United States Patent Application Publication US 2022/0090207 A1 - sequence listing, part 11

SEQ ID NO: 140062 - DNA, 326 bp, Homo sapiens
  chr1:242767711-242768037
  hypo
cattggagaagtcgccggtgtgatgagaatgcccaatgtgccccaagcagccgtctgtggcagaagccagccctcacaaatcaaaacaccactctgtcgtgcacggtgacgtggaaagtttttgaagagggaatctctgccctacgcagttagcggctggggcttgaccacaatgcataatgagcgggcagcggctgagctgcagatgatgcctgctgctctggagtccacgctactgtccctcttttcccgggtaaagctggaagctgaactgggaaccccggggcaatcatcaagatgcagaatgtgaacgataatgctgcaac

SEQ ID NO: 140063 - DNA, 100 bp, Homo sapiens
  chr1:243417562-243417662
  hypo
agtatacaaatcccacgtcttcccgccctgtgttaggcagctgcaaatgttattttttcatcgcttgcataaaatggaagcgaaacgtaccaaaacccta

SEQ ID NO: 140064 - DNA, 31 bp, Homo sapiens; identical to SEQ ID NO: 1253
  chr1:243418478-243418509
  hypo

SEQ ID NO: 140065 - DNA, 30 bp, Homo sapiens
  chr1:243430608-243430638
  hypo
gtcccggtcactgggcgtggtggcttacgc

SEQ ID NO: 140066 - DNA, 78 bp, Homo sapiens; identical to SEQ ID NO: 62207
  chr1:243432190-243432268
  hypo

SEQ ID NO: 140067 - DNA, 162 bp, Homo sapiens; identical to SEQ ID NO: 62208
  chr1:243479807-243479969
  hypo

SEQ ID NO: 140068 - DNA, 30 bp, Homo sapiens; identical to SEQ ID NO: 62209
  chr1:243491038-243491068
  hypo

SEQ ID NO: 140069 - DNA, 132 bp, Homo sapiens; identical to SEQ ID NO: 15644
  chr1:243566400-243566532
  hypo

SEQ ID NO: 140070 - DNA, 686 bp, Homo sapiens
  chr1:243637529-243638215
  hypo
ggaaagaacttgggacgtgagcatggagttaatgaagctttcacccatctcctcctctcaaccgtcatcccggtttaatcctctccttctgccaaagtccagaggccctgcgagcccccgtggagtcgcctgagccagatgctccgcacccagcctccccaagccccggccggctgccctccaggtgcgggctccaggccctctcgcgcggcttcgggactcggccgagcccgggcctagtatccagagtcgaagcagccgccgggaggtctgggtgggcagggaggccgagaggacggtgcaccgcccggcagcgctgagacctggccgcctaggccaccctgcccggcgagggagaggggtgtctcctgcctggagcgctccgcggtggcccgagagcaggtgctggcgtgcgggaggcgcacgtggagccctgcggtctgttccacctgcagaggcacaattgcccagcgtggggtggaaggcaggctgggagctcccgggacgcggcgtggcagcgcagggctcggctagatgcgctcctcctcggactggttgagtaagggaggaggctcgtcctgaacgtgcacagccgctcctaactccgtcaacggaatttcactcaactccgagactgaagcattttattggcagcatttagaatcggggaaaaatctaccttctgt

SEQ ID NO: 140071 - DNA, 30 bp, Homo sapiens; identical to SEQ ID NO: 62212
  chr1:243650526-243650556
  hypo

SEQ ID NO: 140072 - DNA, 336 bp, Homo sapiens; identical to SEQ ID NO: 62213
  chr1:243652441-243652777
  hypo

SEQ ID NO: 140073 - DNA, 40 bp, Homo sapiens; identical to SEQ ID NO: 15646
  chr1:243750609-243750649
  hypo

SEQ ID NO: 140074 - DNA, 857 bp, Homo sapiens; identical to SEQ ID NO: 37031
  chr1:244012278-244013135
  hypo

SEQ ID NO: 140075 - DNA, 542 bp, Homo sapiens; identical to SEQ ID NO: 37034
  chr1:244080519-244081061
  hypo

SEQ ID NO: 140076 - DNA, 88 bp, Homo sapiens; identical to SEQ ID NO: 105327
  chr1:244081077-244081165
  hypo

SEQ ID NO: 140077 - DNA, 465 bp, Homo sapiens
  chr1:244142603-244143068
  hypo
acctcctgtagcagtcgctcatcccaagcagcttctgctgtacagtgcgggtaagtgttcaggagtgaactgccccgctttgttacatttcatggaaggactgtggcctccatgccagagctcttcgaacaaaaacactttcaatcccctcattctcattttgtggggattcccagctgaacgggcctggctttttgggagaagtttccagcccgtagctgccttggccaggagtgtggggggtgggacggaaggtacccacgagggtggcgggtggggccatcggccaggagtgtgggggggtgggacggaaggtacccaggagggtggcgggaggggccatcggccaggagtgggggggtggtgggacggaaggtacccacgagggtggcgtgtggggccatcggccaggagtgggggggatgggacggaaggtacccacgagggtggcgggtggggcagatg

SEQ ID NO: 140078 - DNA, 135 bp, Homo sapiens
  chr1:244200735-244200870
  hypo
acactgttcataagtcggctggctgtggagggtagagggtggctgcgtccccaaacagcagggcccagcaagagggaaaagccacacaccttctctgaggggccccccaaaaaatgatcgcggtagcagtagctt

SEQ ID NO: 140079 - DNA, 30 bp, Homo sapiens
  chr1:244230440-244230470
  hypo
attagcaagacgctccggatggtttgcatc

SEQ ID NO: 140080 - DNA, 30 bp, Homo sapiens
  chr1:244230683-244230713
  hypo
gcgccctgcagccggcggcctgtcctttca

SEQ ID NO: 140081 - DNA, 254 bp, Homo sapiens
  chr1:244243851-244244105
  hypo
cagtaactgcttgtccggcaggagtaagtgcttcagaaatactgagctcagtgaacctgctaaacacaggcaccccggtgagactctgccggatgatgacaaatcgtgttcacattaaccttgtgccctgaaggttgcctttggtgggaagaggcagagaagacgtgagtttcttgccaattccacctggtggagagcctgccaggcctcctgacttgtggtcctgtctctgaccggcacggtggctgcttttc

SEQ ID NO: 140082 - DNA, 217 bp, Homo sapiens; identical to SEQ ID NO: 15648
  chr1:244345253-244345470
  hypo

SEQ ID NO: 140083 - DNA, 30 bp, Homo sapiens
  chr1:244361502-244361532
  hypo
agtgcttgagaagcacggtcccagtccatc

SEQ ID NO: 140084 - DNA, 30 bp, Homo sapiens
  chr1:244374382-244374412
  hypo
ggcgctgcggctcccggcccagcccaccgt

SEQ ID NO: 140085 - DNA, 31 bp, Homo sapiens; identical to SEQ ID NO: 15649
  chr1:244455411-244455442
  hypo

SEQ ID NO: 140086 - DNA, 219 bp, Homo sapiens
  chr1:244499986-244500205
  hypo
ctggtgaccagctgggagtgccgggctccaaggctgagaggtgttgctcaatcagctgaagtgtcctagtccatgaaaagggtacgatttctctttgccgaagagacaatgcgggaaccttaggagaaaacagcaggaaaagacattgctgcccaggtggacacacatctcctccaggtgcgctttccttggcttttgaggcctcgtatatttggacgt

SEQ ID NO: 140087 - DNA, 31 bp, Homo sapiens
  chr1:244534631-244534662
  hypo
caagtctgaagagtccgcacgtgctttcaca

SEQ ID NO: 140088 - DNA, 144 bp, Homo sapiens; identical to SEQ ID NO: 15651
  chr1:244641920-244642064
  hypo

SEQ ID NO: 140089 - DNA, 30 bp, Homo sapiens
  chr1:244715951-244715981
  hypo
catgtgatcttatcgcgggatggaatcgtt

SEQ ID NO: 140090 - DNA, 82 bp, Homo sapiens; identical to SEQ ID NO: 62225
  chr1:244758874-244758956
  hypo

SEQ ID NO: 140091 - DNA, 30 bp, Homo sapiens
  chr1:244814804-244814834
  hypo
agagcttcacatgttcgcagttggttggtt

SEQ ID NO: 140092 - DNA, 74 bp, Homo sapiens; identical to SEQ ID NO: 62226
  chr1:244815256-244815330
  hypo

SEQ ID NO: 140093 - DNA, 87 bp, Homo sapiens; identical to SEQ ID NO: 62227
  chr1:244823751-244823838
  hypo

SEQ ID NO: 140094 - DNA, 90 bp, Homo sapiens; identical to SEQ ID NO: 62228
  chr1:244826767-244826857
  hypo

SEQ ID NO: 140095 - DNA, 54 bp, Homo sapiens
  chr1:244857962-244858016
  hypo
gcagtggcacgtgtgcgtcttattgcgacgctttccaaacgatgatgttgcctt

SEQ ID NO: 140096 - DNA, 40 bp, Homo sapiens; identical to SEQ ID NO: 62229
  chr1:244883480-244883520
  hypo

SEQ ID NO: 140097 - DNA, 1007 bp, Homo sapiens; identical to SEQ ID NO: 37037
  chr1:244893208-244894215
  hypo

SEQ ID NO: 140098 - DNA, 96 bp, Homo sapiens; identical to SEQ ID NO: 62231
  chr1:244896510-244896606
  hypo

SEQ ID NO: 140099 - DNA, 141 bp, Homo sapiens
  chr1:244902171-244902312
  hypo
cgggactgtgtctcggaaaagaaaaaaaaaaacaaaacagaatagttcatcaattatgggaaattaagcttcaaaatctaagtgctcttcttagagacaccggctggatttatgtatagcgctgatggaaattctcttgta

SEQ ID NO: 140100 - DNA, 194 bp, Homo sapiens; identical to SEQ ID NO: 62232
  chr1:244920544-244920738
  hypo

SEQ ID NO: 140101 - DNA, 76 bp, Homo sapiens
  chr1:244924622-244924698
  hypo
gtattatgattatttctaagtgtgctgatcccccgtcccgccaccccgcagcggcagaccacgatgtgcaggggag

SEQ ID NO: 140102 - DNA, 31 bp, Homo sapiens; identical to SEQ ID NO: 62233
  chr1:244943827-244943858
  hypo

SEQ ID NO: 140103 - DNA, 20 bp, Homo sapiens
  chr1:244990926-244990946
  hypo
ttttttttttttgagacgga

SEQ ID NO: 140104 - DNA, 30 bp, Homo sapiens
  chr1:245010284-245010314
  hypo
atctctttagtctacgtacctctactccat

SEQ ID NO: 140105 - DNA, 509 bp, Homo sapiens; identical to SEQ ID NO: 62235
  chr1:245032184-245032693
  hypo

SEQ ID NO: 140106 - DNA, 141 bp, Homo sapiens; identical to SEQ ID NO: 15656
  chr1:245135713-245135854
  hypo

SEQ ID NO: 140107 - DNA, 21 bp, Homo sapiens
  chr1:245136153-245136174
  hypo
gagaagcactcatgtgctgta

SEQ ID NO: 140108 - DNA, 30 bp, Homo sapiens
  chr1:245152646-245152676
  hypo
ttgctatggctccttcggctcctcttggct

SEQ ID NO: 140109 - DNA, 30 bp, Homo sapiens
  chr1:245202931-245202961
  hypo
ctctctcccaggatccgtgcagaacgctgt

SEQ ID NO: 140110 - DNA, 143 bp, Homo sapiens; identical to SEQ ID NO: 62238
  chr1:245205093-245205236
  hypo

SEQ ID NO: 140111 - DNA, 93 bp, Homo sapiens; identical to SEQ ID NO: 62239
  chr1:245209850-245209943
  hypo

SEQ ID NO: 140112 - DNA, 30 bp, Homo sapiens
  chr1:245210397-245210427
  hypo
ggatgaaaagggcttcgtcttttccacaca

SEQ ID NO: 140113 - DNA, 306 bp, Homo sapiens; identical to SEQ ID NO: 15658
  chr1:245254414-245254720
  hypo

SEQ ID NO: 140114 - DNA, 157 bp, Homo sapiens; identical to SEQ ID NO: 62241
  chr1:245281662-245281819
  hypo

SEQ ID NO: 140115 - DNA, 30 bp, Homo sapiens
  chr1:245291868-245291898
  hypo
accaccaatgagcggcggggagcgcagatg

SEQ ID NO: 140116 - DNA, 31 bp, Homo sapiens; identical to SEQ ID NO: 62242
  chr1:245328080-245328111
  hypo

SEQ ID NO: 140117 - DNA, 30 bp, Homo sapiens; identical to SEQ ID NO: 62243
  chr1:245328350-245328380
  hypo

SEQ ID NO: 140118 - DNA, 158 bp, Homo sapiens
  chr1:245370677-245370835
  hypo
gaccgcacaatctaaactgaacccgattggctaacttgaaagacaactttggcgggaagagctgccacagcaggaggggtaaattacagagtgagtagcagacgtgggctctgtagataaggacttacaagggacttacagtccggtgaagaactaaa

SEQ ID NO: 140119 - DNA, 30 bp, Homo sapiens
  chr1:245371291-245371321
  hypo
ggtgggctgtgtgcccgagccctaccttgg

SEQ ID NO: 140120 - DNA, 167 bp, Homo sapiens; identical to SEQ ID NO: 62244
  chr1:245377006-245377173
  hypo

SEQ ID NO: 140121 - DNA, 24 bp, Homo sapiens
  chr1:245380957-245380981
  hypo
cactgcgcccggtcgattgtttta

SEQ ID NO: 140122 - DNA, 30 bp, Homo sapiens; identical to SEQ ID NO: 15660
  chr1:245425171-245425201
  hypo

SEQ ID NO: 140123 - DNA, 96 bp, Homo sapiens
  chr1:245446510-245446606
  hypo
tccgcacaagtccaccgacagcaagcccaatctgcccaagcccacccaccgcgagcccaatctgcctaagcccacccaccgcgagcccaatccgcg

SEQ ID NO: 140124 - DNA, 140 bp, Homo sapiens; identical to SEQ ID NO: 62246
  chr1:245481133-245481273
  hypo

SEQ ID NO: 140125 - DNA, 83 bp, Homo sapiens
  chr1:245488057-245488140
  hypo
gcaagcttgttaacacggcaggacaacccaagatgccatgttcctaaagaaaatgggggccgggcacggtggctcatgcctgt

SEQ ID NO: 140126 - DNA, 21 bp, Homo sapiens
  chr1:245488727-245488748
  hypo
catttcagctgggcgcggtgg

SEQ ID NO: 140127 - DNA, 31 bp, Homo sapiens; identical to SEQ ID NO: 62247
  chr1:245492187-245492218
  hypo

SEQ ID NO: 140128 - DNA, 300 bp, Homo sapiens
  chr1:245494225-245494525
  hypo
ggtgcgggaagtccccgcagagagagagcccacgtagtaagtaaggaacgggggcggttagagattctggagaggccggatggaaaatgcacacacggtgagcagaaaccatgatcctgagacgctgatgtccaggagggagcctcagagcaggaacgcagccgcggcagggggcggtgggagtctgcggtatgacgtagggtacgaagggcctgggggtggcagagcagagcctgctgcggaggcacaggcttctcattccgcgcgagtgaccgagacatggatcgcgctcttgccgga

SEQ ID NO: 140129 - DNA, 53 bp, Homo sapiens
  chr1:245496613-245496666
  hypo
gacatgatgttaagtcgaatcagccacagtcacaaaagcgcaaatactgtgtg

SEQ ID NO: 140130 - DNA, 100 bp, Homo sapiens; identical to SEQ ID NO: 15661
  chr1:245497278-245497378
  hypo

SEQ ID NO: 140131 - DNA, 1050 bp, Homo sapiens
  chr1:245498868-245499918
  hypo
gaaaggagagtcccacgcgggaaaaggagagtgccacgcggggaaaggagagtcccacgaggggaaaggagagtcccacgaggggaaaggggggtcccacgcggggaaagaagggtcccacgcggggaaagaagggtcccacgtggggaaagaagagtcccacgaggggaaaggagggtcccacgcagggagagtcccacgcagggaaaggagagtcccacgcagggaaaggaaggtcccacgcagggaaagaagagccccacgcggagaaggaggagtcccacgaagggaaaggagggtcccacgaagggaaaggagggtcccacgcagggaaagaagagtcccacgcggggagagccccatgcagggaaagagggtcccacgcagggaaaggagagtcccacgcagggaaaggagggtcccacgcagggaaaggagagtcccacgcagggagagtcccacgcagggaaaggagggtcccacgcagggaaaggagagtcccacgcagggaaaggagggtcccacgcagggaaaggagggtcccacgcagggaaagaagagtcccacgcagggagagtcccatgcagggaaagaaggtcccacgcagggaaaggagagtcccacgcagggattgctgttccactctgcatagccgctgggctttctgctgcacggatgccatctagaagaagcaccatccactgttctcagaaagaagagagaggaaggagacaggagtgcgtagagtgagtgggccatcagaaaaaggactgctctggggatgcaggagacccgcttgtaggatttaggggcaccgtgcaagacaggggtcatggtatgcgggtgcctccgactggcggctgcgtggtggatctggccacttggtgaaggtcgcagtgaccttgatctgctctggggagggatgctgttttgcctttcttcacgcacgtggaatcaggactagctggactggcaggaaaaggttctctctggaataatggtttgcttctctgcaggctcgtgcggcggctcgtgcggagccctgtgagc

SEQ ID NO: 140132 - DNA, 147 bp, Homo sapiens; identical to SEQ ID NO: 62250
  chr1:245508140-245508287
  hypo

SEQ ID NO: 140133 - DNA, 116 bp, Homo sapiens
  chr1:245512065-245512181
  hypo
ccactccagccacgccggcctcttgctgttcccagttacgccaactcgcccccacccagtccttcatgtctgcctgctcccctgcctgggtcgcttccccacgatgcctgctgtgg

SEQ ID NO: 140134 - DNA, 30 bp, Homo sapiens
  chr1:245516019-245516049
  hypo
gaggtgagttttcttcgcatttttgggaat

SEQ ID NO: 140135 - DNA, 30 bp, Homo sapiens
  chr1:245517497-245517527
  hypo
ttctttagaattgtacgaaattataccttc

SEQ ID NO: 140136 - DNA, 30 bp, Homo sapiens
  chr1:245517800-245517830
  hypo
tgacactgtcagcggcgcctctgtcacaag

SEQ ID NO: 140137 - DNA, 165 bp, Homo sapiens
  chr1:245525397-245525562
  hypo
gcgaagagagtctcgcggtgagaaatactctgggtgagaatgaccctctgtgtctccttggtccttcacaccccatcaagcacaggcggatcaggagatgtaaaggtcagggagctggtaagcatcgacgaacaaaatcttcctgaggaagggccgggtgcggtg

SEQ ID NO: 140138 - DNA, 400 bp, Homo sapiens
  chr1:245530127-245530527
  hypo
ttctgtaggaccctgctttctcggctgtgattcacgacaaactccaggtccccaacaccatccggaaggcatggaacgaccgggacaaccgctgtgacatttgcgccactcacctgaaccagttgaagcaggaggccatccagatggtgctgacgttggagcaggcagccggcagtgagcactacgacgcctcgccctgctccccgccaccgctctccaacatccccaccctggtggggtcccggcacgtgggtgggctccagcagcccagagactgggcctttgtgcccgccccctgtgccacctccaactacacaggcttcgccaacaagcacggcagcaaacccagcagccttggggtcagcaatggggcggaaaagaagagcgggtccccaaccca

SEQ ID NO: 140139 - DNA, 30 bp, Homo sapiens
  chr1:245534859-245534889
  hypo
ctgcaatttagacgtcgcaaggatgaaaac

SEQ ID NO: 140140 - DNA, 98 bp, Homo sapiens; identical to SEQ ID NO: 62253
  chr1:245537643-245537741
  hypo

SEQ ID NO: 140141 - DNA, 30 bp, Homo sapiens; identical to SEQ ID NO: 62254
  chr1:245538221-245538251
  hypo

SEQ ID NO: 140142 - DNA, 176 bp, Homo sapiens
  chr1:245548881-245549057
  hypo
ggagcaaacctggggcggcgtggagctgtcatgagaatggtattttcgggagctggggaagaggcagagaaggaagggaaaacatttaaagagggcaaaacatggacttcatccgttagctctacagacacggcccttggtagttaggcgacgtgaagccacgtgtactcaggcag

SEQ ID NO: 140143 - DNA, 106 bp, Homo sapiens
  chr1:245576120-245576226
  hypo
cagactttcactgctcgttaatggtgcacggaattctcatggacgttgagaatgtcacatgtacacgcacatgcacacgtgtcgacacctgcgcagacacacatgt

SEQ ID NO: 140144 - DNA, 193 bp, Homo sapiens; identical to SEQ ID NO: 15665
  chr1:245576465-245576658
  hypo

SEQ ID NO: 140145 - DNA, 30 bp, Homo sapiens
  chr1:245578840-245578870
  hypo
ggtctaacagggaggcgccttctcgctcag

SEQ ID NO: 140146 - DNA, 30 bp, Homo sapiens
  chr1:245581340-245581370
  hypo
gggaggcatgatgcgcgccctggagcttca

SEQ ID NO: 140147 - DNA, 283 bp, Homo sapiens; identical to SEQ ID NO: 15666
  chr1:245582886-245583169
  hypo

SEQ ID NO: 140148 - DNA, 30 bp, Homo sapiens
  chr1:245590135-245590165
  hypo
gatgaccattattgccgcactctcgctgag

SEQ ID NO: 140149 - DNA, 93 bp, Homo sapiens
  chr1:245627554-245627647
  hypo
taatagcagtgaggggtgagtcgatgtctcaggagaggatggcccagacctaggtaatgtgtgtcccgtcccccgacccagtgagcacgtgtg

SEQ ID NO: 140150 - DNA, 121 bp, Homo sapiens; identical to SEQ ID NO: 15667
  chr1:245627766-245627887
  hypo

SEQ ID NO: 140151 - DNA, 18 bp, Homo sapiens
  chr1:245628571-245628589
  hypo
gcccggacccattgcctc

SEQ ID NO: 140152 - DNA, 130 bp, Homo sapiens
  chr1:245628941-245629071
  hypo
ggtcctggcagaaagcggatggcgcgctgcgtctaacggagagtttttggaaaggactgtttacaaaagctgtcgcaggtgcaggcaagccgtggtgcgcagtgctcctgccagccgctggggaggcctg

SEQ ID NO: 140153 - DNA, 165 bp, Homo sapiens
  chr1:245633286-245633451
  hypo
atcagagttggttggcgggagtctcgggggagaaatggggtttgacgtaggccttgaaagaaccgataggattcagacaaacctgagtaatgggagggtgttccgagccacacacactgattgttcagtttggtttgctcagctagaggacgtgttgggaagatg

SEQ ID NO: 140154 - DNA, 36 bp, Homo sapiens; identical to SEQ ID NO: 62260
  chr1:245704934-245704970
  hypo

SEQ ID NO: 140155 - DNA, 38 bp, Homo sapiens
  chr1:245722716-245722754
  hypo
tttttgggtttttgtcgagacggagtcttgctctgtcg

SEQ ID NO: 140156 - DNA, 113 bp, Homo sapiens
  chr1:245752682-245752795
  hypo
tgcggtctgtatttacgtgcctgccatctgtccccaggcggcactgagaagggggctgatgctgtcacccctagctccttctgcaggtctcctccgtacgtgccactgccagg

SEQ ID NO: 140157 - DNA, 314 bp, Homo sapiens
  chr1:245753333-245753647
  hypo
ctatttaacgacagtcgtaacacatgagtgagctttactcatgtgggccctttattaacaataagccgcctctgtggcggctgggccccgcggggtcggggggtgggggtgcccaacgtggcagggaggcctgcaaggggaggccgaggcgccggtggaagcacaaaccacccggcgagtcagagcaggggtcggggcccctggccgcaccgtgccgcgcatgcgcagggtcccggggtccctggggtcccgggtttgtgcccccggggcggctgggccccgcgggaggggacggccaacgcggaaatgggccc

SEQ ID NO: 140158 - DNA, 30 bp, Homo sapiens; identical to SEQ ID NO: 15669
  chr1:245755253-245755283
  hypo

SEQ ID NO: 140159 - DNA, 152 bp, Homo sapiens; identical to SEQ ID NO: 15670
  chr1:245764441-245764593
  hypo

SEQ ID NO: 140160 - DNA, 212 bp, Homo sapiens
  chr1:245765878-245766090
  hypo
gtgaaagtcatgcttcgcatctgttccaccttggctcgagatacttcagaatccagctctttcttaaaggtggacccacggaagaagcagatcaccttgtacgatcccctgacttgtggaggtcaaaatgccttccaaaagagaggcaaccaggttcctccaaagatgtttgccttcgatgcagtttttccacaagacgcttctcaggtggg

SEQ ID NO: 140161 - DNA, 310 bp, Homo sapiens; identical to SEQ ID NO: 62263
  chr1:245772565-245772875
  hypo

SEQ ID NO: 140162 - DNA, 30 bp, Homo sapiens; identical to SEQ ID NO: 15672
  chr1:245836498-245836528
  hypo

SEQ ID NO: 140163 - DNA, 30 bp, Homo sapiens
  chr1:245847615-245847645
  hypo
cgcggtcgggagctacgcggagaccctgtc

SEQ ID NO: 140164 - DNA, 607 bp, Homo sapiens; identical to SEQ ID NO: 15673
  chr1:245848540-245849147
  hypo

SEQ ID NO: 140165 - DNA, 970 bp, Homo sapiens
  chr1:245849347-245850317
  hypo
acccaggagcgtcccgggcagcagtagccagcacagcgcctccccactcgtgcagagccccagcctccagagcagccgggagagcctcaactcctgcggcttcgtggaaggcaagcccaggcccatgggctccccccggctgggcatcgccagcctgtccaagacctcggagtacaagccacccagctctccttcccagagatgcaaagtctacacccagaagggggtcctgccgtctcccgccccactgcctccctcgagcaaggattccggcgtggcgtctagggagtccttgctgcagcccgaggtgcgtacgcccccggttggaatgagcccccaggttttgaaaaaatccatgtctgctgggagcgaagggttcccggaaactcctgtcgatgatgagcagcaggcagctactccttcagagtccaagaaggagatcctgagcaccacgatggtgacggtgcagcagccactggagctgaacggtgaggacgagctggtgttcacgctggtggaggagctgaccatcagcggggtcctggacagcggccgccccaccagcatcatcagcttcaacagcgactgctctgcacgggccctggcctcgggctcgcggcccgtcagcatcatcagcagcatcagcgaggacctggagtgctactccagcacggcccccgtctccgaggtcagcatcacacagttcttgcccctcccgaagatgagcctggatgagaaggcccaggacgcagggagcagacgctcttccatcagctcctggctgagcgagatgagcgcgggcagtgagggtgagcagtcgtgccacagtttcatagcccagacgtgttttgggcacggggaggcaatggcagaacctgtggcctcggagtttgtcagcagcctccagaacaccgctgtggtgtgcagagagaagcccaaggccagccccgacaacttgctcatcctgtct

SEQ ID NO: 140166 - DNA, 30 bp, Homo sapiens; identical to SEQ ID NO: 62268
  chr1:245852142-245852172
  hypo

SEQ ID NO: 140167 - DNA, 244 bp, Homo sapiens; identical to SEQ ID NO: 62269
  chr1:245855704-245855948
  hypo

SEQ ID NO: 140168 - DNA, 159 bp, Homo sapiens
  chr1:245859142-245859301
  hypo
cacggtgccctggcacgggtattggcaggactctccaggcgtttttaccttctctactcccagctcacacggtgccctggcacgggtattggcaggactctccaggtgtttttctctactcccatctcacacggtgccctggcacgggtattggcagga

SEQ ID NO: 140169 - DNA, 194 bp, Homo sapiens; identical to SEQ ID NO: 62270
  chr1:245866075-245866269
  hypo

SEQ ID NO: 140170 - DNA, 149 bp, Homo sapiens; identical to SEQ ID NO: 62271
  chr1:245911711-245911860
  hypo

SEQ ID NO: 140171 - DNA, 30 bp, Homo sapiens; identical to SEQ ID NO: 15675
  chr1:245915279-245915309
  hypo

SEQ ID NO: 140172 - DNA, 567 bp, Homo sapiens; identical to SEQ ID NO: 62273
  chr1:245925688-245926255
  hypo

SEQ ID NO: 140173 - DNA, 28 bp, Homo sapiens
  chr1:245978119-245978147
  hypo
acacgcacgcacacacgcacacacatgc

SEQ ID NO: 140174 - DNA, 297 bp, Homo sapiens; identical to SEQ ID NO: 62274
  chr1:245986516-245986813
  hypo

SEQ ID NO: 140175 - DNA, 30 bp, Homo sapiens
  chr1:246016722-246016752
  hypo
cggcatcgaacgcgcgctcaggtcctccca

SEQ ID NO: 140176 - DNA, 184 bp, Homo sapiens; identical to SEQ ID NO: 62275
  chr1:246019928-246020112
  hypo

SEQ ID NO: 140177 - DNA, 30 bp, Homo sapiens
  chr1:246020768-246020798
  hypo
ccacctgctcctcttcgcttacagccattc

SEQ ID NO: 140178 - DNA, 123 bp, Homo sapiens; identical to SEQ ID NO: 62276
  chr1:246026858-246026981
  hypo

SEQ ID NO: 140179 - DNA, 79 bp, Homo sapiens; identical to SEQ ID NO: 62277
  chr1:246032886-246032965
  hypo

SEQ ID NO: 140180 - DNA, 93 bp, Homo sapiens; identical to SEQ ID NO: 62278
  chr1:246033505-246033598
  hypo

SEQ ID NO: 140181 - DNA, 136 bp, Homo sapiens; identical to SEQ ID NO: 62279
  chr1:246094265-246094401
  hypo

SEQ ID NO: 140182 - DNA, 134 bp, Homo sapiens; identical to SEQ ID NO: 62280
  chr1:246160269-246160403
  hypo

SEQ ID NO: 140183 - DNA, 33 bp, Homo sapiens
  chr1:246171645-246171678
  hypo
acacatcctgtaatgcgacgtaaataagaaata

SEQ ID NO: 140184 - DNA, 81 bp, Homo sapiens
  chr1:246171883-246171964
  hypo
ctctggcagcaacagcgcttggggagtagccgtacctctgaagttttcctttcctttctcgagcaacgcagggagggagct

SEQ ID NO: 140185 - DNA, 190 bp, Homo sapiens; identical to SEQ ID NO: 62283
  chr1:246172193-246172383
  hypo

SEQ ID NO: 140186 - DNA, 231 bp, Homo sapiens
  chr1:246310269-246310500
  hypo
cgttttcttgttaatcggcaggcaggcgtgacagtgttcggcagaggacaatctgttcgagaataattagattccccctcgcttcttgcgttggtggcggaagcacccggagtatttacaatacaccattttgcttccatccgagtccatatgttcgctggtcaggttaaaactgaggctgcatggcacatttttcactgtaaacaacgctgccccggcaaaccctagggg

SEQ ID NO: 140187 - DNA, 782 bp, Homo sapiens
  chr1:246310726-246311508
  hypo
gaatcaggacgtgctcggtggttgtaattccatctattgatggcagctgctgctgcaacagggaggccggctagggctgcacactccatggaggcggtgggagcctcacccattctgggttggggcaggggctccgtgggtgccactgcagccacccaaatcgtggctgcagaccaggcttcctgctctatggagcaggcaggcgccccgccttcctgggtggggctacagctgcccaaactgatgctggagatcggagcttccctgtgctcttggtgggggccgggagcagacaggatctgccctccagggtagagctgcagcctccctgctgcggctgcagacctgggcttcgcgctcaatcgagcaggcaggagccagggacaagagggagccccacctttactgagttggtggagcgtgaactccgcaggtgcagacctggcatctctgcagcctgcaccctggagggcccgggaagacccgccccccacttcatccctgcaggctcgggggtgtctgctcccgcttcccagcccctctcctctccagatgcctgctctgatctccgaccggggttggggccgagcccggggcagcaggaggcagagagattcctgggtggaaggcggcagtccccgtaaggcccctccttcagaccagggagggcctgaaggctgggggccaggatgccagtccgggaccggagtggggacttgtggtgcctcgtctgggtgcacatggaggaccatgggccaatcggcaggaacttcctcccctct

SEQ ID NO: 140188 - DNA, 264 bp, Homo sapiens; identical to SEQ ID NO: 62287
  chr1:246320237-246320501
  hypo

SEQ ID NO: 140189 - DNA, 222 bp, Homo sapiens
  chr1:246324304-246324526
  hypo
gggactgtgagacaacgccatcagacaagcgagacgatgccatcagacaagacaggtgttccagcgattgctctaggtaagcctcattctctttgttcactggcagcaccaccccgctccaccctgcgcctcatttgcagagtcctctacaaatgaacatgcagcctgcctggcacacctggcacagctcacctgcatgccgccaagcatgacagactgtct

SEQ ID NO: 140190 - DNA, 124 bp, Homo sapiens
  chr1:246324795-246324919
  hypo
ctccacctttgatttcgatggtctccttcatgttccccagcccccgtctatgcctccaccttggtatatcatgctctattgtaattattaatttacttttctttctccgcgaatagatgtaccc

SEQ ID NO: 140191 - DNA, 30 bp, Homo sapiens
  chr1:246325341-246325371
  hypo
gtcaaagcgtgtggacgtgtacctggccgg

SEQ ID NO: 140192 - DNA, 224 bp, Homo sapiens; identical to SEQ ID NO: 15680
  chr1:246330192-246330416
  hypo

SEQ ID NO: 140193 - DNA, 30 bp, Homo sapiens
  chr1:246374139-246374169
  hypo
ttgatcagagaaagtcgagaggaaggagga

SEQ ID NO: 140194 - DNA, 25 bp, Homo sapiens
  chr1:246489785-246489810
  hypo
cttcaggaggccgggcgtggcagtt

SEQ ID NO: 140195 - DNA, 24 bp, Homo sapiens
  chr1:246490049-246490073
  hypo
aacgagactctgtctaaaaacaaa

SEQ ID NO: 140196 - DNA, 96 bp, Homo sapiens; identical to SEQ ID NO: 62293
  chr1:246518820-246518916
  hypo

SEQ ID NO: 140197 - DNA, 157 bp, Homo sapiens
  chr1:246569251-246569408
  hypo
gactctagaattagacggtttgagcctgaatcgctgcaacagtctgttaattattcaaactctctcattctcctgtaggttaaatcgctgcaacagtctgttaattattcaaactctctcattctcctgtaggttaaaatgggatttttttttttta

SEQ ID NO: 140198 - DNA, 30 bp, Homo sapiens
  chr1:246569876-246569906
  hypo
gtgtccatagtgctacgtgttaggcactat

SEQ ID NO: 140199 - DNA, 75 bp, Homo sapiens; identical to SEQ ID NO: 62294
  chr1:246582056-246582131
  hypo

SEQ ID NO: 140200 - DNA, 27 bp, Homo sapiens
  chr1:246611371-246611398
  hypo
agccaggcgtggtggcgcatgcctgta

SEQ ID NO: 140201 - DNA, 87 bp, Homo sapiens
  chr1:246611517-246611604
  hypo
caaaaaaaaataataacataatctcttacatgatcacaatacatgatgctgaagccactattctggagaccacgctttgagaaccaa

SEQ ID NO: 140202 - DNA, 31 bp, Homo sapiens; identical to SEQ ID NO: 62295
  chr1:246625741-246625772
  hypo

SEQ ID NO: 140203 - DNA, 206 bp, Homo sapiens
  chr1:246652176-246652382
  hypo
ttttatgagtaccagcgtcacccagggagcttggcaagaatgtagattctgtgccttaaaacactagatattctccggagaggcactgagagccagatttttaacaagtcctctctctctctctccacctcccactccccagtcattctgagggaggtgaatggtaggtcacttctgaagaagcaatgcaggccgggcgcggtggt

SEQ ID NO: 140204 - DNA, 130 bp, Homo sapiens; identical to SEQ ID NO: 62296
  chr1:246655155-246655285
  hypo

SEQ ID NO: 140205 - DNA, 30 bp, Homo sapiens; identical to SEQ ID NO: 62297
  chr1:246655683-246655713
  hypo

SEQ ID NO: 140206 - DNA, 19 bp, Homo sapiens
  chr1:246666979-246666998
  hypo
tcaggccggggacagcggc

SEQ ID NO: 140207 - DNA, 30 bp, Homo sapiens
  chr1:246698007-246698037
  hypo
gaatgggccacctctcgaaggtacactttc

SEQ ID NO: 140208 - DNA, 23 bp, Homo sapiens
  chr1:246711494-246711517
  hypo
tttctaatcgattaatacgtcat

SEQ ID NO: 140209 - DNA, 30 bp, Homo sapiens; identical to SEQ ID NO: 62300
  chr1:246768682-246768712
  hypo

SEQ ID NO: 140210 - DNA, 30 bp, Homo sapiens
  chr1:246783151-246783181
  hypo
atggtgcatacacacgatgggctctgggca

SEQ ID NO: 140211 - DNA, 86 bp, Homo sapiens; identical to SEQ ID NO: 15684
  chr1:246783953-246784039
  hypo

SEQ ID NO: 140212 - DNA, 30 bp, Homo sapiens
  chr1:246815261-246815291
  hypo
gtgactgaaaatacacgtaaggatttttat

SEQ ID NO: 140213 - DNA, 30 bp, Homo sapiens
  chr1:246815627-246815657
  hypo
tgacccacgggggtgcgcactcagcttgta

SEQ ID NO: 140214 - DNA, 31 bp, Homo sapiens; identical to SEQ ID NO: 15685
  chr1:246864972-246865003
  hypo

SEQ ID NO: 140215 - DNA, 19 bp, Homo sapiens
  chr1:246869238-246869257
  hypo
gtatagtgagccaggcgcg

SEQ ID NO: 140216 - DNA, 30 bp, Homo sapiens; identical to SEQ ID NO: 15686
  chr1:246886499-246886529
  hypo

SEQ ID NO: 140217 - DNA, 911 bp, Homo sapiens; identical to SEQ ID NO: 105351
  chr1:246887310-246888221
  hypo

SEQ ID NO: 140218 - DNA, 150 bp, Homo sapiens
  chr1:246899320-246899470
  hypo
tggagccagttgtatcgacatcagtggagaacctcaggtataaaaaataaaaaggaaaaacgtagaattaacacataaatttcggtttaatgaagtggaaatatttagtgtaattttgcagacatatttagaagccgacaactcctttct

SEQ ID NO: 140219 - DNA, 31 bp, Homo sapiens; identical to SEQ ID NO: 15688
  chr1:246913294-246913325
  hypo

SEQ ID NO: 140220 - DNA, 327 bp, Homo sapiens
  chr1:246918895-246919222
  hypo
ttgtgccactgtttccgtgggcacacgttacctttctccaccttactctggttttgtttggtttgctgccaggagtcagtattattctttgtacacataagcgcatttcctgcccaaatcaaatctcattttatgtcagccataaataccttcagttttaagaagagctgtgtcctccctttggttctggagatcctgctgacggcaaaaacggccttggaccacagctttccaggcatacttgtcatttagaattcctcctcccagcaggcctccgggcttcaagttggcaggaacagcaagggggcttttcggtagatgctgctg

SEQ ID NO: 140221 - DNA, 334 bp, Homo sapiens; identical to SEQ ID NO: 62307
  chr1:246930841-246931175
  hypo

SEQ ID NO: 140222 - DNA, 122 bp, Homo sapiens; identical to SEQ ID NO: 62308
  chr1:246931770-246931892
  hypo

SEQ ID NO: 140223 - DNA, 92 bp, Homo sapiens; identical to SEQ ID NO: 62309
  chr1:246944243-246944335
  hypo

SEQ ID NO: 140224 - DNA, 53 bp, Homo sapiens; identical to SEQ ID NO: 62310
  chr1:246954178-246954231
  hypo

SEQ ID NO: 140225 - DNA, 31 bp, Homo sapiens; identical to SEQ ID NO: 62311
  chr1:246954579-246954610
  hypo

SEQ ID NO: 140226 - DNA, 30 bp, Homo sapiens
  chr1:246958941-246958971
  hypo
tgcagcacacttatgcgtgaagacgagatc

SEQ ID NO: 140227 - DNA, 161 bp, Homo sapiens; identical to SEQ ID NO: 62312
  chr1:246969292-246969453
  hypo

SEQ ID NO: 140228 - DNA, 30 bp, Homo sapiens
  chr1:246970468-246970498
  hypo
tttcatacctgaggtcgtttttataacaca

SEQ ID NO: 140229 - DNA, 100 bp, Homo sapiens; identical to SEQ ID NO: 15690
  chr1:247017213-247017313
  hypo

SEQ ID NO: 140230 - DNA, 94 bp, Homo sapiens; identical to SEQ ID NO: 15691
  chr1:247027353-247027447
  hypo

SEQ ID NO: 140231 - DNA, 30 bp, Homo sapiens; identical to SEQ ID NO: 15692
  chr1:247048743-247048773
  hypo

SEQ ID NO: 140232 - DNA, 30 bp, Homo sapiens; identical to SEQ ID NO: 15693
  chr1:247090976-247091006
  hypo

SEQ ID NO: 140233 - DNA, 16 bp, Homo sapiens
  chr1:247103101-247103117
  hypo
gcgactctgtctcaaa

SEQ ID NO: 140234 - DNA, 156 bp, Homo sapiens
  chr1:247109074-247109230
  hypo
agcgacggaacctccgcagggtcttcaaagcagctcgatggtcgacgactggaccctgaaaaaaagaaagaaagaaaagcagcttaaggttccgagtagctccttgggatatgatttatgctgaggtgttaaaccggttctgattgaagacttggt

SEQ ID NO: 140235 - DNA, 28 bp, Homo sapiens
  chr1:247111339-247111367
  hypo
tacctgtgaggcgatgagtgacgtcgtt

SEQ ID NO: 140236 - DNA, 21 bp, Homo sapiens
  chr1:247116659-247116680
  hypo
cagcactttaggaggccgagg

SEQ ID NO: 140237 - DNA, 31 bp, Homo sapiens; identical to SEQ ID NO: 62320
  chr1:247129039-247129070
  hypo

SEQ ID NO: 140238 - DNA, 18 bp, Homo sapiens
  chr1:247136657-247136675
  hypo
acatatttctaatgattg

SEQ ID NO: 140239 - DNA, 181 bp, Homo sapiens
  chr1:247146066-247146247
  hypo
gatctctatctatttatatccttttaaacatctctcaaataagtttgaaaattttctccgtacaactcttacatattttatgtcagctatagacttaagtattccatatatttgatgcaattatcaatggtgtcttttattttaaaaacaattttctggccgggcacggtggctcacgcct

SEQ ID NO: 140240 - DNA, 39 bp, Homo sapiens; identical to SEQ ID NO: 62322
  chr1:247156410-247156449
  hypo

SEQ ID NO: 140241 - DNA, 31 bp, Homo sapiens; identical to SEQ ID NO: 15694
  chr1:247163508-247163539
  hypo

SEQ ID NO: 140242 - DNA, 375 bp, Homo sapiens; identical to SEQ ID NO: 37047
  chr1:247170805-247171180
  hypo

SEQ ID NO: 140243 - DNA, 182 bp, Homo sapiens
  chr1:247253909-247254091
  hypo
attccccgggactcacgtggtccttcctcacacgcggctctggtaggatgcattgctctgtacccagggacctctgaggtgacaatggccacggtcatgcagagtgcaagggcacaggctgggtgcctattgtggggaccgtgactgcagcactcccagactatcctcgggcatgttgcccc

SEQ ID NO: 140244 - DNA, 31 bp, Homo sapiens; identical to SEQ ID NO: 15696
  chr1:247275934-247275965
  hypo

SEQ ID NO: 140245 - DNA, 31 bp, Homo sapiens; identical to SEQ ID NO: 1263
  chr1:247278690-247278721
  hypo

SEQ ID NO: 140246 - DNA, 225 bp, Homo sapiens
  chr1:247348620-247348845
  hypo
gaaggtctgaggggcacgggatacaagggtacactgtggtcctgcaggaattcacccaccaattcatcttcagaagctactcccaaaggcttggagactgcctcagaggctggggctcggaggcggggcaggggtcaggcgtcaggccttagtgccttctgctggggtcggcgggtgttttctctttttactgtatttaactacattaatcgtgctcagtatttc

SEQ ID NO: 140247 - DNA, 88 bp, Homo sapiens; identical to SEQ ID NO: 62328
  chr1:247399633-247399721
  hypo

SEQ ID NO: 140248 - DNA, 28 bp, Homo sapiens
  chr1:247399960-247399988
  hypo
aggctccgtctcaaaaaaataaaaagaa

SEQ ID NO: 140249 - DNA, 30 bp, Homo sapiens; identical to SEQ ID NO: 62330
  chr1:247418059-247418089
  hypo

SEQ ID NO: 140250 - DNA, 30 bp, Homo sapiens; identical to SEQ ID NO: 62331
  chr1:247464057-247464087
  hypo

SEQ ID NO: 140251 - DNA, 30 bp, Homo sapiens; identical to SEQ ID NO: 62332
  chr1:247464343-247464373
  hypo

SEQ ID NO: 140252 - DNA, 30 bp, Homo sapiens; identical to SEQ ID NO: 62333
  chr1:247464662-247464692
  hypo

SEQ ID NO: 140253 - DNA, 31 bp, Homo sapiens; identical to SEQ ID NO: 15699
  chr1:247482929-247482960
  hypo

SEQ ID NO: 140254 - DNA, 642 bp, Homo sapiens; identical to SEQ ID NO: 105363
  chr1:247495197-247495839
  hypo

SEQ ID NO: 140255 - DNA, 31 bp, Homo sapiens; identical to SEQ ID NO: 15700
  chr1:247501077-247501108
  hypo

SEQ ID NO: 140256 - DNA, 30 bp, Homo sapiens; identical to SEQ ID NO: 62337
  chr1:247512115-247512145
  hypo

SEQ ID NO: 140257 - DNA, 181 bp, Homo sapiens
  chr1:247527169-247527350
  hypo
taccacattttatccaatccactgttgatgggcacctaggttgattccagccaatttatttattccataagtgactcaaaccaataatcatttttttatggaaagttctggaggtagctttccaggtttagaagagcataggtgtttgtggtgtatttaaaatgaatgggccgggtgcggt

SEQ ID NO: 140258 - DNA, 24 bp, Homo sapiens
  chr1:247533668-247533692
  hypo
gagccaccgcgcctggccaatttc

SEQ ID NO: 140259 - DNA, 254 bp, Homo sapiens
  chr1:247542059-247542313
  hypo
ggagagtaaagagcacgctagcatcacgtgcggccaacctggccacgagctgctctccccgccctccccgcacacgtgtcccttcagggagggagaggaaggtcatgacctggctgcgctgctcgccccacacacgtgtcccttcacggagggaggaggaaggtcgtgcgatgcaggtgttgctccttgcgtcattccctgagctccctttgtgtgtcaagcaatctgggcactgggtacgcagagatgaatat

SEQ ID NO: 140260 - DNA, 30 bp, Homo sapiens
  chr1:247582293-247582323
  hypo
ggcgtgggccatggccgtgtggatcttcgc

SEQ ID NO: 140261 - DNA, 834 bp, Homo sapiens; identical to SEQ ID NO: 62338
  chr1:247587054-247587888
  hypo

SEQ ID NO: 140262 - DNA, 194 bp, Homo sapiens
  chr1:247590065-247590259
  hypo
agtatccaaagcacaaggggacgaacctgttcaccagcggggcacgggtgggtgtccccgctcagccagcttccggaggatgggcagtgagagagtgagagaaggaaaggggcagccaggctgggggcttacggtgttgagagagagggcaggtgtgggaaagcagggtacggtttctacggcagcaaacagtt

SEQ ID NO: 140263 - DNA, 30 bp, Homo sapiens; identical to SEQ ID NO: 62340
  chr1:247596707-247596737
  hypo

SEQ ID NO: 140264 - DNA, 290 bp, Homo sapiens; identical to SEQ ID NO: 15702
  chr1:247614674-247614964
  hypo

SEQ ID NO: 140265 - DNA, 30 bp, Homo sapiens
  chr1:247615647-247615677
  hypo
ccaggtagagcgaagcgtgctgcagctccc

SEQ ID NO: 140266 - DNA, 30 bp, Homo sapiens
  chr1:247642949-247642979
  hypo
gttagctagtgttagcggcagcaaagatgg

SEQ ID NO: 140267 - DNA, 30 bp, Homo sapiens; identical to SEQ ID NO: 15703
  chr1:247695313-247695343
  hypo

SEQ ID NO: 140268 - DNA, 38 bp, Homo sapiens
  chr1:247808860-247808898
  hypo
tggacgggctgggcgcggtggctcacgcctgtaatccc

SEQ ID NO: 140269 - DNA, 30 bp, Homo sapiens; identical to SEQ ID NO: 15704
  chr1:247978776-247978806
  hypo

SEQ ID NO: 140270 - DNA, 33 bp, Homo sapiens; identical to SEQ ID NO: 15705
  chr1:248000442-248000475
  hypo

SEQ ID NO: 140271 - DNA, 181 bp, Homo sapiens
  chr1:248003050-248003231
  hypo
ctggcttgcttggtcctttctatgtcattgtctttccgggaaattcagactgtggcacaggacgtggcatgcttcatgagattaaaaatatttgtagaattaatgaatcaaacaatgggcaggatttgtagagatcttctaaactggctgaataaaataaactataaaagtgatttaagag

SEQ ID NO: 140272 - DNA, 30 bp, Homo sapiens
  chr1:248004852-248004882
  hypo
ccaggagaaagcactcggtggcgccgagga

SEQ ID NO: 140273 - DNA, 31 bp, Homo sapiens; identical to SEQ ID NO: 62345
  chr1:248010073-248010104
  hypo

SEQ ID NO: 140274 - DNA, 30 bp, Homo sapiens
  chr1:248011818-248011848
  hypo
tgtctgttttcccggcgtccagagcgctaa

SEQ ID NO: 140275 - DNA, 139 bp, Homo sapiens; identical to SEQ ID NO: 1264
  chr1:248020309-248020448
  hypo

SEQ ID NO: 140276 - DNA, 115 bp, Homo sapiens; identical to SEQ ID NO: 1265
  chr1:248020515-248020630
  hypo

SEQ ID NO: 140277 - DNA, 400 bp, Homo sapiens; identical to SEQ ID NO: 37059
  chr1:248020956-248021356
  hypo

SEQ ID NO: 140278 - DNA, 25 bp, Homo sapiens
  chr1:248026518-248026543
  hypo
agtcaaagcaagaagttatcacgtt

SEQ ID NO: 140279 - DNA, 307 bp, Homo sapiens; identical to SEQ ID NO: 15709
  chr1:248027959-248028266
  hypo

SEQ ID NO: 140280 - DNA, 30 bp, Homo sapiens
  chr1:248035800-248035830
  hypo
tattgatgaggaaagcgacagttgaagcag

SEQ ID NO: 140281 - DNA, 36 bp, Homo sapiens
  chr1:248036241-248036277
  hypo
gaactctgggccgggcgcggtggctcacgcctgtaa

SEQ ID NO: 140282 - DNA, 91 bp, Homo sapiens
  chr1:248036934-248037025
  hypo
tgcaatgcgcagttacgtgaccactcaggttgggtatcaataaaaattcactagaccgggcgtggcagctcacgcctgtaatcccaacatt

SEQ ID NO: 140283 - DNA, 30 bp, Homo sapiens
  chr1:248041739-248041769
  hypo
ttgtttgatcatgagcgaacacttctactc

SEQ ID NO: 140284 - DNA, 88 bp, Homo sapiens
  chr1:248047445-248047533
  hypo
acttatatcacaagtcgtttaattataacaaagcactacatctaccaatgcaaaattattattattactattattattattattatgt

SEQ ID NO: 140285 - DNA, 88 bp, Homo sapiens
  chr1:248047952-248048040
  hypo
tgcagcctcgacctcctgggcccattgacccccgtacctcagtctcttgagtagctgggaccacacctttgtgcgaccgtgccgggct

SEQ ID NO: 140286 - DNA, 41 bp, Homo sapiens
  chr1:248073855-248073896
  hypo
cgggggggcggggggcggaagacgatgatatccagaggggg

SEQ ID NO: 140287 - DNA, 226 bp, Homo sapiens; identical to SEQ ID NO: 62352
  chr1:248074826-248075052
  hypo

SEQ ID NO: 140288 - DNA, 20 bp, Homo sapiens
  chr1:248092108-248092128
  hypo
aggatgggccgggcgcggtg

SEQ ID NO: 140289 - DNA, 770 bp, Homo sapiens
  chr1:248099359-248100129
  hypo
ccaggccagcaaagacggggtgcagaagagtctcagccagagtgatgtgctgggcagcgtccaattttaccaccctccgcatcaggtcaaacagctgcacgtgctccagagagtcttggagcatgtcactcttcagacgtttgcagttcttcacatatgggctgtcagagctgttctcatcccaaactaggccccatttgtagaaatatttctgcttcttggtacaggagatcacgcgtaatgggatgagccgtagggtcttcaacatcaccaggcgctcttggttttcacaggtctggaagagtgtgaaacctggtagtacttaaagagaaggtagcccatgccctggacatggcaggggcgtgtccagcccagatcaaggatcagttcaggcaggcgacagtgaccgtggtcaccatggcgatgtggtgcccacggtcagaggtggcattggggaagtcagccactcggacgctggtgctcctcactgacttctcatcgctcctgtgctcgctgtagacggtgtttaactcagaatccacatgcaggatgttctcggttttcaggtgtgcgtgggtcagccggttctcgtgcagaaatctaagggtgtggcagagctggtgggccatgtgccagacatgtgggaggggaatggctggatgttattctccttcgggaactcaagggttttcctgcccaggagctcaaaggtgatatgcatggaccgcggagggtgaaccagtcacaccccaagacgcacagcagctggt

SEQ ID NO: 140290 - DNA, 137 bp, Homo sapiens; identical to SEQ ID NO: 62354
  chr1:248328622-248328759
  hypo

SEQ ID NO: 140291 - DNA, 30 bp, Homo sapiens
  chr1:248469116-248469146
  hypo
aaacgtaagagccagcgccagagcgtcaca

SEQ ID NO: 140292 - DNA, 401 bp, Homo sapiens
  chr1:248469371-248469772
  hypo
acgaggtggatctgtcggttggaaactagtttctaaaacgccttctgttccgcatgcgtttattctcttcttctgcacagaatttgctccgtggtgagcctggagatgtctctggatggggacagctccattcccagctacttctgcggggctggtggcgcagagatgggcgcaaaggctgaaagtcgcaagtcctgtgcttctggagttcaaatgcttcctttccagcgggtctccttgcgccatggggccgtgctggggtgaatctggggaaaacaacaggagagggaggccagggaacgcagggatggagggagcctaaccacggactcagacggagccaggcgggtcgcgggtgctggagccgcctgaggactggaaccccctgaggacaggagccg

SEQ ID NO: 140293 - DNA, 102 bp, Homo sapiens
  chr1:248470191-248470293
  hypo
actggagccgcctgaggactggagccgcctgaggactggagccgccgcgattgcatccactgcagggacagtggccagggccggccccgaggcctaatcagg

SEQ ID NO: 140294 - DNA, 30 bp, Homo sapiens; identical to SEQ ID NO: 62355
  chr1:248480154-248480184
  hypo

SEQ ID NO: 140295 - DNA, 223 bp, Homo sapiens
  chr1:248685313-248685536
  hypo
tatgctgctgtctgccggccactgcgctacatagccattatgcaccccaggttctgtgcgtctctggccggtggagcatggctcagcggcctcatcacctccctaattcagtgctccctcactgtgcagctgcccctctgtggtcatcgcacactggatcatattttctgtgaggtgccagtgctcatcaaactggcctgtgtggatacgactttcaacgagg

SEQ ID NO: 140296 - DNA, 339 bp, Homo sapiens; identical to SEQ ID NO: 15713
  chr1:249106192-249106531
  hypo

SEQ ID NO: 140297 - DNA, 99 bp, Homo sapiens; identical to SEQ ID NO: 62357
  chr1:249113998-249114097
  hypo

SEQ ID NO: 140298 - DNA, 34 bp, Homo sapiens; identical to SEQ ID NO: 62358
  chr1:249121615-249121649
  hypo

SEQ ID NO: 140299 - DNA, 175 bp, Homo sapiens; identical to SEQ ID NO: 15714
  chr1:249141904-249142079
  hypo

SEQ ID NO: 140300 - DNA, 30 bp, Homo sapiens; identical to SEQ ID NO: 15715
  chr1:249142490-249142520
  hypo

SEQ ID NO: 140301 - DNA, 235 bp, Homo sapiens; identical to SEQ ID NO: 1267
  chr1:249167653-249167888
  hypo

SEQ ID NO: 140302 - DNA, 39 bp, Homo sapiens; identical to SEQ ID NO: 15717
  chr1:249172379-249172418
  hypo

SEQ ID NO: 140303 - DNA, 124 bp, Homo sapiens; identical to SEQ ID NO: 15718
  chr1:249212001-249212125
  hypo

SEQ ID NO: 140304 - DNA, 138 bp, Homo sapiens; identical to SEQ ID NO: 15719
  chr1:249212376-249212514
  hypo

SEQ ID NO: 140305 - DNA, 193 bp, Homo sapiens; identical to SEQ ID NO: 15720
  chr1:249218263-249218456
  hypo

SEQ ID NO: 140306 - DNA, 80 bp, Homo sapiens
  chr2:67490-67570
  hypo
aaactcccgctcacccgtgagtcacgcagagaacaccaatgaacggctgcaaaactcccgctcacccgtgcatgtcacac

SEQ ID NO: 140307 - DNA, 79 bp, Homo sapiens
  chr2:67749-67828
  hypo
ctgtaaaactcccgctcacccgtgtgtcacgcagagaacaccaatgaacgtgctgcaaaactcccgctcacccctgtgt

SEQ ID NO: 140308 - DNA, 28 bp, Homo sapiens
  chr2:90801-90829
  hypo
tgtgccattgagaggtgacagcgtgctg

SEQ ID NO: 140309 - DNA, 28 bp, Homo sapiens
  chr2:99795-99823
  hypo
agactccgcctcaaaaaaaaaaaaagtt

SEQ ID NO: 140310 - DNA, 202 bp, Homo sapiens; identical to SEQ ID NO: 62368
  chr2:142611-142813
  hypo

SEQ ID NO: 140311 - DNA, 137 bp, Homo sapiens
  chr2:249729-249866
  hypo
cttccatctggaaggcgcgccactacaatcccgctgcctcctctggcagtcaccaggaacccggctttgatcacagacagaattgcaaggcctttagccttcgcaattacgtgagctgttaacgtggaaaacaatgg

SEQ ID NO: 140312 - DNA, 581 bp, Homo sapiens; identical to SEQ ID NO: 37065
  chr2:263890-264471
  hypo

SEQ ID NO: 140313 - DNA, 31 bp, Homo sapiens
  chr2:266542-266573
  hypo
actccccagtggatcccgaaactgtgggtag

SEQ ID NO: 140314 - DNA, 119 bp, Homo sapiens
  chr2:272129-272248
  hypo
atgagccacgttgcccggcaggtaccgtccttggacttgaagttgtgtgttttgtgtttcagtgggtcattgacagcggtgctgtttctgactggaacgtgggccggtccccagaccca

SEQ ID NO: 140315 - DNA, 1519 bp, Homo sapiens; identical to SEQ ID NO: 105380
  chr2:287343-288862
  hypo

SEQ ID NO: 140316 - DNA, 743 bp, Homo sapiens; identical to SEQ ID NO: 15724
  chr2:314482-315225
  hypo

SEQ ID NO: 140317 - DNA, 271 bp, Homo sapiens; identical to SEQ ID NO: 15725
  chr2:318852-319123
  hypo

SEQ ID NO: 140318 - DNA, 450 bp, Homo sapiens; identical to SEQ ID NO: 62375
  chr2:319182-319632
  hypo

SEQ ID NO: 140319 - DNA, 321 bp, Homo sapiens
  chr2:364116-364437
  hypo
gtgaacgggtttgaacggctggtctcccagctgatgatggaacccgacttacagtgttagagataaaagtgaacgggtttgaacggctggtctcctggctgatgattgaacccgacttagagtgttagagatgaaagtgaacgggtttgaacggctggtctcctggctgatgatggaacccgacttagagtgttatagatgaaagtgaacgggtttgaacggctggtctcccggttgatgatggaacccgacttacagtgttagagatgaaagtgaacgggtttgaacggctggtctcccggttgatgattgaacctgact

SEQ ID NO: 140320 - DNA, 43 bp, Homo sapiens; identical to SEQ ID NO: 62377
  chr2:366700-366743
  hypo

SEQ ID NO: 140321 - DNA, 30 bp, Homo sapiens
  chr2:374508-374538
  hypo
gtctcatacggctcacgtgttgtacagtga

SEQ ID NO: 140322 - DNA, 187 bp, Homo sapiens; identical to SEQ ID NO: 62378
  chr2:374751-374938
  hypo

SEQ ID NO: 140323 - DNA, 43 bp, Homo sapiens; identical to SEQ ID NO: 62379
  chr2:416711-416754
  hypo

SEQ ID NO: 140324 - DNA, 20 bp, Homo sapiens
  chr2:426595-426615
  hypo
ggcacgcagggggctccgca

SEQ ID NO: 140325 - DNA, 30 bp, Homo sapiens; identical to SEQ ID NO: 62381
  chr2:427565-427595
  hypo

SEQ ID NO: 140326 - DNA, 278 bp, Homo sapiens; identical to SEQ ID NO: 62382
  chr2:451670-451948
  hypo

SEQ ID NO: 140327 - DNA, 118 bp, Homo sapiens
  chr2:465770-465888
  hypo
aaacaaagaaaatggcgcttgtgttatatatgacgaaaaattgtaaaacttgaggtcattctataaaaagccgtcctgactttagtacttttctacaaataaacgtgtttttacaacg

SEQ ID NO: 140328 - DNA, 30 bp, Homo sapiens; identical to SEQ ID NO: 62383
  chr2:469790-469820
  hypo

SEQ ID NO: 140329 - DNA, 30 bp, Homo sapiens
  chr2:486576-486606
  hypo
agctgtgccggaaaccgacaggtgctgtgt

SEQ ID NO: 140330 - DNA, 30 bp, Homo sapiens; identical to SEQ ID NO: 62384
  chr2:487713-487743
  hypo

SEQ ID NO: 140331 - DNA, 355 bp, Homo sapiens
  chr2:495957-496312
  hypo
gcccctggcgatgcccggccccagaggccactccacatggagtcctgggcctcctatccctggtcccttcccccatgtctcggctaccatgaccttgccaccctccccacccggttgaacgcctctcagcactgctttccttcctgcgccctcagcccctcgcacatccggatggctaatcctcctcctgaggaaattcactctctctattttgcgactgttcccagtcacctgagcatcctgagcatcgatggtgagaagctacaggaggccgagcggctgttgacgcccaggaccgtgggcagcaccttgcagggggaaaccggcttcctccggtctcccagaagaagagttc

SEQ ID NO: 140332 - DNA, 362 bp, Homo sapiens
  chr2:497069-497431
  hypo
tgaccttgtgccttgagatcacgtcccagcctgtctgtcctcatagcccctccatcccgcagcctctcagaagccgccctccccactgtgccctttcttggtttatattcctgcttgtgcgtgcgtgtcgctaatgcacctacatttttgtatcggtcaaattctttgtgtctcttttggttggtgccagttcagtcaggggagacaggttcctccgtttggttcacgtcagtgtgtcaagttcttagaattagaagtgaactgtgtggatgagcgtggccttgccaagagtgagagcatggagagatgccgagggccggactcaggacacggggccagggagggggcgcaggactaaagga

SEQ ID NO: 140333 - DNA, 30 bp, Homo sapiens
  chr2:501881-501911
  hypo
gattcagcatggtcccgcgttgtccacgtc

SEQ ID NO: 140334 - DNA, 391 bp, Homo sapiens; identical to SEQ ID NO: 62386
  chr2:502871-503262
  hypo

SEQ ID NO: 140335 - DNA, 61 bp, Homo sapiens; identical to SEQ ID NO: 62387
  chr2:503730-503791
  hypo

SEQ ID NO: 140336 - DNA, 399 bp, Homo sapiens; identical to SEQ ID NO: 62388
  chr2:522157-522556
  hypo

SEQ ID NO: 140337 - DNA, 394 bp, Homo sapiens; identical to SEQ ID NO: 62389
  chr2:582775-583169
  hypo

SEQ ID NO: 140338 - DNA, 30 bp, Homo sapiens; identical to SEQ ID NO: 62390
  chr2:620825-620855
  hypo

SEQ ID NO: 140339 - DNA, 30 bp, Homo sapiens; identical to SEQ ID NO: 62391
  chr2:674925-674955
  hypo

SEQ ID NO: 140340 - DNA, 193 bp, Homo sapiens; identical to SEQ ID NO: 62392
  chr2:720803-720996
  hypo

SEQ ID NO: 140341 - DNA, 104 bp, Homo sapiens
  chr2:796466-796570
  hypo
aagctctgccggggccggctgctgtagtggggacttcagtctggtgaatcaatattacgttgcgtggaacgtgaacatggacgccactccgtccgggattcagc

SEQ ID NO: 140342 - DNA, 235 bp, Homo sapiens
  chr2:815046-815281
  hypo
tcctcacaggcagtcccaagacggccactcctgtggtgccggctctgcatccatgtccacctgcaggctcagaggagccccgcaccctaatctgcagtggccgccaatcacccctcctgcttctctgccgttaacgtccaccctgggcttgccgggtccttacgtttctgttgttggtggccttgtcctcaccgggcatccccttcatctacacggaagcccctgagatgaggga

SEQ ID NO: 140343 - DNA, 267 bp, Homo sapiens; identical to SEQ ID NO: 62393
  chr2:816396-816663
  hypo

SEQ ID NO: 140344 - DNA, 414 bp, Homo sapiens; identical to SEQ ID NO: 15731
  chr2:816915-817329
  hypo

SEQ ID NO: 140345 - DNA, 203 bp, Homo sapiens; identical to SEQ ID NO: 15732
  chr2:817620-817823
  hypo

SEQ ID NO: 140346 - DNA, 200 bp, Homo sapiens
  chr2:858099-858299
  hypo
tgcctcccctgatgccgatagcaggaccggcaccctcgttctctgcagtcacactccccatgtgaaagcgtctcctgtgttctttcttccaggatgccattttcaggccggctcctgcacaggcagtgcggtgtggtcactgtgctccactgatccactgaacggggttttataaaaagggcgtgcgactcaggtgggca

SEQ ID NO: 140347 - DNA, 30 bp, Homo sapiens
  chr2:869524-869554
  hypo
gccgtgcctgacacccgccagcaacacaca

SEQ ID NO: 140348 - DNA, 30 bp, Homo sapiens
  chr2:869834-869864
  hypo
ctgtgtgcactgggacgggctgagggctgt

SEQ ID NO: 140349 - DNA, 194 bp, Homo sapiens; identical to SEQ ID NO: 15733
  chr2:875846-876040
  hypo

SEQ ID NO: 140350 - DNA, 259 bp, Homo sapiens; identical to SEQ ID NO: 62397
  chr2:910391-910650
  hypo

SEQ ID NO: 140351 - DNA, 43 bp, Homo sapiens
  chr2:911369-911412
  hypo
gtgacagagactattgtgtttcgcttactgtgttaagttatac

SEQ ID NO: 140352 - DNA, 30 bp, Homo sapiens; identical to SEQ ID NO: 15735
  chr2:916486-916516
  hypo

SEQ ID NO: 140353 - DNA, 30 bp, Homo sapiens; identical to SEQ ID NO: 15736
  chr2:916872-916902
  hypo

SEQ ID NO: 140354 - DNA, 227 bp, Homo sapiens
  chr2:923172-923399
  hypo
ggaccccgagatctgcgggcaacaagcacccccgtgattccaatctgcaggcaggatcccggcatctgtaggcaacaagcacccccatgattccaatgcaggcaggaccccgggatccgcgggcaacaagcacgctcatgattccaatgcaggcaggaccccgggatccacgggcaacaagcacccccgtgattccaatgcaggcaggaccccgggatccgcgggca

SEQ ID NO: 140355 - DNA, 767 bp, Homo sapiens; identical to SEQ ID NO: 37074
  chr2:945450-946217
  hypo

SEQ ID NO: 140356 - DNA, 114 bp, Homo sapiens; identical to SEQ ID NO: 37075
  chr2:946289-946403
  hypo

SEQ ID NO: 140357 - DNA, 134 bp, Homo sapiens; identical to SEQ ID NO: 37076
  chr2:946432-946566
  hypo

SEQ ID NO: 140358 - DNA, 30 bp, Homo sapiens; identical to SEQ ID NO: 62404
  chr2:949672-949702
  hypo

SEQ ID NO: 140359 - DNA, 46 bp, Homo sapiens; identical to SEQ ID NO: 62405
  chr2:982993-983039
  hypo

SEQ ID NO: 140360 - DNA, 30 bp, Homo sapiens
  chr2:1065673-1065703
  hypo
agtcatttcagaacccgcggccccccacgt

SEQ ID NO: 140361 - DNA, 30 bp, Homo sapiens
  chr2:1094502-1094532
  hypo
aggactagctgaccgcgctcaggtggggct

SEQ ID NO: 140362 - DNA, 30 bp, Homo sapiens
  chr2:1096269-1096299
  hypo
aagtgggattccacacgggcgccgtgggtc

SEQ ID NO: 140363 - DNA, 36 bp, Homo sapiens; identical to SEQ ID NO: 62406
  chr2:1130680-1130716
  hypo

SEQ ID NO: 140364 - DNA, 270 bp, Homo sapiens
  chr2:1204031-1204301
  hypo
cgcgttcttgccggtcgctggggcggcagcacctggttcattcccagcgagcccggctctgagatcaagatggctcagagagctcaggctcctctttgagaacgtggaatgggaggtgggtggatcctgtggcccagaacctacctccgaccctttcgttgttggactcttgcggggctgctgcgtggtgctgtggtggttgcatggctccttcaccttcccagacgggcttcctgtcgagagccgcagacccgacgaggcctcaccact

SEQ ID NO: 140365 - DNA, 30 bp, Homo sapiens
  chr2:1252812-1252842
  hypo
gtaaactgattgcagcgtcacaaagtgtcc

SEQ ID NO: 140366 - DNA, 30 bp, Homo sapiens
  chr2:1257970-1258000
  hypo
acagctcagttgttccgtgaggagggcccg

SEQ ID NO: 140367 - DNA, 30 bp, Homo sapiens; identical to SEQ ID NO: 15740
  chr2:1266558-1266588
  hypo

SEQ ID NO: 140368 - DNA, 163 bp, Homo sapiens
  chr2:1282737-1282900
  hypo
aacaccctgtcagcgcgcgaatcacccctctgtcagtgcgtgaataaccgctgtctgtgcgtgaatcaccccctgtcagtgcgcgattcacccctctgtcagtgcgcgaatgacccctctgtcagtgcgcgaatcacccctgtcagcgcgcgaatcacccgtc

SEQ ID NO: 140369 - DNA, 30 bp, Homo sapiens
  chr2:1286950-1286980
  hypo
tactgctgccgcccacgccctaactcctca

SEQ ID NO: 140370 - DNA, 30 bp, Homo sapiens
  chr2:1287779-1287809
  hypo
gagccgccgacctgccgttgtgaagaatga

SEQ ID NO: 140371 - DNA, 30 bp, Homo sapiens
  chr2:1291454-1291484
  hypo
ttctcattggagggccggggccacaggaac

SEQ ID NO: 140372 - DNA, 410 bp, Homo sapiens; identical to SEQ ID NO: 62410
  chr2:1311460-1311870
  hypo

SEQ ID NO: 140373 - DNA, 30 bp, Homo sapiens
  chr2:1382487-1382517
  hypo
gatctgtgggaatgccgtgcacccggcaga

SEQ ID NO: 140374 - DNA, 30 bp, Homo sapiens; identical to SEQ ID NO: 62411
  chr2:1426166-1426196
  hypo

SEQ ID NO: 140375 - DNA, 30 bp, Homo sapiens
  chr2:1444991-1445021
  hypo
tgccgcaggagctaccgtgttggaagggaa

SEQ ID NO: 140376 - DNA, 31 bp, Homo sapiens; identical to SEQ ID NO: 15742
  chr2:1461907-1461938
  hypo

SEQ ID NO: 140377 - DNA, 333 bp, Homo sapiens; identical to SEQ ID NO: 62413
  chr2:1482073-1482406
  hypo

SEQ ID NO: 140378 - DNA, 272 bp, Homo sapiens; identical to SEQ ID NO: 62414
  chr2:1488387-1488659
  hypo

SEQ ID NO: 140379 - DNA, 70 bp, Homo sapiens; identical to SEQ ID NO: 62415
  chr2:1501007-1501077
  hypo

SEQ ID NO: 140380 - DNA, 178 bp, Homo sapiens; identical to SEQ ID NO: 62416
  chr2:1506965-1507143
  hypo

SEQ ID NO: 140381 - DNA, 258 bp, Homo sapiens; identical to SEQ ID NO: 62417
  chr2:1516282-1516540
  hypo

SEQ ID NO: 140382 - DNA, 133 bp, Homo sapiens; identical to SEQ ID NO: 62418
  chr2:1520207-1520340
  hypo

SEQ ID NO: 140383 - DNA, 279 bp, Homo sapiens; identical to SEQ ID NO: 15746
  chr2:1543305-1543584
  hypo

SEQ ID NO: 140384 - DNA, 231 bp, Homo sapiens
  chr2:1589538-1589769
  hypo
gccccaaggagagaccgtgggggctgcctgagagcttcagcccagagcagtggcagacaggagaggacggccactcttgaggggcgtgggcggccatcggcaggctgagggggtgggcggctgcgggttgaggggttgggtgcctgtcttcaggctgctcctctacgcaggcccgagcctgtgatcaaggagtcacccagagcccagttatgtctacgggagctcttctca

SEQ ID NO: 140385 - DNA, 109 bp, Homo sapiens; identical to SEQ ID NO: 62421
  chr2:1606632-1606741
  hypo

SEQ ID NO: 140386 - DNA, 297 bp, Homo sapiens; identical to SEQ ID NO: 15747
  chr2:1613966-1614263
  hypo

SEQ ID NO: 140387 - DNA, 30 bp, Homo sapiens
  chr2:1641278-1641308
  hypo
ctggtctctaggctgcggagggaggaagac

SEQ ID NO: 140388 - DNA, 30 bp, Homo sapiens
  chr2:1641524-1641554
  hypo
ggaggacctgccacacgctgtccactctga

SEQ ID NO: 140389 - DNA, 280 bp, Homo sapiens; identical to SEQ ID NO: 62423
  chr2:1647056-1647336
  hypo

SEQ ID NO: 140390 - DNA, 233 bp, Homo sapiens
  chr2:1651996-1652229
  hypo
gaacgtgtgtgccgccgatagattgcagtagaccctgtagtcgtggtagggtgggatcccgtggtcccggccccgctggatgttgatggccgccaggtccagagccaccgtgtgtgccatggagaacagccgctccgtgagctccgtgttcagcagctgcgagggcacacgcattttccccgccaccccgaacagccccctgagaagcggatcgatgccgccctcattcacaa

SEQ ID NO: 140391 - DNA, 97 bp, Homo sapiens; identical to SEQ ID NO: 62424
  chr2:1652503-1652600
  hypo

SEQ ID NO: 140392 - DNA, 452 bp, Homo sapiens; identical to SEQ ID NO: 15749
  chr2:1653096-1653548
  hypo

SEQ ID NO: 140393 - DNA, 122 bp, Homo sapiens; identical to SEQ ID NO: 62426
  chr2:1666259-1666381
  hypo

SEQ ID NO: 140394 - DNA, 30 bp, Homo sapiens
  chr2:1667553-1667583
  hypo
gttacactggacactcggacgcatggagaa

SEQ ID NO: 140395 - DNA, 253 bp, Homo sapiens; identical to SEQ ID NO: 62427
  chr2:1669970-1670223
  hypo

SEQ ID NO: 140396 - DNA, 30 bp, Homo sapiens; identical to SEQ ID NO: 62428
  chr2:1683988-1684018
  hypo

SEQ ID NO: 140397 - DNA, 289 bp, Homo sapiens; identical to SEQ ID NO: 15750
  chr2:1688941-1689230
  hypo

SEQ ID NO: 140398 - DNA, 253 bp, Homo sapiens; identical to SEQ ID NO: 15751
  chr2:1709543-1709796
  hypo

SEQ ID NO: 140399 - DNA, 380 bp, Homo sapiens; identical to SEQ ID NO: 1283
  chr2:1747627-1748007
  hypo

SEQ ID NO: 140400 - DNA, 454 bp, Homo sapiens; identical to SEQ ID NO: 105394
  chr2:1748396-1748850
  hypo

SEQ ID NO: 140401 - DNA, 321 bp, Homo sapiens; identical to SEQ ID NO: 15754
  chr2:1771819-1772140
  hypo

SEQ ID NO: 140402 - DNA, 30 bp, Homo sapiens; identical to SEQ ID NO: 62434
  chr2:1792479-1792509
  hypo

SEQ ID NO: 140403 - DNA, 45 bp, Homo sapiens
  chr2:1793413-1793458
  hypo
gcaaagaagctgcagacacaacgcggtggggaaatgcatatgctg

SEQ ID NO: 140404 - DNA, 99 bp, Homo sapiens; identical to SEQ ID NO: 62435
  chr2:1796264-1796363
  hypo

SEQ ID NO: 140405 - DNA, 162 bp, Homo sapiens; identical to SEQ ID NO: 62436
  chr2:1816187-1816349
  hypo

SEQ ID NO: 140406 - DNA, 85 bp, Homo sapiens; identical to SEQ ID NO: 62437
  chr2:1828325-1828410
  hypo

SEQ ID NO: 140407 - DNA, 30 bp, Homo sapiens
  chr2:1835680-1835710
  hypo
gatttccgattcctacgcggctctcctcag

SEQ ID NO: 140408 - DNA, 30 bp, Homo sapiens
  chr2:1836371-1836401
  hypo
ttaggtctgcaggaacggctcaacgtgtct

SEQ ID NO: 140409 - DNA, 601 bp, Homo sapiens; identical to SEQ ID NO: 15755
  chr2:1846364-1846965
  hypo

SEQ ID NO: 140410 - DNA, 607 bp, Homo sapiens
  chr2:1863597-1864204
  hypo
cagcgttggggacagcgcgccggatgagaggggctctgggaaaggggacccgggccgcgctggtgacaggtctgtctccactcctgggcttgttttctggggattctctcgctgcggtttggctgtttggggagcacccaggggctgccacggcagcgtcactgtccatgctgcatgcagtttgtctgtttcccgaccatgcagcctaggactcttcacttatccctctgtgttgatcatgctgccctcgttgccaacactgcgaaccgctgcagggccgaaaggcgccccaagtacatccagcaataggctcctgtccagtgcggcagaacgtacctagcacatcctgacgtcccattcacttaacgggatgtgtccatgggaactgctgccagagcacatgcacgtccagcagcagtggagcggctaagcaagaggctggggccgccggagccagtattggggttggactcggaggacccatgcaaaaaaaaaatacaaaaggtgactggtgcagctgacgcaaggcaacagaaacgccaccccagcctctcgccctcgcgtggaagagtgagtttcatccagggcctgacgcattcaaaccaca

SEQ ID NO: 140411 - DNA, 81 bp, Homo sapiens
  chr2:1880346-1880427
  hypo
gtgactctcctggatgctgttcgcccacactgagtccccgcagctgaccctatgcgtgccgccattgaaacctcagcacct

SEQ ID NO: 140412 - DNA, 227 bp, Homo sapiens; identical to SEQ ID NO: 62440
  chr2:1887328-1887555
  hypo

SEQ ID NO: 140413 - DNA, 469 bp, Homo sapiens; identical to SEQ ID NO: 62441
  chr2:1895686-1896155
  hypo

SEQ ID NO: 140414 - DNA, 30 bp, Homo sapiens; identical to SEQ ID NO: 62442
  chr2:1896470-1896500
  hypo

SEQ ID NO: 140415 - DNA, 133 bp, Homo sapiens
  chr2:1915730-1915863
  hypo
ggagaaggcatggagagcagccggtgctccctcccacaccagtgacccacgcgtggcttaccttcggtgggagttcctgttgctgttgacatgcccgcgccccgtgcagcccggagtggggcacttgaggaca

SEQ ID NO: 140416 - DNA, 310 bp, Homo sapiens; identical to SEQ ID NO: 15756
  chr2:1926246-1926556
  hypo

SEQ ID NO: 140417 - DNA, 168 bp, Homo sapiens; identical to SEQ ID NO: 15757
  chr2:1932937-1933105
  hypo

SEQ ID NO: 140418 - DNA, 632 bp, Homo sapiens; identical to SEQ ID NO: 62445
  chr2:1940948-1941580
  hypo

SEQ ID NO: 140419 - DNA, 65 bp, Homo sapiens
  chr2:1987512-1987577
  hypo
ccagggctggaactgcgagcttcacttactgaacccgtgaatggctcagtcgcgttttctaagac

SEQ ID NO: 140420 - DNA, 30 bp, Homo sapiens
  chr2:2099297-2099327
  hypo
aggggagctatcctgcgagcccccacctgt

SEQ ID NO: 140421 - DNA, 30 bp, Homo sapiens
  chr2:2099719-2099749
  hypo
aggagccctggtgaacgtggacacgcgtgg

SEQ ID NO: 140422 - DNA, 45 bp, Homo sapiens
  chr2:2125517-2125562
  hypo
aagtgctaggattacaggtgtgagccaccgcgttttttcaagctt

SEQ ID NO: 140423 - DNA, 136 bp, Homo sapiens
  chr2:2142635-2142771
  hypo
aataaggactgcctccgaaagcctggtgtggtttcccgcctgggccgcagtaaaggcacactgtgctagctgggcaggccacttgccatgccattctgtcttctaggaactgcactaccaacggcacatgcaaaac

SEQ ID NO: 140424 - DNA, 43 bp, Homo sapiens; identical to SEQ ID NO: 62446
  chr2:2166002-2166045
  hypo

SEQ ID NO: 140425 - DNA, 157 bp, Homo sapiens
  chr2:2176563-2176720
  hypo
ctgcactgtggccagaagccccgtgctgggcaggggcacctgcactctgtcaccaggagccccgtgctgggcagaggtacctgcactgttgccgcgccgggtgggtgatctcaggacctgatattcttccgccgtcgaccagggtttgaagatgccc

SEQ ID NO: 140426 - DNA, 1157 bp, Homo sapiens; identical to SEQ ID NO: 62447
  chr2:2189142-2190299
  hypo

SEQ ID NO: 140427 - DNA, 116 bp, Homo sapiens
  chr2:2193567-2193683
  hypo
gttctcaggaccgcacggggagaagcagggttctcaggacggcacggggagaagcagcgttctcaggaccgcacggggagaagctcgttctcaggaccgcacggggagaaggagcg

SEQ ID NO: 140428 - DNA, 30 bp, Homo sapiens
  chr2:2267137-2267167
  hypo
cacatatgcaaaacccggtcgcagaatgta

SEQ ID NO: 140429 - DNA, 65 bp, Homo sapiens; identical to SEQ ID NO: 62448
  chr2:2325020-2325085
  hypo

SEQ ID NO: 140430 - DNA, 30 bp, Homo sapiens
  chr2:2476777-2476807
  hypo
tgctttatgctcatccgcacaaagcaacct

SEQ ID NO: 140431 - DNA, 122 bp, Homo sapiens
  chr2:2569469-2569591
  hypo
ttacctggagtcaccgtcttaccgggggacttgagaggtgggtggagctgaccactttccgggaggaaaggagtctgacagaaaggccgttcctcactggaggacagcgtttgctaaggtgg

SEQ ID NO: 140432 - DNA, 30 bp, Homo sapiens
  chr2:2569806-2569836
  hypo
cgccttgggttggggcgaagggtctaccgt

SEQ ID NO: 140433 - DNA, 175 bp, Homo sapiens; identical to SEQ ID NO: 62450
  chr2:2572705-2572880
  hypo

SEQ ID NO: 140434 - DNA, 481 bp, Homo sapiens
  chr2:2575356-2575837
  hypo
gagtccggcagatggcggggccagcacctgagatatcccgttcccctgctatgctggagagggccatggtatgaagtggggggcttcacactgcccccggccctgatctgggaggcccttccaggcgaaggcggctcccggcttccccttcctgctgcccctcttcctccccatgcccgcctctccccccacgcctgcctcctccctcccgctcctcgctgcctcctcgcctccaggccacagtttctgtagctgggtcttcagacttcagaagtgtccttttattgtaaagacttcagtggtttcctagaaagcgccggattttcgagctttcttcctggcggggttgctttgtcctgcgcgacagcaggagttgtgggcggccgctgcaaggcccgcgctggccccgtctcccttcgcaggtgtcgaaccaggagtcacctccgcatctgcgcagcagcgggcccggcggaggggctct

SEQ ID NO: 140435 - DNA, 261 bp, Homo sapiens; identical to SEQ ID NO: 62451
  chr2:2584323-2584584
  hypo

SEQ ID NO: 140436 - DNA, 741 bp, Homo sapiens; identical to SEQ ID NO: 62452
  chr2:2584643-2585384
  hypo

SEQ ID NO: 140437 - DNA, 347 bp, Homo sapiens
  chr2:2639593-2639940
  hypo
ctcatatccagggggcgacttctgagcctgtctccccgcgtgcgcagctttccgtaaggagatcacttcatctgggagtcagccctggccctaggagacctcgtccttatttcacagacaaagaaactgggtctcagcacaaataagaaacatgctggaggctagcagccctgccggtgctgggggctggcgctggagctcaggctacgtgccctgtcaacggctgtatttaggcctctgatgtgtaggcagagggggcatcgctgcccttggatcctgcatgtcagagcttgagcgtgggcccacctcttccacgtggagagtgagagatgcggaagctgaccaca

SEQ ID NO: 140438 - DNA, 30 bp, Homo sapiens; identical to SEQ ID NO: 62453
  chr2:2654041-2654071
  hypo

SEQ ID NO: 140439 - DNA, 30 bp, Homo sapiens; identical to SEQ ID NO: 62454
  chr2:2654333-2654363
  hypo

SEQ ID NO: 140440 - DNA, 103 bp, Homo sapiens
  chr2:2667398-2667501
  hypo
ttgggggttgtacatcgccactgacaggtagatcgacgaaagtcccgctgtcctcatgatctcggccaccgtacctggccacatccaccgtgcaccctctccc

SEQ ID NO: 140441 - DNA, 205 bp, Homo sapiens; identical to SEQ ID NO: 62455
  chr2:2668975-2669180
  hypo

SEQ ID NO: 140442 - DNA, 50 bp, Homo sapiens; identical to SEQ ID NO: 62456
  chr2:2672246-2672296
  hypo

SEQ ID NO: 140443 - DNA, 318 bp, Homo sapiens; identical to SEQ ID NO: 15760
  chr2:2673022-2673340
  hypo

SEQ ID NO: 140444 - DNA, 30 bp, Homo sapiens
  chr2:2686625-2686655
  hypo
ctggtggtgaggaggcgccgaggacttcag

SEQ ID NO: 140445 - DNA, 51 bp, Homo sapiens
  chr2:2693175-2693226
  hypo
ttgacagcctggatgttgtggcgctgaaccgtgtgggtagtcaggtgctcc

SEQ ID NO: 140446 - DNA, 218 bp, Homo sapiens
  chr2:2696880-2697098
  hypo
ccacctagttagttcccaactcggtctatcctgggagaccccgagcaacagtctctcttcaccgtggctcctgccggctccctgactagcaacagtctctcttcaccgtggctcctgctggccccctgactactggtcctcataggcgctttccagacacccacaccttctcgacaagccagtgcaatcagctgcccgaaggaagacacagagcttcc

SEQ ID NO: 140447 - DNA, 152 bp, Homo sapiens; identical to SEQ ID NO: 62458
  chr2:2705290-2705442
  hypo

SEQ ID NO: 140448 - DNA, 30 bp, Homo sapiens
  chr2:2724370-2724400
  hypo
acaataagagtctcacgcaggagcagcatc

SEQ ID NO: 140449 - DNA, 154 bp, Homo sapiens
  chr2:2724720-2724874
  hypo
ccccagccacaccaccggcacctgtgtctccacaccctggtcgtgctgccggcacctgcacctccacaccccggccacgccaccagcacctgcacctccacaccccagccacaccgctggcacctatgtctccacaccccggccatgccgccaa

SEQ ID NO: 140450 - DNA, 416 bp, Homo sapiens
  chr2:2725125-2725541
  hypo
acaccccagccacaccgcccgtacctatgtctccacaccccagccatgccatcagcacctgcacctccacaccccggccacaccaccagcatctgcacctccacaccccagccacagcactggcacctatgtctccacaccccggccatgccacccgcacctgggtctccacaccctggccatgctgccggcacctgcacctccacaccccggccacgccaccagcacctgcacctccactccccagccacacctccagcacctatgtctccacaccccagccatgccatcggcacctgcacctccacaccccggccacaccaccagcacctgcacctccacaccccagccacaccgccggcacctatgtctccacaccccggctatgccgcccgcacctgcgtctccacaccctg

SEQ ID NO: 140451 - DNA, 30 bp, Homo sapiens
  chr2:2730234-2730264
  hypo
cccctcagacccccgcgttcaccgcacccc

SEQ ID NO: 140452 - DNA, 30 bp, Homo sapiens
  chr2:2730517-2730547
  hypo
tgcttgcttcgtgtccgctccctggaacat

SEQ ID NO: 140453 - DNA, 424 bp, Homo sapiens
  chr2:2734117-2734541
  hypo
gacactgtgtgttcccctgggcggggtggacccacgggctctgcccaccagcctcttcgaattctcagacgtctcaagaaaacggccatcaggccccgctgtcctcctccacatcctcccttcgctgcacgcctccctccatggtgggagttgccccctccacagggacgtgtcaagccttgatatacccactgcgtaccccagggccacgctcaggagctgccgctggatgaataagaggatttgaacgggaaaagactcccacagtgccccagaggccaggcctctcctctcctacaccagcccgctgtgacctgggcctcaggatggtgaccccagagctgggcaaatggtgccacagccccagccttgcccggctttaacttcctgagggtaaaattccgcaaacatctctgaagaaaga

SEQ ID NO: 140454 - DNA, 151 bp, Homo sapiens; identical to SEQ ID NO: 62460
  chr2:2734983-2735134
  hypo

SEQ ID NO: 140455 - DNA, 327 bp, Homo sapiens
  chr2:2735621-2735948
  hypo
gaatatgagcagaggcggctccaggctgtcagagagaattacgccatggagagattccgacgcctgtctgagactctctctcatggactctcacttccacatggtcctcacacgcatgtggcctggtcccctgggaggccatgcaagatgatactcagtaagacacacagcaatgtgaaggtgaccggccgaccccagcaagacgcagatactcagtaagacacacagcaacgtgaaggtgaccggccgaccccagcaagacgcagatactcagtaagacacacagcaatgtgaaggtgaccggccgaccccagcaagatgcagata

SEQ ID NO: 140456 - DNA, 291 bp, Homo sapiens; identical to SEQ ID NO: 15761
  chr2:2737133-2737424
  hypo

SEQ ID NO: 140457 - DNA, 359 bp, Homo sapiens
  chr2:2755042-2755401
  hypo
cccaggggtggccccggggacacccacctgactccgcaccccccacgagaggggaggatccttgcagacctcacctttgctggcaacgctgcggcccgcaggctcttccccatctgagcgtcctggccccctgttatttttgccacagtgccgcctcatcctccctctcgcatggtctggctcctgagttccctcttccctccagacccctctcactcagccctgggaccccctccaccccacctcggtttcctgcctctcctgtcttgccacccgctttccctcgaaactctgtggctttcagcaaatgctcctctgtccagcccgagcttccctgcagcagcgcgtcctgctgtcca

SEQ ID NO: 140458 - DNA, 252 bp, Homo sapiens
  chr2:2769792-2770044
  hypo
gagctggccccgaagcgccacggagtccctcagtcaattcctggcatgtgagcaggaaaagggagcacagaggaggagatgcgggggagccattgcaagggcagcctctaaagcctttctcggttggagtccctgatgtcacgatgagtcgctggtgccattggataacaagagttccacgctcaaggaccgcccctccaggcctggtggaatcagcagtcacggctgactgccctgcgcagtgaagggtgg

SEQ ID NO: 140459 - DNA, 169 bp, Homo sapiens
  chr2:2795034-2795203
  hypo
gtgtgagcgtcaccacgatggagcagggcacagggagatctcatgtttgggataaggcagtgaatccggaggaggcctgcagagcagacataaggcatcgcatcgaggggcaggcatgctgtggctcactgacttgcagtaatgcccctggctgcggaacctcccagaa

SEQ ID NO: 140460 - DNA, 30 bp, Homo sapiens
  chr2:2795714-2795744
  hypo
gaggctggccagccacgttagacgccacca

SEQ ID NO: 140461 - DNA, 455 bp, Homo sapiens
  chr2:2797202-2797657
  hypo
ctgctgtgcttagaacggcaccacctcctgcctgcaaaaccatgacagccctcggacagctcccagctccagcatctcctccctcagtcccgctgtgtcactgccactcatccagagtgcaaatctgatcaccgctcgctttaaacactcttcagtaacttcccattttctttcataaatacggcagattcccagccaggctcaccgtggaagccccctggctttgcgcctctccccggcttgaaggcctcggttcttgtcactaggaccaactcctggccgctcactgaagcacacctcatacacagccatccccgtgatcggcagattttgttcctacgaatctacctacttgctaaaatccacttgtagcctccacatgaggtgcacttgcagccatctgtggacgcgaacagagcaggattaatacttgagtcgcccgaggcacagtttct

SEQ ID NO: 140462 - DNA, 30 bp, Homo sapiens; identical to SEQ ID NO: 15762
  chr2:2799355-2799385
  hypo

SEQ ID NO: 140463 - DNA, 161 bp, Homo sapiens; identical to SEQ ID NO: 62466
  chr2:2799591-2799752
  hypo

SEQ ID NO: 140464 - DNA, 160 bp, Homo sapiens; identical to SEQ ID NO: 62467
  chr2:2800084-2800244
  hypo

SEQ ID NO: 140465 - DNA, 30 bp, Homo sapiens
  chr2:2844735-2844765
  hypo
cggcaggtgcagccgcgcctacctgaaatc

SEQ ID NO: 140466 - DNA, 148 bp, Homo sapiens; identical to SEQ ID NO: 15763
  chr2:2849144-2849292
  hypo

SEQ ID NO: 140467 - DNA, 421 bp, Homo sapiens; identical to SEQ ID NO: 62469
  chr2:2854223-2854644
  hypo

SEQ ID NO: 140468 - DNA, 30 bp, Homo sapiens
  chr2:2863139-2863169
  hypo
gcaggcagaggctggcgcggtgacggcaca

SEQ ID NO: 140469 - DNA, 215 bp, Homo sapiens; identical to SEQ ID NO: 62470
  chr2:2876122-2876337
  hypo

SEQ ID NO: 140470 - DNA, 220 bp, Homo sapiens; identical to SEQ ID NO: 15765
  chr2:2879706-2879926
  hypo

SEQ ID NO: 140471 - DNA, 434 bp, Homo sapiens; identical to SEQ ID NO: 62472
  chr2:2893355-2893789
  hypo

SEQ ID NO: 140472 - DNA, 87 bp, Homo sapiens; identical to SEQ ID NO: 62473
  chr2:2897935-2898022
  hypo

SEQ ID NO: 140473 - DNA, 86 bp, Homo sapiens; identical to SEQ ID NO: 62474
  chr2:2936578-2936664
  hypo

SEQ ID NO: 140474 - DNA, 26 bp, Homo sapiens
  chr2:2936723-2936749
  hypo
tgtacgtgtgtgcctatgtgtgtgtg

SEQ ID NO: 140475 - DNA, 147 bp, Homo sapiens
  chr2:2939611-2939758
  hypo
tggccccgtcccatccgacctcactaaacatctgcaccagtttagctgctcccaaactccgggcaagggagaggcagggcttccgggaggcctgggctagcgtgaggaggcgaaggctctgctcctccctgacgggcaccgtccgca

SEQ ID NO: 140476 - DNA, 123 bp, Homo sapiens
  chr2:2940295-2940418
  hypo
cactcaaggtgacgacgggttcagggggtgcacactcaaggtgatgacgggttcaggggtacacgctcaaggtgacgggttcagggggtgcacactcaaggtgacgacggattcaggggtaca

SEQ ID NO: 140477 - DNA, 143 bp, Homo sapiens; identical to SEQ ID NO: 62477
  chr2:2945841-2945984
  hypo

SEQ ID NO: 140478 - DNA, 151 bp, Homo sapiens; identical to SEQ ID NO: 62478
  chr2:3039118-3039269
  hypo

SEQ ID NO: 140479 - DNA, 213 bp, Homo sapiens
  chr2:3041591-3041804
  hypo
gctctcggggtgaggcggcctcagaggaagggagtcggtgcccgagaaaggctgaaatcagaagtgatgtcaagagcctgtgagctgggcgcagcggtatcttcacgccacacctcctggaaagctccgtgtcgaaacatgctgacttctccctcttccgcattccactgccctgtttccatgtgcgtttccgtgacctcacccagtgtgcta

SEQ ID NO: 140480 - DNA, 341 bp, Homo sapiens; identical to SEQ ID NO: 62480
  chr2:3063351-3063692
  hypo

SEQ ID NO: 140481 - DNA, 80 bp, Homo sapiens
  chr2:3066926-3067006
  hypo
ctggaaaggacttgccacatgcgagacgttggaatcctgcatcctccccaggcgtaagcgtcactaaccctccttttttt

SEQ ID NO: 140482 - DNA, 31 bp, Homo sapiens; identical to SEQ ID NO: 15766
  chr2:3084233-3084264
  hypo

SEQ ID NO: 140483 - DNA, 30 bp, Homo sapiens; identical to SEQ ID NO: 62482
  chr2:3109840-3109870
  hypo

SEQ ID NO: 140484 - DNA, 168 bp, Homo sapiens; identical to SEQ ID NO: 62483
  chr2:3113369-3113537
  hypo

SEQ ID NO: 140485 - DNA, 66 bp, Homo sapiens
  chr2:3118886-3118952
  hypo
cttgctgaactttcctgctgccgcttttggggtgactccagcggcgggagagccagcaaaggagac

SEQ ID NO: 140486 - DNA, 30 bp, Homo sapiens
  chr2:3160782-3160812
  hypo
tcctccatccatccgcgcaccatcgtcaag

SEQ ID NO: 140487 - DNA, 102 bp, Homo sapiens; identical to SEQ ID NO: 15767
  chr2:3173338-3173440
  hypo

SEQ ID NO: 140488 - DNA, 30 bp, Homo sapiens; identical to SEQ ID NO: 15768
  chr2:3174505-3174535
  hypo

SEQ ID NO: 140489 - DNA, 250 bp, Homo sapiens; identical to SEQ ID NO: 62486
  chr2:3176032-3176282
  hypo

SEQ ID NO: 140490 - DNA, 30 bp, Homo sapiens
  chr2:3176843-3176873
  hypo
taatggctggtctgccggtgactttagcca

SEQ ID NO: 140491 - DNA, 30 bp, Homo sapiens; identical to SEQ ID NO: 62487
  chr2:3187869-3187899
  hypo

SEQ ID NO: 140492 - DNA, 30 bp, Homo sapiens
  chr2:3192429-3192459
  hypo
gaggaggccctgcccggctcacaaggtggg

SEQ ID NO: 140493 - DNA, 30 bp, Homo sapiens; identical to SEQ ID NO: 62488
  chr2:3193224-3193254
  hypo

SEQ ID NO: 140494 - DNA, 30 bp, Homo sapiens; identical to SEQ ID NO: 15770
  chr2:3197981-3198011
  hypo

SEQ ID NO: 140495 - DNA, 73 bp, Homo sapiens
  chr2:3201716-3201789
  hypo
gagaggcccaatgaccgagctggtgctggagtttattcagcatctcacaagatttaccgaggggctttgctgg

SEQ ID NO: 140496 - DNA, 30 bp, Homo sapiens; identical to SEQ ID NO: 15772
  chr2:3207245-3207275
  hypo

SEQ ID NO: 140497 - DNA, 31 bp, Homo sapiens; identical to SEQ ID NO: 62492
  chr2:3213314-3213345
  hypo

SEQ ID NO: 140498 - DNA, 287 bp, Homo sapiens; identical to SEQ ID NO: 62493
  chr2:3214975-3215262
  hypo

SEQ ID NO: 140499 - DNA, 91 bp, Homo sapiens; identical to SEQ ID NO: 62494
  chr2:3215522-3215613
  hypo

SEQ ID NO: 140500 - DNA, 30 bp, Homo sapiens; identical to SEQ ID NO: 62495
  chr2:3259990-3260020
  hypo

SEQ ID NO: 140501 - DNA, 434 bp, Homo sapiens; identical to SEQ ID NO: 62496
  chr2:3260561-3260995
  hypo

SEQ ID NO: 140502 - DNA, 86 bp, Homo sapiens; identical to SEQ ID NO: 62497
  chr2:3266888-3266974
  hypo

SEQ ID NO: 140503 - DNA, 31 bp, Homo sapiens; identical to SEQ ID NO: 15776
  chr2:3272898-3272929
  hypo

SEQ ID NO: 140504 - DNA, 190 bp, Homo sapiens
  chr2:3280942-3281132
  hypo
gcctctccacccacgcggccccacacctgtctccacccacacggccccgcacctgtctccacccacgcggccccacacctgtctccacccacgcggccccacacctgtctccactcacacggctccacacgtgtcctctgttctccattcaacgcattgaaactacaactggaaacggtagaggacattt

SEQ ID NO: 140505 - DNA, 92 bp, Homo sapiens
  chr2:3281348-3281440
  hypo
gtgggaactactccccggggtgttcatctggttccttttctcattaattaagtgacccacctgactaggctgagtaacgcccacctgctact

SEQ ID NO: 140506 - DNA, 30 bp, Homo sapiens; identical to SEQ ID NO: 62501
  chr2:3284146-3284176
  hypo

SEQ ID NO: 140507 - DNA, 30 bp, Homo sapiens; identical to SEQ ID NO: 15778
  chr2:3285033-3285063
  hypo

SEQ ID NO: 140508 - DNA, 751 bp, Homo sapiens
  chr2:3285952-3286703
  hypo
tgctgggttggtgtcggcaaccatcaccagccccgggccaccgtcaggtgggggcactgcccctctgtgcagcttgcacagaggcctgaagatggacagctctgcggacatggctagcagctgccctggactgaacatgcttttaccctcagaccaagtggtgaaatctgtctttccagccttttgtgtggaaaaaacaaaaaacacagccccacagacttcaatgagcccggcacttcctttcttgtgttccctcgtcactccctcccacctggtgcataaacatacccagattgcggtctctgtctcgttagtcatcccgttcattccctcatgtttaaccttgaaacccgactgccaatgcactgacatcggtgcctacagacggccgcacgggctgctgcgccggctcctggcagggtgtgtgctttgatgggctctgggggcagagccagctggcggcggcaactccgttgcccagggaacagccattgaagtgtgcgctcccgagtctgcaccaggccggcgcctgtcgcggtgctggctgaacctcggcgctgcaggggctgtgcccggcgggtgcccattagtgctctccgtgctccaggaacaaggagcaggtccagaggccccgctcttcccactgacaaacgggcttggtttgctgccttattaatgactacgccactctcaccacccaaacaaaatgcacagagtaggaggaaagaattagcttcgaggaggtgctctt

SEQ ID NO: 140509 - DNA, 57 bp, Homo sapiens
  chr2:3289696-3289753
  hypo
gtcgccgggaccctcgcacggagcagaagtcaccgatgtctccgggaccctcacttt

SEQ ID NO: 140510 - DNA, 559 bp, Homo sapiens
  chr2:3290044-3290603
  hypo
gacaactgccgtcaccgtgcctgcctgtgtatgacgtgtacacacactgctcctgtgtaaacgtgtggccgtgacatggcctccgttcagctccaggtgtcaagtgccagattccaggaagccccaggagtgggcccagaaggagcagtgccaaggacccccgggggtggggccatcctaccaggcatgtcctgggcacatgggaagaccgagaggtgagggacacttggtgtccgtgacagggaaaggctgaggcatcaggcttcgggctgtgtctaccttggtgactctggaagcgttttcataagcacttgtcatatgtcatatgcagtgtgctccaggggagcaggggatctcacagtccagagtgccccgcagagcacccgagacagcggctggcagagcacaggcagcaatgccccagaggaacaagccagcccctgcgtccccacgtgctgagtccatcctcccagcagctccaagaggcggagctatcaatttcacatacagacaaggaaaccaaggcttggagagttgaagccaccgtccaagaacacac

SEQ ID NO: 140511 - DNA, 78 bp, Homo sapiens
  chr2:3290885-3290963
  hypo
ctgcagcaccaagctcgttcaccacgctctagaaaactcattcaacatgttccacaaagctcgtccaccacactccag

SEQ ID NO: 140512 - DNA, 301 bp, Homo sapiens
  chr2:3291142-3291443
  hypo
tccagaaagcttgttcaccacaatccagaaagcgtgttcaccacgctccggaaagctcgttcacaatccagaaagcgcgttcaccacactccagaaagctcgttcaccacactccagaaagttcgttcaccacactccagaaagtttgttcaccacgctccagaaagctcgttcaccacaatctagaaagcgcgttcaccacgctccagaaagcacgttcaccatgctccagaaagttcattcaggctccagaaagttcgttcaccacgctccggaaagctcgttcaccacaatccggaaa

SEQ ID NO: 140513 - DNA, 30 bp, Homo sapiens
  chr2:3291855-3291885
  hypo
ggtggcatcctgatgcggtggcgtcatggc

SEQ ID NO: 140514 - DNA, 30 bp, Homo sapiens
  chr2:3292189-3292219
  hypo
tgaacatgagtctcacgtggctggggctgc

SEQ ID NO: 140515 - DNA, 79 bp, Homo sapiens
  chr2:3292427-3292506
  hypo
ctggactttgccaaacgtgaagatcccgagacaagcccaaccttccatcaagaccaggaaacactgctcagcaggcacg

SEQ ID NO: 140516 - DNA, 473 bp, Homo sapiens
  chr2:3293007-3293480
  hypo
atcatttcgctgtctctctcttctctctgggtgatcctccaaattatagttttaaaacaaagaacgccgagctcagggttttctctctgtccagacagaggatggggcgtgtgacccagggacccagagtatgttgttggatctcaaatgcctacaaaaatgacagaaggaacagtctcgtcctctgtgggagaagggcaatggcagacccaaaaccgaactgagggaccacgggatcctgggagccatgccctgctccccactctgcaccagcctcctggccttccgcttctgtgctggttccctcggtctccctcccagcttgtaaacgaggcatgcccagagccatccgtgatcctgtctccctatgtgcaccatgtctaaaatgagccccagggctttgaatcccgtagggtgtgtcaacagcacccaattcacatttcccatgctcatctccccgacgcaggctccca

SEQ ID NO: 140517 - DNA, 104 bp, Homo sapiens
  chr2:3294540-3294644
  hypo
catgaaatggaccgtcggtcatctgggtctttcgcgaatcaaccagcactaattgccatcagattgcatgtgtcagcacacacagacagcgcttccatcacggc

SEQ ID NO: 140518 - DNA, 192 bp, Homo sapiens
  chr2:3303472-3303664
  hypo
aggttttgccaaatcacggaagacagacaacctggcagtttacatgcaatcttatacgtccctaagatgtcattcaccaagctgcattccctctcttgacagtctgtagaaagcttggttctctaggcagtgagtgaaaaggatctcgttcccagtctcggcaccaccactcacagtcgagtgatcctgggc

SEQ ID NO: 140519 - DNA, 310 bp, Homo sapiens
  chr2:3313497-3313807
  hypo
cttgagaccccaaaacgacagatgcttcccgatgggagtgaaggttgaagagaccggtccacacctccttctgttctaacaccccccttactacctgttcaaaggaggtaatcatgtgggagagaggcagcagagctgggggttaggaaagagacggtggtgtgggtaggattctccctgcaggctctggcagcgcccctgtgtacgcacaggtgtgcaggctctggcagtgcccgtgtacgcacagggcagggacgctccctgcgctgctccaaactggaatattcgcgtctccccactgcagacacca

SEQ ID NO: 140520 - DNA, 188 bp, Homo sapiens; identical to SEQ ID NO: 15784
  chr2:3321053-3321241
  hypo

SEQ ID NO: 140521 - DNA, 168 bp, Homo sapiens
  chr2:3321983-3322151
  hypo
ggagaagctggccccggttctttacagtcttactggaaaaattaattcaaattgggctttgtctaagcaccccctcgtgggctgaaacctggaggaagggccataaacaaagcacccggcaaatgatagagcaggacgccgtgaggagccgtcgtgggctgctccagg

SEQ ID NO: 140522 - DNA, 30 bp, Homo sapiens; identical to SEQ ID NO: 62511
  chr2:3322500-3322530
  hypo

SEQ ID NO: 140523 - DNA, 92 bp, Homo sapiens
  chr2:3325163-3325255
  hypo
ctgcccccgccgccccgtctttaagcaggcacttgacgatgaggctgatggattccaacttttctccccacctctcacgtactccattcttt

SEQ ID NO: 140524 - DNA, 30 bp, Homo sapiens
  chr2:3325638-3325668
  hypo
acgctgcctcatccacggactcctcagcag

SEQ ID NO: 140525 - DNA, 30 bp, Homo sapiens; identical to SEQ ID NO: 62512
  chr2:3325946-3325976
  hypo

SEQ ID NO: 140526 - DNA, 30 bp, Homo sapiens
  chr2:3331926-3331956
  hypo
ccaggtccaaacatccgtgctcacacctgt

SEQ ID NO: 140527 - DNA, 338 bp, Homo sapiens; identical to SEQ ID NO: 62513
  chr2:3346920-3347258
  hypo

SEQ ID NO: 140528 - DNA, 38 bp, Homo sapiens; identical to SEQ ID NO: 62514
  chr2:3347545-3347583
  hypo

SEQ ID NO: 140529 - DNA, 43 bp, Homo sapiens
  chr2:3347858-3347901
  hypo
attaaaaaatcaagaggcacccgcctagggaaagtgaatgatc

SEQ ID NO: 140530 - DNA, 71 bp, Homo sapiens
  chr2:3349536-3349607
  hypo
ctgtttctctttacacggatgcacatgtaggaagggaatgcggccccggggcaccacgcttatctttccct

SEQ ID NO: 140531 - DNA, 560 bp, Homo sapiens
  chr2:3352457-3353017
  hypo
ctgcattatgcagtaacgatgcaggtaccgggcattttccagggaatcaacgactgaaaggagcgaggacctgaggcaacaccaggagctattaacccttcccagccaccactccccaggagagctggagctccagagtgagggatggcggcttccgactgtgcaggaggagaccagactccgttgtcacagaaggcaggggcagggctgcagtccacagccagtggagccttcccggcgtctctcctggtctgtgcacatgcgcacaggcgggctgctcgcagccggaaccatggggcccaggctgttcaggatggagctgtcctgattttcaggacatctcaccccagagacacggcatggcaacagcacgggtgcaccctttccacgtgtgtctgtacaaaagtgtacacttcaggtgcaagagcatacccatggcacatgcctcagagctgaactgcaaattcaaaggagagggaagcgagcagagagaggcagacatgcaggtttcagtcccgattctgccacgcaccagctccacactgcgtggggccacctgc

SEQ ID NO: 140532 - DNA, 30 bp, Homo sapiens
  chr2:3353353-3353383
  hypo
gagcatgccaggagacggggacagggagga

SEQ ID NO: 140533 - DNA, 135 bp, Homo sapiens; identical to SEQ ID NO: 62516
  chr2:3372624-3372759
  hypo

SEQ ID NO: 140534 - DNA, 23 bp, Homo sapiens
  chr2:3373014-3373037
  hypo
tcagggaggagccaagatggccg

SEQ ID NO: 140535 - DNA, 31 bp, Homo sapiens; identical to SEQ ID NO: 15788
  chr2:3382209-3382240
  hypo

SEQ ID NO: 140536 - DNA, 86 bp, Homo sapiens; identical to SEQ ID NO: 62519
  chr2:3391388-3391474
  hypo

SEQ ID NO: 140537 - DNA, 30 bp, Homo sapiens; identical to SEQ ID NO: 15790
  chr2:3391940-3391970
  hypo

SEQ ID NO: 140538 - DNA, 30 bp, Homo sapiens; identical to SEQ ID NO: 62521
  chr2:3392484-3392514
  hypo

SEQ ID NO: 140539 - DNA, 493 bp, Homo sapiens; identical to SEQ ID NO: 15791
  chr2:3418352-3418845
  hypo

SEQ ID NO: 140540 - DNA, 150 bp, Homo sapiens
  chr2:3425449-3425599
  hypo
attgcctaattacacgtgcagcgttgacaaatggcatgcccctccgtgccgtcagcacactgacgttgtcaccattactaacggctggctggcgctgcttccagcaaggtgagcagctgtggccagtggctatgcgtttgggtcatggat

SEQ ID NO: 140541 - DNA, 215 bp, Homo sapiens
  chr2:3427285-3427500
  hypo
cccagccccggcacccgccatctactctgcttctgtgagttcagtgttttcagattccatgtgtaagtgaggtcacacggtgtttgtctttctgtgcctggcttgtttgtctaacgtcatgtcccctaggctcatccacagcacaaacgacgggatttcctccatgaaagctgagtggtattccactgtgcgtcatgccacgttcctttatccgt

SEQ ID NO: 140542 - DNA, 30 bp, Homo sapiens
  chr2:3428771-3428801
  hypo
acagagatgcagagcggtggaaccaaacgt

SEQ ID NO: 140543 - DNA, 30 bp, Homo sapiens
  chr2:3446617-3446647
  hypo
actatattccagatccgaatattcatcgct

SEQ ID NO: 140544 - DNA, 155 bp, Homo sapiens
  chr2:3446896-3447051
  hypo
ttcttcctcttcttagcgcacgcaaagccaggcagctctgggtgatggatttttcaagtccagctcccttgcctcctgtcagaggtggaacgcaggctccagggccacatggaatccagtgggaggcccatccccagggccgaggcctgagacgc

SEQ ID NO: 140545 - DNA, 30 bp, Homo sapiens; identical to SEQ ID NO: 62524
  chr2:3447558-3447588
  hypo

SEQ ID NO: 140546 - DNA, 178 bp, Homo sapiens
  chr2:3449778-3449956
  hypo
agggttggggagaaacgagaagggttagtgcagtcacatcctaggaacgtttctctcaggctgactgggcgtggggccaccgtcagtgagagagccactcatgcttctcgttccctccgctggtctacagttccacctgcctctcatcttgtgaatacataaccgcacttcaggtatc

SEQ ID NO: 140547 - DNA, 361 bp, Homo sapiens
  chr2:3452856-3453217
  hypo
agtgaagaagaacatataccacgagttaaaataaatttcccgtgctgctgaaaaatcagtgccgccatcctctgaccctgctcctcccacgcgccctgcaggctgtctccctctggggtcgagagagcttcacagaccatttgggaaagagccaagcaaacacacttctgcaagccatttgcataagtagacataatccatacggaatgatgcactgttcggttgtagtttcattcgtcagtgacctgcatctgcccgcccagtcttgagttcagctccatccctccctgcagttccgcagcctccggcttccccacctcagcttggctgagagtttcacgttcatccaagtgcttcttta

SEQ ID NO: 140548 - DNA, 193 bp, Homo sapiens
  chr2:3456146-3456339
  hypo
taagtccaggccacacgcaagggatgggaatgagactctgccttttgaggagtgctcaggaatgcatggccgcatttaaactgccacactgtggccggtcagctgggtctgttccacttcaggatccacaggcctctcctggccctgcaggacaggctcccctgcctccactccagcccgtcctggtggttgt

SEQ ID NO: 140549 - DNA, 81 bp, Homo sapiens; identical to SEQ ID NO: 62527
  chr2:3458784-3458865
  hypo

SEQ ID NO: 140550 - DNA, 176 bp, Homo sapiens; identical to SEQ ID NO: 1285
  chr2:3465088-3465264
  hypo

SEQ ID NO: 140551 - DNA, 44 bp, Homo sapiens; identical to SEQ ID NO: 62529
  chr2:3467374-3467418
  hypo

SEQ ID NO: 140552 - DNA, 331 bp, Homo sapiens
  chr2:3469089-3469420
  hypo
gaccctcaggcccaactaaaccgcgacagcccccggtgacaggcaggaccccgccgttgcgatgcgcacagctcagaatcccggcccgactgcagtcgggagagcagccgccccctggcagccgagcaccgcgtgctggtttccagcttccccgccagctcctgcgtcagcgtgtcctctctctacaccgcgtctgtatacacttgtgctcttctacacgtgtgaaacccacagtgctgttctcagctctaaagtacgttgggtttttcttcccacaggattatgtgctggccgtggaggcgtatcattcggttatcaagtattacccaga

SEQ ID NO: 140553 - DNA, 30 bp, Homo sapiens
  chr2:3471056-3471086
  hypo
ggaagcacccaggccgactggactcaccga

SEQ ID NO: 140554 - DNA, 30 bp, Homo sapiens; identical to SEQ ID NO: 62530
  chr2:3471330-3471360
  hypo

SEQ ID NO: 140555 - DNA, 30 bp, Homo sapiens; identical to SEQ ID NO: 62531
  chr2:3482992-3483022
  hypo

SEQ ID NO: 140556 - DNA, 43 bp, Homo sapiens; identical to SEQ ID NO: 62532
  chr2:3498264-3498307
  hypo

SEQ ID NO: 140557 - DNA, 30 bp, Homo sapiens
  chr2:3498914-3498944
  hypo
agtttatccaccacccgatgctggctaact

SEQ ID NO: 140558 - DNA, 192 bp, Homo sapiens; identical to SEQ ID NO: 62533
  chr2:3504355-3504547
  hypo

SEQ ID NO: 140559 - DNA, 31 bp, Homo sapiens; identical to SEQ ID NO: 62534
  chr2:3507168-3507199
  hypo

SEQ ID NO: 140560 - DNA, 356 bp, Homo sapiens; identical to SEQ ID NO: 15797
  chr2:3582015-3582371
  hypo

SEQ ID NO: 140561 - DNA, 344 bp, Homo sapiens
  chr2:3586877-3587221
  hypo
tgcgggcagagacagcggtccacttgccctgtttcccacttcattcatatttgtctttgtccaaaaccctaccaccatatactggcggcttcccgtatcaccaaagaatcttaatttgggggcgtattttgatgaaagttgttctttgacaaatacttatgtcaacacaatatcagagtcaccttgtgccaattcctgtctctcaatgggcaattaagaaccaaagctgcttgaacgagctggccagcatagtcaacgccttctgtgtgccaggagacacaatgcaggcagatgcagccggccctccccatgttacccctgagtgtttacgaactgaggaacca

SEQ ID NO: 140562 - DNA, 30 bp, Homo sapiens; identical to SEQ ID NO: 15798
  chr2:3593320-3593350
  hypo

SEQ ID NO: 140563 - DNA, 72 bp, Homo sapiens; identical to SEQ ID NO: 15799
  chr2:3593597-3593669
  hypo

SEQ ID NO: 140564 - DNA, 30 bp, Homo sapiens
  chr2:3624156-3624186
  hypo
agtccggctagtacgcgaattggagaaaaa

SEQ ID NO: 140565 - DNA, 30 bp, Homo sapiens; identical to SEQ ID NO: 62538
  chr2:3634056-3634086
  hypo

SEQ ID NO: 140566 - DNA, 81 bp, Homo sapiens; identical to SEQ ID NO: 62539
  chr2:3648214-3648295
  hypo

SEQ ID NO: 140567 - DNA, 187 bp, Homo sapiens
  chr2:3649282-3649469
  hypo
aagttctgtcatcttcggcaagtgaagctctcccacgcgcgtgcccaagccctggctccgccctaactctaatcctctctcccttcccgccccgccccttcatcaacccttgcctcagtggaaacggacatttaacatggaatgttcatggcagtaaccctagccgtctccacgtcatctttttgtc

SEQ ID NO: 140568 - DNA, 404 bp, Homo sapiens; identical to SEQ ID NO: 15800
  chr2:3675047-3675451
  hypo

SEQ ID NO: 140569 - DNA, 471 bp, Homo sapiens; identical to SEQ ID NO: 62541
  chr2:3681099-3681570
  hypo

SEQ ID NO: 140570 - DNA, 291 bp, Homo sapiens; identical to SEQ ID NO: 62542
  chr2:3685678-3685969
  hypo

SEQ ID NO: 140571 - DNA, 171 bp, Homo sapiens; identical to SEQ ID NO: 62543
  chr2:3695325-3695496
  hypo

SEQ ID NO: 140572 - DNA, 30 bp, Homo sapiens; identical to SEQ ID NO: 62544
  chr2:3700892-3700922
  hypo

SEQ ID NO: 140573 - DNA, 309 bp, Homo sapiens; identical to SEQ ID NO: 15802
  chr2:3714207-3714516
  hypo

SEQ ID NO: 140574 - DNA, 30 bp, Homo sapiens
  chr2:3794777-3794807
  hypo
cctgtgaactggccccggcccctctgaggc

SEQ ID NO: 140575 - DNA, 294 bp, Homo sapiens
  chr2:3810771-3811065
  hypo
ggcatttggatgagcactggccgactgccagcctggctctgagatccctccctgtctgaagtgttgtggtccccagcacagccccaggaggcaggcaccatctccattctatcgcacctcagagagacctgagaccacacagctgacgtggtgggcccgcgacccagcgctggtgagcgcggctcgagatgtcacccagctcaggagatcccactgccagccaggctcctagaatggtcatggatttttctaaaatggaaatttaattagcacggtaactgaaggctccttgcc

SEQ ID NO: 140576 - DNA, 89 bp, Homo sapiens
  chr2:3833856-3833945
  hypo
gatgtttcccgcccccgccctccacgtgcagtgaacctctcgtgcagatgtgtcccgcctgtgcacggagcctccggtgtgcgtgtgtc

SEQ ID NO: 140577 - DNA, 30 bp, Homo sapiens
  chr2:3834301-3834331
  hypo
gtgcacggagcctctcgtgtggatgtgcag

SEQ ID NO: 140578 - DNA, 16 bp, Homo sapiens
  chr2:3884451-3884467
  hypo
aaaaaaaaaaaaaaag

SEQ ID NO: 140579 - DNA, 37 bp, Homo sapiens
  chr2:3888394-3888431
  hypo
cgggtggccgctctgcgagtttcgcagtgaaagtgtc

SEQ ID NO: 140580 - DNA, 43 bp, Homo sapiens; identical to SEQ ID NO: 62548
  chr2:3919765-3919808
  hypo

SEQ ID NO: 140581 - DNA, 266 bp, Homo sapiens; identical to SEQ ID NO: 62549
  chr2:3990854-3991120
  hypo

SEQ ID NO: 140582 - DNA, 30 bp, Homo sapiens
  chr2:4017515-4017545
  hypo
tttggtgatagaaaccgtgggtctggcgta

SEQ ID NO: 140583 - DNA, 30 bp, Homo sapiens
  chr2:4019935-4019965
  hypo
ccgctgcatctatcccgaggctgcgtccac

SEQ ID NO: 140584 - DNA, 31 bp, Homo sapiens; identical to SEQ ID NO: 15803
  chr2:4271695-4271726
  hypo

SEQ ID NO: 140585 - DNA, 185 bp, Homo sapiens; identical to SEQ ID NO: 62551
  chr2:4976753-4976938
  hypo

SEQ ID NO: 140586 - DNA, 17 bp, Homo sapiens
  chr2:5214016-5214033
  hypo
ctctgtctcaaaaaaaa

SEQ ID NO: 140587 - DNA, 103 bp, Homo sapiens
  chr2:5584525-5584628
  hypo
gacagaggcctgctccgctcgcgtgagaactcacggcacccaccgcaagagagaaactcaaggggggacaatgaccgcaggaccaaggcgcaggaagggcatc

SEQ ID NO: 140588 - DNA, 80 bp, Homo sapiens; identical to SEQ ID NO: 62553
  chr2:5694954-5695034
  hypo

SEQ ID NO: 140589 - DNA, 142 bp, Homo sapiens; identical to SEQ ID NO: 62554
  chr2:6024404-6024546
  hypo

SEQ ID NO: 140590 - DNA, 212 bp, Homo sapiens; identical to SEQ ID NO: 15804
  chr2:6402888-6403100
  hypo

SEQ ID NO: 140591 - DNA, 30 bp, Homo sapiens
  chr2:6406013-6406043
  hypo
agagaggcaaaaccacgagttgggtacacg

SEQ ID NO: 140592 - DNA, 111 bp, Homo sapiens
  chr2:6635590-6635701
  hypo
cgagccgatgaggatcggggcgtcctgtcggacagtaggcaccaggtgaccgccaagtgcttggacccaggcagtctggcctgggaagaaggtccccggggagcagaacag

SEQ ID NO: 140593 - DNA, 30 bp, Homo sapiens; identical to SEQ ID NO: 62556
  chr2:7001576-7001606
  hypo

SEQ ID NO: 140594 - DNA, 1045 bp, Homo sapiens; identical to SEQ ID NO: 105430
  chr2:7005153-7006198
  hypo

SEQ ID NO: 140595 - DNA, 692 bp, Homo sapiens; identical to SEQ ID NO: 105432
  chr2:7057747-7058439
  hypo

SEQ ID NO: 140596 - DNA, 27 bp, Homo sapiens
  chr2:7063031-7063058
  hypo
ggcgtgagccaccgcgcccggcctcct

SEQ ID NO: 140597 - DNA, 31 bp, Homo sapiens; identical to SEQ ID NO: 62560
  chr2:7064666-7064697
  hypo

SEQ ID NO: 140598 - DNA, 271 bp, Homo sapiens; identical to SEQ ID NO: 15806
  chr2:7073080-7073351
  hypo

SEQ ID NO: 140599 - DNA, 30 bp, Homo sapiens
  chr2:7092201-7092231
  hypo
gtgtttctgatttgtcgacttttattttat

SEQ ID NO: 140600 - DNA, 131 bp, Homo sapiens; identical to SEQ ID NO: 62562
  chr2:7099077-7099208
  hypo

SEQ ID NO: 140601 - DNA, 99 bp, Homo sapiens; identical to SEQ ID NO: 15807
  chr2:7109818-7109917
  hypo

SEQ ID NO: 140602 - DNA, 137 bp, Homo sapiens
  chr2:7128199-7128336
  hypo
cgtgtcaaagtgtttcgtttaaaaataaacttttattttagggcagtttagatttagatttacagatttagttttagatacagatttagatggaccgatatggatttagatttagaaaatgacgcaggtagtacaga

SEQ ID NO: 140603 - DNA, 47 bp, Homo sapiens
  chr2:7149568-7149615
  hypo
tgagagcacaggaggcggcgggtctaaaggctcgacagaagcaagaa

SEQ ID NO: 140604 - DNA, 30 bp, Homo sapiens
  chr2:7150267-7150297
  hypo
gtgtaagcaatattccggagcaccgctgtc

SEQ ID NO: 140605 - DNA, 299 bp, Homo sapiens; identical to SEQ ID NO: 15808
  chr2:7164397-7164696
  hypo

SEQ ID NO: 140606 - DNA, 30 bp, Homo sapiens
  chr2:7177024-7177054
  hypo
gattatgagaggtgccgggctgtgcatggg

SEQ ID NO: 140607 - DNA, 34 bp, Homo sapiens; identical to SEQ ID NO: 62565
  chr2:7180009-7180043
  hypo

SEQ ID NO: 140608 - DNA, 113 bp, Homo sapiens; identical to SEQ ID NO: 62566
  chr2:7229709-7229822
  hypo

SEQ ID NO: 140609 - DNA, 103 bp, Homo sapiens
  chr2:7237052-7237155
  hypo
tcacactctgccattttgcctcttagtgcgcatgtgttgagcccactcacctcacgccggaggagatctatctgaaagctgcgggcttcaggtgtttctatct

SEQ ID NO: 140610 - DNA, 30 bp, Homo sapiens
  chr2:7405884-7405914
  hypo
cagtaactgtgggaacgttatcaaagctct

SEQ ID NO: 140611 - DNA, 30 bp, Homo sapiens
  chr2:7408485-7408515
  hypo
gggggtagcttttagcggtgcagcgatttg

SEQ ID NO: 140612 - DNA, 30 bp, Homo sapiens
  chr2:7497773-7497803
  hypo
catctgaaagcatcccggggtgcacactag

SEQ ID NO: 140613 - DNA, 30 bp, Homo sapiens
  chr2:7532284-7532314
  hypo
aatgcccgtgggatgcgccccctccgtaca

SEQ ID NO: 140614 - DNA, 32 bp, Homo sapiens; identical to SEQ ID NO: 105433
  chr2:7571090-7571122
  hypo

SEQ ID NO: 140615 - DNA, 319 bp, Homo sapiens; identical to SEQ ID NO: 37112
  chr2:7571157-7571476
  hypo

SEQ ID NO: 140616 - DNA, 86 bp, Homo sapiens; identical to SEQ ID NO: 1302
  chr2:7571576-7571662
  hypo

SEQ ID NO: 140617 - DNA, 30 bp, Homo sapiens
  chr2:7597320-7597350
  hypo
gacgcaccactgctgcgattgagcagtgat

SEQ ID NO: 140618 - DNA, 183 bp, Homo sapiens; identical to SEQ ID NO: 15812
  chr2:7907357-7907540
  hypo

SEQ ID NO: 140619 - DNA, 30 bp, Homo sapiens; identical to SEQ ID NO: 15813
  chr2:7909326-7909356
  hypo

SEQ ID NO: 140620 - DNA, 42 bp, Homo sapiens
  chr2:7931303-7931345
  hypo
aggcaccgccgggcgcggttgctcacgcctgtaatcccagca

SEQ ID NO: 140621 - DNA, 102 bp, Homo sapiens
  chr2:7931524-7931626
  hypo
gagcttggaggcaccgaaaaaaagccttgggaagcatcctgggaaggaatgcactttggctggaacatactgtatgtgaagatgagccgggcaagatgagcc

SEQ ID NO: 140622 - DNA, 152 bp, Homo sapiens; identical to SEQ ID NO: 62572
  chr2:8214268-8214420
  hypo

SEQ ID NO: 140623 - DNA, 30 bp, Homo sapiens; identical to SEQ ID NO: 15814
  chr2:8234819-8234849
  hypo

SEQ ID NO: 140624 - DNA, 30 bp, Homo sapiens
  chr2:8260833-8260863
  hypo
agagacgctcagattcgacgttaggactcc

SEQ ID NO: 140625 - DNA, 30 bp, Homo sapiens; identical to SEQ ID NO: 15815
  chr2:8301444-8301474
  hypo

SEQ ID NO: 140626 - DNA, 30 bp, Homo sapiens; identical to SEQ ID NO: 62575
  chr2:8359034-8359064
  hypo

SEQ ID NO: 140627 - DNA, 156 bp, Homo sapiens
  chr2:8364596-8364752
  hypo
gattccagagctgctcgctcctccctcctctgcttcttgctttgctggacacccgggtctccttggtcttccagatcttccccgtgttattccctcagactggaaactgctcccctctgtggggcgtggccaatttctgctcgtttttcggaggtg

SEQ ID NO: 140628 - DNA, 30 bp, Homo sapiens; identical to SEQ ID NO: 15816
  chr2:8395180-8395210
  hypo

SEQ ID NO: 140629 - DNA, 30 bp, Homo sapiens; identical to SEQ ID NO: 15817
  chr2:8406381-8406411
  hypo

SEQ ID NO: 140630 - DNA, 30 bp, Homo sapiens; identical to SEQ ID NO: 15818
  chr2:8448296-8448326
  hypo

SEQ ID NO: 140631 - DNA, 58 bp, Homo sapiens
  chr2:8476166-8476224
  hypo
catagggagtggcactgtgctcggcatttttacatacgtcaccttgaatgattctcct

SEQ ID NO: 140632 - DNA, 121 bp, Homo sapiens; identical to SEQ ID NO: 15819
  chr2:8647531-8647652
  hypo

SEQ ID NO: 140633 - DNA, 126 bp, Homo sapiens; identical to SEQ ID NO: 62580
  chr2:8647899-8648025
  hypo

SEQ ID NO: 140634 - DNA, 32 bp, Homo sapiens; identical to SEQ ID NO: 62581
  chr2:8648362-8648394
  hypo

SEQ ID NO: 140635 - DNA, 270 bp, Homo sapiens
  chr2:8658285-8658555
  hypo
ggattccagtggggtgcgggagtgggaagcactccatccgggccgagggaggagtcatttcccagctccagtcagcacctgtttctccgcctctggcccatggtaggaagggagctgccaggcatcccgcccttgaggcctctgagcgaacgagagctggttcacaagctcggaacctggaggctcagaatgcggcggctgctagctgtgtgacaatggacaggtcactgaggtccctggcaatgggtgggaggtcgttagcgctccttg

SEQ ID NO: 140636 - DNA, 69 bp, Homo sapiens
  chr2:8668755-8668824
  hypo
tttccggcacatcctcggtccactcgatgtgtattcacctgccaaaacctgaaacgtacagacacattc

SEQ ID NO: 140637 - DNA, 166 bp, Homo sapiens; identical to SEQ ID NO: 15821
  chr2:8691180-8691346
  hypo

SEQ ID NO: 140638 - DNA, 184 bp, Homo sapiens; identical to SEQ ID NO: 62584
  chr2:8706972-8707156
  hypo

SEQ ID NO: 140639 - DNA, 30 bp, Homo sapiens
  chr2:8708037-8708067
  hypo
gctctgctcctcggccgcaatttgacaaaa

SEQ ID NO: 140640 - DNA, 193 bp, Homo sapiens
  chr2:8713197-8713390
  hypo
cctagatgccaacgtcgggttctaccgctgactagctgcgtcttggccatgttatttcacttctttgtgcctcagtttcctcactggtaaaatggaaagaacaagaagaataatgtctacattatgagagcgttatgccatttcagtgaggtgatacttgtgccagctccgcgaagccagaggcagacagcct

SEQ ID NO: 140641 - DNA, 30 bp, Homo sapiens
  chr2:8713732-8713762
  hypo
ctgtctgggaagaaccgccaccccctgggc

SEQ ID NO: 140642 - DNA, 30 bp, Homo sapiens
  chr2:8732918-8732948
  hypo
caagagtcagtgggacggggcaatggagag

SEQ ID NO: 140643 - DNA, 380 bp, Homo sapiens
  chr2:8735924-8736304
  hypo
aagaaagcagccacacggcagcccgaatgctcatgcgttccagagcattctccaggaactttctcattcatccctccacacttttctgcttttcaaaataatgctggtacagggccagacacacacgcatgccacacacatgcactagactccctacaggctcacagacacacaccagtgcacacactgcgcgttcctctctgctgacatctgagcgaggcaggttcacaagcagccagcggcctcccacatccacccgtcgcaaaggcatcagccttctcccctttctcactttcaacagccccttcgttcacctacgtgtggacctgtggccaaagctgcagtattcgggagagaaaaggaatcgaatgcttggtttt

SEQ ID NO: 140644 - DNA, 225 bp, Homo sapiens
  chr2:8768416-8768641
  hypo
tccctcccagcagggcgtccctccgctgcaccctcatggatgccccatccacctgatggcagcccctccttagttctggccactccttcagcaccaaggcctgggaggtggcttaggaggtgaagaggaaggagcagcagggatgccccgaggcagacgcccgggagtcatgcactagggcctcccagggctgactgggccaggcacctgcgcaaccctcactga

SEQ ID NO: 140645 - DNA, 30 bp, Homo sapiens
  chr2:8776236-8776266
  hypo
ctcatctgtgactggcggcatccacccctc

SEQ ID NO: 140646 - DNA, 30 bp, Homo sapiens; identical to SEQ ID NO: 15824
  chr2:8781806-8781836
  hypo

SEQ ID NO: 140647 - DNA, 30 bp, Homo sapiens; identical to SEQ ID NO: 62589
  chr2:8785642-8785672
  hypo

SEQ ID NO: 140648 - DNA, 303 bp, Homo sapiens; identical to SEQ ID NO: 105436
  chr2:8818277-8818580
  hypo

SEQ ID NO: 140649 - DNA, 666 bp, Homo sapiens; identical to SEQ ID NO: 105437
  chr2:8818828-8819494
  hypo

SEQ ID NO: 140650 - DNA, 30 bp, Homo sapiens
  chr2:8821334-8821364
  hypo
gagctccttagcgaccggtgaggttgggca

SEQ ID NO: 140651 - DNA, 170 bp, Homo sapiens; identical to SEQ ID NO: 37116
  chr2:8821591-8821761
  hypo

SEQ ID NO: 140652 - DNA, 710 bp, Homo sapiens; identical to SEQ ID NO: 105439
  chr2:8821975-8822685
  hypo

SEQ ID NO: 140653 - DNA, 209 bp, Homo sapiens; identical to SEQ ID NO: 37119
  chr2:8825634-8825843
  hypo

SEQ ID NO: 140654 - DNA, 157 bp, Homo sapiens; identical to SEQ ID NO: 62595
  chr2:8833972-8834129
  hypo

SEQ ID NO: 140655 - DNA, 591 bp, Homo sapiens; identical to SEQ ID NO: 62596
  chr2:8834447-8835038
  hypo

SEQ ID NO: 140656 - DNA, 23 bp, Homo sapiens
  chr2:8835578-8835601
  hypo
attccaggcgtgaccccctgcgc

SEQ ID NO: 140657 - DNA, 172 bp, Homo sapiens; identical to SEQ ID NO: 15830
  chr2:8854101-8854273
  hypo

SEQ ID NO: 140658 - DNA, 232 bp, Homo sapiens; identical to SEQ ID NO: 62598
  chr2:8860512-8860744
  hypo

SEQ ID NO: 140659 - DNA, 63 bp, Homo sapiens; identical to SEQ ID NO: 62599
  chr2:8868789-8868852
  hypo

SEQ ID NO: 140660 - DNA, 293 bp, Homo sapiens
  chr2:8870178-8870471
  hypo
gtcaccagccctccccgcatctactctcctaacagctcaggacagccccgtcacactactgccagccctggtgactcactttgttggcaatttttaaagccctcttcattatgtacttcctactcttcagaacctctgtgataagcaatacccctgccatacagaacgctggatctcggtttactcagcctctccctgtagcgtcacaggctgtgcactcacctaggtgagcccctaagagcagggtttgcttctgcttcacctaacgccacgtcttccctcaaatgtgtggt

SEQ ID NO: 140661 - DNA, 31 bp, Homo sapiens; identical to SEQ ID NO: 15832
  chr2:8875261-8875292
  hypo

SEQ ID NO: 140662 - DNA, 30 bp, Homo sapiens
  chr2:8917018-8917048
  hypo
tgtcctgaaacagcacgtcgtcagtgagaa

SEQ ID NO: 140663 - DNA, 30 bp, Homo sapiens; identical to SEQ ID NO: 62602
  chr2:8936669-8936699
  hypo

SEQ ID NO: 140664 - DNA, 318 bp, Homo sapiens; identical to SEQ ID NO: 62603
  chr2:8978037-8978355
  hypo

SEQ ID NO: 140665 - DNA, 188 bp, Homo sapiens; identical to SEQ ID NO: 15834
  chr2:8983019-8983207
  hypo

SEQ ID NO: 140666 - DNA, 31 bp, Homo sapiens
  chr2:8997961-8997992
  hypo
ctgcctgcagagtcgcggctgtgccccgtgc

SEQ ID NO: 140667 - DNA, 167 bp, Homo sapiens; identical to SEQ ID NO: 15835
  chr2:9002473-9002640
  hypo

SEQ ID NO: 140668 - DNA, 30 bp, Homo sapiens; identical to SEQ ID NO: 62607
  chr2:9066723-9066753
  hypo

SEQ ID NO: 140669 - DNA, 105 bp, Homo sapiens
  chr2:9076990-9077095
  hypo
aagttataaagaaaattttcagcttaacttctcaaggttaacaggcttccactcttgaatatcgcagaacacgccacattgtgctgccttcgccagggaaaatat

SEQ ID NO: 140670 - DNA, 390 bp, Homo sapiens; identical to SEQ ID NO: 15836
  chr2:9078567-9078957
  hypo

SEQ ID NO: 140671 - DNA, 30 bp, Homo sapiens
  chr2:9079528-9079558
  hypo
tggagccaaagaaaacggcaggacagagtc

SEQ ID NO: 140672 - DNA, 31 bp, Homo sapiens; identical to SEQ ID NO: 62609
  chr2:9119835-9119866
  hypo

SEQ ID NO: 140673 - DNA, 102 bp, Homo sapiens; identical to SEQ ID NO: 62610
  chr2:9134398-9134500
  hypo

SEQ ID NO: 140674 - DNA, 102 bp, Homo sapiens
  chr2:9135653-9135755
  hypo
tgccttacgttttggcgagtacatgttaatgtgttaaatataaacattttttaaaaatacattccattttttttttttttttttgagacggagtctcgctct

SEQ ID NO: 140675 - DNA, 211 bp, Homo sapiens; identical to SEQ ID NO: 37122
  chr2:9143657-9143868
  hypo

SEQ ID NO: 140676 - DNA, 460 bp, Homo sapiens; identical to SEQ ID NO: 37123
  chr2:9144089-9144549
  hypo

SEQ ID NO: 140677 - DNA, 30 bp, Homo sapiens
  chr2:9167977-9168007
  hypo
aagagaacaaaagagcggttgctgatgtat

SEQ ID NO: 140678 - DNA, 30 bp, Homo sapiens; identical to SEQ ID NO: 62613
  chr2:9192102-9192132
  hypo

SEQ ID NO: 140679 - DNA, 30 bp, Homo sapiens; identical to SEQ ID NO: 15839
  chr2:9193456-9193486
  hypo

SEQ ID NO: 140680 - DNA, 24 bp, Homo sapiens
  chr2:9217108-9217132
  hypo
tgcgccattccacttcagcctggg

SEQ ID NO: 140681 - DNA, 97 bp, Homo sapiens; identical to SEQ ID NO: 15841
  chr2:9218663-9218760
  hypo

SEQ ID NO: 140682 - DNA, 32 bp, Homo sapiens; identical to SEQ ID NO: 62617
  chr2:9234916-9234948
  hypo

SEQ ID NO: 140683 - DNA, 797 bp, Homo sapiens
  chr2:9236515-9237312
  hypo
ctgaggaatcagctgcggcccgcagagaggcagggttttcccttggtggcacaggcagacacatacccggccccacagtggtctcctccatctggggtcccatcagagccatcgctccctcctggagttccgctcagtggcctgccccagggggcccccgcacagccacagggctgtgggaagggaatggtccaggcaggccggtcaggccggctcccccagatcccttggctccccccaggagctggcttctcactcctcacagacaacaagggcgctatgagatgtcatcagagatgccaccaaacaccacaggcaagggacccgtcactcagcccgggctgctgaacgtgctgaggcggctctgatatgcccagaaagtgcccaagcaggtgacacttgggccaggacaggcacacggagatgacctcccactgcctccccaaggatgaccctgctactctgactgagagggtcttcaggtcaagggcggggagggtggcaacagacaccaaagccgagggctctgagcaggctcagaagccgggtgtggagcgggagggtgggggcgcagtggcaggggctgctgcagggccagctgtgccagcaggggtgggggcaggggctcagcggagccggagtgccaggagctaaagaccacccacgccctcttctcggagggcgagcaggccagggagagcgacttaagccacatgaactttcccattatccctgaaggagcggggttcttgttggtattctacctgcacagctgcgtgagacgcagatatggaaaa

SEQ ID NO: 140684 - DNA, 31 bp, Homo sapiens; identical to SEQ ID NO: 62619
  chr2:9241807-9241838
  hypo

SEQ ID NO: 140685 - DNA, 271 bp, Homo sapiens
  chr2:9244225-9244496
  hypo
gcaacactcaacaaacgcttgtggaaggagtgaacaaatgacaagtcacgaaacctaaatacaggtatgtcacaagaagccctccaggcagcgagtcacttagcactgcacaggtagcaactttctaaaatattttacctttagtattgtcatttcatatttctgtctttctcttactttagtgtactattttatggtgtcttaaaccatcacgcaattccacgggtatgcagcacaaagaattgagaagtaattccgataagagcagggg

SEQ ID NO: 140686 - DNA, 26 bp, Homo sapiens
  chr2:9244769-9244795
  hypo
ggaaagggggccgggcgcgatggcgc

SEQ ID NO: 140687 - DNA, 266 bp, Homo sapiens; identical to SEQ ID NO: 15842
  chr2:9245034-9245300
  hypo

SEQ ID NO: 140688 - DNA, 142 bp, Homo sapiens
  chr2:9250219-9250361
  hypo
ttggaacctgtcgagcgccgaaggcccagccctgcggtctcgtgaccttgcccctgccctcccagagcagagtgctctgtggctccatcccctgcagagagcacaggctgggtgagagttggggcgccggggttgggactgc

SEQ ID NO: 140689 - DNA, 175 bp, Homo sapiens; identical to SEQ ID NO: 62622
  chr2:9250673-9250848
  hypo

SEQ ID NO: 140690 - DNA, 60 bp, Homo sapiens
  chr2:9251104-9251164
  hypo
aaggtagcaagacagcgccccctttgcccagctcagtgaagggccggggcagctgatgtg

SEQ ID NO: 140691 - DNA, 31 bp, Homo sapiens; identical to SEQ ID NO: 62624
  chr2:9266321-9266352
  hypo

SEQ ID NO: 140692 - DNA, 30 bp, Homo sapiens
  chr2:9276499-9276529
  hypo
agggtcctgacacccgggtggcctcaccca

SEQ ID NO: 140693 - DNA, 142 bp, Homo sapiens
  chr2:9289578-9289720
  hypo
gtaaagagcaggtgacgatcattggacaaaacccctgggccactttcccatctccagggcagcccctggctggggggatcctggtgacgttcagcggctctgggctctgtgtggacctggacagggccgaccagctccttcc

SEQ ID NO: 140694 - DNA, 189 bp, Homo sapiens; identical to SEQ ID NO: 62625
  chr2:9289932-9290121
  hypo

SEQ ID NO: 140695 - DNA, 31 bp, Homo sapiens; identical to SEQ ID NO: 62626
  chr2:9291497-9291528
  hypo

SEQ ID NO: 140696 - DNA, 31 bp, Homo sapiens; identical to SEQ ID NO: 62627
  chr2:9314160-9314191
  hypo

SEQ ID NO: 140697 - DNA, 1779 bp, Homo sapiens; identical to SEQ ID NO: 105449
  chr2:9346367-9348146
  hypo

SEQ ID NO: 140698 - DNA, 277 bp, Homo sapiens
  chr2:9352725-9353002
  hypo
caattcttcccatgcaccccacgtttccaggcaccggtgccttcctttgtggagcatatacatgcattccaggcccgcactgtctgatgaggcagcctaagacaaatccagctctcagccgccacattgcaagtactcagtagccacacgtggctggtggctaccatattggctcagcaaccaccgggagagccatcacctggaaacttgctgaaatgcagagccccgggttccacccaggacaatttttacagcatctccacgtacaccacaggca

SEQ ID NO: 140699 - DNA, 30 bp, Homo sapiens; identical to SEQ ID NO: 62630
  chr2:9369724-9369754
  hypo

SEQ ID NO: 140700 - DNA, 30 bp, Homo sapiens
  chr2:9388667-9388697
  hypo
cagcgttttgggtctcggtttcttcctctg

SEQ ID NO: 140701 - DNA, 30 bp, Homo sapiens; identical to SEQ ID NO: 15847
  chr2:9402088-9402118
  hypo

SEQ ID NO: 140702 - DNA, 175 bp, Homo sapiens; identical to SEQ ID NO: 62632
  chr2:9409364-9409539
  hypo

SEQ ID NO: 140703 - DNA, 96 bp, Homo sapiens
  chr2:9427257-9427353
  hypo
tgcttctgactgctgcggcatgctgcctggtgctgaggcgggaagttgctgggggcacacggtggagaaaacaagcagcaacgtggggaacaccct

SEQ ID NO: 140704 - DNA, 30 bp, Homo sapiens
  chr2:9455193-9455223
  hypo
tagggaagacgtttccgtcgaatagaacaa

SEQ ID NO: 140705 - DNA, 471 bp, Homo sapiens; identical to SEQ ID NO: 15849
  chr2:9455453-9455924
  hypo

SEQ ID NO: 140706 - DNA, 139 bp, Homo sapiens; identical to SEQ ID NO: 15850
  chr2:9456807-9456946
  hypo

SEQ ID NO: 140707 - DNA, 30 bp, Homo sapiens
  chr2:9472739-9472769
  hypo
cgctctctgtctgaccgtagggagaattgc

SEQ ID NO: 140708 - DNA, 232 bp, Homo sapiens
  chr2:9481655-9481887
  hypo
tctgattaatatgcgcggcacgaacagtgttagcggtgttgtcacatgatttcaccacttactttgtgcagggctttttttctcccccaaatcaatagacgtatttcttggttgtgcagttgagtctcctgacaggtttatttttagtctttcacagagacgctgtacaggtgagcagtatttctccacattccttccacagcattgttctcagcaacgttgaaagctggat

SEQ ID NO: 140709 - DNA, 31 bp, Homo sapiens; identical to SEQ ID NO: 62635
  chr2:9507573-9507604
  hypo

SEQ ID NO: 140710 - DNA, 181 bp, Homo sapiens; identical to SEQ ID NO: 15852
  chr2:9513161-9513342
  hypo

SEQ ID NO: 140711 - DNA, 30 bp, Homo sapiens; identical to SEQ ID NO: 62637
  chr2:9514856-9514886
  hypo

SEQ ID NO: 140712 - DNA, 489 bp, Homo sapiens
  chr2:9518891-9519380
  hypo
ccccagccatgtaggcagggacggtgccaggtcccaccaccttggcgatgatttacagaaaccgttcactcggggactgtctgcctttcctgtgcccgtagcccaggctccctgccgggcagtccctggtcgtccagcctgtgacacactatgctctctctctgttcctgttctcgggcagtgggaacctggataaacagacagggaaaggcagcacagccctgcactactgctgcctgaccgacaatgccgagtgcctcaagttgctcctgcgggggaaggcctccatcgagataggtgagtgggcccgggccccgggggtgggctcagctgcaccctggcctctgcctcctgtctgccatccaagcgctgctcttggaaacagggccaaccctgtgggctcttgttagtgccaaagagaaggagaacctaccgctaatgagaaagagcctctccctgcctgttccacgaggccgcattcaccatctg

SEQ ID NO: 140713 - DNA, 43 bp, Homo sapiens; identical to SEQ ID NO: 62639
  chr2:9608089-9608132
  hypo

SEQ ID NO: 140714 - DNA, 402 bp, Homo sapiens; identical to SEQ ID NO: 15853
  chr2:9609461-9609863
  hypo

SEQ ID NO: 140715 - DNA, 30 bp, Homo sapiens; identical to SEQ ID NO: 62641
  chr2:9624300-9624330
  hypo

SEQ ID NO: 140716 - DNA, 217 bp, Homo sapiens
  chr2:9649998-9650215
  hypo
ccatccctagggaaacgcctaggaatggaatacgtttctgagctctcattatgatcattatacacagcctctttccaaaccacataaaaaattctcgacacacacataccttattgttctcgtgatcgccactcacagctatgggatacatgacatatttccctccctggtcctcattcggggcacattctgctagaccatccggatcatgttctgc

SEQ ID NO: 140717 - DNA, 132 bp, Homo sapiens; identical to SEQ ID NO: 62642
  chr2:9676811-9676943
  hypo

SEQ ID NO: 140718 - DNA, 33 bp, Homo sapiens; identical to SEQ ID NO: 62643
  chr2:9694209-9694242
  hypo

SEQ ID NO: 140719 - DNA, 261 bp, Homo sapiens
  chr2:9720410-9720671
  hypo
aatgaagtgtgggttaaggagtaaactggcaagtttgccccaaattcgatttcatgatgatcttgacatctacacagtggtgtcacttaacaggagtatgttctgaaaaacgcctcgttaggcgacttcatcgttgtgcaaatatcacaggatgtacttacacaagtacatggcagagcctactacacacctaggctatgtagtaaagcctatattcctaggctacaaacacgtacagcacgttaccgtactaactactgt

SEQ ID NO: 140720 - DNA, 50 bp, Homo sapiens
  chr2:9727411-9727461
  hypo
cataaaatactaacacgtatctcatactttcagctcgtatgtatcttccc

SEQ ID NO: 140721 - DNA, 43 bp, Homo sapiens; identical to SEQ ID NO: 62644
  chr2:9737396-9737439
  hypo

SEQ ID NO: 140722 - DNA, 26 bp, Homo sapiens
  chr2:9747620-9747646
  hypo
ccatcgtacctggcatttttctatta

SEQ ID NO: 140723 - DNA, 105 bp, Homo sapiens
  chr2:9768525-9768630
  hypo
ctcttccccgacttacgccatcataaaaagcagaatttataagagccacaaaataaaacgaatattcctttggctcagagtcaccttgctcgagaacaagaaaaa

SEQ ID NO: 140724 - DNA, 31 bp, Homo sapiens; identical to SEQ ID NO: 15854
  chr2:9770735-9770766
  hypo

SEQ ID NO: 140725 - DNA, 30 bp, Homo sapiens; identical to SEQ ID NO: 15855
  chr2:9772360-9772390
  hypo

SEQ ID NO: 140726 - DNA, 30 bp, Homo sapiens
  chr2:9776372-9776402
  hypo
ctctgtttttacgctcgacacatccagcag

SEQ ID NO: 140727 - DNA, 101 bp, Homo sapiens
  chr2:9785030-9785131
  hypo
tactccagagttcttcgaaagtgagttcatcgctggccagagtttcaagtacagagtcattctcttggttagcgtagaagtaactgcgctacagtaactga

SEQ ID NO: 140728 - DNA, 30 bp, Homo sapiens
  chr2:9785344-9785374
  hypo
gctgtcctcaagcatcgtgcatgccctcct

SEQ ID NO: 140729 - DNA, 135 bp, Homo sapiens; identical to SEQ ID NO: 62648
  chr2:9785577-9785712
  hypo

SEQ ID NO: 140730 - DNA, 30 bp, Homo sapiens; identical to SEQ ID NO: 62649
  chr2:9800436-9800466
  hypo

SEQ ID NO: 140731 - DNA, 91 bp, Homo sapiens; identical to SEQ ID NO: 62650
  chr2:9853194-9853285
  hypo

SEQ ID NO: 140732 - DNA, 31 bp, Homo sapiens; identical to SEQ ID NO: 15856
  chr2:9865161-9865192
  hypo

SEQ ID NO: 140733 - DNA, 195 bp, Homo sapiens
  chr2:9921426-9921621
  hypo
acccttgtagactcccgatttccaacccctggttggcggctgggaggtgtggaaagggagtactgggcgccaggaaaatggggttcccggaagatgactcaggcagccccagaatatgtctccatcactaatagagtccagaagcaagcctgtgcccatccactgcgatgagggtttctacgtgatgttactgtc

SEQ ID NO: 140734 - DNA, 123 bp, Homo sapiens
  chr2:9937922-9938045
  hypo
tctggccagcatgtgcggtcgcgtgaagacctgctaacagcaggagctggggactccctgaaggcgctgacctcggccgactcccccaagaattcccagaccctggcacgggtgccggcacat

SEQ ID NO: 140735 - DNA, 43 bp, Homo sapiens; identical to SEQ ID NO: 62653
  chr2:9942206-9942249
  hypo

SEQ ID NO: 140736 - DNA, 236 bp, Homo sapiens
  chr2:9948879-9949115
  hypo
cacaggcctggccaccgtgggggtctttgttcgccggtgctggagggcaatgggtaggctcccctaagacacaggcaaagtaagcgatgcagcacgccccacccccctcccccccacccgccgccggaaagacactcaggtcaagcaggtttgggtgcctggcaaggcagcgggagagtttcaggcctgtacccctccaatttcctcctggtctttctctccgacacagcactggc

SEQ ID NO: 140737 - DNA, 30 bp, Homo sapiens
  chr2:9951931-9951961
  hypo
tgcaggccaggacaccgggggctcccggcc

SEQ ID NO: 140738 - DNA, 176 bp, Homo sapiens; identical to SEQ ID NO: 62655
  chr2:9952203-9952379
  hypo

SEQ ID NO: 140739 - DNA, 711 bp, Homo sapiens; identical to SEQ ID NO: 62656
  chr2:9960203-9960914
  hypo

SEQ ID NO: 140740 - DNA, 31 bp, Homo sapiens; identical to SEQ ID NO: 62657
  chr2:9962491-9962522
  hypo

SEQ ID NO: 140741 - DNA, 31 bp, Homo sapiens; identical to SEQ ID NO: 62658
  chr2:9964325-9964356
  hypo

SEQ ID NO: 140742 - DNA, 38 bp, Homo sapiens; identical to SEQ ID NO: 62659
  chr2:9977943-9977981
  hypo

SEQ ID NO: 140743 - DNA, 135 bp, Homo sapiens; identical to SEQ ID NO: 62660
  chr2:10008083-10008218
  hypo

SEQ ID NO: 140744 - DNA, 23 bp, Homo sapiens
  chr2:10035344-10035367
  hypo
gtggttaggcatggtggcttacg

SEQ ID NO: 140745 - DNA, 152 bp, Homo sapiens; identical to SEQ ID NO: 62662
  chr2:10047573-10047725
  hypo

SEQ ID NO: 140746 - DNA, 31 bp, Homo sapiens; identical to SEQ ID NO: 62663
  chr2:10107384-10107415
  hypo

SEQ ID NO: 140747 - DNA, 214 bp, Homo sapiens; identical to SEQ ID NO: 15859
  chr2:10110632-10110846
  hypo

SEQ ID NO: 140748 - DNA, 17 bp, Homo sapiens
  chr2:10115710-10115727
  hypo
agatataaacacaggcc

SEQ ID NO: 140749 - DNA, 301 bp, Homo sapiens; identical to SEQ ID NO: 15860
  chr2:10150734-10151035
  hypo

SEQ ID NO: 140750 - DNA, 121 bp, Homo sapiens; identical to SEQ ID NO: 15861
  chr2:10151094-10151215
  hypo

SEQ ID NO: 140751 - DNA, 186 bp, Homo sapiens; identical to SEQ ID NO: 1316
  chr2:10151689-10151875
  hypo

SEQ ID NO: 140752 - DNA, 121 bp, Homo sapiens; identical to SEQ ID NO: 1317
  chr2:10151929-10152050
  hypo

SEQ ID NO: 140753 - DNA, 186 bp, Homo sapiens; identical to SEQ ID NO: 1318
  chr2:10152409-10152595
  hypo

SEQ ID NO: 140754 - DNA, 541 bp, Homo sapiens; identical to SEQ ID NO: 15865
  chr2:10152954-10153495
  hypo

SEQ ID NO: 140755 - DNA, 661 bp, Homo sapiens; identical to SEQ ID NO: 62672
  chr2:10153554-10154215
  hypo

SEQ ID NO: 140756 - DNA, 121 bp, Homo sapiens; identical to SEQ ID NO: 15868
  chr2:10154874-10154995
  hypo

SEQ ID NO: 140757 - DNA, 241 bp, Homo sapiens; identical to SEQ ID NO: 15869
  chr2:10155174-10155415
  hypo

SEQ ID NO: 140758 - DNA, 181 bp, Homo sapiens; identical to SEQ ID NO: 62675
  chr2:10155774-10155955
  hypo

SEQ ID NO: 140759 - DNA, 376 bp, Homo sapiens
  chr2:10156254-10156630
  hypo
atggctgtgcgtttgggcgagtcaggtgggcagacgtgcgtatgggcagtcaggtggacaggcgtgtgtatgggtgagtcaggtggaccactgtgtgtacgggcgagtcaggtggaccggcgtgcatatgggcaggtcaggtgggtaggcgtgtgtatggatgtgcatatgggcgggtcaggtggacaggtgtgtatatgggtgtacatgtgtgcacaggtgctactttactctgtgttcaacacgtgttcgtggacgtgctccaggcccaaggcgaaggaataggatgtagcaggggcagggtctccgccccatactcagagtccttgggctccgggaagacacaaccgataagtggttacggggatgcctggga

SEQ ID NO: 140760 - DNA, 532 bp, Homo sapiens
  chr2:10161987-10162519
  hypo
agacttgagatcagccgctcagattaggtgatcagaagcattttgtcacggagacacggagttctgggccggctcttatcttcagggcatctggtagggtggaaagcacttcaagtcatgcgccaagcccacgtcctattccctgggcccattcccttccgttgaagtgctggaggcagagctcgcagctgaagacctacaggcggctctccctcgtgtctgggcatgagcggtctgtggaggcagcagccaggctgtgtccaggtagccctgacggccactgcacaagagcagtgtcgggtagagtccgagcacccatcagctcagccccaggctccatcagaggcggtggaacgggccctgaggatgcctcagtcctgggccttagtgggaggccttccaggtgaagccctggggaccaggtagccctgctcagcaagcagccctggaccctacctcagcagccccggaccccacctcggccgccgcaggaagccaaggggatgagggaccaactcgggaaatggtgggt

SEQ ID NO: 140761 - DNA, 22 bp, Homo sapiens
  chr2:10171043-10171065
  hypo
aggtgcagcggctcacgcctgt

SEQ ID NO: 140762 - DNA, 31 bp, Homo sapiens; identical to SEQ ID NO: 15872
  chr2:10172772-10172803
  hypo

SEQ ID NO: 140763 - DNA, 161 bp, Homo sapiens; identical to SEQ ID NO: 62679
  chr2:10178431-10178592
  hypo

SEQ ID NO: 140764 - DNA, 115 bp, Homo sapiens
  chr2:10181968-10182083
  hypo
cattctagggaacagcaagtgcgaggacctggagacggcagaggggctggtgggacaggcgcccaagaggaggcccaggctgtccctccggggcgtggggagaggcatggggctg

SEQ ID NO: 140765 - DNA, 199 bp, Homo sapiens; identical to SEQ ID NO: 1320
  chr2:10183603-10183802
  hypo

SEQ ID NO: 140766 - DNA, 453 bp, Homo sapiens; identical to SEQ ID NO: 37134
  chr2:10183814-10184267
  hypo

SEQ ID NO: 140767 - DNA, 30 bp, Homo sapiens; identical to SEQ ID NO: 15875
  chr2:10192464-10192494
  hypo

SEQ ID NO: 140768 - DNA, 127 bp, Homo sapiens; identical to SEQ ID NO: 62683
  chr2:10195849-10195976
  hypo

SEQ ID NO: 140769 - DNA, 30 bp, Homo sapiens; identical to SEQ ID NO: 62684
  chr2:10198586-10198616
  hypo

SEQ ID NO: 140770 - DNA, 30 bp, Homo sapiens; identical to SEQ ID NO: 62685
  chr2:10198944-10198974
  hypo

SEQ ID NO: 140771 - DNA, 43 bp, Homo sapiens; identical to SEQ ID NO: 62686
  chr2:10226143-10226186
  hypo

SEQ ID NO: 140772 - DNA, 30 bp, Homo sapiens; identical to SEQ ID NO: 15876
  chr2:10238085-10238115
  hypo

SEQ ID NO: 140773 - DNA, 30 bp, Homo sapiens
  chr2:10272018-10272048
  hypo
tggggtttgtgaagccggggctgagttaac

SEQ ID NO: 140774 - DNA, 30 bp, Homo sapiens
  chr2:10272283-10272313
  hypo
attccttgtacctcacgccactgccattca

SEQ ID NO: 140775 - DNA, 129 bp, Homo sapiens; identical to SEQ ID NO: 62688
  chr2:10281144-10281273
  hypo

SEQ ID NO: 140776 - DNA, 30 bp, Homo sapiens; identical to SEQ ID NO: 62689
  chr2:10284309-10284339
  hypo

SEQ ID NO: 140777 - DNA, 30 bp, Homo sapiens
  chr2:10284920-10284950
  hypo
cgtcagtaaatggtacgacattgagcacca

SEQ ID NO: 140778 - DNA, 30 bp, Homo sapiens
  chr2:10285481-10285511
  hypo
cctagtgtgcacactcgcagcccaggcttg

SEQ ID NO: 140779 - DNA, 38 bp, Homo sapiens; identical to SEQ ID NO: 15877
  chr2:10289568-10289606
  hypo

SEQ ID NO: 140780 - DNA, 30 bp, Homo sapiens
  chr2:10300530-10300560
  hypo
ccaagagcttcacctcgggcttgccatcgg

SEQ ID NO: 140781 - DNA, 266 bp, Homo sapiens
  chr2:10302789-10303055
  hypo
ccacctgcacccccccgccgccccccacccccctgccgaggcctggggagtcacagctcttcctgatcttgctgtgtggcctcgggcagggcgtttgccctctctgggcctcaggcactccatcttgacaataaggccattgcacttgctattcacattgggccacctgtgccagccatccatgacaggggttctttaggtagagacaaatggcctgcaggggcggggacccccggggcatggccgtccactgcaggtcccaggag

SEQ ID NO: 140782 - DNA, 30 bp, Homo sapiens
  chr2:10303436-10303466
  hypo
agagtggggaaaagacgggcgggggggtgg

SEQ ID NO: 140783 - DNA, 461 bp, Homo sapiens
  chr2:10306803-10307264
  hypo
tgcctgcaaagccctcgccctgttccctatggcgcaccagctgcttggatgctcccacgcagcagtgccttgtcatcacattctatttgctgagcggcgatggaacaggccctgcgtccccgcctgtgtcctaagcactccacaagcatgagcgtgtctagatggtgatggtttgctcatggtctctctctcagagcttttaccctggcggggttgggagcgtggcaatgggtcaccactgaccctgttaggaaacaagtgtgtctgtacgtgccacttatgatggggacaggccgtggtcactttgctggggccagtgtcagcaggatggcagatgctttgagaacacggctaagaactctgccttctggagcaggatgtcaaatgctgtttgattcaggcatgtgacacctgtcaagagccctggcacagctgctctcgagacacgcctcgactgccac

SEQ ID NO: 140784 - DNA, 30 bp, Homo sapiens; identical to SEQ ID NO: 62692
  chr2:10307514-10307544
  hypo

SEQ ID NO: 140785 - DNA, 121 bp, Homo sapiens
  chr2:10320483-10320604
  hypo
tggccattgtatttccgtcaccctggagagaaatctgtgaccaaatggttaaaaaaaattccaagtcattcattattcaccctcgctgcataatgcatgaaggctgcgggccaggcccatt

SEQ ID NO: 140786 - DNA, 20 bp, Homo sapiens
  chr2:10326564-10326584
  hypo
gccaccgtgcccggccagca

SEQ ID NO: 140787 - DNA, 30 bp, Homo sapiens
  chr2:10327133-10327163
  hypo
gtgcggggctggtgccggtgcccccgaggc

SEQ ID NO: 140788 - DNA, 83 bp, Homo sapiens
  chr2:10327404-10327487
  hypo
agttgtcatggaaaccggtcacgcagggctcggtagcaggaccctccttcctacctctgccacggtgccgcaggctcagaggg

SEQ ID NO: 140789 - DNA, 151 bp, Homo sapiens; identical to SEQ ID NO: 15878
  chr2:10328930-10329081
  hypo

SEQ ID NO: 140790 - DNA, 629 bp, Homo sapiens
  chr2:10334458-10335087
  hypo
caggctgctgactggcggggctctgggggtaaggccttggtcctgccgtgcctcctcctggctcatctgtgacacagaaatgacagttcctactccccagcttgtgcgggcccaaatgggatggggtgtgtgtgtgaggactggggcctaggcctgtgcagggcaggttgtgttactaacgtccccccgtggctcctgggctaacggtgcacttctccgtcctgcttcactgccttatggcacgtgtccatttccccaaccaccggtgggccccgggtggcttggccggcctggtgtcccgtgcccagcatgggctctggcccaagttagcacttgctgcctaagtgcctctgccttttactcacctccatctggagcgggctcagtggggttcctgctggggctctacgggggcatccagactttgccctctgaccagccccactgtcctgtccttccctcccctgcgtcctcatctgtcactccttggtcacagccgccccctgactttcctccctgcctccttggcatggtgggaaacatgcgagttccatttctgaggctgccttgtgcctgatcttgggcaagttgcttgctagacctctcggcgtctccgttctcagcggtgc

SEQ ID NO: 140791 - DNA, 30 bp, Homo sapiens
  chr2:10336849-10336879
  hypo
tgggcagggaggaggcgggttcgctgtggc

SEQ ID NO: 140792 - DNA, 30 bp, Homo sapiens
  chr2:10337330-10337360
  hypo
ccgagggctggtgtgcggatcgagggaagt

SEQ ID NO: 140793 - DNA, 193 bp, Homo sapiens; identical to SEQ ID NO: 62695
  chr2:10344635-10344828
  hypo

SEQ ID NO: 140794 - DNA, 30 bp, Homo sapiens
  chr2:10345152-10345182
  hypo
ccacgtggtctgcttcgaatccagcaaact

SEQ ID NO: 140795 - DNA, 31 bp, Homo sapiens; identical to SEQ ID NO: 62696
  chr2:10381198-10381229
  hypo

SEQ ID NO: 140796 - DNA, 140 bp, Homo sapiens
  chr2:10381450-10381590
  hypo
agaaggggtgaggcccggcctgggggccgtgggcagaggccaccggggtatggcttcagtcagcaggccccagcaggctggccacggccactaaaggtgccgcaaaacaagactgggaggagtagcgtggagctttggtg

SEQ ID NO: 140797 - DNA, 30 bp, Homo sapiens; identical to SEQ ID NO: 15880
  chr2:10395174-10395204
  hypo

SEQ ID NO: 140798 - DNA, 31 bp, Homo sapiens; identical to SEQ ID NO: 62698
  chr2:10397608-10397639
  hypo

SEQ ID NO: 140799 - DNA, 85 bp, Homo sapiens
  chr2:10400305-10400390
  hypo
tcccagggacacttgcggtcaagatttatggggatgacaaatgcgagccttcagggctgcagggcccagccgctctgggaggatg

SEQ ID NO: 140800 - DNA, 30 bp, Homo sapiens
  chr2:10423237-10423267
  hypo
aacctgagaggtgcccgggattgtgttcac

SEQ ID NO: 140801 - DNA, 512 bp, Homo sapiens; identical to SEQ ID NO: 105470
  chr2:10443617-10444129
  hypo

SEQ ID NO: 140802 - DNA, 398 bp, Homo sapiens; identical to SEQ ID NO: 105471
  chr2:10444193-10444591
  hypo

SEQ ID NO: 140803 - DNA, 164 bp, Homo sapiens
  chr2:10465385-10465549
  hypo
gctcaggcgatcctcccgacatcgtaattacatttttgcagggttttcagttcacaggtgtgctctcccacatccccatttaagtttacttatttttcagccccagcctctgaggctatcattattttacagacgagaacaccgggactcagagggtgatttgt

SEQ ID NO: 140804 - DNA, 61 bp, Homo sapiens; identical to SEQ ID NO: 62699
  chr2:10487203-10487264
  hypo

SEQ ID NO: 140805 - DNA, 528 bp, Homo sapiens; identical to SEQ ID NO: 62700
  chr2:10512199-10512727
  hypo

SEQ ID NO: 140806 - DNA, 30 bp, Homo sapiens; identical to SEQ ID NO: 62701
  chr2:10517353-10517383
  hypo

SEQ ID NO: 140807 - DNA, 67 bp, Homo sapiens
  chr2:10517628-10517695
  hypo
atccctgtcctttcacgcactgtctgcccgcacacactcttccaccctctgtcggcagggcccctgc

SEQ ID NO: 140808 - DNA, 245 bp, Homo sapiens; identical to SEQ ID NO: 15881
  chr2:10517931-10518176
  hypo

SEQ ID NO: 140809 - DNA, 161 bp, Homo sapiens
  chr2:10519034-10519195
  hypo
ctggtcagtattcatttacagcgaggcggacagactcatgctgtaattgagtcatgctatgtatttgtttcaggtcccgctttttctttccacttaagacaatatcattcatttcctgtatcattaaaaatatttgcggtcgggtgcggtcgctcctacct

SEQ ID NO: 140810 - DNA, 41 bp, Homo sapiens
  chr2:10519314-10519355
  hypo
ctgggccagtgcgtgattccgaagactacatttgaagtcca

SEQ ID NO: 140811 - DNA, 578 bp, Homo sapiens
  chr2:10525734-10526312
  hypo
gacgatggcagaatccggtgtctgcttggccgcgtggtgtcactaataggatttgccgagccttttggatgtttgtggcgcgacggctgctgtgggaacccagaggctgctcatttgcagggaatgaataatttatttctgttttcagatgacttattccttcatctgcagccgagcccccacatgttctgtaggctcctgattaagtgatttcagcaggagaatttggcttaatcccccactgccctggacgcctggttccaggctgctgatttgtcggcctcgtgtcggggggtgtccggagcctctcctctctgggggcttttcttcctgctctgcctgtttgggaagcctctggccactgagcatgtgctggccttgggttttacggctgtctggcaattagaatattaatgtcgataacacagcaggacttgcgtgtgacaagctgagccacataacgtcacagtcgctcttgaacatctcggactttcacatgggccagccacaccccagcctaggttgctccctcacctcctcagggcctccctgatgtcggtttagacatgtgccttcca

SEQ ID NO: 140812 - DNA, 31 bp, Homo sapiens; identical to SEQ ID NO: 15883
  chr2:10528985-10529016
  hypo

SEQ ID NO: 140813 - DNA, 30 bp, Homo sapiens; identical to SEQ ID NO: 62707
  chr2:10535653-10535683
  hypo

SEQ ID NO: 140814 - DNA, 43 bp, Homo sapiens; identical to SEQ ID NO: 62708
  chr2:10536067-10536110
  hypo

SEQ ID NO: 140815 - DNA, 138 bp, Homo sapiens; identical to SEQ ID NO: 62709
  chr2:10536464-10536602
  hypo

SEQ ID NO: 140816 - DNA, 114 bp, Homo sapiens; identical to SEQ ID NO: 15884
  chr2:10545012-10545126
  hypo

SEQ ID NO: 140817 - DNA, 58 bp, Homo sapiens
  chr2:10554978-10555036
  hypo
ctggtccattctgcacgtgcgctgctgctgttacagcggcagacgggaggctgaacta

SEQ ID NO: 140818 - DNA, 30 bp, Homo sapiens
  chr2:10555324-10555354
  hypo
ggccgcatggagggccggccctgggctggg

SEQ ID NO: 140819 - DNA, 30 bp, Homo sapiens; identical to SEQ ID NO: 62711
  chr2:10556500-10556530
  hypo

SEQ ID NO: 140820 - DNA, 79 bp, Homo sapiens; identical to SEQ ID NO: 62712
  chr2:10566538-10566617
  hypo

SEQ ID NO: 140821 - DNA, 501 bp, Homo sapiens
  chr2:10566934-10567435
  hypo
cagtcagttctgagcgagcggcccctggacagttgcagagaaacacaggcttgtcgtgccgtttaagctttgcttgcaagagtggatgccccgcaatcgttcctgctctcccgggccccgggcctggggcatgcgttgcacctgcccagcccggtggctgcgcctccctcctccacctgaccaacgcgacattcctcccctcacgcctggcccggtcccttccagggcaactcccagggatgtggtgacatgcagggttcaagtgttcttggttccaggcacctcccggctcacggggagctcagaggtccatgccgaggagaccaggcaggacctcccgaggctgcgccccggccggcccatgcgttttgtgatcccaagtgactctgtgggaagggtggggacgaggcgtcgggagggtatacagggagcccctcccgtgcatggctgcccccccgttcattttctccaccacagccgcttgcacgtatagatactgtg

SEQ ID NO: 140822 - DNA, 202 bp, Homo sapiens
  chr2:10577315-10577517
  hypo
cagggtagggaaacaccgaatgaatgctggggtcctctgacctggcttgaatgctgcctcactatctgcgtgacttgagttcatctctgagtttatgtcttcacgcgggaaacctattttacaatcctcgtaaagtcagtaatacattccaatatcaaaagcgcagtgtggagccagtccccactctcggcccaggcctctg

SEQ ID NO: 140823 - DNA, 102 bp, Homo sapiens
  chr2:10580371-10580473
  hypo
ggaggatggggcttccgtctcacctgtcctcctacctgtgtgtgggtggacccactcattgttctctgagaatcagagcgagctatacgggattcgtgaact

SEQ ID NO: 140824 - DNA, 30 bp, Homo sapiens
  chr2:10581652-10581682
  hypo
acatagtagatcgtcggcctctggaagcca

SEQ ID NO: 140825 - DNA, 62 bp, Homo sapiens
  chr2:10582243-10582305
  hypo
cactccagagtctgacggaaagtatttgtccaacgctgggttgattacgccggtgatctaag

SEQ ID NO: 140826 - DNA, 227 bp, Homo sapiens; identical to SEQ ID NO: 105472
  chr2:10587832-10588059
  hypo

SEQ ID NO: 140827 - DNA, 661 bp, Homo sapiens; identical to SEQ ID NO: 1324
  chr2:10588855-10589516
  hypo

SEQ ID NO: 140828 - DNA, 153 bp, Homo sapiens; identical to SEQ ID NO: 15887
  chr2:10600736-10600889
  hypo

SEQ ID NO: 140829 - DNA, 101 bp, Homo sapiens; identical to SEQ ID NO: 15888
  chr2:10601534-10601635
  hypo

SEQ ID NO: 140830 - DNA, 17 bp, Homo sapiens
  chr2:10605684-10605701
  hypo
cccgacccagaacctga

SEQ ID NO: 140831 - DNA, 80 bp, Homo sapiens; identical to SEQ ID NO: 62718
  chr2:10615283-10615363
  hypo

SEQ ID NO: 140832 - DNA, 85 bp, Homo sapiens; identical to SEQ ID NO: 15890
  chr2:10615572-10615657
  hypo

SEQ ID NO: 140833 - DNA, 167 bp, Homo sapiens
  chr2:10616027-10616194
  hypo
gtcgccgatctggtgcgcagttaacagacctacacccagcttgtgccggtctaacaagccacgccagaggggaagctgcccggggcctcccagggcccctccctgaaggaattgtactcacgttcccatcccagccttctgggctttggcctcgccacaccgactga

SEQ ID NO: 140834 - DNA, 557 bp, Homo sapiens
  chr2:10634191-10634748
  hypo
gagagtcacggagaccgacccttggcacaataagactgtggactgaggccagtgcctgtggactgaggctggtgctgtctaagagtcaccctcccttccgtacatgtgtaccttaccaccacgcaatggccctccgtgagtggccgtgccccccgctcagcaatgacctagcaaggaaactgaggctcacagaggtgacgtgtctgttctaagttcgtgaatgccaacttagaattggtggagctgggaacagaacccaggtcttcggacctgatgttggccacatgggtgggccccacagtcaggacaagaggggtgggggctctgcagaaggatggggctgtgggtggacagccagggccttttccagacgtgggccatggaagtccagcagctggatcaaaaccccatgagctgagcctgcccctatggatcacaggtcacagacatgtcttcggaagccagtcggggaggccagggctggggcgggccaggaccaatccacaccagaggcacaacagcagttcccaaggaagagcagtcgagggcaagggcca

SEQ ID NO: 140835 - DNA, 44 bp, Homo sapiens; identical to SEQ ID NO: 62721
  chr2:10642585-10642629
  hypo

SEQ ID NO: 140836 - DNA, 109 bp, Homo sapiens; identical to SEQ ID NO: 62722
  chr2:10645139-10645248
  hypo

SEQ ID NO: 140837 - DNA, 51 bp, Homo sapiens
  chr2:10654937-10654988
  hypo
caaagctccattgtgaaataccgaaacatcgatgtggaagaaaggaagaca

SEQ ID NO: 140838 - DNA, 31 bp, Homo sapiens; identical to SEQ ID NO: 15892
  chr2:10659326-10659357
  hypo

SEQ ID NO: 140839 - DNA, 307 bp, Homo sapiens; identical to SEQ ID NO: 15893
  chr2:10666471-10666778
  hypo

SEQ ID NO: 140840 - DNA, 68 bp, Homo sapiens
  chr2:10672798-10672866
  hypo
aggtgccagttaggccaagaccgaggggccggggagggcggtgcagcgaggggaggggagtgagagcc

SEQ ID NO: 140841 - DNA, 137 bp, Homo sapiens
  chr2:10673121-10673258
  hypo
tgccttcacaggggctggtctcggaccccccactgcagagctcctggctctgcgggaccatcagctcccagctggttctgctcacccctgggtcctgctgcccgtctcagtcacacgcccacccttccctttgaaat

SEQ ID NO: 140842 - DNA, 31 bp, Homo sapiens; identical to SEQ ID NO: 62726
  chr2:10676513-10676544
  hypo

SEQ ID NO: 140843 - DNA, 462 bp, Homo sapiens; identical to SEQ ID NO: 62727
  chr2:10686606-10687068
  hypo

SEQ ID NO: 140844 - DNA, 103 bp, Homo sapiens
  chr2:10687533-10687636
  hypo
ctgggtgtgtcagtgcggggggcggggtggggggcatagtttttgaaagcgattggcatttccatcaggggacccagtaaagaagatccgctctcttccctgc

SEQ ID NO: 140845 - DNA, 30 bp, Homo sapiens; identical to SEQ ID NO: 62728
  chr2:10710484-10710514
  hypo

SEQ ID NO: 140846 - DNA, 118 bp, Homo sapiens; identical to SEQ ID NO: 15894
  chr2:10732498-10732616
  hypo

SEQ ID NO: 140847 - DNA, 206 bp, Homo sapiens; identical to SEQ ID NO: 15895
  chr2:10742495-10742701
  hypo

SEQ ID NO: 140848 - DNA, 23 bp, Homo sapiens
  chr2:10804796-10804819
  hypo
ctgcatctatggtatgcaccacg

SEQ ID NO: 140849 - DNA, 23 bp, Homo sapiens
  chr2:10804938-10804961
  hypo
acgtgagccaccacacccagcca

SEQ ID NO: 140850 - DNA, 30 bp, Homo sapiens; identical to SEQ ID NO: 37142
  chr2:10861577-10861607
  hypo

SEQ ID NO: 140851 - DNA, 456 bp, Homo sapiens; identical to SEQ ID NO: 37143
  chr2:10862069-10862525
  hypo

SEQ ID NO: 140852 - DNA, 525 bp, Homo sapiens
  chr2:10897429-10897954
  hypo
cgcccggccagaggagactttatttggctgtttaaattgacatatggaaatgttcctaccccacctgtgatcttggctttgtatgtctatatggcttaataactccaccttattatattgcaggcttgaaaggaaaaatgaaatgtttaaagagtaggttatgcattgtttgctgtgtctgtgcttggcgtgatgcccgcatgtcccgggaaggtggaatctcggtctggttgtattggtacagtgatcaagttaccacgatttctcaagtaacaaccttgtaacttggtcacaatatccatatgacacagataaccaccatctcatcccctcccctctttgtcctgtcatccctgcctctcctgggcagcactgcatgccgcctggaagctgggaacgctttgaccttgtggagttcaaggtgaactcctgtctctttctgcatgtggtctgcttcttgttttgatcctgacacgatgtcccgactgcctgctctttgagcccgtctgttttatggacactgga

SEQ ID NO: 140853 - DNA, 128 bp, Homo sapiens
  chr2:10916394-10916522
  hypo
gtgtgtgtgtgtgcgcgcgcacgtgcatgtatgagtgtgtgtgtggacctgtgtgtgcacagcaagtgagacacacctcagagccagacgctgctgggctccggctgagcctgcggggagggtgtcgc

SEQ ID NO: 140854 - DNA, 30 bp, Homo sapiens
  chr2:10916769-10916799
  hypo
cgcagtatctctggacggggctagaccgtg

SEQ ID NO: 140855 - DNA, 692 bp, Homo sapiens
  chr2:10917384-10918076
  hypo
cggtgctgtcctggtcggcctgcgatgggggtcctggctgagcccaagcaaggggagggagctcagggctgacccctctgccagagatcggctctgtgcttggaatatggaacccaaagaccttaacactgcccttctctctgccttcaccactccaggagcccggtgggcacctaccacatctctagtctagccagcacgcgagtcccgagggtgggcctgaattcctgagcttgctctcgcgtgcctttcaggcgatgagaatgatttatttgtttgtgatgcatgtttgctgaaagattaataaatcatttctgtgcctttagcaaacttcctgtgttgctcttaaaaagggatcatccaccttcccggaccacaaggttaaggtaaccccgctaggtaaccctgataggcctgctgcggggcagaccgacagagagagagagagtgagggcgagggtgaggtaagcaacgccccgggaaccccggggtccctggctcacatctcctcgccagctcaggcgccttctgggaaaatgaatccttgcatttttctgttctctaatatggcttttgaggtcttaaatttgaggagccggaatcatgccttcctcctaatctgcagggcctctttggagctgcccccgccagcagtgaagggtgcttgtcggccagggcgcctctccccgggc

SEQ ID NO: 140856 - DNA, 59 bp, Homo sapiens
  chr2:10920051-10920110
  hypo
gtgtggctgcgtcccgcgtcacggagcactgcgcaccgcctgccgctctgactcgcggc

SEQ ID NO: 140857 - DNA, 30 bp, Homo sapiens
  chr2:10923621-10923651
  hypo
tgcgaactacctgttcgcattggtaacctg

SEQ ID NO: 140858 - DNA, 149 bp, Homo sapiens; identical to SEQ ID NO: 62737
  chr2:10925011-10925160
  hypo

SEQ ID NO: 140859 - DNA, 96 bp, Homo sapiens; identical to SEQ ID NO: 62738
  chr2:10926447-10926543
  hypo

SEQ ID NO: 140860 - DNA, 208 bp, Homo sapiens; identical to SEQ ID NO: 105479
  chr2:10953100-10953308
  hypo

SEQ ID NO: 140861 - DNA, 134 bp, Homo sapiens; identical to SEQ ID NO: 105480
  chr2:10953333-10953467
  hypo

SEQ ID NO: 140862 - DNA, 30 bp, Homo sapiens
  chr2:10975255-10975285
  hypo
aaggagcagcaccagcgcctgtgtgtgtac

SEQ ID NO: 140863 - DNA, 30 bp, Homo sapiens; identical to SEQ ID NO: 15898
  chr2:10999966-10999996
  hypo

SEQ ID NO: 140864 - DNA, 33 bp, Homo sapiens
  chr2:11030195-11030228
  hypo
caacaaatggccccacgccggaggctgggcaaa

SEQ ID NO: 140865 - DNA, 30 bp, Homo sapiens; identical to SEQ ID NO: 62740
  chr2:11049717-11049747
  hypo

SEQ ID NO: 140866 - DNA, 115 bp, Homo sapiens; identical to SEQ ID NO: 62741
  chr2:11053787-11053902
  hypo

SEQ ID NO: 140867 - DNA, 207 bp, Homo sapiens
  chr2:11105560-11105767
  hypo
gctacaaaaatcacgcggccagccagatggtgacgaggctgaaatagaagctcatagactgtgggatctacaagcgggagaggctgaccgtgcccaggagctgggtaagggcatctgccaaggtattttggaggaggtgaagaaggcgagtaacaataataactcatgtttataccaaggctgttctaagcacgtgacacttttaag

SEQ ID NO: 140868 - DNA, 30 bp, Homo sapiens; identical to SEQ ID NO: 15900
  chr2:11166612-11166642
  hypo

SEQ ID NO: 140869 - DNA, 31 bp, Homo sapiens; identical to SEQ ID NO: 15901
  chr2:11209932-11209963
  hypo

SEQ ID NO: 140870 - DNA, 242 bp, Homo sapiens
  chr2:11238182-11238424
  hypo
ggcctgaaattaaaacgtctccatttttctttaaccaaatggtagttctaattatagcattcagactggcgtgcatgtttatttgctcatctctcgctttattaagagttagtgcattgtaccttaaaaatgggtgacaaattattacaatgtgttctgggctgtcgatgattagaacaggtggttaaggaggcttggggtgttatccatttctataattatgtcatcgtgttacatttaat

SEQ ID NO: 140871 - DNA, 31 bp, Homo sapiens; identical to SEQ ID NO: 15902
  chr2:11243180-11243211
  hypo

SEQ ID NO: 140872 - DNA, 140 bp, Homo sapiens
  chr2:11311986-11312126
  hypo
cctggcctcttttgcttttttaacaaatcgactcgtgactttctcacattttatctgcaaacagaatctatgtactttcatcagcgcggccagtaagtttgcacagctccagtgtctgtggaagacgagagactcaggaa

SEQ ID NO: 140873 - DNA, 30 bp, Homo sapiens; identical to SEQ ID NO: 15903
  chr2:11397460-11397490
  hypo

SEQ ID NO: 140874 - DNA, 30 bp, Homo sapiens
  chr2:11456827-11456857
  hypo
cgtaaacattttatgcgaccatgtatttta

SEQ ID NO: 140875 - DNA, 178 bp, Homo sapiens
  chr2:11485397-11485575
  hypo
accacttcaagagaacgggagagcaccggaaaaaggctttccagccgcaggccttcgcggggtcttctccttttggggggcggaagaggggtggttatcgggaccgttccgccgcattcctgccctctcggcggccggtgccatcgcttagatccgcccagggcgcaatccgaaaatt

SEQ ID NO: 140876 - DNA, 105 bp, Homo sapiens
  chr2:11487871-11487976
  hypo
aaagtgctgggattacaggggtgagtcacagagccgggcctcaacctggcctttaaaaagacgctacccgtttacattctcagcgtgagtagaagaaactgccca

SEQ ID NO: 140877 - DNA, 70 bp, Homo sapiens
  chr2:11489276-11489346
  hypo
atcaccaataagacacgtaacaacttttcccatctcgcttcacgctgccaggcaacgcaggctggcattg

SEQ ID NO: 140878 - DNA, 24 bp, Homo sapiens
  chr2:11527872-11527896
  hypo
gtgagccaccgtgcccagccaacc

SEQ ID NO: 140879 - DNA, 30 bp, Homo sapiens
  chr2:11530398-11530428
  hypo
agcacctctcagcttcgcaaggaatctgtc

SEQ ID NO: 140880 - DNA, 30 bp, Homo sapiens; identical to SEQ ID NO: 62749
  chr2:11536186-11536216
  hypo

SEQ ID NO: 140881 - DNA, 41 bp, Homo sapiens; identical to SEQ ID NO: 62750
  chr2:11536461-11536502
  hypo

SEQ ID NO: 140882 - DNA, 31 bp, Homo sapiens; identical to SEQ ID NO: 15905
  chr2:11537161-11537192
  hypo

SEQ ID NO: 140883 - DNA, 22 bp, Homo sapiens
  chr2:11594726-11594748
  hypo
agcctcccgaagtactgggatt

SEQ ID NO: 140884 - DNA, 30 bp, Homo sapiens
  chr2:11607884-11607914
  hypo
aaaaagagaacgtagcggaggtctcgagaa

SEQ ID NO: 140885 - DNA, 685 bp, Homo sapiens; identical to SEQ ID NO: 105487
  chr2:11622659-11623344
  hypo

SEQ ID NO: 140886 - DNA, 80 bp, Homo sapiens
  chr2:11702173-11702253
  hypo
catgtccaggcattgcgctcagtccttatcaaccaattcgatacatattaaacctctagtgtacgcgcagctgtgacaga

SEQ ID NO: 140887 - DNA, 30 bp, Homo sapiens
  chr2:11750765-11750795
  hypo
ccggtgggcgcggccgtcacagacatggtc

SEQ ID NO: 140888 - DNA, 31 bp, Homo sapiens; identical to SEQ ID NO: 15906
  chr2:11758939-11758970
  hypo

SEQ ID NO: 140889 - DNA, 251 bp, Homo sapiens
  chr2:11774322-11774573
  hypo
cgacatcatgcactacgccctgctgggcctgcggaagtggtccagcaagacccgggccagcgaggtgcaagagcccttctcccgctgccacgtgcacaacttcatcatcctgaacgtggacctgacccagaacgtgcagtacaaccagaaccggtgagctcctgcacctggggcagaggcggcggcagccctgggggcgcagagtcctgagtgagggcagcctggggctgcagaggcgtcctggctgtgag

SEQ ID NO: 140890 - DNA, 214 bp, Homo sapiens
  chr2:11774873-11775087
  hypo
gtggaccacggcctgcgtgagcctctcaaagagggtgggctttggagccagactgactgcgcctccaagaaccggggttctgctgcgtattagctttgcagcgcaggcaggccactcacctccaagccctattcttcttagctgtaaaaagcagctcacgtttttaccctgggaggttttttgttgctttctttttcaccgatgcgtgaggtcg

SEQ ID NO: 140891 - DNA, 30 bp, Homo sapiens
  chr2:11780431-11780461
  hypo
tcatctgtcaggaccggagctcactgcgcc

SEQ ID NO: 140892 - DNA, 146 bp, Homo sapiens
  chr2:11929295-11929441
  hypo
ggcttaggatgttgccgtcggtcagccagttcaaacacttgagattcttgaaggtctaattggactttgttgagtctaggcttgctgcttcctgggtttgtgtgtgtgtgtgtgtgtgcctgtgcctgtgtgtcagtgtgtgctca

SEQ ID NO: 140893 - DNA, 30 bp, Homo sapiens
  chr2:11962960-11962990
  hypo
gctaggtggcctctgcggtcattgcattga

SEQ ID NO: 140894 - DNA, 299 bp, Homo sapiens
  chr2:11965000-11965299
  hypo
cacctgggagcctggcgcgtcatcattggcctgacagcagagagaattgagaagcatttctcccctgccccaccccggggctgacatttctaagcaagataggaagggagcactttctaggctaggagttgggtgcatttgtaccgtgaaaagcattcctcagttgtggcttaatgccagttacgacgctgcctttccggcctgctccagcaagtagctactggttcacgtgcagtttggggctgtgaaacctaggcagaaggcggctgtctgagggctgtccccgcctaggacagggt

SEQ ID NO: 140895 - DNA, 31 bp, Homo sapiens; identical to SEQ ID NO: 62755
  chr2:11995229-11995260
  hypo

SEQ ID NO: 140896 - DNA, 261 bp, Homo sapiens; identical to SEQ ID NO: 62756
  chr2:12005881-12006142
  hypo

SEQ ID NO: 140897 - DNA, 30 bp, Homo sapiens
  chr2:12072252-12072282
  hypo
tagagccacttctgtcgtcacctgcttctc

SEQ ID NO: 140898 - DNA, 158 bp, Homo sapiens
  chr2:12078413-12078571
  hypo
ttgcacaaaacacgccgagccccaaagggaaaaatcacattgttgttaaggcatggaggccaaatcctgccagcttgtacgcatctagggctgcggctgacgtcagaggctgcagggtgtgtgcgagcgcagggagggttcgccgtgctgaggcatgc

SEQ ID NO: 140899 - DNA, 213 bp, Homo sapiens
  chr2:12103261-12103474
  hypo
tgacccaaggaaagaatgtttcgcacatacctagcaaccagagcgaactcataaaacgttcattccaaggcaacaccattcatctttgcgtatctccctgtgactgctgccataaaacttcactctagagtagacgtccctacagctttatagggatgaaacttccagaactcttcacttaaaatgcacgtcgtttaaagattctcttctttt

SEQ ID NO: 140900 - DNA, 146 bp, Homo sapiens; identical to SEQ ID NO: 62758
  chr2:12145186-12145332
  hypo

SEQ ID NO: 140901 - DNA, 272 bp, Homo sapiens
  chr2:12245940-12246212
  hypo
tttttctggcagtcacggaagtgtttctatatttattatcattacaactctacagggcaggttttgctaaccggttttacagtgggaaacctatagctttagagatttaggcaaggtacacgtagaaaatgtcagagctggtggggtggagggtggaagtctgcctggttctgcctcgagggcttgtaccggctacatcccggcttcctccctggaagagccagcaagactgggatagaaaaatgttgtctccggctcggcgcggtagctca

SEQ ID NO: 140902 - DNA, 42 bp, Homo sapiens; identical to SEQ ID NO: 62759
  chr2:12297694-12297736
  hypo

SEQ ID NO: 140903 - DNA, 31 bp, Homo sapiens; identical to SEQ ID NO: 62760
  chr2:12415511-12415542
  hypo

SEQ ID NO: 140904 - DNA, 30 bp, Homo sapiens
  chr2:12446849-12446879
  hypo
cactacctgcgtgaccggatctgtacccca

SEQ ID NO: 140905 - DNA, 148 bp, Homo sapiens
  chr2:12458691-12458839
  hypo
tttaaaaacaaagaccgtgaaaaaccaaagctataaaagtatgtgaatcatcaacccagaaatcatgcctcaaggcacgcctgacagcatgttcgttcccggatgcttttccttcacaaattatggaggctgccgacatccttctggg

SEQ ID NO: 140906 - DNA, 159 bp, Homo sapiens
  chr2:12630981-12631140
  hypo
gggcagggctaaacacgactgtacatttgggaagcctggaggcagaatgaggcaatggtaaaggccctgaaagataagtagatttctaataaataaagaagtgtaaaatgcattctgagcagaagccgtagatgaacaaaagcttagaggcattgtgtt

SEQ ID NO: 140907 - DNA, 39 bp, Homo sapiens; identical to SEQ ID NO: 62761
  chr2:12631199-12631238
  hypo

SEQ ID NO: 140908 - DNA, 30 bp, Homo sapiens; identical to SEQ ID NO: 15909
  chr2:12694623-12694653
  hypo

SEQ ID NO: 140909 - DNA, 30 bp, Homo sapiens
  chr2:12764995-12765025
  hypo
gagggcttagtcctcgccttctatgagaat

SEQ ID NO: 140910 - DNA, 641 bp, Homo sapiens; identical to SEQ ID NO: 105496
  chr2:12857961-12858602
  hypo

SEQ ID NO: 140911 - DNA, 30 bp, Homo sapiens; identical to SEQ ID NO: 1331
  chr2:12897042-12897072
  hypo

SEQ ID NO: 140912 - DNA, 97 bp, Homo sapiens; identical to SEQ ID NO: 62765
  chr2:14711509-14711606
  hypo

SEQ ID NO: 140913 - DNA, 2014 bp, Homo sapiens; identical to SEQ ID NO: 105500
  chr2:14773808-14775822
  hypo

SEQ ID NO: 140914 - DNA, 43 bp, Homo sapiens; identical to SEQ ID NO: 62767
  chr2:14901340-14901383
  hypo

SEQ ID NO: 140915 - DNA, 39 bp, Homo sapiens; identical to SEQ ID NO: 62768
  chr2:14961049-14961088
  hypo

SEQ ID NO: 140916 - DNA, 38 bp, Homo sapiens; identical to SEQ ID NO: 15914
  chr2:14961327-14961365
  hypo

SEQ ID NO: 140917 - DNA, 31 bp, Homo sapiens; identical to SEQ ID NO: 15915
  chr2:15027588-15027619
  hypo

SEQ ID NO: 140918 - DNA, 180 bp, Homo sapiens
  chr2:15032511-15032691
  hypo
tggcacaatgggctcacagggcgacatagatcaagaccacgtaggacacctgagttctcttccctgtccgacaactaattttctgcatactttttaaatcgcttctcttccaaggaaatccatttcctcttctatgcaatgatgtgtttatattataccgactctatggctgctatttaa

SEQ ID NO: 140919 - DNA, 88 bp, Homo sapiens; identical to SEQ ID NO: 62772
  chr2:15084088-15084176
  hypo

SEQ ID NO: 140920 - DNA, 30 bp, Homo sapiens
  chr2:15246045-15246075
  hypo
attacgattccctttcgccttgagctacat

SEQ ID NO: 140921 - DNA, 454 bp, Homo sapiens; identical to SEQ ID NO: 15916
  chr2:15307075-15307529
  hypo

SEQ ID NO: 140922 - DNA, 30 bp, Homo sapiens
  chr2:15359007-15359037
  hypo
aatgcggggccgcaccggccaggcgtcatc

SEQ ID NO: 140923 - DNA, 30 bp, Homo sapiens; identical to SEQ ID NO: 15917
  chr2:15382063-15382093
  hypo

SEQ ID NO: 140924 - DNA, 30 bp, Homo sapiens; identical to SEQ ID NO: 62775
  chr2:15427997-15428027
  hypo

SEQ ID NO: 140925 - DNA, 91 bp, Homo sapiens
  chr2:15474599-15474690
  hypo
ccacgcctctcttctccttaagccaatttggcatcaaagtgttcacttgttctttacaggattttgacacgctggcaatattacatgcaca

SEQ ID NO: 140926 - DNA, 30 bp, Homo sapiens; identical to SEQ ID NO: 15919
  chr2:15475195-15475225
  hypo

SEQ ID NO: 140927 - DNA, 31 bp, Homo sapiens; identical to SEQ ID NO: 62778
  chr2:15579676-15579707
  hypo

SEQ ID NO: 140928 - DNA, 30 bp, Homo sapiens
  chr2:15613407-15613437
  hypo
ggtcagtatccaggccgtaggtatgagcca

SEQ ID NO: 140929 - DNA, 30 bp, Homo sapiens
  chr2:15635316-15635346
  hypo
gctctcaaaactaaccggcctgcacccact

SEQ ID NO: 140930 - DNA, 31 bp, Homo sapiens
  chr2:15703527-15703558
  hypo
acctccggggagccccgcccacattgcatgc

SEQ ID NO: 140931 - DNA, 30 bp, Homo sapiens; identical to SEQ ID NO: 62780
  chr2:15782568-15782598
  hypo

SEQ ID NO: 140932 - DNA, 101 bp, Homo sapiens; identical to SEQ ID NO: 62781
  chr2:15783081-15783182
  hypo

SEQ ID NO: 140933 - DNA, 31 bp, Homo sapiens; identical to SEQ ID NO: 62782
  chr2:15792394-15792425
  hypo

SEQ ID NO: 140934 - DNA, 46 bp, Homo sapiens
  chr2:15830328-15830374
  hypo
agagtgaccagcctgggctggcgcagaggtgactcatgcctgtaat

SEQ ID NO: 140935 - DNA, 30 bp, Homo sapiens
  chr2:15897697-15897727
  hypo
cccttccctctcagccgccgcactccagcc

SEQ ID NO: 140936 - DNA, 30 bp, Homo sapiens
  chr2:15906343-15906373
  hypo
ctcttctgcctgtgccgtactggcttcgtc

SEQ ID NO: 140937 - DNA, 30 bp, Homo sapiens
  chr2:15906813-15906843
  hypo
tgtccaggttaccttcgtggtttctcctga

SEQ ID NO: 140938 - DNA, 31 bp, Homo sapiens; identical to SEQ ID NO: 15920
  chr2:15910903-15910934
  hypo

SEQ ID NO: 140939 - DNA, 75 bp, Homo sapiens
  chr2:15950472-15950547
  hypo
ccctcaaaacacatgcgtggggcctcggtggcgaggacgcatcagagacagagcaagacgcgaagtctgccccta

SEQ ID NO: 140940 - DNA, 30 bp, Homo sapiens; identical to SEQ ID NO: 62786
  chr2:15950930-15950960
  hypo

SEQ ID NO: 140941 - DNA, 313 bp, Homo sapiens
  chr2:15982988-15983301
  hypo
cttgtgaagccacagggcaggcgtgccaccacactgaccctgcagaggccggggacaaagcagtgcggggccgcactgctgctgaggccggccccagcaaacctgattatggggcctctgccacggtctgcccgcgtctttcagagagagcagtctttattcccccaggcaggtccctggacagacaggtctaaattgaatcaggccctggtccatggcacagagcgggctattcactggccctaccgtcccctagcaaaacaggcccccggccatatggttgtgcgggtaaattgggcggacgtgtggctgg

SEQ ID NO: 140942 - DNA, 30 bp, Homo sapiens
  chr2:15983575-15983605
  hypo
aggtgcggtgaggcacgtgaccgaggaagg

SEQ ID NO: 140943 - DNA, 232 bp, Homo sapiens; identical to SEQ ID NO: 37159
  chr2:16079904-16080136
  hypo

SEQ ID NO: 140944 - DNA, 87 bp, Homo sapiens; identical to SEQ ID NO: 105506
  chr2:16080304-16080391
  hypo

SEQ ID NO: 140945 - DNA, 169 bp, Homo sapiens; identical to SEQ ID NO: 37161
  chr2:16080605-16080774
  hypo

SEQ ID NO: 140946 - DNA, 1126 bp, Homo sapiens; identical to SEQ ID NO: 105510
  chr2:16081809-16082935
  hypo

SEQ ID NO: 140947 - DNA, 43 bp, Homo sapiens; identical to SEQ ID NO: 62792
  chr2:16105581-16105624
  hypo

SEQ ID NO: 140948 - DNA, 31 bp, Homo sapiens; identical to SEQ ID NO: 62793
  chr2:16121785-16121816
  hypo

SEQ ID NO: 140949 - DNA, 435 bp, Homo sapiens
  chr2:16124557-16124992
  hypo
tccccgtctccatggcgacgggagcagctgctctgttctgggccttggctgggctgtgcggggcggcctgcccgcctgtctgcctgcccgcccgcctgcccggccgtgggagctgccagcgccttgccctcccgctgcccacaggccctgccaggctgggcgcaagaaagcgtgtttactaacaccatccacacggctccctgggcatggtggctctgcccagaagatgtcaggccgagggcaccgggaggtgggcctggagccaggctgtctgcagcccggagagacagtcccggccggctgctgccctggcctgccagtctctgggcgagcgcaggcactgggggttaagaggcccccatgaggccctttctgaagtgaacgttcccttcctggaatgccttgccagagcctctggaacgttccagccccagc

SEQ ID NO: 140950 - DNA, 43 bp, Homo sapiens; identical to SEQ ID NO: 15925
  chr2:16274078-16274121
  hypo

SEQ ID NO: 140951 - DNA, 31 bp, Homo sapiens; identical to SEQ ID NO: 62796
  chr2:16396900-16396931
  hypo

SEQ ID NO: 140952 - DNA, 31 bp, Homo sapiens; identical to SEQ ID NO: 62797
  chr2:16705037-16705068
  hypo

SEQ ID NO: 140953 - DNA, 145 bp, Homo sapiens
  chr2:16826646-16826791
  hypo
agcttccttatataataaaaacgaagcggatatgcaccttatatagccgctgtggagtttaaatgagctcctgcaatgacacggctagtgcagtatctgatatgtaatagacattttaaaatgcggagttagaattgaatgcctg

SEQ ID NO: 140954 - DNA, 40 bp, Homo sapiens; identical to SEQ ID NO: 62799
  chr2:17090480-17090520
  hypo

SEQ ID NO: 140955 - DNA, 30 bp, Homo sapiens; identical to SEQ ID NO: 62800
  chr2:17464171-17464201
  hypo

SEQ ID NO: 140956 - DNA, 668 bp, Homo sapiens; identical to SEQ ID NO: 105516
  chr2:17719769-17720437
  hypo

SEQ ID NO: 140957 - DNA, 99 bp, Homo sapiens
  chr2:17830609-17830708
  hypo
ggaacctacctcgtcgccccgattccatcccctcccgacacctgactgcgcgtgttctcctttgcagttctttccttatggagacgcctccaagtttgc

SEQ ID NO: 140958 - DNA, 255 bp, Homo sapiens
  chr2:17998148-17998403
  hypo
tctgtccagcggaggcggaaagccagcgagagggagaagctcaggatgaggaccttggcagatgccctgcacaccctccggaattacctgccacctgtctacagccagagaggccagcctctcaccaagatccagacactcaagtacaccatcaagtacatcggggaactcacagacctccttaaccgcggcagagagcccagagcccagagcgcgtgagctccatccggggaaactgaccggttccagcctcct

SEQ ID NO: 140959 - DNA, 285 bp, Homo sapiens; identical to SEQ ID NO: 62803
  chr2:18112740-18113025
  hypo

SEQ ID NO: 140960 - DNA, 30 bp, Homo sapiens; identical to SEQ ID NO: 15928
  chr2:19249122-19249152
  hypo

SEQ ID NO: 140961 - DNA, 31 bp, Homo sapiens; identical to SEQ ID NO: 62805
  chr2:19605841-19605872
  hypo

SEQ ID NO: 140962 - DNA, 64 bp, Homo sapiens; identical to SEQ ID NO: 62806
  chr2:20001577-20001641
  hypo

SEQ ID NO: 140963 - DNA, 31 bp, Homo sapiens; identical to SEQ ID NO: 62807
  chr2:20047967-20047998
  hypo

SEQ ID NO: 140964 - DNA, 120 bp, Homo sapiens; identical to SEQ ID NO: 105540
  chr2:20101401-20101521
  hypo

SEQ ID NO: 140965 - DNA, 170 bp, Homo sapiens; identical to SEQ ID NO: 62809
  chr2:20111756-20111926
  hypo

SEQ ID NO: 140966 - DNA, 30 bp, Homo sapiens
  chr2:20188031-20188061
  hypo
atttattattcataccgcattcaaagttgt

SEQ ID NO: 140967 - DNA, 31 bp, Homo sapiens; identical to SEQ ID NO: 15931
  chr2:20247560-20247591
  hypo

SEQ ID NO: 140968 - DNA, 30 bp, Homo sapiens
  chr2:20250188-20250218
  hypo
acacaaccacattcgcgaagtcattaaagt

SEQ ID NO: 140969 - DNA, 40 bp, Homo sapiens; identical to SEQ ID NO: 62811
  chr2:20253273-20253313
  hypo

SEQ ID NO: 140970 - DNA, 30 bp, Homo sapiens
  chr2:20368078-20368108
  hypo
ctgtgacacgcagcacgaggccaccctgct

SEQ ID NO: 140971 - DNA, 30 bp, Homo sapiens
  chr2:20368651-20368681
  hypo
aggggatcggagcctcgcccggttggtggg

SEQ ID NO: 140972 - DNA, 30 bp, Homo sapiens
  chr2:20382111-20382141
  hypo
caaaaggcacacaagcgggcggggctgtgt

SEQ ID NO: 140973 - DNA, 30 bp, Homo sapiens
  chr2:20382559-20382589
  hypo
aatgtgagacgcaggcgtctgcttctccga

SEQ ID NO: 140974 - DNA, 738 bp, Homo sapiens; identical to SEQ ID NO: 105551
  chr2:20424155-20424893
  hypo

SEQ ID NO: 140975 - DNA, 30 bp, Homo sapiens; identical to SEQ ID NO: 62813
  chr2:20432766-20432796
  hypo

SEQ ID NO: 140976 - DNA, 138 bp, Homo sapiens; identical to SEQ ID NO: 62814
  chr2:20456197-20456335
  hypo

SEQ ID NO: 140977 - DNA, 30 bp, Homo sapiens
  chr2:20472003-20472033
  hypo
aagaagccagataaacgtgggctcaaaatt

SEQ ID NO: 140978 - DNA, 30 bp, Homo sapiens; identical to SEQ ID NO: 15934
  chr2:20494232-20494262
  hypo

SEQ ID NO: 140979 - DNA, 30 bp, Homo sapiens
  chr2:20500649-20500679
  hypo
cacatgagaaaaaagcgtatctgatttctt

SEQ ID NO: 140980 - DNA, 82 bp, Homo sapiens; identical to SEQ ID NO: 62816
  chr2:20521040-20521122
  hypo

SEQ ID NO: 140981 - DNA, 30 bp, Homo sapiens; identical to SEQ ID NO: 62817
  chr2:20529400-20529430
  hypo

SEQ ID NO: 140982 - DNA, 121 bp, Homo sapiens
  chr2:20544754-20544875
  hypo
aaaaaaaaaaagaaaagaagattccgctttacctcttgtggaaagcttttcctgtccctgcagtctctacctacatgtgtccacagcacttttttcttttttttttttttgcggcggggcc

SEQ ID NO: 140983 - DNA, 277 bp, Homo sapiens; identical to SEQ ID NO: 62818
  chr2:20574693-20574970
  hypo

SEQ ID NO: 140984 - DNA, 164 bp, Homo sapiens; identical to SEQ ID NO: 15936
  chr2:20594842-20595006
  hypo

SEQ ID NO: 140985 - DNA, 121 bp, Homo sapiens
  chr2:20642225-20642346
  hypo
gccaccgctcccggccaacttttccatttttaaagctcattgcatagagatggaagattgacaattttcctagagacattaaactactcctaaattaggaaatattttttttttttttttt

SEQ ID NO: 140986 - DNA, 21 bp, Homo sapiens
  chr2:20642620-20642641
  hypo
ccaccgcgcccggcggaaata

SEQ ID NO: 140987 - DNA, 361 bp, Homo sapiens; identical to SEQ ID NO: 1356
  chr2:20646412-20646773
  hypo

SEQ ID NO: 140988 - DNA, 925 bp, Homo sapiens; identical to SEQ ID NO: 105556
  chr2:20646843-20647768
  hypo

SEQ ID NO: 140989 - DNA, 140 bp, Homo sapiens; identical to SEQ ID NO: 15940
  chr2:20666558-20666698
  hypo

SEQ ID NO: 140990 - DNA, 30 bp, Homo sapiens
  chr2:20669404-20669434
  hypo
cgttttcattttgtacggggtcggcacgtt

SEQ ID NO: 140991 - DNA, 49 bp, Homo sapiens
  chr2:20705784-20705833
  hypo
aggataaattttcaccgattatcgcccagaacagcggtggatgaatctg

SEQ ID NO: 140992 - DNA, 534 bp, Homo sapiens; identical to SEQ ID NO: 62825
  chr2:20841041-20841575
  hypo

SEQ ID NO: 140993 - DNA, 30 bp, Homo sapiens
  chr2:20841977-20842007
  hypo
ggcgtgcaggggctgcgggcatctgacgcc

SEQ ID NO: 140994 - DNA, 2022 bp, Homo sapiens; identical to SEQ ID NO: 105559
  chr2:20865452-20867474
  hypo

SEQ ID NO: 140995 - DNA, 65 bp, Homo sapiens
  chr2:20894620-20894685
  hypo
cccacatacaagccacgaggccatcaagtgactggcttgtctctttctcacgtgagactgcactg

SEQ ID NO: 140996 - DNA, 163 bp, Homo sapiens; identical to SEQ ID NO: 62828
  chr2:20965391-20965554
  hypo

SEQ ID NO: 140997 - DNA, 865 bp, Homo sapiens; identical to SEQ ID NO: 1360
  chr2:21022198-21023063
  hypo

SEQ ID NO: 140998 - DNA, 102 bp, Homo sapiens; identical to SEQ ID NO: 62830
  chr2:21079878-21079980
  hypo

SEQ ID NO: 140999 - DNA, 131 bp, Homo sapiens; identical to SEQ ID NO: 62831
  chr2:21346723-21346854
  hypo

SEQ ID NO: 141000 - DNA, 30 bp, Homo sapiens; identical to SEQ ID NO: 37209
  chr2:21595656-21595686
  hypo

SEQ ID NO: 141001 - DNA, 31 bp, Homo sapiens; identical to SEQ ID NO: 15944
  chr2:22237527-22237558
  hypo

SEQ ID NO: 141002 - DNA, 30 bp, Homo sapiens
  chr2:22585889-22585919
  hypo
taaagtgtctgtggccgggagcggtggcta

SEQ ID NO: 141003 - DNA, 30 bp, Homo sapiens; identical to SEQ ID NO: 62834
  chr2:23093738-23093768
  hypo

SEQ ID NO: 141004 - DNA, 446 bp, Homo sapiens
  chr2:23546893-23547339
  hypo
gggacccagatctgggacagtcgaggtggccaccagtcaccaggcgttctcaggattctctttcagtttgagaggccacccttatttggataaacatgcgtaccgaattcaagaggcactaataccacggtgcgatgaagtgaaaaggcaaacacgcggagtgccagatctcccaacacaaacatggtcccaagcctggcgcacctggattgggcttgggatttttaagccaacaaatggggtgggagacagggaaagagagggccgggaagaaaaaccacaggctcccagaatccaaaggaaagtggcatcctcacccgatgagcagggtctggcacagggctgagcacatgacagccagtaagtctctgctgaaggatgcctgaaatctgcgcggttctaccaccgaaactaatcccgactatgtctcccgcctcctccctaca

SEQ ID NO: 141005 - DNA, 73 bp, Homo sapiens; identical to SEQ ID NO: 62836
  chr2:23573444-23573517
  hypo

SEQ ID NO: 141006 - DNA, 30 bp, Homo sapiens; identical to SEQ ID NO: 15946
  chr2:23607167-23607197
  hypo

SEQ ID NO: 141007 - DNA, 30 bp, Homo sapiens
  chr2:23635657-23635687
  hypo
accacttgtctcctccgcaagaagctcgca

SEQ ID NO: 141008 - DNA, 30 bp, Homo sapiens
  chr2:23636061-23636091
  hypo
atcaaggcagctcctcgacctcacattggg

SEQ ID NO: 141009 - DNA, 110 bp, Homo sapiens
  chr2:23650983-23651093
  hypo
tgacagagcacctgccgcatggcctcatccacgacagctgccatccagagagaacagagtttggaccgtgtccgcagaaggccttggagtgttgacgtgggcaggtctag

SEQ ID NO: 141010 - DNA, 80 bp, Homo sapiens
  chr2:23679397-23679477
  hypo
tctctagtaaggccacgtgatgcgtgcgtctagcacccacgagtgaggagccggaaacattctcccgcgccagctctgcg

SEQ ID NO: 141011 - DNA, 31 bp, Homo sapiens; identical to SEQ ID NO: 15947
  chr2:23725076-23725107
  hypo

SEQ ID NO: 141012 - DNA, 435 bp, Homo sapiens
  chr2:23746910-23747345
  hypo
catgccttcctcttccgaaggccttccccatctagggttttttctccccatgacacctcagtgtcgtaggtagcggagatgcaagtgttcccatttctcggaaaaggaagccgatgctggagcgggggatgacttgctcagtgctgtgctagggagtggcagagccacccaggcccaagtgcccggctcctcatccacatctctttctattacaccaaacccagagcgggcaggcagggcagaagagactacagaagcacaggcgcctgctgggccggccttggctcggaggggctcaggaagacccaggaagtagcaggccaggaaatacctttaggtcctgccccgggctcccgggaggcgtcggcaggagaagcagggcagcagctgtgagtcacggtgatggatgttcatggctcacgggtgggcggctcg

SEQ ID NO: 141013 - DNA, 31 bp, Homo sapiens; identical to SEQ ID NO: 62841
  chr2:23767027-23767058
  hypo

SEQ ID NO: 141014 - DNA, 356 bp, Homo sapiens; identical to SEQ ID NO: 15948
  chr2:23785003-23785359
  hypo

SEQ ID NO: 141015 - DNA, 215 bp, Homo sapiens; identical to SEQ ID NO: 15949
  chr2:23793021-23793236
  hypo

SEQ ID NO: 141016 - DNA, 77 bp, Homo sapiens
  chr2:23795840-23795917
  hypo
agccaccgcgcccggcccaaaaacagtaatttctgtgggtgccgtgatgaggatgatgaagacgtaaccccgtggtg

SEQ ID NO: 141017 - DNA, 151 bp, Homo sapiens
  chr2:23798773-23798924
  hypo
gagcaatggggagcacgtttgtggtcaattcctctagcacccgcaagagctgggctgaaagtgaggcctcagctatactgcgtcaccatcgcctcttccattagaaatatgctgaggggggccgcgcccagtggctcacgcctggagtccc

SEQ ID NO: 141018 - DNA, 30 bp, Homo sapiens
  chr2:23801670-23801700
  hypo
atttcagaggagccccgtggctgcctctca

SEQ ID NO: 141019 - DNA, 207 bp, Homo sapiens
  chr2:23807139-23807346
  hypo
ccataccggggcaggcggcggtgctgctcaaaggatatttattccttaaccgcccagggactgggggcagagctgcgtaccctgctcctggaaacaggcaccctcctcccagcttcgccctctggggattagaatggcagaaactctgggactagggaggatccaaatttggaaagtattggctctgcccagcggtgttcatgctcg

SEQ ID NO: 141020 - DNA, 176 bp, Homo sapiens; identical to SEQ ID NO: 62844
  chr2:23841356-23841532
  hypo

SEQ ID NO: 141021 - DNA, 211 bp, Homo sapiens; identical to SEQ ID NO: 62845
  chr2:23842952-23843163
  hypo

SEQ ID NO: 141022 - DNA, 180 bp, Homo sapiens
  chr2:23850376-23850556
  hypo
agacccacactcaggcgctgacttgtttgggtgagtcttgaagtccccacaataaaactgtagtagctccttcggtgcaccttgcgtctgaggagccgcctccgaggccgtgtgtgctgccctgtttgtctctttgtctcgctgcccctcggtgtgactctgccgcgtcccctctcttgt

SEQ ID NO: 141023 - DNA, 30 bp, Homo sapiens; identical to SEQ ID NO: 62846
  chr2:23853217-23853247
  hypo

SEQ ID NO: 141024 - DNA, 36 bp, Homo sapiens; identical to SEQ ID NO: 62847
  chr2:23863677-23863713
  hypo

SEQ ID NO: 141025 - DNA, 66 bp, Homo sapiens; identical to SEQ ID NO: 62848
  chr2:23865087-23865153
  hypo

SEQ ID NO: 141026 - DNA, 31 bp, Homo sapiens; identical to SEQ ID NO: 62849
  chr2:23881925-23881956
  hypo

SEQ ID NO: 141027 - DNA, 140 bp, Homo sapiens; identical to SEQ ID NO: 15951
  chr2:23893203-23893343
  hypo

SEQ ID NO: 141028 - DNA, 31 bp, Homo sapiens; identical to SEQ ID NO: 62851
  chr2:23901107-23901138
  hypo

SEQ ID NO: 141029 - DNA, 31 bp, Homo sapiens; identical to SEQ ID NO: 62852
  chr2:23906650-23906681
  hypo

SEQ ID NO: 141030 - DNA, 30 bp, Homo sapiens; identical to SEQ ID NO: 15952
  chr2:23913079-23913109
  hypo

SEQ ID NO: 141031 - DNA, 30 bp, Homo sapiens; identical to SEQ ID NO: 62854
  chr2:23914341-23914371
  hypo

SEQ ID NO: 141032 - DNA, 150 bp, Homo sapiens
  chr2:23918664-23918814
  hypo
cccgaacccggccgcgcctctctgcaggtatgaaggggcacgccccgaacctcccaagaagcagtgtcttgggctcagtggttccagtgaggtgccaggcacagatgccgacagtcttagagtgtgtcccaagggcgcccatccatgtcc

SEQ ID NO: 141033 - DNA, 31 bp, Homo sapiens; identical to SEQ ID NO: 62856
  chr2:23925991-23926022
  hypo

SEQ ID NO: 141034 - DNA, 30 bp, Homo sapiens
  chr2:23980044-23980074
  hypo
gtaaagcaatgcactcgaaacgatacaccc

SEQ ID NO: 141035 - DNA, 31 bp, Homo sapiens; identical to SEQ ID NO: 15953
  chr2:24016852-24016883
  hypo

SEQ ID NO: 141036 - DNA, 30 bp, Homo sapiens
  chr2:24026195-24026225
  hypo
acacacacacacacgcgcacgcatttgttt

SEQ ID NO: 141037 - DNA, 30 bp, Homo sapiens; identical to SEQ ID NO: 15954
  chr2:24049917-24049947
  hypo

SEQ ID NO: 141038 - DNA, 175 bp, Homo sapiens; identical to SEQ ID NO: 62859
  chr2:24060294-24060469
  hypo

SEQ ID NO: 141039 - DNA, 20 bp, Homo sapiens
  chr2:24123198-24123218
  hypo
agcgccgggattacaagcat

SEQ ID NO: 141040 - DNA, 99 bp, Homo sapiens; identical to SEQ ID NO: 62860
  chr2:24160943-24161042
  hypo

SEQ ID NO: 141041 - DNA, 98 bp, Homo sapiens; identical to SEQ ID NO: 62861
  chr2:24240163-24240261
  hypo

SEQ ID NO: 141042 - DNA, 30 bp, Homo sapiens; identical to SEQ ID NO: 62862
  chr2:24253625-24253655
  hypo

SEQ ID NO: 141043 - DNA, 40 bp, Homo sapiens; identical to SEQ ID NO: 62863
  chr2:24279834-24279874
  hypo

SEQ ID NO: 141044 - DNA, 30 bp, Homo sapiens; identical to SEQ ID NO: 105571
  chr2:24306893-24306923
  hypo

SEQ ID NO: 141045 - DNA, 30 bp, Homo sapiens; identical to SEQ ID NO: 105572
  chr2:24306946-24306976
  hypo

SEQ ID NO: 141046 - DNA, 230 bp, Homo sapiens
  chr2:24307923-24308153
  hypo
cttctctctagggaacgagacccaacctcttggcgggcggattggtccattttccaggcatggccaggcttttggcacatttatgtaacaggctggcatcccgcccatcttgagcatgggtgggcaagctgggtgctgctaagagaagagaaaggagccgttgggagtgggggtggggaaggaaggcaaaacgcagtcctgggatccttatcactcgcctcctcctgaca

SEQ ID NO: 141047 - DNA, 39 bp, Homo sapiens; identical to SEQ ID NO: 62864
  chr2:24318005-24318044
  hypo

SEQ ID NO: 141048 - DNA, 30 bp, Homo sapiens; identical to SEQ ID NO: 62865
  chr2:24392153-24392183
  hypo

SEQ ID NO: 141049 - DNA, 30 bp, Homo sapiens; identical to SEQ ID NO: 62866
  chr2:24394927-24394957
  hypo

SEQ ID NO: 141050 - DNA, 31 bp, Homo sapiens; identical to SEQ ID NO: 15957
  chr2:24412760-24412791
  hypo

SEQ ID NO: 141051 - DNA, 30 bp, Homo sapiens; identical to SEQ ID NO: 62868
  chr2:24413767-24413797
  hypo

SEQ ID NO: 141052 - DNA, 30 bp, Homo sapiens; identical to SEQ ID NO: 15958
  chr2:24426359-24426389
  hypo

SEQ ID NO: 141053 - DNA, 215 bp, Homo sapiens; identical to SEQ ID NO: 15959
  chr2:24443621-24443836
  hypo

SEQ ID NO: 141054 - DNA, 30 bp, Homo sapiens; identical to SEQ ID NO: 15960
  chr2:24444076-24444106
  hypo

SEQ ID NO: 141055 - DNA, 45 bp, Homo sapiens
  chr2:24492773-24492818
  hypo
gctcgggcacagctccggtactactaatagcggcaatggcaagag

SEQ ID NO: 141056 - DNA, 329 bp, Homo sapiens; identical to SEQ ID NO: 15961
  chr2:24584024-24584353
  hypo

SEQ ID NO: 141057 - DNA, 23 bp, Homo sapiens
  chr2:24584977-24585000
  hypo
accacgcccggccaagacccaag

SEQ ID NO: 141058 - DNA, 30 bp, Homo sapiens
  chr2:24631058-24631088
  hypo
cacgcccggccggtccggaacctttttggc

SEQ ID NO: 141059 - DNA, 41 bp, Homo sapiens; identical to SEQ ID NO: 62874
  chr2:24678877-24678918
  hypo

SEQ ID NO: 141060 - DNA, 29 bp, Homo sapiens
  chr2:24681768-24681797
  hypo
tgagccaccgcgcccggccccatctctga

SEQ ID NO: 141061 - DNA, 30 bp, Homo sapiens
  chr2:24693395-24693425
  hypo
ggctctggaaggaaccgagagcacgtagtg

SEQ ID NO: 141062 - DNA, 257 bp, Homo sapiens; identical to SEQ ID NO: 105576
  chr2:24714924-24715181
  hypo

SEQ ID NO: 141063 - DNA, 30 bp, Homo sapiens; identical to SEQ ID NO: 37219
  chr2:24739679-24739709
  hypo

SEQ ID NO: 141064 - DNA, 37 bp, Homo sapiens
  chr2:24763332-24763369
  hypo
ttttttttttttgagacggagtttcgcttttgtcacc

SEQ ID NO: 141065 - DNA, 44 bp, Homo sapiens
  chr2:24844610-24844654
  hypo
agtgctgggattacaggcatgcgccaccacgcccagcctttcag

SEQ ID NO: 141066 - DNA, 30 bp, Homo sapiens
  chr2:24914366-24914396
  hypo
cctcaagaggcaacacgacgaaatagccat

SEQ ID NO: 141067 - DNA, 156 bp, Homo sapiens
  chr2:25034776-25034932
  hypo
tttaatgtgattactgatctatttggatctcaatctaccatagtattttattgtcttatttgtcacgtatagtcaacattcctttagtgttagacacatatttacccttttcagtgctcttcattttcacatttccatctgcgattattttctttc

SEQ ID NO: 141068 - DNA, 517 bp, Homo sapiens; identical to SEQ ID NO: 62880
  chr2:25044264-25044781
  hypo

SEQ ID NO: 141069 - DNA, 206 bp, Homo sapiens; identical to SEQ ID NO: 15966
  chr2:25047256-25047462
  hypo

SEQ ID NO: 141070 - DNA, 30 bp, Homo sapiens
  chr2:25055948-25055978
  hypo
gtggcttgtctgggccgctatttggtctca

SEQ ID NO: 141071 - DNA, 349 bp, Homo sapiens
  chr2:25057322-25057671
  hypo
aactcgtggccctccccggcccctccctcaccaggggtcgatgagtatctcgaccagggccgtgcagagcaggacgacgcaggagcagctgaaggcagccccactctgcttctccttctccaccgagtagcgggtttccatctcggggtccatgaaccgcatggacaagaggaaggtgtttctcttctttactctgcagtgggaacaagccccatgaatcccaaatgccacatctgccttggcctagcaggggggccgtatttgggatgctcagtttcctgaatcccttgtcagggcccgggaggagtggtgggcctggacgcttccgggtggcgcttacacttgggcg

SEQ ID NO: 141072 - DNA, 30 bp, Homo sapiens; identical to SEQ ID NO: 62883
  chr2:25065535-25065565
  hypo

SEQ ID NO: 141073 - DNA, 276 bp, Homo sapiens; identical to SEQ ID NO: 15968
  chr2:25075398-25075674
  hypo

SEQ ID NO: 141074 - DNA, 39 bp, Homo sapiens
  chr2:25141801-25141840
  hypo
cggctgagtactcggccgagtattcgggctcggagaagc

SEQ ID NO: 141075 - DNA, 30 bp, Homo sapiens; identical to SEQ ID NO: 62885
  chr2:25171477-25171507
  hypo

SEQ ID NO: 141076 - DNA, 23 bp, Homo sapiens
  chr2:25193334-25193357
  hypo
tttttttttttttttttgagacg

SEQ ID NO: 141077 - DNA, 29 bp, Homo sapiens
  chr2:25220423-25220452
  hypo
ttacaggcgtgagccactgtgcccagcct

SEQ ID NO: 141078 - DNA, 30 bp, Homo sapiens
  chr2:25237679-25237709
  hypo
ggagttgcttgtgcacgtgcatgtctgtgc

SEQ ID NO: 141079 - DNA, 80 bp, Homo sapiens; identical to SEQ ID NO: 37222
  chr2:25265054-25265134
  hypo

SEQ ID NO: 141080 - DNA, 30 bp, Homo sapiens; identical to SEQ ID NO: 62888
  chr2:25269261-25269291
  hypo

SEQ ID NO: 141081 - DNA, 30 bp, Homo sapiens; identical to SEQ ID NO: 62889
  chr2:25342403-25342433
  hypo

SEQ ID NO: 141082 - DNA, 30 bp, Homo sapiens
  chr2:25367891-25367921
  hypo
aatcgaggaacagtccggagaaggaggagg

SEQ ID NO: 141083 - DNA, 60 bp, Homo sapiens; identical to SEQ ID NO: 62890
  chr2:25369950-25370010
  hypo

SEQ ID NO: 141084 - DNA, 33 bp, Homo sapiens
  chr2:25374805-25374838
  hypo
caggagcgtgagcggcggcggcaggtggtggag

SEQ ID NO: 141085 - DNA, 30 bp, Homo sapiens; identical to SEQ ID NO: 15971
  chr2:25383389-25383419
  hypo

SEQ ID NO: 141086 - DNA, 744 bp, Homo sapiens; identical to SEQ ID NO: 105586
  chr2:25391012-25391756
  hypo

SEQ ID NO: 141087 - DNA, 30 bp, Homo sapiens; identical to SEQ ID NO: 62893
  chr2:25426136-25426166
  hypo

SEQ ID NO: 141088 - DNA, 234 bp, Homo sapiens; identical to SEQ ID NO: 1368
  chr2:25439138-25439372
  hypo

SEQ ID NO: 141089 - DNA, 121 bp, Homo sapiens; identical to SEQ ID NO: 1369
  chr2:25440005-25440126
  hypo

SEQ ID NO: 141090 - DNA, 31 bp, Homo sapiens; identical to SEQ ID NO: 15975
  chr2:25444163-25444194
  hypo

SEQ ID NO: 141091 - DNA, 150 bp, Homo sapiens; identical to SEQ ID NO: 1370
  chr2:25457151-25457301
  hypo

SEQ ID NO: 141092 - DNA, 140 bp, Homo sapiens; identical to SEQ ID NO: 1371
  chr2:25458562-25458702
  hypo

SEQ ID NO: 141093 - DNA, 96 bp, Homo sapiens; identical to SEQ ID NO: 1372
  chr2:25459790-25459886
  hypo

SEQ ID NO: 141094 - DNA, 109 bp, Homo sapiens; identical to SEQ ID NO: 1373
  chr2:25461983-25462092
  hypo

SEQ ID NO: 141095 - DNA, 449 bp, Homo sapiens; identical to SEQ ID NO: 1374
  chr2:25463163-25463612
  hypo

SEQ ID NO: 141096 - DNA, 173 bp, Homo sapiens; identical to SEQ ID NO: 1375
  chr2:25464416-25464589
  hypo

SEQ ID NO: 141097 - DNA, 775 bp, Homo sapiens; identical to SEQ ID NO: 1376
  chr2:25466754-25467529
  hypo

SEQ ID NO: 141098 - DNA, 99 bp, Homo sapiens; identical to SEQ ID NO: 1377
  chr2:25468110-25468209
  hypo

SEQ ID NO: 141099 - DNA, 311 bp, Homo sapiens; identical to SEQ ID NO: 1378
  chr2:25468876-25469187
  hypo

SEQ ID NO: 141100 - DNA, 174 bp, Homo sapiens; identical to SEQ ID NO: 1379
  chr2:25469473-25469647
  hypo

SEQ ID NO: 141101 - DNA, 124 bp, Homo sapiens; identical to SEQ ID NO: 1380
  chr2:25469905-25470029
  hypo

SEQ ID NO: 141102 - DNA, 163 bp, Homo sapiens; identical to SEQ ID NO: 1381
  chr2:25470448-25470611
  hypo

SEQ ID NO: 141103 - DNA, 193 bp, Homo sapiens; identical to SEQ ID NO: 1382
  chr2:25470891-25471084
  hypo

SEQ ID NO: 141104 - DNA, 30 bp, Homo sapiens; identical to SEQ ID NO: 62910
  chr2:25481256-25481286
  hypo

SEQ ID NO: 141105 - DNA, 91 bp, Homo sapiens; identical to SEQ ID NO: 1383
  chr2:25497815-25497906
  hypo

SEQ ID NO: 141106 - DNA, 238 bp, Homo sapiens; identical to SEQ ID NO: 1384
  chr2:25505303-25505541
  hypo

SEQ ID NO: 141107 - DNA, 30 bp, Homo sapiens; identical to SEQ ID NO: 1385
  chr2:25522993-25523023
  hypo

SEQ ID NO: 141108 - DNA, 189 bp, Homo sapiens
  chr2:25533429-25533618
  hypo
cacagctctgcactccgcctccctgatcctgggctccgggattattctcctgtgggagggtcttggctactctcatttttctttccgttctatccgtaaaatatttcccaagcacccactctgtgctattccaggtccgggggattcacatggaagaaaagggccgtgaccctgcgctccaggctagca

SEQ ID NO: 141109 - DNA, 101 bp, Homo sapiens
  chr2:25535160-25535261
  hypo
ggcagcctaggggcccgcaggtatccaggactatcagttcttttcccatggattcagaagggaggagcctgatcggtcgccccgggcgtcctgcccagtgg

SEQ ID NO: 141110 - DNA, 162 bp, Homo sapiens
  chr2:25536306-25536468
  hypo
gggagggtgggcccccgcggcctcgtgtctgccgtgccccaccccagaacttgtctttggtcccctagaagctactgaacaccttaaggaaacagaggcagctgagagagaaagtgattcacgtgaaggcccacggctagtaagaggcgggtccgagaagga

SEQ ID NO: 141111 - DNA, 181 bp, Homo sapiens
  chr2:25536756-25536937
  hypo
gtccccagcagagcccgctgctcacctttcggtcctcctcccgctccgcagcagagctgctggtgtccccggggccgctggagggcatggcgggcatctgggcgccgggaggcaggctggggctgcgcggggctggggggctgctgggctttggggaaggaattatcgtggtctttggagg

SEQ ID NO: 141112 - DNA, 30 bp, Homo sapiens; identical to SEQ ID NO: 62915
  chr2:25537246-25537276
  hypo

SEQ ID NO: 141113 - DNA, 85 bp, Homo sapiens
  chr2:25551560-25551645
  hypo
tgcggtgcctagagcgaccccccacaatccccattctaggggtcgcttggcagagcccccaaggcactgcgtcagtggaaaggct

SEQ ID NO: 141114 - DNA, 30 bp, Homo sapiens; identical to SEQ ID NO: 62916
  chr2:25566725-25566755
  hypo

SEQ ID NO: 141115 - DNA, 71 bp, Homo sapiens
  chr2:25586740-25586811
  hypo
ccaagcctgagcacccgtgccaggcctggggagatcctcagccacctggcaccgggcgtggggcttgggcc

SEQ ID NO: 141116 - DNA, 30 bp, Homo sapiens
  chr2:25594274-25594304
  hypo
tacagaacggtcacacgcgatcctgtgtgt

SEQ ID NO: 141117 - DNA, 30 bp, Homo sapiens; identical to SEQ ID NO: 15993
  chr2:25600737-25600767
  hypo

SEQ ID NO: 141118 - DNA, 120 bp, Homo sapiens
  chr2:25623181-25623301
  hypo
tcaagatggagcaccgcactgtgcaaatgcacctcgtctcaaaagcacagatgggctttatgttcagagaggcaggcccttctccatggagactgctgaacactccgctcaacgcgaacc

SEQ ID NO: 141119 - DNA, 90 bp, Homo sapiens; identical to SEQ ID NO: 15994
  chr2:25627710-25627800
  hypo

SEQ ID NO: 141120 - DNA, 130 bp, Homo sapiens
  chr2:25656661-25656791
  hypo
ctgaggcaaggtcttccttggcggtcaaaagccacctagtatccaaggaaaatgagaatcagatacgcacgtgataatcctggactctggaagtgggctcagcctctgcgttcttacctgtttttgtttt

SEQ ID NO: 141121 - DNA, 31 bp, Homo sapiens; identical to SEQ ID NO: 62921
  chr2:25684629-25684660
  hypo

SEQ ID NO: 141122 - DNA, 210 bp, Homo sapiens; identical to SEQ ID NO: 62922
  chr2:25766959-25767169
  hypo

SEQ ID NO: 141123 - DNA, 45 bp, Homo sapiens; identical to SEQ ID NO: 62923
  chr2:25924789-25924834
  hypo

SEQ ID NO: 141124 - DNA, 41 bp, Homo sapiens
  chr2:25980216-25980257
  hypo
gaataccctggctgggcgcggtggctcacatctgtaatccc

SEQ ID NO: 141125 - DNA, 105 bp, Homo sapiens; identical to SEQ ID NO: 15995
  chr2:26027550-26027655
  hypo

SEQ ID NO: 141126 - DNA, 30 bp, Homo sapiens; identical to SEQ ID NO: 62926
  chr2:26105459-26105489
  hypo

SEQ ID NO: 141127 - DNA, 100 bp, Homo sapiens; identical to SEQ ID NO: 15996
  chr2:26153168-26153268
  hypo

SEQ ID NO: 141128 - DNA, 250 bp, Homo sapiens; identical to SEQ ID NO: 62928
  chr2:26204215-26204465
  hypo

SEQ ID NO: 141129 - DNA, 31 bp, Homo sapiens; identical to SEQ ID NO: 62929
  chr2:26215604-26215635
  hypo

SEQ ID NO: 141130 - DNA, 116 bp, Homo sapiens; identical to SEQ ID NO: 62930
  chr2:26217600-26217716
  hypo

SEQ ID NO: 141131 - DNA, 30 bp, Homo sapiens
  chr2:26251252-26251282
  hypo
gcatctggatcaggcgcaagctatcggccg

SEQ ID NO: 141132 - DNA, 38 bp, Homo sapiens; identical to SEQ ID NO: 62931
  chr2:26320143-26320181
  hypo

SEQ ID NO: 141133 - DNA, 164 bp, Homo sapiens; identical to SEQ ID NO: 62932
  chr2:26362292-26362456
  hypo

SEQ ID NO: 141134 - DNA, 30 bp, Homo sapiens
  chr2:26364149-26364179
  hypo
gaggcgaggggtcacgtttaaagcccagag

SEQ ID NO: 141135 - DNA, 101 bp, Homo sapiens
  chr2:26372939-26373040
  hypo
aatggagcatacggacaccgcccgtttccagagaaatcatggccgcatcagtgaaatccttagtgacagtgtggtgccagacattccgtccgctgtcacaa

SEQ ID NO: 141136 - DNA, 30 bp, Homo sapiens
  chr2:26373313-26373343
  hypo
cagtcagagcagcctcgttcctgaggaaga

SEQ ID NO: 141137 - DNA, 31 bp, Homo sapiens; identical to SEQ ID NO: 62933
  chr2:26385183-26385214
  hypo

SEQ ID NO: 141138 - DNA, 30 bp, Homo sapiens; identical to SEQ ID NO: 62934
  chr2:26393235-26393265
  hypo

SEQ ID NO: 141139 - DNA, 161 bp, Homo sapiens; identical to SEQ ID NO: 37247
  chr2:26395432-26395593
  hypo

SEQ ID NO: 141140 - DNA, 331 bp, Homo sapiens; identical to SEQ ID NO: 105617
  chr2:26395998-26396329
  hypo

SEQ ID NO: 141141 - DNA, 30 bp, Homo sapiens; identical to SEQ ID NO: 105618
  chr2:26396727-26396757
  hypo

SEQ ID NO: 141142 - DNA, 32 bp, Homo sapiens; identical to SEQ ID NO: 62937
  chr2:26405759-26405791
  hypo

SEQ ID NO: 141143 - DNA, 30 bp, Homo sapiens; identical to SEQ ID NO: 15998
  chr2:26411690-26411720
  hypo

SEQ ID NO: 141144 - DNA, 25 bp, Homo sapiens
  chr2:26493752-26493777
  hypo
ttttttttttttgagacggagtctc

SEQ ID NO: 141145 - DNA, 201 bp, Homo sapiens; identical to SEQ ID NO: 62940
  chr2:26524623-26524824
  hypo

SEQ ID NO: 141146 - DNA, 201 bp, Homo sapiens
  chr2:26525984-26526185
  hypo
gcttatagactttaccgagttgccttgagcaggaggttaccagtatatgctagtgtttgtttgcacctactcggggtgggttgaggccttccccaccggaactaaaaagacacaagaggtgacaaaggtgctactgaaagacatcataccaaggtttgggtcgcctctaaccctaggatcagacgacggtcctgcatttgt

SEQ ID NO: 141147 - DNA, 95 bp, Homo sapiens
  chr2:26527932-26528027
  hypo
tgaaaagtactgtatcgcctgagtaaaaaaaaaaaaaaaagctttcacagaggcagtaggagaaacaacctgcctagggcaacagtattatgatg

SEQ ID NO: 141148 - DNA, 34 bp, Homo sapiens; identical to SEQ ID NO: 62941
  chr2:26528086-26528120
  hypo

SEQ ID NO: 141149 - DNA, 60 bp, Homo sapiens
  chr2:26528392-26528452
  hypo
aaagataataacggccgagctgtcatagaaatcacagctaaaatgcgcaagttagcccat

SEQ ID NO: 141150 - DNA, 176 bp, Homo sapiens; identical to SEQ ID NO: 16001
  chr2:26534836-26535012
  hypo

SEQ ID NO: 141151 - DNA, 194 bp, Homo sapiens
  chr2:26535370-26535564
  hypo
attcccaggcataaacggtgtgtaatatcattgccctttgttacacttttggctgcagctcatgggtcaccaatggatgcccatacagagagccgatttaggtgagcccagcaaagccaagcatacttcagcgtctccatagaaacttcctgtctgtatcatagccacacgcctgcatgcgcacacacgcctcg

SEQ ID NO: 141152 - DNA, 113 bp, Homo sapiens; identical to SEQ ID NO: 62945
  chr2:26541945-26542058
  hypo

SEQ ID NO: 141153 - DNA, 44 bp, Homo sapiens; identical to SEQ ID NO: 62946
  chr2:26566583-26566627
  hypo

SEQ ID NO: 141154 - DNA, 30 bp, Homo sapiens; identical to SEQ ID NO: 16003
  chr2:26590880-26590910
  hypo

SEQ ID NO: 141155 - DNA, 64 bp, Homo sapiens
  chr2:26688523-26688587
  hypo
cccatgccccacatacgtggagtaggtctgggcgatgccgcaggtggcgcggtgcttgctgtag

SEQ ID NO: 141156 - DNA, 30 bp, Homo sapiens
  chr2:26688870-26688900
  hypo
tcagtcttgcctagccggatggcgatgtag

SEQ ID NO: 141157 - DNA, 132 bp, Homo sapiens; identical to SEQ ID NO: 62948
  chr2:26706035-26706167
  hypo

SEQ ID NO: 141158 - DNA, 31 bp, Homo sapiens; identical to SEQ ID NO: 1388
  chr2:26749880-26749911
  hypo

SEQ ID NO: 141159 - DNA, 93 bp, Homo sapiens; identical to SEQ ID NO: 62950
  chr2:26788280-26788373
  hypo

SEQ ID NO: 141160 - DNA, 204 bp, Homo sapiens
  chr2:26800291-26800495
  hypo
cctgcccaggtgcagcgaggcatggactgcaggtgcctgtggtcagtcctgtgcactaacaacctgtcatctcttccttgattgaaccatagatggtccagcagcatcggaagtactatcaagacaagacgggcacagtgcctcgagtcccctactttgcgatgcccgtgagggagccggaacggtaccccctccccaccgtcc

SEQ ID NO: 141161 - DNA, 95 bp, Homo sapiens; identical to SEQ ID NO: 16006
  chr2:26832823-26832918
  hypo

SEQ ID NO: 141162 - DNA, 188 bp, Homo sapiens; identical to SEQ ID NO: 62953
  chr2:26965248-26965436
  hypo

SEQ ID NO: 141163 - DNA, 462 bp, Homo sapiens
  chr2:26986219-26986681
  hypo
gccatgcggaaggcacggatttttggagactggagaacccaagcgcaaatccctaccccactgctcaccagcaggttcttaagcaaatcactctgcttcgctgaatttactgtcctcagctataaaatggtgtcctcggcaactggagctagatgccttcgccactttgctgaaagatatgaactgtgcccaaggtgggcggtatcagataggagccccgaagtggaaacgtccagcgtgggaatctcctctctacagggtccccaaggaactcccggcaggcccacttcagggctcctttctgacaccgcccagctcaacctctcaaaacgattcacaaaatgctgtaatagccacgatgcaccctcactgcactgtcccatccgccccttttacaaataggaagacccaaagataaaaataagaaaccaaggccaggcgcggtggttcacgcctgtaatc

SEQ ID NO: 141164 - DNA, 41 bp, Homo sapiens
  chr2:26993951-26993992
  hypo
ctaggcagacctacccgtggagaaagcgaagacaacccctg

SEQ ID NO: 141165 - DNA, 121 bp, Homo sapiens
  chr2:27007229-27007350
  hypo
gcacgcccgggctaatttgtgtgtgtgtgtatctttggtagaggtggggtttctttcttccttctcctccttctccttccccttctcttttttttttttttttttttttgagacagagtct

SEQ ID NO: 141166 - DNA, 121 bp, Homo sapiens
  chr2:27007589-27007710
  hypo
tttacaggcgtgagccaccacgctcggcaagatggagtttcgccatgttggccaggttggactcgaactcgaactcagtggttccgaacaacttggcctcccaaagcgctgggattacagg

SEQ ID NO: 141167 - DNA, 2682 bp, Homo sapiens; identical to SEQ ID NO: 105637
  chr2:27070260-27072942
  hypo

SEQ ID NO: 141168 - DNA, 28 bp, Homo sapiens
  chr2:27090274-27090302
  hypo
tctattgatggacattcggtttgttccc

SEQ ID NO: 141169 - DNA, 27 bp, Homo sapiens
  chr2:27090601-27090628
  hypo
cgtgagccaccgcgcccggcccccaat

SEQ ID NO: 141170 - DNA, 30 bp, Homo sapiens; identical to SEQ ID NO: 62960
  chr2:27196795-27196825
  hypo

SEQ ID NO: 141171 - DNA, 43 bp, Homo sapiens
  chr2:27224547-27224590
  hypo
aaatgcatatatacacacatacgtacatacatgtatacataca

SEQ ID NO: 141172 - DNA, 31 bp, Homo sapiens; identical to SEQ ID NO: 62961
  chr2:27246589-27246620
  hypo

SEQ ID NO: 141173 - DNA, 30 bp, Homo sapiens; identical to SEQ ID NO: 16011
  chr2:27247193-27247223
  hypo

SEQ ID NO: 141174 - DNA, 30 bp, Homo sapiens; identical to SEQ ID NO: 62963
  chr2:27248775-27248805
  hypo

SEQ ID NO: 141175 - DNA, 30 bp, Homo sapiens; identical to SEQ ID NO: 16012
  chr2:27249334-27249364
  hypo

SEQ ID NO: 141176 - DNA, 30 bp, Homo sapiens; identical to SEQ ID NO: 62965
  chr2:27252499-27252529
  hypo

SEQ ID NO: 141177 - DNA, 31 bp, Homo sapiens; identical to SEQ ID NO: 62966
  chr2:27269293-27269324
  hypo

SEQ ID NO: 141178 - DNA, 248 bp, Homo sapiens; identical to SEQ ID NO: 62967
  chr2:27303536-27303784
  hypo

SEQ ID NO: 141179 - DNA, 250 bp, Homo sapiens; identical to SEQ ID NO: 1395
  chr2:27308892-27309142
  hypo

SEQ ID NO: 141180 - DNA, 111 bp, Homo sapiens; identical to SEQ ID NO: 1396
  chr2:27309206-27309317
  hypo

SEQ ID NO: 141181 - DNA, 30 bp, Homo sapiens; identical to SEQ ID NO: 62970
  chr2:27323812-27323842
  hypo

SEQ ID NO: 141182 - DNA, 98 bp, Homo sapiens; identical to SEQ ID NO: 62971
  chr2:27354485-27354583
  hypo

SEQ ID NO: 141183 - DNA, 30 bp, Homo sapiens
  chr2:27360413-27360443
  hypo
aggggctgcggggccggaggcacaccaggc

SEQ ID NO: 141184 - DNA, 30 bp, Homo sapiens
  chr2:27372999-27373029
  hypo
agtcctgagaatgccgcgcgggagcggagc

SEQ ID NO: 141185 - DNA, 156 bp, Homo sapiens; identical to SEQ ID NO: 62972
  chr2:27433169-27433325
  hypo

SEQ ID NO: 141186 - DNA, 30 bp, Homo sapiens; identical to SEQ ID NO: 62973
  chr2:27439770-27439800
  hypo

SEQ ID NO: 141187 - DNA, 1079 bp, Homo sapiens; identical to SEQ ID NO: 105655
  chr2:27484880-27485959
  hypo

SEQ ID NO: 141188 - DNA, 30 bp, Homo sapiens; identical to SEQ ID NO: 105656
  chr2:27486232-27486262
  hypo

SEQ ID NO: 141189 - DNA, 142 bp, Homo sapiens; identical to SEQ ID NO: 62975
  chr2:27498158-27498300
  hypo

SEQ ID NO: 141190 - DNA, 30 bp, Homo sapiens; identical to SEQ ID NO: 16017
  chr2:27532710-27532740
  hypo

SEQ ID NO: 141191 - DNA, 72 bp, Homo sapiens
  chr2:27538033-27538105
  hypo
gctcagaaaataaagggaaaacgtcaaatgtactgtcccaaacagcaggacgactctgagaaagggtctgaa

SEQ ID NO: 141192 - DNA, 18 bp, Homo sapiens
  chr2:27543106-27543124
  hypo
gaaaaaaaaaaagaaaaa

SEQ ID NO: 141193 - DNA, 21 bp, Homo sapiens
  chr2:27578111-27578132
  hypo
gggcacggtggctcacgcctg

SEQ ID NO: 141194 - DNA, 30 bp, Homo sapiens; identical to SEQ ID NO: 62978
  chr2:27600308-27600338
  hypo

SEQ ID NO: 141195 - DNA, 301 bp, Homo sapiens
  chr2:27601406-27601707
  hypo
gcggaagccacaggtcgggcagggaggagtggggggccctgcgtgggtacgctgatgccgcctcaggttgcccaggctgctgcaggcaaaggggcagtggggacagcggtagggcttctcgccagtgtgggtgcgggtatgtcgtgtcaggttgacgagctgggctgaggcgtaggggcagcggccacagcggaacggcttctctccgctgtgtgtctgcatgtgccgcttcaggtggctcgagtagtgggacacgaaggtgcagaggcggcatgagtacagtagccgtgggggcagcagg

SEQ ID NO: 141196 - DNA, 30 bp, Homo sapiens
  chr2:27616129-27616159
  hypo
gtaaatggaggaggcgtagagctccaggtt

SEQ ID NO: 141197 - DNA, 19 bp, Homo sapiens
  chr2:27630896-27630915
  hypo
agagcgaaattctgtctca

SEQ ID NO: 141198 - DNA, 242 bp, Homo sapiens; identical to SEQ ID NO: 62981
  chr2:27668570-27668812
  hypo

SEQ ID NO: 141199 - DNA, 209 bp, Homo sapiens
  chr2:27703853-27704062
  hypo
aaagcagagagtgttcgcagggaaagtaggcagtagataaaactggaaaggggacttacctgtcataacttcctagcacaacagactggcccccaggacttgatacagctgtggtgaactcccgctcctgagggtcacggctataatcaaaagtttgtagcatgtgaccttcttttccataggctacaattttccgatcacagcctgca

SEQ ID NO: 141200 - DNA, 43 bp, Homo sapiens
  chr2:27704757-27704800
  hypo
gtgctacacattaaccaacaccgtctgggcccacaaagagcat

SEQ ID NO: 141201 - DNA, 94 bp, Homo sapiens
  chr2:27711607-27711701
  hypo
aagttggtgagtgctccgagacattgtataataaaggctaaagttagagatatcaggtcatttgtttaaagtactggtggccagtctgggcaac

SEQ ID NO: 141202 - DNA, 30 bp, Homo sapiens
  chr2:27749904-27749934
  hypo
ctaaataaacacacacgcgcgcgcacacac

SEQ ID NO: 141203 - DNA, 36 bp, Homo sapiens
  chr2:27764226-27764262
  hypo
ggctcggcatcagagggagaccgtggaaggagaccg

SEQ ID NO: 141204 - DNA, 30 bp, Homo sapiens; identical to SEQ ID NO: 16020
  chr2:27805319-27805349
  hypo

SEQ ID NO: 141205 - DNA, 31 bp, Homo sapiens; identical to SEQ ID NO: 16021
  chr2:27902576-27902607
  hypo

SEQ ID NO: 141206 - DNA, 30 bp, Homo sapiens
  chr2:27910858-27910888
  hypo
aaccacttcattgtgcgcaggaccctcagg

SEQ ID NO: 141207 - DNA, 92 bp, Homo sapiens; identical to SEQ ID NO: 105672
  chr2:27937850-27937942
  hypo

SEQ ID NO: 141208 - DNA, 353 bp, Homo sapiens; identical to SEQ ID NO: 105673
  chr2:27938252-27938605
  hypo

SEQ ID NO: 141209 - DNA, 33 bp, Homo sapiens
  chr2:27993511-27993544
  hypo
tttttttttttttttttgagacggagtctcact

SEQ ID NO: 141210 - DNA, 31 bp, Homo sapiens; identical to SEQ ID NO: 62987
  chr2:28058161-28058192
  hypo

SEQ ID NO: 141211 - DNA, 285 bp, Homo sapiens
  chr2:28065674-28065959
  hypo
attctacttgtaccatttctgccagctacattgaagatttatattgcgggatatcggaaatgctactcatgtttttttttttaccctgtttgcaaggttttctaacattatcaagaaccacaagactgtgaatctcacagatggaagaaagaatattttacgacagaaagagtattgctttgcttaacttaaaaggttaactttaattaagacagcgataaaagcttttatagaaagaatgacaaatatgtataattacctccactcctgcgggccattgttagg

SEQ ID NO: 141212 - DNA, 35 bp, Homo sapiens
  chr2:28269008-28269043
  hypo
cctagccactgccttcgaggttctggcccttggcc

SEQ ID NO: 141213 - DNA, 17 bp, Homo sapiens
  chr2:28293431-28293448
  hypo
tttgagacggagtctcg

SEQ ID NO: 141214 - DNA, 16 bp, Homo sapiens
  chr2:28293507-28293523
  hypo
ccgggttcacgccatt

SEQ ID NO: 141215 - DNA, 30 bp, Homo sapiens
  chr2:28422103-28422133
  hypo
agttgacatcttagccgacacacatccttt

SEQ ID NO: 141216 - DNA, 30 bp, Homo sapiens; identical to SEQ ID NO: 16023
  chr2:28442524-28442554
  hypo

SEQ ID NO: 141217 - DNA, 18 bp, Homo sapiens
  chr2:28502826-28502844
  hypo
gcccggcagaggcttttt

SEQ ID NO: 141218 - DNA, 30 bp, Homo sapiens; identical to SEQ ID NO: 62991
  chr2:28509555-28509585
  hypo

SEQ ID NO: 141219 - DNA, 30 bp, Homo sapiens; identical to SEQ ID NO: 62992
  chr2:28543283-28543313
  hypo

SEQ ID NO: 141220 - DNA, 51 bp, Homo sapiens; identical to SEQ ID NO: 62993
  chr2:28572402-28572453
  hypo

SEQ ID NO: 141221 - DNA, 31 bp, Homo sapiens; identical to SEQ ID NO: 62994
  chr2:28577899-28577930
  hypo

SEQ ID NO: 141222 - DNA, 31 bp, Homo sapiens; identical to SEQ ID NO: 62995
  chr2:28581021-28581052
  hypo

SEQ ID NO: 141223 - DNA, 150 bp, Homo sapiens; identical to SEQ ID NO: 16025
  chr2:28586479-28586629
  hypo

SEQ ID NO: 141224 - DNA, 19 bp, Homo sapiens
  chr2:28608277-28608296
  hypo
gtcttgaaaagcttaggtg

SEQ ID NO: 141225 - DNA, 30 bp, Homo sapiens
  chr2:28676460-28676490
  hypo
gagctggcggctacacggggagcggtcacc

SEQ ID NO: 141226 - DNA, 350 bp, Homo sapiens
  chr2:28676716-28677066
  hypo
gtgtatgtgtgtgcgcgcgcgtgcatgtgcgtgtgcataggtatgattcagggagacataagggactttggcaaagtcaggaggatgtgggggctaagcaaacaccactttgaagacttctctttggcatggggtgtgacaagccaggtctggtgccttgttgaggaaagggagaaaactctgagttggtttttgtgttcctcaaaccagtttgcccacatccttggcatcatctgtgccctgtgaagggcccgcttggagccatgcatgtctgggcctgagggtggcggtgcctacgtgaggccctgcggtctcttcaggagctccccgagaggggcacttggccactg

SEQ ID NO: 141227 - DNA, 30 bp, Homo sapiens
  chr2:28718648-28718678
  hypo
tcttcccagcagacccgaacaccggcaatt

SEQ ID NO: 141228 - DNA, 281 bp, Homo sapiens
  chr2:28819587-28819868
  hypo
ggctcagacatctaacggaagggtggggagcgagaactgagtgaaggagaagggtaagatttacggcatctgccttctctctaccacctgaattgcttgcagagcctctgacttaagtccttgaccactctggcatgcaatagtccacttcattccaagcattccttgaatgaagaacaactatgactcatggcctgtcccttagaagtctttgctggtgggctggaagctaaggccacgttcttaaaatccattggcctgggccaggcgcggtggctcac

SEQ ID NO: 141229 - DNA, 30 bp, Homo sapiens
  chr2:28887066-28887096
  hypo
tgacggcacagtacgcggagctgaattgct

SEQ ID NO: 141230 - DNA, 30 bp, Homo sapiens; identical to SEQ ID NO: 16027
  chr2:28918637-28918667
  hypo

SEQ ID NO: 141231 - DNA, 35 bp, Homo sapiens; identical to SEQ ID NO: 16028
  chr2:28919659-28919694
  hypo

SEQ ID NO: 141232 - DNA, 18 bp, Homo sapiens
  chr2:28935037-28935055
  hypo
actctgtctcacaaaaaa

SEQ ID NO: 141233 - DNA, 30 bp, Homo sapiens
  chr2:28946491-28946521
  hypo
cgtgccactgcactgcggcctgggcgagag

SEQ ID NO: 141234 - DNA, 30 bp, Homo sapiens; identical to SEQ ID NO: 63003
  chr2:28971670-28971700
  hypo

SEQ ID NO: 141235 - DNA, 30 bp, Homo sapiens
  chr2:29005679-29005709
  hypo
attaaagtggaaaaacgctgaaaagataga

SEQ ID NO: 141236 - DNA, 433 bp, Homo sapiens; identical to SEQ ID NO: 37293
  chr2:29033264-29033697
  hypo

SEQ ID NO: 141237 - DNA, 45 bp, Homo sapiens; identical to SEQ ID NO: 63005
  chr2:29062639-29062684
  hypo

SEQ ID NO: 141238 - DNA, 23 bp, Homo sapiens
  chr2:29091584-29091607
  hypo
aagcttcaaactagggctgggcg

SEQ ID NO: 141239 - DNA, 30 bp, Homo sapiens; identical to SEQ ID NO: 37295
  chr2:29120717-29120747
  hypo

SEQ ID NO: 141240 - DNA, 31 bp, Homo sapiens; identical to SEQ ID NO: 16031
  chr2:29225584-29225615
  hypo

SEQ ID NO: 141241 - DNA, 163 bp, Homo sapiens; identical to SEQ ID NO: 37296
  chr2:29337888-29338051
  hypo

SEQ ID NO: 141242 - DNA, 589 bp, Homo sapiens; identical to SEQ ID NO: 1403
  chr2:29338158-29338747
  hypo

SEQ ID NO: 141243 - DNA, 297 bp, Homo sapiens; identical to SEQ ID NO: 1404
  chr2:29338809-29339106
  hypo

SEQ ID NO: 141244 - DNA, 103 bp, Homo sapiens; identical to SEQ ID NO: 63012
  chr2:29469961-29470064
  hypo

SEQ ID NO: 141245 - DNA, 30 bp, Homo sapiens
  chr2:29502042-29502072
  hypo
ctaaagtgctctgcgcggcgacagcagtgg

SEQ ID NO: 141246 - DNA, 30 bp, Homo sapiens
  chr2:29698385-29698415
  hypo
cagtctcgggcccgccggacgaggctgcat

SEQ ID NO: 141247 - DNA, 30 bp, Homo sapiens
  chr2:29797680-29797710
  hypo
ctctggaaaatgggacgcagcacagtccca

SEQ ID NO: 141248 - DNA, 30 bp, Homo sapiens
  chr2:29798048-29798078
  hypo
gggtgaacggtgttgcggggggaggtggaa

SEQ ID NO: 141249 - DNA, 690 bp, Homo sapiens; identical to SEQ ID NO: 105702
  chr2:30144174-30144864
  hypo

SEQ ID NO: 141250 - DNA, 22 bp, Homo sapiens
  chr2:30248769-30248791
  hypo
gccaccgcgcctgccctccagc

SEQ ID NO: 141251 - DNA, 83 bp, Homo sapiens; identical to SEQ ID NO: 63014
  chr2:30368627-30368710
  hypo

SEQ ID NO: 141252 - DNA, 224 bp, Homo sapiens; identical to SEQ ID NO: 105703
  chr2:30369367-30369591
  hypo

SEQ ID NO: 141253 - DNA, 30 bp, Homo sapiens; identical to SEQ ID NO: 16038
  chr2:30379567-30379597
  hypo

SEQ ID NO: 141254 - DNA, 30 bp, Homo sapiens
  chr2:30381797-30381827
  hypo
cggattaatgaactgcggaacaagaggttg

SEQ ID NO: 141255 - DNA, 30 bp, Homo sapiens
  chr2:30382193-30382223
  hypo
atggcttgtgctggccggtgtgccatattc

SEQ ID NO: 141256 - DNA, 134 bp, Homo sapiens; identical to SEQ ID NO: 105705
  chr2:30453519-30453653
  hypo

SEQ ID NO: 141257 - DNA, 2030 bp, Homo sapiens; identical to SEQ ID NO: 37306
  chr2:30453784-30455814
  hypo

SEQ ID NO: 141258 - DNA, 30 bp, Homo sapiens
  chr2:30460287-30460317
  hypo
ccaatgatgccgcttcgaggatacgggtcc

SEQ ID NO: 141259 - DNA, 30 bp, Homo sapiens; identical to SEQ ID NO: 16042
  chr2:30478236-30478266
  hypo

SEQ ID NO: 141260 - DNA, 211 bp, Homo sapiens
  chr2:30480378-30480589
  hypo
aggggaggtggagagcggggagctccggtggccccctgaggagttcctggtccaggaggatgagcaagataactgcgaagagacagcgaaagaaaataaagagcagtagagtccctgtggactcccatgggtcataccagccagcatctgttcctgaactgtgtttttcccatcatgacggaagaagagagtgagccgcaattgttctgaa

SEQ ID NO: 141261 - DNA, 400 bp, Homo sapiens
  chr2:30481974-30482374
  hypo
cggccaaccaaggcacgcagcatgtcccctcaggtctccagtcagtccaggttgaccctcagttctggacgtgtgtatatagctgtatttaatacctcaaggtcattgtggctctggggatgccggggcaggaggacgagggtgcgctgtggacacagcagtccgcggaattccgttctgggaagccaatggtcgccggcaccccttgcttcctccctctgttgtctgcctgtgtgacacacatcaatggcaataacttcttccaactcctcgcagaagtgggagaggccggcagcctgcaccgagaggggctttcctctctcttgctccccgcttcgttctgttttggctgcagagagtggttcatccatactctcattccctcgcctccccttgtgga

SEQ ID NO: 141262 - DNA, 30 bp, Homo sapiens
  chr2:30494716-30494746
  hypo
ttttgtgcatcaactcgaccgggctaagga

SEQ ID NO: 141263 - DNA, 195 bp, Homo sapiens; identical to SEQ ID NO: 63022
  chr2:30495296-30495491
  hypo

SEQ ID NO: 141264 - DNA, 31 bp, Homo sapiens; identical to SEQ ID NO: 16045
  chr2:30521569-30521600
  hypo

SEQ ID NO: 141265 - DNA, 267 bp, Homo sapiens; identical to SEQ ID NO: 16046
  chr2:30525797-30526064
  hypo

SEQ ID NO: 141266 - DNA, 23 bp, Homo sapiens
  chr2:30570023-30570046
  hypo
aagatggaggtggggcgcggtgg

SEQ ID NO: 141267 - DNA, 30 bp, Homo sapiens; identical to SEQ ID NO: 16047
  chr2:30581821-30581851
  hypo

SEQ ID NO: 141268 - DNA, 37 bp, Homo sapiens
  chr2:30587092-30587129
  hypo
tcaggtgtgcagggaaaaccatcgactccagcaggag

SEQ ID NO: 141269 - DNA, 32 bp, Homo sapiens; identical to SEQ ID NO: 63026
  chr2:30634156-30634188
  hypo

SEQ ID NO: 141270 - DNA, 29 bp, Homo sapiens
  chr2:30667943-30667972
  hypo
ggtgccaaaaaggtcggggactacttctc

SEQ ID NO: 141271 - DNA, 17 bp, Homo sapiens
  chr2:30668466-30668483
  hypo
gggctcagggccaggcg

SEQ ID NO: 141272 - DNA, 91 bp, Homo sapiens
  chr2:30794969-30795060
  hypo
caaatgccatggtatcgctttagaccataaagggaattcatattgtttctttgttccttttagtcactgcccacctcgccccctttccctc

SEQ ID NO: 141273 - DNA, 162 bp, Homo sapiens
  chr2:30863076-30863238
  hypo
ggaaatccactttcacgtccaccggtatccaatagacaccctccccacatccaaggaggaccttcaactctggtgccacaaacggtgggaagagaaagaagagaggctgcgttccttctatcaaggggagaagaatttttattttaccggacagagtgtcat

SEQ ID NO: 141274 - DNA, 105 bp, Homo sapiens
  chr2:30863743-30863848
  hypo
tcatcaggcttttagcgacaaggaacacacacatttttcttaaaggcccaatcctaacagactccccgtaccagaggcagatctggaactcgtcaacaacagccc

SEQ ID NO: 141275 - DNA, 31 bp, Homo sapiens; identical to SEQ ID NO: 63030
  chr2:30870559-30870590
  hypo

SEQ ID NO: 141276 - DNA, 122 bp, Homo sapiens
  chr2:30982466-30982588
  hypo
caagccgcaggtggacgcagggctcagagctaggtgcgggctgatgtgcgctaaggaaacggcactagagaagctgagcaactttctcaataccgctgagacagcggcggaggcagaattcc

SEQ ID NO: 141277 - DNA, 359 bp, Homo sapiens; identical to SEQ ID NO: 105708
  chr2:31360230-31360589
  hypo

SEQ ID NO: 141278 - DNA, 125 bp, Homo sapiens; identical to SEQ ID NO: 1414
  chr2:31360630-31360755
  hypo

SEQ ID NO: 141279 - DNA, 958 bp, Homo sapiens; identical to SEQ ID NO: 105710
  chr2:31360816-31361774
  hypo

SEQ ID NO: 141280 - DNA, 266 bp, Homo sapiens; identical to SEQ ID NO: 63034
  chr2:31477234-31477500
  hypo

SEQ ID NO: 141281 - DNA, 188 bp, Homo sapiens
  chr2:31480288-31480476
  hypo
agctggctgtgcctgcgtgccagggagggagggagggaggcagggagcggccaggtgcagaacggctggatggctgacagctgggtcatctggcctcacgacttgccaactgtttgactctctcctctctgaacctcagtttcctcccctggaagtgagaacgatactcctcgcgctgcctgcctcag

SEQ ID NO: 141282 - DNA, 30 bp, Homo sapiens
  chr2:31526389-31526419
  hypo
gtgatcccacgtggccgggactgtggtggc

SEQ ID NO: 141283 - DNA, 96 bp, Homo sapiens; identical to SEQ ID NO: 16052
  chr2:31550127-31550223
  hypo

SEQ ID NO: 141284 - DNA, 96 bp, Homo sapiens; identical to SEQ ID NO: 16053
  chr2:31551360-31551456
  hypo

SEQ ID NO: 141285 - DNA, 91 bp, Homo sapiens
  chr2:31560533-31560624
  hypo
attgcggatcttctccggggtggcagggctgtctagccggaagagttccttcacgttattacctgtgtgctgagctcgagctgcacggatg

SEQ ID NO: 141286 - DNA, 232 bp, Homo sapiens; identical to SEQ ID NO: 16054
  chr2:32142424-32142656
  hypo

SEQ ID NO: 141287 - DNA, 30 bp, Homo sapiens
  chr2:32175159-32175189
  hypo
tatattattgccgggcgcagtggctcacgc

SEQ ID NO: 141288 - DNA, 121 bp, Homo sapiens; identical to SEQ ID NO: 16055
  chr2:32244331-32244452
  hypo

SEQ ID NO: 141289 - DNA, 33 bp, Homo sapiens
  chr2:32263996-32264029
  hypo
gtgggccatcgcgcccggcgaagggtttcttaa

SEQ ID NO: 141290 - DNA, 19 bp, Homo sapiens
  chr2:32275096-32275115
  hypo
gtattaaaaaaatatctgg

SEQ ID NO: 141291 - DNA, 28 bp, Homo sapiens
  chr2:32286703-32286731
  hypo
gagccaccacacccggccgaaagagggc

SEQ ID NO: 141292 - DNA, 25 bp, Homo sapiens
  chr2:32290051-32290076
  hypo
aagcaaggatactacatctttcggg

SEQ ID NO: 141293 - DNA, 24 bp, Homo sapiens
  chr2:32290375-32290399
  hypo
cgcgcctggccttaagctaacatt

SEQ ID NO: 141294 - DNA, 121 bp, Homo sapiens; identical to SEQ ID NO: 16058
  chr2:32291346-32291467
  hypo

SEQ ID NO: 141295 - DNA, 41 bp, Homo sapiens
  chr2:32315097-32315138
  hypo
gctggagttacaggcgtgagccaacgcgcccagccgagcat

SEQ ID NO: 141296 - DNA, 18 bp, Homo sapiens
  chr2:32360515-32360533
  hypo
tattctaaatctggtgac

SEQ ID NO: 141297 - DNA, 105 bp, Homo sapiens
  chr2:32361184-32361289
  hypo
ttatgtgagaatgacttttcacggtgttcttaatagcgcaagttttgtttaggagagcacattccaacttacttgcttctataaatataccgtgtaatctagggc

SEQ ID NO: 141298 - DNA, 79 bp, Homo sapiens; identical to SEQ ID NO: 63045
  chr2:32367729-32367808
  hypo

SEQ ID NO: 141299 - DNA, 30 bp, Homo sapiens
  chr2:32394747-32394777
  hypo
gcagaatggggctgcgacagagtgaatatc

SEQ ID NO: 141300 - DNA, 30 bp, Homo sapiens
  chr2:32460589-32460619
  hypo
agggcagcatcagtgcggtgagctgttcta

SEQ ID NO: 141301 - DNA, 31 bp, Homo sapiens; identical to SEQ ID NO: 63046
  chr2:32482237-32482268
  hypo

SEQ ID NO: 141302 - DNA, 121 bp, Homo sapiens; identical to SEQ ID NO: 16059
  chr2:32504349-32504470
  hypo

SEQ ID NO: 141303 - DNA, 29 bp, Homo sapiens
  chr2:32504769-32504798
  hypo
gcccggccgaaagaacctagattttccta

SEQ ID NO: 141304 - DNA, 27 bp, Homo sapiens
  chr2:32560117-32560144
  hypo
tgtactccaacccgggcgacagcgact

SEQ ID NO: 141305 - DNA, 31 bp, Homo sapiens; identical to SEQ ID NO: 16062
  chr2:32580137-32580168
  hypo

SEQ ID NO: 141306 - DNA, 35 bp, Homo sapiens; identical to SEQ ID NO: 63051
  chr2:32580380-32580415
  hypo

SEQ ID NO: 141307 - DNA, 37 bp, Homo sapiens; identical to SEQ ID NO: 63052
  chr2:32798531-32798568
  hypo

SEQ ID NO: 141308 - DNA, 30 bp, Homo sapiens; identical to SEQ ID NO: 63053
  chr2:32842796-32842826
  hypo

SEQ ID NO: 141309 - DNA, 29 bp, Homo sapiens
  chr2:32854102-32854131
  hypo
aggcctgagccaccgcgcccgggtctggt

SEQ ID NO: 141310 - DNA, 45 bp, Homo sapiens; identical to SEQ ID NO: 63054
  chr2:32980696-32980741
  hypo

SEQ ID NO: 141311 - DNA, 117 bp, Homo sapiens
  chr2:32983457-32983574
  hypo
gcctgggagttgtcccggtaccgcagtgctcgtgctcagcgctccaaagccctccttcatcttcggaacaaggagtttcaagagtgtgtagagtgcttcgaacgctcggttaagatt

SEQ ID NO: 141312 - DNA, 46 bp, Homo sapiens
  chr2:33215244-33215290
  hypo
cttattgtactctatcgatattccatgcatacgcaattgacagagg

SEQ ID NO: 141313 - DNA, 30 bp, Homo sapiens
  chr2:33217889-33217919
  hypo
gagatgctcctccagcgggaagggaaggtg

SEQ ID NO: 141314 - DNA, 30 bp, Homo sapiens
  chr2:33218137-33218167
  hypo
cacagcagctggcagcggggggatgctggg

SEQ ID NO: 141315 - DNA, 241 bp, Homo sapiens
  chr2:33281380-33281621
  hypo
tgttttgttttgtttgcatttatttgcttttggctttgtggctttcggttttctttggtaacagaatggcctggatgttaggcaaaatgccgccctgggcgatggtgactttgcccagcagcttgtttagttccctgttgttgcaaattgccagctggaggtgatgagggatgatgcgcgtcttcttcttgtcccttcgtggttgcaaaaatgtgtccagatttggcgggttcttggtctc

SEQ ID NO: 141316 - DNA, 38 bp, Homo sapiens; identical to SEQ ID NO: 63057
  chr2:33304097-33304135
  hypo

SEQ ID NO: 141317 - DNA, 31 bp, Homo sapiens; identical to SEQ ID NO: 63058
  chr2:33313220-33313251
  hypo

SEQ ID NO: 141318 - DNA, 75 bp, Homo sapiens
  chr2:33317209-33317284
  hypo
aaaaacacaccttgtgctgtgcgtgcacgtgcgcatgcacacacacacacacgcgcacacacacacacacacagt

SEQ ID NO: 141319 - DNA, 59 bp, Homo sapiens
  chr2:33346709-33346768
  hypo
gagctggctggagcgcgcatctgctttactttagaaggttacggcgtaatcctccccca

SEQ ID NO: 141320 - DNA, 20 bp, Homo sapiens
  chr2:33374270-33374290
  hypo
gactccgtctcactcacaaa

SEQ ID NO: 141321 - DNA, 30 bp, Homo sapiens
  chr2:33386609-33386639
  hypo
aggcgtgagccaccacgcccggccaggaag

SEQ ID NO: 141322 - DNA, 35 bp, Homo sapiens
  chr2:33513603-33513638
  hypo
atgttctcatttccccgcaaaaagaaaagaagttg

SEQ ID NO: 141323 - DNA, 21 bp, Homo sapiens
  chr2:33530059-33530080
  hypo
acattgtagtgtgggagataa

SEQ ID NO: 141324 - DNA, 30 bp, Homo sapiens; identical to SEQ ID NO: 63061
  chr2:33533018-33533048
  hypo

SEQ ID NO: 141325 - DNA, 30 bp, Homo sapiens; identical to SEQ ID NO: 63062
  chr2:33533298-33533328
  hypo

SEQ ID NO: 141326 - DNA, 157 bp, Homo sapiens
  chr2:33534844-33535001
  hypo
ctcactgcgtgcttccgtcacctgtactttactgtttattccatgctgtaaccttggtactgggttctaaattatctttatagcatcttttatgggcatattttattttgtctcataggtggtatttatctgtccttttctgactctatttttatcc

SEQ ID NO: 141327 - DNA, 30 bp, Homo sapiens; identical to SEQ ID NO: 63063
  chr2:33622285-33622315
  hypo

SEQ ID NO: 141328 - DNA, 39 bp, Homo sapiens; identical to SEQ ID NO: 63064
  chr2:33637934-33637973
  hypo

SEQ ID NO: 141329 - DNA, 30 bp, Homo sapiens; identical to SEQ ID NO: 63065
  chr2:33759233-33759263
  hypo

SEQ ID NO: 141330 - DNA, 17 bp, Homo sapiens
  chr2:33802101-33802118
  hypo
acacctataatcacagc

SEQ ID NO: 141331 - DNA, 30 bp, Homo sapiens; identical to SEQ ID NO: 63067
  chr2:33827700-33827730
  hypo

SEQ ID NO: 141332 - DNA, 303 bp, Homo sapiens; identical to SEQ ID NO: 63068
  chr2:33952401-33952704
  hypo

SEQ ID NO: 141333 - DNA, 30 bp, Homo sapiens; identical to SEQ ID NO: 63069
  chr2:33953180-33953210
  hypo

SEQ ID NO: 141334 - DNA, 30 bp, Homo sapiens
  chr2:34035732-34035762
  hypo
tctcgtagaataatgcgtaaggcccactag

SEQ ID NO: 141335 - DNA, 76 bp, Homo sapiens; identical to SEQ ID NO: 63070
  chr2:34065552-34065628
  hypo

SEQ ID NO: 141336 - DNA, 28 bp, Homo sapiens
  chr2:34066124-34066152
  hypo
aaacaacattcctgggccaggcgcaatg

SEQ ID NO: 141337 - DNA, 21 bp, Homo sapiens
  chr2:35185461-35185482
  hypo
aaggctgggcgggcacggtgg

SEQ ID NO: 141338 - DNA, 28 bp, Homo sapiens
  chr2:35577687-35577715
  hypo
aggcatgagccaccgcgcccagccaaac

SEQ ID NO: 141339 - DNA, 23 bp, Homo sapiens
  chr2:35620887-35620910
  hypo
gcgtctcaaaaaaaaaaaaaaaa

SEQ ID NO: 141340 - DNA, 87 bp, Homo sapiens
  chr2:36071156-36071243
  hypo
gcaagagcaaaatcccgtgcacatcctgcagctgcatctagcggtggggggcggggggggggggcctgcaatgcctgaagccccaga

SEQ ID NO: 141341 - DNA, 182 bp, Homo sapiens; identical to SEQ ID NO: 63073
  chr2:36668405-36668587
  hypo

SEQ ID NO: 141342 - DNA, 30 bp, Homo sapiens
  chr2:36706764-36706794
  hypo
gttgcgaccgtctgcggacagacctgcaca

SEQ ID NO: 141343 - DNA, 202 bp, Homo sapiens; identical to SEQ ID NO: 63074
  chr2:36805564-36805766
  hypo

SEQ ID NO: 141344 - DNA, 30 bp, Homo sapiens
  chr2:36822316-36822346
  hypo
tgaagtgccaagggtcggggagggctttgg

SEQ ID NO: 141345 - DNA, 61 bp, Homo sapiens
  chr2:36824206-36824267
  hypo
tccccaccagaccatgcgatcgttaccatcagtaagcagggcccttcgttttcgtctctgt

SEQ ID NO: 141346 - DNA, 76 bp, Homo sapiens; identical to SEQ ID NO: 63075
  chr2:36939339-36939415
  hypo

SEQ ID NO: 141347 - DNA, 100 bp, Homo sapiens
  chr2:37027666-37027766
  hypo
caggtctcacgcccacgaagtcagcgctgcctgtggctgagtgtcagtggtttgtgagatgtgatctcacacctcatcttgggtgcgatgcacacacacc

SEQ ID NO: 141348 - DNA, 30 bp, Homo sapiens
  chr2:37028151-37028181
  hypo
atatgggtgttataacgatgttttcatcta

SEQ ID NO: 141349 - DNA, 308 bp, Homo sapiens
  chr2:37035289-37035597
  hypo
tacaaaggaggagcccggagaagcataaatgtgaagctgacaccagagatttaatttctccctatgaatttgcttagcagacagctttccactaacgcaggcagggactcagctgagggagtaggactgagtccagcgataacccgggggcttcgcctcagtgagtggccgctgggtgaaccgagatggaagaacacggtaggagggctagtgcagaaaacaagggcctgcttgcttcttcacctgccccgggggatcaagcctaatggtgacactggaggatttgaccctgacgtggcgtgggtccc

SEQ ID NO: 141350 - DNA, 47 bp, Homo sapiens; identical to SEQ ID NO: 63076
  chr2:37076290-37076337
  hypo

SEQ ID NO: 141351 - DNA, 196 bp, Homo sapiens; identical to SEQ ID NO: 63077
  chr2:37076575-37076771
  hypo

SEQ ID NO: 141352 - DNA, 39 bp, Homo sapiens; identical to SEQ ID NO: 16066
  chr2:37149991-37150030
  hypo

SEQ ID NO: 141353 - DNA, 151 bp, Homo sapiens
  chr2:37195421-37195572
  hypo
agtgagacgacatatccgacaattcctttaagtcaattcatagcagacacaaaatgtaattaaatgtatagataatctggactaccacacatatacaaaaactattttaattcgtagttcaactttattactcacaatactttttttgctt

SEQ ID NO: 141354 - DNA, 30 bp, Homo sapiens
  chr2:37195631-37195661
  hypo
tttgggaggccgaggcgggtagatcactgg

SEQ ID NO: 141355 - DNA, 121 bp, Homo sapiens
  chr2:37227181-37227302
  hypo
cccaaaaaacaaaaaacctcccagtatatttatatatatattttttttgagacagagtttcaaaaaactctgttttttgccgagcctggagtgcagtggtgtgatcttggctcaccgcaac

SEQ ID NO: 141356 - DNA, 30 bp, Homo sapiens; identical to SEQ ID NO: 63081
  chr2:37227751-37227781
  hypo

SEQ ID NO: 141357 - DNA, 88 bp, Homo sapiens; identical to SEQ ID NO: 16067
  chr2:37241580-37241668
  hypo

SEQ ID NO: 141358 - DNA, 23 bp, Homo sapiens
  chr2:37242101-37242124
  hypo
gcgagactttgtctcaaaagaaa

SEQ ID NO: 141359 - DNA, 167 bp, Homo sapiens; identical to SEQ ID NO: 63084
  chr2:37287719-37287886
  hypo

SEQ ID NO: 141360 - DNA, 30 bp, Homo sapiens; identical to SEQ ID NO: 16069
  chr2:37376052-37376082
  hypo

SEQ ID NO: 141361 - DNA, 30 bp, Homo sapiens; identical to SEQ ID NO: 63086
  chr2:37446421-37446451
  hypo

SEQ ID NO: 141362 - DNA, 30 bp, Homo sapiens; identical to SEQ ID NO: 105742
  chr2:37898662-37898692
  hypo

SEQ ID NO: 141363 - DNA, 1145 bp, Homo sapiens; identical to SEQ ID NO: 105743
  chr2:37898933-37900078
  hypo

SEQ ID NO: 141364 - DNA, 31 bp, Homo sapiens; identical to SEQ ID NO: 1426
  chr2:37980872-37980903
  hypo

SEQ ID NO: 141365 - DNA, 30 bp, Homo sapiens; identical to SEQ ID NO: 105745
  chr2:38152869-38152899
  hypo

SEQ ID NO: 141366 - DNA, 120 bp, Homo sapiens; identical to SEQ ID NO: 37336
  chr2:38152926-38153046
  hypo

SEQ ID NO: 141367 - DNA, 161 bp, Homo sapiens
  chr2:38157988-38158149
  hypo
tgcccagcctctggcacggtgggccttccgcctccgcctgacatgaggacaaaggggcacagtgggcaggcagcgcatgggtctgtctctggcagggcagagggcggcaggagcagactccctccaggctcaagacacaggcccagcgctgctacccaccc

SEQ ID NO: 141368 - DNA, 178 bp, Homo sapiens
  chr2:38201225-38201403
  hypo
gtccctaaggcatttaacacacgtgtagaggaattaaatttagatgtccttcttcagaaggtagatcatttacgtatgagtgagtctggcaagtcggagagttttgaactacttcgtgaccacaaagaaaaggtaagagacataacaatagcacttcgtatagttccattttttaatt

SEQ ID NO: 141369 - DNA, 41 bp, Homo sapiens
  chr2:38241062-38241103
  hypo
aaggcagccgggcgtcgtggctcacgcctgtaatcccagca

SEQ ID NO: 141370 - DNA, 30 bp, Homo sapiens
  chr2:38305840-38305870
  hypo
tgatgccttttattcggtatcttttgaaga

SEQ ID NO: 141371 - DNA, 28 bp, Homo sapiens
  chr2:38365727-38365755
  hypo
ctcccccgtcctgtcttaaagagaagaa

SEQ ID NO: 141372 - DNA, 222 bp, Homo sapiens; identical to SEQ ID NO: 63092
  chr2:38489623-38489845
  hypo

SEQ ID NO: 141373 - DNA, 24 bp, Homo sapiens
  chr2:38528398-38528422
  hypo
accgtgcctggctcatctcaactt

SEQ ID NO: 141374 - DNA, 157 bp, Homo sapiens
  chr2:38546333-38546490
  hypo
tttttcttatagagacgtggtctcctccaaactcgaatcttctcaaatcagctcacactactactctctaggcttctaaataagtggggttatactcactttcccccttttctgaaagatatcctggctgggcatgacagctcatgcctgtaatccc

SEQ ID NO: 141375 - DNA, 32 bp, Homo sapiens; identical to SEQ ID NO: 16074
  chr2:38551438-38551470
  hypo

SEQ ID NO: 141376 - DNA, 22 bp, Homo sapiens
  chr2:38562883-38562905
  hypo
aataaaaaataaataataggcc

SEQ ID NO: 141377 - DNA, 21 bp, Homo sapiens
  chr2:38563144-38563165
  hypo
gagactctgtctctaaataca

SEQ ID NO: 141378 - DNA, 31 bp, Homo sapiens; identical to SEQ ID NO: 16075
  chr2:38571500-38571531
  hypo

SEQ ID NO: 141379 - DNA, 85 bp, Homo sapiens; identical to SEQ ID NO: 16076
  chr2:38585485-38585570
  hypo

SEQ ID NO: 141380 - DNA, 45 bp, Homo sapiens
  chr2:38594451-38594496
  hypo
ttaacaatttaaggccgggcgcggtggctcatgcctataatctca

SEQ ID NO: 141381 - DNA, 83 bp, Homo sapiens
  chr2:38610901-38610984
  hypo
taaaaacaaaacaaaaaaaggagtgaaagtaaacaccattacgcagaaaacatgcttgtagcttgaagcgaacatggccgtgt

SEQ ID NO: 141382 - DNA, 32 bp, Homo sapiens; identical to SEQ ID NO: 16077
  chr2:38649875-38649907
  hypo

SEQ ID NO: 141383 - DNA, 30 bp, Homo sapiens
  chr2:38689396-38689426
  hypo
tgggaagtgcgggggcgagagcgcctcacc

SEQ ID NO: 141384 - DNA, 31 bp, Homo sapiens; identical to SEQ ID NO: 63100
  chr2:38709159-38709190
  hypo

SEQ ID NO: 141385 - DNA, 387 bp, Homo sapiens
  chr2:38742474-38742861
  hypo
acgaaagatgccccacgacgtatgtcatcaggaaaatgcaaattaaatcaacaatgagataccacctacacaccctttagaacagccaaaatccggaacactgatgtaaggtacctggaagtgcttcggtcaaggaatagtctgaggcgggtatccaggcctgcacgagtcagcaagtttggcacgcaggcgcacacctccacttgttatataaactgtttgtgtaagttcatacttgacttggagccacagttgtctgtaaaaggtataactgccctgttaacactgcgcaccagacacatggctctggggctcggctcgcctgaaatggcttgtcatggtaggcgcgcaggcgcccagagaaagagcgagcgagtcagagctgtc

SEQ ID NO: 141386 - DNA, 316 bp, Homo sapiens; identical to SEQ ID NO: 63101
  chr2:38762338-38762654
  hypo

SEQ ID NO: 141387 - DNA, 30 bp, Homo sapiens; identical to SEQ ID NO: 63102
  chr2:38769189-38769219
  hypo

SEQ ID NO: 141388 - DNA, 30 bp, Homo sapiens; identical to SEQ ID NO: 63103
  chr2:38892294-38892324
  hypo

SEQ ID NO: 141389 - DNA, 26 bp, Homo sapiens
  chr2:38910053-38910079
  hypo
aatcttaaaaacgaaacaaaagacaa

SEQ ID NO: 141390 - DNA, 30 bp, Homo sapiens
  chr2:38936637-38936667
  hypo
agcaataccctcccccgttgcaagtcaagg

SEQ ID NO: 141391 - DNA, 27 bp, Homo sapiens
  chr2:38947098-38947125
  hypo
ctttgggaggctgaccgggtggattgc

SEQ ID NO: 141392 - DNA, 37 bp, Homo sapiens; identical to SEQ ID NO: 63105
  chr2:38953643-38953680
  hypo

SEQ ID NO: 141393 - DNA, 30 bp, Homo sapiens
  chr2:38975401-38975431
  hypo
gcactgcgggaggatcgtttgagcccagga

SEQ ID NO: 141394 - DNA, 30 bp, Homo sapiens
  chr2:38975732-38975762
  hypo
ctcctgctgcgtgagcgagagtatcgcctt

SEQ ID NO: 141395 - DNA, 121 bp, Homo sapiens; identical to SEQ ID NO: 63106
  chr2:39016314-39016435
  hypo

SEQ ID NO: 141396 - DNA, 21 bp, Homo sapiens
  chr2:39034198-39034219
  hypo
ttgttttgttttttttgagac

SEQ ID NO: 141397 - DNA, 30 bp, Homo sapiens; identical to SEQ ID NO: 63108
  chr2:39104180-39104210
  hypo

SEQ ID NO: 141398 - DNA, 245 bp, Homo sapiens
  chr2:39186666-39186911
  hypo
tgaaggtgtgccttggagcaccgcaggtggtgaggagggtcagggcttccacgcggggtgatgacagtccctggcccgcaggccatttcccagaagctcagacaataccttcgggcctccgctcgacggactgccttgtccactctccgcctgggaacgggggttcgtgggagcgccttagtggaagtttgtggagctcgggaggtggcatgcacaggcgcctcggagcgcggccccgaggggcg

SEQ ID NO: 141399 - DNA, 149 bp, Homo sapiens
  chr2:39188203-39188352
  hypo
tttcttctgtctgtgaggtgtcgtttctatgttgagaatatggaacacggtgcgccagcctactccacttcttcccggcagcattcttgcttgtagctagggaggaggcaagttgccctagctcaaggtagactcgctgcgcaatttgc

SEQ ID NO: 141400 - DNA, 30 bp, Homo sapiens; identical to SEQ ID NO: 63111
  chr2:39209051-39209081
  hypo

SEQ ID NO: 141401 - DNA, 24 bp, Homo sapiens
  chr2:39228230-39228254
  hypo
gccttgtcacccaggcgggagtat

SEQ ID NO: 141402 - DNA, 18 bp, Homo sapiens
  chr2:39321790-39321808
  hypo
ctcaaataaataaataaa

SEQ ID NO: 141403 - DNA, 163 bp, Homo sapiens; identical to SEQ ID NO: 63114
  chr2:39406775-39406938
  hypo

SEQ ID NO: 141404 - DNA, 228 bp, Homo sapiens; identical to SEQ ID NO: 105768
  chr2:39663570-39663798
  hypo

SEQ ID NO: 141405 - DNA, 30 bp, Homo sapiens; identical to SEQ ID NO: 16082
  chr2:39675195-39675225
  hypo

SEQ ID NO: 141406 - DNA, 30 bp, Homo sapiens
  chr2:39693565-39693595
  hypo
agtaggtggtagtgtcgtttaccgagatta

SEQ ID NO: 141407 - DNA, 996 bp, Homo sapiens; identical to SEQ ID NO: 105772
  chr2:39893063-39894059
  hypo

SEQ ID NO: 141408 - DNA, 265 bp, Homo sapiens
  chr2:39944193-39944458
  hypo
tcgtatgatttgaaccggctcccaaagctaatttatagcctgcctgctgatgtggaacatggttacagctggtccatcttttgcgcctggtgcagtttaggctttattgtggcagctggaggtctctgcatcgcttatccgtttattagccggaccaagattgcacagctaaagtctggcagagactccacggtatgactgtcctcactgggcctgtccacagtgcgagcgactcctgaggggaacagcgcggagttcaggagtc

SEQ ID NO: 141409 - DNA, 30 bp, Homo sapiens; identical to SEQ ID NO: 16084
  chr2:39963839-39963869
  hypo

SEQ ID NO: 141410 - DNA, 23 bp, Homo sapiens
  chr2:40558734-40558757
  hypo
atgtttattttttttttgagacg

SEQ ID NO: 141411 - DNA, 103 bp, Homo sapiens; identical to SEQ ID NO: 63118
  chr2:40560219-40560322
  hypo

SEQ ID NO: 141412 - DNA, 699 bp, Homo sapiens; identical to SEQ ID NO: 1434
  chr2:40678905-40679604
  hypo

SEQ ID NO: 141413 - DNA, 30 bp, Homo sapiens; identical to SEQ ID NO: 1435
  chr2:40679688-40679718
  hypo

SEQ ID NO: 141414 - DNA, 166 bp, Homo sapiens; identical to SEQ ID NO: 16087
  chr2:41223818-41223984
  hypo

SEQ ID NO: 141415 - DNA, 30 bp, Homo sapiens; identical to SEQ ID NO: 1437
  chr2:42111963-42111993
  hypo

SEQ ID NO: 141416 - DNA, 175 bp, Homo sapiens; identical to SEQ ID NO: 63123
  chr2:42155746-42155921
  hypo

SEQ ID NO: 141417 - DNA, 162 bp, Homo sapiens; identical to SEQ ID NO: 63124
  chr2:42157838-42158000
  hypo

SEQ ID NO: 141418 - DNA, 30 bp, Homo sapiens
  chr2:42224001-42224031
  hypo
agctccccaggtcatcggcacgtctcgcct

SEQ ID NO: 141419 - DNA, 1626 bp, Homo sapiens; identical to SEQ ID NO: 105779
  chr2:42274302-42275928
  hypo

SEQ ID NO: 141420 - DNA, 80 bp, Homo sapiens; identical to SEQ ID NO: 63126
  chr2:42282094-42282174
  hypo

SEQ ID NO: 141421 - DNA, 142 bp, Homo sapiens; identical to SEQ ID NO: 63127
  chr2:42282411-42282553
  hypo

SEQ ID NO: 141422 - DNA, 371 bp, Homo sapiens; identical to SEQ ID NO: 105782
  chr2:42395972-42396343
  hypo

SEQ ID NO: 141423 - DNA, 93 bp, Homo sapiens; identical to SEQ ID NO: 63128
  chr2:42403392-42403485
  hypo

SEQ ID NO: 141424 - DNA, 23 bp, Homo sapiens
  chr2:42450215-42450238
  hypo
attacagacgtgagccaccgtgc

SEQ ID NO: 141425 - DNA, 23 bp, Homo sapiens
  chr2:42521031-42521054
  hypo
agccaccacgcccggcccatgtt

SEQ ID NO: 141426 - DNA, 95 bp, Homo sapiens; identical to SEQ ID NO: 63130
  chr2:42530713-42530808
  hypo

SEQ ID NO: 141427 - DNA, 30 bp, Homo sapiens; identical to SEQ ID NO: 63131
  chr2:42565201-42565231
  hypo

SEQ ID NO: 141428 - DNA, 16 bp, Homo sapiens
  chr2:42610194-42610210
  hypo
gcgccccgcccaagtg

SEQ ID NO: 141429 - DNA, 769 bp, Homo sapiens; identical to SEQ ID NO: 105786
  chr2:42720772-42721541
  hypo

SEQ ID NO: 141430 - DNA, 30 bp, Homo sapiens; identical to SEQ ID NO: 63133
  chr2:42991760-42991790
  hypo

SEQ ID NO: 141431 - DNA, 44 bp, Homo sapiens; identical to SEQ ID NO: 16093
  chr2:43002055-43002099
  hypo

SEQ ID NO: 141432 - DNA, 136 bp, Homo sapiens
  chr2:43051040-43051176
  hypo
ctggctgaatagtaacgctcgtactacatgccaatgagaaaccacagcctgagagtgttggagccgtggctcgcagacattgatgtttataagaatcatctggggagcttgttacaaagcacgttcctgggctacg

SEQ ID NO: 141433 - DNA, 73 bp, Homo sapiens; identical to SEQ ID NO: 63135
  chr2:43103589-43103662
  hypo

SEQ ID NO: 141434 - DNA, 31 bp, Homo sapiens; identical to SEQ ID NO: 63136
  chr2:43113902-43113933
  hypo

SEQ ID NO: 141435 - DNA, 36 bp, Homo sapiens; identical to SEQ ID NO: 16095
  chr2:43123918-43123954
  hypo

SEQ ID NO: 141436 - DNA, 119 bp, Homo sapiens; identical to SEQ ID NO: 63138
  chr2:43147316-43147435
  hypo

SEQ ID NO: 141437 - DNA, 76 bp, Homo sapiens; identical to SEQ ID NO: 16096
  chr2:43148272-43148348
  hypo

SEQ ID NO: 141438 - DNA, 56 bp, Homo sapiens; identical to SEQ ID NO: 63140
  chr2:43159424-43159480
  hypo

SEQ ID NO: 141439 - DNA, 30 bp, Homo sapiens
  chr2:43172667-43172697
  hypo
tgcatggccacagctcgtttgctgtgctgc

SEQ ID NO: 141440 - DNA, 102 bp, Homo sapiens; identical to SEQ ID NO: 16097
  chr2:43173212-43173314
  hypo

SEQ ID NO: 141441 - DNA, 201 bp, Homo sapiens; identical to SEQ ID NO: 63142
  chr2:43185202-43185403
  hypo

SEQ ID NO: 141442 - DNA, 31 bp, Homo sapiens; identical to SEQ ID NO: 16098
  chr2:43198399-43198430
  hypo

SEQ ID NO: 141443 - DNA, 270 bp, Homo sapiens; identical to SEQ ID NO: 63144
  chr2:43227352-43227622
  hypo

SEQ ID NO: 141444 - DNA, 344 bp, Homo sapiens
  chr2:43248786-43249130
  hypo
tagtactgcaagccgcgttttttttttttttttttttttttttttttttatccctggggaaatgagtgaatggctgggggacacagctgagatggaaaatctggaaggaaagtgctccaaccacgccgtctctctcccctgcacatgtgccctgtggcacctcaaagttcccttcaccgcggaggctgctgggtttctccgcattttcccatccagccccgccgccgcctgccatccagccctcctcccaggcttgctgcagccggcccagctgcgagggggcccgaggacggcactgcacaaaggccccattctcagctggcgggggctgttatcagcccagc

SEQ ID NO: 141445 - DNA, 30 bp, Homo sapiens
  chr2:43265673-43265703
  hypo
attacacctcccagccggacgtgaggccat

SEQ ID NO: 141446 - DNA, 147 bp, Homo sapiens
  chr2:43266042-43266189
  hypo
gtgatgtggccacatcgcacctctggcgggaagtggactctctccgaccccccttgggggctctggtggcctctgcgggacctcgggttgtctgagcacacgcaccctcgccctctctgggacctgatgcctcgatttaggctcaga

SEQ ID NO: 141447 - DNA, 31 bp, Homo sapiens; identical to SEQ ID NO: 63146
  chr2:43270310-43270341
  hypo

SEQ ID NO: 141448 - DNA, 31 bp, Homo sapiens; identical to SEQ ID NO: 16101
  chr2:43271000-43271031
  hypo

SEQ ID NO: 141449 - DNA, 142 bp, Homo sapiens
  chr2:43294290-43294432
  hypo
aggcgtgagccaccacgccggccgacctccacccggttttgcgttttttcttagccgttcccaccgtctgtcaatctccttctcttacctttcacccatgtgccttccctgctagaatgcagcacaacgatcttcattttgt

SEQ ID NO: 141450 - DNA, 77 bp, Homo sapiens; identical to SEQ ID NO: 63148
  chr2:43296668-43296745
  hypo

SEQ ID NO: 141451 - DNA, 174 bp, Homo sapiens; identical to SEQ ID NO: 16102
  chr2:43299387-43299561
  hypo

SEQ ID NO: 141452 - DNA, 31 bp, Homo sapiens; identical to SEQ ID NO: 63150
  chr2:43306146-43306177
  hypo

SEQ ID NO: 141453 - DNA, 26 bp, Homo sapiens
  chr2:43337346-43337372
  hypo
ccaccgtgcccagcctactagagcct

SEQ ID NO: 141454 - DNA, 38 bp, Homo sapiens; identical to SEQ ID NO: 63152
  chr2:43365141-43365179
  hypo

SEQ ID NO: 141455 - DNA, 190 bp, Homo sapiens; identical to SEQ ID NO: 16103
  chr2:43373135-43373325
  hypo

SEQ ID NO: 141456 - DNA, 35 bp, Homo sapiens
  chr2:43388281-43388316
  hypo
gaaccaggctggactcgggttccttggctcccaat

SEQ ID NO: 141457 - DNA, 190 bp, Homo sapiens; identical to SEQ ID NO: 63154
  chr2:43408167-43408357
  hypo

SEQ ID NO: 141458 - DNA, 50 bp, Homo sapiens
  chr2:43411558-43411608
  hypo
acctcattaggctcgcgccccctcccgctgacctccgaatgggctgctac

SEQ ID NO: 141459 - DNA, 99 bp, Homo sapiens
  chr2:43413630-43413729
  hypo
gggcccaagagtcctcgcttctaacagagtcccaggtgacgcccatctgacactcggagtctcatgggaccgagaagaccttagcgcaggttgaagagg

SEQ ID NO: 141460 - DNA, 146 bp, Homo sapiens; identical to SEQ ID NO: 63155
  chr2:43420536-43420682
  hypo

SEQ ID NO: 141461 - DNA, 712 bp, Homo sapiens; identical to SEQ ID NO: 37376
  chr2:43451133-43451845
  hypo

SEQ ID NO: 141462 - DNA, 968 bp, Homo sapiens; identical to SEQ ID NO: 1453
  chr2:43451891-43452859
  hypo

SEQ ID NO: 141463 - DNA, 30 bp, Homo sapiens
  chr2:43457246-43457276
  hypo
aggtgtgaaacaccgcgcccagctgataaa

SEQ ID NO: 141464 - DNA, 123 bp, Homo sapiens
  chr2:43496627-43496750
  hypo
gcacatcatgggagccgctgccagtgacgcactcgctgagatgcaggtgaacgtcagggggcccaggctctctggaacagcaactgatggcacacgcaacttggaatgcggcaaccggagctc

SEQ ID NO: 141465 - DNA, 38 bp, Homo sapiens; identical to SEQ ID NO: 63158
  chr2:43523957-43523995
  hypo

SEQ ID NO: 141466 - DNA, 30 bp, Homo sapiens
  chr2:43570483-43570513
  hypo
actcttaattaaatgcgtgtactatggcag

SEQ ID NO: 141467 - DNA, 30 bp, Homo sapiens; identical to SEQ ID NO: 63159
  chr2:43625218-43625248
  hypo

SEQ ID NO: 141468 - DNA, 30 bp, Homo sapiens
  chr2:43637658-43637688
  hypo
gtatatccatacaatcgaataccatttggc

SEQ ID NO: 141469 - DNA, 30 bp, Homo sapiens; identical to SEQ ID NO: 16107
  chr2:43654115-43654145
  hypo

SEQ ID NO: 141470 - DNA, 21 bp, Homo sapiens
  chr2:43665420-43665441
  hypo
acagagcgactccatctcaaa

SEQ ID NO: 141471 - DNA, 30 bp, Homo sapiens
  chr2:43820070-43820100
  hypo
tgagtttgcttttatcgatacttaacaaat

SEQ ID NO: 141472 - DNA, 36 bp, Homo sapiens; identical to SEQ ID NO: 16108
  chr2:43820773-43820809
  hypo

SEQ ID NO: 141473 - DNA, 36 bp, Homo sapiens; identical to SEQ ID NO: 63162
  chr2:43821048-43821084
  hypo

SEQ ID NO: 141474 - DNA, 24 bp, Homo sapiens
  chr2:43824373-43824397
  hypo
catggcgcccggaccgtaattttc

SEQ ID NO: 141475 - DNA, 30 bp, Homo sapiens; identical to SEQ ID NO: 63163
  chr2:43863420-43863450
  hypo

SEQ ID NO: 141476 - DNA, 30 bp, Homo sapiens; identical to SEQ ID NO: 16109
  chr2:43996800-43996830
  hypo

SEQ ID NO: 141477 - DNA, 158 bp, Homo sapiens; identical to SEQ ID NO: 63165
  chr2:44047672-44047830
  hypo

SEQ ID NO: 141478 - DNA, 31 bp, Homo sapiens; identical to SEQ ID NO: 16110
  chr2:44079072-44079103
  hypo

SEQ ID NO: 141479 - DNA, 117 bp, Homo sapiens; identical to SEQ ID NO: 63167
  chr2:44104772-44104889
  hypo

SEQ ID NO: 141480 - DNA, 34 bp, Homo sapiens; identical to SEQ ID NO: 16111
  chr2:44113282-44113316
  hypo

SEQ ID NO: 141481 - DNA, 180 bp, Homo sapiens; identical to SEQ ID NO: 16112
  chr2:44126056-44126236
  hypo

SEQ ID NO: 141482 - DNA, 35 bp, Homo sapiens
  chr2:44224213-44224248
  hypo
caaaacaaaaaaaccacgtcgctgccttcacaggg

SEQ ID NO: 141483 - DNA, 93 bp, Homo sapiens
  chr2:44315168-44315261
  hypo
acacactatttcttacgggtcactcctagctacccagctgcggatgaggaaaggtgaggcacacagcagctgaatgaccgagctcactctctc

SEQ ID NO: 141484 - DNA, 17 bp, Homo sapiens
  chr2:44332906-44332923
  hypo
cccggaaagaaatatct

SEQ ID NO: 141485 - DNA, 41 bp, Homo sapiens; identical to SEQ ID NO: 63172
  chr2:44402109-44402150
  hypo

SEQ ID NO: 141486 - DNA, 30 bp, Homo sapiens
  chr2:44425811-44425841
  hypo
aaataataagaggtacgagggccattaact

SEQ ID NO: 141487 - DNA, 30 bp, Homo sapiens; identical to SEQ ID NO: 16115
  chr2:44428921-44428951
  hypo

SEQ ID NO: 141488 - DNA, 43 bp, Homo sapiens; identical to SEQ ID NO: 63174
  chr2:44436624-44436667
  hypo

SEQ ID NO: 141489 - DNA, 33 bp, Homo sapiens; identical to SEQ ID NO: 16116
  chr2:44439161-44439194
  hypo

SEQ ID NO: 141490 - DNA, 36 bp, Homo sapiens; identical to SEQ ID NO: 63176
  chr2:44468998-44469034
  hypo

SEQ ID NO: 141491 - DNA, 36 bp, Homo sapiens; identical to SEQ ID NO: 63177
  chr2:44469273-44469309
  hypo

SEQ ID NO: 141492 - DNA, 208 bp, Homo sapiens
  chr2:44497612-44497820
  hypo
agaattggacaaaacacgcagcaaagaaagaatgaagcaacaaaagaacgaaagcagctctctcggctttcggctcggaggaggccaaggtgcaactttcttcggtcgtctcgaatccgggttcatccgacaccagccgcctccaccatgccgccgaagttccaccccaatgagatcaaagtcgtatacttcacgtgcactggagttg

SEQ ID NO: 141493 - DNA, 150 bp, Homo sapiens
  chr2:44502841-44502991
  hypo
gcccgacttcaagggcgtccagccctatgcggggatgcccaaggaggtgctgttccagttctctggccaggcccgctaccgcatacctcgggagatcctcttctggctcacagtggcttctgtgctggtgctcatcgcggccaccatagc

SEQ ID NO: 141494 - DNA, 34 bp, Homo sapiens; identical to SEQ ID NO: 16117
  chr2:44505287-44505321
  hypo

SEQ ID NO: 141495 - DNA, 36 bp, Homo sapiens; identical to SEQ ID NO: 63179
  chr2:44528015-44528051
  hypo

SEQ ID NO: 141496 - DNA, 22 bp, Homo sapiens
  chr2:44533700-44533722
  hypo
tttttttttttgagacggagtt

SEQ ID NO: 141497 - DNA, 121 bp, Homo sapiens
  chr2:44534050-44534171
  hypo
attatgcaaccatcaccaatgtctcattccagagcattttcatcacccccaaaataaaccacatctccactagcaataactgcgcatggcccctccctctctgtcctcagtctctggcaac

SEQ ID NO: 141498 - DNA, 701 bp, Homo sapiens
  chr2:44553758-44554459
  hypo
ccgctgtgccagcccaaaaacatttttcttagagtagcctatggcttcacacctcccccattctataaacagtagagacagagcgtactcacctccaaagtcaccgctctcaccagctctggattagaattacacaatgctcctgcaagcacccctccagcactgaaagcagtcagggttgttagacttggctgagaaaagccttggccatgaagcgtcttaatgcaagcctctaaatcagcaaggccattgagttttttagttaggcggccatcagcgtgccactggaggcctaactcaccaccacctctgaaattgaagggcaaaaaagttttagtggaaaaaaaaagttaatactgtaggctggggtcagcgaactacacctggaggcctgttttttgtgtggccctggagctaagactggtttttgctttttaaaggttgagtgaaaacaaggaatgtgcaacagaaactgtacgcggcctgcaaagcttaaaatgtgactatgtagctctttagagaaaaaggtttgccaactcctgatatagacaatccagaattgattcaacgaatatattttgagtgcctgcccatttatcagggattaagtacagaccttaaaagtagaaacaaacgaaaatcccctaccgtggagaagacagtaattttgtggggtaagaaaacaacgacttacccagcaa

SEQ ID NO: 141499 - DNA, 30 bp, Homo sapiens
  chr2:44728876-44728906
  hypo
ctgggcatggtggctcgtgcttgtagtccc

SEQ ID NO: 141500 - DNA, 43 bp, Homo sapiens
  chr2:44729123-44729166
  hypo
atcaaataggccaggcgcagtgcctcacacatgtaatgtcagc

SEQ ID NO: 141501 - DNA, 17 bp, Homo sapiens
  chr2:44809129-44809146
  hypo
tccgtctcaaaaacaaa

SEQ ID NO: 141502 - DNA, 305 bp, Homo sapiens
  chr2:44933644-44933949
  hypo
attttatggttgcctcgatgagcagaaacattttacctcagtgtagtcaatattgcttgttgtgacattccaggcctcgcacagtctttctttgccatagcgaaagcattttttttttttttttcagattatagtcccatttgctaagatacaggaatagcccggcgaatcacagttggagcaccatgatatagctgctaatgttttgcctgcattattacaccaacaaacatgatccagagcgctcagtaattagattcttttgaattagattggccattcaggaacgtcgttccccattctct

SEQ ID NO: 141503 - DNA, 97 bp, Homo sapiens
  chr2:44999265-44999362
  hypo
tcaaagacgaagaaacgtatcaagtgcatagggaatatttttacaaaaacggaaatctgtaaggggtataatcgcctgcctgcgccctttgcagcat

SEQ ID NO: 141504 - DNA, 49 bp, Homo sapiens; identical to SEQ ID NO: 105822
  chr2:45029729-45029778
  hypo

SEQ ID NO: 141505 - DNA, 97 bp, Homo sapiens; identical to SEQ ID NO: 105823
  chr2:45029987-45030084
  hypo

SEQ ID NO: 141506 - DNA, 30 bp, Homo sapiens; identical to SEQ ID NO: 1456
  chr2:45150461-45150491
  hypo

SEQ ID NO: 141507 - DNA, 867 bp, Homo sapiens; identical to SEQ ID NO: 105854
  chr2:45231696-45232563
  hypo

SEQ ID NO: 141508 - DNA, 66 bp, Homo sapiens; identical to SEQ ID NO: 105858
  chr2:45240360-45240426
  hypo

SEQ ID NO: 141509 - DNA, 140 bp, Homo sapiens; identical to SEQ ID NO: 1472
  chr2:45240490-45240630
  hypo

SEQ ID NO: 141510 - DNA, 405 bp, Homo sapiens; identical to SEQ ID NO: 1473
  chr2:45240763-45241168
  hypo

SEQ ID NO: 141511 - DNA, 31 bp, Homo sapiens; identical to SEQ ID NO: 63188
  chr2:45318688-45318719
  hypo

SEQ ID NO: 141512 - DNA, 30 bp, Homo sapiens
  chr2:45464371-45464401
  hypo
attatcagagaagaacgggccttataaatg

SEQ ID NO: 141513 - DNA, 30 bp, Homo sapiens; identical to SEQ ID NO: 63189
  chr2:45616413-45616443
  hypo

SEQ ID NO: 141514 - DNA, 30 bp, Homo sapiens
  chr2:45910016-45910046
  hypo
tctagttttctgccacggtaaattgaggtg

SEQ ID NO: 141515 - DNA, 206 bp, Homo sapiens; identical to SEQ ID NO: 16124
  chr2:45927197-45927403
  hypo

SEQ ID NO: 141516 - DNA, 42 bp, Homo sapiens; identical to SEQ ID NO: 16125
  chr2:45940265-45940307
  hypo

SEQ ID NO: 141517 - DNA, 23 bp, Homo sapiens
  chr2:45950744-45950767
  hypo
gttttgttttgttttttgagacg

SEQ ID NO: 141518 - DNA, 31 bp, Homo sapiens; identical to SEQ ID NO: 63193
  chr2:45997208-45997239
  hypo

SEQ ID NO: 141519 - DNA, 31 bp, Homo sapiens; identical to SEQ ID NO: 16127
  chr2:46143761-46143792
  hypo

SEQ ID NO: 141520 - DNA, 30 bp, Homo sapiens
  chr2:46152710-46152740
  hypo
aggcgtgaaccaccgcgcccggccaagcat

SEQ ID NO: 141521 - DNA, 17 bp, Homo sapiens
  chr2:46324657-46324674
  hypo
caaaaaaaaaaaaaaaa

SEQ ID NO: 141522 - DNA, 30 bp, Homo sapiens; identical to SEQ ID NO: 16128
  chr2:46398833-46398863
  hypo

SEQ ID NO: 141523 - DNA, 51 bp, Homo sapiens
  chr2:46399257-46399308
  hypo
gctgtggctctctgccgtcctccagagactctgcagcgttcattccattag

SEQ ID NO: 141524 - DNA, 146 bp, Homo sapiens
  chr2:46399619-46399765
  hypo
ctgggcgggcctgggcgtgcctgggcggccctgggagggtttgaggagcaggaataagcgccatccctcagaactgcccagaaatgcctccttcactaacaagaatggagacataatgtgtttggagctaacgctttgagactatt

SEQ ID NO: 141525 - DNA, 560 bp, Homo sapiens; identical to SEQ ID NO: 105870
  chr2:46524133-46524693
  hypo

SEQ ID NO: 141526 - DNA, 1567 bp, Homo sapiens; identical to SEQ ID NO: 105871
  chr2:46524956-46526523
  hypo

SEQ ID NO: 141527 - DNA, 40 bp, Homo sapiens
  chr2:46635254-46635294
  hypo
ttctggagttgatagcgagctcctccgcctttttgtaatg

SEQ ID NO: 141528 - DNA, 125 bp, Homo sapiens; identical to SEQ ID NO: 63198
  chr2:46707663-46707788
  hypo

SEQ ID NO: 141529 - DNA, 324 bp, Homo sapiens; identical to SEQ ID NO: 105877
  chr2:46770635-46770959
  hypo

SEQ ID NO: 141530 - DNA, 82 bp, Homo sapiens; identical to SEQ ID NO: 63199
  chr2:46834765-46834847
  hypo

SEQ ID NO: 141531 - DNA, 30 bp, Homo sapiens
  chr2:46986915-46986945
  hypo
ctgtgagcttccgccgctacaacagatccc

SEQ ID NO: 141532 - DNA, 24 bp, Homo sapiens
  chr2:47094743-47094767
  hypo
gggattacacgtgtgagccactgc

SEQ ID NO: 141533 - DNA, 224 bp, Homo sapiens
  chr2:47095092-47095316
  hypo
ccttggcagaggcgtcggccttcctaatgggctgaatctccctctgcctctgaattatgttcaactcgacaaatactgactgggccgatcagcatgcctggctctgtgctgagtgtcactgaactcgaggaacttccctccaggaattctgagtctagtagaatagacaggcaatgaaaccttactgagagaagcgcagggctgggcatgatggctcatgcctg

SEQ ID NO: 141534 - DNA, 161 bp, Homo sapiens; identical to SEQ ID NO: 63200
  chr2:47102025-47102186
  hypo

SEQ ID NO: 141535 - DNA, 31 bp, Homo sapiens; identical to SEQ ID NO: 16134
  chr2:47125492-47125523
  hypo

SEQ ID NO: 141536 - DNA, 82 bp, Homo sapiens; identical to SEQ ID NO: 1481
  chr2:47167905-47167987
  hypo

SEQ ID NO: 141537 - DNA, 17 bp, Homo sapiens
  chr2:47182013-47182030
  hypo
atttttttaaatagtgt

SEQ ID NO: 141538 - DNA, 159 bp, Homo sapiens
  chr2:47193929-47194088
  hypo
ttttttttttttttttcgaagataaattcctagaaagtagaattactgaatcatagagtatacattttttggagactttgatacagaagccaaattgcctgtgttttttgttttttttttttccgttaaaaaattgtgttggccgggcgcggtggctca

SEQ ID NO: 141539 - DNA, 135 bp, Homo sapiens
  chr2:47200520-47200655
  hypo
gagccttccagccaccgcatggtgcagggaaacccttgctaccctcatttatcccccgtcagggagggcctcagtgccgagtgcggcggaggatggatccctcccactgccgcaggttgccggttgaggtgaact

SEQ ID NO: 141540 - DNA, 30 bp, Homo sapiens
  chr2:47200854-47200884
  hypo
aaatcgtgccagtagcggccaagtctgcac

SEQ ID NO: 141541 - DNA, 308 bp, Homo sapiens
  chr2:47232012-47232320
  hypo
tttgcccccagcctgcgtgttgcccccagggtatagaggtgggcagaggggtgggactatctgcacataccaaagaacacaagagtcccacatccttgatggggagcttctggcttggtgatgaggagctcccctcttggaattagacagaatttcccgctcatacagcacctttccctctcctaccgccacccccagcagccatctggcaactctgtgagctactgaaatcctcggcgctggacgccaagagcagagttcttgagtgtggggaagctctccctggggagggacggaggagagtttcc

SEQ ID NO: 141542 - DNA, 96 bp, Homo sapiens
  chr2:47234721-47234817
  hypo
tctctgaggagggccctcctggcttgccagtgcctcctccacgcatcaagggcgtgccagccagctcggggcctcggcagccgaggcaggccaggc

SEQ ID NO: 141543 - DNA, 30 bp, Homo sapiens
  chr2:47235500-47235530
  hypo
ctcagtcaaaggtgtcgtgatagcctggga

SEQ ID NO: 141544 - DNA, 30 bp, Homo sapiens
  chr2:47235986-47236016
  hypo
ctcttgctctctgtgcggcaattgcattgg

SEQ ID NO: 141545 - DNA, 31 bp, Homo sapiens; identical to SEQ ID NO: 16136
  chr2:47236538-47236569
  hypo

SEQ ID NO: 141546 - DNA, 128 bp, Homo sapiens
  chr2:47238528-47238656
  hypo
cgtgcccctgatggccgcgaaggtctgcatcgggtcccttcgctgggtgagtgagctgtgagggcaggtcccagaggcctcctgtggggagggtggcagcagctggctgtgcacgtcttgacgtgtat

SEQ ID NO: 141547 - DNA, 102 bp, Homo sapiens; identical to SEQ ID NO: 16137
  chr2:47247695-47247797
  hypo

SEQ ID NO: 141548 - DNA, 40 bp, Homo sapiens
  chr2:47249808-47249848
  hypo
ctgggagcggcagtcacggtgacatcgggtataaatgagc

SEQ ID NO: 141549 - DNA, 30 bp, Homo sapiens
  chr2:47255030-47255060
  hypo
tatgttggtaactgccggaattcttttttc

SEQ ID NO: 141550 - DNA, 30 bp, Homo sapiens
  chr2:47271446-47271476
  hypo
ctctaattgttgtctcgaaggcagccattg

SEQ ID NO: 141551 - DNA, 30 bp, Homo sapiens
  chr2:47278059-47278089
  hypo
ttggagcctttattgcgtctatgacagaga

SEQ ID NO: 141552 - DNA, 30 bp, Homo sapiens
  chr2:47305609-47305639
  hypo
gcctccccaaatcgccggagcagaaggacc

SEQ ID NO: 141553 - DNA, 25 bp, Homo sapiens
  chr2:47335710-47335735
  hypo
ttccggacacattttcatgcctctg

SEQ ID NO: 141554 - DNA, 81 bp, Homo sapiens
  chr2:47370887-47370968
  hypo
aagtgctgggattacaggtgtgagccaccgtgtctggccaccctttgctcatttttaaccggaatatttattacaattgga

SEQ ID NO: 141555 - DNA, 205 bp, Homo sapiens
  chr2:47419052-47419257
  hypo
aggctctatttaagccgagcacttcacgtcattccactctgccttgttttcagttgagggaagggagggatgatgattcctcttgggggaatgtgggaggaaaggtaaacagtgcacgtgaacttccaagagctgcctagaaccaagaaaggcacattctctccttcccattcatggggcaaatatttaccgagccaggactctg

SEQ ID NO: 141556 - DNA, 173 bp, Homo sapiens; identical to SEQ ID NO: 16138
  chr2:47475843-47476016
  hypo

SEQ ID NO: 141557 - DNA, 31 bp, Homo sapiens; identical to SEQ ID NO: 63210
  chr2:47536015-47536046
  hypo

SEQ ID NO: 141558 - DNA, 79 bp, Homo sapiens; identical to SEQ ID NO: 63211
  chr2:47574176-47574255
  hypo

SEQ ID NO: 141559 - DNA, 30 bp, Homo sapiens
  chr2:47587317-47587347
  hypo
ccaccacgccaggcccgtttagttcattct

SEQ ID NO: 141560 - DNA, 84 bp, Homo sapiens
  chr2:47595492-47595576
  hypo
acccgaaatcatctcggttctcagtatttggctctatgggaacaccttttcttttctctctttttttttttttttgagacggag

SEQ ID NO: 141561 - DNA, 329 bp, Homo sapiens; identical to SEQ ID NO: 1483
  chr2:47596114-47596443
  hypo

SEQ ID NO: 141562 - DNA, 27 bp, Homo sapiens
  chr2:47596455-47596482
  hypo
cgctagtccttcggcgagcgagcacct

SEQ ID NO: 141563 - DNA, 343 bp, Homo sapiens; identical to SEQ ID NO: 1485
  chr2:47596505-47596848
  hypo

SEQ ID NO: 141564 - DNA, 41 bp, Homo sapiens; identical to SEQ ID NO: 37435
  chr2:47596941-47596982
  hypo

SEQ ID NO: 141565 - DNA, 181 bp, Homo sapiens; identical to SEQ ID NO: 16142
  chr2:47598299-47598480
  hypo

SEQ ID NO: 141566 - DNA, 88 bp, Homo sapiens; identical to SEQ ID NO: 63217
  chr2:47598539-47598627
  hypo

SEQ ID NO: 141567 - DNA, 28 bp, Homo sapiens
  chr2:47599466-47599494
  hypo
gatttttttttgtaaaagaggcggtgac

SEQ ID NO: 141568 - DNA, 16 bp, Homo sapiens
  chr2:47612111-47612127
  hypo
ccgggattacaggcat

SEQ ID NO: 141569 - DNA, 764 bp, Homo sapiens; identical to SEQ ID NO: 105893
  chr2:47629777-47630541
  hypo

SEQ ID NO: 141570 - DNA, 30 bp, Homo sapiens
  chr2:47631586-47631616
  hypo
caggatcgccaaagacggaagactttggaa

SEQ ID NO: 141571 - DNA, 156 bp, Homo sapiens; identical to SEQ ID NO: 37437
  chr2:47635538-47635694
  hypo

SEQ ID NO: 141572 - DNA, 280 bp, Homo sapiens; identical to SEQ ID NO: 37438
  chr2:47637231-47637511
  hypo

SEQ ID NO: 141573 - DNA, 148 bp, Homo sapiens; identical to SEQ ID NO: 37439
  chr2:47639551-47639699
  hypo

SEQ ID NO: 141574 - DNA, 151 bp, Homo sapiens; identical to SEQ ID NO: 37440
  chr2:47641406-47641557
  hypo

SEQ ID NO: 141575 - DNA, 135 bp, Homo sapiens; identical to SEQ ID NO: 37441
  chr2:47643433-47643568
  hypo

SEQ ID NO: 141576 - DNA, 201 bp, Homo sapiens; identical to SEQ ID NO: 37442
  chr2:47656879-47657080
  hypo

SEQ ID NO: 141577 - DNA, 111 bp, Homo sapiens; identical to SEQ ID NO: 37443
  chr2:47672685-47672796
  hypo

SEQ ID NO: 141578 - DNA, 125 bp, Homo sapiens; identical to SEQ ID NO: 37444
  chr2:47690168-47690293
  hypo

SEQ ID NO: 141579 - DNA, 152 bp, Homo sapiens; identical to SEQ ID NO: 37445
  chr2:47693795-47693947
  hypo

SEQ ID NO: 141580 - DNA, 99 bp, Homo sapiens; identical to SEQ ID NO: 37446
  chr2:47698102-47698201
  hypo

SEQ ID NO: 141581 - DNA, 247 bp, Homo sapiens; identical to SEQ ID NO: 37447
  chr2:47702162-47702409
  hypo

SEQ ID NO: 141582 - DNA, 206 bp, Homo sapiens; identical to SEQ ID NO: 37448
  chr2:47703504-47703710
  hypo

SEQ ID NO: 141583 - DNA, 249 bp, Homo sapiens; identical to SEQ ID NO: 37449
  chr2:47705409-47705658
  hypo

SEQ ID NO: 141584 - DNA, 177 bp, Homo sapiens; identical to SEQ ID NO: 37450
  chr2:47707833-47708010
  hypo

SEQ ID NO: 141585 - DNA, 451 bp, Homo sapiens; identical to SEQ ID NO: 37451
  chr2:47709916-47710367
  hypo

SEQ ID NO: 141586 - DNA, 780 bp, Homo sapiens; identical to SEQ ID NO: 105910
  chr2:47747970-47748750
  hypo

SEQ ID NO: 141587 - DNA, 2288 bp, Homo sapiens; identical to SEQ ID NO: 37453
  chr2:47796744-47799032
  hypo

SEQ ID NO: 141588 - DNA, 39 bp, Homo sapiens; identical to SEQ ID NO: 16145
  chr2:47802076-47802115
  hypo

SEQ ID NO: 141589 - DNA, 144 bp, Homo sapiens
  chr2:47845122-47845266
  hypo
ggctctcttcccgagcgggtgggagagttggggctaggcttcggtgcttgtccttctctatctcagggggtgccaaattgcctgaggcccaagccgtgccagggaaaatttgctgacaggcctgtgtcccggtgtcccttctgg

SEQ ID NO: 141590 - DNA, 30 bp, Homo sapiens
  chr2:47845587-47845617
  hypo
cttttccctttctaacgtacctgagcaatt

SEQ ID NO: 141591 - DNA, 30 bp, Homo sapiens; identical to SEQ ID NO: 63239
  chr2:47863907-47863937
  hypo

SEQ ID NO: 141592 - DNA, 30 bp, Homo sapiens; identical to SEQ ID NO: 16146
  chr2:47917826-47917856
  hypo

SEQ ID NO: 141593 - DNA, 46 bp, Homo sapiens; identical to SEQ ID NO: 63241
  chr2:47918382-47918428
  hypo

SEQ ID NO: 141594 - DNA, 413 bp, Homo sapiens; identical to SEQ ID NO: 37456
  chr2:48010219-48010632
  hypo

SEQ ID NO: 141595 - DNA, 198 bp, Homo sapiens; identical to SEQ ID NO: 37458
  chr2:48018064-48018262
  hypo

SEQ ID NO: 141596 - DNA, 171 bp, Homo sapiens; identical to SEQ ID NO: 37459
  chr2:48023031-48023202
  hypo

SEQ ID NO: 141597 - DNA, 2546 bp, Homo sapiens; identical to SEQ ID NO: 37460
  chr2:48025748-48028294
  hypo

SEQ ID NO: 141598 - DNA, 267 bp, Homo sapiens; identical to SEQ ID NO: 37461
  chr2:48030557-48030824
  hypo

SEQ ID NO: 141599 - DNA, 119 bp, Homo sapiens; identical to SEQ ID NO: 37462
  chr2:48032047-48032166
  hypo

SEQ ID NO: 141600 - DNA, 91 bp, Homo sapiens; identical to SEQ ID NO: 37463
  chr2:48032755-48032846
  hypo

SEQ ID NO: 141601 - DNA, 751 bp, Homo sapiens; identical to SEQ ID NO: 37464
  chr2:48033341-48034092
  hypo

SEQ ID NO: 141602 - DNA, 31 bp, Homo sapiens; identical to SEQ ID NO: 16148
  chr2:48112329-48112360
  hypo

SEQ ID NO: 141603 - DNA, 30 bp, Homo sapiens
  chr2:48512630-48512660
  hypo
ttgtttctaacaatcgaggaacaggcattt

SEQ ID NO: 141604 - DNA, 101 bp, Homo sapiens; identical to SEQ ID NO: 16149
  chr2:48539632-48539733
  hypo

SEQ ID NO: 141605 - DNA, 87 bp, Homo sapiens; identical to SEQ ID NO: 63252
  chr2:48606933-48607020
  hypo

SEQ ID NO: 141606 - DNA, 30 bp, Homo sapiens; identical to SEQ ID NO: 63253
  chr2:48636639-48636669
  hypo

SEQ ID NO: 141607 - DNA, 108 bp, Homo sapiens
  chr2:48742858-48742966
  hypo
caggcccatttcaaccgtgtccaggcctccagattagctgaggagttcctgaaacccacttctccttacctctccgcctgtggcaccatctctcgagtctactctcta

SEQ ID NO: 141608 - DNA, 30 bp, Homo sapiens; identical to SEQ ID NO: 16150
  chr2:48925981-48926011
  hypo

SEQ ID NO: 141609 - DNA, 29 bp, Homo sapiens
  chr2:48926250-48926279
  hypo
ctgcgcccggccatattttatacatttta

SEQ ID NO: 141610 - DNA, 92 bp, Homo sapiens; identical to SEQ ID NO: 16152
  chr2:49621662-49621754
  hypo

SEQ ID NO: 141611 - DNA, 22 bp, Homo sapiens
  chr2:49832949-49832971
  hypo
aagttaactttaatgttttttc

SEQ ID NO: 141612 - DNA, 30 bp, Homo sapiens; identical to SEQ ID NO: 63258
  chr2:51467037-51467067
  hypo

SEQ ID NO: 141613 - DNA, 20 bp, Homo sapiens
  chr2:52159356-52159376
  hypo
gctgtcgctcccgggcttct

SEQ ID NO: 141614 - DNA, 30 bp, Homo sapiens; identical to SEQ ID NO: 37479
  chr2:53340315-53340345
  hypo

SEQ ID NO: 141615 - DNA, 22 bp, Homo sapiens
  chr2:53896666-53896688
  hypo
cggcccctttctttctttaaag

SEQ ID NO: 141616 - DNA, 38 bp, Homo sapiens
  chr2:53992664-53992702
  hypo
tccaactgtagagcacgtgtccgcgtaagcctctgtaa

SEQ ID NO: 141617 - DNA, 37 bp, Homo sapiens; identical to SEQ ID NO: 16153
  chr2:54019054-54019091
  hypo

SEQ ID NO: 141618 - DNA, 89 bp, Homo sapiens
  chr2:54027325-54027414
  hypo
tttttatttatattttttccccatagaaaaccaagttcgcagtaccattacagaatatcagtcatttctgctaccgcaatgccaatatc

SEQ ID NO: 141619 - DNA, 155 bp, Homo sapiens; identical to SEQ ID NO: 16154
  chr2:54097366-54097521
  hypo

SEQ ID NO: 141620 - DNA, 160 bp, Homo sapiens; identical to SEQ ID NO: 63263
  chr2:54124938-54125098
  hypo

SEQ ID NO: 141621 - DNA, 17 bp, Homo sapiens
  chr2:54182795-54182812
  hypo
tgtctgcaatccaagca

SEQ ID NO: 141622 - DNA, 7 bp, Homo sapiens
  chr2:54199156-54199163
  hypo
actctgg

SEQ ID NO: 141623 - DNA, 22 bp, Homo sapiens
  chr2:54216156-54216178
  hypo
ttacaggcgtgagccaccacgc

SEQ ID NO: 141624 - DNA, 115 bp, Homo sapiens
  chr2:54308419-54308534
  hypo
tatttgtaataataacggcagtattatcaagtacagtcctgcagtacatatgacatttccatccacaatgcacctctaataggatggcccgcctagaaaacggtagccccataag

SEQ ID NO: 141625 - DNA, 293 bp, Homo sapiens
  chr2:54312127-54312420
  hypo
cgtggggaatgtttccggatggaatattctatgtcttcaacttactttcaaaaaaacaatacagcaagtcctcaaataagtctctttgttcaacgtcgttttgttcagtgtgagaaaaatgatgagaaaaaaaatcattcctggaaatatattcctggtcagggccactgtctgtgtagagttgcacgttctcctcacgtctgtgggatttttctccaggtgatccagtttcctcccacgttccaaggctgtgcacatttagttcactggcgggtccacgtggtggcactgtg

SEQ ID NO: 141626 - DNA, 31 bp, Homo sapiens
  chr2:54328519-54328550
  hypo
gccaggggccgggcgcggtggctcacgcctg

SEQ ID NO: 141627 - DNA, 121 bp, Homo sapiens
  chr2:54343975-54344096
  hypo
gtctaagctaattccgactggctattttaaagagcaggcgtacgagctcaagtggcggggtgaataatttggcaggaagggtggttacagaacaggtgactcaggatgattcaggtcagag

SEQ ID NO: 141628 - DNA, 30 bp, Homo sapiens
  chr2:54366381-54366411
  hypo
tgccttaggatggttcgtgaagttcttagg

SEQ ID NO: 141629 - DNA, 30 bp, Homo sapiens; identical to SEQ ID NO: 16157
  chr2:54482460-54482490
  hypo

SEQ ID NO: 141630 - DNA, 30 bp, Homo sapiens
  chr2:54483178-54483208
  hypo
gccattacctctgtcgccttgctcttttct

SEQ ID NO: 141631 - DNA, 30 bp, Homo sapiens
  chr2:54483416-54483446
  hypo
ccacccctcagtctcgcgacactcactcct

SEQ ID NO: 141632 - DNA, 141 bp, Homo sapiens; identical to SEQ ID NO: 37485
  chr2:54683031-54683172
  hypo

SEQ ID NO: 141633 - DNA, 30 bp, Homo sapiens; identical to SEQ ID NO: 63269
  chr2:54855919-54855949
  hypo

SEQ ID NO: 141634 - DNA, 30 bp, Homo sapiens
  chr2:54856320-54856350
  hypo
gaggacgagatgagcggccgcagtggccac

SEQ ID NO: 141635 - DNA, 138 bp, Homo sapiens; identical to SEQ ID NO: 63270
  chr2:54880808-54880946
  hypo

SEQ ID NO: 141636 - DNA, 80 bp, Homo sapiens
  chr2:54939736-54939816
  hypo
cttactcttctcatgcggaaatgccgagttcccatttagtatggaatcttaattcccatgtcaaccgatatttgccgagg

SEQ ID NO: 141637 - DNA, 30 bp, Homo sapiens
  chr2:54998500-54998530
  hypo
ttactcatacaagagcggatacattatcat

SEQ ID NO: 141638 - DNA, 32 bp, Homo sapiens; identical to SEQ ID NO: 63271
  chr2:55098809-55098841
  hypo

SEQ ID NO: 141639 - DNA, 30 bp, Homo sapiens
  chr2:55168528-55168558
  hypo
gtggcacagtgtcaacggcaaatgagcaac

SEQ ID NO: 141640 - DNA, 361 bp, Homo sapiens
  chr2:55173804-55174165
  hypo
ttgtcaagtaagtattcacaccgctctggagacaaacacaggtgtttggtgaacatccagtactaagtgttcacgcagaatccacaaccgcgaagggtcaatacttaaaatccgctgaatttgccacaatgcaggtttcttccccttgctcctctcatcttcagttttgaagcaatacagctgtaaacatatgcttgcgaaatgagaaagaaacattgagattgctttacctttcggtttttttctgaaaatcaaggtgaaaaaaaaaagcatcggattgcgtctgtgtatatatatacaatctcctgtatatataaatacacggtgtttgtgcttgtacgcatactctatattcactgta

SEQ ID NO: 141641 - DNA, 30 bp, Homo sapiens
  chr2:55174457-55174487
  hypo
tgctcaatttggtggcgatgatgtcagccg

SEQ ID NO: 141642 - DNA, 208 bp, Homo sapiens
  chr2:55175831-55176039
  hypo
attcaggctgggtcccgtggcaggcggggagtgagagaggagggcaggactgaacagatccaagtggaggggcctttgaggcgggaggagagaggaggccggcactggcctagacaggccacaccgggaaggcagccttgcagcccttgttcaatgctgtgcttcctctggccgctctctcttccagaccacccgttagccgagcagc

SEQ ID NO: 141643 - DNA, 241 bp, Homo sapiens; identical to SEQ ID NO: 16158
  chr2:55289045-55289286
  hypo

SEQ ID NO: 141644 - DNA, 233 bp, Homo sapiens
  chr2:55366222-55366455
  hypo
gggctaataacccaacggtcacatccactaattcaggcctcctggtgcccaatagagccaacttcccaaaatgctgccttgtatagggggaccccgtttgatagccaggcccacgatgcaatgacacactgccataaagtacaataaagagtacccgcctctactcttcatggcagaggacaaagttcatccattgtattatcatgaagcatcattacgttgggcagtcattt

SEQ ID NO: 141645 - DNA, 103 bp, Homo sapiens; identical to SEQ ID NO: 63275
  chr2:55391616-55391719
  hypo

SEQ ID NO: 141646 - DNA, 113 bp, Homo sapiens; identical to SEQ ID NO: 63276
  chr2:55451551-55451664
  hypo

SEQ ID NO: 141647 - DNA, 101 bp, Homo sapiens; identical to SEQ ID NO: 63277
  chr2:55458365-55458466
  hypo

SEQ ID NO: 141648 - DNA, 17 bp, Homo sapiens
  chr2:55492354-55492371
  hypo
gacgacaagaacaaaac

SEQ ID NO: 141649 - DNA, 85 bp, Homo sapiens; identical to SEQ ID NO: 16162
  chr2:55499045-55499130
  hypo

SEQ ID NO: 141650 - DNA, 30 bp, Homo sapiens; identical to SEQ ID NO: 63280
  chr2:55559544-55559574
  hypo

SEQ ID NO: 141651 - DNA, 872 bp, Homo sapiens; identical to SEQ ID NO: 105970
  chr2:55646266-55647138
  hypo

SEQ ID NO: 141652 - DNA, 30 bp, Homo sapiens; identical to SEQ ID NO: 63282
  chr2:55653106-55653136
  hypo

SEQ ID NO: 141653 - DNA, 29 bp, Homo sapiens
  chr2:55653315-55653344
  hypo
ccagtgccggtccacagcccagggactgg

SEQ ID NO: 141654 - DNA, 41 bp, Homo sapiens; identical to SEQ ID NO: 16163
  chr2:55669239-55669280
  hypo

SEQ ID NO: 141655 - DNA, 100 bp, Homo sapiens; identical to SEQ ID NO: 63285
  chr2:55687099-55687199
  hypo

SEQ ID NO: 141656 - DNA, 39 bp, Homo sapiens; identical to SEQ ID NO: 63286
  chr2:55687318-55687357
  hypo

SEQ ID NO: 141657 - DNA, 43 bp, Homo sapiens; identical to SEQ ID NO: 63287
  chr2:55825328-55825371
  hypo

SEQ ID NO: 141658 - DNA, 88 bp, Homo sapiens; identical to SEQ ID NO: 63288
  chr2:55874485-55874573
  hypo

SEQ ID NO: 141659 - DNA, 29 bp, Homo sapiens
  chr2:55874934-55874963
  hypo
agcgtgagccaccgcgcccagcagacatt

SEQ ID NO: 141660 - DNA, 30 bp, Homo sapiens
  chr2:55923753-55923783
  hypo
tgaactccttgaatcggttagcttttatcc

SEQ ID NO: 141661 - DNA, 23 bp, Homo sapiens
  chr2:56051167-56051190
  hypo
aaaaagccaggcctggtgttgcg

SEQ ID NO: 141662 - DNA, 23 bp, Homo sapiens
  chr2:56051309-56051332
  hypo
ccgtgtcaaaaaaaaaaaaaaaa

SEQ ID NO: 141663 - DNA, 27 bp, Homo sapiens
  chr2:56347000-56347027
  hypo
caccgcgcccagcccagacttcccttt

SEQ ID NO: 141664 - DNA, 78 bp, Homo sapiens; identical to SEQ ID NO: 63291
  chr2:57645779-57645857
  hypo

SEQ ID NO: 141665 - DNA, 30 bp, Homo sapiens; identical to SEQ ID NO: 16164
  chr2:57986782-57986812
  hypo

SEQ ID NO: 141666 - DNA, 30 bp, Homo sapiens; identical to SEQ ID NO: 16165
  chr2:57987077-57987107
  hypo

SEQ ID NO: 141667 - DNA, 30 bp, Homo sapiens; identical to SEQ ID NO: 16166
  chr2:57987333-57987363
  hypo

SEQ ID NO: 141668 - DNA, 31 bp, Homo sapiens; identical to SEQ ID NO: 16167
  chr2:58097324-58097355
  hypo

SEQ ID NO: 141669 - DNA, 35 bp, Homo sapiens
  chr2:58614659-58614694
  hypo
agaccggagctgttcctattcggccatcttggctc

SEQ ID NO: 141670 - DNA, 738 bp, Homo sapiens; identical to SEQ ID NO: 105989
  chr2:58655394-58656132
  hypo

SEQ ID NO: 141671 - DNA, 18 bp, Homo sapiens
  chr2:58761240-58761258
  hypo
ttagccaggcgtggtcgc

SEQ ID NO: 141672 - DNA, 102 bp, Homo sapiens; identical to SEQ ID NO: 1521
  chr2:58776939-58777041
  hypo

SEQ ID NO: 141673 - DNA, 35 bp, Homo sapiens; identical to SEQ ID NO: 63299
  chr2:58788930-58788965
  hypo

SEQ ID NO: 141674 - DNA, 30 bp, Homo sapiens
  chr2:59140069-59140099
  hypo
ccgaatgttgtgattcgtattattgaaagg

SEQ ID NO: 141675 - DNA, 39 bp, Homo sapiens; identical to SEQ ID NO: 63300
  chr2:59382730-59382769
  hypo

SEQ ID NO: 141676 - DNA, 30 bp, Homo sapiens
  chr2:60201907-60201937
  hypo
cttgcgctgtccactcgaggcatgcagaag

SEQ ID NO: 141677 - DNA, 30 bp, Homo sapiens
  chr2:60367332-60367362
  hypo
tctccttgaagttctcggtaggctctgtgc

SEQ ID NO: 141678 - DNA, 132 bp, Homo sapiens
  chr2:60598575-60598707
  hypo
tggacccagcggctccgttgactccccacacccaagacccacagccacaggacacgggcttctctggtccacttagccctcgtcagcgccaacagttctaatgattccagggtccttcgatggccctcccgc

SEQ ID NO: 141679 - DNA, 46 bp, Homo sapiens; identical to SEQ ID NO: 63302
  chr2:60642568-60642614
  hypo

SEQ ID NO: 141680 - DNA, 30 bp, Homo sapiens; identical to SEQ ID NO: 63303
  chr2:60679644-60679674
  hypo

SEQ ID NO: 141681 - DNA, 30 bp, Homo sapiens; identical to SEQ ID NO: 63304
  chr2:60688396-60688426
  hypo

SEQ ID NO: 141682 - DNA, 82 bp, Homo sapiens
  chr2:60688976-60689058
  hypo
gtcgccaggaagggcggcttgctacctggctggaatggttgcagtaacctttgcatagggctgggccggcctggggacagcg

SEQ ID NO: 141683 - DNA, 206 bp, Homo sapiens
  chr2:60704079-60704285
  hypo
tgcctttgtagttagaagggacgataaaagacactgccctgaacatatttctgtcacccgaattgtccagcttcacacaaacgtatcacaaacaccccgatgcctccctgccccactcgagaaatgaagaaaaggatgggaaatcatcatttggacacctggaaagccttgcaaaccacacttgcgtttctcccaggttaagtatt

SEQ ID NO: 141684 - DNA, 147 bp, Homo sapiens; identical to SEQ ID NO: 16170
  chr2:60705870-60706017
  hypo

SEQ ID NO: 141685 - DNA, 451 bp, Homo sapiens; identical to SEQ ID NO: 63308
  chr2:60706375-60706826
  hypo

SEQ ID NO: 141686 - DNA, 30 bp, Homo sapiens
  chr2:60732367-60732397
  hypo
aaaaagctagaggatcggagagaaaagaag

SEQ ID NO: 141687 - DNA, 64 bp, Homo sapiens; identical to SEQ ID NO: 63309
  chr2:60733547-60733611
  hypo

SEQ ID NO: 141688 - DNA, 30 bp, Homo sapiens
  chr2:60770673-60770703
  hypo
acctgagggccagagcgtcggaatttatgt

SEQ ID NO: 141689 - DNA, 30 bp, Homo sapiens
  chr2:60770982-60771012
  hypo
atgattgattattagcgctataaaatatat

SEQ ID NO: 141690 - DNA, 592 bp, Homo sapiens
  chr2:60778605-60779197
  hypo
ggtgaccagaccgggcggggtggggggtgggcagggaaagcacgtggtgacctcctcgcggtcccgagctgtggacaagagacgtctgagaaagtacccagggcggaggggaggggaggcgcagaacgcgcttttacagttgccctgcaaaataaaaatgctttgcaaagccgagtttcacccagccgatttcgcagtctgggaggtcgagaagaggtctcggcattgtgctgggggcggaccaggaccacgggccaggctggcgcggagacactgcgtggcctgccgccgtgcctggcgggtgggcgccgggcgccgggtgggcgatccggggctgggctggggcgcggcgaggtcgggcaaggcccgggcgaggccaggccgccgccgccgcctgctccggggctgccgcgccgcgctcggtcctctgtctgtttgttggcaggaggctcccgcacacgcggtgcttgtaaacattcagacacgagatttttcccaatcaaaatccacttccactttttttgaaaatcttccaaaaaatagtaagaggagggagttcctctctccctctccgtgccgtcggcgccctaag

SEQ ID NO: 141691 - DNA, 1093 bp, Homo sapiens; identical to SEQ ID NO: 106002
  chr2:60783806-60784899
  hypo

SEQ ID NO: 141692 - DNA, 125 bp, Homo sapiens; identical to SEQ ID NO: 63311
  chr2:60812483-60812608
  hypo

SEQ ID NO: 141693 - DNA, 36 bp, Homo sapiens
  chr2:60986215-60986251
  hypo
tgaattggctgagcgcgggggctcacgcctgtgatc

SEQ ID NO: 141694 - DNA, 262 bp, Homo sapiens
  chr2:61035609-61035871
  hypo
gttaagcgggaatctcggttcctacctccccagacctgctgcaggaactccgggccgctctgggctttgccctgacaagcaggaggggtggcttacccgattggtcagcttggggagggaactaagcatgtgcggccacaccctgtggctcctcccttttacgtttttcccgccctgcgcagtggctctgctgtgtctgcgggtggccttgactgtgaagagcccgtgcttggagcacactcaaagccgctgtcttcaatga

SEQ ID NO: 141695 - DNA, 170 bp, Homo sapiens; identical to SEQ ID NO: 63313
  chr2:61074832-61075002
  hypo

SEQ ID NO: 141696 - DNA, 86 bp, Homo sapiens; identical to SEQ ID NO: 63314
  chr2:61088704-61088790
  hypo

SEQ ID NO: 141697 - DNA, 105 bp, Homo sapiens; identical to SEQ ID NO: 16174
  chr2:61135143-61135248
  hypo

SEQ ID NO: 141698 - DNA, 21 bp, Homo sapiens
  chr2:61142250-61142271
  hypo
ccaccacgcctggccagtttg

SEQ ID NO: 141699 - DNA, 30 bp, Homo sapiens; identical to SEQ ID NO: 63317
  chr2:61149841-61149871
  hypo

SEQ ID NO: 141700 - DNA, 54 bp, Homo sapiens
  chr2:61175237-61175291
  hypo
atgaagtgaatgacgcgagctcgcacagccaggggccttcggtgaaggacgcgc

SEQ ID NO: 141701 - DNA, 457 bp, Homo sapiens; identical to SEQ ID NO: 1532
  chr2:61175642-61176099
  hypo

SEQ ID NO: 141702 - DNA, 41 bp, Homo sapiens; identical to SEQ ID NO: 63320
  chr2:61186778-61186819
  hypo

SEQ ID NO: 141703 - DNA, 35 bp, Homo sapiens; identical to SEQ ID NO: 63321
  chr2:61189412-61189447
  hypo

SEQ ID NO: 141704 - DNA, 26 bp, Homo sapiens
  chr2:61247107-61247133
  hypo
tatccactttgggagactgggcgggc

SEQ ID NO: 141705 - DNA, 127 bp, Homo sapiens; identical to SEQ ID NO: 16178
  chr2:61304101-61304228
  hypo

SEQ ID NO: 141706 - DNA, 18 bp, Homo sapiens
  chr2:61320689-61320707
  hypo
attgcactccagtctggg

SEQ ID NO: 141707 - DNA, 30 bp, Homo sapiens; identical to SEQ ID NO: 16179
  chr2:61389158-61389188
  hypo

SEQ ID NO: 141708 - DNA, 30 bp, Homo sapiens; identical to SEQ ID NO: 63326
  chr2:61391159-61391189
  hypo

SEQ ID NO: 141709 - DNA, 40 bp, Homo sapiens
  chr2:61394938-61394978
  hypo
ggcaggttggccgggcgcggtgactcacgcctgtaatcct

SEQ ID NO: 141710 - DNA, 27 bp, Homo sapiens
  chr2:61403047-61403074
  hypo
ctggtccattgtccaaaagtccgtaag

SEQ ID NO: 141711 - DNA, 27 bp, Homo sapiens
  chr2:61403373-61403400
  hypo
gcgcccggccaagactgattgttctag

SEQ ID NO: 141712 - DNA, 26 bp, Homo sapiens
  chr2:61424131-61424157
  hypo
aggcgtggtggctcacgcctataatc

SEQ ID NO: 141713 - DNA, 140 bp, Homo sapiens; identical to SEQ ID NO: 16180
  chr2:61448895-61449035
  hypo

SEQ ID NO: 141714 - DNA, 30 bp, Homo sapiens
  chr2:61452937-61452967
  hypo
ttgttgattcattaacgtttaactcactgc

SEQ ID NO: 141715 - DNA, 30 bp, Homo sapiens
  chr2:61453316-61453346
  hypo
tttcacagcatacaccgtgaaaagtacatt

SEQ ID NO: 141716 - DNA, 41 bp, Homo sapiens; identical to SEQ ID NO: 16181
  chr2:61471723-61471764
  hypo

SEQ ID NO: 141717 - DNA, 20 bp, Homo sapiens
  chr2:61488943-61488963
  hypo
tgttaagaatttttggctgg

SEQ ID NO: 141718 - DNA, 121 bp, Homo sapiens; identical to SEQ ID NO: 16182
  chr2:61505030-61505151
  hypo

SEQ ID NO: 141719 - DNA, 36 bp, Homo sapiens; identical to SEQ ID NO: 16183
  chr2:61505210-61505246
  hypo

SEQ ID NO: 141720 - DNA, 30 bp, Homo sapiens; identical to SEQ ID NO: 16184
  chr2:61509378-61509408
  hypo

SEQ ID NO: 141721 - DNA, 33 bp, Homo sapiens; identical to SEQ ID NO: 16185
  chr2:61556156-61556189
  hypo

SEQ ID NO: 141722 - DNA, 30 bp, Homo sapiens; identical to SEQ ID NO: 16186
  chr2:61642178-61642208
  hypo

SEQ ID NO: 141723 - DNA, 30 bp, Homo sapiens; identical to SEQ ID NO: 63337
  chr2:61645589-61645619
  hypo

SEQ ID NO: 141724 - DNA, 44 bp, Homo sapiens
  chr2:61660470-61660514
  hypo
ttacaagtggcgaatcggccaggtgcggtggctcatgcctgtaa

SEQ ID NO: 141725 - DNA, 19 bp, Homo sapiens
  chr2:61742924-61742943
  hypo
aaaatccaacctggccggg

SEQ ID NO: 141726 - DNA, 121 bp, Homo sapiens; identical to SEQ ID NO: 63338
  chr2:61759937-61760058
  hypo

SEQ ID NO: 141727 - DNA, 164 bp, Homo sapiens
  chr2:61816740-61816904
  hypo
agcgagaaccctggccgaatttttgcaggtggctccagtacagctgcgggtgacccatcttgctctcaggaatgcaacgacgtaaaaggaaagccatgaaacatgtcttttgcaaatattctctcccagtctgtggcttatcttgttctctccatttttttttc

SEQ ID NO: 141728 - DNA, 33 bp, Homo sapiens
  chr2:61885814-61885847
  hypo
gccaccgcgcccggccttcactcttaacagaag

SEQ ID NO: 141729 - DNA, 96 bp, Homo sapiens; identical to SEQ ID NO: 106024
  chr2:61921787-61921883
  hypo

SEQ ID NO: 141730 - DNA, 43 bp, Homo sapiens
  chr2:61923842-61923885
  hypo
gctggagagtagtggccgtatcatttagttccctgctgcctca

SEQ ID NO: 141731 - DNA, 827 bp, Homo sapiens; identical to SEQ ID NO: 37536
  chr2:61990959-61991786
  hypo

SEQ ID NO: 141732 - DNA, 30 bp, Homo sapiens
  chr2:62076948-62076978
  hypo
tgtccttcacagccacgtggatggagctgt

SEQ ID NO: 141733 - DNA, 20 bp, Homo sapiens
  chr2:62092173-62092193
  hypo
gactccgtctcaaaaaaaaa

SEQ ID NO: 141734 - DNA, 28 bp, Homo sapiens
  chr2:62107144-62107172
  hypo
gagccaccacgcccggcctctaccactc

SEQ ID NO: 141735 - DNA, 93 bp, Homo sapiens; identical to SEQ ID NO: 16190
  chr2:62116628-62116721
  hypo

SEQ ID NO: 141736 - DNA, 39 bp, Homo sapiens; identical to SEQ ID NO: 16191
  chr2:62146651-62146690
  hypo

SEQ ID NO: 141737 - DNA, 251 bp, Homo sapiens
  chr2:62406298-62406549
  hypo
tttaattaactttgtcggagaaagttgccaagcactcttcagctgttttggaatgttgtattccaagttgtagaggttatgactttctctttctggaacccaaaagcgacttgtggaagcaaaatgagaacagcttttggcctccgacaccacaatgcatcagccagacctggatgttgccactaaactgaggaaaaactgtctctggtgtctccttatggccagaatggcatgttcgactttagacttga

SEQ ID NO: 141738 - DNA, 31 bp, Homo sapiens; identical to SEQ ID NO: 16192
  chr2:62432139-62432170
  hypo

SEQ ID NO: 141739 - DNA, 39 bp, Homo sapiens; identical to SEQ ID NO: 16193
  chr2:62497413-62497452
  hypo

SEQ ID NO: 141740 - DNA, 38 bp, Homo sapiens; identical to SEQ ID NO: 16194
  chr2:62497691-62497729
  hypo

SEQ ID NO: 141741 - DNA, 34 bp, Homo sapiens; identical to SEQ ID NO: 63347
  chr2:62585417-62585451
  hypo

SEQ ID NO: 141742 - DNA, 268 bp, Homo sapiens
  chr2:62635424-62635692
  hypo
gctgtgttgtaaggatgttcacgcagccctctcagaggtcccagaggtgaggaactgacgcctcctgccaacagccatgtgaggacccatcttggacgtgaatcctcccgcctcatatcaagccctcacgtgacagcagctctgcttaatatcttgaccgcaacctcatgagagaccctgaaccagaacaactcaccttagtcgcgtccaaattcctgactctaagttaccattagagatgacacacgttttgctgttgaggctgctg

SEQ ID NO: 141743 - DNA, 30 bp, Homo sapiens
  chr2:62652292-62652322
  hypo
gtaacgagtcctgaacgttcataatcccct

SEQ ID NO: 141744 - DNA, 30 bp, Homo sapiens
  chr2:62653369-62653399
  hypo
gattctgatgcagaacgtcctccggccact

SEQ ID NO: 141745 - DNA, 30 bp, Homo sapiens
  chr2:62653728-62653758
  hypo
gctaagcccccaggccgacgccagcggtcc

SEQ ID NO: 141746 - DNA, 31 bp, Homo sapiens; identical to SEQ ID NO: 16195
  chr2:62679583-62679614
  hypo

SEQ ID NO: 141747 - DNA, 72 bp, Homo sapiens; identical to SEQ ID NO: 63350
  chr2:62685373-62685445
  hypo

SEQ ID NO: 141748 - DNA, 30 bp, Homo sapiens
  chr2:62764542-62764572
  hypo
tcgcaccttgtgcagcggggaggagcctgg

SEQ ID NO: 141749 - DNA, 30 bp, Homo sapiens; identical to SEQ ID NO: 16196
  chr2:62788798-62788828
  hypo

SEQ ID NO: 141750 - DNA, 28 bp, Homo sapiens
  chr2:62910505-62910533
  hypo
agtaagcaggccaggcgcggtgtctccg

SEQ ID NO: 141751 - DNA, 26 bp, Homo sapiens
  chr2:63118021-63118047
  hypo
ataagaagcctgggctgggcacggcg

SEQ ID NO: 141752 - DNA, 25 bp, Homo sapiens
  chr2:63118286-63118311
  hypo
gggcgacaaaaaaaaaaaaaaaagt

SEQ ID NO: 141753 - DNA, 170 bp, Homo sapiens; identical to SEQ ID NO: 63355
  chr2:63118746-63118916
  hypo

SEQ ID NO: 141754 - DNA, 238 bp, Homo sapiens; identical to SEQ ID NO: 63356
  chr2:63123374-63123612
  hypo

SEQ ID NO: 141755 - DNA, 218 bp, Homo sapiens
  chr2:63192033-63192251
  hypo
ggcatgaaaccacaacgacttgattttttcagccattagtagatcagagcagtaatttcacagtattttggtcaaggtaattataataccacgaactgagtagatttgaaaattcacgaaagaagtccagaaataccaggtgagcttccttgtgttcactggaacgttatgattagtttaattggtctttgtttgattttagccgcagaaactgtttg

SEQ ID NO: 141756 - DNA, 150 bp, Homo sapiens; identical to SEQ ID NO: 16201
  chr2:63272199-63272349
  hypo

SEQ ID NO: 141757 - DNA, 30 bp, Homo sapiens; identical to SEQ ID NO: 63359
  chr2:63834269-63834299
  hypo

SEQ ID NO: 141758 - DNA, 53 bp, Homo sapiens; identical to SEQ ID NO: 63360
  chr2:63855249-63855302
  hypo

SEQ ID NO: 141759 - DNA, 30 bp, Homo sapiens
  chr2:64219530-64219560
  hypo
cctggactccgtctccgtccaaaacatgaa

SEQ ID NO: 141760 - DNA, 31 bp, Homo sapiens; identical to SEQ ID NO: 63361
  chr2:64345228-64345259
  hypo

SEQ ID NO: 141761 - DNA, 191 bp, Homo sapiens; identical to SEQ ID NO: 16202
  chr2:64348215-64348406
  hypo

SEQ ID NO: 141762 - DNA, 30 bp, Homo sapiens
  chr2:64372144-64372174
  hypo
ccactatcaaagtcccgtaattaattactt

SEQ ID NO: 141763 - DNA, 32 bp, Homo sapiens
  chr2:64372515-64372547
  hypo
gagagctaaaggcaacgcgtcctgagcgcttt

SEQ ID NO: 141764 - DNA, 121 bp, Homo sapiens
  chr2:64375240-64375361
  hypo
tacagaaatgagccaccgcgcccggccaaatatcagtagacttctaatcagaaactgtgcaagtcagaagaccatgaaaaggcatttccaaagtgctgaaaaaaaaacctgcctggcatgg

SEQ ID NO: 141765 - DNA, 134 bp, Homo sapiens; identical to SEQ ID NO: 16203
  chr2:64538767-64538901
  hypo

SEQ ID NO: 141766 - DNA, 31 bp, Homo sapiens
  chr2:64543594-64543625
  hypo
tcatgaaagcatcctccgggacccagtttcc

SEQ ID NO: 141767 - DNA, 109 bp, Homo sapiens
  chr2:64732411-64732520
  hypo
tcctcaggggcctctcgggatcttcaggtgcaaagctactgcacggtccttctgagctgaccctgccccgctctaccatacctcttccaatggccgcctcacatcctat

SEQ ID NO: 141768 - DNA, 30 bp, Homo sapiens
  chr2:64794704-64794734
  hypo
ttaaaccgcctggagcgaattttcgaagca

SEQ ID NO: 141769 - DNA, 30 bp, Homo sapiens
  chr2:64818389-64818419
  hypo
cctcacccagagttccgtcctgcctgtgta

SEQ ID NO: 141770 - DNA, 147 bp, Homo sapiens
  chr2:64835503-64835650
  hypo
actgaggacagggaggcgaagtgagctgttaaaagtcaccatctaaggagctgtgctggggatagaacacgggtggctacgccgggcatggtggtgcgcacctgcagtcctggctgctggagaagctgaggcggaaggatcgcttaa

SEQ ID NO: 141771 - DNA, 183 bp, Homo sapiens; identical to SEQ ID NO: 1554
  chr2:64836249-64836432
  hypo

SEQ ID NO: 141772 - DNA, 162 bp, Homo sapiens; identical to SEQ ID NO: 1555
  chr2:64836470-64836632
  hypo

SEQ ID NO: 141773 - DNA, 86 bp, Homo sapiens; identical to SEQ ID NO: 1556
  chr2:64836746-64836832
  hypo

SEQ ID NO: 141774 - DNA, 30 bp, Homo sapiens
  chr2:64855231-64855261
  hypo
ggtaacgatcggattcgaacaccttgctca

SEQ ID NO: 141775 - DNA, 100 bp, Homo sapiens; identical to SEQ ID NO: 63368
  chr2:64865160-64865260
  hypo

SEQ ID NO: 141776 - DNA, 30 bp, Homo sapiens; identical to SEQ ID NO: 63369
  chr2:64865713-64865743
  hypo

SEQ ID NO: 141777 - DNA, 30 bp, Homo sapiens; identical to SEQ ID NO: 106068
  chr2:64871899-64871929
  hypo

SEQ ID NO: 141778 - DNA, 143 bp, Homo sapiens; identical to SEQ ID NO: 106069
  chr2:64872366-64872509
  hypo

SEQ ID NO: 141779 - DNA, 30 bp, Homo sapiens
  chr2:64881845-64881875
  hypo
gagacgcagccaggtcggaggcgcagtcct

SEQ ID NO: 141780 - DNA, 23 bp, Homo sapiens
  chr2:64950610-64950633
  hypo
agaccttagagttccccaccccg

SEQ ID NO: 141781 - DNA, 22 bp, Homo sapiens
  chr2:64950932-64950954
  hypo
cgcctggccagagtttttcaac

SEQ ID NO: 141782 - DNA, 37 bp, Homo sapiens; identical to SEQ ID NO: 63370
  chr2:65062637-65062674
  hypo

SEQ ID NO: 141783 - DNA, 30 bp, Homo sapiens; identical to SEQ ID NO: 106074
  chr2:65086545-65086575
  hypo

SEQ ID NO: 141784 - DNA, 358 bp, Homo sapiens; identical to SEQ ID NO: 106075
  chr2:65086835-65087193
  hypo

SEQ ID NO: 141785 - DNA, 483 bp, Homo sapiens; identical to SEQ ID NO: 106077
  chr2:65215347-65215830
  hypo

SEQ ID NO: 141786 - DNA, 30 bp, Homo sapiens; identical to SEQ ID NO: 63372
  chr2:65246629-65246659
  hypo

SEQ ID NO: 141787 - DNA, 30 bp, Homo sapiens; identical to SEQ ID NO: 63373
  chr2:65247283-65247313
  hypo

SEQ ID NO: 141788 - DNA, 134 bp, Homo sapiens; identical to SEQ ID NO: 63374
  chr2:65251106-65251240
  hypo

SEQ ID NO: 141789 - DNA, 17 bp, Homo sapiens
  chr2:65252630-65252647
  hypo
ggcggaggtctcaaaaa

SEQ ID NO: 141790 - DNA, 30 bp, Homo sapiens
  chr2:65253773-65253803
  hypo
tgtttaataagtgtacgcttttacttttca

SEQ ID NO: 141791 - DNA, 30 bp, Homo sapiens
  chr2:65254065-65254095
  hypo
gcgacagaggccaagcgtgggtgtttccct

SEQ ID NO: 141792 - DNA, 30 bp, Homo sapiens
  chr2:65254384-65254414
  hypo
aggacattgggatgacgtacgtgaacaggt

SEQ ID NO: 141793 - DNA, 31 bp, Homo sapiens; identical to SEQ ID NO: 63375
  chr2:65267111-65267142
  hypo

SEQ ID NO: 141794 - DNA, 36 bp, Homo sapiens
  chr2:65289379-65289415
  hypo
agtcctggccaggtgcggtgactcccgcctgtaagc

SEQ ID NO: 141795 - DNA, 30 bp, Homo sapiens; identical to SEQ ID NO: 63376
  chr2:65299179-65299209
  hypo

SEQ ID NO: 141796 - DNA, 17 bp, Homo sapiens
  chr2:65413492-65413509
  hypo
ggccaacaaacacttaa

SEQ ID NO: 141797 - DNA, 20 bp, Homo sapiens
  chr2:65414126-65414146
  hypo
gccaccgcgcccggccagaa

SEQ ID NO: 141798 - DNA, 39 bp, Homo sapiens
  chr2:65456601-65456640
  hypo
cattgaggccaggcgcggtggctcatgcctgtaatccca

SEQ ID NO: 141799 - DNA, 30 bp, Homo sapiens; identical to SEQ ID NO: 16208
  chr2:65541295-65541325
  hypo

SEQ ID NO: 141800 - DNA, 30 bp, Homo sapiens; identical to SEQ ID NO: 63379
  chr2:65655495-65655525
  hypo

SEQ ID NO: 141801 - DNA, 22 bp, Homo sapiens
  chr2:65727278-65727300
  hypo
gcaagaacgaaactttgcctca

SEQ ID NO: 141802 - DNA, 66 bp, Homo sapiens; identical to SEQ ID NO: 63381
  chr2:65740148-65740214
  hypo

SEQ ID NO: 141803 - DNA, 39 bp, Homo sapiens; identical to SEQ ID NO: 63382
  chr2:65829224-65829263
  hypo

SEQ ID NO: 141804 - DNA, 38 bp, Homo sapiens; identical to SEQ ID NO: 16209
  chr2:65829502-65829540
  hypo

SEQ ID NO: 141805 - DNA, 132 bp, Homo sapiens
  chr2:65867723-65867855
  hypo
tcttggggaacaggtcgttgaagtgggtacaggacggggcagtcactttaatcgctggtccgagctccccagcctcccttttgcaaaaagcaaaaatacgttatcgtcactagggggcggaagtaggccagc

SEQ ID NO: 141806 - DNA, 81 bp, Homo sapiens
  chr2:65868439-65868520
  hypo
tccatctaaaaaaaaaaaaaaaaaaagaatgtttgaaaccaaactggtttgtcaaatgcataacagcgcccttgatttcac

SEQ ID NO: 141807 - DNA, 93 bp, Homo sapiens; identical to SEQ ID NO: 16210
  chr2:66604302-66604395
  hypo

SEQ ID NO: 141808 - DNA, 1945 bp, Homo sapiens; identical to SEQ ID NO: 106089
  chr2:66659956-66661901
  hypo

SEQ ID NO: 141809 - DNA, 31 bp, Homo sapiens; identical to SEQ ID NO: 16212
  chr2:66666250-66666281
  hypo

SEQ ID NO: 141810 - DNA, 30 bp, Homo sapiens
  chr2:66794700-66794730
  hypo
attcaccgggaggtccgctacctggtaaat

SEQ ID NO: 141811 - DNA, 22 bp, Homo sapiens
  chr2:67423077-67423099
  hypo
cggccatcttggctcctccccc

SEQ ID NO: 141812 - DNA, 30 bp, Homo sapiens; identical to SEQ ID NO: 37592
  chr2:67593787-67593817
  hypo

SEQ ID NO: 141813 - DNA, 40 bp, Homo sapiens
  chr2:67625452-67625492
  hypo
ttttttttataccttacgtgtcttttttcttttgggaaag

SEQ ID NO: 141814 - DNA, 39 bp, Homo sapiens
  chr2:67625731-67625770
  hypo
tgctgggattacagccaccgcgcccggccaccttacatg

SEQ ID NO: 141815 - DNA, 147 bp, Homo sapiens
  chr2:67626110-67626257
  hypo
aagtttgcgaagtgccgcgtggatttttatgtgaaacaagcatttctgttacggttcaggtaattatctctgggaaaaaaaattatcttggactataaaagttagtctcagctatttgaccttggggtcttacgaagtaaggtaatg

SEQ ID NO: 141816 - DNA, 30 bp, Homo sapiens; identical to SEQ ID NO: 37595
  chr2:67639753-67639783
  hypo

SEQ ID NO: 141817 - DNA, 35 bp, Homo sapiens
  chr2:67721498-67721533
  hypo
aaacatgtgggaccagccaggcgcggtggctcacg

SEQ ID NO: 141818 - DNA, 31 bp, Homo sapiens; identical to SEQ ID NO: 63393
  chr2:67747554-67747585
  hypo

SEQ ID NO: 141819 - DNA, 30 bp, Homo sapiens
  chr2:68183529-68183559
  hypo
tcctgctggaggggacgcctgttctctata

SEQ ID NO: 141820 - DNA, 18 bp, Homo sapiens
  chr2:68246255-68246273
  hypo
acttttttttttttttta

SEQ ID NO: 141821 - DNA, 30 bp, Homo sapiens; identical to SEQ ID NO: 16215
  chr2:68251584-68251614
  hypo

SEQ ID NO: 141822 - DNA, 39 bp, Homo sapiens; identical to SEQ ID NO: 16216
  chr2:68287483-68287522
  hypo

SEQ ID NO: 141823 - DNA, 38 bp, Homo sapiens; identical to SEQ ID NO: 16217
  chr2:68287761-68287799
  hypo

SEQ ID NO: 141824 - DNA, 30 bp, Homo sapiens
  chr2:68341457-68341487
  hypo
agactctccaccgcccgtttttcgggttgc

SEQ ID NO: 141825 - DNA, 30 bp, Homo sapiens
  chr2:68350092-68350122
  hypo
tgaggtaagctgcgccgttcatgttctact

SEQ ID NO: 141826 - DNA, 80 bp, Homo sapiens; identical to SEQ ID NO: 16218
  chr2:68433261-68433341
  hypo

SEQ ID NO: 141827 - DNA, 192 bp, Homo sapiens
  chr2:68486674-68486866
  hypo
ggcattagtaacctgcgtttgcatgtcctttacttctgttgtttccacgagaagaaaatactctgaacattgcgctattgtttttgagcaagcctgttctctcttttgcctgactctggacactgcataattgtttaatggcgtaaatggaatagcttaattctaaaagatccttggcgaaacagtactgga

SEQ ID NO: 141828 - DNA, 30 bp, Homo sapiens; identical to SEQ ID NO: 16219
  chr2:68544313-68544343
  hypo

SEQ ID NO: 141829 - DNA, 198 bp, Homo sapiens; identical to SEQ ID NO: 37598
  chr2:68546318-68546516
  hypo

SEQ ID NO: 141830 - DNA, 812 bp, Homo sapiens; identical to SEQ ID NO: 37599
  chr2:68546552-68547364
  hypo

SEQ ID NO: 141831 - DNA, 24 bp, Homo sapiens
  chr2:68660239-68660263
  hypo
gcagcagggggctggcgtgtcagt

SEQ ID NO: 141832 - DNA, 521 bp, Homo sapiens
  chr2:68672362-68672883
  hypo
gattctaagtccccagcgaaaacccacaccaaaatcatcaccagcgtgcacatctgttcccttgttgagatttaatcactgaagagcaggtggaagccgtcctgaacgaattaccccatgtacctagaagcctcttcccaaatcaagcagtgatcacctcactcataaacagagcacgcacccaaaggttttgcttgatgtattttgagactagtttcacgtgttgctgctaaacgtttccagggagttgcaaaagttaatccttatggatcggtgattgaaatacagtgacatccctgctgctctgcagtgtgcgcaaaggtcaaatcaaaataacaaacacgcacgacgtcttcgatcaccttcctgtaaaaccgggtttctagccggacccatgtcctcacagttcctgaatcaagttcaccgtctgtgcaagcgccacctgacagagctccctgcgacactgaaacgcgtttgggcacttcccacgtgggaaccactcgccacgggcacctcctgag

SEQ ID NO: 141833 - DNA, 30 bp, Homo sapiens; identical to SEQ ID NO: 63403
  chr2:68873190-68873220
  hypo

SEQ ID NO: 141834 - DNA, 30 bp, Homo sapiens
  chr2:69002074-69002104
  hypo
tgacggggcccgccgcggtgccggactgcc

SEQ ID NO: 141835 - DNA, 38 bp, Homo sapiens
  chr2:69116718-69116756
  hypo
agagcctgtggcggccgctgcctcgtgcgacaagtggc

SEQ ID NO: 141836 - DNA, 30 bp, Homo sapiens; identical to SEQ ID NO: 1574
  chr2:69220161-69220191
  hypo

SEQ ID NO: 141837 - DNA, 1228 bp, Homo sapiens; identical to SEQ ID NO: 106108
  chr2:69240027-69241255
  hypo

SEQ ID NO: 141838 - DNA, 31 bp, Homo sapiens; identical to SEQ ID NO: 16225
  chr2:69520725-69520756
  hypo

SEQ ID NO: 141839 - DNA, 102 bp, Homo sapiens
  chr2:69612623-69612725
  hypo
tgagattataggcgggagccaccacgcccagcgctgatttatttatttatttatttttttttcagtaagtactttgactacgtttttttcttggaacatgat

SEQ ID NO: 141840 - DNA, 31 bp, Homo sapiens; identical to SEQ ID NO: 1577
  chr2:69614637-69614668
  hypo

SEQ ID NO: 141841 - DNA, 30 bp, Homo sapiens
  chr2:69615091-69615121
  hypo
gctttaacagccgcgcgtttgacttacgaa

SEQ ID NO: 141842 - DNA, 17 bp, Homo sapiens
  chr2:69720206-69720223
  hypo
cgtgaacccgggaggcg

SEQ ID NO: 141843 - DNA, 17 bp, Homo sapiens
  chr2:69720282-69720299
  hypo
tccgtctcaaaaaaaaa

SEQ ID NO: 141844 - DNA, 30 bp, Homo sapiens
  chr2:69745828-69745858
  hypo
gcgagccactgcacccggccaaaaaaatag

SEQ ID NO: 141845 - DNA, 46 bp, Homo sapiens; identical to SEQ ID NO: 63408
  chr2:69778022-69778068
  hypo

SEQ ID NO: 141846 - DNA, 34 bp, Homo sapiens
  chr2:69813142-69813176
  hypo
gtgctccctgccctccgcacgtcactgccccaag

SEQ ID NO: 141847 - DNA, 30 bp, Homo sapiens
  chr2:69864867-69864897
  hypo
gcaagttaaaatgacggctctgatgcagta

SEQ ID NO: 141848 - DNA, 143 bp, Homo sapiens; identical to SEQ ID NO: 63409
  chr2:69928486-69928629
  hypo

SEQ ID NO: 141849 - DNA, 375 bp, Homo sapiens; identical to SEQ ID NO: 106118
  chr2:69968428-69968803
  hypo

SEQ ID NO: 141850 - DNA, 19 bp, Homo sapiens
  chr2:69975511-69975530
  hypo
ctcaaaaaaagaaaaaaaa

SEQ ID NO: 141851 - DNA, 25 bp, Homo sapiens
  chr2:69997830-69997855
  hypo
accaggctcattaaacctgtacgca

SEQ ID NO: 141852 - DNA, 121 bp, Homo sapiens; identical to SEQ ID NO: 63412
  chr2:69997974-69998095
  hypo

SEQ ID NO: 141853 - DNA, 30 bp, Homo sapiens
  chr2:70005336-70005366
  hypo
ttttcatcatctcgccgaaatcagaaatta

SEQ ID NO: 141854 - DNA, 46 bp, Homo sapiens; identical to SEQ ID NO: 63413
  chr2:70005611-70005657
  hypo

SEQ ID NO: 141855 - DNA, 31 bp, Homo sapiens; identical to SEQ ID NO: 16228
  chr2:70020009-70020040
  hypo

SEQ ID NO: 141856 - DNA, 170 bp, Homo sapiens
  chr2:70055298-70055468
  hypo
atgggaaacacctgcacgttctttgtgctggcaaattctgtgtatgcaagctgatccctctgcagccattattctccgcctcccacctccaccccaagctgcctcggctagcctctctcggttcagatttctcatgcatgaatcagacattagtccacggggaccctcaa

SEQ ID NO: 141857 - DNA, 222 bp, Homo sapiens
  chr2:70165949-70166171
  hypo
acacgcccttcacaccgcgcatgctcattcccccgacgcgccgcgtgtggatgggagcagtatttctcactttaaaatggacaccttgatagtgtgtctctggggttgcacagctcatcaaagttccaaattgtttgttctcacaaacaaaacggtacaatctatttttgtgcgatgttcttgggacctcgctgtgttctgctatctcgaggcacattctcc

SEQ ID NO: 141858 - DNA, 30 bp, Homo sapiens; identical to SEQ ID NO: 16230
  chr2:70186711-70186741
  hypo

SEQ ID NO: 141859 - DNA, 30 bp, Homo sapiens; identical to SEQ ID NO: 16231
  chr2:70188590-70188620
  hypo

SEQ ID NO: 141860 - DNA, 30 bp, Homo sapiens; identical to SEQ ID NO: 16232
  chr2:70203494-70203524
  hypo

SEQ ID NO: 141861 - DNA, 87 bp, Homo sapiens; identical to SEQ ID NO: 63419
  chr2:70203998-70204085
  hypo

SEQ ID NO: 141862 - DNA, 261 bp, Homo sapiens
  chr2:70224804-70225065
  hypo
atggccacctccagcccgatggcactgaaccacagatgagcaacagaatgacctggggaggcatttaaaatctagatcctgactcagttgatctggccgggtcaagcatgtgtatttttgcaaaagtgccccaggtgattctgacacatactcctagttaagaaccacggttacggccgcctcttcctcatcgttattaataacaagagaaacaacaattgacattttttgtgcacttacgtgcactgcctcatgtaatct

SEQ ID NO: 141863 - DNA, 27 bp, Homo sapiens
  chr2:70234358-70234385
  hypo
tctacttaagccgggcgcaggttgctc

SEQ ID NO: 141864 - DNA, 27 bp, Homo sapiens
  chr2:70234624-70234651
  hypo
gggcaacaagaacgaaaccctgcctca

SEQ ID NO: 141865 - DNA, 61 bp, Homo sapiens; identical to SEQ ID NO: 63423
  chr2:70329616-70329677
  hypo

SEQ ID NO: 141866 - DNA, 21 bp, Homo sapiens
  chr2:70336325-70336346
  hypo
gggtgcggtggttcacgcgtg

SEQ ID NO: 141867 - DNA, 640 bp, Homo sapiens; identical to SEQ ID NO: 106127
  chr2:70351164-70351804
  hypo

SEQ ID NO: 141868 - DNA, 85 bp, Homo sapiens; identical to SEQ ID NO: 63425
  chr2:70367821-70367906
  hypo

SEQ ID NO: 141869 - DNA, 296 bp, Homo sapiens; identical to SEQ ID NO: 1580
  chr2:70369035-70369331
  hypo

SEQ ID NO: 141870 - DNA, 30 bp, Homo sapiens
  chr2:70369841-70369871
  hypo
gtcaccaccctccggcgctctcattcccgc

SEQ ID NO: 141871 - DNA, 225 bp, Homo sapiens
  chr2:70393987-70394212
  hypo
tgattcccttttgctcgctatccccaggttcttgctatttgcattcatgtctaagcaaactaatgacatgctctctcacccgatggtcagcaccatgaatgctgagggactacaagttaggacactgcttacccagcaagcatctgtctttctctctgaatatgacctcaaggcaggtaaaatacttgaaagtacttaaccaacctcttaaagaaccttgcggcc

SEQ ID NO: 141872 - DNA, 207 bp, Homo sapiens; identical to SEQ ID NO: 106133
  chr2:70418109-70418316
  hypo

SEQ ID NO: 141873 - DNA, 85 bp, Homo sapiens
  chr2:70418576-70418661
  hypo
tccttacaaaaaatgaaaattaaaaaaaaaatcgcccgagattttctacattattagcagatgtcagctgcgaatttggagtttg

SEQ ID NO: 141874 - DNA, 102 bp, Homo sapiens; identical to SEQ ID NO: 63429
  chr2:70427483-70427585
  hypo

SEQ ID NO: 141875 - DNA, 95 bp, Homo sapiens
  chr2:70430853-70430948
  hypo
gttctgccacaaccccgatgggttacctccgcttgtcaataccacttgccaggagggcatacggagataactgagactattaagaagctagagga

SEQ ID NO: 141876 - DNA, 41 bp, Homo sapiens
  chr2:70521964-70522005
  hypo
aggcgtgagcccccgctcccggctgggcctctatatttttt

SEQ ID NO: 141877 - DNA, 40 bp, Homo sapiens; identical to SEQ ID NO: 63430
  chr2:70557158-70557198
  hypo

SEQ ID NO: 141878 - DNA, 22 bp, Homo sapiens
  chr2:71333964-71333986
  hypo
cggcctattgtttttaatgttc

SEQ ID NO: 141879 - DNA, 16 bp, Homo sapiens
  chr2:71355045-71355061
  hypo
gcgcctggccgaacat

SEQ ID NO: 141880 - DNA, 213 bp, Homo sapiens; identical to SEQ ID NO: 63433
  chr2:71355398-71355611
  hypo

SEQ ID NO: 141881 - DNA, 30 bp, Homo sapiens
  chr2:71442756-71442786
  hypo
ctattagccgtggaacgatagaaattagag

SEQ ID NO: 141882 - DNA, 69 bp, Homo sapiens; identical to SEQ ID NO: 106143
  chr2:71502820-71502889
  hypo

SEQ ID NO: 141883 - DNA, 30 bp, Homo sapiens; identical to SEQ ID NO: 106144
  chr2:71502910-71502940
  hypo

SEQ ID NO: 141884 - DNA, 931 bp, Homo sapiens; identical to SEQ ID NO: 37625
  chr2:71503407-71504338
  hypo

SEQ ID NO: 141885 - DNA, 24 bp, Homo sapiens
  chr2:71507014-71507038
  hypo
aatgaaagaaaagaggatggccgt

SEQ ID NO: 141886 - DNA, 88 bp, Homo sapiens
  chr2:71564760-71564848
  hypo
cctgagctcaagcattccacctgtctcggcctcccaaagtagtaagattacgtgcatgagccaatgcgcagcctataaaattattcag

SEQ ID NO: 141887 - DNA, 30 bp, Homo sapiens
  chr2:71576607-71576637
  hypo
gggatataagaatgcgaaaaatggggcgcc

SEQ ID NO: 141888 - DNA, 31 bp, Homo sapiens; identical to SEQ ID NO: 16241
  chr2:71615794-71615825
  hypo

SEQ ID NO: 141889 - DNA, 30 bp, Homo sapiens
  chr2:71674546-71674576
  hypo
aaagaaaccaagccgcgaaggtaagatcac

SEQ ID NO: 141890 - DNA, 294 bp, Homo sapiens; identical to SEQ ID NO: 63437
  chr2:71753209-71753503
  hypo

SEQ ID NO: 141891 - DNA, 175 bp, Homo sapiens; identical to SEQ ID NO: 63438
  chr2:71763614-71763789
  hypo

SEQ ID NO: 141892 - DNA, 33 bp, Homo sapiens; identical to SEQ ID NO: 63439
  chr2:71792490-71792523
  hypo

SEQ ID NO: 141893 - DNA, 50 bp, Homo sapiens; identical to SEQ ID NO: 63440
  chr2:71839445-71839495
  hypo

SEQ ID NO: 141894 - DNA, 439 bp, Homo sapiens
  chr2:71899490-71899929
  hypo
tccctgggcctgccacggagccagccctctgccgtggggttcagggcctctggcaggcaggccctccagggaccccattaaccagacgagactgtcgtaaagtacaaggtctcctttcatccggcggctttgaaccaccactggttgccccggccaggctccccacctggagcccagcacaccctgcacgtcaggcacccaccctgcaaataaacagctagtaaaagcgcccaggccaggagcataatgagcgcctgggacctgggggggttcattccccaggctggagccccagcccagctgctcccaccaggggccgtttgaacctctggctcattaccgagcccataaaccaagctggccagaggaatggaggctgctggcgggccatgcaggcgggcctgcggagctggccataaaagctcgccagaggagggag

SEQ ID NO: 141895 - DNA, 30 bp, Homo sapiens
  chr2:72020497-72020527
  hypo
ctgtacatgtatgcacgtgagtcagtgtgg

SEQ ID NO: 141896 - DNA, 30 bp, Homo sapiens
  chr2:72309509-72309539
  hypo
catcgggcagcctcccgtcagcacttctgt

SEQ ID NO: 141897 - DNA, 154 bp, Homo sapiens
  chr2:72310169-72310323
  hypo
gaccactctcagaagcgcgggctgaggcttgcacacagtcagattcccgcgcagcacgtgcacaggtgtgcccaggggcgagcggtgtttgaagtgcttgggacaggatggtcggaggaaggcgtgcgctgagcttgaacggttggcaggatat

SEQ ID NO: 141898 - DNA, 34 bp, Homo sapiens; identical to SEQ ID NO: 63442
  chr2:72316765-72316799
  hypo

SEQ ID NO: 141899 - DNA, 30 bp, Homo sapiens; identical to SEQ ID NO: 63443
  chr2:72317232-72317262
  hypo

SEQ ID NO: 141900 - DNA, 54 bp, Homo sapiens
  chr2:72358939-72358993
  hypo
agacgctgaagagtgcgcccaagggggcacggctcttcccgtcccccaacccca

SEQ ID NO: 141901 - DNA, 375 bp, Homo sapiens
  chr2:72359325-72359700
  hypo
tgggctgggctgaggcgggtgggtcttgggttagactgtggcgctcagcatggcctccgtctccggcaggatctcgttctggttggagtccaggccaaagaacttgacgctgaggccatccacggggtgcaggacggggaccaaggtgatgcgggggaaggtccgtgtggccagctcaaagcggctggtgctagccagctccaccgccagcaccttcaggaacagcttggccaggtgcttgcccaggcaggtccggacaccgccaccgaacgggaggtaatggaagcggccatccttgtcctcgctccgcgcctggctgaagcgatcggggtcgaacacgttcacgtctttgaacacgggcgctgtgtcatgggt

SEQ ID NO: 141902 - DNA, 156 bp, Homo sapiens
  chr2:72359981-72360137
  hypo
cctgatgcatttggggcgcacttctcccatcggactgaaagctccctgaaagcaagcactgtttccccatcaggcctgaagtccctgaaatggaggctggtgccccgccttgcccctatcccggtgcccctgctcccccatcgcccccggtgccac

SEQ ID NO: 141903 - DNA, 241 bp, Homo sapiens
  chr2:72366137-72366378
  hypo
tctgtgaaccccatggccctgcgtgctgcgcttgctcagccagatagcctcccccttctctgctggcaggtgtggacagatggacatatggatgggcagtaggagcgggtagagccggagtggggacccactgcccaggccagtgactcagactgggaggaatggaagcggctgcccaggaggggtgggggcctgggcaggccacccggccaagccaccggagcctcggcctgcagagtgg

SEQ ID NO: 141904 - DNA, 31 bp, Homo sapiens; identical to SEQ ID NO: 63446
  chr2:72369008-72369039
  hypo

SEQ ID NO: 141905 - DNA, 292 bp, Homo sapiens; identical to SEQ ID NO: 106153
  chr2:72374233-72374525
  hypo

SEQ ID NO: 141906 - DNA, 126 bp, Homo sapiens; identical to SEQ ID NO: 37634
  chr2:72374563-72374689
  hypo

SEQ ID NO: 141907 - DNA, 487 bp, Homo sapiens; identical to SEQ ID NO: 106155
  chr2:72374713-72375200
  hypo

SEQ ID NO: 141908 - DNA, 801 bp, Homo sapiens; identical to SEQ ID NO: 106156
  chr2:72375565-72376366
  hypo

SEQ ID NO: 141909 - DNA, 181 bp, Homo sapiens; identical to SEQ ID NO: 63451
  chr2:72430073-72430254
  hypo

SEQ ID NO: 141910 - DNA, 32 bp, Homo sapiens; identical to SEQ ID NO: 63452
  chr2:72459901-72459933
  hypo

SEQ ID NO: 141911 - DNA, 22 bp, Homo sapiens
  chr2:72778912-72778934
  hypo
ccgcgcccggccattaaaatct

SEQ ID NO: 141912 - DNA, 160 bp, Homo sapiens; identical to SEQ ID NO: 63454
  chr2:73042121-73042281
  hypo

SEQ ID NO: 141913 - DNA, 31 bp, Homo sapiens
  chr2:73043272-73043303
  hypo
gcaagactccgtctcaaaaacaaaacaaata

SEQ ID NO: 141914 - DNA, 710 bp, Homo sapiens; identical to SEQ ID NO: 1596
  chr2:73052643-73053353
  hypo

SEQ ID NO: 141915 - DNA, 373 bp, Homo sapiens; identical to SEQ ID NO: 106162
  chr2:73114129-73114502
  hypo

SEQ ID NO: 141916 - DNA, 30 bp, Homo sapiens; identical to SEQ ID NO: 63457
  chr2:73121760-73121790
  hypo

SEQ ID NO: 141917 - DNA, 3302 bp, Homo sapiens; identical to SEQ ID NO: 106166
  chr2:73142997-73146299
  hypo

SEQ ID NO: 141918 - DNA, 30 bp, Homo sapiens
  chr2:73158532-73158562
  hypo
cctgacagtcaccttcggccagcccacttg

SEQ ID NO: 141919 - DNA, 30 bp, Homo sapiens
  chr2:73169420-73169450
  hypo
gtgaaaggggtccgtcggccagctcgactc

SEQ ID NO: 141920 - DNA, 30 bp, Homo sapiens
  chr2:73172113-73172143
  hypo
gctgcacagtgctccgtccccaggccgctg

SEQ ID NO: 141921 - DNA, 30 bp, Homo sapiens; identical to SEQ ID NO: 63459
  chr2:73190263-73190293
  hypo

SEQ ID NO: 141922 - DNA, 30 bp, Homo sapiens; identical to SEQ ID NO: 63460
  chr2:73216752-73216782
  hypo

SEQ ID NO: 141923 - DNA, 267 bp, Homo sapiens
  chr2:73217259-73217526
  hypo
ctggtccgccagccccggggcagcgcagcattccgtggagccagagtacttcctggcatgcccaccctgggctctcgggaacacagcctccatcttaagtctcaggctgatcctcagagtccaatccttgtcctcccagctcgctcgagggaaggctgggaggcagccaggggcatcacggcgtggacacacttcagtggtacagtgggcagggctggggagctgccggctcatactgggccctgctgcccccgccacatgaataga

SEQ ID NO: 141924 - DNA, 283 bp, Homo sapiens
  chr2:73302642-73302925
  hypo
ggaaggctatttgggggggcccggggggatctgcagcagcgtgggtgaggtctccatgatccgcaccagcagccggtcgatgtagctctccagctcctgcacatgctcgtcccgctggctcagctcccgctcccgctgcaggagcaggctgatgagctcatcgtgggtcaggtggtagtacttggccgactggtccagcacagctgagtcctgaggccggaccgaagacagtgagcagggcagccctaggcctgcctgcctgcctgcccgcttgcccgcccgc

SEQ ID NO: 141925 - DNA, 294 bp, Homo sapiens
  chr2:73308597-73308891
  hypo
tggcttcaggggcggcggtggtggcggcagcggcagcagtggcagcagcgggggaggcggctgcaaaaaggttagtgcttagcatgggagcagcagtgggagcaggagtgggaggggccggagcccagggggagcaggggaggtggtgaggaagagcagctgggtcagattctacctgaggagacacgtccaggctgtggagggagacaaaaccgtgagcctcctggttaatgccaagactggaaaggcccctgagtcccacgccccaccccctgcttcgggaccaggggccat

SEQ ID NO: 141926 - DNA, 31 bp, Homo sapiens; identical to SEQ ID NO: 63463
  chr2:73384739-73384770
  hypo

SEQ ID NO: 141927 - DNA, 309 bp, Homo sapiens; identical to SEQ ID NO: 63464
  chr2:73440137-73440446
  hypo

SEQ ID NO: 141928 - DNA, 30 bp, Homo sapiens; identical to SEQ ID NO: 16253
  chr2:73478534-73478564
  hypo

SEQ ID NO: 141929 - DNA, 138 bp, Homo sapiens
  chr2:73493621-73493759
  hypo
ccgcccccacctccacggcccaggctggcgctgggcgtgctgccacagctgctgctgatgacctgcagctgccgctcggcacggtcagcccgctcaaggagctcctcaatgaactgctgcagccgcagcttggcgctg

SEQ ID NO: 141930 - DNA, 947 bp, Homo sapiens; identical to SEQ ID NO: 106193
  chr2:73520104-73521051
  hypo

SEQ ID NO: 141931 - DNA, 30 bp, Homo sapiens
  chr2:73617095-73617125
  hypo
tgagccaccgcgcccggcctctaatcgtga

SEQ ID NO: 141932 - DNA, 17 bp, Homo sapiens
  chr2:73713209-73713226
  hypo
atcttggctcctgtccc

SEQ ID NO: 141933 - DNA, 30 bp, Homo sapiens
  chr2:73713431-73713461
  hypo
ctagactttcactgacgccgcaaggaaggg

SEQ ID NO: 141934 - DNA, 28 bp, Homo sapiens
  chr2:74004336-74004364
  hypo
ctcaagcgatacacccaccttgcctccc

SEQ ID NO: 141935 - DNA, 29 bp, Homo sapiens
  chr2:74010593-74010622
  hypo
tttggcccttaaaagcggcagcagggccg

SEQ ID NO: 141936 - DNA, 30 bp, Homo sapiens
  chr2:74045570-74045600
  hypo
gtggtgggcgcgcgcgcgccctgggtcccc

SEQ ID NO: 141937 - DNA, 30 bp, Homo sapiens; identical to SEQ ID NO: 63470
  chr2:74053684-74053714
  hypo

SEQ ID NO: 141938 - DNA, 30 bp, Homo sapiens; identical to SEQ ID NO: 63471
  chr2:74119709-74119739
  hypo

SEQ ID NO: 141939 - DNA, 190 bp, Homo sapiens; identical to SEQ ID NO: 63472
  chr2:74120175-74120365
  hypo

SEQ ID NO: 141940 - DNA, 30 bp, Homo sapiens
  chr2:74121171-74121201
  hypo
ttaaacgagagaatgcgtatatacagcact

SEQ ID NO: 141941 - DNA, 34 bp, Homo sapiens; identical to SEQ ID NO: 63473
  chr2:74126219-74126253
  hypo

SEQ ID NO: 141942 - DNA, 507 bp, Homo sapiens; identical to SEQ ID NO: 63474
  chr2:74152824-74153331
  hypo

SEQ ID NO: 141943 - DNA, 93 bp, Homo sapiens
  chr2:74155568-74155661
  hypo
aaataaaataagcaaggcctcactgagaaggtgacatctgagcaaaaaactgaagatgagggagcaaatcacgtggatacctgggagaagaat

SEQ ID NO: 141944 - DNA, 42 bp, Homo sapiens; identical to SEQ ID NO: 16258
  chr2:74193106-74193148
  hypo

SEQ ID NO: 141945 - DNA, 26 bp, Homo sapiens
  chr2:74207338-74207364
  hypo
aacgtagtagccgggcgcggtggctc

SEQ ID NO: 141946 - DNA, 253 bp, Homo sapiens; identical to SEQ ID NO: 106201
  chr2:74211284-74211537
  hypo

SEQ ID NO: 141947 - DNA, 246 bp, Homo sapiens; identical to SEQ ID NO: 63478
  chr2:74213647-74213893
  hypo

SEQ ID NO: 141948 - DNA, 30 bp, Homo sapiens; identical to SEQ ID NO: 63479
  chr2:74214648-74214678
  hypo

SEQ ID NO: 141949 - DNA, 23 bp, Homo sapiens
  chr2:74219449-74219472
  hypo
gttttgtttgagatggagtctcg

SEQ ID NO: 141950 - DNA, 23 bp, Homo sapiens
  chr2:74219711-74219734
  hypo
attacaggcgtgagccactgtgc

SEQ ID NO: 141951 - DNA, 30 bp, Homo sapiens; identical to SEQ ID NO: 63481
  chr2:74231282-74231312
  hypo

SEQ ID NO: 141952 - DNA, 30 bp, Homo sapiens; identical to SEQ ID NO: 63482
  chr2:74232658-74232688
  hypo

SEQ ID NO: 141953 - DNA, 30 bp, Homo sapiens
  chr2:74308453-74308483
  hypo
tgcaagctcagcctcgcgctgtgctgggca

SEQ ID NO: 141954 - DNA, 20 bp, Homo sapiens
  chr2:74315938-74315958
  hypo
ggctcatgcctgtggtcgca

SEQ ID NO: 141955 - DNA, 19 bp, Homo sapiens
  chr2:74316197-74316216
  hypo
attccgtctcaaaaaaaaa

SEQ ID NO: 141956 - DNA, 24 bp, Homo sapiens
  chr2:74323598-74323622
  hypo
gaaaagcaggtcaggccgggcgca

SEQ ID NO: 141957 - DNA, 260 bp, Homo sapiens; identical to SEQ ID NO: 63485
  chr2:74327558-74327818
  hypo

SEQ ID NO: 141958 - DNA, 30 bp, Homo sapiens; identical to SEQ ID NO: 16262
  chr2:74329317-74329347
  hypo

SEQ ID NO: 141959 - DNA, 30 bp, Homo sapiens; identical to SEQ ID NO: 63487
  chr2:74329794-74329824
  hypo

SEQ ID NO: 141960 - DNA, 46 bp, Homo sapiens; identical to SEQ ID NO: 63488
  chr2:74350340-74350386
  hypo

SEQ ID NO: 141961 - DNA, 121 bp, Homo sapiens; identical to SEQ ID NO: 63489
  chr2:74350565-74350686
  hypo

SEQ ID NO: 141962 - DNA, 422 bp, Homo sapiens; identical to SEQ ID NO: 106207
  chr2:74405755-74406177
  hypo

SEQ ID NO: 141963 - DNA, 1040 bp, Homo sapiens; identical to SEQ ID NO: 37682
  chr2:74425423-74426463
  hypo

SEQ ID NO: 141964 - DNA, 193 bp, Homo sapiens
  chr2:74454118-74454311
  hypo
tgaggatccagagcaccgccaggcagaggatctgcaccagggtgaagaggtggatccggcgcagcggcacgtgccgcaggaaggcatggtccggctggtgcttggctggcatcaggaagagcttgcagcgttcccagaactagggggacagcgggggctcagccaggcagccagaccccgagggcccgctggg

SEQ ID NO: 141965 - DNA, 30 bp, Homo sapiens
  chr2:74459677-74459707
  hypo
tgaccgtggcagccacgtaccaggggagcc

SEQ ID NO: 141966 - DNA, 31 bp, Homo sapiens; identical to SEQ ID NO: 63493
  chr2:74460531-74460562
  hypo

SEQ ID NO: 141967 - DNA, 29 bp, Homo sapiens
  chr2:74464374-74464403
  hypo
ttacaggcgtgagccactgtgcctggccc

SEQ ID NO: 141968 - DNA, 30 bp, Homo sapiens; identical to SEQ ID NO: 63494
  chr2:74653151-74653181
  hypo

SEQ ID NO: 141969 - DNA, 212 bp, Homo sapiens; identical to SEQ ID NO: 16266
  chr2:74663401-74663613
  hypo

SEQ ID NO: 141970 - DNA, 31 bp, Homo sapiens; identical to SEQ ID NO: 63496
  chr2:74669782-74669813
  hypo

SEQ ID NO: 141971 - DNA, 39 bp, Homo sapiens; identical to SEQ ID NO: 16267
  chr2:74672958-74672997
  hypo

SEQ ID NO: 141972 - DNA, 87 bp, Homo sapiens
  chr2:74679100-74679187
  hypo
cgagactccgtctcaaaaaaaaaaaaaaaaaaaatttcagaatctgccccacccgccaaccatgtcgggcattccatgttaacctga

SEQ ID NO: 141973 - DNA, 27 bp, Homo sapiens
  chr2:74700452-74700479
  hypo
ttttctttttttgagacgaagttttgc

SEQ ID NO: 141974 - DNA, 1535 bp, Homo sapiens; identical to SEQ ID NO: 106222
  chr2:74740309-74741844
  hypo

SEQ ID NO: 141975 - DNA, 278 bp, Homo sapiens; identical to SEQ ID NO: 1628
  chr2:74741872-74742150
  hypo

SEQ ID NO: 141976 - DNA, 323 bp, Homo sapiens; identical to SEQ ID NO: 1629
  chr2:74742324-74742647
  hypo

SEQ ID NO: 141977 - DNA, 30 bp, Homo sapiens
  chr2:74752716-74752746
  hypo
atgggcaaggcttggcgctgcttcagcagc

SEQ ID NO: 141978 - DNA, 107 bp, Homo sapiens; identical to SEQ ID NO: 16272
  chr2:74753266-74753373
  hypo

SEQ ID NO: 141979 - DNA, 30 bp, Homo sapiens; identical to SEQ ID NO: 63503
  chr2:74760170-74760200
  hypo

SEQ ID NO: 141980 - DNA, 232 bp, Homo sapiens; identical to SEQ ID NO: 16273
  chr2:74761646-74761878
  hypo

SEQ ID NO: 141981 - DNA, 40 bp, Homo sapiens
  chr2:74762273-74762313
  hypo
gattacaggcgtgagccactgcacccggcgaaactggctc

SEQ ID NO: 141982 - DNA, 37 bp, Homo sapiens; identical to SEQ ID NO: 1631
  chr2:74776039-74776076
  hypo

SEQ ID NO: 141983 - DNA, 402 bp, Homo sapiens; identical to SEQ ID NO: 106233
  chr2:74781685-74782087
  hypo

SEQ ID NO: 141984 - DNA, 252 bp, Homo sapiens; identical to SEQ ID NO: 106234
  chr2:74782218-74782470
  hypo

SEQ ID NO: 141985 - DNA, 19 bp, Homo sapiens
  chr2:74790431-74790450
  hypo
aaagagagagcagggccgg

SEQ ID NO: 141986 - DNA, 17 bp, Homo sapiens
  chr2:74848118-74848135
  hypo
gccagaaaggccgggcg

SEQ ID NO: 141987 - DNA, 23 bp, Homo sapiens
  chr2:74849644-74849667
  hypo
agccaccgcgcccggccattgcc

SEQ ID NO: 141988 - DNA, 31 bp, Homo sapiens; identical to SEQ ID NO: 16277
  chr2:74856914-74856945
  hypo

SEQ ID NO: 141989 - DNA, 42 bp, Homo sapiens; identical to SEQ ID NO: 63510
  chr2:74874697-74874739
  hypo

SEQ ID NO: 141990 - DNA, 30 bp, Homo sapiens; identical to SEQ ID NO: 16278
  chr2:75031627-75031657
  hypo

SEQ ID NO: 141991 - DNA, 1611 bp, Homo sapiens; identical to SEQ ID NO: 37700
  chr2:75060917-75062528
  hypo

SEQ ID NO: 141992 - DNA, 135 bp, Homo sapiens; identical to SEQ ID NO: 63513
  chr2:75078339-75078474
  hypo

SEQ ID NO: 141993 - DNA, 106 bp, Homo sapiens; identical to SEQ ID NO: 63514
  chr2:75105985-75106091
  hypo

SEQ ID NO: 141994 - DNA, 223 bp, Homo sapiens; identical to SEQ ID NO: 63515
  chr2:75145461-75145684
  hypo

SEQ ID NO: 141995 - DNA, 75 bp, Homo sapiens
  chr2:75785490-75785565
  hypo
gaactgagatttgaacgcaagaagcctgacgccaaagcctgaaaccatcactgtgagcatcgacggcactaagct

SEQ ID NO: 141996 - DNA, 31 bp, Homo sapiens; identical to SEQ ID NO: 63516
  chr2:75803805-75803836
  hypo

SEQ ID NO: 141997 - DNA, 152 bp, Homo sapiens; identical to SEQ ID NO: 63517
  chr2:75825235-75825387
  hypo

SEQ ID NO: 141998 - DNA, 30 bp, Homo sapiens
  chr2:76164730-76164760
  hypo
ttatttactgatttccgtttctatctccca

SEQ ID NO: 141999 - DNA, 139 bp, Homo sapiens
  chr2:76642425-76642564
  hypo
agggaagaaagcctccgatgagtatgcctacgacttcctaaaattactgccgtgctcacttcctaagggtaaggagggcacggcgcattgcacccgagaggcggaggttgcagtgagccgagaacgcgcactccagcct

SEQ ID NO: 142000 - DNA, 38 bp, Homo sapiens; identical to SEQ ID NO: 63518
  chr2:78904025-78904063
  hypo

SEQ ID NO: 142001 - DNA, 30 bp, Homo sapiens
  chr2:79239153-79239183
  hypo
ctcttgacactgggacgttgacaaggtttt

SEQ ID NO: 142002 - DNA, 27 bp, Homo sapiens
  chr2:79367855-79367882
  hypo
caccgcgcccagccagaacattttcaa

SEQ ID NO: 142003 - DNA, 18 bp, Homo sapiens
  chr2:79370555-79370573
  hypo
tatcacttgacatatgga

SEQ ID NO: 142004 - DNA, 17 bp, Homo sapiens
  chr2:79370812-79370829
  hypo
tccgcccgcctcggcct

SEQ ID NO: 142005 - DNA, 39 bp, Homo sapiens; identical to SEQ ID NO: 63520
  chr2:79824566-79824605
  hypo

SEQ ID NO: 142006 - DNA, 90 bp, Homo sapiens; identical to SEQ ID NO: 16280
  chr2:79933146-79933236
  hypo

SEQ ID NO: 142007 - DNA, 29 bp, Homo sapiens
  chr2:79933475-79933504
  hypo
gagactccgtctcaaaaaaaaaaaaaaaa

SEQ ID NO: 142008 - DNA, 30 bp, Homo sapiens
  chr2:80639914-80639944
  hypo
catggtcaataggttcgtcacccttttcct

SEQ ID NO: 142009 - DNA, 202 bp, Homo sapiens
  chr2:81421334-81421536
  hypo
acggagacgctgtggcgtctctctgggggtctctccccgcccgggtggacgtggcgctccctcctcggcccctggggctcagcgcagccatgcagccctcgcctgcaacctgcagtcatcccgcaccgcggcaacaacataaagtcgtcgttgacgtcgaccatgggcacgtagaaggagggcacgtcgttcacgcacaggg

SEQ ID NO: 142010 - DNA, 30 bp, Homo sapiens
  chr2:81421769-81421799
  hypo
gcagcatcgtgcaggcgctgaatggcactg

SEQ ID NO: 142011 - DNA, 500 bp, Homo sapiens
  chr2:81422009-81422509
  hypo
caggagataggagcccgtgtaggtgacgtattcggcgtaccactgggtcgcctgtggcgtgatgcagcacagaatcttgcgcttctcctcgatcttcttcctgatgtgcaggaattcgaagtaggggttggccctgtcgctgtggtaggggtagatggcgtccagcttgatggcgtccacgatggtggccagcgtctgctggatcacctcccgcgtctgctgcgtggacgtgttcagctgctgggtggagtgctggaagtggcgtttgcgcggatgctgggctgggcgtagtcctcctccgagccgcgggcctgaggcacactccttggagtgaggtgtgccctacttgctctcgttcacgagcatctgccggttcctggtgatgcagtgagggatctaccccactctgggggctttcggggcttcggccgtgggttttggttctgattctgtggcttctgggtcgatgccgcagggagggccttcggctggggcggcag

SEQ ID NO: 142012 - DNA, 30 bp, Homo sapiens; identical to SEQ ID NO: 63523
  chr2:81694431-81694461
  hypo

SEQ ID NO: 142013 - DNA, 30 bp, Homo sapiens; identical to SEQ ID NO: 63524
  chr2:84667198-84667228
  hypo

SEQ ID NO: 142014 - DNA, 29 bp, Homo sapiens
  chr2:84667467-84667496
  hypo
gcctgggcgacagagcaaaactctgtctc

SEQ ID NO: 142015 - DNA, 30 bp, Homo sapiens; identical to SEQ ID NO: 63526
  chr2:85048990-85049020
  hypo

SEQ ID NO: 142016 - DNA, 30 bp, Homo sapiens; identical to SEQ ID NO: 63527
  chr2:85051128-85051158
  hypo

SEQ ID NO: 142017 - DNA, 594 bp, Homo sapiens; identical to SEQ ID NO: 106255
  chr2:85107340-85107934
  hypo

SEQ ID NO: 142018 - DNA, 30 bp, Homo sapiens
  chr2:85121142-85121172
  hypo
cagtttgggaatcaccgtcctaggtcaatg

SEQ ID NO: 142019 - DNA, 22 bp, Homo sapiens
  chr2:85169922-85169944
  hypo
ttttttttttagatggagtctc

SEQ ID NO: 142020 - DNA, 31 bp, Homo sapiens; identical to SEQ ID NO: 1643
  chr2:85198256-85198287
  hypo

SEQ ID NO: 142021 - DNA, 38 bp, Homo sapiens; identical to SEQ ID NO: 16284
  chr2:85227243-85227281
  hypo

SEQ ID NO: 142022 - DNA, 38 bp, Homo sapiens; identical to SEQ ID NO: 63532
  chr2:85227520-85227558
  hypo

SEQ ID NO: 142023 - DNA, 17 bp, Homo sapiens
  chr2:85241813-85241830
  hypo
ggaaatactggcgcgcg

SEQ ID NO: 142024 - DNA, 22 bp, Homo sapiens
  chr2:85242186-85242208
  hypo
agaagtcttataccaaggaggc

SEQ ID NO: 142025 - DNA, 26 bp, Homo sapiens
  chr2:85246146-85246172
  hypo
accacgcccagccagaactttgattt

SEQ ID NO: 142026 - DNA, 30 bp, Homo sapiens
  chr2:85269951-85269981
  hypo
tcccaacctgtcacccgctccccgaactgt

SEQ ID NO: 142027 - DNA, 141 bp, Homo sapiens; identical to SEQ ID NO: 63533
  chr2:85280280-85280421
  hypo

SEQ ID NO: 142028 - DNA, 27 bp, Homo sapiens
  chr2:85283997-85284024
  hypo
tgtgcagtaaaaattaaaacacggctg

SEQ ID NO: 142029 - DNA, 30 bp, Homo sapiens
  chr2:85287861-85287891
  hypo
accgtgcccggccaagccaatggcaggttt

SEQ ID NO: 142030 - DNA, 55 bp, Homo sapiens; identical to SEQ ID NO: 16286
  chr2:85290473-85290528
  hypo

SEQ ID NO: 142031 - DNA, 31 bp, Homo sapiens; identical to SEQ ID NO: 16287
  chr2:85292073-85292104
  hypo

SEQ ID NO: 142032 - DNA, 30 bp, Homo sapiens; identical to SEQ ID NO: 16288
  chr2:85293322-85293352
  hypo

SEQ ID NO: 142033 - DNA, 121 bp, Homo sapiens; identical to SEQ ID NO: 63537
  chr2:85356673-85356794
  hypo

SEQ ID NO: 142034 - DNA, 1368 bp, Homo sapiens; identical to SEQ ID NO: 106263
  chr2:85359941-85361309
  hypo

SEQ ID NO: 142035 - DNA, 62 bp, Homo sapiens; identical to SEQ ID NO: 37722
  chr2:85361466-85361528
  hypo

SEQ ID NO: 142036 - DNA, 20 bp, Homo sapiens
  chr2:85361628-85361648
  hypo
gcccccgggcttggccatgg

SEQ ID NO: 142037 - DNA, 32 bp, Homo sapiens; identical to SEQ ID NO: 16291
  chr2:85498071-85498103
  hypo

SEQ ID NO: 142038 - DNA, 150 bp, Homo sapiens
  chr2:85515478-85515628
  hypo
atcacaaaccagaggcggagtggaaggaggacctagagacatcccagtttactccatgcggctctccaggctagacgtgtgagcagaacttgaaggtttttcggagggagtcacagaggtttggacaccggcttttttgttaaaatactt

SEQ ID NO: 142039 - DNA, 30 bp, Homo sapiens
  chr2:85516047-85516077
  hypo
cacgaagacaggaatcgcatctgagcgcct

SEQ ID NO: 142040 - DNA, 95 bp, Homo sapiens
  chr2:85521475-85521570
  hypo
aaagctctctggatgatttcaactctgggtgaatcacactttgcagagtttgattcagtgggtcgcggtaggtcgagcctgagaatttgcattct

SEQ ID NO: 142041 - DNA, 17 bp, Homo sapiens
  chr2:85534082-85534099
  hypo
ggccagcgactgcattt

SEQ ID NO: 142042 - DNA, 24 bp, Homo sapiens
  chr2:85541360-85541384
  hypo
gacggagcaagactccatctaaaa

SEQ ID NO: 142043 - DNA, 30 bp, Homo sapiens
  chr2:85594700-85594730
  hypo
catttaaggctggtccgagtagaatgattt

SEQ ID NO: 142044 - DNA, 156 bp, Homo sapiens; identical to SEQ ID NO: 63544
  chr2:85596562-85596718
  hypo

SEQ ID NO: 142045 - DNA, 30 bp, Homo sapiens; identical to SEQ ID NO: 63545
  chr2:85604351-85604381
  hypo

SEQ ID NO: 142046 - DNA, 30 bp, Homo sapiens; identical to SEQ ID NO: 16292
  chr2:85660775-85660805
  hypo

SEQ ID NO: 142047 - DNA, 36 bp, Homo sapiens; identical to SEQ ID NO: 63547
  chr2:85686731-85686767
  hypo

SEQ ID NO: 142048 - DNA, 21 bp, Homo sapiens
  chr2:85702012-85702033
  hypo
tgtgcccggccgatttaacct

SEQ ID NO: 142049 - DNA, 35 bp, Homo sapiens; identical to SEQ ID NO: 63548
  chr2:85729114-85729149
  hypo

SEQ ID NO: 142050 - DNA, 293 bp, Homo sapiens; identical to SEQ ID NO: 63549
  chr2:85730474-85730767
  hypo

SEQ ID NO: 142051 - DNA, 30 bp, Homo sapiens
  chr2:85769582-85769612
  hypo
tacatgtgaatcatcggaggatatttgctg

SEQ ID NO: 142052 - DNA, 143 bp, Homo sapiens
  chr2:85776337-85776480
  hypo
ctagctgtatgtcttcgggcaaattattttacctctcagcctaatgtaataatgcaggtaacactgctcacgcggtgtgttgcacatagcaaacacttgggaacagttagctattcatcgtggtacattaaattgcttttccc

SEQ ID NO: 142053 - DNA, 45 bp, Homo sapiens; identical to SEQ ID NO: 63551
  chr2:85789678-85789723
  hypo

SEQ ID NO: 142054 - DNA, 95 bp, Homo sapiens; identical to SEQ ID NO: 63552
  chr2:85819557-85819652
  hypo

SEQ ID NO: 142055 - DNA, 30 bp, Homo sapiens; identical to SEQ ID NO: 63553
  chr2:85824642-85824672
  hypo

SEQ ID NO: 142056 - DNA, 236 bp, Homo sapiens; identical to SEQ ID NO: 37728
  chr2:85829250-85829486
  hypo

SEQ ID NO: 142057 - DNA, 43 bp, Homo sapiens
  chr2:85833322-85833365
  hypo
catcgtatctagtcaaatgagcggattctaaagcagcctgctg

SEQ ID NO: 142058 - DNA, 212 bp, Homo sapiens; identical to SEQ ID NO: 63555
  chr2:85836003-85836215
  hypo

SEQ ID NO: 142059 - DNA, 89 bp, Homo sapiens
  chr2:85836531-85836620
  hypo
gctgcagctgtttccaccaggcgtacctgatagacgataactgatgtgacctctccactgtctgcctcgtattctaagcagaagagctg

SEQ ID NO: 142060 - DNA, 17 bp, Homo sapiens
  chr2:85838282-85838299
  hypo
atcgcaccattgcactc

SEQ ID NO: 142061 - DNA, 30 bp, Homo sapiens; identical to SEQ ID NO: 63556
  chr2:85846339-85846369
  hypo

SEQ ID NO: 142062 - DNA, 91 bp, Homo sapiens; identical to SEQ ID NO: 16297
  chr2:85870243-85870334
  hypo

SEQ ID NO: 142063 - DNA, 228 bp, Homo sapiens; identical to SEQ ID NO: 63558
  chr2:85871980-85872208
  hypo

SEQ ID NO: 142064 - DNA, 158 bp, Homo sapiens; identical to SEQ ID NO: 16299
  chr2:85878687-85878845
  hypo

SEQ ID NO: 142065 - DNA, 45 bp, Homo sapiens; identical to SEQ ID NO: 63560
  chr2:85885943-85885988
  hypo

SEQ ID NO: 142066 - DNA, 495 bp, Homo sapiens
  chr2:85890509-85891004
  hypo
ttgcctgtggtatggcctgctcgctgctgttcccggcctgggtggtcacggacatgcagaggtggcactcagagtctcgcggcagccattctcctgtcggcgaccctggagatgtgagcattagggggaaagcaggcaaggccaccctacagaggtgtttggtttctgtcctccttggtgcattgcagtgggaccacagagggagagggtcatgcagtggcagggtagggggaggaggagagcaggcattgggctaaggagtgggcagtgggctcacttgggccagcgctgtcatccatggagcaccggaggacgaggcggcagaccagctggggcagcatgcggcccagcagcgtgtcgagcaggatgacggagtagcgctcagccaggcactggcagatgccgcccgccaccagaggtaccacgcggcacacctgggccactgccacagctagcgcaccctggggcgggggcggagagaggccagcatgggac

SEQ ID NO: 142067 - DNA, 30 bp, Homo sapiens; identical to SEQ ID NO: 63562
  chr2:85941563-85941593
  hypo

SEQ ID NO: 142068 - DNA, 841 bp, Homo sapiens; identical to SEQ ID NO: 106285
  chr2:85980859-85981700
  hypo

SEQ ID NO: 142069 - DNA, 30 bp, Homo sapiens; identical to SEQ ID NO: 16302
  chr2:85998053-85998083
  hypo

SEQ ID NO: 142070 - DNA, 31 bp, Homo sapiens; identical to SEQ ID NO: 63565
  chr2:86258592-86258623
  hypo

SEQ ID NO: 142071 - DNA, 30 bp, Homo sapiens; identical to SEQ ID NO: 63566
  chr2:86282124-86282154
  hypo

SEQ ID NO: 142072 - DNA, 33 bp, Homo sapiens; identical to SEQ ID NO: 16303
  chr2:86344874-86344907
  hypo

SEQ ID NO: 142073 - DNA, 93 bp, Homo sapiens
  chr2:86345206-86345299
  hypo
ttcttaagcatgggtatctttcttagatttttatgctcattttctctttttattgtgtatactcttctgtttcagtgacgcttataatccatt

SEQ ID NO: 142074 - DNA, 44 bp, Homo sapiens; identical to SEQ ID NO: 63569
  chr2:86346747-86346791
  hypo

SEQ ID NO: 142075 - DNA, 30 bp, Homo sapiens; identical to SEQ ID NO: 16305
  chr2:86362920-86362950
  hypo

SEQ ID NO: 142076 - DNA, 30 bp, Homo sapiens; identical to SEQ ID NO: 16306
  chr2:86374888-86374918
  hypo

SEQ ID NO: 142077 - DNA, 40 bp, Homo sapiens; identical to SEQ ID NO: 63572
  chr2:86423729-86423769
  hypo

SEQ ID NO: 142078 - DNA, 241 bp, Homo sapiens
  chr2:86425627-86425868
  hypo
agtgagctgtgatcgcaccactgcactcaagccttcgcaacagaccaagacctagtctcaaaaaaaaaaaaaagtgcgcaatgactcccgttgccaattcaaagagcttttatgaatgtttcaatatacttgtctagcgtatgtgcctgtttttggactcaaagtggccaccataggtgggagatcaagttggcaacaatagtgttccaaggtaatacaccctatatcttgctctgtaccc

SEQ ID NO: 142079 - DNA, 31 bp, Homo sapiens; identical to SEQ ID NO: 1652
  chr2:86428203-86428234
  hypo

SEQ ID NO: 142080 - DNA, 25 bp, Homo sapiens
  chr2:86455859-86455884
  hypo
cgtgagtcaccgcgcctggcaaccc

SEQ ID NO: 142081 - DNA, 18 bp, Homo sapiens
  chr2:86522937-86522955
  hypo
aggcgtgagccaccgcgc

SEQ ID NO: 142082 - DNA, 30 bp, Homo sapiens
  chr2:86716738-86716768
  hypo
atgctgcaaaggacacggagaagataaggg

SEQ ID NO: 142083 - DNA, 150 bp, Homo sapiens
  chr2:86783933-86784083
  hypo
ggtcccctagcccgctttttcactggatacctgtgtctgagtgtattctttcatccgtcgtttggccaggatctgcgggtcggacccggaacaccatccctactcctgtccatgaaacaagtacctgacgagctctttacacttcctgag

SEQ ID NO: 142084 - DNA, 90 bp, Homo sapiens; identical to SEQ ID NO: 63576
  chr2:86809395-86809485
  hypo

SEQ ID NO: 142085 - DNA, 54 bp, Homo sapiens; identical to SEQ ID NO: 106300
  chr2:86850367-86850421
  hypo

SEQ ID NO: 142086 - DNA, 27 bp, Homo sapiens
  chr2:86888385-86888412
  hypo
ctccccgcatagcagctttatttgtga

SEQ ID NO: 142087 - DNA, 142 bp, Homo sapiens
  chr2:86914544-86914686
  hypo
acaagatgtagcatgcgaaaatgaaaagttttctctctcaataccattagtcaacgtattgatgatacatgccataaacggaaacaaatggttctctatgtaggttgatgaatcaacagattttaccaataaatgtcatatt

SEQ ID NO: 142088 - DNA, 27 bp, Homo sapiens
  chr2:86915599-86915626
  hypo
attcacgggaaagcaacgaacacctcg

SEQ ID NO: 142089 - DNA, 21 bp, Homo sapiens
  chr2:87013855-87013876
  hypo
aaaactggccgggtgcggtag

SEQ ID NO: 142090 - DNA, 301 bp, Homo sapiens; identical to SEQ ID NO: 106302
  chr2:87016716-87017017
  hypo

SEQ ID NO: 142091 - DNA, 1073 bp, Homo sapiens; identical to SEQ ID NO: 106303
  chr2:87017490-87018563
  hypo

SEQ ID NO: 142092 - DNA, 29 bp, Homo sapiens
  chr2:87038350-87038379
  hypo
caggcgtgagccaccgcgcctggcctctt

SEQ ID NO: 142093 - DNA, 30 bp, Homo sapiens; identical to SEQ ID NO: 63581
  chr2:87142056-87142086
  hypo

SEQ ID NO: 142094 - DNA, 77 bp, Homo sapiens; identical to SEQ ID NO: 16313
  chr2:87569213-87569290
  hypo

SEQ ID NO: 142095 - DNA, 24 bp, Homo sapiens
  chr2:88311220-88311244
  hypo
tgtcagatgtaatttcgcttttaa

SEQ ID NO: 142096 - DNA, 22 bp, Homo sapiens
  chr2:88328177-88328199
  hypo
ttttttcttgagatggcgtctc

SEQ ID NO: 142097 - DNA, 121 bp, Homo sapiens
  chr2:88341848-88341969
  hypo
gattacaggcgtgagccactgcacccggcctagaccactattcctaaatgaggtttctctttgtttcttttctttgactgcccacccccaccccacctctctctttctttctttaaaaaac

SEQ ID NO: 142098 - DNA, 24 bp, Homo sapiens
  chr2:88343479-88343503
  hypo
cactgcgcccggcctcacgttact

SEQ ID NO: 142099 - DNA, 7 bp, Homo sapiens
  chr2:88366760-88366767
  hypo
caggcgt

SEQ ID NO: 142100 - DNA, 30 bp, Homo sapiens; identical to SEQ ID NO: 16316
  chr2:88367488-88367518
  hypo

SEQ ID NO: 142101 - DNA, 68 bp, Homo sapiens; identical to SEQ ID NO: 63586
  chr2:88387491-88387559
  hypo

SEQ ID NO: 142102 - DNA, 98 bp, Homo sapiens
  chr2:88469320-88469418
  hypo
cctgcagcgaagactccgaggctgaacgtcaataaagcgtttactaaagcgccttaaaaaatgggccgcggggctgggcgcggtggctcacgcctgta

SEQ ID NO: 142103 - DNA, 197 bp, Homo sapiens; identical to SEQ ID NO: 63587
  chr2:88559424-88559621
  hypo

SEQ ID NO: 142104 - DNA, 101 bp, Homo sapiens
  chr2:88591077-88591178
  hypo
cgccactgcactccagcatgggcgacagagcaagactcagtaaataaataaaacaaaaaaagcatgcacgcacaaagcaacaaaaacgtttcaaagaacat

SEQ ID NO: 142105 - DNA, 154 bp, Homo sapiens; identical to SEQ ID NO: 37752
  chr2:88751265-88751419
  hypo

SEQ ID NO: 142106 - DNA, 355 bp, Homo sapiens; identical to SEQ ID NO: 37753
  chr2:88751460-88751815
  hypo

SEQ ID NO: 142107 - DNA, 1101 bp, Homo sapiens; identical to SEQ ID NO: 106313
  chr2:88751942-88753043
  hypo

SEQ ID NO: 142108 - DNA, 20 bp, Homo sapiens
  chr2:88892429-88892449
  hypo
acattggatcacctgacgtc

SEQ ID NO: 142109 - DNA, 127 bp, Homo sapiens
  chr2:88895916-88896043
  hypo
taaactctggtgtcacgagacaaacaacttaataaataagtaaattatatggtatgttaggtgataaatgccgttaaaaaaatggaacaagataaagggagaatggtaaatacgcatggggtggaga

SEQ ID NO: 142110 - DNA, 17 bp, Homo sapiens
  chr2:88908544-88908561
  hypo
cccggccttgatgatcc

SEQ ID NO: 142111 - DNA, 25 bp, Homo sapiens
  chr2:88923517-88923542
  hypo
tttttttttgagacggagtttcgct

SEQ ID NO: 142112 - DNA, 70 bp, Homo sapiens
  chr2:88990233-88990303
  hypo
aaatctaggtgataaccggcagttaacagtggcccataccagtgacttgcgctcacggaagagttctgaa

SEQ ID NO: 142113 - DNA, 294 bp, Homo sapiens; identical to SEQ ID NO: 1664
  chr2:89065128-89065422
  hypo

SEQ ID NO: 142114 - DNA, 19 bp, Homo sapiens
  chr2:89091848-89091867
  hypo
caggcgtgagccaccgcgc

SEQ ID NO: 142115 - DNA, 30 bp, Homo sapiens
  chr2:89110206-89110236
  hypo
gcaggtggaggagcgcggtccccgggacat

SEQ ID NO: 142116 - DNA, 31 bp, Homo sapiens
  chr2:89371576-89371607
  hypo
gggggggagaggatgacgttactttaaatat

SEQ ID NO: 142117 - DNA, 40 bp, Homo sapiens; identical to SEQ ID NO: 16323
  chr2:89601944-89601984
  hypo

SEQ ID NO: 142118 - DNA, 86 bp, Homo sapiens
  chr2:92065783-92065869
  hypo
cgagagcgacccacccgccccctcgcagctccgaaaaagcttcaagaaggaacaggatcccgaggcctggacgctggaccctacac

SEQ ID NO: 142119 - DNA, 31 bp, Homo sapiens; identical to SEQ ID NO: 63598
  chr2:95646408-95646439
  hypo

SEQ ID NO: 142120 - DNA, 30 bp, Homo sapiens
  chr2:95650576-95650606
  hypo
agacttcgcggcatccgggttccctctgtg

SEQ ID NO: 142121 - DNA, 30 bp, Homo sapiens; identical to SEQ ID NO: 63599
  chr2:95677207-95677237
  hypo

SEQ ID NO: 142122 - DNA, 1614 bp, Homo sapiens; identical to SEQ ID NO: 106325
  chr2:95690866-95692480
  hypo

SEQ ID NO: 142123 - DNA, 35 bp, Homo sapiens; identical to SEQ ID NO: 63601
  chr2:95715630-95715665
  hypo

SEQ ID NO: 142124 - DNA, 134 bp, Homo sapiens; identical to SEQ ID NO: 16325
  chr2:95722587-95722721
  hypo

SEQ ID NO: 142125 - DNA, 541 bp, Homo sapiens; identical to SEQ ID NO: 63603
  chr2:95723255-95723796
  hypo

SEQ ID NO: 142126 - DNA, 31 bp, Homo sapiens; identical to SEQ ID NO: 63604
  chr2:95745774-95745805
  hypo

SEQ ID NO: 142127 - DNA, 346 bp, Homo sapiens; identical to SEQ ID NO: 37761
  chr2:95825282-95825628
  hypo

SEQ ID NO: 142128 - DNA, 31 bp, Homo sapiens
  chr2:95940204-95940235
  hypo
aggaacccaaacctgtcgggcaggttttgag

SEQ ID NO: 142129 - DNA, 253 bp, Homo sapiens
  chr2:95941662-95941915
  hypo
ctgctgcctgcccaggtggtgcggtacgaggcgggctacgtggtatgcgctgtgatcgcgggcctctacctgctgctggtgcccactgccgggctttgcttctgctgctgccgctgccaccggcgctgcgggggacgagtgaagacagagcacaaggcgctggcctgtgagcgcgcggccctcatggtcttcctgctgctgaccaccctcttgctgctgtaaggcgctgcccagggcccgggtagggcgggct

SEQ ID NO: 142130 - DNA, 30 bp, Homo sapiens
  chr2:95943937-95943967
  hypo
ctgggcccttcaaggcggcaggcgtctggg

SEQ ID NO: 142131 - DNA, 154 bp, Homo sapiens
  chr2:95945592-95945746
  hypo
gtggatcgtgggctgcgtgctgtgctccgtggtcctattcgtggtgctctgcaacctgctgggcctcaatctgggcatctggggcctgtctgccagggacgaccccagccacccagaagccaagggcgaggctggagcccgcttcctcatggcg

SEQ ID NO: 142132 - DNA, 30 bp, Homo sapiens; identical to SEQ ID NO: 16327
  chr2:95953891-95953921
  hypo

SEQ ID NO: 142133 - DNA, 30 bp, Homo sapiens
  chr2:95960252-95960282
  hypo
cctgaaacactgtgacgagagaaaacccga

SEQ ID NO: 142134 - DNA, 247 bp, Homo sapiens
  chr2:95960726-95960973
  hypo
ctgcagtgggaggttcgcaaggcccgaacagccggtgggtccagcagagcagggcagttgtcccaggcccgcggtgtcacggctggtgaactccgaggacagcgcatctgagtgtgggatgtcagcgagtgtgccaagcaggggcgagcagctcttgggggtgctgctgtgatgagtgggttcctctgctcctgactcctccggccaggccgtcaggaagaccagcccatcacggcagtgcagtcac

SEQ ID NO: 142135 - DNA, 246 bp, Homo sapiens
  chr2:95985467-95985713
  hypo
tatcgtctggagctccgggcgcctgtgtcatgccttttacctgcctcacaggctcttgggctcatggtgctccctctctctccctccgctgcgccgtctgtctcagtccatgttccttgccttccttagggagagtgagacataagcctcgtattggattaggaggccaggagggctgctcccaaggtggccgttgagccccatctcagaacaagggagggagggcaagagcggcaggtttgcctc

SEQ ID NO: 142136 - DNA, 161 bp, Homo sapiens
  chr2:95992198-95992359
  hypo
gctctgggagggcagcggctcccaaattcttagcgcccaacatggcctacaggacctgtgtaactggaccggcctgccggccctgttctcaaatgggaagccctacaggacaccccctgctgcactgcggctgtgcttgtgaatggcggtgggaacgccca

SEQ ID NO: 142137 - DNA, 1166 bp, Homo sapiens; identical to SEQ ID NO: 106331
  chr2:96011564-96012730
  hypo

SEQ ID NO: 142138 - DNA, 31 bp, Homo sapiens; identical to SEQ ID NO: 16328
  chr2:96049659-96049690
  hypo

SEQ ID NO: 142139 - DNA, 43 bp, Homo sapiens
  chr2:96677723-96677766
  hypo
ggtagagcacttaatagttggcattcagcggcagcagttactg

SEQ ID NO: 142140 - DNA, 30 bp, Homo sapiens
  chr2:96751887-96751917
  hypo
cgctgccccaggatgcgcagaacccagtgc

SEQ ID NO: 142141 - DNA, 242 bp, Homo sapiens; identical to SEQ ID NO: 63613
  chr2:96754441-96754683
  hypo

SEQ ID NO: 142142 - DNA, 30 bp, Homo sapiens; identical to SEQ ID NO: 63614
  chr2:96779832-96779862
  hypo

SEQ ID NO: 142143 - DNA, 31 bp, Homo sapiens; identical to SEQ ID NO: 63615
  chr2:96800289-96800320
  hypo

SEQ ID NO: 142144 - DNA, 31 bp, Homo sapiens; identical to SEQ ID NO: 63616
  chr2:96806866-96806897
  hypo

SEQ ID NO: 142145 - DNA, 314 bp, Homo sapiens
  chr2:96814765-96815079
  hypo
atgcataggggcccgcgatacgccccaaccctggccctgcctctcacccgggtgccaccctgagcttcaggtcccctggcgtgcacccccaagcaggacattcggatgctcagacaccttgaggctgcatccagaccagcactgaggagtccccagccatgcgcggaggacgttctgcctttttcaagtcaatcagtccttctgagtacatcaagaagaaagtctccacgtggggctggcgtggctgtaacttctaatacctgcctttcctcattttaaccaagaggctttgcgcccctttctgcatttatcac

SEQ ID NO: 142146 - DNA, 224 bp, Homo sapiens; identical to SEQ ID NO: 16330
  chr2:96821756-96821980
  hypo

SEQ ID NO: 142147 - DNA, 122 bp, Homo sapiens
  chr2:96829030-96829152
  hypo
accacaccactcaggccgggggtttcctctgcgccctgtgctggccgacctgcccggaatggcttcacccacccctcccctgcccatccttgagacccctcaggtttcgcttcctccaggaa

SEQ ID NO: 142148 - DNA, 28 bp, Homo sapiens
  chr2:96837380-96837408
  hypo
accccgcgggaattgaaatcttaccaca

SEQ ID NO: 142149 - DNA, 38 bp, Homo sapiens
  chr2:96839115-96839153
  hypo
ctaaagagtgctgagattacaggcgtgagccaacgtgc

SEQ ID NO: 142150 - DNA, 31 bp, Homo sapiens
  chr2:96970462-96970493
  hypo
catctgcggtttggtccgttgagccttgtct

SEQ ID NO: 142151 - DNA, 832 bp, Homo sapiens; identical to SEQ ID NO: 106346
  chr2:96987014-96987846
  hypo

SEQ ID NO: 142152 - DNA, 34 bp, Homo sapiens; identical to SEQ ID NO: 63621
  chr2:96993130-96993164
  hypo

SEQ ID NO: 142153 - DNA, 30 bp, Homo sapiens; identical to SEQ ID NO: 63622
  chr2:97039125-97039155
  hypo

SEQ ID NO: 142154 - DNA, 190 bp, Homo sapiens; identical to SEQ ID NO: 63623
  chr2:97068615-97068805
  hypo

SEQ ID NO: 142155 - DNA, 30 bp, Homo sapiens
  chr2:97074697-97074727
  hypo
agaactctggccaggcgcagtggctcacat

SEQ ID NO: 142156 - DNA, 30 bp, Homo sapiens
  chr2:97159082-97159112
  hypo
atcatggaccacctgcggttcccagttcac

SEQ ID NO: 142157 - DNA, 31 bp, Homo sapiens; identical to SEQ ID NO: 63624
  chr2:97170312-97170343
  hypo

SEQ ID NO: 142158 - DNA, 211 bp, Homo sapiens; identical to SEQ ID NO: 1667
  chr2:97171201-97171412
  hypo

SEQ ID NO: 142159 - DNA, 287 bp, Homo sapiens; identical to SEQ ID NO: 37773
  chr2:97175213-97175500
  hypo

SEQ ID NO: 142160 - DNA, 30 bp, Homo sapiens; identical to SEQ ID NO: 16334
  chr2:97192251-97192281
  hypo

SEQ ID NO: 142161 - DNA, 269 bp, Homo sapiens; identical to SEQ ID NO: 37776
  chr2:97203313-97203582
  hypo

SEQ ID NO: 142162 - DNA, 154 bp, Homo sapiens
  chr2:97222198-97222352
  hypo
aaaaaaaaaaaggaagaaagaaaagaaagaaatcagcacgtgctacacatcagggctccccccgcccccagccaggggtcaatcacctaacagcacgcactgccgactcagctccaactgccttctctccctggggtcccgcttcaggatgcat

SEQ ID NO: 142163 - DNA, 105 bp, Homo sapiens
  chr2:97274643-97274748
  hypo
gcaggtcgactgccccgctcagggacttcaaaggccaagtctctgcgggccacatcgcggggcttcttcttcttctcagcatcctgatcccgaggttcagagccc

SEQ ID NO: 142164 - DNA, 229 bp, Homo sapiens; identical to SEQ ID NO: 106358
  chr2:97303972-97304201
  hypo

SEQ ID NO: 142165 - DNA, 149 bp, Homo sapiens; identical to SEQ ID NO: 16337
  chr2:97305375-97305524
  hypo

SEQ ID NO: 142166 - DNA, 144 bp, Homo sapiens
  chr2:97335817-97335961
  hypo
ctcaccccttttctccgttttcctctcgcttgccctagtgtattcccgactctgttagggatggtttagcttatcgaggccgagtcttcctggagttaatcacccaaatcaagtcctatcaagactccacgataaaggatctct

SEQ ID NO: 142167 - DNA, 78 bp, Homo sapiens
  chr2:97361030-97361108
  hypo
cagcgtcccagccccgagggcaagcactgatccctcacaggacggggaagcctgtccttgtgcgccttcagacactgg

SEQ ID NO: 142168 - DNA, 155 bp, Homo sapiens
  chr2:97364038-97364193
  hypo
gcctccacaggaactcggggagcgctccccttcccctccccaccctggcctatgctggcctcccaaggctgcaaagccacagagaacaagcccgaacctgaagggatagatggggtggaatgagtccacagcggcacagacggggaactcaccta

SEQ ID NO: 142169 - DNA, 30 bp, Homo sapiens; identical to SEQ ID NO: 16339
  chr2:97365975-97366005
  hypo

SEQ ID NO: 142170 - DNA, 37 bp, Homo sapiens; identical to SEQ ID NO: 63633
  chr2:97370002-97370039
  hypo

SEQ ID NO: 142171 - DNA, 31 bp, Homo sapiens; identical to SEQ ID NO: 1674
  chr2:97405566-97405597
  hypo

SEQ ID NO: 142172 - DNA, 738 bp, Homo sapiens; identical to SEQ ID NO: 63635
  chr2:97427362-97428100
  hypo

SEQ ID NO: 142173 - DNA, 36 bp, Homo sapiens
  chr2:97431124-97431160
  hypo
agtgctgggattaccggtgtgagccaccctgcccag

SEQ ID NO: 142174 - DNA, 137 bp, Homo sapiens
  chr2:97432862-97432999
  hypo
tgcagaggtaggggccgagtgtccctaggagtaaggcaggggtacagccttgcagcacttctgtctcccagctcacggcagttagtgccagatatctgtggaaccccatgctgcgtgcaagacgtgatgctaggtga

SEQ ID NO: 142175 - DNA, 89 bp, Homo sapiens
  chr2:97434628-97434717
  hypo
gcatgcaggggaaaatgcccacgtgaggctgaggagcaaggccaggacaacgctaaaaggtttaagagtcagccaagaggccgggtgcg

SEQ ID NO: 142176 - DNA, 336 bp, Homo sapiens; identical to SEQ ID NO: 63636
  chr2:97435334-97435670
  hypo

SEQ ID NO: 142177 - DNA, 130 bp, Homo sapiens
  chr2:97436176-97436306
  hypo
gggaagacatttcagcggaatttgctagggcgggtagacatggcgttttccactctggtacgtgttgccctgggagagcttggacaagacccgaaggctgagaggtgagcctcaccgtccttcgcagcag

SEQ ID NO: 142178 - DNA, 30 bp, Homo sapiens
  chr2:97436542-97436572
  hypo
gctcctgaaaggccgcgcagccatggagag

SEQ ID NO: 142179 - DNA, 89 bp, Homo sapiens
  chr2:97437493-97437582
  hypo
ttggaacacagtttagatgggttcttcagattccctgctgataagaaattaaatccttatccccatcatcctttcggagtctctcagag

SEQ ID NO: 142180 - DNA, 197 bp, Homo sapiens; identical to SEQ ID NO: 63637
  chr2:97437987-97438184
  hypo

SEQ ID NO: 142181 - DNA, 231 bp, Homo sapiens; identical to SEQ ID NO: 63638
  chr2:97454843-97455074
  hypo

SEQ ID NO: 142182 - DNA, 177 bp, Homo sapiens; identical to SEQ ID NO: 63639
  chr2:97463243-97463420
  hypo

SEQ ID NO: 142183 - DNA, 31 bp, Homo sapiens; identical to SEQ ID NO: 16344
  chr2:97465079-97465110
  hypo

SEQ ID NO: 142184 - DNA, 26 bp, Homo sapiens
  chr2:97471882-97471908
  hypo
ctcccggacggggcggctggccgggc

SEQ ID NO: 142185 - DNA, 17 bp, Homo sapiens
  chr2:97472282-97472299
  hypo
cgcgcgcgcccttagtt

SEQ ID NO: 142186 - DNA, 30 bp, Homo sapiens
  chr2:97474430-97474460
  hypo
catctctgacttcagcgtccgggcactcgt

SEQ ID NO: 142187 - DNA, 98 bp, Homo sapiens; identical to SEQ ID NO: 16345
  chr2:97479659-97479757
  hypo

SEQ ID NO: 142188 - DNA, 299 bp, Homo sapiens; identical to SEQ ID NO: 37780
  chr2:97482862-97483161
  hypo

SEQ ID NO: 142189 - DNA, 179 bp, Homo sapiens; identical to SEQ ID NO: 16347
  chr2:97485584-97485763
  hypo

SEQ ID NO: 142190 - DNA, 97 bp, Homo sapiens
  chr2:97489046-97489143
  hypo
atgaggcctctctgcgccgaggtggccatttagatcctgggctttggtgctggaatccaagacattaaccaaaaccacatgtcgcacttggccttcc

SEQ ID NO: 142191 - DNA, 30 bp, Homo sapiens
  chr2:97500939-97500969
  hypo
ttgtcttttttcactcggcgtcattctcgg

SEQ ID NO: 142192 - DNA, 30 bp, Homo sapiens
  chr2:97501171-97501201
  hypo
ggttgttgcatgtttcgttttttaaacaat

SEQ ID NO: 142193 - DNA, 30 bp, Homo sapiens; identical to SEQ ID NO: 63646
  chr2:97511173-97511203
  hypo

SEQ ID NO: 142194 - DNA, 34 bp, Homo sapiens; identical to SEQ ID NO: 16349
  chr2:97511923-97511957
  hypo

SEQ ID NO: 142195 - DNA, 30 bp, Homo sapiens; identical to SEQ ID NO: 16350
  chr2:97520074-97520104
  hypo

SEQ ID NO: 142196 - DNA, 30 bp, Homo sapiens; identical to SEQ ID NO: 16351
  chr2:97526598-97526628
  hypo

SEQ ID NO: 142197 - DNA, 30 bp, Homo sapiens; identical to SEQ ID NO: 63650
  chr2:97526903-97526933
  hypo

SEQ ID NO: 142198 - DNA, 177 bp, Homo sapiens; identical to SEQ ID NO: 63651
  chr2:97530638-97530815
  hypo

SEQ ID NO: 142199 - DNA, 157 bp, Homo sapiens; identical to SEQ ID NO: 37784
  chr2:97535759-97535916
  hypo

SEQ ID NO: 142200 - DNA, 436 bp, Homo sapiens; identical to SEQ ID NO: 16353
  chr2:97544649-97545085
  hypo

SEQ ID NO: 142201 - DNA, 207 bp, Homo sapiens
  chr2:97545393-97545600
  hypo
aacggctaaggcccacgggtggtctgactccacaggctgaccaggtggccttgcacacggcaggcagagaagacacagtgggggaaaccgaggcgtgcctccaggagagctgccctggggtggggaagacccaacctctctgaagcccagctccctctgcctgccgggtccctgcagcggcctgtggacgcccgagttgcccggccc

SEQ ID NO: 142202 - DNA, 25 bp, Homo sapiens
  chr2:97546332-97546357
  hypo
aaacattttttttttttgagacgga

SEQ ID NO: 142203 - DNA, 25 bp, Homo sapiens
  chr2:97546656-97546681
  hypo
caacggtaattggctgaacctaact

SEQ ID NO: 142204 - DNA, 30 bp, Homo sapiens
  chr2:97549948-97549978
  hypo
ggttcctgatgtgcacgaccctgtgtccag

SEQ ID NO: 142205 - DNA, 84 bp, Homo sapiens; identical to SEQ ID NO: 63657
  chr2:97550183-97550267
  hypo

SEQ ID NO: 142206 - DNA, 100 bp, Homo sapiens; identical to SEQ ID NO: 63658
  chr2:97552034-97552134
  hypo

SEQ ID NO: 142207 - DNA, 146 bp, Homo sapiens; identical to SEQ ID NO: 63659
  chr2:97552401-97552547
  hypo

SEQ ID NO: 142208 - DNA, 159 bp, Homo sapiens; identical to SEQ ID NO: 16355
  chr2:97558026-97558185
  hypo

SEQ ID NO: 142209 - DNA, 29 bp, Homo sapiens
  chr2:97562880-97562909
  hypo
ggagtgagccacagcgcttggcccctttg

SEQ ID NO: 142210 - DNA, 19 bp, Homo sapiens
  chr2:97567214-97567233
  hypo
aggccgacctcttaatgcc

SEQ ID NO: 142211 - DNA, 87 bp, Homo sapiens
  chr2:97568144-97568231
  hypo
caattttttaaaaagacaggctctcagctcactgctctgtcctcagcgcctagcacatggctggcatgcaagcggtaattcttgatg

SEQ ID NO: 142212 - DNA, 229 bp, Homo sapiens
  chr2:97572470-97572699
  hypo
ccacgcacaggccttcgcctccctgtcagacagggccagctttccagctgtttgggagccccagcagcagctgggccgggaacacagtgggaggtcaatggcccctctgagctgctccacagtgaactcaaagccagtcagaagtctgcatctgggcttcattaatccaaaacttgaggcctgcgcgggagctcgtttactcgtttactcacagcgggcgaggagggcc

SEQ ID NO: 142213 - DNA, 315 bp, Homo sapiens
  chr2:97576051-97576366
  hypo
gagacgccgtcccaccggggagacggcctcctctgcacagtgaggttggtcatgcagcctcccacactctcttaggctttaacccccttcgacgaccaatatttgattccaaatgaaaaactgttctccttgacaaagacggcaaaagcaaaatacgaattgtgtagtgttgttccgtctgcatcagggctaacgttttactgtcagccccaaaccgcactccttgcttcaaaagtaactacacagaaactccttttatggccttcggcatttcccaacaacactcccgctggtccacgccgtttgtccggctac

SEQ ID NO: 142214 - DNA, 33 bp, Homo sapiens
  chr2:97578423-97578456
  hypo
cgatcatggcctgaccgccgcccaccttcacgc

SEQ ID NO: 142215 - DNA, 30 bp, Homo sapiens
  chr2:97586540-97586570
  hypo
tgaatcgagagtgtgcgagtgggagtcggg

SEQ ID NO: 142216 - DNA, 455 bp, Homo sapiens
  chr2:97586995-97587450
  hypo
ggagctgcaggagaacggcaccccatgggctacaggaggacaccgccttccccttgctctcgccacccagcccgcacaggggagtaagtgggcagtcacggagatcagggacattccgatgacctccaggcagtgccatccccacccagggcactctaggggccaccttggtccctagtgatgaagctgtatgaggaccaggctctgggcgtctagtaccttccctggccactcccggatgttctccaggagcaagaggagaagctgctggaggtcaactttgggcagcaggcggagccccacgtccaggctggtgcggcacagcagctcaatcagtcccatgaggttctcatcagtgtaggcccccggctgggcctgggcacacagcgccagaaactggagagagaaaagagggcaggggtggccagggcatgggggaacgggagagtacttcg

SEQ ID NO: 142217 - DNA, 332 bp, Homo sapiens; identical to SEQ ID NO: 63666
  chr2:97588989-97589321
  hypo

SEQ ID NO: 142218 - DNA, 30 bp, Homo sapiens; identical to SEQ ID NO: 16358
  chr2:97599772-97599802
  hypo

SEQ ID NO: 142219 - DNA, 30 bp, Homo sapiens
  chr2:97606025-97606055
  hypo
agctgctgctgccaccgccacaggagacgc

SEQ ID NO: 142220 - DNA, 31 bp, Homo sapiens; identical to SEQ ID NO: 63668
  chr2:97612348-97612379
  hypo

SEQ ID NO: 142221 - DNA, 31 bp, Homo sapiens; identical to SEQ ID NO: 16359
  chr2:97614532-97614563
  hypo

SEQ ID NO: 142222 - DNA, 31 bp, Homo sapiens; identical to SEQ ID NO: 63670
  chr2:97615857-97615888
  hypo

SEQ ID NO: 142223 - DNA, 737 bp, Homo sapiens; identical to SEQ ID NO: 16360
  chr2:97651750-97652487
  hypo

SEQ ID NO: 142224 - DNA, 162 bp, Homo sapiens; identical to SEQ ID NO: 63672
  chr2:97655846-97656008
  hypo

SEQ ID NO: 142225 - DNA, 104 bp, Homo sapiens; identical to SEQ ID NO: 1677
  chr2:97779475-97779579
  hypo

SEQ ID NO: 142226 - DNA, 25 bp, Homo sapiens
  chr2:97825525-97825550
  hypo
atttttttttttgagacggagtctc

SEQ ID NO: 142227 - DNA, 31 bp, Homo sapiens; identical to SEQ ID NO: 16363
  chr2:97890111-97890142
  hypo

SEQ ID NO: 142228 - DNA, 81 bp, Homo sapiens
  chr2:98025636-98025717
  hypo
gagtagctgagttcaggtcatcagacatgcaaatcgactccagggaaacctgtgcttattgggccccgcttctggagaaac

SEQ ID NO: 142229 - DNA, 31 bp, Homo sapiens; identical to SEQ ID NO: 63677
  chr2:98266896-98266927
  hypo

SEQ ID NO: 142230 - DNA, 31 bp, Homo sapiens; identical to SEQ ID NO: 16364
  chr2:98276216-98276247
  hypo

SEQ ID NO: 142231 - DNA, 147 bp, Homo sapiens
  chr2:98330281-98330428
  hypo
tgcggagagtgtgagcggcagggcctccctctcaggctgggggcttgggctgcagggaaatccaaaccggctttgtaagccccgattcctcacccagaaccggctctccattggcattgggaccagagaccccgcaagtggcctgtt

SEQ ID NO: 142232 - DNA, 30 bp, Homo sapiens
  chr2:98330659-98330689
  hypo
agaggcttggccgagcggggctgttcaggg

SEQ ID NO: 142233 - DNA, 30 bp, Homo sapiens; identical to SEQ ID NO: 63679
  chr2:98349068-98349098
  hypo

SEQ ID NO: 142234 - DNA, 344 bp, Homo sapiens
  chr2:98349360-98349704
  hypo
ggagcagggcacatacgccctgtccctcatctatgggaagacggtgtaccactacctcatcagccaagacaaggcgggcaagtactgcattcccgagggcaccaagtttgacacgctctggcaggtaggctgcccgtgcaacttgttctgggagatgccgtgctcagatggggtgccgggctctggggaggagaggagcctctctgctagctgcctgctccctgcagctggtggagtatctgaagctgaaggcggacgggctcatctactgcctgaaggaggcctgccccaacagcagtgccagcaacgcctcaggtgacggcagcaggcgggcgggcggtggg

SEQ ID NO: 142235 - DNA, 448 bp, Homo sapiens
  chr2:98350738-98351186
  hypo
gataccaatgcacacgcccctagagtccaccctcatgtggcttcatggggcacccacagctgtggccaggagtgtatgccagtgtgtgcgtgtggatgtgcaggaacacgcatgggcacccacctgcttgtgcatgctccagggacggcacccttgtctggggcaggtgcttgtgggggctgaggctgccttgctccccacacccctgcccctgacctgggagtgtaccgctgtgtgtgcccagcacgcataacgtccccagacaaaccgcggccgatgcccatggacacgagcgtgtatgagagcccctacagcgacccagaggagctcaaggacaagaagctcttcctgaagcgcgataacctcctcatagctgacattgaacttggctgcggcaactttggctcagtgcgccagggcgtgtaccgcatgcgcaagtatggccgcc

SEQ ID NO: 142236 - DNA, 30 bp, Homo sapiens; identical to SEQ ID NO: 63682
  chr2:98351533-98351563
  hypo

SEQ ID NO: 142237 - DNA, 30 bp, Homo sapiens; identical to SEQ ID NO: 63683
  chr2:98354208-98354238
  hypo

SEQ ID NO: 142238 - DNA, 30 bp, Homo sapiens; identical to SEQ ID NO: 63684
  chr2:98357852-98357882
  hypo

SEQ ID NO: 142239 - DNA, 322 bp, Homo sapiens; identical to SEQ ID NO: 63685
  chr2:98377006-98377328
  hypo

SEQ ID NO: 142240 - DNA, 594 bp, Homo sapiens; identical to SEQ ID NO: 63686
  chr2:98408813-98409407
  hypo

SEQ ID NO: 142241 - DNA, 19 bp, Homo sapiens
  chr2:98581934-98581953
  hypo
tacccgccaggtggtgtgg

SEQ ID NO: 142242 - DNA, 27 bp, Homo sapiens
  chr2:98613469-98613496
  hypo
ctgttaccttcacgagccatctcgcgc

SEQ ID NO: 142243 - DNA, 33 bp, Homo sapiens; identical to SEQ ID NO: 63688
  chr2:98613857-98613890
  hypo

SEQ ID NO: 142244 - DNA, 33 bp, Homo sapiens; identical to SEQ ID NO: 63689
  chr2:98614129-98614162
  hypo

SEQ ID NO: 142245 - DNA, 48 bp, Homo sapiens; identical to SEQ ID NO: 63690
  chr2:98674828-98674876
  hypo

SEQ ID NO: 142246 - DNA, 165 bp, Homo sapiens; identical to SEQ ID NO: 63691
  chr2:98871118-98871283
  hypo

SEQ ID NO: 142247 - DNA, 70 bp, Homo sapiens
  chr2:99004116-99004186
  hypo
agcaaagtccgaaggcgtgtctgaactcggccacatttgcgaacctgcgaccacacgtatttgccactac

SEQ ID NO: 142248 - DNA, 192 bp, Homo sapiens; identical to SEQ ID NO: 63692
  chr2:99097185-99097377
  hypo

SEQ ID NO: 142249 - DNA, 30 bp, Homo sapiens
  chr2:99130591-99130621
  hypo
cttcagtgaacccgtcgtctttacgttaaa

SEQ ID NO: 142250 - DNA, 284 bp, Homo sapiens
  chr2:99136318-99136602
  hypo
gcccccggtaggtcacgttctttctaaatgagagcatgatttctctccatcaccgtccccatggtttcttacaagtgctccttttctcagggctactgccactttagtggactagggctcggtgccagcacttcccgggtaatcaggcgtggtctgaccgaggatcaagaagcacatcatcaccaatgacatcatgacagcaagagagcacagccctcgccatggtgccagggcccgtgcaatgcagcgggcttccaccatcgacgtggcggccgacatgctgg

SEQ ID NO: 142251 - DNA, 30 bp, Homo sapiens
  chr2:99185051-99185081
  hypo
acaagaagtcatcaacgtggagagtttggt

SEQ ID NO: 142252 - DNA, 30 bp, Homo sapiens; identical to SEQ ID NO: 63693
  chr2:99207058-99207088
  hypo

SEQ ID NO: 142253 - DNA, 30 bp, Homo sapiens
  chr2:99222996-99223026
  hypo
tagccaaacagctccgctttctatactgga

SEQ ID NO: 142254 - DNA, 30 bp, Homo sapiens; identical to SEQ ID NO: 16367
  chr2:99260668-99260698
  hypo

SEQ ID NO: 142255 - DNA, 100 bp, Homo sapiens
  chr2:99348223-99348323
  hypo
ggtttcaacgcacatcgttgggtgctaatgcccctgattttccactatgccccgttttcttgaaccccatgtccttatctgtcgccgtttcacaaggtta

SEQ ID NO: 142256 - DNA, 198 bp, Homo sapiens; identical to SEQ ID NO: 16368
  chr2:99386852-99387050
  hypo

SEQ ID NO: 142257 - DNA, 207 bp, Homo sapiens; identical to SEQ ID NO: 63696
  chr2:99444495-99444702
  hypo

SEQ ID NO: 142258 - DNA, 39 bp, Homo sapiens
  chr2:99487422-99487461
  hypo
tgaatgcccagggaccgcgagattcgcgaagagcagggg

SEQ ID NO: 142259 - DNA, 190 bp, Homo sapiens; identical to SEQ ID NO: 63697
  chr2:99517364-99517554
  hypo

SEQ ID NO: 142260 - DNA, 48 bp, Homo sapiens
  chr2:99537759-99537807
  hypo
agccacaagtggtgccgatactgggccaatctgcgtcccaggtgagcg

SEQ ID NO: 142261 - DNA, 87 bp, Homo sapiens; identical to SEQ ID NO: 63698
  chr2:99543361-99543448
  hypo

SEQ ID NO: 142262 - DNA, 30 bp, Homo sapiens
  chr2:99549066-99549096
  hypo
aagccattcaatccccgcaacgccgctgcc

SEQ ID NO: 142263 - DNA, 19 bp, Homo sapiens
  chr2:99694299-99694318
  hypo
caggcgtgagccaccgcac

SEQ ID NO: 142264 - DNA, 88 bp, Homo sapiens
  chr2:99795932-99796020
  hypo
gcactcagcactgaaacgtgatatctatgcttattgctgttgtcactgtcatcattatcatcaaataatgccccaggcaaggtagagt

SEQ ID NO: 142265 - DNA, 328 bp, Homo sapiens; identical to SEQ ID NO: 63699
  chr2:99796319-99796647
  hypo

SEQ ID NO: 142266 - DNA, 78 bp, Homo sapiens; identical to SEQ ID NO: 16370
  chr2:99798645-99798723
  hypo

SEQ ID NO: 142267 - DNA, 138 bp, Homo sapiens; identical to SEQ ID NO: 63701
  chr2:99799022-99799160
  hypo

SEQ ID NO: 142268 - DNA, 30 bp, Homo sapiens; identical to SEQ ID NO: 16372
  chr2:99871723-99871753
  hypo

SEQ ID NO: 142269 - DNA, 36 bp, Homo sapiens
  chr2:99951495-99951531
  hypo
aaagaaatggagtattttgtacgagaaattttatac

SEQ ID NO: 142270 - DNA, 30 bp, Homo sapiens
  chr2:99997458-99997488
  hypo
tcatcagctgaatttcgtctttttataagg

SEQ ID NO: 142271 - DNA, 53 bp, Homo sapiens
  chr2:100064552-100064605
  hypo
cagccttttccaccacgctgcttctccgtgaatttatgcggctaaatacacta

SEQ ID NO: 142272 - DNA, 30 bp, Homo sapiens
  chr2:100067743-100067773
  hypo
ccgaataaaaagacacgtcaagaacacatt

SEQ ID NO: 142273 - DNA, 105 bp, Homo sapiens; identical to SEQ ID NO: 63703
  chr2:100107652-100107757
  hypo

SEQ ID NO: 142274 - DNA, 121 bp, Homo sapiens
  chr2:100141753-100141874
  hypo
ctttctttaaaagctgagaccgatgatgtgggagcaatcacacacctcctatgcatatataaaaaccagtaagatccttaaaaataggtttggtttccaatcattgttaaggttttcaggc

SEQ ID NO: 142275 - DNA, 30 bp, Homo sapiens; identical to SEQ ID NO: 63704
  chr2:100210022-100210052
  hypo

SEQ ID NO: 142276 - DNA, 31 bp, Homo sapiens; identical to SEQ ID NO: 16373
  chr2:100293283-100293314
  hypo

SEQ ID NO: 142277 - DNA, 83 bp, Homo sapiens
  chr2:100294012-100294095
  hypo
acgcagacaaggagtcgaagggttatgagcccccagctgcactcgctcacgctttcatgcagggagagcgggccttgcaggag

SEQ ID NO: 142278 - DNA, 30 bp, Homo sapiens
  chr2:100587279-100587309
  hypo
gggaggcgtgtctcacgcacctttgctcta

SEQ ID NO: 142279 - DNA, 97 bp, Homo sapiens; identical to SEQ ID NO: 16374
  chr2:100618384-100618481
  hypo

SEQ ID NO: 142280 - DNA, 950 bp, Homo sapiens; identical to SEQ ID NO: 106398
  chr2:100720955-100721905
  hypo

SEQ ID NO: 142281 - DNA, 30 bp, Homo sapiens; identical to SEQ ID NO: 16376
  chr2:100759830-100759860
  hypo

SEQ ID NO: 142282 - DNA, 30 bp, Homo sapiens; identical to SEQ ID NO: 16377
  chr2:100760336-100760366
  hypo

SEQ ID NO: 142283 - DNA, 30 bp, Homo sapiens
  chr2:100812342-100812372
  hypo
cgcagcaatgcagtgcgtcttggctgctca

SEQ ID NO: 142284 - DNA, 30 bp, Homo sapiens; identical to SEQ ID NO: 37809
  chr2:100898038-100898068
  hypo

SEQ ID NO: 142285 - DNA, 392 bp, Homo sapiens; identical to SEQ ID NO: 37810
  chr2:100898413-100898805
  hypo

SEQ ID NO: 142286 - DNA, 104 bp, Homo sapiens
  chr2:100910679-100910783
  hypo
acagttcttaccccgcgtgctcagcagataaacacatgccaaaccgcttggtgccagtttccatgcatcttcttatcataagccgatagcggggctcaaaaacg

SEQ ID NO: 142287 - DNA, 30 bp, Homo sapiens
  chr2:100969327-100969357
  hypo
tctacttacagttgacggggtcggggtgca

SEQ ID NO: 142288 - DNA, 121 bp, Homo sapiens; identical to SEQ ID NO: 63712
  chr2:101006127-101006248
  hypo

SEQ ID NO: 142289 - DNA, 245 bp, Homo sapiens
  chr2:101009822-101010067
  hypo
tggttctgttatacacggtaatgcccggagggatagtcgggtatgacaccaggtggtcaatgccagcctcttttaagatgtatggggcatcgtcctccagggtctcgtggtgtccaatcacactgtacattatctcacagggagcacagagctctacatacgtcacccagtgaatgatgtggtccccaaactgaaggtctagccatctgtggttcggatcgccgaggtagcgcacgaaatcttca

SEQ ID NO: 142290 - DNA, 126 bp, Homo sapiens; identical to SEQ ID NO: 63713
  chr2:101013987-101014113
  hypo

SEQ ID NO: 142291 - DNA, 30 bp, Homo sapiens; identical to SEQ ID NO: 63714
  chr2:101015479-101015509
  hypo

SEQ ID NO: 142292 - DNA, 38 bp, Homo sapiens
  chr2:101021652-101021690
  hypo
cccttgctctgctgacggaaccccgagtcccgggcgtg

SEQ ID NO: 142293 - DNA, 30 bp, Homo sapiens
  chr2:101022448-101022478
  hypo
caaatgacaagagcacgaagtagaatcagc

SEQ ID NO: 142294 - DNA, 44 bp, Homo sapiens; identical to SEQ ID NO: 16378
  chr2:101022687-101022731
  hypo

SEQ ID NO: 142295 - DNA, 197 bp, Homo sapiens; identical to SEQ ID NO: 37815
  chr2:101033435-101033632
  hypo

SEQ ID NO: 142296 - DNA, 566 bp, Homo sapiens; identical to SEQ ID NO: 106406
  chr2:101033731-101034297
  hypo

SEQ ID NO: 142297 - DNA, 41 bp, Homo sapiens; identical to SEQ ID NO: 63718
  chr2:101035288-101035329
  hypo

SEQ ID NO: 142298 - DNA, 30 bp, Homo sapiens
  chr2:101181097-101181127
  hypo
ttggggttggagaccgattatcccggtgcc

SEQ ID NO: 142299 - DNA, 198 bp, Homo sapiens; identical to SEQ ID NO: 16381
  chr2:101362899-101363097
  hypo

SEQ ID NO: 142300 - DNA, 30 bp, Homo sapiens
  chr2:101395616-101395646
  hypo
ggaggcacatgctcccgacagaggaaaagc

SEQ ID NO: 142301 - DNA, 215 bp, Homo sapiens; identical to SEQ ID NO: 63720
  chr2:101520348-101520563
  hypo

SEQ ID NO: 142302 - DNA, 291 bp, Homo sapiens
  chr2:101552506-101552797
  hypo
cactgatgtcatccaagaggacgaggtccatttaagaaacgtacttgaatctgtttttcagtctaaatcctaccagctgtcggtgtaaaataataaatgagtctagtgttaattttcctggtgaaaagaactctttcccctttcggcatggtataaaggtgcccttcatgcactgctcgtggcctcttccgggttcccgctgccatgcacttcagccacaccctcctaatgtgaaagaatgaattgtccacacagattctcagacatcacgtgaccatctagttgagtgca

SEQ ID NO: 142303 - DNA, 41 bp, Homo sapiens; identical to SEQ ID NO: 63722
  chr2:101574053-101574094
  hypo

SEQ ID NO: 142304 - DNA, 41 bp, Homo sapiens; identical to SEQ ID NO: 63723
  chr2:101574393-101574434
  hypo

SEQ ID NO: 142305 - DNA, 30 bp, Homo sapiens
  chr2:101574904-101574934
  hypo
gtgtctcatctactccggactctaagagtg

SEQ ID NO: 142306 - DNA, 30 bp, Homo sapiens; identical to SEQ ID NO: 63724
  chr2:101593777-101593807
  hypo

SEQ ID NO: 142307 - DNA, 31 bp, Homo sapiens; identical to SEQ ID NO: 63725
  chr2:101607562-101607593
  hypo

SEQ ID NO: 142308 - DNA, 30 bp, Homo sapiens
  chr2:101609922-101609952
  hypo
tgcctcccaaccatcgcccctgcagcctgc

SEQ ID NO: 142309 - DNA, 152 bp, Homo sapiens; identical to SEQ ID NO: 63726
  chr2:101612185-101612337
  hypo

SEQ ID NO: 142310 - DNA, 94 bp, Homo sapiens; identical to SEQ ID NO: 63727
  chr2:101638837-101638931
  hypo

SEQ ID NO: 142311 - DNA, 20 bp, Homo sapiens
  chr2:101641693-101641713
  hypo
tttatttattttgagacgga

SEQ ID NO: 142312 - DNA, 31 bp, Homo sapiens; identical to SEQ ID NO: 16384
  chr2:101649863-101649894
  hypo

SEQ ID NO: 142313 - DNA, 31 bp, Homo sapiens; identical to SEQ ID NO: 63729
  chr2:101651029-101651060
  hypo

SEQ ID NO: 142314 - DNA, 176 bp, Homo sapiens; identical to SEQ ID NO: 63730
  chr2:101696582-101696758
  hypo

SEQ ID NO: 142315 - DNA, 30 bp, Homo sapiens; identical to SEQ ID NO: 63731
  chr2:101727882-101727912
  hypo

SEQ ID NO: 142316 - DNA, 24 bp, Homo sapiens
  chr2:101757493-101757517
  hypo
gattacaggcgtgagccaccgtgc

SEQ ID NO: 142317 - DNA, 705 bp, Homo sapiens; identical to SEQ ID NO: 1701
  chr2:101767138-101767843
  hypo

SEQ ID NO: 142318 - DNA, 39 bp, Homo sapiens; identical to SEQ ID NO: 63733
  chr2:101772515-101772554
  hypo

SEQ ID NO: 142319 - DNA, 31 bp, Homo sapiens; identical to SEQ ID NO: 63734
  chr2:101833727-101833758
  hypo

SEQ ID NO: 142320 - DNA, 18 bp, Homo sapiens
  chr2:101835086-101835104
  hypo
cagcctagtcaccaagct

SEQ ID NO: 142321 - DNA, 30 bp, Homo sapiens
  chr2:101861893-101861923
  hypo
ctgtttaaggctgcgcgtacaggcttacgt

SEQ ID NO: 142322 - DNA, 106 bp, Homo sapiens; identical to SEQ ID NO: 63736
  chr2:101875535-101875641
  hypo

SEQ ID NO: 142323 - DNA, 249 bp, Homo sapiens
  chr2:101882440-101882689
  hypo
gcaacgtttgtagttcgctttgctcgcaagaccatcctgaaaacacagtccactgtggaacatattaagtagacgggggaaaaaaagcataggacatttaaagaggaagtgcttacttcatagaaaaagtcctttgaggatacctgtttgaattacaaagtgtgggtgtgacttgaactgtaaagttctgcagactgatgactcgcagcaggtcagctgtccggattcccgctccggcttcccactccg

SEQ ID NO: 142324 - DNA, 30 bp, Homo sapiens
  chr2:101884950-101884980
  hypo
aaacacgttttttggcgacgcacaaatctc

SEQ ID NO: 142325 - DNA, 68 bp, Homo sapiens; identical to SEQ ID NO: 63738
  chr2:101889653-101889721
  hypo

SEQ ID NO: 142326 - DNA, 956 bp, Homo sapiens; identical to SEQ ID NO: 37822
  chr2:101924526-101925482
  hypo

SEQ ID NO: 142327 - DNA, 31 bp, Homo sapiens; identical to SEQ ID NO: 63740
  chr2:101955034-101955065
  hypo

SEQ ID NO: 142328 - DNA, 187 bp, Homo sapiens; identical to SEQ ID NO: 63741
  chr2:101970927-101971114
  hypo

SEQ ID NO: 142329 - DNA, 35 bp, Homo sapiens
  chr2:102226227-102226262
  hypo
tggggctgcttctgcggcttcgtgttcattacctg

SEQ ID NO: 142330 - DNA, 164 bp, Homo sapiens; identical to SEQ ID NO: 63743
  chr2:102232954-102233118
  hypo

SEQ ID NO: 142331 - DNA, 27 bp, Homo sapiens
  chr2:102251913-102251940
  hypo
ctgttaggaacagggtcgcatagctgg

SEQ ID NO: 142332 - DNA, 332 bp, Homo sapiens; identical to SEQ ID NO: 37825
  chr2:102313749-102314081
  hypo

SEQ ID NO: 142333 - DNA, 153 bp, Homo sapiens; identical to SEQ ID NO: 37826
  chr2:102314091-102314244
  hypo

SEQ ID NO: 142334 - DNA, 30 bp, Homo sapiens
  chr2:102319775-102319805
  hypo
ctttaagtgggtacacggtttgcccacagt

SEQ ID NO: 142335 - DNA, 83 bp, Homo sapiens
  chr2:102320122-102320205
  hypo
tgctaaaattgctttcgattgctcagtggtaaagtgccatatagattgtctggcttttaaaaatcattaggggccgggcacgg

SEQ ID NO: 142336 - DNA, 31 bp, Homo sapiens; identical to SEQ ID NO: 16392
  chr2:102347214-102347245
  hypo

SEQ ID NO: 142337 - DNA, 31 bp, Homo sapiens; identical to SEQ ID NO: 63749
  chr2:102349438-102349469
  hypo

SEQ ID NO: 142338 - DNA, 80 bp, Homo sapiens; identical to SEQ ID NO: 63750
  chr2:102356563-102356643
  hypo

SEQ ID NO: 142339 - DNA, 25 bp, Homo sapiens
  chr2:102377171-102377196
  hypo
aagaaaattgttggcccggcgcagt

SEQ ID NO: 142340 - DNA, 30 bp, Homo sapiens; identical to SEQ ID NO: 16395
  chr2:102381771-102381801
  hypo

SEQ ID NO: 142341 - DNA, 30 bp, Homo sapiens; identical to SEQ ID NO: 16396
  chr2:102427995-102428025
  hypo

SEQ ID NO: 142342 - DNA, 30 bp, Homo sapiens
  chr2:102428837-102428867
  hypo
acatcagcagtgtctcgaggccttcttttc

SEQ ID NO: 142343 - DNA, 22 bp, Homo sapiens
  chr2:102429299-102429321
  hypo
attacgttggccaggcgtggtg

SEQ ID NO: 142344 - DNA, 30 bp, Homo sapiens
  chr2:102443645-102443675
  hypo
aacttgagtgtggtacgtgaatgaacatct

SEQ ID NO: 142345 - DNA, 31 bp, Homo sapiens; identical to SEQ ID NO: 16397
  chr2:102450133-102450164
  hypo

SEQ ID NO: 142346 - DNA, 31 bp, Homo sapiens; identical to SEQ ID NO: 63755
  chr2:102452625-102452656
  hypo

SEQ ID NO: 142347 - DNA, 260 bp, Homo sapiens
  chr2:102486132-102486392
  hypo
cacctcacaaagtaacggactactcctcatccagtgaggagtcggggacgacggatgaggaggacgacgatgtggagcaggaaggggctgacgagtccacctcaggaccagaggacaccagagcagcgtcagtccccggtctcttttagagcggatgagagtattctctcagagcctgctttccactgggacctagttgttcctagactattccgtgaccccatgagcacttactatgtagttctcgtggattcagcagc

SEQ ID NO: 142348 - DNA, 220 bp, Homo sapiens
  chr2:102486856-102487076
  hypo
ggcactctaatcgtccgccaggtacccgtgtcttctctgttgtcagaggctgagcttctcctgtggtcattaacccacttgctcattcactcactcatgctgtttctccatcatcatctgttttcatgttaacaagtcccagagggtcaagtgtcgagtgtcgggggctagggaggcaggtgtgtactgcatgcccagaaggtagcgagtagtctccacc

SEQ ID NO: 142349 - DNA, 177 bp, Homo sapiens; identical to SEQ ID NO: 63756
  chr2:102636185-102636362
  hypo

SEQ ID NO: 142350 - DNA, 33 bp, Homo sapiens; identical to SEQ ID NO: 16399
  chr2:102640213-102640246
  hypo

SEQ ID NO: 142351 - DNA, 69 bp, Homo sapiens
  chr2:102681928-102681997
  hypo
gtctcagtgctgttgcgtctgccttctgaagcgtgttaaatgtgcatttccctccgtgtccactgcctt

SEQ ID NO: 142352 - DNA, 161 bp, Homo sapiens; identical to SEQ ID NO: 63758
  chr2:102683381-102683542
  hypo

SEQ ID NO: 142353 - DNA, 541 bp, Homo sapiens; identical to SEQ ID NO: 106425
  chr2:102758957-102759498
  hypo

SEQ ID NO: 142354 - DNA, 40 bp, Homo sapiens; identical to SEQ ID NO: 63759
  chr2:102804744-102804784
  hypo

SEQ ID NO: 142355 - DNA, 31 bp, Homo sapiens; identical to SEQ ID NO: 63760
  chr2:102849810-102849841
  hypo

SEQ ID NO: 142356 - DNA, 65 bp, Homo sapiens
  chr2:102866730-102866795
  hypo
ccatcgggttcgatgcgctctctgctcccttgtgcctctctccctggccccgggcttctgccttc

SEQ ID NO: 142357 - DNA, 52 bp, Homo sapiens; identical to SEQ ID NO: 63762
  chr2:102867170-102867222
  hypo

SEQ ID NO: 142358 - DNA, 43 bp, Homo sapiens; identical to SEQ ID NO: 16402
  chr2:103130074-103130117
  hypo

SEQ ID NO: 142359 - DNA, 108 bp, Homo sapiens
  chr2:103548793-103548901
  hypo
aaaaagacaatgcatcgccaacaagtcacagacaattcttttcctgtaaaggttggggtgctcgatgtacattcagagccacgcacgcgagtgcgaagaagtcgacta

SEQ ID NO: 142360 - DNA, 30 bp, Homo sapiens
  chr2:103549455-103549485
  hypo
cattcgtgatttcagcgatcctttctgaaa

SEQ ID NO: 142361 - DNA, 24 bp, Homo sapiens
  chr2:104069671-104069695
  hypo
tatgcaggccgtgcacggtggctc

SEQ ID NO: 142362 - DNA, 42 bp, Homo sapiens; identical to SEQ ID NO: 63765
  chr2:104111994-104112036
  hypo

SEQ ID NO: 142363 - DNA, 30 bp, Homo sapiens; identical to SEQ ID NO: 63766
  chr2:104669548-104669578
  hypo

SEQ ID NO: 142364 - DNA, 30 bp, Homo sapiens
  chr2:104936429-104936459
  hypo
ttatttttattttatcgatgccttcaaaat

SEQ ID NO: 142365 - DNA, 177 bp, Homo sapiens; identical to SEQ ID NO: 1710
  chr2:105458974-105459151
  hypo

SEQ ID NO: 142366 - DNA, 580 bp, Homo sapiens; identical to SEQ ID NO: 106434
  chr2:105459902-105460482
  hypo

SEQ ID NO: 142367 - DNA, 250 bp, Homo sapiens; identical to SEQ ID NO: 1713
  chr2:105461163-105461413
  hypo

SEQ ID NO: 142368 - DNA, 112 bp, Homo sapiens; identical to SEQ ID NO: 1714
  chr2:105461555-105461667
  hypo

SEQ ID NO: 142369 - DNA, 204 bp, Homo sapiens; identical to SEQ ID NO: 1715
  chr2:105461699-105461903
  hypo

SEQ ID NO: 142370 - DNA, 1386 bp, Homo sapiens; identical to SEQ ID NO: 106443
  chr2:105468470-105469856
  hypo

SEQ ID NO: 142371 - DNA, 1386 bp, Homo sapiens; identical to SEQ ID NO: 106445
  chr2:105471039-105472425
  hypo

SEQ ID NO: 142372 - DNA, 1022 bp, Homo sapiens; identical to SEQ ID NO: 106447
  chr2:105478380-105479402
  hypo

SEQ ID NO: 142373 - DNA, 249 bp, Homo sapiens
  chr2:105528548-105528797
  hypo
cagcacccagggtgccgtcatgggagccatcccctccagggattcggagcagtgtgtttgattgccgtcactgcacagagcagtgccgagtttgttcgtgctggtcgggcaagcatcaagcacagaacctagcgcattgtgggtgcttgacaagtgtttcttgaataaacaaaggaagggggaaggagggagtttggggctggggaagcctccatcgtagctgagatcactcaccggcatcattggcca

SEQ ID NO: 142374 - DNA, 121 bp, Homo sapiens; identical to SEQ ID NO: 63776
  chr2:105695481-105695602
  hypo

SEQ ID NO: 142375 - DNA, 242 bp, Homo sapiens; identical to SEQ ID NO: 63777
  chr2:105697574-105697816
  hypo

SEQ ID NO: 142376 - DNA, 30 bp, Homo sapiens
  chr2:105709456-105709486
  hypo
gtagtccaacttttacgacttgaactatta

SEQ ID NO: 142377 - DNA, 472 bp, Homo sapiens; identical to SEQ ID NO: 63778
  chr2:105719461-105719933
  hypo

SEQ ID NO: 142378 - DNA, 899 bp, Homo sapiens; identical to SEQ ID NO: 106456
  chr2:105760094-105760993
  hypo

SEQ ID NO: 142379 - DNA, 30 bp, Homo sapiens; identical to SEQ ID NO: 63781
  chr2:105858474-105858504
  hypo

SEQ ID NO: 142380 - DNA, 56 bp, Homo sapiens; identical to SEQ ID NO: 63782
  chr2:105859042-105859098
  hypo

SEQ ID NO: 142381 - DNA, 164 bp, Homo sapiens
  chr2:105885966-105886130
  hypo
tagatggccagcagcgtgtgaaagagttgctggcggtggggtgggtctcggccctcggagcaccacaggcagtagtcctcggccgctgcaaagtcctgcagctcgtgcaccaggatatgcagcgccttctcatgctcgcccagcttcccgtgcaggatggcgct

SEQ ID NO: 142382 - DNA, 651 bp, Homo sapiens; identical to SEQ ID NO: 63784
  chr2:105887867-105888518
  hypo

SEQ ID NO: 142383 - DNA, 245 bp, Homo sapiens
  chr2:105910431-105910676
  hypo
gaggagatatttatgcgaggtatcaaaactattttttcgagtagagaagtaccctccagtaattgcagggtaaagggccctgtgggaagcgccagcctgacttagccagcctgatgcccagaggcatggctgatctgccatgtcttgtctgtgaaatgaggacaattgtaccagtcattaccgaattcttttgagggttaaaacaacaaatgtttttaaatgccttgaagcgttcctgacatact

SEQ ID NO: 142384 - DNA, 30 bp, Homo sapiens
  chr2:105910889-105910919
  hypo
gcaaaggactcggtccgtaatggaaaaaga

SEQ ID NO: 142385 - DNA, 55 bp, Homo sapiens; identical to SEQ ID NO: 63785
  chr2:105937338-105937393
  hypo

SEQ ID NO: 142386 - DNA, 228 bp, Homo sapiens
  chr2:105987659-105987887
  hypo
aaaaacaggtttacttgttgccgtgaaggtgttttttagatgtgactaacatctaagtcagcaagcttcgagtgcagcacgttacccacgtatcagggccgggcttcatctaatcggtagtgggccttaggggcaaagactaaggtttccctaagggcaactaattcttctcaagactgcaatagacacaccctgcctgagtttccagcctgccgccctacggaattc

SEQ ID NO: 142387 - DNA, 30 bp, Homo sapiens
  chr2:105995098-105995128
  hypo
atctgcactcagctccgcaacgtttctctc

SEQ ID NO: 142388 - DNA, 70 bp, Homo sapiens; identical to SEQ ID NO: 63787
  chr2:106011678-106011748
  hypo

SEQ ID NO: 142389 - DNA, 395 bp, Homo sapiens; identical to SEQ ID NO: 63788
  chr2:106016088-106016483
  hypo

SEQ ID NO: 142390 - DNA, 190 bp, Homo sapiens
  chr2:106060609-106060799
  hypo
atagggttttaggagggagtgcgtggaccgataccattttttgtaagctgaaaagagtgtagaccaaggaaagtgttgtttttctggactggaaagtcctcagatgcagaaccagtgtgtgttggggtgcagaggatgagtggtttgtgaaccgcgttgcctaccaagcgcctgtctgcagaatctggaa

SEQ ID NO: 142391 - DNA, 92 bp, Homo sapiens; identical to SEQ ID NO: 16419
  chr2:106064704-106064796
  hypo

SEQ ID NO: 142392 - DNA, 22 bp, Homo sapiens
  chr2:106066835-106066857
  hypo
tggcccccgaatttactttcaa

SEQ ID NO: 142393 - DNA, 37 bp, Homo sapiens; identical to SEQ ID NO: 16420
  chr2:106081973-106082010
  hypo

SEQ ID NO: 142394 - DNA, 30 bp, Homo sapiens; identical to SEQ ID NO: 16421
  chr2:106135399-106135429
  hypo

SEQ ID NO: 142395 - DNA, 242 bp, Homo sapiens
  chr2:106227198-106227440
  hypo
ttttgcttcaaacaccgcagaacacagagcaaaccccatgacgccgtccttcaactaaacagcccaaagcagcaaactagaggtttccatttttagtttgcaaggggaacaactgagctttcatgagttggaatttgctaacgtaaattgagcctttgtaagagggctgaaattgaccctggagacggaaagcacaggaaatatttgctgtggtcggtgggagaggacgctccgcagacaaa

SEQ ID NO: 142396 - DNA, 30 bp, Homo sapiens
  chr2:106355734-106355764
  hypo
atgaaatcaccgtgccgtcttaagactcgt

SEQ ID NO: 142397 - DNA, 215 bp, Homo sapiens; identical to SEQ ID NO: 106461
  chr2:106362017-106362232
  hypo

SEQ ID NO: 142398 - DNA, 201 bp, Homo sapiens
  chr2:106399855-106400056
  hypo
agcaccgtgaaggcccgcgtggaacatggtttttatttagagtaaaaacagctcgatgcagcgttgcctgtctgagccagacttagctcttcatcttcacctgcttgtgggaagcttcgtacaccaccaaggcacaggttaatgtgcagtatttgccaccgtgggtgcagttactaggaaggcagccgttcgcggagaata

SEQ ID NO: 142399 - DNA, 98 bp, Homo sapiens
  chr2:106473750-106473848
  hypo
tcagactgagccagccgcccgtcctggagccggcactgggcccgcgcccgtccccgacagatggccatccagccctgctggagcgcagcgtcggttcg

SEQ ID NO: 142400 - DNA, 30 bp, Homo sapiens; identical to SEQ ID NO: 63795
  chr2:106485468-106485498
  hypo

SEQ ID NO: 142401 - DNA, 30 bp, Homo sapiens; identical to SEQ ID NO: 63796
  chr2:106497797-106497827
  hypo

SEQ ID NO: 142402 - DNA, 381 bp, Homo sapiens
  chr2:106498147-106498528
  hypo
gcatgtggtccagacgctgtaccccttcagctcagtcaccgaggaggagctcaacttcgagaagggggagaccatggaggtgattgagaagccggagaacgaccccgagtggtggaaatgcaaaaatgcccggggccaggtgggcctcgtccccaaaaactacgtggtggtcctcagtgacgggcctgccctgcaccctgcgcacgccccacagataagctacaccgggccctcgtccagcgggcgcttcgcgggcagagagtggtactacgggaacgtgacgcggcaccaggccgagtgcgccctcaacgagcggggcgtggagggcgacttcctcattagggacagcgagtcctcggtaagtgcgctgcgcccacagct

SEQ ID NO: 142403 - DNA, 168 bp, Homo sapiens
  chr2:106499099-106499267
  hypo
agatatgaggccactcgactggggcagcagacccagttcagcggtgggcaggctgggggcggtgagtttcaggcatggggtcaagcctgcatcccagaaggcaggcttttcgtgtgtgaaggaaatactcgaccagttttgcaaacgtctttccgaatacaccttcta

SEQ ID NO: 142404 - DNA, 30 bp, Homo sapiens
  chr2:106499511-106499541
  hypo
tgctctctttgaggacggagcatcgtggtg

SEQ ID NO: 142405 - DNA, 30 bp, Homo sapiens
  chr2:106509810-106509840
  hypo
cgagcccacccggccggccagctttagagg

SEQ ID NO: 142406 - DNA, 30 bp, Homo sapiens; identical to SEQ ID NO: 1734
  chr2:106685357-106685387
  hypo

SEQ ID NO: 142407 - DNA, 30 bp, Homo sapiens; identical to SEQ ID NO: 63801
  chr2:106710105-106710135
  hypo

SEQ ID NO: 142408 - DNA, 241 bp, Homo sapiens
  chr2:106713427-106713668
  hypo
cgagggactgttctgcgtggaagtccagggagtgctcctgcaactgctgtggccaagctgactgtgtgcaggcgcccagcaagagctcggtggggggcaggttattctgtctcaacaggcctgagttaccgcccactacaagagggttgctccaaggcagaccacccacaccaggtaacaagtgcagacgtgcccaccgagcatgaccccggtgtgagaccacaaacgtggtgtggggcca

SEQ ID NO: 142409 - DNA, 30 bp, Homo sapiens
  chr2:106714041-106714071
  hypo
tctcaagcgtcagcacgcacggatcacctg

SEQ ID NO: 142410 - DNA, 31 bp, Homo sapiens; identical to SEQ ID NO: 16424
  chr2:106718550-106718581
  hypo

SEQ ID NO: 142411 - DNA, 62 bp, Homo sapiens
  chr2:106722161-106722223
  hypo
ctgctgaatgacctgcggagcgccacggatcacgccactcactgaggcggagacggcaacag

SEQ ID NO: 142412 - DNA, 332 bp, Homo sapiens; identical to SEQ ID NO: 63803
  chr2:106730105-106730437
  hypo

SEQ ID NO: 142413 - DNA, 169 bp, Homo sapiens; identical to SEQ ID NO: 63804
  chr2:106734892-106735061
  hypo

SEQ ID NO: 142414 - DNA, 52 bp, Homo sapiens
  chr2:106742073-106742125
  hypo
acctccatacacctccgatgtggaggccaggagcagacgggcaccgactcgt

SEQ ID NO: 142415 - DNA, 153 bp, Homo sapiens; identical to SEQ ID NO: 16426
  chr2:106778554-106778707
  hypo

SEQ ID NO: 142416 - DNA, 300 bp, Homo sapiens; identical to SEQ ID NO: 63807
  chr2:106927122-106927422
  hypo

SEQ ID NO: 142417 - DNA, 521 bp, Homo sapiens
  chr2:106959094-106959615
  hypo
tgttagtggccatatgccatgcgcttcacgtgctccaggcagagacgagctcaagagcctctggtctctgctgcgggtggcgaggggcggctggaacagcatacttcagtcgttccgtgtcagcctccacccctggtagcaccagagcctcccaggcgtccccgcagtccgagccagccttagcacccagcgctttcttgctgtcgcctggttgttcccgcggcggccgagctcagcacctctcacactccctgcctctcgaggactctgcttgttcctcatcacagcacggttgctctcgcacccaaggcggtgtccccccagcgcctcaccacgatcgcggcagagatctcctgcagggcgtccgggccttgggaaggcatcgccatctcccgcagcgccctcccggactagcgcagcaggctggcatcgcttcctgaggtttggccccaagttttacggcttaatgaggcacataaatagataaattgtcttcatcacgtcagcgattgctttcactt

SEQ ID NO: 142418 - DNA, 204 bp, Homo sapiens
  chr2:106959838-106960042
  hypo
agccgtggtccccacggaagcggtgagaacgcacctggccggctcagccacacggcacggtggcctaggccctgctgcgggctctggatccagcggtcacggtttcactgagagggcgcctcccaggggctgctccggcccagggcagggcattgcaggggtgatgggacagccctgcttttgagaggcgcggcactctgccaa

SEQ ID NO: 142419 - DNA, 30 bp, Homo sapiens; identical to SEQ ID NO: 63810
  chr2:107084872-107084902
  hypo

SEQ ID NO: 142420 - DNA, 33 bp, Homo sapiens; identical to SEQ ID NO: 63811
  chr2:107134449-107134482
  hypo

SEQ ID NO: 142421 - DNA, 79 bp, Homo sapiens; identical to SEQ ID NO: 63812
  chr2:107204234-107204313
  hypo

SEQ ID NO: 142422 - DNA, 1004 bp, Homo sapiens
  chr2:107459357-107460361
  hypo
taatattaggaacacctggtgcggagaccccagcttgccccgtcagagatccagaggcgcgctcagaaagaaccggcccccagggacacactggctcaagacagggcgacctggtccccccgctgagacctacctatttcctcgcccaaggaagagttgaggattgcgcctgcagacatgacgacagcgcagctgcgcaggccgcgggggtgcagctggctcaggggcacggcgggcaccaggcgccgccagcccagcgcagaaaagggcgcctcggtgccgtccagcgtccgcacgcgcgcgcggctccgcagctggcacagcagctgtgccctgctcagcccggcctcccgcttcccgcggaagcgcaccccgtgcttgttggcggtcaggtaatccttcatcgccttctgcaggcgcgggttcagcattttggaagagacgttccccttccagagccggtacaggaaggccctggacatggaggagtacagcctgtcgccgtcgtcgccctcctccaacacgtggctccttctctgcctccggtgcctcttcttcacccgcctcctctggacctgtgcagccggaaaagccccctcccgtgggcctggctccccgggggaagggaatcccaatgtcccctgagtgtggctgtgccaccctggctgaccagcagcaaaaaagtagtcgtcatcctccgggtagaaagcactttgagattttctccccacctgggatgaaaaaaactctttatgttcaaacccatcttgggactgggcccatttctgcaggtctccaggccccgcatgaaaggaaccggctgggtgggcgcggggcagcgcctggcgtgcgtccaggcccccaggcggggagggctcatgtgcggcgcccatgatggcccgctgcttcccctgcaccggcaggagcctcctggtctccaggaaggagagggagctgggtacaggctcagcggggttgctgtcggtgaagtagatgaaaatcag

SEQ ID NO: 142423 - DNA, 57 bp, Homo sapiens; identical to SEQ ID NO: 63815
  chr2:107595240-107595297
  hypo

SEQ ID NO: 142424 - DNA, 30 bp, Homo sapiens
  chr2:107718814-107718844
  hypo
ccttggggaggagaacgttgtgtgccatgt

SEQ ID NO: 142425 - DNA, 30 bp, Homo sapiens; identical to SEQ ID NO: 63816
  chr2:107872047-107872077
  hypo

SEQ ID NO: 142426 - DNA, 157 bp, Homo sapiens; identical to SEQ ID NO: 63817
  chr2:107919280-107919437
  hypo

SEQ ID NO: 142427 - DNA, 181 bp, Homo sapiens; identical to SEQ ID NO: 63818
  chr2:108085837-108086018
  hypo

SEQ ID NO: 142428 - DNA, 76 bp, Homo sapiens; identical to SEQ ID NO: 63819
  chr2:108086317-108086393
  hypo

SEQ ID NO: 142429 - DNA, 30 bp, Homo sapiens; identical to SEQ ID NO: 1739
  chr2:108160503-108160533
  hypo

SEQ ID NO: 142430 - DNA, 807 bp, Homo sapiens; identical to SEQ ID NO: 63821
  chr2:108160840-108161647
  hypo

SEQ ID NO: 142431 - DNA, 25 bp, Homo sapiens
  chr2:108420525-108420550
  hypo
atgcgtttccattccacttcatcct

SEQ ID NO: 142432 - DNA, 30 bp, Homo sapiens; identical to SEQ ID NO: 63823
  chr2:108443356-108443386
  hypo

SEQ ID NO: 142433 - DNA, 121 bp, Homo sapiens
  chr2:108552483-108552604
  hypo
ctggtgacagagcgagactccgtccaaaaaaaaaaaagttgggggggagcttacgcttttcattaaatgtatacttaaaattttaaaaatagaaaacgatgggccaggtgcggtggctcat

SEQ ID NO: 142434 - DNA, 29 bp, Homo sapiens
  chr2:108917751-108917780
  hypo
ctctccccaaaggaggccaggcgcggtgg

SEQ ID NO: 142435 - DNA, 88 bp, Homo sapiens; identical to SEQ ID NO: 63825
  chr2:108918019-108918107
  hypo

SEQ ID NO: 142436 - DNA, 20 bp, Homo sapiens
  chr2:109004253-109004273
  hypo
tttttttttttttttttgag

SEQ ID NO: 142437 - DNA, 27 bp, Homo sapiens
  chr2:109067047-109067074
  hypo
aaaaatgtggccgggcgcggtgggtca

SEQ ID NO: 142438 - DNA, 40 bp, Homo sapiens; identical to SEQ ID NO: 63827
  chr2:109225029-109225069
  hypo

SEQ ID NO: 142439 - DNA, 87 bp, Homo sapiens
  chr2:109259998-109260085
  hypo
cagcacaaaactgggcggcctttagggcagacaccgagctagccagttttttttttcataccccagtggtagcgtttgagttttttt

SEQ ID NO: 142440 - DNA, 84 bp, Homo sapiens; identical to SEQ ID NO: 63828
  chr2:109328950-109329034
  hypo

SEQ ID NO: 142441 - DNA, 103 bp, Homo sapiens
  chr2:109329293-109329396
  hypo
ctgaggctttgggtacggcttgttcttacaataccggtaacaacggacggggcggcggcccatggcgataccaggatcttcagcggcgcgcttaagagaaaga

SEQ ID NO: 142442 - DNA, 181 bp, Homo sapiens
  chr2:109335079-109335260
  hypo
gcgtgaaccacagcgcccggcggaatgcgtggattttggcataagacggtggttctggaaccaatcccccgccgagatgactgtttaaaaaattgtaattgtccaaaacttaatatttgtggtctttttcattatgcagttctaaatctccctttttttttttttttaaattcagacggag

SEQ ID NO: 142443 - DNA, 285 bp, Homo sapiens; identical to SEQ ID NO: 106479
  chr2:109335499-109335784
  hypo

SEQ ID NO: 142444 - DNA, 30 bp, Homo sapiens; identical to SEQ ID NO: 106480
  chr2:109336020-109336050
  hypo

SEQ ID NO: 142445 - DNA, 30 bp, Homo sapiens; identical to SEQ ID NO: 63831
  chr2:109484644-109484674
  hypo

SEQ ID NO: 142446 - DNA, 31 bp, Homo sapiens; identical to SEQ ID NO: 63832
  chr2:109523049-109523080
  hypo

SEQ ID NO: 142447 - DNA, 30 bp, Homo sapiens
  chr2:109524418-109524448
  hypo
tcactgtcgacgctccggctcagcagctgc

SEQ ID NO: 142448 - DNA, 38 bp, Homo sapiens; identical to SEQ ID NO: 16437
  chr2:109536233-109536271
  hypo

SEQ ID NO: 142449 - DNA, 31 bp, Homo sapiens; identical to SEQ ID NO: 63834
  chr2:109543737-109543768
  hypo

SEQ ID NO: 142450 - DNA, 38 bp, Homo sapiens; identical to SEQ ID NO: 16438
  chr2:109556839-109556877
  hypo

SEQ ID NO: 142451 - DNA, 475 bp, Homo sapiens
  chr2:109558966-109559441
  hypo
gatgaaccacggcgacggcaggggccagcgtccccgtctccctcccgttctagaagacataaatggtgccttcattttgtgagtctgcgctgagtgaggccgtgaggcgggcggttccgccacctgctttccacgccagaggcctttcaagacggcgggagccctgcggttccagcgcgttcctgttcccgcctctccttttaccacgaagccagcttcgctcccaggcaccaccctggccatctggactctcacgaaggttcgtgccctgagaacttcaggaggaggcgcgctaagaaaactcaacagcagcaacaaaaacattttcaggctcccagtcttttaagtttgagcgggtaggatttttgtttgtttgtttgttttgaacgattcaatagatggattttctccctgctcctaatcctgggattagaccatgccttcccggccccttcgctgacgtgcaggtaacccg

SEQ ID NO: 142452 - DNA, 30 bp, Homo sapiens; identical to SEQ ID NO: 1741
  chr2:109583297-109583327
  hypo

SEQ ID NO: 142453 - DNA, 182 bp, Homo sapiens
  chr2:109588358-109588540
  hypo
agcttcctgctgtgccgtggctgctgctcagtcacataggggcaacagaggagcagccgtggggagctcccgtggcccggagctgaggcctcctgccgcagccacttgcgaggcctctggatgtgggtcctccagcctggcctggcccgcagatgttgcagcccagccgactgcagcctcag

SEQ ID NO: 142454 - DNA, 115 bp, Homo sapiens; identical to SEQ ID NO: 63838
  chr2:109604151-109604266
  hypo

SEQ ID NO: 142455 - DNA, 581 bp, Homo sapiens; identical to SEQ ID NO: 106483
  chr2:109647968-109648549
  hypo

SEQ ID NO: 142456 - DNA, 198 bp, Homo sapiens
  chr2:109723677-109723875
  hypo
gccttttttttttttttcagctgccaaagacttccagagtttaaaagaacgctggagaccatccacggaagagtatgacccacacgctcagggataagtacaggtccagatgtagtttgaaactgaggagagttgacagaggggatggaaagagagcaaagtagagccagccagtatgctggccgagtaccccctggg

SEQ ID NO: 142457 - DNA, 35 bp, Homo sapiens
  chr2:109737055-109737090
  hypo
ctccatgtggtgagccgagatcgcgccattgcact

SEQ ID NO: 142458 - DNA, 186 bp, Homo sapiens; identical to SEQ ID NO: 63840
  chr2:109741775-109741961
  hypo

SEQ ID NO: 142459 - DNA, 30 bp, Homo sapiens
  chr2:109757734-109757764
  hypo
aaccagtgctctgtcggcttttgcagttgc

SEQ ID NO: 142460 - DNA, 30 bp, Homo sapiens; identical to SEQ ID NO: 63841
  chr2:109813161-109813191
  hypo

SEQ ID NO: 142461 - DNA, 30 bp, Homo sapiens
  chr2:109991247-109991277
  hypo
ccctatggggttcaccgagggactctcacc

SEQ ID NO: 142462 - DNA, 30 bp, Homo sapiens
  chr2:109991767-109991797
  hypo
aaactctcctgcggccgtccccacgccagg

SEQ ID NO: 142463 - DNA, 960 bp, Homo sapiens
  chr2:110007110-110008070
  hypo
ttctggttctgctggcgagacccatggactctgggatgaggaaggaggcattgacagccgcagggcagctggaggttctttggcagatcttggttttgagggctggcttgtggggcctcacaggggcggtcgcttcccgggctacccactatgagatgagcctggcccagggtgtgcagattcatgtgccacatcatagggcactggcagagggcggcccctgaattctctagagggtcccggcatgaatgctgctgtgggctgtgtgacagctggggtaggcgggcaggttccacaaactgatctgcagcttggccaactgcccccaagcagctagcacccagaggcggacaaggtggacgggtgccacctgcctctcatgggaccagcctgcacctgacagggacagggttttgtccagtccataagagggggctgaaatgaaaaccattcgctccgactccctcctcagatttttaaatgtcaactcttccaaaagccttgcctgtactcaggctttacgtgcaaaattaggcagccatttgtgcagtgcaggtctgcacctgcgttttaaacttcagttatccgaatagtcacctcagcttgccagcccattgggcagcccgacagcagcctgacctgtatgcttcagccattacaggacggggaccagggctagaatgcaaacaccaagaggacaggatgggaaaggcacatctgccatgtgctggagggatgcaggtcacccacaggctcggggaggggtgcgggtcacccatgggctcgggccttcactctggcagggccggcggcctcacacaggtctccagcacactcctgcagtgctctagtgttgctcagcctctgtcaaactaacttcaaggggggaatctcctccagggtagaagcctctcccatagcaggtgtgtggccacggcttgtggccgggcagggagcatc

SEQ ID NO: 142464 - DNA, 41 bp, Homo sapiens; identical to SEQ ID NO: 16443
  chr2:110008966-110009007
  hypo

SEQ ID NO: 142465 - DNA, 41 bp, Homo sapiens; identical to SEQ ID NO: 16444
  chr2:110009246-110009287
  hypo

SEQ ID NO: 142466 - DNA, 232 bp, Homo sapiens
  chr2:110011286-110011518
  hypo
atggaggcctgtgcgcgagacgagtctgcaccaacttgcagagtgaggagctgggaaagtgtggctgctcctaatgggtgcacgggagccgccgtcccgcacaggcactggcaggcgagggcatcctgtgaccgtgggcccacaaggatgtgtgtggccggtgagggtccttctgattgggatggcaccggtgccaaattcaggcccagctttatgacgtgactaattggag

SEQ ID NO: 142467 - DNA, 31 bp, Homo sapiens; identical to SEQ ID NO: 63845
  chr2:110011965-110011996
  hypo

SEQ ID NO: 142468 - DNA, 352 bp, Homo sapiens
  chr2:110015122-110015474
  hypo
gccctctgactccggcgctgtggccagcgtggccccaagtcccactttaagcagctcaggggcggtcagtgcctttcagcggcgtgtggatggcaagaagaacaccaagaaacgccactccttcaccgcgctcagtgtgacgcacagatcctcccaggctgccagccacaggcattccatggaaattagtgctccagtgttgatcagctccagcgatccccgagccgcggccaggattggagaccttgctcatctgtcgtgcgctgctcccacccaggtaacatcccgcgggccagggcaggcatccctgggttctctggggttctatcctcagctccgtgttcagtgtccc

SEQ ID NO: 142469 - DNA, 30 bp, Homo sapiens; identical to SEQ ID NO: 16446
  chr2:110016463-110016493
  hypo

SEQ ID NO: 142470 - DNA, 263 bp, Homo sapiens; identical to SEQ ID NO: 63848
  chr2:110016728-110016991
  hypo

SEQ ID NO: 142471 - DNA, 143 bp, Homo sapiens; identical to SEQ ID NO: 16448
  chr2:110017050-110017193
  hypo

SEQ ID NO: 142472 - DNA, 73 bp, Homo sapiens
  chr2:110021040-110021113
  hypo
tcccagaggctgccacgggcacacagggcctgggcaggtggggtgtggcccaggctggcggccaagcagagct

SEQ ID NO: 142473 - DNA, 467 bp, Homo sapiens
  chr2:110021653-110022120
  hypo
acgcctcaacttcagcgcatgccaggagcaaccgatgacacccctctttccgcaaacctgcttccccttctgtattccatctgttcctcaaggagtcaccactgtccttaggtgccctgagctaacactcttcgtcttcgctaatacccttcgtcttccccaacactgactccctgcccctgagttccctcctgagtcccttggaaggttctggggagccttcagactggcccttggttgcctctccagctcccggcagcactgtccattcccgtgagcctgtgcagatcttctccctgcgcaccacgctgctctggccctggtccatttctccccgaaactgccgtagctaatcccttcccacctgcccatgtcccttttgctgcccctcagcatggcattctacctaccaggcaacacacagacacatacctgtgcagaaggctcctgcccgcccttccagacca

SEQ ID NO: 142474 - DNA, 91 bp, Homo sapiens; identical to SEQ ID NO: 63851
  chr2:110022452-110022543
  hypo

SEQ ID NO: 142475 - DNA, 30 bp, Homo sapiens; identical to SEQ ID NO: 63852
  chr2:110022886-110022916
  hypo

SEQ ID NO: 142476 - DNA, 30 bp, Homo sapiens; identical to SEQ ID NO: 63853
  chr2:110023308-110023338
  hypo

SEQ ID NO: 142477 - DNA, 114 bp, Homo sapiens; identical to SEQ ID NO: 63854
  chr2:110025458-110025572
  hypo

SEQ ID NO: 142478 - DNA, 158 bp, Homo sapiens
  chr2:110026465-110026623
  hypo
cgtacagcctgccaacgcccagaccctcttttttcccttttagtaatcccagcagggaactaatacggcctggttcccagccactgcttaggggccccattaaaatgcagcggaggaggctctagtgtctggttacaacctggcggtttagaatcggg

SEQ ID NO: 142479 - DNA, 30 bp, Homo sapiens
  chr2:110028126-110028156
  hypo
gtccctcgcacccctcgccctgggtaccac

SEQ ID NO: 142480 - DNA, 166 bp, Homo sapiens; identical to SEQ ID NO: 16450
  chr2:110028489-110028655
  hypo

SEQ ID NO: 142481 - DNA, 31 bp, Homo sapiens; identical to SEQ ID NO: 63856
  chr2:110033758-110033789
  hypo

SEQ ID NO: 142482 - DNA, 30 bp, Homo sapiens; identical to SEQ ID NO: 16451
  chr2:110036817-110036847
  hypo

SEQ ID NO: 142483 - DNA, 225 bp, Homo sapiens; identical to SEQ ID NO: 63858
  chr2:110040035-110040260
  hypo

SEQ ID NO: 142484 - DNA, 30 bp, Homo sapiens; identical to SEQ ID NO: 63859
  chr2:110045579-110045609
  hypo

SEQ ID NO: 142485 - DNA, 159 bp, Homo sapiens
  chr2:110048956-110049115
  hypo
gtacctggcgctctacgcctacaagccccagaagagtgacgagctggagctgcacaagggagagatgtaccgggtcctcgagaagtgtcaggatggctggttcaagggggcgtctctgaggaccggggtctctggggtgttccccggaaactacgtgac

SEQ ID NO: 142486 - DNA, 30 bp, Homo sapiens
  chr2:110090990-110091020
  hypo
gattacagtccgaaccgcacggggcttata

SEQ ID NO: 142487 - DNA, 31 bp, Homo sapiens; identical to SEQ ID NO: 63860
  chr2:110105993-110106024
  hypo

SEQ ID NO: 142488 - DNA, 50 bp, Homo sapiens; identical to SEQ ID NO: 16452
  chr2:110256841-110256891
  hypo

SEQ ID NO: 142489 - DNA, 195 bp, Homo sapiens; identical to SEQ ID NO: 16453
  chr2:110259062-110259257
  hypo

SEQ ID NO: 142490 - DNA, 127 bp, Homo sapiens
  chr2:110260106-110260233
  hypo
catcccgcacctcagcgctggccagtactctgggggctggcggggtggatccattgagggggtcggagggagcttggaagcagccggtttctttaaactcttaccaaaaccccgcgctctgtctaga

SEQ ID NO: 142491 - DNA, 31 bp, Homo sapiens; identical to SEQ ID NO: 16454
  chr2:110266916-110266947
  hypo

SEQ ID NO: 142492 - DNA, 31 bp, Homo sapiens; identical to SEQ ID NO: 16455
  chr2:110267204-110267235
  hypo

SEQ ID NO: 142493 - DNA, 94 bp, Homo sapiens
  chr2:110274997-110275091
  hypo
aagctgccgaaccaccgcagcaaggaaggccgggtgagtgaacagagtccaaacaccgcaggttcggacctgtgaaccccgcctggctgctgct

SEQ ID NO: 142494 - DNA, 38 bp, Homo sapiens; identical to SEQ ID NO: 16456
  chr2:110352251-110352289
  hypo

SEQ ID NO: 142495 - DNA, 30 bp, Homo sapiens
  chr2:110433571-110433601
  hypo
ctagatctatgcacccgcgctgtccacacg

SEQ ID NO: 142496 - DNA, 30 bp, Homo sapiens
  chr2:110433819-110433849
  hypo
agtgagcctgggagccgggctctccgttag

SEQ ID NO: 142497 - DNA, 162 bp, Homo sapiens; identical to SEQ ID NO: 63866
  chr2:110483972-110484134
  hypo

SEQ ID NO: 142498 - DNA, 197 bp, Homo sapiens; identical to SEQ ID NO: 63867
  chr2:110853613-110853810
  hypo

SEQ ID NO: 142499 - DNA, 146 bp, Homo sapiens; identical to SEQ ID NO: 63868
  chr2:110855513-110855659
  hypo

SEQ ID NO: 142500 - DNA, 176 bp, Homo sapiens; identical to SEQ ID NO: 63869
  chr2:110861844-110862020
  hypo

SEQ ID NO: 142501 - DNA, 30 bp, Homo sapiens; identical to SEQ ID NO: 37874
  chr2:110927414-110927444
  hypo

SEQ ID NO: 142502 - DNA, 30 bp, Homo sapiens; identical to SEQ ID NO: 63871
  chr2:110966268-110966298
  hypo

SEQ ID NO: 142503 - DNA, 30 bp, Homo sapiens; identical to SEQ ID NO: 63872
  chr2:111430909-111430939
  hypo

SEQ ID NO: 142504 - DNA, 97 bp, Homo sapiens; identical to SEQ ID NO: 63873
  chr2:111438059-111438156
  hypo

SEQ ID NO: 142505 - DNA, 92 bp, Homo sapiens; identical to SEQ ID NO: 63874
  chr2:111438463-111438555
  hypo

SEQ ID NO: 142506 - DNA, 836 bp, Homo sapiens; identical to SEQ ID NO: 106493
  chr2:111490023-111490859
  hypo

SEQ ID NO: 142507 - DNA, 86 bp, Homo sapiens; identical to SEQ ID NO: 37882
  chr2:111880645-111880731
  hypo

SEQ ID NO: 142508 - DNA, 87 bp, Homo sapiens
  chr2:111881444-111881531
  hypo
aggtaatcctgaaggcaatcacggaggtgaaggggacagctgcccccacggcagccctcagggcccgctggccccacctgccagccc

SEQ ID NO: 142509 - DNA, 30 bp, Homo sapiens
  chr2:111890342-111890372
  hypo
ggttcctgggcctgtcggaaaatgacattc

SEQ ID NO: 142510 - DNA, 112 bp, Homo sapiens; identical to SEQ ID NO: 63877
  chr2:111890891-111891003
  hypo

SEQ ID NO: 142511 - DNA, 311 bp, Homo sapiens
  chr2:111911292-111911603
  hypo
agtgttagtcttttattgccacgagccttgcaaagcctgacaggatattttcccgtttttccagttagagaaatagaggaagttgtcgtgtagttgtcatgtattcagtccacttaagggcagtggggaagcgtttgagacggagctgtggaggctgaatccttgaaggaggaggtgagagaggcacaggtgagcgcaaagtcccagtgcatgtcccctcttctctcccgatgcagtgtcattcccaggtgaacctgccgggctgaacggcctggcccctctattcagtcggagttttactactccagtgg

SEQ ID NO: 142512 - DNA, 30 bp, Homo sapiens
  chr2:111912532-111912562
  hypo
gggctgtgaaggtcacggagctcttaaaag

SEQ ID NO: 142513 - DNA, 30 bp, Homo sapiens
  chr2:111912927-111912957
  hypo
tgtgagcgcatgtaccggttcatctgctgg

SEQ ID NO: 142514 - DNA, 163 bp, Homo sapiens
  chr2:111929171-111929334
  hypo
tgtgttcttggccacagtaaccggccccccagccaccagcaccccggggtcccgtctctgagctgcctgctggactatgcaacaggcgcccaccctccagcatgttctccttgtgctaaattagccagggctggtttctgtcgctggcagccaaagcagtgac

SEQ ID NO: 142515 - DNA, 46 bp, Homo sapiens; identical to SEQ ID NO: 16458
  chr2:111935998-111936044
  hypo

SEQ ID NO: 142516 - DNA, 30 bp, Homo sapiens
  chr2:112477076-112477106
  hypo
aggtgattgggatgccgggggacgcacctg

SEQ ID NO: 142517 - DNA, 31 bp, Homo sapiens; identical to SEQ ID NO: 1750
  chr2:112655268-112655299
  hypo

SEQ ID NO: 142518 - DNA, 34 bp, Homo sapiens; identical to SEQ ID NO: 16460
  chr2:112655539-112655573
  hypo

SEQ ID NO: 142519 - DNA, 638 bp, Homo sapiens; identical to SEQ ID NO: 1751
  chr2:112656486-112657124
  hypo

SEQ ID NO: 142520 - DNA, 148 bp, Homo sapiens
  chr2:112745415-112745563
  hypo
acatttttatacgtgcggtttttatggagttcgttgctttgggtttattgctctaatgctagtttactcttcgttttcaaaggtatagatcttggaagtctcatagcagagattattatagccttgagacagcatgatatatagaact

SEQ ID NO: 142521 - DNA, 27 bp, Homo sapiens
  chr2:112745622-112745649
  hypo
gtggcacgatctcggctcactgcaaca

SEQ ID NO: 142522 - DNA, 83 bp, Homo sapiens
  chr2:112779012-112779095
  hypo
tgactgtctgtgttgcggacttcggcctctctaagaagatttacagtggcgattattaccgccaaggccgcattgctaagatg

SEQ ID NO: 142523 - DNA, 107 bp, Homo sapiens; identical to SEQ ID NO: 63884
  chr2:112785955-112786062
  hypo

SEQ ID NO: 142524 - DNA, 95 bp, Homo sapiens; identical to SEQ ID NO: 63885
  chr2:112786371-112786466
  hypo

SEQ ID NO: 142525 - DNA, 143 bp, Homo sapiens
  chr2:112810884-112811027
  hypo
aaaacaaaacaaaacaaaaaatcattgcctctccagtgttcttaactaaaggtgccatctgcctaacttaatttaggaatgcctgtatgttttggtactgtttaaatattcccagctttgccactctccgtctcacaccaaca

SEQ ID NO: 142526 - DNA, 30 bp, Homo sapiens
  chr2:112817646-112817676
  hypo
gggcgcaatggctcacgcctgtaatcccgg

SEQ ID NO: 142527 - DNA, 30 bp, Homo sapiens; identical to SEQ ID NO: 16463
  chr2:112918537-112918567
  hypo

SEQ ID NO: 142528 - DNA, 30 bp, Homo sapiens; identical to SEQ ID NO: 16464
  chr2:112942790-112942820
  hypo

SEQ ID NO: 142529 - DNA, 30 bp, Homo sapiens; identical to SEQ ID NO: 63888
  chr2:112944629-112944659
  hypo

SEQ ID NO: 142530 - DNA, 48 bp, Homo sapiens; identical to SEQ ID NO: 16465
  chr2:112945139-112945187
  hypo

SEQ ID NO: 142531 - DNA, 509 bp, Homo sapiens
  chr2:113103032-113103541
  hypo
caccaccgcccgttttcgaatccatttggcacctccttcgcctaagaatttgcttttccaggcgtcccctttctgttccgtctctgtactgcactaacttcacctatacacaggtctgtatcctcctgttaaaaccactgaccaggactgccgcttctgggtgcgatacagtaacaggcattggattcctcctcttccctcaaacaactagaaagctggaggaaataaacgacgttactgttaggcattggataataggccatgaaagatacggatctattaaaaaaagaaaactaatcaggtaagctctgcaatcgccccagctttttccctgtagttccattcttgaccacagagcagggcatcccgggcagagcgcagctgcgcagcaatcttgctaaatggagcagaggtggagatgagaggagcaagggcagctgcgtgggagcactgccgaggagagcgctggcaggcacagaactccagacgtctatgtaagggtcctctgc

SEQ ID NO: 142532 - DNA, 36 bp, Homo sapiens; identical to SEQ ID NO: 16468
  chr2:113168034-113168070
  hypo

SEQ ID NO: 142533 - DNA, 31 bp, Homo sapiens; identical to SEQ ID NO: 63892
  chr2:113242120-113242151
  hypo

SEQ ID NO: 142534 - DNA, 30 bp, Homo sapiens
  chr2:113251527-113251557
  hypo
catctaacagctgtgcgctccccaataacg

SEQ ID NO: 142535 - DNA, 189 bp, Homo sapiens; identical to SEQ ID NO: 16469
  chr2:113286634-113286823
  hypo

SEQ ID NO: 142536 - DNA, 30 bp, Homo sapiens
  chr2:113331315-113331345
  hypo
gcaaaactgcagtacggagatccgtattac

SEQ ID NO: 142537 - DNA, 45 bp, Homo sapiens; identical to SEQ ID NO: 63894
  chr2:113349168-113349213
  hypo

SEQ ID NO: 142538 - DNA, 30 bp, Homo sapiens
  chr2:113400328-113400358
  hypo
gacggcctctgaagccgcctttgttcctgg

SEQ ID NO: 142539 - DNA, 30 bp, Homo sapiens
  chr2:113446492-113446522
  hypo
tctgccgacagccatcgtgggtgttccgtc

SEQ ID NO: 142540 - DNA, 31 bp, Homo sapiens; identical to SEQ ID NO: 63895
  chr2:113451876-113451907
  hypo

SEQ ID NO: 142541 - DNA, 30 bp, Homo sapiens; identical to SEQ ID NO: 1753
  chr2:113469219-113469249
  hypo

SEQ ID NO: 142542 - DNA, 34 bp, Homo sapiens; identical to SEQ ID NO: 63897
  chr2:113494875-113494909
  hypo

SEQ ID NO: 142543 - DNA, 33 bp, Homo sapiens
  chr2:113498450-113498483
  hypo
ggctattcggggtgtcgccgtgacttgttccct

SEQ ID NO: 142544 - DNA, 30 bp, Homo sapiens
  chr2:113498792-113498822
  hypo
ctcgtagccagcccccgagactgctgtacg

SEQ ID NO: 142545 - DNA, 105 bp, Homo sapiens
  chr2:113611569-113611674
  hypo
tagaaatattgctgtcgtttttattccttgtggacatccagtcactcgtaaacaatgtgctgaagtggttgacaaatgtctcaagtggtacgcagtcattacttt

SEQ ID NO: 142546 - DNA, 30 bp, Homo sapiens
  chr2:113635151-113635181
  hypo
cagcagtcaaaggatcgtcccggtggaggt

SEQ ID NO: 142547 - DNA, 170 bp, Homo sapiens
  chr2:113707197-113707367
  hypo
gaacacacattccaaagtgcacgttaggttctttgcatggtcccagtctgagtgagtgtgggtgtgtaagttctccctgcggtaggatggtgtcctgtccagggctggtttctgacttgtgcgtgaacgttaataggttctggtcacccgagatcctgaactggaacaag

SEQ ID NO: 142548 - DNA, 32 bp, Homo sapiens; identical to SEQ ID NO: 16472
  chr2:113804065-113804097
  hypo

SEQ ID NO: 142549 - DNA, 30 bp, Homo sapiens; identical to SEQ ID NO: 63900
  chr2:113808515-113808545
  hypo

SEQ ID NO: 142550 - DNA, 30 bp, Homo sapiens; identical to SEQ ID NO: 16473
  chr2:113830176-113830206
  hypo

SEQ ID NO: 142551 - DNA, 87 bp, Homo sapiens; identical to SEQ ID NO: 63902
  chr2:113908443-113908530
  hypo

SEQ ID NO: 142552 - DNA, 30 bp, Homo sapiens
  chr2:113959596-113959626
  hypo
tctgggcagggacctcggggggcttcaagg

SEQ ID NO: 142553 - DNA, 30 bp, Homo sapiens; identical to SEQ ID NO: 63903
  chr2:113959946-113959976
  hypo

SEQ ID NO: 142554 - DNA, 343 bp, Homo sapiens
  chr2:113967315-113967658
  hypo
accgccctgcaagcccgtcccaggctgggcagccgcgtgtggtgctaggaaatgccactggcatttgaggcgtttgaggtgctgtccccacacgtgccttggccctgtgggggcctccagccaggcggggacctgggagagggagggagaggataagccgcttcgaaactccagatgcagcagttaaaaagaggacagaggcaatgatccttcaaattgccacatctgtataatctgccttttattttctgcttcatgaagttttatttcctattatttattcacctccccgccctcccctcccccgcctccactcctccttagcaggcgacatgctcagatg

SEQ ID NO: 142555 - DNA, 189 bp, Homo sapiens; identical to SEQ ID NO: 63904
  chr2:113973330-113973519
  hypo

SEQ ID NO: 142556 - DNA, 31 bp, Homo sapiens; identical to SEQ ID NO: 16475
  chr2:113975770-113975801
  hypo

SEQ ID NO: 142557 - DNA, 112 bp, Homo sapiens; identical to SEQ ID NO: 63906
  chr2:114060816-114060928
  hypo

SEQ ID NO: 142558 - DNA, 31 bp, Homo sapiens
  chr2:114151326-114151357
  hypo
aaaaacagtattgctggccaccgcgccggcg

SEQ ID NO: 142559 - DNA, 30 bp, Homo sapiens; identical to SEQ ID NO: 63907
  chr2:114430269-114430299
  hypo

SEQ ID NO: 142560 - DNA, 68 bp, Homo sapiens
  chr2:114467012-114467080
  hypo
agagtgagggaaggacggaccatgggagtcagcatttttcaagcatccaggcacgctgggcctggtat

SEQ ID NO: 142561 - DNA, 31 bp, Homo sapiens; identical to SEQ ID NO: 63908
  chr2:114469901-114469932
  hypo

SEQ ID NO: 142562 - DNA, 30 bp, Homo sapiens
  chr2:114470171-114470201
  hypo
gtgagccaccacgcccggcccaaaagcatt

SEQ ID NO: 142563 - DNA, 22 bp, Homo sapiens
  chr2:114511584-114511606
  hypo
ttggccaggtgaggtggctcac

SEQ ID NO: 142564 - DNA, 88 bp, Homo sapiens; identical to SEQ ID NO: 16478
  chr2:114515439-114515527
  hypo

SEQ ID NO: 142565 - DNA, 30 bp, Homo sapiens
  chr2:114600888-114600918
  hypo
agatagccagccgtccgcaaaacgctgcag

SEQ ID NO: 142566 - DNA, 32 bp, Homo sapiens; identical to SEQ ID NO: 63912
  chr2:114736318-114736350
  hypo

SEQ ID NO: 142567 - DNA, 692 bp, Homo sapiens; identical to SEQ ID NO: 63913
  chr2:114736469-114737161
  hypo

SEQ ID NO: 142568 - DNA, 31 bp, Homo sapiens; identical to SEQ ID NO: 16480
  chr2:114737398-114737429
  hypo

SEQ ID NO: 142569 - DNA, 27 bp, Homo sapiens
  chr2:115153911-115153938
  hypo
aacgattaagaccgttttttgtttctg

SEQ ID NO: 142570 - DNA, 44 bp, Homo sapiens
  chr2:115183212-115183256
  hypo
gaacagtcaggaaaggagaagcgtattgaaagtgcaaattgagg

SEQ ID NO: 142571 - DNA, 237 bp, Homo sapiens; identical to SEQ ID NO: 37896
  chr2:115918655-115918892
  hypo

SEQ ID NO: 142572 - DNA, 38 bp, Homo sapiens; identical to SEQ ID NO: 63916
  chr2:118628527-118628565
  hypo

SEQ ID NO: 142573 - DNA, 80 bp, Homo sapiens; identical to SEQ ID NO: 63917
  chr2:118736285-118736365
  hypo

SEQ ID NO: 142574 - DNA, 146 bp, Homo sapiens; identical to SEQ ID NO: 63918
  chr2:118743610-118743756
  hypo

SEQ ID NO: 142575 - DNA, 86 bp, Homo sapiens
  chr2:118743815-118743901
  hypo
ctgccaacagctctgcctctaccgtggggtatattttaaaattatacacttgcacacatatatatcctaaacgaaatacgtggcat

SEQ ID NO: 142576 - DNA, 30 bp, Homo sapiens
  chr2:118755084-118755114
  hypo
taacactgtgctgcacggtgttcccgcaga

SEQ ID NO: 142577 - DNA, 30 bp, Homo sapiens
  chr2:118775299-118775329
  hypo
ccaggcgtgagccaccgctcccagccggaa

SEQ ID NO: 142578 - DNA, 24 bp, Homo sapiens
  chr2:118871218-118871242
  hypo
cccgcctcagcctcccaaagtgct

SEQ ID NO: 142579 - DNA, 44 bp, Homo sapiens; identical to SEQ ID NO: 63920
  chr2:118875672-118875716
  hypo

SEQ ID NO: 142580 - DNA, 30 bp, Homo sapiens; identical to SEQ ID NO: 16482
  chr2:118942465-118942495
  hypo

SEQ ID NO: 142581 - DNA, 68 bp, Homo sapiens
  chr2:119028305-119028373
  hypo
gaatgtcccgattctcgctcctccgcctggagcctgaactgtccctcggtaagcgccaactgaacagc

SEQ ID NO: 142582 - DNA, 876 bp, Homo sapiens; identical to SEQ ID NO: 106572
  chr2:119613016-119613892
  hypo

SEQ ID NO: 142583 - DNA, 347 bp, Homo sapiens; identical to SEQ ID NO: 106577
  chr2:119769049-119769396
  hypo

SEQ ID NO: 142584 - DNA, 101 bp, Homo sapiens; identical to SEQ ID NO: 37939
  chr2:119916524-119916625
  hypo

SEQ ID NO: 142585 - DNA, 30 bp, Homo sapiens
  chr2:119989193-119989223
  hypo
cagacgaaacttgcgcgcacgtgtatttct

SEQ ID NO: 142586 - DNA, 31 bp, Homo sapiens; identical to SEQ ID NO: 16484
  chr2:119997107-119997138
  hypo

SEQ ID NO: 142587 - DNA, 186 bp, Homo sapiens
  chr2:120003177-120003363
  hypo
agcggggactttgcccgctccctggccacacgcctggtgggctctggcttcaaagtggtggtggggagccgcaaccccaaacgcacagccaggctgtttccctcagcggcccaagtgactttccaagaggaggcagtgagctccccggaggtcatctttgtggctgtgttccgggagcactactct

SEQ ID NO: 142588 - DNA, 575 bp, Homo sapiens; identical to SEQ ID NO: 16485
  chr2:120005201-120005776
  hypo

SEQ ID NO: 142589 - DNA, 30 bp, Homo sapiens; identical to SEQ ID NO: 63926
  chr2:120007861-120007891
  hypo

SEQ ID NO: 142590 - DNA, 151 bp, Homo sapiens; identical to SEQ ID NO: 16486
  chr2:120011807-120011958
  hypo

SEQ ID NO: 142591 - DNA, 31 bp, Homo sapiens; identical to SEQ ID NO: 63928
  chr2:120012442-120012473
  hypo

SEQ ID NO: 142592 - DNA, 251 bp, Homo sapiens; identical to SEQ ID NO: 63929
  chr2:120020671-120020922
  hypo

SEQ ID NO: 142593 - DNA, 30 bp, Homo sapiens; identical to SEQ ID NO: 16488
  chr2:120023906-120023936
  hypo

SEQ ID NO: 142594 - DNA, 83 bp, Homo sapiens; identical to SEQ ID NO: 16489
  chr2:120069740-120069823
  hypo

SEQ ID NO: 142595 - DNA, 30 bp, Homo sapiens
  chr2:120081117-120081147
  hypo
ctcaccccggctgcacgtcaggatcaccca

SEQ ID NO: 142596 - DNA, 36 bp, Homo sapiens
  chr2:120230475-120230511
  hypo
ataggtgtaagccgccacacccggccaaaagcaaac

SEQ ID NO: 142597 - DNA, 30 bp, Homo sapiens
  chr2:120230756-120230786
  hypo
gcacccccagtctcgcggtggtatgcgaca

SEQ ID NO: 142598 - DNA, 185 bp, Homo sapiens; identical to SEQ ID NO: 16490
  chr2:120247826-120248011
  hypo

SEQ ID NO: 142599 - DNA, 163 bp, Homo sapiens; identical to SEQ ID NO: 63933
  chr2:120282305-120282468
  hypo

SEQ ID NO: 142600 - DNA, 19 bp, Homo sapiens
  chr2:120315524-120315543
  hypo
actccgtctcaaaaaaaaa

SEQ ID NO: 142601 - DNA, 240 bp, Homo sapiens
  chr2:120317341-120317581
  hypo
tgtaagaaaggtaagcgtcattggtttacctgttctcccacggtgtggttgtctgcgtctcaggcctgtgtggggtggggggtgtgtggtgtgttgtcacccccggtgctgctctctgtgcagtccggggcttgtcccaacaagatgccacctgtcttccaggaacaccacctggtccctggcttgtccctcacggtcaccgttacattttctccagatgagtggcgatactattatgac

SEQ ID NO: 142602 - DNA, 30 bp, Homo sapiens
  chr2:120317818-120317848
  hypo
gacagagtcaggagacgcggtttgctgcag

SEQ ID NO: 142603 - DNA, 30 bp, Homo sapiens
  chr2:120436007-120436037
  hypo
ggccctgccataggccgcctggtgacccac

SEQ ID NO: 142604 - DNA, 42 bp, Homo sapiens
  chr2:120441329-120441371
  hypo
gtgtgtatgtgtgtgcgtgtgtgtgcgcgtgcattgctccgc

SEQ ID NO: 142605 - DNA, 30 bp, Homo sapiens
  chr2:120441887-120441917
  hypo
aactgttcactcacacgttgcttctcccag

SEQ ID NO: 142606 - DNA, 162 bp, Homo sapiens; identical to SEQ ID NO: 63935
  chr2:120754213-120754375
  hypo

SEQ ID NO: 142607 - DNA, 23 bp, Homo sapiens
  chr2:120769505-120769528
  hypo
tgagactgagtctggctttgtcg

SEQ ID NO: 142608 - DNA, 22 bp, Homo sapiens
  chr2:120769767-120769789
  hypo
gagccaccgcgcccagccaaat

SEQ ID NO: 142609 - DNA, 129 bp, Homo sapiens; identical to SEQ ID NO: 1791
  chr2:120770808-120770937
  hypo

SEQ ID NO: 142610 - DNA, 218 bp, Homo sapiens; identical to SEQ ID NO: 106596
  chr2:120770966-120771184
  hypo

SEQ ID NO: 142611 - DNA, 79 bp, Homo sapiens; identical to SEQ ID NO: 63939
  chr2:120973476-120973555
  hypo

SEQ ID NO: 142612 - DNA, 679 bp, Homo sapiens; identical to SEQ ID NO: 63940
  chr2:120973770-120974449
  hypo

SEQ ID NO: 142613 - DNA, 30 bp, Homo sapiens; identical to SEQ ID NO: 63941
  chr2:120976020-120976050
  hypo

SEQ ID NO: 142614 - DNA, 30 bp, Homo sapiens
  chr2:120977583-120977613
  hypo
gtgagagagacagagcgagctccctcagac

SEQ ID NO: 142615 - DNA, 544 bp, Homo sapiens; identical to SEQ ID NO: 16497
  chr2:120979867-120980411
  hypo

SEQ ID NO: 142616 - DNA, 102 bp, Homo sapiens; identical to SEQ ID NO: 16498
  chr2:120982087-120982189
  hypo

SEQ ID NO: 142617 - DNA, 173 bp, Homo sapiens; identical to SEQ ID NO: 63944
  chr2:120987005-120987178
  hypo

SEQ ID NO: 142618 - DNA, 76 bp, Homo sapiens
  chr2:120995062-120995138
  hypo
acatgcgtgtgcacacgcacacatgggcatgaatgtgggtacgaggcatgtgtgctccacacgctgacttcactgg

SEQ ID NO: 142619 - DNA, 30 bp, Homo sapiens
  chr2:120996329-120996359
  hypo
ggtgcggggcactgtcgggggcagccggag

SEQ ID NO: 142620 - DNA, 47 bp, Homo sapiens
  chr2:120996939-120996986
  hypo
tcctctggatgcccccgctcctcctggcgccccgtgagggtctgtgt

SEQ ID NO: 142621 - DNA, 30 bp, Homo sapiens; identical to SEQ ID NO: 16499
  chr2:121035758-121035788
  hypo

SEQ ID NO: 142622 - DNA, 254 bp, Homo sapiens
  chr2:121036316-121036570
  hypo
gcaagtcagccctgacgcttcagttcatgtatgacgaggtaagccctgctaggcacagaccaccttcctttggcattggccgtagcagtgtccctgctcccgctgtttctgtgccggtcctcccgtacacaggggttcacggagcaagtctgtgttgaggtggcttctgaatagcttcctaggaaggtctaatcagcataagatctggattgctgattctaggtaaataatttcaactccggcggggatgtgag

SEQ ID NO: 142623 - DNA, 285 bp, Homo sapiens; identical to SEQ ID NO: 16500
  chr2:121058174-121058459
  hypo

SEQ ID NO: 142624 - DNA, 265 bp, Homo sapiens; identical to SEQ ID NO: 16501
  chr2:121108589-121108854
  hypo

SEQ ID NO: 142625 - DNA, 31 bp, Homo sapiens; identical to SEQ ID NO: 63948
  chr2:121109323-121109354
  hypo

SEQ ID NO: 142626 - DNA, 524 bp, Homo sapiens; identical to SEQ ID NO: 63949
  chr2:121116364-121116888
  hypo

SEQ ID NO: 142627 - DNA, 31 bp, Homo sapiens; identical to SEQ ID NO: 16502
  chr2:121136846-121136877
  hypo

SEQ ID NO: 142628 - DNA, 30 bp, Homo sapiens; identical to SEQ ID NO: 16503
  chr2:121137649-121137679
  hypo

SEQ ID NO: 142629 - DNA, 124 bp, Homo sapiens
  chr2:121157065-121157189
  hypo
gtccctcggggcacccggaagctggcccttcgtcccagcctgggctggggctgactctcagagctgcgggtcctcacgtggaagatggacatgagactcgtgttctgaccgaaagagttgctgt

SEQ ID NO: 142630 - DNA, 30 bp, Homo sapiens
  chr2:121189984-121190014
  hypo
aagcccgccaggccacgccgccccacgcca

SEQ ID NO: 142631 - DNA, 242 bp, Homo sapiens
  chr2:121190384-121190626
  hypo
ctggcactttggccgcgagatctggaaggaatggagggaggctgggtctgcatgtggggcagtggcggctgtgaagctagaagtctcagggtcgccgccaaatgcggcaggccccaaatgagcacgctgggctcataaagctggcggctggcagggtggtgtccccttcacagccacaactcttcaagagcactcgtggctctggcctgcctggcctggccacacagcgcttgcaccacagc

SEQ ID NO: 142632 - DNA, 31 bp, Homo sapiens; identical to SEQ ID NO: 16504
  chr2:121210914-121210945
  hypo

SEQ ID NO: 142633 - DNA, 30 bp, Homo sapiens
  chr2:121230547-121230577
  hypo
ggcaagcatgaaccacgtcagtcccaccac

SEQ ID NO: 142634 - DNA, 135 bp, Homo sapiens; identical to SEQ ID NO: 16505
  chr2:121243024-121243159
  hypo

SEQ ID NO: 142635 - DNA, 30 bp, Homo sapiens; identical to SEQ ID NO: 37964
  chr2:121245106-121245136
  hypo

SEQ ID NO: 142636 - DNA, 18 bp, Homo sapiens
  chr2:121253110-121253128
  hypo
ctccgtctctaaaataaa

SEQ ID NO: 142637 - DNA, 137 bp, Homo sapiens
  chr2:121266976-121267113
  hypo
tgggcagggcttgggatcctgcgtaagtgtggaggctggagtgcatgccttggggatgccggagcctagctgtgctcggtgagagggaggctgcagggaaggaggatcgggatgccggtggagctgcttgatcctct

SEQ ID NO: 142638 - DNA, 21 bp, Homo sapiens
  chr2:121320352-121320373
  hypo
gggctgggccagacacggtga

SEQ ID NO: 142639 - DNA, 40 bp, Homo sapiens; identical to SEQ ID NO: 16506
  chr2:121327690-121327730
  hypo

SEQ ID NO: 142640 - DNA, 173 bp, Homo sapiens; identical to SEQ ID NO: 63958
  chr2:121381301-121381474
  hypo

SEQ ID NO: 142641 - DNA, 31 bp, Homo sapiens; identical to SEQ ID NO: 63959
  chr2:121411774-121411805
  hypo

SEQ ID NO: 142642 - DNA, 34 bp, Homo sapiens; identical to SEQ ID NO: 63960
  chr2:121436962-121436996
  hypo

SEQ ID NO: 142643 - DNA, 31 bp, Homo sapiens; identical to SEQ ID NO: 1800
  chr2:121438058-121438089
  hypo

SEQ ID NO: 142644 - DNA, 71 bp, Homo sapiens
  chr2:121444216-121444287
  hypo
taccgtccagcctgccgcagcccattctttgatgatcatttcacctgctgtgcgcacggctcctcaagctt

SEQ ID NO: 142645 - DNA, 31 bp, Homo sapiens; identical to SEQ ID NO: 63962
  chr2:121534939-121534970
  hypo

SEQ ID NO: 142646 - DNA, 97 bp, Homo sapiens; identical to SEQ ID NO: 16508
  chr2:121542640-121542737
  hypo

SEQ ID NO: 142647 - DNA, 232 bp, Homo sapiens
  chr2:121549383-121549615
  hypo
tctgtgactttaatgcggtgtgcacgtgtgtgtgtggcctgcgtgcaggtgtatgcatgtgtgtggctgtgtatatggtttgtcggcgtatgttctgtgtgctgtgtgagtgtgtgagcctgcgtgtgtgtgtgcatccatgtgtgcctatgcgtgtgggtcctgggcacgcatgccgcacgactgagatcacagcagaggtgagaacaccgtggctctgtggtggctgtga

SEQ ID NO: 142648 - DNA, 101 bp, Homo sapiens
  chr2:121549850-121549951
  hypo
caagcaagtgaagttcgtggactcctacaataatgctataaatgcatagaagaaaagacacaggactgtgaaagaaagtgatgatgcgatgtctaaaacgt

SEQ ID NO: 142649 - DNA, 212 bp, Homo sapiens; identical to SEQ ID NO: 63964
  chr2:121550759-121550971
  hypo

SEQ ID NO: 142650 - DNA, 30 bp, Homo sapiens
  chr2:121557156-121557186
  hypo
agtgctggtaaaatgcgacggctgcattcg

SEQ ID NO: 142651 - DNA, 30 bp, Homo sapiens
  chr2:121557761-121557791
  hypo
ccgcagggtgcaccccgggtggatgcaagg

SEQ ID NO: 142652 - DNA, 30 bp, Homo sapiens; identical to SEQ ID NO: 16509
  chr2:121570259-121570289
  hypo

SEQ ID NO: 142653 - DNA, 140 bp, Homo sapiens; identical to SEQ ID NO: 16510
  chr2:121609722-121609862
  hypo

SEQ ID NO: 142654 - DNA, 53 bp, Homo sapiens
  chr2:121614059-121614112
  hypo
caccatcatgggcctcgttttaaagtggacctgcccaccgccccgatctccac

SEQ ID NO: 142655 - DNA, 81 bp, Homo sapiens
  chr2:121628104-121628185
  hypo
ggagtatggcctcagcggaggtgtgactgccagtgacacctgccggaatgtgaacttcacggatagcgctggctcacacct

SEQ ID NO: 142656 - DNA, 31 bp, Homo sapiens; identical to SEQ ID NO: 16511
  chr2:121688087-121688118
  hypo

SEQ ID NO: 142657 - DNA, 202 bp, Homo sapiens; identical to SEQ ID NO: 63968
  chr2:121692169-121692371
  hypo

SEQ ID NO: 142658 - DNA, 76 bp, Homo sapiens; identical to SEQ ID NO: 63969
  chr2:121708534-121708610
  hypo

SEQ ID NO: 142659 - DNA, 30 bp, Homo sapiens; identical to SEQ ID NO: 63970
  chr2:121708911-121708941
  hypo

SEQ ID NO: 142660 - DNA, 142 bp, Homo sapiens; identical to SEQ ID NO: 63971
  chr2:121711173-121711315
  hypo

SEQ ID NO: 142661 - DNA, 31 bp, Homo sapiens; identical to SEQ ID NO: 16512
  chr2:121723280-121723311
  hypo

SEQ ID NO: 142662 - DNA, 131 bp, Homo sapiens; identical to SEQ ID NO: 63973
  chr2:121726278-121726409
  hypo

SEQ ID NO: 142663 - DNA, 367 bp, Homo sapiens; identical to SEQ ID NO: 16514
  chr2:121742085-121742452
  hypo

SEQ ID NO: 142664 - DNA, 1126 bp, Homo sapiens; identical to SEQ ID NO: 16515
  chr2:121745648-121746774
  hypo

SEQ ID NO: 142665 - DNA, 31 bp, Homo sapiens; identical to SEQ ID NO: 63976
  chr2:121818463-121818494
  hypo

SEQ ID NO: 142666 - DNA, 31 bp, Homo sapiens; identical to SEQ ID NO: 63977
  chr2:121827342-121827373
  hypo

SEQ ID NO: 142667 - DNA, 31 bp, Homo sapiens; identical to SEQ ID NO: 16516
  chr2:121846109-121846140
  hypo

SEQ ID NO: 142668 - DNA, 43 bp, Homo sapiens; identical to SEQ ID NO: 16517
  chr2:121924777-121924820
  hypo

SEQ ID NO: 142669 - DNA, 198 bp, Homo sapiens
  chr2:121932345-121932543
  hypo
ctacacaagatggatgagcagcggtgagctcccctgactcacccactataagcccaccaccccaaaaatggtctcctgtcccttggcacaagtattccttccttcagcacgtgagacagacatgccctaacccccacccgacccgctttctgggaagccgacacaggggcttggccccggccacggtgcctgaggcct

SEQ ID NO: 142670 - DNA, 30 bp, Homo sapiens
  chr2:121944032-121944062
  hypo
agacagctctgtgcgcgtgcccgtggagca

SEQ ID NO: 142671 - DNA, 95 bp, Homo sapiens; identical to SEQ ID NO: 63980
  chr2:121962010-121962105
  hypo

SEQ ID NO: 142672 - DNA, 30 bp, Homo sapiens
  chr2:121969585-121969615
  hypo
gacagccccagtcagcgatgtgggagccgc

SEQ ID NO: 142673 - DNA, 333 bp, Homo sapiens
  chr2:121970082-121970415
  hypo
cgggcggggaacccccgcagtgcagtgcaggtggctttccggccctcctgaagattccgatgcactgggacaccacccagccactacaagccatgaataaaagcctcctgcctctcaccgctttaatatgtgccggggccattccaagctcttgaagtaaattcagctcatttactcgttataatcgtcctgcgaggcaggcacgagtattagtcctcgtggactaattttacggatgaggcaagcaaaacagaaaagttaggcgaccttgggcaaggtcacacagccggaggctgaatgagaagctaggcagttctccgctacatcaggggc

SEQ ID NO: 142674 - DNA, 209 bp, Homo sapiens; identical to SEQ ID NO: 63981
  chr2:121975956-121976165
  hypo

SEQ ID NO: 142675 - DNA, 31 bp, Homo sapiens; identical to SEQ ID NO: 16519
  chr2:121982627-121982658
  hypo

SEQ ID NO: 142676 - DNA, 31 bp, Homo sapiens; identical to SEQ ID NO: 16520
  chr2:122006602-122006633
  hypo

SEQ ID NO: 142677 - DNA, 162 bp, Homo sapiens
  chr2:122010687-122010849
  hypo
accacagctccccaccggccatgacactggccgagcacagccatgcccactgggtcagactccgtctcagccattaggaaggtctctggtcacatgccagtgaacacttcttgaccatgccaaaccccagtgctgctcatggtgacgcgctggacgcctttc

SEQ ID NO: 142678 - DNA, 254 bp, Homo sapiens
  chr2:122011447-122011701
  hypo
tctgcatgcctacccccgtgccaacacagtgggcccaaggtgacctcccacccaactcacacagcagcacaacagcaccatcccaaaagccacgcagaaggccaccacccacagtcacatacaggctgacgagcgaggtcacacaggctgaactgacctagggcacaagggcatttctctgcctggccgacatcactgctgggcgtgggtggaagccaggacagcgggctatgagaaggcgcgggtcgtgtctg

SEQ ID NO: 142679 - DNA, 18 bp, Homo sapiens
  chr2:122012149-122012167
  hypo
gattgcctgaggtcagga

SEQ ID NO: 142680 - DNA, 38 bp, Homo sapiens; identical to SEQ ID NO: 63986
  chr2:122013319-122013357
  hypo

SEQ ID NO: 142681 - DNA, 37 bp, Homo sapiens; identical to SEQ ID NO: 63987
  chr2:122013596-122013633
  hypo

SEQ ID NO: 142682 - DNA, 86 bp, Homo sapiens
  chr2:122094224-122094310
  hypo
cttatgcgagatgcccggaatagtcaaattcagagagagggaaagtagaatgctggttgccaggggccttgcgggaggcaggaatg

SEQ ID NO: 142683 - DNA, 290 bp, Homo sapiens; identical to SEQ ID NO: 63988
  chr2:122094601-122094891
  hypo

SEQ ID NO: 142684 - DNA, 107 bp, Homo sapiens; identical to SEQ ID NO: 63989
  chr2:122096091-122096198
  hypo

SEQ ID NO: 142685 - DNA, 89 bp, Homo sapiens; identical to SEQ ID NO: 16521
  chr2:122102163-122102252
  hypo

SEQ ID NO: 142686 - DNA, 30 bp, Homo sapiens; identical to SEQ ID NO: 63991
  chr2:122104163-122104193
  hypo

SEQ ID NO: 142687 - DNA, 210 bp, Homo sapiens; identical to SEQ ID NO: 63992
  chr2:122104563-122104773
  hypo

SEQ ID NO: 142688 - DNA, 30 bp, Homo sapiens
  chr2:122117831-122117861
  hypo
gcttcttattgagaacgaagctccaagaga

SEQ ID NO: 142689 - DNA, 104 bp, Homo sapiens; identical to SEQ ID NO: 63993
  chr2:122118645-122118749
  hypo

SEQ ID NO: 142690 - DNA, 30 bp, Homo sapiens; identical to SEQ ID NO: 63994
  chr2:122125264-122125294
  hypo

SEQ ID NO: 142691 - DNA, 359 bp, Homo sapiens; identical to SEQ ID NO: 63995
  chr2:122187626-122187985
  hypo

SEQ ID NO: 142692 - DNA, 47 bp, Homo sapiens
  chr2:122260202-122260249
  hypo
atgacatcagaatggcggtgggtgccagatcacgcaaggcccagtgg

SEQ ID NO: 142693 - DNA, 32 bp, Homo sapiens; identical to SEQ ID NO: 63997
  chr2:122274304-122274336
  hypo

SEQ ID NO: 142694 - DNA, 30 bp, Homo sapiens; identical to SEQ ID NO: 16523
  chr2:122283865-122283895
  hypo

SEQ ID NO: 142695 - DNA, 262 bp, Homo sapiens; identical to SEQ ID NO: 16524
  chr2:122305113-122305375
  hypo

SEQ ID NO: 142696 - DNA, 238 bp, Homo sapiens
  chr2:122312634-122312872
  hypo
agttgtgggtggaaagcaacacggtctgtgcagacccagagtcctaatggagtcaagaactccctggagagctcacgctgcacacaaacctcagcaggtctctctgcggcccatgaatcctctgcagttttcctggatgtgctgtgctctcgcatgctcccgtctgcagcactgtgtgttctctctgctgtctgctcttgtgcctctttcaggactcgcttcaagcctcatcaactcc

SEQ ID NO: 142697 - DNA, 30 bp, Homo sapiens
  chr2:122342604-122342634
  hypo
actcttttaccctcacgacaaccctatgga

SEQ ID NO: 142698 - DNA, 31 bp, Homo sapiens; identical to SEQ ID NO: 16526
  chr2:122409687-122409718
  hypo

SEQ ID NO: 142699 - DNA, 30 bp, Homo sapiens
  chr2:122419710-122419740
  hypo
gtaacgtagcctggtcgcaagctccaaggt

SEQ ID NO: 142700 - DNA, 30 bp, Homo sapiens
  chr2:122468130-122468160
  hypo
aaggtggtggaggagcgtggttgtgggagg

SEQ ID NO: 142701 - DNA, 30 bp, Homo sapiens; identical to SEQ ID NO: 64002
  chr2:122495527-122495557
  hypo

SEQ ID NO: 142702 - DNA, 32 bp, Homo sapiens; identical to SEQ ID NO: 16527
  chr2:122497729-122497761
  hypo

SEQ ID NO: 142703 - DNA, 91 bp, Homo sapiens
  chr2:122498000-122498091
  hypo
gcgacagagcaagattctgtctcaaaacaaaacaaaacaaagatgaggtcctgttgggtttgcgttagctgtaaaccgtgactagtgtcct

SEQ ID NO: 142704 - DNA, 30 bp, Homo sapiens; identical to SEQ ID NO: 64004
  chr2:122498308-122498338
  hypo

SEQ ID NO: 142705 - DNA, 156 bp, Homo sapiens; identical to SEQ ID NO: 64005
  chr2:122511907-122512063
  hypo

SEQ ID NO: 142706 - DNA, 24 bp, Homo sapiens
  chr2:122523884-122523908
  hypo
tataaataagtcaggccgggcgtg

SEQ ID NO: 142707 - DNA, 99 bp, Homo sapiens; identical to SEQ ID NO: 64007
  chr2:122783864-122783963
  hypo

SEQ ID NO: 142708 - DNA, 321 bp, Homo sapiens
  chr2:122976045-122976366
  hypo
gaagcctgaggatgacggacacgtggagcagacctggagtgaaccccaggtgtggccaacccagcagacccacagaccagagtgagaaataatactgtcacgcggcagagattttgtgttgttttgctgcaaaaactgactggtacctggggagatgtgatgatgatgatggagtgtagcaatagcatcacatatggagggggtcagaggggtgtgatgaatggcatctttccccgggcacagcggcagctgctttggtccctgcatagcacgtctcgctctggtggggagctggatttgctccagcgctccctgctctgc

SEQ ID NO: 142709 - DNA, 30 bp, Homo sapiens
  chr2:122976770-122976800
  hypo
cgcaccgttagggagcggaaggccgtcctc

SEQ ID NO: 142710 - DNA, 30 bp, Homo sapiens
  chr2:122998738-122998768
  hypo
taccagctccctgatcgctccagtctggtg

SEQ ID NO: 142711 - DNA, 30 bp, Homo sapiens
  chr2:124281583-124281613
  hypo
agtggtgatgttggacgcaactgggaaaat

SEQ ID NO: 142712 - DNA, 104 bp, Homo sapiens; identical to SEQ ID NO: 64008
  chr2:124441078-124441182
  hypo

SEQ ID NO: 142713 - DNA, 102 bp, Homo sapiens; identical to SEQ ID NO: 64009
  chr2:125119893-125119995
  hypo

SEQ ID NO: 142714 - DNA, 30 bp, Homo sapiens
  chr2:127241081-127241111
  hypo
gttcgtggatttatccgagactttttagct

SEQ ID NO: 142715 - DNA, 30 bp, Homo sapiens
  chr2:127315808-127315838
  hypo
cggcggcggcagcagcggcgaggctgagac

SEQ ID NO: 142716 - DNA, 381 bp, Homo sapiens; identical to SEQ ID NO: 37979
  chr2:127413346-127413727
  hypo

SEQ ID NO: 142717 - DNA, 26 bp, Homo sapiens
  chr2:127413969-127413995
  hypo
cggacgccctggtgtcccggtccgtg

SEQ ID NO: 142718 - DNA, 266 bp, Homo sapiens; identical to SEQ ID NO: 37981
  chr2:127414108-127414374
  hypo

SEQ ID NO: 142719 - DNA, 67 bp, Homo sapiens
  chr2:127423249-127423316
  hypo
gcactacagcagactcggcacaggtgcctggggctgtgcacgccctggcaagcgcccactctgccct

SEQ ID NO: 142720 - DNA, 30 bp, Homo sapiens
  chr2:127426501-127426531
  hypo
ttcaggtttcggatcgaattgcctatgact

SEQ ID NO: 142721 - DNA, 280 bp, Homo sapiens
  chr2:127428872-127429152
  hypo
ctcactgggcaggtgccggagggagagccagagcaggtgcaagcatgcgaggcaggcttccctgagcccgacagccagggacaaccagctaacacccaagttcagaaaacagtgctttatcacaggcacgagcacaggggagcaacctctccacgcacggggccaggtgtcagctgtgcacttgcatgcttccttattggaacctctccctaccgggaggccatcattagatttggagatggagcctcgggggtcaatgtgtgtccgtattcttccagtc

SEQ ID NO: 142722 - DNA, 285 bp, Homo sapiens
  chr2:127435251-127435536
  hypo
gtatgtgttgcctgccgtaatccttcgctagggatgagcacacgagggtccgggaggggtgcttggagttgggacccagagcaccaggacttactgtcaaatctctctggcaccaaaacgcatgctccctatgccacctatcaggatgcacccttaaagcacttttaagatgctttttggaaagagccatttgttggtgtgcatttgtcttcaccactgccccaaacatagctgtccaatattcaggtgaaaatgtcccccatcggccgggtgcagcggctcacg

SEQ ID NO: 142723 - DNA, 315 bp, Homo sapiens
  chr2:127438525-127438840
  hypo
gcgggcaggtcagggcggcgggaagggaccttaacagaccttctagtcggcgactttgaagattcttcaagacaatagccagttctgaagattcatccccgtttcttcactgtaaaaataacacgttttttgtagatgacttggaaaatacagacagccatatgttagaagtaaacaaaaccactcctaacccgtctacttcttaaaagccggtacttaacatttgaagcgtatttcttttcatcgctttgttttaaggtttttgtggaatatttttcatcatttctatttagagggtcccgttttcttcactta

SEQ ID NO: 142724 - DNA, 30 bp, Homo sapiens; identical to SEQ ID NO: 1805
  chr2:127464270-127464300
  hypo

SEQ ID NO: 142725 - DNA, 770 bp, Homo sapiens; identical to SEQ ID NO: 106635
  chr2:127534436-127535206
  hypo

SEQ ID NO: 142726 - DNA, 30 bp, Homo sapiens
  chr2:127644700-127644730
  hypo
tttcttcccgggcagcgcatggtccaattt

SEQ ID NO: 142727 - DNA, 30 bp, Homo sapiens
  chr2:127704122-127704152
  hypo
tccaattccacacaacgctgcctaagtcaa

SEQ ID NO: 142728 - DNA, 30 bp, Homo sapiens
  chr2:127704778-127704808
  hypo
tgtgcctgggcacggcgcgtagtgtgtaat

SEQ ID NO: 142729 - DNA, 315 bp, Homo sapiens
  chr2:127734330-127734645
  hypo
ctgctcgacgggaggcgagaagagacctcacagccagaagagggggagctgcccctgctggccctgccctgcccgactcacgcagcgaggtgccgcatcagactgaaatgtaattagagtgtaatgcaagccaggacgcgcggagactcttaattgaaaattccatttccagccccatcacggctcacagcgccgatgctatcagagatagacgcggccagcacccgcagctcagccccacacaccccacccagccagcaccaccccgccactgccccccacttcgtgctgcagggcctgcgccaggccacgtca

SEQ ID NO: 142730 - DNA, 293 bp, Homo sapiens
  chr2:127801057-127801350
  hypo
caagcctccaaacagcgcagccgaggaggggctcagccgtctaccctgtctccagcggaggagcttctgagaccaggagcgggggccgtcgggtgagcattcccctggaacacgaaggagcaaacctgcccggctgcattccgccctcccgctgccctaggcccgctataggctggataaagtgaaccaagcaagggtcccagaaacgtcacacgtgaactcgcccattcacactcacccattcccatgcacactggccattcactcagccattcacacgtgcacacattcgc

SEQ ID NO: 142731 - DNA, 30 bp, Homo sapiens; identical to SEQ ID NO: 16532
  chr2:127815118-127815148
  hypo

SEQ ID NO: 142732 - DNA, 31 bp, Homo sapiens; identical to SEQ ID NO: 16533
  chr2:127816629-127816660
  hypo

SEQ ID NO: 142733 - DNA, 31 bp, Homo sapiens; identical to SEQ ID NO: 64022
  chr2:127827840-127827871
  hypo

SEQ ID NO: 142734 - DNA, 40 bp, Homo sapiens; identical to SEQ ID NO: 64023
  chr2:127855674-127855714
  hypo

SEQ ID NO: 142735 - DNA, 942 bp, Homo sapiens; identical to SEQ ID NO: 106641
  chr2:127863361-127864303
  hypo

SEQ ID NO: 142736 - DNA, 30 bp, Homo sapiens
  chr2:127895051-127895081
  hypo
agagaatgttgctgccgggggcctgtccct

SEQ ID NO: 142737 - DNA, 271 bp, Homo sapiens
  chr2:127895378-127895649
  hypo
cccattccttgaggccgcctcccatagagccactccgcacgcgtgggggtgtgggcacggcctaccctgctggccacaggacagagtgctgggcacatctcctcagccgcgctcgcagacagctgtcttccaagttcagggtgggacgcaggtcactggtcaccaccactcgcccagcagacaggctgagcctagttatgcagcagcaccagccagtgaggaggaacacctttgagaacatcctgtcatgaaccctcgcccaaacggactt

SEQ ID NO: 142738 - DNA, 174 bp, Homo sapiens; identical to SEQ ID NO: 64026
  chr2:127895961-127896135
  hypo

SEQ ID NO: 142739 - DNA, 216 bp, Homo sapiens
  chr2:127933495-127933711
  hypo
ccgtgagctgtgatccgatcaaccacgcctacataatgaaacccagtaagaactccagacgtcacagctccggtgagtttccctgggcgacagcactctgtgcaccgtcacacacaatgtgcgggaagacagtcgtgtctgggaatgacggaagcttcgtgtttgggacactcccaggcctcactcatgcatctttcccttcggctggttctgact

SEQ ID NO: 142740 - DNA, 30 bp, Homo sapiens
  chr2:127933960-127933990
  hypo
taaacagtcctgccacgactgtttcaatgc

SEQ ID NO: 142741 - DNA, 31 bp, Homo sapiens; identical to SEQ ID NO: 64028
  chr2:128029535-128029566
  hypo

SEQ ID NO: 142742 - DNA, 30 bp, Homo sapiens
  chr2:128046252-128046282
  hypo
acccccgaacgtgcacgcccgtttccaaac

SEQ ID NO: 142743 - DNA, 193 bp, Homo sapiens; identical to SEQ ID NO: 16534
  chr2:128127765-128127958
  hypo

SEQ ID NO: 142744 - DNA, 243 bp, Homo sapiens
  chr2:128128832-128129075
  hypo
acaagccaaccagaacgaggtggccgtgcaagatgtaacagctgctatgctccaggggaggcgtccccatgccgatgtacaacaactaattttgatccccaggcctatgcacaagtgtctttgtgcgctctcggggcttgggacagaatttccaaaagcagagatcaacagggatcttttataaatgttcgacaagggcctcaggagccatttgttgaatttatcaatcgtttaacccaggca

SEQ ID NO: 142745 - DNA, 647 bp, Homo sapiens
  chr2:128158416-128159063
  hypo
ggcccctctgctgctgggaaccgggcgcactcccgccagtcgcaggagctggctccacccgccccttctgatccagtgtcccgcagtcctgcccgcttcaccgccctcgcctagcccccgcgggtggtaaaagtccagcccggcggagcgcccctgcctccttccacgcccctggcctgccctgcgcagctacgcccagcccgcgtccatcccggaccatcctgttgaaggcagtcccctggcacgcagggctgggagctcttagctgaggatggaaccgactgcaccaggagccgctgggaggaaggccgaggggcgcagaggagaggcaaggaaaaaacagcagcccaagaatcgggcctccctgttacagcaggagtcgcatctatttatatatgttatgtcttattgctcagcaaccagctctcggccggggcgtgggccgggaagaggggtctcctggtgcagcgggttggcgtgactcatcaccgccgcgcactctggcctctgggcctaggttaacagactcccgggtttcaggctgggcccaggcggccaggccctccctgctgaggaatctgggttggggcagtgccagctccctgcttctcacctggccacagaaggggtagcgggaggagcgtggg

SEQ ID NO: 142746 - DNA, 30 bp, Homo sapiens
  chr2:128186243-128186273
  hypo
cacaatgagtgcagcgaggtcatgagcaac

SEQ ID NO: 142747 - DNA, 46 bp, Homo sapiens
  chr2:128214275-128214321
  hypo
gaaagcaccgatatgcgcatcttttttttttttttttttttttttt

SEQ ID NO: 142748 - DNA, 79 bp, Homo sapiens; identical to SEQ ID NO: 16536
  chr2:128273730-128273809
  hypo

SEQ ID NO: 142749 - DNA, 78 bp, Homo sapiens; identical to SEQ ID NO: 16537
  chr2:128273868-128273946
  hypo

SEQ ID NO: 142750 - DNA, 30 bp, Homo sapiens; identical to SEQ ID NO: 64033
  chr2:128285594-128285624
  hypo

SEQ ID NO: 142751 - DNA, 30 bp, Homo sapiens
  chr2:128290058-128290088
  hypo
taggttgtccatgggcgcatttcagctcag

SEQ ID NO: 142752 - DNA, 32 bp, Homo sapiens; identical to SEQ ID NO: 64034
  chr2:128292846-128292878
  hypo

SEQ ID NO: 142753 - DNA, 64 bp, Homo sapiens; identical to SEQ ID NO: 64035
  chr2:128293881-128293945
  hypo

SEQ ID NO: 142754 - DNA, 84 bp, Homo sapiens; identical to SEQ ID NO: 64036
  chr2:128306300-128306384
  hypo

SEQ ID NO: 142755 - DNA, 30 bp, Homo sapiens
  chr2:128331339-128331369
  hypo
cgggcgcttggcttccgtcactgtctggtg

SEQ ID NO: 142756 - DNA, 31 bp, Homo sapiens; identical to SEQ ID NO: 64037
  chr2:128338346-128338377
  hypo

SEQ ID NO: 142757 - DNA, 30 bp, Homo sapiens; identical to SEQ ID NO: 64038
  chr2:128350291-128350321
  hypo

SEQ ID NO: 142758 - DNA, 30 bp, Homo sapiens; identical to SEQ ID NO: 16538
  chr2:128350733-128350763
  hypo

SEQ ID NO: 142759 - DNA, 30 bp, Homo sapiens; identical to SEQ ID NO: 64040
  chr2:128366309-128366339
  hypo

SEQ ID NO: 142760 - DNA, 30 bp, Homo sapiens
  chr2:128398472-128398502
  hypo
ggttgtagtgagtctcgcagtaggccaggc

SEQ ID NO: 142761 - DNA, 188 bp, Homo sapiens
  chr2:128398929-128399117
  hypo
cctcataggcagaggcggccctgcctgtccacgtggggcctcctgcaggcaccccctgcaagcctgggatcactgagcagcaccttgcattcccccagggatctgcatgtgaggatgagggctgggggctggggcctgcatcagggcaggaccgcatggcctcccacccaagccgccacccaaggcac

SEQ ID NO: 142762 - DNA, 366 bp, Homo sapiens
  chr2:128402977-128403343
  hypo
ttgttcactcagtctcagaggcggccgccggcagcattcaaaggcaccccagcccggagccaccccagggaggagccccaggccagcggtcagattcatgggcttccgtgcagaaggggagctgcaccggcgagcacccggcctctgagctgagccgcatcctcacggacaggacagcgccccattatgaggctcctgcagctgttcctcgctccagataaaggccatgatttattctgtgtgcccaaatggggcctcattatacagggcaggacacaaggaccctacagcaagtgtcctcaaagagtcgcctctcactccgtgagcaagactcctcggcctcccaccctccgttcacaggccccc

SEQ ID NO: 142763 - DNA, 30 bp, Homo sapiens; identical to SEQ ID NO: 64042
  chr2:128403695-128403725
  hypo

SEQ ID NO: 142764 - DNA, 129 bp, Homo sapiens
  chr2:128415008-128415137
  hypo
agcactgggcacacacgaagcagtgctcatggtacagctccccattgctgttgacaatgcgctcggcgggggagaagcgggcctggcagcgctggcacacggcgttggccaaggcgtccgacatattgc

SEQ ID NO: 142765 - DNA, 70 bp, Homo sapiens
  chr2:128434219-128434289
  hypo
gtgatccgactgtctcgagttattacttcttgttgcgagcgtgtctcagctgattcggcttaactgtaat

SEQ ID NO: 142766 - DNA, 106 bp, Homo sapiens; identical to SEQ ID NO: 1817
  chr2:128459398-128459504
  hypo

SEQ ID NO: 142767 - DNA, 30 bp, Homo sapiens
  chr2:128471478-128471508
  hypo
agtcctggccaccccggaaaggccccctct

SEQ ID NO: 142768 - DNA, 33 bp, Homo sapiens; identical to SEQ ID NO: 16541
  chr2:128472922-128472955
  hypo

SEQ ID NO: 142769 - DNA, 25 bp, Homo sapiens
  chr2:128487353-128487378
  hypo
ccactgcacccggccaactattcat

SEQ ID NO: 142770 - DNA, 30 bp, Homo sapiens; identical to SEQ ID NO: 16543
  chr2:128549955-128549985
  hypo

SEQ ID NO: 142771 - DNA, 219 bp, Homo sapiens
  chr2:128583665-128583884
  hypo
gaaagtgctgggattacaggtgtgagccgctgcgcgtcaccaccaatccattttctccaggacctctctctgtgcagagagctcttctctttcacctattaaacttccactctgaacctcactctttgtatatccgcatcctagtgttctgtggctttagacaaggaacctcgagtatttacccaagacgatgatatcgtttcattggcagctcagata

SEQ ID NO: 142772 - DNA, 85 bp, Homo sapiens; identical to SEQ ID NO: 64048
  chr2:128600134-128600219
  hypo

SEQ ID NO: 142773 - DNA, 24 bp, Homo sapiens
  chr2:128600518-128600542
  hypo
gccacacaacggaagggaggcata

SEQ ID NO: 142774 - DNA, 23 bp, Homo sapiens
  chr2:128601382-128601405
  hypo
cttataaaagaggctgcgggctg

SEQ ID NO: 142775 - DNA, 181 bp, Homo sapiens; identical to SEQ ID NO: 16547
  chr2:128616460-128616641
  hypo

SEQ ID NO: 142776 - DNA, 30 bp, Homo sapiens; identical to SEQ ID NO: 38005
  chr2:128646900-128646930
  hypo

SEQ ID NO: 142777 - DNA, 17 bp, Homo sapiens
  chr2:128663343-128663360
  hypo
aatttgccggccaggcg

SEQ ID NO: 142778 - DNA, 34 bp, Homo sapiens
  chr2:128666471-128666505
  hypo
gagactctgtctcggaaaaaaaaaaaaagaagaa

SEQ ID NO: 142779 - DNA, 42 bp, Homo sapiens; identical to SEQ ID NO: 16548
  chr2:128679950-128679992
  hypo

SEQ ID NO: 142780 - DNA, 41 bp, Homo sapiens; identical to SEQ ID NO: 16549
  chr2:128680171-128680212
  hypo

SEQ ID NO: 142781 - DNA, 30 bp, Homo sapiens
  chr2:128726436-128726466
  hypo
tacgtctagaccaggcgttgacaaactata

SEQ ID NO: 142782 - DNA, 68 bp, Homo sapiens
  chr2:128826372-128826440
  hypo
ggggaggaaaagccccggggagaatgaccctgcagtgtggccacacagacaaacggcctcttcttcct

SEQ ID NO: 142783 - DNA, 36 bp, Homo sapiens
  chr2:128826704-128826740
  hypo
tccatgtggagccaacgtgatcgcaaaggtcctcat

SEQ ID NO: 142784 - DNA, 31 bp, Homo sapiens; identical to SEQ ID NO: 64057
  chr2:128847692-128847723
  hypo

SEQ ID NO: 142785 - DNA, 30 bp, Homo sapiens
  chr2:128918672-128918702
  hypo
ccttccagagctaagcgcctgctcttctct

SEQ ID NO: 142786 - DNA, 31 bp, Homo sapiens; identical to SEQ ID NO: 64058
  chr2:128952616-128952647
  hypo

SEQ ID NO: 142787 - DNA, 31 bp, Homo sapiens; identical to SEQ ID NO: 64059
  chr2:128952706-128952737
  hypo

SEQ ID NO: 142788 - DNA, 201 bp, Homo sapiens; identical to SEQ ID NO: 64060
  chr2:129021513-129021714
  hypo

SEQ ID NO: 142789 - DNA, 57 bp, Homo sapiens; identical to SEQ ID NO: 16550
  chr2:129027718-129027775
  hypo

SEQ ID NO: 142790 - DNA, 30 bp, Homo sapiens; identical to SEQ ID NO: 64062
  chr2:129057525-129057555
  hypo

SEQ ID NO: 142791 - DNA, 32 bp, Homo sapiens
  chr2:129103147-129103179
  hypo
cgacttccagattccgcggctgagcggcgagt

SEQ ID NO: 142792 - DNA, 30 bp, Homo sapiens; identical to SEQ ID NO: 16551
  chr2:129126360-129126390
  hypo

SEQ ID NO: 142793 - DNA, 31 bp, Homo sapiens; identical to SEQ ID NO: 64065
  chr2:129134897-129134928
  hypo

SEQ ID NO: 142794 - DNA, 30 bp, Homo sapiens
  chr2:129154403-129154433
  hypo
ttccccagtgcttagcgatgctgaacatct

SEQ ID NO: 142795 - DNA, 171 bp, Homo sapiens; identical to SEQ ID NO: 64066
  chr2:129250622-129250793
  hypo

SEQ ID NO: 142796 - DNA, 69 bp, Homo sapiens
  chr2:129284175-129284244
  hypo
acctcactgctccgacgtgcagcctccagcctgactccgtgacttgtttggacgcgtggcgcttggatt

SEQ ID NO: 142797 - DNA, 30 bp, Homo sapiens; identical to SEQ ID NO: 16553
  chr2:129335826-129335856
  hypo

SEQ ID NO: 142798 - DNA, 31 bp, Homo sapiens; identical to SEQ ID NO: 64068
  chr2:129377450-129377481
  hypo

SEQ ID NO: 142799 - DNA, 72 bp, Homo sapiens
  chr2:129448154-129448226
  hypo
cacctgtccctgtgccggtcgggcagcgcatgcgcctatggcctcgggcagcgcatgcgcctatggcctctc

SEQ ID NO: 142800 - DNA, 183 bp, Homo sapiens
  chr2:129539248-129539431
  hypo
gccctggatgccttccgattcctccgttcagccagcacgagtgaagaagagcggagacactgaggcagagacaagctgtccttggggttctccactggggggagaccaggcatggaggggacccatacgtctccattcccagtcaagcgctccagacctccaggacctcgatgaggctgttaa

SEQ ID NO: 142801 - DNA, 159 bp, Homo sapiens; identical to SEQ ID NO: 16554
  chr2:129542647-129542806
  hypo

SEQ ID NO: 142802 - DNA, 23 bp, Homo sapiens
  chr2:129660420-129660443
  hypo
tcagccgggtgcggtggttcacg

SEQ ID NO: 142803 - DNA, 30 bp, Homo sapiens
  chr2:129865792-129865822
  hypo
ggagctaggccacagcgcgggtgttcacca

SEQ ID NO: 142804 - DNA, 43 bp, Homo sapiens; identical to SEQ ID NO: 64071
  chr2:130174991-130175034
  hypo

SEQ ID NO: 142805 - DNA, 95 bp, Homo sapiens; identical to SEQ ID NO: 16556
  chr2:130356760-130356855
  hypo

SEQ ID NO: 142806 - DNA, 196 bp, Homo sapiens; identical to SEQ ID NO: 64073
  chr2:130512121-130512317
  hypo

SEQ ID NO: 142807 - DNA, 30 bp, Homo sapiens
  chr2:130583557-130583587
  hypo
gcacacgcgtctgtccgtccccgtgggcag

SEQ ID NO: 142808 - DNA, 77 bp, Homo sapiens
  chr2:130626911-130626988
  hypo
catcctcccgctggccgggtcttctccgcgaattgggatctgcctcctgggaggatgatacccgtggctgctgctct

SEQ ID NO: 142809 - DNA, 30 bp, Homo sapiens; identical to SEQ ID NO: 64074
  chr2:130638043-130638073
  hypo

SEQ ID NO: 142810 - DNA, 94 bp, Homo sapiens
  chr2:130669923-130670017
  hypo
ggcgcactgacaggccgcactgtcccagcctctacgtttgtggtcaaagagcagcaccttcctgaggcctgaggcctagcgggcacgtgaggtt

SEQ ID NO: 142811 - DNA, 37 bp, Homo sapiens; identical to SEQ ID NO: 16557
  chr2:130670340-130670377
  hypo

SEQ ID NO: 142812 - DNA, 381 bp, Homo sapiens; identical to SEQ ID NO: 38010
  chr2:130737256-130737637
  hypo

SEQ ID NO: 142813 - DNA, 136 bp, Homo sapiens
  chr2:130886698-130886834
  hypo
ccaaacacagcaaggcgagccccaggggctcaggctccagcctccagcatgccgctcccttctactcgtcttcctgcctggcaggagaagctcccgctactggttgccctcctaccactgtcgacaccaccaactg

SEQ ID NO: 142814 - DNA, 30 bp, Homo sapiens; identical to SEQ ID NO: 64078
  chr2:130910908-130910938
  hypo

SEQ ID NO: 142815 - DNA, 40 bp, Homo sapiens
  chr2:130919035-130919075
  hypo
tgcagtcccagcagccgcgggccagcgcagcacccccctc

SEQ ID NO: 142816 - DNA, 139 bp, Homo sapiens; identical to SEQ ID NO: 16558
  chr2:130943150-130943289
  hypo

SEQ ID NO: 142817 - DNA, 136 bp, Homo sapiens
  chr2:130948041-130948177
  hypo
ggagaaacaaaggcagcgctgccctcgggggagcattggccctggcggaacgcagcagccgcgaaggatccagccagaggatgccacgccagcccagcgctaccaggctgcccaaggggggcgggcctgggaagag

SEQ ID NO: 142818 - DNA, 30 bp, Homo sapiens
  chr2:130988667-130988697
  hypo
aggttcaggagaactcggaacacatctgca

SEQ ID NO: 142819 - DNA, 30 bp, Homo sapiens
  chr2:130989420-130989450
  hypo
cttgacgtcagctgacggagaccagtccca

SEQ ID NO: 142820 - DNA, 21 bp, Homo sapiens
  chr2:131071069-131071090
  hypo
tacaggcgtgagccaccgccc

SEQ ID NO: 142821 - DNA, 30 bp, Homo sapiens; identical to SEQ ID NO: 64081
  chr2:131103220-131103250
  hypo

SEQ ID NO: 142822 - DNA, 210 bp, Homo sapiens; identical to SEQ ID NO: 106679
  chr2:131113000-131113210
  hypo

SEQ ID NO: 142823 - DNA, 214 bp, Homo sapiens; identical to SEQ ID NO: 106680
  chr2:131114253-131114467
  hypo

SEQ ID NO: 142824 - DNA, 129 bp, Homo sapiens; identical to SEQ ID NO: 64083
  chr2:131116460-131116589
  hypo

SEQ ID NO: 142825 - DNA, 30 bp, Homo sapiens; identical to SEQ ID NO: 64084
  chr2:131127705-131127735
  hypo

SEQ ID NO: 142826 - DNA, 151 bp, Homo sapiens; identical to SEQ ID NO: 64085
  chr2:131486974-131487125
  hypo

SEQ ID NO: 142827 - DNA, 30 bp, Homo sapiens; identical to SEQ ID NO: 64086
  chr2:131487528-131487558
  hypo

SEQ ID NO: 142828 - DNA, 89 bp, Homo sapiens; identical to SEQ ID NO: 16559
  chr2:131502559-131502648
  hypo

SEQ ID NO: 142829 - DNA, 908 bp, Homo sapiens; identical to SEQ ID NO: 106683
  chr2:131513376-131514284
  hypo

SEQ ID NO: 142830 - DNA, 292 bp, Homo sapiens
  chr2:131583608-131583900
  hypo
ctctcggtctctcctcgggggccctgccccacgggtcaggctccacttctgttgctgccgcaccctggaagcccccaggaccgctccacactcgccatcaccctggctttgtgtcacaacctgcgtggcgcaggtgcaggatgcaccagcatggatgacatgtcactctccctggaggaacccgcttggcaggggtagctgataacttagggccagcgcagacacagaactgtgcgaaatgacgctgatgtcgcagtgatgcgagccgcatgttcctcgcctcacctgctca

SEQ ID NO: 142831 - DNA, 208 bp, Homo sapiens
  chr2:131639162-131639370
  hypo
cactaagagactacagctgtgcgtgagctgtttctgaggccatcctccgcagacgtacaaggttttgctatagtgaatgcttcgggagatgtaaggagggagcgctcactgtggctcagaagtgctggaggaccatcctggagggcggcccttgcgtgggcgagatggcgatccagagcagatggtgatgccacgtgcagccagtgag

SEQ ID NO: 142832 - DNA, 49 bp, Homo sapiens; identical to SEQ ID NO: 64091
  chr2:131674645-131674694
  hypo

SEQ ID NO: 142833 - DNA, 312 bp, Homo sapiens; identical to SEQ ID NO: 1821
  chr2:131720786-131721098
  hypo

SEQ ID NO: 142834 - DNA, 30 bp, Homo sapiens
  chr2:131804284-131804314
  hypo
acacccttgtgttgcgcccggagcccgccc

SEQ ID NO: 142835 - DNA, 233 bp, Homo sapiens
  chr2:131813290-131813523
  hypo
ctgagttcacccaagccggtccaggcgcagggagaggacacaggcagggaggagctaagctgcgtgtcagccccacgcaactcgccagacctgctgccactgccgcccccactctcctccactaagatctgacttcattcttactttgtgtacgtgtgtgcatgcacgtgtgtgtggtggcagggtgttggggaggaggaaaaaataccaaaagagaacgttctacagatgga

SEQ ID NO: 142836 - DNA, 241 bp, Homo sapiens; identical to SEQ ID NO: 64094
  chr2:131818831-131819072
  hypo

SEQ ID NO: 142837 - DNA, 24 bp, Homo sapiens
  chr2:131823063-131823087
  hypo
tcaaaaagaaaagaaacgccgggc

SEQ ID NO: 142838 - DNA, 25 bp, Homo sapiens
  chr2:131836750-131836775
  hypo
cttataaaaaacacacagggccggg

SEQ ID NO: 142839 - DNA, 30 bp, Homo sapiens
  chr2:131877921-131877951
  hypo
ctcggcctgagccaccgtgcccagccgtga

SEQ ID NO: 142840 - DNA, 395 bp, Homo sapiens
  chr2:131878433-131878828
  hypo
gatagagactcgggccggacaggctattctctttctgggtatgattttgaacctgcctgtttttgttctgtaggtgaagagatggcgtttgtgaagagtggctggttgctgcgacagagtgagtacaggatgtgcggtctgcgatcggcattgccgaagggcagtctctatttctgtttgcttaaagttgatcatatttaaaagcaaataacaaagttttatgagtgctatggccttgagtttccccttggacattcctagatctctgtgaactgtcttgcacaccacggagctcctccttggttgctgagttgacaggaaccaggaaatgatggcagtccctgctgctttcgctctcctcactagcatgctttactttttaattttaatttatt

SEQ ID NO: 142841 - DNA, 18 bp, Homo sapiens
  chr2:131882642-131882660
  hypo
caccgtgcctggccaaaa

SEQ ID NO: 142842 - DNA, 220 bp, Homo sapiens
  chr2:131883251-131883471
  hypo
gcattccaacttgggcgaaatagtaagactgtctctaaaaaaaaaaaaacaaccgtactattttttttttccaggtactattttgaagcgctggaagaagaactggtttgatctgtggtcggatggtcacctgatctattatgatgaccagactcggcagaatatcgaggataaggtccacatgccaatggactgcatcaacatccgcacggggcaggaa

SEQ ID NO: 142843 - DNA, 30 bp, Homo sapiens
  chr2:131884031-131884061
  hypo
gaggttgcagtgagccgaatatattttgtg

SEQ ID NO: 142844 - DNA, 30 bp, Homo sapiens
  chr2:131884491-131884521
  hypo
gagaaatgcaagagtcgcttttccaattct

SEQ ID NO: 142845 - DNA, 30 bp, Homo sapiens
  chr2:131914468-131914498
  hypo
cagggacggcaggagcggggttttctgagg

SEQ ID NO: 142846 - DNA, 101 bp, Homo sapiens
  chr2:131962503-131962604
  hypo
ccactgaatagcatacggattattctccacaacagactatgcgttaggccaaaaaacaagtcacaacacatttttaaaaactgaaatcatggccaggcgcg

SEQ ID NO: 142847 - DNA, 37 bp, Homo sapiens
  chr2:131966829-131966866
  hypo
cccttcagcagcaggcgtataccgcggttatatacag

SEQ ID NO: 142848 - DNA, 176 bp, Homo sapiens
  chr2:131967160-131967336
  hypo
ttctggctggagcctcggacactggctcactgcagttggtggtgtccacagagcggtaggagggcaactagtagcgggagcttctcctgccaggcaggaagacgagtagaagggagcagcaccgacgcatgctggaggctggagcctgagcccctggggctcgccttgctgtgttt

SEQ ID NO: 142849 - DNA, 96 bp, Homo sapiens; identical to SEQ ID NO: 106697
  chr2:132088785-132088881
  hypo

SEQ ID NO: 142850 - DNA, 240 bp, Homo sapiens; identical to SEQ ID NO: 106701
  chr2:132182875-132183115
  hypo

SEQ ID NO: 142851 - DNA, 30 bp, Homo sapiens; identical to SEQ ID NO: 16565
  chr2:132203188-132203218
  hypo

SEQ ID NO: 142852 - DNA, 203 bp, Homo sapiens
  chr2:132269040-132269243
  hypo
gccctggcctggctgcggaggcgggtgctgcgctggcccgcggctgctgggactgcaattgtttggattttcactgaccgtgctttgtttttgtttttttctcctcactcctgggctcgttctcattgctttctttctctctccgcttccccctcccgtgtctggtcctatctctccccttccccacccggccctcttgtcct

SEQ ID NO: 142853 - DNA, 298 bp, Homo sapiens
  chr2:132270119-132270417
  hypo
aggaatctgtgagagccgggggagacgggctgtgctcacagccagtgatctgtcccgttcacctgggaaggagcacacatgattgaacaggaatttgagcacaagatgagaaaatgtgttggccccttagcgctggtgggctggatggcggccacagcacacgggggcacctcattccgcaggagccactgcagaggagaggaggaacctgagggcttgtgccagggagggaggacagtgtccagaaagcatctggcaaaccccatggtgggaaggtgaccagcgagacccaggtggg

SEQ ID NO: 142854 - DNA, 125 bp, Homo sapiens
  chr2:132274361-132274486
  hypo
ctgggctccaggccaccggaggatttggcccccagccactgagccctcagcacatacctcccccacaggtcctggagatgtggctgagctacctgcagccgtggcggtacgcgcctgacaagcag

SEQ ID NO: 142855 - DNA, 31 bp, Homo sapiens
  chr2:132296605-132296636
  hypo
aactgaaatcatggccgggcgcggtggctca

SEQ ID NO: 142856 - DNA, 319 bp, Homo sapiens; identical to SEQ ID NO: 16567
  chr2:132301068-132301387
  hypo

SEQ ID NO: 142857 - DNA, 30 bp, Homo sapiens
  chr2:132306578-132306608
  hypo
gtatcctagactctgcgcctggtatgcaat

SEQ ID NO: 142858 - DNA, 202 bp, Homo sapiens
  chr2:132348632-132348834
  hypo
ctgagatgtgcacaccgcacgcgcacgtcgcacgcgcggcagcggcttggctggcttgtaacggcttgcacgcgcacgccgcccccgcataaccgtcagactggcctgtaacggcttgcaggcgcacgccgcacgcgcgtaacggcttggctgccctgtaacggcttgcacgtgcatgctgcacgcgcgttaacggcttggc

SEQ ID NO: 142859 - DNA, 85 bp, Homo sapiens; identical to SEQ ID NO: 64104
  chr2:132403829-132403914
  hypo

SEQ ID NO: 142860 - DNA, 534 bp, Homo sapiens; identical to SEQ ID NO: 16569
  chr2:132415329-132415863
  hypo

SEQ ID NO: 142861 - DNA, 88 bp, Homo sapiens; identical to SEQ ID NO: 64106
  chr2:132586578-132586666
  hypo

SEQ ID NO: 142862 - DNA, 276 bp, Homo sapiens; identical to SEQ ID NO: 1828
  chr2:132767359-132767635
  hypo

SEQ ID NO: 142863 - DNA, 247 bp, Homo sapiens; identical to SEQ ID NO: 1829
  chr2:132767688-132767935
  hypo

SEQ ID NO: 142864 - DNA, 121 bp, Homo sapiens; identical to SEQ ID NO: 106708
  chr2:132795463-132795584
  hypo

SEQ ID NO: 142865 - DNA, 279 bp, Homo sapiens; identical to SEQ ID NO: 1830
  chr2:132795725-132796004
  hypo

SEQ ID NO: 142866 - DNA, 341 bp, Homo sapiens; identical to SEQ ID NO: 1831
  chr2:132796063-132796404
  hypo

SEQ ID NO: 142867 - DNA, 505 bp, Homo sapiens
  chr2:133174959-133175464
  hypo
cgaggcctgcagctacgctacgctgctgcacgtgctgacactcagctttgagcgctacatcgccatctgtcaccccttcaggtacaaggctgtgtcgggaccttgccaggtgaagctgctgattggcttcgtctgggtcacctccgccctggtggcactgcccttgctgtttgccatgggtactgagtaccccctggtgaacgtgcccagccaccggggtctcacttgcaaccgctccagcacccgccaccacgagcagcccgagacctccaatatgtccatctgtaccaacctctccagccgctggaccgtgttccagtccagcatcttcggcgccttcgtggtctacctcgtggtcctgctctccgtagccttcatgtgctggaacatgatgcaggtgctcatgaaaagccagaagggctcgctggccgggggcacgcggcctccgcagctgaggaagtccgagagcgaagagagcaggaccgccaggaggcagaccatcatc

SEQ ID NO: 142868 - DNA, 30 bp, Homo sapiens
  chr2:133175958-133175988
  hypo
aaagcaggctgtgagcgacacacactctcg

SEQ ID NO: 142869 - DNA, 172 bp, Homo sapiens
  chr2:134897880-134898052
  hypo
aaaggagagatgggacgatgtggagcagctgtgctgctgtgggcgccacaagtctgcttagaatgggggacaaggcactggctggcaagtcaggagatctggggactgacgctttccctgccactttgtgagcctctgtgtcttccacaaaagtgggcgagttgggtcagat

SEQ ID NO: 142870 - DNA, 134 bp, Homo sapiens
  chr2:134948635-134948769
  hypo
aactgtgtccctccccgccagtccctggcaccgtctgttctttttctgtattatgtgcctggcacatagtacgcacccagtacctgttgtgattgtgatttttattagtaatagttggtcgtacctaattggca

SEQ ID NO: 142871 - DNA, 30 bp, Homo sapiens; identical to SEQ ID NO: 64112
  chr2:134949188-134949218
  hypo

SEQ ID NO: 142872 - DNA, 30 bp, Homo sapiens; identical to SEQ ID NO: 64113
  chr2:134949556-134949586
  hypo

SEQ ID NO: 142873 - DNA, 20 bp, Homo sapiens
  chr2:135141291-135141311
  hypo
tttgagacagtctcactgtg

SEQ ID NO: 142874 - DNA, 20 bp, Homo sapiens
  chr2:135141550-135141570
  hypo
cttaagcatggtttttatgt

SEQ ID NO: 142875 - DNA, 30 bp, Homo sapiens
  chr2:135276133-135276163
  hypo
aaccactcggggtcgcgtaaaagacttttg

SEQ ID NO: 142876 - DNA, 83 bp, Homo sapiens
  chr2:135293577-135293660
  hypo
gccaccgcgcccagccttgtttgtatgttttacattgtgtgtgtatatatatttagacggagggcgcacgcgtatatacgtgc

SEQ ID NO: 142877 - DNA, 30 bp, Homo sapiens
  chr2:135293984-135294014
  hypo
cctgagtacatagcacgcgaagactccctg

SEQ ID NO: 142878 - DNA, 24 bp, Homo sapiens
  chr2:135432224-135432248
  hypo
gccgactaatgtttaaaaaaaaac

SEQ ID NO: 142879 - DNA, 1423 bp, Homo sapiens; identical to SEQ ID NO: 38039
  chr2:135475590-135477013
  hypo

SEQ ID NO: 142880 - DNA, 27 bp, Homo sapiens
  chr2:135663110-135663137
  hypo
aaggctatacaaaaattagcccgggca

SEQ ID NO: 142881 - DNA, 27 bp, Homo sapiens
  chr2:135663256-135663283
  hypo
cagagcgagactctgtctcaaaaaaaa

SEQ ID NO: 142882 - DNA, 97 bp, Homo sapiens; identical to SEQ ID NO: 64120
  chr2:135707350-135707447
  hypo

SEQ ID NO: 142883 - DNA, 181 bp, Homo sapiens; identical to SEQ ID NO: 64121
  chr2:135718100-135718281
  hypo

SEQ ID NO: 142884 - DNA, 30 bp, Homo sapiens
  chr2:135832359-135832389
  hypo
gtattagaaaaagcacgaagatacgatact

SEQ ID NO: 142885 - DNA, 218 bp, Homo sapiens
  chr2:135926164-135926382
  hypo
agaggaaagaaggcagaactccgtgtcagacttcccaccccctgctggccgggaattcattttgcgcaccactgtgccgcgccctgctccctactccaaagctctgcctcagcggatgtacagtgttctcaccaaagaggactttagacttgcaggtgccttttcatcagatacttccttcttctgattcttctagcattactcgttggtggcttcag

SEQ ID NO: 142886 - DNA, 30 bp, Homo sapiens; identical to SEQ ID NO: 64123
  chr2:136150019-136150049
  hypo

SEQ ID NO: 142887 - DNA, 30 bp, Homo sapiens
  chr2:136279993-136280023
  hypo
tggacttggggtacccgccgggtggtgtgg

SEQ ID NO: 142888 - DNA, 89 bp, Homo sapiens; identical to SEQ ID NO: 1839
  chr2:136288365-136288454
  hypo

SEQ ID NO: 142889 - DNA, 20 bp, Homo sapiens
  chr2:136361460-136361480
  hypo
cccaccgcagccggccaagt

SEQ ID NO: 142890 - DNA, 30 bp, Homo sapiens; identical to SEQ ID NO: 64125
  chr2:136545723-136545753
  hypo

SEQ ID NO: 142891 - DNA, 134 bp, Homo sapiens
  chr2:136555619-136555753
  hypo
gccaagctcctgtcacggatccgcgtcttcatcacctcattgtaatctccattcttgaaaataggatgtgcaaaccagcctcccatgaactgcgggtagggtgggggagacagcccaggcgttacaggtgggca

SEQ ID NO: 142892 - DNA, 30 bp, Homo sapiens; identical to SEQ ID NO: 64126
  chr2:136567139-136567169
  hypo

SEQ ID NO: 142893 - DNA, 195 bp, Homo sapiens
  chr2:136602112-136602307
  hypo
acatagtgtgtgagtcgatgaataactttctctatgattctttttttatttataagttcttcttcagagtctatctctgattcgatttccttcaagtaccagttaacaagctcgctcctctttaatgctgactcgtcctcttctgcaacaaaaaaacacattcaaattatcctagcaactcgtactgtcagtcct

SEQ ID NO: 142894 - DNA, 165 bp, Homo sapiens
  chr2:136721520-136721685
  hypo
gattacaggcgtgagccactgcgcctggccttaatgactattattagtaacaccactaccactgactacttatttgatgattaattatcattcctttttcacagctggatgactatatacaaaaagtatgcagggcgctgggaacacgaacgtaagtatttgtta

SEQ ID NO: 142895 - DNA, 222 bp, Homo sapiens; identical to SEQ ID NO: 64128
  chr2:136785591-136785813
  hypo

SEQ ID NO: 142896 - DNA, 43 bp, Homo sapiens
  chr2:136845085-136845128
  hypo
tggccgcaagagagaagctgcaaactctcgtggtgttacagct

SEQ ID NO: 142897 - DNA, 3177 bp, Homo sapiens; identical to SEQ ID NO: 38045
  chr2:136873850-136877027
  hypo

SEQ ID NO: 142898 - DNA, 34 bp, Homo sapiens; identical to SEQ ID NO: 64130
  chr2:136911819-136911853
  hypo

SEQ ID NO: 142899 - DNA, 33 bp, Homo sapiens
  chr2:137088315-137088348
  hypo
gacaatcagtactctcgcttttttttttttttt

SEQ ID NO: 142900 - DNA, 43 bp, Homo sapiens; identical to SEQ ID NO: 16583
  chr2:137195176-137195219
  hypo

SEQ ID NO: 142901 - DNA, 713 bp, Homo sapiens; identical to SEQ ID NO: 38046
  chr2:137522036-137522749
  hypo

SEQ ID NO: 142902 - DNA, 544 bp, Homo sapiens; identical to SEQ ID NO: 1843
  chr2:137522848-137523392
  hypo

SEQ ID NO: 142903 - DNA, 27 bp, Homo sapiens
  chr2:138265955-138265982
  hypo
tttttttttttgagacagtctcgctgt

SEQ ID NO: 142904 - DNA, 31 bp, Homo sapiens; identical to SEQ ID NO: 1845
  chr2:138436702-138436733
  hypo

SEQ ID NO: 142905 - DNA, 199 bp, Homo sapiens; identical to SEQ ID NO: 64136
  chr2:138689490-138689689
  hypo

SEQ ID NO: 142906 - DNA, 30 bp, Homo sapiens; identical to SEQ ID NO: 16587
  chr2:138940401-138940431
  hypo

SEQ ID NO: 142907 - DNA, 31 bp, Homo sapiens; identical to SEQ ID NO: 16588
  chr2:139274945-139274976
  hypo

SEQ ID NO: 142908 - DNA, 79 bp, Homo sapiens
  chr2:139436925-139437004
  hypo
tgactcttcacctacgtggcagcgggggagtaggagaggcctgaattttttttttttttttttgagacggagtctcgct

SEQ ID NO: 142909 - DNA, 859 bp, Homo sapiens; identical to SEQ ID NO: 38051
  chr2:139536963-139537822
  hypo

SEQ ID NO: 142910 - DNA, 386 bp, Homo sapiens; identical to SEQ ID NO: 106740
  chr2:139537850-139538236
  hypo

SEQ ID NO: 142911 - DNA, 30 bp, Homo sapiens
  chr2:143289426-143289456
  hypo
gcattgtattgagagcgacaggaggtagcc

SEQ ID NO: 142912 - DNA, 19 bp, Homo sapiens
  chr2:143555049-143555068
  hypo
cttaaagaaagcagaactg

SEQ ID NO: 142913 - DNA, 30 bp, Homo sapiens
  chr2:144138488-144138518
  hypo
agaaactagcatccccgggcaatgtgaatg

SEQ ID NO: 142914 - DNA, 75 bp, Homo sapiens
  chr2:144227050-144227125
  hypo
gcaatgccccacacgcgagctccagtgggccagttctttgtattgacacatacgcaagttcggacatgacaccca

SEQ ID NO: 142915 - DNA, 331 bp, Homo sapiens
  chr2:144478009-144478340
  hypo
ctcacctctcgcaaccgagactccatcagaagagcctaatggcgtcaactaattgctagaaaaaaagactgccctctatcgacgcagatgcacctgtgccgtgtgactcattcaccaagcacagtaaacacttttaagtactagggcgaagggggattcgaatgaatgagggcatcgagggggtcaagtggtggacaataggaactgtgaagtctcctctgcctgccggtcctgtggccagcacttctgctgcactagcttccctaaaagaggcacacgacttcccaaacttcagtgtgctcacaaaccaaattacctagcaatcttgtta

SEQ ID NO: 142916 - DNA, 30 bp, Homo sapiens
  chr2:144598716-144598746
  hypo
tgttcccacgtaatacggtgcttcgtttca

SEQ ID NO: 142917 - DNA, 229 bp, Homo sapiens; identical to SEQ ID NO: 1850
  chr2:144694285-144694514
  hypo

SEQ ID NO: 142918 - DNA, 772 bp, Homo sapiens; identical to SEQ ID NO: 38056
  chr2:144694553-144695325
  hypo

SEQ ID NO: 142919 - DNA, 34 bp, Homo sapiens; identical to SEQ ID NO: 1852
  chr2:145090079-145090113
  hypo

SEQ ID NO: 142920 - DNA, 30 bp, Homo sapiens; identical to SEQ ID NO: 16595
  chr2:145162474-145162504
  hypo

SEQ ID NO: 142921 - DNA, 27 bp, Homo sapiens
  chr2:145167761-145167788
  hypo
caccgcgcccagccataaaaaagaatg

SEQ ID NO: 142922 - DNA, 30 bp, Homo sapiens
  chr2:145196961-145196991
  hypo
ctctcagcctcgacacgcgtcaagtaaaag

SEQ ID NO: 142923 - DNA, 22 bp, Homo sapiens
  chr2:145204291-145204313
  hypo
taacaattggctggacgcggtg

SEQ ID NO: 142924 - DNA, 1193 bp, Homo sapiens; identical to SEQ ID NO: 38058
  chr2:145273317-145274510
  hypo

SEQ ID NO: 142925 - DNA, 1364 bp, Homo sapiens; identical to SEQ ID NO: 106746
  chr2:145274576-145275940
  hypo

SEQ ID NO: 142926 - DNA, 677 bp, Homo sapiens; identical to SEQ ID NO: 38061
  chr2:145281301-145281978
  hypo

SEQ ID NO: 142927 - DNA, 22 bp, Homo sapiens
  chr2:146076796-146076818
  hypo
aaaactgtgtgtagccgggcac

SEQ ID NO: 142928 - DNA, 201 bp, Homo sapiens; identical to SEQ ID NO: 64152
  chr2:147344899-147345100
  hypo

SEQ ID NO: 142929 - DNA, 30 bp, Homo sapiens
  chr2:147907698-147907728
  hypo
gtcgtaacccagttgcgtgtgtgtgctcag

SEQ ID NO: 142930 - DNA, 30 bp, Homo sapiens; identical to SEQ ID NO: 1859
  chr2:148389097-148389127
  hypo

SEQ ID NO: 142931 - DNA, 1309 bp, Homo sapiens; identical to SEQ ID NO: 106751
  chr2:148601210-148602519
  hypo

SEQ ID NO: 142932 - DNA, 216 bp, Homo sapiens; identical to SEQ ID NO: 1861
  chr2:148602727-148602943
  hypo

SEQ ID NO: 142933 - DNA, 84 bp, Homo sapiens; identical to SEQ ID NO: 64156
  chr2:148776774-148776858
  hypo

SEQ ID NO: 142934 - DNA, 30 bp, Homo sapiens; identical to SEQ ID NO: 64157
  chr2:148823731-148823761
  hypo

SEQ ID NO: 142935 - DNA, 25 bp, Homo sapiens
  chr2:148912495-148912520
  hypo
tattcctattcggccatcttggctc

SEQ ID NO: 142936 - DNA, 194 bp, Homo sapiens
  chr2:148965102-148965296
  hypo
ccataacagatcattcgagggtgggagatggtggaagaatgaggaaacactggaagcatttgtgcaaaagtcaggaacattgcaaagatacccactggcgtgactattatttaacattgtactaaagggagccagctgagagagatactagaagttaggaaaaaaaaaaaaaaagatgacgttaaacccctggg

SEQ ID NO: 142937 - DNA, 156 bp, Homo sapiens
  chr2:149015974-149016130
  hypo
aaagaaggctgcaatctgcaccggtatccaccagtgccagcacctgcacccaccgtacattggtgggggaccagtggatcgctaattccacacgtggcctccaatcgtccagtgtccccccaaactgggcatcccggcaagttccctaatgaaaca

SEQ ID NO: 142938 - DNA, 38 bp, Homo sapiens; identical to SEQ ID NO: 16604
  chr2:149045674-149045712
  hypo

SEQ ID NO: 142939 - DNA, 29 bp, Homo sapiens
  chr2:149047808-149047837
  hypo
gagtcaccgcacccagccaaaaatcatgt

SEQ ID NO: 142940 - DNA, 137 bp, Homo sapiens
  chr2:149215520-149215657
  hypo
taatgccataattacgggtctgtctctagtaattagaaagttggatatgccgaagagcaagtagattagtttaattggagtaagtggactaagttggaagaaggaaacaacttgaatttgacgtatgattttgatag

SEQ ID NO: 142941 - DNA, 195 bp, Homo sapiens; identical to SEQ ID NO: 16605
  chr2:149227322-149227517
  hypo

SEQ ID NO: 142942 - DNA, 30 bp, Homo sapiens; identical to SEQ ID NO: 16606
  chr2:149286257-149286287
  hypo

SEQ ID NO: 142943 - DNA, 30 bp, Homo sapiens; identical to SEQ ID NO: 64163
  chr2:149287072-149287102
  hypo

SEQ ID NO: 142944 - DNA, 33 bp, Homo sapiens; identical to SEQ ID NO: 16607
  chr2:149436587-149436620
  hypo

SEQ ID NO: 142945 - DNA, 101 bp, Homo sapiens; identical to SEQ ID NO: 64165
  chr2:149514579-149514680
  hypo

SEQ ID NO: 142946 - DNA, 41 bp, Homo sapiens
  chr2:149514919-149514960
  hypo
gggtgacagtgcgagactccgtctcaaaacaaaatatatat

SEQ ID NO: 142947 - DNA, 199 bp, Homo sapiens; identical to SEQ ID NO: 16608
  chr2:149525278-149525477
  hypo

SEQ ID NO: 142948 - DNA, 30 bp, Homo sapiens; identical to SEQ ID NO: 1862
  chr2:149588676-149588706
  hypo

SEQ ID NO: 142949 - DNA, 273 bp, Homo sapiens; identical to SEQ ID NO: 1863
  chr2:149632584-149632857
  hypo

SEQ ID NO: 142950 - DNA, 1805 bp, Homo sapiens; identical to SEQ ID NO: 106758
  chr2:149632888-149634693
  hypo

SEQ ID NO: 142951 - DNA, 144 bp, Homo sapiens; identical to SEQ ID NO: 64170
  chr2:150131806-150131950
  hypo

SEQ ID NO: 142952 - DNA, 30 bp, Homo sapiens; identical to SEQ ID NO: 1869
  chr2:150153324-150153354
  hypo

SEQ ID NO: 142953 - DNA, 31 bp, Homo sapiens
  chr2:150184648-150184679
  hypo
ctgccccgggcagtttcgaagacttgatttt

SEQ ID NO: 142954 - DNA, 1571 bp, Homo sapiens; identical to SEQ ID NO: 106763
  chr2:150186116-150187687
  hypo

SEQ ID NO: 142955 - DNA, 80 bp, Homo sapiens; identical to SEQ ID NO: 64173
  chr2:150394599-150394679
  hypo

SEQ ID NO: 142956 - DNA, 34 bp, Homo sapiens; identical to SEQ ID NO: 64174
  chr2:150422348-150422382
  hypo

SEQ ID NO: 142957 - DNA, 20 bp, Homo sapiens
  chr2:150428825-150428845
  hypo
ctgggcgagagagactccgt

SEQ ID NO: 142958 - DNA, 30 bp, Homo sapiens; identical to SEQ ID NO: 64175
  chr2:152042660-152042690
  hypo

SEQ ID NO: 142959 - DNA, 30 bp, Homo sapiens; identical to SEQ ID NO: 64176
  chr2:152134118-152134148
  hypo

SEQ ID NO: 142960 - DNA, 279 bp, Homo sapiens; identical to SEQ ID NO: 64177
  chr2:152153949-152154228
  hypo

SEQ ID NO: 142961 - DNA, 34 bp, Homo sapiens
  chr2:152265326-152265360
  hypo
tcttaaaaaaaaaaaaaggcgggggaggagcagc

SEQ ID NO: 142962 - DNA, 25 bp, Homo sapiens
  chr2:152266077-152266102
  hypo
cccaacagtacgttatctccttttg

SEQ ID NO: 142963 - DNA, 207 bp, Homo sapiens; identical to SEQ ID NO: 64179
  chr2:152295715-152295922
  hypo

SEQ ID NO: 142964 - DNA, 25 bp, Homo sapiens
  chr2:152561379-152561404
  hypo
attcggccatcttggctcctcccca

SEQ ID NO: 142965 - DNA, 207 bp, Homo sapiens; identical to SEQ ID NO: 16617
  chr2:152642696-152642903
  hypo

SEQ ID NO: 142966 - DNA, 148 bp, Homo sapiens
  chr2:152681225-152681373
  hypo
aagtccttcttacacgaagttgtgtgcaaatgtgcgtgcgtgcatgtgtgtgtagaactaactctggcactagataatcttgttaaaatccaggtgtgtgtgcgtaggagaaataactccggcactacgtaatcgtggttaaaatcca

SEQ ID NO: 142967 - DNA, 307 bp, Homo sapiens; identical to SEQ ID NO: 106775
  chr2:152955491-152955798
  hypo

SEQ ID NO: 142968 - DNA, 131 bp, Homo sapiens; identical to SEQ ID NO: 38087
  chr2:152956019-152956150
  hypo

SEQ ID NO: 142969 - DNA, 95 bp, Homo sapiens
  chr2:153079538-153079633
  hypo
ataagtaaataataaaaagagaaagatatgaagagagaaaggacaaaaaaagagatttaaacacacataagtatactgacgagaagtgtacattc

SEQ ID NO: 142970 - DNA, 723 bp, Homo sapiens; identical to SEQ ID NO: 106780
  chr2:153192136-153192859
  hypo

SEQ ID NO: 142971 - DNA, 30 bp, Homo sapiens; identical to SEQ ID NO: 64187
  chr2:153246169-153246199
  hypo

SEQ ID NO: 142972 - DNA, 78 bp, Homo sapiens
  chr2:153258693-153258771
  hypo
gcgtgagccactacgcccggccgtgtttgatcttttaaaagcccataaatgctaagcgttgttctcatctgtaaatag

SEQ ID NO: 142973 - DNA, 99 bp, Homo sapiens
  chr2:153438093-153438192
  hypo
aagacaatatgacgccgcgggccctgccccagcgtatccaaacatcaccgccgcgggccctgccccagtgtatccaaacatcaccgcctagatagtagc

SEQ ID NO: 142974 - DNA, 40 bp, Homo sapiens
  chr2:153448029-153448069
  hypo
aggtttcaggccaggcgcaacggctcatgccggtaatccc

SEQ ID NO: 142975 - DNA, 31 bp, Homo sapiens; identical to SEQ ID NO: 1876
  chr2:153573617-153573648
  hypo

SEQ ID NO: 142976 - DNA, 80 bp, Homo sapiens; identical to SEQ ID NO: 1883
  chr2:155553935-155554015
  hypo

SEQ ID NO: 142977 - DNA, 1446 bp, Homo sapiens; identical to SEQ ID NO: 106791
  chr2:155554076-155555522
  hypo

SEQ ID NO: 142978 - DNA, 29 bp, Homo sapiens
  chr2:156216743-156216772
  hypo
actttttttttttttttgagacggagtct

SEQ ID NO: 142979 - DNA, 26 bp, Homo sapiens
  chr2:157123420-157123446
  hypo
cacgcgtgagccgccgcgcccagcca

SEQ ID NO: 142980 - DNA, 406 bp, Homo sapiens; identical to SEQ ID NO: 106795
  chr2:157189364-157189770
  hypo

SEQ ID NO: 142981 - DNA, 24 bp, Homo sapiens
  chr2:157224052-157224076
  hypo
tccctctccctctcccgctccgtc

SEQ ID NO: 142982 - DNA, 460 bp, Homo sapiens; identical to SEQ ID NO: 38107
  chr2:157292162-157292622
  hypo

SEQ ID NO: 142983 - DNA, 35 bp, Homo sapiens; identical to SEQ ID NO: 64194
  chr2:157340914-157340949
  hypo

SEQ ID NO: 142984 - DNA, 30 bp, Homo sapiens; identical to SEQ ID NO: 16626
  chr2:158155295-158155325
  hypo

SEQ ID NO: 142985 - DNA, 349 bp, Homo sapiens; identical to SEQ ID NO: 38109
  chr2:158484949-158485298
  hypo

SEQ ID NO: 142986 - DNA, 101 bp, Homo sapiens; identical to SEQ ID NO: 64197
  chr2:158607939-158608040
  hypo

SEQ ID NO: 142987 - DNA, 91 bp, Homo sapiens; identical to SEQ ID NO: 64198
  chr2:158674927-158675018
  hypo

SEQ ID NO: 142988 - DNA, 31 bp, Homo sapiens; identical to SEQ ID NO: 16628
  chr2:158901219-158901250
  hypo

SEQ ID NO: 142989 - DNA, 34 bp, Homo sapiens; identical to SEQ ID NO: 64200
  chr2:158914981-158915015
  hypo

SEQ ID NO: 142990 - DNA, 18 bp, Homo sapiens
  chr2:159207732-159207750
  hypo
ctgaccatagcccaagat

SEQ ID NO: 142991 - DNA, 1841 bp, Homo sapiens; identical to SEQ ID NO: 106806
  chr2:159313053-159314894
  hypo

SEQ ID NO: 142992 - DNA, 31 bp, Homo sapiens; identical to SEQ ID NO: 16632
  chr2:159340499-159340530
  hypo

SEQ ID NO: 142993 - DNA, 30 bp, Homo sapiens
  chr2:159417489-159417519
  hypo
ggacaggtggcctaccggctgaatctggcc

SEQ ID NO: 142994 - DNA, 158 bp, Homo sapiens; identical to SEQ ID NO: 16633
  chr2:159490659-159490817
  hypo

SEQ ID NO: 142995 - DNA, 154 bp, Homo sapiens; identical to SEQ ID NO: 16634
  chr2:159528147-159528301
  hypo

SEQ ID NO: 142996 - DNA, 31 bp, Homo sapiens; identical to SEQ ID NO: 64208
  chr2:159538761-159538792
  hypo

SEQ ID NO: 142997 - DNA, 27 bp, Homo sapiens
  chr2:159613154-159613181
  hypo
agctgaaatgtccgtcaacgaatgaag

SEQ ID NO: 142998 - DNA, 120 bp, Homo sapiens
  chr2:159638826-159638946
  hypo
tcttttccaagcccgcgtgctcccaatccaggcaaacacaaatctttcacatgactgcagtttcttttatacccacagggaagggcgacggaaaggagggccatccgcggaaacctttca

SEQ ID NO: 142999 - DNA, 30 bp, Homo sapiens; identical to SEQ ID NO: 1895
  chr2:159660261-159660291
  hypo

SEQ ID NO: 143000 - DNA, 31 bp, Homo sapiens; identical to SEQ ID NO: 64210
  chr2:159747449-159747480
  hypo

SEQ ID NO: 143001 - DNA, 289 bp, Homo sapiens; identical to SEQ ID NO: 64211
  chr2:159946995-159947284
  hypo

SEQ ID NO: 143002 - DNA, 40 bp, Homo sapiens
  chr2:159964842-159964882
  hypo
gcattttttgctgcccgtttcccgccgcctgcagttaatg

SEQ ID NO: 143003 - DNA, 30 bp, Homo sapiens; identical to SEQ ID NO: 64213
  chr2:159965183-159965213
  hypo

SEQ ID NO: 143004 - DNA, 30 bp, Homo sapiens; identical to SEQ ID NO: 16637
  chr2:159987935-159987965
  hypo

SEQ ID NO: 143005 - DNA, 155 bp, Homo sapiens; identical to SEQ ID NO: 64215
  chr2:159994716-159994871
  hypo

SEQ ID NO: 143006 - DNA, 30 bp, Homo sapiens
  chr2:160061138-160061168
  hypo
gcttcatgcacaggacgctggcggctcccc

SEQ ID NO: 143007 - DNA, 87 bp, Homo sapiens
  chr2:160061389-160061476
  hypo
gctatttagctgcgtcgtaggcctccctttgtgtagcgcattgaagcaattccacttggcatgtgtgctcaccgtagtttactgttc

SEQ ID NO: 143008 - DNA, 245 bp, Homo sapiens; identical to SEQ ID NO: 64216
  chr2:160086243-160086488
  hypo

SEQ ID NO: 143009 - DNA, 30 bp, Homo sapiens; identical to SEQ ID NO: 16639
  chr2:160087162-160087192
  hypo

SEQ ID NO: 143010 - DNA, 29 bp, Homo sapiens
  chr2:160141928-160141957
  hypo
aaaaaagtctgggcgcgatggtgcacacc

SEQ ID NO: 143011 - DNA, 507 bp, Homo sapiens; identical to SEQ ID NO: 1898
  chr2:160142448-160142955
  hypo

SEQ ID NO: 143012 - DNA, 43 bp, Homo sapiens; identical to SEQ ID NO: 64219
  chr2:160632630-160632673
  hypo

SEQ ID NO: 143013 - DNA, 679 bp, Homo sapiens; identical to SEQ ID NO: 106816
  chr2:160654214-160654893
  hypo

SEQ ID NO: 143014 - DNA, 279 bp, Homo sapiens; identical to SEQ ID NO: 38125
  chr2:160760619-160760898
  hypo

SEQ ID NO: 143015 - DNA, 423 bp, Homo sapiens; identical to SEQ ID NO: 38126
  chr2:160760959-160761382
  hypo

SEQ ID NO: 143016 - DNA, 30 bp, Homo sapiens
  chr2:160862181-160862211
  hypo
gtgtgtgtactgcaccggctcgggtttctg

SEQ ID NO: 143017 - DNA, 80 bp, Homo sapiens
  chr2:161052030-161052110
  hypo
cgtcatccatggaggcggagaggtccatgaggtaatacaaatccaccgggtagtcctcagtctggcggacatgcacctgc

SEQ ID NO: 143018 - DNA, 30 bp, Homo sapiens; identical to SEQ ID NO: 64223
  chr2:161054816-161054846
  hypo

SEQ ID NO: 143019 - DNA, 23 bp, Homo sapiens
  chr2:161089038-161089061
  hypo
ccgtctcaaaaaaaaaaagaatg

SEQ ID NO: 143020 - DNA, 116 bp, Homo sapiens; identical to SEQ ID NO: 64224
  chr2:161113755-161113871
  hypo

SEQ ID NO: 143021 - DNA, 658 bp, Homo sapiens; identical to SEQ ID NO: 38128
  chr2:161126280-161126938
  hypo

SEQ ID NO: 143022 - DNA, 92 bp, Homo sapiens; identical to SEQ ID NO: 16646
  chr2:161127527-161127619
  hypo

SEQ ID NO: 143023 - DNA, 153 bp, Homo sapiens; identical to SEQ ID NO: 16647
  chr2:161128080-161128233
  hypo

SEQ ID NO: 143024 - DNA, 30 bp, Homo sapiens
  chr2:161141250-161141280
  hypo
tggttatactgctgacgaatcctaaaggta

SEQ ID NO: 143025 - DNA, 39 bp, Homo sapiens
  chr2:161141482-161141521
  hypo
atggatttattttaacgacatacccgttctgtatagcag

SEQ ID NO: 143026 - DNA, 64 bp, Homo sapiens
  chr2:161150181-161150245
  hypo
aggtggtggtggtggcgagggggagaggtgtttgtgcagggagtcagggcgccagagctgttct

SEQ ID NO: 143027 - DNA, 28 bp, Homo sapiens
  chr2:161226818-161226846
  hypo
aaatttttaaacccaagattacgttttt

SEQ ID NO: 143028 - DNA, 28 bp, Homo sapiens
  chr2:161226965-161226993
  hypo
aaaccccgtctctactaaagatacagac

SEQ ID NO: 143029 - DNA, 161 bp, Homo sapiens; identical to SEQ ID NO: 64230
  chr2:161253362-161253523
  hypo

SEQ ID NO: 143030 - DNA, 126 bp, Homo sapiens; identical to SEQ ID NO: 106821
  chr2:161263703-161263829
  hypo

SEQ ID NO: 143031 - DNA, 458 bp, Homo sapiens; identical to SEQ ID NO: 106822
  chr2:161263896-161264354
  hypo

SEQ ID NO: 143032 - DNA, 327 bp, Homo sapiens; identical to SEQ ID NO: 1905
  chr2:161264419-161264746
  hypo

SEQ ID NO: 143033 - DNA, 166 bp, Homo sapiens
  chr2:161506268-161506434
  hypo
gcttatggtacgtctcgtcaagccacagcctcgcagggagctagcgcccatgctggtgcctagaggtgcctgtcctgctgcagctggtatgcctggctgtgcacagtggccggatcccacgctctctcacacacccctcacttctccacacctggctcgcccttgg

SEQ ID NO: 143034 - DNA, 30 bp, Homo sapiens; identical to SEQ ID NO: 16652
  chr2:161986974-161987004
  hypo

SEQ ID NO: 143035 - DNA, 18 bp, Homo sapiens
  chr2:161987325-161987343
  hypo
aggcataagaagaaatca

SEQ ID NO: 143036 - DNA, 17 bp, Homo sapiens
  chr2:161987582-161987599
  hypo
ctccatctaaaaaaaaa

SEQ ID NO: 143037 - DNA, 162 bp, Homo sapiens; identical to SEQ ID NO: 16654
  chr2:161989984-161990146
  hypo

SEQ ID NO: 143038 - DNA, 30 bp, Homo sapiens
  chr2:162006313-162006343
  hypo
gttgaaccacccttgcgttacagggataaa

SEQ ID NO: 143039 - DNA, 30 bp, Homo sapiens
  chr2:162055113-162055143
  hypo
ttccaatgagcatatcgcgagacaaatact

SEQ ID NO: 143040 - DNA, 209 bp, Homo sapiens; identical to SEQ ID NO: 64237
  chr2:162096296-162096505
  hypo

SEQ ID NO: 143041 - DNA, 30 bp, Homo sapiens
  chr2:162168600-162168630
  hypo
taagataacaaatacggagtagcttgaaaa

SEQ ID NO: 143042 - DNA, 30 bp, Homo sapiens
  chr2:162271259-162271289
  hypo
gctccttcagtctcccgggcggagcccgcc

SEQ ID NO: 143043 - DNA, 768 bp, Homo sapiens; identical to SEQ ID NO: 106833
  chr2:162271678-162272446
  hypo

SEQ ID NO: 143044 - DNA, 477 bp, Homo sapiens; identical to SEQ ID NO: 106837
  chr2:162274749-162275226
  hypo

SEQ ID NO: 143045 - DNA, 127 bp, Homo sapiens; identical to SEQ ID NO: 1911
  chr2:162275310-162275437
  hypo

SEQ ID NO: 143046 - DNA, 337 bp, Homo sapiens; identical to SEQ ID NO: 1912
  chr2:162275472-162275809
  hypo

SEQ ID NO: 143047 - DNA, 55 bp, Homo sapiens; identical to SEQ ID NO: 106840
  chr2:162279832-162279887
  hypo

SEQ ID NO: 143048 - DNA, 263 bp, Homo sapiens; identical to SEQ ID NO: 38142
  chr2:162280152-162280415
  hypo

SEQ ID NO: 143049 - DNA, 60 bp, Homo sapiens
  chr2:162838346-162838406
  hypo
cgggcgccatagacacgcgctcacaccagctctcagagctggcagcgtgccacagatggc

SEQ ID NO: 143050 - DNA, 30 bp, Homo sapiens
  chr2:162875865-162875895
  hypo
agcctaagtgtgcacggagcgcgcgcacgg

SEQ ID NO: 143051 - DNA, 203 bp, Homo sapiens; identical to SEQ ID NO: 1916
  chr2:162930081-162930284
  hypo

SEQ ID NO: 143052 - DNA, 639 bp, Homo sapiens; identical to SEQ ID NO: 1917
  chr2:162930338-162930977
  hypo

SEQ ID NO: 143053 - DNA, 39 bp, Homo sapiens
  chr2:163298802-163298841
  hypo
tgggattacaggcgtgagccactgcgcccggccgtgaca

SEQ ID NO: 143054 - DNA, 139 bp, Homo sapiens
  chr2:164966391-164966530
  hypo
gaattggtatgtttccgagatgggctgtaaggcagtggcgatgacatggtctatgagcaaatgctgttatgccagctctaagatttgaatattctcatttggaacggacttgtttgaggcttgtcgattagtaacacag

SEQ ID NO: 143055 - DNA, 870 bp, Homo sapiens; identical to SEQ ID NO: 106861
  chr2:165477433-165478303
  hypo

SEQ ID NO: 143056 - DNA, 22 bp, Homo sapiens
  chr2:165562521-165562543
  hypo
cgacaagagtgaaactccatct

SEQ ID NO: 143057 - DNA, 215 bp, Homo sapiens; identical to SEQ ID NO: 16661
  chr2:165637157-165637372
  hypo

SEQ ID NO: 143058 - DNA, 1525 bp, Homo sapiens; identical to SEQ ID NO: 106862
  chr2:165697144-165698669
  hypo

SEQ ID NO: 143059 - DNA, 476 bp, Homo sapiens; identical to SEQ ID NO: 1924
  chr2:166649933-166650409
  hypo

SEQ ID NO: 143060 - DNA, 791 bp, Homo sapiens; identical to SEQ ID NO: 38161
  chr2:166650454-166651245
  hypo

SEQ ID NO: 143061 - DNA, 165 bp, Homo sapiens
  chr2:166726863-166727028
  hypo
agagaacagccttctcgaacttgctttttgctgtttataagttattcccttcaggaaggctgtgctacacttcgatgagcagcggtctgaatgcggtggtttccttgcacctttgccaaccttgcttctaaaaaaatctgtcagcatgaacgctgttgtatgatc

SEQ ID NO: 143062 - DNA, 89 bp, Homo sapiens; identical to SEQ ID NO: 16667
  chr2:166790774-166790863
  hypo

SEQ ID NO: 143063 - DNA, 87 bp, Homo sapiens; identical to SEQ ID NO: 16668
  chr2:166894500-166894587
  hypo

SEQ ID NO: 143064 - DNA, 30 bp, Homo sapiens; identical to SEQ ID NO: 38164
  chr2:167830802-167830832
  hypo

SEQ ID NO: 143065 - DNA, 2210 bp, Homo sapiens; identical to SEQ ID NO: 38165
  chr2:168148856-168151066
  hypo

SEQ ID NO: 143066 - DNA, 31 bp, Homo sapiens; identical to SEQ ID NO: 64256
  chr2:168249795-168249826
  hypo

SEQ ID NO: 143067 - DNA, 20 bp, Homo sapiens
  chr2:168593132-168593152
  hypo
tggatgcagtggctcacgcc

SEQ ID NO: 143068 - DNA, 30 bp, Homo sapiens
  chr2:168815914-168815944
  hypo
gtgagccaccgcgcccggccatcagctttt

SEQ ID NO: 143069 - DNA, 107 bp, Homo sapiens
  chr2:168921848-168921955
  hypo
gggactgtatttgttcggggatggtgctggcactcactgcaatctgttacgagagccaccgttacagcattcaagaaagccaaagggagacacggtgagtgtggtta

SEQ ID NO: 143070 - DNA, 31 bp, Homo sapiens; identical to SEQ ID NO: 16670
  chr2:168931676-168931707
  hypo

SEQ ID NO: 143071 - DNA, 30 bp, Homo sapiens
  chr2:168995616-168995646
  hypo
gcccacaggagaaagcgggagactgggaac

SEQ ID NO: 143072 - DNA, 204 bp, Homo sapiens
  chr2:169073152-169073356
  hypo
aacctgacagaaatacgagtttttaggcaaagaaacgttgttataagccaccttcaaaagaagacattattcgtgtgctttcaactttctaaagccaaggctaatgccaccgccacacctcttaggcatggatgatctcatgaacagcagcggactttcatctcctgagaggtcttggtcaccggctctgtgccaggcactccc

SEQ ID NO: 143073 - DNA, 1391 bp, Homo sapiens; identical to SEQ ID NO: 38166
  chr2:169312408-169313799
  hypo

SEQ ID NO: 143074 - DNA, 97 bp, Homo sapiens; identical to SEQ ID NO: 64261
  chr2:169337554-169337651
  hypo

SEQ ID NO: 143075 - DNA, 24 bp, Homo sapiens
  chr2:169340960-169340984
  hypo
gattacaggcgttgagccactgtg

SEQ ID NO: 143076 - DNA, 30 bp, Homo sapiens
  chr2:169407960-169407990
  hypo
gggtgagtttcttaacgtccctaggctgca

SEQ ID NO: 143077 - DNA, 42 bp, Homo sapiens; identical to SEQ ID NO: 16674
  chr2:169436466-169436508
  hypo

SEQ ID NO: 143078 - DNA, 31 bp, Homo sapiens; identical to SEQ ID NO: 16675
  chr2:169453320-169453351
  hypo

SEQ ID NO: 143079 - DNA, 27 bp, Homo sapiens
  chr2:169519252-169519279
  hypo
acaaacgagccctggaaagaaagctag

SEQ ID NO: 143080 - DNA, 198 bp, Homo sapiens; identical to SEQ ID NO: 64266
  chr2:169533300-169533498
  hypo

SEQ ID NO: 143081 - DNA, 33 bp, Homo sapiens; identical to SEQ ID NO: 64267
  chr2:169561124-169561157
  hypo

SEQ ID NO: 143082 - DNA, 32 bp, Homo sapiens; identical to SEQ ID NO: 64268
  chr2:169561396-169561428
  hypo

SEQ ID NO: 143083 - DNA, 20 bp, Homo sapiens
  chr2:169584038-169584058
  hypo
cagagcgagactccatctca

SEQ ID NO: 143084 - DNA, 31 bp, Homo sapiens; identical to SEQ ID NO: 64270
  chr2:169596485-169596516
  hypo

SEQ ID NO: 143085 - DNA, 31 bp, Homo sapiens; identical to SEQ ID NO: 64271
  chr2:169610604-169610635
  hypo

SEQ ID NO: 143086 - DNA, 19 bp, Homo sapiens
  chr2:169643032-169643051
  hypo
ctcccgtaaacacactgcg

SEQ ID NO: 143087 - DNA, 25 bp, Homo sapiens
  chr2:169643564-169643589
  hypo
gaattgagttcgctgcggacccata

SEQ ID NO: 143088 - DNA, 73 bp, Homo sapiens
  chr2:170031751-170031824
  hypo
attgcataaagtctgcgggctggtgcagttgccgtcactgcactggaactgtcccagtcggcagaagcgctgc

SEQ ID NO: 143089 - DNA, 1222 bp, Homo sapiens; identical to SEQ ID NO: 106877
  chr2:170218318-170219540
  hypo

SEQ ID NO: 143090 - DNA, 241 bp, Homo sapiens
  chr2:170282878-170283119
  hypo
tccagtgaaaaaggacgaacctgaagttgccagtgtgaagcccgtgagtgtgcagtgaaccgcagagaaagcttcttggtgagttgagtttgtggagtggcccagagccaggcgggagcgtcagtaccgcgcactgttaacagcggcccgacaaacccagcaaatgcagaattggccaggggatccccgaaagaaccaatccttccccagccctctcaccgaaagccacagcaggaaaaac

SEQ ID NO: 143091 - DNA, 41 bp, Homo sapiens
  chr2:170283326-170283367
  hypo
gcttggcggtatttccgggtcagtctcgtgtctggccccgg

SEQ ID NO: 143092 - DNA, 50 bp, Homo sapiens
  chr2:170337116-170337166
  hypo
gaattcgtaaaattacggactgtagtaacatattgcgcactttctatgac

SEQ ID NO: 143093 - DNA, 39 bp, Homo sapiens
  chr2:170337461-170337500
  hypo
acaggcgtgagccactgcgcccggcgacattttctgtct

SEQ ID NO: 143094 - DNA, 78 bp, Homo sapiens; identical to SEQ ID NO: 16678
  chr2:170373533-170373611
  hypo

SEQ ID NO: 143095 - DNA, 205 bp, Homo sapiens; identical to SEQ ID NO: 38169
  chr2:170430255-170430460
  hypo

SEQ ID NO: 143096 - DNA, 21 bp, Homo sapiens
  chr2:170450460-170450481
  hypo
ggcccactgttttatatcttg

SEQ ID NO: 143097 - DNA, 158 bp, Homo sapiens; identical to SEQ ID NO: 16680
  chr2:170551728-170551886
  hypo

SEQ ID NO: 143098 - DNA, 38 bp, Homo sapiens; identical to SEQ ID NO: 16681
  chr2:170552125-170552163
  hypo

SEQ ID NO: 143099 - DNA, 102 bp, Homo sapiens
  chr2:170569211-170569313
  hypo
aacttgcatttctatagtaacgacacctgctccagggatagttattgctaaggggtggagccaccagagggtggcaaaaactgggaacgcagtgcctcccag

SEQ ID NO: 143100 - DNA, 145 bp, Homo sapiens; identical to SEQ ID NO: 64282
  chr2:170569585-170569730
  hypo

SEQ ID NO: 143101 - DNA, 166 bp, Homo sapiens; identical to SEQ ID NO: 16684
  chr2:170584902-170585068
  hypo

SEQ ID NO: 143102 - DNA, 24 bp, Homo sapiens
  chr2:170587050-170587074
  hypo
ctattgttttttattttgagacgg

SEQ ID NO: 143103 - DNA, 226 bp, Homo sapiens
  chr2:170591023-170591249
  hypo
ttaagcgaaagggctcgggatttcccttttccgagacctcttcttgtccatttatatttccatcatccctttcttggcatttcgatgtgatttgaaagggagacgagcttggggaaaaggttgaattggggccgagccgagacagctgaggtccggcctcgagtggggtgaccctcggacacttgccttgcctagtgtgggatctcatctccgaacgccaggccag

SEQ ID NO: 143104 - DNA, 20 bp, Homo sapiens
  chr2:170596964-170596984
  hypo
ttttttttttttgagacgga

SEQ ID NO: 143105 - DNA, 181 bp, Homo sapiens
  chr2:170620608-170620789
  hypo
tcttcttggtctatttgtttaaatacttctataaaaagagacattccctcatttactagttgtttactcagagttacagtttgtgtaggaaaggcaggttaaatgcttgattcttccctttatttactagtttgcaaaatagttgttagcgtcctccaaagatgatttattaggtttattt

SEQ ID NO: 143106 - DNA, 25 bp, Homo sapiens
  chr2:170681880-170681905
  hypo
agtggagaggcagggcgcggcggct

SEQ ID NO: 143107 - DNA, 241 bp, Homo sapiens; identical to SEQ ID NO: 16687
  chr2:170682144-170682385
  hypo

SEQ ID NO: 143108 - DNA, 21 bp, Homo sapiens
  chr2:170686218-170686239
  hypo
ccaccgcgcccggccaacatt

SEQ ID NO: 143109 - DNA, 28 bp, Homo sapiens
  chr2:170716502-170716530
  hypo
aggcgtgagccaccgcacctggtcttat

SEQ ID NO: 143110 - DNA, 30 bp, Homo sapiens; identical to SEQ ID NO: 1934
  chr2:171300632-171300662
  hypo

SEQ ID NO: 143111 - DNA, 83 bp, Homo sapiens
  chr2:171542903-171542986
  hypo
gcgaggcggggcggggcggggcggggcggggcgaggcaatagaaaaactaggagaaaatgtatatgaacgtatccatgcttct

SEQ ID NO: 143112 - DNA, 38 bp, Homo sapiens; identical to SEQ ID NO: 16690
  chr2:171624030-171624068
  hypo

SEQ ID NO: 143113 - DNA, 49 bp, Homo sapiens; identical to SEQ ID NO: 1939
  chr2:171627263-171627312
  hypo

SEQ ID NO: 143114 - DNA, 632 bp, Homo sapiens; identical to SEQ ID NO: 38182
  chr2:171627346-171627978
  hypo

SEQ ID NO: 143115 - DNA, 225 bp, Homo sapiens; identical to SEQ ID NO: 16693
  chr2:171730910-171731135
  hypo

SEQ ID NO: 143116 - DNA, 29 bp, Homo sapiens
  chr2:171788437-171788466
  hypo
ttataaaaaagtctctttggccgcgcaca

SEQ ID NO: 143117 - DNA, 30 bp, Homo sapiens
  chr2:171806161-171806191
  hypo
aagtaacctgtggggcggccagggcttatt

SEQ ID NO: 143118 - DNA, 137 bp, Homo sapiens
  chr2:171815735-171815872
  hypo
tgctgggattacaggcatgagccatcgtgcccggccccagatgcgcttctgattttaggcgatagttgacatgtctcttcaagccccagtttctcttcgacattttaaatctttcctcattacgttgtagttatact

SEQ ID NO: 143119 - DNA, 791 bp, Homo sapiens
  chr2:171822422-171823213
  hypo
gagagctgctgtcttccctcccgcccaccagcaacgcaccctccgaccctgccacaactactgcaaaggcagacgctgcctcctcactcactgtggatgtgacgccccccactgccaaggcccccaccaccgttgaggacagagtcggcgactccaccccagtcagcgagaagcctgtttctgcggctgtggatgccaatgcttctgagtcaccttaactttgaaccattctttggaattggcgtggtatatttaaccacgggagcgtgtctggaaacgcaaactatcattaatttcatactagtttgtaccgtatctgtaggcatcctgtaaataattccaaggggaaaactaaacgaggacgtgggttgtatcctgccaggttgagtggggctcacacgctagggtgagatgtcagaaagcgcttgtattttaaacaaccaaaaagaattgtaagggtggcttgctgccaggcttgcactgccgttcctgggggtgtgcatcttcgggaaaggtggtggcggggcgtccactaggtttcctgtcccctgctgctccttccgtaagaaaatgaaatattctatgcctaatactcacacgcaacatttcttgtactttgtaagtcgtttgcgagaatgcagaccacctcactaaactgtaaacggtaaagagatttttacttttggtctccgtgagtcgcatctctactaaggtttacacaggaattccacctgaagacttgtgttaaagttctacagcgcgcactgttaactgaacgtctttttcttcag

SEQ ID NO: 143120 - DNA, 258 bp, Homo sapiens
  chr2:171860122-171860380
  hypo
gagagattaattgctcggagattagcatcacagtgttttaaacagatactcaaaacagttgagctccttacaatagcaacaaggtgtagctacaaaattattacagtacacagtatgtggtacagttaattttatgaagttattatttaattcggcatctttacatttgtttacgtttctctcaactgcaaatagcaccaggtacagtctgtgtttgtatacgttttgataaattttaacttcttgtaatagatttgt

SEQ ID NO: 143121 - DNA, 17 bp, Homo sapiens
  chr2:171860859-171860876
  hypo
atcggaaaaaaaaaagc

SEQ ID NO: 143122 - DNA, 19 bp, Homo sapiens
  chr2:172129145-172129164
  hypo
tttttttttgagacagagt

SEQ ID NO: 143123 - DNA, 22 bp, Homo sapiens
  chr2:172178477-172178499
  hypo
ttttttttttttgatacgcagt

SEQ ID NO: 143124 - DNA, 25 bp, Homo sapiens
  chr2:172188767-172188792
  hypo
ttaataagttatttccacccccgcc

SEQ ID NO: 143125 - DNA, 25 bp, Homo sapiens
  chr2:172188911-172188936
  hypo
tcccgagtagctggaactacataca

SEQ ID NO: 143126 - DNA, 20 bp, Homo sapiens
  chr2:172192615-172192635
  hypo
tttttttttgagacaaagtt

SEQ ID NO: 143127 - DNA, 42 bp, Homo sapiens
  chr2:172302763-172302805
  hypo
atctaggagagtggccaggtgcggtggctcacgcctgtaatc

SEQ ID NO: 143128 - DNA, 30 bp, Homo sapiens
  chr2:172364749-172364779
  hypo
gcaagttcattgcttcgtgagcttcaagtg

SEQ ID NO: 143129 - DNA, 58 bp, Homo sapiens
  chr2:172367065-172367123
  hypo
gtaaagtccagtttacgtgacaccatacaaagtcactgtgtaacgcgtgtcacaaatt

SEQ ID NO: 143130 - DNA, 172 bp, Homo sapiens; identical to SEQ ID NO: 38195
  chr2:172378954-172379126
  hypo

SEQ ID NO: 143131 - DNA, 891 bp, Homo sapiens; identical to SEQ ID NO: 38196
  chr2:172379338-172380229
  hypo

SEQ ID NO: 143132 - DNA, 98 bp, Homo sapiens
  chr2:172411068-172411166
  hypo
gtgttttcgtaaatacgcttggccttctgatcctggtgttcggggccctcattttttggatagtcaccagaccgcaatggaaacgtcctaaggagcca

SEQ ID NO: 143133 - DNA, 153 bp, Homo sapiens
  chr2:172424322-172424475
  hypo
tcagccaaccggacacgtgaatgagtgagttttgagtttattctagcccccaatctttgaaccaccccagctgacactgagttgagcagagataaaccgtcccctctaagttctttccaaattttttttttttgtttttggagacgaagtctt

SEQ ID NO: 143134 - DNA, 33 bp, Homo sapiens
  chr2:172424534-172424567
  hypo
cctgggttcaatcttcaccgggaagccatttca

SEQ ID NO: 143135 - DNA, 16 bp, Homo sapiens
  chr2:172778342-172778358
  hypo
cgcccggcctaggtaa

SEQ ID NO: 143136 - DNA, 31 bp, Homo sapiens
  chr2:172873883-172873914
  hypo
gtgtgagatttcatcacgctgtgcagaacgg

SEQ ID NO: 143137 - DNA, 30 bp, Homo sapiens; identical to SEQ ID NO: 64307
  chr2:172912439-172912469
  hypo

SEQ ID NO: 143138 - DNA, 21 bp, Homo sapiens
  chr2:173036682-173036703
  hypo
gtcaccgcgcccagcccaata

SEQ ID NO: 143139 - DNA, 94 bp, Homo sapiens
  chr2:173422679-173422773
  hypo
gcctcccaagcctagaactaccggcaagcaccaccacgcccggctattttttattttctgtatatgtgaggtctcattgtgttgcccaggctgg

SEQ ID NO: 143140 - DNA, 33 bp, Homo sapiens
  chr2:173422952-173422985
  hypo
tgtaaataccactgcattcggaccagcttaaag

SEQ ID NO: 143141 - DNA, 101 bp, Homo sapiens; identical to SEQ ID NO: 16702
  chr2:173423967-173424068
  hypo

SEQ ID NO: 143142 - DNA, 30 bp, Homo sapiens; identical to SEQ ID NO: 64311
  chr2:173843280-173843310
  hypo

SEQ ID NO: 143143 - DNA, 30 bp, Homo sapiens
  chr2:173853485-173853515
  hypo
acgagctgcctctatcgtcttacgagaaga

SEQ ID NO: 143144 - DNA, 48 bp, Homo sapiens
  chr2:173894915-173894963
  hypo
ttccttttttgccatcgtcatgggactaagtaacgttgctgtgagccg

SEQ ID NO: 143145 - DNA, 30 bp, Homo sapiens
  chr2:173908976-173909006
  hypo
tgtaaactgtcatggcgccggggggcggga

SEQ ID NO: 143146 - DNA, 60 bp, Homo sapiens
  chr2:173909414-173909474
  hypo
tcagtttaagcgtggcgacaggggggttcaatttgttcccctacacggatccggagcgcc

SEQ ID NO: 143147 - DNA, 30 bp, Homo sapiens
  chr2:173913312-173913342
  hypo
ctatattccttttagcgcatgattgcaaat

SEQ ID NO: 143148 - DNA, 45 bp, Homo sapiens; identical to SEQ ID NO: 64312
  chr2:173927295-173927340
  hypo

SEQ ID NO: 143149 - DNA, 320 bp, Homo sapiens; identical to SEQ ID NO: 38228
  chr2:173940415-173940735
  hypo

SEQ ID NO: 143150 - DNA, 199 bp, Homo sapiens
  chr2:173941390-173941589
  hypo
agagccaccgctccccgcccttcctgccccgggcttgggcagcatgaagcgcccgccctctcgggcttccccctttcctcccaccggagccggggatgtctcctttggcgaccctcaggcagcggctttttgtgggctcccagacctgcaccaggcccagaagtgcttacccaggccgtcgcctcgtctggcctcgctt

SEQ ID NO: 143151 - DNA, 121 bp, Homo sapiens
  chr2:174049585-174049706
  hypo
caacatcaagccactgcactccagccagagtgagactcagtctagaaaaaaaaaaaaaattaggtagcaaactggtaccagagttaaaaataaggaaggagaggccaggcacggtggctca

SEQ ID NO: 143152 - DNA, 30 bp, Homo sapiens
  chr2:174095123-174095153
  hypo
gctgggctggtacaccgctgaaccggcttt

SEQ ID NO: 143153 - DNA, 30 bp, Homo sapiens
  chr2:174103491-174103521
  hypo
attcataccctggagcgctcgatcgtcaac

SEQ ID NO: 143154 - DNA, 22 bp, Homo sapiens
  chr2:174108654-174108676
  hypo
agatttacgtttttaacagatc

SEQ ID NO: 143155 - DNA, 30 bp, Homo sapiens
  chr2:174115282-174115312
  hypo
tataatgcctgcgttcgcatggacaccatc

SEQ ID NO: 143156 - DNA, 104 bp, Homo sapiens; identical to SEQ ID NO: 106971
  chr2:174147822-174147926
  hypo

SEQ ID NO: 143157 - DNA, 142 bp, Homo sapiens; identical to SEQ ID NO: 64315
  chr2:174204827-174204969
  hypo

SEQ ID NO: 143158 - DNA, 30 bp, Homo sapiens; identical to SEQ ID NO: 64316
  chr2:174231926-174231956
  hypo

SEQ ID NO: 143159 - DNA, 75 bp, Homo sapiens
  chr2:174278556-174278631
  hypo
ctgacgcggctggggcgcgttgacctggagcttttgtctgggatttctcacccctgtctccgccatgagggctcc

SEQ ID NO: 143160 - DNA, 218 bp, Homo sapiens; identical to SEQ ID NO: 1972
  chr2:174349950-174350168
  hypo

SEQ ID NO: 143161 - DNA, 160 bp, Homo sapiens; identical to SEQ ID NO: 64318
  chr2:174522466-174522626
  hypo

SEQ ID NO: 143162 - DNA, 30 bp, Homo sapiens; identical to SEQ ID NO: 64319
  chr2:174731502-174731532
  hypo

SEQ ID NO: 143163 - DNA, 30 bp, Homo sapiens; identical to SEQ ID NO: 16705
  chr2:174848652-174848682
  hypo

SEQ ID NO: 143164 - DNA, 277 bp, Homo sapiens
  chr2:174890600-174890877
  hypo
cccaaagagcactgactgggccgtcaaggaagatgaatgtctccccaaaagtgctcctcggggacaagtttccacgcagatgcaaccgggaacgccggccaggctccggaaggcgaggccccagagcgcagcggcctccaagcgcgggctcagcctgtcgcctccgcagccagggcccaggaggccgctcttccggggtcaccaacacggctcgttctgagcctagaggcccagggcacagtgtgagccggaatacggtgtaggggacacagctcag

SEQ ID NO: 143165 - DNA, 30 bp, Homo sapiens
  chr2:174922000-174922030
  hypo
gctgggaaagcatcccggtaccttttcatg

SEQ ID NO: 143166 - DNA, 30 bp, Homo sapiens; identical to SEQ ID NO: 16707
  chr2:174970629-174970659
  hypo

SEQ ID NO: 143167 - DNA, 30 bp, Homo sapiens; identical to SEQ ID NO: 16708
  chr2:175110638-175110668
  hypo

SEQ ID NO: 143168 - DNA, 73 bp, Homo sapiens; identical to SEQ ID NO: 64324
  chr2:175113857-175113930
  hypo

SEQ ID NO: 143169 - DNA, 519 bp, Homo sapiens; identical to SEQ ID NO: 1981
  chr2:175199921-175200440
  hypo

SEQ ID NO: 143170 - DNA, 143 bp, Homo sapiens; identical to SEQ ID NO: 1982
  chr2:175200709-175200852
  hypo

SEQ ID NO: 143171 - DNA, 266 bp, Homo sapiens; identical to SEQ ID NO: 1983
  chr2:175200916-175201182
  hypo

SEQ ID NO: 143172 - DNA, 182 bp, Homo sapiens; identical to SEQ ID NO: 1984
  chr2:175201359-175201541
  hypo

SEQ ID NO: 143173 - DNA, 53 bp, Homo sapiens; identical to SEQ ID NO: 1985
  chr2:175201775-175201828
  hypo

SEQ ID NO: 143174 - DNA, 23 bp, Homo sapiens
  chr2:175218487-175218510
  hypo
ccggctcaattaagagctttaaa

SEQ ID NO: 143175 - DNA, 19 bp, Homo sapiens
  chr2:175255417-175255436
  hypo
gtatcgtgggaggaacccg

SEQ ID NO: 143176 - DNA, 21 bp, Homo sapiens
  chr2:175261537-175261558
  hypo
aaaaaacgaataagcctttat

SEQ ID NO: 143177 - DNA, 30 bp, Homo sapiens
  chr2:175352709-175352739
  hypo
tctgatgttaagagtcgtaaggctttttaa

SEQ ID NO: 143178 - DNA, 36 bp, Homo sapiens
  chr2:175383904-175383940
  hypo
cttaagattctctaccgggtgcggtggctcacacct

SEQ ID NO: 143179 - DNA, 36 bp, Homo sapiens; identical to SEQ ID NO: 16716
  chr2:175384179-175384215
  hypo

SEQ ID NO: 143180 - DNA, 103 bp, Homo sapiens
  chr2:175431784-175431887
  hypo
cagaaatactcactccggctttcgtttcttgccagtttgctgggataacttttggtcgtttgtacatatggctctggaggtggcaaatcggaaatcggatgga

SEQ ID NO: 143181 - DNA, 30 bp, Homo sapiens; identical to SEQ ID NO: 16717
  chr2:175436394-175436424
  hypo

SEQ ID NO: 143182 - DNA, 30 bp, Homo sapiens
  chr2:175494501-175494531
  hypo
cccctctattggccccgcacccagttttca

SEQ ID NO: 143183 - DNA, 1378 bp, Homo sapiens; identical to SEQ ID NO: 107008
  chr2:175546697-175548075
  hypo

SEQ ID NO: 143184 - DNA, 30 bp, Homo sapiens; identical to SEQ ID NO: 64336
  chr2:175584404-175584434
  hypo

SEQ ID NO: 143185 - DNA, 30 bp, Homo sapiens
  chr2:175629203-175629233
  hypo
ggagggtttggaaagcgagtcggctcacta

SEQ ID NO: 143186 - DNA, 30 bp, Homo sapiens; identical to SEQ ID NO: 16718
  chr2:175661546-175661576
  hypo

SEQ ID NO: 143187 - DNA, 31 bp, Homo sapiens; identical to SEQ ID NO: 16719
  chr2:175855047-175855078
  hypo

SEQ ID NO: 143188 - DNA, 30 bp, Homo sapiens
  chr2:175866751-175866781
  hypo
tgaattaggtgcattcgctatagttctaga

SEQ ID NO: 143189 - DNA, 287 bp, Homo sapiens; identical to SEQ ID NO: 64339
  chr2:175927665-175927952
  hypo

SEQ ID NO: 143190 - DNA, 30 bp, Homo sapiens
  chr2:175962202-175962232
  hypo
tgtaatgactgcggtcgagattcctctgac

SEQ ID NO: 143191 - DNA, 18 bp, Homo sapiens
  chr2:176026497-176026515
  hypo
tttttttttgagacaccg

SEQ ID NO: 143192 - DNA, 30 bp, Homo sapiens; identical to SEQ ID NO: 38262
  chr2:176494846-176494876
  hypo

SEQ ID NO: 143193 - DNA, 33 bp, Homo sapiens; identical to SEQ ID NO: 16722
  chr2:176569573-176569606
  hypo

SEQ ID NO: 143194 - DNA, 30 bp, Homo sapiens
  chr2:176839090-176839120
  hypo
aagttataactgcatcggtcgtacaacagt

SEQ ID NO: 143195 - DNA, 30 bp, Homo sapiens; identical to SEQ ID NO: 64343
  chr2:176862878-176862908
  hypo

SEQ ID NO: 143196 - DNA, 390 bp, Homo sapiens; identical to SEQ ID NO: 2003
  chr2:176944456-176944846
  hypo

SEQ ID NO: 143197 - DNA, 131 bp, Homo sapiens; identical to SEQ ID NO: 2004
  chr2:176945137-176945268
  hypo

SEQ ID NO: 143198 - DNA, 52 bp, Homo sapiens; identical to SEQ ID NO: 2009
  chr2:176957576-176957628
  hypo

SEQ ID NO: 143199 - DNA, 694 bp, Homo sapiens; identical to SEQ ID NO: 38280
  chr2:176957914-176958608
  hypo

SEQ ID NO: 143200 - DNA, 65 bp, Homo sapiens; identical to SEQ ID NO: 16727
  chr2:177013794-177013859
  hypo

SEQ ID NO: 143201 - DNA, 30 bp, Homo sapiens; identical to SEQ ID NO: 38313
  chr2:177021872-177021902
  hypo

SEQ ID NO: 143202 - DNA, 30 bp, Homo sapiens; identical to SEQ ID NO: 38314
  chr2:177022107-177022137
  hypo

SEQ ID NO: 143203 - DNA, 104 bp, Homo sapiens; identical to SEQ ID NO: 107081
  chr2:177022458-177022562
  hypo

SEQ ID NO: 143204 - DNA, 30 bp, Homo sapiens; identical to SEQ ID NO: 38316
  chr2:177037295-177037325
  hypo

SEQ ID NO: 143205 - DNA, 30 bp, Homo sapiens; identical to SEQ ID NO: 107083
  chr2:177039570-177039600
  hypo

SEQ ID NO: 143206 - DNA, 331 bp, Homo sapiens; identical to SEQ ID NO: 38317
  chr2:177042471-177042802
  hypo

SEQ ID NO: 143207 - DNA, 297 bp, Homo sapiens; identical to SEQ ID NO: 2041
  chr2:177043266-177043563
  hypo

SEQ ID NO: 143208 - DNA, 762 bp, Homo sapiens; identical to SEQ ID NO: 38320
  chr2:177052672-177053434
  hypo

SEQ ID NO: 143209 - DNA, 84 bp, Homo sapiens; identical to SEQ ID NO: 2043
  chr2:177053618-177053702
  hypo

SEQ ID NO: 143210 - DNA, 91 bp, Homo sapiens; identical to SEQ ID NO: 16732
  chr2:177178832-177178923
  hypo

SEQ ID NO: 143211 - DNA, 91 bp, Homo sapiens; identical to SEQ ID NO: 64358
  chr2:177498055-177498146
  hypo

SEQ ID NO: 143212 - DNA, 1037 bp, Homo sapiens; identical to SEQ ID NO: 38326
  chr2:177502149-177503186
  hypo

SEQ ID NO: 143213 - DNA, 30 bp, Homo sapiens
  chr2:178035401-178035431
  hypo
gtaagatttggaatccgttcaaaaaacaag

SEQ ID NO: 143214 - DNA, 30 bp, Homo sapiens
  chr2:178042570-178042600
  hypo
cgtgagagggagctcgaagagtgccaacgg

SEQ ID NO: 143215 - DNA, 31 bp, Homo sapiens
  chr2:178075535-178075566
  hypo
caggtgtgagccatggcgcccggccagagct

SEQ ID NO: 143216 - DNA, 33 bp, Homo sapiens
  chr2:178089623-178089656
  hypo
ccagtttgggcgacagagcgagactccgtctca

SEQ ID NO: 143217 - DNA, 137 bp, Homo sapiens
  chr2:178090223-178090360
  hypo
taaagcacttgtcatcgtacattaaggaattgcgtaaaatgtttagctgtatctgtaggctccaggtaacttaattttttaattgtattactatgatgttcagtaaatgctgagtgaacttacattctttaaaatac

SEQ ID NO: 143218 - DNA, 79 bp, Homo sapiens
  chr2:178131779-178131858
  hypo
gctgtctttgggaagacggccttccctacatgcttgagatgtgtcaattgtgataccttgctccagattgctcataaaa

SEQ ID NO: 143219 - DNA, 30 bp, Homo sapiens; identical to SEQ ID NO: 16734
  chr2:178133682-178133712
  hypo

SEQ ID NO: 143220 - DNA, 817 bp, Homo sapiens; identical to SEQ ID NO: 107098
  chr2:178257218-178258035
  hypo

SEQ ID NO: 143221 - DNA, 208 bp, Homo sapiens
  chr2:178385808-178386016
  hypo
gttcacctgttttggcggacaactctaaagcaagccaatgtgtattccttccatggagtagaggctgggaagaaactgagattatatcttaaactaatcatttgggtcgtcttgactttcagtttctagatgttaaatctgatttcacttaacttaaagcccctgtggggattttgtttgttttttagggtgacgcagacttacgatg

SEQ ID NO: 143222 - DNA, 94 bp, Homo sapiens; identical to SEQ ID NO: 64365
  chr2:178586887-178586981
  hypo

SEQ ID NO: 143223 - DNA, 31 bp, Homo sapiens; identical to SEQ ID NO: 64366
  chr2:178627423-178627454
  hypo

SEQ ID NO: 143224 - DNA, 383 bp, Homo sapiens; identical to SEQ ID NO: 64367
  chr2:178936538-178936921
  hypo

SEQ ID NO: 143225 - DNA, 188 bp, Homo sapiens; identical to SEQ ID NO: 64368
  chr2:178972991-178973179
  hypo

SEQ ID NO: 143226 - DNA, 31 bp, Homo sapiens; identical to SEQ ID NO: 16738
  chr2:179012822-179012853
  hypo

SEQ ID NO: 143227 - DNA, 31 bp, Homo sapiens; identical to SEQ ID NO: 16739
  chr2:179058447-179058478
  hypo

SEQ ID NO: 143228 - DNA, 30 bp, Homo sapiens
  chr2:179256654-179256684
  hypo
tttattccaggagctcgggatacgtcaatg

SEQ ID NO: 143229 - DNA, 41 bp, Homo sapiens
  chr2:179303354-179303395
  hypo
ttccagataaacttcaataaacgtgtatcaaggtccaaaat

SEQ ID NO: 143230 - DNA, 40 bp, Homo sapiens
  chr2:179303694-179303734
  hypo
ccactgtgcctggccaaacgctggtaggttttgagtgaga

SEQ ID NO: 143231 - DNA, 641 bp, Homo sapiens; identical to SEQ ID NO: 107108
  chr2:179316083-179316724
  hypo

SEQ ID NO: 143232 - DNA, 30 bp, Homo sapiens; identical to SEQ ID NO: 64374
  chr2:179319696-179319726
  hypo

SEQ ID NO: 143233 - DNA, 30 bp, Homo sapiens
  chr2:179414355-179414385
  hypo
ttaactgcagaaacacggaattggtattca

SEQ ID NO: 143234 - DNA, 31 bp, Homo sapiens; identical to SEQ ID NO: 64375
  chr2:179999949-179999980
  hypo

SEQ ID NO: 143235 - DNA, 32 bp, Homo sapiens; identical to SEQ ID NO: 64376
  chr2:180019920-180019952
  hypo

SEQ ID NO: 143236 - DNA, 81 bp, Homo sapiens; identical to SEQ ID NO: 64377
  chr2:180027693-180027774
  hypo

SEQ ID NO: 143237 - DNA, 417 bp, Homo sapiens
  chr2:180128341-180128758
  hypo
actcccaacttctcccgcgatgtctgtgtgtaagagaaagatgtcaaagcaccaagaaaaccacgggggctgtcagagcaacagccaagtccaaaccgtgcatcccagggtgaaatcccacccgtaccctcaagagctggtcagactgcggctcttttctaatatgagtctacctaaaatagaaaaataaacacaaccacagaccctggccaaccctctctctcctcccctttgtgactctcccaaacgctggagggatgttaacctctggcaggcccgtggaagccaagccccgcgacctgaggaggcgtccaggagcctcggcgcagccctggggcctcgagcccgtgtcctccacccacccgacagggccggtcaccggtcacacaaaggagccagtcgcgggcgctggacgcg

SEQ ID NO: 143238 - DNA, 86 bp, Homo sapiens; identical to SEQ ID NO: 2056
  chr2:180129610-180129696
  hypo

SEQ ID NO: 143239 - DNA, 31 bp, Homo sapiens; identical to SEQ ID NO: 67308
  chr2:180598494-180598525
  hypo

SEQ ID NO: 143240 - DNA, 30 bp, Homo sapiens
  chr2:180857604-180857634
  hypo
atccaagaggctcacgttgtaaacagatat

SEQ ID NO: 143241 - DNA, 365 bp, Homo sapiens
  chr2:180886584-180886949
  hypo
tattacaaaccacttcgcggggtcggtgtataataccccccgccgcgatgtggggagtgatatcaccctctctcaccctggatattacgaacaacctcgcggggggtggtggtccataatatccgggtggggggagaggctgatatcactccccacatcgcgagggaggggatgtacaccgcccgccgccacgcgaggtggttcgtaatatccagtgggggagagggtgatatcacacccacatcgcggggggtgggagggcatgtacacaggatattatgttggttgaggttactgactctgaggcaaggcggccagaatatgtaccttggctctgccacttactgccccgtttgatcttgatc

SEQ ID NO: 143242 - DNA, 30 bp, Homo sapiens; identical to SEQ ID NO: 2058
  chr2:181179266-181179296
  hypo

SEQ ID NO: 143243 - DNA, 31 bp, Homo sapiens; identical to SEQ ID NO: 2061
  chr2:181846233-181846264
  hypo

SEQ ID NO: 143244 - DNA, 30 bp, Homo sapiens; identical to SEQ ID NO: 107120
  chr2:181846276-181846306
  hypo

SEQ ID NO: 143245 - DNA, 139 bp, Homo sapiens
  chr2:181846533-181846672
  hypo
tttctaacttgagttcggcaaatcccttaacgctggcgttgtgtgacacatcacctcccttgtacgtacccctgttgtacgatgaaataagtgtgaacacttttgaagctttttcattacaagacgattttagatgact

SEQ ID NO: 143246 - DNA, 30 bp, Homo sapiens
  chr2:181884049-181884079
  hypo
ggaacatgttcagccggtgctcaaaatgtg

SEQ ID NO: 143247 - DNA, 30 bp, Homo sapiens
  chr2:182294589-182294619
  hypo
ttctggcgaatgaggcgctaccatgaaaga

SEQ ID NO: 143248 - DNA, 481 bp, Homo sapiens; identical to SEQ ID NO: 38347
  chr2:182321356-182321837
  hypo

SEQ ID NO: 143249 - DNA, 153 bp, Homo sapiens; identical to SEQ ID NO: 2063
  chr2:182322038-182322191
  hypo

SEQ ID NO: 143250 - DNA, 744 bp, Homo sapiens; identical to SEQ ID NO: 38349
  chr2:182322399-182323143
  hypo

SEQ ID NO: 143251 - DNA, 30 bp, Homo sapiens
  chr2:182360740-182360770
  hypo
caccggttttcaccacggagatcttcttta

SEQ ID NO: 143252 - DNA, 164 bp, Homo sapiens; identical to SEQ ID NO: 64385
  chr2:182413424-182413588
  hypo

SEQ ID NO: 143253 - DNA, 30 bp, Homo sapiens
  chr2:182559208-182559238
  hypo
cggagccagagaacccgatcaaccgtgaga

SEQ ID NO: 143254 - DNA, 31 bp, Homo sapiens; identical to SEQ ID NO: 2069
  chr2:182756672-182756703
  hypo

SEQ ID NO: 143255 - DNA, 31 bp, Homo sapiens; identical to SEQ ID NO: 16751
  chr2:183587686-183587717
  hypo

SEQ ID NO: 143256 - DNA, 36 bp, Homo sapiens
  chr2:183811122-183811158
  hypo
tgtttacaaaaaaaaaaggagcgacacacaccaggg

SEQ ID NO: 143257 - DNA, 26 bp, Homo sapiens
  chr2:183865807-183865833
  hypo
gagacgctgtctcaaagaaagaaaaa

SEQ ID NO: 143258 - DNA, 105 bp, Homo sapiens; identical to SEQ ID NO: 38372
  chr2:183902296-183902401
  hypo

SEQ ID NO: 143259 - DNA, 567 bp, Homo sapiens; identical to SEQ ID NO: 2074
  chr2:183902442-183903009
  hypo

SEQ ID NO: 143260 - DNA, 601 bp, Homo sapiens; identical to SEQ ID NO: 38374
  chr2:183903037-183903638
  hypo

SEQ ID NO: 143261 - DNA, 31 bp, Homo sapiens; identical to SEQ ID NO: 64392
  chr2:183964790-183964821
  hypo

SEQ ID NO: 143262 - DNA, 34 bp, Homo sapiens
  chr2:183991027-183991061
  hypo
attagaggcttgcgccttctactgtgtctgtatg

SEQ ID NO: 143263 - DNA, 30 bp, Homo sapiens; identical to SEQ ID NO: 64393
  chr2:184122780-184122810
  hypo

SEQ ID NO: 143264 - DNA, 30 bp, Homo sapiens; identical to SEQ ID NO: 2077
  chr2:184857322-184857352
  hypo

SEQ ID NO: 143265 - DNA, 1570 bp, Homo sapiens; identical to SEQ ID NO: 38377
  chr2:185462254-185463824
  hypo

SEQ ID NO: 143266 - DNA, 93 bp, Homo sapiens; identical to SEQ ID NO: 64396
  chr2:185490892-185490985
  hypo

SEQ ID NO: 143267 - DNA, 44 bp, Homo sapiens; identical to SEQ ID NO: 64397
  chr2:186081367-186081411
  hypo

SEQ ID NO: 143268 - DNA, 30 bp, Homo sapiens
  chr2:187167177-187167207
  hypo
acagatagaaaagaccgcaatatatcaaac

SEQ ID NO: 143269 - DNA, 30 bp, Homo sapiens; identical to SEQ ID NO: 64398
  chr2:187355304-187355334
  hypo

SEQ ID NO: 143270 - DNA, 285 bp, Homo sapiens; identical to SEQ ID NO: 2079
  chr2:187454989-187455274
  hypo

SEQ ID NO: 143271 - DNA, 33 bp, Homo sapiens
  chr2:188404595-188404628
  hypo
catcacaaccaccacccattacgtcatcttctt

SEQ ID NO: 143272 - DNA, 17 bp, Homo sapiens
  chr2:190351918-190351935
  hypo
cccggcctgctgggttt

SEQ ID NO: 143273 - DNA, 29 bp, Homo sapiens
  chr2:190368121-190368150
  hypo
gccgggattacaggcgtgagccaccacgc

SEQ ID NO: 143274 - DNA, 83 bp, Homo sapiens
  chr2:190369340-190369423
  hypo
ttatctatgaatgttacttaacgacattttaatactaaaatctggctgtacaggttttagggattatttaaataatcggaaaa

SEQ ID NO: 143275 - DNA, 30 bp, Homo sapiens; identical to SEQ ID NO: 16759
  chr2:190409988-190410018
  hypo

SEQ ID NO: 143276 - DNA, 29 bp, Homo sapiens
  chr2:190421331-190421360
  hypo
gccaccgcggccctattaatactttttta

SEQ ID NO: 143277 - DNA, 30 bp, Homo sapiens; identical to SEQ ID NO: 64402
  chr2:190616056-190616086
  hypo

SEQ ID NO: 143278 - DNA, 116 bp, Homo sapiens; identical to SEQ ID NO: 64403
  chr2:190686868-190686984
  hypo

SEQ ID NO: 143279 - DNA, 30 bp, Homo sapiens; identical to SEQ ID NO: 16760
  chr2:190703412-190703442
  hypo

SEQ ID NO: 143280 - DNA, 98 bp, Homo sapiens; identical to SEQ ID NO: 16761
  chr2:190703659-190703757
  hypo

SEQ ID NO: 143281 - DNA, 30 bp, Homo sapiens; identical to SEQ ID NO: 16762
  chr2:190704167-190704197
  hypo

SEQ ID NO: 143282 - DNA, 30 bp, Homo sapiens
  chr2:190719044-190719074
  hypo
taaaacagatgtttccgcagctgacatcgt

SEQ ID NO: 143283 - DNA, 202 bp, Homo sapiens; identical to SEQ ID NO: 38391
  chr2:191044991-191045193
  hypo

SEQ ID NO: 143284 - DNA, 763 bp, Homo sapiens; identical to SEQ ID NO: 107170
  chr2:191045258-191046021
  hypo

SEQ ID NO: 143285 - DNA, 121 bp, Homo sapiens
  chr2:191145273-191145394
  hypo
gagtgggcccaagcatgtgcatttagatgcaaaattgcagagtttaactggtatataaccttcctctaaaaatgttcaacttagcaagggggaaaatgcctcaaatgagcatgcgcacaac

SEQ ID NO: 143286 - DNA, 126 bp, Homo sapiens
  chr2:191301772-191301898
  hypo
ctgtctgtgggcatcgggatcgactacacccacatcgaagtgctcatcgatggaaaggggtgtaagccccccgagtacaggaattaccagatcgtcttcatcgtcttcggcgttctcatgaccatg

SEQ ID NO: 143287 - DNA, 26 bp, Homo sapiens
  chr2:191374476-191374502
  hypo
attttccagctgggtgcggtggctca

SEQ ID NO: 143288 - DNA, 30 bp, Homo sapiens
  chr2:191375096-191375126
  hypo
tgtggagtctggagacgaccagccatgagg

SEQ ID NO: 143289 - DNA, 181 bp, Homo sapiens; identical to SEQ ID NO: 107175
  chr2:191512940-191513121
  hypo

SEQ ID NO: 143290 - DNA, 30 bp, Homo sapiens; identical to SEQ ID NO: 2095
  chr2:191728884-191728914
  hypo

SEQ ID NO: 143291 - DNA, 17 bp, Homo sapiens
  chr2:191793066-191793083
  hypo
ttttttttttttgagac

SEQ ID NO: 143292 - DNA, 121 bp, Homo sapiens; identical to SEQ ID NO: 16769
  chr2:191794488-191794609
  hypo

SEQ ID NO: 143293 - DNA, 217 bp, Homo sapiens; identical to SEQ ID NO: 64415
  chr2:191796738-191796955
  hypo

SEQ ID NO: 143294 - DNA, 112 bp, Homo sapiens
  chr2:191829750-191829862
  hypo
tttatgactatgtgccgattcctgctcgggctgtttgctgttggctggtaataatatatttgatttaaatgctgttgactgtgctattaactgctgccgtcagtaaactcca

SEQ ID NO: 143295 - DNA, 839 bp, Homo sapiens; identical to SEQ ID NO: 38406
  chr2:192109716-192110555
  hypo

SEQ ID NO: 143296 - DNA, 444 bp, Homo sapiens; identical to SEQ ID NO: 107187
  chr2:192110584-192111028
  hypo

SEQ ID NO: 143297 - DNA, 30 bp, Homo sapiens
  chr2:192145292-192145322
  hypo
cttggttaggctgccggagtcacactccct

SEQ ID NO: 143298 - DNA, 85 bp, Homo sapiens; identical to SEQ ID NO: 64418
  chr2:192342591-192342676
  hypo

SEQ ID NO: 143299 - DNA, 28 bp, Homo sapiens
  chr2:192544126-192544154
  hypo
cgagtctcgctctgtcgccaagctggag

SEQ ID NO: 143300 - DNA, 30 bp, Homo sapiens; identical to SEQ ID NO: 38410
  chr2:192587188-192587218
  hypo

SEQ ID NO: 143301 - DNA, 31 bp, Homo sapiens; identical to SEQ ID NO: 64420
  chr2:192746022-192746053
  hypo

SEQ ID NO: 143302 - DNA, 146 bp, Homo sapiens; identical to SEQ ID NO: 64421
  chr2:192746554-192746700
  hypo

SEQ ID NO: 143303 - DNA, 343 bp, Homo sapiens; identical to SEQ ID NO: 2103
  chr2:193058974-193059317
  hypo

SEQ ID NO: 143304 - DNA, 204 bp, Homo sapiens; identical to SEQ ID NO: 2104
  chr2:193059344-193059548
  hypo

SEQ ID NO: 143305 - DNA, 1231 bp, Homo sapiens; identical to SEQ ID NO: 2105
  chr2:193059661-193060892
  hypo

SEQ ID NO: 143306 - DNA, 31 bp, Homo sapiens; identical to SEQ ID NO: 16777
  chr2:194333178-194333209
  hypo

SEQ ID NO: 143307 - DNA, 43 bp, Homo sapiens; identical to SEQ ID NO: 64426
  chr2:196362208-196362251
  hypo

SEQ ID NO: 143308 - DNA, 45 bp, Homo sapiens; identical to SEQ ID NO: 16778
  chr2:196402552-196402597
  hypo

SEQ ID NO: 143309 - DNA, 100 bp, Homo sapiens
  chr2:196411140-196411240
  hypo
gctggagtactgttgcggcattttggctcactacagcactataataaaaaattaaacagtgcagtggctcacacctgtaatcctgggtccggaattggcg

SEQ ID NO: 143310 - DNA, 100 bp, Homo sapiens; identical to SEQ ID NO: 64428
  chr2:196411539-196411639
  hypo

SEQ ID NO: 143311 - DNA, 106 bp, Homo sapiens
  chr2:196462781-196462887
  hypo
aggtgtaactgatcatcctaccgccatctcccaagtagctgggacaacaggcttccgccaccacgcggagtttcactatgttgcccaggcttgtctcgaactcctg

SEQ ID NO: 143312 - DNA, 41 bp, Homo sapiens; identical to SEQ ID NO: 64429
  chr2:196477242-196477283
  hypo

SEQ ID NO: 143313 - DNA, 32 bp, Homo sapiens
  chr2:197003965-197003997
  hypo
gcgtgagccaccgcgcccggccgtaaaatcat

SEQ ID NO: 143314 - DNA, 387 bp, Homo sapiens; identical to SEQ ID NO: 107197
  chr2:197035575-197035962
  hypo

SEQ ID NO: 143315 - DNA, 90 bp, Homo sapiens; identical to SEQ ID NO: 64431
  chr2:197038937-197039027
  hypo

SEQ ID NO: 143316 - DNA, 30 bp, Homo sapiens; identical to SEQ ID NO: 16780
  chr2:197094969-197094999
  hypo

SEQ ID NO: 143317 - DNA, 30 bp, Homo sapiens; identical to SEQ ID NO: 16781
  chr2:197095365-197095395
  hypo

SEQ ID NO: 143318 - DNA, 39 bp, Homo sapiens; identical to SEQ ID NO: 64434
  chr2:197095850-197095889
  hypo

SEQ ID NO: 143319 - DNA, 30 bp, Homo sapiens
  chr2:197143287-197143317
  hypo
ttgccgatgaaccagcgcacttgtgggtct

SEQ ID NO: 143320 - DNA, 150 bp, Homo sapiens
  chr2:197379962-197380112
  hypo
gatcccatgctcacttgcccacacacttctcgctgctctgcacccggcttggcaggtgtgagacccaggctgttagtacaagccaagtgcaggctgctgggccaagtgggcagaataagcccagcaggcgcaaacaaaactcaggcagaa

SEQ ID NO: 143321 - DNA, 1386 bp, Homo sapiens; identical to SEQ ID NO: 107198
  chr2:197457183-197458569
  hypo

SEQ ID NO: 143322 - DNA, 30 bp, Homo sapiens
  chr2:197501350-197501380
  hypo
ttctcagccgtggccgggcgcggtggctca

SEQ ID NO: 143323 - DNA, 31 bp, Homo sapiens; identical to SEQ ID NO: 64436
  chr2:197503798-197503829
  hypo

SEQ ID NO: 143324 - DNA, 30 bp, Homo sapiens
  chr2:197629265-197629295
  hypo
tctgttctcagttgcggtgctttatataga

SEQ ID NO: 143325 - DNA, 16 bp, Homo sapiens
  chr2:197663622-197663638
  hypo
taaaaatttaaaaagg

SEQ ID NO: 143326 - DNA, 30 bp, Homo sapiens
  chr2:198101797-198101827
  hypo
tttttagagcaaactcgactcctttaagtc

SEQ ID NO: 143327 - DNA, 31 bp, Homo sapiens; identical to SEQ ID NO: 64438
  chr2:198252232-198252263
  hypo

SEQ ID NO: 143328 - DNA, 30 bp, Homo sapiens; identical to SEQ ID NO: 2109
  chr2:198257066-198257096
  hypo

SEQ ID NO: 143329 - DNA, 122 bp, Homo sapiens; identical to SEQ ID NO: 2110
  chr2:198257785-198257907
  hypo

SEQ ID NO: 143330 - DNA, 30 bp, Homo sapiens; identical to SEQ ID NO: 2111
  chr2:198260933-198260963
  hypo

SEQ ID NO: 143331 - DNA, 26 bp, Homo sapiens
  chr2:198262503-198262529
  hypo
gagcgagactccgtctcaaaaaaaaa

SEQ ID NO: 143332 - DNA, 107 bp, Homo sapiens; identical to SEQ ID NO: 2112
  chr2:198262739-198262846
  hypo

SEQ ID NO: 143333 - DNA, 149 bp, Homo sapiens; identical to SEQ ID NO: 2113
  chr2:198265014-198265163
  hypo

SEQ ID NO: 143334 - DNA, 179 bp, Homo sapiens; identical to SEQ ID NO: 2114
  chr2:198265428-198265607
  hypo

SEQ ID NO: 143335 - DNA, 30 bp, Homo sapiens; identical to SEQ ID NO: 2115
  chr2:198266164-198266194
  hypo

SEQ ID NO: 143336 - DNA, 371 bp, Homo sapiens; identical to SEQ ID NO: 2116
  chr2:198266478-198266849
  hypo

SEQ ID NO: 143337 - DNA, 433 bp, Homo sapiens; identical to SEQ ID NO: 2117
  chr2:198267317-198267750
  hypo

SEQ ID NO: 143338 - DNA, 71 bp, Homo sapiens; identical to SEQ ID NO: 2118
  chr2:198268365-198268436
  hypo

SEQ ID NO: 143339 - DNA, 94 bp, Homo sapiens; identical to SEQ ID NO: 2119
  chr2:198269811-198269905
  hypo

SEQ ID NO: 143340 - DNA, 30 bp, Homo sapiens; identical to SEQ ID NO: 2120
  chr2:198270121-198270151
  hypo

SEQ ID NO: 143341 - DNA, 82 bp, Homo sapiens; identical to SEQ ID NO: 2121
  chr2:198272717-198272799
  hypo

SEQ ID NO: 143342 - DNA, 148 bp, Homo sapiens; identical to SEQ ID NO: 2122
  chr2:198273116-198273264
  hypo

SEQ ID NO: 143343 - DNA, 30 bp, Homo sapiens; identical to SEQ ID NO: 2123
  chr2:198274673-198274703
  hypo

SEQ ID NO: 143344 - DNA, 105 bp, Homo sapiens; identical to SEQ ID NO: 16798
  chr2:198276037-198276142
  hypo

SEQ ID NO: 143345 - DNA, 30 bp, Homo sapiens; identical to SEQ ID NO: 2124
  chr2:198285175-198285205
  hypo

SEQ ID NO: 143346 - DNA, 38 bp, Homo sapiens; identical to SEQ ID NO: 16800
  chr2:198317067-198317105
  hypo

SEQ ID NO: 143347 - DNA, 44 bp, Homo sapiens
  chr2:198356152-198356196
  hypo
ggattacaggcatgagtcaccacgcccagccaagtcttttctta

SEQ ID NO: 143348 - DNA, 30 bp, Homo sapiens
  chr2:198379061-198379091
  hypo
caaaactttgtttcacgcacaaaattattt

SEQ ID NO: 143349 - DNA, 121 bp, Homo sapiens; identical to SEQ ID NO: 16801
  chr2:198456556-198456677
  hypo

SEQ ID NO: 143350 - DNA, 1300 bp, Homo sapiens; identical to SEQ ID NO: 107229
  chr2:198669112-198670412
  hypo

SEQ ID NO: 143351 - DNA, 929 bp, Homo sapiens; identical to SEQ ID NO: 38439
  chr2:200320440-200321369
  hypo

SEQ ID NO: 143352 - DNA, 390 bp, Homo sapiens; identical to SEQ ID NO: 107231
  chr2:200321660-200322050
  hypo

SEQ ID NO: 143353 - DNA, 214 bp, Homo sapiens; identical to SEQ ID NO: 107232
  chr2:200322456-200322670
  hypo

SEQ ID NO: 143354 - DNA, 782 bp, Homo sapiens; identical to SEQ ID NO: 107233
  chr2:200323015-200323797
  hypo

SEQ ID NO: 143355 - DNA, 583 bp, Homo sapiens; identical to SEQ ID NO: 107234
  chr2:200324028-200324611
  hypo

SEQ ID NO: 143356 - DNA, 31 bp, Homo sapiens; identical to SEQ ID NO: 64463
  chr2:200457172-200457203
  hypo

SEQ ID NO: 143357 - DNA, 30 bp, Homo sapiens; identical to SEQ ID NO: 64464
  chr2:200524604-200524634
  hypo

SEQ ID NO: 143358 - DNA, 30 bp, Homo sapiens
  chr2:200528713-200528743
  hypo
agacggatacactgacgtgctcttcagtga

SEQ ID NO: 143359 - DNA, 28 bp, Homo sapiens
  chr2:200807067-200807095
  hypo
gcgtgagctaccgcgcccggccagcctt

SEQ ID NO: 143360 - DNA, 58 bp, Homo sapiens; identical to SEQ ID NO: 64466
  chr2:200938956-200939014
  hypo

SEQ ID NO: 143361 - DNA, 30 bp, Homo sapiens; identical to SEQ ID NO: 16804
  chr2:200959336-200959366
  hypo

SEQ ID NO: 143362 - DNA, 24 bp, Homo sapiens
  chr2:201156518-201156542
  hypo
tatttttaagaattaagtggccgg

SEQ ID NO: 143363 - DNA, 24 bp, Homo sapiens
  chr2:201156841-201156865
  hypo
tccgtctcaaaagaacaaaaacaa

SEQ ID NO: 143364 - DNA, 30 bp, Homo sapiens; identical to SEQ ID NO: 64469
  chr2:201168278-201168308
  hypo

SEQ ID NO: 143365 - DNA, 1505 bp, Homo sapiens; identical to SEQ ID NO: 107254
  chr2:201171094-201172599
  hypo

SEQ ID NO: 143366 - DNA, 144 bp, Homo sapiens
  chr2:201218933-201219077
  hypo
gtgttgatgttcctcgctctcatacaatgagatgactttaactttaccctgtgatcctagaagtggagccataggtcttggacagtgtagccagccctagtaaagaatcaagttcaggtcgggcgcgatggctcacacctgtaa

SEQ ID NO: 143367 - DNA, 23 bp, Homo sapiens
  chr2:201219316-201219339
  hypo
caagactccgtctcaaaaaaaaa

SEQ ID NO: 143368 - DNA, 318 bp, Homo sapiens
  chr2:201273679-201273997
  hypo
taaagcagttgctaaatgaaccgctaactagccatcttgactgtcacccaacagcggccgcctggtgggaccactttgtttatggcatgagagtcctttagcggggcagtcaagtgcagcttcaaacggtggcttaggtgttagcctgggctgtggcaatgaagtaaaaggctgtgtgaagctgcgccagaaacagcctctgcaaaacagccgctgcgggcgtgaattttatgagttctccgtatgcaaactactattagtcacgcattgattgatccattccttccaggagcatccgtcctcagaagcttggtttcc

SEQ ID NO: 143369 - DNA, 351 bp, Homo sapiens
  chr2:201281659-201282010
  hypo
aggggctttcttgaacactggcgtactgctctttgagaacaaagggaaggggattttactgtgtcccattcaaactggtttgctttcttgtcgagtcacaaagggcctgggatttctgggagctcgtgagatgcgtctgtgcatacacactagcaaaagtgtgccgctcctttcaaagtaactgttccactcattcctgctatgacacagcaaggccttgtgtttcggatttcccaggatatagtacgccagtctacccttcccagtgggggaagatcacaggcctgcaaaacaggttctgaacaaacaataacacagtattactttcataaaacccgaagattactgaaa

SEQ ID NO: 143370 - DNA, 21 bp, Homo sapiens
  chr2:201330741-201330762
  hypo
gagactctgtctcaaaacaaa

SEQ ID NO: 143371 - DNA, 324 bp, Homo sapiens; identical to SEQ ID NO: 64476
  chr2:201354839-201355163
  hypo

SEQ ID NO: 143372 - DNA, 30 bp, Homo sapiens
  chr2:201371135-201371165
  hypo
agctaggctaggtggcgagcccaacactaa

SEQ ID NO: 143373 - DNA, 30 bp, Homo sapiens
  chr2:201371647-201371677
  hypo
cacaaggactcccgccgggctgtgtaaata

SEQ ID NO: 143374 - DNA, 21 bp, Homo sapiens
  chr2:201389474-201389495
  hypo
ccaccgcgcccggctagcact

SEQ ID NO: 143375 - DNA, 31 bp, Homo sapiens; identical to SEQ ID NO: 16812
  chr2:201502745-201502776
  hypo

SEQ ID NO: 143376 - DNA, 30 bp, Homo sapiens
  chr2:201630936-201630966
  hypo
ttcccttcacctgtacggccacaccgcatc

SEQ ID NO: 143377 - DNA, 340 bp, Homo sapiens; identical to SEQ ID NO: 64479
  chr2:201652445-201652785
  hypo

SEQ ID NO: 143378 - DNA, 30 bp, Homo sapiens
  chr2:201681170-201681200
  hypo
ttaaatcctaattccgccacagatttggag

SEQ ID NO: 143379 - DNA, 31 bp, Homo sapiens; identical to SEQ ID NO: 16814
  chr2:201691288-201691319
  hypo

SEQ ID NO: 143380 - DNA, 83 bp, Homo sapiens
  chr2:201712541-201712624
  hypo
ttacagcaatctcattcgcagagttttacaatgtgtacatatgggcaggtgcaaatgcatagagagagaaccagaaagtaatg

SEQ ID NO: 143381 - DNA, 121 bp, Homo sapiens; identical to SEQ ID NO: 64482
  chr2:201809207-201809328
  hypo

SEQ ID NO: 143382 - DNA, 30 bp, Homo sapiens
  chr2:201939995-201940025
  hypo
atgttatatttagccgggcaccgtggctca

SEQ ID NO: 143383 - DNA, 18 bp, Homo sapiens
  chr2:201966896-201966914
  hypo
taaagaataatttgttct

SEQ ID NO: 143384 - DNA, 183 bp, Homo sapiens
  chr2:202003518-202003701
  hypo
tacctcccatcagagccatcacgatggccaggtcggcctctgtcacagtgtccatgggggaggagatcagcggcgtcttcagagtgaccattgggtcagggctgaggtcaggtccacctcatcagctatgaagtctatgaatcctgggagaatcaagaagtcgttgtaggtgagtccctggtc

SEQ ID NO: 143385 - DNA, 258 bp, Homo sapiens; identical to SEQ ID NO: 64485
  chr2:202004688-202004946
  hypo

SEQ ID NO: 143386 - DNA, 30 bp, Homo sapiens; identical to SEQ ID NO: 64486
  chr2:202015887-202015917
  hypo

SEQ ID NO: 143387 - DNA, 36 bp, Homo sapiens; identical to SEQ ID NO: 64487
  chr2:202119807-202119843
  hypo

SEQ ID NO: 143388 - DNA, 30 bp, Homo sapiens; identical to SEQ ID NO: 64488
  chr2:202136468-202136498
  hypo

SEQ ID NO: 143389 - DNA, 98 bp, Homo sapiens; identical to SEQ ID NO: 64489
  chr2:202261465-202261563
  hypo

SEQ ID NO: 143390 - DNA, 42 bp, Homo sapiens; identical to SEQ ID NO: 64490
  chr2:202270407-202270449
  hypo

SEQ ID NO: 143391 - DNA, 27 bp, Homo sapiens
  chr2:202315117-202315144
  hypo
cagagcgagactctgtcttaaaaaaaa

SEQ ID NO: 143392 - DNA, 29 bp, Homo sapiens
  chr2:202416440-202416469
  hypo
aacatggagaaaccccgtctctactaaaa

SEQ ID NO: 143393 - DNA, 28 bp, Homo sapiens
  chr2:202416768-202416796
  hypo
agtggtgcgatctcggccccgtgtgatc

SEQ ID NO: 143394 - DNA, 30 bp, Homo sapiens
  chr2:202574654-202574684
  hypo
tcctgcaataacctgcggttggctcctacg

SEQ ID NO: 143395 - DNA, 205 bp, Homo sapiens; identical to SEQ ID NO: 38481
  chr2:202644944-202645149
  hypo

SEQ ID NO: 143396 - DNA, 23 bp, Homo sapiens
  chr2:202669896-202669919
  hypo
gggtgcggtggctcacgcctgta

SEQ ID NO: 143397 - DNA, 23 bp, Homo sapiens
  chr2:202670158-202670181
  hypo
gcgagactctgtctcaaaaaaaa

SEQ ID NO: 143398 - DNA, 30 bp, Homo sapiens
  chr2:202719718-202719748
  hypo
gccacgctaacagggcgttcttgtattgtg

SEQ ID NO: 143399 - DNA, 30 bp, Homo sapiens; identical to SEQ ID NO: 16817
  chr2:202848776-202848806
  hypo

SEQ ID NO: 143400 - DNA, 105 bp, Homo sapiens; identical to SEQ ID NO: 64494
  chr2:202888727-202888832
  hypo

SEQ ID NO: 143401 - DNA, 44 bp, Homo sapiens; identical to SEQ ID NO: 64495
  chr2:202893411-202893455
  hypo

SEQ ID NO: 143402 - DNA, 1090 bp, Homo sapiens; identical to SEQ ID NO: 38484
  chr2:202898960-202900050
  hypo

SEQ ID NO: 143403 - DNA, 40 bp, Homo sapiens; identical to SEQ ID NO: 107289
  chr2:202900071-202900111
  hypo

SEQ ID NO: 143404 - DNA, 24 bp, Homo sapiens
  chr2:203068493-203068517
  hypo
tctttttttttttttttgagacgg

SEQ ID NO: 143405 - DNA, 81 bp, Homo sapiens; identical to SEQ ID NO: 64499
  chr2:203129281-203129362
  hypo

SEQ ID NO: 143406 - DNA, 46 bp, Homo sapiens; identical to SEQ ID NO: 64500
  chr2:203163326-203163372
  hypo

SEQ ID NO: 143407 - DNA, 309 bp, Homo sapiens; identical to SEQ ID NO: 107298
  chr2:203242123-203242432
  hypo

SEQ ID NO: 143408 - DNA, 35 bp, Homo sapiens; identical to SEQ ID NO: 16819
  chr2:203250364-203250399
  hypo

SEQ ID NO: 143409 - DNA, 163 bp, Homo sapiens; identical to SEQ ID NO: 16820
  chr2:203431924-203432087
  hypo

SEQ ID NO: 143410 - DNA, 80 bp, Homo sapiens; identical to SEQ ID NO: 64503
  chr2:203467677-203467757
  hypo

SEQ ID NO: 143411 - DNA, 287 bp, Homo sapiens
  chr2:203484333-203484620
  hypo
gggggaatgccatatcgggtgcaccagttatcagagggactagccagttcccgaaacccccaattatgattggtatcaccataaagaagatgaaaacgaacgcgtgggcagtaacaataacattgtacatctgatcatctcctagtagagtttctggttggtctagtcctgcttgaattaggaagcttaaggcggtgcctattatctccgctcttgcgccgaatagcaggtatagtgttccggtgactttgtggttagttgaaaacaatcaacgattgatgaacata

SEQ ID NO: 143412 - DNA, 34 bp, Homo sapiens; identical to SEQ ID NO: 64505
  chr2:203498544-203498578
  hypo

SEQ ID NO: 143413 - DNA, 30 bp, Homo sapiens
  chr2:203524621-203524651
  hypo
gtaagccactgcgcccggccaccaccgtgc

SEQ ID NO: 143414 - DNA, 98 bp, Homo sapiens; identical to SEQ ID NO: 64506
  chr2:203621983-203622081
  hypo

SEQ ID NO: 143415 - DNA, 35 bp, Homo sapiens; identical to SEQ ID NO: 64507
  chr2:203880464-203880499
  hypo

SEQ ID NO: 143416 - DNA, 46 bp, Homo sapiens; identical to SEQ ID NO: 64508
  chr2:204055397-204055443
  hypo

SEQ ID NO: 143417 - DNA, 30 bp, Homo sapiens
  chr2:204102484-204102514
  hypo
aacgccaaatgctgacgtagatagcactta

SEQ ID NO: 143418 - DNA, 30 bp, Homo sapiens
  chr2:204102841-204102871
  hypo
gtgtaacagtgtccccgggagggctctgtt

SEQ ID NO: 143419 - DNA, 33 bp, Homo sapiens; identical to SEQ ID NO: 64509
  chr2:204190591-204190624
  hypo

SEQ ID NO: 143420 - DNA, 32 bp, Homo sapiens; identical to SEQ ID NO: 64510
  chr2:204206112-204206144
  hypo

SEQ ID NO: 143421 - DNA, 30 bp, Homo sapiens
  chr2:204292868-204292898
  hypo
tgtgaagctagacacgaaggtccctaaggt

SEQ ID NO: 143422 - DNA, 196 bp, Homo sapiens; identical to SEQ ID NO: 107310
  chr2:204399767-204399963
  hypo

SEQ ID NO: 143423 - DNA, 40 bp, Homo sapiens; identical to SEQ ID NO: 64512
  chr2:204475584-204475624
  hypo

SEQ ID NO: 143424 - DNA, 30 bp, Homo sapiens
  chr2:204735334-204735364
  hypo
gtactggccagcagccgaggcatcgccagc

SEQ ID NO: 143425 - DNA, 226 bp, Homo sapiens
  chr2:204803397-204803623
  hypo
gaattaaagtagcatcggtgtcaattctgtggaaggtgagatccagccttaggtaggattgttttaagtttccagattaagctgacgaataatttgtattctggaacaatattcatcgtagattctaaatgaatacaaccaatgttcactctcattataaagaaagccatgagatgtggcatgctgtttggcatgtggcaaacctgaggcacgagtggctaaatgg

SEQ ID NO: 143426 - DNA, 30 bp, Homo sapiens; identical to SEQ ID NO: 16825
  chr2:205130909-205130939
  hypo

SEQ ID NO: 143427 - DNA, 24 bp, Homo sapiens
  chr2:205341736-205341760
  hypo
taggaaagtaacaggccgggcgcg

SEQ ID NO: 143428 - DNA, 30 bp, Homo sapiens
  chr2:205693213-205693243
  hypo
ttttataccatagtccggggaattgtttgt

SEQ ID NO: 143429 - DNA, 24 bp, Homo sapiens
  chr2:205817433-205817457
  hypo
tatcacggtcaggcgcggtggctc

SEQ ID NO: 143430 - DNA, 17 bp, Homo sapiens
  chr2:205861813-205861830
  hypo
atcttggctcctcccct

SEQ ID NO: 143431 - DNA, 30 bp, Homo sapiens; identical to SEQ ID NO: 64516
  chr2:205984017-205984047
  hypo

SEQ ID NO: 143432 - DNA, 35 bp, Homo sapiens; identical to SEQ ID NO: 16827
  chr2:205984486-205984521
  hypo

SEQ ID NO: 143433 - DNA, 30 bp, Homo sapiens
  chr2:206040714-206040744
  hypo
gtggtatttcagaggcgaacctgcttgaat

SEQ ID NO: 143434 - DNA, 31 bp, Homo sapiens; identical to SEQ ID NO: 2155
  chr2:206166172-206166203
  hypo

SEQ ID NO: 143435 - DNA, 45 bp, Homo sapiens; identical to SEQ ID NO: 64519
  chr2:206166493-206166538
  hypo

SEQ ID NO: 143436 - DNA, 30 bp, Homo sapiens
  chr2:206473840-206473870
  hypo
aagctatgtaatatacgttgcagagggctc

SEQ ID NO: 143437 - DNA, 30 bp, Homo sapiens
  chr2:206514225-206514255
  hypo
catcatgtgaaacacggcaatcacctttcc

SEQ ID NO: 143438 - DNA, 664 bp, Homo sapiens; identical to SEQ ID NO: 107315
  chr2:206546582-206547246
  hypo

SEQ ID NO: 143439 - DNA, 30 bp, Homo sapiens
  chr2:206586126-206586156
  hypo
cactttcattcattgcgtgaatgtgcatga

SEQ ID NO: 143440 - DNA, 150 bp, Homo sapiens; identical to SEQ ID NO: 64521
  chr2:206586381-206586531
  hypo

SEQ ID NO: 143441 - DNA, 115 bp, Homo sapiens
  chr2:206605277-206605392
  hypo
tctgaacaagctccacgctccactgctgacaaggtttgttagaatccgccctcagacctggcactcaggtatcgccctccggctggagctcttcggctgccgggtcacaggtgag

SEQ ID NO: 143442 - DNA, 177 bp, Homo sapiens; identical to SEQ ID NO: 64523
  chr2:206608211-206608388
  hypo

SEQ ID NO: 143443 - DNA, 89 bp, Homo sapiens; identical to SEQ ID NO: 64524
  chr2:206609769-206609858
  hypo

SEQ ID NO: 143444 - DNA, 316 bp, Homo sapiens
  chr2:206611451-206611767
  hypo
ttttcctgtctgtgccgtacctgtcacgggctcagccggcaggatggcatgagggattaataagggcatgtcggagaagtgcttttggctcccagggagaaaaatgctgcctgtatgctggctacagcagcgcagaggagccctgttgaggcacacgggctgggaattgggcccaaattagcctcctcacttttgaattgaaggcagccccagcgaacacatcttcataggaagacacttaactccccattacctggggatgaggccaaagttccctgcagcctgctaaacgtgtgtcacccgtcctctcacaggt

SEQ ID NO: 143445 - DNA, 57 bp, Homo sapiens
  chr2:206614127-206614184
  hypo
ccttggagtcagcgtcgcctgtagccccctccattattgtctcgtggccttttgtgc

SEQ ID NO: 143446 - DNA, 30 bp, Homo sapiens
  chr2:206669895-206669925
  hypo
cgaagtgatgggtcgcgtccaattcatttt

SEQ ID NO: 143447 - DNA, 104 bp, Homo sapiens
  chr2:206670207-206670311
  hypo
aatcaaaaagggggacgcagtggcagccaaagccaagcgaagcagatttgacctgcgcactgcatgaaatcccttctgccagcctgcaccggttaggaccgtca

SEQ ID NO: 143448 - DNA, 30 bp, Homo sapiens
  chr2:206701292-206701322
  hypo
gagccaccccacccccgctgcttctgctgc

SEQ ID NO: 143449 - DNA, 30 bp, Homo sapiens
  chr2:206757648-206757678
  hypo
aaaggaggtgagtggcgattgggtcccccg

SEQ ID NO: 143450 - DNA, 154 bp, Homo sapiens; identical to SEQ ID NO: 64525
  chr2:206826959-206827113
  hypo

SEQ ID NO: 143451 - DNA, 147 bp, Homo sapiens; identical to SEQ ID NO: 16832
  chr2:206830586-206830733
  hypo

SEQ ID NO: 143452 - DNA, 27 bp, Homo sapiens
  chr2:206830792-206830819
  hypo
gtgaccgctgctgtggtgggggaactg

SEQ ID NO: 143453 - DNA, 28 bp, Homo sapiens
  chr2:206889972-206890000
  hypo
cacgcatggtagctcacgcctgtaatcc

SEQ ID NO: 143454 - DNA, 149 bp, Homo sapiens; identical to SEQ ID NO: 16835
  chr2:206890497-206890646
  hypo

SEQ ID NO: 143455 - DNA, 140 bp, Homo sapiens; identical to SEQ ID NO: 64530
  chr2:206896303-206896443
  hypo

SEQ ID NO: 143456 - DNA, 24 bp, Homo sapiens
  chr2:206970535-206970559
  hypo
catgtaagaatataactggaccga

SEQ ID NO: 143457 - DNA, 42 bp, Homo sapiens; identical to SEQ ID NO: 64532
  chr2:206971200-206971242
  hypo

SEQ ID NO: 143458 - DNA, 42 bp, Homo sapiens; identical to SEQ ID NO: 64533
  chr2:206971481-206971523
  hypo

SEQ ID NO: 143459 - DNA, 44 bp, Homo sapiens; identical to SEQ ID NO: 16836
  chr2:207021943-207021987
  hypo

SEQ ID NO: 143460 - DNA, 81 bp, Homo sapiens; identical to SEQ ID NO: 64535
  chr2:207068387-207068468
  hypo

SEQ ID NO: 143461 - DNA, 38 bp, Homo sapiens; identical to SEQ ID NO: 64536
  chr2:207068776-207068814
  hypo

SEQ ID NO: 143462 - DNA, 1087 bp, Homo sapiens; identical to SEQ ID NO: 107329
  chr2:207139217-207140304
  hypo

SEQ ID NO: 143463 - DNA, 86 bp, Homo sapiens; identical to SEQ ID NO: 107330
  chr2:207307391-207307477
  hypo

SEQ ID NO: 143464 - DNA, 126 bp, Homo sapiens; identical to SEQ ID NO: 2160
  chr2:207307547-207307673
  hypo

SEQ ID NO: 143465 - DNA, 1523 bp, Homo sapiens; identical to SEQ ID NO: 107332
  chr2:207307712-207309235
  hypo

SEQ ID NO: 143466 - DNA, 31 bp, Homo sapiens; identical to SEQ ID NO: 64541
  chr2:207395272-207395303
  hypo

SEQ ID NO: 143467 - DNA, 30 bp, Homo sapiens; identical to SEQ ID NO: 64542
  chr2:207666259-207666289
  hypo

SEQ ID NO: 143468 - DNA, 30 bp, Homo sapiens
  chr2:207909524-207909554
  hypo
ggatgctgctactggcgaccgctacacagt

SEQ ID NO: 143469 - DNA, 30 bp, Homo sapiens; identical to SEQ ID NO: 64543
  chr2:207988636-207988666
  hypo

SEQ ID NO: 143470 - DNA, 179 bp, Homo sapiens
  chr2:208003598-208003777
  hypo
ttgtgtctgtgtctgcgattgccacgaaatttggtcatttatttggcttgatcttcaataacttgagttcttccttgcgtgtgcttttttggaaaagaaaatgaaaatggcgcctacactatcaggatttgctaacaactatgtgaatgagaggatcctttttgcgaaggtaggggatg

SEQ ID NO: 143471 - DNA, 299 bp, Homo sapiens
  chr2:208286406-208286705
  hypo
gcctctggtccccttcggccactcttcagagacaccaatccccggccccccacagcattttcaacaatccacttccgactacctttttatgactttacaacacagtttttcctcaaattttatggcatttcattaaagccgccagaaggtgatactaccccttttctaggagtgaaataaattcaagttttatcgcttctggaaatgcccgagcagctgtcaggacatttgatagattttctcaattacaggacttgtggagcattttatacttacatctgcaccgaagcccgatagag

SEQ ID NO: 143472 - DNA, 43 bp, Homo sapiens
  chr2:208317602-208317645
  hypo
atgagtgagttactggctgggcgtggtggctcacgcctgtaat

SEQ ID NO: 143473 - DNA, 30 bp, Homo sapiens; identical to SEQ ID NO: 16841
  chr2:208331964-208331994
  hypo

SEQ ID NO: 143474 - DNA, 41 bp, Homo sapiens
  chr2:208339131-208339172
  hypo
agttctgtagatggccgggcgcggtggctcacgcctataat

SEQ ID NO: 143475 - DNA, 19 bp, Homo sapiens
  chr2:208372101-208372120
  hypo
ctgtcttgccgtgcgcggt

SEQ ID NO: 143476 - DNA, 31 bp, Homo sapiens; identical to SEQ ID NO: 2164
  chr2:208395299-208395330
  hypo

SEQ ID NO: 143477 - DNA, 48 bp, Homo sapiens; identical to SEQ ID NO: 16843
  chr2:208410313-208410361
  hypo

SEQ ID NO: 143478 - DNA, 21 bp, Homo sapiens
  chr2:208437340-208437361
  hypo
ccatcctggctaacacggtga

SEQ ID NO: 143479 - DNA, 30 bp, Homo sapiens
  chr2:208477097-208477127
  hypo
acaggcatgagccaccgcatccggccagat

SEQ ID NO: 143480 - DNA, 30 bp, Homo sapiens
  chr2:208477875-208477905
  hypo
aagaagttgttatcccgttcatagcgaatt

SEQ ID NO: 143481 - DNA, 241 bp, Homo sapiens; identical to SEQ ID NO: 16844
  chr2:208574935-208575176
  hypo

SEQ ID NO: 143482 - DNA, 42 bp, Homo sapiens; identical to SEQ ID NO: 64549
  chr2:208577541-208577583
  hypo

SEQ ID NO: 143483 - DNA, 30 bp, Homo sapiens; identical to SEQ ID NO: 64550
  chr2:208578996-208579026
  hypo

SEQ ID NO: 143484 - DNA, 156 bp, Homo sapiens; identical to SEQ ID NO: 16845
  chr2:208580709-208580865
  hypo

SEQ ID NO: 143485 - DNA, 26 bp, Homo sapiens
  chr2:208588309-208588335
  hypo
ccttgctgggctgggcgcggtgactc

SEQ ID NO: 143486 - DNA, 17 bp, Homo sapiens
  chr2:208594468-208594485
  hypo
atccatactggagtgca

SEQ ID NO: 143487 - DNA, 16 bp, Homo sapiens
  chr2:208609390-208609406
  hypo
gccaggaagaagtttt

SEQ ID NO: 143488 - DNA, 30 bp, Homo sapiens; identical to SEQ ID NO: 16847
  chr2:208613160-208613190
  hypo

SEQ ID NO: 143489 - DNA, 138 bp, Homo sapiens; identical to SEQ ID NO: 64556
  chr2:208622062-208622200
  hypo

SEQ ID NO: 143490 - DNA, 31 bp, Homo sapiens; identical to SEQ ID NO: 16849
  chr2:208623136-208623167
  hypo

SEQ ID NO: 143491 - DNA, 27 bp, Homo sapiens
  chr2:208662164-208662191
  hypo
aaacttcaagaatttagtggccgggca

SEQ ID NO: 143492 - DNA, 147 bp, Homo sapiens
  chr2:208688670-208688817
  hypo
gctagacttaactgtcgaaacaccgttccacatgacagaaatcaacacttgtctgtttacattaaccgagcagagcttagtcacccatcactggattcgacctcgagcagacagctctacctgactcagggtcggaagagtgataca

SEQ ID NO: 143493 - DNA, 69 bp, Homo sapiens; identical to SEQ ID NO: 64560
  chr2:208692451-208692520
  hypo

SEQ ID NO: 143494 - DNA, 337 bp, Homo sapiens
  chr2:208696085-208696422
  hypo
cgagcaccacgctgccggctgaggcctggccatcccagcgagagcatggagccatcgcatagggaaacgtagggcttccaatcagaacacctgtgtcaaaccacaaatcctttgtagctgagtgacagtgggcaagttactacttaagttcttggtgctttggttttctcatttgtaaaatgctgctcacggtgaaccccttcctattcactgggttgctgtgagactaaaatgagaaatatacttttaagtggaaggactacgcaaaggctgcgacgccgcccctcacaggtgactctagtacccgtctccttgacacaggcgctatcctggacat

SEQ ID NO: 143495 - DNA, 30 bp, Homo sapiens; identical to SEQ ID NO: 16852
  chr2:208798586-208798616
  hypo

SEQ ID NO: 143496 - DNA, 30 bp, Homo sapiens
  chr2:208817845-208817875
  hypo
ggaaaaaatcaattgcgtgccacgtgtaat

SEQ ID NO: 143497 - DNA, 96 bp, Homo sapiens
  chr2:208865896-208865992
  hypo
tgggtaatatctgatcgtgatcgagcatgccctggcttgaaagttgaggtctcatccagtaagtcatttacagaacgaggccggtccctccgacgc

SEQ ID NO: 143498 - DNA, 31 bp, Homo sapiens; identical to SEQ ID NO: 16853
  chr2:208969265-208969296
  hypo

SEQ ID NO: 143499 - DNA, 30 bp, Homo sapiens; identical to SEQ ID NO: 16854
  chr2:208975111-208975141
  hypo

SEQ ID NO: 143500 - DNA, 31 bp, Homo sapiens; identical to SEQ ID NO: 64564
  chr2:208983457-208983488
  hypo

SEQ ID NO: 143501 - DNA, 111 bp, Homo sapiens
  chr2:208993011-208993122
  hypo
ctcagcaggtattgccgcccccggtagttgggcagctcgtagaggacccagcagccctccagcacgtggagggaacggatctcgctgaggtggaagcggtcctggatgctg

SEQ ID NO: 143502 - DNA, 31 bp, Homo sapiens; identical to SEQ ID NO: 64565
  chr2:208994120-208994151
  hypo

SEQ ID NO: 143503 - DNA, 151 bp, Homo sapiens; identical to SEQ ID NO: 64566
  chr2:208994584-208994735
  hypo

SEQ ID NO: 143504 - DNA, 20 bp, Homo sapiens
  chr2:209038329-209038349
  hypo
gagagcgagactccatctca

SEQ ID NO: 143505 - DNA, 44 bp, Homo sapiens; identical to SEQ ID NO: 64568
  chr2:209094645-209094689
  hypo

SEQ ID NO: 143506 - DNA, 30 bp, Homo sapiens; identical to SEQ ID NO: 2168
  chr2:209101844-209101874
  hypo

SEQ ID NO: 143507 - DNA, 30 bp, Homo sapiens; identical to SEQ ID NO: 2169
  chr2:209103912-209103942
  hypo

SEQ ID NO: 143508 - DNA, 30 bp, Homo sapiens; identical to SEQ ID NO: 2170
  chr2:209104621-209104651
  hypo

SEQ ID NO: 143509 - DNA, 79 bp, Homo sapiens; identical to SEQ ID NO: 2171
  chr2:209108239-209108318
  hypo

SEQ ID NO: 143510 - DNA, 309 bp, Homo sapiens; identical to SEQ ID NO: 2172
  chr2:209113080-209113389
  hypo

SEQ ID NO: 143511 - DNA, 212 bp, Homo sapiens; identical to SEQ ID NO: 107355
  chr2:209118760-209118972
  hypo

SEQ ID NO: 143512 - DNA, 31 bp, Homo sapiens; identical to SEQ ID NO: 16863
  chr2:209137007-209137038
  hypo

SEQ ID NO: 143513 - DNA, 30 bp, Homo sapiens
  chr2:209165733-209165763
  hypo
gctactggttgagaacgcatcccaactgca

SEQ ID NO: 143514 - DNA, 930 bp, Homo sapiens; identical to SEQ ID NO: 64576
  chr2:209224957-209225887
  hypo

SEQ ID NO: 143515 - DNA, 30 bp, Homo sapiens; identical to SEQ ID NO: 2174
  chr2:210051601-210051631
  hypo

SEQ ID NO: 143516 - DNA, 301 bp, Homo sapiens; identical to SEQ ID NO: 64578
  chr2:210673259-210673560
  hypo

SEQ ID NO: 143517 - DNA, 245 bp, Homo sapiens
  chr2:211036573-211036818
  hypo
cacaattgtcaagtccgcaagtctccgtgcgtttgcttttatttgggccgtgcgttcaaatgcgctcataattctttctgaccctcagaggggccctgaagtaggtgacaaatttgccttggatccaactgggtggttttatgattaaaaaaaaaaaaacagacaaagcagttttaagtctctacaaatctggtttgagtggcgctggacctaactcccctctgcagtaacgctgtcaaataaac

SEQ ID NO: 143518 - DNA, 30 bp, Homo sapiens
  chr2:211037027-211037057
  hypo
aaatgatttaaggaacgaagagcactaggc

SEQ ID NO: 143519 - DNA, 42 bp, Homo sapiens; identical to SEQ ID NO: 64579
  chr2:211055939-211055981
  hypo

SEQ ID NO: 143520 - DNA, 30 bp, Homo sapiens; identical to SEQ ID NO: 2182
  chr2:212452337-212452367
  hypo

SEQ ID NO: 143521 - DNA, 30 bp, Homo sapiens
  chr2:213801548-213801578
  hypo
agccacctgaagaaccgggcacagccgtgg

SEQ ID NO: 143522 - DNA, 45 bp, Homo sapiens
  chr2:214000554-214000599
  hypo
acaagctcaggagtacgagagcgcctgaccaacatggtgaaaccc

SEQ ID NO: 143523 - DNA, 35 bp, Homo sapiens
  chr2:214458776-214458811
  hypo
gcgtgagccaccgcgcccggccatccctgccacat

SEQ ID NO: 143524 - DNA, 45 bp, Homo sapiens
  chr2:215581839-215581884
  hypo
atcctcctaggtatataactcctaggtatacgattcccagtgaca

SEQ ID NO: 143525 - DNA, 17 bp, Homo sapiens
  chr2:216132271-216132288
  hypo
tccgtcacaagaaaaaa

SEQ ID NO: 143526 - DNA, 22 bp, Homo sapiens
  chr2:216162708-216162730
  hypo
ctagcattggcccggcgcagcg

SEQ ID NO: 143527 - DNA, 77 bp, Homo sapiens
  chr2:216179503-216179580
  hypo
cgcacccgaggccaagattttgtaggggtggaaaggtgtgatcctttgctctccatcgtaaacgtcacggccaatat

SEQ ID NO: 143528 - DNA, 59 bp, Homo sapiens
  chr2:216195105-216195164
  hypo
tacagaaaaaatacacggtgattatagggaatttccatataccccgcttccccgcagtt

SEQ ID NO: 143529 - DNA, 38 bp, Homo sapiens; identical to SEQ ID NO: 16868
  chr2:216196376-216196414
  hypo

SEQ ID NO: 143530 - DNA, 194 bp, Homo sapiens
  chr2:216274336-216274530
  hypo
atcccgacacggtgtcggaagctgagacccaggagaccacaaagctactggctgtgatttcggtcacagattcagaagtggccacaagaggagaaaagggagtcgtctctcctgtcacggtgttgcctagagagtcacagaaaggggaaagtcagccttcagtcatctagaaaatttaccgtcctcgtcgccaa

SEQ ID NO: 143531 - DNA, 20 bp, Homo sapiens
  chr2:216808264-216808284
  hypo
ataaaatgccaagggcttgg

SEQ ID NO: 143532 - DNA, 19 bp, Homo sapiens
  chr2:216808583-216808602
  hypo
agagcgaaaggcttttgga

SEQ ID NO: 143533 - DNA, 83 bp, Homo sapiens; identical to SEQ ID NO: 64586
  chr2:216824990-216825073
  hypo

SEQ ID NO: 143534 - DNA, 31 bp, Homo sapiens; identical to SEQ ID NO: 38547
  chr2:216826037-216826068
  hypo

SEQ ID NO: 143535 - DNA, 46 bp, Homo sapiens; identical to SEQ ID NO: 64588
  chr2:216852231-216852277
  hypo

SEQ ID NO: 143536 - DNA, 184 bp, Homo sapiens; identical to SEQ ID NO: 64589
  chr2:216885425-216885609
  hypo

SEQ ID NO: 143537 - DNA, 31 bp, Homo sapiens; identical to SEQ ID NO: 64590
  chr2:216913503-216913534
  hypo

SEQ ID NO: 143538 - DNA, 25 bp, Homo sapiens
  chr2:216949850-216949875
  hypo
gacaggtgcgcgctgccacgcctga

SEQ ID NO: 143539 - DNA, 42 bp, Homo sapiens; identical to SEQ ID NO: 2185
  chr2:217008384-217008426
  hypo

SEQ ID NO: 143540 - DNA, 183 bp, Homo sapiens; identical to SEQ ID NO: 107382
  chr2:217236004-217236187
  hypo

SEQ ID NO: 143541 - DNA, 783 bp, Homo sapiens; identical to SEQ ID NO: 107383
  chr2:217236231-217237014
  hypo

SEQ ID NO: 143542 - DNA, 30 bp, Homo sapiens; identical to SEQ ID NO: 64595
  chr2:217417251-217417281
  hypo

SEQ ID NO: 143543 - DNA, 57 bp, Homo sapiens; identical to SEQ ID NO: 16875
  chr2:217472020-217472077
  hypo

SEQ ID NO: 143544 - DNA, 117 bp, Homo sapiens
  chr2:217475513-217475630
  hypo
caagcccggccagaccgatgtacaaccaaccacccatgggaaagatctcctggaagtccgtggtcaccatctgggcctggatcccgaagtgcctgtctgcagcgatggccacacggt

SEQ ID NO: 143545 - DNA, 17 bp, Homo sapiens
  chr2:217488116-217488133
  hypo
accgcgcccggccggaa

SEQ ID NO: 143546 - DNA, 30 bp, Homo sapiens
  chr2:217491187-217491217
  hypo
gatgatgacagcgatcgatcgagttgttga

SEQ ID NO: 143547 - DNA, 521 bp, Homo sapiens
  chr2:217528433-217528954
  hypo
catcacgttggagctcgctagcgatgcagaatttccagctctccagggacctactgcatgggaatctgcattttatcaaggtttcctggcgcatatttgaagttgcgaagctccacccggcagcgcatgggtagctgcaaggggtggctgctcagtggacgccgggttgagggacagaaggaaagttgctggctgcgggctcctccatgctcttctcctctctccccagtgcaagatgtctctgaacgggcagcgtggggagtgctggtgtgtgaaccccaacaccgggaagctgatccagggagcccccaccatccggggggaccccgagtgtcatctcttctacaatgagcagcaggaggctcgcggggtgcacacccagcggatgcagtagaccgcagccagccggtgcctggcgcccctgccccccgcccctctccaaacaccggcagaaaacggagagtgcttgggtggtgggtgctggaggattttccagttctgacacacgtatttatatttgg

SEQ ID NO: 143548 - DNA, 1143 bp, Homo sapiens; identical to SEQ ID NO: 107394
  chr2:217558851-217559994
  hypo

SEQ ID NO: 143549 - DNA, 222 bp, Homo sapiens; identical to SEQ ID NO: 16879
  chr2:217674465-217674687
  hypo

SEQ ID NO: 143550 - DNA, 251 bp, Homo sapiens
  chr2:217674953-217675204
  hypo
agagcagaggagcgacgctctggtgtgggcagcccgagaggtgatggggtttcagtaaatcatggcggggagttcaggccaccgccggagtccagtgggtagggctctctacggccggaggtggctgtgggggagacgggcgggaggcccagaccggcagggagctttctgcagggaagctggaaggatggtggggccggtaacccaacatggggcccaggagcgggagacatggccggaggggcggcgag

SEQ ID NO: 143551 - DNA, 202 bp, Homo sapiens; identical to SEQ ID NO: 16880
  chr2:217690997-217691199
  hypo

SEQ ID NO: 143552 - DNA, 30 bp, Homo sapiens; identical to SEQ ID NO: 16881
  chr2:217724851-217724881
  hypo

SEQ ID NO: 143553 - DNA, 76 bp, Homo sapiens
  chr2:217750175-217750251
  hypo
tccggacctacagcaggccatgcctaagcctccccgaccccgcccacgcccccgcccccaccgtgggctcctgcgc

SEQ ID NO: 143554 - DNA, 406 bp, Homo sapiens; identical to SEQ ID NO: 64604
  chr2:217751662-217752068
  hypo

SEQ ID NO: 143555 - DNA, 30 bp, Homo sapiens; identical to SEQ ID NO: 38562
  chr2:217905816-217905846
  hypo

SEQ ID NO: 143556 - DNA, 275 bp, Homo sapiens
  chr2:217931327-217931602
  hypo
actcaccattctgttcggttgcccgcttgcctcctcccgctggctccagcttctgtgcctacaatgaaggctgtgcccattccctcacgtgcccgccgtggcctgacaccttcctgggcccaccctaacacattcctccgttgcttttaacgactgtttacagctcgctacctctaggacgtggcttctgatgaaaactgtccagacgctctgcctccggtgtaattcagagcccagctctcctccttaaaattcttttacgctattttccacaa

SEQ ID NO: 143557 - DNA, 30 bp, Homo sapiens
  chr2:218201129-218201159
  hypo
gcagctgcaccgctgcggccgtccatctgt

SEQ ID NO: 143558 - DNA, 30 bp, Homo sapiens; identical to SEQ ID NO: 38563
  chr2:218296492-218296522
  hypo

SEQ ID NO: 143559 - DNA, 30 bp, Homo sapiens
  chr2:218618079-218618109
  hypo
gcctaaccttccagcggaagcctctgtccc

SEQ ID NO: 143560 - DNA, 194 bp, Homo sapiens
  chr2:218664471-218664665
  hypo
tggcagacccctgtccgaacaacacagatagataacggcacagagttttctttaactttatcatttataaagccatacaatgcattgcaaagaaacaaagcagctgtacaggagtggggacgcgtcagtgtacaatacattcatgtccaggataaggagcatacaccaggatttatacacggtggcagcggcta

SEQ ID NO: 143561 - DNA, 195 bp, Homo sapiens; identical to SEQ ID NO: 64608
  chr2:218665146-218665341
  hypo

SEQ ID NO: 143562 - DNA, 47 bp, Homo sapiens; identical to SEQ ID NO: 16882
  chr2:218676419-218676466
  hypo

SEQ ID NO: 143563 - DNA, 135 bp, Homo sapiens; identical to SEQ ID NO: 64610
  chr2:218678420-218678555
  hypo

SEQ ID NO: 143564 - DNA, 862 bp, Homo sapiens; identical to SEQ ID NO: 16884
  chr2:218682481-218683343
  hypo

SEQ ID NO: 143565 - DNA, 155 bp, Homo sapiens; identical to SEQ ID NO: 16885
  chr2:218686228-218686383
  hypo

SEQ ID NO: 143566 - DNA, 30 bp, Homo sapiens; identical to SEQ ID NO: 16886
  chr2:218686608-218686638
  hypo

SEQ ID NO: 143567 - DNA, 30 bp, Homo sapiens
  chr2:218694174-218694204
  hypo
aatgcctgtggagcacgtcccgggaaaggg

SEQ ID NO: 143568 - DNA, 289 bp, Homo sapiens
  chr2:218694773-218695062
  hypo
gccagggccgatttgcgctgtccacagaaggactccaaggggaaggccgaggcccaccctgcaaaggaccccaaggctccgaggcatagttgagtccccggctctcaggagcctgagcccctcgcagcccctgtgcccagggctctgtgggccaagtgtcaagcaggagtgtgctggctggtgagaggcagcccccagcccccttctactgatcccccgtggctcagtgtccctggccatgccgacactctgagtgggaggctatgcccagctgcgtggcttcatgggt

SEQ ID NO: 143569 - DNA, 311 bp, Homo sapiens
  chr2:218697818-218698129
  hypo
gcctggcctcagagacggtcattcatggaataaccacgaagcagccccagcccacaggtacgcgcatgtttaaccaactggtgcagcggaggcgcaggtgggcccgtgaggaggtgaagcggacgagaggaccagacagggcaggagctctctcttggttcctcccttgttcacctccagctcctgaattcctcgttcccccagttcctgggcaattgggcccttctgctgaggcagatgagtgggcgacgctaaagccaggcaagtcttttgcttcctgagagaaaaattccacacgtttctccaccttc

SEQ ID NO: 143570 - DNA, 30 bp, Homo sapiens; identical to SEQ ID NO: 64615
  chr2:218698418-218698448
  hypo

SEQ ID NO: 143571 - DNA, 30 bp, Homo sapiens
  chr2:218699611-218699641
  hypo
atgtgtgagtgtggacgacggagaagacaa

SEQ ID NO: 143572 - DNA, 109 bp, Homo sapiens
  chr2:218700731-218700840
  hypo
actcacctctttgggccgccctccaggattgagagcgatggtaagagccagctccggggagacacactggacaggggagcgaaccccagggctacgaggggatgtggct

SEQ ID NO: 143573 - DNA, 30 bp, Homo sapiens; identical to SEQ ID NO: 64617
  chr2:218704041-218704071
  hypo

SEQ ID NO: 143574 - DNA, 309 bp, Homo sapiens; identical to SEQ ID NO: 64618
  chr2:218704292-218704601
  hypo

SEQ ID NO: 143575 - DNA, 1079 bp, Homo sapiens; identical to SEQ ID NO: 64619
  chr2:218712678-218713757
  hypo

SEQ ID NO: 143576 - DNA, 31 bp, Homo sapiens; identical to SEQ ID NO: 64620
  chr2:218738051-218738082
  hypo

SEQ ID NO: 143577 - DNA, 47 bp, Homo sapiens; identical to SEQ ID NO: 64621
  chr2:218749829-218749876
  hypo

SEQ ID NO: 143578 - DNA, 30 bp, Homo sapiens
  chr2:218755749-218755779
  hypo
gtccagagcctggtccgcactgcagggaga

SEQ ID NO: 143579 - DNA, 203 bp, Homo sapiens; identical to SEQ ID NO: 16892
  chr2:218757380-218757583
  hypo

SEQ ID NO: 143580 - DNA, 88 bp, Homo sapiens
  chr2:218762563-218762651
  hypo
tcacggaggttgctccggaagttctcctcattggctgtgctggggaaggagacagcgatgatcctctctgtgacgtacaccaggtcca

SEQ ID NO: 143581 - DNA, 201 bp, Homo sapiens; identical to SEQ ID NO: 16893
  chr2:218765457-218765658
  hypo

SEQ ID NO: 143582 - DNA, 194 bp, Homo sapiens
  chr2:218819723-218819917
  hypo
ctcatgagctccacccaacagcggctgggtgcaggtacccacgggctgtctgggcagccagagccggacaggtgtccgccatagtccccagggggttactccaaagaggagaaactgctggctaataacactgcagcacattcctgggccaagataagtggctccaggcatcctcagcacgttccagcctcagt

SEQ ID NO: 143583 - DNA, 30 bp, Homo sapiens
  chr2:218820218-218820248
  hypo
cacaagccttcctcccgcacagtgcccgtc

SEQ ID NO: 143584 - DNA, 31 bp, Homo sapiens; identical to SEQ ID NO: 64625
  chr2:219016358-219016389
  hypo

SEQ ID NO: 143585 - DNA, 45 bp, Homo sapiens; identical to SEQ ID NO: 64626
  chr2:219080905-219080950
  hypo

SEQ ID NO: 143586 - DNA, 30 bp, Homo sapiens; identical to SEQ ID NO: 64627
  chr2:219128068-219128098
  hypo

SEQ ID NO: 143587 - DNA, 112 bp, Homo sapiens; identical to SEQ ID NO: 64628
  chr2:219129430-219129542
  hypo

SEQ ID NO: 143588 - DNA, 30 bp, Homo sapiens; identical to SEQ ID NO: 64629
  chr2:219131099-219131129
  hypo

SEQ ID NO: 143589 - DNA, 314 bp, Homo sapiens
  chr2:219145047-219145361
  hypo
gggaaacgttcctcacgtgcatctgtggagggctcctgtgtgcccagcccacgccactgggggttcactggggggtcacgatgtagtggggaagccaggcaggagcaggtatgggcatccactggggcagccagccagggcagaacaggggatggggacagagggtaggagaaaaggagggcggcagagcgcagtttgtgcagcagcagggatagaggtgaagacagggatctgcatcagcctcacagaggcaggtgtgcaaagggtgtgcgtgactgtgcaggacccatgcgcagatccgcaccagcgcacat

SEQ ID NO: 143590 - DNA, 30 bp, Homo sapiens; identical to SEQ ID NO: 38566
  chr2:219154765-219154795
  hypo

SEQ ID NO: 143591 - DNA, 38 bp, Homo sapiens
  chr2:219180147-219180185
  hypo
gggattccaggcatgagccatggcgcccggccaaggat

SEQ ID NO: 143592 - DNA, 30 bp, Homo sapiens
  chr2:219187279-219187309
  hypo
gggcaggacttatgtcgtccgctggggagg

SEQ ID NO: 143593 - DNA, 131 bp, Homo sapiens
  chr2:219187554-219187685
  hypo
agaaaagtaattcggcgaatgaataaatccatgaatggcagctgaccccgatgatctctcaggtttctgccagttgagaaagtgtagcagtgccctggacggggaggcgggcggggcgaactgcgagctcc

SEQ ID NO: 143594 - DNA, 90 bp, Homo sapiens; identical to SEQ ID NO: 64632
  chr2:219204241-219204331
  hypo

SEQ ID NO: 143595 - DNA, 31 bp, Homo sapiens; identical to SEQ ID NO: 64633
  chr2:219205429-219205460
  hypo

SEQ ID NO: 143596 - DNA, 399 bp, Homo sapiens; identical to SEQ ID NO: 64634
  chr2:219209329-219209728
  hypo

SEQ ID NO: 143597 - DNA, 68 bp, Homo sapiens; identical to SEQ ID NO: 64635
  chr2:219210000-219210068
  hypo

SEQ ID NO: 143598 - DNA, 21 bp, Homo sapiens
  chr2:219231159-219231180
  hypo
gattttcgagtgctgtacctc

SEQ ID NO: 143599 - DNA, 338 bp, Homo sapiens; identical to SEQ ID NO: 107413
  chr2:219232221-219232559
  hypo

SEQ ID NO: 143600 - DNA, 235 bp, Homo sapiens; identical to SEQ ID NO: 38569
  chr2:219232655-219232890
  hypo

SEQ ID NO: 143601 - DNA, 378 bp, Homo sapiens
  chr2:219255970-219256348
  hypo
catgaacaacgccaccgtggccgtggacatttaccagggggtgagcgcgggtgggtggggagggcgtgacccagagaggctccccgcctcgggcagggccaccggtcctaccacactcgtccctgcagggcgtgatcctgggctgcctgttcggccccgcggccctctacatctgggccataggtctcctggcggctgggcagagctccaccatgacgggcacctacgcgggacagttcgtgatggaggtagggcagggggcgggcccaggagggcaaggggtccaaggacagcaggcacactactgggggctagaactccgagccttgtgggtcctcttttcttttctttcttttcttcctttttttttgtttttgt

SEQ ID NO: 143602 - DNA, 242 bp, Homo sapiens; identical to SEQ ID NO: 107417
  chr2:219262921-219263163
  hypo

SEQ ID NO: 143603 - DNA, 990 bp, Homo sapiens; identical to SEQ ID NO: 38573
  chr2:219263452-219264442
  hypo

SEQ ID NO: 143604 - DNA, 45 bp, Homo sapiens; identical to SEQ ID NO: 64642
  chr2:219267985-219268030
  hypo

SEQ ID NO: 143605 - DNA, 30 bp, Homo sapiens; identical to SEQ ID NO: 64643
  chr2:219283253-219283283
  hypo

SEQ ID NO: 143606 - DNA, 166 bp, Homo sapiens; identical to SEQ ID NO: 64644
  chr2:219294016-219294182
  hypo

SEQ ID NO: 143607 - DNA, 171 bp, Homo sapiens
  chr2:219295535-219295706
  hypo
tccagaagtggacagcgtccaaccggacctcaggcctaggcaaaacccacactgtgggctccgtgggtgagggccaggcgggggcagtgagggagccaggatccaggagctgggccaggagagccacttggtccaccacccaccctccttccctgacgtgcatcttcaacg

SEQ ID NO: 143608 - DNA, 25 bp, Homo sapiens
  chr2:219309279-219309304
  hypo
cgtgagccaccgtgcccggccggcc

SEQ ID NO: 143609 - DNA, 189 bp, Homo sapiens
  chr2:219431995-219432184
  hypo
ttcatggcttgcaagacgcatcctcctctattggttattaaacagcaggaattcgtcaatgctccatcctaggtgcctttattttacagcactatactctttttcggcaatttcatccacatccatggcttcaattactatcaatatggcagatgacaaacacatacacacaccgcgcacatttacgta

SEQ ID NO: 143610 - DNA, 30 bp, Homo sapiens; identical to SEQ ID NO: 64646
  chr2:219507516-219507546
  hypo

SEQ ID NO: 143611 - DNA, 31 bp, Homo sapiens; identical to SEQ ID NO: 16902
  chr2:219509561-219509592
  hypo

SEQ ID NO: 143612 - DNA, 30 bp, Homo sapiens; identical to SEQ ID NO: 64648
  chr2:219525792-219525822
  hypo

SEQ ID NO: 143613 - DNA, 32 bp, Homo sapiens; identical to SEQ ID NO: 64649
  chr2:219577394-219577426
  hypo

SEQ ID NO: 143614 - DNA, 30 bp, Homo sapiens; identical to SEQ ID NO: 64650
  chr2:219585142-219585172
  hypo

SEQ ID NO: 143615 - DNA, 45 bp, Homo sapiens; identical to SEQ ID NO: 16903
  chr2:219586060-219586105
  hypo

SEQ ID NO: 143616 - DNA, 87 bp, Homo sapiens
  chr2:219599482-219599569
  hypo
aagaggattaagtgacgggattatgaattattttgagtgtacttaatacacatgcatgcgtgcttgtagtctcgtaaagtgaatggc

SEQ ID NO: 143617 - DNA, 38 bp, Homo sapiens
  chr2:219609748-219609786
  hypo
aaataaatcgtacgtcgtagtaacgacgcttcagggct

SEQ ID NO: 143618 - DNA, 49 bp, Homo sapiens
  chr2:219694761-219694810
  hypo
tgctcctgcatgaagcgcatgtagatctgggcgccgggtttccgcagtt

SEQ ID NO: 143619 - DNA, 1050 bp, Homo sapiens; identical to SEQ ID NO: 107430
  chr2:219735641-219736691
  hypo

SEQ ID NO: 143620 - DNA, 428 bp, Homo sapiens; identical to SEQ ID NO: 107435
  chr2:219748348-219748776
  hypo

SEQ ID NO: 143621 - DNA, 749 bp, Homo sapiens; identical to SEQ ID NO: 2202
  chr2:219757350-219758099
  hypo

SEQ ID NO: 143622 - DNA, 39 bp, Homo sapiens
  chr2:219773280-219773319
  hypo
tgacaaactgctctacgacagtaacgaggccttagagct

SEQ ID NO: 143623 - DNA, 816 bp, Homo sapiens; identical to SEQ ID NO: 107442
  chr2:219824276-219825092
  hypo

SEQ ID NO: 143624 - DNA, 851 bp, Homo sapiens; identical to SEQ ID NO: 38592
  chr2:219825130-219825981
  hypo

SEQ ID NO: 143625 - DNA, 1320 bp, Homo sapiens; identical to SEQ ID NO: 38595
  chr2:219845550-219846870
  hypo

SEQ ID NO: 143626 - DNA, 940 bp, Homo sapiens; identical to SEQ ID NO: 107447
  chr2:219846894-219847834
  hypo

SEQ ID NO: 143627 - DNA, 76 bp, Homo sapiens; identical to SEQ ID NO: 2210
  chr2:219857661-219857737
  hypo

SEQ ID NO: 143628 - DNA, 1146 bp, Homo sapiens; identical to SEQ ID NO: 38601
  chr2:219857780-219858926
  hypo

SEQ ID NO: 143629 - DNA, 1583 bp, Homo sapiens; identical to SEQ ID NO: 107455
  chr2:219866437-219868020
  hypo

SEQ ID NO: 143630 - DNA, 31 bp, Homo sapiens; identical to SEQ ID NO: 16912
  chr2:219879556-219879587
  hypo

SEQ ID NO: 143631 - DNA, 178 bp, Homo sapiens; identical to SEQ ID NO: 16913
  chr2:219892663-219892841
  hypo

SEQ ID NO: 143632 - DNA, 34 bp, Homo sapiens; identical to SEQ ID NO: 64664
  chr2:219919241-219919275
  hypo

SEQ ID NO: 143633 - DNA, 30 bp, Homo sapiens; identical to SEQ ID NO: 64665
  chr2:219920330-219920360
  hypo

SEQ ID NO: 143634 - DNA, 93 bp, Homo sapiens; identical to SEQ ID NO: 64666
  chr2:219994458-219994551
  hypo

SEQ ID NO: 143635 - DNA, 36 bp, Homo sapiens; identical to SEQ ID NO: 64667
  chr2:220039755-220039791
  hypo

SEQ ID NO: 143636 - DNA, 30 bp, Homo sapiens; identical to SEQ ID NO: 64668
  chr2:220040333-220040363
  hypo

SEQ ID NO: 143637 - DNA, 42 bp, Homo sapiens; identical to SEQ ID NO: 16914
  chr2:220049819-220049861
  hypo

SEQ ID NO: 143638 - DNA, 211 bp, Homo sapiens
  chr2:220066673-220066884
  hypo
gcgagggctctgaggactgccagcacgctgtcacctctcaagctcacgggagagctagtgcacctgaggacaaacggctgagcattgtcacaaagattgtgtatcacacacccaagggagcaaggcagaactcagggaaggcagtcatgccagccgactaatctcctaggatctgaaaccagcttcaatcagcttccgcatcctggtactt

SEQ ID NO: 143639 - DNA, 362 bp, Homo sapiens; identical to SEQ ID NO: 64671
  chr2:220080602-220080964
  hypo

SEQ ID NO: 143640 - DNA, 30 bp, Homo sapiens; identical to SEQ ID NO: 64672
  chr2:220084596-220084626
  hypo

SEQ ID NO: 143641 - DNA, 30 bp, Homo sapiens
  chr2:220091910-220091940
  hypo
agacgttacttattacgattatttacatcc

SEQ ID NO: 143642 - DNA, 128 bp, Homo sapiens
  chr2:220092639-220092767
  hypo
tcacacttgctcccctcggcgacgtgcaccaacaggtcctcctcccctgggggtgaatcactataggaggcctctaggcgctggtattcagtgtcaaactgcgccatcaccaccgccccctgtccacc

SEQ ID NO: 143643 - DNA, 30 bp, Homo sapiens; identical to SEQ ID NO: 64674
  chr2:220148148-220148178
  hypo

SEQ ID NO: 143644 - DNA, 31 bp, Homo sapiens; identical to SEQ ID NO: 16916
  chr2:220149375-220149406
  hypo

SEQ ID NO: 143645 - DNA, 551 bp, Homo sapiens; identical to SEQ ID NO: 64676
  chr2:220150655-220151206
  hypo

SEQ ID NO: 143646 - DNA, 260 bp, Homo sapiens
  chr2:220161580-220161840
  hypo
tggtcattggcatcgcgggacctctgccactcagcctgagccagaagcccaaccccttaccccaagccctccagacctcgcagcagagagagggctgggccaggtgggccagcagggttcactcacagggcaggaagtcaggatgccggttctttttgatgttgccctccccctgcgcggtggcacaggtgtttggctctgcttggtaggcacagagggcctgccactccttggcaaggcggtcccggttccgcaggtga

SEQ ID NO: 143647 - DNA, 100 bp, Homo sapiens; identical to SEQ ID NO: 107478
  chr2:220173936-220174036
  hypo

SEQ ID NO: 143648 - DNA, 244 bp, Homo sapiens; identical to SEQ ID NO: 38621
  chr2:220174059-220174303
  hypo

SEQ ID NO: 143649 - DNA, 30 bp, Homo sapiens; identical to SEQ ID NO: 64679
  chr2:220254233-220254263
  hypo

SEQ ID NO: 143650 - DNA, 365 bp, Homo sapiens
  chr2:220309513-220309878
  hypo
ggtgcctcagtctcacggtgctcctttctctagggggttctgacaccctggtgggcacctccctggacacacccccgacctccgtgacaggcacctcagaggagcaagtgagctggtggggcagcgggcagacggtcctggagcaggaagcgggcagtgggggtggcacccgccgcctcccgggcagcccaaggcaagcacaggcaaccggggccgggccacggcacctgggggtggagccgctggtgcgggcatctcgagctaatctggtgggcgcaagctgggggtcagaggatagcctttccgtggccagtgacctgtacggcagcgcattcagcctgtacagaggacgggcgctctctatc

SEQ ID NO: 143651 - DNA, 132 bp, Homo sapiens; identical to SEQ ID NO: 64680
  chr2:220316365-220316497
  hypo

SEQ ID NO: 143652 - DNA, 30 bp, Homo sapiens
  chr2:220330731-220330761
  hypo
ctgcactaacctgccgcttgctgactgagg

SEQ ID NO: 143653 - DNA, 40 bp, Homo sapiens; identical to SEQ ID NO: 64681
  chr2:220337589-220337629
  hypo

SEQ ID NO: 143654 - DNA, 750 bp, Homo sapiens; identical to SEQ ID NO: 2227
  chr2:220349054-220349804
  hypo

SEQ ID NO: 143655 - DNA, 30 bp, Homo sapiens
  chr2:220355139-220355169
  hypo
tggtgttgtgcgagcgtgccgggagaatgc

SEQ ID NO: 143656 - DNA, 30 bp, Homo sapiens; identical to SEQ ID NO: 16921
  chr2:220366828-220366858
  hypo

SEQ ID NO: 143657 - DNA, 84 bp, Homo sapiens; identical to SEQ ID NO: 16922
  chr2:220371684-220371768
  hypo

SEQ ID NO: 143658 - DNA, 294 bp, Homo sapiens; identical to SEQ ID NO: 2232
  chr2:220378981-220379275
  hypo

SEQ ID NO: 143659 - DNA, 30 bp, Homo sapiens; identical to SEQ ID NO: 16924
  chr2:220405148-220405178
  hypo

SEQ ID NO: 143660 - DNA, 30 bp, Homo sapiens; identical to SEQ ID NO: 64687
  chr2:220405620-220405650
  hypo

SEQ ID NO: 143661 - DNA, 200 bp, Homo sapiens; identical to SEQ ID NO: 107502
  chr2:220407984-220408184
  hypo

SEQ ID NO: 143662 - DNA, 57 bp, Homo sapiens; identical to SEQ ID NO: 107503
  chr2:220408722-220408779
  hypo

SEQ ID NO: 143663 - DNA, 30 bp, Homo sapiens
  chr2:220412591-220412621
  hypo
cgtgactggtgctgcgctgatcgccactgc

SEQ ID NO: 143664 - DNA, 30 bp, Homo sapiens
  chr2:220418898-220418928
  hypo
ggggtggtgtgcaggcgggcagacagcagt

SEQ ID NO: 143665 - DNA, 235 bp, Homo sapiens
  chr2:220419206-220419441
  hypo
agtctggctgcgcagcgcagggaatccgctgtgaaggagacacagcctgagtcggccaggcccaggccattgagtaccagtcggtgacggtggccgtccgagtggatgtgacacttgggtcctggatacagctgtactccaccccgggcccactccccggtcacaccttcctgggacagctccagctggaaggtggcactgcccccctcactgatggtcacgtcctccagaggcc

SEQ ID NO: 143666 - DNA, 80 bp, Homo sapiens; identical to SEQ ID NO: 64690
  chr2:220420852-220420932
  hypo

SEQ ID NO: 143667 - DNA, 87 bp, Homo sapiens; identical to SEQ ID NO: 64691
  chr2:220421316-220421403
  hypo

SEQ ID NO: 143668 - DNA, 118 bp, Homo sapiens; identical to SEQ ID NO: 16928
  chr2:220422086-220422204
  hypo

SEQ ID NO: 143669 - DNA, 177 bp, Homo sapiens
  chr2:220424029-220424206
  hypo
agcaccaggcggcagcgtggcccatccctctccagcaccagggcctcgctctcctccacttccagcccatccttgtaccagcgcacaggggcatcctcccgagacagttcacacatcagcaccacacactccaaggtcacggcgatcaaggtcacctcatcgcgagggtatatgatc

SEQ ID NO: 143670 - DNA, 402 bp, Homo sapiens; identical to SEQ ID NO: 16929
  chr2:220427078-220427480
  hypo

SEQ ID NO: 143671 - DNA, 126 bp, Homo sapiens; identical to SEQ ID NO: 64694
  chr2:220428139-220428265
  hypo

SEQ ID NO: 143672 - DNA, 30 bp, Homo sapiens; identical to SEQ ID NO: 64695
  chr2:220431384-220431414
  hypo

SEQ ID NO: 143673 - DNA, 58 bp, Homo sapiens; identical to SEQ ID NO: 64696
  chr2:220431757-220431815
  hypo

SEQ ID NO: 143674 - DNA, 30 bp, Homo sapiens; identical to SEQ ID NO: 64697
  chr2:220432109-220432139
  hypo

SEQ ID NO: 143675 - DNA, 338 bp, Homo sapiens; identical to SEQ ID NO: 16931
  chr2:220432723-220433061
  hypo

SEQ ID NO: 143676 - DNA, 368 bp, Homo sapiens
  chr2:220434650-220435018
  hypo
aagaagagttctagggccctccggatttgtacatcaatcactccttagtggtgttccaccatctgcctcggaatcatttaaggagtttgctaagaagttcctgagtaccctggagacctactaaatccgaatccctggggagtgagaggcgggcgggtttggtattttaatattcccgcggaccacctctcctccagtcttgggggcagcgctgggcaccgaggagggctggagttcggagggcctcggaggacactcgaggcccctccctaggtcccgggctccgccgtacctttcacgtgcagctgcacggcactgagcgtctggcccgccgagttgcgcgcggcgcagacgtagagcccacgatc

SEQ ID NO: 143677 - DNA, 1056 bp, Homo sapiens; identical to SEQ ID NO: 107505
  chr2:220435308-220436364
  hypo

SEQ ID NO: 143678 - DNA, 28 bp, Homo sapiens
  chr2:220444403-220444431
  hypo
tttttttttgagacagagtctcgttctg

SEQ ID NO: 143679 - DNA, 30 bp, Homo sapiens; identical to SEQ ID NO: 64703
  chr2:220480939-220480969
  hypo

SEQ ID NO: 143680 - DNA, 238 bp, Homo sapiens; identical to SEQ ID NO: 107507
  chr2:220492469-220492707
  hypo

SEQ ID NO: 143681 - DNA, 31 bp, Homo sapiens; identical to SEQ ID NO: 16935
  chr2:220497988-220498019
  hypo

SEQ ID NO: 143682 - DNA, 30 bp, Homo sapiens
  chr2:220498704-220498734
  hypo
aggagggccgggcgccgggggcagggtctg

SEQ ID NO: 143683 - DNA, 149 bp, Homo sapiens
  chr2:220499162-220499311
  hypo
agcctgcagcagccttcgtgcgtctgaatgaggctgtactcctggagtctgtgcttgaggtccctgtcccggtccgcttcctcttcgtgatgctggggcccagccacaccagcactgactatcacgagcttgggcgctccattgccacc

SEQ ID NO: 143684 - DNA, 120 bp, Homo sapiens
  chr2:220505455-220505575
  hypo
tgggtgggagcaggccgggacgctgtgcactggggcccactggctgctcccctaggtgaagacgtggcggatgcatctgttcacctgcatccagctgggctgcatcgcactgctctgggt

SEQ ID NO: 143685 - DNA, 35 bp, Homo sapiens; identical to SEQ ID NO: 64707
  chr2:220508876-220508911
  hypo

SEQ ID NO: 143686 - DNA, 30 bp, Homo sapiens
  chr2:220553635-220553665
  hypo
ctgactgcagaaaagcgatgttcacatgcg

SEQ ID NO: 143687 - DNA, 87 bp, Homo sapiens
  chr2:220553962-220554049
  hypo
cctggactcttgacacggctttgcctgcagctctggactctccctcaggctccagggctccctgtgcccttgcggtgctccggcctc

SEQ ID NO: 143688 - DNA, 27 bp, Homo sapiens
  chr2:221738581-221738608
  hypo
tcagctggctgggcgcggtggctcacg

SEQ ID NO: 143689 - DNA, 30 bp, Homo sapiens
  chr2:221805497-221805527
  hypo
aggggtggaatgtagcgggtcccagtgatt

SEQ ID NO: 143690 - DNA, 30 bp, Homo sapiens; identical to SEQ ID NO: 16937
  chr2:222034086-222034116
  hypo

SEQ ID NO: 143691 - DNA, 231 bp, Homo sapiens
  chr2:222389988-222390219
  hypo
gcagatgaaaacaggcgtgagactcaatgcacaacatgtagattaagttaaaaggttaattttctgactcgtggtctggatagtagagctgtggaggaaaacgagttaccatatgctccgtaaatttcctttcggttaaaaaagatgagggaaagagagagagatatgtccttgattccgtgccattagttccggcagtgaggatgctcactgtcacgcctttcccaggtt

SEQ ID NO: 143692 - DNA, 2254 bp, Homo sapiens; identical to SEQ ID NO: 2242
  chr2:222435994-222438248
  hypo

SEQ ID NO: 143693 - DNA, 2741 bp, Homo sapiens; identical to SEQ ID NO: 107532
  chr2:223169337-223172078
  hypo

SEQ ID NO: 143694 - DNA, 1263 bp, Homo sapiens; identical to SEQ ID NO: 107538
  chr2:223183521-223184784
  hypo

SEQ ID NO: 143695 - DNA, 421 bp, Homo sapiens; identical to SEQ ID NO: 38675
  chr2:223185034-223185455
  hypo

SEQ ID NO: 143696 - DNA, 144 bp, Homo sapiens; identical to SEQ ID NO: 16940
  chr2:223562590-223562734
  hypo

SEQ ID NO: 143697 - DNA, 31 bp, Homo sapiens; identical to SEQ ID NO: 16941
  chr2:223628807-223628838
  hypo

SEQ ID NO: 143698 - DNA, 82 bp, Homo sapiens
  chr2:223652841-223652923
  hypo
attacaggcgtgggccactgcgcccggccgtgggcaggagattctaacccatgctgtcactaaccttcggcctcaatcaggt

SEQ ID NO: 143699 - DNA, 33 bp, Homo sapiens; identical to SEQ ID NO: 64716
  chr2:223743762-223743795
  hypo

SEQ ID NO: 143700 - DNA, 176 bp, Homo sapiens; identical to SEQ ID NO: 64717
  chr2:223753467-223753643
  hypo

SEQ ID NO: 143701 - DNA, 121 bp, Homo sapiens
  chr2:223764175-223764296
  hypo
acgggactctctctcaaaaaagaataaaaaaataaataaataaaaagagaaagataatgttacaggacaggggtcctgatctaaacctgaagggaaggttctcggatcttgcgcaagaaag

SEQ ID NO: 143702 - DNA, 30 bp, Homo sapiens
  chr2:223764717-223764747
  hypo
caccaaagacggagtcgctctggttcaaac

SEQ ID NO: 143703 - DNA, 97 bp, Homo sapiens
  chr2:223772742-223772839
  hypo
acctctcccagtgaacgtgtaggttgcacgagagtgggaacttaggccgttttgtttactgttactttcgcagtgcttagaacgatatctaacatag

SEQ ID NO: 143704 - DNA, 30 bp, Homo sapiens
  chr2:224282206-224282236
  hypo
tccaaaggagcacagcgcactcagcgtcct

SEQ ID NO: 143705 - DNA, 201 bp, Homo sapiens; identical to SEQ ID NO: 16942
  chr2:224640635-224640836
  hypo

SEQ ID NO: 143706 - DNA, 22 bp, Homo sapiens
  chr2:224661686-224661708
  hypo
cgactttttctatcattgagtg

SEQ ID NO: 143707 - DNA, 30 bp, Homo sapiens; identical to SEQ ID NO: 16943
  chr2:224698418-224698448
  hypo

SEQ ID NO: 143708 - DNA, 43 bp, Homo sapiens
  chr2:224759072-224759115
  hypo
caacagtcacttgtctccatgcggaaaaacacaggaactgtct

SEQ ID NO: 143709 - DNA, 384 bp, Homo sapiens; identical to SEQ ID NO: 107546
  chr2:224808914-224809298
  hypo

SEQ ID NO: 143710 - DNA, 30 bp, Homo sapiens
  chr2:224831770-224831800
  hypo
ctgaaacttgagagcgaaagtgagataaat

SEQ ID NO: 143711 - DNA, 30 bp, Homo sapiens
  chr2:224854487-224854517
  hypo
aacaggagtgagcagcggactttctttttc

SEQ ID NO: 143712 - DNA, 30 bp, Homo sapiens
  chr2:224855356-224855386
  hypo
cactaacacggccaccggctcatatcccag

SEQ ID NO: 143713 - DNA, 89 bp, Homo sapiens
  chr2:224856516-224856605
  hypo
caccacaccggaacacggagagctgggccagcattggcacttgataggatttcccgtcggctgccacgaaagtgcgtttctttgtgttc

SEQ ID NO: 143714 - DNA, 30 bp, Homo sapiens; identical to SEQ ID NO: 64722
  chr2:224866468-224866498
  hypo

SEQ ID NO: 143715 - DNA, 31 bp, Homo sapiens; identical to SEQ ID NO: 64723
  chr2:224900728-224900759
  hypo

SEQ ID NO: 143716 - DNA, 1435 bp, Homo sapiens; identical to SEQ ID NO: 107549
  chr2:224903206-224904641
  hypo

SEQ ID NO: 143717 - DNA, 43 bp, Homo sapiens; identical to SEQ ID NO: 64725
  chr2:225229320-225229363
  hypo

SEQ ID NO: 143718 - DNA, 31 bp, Homo sapiens; identical to SEQ ID NO: 64726
  chr2:225233497-225233528
  hypo

SEQ ID NO: 143719 - DNA, 30 bp, Homo sapiens
  chr2:225359460-225359490
  hypo
taacctaaaattcatcgtagacatacatgt

SEQ ID NO: 143720 - DNA, 31 bp, Homo sapiens; identical to SEQ ID NO: 2266
  chr2:225381703-225381734
  hypo

SEQ ID NO: 143721 - DNA, 40 bp, Homo sapiens; identical to SEQ ID NO: 64728
  chr2:225390997-225391037
  hypo

SEQ ID NO: 143722 - DNA, 25 bp, Homo sapiens
  chr2:225394304-225394329
  hypo
cactgtactccgagactccctctca

SEQ ID NO: 143723 - DNA, 36 bp, Homo sapiens; identical to SEQ ID NO: 64730
  chr2:225463885-225463921
  hypo

SEQ ID NO: 143724 - DNA, 33 bp, Homo sapiens; identical to SEQ ID NO: 64731
  chr2:225482440-225482473
  hypo

SEQ ID NO: 143725 - DNA, 25 bp, Homo sapiens
  chr2:225683122-225683147
  hypo
tttttttttttgagacggagtcttg

SEQ ID NO: 143726 - DNA, 49 bp, Homo sapiens; identical to SEQ ID NO: 16948
  chr2:225692100-225692149
  hypo

SEQ ID NO: 143727 - DNA, 30 bp, Homo sapiens; identical to SEQ ID NO: 16949
  chr2:225748121-225748151
  hypo

SEQ ID NO: 143728 - DNA, 22 bp, Homo sapiens
  chr2:225831797-225831819
  hypo
tctttttttttttttttgagac

SEQ ID NO: 143729 - DNA, 708 bp, Homo sapiens; identical to SEQ ID NO: 38685
  chr2:225906070-225906778
  hypo

SEQ ID NO: 143730 - DNA, 571 bp, Homo sapiens; identical to SEQ ID NO: 2269
  chr2:225906790-225907361
  hypo

SEQ ID NO: 143731 - DNA, 182 bp, Homo sapiens; identical to SEQ ID NO: 38687
  chr2:225907439-225907621
  hypo

SEQ ID NO: 143732 - DNA, 31 bp, Homo sapiens; identical to SEQ ID NO: 64738
  chr2:226907862-226907893
  hypo

SEQ ID NO: 143733 - DNA, 30 bp, Homo sapiens
  chr2:227526683-227526713
  hypo
gccaattccattccccgctctctcctcatg

SEQ ID NO: 143734 - DNA, 150 bp, Homo sapiens; identical to SEQ ID NO: 64739
  chr2:227750576-227750726
  hypo

SEQ ID NO: 143735 - DNA, 30 bp, Homo sapiens; identical to SEQ ID NO: 64740
  chr2:227751189-227751219
  hypo

SEQ ID NO: 143736 - DNA, 155 bp, Homo sapiens
  chr2:227769067-227769222
  hypo
ggggtttaagcatgcacggtcaccaaacagacaagttacaccactgtggcacatcctgcaagcggggggggaggggggtcagggaactcctgtttcagtagatatatctgatgaaaataatgctctcctgaggggatgatcgtgtatgtggtgtg

SEQ ID NO: 143737 - DNA, 41 bp, Homo sapiens
  chr2:227818766-227818807
  hypo
cttgcattcatttaacgactgttgatcgaatacctgccatg

SEQ ID NO: 143738 - DNA, 366 bp, Homo sapiens
  chr2:227841930-227842296
  hypo
tttgtgtctccccttcggcaagctccccctccctttagttttgcatttaacacagtcttgccttcatgactgccgcctcctttttttctgtaaacacaaatatgaagtgtatttgctttgcttttcagccttgtctgccccactgagtgtccgaaatagccggctggaattcatgagaatgttacgtcttcagatgtttataatccaaaagaatcccttatggtttttaataataaaacaacttagatgtcggtattttgtgttggaaaggcgagcaaagttcacaatgcagcaattacaatgcagtgcattatgtataatttgtagcctgccccaggagcaatggtgaaccgtgaaacaccatcc

SEQ ID NO: 143739 - DNA, 30 bp, Homo sapiens; identical to SEQ ID NO: 64743
  chr2:227871066-227871096
  hypo

SEQ ID NO: 143740 - DNA, 31 bp, Homo sapiens; identical to SEQ ID NO: 16954
  chr2:228010266-228010297
  hypo

SEQ ID NO: 143741 - DNA, 91 bp, Homo sapiens; identical to SEQ ID NO: 16955
  chr2:228185365-228185456
  hypo

SEQ ID NO: 143742 - DNA, 76 bp, Homo sapiens; identical to SEQ ID NO: 16956
  chr2:228211999-228212075
  hypo

SEQ ID NO: 143743 - DNA, 88 bp, Homo sapiens
  chr2:228255399-228255487
  hypo
acaggcatgaaccaccgtgccgggcctacacattgtttttcgtttagttgttatgaaggcgtatttgacaaggcggaaggatagaata

SEQ ID NO: 143744 - DNA, 30 bp, Homo sapiens; identical to SEQ ID NO: 64747
  chr2:228336225-228336255
  hypo

SEQ ID NO: 143745 - DNA, 222 bp, Homo sapiens
  chr2:228466726-228466948
  hypo
aaaaacaaaaaaacaaacaaaaaaaaacctgtttgacgttggactaggaacatctgctcagtctgccctcagcctatgagaaccatttcctttttccgtttcctcgtttcccatctttatcttcccgagttcatgcacacacgtgccgctttgaggctgtctcagtcaccttcgtagatcatccctctcactcccacccatgcccagcgcccagcacaacac

SEQ ID NO: 143746 - DNA, 247 bp, Homo sapiens
  chr2:228632575-228632822
  hypo
tccgagccttatagcgggatcctcaaccaggggccattccgccccccaggagacaaccagctgtgtctcggacagttttgctggtcacagcaagcggccggggtggcggtgctagaggacgctgctaaacccccttggtgcacagggcaggccccatgggacgggaatcctgggctcggggcgcggctgcctgggtcccctctggcggcgccagctccaggaggcaggaaacgaggaggccctggct

SEQ ID NO: 143747 - DNA, 38 bp, Homo sapiens; identical to SEQ ID NO: 16958
  chr2:228638406-228638444
  hypo

SEQ ID NO: 143748 - DNA, 195 bp, Homo sapiens; identical to SEQ ID NO: 64751
  chr2:228735638-228735833
  hypo

SEQ ID NO: 143749 - DNA, 95 bp, Homo sapiens; identical to SEQ ID NO: 64752
  chr2:228741008-228741103
  hypo

SEQ ID NO: 143750 - DNA, 30 bp, Homo sapiens
  chr2:229077311-229077341
  hypo
agataagataatgtacgcagagcacttagt

SEQ ID NO: 143751 - DNA, 30 bp, Homo sapiens
  chr2:229897869-229897899
  hypo
acctgactcacctcacgctagactggagag

SEQ ID NO: 143752 - DNA, 31 bp, Homo sapiens; identical to SEQ ID NO: 16959
  chr2:230136329-230136360
  hypo

SEQ ID NO: 143753 - DNA, 30 bp, Homo sapiens
  chr2:230436206-230436236
  hypo
tctctctgctccccacgccttctctctctg

SEQ ID NO: 143754 - DNA, 1165 bp, Homo sapiens; identical to SEQ ID NO: 107573
  chr2:230578041-230579206
  hypo

SEQ ID NO: 143755 - DNA, 30 bp, Homo sapiens
  chr2:230650520-230650550
  hypo
ctgcatcacagactccgcctgtttcagcag

SEQ ID NO: 143756 - DNA, 30 bp, Homo sapiens; identical to SEQ ID NO: 16960
  chr2:230664082-230664112
  hypo

SEQ ID NO: 143757 - DNA, 121 bp, Homo sapiens; identical to SEQ ID NO: 16961
  chr2:230743169-230743290
  hypo

SEQ ID NO: 143758 - DNA, 30 bp, Homo sapiens
  chr2:230783837-230783867
  hypo
agttacactggggccggcgtggtggctctc

SEQ ID NO: 143759 - DNA, 31 bp, Homo sapiens; identical to SEQ ID NO: 2279
  chr2:230786011-230786042
  hypo

SEQ ID NO: 143760 - DNA, 24 bp, Homo sapiens
  chr2:230788570-230788594
  hypo
tttttttttttttttttgagacgg

SEQ ID NO: 143761 - DNA, 21 bp, Homo sapiens
  chr2:230795172-230795193
  hypo
agagatgctttaggctgggca

SEQ ID NO: 143762 - DNA, 140 bp, Homo sapiens; identical to SEQ ID NO: 64760
  chr2:230795432-230795572
  hypo

SEQ ID NO: 143763 - DNA, 46 bp, Homo sapiens; identical to SEQ ID NO: 64761
  chr2:230796253-230796299
  hypo

SEQ ID NO: 143764 - DNA, 30 bp, Homo sapiens; identical to SEQ ID NO: 64762
  chr2:230911329-230911359
  hypo

SEQ ID NO: 143765 - DNA, 30 bp, Homo sapiens; identical to SEQ ID NO: 64763
  chr2:230923759-230923789
  hypo

SEQ ID NO: 143766 - DNA, 30 bp, Homo sapiens
  chr2:231192973-231193003
  hypo
cttcaccactcacttcgccttgtagcttcc

SEQ ID NO: 143767 - DNA, 42 bp, Homo sapiens; identical to SEQ ID NO: 64764
  chr2:231492417-231492459
  hypo

SEQ ID NO: 143768 - DNA, 251 bp, Homo sapiens
  chr2:231522218-231522469
  hypo
aaacggcacagctaacgtgaaggaacaaggcatcctaatccactgtgtggtgtggcagaatccatgacaagccacacaggtgtagggctgccgcgctgtcacacagggtcccagcgctgaaggaccgggcggtgagggggcagggaaagtcagaaagggcacccagggtacagggcacagtgctcagtttgctgtggctgcctgagtagtaataatcacagctacaactgcaggtgcgctcaggtgccagg

SEQ ID NO: 143769 - DNA, 269 bp, Homo sapiens
  chr2:231530667-231530936
  hypo
gaaacagggagagaatcagagcgaaagcttccagttcaaacgcaggttgagaatgaggtttgcagagccagcgggcagtgagtgctgaccgagaagacccatggcggcccactgcagtgggggcggcggcagtgtgaccttgttgaaactagccgctccagtgacccaaggctgggggagatttggctctgctactttccagcactgtgagcttgggagccttacctgctccgagcttcagtttccttacttgtataatggggattaaa

SEQ ID NO: 143770 - DNA, 30 bp, Homo sapiens
  chr2:231555257-231555287
  hypo
gcagcagtccaggcgcggtcacccagacca

SEQ ID NO: 143771 - DNA, 30 bp, Homo sapiens
  chr2:231559377-231559407
  hypo
gcccttatgagagttcgtcgctggcactgt

SEQ ID NO: 143772 - DNA, 35 bp, Homo sapiens
  chr2:231585403-231585438
  hypo
gggttacaggcgtgagccaccgcgccaggcttaag

SEQ ID NO: 143773 - DNA, 30 bp, Homo sapiens
  chr2:231595549-231595579
  hypo
tgaaaaaaatttgtgcgatgatggccgaag

SEQ ID NO: 143774 - DNA, 30 bp, Homo sapiens; identical to SEQ ID NO: 64766
  chr2:231604218-231604248
  hypo

SEQ ID NO: 143775 - DNA, 161 bp, Homo sapiens; identical to SEQ ID NO: 16964
  chr2:231676878-231677039
  hypo

SEQ ID NO: 143776 - DNA, 30 bp, Homo sapiens
  chr2:231683170-231683200
  hypo
ctcaggtgtggctgcgttttgtcctttctc

SEQ ID NO: 143777 - DNA, 31 bp, Homo sapiens; identical to SEQ ID NO: 64768
  chr2:231690698-231690729
  hypo

SEQ ID NO: 143778 - DNA, 237 bp, Homo sapiens; identical to SEQ ID NO: 2283
  chr2:231692870-231693107
  hypo

SEQ ID NO: 143779 - DNA, 32 bp, Homo sapiens; identical to SEQ ID NO: 16966
  chr2:231744874-231744906
  hypo

SEQ ID NO: 143780 - DNA, 30 bp, Homo sapiens; identical to SEQ ID NO: 64771
  chr2:231856330-231856360
  hypo

SEQ ID NO: 143781 - DNA, 459 bp, Homo sapiens; identical to SEQ ID NO: 38710
  chr2:231902080-231902539
  hypo

SEQ ID NO: 143782 - DNA, 24 bp, Homo sapiens
  chr2:231919624-231919648
  hypo
tttttttctttttagacggagtct

SEQ ID NO: 143783 - DNA, 27 bp, Homo sapiens
  chr2:231955814-231955841
  hypo
ccgaagagagttagccgcctctataag

SEQ ID NO: 143784 - DNA, 142 bp, Homo sapiens; identical to SEQ ID NO: 64774
  chr2:231965553-231965695
  hypo

SEQ ID NO: 143785 - DNA, 83 bp, Homo sapiens; identical to SEQ ID NO: 64775
  chr2:231977474-231977557
  hypo

SEQ ID NO: 143786 - DNA, 39 bp, Homo sapiens
  chr2:231992332-231992371
  hypo
gctgggattacgggcatgagccaccgcaccccacgccct

SEQ ID NO: 143787 - DNA, 30 bp, Homo sapiens
  chr2:232048884-232048914
  hypo
ggagcctggtggtgccggctccactaggag

SEQ ID NO: 143788 - DNA, 31 bp, Homo sapiens; identical to SEQ ID NO: 16968
  chr2:232054070-232054101
  hypo

SEQ ID NO: 143789 - DNA, 43 bp, Homo sapiens; identical to SEQ ID NO: 64778
  chr2:232109612-232109655
  hypo

SEQ ID NO: 143790 - DNA, 141 bp, Homo sapiens; identical to SEQ ID NO: 16969
  chr2:232113117-232113258
  hypo

SEQ ID NO: 143791 - DNA, 30 bp, Homo sapiens
  chr2:232114722-232114752
  hypo
gagggagaccaccacgtgcatttgcaggtc

SEQ ID NO: 143792 - DNA, 30 bp, Homo sapiens; identical to SEQ ID NO: 64780
  chr2:232115219-232115249
  hypo

SEQ ID NO: 143793 - DNA, 31 bp, Homo sapiens; identical to SEQ ID NO: 64781
  chr2:232131874-232131905
  hypo

SEQ ID NO: 143794 - DNA, 30 bp, Homo sapiens
  chr2:232135424-232135454
  hypo
caggactgcttccctcgcgccagtcactgt

SEQ ID NO: 143795 - DNA, 30 bp, Homo sapiens
  chr2:232135721-232135751
  hypo
acgagcgacgtggtgcggcagtacatggcc

SEQ ID NO: 143796 - DNA, 43 bp, Homo sapiens; identical to SEQ ID NO: 64782
  chr2:232162353-232162396
  hypo

SEQ ID NO: 143797 - DNA, 100 bp, Homo sapiens; identical to SEQ ID NO: 64783
  chr2:232223173-232223273
  hypo

SEQ ID NO: 143798 - DNA, 30 bp, Homo sapiens; identical to SEQ ID NO: 64784
  chr2:232235319-232235349
  hypo

SEQ ID NO: 143799 - DNA, 126 bp, Homo sapiens; identical to SEQ ID NO: 16970
  chr2:232247494-232247620
  hypo

SEQ ID NO: 143800 - DNA, 155 bp, Homo sapiens; identical to SEQ ID NO: 64786
  chr2:232264148-232264303
  hypo

SEQ ID NO: 143801 - DNA, 25 bp, Homo sapiens
  chr2:232279270-232279295
  hypo
aggtgggtctgggcgcggtggctca

SEQ ID NO: 143802 - DNA, 196 bp, Homo sapiens
  chr2:232283621-232283817
  hypo
catggcctccggggccccgggagtcgcaggcaccctgcctggacgctgttgtggggcctgaacgaagttcactgctgccggcgcccaaaagcgctcgctccagctcctgcacctgctcaactgtgtgctccctttcacgagggtcggaatgcggtggatctgagagagtggagtctgatcccgcccgcactgaaac

SEQ ID NO: 143803 - DNA, 23 bp, Homo sapiens
  chr2:232330293-232330316
  hypo
acctcaggccgggcgcggtggct

SEQ ID NO: 143804 - DNA, 30 bp, Homo sapiens; identical to SEQ ID NO: 16971
  chr2:232333015-232333045
  hypo

SEQ ID NO: 143805 - DNA, 31 bp, Homo sapiens; identical to SEQ ID NO: 64789
  chr2:232390143-232390174
  hypo

SEQ ID NO: 143806 - DNA, 30 bp, Homo sapiens; identical to SEQ ID NO: 64790
  chr2:232398516-232398546
  hypo

SEQ ID NO: 143807 - DNA, 79 bp, Homo sapiens; identical to SEQ ID NO: 64791
  chr2:232458616-232458695
  hypo

SEQ ID NO: 143808 - DNA, 30 bp, Homo sapiens
  chr2:232458899-232458929
  hypo
ccctgggaccctcacgccctgctcccttgc

SEQ ID NO: 143809 - DNA, 81 bp, Homo sapiens; identical to SEQ ID NO: 64792
  chr2:232472539-232472620
  hypo

SEQ ID NO: 143810 - DNA, 510 bp, Homo sapiens; identical to SEQ ID NO: 107606
  chr2:232479180-232479690
  hypo

SEQ ID NO: 143811 - DNA, 132 bp, Homo sapiens; identical to SEQ ID NO: 64794
  chr2:232485558-232485690
  hypo

SEQ ID NO: 143812 - DNA, 20 bp, Homo sapiens
  chr2:232522882-232522902
  hypo
ggaataaaggctgggcgcgg

SEQ ID NO: 143813 - DNA, 627 bp, Homo sapiens; identical to SEQ ID NO: 107607
  chr2:232526741-232527368
  hypo

SEQ ID NO: 143814 - DNA, 31 bp, Homo sapiens; identical to SEQ ID NO: 16975
  chr2:232528195-232528226
  hypo

SEQ ID NO: 143815 - DNA, 30 bp, Homo sapiens
  chr2:232528483-232528513
  hypo
ggagggagacgccacggcacagaggacctg

SEQ ID NO: 143816 - DNA, 30 bp, Homo sapiens
  chr2:232541240-232541270
  hypo
atacagacaaacacacgcacatgaaagggg

SEQ ID NO: 143817 - DNA, 27 bp, Homo sapiens
  chr2:232544633-232544660
  hypo
cgtgagccactgcgcccggcctaaagc

SEQ ID NO: 143818 - DNA, 552 bp, Homo sapiens; identical to SEQ ID NO: 107609
  chr2:232545576-232546128
  hypo

SEQ ID NO: 143819 - DNA, 31 bp, Homo sapiens; identical to SEQ ID NO: 16976
  chr2:232553412-232553443
  hypo

SEQ ID NO: 143820 - DNA, 183 bp, Homo sapiens
  chr2:232557589-232557772
  hypo
tcaggacatgggatccgtgttcatggttgtacagacatgtacatgcacaccgagagactgggcgtgggagtgtggaacgggcctgctacagggaagagaggacaggctgggccaaggcctgggtgtggccgcgcgcctgcaggtgcctcttgccctgcgttctatgcccgcaccaggcctgcc

SEQ ID NO: 143821 - DNA, 30 bp, Homo sapiens; identical to SEQ ID NO: 64801
  chr2:232649801-232649831
  hypo

SEQ ID NO: 143822 - DNA, 30 bp, Homo sapiens
  chr2:232752662-232752692
  hypo
gtcagtactgatcggcgtccagtgtctggg

SEQ ID NO: 143823 - DNA, 246 bp, Homo sapiens; identical to SEQ ID NO: 64802
  chr2:232760318-232760564
  hypo

SEQ ID NO: 143824 - DNA, 30 bp, Homo sapiens
  chr2:232787005-232787035
  hypo
aacggagccagttcccgatcctgaaacaca

SEQ ID NO: 143825 - DNA, 2091 bp, Homo sapiens; identical to SEQ ID NO: 107619
  chr2:232790015-232792106
  hypo

SEQ ID NO: 143826 - DNA, 30 bp, Homo sapiens; identical to SEQ ID NO: 38732
  chr2:232794155-232794185
  hypo

SEQ ID NO: 143827 - DNA, 132 bp, Homo sapiens
  chr2:232850672-232850804
  hypo
gcgtctagaacaagtcgggtaagctggcttgctgagtcgtctggcttttattttttgcccatgctggatgcttcagtccgctcctggtgcccttggacatcagactctgggttcttccgcctttgcactctt

SEQ ID NO: 143828 - DNA, 121 bp, Homo sapiens
  chr2:233159519-233159640
  hypo
tttgcagggctcttgcgaggattaaataagatcagcgtgagagatgcttaggacagaggacgtgcttaataaatattagctccattccagacatctgtcacccagccgcttccttctgttt

SEQ ID NO: 143829 - DNA, 95 bp, Homo sapiens
  chr2:233183055-233183150
  hypo
ttggaggaccagtttcgccaagtgttctctggcccagttgtaaacatcattcgtttgcttgtccagcaaacattattggacgcctattagtgcca

SEQ ID NO: 143830 - DNA, 31 bp, Homo sapiens; identical to SEQ ID NO: 16977
  chr2:233197429-233197460
  hypo

SEQ ID NO: 143831 - DNA, 286 bp, Homo sapiens
  chr2:233198440-233198726
  hypo
ggtctgtccacacatcgctgccgacggtgaggctgtgggtggtgccagccttccaggcctggctgggcagctctgggcttgtcaggctctgacccatcccgtcccgcagatggcactgtacttctgctcggggctgctgcaggacccagcgcagttccggcactacgcgctcaatgtgcccctgtacacacacttcacctcgcccatccgccgctttgccgacgtcctggtgcaccgcctcctggctgccgcgttaggtgaggggtgcagtcggggtcagggcaga

SEQ ID NO: 143832 - DNA, 31 bp, Homo sapiens; identical to SEQ ID NO: 64807
  chr2:233217697-233217728
  hypo

SEQ ID NO: 143833 - DNA, 42 bp, Homo sapiens
  chr2:233230826-233230868
  hypo
ttaccagaaggtctgcggtgctcctgttcctcggccccggtg

SEQ ID NO: 143834 - DNA, 79 bp, Homo sapiens; identical to SEQ ID NO: 38734
  chr2:233251507-233251586
  hypo

SEQ ID NO: 143835 - DNA, 41 bp, Homo sapiens
  chr2:233258359-233258400
  hypo
gtgctgggattacaggcgtgagccaccgtgcatgtccatct

SEQ ID NO: 143836 - DNA, 910 bp, Homo sapiens; identical to SEQ ID NO: 107623
  chr2:233283249-233284159
  hypo

SEQ ID NO: 143837 - DNA, 83 bp, Homo sapiens; identical to SEQ ID NO: 38737
  chr2:233284386-233284469
  hypo

SEQ ID NO: 143838 - DNA, 682 bp, Homo sapiens; identical to SEQ ID NO: 107625
  chr2:233284686-233285368
  hypo

SEQ ID NO: 143839 - DNA, 618 bp, Homo sapiens; identical to SEQ ID NO: 107626
  chr2:233285625-233286243
  hypo

SEQ ID NO: 143840 - DNA, 31 bp, Homo sapiens; identical to SEQ ID NO: 64814
  chr2:233321555-233321586
  hypo

SEQ ID NO: 143841 - DNA, 30 bp, Homo sapiens; identical to SEQ ID NO: 64815
  chr2:233321813-233321843
  hypo

SEQ ID NO: 143842 - DNA, 247 bp, Homo sapiens; identical to SEQ ID NO: 107627
  chr2:233350292-233350539
  hypo

SEQ ID NO: 143843 - DNA, 435 bp, Homo sapiens; identical to SEQ ID NO: 2296
  chr2:233350843-233351278
  hypo

SEQ ID NO: 143844 - DNA, 217 bp, Homo sapiens; identical to SEQ ID NO: 107631
  chr2:233351789-233352006
  hypo

SEQ ID NO: 143845 - DNA, 350 bp, Homo sapiens; identical to SEQ ID NO: 107632
  chr2:233352101-233352451
  hypo

SEQ ID NO: 143846 - DNA, 256 bp, Homo sapiens; identical to SEQ ID NO: 38746
  chr2:233352506-233352762
  hypo

SEQ ID NO: 143847 - DNA, 15 bp, Homo sapiens
  chr2:233352775-233352790
  hypo
cgagtgagggcagcg

SEQ ID NO: 143848 - DNA, 46 bp, Homo sapiens; identical to SEQ ID NO: 64821
  chr2:233355392-233355438
  hypo

SEQ ID NO: 143849 - DNA, 43 bp, Homo sapiens
  chr2:233357812-233357855
  hypo
cccccagtgcccagcccggagcctggcacgtgaccccagagca

SEQ ID NO: 143850 - DNA, 38 bp, Homo sapiens
  chr2:233358339-233358377
  hypo
ggaggcatctcagggcgtgcagccgggaccttggcctc

SEQ ID NO: 143851 - DNA, 30 bp, Homo sapiens; identical to SEQ ID NO: 38748
  chr2:233386293-233386323
  hypo

SEQ ID NO: 143852 - DNA, 109 bp, Homo sapiens; identical to SEQ ID NO: 64824
  chr2:233389941-233390050
  hypo

SEQ ID NO: 143853 - DNA, 31 bp, Homo sapiens; identical to SEQ ID NO: 64825
  chr2:233394636-233394667
  hypo

SEQ ID NO: 143854 - DNA, 30 bp, Homo sapiens; identical to SEQ ID NO: 64826
  chr2:233409100-233409130
  hypo

SEQ ID NO: 143855 - DNA, 21 bp, Homo sapiens
  chr2:233440624-233440645
  hypo
ggggtgctttgctgggcgcag

SEQ ID NO: 143856 - DNA, 31 bp, Homo sapiens; identical to SEQ ID NO: 64828
  chr2:233466816-233466847
  hypo

SEQ ID NO: 143857 - DNA, 406 bp, Homo sapiens; identical to SEQ ID NO: 38751
  chr2:233497773-233498179
  hypo

SEQ ID NO: 143858 - DNA, 181 bp, Homo sapiens; identical to SEQ ID NO: 2304
  chr2:233498345-233498526
  hypo

SEQ ID NO: 143859 - DNA, 302 bp, Homo sapiens; identical to SEQ ID NO: 2305
  chr2:233498571-233498873
  hypo

SEQ ID NO: 143860 - DNA, 449 bp, Homo sapiens; identical to SEQ ID NO: 38754
  chr2:233498895-233499344
  hypo

SEQ ID NO: 143861 - DNA, 30 bp, Homo sapiens; identical to SEQ ID NO: 38755
  chr2:233520329-233520359
  hypo

SEQ ID NO: 143862 - DNA, 144 bp, Homo sapiens
  chr2:233527388-233527532
  hypo
attggcctcgcagagcgggaggtatttgagtcatttttcgatgaatgaagccaaaggaattacatgtttcggagactaacgagtgtcctttcatcccggtcatgcattcctttgaccctgcaggtatgacgctgggcgggatgg

SEQ ID NO: 143863 - DNA, 150 bp, Homo sapiens; identical to SEQ ID NO: 64834
  chr2:233540160-233540310
  hypo

SEQ ID NO: 143864 - DNA, 30 bp, Homo sapiens; identical to SEQ ID NO: 64835
  chr2:233599883-233599913
  hypo

SEQ ID NO: 143865 - DNA, 30 bp, Homo sapiens; identical to SEQ ID NO: 64836
  chr2:233600174-233600204
  hypo

SEQ ID NO: 143866 - DNA, 30 bp, Homo sapiens
  chr2:233642305-233642335
  hypo
ttgtagaatcctctccgtcccccccccgcc

SEQ ID NO: 143867 - DNA, 49 bp, Homo sapiens; identical to SEQ ID NO: 16990
  chr2:233714269-233714318
  hypo

SEQ ID NO: 143868 - DNA, 30 bp, Homo sapiens
  chr2:233734895-233734925
  hypo
ggggtggggaggtgcgggcacgatgtccca

SEQ ID NO: 143869 - DNA, 117 bp, Homo sapiens; identical to SEQ ID NO: 64838
  chr2:233750023-233750140
  hypo

SEQ ID NO: 143870 - DNA, 234 bp, Homo sapiens; identical to SEQ ID NO: 64839
  chr2:233750441-233750675
  hypo

SEQ ID NO: 143871 - DNA, 30 bp, Homo sapiens
  chr2:233751133-233751163
  hypo
gcagtgtgtgccctgcgagtgtgctgtgca

SEQ ID NO: 143872 - DNA, 166 bp, Homo sapiens; identical to SEQ ID NO: 64840
  chr2:233753187-233753353
  hypo

SEQ ID NO: 143873 - DNA, 188 bp, Homo sapiens; identical to SEQ ID NO: 64841
  chr2:233753917-233754105
  hypo

SEQ ID NO: 143874 - DNA, 193 bp, Homo sapiens; identical to SEQ ID NO: 64842
  chr2:233764816-233765009
  hypo

SEQ ID NO: 143875 - DNA, 30 bp, Homo sapiens
  chr2:233766642-233766672
  hypo
gggccgctgaagacccggcctcagtctgtc

SEQ ID NO: 143876 - DNA, 174 bp, Homo sapiens
  chr2:233767044-233767218
  hypo
agcccgagcccagcccgctgcagcgcagtctttagtgaattcgaggccggactgagcaggtcccgtgagcagcgtggggagtgggggcttggctgtctgatgggggagtgacagctaaccccttgggttgctaagggacgaggggagtcacatattcaacgcagccatgggatg

SEQ ID NO: 143877 - DNA, 30 bp, Homo sapiens; identical to SEQ ID NO: 38757
  chr2:233790029-233790059
  hypo

SEQ ID NO: 143878 - DNA, 23 bp, Homo sapiens
  chr2:233813713-233813736
  hypo
caagactgcgtctcaaaaaaacc

SEQ ID NO: 143879 - DNA, 172 bp, Homo sapiens; identical to SEQ ID NO: 64845
  chr2:233845596-233845768
  hypo

SEQ ID NO: 143880 - DNA, 31 bp, Homo sapiens; identical to SEQ ID NO: 64846
  chr2:233888472-233888503
  hypo

SEQ ID NO: 143881 - DNA, 30 bp, Homo sapiens; identical to SEQ ID NO: 16992
  chr2:233896303-233896333
  hypo

SEQ ID NO: 143882 - DNA, 30 bp, Homo sapiens; identical to SEQ ID NO: 64848
  chr2:233897228-233897258
  hypo

SEQ ID NO: 143883 - DNA, 30 bp, Homo sapiens; identical to SEQ ID NO: 64849
  chr2:233897546-233897576
  hypo

SEQ ID NO: 143884 - DNA, 30 bp, Homo sapiens
  chr2:233918100-233918130
  hypo
tgctcgtggatatgccgcctaactcaaccc

SEQ ID NO: 143885 - DNA, 144 bp, Homo sapiens; identical to SEQ ID NO: 16993
  chr2:233945669-233945813
  hypo

SEQ ID NO: 143886 - DNA, 30 bp, Homo sapiens
  chr2:233960666-233960696
  hypo
ccttagcaatctgtccgtgagatggatcca

SEQ ID NO: 143887 - DNA, 162 bp, Homo sapiens; identical to SEQ ID NO: 64851
  chr2:233986775-233986937
  hypo

SEQ ID NO: 143888 - DNA, 30 bp, Homo sapiens
  chr2:233992033-233992063
  hypo
gaccaaggaaagcggcgacacagagccgcc

SEQ ID NO: 143889 - DNA, 30 bp, Homo sapiens
  chr2:233996634-233996664
  hypo
aggcttttaaaagcacgatcagtacattcg

SEQ ID NO: 143890 - DNA, 30 bp, Homo sapiens
  chr2:233997131-233997161
  hypo
tcgggtatgtagtgccgatggagagagctt

SEQ ID NO: 143891 - DNA, 175 bp, Homo sapiens
  chr2:234055892-234056067
  hypo
cccacacacagtggacgagggggatgcccctagagtctctgtgattcccgggagacgcctgtggaaacatgcacgtgcgccgctggggcaagagaagcccagtggccccacgaaggacgcacaccagaggttgcccagccatgtagacaaggggttcgggcgggggaagccttgc

SEQ ID NO: 143892 - DNA, 30 bp, Homo sapiens
  chr2:234071636-234071666
  hypo
ggggacccaccagcccgggggttcgggcac

SEQ ID NO: 143893 - DNA, 30 bp, Homo sapiens; identical to SEQ ID NO: 64852
  chr2:234077718-234077748
  hypo

SEQ ID NO: 143894 - DNA, 30 bp, Homo sapiens; identical to SEQ ID NO: 64853
  chr2:234078954-234078984
  hypo

SEQ ID NO: 143895 - DNA, 144 bp, Homo sapiens; identical to SEQ ID NO: 64854
  chr2:234079668-234079812
  hypo

SEQ ID NO: 143896 - DNA, 193 bp, Homo sapiens; identical to SEQ ID NO: 64855
  chr2:234093874-234094067
  hypo

SEQ ID NO: 143897 - DNA, 30 bp, Homo sapiens
  chr2:234101504-234101534
  hypo
cagctgacctcaccacggataggcttcccc

SEQ ID NO: 143898 - DNA, 30 bp, Homo sapiens
  chr2:234101814-234101844
  hypo
gtgagccaccacacccggtgcattgggtgt

SEQ ID NO: 143899 - DNA, 95 bp, Homo sapiens
  chr2:234121797-234121892
  hypo
acacacaaatacgcacgcatgcacacgtgcaggaagctagcaggagggaggtgccccgcacaaatctggagaaatatcacagggctcggctgggc

SEQ ID NO: 143900 - DNA, 34 bp, Homo sapiens
  chr2:234122191-234122225
  hypo
aaagaaagatcacagggcccgttaggctccttcc

SEQ ID NO: 143901 - DNA, 30 bp, Homo sapiens
  chr2:234127790-234127820
  hypo
cagagttctactgcccggccatcctgcagg

SEQ ID NO: 143902 - DNA, 30 bp, Homo sapiens
  chr2:234140747-234140777
  hypo
ctgcccggggagacacgctgtagccacgat

SEQ ID NO: 143903 - DNA, 30 bp, Homo sapiens; identical to SEQ ID NO: 64856
  chr2:234159331-234159361
  hypo

SEQ ID NO: 143904 - DNA, 279 bp, Homo sapiens; identical to SEQ ID NO: 64857
  chr2:234206549-234206828
  hypo

SEQ ID NO: 143905 - DNA, 30 bp, Homo sapiens; identical to SEQ ID NO: 16996
  chr2:234216547-234216577
  hypo

SEQ ID NO: 143906 - DNA, 30 bp, Homo sapiens; identical to SEQ ID NO: 64859
  chr2:234260971-234261001
  hypo

SEQ ID NO: 143907 - DNA, 205 bp, Homo sapiens
  chr2:234263721-234263926
  hypo
aaccccggttctgcacgtttctcaggagcggtcgggtggtgtcccgcgagtgccctgcagacttccctgtggtgccctcagaagtccgctcggacccgggtgcgagggatcaccccttcaccccttcatcccaaaagggaaggaagggatgcgcgttcagtgaccgtctctctcagcaaagccgggaccgcgcacccgcttggca

SEQ ID NO: 143908 - DNA, 92 bp, Homo sapiens; identical to SEQ ID NO: 64860
  chr2:234355708-234355800
  hypo

SEQ ID NO: 143909 - DNA, 30 bp, Homo sapiens; identical to SEQ ID NO: 16998
  chr2:234359917-234359947
  hypo

SEQ ID NO: 143910 - DNA, 30 bp, Homo sapiens
  chr2:234366901-234366931
  hypo
gtggtcagctctaacgtgtcccttgcagac

SEQ ID NO: 143911 - DNA, 375 bp, Homo sapiens
  chr2:234369774-234370149
  hypo
attcctgctcctcgcccgccaggtgcgggttccgcctgtgagtccctcccagccggcagctgtgctgctccgccggtgcggggcctgcctgcattctccccccgtggccgcacgctggctggtgccctggtgtccctttcttgtttcccctgggctccttcttctcctggctgtggacaggtgcacccgtcggttttgtgcccggcatgccgtgtgcccttccaggcagcctgcccagccctggcgtgcagatggatcgtctgtgccagccttcggctcttgtcgagcaggtggtcgctgtcccagtcatcaccggcgttcctcgctctgcacttccataccggctgcagtccttcctggcgctgcattctctgc

SEQ ID NO: 143912 - DNA, 30 bp, Homo sapiens; identical to SEQ ID NO: 64863
  chr2:234370958-234370988
  hypo

SEQ ID NO: 143913 - DNA, 1030 bp, Homo sapiens
  chr2:234372715-234373745
  hypo
gcagagccctggagcggacctcacccccctgggcctcgcgctgatcagcagtgcacactctccatttctctctccctccctccgcctggagcagcagctggatccgcctcagaaggagcagctggggagtgctcttgccgagatggaccgacagctcaggaggctggcagacaccccgtggctctgccagtccgcagagcccggcgacgaagaggtatgtggctcatagggctgtgcctgggtctcccggacatggtggctctcgcctgaagtgcctgtgttccttgtgacccgtgtggctctgggatcaagatcgtgtcgctccggcagcccctgaggggccttctccagacttcgctattaaaatgctctttaaggcagggagggacagcaggtaggaaggagttctgggctgggattaagagtgccccttgaggaccagggacctgttgtcctctgaaacagaactgcagggcttcctggacagtgggtagaaggaaggctgagcccagccccacagcctcccccgagggtggagatgtatcatgggataaatggcagccttttgggatcccgctgtggacagggcgcagttggtgtgcgccactccccactcacactctcttcctgtgtgaacagaaagactccagctcgtcgcaggtctgggagggacccgaggacgcagggcatagcggaccctggggtggagtcacattcttctgcagggagtgctggctgaaggagccctggagagggccgtgtctggacaaggacaaaccccagcctgtctcttggcttccctgcttcagagatagaacacagaggggccctgaggaaagctcatcttgggcagtacagttgcagaaggcaaataactgcaagacgccaaacctgggcacccctgcccagtggggtttgtgagacctgtgggcagcagtaaggcgaggggacagaggtgggcagctgcacaacagcaccctctttccggggccctggggcgttttttgacgcatgcaatcctttcatggga

SEQ ID NO: 143914 - DNA, 30 bp, Homo sapiens
  chr2:234380783-234380813
  hypo
aaagtgttggttgccggaatctttccaaac

SEQ ID NO: 143915 - DNA, 30 bp, Homo sapiens
  chr2:234384287-234384317
  hypo
caggccggcccggccgcacgcgcctgctgg

SEQ ID NO: 143916 - DNA, 30 bp, Homo sapiens; identical to SEQ ID NO: 64865
  chr2:234384935-234384965
  hypo

SEQ ID NO: 143917 - DNA, 30 bp, Homo sapiens; identical to SEQ ID NO: 64866
  chr2:234385344-234385374
  hypo

SEQ ID NO: 143918 - DNA, 305 bp, Homo sapiens
  chr2:234389315-234389620
  hypo
gatggcctgtggcagcggagtcctggcggccaggggtcaggcagtgtcctggaggaagtggggtagcagccctgaagccacagcagcgtcccctggagtggccaggctctcgggaaccttggagagagcgggagaaggacagggagcccgcagcagggctgaggtggcagcaagacggggtggttctggagacctgagggtgtgggaacctgaagggaaagccaagagccaggcagagggtgaggctgcgggtgaggaggaaggagggggaccggggggccatggatctgcgggctcctcatcgt

SEQ ID NO: 143919 - DNA, 31 bp, Homo sapiens; identical to SEQ ID NO: 17002
  chr2:234389853-234389884
  hypo

SEQ ID NO: 143920 - DNA, 292 bp, Homo sapiens; identical to SEQ ID NO: 64868
  chr2:234394403-234394695
  hypo

SEQ ID NO: 143921 - DNA, 30 bp, Homo sapiens
  chr2:234394953-234394983
  hypo
cctggcttgatagcccggcagctggcagga

SEQ ID NO: 143922 - DNA, 104 bp, Homo sapiens; identical to SEQ ID NO: 64869
  chr2:234396519-234396623
  hypo

SEQ ID NO: 143923 - DNA, 284 bp, Homo sapiens
  chr2:234399623-234399907
  hypo
gaggccacgaggagccgtctgcaccatgggcgtgtattgcctgcgggtacttaccactgaacatggcatatgacaaatgccatatcagaacagactgtaattgagggaaaaggagatagaagaatatattaatatctcactggaagaagccacattaccactaagttatggtgcaggaagaagtctgacctgagacttcagctccgccagcgtggcatcttctgagatctctatgtctcccaagtagaggagagaaacttgcgcaggctcgttcccagaagcac

SEQ ID NO: 143924 - DNA, 30 bp, Homo sapiens
  chr2:234465571-234465601
  hypo
agatgaggtcatgaccggaggtcccaacta

SEQ ID NO: 143925 - DNA, 155 bp, Homo sapiens
  chr2:234545054-234545209
  hypo
gaaaggataaatacacgccctctattggggtcaggttttgtgcctgtacttcttccgcctactgtatcatagcagcttagaatcccagctgctggctcgggctgcagttctctcatggctcgcgcagggtggaccagccccgttcctttatgtgt

SEQ ID NO: 143926 - DNA, 47 bp, Homo sapiens
  chr2:234545414-234545461
  hypo
ctggaagatcagaaccgggaattcatggttttcgcccatgctcaatg

SEQ ID NO: 143927 - DNA, 30 bp, Homo sapiens
  chr2:234545912-234545942
  hypo
tcaatttggttgttgcgaacggactttgtt

SEQ ID NO: 143928 - DNA, 30 bp, Homo sapiens; identical to SEQ ID NO: 2311
  chr2:234652586-234652616
  hypo

SEQ ID NO: 143929 - DNA, 30 bp, Homo sapiens; identical to SEQ ID NO: 107657
  chr2:234652665-234652695
  hypo

SEQ ID NO: 143930 - DNA, 31 bp, Homo sapiens; identical to SEQ ID NO: 64873
  chr2:234724687-234724718
  hypo

SEQ ID NO: 143931 - DNA, 425 bp, Homo sapiens
  chr2:234737268-234737693
  hypo
cttccagttcatgagcggcccagttctgtaccaggagaagctgctgaagccggcagctttgctgctggagaagggtgccgaccaggaggaagacgaggccctgcgggtgctgtccctgcgcgccctcggcaacatggccctgggcgcccccaagaaggtactgtgcctggccctgggcccaggtcccgggagctgagggtgcaggccgggtgccctggtcagcctgggagggagggtgcaggctgagggctgcccatgcccctccaggtgaagcagtaccggaaggtcttgctggagaagtgcctgggccccctgagggagcccgtgagcaacagcgtgactgccgagggcatggaggccctgaccaagatcctggctgagctccgggaaggggatgtggggtcctctttcgacgccatgtctga

SEQ ID NO: 143932 - DNA, 30 bp, Homo sapiens; identical to SEQ ID NO: 64875
  chr2:234750047-234750077
  hypo

SEQ ID NO: 143933 - DNA, 350 bp, Homo sapiens
  chr2:234751559-234751909
  hypo
agaagtgctcaaaaacgcatgtcgttgcactacacgacacaaaagccagcctgaaaggggctccctgacagctaaatctggggttacttgagcgtcaaattgcataccggcaatggattataacatgtgaatcaaagaacaaaaagactccatgaattcctactgatcctaaaaaataaaaataaaataaatcaaagcatgagagggaactacaggaagcaaaaaaaagaaccagaggggagatagctcttttgagcagaataatgccaactgacgtgtgccaaggaacggcagagacagaaacaacctgggcggggacctccacccaggcgatccgcattgctggcttc

SEQ ID NO: 143934 - DNA, 34 bp, Homo sapiens
  chr2:234764846-234764880
  hypo
acaattcacagagtgcgagcggactggagcccgc

SEQ ID NO: 143935 - DNA, 30 bp, Homo sapiens; identical to SEQ ID NO: 64876
  chr2:234774815-234774845
  hypo

SEQ ID NO: 143936 - DNA, 59 bp, Homo sapiens; identical to SEQ ID NO: 64877
  chr2:235005078-235005137
  hypo

SEQ ID NO: 143937 - DNA, 30 bp, Homo sapiens
  chr2:235210297-235210327
  hypo
tggctgcacagacgccgtgggctcagaagc

SEQ ID NO: 143938 - DNA, 30 bp, Homo sapiens; identical to SEQ ID NO: 17004
  chr2:235406525-235406555
  hypo

SEQ ID NO: 143939 - DNA, 63 bp, Homo sapiens; identical to SEQ ID NO: 64879
  chr2:235442548-235442611
  hypo

SEQ ID NO: 143940 - DNA, 90 bp, Homo sapiens; identical to SEQ ID NO: 17005
  chr2:235460413-235460503
  hypo

SEQ ID NO: 143941 - DNA, 31 bp, Homo sapiens; identical to SEQ ID NO: 17006
  chr2:235517160-235517191
  hypo

SEQ ID NO: 143942 - DNA, 31 bp, Homo sapiens; identical to SEQ ID NO: 17007
  chr2:235637559-235637590
  hypo

SEQ ID NO: 143943 - DNA, 103 bp, Homo sapiens; identical to SEQ ID NO: 64883
  chr2:235700053-235700156
  hypo

SEQ ID NO: 143944 - DNA, 74 bp, Homo sapiens; identical to SEQ ID NO: 64884
  chr2:235809203-235809277
  hypo

SEQ ID NO: 143945 - DNA, 38 bp, Homo sapiens; identical to SEQ ID NO: 17008
  chr2:235815938-235815976
  hypo

SEQ ID NO: 143946 - DNA, 31 bp, Homo sapiens; identical to SEQ ID NO: 17009
  chr2:235823641-235823672
  hypo

SEQ ID NO: 143947 - DNA, 1713 bp, Homo sapiens; identical to SEQ ID NO: 107666
  chr2:235859954-235861667
  hypo

SEQ ID NO: 143948 - DNA, 96 bp, Homo sapiens; identical to SEQ ID NO: 64888
  chr2:235868187-235868283
  hypo

SEQ ID NO: 143949 - DNA, 29 bp, Homo sapiens
  chr2:235870196-235870225
  hypo
tgagccactgcgcccggcctccatgttgg

SEQ ID NO: 143950 - DNA, 31 bp, Homo sapiens; identical to SEQ ID NO: 17012
  chr2:235893743-235893774
  hypo

SEQ ID NO: 143951 - DNA, 354 bp, Homo sapiens
  chr2:235894217-235894571
  hypo
ggcattttgactctccgcgcacaggtatttttgaccctctgcgcacagatatttttgaccctctgcgcacaggtgttttgactgtctgtttgtagcatcctcccttgatgtatgttcgggtgaagcagccctcgatgcacacctatgagctcagggactgtgcgcaggtgaaccagcctgtgacacacgcctacgagctcaaggagcacggtgcaggtgaaccagcctgtgacacacgcctacgagctcaaggagcatgatgcaggtgaaccagccctggatacacgcctatgagctcagggtccatgtgcaggtgaaccagccctcgacacacacctacgagaacagggacca

SEQ ID NO: 143952 - DNA, 98 bp, Homo sapiens
  chr2:235897308-235897406
  hypo
gagaaggcagccactcggtgctgcgcgggtgccaggaggagctcacggtgtgtaggggggacgcatgaacaggtgaacaaagccgttgcgggtgctgg

SEQ ID NO: 143953 - DNA, 31 bp, Homo sapiens; identical to SEQ ID NO: 64892
  chr2:235901828-235901859
  hypo

SEQ ID NO: 143954 - DNA, 31 bp, Homo sapiens; identical to SEQ ID NO: 64893
  chr2:235903729-235903760
  hypo

SEQ ID NO: 143955 - DNA, 31 bp, Homo sapiens; identical to SEQ ID NO: 17014
  chr2:235904049-235904080
  hypo

SEQ ID NO: 143956 - DNA, 114 bp, Homo sapiens
  chr2:235909180-235909294
  hypo
gggaagcctggatcttgggctcgggctctgatgctttgtctctgagccgctgacatggaggacgtcaagccgcgatgttcatgtccccattgcgtagaggtgggtcctgtagtc

SEQ ID NO: 143957 - DNA, 165 bp, Homo sapiens; identical to SEQ ID NO: 64895
  chr2:235922809-235922974
  hypo

SEQ ID NO: 143958 - DNA, 64 bp, Homo sapiens; identical to SEQ ID NO: 17016
  chr2:235931226-235931290
  hypo

SEQ ID NO: 143959 - DNA, 30 bp, Homo sapiens
  chr2:235932174-235932204
  hypo
agtgagactccatctcgggcggtggggtgg

SEQ ID NO: 143960 - DNA, 30 bp, Homo sapiens
  chr2:235936429-235936459
  hypo
cgtgaacagtctgtgcgctcagcctgaggt

SEQ ID NO: 143961 - DNA, 313 bp, Homo sapiens; identical to SEQ ID NO: 64897
  chr2:235941052-235941365
  hypo

SEQ ID NO: 143962 - DNA, 379 bp, Homo sapiens
  chr2:235950026-235950405
  hypo
ccagctcagccaccacgaatagcactggcaacatcttcgatgagcttccagtcacaaacggactccacgcagagccgccggtcaggcgggacaaccccttcttcagaagcaagcgctcctacagtctctcggaactctccgtcctccaagccaagtccgatgctcccacatcgtcgagtttcttcaccggcttgaaatcacctgcccccgagcaatttcagagccgggaggattttcgaactgcctggctaaaccacaggaagctggcccggtcttgccacgacctggacttgcttggccaaagccctggttggggccagacccaagccgtggagacaaacatcgtgtgcaagctggatagctccgggggtgctgtcca

SEQ ID NO: 143963 - DNA, 94 bp, Homo sapiens
  chr2:235950683-235950777
  hypo
catatgtctccgtcccgctcaactgcagctgtggggacacggtccaggcacagctgcacaacctggagccctgtatgtacgtggctgtcgtggc

SEQ ID NO: 143964 - DNA, 31 bp, Homo sapiens; identical to SEQ ID NO: 17018
  chr2:235951107-235951138
  hypo

SEQ ID NO: 143965 - DNA, 31 bp, Homo sapiens; identical to SEQ ID NO: 64901
  chr2:235951347-235951378
  hypo

SEQ ID NO: 143966 - DNA, 433 bp, Homo sapiens
  chr2:235960995-235961428
  hypo
actggtgaacctggcacgctctgcacatcatctcttttctcccgtgaatcctggcagtgatcgatttcaggggacatttggtagtaggccagggaacatggagaatagagagcccatggccattcctgcgccgtctgctggaattctgcggggagcagagcctgccccactccctacactgtctcacgctgtgtgcctcttcctctgcaggccctactgaagatggactgccagggcctggtggtcagactcatccaggactttgtgctcctgaccacggctgtagaggtggcccagcgctggcgggagctggctgagaagctggccaaggtctccaagcagcagatggacgcctacgagtctccccaccgggacaggaacggggttgtggacagcgaggtgagcagcggctgagcttcgagctcaccgagcc

SEQ ID NO: 143967 - DNA, 31 bp, Homo sapiens; identical to SEQ ID NO: 17019
  chr2:235970776-235970807
  hypo

SEQ ID NO: 143968 - DNA, 31 bp, Homo sapiens; identical to SEQ ID NO: 17020
  chr2:236008617-236008648
  hypo

SEQ ID NO: 143969 - DNA, 228 bp, Homo sapiens; identical to SEQ ID NO: 64905
  chr2:236014700-236014928
  hypo

SEQ ID NO: 143970 - DNA, 187 bp, Homo sapiens; identical to SEQ ID NO: 64906
  chr2:236015359-236015546
  hypo

SEQ ID NO: 143971 - DNA, 29 bp, Homo sapiens
  chr2:236023396-236023425
  hypo
tcagtggtgacaggccgggcacggtggct

SEQ ID NO: 143972 - DNA, 200 bp, Homo sapiens; identical to SEQ ID NO: 17021
  chr2:236024874-236025074
  hypo

SEQ ID NO: 143973 - DNA, 19 bp, Homo sapiens
  chr2:236211239-236211258
  hypo
aaaatgaagttcttggctg

SEQ ID NO: 143974 - DNA, 31 bp, Homo sapiens; identical to SEQ ID NO: 17023
  chr2:236229403-236229434
  hypo

SEQ ID NO: 143975 - DNA, 1940 bp, Homo sapiens; identical to SEQ ID NO: 2316
  chr2:236402217-236404157
  hypo

SEQ ID NO: 143976 - DNA, 21 bp, Homo sapiens
  chr2:236412780-236412801
  hypo
cagcctcgaactctctttttt

SEQ ID NO: 143977 - DNA, 138 bp, Homo sapiens; identical to SEQ ID NO: 17026
  chr2:236415970-236416108
  hypo

SEQ ID NO: 143978 - DNA, 30 bp, Homo sapiens
  chr2:236417256-236417286
  hypo
acaggtcccgaagtccgggaggagggagga

SEQ ID NO: 143979 - DNA, 287 bp, Homo sapiens
  chr2:236417495-236417782
  hypo
gggatgctctgtgcatcaaagcgatttgcccagggttacacagaggaaggtggcagagccggaagtggcagaatccagtgcacgggcgggatgccgagtgtgtcgccaaactccaccactttagtcgggggcgtggtggtggctgcgctatctgcttcccactcactggcatcctagccgtgtggggtgtgtgctcacctgcagccaccctcacctgcttgaaccagatttacctagagggtggtgtgaactcatgtgatgtgaacgattacttatagttaccgtga

SEQ ID NO: 143980 - DNA, 31 bp, Homo sapiens; identical to SEQ ID NO: 64914
  chr2:236426084-236426115
  hypo

SEQ ID NO: 143981 - DNA, 27 bp, Homo sapiens
  chr2:236437321-236437348
  hypo
tttttgtttgttttgagaagacggagt

SEQ ID NO: 143982 - DNA, 30 bp, Homo sapiens
  chr2:236443423-236443453
  hypo
ccgtggaagagccaacggcagcccgtgcag

SEQ ID NO: 143983 - DNA, 226 bp, Homo sapiens
  chr2:236443809-236444035
  hypo
ctccaccgggccacccgcaccaggttgcctcccatcgtttgcaggagcggaagacccgatggagcaggtttcacagtgccctcgctgctgcctcccgtttcatctgcacgtctctttcaatgcgggcgtgcgaacttccaggtagagccgagttcaagaaaatgaagtactgcatgcgacgagcaagtttattgaagagggtgtgaggtcgcggcgcctgaccctc

SEQ ID NO: 143984 - DNA, 31 bp, Homo sapiens
  chr2:236445357-236445388
  hypo
tgaggtctgcgaagacgtctttgagtctgtt

SEQ ID NO: 143985 - DNA, 30 bp, Homo sapiens
  chr2:236452588-236452618
  hypo
gagttctctctctgccgcctgtgcccaggc

SEQ ID NO: 143986 - DNA, 225 bp, Homo sapiens
  chr2:236452977-236453202
  hypo
tcctgccgttgcttacgaggttctgagtcccgcagggactggctttcttcctctgtaggagtttcctaccatgtaagttttagaaggaaaggatactctttggggcctcagcggtccccttaggctgagcatctgaaccttcccgtggtccgtgtggctggaaggaggcttccatcgctggaaatccatttctcaaggcgaggagccagccgggccgaccacgga

SEQ ID NO: 143987 - DNA, 107 bp, Homo sapiens; identical to SEQ ID NO: 64917
  chr2:236456628-236456735
  hypo

SEQ ID NO: 143988 - DNA, 202 bp, Homo sapiens; identical to SEQ ID NO: 17028
  chr2:236459168-236459370
  hypo

SEQ ID NO: 143989 - DNA, 31 bp, Homo sapiens; identical to SEQ ID NO: 64919
  chr2:236466162-236466193
  hypo

SEQ ID NO: 143990 - DNA, 31 bp, Homo sapiens; identical to SEQ ID NO: 17029
  chr2:236467580-236467611
  hypo

SEQ ID NO: 143991 - DNA, 31 bp, Homo sapiens; identical to SEQ ID NO: 64921
  chr2:236511015-236511046
  hypo

SEQ ID NO: 143992 - DNA, 71 bp, Homo sapiens
  chr2:236512588-236512659
  hypo
ggcacccatcaaaatgacacacggtgactctggtttcttccagcatccccgagatgaagatgaaaaactgt

SEQ ID NO: 143993 - DNA, 323 bp, Homo sapiens; identical to SEQ ID NO: 64922
  chr2:236541633-236541956
  hypo

SEQ ID NO: 143994 - DNA, 31 bp, Homo sapiens; identical to SEQ ID NO: 17031
  chr2:236544007-236544038
  hypo

SEQ ID NO: 143995 - DNA, 95 bp, Homo sapiens; identical to SEQ ID NO: 64924
  chr2:236553451-236553546
  hypo

SEQ ID NO: 143996 - DNA, 24 bp, Homo sapiens
  chr2:236555500-236555524
  hypo
cgcgtgcggtggctcacgcctgta

SEQ ID NO: 143997 - DNA, 22 bp, Homo sapiens
  chr2:236566309-236566331
  hypo
gccaccgcgcccagcccagtgg

SEQ ID NO: 143998 - DNA, 195 bp, Homo sapiens; identical to SEQ ID NO: 64927
  chr2:236571424-236571619
  hypo

SEQ ID NO: 143999 - DNA, 76 bp, Homo sapiens; identical to SEQ ID NO: 64928
  chr2:236602264-236602340
  hypo

SEQ ID NO: 144000 - DNA, 198 bp, Homo sapiens; identical to SEQ ID NO: 17035
  chr2:236603368-236603566
  hypo

SEQ ID NO: 144001 - DNA, 31 bp, Homo sapiens; identical to SEQ ID NO: 64930
  chr2:236605764-236605795
  hypo

SEQ ID NO: 144002 - DNA, 28 bp, Homo sapiens
  chr2:236612992-236613020
  hypo
ttagaaatgctgatttgaggccgggcgt

SEQ ID NO: 144003 - DNA, 147 bp, Homo sapiens; identical to SEQ ID NO: 17037
  chr2:236613259-236613406
  hypo

SEQ ID NO: 144004 - DNA, 31 bp, Homo sapiens; identical to SEQ ID NO: 64933
  chr2:236615816-236615847
  hypo

SEQ ID NO: 144005 - DNA, 110 bp, Homo sapiens; identical to SEQ ID NO: 64934
  chr2:236616174-236616284
  hypo

SEQ ID NO: 144006 - DNA, 175 bp, Homo sapiens; identical to SEQ ID NO: 17039
  chr2:236617714-236617889
  hypo

SEQ ID NO: 144007 - DNA, 193 bp, Homo sapiens; identical to SEQ ID NO: 64936
  chr2:236618369-236618562
  hypo

SEQ ID NO: 144008 - DNA, 188 bp, Homo sapiens; identical to SEQ ID NO: 17041
  chr2:236619769-236619957
  hypo

SEQ ID NO: 144009 - DNA, 31 bp, Homo sapiens; identical to SEQ ID NO: 64938
  chr2:236621491-236621522
  hypo

SEQ ID NO: 144010 - DNA, 31 bp, Homo sapiens; identical to SEQ ID NO: 17042
  chr2:236622524-236622555
  hypo

SEQ ID NO: 144011 - DNA, 189 bp, Homo sapiens; identical to SEQ ID NO: 17043
  chr2:236624441-236624630
  hypo

SEQ ID NO: 144012 - DNA, 193 bp, Homo sapiens; identical to SEQ ID NO: 17044
  chr2:236637397-236637590
  hypo

SEQ ID NO: 144013 - DNA, 31 bp, Homo sapiens; identical to SEQ ID NO: 64942
  chr2:236644830-236644861
  hypo

SEQ ID NO: 144014 - DNA, 31 bp, Homo sapiens; identical to SEQ ID NO: 17045
  chr2:236646339-236646370
  hypo

SEQ ID NO: 144015 - DNA, 193 bp, Homo sapiens
  chr2:236647744-236647937
  hypo
tcaacttattactcctcgcctgctaggacatcatcccctttgcatctggggacactgagatggggcgaggtggggcaagactacacagctgtatgtggcagagccagggttcaggcagagctaggccagtatcggggtctgggggcgaccgtctgcagcaccgtcacatacgtggggacgtccacctgtgtca

SEQ ID NO: 144016 - DNA, 655 bp, Homo sapiens
  chr2:236648389-236649044
  hypo
ccgtctggagggcctcggacactttcaggctgggatggggactctgattttttgcttctcaggcactgatgtggttcagacccaggattctaggagggaaggttcccgtcgcaggggagggaatcagacgtcgctctgggcggcagtggagctggcaggcagcctctgggctctggcagcattgtcctctgggtccagcgatttggggtttagacagggtttctggacggcatctgcacagaggagcggaagacaagagctgggaaccgatgcgtgccttccctctttaaaacaagagtttcgaatccccatgagggttccctagcgtggtctcagagcccaggatctggagggggacgtctgtcattggagaaggcagaggagccagggtggaatccttcccgctgcccagcaggagcagggctggcctagcgggccgggctgggcactgcagcaaccttgtaccatcccctcctgagagcatcaggggccgggacgtccaaggtagcaccaggcccctcatgcccgcaccccctcctcatggtcacctctgttcctgcagggtcccggtggtctcccgctaaccccgcgtggtctctaacgcctcctgtcagccgctgctctgctgtctccacccgtgcggaggtcccatcca

SEQ ID NO: 144017 - DNA, 31 bp, Homo sapiens; identical to SEQ ID NO: 64946
  chr2:236652842-236652873
  hypo

SEQ ID NO: 144018 - DNA, 126 bp, Homo sapiens; identical to SEQ ID NO: 64947
  chr2:236656835-236656961
  hypo

SEQ ID NO: 144019 - DNA, 275 bp, Homo sapiens; identical to SEQ ID NO: 17048
  chr2:236660556-236660831
  hypo

SEQ ID NO: 144020 - DNA, 422 bp, Homo sapiens
  chr2:236663444-236663866
  hypo
cagggtcccttcctccgtgaagttaaggtccactagggagggtaaacatcaaacggtcacccagaaacatgaccttgtgtcttgctcaggggtggaaaagaagtgtggcagcccaggctgctttctgggggtggagcgttctcgctcctgctcacaggcgagtttgtgtggcttgcggggctgggtgagctggttccacaagatggtttctgcttgacctgggcagctgagccggacgtgggctgtgggtacccaaccgtttggattctcagcagagccctggggaagggaggcactgggggctggggcgggctggatgtgcggacttggcagctgggggctgcaggtccgtctgcagggactgcacagggctctcgttcctagattgcttcacagccagcggctctgtgcctgtcagattc

SEQ ID NO: 144021 - DNA, 31 bp, Homo sapiens; identical to SEQ ID NO: 17049
  chr2:236664671-236664702
  hypo

SEQ ID NO: 144022 - DNA, 81 bp, Homo sapiens; identical to SEQ ID NO: 64951
  chr2:236669005-236669086
  hypo

SEQ ID NO: 144023 - DNA, 202 bp, Homo sapiens; identical to SEQ ID NO: 17051
  chr2:236672624-236672826
  hypo

SEQ ID NO: 144024 - DNA, 531 bp, Homo sapiens
  chr2:236673973-236674504
  hypo
gggggcacctgcgagcgcccgtggcagctgctttgctttccccatgggtggtagtctcacgctgcccccacaggcccggcccctccagtgggaacatgtgcctgcactttttagtcgaacatgtaaattaatcagcagcagtccagcctaaaaagagaagctgaacactgttcgtttgggggctcatcggctcactgccgcgtggtcagtcctggtgccgtgagcacagccaaccggactgtaccacatgttcccttctccctgggctgagcaatcgcttccccgctaaatgttcggcagcactttgccttgtacgtgtctacgtctgcaggaggggctgtgactcatccccagccaactgtattccaagcacagccatagttcagagtgaatctttatggtctgtgaattctggagtttcagaaaactctctcattcaacgttgtgagtaaaccgtaagaaaaaatattgaacaccaacatagtcatctgggtactgggaaatactcccatgcccgcaccaagatttcat

SEQ ID NO: 144025 - DNA, 211 bp, Homo sapiens
  chr2:236675950-236676161
  hypo
ttggccaggcacctcacgttagcgtctgcagccttgaatcgggaggcaggttgggcgcaggcttctcgtgcgcaccagcgagcacccgggccaagcgtggaggctctgcgggctgggggtccggcccacaccatcagcctctgtgcagccgttgctttttccgttgaccaaagccatgaccttacctttatgcagtcgtgttcagagagag

SEQ ID NO: 144026 - DNA, 31 bp, Homo sapiens; identical to SEQ ID NO: 17054
  chr2:236680141-236680172
  hypo

SEQ ID NO: 144027 - DNA, 30 bp, Homo sapiens
  chr2:236685489-236685519
  hypo
ccttttccaaaatctcgaggctctcctagc

SEQ ID NO: 144028 - DNA, 400 bp, Homo sapiens; identical to SEQ ID NO: 64956
  chr2:236685966-236686366
  hypo

SEQ ID NO: 144029 - DNA, 31 bp, Homo sapiens; identical to SEQ ID NO: 64957
  chr2:236697236-236697267
  hypo

SEQ ID NO: 144030 - DNA, 63 bp, Homo sapiens
  chr2:236708150-236708213
  hypo
gtccaacctgttcaccgtgagtgtcaaccctgggtggagatttgaatgcgattccgaagcgtt

SEQ ID NO: 144031 - DNA, 97 bp, Homo sapiens; identical to SEQ ID NO: 64958
  chr2:236715041-236715138
  hypo

SEQ ID NO: 144032 - DNA, 329 bp, Homo sapiens; identical to SEQ ID NO: 64959
  chr2:236716146-236716475
  hypo

SEQ ID NO: 144033 - DNA, 31 bp, Homo sapiens; identical to SEQ ID NO: 17056
  chr2:236717069-236717100
  hypo

SEQ ID NO: 144034 - DNA, 31 bp, Homo sapiens; identical to SEQ ID NO: 64961
  chr2:236719835-236719866
  hypo

SEQ ID NO: 144035 - DNA, 31 bp, Homo sapiens; identical to SEQ ID NO: 64962
  chr2:236721555-236721586
  hypo

SEQ ID NO: 144036 - DNA, 31 bp, Homo sapiens; identical to SEQ ID NO: 64963
  chr2:236722174-236722205
  hypo

SEQ ID NO: 144037 - DNA, 163 bp, Homo sapiens; identical to SEQ ID NO: 17057
  chr2:236722552-236722715
  hypo

SEQ ID NO: 144038 - DNA, 31 bp, Homo sapiens; identical to SEQ ID NO: 64965
  chr2:236723849-236723880
  hypo

SEQ ID NO: 144039 - DNA, 60 bp, Homo sapiens; identical to SEQ ID NO: 17058
  chr2:236727032-236727092
  hypo

SEQ ID NO: 144040 - DNA, 20 bp, Homo sapiens
  chr2:236730154-236730174
  hypo
gtagccgggactacagggaa

SEQ ID NO: 144041 - DNA, 99 bp, Homo sapiens; identical to SEQ ID NO: 17060
  chr2:236733469-236733568
  hypo

SEQ ID NO: 144042 - DNA, 189 bp, Homo sapiens; identical to SEQ ID NO: 17061
  chr2:236738718-236738907
  hypo

SEQ ID NO: 144043 - DNA, 193 bp, Homo sapiens; identical to SEQ ID NO: 17062
  chr2:236739766-236739959
  hypo

SEQ ID NO: 144044 - DNA, 189 bp, Homo sapiens; identical to SEQ ID NO: 17063
  chr2:236741688-236741877
  hypo

SEQ ID NO: 144045 - DNA, 31 bp, Homo sapiens; identical to SEQ ID NO: 17064
  chr2:236743374-236743405
  hypo

SEQ ID NO: 144046 - DNA, 31 bp, Homo sapiens; identical to SEQ ID NO: 64973
  chr2:236749799-236749830
  hypo

SEQ ID NO: 144047 - DNA, 230 bp, Homo sapiens; identical to SEQ ID NO: 64974
  chr2:236750707-236750937
  hypo

SEQ ID NO: 144048 - DNA, 38 bp, Homo sapiens; identical to SEQ ID NO: 17066
  chr2:236751636-236751674
  hypo

SEQ ID NO: 144049 - DNA, 195 bp, Homo sapiens; identical to SEQ ID NO: 64976
  chr2:236751878-236752073
  hypo

SEQ ID NO: 144050 - DNA, 229 bp, Homo sapiens; identical to SEQ ID NO: 64977
  chr2:236759875-236760104
  hypo

SEQ ID NO: 144051 - DNA, 158 bp, Homo sapiens; identical to SEQ ID NO: 17068
  chr2:236760925-236761083
  hypo

SEQ ID NO: 144052 - DNA, 31 bp, Homo sapiens; identical to SEQ ID NO: 17069
  chr2:236763010-236763041
  hypo

SEQ ID NO: 144053 - DNA, 269 bp, Homo sapiens; identical to SEQ ID NO: 64980
  chr2:236765491-236765760
  hypo

SEQ ID NO: 144054 - DNA, 28 bp, Homo sapiens
  chr2:236766059-236766087
  hypo
atcctttgacgagcgtccccaaggagac

SEQ ID NO: 144055 - DNA, 128 bp, Homo sapiens
  chr2:236777008-236777136
  hypo
agtcagatgcatgcacggcccccggtgtctgttaaagccgatgaggaatgctgcccgcagagcaaaggcgagtggttgtggacgtgcctgttgataatctgatcttgacatggcgccgcctgcgttga

SEQ ID NO: 144056 - DNA, 28 bp, Homo sapiens
  chr2:236782974-236783002
  hypo
aagccactgtgcccggcccagaaccaca

SEQ ID NO: 144057 - DNA, 31 bp, Homo sapiens; identical to SEQ ID NO: 64982
  chr2:236786675-236786706
  hypo

SEQ ID NO: 144058 - DNA, 151 bp, Homo sapiens; identical to SEQ ID NO: 64983
  chr2:236791005-236791156
  hypo

SEQ ID NO: 144059 - DNA, 167 bp, Homo sapiens; identical to SEQ ID NO: 64984
  chr2:236796531-236796698
  hypo

SEQ ID NO: 144060 - DNA, 31 bp, Homo sapiens; identical to SEQ ID NO: 64985
  chr2:236801620-236801651
  hypo

SEQ ID NO: 144061 - DNA, 346 bp, Homo sapiens; identical to SEQ ID NO: 64986
  chr2:236801866-236802212
  hypo

SEQ ID NO: 144062 - DNA, 377 bp, Homo sapiens; identical to SEQ ID NO: 64987
  chr2:236826181-236826558
  hypo

SEQ ID NO: 144063 - DNA, 566 bp, Homo sapiens
  chr2:236839043-236839609
  hypo
catcttgccggcctgccggatcgcggtgtctctgctaagactcgctgggtcttttgtcttcacttccactcgatgttgcggttgcggttgggttgcgtctttgtatagggttgttcggtgcgagccatctgtggcatcgggtcccttcacattgctttgtcaggcaccatcaagattggcgtcccccttttattcctcccgaatagtttctgtctggcgcttccgtttgccatgcaggcaggacaggggctgctctcggtggtaaggtgcactatgtgccagcgtgtgggtcccatagactaactcgcgctggtttctgtggtctgcagtccgcggtggtgttcacctgacttgtttattcctagggaatgtcactagtgcatctgggtctcagatggcaagcggcatcagcctggtctccttcaacagccgacccgacggcatgcaccagcgctcctactcagtctccagtgccgaccagtggagtgaggctacggtcattgcaaactcggccatcagcagtggtaagagggggctcagccccacggacccgcagccacctcaag

SEQ ID NO: 144064 - DNA, 30 bp, Homo sapiens
  chr2:236840171-236840201
  hypo
tgaatgacgcagcaccgagggcaccctggt

SEQ ID NO: 144065 - DNA, 114 bp, Homo sapiens
  chr2:236840415-236840529
  hypo
tagtggctccgcagacgccaccaagcagaagccttaaaggaagacatctccaaaccaagccgggagacgcggagtcagcgaggtagctccacaccatagcggtgcgggtctgga

SEQ ID NO: 144066 - DNA, 31 bp, Homo sapiens; identical to SEQ ID NO: 17075
  chr2:236841397-236841428
  hypo

SEQ ID NO: 144067 - DNA, 38 bp, Homo sapiens; identical to SEQ ID NO: 17076
  chr2:236842446-236842484
  hypo

SEQ ID NO: 144068 - DNA, 124 bp, Homo sapiens; identical to SEQ ID NO: 17077
  chr2:236847370-236847494
  hypo

SEQ ID NO: 144069 - DNA, 31 bp, Homo sapiens; identical to SEQ ID NO: 64993
  chr2:236848202-236848233
  hypo

SEQ ID NO: 144070 - DNA, 36 bp, Homo sapiens; identical to SEQ ID NO: 17078
  chr2:236853750-236853786
  hypo

SEQ ID NO: 144071 - DNA, 36 bp, Homo sapiens; identical to SEQ ID NO: 17079
  chr2:236854025-236854061
  hypo

SEQ ID NO: 144072 - DNA, 209 bp, Homo sapiens; identical to SEQ ID NO: 64996
  chr2:236857147-236857356
  hypo

SEQ ID NO: 144073 - DNA, 41 bp, Homo sapiens; identical to SEQ ID NO: 17081
  chr2:236863815-236863856
  hypo

SEQ ID NO: 144074 - DNA, 224 bp, Homo sapiens; identical to SEQ ID NO: 64998
  chr2:236868107-236868331
  hypo

SEQ ID NO: 144075 - DNA, 31 bp, Homo sapiens; identical to SEQ ID NO: 64999
  chr2:236868991-236869022
  hypo

SEQ ID NO: 144076 - DNA, 149 bp, Homo sapiens; identical to SEQ ID NO: 17082
  chr2:236870132-236870281
  hypo

SEQ ID NO: 144077 - DNA, 148 bp, Homo sapiens; identical to SEQ ID NO: 65001
  chr2:236870520-236870668
  hypo

SEQ ID NO: 144078 - DNA, 198 bp, Homo sapiens; identical to SEQ ID NO: 17083
  chr2:236872389-236872587
  hypo

SEQ ID NO: 144079 - DNA, 331 bp, Homo sapiens
  chr2:236877178-236877509
  hypo
cccctcccctcacgccaacagaaagaagcaccgaaggaagaaaagcactagcaacttcaaagccgacggcctgtccggcactgctgaaggtaagggttccgcggtgccccgggagagagtctccactgcggaaaattctctgttatttttcaaatgcgtgaaattagacacccttagcacaacaaatgcacagtaatgctggtcaccgtatgtgctttctgtttgcaaggtggcacgagagggcccttgggaccttttcatcactgtctgattctcatattacgcaaccaaatctgctgtcatcactcttggccgccgtcgctggtagcgg

SEQ ID NO: 144080 - DNA, 110 bp, Homo sapiens; identical to SEQ ID NO: 17085
  chr2:236881385-236881495
  hypo

SEQ ID NO: 144081 - DNA, 30 bp, Homo sapiens
  chr2:236889180-236889210
  hypo
acacatgttgagcgtcgaggacaggttcaa

SEQ ID NO: 144082 - DNA, 88 bp, Homo sapiens
  chr2:236897036-236897124
  hypo
ctgccatgaatcagtcgcacctgcttcagatactactcagaatttcttgtccttaaatgccacccccaacccccgccccgaagtcagg

SEQ ID NO: 144083 - DNA, 108 bp, Homo sapiens
  chr2:236897389-236897497
  hypo
attgcacttcagaatcggtgatgcgcactcattcccctgcacccacccttttttctgtggtcagcatgtgtttcccagactgggcgtcactgtcgcctccttgactct

SEQ ID NO: 144084 - DNA, 157 bp, Homo sapiens
  chr2:236900736-236900893
  hypo
gtgatggtggccatcacgagacccagataacaggagtggttagaagcgcagcggaggagcctgtcttcctgggtccgagttgcgtggttaggagcgcagcggaggagccggtcttcctgggtccatgttgcgtggttaggagcgcagcggaggagcc

SEQ ID NO: 144085 - DNA, 217 bp, Homo sapiens; identical to SEQ ID NO: 65006
  chr2:236901339-236901556
  hypo

SEQ ID NO: 144086 - DNA, 31 bp, Homo sapiens; identical to SEQ ID NO: 65007
  chr2:236908516-236908547
  hypo

SEQ ID NO: 144087 - DNA, 172 bp, Homo sapiens; identical to SEQ ID NO: 17088
  chr2:236909410-236909582
  hypo

SEQ ID NO: 144088 - DNA, 31 bp, Homo sapiens; identical to SEQ ID NO: 65009
  chr2:236912262-236912293
  hypo

SEQ ID NO: 144089 - DNA, 31 bp, Homo sapiens; identical to SEQ ID NO: 65010
  chr2:236919372-236919403
  hypo

SEQ ID NO: 144090 - DNA, 156 bp, Homo sapiens; identical to SEQ ID NO: 65011
  chr2:236945109-236945265
  hypo

SEQ ID NO: 144091 - DNA, 253 bp, Homo sapiens; identical to SEQ ID NO: 17089
  chr2:236949321-236949574
  hypo

SEQ ID NO: 144092 - DNA, 177 bp, Homo sapiens; identical to SEQ ID NO: 65013
  chr2:236950836-236951013
  hypo

SEQ ID NO: 144093 - DNA, 31 bp, Homo sapiens; identical to SEQ ID NO: 17090
  chr2:236951333-236951364
  hypo

SEQ ID NO: 144094 - DNA, 212 bp, Homo sapiens; identical to SEQ ID NO: 65015
  chr2:236954181-236954393
  hypo

SEQ ID NO: 144095 - DNA, 46 bp, Homo sapiens; identical to SEQ ID NO: 65016
  chr2:236970388-236970434
  hypo

SEQ ID NO: 144096 - DNA, 166 bp, Homo sapiens; identical to SEQ ID NO: 65017
  chr2:236970493-236970659
  hypo

SEQ ID NO: 144097 - DNA, 57 bp, Homo sapiens; identical to SEQ ID NO: 65018
  chr2:236976365-236976422
  hypo

SEQ ID NO: 144098 - DNA, 19 bp, Homo sapiens
  chr2:236981923-236981942
  hypo
ccaccgtgcctggcctata

SEQ ID NO: 144099 - DNA, 31 bp, Homo sapiens; identical to SEQ ID NO: 17093
  chr2:236989877-236989908
  hypo

SEQ ID NO: 144100 - DNA, 31 bp, Homo sapiens; identical to SEQ ID NO: 17094
  chr2:236991808-236991839
  hypo

SEQ ID NO: 144101 - DNA, 30 bp, Homo sapiens
  chr2:236992489-236992519
  hypo
tcaattaaatgaatccgagataaatgggca

SEQ ID NO: 144102 - DNA, 189 bp, Homo sapiens; identical to SEQ ID NO: 65022
  chr2:236994422-236994611
  hypo

SEQ ID NO: 144103 - DNA, 155 bp, Homo sapiens; identical to SEQ ID NO: 17095
  chr2:236996174-236996329
  hypo

SEQ ID NO: 144104 - DNA, 144 bp, Homo sapiens
  chr2:236997671-236997815
  hypo
aggtagaaggtacatcaccaccgtccatcacgtgaaggagtagaaaaagtgggatgccacagttgcggcagagaatatccaaaaggaaagggtccaagtcagaccgctcacgtgggtggcagcgtccaagtccagtttgtacat

SEQ ID NO: 144105 - DNA, 94 bp, Homo sapiens; identical to SEQ ID NO: 65024
  chr2:236999642-236999736
  hypo

SEQ ID NO: 144106 - DNA, 40 bp, Homo sapiens; identical to SEQ ID NO: 65025
  chr2:237007807-237007847
  hypo

SEQ ID NO: 144107 - DNA, 31 bp, Homo sapiens; identical to SEQ ID NO: 65026
  chr2:237010462-237010493
  hypo

SEQ ID NO: 144108 - DNA, 29 bp, Homo sapiens
  chr2:237013228-237013257
  hypo
gggttacaaagacaagcgtgcacaggcca

SEQ ID NO: 144109 - DNA, 21 bp, Homo sapiens
  chr2:237014529-237014550
  hypo
cgtgcccggcccctcttgtgc

SEQ ID NO: 144110 - DNA, 134 bp, Homo sapiens; identical to SEQ ID NO: 65029
  chr2:237015288-237015422
  hypo

SEQ ID NO: 144111 - DNA, 158 bp, Homo sapiens; identical to SEQ ID NO: 65030
  chr2:237018157-237018315
  hypo

SEQ ID NO: 144112 - DNA, 162 bp, Homo sapiens; identical to SEQ ID NO: 65031
  chr2:237020447-237020609
  hypo

SEQ ID NO: 144113 - DNA, 276 bp, Homo sapiens; identical to SEQ ID NO: 65032
  chr2:237022762-237023038
  hypo

SEQ ID NO: 144114 - DNA, 165 bp, Homo sapiens; identical to SEQ ID NO: 17103
  chr2:237032440-237032605
  hypo

SEQ ID NO: 144115 - DNA, 404 bp, Homo sapiens; identical to SEQ ID NO: 65034
  chr2:237032664-237033068
  hypo

SEQ ID NO: 144116 - DNA, 30 bp, Homo sapiens
  chr2:237033372-237033402
  hypo
aacgtgattagtcatcgccgagaagaaagc

SEQ ID NO: 144117 - DNA, 55 bp, Homo sapiens; identical to SEQ ID NO: 65035
  chr2:237034240-237034295
  hypo

SEQ ID NO: 144118 - DNA, 162 bp, Homo sapiens; identical to SEQ ID NO: 65036
  chr2:237037748-237037910
  hypo

SEQ ID NO: 144119 - DNA, 823 bp, Homo sapiens; identical to SEQ ID NO: 2319
  chr2:237075812-237076635
  hypo

SEQ ID NO: 144120 - DNA, 349 bp, Homo sapiens; identical to SEQ ID NO: 38777
  chr2:237076656-237077005
  hypo

SEQ ID NO: 144121 - DNA, 206 bp, Homo sapiens; identical to SEQ ID NO: 38778
  chr2:237077033-237077239
  hypo

SEQ ID NO: 144122 - DNA, 1230 bp, Homo sapiens; identical to SEQ ID NO: 107678
  chr2:237077284-237078514
  hypo

SEQ ID NO: 144123 - DNA, 31 bp, Homo sapiens; identical to SEQ ID NO: 65041
  chr2:237225643-237225674
  hypo

SEQ ID NO: 144124 - DNA, 30 bp, Homo sapiens
  chr2:237415651-237415681
  hypo
catggggtggtgggacgcgtaggggagggg

SEQ ID NO: 144125 - DNA, 422 bp, Homo sapiens; identical to SEQ ID NO: 107694
  chr2:237476437-237476859
  hypo

SEQ ID NO: 144126 - DNA, 31 bp, Homo sapiens; identical to SEQ ID NO: 65042
  chr2:237482705-237482736
  hypo

SEQ ID NO: 144127 - DNA, 374 bp, Homo sapiens; identical to SEQ ID NO: 65043
  chr2:237489567-237489941
  hypo

SEQ ID NO: 144128 - DNA, 30 bp, Homo sapiens
  chr2:237496300-237496330
  hypo
ccaatgcttaacccacgtgctgtccagtta

SEQ ID NO: 144129 - DNA, 464 bp, Homo sapiens
  chr2:237496906-237497370
  hypo
gaatgtatgttggcacggcaacatgtcatggggcgagcggcaaacatgtcctgtcggtggcggtggcgtgtctgaaagggccttgggctccaccgtgccatgctggatttgcttccttttagcctttcacatgaaagtgtttgaagctaatcttttcattcctttacgcggggctcgtcaataggacgaacgcattaaaggtttccccaccgttgcgtttctcagggccgttgttaaaagtgtgaattgtgtttcgtgccacactgtaatgagaattttaatttcatgcgcagcccaaagtgtaaatgaaaaatcgtccgttgcccagctatgcagacggtgaatgtctttccctgcgacatattccacactcgttcttgttaatttattcatccatccacacgtttgttcgttcactcactgatggacaagctttagtgcgcgaccactgtgtgccctgctct

SEQ ID NO: 144130 - DNA, 200 bp, Homo sapiens; identical to SEQ ID NO: 17109
  chr2:237542534-237542734
  hypo

SEQ ID NO: 144131 - DNA, 30 bp, Homo sapiens
  chr2:237543034-237543064
  hypo
ccagaggcagcggagcgaagccccaagcgt

SEQ ID NO: 144132 - DNA, 21 bp, Homo sapiens
  chr2:237543918-237543939
  hypo
ttatcttttgagacagagtct

SEQ ID NO: 144133 - DNA, 201 bp, Homo sapiens; identical to SEQ ID NO: 65047
  chr2:237544238-237544439
  hypo

SEQ ID NO: 144134 - DNA, 210 bp, Homo sapiens
  chr2:237629783-237629993
  hypo
ctggcagcgcttccacggtgacttgagatgatgtatggccacgcacgggcttgttatggcacatcccttgataagtctgtgtaattaattggatgccatctgatgcggcagcaggttagacatttaagaaataaaaagttgtccatgccccacggagcacatctgtttaatggcataattcaaattaatttccaacgattccataagagc

SEQ ID NO: 144135 - DNA, 31 bp, Homo sapiens; identical to SEQ ID NO: 17110
  chr2:237686475-237686506
  hypo

SEQ ID NO: 144136 - DNA, 30 bp, Homo sapiens; identical to SEQ ID NO: 2326
  chr2:237714754-237714784
  hypo

SEQ ID NO: 144137 - DNA, 26 bp, Homo sapiens
  chr2:237806448-237806474
  hypo
aattattaagaagtttcgggccgggc

SEQ ID NO: 144138 - DNA, 55 bp, Homo sapiens
  chr2:237925351-237925406
  hypo
gcaccgcaggacagacgggcattccctctgcgctgaccggcgggagttagagtcc

SEQ ID NO: 144139 - DNA, 30 bp, Homo sapiens
  chr2:237965335-237965365
  hypo
catatcctgcctcccggcactctcaacccc

SEQ ID NO: 144140 - DNA, 57 bp, Homo sapiens; identical to SEQ ID NO: 65051
  chr2:237973043-237973100
  hypo

SEQ ID NO: 144141 - DNA, 166 bp, Homo sapiens
  chr2:237999667-237999833
  hypo
gtgattgtggtggggcggtcacaggccatgtgccttttcccagtgttttacagcgggttgattggcaggactgggcttgggaactccttactcgttcagcaagcattctcttgtgcaccgtcgggtccgtagttttattccttcccggagccgcctctcactgaat

SEQ ID NO: 144142 - DNA, 30 bp, Homo sapiens
  chr2:238248668-238248698
  hypo
ctggtggctaagccccgatcaaagcaactc

SEQ ID NO: 144143 - DNA, 160 bp, Homo sapiens
  chr2:238249169-238249329
  hypo
atttgaagaagacgtcgtttggctcactggcgaaggtgtatacctccttgatgttcaccttcctgccaatgcccaggaccacgaagaagtagcccttgcatttggcctgcaggatgactctctgggcctcctccagctgctgctccggcacctcgcccgt

SEQ ID NO: 144144 - DNA, 30 bp, Homo sapiens
  chr2:238249559-238249589
  hypo
caactgccactctggcgaagtgctgggagg

SEQ ID NO: 144145 - DNA, 187 bp, Homo sapiens
  chr2:238264426-238264613
  hypo
gccacctgcttcagcggaagatcttggccaccttccatggaaaatttgagacaaggggacactgttctcctctacaaaccaacaatctggcctggcccctcccaaaagagacatgctagagttccatgagagtccagcagcactcagtgatacattgctcaggccagaggccgcctgcggagactct

SEQ ID NO: 144146 - DNA, 31 bp, Homo sapiens; identical to SEQ ID NO: 65053
  chr2:238268758-238268789
  hypo

SEQ ID NO: 144147 - DNA, 30 bp, Homo sapiens; identical to SEQ ID NO: 17113
  chr2:238274430-238274460
  hypo

SEQ ID NO: 144148 - DNA, 657 bp, Homo sapiens; identical to SEQ ID NO: 17114
  chr2:238280411-238281068
  hypo

SEQ ID NO: 144149 - DNA, 536 bp, Homo sapiens; identical to SEQ ID NO: 17115
  chr2:238283028-238283564
  hypo

SEQ ID NO: 144150 - DNA, 37 bp, Homo sapiens
  chr2:238320936-238320973
  hypo
cggaaccgatgcccccgccccacggtccacctccctt

SEQ ID NO: 144151 - DNA, 355 bp, Homo sapiens
  chr2:238359241-238359596
  hypo
tgagagacgaggagccgagtaccttttcaacacccacacactcctcaccctttcctcagttcagctcgtccaccccaactacgcacaacagcagcacagcagtaaggccaatggtgcaaggcgccgggctgcccggcctggcacacaagctgcatgggaggtggtgatgcccagccaggtgggcacggacctccccaccctgggtctcaggccaaggccacagggcagcaaaaggaggtgctgtaaggggccagcctgcgctgcatgcccaccttcgacgaatcccagtgaccagggaggagaggcacatgtggctggtggccaccaccgtgaacagggccggcaaatgtttcct

SEQ ID NO: 144152 - DNA, 152 bp, Homo sapiens; identical to SEQ ID NO: 38796
  chr2:238384222-238384374
  hypo

SEQ ID NO: 144153 - DNA, 42 bp, Homo sapiens; identical to SEQ ID NO: 65059
  chr2:238392736-238392778
  hypo

SEQ ID NO: 144154 - DNA, 30 bp, Homo sapiens; identical to SEQ ID NO: 17118
  chr2:238473832-238473862
  hypo

SEQ ID NO: 144155 - DNA, 145 bp, Homo sapiens
  chr2:238486155-238486300
  hypo
cctgcagggctgctccgttcctctgaggagggcacgttcctgtcctgggtgacctgtgcggccaggcagaaaactgctaggacacacatcagatccttcaccctgaccaggcccaggagactgccagccacggggtatttcaggt

SEQ ID NO: 144156 - DNA, 206 bp, Homo sapiens
  chr2:238486658-238486864
  hypo
gtcgtacaccagaagcgcagcgttggcacccctgaagtagaggtggcagacgctgtggtacttctcctggccagctgtgtcccagatctcaagcttcagagaggtggcacccacatccaccacctttgtgaagaacgcacctgaaacagggaggcccagagggcttactcagaggacgaggttgccacatgcggctcaggtgggac

SEQ ID NO: 144157 - DNA, 30 bp, Homo sapiens
  chr2:238487177-238487207
  hypo
gcacccccggcctaccggcccctcgcctgc

SEQ ID NO: 144158 - DNA, 83 bp, Homo sapiens; identical to SEQ ID NO: 17119
  chr2:238492722-238492805
  hypo

SEQ ID NO: 144159 - DNA, 880 bp, Homo sapiens; identical to SEQ ID NO: 107703
  chr2:238536004-238536884
  hypo

SEQ ID NO: 144160 - DNA, 172 bp, Homo sapiens; identical to SEQ ID NO: 65063
  chr2:238540446-238540618
  hypo

SEQ ID NO: 144161 - DNA, 31 bp, Homo sapiens; identical to SEQ ID NO: 17121
  chr2:238550619-238550650
  hypo

SEQ ID NO: 144162 - DNA, 31 bp, Homo sapiens; identical to SEQ ID NO: 65065
  chr2:238552317-238552348
  hypo

SEQ ID NO: 144163 - DNA, 31 bp, Homo sapiens; identical to SEQ ID NO: 65066
  chr2:238553952-238553983
  hypo

SEQ ID NO: 144164 - DNA, 30 bp, Homo sapiens
  chr2:238581621-238581651
  hypo
acgatgaccgtgctccgtcgttttaggcga

SEQ ID NO: 144165 - DNA, 31 bp, Homo sapiens; identical to SEQ ID NO: 65067
  chr2:238590665-238590696
  hypo

SEQ ID NO: 144166 - DNA, 177 bp, Homo sapiens; identical to SEQ ID NO: 107705
  chr2:238599863-238600040
  hypo

SEQ ID NO: 144167 - DNA, 245 bp, Homo sapiens; identical to SEQ ID NO: 107706
  chr2:238617173-238617418
  hypo

SEQ ID NO: 144168 - DNA, 30 bp, Homo sapiens
  chr2:238620279-238620309
  hypo
cctggggttggtcacggaccaggagccaga

SEQ ID NO: 144169 - DNA, 193 bp, Homo sapiens
  chr2:238625969-238626162
  hypo
gtttccctgaggtcccaacaccggaatggctctgagcttctgcttctcttcgatggtgttttattccttcatcgcgtttgctttgaaggcatgagcagcctgttggagggggcgtgaaggctgctgggccggctttactgtcctgctctcccccgaggcccttcacctggggaagcttcgtcctgggctctct

SEQ ID NO: 144170 - DNA, 63 bp, Homo sapiens; identical to SEQ ID NO: 65070
  chr2:238629645-238629708
  hypo

SEQ ID NO: 144171 - DNA, 30 bp, Homo sapiens; identical to SEQ ID NO: 65071
  chr2:238657861-238657891
  hypo

SEQ ID NO: 144172 - DNA, 132 bp, Homo sapiens
  chr2:238669910-238670042
  hypo
ctaatcccagcgctgcgggtggccaaggctggaggatcacttaagaccaggaattccaggccagcctggcaacctagcaagattccgtctctagataggtatgtagtatctatataccgttgttgagaaaag

SEQ ID NO: 144173 - DNA, 333 bp, Homo sapiens
  chr2:238706994-238707327
  hypo
gacaagccaaaccccgggagggaccacgcggcctgggaaacagttcggcaaggaggccgggcccctgtcccgcctctgagggcggaggactcggcctgcaccggacccaagcgaggggcagtctggcctctgctggcagaagcagcgcttccaagtattttcatatggtgactttgcagagctgcgcggtccagacgagggtttcaggctgcaaagcgggaaagtcttgggggccgctctgcgctccaagacagacgcccacaatctcttctacgtcgtgcaacattcaagcaggcggcctccttcccgcgctttcgcgcccacaggctgggc

SEQ ID NO: 144174 - DNA, 30 bp, Homo sapiens; identical to SEQ ID NO: 65073
  chr2:238708540-238708570
  hypo

SEQ ID NO: 144175 - DNA, 41 bp, Homo sapiens; identical to SEQ ID NO: 65074
  chr2:238785778-238785819
  hypo

SEQ ID NO: 144176 - DNA, 177 bp, Homo sapiens; identical to SEQ ID NO: 17124
  chr2:238786044-238786221
  hypo

SEQ ID NO: 144177 - DNA, 31 bp, Homo sapiens; identical to SEQ ID NO: 65076
  chr2:238786475-238786506
  hypo

SEQ ID NO: 144178 - DNA, 31 bp, Homo sapiens; identical to SEQ ID NO: 2330
  chr2:238791402-238791433
  hypo

SEQ ID NO: 144179 - DNA, 34 bp, Homo sapiens; identical to SEQ ID NO: 17126
  chr2:238793663-238793697
  hypo

SEQ ID NO: 144180 - DNA, 345 bp, Homo sapiens
  chr2:238793971-238794316
  hypo
ccgcctgcccctgcccggaggcctggccctggagcccacccacctccctgaggcctgtcgtgagcatcaggagctcccagtacagcatctggggctgcctcggtgccctcgtgggtttgttcatggcggtgtccgccctggaacttgccacatgcccacgagcactgggacccctctgtgctctccctggtggctgtggtgctgtcatccctgtgtgtgctggtggaatagcgtgggctccacggaaaggccctcaggcgtggacaggacagatggcagtgcccagcacagccaggtctcagaggatccaaaggcgagcattgcccaggccgaggccgccctccc

SEQ ID NO: 144181 - DNA, 186 bp, Homo sapiens
  chr2:238794725-238794911
  hypo
cactcctgtggcctgcgcaggcatcagccggggtgccgggtccccatggggacgagctgtagacacagctgtccagggctgggcagagtggggcagtggctggggatatgccggccctgcccaggccgccccacgggggtgtcgttccaccttcctgtagtctccttggcgcgcgtgaccgtggtt

SEQ ID NO: 144182 - DNA, 31 bp, Homo sapiens; identical to SEQ ID NO: 65079
  chr2:238819638-238819669
  hypo

SEQ ID NO: 144183 - DNA, 33 bp, Homo sapiens; identical to SEQ ID NO: 65080
  chr2:238820427-238820460
  hypo

SEQ ID NO: 144184 - DNA, 355 bp, Homo sapiens
  chr2:238821615-238821970
  hypo
gctgtggtgtgggcccgttttcccaagaggagcaggcgtggctgcaccttacactgggtcaggagaggagcccagggtctactgacagtgggcggtggcctcagggactgatcctagtctctgtcttgttgggaaccgccgggactccactgtccgtgacccagtctcagccttgggccctcagtgagggtctggtcagtctgctacgccaggccccagcttcctccgcttctaggatgtcaccacctgtgagtggagaagccgagggtgctctggggccagtggctttgggccataaggaaataataagaatgacaacagcagtagcgtttgcgtgagccgggcactgcgctgt

SEQ ID NO: 144185 - DNA, 158 bp, Homo sapiens
  chr2:238822318-238822476
  hypo
gacctgcgataccgacggcatctctcagacaacctgcagccgggccaacctgggttggggggctgtgctgggacctaagtcagggaccaccggaggaggtagcccttgagccgccctggagcccgggccatggctgggtcggccggctaggcaggcgt

SEQ ID NO: 144186 - DNA, 30 bp, Homo sapiens
  chr2:238831232-238831262
  hypo
tggaagccagctctccgactccagggcccc

SEQ ID NO: 144187 - DNA, 72 bp, Homo sapiens; identical to SEQ ID NO: 107708
  chr2:238864558-238864630
  hypo

SEQ ID NO: 144188 - DNA, 527 bp, Homo sapiens; identical to SEQ ID NO: 107709
  chr2:238864726-238865253
  hypo

SEQ ID NO: 144189 - DNA, 18 bp, Homo sapiens
  chr2:238874441-238874459
  hypo
gcccggctgagttgtgtt

SEQ ID NO: 144190 - DNA, 211 bp, Homo sapiens; identical to SEQ ID NO: 107711
  chr2:238876149-238876360
  hypo

SEQ ID NO: 144191 - DNA, 30 bp, Homo sapiens; identical to SEQ ID NO: 65085
  chr2:238885933-238885963
  hypo

SEQ ID NO: 144192 - DNA, 60 bp, Homo sapiens
  chr2:238934773-238934833
  hypo
ctgagtccagctcgccgcccccgcccccacccctgcccggctgcccggggcagctgtggg

SEQ ID NO: 144193 - DNA, 32 bp, Homo sapiens; identical to SEQ ID NO: 38805
  chr2:238967038-238967070
  hypo

SEQ ID NO: 144194 - DNA, 30 bp, Homo sapiens
  chr2:238973810-238973840
  hypo
tttacaggtttaatacgttctcctatccat

SEQ ID NO: 144195 - DNA, 40 bp, Homo sapiens; identical to SEQ ID NO: 17133
  chr2:239005247-239005287
  hypo

SEQ ID NO: 144196 - DNA, 46 bp, Homo sapiens
  chr2:239006884-239006930
  hypo
ggccaggaacgcgctccggctcagcgtgggccgcagcaccaccagg

SEQ ID NO: 144197 - DNA, 279 bp, Homo sapiens; identical to SEQ ID NO: 65089
  chr2:239010178-239010457
  hypo

SEQ ID NO: 144198 - DNA, 30 bp, Homo sapiens; identical to SEQ ID NO: 65090
  chr2:239010664-239010694
  hypo

SEQ ID NO: 144199 - DNA, 72 bp, Homo sapiens; identical to SEQ ID NO: 65091
  chr2:239011436-239011508
  hypo

SEQ ID NO: 144200 - DNA, 31 bp, Homo sapiens; identical to SEQ ID NO: 65092
  chr2:239012748-239012779
  hypo

SEQ ID NO: 144201 - DNA, 31 bp, Homo sapiens; identical to SEQ ID NO: 65093
  chr2:239030394-239030425
  hypo

SEQ ID NO: 144202 - DNA, 30 bp, Homo sapiens
  chr2:239030640-239030670
  hypo
gacctggctcaccacgatgctctccatgta

SEQ ID NO: 144203 - DNA, 31 bp, Homo sapiens; identical to SEQ ID NO: 65094
  chr2:239033394-239033425
  hypo

SEQ ID NO: 144204 - DNA, 74 bp, Homo sapiens; identical to SEQ ID NO: 65095
  chr2:239039047-239039121
  hypo

SEQ ID NO: 144205 - DNA, 30 bp, Homo sapiens; identical to SEQ ID NO: 65096
  chr2:239039944-239039974
  hypo

SEQ ID NO: 144206 - DNA, 170 bp, Homo sapiens; identical to SEQ ID NO: 65097
  chr2:239041689-239041859
  hypo

SEQ ID NO: 144207 - DNA, 790 bp, Homo sapiens
  chr2:239049319-239050109
  hypo
tcctaggagctcgggcggctccaggcacttcttcccttgagtgggtggactactgaggtcccctgggcacggcgtcatggtgcggaacgtggatgacctggatttccacctgccctcgcatgcccaggacatgctggatggcctgcagcgcctgcgctctcagcccaagctggccgacgtcacactgctggtgggcggccgggagctgccatgccaccgcggcctcctggcgctcagcagcccctacttccatgccatgtttgcgggtgacttcgccgagagcttctctgcgcgcgtggagctgcgggacgtggagcccgccgtggtgggacaactggtggacttcgtgtacacaggccggctgaccatcacgcagggcaacgtggaggcgctgacacgcacggctgcgcgcctgcacttcccctcggtgcagaaggtctgcggccgctacctgcagcagcaactggatgccgccaactgcctgggcatctgtgagttcggggagcagcaagggctgctgggcgtggctgccaaggcctgggccttcctgcgagagaactttgaggctgtggcacgtgaggacgagttcctgcagcttccccgagagcggctggtcacttgtctggccggcgacctgctgcaggtacagccggagcaaagccgactcgaggccctgatgcgctgggtgcgccatgacccgcaggcccgggccgcccacctgcccgagctgctcagcctagtgcacctggacgccgtgcccaggccctgcgtgcagcaactgctggcctca

SEQ ID NO: 144208 - DNA, 96 bp, Homo sapiens
  chr2:239051082-239051178
  hypo
acctaggcagtgactgcttaccggccgttcctaagacagccagcatttcccactgagccgggacaccctcgtgccgcctgctggaggccacccagg

SEQ ID NO: 144209 - DNA, 266 bp, Homo sapiens
  chr2:239056520-239056786
  hypo
ggacagctggacgcccgtcagcccggccctcaaatacgtcagcaacttctcggctgccggctgccggggccggctctacctggtgggctccagcgcctgcaagtacaacgccctggccctgcagtgctacaaccctgtcacaggtgggtggggctcagggaccgaggatagaggaccacaggcccctctgacaggcgacagtccgctcgtagtgatggtgaggattggggctcctgaggatagacggggcccggggtggagagagc

SEQ ID NO: 144210 - DNA, 30 bp, Homo sapiens
  chr2:239057091-239057121
  hypo
gagtttgaggcccagcgcagcctccctgag

SEQ ID NO: 144211 - DNA, 31 bp, Homo sapiens; identical to SEQ ID NO: 65100
  chr2:239057679-239057710
  hypo

SEQ ID NO: 144212 - DNA, 513 bp, Homo sapiens; identical to SEQ ID NO: 17138
  chr2:239059357-239059870
  hypo

SEQ ID NO: 144213 - DNA, 175 bp, Homo sapiens; identical to SEQ ID NO: 17139
  chr2:239065003-239065178
  hypo

SEQ ID NO: 144214 - DNA, 30 bp, Homo sapiens; identical to SEQ ID NO: 65103
  chr2:239070193-239070223
  hypo

SEQ ID NO: 144215 - DNA, 283 bp, Homo sapiens; identical to SEQ ID NO: 65104
  chr2:239074293-239074576
  hypo

SEQ ID NO: 144216 - DNA, 146 bp, Homo sapiens
  chr2:239079152-239079298
  hypo
gtgctcctggccgcgcgccacccctcagtgccctatccgcaccaccatcacagtgacgttgtcggccgagccccgctgcaccgccttgttggccagcctgttgcaggctgcttcgtagcgggcgtcggctgcggacttcccttccc

SEQ ID NO: 144217 - DNA, 62 bp, Homo sapiens; identical to SEQ ID NO: 17141
  chr2:239082211-239082273
  hypo

SEQ ID NO: 144218 - DNA, 140 bp, Homo sapiens
  chr2:239083072-239083212
  hypo
aaggcagagaaccatactcaacgtgtgagagagcactccgcaaatgccacggctgcgcatgggcgtttaagatcaccacggggctcccaaatcatggaccaagcaagttcaggagatgcggtgcagatggctgcacatgg

SEQ ID NO: 144219 - DNA, 140 bp, Homo sapiens
  chr2:239091202-239091342
  hypo
caaagaggagggcaagcgttgtgcatgctggccgagtgccaggtaggccgtccacaccagtgcctccaggtgttctcgcccctgccaggttcattgtgtctgttttacaggaagacactgaggcacgaagaataagtaac

SEQ ID NO: 144220 - DNA, 30 bp, Homo sapiens; identical to SEQ ID NO: 17143
  chr2:239091668-239091698
  hypo

SEQ ID NO: 144221 - DNA, 53 bp, Homo sapiens
  chr2:239096415-239096468
  hypo
tgaagcgtcatctcccgctcagcagggctgctcaaccgcgacactactgacat

SEQ ID NO: 144222 - DNA, 317 bp, Homo sapiens
  chr2:239133160-239133477
  hypo
gcaaatggactgtaacgatgtgcgcactggagtgttagggaagccgcctgaggtctataatttacttggaaatgcataaaaaataaaacggatcaaagcagggaggattaactagatgtgacaaagtccagtaacatgtgaatggcacactcaggtggtgggtgtatatccagacgcgcaatgtaaaattcccgcatcgctgctgagagccggcaaatgtccgtcgccaggtgttgggggcgaagggaggtctaggcctctgctcctctgcttcagatgccggcaggccccggaggagcgcccgcgacccctcggag

SEQ ID NO: 144223 - DNA, 31 bp, Homo sapiens; identical to SEQ ID NO: 17144
  chr2:239144284-239144315
  hypo

SEQ ID NO: 144224 - DNA, 30 bp, Homo sapiens
  chr2:239147179-239147209
  hypo
gtgaacctgggagagcgctggcagctctac

SEQ ID NO: 144225 - DNA, 177 bp, Homo sapiens
  chr2:239147430-239147607
  hypo
gccgggcccacccccgcaggactctggctggcattggtcaccaaggcctccagacactccgggcaatttgggctgtggtcaggctgcccagggctgcgggcaccaagtcgggcccctcagcaggagcctgactcagttcagcctcaggggcctcctccaggtcggagcacaggtcgt

SEQ ID NO: 144226 - DNA, 1057 bp, Homo sapiens; identical to SEQ ID NO: 38810
  chr2:239148239-239149296
  hypo

SEQ ID NO: 144227 - DNA, 30 bp, Homo sapiens
  chr2:239152191-239152221
  hypo
cctgcccatatcattcgcaatggagacatg

SEQ ID NO: 144228 - DNA, 30 bp, Homo sapiens
  chr2:239152515-239152545
  hypo
ccagcaagaagcaaacgctataagggagct

SEQ ID NO: 144229 - DNA, 30 bp, Homo sapiens
  chr2:239161142-239161172
  hypo
tccccctccttctccgccttcaccggggcc

SEQ ID NO: 144230 - DNA, 30 bp, Homo sapiens; identical to SEQ ID NO: 65112
  chr2:239161473-239161503
  hypo

SEQ ID NO: 144231 - DNA, 31 bp, Homo sapiens; identical to SEQ ID NO: 17147
  chr2:239167113-239167144
  hypo

SEQ ID NO: 144232 - DNA, 96 bp, Homo sapiens
  chr2:239167994-239168090
  hypo
tgtgagaaatacatgcgggacagaggagcagcatgaatctgaacccgcgcatgacactgtgaagctgcctgggaagtgtggcgctgtggtaggaaa

SEQ ID NO: 144233 - DNA, 191 bp, Homo sapiens
  chr2:239186415-239186606
  hypo
ctgcgagtcccgccccgtggagcagttttcgttggtctcatgtccactggagccactgctcatgtccacatcttcctgcagtgggacctggctgggctggggctccacgggctccttggtggggttactggggctgggcggaaattccgcgtatccattcatgctgggctctggaacgaagctggcaaaca

SEQ ID NO: 144234 - DNA, 116 bp, Homo sapiens
  chr2:239188885-239189001
  hypo
caggtcgagcccattcgccggtgagccactccaggacagcctggtgagaggcggggctcatggagaatccacccacatcagtgtctggagaacagcagggccgactagacctcgcc

SEQ ID NO: 144235 - DNA, 132 bp, Homo sapiens
  chr2:239189366-239189498
  hypo
tctttctgaaagagacgagaacaataaaacagaaaccataatgagcgagacacataaagagaaccatcctgaaccagagacagatctgaatctgccaatcaaaggacaagagtccaacgcctaagtgcatcc

SEQ ID NO: 144236 - DNA, 79 bp, Homo sapiens; identical to SEQ ID NO: 65115
  chr2:239192199-239192278
  hypo

SEQ ID NO: 144237 - DNA, 56 bp, Homo sapiens; identical to SEQ ID NO: 17149
  chr2:239211885-239211941
  hypo

SEQ ID NO: 144238 - DNA, 207 bp, Homo sapiens; identical to SEQ ID NO: 65117
  chr2:239212967-239213174
  hypo

SEQ ID NO: 144239 - DNA, 165 bp, Homo sapiens; identical to SEQ ID NO: 65118
  chr2:239224074-239224239
  hypo

SEQ ID NO: 144240 - DNA, 17 bp, Homo sapiens
  chr2:239265428-239265445
  hypo
tttttttttgaggtaga

SEQ ID NO: 144241 - DNA, 137 bp, Homo sapiens
  chr2:239265744-239265881
  hypo
aatacatgttctattgtacctggttccccgcagtctccctcacacatgtgtgatgtgcttttgttgggacctgtggcctcttgccagccactaccctttccttgggcacatgaccactagggcgggcacctgtgggc

SEQ ID NO: 144242 - DNA, 30 bp, Homo sapiens
  chr2:239300094-239300124
  hypo
aatcacggcttgatgcgttcacgctgcccc

SEQ ID NO: 144243 - DNA, 242 bp, Homo sapiens
  chr2:239306051-239306293
  hypo
tttggactgaggaggcgtgttcctcttcctatgtctccctgactgtaggagcgatctctctttgagtcggcatggaagaaggagaaggacatcgtttccaaggagatagagaagctccgcacgtccatccagaccctgtgcaagagcgcacttcccctggggaagatcatggactacatccaggaagacgtggatgccatgcagaatgagctgcagatgtggcacagcgagaacaggcagca

SEQ ID NO: 144244 - DNA, 213 bp, Homo sapiens
  chr2:239316287-239316500
  hypo
acctgggcttcccagcggcgcaggcactgccacgcccttggccttggctgttggcttaggcaggtggcctgactccggcctccctctcccacctgcttggttggattcaagagtgctggcctcaccttgtcatcagagcatacgtgcagcattaggtggaaagtgcgaagggcagccctcagcacacagcacacggtgcgctccaggcggacc

SEQ ID NO: 144245 - DNA, 30 bp, Homo sapiens
  chr2:239320852-239320882
  hypo
atacacagaagcacccgtttataccattgg

SEQ ID NO: 144246 - DNA, 154 bp, Homo sapiens
  chr2:239321158-239321312
  hypo
tggcctgcccaataccggtgctttgaacggtgtggaggctgccctgatggcccagcacgtggtcactttcataaaagcgctatatatttttttcacaacttaattactttattgggcttaacaaatagcatttcctgctcgctgtactaaaatt

SEQ ID NO: 144247 - DNA, 30 bp, Homo sapiens
  chr2:239326127-239326157
  hypo
ttagtatgtttttttcgaccactgtgtttt

SEQ ID NO: 144248 - DNA, 30 bp, Homo sapiens
  chr2:239326357-239326387
  hypo
tgcgcccttctcctgcgtgtgtctccccag

SEQ ID NO: 144249 - DNA, 30 bp, Homo sapiens; identical to SEQ ID NO: 17152
  chr2:239333817-239333847
  hypo

SEQ ID NO: 144250 - DNA, 39 bp, Homo sapiens; identical to SEQ ID NO: 65123
  chr2:239344602-239344641
  hypo

SEQ ID NO: 144251 - DNA, 30 bp, Homo sapiens; identical to SEQ ID NO: 65124
  chr2:239349745-239349775
  hypo

SEQ ID NO: 144252 - DNA, 57 bp, Homo sapiens; identical to SEQ ID NO: 65125
  chr2:239467686-239467743
  hypo

SEQ ID NO: 144253 - DNA, 31 bp, Homo sapiens; identical to SEQ ID NO: 65126
  chr2:239475086-239475117
  hypo

SEQ ID NO: 144254 - DNA, 168 bp, Homo sapiens; identical to SEQ ID NO: 65127
  chr2:239482479-239482647
  hypo

SEQ ID NO: 144255 - DNA, 241 bp, Homo sapiens; identical to SEQ ID NO: 65128
  chr2:239494956-239495197
  hypo

SEQ ID NO: 144256 - DNA, 30 bp, Homo sapiens
  chr2:239622955-239622985
  hypo
ttgctggaagacctgcgccccgaagacccc

SEQ ID NO: 144257 - DNA, 160 bp, Homo sapiens
  chr2:239684264-239684424
  hypo
aggggatggagtgagcgggagctgggttttacgaactcccgttggaggaaaagaatgcggctatactcacagtgtggtgggacaccggtggagggtcttgaacacaggagtggtgcaatcctggttgagttttgggggtcacccccgttgcaatgggtgt

SEQ ID NO: 144258 - DNA, 30 bp, Homo sapiens
  chr2:239684740-239684770
  hypo
acaagctgggcaacccggagttacctgggg

SEQ ID NO: 144259 - DNA, 31 bp, Homo sapiens; identical to SEQ ID NO: 65129
  chr2:239709447-239709478
  hypo

SEQ ID NO: 144260 - DNA, 31 bp, Homo sapiens; identical to SEQ ID NO: 65130
  chr2:239780653-239780684
  hypo

SEQ ID NO: 144261 - DNA, 468 bp, Homo sapiens
  chr2:239800519-239800987
  hypo
aatgagcagccactgcgtgtgggaagattgggctatgtaggacaagctgtatttgtgcacctgcgcaaggcgggaccactgaaatttagccctggagttcgttcacggagccgctgaccacttatcccttcctcttcagcatgtgcttgccgctgagccatgcgggtgctgtgttctctgttatgtgccggtgtgtggactggaacccgcctgcagcagccactcccacctgccctcgggaccctgactgtacatgggctgagccaggcaaccaccggaagggtgagtccttccccaggactcagcgggtgagagactccggctcacctcacggcggaacgcagacacctgagagcccgcaagcctcaggacagagagaaacagaggtccaggtggaaatgcggaggcggcacgaggagggggccctggcctgggagcacgtgcgctgcaccacgtgttacccgtgag

SEQ ID NO: 144262 - DNA, 31 bp, Homo sapiens; identical to SEQ ID NO: 65132
  chr2:239834260-239834291
  hypo

SEQ ID NO: 144263 - DNA, 30 bp, Homo sapiens; identical to SEQ ID NO: 65133
  chr2:239888048-239888078
  hypo

SEQ ID NO: 144264 - DNA, 501 bp, Homo sapiens
  chr2:239888393-239888894
  hypo
ctggtgagtggtcagccaggacgtggctccccgtccctccggtgaccaggtgggcactggctcctgatggttcgaagccccggtcagcccccgccatccctaaactagtgacttccacttgcgttctcccccagggtcttcggggcaccccacgggagagagcacctgcaaggaccataacacgtgaggctgtgctgagtcctacgacaggcaggaacttgtacttggcccccggcgacccgggcgatttgcgggtcttcctcttggtttaacgaaggctctagcccggttccggagcccaccaagacgctgaagccatcagttcttggcttgcatttctagagccacccgtgtagttgcgagacagtgagaaagttcgcccgagttgcaatcctgcccgtgcctctgtctaggagcgactgtggcttcgggttaagcctctgtctttacctgtagtgggagatgtctgctcgtcacccacaggcgcggcccatgtgtgtc

SEQ ID NO: 144265 - DNA, 79 bp, Homo sapiens; identical to SEQ ID NO: 65135
  chr2:239925670-239925749
  hypo

SEQ ID NO: 144266 - DNA, 44 bp, Homo sapiens
  chr2:239947344-239947388
  hypo
tggggactgcatccacgcttctgctgttccgctgggaccagggc

SEQ ID NO: 144267 - DNA, 30 bp, Homo sapiens
  chr2:239949295-239949325
  hypo
catggcgccggggaacgtctggggtgataa

SEQ ID NO: 144268 - DNA, 322 bp, Homo sapiens
  chr2:239949577-239949899
  hypo
gcagctcccgaggaccggcacgcctatggaggggacgccataactccaggccaccaagcccttcccctcactgccccagaagagttttaatctttaggacaacgcaatcagaaccagatgttcccccaaacaggggccgggccaaggcgcgccctacacacagcgccgctgagccaacagagttgcgtcttttgtctggcgtggtggcccacgctgcgcgcacagccagggacccagctgccgacaccttgtttccccccaggcatgttgaccacaaggcacagagccacgctcgggtgggcccaggcgcagcatggggctc

SEQ ID NO: 144269 - DNA, 30 bp, Homo sapiens
  chr2:239956819-239956849
  hypo
cagcacgaggcaggacgtcccgggtcctca

SEQ ID NO: 144270 - DNA, 148 bp, Homo sapiens
  chr2:239957266-239957414
  hypo
cctagcctagcagccccgctctcctgcgggctcccccgtgggccaagtctcctaaactgggccagcctggagtcaggtgcgtgcagccctgccactctacctccttgcagcgaggcctggagggcgttccacgcgtgggcaccgcggc

SEQ ID NO: 144271 - DNA, 57 bp, Homo sapiens; identical to SEQ ID NO: 65138
  chr2:239958979-239959036
  hypo

SEQ ID NO: 144272 - DNA, 934 bp, Homo sapiens; identical to SEQ ID NO: 65139
  chr2:239969831-239970765
  hypo

SEQ ID NO: 144273 - DNA, 30 bp, Homo sapiens
  chr2:239971095-239971125
  hypo
taaagtcatgccggtcgtacagtccatgca

SEQ ID NO: 144274 - DNA, 153 bp, Homo sapiens
  chr2:239971450-239971603
  hypo
gacgctggggaggggcggccagtcccagcgggccacggcctccgggacagccgcctgctggtggggcgtgggcacgtgggcacgctgcggcacggcgggaagccgcgagggcagggcagacgccaagaggcccagtggcgtcatcagggtttc

SEQ ID NO: 144275 - DNA, 840 bp, Homo sapiens
  chr2:239973898-239974738
  hypo
agcaaaacagggaccgccgggctgcagcccctggccccggagatgacggctggtgcccgtgcttgaggcgtcaggccagctcgcggtgccagcactgccaggctcggctggccacaggaaactgtcccaccgattcctgctgtttgttttttcttaaggcattgttcctcagacttcagaaaacccagccacaaaaatccaccagagcaataaaaaaaaaggcacaaactcgcatcttccgatggcttttgagaaactcaagccagctcccccagctcacattcctgtttctgtccagttttgttttctttaaaggtccctctgtcccccacccgggtgcagaccccccgccgcacaccgctatggttcacagaggcgggccacagccgtagaaaacgtcctctttaaaaaaaaataagctacaagatgagtcgagtggtttacacagagactgtggagttgtgggtaataaactttaagcaccagttttaatcaagtttgttttgtattattagatctttgatatttgttttctgtgcctcgtgtcaactgaattcggcagctcggccgcctgttgccacaggctcctttcttccacggcgtcccttgcgggacccgccagagtgtgcttggcttccgcgtgtccgtgtgtctgcgcgtcgccggcgtctgtcccgtgttccctgtgaggctgccacgcccaggcgtgcatgtgcgtctcgagacctgtgggcctgggcggcagaaaggcttcccgtggctgttgcacgctgggtgtccctgggtgctccaagagagccccacggtgggacgcaggcgtgacacgggaaagtttcttgg

SEQ ID NO: 144276 - DNA, 30 bp, Homo sapiens
  chr2:239975184-239975214
  hypo
cagcgaggccatggcggtgaccgtctcggc

SEQ ID NO: 144277 - DNA, 30 bp, Homo sapiens; identical to SEQ ID NO: 65142
  chr2:239982754-239982784
  hypo

SEQ ID NO: 144278 - DNA, 206 bp, Homo sapiens; identical to SEQ ID NO: 65143
  chr2:239986520-239986726
  hypo

SEQ ID NO: 144279 - DNA, 30 bp, Homo sapiens
  chr2:239987545-239987575
  hypo
gccaccgactgagtcgtgtcttggggatct

SEQ ID NO: 144280 - DNA, 297 bp, Homo sapiens; identical to SEQ ID NO: 65144
  chr2:239997290-239997587
  hypo

SEQ ID NO: 144281 - DNA, 139 bp, Homo sapiens; identical to SEQ ID NO: 17157
  chr2:239999814-239999953
  hypo

SEQ ID NO: 144282 - DNA, 1421 bp, Homo sapiens
  chr2:240002663-240004084
  hypo
ggaccccacagccccgttcagccacagaccagtttcagacacgctcatctccaacaagtgcttcctggaatgtgtgcacagaggaaaagctgctacttcaggtgtcatgtgaagccgggaggctcacctgaaggccgccaagtactcagcgtctcccatgggggggtccaggccgccggtgaaagccatgttgacgttgaaacccacgccgggccctgtgcccacctgtggccagaaggagagaaacacacgtcatggaccccgagcgggacctgtctgacaggaacgcctgatgcaggtggcaccgggatgggctcggccttggtgggcccctggggagagcccacgtgtcctgatctcctggtgcatattcattaagacgcgtgtgaaggggccccactgacaggggcacactgacatcagcaagggggcccttttcctggctgctgtaggctctcgccgaccctgcccttggcacaccaaggccctgcactgacatttctgcggacccgccgccctgtgttgtgtgccgtgtgttacatcagggaatcagacctgggtctctctgggcagaaagtgtctccgatgagcctgtcatttcctacttcctctaaaaaaataatatccagaggcagacggagcgtcttcctggatgaaagccctgctgttggagcctctgttcagagtgggcaggctctgaacggggacctggggcgttgtcaaggagccgctgggcctgccgttcctggggccgccatgcagccccgcgccgggcaaaggacagtggacagagccccttgccggagggtgtcctgtggaagacagtggcctgggccctgcccggaggaaaacgggcaccacacacctcctccttcacaaacacctctgtctgcctggatgggaaccagaaacaatatccagcctctcatttgtacttcagacaaaacacaggccacctgtgcacacgcgatacgatgcaggctgacgtctgactgaagttactgtctgggcttaagtgagcacgaaggccgcactcactgctgccgggcagctgtggaccgtctgccccgtgcccccacagcggctccccgcagtccccctttccccccagaggcccttatataccccacctacctcatcaggagccccgctgcctgggaagaagttcccatcgtcgtagcggtggagggacatgtacaggacgctggggtcgctgtagaaagcctgctgggtcccgtttccatggtgcacgtccttaaagagcagggacaactacttcagggctgaggcaggtattggagggtggcctcccctgagggccgtccccaaccccagttgtgcttagtgacaacggctcctgctcaggaatgacattaccctccagctgggcccgtacccggcaggcgcgattctggggctgt

SEQ ID NO: 144283 - DNA, 30 bp, Homo sapiens
  chr2:240004596-240004626
  hypo
cgagggggtggccccgctgagaacagctgt

SEQ ID NO: 144284 - DNA, 30 bp, Homo sapiens
  chr2:240005596-240005626
  hypo
gccctggccgctgccgtcacccacaggcac

SEQ ID NO: 144285 - DNA, 30 bp, Homo sapiens
  chr2:240005941-240005971
  hypo
cgggagagaactgacgctggagacgaagcg

SEQ ID NO: 144286 - DNA, 30 bp, Homo sapiens
  chr2:240012666-240012696
  hypo
actggccgtgtgggcgggtgaggagagctg

SEQ ID NO: 144287 - DNA, 170 bp, Homo sapiens
  chr2:240014778-240014948
  hypo
tccgctgggcgaggccgagcagggacaccagctcctcacccagttgaaacttgcggtcactggagaggagcaacgcaggagctgatctggtttgaaaaagaggtcaaagcactttacagctcccatttcccagcgccgaggagtggtgagttttccgtgttccaagcccc

SEQ ID NO: 144288 - DNA, 180 bp, Homo sapiens; identical to SEQ ID NO: 17159
  chr2:240015871-240016051
  hypo

SEQ ID NO: 144289 - DNA, 389 bp, Homo sapiens
  chr2:240016396-240016785
  hypo
actgccacagacttcgaaggggatgagatgctggctgcatacaggatcctgtttcttaaagcgagagccactgcaccccagagccccagccacctgcgccagacaaccttccccagagaaaggtgcccgagtcggcgatcaaaacgctctcggctcacacggcctttgaagccgcacatgggcagcccctgcgtatggaaaacacctggcagcaattattcactttgagggaagcaaggctgcgatttctgtgaccactgggactcgagaagaaacaggacattatttacacattaaaggaacacttaccccaacaccaccgcaagggagccggacgaacacggaggcgagcgagcctgtgggggggagggagacggtcagagaggcca

SEQ ID NO: 144290 - DNA, 30 bp, Homo sapiens; identical to SEQ ID NO: 65150
  chr2:240018007-240018037
  hypo

SEQ ID NO: 144291 - DNA, 30 bp, Homo sapiens; identical to SEQ ID NO: 65151
  chr2:240026632-240026662
  hypo

SEQ ID NO: 144292 - DNA, 30 bp, Homo sapiens; identical to SEQ ID NO: 65152
  chr2:240027044-240027074
  hypo

SEQ ID NO: 144293 - DNA, 56 bp, Homo sapiens
  chr2:240029182-240029238
  hypo
cctgcagctccattcccttcacgacccactgcctcgccagcaccttaactctgagg

SEQ ID NO: 144294 - DNA, 199 bp, Homo sapiens
  chr2:240029725-240029924
  hypo
cctgccccggtcggcgttacctcgcatttgccccggaggcccgtctcctgcaggcgggaccagatgctctggatcctcccggcgtgctcggggtggctgctgctactcccgcaggtgcactggtgcttcagcatcagcgtgtcatacacgaggcctggggcggggcagaggggccaagatcagcgcacatccaggggcg

SEQ ID NO: 144295 - DNA, 128 bp, Homo sapiens
  chr2:240031619-240031747
  hypo
acagaaaagctggagcgtagagagatggagaagcggcaaagcccacacagctgagggtggcagagccagccaggagaccacgtggctaaaggaacgcactgcgtcgctgtgcacggacacgggaagat

SEQ ID NO: 144296 - DNA, 157 bp, Homo sapiens
  chr2:240032301-240032458
  hypo
ctgagagtgagaacctcgcagactgcagaacactaagccacgtgatgagaatcatctgaagaatgaagccgtgctgtatttacagaacatttttcttagtgcgtcattaacaagaaatattagatcataacaacatgaagagcgctcctgcctctgt

SEQ ID NO: 144297 - DNA, 30 bp, Homo sapiens; identical to SEQ ID NO: 17160
  chr2:240036882-240036912
  hypo

SEQ ID NO: 144298 - DNA, 30 bp, Homo sapiens
  chr2:240038826-240038856
  hypo
tggctgacctcaatgcgctctgggagctgt

SEQ ID NO: 144299 - DNA, 30 bp, Homo sapiens
  chr2:240039751-240039781
  hypo
gtatcagacgacaccggtccccacgcagca

SEQ ID NO: 144300 - DNA, 553 bp, Homo sapiens; identical to SEQ ID NO: 65155
  chr2:240054227-240054780
  hypo

SEQ ID NO: 144301 - DNA, 30 bp, Homo sapiens; identical to SEQ ID NO: 65156
  chr2:240056009-240056039
  hypo

SEQ ID NO: 144302 - DNA, 178 bp, Homo sapiens
  chr2:240061312-240061490
  hypo
atttcaagctcatccgtcccgagtccgactctagccgtaggacacaggacaaacgcttcgcactgacctccgccgggatgctggggacggcgggcgcgataccgttctccgcgctgacgctcccggagctgttgttgggtgagctgggtccggagcctggggcgctgctgcacgcgga

SEQ ID NO: 144303 - DNA, 30 bp, Homo sapiens
  chr2:240062338-240062368
  hypo
ctgctgttcagcaacgactctgggtgctca

SEQ ID NO: 144304 - DNA, 41 bp, Homo sapiens; identical to SEQ ID NO: 17161
  chr2:240064715-240064756
  hypo

SEQ ID NO: 144305 - DNA, 362 bp, Homo sapiens; identical to SEQ ID NO: 65159
  chr2:240066059-240066421
  hypo

SEQ ID NO: 144306 - DNA, 147 bp, Homo sapiens; identical to SEQ ID NO: 65160
  chr2:240067064-240067211
  hypo

SEQ ID NO: 144307 - DNA, 216 bp, Homo sapiens
  chr2:240077355-240077571
  hypo
ttgtgtgactgagtacgttcactgtttccgcccagaactggccaaaacctttggataacagagaatttgtttagcaaaaaaaagcggtgcccctaggctctcatctccaagagccgccccctagggaggacgccttgggatttcccacactgtcttgcagtttgtaggatccactggccacatctgggatgaggcactgcccgccctcagcacctg

SEQ ID NO: 144308 - DNA, 30 bp, Homo sapiens
  chr2:240080007-240080037
  hypo
ccttcatgggaaacacggagtgacttgtac

SEQ ID NO: 144309 - DNA, 217 bp, Homo sapiens
  chr2:240080392-240080609
  hypo
cacaccatgcagagcccgccccaccgcgcacccgccctccagacaccaggagagggcggccctcaccgtcagggcaggtcacacccgcccagccctggtcacatggtcccaggccagaccgcacacgcgtgccctccgcgaagaagcgtccagcagggcgagcagaagtgaagctctatccctgctgcaatcacacccgcaccgcacacaattactc

SEQ ID NO: 144310 - DNA, 30 bp, Homo sapiens; identical to SEQ ID NO: 65163
  chr2:240084853-240084883
  hypo

SEQ ID NO: 144311 - DNA, 30 bp, Homo sapiens
  chr2:240085529-240085559
  hypo
agtggttcagattccggtgggccagcgcct

SEQ ID NO: 144312 - DNA, 31 bp, Homo sapiens; identical to SEQ ID NO: 17165
  chr2:240097929-240097960
  hypo

SEQ ID NO: 144313 - DNA, 30 bp, Homo sapiens
  chr2:240100787-240100817
  hypo
tagagtggggagtgcgtgcgaggcagccac

SEQ ID NO: 144314 - DNA, 30 bp, Homo sapiens; identical to SEQ ID NO: 65165
  chr2:240101489-240101519
  hypo

SEQ ID NO: 144315 - DNA, 601 bp, Homo sapiens
  chr2:240103121-240103722
  hypo
cacgcccggcagcagcgtgtgcgcaggaggggcagggagggccgtcagggctagctgcacacaccaagcatctcacctgtatctttcccatggcaaaaacttaattccgaacaaccaacttaaatgaacttcttggggatggtgggataaacataagcaagctcttgccgtgtccttcatcagggcagcgctggcctccgaagactcacaggcggcccatagcacgctggctggagggcagtgcccaggccaggctgcctggctgataaaacctgctccacccacctgcttgctgccagcgcacttgcacctaaatatttaacctctccgtgctgggttaaatgtggcacctgcccccaagggttcctgtgaggactggaagaggtggcatggggagaacactcagaagagctggtctgggcttgcctccgtgcggcctgattgtcatcaaaccgtcacttttgaaagatgtcgcctagagacgccgacttcctgcagacactaaatatcctaaggtaaaatcaggccccctcaaggctagggagatactacctggagcacaccttcctaacgcggtgttccttgccgccacatgcaagca

SEQ ID NO: 144316 - DNA, 30 bp, Homo sapiens
  chr2:240103944-240103974
  hypo
atctcctcgtcatggcgagcccctcccctc

SEQ ID NO: 144317 - DNA, 172 bp, Homo sapiens
  chr2:240105071-240105243
  hypo
ggcagatgccgcgcccgcataaagcggcaggggccaggaggaaagggcggcagaatggacgccacggacggtaagctgccgcccatggatgggaacaccaggtgcagaccagctggggtagggccacggcatccatggctctccaggtgtgtgcccacgtgccctatgtgtc

SEQ ID NO: 144318 - DNA, 174 bp, Homo sapiens; identical to SEQ ID NO: 65168
  chr2:240107030-240107204
  hypo

SEQ ID NO: 144319 - DNA, 30 bp, Homo sapiens; identical to SEQ ID NO: 65169
  chr2:240111548-240111578
  hypo

SEQ ID NO: 144320 - DNA, 184 bp, Homo sapiens
  chr2:240112234-240112418
  hypo
cgaagtcaccgtgccgctgtgagagccacaagagcgtgtgccccagaagtggtccagacagacgctcgagacccggagcccgtttccatggtgagacaagcgcccccttggaaaacatgtttaccagacacagccaacgagacgtgctcctggctcttggcacaagtgcgttcctctgggcatg

SEQ ID NO: 144321 - DNA, 30 bp, Homo sapiens; identical to SEQ ID NO: 65171
  chr2:240115663-240115693
  hypo

SEQ ID NO: 144322 - DNA, 459 bp, Homo sapiens; identical to SEQ ID NO: 17166
  chr2:240116629-240117088
  hypo

SEQ ID NO: 144323 - DNA, 189 bp, Homo sapiens; identical to SEQ ID NO: 65173
  chr2:240117492-240117681
  hypo

SEQ ID NO: 144324 - DNA, 30 bp, Homo sapiens; identical to SEQ ID NO: 65174
  chr2:240118236-240118266
  hypo

SEQ ID NO: 144325 - DNA, 30 bp, Homo sapiens; identical to SEQ ID NO: 65175
  chr2:240118604-240118634
  hypo

SEQ ID NO: 144326 - DNA, 30 bp, Homo sapiens
  chr2:240121835-240121865
  hypo
gacttacgaactatcgatctttactggcgt

SEQ ID NO: 144327 - DNA, 30 bp, Homo sapiens; identical to SEQ ID NO: 65176
  chr2:240123835-240123865
  hypo

SEQ ID NO: 144328 - DNA, 37 bp, Homo sapiens; identical to SEQ ID NO: 65177
  chr2:240129718-240129755
  hypo

SEQ ID NO: 144329 - DNA, 165 bp, Homo sapiens
  chr2:240165145-240165310
  hypo
ctggataaattaacattctaaagtgtgtttggtggggggttgctgacatagacaaaaacaatgaaaccgctgtgactcaagagtagtataggtcacacctcactgtgcacaccccactgtgctaacagagctgcttttcagacacgggaacggaagcttagggct

SEQ ID NO: 144330 - DNA, 473 bp, Homo sapiens
  chr2:240167439-240167912
  hypo
atgccaggaataaagacgagcctgcccccaccttctattcaatatgtctttcctgagcatctgctgggtgatctacctaacttgttccttcacgaatatcccaacagtcttcagttcatccccagcccctatgtgttcaagcagacacacacgtctggttcacagctcagcgagcaggccctgagcgtctgggaacgtgagagtgagcaacgcagaggcctggccccggcccagcagaaccggcaacccacactggctgcctgcgtccagtcccgccatggggtctgcctggtgccagcacctgcccagacacagggcagaggagactgcaggggggtgtccagctgctctcacgtgccaggccaggcttgctaacacctgtggcttagtcgggtgatagggacaaaacgtgcaaactgagcccgctggacacgcagactcagcaggcaggcagagcccggtggggaggcaaa

SEQ ID NO: 144331 - DNA, 418 bp, Homo sapiens
  chr2:240168780-240169198
  hypo
gatgaaaggtgatgcagctatcggcaatggctggagactagctctgcggtctgctcgtggataaccgcgctccctcgctgccgggccacccgcacagccgggcaaaccaaaaggcccactttttcatgctgtacccaccacttctgtttccccgcaggcatcctactttctaaactaacaccttttcactcccgagaattctaacaaatattatacaattcctacccgcatctaccctccacctggacgtagaacccgtgtgggaggcagtcctgcagggtttggggtggaatatcccccctgtcgagtggagacgaggctgacatgaggagtgaataaacgaacacagataaagaacgaggcacacagtacgtgcggggcgagagactccctttgctcctcccgcttcacctttgct

SEQ ID NO: 144332 - DNA, 42 bp, Homo sapiens
  chr2:240169830-240169872
  hypo
gtgcttcagccaacacgccccttgggttgaaagacttactcc

SEQ ID NO: 144333 - DNA, 193 bp, Homo sapiens; identical to SEQ ID NO: 65181
  chr2:240170921-240171114
  hypo

SEQ ID NO: 144334 - DNA, 132 bp, Homo sapiens; identical to SEQ ID NO: 17171
  chr2:240172541-240172673
  hypo

SEQ ID NO: 144335 - DNA, 30 bp, Homo sapiens; identical to SEQ ID NO: 65183
  chr2:240187675-240187705
  hypo

SEQ ID NO: 144336 - DNA, 30 bp, Homo sapiens; identical to SEQ ID NO: 65184
  chr2:240205155-240205185
  hypo

SEQ ID NO: 144337 - DNA, 512 bp, Homo sapiens
  chr2:240212279-240212791
  hypo
acacacacacacacacaggcacgtgcgcacaagcagtcacgtacacacatgtacgcacacacaaccacacatgcgcgcacgcatgcattcagttcgcacgcgcatgcacacacacgcacgcacacactcacatacgcactcacgtacgcacacacgcgcacgcactcacacacacaccacacacgctcccgtgtttagtgtgtttctagggcactatggggagggccggggttctatacagggcctggcccacctgaaagtccatgtgaaaggcagcctccagggctcctatcaagtgggtggcttcgctcattcactcaggaatttttcgtggcacagtaaggcaaggggtggggatttttctttaaaagctttatccaatcatgactaatggaataagtgagccaggcctcaagaaaaccgaggacaaaaggaaagagccgttcagaaggcagcgcctgcctccacctgctggtgcgtgcccgggacagggaggacggcaggttttacca

SEQ ID NO: 144338 - DNA, 310 bp, Homo sapiens
  chr2:240213546-240213856
  hypo
cttctccccgggagccgccgattacatttgcatgaaaatagaacctttgtttgcaagagttcccgctccagtggatccctcctttgtctgcagcacagcaactgatggggcaggatgctggtgtgtgcacacagcccagctcaggacagccacgccaggggctgcgcgcacggcccagctcggcccagctcagcccagctcagggcggccacaccaggggctgcgcgcacagcccagctcaggacggccacgccaggggctgtgcttgcccatcgtggcaaggcaggcaaggggacggccaggatggtag

SEQ ID NO: 144339 - DNA, 505 bp, Homo sapiens; identical to SEQ ID NO: 65187
  chr2:240226677-240227182
  hypo

SEQ ID NO: 144340 - DNA, 313 bp, Homo sapiens
  chr2:240232939-240233252
  hypo
gcagcctgaactccacgtgtcccctgctgtgtcactggcatgctggtcttgcatggcactgagatgtgtggcacaagcaggcaccaagcccggagacacccgacgctcaccgttagactgggtagcatttgtcaagcgccgagcaaacagtggatgaagtgtcctcagccggcgtcagctgttctgatccgcagaacacataactcctggcactcctttccaagcatccgggaaatgtagaatccaagtgttacaccatccagttgaagatgacagatttacgatataaaacggcacccgcgactgaggactt

SEQ ID NO: 144341 - DNA, 47 bp, Homo sapiens; identical to SEQ ID NO: 17176
  chr2:240234572-240234619
  hypo

SEQ ID NO: 144342 - DNA, 31 bp, Homo sapiens; identical to SEQ ID NO: 17177
  chr2:240247259-240247290
  hypo

SEQ ID NO: 144343 - DNA, 30 bp, Homo sapiens
  chr2:240248031-240248061
  hypo
gtgaatggtgggtgccgcagccagagggag

SEQ ID NO: 144344 - DNA, 113 bp, Homo sapiens
  chr2:240262929-240263042
  hypo
agcacatgagagagacgtggggcgaaggccgcctttgctcccgcacagccacattgagactgcaggtgttcaggcaaagacagggccaggcagcacctcggtgagcctgcagc

SEQ ID NO: 144345 - DNA, 115 bp, Homo sapiens
  chr2:240265815-240265930
  hypo
acacagcctggcacccggaggcagccacgcacctgcacacctgtccacgtgcgacctgcccccactgccgggtgcctcaatcacagcctttctgttccccgccaagctgtgctca

SEQ ID NO: 144346 - DNA, 30 bp, Homo sapiens
  chr2:240266621-240266651
  hypo
cccagggctgcccaccgcaggggccatgaa

SEQ ID NO: 144347 - DNA, 1544 bp, Homo sapiens
  chr2:240270279-240271823
  hypo
cccccgtgggctttccgtccacactcccggtttcatgccagggactctggcttcaaggcagaggctctgtgtcctgacaaacgcatcctgccctgccacagcgcatcccctcagggagggtgtggagggctggccgggcaaggggcgtaaggctccagggcctcctttcaaaggagagcccttccaggctaagtcaatccaggttcttccctcaggccgctcacatcattagaaatcgttctttagagcaataaaatcccaacagttaagcagctttgacgtcagagaaccagggcctggctctggcaaagttcagcgggaacagcaataaaaccgtaacacaaaactcacccagcagcagaggactttcacagaacacaggagaggaaagccacacacactgcactagaagggcacttcatcagcagggcaaagccaagtcacatgacaaatgtgagagggggcccatgggcggctggactcccccagcccggcctgcccagggagtgagggcggcacgggcacccacaccaggccacacaggagcagggcccccatgccagatgggcaggcaagggtgagccaggcaggcaagagtgagccgggtgggcagggcgaaggacagggccagctagcagaggacggcacgagagacacacggagggaggggaggtgcagccaggtaggccccgaacaccacgttgccaggactcggctcctcggctcaaggaaaagggacagcggttccgtggctgtgctctgacacacctagaaatttcccgctcaagagagcaaactgaatcctttagtattaatgatttctcttcctcccaaaacccactaaaatgatgaaaagcaggattggaaagcacttccagcaatgcctgggagcggacggacaggtgcatcagctgacaagaaacacagaggaacttcccgaaactagagatctctggggatggagctgcttgggaaggcacacaagcgagtgggcctcgcccaggagggagggcacggttctgggcaagccccatcccccgcctgagacgtgggcagaggccgctgggccaccagccagtgtgtgcaggtggtggtatgcacgtgttgggcacaaggggtcctgcctcccaagggacctccgggcggaagggcagacacggcagggaaagatgacagcggacagggcagaggaggcagccagcagacttcaggccccaggcaaaccacctcagctgtaccccctgcacagatggagagcagagaatgggctgggccaaggggcagccctgccctcaccagtgcggcctgtcttcagcctccaacccactgagagagagaatggagaggtcgtgggtggcaataaggcgcacacaacccaactcacatgggcaggacaggcccgggcaggccggtgatcaaactgaaccgcagcggctgaaattcccacagaaaaggccaaacaaacccagcaccccgcggtttccagagctgagcctcaaagaacccggcctgaaaaggttagagacaagcggatggagaaatat

SEQ ID NO: 144348 - DNA, 30 bp, Homo sapiens
  chr2:240288682-240288712
  hypo
tgcctgaaagcctccgtcactgacaggcac

SEQ ID NO: 144349 - DNA, 30 bp, Homo sapiens
  chr2:240290991-240291021
  hypo
ccaagagcatgtctacggttggagctcaca

SEQ ID NO: 144350 - DNA, 30 bp, Homo sapiens
  chr2:240291381-240291411
  hypo
aagtgttcaacacagcgcctcggaagccag

SEQ ID NO: 144351 - DNA, 246 bp, Homo sapiens
  chr2:240291770-240292016
  hypo
tacaggacggcaggccgtctgccctgtgtccccgggactggcaggtcagtgagggtagcatcccgacttttcccaaggggctctgcggggtcaaaacagagtttaaaaatgcaaagacaaccatgcaacccttagccatgggccaccaacaaccgtcagagagtggtgctagaggtccaaaatgctgcgctgagggaggcaccccacagctctgaaatgttccaactccctcgatcccactgaaag

SEQ ID NO: 144352 - DNA, 241 bp, Homo sapiens; identical to SEQ ID NO: 107734
  chr2:240294230-240294471
  hypo

SEQ ID NO: 144353 - DNA, 247 bp, Homo sapiens
  chr2:240298220-240298467
  hypo
ctggcccgaaggcacgtgtctactaccatcagtaacatggcctcctggccacaccacacacaccacctgccgggagcacaacacccgccccagggggaggtgatgaacgccatccagccacagattgcccgggacgcctagttttttgttagttcagaccgtgtgttcctgaatacagcctgagtggccacacttgagtaacgattaaaaagccacagtgctcaacagaacacgccactgctatgac

SEQ ID NO: 144354 - DNA, 30 bp, Homo sapiens; identical to SEQ ID NO: 65196
  chr2:240301916-240301946
  hypo

SEQ ID NO: 144355 - DNA, 44 bp, Homo sapiens; identical to SEQ ID NO: 17182
  chr2:240312831-240312875
  hypo

SEQ ID NO: 144356 - DNA, 96 bp, Homo sapiens
  chr2:240316126-240316222
  hypo
cgcctcctcacacgccggggccctgggcgaagcggctggagaacaagctgcacacacctgccttggccttggcacaacagtcgcatttgccactcg

SEQ ID NO: 144357 - DNA, 252 bp, Homo sapiens
  chr2:240318369-240318621
  hypo
tctcgtctcttagcccggctgacggagtcttttgccaaagagattttttaaaaaactcttatcctattaaatctgtcaagattttctttaaggtttctgggttggtattgaaagagtagattaacttggtcctcaaatgctttcttccaataaaatcttccaaggtaatcaacagaccgaacaacaaacactaaaagctgctccggctgaagtggacttggagcattagctcccttccgtcacccccacctg

SEQ ID NO: 144358 - DNA, 95 bp, Homo sapiens
  chr2:240319793-240319888
  hypo
cctcggaggaaagcccggccacagcctgtcgccccgctgcctctcagcaacggcagttctctcggcctctgcggctccttcgcgccctacatcag

SEQ ID NO: 144359 - DNA, 39 bp, Homo sapiens
  chr2:240320281-240320320
  hypo
gctgcctgagccgcacgtggccagcgtgccaggttgtcc

SEQ ID NO: 144360 - DNA, 43 bp, Homo sapiens
  chr2:240342329-240342372
  hypo
gatgcagcccaaggctctcaccgggcaaagcccccacctgtgc

SEQ ID NO: 144361 - DNA, 121 bp, Homo sapiens; identical to SEQ ID NO: 17183
  chr2:240361082-240361203
  hypo

SEQ ID NO: 144362 - DNA, 143 bp, Homo sapiens; identical to SEQ ID NO: 2338
  chr2:240402417-240402560
  hypo

SEQ ID NO: 144363 - DNA, 207 bp, Homo sapiens
  chr2:240420315-240420522
  hypo
gcctgcactgggttccgaggacaatctgggccggactgcaaagggaggtggggccacaccagttcgaggacaatctgggccagactgcaaagggaggtggggccacaccgggttccgaggacgatctgggccggactgcaaagggaggtggagccacaccgggttatgaggacaatctgggccggactgcaacgggaggtggagcca

SEQ ID NO: 144364 - DNA, 30 bp, Homo sapiens
  chr2:240442765-240442795
  hypo
gcccacccgcttgcccgcccgcctgccctc

SEQ ID NO: 144365 - DNA, 31 bp, Homo sapiens; identical to SEQ ID NO: 65201
  chr2:240484932-240484963
  hypo

SEQ ID NO: 144366 - DNA, 31 bp, Homo sapiens; identical to SEQ ID NO: 65202
  chr2:240506414-240506445
  hypo

SEQ ID NO: 144367 - DNA, 197 bp, Homo sapiens; identical to SEQ ID NO: 65203
  chr2:240567503-240567700
  hypo

SEQ ID NO: 144368 - DNA, 30 bp, Homo sapiens
  chr2:240581880-240581910
  hypo
cccccgcccctcccacgcaggctccaacac

SEQ ID NO: 144369 - DNA, 312 bp, Homo sapiens
  chr2:240582219-240582531
  hypo
gcaccagtccagagccggcttcgccacccagccttgagtcacctctccacctggccacctacggagaagctcctaggtgattcatttgtcaagtaccgacgagacaccctctggtgtgaggcggcattgttagtaaccttgttatgatctaaatattcgcaggtttggatctcatcgctaccatagactgttggagtttcaagggtggagatccgccattgctttttccatatccgcagaaattcctttcacatgaaatgtgagtctgttgggttcccccccgagaccagcggtggaagaagaagctggagg

SEQ ID NO: 144370 - DNA, 260 bp, Homo sapiens; identical to SEQ ID NO: 17185
  chr2:240599652-240599912
  hypo

SEQ ID NO: 144371 - DNA, 115 bp, Homo sapiens
  chr2:240600457-240600572
  hypo
gggccttttgggctgcgcgcacattcggtgtgaccccctctgtccctctcctctcgcataggggtcagcgctgcatgaggatagagtgtgtccccctcctcgcatgtggctactc

SEQ ID NO: 144372 - DNA, 35 bp, Homo sapiens; identical to SEQ ID NO: 17186
  chr2:240612327-240612362
  hypo

SEQ ID NO: 144373 - DNA, 111 bp, Homo sapiens; identical to SEQ ID NO: 65206
  chr2:240618672-240618783
  hypo

SEQ ID NO: 144374 - DNA, 30 bp, Homo sapiens
  chr2:240619707-240619737
  hypo
acgccccttcctcttcgcggcggcaggccc

SEQ ID NO: 144375 - DNA, 226 bp, Homo sapiens; identical to SEQ ID NO: 65207
  chr2:240639522-240639748
  hypo

SEQ ID NO: 144376 - DNA, 152 bp, Homo sapiens
  chr2:240643422-240643574
  hypo
ccaatgcaccctcaccggatttcagaggcctctgtcactgtgacgcagcagccccattctccctgccccacccaggccctggtgtgatcaacgattcacaaacctcgcgcctcagagtctaacctaagatgaggatccgccccagcaacctc

SEQ ID NO: 144377 - DNA, 30 bp, Homo sapiens; identical to SEQ ID NO: 65209
  chr2:240644009-240644039
  hypo

SEQ ID NO: 144378 - DNA, 744 bp, Homo sapiens
  chr2:240658160-240658904
  hypo
tctccttggtgaggtcgcgtggaggcagtgatgtctgtcggtaccccaaggcctgtgtggaggcagcaaagtgtctgggggacggactggtttcccggctttgctcaagctccgatgcccacgggaggagggtaggaggcagtcgctggtctcggtaggacacgggatgccacgcatggctggttggccaatctgtgtttgggtcaacgcgcccctgtgtgctcggacctggaactgcacctttgtcgggcaccctgagataggaagggctcacaccctgacaggtgcgatcagtcagggcagggaggcgggcagcaggactggccactggccccgataggtgctggtgagctgggcagacactcggggtcttcctcccaccctccaccctgaggacaaggcaggacccccaggagcccccaacccaacgccccccaacccagcgcctcgcttcttccctctcccctccggcctccggaatgtggcgcccagcgacacagacaagcccatcctcaaaagcaccgggtctttcaaggcaggagctctgacgtcatcggagtcacgtgaacctggttccttcacaggttctgaaaaatggacgcaacaaaactagcggtggaaaaagcctttgactcccgccctcaaattcttgccagtgaaatacccggaaaaggagacatggcttttcccttgcaggcaagtcaggctcctgagtgcttctctccaggtcgcagcagggcacgg

SEQ ID NO: 144379 - DNA, 207 bp, Homo sapiens
  chr2:240666722-240666929
  hypo
gcactgagagtctggccgtctggaagccaggaccagctctgcccggaagtcgtagagccaggtcagcctccgccttgctccctgcctgcgctgcgcctttgcggcagcagcagcttagaggaggaaaggtggctccgagcaccctcatggctcccgagcgcccgagcccagggacttgggggacagcatcggcgctgagtcctcgag

SEQ ID NO: 144380 - DNA, 31 bp, Homo sapiens; identical to SEQ ID NO: 65212
  chr2:240668882-240668913
  hypo

SEQ ID NO: 144381 - DNA, 31 bp, Homo sapiens; identical to SEQ ID NO: 65213
  chr2:240670557-240670588
  hypo

SEQ ID NO: 144382 - DNA, 30 bp, Homo sapiens
  chr2:240670892-240670922
  hypo
cgtgagctgattgttcggggtgtgcagtgg

SEQ ID NO: 144383 - DNA, 30 bp, Homo sapiens
  chr2:240671135-240671165
  hypo
gagtctcgactctggcgaagcatctgctac

SEQ ID NO: 144384 - DNA, 30 bp, Homo sapiens
  chr2:240671935-240671965
  hypo
ccccctcgtcccctgcgctcatcctgcagc

SEQ ID NO: 144385 - DNA, 121 bp, Homo sapiens
  chr2:240672185-240672306
  hypo
cagcctctcaggcatcggcgcttgtccctgggatctccctgggcagggccaagccaggcgggtcattctcctgggagcaccgcactcattcccaggctctacctagcggcgctgtccggac

SEQ ID NO: 144386 - DNA, 30 bp, Homo sapiens
  chr2:240672696-240672726
  hypo
gggtccggtgggttccggggtctgctctga

SEQ ID NO: 144387 - DNA, 30 bp, Homo sapiens
  chr2:240677540-240677570
  hypo
agaatgaaagtcaggcgtgatcaagcgttg

SEQ ID NO: 144388 - DNA, 30 bp, Homo sapiens
  chr2:240686412-240686442
  hypo
cttaggctgtgcgaacgtgagggacaaaat

SEQ ID NO: 144389 - DNA, 131 bp, Homo sapiens; identical to SEQ ID NO: 65214
  chr2:240687706-240687837
  hypo

SEQ ID NO: 144390 - DNA, 30 bp, Homo sapiens
  chr2:240689929-240689959
  hypo
catttgacccgcgagcgctggcacccatgc

SEQ ID NO: 144391 - DNA, 195 bp, Homo sapiens
  chr2:240690337-240690532
  hypo
tgtctcccatcctgggctggacggtggctcggcaaagtcagtccctcacacatcctcgatccaggtcccgcacgtgccccggctctgaggtttagcctgttggctgatggggggaaaggtgtatggggcctttgtcgacagcacatatgccgggctgtggagtggggcccagggtgcctgcgagtgtctgcactc

SEQ ID NO: 144392 - DNA, 30 bp, Homo sapiens
  chr2:240692308-240692338
  hypo
ctttataagtgtggacgccgccatgaccct

SEQ ID NO: 144393 - DNA, 381 bp, Homo sapiens; identical to SEQ ID NO: 65216
  chr2:240700323-240700704
  hypo

SEQ ID NO: 144394 - DNA, 254 bp, Homo sapiens; identical to SEQ ID NO: 65217
  chr2:240725284-240725538
  hypo

SEQ ID NO: 144395 - DNA, 207 bp, Homo sapiens; identical to SEQ ID NO: 17189
  chr2:240733614-240733821
  hypo

SEQ ID NO: 144396 - DNA, 106 bp, Homo sapiens; identical to SEQ ID NO: 17190
  chr2:240734676-240734782
  hypo

SEQ ID NO: 144397 - DNA, 140 bp, Homo sapiens
  chr2:240735059-240735199
  hypo
cacaggcccgggtgacgggtgccttcagctgctggaggagccctgccattcccaggaggagggcgtcagatctgccgccggcacacgcagagcacccttcccaggcactgatggcacctgctttccgagtgcctctctga

SEQ ID NO: 144398 - DNA, 188 bp, Homo sapiens; identical to SEQ ID NO: 65220
  chr2:240747275-240747463
  hypo

SEQ ID NO: 144399 - DNA, 108 bp, Homo sapiens
  chr2:240750694-240750802
  hypo
agggccttccggggccgggtgcggaggaatcctgagtcgctccctcacactctctgggccagaactcagccacccaggtccctggcagcagagcgtgctggaagtgcg

SEQ ID NO: 144400 - DNA, 30 bp, Homo sapiens
  chr2:240751251-240751281
  hypo
atctttgtcctgagacggctgtcaagcctc

SEQ ID NO: 144401 - DNA, 139 bp, Homo sapiens; identical to SEQ ID NO: 65222
  chr2:240756516-240756655
  hypo

SEQ ID NO: 144402 - DNA, 30 bp, Homo sapiens
  chr2:240762114-240762144
  hypo
cgtttgccccatcggcgatgtctaaaagaa

SEQ ID NO: 144403 - DNA, 139 bp, Homo sapiens; identical to SEQ ID NO: 17191
  chr2:240809617-240809756
  hypo

SEQ ID NO: 144404 - DNA, 30 bp, Homo sapiens; identical to SEQ ID NO: 17192
  chr2:240844757-240844787
  hypo

SEQ ID NO: 144405 - DNA, 30 bp, Homo sapiens; identical to SEQ ID NO: 65225
  chr2:240896168-240896198
  hypo

SEQ ID NO: 144406 - DNA, 91 bp, Homo sapiens
  chr2:240905549-240905640
  hypo
gggagtgttccagggcgaggcctggagctgggaagggattttagacagtgcactgggaggcaccctgcccagtcaccgacaacctgggctg

SEQ ID NO: 144407 - DNA, 147 bp, Homo sapiens; identical to SEQ ID NO: 65226
  chr2:240905880-240906027
  hypo

SEQ ID NO: 144408 - DNA, 325 bp, Homo sapiens; identical to SEQ ID NO: 65227
  chr2:240906447-240906772
  hypo

SEQ ID NO: 144409 - DNA, 30 bp, Homo sapiens; identical to SEQ ID NO: 65228
  chr2:240907077-240907107
  hypo

SEQ ID NO: 144410 - DNA, 59 bp, Homo sapiens; identical to SEQ ID NO: 65229
  chr2:240927100-240927159
  hypo

SEQ ID NO: 144411 - DNA, 142 bp, Homo sapiens; identical to SEQ ID NO: 65230
  chr2:240928843-240928985
  hypo

SEQ ID NO: 144412 - DNA, 242 bp, Homo sapiens
  chr2:240930581-240930823
  hypo
agaacccaaggctcacgggatccatgaatcatgcttccacagacagccacagagctgcgaacctgcggcaagctgaagatgagtggacggtaggtatagcgtcaggagcgtcctagtaaaaaccgcgtcgctcatacacggttagtgatccaataatgcaaatgcccctccaagaaactgctgccaggataacaatgatcgtttgctttcctaagtgtatttatgtgcgtttccacatgggt

SEQ ID NO: 144413 - DNA, 87 bp, Homo sapiens; identical to SEQ ID NO: 65231
  chr2:240940090-240940177
  hypo

SEQ ID NO: 144414 - DNA, 31 bp, Homo sapiens; identical to SEQ ID NO: 65232
  chr2:240943998-240944029
  hypo

SEQ ID NO: 144415 - DNA, 140 bp, Homo sapiens
  chr2:240965862-240966002
  hypo
ttcagaaatgatcatgcgattgtaaaacagtgggaatgcagctgtgtaaactacggccggttctatggatgtttctataattgaagaattgctttttgtcaaaaatacggattcccggtccccaacgcaggagggtctgg

SEQ ID NO: 144416 - DNA, 83 bp, Homo sapiens
  chr2:240966215-240966298
  hypo
atcacagcacgcagacgtaacttctcacaacctgtttgcgtggatgttttgttgtacctgagcgagttagaaaaacaccacct

SEQ ID NO: 144417 - DNA, 194 bp, Homo sapiens
  chr2:241068022-241068216
  hypo
tctctgtgatgaaggcgatcaggtataaaaaccgagaaaatacctctttgtcagtgtaggtgaagacacatcactgacaatggctggagttttgccacgggagtgaccgtggctgggcccgtcagctgcagtccgatcacccaggtcatcactcttcctgacagcctcacggtgacagccgagtcacacggaga

SEQ ID NO: 144418 - DNA, 174 bp, Homo sapiens; identical to SEQ ID NO: 65234
  chr2:241069129-241069303
  hypo

SEQ ID NO: 144419 - DNA, 30 bp, Homo sapiens; identical to SEQ ID NO: 65235
  chr2:241070808-241070838
  hypo

SEQ ID NO: 144420 - DNA, 30 bp, Homo sapiens; identical to SEQ ID NO: 65236
  chr2:241072048-241072078
  hypo

SEQ ID NO: 144421 - DNA, 31 bp, Homo sapiens; identical to SEQ ID NO: 17194
  chr2:241073763-241073794
  hypo

SEQ ID NO: 144422 - DNA, 30 bp, Homo sapiens
  chr2:241098708-241098738
  hypo
acatgaggcataccccgtcggagaatctgt

SEQ ID NO: 144423 - DNA, 31 bp, Homo sapiens; identical to SEQ ID NO: 17195
  chr2:241100736-241100767
  hypo

SEQ ID NO: 144424 - DNA, 196 bp, Homo sapiens
  chr2:241130456-241130652
  hypo
ccccaaagtcggcggcgggggtcttggggcatctgggtggctctgggaccagcccacccaacataggaggggtcacccaggggttctaggtttgtcgcatccctggcggctcacccaggacccacggtcattcaagcacaccattcctcatcccctcattcagccgacacttgctgagcaccgccttggcgctgga

SEQ ID NO: 144425 - DNA, 31 bp, Homo sapiens; identical to SEQ ID NO: 65239
  chr2:241154321-241154352
  hypo

SEQ ID NO: 144426 - DNA, 30 bp, Homo sapiens
  chr2:241156892-241156922
  hypo
accgtccacctccaccggctccacccacct

SEQ ID NO: 144427 - DNA, 254 bp, Homo sapiens; identical to SEQ ID NO: 65240
  chr2:241157269-241157523
  hypo

SEQ ID NO: 144428 - DNA, 215 bp, Homo sapiens
  chr2:241175123-241175338
  hypo
ggagctctcggtccccgagcccggtcaatacctgagccaggcattcttaacctcctgtgcaccgaggccccatggcaggtagtgaaagttagggacccctcatcagaataatgtttttaggtgcataaaataaaatgcatagaatcgcaaaggaaacgcattgcattgaaattgttagcacaggtgagagctgagttttccgcagagtgaggtgc

SEQ ID NO: 144429 - DNA, 202 bp, Homo sapiens
  chr2:241196840-241197042
  hypo
ccgcattggacggagcggtgtggccccctaagatgctgaccagccccggccaatcatctccagccacagccacccagggcaagtatttgtaggcccagctacttcctgtcactcacgtgtgagcacacacaggatagagggtgacgcgggtggtgccgtccacccagcttccccgcaggcttcgttcccagctcacccacct

SEQ ID NO: 144430 - DNA, 142 bp, Homo sapiens
  chr2:241197101-241197243
  hypo
cacaaatatcgtgagaccacgcagccctgggtttgagaaccaaaaagccaagaaatggtgcgtgggctcagcagaaatgactgtcctgggggctggaacggacgatgtggcgacatcatcagccgaccgtaaacaccaggct

SEQ ID NO: 144431 - DNA, 155 bp, Homo sapiens
  chr2:241226632-241226787
  hypo
gccaggggcggtcagcggtgaccgtgtgtgccaggggcagtcagcggtgaccgtttgcgctgaggacggtcagcagcatctattggattccctccctcttggggctggtgtgagcagccattccctgagcagccctgtcccgcacacaggcagct

SEQ ID NO: 144432 - DNA, 30 bp, Homo sapiens
  chr2:241229148-241229178
  hypo
cagccacggcgtgggcgggctgacgggtgg

SEQ ID NO: 144433 - DNA, 30 bp, Homo sapiens
  chr2:241229484-241229514
  hypo
ctctggcatttggaccgggtccacagcatc

SEQ ID NO: 144434 - DNA, 30 bp, Homo sapiens
  chr2:241229784-241229814
  hypo
aggccccagtcacgtcgcccctctggctag

SEQ ID NO: 144435 - DNA, 30 bp, Homo sapiens
  chr2:241262309-241262339
  hypo
gccgagggcccggagcgcgaggatggacgg

SEQ ID NO: 144436 - DNA, 115 bp, Homo sapiens
  chr2:241262542-241262657
  hypo
cgggagacgaaatgacggggcatccaataagccccaagtcggcccgcccctccctaccggagggcagtggaggccccgccgggagtccaggctccgccaccgccatcagacccga

SEQ ID NO: 144437 - DNA, 286 bp, Homo sapiens; identical to SEQ ID NO: 17197
  chr2:241286543-241286829
  hypo

SEQ ID NO: 144438 - DNA, 265 bp, Homo sapiens; identical to SEQ ID NO: 107746
  chr2:241306312-241306577
  hypo

SEQ ID NO: 144439 - DNA, 312 bp, Homo sapiens
  chr2:241314525-241314837
  hypo
actcggtttccccaccgctctttggattcaagctgctgcaaagccctccccagcctgggtgtcgagaagttgcttggcccagtcgcatggcacgcccaggcagtggggcccgcagacagcgtgggcaccgtttacggatgaatcgacgagcccctcttcgcctccatccctacgcgatgcacttccccattctcctgacaccgcatgggctgtttctgacttccagctaccaggagcaaggctgccatgacctcctgtgtgtgtacatcgtgctgccgtcacacgtgccccgatttccgcagggtgcccacg

SEQ ID NO: 144440 - DNA, 30 bp, Homo sapiens
  chr2:241316160-241316190
  hypo
atactaattacaaggcgacagagccagatg

SEQ ID NO: 144441 - DNA, 195 bp, Homo sapiens; identical to SEQ ID NO: 17198
  chr2:241328245-241328440
  hypo

SEQ ID NO: 144442 - DNA, 173 bp, Homo sapiens
  chr2:241338270-241338443
  hypo
ctgtccagcaggccacggggcagcccgcaggcgccagggtgtggggtgccccacttcatcttttcacatccactcggagtgcatccccccaaaactctgagcgtgtggggctggtgggggcattgaggctgtgctgcctccccaggtccccccaaaagcgagtgctgggttcc

SEQ ID NO: 144443 - DNA, 30 bp, Homo sapiens
  chr2:241339605-241339635
  hypo
cccacaactttgaggcgcagccttcccctc

SEQ ID NO: 144444 - DNA, 30 bp, Homo sapiens
  chr2:241339994-241340024
  hypo
gcccaggaggtgggacggtcgatgcctgcc

SEQ ID NO: 144445 - DNA, 30 bp, Homo sapiens
  chr2:241340342-241340372
  hypo
gggccggggagggaccgtgggtgcatgttg

SEQ ID NO: 144446 - DNA, 341 bp, Homo sapiens
  chr2:241350507-241350848
  hypo
caggtgtgagggaggcggccccaccatcgcaggtgcgagggaggctggcccccagcatggcaggtgcgagggaggcggccccaccatcacaggtgcgagggaggccggcccccagcatggtaggtgcgaaggaggtgggcccccaccatcaaaggtgcgagggaggcagcccccaccatcgcagctgcgagggaggcggccccaccatcacaggtgccagggaggccggcccccagcatggcaggtgcgaaggaggcgggcccccagcatggcaggtgcgagggaggtgggcccccagcatggcaggtgcgagggaggcgggcccccgccatcgaaggccc

SEQ ID NO: 144447 - DNA, 349 bp, Homo sapiens
  chr2:241352749-241353098
  hypo
gggagtggacggacgcgcaggagtgccacgcggggccagacagtctgtgttgcgttgcactgggctcctcggctccctcacacggagtgggtggagctgggaggacttgggtccagtcgggacacccggctctggccttgccctccccgaccagccatggggtcctctgtgtcctcacatgacagccagccccactcgcttctgctatgatgtctgccaggggccgctggatccagtgacgctgaaccccagggaggggttctcaggtgcatcctgagacagcaggcctcatgactcctccccactccctctctctctccatcggctttgtggccgtgttgtcatggga

SEQ ID NO: 144448 - DNA, 237 bp, Homo sapiens
  chr2:241364405-241364642
  hypo
gaccccgcaaaaacacgcacccatgtgcccctggtggcagagacaaacacagctacagcagcgctcttgaaaccacacgattgtccagccacggtggcctgggcatggagaccacaggcgctcacaacggaaggccacctgaggacgagaagtgggcagcaacgcaggtggtgctcaggatcgagagaccgaggtcagcgccagggagagtgccaggcccggcggcccagtccatgg

SEQ ID NO: 144449 - DNA, 214 bp, Homo sapiens; identical to SEQ ID NO: 65244
  chr2:241373309-241373523
  hypo

SEQ ID NO: 144450 - DNA, 219 bp, Homo sapiens; identical to SEQ ID NO: 107747
  chr2:241374396-241374615
  hypo

SEQ ID NO: 144451 - DNA, 332 bp, Homo sapiens; identical to SEQ ID NO: 38824
  chr2:241375297-241375629
  hypo

SEQ ID NO: 144452 - DNA, 30 bp, Homo sapiens
  chr2:241378371-241378401
  hypo
ccccgggtgcccctgcgctgccaggagccc

SEQ ID NO: 144453 - DNA, 74 bp, Homo sapiens
  chr2:241378903-241378977
  hypo
tggagcgggcaccagcgtgccctggagcctgtaccaagcacccactcgttgggcccctccgaaggaatcttttc

SEQ ID NO: 144454 - DNA, 600 bp, Homo sapiens
  chr2:241379289-241379889
  hypo
agcgtgaggaccgagcggagcccaggggagccctgatccgacagggccacctgcgtgatgcaatggcctgggtccctgctggaccgccaagcctcccatgccaggcaggccacagcactcctcaggcacagatgcccccacccccatcccatccccggtgtccccgggccttttcacaggagagaaagggaataatcgtgacctcctgtgaaggtggccaggagggagaaggtgctggggctgtgcacctcgtgggcagcctcgggctgtgtcccccctctccccggacaccctctgcaaaggcccacacacacccctctcagttaatggcatccggtaccctaagagcactcatgaacccgggtgctcttagaacacggggaaacccggcttgtggagcgtttcccatgactgtctggttaacacatcagacggaaggggtctttgtagacctgttttacaaatgagtaaaccgaagcctggtgaagcgctcctcttagggccagatctggctacagcattgaccactgcccagtaaagccaggccaggctgcttgtcccaggctctgcacttcttggaaggctcgtgcttttcccagc

SEQ ID NO: 144455 - DNA, 30 bp, Homo sapiens
  chr2:241380227-241380257
  hypo
ccagctcctcctggccgtgccgcccagaga

SEQ ID NO: 144456 - DNA, 799 bp, Homo sapiens
  chr2:241380566-241381365
  hypo
ctccctacagcaggacggggggcatacctacctggtggccgaaccgcagggctgcacatcagacctcggaggagagcttagtgggtgtctgagcatgcccatgtctgttctatggcatccatgtgcatggcacaggtgtcagccatgggctggcactagacaggagacgagccaggggaggggctcacccgaagccacactggtcaggtctggcctggggccccacatctgccgtgcccgggccagtgagaggctggacgccttttcttaagccagaccgtcctcacagggcctggctcagttatttcagatcaagactggacccgtggtggaggctggggtgggcactcctacatgcggggcctctgcccagccctggccctgtccagtgtcgacgtgcccagagccctgagccggcctggatcttgccagtcgccagcacagccctgtggggcccgggatcttgcccactttacgtgggggctccagacaggagccgcctgcccggagcctgggctcctcgctgccgtgcctgtggtggcttttctttgtctgggaacaggcctgggcaggtgccctgagccgcttgaagtctcctgacggggtggggggtgcagtgtagggtgttgaggcttgggccagggaagcgggcggttctccctccacctccaggccccacacccaggcgggagcacgcagcagccaggtgttgggtgagggctatgctgaggagcagggcccagagctgcagcctccttggctgcccttggcccgccgtgggtggcggggaagtacaggt

SEQ ID NO: 144457 - DNA, 115 bp, Homo sapiens
  chr2:241381611-241381726
  hypo
gggcatcggccaacacgtaccctccctgttgccggggcccccgcctgggcaggcctgagctccacacagggtggggaaggccccgagtccctcccggtaccgggtggggctgggt

SEQ ID NO: 144458 - DNA, 30 bp, Homo sapiens; identical to SEQ ID NO: 65251
  chr2:241383502-241383532
  hypo

SEQ ID NO: 144459 - DNA, 31 bp, Homo sapiens; identical to SEQ ID NO: 17201
  chr2:241384030-241384061
  hypo

SEQ ID NO: 144460 - DNA, 31 bp, Homo sapiens; identical to SEQ ID NO: 65253
  chr2:241385468-241385499
  hypo

SEQ ID NO: 144461 - DNA, 31 bp, Homo sapiens; identical to SEQ ID NO: 65254
  chr2:241388730-241388761
  hypo

SEQ ID NO: 144462 - DNA, 30 bp, Homo sapiens
  chr2:241390159-241390189
  hypo
tgggcagattccccccgacatcatttagac

SEQ ID NO: 144463 - DNA, 30 bp, Homo sapiens; identical to SEQ ID NO: 107750
  chr2:241392503-241392533
  hypo

SEQ ID NO: 144464 - DNA, 31 bp, Homo sapiens; identical to SEQ ID NO: 107751
  chr2:241393135-241393166
  hypo

SEQ ID NO: 144465 - DNA, 381 bp, Homo sapiens; identical to SEQ ID NO: 107752
  chr2:241393198-241393579
  hypo

SEQ ID NO: 144466 - DNA, 30 bp, Homo sapiens; identical to SEQ ID NO: 17203
  chr2:241401855-241401885
  hypo

SEQ ID NO: 144467 - DNA, 30 bp, Homo sapiens; identical to SEQ ID NO: 65257
  chr2:241402771-241402801
  hypo

SEQ ID NO: 144468 - DNA, 30 bp, Homo sapiens; identical to SEQ ID NO: 65258
  chr2:241403525-241403555
  hypo

SEQ ID NO: 144469 - DNA, 30 bp, Homo sapiens; identical to SEQ ID NO: 17204
  chr2:241405181-241405211
  hypo

SEQ ID NO: 144470 - DNA, 30 bp, Homo sapiens; identical to SEQ ID NO: 17205
  chr2:241407583-241407613
  hypo

SEQ ID NO: 144471 - DNA, 30 bp, Homo sapiens; identical to SEQ ID NO: 65261
  chr2:241439597-241439627
  hypo

SEQ ID NO: 144472 - DNA, 30 bp, Homo sapiens; identical to SEQ ID NO: 17206
  chr2:241440208-241440238
  hypo

SEQ ID NO: 144473 - DNA, 30 bp, Homo sapiens; identical to SEQ ID NO: 17207
  chr2:241451552-241451582
  hypo

SEQ ID NO: 144474 - DNA, 30 bp, Homo sapiens
  chr2:241460649-241460679
  hypo
cagaatcggagccgcgggaactagatcgtc

SEQ ID NO: 144475 - DNA, 30 bp, Homo sapiens
  chr2:241490904-241490934
  hypo
ttaggacagcctatgcgaaccacagttctt

SEQ ID NO: 144476 - DNA, 30 bp, Homo sapiens
  chr2:241498146-241498176
  hypo
actggctagctttccggggactaaggacta

SEQ ID NO: 144477 - DNA, 158 bp, Homo sapiens; identical to SEQ ID NO: 65264
  chr2:241502880-241503038
  hypo

SEQ ID NO: 144478 - DNA, 30 bp, Homo sapiens
  chr2:241512450-241512480
  hypo
cctgacaggctccccggccggggctatggg

SEQ ID NO: 144479 - DNA, 30 bp, Homo sapiens; identical to SEQ ID NO: 65265
  chr2:241512720-241512750
  hypo

SEQ ID NO: 144480 - DNA, 96 bp, Homo sapiens
  chr2:241513635-241513731
  hypo
atcgatgtcatccacgaggtggcccacagttggttcggcaacgctgtcaccaacgccacgtgggaagagatgtggctgagcgagggcctggccacc

SEQ ID NO: 144481 - DNA, 30 bp, Homo sapiens; identical to SEQ ID NO: 17208
  chr2:241516339-241516369
  hypo

SEQ ID NO: 144482 - DNA, 30 bp, Homo sapiens; identical to SEQ ID NO: 65267
  chr2:241530259-241530289
  hypo

SEQ ID NO: 144483 - DNA, 30 bp, Homo sapiens; identical to SEQ ID NO: 65268
  chr2:241533374-241533404
  hypo

SEQ ID NO: 144484 - DNA, 30 bp, Homo sapiens; identical to SEQ ID NO: 17209
  chr2:241533679-241533709
  hypo

SEQ ID NO: 144485 - DNA, 30 bp, Homo sapiens
  chr2:241538121-241538151
  hypo
aggtgactggagcccgagggcctgacaggt

SEQ ID NO: 144486 - DNA, 879 bp, Homo sapiens
  chr2:241541852-241542731
  hypo
ccggctccacctgagcgctgccctcgctggcagccctgccttgctctgctgccattccgtaagccctgcaggcaggccccttggcgcccttcagccgtgttcatgattgtctcctggcctctgctgtttagaggtctaatgccctccgcccccggcgagccaaacccagtgatggtggttcctgccaccagcttcctgtggcaccgctgccactcccgccaggctcctggggcaccgccaccactcccgccaggctcctggggcaccgccggccactcccgccaggctcctggggcaccgccgcccactccctccaggctcctggggcaccgccgccactcccgccaggctcctggggcaccgccgccactcctgccagcctcctgcggcacagctgccactccctattaaccagcatggcacaggtgagcggtgtgaccttggtcttcccagggaaccagtgcttggcagctcacaccacacacgcctacgcctaccctccaccagccacagcagttgtggcatctctaccctgcccagcaaaagtggaagtgttgcctgtgccgctaggaacctccaggtttgctccacctccaggggccttgccagggtgtcaaacctgtgtctcgggacactgctgttaggtctccagcttccctatcaggcgcctcagcacccagtcctaccagtgctcccgcctcccgtccccagctggctgggcctgcagccccctcctgtgccccgagctggccgggcccgcagcccactccctggtcactggatgttgctgacacttcactcggtcagagccctagcacccaaggggggccagggcctgacgggggtggagcgaggggtgggccgcgtctgtgcaggctc

SEQ ID NO: 144487 - DNA, 49 bp, Homo sapiens; identical to SEQ ID NO: 17211
  chr2:241543041-241543090
  hypo

SEQ ID NO: 144488 - DNA, 55 bp, Homo sapiens; identical to SEQ ID NO: 65273
  chr2:241543512-241543567
  hypo

SEQ ID NO: 144489 - DNA, 82 bp, Homo sapiens
  chr2:241544692-241544774
  hypo
atgtgggctgaagaccgtctccccaccatggtgggaagggacaaagggtggccctggcagatccggacgggcaggactgggt

SEQ ID NO: 144490 - DNA, 195 bp, Homo sapiens; identical to SEQ ID NO: 17212
  chr2:241544974-241545169
  hypo

SEQ ID NO: 144491 - DNA, 30 bp, Homo sapiens
  chr2:241545944-241545974
  hypo
tgatagctgtggatgcggccgtgacatcct

SEQ ID NO: 144492 - DNA, 48 bp, Homo sapiens; identical to SEQ ID NO: 17213
  chr2:241555875-241555923
  hypo

SEQ ID NO: 144493 - DNA, 30 bp, Homo sapiens; identical to SEQ ID NO: 65277
  chr2:241559777-241559807
  hypo

SEQ ID NO: 144494 - DNA, 31 bp, Homo sapiens; identical to SEQ ID NO: 17214
  chr2:241580623-241580654
  hypo

SEQ ID NO: 144495 - DNA, 31 bp, Homo sapiens; identical to SEQ ID NO: 17215
  chr2:241580866-241580897
  hypo

SEQ ID NO: 144496 - DNA, 34 bp, Homo sapiens; identical to SEQ ID NO: 65280
  chr2:241581262-241581296
  hypo

SEQ ID NO: 144497 - DNA, 30 bp, Homo sapiens; identical to SEQ ID NO: 65281
  chr2:241581615-241581645
  hypo

SEQ ID NO: 144498 - DNA, 30 bp, Homo sapiens; identical to SEQ ID NO: 65282
  chr2:241581942-241581972
  hypo

SEQ ID NO: 144499 - DNA, 31 bp, Homo sapiens; identical to SEQ ID NO: 65283
  chr2:241628004-241628035
  hypo

SEQ ID NO: 144500 - DNA, 116 bp, Homo sapiens; identical to SEQ ID NO: 65284
  chr2:241631409-241631525
  hypo

SEQ ID NO: 144501 - DNA, 41 bp, Homo sapiens; identical to SEQ ID NO: 17217
  chr2:241655277-241655318
  hypo

SEQ ID NO: 144502 - DNA, 31 bp, Homo sapiens; identical to SEQ ID NO: 17218
  chr2:241656740-241656771
  hypo

SEQ ID NO: 144503 - DNA, 30 bp, Homo sapiens
  chr2:241657442-241657472
  hypo
acctcgccctgcaggcggccctaccgtatg

SEQ ID NO: 144504 - DNA, 30 bp, Homo sapiens; identical to SEQ ID NO: 65287
  chr2:241659765-241659795
  hypo

SEQ ID NO: 144505 - DNA, 161 bp, Homo sapiens; identical to SEQ ID NO: 65288
  chr2:241660273-241660434
  hypo

SEQ ID NO: 144506 - DNA, 30 bp, Homo sapiens
  chr2:241660720-241660750
  hypo
taagctctgccctgccgcctcctgcccatg

SEQ ID NO: 144507 - DNA, 243 bp, Homo sapiens
  chr2:241661234-241661477
  hypo
tggcactgacgcagacgtggctgtgtgtgtactctctgttgaatgtgtgcgtgagcaggcgcaagcactgtggacagagcacacgcgtggtcaggggccaggcctcccgggaccctgctcagacagccttgcaggctcttctacccacccctccccagacacaggtgggttccgacgccagagcacagtgggtcaaggtgggcagcacctccaccccgcccaggtcatcgggtgagcccagga

SEQ ID NO: 144508 - DNA, 30 bp, Homo sapiens; identical to SEQ ID NO: 17219
  chr2:241664424-241664454
  hypo

SEQ ID NO: 144509 - DNA, 30 bp, Homo sapiens
  chr2:241689045-241689075
  hypo
ttccaggcagccaagcgctctcacatctgt

SEQ ID NO: 144510 - DNA, 340 bp, Homo sapiens; identical to SEQ ID NO: 17220
  chr2:241689803-241690143
  hypo

SEQ ID NO: 144511 - DNA, 150 bp, Homo sapiens
  chr2:241697788-241697938
  hypo
cggaaccaggggaagcggtcatagaaggggtctccgccggtcaccacgttgtcacagtcctcgatgacactggagggcacctctgcagcgcggtcgtacatctcccgcatcaggtccagacgctgcctgcagggacggcaggggtcaatg

SEQ ID NO: 144512 - DNA, 30 bp, Homo sapiens
  chr2:241702697-241702727
  hypo
cctgccgggcctgctcggggtggttgaacc

SEQ ID NO: 144513 - DNA, 30 bp, Homo sapiens; identical to SEQ ID NO: 65291
  chr2:241717108-241717138
  hypo

SEQ ID NO: 144514 - DNA, 31 bp, Homo sapiens; identical to SEQ ID NO: 65292
  chr2:241717833-241717864
  hypo

SEQ ID NO: 144515 - DNA, 31 bp, Homo sapiens; identical to SEQ ID NO: 65293
  chr2:241718184-241718215
  hypo

SEQ ID NO: 144516 - DNA, 30 bp, Homo sapiens
  chr2:241721018-241721048
  hypo
tctgacagttccacgcggttatcaccgctc

SEQ ID NO: 144517 - DNA, 1185 bp, Homo sapiens
  chr2:241721304-241722489
  hypo
ttggaactcctcacacgggccgcacagctcttcacaattcacacagttctctgtccccacacagccaccgccgagttccctgtgcgtttcccagtgagcacctcgcggatccccgtggtggcgcccgccctgtctcacgcattcccacgctggctcactccgttcctgccggtccctcgaacgctttcacggctgcccacgcggttcctcacacagtccccagcgtcgccccaggcagcttcacacgtggcgcgctccgcggcacctccgactccacacgcgcccgcctccccctgtggccccgtcacgcctacggctgctcagagtccagcacgcctgtcacccgcttcctctcagggctccccagccctctccatgtccgaggggctcctccgcgcccctttcagctcctcccagggcccccacgccccccgggccacactttcccacctcggtgtctcccagcagcccccgccccaggccctgccgtgaggccgccccggacgccctccgtccccgcaggcacaggcaccgcacggggcctcccacacccgctttcttccttcccgggatccacccccacgtcccccatctcccagcgcactcactgcccgccccgcccctcaccacagggcgccaatgcagggcagacaccgccaccagcctcccgcacctgccccggggctgaaggaagccgcttaccttgttgggtccggagtcctgaaaaggaaaagacagagagaggctgaggcccggagcgaagctggcgcgggctgtgggggcggaagagcaggcggcccggctgcctcgccctggccatgactcaggctctaccaccccgtggtctcctagacagcagctcccccaggcagggtccctccagggccgcccttcccgggcccaggcctgggctgcctgctgcacggggccaactgtggccatagccccactttacaggcggggaaactgagggtcccgggagaaaccagggcccctaccccttctccagcatgtgacactctggccatctccgggctctcccttgaacctggccacctcccagacacagggcccggaaacgagggtgacaggggcaggatggggcgccaaagaccctctggggttctggctatggaagccgggccgggccactcaccatttcagccagggcggagatgaccttgc

SEQ ID NO: 144518 - DNA, 458 bp, Homo sapiens; identical to SEQ ID NO: 65295
  chr2:241724228-241724686
  hypo

SEQ ID NO: 144519 - DNA, 174 bp, Homo sapiens
  chr2:241727447-241727621
  hypo
gcccgccccccgcttcgtgcctgtgggatgatgccctgctggtccttctcctgcttgcccatcatggtgtaggacttgccggcacccgtctgcccataggcgaagatgcacacgttgtatccctcaaaggcatgctgcagcatctcctcgccgatgtcccggtacacctgcttc

SEQ ID NO: 144520 - DNA, 157 bp, Homo sapiens
  chr2:241750152-241750309
  hypo
gatgacactccaggagcgatcagcaccgaattcatggtgctgggcgtggagggggtctaagggcctggacgccaccaaggccactcgatgtgcccgccatggtgacgtggaaggacctccttcccgccaggccccatctgtccgtcttcctccccag

SEQ ID NO: 144521 - DNA, 30 bp, Homo sapiens
  chr2:241757727-241757757
  hypo
aaggctgccctcctccgatcccacgctggg

SEQ ID NO: 144522 - DNA, 113 bp, Homo sapiens
  chr2:241776235-241776348
  hypo
gggatctgcttgtggcgcactggacggccgggtgctgactcagtgtctggccagcagcaactgggctggggccagatcccatcgcagcgcagccgtgtcggcaggcagctgct

SEQ ID NO: 144523 - DNA, 31 bp, Homo sapiens; identical to SEQ ID NO: 17224
  chr2:241789957-241789988
  hypo

SEQ ID NO: 144524 - DNA, 31 bp, Homo sapiens; identical to SEQ ID NO: 65298
  chr2:241817567-241817598
  hypo

SEQ ID NO: 144525 - DNA, 31 bp, Homo sapiens; identical to SEQ ID NO: 65299
  chr2:241830264-241830295
  hypo

SEQ ID NO: 144526 - DNA, 31 bp, Homo sapiens; identical to SEQ ID NO: 17225
  chr2:241838794-241838825
  hypo

SEQ ID NO: 144527 - DNA, 209 bp, Homo sapiens
  chr2:241842759-241842968
  hypo
tcccagggcgttccccggggggcccagccaggctccggccaaggcctaccctgtgggttcttctagtctagccatggccctggtctgggagccccataatggacaccccgcagtgaggccttggggggcatgcacggggctgggccagccctcgcgccctggaaaggcatcctggggggactccgggccaccgccggcaggcgtgggct

SEQ ID NO: 144528 - DNA, 30 bp, Homo sapiens
  chr2:241843268-241843298
  hypo
aggctgaactgcaggcggccacgcccaccc

SEQ ID NO: 144529 - DNA, 116 bp, Homo sapiens; identical to SEQ ID NO: 65301
  chr2:241858347-241858463
  hypo

SEQ ID NO: 144530 - DNA, 91 bp, Homo sapiens
  chr2:241861963-241862054
  hypo
ccggctggagaccaccgaggctcagctgcggaggtcagagctggagcacagcgtggatctggaggaggcccttggccgtctggaggctgcc

SEQ ID NO: 144531 - DNA, 184 bp, Homo sapiens
  chr2:241862319-241862503
  hypo
ggggagaccccaggccgagtggaaacagtgaaacactcagcctcctgggctcagcgtgggcctctcacgcaaccaggcaccaccgtcccagcctctgagagcggctcagcagcatccctattatagtagctgcatcacgattgtacccatcgctatcagacccctcccccgctccacaggccag

SEQ ID NO: 144532 - DNA, 30 bp, Homo sapiens; identical to SEQ ID NO: 17227
  chr2:241864767-241864797
  hypo

SEQ ID NO: 144533 - DNA, 104 bp, Homo sapiens; identical to SEQ ID NO: 17228
  chr2:241865149-241865253
  hypo

SEQ ID NO: 144534 - DNA, 30 bp, Homo sapiens; identical to SEQ ID NO: 17229
  chr2:241865564-241865594
  hypo

SEQ ID NO: 144535 - DNA, 30 bp, Homo sapiens
  chr2:241871724-241871754
  hypo
ctcctcccagactctcggagcaaaccctgc

SEQ ID NO: 144536 - DNA, 269 bp, Homo sapiens
  chr2:241872035-241872304
  hypo
cctcaggactgtctgcgcggtccccaccaaatcatggccctgtgctctgggcccctctatcccttcctctctgcaccttgaaggtggcccaggaggacgcccggtgcctggagctggcaggtagcagcatcactgaattgggggagccacggcgcccactgaggagcccccaacgtgccacatccccccatcaaggggcgtccccaccacacatctgctccccagccaccctggaccccgcactgcaggccatgcgggcagccatagag

SEQ ID NO: 144537 - DNA, 76 bp, Homo sapiens
  chr2:241872594-241872670
  hypo
ccaggagcagctgtccgaaagccggcgggagctgtgggccgcacagaagctccagcaggagcgggctcgggagcag

SEQ ID NO: 144538 - DNA, 30 bp, Homo sapiens; identical to SEQ ID NO: 65306
  chr2:241889029-241889059
  hypo

SEQ ID NO: 144539 - DNA, 161 bp, Homo sapiens; identical to SEQ ID NO: 65307
  chr2:241896340-241896501
  hypo

SEQ ID NO: 144540 - DNA, 298 bp, Homo sapiens; identical to SEQ ID NO: 17231
  chr2:241896819-241897117
  hypo

SEQ ID NO: 144541 - DNA, 31 bp, Homo sapiens; identical to SEQ ID NO: 65309
  chr2:241903090-241903121
  hypo

SEQ ID NO: 144542 - DNA, 31 bp, Homo sapiens; identical to SEQ ID NO: 65310
  chr2:241908035-241908066
  hypo

SEQ ID NO: 144543 - DNA, 30 bp, Homo sapiens
  chr2:241911767-241911797
  hypo
gcggggtgggagcggcgctctccggtgcac

SEQ ID NO: 144544 - DNA, 31 bp, Homo sapiens; identical to SEQ ID NO: 17232
  chr2:241937929-241937960
  hypo

SEQ ID NO: 144545 - DNA, 147 bp, Homo sapiens; identical to SEQ ID NO: 65312
  chr2:241971086-241971233
  hypo

SEQ ID NO: 144546 - DNA, 92 bp, Homo sapiens; identical to SEQ ID NO: 65313
  chr2:241988025-241988117
  hypo

SEQ ID NO: 144547 - DNA, 219 bp, Homo sapiens; identical to SEQ ID NO: 65314
  chr2:241989255-241989474
  hypo

SEQ ID NO: 144548 - DNA, 30 bp, Homo sapiens; identical to SEQ ID NO: 17234
  chr2:241991115-241991145
  hypo

SEQ ID NO: 144549 - DNA, 251 bp, Homo sapiens; identical to SEQ ID NO: 65316
  chr2:241992476-241992727
  hypo

SEQ ID NO: 144550 - DNA, 30 bp, Homo sapiens; identical to SEQ ID NO: 65317
  chr2:241993288-241993318
  hypo

SEQ ID NO: 144551 - DNA, 730 bp, Homo sapiens
  chr2:242004392-242005122
  hypo
ccagtgagggagccacgagggggtcccctctccctagagggcccaacggtctccaagggcagagcgtctggccgctgcttgcccaggccccttccctgaggaacagggaggggataaaatcccccggtgggcttgaaacacggtcacacattcaaaagtgtgaccctcctggaggtacgtggccagggacaaagaaggactctgccagcgatggctgtgtcaggcccaagagccagacccggctgagccgccgacgggagccaggcatgcatagctaacggctgaccagtcccctccccttgttttgacccaaaccctgaagagctcttcccaccgacggccctcaagatggagagagtggaggagagtggggtctctatctcctggaacccgcccaatggtccagccgccaggcagatgcttgatggctacgcggtcacctacgtctcctccgacggctcctaccgccgcacagactttgtggacaggacccgctcctcgcaccagctccaggccctggcggccggcagggcctacaacatctccgtcttctcagtgaagcgaaacagtaacaacaagaatgacatcagcaggcctgccgtgctgctggcccgcacgcgtgagtgtccccgagcctggccgtccctgcccagcccctgcccctcgagggcagcgctggccccggcacctgcagggcggctgtcatgccgtccaccctcctagttcttgc

SEQ ID NO: 144552 - DNA, 353 bp, Homo sapiens
  chr2:242009175-242009528
  hypo
tgccagcccacaccccgcctcggcactgtaccattctccataataaagaatctggcttccagcaaggctgcggcagcccatgtccggttctcaaaccgtgttcttgccagaagaccctgtgggcaccccctcacctctccctgctcctgcctcatccagggcccctgcctccagcaaacctgaccgccgcccgagtcactgccacctctgcccacgtggtctgggatgccccgactccaggcagcttgctggaggcttatgtcatcaatgtgaccaccagccagagcaccaagagccgctatgtccccaacgggaagctggcgtcctacacggtgcgcgacctgctgccggga

SEQ ID NO: 144553 - DNA, 493 bp, Homo sapiens
  chr2:242010982-242011475
  hypo
ctctgcagcccccagggatggcgctgacagacgctggcaccagggaggacaccaccctcgggtgctcaagaacagaccgcccccggcgcgcctgccggagctgcgcctgctcaatgaccacagcgcccccgagacccccacccagccccccaggtacatgccccacccatcggccccatcgcccgaggcggcgctcggactgtggtgaccctcccaccctctctgcaggttctcggagcttgtggacggcagaggaagagtgagcgccaggttcggtggctcacccagcaaagcagccaccgtgagatcacgtgagtgccagggcctccccacccaccttggtggcccaccctcgtcctcactgccactctcaccaggtcctgtcccctacatgatgagcccacccccaccgccagcgcagtctccagccagtgacccccaccccgactgtgcacaaggcgcggggctcgtgggccgccggcagcatgcacct

SEQ ID NO: 144554 - DNA, 30 bp, Homo sapiens
  chr2:242011711-242011741
  hypo
ctggcaagatcttcccggtggcagcaaggc

SEQ ID NO: 144555 - DNA, 30 bp, Homo sapiens
  chr2:242021396-242021426
  hypo
aggtgctgcccatcacgggggtcagaacag

SEQ ID NO: 144556 - DNA, 221 bp, Homo sapiens
  chr2:242021671-242021892
  hypo
actgcccttctttgtcgcagcctgtataaaggtgtcccgcccctgcacaaggctgttctccgagacaaaggcctttccagtctgggagggaggcgtctgtcaccacgtgtaagttggtttctgtcctccgccttaccgcatttgtcgtgtgttcttgactcctcaaagtgctgtctcaaagctacccagctaaccctgaggagggacgatggctgcagtca

SEQ ID NO: 144557 - DNA, 30 bp, Homo sapiens; identical to SEQ ID NO: 65321
  chr2:242031602-242031632
  hypo

SEQ ID NO: 144558 - DNA, 149 bp, Homo sapiens
  chr2:242065196-242065345
  hypo
cgctcacatccctctcggcctgtctgtgtgaccactgaggtgggggctggtgggaggtggagagacagactctagcgtgacacccccacgcttctcctgctcccgacgggatctccccaggctgctgggaggagcggctctctaagtgt

SEQ ID NO: 144559 - DNA, 30 bp, Homo sapiens; identical to SEQ ID NO: 65322
  chr2:242066188-242066218
  hypo

SEQ ID NO: 144560 - DNA, 31 bp, Homo sapiens; identical to SEQ ID NO: 17239
  chr2:242072560-242072591
  hypo

SEQ ID NO: 144561 - DNA, 31 bp, Homo sapiens; identical to SEQ ID NO: 17240
  chr2:242074733-242074764
  hypo

SEQ ID NO: 144562 - DNA, 93 bp, Homo sapiens; identical to SEQ ID NO: 17241
  chr2:242076562-242076655
  hypo

SEQ ID NO: 144563 - DNA, 111 bp, Homo sapiens; identical to SEQ ID NO: 65326
  chr2:242102769-242102880
  hypo

SEQ ID NO: 144564 - DNA, 315 bp, Homo sapiens
  chr2:242122191-242122506
  hypo
ccctcccctccgtgcggcagatcgatgccacgttcgtcaggttctgagtccttcttggctcctcatgtggtccctctcctcggaagaactgcccagccacgggtttttaacccacctgttgctcctgaggtcgtcactatatcaacagtcacaaacccaatggcaataaaggcactgacgatagctggcgcgcgcgacgtcacacaccattttcagatgccgttgcaattaaatcttgccacactgtcctcctgggtgattgttgacagttattgtagccacagagagaacataagacacgttgcgttcattcgc

SEQ ID NO: 144565 - DNA, 935 bp, Homo sapiens
  chr2:242128593-242129528
  hypo
ctcccagcctggggccggggccgagtcctaacactgagacctggctcgggcttcagggttaggcaggtgcaggcggcccaggctcagtctctgtccctctgggcctccgctaatgtgaagtgaagggtagaactagaaggctgcccctccgacctcctgcggcgcctccatggtcacaccctccggtcatcgtcgcagctccaaatgccagccccagctcgaaccctctccttccagggccacagatgtcgtgctcctggccccgttttgccagcccaagactaggagccacggcacctgtcctcccacagagagagacccccggggcgaaggtgcgggaggaagctgggacccccaagagttgtgaggccgggctccatcaggcccgccttgctggggagctcagggcctatgggtcctggcactgggtcctcaggccatgagcgaaggcaggcgacttgaggggtttcctgtccctggctcacatggctccaccctacggataagagagggagaggtgtctgtactccaggcccacctttctgggccttctcaggctccactgagtacccaggcagagtggacggcattcagggctgggggacacgggcactcactggatggacagacagacgcctgctgtgccaggcctgccagacgctcccgccccggcactggtttcttcctggagctcgtggctggctagggggttctccatgtgctcatggccaggagagtctgccgagccagcccagccccattctactccgagtcgagtctgtaaagtgagctcactgcaggcagtgtggtggccccaggaacgggtctcacccatcccctctctgacccccatccccacccggccttgctgggtgcaggagcaggatgctgcggcgacgggcccaggaagaggacagcaccgtcctgatcgatgt

SEQ ID NO: 144566 - DNA, 30 bp, Homo sapiens
  chr2:242130057-242130087
  hypo
ttctcctgggccacacgtctgccccagcag

SEQ ID NO: 144567 - DNA, 46 bp, Homo sapiens
  chr2:242130372-242130418
  hypo
ctctggccctgcctgccgctccccgcgcctgcgcatcctgtgcccc

SEQ ID NO: 144568 - DNA, 30 bp, Homo sapiens; identical to SEQ ID NO: 65330
  chr2:242138763-242138793
  hypo

SEQ ID NO: 144569 - DNA, 30 bp, Homo sapiens
  chr2:242139769-242139799
  hypo
ggtgcgcacgcttatcgcgtgtctgcattt

SEQ ID NO: 144570 - DNA, 30 bp, Homo sapiens; identical to SEQ ID NO: 65331
  chr2:242141853-242141883
  hypo

SEQ ID NO: 144571 - DNA, 53 bp, Homo sapiens; identical to SEQ ID NO: 65332
  chr2:242142972-242143025
  hypo

SEQ ID NO: 144572 - DNA, 30 bp, Homo sapiens; identical to SEQ ID NO: 17242
  chr2:242143523-242143553
  hypo

SEQ ID NO: 144573 - DNA, 179 bp, Homo sapiens
  chr2:242148772-242148951
  hypo
tggagtactggaagcggaagagcgccacgctggcctaccgctgggactgctctgactacgaggacactgaggtgagccacccccgctggaccacggtcacacccggcgagggccgccactgagcaccggctcccttccaggagaggcctcggccccagtttgccgcctcagcccccatg

SEQ ID NO: 144574 - DNA, 30 bp, Homo sapiens; identical to SEQ ID NO: 17243
  chr2:242165215-242165245
  hypo

SEQ ID NO: 144575 - DNA, 31 bp, Homo sapiens; identical to SEQ ID NO: 17244
  chr2:242167883-242167914
  hypo

SEQ ID NO: 144576 - DNA, 68 bp, Homo sapiens
  chr2:242169266-242169334
  hypo
gtccagggtgcgtcccgcaccacaaagcctctggaaggtgccttggcctcttcgtgtgctgggggttt

SEQ ID NO: 144577 - DNA, 360 bp, Homo sapiens; identical to SEQ ID NO: 17245
  chr2:242169866-242170226
  hypo

SEQ ID NO: 144578 - DNA, 30 bp, Homo sapiens; identical to SEQ ID NO: 65338
  chr2:242177535-242177565
  hypo

SEQ ID NO: 144579 - DNA, 30 bp, Homo sapiens
  chr2:242180137-242180167
  hypo
ctcgtgtagtgcgacgcccttgtgtggcag

SEQ ID NO: 144580 - DNA, 31 bp, Homo sapiens; identical to SEQ ID NO: 17246
  chr2:242182172-242182203
  hypo

SEQ ID NO: 144581 - DNA, 139 bp, Homo sapiens; identical to SEQ ID NO: 17247
  chr2:242190664-242190803
  hypo

SEQ ID NO: 144582 - DNA, 30 bp, Homo sapiens
  chr2:242191007-242191037
  hypo
cccaaaggtaacacacgcgacgtgtgcact

SEQ ID NO: 144583 - DNA, 30 bp, Homo sapiens; identical to SEQ ID NO: 65341
  chr2:242202033-242202063
  hypo

SEQ ID NO: 144584 - DNA, 223 bp, Homo sapiens
  chr2:242209284-242209507
  hypo
cccgcatccaccctccgccctcccacgcttgcttgctgactctcacctggcatggtctctcactcaaggttgtcccgggctccaatgtcacttcttaaacccagacacccacccccttatcaagctaggttctgggcaagtctctagtgcccagtgacagccacactagaagtctgcaaaatgcagttccgtccatgtcagcccgcaccgactctccagcacg

SEQ ID NO: 144585 - DNA, 30 bp, Homo sapiens; identical to SEQ ID NO: 65343
  chr2:242209894-242209924
  hypo

SEQ ID NO: 144586 - DNA, 20 bp, Homo sapiens
  chr2:242233324-242233344
  hypo
agaccctgcctcaaaaaaaa

SEQ ID NO: 144587 - DNA, 23 bp, Homo sapiens
  chr2:242259919-242259942
  hypo
cttttgcggccaagcacggtggc

SEQ ID NO: 144588 - DNA, 121 bp, Homo sapiens
  chr2:242268831-242268952
  hypo
cagacatcttcatgaaatagatgagtaggaaacacctaccagcctattttattaagccagcattatcctattacaaatgacaagaaaactacagactaatatatgttagaaatgcttgttt

SEQ ID NO: 144589 - DNA, 126 bp, Homo sapiens; identical to SEQ ID NO: 38840
  chr2:242269444-242269570
  hypo

SEQ ID NO: 144590 - DNA, 173 bp, Homo sapiens
  chr2:242277163-242277336
  hypo
gacactctcaccctgaaggaacgggagcggctgaagaaaagggtgagtgaggctggcgtcctgccctccctctgggtgcgactcgggggcatggggatgaagaaaggagtgtgttcccacgctcagtctgctcaggtgtcgggaggcagggcgggagaatttttcctgcattt

SEQ ID NO: 144591 - DNA, 256 bp, Homo sapiens; identical to SEQ ID NO: 65348
  chr2:242277631-242277887
  hypo

SEQ ID NO: 144592 - DNA, 21 bp, Homo sapiens
  chr2:242314657-242314678
  hypo
gcccagccccaaatcttttca

SEQ ID NO: 144593 - DNA, 503 bp, Homo sapiens
  chr2:242350118-242350621
  hypo
acaggcgggagccatcgcccctggccaatttcttttttttattgttcacatcagagtgccttagtgtgttcagcacttcctttgcgctctcccatgtgtgtgactcagtctgctgagttggtttatcatctgaccttcacttggtgactgtttgtttcatgaaaggccttttgtgactttgctgtttcgtgaccgccttgcgttttgctcactgttgggtcactgccacttcccagggctcatttgctgtcttgctgtggagacatgtctatgttacattcagagaacatttggaattgatctctgtcttattttgaactctcttctagatacttgtttgccttgcaacttaagagagacctgctggaagagcgtttgacctgtgctgacaccacagcggcccttctcacgtcccatctcctgcagtgtgagtatctccccgccagcggggagcattcactgaccatggcacagatatacccgcactcagaactacaattagt

SEQ ID NO: 144594 - DNA, 284 bp, Homo sapiens
  chr2:242353961-242354245
  hypo
ggggagctggtttgaacggcacagactgaggtgcctacccatacagatcttaccttaccccgtaagattgtgtggatttcgtgcacctcaccactcccagtgtgggggatctcttgtgtttgcaggggagtgccttttgtgtgcccgacagcatggcagtcatgagatatacagatgcgtttctacagatgagaatgtgtgcagtgtagcgggagcatagctcatacgctgtgagctgaaagaaggccgagggcaggctcaaggaggctcgtgggaggacctag

SEQ ID NO: 144595 - DNA, 43 bp, Homo sapiens
  chr2:242354474-242354517
  hypo
actccattgtacatacggtcagaccatgcgtgcagagctccat

SEQ ID NO: 144596 - DNA, 86 bp, Homo sapiens; identical to SEQ ID NO: 65354
  chr2:242357375-242357461
  hypo

SEQ ID NO: 144597 - DNA, 30 bp, Homo sapiens; identical to SEQ ID NO: 17253
  chr2:242357707-242357737
  hypo

SEQ ID NO: 144598 - DNA, 86 bp, Homo sapiens
  chr2:242393497-242393583
  hypo
caggagtggccctttctaatttacagccctattaccccaccctagccatggcctgtttgcaaccccagcagcgtcatagcagcaca

SEQ ID NO: 144599 - DNA, 30 bp, Homo sapiens; identical to SEQ ID NO: 65356
  chr2:242434620-242434650
  hypo

SEQ ID NO: 144600 - DNA, 209 bp, Homo sapiens
  chr2:242435158-242435367
  hypo
gcccaggctcctgacggcctcttgggtgtgcagtctgcggtggcagccctgacaagccaccgcaccacgtgggtctgaaggtgtccccaatgcacagggtctcaggagcagcaatgactggcccagaccccacccccagagctgctgcccaggggcgccgggaaggggtccctgtgtgtggaccaggacttggcgcatctgccggcggc

SEQ ID NO: 144601 - DNA, 223 bp, Homo sapiens; identical to SEQ ID NO: 65358
  chr2:242435717-242435940
  hypo

SEQ ID NO: 144602 - DNA, 410 bp, Homo sapiens; identical to SEQ ID NO: 65359
  chr2:242436355-242436765
  hypo

SEQ ID NO: 144603 - DNA, 414 bp, Homo sapiens
  chr2:242438421-242438835
  hypo
gaggcaggcctccacgaactccttgaagggcttgctgtgctggccctccagtgtgggtgggctgttcttgggaatcaggaacaggacgcgcatggggtggaggtcagagtttggaggctcccccttggccagctcgatggctgtgatccccagggaccagatgtcagcctggacagaacacaaggactgttgctgccctgagcacccgagccaggcatggtgcccgcacctgcccgcccgctgcacccaccttgaagtcgtaggccgactgcttgatgacctcaggtgccatccagaagggggtgcccacgaatgtgttcctcttaatctgcgtgtctgtgagctgccctgctaccccaaagtccgccagcttcacgtcaccctgctccgagagtagcacgttggcagctgctt

SEQ ID NO: 144604 - DNA, 30 bp, Homo sapiens; identical to SEQ ID NO: 17255
  chr2:242439074-242439104
  hypo

SEQ ID NO: 144605 - DNA, 288 bp, Homo sapiens; identical to SEQ ID NO: 17256
  chr2:242439376-242439664
  hypo

SEQ ID NO: 144606 - DNA, 342 bp, Homo sapiens; identical to SEQ ID NO: 65364
  chr2:242440833-242441175
  hypo

SEQ ID NO: 144607 - DNA, 78 bp, Homo sapiens
  chr2:242459132-242459210
  hypo
gaggcactgcgcccggcagaaagaagaatttctataaacaaagagtgccattgagccatgcgacgatctaggatgtgt

SEQ ID NO: 144608 - DNA, 30 bp, Homo sapiens; identical to SEQ ID NO: 17257
  chr2:242479645-242479675
  hypo

SEQ ID NO: 144609 - DNA, 30 bp, Homo sapiens
  chr2:242491997-242492027
  hypo
gaaccctccgttccccgcccccgtctcctg

SEQ ID NO: 144610 - DNA, 30 bp, Homo sapiens
  chr2:242492302-242492332
  hypo
tgccagcctggggcacgtgcagacacacac

SEQ ID NO: 144611 - DNA, 30 bp, Homo sapiens
  chr2:242519148-242519178
  hypo
tgctggctaactcacggtgagctaatccac

SEQ ID NO: 144612 - DNA, 30 bp, Homo sapiens
  chr2:242522641-242522671
  hypo
cacccgtgtagcctcgtctccatgtgcctg

SEQ ID NO: 144613 - DNA, 661 bp, Homo sapiens
  chr2:242523725-242524386
  hypo
ccaccacacccagcccccttcttaatttcttagggaacgctttggaaaacaaacatcagcagataaaaaaaaaatgtacagcctacgcaagtgataatattcaaaatcctcagccataaaaataaaggccttttatttggtttttctatgccagtacagaaacatctggacaacactcttgagcctgcagaggctcacggccacacccacttctgccgcagggactgtctgttgaggagccgaaccgttgaggcacagtagccaggccctcccgagggctccagaagctctaggtttacggggtcaccttcttgtaggtgacgtgaagatgctgagtcattggctgtgtcgtggttgccatggagaccgtctgctcaagtttgccttcagaattcagcctgaacttccgggtgatctgagcaggagaatggaacaaagatagcttagttttatcttcaaaagattcaatcaatgcctgtgcgcccactgcatgccacacactcatcacgggctgtgagccaggcagtggccctgccagaggagggtagacacacagcccagggcccctgggcatgtcacaatccaggtgcccttcagctgcctccagaagaccaccaggggaacacagggattgtttatttagaagtcaccttttttgtcg

SEQ ID NO: 144614 - DNA, 21 bp, Homo sapiens
  chr2:242524445-242524466
  hypo
gggcctggttagtacttggat

SEQ ID NO: 144615 - DNA, 202 bp, Homo sapiens; identical to SEQ ID NO: 65368
  chr2:242554490-242554692
  hypo

SEQ ID NO: 144616 - DNA, 30 bp, Homo sapiens; identical to SEQ ID NO: 65369
  chr2:242555224-242555254
  hypo

SEQ ID NO: 144617 - DNA, 303 bp, Homo sapiens
  chr2:242566819-242567122
  hypo
gggcaagcaagaccgcgaacacgtggttcatagacgtgctaacaatgtaccctcaaggaatcgctgctggcggagaagaacactacgtccacagaacgccaccgggcactgcctctggagcgtggcttcaacccacctctgaagcccactggcccgcatccttcagtttggggaacctgcccaaaagcagacactggctagcgagctgaatagacaagtgtgcggcgctttccacataaatccctaaagaatgacccaaagagtctgtcactgaagaacaaatccacacggacagcaagaacc

SEQ ID NO: 144618 - DNA, 403 bp, Homo sapiens; identical to SEQ ID NO: 17259
  chr2:242572244-242572647
  hypo

SEQ ID NO: 144619 - DNA, 561 bp, Homo sapiens
  chr2:242578415-242578976
  hypo
tgggtccaggctcgccgcaggagataccccatctacttggtccaccggtgggcacctggtttgcactatggcacggataccatggccaccatgactgtatgctcagcccctggcgggagtgggtgtgtgggtgagtgagtgccgggtcccgccagctgtttcaagcgcaggcaccagagtgggctctgcagagcttacagctagacatgtggcaagcaactcccacggcggactccagcgtccagacaaagggacagtggattctggtgtccagacaaggggaaggtagtggcgcccaagcaggggtgcttacaaccctgaagcccaagagggggtgttgcagagtgtcagcagccctgttactcccattgccctgctccaggctatagctctggggctggctccgtccccgctgcttccctttgctgcctcctgtcacgtggggtgtcacagtgggtggctgccctttgccggcagagggcccagggccacagtgttacagccttctttgtacttgcattcattgggtccctagttcttgtcccacgtccaagaagaatg

SEQ ID NO: 144620 - DNA, 30 bp, Homo sapiens; identical to SEQ ID NO: 65371
  chr2:242581628-242581658
  hypo

SEQ ID NO: 144621 - DNA, 72 bp, Homo sapiens
  chr2:242585228-242585300
  hypo
gggaatgtatgactcgctcccaacagagggcaggattctcggggagggccggagtgcgtttctctggacgga

SEQ ID NO: 144622 - DNA, 223 bp, Homo sapiens; identical to SEQ ID NO: 65373
  chr2:242599562-242599785
  hypo

SEQ ID NO: 144623 - DNA, 253 bp, Homo sapiens
  chr2:242600212-242600465
  hypo
tcactgccccatcctccctcccgtgtttggggaaatcacttaccccctcgttccgcacgcgtgctcaggatctcaccaagtcacacctcagtccctggcctcggattagggaggctgttgctgggtgcagtggccaggaaggcgcaagggtcagggcttcctagaacctccgtccctctgggtgcaggtagcactggtgggagtgttgggggcagcttgtctgtgtggactccagctccgtcccttcgggagt

SEQ ID NO: 144624 - DNA, 30 bp, Homo sapiens
  chr2:242600915-242600945
  hypo
agaagtccgcaaagccgaagctagagaaac

SEQ ID NO: 144625 - DNA, 202 bp, Homo sapiens
  chr2:242602196-242602398
  hypo
aatcaataaagcgggccgggcgcggtggctcacgcctataatcccaacttcaaaaccaataaagtgggccgggcgcggtggctcacgcctataatcccaacttcaaaatcaataaagcgggccgggcatggtggctcacgcctataatcccaacttcaaaaccaataaagcgggccgggcgcggtggctcacgcctataatc

SEQ ID NO: 144626 - DNA, 391 bp, Homo sapiens; identical to SEQ ID NO: 65376
  chr2:242608060-242608451
  hypo

SEQ ID NO: 144627 - DNA, 215 bp, Homo sapiens
  chr2:242608727-242608942
  hypo
agcagttaaccgaatcgggggctctgttgtggatgctccgccccatttaggaggaagaaggcagatctgggcctgaaatgggacggtctctgagctgtggcgcagccccagagtgcacaccacgctccatgcacctcctgggcagggtggcagtagtggggaacatgggctggagctctgtggctcacactttttgtttgtttgtttgtttttga

SEQ ID NO: 144628 - DNA, 34 bp, Homo sapiens
  chr2:242609241-242609275
  hypo
aacctagtcacgaattcctcgtcgaactagaatt

SEQ ID NO: 144629 - DNA, 185 bp, Homo sapiens; identical to SEQ ID NO: 17262
  chr2:242610781-242610966
  hypo

SEQ ID NO: 144630 - DNA, 207 bp, Homo sapiens; identical to SEQ ID NO: 65378
  chr2:242611927-242612134
  hypo

SEQ ID NO: 144631 - DNA, 597 bp, Homo sapiens; identical to SEQ ID NO: 65379
  chr2:242616804-242617401
  hypo

SEQ ID NO: 144632 - DNA, 714 bp, Homo sapiens; identical to SEQ ID NO: 65380
  chr2:242617755-242618469
  hypo

SEQ ID NO: 144633 - DNA, 165 bp, Homo sapiens; identical to SEQ ID NO: 65381
  chr2:242618722-242618887
  hypo

SEQ ID NO: 144634 - DNA, 104 bp, Homo sapiens
  chr2:242618946-242619050
  hypo
gctgaagcgggaggatcacttgggcccaagagttgttatagcgagctttgcttgttccactgtactccagcctgggcaacagagggagacgccctctttcaaaa

SEQ ID NO: 144635 - DNA, 38 bp, Homo sapiens
  chr2:242620781-242620819
  hypo
accgtataccctccacgaacataaattcaaaatgaatc

SEQ ID NO: 144636 - DNA, 121 bp, Homo sapiens; identical to SEQ ID NO: 65382
  chr2:242636477-242636598
  hypo

SEQ ID NO: 144637 - DNA, 121 bp, Homo sapiens
  chr2:242636837-242636958
  hypo
agactctgtctcaaaaaaaaaaaaaaaaaaagtacatgggtaaactgtggaacatccggacgttggaatatttttcaaattaaacatgaactagctattaagccacggaaaggcacgctgg

SEQ ID NO: 144638 - DNA, 220 bp, Homo sapiens
  chr2:242637017-242637237
  hypo
attccaattacatgacattctggaaaaagcaaactggaaacagtaaaatgatcagtggttgccaggggcctcgggagggggagagggatgaatcgggaagcgcaggggatttttagggccacaaaactatgctgtatgacatgtaatggggggtagctgacattatacatttgtcaaaacctataagaatgcacaaggcactgggcgtggtggctcacgc

SEQ ID NO: 144639 - DNA, 25 bp, Homo sapiens
  chr2:242637569-242637594
  hypo
atgtatcgggcccgccgtggtggct

SEQ ID NO: 144640 - DNA, 25 bp, Homo sapiens
  chr2:242637773-242637798
  hypo
ggcgtggatccgggaggtggagctt

SEQ ID NO: 144641 - DNA, 80 bp, Homo sapiens; identical to SEQ ID NO: 65387
  chr2:242648696-242648776
  hypo

SEQ ID NO: 144642 - DNA, 30 bp, Homo sapiens; identical to SEQ ID NO: 65388
  chr2:242660549-242660579
  hypo

SEQ ID NO: 144643 - DNA, 246 bp, Homo sapiens; identical to SEQ ID NO: 65389
  chr2:242664009-242664255
  hypo

SEQ ID NO: 144644 - DNA, 752 bp, Homo sapiens; identical to SEQ ID NO: 65390
  chr2:242664618-242665370
  hypo

SEQ ID NO: 144645 - DNA, 21 bp, Homo sapiens
  chr2:242673150-242673171
  hypo
aagtgctttgggaggccgacg

SEQ ID NO: 144646 - DNA, 30 bp, Homo sapiens; identical to SEQ ID NO: 65391
  chr2:242678716-242678746
  hypo

SEQ ID NO: 144647 - DNA, 30 bp, Homo sapiens; identical to SEQ ID NO: 65392
  chr2:242682089-242682119
  hypo

SEQ ID NO: 144648 - DNA, 30 bp, Homo sapiens; identical to SEQ ID NO: 65393
  chr2:242688383-242688413
  hypo

SEQ ID NO: 144649 - DNA, 30 bp, Homo sapiens; identical to SEQ ID NO: 65394
  chr2:242692867-242692897
  hypo

SEQ ID NO: 144650 - DNA, 30 bp, Homo sapiens
  chr2:242704531-242704561
  hypo
agagctgccctgggcgccactgcggacccc

SEQ ID NO: 144651 - DNA, 31 bp, Homo sapiens
  chr2:242710640-242710671
  hypo
tcgcatccaggcaggccgtgttctcgcagcc

SEQ ID NO: 144652 - DNA, 108 bp, Homo sapiens
  chr2:242712092-242712200
  hypo
ggcagaggtgacaggcgtacagggcagtgtgtctggacccagatggcaggcacgttaacgaccagtgaccagggctctgcccacctggcccggcgcgttggcccccca

SEQ ID NO: 144653 - DNA, 210 bp, Homo sapiens
  chr2:242713946-242714156
  hypo
acccctgcccctgccccgaggtggccctgggcttgcccgcccgcctgcagtgtcggctgaagagggtaacgtgcgtgcgccccggctgctcccggctgctcccggctgctccccggctgctccccgctgctcccggctgctccccggctgctccccggctgctccccgctgctcccggctgctctcggctgctcccggctgctccccagc

SEQ ID NO: 144654 - DNA, 616 bp, Homo sapiens
  chr2:242716187-242716803
  hypo
agagggcgtggctcccgtcccaggaggcaggtgagcttctggggattccagttcacctgccccacagccgcaccctgcctgtgcctgcaccctggggagcccagagccggcaggggccgaggcggtgggacctcgggggagctcaagcctcgactgtcccctcgctggaggccagaggccaagatgatgtccatgctgggcggcttgcagaggtaaggggggcagttggaccccccaggtggacaaagcgcttcatctgtggctattctgagagacggacaggagtgggttttgtttgtctttcgaaggaagtgacttggatttggaggctgttcctactcaggcttccctgaattcacctgtcttggcttcgtttcggaagtagggggcccctcctgcccaggcctggtgctgcttctgggtgtttgggggttctgggatgtggggcccagtgagaaagctgccccccaacactgtggcgtggagacgctcgagtgtccgcgtgacggctggggagggtgagacctgctgggcttgggacctcccagcctcggtctgcggctcaggcccatggctgggccgtgttggtgggagtgccaggcgcttgctggagcgt

SEQ ID NO: 144655 - DNA, 30 bp, Homo sapiens; identical to SEQ ID NO: 65397
  chr2:242734544-242734574
  hypo

SEQ ID NO: 144656 - DNA, 562 bp, Homo sapiens; identical to SEQ ID NO: 65398
  chr2:242734967-242735529
  hypo

SEQ ID NO: 144657 - DNA, 31 bp, Homo sapiens; identical to SEQ ID NO: 65399
  chr2:242735880-242735911
  hypo

SEQ ID NO: 144658 - DNA, 31 bp, Homo sapiens; identical to SEQ ID NO: 65400
  chr2:242738173-242738204
  hypo

SEQ ID NO: 144659 - DNA, 31 bp, Homo sapiens; identical to SEQ ID NO: 65401
  chr2:242753192-242753223
  hypo

SEQ ID NO: 144660 - DNA, 321 bp, Homo sapiens
  chr2:242754377-242754698
  hypo
gtgtgcatgggtccccgtcgtaggcaggcgttctgccctggccaggcgtggtgtccggcatccggccatctccctcctccctccttcccttagccccgcatccaggtgccccgtgtgcccggcctgggcggctggccgtggatctgaccgctcctgcatggtggaggaccagcgttcccactgtctgcagctgtgccacctccctgtgccgggctgtgcgtgctcacgctcggctccgtctgcctttgtgcgatcagactgagagaccccccaggcaggtcccgcctgcaacaagcagaccccatgcgtgccccaaatgcc

SEQ ID NO: 144661 - DNA, 762 bp, Homo sapiens; identical to SEQ ID NO: 17275
  chr2:242755672-242756434
  hypo

SEQ ID NO: 144662 - DNA, 30 bp, Homo sapiens; identical to SEQ ID NO: 17276
  chr2:242757210-242757240
  hypo

SEQ ID NO: 144663 - DNA, 411 bp, Homo sapiens; identical to SEQ ID NO: 17277
  chr2:242762673-242763084
  hypo

SEQ ID NO: 144664 - DNA, 456 bp, Homo sapiens
  chr2:242766032-242766488
  hypo
tgtgttcttctccacgacgttctctttgtctgactttctgctcctgccgcgtgcgcagaggggcgaggaggaagcatttgcgcatgcgcagaaggctcgctccacgccacgtgcttcaagcgcgtcgttccgtttagtatgaaataaaggcccgcggggtggagaacgtgtctgttttccagatgtggagatcaaggcccggcaagtcctctgttgttgacggttctcaggtggtagaaacgatctcgcagcgcacctgcgtggcttccgaaaccgttgtctcaagcgtgttccacttgatgtgattaaaaaagttctcgtggccccaagcacctgctttacctgctcagaccagagtgtcgttccgtcccattcattccgcagctttccccgaacgcacacaagtgaaatgtaaatgtcagtgtgtgtgtatctatctcccgtttctcccaaagc

SEQ ID NO: 144665 - DNA, 30 bp, Homo sapiens
  chr2:242788789-242788819
  hypo
actccgtctcctagcgcactgtgctgtgaa

SEQ ID NO: 144666 - DNA, 282 bp, Homo sapiens; identical to SEQ ID NO: 65407
  chr2:242791133-242791415
  hypo

SEQ ID NO: 144667 - DNA, 159 bp, Homo sapiens; identical to SEQ ID NO: 65408
  chr2:242793063-242793222
  hypo

SEQ ID NO: 144668 - DNA, 258 bp, Homo sapiens; identical to SEQ ID NO: 65409
  chr2:242794839-242795097
  hypo

SEQ ID NO: 144669 - DNA, 30 bp, Homo sapiens; identical to SEQ ID NO: 65410
  chr2:242811947-242811977
  hypo

SEQ ID NO: 144670 - DNA, 115 bp, Homo sapiens
  chr2:242815159-242815274
  hypo
aagggcggtggccacgttgcctacggcccccagggcaatggctgcttctcccaaggctattaccagaagaggcagctgaggtccaggttccacaaggcccgctgtgggtgccgcc

SEQ ID NO: 144671 - DNA, 30 bp, Homo sapiens; identical to SEQ ID NO: 17280
  chr2:242821604-242821634
  hypo

SEQ ID NO: 144672 - DNA, 388 bp, Homo sapiens
  chr2:242832880-242833268
  hypo
tggatacgtcccagccgaaatgttcaccgtgaatccggcaacctgtggagctgatttccatttctaaggaatgaggggggatggggaagaaccccccaggacagcaccaacagtccctgcggggacctttcccggacacccggccttctcggcggtgaggcaggtggcggcaccgacaggcccgggggggacctttcccggacacccagcctcctcggtggcgaggcaggtggcggcaccgacaggcccggcggggacctttcccggacacctggcctccttggcaaggcaggtggcggcaccaacaggcccgggggggacctttcccggacacctggcctcctcggcgaggcaggtggcagaactggttccacgtctgatcttcctt

SEQ ID NO: 144673 - DNA, 339 bp, Homo sapiens; identical to SEQ ID NO: 65414
  chr2:242833524-242833863
  hypo

SEQ ID NO: 144674 - DNA, 31 bp, Homo sapiens
  chr2:242835073-242835104
  hypo
tccatggccagtgttgcgagggccctggctg

SEQ ID NO: 144675 - DNA, 301 bp, Homo sapiens
  chr2:242836339-242836640
  hypo
gcagagtctggagctcgtgggccctcaggccgccttcttgtccttggtgtggagggactcagtggcctccgggaccctgtctgggcatctccctgggccctgcagcatcttgttcctcccctccagctgctcagcccatcccacgcggagcctggggcagggcgataatttcggcattgtgagtcaagctctcggaacttagtgacggccaagcccgtgtctctcagcacctgggcacctgtgagagcaggagtatgacactccctgccaggggtgggggtgtcaccgcatccctgcccag

SEQ ID NO: 144676 - DNA, 30 bp, Homo sapiens; identical to SEQ ID NO: 17283
  chr2:242845217-242845247
  hypo

SEQ ID NO: 144677 - DNA, 86 bp, Homo sapiens; identical to SEQ ID NO: 65417
  chr2:242845591-242845677
  hypo

SEQ ID NO: 144678 - DNA, 176 bp, Homo sapiens
  chr2:242874826-242875002
  hypo
aggacggcgctgtgcggctctaggtggaatgcactgggctggccctgccggctatctcagccccgagacccacgaaggccctggccgtgctgtcctcacatcagcccggcccttttcgtccggcgtggagagttccagcctttacggttgtccagggccgcggaggtagccagggc

SEQ ID NO: 144679 - DNA, 190 bp, Homo sapiens
  chr2:242887763-242887953
  hypo
tccgatggtccctacgtagggaccaggcacaacagctctcagatgcaccacgaggcctgatgggatttgcacaggtgcggggacactgtggccaaaatggcttcagatgatctttttcaggaaaatattgtctcagcagtttgcagcacccgtggaccatggtcacccctgacccgttttacagacctca

SEQ ID NO: 144680 - DNA, 106 bp, Homo sapiens
  chr2:242890285-242890391
  hypo
gtctgctcagccagcgccctcacctgcggtcggtgagctgtgcacggggaagcagagcctggcggccacgtcggcctcctgtgagagggtcgagggctccagcccc

SEQ ID NO: 144681 - DNA, 30 bp, Homo sapiens
  chr2:242895485-242895515
  hypo
aatgagtgcaattccgggtccacccgaagg

SEQ ID NO: 144682 - DNA, 31 bp, Homo sapiens; identical to SEQ ID NO: 17286
  chr2:242895762-242895793
  hypo

SEQ ID NO: 144683 - DNA, 408 bp, Homo sapiens
  chr2:242925458-242925866
  hypo
atgcatgaacttctggcgtccacaatctagtggatgaatctcaaaagatacttcgagcaaaaacaccggacagaagcgtccgtgccagccccgcaggctgcctgtgtgccaggctatcccgtgccatctgatccgggagaagcaggactttcttgcacaggtactcagcgctgtggctgtgggaggagccgggagggccctggcgtgggtgggcttggggaaactgtaggagctggaaatatttcatatcttatttggggtgttgtttacaggggaacttgacaaactcatctaatggtacaatcgagacatctgtgtaaataaagtgtcaaaaatcatcctgctgacatccatgctccccgccccacggcacttcccggccctcagccctcccgtgcggctcctgcc

SEQ ID NO: 144684 - DNA, 30 bp, Homo sapiens; identical to SEQ ID NO: 65422
  chr2:242929264-242929294
  hypo

SEQ ID NO: 144685 - DNA, 30 bp, Homo sapiens
  chr2:242930236-242930266
  hypo
gtggctcagtcccgcgagaaactggaggcc

SEQ ID NO: 144686 - DNA, 265 bp, Homo sapiens; identical to SEQ ID NO: 65423
  chr2:242933405-242933670
  hypo

SEQ ID NO: 144687 - DNA, 30 bp, Homo sapiens
  chr2:242937905-242937935
  hypo
tctctatggtaatctcggctcactgcaacc

SEQ ID NO: 144688 - DNA, 142 bp, Homo sapiens
  chr2:242938359-242938501
  hypo
gtgggtggtggccttcgtcgcaggcagggctggtcagaggcgacgcctgtcctggcctgcttgtcacagccaggtaggcaccaggccagaagctgcagagcccaggcagtattgctcacctgtccagcgcgctgtccgtatt

SEQ ID NO: 144689 - DNA, 30 bp, Homo sapiens; identical to SEQ ID NO: 17287
  chr2:242945967-242945997
  hypo

SEQ ID NO: 144690 - DNA, 364 bp, Homo sapiens
  chr2:242948201-242948565
  hypo
cttgccattagtgaaaaatgccgtaaaaacccatacccctgctgaggcctcggaacctgagaggtgtggcctgtctcctctaagccgtttatcatccgtggtccacagacacatcagagagtctccaaacgctttcctgattgcttctcccaagtaccccggacaggcactgttgttggcaccagggaacaccccggggaacagagcagatccaacaccaggcccaggagagtcggctcccggtgacgcctgagatgtctgtggactccaggcaatacttgtgcaagaggccgtgggggccaatggggcatgatagtgtgaccttcaaattaccagtgtgcacggcacacggaaggaacacaca

SEQ ID NO: 144691 - DNA, 30 bp, Homo sapiens; identical to SEQ ID NO: 65426
  chr2:242988080-242988110
  hypo

SEQ ID NO: 144692 - DNA, 30 bp, Homo sapiens; identical to SEQ ID NO: 17288
  chr2:242997743-242997773
  hypo

SEQ ID NO: 144693 - DNA, 30 bp, Homo sapiens
  chr3:985974-986004
  hypo
gtgaagaaaattattcgaagcaaacttatg

SEQ ID NO: 144694 - DNA, 30 bp, Homo sapiens
  chr3:2933533-2933563
  hypo
atgttttgaaaagaccgctcaggttgtttt

SEQ ID NO: 144695 - DNA, 33 bp, Homo sapiens
  chr3:3167654-3167687
  hypo
ccggcaaaagtaatcccggcacttttgggggcc

SEQ ID NO: 144696 - DNA, 92 bp, Homo sapiens
  chr3:3167926-3168018
  hypo
caaaaactacacattttcgcactttaagggctcaacggctgtattcccactcctttgccactctctttgctcttttccgctctagaaagaat

SEQ ID NO: 144697 - DNA, 210 bp, Homo sapiens; identical to SEQ ID NO: 17289
  chr3:3179062-3179272
  hypo

SEQ ID NO: 144698 - DNA, 30 bp, Homo sapiens
  chr3:3192608-3192638
  hypo
caacagagcagatcgcgttaagccccaaaa

SEQ ID NO: 144699 - DNA, 38 bp, Homo sapiens; identical to SEQ ID NO: 65431
  chr3:3426021-3426059
  hypo

SEQ ID NO: 144700 - DNA, 28 bp, Homo sapiens
  chr3:3586573-3586601
  hypo
attgaaaaactactggctgagcgcggtg

SEQ ID NO: 144701 - DNA, 42 bp, Homo sapiens
  chr3:3639125-3639167
  hypo
tccttaggccgggcacggtggctcacgcctgtaatcccagca

SEQ ID NO: 144702 - DNA, 166 bp, Homo sapiens; identical to SEQ ID NO: 17290
  chr3:3786389-3786555
  hypo

SEQ ID NO: 144703 - DNA, 2432 bp, Homo sapiens; identical to SEQ ID NO: 107800
  chr3:3840346-3842778
  hypo

SEQ ID NO: 144704 - DNA, 30 bp, Homo sapiens; identical to SEQ ID NO: 65435
  chr3:3887381-3887411
  hypo

SEQ ID NO: 144705 - DNA, 233 bp, Homo sapiens; identical to SEQ ID NO: 17292
  chr3:4347746-4347979
  hypo

SEQ ID NO: 144706 - DNA, 84 bp, Homo sapiens
  chr3:4669492-4669576
  hypo
gcagttctggaaagccgctaagcctggggccaacagcaccacagacgcagtgctactcaacaaactgcacgtacgtattgccat

SEQ ID NO: 144707 - DNA, 219 bp, Homo sapiens
  chr3:4735233-4735452
  hypo
ctgatccagatgatgcggtcagaacgggatcggatggatgagaacagccctctcatgtaccacatccacttggtcgagctcctggctgtgtgcacggagggtaagaatgtctacacagagatcaagtgcaactccctgctcccgctggatgacatcgttcgcgtggtgacccacgaggactgcatccctgaggtgagcgagcccagcctggctgtgccc

SEQ ID NO: 144708 - DNA, 30 bp, Homo sapiens; identical to SEQ ID NO: 38868
  chr3:4742260-4742290
  hypo

SEQ ID NO: 144709 - DNA, 31 bp, Homo sapiens; identical to SEQ ID NO: 65439
  chr3:4748815-4748846
  hypo

SEQ ID NO: 144710 - DNA, 406 bp, Homo sapiens
  chr3:4755877-4756283
  hypo
agggcagaaataacccggagccaaagaactaagctttctcaagcaaaccagttggcttgagtcaatataataaatgaggtgttctttggcctgggtgctgaggacgacaccacggtgagtgtggaggccgtttccctcctcccatccctgttttctgatgagtggcctcttatggagcttgtcccatgactgacacttccctggtgatgtccagaattgttctgcttctctgccctctcctgagccttcaccgccaaagaatcggatctggaggggccctggcatggcttcttccaactctccctgtgcctacgaggaggctggggctaagagctgagagactgcccgaggtcacgtgtgaagtctagatgagatcaagactaccgtctgggtttcccaaatccct

SEQ ID NO: 144711 - DNA, 30 bp, Homo sapiens
  chr3:4800022-4800052
  hypo
cccgcaagccatgcccgctcccaccaggct

SEQ ID NO: 144712 - DNA, 63 bp, Homo sapiens; identical to SEQ ID NO: 65441
  chr3:4840916-4840979
  hypo

SEQ ID NO: 144713 - DNA, 30 bp, Homo sapiens
  chr3:4864440-4864470
  hypo
cactgtaactcacagcgccgctcattcccc

SEQ ID NO: 144714 - DNA, 761 bp, Homo sapiens
  chr3:4865775-4866536
  hypo
atattcgtcgactaacgtggacagtgaaatatcgggggagaacctgcccccccatggtagctagagtgttctggaatgcaccagcgctgccgtttctggaggagcagtctgtgctgggctctgctttacctcgggaagggcagattggatagtaaggaatagctcgtgtgtaatcagtgtgcggaaaataaacactgtatgtgcatgatctcactcaatcctcatcacagcatggtaggtggtactattaacactttatagatgggaacctaaagctcaggaaggtcgagcaacttttgcagggtcgcggcgctgggaagtgctagagccaagactgaaatccagagctgctgaaccagaacccaccctcaggttgtcctgacccacatatccgcatgtggttacctgtgtgcacatgcacacagccctcctgtcagtctgcagccattggctggctggcggcatctggtttggactggcgcatcttagacttggactggctcatctcccagccccgaccccgagtgatactgaattagcctcctttaaaagaggcaagatgcaggaaaggcccctctgcgggtagagaggagagtgggaaagaggatctcccggggatactgaccggctcatgcataaatcagtaagacaggagttagatggggtgtgactttccgagctgctgccgccagcaaccactgctcagacaaccacttcacaaccctaggggttgttgagacggtaggagttcaggaaggggt

SEQ ID NO: 144715 - DNA, 827 bp, Homo sapiens; identical to SEQ ID NO: 107807
  chr3:4909947-4910774
  hypo

SEQ ID NO: 144716 - DNA, 38 bp, Homo sapiens; identical to SEQ ID NO: 17295
  chr3:4993605-4993643
  hypo

SEQ ID NO: 144717 - DNA, 539 bp, Homo sapiens; identical to SEQ ID NO: 107808
  chr3:5018750-5019289
  hypo

SEQ ID NO: 144718 - DNA, 30 bp, Homo sapiens; identical to SEQ ID NO: 107809
  chr3:5020312-5020342
  hypo

SEQ ID NO: 144719 - DNA, 31 bp, Homo sapiens; identical to SEQ ID NO: 2369
  chr3:5020396-5020427
  hypo

SEQ ID NO: 144720 - DNA, 177 bp, Homo sapiens; identical to SEQ ID NO: 65447
  chr3:5030719-5030896
  hypo

SEQ ID NO: 144721 - DNA, 31 bp, Homo sapiens; identical to SEQ ID NO: 65448
  chr3:5066590-5066621
  hypo

SEQ ID NO: 144722 - DNA, 32 bp, Homo sapiens; identical to SEQ ID NO: 65449
  chr3:5126484-5126516
  hypo

SEQ ID NO: 144723 - DNA, 25 bp, Homo sapiens
  chr3:5148382-5148407
  hypo
ggattataggcgtgagccactgcgc

SEQ ID NO: 144724 - DNA, 80 bp, Homo sapiens; identical to SEQ ID NO: 65450
  chr3:5165842-5165922
  hypo

SEQ ID NO: 144725 - DNA, 18 bp, Homo sapiens
  chr3:5238581-5238599
  hypo
ctttgtcatcgtcgtcgt

SEQ ID NO: 144726 - DNA, 17 bp, Homo sapiens
  chr3:5238718-5238735
  hypo
ttcgcctgcctcagcct

SEQ ID NO: 144727 - DNA, 30 bp, Homo sapiens
  chr3:5252553-5252583
  hypo
ttctggccagcaccccgccaccacgcccac

SEQ ID NO: 144728 - DNA, 175 bp, Homo sapiens
  chr3:5252797-5252972
  hypo
tttgtaggtgtgggtacgccacgctgcatcacgtcattgacaagtccacagaagaccggatggagagcttctttctcagtgagacctgtaaatatttgtatctggtatgtgtgttgcaagatgaacccaggaatatttagtattgcttagagcaagcattcgcatagtcttccat

SEQ ID NO: 144729 - DNA, 43 bp, Homo sapiens; identical to SEQ ID NO: 65452
  chr3:5296186-5296229
  hypo

SEQ ID NO: 144730 - DNA, 30 bp, Homo sapiens
  chr3:5740648-5740678
  hypo
actttgccgcttttgcgatgtttcttacct

SEQ ID NO: 144731 - DNA, 30 bp, Homo sapiens
  chr3:5812129-5812159
  hypo
cgtgtgttcttctgccggtgtgttcctctc

SEQ ID NO: 144732 - DNA, 94 bp, Homo sapiens
  chr3:5824092-5824186
  hypo
gccactgcgcccagctgcaattatgataagttctaagaataatataaagattatgctttgatagaaaaatagaaagattcggtgaaagaaggga

SEQ ID NO: 144733 - DNA, 36 bp, Homo sapiens; identical to SEQ ID NO: 65453
  chr3:6109802-6109838
  hypo

SEQ ID NO: 144734 - DNA, 36 bp, Homo sapiens; identical to SEQ ID NO: 65454
  chr3:6110077-6110113
  hypo

SEQ ID NO: 144735 - DNA, 30 bp, Homo sapiens; identical to SEQ ID NO: 65455
  chr3:6261097-6261127
  hypo

SEQ ID NO: 144736 - DNA, 85 bp, Homo sapiens; identical to SEQ ID NO: 17298
  chr3:6811741-6811826
  hypo

SEQ ID NO: 144737 - DNA, 30 bp, Homo sapiens; identical to SEQ ID NO: 38876
  chr3:6841364-6841394
  hypo

SEQ ID NO: 144738 - DNA, 466 bp, Homo sapiens; identical to SEQ ID NO: 107825
  chr3:6903188-6903654
  hypo

SEQ ID NO: 144739 - DNA, 162 bp, Homo sapiens
  chr3:7188148-7188310
  hypo
ttagttatgcatcaacggcacccgagctaagtgatgaccggcgctatgacttcttctctcgcgtggtgccacccgattccttccaagcccaggccatggtagacattgtaaaggccctaggctggaattatgtgtctaccctcgcatcggaaggaagttatg

SEQ ID NO: 144740 - DNA, 48 bp, Homo sapiens
  chr3:7620288-7620336
  hypo
gaccagaggcccaatgaaaatcgaaccggatgccaggatattcccatc

SEQ ID NO: 144741 - DNA, 77 bp, Homo sapiens; identical to SEQ ID NO: 65458
  chr3:8505218-8505295
  hypo

SEQ ID NO: 144742 - DNA, 31 bp, Homo sapiens; identical to SEQ ID NO: 2374
  chr3:8543387-8543418
  hypo

SEQ ID NO: 144743 - DNA, 30 bp, Homo sapiens; identical to SEQ ID NO: 107830
  chr3:8543456-8543486
  hypo

SEQ ID NO: 144744 - DNA, 44 bp, Homo sapiens; identical to SEQ ID NO: 17300
  chr3:8595737-8595781
  hypo

SEQ ID NO: 144745 - DNA, 224 bp, Homo sapiens
  chr3:8595840-8596064
  hypo
ccgcctcaacctcccaagtaataaacctctttaactcttggtaacaaccagtgagagaggttggggttgtgatacccatttcgcagatgaggaccctggggcgcagtgaggttaccccacgtgctgatgagagcggggcttcggttcaatccccagtccttctgcttcaccggcagagtgaagtctgaagccgtgttggggtggggcctcggcagggtgggtcc

SEQ ID NO: 144746 - DNA, 29 bp, Homo sapiens
  chr3:8651966-8651995
  hypo
atgtctttactagccgagtgagaacagat

SEQ ID NO: 144747 - DNA, 46 bp, Homo sapiens; identical to SEQ ID NO: 17303
  chr3:8669370-8669416
  hypo

SEQ ID NO: 144748 - DNA, 31 bp, Homo sapiens; identical to SEQ ID NO: 65464
  chr3:8787621-8787652
  hypo

SEQ ID NO: 144749 - DNA, 30 bp, Homo sapiens; identical to SEQ ID NO: 65465
  chr3:8863687-8863717
  hypo

SEQ ID NO: 144750 - DNA, 20 bp, Homo sapiens
  chr3:8952242-8952262
  hypo
gatagcgccactgcactcct

SEQ ID NO: 144751 - DNA, 31 bp, Homo sapiens; identical to SEQ ID NO: 65467
  chr3:9006146-9006177
  hypo

SEQ ID NO: 144752 - DNA, 30 bp, Homo sapiens
  chr3:9027439-9027469
  hypo
ggggtcgcggatgacgatggtgtgaagggg

SEQ ID NO: 144753 - DNA, 30 bp, Homo sapiens; identical to SEQ ID NO: 17304
  chr3:9032616-9032646
  hypo

SEQ ID NO: 144754 - DNA, 30 bp, Homo sapiens; identical to SEQ ID NO: 38885
  chr3:9077066-9077096
  hypo

SEQ ID NO: 144755 - DNA, 214 bp, Homo sapiens; identical to SEQ ID NO: 65470
  chr3:9173887-9174101
  hypo

SEQ ID NO: 144756 - DNA, 31 bp, Homo sapiens; identical to SEQ ID NO: 17305
  chr3:9188566-9188597
  hypo

SEQ ID NO: 144757 - DNA, 31 bp, Homo sapiens; identical to SEQ ID NO: 65472
  chr3:9204928-9204959
  hypo

SEQ ID NO: 144758 - DNA, 30 bp, Homo sapiens
  chr3:9246408-9246438
  hypo
acagaaggcgtaagccgggcaatcacaggc

SEQ ID NO: 144759 - DNA, 149 bp, Homo sapiens
  chr3:9553507-9553656
  hypo
gctcgccactggctgccggatgcatcttgcatgtgtctggtgtttgggaaacacaccccaatttgtcctgcctccacaggaggcttggctgcatcctttacatggcgactgtttttttttttttttttagacggaatctggctctgtcg

SEQ ID NO: 144760 - DNA, 28 bp, Homo sapiens
  chr3:9553895-9553923
  hypo
tgagccaccgcgccggcctacatggcaa

SEQ ID NO: 144761 - DNA, 37 bp, Homo sapiens; identical to SEQ ID NO: 65475
  chr3:9554923-9554960
  hypo

SEQ ID NO: 144762 - DNA, 22 bp, Homo sapiens
  chr3:9688154-9688176
  hypo
gccaccacgcccggccggattg

SEQ ID NO: 144763 - DNA, 128 bp, Homo sapiens
  chr3:9704770-9704898
  hypo
ggagagccattgtgacgtttgagcggggaaattccgaatgcaagtagcaacggtgcgaaaattggtccaagaagagtggactgacatacagagagcctcagaggggaagggagcggaattcagtctat

SEQ ID NO: 144764 - DNA, 30 bp, Homo sapiens; identical to SEQ ID NO: 65476
  chr3:9743601-9743631
  hypo

SEQ ID NO: 144765 - DNA, 30 bp, Homo sapiens; identical to SEQ ID NO: 65477
  chr3:9780860-9780890
  hypo

SEQ ID NO: 144766 - DNA, 155 bp, Homo sapiens; identical to SEQ ID NO: 17306
  chr3:9782959-9783114
  hypo

SEQ ID NO: 144767 - DNA, 40 bp, Homo sapiens; identical to SEQ ID NO: 17307
  chr3:9793442-9793482
  hypo

SEQ ID NO: 144768 - DNA, 31 bp, Homo sapiens; identical to SEQ ID NO: 2381
  chr3:9851988-9852019
  hypo

SEQ ID NO: 144769 - DNA, 258 bp, Homo sapiens; identical to SEQ ID NO: 65481
  chr3:9905282-9905540
  hypo

SEQ ID NO: 144770 - DNA, 121 bp, Homo sapiens; identical to SEQ ID NO: 65482
  chr3:9924113-9924234
  hypo

SEQ ID NO: 144771 - DNA, 31 bp, Homo sapiens; identical to SEQ ID NO: 65483
  chr3:9926968-9926999
  hypo

SEQ ID NO: 144772 - DNA, 38 bp, Homo sapiens; identical to SEQ ID NO: 65484
  chr3:9941463-9941501
  hypo

SEQ ID NO: 144773 - DNA, 34 bp, Homo sapiens; identical to SEQ ID NO: 17310
  chr3:9947647-9947681
  hypo

SEQ ID NO: 144774 - DNA, 31 bp, Homo sapiens; identical to SEQ ID NO: 65486
  chr3:9948632-9948663
  hypo

SEQ ID NO: 144775 - DNA, 912 bp, Homo sapiens; identical to SEQ ID NO: 38905
  chr3:9956772-9957684
  hypo

SEQ ID NO: 144776 - DNA, 31 bp, Homo sapiens; identical to SEQ ID NO: 17312
  chr3:9963223-9963254
  hypo

SEQ ID NO: 144777 - DNA, 31 bp, Homo sapiens; identical to SEQ ID NO: 17313
  chr3:9965746-9965777
  hypo

SEQ ID NO: 144778 - DNA, 30 bp, Homo sapiens; identical to SEQ ID NO: 17314
  chr3:9971741-9971771
  hypo

SEQ ID NO: 144779 - DNA, 30 bp, Homo sapiens
  chr3:9984562-9984592
  hypo
gctcctatgagtgccgaggtcagtgtctac

SEQ ID NO: 144780 - DNA, 156 bp, Homo sapiens
  chr3:9987358-9987514
  hypo
attccgcataagacacggcctctgtgcaaaatgccggctgaaaaaaaaatagaaatattaaaagcaaaaaacggcatgggggtggggtgagttcaaacctggctgtcccccgggggttgccgtcaggtagagaggcctggggatgccttttttttt

SEQ ID NO: 144781 - DNA, 31 bp, Homo sapiens
  chr3:9989483-9989514
  hypo
agcgggggtgcagtggcgttggctggggggc

SEQ ID NO: 144782 - DNA, 230 bp, Homo sapiens; identical to SEQ ID NO: 65491
  chr3:9991407-9991637
  hypo

SEQ ID NO: 144783 - DNA, 223 bp, Homo sapiens; identical to SEQ ID NO: 38909
  chr3:9993709-9993932
  hypo

SEQ ID NO: 144784 - DNA, 192 bp, Homo sapiens; identical to SEQ ID NO: 38910
  chr3:9993964-9994156
  hypo

SEQ ID NO: 144785 - DNA, 87 bp, Homo sapiens
  chr3:10011410-10011497
  hypo
ctttgtttgtgtctgcgggcatggccatggctgctcccgtcatctgctcctgcatcattcgtgattggtcagcggctgtagcataag

SEQ ID NO: 144786 - DNA, 21 bp, Homo sapiens
  chr3:10055676-10055697
  hypo
ccaccgcgcccggccaatttc

SEQ ID NO: 144787 - DNA, 29 bp, Homo sapiens
  chr3:10061732-10061761
  hypo
aatgaaattctgaggtcggccaggcgtgg

SEQ ID NO: 144788 - DNA, 33 bp, Homo sapiens
  chr3:10127375-10127408
  hypo
tcaattcttttttcaaaccgttaaactattgat

SEQ ID NO: 144789 - DNA, 204 bp, Homo sapiens; identical to SEQ ID NO: 65496
  chr3:10131931-10132135
  hypo

SEQ ID NO: 144790 - DNA, 24 bp, Homo sapiens
  chr3:10132434-10132458
  hypo
cccggtggtagttgctgattcttc

SEQ ID NO: 144791 - DNA, 27 bp, Homo sapiens
  chr3:10137566-10137593
  hypo
tttttttttttttttttgagacggagt

SEQ ID NO: 144792 - DNA, 27 bp, Homo sapiens
  chr3:10137652-10137679
  hypo
cctcccggctggacagtgaatgtttaa

SEQ ID NO: 144793 - DNA, 79 bp, Homo sapiens; identical to SEQ ID NO: 65499
  chr3:10182837-10182916
  hypo

SEQ ID NO: 144794 - DNA, 19 bp, Homo sapiens
  chr3:10183215-10183234
  hypo
cgggcgacagagtgagacc

SEQ ID NO: 144795 - DNA, 30 bp, Homo sapiens
  chr3:10184301-10184331
  hypo
atgggcatgagcctccgcgcccggcccaga

SEQ ID NO: 144796 - DNA, 140 bp, Homo sapiens; identical to SEQ ID NO: 65501
  chr3:10212190-10212330
  hypo

SEQ ID NO: 144797 - DNA, 30 bp, Homo sapiens; identical to SEQ ID NO: 17324
  chr3:10276368-10276398
  hypo

SEQ ID NO: 144798 - DNA, 30 bp, Homo sapiens; identical to SEQ ID NO: 17325
  chr3:10276657-10276687
  hypo

SEQ ID NO: 144799 - DNA, 30 bp, Homo sapiens; identical to SEQ ID NO: 17326
  chr3:10332155-10332185
  hypo

SEQ ID NO: 144800 - DNA, 113 bp, Homo sapiens; identical to SEQ ID NO: 65505
  chr3:10332491-10332604
  hypo

SEQ ID NO: 144801 - DNA, 30 bp, Homo sapiens; identical to SEQ ID NO: 17327
  chr3:10353633-10353663
  hypo

SEQ ID NO: 144802 - DNA, 42 bp, Homo sapiens; identical to SEQ ID NO: 17328
  chr3:10363447-10363489
  hypo

SEQ ID NO: 144803 - DNA, 243 bp, Homo sapiens
  chr3:10384502-10384745
  hypo
ggtcctggagatgagcggcttgttgcggccgtacggcttcctcagcagcagggtctccgtgggcggctcagtggccagtgccagcgaggcaaacgtgtccatgatgaggttcacccagagcatctgcacggccttcagaggggagtcctggggacgggcaggagagggctgtcacctgtgcgcccacctgctgctgtgaagtgctgggcgggctcatggtgtagtgtccgcaggctcctgctg

SEQ ID NO: 144804 - DNA, 30 bp, Homo sapiens; identical to SEQ ID NO: 65508
  chr3:10400466-10400496
  hypo

SEQ ID NO: 144805 - DNA, 228 bp, Homo sapiens
  chr3:10541006-10541234
  hypo
gcctcacgtgacaaccgggaagatgggtgctcagctaacccttggtttacggaggagcaaactgaggcgaagtcactggttcaaccacacacaaccgaacgcacatgactgaataagcaattcccctcccacgcattacatgggaaaacaaaaagcatttgtaaagtgcttgcggacacattttagcgattagtactattatgatgaacatttcggtacttggcaatt

SEQ ID NO: 144806 - DNA, 132 bp, Homo sapiens
  chr3:10569428-10569560
  hypo
cctggccagagatggcggtgaatcacccggtgtccccgctgggtttcaggccacggacacaagtaccctctctgactgctcggctccagcacctacagtcactgcagaagtctgcagcgtatggccacaccc

SEQ ID NO: 144807 - DNA, 120 bp, Homo sapiens
  chr3:10638627-10638747
  hypo
caccacaggcgagtacgcgtgcacacacacaggcacacgcacacgcaggtgcacacgcacacaggcacacacgcacacaggcacacacccagacacacacaggtgcgcacacacacaggg

SEQ ID NO: 144808 - DNA, 30 bp, Homo sapiens
  chr3:10659939-10659969
  hypo
tcctcgcctgcagaacggggataatcattg

SEQ ID NO: 144809 - DNA, 30 bp, Homo sapiens; identical to SEQ ID NO: 65510
  chr3:10670785-10670815
  hypo

SEQ ID NO: 144810 - DNA, 98 bp, Homo sapiens; identical to SEQ ID NO: 107883
  chr3:10749299-10749397
  hypo

SEQ ID NO: 144811 - DNA, 1 bp, Homo sapiens
  chr3:10749432-10749433
  hypo
c

SEQ ID NO: 144812 - DNA, 478 bp, Homo sapiens; identical to SEQ ID NO: 107885
  chr3:10749467-10749945
  hypo

SEQ ID NO: 144813 - DNA, 202 bp, Homo sapiens
  chr3:10959982-10960184
  hypo
gaccctagtgcctctcgctgcttccccacagggactgcatcatgctctgttgcctgaacagcggcaccagcttcgtggctgggtttgccatcttctcagtcctgggttttatggcgtacgagcagggggtacccattgctgaggtggcagagtcaggtaagttcgccaaaggtggggatggaaaaggcggcaagggaggcca

SEQ ID NO: 144814 - DNA, 34 bp, Homo sapiens
  chr3:10976103-10976137
  hypo
gctgcatacgcaaatcgggcgctggatccgcctc

SEQ ID NO: 144815 - DNA, 30 bp, Homo sapiens
  chr3:10976948-10976978
  hypo
tcatctgcatggtgcgcgatgacggcctgc

SEQ ID NO: 144816 - DNA, 128 bp, Homo sapiens
  chr3:10991634-10991762
  hypo
tgggcacgtcatccacgcaaaccccacaaccatcttttcagcacatattttgtgcccattttgcagatgaggaccctgaggttaacggaggtaatgtgacttgcctcgcgtctcgcaaagagggaatg

SEQ ID NO: 144817 - DNA, 31 bp, Homo sapiens; identical to SEQ ID NO: 17331
  chr3:11050501-11050532
  hypo

SEQ ID NO: 144818 - DNA, 30 bp, Homo sapiens
  chr3:11081281-11081311
  hypo
ttgtaagaatagttccgtggacacatctgc

SEQ ID NO: 144819 - DNA, 121 bp, Homo sapiens; identical to SEQ ID NO: 17332
  chr3:11133517-11133638
  hypo

SEQ ID NO: 144820 - DNA, 30 bp, Homo sapiens; identical to SEQ ID NO: 17333
  chr3:11203460-11203490
  hypo

SEQ ID NO: 144821 - DNA, 216 bp, Homo sapiens; identical to SEQ ID NO: 17334
  chr3:11210147-11210363
  hypo

SEQ ID NO: 144822 - DNA, 30 bp, Homo sapiens
  chr3:11248495-11248525
  hypo
agatgcagagaccaccgtctgcaccctcga

SEQ ID NO: 144823 - DNA, 30 bp, Homo sapiens
  chr3:11253650-11253680
  hypo
gaatctgcattttaacgtacgcactcccaa

SEQ ID NO: 144824 - DNA, 31 bp, Homo sapiens; identical to SEQ ID NO: 38924
  chr3:11258023-11258054
  hypo

SEQ ID NO: 144825 - DNA, 17 bp, Homo sapiens
  chr3:11268281-11268298
  hypo
gatcatggggccaggcg

SEQ ID NO: 144826 - DNA, 43 bp, Homo sapiens; identical to SEQ ID NO: 65519
  chr3:11300931-11300974
  hypo

SEQ ID NO: 144827 - DNA, 30 bp, Homo sapiens; identical to SEQ ID NO: 17336
  chr3:11323545-11323575
  hypo

SEQ ID NO: 144828 - DNA, 30 bp, Homo sapiens
  chr3:11491110-11491140
  hypo
ttggcataaatctaacgtgtgtatttggat

SEQ ID NO: 144829 - DNA, 30 bp, Homo sapiens
  chr3:11508120-11508150
  hypo
tcttactgctcttttcggaaaaagcagttc

SEQ ID NO: 144830 - DNA, 30 bp, Homo sapiens; identical to SEQ ID NO: 17337
  chr3:11530042-11530072
  hypo

SEQ ID NO: 144831 - DNA, 38 bp, Homo sapiens
  chr3:11574542-11574580
  hypo
agcagcccggaggtgcgctggtgcgcagagcagacagt

SEQ ID NO: 144832 - DNA, 258 bp, Homo sapiens; identical to SEQ ID NO: 65522
  chr3:11577994-11578252
  hypo

SEQ ID NO: 144833 - DNA, 286 bp, Homo sapiens; identical to SEQ ID NO: 17338
  chr3:11581142-11581428
  hypo

SEQ ID NO: 144834 - DNA, 89 bp, Homo sapiens
  chr3:11595080-11595169
  hypo
agggacacctggtcactggaccgcagaccggcccatccacagcctggctgggctggcatctagacctcgcttggcagtcccctcccaag

SEQ ID NO: 144835 - DNA, 30 bp, Homo sapiens
  chr3:11595640-11595670
  hypo
tccccaggttcactgcgaggctcagactcg

SEQ ID NO: 144836 - DNA, 358 bp, Homo sapiens
  chr3:11600064-11600422
  hypo
ccatgtgggcagaggggctggcgggctggcccctgcgagaggcggactcagggctgctggatgctccgtccttggccgctttgatctggagccacgtgtcacccagagctttggcaaagtggtcgtccacggagcccgtgatggacacggagttgggtgccggctcgggctccttgtaattcttgcccaggctcctgcggaaatgctcctccaccacggggtcacaggtggtggcagctgcaggcaagcaggaaggcaggcagtcagacacaggtggctgcagacagacaggcacggttgcagcaccctccctcaggcagcccagagccggactggctgccacggtcagcgtgggctc

SEQ ID NO: 144837 - DNA, 39 bp, Homo sapiens; identical to SEQ ID NO: 17340
  chr3:11606284-11606323
  hypo

SEQ ID NO: 144838 - DNA, 33 bp, Homo sapiens
  chr3:11607100-11607133
  hypo
gtgctgtagggagccggcgcgcagctctctcgt

SEQ ID NO: 144839 - DNA, 30 bp, Homo sapiens; identical to SEQ ID NO: 17341
  chr3:11608499-11608529
  hypo

SEQ ID NO: 144840 - DNA, 30 bp, Homo sapiens; identical to SEQ ID NO: 17342
  chr3:11617571-11617601
  hypo

SEQ ID NO: 144841 - DNA, 575 bp, Homo sapiens; identical to SEQ ID NO: 65530
  chr3:11655423-11655998
  hypo

SEQ ID NO: 144842 - DNA, 31 bp, Homo sapiens; identical to SEQ ID NO: 65531
  chr3:11688146-11688177
  hypo

SEQ ID NO: 144843 - DNA, 17 bp, Homo sapiens
  chr3:11707434-11707451
  hypo
tcattctgggccgggcg

SEQ ID NO: 144844 - DNA, 136 bp, Homo sapiens; identical to SEQ ID NO: 17344
  chr3:11707750-11707886
  hypo

SEQ ID NO: 144845 - DNA, 31 bp, Homo sapiens; identical to SEQ ID NO: 65533
  chr3:11712550-11712581
  hypo

SEQ ID NO: 144846 - DNA, 30 bp, Homo sapiens
  chr3:11720409-11720439
  hypo
cataatgttgtgcaacgccttacgtgtttg

SEQ ID NO: 144847 - DNA, 30 bp, Homo sapiens
  chr3:11754897-11754927
  hypo
ggctgcttctgcttgcgtcaaattccttac

SEQ ID NO: 144848 - DNA, 30 bp, Homo sapiens; identical to SEQ ID NO: 65534
  chr3:11763304-11763334
  hypo

SEQ ID NO: 144849 - DNA, 29 bp, Homo sapiens
  chr3:11813829-11813858
  hypo
caggcgtgagccaccgtgcccagcccagt

SEQ ID NO: 144850 - DNA, 30 bp, Homo sapiens
  chr3:11817125-11817155
  hypo
aaagataaccgtttgcgcagcattattcac

SEQ ID NO: 144851 - DNA, 100 bp, Homo sapiens; identical to SEQ ID NO: 65535
  chr3:12186544-12186644
  hypo

SEQ ID NO: 144852 - DNA, 82 bp, Homo sapiens; identical to SEQ ID NO: 17345
  chr3:12204373-12204455
  hypo

SEQ ID NO: 144853 - DNA, 31 bp, Homo sapiens; identical to SEQ ID NO: 65537
  chr3:12223765-12223796
  hypo

SEQ ID NO: 144854 - DNA, 120 bp, Homo sapiens; identical to SEQ ID NO: 65538
  chr3:12486438-12486558
  hypo

SEQ ID NO: 144855 - DNA, 121 bp, Homo sapiens
  chr3:12486826-12486947
  hypo
cttccatatctgcaccgggagatcactgatagggctaatggcatttgcttgcctccacaccctgggcccagtgctccaggagtcacgcaatcccacaggcccagggcggaaactgttccca

SEQ ID NO: 144856 - DNA, 30 bp, Homo sapiens; identical to SEQ ID NO: 65540
  chr3:12503124-12503154
  hypo

SEQ ID NO: 144857 - DNA, 28 bp, Homo sapiens
  chr3:12507119-12507147
  hypo
tagtaacgtgtttttctaccaaatagac

SEQ ID NO: 144858 - DNA, 40 bp, Homo sapiens; identical to SEQ ID NO: 65542
  chr3:12558546-12558586
  hypo

SEQ ID NO: 144859 - DNA, 44 bp, Homo sapiens; identical to SEQ ID NO: 65543
  chr3:12575983-12576027
  hypo

SEQ ID NO: 144860 - DNA, 91 bp, Homo sapiens; identical to SEQ ID NO: 65544
  chr3:12586166-12586257
  hypo

SEQ ID NO: 144861 - DNA, 150 bp, Homo sapiens; identical to SEQ ID NO: 65545
  chr3:12596373-12596523
  hypo

SEQ ID NO: 144862 - DNA, 30 bp, Homo sapiens; identical to SEQ ID NO: 17349
  chr3:12596822-12596852
  hypo

SEQ ID NO: 144863 - DNA, 102 bp, Homo sapiens; identical to SEQ ID NO: 65547
  chr3:12605272-12605374
  hypo

SEQ ID NO: 144864 - DNA, 30 bp, Homo sapiens; identical to SEQ ID NO: 65548
  chr3:12625379-12625409
  hypo

SEQ ID NO: 144865 - DNA, 123 bp, Homo sapiens; identical to SEQ ID NO: 65549
  chr3:12626571-12626694
  hypo

SEQ ID NO: 144866 - DNA, 119 bp, Homo sapiens
  chr3:12660086-12660205
  hypo
tcatctgatgcccggcgctgatagccaaactgctgaactattgtaggagagatgcagctggagccatcaaacacggcatctttgaatccaaaaccattgctgatcgtcttccaagctcc

SEQ ID NO: 144867 - DNA, 30 bp, Homo sapiens
  chr3:12718585-12718615
  hypo
atcttatcggcagggcgcggtggctcacac

SEQ ID NO: 144868 - DNA, 31 bp, Homo sapiens; identical to SEQ ID NO: 65551
  chr3:12734231-12734262
  hypo

SEQ ID NO: 144869 - DNA, 41 bp, Homo sapiens
  chr3:12743272-12743313
  hypo
ctcgagtagttgggattacaggcatgcgccaccacgcccca

SEQ ID NO: 144870 - DNA, 41 bp, Homo sapiens
  chr3:12761056-12761097
  hypo
cggccagcaatcttgaaaacttccaccgcatcccaaatctt

SEQ ID NO: 144871 - DNA, 31 bp, Homo sapiens; identical to SEQ ID NO: 65552
  chr3:12788072-12788103
  hypo

SEQ ID NO: 144872 - DNA, 30 bp, Homo sapiens; identical to SEQ ID NO: 65553
  chr3:12810339-12810369
  hypo

SEQ ID NO: 144873 - DNA, 95 bp, Homo sapiens; identical to SEQ ID NO: 65554
  chr3:12820701-12820796
  hypo

SEQ ID NO: 144874 - DNA, 79 bp, Homo sapiens; identical to SEQ ID NO: 65555
  chr3:12821388-12821467
  hypo

SEQ ID NO: 144875 - DNA, 30 bp, Homo sapiens
  chr3:12837002-12837032
  hypo
tggtctagaacctacgtacctcataataac

SEQ ID NO: 144876 - DNA, 30 bp, Homo sapiens; identical to SEQ ID NO: 65556
  chr3:12840319-12840349
  hypo

SEQ ID NO: 144877 - DNA, 126 bp, Homo sapiens; identical to SEQ ID NO: 65557
  chr3:12856635-12856761
  hypo

SEQ ID NO: 144878 - DNA, 30 bp, Homo sapiens; identical to SEQ ID NO: 65558
  chr3:12858400-12858430
  hypo

SEQ ID NO: 144879 - DNA, 46 bp, Homo sapiens; identical to SEQ ID NO: 65559
  chr3:12867101-12867147
  hypo

SEQ ID NO: 144880 - DNA, 25 bp, Homo sapiens
  chr3:12870930-12870955
  hypo
ccaccacgcccggccccatattaca

SEQ ID NO: 144881 - DNA, 30 bp, Homo sapiens; identical to SEQ ID NO: 65561
  chr3:12875590-12875620
  hypo

SEQ ID NO: 144882 - DNA, 30 bp, Homo sapiens
  chr3:12923954-12923984
  hypo
cccccggctgccgccgcgggttccgcgacg

SEQ ID NO: 144883 - DNA, 44 bp, Homo sapiens; identical to SEQ ID NO: 65562
  chr3:12940403-12940447
  hypo

SEQ ID NO: 144884 - DNA, 103 bp, Homo sapiens; identical to SEQ ID NO: 65563
  chr3:12940861-12940964
  hypo

SEQ ID NO: 144885 - DNA, 30 bp, Homo sapiens; identical to SEQ ID NO: 65564
  chr3:12943805-12943835
  hypo

SEQ ID NO: 144886 - DNA, 30 bp, Homo sapiens; identical to SEQ ID NO: 65565
  chr3:12947640-12947670
  hypo

SEQ ID NO: 144887 - DNA, 30 bp, Homo sapiens; identical to SEQ ID NO: 17355
  chr3:12949442-12949472
  hypo

SEQ ID NO: 144888 - DNA, 216 bp, Homo sapiens
  chr3:12949720-12949936
  hypo
gtcaggggaaatgccgcactggcttcgccgcaggccctgccccgcgtgatgcatgccctgaatgcagacgccctgcctcggtcttgcatgcgctgggctagcaaggtggttctaggccaagctcttaccggcttccgagaggtcccgcagggagctgctgagggcgctgcgcttgaggccctcaccgctggcatagctgtcgtccaggcaggcccg

SEQ ID NO: 144889 - DNA, 30 bp, Homo sapiens; identical to SEQ ID NO: 65568
  chr3:12950498-12950528
  hypo

SEQ ID NO: 144890 - DNA, 76 bp, Homo sapiens; identical to SEQ ID NO: 17357
  chr3:12956288-12956364
  hypo

SEQ ID NO: 144891 - DNA, 398 bp, Homo sapiens
  chr3:12976952-12977350
  hypo
gaagaggttcaggccgatgcggtagtgcctcttgcggatgacatcgttgctaaaggcaggcgagtcccagctgttgcgggcctccttgtggtaggtctgcttgctgagcgtctgctcccgcaggctgtcacgggacgatgactcggagctgcagttgatggtatcgttggagttggacgtgctgttgatgctgtcattgtcaccgtctgagtagtccgactcagacttgctctgccggttggctgagccattgatggccaagtggctgtccaggggcctggggggccggggccgcaactcaggctcctcccgggggaggctcttgggggcgccgctgtggggaccatgcttgggactgccctgctgcccgccaaggctgcgctcgtaagcactctgcc

SEQ ID NO: 144892 - DNA, 30 bp, Homo sapiens; identical to SEQ ID NO: 65571
  chr3:12983206-12983236
  hypo

SEQ ID NO: 144893 - DNA, 440 bp, Homo sapiens; identical to SEQ ID NO: 65572
  chr3:12984506-12984946
  hypo

SEQ ID NO: 144894 - DNA, 428 bp, Homo sapiens; identical to SEQ ID NO: 107914
  chr3:13008719-13009147
  hypo

SEQ ID NO: 144895 - DNA, 107 bp, Homo sapiens
  chr3:13020985-13021092
  hypo
cacatgcacgcagcacgcgcacacacacactctaagatgtccctggacagcggttgtctctggggaggggaatgggacgtggaagggcgtggcgcatagctcactgt

SEQ ID NO: 144896 - DNA, 58 bp, Homo sapiens
  chr3:13028239-13028297
  hypo
gacgaggagctgggacgagaaccaggctggcagggtgcctgtgcgcatatgtgagctc

SEQ ID NO: 144897 - DNA, 418 bp, Homo sapiens
  chr3:13028557-13028975
  hypo
atgagctccctcagccgtcccccatctggtgctgcggccagtgcgggtcataaaccctgagcccctgcttaatccgccagctcccgagtcagcgccagccagacacgtgacactgcagccccacagacctgtttggcaggagcagcagctggtcctgctgggggcggggagggctgtccgccttgccctcgccctgtccctaccacctcccagcccacagcctgcagttgggccactgcctgccttgtagcgagaggtatggtacgtgctgggggcagtgcaggtagggaaaagaacacggttctcaccaaatggtgccgggccacctgggaatgggtatatgtgtgcacctggggccgtgcatgtgcacacatgtgcatgtgtcagagagagagagagagaccgtagatgaaaatct

SEQ ID NO: 144898 - DNA, 30 bp, Homo sapiens; identical to SEQ ID NO: 17362
  chr3:13083462-13083492
  hypo

SEQ ID NO: 144899 - DNA, 229 bp, Homo sapiens
  chr3:13083877-13084106
  hypo
ctccagctggaccacggtaacgtctccgcggagacacggagaggggctagtgggaggtggagaaccggctgcttcggcccgccctggtccctgccacggcggcccccactcacatggcccagcccgcccggcgcagcttgtacagtacacgcctccaatacaaagagcagccagcacaaaagcctagcaactcattcacgcagctcgcctggcccggctcatgctgctg

SEQ ID NO: 144900 - DNA, 31 bp, Homo sapiens; identical to SEQ ID NO: 2399
  chr3:13138221-13138252
  hypo

SEQ ID NO: 144901 - DNA, 95 bp, Homo sapiens; identical to SEQ ID NO: 17365
  chr3:13205533-13205628
  hypo

SEQ ID NO: 144902 - DNA, 30 bp, Homo sapiens
  chr3:13218235-13218265
  hypo
ggaacaggcgaggtccgtgcatttaggcca

SEQ ID NO: 144903 - DNA, 685 bp, Homo sapiens; identical to SEQ ID NO: 107921
  chr3:13323320-13324005
  hypo

SEQ ID NO: 144904 - DNA, 113 bp, Homo sapiens; identical to SEQ ID NO: 2401
  chr3:13324234-13324347
  hypo

SEQ ID NO: 144905 - DNA, 254 bp, Homo sapiens; identical to SEQ ID NO: 2402
  chr3:13324419-13324673
  hypo

SEQ ID NO: 144906 - DNA, 199 bp, Homo sapiens; identical to SEQ ID NO: 2403
  chr3:13324740-13324939
  hypo

SEQ ID NO: 144907 - DNA, 30 bp, Homo sapiens; identical to SEQ ID NO: 65584
  chr3:13358467-13358497
  hypo

SEQ ID NO: 144908 - DNA, 31 bp, Homo sapiens; identical to SEQ ID NO: 65585
  chr3:13363860-13363891
  hypo

SEQ ID NO: 144909 - DNA, 264 bp, Homo sapiens
  chr3:13367326-13367590
  hypo
catagtaaaccgtcacggatcccacggcccgggccacagccacacccgtcttggggtcgatgtggaggatgctgttggccgaggagctccaggttcctgagaggcctggagaggaagcacaggtgtcagccccctttccatagctggacactccagtcaaagcccagctcacctggatgacaggccagcttcctcgctggctgccgctacccccatgggggctcactcagcagcctcaggagacagccacgctgcctgccccag

SEQ ID NO: 144910 - DNA, 30 bp, Homo sapiens
  chr3:13431621-13431651
  hypo
gccggcaacagtgttcgtttcctagtgcca

SEQ ID NO: 144911 - DNA, 30 bp, Homo sapiens
  chr3:13431940-13431970
  hypo
caccggcagaggacccgcgtggctctgctc

SEQ ID NO: 144912 - DNA, 30 bp, Homo sapiens
  chr3:13442884-13442914
  hypo
gcatgccgaccactccgacaccacctggcc

SEQ ID NO: 144913 - DNA, 53 bp, Homo sapiens; identical to SEQ ID NO: 65586
  chr3:13501984-13502037
  hypo

SEQ ID NO: 144914 - DNA, 30 bp, Homo sapiens
  chr3:13505641-13505671
  hypo
acgtgaaagtccagtcggtctaagggaatc

SEQ ID NO: 144915 - DNA, 30 bp, Homo sapiens; identical to SEQ ID NO: 65587
  chr3:13522725-13522755
  hypo

SEQ ID NO: 144916 - DNA, 30 bp, Homo sapiens
  chr3:13523992-13524022
  hypo
tggagggaggccgggcgcagtggctcgtgc

SEQ ID NO: 144917 - DNA, 19 bp, Homo sapiens
  chr3:13525738-13525757
  hypo
caggcgtgagccaccgcac

SEQ ID NO: 144918 - DNA, 30 bp, Homo sapiens; identical to SEQ ID NO: 65588
  chr3:13547506-13547536
  hypo

SEQ ID NO: 144919 - DNA, 11 bp, Homo sapiens
  chr3:13590973-13590984
  hypo
cgggttccccc

SEQ ID NO: 144920 - DNA, 824 bp, Homo sapiens; identical to SEQ ID NO: 17370
  chr3:13611724-13612548
  hypo

SEQ ID NO: 144921 - DNA, 27 bp, Homo sapiens
  chr3:13627315-13627342
  hypo
aaaagcctagcacgtgtagttagttac

SEQ ID NO: 144922 - DNA, 207 bp, Homo sapiens; identical to SEQ ID NO: 65591
  chr3:13669959-13670166
  hypo

SEQ ID NO: 144923 - DNA, 258 bp, Homo sapiens
  chr3:13679056-13679314
  hypo
tgcaggaagtgcgagcgcaccacgtgccatgacttcctggagtgccagaactcgccagcgcgcatcacgcactaccagctcaacttccagacgggcctcctggtgcctgcgcatatcttccgcattggccccgcgccagccttcacgggggacaccatcgccctgaacatcatcaagggcaatgaggagggctactttggcacgcgcaggctcaatgcctacacgggtgtggtctacctgcagcgggccgtgctggag

SEQ ID NO: 144924 - DNA, 30 bp, Homo sapiens
  chr3:13828067-13828097
  hypo
gaatgttggccatagcgcttgacatgcgtt

SEQ ID NO: 144925 - DNA, 30 bp, Homo sapiens
  chr3:13828491-13828521
  hypo
tgccgggccggacagcgcagctataaaggg

SEQ ID NO: 144926 - DNA, 30 bp, Homo sapiens
  chr3:13843145-13843175
  hypo
cctctccagtgccagcggtgggcagcggga

SEQ ID NO: 144927 - DNA, 30 bp, Homo sapiens; identical to SEQ ID NO: 17372
  chr3:13860189-13860219
  hypo

SEQ ID NO: 144928 - DNA, 643 bp, Homo sapiens; identical to SEQ ID NO: 107932
  chr3:13936737-13937380
  hypo

SEQ ID NO: 144929 - DNA, 30 bp, Homo sapiens; identical to SEQ ID NO: 17373
  chr3:14164940-14164970
  hypo

SEQ ID NO: 144930 - DNA, 217 bp, Homo sapiens
  chr3:14174612-14174829
  hypo
cctgaccccagacaagctccccgcaaacaagtcacaaatataaggcctgcactaagcgtctaaggggatttgcacacacggggccggggaagcattttgttaatggtttgccatgggtgggaggacaatcaggacaggctttccagaggcagcggcatttgttcaggcttctcaggatttcagcagagggaggttagctccacggcatgccagtggt

SEQ ID NO: 144931 - DNA, 30 bp, Homo sapiens
  chr3:14198602-14198632
  hypo
ggagaggacgctgcacgttcagcttccact

SEQ ID NO: 144932 - DNA, 30 bp, Homo sapiens
  chr3:14198912-14198942
  hypo
tacacacaggcggctcgggcactattcctg

SEQ ID NO: 144933 - DNA, 45 bp, Homo sapiens
  chr3:14208687-14208732
  hypo
acccctttattgaaacgtttcatcgccctccgaagatatgtctca

SEQ ID NO: 144934 - DNA, 30 bp, Homo sapiens; identical to SEQ ID NO: 65596
  chr3:14239629-14239659
  hypo

SEQ ID NO: 144935 - DNA, 30 bp, Homo sapiens
  chr3:14240924-14240954
  hypo
agctgaatgtgtgtgcgtgttcattatcaa

SEQ ID NO: 144936 - DNA, 94 bp, Homo sapiens; identical to SEQ ID NO: 65597
  chr3:14291142-14291236
  hypo

SEQ ID NO: 144937 - DNA, 36 bp, Homo sapiens
  chr3:14313487-14313523
  hypo
cgccttctgtattttcttcctcgcaacgttcagttc

SEQ ID NO: 144938 - DNA, 145 bp, Homo sapiens; identical to SEQ ID NO: 65598
  chr3:14383871-14384016
  hypo

SEQ ID NO: 144939 - DNA, 266 bp, Homo sapiens; identical to SEQ ID NO: 17375
  chr3:14384851-14385117
  hypo

SEQ ID NO: 144940 - DNA, 30 bp, Homo sapiens
  chr3:14385357-14385387
  hypo
cggtgtctctgggtccgaggtcgcatgggc

SEQ ID NO: 144941 - DNA, 192 bp, Homo sapiens; identical to SEQ ID NO: 65600
  chr3:14386837-14387029
  hypo

SEQ ID NO: 144942 - DNA, 30 bp, Homo sapiens
  chr3:14415719-14415749
  hypo
aagtggcggcagcaccgatgtcaacaccca

SEQ ID NO: 144943 - DNA, 106 bp, Homo sapiens; identical to SEQ ID NO: 107936
  chr3:14443832-14443938
  hypo

SEQ ID NO: 144944 - DNA, 601 bp, Homo sapiens; identical to SEQ ID NO: 107937
  chr3:14443997-14444598
  hypo

SEQ ID NO: 144945 - DNA, 106 bp, Homo sapiens; identical to SEQ ID NO: 107938
  chr3:14444657-14444763
  hypo

SEQ ID NO: 144946 - DNA, 92 bp, Homo sapiens; identical to SEQ ID NO: 65603
  chr3:14452943-14453035
  hypo

SEQ ID NO: 144947 - DNA, 37 bp, Homo sapiens; identical to SEQ ID NO: 65604
  chr3:14508071-14508108
  hypo

SEQ ID NO: 144948 - DNA, 31 bp, Homo sapiens; identical to SEQ ID NO: 17377
  chr3:14510138-14510169
  hypo

SEQ ID NO: 144949 - DNA, 31 bp, Homo sapiens; identical to SEQ ID NO: 17378
  chr3:14510390-14510421
  hypo

SEQ ID NO: 144950 - DNA, 176 bp, Homo sapiens
  chr3:14514230-14514406
  hypo
gacatggcagatgggcgattcggagaagggacccacatttctgtgtgagctgatcattgtctgggccatcgtaataagttgcaagtgcccaggagaagcctacgccacactcaggattctgtgctccctggagcgtgcgaggggctgggcattggctccctcccgtgctttataca

SEQ ID NO: 144951 - DNA, 30 bp, Homo sapiens
  chr3:14514970-14515000
  hypo
ctttgtccccctccccgcgggccgaagtct

SEQ ID NO: 144952 - DNA, 271 bp, Homo sapiens
  chr3:14535134-14535405
  hypo
ctgggtggccccttaggagttcggcccacatgctgacttcagagcatccggggactgctggggcctggcgatcggggggcccggctgctgtgtgccgtgtgcggcttgcggctgatgatcagctccaagacatcacccgcctcggccaggagtggcaccgccaggcagcagtcgaagtcccgtgtacggacgtggttgacctgcatggggcacaagcaagggaacagaaccgagatgtcagccctgctgcgctgaagggagcaagaggcat

SEQ ID NO: 144953 - DNA, 30 bp, Homo sapiens; identical to SEQ ID NO: 65608
  chr3:14555913-14555943
  hypo

SEQ ID NO: 144954 - DNA, 113 bp, Homo sapiens
  chr3:14563227-14563340
  hypo
gctggccccgtgcagcgggattccatcgacactgagcagcctgtcgcccaccttcagggagccctccctgtagggaagggccagtcaccagcctggcccggcagcagcactgg

SEQ ID NO: 144955 - DNA, 132 bp, Homo sapiens; identical to SEQ ID NO: 65609
  chr3:14564197-14564329
  hypo

SEQ ID NO: 144956 - DNA, 211 bp, Homo sapiens
  chr3:14565823-14566034
  hypo
aggccctggtggggaggtagccgtgtccacccgcaaccgaggcagtggagaaagttccccgtccaagggcacccaccgggcgggggcagctcatactccacctccagcaccacgcgctcgcccacattcttgagcagggtgatgatctcatcgtggcggagcctggtcaggtggatcccgttcacagaccgaatatagtcaccaatgttca

SEQ ID NO: 144957 - DNA, 31 bp, Homo sapiens; identical to SEQ ID NO: 65610
  chr3:14575093-14575124
  hypo

SEQ ID NO: 144958 - DNA, 30 bp, Homo sapiens
  chr3:14614341-14614371
  hypo
agcccgcagccagctcggtggagctgagca

SEQ ID NO: 144959 - DNA, 30 bp, Homo sapiens; identical to SEQ ID NO: 65611
  chr3:14615429-14615459
  hypo

SEQ ID NO: 144960 - DNA, 27 bp, Homo sapiens
  chr3:14694130-14694157
  hypo
gggcgcggtgactcacgcctgtaatcc

SEQ ID NO: 144961 - DNA, 30 bp, Homo sapiens; identical to SEQ ID NO: 65613
  chr3:14716123-14716153
  hypo

SEQ ID NO: 144962 - DNA, 30 bp, Homo sapiens; identical to SEQ ID NO: 17380
  chr3:14716480-14716510
  hypo

SEQ ID NO: 144963 - DNA, 30 bp, Homo sapiens; identical to SEQ ID NO: 17381
  chr3:14849230-14849260
  hypo

SEQ ID NO: 144964 - DNA, 354 bp, Homo sapiens; identical to SEQ ID NO: 107942
  chr3:14851850-14852204
  hypo

SEQ ID NO: 144965 - DNA, 511 bp, Homo sapiens; identical to SEQ ID NO: 107943
  chr3:14852212-14852723
  hypo

SEQ ID NO: 144966 - DNA, 30 bp, Homo sapiens
  chr3:14993798-14993828
  hypo
gccctgtcttcagccgtggcactgagccac

SEQ ID NO: 144967 - DNA, 41 bp, Homo sapiens; identical to SEQ ID NO: 65618
  chr3:15004943-15004984
  hypo

SEQ ID NO: 144968 - DNA, 40 bp, Homo sapiens
  chr3:15005223-15005263
  hypo
gcctctgcctcccaaagtcgcattttttaataatgctcat

SEQ ID NO: 144969 - DNA, 82 bp, Homo sapiens
  chr3:15079927-15080009
  hypo
aagtgtgctgccacccgatgtcctttcttttttttccggccctttgccagtttccaagttttgttagcgcatataatccagt

SEQ ID NO: 144970 - DNA, 27 bp, Homo sapiens
  chr3:15102714-15102741
  hypo
gtctccctctccccacggtctccctct

SEQ ID NO: 144971 - DNA, 251 bp, Homo sapiens
  chr3:15105312-15105563
  hypo
cagctcgctgcgggccgcaccgagacccccaccccttcccattatctgcctggcagttgcccggggacaaaggtgtgcacagttgtgcagtaggttatgaaggagtatctgggtgcccatacaccctaagaccaagaccaagtcttccaggaagccatcaagccagctgattccaggcaagcaggtccaagttatcagattcacctgcgcagagcaaatggctaggaagcggcttccggatctcttgaagg

SEQ ID NO: 144972 - DNA, 18 bp, Homo sapiens
  chr3:15107708-15107726
  hypo
aatggtgctatcttggct

SEQ ID NO: 144973 - DNA, 164 bp, Homo sapiens; identical to SEQ ID NO: 17385
  chr3:15116203-15116367
  hypo

SEQ ID NO: 144974 - DNA, 306 bp, Homo sapiens; identical to SEQ ID NO: 17386
  chr3:15123749-15124055
  hypo

SEQ ID NO: 144975 - DNA, 31 bp, Homo sapiens; identical to SEQ ID NO: 17387
  chr3:15317991-15318022
  hypo

SEQ ID NO: 144976 - DNA, 143 bp, Homo sapiens
  chr3:15349227-15349370
  hypo
cactgtgcaggcagccgctctgcaagatgcactcgcatgcatgaccgcatcctcacggtcacctccctggtggtggccagtgccagtgctgtccacattcacaccagtgagaaaacggagggccagatcggttagcgtgtggc

SEQ ID NO: 144977 - DNA, 80 bp, Homo sapiens
  chr3:15374527-15374607
  hypo
cattgccgaaggctgcggcctctctgggcgagccccataccgaaacacagaggtgcggcggtcctacctgaatagccagg

SEQ ID NO: 144978 - DNA, 30 bp, Homo sapiens; identical to SEQ ID NO: 65626
  chr3:15417155-15417185
  hypo

SEQ ID NO: 144979 - DNA, 93 bp, Homo sapiens
  chr3:15432500-15432593
  hypo
ggggatgatgcgggaagaaggtgatctttccctgaagccgagcagtctgagggcaggcccctctccaaagccgcatcatctgaagttagccac

SEQ ID NO: 144980 - DNA, 153 bp, Homo sapiens; identical to SEQ ID NO: 65627
  chr3:15540527-15540680
  hypo

SEQ ID NO: 144981 - DNA, 30 bp, Homo sapiens
  chr3:15541375-15541405
  hypo
tacttataaagtgggcgtgcaaagccgact

SEQ ID NO: 144982 - DNA, 31 bp, Homo sapiens; identical to SEQ ID NO: 65628
  chr3:15600371-15600402
  hypo

SEQ ID NO: 144983 - DNA, 99 bp, Homo sapiens
  chr3:15674930-15675029
  hypo
ttagagctctcctaccgggctccttttgtaaaataaattttatcttctccagatagaaagaaatgtgataccttgcggattttgcggtttccttgtttt

SEQ ID NO: 144984 - DNA, 30 bp, Homo sapiens
  chr3:15687575-15687605
  hypo
aaaatagaaaagaagcgttcctcacatctg

SEQ ID NO: 144985 - DNA, 30 bp, Homo sapiens
  chr3:15687815-15687845
  hypo
ggcaagagttgggcacgttgcccgactgtg

SEQ ID NO: 144986 - DNA, 22 bp, Homo sapiens
  chr3:15696527-15696549
  hypo
ccgcgcccggcctgcatcagtt

SEQ ID NO: 144987 - DNA, 19 bp, Homo sapiens
  chr3:15899076-15899095
  hypo
ccaccgcgcctggccgcaa

SEQ ID NO: 144988 - DNA, 30 bp, Homo sapiens; identical to SEQ ID NO: 17390
  chr3:15919490-15919520
  hypo

SEQ ID NO: 144989 - DNA, 30 bp, Homo sapiens
  chr3:16024323-16024353
  hypo
gggcggacgcctgcacgatgatgcgaatgg

SEQ ID NO: 144990 - DNA, 30 bp, Homo sapiens; identical to SEQ ID NO: 17391
  chr3:16329435-16329465
  hypo

SEQ ID NO: 144991 - DNA, 30 bp, Homo sapiens
  chr3:16363622-16363652
  hypo
agctgaaactgacagcgctctgcagccgat

SEQ ID NO: 144992 - DNA, 233 bp, Homo sapiens
  chr3:16363980-16364213
  hypo
tcaggcaggccctgccgagaatgtggcctcagccatcaaaggtgcagtgagctgaatccaggtgatgcctgactcaggctttggtgtgtccactcgactcactggcctcttccccagcaactggtgaaaatgtcctcaggaaaagcaccacaggctgctcagggtggggtgggaagcatcagaatcatctggcacaagggttgccgacacttgcacctcgtacagcccttgtg

SEQ ID NO: 144993 - DNA, 30 bp, Homo sapiens; identical to SEQ ID NO: 65633
  chr3:16371441-16371471
  hypo

SEQ ID NO: 144994 - DNA, 30 bp, Homo sapiens; identical to SEQ ID NO: 17392
  chr3:16411652-16411682
  hypo

SEQ ID NO: 144995 - DNA, 30 bp, Homo sapiens
  chr3:16419454-16419484
  hypo
gacgcgtgatccccacgtgcgttttttgca

SEQ ID NO: 144996 - DNA, 216 bp, Homo sapiens; identical to SEQ ID NO: 17393
  chr3:16439261-16439477
  hypo

SEQ ID NO: 144997 - DNA, 30 bp, Homo sapiens
  chr3:16527349-16527379
  hypo
gctctctttcatgtgcggtggataagcttt

SEQ ID NO: 144998 - DNA, 79 bp, Homo sapiens
  chr3:16542423-16542502
  hypo
gtatggctgactgttcgggaagtctggacagaatgcgggagcattcggaacaaatcgctgttatataaaacagagatgg

SEQ ID NO: 144999 - DNA, 78 bp, Homo sapiens
  chr3:16542621-16542699
  hypo
tgacagagcaagacttgtctgtaacaaaacacacacacgcacacacacacaaacacagcacagcgccaaatacttggc

SEQ ID NO: 145000 - DNA, 1245 bp, Homo sapiens; identical to SEQ ID NO: 38969
  chr3:16553593-16554838
  hypo

SEQ ID NO: 145001 - DNA, 322 bp, Homo sapiens; identical to SEQ ID NO: 38970
  chr3:16555196-16555518
  hypo

SEQ ID NO: 145002 - DNA, 30 bp, Homo sapiens
  chr3:16572940-16572970
  hypo
ctgtgctgtcacccccggtatcctttcacg

SEQ ID NO: 145003 - DNA, 30 bp, Homo sapiens; identical to SEQ ID NO: 65638
  chr3:16645769-16645799
  hypo

SEQ ID NO: 145004 - DNA, 30 bp, Homo sapiens
  chr3:16646360-16646390
  hypo
gggggtggggaacccgcaccccaaacctct

SEQ ID NO: 145005 - DNA, 30 bp, Homo sapiens
  chr3:16647080-16647110
  hypo
acgcagcgcgtgtgcgcaggtccggtgcct

SEQ ID NO: 145006 - DNA, 35 bp, Homo sapiens; identical to SEQ ID NO: 2416
  chr3:16860035-16860070
  hypo

SEQ ID NO: 145007 - DNA, 106 bp, Homo sapiens; identical to SEQ ID NO: 107963
  chr3:16925425-16925531
  hypo

SEQ ID NO: 145008 - DNA, 636 bp, Homo sapiens; identical to SEQ ID NO: 107964
  chr3:16925583-16926219
  hypo

SEQ ID NO: 145009 - DNA, 353 bp, Homo sapiens; identical to SEQ ID NO: 38974
  chr3:16926665-16927018
  hypo

SEQ ID NO: 145010 - DNA, 23 bp, Homo sapiens
  chr3:16966695-16966718
  hypo
tgagccaccgcgcccggccaggg

SEQ ID NO: 145011 - DNA, 121 bp, Homo sapiens; identical to SEQ ID NO: 65642
  chr3:17101441-17101562
  hypo

SEQ ID NO: 145012 - DNA, 25 bp, Homo sapiens
  chr3:17192867-17192892
  hypo
gagcgagaatcgtctcaaaaaaaaa

SEQ ID NO: 145013 - DNA, 30 bp, Homo sapiens
  chr3:17234960-17234990
  hypo
agatcacatgcttgccgtgggtgcgacata

SEQ ID NO: 145014 - DNA, 30 bp, Homo sapiens
  chr3:17242061-17242091
  hypo
ggaaaaactgttttccgtgaaacggtccct

SEQ ID NO: 145015 - DNA, 30 bp, Homo sapiens
  chr3:17318259-17318289
  hypo
ttttctaaaggctcgcgtgattaggtggag

SEQ ID NO: 145016 - DNA, 30 bp, Homo sapiens
  chr3:17318972-17319002
  hypo
tactctttggaaacccgtaggcaagacttg

SEQ ID NO: 145017 - DNA, 20 bp, Homo sapiens
  chr3:17523518-17523538
  hypo
caccgcgcctggccgactca

SEQ ID NO: 145018 - DNA, 71 bp, Homo sapiens
  chr3:17560359-17560430
  hypo
aaaagtgcttgctctggctcccgcacctgctcacctgcgcgctccctcccgtgaggggtggaaggcagaca

SEQ ID NO: 145019 - DNA, 31 bp, Homo sapiens; identical to SEQ ID NO: 2419
  chr3:17571374-17571405
  hypo

SEQ ID NO: 145020 - DNA, 31 bp, Homo sapiens; identical to SEQ ID NO: 17400
  chr3:17643205-17643236
  hypo

SEQ ID NO: 145021 - DNA, 21 bp, Homo sapiens
  chr3:17676888-17676909
  hypo
aaggctgggtgtggtgtctca

SEQ ID NO: 145022 - DNA, 29 bp, Homo sapiens
  chr3:17735071-17735100
  hypo
aagctcgaactgggcggagcccactgcag

SEQ ID NO: 145023 - DNA, 30 bp, Homo sapiens
  chr3:18176973-18177003
  hypo
gggccagctgctggccgttgcctgccctgc

SEQ ID NO: 145024 - DNA, 90 bp, Homo sapiens
  chr3:18427926-18428016
  hypo
ggcaggacccatggccgaggcagcattcaagctcctttccctttcgtcctggtatattcggtctctttcagcttccggtaactgcaagaa

SEQ ID NO: 145025 - DNA, 153 bp, Homo sapiens; identical to SEQ ID NO: 17401
  chr3:18452750-18452903
  hypo

SEQ ID NO: 145026 - DNA, 30 bp, Homo sapiens; identical to SEQ ID NO: 65648
  chr3:18459504-18459534
  hypo

SEQ ID NO: 145027 - DNA, 131 bp, Homo sapiens
  chr3:18462327-18462458
  hypo
ccttcctcttcctagcgggctcccgttctgctccaggcgggcaatcttggctggtggacccttcggatcactcacattgttagacatttctgaatgttctttcccctgagttgcctcgttcaaatgatcca

SEQ ID NO: 145028 - DNA, 1143 bp, Homo sapiens; identical to SEQ ID NO: 107971
  chr3:18485177-18486320
  hypo

SEQ ID NO: 145029 - DNA, 30 bp, Homo sapiens; identical to SEQ ID NO: 107972
  chr3:18486524-18486554
  hypo

SEQ ID NO: 145030 - DNA, 30 bp, Homo sapiens
  chr3:19031351-19031381
  hypo
tgatagagagctagtcgtcaagaagcaaga

SEQ ID NO: 145031 - DNA, 77 bp, Homo sapiens; identical to SEQ ID NO: 65652
  chr3:19276254-19276331
  hypo

SEQ ID NO: 145032 - DNA, 30 bp, Homo sapiens
  chr3:19405777-19405807
  hypo
ctgtttagccattcacgctaatctaggatt

SEQ ID NO: 145033 - DNA, 139 bp, Homo sapiens; identical to SEQ ID NO: 17404
  chr3:19790878-19791017
  hypo

SEQ ID NO: 145034 - DNA, 148 bp, Homo sapiens
  chr3:19992378-19992526
  hypo
tcaaatttggacatggctagtcgaggcgcaacaagacccaacgggccaaatacgggaaataaaatatgccagttcaaactagtacttctgggagagtccgctgttggcaaatcaagcctagtgcttcgttttgtgaaaggccaatttc

SEQ ID NO: 145035 - DNA, 26 bp, Homo sapiens
  chr3:20013244-20013270
  hypo
gtggaagccaccgcacctggcccagt

SEQ ID NO: 145036 - DNA, 30 bp, Homo sapiens
  chr3:20049623-20049653
  hypo
cgaccattcggtggcggcggctgttactgg

SEQ ID NO: 145037 - DNA, 45 bp, Homo sapiens; identical to SEQ ID NO: 65655
  chr3:20070403-20070448
  hypo

SEQ ID NO: 145038 - DNA, 99 bp, Homo sapiens; identical to SEQ ID NO: 65656
  chr3:20070773-20070872
  hypo

SEQ ID NO: 145039 - DNA, 98 bp, Homo sapiens; identical to SEQ ID NO: 17407
  chr3:20071111-20071209
  hypo

SEQ ID NO: 145040 - DNA, 133 bp, Homo sapiens
  chr3:20113811-20113944
  hypo
attccatttttaggccgaggagtcttgtaaatgtaatggctggaaaaaccctaacccctcacccactccccccagagccgacctgcagcaaataattgtcagtctaacagaatcctgtcggagttgtagccat

SEQ ID NO: 145041 - DNA, 37 bp, Homo sapiens; identical to SEQ ID NO: 65658
  chr3:20120130-20120167
  hypo

SEQ ID NO: 145042 - DNA, 31 bp, Homo sapiens; identical to SEQ ID NO: 65659
  chr3:20171684-20171715
  hypo

SEQ ID NO: 145043 - DNA, 30 bp, Homo sapiens
  chr3:20190188-20190218
  hypo
cccacatgagcttaacgacactagacgcag

SEQ ID NO: 145044 - DNA, 30 bp, Homo sapiens
  chr3:20215872-20215902
  hypo
gcaaatagaggtcatcggaatcatctcctg

SEQ ID NO: 145045 - DNA, 39 bp, Homo sapiens
  chr3:20630726-20630765
  hypo
gttttgccagtcctgctgaatgtccgaccgcctacacac

SEQ ID NO: 145046 - DNA, 18 bp, Homo sapiens
  chr3:21313407-21313425
  hypo
gtgcggggccaccgagac

SEQ ID NO: 145047 - DNA, 30 bp, Homo sapiens
  chr3:21797602-21797632
  hypo
aagaattgactaaagcgagcaaggacagat

SEQ ID NO: 145048 - DNA, 30 bp, Homo sapiens; identical to SEQ ID NO: 2423
  chr3:22335323-22335353
  hypo

SEQ ID NO: 145049 - DNA, 30 bp, Homo sapiens; identical to SEQ ID NO: 38985
  chr3:22412730-22412760
  hypo

SEQ ID NO: 145050 - DNA, 320 bp, Homo sapiens; identical to SEQ ID NO: 65663
  chr3:23031954-23032274
  hypo

SEQ ID NO: 145051 - DNA, 30 bp, Homo sapiens; identical to SEQ ID NO: 17410
  chr3:23427945-23427975
  hypo

SEQ ID NO: 145052 - DNA, 58 bp, Homo sapiens
  chr3:23521986-23522044
  hypo
gcctgatcccagccccgaccggttccatggagggtgcagccctcgctgcgcctccccc

SEQ ID NO: 145053 - DNA, 163 bp, Homo sapiens; identical to SEQ ID NO: 17411
  chr3:23750592-23750755
  hypo

SEQ ID NO: 145054 - DNA, 95 bp, Homo sapiens
  chr3:23838423-23838518
  hypo
aacgttgaaacaatacgttaggccaggagacatgttagactggactggtaacagctacttttttttttttttgagacggagtctcgccctgttgc

SEQ ID NO: 145055 - DNA, 30 bp, Homo sapiens; identical to SEQ ID NO: 38992
  chr3:23848497-23848527
  hypo

SEQ ID NO: 145056 - DNA, 167 bp, Homo sapiens; identical to SEQ ID NO: 107993
  chr3:23848588-23848755
  hypo

SEQ ID NO: 145057 - DNA, 20 bp, Homo sapiens
  chr3:23924048-23924068
  hypo
gggaccgggagccgcggagc

SEQ ID NO: 145058 - DNA, 285 bp, Homo sapiens; identical to SEQ ID NO: 107996
  chr3:23957823-23958108
  hypo

SEQ ID NO: 145059 - DNA, 205 bp, Homo sapiens; identical to SEQ ID NO: 108000
  chr3:23986745-23986950
  hypo

SEQ ID NO: 145060 - DNA, 83 bp, Homo sapiens
  chr3:24060720-24060803
  hypo
gggctgcagctcttctctccttctcgttgcccacagcatggtgagcggggttgggtggggatgtttggcggatggcatgtttc

SEQ ID NO: 145061 - DNA, 442 bp, Homo sapiens; identical to SEQ ID NO: 65669
  chr3:24160974-24161416
  hypo

SEQ ID NO: 145062 - DNA, 170 bp, Homo sapiens; identical to SEQ ID NO: 17414
  chr3:24344849-24345019
  hypo

SEQ ID NO: 145063 - DNA, 32 bp, Homo sapiens; identical to SEQ ID NO: 17415
  chr3:24374242-24374274
  hypo

SEQ ID NO: 145064 - DNA, 196 bp, Homo sapiens; identical to SEQ ID NO: 17416
  chr3:24436869-24437065
  hypo

SEQ ID NO: 145065 - DNA, 498 bp, Homo sapiens; identical to SEQ ID NO: 108002
  chr3:24535350-24535848
  hypo

SEQ ID NO: 145066 - DNA, 1441 bp, Homo sapiens; identical to SEQ ID NO: 108003
  chr3:24535911-24537352
  hypo

SEQ ID NO: 145067 - DNA, 814 bp, Homo sapiens; identical to SEQ ID NO: 108004
  chr3:24562964-24563778
  hypo

SEQ ID NO: 145068 - DNA, 30 bp, Homo sapiens
  chr3:24686412-24686442
  hypo
tgtggtgactcctcccgcccggaatttggg

SEQ ID NO: 145069 - DNA, 30 bp, Homo sapiens
  chr3:24686653-24686683
  hypo
ctcagggtgcggccgcgtcactggtcgggt

SEQ ID NO: 145070 - DNA, 30 bp, Homo sapiens
  chr3:25215971-25216001
  hypo
ctttccacctgtcatcggaggactttccct

SEQ ID NO: 145071 - DNA, 179 bp, Homo sapiens
  chr3:25619923-25620102
  hypo
tgttgatgaaggtttcgttcacacttgctgggtcggggcaatgtctttttttccagatggatactctattgtaaaatgatttccctccataagcttgactctccgtccctctcttccgtgtcatcttcctacgaaccggataaactgcctattaaatttaattacggcccaaatggcca

SEQ ID NO: 145072 - DNA, 304 bp, Homo sapiens
  chr3:25728356-25728660
  hypo
gccgccgccagcaccggacccggagccgccatgcccaagtgccccaagtgcgacaaggaagtttacttcgccgagagggtgacctctctgggcaaggacttgcctcggccctgcctgaagtgcgagaatgtgggaagacgctgacctccgagggccacgctgagcacgaaagcaagccctactgcaaccacttgctatgccgccatgtttgggcaaaaaggctctggccggggtgaagccgacagccacactttcaagtaaatcgggtggtggagacctcatccttggccgctcgctgggccac

SEQ ID NO: 145073 - DNA, 30 bp, Homo sapiens
  chr3:25780934-25780964
  hypo
ccacggtttgctcaccggtattttagagga

SEQ ID NO: 145074 - DNA, 30 bp, Homo sapiens; identical to SEQ ID NO: 39012
  chr3:27415997-27416027
  hypo

SEQ ID NO: 145075 - DNA, 30 bp, Homo sapiens
  chr3:27472586-27472616
  hypo
gcaaactttcaacggcgaaaaccgcaatta

SEQ ID NO: 145076 - DNA, 30 bp, Homo sapiens
  chr3:27472846-27472876
  hypo
taagtcttcctcaggcggatgaattactac

SEQ ID NO: 145077 - DNA, 22 bp, Homo sapiens
  chr3:27487117-27487139
  hypo
tattgtaatggctgggcgcagc

SEQ ID NO: 145078 - DNA, 31 bp, Homo sapiens; identical to SEQ ID NO: 65679
  chr3:27514260-27514291
  hypo

SEQ ID NO: 145079 - DNA, 101 bp, Homo sapiens; identical to SEQ ID NO: 65680
  chr3:27519020-27519121
  hypo

SEQ ID NO: 145080 - DNA, 37 bp, Homo sapiens
  chr3:27563871-27563908
  hypo
agaaatcagatctgggccaggcgcagtggctcatgcc

SEQ ID NO: 145081 - DNA, 36 bp, Homo sapiens; identical to SEQ ID NO: 17422
  chr3:27564147-27564183
  hypo

SEQ ID NO: 145082 - DNA, 38 bp, Homo sapiens; identical to SEQ ID NO: 17423
  chr3:27587340-27587378
  hypo

SEQ ID NO: 145083 - DNA, 31 bp, Homo sapiens; identical to SEQ ID NO: 65683
  chr3:27671739-27671770
  hypo

SEQ ID NO: 145084 - DNA, 1678 bp, Homo sapiens; identical to SEQ ID NO: 39017
  chr3:27762337-27764015
  hypo

SEQ ID NO: 145085 - DNA, 30 bp, Homo sapiens
  chr3:28884785-28884815
  hypo
tgtatttacaatggccgatttttatggtat

SEQ ID NO: 145086 - DNA, 30 bp, Homo sapiens
  chr3:29065179-29065209
  hypo
agaattgaggctgggcgtggtggctcatgc

SEQ ID NO: 145087 - DNA, 33 bp, Homo sapiens; identical to SEQ ID NO: 65685
  chr3:29664779-29664812
  hypo

SEQ ID NO: 145088 - DNA, 37 bp, Homo sapiens; identical to SEQ ID NO: 65686
  chr3:30574869-30574906
  hypo

SEQ ID NO: 145089 - DNA, 262 bp, Homo sapiens; identical to SEQ ID NO: 108037
  chr3:30648803-30649065
  hypo

SEQ ID NO: 145090 - DNA, 30 bp, Homo sapiens; identical to SEQ ID NO: 39028
  chr3:30682923-30682953
  hypo

SEQ ID NO: 145091 - DNA, 30 bp, Homo sapiens; identical to SEQ ID NO: 17426
  chr3:30713268-30713298
  hypo

SEQ ID NO: 145092 - DNA, 175 bp, Homo sapiens; identical to SEQ ID NO: 65690
  chr3:30713672-30713847
  hypo

SEQ ID NO: 145093 - DNA, 30 bp, Homo sapiens; identical to SEQ ID NO: 39029
  chr3:30804983-30805013
  hypo

SEQ ID NO: 145094 - DNA, 52 bp, Homo sapiens
  chr3:30885630-30885682
  hypo
tctttcataagcgcgcgggcgtgcgcgcacacacacacgttctctctccctc

SEQ ID NO: 145095 - DNA, 30 bp, Homo sapiens; identical to SEQ ID NO: 39030
  chr3:31064170-31064200
  hypo

SEQ ID NO: 145096 - DNA, 30 bp, Homo sapiens
  chr3:31108784-31108814
  hypo
catcagcacaactgtcggctaagttttcac

SEQ ID NO: 145097 - DNA, 31 bp, Homo sapiens; identical to SEQ ID NO: 17428
  chr3:31398337-31398368
  hypo

SEQ ID NO: 145098 - DNA, 137 bp, Homo sapiens
  chr3:31494140-31494277
  hypo
ctggttgtgccgttgcgagctgcagcggtgatcgccgcggcaggcccagaagtgtatcctgactcgtaaattgacgaagccactggtgctgcaagtgttcttttggggtagtgtctgggatccggtgcaagtcgaat

SEQ ID NO: 145099 - DNA, 30 bp, Homo sapiens
  chr3:31591304-31591334
  hypo
gttatacacgttgtgcgtgcgttatataaa

SEQ ID NO: 145100 - DNA, 38 bp, Homo sapiens
  chr3:31717146-31717184
  hypo
aaactgcagggccaggcgcagtggctcacgcctgtaat

SEQ ID NO: 145101 - DNA, 140 bp, Homo sapiens
  chr3:31786600-31786740
  hypo
aggtagaaaagcaggtttgggcgcccttgctccagcgtgaatacacgcaaatctcctagactggattctgcacccaaattgttttattttgctacaatgggataaccagcaaagaggactatactcgttaatttactgat

SEQ ID NO: 145102 - DNA, 30 bp, Homo sapiens
  chr3:31790791-31790821
  hypo
gcgattacttcaaaacgatgtttttaaaaa

SEQ ID NO: 145103 - DNA, 30 bp, Homo sapiens; identical to SEQ ID NO: 65696
  chr3:31977294-31977324
  hypo

SEQ ID NO: 145104 - DNA, 30 bp, Homo sapiens
  chr3:32011003-32011033
  hypo
gggcttcgctgggcacggtggctcacgcct

SEQ ID NO: 145105 - DNA, 30 bp, Homo sapiens
  chr3:32011560-32011590
  hypo
acacactttgaagtccgaaaattccgtgct

SEQ ID NO: 145106 - DNA, 30 bp, Homo sapiens
  chr3:32131125-32131155
  hypo
ctttggtcaatgaaccggagcagaggagat

SEQ ID NO: 145107 - DNA, 27 bp, Homo sapiens
  chr3:32150617-32150644
  hypo
ggcatgaaccaccgtacccggccggct

SEQ ID NO: 145108 - DNA, 146 bp, Homo sapiens
  chr3:32151265-32151411
  hypo
cagctggacacagtcccggtccttaaacaacttaccttcaggtctgagatcagtgaggacatggaagataagaccgaaggaattgccaagtggaatggagtaactgctctgttacactttaaatcgtgtttctttttttgtttgtt

SEQ ID NO: 145109 - DNA, 26 bp, Homo sapiens
  chr3:32151710-32151736
  hypo
aaatcgtgtttcttaaattgtggtcc

SEQ ID NO: 145110 - DNA, 30 bp, Homo sapiens; identical to SEQ ID NO: 65699
  chr3:32187886-32187916
  hypo

SEQ ID NO: 145111 - DNA, 182 bp, Homo sapiens; identical to SEQ ID NO: 108045
  chr3:32279558-32279740
  hypo

SEQ ID NO: 145112 - DNA, 31 bp, Homo sapiens; identical to SEQ ID NO: 65700
  chr3:32300385-32300416
  hypo

SEQ ID NO: 145113 - DNA, 31 bp, Homo sapiens; identical to SEQ ID NO: 65701
  chr3:32412106-32412137
  hypo

SEQ ID NO: 145114 - DNA, 1104 bp, Homo sapiens; identical to SEQ ID NO: 108047
  chr3:32433046-32434150
  hypo

SEQ ID NO: 145115 - DNA, 330 bp, Homo sapiens; identical to SEQ ID NO: 108052
  chr3:32612446-32612776
  hypo

SEQ ID NO: 145116 - DNA, 274 bp, Homo sapiens; identical to SEQ ID NO: 65704
  chr3:32663084-32663358
  hypo

SEQ ID NO: 145117 - DNA, 30 bp, Homo sapiens; identical to SEQ ID NO: 2464
  chr3:32668904-32668934
  hypo

SEQ ID NO: 145118 - DNA, 42 bp, Homo sapiens; identical to SEQ ID NO: 65706
  chr3:32886050-32886092
  hypo

SEQ ID NO: 145119 - DNA, 31 bp, Homo sapiens; identical to SEQ ID NO: 65707
  chr3:32891114-32891145
  hypo

SEQ ID NO: 145120 - DNA, 30 bp, Homo sapiens; identical to SEQ ID NO: 65708
  chr3:32927433-32927463
  hypo

SEQ ID NO: 145121 - DNA, 30 bp, Homo sapiens
  chr3:33011757-33011787
  hypo
ttgtcaagaaactcacggtggaatcaaggt

SEQ ID NO: 145122 - DNA, 146 bp, Homo sapiens
  chr3:33012237-33012383
  hypo
acccgaataatcctacggcgaaacctaaccaccggtaagaaggacaactgccctgctctgaccacactggaagctaagctcttaccctaagctcttaccctatgaattctggtttgaggttcatattaaatcggagagagaaaaag

SEQ ID NO: 145123 - DNA, 285 bp, Homo sapiens
  chr3:33104314-33104599
  hypo
tgtctacaaatcccccggttccttcttatcaaagcaatcagcttctattccattccagagccgttcggtgggtatgtgatgtgcacaaatgcatgatgtgccctcatggctaccaggcagaggcgtggaaggccaggagactagagacacagtgtgtcagggatgaaactgctcccacatgtgcttcacaaaaggaggcgacagtgacggttctgaaagtcctacggaagccaatatgtcaactgggatggcttccagacagaaggaacacgtataggaactgtg

SEQ ID NO: 145124 - DNA, 30 bp, Homo sapiens; identical to SEQ ID NO: 65711
  chr3:33132523-33132553
  hypo

SEQ ID NO: 145125 - DNA, 342 bp, Homo sapiens
  chr3:33216331-33216673
  hypo
agcactgcgtgggcacgcgaaggtggcccatccctgggctgcttacctttcccacaggcctgcaccaggccgtaccactccccacagctgttacatagcaaggtgaaggcggtctcccggtggcccatgatgtggcctggggcacacacgtacagcagttcatcccccatttccaagccggtgcggccctgcaggatggtgtgtgggaacgaaggcgggtctccacacggcttctctgaggagaaggaatcacagttagcttttccaaactgtgcggaactttttcagcctatgagaaaacagacttaaaacacaactctcccctgccgcccaccgtaccct

SEQ ID NO: 145126 - DNA, 1076 bp, Homo sapiens; identical to SEQ ID NO: 2471
  chr3:33259727-33260803
  hypo

SEQ ID NO: 145127 - DNA, 30 bp, Homo sapiens
  chr3:33433369-33433399
  hypo
tcatcatccggtccccgcatgccagacccg

SEQ ID NO: 145128 - DNA, 30 bp, Homo sapiens
  chr3:33437093-33437123
  hypo
acacggcaccagacgcgccacacaaggtgc

SEQ ID NO: 145129 - DNA, 121 bp, Homo sapiens; identical to SEQ ID NO: 65713
  chr3:33437662-33437783
  hypo

SEQ ID NO: 145130 - DNA, 30 bp, Homo sapiens; identical to SEQ ID NO: 65714
  chr3:33444373-33444403
  hypo

SEQ ID NO: 145131 - DNA, 138 bp, Homo sapiens; identical to SEQ ID NO: 65715
  chr3:33689108-33689246
  hypo

SEQ ID NO: 145132 - DNA, 30 bp, Homo sapiens; identical to SEQ ID NO: 17436
  chr3:33729785-33729815
  hypo

SEQ ID NO: 145133 - DNA, 181 bp, Homo sapiens
  chr3:33818923-33819104
  hypo
ggaggttgcagtgagccaagatcacgccactgcactccggccaaagtgcgactctgtctcaaaagaaaaaacaagtaataactaatatttattgagttatttaatgttccaggtactattataaacactttatgtaaacaattatgtaactttttttttttgagatggagtctcgctctgt

SEQ ID NO: 145134 - DNA, 198 bp, Homo sapiens; identical to SEQ ID NO: 65717
  chr3:33841158-33841356
  hypo

SEQ ID NO: 145135 - DNA, 77 bp, Homo sapiens; identical to SEQ ID NO: 65718
  chr3:33841655-33841732
  hypo

SEQ ID NO: 145136 - DNA, 224 bp, Homo sapiens; identical to SEQ ID NO: 65719
  chr3:36778834-36779058
  hypo

SEQ ID NO: 145137 - DNA, 30 bp, Homo sapiens; identical to SEQ ID NO: 17438
  chr3:36868864-36868894
  hypo

SEQ ID NO: 145138 - DNA, 30 bp, Homo sapiens; identical to SEQ ID NO: 65721
  chr3:36902420-36902450
  hypo

SEQ ID NO: 145139 - DNA, 163 bp, Homo sapiens; identical to SEQ ID NO: 65722
  chr3:36984239-36984402
  hypo

SEQ ID NO: 145140 - DNA, 42 bp, Homo sapiens; identical to SEQ ID NO: 17440
  chr3:36984641-36984683
  hypo

SEQ ID NO: 145141 - DNA, 1137 bp, Homo sapiens; identical to SEQ ID NO: 108079
  chr3:36985556-36986693
  hypo

SEQ ID NO: 145142 - DNA, 30 bp, Homo sapiens; identical to SEQ ID NO: 17442
  chr3:36987025-36987055
  hypo

SEQ ID NO: 145143 - DNA, 30 bp, Homo sapiens; identical to SEQ ID NO: 65726
  chr3:36987478-36987508
  hypo

SEQ ID NO: 145144 - DNA, 30 bp, Homo sapiens; identical to SEQ ID NO: 17443
  chr3:37017734-37017764
  hypo

SEQ ID NO: 145145 - DNA, 30 bp, Homo sapiens; identical to SEQ ID NO: 65728
  chr3:37018014-37018044
  hypo

SEQ ID NO: 145146 - DNA, 1449 bp, Homo sapiens; identical to SEQ ID NO: 108080
  chr3:37033964-37035413
  hypo

SEQ ID NO: 145147 - DNA, 92 bp, Homo sapiens; identical to SEQ ID NO: 39062
  chr3:37038108-37038200
  hypo

SEQ ID NO: 145148 - DNA, 100 bp, Homo sapiens; identical to SEQ ID NO: 39063
  chr3:37042444-37042544
  hypo

SEQ ID NO: 145149 - DNA, 75 bp, Homo sapiens; identical to SEQ ID NO: 39064
  chr3:37045890-37045965
  hypo

SEQ ID NO: 145150 - DNA, 74 bp, Homo sapiens; identical to SEQ ID NO: 39065
  chr3:37048480-37048554
  hypo

SEQ ID NO: 145151 - DNA, 93 bp, Homo sapiens; identical to SEQ ID NO: 39066
  chr3:37050303-37050396
  hypo

SEQ ID NO: 145152 - DNA, 281 bp, Homo sapiens; identical to SEQ ID NO: 39067
  chr3:37053309-37053590
  hypo

SEQ ID NO: 145153 - DNA, 114 bp, Homo sapiens; identical to SEQ ID NO: 39068
  chr3:37055921-37056035
  hypo

SEQ ID NO: 145154 - DNA, 95 bp, Homo sapiens; identical to SEQ ID NO: 39069
  chr3:37058995-37059090
  hypo

SEQ ID NO: 145155 - DNA, 155 bp, Homo sapiens; identical to SEQ ID NO: 39070
  chr3:37061799-37061954
  hypo

SEQ ID NO: 145156 - DNA, 372 bp, Homo sapiens; identical to SEQ ID NO: 39071
  chr3:37067126-37067498
  hypo

SEQ ID NO: 145157 - DNA, 150 bp, Homo sapiens; identical to SEQ ID NO: 39072
  chr3:37070273-37070423
  hypo

SEQ ID NO: 145158 - DNA, 110 bp, Homo sapiens; identical to SEQ ID NO: 39073
  chr3:37081675-37081785
  hypo

SEQ ID NO: 145159 - DNA, 65 bp, Homo sapiens; identical to SEQ ID NO: 39074
  chr3:37083757-37083822
  hypo

SEQ ID NO: 145160 - DNA, 166 bp, Homo sapiens; identical to SEQ ID NO: 39075
  chr3:37089008-37089174
  hypo

SEQ ID NO: 145161 - DNA, 94 bp, Homo sapiens; identical to SEQ ID NO: 39076
  chr3:37090006-37090100
  hypo

SEQ ID NO: 145162 - DNA, 115 bp, Homo sapiens; identical to SEQ ID NO: 39077
  chr3:37090393-37090508
  hypo

SEQ ID NO: 145163 - DNA, 362 bp, Homo sapiens; identical to SEQ ID NO: 39078
  chr3:37091975-37092337
  hypo

SEQ ID NO: 145164 - DNA, 138 bp, Homo sapiens; identical to SEQ ID NO: 65747
  chr3:37144392-37144530
  hypo

SEQ ID NO: 145165 - DNA, 39 bp, Homo sapiens
  chr3:37214388-37214427
  hypo
gttgagttttattggccgggcgtggtggctcatccctgt

SEQ ID NO: 145166 - DNA, 26 bp, Homo sapiens
  chr3:37360899-37360925
  hypo
ttatgagagagagtctcgctctgttg

SEQ ID NO: 145167 - DNA, 136 bp, Homo sapiens
  chr3:37438334-37438470
  hypo
caccgtgcccggccttcaaacttattttattagtcccataaactctaccatccctcctgtttctgtagttgaatccaatgctgttatctgaagccagcgcctcacttttctacggagtctgcgttctctcacctat

SEQ ID NO: 145168 - DNA, 1039 bp, Homo sapiens; identical to SEQ ID NO: 39079
  chr3:37493090-37494129
  hypo

SEQ ID NO: 145169 - DNA, 147 bp, Homo sapiens
  chr3:37649400-37649547
  hypo
tttttaatttgggggtaactccgtcttcaccattaatggccattcttcaaagctactttcattcctgtgagggatggccagacacgagaaagccaagcagggattttcagttacaggtgagcatccgatctgcagccagggcttttt

SEQ ID NO: 145170 - DNA, 30 bp, Homo sapiens; identical to SEQ ID NO: 2480
  chr3:37731246-37731276
  hypo

SEQ ID NO: 145171 - DNA, 30 bp, Homo sapiens
  chr3:37765252-37765282
  hypo
tcccctagaacagggcgtgatatagggcag

SEQ ID NO: 145172 - DNA, 62 bp, Homo sapiens; identical to SEQ ID NO: 65751
  chr3:37774453-37774515
  hypo

SEQ ID NO: 145173 - DNA, 21 bp, Homo sapiens
  chr3:37983173-37983194
  hypo
ttgggccgggcatgttttcat

SEQ ID NO: 145174 - DNA, 163 bp, Homo sapiens; identical to SEQ ID NO: 17448
  chr3:38017264-38017427
  hypo

SEQ ID NO: 145175 - DNA, 383 bp, Homo sapiens; identical to SEQ ID NO: 65754
  chr3:38030489-38030872
  hypo

SEQ ID NO: 145176 - DNA, 321 bp, Homo sapiens
  chr3:38032150-38032471
  hypo
agtgaatgcctagcccgctgagcactgtgtggtggggtgtgtcctgcagggcaggagctaggattgagttacagtggtggggaccaggagtagggaggcagagactggccccgtgccaggcctagcactgcccacaggcagggcgaaggcgcgggagcagtttccagcaggtaggcctgggcagagagttggggggcgggggtttccagggaaccagtggggcagagtgggctattcaagtcaagggcatagagcatagggtcccagggctcagggccacagagcctccgcggcagaattgggaggcggcagcagcccagc

SEQ ID NO: 145177 - DNA, 540 bp, Homo sapiens
  chr3:38033409-38033949
  hypo
agaatgaacacaggtgccatgcgagtgcgacctcagccctggcagctgagggcttggctctacgggctggggctggatatcagacgggctcccggacccctgggggcgatgctgcctctcccagtgacaccagccgagtcccaactttttggctgccagtttgactttccagtcccccatgtgccctggttgacactgttctgaggccatccagtagtctttctggcactctgtcaccatgttgtactcttccatgagctacagctcacagtttctgtctgcacctctggtcactgcctgcctgggcctctggtaactgtcactggtcactatttctgcctattactcagtgtccttctacggggccaccactggtggacatcctgcttgtcacccaatgtcctcacgttttctgttgcttgagatcaccttttcatggccactatgtctgcctgtcactcatgtcattgtcacaccaacaggccatcaactgtggcaacagttcttggggcaattagggtgcacggacggctcccttct

SEQ ID NO: 145178 - DNA, 177 bp, Homo sapiens; identical to SEQ ID NO: 65757
  chr3:38051944-38052121
  hypo

SEQ ID NO: 145179 - DNA, 401 bp, Homo sapiens; identical to SEQ ID NO: 2484
  chr3:38080607-38081008
  hypo

SEQ ID NO: 145180 - DNA, 78 bp, Homo sapiens; identical to SEQ ID NO: 39089
  chr3:38081153-38081231
  hypo

SEQ ID NO: 145181 - DNA, 30 bp, Homo sapiens; identical to SEQ ID NO: 65760
  chr3:38164501-38164531
  hypo

SEQ ID NO: 145182 - DNA, 30 bp, Homo sapiens; identical to SEQ ID NO: 2486
  chr3:38180464-38180494
  hypo

SEQ ID NO: 145183 - DNA, 30 bp, Homo sapiens; identical to SEQ ID NO: 2487
  chr3:38182009-38182039
  hypo

SEQ ID NO: 145184 - DNA, 55 bp, Homo sapiens; identical to SEQ ID NO: 2488
  chr3:38182281-38182336
  hypo

SEQ ID NO: 145185 - DNA, 159 bp, Homo sapiens; identical to SEQ ID NO: 2489
  chr3:38182625-38182784
  hypo

SEQ ID NO: 145186 - DNA, 124 bp, Homo sapiens
  chr3:38217258-38217382
  hypo
tattctgctgtgtgacgtaggctaacgttggttgcagttaaagaactaactaggagaggacagaagaagagtggaagaagtgaggatgtaggatggggcattgaggaggcgtgccaatgtgaag

SEQ ID NO: 145187 - DNA, 30 bp, Homo sapiens; identical to SEQ ID NO: 65765
  chr3:38317674-38317704
  hypo

SEQ ID NO: 145188 - DNA, 144 bp, Homo sapiens
  chr3:38323909-38324053
  hypo
cccctggcaattttgcggccgcgttctcagcacaggtgtggacaggagcctgcctgggcctgtttggctgtggggaatctgtggaaggagcgggctgccctcccagaaagcgtgagttctcaggtgtggcgtctggccatctcc

SEQ ID NO: 145189 - DNA, 171 bp, Homo sapiens
  chr3:38413410-38413581
  hypo
ctggtaatccacacacggcttttagttggatgtgaaattcagagcaggctttgtttgccttgtgcgagaacacatgcctccaagaaggagcctgtgcagacaagcagcttgaggatcgggaaagaactgactctgaaaaggcattttcatttgtcacgtaggtgtcacatg

SEQ ID NO: 145190 - DNA, 78 bp, Homo sapiens; identical to SEQ ID NO: 39101
  chr3:38495096-38495174
  hypo

SEQ ID NO: 145191 - DNA, 52 bp, Homo sapiens; identical to SEQ ID NO: 39102
  chr3:38495213-38495265
  hypo

SEQ ID NO: 145192 - DNA, 102 bp, Homo sapiens; identical to SEQ ID NO: 39103
  chr3:38495678-38495780
  hypo

SEQ ID NO: 145193 - DNA, 1235 bp, Homo sapiens; identical to SEQ ID NO: 39104
  chr3:38496020-38497255
  hypo

SEQ ID NO: 145194 - DNA, 30 bp, Homo sapiens
  chr3:38605112-38605142
  hypo
ccccgtctgccccggcgatggcttcccatc

SEQ ID NO: 145195 - DNA, 30 bp, Homo sapiens
  chr3:38605386-38605416
  hypo
catccctctctaccccggcctccatgaccg

SEQ ID NO: 145196 - DNA, 30 bp, Homo sapiens
  chr3:38605664-38605694
  hypo
aatctctgcttggaacgtctgccagacatt

SEQ ID NO: 145197 - DNA, 30 bp, Homo sapiens
  chr3:38631192-38631222
  hypo
gtggggcccgggtagcgcctcacttggacc

SEQ ID NO: 145198 - DNA, 31 bp, Homo sapiens; identical to SEQ ID NO: 65770
  chr3:38645195-38645226
  hypo

SEQ ID NO: 145199 - DNA, 178 bp, Homo sapiens; identical to SEQ ID NO: 65771
  chr3:38674619-38674797
  hypo

SEQ ID NO: 145200 - DNA, 30 bp, Homo sapiens
  chr3:38692015-38692045
  hypo
agacacccacacacgcgcgcgcgcaaacac

SEQ ID NO: 145201 - DNA, 92 bp, Homo sapiens; identical to SEQ ID NO: 65772
  chr3:38755470-38755562
  hypo

SEQ ID NO: 145202 - DNA, 27 bp, Homo sapiens
  chr3:38930996-38931023
  hypo
taaagaaatgctggccgggcgcggtgg

SEQ ID NO: 145203 - DNA, 58 bp, Homo sapiens
  chr3:38984803-38984861
  hypo
gttgggagtgggaatcggggattaactgcaaagaggcatgagacgttttggggggtaa

SEQ ID NO: 145204 - DNA, 278 bp, Homo sapiens; identical to SEQ ID NO: 108130
  chr3:39148231-39148509
  hypo

SEQ ID NO: 145205 - DNA, 30 bp, Homo sapiens; identical to SEQ ID NO: 17462
  chr3:39184202-39184232
  hypo

SEQ ID NO: 145206 - DNA, 30 bp, Homo sapiens; identical to SEQ ID NO: 17463
  chr3:39184537-39184567
  hypo

SEQ ID NO: 145207 - DNA, 247 bp, Homo sapiens; identical to SEQ ID NO: 65776
  chr3:39185650-39185897
  hypo

SEQ ID NO: 145208 - DNA, 31 bp, Homo sapiens; identical to SEQ ID NO: 17464
  chr3:39229445-39229476
  hypo

SEQ ID NO: 145209 - DNA, 30 bp, Homo sapiens; identical to SEQ ID NO: 17465
  chr3:39231892-39231922
  hypo

SEQ ID NO: 145210 - DNA, 107 bp, Homo sapiens; identical to SEQ ID NO: 17466
  chr3:39234909-39235016
  hypo

SEQ ID NO: 145211 - DNA, 30 bp, Homo sapiens
  chr3:39497845-39497875
  hypo
cttcctcgccagcccggccgcagccctccc

SEQ ID NO: 145212 - DNA, 46 bp, Homo sapiens; identical to SEQ ID NO: 65780
  chr3:40172134-40172180
  hypo

SEQ ID NO: 145213 - DNA, 69 bp, Homo sapiens; identical to SEQ ID NO: 17467
  chr3:40231757-40231826
  hypo

SEQ ID NO: 145214 - DNA, 105 bp, Homo sapiens; identical to SEQ ID NO: 65782
  chr3:40374173-40374278
  hypo

SEQ ID NO: 145215 - DNA, 382 bp, Homo sapiens
  chr3:40429456-40429838
  hypo
gtcttaacctgggctcgttctttaaacttgtgaggccggggcggtggacttactgacatcctgtattctctcacctgcagctaggagaaaagatgttcactgtgctgacccgccaaccatgtgagcaagcaggttagtatctctcagcaggtagcaagcgtggttttgccaaatcgcaagagaaccccagcttcggcctacagtttttcatccatatcccctgcaaatgattgtttaactttattggtttgagactcagtactcagctgggtttcaacaccggcattcctcaaataaaagtaatgcttttcatcaaagccacacaaaacaaggactaacatgcatgtttcacttaaatggtttttccggtttgtataatcca

SEQ ID NO: 145216 - DNA, 154 bp, Homo sapiens; identical to SEQ ID NO: 17469
  chr3:40510131-40510285
  hypo

SEQ ID NO: 145217 - DNA, 30 bp, Homo sapiens; identical to SEQ ID NO: 39120
  chr3:40924946-40924976
  hypo

SEQ ID NO: 145218 - DNA, 191 bp, Homo sapiens; identical to SEQ ID NO: 17470
  chr3:41119484-41119675
  hypo

SEQ ID NO: 145219 - DNA, 30 bp, Homo sapiens
  chr3:41236257-41236287
  hypo
attaagccccaaagcgcactataattttct

SEQ ID NO: 145220 - DNA, 183 bp, Homo sapiens; identical to SEQ ID NO: 108146
  chr3:41240160-41240343
  hypo

SEQ ID NO: 145221 - DNA, 42 bp, Homo sapiens; identical to SEQ ID NO: 2502
  chr3:41266109-41266151
  hypo

SEQ ID NO: 145222 - DNA, 30 bp, Homo sapiens; identical to SEQ ID NO: 65788
  chr3:41282921-41282951
  hypo

SEQ ID NO: 145223 - DNA, 172 bp, Homo sapiens; identical to SEQ ID NO: 65789
  chr3:41283295-41283467
  hypo

SEQ ID NO: 145224 - DNA, 30 bp, Homo sapiens; identical to SEQ ID NO: 17472
  chr3:41288379-41288409
  hypo

SEQ ID NO: 145225 - DNA, 203 bp, Homo sapiens; identical to SEQ ID NO: 65791
  chr3:41289146-41289349
  hypo

SEQ ID NO: 145226 - DNA, 30 bp, Homo sapiens
  chr3:41306789-41306819
  hypo
gacacaccgtcacctcgggcccttgctgag

SEQ ID NO: 145227 - DNA, 19 bp, Homo sapiens
  chr3:42033445-42033464
  hypo
tggagtggccgggcacgcc

SEQ ID NO: 145228 - DNA, 43 bp, Homo sapiens; identical to SEQ ID NO: 65793
  chr3:42159858-42159901
  hypo

SEQ ID NO: 145229 - DNA, 21 bp, Homo sapiens
  chr3:42162757-42162778
  hypo
ttttttttttttgagacggag

SEQ ID NO: 145230 - DNA, 271 bp, Homo sapiens; identical to SEQ ID NO: 65795
  chr3:42190935-42191206
  hypo

SEQ ID NO: 145231 - DNA, 252 bp, Homo sapiens; identical to SEQ ID NO: 65796
  chr3:42207052-42207304
  hypo

SEQ ID NO: 145232 - DNA, 158 bp, Homo sapiens; identical to SEQ ID NO: 65797
  chr3:42222605-42222763
  hypo

SEQ ID NO: 145233 - DNA, 97 bp, Homo sapiens; identical to SEQ ID NO: 65798
  chr3:42223002-42223099
  hypo

SEQ ID NO: 145234 - DNA, 134 bp, Homo sapiens; identical to SEQ ID NO: 65799
  chr3:42243986-42244120
  hypo

SEQ ID NO: 145235 - DNA, 30 bp, Homo sapiens; identical to SEQ ID NO: 65800
  chr3:42244342-42244372
  hypo

SEQ ID NO: 145236 - DNA, 63 bp, Homo sapiens; identical to SEQ ID NO: 65801
  chr3:42249919-42249982
  hypo

SEQ ID NO: 145237 - DNA, 30 bp, Homo sapiens
  chr3:42265734-42265764
  hypo
gtggctttcctgatcggagggcttttcttt

SEQ ID NO: 145238 - DNA, 89 bp, Homo sapiens
  chr3:42268587-42268676
  hypo
gcactttggtgcgttcgaagaactaagagaaggcctgtgtggtagtgggctggtaggatcgagggagcgtggtggtagcagaaattatg

SEQ ID NO: 145239 - DNA, 38 bp, Homo sapiens; identical to SEQ ID NO: 65803
  chr3:42569052-42569090
  hypo

SEQ ID NO: 145240 - DNA, 105 bp, Homo sapiens; identical to SEQ ID NO: 65804
  chr3:42577665-42577770
  hypo

SEQ ID NO: 145241 - DNA, 30 bp, Homo sapiens
  chr3:42626068-42626098
  hypo
cagcatcatatgggcggaaatcgaagtggg

SEQ ID NO: 145242 - DNA, 88 bp, Homo sapiens; identical to SEQ ID NO: 65805
  chr3:42630385-42630473
  hypo

SEQ ID NO: 145243 - DNA, 121 bp, Homo sapiens; identical to SEQ ID NO: 65806
  chr3:42640753-42640874
  hypo

SEQ ID NO: 145244 - DNA, 40 bp, Homo sapiens; identical to SEQ ID NO: 17476
  chr3:42659547-42659587
  hypo

SEQ ID NO: 145245 - DNA, 30 bp, Homo sapiens; identical to SEQ ID NO: 17477
  chr3:42692913-42692943
  hypo

SEQ ID NO: 145246 - DNA, 385 bp, Homo sapiens; identical to SEQ ID NO: 108167
  chr3:42696176-42696561
  hypo

SEQ ID NO: 145247 - DNA, 30 bp, Homo sapiens; identical to SEQ ID NO: 65810
  chr3:42699918-42699948
  hypo

SEQ ID NO: 145248 - DNA, 30 bp, Homo sapiens; identical to SEQ ID NO: 65811
  chr3:42700188-42700218
  hypo

SEQ ID NO: 145249 - DNA, 30 bp, Homo sapiens; identical to SEQ ID NO: 17479
  chr3:42701027-42701057
  hypo

SEQ ID NO: 145250 - DNA, 759 bp, Homo sapiens; identical to SEQ ID NO: 39135
  chr3:42814257-42815016
  hypo

SEQ ID NO: 145251 - DNA, 72 bp, Homo sapiens; identical to SEQ ID NO: 65814
  chr3:42815888-42815960
  hypo

SEQ ID NO: 145252 - DNA, 101 bp, Homo sapiens
  chr3:42851003-42851104
  hypo
agctgctattgaacacggcaggtgagagaatttctttatggccaattcttagacaaaaagtaggggaagcggttgggcacagtggctcacgcctgtaatcc

SEQ ID NO: 145253 - DNA, 23 bp, Homo sapiens
  chr3:42852211-42852234
  hypo
ccctttgttcaagtgcgctctca

SEQ ID NO: 145254 - DNA, 46 bp, Homo sapiens; identical to SEQ ID NO: 65816
  chr3:42860054-42860100
  hypo

SEQ ID NO: 145255 - DNA, 284 bp, Homo sapiens
  chr3:42905953-42906237
  hypo
gcagcactacaggacgtcgggactgggcatttccttccaacatggccgccactgcctctccgcagccactcgccactgaggatgccgattctgagaatagcagcttctattactatgactacctggatgaagtggccttcatgctctgcaggaaggatgcagtggtgtcctttggcaaagtcttcctcccagtcttctatagcctgatttttgtgttgggcctcagcgggaacctccttcttctcatggtcttgctccgttacgtgcctcgcaggcggatggtt

SEQ ID NO: 145256 - DNA, 74 bp, Homo sapiens
  chr3:42906565-42906639
  hypo
gtgtgtggaactgccacgcagatttcggcgggcatgggaccatttggaagctcttcctccgcttccagcagaac

SEQ ID NO: 145257 - DNA, 30 bp, Homo sapiens
  chr3:42923885-42923915
  hypo
acccttatatcaacccggttcagagattcc

SEQ ID NO: 145258 - DNA, 45 bp, Homo sapiens; identical to SEQ ID NO: 65819
  chr3:43074999-43075044
  hypo

SEQ ID NO: 145259 - DNA, 30 bp, Homo sapiens; identical to SEQ ID NO: 65820
  chr3:43121142-43121172
  hypo

SEQ ID NO: 145260 - DNA, 240 bp, Homo sapiens; identical to SEQ ID NO: 65821
  chr3:43121443-43121683
  hypo

SEQ ID NO: 145261 - DNA, 30 bp, Homo sapiens
  chr3:43123401-43123431
  hypo
aagaggagcgagatacgcatgaagcagaac

SEQ ID NO: 145262 - DNA, 704 bp, Homo sapiens; identical to SEQ ID NO: 39144
  chr3:43147023-43147727
  hypo

SEQ ID NO: 145263 - DNA, 30 bp, Homo sapiens; identical to SEQ ID NO: 65823
  chr3:43405856-43405886
  hypo

SEQ ID NO: 145264 - DNA, 30 bp, Homo sapiens; identical to SEQ ID NO: 65824
  chr3:43526635-43526665
  hypo

SEQ ID NO: 145265 - DNA, 30 bp, Homo sapiens; identical to SEQ ID NO: 65825
  chr3:43626297-43626327
  hypo

SEQ ID NO: 145266 - DNA, 194 bp, Homo sapiens; identical to SEQ ID NO: 17486
  chr3:43655461-43655655
  hypo

SEQ ID NO: 145267 - DNA, 215 bp, Homo sapiens; identical to SEQ ID NO: 2516
  chr3:43663333-43663548
  hypo

SEQ ID NO: 145268 - DNA, 28 bp, Homo sapiens
  chr3:43664635-43664663
  hypo
gcgtgagccaccgcgccctgccggcttt

SEQ ID NO: 145269 - DNA, 26 bp, Homo sapiens
  chr3:43735475-43735501
  hypo
ccttcctgctcctaaactaaacgata

SEQ ID NO: 145270 - DNA, 26 bp, Homo sapiens
  chr3:43735740-43735766
  hypo
actccgtctcaaaaaaaaaaaaaaaa

SEQ ID NO: 145271 - DNA, 30 bp, Homo sapiens; identical to SEQ ID NO: 39150
  chr3:44035436-44035466
  hypo

SEQ ID NO: 145272 - DNA, 3812 bp, Homo sapiens; identical to SEQ ID NO: 39151
  chr3:44036213-44040025
  hypo

SEQ ID NO: 145273 - DNA, 35 bp, Homo sapiens
  chr3:44237213-44237248
  hypo
caattataggccgggcgcagtggctcacgactgta

SEQ ID NO: 145274 - DNA, 385 bp, Homo sapiens
  chr3:44283268-44283653
  hypo
ccctcggagctccgcgagaggccctccaaaaagacgctggcacggaactcgcggctctcctgcccgttggatcccgaagcaccagtcggggccccagacacgaggccccacttccgcttacgcgccccacttccgcttccggccccgggctgtggtgactggcggtgtggggtgggtcagagggcagtaggtacctccaggcgggagcagcgtttgcaccgcggtgggttcctgcgagctggtgcagaggggccccagcgggccggccccggggcacatgcgacgacctccacccctgggccccacgacggcctcagggcctgaaggcaatgtgcgaaacctgcagaagcggcaggcgccagggccaggcgcggcgggaggctgt

SEQ ID NO: 145275 - DNA, 31 bp, Homo sapiens; identical to SEQ ID NO: 65834
  chr3:44295784-44295815
  hypo

SEQ ID NO: 145276 - DNA, 51 bp, Homo sapiens; identical to SEQ ID NO: 108192
  chr3:44379863-44379914
  hypo

SEQ ID NO: 145277 - DNA, 154 bp, Homo sapiens; identical to SEQ ID NO: 65836
  chr3:44461797-44461951
  hypo

SEQ ID NO: 145278 - DNA, 233 bp, Homo sapiens; identical to SEQ ID NO: 39158
  chr3:44518641-44518874
  hypo

SEQ ID NO: 145279 - DNA, 30 bp, Homo sapiens; identical to SEQ ID NO: 65838
  chr3:44620180-44620210
  hypo

SEQ ID NO: 145280 - DNA, 292 bp, Homo sapiens; identical to SEQ ID NO: 65839
  chr3:44752299-44752591
  hypo

SEQ ID NO: 145281 - DNA, 806 bp, Homo sapiens; identical to SEQ ID NO: 108204
  chr3:44802847-44803653
  hypo

SEQ ID NO: 145282 - DNA, 38 bp, Homo sapiens
  chr3:44807339-44807377
  hypo
ccccagacggagtctcgctctgtcacctaggctgtacc

SEQ ID NO: 145283 - DNA, 38 bp, Homo sapiens; identical to SEQ ID NO: 17494
  chr3:44808573-44808611
  hypo

SEQ ID NO: 145284 - DNA, 211 bp, Homo sapiens; identical to SEQ ID NO: 17495
  chr3:44816760-44816971
  hypo

SEQ ID NO: 145285 - DNA, 24 bp, Homo sapiens
  chr3:44818860-44818884
  hypo
tttttatgtggagcatcgctggcc

SEQ ID NO: 145286 - DNA, 20 bp, Homo sapiens
  chr3:44821037-44821057
  hypo
tatttgtggctgggcacggt

SEQ ID NO: 145287 - DNA, 18 bp, Homo sapiens
  chr3:44825669-44825687
  hypo
tctttttgttttgagacg

SEQ ID NO: 145288 - DNA, 31 bp, Homo sapiens; identical to SEQ ID NO: 17499
  chr3:44834019-44834050
  hypo

SEQ ID NO: 145289 - DNA, 19 bp, Homo sapiens
  chr3:44836158-44836177
  hypo
atgtacccctgttagccgg

SEQ ID NO: 145290 - DNA, 28 bp, Homo sapiens
  chr3:44876135-44876163
  hypo
tgggcactgtggctcacgcctgtaatct

SEQ ID NO: 145291 - DNA, 77 bp, Homo sapiens; identical to SEQ ID NO: 17502
  chr3:44882437-44882514
  hypo

SEQ ID NO: 145292 - DNA, 24 bp, Homo sapiens
  chr3:44882895-44882919
  hypo
tgttttttttttgagacggagtct

SEQ ID NO: 145293 - DNA, 30 bp, Homo sapiens; identical to SEQ ID NO: 17504
  chr3:44888529-44888559
  hypo

SEQ ID NO: 145294 - DNA, 33 bp, Homo sapiens
  chr3:44902782-44902815
  hypo
ggaaacattctaaacatacgtaagtataacagg

SEQ ID NO: 145295 - DNA, 30 bp, Homo sapiens; identical to SEQ ID NO: 2533
  chr3:44931198-44931228
  hypo

SEQ ID NO: 145296 - DNA, 261 bp, Homo sapiens; identical to SEQ ID NO: 17506
  chr3:44945260-44945521
  hypo

SEQ ID NO: 145297 - DNA, 31 bp, Homo sapiens; identical to SEQ ID NO: 17507
  chr3:44975282-44975313
  hypo

SEQ ID NO: 145298 - DNA, 187 bp, Homo sapiens; identical to SEQ ID NO: 65856
  chr3:44999994-45000181
  hypo

SEQ ID NO: 145299 - DNA, 30 bp, Homo sapiens
  chr3:45009422-45009452
  hypo
ctacgcaaagcagctcgttttaattcttac

SEQ ID NO: 145300 - DNA, 16 bp, Homo sapiens
  chr3:45188139-45188155
  hypo
gcgaaggtcgcccata

SEQ ID NO: 145301 - DNA, 30 bp, Homo sapiens; identical to SEQ ID NO: 17508
  chr3:45365530-45365560
  hypo

SEQ ID NO: 145302 - DNA, 37 bp, Homo sapiens
  chr3:45541766-45541803
  hypo
gacaggcatgagccaccgcgcccggccttctcttata

SEQ ID NO: 145303 - DNA, 357 bp, Homo sapiens
  chr3:45634790-45635147
  hypo
gagtcccgggccatgcgggggcgccaaggagtcaggcctggtgtccctgcagccgcgcggatccacttgcagatgggtccctctacgaataacgagcctactagggcacgtgcttttactgctgcactgaggacgtgaaatgcgcgcaggcacaacgagactttcttctttttcgctctttcagagggcccgggctcccatctacgctttgctggttacgttggcatgttgggcatttccccctctctgcctcagtctcccgacctgtcaaagaggacggtgggccagccatgggtgacacgcccgtgcgcctctccaatagtgcacctcgggcaagccgggcggcgggcacagcct

SEQ ID NO: 145304 - DNA, 30 bp, Homo sapiens; identical to SEQ ID NO: 65858
  chr3:45647126-45647156
  hypo

SEQ ID NO: 145305 - DNA, 92 bp, Homo sapiens; identical to SEQ ID NO: 65859
  chr3:45684620-45684712
  hypo

SEQ ID NO: 145306 - DNA, 30 bp, Homo sapiens
  chr3:45685166-45685196
  hypo
taaatatactctccccgccagaagcccatg

SEQ ID NO: 145307 - DNA, 297 bp, Homo sapiens; identical to SEQ ID NO: 65860
  chr3:45719313-45719610
  hypo

SEQ ID NO: 145308 - DNA, 30 bp, Homo sapiens; identical to SEQ ID NO: 65861
  chr3:45720201-45720231
  hypo

SEQ ID NO: 145309 - DNA, 27 bp, Homo sapiens
  chr3:45741292-45741319
  hypo
tgtgagccaccgcgcccagccgagaaa

SEQ ID NO: 145310 - DNA, 140 bp, Homo sapiens
  chr3:45750557-45750697
  hypo
cattattgggcccgtcgtaaatttatgtgttttatttgtcgaagatagctatgctaacttagcagggctgttgtgaagattaaagggaatctttggaaaatacctggcacacagtaggtcataaccgaaggtgatgtttt

SEQ ID NO: 145311 - DNA, 30 bp, Homo sapiens; identical to SEQ ID NO: 17510
  chr3:45761235-45761265
  hypo

SEQ ID NO: 145312 - DNA, 30 bp, Homo sapiens; identical to SEQ ID NO: 65863
  chr3:45821469-45821499
  hypo

SEQ ID NO: 145313 - DNA, 30 bp, Homo sapiens; identical to SEQ ID NO: 65864
  chr3:45834354-45834384
  hypo

SEQ ID NO: 145314 - DNA, 713 bp, Homo sapiens; identical to SEQ ID NO: 108219
  chr3:45837556-45838269
  hypo

SEQ ID NO: 145315 - DNA, 30 bp, Homo sapiens
  chr3:45845364-45845394
  hypo
cttctttgtgatccacgtctggctgtggtt

SEQ ID NO: 145316 - DNA, 44 bp, Homo sapiens; identical to SEQ ID NO: 17511
  chr3:45968553-45968597
  hypo

SEQ ID NO: 145317 - DNA, 43 bp, Homo sapiens; identical to SEQ ID NO: 17512
  chr3:45968716-45968759
  hypo

SEQ ID NO: 145318 - DNA, 30 bp, Homo sapiens
  chr3:46000885-46000915
  hypo
tgcagtggtgccgccgcaccatccagctga

SEQ ID NO: 145319 - DNA, 30 bp, Homo sapiens
  chr3:46008672-46008702
  hypo
tgctccacctcctcccgcagctgctgacac

SEQ ID NO: 145320 - DNA, 30 bp, Homo sapiens
  chr3:46008922-46008952
  hypo
ggagctggttacgcccgaccacattctgta

SEQ ID NO: 145321 - DNA, 771 bp, Homo sapiens
  chr3:46009335-46010106
  hypo
tgctgttttttctcccgcctcaactctgctagctcctcctcccaggagctcgtgtgggccagcaactcctgcagccgtcgccagagctggtctgcctcctgtcccttcccagacaactcctcctggagtggggccatctccttcaccaggcgctccaggctggcccgggcatcctctttcagctgaagctccttgaccagctgttccagttgggcactctgctgtctgttgacctcctcgaccttggttctctccctttctagggcttgaagcttctcccctagctcctgcatctcctgggccgcatcactgggaataggttcttgccggccctttgtgtctgatgccgtatctgccttctgctgagccatggctagccagcctgggaagctggctaaatgctggtttttcttgtccagtgagtcccgtgtggcctcaagctcctgtgccaagggctgcagcatggactccagccgccgcagggctgtgtggtagtcctcctccttctctgctgctcctagctccaggccctgcaggcatgtctgcagctccttcacagtgttctgggtggcctgggtgacctcccactgcttctggagctcagctaccaagcaagtgaggcgaacgttgtcctccgctgcagtgcgccccctctccctctctgtctgcagttgctccccttgctggctgacagctgccctcagctcctggttctctctgtccagctgctgcatgcgctcccgtagctgcttctcccgcacctccaactgg

SEQ ID NO: 145322 - DNA, 87 bp, Homo sapiens; identical to SEQ ID NO: 65870
  chr3:46020638-46020725
  hypo

SEQ ID NO: 145323 - DNA, 30 bp, Homo sapiens
  chr3:46062866-46062896
  hypo
gttgtgctggtagacggaggtgaggtacca

SEQ ID NO: 145324 - DNA, 30 bp, Homo sapiens; identical to SEQ ID NO: 17513
  chr3:46064701-46064731
  hypo

SEQ ID NO: 145325 - DNA, 227 bp, Homo sapiens
  chr3:46230412-46230639
  hypo
tgtgccagcaggttccggggccctgtggtggcttgtgcacactgcagtctatctgcaggctcactttggcgtaggacggcacctggacccactggattccggctcccatgctcccctctggaagtacaagtcctgggccaggcgcatgtgaacctccatggtgaatgcagcagcttcctctgcagattcctagcgaggtagtggctggatgccgcgagagacagatg

SEQ ID NO: 145326 - DNA, 100 bp, Homo sapiens
  chr3:46245361-46245461
  hypo
gtgacggtccgtgcccgcaaggcaaacacggcgtggacgatggccaggtacctgtcaatcgtcagcaggatgatgaaaaagatctcgctgtacaagcctg

SEQ ID NO: 145327 - DNA, 30 bp, Homo sapiens
  chr3:46439426-46439456
  hypo
caaaaaggccatgtccgtgtaactccgaca

SEQ ID NO: 145328 - DNA, 30 bp, Homo sapiens
  chr3:46459227-46459257
  hypo
gcaatcacgagctcacgtgagtggtcacct

SEQ ID NO: 145329 - DNA, 29 bp, Homo sapiens
  chr3:46549770-46549799
  hypo
aacagttcaagtttaacgtaggaaatgat

SEQ ID NO: 145330 - DNA, 22 bp, Homo sapiens
  chr3:46557733-46557755
  hypo
ccgcgcccggccctcttgtctt

SEQ ID NO: 145331 - DNA, 30 bp, Homo sapiens; identical to SEQ ID NO: 17515
  chr3:46571401-46571431
  hypo

SEQ ID NO: 145332 - DNA, 103 bp, Homo sapiens
  chr3:46586213-46586316
  hypo
gttgaatgaaaggcgccgtcacttaaattgatgttttttaaagacaaagaattatgttaagggtctagggcggggaacaggagaggaacgcatcctgaaagac

SEQ ID NO: 145333 - DNA, 30 bp, Homo sapiens; identical to SEQ ID NO: 17516
  chr3:46593985-46594015
  hypo

SEQ ID NO: 145334 - DNA, 30 bp, Homo sapiens
  chr3:46637062-46637092
  hypo
ggctgcagagtggagcgggttccattccgt

SEQ ID NO: 145335 - DNA, 31 bp, Homo sapiens; identical to SEQ ID NO: 17517
  chr3:46713299-46713330
  hypo

SEQ ID NO: 145336 - DNA, 30 bp, Homo sapiens; identical to SEQ ID NO: 65878
  chr3:46755901-46755931
  hypo

SEQ ID NO: 145337 - DNA, 30 bp, Homo sapiens; identical to SEQ ID NO: 65879
  chr3:46758798-46758828
  hypo

SEQ ID NO: 145338 - DNA, 37 bp, Homo sapiens; identical to SEQ ID NO: 65880
  chr3:46769540-46769577
  hypo

SEQ ID NO: 145339 - DNA, 36 bp, Homo sapiens; identical to SEQ ID NO: 65881
  chr3:46769816-46769852
  hypo

SEQ ID NO: 145340 - DNA, 30 bp, Homo sapiens; identical to SEQ ID NO: 2537
  chr3:46774362-46774392
  hypo

SEQ ID NO: 145341 - DNA, 55 bp, Homo sapiens
  chr3:46775529-46775584
  hypo
aagtccccagcccccgctgactgacctctgcaagcagtgcgcagccgtgaggacc

SEQ ID NO: 145342 - DNA, 30 bp, Homo sapiens; identical to SEQ ID NO: 17519
  chr3:46798225-46798255
  hypo

SEQ ID NO: 145343 - DNA, 30 bp, Homo sapiens; identical to SEQ ID NO: 39179
  chr3:46866850-46866880
  hypo

SEQ ID NO: 145344 - DNA, 353 bp, Homo sapiens
  chr3:46874964-46875317
  hypo
tgtgcttgagggggccggcccccagccccgcgtgccgctcctcacctggaaatgcagtggcctgccgtcagcacccacgtggcggtgaccagggtgccgccgcagatgtgcctgcctttggtcctcacgctcacctgccagggccacctcccttcctccgcgtccactcctcccacgattctcagaggggttcggccacacactggggtgaggatagtgtaggatgaagaactcactcaaagacacaggagttgactcccccgggcgccccgacgacagccaagaaggaggccatgtcccccggggctcccgagccacgcttcagattccccgggccgcggaccgcaggctcc

SEQ ID NO: 145345 - DNA, 196 bp, Homo sapiens; identical to SEQ ID NO: 65886
  chr3:46943638-46943834
  hypo

SEQ ID NO: 145346 - DNA, 183 bp, Homo sapiens; identical to SEQ ID NO: 65887
  chr3:46944571-46944754
  hypo

SEQ ID NO: 145347 - DNA, 31 bp, Homo sapiens; identical to SEQ ID NO: 65888
  chr3:46947810-46947841
  hypo

SEQ ID NO: 145348 - DNA, 133 bp, Homo sapiens
  chr3:46948913-46949046
  hypo
tggcccggacactggcgcttgcccggaggccacagtcagacaacctgtccacaacaaactcatatccatacatcagcaagacagtggggcgtgttgggtgtcattctccatgtgcgagcgtttgtatgcgcgt

SEQ ID NO: 145349 - DNA, 30 bp, Homo sapiens
  chr3:46984874-46984904
  hypo
cctcaggggaaggagcggcagacacctgcc

SEQ ID NO: 145350 - DNA, 221 bp, Homo sapiens; identical to SEQ ID NO: 65889
  chr3:46985693-46985914
  hypo

SEQ ID NO: 145351 - DNA, 29 bp, Homo sapiens
  chr3:46996119-46996148
  hypo
gaacaggtatttccaccgggcacggtggc

SEQ ID NO: 145352 - DNA, 39 bp, Homo sapiens; identical to SEQ ID NO: 17523
  chr3:47007697-47007736
  hypo

SEQ ID NO: 145353 - DNA, 200 bp, Homo sapiens; identical to SEQ ID NO: 65892
  chr3:47043981-47044181
  hypo

SEQ ID NO: 145354 - DNA, 79 bp, Homo sapiens; identical to SEQ ID NO: 108237
  chr3:47050738-47050817
  hypo

SEQ ID NO: 145355 - DNA, 80 bp, Homo sapiens; identical to SEQ ID NO: 108238
  chr3:47051151-47051231
  hypo

SEQ ID NO: 145356 - DNA, 31 bp, Homo sapiens; identical to SEQ ID NO: 17524
  chr3:47052059-47052090
  hypo

SEQ ID NO: 145357 - DNA, 31 bp, Homo sapiens; identical to SEQ ID NO: 17525
  chr3:47087395-47087426
  hypo

SEQ ID NO: 145358 - DNA, 16 bp, Homo sapiens
  chr3:47131720-47131736
  hypo
agtgagactccttctc

SEQ ID NO: 145359 - DNA, 20 bp, Homo sapiens
  chr3:47147381-47147401
  hypo
gactccgtctccaaaaaaaa

SEQ ID NO: 145360 - DNA, 37 bp, Homo sapiens; identical to SEQ ID NO: 65896
  chr3:47185203-47185240
  hypo

SEQ ID NO: 145361 - DNA, 37 bp, Homo sapiens
  chr3:47185479-47185516
  hypo
atgagccactgcgcccggccacattacaccagaactt

SEQ ID NO: 145362 - DNA, 93 bp, Homo sapiens
  chr3:47239321-47239414
  hypo
aacagagcgagaccccgtctcaaaaagacaaaacaaaacaggcagggcacggtggctcacgcctgatcttgcggtgagctgagatcgcgccac

SEQ ID NO: 145363 - DNA, 33 bp, Homo sapiens
  chr3:47240136-47240169
  hypo
attagcctggccgggcgcagtggctcacgcctg

SEQ ID NO: 145364 - DNA, 21 bp, Homo sapiens
  chr3:47275290-47275311
  hypo
gaggggaagccaggcacggtg

SEQ ID NO: 145365 - DNA, 121 bp, Homo sapiens
  chr3:47370604-47370725
  hypo
tgagaccctgtctcaaaaaagaaaaaaaaggaaaaaaaaagacaagtataagagttcccatactaaagaagccatctgtccgtgttgtgttttttttgttgttgttttgtttgttttttgt

SEQ ID NO: 145366 - DNA, 139 bp, Homo sapiens; identical to SEQ ID NO: 65898
  chr3:47373435-47373574
  hypo

SEQ ID NO: 145367 - DNA, 30 bp, Homo sapiens; identical to SEQ ID NO: 65899
  chr3:47398194-47398224
  hypo

SEQ ID NO: 145368 - DNA, 19 bp, Homo sapiens
  chr3:47411264-47411283
  hypo
agaacgggacgcaggccgg

SEQ ID NO: 145369 - DNA, 21 bp, Homo sapiens
  chr3:47426559-47426580
  hypo
gtaattttttagtggggaaat

SEQ ID NO: 145370 - DNA, 30 bp, Homo sapiens; identical to SEQ ID NO: 65902
  chr3:47450761-47450791
  hypo

SEQ ID NO: 145371 - DNA, 30 bp, Homo sapiens
  chr3:47453339-47453369
  hypo
cattgagcagcgtccgcagcaccgaaaccc

SEQ ID NO: 145372 - DNA, 30 bp, Homo sapiens; identical to SEQ ID NO: 65903
  chr3:47459242-47459272
  hypo

SEQ ID NO: 145373 - DNA, 30 bp, Homo sapiens; identical to SEQ ID NO: 65904
  chr3:47459861-47459891
  hypo

SEQ ID NO: 145374 - DNA, 27 bp, Homo sapiens
  chr3:47521006-47521033
  hypo
cacctcaaggccgggcgcggtggctca

SEQ ID NO: 145375 - DNA, 23 bp, Homo sapiens
  chr3:47555870-47555893
  hypo
ggccgacacggaattatatcttg

SEQ ID NO: 145376 - DNA, 29 bp, Homo sapiens
  chr3:47588427-47588456
  hypo
ggtacattggccgggcgcggtgactcaca

SEQ ID NO: 145377 - DNA, 26 bp, Homo sapiens
  chr3:47613055-47613081
  hypo
gcacaatggagaggccgtaccagccc

SEQ ID NO: 145378 - DNA, 97 bp, Homo sapiens
  chr3:47677841-47677938
  hypo
tccaaagcacagagtcgctgccctctctgcatactctgctataaagcaagggttaccatgcccagaggaatgtgaagggaattaactgatatttttg

SEQ ID NO: 145379 - DNA, 27 bp, Homo sapiens
  chr3:47691431-47691458
  hypo
atttaggctacaaagaatcatcgaatg

SEQ ID NO: 145380 - DNA, 28 bp, Homo sapiens
  chr3:47799254-47799282
  hypo
caaagcgaggctccgtatcaaaaaaaaa

SEQ ID NO: 145381 - DNA, 30 bp, Homo sapiens; identical to SEQ ID NO: 17529
  chr3:47883008-47883038
  hypo

SEQ ID NO: 145382 - DNA, 30 bp, Homo sapiens; identical to SEQ ID NO: 65910
  chr3:47887941-47887971
  hypo

SEQ ID NO: 145383 - DNA, 30 bp, Homo sapiens; identical to SEQ ID NO: 65911
  chr3:47889025-47889055
  hypo

SEQ ID NO: 145384 - DNA, 82 bp, Homo sapiens; identical to SEQ ID NO: 17530
  chr3:47889945-47890027
  hypo

SEQ ID NO: 145385 - DNA, 30 bp, Homo sapiens; identical to SEQ ID NO: 65913
  chr3:47890245-47890275
  hypo

SEQ ID NO: 145386 - DNA, 30 bp, Homo sapiens; identical to SEQ ID NO: 65914
  chr3:47890476-47890506
  hypo

SEQ ID NO: 145387 - DNA, 582 bp, Homo sapiens; identical to SEQ ID NO: 108255
  chr3:47890800-47891382
  hypo

SEQ ID NO: 145388 - DNA, 30 bp, Homo sapiens
  chr3:47950792-47950822
  hypo
tgaaggaggagcttcgactttgctatgtaa

SEQ ID NO: 145389 - DNA, 20 bp, Homo sapiens
  chr3:47964239-47964259
  hypo
tacatgaaaaaaaagcaggg

SEQ ID NO: 145390 - DNA, 90 bp, Homo sapiens; identical to SEQ ID NO: 65917
  chr3:48053066-48053156
  hypo

SEQ ID NO: 145391 - DNA, 30 bp, Homo sapiens; identical to SEQ ID NO: 17533
  chr3:48078088-48078118
  hypo

SEQ ID NO: 145392 - DNA, 31 bp, Homo sapiens; identical to SEQ ID NO: 65919
  chr3:48179596-48179627
  hypo

SEQ ID NO: 145393 - DNA, 30 bp, Homo sapiens
  chr3:48221842-48221872
  hypo
gtctcgcaggctttccggtttttgccagaa

SEQ ID NO: 145394 - DNA, 30 bp, Homo sapiens; identical to SEQ ID NO: 17534
  chr3:48227759-48227789
  hypo

SEQ ID NO: 145395 - DNA, 30 bp, Homo sapiens
  chr3:48231959-48231989
  hypo
ggtgaggaggaacgccgtacttgccgggag

SEQ ID NO: 145396 - DNA, 40 bp, Homo sapiens
  chr3:48236529-48236569
  hypo
agtaatggccgggcgcggtggctcacgcctgtaatcccag

SEQ ID NO: 145397 - DNA, 169 bp, Homo sapiens; identical to SEQ ID NO: 17535
  chr3:48263633-48263802
  hypo

SEQ ID NO: 145398 - DNA, 33 bp, Homo sapiens; identical to SEQ ID NO: 17536
  chr3:48275731-48275764
  hypo

SEQ ID NO: 145399 - DNA, 36 bp, Homo sapiens; identical to SEQ ID NO: 65923
  chr3:48316726-48316762
  hypo

SEQ ID NO: 145400 - DNA, 30 bp, Homo sapiens; identical to SEQ ID NO: 65924
  chr3:48339928-48339958
  hypo

SEQ ID NO: 145401 - DNA, 31 bp, Homo sapiens; identical to SEQ ID NO: 17537
  chr3:48451212-48451243
  hypo

SEQ ID NO: 145402 - DNA, 31 bp, Homo sapiens; identical to SEQ ID NO: 65926
  chr3:48456271-48456302
  hypo

SEQ ID NO: 145403 - DNA, 77 bp, Homo sapiens
  chr3:48456671-48456748
  hypo
cattctcgagaccacggtcacccggattcttggcgtctgtaccacgtccagattctggccacggacgcatatctcac

SEQ ID NO: 145404 - DNA, 258 bp, Homo sapiens; identical to SEQ ID NO: 65928
  chr3:48459417-48459675
  hypo

SEQ ID NO: 145405 - DNA, 71 bp, Homo sapiens; identical to SEQ ID NO: 65929
  chr3:48461256-48461327
  hypo

SEQ ID NO: 145406 - DNA, 297 bp, Homo sapiens
  chr3:48474262-48474559
  hypo
ttgtggaggtccctctgctggcgggagtagctagacgcctgttctcgaatggcctcttggagactcacaggccccttctgcgcctccaggagtaaagccttcagctcctgtagtcgcacacggttcacataggtggagccagccacaccaatcagggcccccaggactgagccaatgagggaccagttcttggtcctctcagcccttgtgcgctccttctcatgactttcccgcacagctgcagagaagagggagaacttctctcgctcagagtcttctgcacgcagataggctgtg

SEQ ID NO: 145407 - DNA, 30 bp, Homo sapiens; identical to SEQ ID NO: 65931
  chr3:48484176-48484206
  hypo

SEQ ID NO: 145408 - DNA, 188 bp, Homo sapiens
  chr3:48506153-48506341
  hypo
gtggctaggctgagcggattgttagggtgcaggccatggtggcaccaggcctcagtctgcaccccccctctctcaggtggtcagagcgctcacggtgatgttgcacagacagtggctgacagtgcggagggcagggggacccccaaggaccgaccagcagaggcggacagtgcgctgtctgcgggaca

SEQ ID NO: 145409 - DNA, 30 bp, Homo sapiens; identical to SEQ ID NO: 65933
  chr3:48517011-48517041
  hypo

SEQ ID NO: 145410 - DNA, 85 bp, Homo sapiens; identical to SEQ ID NO: 65934
  chr3:48563028-48563113
  hypo

SEQ ID NO: 145411 - DNA, 133 bp, Homo sapiens
  chr3:48575983-48576116
  hypo
cctcatgaagtcctccgtagcctcatcactgtcgcggttgacatagtcagggctgcccagtttcacttgctgccggagccaggcacagagaaaggacatatcagggtcaggagccaggcggggccagagacca

SEQ ID NO: 145412 - DNA, 31 bp, Homo sapiens; identical to SEQ ID NO: 65935
  chr3:48584749-48584780
  hypo

SEQ ID NO: 145413 - DNA, 30 bp, Homo sapiens
  chr3:48585186-48585216
  hypo
gtgaatcactgcacccggccttgcacgcac

SEQ ID NO: 145414 - DNA, 31 bp, Homo sapiens; identical to SEQ ID NO: 17541
  chr3:48604090-48604121
  hypo

SEQ ID NO: 145415 - DNA, 31 bp, Homo sapiens; identical to SEQ ID NO: 17542
  chr3:48605091-48605122
  hypo

SEQ ID NO: 145416 - DNA, 40 bp, Homo sapiens; identical to SEQ ID NO: 65938
  chr3:48607710-48607750
  hypo

SEQ ID NO: 145417 - DNA, 31 bp, Homo sapiens; identical to SEQ ID NO: 65939
  chr3:48622954-48622985
  hypo

SEQ ID NO: 145418 - DNA, 30 bp, Homo sapiens; identical to SEQ ID NO: 108275
  chr3:48632463-48632493
  hypo

SEQ ID NO: 145419 - DNA, 107 bp, Homo sapiens; identical to SEQ ID NO: 65940
  chr3:48636552-48636659
  hypo

SEQ ID NO: 145420 - DNA, 77 bp, Homo sapiens
  chr3:48659178-48659255
  hypo
acatgcagcatggccgtcgctagtgccagggccggaacccgggcacctggcaacgggcaaacgcccctcccccggga

SEQ ID NO: 145421 - DNA, 30 bp, Homo sapiens; identical to SEQ ID NO: 65942
  chr3:48670907-48670937
  hypo

SEQ ID NO: 145422 - DNA, 30 bp, Homo sapiens; identical to SEQ ID NO: 17544
  chr3:48677758-48677788
  hypo

SEQ ID NO: 145423 - DNA, 31 bp, Homo sapiens; identical to SEQ ID NO: 17545
  chr3:48684050-48684081
  hypo

SEQ ID NO: 145424 - DNA, 31 bp, Homo sapiens; identical to SEQ ID NO: 17546
  chr3:48685739-48685770
  hypo

SEQ ID NO: 145425 - DNA, 303 bp, Homo sapiens; identical to SEQ ID NO: 108277
  chr3:48693397-48693700
  hypo

SEQ ID NO: 145426 - DNA, 279 bp, Homo sapiens; identical to SEQ ID NO: 108278
  chr3:48693851-48694130
  hypo

SEQ ID NO: 145427 - DNA, 213 bp, Homo sapiens
  chr3:48698251-48698464
  hypo
ccaccacctggatctcgccagtgaggctgtcgatggcaaagtgtccacggctattgccactgatgatgttgtagtgcaccaatccgttggcgtccttgtcccggtcagtggccgtgacgcgcagcacgactgtgtgggggcgcacatcctcgcgcacctgcgccacgtagcgcttctcgctgaactgaggagcattgtcgttctcgtctagca

SEQ ID NO: 145428 - DNA, 121 bp, Homo sapiens; identical to SEQ ID NO: 2547
  chr3:48698889-48699010
  hypo

SEQ ID NO: 145429 - DNA, 1208 bp, Homo sapiens; identical to SEQ ID NO: 108280
  chr3:48699376-48700584
  hypo

SEQ ID NO: 145430 - DNA, 732 bp, Homo sapiens; identical to SEQ ID NO: 108281
  chr3:48700955-48701687
  hypo

SEQ ID NO: 145431 - DNA, 41 bp, Homo sapiens
  chr3:48702182-48702223
  hypo
gtggttttgacagcaccagcgctttctgtgtccacaatcta

SEQ ID NO: 145432 - DNA, 165 bp, Homo sapiens
  chr3:48703691-48703856
  hypo
ctgggattacaggcatgagccattgtgcccggcctgccctgttcttcttagacaaacttgctgggctaaaatctaaccccgttaaaatagactatttacgtattgtttgcctctagcgcagcagaacattgctggagaaaaacaaacaaccgtgctaattggtct

SEQ ID NO: 145433 - DNA, 130 bp, Homo sapiens
  chr3:48731396-48731526
  hypo
ttcagcaggtgccgacgagcgccttacaaacgactggctgaacacctttcctcccaggcctctctgccccagcatcactcaatctgctcagtcctcgactgctgcaggggaatgcgtgctcagagagaga

SEQ ID NO: 145434 - DNA, 73 bp, Homo sapiens; identical to SEQ ID NO: 65954
  chr3:48732602-48732675
  hypo

SEQ ID NO: 145435 - DNA, 20 bp, Homo sapiens
  chr3:48732782-48732802
  hypo
tcttctgtctgttgtttgtc

SEQ ID NO: 145436 - DNA, 30 bp, Homo sapiens
  chr3:48733029-48733059
  hypo
tatgagctcatggggcggggttagatgcag

SEQ ID NO: 145437 - DNA, 36 bp, Homo sapiens; identical to SEQ ID NO: 17554
  chr3:48733583-48733619
  hypo

SEQ ID NO: 145438 - DNA, 17 bp, Homo sapiens
  chr3:48751110-48751127
  hypo
ccgggcgtggtgccacg

SEQ ID NO: 145439 - DNA, 32 bp, Homo sapiens; identical to SEQ ID NO: 65957
  chr3:48752181-48752213
  hypo

SEQ ID NO: 145440 - DNA, 40 bp, Homo sapiens
  chr3:48797085-48797125
  hypo
ctgggattacaggcatgagccactgcgcccggccaagtat

SEQ ID NO: 145441 - DNA, 24 bp, Homo sapiens
  chr3:48923662-48923686
  hypo
atataatagtaatggccgggtgcg

SEQ ID NO: 145442 - DNA, 35 bp, Homo sapiens
  chr3:48948534-48948569
  hypo
tatgcagcactcctcacggtgataatttttttttt

SEQ ID NO: 145443 - DNA, 121 bp, Homo sapiens
  chr3:48954851-48954972
  hypo
caggcgtgagccacggtgcccggccacgcggcatgatttttaatggctttctacattgtatggtttgttattgttgttttgagacagggtctccttctatcaccgatgctggactgcagtg

SEQ ID NO: 145444 - DNA, 34 bp, Homo sapiens; identical to SEQ ID NO: 65960
  chr3:48978306-48978340
  hypo

SEQ ID NO: 145445 - DNA, 32 bp, Homo sapiens; identical to SEQ ID NO: 17556
  chr3:48986828-48986860
  hypo

SEQ ID NO: 145446 - DNA, 121 bp, Homo sapiens
  chr3:49014623-49014744
  hypo
gactccgtctcaaaaacaaacaaacaaacaaaaaactgccatctctttctttgctgtatgttttataccacctatatgggcaaccgtagggaatgtggttttttgttttgttttgtttcgt

SEQ ID NO: 145447 - DNA, 30 bp, Homo sapiens
  chr3:49015163-49015193
  hypo
acaggcgtgaggcaccgtgcccggcctgta

SEQ ID NO: 145448 - DNA, 86 bp, Homo sapiens; identical to SEQ ID NO: 17557
  chr3:49023683-49023769
  hypo

SEQ ID NO: 145449 - DNA, 25 bp, Homo sapiens
  chr3:49023828-49023853
  hypo
ctgctcactgcggcctccactcctg

SEQ ID NO: 145450 - DNA, 145 bp, Homo sapiens
  chr3:49034170-49034315
  hypo
ggcaaagctacggaccggtaaaggttaatcaggtataattaagtctgtccggggttcgacaaacagcatcttgtccaaggtgagcatagcccaaggctatgtgcctgcccggagactcagcttggggttccgaggcatgtgggca

SEQ ID NO: 145451 - DNA, 324 bp, Homo sapiens
  chr3:49035604-49035928
  hypo
gcagactcacatgggcggtccaggcgggagccgttgttggccacagcagtgatacagagatcatggcccaaggggaagcgtccacaatgcaggatggctggccaggggtagctgtagcaggccatgatgggctcgcagctggcctgcatggcctcgcacaggctgtaggaggggtagatgaccctttgggggaaagggtcgggggctgcaccgccacaggctgagcacccagatcagctggaacctctccatgttcctacccctgtctcgtggcctggaactctctggttgctgggcaacgacactggtcgcctagcaacagcc

SEQ ID NO: 145452 - DNA, 30 bp, Homo sapiens
  chr3:49036387-49036417
  hypo
gaggaggttccagcccgcctgcccccaacc

SEQ ID NO: 145453 - DNA, 30 bp, Homo sapiens; identical to SEQ ID NO: 65966
  chr3:49042286-49042316
  hypo

SEQ ID NO: 145454 - DNA, 30 bp, Homo sapiens; identical to SEQ ID NO: 17561
  chr3:49049559-49049589
  hypo

SEQ ID NO: 145455 - DNA, 30 bp, Homo sapiens; identical to SEQ ID NO: 65968
  chr3:49052437-49052467
  hypo

SEQ ID NO: 145456 - DNA, 30 bp, Homo sapiens
  chr3:49053193-49053223
  hypo
tatacctctctgcacgtcccaccccatttt

SEQ ID NO: 145457 - DNA, 30 bp, Homo sapiens
  chr3:49060832-49060862
  hypo
gacttttcagaagtcgggaagcagtatgtt

SEQ ID NO: 145458 - DNA, 17 bp, Homo sapiens
  chr3:49075508-49075525
  hypo
ttttaaaacagagtctc

SEQ ID NO: 145459 - DNA, 43 bp, Homo sapiens; identical to SEQ ID NO: 17563
  chr3:49080007-49080050
  hypo

SEQ ID NO: 145460 - DNA, 181 bp, Homo sapiens; identical to SEQ ID NO: 17564
  chr3:49095130-49095311
  hypo

SEQ ID NO: 145461 - DNA, 83 bp, Homo sapiens
  chr3:49142733-49142816
  hypo
caggaaagggaagggacgggtctgggccaggagggacctcacataagttctatgatgatttggtttaaaatcttggccgggcg

SEQ ID NO: 145462 - DNA, 33 bp, Homo sapiens
  chr3:49145905-49145938
  hypo
cgttcaggggctgtccgcgtgggggccacctcg

SEQ ID NO: 145463 - DNA, 30 bp, Homo sapiens; identical to SEQ ID NO: 65973
  chr3:49146371-49146401
  hypo

SEQ ID NO: 145464 - DNA, 30 bp, Homo sapiens; identical to SEQ ID NO: 65974
  chr3:49154620-49154650
  hypo

SEQ ID NO: 145465 - DNA, 31 bp, Homo sapiens; identical to SEQ ID NO: 65975
  chr3:49167302-49167333
  hypo

SEQ ID NO: 145466 - DNA, 30 bp, Homo sapiens
  chr3:49168271-49168301
  hypo
tgcagatgcaagctccgtgcacctatagag

SEQ ID NO: 145467 - DNA, 30 bp, Homo sapiens
  chr3:49168501-49168531
  hypo
tctccctccgtgggtcgagtaggttgtctc

SEQ ID NO: 145468 - DNA, 31 bp, Homo sapiens; identical to SEQ ID NO: 65976
  chr3:49168953-49168984
  hypo

SEQ ID NO: 145469 - DNA, 20 bp, Homo sapiens
  chr3:49189528-49189548
  hypo
ataaaagttaagccaagagg

SEQ ID NO: 145470 - DNA, 30 bp, Homo sapiens
  chr3:49201564-49201594
  hypo
gccttcttccctgccgtggagatgcgcgac

SEQ ID NO: 145471 - DNA, 30 bp, Homo sapiens; identical to SEQ ID NO: 17566
  chr3:49211734-49211764
  hypo

SEQ ID NO: 145472 - DNA, 23 bp, Homo sapiens
  chr3:49243948-49243971
  hypo
actgcacccggcccagaggtcac

SEQ ID NO: 145473 - DNA, 30 bp, Homo sapiens; identical to SEQ ID NO: 65980
  chr3:49313319-49313349
  hypo

SEQ ID NO: 145474 - DNA, 32 bp, Homo sapiens; identical to SEQ ID NO: 17567
  chr3:49433705-49433737
  hypo

SEQ ID NO: 145475 - DNA, 33 bp, Homo sapiens; identical to SEQ ID NO: 65982
  chr3:49522229-49522262
  hypo

SEQ ID NO: 145476 - DNA, 37 bp, Homo sapiens; identical to SEQ ID NO: 17568
  chr3:49532335-49532372
  hypo

SEQ ID NO: 145477 - DNA, 30 bp, Homo sapiens; identical to SEQ ID NO: 65984
  chr3:49568645-49568675
  hypo

SEQ ID NO: 145478 - DNA, 846 bp, Homo sapiens; identical to SEQ ID NO: 108320
  chr3:49591666-49592512
  hypo

SEQ ID NO: 145479 - DNA, 98 bp, Homo sapiens; identical to SEQ ID NO: 65986
  chr3:49636111-49636209
  hypo

SEQ ID NO: 145480 - DNA, 127 bp, Homo sapiens; identical to SEQ ID NO: 65987
  chr3:49662398-49662525
  hypo

SEQ ID NO: 145481 - DNA, 182 bp, Homo sapiens; identical to SEQ ID NO: 17569
  chr3:49688340-49688522
  hypo

SEQ ID NO: 145482 - DNA, 205 bp, Homo sapiens
  chr3:49690064-49690269
  hypo
cggcaccgctcccacgggcccctgctacccaccatcgaggactcctcagaggaggaggagctgcgggaggaagaggagctgcttcgtgagcaagagaagatgcgggaggtggagcagcagcgcatccgcagcacggcccgcaagacccggcgggacaaggaagaactgcgggcccagcggaggcgagagcgctccaagacaccac

SEQ ID NO: 145483 - DNA, 30 bp, Homo sapiens; identical to SEQ ID NO: 65990
  chr3:49694717-49694747
  hypo

SEQ ID NO: 145484 - DNA, 31 bp, Homo sapiens; identical to SEQ ID NO: 65991
  chr3:49698034-49698065
  hypo

SEQ ID NO: 145485 - DNA, 58 bp, Homo sapiens; identical to SEQ ID NO: 65992
  chr3:49698934-49698992
  hypo

SEQ ID NO: 145486 - DNA, 211 bp, Homo sapiens; identical to SEQ ID NO: 65993
  chr3:49699562-49699773
  hypo

SEQ ID NO: 145487 - DNA, 31 bp, Homo sapiens; identical to SEQ ID NO: 17572
  chr3:49700336-49700367
  hypo

SEQ ID NO: 145488 - DNA, 30 bp, Homo sapiens; identical to SEQ ID NO: 17573
  chr3:49700590-49700620
  hypo

SEQ ID NO: 145489 - DNA, 31 bp, Homo sapiens; identical to SEQ ID NO: 65996
  chr3:49700894-49700925
  hypo

SEQ ID NO: 145490 - DNA, 31 bp, Homo sapiens; identical to SEQ ID NO: 65997
  chr3:49701764-49701795
  hypo

SEQ ID NO: 145491 - DNA, 570 bp, Homo sapiens
  chr3:49720263-49720833
  hypo
ggtgtcttgcaggtgcgtggtggaggctggctttcctttcagcagtgactgcctgccagacctcagcgtgtgggctgagatgctggacaaatcgcccatcagatacatccctcaggtatgcagccccctccttgccctgtgtgctgcccatccatccagaatccagggcccagctcaacacagctccccactcttccccaaacacccaggtgaagacaccactgttactgatgttgggccaggaggaccggcgtgtgcccttcaagcagggcatggagtattaccgtgccctcaagacccggaatgtgcctgttcggtgagtgcagcatgaaggccctggcagctggtgggcaggtgagcacaggaggaccctccaaccttaaatgttgctgactaatccctacaggctcctgctctatcccaaaagcacccacgcattatcagaggtggaggtggagtcagacagcttcatgaatgctgtgctctggctacgcacacacttgggcagctgaagccctgccattctgcatgagctgatcagcctgtgccacacttcgctcttgaggagct

SEQ ID NO: 145492 - DNA, 219 bp, Homo sapiens; identical to SEQ ID NO: 66000
  chr3:49722991-49723210
  hypo

SEQ ID NO: 145493 - DNA, 30 bp, Homo sapiens; identical to SEQ ID NO: 66001
  chr3:49754476-49754506
  hypo

SEQ ID NO: 145494 - DNA, 339 bp, Homo sapiens
  chr3:49755501-49755840
  hypo
ccattgaggcccctccggcctggctccagaaagactacgtgcttgtggacgctggccttgcggctgggtgcgtctggcggtgtggtgctgagtactgaggactgtgcgctcagctcttggagcgggctgggtgtttggggccagcggcggcagcggcaggcacggcggcagcagcggcagggtggggcgaacaggtagagcagcacgagcacaaggcccacggcacagcccagcagtgtggtgaagcctgtgttgaaagcctcgggctctgggcgcggaaagtgcacgctcacgttgtactcgtgcgtctggttgtggtgcaggcggggcccagtggcc

SEQ ID NO: 145495 - DNA, 30 bp, Homo sapiens; identical to SEQ ID NO: 17576
  chr3:49758379-49758409
  hypo

SEQ ID NO: 145496 - DNA, 31 bp, Homo sapiens; identical to SEQ ID NO: 17577
  chr3:49781387-49781418
  hypo

SEQ ID NO: 145497 - DNA, 26 bp, Homo sapiens
  chr3:49819881-49819907
  hypo
ttgagccaccgcgcccggcctggagg

SEQ ID NO: 145498 - DNA, 717 bp, Homo sapiens; identical to SEQ ID NO: 108331
  chr3:49906716-49907433
  hypo

SEQ ID NO: 145499 - DNA, 31 bp, Homo sapiens; identical to SEQ ID NO: 66006
  chr3:49928713-49928744
  hypo

SEQ ID NO: 145500 - DNA, 30 bp, Homo sapiens
  chr3:49937814-49937844
  hypo
agtgcgaggtgcagacggggctcagtagcc

SEQ ID NO: 145501 - DNA, 1139 bp, Homo sapiens; identical to SEQ ID NO: 66007
  chr3:49939688-49940827
  hypo

SEQ ID NO: 145502 - DNA, 227 bp, Homo sapiens; identical to SEQ ID NO: 17579
  chr3:49948217-49948444
  hypo

SEQ ID NO: 145503 - DNA, 31 bp, Homo sapiens
  chr3:49977173-49977204
  hypo
atttctctcacactaacggacaataaggagg

SEQ ID NO: 145504 - DNA, 20 bp, Homo sapiens
  chr3:50071916-50071936
  hypo
aggtgcggtggctcacgcct

SEQ ID NO: 145505 - DNA, 19 bp, Homo sapiens
  chr3:50072175-50072194
  hypo
agagcgagactccgtctcc

SEQ ID NO: 145506 - DNA, 30 bp, Homo sapiens
  chr3:50103761-50103791
  hypo
cctcccccacagccccgcacagcacagccc

SEQ ID NO: 145507 - DNA, 101 bp, Homo sapiens
  chr3:50140299-50140400
  hypo
gcactccctgactccgtttacctttactccgcatcccattctcttactgcctatctgaaggattggatgggcagagtataggtggcggtggttggtcctcc

SEQ ID NO: 145508 - DNA, 160 bp, Homo sapiens
  chr3:50144932-50145092
  hypo
tggtaaccgcgtcagcgctttctctgtagctagtacggctattgctgctgctcagtggtcatccacccaggtaagatcgaggatctttttgctcaaggtagtgtggtggtggtgcccagattcacagacgtgacctctcctgtggtactcgcagtatgag

SEQ ID NO: 145509 - DNA, 40 bp, Homo sapiens; identical to SEQ ID NO: 66013
  chr3:50145391-50145431
  hypo

SEQ ID NO: 145510 - DNA, 115 bp, Homo sapiens; identical to SEQ ID NO: 39246
  chr3:50192965-50193080
  hypo

SEQ ID NO: 145511 - DNA, 43 bp, Homo sapiens
  chr3:50210489-50210532
  hypo
ggggtttagctttgggtgtggcgccttccctggcctgcctacc

SEQ ID NO: 145512 - DNA, 127 bp, Homo sapiens
  chr3:50214170-50214297
  hypo
gacgatgctgagccccgctctgccttacaggattacatcttctacctggagcctgagcgactcgagtcagggaagggcaagtgtccgtacgatcccaagctggacacagcatcggccctcatcagtg

SEQ ID NO: 145513 - DNA, 31 bp, Homo sapiens; identical to SEQ ID NO: 66015
  chr3:50218760-50218791
  hypo

SEQ ID NO: 145514 - DNA, 30 bp, Homo sapiens; identical to SEQ ID NO: 66016
  chr3:50220106-50220136
  hypo

SEQ ID NO: 145515 - DNA, 31 bp, Homo sapiens; identical to SEQ ID NO: 17581
  chr3:50220857-50220888
  hypo

SEQ ID NO: 145516 - DNA, 58 bp, Homo sapiens; identical to SEQ ID NO: 17582
  chr3:50224042-50224100
  hypo

SEQ ID NO: 145517 - DNA, 49 bp, Homo sapiens; identical to SEQ ID NO: 66019
  chr3:50225312-50225361
  hypo

SEQ ID NO: 145518 - DNA, 459 bp, Homo sapiens
  chr3:50255799-50256258
  hypo
acagtacggtggcaccggtgggcagaggcctaggctaggctggggggaaggggctggttgtggccatggtgccctccataccgaggcgtgtggtgcctggctgtgccttgccgctgtggaggtgagtctgcatgccaatccccacagtgttggggtcccctaggcagctcagatcccacctccttcctggggccacctactgaccaccctccctgcctgccacagacggggtggagtcggagctgctgcacacctacagcaaggtggacccgtttgacgtcctgatcctgtgtgtgcgcgtggccgtgctgacagcagtcacgctcacagtgcccatcgttctgttcccggtgagctggtgggcaggtggctagactagtggcgggaggggctgatggggccaacaggctgatgattcttctcacctgccccccaggtgcgccgcgccatccagcagat

SEQ ID NO: 145519 - DNA, 706 bp, Homo sapiens; identical to SEQ ID NO: 108345
  chr3:50374289-50374995
  hypo

SEQ ID NO: 145520 - DNA, 328 bp, Homo sapiens; identical to SEQ ID NO: 108346
  chr3:50375232-50375560
  hypo

SEQ ID NO: 145521 - DNA, 30 bp, Homo sapiens; identical to SEQ ID NO: 66023
  chr3:50387131-50387161
  hypo

SEQ ID NO: 145522 - DNA, 30 bp, Homo sapiens; identical to SEQ ID NO: 66024
  chr3:50392541-50392571
  hypo

SEQ ID NO: 145523 - DNA, 58 bp, Homo sapiens
  chr3:50395834-50395892
  hypo
gtcagccatgtcccctcggccccggctatggcgctggtagaagcgaagatatacccaa

SEQ ID NO: 145524 - DNA, 134 bp, Homo sapiens
  chr3:50404008-50404142
  hypo
ctcattgttaacctcgcagtccatctcacagtggctgttggggccgcactgctgggcagagagtgaggaccgtaagccacccaccagttttcctccctcccatcacctttcatacatccggttccccaggccat

SEQ ID NO: 145525 - DNA, 31 bp, Homo sapiens; identical to SEQ ID NO: 66027
  chr3:50417389-50417420
  hypo

SEQ ID NO: 145526 - DNA, 41 bp, Homo sapiens; identical to SEQ ID NO: 66028
  chr3:50420381-50420422
  hypo

SEQ ID NO: 145527 - DNA, 357 bp, Homo sapiens
  chr3:50425412-50425769
  hypo
agggaaataatgactcgacgccgcatcttccaatttcttctattaaaaagcctgctcattacgggcatgtacttattaattatctgtgatttgttgtgaaatgcgagggggtttccacaacaggagtgggagaaaacaaagcccagccctggcgcctgcctcccagccctcacccgcctgcgtctgccccgcctgtccctggcccatgtctgcttgccagtcgcctgggttcttggccatctgtgcgtcataatcaccggccgccccggggacccgtaacacaaacgggctaatttcatgtgtaatgatctttaatcagaaccgagcgcggctgacagaggccgccagaaggtgagc

SEQ ID NO: 145528 - DNA, 30 bp, Homo sapiens
  chr3:50426590-50426620
  hypo
gcgggggcggaggccgggcccaagctgcag

SEQ ID NO: 145529 - DNA, 31 bp, Homo sapiens; identical to SEQ ID NO: 66029
  chr3:50438043-50438074
  hypo

SEQ ID NO: 145530 - DNA, 30 bp, Homo sapiens
  chr3:50454968-50454998
  hypo
cacagggctgggcagcggggaggaccccac

SEQ ID NO: 145531 - DNA, 30 bp, Homo sapiens
  chr3:50521871-50521901
  hypo
agtccacccagtggccgcacccccagtagc

SEQ ID NO: 145532 - DNA, 54 bp, Homo sapiens; identical to SEQ ID NO: 66030
  chr3:50523257-50523311
  hypo

SEQ ID NO: 145533 - DNA, 34 bp, Homo sapiens; identical to SEQ ID NO: 66031
  chr3:50575570-50575604
  hypo

SEQ ID NO: 145534 - DNA, 470 bp, Homo sapiens; identical to SEQ ID NO: 108354
  chr3:50604942-50605412
  hypo

SEQ ID NO: 145535 - DNA, 85 bp, Homo sapiens
  chr3:50605775-50605860
  hypo
gtttatgggagtcaccgggtagcctggtacaaatgcaaacgcccctgtgtctcccggtctgggaaggaggcagggaaacagcatg

SEQ ID NO: 145536 - DNA, 30 bp, Homo sapiens
  chr3:50689248-50689278
  hypo
ttggtaaggaattccgtaagaagctacttg

SEQ ID NO: 145537 - DNA, 30 bp, Homo sapiens; identical to SEQ ID NO: 39264
  chr3:50751133-50751163
  hypo

SEQ ID NO: 145538 - DNA, 39 bp, Homo sapiens
  chr3:51617713-51617752
  hypo
attacaggcatgagccaccacgcccggccgacaagtggt

SEQ ID NO: 145539 - DNA, 87 bp, Homo sapiens
  chr3:51623968-51624055
  hypo
tgcttagagaagttccggggaattcatgttcagcatttttttctttgtttttcttttggagagagtctcacctcgtcgctcaggctg

SEQ ID NO: 145540 - DNA, 38 bp, Homo sapiens; identical to SEQ ID NO: 66034
  chr3:51660727-51660765
  hypo

SEQ ID NO: 145541 - DNA, 30 bp, Homo sapiens
  chr3:51672250-51672280
  hypo
acacagttcatggatcgcttccgggactgt

SEQ ID NO: 145542 - DNA, 120 bp, Homo sapiens; identical to SEQ ID NO: 66035
  chr3:51680378-51680498
  hypo

SEQ ID NO: 145543 - DNA, 30 bp, Homo sapiens; identical to SEQ ID NO: 66036
  chr3:51702494-51702524
  hypo

SEQ ID NO: 145544 - DNA, 31 bp, Homo sapiens; identical to SEQ ID NO: 17586
  chr3:51731021-51731052
  hypo

SEQ ID NO: 145545 - DNA, 108 bp, Homo sapiens
  chr3:51737836-51737944
  hypo
ccgtggctgggatgacggtgacacccgcagcgagcacagctacagcgagtcaggtgccagcggctcctcttttgaggagctggacttggagggcgaggggcccttagg

SEQ ID NO: 145546 - DNA, 242 bp, Homo sapiens
  chr3:51743194-51743436
  hypo
ctttttgcactggaccgcatcaaccgtgacccgcacctgctgcctggcgtgcgcctgggtgcacacatcctcgacagttgctccaaggacacacatgcgctggagcaggcactggactttgtgcgtgcctcactcagccgtggtgctgatggctcacgccacatctgccccgacggctcttatgcgacccatggtgatgctcccactgccatcactggtgttattggcggttcctacagtga

SEQ ID NO: 145547 - DNA, 176 bp, Homo sapiens; identical to SEQ ID NO: 66039
  chr3:51749173-51749349
  hypo

SEQ ID NO: 145548 - DNA, 207 bp, Homo sapiens; identical to SEQ ID NO: 66040
  chr3:51749767-51749974
  hypo

SEQ ID NO: 145549 - DNA, 17 bp, Homo sapiens
  chr3:51838441-51838458
  hypo
tgcgagccactgcaccc

SEQ ID NO: 145550 - DNA, 291 bp, Homo sapiens; identical to SEQ ID NO: 39270
  chr3:51990359-51990650
  hypo

SEQ ID NO: 145551 - DNA, 67 bp, Homo sapiens; identical to SEQ ID NO: 66042
  chr3:51996782-51996849
  hypo

SEQ ID NO: 145552 - DNA, 196 bp, Homo sapiens; identical to SEQ ID NO: 108369
  chr3:52001296-52001492
  hypo

SEQ ID NO: 145553 - DNA, 616 bp, Homo sapiens; identical to SEQ ID NO: 108374
  chr3:52009562-52010178
  hypo

SEQ ID NO: 145554 - DNA, 30 bp, Homo sapiens; identical to SEQ ID NO: 66044
  chr3:52013091-52013121
  hypo

SEQ ID NO: 145555 - DNA, 20 bp, Homo sapiens
  chr3:52025673-52025693
  hypo
gcctagactggcttgctttt

SEQ ID NO: 145556 - DNA, 30 bp, Homo sapiens
  chr3:52081154-52081184
  hypo
ccagtaagcgtggcccggcccaaggtcaca

SEQ ID NO: 145557 - DNA, 30 bp, Homo sapiens
  chr3:52081389-52081419
  hypo
agccggctcaggaggcggctgccactccca

SEQ ID NO: 145558 - DNA, 167 bp, Homo sapiens; identical to SEQ ID NO: 17589
  chr3:52088123-52088290
  hypo

SEQ ID NO: 145559 - DNA, 31 bp, Homo sapiens; identical to SEQ ID NO: 17590
  chr3:52141679-52141710
  hypo

SEQ ID NO: 145560 - DNA, 31 bp, Homo sapiens; identical to SEQ ID NO: 17591
  chr3:52164141-52164172
  hypo

SEQ ID NO: 145561 - DNA, 30 bp, Homo sapiens; identical to SEQ ID NO: 66049
  chr3:52255539-52255569
  hypo

SEQ ID NO: 145562 - DNA, 203 bp, Homo sapiens
  chr3:52255937-52256140
  hypo
gccctggagctggcccggactgccacacttcacccggctgggcagaccgggcacggcagcctgcacctccagcaggaagtccataaaggccgccccacaggcgcagtgcagagggttggcgcttacatctagtatttgcagggcactcgccaggggcccaaaccaggagtggtccactgtcttgagggcgttggcgctaaggt

SEQ ID NO: 145563 - DNA, 116 bp, Homo sapiens
  chr3:52256497-52256613
  hypo
ggcccagtgcattgccgctgaagtccagggcccgcagcgacgtactgcagagctgctgggacacttggctgtggatgttgttgtgggccaggctgaggtggcgcagggtgcgcagg

SEQ ID NO: 145564 - DNA, 283 bp, Homo sapiens; identical to SEQ ID NO: 66050
  chr3:52257378-52257661
  hypo

SEQ ID NO: 145565 - DNA, 134 bp, Homo sapiens
  chr3:52258189-52258323
  hypo
gccagttgcagttcaccaggccgtggggctggagctcacagggtaggaaggcaggcaaggtacccagggccagggtcatggccagcatgatggcctgcaccaggagagacagcgggtgcagggcgctgcggcag

SEQ ID NO: 145566 - DNA, 30 bp, Homo sapiens; identical to SEQ ID NO: 17593
  chr3:52269721-52269751
  hypo

SEQ ID NO: 145567 - DNA, 18 bp, Homo sapiens
  chr3:52299043-52299061
  hypo
tcggccagccgggtgcgg

SEQ ID NO: 145568 - DNA, 30 bp, Homo sapiens
  chr3:52302267-52302297
  hypo
ccacttggcagctggcgcgctgttcctggc

SEQ ID NO: 145569 - DNA, 30 bp, Homo sapiens; identical to SEQ ID NO: 66054
  chr3:52349178-52349208
  hypo

SEQ ID NO: 145570 - DNA, 26 bp, Homo sapiens
  chr3:52352345-52352371
  hypo
gccactgcgcccggcctggaggtgca

SEQ ID NO: 145571 - DNA, 30 bp, Homo sapiens
  chr3:52398664-52398694
  hypo
cttcgggatgagagccgtgaaaactgtgat

SEQ ID NO: 145572 - DNA, 160 bp, Homo sapiens
  chr3:52415739-52415899
  hypo
atgagccacatctgtcgcatcagccgcaccctacgccaggcgctgggcaatgcactcctgctgggcgtgggtggcagcggccgcagctccctcacaaggctcgcctcgcacatgtgagcgcctccagggcgtgctgggcagtgggcggccagggctggct

SEQ ID NO: 145573 - DNA, 30 bp, Homo sapiens
  chr3:52427402-52427432
  hypo
tacagcaacgtctgccgcagcctctttgag

SEQ ID NO: 145574 - DNA, 30 bp, Homo sapiens
  chr3:52429714-52429744
  hypo
cagacccagtggggccgcctctgcatccat

SEQ ID NO: 145575 - DNA, 30 bp, Homo sapiens; identical to SEQ ID NO: 66057
  chr3:52436341-52436371
  hypo

SEQ ID NO: 145576 - DNA, 37 bp, Homo sapiens
  chr3:52440356-52440393
  hypo
gccatcaggttgaagcggatgtcgtggtagggctccc

SEQ ID NO: 145577 - DNA, 250 bp, Homo sapiens
  chr3:52440845-52441095
  hypo
ctgcagtggcgaggccgatacgctccatgatgacccgccgggccttgtctgtccactcctcgtcctccccccagggccctagtggagaccaagacaaggaatcagcgagaaggaaaccctgagtttgggcaggccaggagtgggaaggaagacagagaagagcagttgagccagggaatcaggagctggtcgggcaatatggtgtagggtgaaaccccagccagagccgggtgtcggtaccgacaacccc

SEQ ID NO: 145578 - DNA, 30 bp, Homo sapiens
  chr3:52470003-52470033
  hypo
caggtgtaggtgcccgcatcgaaacggcta

SEQ ID NO: 145579 - DNA, 31 bp, Homo sapiens; identical to SEQ ID NO: 39280
  chr3:52477535-52477566
  hypo

SEQ ID NO: 145580 - DNA, 31 bp, Homo sapiens; identical to SEQ ID NO: 17596
  chr3:52485958-52485989
  hypo

SEQ ID NO: 145581 - DNA, 31 bp, Homo sapiens; identical to SEQ ID NO: 66062
  chr3:52487923-52487954
  hypo

SEQ ID NO: 145582 - DNA, 30 bp, Homo sapiens; identical to SEQ ID NO: 17597
  chr3:52517727-52517757
  hypo

SEQ ID NO: 145583 - DNA, 30 bp, Homo sapiens
  chr3:52518050-52518080
  hypo
ctggccgttcttctgcggaatgtctgttca

SEQ ID NO: 145584 - DNA, 30 bp, Homo sapiens
  chr3:52518466-52518496
  hypo
aacagccgctctccccgccccacccaccct

SEQ ID NO: 145585 - DNA, 30 bp, Homo sapiens; identical to SEQ ID NO: 17598
  chr3:52522576-52522606
  hypo

SEQ ID NO: 145586 - DNA, 287 bp, Homo sapiens; identical to SEQ ID NO: 66065
  chr3:52526248-52526535
  hypo

SEQ ID NO: 145587 - DNA, 304 bp, Homo sapiens
  chr3:52537788-52538092
  hypo
ccttctgcacctgccggccaggcctggtcagcatcaacagcaacgcttctgcgggctgcttcgccttctgctcccccttctcctgcgaccggtctgccacttgccaggtgaccgctgatgggaagaccaggtgagcacaggtgcctgggagcagagacagtgggttgggcaagcgtgccctctgcgggaaggcgtggggggtgcggtggggggggcctcagcctccgccctgactggctctccctgggagcccagctgtgtgtgcagggaaagcgaggtgggggatgggcgtgcctgctacgga

SEQ ID NO: 145588 - DNA, 31 bp, Homo sapiens; identical to SEQ ID NO: 66067
  chr3:52538705-52538736
  hypo

SEQ ID NO: 145589 - DNA, 423 bp, Homo sapiens; identical to SEQ ID NO: 66068
  chr3:52540174-52540597
  hypo

SEQ ID NO: 145590 - DNA, 30 bp, Homo sapiens; identical to SEQ ID NO: 66069
  chr3:52550215-52550245
  hypo

SEQ ID NO: 145591 - DNA, 974 bp, Homo sapiens
  chr3:52552578-52553552
  hypo
cctttcaccatcttcgtgccgcacgcagatctaatgagcaacctgtcgcaggtatgcagcccccagagcgaggctgggcagggctgggtgctctggtggtggccctgcgtgggctgaggcggcagtcagggaccccactcccctcgcgactctgctccaggatgagctggcccggattcgtgcgcatcgccagctggtgtttcgctaccacgtggttggctgtcggcggctgcggagcgaggacctgctggagcaggggtacgccacggccctctcagggcacccactgcgcttcagcgagagggaggtgagccctggccctggcctgccccgctccatcccgccccgccccgcccctgcgcgccattgccccaggccccacggcccacgcagtcaagaaccccacctcccctagccagggggcgcctcctgctgagtccagcccgggactccgcccttgacctgggcctcgcccactgctgtgggcctgtcctgcccagcgcccttgtgtccttccgaggactgagccccgccccctgccctgactccgccccagaccccgcccacctcgtcctggtcccgaagaaccgggactgcctgcaccctgacttgcccaacccaggttcaacctccacctcaggccccgatagcttccgagcaccccacctatctgcttcatcagccccgtgccccgcccccagggcagcatatacctcaatgacttcgcgcgcgtggtgagcagcgaccatgaggccgtgaacggcatcctgcacttcattgaccgtgtcctgctgccccccgaggcgctgcactgggagcctgatgatgctcccatcccgagggtatgacaagcacgggcctgggagctggaagacaggcaggtgggggcctgggatcctcccttcccgcctggcctagctgtttatgagagcctttcctcagagaaatgtcaccgccgccgcccagggcttcgg

SEQ ID NO: 145592 - DNA, 114 bp, Homo sapiens; identical to SEQ ID NO: 66073
  chr3:52556285-52556399
  hypo

SEQ ID NO: 145593 - DNA, 98 bp, Homo sapiens
  chr3:52558860-52558958
  hypo
cagccagcacctgcctcgactccgcgtcctgataggtctggggacacaaagtgtgcattgggtgtgtgcacccaggaggctaccgccctggccctccc

SEQ ID NO: 145594 - DNA, 30 bp, Homo sapiens; identical to SEQ ID NO: 17604
  chr3:52561332-52561362
  hypo

SEQ ID NO: 145595 - DNA, 438 bp, Homo sapiens
  chr3:52568497-52568935
  hypo
cacggtcactgcgcccgcttggttcggacctcggcaactggccgcactgacccgtcaactcccggtttcccggcgcacgcccctcgtgagatgctgtggtcttttctagcaacgtcgacaggctttccaacaaaattcctctttcctgcgcagaaccgctctccactcgcatttcttctgctcagatccgtattccgagcccgcacgcataccaggctgtgctcagggtccggaggaggccgacccagtagccgtgggccctgtcggaggggagccagctgggcgcgcgttgttttctgaggtggccgcgctgtctttcagggtgtgtgtacattcgaaactccactgaaccttgattgaagacctacagtgtggcagtccatggcctggggactggtaaggattgaggccgtaggatgggctcgagtgtggcggtgt

SEQ ID NO: 145596 - DNA, 30 bp, Homo sapiens
  chr3:52579135-52579165
  hypo
cagcctgaggcgtggcgtggggcacttcag

SEQ ID NO: 145597 - DNA, 85 bp, Homo sapiens; identical to SEQ ID NO: 66077
  chr3:52599731-52599816
  hypo

SEQ ID NO: 145598 - DNA, 24 bp, Homo sapiens
  chr3:52644974-52644998
  hypo
atacaggaacgagcctgaaccagc

SEQ ID NO: 145599 - DNA, 30 bp, Homo sapiens; identical to SEQ ID NO: 17605
  chr3:52724029-52724059
  hypo

SEQ ID NO: 145600 - DNA, 30 bp, Homo sapiens; identical to SEQ ID NO: 66079
  chr3:52726711-52726741
  hypo

SEQ ID NO: 145601 - DNA, 30 bp, Homo sapiens
  chr3:52825899-52825929
  hypo
tgattatatcgtccccgacatcttctgagc

SEQ ID NO: 145602 - DNA, 30 bp, Homo sapiens; identical to SEQ ID NO: 66080
  chr3:52867315-52867345
  hypo

SEQ ID NO: 145603 - DNA, 30 bp, Homo sapiens
  chr3:52870528-52870558
  hypo
ttaattctcactagcgaagaagtggagatg

SEQ ID NO: 145604 - DNA, 30 bp, Homo sapiens; identical to SEQ ID NO: 66081
  chr3:52874453-52874483
  hypo

SEQ ID NO: 145605 - DNA, 862 bp, Homo sapiens
  chr3:52899902-52900764
  hypo
tgtgtgtgtgtaggggcggtggggggacacaaaccgtcacatgctttacacgttgtctaaccttcctgctctcacctactgtacacatggctccattttctttcattagaggctacatggcatcccacagtgtggctgtgccatctcatttactctatgagctgctgccgcgaatgtccctgccatgtgctacctctgcctgtgtgggcccatatctgaggggcagattcctagaggcacacttgctacatcaaaagctatgtgcggcttattctgtggcgccgctctccacagaggctgtgccaactcacactcccactaatagcacgagtacccattcccacattcttgccagcatggtgtactagcaaaccttctcactctgacaatttgatcgctgaagaggctgtctcagcacggctgcggcgtgcacccatcaggccacttgggtgccagggcacctgcggggcttgccaccgtctaccgccttgaggggcctggcagggctcccagtcccaccccatctcacctgctctctcctctcggacatgagcccagagcccctccttttccccatgctcacgccctcccctgaggataccagggtgtggtggtgctcactctcccagaagtttgggcagtgctactggtgccacacaataggacagcaattatggatgactcaactctacctgtcgacttcacacagcacccaggtcaccgactgctcacttaacgctatgttgtttggttttccacacgccactctcacttggcatgtggagggcggggaccaggcacccagctcgactgtcctcctcagagcccgatctgggctggcgctccacgtggacccactgac

SEQ ID NO: 145606 - DNA, 76 bp, Homo sapiens
  chr3:52901656-52901732
  hypo
ctcctgcaacacaggcgagtgctgaggcagcggactcttcccctgggcaagtggcaagcagcgccacctccagctg

SEQ ID NO: 145607 - DNA, 31 bp, Homo sapiens; identical to SEQ ID NO: 17608
  chr3:53014728-53014759
  hypo

SEQ ID NO: 145608 - DNA, 33 bp, Homo sapiens; identical to SEQ ID NO: 17609
  chr3:53032131-53032164
  hypo

SEQ ID NO: 145609 - DNA, 1232 bp, Homo sapiens; identical to SEQ ID NO: 66086
  chr3:53032403-53033635
  hypo

SEQ ID NO: 145610 - DNA, 28 bp, Homo sapiens
  chr3:53040690-53040718
  hypo
atattacgtcattttatataagggtctt

SEQ ID NO: 145611 - DNA, 140 bp, Homo sapiens; identical to SEQ ID NO: 66087
  chr3:53054012-53054152
  hypo

SEQ ID NO: 145612 - DNA, 19 bp, Homo sapiens
  chr3:53060885-53060904
  hypo
ggcttactgcagcctcgac

SEQ ID NO: 145613 - DNA, 30 bp, Homo sapiens
  chr3:53075423-53075453
  hypo
tcattttccgcgaggcgcgggggctcatgc

SEQ ID NO: 145614 - DNA, 125 bp, Homo sapiens; identical to SEQ ID NO: 17612
  chr3:53132044-53132169
  hypo

SEQ ID NO: 145615 - DNA, 148 bp, Homo sapiens; identical to SEQ ID NO: 108402
  chr3:53190591-53190739
  hypo

SEQ ID NO: 145616 - DNA, 30 bp, Homo sapiens; identical to SEQ ID NO: 108403
  chr3:53191038-53191068
  hypo

SEQ ID NO: 145617 - DNA, 227 bp, Homo sapiens; identical to SEQ ID NO: 2578
  chr3:53195773-53196000
  hypo

SEQ ID NO: 145618 - DNA, 202 bp, Homo sapiens
  chr3:53216914-53217116
  hypo
tgcagattggcctgtcctctccgccccgtcctctccaggctcctccttcgagggctggcaggaggaagactcaagcgctgggcctctgcggggtgagggtgtgggcggtcaggagaacggtggctttgtgtagagggctagactggtcggcaggcaccagctcatagactctgcccctcccggtgctttcccttccccctcc

SEQ ID NO: 145619 - DNA, 30 bp, Homo sapiens; identical to SEQ ID NO: 17614
  chr3:53220696-53220726
  hypo

SEQ ID NO: 145620 - DNA, 30 bp, Homo sapiens
  chr3:53259753-53259783
  hypo
ccacacttcatacccgccctaggccttggt

SEQ ID NO: 145621 - DNA, 112 bp, Homo sapiens; identical to SEQ ID NO: 17615
  chr3:53276151-53276263
  hypo

SEQ ID NO: 145622 - DNA, 30 bp, Homo sapiens; identical to SEQ ID NO: 66092
  chr3:53294946-53294976
  hypo

SEQ ID NO: 145623 - DNA, 17 bp, Homo sapiens
  chr3:53297367-53297384
  hypo
ggcgtgagccaccatac

SEQ ID NO: 145624 - DNA, 582 bp, Homo sapiens; identical to SEQ ID NO: 108411
  chr3:53527818-53528400
  hypo

SEQ ID NO: 145625 - DNA, 230 bp, Homo sapiens; identical to SEQ ID NO: 39293
  chr3:53528642-53528872
  hypo

SEQ ID NO: 145626 - DNA, 31 bp, Homo sapiens; identical to SEQ ID NO: 17616
  chr3:53545544-53545575
  hypo

SEQ ID NO: 145627 - DNA, 99 bp, Homo sapiens
  chr3:53560155-53560254
  hypo
tcagattgggtcacgcgcacatccggaaccagttgcaaggccagggacgtgtgcagcactgctgacgtggggccaggtcatgtgcgtcacccctcgacc

SEQ ID NO: 145628 - DNA, 203 bp, Homo sapiens; identical to SEQ ID NO: 66096
  chr3:53675066-53675269
  hypo

SEQ ID NO: 145629 - DNA, 31 bp, Homo sapiens; identical to SEQ ID NO: 66097
  chr3:53757556-53757587
  hypo

SEQ ID NO: 145630 - DNA, 31 bp, Homo sapiens; identical to SEQ ID NO: 66098
  chr3:53841385-53841416
  hypo

SEQ ID NO: 145631 - DNA, 35 bp, Homo sapiens; identical to SEQ ID NO: 17617
  chr3:53842745-53842780
  hypo

SEQ ID NO: 145632 - DNA, 44 bp, Homo sapiens; identical to SEQ ID NO: 66100
  chr3:53844087-53844131
  hypo

SEQ ID NO: 145633 - DNA, 228 bp, Homo sapiens; identical to SEQ ID NO: 66101
  chr3:53845188-53845416
  hypo

SEQ ID NO: 145634 - DNA, 60 bp, Homo sapiens; identical to SEQ ID NO: 66102
  chr3:53857418-53857478
  hypo

SEQ ID NO: 145635 - DNA, 30 bp, Homo sapiens; identical to SEQ ID NO: 66103
  chr3:53857683-53857713
  hypo

SEQ ID NO: 145636 - DNA, 80 bp, Homo sapiens
  chr3:53857924-53858004
  hypo
gctctcagagcctgcgctggccagggcccgggcacccagggattgctgctgccccagggctccccgtgccagggctccag

SEQ ID NO: 145637 - DNA, 148 bp, Homo sapiens; identical to SEQ ID NO: 66105
  chr3:54067943-54068091
  hypo

SEQ ID NO: 145638 - DNA, 213 bp, Homo sapiens
  chr3:54237683-54237896
  hypo
ccagttctccttcaactccctcggccaaactccgtctcatcccgctggtcagtggcctgcctgtgtgctggcatctgtcggtgtgctgttctgccgacgtgcttcctcgatgtcctctcgctgtccggccgcttgtgtcttcttccgctgatgtgcctcttgacgtctggctgcctgcgtgtctgcttgctagggtctcagatttttataggc

SEQ ID NO: 145639 - DNA, 31 bp, Homo sapiens; identical to SEQ ID NO: 66107
  chr3:54307079-54307110
  hypo

SEQ ID NO: 145640 - DNA, 548 bp, Homo sapiens; identical to SEQ ID NO: 66108
  chr3:54660168-54660716
  hypo

SEQ ID NO: 145641 - DNA, 30 bp, Homo sapiens; identical to SEQ ID NO: 2587
  chr3:55237864-55237894
  hypo

SEQ ID NO: 145642 - DNA, 23 bp, Homo sapiens
  chr3:55314345-55314368
  hypo
gttgacatctgttttatgtttcg

SEQ ID NO: 145643 - DNA, 23 bp, Homo sapiens
  chr3:55314667-55314690
  hypo
ccgtgcctggccatgttttgatt

SEQ ID NO: 145644 - DNA, 29 bp, Homo sapiens
  chr3:55380621-55380650
  hypo
tattaaaaattaacttttggccgggcacg

SEQ ID NO: 145645 - DNA, 30 bp, Homo sapiens; identical to SEQ ID NO: 2591
  chr3:55749866-55749896
  hypo

SEQ ID NO: 145646 - DNA, 28 bp, Homo sapiens
  chr3:55856928-55856956
  hypo
ccgcaccgagccccaagaatttttaata

SEQ ID NO: 145647 - DNA, 27 bp, Homo sapiens
  chr3:55983107-55983134
  hypo
gcccacctggacaggcgcagtggttca

SEQ ID NO: 145648 - DNA, 36 bp, Homo sapiens; identical to SEQ ID NO: 17624
  chr3:56093397-56093433
  hypo

SEQ ID NO: 145649 - DNA, 30 bp, Homo sapiens
  chr3:56443142-56443172
  hypo
gggccagaggcggcacgtgacctcaaagta

SEQ ID NO: 145650 - DNA, 30 bp, Homo sapiens
  chr3:56654004-56654034
  hypo
tgttttaagttacttcggtgcatcccagga

SEQ ID NO: 145651 - DNA, 30 bp, Homo sapiens
  chr3:56654263-56654293
  hypo
tagcaatgtggcccacgctttttaaaaaat

SEQ ID NO: 145652 - DNA, 83 bp, Homo sapiens; identical to SEQ ID NO: 17625
  chr3:56691369-56691452
  hypo

SEQ ID NO: 145653 - DNA, 391 bp, Homo sapiens; identical to SEQ ID NO: 17626
  chr3:56718074-56718465
  hypo

SEQ ID NO: 145654 - DNA, 42 bp, Homo sapiens; identical to SEQ ID NO: 66118
  chr3:56792412-56792454
  hypo

SEQ ID NO: 145655 - DNA, 108 bp, Homo sapiens
  chr3:56840407-56840515
  hypo
ctgtgtgtgtgtttacgggcttaggaacaacactgctctaacaggcagcttcactcaaagaaacggcacaaagtgtctttcagaacttgccttcggcatagcccgtta

SEQ ID NO: 145656 - DNA, 98 bp, Homo sapiens; identical to SEQ ID NO: 17627
  chr3:56882997-56883095
  hypo

SEQ ID NO: 145657 - DNA, 508 bp, Homo sapiens
  chr3:57040316-57040824
  hypo
gctgtcgatgccaatgaccagcgtgaggtatctggagaaccactacaccgacaagatagatttcagttgttttcaaacaagccatcaaagtggctaatggcttccctcaaagaaaccccacaccttcagccaacagacaaggaactcattaggcggagctccccgctccgatctccactgtccacaagcttcttccaagccgttaggaaaacagctccccagagcccacatgctgacaggcagcatccggggtgatcagatttctatcagtaaagacacatggcatttctctctggctccagttcagaatctcaccccacccacccccaacaggcagatcgtagcttttcataggtcctaaataatccggcctttaagaaaatgctcgtgtatcagtgacacacacaacatcaccaacacagtcactcgttcaatgtgctgcctgctctcgacacccccccaaacacggtcacactttctcatgcccgcctggaaatccatctccatc

SEQ ID NO: 145658 - DNA, 31 bp, Homo sapiens; identical to SEQ ID NO: 66120
  chr3:57044050-57044081
  hypo

SEQ ID NO: 145659 - DNA, 33 bp, Homo sapiens; identical to SEQ ID NO: 66121
  chr3:57101180-57101213
  hypo

SEQ ID NO: 145660 - DNA, 899 bp, Homo sapiens; identical to SEQ ID NO: 39313
  chr3:57112573-57113472
  hypo

SEQ ID NO: 145661 - DNA, 49 bp, Homo sapiens; identical to SEQ ID NO: 66123
  chr3:57117481-57117530
  hypo

SEQ ID NO: 145662 - DNA, 257 bp, Homo sapiens; identical to SEQ ID NO: 66124
  chr3:57131628-57131885
  hypo

SEQ ID NO: 145663 - DNA, 30 bp, Homo sapiens
  chr3:57132141-57132171
  hypo
ctgctgccctgtcgcgtgtgctgccccggc

SEQ ID NO: 145664 - DNA, 30 bp, Homo sapiens; identical to SEQ ID NO: 66125
  chr3:57235329-57235359
  hypo

SEQ ID NO: 145665 - DNA, 219 bp, Homo sapiens; identical to SEQ ID NO: 108441
  chr3:57261347-57261566
  hypo

SEQ ID NO: 145666 - DNA, 30 bp, Homo sapiens
  chr3:57310732-57310762
  hypo
aatgttttagggagcgagggtttgctaaaa

SEQ ID NO: 145667 - DNA, 30 bp, Homo sapiens
  chr3:57356562-57356592
  hypo
aaaagtgcatatacacgtggattaaaaaac

SEQ ID NO: 145668 - DNA, 28 bp, Homo sapiens
  chr3:57356945-57356973
  hypo
agactccgtctcaaaacaaacaaacaaa

SEQ ID NO: 145669 - DNA, 30 bp, Homo sapiens; identical to SEQ ID NO: 17632
  chr3:57505728-57505758
  hypo

SEQ ID NO: 145670 - DNA, 121 bp, Homo sapiens
  chr3:57529372-57529493
  hypo
tatgatatcttagtcttgctgccttccaagaaagtgatgctatgatcaagcaaaaaataggcatacttgatgcatggcaaatataaaatgtcatgtaaatgctcaaaaattttactgtggg

SEQ ID NO: 145671 - DNA, 121 bp, Homo sapiens; identical to SEQ ID NO: 66129
  chr3:57536862-57536983
  hypo

SEQ ID NO: 145672 - DNA, 31 bp, Homo sapiens; identical to SEQ ID NO: 66130
  chr3:57537282-57537313
  hypo

SEQ ID NO: 145673 - DNA, 37 bp, Homo sapiens; identical to SEQ ID NO: 66131
  chr3:57539554-57539591
  hypo

SEQ ID NO: 145674 - DNA, 45 bp, Homo sapiens; identical to SEQ ID NO: 66132
  chr3:57544222-57544267
  hypo

SEQ ID NO: 145675 - DNA, 181 bp, Homo sapiens; identical to SEQ ID NO: 66133
  chr3:57544506-57544687
  hypo

SEQ ID NO: 145676 - DNA, 34 bp, Homo sapiens
  chr3:57600222-57600256
  hypo
ggacacggtggctcacgcctgtaatccgtttttt

SEQ ID NO: 145677 - DNA, 40 bp, Homo sapiens
  chr3:57674949-57674989
  hypo
aattacaggcatgagccgccatgcccggcctagtgtttat

SEQ ID NO: 145678 - DNA, 284 bp, Homo sapiens; identical to SEQ ID NO: 66134
  chr3:57679349-57679633
  hypo

SEQ ID NO: 145679 - DNA, 145 bp, Homo sapiens; identical to SEQ ID NO: 17635
  chr3:57679966-57680111
  hypo

SEQ ID NO: 145680 - DNA, 24 bp, Homo sapiens
  chr3:57680170-57680194
  hypo
cacggcagaacttaagcattttgc

SEQ ID NO: 145681 - DNA, 20 bp, Homo sapiens
  chr3:57905503-57905523
  hypo
aagagcgaaactccatctca

SEQ ID NO: 145682 - DNA, 94 bp, Homo sapiens; identical to SEQ ID NO: 17638
  chr3:57906366-57906460
  hypo

SEQ ID NO: 145683 - DNA, 30 bp, Homo sapiens
  chr3:57930171-57930201
  hypo
gaagaatggggtgatcgtaattttctcaag

SEQ ID NO: 145684 - DNA, 145 bp, Homo sapiens
  chr3:58090179-58090324
  hypo
cattaagaccgtctacgtgagtgctgtcaggggccaagggacgcagtctacagctttgccttgtgggcattgcacttgcccctctgcgttctgtgttttccagctcccctggaggtgcaactttaaactccgaataaattcagtt

SEQ ID NO: 145685 - DNA, 137 bp, Homo sapiens
  chr3:58109086-58109223
  hypo
gacccctctaaagtcgtggcatcggggccaggtctcgagcacgggaaggtgggtgaagctggcctccttagcgtcgactgctcggaagcgggaccgggggccctgggcctggaagctgtctcggactcgggaacaaa

SEQ ID NO: 145686 - DNA, 143 bp, Homo sapiens; identical to SEQ ID NO: 66140
  chr3:58136696-58136839
  hypo

SEQ ID NO: 145687 - DNA, 105 bp, Homo sapiens; identical to SEQ ID NO: 66141
  chr3:58153497-58153602
  hypo

SEQ ID NO: 145688 - DNA, 30 bp, Homo sapiens; identical to SEQ ID NO: 66142
  chr3:58222059-58222089
  hypo

SEQ ID NO: 145689 - DNA, 30 bp, Homo sapiens
  chr3:58227817-58227847
  hypo
ggagaataggcgtgccggggagagaggagc

SEQ ID NO: 145690 - DNA, 30 bp, Homo sapiens; identical to SEQ ID NO: 66143
  chr3:58305029-58305059
  hypo

SEQ ID NO: 145691 - DNA, 23 bp, Homo sapiens
  chr3:58340558-58340581
  hypo
ccaggtgtggtggcagtggctcg

SEQ ID NO: 145692 - DNA, 23 bp, Homo sapiens
  chr3:58342711-58342734
  hypo
tctagaaaacttcaggctgggcg

SEQ ID NO: 145693 - DNA, 30 bp, Homo sapiens; identical to SEQ ID NO: 2600
  chr3:58474980-58475010
  hypo

SEQ ID NO: 145694 - DNA, 23 bp, Homo sapiens
  chr3:58484907-58484930
  hypo
gctgatctcgaactcctgacctc

SEQ ID NO: 145695 - DNA, 30 bp, Homo sapiens
  chr3:58520116-58520146
  hypo
tctaaccaacccaggcgccgagctatcaac

SEQ ID NO: 145696 - DNA, 31 bp, Homo sapiens; identical to SEQ ID NO: 17642
  chr3:58554742-58554773
  hypo

SEQ ID NO: 145697 - DNA, 85 bp, Homo sapiens
  chr3:58652282-58652367
  hypo
ccattcttggggggacgtacccgagggctcgaggctcccacttccctgcttcgatggagaaggcgaggtggtccagcaggtgccg

SEQ ID NO: 145698 - DNA, 25 bp, Homo sapiens
  chr3:58713169-58713194
  hypo
ttctttttttttgagacggagtttc

SEQ ID NO: 145699 - DNA, 20 bp, Homo sapiens
  chr3:58864714-58864734
  hypo
cagagcgagacttcgtctcc

SEQ ID NO: 145700 - DNA, 18 bp, Homo sapiens
  chr3:58916504-58916522
  hypo
aggactggcagccaagat

SEQ ID NO: 145701 - DNA, 38 bp, Homo sapiens; identical to SEQ ID NO: 66149
  chr3:59041983-59042021
  hypo

SEQ ID NO: 145702 - DNA, 20 bp, Homo sapiens
  chr3:60034187-60034207
  hypo
ctctacgaccggccttaagt

SEQ ID NO: 145703 - DNA, 30 bp, Homo sapiens; identical to SEQ ID NO: 66150
  chr3:60133193-60133223
  hypo

SEQ ID NO: 145704 - DNA, 31 bp, Homo sapiens; identical to SEQ ID NO: 17643
  chr3:61332124-61332155
  hypo

SEQ ID NO: 145705 - DNA, 2752 bp, Homo sapiens; identical to SEQ ID NO: 108468
  chr3:61546307-61549059
  hypo

SEQ ID NO: 145706 - DNA, 91 bp, Homo sapiens; identical to SEQ ID NO: 2603
  chr3:61656125-61656216
  hypo

SEQ ID NO: 145707 - DNA, 31 bp, Homo sapiens; identical to SEQ ID NO: 17645
  chr3:62022461-62022492
  hypo

SEQ ID NO: 145708 - DNA, 93 bp, Homo sapiens; identical to SEQ ID NO: 66155
  chr3:63082428-63082521
  hypo

SEQ ID NO: 145709 - DNA, 20 bp, Homo sapiens
  chr3:63171771-63171791
  hypo
gccatcgcacctggactcat

SEQ ID NO: 145710 - DNA, 30 bp, Homo sapiens; identical to SEQ ID NO: 66156
  chr3:63847208-63847238
  hypo

SEQ ID NO: 145711 - DNA, 31 bp, Homo sapiens; identical to SEQ ID NO: 17646
  chr3:63867446-63867477
  hypo

SEQ ID NO: 145712 - DNA, 16 bp, Homo sapiens
  chr3:63939612-63939628
  hypo
gcgctcagccaagaga

SEQ ID NO: 145713 - DNA, 30 bp, Homo sapiens; identical to SEQ ID NO: 39362
  chr3:63967884-63967914
  hypo

SEQ ID NO: 145714 - DNA, 30 bp, Homo sapiens
  chr3:63983717-63983747
  hypo
gattcttcaacgcaccgtctttgagagaga

SEQ ID NO: 145715 - DNA, 19 bp, Homo sapiens
  chr3:64030612-64030631
  hypo
taaaagtgtgtgggccggg

SEQ ID NO: 145716 - DNA, 124 bp, Homo sapiens; identical to SEQ ID NO: 66159
  chr3:64142935-64143059
  hypo

SEQ ID NO: 145717 - DNA, 30 bp, Homo sapiens; identical to SEQ ID NO: 2621
  chr3:64232467-64232497
  hypo

SEQ ID NO: 145718 - DNA, 140 bp, Homo sapiens
  chr3:64317484-64317624
  hypo
catcattccaccgcccgtcgattatttacctcatccccaagtgcggaaggtcaaaccgctggtattttgcagtctgcctctgcaggtgaaatttagctttaattgtctaattgctactctggcaacggctgccacagatt

SEQ ID NO: 145719 - DNA, 338 bp, Homo sapiens; identical to SEQ ID NO: 17648
  chr3:64547142-64547480
  hypo

SEQ ID NO: 145720 - DNA, 814 bp, Homo sapiens; identical to SEQ ID NO: 108506
  chr3:64673124-64673938
  hypo

SEQ ID NO: 145721 - DNA, 27 bp, Homo sapiens
  chr3:64950009-64950036
  hypo
ggactacatgtgcgagacaccatgccc

SEQ ID NO: 145722 - DNA, 30 bp, Homo sapiens; identical to SEQ ID NO: 66165
  chr3:65170879-65170909
  hypo

SEQ ID NO: 145723 - DNA, 156 bp, Homo sapiens; identical to SEQ ID NO: 66166
  chr3:65364854-65365010
  hypo

SEQ ID NO: 145724 - DNA, 242 bp, Homo sapiens; identical to SEQ ID NO: 66167
  chr3:65368389-65368631
  hypo

SEQ ID NO: 145725 - DNA, 40 bp, Homo sapiens; identical to SEQ ID NO: 17653
  chr3:65435158-65435198
  hypo

SEQ ID NO: 145726 - DNA, 21 bp, Homo sapiens
  chr3:65676965-65676986
  hypo
agactccgtctcaaaaaaaaa

SEQ ID NO: 145727 - DNA, 20 bp, Homo sapiens
  chr3:65722694-65722714
  hypo
ttttgagacggagtctcgct

SEQ ID NO: 145728 - DNA, 25 bp, Homo sapiens
  chr3:65949273-65949298
  hypo
aagcgagactcagtctctaaataaa

SEQ ID NO: 145729 - DNA, 31 bp, Homo sapiens; identical to SEQ ID NO: 66172
  chr3:65999147-65999178
  hypo

SEQ ID NO: 145730 - DNA, 1447 bp, Homo sapiens; identical to SEQ ID NO: 108510
  chr3:66024121-66025568
  hypo

SEQ ID NO: 145731 - DNA, 104 bp, Homo sapiens; identical to SEQ ID NO: 17657
  chr3:66053362-66053466
  hypo

SEQ ID NO: 145732 - DNA, 104 bp, Homo sapiens; identical to SEQ ID NO: 17658
  chr3:66053765-66053869
  hypo

SEQ ID NO: 145733 - DNA, 255 bp, Homo sapiens
  chr3:66423427-66423682
  hypo
aagaccttgttctggcgcatatgggagtacacatataaacagaaatatattactaaacaaacaccgcgtgttcattcagccccgtagccaaaggcagatggggagcctgcccaccccggatggcccctttctggttttcttcactcatcagctggctttctgtttttgttgactgtgccctttatgtagtagctgccactgccgcgagcatccctttctgtctggcattgtaagtgcttacgtttgctctcattt

SEQ ID NO: 145734 - DNA, 30 bp, Homo sapiens; identical to SEQ ID NO: 66176
  chr3:66433506-66433536
  hypo

SEQ ID NO: 145735 - DNA, 30 bp, Homo sapiens
  chr3:66434515-66434545
  hypo
aacacgtcgtcatccggcatgacatgcatg

SEQ ID NO: 145736 - DNA, 30 bp, Homo sapiens
  chr3:66451721-66451751
  hypo
tggggcactgcaccccgagcgcttcagaga

SEQ ID NO: 145737 - DNA, 457 bp, Homo sapiens
  chr3:66452222-66452679
  hypo
acagaaagcgacctgcgggagtcacctgtcaaacctcccatccatctcctggccaacccagccaacagctccaaaggcctggttagcgcttgccaaatcaagtggcaggtactgggggcaatgctcacatgggtccttgtactcatgtccttggaagtagccgcgacatgtgcactagcccccgcttcccacccacacacacaatgagttccactgcaggcccggcccccacataggcagggatggaggctgcgctcacatcagctctgcaagatcccccaaacatgccccttcccatgtgccctgtgtgggactctgcccctccctccgaggaatgccatggagccagctggaaccactgggcaggaagtcgcatacccaggtcactaactgctcctctctgcctgtaatttgggatccagaaattctcccttccctcccgcgtactgactctgtg

SEQ ID NO: 145738 - DNA, 135 bp, Homo sapiens; identical to SEQ ID NO: 66178
  chr3:66455987-66456122
  hypo

SEQ ID NO: 145739 - DNA, 52 bp, Homo sapiens; identical to SEQ ID NO: 66179
  chr3:66460440-66460492
  hypo

SEQ ID NO: 145740 - DNA, 97 bp, Homo sapiens; identical to SEQ ID NO: 66180
  chr3:66461117-66461214
  hypo

SEQ ID NO: 145741 - DNA, 31 bp, Homo sapiens; identical to SEQ ID NO: 17660
  chr3:66463001-66463032
  hypo

SEQ ID NO: 145742 - DNA, 197 bp, Homo sapiens; identical to SEQ ID NO: 17661
  chr3:66482907-66483104
  hypo

SEQ ID NO: 145743 - DNA, 179 bp, Homo sapiens; identical to SEQ ID NO: 66183
  chr3:66521939-66522118
  hypo

SEQ ID NO: 145744 - DNA, 1605 bp, Homo sapiens; identical to SEQ ID NO: 39372
  chr3:66550297-66551902
  hypo

SEQ ID NO: 145745 - DNA, 30 bp, Homo sapiens; identical to SEQ ID NO: 66185
  chr3:66744845-66744875
  hypo

SEQ ID NO: 145746 - DNA, 156 bp, Homo sapiens; identical to SEQ ID NO: 66186
  chr3:66852897-66853053
  hypo

SEQ ID NO: 145747 - DNA, 30 bp, Homo sapiens; identical to SEQ ID NO: 2632
  chr3:66879269-66879299
  hypo

SEQ ID NO: 145748 - DNA, 1094 bp, Homo sapiens; identical to SEQ ID NO: 108513
  chr3:67048276-67049370
  hypo

SEQ ID NO: 145749 - DNA, 44 bp, Homo sapiens; identical to SEQ ID NO: 66189
  chr3:67079755-67079799
  hypo

SEQ ID NO: 145750 - DNA, 30 bp, Homo sapiens
  chr3:67564417-67564447
  hypo
tacccagcggaatacgacatatccctggaa

SEQ ID NO: 145751 - DNA, 30 bp, Homo sapiens
  chr3:68804239-68804269
  hypo
tgtgcgcaggtacatcgacatctccgattc

SEQ ID NO: 145752 - DNA, 159 bp, Homo sapiens; identical to SEQ ID NO: 2636
  chr3:69062097-69062256
  hypo

SEQ ID NO: 145753 - DNA, 24 bp, Homo sapiens
  chr3:69095216-69095240
  hypo
accactgcacgctagcctggacaa

SEQ ID NO: 145754 - DNA, 303 bp, Homo sapiens; identical to SEQ ID NO: 66192
  chr3:69230131-69230434
  hypo

SEQ ID NO: 145755 - DNA, 137 bp, Homo sapiens
  chr3:69230706-69230843
  hypo
aagaagacccgtcatcgaggatttctgtgctgctgcttctttgggatttggagagggagaaaaatggcttatcgctgtccatctcggagagcaggtgggactgggactccaggcttccactccgctggcggcagtgc

SEQ ID NO: 145756 - DNA, 23 bp, Homo sapiens
  chr3:69248143-69248166
  hypo
gggcgcggtggctcacgcctgta

SEQ ID NO: 145757 - DNA, 18 bp, Homo sapiens
  chr3:69309256-69309274
  hypo
acgtgctagcagccctcg

SEQ ID NO: 145758 - DNA, 77 bp, Homo sapiens; identical to SEQ ID NO: 17669
  chr3:69309453-69309530
  hypo

SEQ ID NO: 145759 - DNA, 30 bp, Homo sapiens; identical to SEQ ID NO: 66195
  chr3:69314077-69314107
  hypo

SEQ ID NO: 145760 - DNA, 731 bp, Homo sapiens; identical to SEQ ID NO: 108524
  chr3:69434905-69435636
  hypo

SEQ ID NO: 145761 - DNA, 37 bp, Homo sapiens
  chr3:69585560-69585597
  hypo
agcagatacctgaagcggaggacgtccaccgttgggt

SEQ ID NO: 145762 - DNA, 181 bp, Homo sapiens
  chr3:69589305-69589486
  hypo
tgcactccactctgggtgacagagttcgaaggaaaaaaaaaggaagaattgtagaaacaccaatacatccaccacctgtcttgtgacacttaatttagagacaaaaatatatacagagtgcttactgagtgtcaatctctcttaaatatcatctttttaaatttattaaaaatatataggc

SEQ ID NO: 145763 - DNA, 186 bp, Homo sapiens; identical to SEQ ID NO: 2638
  chr3:69590940-69591126
  hypo

SEQ ID NO: 145764 - DNA, 198 bp, Homo sapiens; identical to SEQ ID NO: 39384
  chr3:69591779-69591977
  hypo

SEQ ID NO: 145765 - DNA, 20 bp, Homo sapiens
  chr3:69740954-69740974
  hypo
acaggcgtgagccaccgcgc

SEQ ID NO: 145766 - DNA, 801 bp, Homo sapiens; identical to SEQ ID NO: 108528
  chr3:69788413-69789214
  hypo

SEQ ID NO: 145767 - DNA, 30 bp, Homo sapiens
  chr3:69925264-69925294
  hypo
gttgtcgactttcacgtatgaagacttagt

SEQ ID NO: 145768 - DNA, 82 bp, Homo sapiens
  chr3:69928165-69928247
  hypo
cttgattatatttgcgcagactcattttatagtttggtgcaatttaggatacccccaaagtgcaaacgaagggtctcattag

SEQ ID NO: 145769 - DNA, 255 bp, Homo sapiens; identical to SEQ ID NO: 17675
  chr3:69937600-69937855
  hypo

SEQ ID NO: 145770 - DNA, 87 bp, Homo sapiens
  chr3:69970990-69971077
  hypo
ttattaacactgggacgaaagagtctttgttttgaaaggctgtcttgtgcatcgtaggatgtttagcatcaccgctggactctcgca

SEQ ID NO: 145771 - DNA, 369 bp, Homo sapiens
  chr3:69986971-69987340
  hypo
ggtgcagacccacctcgaaaaccccaccaagtaccacatacagcaagcccaacggcagcaggtaaagcagtacctttctaccactttagcaaataaacatgccaaccaagtcctgagcttgccatgtccaaaccagcctggcgatcatgtcatgccaccggtgccggggagcagcgcacccaacagccccatggctatgcttacgcttaactccaactgtgaaaaagaggtaattcatgtctcctctcctctcctgttttcttatgctaaataacttgtctgttgaatatgattcccacacttaactgtggactctagtttgtccttgtggccacatttaccagcctttgtccccgattcaccatcgtg

SEQ ID NO: 145772 - DNA, 50 bp, Homo sapiens
  chr3:70008506-70008556
  hypo
aagaacttgaaaaccgacagaagaaactggagcacgccaaccggcatttg

SEQ ID NO: 145773 - DNA, 30 bp, Homo sapiens; identical to SEQ ID NO: 66205
  chr3:70900167-70900197
  hypo

SEQ ID NO: 145774 - DNA, 41 bp, Homo sapiens; identical to SEQ ID NO: 66206
  chr3:70901511-70901552
  hypo

SEQ ID NO: 145775 - DNA, 119 bp, Homo sapiens
  chr3:71019766-71019885
  hypo
aagaaaaaagtttaacggaattaaaatttaatatctaattagagcaaggctaatatattttgaaatgagtaggggagacctgtgcctctgctgcatattcgggacggccgttaatctta

SEQ ID NO: 145776 - DNA, 30 bp, Homo sapiens
  chr3:71027124-71027154
  hypo
tgtggagaagcctccgatgcggacttggag

SEQ ID NO: 145777 - DNA, 30 bp, Homo sapiens
  chr3:71033985-71034015
  hypo
ccttcccgagatgagcgtatcctctaacta

SEQ ID NO: 145778 - DNA, 293 bp, Homo sapiens
  chr3:71036184-71036477
  hypo
catattgattaaaatcgctggtactaactatagattgtcaacgctcaattaattttcacacagtgactccaagcaaaatcaaataaaggcagtgtacctttaaattttacaaatcttaaaatcaagaagcaaagcactgtctccattttgaataatcagttaaagctactaggagaattttagaaacgtaagaggaatatgaccgttaaagagatcgatttattacaaggaaggaggtccaagacaaacttttaggttcagacacgatccttctgcttcggtattaacagcct

SEQ ID NO: 145779 - DNA, 271 bp, Homo sapiens; identical to SEQ ID NO: 17677
  chr3:71049501-71049772
  hypo

SEQ ID NO: 145780 - DNA, 30 bp, Homo sapiens; identical to SEQ ID NO: 66209
  chr3:71074446-71074476
  hypo

SEQ ID NO: 145781 - DNA, 30 bp, Homo sapiens; identical to SEQ ID NO: 66210
  chr3:71082358-71082388
  hypo

SEQ ID NO: 145782 - DNA, 30 bp, Homo sapiens
  chr3:71083233-71083263
  hypo
atattctccactgtgcgtcactggtttcta

SEQ ID NO: 145783 - DNA, 1739 bp, Homo sapiens; identical to SEQ ID NO: 39389
  chr3:71113095-71114834
  hypo

SEQ ID NO: 145784 - DNA, 450 bp, Homo sapiens
  chr3:71119373-71119823
  hypo
tttaatgtaaaaatgcacattcgtctactctattgcctcctcgctcacagcaggggagtgccaaactcgatattttagctcacctaagagaacaacctgtattactgttgggcatcttgccttcttttgctcactctccggggagagcatgtcggcgcattttcaataaaacaccttcttagcagtaatgggccactgttcccatttcagtggtccctaaggtttcacgatacagtatatttggctgactcgcagttcgagttttcttctggcattcctaagatccaaaaaacggaagagaaaaagcaaaagaagagtacttgcttatcctttgtttcagtaagaaaacagtcaactttgagactgattagctggtaggacttacacaaaacaagggcactctcgggccctctcccctgctacgggaaccctccgcgcacgtgtgggcca

SEQ ID NO: 145785 - DNA, 19 bp, Homo sapiens
  chr3:71120739-71120758
  hypo
tttgagatggagtctcgct

SEQ ID NO: 145786 - DNA, 78 bp, Homo sapiens; identical to SEQ ID NO: 66213
  chr3:71120997-71121075
  hypo

SEQ ID NO: 145787 - DNA, 19 bp, Homo sapiens
  chr3:71127280-71127299
  hypo
cctcctctgtatattttct

SEQ ID NO: 145788 - DNA, 27 bp, Homo sapiens
  chr3:71148377-71148404
  hypo
taggttgcacacagtggctcacgccta

SEQ ID NO: 145789 - DNA, 30 bp, Homo sapiens
  chr3:71149474-71149504
  hypo
ataacaatccctttacgctctcaaacaaac

SEQ ID NO: 145790 - DNA, 455 bp, Homo sapiens
  chr3:71163556-71164011
  hypo
tctcctaaaaggacacgctcactgaactgtgctcataactagagttgtaacaaataatacttttaagacactgcgtaaggttgagtggcgcctttgtgtttaagaggtgcaaaggaaagctaagaaacacaagcaccgatagatgagtgacaaagaaaagaccatgggaaagtggaaccctgctatcccacctgcctactgcatccacccccgtgtcccagggaggccttctgcctactgaactcaccacgaccagcccttcagatgtaatgcacaggctagttcatctgtgaagggagagacagattcgacaaggcctgcctggaagagcctcgagaaaaggggctgtctgagtggggcatctggaagccaagacgcctgggagagttgcctgagactctagcctgctgtctcagggaggattcaccatcactggactccgggtttccttgtct

SEQ ID NO: 145791 - DNA, 27 bp, Homo sapiens
  chr3:71165163-71165190
  hypo
ggcgtgagccaccgtgtccggccatca

SEQ ID NO: 145792 - DNA, 28 bp, Homo sapiens
  chr3:71175339-71175367
  hypo
gaaaagaaatttttggccgggcgtggtg

SEQ ID NO: 145793 - DNA, 245 bp, Homo sapiens
  chr3:71187311-71187556
  hypo
tgcgcagaatggtgacgctgtctggagaacacacgtggaggaagaagcgaatgcttctaattgcctcaaaatgggatttttaatatttaggaacgtaatgggatcgggaaataagaacacttccaacatcctttataaataagcctttacaaaatattgttagctgttaataatacatcattatcaaaaatggaaagtcatgaatacagtgcatgtaacctttgtattcacgtgaattaacctat

SEQ ID NO: 145794 - DNA, 110 bp, Homo sapiens; identical to SEQ ID NO: 66218
  chr3:71218263-71218373
  hypo

SEQ ID NO: 145795 - DNA, 78 bp, Homo sapiens; identical to SEQ ID NO: 66219
  chr3:71247379-71247457
  hypo

SEQ ID NO: 145796 - DNA, 30 bp, Homo sapiens
  chr3:71267115-71267145
  hypo
tacacttcattgtgtcgacatcctcccctc

SEQ ID NO: 145797 - DNA, 30 bp, Homo sapiens
  chr3:71267885-71267915
  hypo
tatttacaaaacaggcgacagctggattca

SEQ ID NO: 145798 - DNA, 30 bp, Homo sapiens; identical to SEQ ID NO: 66220
  chr3:71292536-71292566
  hypo

SEQ ID NO: 145799 - DNA, 57 bp, Homo sapiens
  chr3:71307161-71307218
  hypo
taattgttattactgcgcttaataacatccacggagcgcctacgaatatctacatag

SEQ ID NO: 145800 - DNA, 186 bp, Homo sapiens
  chr3:71357100-71357286
  hypo
gggatccatgcattgcggcccagctaagctccttgctgaaagagcgccggattcgggagcgaatggcacagacacagggattgtgacaaaaatccgtatgcaagctttagatgctgagtgacacatactgatgcacagagtcaaagatgtcatcctcacacaagcgccactcgctgtaagcttgag

SEQ ID NO: 145801 - DNA, 153 bp, Homo sapiens; identical to SEQ ID NO: 17683
  chr3:71366444-71366597
  hypo

SEQ ID NO: 145802 - DNA, 81 bp, Homo sapiens
  chr3:71408815-71408896
  hypo
tgaactataggtgtgcgccaccatgcccaaataattttggaattgtagtagacaagctaaattttagtaggccggctggtc

SEQ ID NO: 145803 - DNA, 286 bp, Homo sapiens; identical to SEQ ID NO: 66223
  chr3:71410778-71411064
  hypo

SEQ ID NO: 145804 - DNA, 119 bp, Homo sapiens
  chr3:71451126-71451245
  hypo
tcaccaggctataaacgccatgagagacggaatggcacacaaacatcttcctcactggagttgtggcaggctctgaactggggatcaagaaaccttagtgagtgcggtttattgtccta

SEQ ID NO: 145805 - DNA, 30 bp, Homo sapiens
  chr3:71463810-71463840
  hypo
taaggggagagggcacgaggaggacaagcg

SEQ ID NO: 145806 - DNA, 66 bp, Homo sapiens
  chr3:71496760-71496826
  hypo
tgtggatgaggttcacgctagcagcatggttctttaaaggaagctcatccacgtccagcgtgccct

SEQ ID NO: 145807 - DNA, 26 bp, Homo sapiens
  chr3:71509869-71509895
  hypo
gtgagctaccgcgcctggcctaattt

SEQ ID NO: 145808 - DNA, 26 bp, Homo sapiens
  chr3:71510925-71510951
  hypo
gggaaaaagagcgagactctgtatcg

SEQ ID NO: 145809 - DNA, 30 bp, Homo sapiens; identical to SEQ ID NO: 66226
  chr3:71511869-71511899
  hypo

SEQ ID NO: 145810 - DNA, 30 bp, Homo sapiens; identical to SEQ ID NO: 17685
  chr3:71531004-71531034
  hypo

SEQ ID NO: 145811 - DNA, 94 bp, Homo sapiens; identical to SEQ ID NO: 66228
  chr3:71533899-71533993
  hypo

SEQ ID NO: 145812 - DNA, 30 bp, Homo sapiens; identical to SEQ ID NO: 66229
  chr3:71538233-71538263
  hypo

SEQ ID NO: 145813 - DNA, 57 bp, Homo sapiens
  chr3:71563897-71563954
  hypo
acctgcatgtggagccgacccaggtgagcagctcaatgctctcgcccactgggccca

SEQ ID NO: 145814 - DNA, 31 bp, Homo sapiens; identical to SEQ ID NO: 17686
  chr3:71567986-71568017
  hypo

SEQ ID NO: 145815 - DNA, 30 bp, Homo sapiens
  chr3:71580341-71580371
  hypo
caaagtaggagatatcggttcaaatccggg

SEQ ID NO: 145816 - DNA, 44 bp, Homo sapiens
  chr3:71581509-71581553
  hypo
agtgctgagattacaggcatgagccaccacggccggcacaaaga

SEQ ID NO: 145817 - DNA, 30 bp, Homo sapiens; identical to SEQ ID NO: 66231
  chr3:71600099-71600129
  hypo

SEQ ID NO: 145818 - DNA, 1335 bp, Homo sapiens; identical to SEQ ID NO: 108531
  chr3:71630564-71631899
  hypo

SEQ ID NO: 145819 - DNA, 1599 bp, Homo sapiens; identical to SEQ ID NO: 108537
  chr3:71833527-71835126
  hypo

SEQ ID NO: 145820 - DNA, 30 bp, Homo sapiens; identical to SEQ ID NO: 17690
  chr3:71942837-71942867
  hypo

SEQ ID NO: 145821 - DNA, 116 bp, Homo sapiens
  chr3:72192476-72192592
  hypo
tttatccttgcttatgtgagacggttaatggcactcaagaaatcatcacgagtttaaaactcattctagagaaaacacggctctgacatggtagcgcccttgggataagtccaccc

SEQ ID NO: 145822 - DNA, 30 bp, Homo sapiens
  chr3:72208322-72208352
  hypo
ggatagaaaggccaccgctagcctcagcgc

SEQ ID NO: 145823 - DNA, 30 bp, Homo sapiens
  chr3:72209689-72209719
  hypo
gtggataatggacgtcgacttggctgcatt

SEQ ID NO: 145824 - DNA, 30 bp, Homo sapiens
  chr3:72270380-72270410
  hypo
acaccttctgagctacgtcattagcccact

SEQ ID NO: 145825 - DNA, 30 bp, Homo sapiens
  chr3:72386021-72386051
  hypo
tgttcacccaggtaacggaattgcctgggg

SEQ ID NO: 145826 - DNA, 30 bp, Homo sapiens
  chr3:72388710-72388740
  hypo
cgtgcctgggactcacggtgtgcgtggcca

SEQ ID NO: 145827 - DNA, 72 bp, Homo sapiens; identical to SEQ ID NO: 66237
  chr3:72420266-72420338
  hypo

SEQ ID NO: 145828 - DNA, 24 bp, Homo sapiens
  chr3:72429879-72429903
  hypo
cgatccacccgcctcggcctccca

SEQ ID NO: 145829 - DNA, 353 bp, Homo sapiens; identical to SEQ ID NO: 108541
  chr3:72496510-72496863
  hypo

SEQ ID NO: 145830 - DNA, 39 bp, Homo sapiens; identical to SEQ ID NO: 66239
  chr3:72506010-72506049
  hypo

SEQ ID NO: 145831 - DNA, 207 bp, Homo sapiens; identical to SEQ ID NO: 66240
  chr3:72618810-72619017
  hypo

SEQ ID NO: 145832 - DNA, 99 bp, Homo sapiens
  chr3:72680452-72680551
  hypo
agtccctgtgacgtgcgaggccccgtgctggctactgggcatacaacggtgcccatgacagcccactcaacgcctacagtctaccgggaacgagagaca

SEQ ID NO: 145833 - DNA, 80 bp, Homo sapiens
  chr3:72703938-72704018
  hypo
gaccgtaaacactctcggacccatggcaaattcggcttggcccatccctaccacatattttgaagcgtatctcagagatc

SEQ ID NO: 145834 - DNA, 31 bp, Homo sapiens; identical to SEQ ID NO: 66242
  chr3:72739581-72739612
  hypo

SEQ ID NO: 145835 - DNA, 30 bp, Homo sapiens; identical to SEQ ID NO: 17691
  chr3:72769747-72769777
  hypo

SEQ ID NO: 145836 - DNA, 42 bp, Homo sapiens; identical to SEQ ID NO: 66244
  chr3:72773316-72773358
  hypo

SEQ ID NO: 145837 - DNA, 17 bp, Homo sapiens
  chr3:72773735-72773752
  hypo
tttttttttttgagacg

SEQ ID NO: 145838 - DNA, 242 bp, Homo sapiens
  chr3:72778072-72778314
  hypo
ctgttgttggattctcgctgctactgagagcccagatataaaatgttaatgtgcaaggaagccagccgaccaggtgacggtgacaaacctcacgtcccatctgttcttcccctccctccactccaggttgggcacgaaaaacaactccgtgattcctctttgctgagtaaactgatgcgtgaatgaacaaataaacctctgagagattccaatgccaggggaggccccgagcttttatcttg

SEQ ID NO: 145839 - DNA, 85 bp, Homo sapiens; identical to SEQ ID NO: 66246
  chr3:72795275-72795360
  hypo

SEQ ID NO: 145840 - DNA, 20 bp, Homo sapiens
  chr3:72797551-72797571
  hypo
tctcaaactgccgggcgtgg

SEQ ID NO: 145841 - DNA, 153 bp, Homo sapiens; identical to SEQ ID NO: 17692
  chr3:72877845-72877998
  hypo

SEQ ID NO: 145842 - DNA, 31 bp, Homo sapiens; identical to SEQ ID NO: 39401
  chr3:72896942-72896973
  hypo

SEQ ID NO: 145843 - DNA, 31 bp, Homo sapiens; identical to SEQ ID NO: 17693
  chr3:72913684-72913715
  hypo

SEQ ID NO: 145844 - DNA, 32 bp, Homo sapiens; identical to SEQ ID NO: 66250
  chr3:72964697-72964729
  hypo

SEQ ID NO: 145845 - DNA, 31 bp, Homo sapiens; identical to SEQ ID NO: 66251
  chr3:72998942-72998973
  hypo

SEQ ID NO: 145846 - DNA, 30 bp, Homo sapiens; identical to SEQ ID NO: 66252
  chr3:73044532-73044562
  hypo

SEQ ID NO: 145847 - DNA, 20 bp, Homo sapiens
  chr3:73045123-73045143
  hypo
attatttttttgaaacagtc

SEQ ID NO: 145848 - DNA, 259 bp, Homo sapiens; identical to SEQ ID NO: 39403
  chr3:73045502-73045761
  hypo

SEQ ID NO: 145849 - DNA, 30 bp, Homo sapiens
  chr3:73124229-73124259
  hypo
cgattggatcaaccgcgatgaccaactttg

SEQ ID NO: 145850 - DNA, 31 bp, Homo sapiens; identical to SEQ ID NO: 17696
  chr3:73232504-73232535
  hypo

SEQ ID NO: 145851 - DNA, 25 bp, Homo sapiens
  chr3:73342730-73342755
  hypo
gagcgagagtctgtctcaaacaaac

SEQ ID NO: 145852 - DNA, 22 bp, Homo sapiens
  chr3:73392026-73392048
  hypo
ttacaggcgtgagccaccgcgc

SEQ ID NO: 145853 - DNA, 819 bp, Homo sapiens; identical to SEQ ID NO: 66257
  chr3:73433223-73434042
  hypo

SEQ ID NO: 145854 - DNA, 392 bp, Homo sapiens; identical to SEQ ID NO: 39405
  chr3:73673261-73673653
  hypo

SEQ ID NO: 145855 - DNA, 31 bp, Homo sapiens
  chr3:74039864-74039895
  hypo
gtgcagccaagatggccgaataggaatagct

SEQ ID NO: 145856 - DNA, 655 bp, Homo sapiens; identical to SEQ ID NO: 108552
  chr3:74663365-74664020
  hypo

SEQ ID NO: 145857 - DNA, 82 bp, Homo sapiens; identical to SEQ ID NO: 108553
  chr3:74664045-74664127
  hypo

SEQ ID NO: 145858 - DNA, 30 bp, Homo sapiens; identical to SEQ ID NO: 2657
  chr3:75168992-75169022
  hypo

SEQ ID NO: 145859 - DNA, 26 bp, Homo sapiens
  chr3:75974125-75974151
  hypo
accgcgccggccgggaatttattttc

SEQ ID NO: 145860 - DNA, 30 bp, Homo sapiens; identical to SEQ ID NO: 108558
  chr3:76473866-76473896
  hypo

SEQ ID NO: 145861 - DNA, 30 bp, Homo sapiens; identical to SEQ ID NO: 108559
  chr3:76473962-76473992
  hypo

SEQ ID NO: 145862 - DNA, 30 bp, Homo sapiens; identical to SEQ ID NO: 39412
  chr3:77400955-77400985
  hypo

SEQ ID NO: 145863 - DNA, 93 bp, Homo sapiens
  chr3:77427992-77428085
  hypo
caattcgtgtttcttcggtaaagtcttccctggccatgctttccccaacccggcatgcgtaacaagtcaagattatcagtcactccttgatgt

SEQ ID NO: 145864 - DNA, 30 bp, Homo sapiens
  chr3:77980624-77980654
  hypo
cagaagaagggagtacgtgattacggccta

SEQ ID NO: 145865 - DNA, 30 bp, Homo sapiens
  chr3:79190619-79190649
  hypo
tcgaggaccagaaagcgcagtcgaggctta

SEQ ID NO: 145866 - DNA, 199 bp, Homo sapiens; identical to SEQ ID NO: 66263
  chr3:82247998-82248197
  hypo

SEQ ID NO: 145867 - DNA, 25 bp, Homo sapiens
  chr3:82344794-82344819
  hypo
aatttccttgcgtattcagtacccg

SEQ ID NO: 145868 - DNA, 31 bp, Homo sapiens; identical to SEQ ID NO: 17700
  chr3:82363227-82363258
  hypo

SEQ ID NO: 145869 - DNA, 30 bp, Homo sapiens
  chr3:83661139-83661169
  hypo
aacaaaattatgagccgttaattcactcag

SEQ ID NO: 145870 - DNA, 41 bp, Homo sapiens; identical to SEQ ID NO: 66265
  chr3:84175658-84175699
  hypo

SEQ ID NO: 145871 - DNA, 31 bp, Homo sapiens; identical to SEQ ID NO: 66266
  chr3:85471958-85471989
  hypo

SEQ ID NO: 145872 - DNA, 30 bp, Homo sapiens; identical to SEQ ID NO: 2663
  chr3:85617271-85617301
  hypo

SEQ ID NO: 145873 - DNA, 30 bp, Homo sapiens; identical to SEQ ID NO: 17702
  chr3:86061700-86061730
  hypo

SEQ ID NO: 145874 - DNA, 31 bp, Homo sapiens; identical to SEQ ID NO: 66269
  chr3:87005927-87005958
  hypo

SEQ ID NO: 145875 - DNA, 30 bp, Homo sapiens
  chr3:87038956-87038986
  hypo
agtaatgtccaagggcgcctcgtgccaaat

SEQ ID NO: 145876 - DNA, 45 bp, Homo sapiens
  chr3:87226517-87226562
  hypo
tgctttttattcagtgtgtttcacggaatagttttggaactattt

SEQ ID NO: 145877 - DNA, 92 bp, Homo sapiens
  chr3:87297459-87297551
  hypo
agagagagaacgtttcggtatacattttgtttctcagttaccttattctttttgagtgtctgatttttgagacagtctcgctctgttgccca

SEQ ID NO: 145878 - DNA, 30 bp, Homo sapiens
  chr3:87424824-87424854
  hypo
aaagtgcaggcactccgcgtggaactggcg

SEQ ID NO: 145879 - DNA, 43 bp, Homo sapiens; identical to SEQ ID NO: 66270
  chr3:87652051-87652094
  hypo

SEQ ID NO: 145880 - DNA, 37 bp, Homo sapiens; identical to SEQ ID NO: 17703
  chr3:87737839-87737876
  hypo

SEQ ID NO: 145881 - DNA, 21 bp, Homo sapiens
  chr3:88035987-88036008
  hypo
ctcacacctgtaatcccagca

SEQ ID NO: 145882 - DNA, 161 bp, Homo sapiens; identical to SEQ ID NO: 66272
  chr3:88098565-88098726
  hypo

SEQ ID NO: 145883 - DNA, 30 bp, Homo sapiens
  chr3:88112147-88112177
  hypo
tttaattagaaaagcggaatgctcctggtg

SEQ ID NO: 145884 - DNA, 30 bp, Homo sapiens; identical to SEQ ID NO: 66273
  chr3:88188011-88188041
  hypo

SEQ ID NO: 145885 - DNA, 23 bp, Homo sapiens
  chr3:88210213-88210236
  hypo
ttttttttttttgagacggagtc

SEQ ID NO: 145886 - DNA, 39 bp, Homo sapiens; identical to SEQ ID NO: 17705
  chr3:93697928-93697967
  hypo

SEQ ID NO: 145887 - DNA, 39 bp, Homo sapiens; identical to SEQ ID NO: 17706
  chr3:93698206-93698245
  hypo

SEQ ID NO: 145888 - DNA, 156 bp, Homo sapiens
  chr3:93707708-93707864
  hypo
gtttagctgacaagtgcgcagatctcctcttgggctcttgcttcgccaccccttcggctgaactgaccttcctcttgggcatcttggcggcaggaggggcacttgctgggcacctgtgggccacggagctgagagccttcgcgaagctgggctgcc

SEQ ID NO: 145889 - DNA, 79 bp, Homo sapiens; identical to SEQ ID NO: 66278
  chr3:93780313-93780392
  hypo

SEQ ID NO: 145890 - DNA, 30 bp, Homo sapiens; identical to SEQ ID NO: 66279
  chr3:93800934-93800964
  hypo

SEQ ID NO: 145891 - DNA, 30 bp, Homo sapiens; identical to SEQ ID NO: 66280
  chr3:93801348-93801378
  hypo

SEQ ID NO: 145892 - DNA, 85 bp, Homo sapiens; identical to SEQ ID NO: 66281
  chr3:94174883-94174968
  hypo

SEQ ID NO: 145893 - DNA, 113 bp, Homo sapiens; identical to SEQ ID NO: 66282
  chr3:94656924-94657037
  hypo

SEQ ID NO: 145894 - DNA, 30 bp, Homo sapiens; identical to SEQ ID NO: 66283
  chr3:96338459-96338489
  hypo

SEQ ID NO: 145895 - DNA, 109 bp, Homo sapiens
  chr3:96984569-96984678
  hypo
tggtggggttcccaccgctgccactgctgctcctgcagccactcctgccaccaccgcttgtgccttcctgttgcagccggcgcaatggcagcagcggctccagatggcc

SEQ ID NO: 145896 - DNA, 30 bp, Homo sapiens; identical to SEQ ID NO: 39432
  chr3:97115818-97115848
  hypo

SEQ ID NO: 145897 - DNA, 38 bp, Homo sapiens
  chr3:97473825-97473863
  hypo
cgtgagccaccgcgcccggccacaaagttttcttttaa

SEQ ID NO: 145898 - DNA, 275 bp, Homo sapiens
  chr3:97541091-97541366
  hypo
cttctcccggttcttcgctccccgaagtccttcccgggacaaggaagaggaagaggaggagaggccggggacgagcccgcctccagctccaggccggtccgctgccaggtgggagtcgaggagggggtcgcgggggggccctgcacatattcgcgggatgaaggctcccggcctgaccgccggcagcgggccgctcttgggccaggctgcagttcgctcgccactttctgttctccttcctccattgctaaagtttcctcctccttgccccgttc

SEQ ID NO: 145899 - DNA, 183 bp, Homo sapiens
  chr3:97541433-97541616
  hypo
cgcatatcccccgatccccgcctggctccgcgctcttcctttcccactttcccctgcccggacgtgattgggttcccgttccacacacgctctactctccaagttctgtggcaaaagcgatttccccggcgtcccgcctgcagtaatgggaaacacttgtgagccgagcggagccgtcggcca

SEQ ID NO: 145900 - DNA, 272 bp, Homo sapiens; identical to SEQ ID NO: 108593
  chr3:97690770-97691042
  hypo

SEQ ID NO: 145901 - DNA, 106 bp, Homo sapiens; identical to SEQ ID NO: 17710
  chr3:97744979-97745085
  hypo

SEQ ID NO: 145902 - DNA, 29 bp, Homo sapiens
  chr3:97804782-97804811
  hypo
gggcgcggtggctcacgcctgtaatccta

SEQ ID NO: 145903 - DNA, 19 bp, Homo sapiens
  chr3:98092392-98092411
  hypo
caggcgtgagccaccgcgc

SEQ ID NO: 145904 - DNA, 30 bp, Homo sapiens; identical to SEQ ID NO: 66287
  chr3:98235903-98235933
  hypo

SEQ ID NO: 145905 - DNA, 46 bp, Homo sapiens; identical to SEQ ID NO: 66288
  chr3:98290223-98290269
  hypo

SEQ ID NO: 145906 - DNA, 83 bp, Homo sapiens
  chr3:98304458-98304541
  hypo
ccccgccgttctccacgatgggctataaagaagtaatcatcacacctggaaaacacagcggcgccaaaccagggatcaaatgg

SEQ ID NO: 145907 - DNA, 31 bp, Homo sapiens; identical to SEQ ID NO: 66290
  chr3:98408813-98408844
  hypo

SEQ ID NO: 145908 - DNA, 29 bp, Homo sapiens
  chr3:98618381-98618410
  hypo
ccgcgcccggtagactggccttttctaaa

SEQ ID NO: 145909 - DNA, 1438 bp, Homo sapiens; identical to SEQ ID NO: 108602
  chr3:98619761-98621199
  hypo

SEQ ID NO: 145910 - DNA, 24 bp, Homo sapiens
  chr3:98696063-98696087
  hypo
cccggccagggggtcttacatccc

SEQ ID NO: 145911 - DNA, 20 bp, Homo sapiens
  chr3:99416113-99416133
  hypo
gccaccgcgcccggcacaaa

SEQ ID NO: 145912 - DNA, 19 bp, Homo sapiens
  chr3:99535086-99535105
  hypo
ttttttttttttttttgag

SEQ ID NO: 145913 - DNA, 19 bp, Homo sapiens
  chr3:99535344-99535363
  hypo
aaagcgttgggattacagg

SEQ ID NO: 145914 - DNA, 546 bp, Homo sapiens; identical to SEQ ID NO: 108606
  chr3:99594775-99595321
  hypo

SEQ ID NO: 145915 - DNA, 30 bp, Homo sapiens; identical to SEQ ID NO: 66295
  chr3:99598903-99598933
  hypo

SEQ ID NO: 145916 - DNA, 31 bp, Homo sapiens; identical to SEQ ID NO: 66296
  chr3:99622031-99622062
  hypo

SEQ ID NO: 145917 - DNA, 31 bp, Homo sapiens; identical to SEQ ID NO: 17714
  chr3:99694509-99694540
  hypo

SEQ ID NO: 145918 - DNA, 30 bp, Homo sapiens
  chr3:99720875-99720905
  hypo
aatctgctggtgatgcgtgtgtgactgttt

SEQ ID NO: 145919 - DNA, 117 bp, Homo sapiens; identical to SEQ ID NO: 66298
  chr3:99944287-99944404
  hypo

SEQ ID NO: 145920 - DNA, 23 bp, Homo sapiens
  chr3:99981290-99981313
  hypo
gggcgcggtggctcacgcctgta

SEQ ID NO: 145921 - DNA, 23 bp, Homo sapiens
  chr3:99981552-99981575
  hypo
gtgaggctcggtctcaaaaaaaa

SEQ ID NO: 145922 - DNA, 30 bp, Homo sapiens; identical to SEQ ID NO: 17716
  chr3:100270285-100270315
  hypo

SEQ ID NO: 145923 - DNA, 30 bp, Homo sapiens; identical to SEQ ID NO: 2679
  chr3:100306083-100306113
  hypo

SEQ ID NO: 145924 - DNA, 185 bp, Homo sapiens; identical to SEQ ID NO: 66301
  chr3:100329427-100329612
  hypo

SEQ ID NO: 145925 - DNA, 30 bp, Homo sapiens; identical to SEQ ID NO: 17718
  chr3:100535428-100535458
  hypo

SEQ ID NO: 145926 - DNA, 46 bp, Homo sapiens; identical to SEQ ID NO: 66303
  chr3:100796977-100797023
  hypo

SEQ ID NO: 145927 - DNA, 33 bp, Homo sapiens; identical to SEQ ID NO: 66304
  chr3:100989028-100989061
  hypo

SEQ ID NO: 145928 - DNA, 128 bp, Homo sapiens
  chr3:100998458-100998586
  hypo
tgaaagcacaacacagcaactcgaataggatgttgcaatgaggtagcagagaaaccggacttcacctggggtgagttaaattgtctccgacgtcaaatcaaatttacgctaattctctaactaagcaa

SEQ ID NO: 145929 - DNA, 189 bp, Homo sapiens; identical to SEQ ID NO: 66306
  chr3:101021601-101021790
  hypo

SEQ ID NO: 145930 - DNA, 29 bp, Homo sapiens
  chr3:101089837-101089866
  hypo
aaaaataaaacagtggccaagcgcggtgg

SEQ ID NO: 145931 - DNA, 30 bp, Homo sapiens; identical to SEQ ID NO: 66307
  chr3:101133120-101133150
  hypo

SEQ ID NO: 145932 - DNA, 150 bp, Homo sapiens; identical to SEQ ID NO: 17719
  chr3:101157527-101157677
  hypo

SEQ ID NO: 145933 - DNA, 90 bp, Homo sapiens; identical to SEQ ID NO: 17720
  chr3:101230980-101231070
  hypo

SEQ ID NO: 145934 - DNA, 982 bp, Homo sapiens; identical to SEQ ID NO: 108619
  chr3:101231398-101232380
  hypo

SEQ ID NO: 145935 - DNA, 82 bp, Homo sapiens; identical to SEQ ID NO: 66311
  chr3:101232950-101233032
  hypo

SEQ ID NO: 145936 - DNA, 30 bp, Homo sapiens
  chr3:101359443-101359473
  hypo
cattaggagacatgtcgggaaatgcttctt

SEQ ID NO: 145937 - DNA, 121 bp, Homo sapiens; identical to SEQ ID NO: 66312
  chr3:101393170-101393291
  hypo

SEQ ID NO: 145938 - DNA, 40 bp, Homo sapiens
  chr3:101397312-101397352
  hypo
tttaaatattttggccgggcgcggtgactcacgcctgtaa

SEQ ID NO: 145939 - DNA, 31 bp, Homo sapiens; identical to SEQ ID NO: 17722
  chr3:101406817-101406848
  hypo

SEQ ID NO: 145940 - DNA, 16 bp, Homo sapiens
  chr3:101420460-101420476
  hypo
cagagcgagactctgt

SEQ ID NO: 145941 - DNA, 38 bp, Homo sapiens
  chr3:101441001-101441039
  hypo
gggattacaggcgtgagccaccgcgcccggccttactt

SEQ ID NO: 145942 - DNA, 465 bp, Homo sapiens; identical to SEQ ID NO: 108628
  chr3:101497829-101498294
  hypo

SEQ ID NO: 145943 - DNA, 104 bp, Homo sapiens; identical to SEQ ID NO: 2686
  chr3:101498503-101498607
  hypo

SEQ ID NO: 145944 - DNA, 44 bp, Homo sapiens; identical to SEQ ID NO: 17726
  chr3:101575166-101575210
  hypo

SEQ ID NO: 145945 - DNA, 263 bp, Homo sapiens
  chr3:101588884-101589147
  hypo
gcccatcgctggtaccggttcatggcgctggagttggggaaccctgctgtagggaaagaaccccttagctctgcagcagccacgatttcagatggtacaacttgtttaaaataaatagacacactcacttcagagactggtcaagaaatagttgccgagagctcttggaaccaagatgagaacttacattacagtttcttctgcagcctaggatcacagatgacgggcaggggctttattagtttaaccggcatctatttctc

SEQ ID NO: 145946 - DNA, 29 bp, Homo sapiens
  chr3:102885888-102885917
  hypo
aaacccagtcaaaagctcaaacgccggca

SEQ ID NO: 145947 - DNA, 26 bp, Homo sapiens
  chr3:103645244-103645270
  hypo
acttcgtcaaaaaacaaacaaacaaa

SEQ ID NO: 145948 - DNA, 30 bp, Homo sapiens
  chr3:105084888-105084918
  hypo
gacattgggaaaatccgtatgacgaagtac

SEQ ID NO: 145949 - DNA, 474 bp, Homo sapiens; identical to SEQ ID NO: 108638
  chr3:105088087-105088561
  hypo

SEQ ID NO: 145950 - DNA, 30 bp, Homo sapiens
  chr3:105088693-105088723
  hypo
aaaatatatgaaccacgaaaactgaattca

SEQ ID NO: 145951 - DNA, 21 bp, Homo sapiens
  chr3:105174273-105174294
  hypo
cgacaccgtctcaaaaaaaaa

SEQ ID NO: 145952 - DNA, 197 bp, Homo sapiens
  chr3:105444397-105444594
  hypo
tcctttccttttctagtgcatcgctctagttcataatgttactataacgtgtttggacaactctcgcagcttctttattactcccaacgtgaaagggaagctccaacatttaatcactcatttacacaaaagacacaacgggtggttaaagacaaaagtgccaatttaaaacgttcgtaaaggcaagtattattttc

SEQ ID NO: 145953 - DNA, 29 bp, Homo sapiens
  chr3:106152317-106152346
  hypo
caggtgtgaaccaccgcgcccgtcaagaa

SEQ ID NO: 145954 - DNA, 174 bp, Homo sapiens; identical to SEQ ID NO: 66322
  chr3:106350365-106350539
  hypo

SEQ ID NO: 145955 - DNA, 218 bp, Homo sapiens
  chr3:106362773-106362991
  hypo
gagggtgcgctgggtcccccagcactgccggcccaccttcaccatgctcgaaatctccccgggcctcagctgctgcctcgcggggcaggactcgggacctgcagcccgccatgctggacaaccttccctctgccactgtgggcttgcgtgcggcctgagcctctctgacgggtgccaccccctgctcccccgcgcccgctcccatggaccatccaagg

SEQ ID NO: 145956 - DNA, 31 bp, Homo sapiens; identical to SEQ ID NO: 66323
  chr3:106554231-106554262
  hypo

SEQ ID NO: 145957 - DNA, 387 bp, Homo sapiens; identical to SEQ ID NO: 108648
  chr3:107244653-107245040
  hypo

SEQ ID NO: 145958 - DNA, 58 bp, Homo sapiens
  chr3:107505825-107505883
  hypo
gaatagatacttctccgaataagatatataacaaatacgtggccgataagtacaagaa

SEQ ID NO: 145959 - DNA, 92 bp, Homo sapiens; identical to SEQ ID NO: 66324
  chr3:107520014-107520106
  hypo

SEQ ID NO: 145960 - DNA, 106 bp, Homo sapiens; identical to SEQ ID NO: 17729
  chr3:107530307-107530413
  hypo

SEQ ID NO: 145961 - DNA, 44 bp, Homo sapiens
  chr3:107552851-107552895
  hypo
cccgatgttctccacgtgactcgactctgcgttccatccacgga

SEQ ID NO: 145962 - DNA, 31 bp, Homo sapiens; identical to SEQ ID NO: 66327
  chr3:107718612-107718643
  hypo

SEQ ID NO: 145963 - DNA, 30 bp, Homo sapiens; identical to SEQ ID NO: 66328
  chr3:107749983-107750013
  hypo

SEQ ID NO: 145964 - DNA, 85 bp, Homo sapiens; identical to SEQ ID NO: 66329
  chr3:107750327-107750412
  hypo

SEQ ID NO: 145965 - DNA, 87 bp, Homo sapiens; identical to SEQ ID NO: 66330
  chr3:107771804-107771891
  hypo

SEQ ID NO: 145966 - DNA, 56 bp, Homo sapiens
  chr3:107832936-107832992
  hypo
cgctggctctgttatcggcagggagcatccaggacaaggcgcggcctacgcggtgc

SEQ ID NO: 145967 - DNA, 30 bp, Homo sapiens
  chr3:107833339-107833369
  hypo
atgcaatcctcacaacgctgaggtgggtgc

SEQ ID NO: 145968 - DNA, 30 bp, Homo sapiens; identical to SEQ ID NO: 66331
  chr3:107836747-107836777
  hypo

SEQ ID NO: 145969 - DNA, 30 bp, Homo sapiens
  chr3:108613391-108613421
  hypo
cttagccaaattaatcgtgagtttaaggcc

SEQ ID NO: 145970 - DNA, 240 bp, Homo sapiens; identical to SEQ ID NO: 66332
  chr3:108836863-108837103
  hypo

SEQ ID NO: 145971 - DNA, 28 bp, Homo sapiens
  chr3:108918697-108918725
  hypo
cctatcttaaaagttgttctccggggga

SEQ ID NO: 145972 - DNA, 30 bp, Homo sapiens; identical to SEQ ID NO: 2692
  chr3:108976491-108976521
  hypo

SEQ ID NO: 145973 - DNA, 93 bp, Homo sapiens
  chr3:109035084-109035177
  hypo
cgccaccacgccccgctaatatttaaattttttgtagagaggagacctgggatggaaggagattgcggggacggagaggatgtgggtaggggg

SEQ ID NO: 145974 - DNA, 30 bp, Homo sapiens; identical to SEQ ID NO: 66335
  chr3:109035627-109035657
  hypo

SEQ ID NO: 145975 - DNA, 121 bp, Homo sapiens; identical to SEQ ID NO: 66336
  chr3:109035956-109036077
  hypo

SEQ ID NO: 145976 - DNA, 146 bp, Homo sapiens; identical to SEQ ID NO: 17733
  chr3:109061755-109061901
  hypo

SEQ ID NO: 145977 - DNA, 23 bp, Homo sapiens
  chr3:109128771-109128794
  hypo
taacgtctgatttcacggagtgc

SEQ ID NO: 145978 - DNA, 143 bp, Homo sapiens
  chr3:109128853-109128996
  hypo
tgtgagcggcttttgtacccagttgcttcctggctgctttacggtcgatttgcaggcagtccgctttgtacaagccatggtatagaggcttccttatttacctcccttatccttcagctggagctctgcgagccagaggcagc

SEQ ID NO: 145979 - DNA, 28 bp, Homo sapiens
  chr3:111281074-111281102
  hypo
cctccccgaataacaacttctttgaagt

SEQ ID NO: 145980 - DNA, 124 bp, Homo sapiens; identical to SEQ ID NO: 2694
  chr3:111393431-111393555
  hypo

SEQ ID NO: 145981 - DNA, 20 bp, Homo sapiens
  chr3:111469485-111469505
  hypo
aaatctaaaaataaaattcc

SEQ ID NO: 145982 - DNA, 30 bp, Homo sapiens; identical to SEQ ID NO: 66341
  chr3:112021542-112021572
  hypo

SEQ ID NO: 145983 - DNA, 30 bp, Homo sapiens; identical to SEQ ID NO: 66342
  chr3:112021858-112021888
  hypo

SEQ ID NO: 145984 - DNA, 17 bp, Homo sapiens
  chr3:112186070-112186087
  hypo
tgcgaggattatagacg

SEQ ID NO: 145985 - DNA, 22 bp, Homo sapiens
  chr3:112207083-112207105
  hypo
tttttttttgagacagagtctc

SEQ ID NO: 145986 - DNA, 121 bp, Homo sapiens; identical to SEQ ID NO: 66345
  chr3:112207344-112207465
  hypo

SEQ ID NO: 145987 - DNA, 42 bp, Homo sapiens; identical to SEQ ID NO: 66346
  chr3:112249241-112249283
  hypo

SEQ ID NO: 145988 - DNA, 155 bp, Homo sapiens
  chr3:112357812-112357967
  hypo
cctctttcttcttctcgctgcccaggcttggccttcctgctccccctccaccgtcattcccctccgccaccacctggccctctacaccagaggccttacatttctggacaaagcccttctgcctgatcttctcgatcctacggatggggccttgg

SEQ ID NO: 145989 - DNA, 21 bp, Homo sapiens
  chr3:112509306-112509327
  hypo
ccgcttccaagacggcggcaa

SEQ ID NO: 145990 - DNA, 21 bp, Homo sapiens
  chr3:112509506-112509527
  hypo
caatggcgagcgtttagcctg

SEQ ID NO: 145991 - DNA, 31 bp, Homo sapiens; identical to SEQ ID NO: 17739
  chr3:112539318-112539349
  hypo

SEQ ID NO: 145992 - DNA, 39 bp, Homo sapiens; identical to SEQ ID NO: 17740
  chr3:112543789-112543828
  hypo

SEQ ID NO: 145993 - DNA, 30 bp, Homo sapiens
  chr3:112843455-112843485
  hypo
gtgggcgcgtgggcgcgtgagcgcgcactc

SEQ ID NO: 145994 - DNA, 987 bp, Homo sapiens; identical to SEQ ID NO: 39490
  chr3:112930655-112931642
  hypo

SEQ ID NO: 145995 - DNA, 30 bp, Homo sapiens; identical to SEQ ID NO: 66350
  chr3:112998762-112998792
  hypo

SEQ ID NO: 145996 - DNA, 30 bp, Homo sapiens; identical to SEQ ID NO: 17742
  chr3:113005188-113005218
  hypo

SEQ ID NO: 145997 - DNA, 112 bp, Homo sapiens
  chr3:113159893-113160005
  hypo
tctttctggagatgaggaagccgaagtgcagagggcccagcgtgccaagcgtcgcacccagctgagcgcagggcaggtgtctcactggagcggggagccccagcaccttccc

SEQ ID NO: 145998 - DNA, 1191 bp, Homo sapiens; identical to SEQ ID NO: 108674
  chr3:113251173-113252364
  hypo

SEQ ID NO: 145999 - DNA, 30 bp, Homo sapiens
  chr3:113349293-113349323
  hypo
accgagccagctcctcggggcaaagaaaat

SEQ ID NO: 146000 - DNA, 30 bp, Homo sapiens; identical to SEQ ID NO: 66353
  chr3:113412708-113412738
  hypo

SEQ ID NO: 146001 - DNA, 24 bp, Homo sapiens
  chr3:113473364-113473388
  hypo
agcgacaccctgtctcaaaagtaa

SEQ ID NO: 146002 - DNA, 79 bp, Homo sapiens; identical to SEQ ID NO: 39495
  chr3:113557397-113557476
  hypo

SEQ ID NO: 146003 - DNA, 253 bp, Homo sapiens; identical to SEQ ID NO: 108682
  chr3:113557554-113557807
  hypo

SEQ ID NO: 146004 - DNA, 30 bp, Homo sapiens; identical to SEQ ID NO: 66356
  chr3:113599901-113599931
  hypo

SEQ ID NO: 146005 - DNA, 30 bp, Homo sapiens; identical to SEQ ID NO: 66357
  chr3:113822398-113822428
  hypo

SEQ ID NO: 146006 - DNA, 253 bp, Homo sapiens; identical to SEQ ID NO: 66358
  chr3:113957888-113958141
  hypo

SEQ ID NO: 146007 - DNA, 30 bp, Homo sapiens; identical to SEQ ID NO: 66359
  chr3:114069711-114069741
  hypo

SEQ ID NO: 146008 - DNA, 231 bp, Homo sapiens; identical to SEQ ID NO: 17746
  chr3:114070277-114070508
  hypo

SEQ ID NO: 146009 - DNA, 30 bp, Homo sapiens; identical to SEQ ID NO: 66361
  chr3:114649472-114649502
  hypo

SEQ ID NO: 146010 - DNA, 30 bp, Homo sapiens
  chr3:114827570-114827600
  hypo
attaccggagttcctcggagtgaccagtgg

SEQ ID NO: 146011 - DNA, 703 bp, Homo sapiens; identical to SEQ ID NO: 39500
  chr3:115377287-115377990
  hypo

SEQ ID NO: 146012 - DNA, 30 bp, Homo sapiens
  chr3:115447450-115447480
  hypo
aactcagcgctttcacgtatcatacctgat

SEQ ID NO: 146013 - DNA, 30 bp, Homo sapiens
  chr3:115502131-115502161
  hypo
tgcacggagcgggcacggtgactcacacct

SEQ ID NO: 146014 - DNA, 29 bp, Homo sapiens
  chr3:115502400-115502429
  hypo
caagagcgaaacgccgtctcaaaagaaaa

SEQ ID NO: 146015 - DNA, 30 bp, Homo sapiens; identical to SEQ ID NO: 2707
  chr3:115881799-115881829
  hypo

SEQ ID NO: 146016 - DNA, 30 bp, Homo sapiens
  chr3:117310504-117310534
  hypo
tcagaattgctagcccgtaccactacggaa

SEQ ID NO: 146017 - DNA, 26 bp, Homo sapiens
  chr3:118290927-118290953
  hypo
tgtttgtttgtttgtttgagacgaag

SEQ ID NO: 146018 - DNA, 212 bp, Homo sapiens; identical to SEQ ID NO: 66366
  chr3:118864572-118864784
  hypo

SEQ ID NO: 146019 - DNA, 39 bp, Homo sapiens; identical to SEQ ID NO: 17749
  chr3:119011021-119011060
  hypo

SEQ ID NO: 146020 - DNA, 149 bp, Homo sapiens
  chr3:119298220-119298369
  hypo
gcggcacactcagtacgctcttcaagcatctgggcacacccggtccactacagtcctacaaagtcggacgtgagcacgggcgaaggcgtcagccggggccacacgggagtcactgaccacagccaggcgagagccggctttccggtgcc

SEQ ID NO: 146021 - DNA, 97 bp, Homo sapiens; identical to SEQ ID NO: 66368
  chr3:119342486-119342583
  hypo

SEQ ID NO: 146022 - DNA, 45 bp, Homo sapiens; identical to SEQ ID NO: 66369
  chr3:119432909-119432954
  hypo

SEQ ID NO: 146023 - DNA, 43 bp, Homo sapiens; identical to SEQ ID NO: 17750
  chr3:119517357-119517400
  hypo

SEQ ID NO: 146024 - DNA, 159 bp, Homo sapiens
  chr3:119535939-119536098
  hypo
atgctcaccgagctccgcagcatcaatgctcagcacacccagcggctgctgcgcatccaggacatacacccctttgctacgcccctcatgcaggagttgttcggcatcacaggtagctgagcggctgcccttgggtgacacctccgagaggcagccaga

SEQ ID NO: 146025 - DNA, 31 bp, Homo sapiens; identical to SEQ ID NO: 17751
  chr3:119687780-119687811
  hypo

SEQ ID NO: 146026 - DNA, 30 bp, Homo sapiens
  chr3:119692237-119692267
  hypo
tatatactacctgcccgttagtcatcggca

SEQ ID NO: 146027 - DNA, 21 bp, Homo sapiens
  chr3:119755627-119755648
  hypo
agactccgactcaaaaaaaaa

SEQ ID NO: 146028 - DNA, 32 bp, Homo sapiens; identical to SEQ ID NO: 66373
  chr3:119827278-119827310
  hypo

SEQ ID NO: 146029 - DNA, 30 bp, Homo sapiens; identical to SEQ ID NO: 66374
  chr3:119885172-119885202
  hypo

SEQ ID NO: 146030 - DNA, 30 bp, Homo sapiens
  chr3:119901609-119901639
  hypo
gttgatgactcagaacgtgaagatgccatg

SEQ ID NO: 146031 - DNA, 30 bp, Homo sapiens
  chr3:119914568-119914598
  hypo
accggtgtgagccaccgcgcttggcctctc

SEQ ID NO: 146032 - DNA, 142 bp, Homo sapiens
  chr3:120023462-120023604
  hypo
ggctctgcctgttgacgctgcctgaaggcgatttgcgtaggaggcctacctaggcttgggttcagaaaggagcccatttgtctgaaataagttggggaggggaatctggtaatattttatttctattcgagctgttgattag

SEQ ID NO: 146033 - DNA, 30 bp, Homo sapiens
  chr3:120026144-120026174
  hypo
gcgagatgtgcgtgcgcatgctcctgtact

SEQ ID NO: 146034 - DNA, 30 bp, Homo sapiens; identical to SEQ ID NO: 66375
  chr3:120026677-120026707
  hypo

SEQ ID NO: 146035 - DNA, 159 bp, Homo sapiens; identical to SEQ ID NO: 66376
  chr3:120064576-120064735
  hypo

SEQ ID NO: 146036 - DNA, 31 bp, Homo sapiens; identical to SEQ ID NO: 2716
  chr3:120068919-120068950
  hypo

SEQ ID NO: 146037 - DNA, 42 bp, Homo sapiens; identical to SEQ ID NO: 66378
  chr3:120150380-120150422
  hypo

SEQ ID NO: 146038 - DNA, 102 bp, Homo sapiens; identical to SEQ ID NO: 66379
  chr3:120150481-120150583
  hypo

SEQ ID NO: 146039 - DNA, 30 bp, Homo sapiens; identical to SEQ ID NO: 66380
  chr3:120174413-120174443
  hypo

SEQ ID NO: 146040 - DNA, 39 bp, Homo sapiens; identical to SEQ ID NO: 66381
  chr3:120313289-120313328
  hypo

SEQ ID NO: 146041 - DNA, 1311 bp, Homo sapiens; identical to SEQ ID NO: 108724
  chr3:120626722-120628033
  hypo

SEQ ID NO: 146042 - DNA, 37 bp, Homo sapiens; identical to SEQ ID NO: 66383
  chr3:121215301-121215338
  hypo

SEQ ID NO: 146043 - DNA, 30 bp, Homo sapiens; identical to SEQ ID NO: 17757
  chr3:121215804-121215834
  hypo

SEQ ID NO: 146044 - DNA, 40 bp, Homo sapiens
  chr3:121265947-121265987
  hypo
agagatctcgccggccgtggtggctcacgcctgtaatccc

SEQ ID NO: 146045 - DNA, 41 bp, Homo sapiens
  chr3:121280184-121280225
  hypo
cccagggttggccgggcgtggtggctcacgcctgtaatccc

SEQ ID NO: 146046 - DNA, 30 bp, Homo sapiens; identical to SEQ ID NO: 66386
  chr3:121348594-121348624
  hypo

SEQ ID NO: 146047 - DNA, 213 bp, Homo sapiens; identical to SEQ ID NO: 17758
  chr3:121438458-121438671
  hypo

SEQ ID NO: 146048 - DNA, 95 bp, Homo sapiens; identical to SEQ ID NO: 17759
  chr3:121500623-121500718
  hypo

SEQ ID NO: 146049 - DNA, 21 bp, Homo sapiens
  chr3:121511496-121511517
  hypo
agactccgtctcaaaaaaaaa

SEQ ID NO: 146050 - DNA, 102 bp, Homo sapiens; identical to SEQ ID NO: 66390
  chr3:121563923-121564025
  hypo

SEQ ID NO: 146051 - DNA, 27 bp, Homo sapiens
  chr3:121612931-121612958
  hypo
taggattatatgcgtgaaccaccgcgc

SEQ ID NO: 146052 - DNA, 30 bp, Homo sapiens; identical to SEQ ID NO: 2722
  chr3:121634394-121634424
  hypo

SEQ ID NO: 146053 - DNA, 361 bp, Homo sapiens; identical to SEQ ID NO: 66392
  chr3:121637755-121638116
  hypo

SEQ ID NO: 146054 - DNA, 34 bp, Homo sapiens; identical to SEQ ID NO: 66393
  chr3:121638471-121638505
  hypo

SEQ ID NO: 146055 - DNA, 27 bp, Homo sapiens
  chr3:121657605-121657632
  hypo
gctgttcctattcggccatcttggctc

SEQ ID NO: 146056 - DNA, 30 bp, Homo sapiens; identical to SEQ ID NO: 66395
  chr3:121712094-121712124
  hypo

SEQ ID NO: 146057 - DNA, 241 bp, Homo sapiens; identical to SEQ ID NO: 17764
  chr3:122003335-122003576
  hypo

SEQ ID NO: 146058 - DNA, 30 bp, Homo sapiens
  chr3:122137600-122137630
  hypo
cttgggaggatcagcgacatttcggtgcag

SEQ ID NO: 146059 - DNA, 29 bp, Homo sapiens
  chr3:122140551-122140580
  hypo
ccgcacccggccactagcttttctaagac

SEQ ID NO: 146060 - DNA, 77 bp, Homo sapiens; identical to SEQ ID NO: 17765
  chr3:122231235-122231312
  hypo

SEQ ID NO: 146061 - DNA, 33 bp, Homo sapiens
  chr3:122234241-122234274
  hypo
aaaaataattaagggccgggcgcggtggctcac

SEQ ID NO: 146062 - DNA, 17 bp, Homo sapiens
  chr3:122279519-122279536
  hypo
accgcgcctggtcgaaa

SEQ ID NO: 146063 - DNA, 232 bp, Homo sapiens; identical to SEQ ID NO: 108745
  chr3:122296548-122296780
  hypo

SEQ ID NO: 146064 - DNA, 58 bp, Homo sapiens
  chr3:122355299-122355357
  hypo
gacatcgaatggtggcgggttaaactgtactgcttaagtggagcggctaccgttatgc

SEQ ID NO: 146065 - DNA, 181 bp, Homo sapiens; identical to SEQ ID NO: 17766
  chr3:122451546-122451727
  hypo

SEQ ID NO: 146066 - DNA, 637 bp, Homo sapiens; identical to SEQ ID NO: 108751
  chr3:122513918-122514555
  hypo

SEQ ID NO: 146067 - DNA, 92 bp, Homo sapiens; identical to SEQ ID NO: 66404
  chr3:122573578-122573670
  hypo

SEQ ID NO: 146068 - DNA, 32 bp, Homo sapiens; identical to SEQ ID NO: 66405
  chr3:122573969-122574001
  hypo

SEQ ID NO: 146069 - DNA, 30 bp, Homo sapiens; identical to SEQ ID NO: 17769
  chr3:122604764-122604794
  hypo

SEQ ID NO: 146070 - DNA, 30 bp, Homo sapiens; identical to SEQ ID NO: 66407
  chr3:122612195-122612225
  hypo

SEQ ID NO: 146071 - DNA, 30 bp, Homo sapiens; identical to SEQ ID NO: 17770
  chr3:122629778-122629808
  hypo

SEQ ID NO: 146072 - DNA, 30 bp, Homo sapiens; identical to SEQ ID NO: 66409
  chr3:122645374-122645404
  hypo

SEQ ID NO: 146073 - DNA, 24 bp, Homo sapiens
  chr3:122695608-122695632
  hypo
ctccggggccaggcgcggtggctc

SEQ ID NO: 146074 - DNA, 23 bp, Homo sapiens
  chr3:122702415-122702438
  hypo
ggtgatgatgtaaagagctggcg

SEQ ID NO: 146075 - DNA, 22 bp, Homo sapiens
  chr3:122702557-122702579
  hypo
cgtctcaaaaaaaaaaaaaaaa

SEQ ID NO: 146076 - DNA, 30 bp, Homo sapiens; identical to SEQ ID NO: 39541
  chr3:122705777-122705807
  hypo

SEQ ID NO: 146077 - DNA, 31 bp, Homo sapiens; identical to SEQ ID NO: 66411
  chr3:122762423-122762454
  hypo

SEQ ID NO: 146078 - DNA, 164 bp, Homo sapiens; identical to SEQ ID NO: 108756
  chr3:122785819-122785983
  hypo

SEQ ID NO: 146079 - DNA, 30 bp, Homo sapiens
  chr3:122818398-122818428
  hypo
ctgcagtgagggctcgtggggcgcttgctc

SEQ ID NO: 146080 - DNA, 30 bp, Homo sapiens; identical to SEQ ID NO: 66413
  chr3:122840239-122840269
  hypo

SEQ ID NO: 146081 - DNA, 31 bp, Homo sapiens; identical to SEQ ID NO: 66414
  chr3:122844185-122844216
  hypo

SEQ ID NO: 146082 - DNA, 349 bp, Homo sapiens
  chr3:123049662-123050011
  hypo
ggcaggtcagtcagtcgctcgggctgtggacagtcccagggagggagacggtacccggggggtggacacttacgagatggcctcgatcatgtccatgcccatctccacacagcagtgggcgtggtcagcccttgcttcaggcagccccgagacgcagtaataacaatccccaaggatcttaatacgtaaacagtgattctcctggaaagcaaattaattttacaaattaaaaatagtaggaaagagaagtgggagggaaagaaacgagaagcaaaaagattcaccccgtgcctggaataacttgccttttagggcagtgagcgcaggcccacgccggaactcggcatgg

SEQ ID NO: 146083 - DNA, 31 bp, Homo sapiens; identical to SEQ ID NO: 66415
  chr3:123061284-123061315
  hypo

SEQ ID NO: 146084 - DNA, 31 bp, Homo sapiens; identical to SEQ ID NO: 17772
  chr3:123064299-123064330
  hypo

SEQ ID NO: 146085 - DNA, 30 bp, Homo sapiens
  chr3:123092588-123092618
  hypo
aggccagaagcatcacgccccccccccccc

SEQ ID NO: 146086 - DNA, 31 bp, Homo sapiens; identical to SEQ ID NO: 66417
  chr3:123161050-123161081
  hypo

SEQ ID NO: 146087 - DNA, 456 bp, Homo sapiens
  chr3:123166197-123166653
  hypo
ggagtccagctgaggcctgcccgccccgcaatccagtcccggtggccaggtcggcccctacctgcttcagcaggaactggtcctgggcgttggtgcgcagggcgatggccaggtggagggcggacaggagcaccccgctgagcactgcggcccgcatgcgcacgggcagcagcgtgtagatggtgtagatgaagaacacggtccaccagatgccctcagaggcgctgcgtggctgcggcagcagcaggcccaccacctggacggccagcaccacggcgatgagcgcatagcaggccaggcccatgtggtcctggtggaaggcggcgcggttgcaaagcacagccatgatgaggatcacgccgacggcggccgccagcacggccaggtagggcagctggagcgggggccgcgccgcgtggaaggccaacatgaccaggcacacgagcaccagcacgg

SEQ ID NO: 146088 - DNA, 1267 bp, Homo sapiens; identical to SEQ ID NO: 108760
  chr3:123167300-123168567
  hypo

SEQ ID NO: 146089 - DNA, 30 bp, Homo sapiens; identical to SEQ ID NO: 39547
  chr3:123170279-123170309
  hypo

SEQ ID NO: 146090 - DNA, 43 bp, Homo sapiens; identical to SEQ ID NO: 66421
  chr3:123200211-123200254
  hypo

SEQ ID NO: 146091 - DNA, 30 bp, Homo sapiens
  chr3:123201102-123201132
  hypo
tcctccaagcttattcgcggcagtattcac

SEQ ID NO: 146092 - DNA, 30 bp, Homo sapiens; identical to SEQ ID NO: 17775
  chr3:123339402-123339432
  hypo

SEQ ID NO: 146093 - DNA, 82 bp, Homo sapiens
  chr3:123340747-123340829
  hypo
aacaacttaactgtgcgcagaaccaccgtgtggccctgcggagaatgcctctgcaggctcaggccacgtggcaacctttcat

SEQ ID NO: 146094 - DNA, 31 bp, Homo sapiens; identical to SEQ ID NO: 66424
  chr3:123356920-123356951
  hypo

SEQ ID NO: 146095 - DNA, 182 bp, Homo sapiens
  chr3:123456129-123456311
  hypo
atacacacacaggtgcgcagtgaacaagcagctcctctaggagggtgcggcaccaggcagggatcgttctgcactagccgtccactggtcgataccttggatggaaagttcagctgacatcgaggccttccccgacccgttcaccaccaggcacgtgtacactcccacgtcatcttggttga

SEQ ID NO: 146096 - DNA, 21 bp, Homo sapiens
  chr3:123498992-123499013
  hypo
ttttatggttgggcgcggtgg

SEQ ID NO: 146097 - DNA, 31 bp, Homo sapiens; identical to SEQ ID NO: 66426
  chr3:123528975-123529006
  hypo

SEQ ID NO: 146098 - DNA, 44 bp, Homo sapiens; identical to SEQ ID NO: 17777
  chr3:123667349-123667393
  hypo

SEQ ID NO: 146099 - DNA, 1610 bp, Homo sapiens; identical to SEQ ID NO: 108767
  chr3:123751654-123753264
  hypo

SEQ ID NO: 146100 - DNA, 254 bp, Homo sapiens; identical to SEQ ID NO: 66429
  chr3:123813449-123813703
  hypo

SEQ ID NO: 146101 - DNA, 346 bp, Homo sapiens
  chr3:124103486-124103832
  hypo
atgaggcacctagctggtgcccgcctgcaggctgctcgcttgctgagaggcggcgtgccagctccgcgcaccgcgcctcagtgccagatcagggagctgtcagctcagcgcccacgcccctccgcttcagctccggggagccccagggtgggctgctggaaggcgcgactgcaacttgactttgcctcactgttgttgctggcagaatacgtacaccaatgcggacaagctcctagaagcagcagagcagttggctcagacgggggaatgtgaccccgaggagatctacaaggcagctcgacacctggaggtgcgcatccaagacttcgtgcgcagggtggagcag

SEQ ID NO: 146102 - DNA, 95 bp, Homo sapiens; identical to SEQ ID NO: 66431
  chr3:124126551-124126646
  hypo

SEQ ID NO: 146103 - DNA, 209 bp, Homo sapiens; identical to SEQ ID NO: 17780
  chr3:124281714-124281923
  hypo

SEQ ID NO: 146104 - DNA, 31 bp, Homo sapiens; identical to SEQ ID NO: 66433
  chr3:124331583-124331614
  hypo

SEQ ID NO: 146105 - DNA, 31 bp, Homo sapiens; identical to SEQ ID NO: 66434
  chr3:124377424-124377455
  hypo

SEQ ID NO: 146106 - DNA, 96 bp, Homo sapiens; identical to SEQ ID NO: 66435
  chr3:124436153-124436249
  hypo

SEQ ID NO: 146107 - DNA, 29 bp, Homo sapiens
  chr3:124440790-124440819
  hypo
gcaaaattctgtctcgaaaaaaaaggaaa

SEQ ID NO: 146108 - DNA, 85 bp, Homo sapiens; identical to SEQ ID NO: 66437
  chr3:124465923-124466008
  hypo

SEQ ID NO: 146109 - DNA, 204 bp, Homo sapiens
  chr3:124466067-124466271
  hypo
ggaggttctcactgtgactcagtgtgtgcccgacagcagagcccacaccactccagttgcagtggttgccatctgggtcatcagacctggctgtcaggggtgcagccacaggagagccaacagcagagggtgctggccgctgagctagctgctaatgctggcctgggtgcagttctcatccaaagtacccggtgggtgggagtc

SEQ ID NO: 146110 - DNA, 402 bp, Homo sapiens; identical to SEQ ID NO: 66439
  chr3:124515255-124515657
  hypo

SEQ ID NO: 146111 - DNA, 31 bp, Homo sapiens; identical to SEQ ID NO: 66440
  chr3:124516871-124516902
  hypo

SEQ ID NO: 146112 - DNA, 194 bp, Homo sapiens; identical to SEQ ID NO: 66441
  chr3:124518662-124518856
  hypo

SEQ ID NO: 146113 - DNA, 524 bp, Homo sapiens; identical to SEQ ID NO: 39555
  chr3:124605379-124605903
  hypo

SEQ ID NO: 146114 - DNA, 30 bp, Homo sapiens; identical to SEQ ID NO: 17783
  chr3:124609499-124609529
  hypo

SEQ ID NO: 146115 - DNA, 30 bp, Homo sapiens
  chr3:124621044-124621074
  hypo
gcagtgtgacatgtgcgttttctcgtcctg

SEQ ID NO: 146116 - DNA, 464 bp, Homo sapiens
  chr3:124716557-124717021
  hypo
gaactgaaagtatcccgacttgcactggcacagggcaacgccgtccaggtcagtgcagatggaggtgtctttgtcacattcgggactcttccgcttgcacaagctgcccgctggaatggaaaaacaagacagtgaaacaaaacaaaaccttctccacttcaaaccttaaaatctcctccacttcaaagctcatgtgtctgcatgaactctctatttcaagaggctgagaacagttttccgaaaagtctccacagagcaacactcctctcaggagtccatctgtactgccttctgccactccttctctgatcagccgcaggctgtgcaccagtgttccccgttgaaaacaccctcacagcgtgccacggacccactgagaaacgaaattggaataaacaggccctgttcactcctctggtgctcactgcaaatacagcccttaatggccccgtgtcttccaaagg

SEQ ID NO: 146117 - DNA, 617 bp, Homo sapiens; identical to SEQ ID NO: 2736
  chr3:124773768-124774385
  hypo

SEQ ID NO: 146118 - DNA, 22 bp, Homo sapiens
  chr3:124792862-124792884
  hypo
ccagccaggtgcaatgactcac

SEQ ID NO: 146119 - DNA, 31 bp, Homo sapiens; identical to SEQ ID NO: 66445
  chr3:124884655-124884686
  hypo

SEQ ID NO: 146120 - DNA, 186 bp, Homo sapiens; identical to SEQ ID NO: 66446
  chr3:124885657-124885843
  hypo

SEQ ID NO: 146121 - DNA, 40 bp, Homo sapiens; identical to SEQ ID NO: 17786
  chr3:125026373-125026413
  hypo

SEQ ID NO: 146122 - DNA, 27 bp, Homo sapiens
  chr3:125041099-125041126
  hypo
gacttcgtgatccaccagcctcagcct

SEQ ID NO: 146123 - DNA, 21 bp, Homo sapiens
  chr3:125042500-125042521
  hypo
ggccttataaagaacaattgc

SEQ ID NO: 146124 - DNA, 30 bp, Homo sapiens; identical to SEQ ID NO: 66450
  chr3:125050009-125050039
  hypo

SEQ ID NO: 146125 - DNA, 111 bp, Homo sapiens
  chr3:125078700-125078811
  hypo
acagacccaagtgggcggcagcccacccgccaccatgcagctccacgccgctgctccaccagctgctaagtgcaccgccagcacaggcccgcccatgcagctggcacaact

SEQ ID NO: 146126 - DNA, 40 bp, Homo sapiens
  chr3:125210664-125210704
  hypo
gccataagccgggcacggtggcttatgcctgtaatcccag

SEQ ID NO: 146127 - DNA, 150 bp, Homo sapiens; identical to SEQ ID NO: 66452
  chr3:125261067-125261217
  hypo

SEQ ID NO: 146128 - DNA, 32 bp, Homo sapiens
  chr3:125321255-125321287
  hypo
cttaaaaaaagaaaacgagaccgggcgttgcg

SEQ ID NO: 146129 - DNA, 44 bp, Homo sapiens
  chr3:125411623-125411667
  hypo
caggactgtttttacccccagcggcattgggtgtagtatcatcc

SEQ ID NO: 146130 - DNA, 33 bp, Homo sapiens; identical to SEQ ID NO: 66453
  chr3:125412959-125412992
  hypo

SEQ ID NO: 146131 - DNA, 29 bp, Homo sapiens
  chr3:125413626-125413655
  hypo
cagtgcttgcctccgcgagacaagcatat

SEQ ID NO: 146132 - DNA, 121 bp, Homo sapiens
  chr3:125477670-125477791
  hypo
aagcccctcactgcccgggctggccaggctggcctgcagatcctagtgcggggctgccaagcccacgcccacccggaactccagccggcagacaagtagcgcgcatagccccggttccggc

SEQ ID NO: 146133 - DNA, 31 bp, Homo sapiens; identical to SEQ ID NO: 2737
  chr3:125635404-125635435
  hypo

SEQ ID NO: 146134 - DNA, 31 bp, Homo sapiens; identical to SEQ ID NO: 66455
  chr3:125652362-125652393
  hypo

SEQ ID NO: 146135 - DNA, 30 bp, Homo sapiens; identical to SEQ ID NO: 66456
  chr3:125677975-125678005
  hypo

SEQ ID NO: 146136 - DNA, 43 bp, Homo sapiens; identical to SEQ ID NO: 66457
  chr3:125678378-125678421
  hypo

SEQ ID NO: 146137 - DNA, 31 bp, Homo sapiens; identical to SEQ ID NO: 17792
  chr3:125679194-125679225
  hypo

SEQ ID NO: 146138 - DNA, 171 bp, Homo sapiens; identical to SEQ ID NO: 66459
  chr3:125679707-125679878
  hypo

SEQ ID NO: 146139 - DNA, 187 bp, Homo sapiens; identical to SEQ ID NO: 66460
  chr3:125774552-125774739
  hypo

SEQ ID NO: 146140 - DNA, 35 bp, Homo sapiens; identical to SEQ ID NO: 66461
  chr3:125793293-125793328
  hypo

SEQ ID NO: 146141 - DNA, 94 bp, Homo sapiens; identical to SEQ ID NO: 66462
  chr3:125793387-125793481
  hypo

SEQ ID NO: 146142 - DNA, 115 bp, Homo sapiens
  chr3:125826119-125826234
  hypo
gggagacacggtgcccgatggtccagcctctccgtcagcagggcctgggccacaccagccacctgcggatgacccgacataagcaccgggtcacggcacccgtgtgatgggtgtc

SEQ ID NO: 146143 - DNA, 31 bp, Homo sapiens; identical to SEQ ID NO: 17793
  chr3:125828922-125828953
  hypo

SEQ ID NO: 146144 - DNA, 31 bp, Homo sapiens; identical to SEQ ID NO: 17794
  chr3:125846598-125846629
  hypo

SEQ ID NO: 146145 - DNA, 56 bp, Homo sapiens
  chr3:125875511-125875567
  hypo
ctgagccgccctgccgctcaggccatgtgaccacaggtcacggccttcccagcagg

SEQ ID NO: 146146 - DNA, 30 bp, Homo sapiens
  chr3:125876154-125876184
  hypo
gggcagggcgcggccggctccaggtcctca

SEQ ID NO: 146147 - DNA, 190 bp, Homo sapiens; identical to SEQ ID NO: 66466
  chr3:125977271-125977461
  hypo

SEQ ID NO: 146148 - DNA, 1421 bp, Homo sapiens; identical to SEQ ID NO: 108788
  chr3:126074821-126076242
  hypo

SEQ ID NO: 146149 - DNA, 253 bp, Homo sapiens
  chr3:126090322-126090575
  hypo
gagctgtggaagctgcgaggagggcctgggtcgcaacaagcaggacacgccccacagtgagcaatcacctggctcaacctgcgggtgtcttccggcaatgcaagcatcacaccgtcatgctcgccggctcctgcggtggtgtgagccctgggtgcacagcttcttgctccattccatgcacctctgccctccttctatgaagcgagggtgcagccatgcagctaaccatcctgacccacggagtggctgcaac

SEQ ID NO: 146150 - DNA, 37 bp, Homo sapiens; identical to SEQ ID NO: 66469
  chr3:126137172-126137209
  hypo

SEQ ID NO: 146151 - DNA, 175 bp, Homo sapiens
  chr3:126157597-126157772
  hypo
tctccgcacttctcacgcggtgagcactctcccaggtattaggtgtccgtccgcctgtgccctcacagctgaccaggatgtggcccagggctatggaggccccatctagcctgtctcctcctgctacaagaagtgttcctgctgttgcaccatttgactccgggctacggtgatt

SEQ ID NO: 146152 - DNA, 30 bp, Homo sapiens
  chr3:126189741-126189771
  hypo
cacaggacactcgaacggctttgtgcctag

SEQ ID NO: 146153 - DNA, 319 bp, Homo sapiens; identical to SEQ ID NO: 39573
  chr3:126195082-126195401
  hypo

SEQ ID NO: 146154 - DNA, 39 bp, Homo sapiens
  chr3:126195712-126195751
  hypo
tcatcggtctccctccgctccactcgctcccatccacgg

SEQ ID NO: 146155 - DNA, 31 bp, Homo sapiens; identical to SEQ ID NO: 66471
  chr3:126202246-126202277
  hypo

SEQ ID NO: 146156 - DNA, 88 bp, Homo sapiens; identical to SEQ ID NO: 66472
  chr3:126218193-126218281
  hypo

SEQ ID NO: 146157 - DNA, 31 bp, Homo sapiens; identical to SEQ ID NO: 17796
  chr3:126220860-126220891
  hypo

SEQ ID NO: 146158 - DNA, 273 bp, Homo sapiens
  chr3:126253862-126254135
  hypo
cagccaggagacacacagcatcgctgtcctcagccgggagacagacagacagcatccctgtccccagccgggagacagatagacagcatcactgtcctcagctggagacagacagacagcatccctgtccccagccgggagacagacagcatccctgtccccagccgggagacagacagacagcatcgctgtccccagccggtagacagacagcatccctgtcctcagctgggagacagacagacagcatcactgtcctcagctggagaaaga

SEQ ID NO: 146159 - DNA, 153 bp, Homo sapiens; identical to SEQ ID NO: 17797
  chr3:126254314-126254467
  hypo

SEQ ID NO: 146160 - DNA, 31 bp, Homo sapiens; identical to SEQ ID NO: 17798
  chr3:126258809-126258840
  hypo

SEQ ID NO: 146161 - DNA, 178 bp, Homo sapiens
  chr3:126261822-126262000
  hypo
tgtcctccccacctcgcccaccctggcaaggacagctgcggccaaggacgaaagccctcccttggctggcctcacgatggggccgtcccgggagccaggtgggagctgccttccactgccatcgggtctcctctcctctcccacgcggctggccctacccaggcgccaccttcggtct

SEQ ID NO: 146162 - DNA, 159 bp, Homo sapiens
  chr3:126274127-126274286
  hypo
gctgtgccgaagccccgtgtttatgacactgaggaggcatcacctgcccattcagaggagagatgagcagtctttgggggccatcaccctttgaggccaggacggtacagtcgcaggagacctgacacggtgcaggctagaccccgctccagcatggaa

SEQ ID NO: 146163 - DNA, 30 bp, Homo sapiens; identical to SEQ ID NO: 66478
  chr3:126374822-126374852
  hypo

SEQ ID NO: 146164 - DNA, 267 bp, Homo sapiens
  chr3:126439994-126440261
  hypo
acctcccacgcaggccgtggtgatgtttccttgctcacaaactttcagcgtctcctcgggatggttggacctctccctttgcctgacttccaagcttccttctgtgctggcttcatccaagtccttccaccccacgccttccaaagtgaacctatggcggcaggcgcacggtctcttcctgtctgtgcctcttccccggtgccctgccctaggctatgaagcttctgccttctgcagacatcgctgccgtcccgcccatgggatgga

SEQ ID NO: 146165 - DNA, 30 bp, Homo sapiens; identical to SEQ ID NO: 66479
  chr3:126452008-126452038
  hypo

SEQ ID NO: 146166 - DNA, 54 bp, Homo sapiens; identical to SEQ ID NO: 66480
  chr3:126465314-126465368
  hypo

SEQ ID NO: 146167 - DNA, 30 bp, Homo sapiens; identical to SEQ ID NO: 17800
  chr3:126465979-126466009
  hypo

SEQ ID NO: 146168 - DNA, 229 bp, Homo sapiens; identical to SEQ ID NO: 66482
  chr3:126472158-126472387
  hypo

SEQ ID NO: 146169 - DNA, 84 bp, Homo sapiens; identical to SEQ ID NO: 66483
  chr3:126501194-126501278
  hypo

SEQ ID NO: 146170 - DNA, 65 bp, Homo sapiens
  chr3:126516695-126516760
  hypo
ggtgtggtgtgtctgcgtgaaaaggaagaagaagagtaacagggcgcctccgtgccagtgtctgg

SEQ ID NO: 146171 - DNA, 423 bp, Homo sapiens; identical to SEQ ID NO: 66484
  chr3:126577517-126577940
  hypo

SEQ ID NO: 146172 - DNA, 30 bp, Homo sapiens
  chr3:126633349-126633379
  hypo
gtagcagcagccatgcgtggtggagctgga

SEQ ID NO: 146173 - DNA, 165 bp, Homo sapiens; identical to SEQ ID NO: 66485
  chr3:126676241-126676406
  hypo

SEQ ID NO: 146174 - DNA, 118 bp, Homo sapiens; identical to SEQ ID NO: 66486
  chr3:126707398-126707516
  hypo

SEQ ID NO: 146175 - DNA, 30 bp, Homo sapiens; identical to SEQ ID NO: 66487
  chr3:126707739-126707769
  hypo

SEQ ID NO: 146176 - DNA, 30 bp, Homo sapiens; identical to SEQ ID NO: 66488
  chr3:126711245-126711275
  hypo

SEQ ID NO: 146177 - DNA, 403 bp, Homo sapiens; identical to SEQ ID NO: 66489
  chr3:126724695-126725098
  hypo

SEQ ID NO: 146178 - DNA, 329 bp, Homo sapiens; identical to SEQ ID NO: 66490
  chr3:126730804-126731133
  hypo

SEQ ID NO: 146179 - DNA, 30 bp, Homo sapiens
  chr3:126733158-126733188
  hypo
gcatcgtggatgcacgcgcgtcacggcagc

SEQ ID NO: 146180 - DNA, 65 bp, Homo sapiens
  chr3:126736636-126736701
  hypo
tacacggtgctcatcggctccacaccctgtaccctcaccgtgtcggagacgcaactgctgtgcga

SEQ ID NO: 146181 - DNA, 30 bp, Homo sapiens; identical to SEQ ID NO: 66492
  chr3:126737186-126737216
  hypo

SEQ ID NO: 146182 - DNA, 182 bp, Homo sapiens; identical to SEQ ID NO: 66493
  chr3:126747048-126747230
  hypo

SEQ ID NO: 146183 - DNA, 31 bp, Homo sapiens
  chr3:126755184-126755215
  hypo
gggcgggtggtggggacggcagtggtgatga

SEQ ID NO: 146184 - DNA, 30 bp, Homo sapiens; identical to SEQ ID NO: 17807
  chr3:126755850-126755880
  hypo

SEQ ID NO: 146185 - DNA, 76 bp, Homo sapiens; identical to SEQ ID NO: 66495
  chr3:126756348-126756424
  hypo

SEQ ID NO: 146186 - DNA, 85 bp, Homo sapiens
  chr3:126796238-126796323
  hypo
tgagaagggaggggatcccagcgtttgagctgcaggcccacagccccgcacgggctgttcctgcgtgggcagcccaaggattaaa

SEQ ID NO: 146187 - DNA, 30 bp, Homo sapiens
  chr3:126821574-126821604
  hypo
cagcccttcgtgacccggtgctgtgtgggg

SEQ ID NO: 146188 - DNA, 169 bp, Homo sapiens; identical to SEQ ID NO: 66496
  chr3:126894144-126894313
  hypo

SEQ ID NO: 146189 - DNA, 30 bp, Homo sapiens; identical to SEQ ID NO: 66497
  chr3:127006272-127006302
  hypo

SEQ ID NO: 146190 - DNA, 30 bp, Homo sapiens; identical to SEQ ID NO: 66498
  chr3:127007386-127007416
  hypo

SEQ ID NO: 146191 - DNA, 30 bp, Homo sapiens
  chr3:127070881-127070911
  hypo
gaggcagaagctgcacgcggcctcttcaca

SEQ ID NO: 146192 - DNA, 159 bp, Homo sapiens
  chr3:127285884-127286043
  hypo
agagcctcccggagccggctttaaacactcttcacagcaggtttttggatcttgatttgaagaatgcattcagctgagtcaccgtccccaaacaatatgagaaataaatcgttgggcacgctcctgatcccagagccaattacacgggccactccccac

SEQ ID NO: 146193 - DNA, 220 bp, Homo sapiens
  chr3:127286317-127286537
  hypo
tataatcaccccaggcgctctcagtcccatcccagcaatcctttcggcattttctctacatcctccagactggttttggagtggctacaggctcctcattttgatgcaatggcccaagaaacaaggctcggggcccttccagtgctgagggtgtttctgtcagatgtgacagtgcggcgcagtggtcagaggcctggactcagcccgattgcctggagtc

SEQ ID NO: 146194 - DNA, 30 bp, Homo sapiens; identical to SEQ ID NO: 66500
  chr3:127288516-127288546
  hypo

SEQ ID NO: 146195 - DNA, 80 bp, Homo sapiens; identical to SEQ ID NO: 17809
  chr3:127292369-127292449
  hypo

SEQ ID NO: 146196 - DNA, 30 bp, Homo sapiens; identical to SEQ ID NO: 66502
  chr3:127323635-127323665
  hypo

SEQ ID NO: 146197 - DNA, 30 bp, Homo sapiens; identical to SEQ ID NO: 66503
  chr3:127323950-127323980
  hypo

SEQ ID NO: 146198 - DNA, 285 bp, Homo sapiens; identical to SEQ ID NO: 66504
  chr3:127325613-127325898
  hypo

SEQ ID NO: 146199 - DNA, 203 bp, Homo sapiens; identical to SEQ ID NO: 17811
  chr3:127326109-127326312
  hypo

SEQ ID NO: 146200 - DNA, 30 bp, Homo sapiens; identical to SEQ ID NO: 66506
  chr3:127333578-127333608
  hypo

SEQ ID NO: 146201 - DNA, 30 bp, Homo sapiens; identical to SEQ ID NO: 66507
  chr3:127339593-127339623
  hypo

SEQ ID NO: 146202 - DNA, 469 bp, Homo sapiens; identical to SEQ ID NO: 39583
  chr3:127347861-127348330
  hypo

SEQ ID NO: 146203 - DNA, 204 bp, Homo sapiens
  chr3:127349663-127349867
  hypo
ctctttggaaaaaggcgacattcaataaataaacatcaattgattggtctgctatttctttgtgtgacagtcataaaccagaactggccagcaacgtcctcatggacccaggcccagctgtaactgcccatgtgcttatgtgaccagctgtgaggactgcaggcagcctgcctcccggctcctctctcccgtgcatgctcttca

SEQ ID NO: 146204 - DNA, 269 bp, Homo sapiens; identical to SEQ ID NO: 66509
  chr3:127366355-127366624
  hypo

SEQ ID NO: 146205 - DNA, 30 bp, Homo sapiens; identical to SEQ ID NO: 17813
  chr3:127373504-127373534
  hypo

SEQ ID NO: 146206 - DNA, 118 bp, Homo sapiens
  chr3:127390329-127390447
  hypo
ggtgcgcagcgactacggcacgctcttcgtggtgctggtggtcattggggccatctgcatcatcatcattgcgcttggcctgctctacaactgctggcagcgccggctgcccaagctc

SEQ ID NO: 146207 - DNA, 30 bp, Homo sapiens; identical to SEQ ID NO: 66511
  chr3:127393182-127393212
  hypo

SEQ ID NO: 146208 - DNA, 30 bp, Homo sapiens; identical to SEQ ID NO: 66512
  chr3:127393501-127393531
  hypo

SEQ ID NO: 146209 - DNA, 810 bp, Homo sapiens; identical to SEQ ID NO: 66513
  chr3:127394386-127395196
  hypo

SEQ ID NO: 146210 - DNA, 159 bp, Homo sapiens; identical to SEQ ID NO: 66514
  chr3:127395762-127395921
  hypo

SEQ ID NO: 146211 - DNA, 30 bp, Homo sapiens
  chr3:127399253-127399283
  hypo
aggaggcgcagcagcgtctgcgggcactcg

SEQ ID NO: 146212 - DNA, 31 bp, Homo sapiens; identical to SEQ ID NO: 17816
  chr3:127401716-127401747
  hypo

SEQ ID NO: 146213 - DNA, 30 bp, Homo sapiens; identical to SEQ ID NO: 66516
  chr3:127408594-127408624
  hypo

SEQ ID NO: 146214 - DNA, 57 bp, Homo sapiens
  chr3:127439439-127439496
  hypo
gaggtcaaaagtgcccggggcggaggagcgcggcagtggatgcgactccatactgca

SEQ ID NO: 146215 - DNA, 144 bp, Homo sapiens; identical to SEQ ID NO: 66518
  chr3:127439916-127440060
  hypo

SEQ ID NO: 146216 - DNA, 175 bp, Homo sapiens
  chr3:127505553-127505728
  hypo
ctcagttcgctcacccgtgaagtggggataatcctaacaccaccgacctcagagagcaatgtcgcgaggtaaataaggaaatgcggatggggcaggggtcttgcctgggctaatgaaagccccccatcgctgtccactaggaagccatttgctccgatggcgcaggtaagccact

SEQ ID NO: 146217 - DNA, 26 bp, Homo sapiens
  chr3:127512901-127512927
  hypo
cagccctccaggaggccgaggtgggc

SEQ ID NO: 146218 - DNA, 73 bp, Homo sapiens
  chr3:127515529-127515602
  hypo
cgcaatgtttagaatcgtgcactcttctgagcactgaacctcagcaaagctctcccagcgtaaggataattaa

SEQ ID NO: 146219 - DNA, 30 bp, Homo sapiens; identical to SEQ ID NO: 66520
  chr3:127523159-127523189
  hypo

SEQ ID NO: 146220 - DNA, 30 bp, Homo sapiens; identical to SEQ ID NO: 17818
  chr3:127534320-127534350
  hypo

SEQ ID NO: 146221 - DNA, 295 bp, Homo sapiens
  chr3:127534723-127535018
  hypo
gccaccctttccccaccctggcgcccaaggaccatgtagacgtcaataaggaagtatttgctgaatgaatcgctgctttggatcctgggagaggagagcaaggagccgtatggggtagccacagagctgcatgcgaggggcgctgagcaggagccaggccgtcctcacccctgcagagactgacagagtggggttcaaaatggccacttgaagggacaataagctgtgtgatttagctgaccccagggagcatctgcgctaaaccagctggctggtgatgcgggaacacctagtc

SEQ ID NO: 146222 - DNA, 100 bp, Homo sapiens
  chr3:127536744-127536844
  hypo
gccagtctccatcgccgtgctgatagcatcagtggacatttgctcatgatccagtatccccccctttttctttttttgagatggagtcttgctctgtcac

SEQ ID NO: 146223 - DNA, 39 bp, Homo sapiens
  chr3:127537083-127537122
  hypo
gcgtgagccactgcacccggccaatatttttaagttcca

SEQ ID NO: 146224 - DNA, 156 bp, Homo sapiens
  chr3:127570888-127571044
  hypo
ttcacaggtgggcctcgggctgctcgaggagggaggagccggcagagccaaggaacacagaggcctcacagggggttaatcactccctccacctgccatatggccagggaaatcatccactctcacggagctggatgggagcggaagctgctcctg

SEQ ID NO: 146225 - DNA, 379 bp, Homo sapiens; identical to SEQ ID NO: 108816
  chr3:127634094-127634473
  hypo

SEQ ID NO: 146226 - DNA, 81 bp, Homo sapiens; identical to SEQ ID NO: 66524
  chr3:127637228-127637309
  hypo

SEQ ID NO: 146227 - DNA, 225 bp, Homo sapiens
  chr3:127731013-127731238
  hypo
gggcaacagagtaagcctccgtctcaaaaaaaaaaaaggacctaaaaatccccctcgcctagtgacgtcacatcagctatgacgtcatcgcacacattcctctctgtgtgtggtgatgctggtgtacacaaacccactgcactgccagtcggatgaaagcccagcacatgcaattatgtacagtacataatacttgatcctattaataaacgactgtgttactgt

SEQ ID NO: 146228 - DNA, 31 bp, Homo sapiens; identical to SEQ ID NO: 17821
  chr3:127783728-127783759
  hypo

SEQ ID NO: 146229 - DNA, 82 bp, Homo sapiens; identical to SEQ ID NO: 66526
  chr3:127788442-127788524
  hypo

SEQ ID NO: 146230 - DNA, 30 bp, Homo sapiens; identical to SEQ ID NO: 66527
  chr3:127790447-127790477
  hypo

SEQ ID NO: 146231 - DNA, 899 bp, Homo sapiens; identical to SEQ ID NO: 39589
  chr3:127794263-127795162
  hypo

SEQ ID NO: 146232 - DNA, 104 bp, Homo sapiens; identical to SEQ ID NO: 108821
  chr3:127795649-127795753
  hypo

SEQ ID NO: 146233 - DNA, 29 bp, Homo sapiens
  chr3:127796073-127796102
  hypo
cgacaggcagcccccgtggccggcccacc

SEQ ID NO: 146234 - DNA, 183 bp, Homo sapiens
  chr3:127798794-127798977
  hypo
gctgggaacagcgtccgggtacttagccccacctcaggcaccacggagccagcagggaaggacaggcctggcaagggcaagaacgcagctctcatcctactgggaaggcacattccagtaaggtgcactgcccagtgctgcacttgcccttgctgcttacttagtgggcgaacgcagagattc

SEQ ID NO: 146235 - DNA, 30 bp, Homo sapiens
  chr3:127814434-127814464
  hypo
catggacttgaatcacgcattcgattccta

SEQ ID NO: 146236 - DNA, 214 bp, Homo sapiens; identical to SEQ ID NO: 66530
  chr3:127816139-127816353
  hypo

SEQ ID NO: 146237 - DNA, 74 bp, Homo sapiens; identical to SEQ ID NO: 66531
  chr3:127865561-127865635
  hypo

SEQ ID NO: 146238 - DNA, 31 bp, Homo sapiens
  chr3:127871428-127871459
  hypo
gggcactgtagcccagcggaacccaccaggc

SEQ ID NO: 146239 - DNA, 27 bp, Homo sapiens
  chr3:127873581-127873608
  hypo
acgtccggcctgtaccaacattttctg

SEQ ID NO: 146240 - DNA, 263 bp, Homo sapiens
  chr3:127937300-127937563
  hypo
gctttctgggccaagcgcagtgtccatgtcttagagtggactactcaagctgctcaaccgtcttgatttatgtttaattcttgctttagatgtgtccattcagacattcctttggtatgtttccagaggcttgggtttggggtttgaaggagtgattccggactggccgttggtttgcttgttcattgtttcggcacttaagtgtgctgcgtgtgtcaggagcagggactcagccctcctggagctgacgggctagtaaagaa

SEQ ID NO: 146241 - DNA, 30 bp, Homo sapiens
  chr3:127937876-127937906
  hypo
gagaggaggctatgccgaggcctgagcaga

SEQ ID NO: 146242 - DNA, 30 bp, Homo sapiens
  chr3:127976650-127976680
  hypo
tgagcgtggcctgtgcgcgtcaagctgtcc

SEQ ID NO: 146243 - DNA, 211 bp, Homo sapiens; identical to SEQ ID NO: 66533
  chr3:127993822-127994033
  hypo

SEQ ID NO: 146244 - DNA, 30 bp, Homo sapiens; identical to SEQ ID NO: 17824
  chr3:127998756-127998786
  hypo

SEQ ID NO: 146245 - DNA, 84 bp, Homo sapiens
  chr3:128004543-128004627
  hypo
agctcccctcgcccacgctcccttagcccattcctgtccagcgtcaggccagtcccacgttcctggagccgccagcaccctgcc

SEQ ID NO: 146246 - DNA, 30 bp, Homo sapiens
  chr3:128027888-128027918
  hypo
acgcatgatctcattcggaaagactgcctt

SEQ ID NO: 146247 - DNA, 30 bp, Homo sapiens
  chr3:128036179-128036209
  hypo
gcctgttctccgccccgctgctggagctca

SEQ ID NO: 146248 - DNA, 30 bp, Homo sapiens
  chr3:128036456-128036486
  hypo
ctgtgtggcatctcacggtattcatctgcc

SEQ ID NO: 146249 - DNA, 30 bp, Homo sapiens; identical to SEQ ID NO: 17825
  chr3:128037666-128037696
  hypo

SEQ ID NO: 146250 - DNA, 30 bp, Homo sapiens; identical to SEQ ID NO: 17826
  chr3:128038297-128038327
  hypo

SEQ ID NO: 146251 - DNA, 30 bp, Homo sapiens
  chr3:128055802-128055832
  hypo
gcgccacctcagctgcgccccgtggacatt

SEQ ID NO: 146252 - DNA, 254 bp, Homo sapiens
  chr3:128056310-128056564
  hypo
gcatgaggcccctggccgccctctctcacaggaaggctcataaacacaaggatctcgctcaagccccggcacgtctggaatctcagctcggtgctttgccaggtatgattttgccacaaggggcatttcttttccagaatctgatgcagtcactctcttcagagcggctgggcgtttatctggacctgtcacaaccaggtttctcagcagctcctgtgctgggcactgaggacgcagcatagggagagcacagt

SEQ ID NO: 146253 - DNA, 30 bp, Homo sapiens
  chr3:128057109-128057139
  hypo
ccaaattcaaggcagcggcaccctcccgct

SEQ ID NO: 146254 - DNA, 30 bp, Homo sapiens
  chr3:128066564-128066594
  hypo
aaggacatcatgtaacgataaaaggctcgg

SEQ ID NO: 146255 - DNA, 309 bp, Homo sapiens
  chr3:128070500-128070809
  hypo
aagagggacacacacacgtgtaatgacataattatatgcaccggcagccaagtccttgctcaaaggccagggacaatggggacccacctggcgtgtaagcaagcgcctggacttccatgtgcacagtgactgctcctcaggagctcagtccctccagtgactgaaggctaataaatagagcaaattattcatgcaaacagtgagaatccccacttagcgccattgttgtaactgtgctggcctggattcaggactgttccctagaagcaaggcctattgagcagatcccacatgcgttgcctttggttt

SEQ ID NO: 146256 - DNA, 137 bp, Homo sapiens; identical to SEQ ID NO: 66539
  chr3:128080965-128081102
  hypo

SEQ ID NO: 146257 - DNA, 30 bp, Homo sapiens
  chr3:128081445-128081475
  hypo
cattgaggggcacgcggagcttaaagcctt

SEQ ID NO: 146258 - DNA, 118 bp, Homo sapiens; identical to SEQ ID NO: 66540
  chr3:128110727-128110845
  hypo

SEQ ID NO: 146259 - DNA, 63 bp, Homo sapiens
  chr3:128118206-128118269
  hypo
ggggtgcatgagcccgtcgagtgcgcgcttgagagcctcggaaagagcgaggctcctgcgaag

SEQ ID NO: 146260 - DNA, 31 bp, Homo sapiens; identical to SEQ ID NO: 17830
  chr3:128122245-128122276
  hypo

SEQ ID NO: 146261 - DNA, 362 bp, Homo sapiens
  chr3:128123186-128123548
  hypo
gccagatagactttccggctctgcctgctccgggcagtgcgaggtatgcattgtgtgtaacgagagccatcgcgggtgagatggactgccgattgggccacgcctgtctccccagcccagcacagacgccggggagccccacgccttctcagcctccagacctcctggcaccagagggagacgggctgcccatgccatttgtcggggtctgctgccagctacctgctctgtttgcagaaggaaggccaggctctgattcagggagtcagatacctacaggccaggcgctcacttgaggggactggccagggtcctccccatgcccacactctgtgccccatcccaagcggggggcagaccac

SEQ ID NO: 146262 - DNA, 30 bp, Homo sapiens; identical to SEQ ID NO: 17831
  chr3:128127093-128127123
  hypo

SEQ ID NO: 146263 - DNA, 31 bp, Homo sapiens; identical to SEQ ID NO: 66544
  chr3:128141569-128141600
  hypo

SEQ ID NO: 146264 - DNA, 30 bp, Homo sapiens
  chr3:128158553-128158583
  hypo
ccatgcaacgactgccgctgaaaagatagt

SEQ ID NO: 146265 - DNA, 30 bp, Homo sapiens
  chr3:128158967-128158997
  hypo
caggtgtcaaagcatcgaaacacagacact

SEQ ID NO: 146266 - DNA, 103 bp, Homo sapiens; identical to SEQ ID NO: 66545
  chr3:128179464-128179567
  hypo

SEQ ID NO: 146267 - DNA, 30 bp, Homo sapiens
  chr3:128181793-128181823
  hypo
tgtcctcagggttacggaaggtgtagccgg

SEQ ID NO: 146268 - DNA, 206 bp, Homo sapiens; identical to SEQ ID NO: 66546
  chr3:128182026-128182232
  hypo

SEQ ID NO: 146269 - DNA, 162 bp, Homo sapiens; identical to SEQ ID NO: 39601
  chr3:128273889-128274051
  hypo

SEQ ID NO: 146270 - DNA, 346 bp, Homo sapiens; identical to SEQ ID NO: 2761
  chr3:128274308-128274654
  hypo

SEQ ID NO: 146271 - DNA, 40 bp, Homo sapiens; identical to SEQ ID NO: 17835
  chr3:128290741-128290781
  hypo

SEQ ID NO: 146272 - DNA, 189 bp, Homo sapiens
  chr3:128340981-128341170
  hypo
caactctgtgacgcccgacacttactctgtcgcacagatcagagccctctgtcttcagcctggactgcagcagtgcaatctcactggtcaaggccttgtgttcagtctccaggctcttcttgccactgttgagggtggagatgtcccgggattgcttgtacctattgacggtctcgtcaaagtgacggt

SEQ ID NO: 146273 - DNA, 46 bp, Homo sapiens; identical to SEQ ID NO: 66551
  chr3:128401971-128402017
  hypo

SEQ ID NO: 146274 - DNA, 30 bp, Homo sapiens
  chr3:128410048-128410078
  hypo
cctcctgggctcaagcgatcttaccacttc

SEQ ID NO: 146275 - DNA, 121 bp, Homo sapiens
  chr3:128500449-128500570
  hypo
gtcgaggctgcagtgatcatgctctactgcactccagtctgggaaggagggagagaccttgtctgaaaaaacaaaaaacagttcacacagctgaatgtatctgaggtgagattgaaaccca

SEQ ID NO: 146276 - DNA, 121 bp, Homo sapiens; identical to SEQ ID NO: 66552
  chr3:128526382-128526503
  hypo

SEQ ID NO: 146277 - DNA, 30 bp, Homo sapiens
  chr3:128579932-128579962
  hypo
ggtaagcaccatctgcgtggggtgcaggag

SEQ ID NO: 146278 - DNA, 30 bp, Homo sapiens
  chr3:128580495-128580525
  hypo
caccagccaggggcccggcttccctggtct

SEQ ID NO: 146279 - DNA, 143 bp, Homo sapiens
  chr3:128581910-128582053
  hypo
tcaaaaaaaagaaaagaaaaaaaaagaaggtggagaatcagcaaagtgggattccacttctattacagaaggaatatacatctctgtaaacagaagatttacaagaatatgttccaaaggattaacagcgttaatgggtgggc

SEQ ID NO: 146280 - DNA, 36 bp, Homo sapiens
  chr3:128653973-128654009
  hypo
agagcctggaagacccgcctccgctcagtgtctcgc

SEQ ID NO: 146281 - DNA, 31 bp, Homo sapiens; identical to SEQ ID NO: 66553
  chr3:128662254-128662285
  hypo

SEQ ID NO: 146282 - DNA, 17 bp, Homo sapiens
  chr3:128672070-128672087
  hypo
aatctgggccgggcgcg

SEQ ID NO: 146283 - DNA, 30 bp, Homo sapiens
  chr3:128688603-128688633
  hypo
gctagcaaaggcgttcgctcaaagctactg

SEQ ID NO: 146284 - DNA, 30 bp, Homo sapiens; identical to SEQ ID NO: 66554
  chr3:128689155-128689185
  hypo

SEQ ID NO: 146285 - DNA, 30 bp, Homo sapiens
  chr3:128714129-128714159
  hypo
gctccaatactcctcgggttcagtctgaaa

SEQ ID NO: 146286 - DNA, 183 bp, Homo sapiens; identical to SEQ ID NO: 2764
  chr3:128720163-128720346
  hypo

SEQ ID NO: 146287 - DNA, 115 bp, Homo sapiens; identical to SEQ ID NO: 2765
  chr3:128720418-128720533
  hypo

SEQ ID NO: 146288 - DNA, 699 bp, Homo sapiens; identical to SEQ ID NO: 2766
  chr3:128720566-128721265
  hypo

SEQ ID NO: 146289 - DNA, 227 bp, Homo sapiens; identical to SEQ ID NO: 17839
  chr3:128737540-128737767
  hypo

SEQ ID NO: 146290 - DNA, 30 bp, Homo sapiens; identical to SEQ ID NO: 17840
  chr3:128766078-128766108
  hypo

SEQ ID NO: 146291 - DNA, 31 bp, Homo sapiens; identical to SEQ ID NO: 66560
  chr3:128768446-128768477
  hypo

SEQ ID NO: 146292 - DNA, 272 bp, Homo sapiens
  chr3:128782773-128783045
  hypo
ctgcctaagaacaatcgtaaaagctggcatctgctccttgggcaccaggtgtgtccaaggcttgcgtgcagcacctcccatgggtgactctcgggtttccctttggaagactgtaaggagggagctgttctgcaacccgctgcatggaggagggtgcaggcctaggtcacctgcttgttctctctcacacgtgctccctcgaaagcttccaggcccgtgggggaccctggaactaaggcccttcagtccccaacccccgacatagggtgcta

SEQ ID NO: 146293 - DNA, 164 bp, Homo sapiens; identical to SEQ ID NO: 17841
  chr3:128785013-128785177
  hypo

SEQ ID NO: 146294 - DNA, 30 bp, Homo sapiens; identical to SEQ ID NO: 66564
  chr3:128785898-128785928
  hypo

SEQ ID NO: 146295 - DNA, 26 bp, Homo sapiens
  chr3:128791367-128791393
  hypo
ttttattttttttttttgagtcggag

SEQ ID NO: 146296 - DNA, 85 bp, Homo sapiens; identical to SEQ ID NO: 17843
  chr3:128791632-128791717
  hypo

SEQ ID NO: 146297 - DNA, 31 bp, Homo sapiens; identical to SEQ ID NO: 66567
  chr3:128822756-128822787
  hypo

SEQ ID NO: 146298 - DNA, 30 bp, Homo sapiens
  chr3:128826756-128826786
  hypo
gcaaaccctcctccccgggctcccaggcac

SEQ ID NO: 146299 - DNA, 30 bp, Homo sapiens; identical to SEQ ID NO: 17844
  chr3:128889309-128889339
  hypo

SEQ ID NO: 146300 - DNA, 121 bp, Homo sapiens
  chr3:128908772-128908893
  hypo
gcctcatttaactcctaacaaaagcctctgtggcctggcgctgatgactcacacacacacaaaaaagaaatcctgattctagtactttctagccatttgtctagagttggagaccagcctg

SEQ ID NO: 146301 - DNA, 31 bp, Homo sapiens; identical to SEQ ID NO: 66570
  chr3:128933594-128933625
  hypo

SEQ ID NO: 146302 - DNA, 68 bp, Homo sapiens; identical to SEQ ID NO: 66571
  chr3:128973539-128973607
  hypo

SEQ ID NO: 146303 - DNA, 32 bp, Homo sapiens; identical to SEQ ID NO: 17845
  chr3:129008730-129008762
  hypo

SEQ ID NO: 146304 - DNA, 24 bp, Homo sapiens
  chr3:129011640-129011664
  hypo
atttcaagtcgactaacaagaaga

SEQ ID NO: 146305 - DNA, 479 bp, Homo sapiens; identical to SEQ ID NO: 66574
  chr3:129045162-129045641
  hypo

SEQ ID NO: 146306 - DNA, 30 bp, Homo sapiens
  chr3:129047343-129047373
  hypo
aggtctgaagatggtcggcatcagtgttcg

SEQ ID NO: 146307 - DNA, 31 bp, Homo sapiens; identical to SEQ ID NO: 66575
  chr3:129072726-129072757
  hypo

SEQ ID NO: 146308 - DNA, 30 bp, Homo sapiens
  chr3:129106537-129106567
  hypo
aagtgcgctccacatcgactgctcagggct

SEQ ID NO: 146309 - DNA, 30 bp, Homo sapiens; identical to SEQ ID NO: 17847
  chr3:129120402-129120432
  hypo

SEQ ID NO: 146310 - DNA, 30 bp, Homo sapiens; identical to SEQ ID NO: 66577
  chr3:129183556-129183586
  hypo

SEQ ID NO: 146311 - DNA, 30 bp, Homo sapiens; identical to SEQ ID NO: 17848
  chr3:129221577-129221607
  hypo

SEQ ID NO: 146312 - DNA, 117 bp, Homo sapiens; identical to SEQ ID NO: 17849
  chr3:129221881-129221998
  hypo

SEQ ID NO: 146313 - DNA, 30 bp, Homo sapiens; identical to SEQ ID NO: 66580
  chr3:129224227-129224257
  hypo

SEQ ID NO: 146314 - DNA, 172 bp, Homo sapiens; identical to SEQ ID NO: 66581
  chr3:129231140-129231312
  hypo

SEQ ID NO: 146315 - DNA, 31 bp, Homo sapiens; identical to SEQ ID NO: 66582
  chr3:129233461-129233492
  hypo

SEQ ID NO: 146316 - DNA, 30 bp, Homo sapiens
  chr3:129239127-129239157
  hypo
ctgcaccctctgcccgccttggggtctgct

SEQ ID NO: 146317 - DNA, 224 bp, Homo sapiens
  chr3:129240328-129240552
  hypo
tgcccactggagggacgcagacactgagaccccaaggagagtggctgcagaggcccccagtgggaagtgtcggagctagagccccatcccagagcccttgccccaccccagaccgcccctcctccctgcctccctccgcatctctctggagatgatggaggaaaataaagaaagggagccagacagttgtgccaacagaactcctccgtcgagtgtctaattac

SEQ ID NO: 146318 - DNA, 167 bp, Homo sapiens; identical to SEQ ID NO: 66583
  chr3:129246204-129246371
  hypo

SEQ ID NO: 146319 - DNA, 83 bp, Homo sapiens; identical to SEQ ID NO: 66584
  chr3:129247537-129247620
  hypo

SEQ ID NO: 146320 - DNA, 31 bp, Homo sapiens; identical to SEQ ID NO: 66585
  chr3:129247919-129247950
  hypo

SEQ ID NO: 146321 - DNA, 167 bp, Homo sapiens
  chr3:129251135-129251302
  hypo
ctacacgctcaagccggaggtcaacaacgagtcttttgtcatctacatgttcgtggtccacttcaccatccccatgattatcatctttttctgctatgggcagctcgtcttcaccgtcaaggaggtacgggccggggggtgggcggcctcacggctctgagggtcca

SEQ ID NO: 146322 - DNA, 112 bp, Homo sapiens; identical to SEQ ID NO: 66587
  chr3:129252487-129252599
  hypo

SEQ ID NO: 146323 - DNA, 30 bp, Homo sapiens; identical to SEQ ID NO: 66588
  chr3:129261753-129261783
  hypo

SEQ ID NO: 146324 - DNA, 30 bp, Homo sapiens; identical to SEQ ID NO: 66589
  chr3:129266338-129266368
  hypo

SEQ ID NO: 146325 - DNA, 31 bp, Homo sapiens; identical to SEQ ID NO: 66590
  chr3:129266573-129266604
  hypo

SEQ ID NO: 146326 - DNA, 31 bp, Homo sapiens; identical to SEQ ID NO: 66591
  chr3:129275268-129275299
  hypo

SEQ ID NO: 146327 - DNA, 31 bp, Homo sapiens; identical to SEQ ID NO: 66592
  chr3:129275852-129275883
  hypo

SEQ ID NO: 146328 - DNA, 30 bp, Homo sapiens; identical to SEQ ID NO: 66593
  chr3:129281733-129281763
  hypo

SEQ ID NO: 146329 - DNA, 30 bp, Homo sapiens
  chr3:129283610-129283640
  hypo
aacatcccctcctcccggcctctgcccttg

SEQ ID NO: 146330 - DNA, 182 bp, Homo sapiens
  chr3:129284110-129284292
  hypo
ccgtggggtcactgccgctgagtccctgccacgtcccccgcctgggctctgtctgtccccaggcagcctcacccgcagacagctgtacatgcagatggacatccagttggtgagcatcttctccaccacagactctgtgcgccgcagcatgagcttggggttcttggcggccgaggcgtcaa

SEQ ID NO: 146331 - DNA, 139 bp, Homo sapiens
  chr3:129289961-129290100
  hypo
gggaggtagtccaggcggaacctgctgccccgctgtgcctcctcggggtccagtagctcctcagccacagccacctcgtctgcgtaggcccgcccattgatgaagaagtccactggcgctgatgcgttgctcagggccc

SEQ ID NO: 146332 - DNA, 360 bp, Homo sapiens
  chr3:129290346-129290706
  hypo
ctcaccgtgggctcccggccaatgtggtggacggccatggacacattctgcaccatgtggaaacgctcaccagccactgtgatggtcctgccgccactgcgggggacagcaaaacctatcagtgcacctgcagccccagagagcctgggggaagggcggggtgccagtctcacctgacagggctgcggcggggactgatggccgtgatgaccgggttctgcatgtaccagaaggtgaggttgccgtgcacgcagccccgacgctcgaagcgcacacacacaggcaccggagccggcagggccccctcaggcatggtgcaggcgatgctggtatctgtgcgcctggggggagcagcaggtt

SEQ ID NO: 146333 - DNA, 30 bp, Homo sapiens; identical to SEQ ID NO: 66595
  chr3:129293110-129293140
  hypo

SEQ ID NO: 146334 - DNA, 30 bp, Homo sapiens; identical to SEQ ID NO: 66596
  chr3:129303299-129303329
  hypo

SEQ ID NO: 146335 - DNA, 30 bp, Homo sapiens; identical to SEQ ID NO: 108867
  chr3:129323581-129323611
  hypo

SEQ ID NO: 146336 - DNA, 1286 bp, Homo sapiens; identical to SEQ ID NO: 108868
  chr3:129324047-129325333
  hypo

SEQ ID NO: 146337 - DNA, 53 bp, Homo sapiens; identical to SEQ ID NO: 66598
  chr3:129370401-129370454
  hypo

SEQ ID NO: 146338 - DNA, 87 bp, Homo sapiens; identical to SEQ ID NO: 17852
  chr3:129372594-129372681
  hypo

SEQ ID NO: 146339 - DNA, 53 bp, Homo sapiens; identical to SEQ ID NO: 66600
  chr3:129373805-129373858
  hypo

SEQ ID NO: 146340 - DNA, 88 bp, Homo sapiens
  chr3:129398050-129398138
  hypo
ctcttccctcagacacctgcacggcttgctccgtcacctcctttaagtctttgcttcaatgtcaccttagcagcgaggacttctctga

SEQ ID NO: 146341 - DNA, 34 bp, Homo sapiens
  chr3:129487991-129488025
  hypo
ccattgccagcgggccgcacgtggcccaggatgg

SEQ ID NO: 146342 - DNA, 88 bp, Homo sapiens
  chr3:129510236-129510324
  hypo
gacacaccagaaatttagggaggcagttggtatggggaaacagaatgggtttgcttgttagacctacgtttgactcggcttcctattg

SEQ ID NO: 146343 - DNA, 40 bp, Homo sapiens; identical to SEQ ID NO: 66603
  chr3:129511159-129511199
  hypo

SEQ ID NO: 146344 - DNA, 40 bp, Homo sapiens
  chr3:129511378-129511418
  hypo
agatgaggtttcactatgttggccacgctgatccatttgc

SEQ ID NO: 146345 - DNA, 38 bp, Homo sapiens
  chr3:129597081-129597119
  hypo
caggcgtgagccactgcgcctggccaacatctctaagt

SEQ ID NO: 146346 - DNA, 81 bp, Homo sapiens; identical to SEQ ID NO: 108874
  chr3:129693118-129693199
  hypo

SEQ ID NO: 146347 - DNA, 194 bp, Homo sapiens; identical to SEQ ID NO: 2771
  chr3:129693304-129693498
  hypo

SEQ ID NO: 146348 - DNA, 30 bp, Homo sapiens
  chr3:129704202-129704232
  hypo
atgtctcagctccgacgcaggtacacccca

SEQ ID NO: 146349 - DNA, 30 bp, Homo sapiens
  chr3:129892493-129892523
  hypo
gtatacgtgagccggcggctcacgcctata

SEQ ID NO: 146350 - DNA, 16 bp, Homo sapiens
  chr3:129916680-129916696
  hypo
aaaaaaaaaaaaaaga

SEQ ID NO: 146351 - DNA, 30 bp, Homo sapiens; identical to SEQ ID NO: 66607
  chr3:129979327-129979357
  hypo

SEQ ID NO: 146352 - DNA, 474 bp, Homo sapiens
  chr3:129982887-129983361
  hypo
tgcctccctgtgctcgagggcttccacttgaccacctatggcaaccggaagcagatgcagagacatgtgcgcgaggcttcagcccgccccttacagggaaccgccccccctgggccacgccctggagtggacgctggagaatgtgctcctggcagcccctcggccgcggaaggcacaagtcctcttcgccatcgtggccagcgagacaagtagctgggacagggagaagctatggactctgtccctggaggccaaatgcaagggcattaccctctttgtgctggccttgggtccgggtgtggggacccatgagctagccgagctagccgagctggtcagtgctccctctgagcagcatctactgcgcctacaaggggtctcagagccagaggttaactacgctcagggattcactcgggccttcctgaacctcctaaaaagtgagcagtccccgggaactggggcaccttgggt

SEQ ID NO: 146353 - DNA, 164 bp, Homo sapiens; identical to SEQ ID NO: 39626
  chr3:130064445-130064609
  hypo

SEQ ID NO: 146354 - DNA, 119 bp, Homo sapiens; identical to SEQ ID NO: 39627
  chr3:130064780-130064899
  hypo

SEQ ID NO: 146355 - DNA, 30 bp, Homo sapiens; identical to SEQ ID NO: 2773
  chr3:130132286-130132316
  hypo

SEQ ID NO: 146356 - DNA, 355 bp, Homo sapiens; identical to SEQ ID NO: 108880
  chr3:130235708-130236063
  hypo

SEQ ID NO: 146357 - DNA, 101 bp, Homo sapiens; identical to SEQ ID NO: 2775
  chr3:130236173-130236274
  hypo

SEQ ID NO: 146358 - DNA, 44 bp, Homo sapiens; identical to SEQ ID NO: 17859
  chr3:130237351-130237395
  hypo

SEQ ID NO: 146359 - DNA, 245 bp, Homo sapiens; identical to SEQ ID NO: 66615
  chr3:130424514-130424759
  hypo

SEQ ID NO: 146360 - DNA, 115 bp, Homo sapiens; identical to SEQ ID NO: 66616
  chr3:130460752-130460867
  hypo

SEQ ID NO: 146361 - DNA, 158 bp, Homo sapiens
  chr3:130464452-130464610
  hypo
atgagcctttactatgtgttccgtgctgtgcttggggctatgagaattacaaagttaccatatgacatagttcttgtccaagaatctgtagtttcttggaaataagaaagagacacattaaaagcttaaaactggccgggcgcggtggctcacgcctg

SEQ ID NO: 146362 - DNA, 27 bp, Homo sapiens
  chr3:130473843-130473870
  hypo
gagagagaaagagtctcgctctgtagc

SEQ ID NO: 146363 - DNA, 26 bp, Homo sapiens
  chr3:130474109-130474135
  hypo
gtgagccaccgcgcccggccagaaca

SEQ ID NO: 146364 - DNA, 30 bp, Homo sapiens
  chr3:130474596-130474626
  hypo
gaacacatttttatgcggccattggcggta

SEQ ID NO: 146365 - DNA, 30 bp, Homo sapiens; identical to SEQ ID NO: 66620
  chr3:130548531-130548561
  hypo

SEQ ID NO: 146366 - DNA, 30 bp, Homo sapiens
  chr3:131068481-131068511
  hypo
cgaagcagagatccgcgagtgtttggaaaa

SEQ ID NO: 146367 - DNA, 65 bp, Homo sapiens; identical to SEQ ID NO: 17860
  chr3:131100367-131100432
  hypo

SEQ ID NO: 146368 - DNA, 121 bp, Homo sapiens
  chr3:131595101-131595222
  hypo
ataaataaataaataaataaataaatacgaatacaaccaaatgaaaggcatgctctttattttttgtgagaatgttttattattatgagacattctttttctcggccgggcgtggtggctc

SEQ ID NO: 146369 - DNA, 152 bp, Homo sapiens; identical to SEQ ID NO: 17861
  chr3:132034533-132034685
  hypo

SEQ ID NO: 146370 - DNA, 157 bp, Homo sapiens
  chr3:132398974-132399131
  hypo
cctgtgaatagtaactcggccttaagagaacattaaccaaaaccttaagctgagcaaactactgagcagcaagtattgacaacatttcaaggttttgttttttgttttgttttgttttgagatggagtctcactcgggctggagtgcagtggtgtga

SEQ ID NO: 146371 - DNA, 37 bp, Homo sapiens; identical to SEQ ID NO: 17863
  chr3:132399370-132399407
  hypo

SEQ ID NO: 146372 - DNA, 37 bp, Homo sapiens
  chr3:132440041-132440078
  hypo
gtgagccaccacgcccggctgctttacatactatttt

SEQ ID NO: 146373 - DNA, 30 bp, Homo sapiens
  chr3:132441484-132441514
  hypo
gggagcaggacggggcggggcagcggaacg

SEQ ID NO: 146374 - DNA, 30 bp, Homo sapiens; identical to SEQ ID NO: 66625
  chr3:132442076-132442106
  hypo

SEQ ID NO: 146375 - DNA, 436 bp, Homo sapiens; identical to SEQ ID NO: 108899
  chr3:132756101-132756537
  hypo

SEQ ID NO: 146376 - DNA, 538 bp, Homo sapiens; identical to SEQ ID NO: 2778
  chr3:132756941-132757479
  hypo

SEQ ID NO: 146377 - DNA, 452 bp, Homo sapiens; identical to SEQ ID NO: 39640
  chr3:132757536-132757988
  hypo

SEQ ID NO: 146378 - DNA, 139 bp, Homo sapiens; identical to SEQ ID NO: 66629
  chr3:133217916-133218055
  hypo

SEQ ID NO: 146379 - DNA, 30 bp, Homo sapiens; identical to SEQ ID NO: 17866
  chr3:133265114-133265144
  hypo

SEQ ID NO: 146380 - DNA, 18 bp, Homo sapiens
  chr3:133270176-133270194
  hypo
aaccagaggagccaagat

SEQ ID NO: 146381 - DNA, 50 bp, Homo sapiens; identical to SEQ ID NO: 2780
  chr3:133276457-133276507
  hypo

SEQ ID NO: 146382 - DNA, 99 bp, Homo sapiens
  chr3:133364597-133364696
  hypo
ctacagcagttctttccgtttattttagcagtaggatctcttttcaaacagaccgcacccaaaagcctaagagatactacataataaacctatcattca

SEQ ID NO: 146383 - DNA, 30 bp, Homo sapiens; identical to SEQ ID NO: 17868
  chr3:133520559-133520589
  hypo

SEQ ID NO: 146384 - DNA, 109 bp, Homo sapiens; identical to SEQ ID NO: 17869
  chr3:133560512-133560621
  hypo

SEQ ID NO: 146385 - DNA, 30 bp, Homo sapiens; identical to SEQ ID NO: 17870
  chr3:133610700-133610730
  hypo

SEQ ID NO: 146386 - DNA, 561 bp, Homo sapiens; identical to SEQ ID NO: 39647
  chr3:133646156-133646717
  hypo

SEQ ID NO: 146387 - DNA, 30 bp, Homo sapiens
  chr3:133648071-133648101
  hypo
gtgggaactctggtgcgattctgccatgag

SEQ ID NO: 146388 - DNA, 228 bp, Homo sapiens
  chr3:133648403-133648631
  hypo
caaccccgacagccccgcaaagctggtttaagtgtcccggtgagcaactgtgtccacctaggttcactacccacagtagagggttttagtgctcaaccatatctgctcttttcttctcctgagcacacagaatattctgttccgctcttgcggcagctaggctgggagcagagtgaagagcgttactttgggacaaagcattgcttagcagtgcgggatcttccagga

SEQ ID NO: 146389 - DNA, 30 bp, Homo sapiens
  chr3:133728471-133728501
  hypo
tacagctggagtgtgcgtctaggcttacaa

SEQ ID NO: 146390 - DNA, 237 bp, Homo sapiens; identical to SEQ ID NO: 39648
  chr3:133748100-133748337
  hypo

SEQ ID NO: 146391 - DNA, 550 bp, Homo sapiens; identical to SEQ ID NO: 39649
  chr3:133748401-133748951
  hypo

SEQ ID NO: 146392 - DNA, 53 bp, Homo sapiens; identical to SEQ ID NO: 39650
  chr3:133969906-133969959
  hypo

SEQ ID NO: 146393 - DNA, 31 bp, Homo sapiens; identical to SEQ ID NO: 66640
  chr3:134021045-134021076
  hypo

SEQ ID NO: 146394 - DNA, 24 bp, Homo sapiens
  chr3:134042382-134042406
  hypo
gactgcccagctgtgccgggtgca

SEQ ID NO: 146395 - DNA, 94 bp, Homo sapiens; identical to SEQ ID NO: 66642
  chr3:134080495-134080589
  hypo

SEQ ID NO: 146396 - DNA, 1049 bp, Homo sapiens; identical to SEQ ID NO: 2783
  chr3:134092502-134093551
  hypo

SEQ ID NO: 146397 - DNA, 239 bp, Homo sapiens; identical to SEQ ID NO: 39653
  chr3:134093626-134093865
  hypo

SEQ ID NO: 146398 - DNA, 31 bp, Homo sapiens; identical to SEQ ID NO: 66645
  chr3:134103115-134103146
  hypo

SEQ ID NO: 146399 - DNA, 31 bp, Homo sapiens; identical to SEQ ID NO: 17877
  chr3:134166665-134166696
  hypo

SEQ ID NO: 146400 - DNA, 175 bp, Homo sapiens
  chr3:134195845-134196020
  hypo
tcaagccagtcctagacggagatttcgaagccctggttgacaaaatctgactagcccaaattaggtcacctaattcctgatacaatgagctacagttctggcaccataacacaagttacgaacttgcccagaggctattcctgggggtggcggcagttctcggatgagtgtcata

SEQ ID NO: 146401 - DNA, 38 bp, Homo sapiens
  chr3:134202928-134202966
  hypo
aaatggctcacagggccgggcgcggtggctcgcgcctg

SEQ ID NO: 146402 - DNA, 158 bp, Homo sapiens
  chr3:134203265-134203423
  hypo
gctgtcccccataggataactgcaagatatccctaacaccttggcaaaaattatacacagattggtgtgggaaagggtttacacccccatgacaaggatctcggcaaaagttaagcaaaatgcgccctgctacttctgtcaccggtgagccaggtgag

SEQ ID NO: 146403 - DNA, 6 bp, Homo sapiens
  chr3:134369512-134369518
  hypo
gccact

SEQ ID NO: 146404 - DNA, 575 bp, Homo sapiens; identical to SEQ ID NO: 39656
  chr3:134369552-134370127
  hypo

SEQ ID NO: 146405 - DNA, 26 bp, Homo sapiens
  chr3:134502361-134502387
  hypo
gagatcgggcgcgttcagggtggtat

SEQ ID NO: 146406 - DNA, 2575 bp, Homo sapiens; identical to SEQ ID NO: 108924
  chr3:134513741-134516316
  hypo

SEQ ID NO: 146407 - DNA, 30 bp, Homo sapiens; identical to SEQ ID NO: 2788
  chr3:134592951-134592981
  hypo

SEQ ID NO: 146408 - DNA, 86 bp, Homo sapiens; identical to SEQ ID NO: 66652
  chr3:135601877-135601963
  hypo

SEQ ID NO: 146409 - DNA, 834 bp, Homo sapiens; identical to SEQ ID NO: 39662
  chr3:135684609-135685443
  hypo

SEQ ID NO: 146410 - DNA, 173 bp, Homo sapiens; identical to SEQ ID NO: 66654
  chr3:135741865-135742038
  hypo

SEQ ID NO: 146411 - DNA, 29 bp, Homo sapiens
  chr3:135866169-135866198
  hypo
cactccagcctaggcgacagagcaagacc

SEQ ID NO: 146412 - DNA, 311 bp, Homo sapiens
  chr3:135870036-135870347
  hypo
atgtgtactggcagctaaaaacgtcgttactggggaccctgtgacatttattacactggtgctggtactagcgttacgcacagcaatgctagtcacgttaatgcccaaagtgagcctggtctgctccaaggccttttctggcacggcaaatgcctccagcttcttctccccattggccatataggagttttggcagccacgacatatacaatctaagcaggctttgcggttagagtagcaagggcagcgttggcctcggcatgtaagaacacttggattttgagtagcacgcccacatttacaccctttct

SEQ ID NO: 146413 - DNA, 148 bp, Homo sapiens
  chr3:135900335-135900483
  hypo
cagaagtcctttcactaccaccgtggaacaccttcttgggcccgattactaaggtgaagaaattgttctaaaggtctgtaaatggtaagctccaaaaatttgttcacaaccccatccagctcaatgttttaaaatcaaaacttggccg

SEQ ID NO: 146414 - DNA, 30 bp, Homo sapiens; identical to SEQ ID NO: 66658
  chr3:135996508-135996538
  hypo

SEQ ID NO: 146415 - DNA, 29 bp, Homo sapiens
  chr3:136314295-136314324
  hypo
gaggctgaggcaggtggatcacgaggtca

SEQ ID NO: 146416 - DNA, 27 bp, Homo sapiens
  chr3:136344867-136344894
  hypo
ctgggcgaaagagtagaactctgtctc

SEQ ID NO: 146417 - DNA, 22 bp, Homo sapiens
  chr3:136375996-136376018
  hypo
taaagaacgtcctctcctacac

SEQ ID NO: 146418 - DNA, 136 bp, Homo sapiens
  chr3:136454635-136454771
  hypo
ggtgggaggtataaaaatttattatacataaagaatattaccactaacaaatgcagacaagctaggacatggtactgggtggaggacggctagctctttggaaagtgaaaggttggggtggcgtaggcctcatgcc

SEQ ID NO: 146419 - DNA, 38 bp, Homo sapiens; identical to SEQ ID NO: 17885
  chr3:136582611-136582649
  hypo

SEQ ID NO: 146420 - DNA, 121 bp, Homo sapiens; identical to SEQ ID NO: 17886
  chr3:136582948-136583069
  hypo

SEQ ID NO: 146421 - DNA, 37 bp, Homo sapiens; identical to SEQ ID NO: 17887
  chr3:136583308-136583345
  hypo

SEQ ID NO: 146422 - DNA, 32 bp, Homo sapiens; identical to SEQ ID NO: 66665
  chr3:136593311-136593343
  hypo

SEQ ID NO: 146423 - DNA, 133 bp, Homo sapiens; identical to SEQ ID NO: 66666
  chr3:136678362-136678495
  hypo

SEQ ID NO: 146424 - DNA, 30 bp, Homo sapiens; identical to SEQ ID NO: 66667
  chr3:136729076-136729106
  hypo

SEQ ID NO: 146425 - DNA, 30 bp, Homo sapiens; identical to SEQ ID NO: 66668
  chr3:136753940-136753970
  hypo

SEQ ID NO: 146426 - DNA, 121 bp, Homo sapiens; identical to SEQ ID NO: 66669
  chr3:137433348-137433469
  hypo

SEQ ID NO: 146427 - DNA, 33 bp, Homo sapiens; identical to SEQ ID NO: 66670
  chr3:137561183-137561216
  hypo

SEQ ID NO: 146428 - DNA, 33 bp, Homo sapiens; identical to SEQ ID NO: 66671
  chr3:137561455-137561488
  hypo

SEQ ID NO: 146429 - DNA, 91 bp, Homo sapiens; identical to SEQ ID NO: 17888
  chr3:137717830-137717921
  hypo

SEQ ID NO: 146430 - DNA, 30 bp, Homo sapiens
  chr3:137720343-137720373
  hypo
gtgagccaccgcgcccggcaacattccccc

SEQ ID NO: 146431 - DNA, 28 bp, Homo sapiens
  chr3:137729017-137729045
  hypo
agcaggagggcggcagcttctcgcaggc

SEQ ID NO: 146432 - DNA, 196 bp, Homo sapiens; identical to SEQ ID NO: 66674
  chr3:137783020-137783216
  hypo

SEQ ID NO: 146433 - DNA, 196 bp, Homo sapiens; identical to SEQ ID NO: 17889
  chr3:137822426-137822622
  hypo

SEQ ID NO: 146434 - DNA, 163 bp, Homo sapiens; identical to SEQ ID NO: 66676
  chr3:137831297-137831460
  hypo

SEQ ID NO: 146435 - DNA, 30 bp, Homo sapiens; identical to SEQ ID NO: 66677
  chr3:137880390-137880420
  hypo

SEQ ID NO: 146436 - DNA, 25 bp, Homo sapiens
  chr3:137890018-137890043
  hypo
atagcaaaatacaggccgggcgtgg

SEQ ID NO: 146437 - DNA, 32 bp, Homo sapiens; identical to SEQ ID NO: 17891
  chr3:137891418-137891450
  hypo

SEQ ID NO: 146438 - DNA, 20 bp, Homo sapiens
  chr3:137892590-137892610
  hypo
gcctggggctgggcgcggtg

SEQ ID NO: 146439 - DNA, 18 bp, Homo sapiens
  chr3:138000423-138000441
  hypo
ccccggcctaattgattt

SEQ ID NO: 146440 - DNA, 35 bp, Homo sapiens; identical to SEQ ID NO: 17893
  chr3:138001201-138001236
  hypo

SEQ ID NO: 146441 - DNA, 30 bp, Homo sapiens; identical to SEQ ID NO: 66682
  chr3:138009726-138009756
  hypo

SEQ ID NO: 146442 - DNA, 42 bp, Homo sapiens; identical to SEQ ID NO: 66683
  chr3:138020317-138020359
  hypo

SEQ ID NO: 146443 - DNA, 25 bp, Homo sapiens
  chr3:138058965-138058990
  hypo
tgagccaccgcgcccagccagcatc

SEQ ID NO: 146444 - DNA, 1116 bp, Homo sapiens; identical to SEQ ID NO: 108963
  chr3:138066746-138067862
  hypo

SEQ ID NO: 146445 - DNA, 59 bp, Homo sapiens; identical to SEQ ID NO: 66685
  chr3:138081463-138081522
  hypo

SEQ ID NO: 146446 - DNA, 1021 bp, Homo sapiens; identical to SEQ ID NO: 39697
  chr3:138153255-138154276
  hypo

SEQ ID NO: 146447 - DNA, 15 bp, Homo sapiens
  chr3:138154497-138154512
  hypo
cggcgccgggccccg

SEQ ID NO: 146448 - DNA, 202 bp, Homo sapiens; identical to SEQ ID NO: 66687
  chr3:138158922-138159124
  hypo

SEQ ID NO: 146449 - DNA, 162 bp, Homo sapiens; identical to SEQ ID NO: 108967
  chr3:138327434-138327596
  hypo

SEQ ID NO: 146450 - DNA, 147 bp, Homo sapiens; identical to SEQ ID NO: 66689
  chr3:138413615-138413762
  hypo

SEQ ID NO: 146451 - DNA, 27 bp, Homo sapiens
  chr3:138442408-138442435
  hypo
tcatgctttatacggttacatgtttta

SEQ ID NO: 146452 - DNA, 30 bp, Homo sapiens
  chr3:138479110-138479140
  hypo
taaaaacaccaaatcgctcaatacagatgg

SEQ ID NO: 146453 - DNA, 35 bp, Homo sapiens; identical to SEQ ID NO: 66691
  chr3:138542242-138542277
  hypo

SEQ ID NO: 146454 - DNA, 35 bp, Homo sapiens; identical to SEQ ID NO: 66692
  chr3:138542516-138542551
  hypo

SEQ ID NO: 146455 - DNA, 27 bp, Homo sapiens
  chr3:138572035-138572062
  hypo
aatatttacatgagtggggcacggtgg

SEQ ID NO: 146456 - DNA, 39 bp, Homo sapiens; identical to SEQ ID NO: 17898
  chr3:138577522-138577561
  hypo

SEQ ID NO: 146457 - DNA, 31 bp, Homo sapiens; identical to SEQ ID NO: 17899
  chr3:138634049-138634080
  hypo

SEQ ID NO: 146458 - DNA, 84 bp, Homo sapiens
  chr3:138635479-138635563
  hypo
gctccagattgagcgataaagtgagaccctgtctcaaaaagcaaaacaatatataaaagagctgagcaccgaccagtccaagca

SEQ ID NO: 146459 - DNA, 30 bp, Homo sapiens; identical to SEQ ID NO: 17900
  chr3:138647455-138647485
  hypo

SEQ ID NO: 146460 - DNA, 458 bp, Homo sapiens; identical to SEQ ID NO: 108970
  chr3:138654714-138655172
  hypo

SEQ ID NO: 146461 - DNA, 27 bp, Homo sapiens
  chr3:138679565-138679592
  hypo
cgggcacagacgcgcaagcccagagca

SEQ ID NO: 146462 - DNA, 31 bp, Homo sapiens; identical to SEQ ID NO: 66699
  chr3:138694446-138694477
  hypo

SEQ ID NO: 146463 - DNA, 30 bp, Homo sapiens
  chr3:138942701-138942731
  hypo
ctgtgtgtgtgtgcgcgcacatgtgcttgt

SEQ ID NO: 146464 - DNA, 37 bp, Homo sapiens; identical to SEQ ID NO: 66700
  chr3:138981443-138981480
  hypo

SEQ ID NO: 146465 - DNA, 28 bp, Homo sapiens
  chr3:139077502-139077530
  hypo
atggagcgaaactctgtctcaaaagaaa

SEQ ID NO: 146466 - DNA, 213 bp, Homo sapiens; identical to SEQ ID NO: 66702
  chr3:139180922-139181135
  hypo

SEQ ID NO: 146467 - DNA, 808 bp, Homo sapiens; identical to SEQ ID NO: 39717
  chr3:139258159-139258967
  hypo

SEQ ID NO: 146468 - DNA, 108 bp, Homo sapiens
  chr3:139352979-139353087
  hypo
ccatttgtcacaggccgtcgcggaggcacagtaaggaaggcgacccgggaaggttaagtgccgtcactgcagatgtaacgtgcaaatgctcatcgcttgggaggcagt

SEQ ID NO: 146469 - DNA, 30 bp, Homo sapiens
  chr3:139353359-139353389
  hypo
caatcaaccttcatgcgatctccagtactt

SEQ ID NO: 146470 - DNA, 30 bp, Homo sapiens
  chr3:139398029-139398059
  hypo
tgtccgtgccctctcggatcccttttctct

SEQ ID NO: 146471 - DNA, 30 bp, Homo sapiens
  chr3:139591140-139591170
  hypo
gagcgagagcgagagcgagagagagagaaa

SEQ ID NO: 146472 - DNA, 1784 bp, Homo sapiens; identical to SEQ ID NO: 39719
  chr3:139653417-139655201
  hypo

SEQ ID NO: 146473 - DNA, 499 bp, Homo sapiens; identical to SEQ ID NO: 66706
  chr3:140401391-140401890
  hypo

SEQ ID NO: 146474 - DNA, 153 bp, Homo sapiens; identical to SEQ ID NO: 66707
  chr3:140434138-140434291
  hypo

SEQ ID NO: 146475 - DNA, 29 bp, Homo sapiens
  chr3:140539796-140539825
  hypo
aaaaaaggagggggcggcggacacctctg

SEQ ID NO: 146476 - DNA, 1526 bp, Homo sapiens; identical to SEQ ID NO: 108992
  chr3:140660222-140661748
  hypo

SEQ ID NO: 146477 - DNA, 30 bp, Homo sapiens; identical to SEQ ID NO: 17909
  chr3:140696571-140696601
  hypo

SEQ ID NO: 146478 - DNA, 30 bp, Homo sapiens; identical to SEQ ID NO: 39721
  chr3:140713624-140713654
  hypo

SEQ ID NO: 146479 - DNA, 871 bp, Homo sapiens; identical to SEQ ID NO: 108994
  chr3:140769430-140770301
  hypo

SEQ ID NO: 146480 - DNA, 182 bp, Homo sapiens; identical to SEQ ID NO: 2831
  chr3:140770407-140770589
  hypo

SEQ ID NO: 146481 - DNA, 1209 bp, Homo sapiens; identical to SEQ ID NO: 108996
  chr3:140770643-140771852
  hypo

SEQ ID NO: 146482 - DNA, 30 bp, Homo sapiens; identical to SEQ ID NO: 17913
  chr3:140784660-140784690
  hypo

SEQ ID NO: 146483 - DNA, 30 bp, Homo sapiens; identical to SEQ ID NO: 66715
  chr3:140784974-140785004
  hypo

SEQ ID NO: 146484 - DNA, 30 bp, Homo sapiens; identical to SEQ ID NO: 66716
  chr3:140785458-140785488
  hypo

SEQ ID NO: 146485 - DNA, 39 bp, Homo sapiens; identical to SEQ ID NO: 66717
  chr3:141053874-141053913
  hypo

SEQ ID NO: 146486 - DNA, 30 bp, Homo sapiens
  chr3:141061511-141061541
  hypo
gcaagaagtttagcccgaaataaaaaaact

SEQ ID NO: 146487 - DNA, 233 bp, Homo sapiens; identical to SEQ ID NO: 66718
  chr3:141086061-141086294
  hypo

SEQ ID NO: 146488 - DNA, 30 bp, Homo sapiens
  chr3:141098440-141098470
  hypo
taatcgctgactttccgtagtcgttggtga

SEQ ID NO: 146489 - DNA, 30 bp, Homo sapiens
  chr3:141112740-141112770
  hypo
atggccccacgttggcgattgtgaagcgcc

SEQ ID NO: 146490 - DNA, 314 bp, Homo sapiens
  chr3:141161721-141162035
  hypo
cacaaatgcattttccatcatcgaaacagaaaatagtaataacatgttttccccgctggacttgagggcaagtttcaaaaaggtctccgactccatgagaacagctagcctttgcctggagaggacggacgtctgccacgaggcagagcctgtccgcacacttgccgagcactcatacgctgtttcttccgtagctgaagcttacagaagtcagcctgtacgtgaacatgatggcagttcacctggtaacacagggaaagaaaattgtgaagcccttgcagcgaaaccgaaaacatgccggaagccaaagacat

SEQ ID NO: 146491 - DNA, 30 bp, Homo sapiens; identical to SEQ ID NO: 17916
  chr3:141166409-141166439
  hypo

SEQ ID NO: 146492 - DNA, 520 bp, Homo sapiens; identical to SEQ ID NO: 66721
  chr3:141174173-141174693
  hypo

SEQ ID NO: 146493 - DNA, 62 bp, Homo sapiens
  chr3:141174926-141174988
  hypo
gacacatgatatatacgcctccatctgtacacttgctccccgccttgcgagtgttgaggggg

SEQ ID NO: 146494 - DNA, 30 bp, Homo sapiens
  chr3:141175355-141175385
  hypo
tgccttggtgtgcctcgcactgaagactct

SEQ ID NO: 146495 - DNA, 30 bp, Homo sapiens
  chr3:141182593-141182623
  hypo
cactgtgaggaggagcgcgggggtgggcaa

SEQ ID NO: 146496 - DNA, 29 bp, Homo sapiens
  chr3:141203918-141203947
  hypo
tgttaaagaaacaggttcaaccgggcgca

SEQ ID NO: 146497 - DNA, 30 bp, Homo sapiens; identical to SEQ ID NO: 17918
  chr3:141319348-141319378
  hypo

SEQ ID NO: 146498 - DNA, 34 bp, Homo sapiens; identical to SEQ ID NO: 66725
  chr3:141363514-141363548
  hypo

SEQ ID NO: 146499 - DNA, 139 bp, Homo sapiens; identical to SEQ ID NO: 66726
  chr3:141481967-141482106
  hypo

SEQ ID NO: 146500 - DNA, 111 bp, Homo sapiens
  chr3:141495377-141495488
  hypo
catggttcagagcagcgggcaccggtgcagatcgcccatctccacggcagaggtgatcgtttccagcgcagcggtgcaaagccaaagggcacccacgagttcattacataa

SEQ ID NO: 146501 - DNA, 144 bp, Homo sapiens
  chr3:141495873-141496017
  hypo
cctcgcttggtggggcgcatgggcaaagatgttgaggggccacgtctgaaacttcactgctcttggctccacgcgaaggctccttggcattcagagtctgctcgttagattgtgcccttggaacagtcgcgaccgcatgccgtg

SEQ ID NO: 146502 - DNA, 39 bp, Homo sapiens; identical to SEQ ID NO: 17920
  chr3:141509676-141509715
  hypo

SEQ ID NO: 146503 - DNA, 131 bp, Homo sapiens
  chr3:141523990-141524121
  hypo
ccgtgggcccccctgcgcgtgctccacactctattgaatcaaccttctgacctgtctgtctctaccagtctctaaatcctcaagggcaagggccaggccttacaggtctcggtatccctggaactcattgc

SEQ ID NO: 146504 - DNA, 24 bp, Homo sapiens
  chr3:141560521-141560545
  hypo
ggagagggccgggtgcggtggctc

SEQ ID NO: 146505 - DNA, 30 bp, Homo sapiens
  chr3:141593424-141593454
  hypo
cacgcttattattagcgcacacacacatac

SEQ ID NO: 146506 - DNA, 214 bp, Homo sapiens; identical to SEQ ID NO: 17921
  chr3:141622401-141622615
  hypo

SEQ ID NO: 146507 - DNA, 18 bp, Homo sapiens
  chr3:141637292-141637310
  hypo
ttttttttttttgagacg

SEQ ID NO: 146508 - DNA, 30 bp, Homo sapiens; identical to SEQ ID NO: 66731
  chr3:141654232-141654262
  hypo

SEQ ID NO: 146509 - DNA, 24 bp, Homo sapiens
  chr3:141656342-141656366
  hypo
gtgagccaccgcgcccggtgtgcc

SEQ ID NO: 146510 - DNA, 406 bp, Homo sapiens; identical to SEQ ID NO: 17923
  chr3:141656808-141657214
  hypo

SEQ ID NO: 146511 - DNA, 92 bp, Homo sapiens
  chr3:141664266-141664358
  hypo
ggcatacccacctcttttgtccaaaactcaagagtgatggtggtgaaccaagtgcgtgaaggaactcagtactgaaacgtgatccccggagt

SEQ ID NO: 146512 - DNA, 105 bp, Homo sapiens
  chr3:141664565-141664670
  hypo
atgtgacatgaagctcggccatggtgaagtatggtaagtgacaaatggcatgcattgaagcacgacaagggatgagtttttaaatccaaacgtgatctggggaat

SEQ ID NO: 146513 - DNA, 30 bp, Homo sapiens
  chr3:141671412-141671442
  hypo
cagggggtctcgcctcgggactcggagcag

SEQ ID NO: 146514 - DNA, 24 bp, Homo sapiens
  chr3:141790269-141790293
  hypo
gaatacacgcgtgagccaccgcac

SEQ ID NO: 146515 - DNA, 31 bp, Homo sapiens
  chr3:141832991-141833022
  hypo
gcgagaatccgtctcaaaaaaaaaaaaaggt

SEQ ID NO: 146516 - DNA, 29 bp, Homo sapiens
  chr3:141863646-141863675
  hypo
actgggattataggcgtgagtcactgcac

SEQ ID NO: 146517 - DNA, 205 bp, Homo sapiens
  chr3:141868981-141869186
  hypo
ggtcattctgtcccgcggaaactgcacacaccccaaatacccgtacacttggttccatatgaaaagattttgttcattcgttcgtgccgaagttaaaaaccccgtgtgaacagcgcattaaaacgattagatctttctcattttactccagtcaaatcttatagatcttctatatgccactttgtttgtttttgagacggggtct

SEQ ID NO: 146518 - DNA, 36 bp, Homo sapiens; identical to SEQ ID NO: 66736
  chr3:141954423-141954459
  hypo

SEQ ID NO: 146519 - DNA, 31 bp, Homo sapiens; identical to SEQ ID NO: 66737
  chr3:141959959-141959990
  hypo

SEQ ID NO: 146520 - DNA, 30 bp, Homo sapiens; identical to SEQ ID NO: 66738
  chr3:141991373-141991403
  hypo

SEQ ID NO: 146521 - DNA, 20 bp, Homo sapiens
  chr3:142102828-142102848
  hypo
aaggctgggcgcagtggctc

SEQ ID NO: 146522 - DNA, 19 bp, Homo sapiens
  chr3:142103147-142103166
  hypo
aagcataaaagacaagttt

SEQ ID NO: 146523 - DNA, 90 bp, Homo sapiens
  chr3:142103577-142103667
  hypo
ttctaggacgataatcgtcaactatcgtaaactatcaactcataatcaagtgtgtaaataaactttaaataaatacgctagcagttccag

SEQ ID NO: 146524 - DNA, 103 bp, Homo sapiens; identical to SEQ ID NO: 17927
  chr3:142321773-142321876
  hypo

SEQ ID NO: 146525 - DNA, 16 bp, Homo sapiens
  chr3:142348347-142348363
  hypo
agaaataatttatata

SEQ ID NO: 146526 - DNA, 41 bp, Homo sapiens; identical to SEQ ID NO: 66742
  chr3:142354391-142354432
  hypo

SEQ ID NO: 146527 - DNA, 30 bp, Homo sapiens
  chr3:142367279-142367309
  hypo
acaaactaaaaaagacgagaaaattcagtt

SEQ ID NO: 146528 - DNA, 30 bp, Homo sapiens
  chr3:142447934-142447964
  hypo
aaacattgccatggcgaacggttcagggat

SEQ ID NO: 146529 - DNA, 181 bp, Homo sapiens; identical to SEQ ID NO: 66743
  chr3:142499676-142499857
  hypo

SEQ ID NO: 146530 - DNA, 199 bp, Homo sapiens
  chr3:142537574-142537773
  hypo
attgtgcctggatgataaaatctgttttaagactctcatcggcaaaaagccaaattcaactagtaaggtatttcagctacgctaacaccaggaagctggactgagtggttagatcagccatgtcccgctctgcagtgctgtaggtctgttgtggtttcaaatgcctgctatgaagaatgcaccgcgttaacgtgaaaga

SEQ ID NO: 146531 - DNA, 30 bp, Homo sapiens
  chr3:142539810-142539840
  hypo
gtagatgttgatgatcgagactgtggcgtg

SEQ ID NO: 146532 - DNA, 30 bp, Homo sapiens; identical to SEQ ID NO: 66745
  chr3:142681000-142681030
  hypo

SEQ ID NO: 146533 - DNA, 30 bp, Homo sapiens; identical to SEQ ID NO: 66746
  chr3:142681386-142681416
  hypo

SEQ ID NO: 146534 - DNA, 1008 bp, Homo sapiens; identical to SEQ ID NO: 109021
  chr3:142682049-142683057
  hypo

SEQ ID NO: 146535 - DNA, 77 bp, Homo sapiens; identical to SEQ ID NO: 17930
  chr3:142683682-142683759
  hypo

SEQ ID NO: 146536 - DNA, 35 bp, Homo sapiens; identical to SEQ ID NO: 66749
  chr3:142718176-142718211
  hypo

SEQ ID NO: 146537 - DNA, 34 bp, Homo sapiens; identical to SEQ ID NO: 17932
  chr3:142718450-142718484
  hypo

SEQ ID NO: 146538 - DNA, 34 bp, Homo sapiens; identical to SEQ ID NO: 66751
  chr3:142725293-142725327
  hypo

SEQ ID NO: 146539 - DNA, 40 bp, Homo sapiens; identical to SEQ ID NO: 66752
  chr3:142727624-142727664
  hypo

SEQ ID NO: 146540 - DNA, 39 bp, Homo sapiens; identical to SEQ ID NO: 17934
  chr3:142727843-142727882
  hypo

SEQ ID NO: 146541 - DNA, 45 bp, Homo sapiens; identical to SEQ ID NO: 66754
  chr3:142728139-142728184
  hypo

SEQ ID NO: 146542 - DNA, 30 bp, Homo sapiens
  chr3:142743665-142743695
  hypo
gaccagacattggtacgatcgactccaata

SEQ ID NO: 146543 - DNA, 132 bp, Homo sapiens
  chr3:142775175-142775307
  hypo
cctaaaaggtctaggcgatcacggtctagatctcctaaaaaatcaggaaagaagtccagatcccagtccagatctccacacaggtctcataaaaagtcaaagaaaaacaaacactgacgtaaatttttaaga

SEQ ID NO: 146544 - DNA, 36 bp, Homo sapiens; identical to SEQ ID NO: 17936
  chr3:142788518-142788554
  hypo

SEQ ID NO: 146545 - DNA, 46 bp, Homo sapiens; identical to SEQ ID NO: 66756
  chr3:142791152-142791198
  hypo

SEQ ID NO: 146546 - DNA, 17 bp, Homo sapiens
  chr3:142796897-142796914
  hypo
taaattagccaggcatg

SEQ ID NO: 146547 - DNA, 159 bp, Homo sapiens
  chr3:142820240-142820399
  hypo
aaagagaaacctatagaaggacgaagatatatcgtctgaaaactaatgagatgttacattttgaaccaaaatcgcatctaacttttcagcatgtaattaggcaagatctgagccaaagtataaagagttgacataaaattttgggaatacggctgggtg

SEQ ID NO: 146548 - DNA, 522 bp, Homo sapiens; identical to SEQ ID NO: 2840
  chr3:142837796-142838318
  hypo

SEQ ID NO: 146549 - DNA, 167 bp, Homo sapiens; identical to SEQ ID NO: 2841
  chr3:142838479-142838646
  hypo

SEQ ID NO: 146550 - DNA, 196 bp, Homo sapiens; identical to SEQ ID NO: 2842
  chr3:142838876-142839072
  hypo

SEQ ID NO: 146551 - DNA, 321 bp, Homo sapiens; identical to SEQ ID NO: 2843
  chr3:142839204-142839525
  hypo

SEQ ID NO: 146552 - DNA, 126 bp, Homo sapiens; identical to SEQ ID NO: 2844
  chr3:142839562-142839688
  hypo

SEQ ID NO: 146553 - DNA, 118 bp, Homo sapiens; identical to SEQ ID NO: 2845
  chr3:142839783-142839901
  hypo

SEQ ID NO: 146554 - DNA, 183 bp, Homo sapiens; identical to SEQ ID NO: 2846
  chr3:142839944-142840127
  hypo

SEQ ID NO: 146555 - DNA, 26 bp, Homo sapiens
  chr3:142861655-142861681
  hypo
tgggagctgcccgccccatcttggga

SEQ ID NO: 146556 - DNA, 1051 bp, Homo sapiens
  chr3:142895257-142896308
  hypo
gcctcctggtggcggagaccccggtgggggtagcggggggttcccgggaggccgagggaagcaagacatcggggacattctgcagcagataatgaccatcaccgaccagagcctggacgaggcccaggccaagaaacacgccctaaactgccaccgaatgaagcctgctctctttagcgtcctgtgtgaaatcaaggagaaaaccggcctcagcattcggagctcccaggaggaggagccggtggacccacagctgatgcgcttggacaacatgcttctggcagagggtgtggctgggcccgagaaagggggcggctcagcagcagcagctgcagccgctgcagcctctggtggtggcgtgtcccctgacaactccatcgaacactcggactatcgcagcaaacttgcccagatccgtcacatataccactcggaactggagaagtatgagcaggcatgtaatgagttcacgacccatgtcatgaacctgctgagggagcagagccgcaccaggcccgtggcccccaaagagatggaacgcatggtgagcatcatccatcgaaagttcagcgccatccagatgcagctgaagcagagcacctgcgaggctatgatgatgctgcgctcccgtttcctggatgccagacgaaagcgccgtaacttcagcagacaggccactgaggtcctaaatgagtatttctactcccacctgagtaacccatatcctagtgaggaggccaaggaggagcttgccaagaagtgtggcatcaccgtgtctcaggtctccaaccggtttggcaacaagaagattcgctataagaaaaacatcggaaagttccaagaggaggcaaacatctatgctgtcaagacagccgtgtcagtcacccaggggggccacagcagcaccagctccccgacacccccttcctctgcaggctctggcggctctttcaatatctcaggatctggagacatgtttctggggatgcctgggctcaacggagattcctattctgcttcccaggtggcatcactccgacgctcgatgggg

SEQ ID NO: 146557 - DNA, 31 bp, Homo sapiens; identical to SEQ ID NO: 17946
  chr3:142913605-142913636
  hypo

SEQ ID NO: 146558 - DNA, 34 bp, Homo sapiens
  chr3:142930275-142930309
  hypo
aggcgtgagccactgcacccggtcaccacactct

SEQ ID NO: 146559 - DNA, 103 bp, Homo sapiens; identical to SEQ ID NO: 66770
  chr3:142957647-142957750
  hypo

SEQ ID NO: 146560 - DNA, 30 bp, Homo sapiens; identical to SEQ ID NO: 66771
  chr3:142973742-142973772
  hypo

SEQ ID NO: 146561 - DNA, 99 bp, Homo sapiens; identical to SEQ ID NO: 17948
  chr3:143027448-143027547
  hypo

SEQ ID NO: 146562 - DNA, 30 bp, Homo sapiens
  chr3:143150536-143150566
  hypo
atggtcttgatctcccgacctcgtgaccca

SEQ ID NO: 146563 - DNA, 358 bp, Homo sapiens
  chr3:143316154-143316512
  hypo
ttgacatggtgggcacgctggcgtccagagaaagagagagccaaagctgtccttcttgcagacagacaggagggggccaaaacacagctcaggcttgtttgtgctcaaagagagaaagttaagctgttgaccctgaaggcaagggagaactggcctcgcaaccttgcgtgggggtggccaattcaagcagctgagacagagcggacagcgtaagaaaagctgctcaggagagaggtagtttaagaaagctgttgatgagagctgctgctgaataaaaccatattcacccgcctgtggccccccgagggttctttctgctcatccacccactcccctcggacttcagcatggtgtggac

SEQ ID NO: 146564 - DNA, 79 bp, Homo sapiens
  chr3:143316754-143316833
  hypo
gtagagtggcatattcggcactgtggggttaaacataagcagtgggcgctgccttccctagaatcgcagtatcgagagc

SEQ ID NO: 146565 - DNA, 73 bp, Homo sapiens
  chr3:143317070-143317143
  hypo
cagctgttgccatggcgattttcatttttaaaaactgtatccatacaaagacaggcaacgcagctgtttccat

SEQ ID NO: 146566 - DNA, 30 bp, Homo sapiens
  chr3:143317415-143317445
  hypo
ctttgaaaaagacaccgtcttcctccaaat

SEQ ID NO: 146567 - DNA, 25 bp, Homo sapiens
  chr3:143614334-143614359
  hypo
tctgtcggccgggcgcggtggctca

SEQ ID NO: 146568 - DNA, 31 bp, Homo sapiens; identical to SEQ ID NO: 66774
  chr3:145833014-145833045
  hypo

SEQ ID NO: 146569 - DNA, 884 bp, Homo sapiens; identical to SEQ ID NO: 109036
  chr3:145878416-145879300
  hypo

SEQ ID NO: 146570 - DNA, 31 bp, Homo sapiens; identical to SEQ ID NO: 17951
  chr3:145969119-145969150
  hypo

SEQ ID NO: 146571 - DNA, 40 bp, Homo sapiens; identical to SEQ ID NO: 17952
  chr3:145970677-145970717
  hypo

SEQ ID NO: 146572 - DNA, 30 bp, Homo sapiens
  chr3:148221195-148221225
  hypo
acaggcgtgagccaccgcgcccagcgacaa

SEQ ID NO: 146573 - DNA, 141 bp, Homo sapiens; identical to SEQ ID NO: 66778
  chr3:148394229-148394370
  hypo

SEQ ID NO: 146574 - DNA, 30 bp, Homo sapiens; identical to SEQ ID NO: 17953
  chr3:148450845-148450875
  hypo

SEQ ID NO: 146575 - DNA, 31 bp, Homo sapiens
  chr3:148463858-148463889
  hypo
cgcgcccagcgtgaaggcttctatttagtta

SEQ ID NO: 146576 - DNA, 40 bp, Homo sapiens
  chr3:148472161-148472201
  hypo
taaaatccataaaggtctggccgggcgcggtggctcacac

SEQ ID NO: 146577 - DNA, 30 bp, Homo sapiens
  chr3:148497047-148497077
  hypo
gaagctagccacgcgcgtacagaaggtgaa

SEQ ID NO: 146578 - DNA, 26 bp, Homo sapiens
  chr3:148523201-148523227
  hypo
taaaagacttcaaaggtgggccgggc

SEQ ID NO: 146579 - DNA, 25 bp, Homo sapiens
  chr3:148523466-148523491
  hypo
gagcgagactcctactcaaaaaaaa

SEQ ID NO: 146580 - DNA, 204 bp, Homo sapiens
  chr3:148556039-148556243
  hypo
taaacaaattaacaaaaataataatgataatttcaactcaagggttgggtgcaggtaagaggatagcaatatgttctggaagctttgaaatgaaagaggatgtcattttctggtcctcttgggtttttttttttcgttccgagaagctcatccttattaggtaagatttgttctttcacattatgatatcgagacataattgtc

SEQ ID NO: 146581 - DNA, 30 bp, Homo sapiens; identical to SEQ ID NO: 17955
  chr3:148704508-148704538
  hypo

SEQ ID NO: 146582 - DNA, 228 bp, Homo sapiens
  chr3:148705304-148705532
  hypo
tcctgctgagccttaaacctccgggagatttcctctttgaactccttgaccgaggctcgatcgcagatcacaatttcctccttgtccttgggggtcttgacggtgacccgaatggggggcctcgtctcggccccgctcggctccgccatgccgccgccgccacccggccgcccgccagcccgcccggctcctcctcctccccgctcgcccggccggcccggctcggct

SEQ ID NO: 146583 - DNA, 215 bp, Homo sapiens; identical to SEQ ID NO: 109081
  chr3:148709992-148710207
  hypo

SEQ ID NO: 146584 - DNA, 34 bp, Homo sapiens; identical to SEQ ID NO: 17957
  chr3:148726131-148726165
  hypo

SEQ ID NO: 146585 - DNA, 55 bp, Homo sapiens
  chr3:148802383-148802438
  hypo
cgcacacatcacctgcgaattctcttattttctaggttaacgccagaaatataat

SEQ ID NO: 146586 - DNA, 39 bp, Homo sapiens; identical to SEQ ID NO: 66787
  chr3:148802989-148803028
  hypo

SEQ ID NO: 146587 - DNA, 743 bp, Homo sapiens; identical to SEQ ID NO: 109082
  chr3:148803821-148804564
  hypo

SEQ ID NO: 146588 - DNA, 239 bp, Homo sapiens
  chr3:148804768-148805007
  hypo
gtggtgaaccgtggggactttcgctccaaattttcatgttaagcctcagcgtatgcatgagacacaacgagtttggaaaatcttaaatggaacttagagtcccctccccacctctttttgttatttttaaggaaaattttcctttcttggtgcaggaaacccatcacatgtttattacagctatgggggcgtttgcctgaaatggtggacgggaccattttccccgtgggcacttggct

SEQ ID NO: 146589 - DNA, 30 bp, Homo sapiens
  chr3:148805647-148805677
  hypo
acaggcatgagccaccgtgccaggccggta

SEQ ID NO: 146590 - DNA, 19 bp, Homo sapiens
  chr3:148808201-148808220
  hypo
gactccctctcaaaaaaaa

SEQ ID NO: 146591 - DNA, 59 bp, Homo sapiens; identical to SEQ ID NO: 17958
  chr3:148867080-148867139
  hypo

SEQ ID NO: 146592 - DNA, 30 bp, Homo sapiens
  chr3:148870750-148870780
  hypo
acagtcaggggccatcggaacatacaagca

SEQ ID NO: 146593 - DNA, 63 bp, Homo sapiens
  chr3:148904408-148904471
  hypo
atattccatgtacatcggcctcatttccggcgctgaataagtaccacacgaccgaatctcctt

SEQ ID NO: 146594 - DNA, 144 bp, Homo sapiens
  chr3:149096958-149097102
  hypo
taaatcagtggagttgggaagcgtggaaccacccacctgctcaggcggaggcaggcaaatcctcataagagtgtcattgggtcaccactatgtgtccaacaacagggaacgtgtgtttggcccgatggcttagagacaggattc

SEQ ID NO: 146595 - DNA, 30 bp, Homo sapiens; identical to SEQ ID NO: 66792
  chr3:149182947-149182977
  hypo

SEQ ID NO: 146596 - DNA, 33 bp, Homo sapiens; identical to SEQ ID NO: 66793
  chr3:149233986-149234019
  hypo

SEQ ID NO: 146597 - DNA, 30 bp, Homo sapiens; identical to SEQ ID NO: 66794
  chr3:149260170-149260200
  hypo

SEQ ID NO: 146598 - DNA, 25 bp, Homo sapiens
  chr3:149286554-149286579
  hypo
ttgttgtttttgttgttgagacgga

SEQ ID NO: 146599 - DNA, 31 bp, Homo sapiens; identical to SEQ ID NO: 66796
  chr3:149345428-149345459
  hypo

SEQ ID NO: 146600 - DNA, 121 bp, Homo sapiens
  chr3:149360169-149360290
  hypo
gcactccagcctaggcgacaagcaaaactctgtcacacacacacacacacacacacgaaagtacgaatacccaaatataagttggatgatataattttgtaagagaaatccggccgggcac

SEQ ID NO: 146601 - DNA, 45 bp, Homo sapiens
  chr3:149470936-149470981
  hypo
taatgatgacaatgaccgatgcttacaggattcagagcaatgttt

SEQ ID NO: 146602 - DNA, 30 bp, Homo sapiens
  chr3:149686216-149686246
  hypo
tgcagtcaccatcgacgtatagactatctc

SEQ ID NO: 146603 - DNA, 289 bp, Homo sapiens; identical to SEQ ID NO: 66797
  chr3:149700883-149701172
  hypo

SEQ ID NO: 146604 - DNA, 31 bp, Homo sapiens; identical to SEQ ID NO: 66798
  chr3:149858728-149858759
  hypo

SEQ ID NO: 146605 - DNA, 174 bp, Homo sapiens; identical to SEQ ID NO: 66799
  chr3:149931180-149931354
  hypo

SEQ ID NO: 146606 - DNA, 209 bp, Homo sapiens
  chr3:149956589-149956798
  hypo
ccttgtccgaggctccgatgttatccaggtgattcatcatttaatgctgttggcttcaacatggatttaatggtaactaaaccaagtgcacactatgtgaagatctattcacttggaggtccttcatttcaggtcaccaggtatgcccctgggctcctgccgcagctgatcgggtgctaggtgctgaggatacacggtgagttccttct

SEQ ID NO: 146607 - DNA, 190 bp, Homo sapiens; identical to SEQ ID NO: 66800
  chr3:150026517-150026707
  hypo

SEQ ID NO: 146608 - DNA, 19 bp, Homo sapiens
  chr3:150045490-150045509
  hypo
cctcccgaagtgctgggat

SEQ ID NO: 146609 - DNA, 31 bp, Homo sapiens; identical to SEQ ID NO: 66802
  chr3:150057189-150057220
  hypo

SEQ ID NO: 146610 - DNA, 151 bp, Homo sapiens; identical to SEQ ID NO: 66803
  chr3:150086092-150086243
  hypo

SEQ ID NO: 146611 - DNA, 30 bp, Homo sapiens
  chr3:150150307-150150337
  hypo
ctaattcgccaaattcgatgtatttttttc

SEQ ID NO: 146612 - DNA, 104 bp, Homo sapiens; identical to SEQ ID NO: 66804
  chr3:150187003-150187107
  hypo

SEQ ID NO: 146613 - DNA, 164 bp, Homo sapiens; identical to SEQ ID NO: 66805
  chr3:150237437-150237601
  hypo

SEQ ID NO: 146614 - DNA, 103 bp, Homo sapiens; identical to SEQ ID NO: 17963
  chr3:150237900-150238003
  hypo

SEQ ID NO: 146615 - DNA, 228 bp, Homo sapiens; identical to SEQ ID NO: 109099
  chr3:150320965-150321193
  hypo

SEQ ID NO: 146616 - DNA, 431 bp, Homo sapiens; identical to SEQ ID NO: 66808
  chr3:150329377-150329808
  hypo

SEQ ID NO: 146617 - DNA, 160 bp, Homo sapiens; identical to SEQ ID NO: 66809
  chr3:150379954-150380114
  hypo

SEQ ID NO: 146618 - DNA, 42 bp, Homo sapiens
  chr3:150420383-150420425
  hypo
caaggatgtgtgcttctagcacagccacgggtagaggacagg

SEQ ID NO: 146619 - DNA, 197 bp, Homo sapiens; identical to SEQ ID NO: 66810
  chr3:150443085-150443282
  hypo

SEQ ID NO: 146620 - DNA, 24 bp, Homo sapiens
  chr3:150445180-150445204
  hypo
gagccttacagaggccgggcacgg

SEQ ID NO: 146621 - DNA, 27 bp, Homo sapiens
  chr3:150470111-150470138
  hypo
taggccaggtgcagtggctcacgcctg

SEQ ID NO: 146622 - DNA, 26 bp, Homo sapiens
  chr3:150470377-150470403
  hypo
agagcgagactccatctcagtattaa

SEQ ID NO: 146623 - DNA, 30 bp, Homo sapiens
  chr3:150496669-150496699
  hypo
cccgggctccccgacgcccccagttcaaac

SEQ ID NO: 146624 - DNA, 30 bp, Homo sapiens; identical to SEQ ID NO: 66814
  chr3:150497159-150497189
  hypo

SEQ ID NO: 146625 - DNA, 187 bp, Homo sapiens; identical to SEQ ID NO: 66815
  chr3:150497416-150497603
  hypo

SEQ ID NO: 146626 - DNA, 28 bp, Homo sapiens
  chr3:150670180-150670208
  hypo
ggctcagctgtaggcaatgtgcgtcctg

SEQ ID NO: 146627 - DNA, 87 bp, Homo sapiens; identical to SEQ ID NO: 66817
  chr3:150670267-150670354
  hypo

SEQ ID NO: 146628 - DNA, 197 bp, Homo sapiens; identical to SEQ ID NO: 39794
  chr3:150802802-150802999
  hypo

SEQ ID NO: 146629 - DNA, 1870 bp, Homo sapiens; identical to SEQ ID NO: 2872
  chr3:150803025-150804895
  hypo

SEQ ID NO: 146630 - DNA, 252 bp, Homo sapiens; identical to SEQ ID NO: 2873
  chr3:150804936-150805188
  hypo

SEQ ID NO: 146631 - DNA, 97 bp, Homo sapiens
  chr3:150848437-150848534
  hypo
gctgacctgtgggcgcggctcttccttcacctgtgggtgcacatgggcctgctcccttgctccactgtggtctctgcccagacgcgcttcctaagaa

SEQ ID NO: 146632 - DNA, 30 bp, Homo sapiens; identical to SEQ ID NO: 17970
  chr3:150872693-150872723
  hypo

SEQ ID NO: 146633 - DNA, 29 bp, Homo sapiens
  chr3:150948036-150948065
  hypo
caggcgtgagccaccgcacccggccggga

SEQ ID NO: 146634 - DNA, 30 bp, Homo sapiens; identical to SEQ ID NO: 17971
  chr3:151056254-151056284
  hypo

SEQ ID NO: 146635 - DNA, 157 bp, Homo sapiens; identical to SEQ ID NO: 66823
  chr3:151112505-151112662
  hypo

SEQ ID NO: 146636 - DNA, 31 bp, Homo sapiens; identical to SEQ ID NO: 66824
  chr3:151142108-151142139
  hypo

SEQ ID NO: 146637 - DNA, 30 bp, Homo sapiens
  chr3:151176345-151176375
  hypo
atggaagtcaggtaccgaaatgtgcagtgt

SEQ ID NO: 146638 - DNA, 18 bp, Homo sapiens
  chr3:151869974-151869992
  hypo
taaaagatagcactgact

SEQ ID NO: 146639 - DNA, 23 bp, Homo sapiens
  chr3:151913601-151913624
  hypo
tgcccggccggtgttttgttttc

SEQ ID NO: 146640 - DNA, 18 bp, Homo sapiens
  chr3:151944526-151944544
  hypo
caggtgcagtggctcacg

SEQ ID NO: 146641 - DNA, 30 bp, Homo sapiens; identical to SEQ ID NO: 66828
  chr3:152549375-152549405
  hypo

SEQ ID NO: 146642 - DNA, 84 bp, Homo sapiens; identical to SEQ ID NO: 66829
  chr3:152786502-152786586
  hypo

SEQ ID NO: 146643 - DNA, 121 bp, Homo sapiens; identical to SEQ ID NO: 66830
  chr3:152830628-152830749
  hypo

SEQ ID NO: 146644 - DNA, 30 bp, Homo sapiens; identical to SEQ ID NO: 17975
  chr3:152877466-152877496
  hypo

SEQ ID NO: 146645 - DNA, 150 bp, Homo sapiens; identical to SEQ ID NO: 17976
  chr3:152877716-152877866
  hypo

SEQ ID NO: 146646 - DNA, 40 bp, Homo sapiens; identical to SEQ ID NO: 66833
  chr3:152891477-152891517
  hypo

SEQ ID NO: 146647 - DNA, 46 bp, Homo sapiens; identical to SEQ ID NO: 17977
  chr3:153010522-153010568
  hypo

SEQ ID NO: 146648 - DNA, 46 bp, Homo sapiens; identical to SEQ ID NO: 17978
  chr3:153010747-153010793
  hypo

SEQ ID NO: 146649 - DNA, 38 bp, Homo sapiens
  chr3:153403753-153403791
  hypo
tttttttttttttttttgagacggagtggagtctctgt

SEQ ID NO: 146650 - DNA, 38 bp, Homo sapiens
  chr3:153404030-153404068
  hypo
agccaccgcgcccgggcgagtaatctttagatatttgt

SEQ ID NO: 146651 - DNA, 30 bp, Homo sapiens; identical to SEQ ID NO: 17979
  chr3:153811970-153812000
  hypo

SEQ ID NO: 146652 - DNA, 22 bp, Homo sapiens
  chr3:153824797-153824819
  hypo
ttgctttttttttttttgagac

SEQ ID NO: 146653 - DNA, 82 bp, Homo sapiens; identical to SEQ ID NO: 66838
  chr3:153824878-153824960
  hypo

SEQ ID NO: 146654 - DNA, 162 bp, Homo sapiens
  chr3:154907061-154907223
  hypo
ttacaggtgtaagccaagcgcccggtccaaaattgaagttttgtgcaagatgataattttggggaaaacagtttatagcattatgcagatatcttcactttgctcagaaaatgtcattggcccggagacctcaggaaagctatttaacgcctctgaaactta

SEQ ID NO: 146655 - DNA, 30 bp, Homo sapiens; identical to SEQ ID NO: 17980
  chr3:155059288-155059318
  hypo

SEQ ID NO: 146656 - DNA, 43 bp, Homo sapiens
  chr3:155315611-155315654
  hypo
aagaagatgaagtataggttgcgtttactcattttatctgaca

SEQ ID NO: 146657 - DNA, 16 bp, Homo sapiens
  chr3:155351687-155351703
  hypo
gcgagactctgtctca

SEQ ID NO: 146658 - DNA, 40 bp, Homo sapiens; identical to SEQ ID NO: 66842
  chr3:155454718-155454758
  hypo

SEQ ID NO: 146659 - DNA, 39 bp, Homo sapiens; identical to SEQ ID NO: 17981
  chr3:155454997-155455036
  hypo

SEQ ID NO: 146660 - DNA, 159 bp, Homo sapiens; identical to SEQ ID NO: 66844
  chr3:155460890-155461049
  hypo

SEQ ID NO: 146661 - DNA, 30 bp, Homo sapiens; identical to SEQ ID NO: 17982
  chr3:155524961-155524991
  hypo

SEQ ID NO: 146662 - DNA, 30 bp, Homo sapiens
  chr3:155525322-155525352
  hypo
caatagaaagtaaataacagccgggcgtgg

SEQ ID NO: 146663 - DNA, 28 bp, Homo sapiens
  chr3:155668814-155668842
  hypo
cgcgcccggcctagttttatttcttgat

SEQ ID NO: 146664 - DNA, 42 bp, Homo sapiens; identical to SEQ ID NO: 2887
  chr3:155722291-155722333
  hypo

SEQ ID NO: 146665 - DNA, 43 bp, Homo sapiens; identical to SEQ ID NO: 17984
  chr3:156002787-156002830
  hypo

SEQ ID NO: 146666 - DNA, 86 bp, Homo sapiens
  chr3:156015532-156015618
  hypo
aaaaggcacttagcgcgtgtgtgtgtgtgtgcgcgtgtgctcgtgtgcgtgtgtgtgtgcatgcaagtctccgtatggggaaaagt

SEQ ID NO: 146667 - DNA, 30 bp, Homo sapiens
  chr3:156016088-156016118
  hypo
atgtgcgcacgtggacgtgaaggagtctga

SEQ ID NO: 146668 - DNA, 63 bp, Homo sapiens
  chr3:156396586-156396649
  hypo
acaatgaaagttttacgatttgaacaattcatatgtcagttcaacgtgcgtgtgactgagaag

SEQ ID NO: 146669 - DNA, 30 bp, Homo sapiens; identical to SEQ ID NO: 39823
  chr3:156406981-156407011
  hypo

SEQ ID NO: 146670 - DNA, 30 bp, Homo sapiens; identical to SEQ ID NO: 39824
  chr3:156435624-156435654
  hypo

SEQ ID NO: 146671 - DNA, 219 bp, Homo sapiens; identical to SEQ ID NO: 17985
  chr3:156543099-156543318
  hypo

SEQ ID NO: 146672 - DNA, 30 bp, Homo sapiens; identical to SEQ ID NO: 17986
  chr3:156636841-156636871
  hypo

SEQ ID NO: 146673 - DNA, 164 bp, Homo sapiens
  chr3:156795058-156795222
  hypo
tcaggttttcccacagcctggcgagaatagctcctgaaatcaaccaacgccctctgtcctgactccacctctgccacagctactgcagttctttggttatcctgataaccgaaggccactctggaaaggtgtccactgggaacgactggcactctgccttggga

SEQ ID NO: 146674 - DNA, 168 bp, Homo sapiens; identical to SEQ ID NO: 2891
  chr3:156799360-156799528
  hypo

SEQ ID NO: 146675 - DNA, 44 bp, Homo sapiens
  chr3:156843277-156843321
  hypo
aatatacctttgtaacaaggccgggcgcggtgcaatcccagcac

SEQ ID NO: 146676 - DNA, 33 bp, Homo sapiens
  chr3:156862935-156862968
  hypo
caggattttgccgggcgcggtggctcatgcctg

SEQ ID NO: 146677 - DNA, 30 bp, Homo sapiens; identical to SEQ ID NO: 66855
  chr3:156930064-156930094
  hypo

SEQ ID NO: 146678 - DNA, 43 bp, Homo sapiens; identical to SEQ ID NO: 17988
  chr3:157866878-157866921
  hypo

SEQ ID NO: 146679 - DNA, 30 bp, Homo sapiens; identical to SEQ ID NO: 66857
  chr3:158176354-158176384
  hypo

SEQ ID NO: 146680 - DNA, 98 bp, Homo sapiens; identical to SEQ ID NO: 66858
  chr3:158361236-158361334
  hypo

SEQ ID NO: 146681 - DNA, 30 bp, Homo sapiens
  chr3:158369913-158369943
  hypo
ctgaattaagggcggcggccactgaccacc

SEQ ID NO: 146682 - DNA, 22 bp, Homo sapiens
  chr3:158400513-158400535
  hypo
tgctttatgactgtcataggcc

SEQ ID NO: 146683 - DNA, 38 bp, Homo sapiens; identical to SEQ ID NO: 66860
  chr3:158434647-158434685
  hypo

SEQ ID NO: 146684 - DNA, 30 bp, Homo sapiens; identical to SEQ ID NO: 17989
  chr3:158441968-158441998
  hypo

SEQ ID NO: 146685 - DNA, 77 bp, Homo sapiens; identical to SEQ ID NO: 66862
  chr3:158448985-158449062
  hypo

SEQ ID NO: 146686 - DNA, 33 bp, Homo sapiens; identical to SEQ ID NO: 66863
  chr3:158451329-158451362
  hypo

SEQ ID NO: 146687 - DNA, 30 bp, Homo sapiens
  chr3:158488406-158488436
  hypo
ctgctttccggtttccgacatcgtgtttac

SEQ ID NO: 146688 - DNA, 30 bp, Homo sapiens
  chr3:158489083-158489113
  hypo
aaaagcgagcaattacggtgtgctgaccat

SEQ ID NO: 146689 - DNA, 194 bp, Homo sapiens; identical to SEQ ID NO: 66864
  chr3:158690124-158690318
  hypo

SEQ ID NO: 146690 - DNA, 38 bp, Homo sapiens; identical to SEQ ID NO: 66865
  chr3:159001223-159001261
  hypo

SEQ ID NO: 146691 - DNA, 30 bp, Homo sapiens
  chr3:159502452-159502482
  hypo
attttattttggagacggagtcttgtgacg

SEQ ID NO: 146692 - DNA, 212 bp, Homo sapiens; identical to SEQ ID NO: 109182
  chr3:159706813-159707025
  hypo

SEQ ID NO: 146693 - DNA, 171 bp, Homo sapiens; identical to SEQ ID NO: 66867
  chr3:159814275-159814446
  hypo

SEQ ID NO: 146694 - DNA, 31 bp, Homo sapiens; identical to SEQ ID NO: 17990
  chr3:160115509-160115540
  hypo

SEQ ID NO: 146695 - DNA, 30 bp, Homo sapiens; identical to SEQ ID NO: 66869
  chr3:160115719-160115749
  hypo

SEQ ID NO: 146696 - DNA, 520 bp, Homo sapiens; identical to SEQ ID NO: 39863
  chr3:160167468-160167988
  hypo

SEQ ID NO: 146697 - DNA, 30 bp, Homo sapiens; identical to SEQ ID NO: 17992
  chr3:160170174-160170204
  hypo

SEQ ID NO: 146698 - DNA, 39 bp, Homo sapiens; identical to SEQ ID NO: 66872
  chr3:160328304-160328343
  hypo

SEQ ID NO: 146699 - DNA, 1657 bp, Homo sapiens; identical to SEQ ID NO: 109197
  chr3:160472421-160474078
  hypo

SEQ ID NO: 146700 - DNA, 28 bp, Homo sapiens
  chr3:160590694-160590722
  hypo
gcacagcgggactctgtctgggaaaaaa

SEQ ID NO: 146701 - DNA, 32 bp, Homo sapiens
  chr3:160821776-160821808
  hypo
agtgctggaattactggcgtgagccaccgcgc

SEQ ID NO: 146702 - DNA, 36 bp, Homo sapiens; identical to SEQ ID NO: 66875
  chr3:160863216-160863252
  hypo

SEQ ID NO: 146703 - DNA, 215 bp, Homo sapiens
  chr3:160879672-160879887
  hypo
agcgcagccaccgccgcccacaaaaggatttttcaaatgtttttttcgcggggaaagaagtttgaagactactgcaataaacaacaacagagaaaaaggaagaggaaagagtataaagatttttgcttatatcatgtgaattattaaaaagaatgaagggaaggggaaattattcaatcttctggccctccgcgtacatacgaggcagaagtctg

SEQ ID NO: 146704 - DNA, 30 bp, Homo sapiens
  chr3:160986923-160986953
  hypo
tcacgtattctggcacgccgcactaactaa

SEQ ID NO: 146705 - DNA, 31 bp, Homo sapiens; identical to SEQ ID NO: 17995
  chr3:162129671-162129702
  hypo

SEQ ID NO: 146706 - DNA, 23 bp, Homo sapiens
  chr3:162624227-162624250
  hypo
tttttttttctgagacggagtct

SEQ ID NO: 146707 - DNA, 22 bp, Homo sapiens
  chr3:162624489-162624511
  hypo
ttagaggcgtgagttcaatagg

SEQ ID NO: 146708 - DNA, 30 bp, Homo sapiens
  chr3:164967647-164967677
  hypo
ccacaacgagagaggcgccatcagagggaa

SEQ ID NO: 146709 - DNA, 31 bp, Homo sapiens; identical to SEQ ID NO: 66878
  chr3:165174993-165175024
  hypo

SEQ ID NO: 146710 - DNA, 27 bp, Homo sapiens
  chr3:165592807-165592834
  hypo
tcccacgcaaaccgaagagctggtctc

SEQ ID NO: 146711 - DNA, 30 bp, Homo sapiens
  chr3:166010054-166010084
  hypo
tttgggcctgcgaaccgaaattcctgacct

SEQ ID NO: 146712 - DNA, 113 bp, Homo sapiens
  chr3:166834367-166834480
  hypo
gaaccctccctgttgcggtggtgggtgatagtagtgatgtggattcagggtccggagcaatgaaggctcccggcctgggagcaggctccagcctgctgcggaaggatggacag

SEQ ID NO: 146713 - DNA, 30 bp, Homo sapiens
  chr3:167413450-167413480
  hypo
gtgctcgtgccttttcgtttaggtcttgga

SEQ ID NO: 146714 - DNA, 30 bp, Homo sapiens; identical to SEQ ID NO: 66880
  chr3:167449627-167449657
  hypo

SEQ ID NO: 146715 - DNA, 31 bp, Homo sapiens; identical to SEQ ID NO: 66881
  chr3:167566092-167566123
  hypo

SEQ ID NO: 146716 - DNA, 181 bp, Homo sapiens
  chr3:167812532-167812713
  hypo
ggctggcagaagcggcggagggctaccagtttccctgccccgattgcagctgggcctttgacaagagctcgggtaaaggactatctgtgcacccgcccaccaaacgcccagcgggacgatgggctggtgctacgaagttctaaacctaaccgctgggaggaagaagcgggaggatgagaat

SEQ ID NO: 146717 - DNA, 30 bp, Homo sapiens
  chr3:167812917-167812947
  hypo
ctgctggtacttgagcgccaccgcctcggc

SEQ ID NO: 146718 - DNA, 30 bp, Homo sapiens
  chr3:167813251-167813281
  hypo
gcgcgcagccatcgacgccgcccgggcagc

SEQ ID NO: 146719 - DNA, 40 bp, Homo sapiens
  chr3:167911806-167911846
  hypo
taagccaccgtgcccggccgacattctgtatttttcttag

SEQ ID NO: 146720 - DNA, 175 bp, Homo sapiens
  chr3:167916938-167917113
  hypo
gtacacctgctgtgatatcaccgggagttgtacaccgccggtgatattgggtgtgatattactctctttacccctgcatactaggaacaatatcacgggttgagagtacagcccatgcgatattgggagtaatattctctcccccccccaccccgttaatattaggaacaatatc

SEQ ID NO: 146721 - DNA, 29 bp, Homo sapiens
  chr3:168156698-168156727
  hypo
caggaggcggagcttgcagtaagccaaga

SEQ ID NO: 146722 - DNA, 38 bp, Homo sapiens; identical to SEQ ID NO: 66884
  chr3:168197106-168197144
  hypo

SEQ ID NO: 146723 - DNA, 25 bp, Homo sapiens
  chr3:168393410-168393435
  hypo
ctccgtcccaaaaaaacaaaaaaca

SEQ ID NO: 146724 - DNA, 30 bp, Homo sapiens; identical to SEQ ID NO: 66886
  chr3:168427047-168427077
  hypo

SEQ ID NO: 146725 - DNA, 24 bp, Homo sapiens
  chr3:168548104-168548128
  hypo
agtaaacaaatgtaggctggacgc

SEQ ID NO: 146726 - DNA, 146 bp, Homo sapiens; identical to SEQ ID NO: 17996
  chr3:168608962-168609108
  hypo

SEQ ID NO: 146727 - DNA, 31 bp, Homo sapiens; identical to SEQ ID NO: 39877
  chr3:168754776-168754807
  hypo

SEQ ID NO: 146728 - DNA, 32 bp, Homo sapiens; identical to SEQ ID NO: 17997
  chr3:169030444-169030476
  hypo

SEQ ID NO: 146729 - DNA, 78 bp, Homo sapiens; identical to SEQ ID NO: 66891
  chr3:169200019-169200097
  hypo

SEQ ID NO: 146730 - DNA, 78 bp, Homo sapiens; identical to SEQ ID NO: 17999
  chr3:169200396-169200474
  hypo

SEQ ID NO: 146731 - DNA, 22 bp, Homo sapiens
  chr3:169235769-169235791
  hypo
gggcgctatggctcacgcctgt

SEQ ID NO: 146732 - DNA, 21 bp, Homo sapiens
  chr3:169243516-169243537
  hypo
taaaaggtggctggatgcagc

SEQ ID NO: 146733 - DNA, 54 bp, Homo sapiens; identical to SEQ ID NO: 109221
  chr3:169380560-169380614
  hypo

SEQ ID NO: 146734 - DNA, 88 bp, Homo sapiens; identical to SEQ ID NO: 109222
  chr3:169380982-169381070
  hypo

SEQ ID NO: 146735 - DNA, 263 bp, Homo sapiens; identical to SEQ ID NO: 39887
  chr3:169381407-169381670
  hypo

SEQ ID NO: 146736 - DNA, 985 bp, Homo sapiens; identical to SEQ ID NO: 39890
  chr3:169482161-169483146
  hypo

SEQ ID NO: 146737 - DNA, 30 bp, Homo sapiens; identical to SEQ ID NO: 39892
  chr3:169492085-169492115
  hypo

SEQ ID NO: 146738 - DNA, 30 bp, Homo sapiens; identical to SEQ ID NO: 66899
  chr3:169492631-169492661
  hypo

SEQ ID NO: 146739 - DNA, 733 bp, Homo sapiens; identical to SEQ ID NO: 109231
  chr3:169529938-169530671
  hypo

SEQ ID NO: 146740 - DNA, 850 bp, Homo sapiens; identical to SEQ ID NO: 66901
  chr3:169539897-169540747
  hypo

SEQ ID NO: 146741 - DNA, 30 bp, Homo sapiens
  chr3:169545101-169545131
  hypo
atgagattttttcgccgggtgcggtggctc

SEQ ID NO: 146742 - DNA, 19 bp, Homo sapiens
  chr3:169616164-169616183
  hypo
ctcaaaaaaaaaaaaaagt

SEQ ID NO: 146743 - DNA, 48 bp, Homo sapiens; identical to SEQ ID NO: 2935
  chr3:169645351-169645399
  hypo

SEQ ID NO: 146744 - DNA, 146 bp, Homo sapiens; identical to SEQ ID NO: 18005
  chr3:169656678-169656824
  hypo

SEQ ID NO: 146745 - DNA, 30 bp, Homo sapiens
  chr3:169657652-169657682
  hypo
acagaatacagaaggcgtgatagatgggat

SEQ ID NO: 146746 - DNA, 43 bp, Homo sapiens
  chr3:169727689-169727732
  hypo
taaaaacccaacctaaacctccgatttggcaatgaattttaga

SEQ ID NO: 146747 - DNA, 30 bp, Homo sapiens
  chr3:169780395-169780425
  hypo
acttccaaaacctccggcctcgtcttgtga

SEQ ID NO: 146748 - DNA, 80 bp, Homo sapiens; identical to SEQ ID NO: 66905
  chr3:169780673-169780753
  hypo

SEQ ID NO: 146749 - DNA, 30 bp, Homo sapiens; identical to SEQ ID NO: 66906
  chr3:169782064-169782094
  hypo

SEQ ID NO: 146750 - DNA, 33 bp, Homo sapiens; identical to SEQ ID NO: 66907
  chr3:169795276-169795309
  hypo

SEQ ID NO: 146751 - DNA, 92 bp, Homo sapiens; identical to SEQ ID NO: 66908
  chr3:169795488-169795580
  hypo

SEQ ID NO: 146752 - DNA, 61 bp, Homo sapiens
  chr3:169796499-169796560
  hypo
cagcagaccgctttacgcaaagccagaacacgagctgtaactactgcgcctgtcaaacctg

SEQ ID NO: 146753 - DNA, 30 bp, Homo sapiens
  chr3:169798165-169798195
  hypo
cagtttcttcctttcgctttttattgcctc

SEQ ID NO: 146754 - DNA, 18 bp, Homo sapiens
  chr3:169807405-169807423
  hypo
aaagttgctacactgtcg

SEQ ID NO: 146755 - DNA, 97 bp, Homo sapiens; identical to SEQ ID NO: 18007
  chr3:169896228-169896325
  hypo

SEQ ID NO: 146756 - DNA, 30 bp, Homo sapiens
  chr3:169900403-169900433
  hypo
cttccaagaagtagcggagcgggttttata

SEQ ID NO: 146757 - DNA, 101 bp, Homo sapiens; identical to SEQ ID NO: 66912
  chr3:169915437-169915538
  hypo

SEQ ID NO: 146758 - DNA, 40 bp, Homo sapiens; identical to SEQ ID NO: 66913
  chr3:169916137-169916177
  hypo

SEQ ID NO: 146759 - DNA, 37 bp, Homo sapiens; identical to SEQ ID NO: 66914
  chr3:169917046-169917083
  hypo

SEQ ID NO: 146760 - DNA, 41 bp, Homo sapiens; identical to SEQ ID NO: 18009
  chr3:169980658-169980699
  hypo

SEQ ID NO: 146761 - DNA, 31 bp, Homo sapiens; identical to SEQ ID NO: 18010
  chr3:169983366-169983397
  hypo

SEQ ID NO: 146762 - DNA, 30 bp, Homo sapiens; identical to SEQ ID NO: 39902
  chr3:170138442-170138472
  hypo

SEQ ID NO: 146763 - DNA, 41 bp, Homo sapiens
  chr3:170154036-170154077
  hypo
agactatgtgactctaaagcccgagttgtccaatttaagaa

SEQ ID NO: 146764 - DNA, 75 bp, Homo sapiens; identical to SEQ ID NO: 66918
  chr3:170179926-170180001
  hypo

SEQ ID NO: 146765 - DNA, 204 bp, Homo sapiens
  chr3:170184922-170185126
  hypo
tgctacttgtccggccgtttgccttcgcatctgacatctgttggtaatagaagcctttgtcttcagtgggcccgccccagtcctcctggctctcgccctctgtggcgtaggagaaaccctcctccactgagaaggggtcatccacgtcgtagcgttggtacgtgctttggtgcagggcctcttctcgagcgctgatttccaggg

SEQ ID NO: 146766 - DNA, 43 bp, Homo sapiens; identical to SEQ ID NO: 66919
  chr3:170267373-170267416
  hypo

SEQ ID NO: 146767 - DNA, 29 bp, Homo sapiens
  chr3:170440556-170440585
  hypo
ttattataagaatttgcttggcggggcgc

SEQ ID NO: 146768 - DNA, 97 bp, Homo sapiens; identical to SEQ ID NO: 66920
  chr3:170555016-170555113
  hypo

SEQ ID NO: 146769 - DNA, 121 bp, Homo sapiens
  chr3:170588562-170588683
  hypo
caggagttcgagaccacccttggcagcgtaggcatagggagaacccgtctctacaaacaattttaaaaaaaatggcccgcgtggtggtgcgcgtctgtactcccagccactcgggaggctg

SEQ ID NO: 146770 - DNA, 94 bp, Homo sapiens; identical to SEQ ID NO: 66922
  chr3:170588742-170588836
  hypo

SEQ ID NO: 146771 - DNA, 1429 bp, Homo sapiens; identical to SEQ ID NO: 109251
  chr3:170625810-170627239
  hypo

SEQ ID NO: 146772 - DNA, 17 bp, Homo sapiens
  chr3:170785203-170785220
  hypo
aatcccagcactttggg

SEQ ID NO: 146773 - DNA, 17 bp, Homo sapiens
  chr3:170785459-170785476
  hypo
ccaaaaaaaaaaaaaaa

SEQ ID NO: 146774 - DNA, 30 bp, Homo sapiens
  chr3:170863974-170864004
  hypo
tctgtgcactgaccccgctcctgcctgcat

SEQ ID NO: 146775 - DNA, 26 bp, Homo sapiens
  chr3:170864392-170864418
  hypo
tatgtgtttgatggccgggctcacac

SEQ ID NO: 146776 - DNA, 46 bp, Homo sapiens; identical to SEQ ID NO: 66927
  chr3:170870833-170870879
  hypo

SEQ ID NO: 146777 - DNA, 37 bp, Homo sapiens; identical to SEQ ID NO: 66928
  chr3:171121103-171121140
  hypo

SEQ ID NO: 146778 - DNA, 111 bp, Homo sapiens
  chr3:171171981-171172092
  hypo
gttgtgctcagctgggcatggcggccatgattcaatcacaggagcgcctggctgggtggactttagaaccactatcactgagagaaggaatggcgtcgaaacaagaagggc

SEQ ID NO: 146779 - DNA, 18 bp, Homo sapiens
  chr3:171242760-171242778
  hypo
actctgatgccacagata

SEQ ID NO: 146780 - DNA, 90 bp, Homo sapiens
  chr3:171243543-171243633
  hypo
agtttcagaaggttacaccatcgatgtacagattaattagaagtgggatagggaggccgaggcgggcggatcacgaggtcaggagatgga

SEQ ID NO: 146781 - DNA, 30 bp, Homo sapiens
  chr3:171255354-171255384
  hypo
ttaaatccagtgttacgggaaattttccac

SEQ ID NO: 146782 - DNA, 30 bp, Homo sapiens
  chr3:171334656-171334686
  hypo
gtaatgggaaacgaacgcacgaactctacc

SEQ ID NO: 146783 - DNA, 217 bp, Homo sapiens; identical to SEQ ID NO: 66931
  chr3:171362727-171362944
  hypo

SEQ ID NO: 146784 - DNA, 164 bp, Homo sapiens; identical to SEQ ID NO: 18016
  chr3:171363248-171363412
  hypo

SEQ ID NO: 146785 - DNA, 30 bp, Homo sapiens; identical to SEQ ID NO: 66933
  chr3:171455811-171455841
  hypo

SEQ ID NO: 146786 - DNA, 114 bp, Homo sapiens; identical to SEQ ID NO: 18017
  chr3:171493912-171494026
  hypo

SEQ ID NO: 146787 - DNA, 29 bp, Homo sapiens
  chr3:171503242-171503271
  hypo
tttttagatggagtcttgctccgatgccc

SEQ ID NO: 146788 - DNA, 29 bp, Homo sapiens
  chr3:171503510-171503539
  hypo
gccaccacgcccagcctccagtgtctatt

SEQ ID NO: 146789 - DNA, 46 bp, Homo sapiens; identical to SEQ ID NO: 18018
  chr3:171529765-171529811
  hypo

SEQ ID NO: 146790 - DNA, 34 bp, Homo sapiens
  chr3:171661619-171661653
  hypo
gattacaggcgtgagcctccgcgcccagcctgag

SEQ ID NO: 146791 - DNA, 30 bp, Homo sapiens; identical to SEQ ID NO: 109260
  chr3:171758300-171758330
  hypo

SEQ ID NO: 146792 - DNA, 155 bp, Homo sapiens; identical to SEQ ID NO: 109261
  chr3:171758578-171758733
  hypo

SEQ ID NO: 146793 - DNA, 21 bp, Homo sapiens
  chr3:171773855-171773876
  hypo
ccactgcgcccggcctgttcc

SEQ ID NO: 146794 - DNA, 154 bp, Homo sapiens
  chr3:171886949-171887103
  hypo
gcccacgtcagcactcggtcatgtctgtccaaaaggtgctttgaacccttggaggatgtggaatgccatgtcgacctcagtgccaccaggggcatactcgagcccaccaaaggagcaagtgaaggggttgcctgagcggcgctccggaatgtgc

SEQ ID NO: 146795 - DNA, 31 bp, Homo sapiens; identical to SEQ ID NO: 18020
  chr3:171926519-171926550
  hypo

SEQ ID NO: 146796 - DNA, 279 bp, Homo sapiens
  chr3:171965331-171965610
  hypo
gatagtactggagtccgccgggtggtggtcacaccccagtctcctgagtgttatcccccaagctacccctcagccatgtctccaacccatcatctccctccctatctgactcaccatccacattttattcataactcacacacggcttactacccacctgttaccggacctggagatatgccgcctcagttttttccccagcatcatcttccccacacaatatatggtgagcaaggtgagtagattttcgttggcgtcaggagccgttgaaactgatta

SEQ ID NO: 146797 - DNA, 113 bp, Homo sapiens; identical to SEQ ID NO: 66941
  chr3:171976024-171976137
  hypo

SEQ ID NO: 146798 - DNA, 19 bp, Homo sapiens
  chr3:172032876-172032895
  hypo
gaatttacagccgggcgcg

SEQ ID NO: 146799 - DNA, 318 bp, Homo sapiens; identical to SEQ ID NO: 66943
  chr3:172033194-172033512
  hypo

SEQ ID NO: 146800 - DNA, 30 bp, Homo sapiens; identical to SEQ ID NO: 66944
  chr3:172042752-172042782
  hypo

SEQ ID NO: 146801 - DNA, 39 bp, Homo sapiens; identical to SEQ ID NO: 66945
  chr3:172056804-172056843
  hypo

SEQ ID NO: 146802 - DNA, 25 bp, Homo sapiens
  chr3:172186701-172186726
  hypo
tacaggttaagaagaaacaggcgtg

SEQ ID NO: 146803 - DNA, 17 bp, Homo sapiens
  chr3:172302222-172302239
  hypo
gcagtgagcctagatcg

SEQ ID NO: 146804 - DNA, 502 bp, Homo sapiens
  chr3:172341458-172341960
  hypo
caaagatttattgagcgcttataagaggcaccatgtcaggcattggggtcacagaggtgaggctgacgtgacccccacatcaagggtcctagtcttgtgagggagtcagacctacctgcagacaattaccatgtcatgtgtggagtgcagtgtgagacccgaggaacgacccctaaatcctcctgagaaaggagttaggaaaggctcctggaggaggctggcaaagaaatacaagaacagtgaaaagcactctaaggagaaggaagggtgttcggtaagagaacatggcgcatgtgcggaacacgaacagaaccgcggtaataagttccgggttggctagctgtaccacagcacgatgtgcagggacggccaggagaggatgctacagagcagcagctctcaaacttttcagtctcaggactttacaatcttaaacattattgaggacccttccccctcccccacgaagagcttttgtttatgtgggcttcatttattgatg

SEQ ID NO: 146805 - DNA, 21 bp, Homo sapiens
  chr3:172342379-172342400
  hypo
gaggctgtttgccaagattgt

SEQ ID NO: 146806 - DNA, 18 bp, Homo sapiens
  chr3:172342645-172342663
  hypo
tttttttttttgagacgg

SEQ ID NO: 146807 - DNA, 36 bp, Homo sapiens; identical to SEQ ID NO: 66951
  chr3:172351502-172351538
  hypo

SEQ ID NO: 146808 - DNA, 241 bp, Homo sapiens; identical to SEQ ID NO: 66952
  chr3:172355749-172355990
  hypo

SEQ ID NO: 146809 - DNA, 18 bp, Homo sapiens
  chr3:172356109-172356127
  hypo
tgccatatagcagataaa

SEQ ID NO: 146810 - DNA, 142 bp, Homo sapiens; identical to SEQ ID NO: 66954
  chr3:172394008-172394150
  hypo

SEQ ID NO: 146811 - DNA, 39 bp, Homo sapiens
  chr3:172394536-172394575
  hypo
ggtgttccttcagtcatcggagccatgtcatttacacct

SEQ ID NO: 146812 - DNA, 22 bp, Homo sapiens
  chr3:172395440-172395462
  hypo
cgggggggcggctcacgcctgt

SEQ ID NO: 146813 - DNA, 81 bp, Homo sapiens; identical to SEQ ID NO: 18031
  chr3:172395701-172395782
  hypo

SEQ ID NO: 146814 - DNA, 34 bp, Homo sapiens; identical to SEQ ID NO: 66956
  chr3:172409439-172409473
  hypo

SEQ ID NO: 146815 - DNA, 30 bp, Homo sapiens
  chr3:172414982-172415012
  hypo
tgctagggtaacgggcgtgagccacagcac

SEQ ID NO: 146816 - DNA, 78 bp, Homo sapiens; identical to SEQ ID NO: 66957
  chr3:172424593-172424671
  hypo

SEQ ID NO: 146817 - DNA, 42 bp, Homo sapiens; identical to SEQ ID NO: 66958
  chr3:172425341-172425383
  hypo

SEQ ID NO: 146818 - DNA, 42 bp, Homo sapiens; identical to SEQ ID NO: 18032
  chr3:172425682-172425724
  hypo

SEQ ID NO: 146819 - DNA, 42 bp, Homo sapiens; identical to SEQ ID NO: 66960
  chr3:172426414-172426456
  hypo

SEQ ID NO: 146820 - DNA, 38 bp, Homo sapiens; identical to SEQ ID NO: 18033
  chr3:172469919-172469957
  hypo

SEQ ID NO: 146821 - DNA, 38 bp, Homo sapiens; identical to SEQ ID NO: 66962
  chr3:172470196-172470234
  hypo

SEQ ID NO: 146822 - DNA, 24 bp, Homo sapiens
  chr3:172475718-172475742
  hypo
tcactgcaacctctgctttcccgg

SEQ ID NO: 146823 - DNA, 84 bp, Homo sapiens; identical to SEQ ID NO: 66964
  chr3:172475921-172476005
  hypo

SEQ ID NO: 146824 - DNA, 23 bp, Homo sapiens
  chr3:172550528-172550551
  hypo
ccggcctatttctcaaattacag

SEQ ID NO: 146825 - DNA, 200 bp, Homo sapiens; identical to SEQ ID NO: 66966
  chr3:172727364-172727564
  hypo

SEQ ID NO: 146826 - DNA, 139 bp, Homo sapiens; identical to SEQ ID NO: 18036
  chr3:172727623-172727762
  hypo

SEQ ID NO: 146827 - DNA, 24 bp, Homo sapiens
  chr3:173004404-173004428
  hypo
aacacagtgaaacgccgtctctac

SEQ ID NO: 146828 - DNA, 37 bp, Homo sapiens
  chr3:173162773-173162810
  hypo
ggccgggcgcggtcgcggctcacgcctgtaatcccag

SEQ ID NO: 146829 - DNA, 28 bp, Homo sapiens
  chr3:173291563-173291591
  hypo
gatgaaaaggccgggcgcggtggctcac

SEQ ID NO: 146830 - DNA, 181 bp, Homo sapiens; identical to SEQ ID NO: 66969
  chr3:173864874-173865055
  hypo

SEQ ID NO: 146831 - DNA, 134 bp, Homo sapiens; identical to SEQ ID NO: 66970
  chr3:174095071-174095205
  hypo

SEQ ID NO: 146832 - DNA, 1074 bp, Homo sapiens; identical to SEQ ID NO: 109279
  chr3:174158357-174159431
  hypo

SEQ ID NO: 146833 - DNA, 33 bp, Homo sapiens; identical to SEQ ID NO: 18041
  chr3:175307700-175307733
  hypo

SEQ ID NO: 146834 - DNA, 547 bp, Homo sapiens
  chr3:175338090-175338637
  hypo
cctgccatggctccacgcttagcacgcagctgagctgggtgtgctgcaaccagcatccacgttgggcgccagcgtcaagatgaggggaatgcaatggcacccgaaaactaaaagagatgccagcaatcacagatccctaaggggtgttacagctatagctcggggagtcccggggtctcggcccccagaagttttgctgctctttctcccatagtccactgcttgggagcatattacaagcccatttattcctgccactcacagatcggcaggcagaaaggagtaacactcagtggctttttcactcccgcaattcggcgagcaggagggggtgtgttacagctctcttgttcctgctgcctgcagctcagcgaacaggggcatgtcacagctctcttgttcttaccacctggaacgggtacatgttgccgctctcttcgtgcctgcacatgttgccgctcttttcgtgcctgcaatctggcaggttacaggttcttgtcctgtgaccaagagaaatgaggtatgcggacacaggatagcaaataag

SEQ ID NO: 146835 - DNA, 30 bp, Homo sapiens
  chr3:175338900-175338930
  hypo
gattctacgtaaaaccggcagctcggtttt

SEQ ID NO: 146836 - DNA, 30 bp, Homo sapiens; identical to SEQ ID NO: 2961
  chr3:175414760-175414790
  hypo

SEQ ID NO: 146837 - DNA, 92 bp, Homo sapiens; identical to SEQ ID NO: 18044
  chr3:176545043-176545135
  hypo

SEQ ID NO: 146838 - DNA, 30 bp, Homo sapiens
  chr3:176636268-176636298
  hypo
ctttctgtcttctcgcgcagggctactgga

SEQ ID NO: 146839 - DNA, 219 bp, Homo sapiens; identical to SEQ ID NO: 66976
  chr3:176710429-176710648
  hypo

SEQ ID NO: 146840 - DNA, 88 bp, Homo sapiens; identical to SEQ ID NO: 66977
  chr3:176753532-176753620
  hypo

SEQ ID NO: 146841 - DNA, 26 bp, Homo sapiens
  chr3:176836759-176836785
  hypo
ttttgttttttgtttttgagacggag

SEQ ID NO: 146842 - DNA, 26 bp, Homo sapiens
  chr3:176845707-176845733
  hypo
caaaacattgtaaaacgggccgggcg

SEQ ID NO: 146843 - DNA, 20 bp, Homo sapiens
  chr3:176849312-176849332
  hypo
ttttgagacagagtctcact

SEQ ID NO: 146844 - DNA, 35 bp, Homo sapiens; identical to SEQ ID NO: 18046
  chr3:176854101-176854136
  hypo

SEQ ID NO: 146845 - DNA, 94 bp, Homo sapiens; identical to SEQ ID NO: 66982
  chr3:176869523-176869617
  hypo

SEQ ID NO: 146846 - DNA, 18 bp, Homo sapiens
  chr3:176872485-176872503
  hypo
agaactttttaaaaagaa

SEQ ID NO: 146847 - DNA, 76 bp, Homo sapiens; identical to SEQ ID NO: 18048
  chr3:176890963-176891039
  hypo

SEQ ID NO: 146848 - DNA, 30 bp, Homo sapiens
  chr3:176891907-176891937
  hypo
attatgatgacaggccgggtgcggtggctc

SEQ ID NO: 146849 - DNA, 35 bp, Homo sapiens; identical to SEQ ID NO: 66985
  chr3:176893550-176893585
  hypo

SEQ ID NO: 146850 - DNA, 120 bp, Homo sapiens; identical to SEQ ID NO: 66986
  chr3:176897152-176897272
  hypo

SEQ ID NO: 146851 - DNA, 91 bp, Homo sapiens; identical to SEQ ID NO: 109283
  chr3:176915777-176915868
  hypo

SEQ ID NO: 146852 - DNA, 30 bp, Homo sapiens
  chr3:176931461-176931491
  hypo
ccaaccatttaaaaacgtatgaattattcg

SEQ ID NO: 146853 - DNA, 30 bp, Homo sapiens
  chr3:176932072-176932102
  hypo
agttgtaaaaccgggcgtggtggctcactt

SEQ ID NO: 146854 - DNA, 211 bp, Homo sapiens
  chr3:176963511-176963722
  hypo
gctccatattgtagtcgggaaaactgaggcacagagaaaacaggaaactgcctaagaataatagctcataaacaatggggcagagtttcaaaaccagagagttgggttccaaagactgagctcgtaaccaccataccatgctatctgtcctcatgtaagcctctccctctcttttgccacgcttgagtttgcactccgggatatcatatac

SEQ ID NO: 146855 - DNA, 21 bp, Homo sapiens
  chr3:176964237-176964258
  hypo
gggcgcggttgctcacgcctg

SEQ ID NO: 146856 - DNA, 37 bp, Homo sapiens; identical to SEQ ID NO: 66988
  chr3:176990423-176990460
  hypo

SEQ ID NO: 146857 - DNA, 36 bp, Homo sapiens; identical to SEQ ID NO: 66989
  chr3:176990699-176990735
  hypo

SEQ ID NO: 146858 - DNA, 46 bp, Homo sapiens; identical to SEQ ID NO: 66990
  chr3:177001715-177001761
  hypo

SEQ ID NO: 146859 - DNA, 89 bp, Homo sapiens; identical to SEQ ID NO: 66991
  chr3:177030448-177030537
  hypo

SEQ ID NO: 146860 - DNA, 104 bp, Homo sapiens
  chr3:177085604-177085708
  hypo
attacaggagtgagccaccgtgcctggccaacacaaccttttaataaagattgcattgtgttggaggcatatataggtatatatgaagacgggcactgcgtcag

SEQ ID NO: 146861 - DNA, 231 bp, Homo sapiens
  chr3:177094900-177095131
  hypo
ccaaacaagcccgaacgtaatcgcctaattaaatcattttcatctaatgaatataagcaacaaaataaactggcatagcagcgagtcagggagtgattccaatggaagcaactgcagaggtggtgtggccgtgccgggacttgcagagcttttctgcttattttcaagtgacgcccgtgttggcaccttagctccaggtgagtgggtctgagaaggcggctctgtctggca

SEQ ID NO: 146862 - DNA, 90 bp, Homo sapiens; identical to SEQ ID NO: 66993
  chr3:177158384-177158474
  hypo

SEQ ID NO: 146863 - DNA, 121 bp, Homo sapiens
  chr3:177238532-177238653
  hypo
agccaccgcagcctggccaacaagaatacaagaatttcaataagtggtctgacttgggaggtataaaggtgaagacagcaaacattaaaaagtccttgcggtggggcgtggtggctcatgc

SEQ ID NO: 146864 - DNA, 121 bp, Homo sapiens; identical to SEQ ID NO: 18051
  chr3:177238892-177239013
  hypo

SEQ ID NO: 146865 - DNA, 81 bp, Homo sapiens
  chr3:177239192-177239273
  hypo
tctgacagcaggtggagctcagacagtagagctcgctcaaccgccgctcaccttgtgctgtgcagccggttccttacaggc

SEQ ID NO: 146866 - DNA, 34 bp, Homo sapiens
  chr3:177269265-177269299
  hypo
agaaaaaccttgctaacttcgttttgaactaaga

SEQ ID NO: 146867 - DNA, 31 bp, Homo sapiens; identical to SEQ ID NO: 18052
  chr3:177299217-177299248
  hypo

SEQ ID NO: 146868 - DNA, 32 bp, Homo sapiens; identical to SEQ ID NO: 66998
  chr3:177308261-177308293
  hypo

SEQ ID NO: 146869 - DNA, 20 bp, Homo sapiens
  chr3:177383082-177383102
  hypo
gagctgttcctattcggcca

SEQ ID NO: 146870 - DNA, 44 bp, Homo sapiens; identical to SEQ ID NO: 67000
  chr3:177829172-177829216
  hypo

SEQ ID NO: 146871 - DNA, 33 bp, Homo sapiens
  chr3:178577720-178577753
  hypo
aaacaaaataaagttcggaaggggagccaagat

SEQ ID NO: 146872 - DNA, 181 bp, Homo sapiens; identical to SEQ ID NO: 18054
  chr3:178860952-178861133
  hypo

SEQ ID NO: 146873 - DNA, 30 bp, Homo sapiens; identical to SEQ ID NO: 2966
  chr3:178916861-178916891
  hypo

SEQ ID NO: 146874 - DNA, 30 bp, Homo sapiens; identical to SEQ ID NO: 2967
  chr3:178921538-178921568
  hypo

SEQ ID NO: 146875 - DNA, 39 bp, Homo sapiens; identical to SEQ ID NO: 2968
  chr3:178936067-178936106
  hypo

SEQ ID NO: 146876 - DNA, 30 bp, Homo sapiens
  chr3:178945499-178945529
  hypo
atggagagtagcttacgagaagaacagagc

SEQ ID NO: 146877 - DNA, 30 bp, Homo sapiens; identical to SEQ ID NO: 2969
  chr3:178952070-178952100
  hypo

SEQ ID NO: 146878 - DNA, 43 bp, Homo sapiens; identical to SEQ ID NO: 67006
  chr3:178978409-178978452
  hypo

SEQ ID NO: 146879 - DNA, 30 bp, Homo sapiens
  chr3:179031721-179031751
  hypo
ggaaaaagacatttgcgggacaaagaaata

SEQ ID NO: 146880 - DNA, 41 bp, Homo sapiens; identical to SEQ ID NO: 2971
  chr3:179064153-179064194
  hypo

SEQ ID NO: 146881 - DNA, 121 bp, Homo sapiens
  chr3:179064839-179064960
  hypo
gagccaccccgcccggcctggaaagctttttaagttcggaaagtaatacgatctggatttcttttcttttatttatttatttatttatttgaaaaaatgtctcgctctcttgcccaggctg

SEQ ID NO: 146882 - DNA, 45 bp, Homo sapiens; identical to SEQ ID NO: 67008
  chr3:179085021-179085066
  hypo

SEQ ID NO: 146883 - DNA, 31 bp, Homo sapiens; identical to SEQ ID NO: 67009
  chr3:179112492-179112523
  hypo

SEQ ID NO: 146884 - DNA, 26 bp, Homo sapiens
  chr3:179121285-179121311
  hypo
aattaaaaagtcaggccgggcgcagt

SEQ ID NO: 146885 - DNA, 40 bp, Homo sapiens
  chr3:179159868-179159908
  hypo
acaggcgtgagccaccaagcccggccgactgaaatatcgt

SEQ ID NO: 146886 - DNA, 1132 bp, Homo sapiens; identical to SEQ ID NO: 39952
  chr3:179168655-179169787
  hypo

SEQ ID NO: 146887 - DNA, 37 bp, Homo sapiens; identical to SEQ ID NO: 18061
  chr3:179203079-179203116
  hypo

SEQ ID NO: 146888 - DNA, 89 bp, Homo sapiens
  chr3:179319790-179319879
  hypo
agcattagtacagaacgtattttcacaccctaatgacaaaatactttgtcattataaattaactggggcggtggttcacacctgtattc

SEQ ID NO: 146889 - DNA, 80 bp, Homo sapiens; identical to SEQ ID NO: 109309
  chr3:179367504-179367584
  hypo

SEQ ID NO: 146890 - DNA, 154 bp, Homo sapiens; identical to SEQ ID NO: 67014
  chr3:179377823-179377977
  hypo

SEQ ID NO: 146891 - DNA, 179 bp, Homo sapiens; identical to SEQ ID NO: 67015
  chr3:179383081-179383260
  hypo

SEQ ID NO: 146892 - DNA, 21 bp, Homo sapiens
  chr3:179390182-179390203
  hypo
tttttttttgagacagtgtgt

SEQ ID NO: 146893 - DNA, 142 bp, Homo sapiens; identical to SEQ ID NO: 18063
  chr3:179391535-179391677
  hypo

SEQ ID NO: 146894 - DNA, 21 bp, Homo sapiens
  chr3:179391976-179391997
  hypo
ggcctgttttgagatttgtat

SEQ ID NO: 146895 - DNA, 161 bp, Homo sapiens
  chr3:179398899-179399060
  hypo
tgggaaacgattgctcggctgtccataggagcacttggagccagggctggggtgaagccaccgctgtgggtgtctgtggagctgccgaatagtcattgatgatgactacagtgttgtgaccaagcgagttacagagaaacgccacactttgagacaaatta

SEQ ID NO: 146896 - DNA, 30 bp, Homo sapiens
  chr3:179419083-179419113
  hypo
gacaggagtcttgccggcttacatttcagt

SEQ ID NO: 146897 - DNA, 374 bp, Homo sapiens; identical to SEQ ID NO: 67020
  chr3:179449286-179449660
  hypo

SEQ ID NO: 146898 - DNA, 30 bp, Homo sapiens
  chr3:179501935-179501965
  hypo
aatataaaaattggcgaaaagaagccatac

SEQ ID NO: 146899 - DNA, 521 bp, Homo sapiens; identical to SEQ ID NO: 2973
  chr3:179754238-179754759
  hypo

SEQ ID NO: 146900 - DNA, 69 bp, Homo sapiens; identical to SEQ ID NO: 2974
  chr3:179754803-179754872
  hypo

SEQ ID NO: 146901 - DNA, 241 bp, Homo sapiens; identical to SEQ ID NO: 2975
  chr3:179755086-179755327
  hypo

SEQ ID NO: 146902 - DNA, 54 bp, Homo sapiens; identical to SEQ ID NO: 109319
  chr3:180396750-180396804
  hypo

SEQ ID NO: 146903 - DNA, 966 bp, Homo sapiens; identical to SEQ ID NO: 39960
  chr3:180397083-180398049
  hypo

SEQ ID NO: 146904 - DNA, 35 bp, Homo sapiens; identical to SEQ ID NO: 67025
  chr3:180502776-180502811
  hypo

SEQ ID NO: 146905 - DNA, 30 bp, Homo sapiens
  chr3:180538846-180538876
  hypo
ccgcatgaagagccccgggaagtgcagcta

SEQ ID NO: 146906 - DNA, 623 bp, Homo sapiens; identical to SEQ ID NO: 67026
  chr3:180546428-180547051
  hypo

SEQ ID NO: 146907 - DNA, 30 bp, Homo sapiens
  chr3:180825729-180825759
  hypo
gctcctggccttctgcggttcttgcaactc

SEQ ID NO: 146908 - DNA, 1086 bp, Homo sapiens; identical to SEQ ID NO: 109332
  chr3:181429280-181430366
  hypo

SEQ ID NO: 146909 - DNA, 868 bp, Homo sapiens; identical to SEQ ID NO: 39972
  chr3:181430443-181431311
  hypo

SEQ ID NO: 146910 - DNA, 178 bp, Homo sapiens; identical to SEQ ID NO: 2993
  chr3:181444346-181444524
  hypo

SEQ ID NO: 146911 - DNA, 336 bp, Homo sapiens; identical to SEQ ID NO: 2994
  chr3:181444612-181444948
  hypo

SEQ ID NO: 146912 - DNA, 88 bp, Homo sapiens; identical to SEQ ID NO: 67031
  chr3:181466763-181466851
  hypo

SEQ ID NO: 146913 - DNA, 18 bp, Homo sapiens
  chr3:181480126-181480144
  hypo
cgtaaaggctgggcgcgg

SEQ ID NO: 146914 - DNA, 90 bp, Homo sapiens; identical to SEQ ID NO: 67032
  chr3:181521186-181521276
  hypo

SEQ ID NO: 146915 - DNA, 25 bp, Homo sapiens
  chr3:181626524-181626549
  hypo
tgagccaccgcgcccggctcaatga

SEQ ID NO: 146916 - DNA, 30 bp, Homo sapiens
  chr3:181900506-181900536
  hypo
gcacgtgtgaacagccgatgaggcgggtat

SEQ ID NO: 146917 - DNA, 263 bp, Homo sapiens; identical to SEQ ID NO: 67033
  chr3:182314907-182315170
  hypo

SEQ ID NO: 146918 - DNA, 38 bp, Homo sapiens
  chr3:182457888-182457926
  hypo
agcctccgtggctggcgcggtggctcattcctgtaatc

SEQ ID NO: 146919 - DNA, 293 bp, Homo sapiens; identical to SEQ ID NO: 39987
  chr3:182510866-182511159
  hypo

SEQ ID NO: 146920 - DNA, 171 bp, Homo sapiens; identical to SEQ ID NO: 2998
  chr3:182511622-182511793
  hypo

SEQ ID NO: 146921 - DNA, 20 bp, Homo sapiens
  chr3:182527322-182527342
  hypo
caccacgccctgcccgctct

SEQ ID NO: 146922 - DNA, 31 bp, Homo sapiens; identical to SEQ ID NO: 18077
  chr3:182599428-182599459
  hypo

SEQ ID NO: 146923 - DNA, 35 bp, Homo sapiens; identical to SEQ ID NO: 18078
  chr3:182650848-182650883
  hypo

SEQ ID NO: 146924 - DNA, 128 bp, Homo sapiens; identical to SEQ ID NO: 18079
  chr3:182656909-182657037
  hypo

SEQ ID NO: 146925 - DNA, 21 bp, Homo sapiens
  chr3:182663292-182663313
  hypo
ggcaggagaatggtgtgaacc

SEQ ID NO: 146926 - DNA, 20 bp, Homo sapiens
  chr3:182663372-182663392
  hypo
agactccctctcaaaacaaa

SEQ ID NO: 146927 - DNA, 30 bp, Homo sapiens
  chr3:182686664-182686694
  hypo
ggcatgagccaccgcgccaggccaaatgta

SEQ ID NO: 146928 - DNA, 30 bp, Homo sapiens; identical to SEQ ID NO: 18080
  chr3:182699399-182699429
  hypo

SEQ ID NO: 146929 - DNA, 42 bp, Homo sapiens; identical to SEQ ID NO: 67042
  chr3:182704500-182704542
  hypo

SEQ ID NO: 146930 - DNA, 43 bp, Homo sapiens; identical to SEQ ID NO: 67043
  chr3:182725058-182725101
  hypo

SEQ ID NO: 146931 - DNA, 77 bp, Homo sapiens; identical to SEQ ID NO: 18081
  chr3:182778668-182778745
  hypo

SEQ ID NO: 146932 - DNA, 74 bp, Homo sapiens
  chr3:182788793-182788867
  hypo
tgtctacaaacttctcgatcagcatagcatcatcattgaaagacttcttagcttctctccgtgctgactctaac

SEQ ID NO: 146933 - DNA, 77 bp, Homo sapiens; identical to SEQ ID NO: 18083
  chr3:182800448-182800525
  hypo

SEQ ID NO: 146934 - DNA, 40 bp, Homo sapiens; identical to SEQ ID NO: 67047
  chr3:182812782-182812822
  hypo

SEQ ID NO: 146935 - DNA, 30 bp, Homo sapiens; identical to SEQ ID NO: 18085
  chr3:182813273-182813303
  hypo

SEQ ID NO: 146936 - DNA, 46 bp, Homo sapiens; identical to SEQ ID NO: 18086
  chr3:182815988-182816034
  hypo

SEQ ID NO: 146937 - DNA, 23 bp, Homo sapiens
  chr3:182833351-182833374
  hypo
aaatgctgccaggtgcggtggcc

SEQ ID NO: 146938 - DNA, 42 bp, Homo sapiens
  chr3:182882984-182883026
  hypo
attttaagcacatagccgggcgcagtggctcacgcctgtaat

SEQ ID NO: 146939 - DNA, 38 bp, Homo sapiens; identical to SEQ ID NO: 18088
  chr3:182895950-182895988
  hypo

SEQ ID NO: 146940 - DNA, 164 bp, Homo sapiens; identical to SEQ ID NO: 67052
  chr3:182935982-182936146
  hypo

SEQ ID NO: 146941 - DNA, 30 bp, Homo sapiens; identical to SEQ ID NO: 67053
  chr3:182938994-182939024
  hypo

SEQ ID NO: 146942 - DNA, 30 bp, Homo sapiens
  chr3:182970448-182970478
  hypo
ttttaaaccctgattcgacaatcatacatt

SEQ ID NO: 146943 - DNA, 44 bp, Homo sapiens; identical to SEQ ID NO: 67054
  chr3:182976026-182976070
  hypo

SEQ ID NO: 146944 - DNA, 148 bp, Homo sapiens; identical to SEQ ID NO: 67055
  chr3:182976757-182976905
  hypo

SEQ ID NO: 146945 - DNA, 30 bp, Homo sapiens
  chr3:182986546-182986576
  hypo
tatggtacaagaaaccgtaagtggctaagg

SEQ ID NO: 146946 - DNA, 31 bp, Homo sapiens
  chr3:182987885-182987916
  hypo
ctatgatcgacgttccggaattagaaggacg

SEQ ID NO: 146947 - DNA, 30 bp, Homo sapiens
  chr3:182988353-182988383
  hypo
tgcctatgtaatctccggtgatgtagctgc

SEQ ID NO: 146948 - DNA, 17 bp, Homo sapiens
  chr3:183013721-183013738
  hypo
ggcgacagagcgactcc

SEQ ID NO: 146949 - DNA, 43 bp, Homo sapiens; identical to SEQ ID NO: 67057
  chr3:183014965-183015008
  hypo

SEQ ID NO: 146950 - DNA, 31 bp, Homo sapiens; identical to SEQ ID NO: 18091
  chr3:183020691-183020722
  hypo

SEQ ID NO: 146951 - DNA, 297 bp, Homo sapiens; identical to SEQ ID NO: 67059
  chr3:183035118-183035415
  hypo

SEQ ID NO: 146952 - DNA, 84 bp, Homo sapiens
  chr3:183052205-183052289
  hypo
caataggggacagatgagcaccgtgggcctccaggcgatactccaagaaggacatgtatcacttaagtagcataaaagacaaag

SEQ ID NO: 146953 - DNA, 30 bp, Homo sapiens
  chr3:183059712-183059742
  hypo
tattcccaatgtaggcggaggaccttgagg

SEQ ID NO: 146954 - DNA, 30 bp, Homo sapiens
  chr3:183096207-183096237
  hypo
gacctgggcccataccgatttaagcggcat

SEQ ID NO: 146955 - DNA, 822 bp, Homo sapiens; identical to SEQ ID NO: 109363
  chr3:183165025-183165847
  hypo

SEQ ID NO: 146956 - DNA, 121 bp, Homo sapiens; identical to SEQ ID NO: 67062
  chr3:183183283-183183404
  hypo

SEQ ID NO: 146957 - DNA, 34 bp, Homo sapiens; identical to SEQ ID NO: 18095
  chr3:183183703-183183737
  hypo

SEQ ID NO: 146958 - DNA, 30 bp, Homo sapiens
  chr3:183196578-183196608
  hypo
cccctccccttcctacgcttccctgcaggg

SEQ ID NO: 146959 - DNA, 36 bp, Homo sapiens
  chr3:183199495-183199531
  hypo
gagctaagcattccacgtgtacgatctcgtctaatc

SEQ ID NO: 146960 - DNA, 31 bp, Homo sapiens; identical to SEQ ID NO: 18096
  chr3:183199735-183199766
  hypo

SEQ ID NO: 146961 - DNA, 31 bp, Homo sapiens
  chr3:183200065-183200096
  hypo
caggcatgagccaccgcgcccggcctacagg

SEQ ID NO: 146962 - DNA, 32 bp, Homo sapiens; identical to SEQ ID NO: 67066
  chr3:183208294-183208326
  hypo

SEQ ID NO: 146963 - DNA, 42 bp, Homo sapiens; identical to SEQ ID NO: 18097
  chr3:183209171-183209213
  hypo

SEQ ID NO: 146964 - DNA, 249 bp, Homo sapiens; identical to SEQ ID NO: 67068
  chr3:183209978-183210227
  hypo

SEQ ID NO: 146965 - DNA, 247 bp, Homo sapiens; identical to SEQ ID NO: 67069
  chr3:183217391-183217638
  hypo

SEQ ID NO: 146966 - DNA, 30 bp, Homo sapiens; identical to SEQ ID NO: 67070
  chr3:183225874-183225904
  hypo

SEQ ID NO: 146967 - DNA, 58 bp, Homo sapiens; identical to SEQ ID NO: 67071
  chr3:183245665-183245723
  hypo

SEQ ID NO: 146968 - DNA, 151 bp, Homo sapiens; identical to SEQ ID NO: 18099
  chr3:183275003-183275154
  hypo

SEQ ID NO: 146969 - DNA, 22 bp, Homo sapiens
  chr3:183342953-183342975
  hypo
ccaaagttccttcggcgctgtg

SEQ ID NO: 146970 - DNA, 121 bp, Homo sapiens; identical to SEQ ID NO: 67073
  chr3:183356999-183357120
  hypo

SEQ ID NO: 146971 - DNA, 172 bp, Homo sapiens; identical to SEQ ID NO: 18101
  chr3:183381134-183381306
  hypo

SEQ ID NO: 146972 - DNA, 157 bp, Homo sapiens; identical to SEQ ID NO: 67075
  chr3:183419804-183419961
  hypo

SEQ ID NO: 146973 - DNA, 221 bp, Homo sapiens; identical to SEQ ID NO: 18103
  chr3:183479751-183479972
  hypo

SEQ ID NO: 146974 - DNA, 30 bp, Homo sapiens
  chr3:183520925-183520955
  hypo
taaggaacatacatgcgataaagaggtctg

SEQ ID NO: 146975 - DNA, 56 bp, Homo sapiens; identical to SEQ ID NO: 18104
  chr3:183525221-183525277
  hypo

SEQ ID NO: 146976 - DNA, 169 bp, Homo sapiens
  chr3:183525713-183525882
  hypo
ttccaaccaggcatcgctttgcatgtcagggaggtatgcttgtttggagagaggctgtttctaaagcagcgatacgaacaaacggctttcttctgcttttccagattgggatcaccctgcagcccgtggcactccacaggaacgtgtatgcgtccgtggtggaggacat

SEQ ID NO: 146977 - DNA, 49 bp, Homo sapiens
  chr3:183529222-183529271
  hypo
gtggggagcggcgcccggcaggctcttctggggtcgtctgtcctatccg

SEQ ID NO: 146978 - DNA, 45 bp, Homo sapiens
  chr3:183529475-183529520
  hypo
gcgctgccaggtgcccgggtctattggaggcgccccatctcagac

SEQ ID NO: 146979 - DNA, 21 bp, Homo sapiens
  chr3:183529743-183529764
  hypo
gggcatggtggctcacgcctg

SEQ ID NO: 146980 - DNA, 145 bp, Homo sapiens
  chr3:183531344-183531489
  hypo
tttccacctgcagagcgtcatagtgcagcccgtggctgcttgaggcagctcccgcagtggcagcttgggttgtgaaataattaaaaagttaacattttcttttgtctggaatttgctaacatgttgaactgctttttatttattt

SEQ ID NO: 146981 - DNA, 30 bp, Homo sapiens
  chr3:183535025-183535055
  hypo
gggctgtgccctcccgcaggggcccatgcc

SEQ ID NO: 146982 - DNA, 374 bp, Homo sapiens; identical to SEQ ID NO: 109370
  chr3:183602723-183603097
  hypo

SEQ ID NO: 146983 - DNA, 31 bp, Homo sapiens; identical to SEQ ID NO: 18107
  chr3:183627257-183627288
  hypo

SEQ ID NO: 146984 - DNA, 30 bp, Homo sapiens
  chr3:183633431-183633461
  hypo
cggggcagtgggactcgccactgccatgct

SEQ ID NO: 146985 - DNA, 31 bp, Homo sapiens; identical to SEQ ID NO: 18108
  chr3:183637698-183637729
  hypo

SEQ ID NO: 146986 - DNA, 85 bp, Homo sapiens
  chr3:183639002-183639087
  hypo
tcggtaggaggacgcgatgaggggcccgccccaggcagggaatggcaatgctctaaagaaaagagacttcgtcaacagggaggag

SEQ ID NO: 146987 - DNA, 45 bp, Homo sapiens; identical to SEQ ID NO: 67083
  chr3:183642079-183642124
  hypo

SEQ ID NO: 146988 - DNA, 67 bp, Homo sapiens; identical to SEQ ID NO: 18109
  chr3:183642827-183642894
  hypo

SEQ ID NO: 146989 - DNA, 338 bp, Homo sapiens; identical to SEQ ID NO: 18110
  chr3:183643315-183643653
  hypo

SEQ ID NO: 146990 - DNA, 18 bp, Homo sapiens
  chr3:183644369-183644387
  hypo
tttaatcaaatacttgcc

SEQ ID NO: 146991 - DNA, 199 bp, Homo sapiens; identical to SEQ ID NO: 18112
  chr3:183647990-183648189
  hypo

SEQ ID NO: 146992 - DNA, 61 bp, Homo sapiens; identical to SEQ ID NO: 67088
  chr3:183652389-183652450
  hypo

SEQ ID NO: 146993 - DNA, 31 bp, Homo sapiens; identical to SEQ ID NO: 67089
  chr3:183657846-183657877
  hypo

SEQ ID NO: 146994 - DNA, 31 bp, Homo sapiens; identical to SEQ ID NO: 67090
  chr3:183659806-183659837
  hypo

SEQ ID NO: 146995 - DNA, 102 bp, Homo sapiens; identical to SEQ ID NO: 18113
  chr3:183670354-183670456
  hypo

SEQ ID NO: 146996 - DNA, 88 bp, Homo sapiens; identical to SEQ ID NO: 40007
  chr3:183676017-183676105
  hypo

SEQ ID NO: 146997 - DNA, 32 bp, Homo sapiens
  chr3:183676453-183676485
  hypo
ttgtcaggatctcactcggtcccccaggctgg

SEQ ID NO: 146998 - DNA, 31 bp, Homo sapiens; identical to SEQ ID NO: 67094
  chr3:183681332-183681363
  hypo

SEQ ID NO: 146999 - DNA, 154 bp, Homo sapiens; identical to SEQ ID NO: 67095
  chr3:183684047-183684201
  hypo

SEQ ID NO: 147000 - DNA, 31 bp, Homo sapiens; identical to SEQ ID NO: 67096
  chr3:183687201-183687232
  hypo

SEQ ID NO: 147001 - DNA, 195 bp, Homo sapiens
  chr3:183688725-183688920
  hypo
gaatatatacacatccggggccctctaatgacacggacctgtgaatatggtgctggttccgaaatacatagtctgtattttaaaagccttgaacctggcatctctgttccaccattccctataggaggccctctgagactaatcttgtgctacctgggctgtgacatcatctaccgttaacgatccttaacttat

SEQ ID NO: 147002 - DNA, 19 bp, Homo sapiens
  chr3:183692401-183692420
  hypo
taaatttaattccagaaaa

SEQ ID NO: 147003 - DNA, 30 bp, Homo sapiens
  chr3:183696405-183696435
  hypo
ttttccaatatccgacgctcctcctcgcgg

SEQ ID NO: 147004 - DNA, 32 bp, Homo sapiens
  chr3:183698520-183698552
  hypo
gagacagtctcgctgcgacacccaggctggag

SEQ ID NO: 147005 - DNA, 211 bp, Homo sapiens; identical to SEQ ID NO: 67097
  chr3:183703568-183703779
  hypo

SEQ ID NO: 147006 - DNA, 41 bp, Homo sapiens; identical to SEQ ID NO: 18116
  chr3:183710272-183710313
  hypo

SEQ ID NO: 147007 - DNA, 30 bp, Homo sapiens; identical to SEQ ID NO: 18117
  chr3:183713881-183713911
  hypo

SEQ ID NO: 147008 - DNA, 23 bp, Homo sapiens
  chr3:183716581-183716604
  hypo
aaacaatgactcagggccaggcg

SEQ ID NO: 147009 - DNA, 200 bp, Homo sapiens
  chr3:183720217-183720417
  hypo
caataacaaaaagcaattcagattctgtcaaggttcaaacaaagatcagggaaacacacattcatagacacctctggtatgaaaaacaggtaacattcgattcataagcagacagatctgctcttgcaaaagacgcttctgcgggcgctaacgccatcctcaggcctcagataatcagcgcacctatcacaccccatggc

SEQ ID NO: 147010 - DNA, 144 bp, Homo sapiens; identical to SEQ ID NO: 67102
  chr3:183728815-183728959
  hypo

SEQ ID NO: 147011 - DNA, 165 bp, Homo sapiens
  chr3:183731932-183732097
  hypo
ttataggcgtgagccaccgcgcccggccaaaaaataagtttctaaattacccattatacgaaaaaagatgtgttttagtacaacaagcaggtaagagactcttaggaaaggaaactgaccggtcgagttctcctgaacttggaatcttcacggtctctgtgcgtc

SEQ ID NO: 147012 - DNA, 31 bp, Homo sapiens; identical to SEQ ID NO: 67103
  chr3:183756606-183756637
  hypo

SEQ ID NO: 147013 - DNA, 145 bp, Homo sapiens
  chr3:183775517-183775662
  hypo
gtctcaaaacaaaacaaaacaaaacaaaacaaaaaacaaaaacaaaagcctaataagcgcacatcaccccagatgccgattaaattgttccaggtggggcccaggtgatgctaacgtgcagacggggttacgacctgctgcttta

SEQ ID NO: 147014 - DNA, 30 bp, Homo sapiens; identical to SEQ ID NO: 67104
  chr3:183801205-183801235
  hypo

SEQ ID NO: 147015 - DNA, 349 bp, Homo sapiens
  chr3:183801858-183802207
  hypo
caggcccaaaggagccgggggagttagcagggaaggaggtgagacccggagagactgagctagatgggggctcaggatggacaaacgcccagctagtggagctgtgggtgcagttcagccacgcgatggacaccctgctcttccgcctcgggaacacctaggagttgagttctgagtgtgcgcgagcagcagggttcagcttcccttggcctcagcgggccatgccaggcgctgcttctgcactgcagtcggcagacccagccccagccatgccatgatccctgctccagcccttcctgtggttaaatagaaccactgctagcactcccagaaacgagaatgtatttcc

SEQ ID NO: 147016 - DNA, 31 bp, Homo sapiens; identical to SEQ ID NO: 18120
  chr3:183806894-183806925
  hypo

SEQ ID NO: 147017 - DNA, 31 bp, Homo sapiens; identical to SEQ ID NO: 67107
  chr3:183830375-183830406
  hypo

SEQ ID NO: 147018 - DNA, 87 bp, Homo sapiens; identical to SEQ ID NO: 109373
  chr3:183851914-183852001
  hypo

SEQ ID NO: 147019 - DNA, 30 bp, Homo sapiens; identical to SEQ ID NO: 67109
  chr3:183853604-183853634
  hypo

SEQ ID NO: 147020 - DNA, 44 bp, Homo sapiens; identical to SEQ ID NO: 18122
  chr3:183872151-183872195
  hypo

SEQ ID NO: 147021 - DNA, 30 bp, Homo sapiens; identical to SEQ ID NO: 18123
  chr3:183886659-183886689
  hypo

SEQ ID NO: 147022 - DNA, 30 bp, Homo sapiens
  chr3:183889553-183889583
  hypo
ctttccagagagaatcggatcgcaccacgt

SEQ ID NO: 147023 - DNA, 30 bp, Homo sapiens; identical to SEQ ID NO: 67112
  chr3:183890221-183890251
  hypo

SEQ ID NO: 147024 - DNA, 137 bp, Homo sapiens; identical to SEQ ID NO: 67113
  chr3:183891938-183892075
  hypo

SEQ ID NO: 147025 - DNA, 30 bp, Homo sapiens; identical to SEQ ID NO: 18125
  chr3:183895700-183895730
  hypo

SEQ ID NO: 147026 - DNA, 215 bp, Homo sapiens; identical to SEQ ID NO: 67115
  chr3:183898697-183898912
  hypo

SEQ ID NO: 147027 - DNA, 30 bp, Homo sapiens; identical to SEQ ID NO: 67116
  chr3:183911491-183911521
  hypo

SEQ ID NO: 147028 - DNA, 23 bp, Homo sapiens
  chr3:183918605-183918628
  hypo
gcgagactccatctcaaaataca

SEQ ID NO: 147029 - DNA, 101 bp, Homo sapiens; identical to SEQ ID NO: 67118
  chr3:183921231-183921332
  hypo

SEQ ID NO: 147030 - DNA, 143 bp, Homo sapiens; identical to SEQ ID NO: 67119
  chr3:184015335-184015478
  hypo

SEQ ID NO: 147031 - DNA, 23 bp, Homo sapiens
  chr3:184015597-184015620
  hypo
gcgtggtggcacaaaaattcaac

SEQ ID NO: 147032 - DNA, 264 bp, Homo sapiens
  chr3:184015972-184016236
  hypo
gtcctgacataagcgcgtcagtcacacgcctctaaggcttcacagggaaagacgagaagatagaggacgaagaccttgtcttgttctgcttttagctccagaacttggcggggagcacagggctttattgatcgatgtcaactccacctggctccccaaagtatttaaaatggtagccacgggaatagcagagtactctctttcaactggggaggaatatcaaatgaggttaataggccgggcgcggtggttcacacctgtaat

SEQ ID NO: 147033 - DNA, 111 bp, Homo sapiens; identical to SEQ ID NO: 67121
  chr3:184018032-184018143
  hypo

SEQ ID NO: 147034 - DNA, 292 bp, Homo sapiens
  chr3:184026066-184026358
  hypo
aaagtgaggtgggggcgtctctggttcgtagtagggtgtatgaggggaggagtgtggattcagtcgtatgactgacgggttaaagggtcagcgctgaggtgggctctcaatgtttctggccaggcctgtctttttgtctcttaactttttgtcctgtctgcttccctcagttattctaggcaaatcacactatgtattgtatgggctggtggctgccatgcagccccgaatgctggttacgtttgatgaggagctgcggccattgccagtgtctgtccgtgtgggccaggtg

SEQ ID NO: 147035 - DNA, 73 bp, Homo sapiens
  chr3:184031680-184031753
  hypo
attttcaaagcctgcataattcgtattgtatcacgatttacttaggcaggacggagtctttaatttctttctt

SEQ ID NO: 147036 - DNA, 30 bp, Homo sapiens; identical to SEQ ID NO: 18129
  chr3:184041990-184042020
  hypo

SEQ ID NO: 147037 - DNA, 74 bp, Homo sapiens; identical to SEQ ID NO: 67124
  chr3:184042660-184042734
  hypo

SEQ ID NO: 147038 - DNA, 144 bp, Homo sapiens; identical to SEQ ID NO: 67125
  chr3:184043271-184043415
  hypo

SEQ ID NO: 147039 - DNA, 87 bp, Homo sapiens
  chr3:184045149-184045236
  hypo
agcggagtagagaacggccctcccagcctgaggggctgcgcaaggcagctagcctcacggaggatcgggaccgtgggcgggatgccg

SEQ ID NO: 147040 - DNA, 30 bp, Homo sapiens; identical to SEQ ID NO: 18131
  chr3:184048817-184048847
  hypo

SEQ ID NO: 147041 - DNA, 197 bp, Homo sapiens
  chr3:184057051-184057248
  hypo
aaaagaagaggctgtcggctgaaagcattatttgcaggtgacacttgagatgggccttaagtgatggcaagcattttttcacgtaaggatggcattcttggcccagaggaaagctgagttccttttcctggaggcaggcgggctgcttgctgacagggattggtggagaagggtttttgttttttgttatttatttt

SEQ ID NO: 147042 - DNA, 17 bp, Homo sapiens
  chr3:184057547-184057564
  hypo
tgagaaggggggtttta

SEQ ID NO: 147043 - DNA, 164 bp, Homo sapiens; identical to SEQ ID NO: 18133
  chr3:184059510-184059674
  hypo

SEQ ID NO: 147044 - DNA, 200 bp, Homo sapiens
  chr3:184059877-184060077
  hypo
acgtgaccaagcctaccgccatggcccagggccgagtggctcacctcattgagtggaagggctggagcaagccgagtgactcacctgctgccctggaatcagccttttcctcctattcagacctcagcgagggcgaacaagaggctcgctttgcagcaggtggatggcagaaaggggataagctacactcttggcacagg

SEQ ID NO: 147045 - DNA, 30 bp, Homo sapiens; identical to SEQ ID NO: 67131
  chr3:184064339-184064369
  hypo

SEQ ID NO: 147046 - DNA, 190 bp, Homo sapiens
  chr3:184067617-184067807
  hypo
tggtctggccctagctgtggccgccactctggcctttaccattgcttctccgtgggtggcctctgaatgaattacttattagccggcacagcgatctccagttgcacgggttcctaagtagtctccagtgttttctctctcttatctgaatgttcccctcctgaacttaattgggcgactacctattgat

SEQ ID NO: 147047 - DNA, 108 bp, Homo sapiens; identical to SEQ ID NO: 67133
  chr3:184070506-184070614
  hypo

SEQ ID NO: 147048 - DNA, 31 bp, Homo sapiens; identical to SEQ ID NO: 18135
  chr3:184070999-184071030
  hypo

SEQ ID NO: 147049 - DNA, 326 bp, Homo sapiens; identical to SEQ ID NO: 67135
  chr3:184071378-184071704
  hypo

SEQ ID NO: 147050 - DNA, 80 bp, Homo sapiens; identical to SEQ ID NO: 18137
  chr3:184072026-184072106
  hypo

SEQ ID NO: 147051 - DNA, 31 bp, Homo sapiens; identical to SEQ ID NO: 67137
  chr3:184073334-184073365
  hypo

SEQ ID NO: 147052 - DNA, 26 bp, Homo sapiens
  chr3:184092860-184092886
  hypo
cccccggcccacatgtagaagtttat

SEQ ID NO: 147053 - DNA, 225 bp, Homo sapiens; identical to SEQ ID NO: 40022
  chr3:184097687-184097912
  hypo

SEQ ID NO: 147054 - DNA, 281 bp, Homo sapiens; identical to SEQ ID NO: 40023
  chr3:184098371-184098652
  hypo

SEQ ID NO: 147055 - DNA, 149 bp, Homo sapiens; identical to SEQ ID NO: 109400
  chr3:184099331-184099480
  hypo

SEQ ID NO: 147056 - DNA, 30 bp, Homo sapiens; identical to SEQ ID NO: 67141
  chr3:184100177-184100207
  hypo

SEQ ID NO: 147057 - DNA, 30 bp, Homo sapiens; identical to SEQ ID NO: 67142
  chr3:184122273-184122303
  hypo

SEQ ID NO: 147058 - DNA, 31 bp, Homo sapiens; identical to SEQ ID NO: 67143
  chr3:184127162-184127193
  hypo

SEQ ID NO: 147059 - DNA, 213 bp, Homo sapiens
  chr3:184133790-184134003
  hypo
aatgttccgccctgacgtttccgcatggcttgcccttcatttcattcaatctccacatttccactcaaatcctacctctcagccatcactgtcaattgccctccacccgaagaccaccaggatcccacctatagtggagcacttggggtttatggctggttgcagtgaaggggaacgcacgccatggggcactgtgggcgtatcagtgagggg

SEQ ID NO: 147060 - DNA, 147 bp, Homo sapiens
  chr3:184144867-184145014
  hypo
gaagggcagaattatcgatctcgtcttcccagcccgctctctgaaactaggtcccagaacgtgtcctgtggggaagtgggcaatgacaagccataggagctgacatagatcagctctaagtagcacggagcctctcatagtcaccca

SEQ ID NO: 147061 - DNA, 87 bp, Homo sapiens; identical to SEQ ID NO: 18140
  chr3:184186551-184186638
  hypo

SEQ ID NO: 147062 - DNA, 44 bp, Homo sapiens
  chr3:184200586-184200630
  hypo
catcattttggtccgcgcacacacacacacgcacgcacatacac

SEQ ID NO: 147063 - DNA, 219 bp, Homo sapiens; identical to SEQ ID NO: 18141
  chr3:184225974-184226193
  hypo

SEQ ID NO: 147064 - DNA, 102 bp, Homo sapiens; identical to SEQ ID NO: 67149
  chr3:184257023-184257125
  hypo

SEQ ID NO: 147065 - DNA, 30 bp, Homo sapiens
  chr3:184265135-184265165
  hypo
tacagctgtggcacccgctcagtcgtcttc

SEQ ID NO: 147066 - DNA, 172 bp, Homo sapiens; identical to SEQ ID NO: 18142
  chr3:184273716-184273888
  hypo

SEQ ID NO: 147067 - DNA, 1513 bp, Homo sapiens; identical to SEQ ID NO: 109403
  chr3:184278876-184280389
  hypo

SEQ ID NO: 147068 - DNA, 43 bp, Homo sapiens
  chr3:184282048-184282091
  hypo
tgggatgcctctgggaagcagcggtgcctacaagggtggtttc

SEQ ID NO: 147069 - DNA, 30 bp, Homo sapiens; identical to SEQ ID NO: 67152
  chr3:184290374-184290404
  hypo

SEQ ID NO: 147070 - DNA, 30 bp, Homo sapiens; identical to SEQ ID NO: 67153
  chr3:184290705-184290735
  hypo

SEQ ID NO: 147071 - DNA, 32 bp, Homo sapiens
  chr3:184294857-184294889
  hypo
atctgctggcccacacgcgctacacctttgag

SEQ ID NO: 147072 - DNA, 166 bp, Homo sapiens; identical to SEQ ID NO: 67155
  chr3:184295483-184295649
  hypo

SEQ ID NO: 147073 - DNA, 31 bp, Homo sapiens; identical to SEQ ID NO: 67156
  chr3:184298770-184298801
  hypo

SEQ ID NO: 147074 - DNA, 191 bp, Homo sapiens; identical to SEQ ID NO: 67157
  chr3:184316125-184316316
  hypo

SEQ ID NO: 147075 - DNA, 337 bp, Homo sapiens; identical to SEQ ID NO: 109407
  chr3:184319505-184319842
  hypo

SEQ ID NO: 147076 - DNA, 358 bp, Homo sapiens; identical to SEQ ID NO: 109408
  chr3:184319873-184320231
  hypo

SEQ ID NO: 147077 - DNA, 111 bp, Homo sapiens; identical to SEQ ID NO: 3018
  chr3:184321762-184321873
  hypo

SEQ ID NO: 147078 - DNA, 378 bp, Homo sapiens; identical to SEQ ID NO: 109410
  chr3:184322209-184322587
  hypo

SEQ ID NO: 147079 - DNA, 183 bp, Homo sapiens; identical to SEQ ID NO: 67161
  chr3:184331110-184331293
  hypo

SEQ ID NO: 147080 - DNA, 149 bp, Homo sapiens; identical to SEQ ID NO: 67162
  chr3:184340017-184340166
  hypo

SEQ ID NO: 147081 - DNA, 112 bp, Homo sapiens
  chr3:184347418-184347530
  hypo
cagcaaggctgagcacgctcagagggaaggcggagaaggcccccgcctcctgctcacggcctactgtctccacaggcccaggctgcacgggcaggaccgcggctacatgtct

SEQ ID NO: 147082 - DNA, 31 bp, Homo sapiens; identical to SEQ ID NO: 18149
  chr3:184353658-184353689
  hypo

SEQ ID NO: 147083 - DNA, 89 bp, Homo sapiens; identical to SEQ ID NO: 67164
  chr3:184357509-184357598
  hypo

SEQ ID NO: 147084 - DNA, 46 bp, Homo sapiens; identical to SEQ ID NO: 67165
  chr3:184378703-184378749
  hypo

SEQ ID NO: 147085 - DNA, 30 bp, Homo sapiens
  chr3:184387443-184387473
  hypo
gaggtgaagcctctccgtactaagcctggt

SEQ ID NO: 147086 - DNA, 214 bp, Homo sapiens
  chr3:184434952-184435166
  hypo
gcccagtgcaaggggcgggcgagagcctggccaggagccagggccctggtctgaatggctgttgccaaggggctgccaacagcccatctcaatccccaagaggctgggcaagggcggggggcccaacccccacctcgaaggcccacctcacgccattcgcaggccgtgatcagaatgtgcaggacgcaggggctttgagcggctgaacagagcc

SEQ ID NO: 147087 - DNA, 222 bp, Homo sapiens; identical to SEQ ID NO: 67166
  chr3:184459042-184459264
  hypo

SEQ ID NO: 147088 - DNA, 31 bp, Homo sapiens; identical to SEQ ID NO: 67167
  chr3:184491997-184492028
  hypo

SEQ ID NO: 147089 - DNA, 30 bp, Homo sapiens
  chr3:184499441-184499471
  hypo
tcactacgtgggcaacgctgatattatgat

SEQ ID NO: 147090 - DNA, 23 bp, Homo sapiens
  chr3:184566643-184566666
  hypo
accgcacccggccttttttttct

SEQ ID NO: 147091 - DNA, 109 bp, Homo sapiens
  chr3:184580625-184580734
  hypo
acccaaatgatgaagcgggtgtggtctcacttttgttttgttgtgtgcttgaattacagtggataaattcacgcacagttgtgctcttagacagcgtagagaagttgca

SEQ ID NO: 147092 - DNA, 327 bp, Homo sapiens; identical to SEQ ID NO: 18152
  chr3:184626081-184626408
  hypo

SEQ ID NO: 147093 - DNA, 39 bp, Homo sapiens; identical to SEQ ID NO: 67169
  chr3:184630018-184630057
  hypo

SEQ ID NO: 147094 - DNA, 30 bp, Homo sapiens
  chr3:184645597-184645627
  hypo
tgcagtcacaatactcgttcttttgtattt

SEQ ID NO: 147095 - DNA, 100 bp, Homo sapiens; identical to SEQ ID NO: 18153
  chr3:184661514-184661614
  hypo

SEQ ID NO: 147096 - DNA, 31 bp, Homo sapiens; identical to SEQ ID NO: 67171
  chr3:184689920-184689951
  hypo

SEQ ID NO: 147097 - DNA, 18 bp, Homo sapiens
  chr3:184701678-184701696
  hypo
ctcaccaagcttggccgg

SEQ ID NO: 147098 - DNA, 30 bp, Homo sapiens; identical to SEQ ID NO: 67172
  chr3:184769939-184769969
  hypo

SEQ ID NO: 147099 - DNA, 298 bp, Homo sapiens; identical to SEQ ID NO: 18154
  chr3:184784965-184785263
  hypo

SEQ ID NO: 147100 - DNA, 30 bp, Homo sapiens
  chr3:184791024-184791054
  hypo
atgaacaagcctctacggcttcgggggcaa

SEQ ID NO: 147101 - DNA, 30 bp, Homo sapiens
  chr3:184792638-184792668
  hypo
ctcacacctggcccacggtgaacctcccct

SEQ ID NO: 147102 - DNA, 435 bp, Homo sapiens
  chr3:184800446-184800881
  hypo
cggctccttccctttcggtacctcctcaatctgatccaagattctctgcgaccatcacttcaccgccttcaaatctcccagtgaaattaaggcggggtcacaattcatgacaccagatgctacatagaaagtaagtcaggatacaaaagaaaactgtttataataaaaagaatgtcttagttgtaagacggagagaagctaatcagcataccactgaactgctacggttgttggttggagcggggcggggtgggtagaaaatatcaacagcattggaaaaaaggatccaccagacaaaggtacaaaagctcggcgtgggtccgaggctgtggcttcctgtctggactctcacacagtcgtttctatcgtttcaatcacttccaggtcagactgcgagggggagagaagggtgcactcatccggttcccagctgct

SEQ ID NO: 147103 - DNA, 94 bp, Homo sapiens; identical to SEQ ID NO: 18156
  chr3:184833595-184833689
  hypo

SEQ ID NO: 147104 - DNA, 93 bp, Homo sapiens; identical to SEQ ID NO: 67176
  chr3:184833748-184833841
  hypo

SEQ ID NO: 147105 - DNA, 1188 bp, Homo sapiens; identical to SEQ ID NO: 40036
  chr3:184870164-184871352
  hypo

SEQ ID NO: 147106 - DNA, 131 bp, Homo sapiens
  chr3:184880627-184880758
  hypo
tgatagtgatgcaataatggccgtcatctccactgaaggaggcgagactccagcacacagcgaatgtcctcgccattctattcaaagagaagagtcatcctggaacagccgtgctggaactctcagaactc

SEQ ID NO: 147107 - DNA, 31 bp, Homo sapiens; identical to SEQ ID NO: 67179
  chr3:184935944-184935975
  hypo

SEQ ID NO: 147108 - DNA, 88 bp, Homo sapiens
  chr3:185001578-185001666
  hypo
cagggaggagttggaccgttgtaaataaactgctgttgtagcactgactgttcttaatgctttcttttaagcaaagtaaacttacttt

SEQ ID NO: 147109 - DNA, 28 bp, Homo sapiens
  chr3:185001905-185001933
  hypo
gtgaaccactacgcgcggccactttcct

SEQ ID NO: 147110 - DNA, 46 bp, Homo sapiens; identical to SEQ ID NO: 67181
  chr3:185055820-185055866
  hypo

SEQ ID NO: 147111 - DNA, 98 bp, Homo sapiens; identical to SEQ ID NO: 67182
  chr3:185061153-185061251
  hypo

SEQ ID NO: 147112 - DNA, 154 bp, Homo sapiens
  chr3:185069788-185069942
  hypo
agcttcatctctaacaagacccggaagttgcaaacatcactcactcactcacatctcattgactagaacttagtcatgtggtcacgtgtacagccaggaaagtacagaactatttagcagagtggccacgtacccacctaaaactttaaaagta

SEQ ID NO: 147113 - DNA, 143 bp, Homo sapiens; identical to SEQ ID NO: 18159
  chr3:185191404-185191547
  hypo

SEQ ID NO: 147114 - DNA, 30 bp, Homo sapiens; identical to SEQ ID NO: 67185
  chr3:185212882-185212912
  hypo

SEQ ID NO: 147115 - DNA, 30 bp, Homo sapiens; identical to SEQ ID NO: 18160
  chr3:185214820-185214850
  hypo

SEQ ID NO: 147116 - DNA, 30 bp, Homo sapiens; identical to SEQ ID NO: 3021
  chr3:185233301-185233331
  hypo

SEQ ID NO: 147117 - DNA, 27 bp, Homo sapiens
  chr3:185244739-185244766
  hypo
aaaatatgccgggcgcggtggctcacg

SEQ ID NO: 147118 - DNA, 27 bp, Homo sapiens
  chr3:185245065-185245092
  hypo
gataatcatccacgctctagcacaagg

SEQ ID NO: 147119 - DNA, 279 bp, Homo sapiens
  chr3:185245475-185245754
  hypo
cctcaggtgggtgagcgctcacactcccgtcccacttggccaggactcctttccatggctctgcagcttgttcccacagtggagacggttaccctggctgtgcccctgagaatggcatccagactccatcaggggcatgtgtcatgcagagctcaacagtagggaacgtacacgtgtatgaggttcaaggggtggggataaacgggcggtccccaggaaaaaagcaccaaagggcacattaaagagaaaagagcagcctgggcgcagtggctcacacct

SEQ ID NO: 147120 - DNA, 34 bp, Homo sapiens; identical to SEQ ID NO: 18162
  chr3:185266641-185266675
  hypo

SEQ ID NO: 147121 - DNA, 77 bp, Homo sapiens; identical to SEQ ID NO: 67189
  chr3:185270831-185270908
  hypo

SEQ ID NO: 147122 - DNA, 91 bp, Homo sapiens; identical to SEQ ID NO: 67190
  chr3:185271290-185271381
  hypo

SEQ ID NO: 147123 - DNA, 361 bp, Homo sapiens; identical to SEQ ID NO: 67191
  chr3:185277644-185278005
  hypo

SEQ ID NO: 147124 - DNA, 21 bp, Homo sapiens
  chr3:185278244-185278265
  hypo
ggcccagaaagtatttttaaa

SEQ ID NO: 147125 - DNA, 19 bp, Homo sapiens
  chr3:185301293-185301312
  hypo
tttgtttttgagacagagt

SEQ ID NO: 147126 - DNA, 105 bp, Homo sapiens; identical to SEQ ID NO: 18166
  chr3:185303179-185303284
  hypo

SEQ ID NO: 147127 - DNA, 343 bp, Homo sapiens
  chr3:185317866-185318209
  hypo
gagccactgcgcccagcccaaagatgatattactttgaagccttttatttcatttaaaaagttaatataaattgaatttcatcatctgtttggaatatttgtttagaattgtttaccgttaagattgacacatatgaaggatggtagatttgtgcctgagatgctggcactactgtgtttctgtgagttttgtgtagtctagtcagagaagcccaggtattcctagggcaggtttcttgtgtaaagaggtccataatcggttatctgcaacccctgggagccagatgtgtttaggaattcagaatttttcatattttaggtatgttaccggccaaacatacgg

SEQ ID NO: 147128 - DNA, 81 bp, Homo sapiens; identical to SEQ ID NO: 18168
  chr3:185352336-185352417
  hypo

SEQ ID NO: 147129 - DNA, 404 bp, Homo sapiens
  chr3:185360804-185361208
  hypo
agagcgagactctgtgtcaaaaaaaaaaaaacaaaaaaaacccactgttttagacataatgctattgtacacttaatacagtgtaaacataactcacatgcagtgagacactaaaacgtgtatgactcattttattgcaaagttcgctttactgtggtggtctggaactgaacctgcgacgttcctgaggtatgcctgcacttactagtgagcttcccgtggaggcgtgaagtgcctcttcccggaactgccgggcatattatcctccccctttcctccacttaaaaagcagctttgcctggccaggcttgcagttccttaaggatagactggtcttctctagcttgacatgcagtcgatccatccctctagctccgaggttcggaaacttcagtgcgcacagc

SEQ ID NO: 147130 - DNA, 30 bp, Homo sapiens
  chr3:185361684-185361714
  hypo
aaaaagccctaatggcgcgtaccctattaa

SEQ ID NO: 147131 - DNA, 116 bp, Homo sapiens; identical to SEQ ID NO: 67198
  chr3:185362625-185362741
  hypo

SEQ ID NO: 147132 - DNA, 285 bp, Homo sapiens
  chr3:185363068-185363353
  hypo
gcctgcagaagccctggggggcgggaggcggggctcggtggttctggcaaacctggctgaccttccccgcccctcctcggcccctggggttctcagggcctcggcagagtccctggccgcctccgcagacttctcattcctcagatggtctttggtttgctcccgatctggctggctgcgtttggtctcattctgtcaggtgttggaagggctacattcatccgttgttttgctggtgcctgtgggagcctcacttgctgcgctgtgaggcgactccctgagggt

SEQ ID NO: 147133 - DNA, 105 bp, Homo sapiens
  chr3:185363651-185363756
  hypo
cagttcactgctggacggacaggccaggaagcagaagcagggcgccagcaactgggggccgtgcagagtcagatgctacacttgggctcccgtgctgctcccgcc

SEQ ID NO: 147134 - DNA, 30 bp, Homo sapiens
  chr3:185364346-185364376
  hypo
gggttgtggtgagaccgaagaggaggagga

SEQ ID NO: 147135 - DNA, 197 bp, Homo sapiens; identical to SEQ ID NO: 18173
  chr3:185365779-185365976
  hypo

SEQ ID NO: 147136 - DNA, 74 bp, Homo sapiens
  chr3:185373821-185373895
  hypo
ctctgctgaacaagacggggattggatgagatggtccctcaagccccttttagttgaaacggtcctttctcctg

SEQ ID NO: 147137 - DNA, 30 bp, Homo sapiens
  chr3:185374352-185374382
  hypo
caaaaactctgtttccgaaaatgtttcatg

SEQ ID NO: 147138 - DNA, 506 bp, Homo sapiens
  chr3:185374973-185375479
  hypo
ctctgcatggtgtggcgctgcctgggactgagagggaacaagggccgtgggatgagaggaggtggtagaagggccacagggccgtcaggagcagcctcaccttgatagaggctccggcgaatctcgccagctgtttgatgtgtgcccccttcttcccgatgatggcgcccacagcctgggttgggatgaagagattcacaatctcctgctctggatactgggagggcgagacaagaaagaagacatcattccaaccaggctttctcctccaggcactcaacaggtaccaagcaccttaccatgaaccccatggtgggaaggccccgccacccaaggaaatggccaaaatggtgcacaggatccttctgcggcctgcggctctgcaggtgtgaagcctgaggaagggacctgagcacaggcagcgctagtgataatcaagggcatcctcctcttgagcttctcaatttgttggattccaaaagctgtctgatcgcaggttttctgtc

SEQ ID NO: 147139 - DNA, 30 bp, Homo sapiens; identical to SEQ ID NO: 67203
  chr3:185375910-185375940
  hypo

SEQ ID NO: 147140 - DNA, 159 bp, Homo sapiens; identical to SEQ ID NO: 67204
  chr3:185376172-185376331
  hypo

SEQ ID NO: 147141 - DNA, 31 bp, Homo sapiens; identical to SEQ ID NO: 67205
  chr3:185384087-185384118
  hypo

SEQ ID NO: 147142 - DNA, 30 bp, Homo sapiens
  chr3:185394175-185394205
  hypo
gaattccaggccgggcgccgtggttcacgc

SEQ ID NO: 147143 - DNA, 22 bp, Homo sapiens
  chr3:185402473-185402495
  hypo
cgtgagtcaccacatccagcct

SEQ ID NO: 147144 - DNA, 258 bp, Homo sapiens; identical to SEQ ID NO: 18175
  chr3:185407214-185407472
  hypo

SEQ ID NO: 147145 - DNA, 30 bp, Homo sapiens
  chr3:185435877-185435907
  hypo
gggctgggcaaactacggcccctgcgctac

SEQ ID NO: 147146 - DNA, 111 bp, Homo sapiens
  chr3:185441711-185441822
  hypo
gggaggcaaccgaagcgggtaagcaggttcggtctgggcaatcccagggaagccgaaggagacaaatccagcgccagactatgcagagacaaatttcggtaactctacgtg

SEQ ID NO: 147147 - DNA, 267 bp, Homo sapiens; identical to SEQ ID NO: 67207
  chr3:185445846-185446113
  hypo

SEQ ID NO: 147148 - DNA, 31 bp, Homo sapiens; identical to SEQ ID NO: 67208
  chr3:185448439-185448470
  hypo

SEQ ID NO: 147149 - DNA, 30 bp, Homo sapiens; identical to SEQ ID NO: 18177
  chr3:185457319-185457349
  hypo

SEQ ID NO: 147150 - DNA, 31 bp, Homo sapiens; identical to SEQ ID NO: 67210
  chr3:185498444-185498475
  hypo

SEQ ID NO: 147151 - DNA, 23 bp, Homo sapiens
  chr3:185504510-185504533
  hypo
tggacgcgcgtgacagaaccctc

SEQ ID NO: 147152 - DNA, 35 bp, Homo sapiens; identical to SEQ ID NO: 18178
  chr3:185551484-185551519
  hypo

SEQ ID NO: 147153 - DNA, 181 bp, Homo sapiens; identical to SEQ ID NO: 67212
  chr3:185551758-185551939
  hypo

SEQ ID NO: 147154 - DNA, 33 bp, Homo sapiens
  chr3:185565287-185565320
  hypo
aagtgttgggattacaggcgtgagccatggcgc

SEQ ID NO: 147155 - DNA, 39 bp, Homo sapiens; identical to SEQ ID NO: 67213
  chr3:185630394-185630433
  hypo

SEQ ID NO: 147156 - DNA, 38 bp, Homo sapiens; identical to SEQ ID NO: 18180
  chr3:185630672-185630710
  hypo

SEQ ID NO: 147157 - DNA, 181 bp, Homo sapiens; identical to SEQ ID NO: 18181
  chr3:185643231-185643412
  hypo

SEQ ID NO: 147158 - DNA, 81 bp, Homo sapiens; identical to SEQ ID NO: 18182
  chr3:185656907-185656988
  hypo

SEQ ID NO: 147159 - DNA, 35 bp, Homo sapiens; identical to SEQ ID NO: 18183
  chr3:185667604-185667639
  hypo

SEQ ID NO: 147160 - DNA, 96 bp, Homo sapiens; identical to SEQ ID NO: 67218
  chr3:185668396-185668492
  hypo

SEQ ID NO: 147161 - DNA, 21 bp, Homo sapiens
  chr3:185681299-185681320
  hypo
tcaaggaaaactgtgaaggcc

SEQ ID NO: 147162 - DNA, 81 bp, Homo sapiens; identical to SEQ ID NO: 67220
  chr3:185681619-185681700
  hypo

SEQ ID NO: 147163 - DNA, 25 bp, Homo sapiens
  chr3:185750687-185750712
  hypo
atgtcaggggtccccaaccctcggg

SEQ ID NO: 147164 - DNA, 25 bp, Homo sapiens
  chr3:185754378-185754403
  hypo
gtgctggcaaaacaccgattgccgg

SEQ ID NO: 147165 - DNA, 714 bp, Homo sapiens; identical to SEQ ID NO: 40042
  chr3:185825459-185826173
  hypo

SEQ ID NO: 147166 - DNA, 1076 bp, Homo sapiens; identical to SEQ ID NO: 109427
  chr3:185826424-185827500
  hypo

SEQ ID NO: 147167 - DNA, 26 bp, Homo sapiens
  chr3:185909804-185909830
  hypo
ttattttttgagacagagtttcgctc

SEQ ID NO: 147168 - DNA, 30 bp, Homo sapiens
  chr3:185938732-185938762
  hypo
gcaggactccaagcacgaagattgccaaag

SEQ ID NO: 147169 - DNA, 30 bp, Homo sapiens
  chr3:185979980-185980010
  hypo
ccaaatgctcatttccggccccagtttcct

SEQ ID NO: 147170 - DNA, 30 bp, Homo sapiens; identical to SEQ ID NO: 67225
  chr3:186075864-186075894
  hypo

SEQ ID NO: 147171 - DNA, 1081 bp, Homo sapiens; identical to SEQ ID NO: 40045
  chr3:186078689-186079770
  hypo

SEQ ID NO: 147172 - DNA, 484 bp, Homo sapiens; identical to SEQ ID NO: 3029
  chr3:186079818-186080302
  hypo

SEQ ID NO: 147173 - DNA, 30 bp, Homo sapiens
  chr3:186085566-186085596
  hypo
aggacatggtgtgcacgctgcccggctttg

SEQ ID NO: 147174 - DNA, 21 bp, Homo sapiens
  chr3:186102316-186102337
  hypo
acaagtggccgggcgcggcgc

SEQ ID NO: 147175 - DNA, 44 bp, Homo sapiens; identical to SEQ ID NO: 18190
  chr3:186142829-186142873
  hypo

SEQ ID NO: 147176 - DNA, 30 bp, Homo sapiens
  chr3:186170612-186170642
  hypo
gtttccaaaacacaccgacactcagtctcc

SEQ ID NO: 147177 - DNA, 37 bp, Homo sapiens; identical to SEQ ID NO: 18191
  chr3:186271904-186271941
  hypo

SEQ ID NO: 147178 - DNA, 35 bp, Homo sapiens; identical to SEQ ID NO: 67230
  chr3:186309944-186309979
  hypo

SEQ ID NO: 147179 - DNA, 31 bp, Homo sapiens; identical to SEQ ID NO: 18192
  chr3:186329021-186329052
  hypo

SEQ ID NO: 147180 - DNA, 30 bp, Homo sapiens; identical to SEQ ID NO: 18193
  chr3:186338548-186338578
  hypo

SEQ ID NO: 147181 - DNA, 30 bp, Homo sapiens; identical to SEQ ID NO: 67233
  chr3:186370493-186370523
  hypo

SEQ ID NO: 147182 - DNA, 192 bp, Homo sapiens; identical to SEQ ID NO: 67234
  chr3:186409539-186409731
  hypo

SEQ ID NO: 147183 - DNA, 100 bp, Homo sapiens; identical to SEQ ID NO: 18195
  chr3:186429028-186429128
  hypo

SEQ ID NO: 147184 - DNA, 110 bp, Homo sapiens
  chr3:186442809-186442919
  hypo
ttagggcagtgtatgcgaatgctgattgcgatcattaatgctgtgtttttgtctgctctttgttaagccgagggccctgtggtgacagcccagtacgactgcctcggctg

SEQ ID NO: 147185 - DNA, 30 bp, Homo sapiens
  chr3:186443259-186443289
  hypo
taacaaatgggtaatcgtcattacaggctc

SEQ ID NO: 147186 - DNA, 225 bp, Homo sapiens
  chr3:186471841-186472066
  hypo
agtctttccattatccgaaattcacaaccatgaacctggctgtttgttgttggtgctgactcgcaggcatggtaagtcgtttccatgtatgtctggagtataagttcatcggtagcagggcttggtttttcctgagagaattcactgtgagaaagagtcttggcacgtctgttctctgttgacacttgccgagagtcttggaacgtcactgggcttgtacacatt

SEQ ID NO: 147187 - DNA, 30 bp, Homo sapiens
  chr3:186475342-186475372
  hypo
acagatacgagccaccgcgcccagacttta

SEQ ID NO: 147188 - DNA, 30 bp, Homo sapiens; identical to SEQ ID NO: 109438
  chr3:186490286-186490316
  hypo

SEQ ID NO: 147189 - DNA, 26 bp, Homo sapiens
  chr3:186492227-186492253
  hypo
gtgagccaccgcgcctggccggctta

SEQ ID NO: 147190 - DNA, 26 bp, Homo sapiens
  chr3:186495273-186495299
  hypo
aaaataatgaagggccgggtgcggtg

SEQ ID NO: 147191 - DNA, 84 bp, Homo sapiens
  chr3:186530262-186530346
  hypo
gagagagagggagagggagcaagaaatctcttttcttaataaattacccggcctgacagtctgttatagcgacaaaatggacaa

SEQ ID NO: 147192 - DNA, 20 bp, Homo sapiens
  chr3:186535203-186535223
  hypo
aactgcggttcactgagggt

SEQ ID NO: 147193 - DNA, 48 bp, Homo sapiens; identical to SEQ ID NO: 3030
  chr3:186544978-186545026
  hypo

SEQ ID NO: 147194 - DNA, 23 bp, Homo sapiens
  chr3:186629364-186629387
  hypo
caagactccgtctcaaaaaaaga

SEQ ID NO: 147195 - DNA, 30 bp, Homo sapiens
  chr3:186641319-186641349
  hypo
ggactcagcgctggccgtcacttgctgtaa

SEQ ID NO: 147196 - DNA, 27 bp, Homo sapiens
  chr3:186663470-186663497
  hypo
taattagaagtgtaccttttccggctg

SEQ ID NO: 147197 - DNA, 168 bp, Homo sapiens; identical to SEQ ID NO: 18198
  chr3:186697395-186697563
  hypo

SEQ ID NO: 147198 - DNA, 150 bp, Homo sapiens
  chr3:186713654-186713804
  hypo
taaatgcttttaatcaataacttcccacgggcggggacactgatttgaaatataatctttgggtgaggtgtgtggctgccctgtctctgtataggtagacacaggcccacaggtgcagtggccatattatcggtgcgtgtttactcccat

SEQ ID NO: 147199 - DNA, 30 bp, Homo sapiens; identical to SEQ ID NO: 18199
  chr3:186731783-186731813
  hypo

SEQ ID NO: 147200 - DNA, 203 bp, Homo sapiens; identical to SEQ ID NO: 18200
  chr3:186783727-186783930
  hypo

SEQ ID NO: 147201 - DNA, 30 bp, Homo sapiens; identical to SEQ ID NO: 18201
  chr3:186795537-186795567
  hypo

SEQ ID NO: 147202 - DNA, 51 bp, Homo sapiens; identical to SEQ ID NO: 18202
  chr3:186938674-186938725
  hypo

SEQ ID NO: 147203 - DNA, 30 bp, Homo sapiens; identical to SEQ ID NO: 18203
  chr3:186945828-186945858
  hypo

SEQ ID NO: 147204 - DNA, 63 bp, Homo sapiens
  chr3:187086138-187086201
  hypo
aactgaaccgaacaccgaaactgaaactgtttgtctcttcctgagaaacgagcaaacctgaaa

SEQ ID NO: 147205 - DNA, 166 bp, Homo sapiens
  chr3:187242733-187242899
  hypo
cacttaataagtgctcgagtaaatacgcgtagaatgtgagtgaacagagatcttttgtataaaagatcttcctagaaactttgaggggtatacaatggaagcaaacatgcctttcaaggagaacatagtctattgacagaaacagaaaccacctggtcttggtgct

SEQ ID NO: 147206 - DNA, 144 bp, Homo sapiens; identical to SEQ ID NO: 67248
  chr3:187281940-187282084
  hypo

SEQ ID NO: 147207 - DNA, 376 bp, Homo sapiens; identical to SEQ ID NO: 67249
  chr3:187443047-187443423
  hypo

SEQ ID NO: 147208 - DNA, 2901 bp, Homo sapiens; identical to SEQ ID NO: 109451
  chr3:187455276-187458177
  hypo

SEQ ID NO: 147209 - DNA, 368 bp, Homo sapiens; identical to SEQ ID NO: 109454
  chr3:187462444-187462812
  hypo

SEQ ID NO: 147210 - DNA, 228 bp, Homo sapiens; identical to SEQ ID NO: 109455
  chr3:187463099-187463327
  hypo

SEQ ID NO: 147211 - DNA, 29 bp, Homo sapiens
  chr3:187559335-187559364
  hypo
taatgcgcgtaaaagacagagttaattcc

SEQ ID NO: 147212 - DNA, 30 bp, Homo sapiens
  chr3:187744817-187744847
  hypo
tctcacaactgagcccgtctgaattccacc

SEQ ID NO: 147213 - DNA, 16 bp, Homo sapiens
  chr3:187775484-187775500
  hypo
acctagagcatcactc

SEQ ID NO: 147214 - DNA, 17 bp, Homo sapiens
  chr3:187869996-187870013
  hypo
agccatgttcatatttt

SEQ ID NO: 147215 - DNA, 151 bp, Homo sapiens
  chr3:187870444-187870595
  hypo
tgaagatgcaatagccgggtgagagactgctttcattatgtgctaacgtgagggattactttagatattaataggagagaagtgcaaggaaaggaagtctcagggtatggaatgctttcctggccatggctgctgcgcgtcataatcccct

SEQ ID NO: 147216 - DNA, 30 bp, Homo sapiens
  chr3:187875182-187875212
  hypo
ggcaagagttagatcggatttgatttcaga

SEQ ID NO: 147217 - DNA, 172 bp, Homo sapiens; identical to SEQ ID NO: 67255
  chr3:187930466-187930638
  hypo

SEQ ID NO: 147218 - DNA, 30 bp, Homo sapiens
  chr3:187961286-187961316
  hypo
ttgcacggaaagctgcgaaataaatcgttt

SEQ ID NO: 147219 - DNA, 30 bp, Homo sapiens
  chr3:187984183-187984213
  hypo
agcgcaggagactgtcgcttcccttggata

SEQ ID NO: 147220 - DNA, 84 bp, Homo sapiens; identical to SEQ ID NO: 67256
  chr3:187984521-187984605
  hypo

SEQ ID NO: 147221 - DNA, 30 bp, Homo sapiens; identical to SEQ ID NO: 18207
  chr3:188067316-188067346
  hypo

SEQ ID NO: 147222 - DNA, 165 bp, Homo sapiens; identical to SEQ ID NO: 18208
  chr3:188070250-188070415
  hypo

SEQ ID NO: 147223 - DNA, 39 bp, Homo sapiens; identical to SEQ ID NO: 67259
  chr3:188246126-188246165
  hypo

SEQ ID NO: 147224 - DNA, 95 bp, Homo sapiens; identical to SEQ ID NO: 18209
  chr3:188353740-188353835
  hypo

SEQ ID NO: 147225 - DNA, 70 bp, Homo sapiens
  chr3:188365073-188365143
  hypo
gggcctggcttgatccggtaaagagcgtctgctgcggtgcctgatggaaagtgcccgcttaattgggaga

SEQ ID NO: 147226 - DNA, 30 bp, Homo sapiens
  chr3:188554329-188554359
  hypo
attgtgctctgcacacgatggaggctcaat

SEQ ID NO: 147227 - DNA, 30 bp, Homo sapiens
  chr3:189013748-189013778
  hypo
caggataggagtttgcgtttttgtttcttg

SEQ ID NO: 147228 - DNA, 33 bp, Homo sapiens; identical to SEQ ID NO: 67261
  chr3:189160151-189160184
  hypo

SEQ ID NO: 147229 - DNA, 30 bp, Homo sapiens; identical to SEQ ID NO: 40063
  chr3:189508455-189508485
  hypo

SEQ ID NO: 147230 - DNA, 30 bp, Homo sapiens
  chr3:189551907-189551937
  hypo
gggaagcttgactaccgtggagagctcagt

SEQ ID NO: 147231 - DNA, 30 bp, Homo sapiens
  chr3:189552252-189552282
  hypo
acagttatggactcgcgtttcctcctaata

SEQ ID NO: 147232 - DNA, 203 bp, Homo sapiens; identical to SEQ ID NO: 67263
  chr3:189557796-189557999
  hypo

SEQ ID NO: 147233 - DNA, 133 bp, Homo sapiens
  chr3:189612056-189612189
  hypo
ccaccggcagctccacgaattctcctccccttctcatctcctgcggaccccaagcagtgcctctacagtcagtgtgggctccagtgagacccggggtgagcgtgttattgatgctgtgcgattcaccctccgc

SEQ ID NO: 147234 - DNA, 94 bp, Homo sapiens; identical to SEQ ID NO: 18210
  chr3:189618731-189618825
  hypo

SEQ ID NO: 147235 - DNA, 30 bp, Homo sapiens; identical to SEQ ID NO: 40064
  chr3:189645917-189645947
  hypo

SEQ ID NO: 147236 - DNA, 28 bp, Homo sapiens
  chr3:189900046-189900074
  hypo
gcgcccagccggtcgtttatctcttgaa

SEQ ID NO: 147237 - DNA, 298 bp, Homo sapiens; identical to SEQ ID NO: 67267
  chr3:189900375-189900673
  hypo

SEQ ID NO: 147238 - DNA, 81 bp, Homo sapiens
  chr3:190105539-190105620
  hypo
gcagactcccttgagcgagcacttgtttagcatagtttcaccagtggcctgtctgtctaaagtagtcggcgaatattaaaa

SEQ ID NO: 147239 - DNA, 20 bp, Homo sapiens
  chr3:190116998-190117018
  hypo
aaaatgtttttaggctgggc

SEQ ID NO: 147240 - DNA, 162 bp, Homo sapiens
  chr3:190278464-190278626
  hypo
ctagtttcagcctgtcacctgcgggctaggtgagagaattcagtggtcagagtgatgcagataaggagatgctaatgattaccaagtctagagaatgcagacgataaaaagtttcatatgcggaagtagatgttaaggtgctgagcacgtgaagacccatct

SEQ ID NO: 147241 - DNA, 31 bp, Homo sapiens; identical to SEQ ID NO: 67270
  chr3:190421350-190421381
  hypo

SEQ ID NO: 147242 - DNA, 94 bp, Homo sapiens; identical to SEQ ID NO: 67271
  chr3:190595740-190595834
  hypo

SEQ ID NO: 147243 - DNA, 541 bp, Homo sapiens; identical to SEQ ID NO: 109472
  chr3:191046934-191047475
  hypo

SEQ ID NO: 147244 - DNA, 586 bp, Homo sapiens; identical to SEQ ID NO: 3045
  chr3:192126786-192127372
  hypo

SEQ ID NO: 147245 - DNA, 174 bp, Homo sapiens; identical to SEQ ID NO: 3046
  chr3:192127556-192127730
  hypo

SEQ ID NO: 147246 - DNA, 274 bp, Homo sapiens; identical to SEQ ID NO: 40074
  chr3:192127936-192128210
  hypo

SEQ ID NO: 147247 - DNA, 286 bp, Homo sapiens; identical to SEQ ID NO: 3049
  chr3:192232532-192232818
  hypo

SEQ ID NO: 147248 - DNA, 102 bp, Homo sapiens; identical to SEQ ID NO: 3050
  chr3:192232849-192232951
  hypo

SEQ ID NO: 147249 - DNA, 255 bp, Homo sapiens; identical to SEQ ID NO: 3051
  chr3:192233094-192233349
  hypo

SEQ ID NO: 147250 - DNA, 22 bp, Homo sapiens
  chr3:192495248-192495270
  hypo
agtaacaattatcataaaagac

SEQ ID NO: 147251 - DNA, 38 bp, Homo sapiens
  chr3:192595828-192595866
  hypo
caggaacggcccgtacgaaacatcttcaaacaattcct

SEQ ID NO: 147252 - DNA, 21 bp, Homo sapiens
  chr3:192626494-192626515
  hypo
ccacgccgggccaaattttct

SEQ ID NO: 147253 - DNA, 547 bp, Homo sapiens; identical to SEQ ID NO: 40081
  chr3:192635621-192636168
  hypo

SEQ ID NO: 147254 - DNA, 32 bp, Homo sapiens; identical to SEQ ID NO: 67281
  chr3:192670615-192670647
  hypo

SEQ ID NO: 147255 - DNA, 29 bp, Homo sapiens
  chr3:192858850-192858879
  hypo
gtattaaagaaatttatgggccgggcacg

SEQ ID NO: 147256 - DNA, 24 bp, Homo sapiens
  chr3:193173114-193173138
  hypo
gcgagactccgtctcaaaaaaaaa

SEQ ID NO: 147257 - DNA, 28 bp, Homo sapiens
  chr3:193235270-193235298
  hypo
ttattttattttattttgagacggagtt

SEQ ID NO: 147258 - DNA, 88 bp, Homo sapiens; identical to SEQ ID NO: 18221
  chr3:193235537-193235625
  hypo

SEQ ID NO: 147259 - DNA, 379 bp, Homo sapiens
  chr3:193303429-193303808
  hypo
tctgttagattcattcgtgttgttacatgtatccgcaggtcattctgtttgttgttgaggagtatttcattgtgtaaatttcctttcattttctcactgctgcacgtttcatttggctccagttttcaattaccgtgaaaaagtcgctatgaacatgtttgtacaagactttccatgaacacgtttttacttctcctagataaatccctgagagtggaatggttagaccaaaggggaagtgtatatttaactttataagaaaatgccaaatatttttccaaagtggtcgtgccattttacattcctgccatcggttattgacagttctggttgctccacatcctcgacaaaattttcatttctccgatgactaataaca

SEQ ID NO: 147260 - DNA, 87 bp, Homo sapiens; identical to SEQ ID NO: 18222
  chr3:193312127-193312214
  hypo

SEQ ID NO: 147261 - DNA, 27 bp, Homo sapiens
  chr3:193312453-193312480
  hypo
accgtgagccaccgcgcccggcccaat

SEQ ID NO: 147262 - DNA, 148 bp, Homo sapiens
  chr3:193314533-193314681
  hypo
taatagtccccttggcgctctgtatactctcaagtcttaaatgttttgtatgcagctgtacgttgacagttgaatggtctcgctccaagtggatcagcaagaacataaagaatcatttaactggtacaggctgcggcttgtgaattcc

SEQ ID NO: 147263 - DNA, 176 bp, Homo sapiens; identical to SEQ ID NO: 18224
  chr3:193391747-193391923
  hypo

SEQ ID NO: 147264 - DNA, 220 bp, Homo sapiens; identical to SEQ ID NO: 67288
  chr3:193392561-193392781
  hypo

SEQ ID NO: 147265 - DNA, 414 bp, Homo sapiens; identical to SEQ ID NO: 67289
  chr3:193419603-193420017
  hypo

SEQ ID NO: 147266 - DNA, 88 bp, Homo sapiens
  chr3:193428477-193428565
  hypo
cagggacccagaggccgcggagccggaccgcagagtggaggccaggccggtgggcaggaggaggtgggaacaccgaaggccgccagga

SEQ ID NO: 147267 - DNA, 68 bp, Homo sapiens; identical to SEQ ID NO: 18228
  chr3:193428949-193429017
  hypo

SEQ ID NO: 147268 - DNA, 46 bp, Homo sapiens; identical to SEQ ID NO: 18229
  chr3:193438389-193438435
  hypo

SEQ ID NO: 147269 - DNA, 30 bp, Homo sapiens; identical to SEQ ID NO: 67293
  chr3:193450100-193450130
  hypo

SEQ ID NO: 147270 - DNA, 375 bp, Homo sapiens
  chr3:193455062-193455437
  hypo
cttcaagactcctcccgcgctgttggcaggaatgtttctttcctgggtgtcaatacaagcccagggtcatttttcagcatttgccaatcgctgtaattgcacaggcccgagtggctctccagagaattcctgccgttcctcattctctcctcctggactgtgctctatagatgcaccccaggccatggatcatgtttttcacataacccgttaattactaaagaaaacaacccagctttcaacctgattagcccagattaatggccagcagcgggtttcacgcgcctgcacaatttatcactgaaaagaactgtgtctttaatgatttagctacctggccgggcagggcttactccaggccgcaggcctcctgga

SEQ ID NO: 147271 - DNA, 31 bp, Homo sapiens; identical to SEQ ID NO: 67295
  chr3:193481550-193481581
  hypo

SEQ ID NO: 147272 - DNA, 31 bp, Homo sapiens; identical to SEQ ID NO: 67296
  chr3:193481891-193481922
  hypo

SEQ ID NO: 147273 - DNA, 100 bp, Homo sapiens
  chr3:193489690-193489790
  hypo
ggcatcagaggagaacggctgtgagaagcagtgggcgggaacccatccttggctaggtttacagtgctgttgaaggggctgatggcggctactgtttgtt

SEQ ID NO: 147274 - DNA, 252 bp, Homo sapiens; identical to SEQ ID NO: 67297
  chr3:193490129-193490381
  hypo

SEQ ID NO: 147275 - DNA, 30 bp, Homo sapiens; identical to SEQ ID NO: 67298
  chr3:193493018-193493048
  hypo

SEQ ID NO: 147276 - DNA, 36 bp, Homo sapiens; identical to SEQ ID NO: 67299
  chr3:193503309-193503345
  hypo

SEQ ID NO: 147277 - DNA, 209 bp, Homo sapiens; identical to SEQ ID NO: 67300
  chr3:193505271-193505480
  hypo

SEQ ID NO: 147278 - DNA, 103 bp, Homo sapiens; identical to SEQ ID NO: 67301
  chr3:193509944-193510047
  hypo

SEQ ID NO: 147279 - DNA, 161 bp, Homo sapiens; identical to SEQ ID NO: 67302
  chr3:193513919-193514080
  hypo

SEQ ID NO: 147280 - DNA, 153 bp, Homo sapiens; identical to SEQ ID NO: 18234
  chr3:193548631-193548784
  hypo

SEQ ID NO: 147281 - DNA, 31 bp, Homo sapiens; identical to SEQ ID NO: 67304
  chr3:193577777-193577808
  hypo

SEQ ID NO: 147282 - DNA, 434 bp, Homo sapiens; identical to SEQ ID NO: 67305
  chr3:193586964-193587398
  hypo

SEQ ID NO: 147283 - DNA, 203 bp, Homo sapiens
  chr3:193588154-193588357
  hypo
ctttatgccaggtcccgcatgaacagtggtagatctagaactcaggtgctacgctgtcggcctgctgttggtctgcggagctactatatagctgttgcgtgactcagggaacacctggggcgtgactgacaggtggagaagggtcaaggtggttggagcccaagcgtggataagacagccccggagggagaggccagcctggg

SEQ ID NO: 147284 - DNA, 106 bp, Homo sapiens
  chr3:193589775-193589881
  hypo
aaaagtatatatatatataccagtcacaacaacagcaatgataaaggctaatgattgctgagggtttgctatgtgcaagcgcgttttttcacgtaatcctcacagt

SEQ ID NO: 147285 - DNA, 31 bp, Homo sapiens; identical to SEQ ID NO: 67308
  chr3:193595776-193595807
  hypo

SEQ ID NO: 147286 - DNA, 30 bp, Homo sapiens
  chr3:193601116-193601146
  hypo
catgactcagctgggcgtggtggctcgcac

SEQ ID NO: 147287 - DNA, 148 bp, Homo sapiens; identical to SEQ ID NO: 18237
  chr3:193659934-193660082
  hypo

SEQ ID NO: 147288 - DNA, 31 bp, Homo sapiens; identical to SEQ ID NO: 18238
  chr3:193663524-193663555
  hypo

SEQ ID NO: 147289 - DNA, 56 bp, Homo sapiens
  chr3:193696014-193696070
  hypo
aaaaacctgcagaaacatgtccgaagccatcccacgccatgaacaggaagcctttg

SEQ ID NO: 147290 - DNA, 170 bp, Homo sapiens; identical to SEQ ID NO: 18239
  chr3:193711553-193711723
  hypo

SEQ ID NO: 147291 - DNA, 30 bp, Homo sapiens; identical to SEQ ID NO: 109495
  chr3:193720801-193720831
  hypo

SEQ ID NO: 147292 - DNA, 649 bp, Homo sapiens; identical to SEQ ID NO: 109496
  chr3:193721032-193721681
  hypo

SEQ ID NO: 147293 - DNA, 31 bp, Homo sapiens; identical to SEQ ID NO: 40088
  chr3:193852179-193852210
  hypo

SEQ ID NO: 147294 - DNA, 367 bp, Homo sapiens; identical to SEQ ID NO: 109500
  chr3:193852643-193853010
  hypo

SEQ ID NO: 147295 - DNA, 636 bp, Homo sapiens; identical to SEQ ID NO: 109502
  chr3:193853735-193854371
  hypo

SEQ ID NO: 147296 - DNA, 30 bp, Homo sapiens
  chr3:193857410-193857440
  hypo
gcgctgtgggtctggcgggcgcgccctcct

SEQ ID NO: 147297 - DNA, 312 bp, Homo sapiens; identical to SEQ ID NO: 3062
  chr3:193858569-193858881
  hypo

SEQ ID NO: 147298 - DNA, 282 bp, Homo sapiens; identical to SEQ ID NO: 3063
  chr3:193858949-193859231
  hypo

SEQ ID NO: 147299 - DNA, 122 bp, Homo sapiens; identical to SEQ ID NO: 109506
  chr3:193859655-193859777
  hypo

SEQ ID NO: 147300 - DNA, 95 bp, Homo sapiens; identical to SEQ ID NO: 67318
  chr3:193903173-193903268
  hypo

SEQ ID NO: 147301 - DNA, 204 bp, Homo sapiens; identical to SEQ ID NO: 67319
  chr3:193922614-193922818
  hypo

SEQ ID NO: 147302 - DNA, 112 bp, Homo sapiens; identical to SEQ ID NO: 67320
  chr3:193940698-193940810
  hypo

SEQ ID NO: 147303 - DNA, 332 bp, Homo sapiens
  chr3:193969962-193970294
  hypo
ggtggcaccagcacccgaaacacactgctacatggggctggcccatggatagccgcgcacctcagagtgagcagtgccagaagccaggtagattgggggtggagggctgggggagagacatgaggcaggaagcagttaggcaccaaagcaggagtttctagaccttcggtcaacaaaaattcaaggagcacctgcttgcgctaagtgctggaaatgcagtgatgcgtaaaacacagagcccgcttcgtggaacttagcatcaagagagaacacttgacatgcagacaggcaatgccagtgtcgtgggatgcgtgctccccaggaaatgggct

SEQ ID NO: 147304 - DNA, 151 bp, Homo sapiens; identical to SEQ ID NO: 40098
  chr3:193987503-193987654
  hypo

SEQ ID NO: 147305 - DNA, 93 bp, Homo sapiens
  chr3:194012768-194012861
  hypo
ctctcccagggagaccgcaggctttgctagtaattggcccattgtccttccactgcgattcctgcacaagccgggaatcgcctggctaggggc

SEQ ID NO: 147306 - DNA, 30 bp, Homo sapiens
  chr3:194040789-194040819
  hypo
ctggagaggctgtcacgcccacagcatcac

SEQ ID NO: 147307 - DNA, 19 bp, Homo sapiens
  chr3:194041069-194041088
  hypo
actcccagcactttgggag

SEQ ID NO: 147308 - DNA, 648 bp, Homo sapiens; identical to SEQ ID NO: 67325
  chr3:194048750-194049398
  hypo

SEQ ID NO: 147309 - DNA, 94 bp, Homo sapiens; identical to SEQ ID NO: 67326
  chr3:194058379-194058473
  hypo

SEQ ID NO: 147310 - DNA, 172 bp, Homo sapiens; identical to SEQ ID NO: 67327
  chr3:194061693-194061865
  hypo

SEQ ID NO: 147311 - DNA, 203 bp, Homo sapiens; identical to SEQ ID NO: 67328
  chr3:194066804-194067007
  hypo

SEQ ID NO: 147312 - DNA, 83 bp, Homo sapiens; identical to SEQ ID NO: 67329
  chr3:194078511-194078594
  hypo

SEQ ID NO: 147313 - DNA, 30 bp, Homo sapiens
  chr3:194080145-194080175
  hypo
cggcaatggccagcccgctctgggcctggg

SEQ ID NO: 147314 - DNA, 406 bp, Homo sapiens
  chr3:194080453-194080859
  hypo
agcaggagccagttgcggagcggaaggatgtctgagtcacacctccagggattgtcatacagccgcagctcacacagtttccccaggtgatcgaagatgccgaggggcaagttctccagctggttgttctgcagctggatggccatgaggccattgacgttggcgaagatattccctgggagctgtctgaggcggttgttctgcagggagatgttctgcaggttggccaacatgcggaagacgttcccgtccaggtcctgcagtgcgttggtgtggagggacagctcccgaagctccgttagcccgttgaaggcacccggggagatgaagctgatctgattgcggctaagaatcaggacctgcaactggcggaggttgctgaagacattgtcgggtagagaagaga

SEQ ID NO: 147315 - DNA, 149 bp, Homo sapiens
  chr3:194105560-194105709
  hypo
tggccgaccgcagaccgtgtgaggtagaaggagcatttcccagcctcatgcctgtctccatcaaatgctggaaatccttctggctgtggttgctgggtctcggcctgagctcctccccgggtgggagctcatggcgcacatggtgacca

SEQ ID NO: 147316 - DNA, 213 bp, Homo sapiens; identical to SEQ ID NO: 67331
  chr3:194128257-194128470
  hypo

SEQ ID NO: 147317 - DNA, 112 bp, Homo sapiens; identical to SEQ ID NO: 67332
  chr3:194166904-194167016
  hypo

SEQ ID NO: 147318 - DNA, 30 bp, Homo sapiens; identical to SEQ ID NO: 18252
  chr3:194171233-194171263
  hypo

SEQ ID NO: 147319 - DNA, 30 bp, Homo sapiens
  chr3:194181435-194181465
  hypo
caggtcgctttcacccgccactcaggcatc

SEQ ID NO: 147320 - DNA, 30 bp, Homo sapiens
  chr3:194207285-194207315
  hypo
cccgctcaccggggccgctcactggccgcc

SEQ ID NO: 147321 - DNA, 283 bp, Homo sapiens; identical to SEQ ID NO: 40099
  chr3:194207974-194208257
  hypo

SEQ ID NO: 147322 - DNA, 77 bp, Homo sapiens; identical to SEQ ID NO: 40100
  chr3:194208467-194208544
  hypo

SEQ ID NO: 147323 - DNA, 19 bp, Homo sapiens
  chr3:194222009-194222028
  hypo
gggcgcggtggctcacgcc

SEQ ID NO: 147324 - DNA, 148 bp, Homo sapiens; identical to SEQ ID NO: 67336
  chr3:194228175-194228323
  hypo

SEQ ID NO: 147325 - DNA, 30 bp, Homo sapiens
  chr3:194236977-194237007
  hypo
aggcgtgatccaccacgcctggcctcgggg

SEQ ID NO: 147326 - DNA, 116 bp, Homo sapiens; identical to SEQ ID NO: 3066
  chr3:194278584-194278700
  hypo

SEQ ID NO: 147327 - DNA, 241 bp, Homo sapiens; identical to SEQ ID NO: 67338
  chr3:194301030-194301271
  hypo

SEQ ID NO: 147328 - DNA, 30 bp, Homo sapiens; identical to SEQ ID NO: 67339
  chr3:194303490-194303520
  hypo

SEQ ID NO: 147329 - DNA, 16 bp, Homo sapiens
  chr3:194303993-194304009
  hypo
gcccaaaagattttaa

SEQ ID NO: 147330 - DNA, 148 bp, Homo sapiens; identical to SEQ ID NO: 67341
  chr3:194316643-194316791
  hypo

SEQ ID NO: 147331 - DNA, 30 bp, Homo sapiens
  chr3:194319663-194319693
  hypo
ggatcaaacggaagccgagttggtgagtaa

SEQ ID NO: 147332 - DNA, 218 bp, Homo sapiens; identical to SEQ ID NO: 67342
  chr3:194324944-194325162
  hypo

SEQ ID NO: 147333 - DNA, 37 bp, Homo sapiens; identical to SEQ ID NO: 67343
  chr3:194335589-194335626
  hypo

SEQ ID NO: 147334 - DNA, 31 bp, Homo sapiens; identical to SEQ ID NO: 67344
  chr3:194338061-194338092
  hypo

SEQ ID NO: 147335 - DNA, 35 bp, Homo sapiens; identical to SEQ ID NO: 67345
  chr3:194341459-194341494
  hypo

SEQ ID NO: 147336 - DNA, 31 bp, Homo sapiens; identical to SEQ ID NO: 67346
  chr3:194344004-194344035
  hypo

SEQ ID NO: 147337 - DNA, 30 bp, Homo sapiens
  chr3:194349132-194349162
  hypo
cagaagagccccgacggtgtcacacagact

SEQ ID NO: 147338 - DNA, 572 bp, Homo sapiens; identical to SEQ ID NO: 40102
  chr3:194353931-194354503
  hypo

SEQ ID NO: 147339 - DNA, 220 bp, Homo sapiens; identical to SEQ ID NO: 67348
  chr3:194365660-194365880
  hypo

SEQ ID NO: 147340 - DNA, 241 bp, Homo sapiens; identical to SEQ ID NO: 67349
  chr3:194374238-194374479
  hypo

SEQ ID NO: 147341 - DNA, 21 bp, Homo sapiens
  chr3:194411156-194411177
  hypo
tacaggcgtgagccactgtac

SEQ ID NO: 147342 - DNA, 31 bp, Homo sapiens; identical to SEQ ID NO: 18260
  chr3:194431442-194431473
  hypo

SEQ ID NO: 147343 - DNA, 30 bp, Homo sapiens
  chr3:194471383-194471413
  hypo
tgctgtgctgttgagcgtagaccgcaaaac

SEQ ID NO: 147344 - DNA, 30 bp, Homo sapiens
  chr3:194503580-194503610
  hypo
gcttcagtgactgggcgcaggatggatgcc

SEQ ID NO: 147345 - DNA, 30 bp, Homo sapiens
  chr3:194504030-194504060
  hypo
aatcctcactgtgtgcgtcttactgggagg

SEQ ID NO: 147346 - DNA, 30 bp, Homo sapiens
  chr3:194532600-194532630
  hypo
cttggggcaagcatgcgattcattgggggt

SEQ ID NO: 147347 - DNA, 30 bp, Homo sapiens
  chr3:194533035-194533065
  hypo
gtgcgtaatatgccacggtggctctgggtt

SEQ ID NO: 147348 - DNA, 77 bp, Homo sapiens; identical to SEQ ID NO: 67352
  chr3:194558267-194558344
  hypo

SEQ ID NO: 147349 - DNA, 30 bp, Homo sapiens; identical to SEQ ID NO: 67353
  chr3:194578140-194578170
  hypo

SEQ ID NO: 147350 - DNA, 187 bp, Homo sapiens; identical to SEQ ID NO: 18261
  chr3:194596887-194597074
  hypo

SEQ ID NO: 147351 - DNA, 31 bp, Homo sapiens; identical to SEQ ID NO: 40109
  chr3:194602924-194602955
  hypo

SEQ ID NO: 147352 - DNA, 185 bp, Homo sapiens; identical to SEQ ID NO: 67356
  chr3:194669149-194669334
  hypo

SEQ ID NO: 147353 - DNA, 31 bp, Homo sapiens; identical to SEQ ID NO: 18262
  chr3:194670887-194670918
  hypo

SEQ ID NO: 147354 - DNA, 30 bp, Homo sapiens
  chr3:194676809-194676839
  hypo
cctctcggaacagatcgctcgccacctccc

SEQ ID NO: 147355 - DNA, 21 bp, Homo sapiens
  chr3:194706825-194706846
  hypo
cgcgcccggcctcaacctcag

SEQ ID NO: 147356 - DNA, 31 bp, Homo sapiens; identical to SEQ ID NO: 18264
  chr3:194755642-194755673
  hypo

SEQ ID NO: 147357 - DNA, 64 bp, Homo sapiens; identical to SEQ ID NO: 18265
  chr3:194766333-194766397
  hypo

SEQ ID NO: 147358 - DNA, 43 bp, Homo sapiens
  chr3:194778172-194778215
  hypo
ctccagcgtttccaccgagccatgttttcgcgtcggcttcagg

SEQ ID NO: 147359 - DNA, 49 bp, Homo sapiens; identical to SEQ ID NO: 67361
  chr3:194783224-194783273
  hypo

SEQ ID NO: 147360 - DNA, 325 bp, Homo sapiens
  chr3:194786344-194786669
  hypo
ggtgtgatctgttggcgggccggggtgtgatctgttggcgggccggggtgtgatctgtcggcgctctgtgatctgtcagcggcctggggtgtgatctctcagcgggctggggtgcctgtgcggtgatctgtttgcgggctggggtgtgagctgtcggcggtctggggtgtgatctgtcggcggtctggggtgtgatctgtcggcggtctggggtgtgatctgtcagcgggctggggtgcctgtgcagtgatctgtcggggggctgaggtgtgatctgtgggcgggctggggtgactctgcagtgatctgtcggcaggctggggtg

SEQ ID NO: 147361 - DNA, 31 bp, Homo sapiens; identical to SEQ ID NO: 18266
  chr3:194790031-194790062
  hypo

SEQ ID NO: 147362 - DNA, 85 bp, Homo sapiens; identical to SEQ ID NO: 67363
  chr3:194790285-194790370
  hypo

SEQ ID NO: 147363 - DNA, 159 bp, Homo sapiens; identical to SEQ ID NO: 67364
  chr3:194790634-194790793
  hypo

SEQ ID NO: 147364 - DNA, 53 bp, Homo sapiens; identical to SEQ ID NO: 67365
  chr3:194793569-194793622
  hypo

SEQ ID NO: 147365 - DNA, 31 bp, Homo sapiens; identical to SEQ ID NO: 18268
  chr3:194798290-194798321
  hypo

SEQ ID NO: 147366 - DNA, 39 bp, Homo sapiens; identical to SEQ ID NO: 18269
  chr3:194799661-194799700
  hypo

SEQ ID NO: 147367 - DNA, 31 bp, Homo sapiens; identical to SEQ ID NO: 18270
  chr3:194817220-194817251
  hypo

SEQ ID NO: 147368 - DNA, 70 bp, Homo sapiens; identical to SEQ ID NO: 67369
  chr3:194818058-194818128
  hypo

SEQ ID NO: 147369 - DNA, 30 bp, Homo sapiens; identical to SEQ ID NO: 67370
  chr3:194824115-194824145
  hypo

SEQ ID NO: 147370 - DNA, 164 bp, Homo sapiens; identical to SEQ ID NO: 67371
  chr3:194825298-194825462
  hypo

SEQ ID NO: 147371 - DNA, 125 bp, Homo sapiens; identical to SEQ ID NO: 67372
  chr3:194832847-194832972
  hypo

SEQ ID NO: 147372 - DNA, 602 bp, Homo sapiens; identical to SEQ ID NO: 67373
  chr3:194835411-194836013
  hypo

SEQ ID NO: 147373 - DNA, 31 bp, Homo sapiens; identical to SEQ ID NO: 67374
  chr3:194841585-194841616
  hypo

SEQ ID NO: 147374 - DNA, 31 bp, Homo sapiens; identical to SEQ ID NO: 67375
  chr3:194841831-194841862
  hypo

SEQ ID NO: 147375 - DNA, 505 bp, Homo sapiens; identical to SEQ ID NO: 67376
  chr3:194851493-194851998
  hypo

SEQ ID NO: 147376 - DNA, 30 bp, Homo sapiens
  chr3:194862344-194862374
  hypo
cgcctcttcaaagaccgagagctcagtggg

SEQ ID NO: 147377 - DNA, 31 bp, Homo sapiens; identical to SEQ ID NO: 67377
  chr3:194863436-194863467
  hypo

SEQ ID NO: 147378 - DNA, 167 bp, Homo sapiens; identical to SEQ ID NO: 18273
  chr3:194866033-194866200
  hypo

SEQ ID NO: 147379 - DNA, 31 bp, Homo sapiens; identical to SEQ ID NO: 18274
  chr3:194866459-194866490
  hypo

SEQ ID NO: 147380 - DNA, 24 bp, Homo sapiens
  chr3:194890868-194890892
  hypo
acgcctggccgttaatgtatatat

SEQ ID NO: 147381 - DNA, 31 bp, Homo sapiens; identical to SEQ ID NO: 67381
  chr3:194896168-194896199
  hypo

SEQ ID NO: 147382 - DNA, 181 bp, Homo sapiens
  chr3:194927045-194927226
  hypo
taattttgaaagagagaatgggaaagactcaagagtcaaccaaatgaaacatgtagtcaattcaagaatgtgaatcctgcatggatactagatggcaataaggtgattatttattgttagttttgctaaatgtaataaaaatagcgcatttaatacaaatagtactttccagccagttgcg

SEQ ID NO: 147383 - DNA, 30 bp, Homo sapiens
  chr3:194927872-194927902
  hypo
gactgtgggatggctcgcgggtctgaggag

SEQ ID NO: 147384 - DNA, 31 bp, Homo sapiens; identical to SEQ ID NO: 67383
  chr3:194933211-194933242
  hypo

SEQ ID NO: 147385 - DNA, 153 bp, Homo sapiens; identical to SEQ ID NO: 67384
  chr3:194935162-194935315
  hypo

SEQ ID NO: 147386 - DNA, 30 bp, Homo sapiens
  chr3:194974060-194974090
  hypo
aatcaggaggcgaagcggcaagatcccgtt

SEQ ID NO: 147387 - DNA, 22 bp, Homo sapiens
  chr3:194974509-194974531
  hypo
gagccaccgcgcccggcctgtt

SEQ ID NO: 147388 - DNA, 259 bp, Homo sapiens; identical to SEQ ID NO: 40111
  chr3:194980252-194980511
  hypo

SEQ ID NO: 147389 - DNA, 30 bp, Homo sapiens; identical to SEQ ID NO: 109526
  chr3:194981259-194981289
  hypo

SEQ ID NO: 147390 - DNA, 30 bp, Homo sapiens; identical to SEQ ID NO: 109527
  chr3:194981331-194981361
  hypo

SEQ ID NO: 147391 - DNA, 23 bp, Homo sapiens
  chr3:194981883-194981906
  hypo
gggcgcggtggctcacgcctgta

SEQ ID NO: 147392 - DNA, 31 bp, Homo sapiens; identical to SEQ ID NO: 18278
  chr3:195005356-195005387
  hypo

SEQ ID NO: 147393 - DNA, 188 bp, Homo sapiens; identical to SEQ ID NO: 18279
  chr3:195012970-195013158
  hypo

SEQ ID NO: 147394 - DNA, 70 bp, Homo sapiens
  chr3:195058609-195058679
  hypo
cccactttctgtactccgacctgagcccggggccactcccacctcaacctgagcccggggccactcccac

SEQ ID NO: 147395 - DNA, 30 bp, Homo sapiens; identical to SEQ ID NO: 67389
  chr3:195092658-195092688
  hypo

SEQ ID NO: 147396 - DNA, 81 bp, Homo sapiens; identical to SEQ ID NO: 18280
  chr3:195093139-195093220
  hypo

SEQ ID NO: 147397 - DNA, 21 bp, Homo sapiens
  chr3:195095450-195095471
  hypo
ttttcttttttgagacggagt

SEQ ID NO: 147398 - DNA, 20 bp, Homo sapiens
  chr3:195095530-195095550
  hypo
cctcccgggttcatgccatt

SEQ ID NO: 147399 - DNA, 79 bp, Homo sapiens; identical to SEQ ID NO: 67393
  chr3:195134177-195134256
  hypo

SEQ ID NO: 147400 - DNA, 78 bp, Homo sapiens; identical to SEQ ID NO: 67394
  chr3:195139466-195139544
  hypo

SEQ ID NO: 147401 - DNA, 139 bp, Homo sapiens; identical to SEQ ID NO: 67395
  chr3:195172945-195173084
  hypo

SEQ ID NO: 147402 - DNA, 31 bp, Homo sapiens; identical to SEQ ID NO: 67396
  chr3:195176385-195176416
  hypo

SEQ ID NO: 147403 - DNA, 39 bp, Homo sapiens
  chr3:195183765-195183804
  hypo
gctggcattacaggcgtgagccaccgtgcctggcctctt

SEQ ID NO: 147404 - DNA, 241 bp, Homo sapiens
  chr3:195194374-195194615
  hypo
tgggatgacaggtgtgagccgccgcgcccagcttggttgggtactttcataattcttttttcaaacttattactggtgattaatttttaaacagtatctagtaatgtgagcactcgtcctatttatgaggtgaaacttctcatatcctatacttaataatttctaaaatataaacatacaaatgcctgccgtatcttgtctattctgtctctgtcttcgttttcttttttctttctttctt

SEQ ID NO: 147405 - DNA, 30 bp, Homo sapiens
  chr3:195261889-195261919
  hypo
gaaagacaacttttgcgtggtgtggggtcg

SEQ ID NO: 147406 - DNA, 156 bp, Homo sapiens; identical to SEQ ID NO: 18287
  chr3:195393195-195393351
  hypo

SEQ ID NO: 147407 - DNA, 228 bp, Homo sapiens; identical to SEQ ID NO: 18288
  chr3:195419008-195419236
  hypo

SEQ ID NO: 147408 - DNA, 127 bp, Homo sapiens
  chr3:195448189-195448316
  hypo
gtgtaagcgtgcctggcgctgcagtacacgctaatcaaccatgacgctgccatcgtaagggatggctgagagtttgtctttatgaacgtgggacagtaagtggggcacggagcgggggtgcagggag

SEQ ID NO: 147409 - DNA, 30 bp, Homo sapiens; identical to SEQ ID NO: 67401
  chr3:195501027-195501057
  hypo

SEQ ID NO: 147410 - DNA, 561 bp, Homo sapiens
  chr3:195536287-195536848
  hypo
tgggggtgggggctgcccacccgcccttggtgactgcttttcctgccaaggccctggtcatgcccggtcagatgtgtgggtgccatctcccagccacgaccatctcctctcctggcccagctccacttggtccccttagcgacgcaaaggactcagcgctccacgacatgcctagcttcttcgggtcgtcatggagacgcccttgcacaccaacagtccttcactccttctccgggtcacgcccccgtgcttttccacgcccaccccaggtcttgcccctctgcgctcctctccacagaccccacttcctggctccacatggagctgagtgtccagctggtacccagcacatttgggctcagctttaaatcacagatttggaaactcaagaacttgggcgtcaggaggtccaaccgttcaccactgctttttacacaggggaccggggccctggggagacacggggcagggcctggtcacaggggccagaacagttcacggcaaagacttggccctggggctcctaaatccaagctgcctccccggcgccccaagccccag

SEQ ID NO: 147411 - DNA, 30 bp, Homo sapiens
  chr3:195537064-195537094
  hypo
cgaggtggaagggtccgcttcaccagcatg

SEQ ID NO: 147412 - DNA, 498 bp, Homo sapiens
  chr3:195537486-195537984
  hypo
agctcagaggtaagaagcccacggccagcacctcccggccctctgcgccctggccgcctcctccgcaccaccctcccggccggcctgcccctctcctccttgtcgcttcccttgcttgctgctgtctcccgatcttctcctctctccattcccagggtcctcagtttgtctgcgtctcacctgtctcgtcctctcaccctgcagctttacatgagttttcttccgtctccatcacccagctttcctggcatcccctctacccccagctctgtacacaagggtgtacatctttctccttgactctgttcctcttgctctggctctgcctgtctttctctctgcgagtaagcctgggctctcaccatggatccttccagacatcgccgggctgctctctggccctctgttctcttttctctctctttcgagcattctccctctgtctttcccctcagatcttgtcccgtatctgccagttcatgcctcctcttccccact

SEQ ID NO: 147413 - DNA, 17 bp, Homo sapiens
  chr3:195538343-195538360
  hypo
tccactcttctttctct

SEQ ID NO: 147414 - DNA, 196 bp, Homo sapiens; identical to SEQ ID NO: 18290
  chr3:195539282-195539478
  hypo

SEQ ID NO: 147415 - DNA, 31 bp, Homo sapiens; identical to SEQ ID NO: 67406
  chr3:195540175-195540206
  hypo

SEQ ID NO: 147416 - DNA, 31 bp, Homo sapiens; identical to SEQ ID NO: 67407
  chr3:195544692-195544723
  hypo

SEQ ID NO: 147417 - DNA, 30 bp, Homo sapiens; identical to SEQ ID NO: 18291
  chr3:195545397-195545427
  hypo

SEQ ID NO: 147418 - DNA, 30 bp, Homo sapiens; identical to SEQ ID NO: 67409
  chr3:195564733-195564763
  hypo

SEQ ID NO: 147419 - DNA, 182 bp, Homo sapiens; identical to SEQ ID NO: 67410
  chr3:195573452-195573634
  hypo

SEQ ID NO: 147420 - DNA, 306 bp, Homo sapiens; identical to SEQ ID NO: 67411
  chr3:195586971-195587277
  hypo

SEQ ID NO: 147421 - DNA, 88 bp, Homo sapiens; identical to SEQ ID NO: 67412
  chr3:195591688-195591776
  hypo

SEQ ID NO: 147422 - DNA, 280 bp, Homo sapiens; identical to SEQ ID NO: 67413
  chr3:195592095-195592375
  hypo

SEQ ID NO: 147423 - DNA, 160 bp, Homo sapiens; identical to SEQ ID NO: 67414
  chr3:195592434-195592594
  hypo

SEQ ID NO: 147424 - DNA, 30 bp, Homo sapiens; identical to SEQ ID NO: 67415
  chr3:195594857-195594887
  hypo

SEQ ID NO: 147425 - DNA, 160 bp, Homo sapiens; identical to SEQ ID NO: 67416
  chr3:195595788-195595948
  hypo

SEQ ID NO: 147426 - DNA, 30 bp, Homo sapiens; identical to SEQ ID NO: 18295
  chr3:195596746-195596776
  hypo

SEQ ID NO: 147427 - DNA, 84 bp, Homo sapiens
  chr3:195597365-195597449
  hypo
agcccacaccaggcagcggccagagggcagacactcctgtcccgcaggccacgatggagggcctaagaacggggcatcccagct

SEQ ID NO: 147428 - DNA, 429 bp, Homo sapiens
  chr3:195597820-195598249
  hypo
tggtgtggggggactcgctgtgtggggttctggtgtgtgggggcccgctgtgtgggttctggtgtgtgggggcccgctgtgtggggttctggtgtgtggggcccggtgggtgaaggcccctgctttccacgcctctcagggcagaccagagtatcagaagtcagcaggagaagggctgcagaggccaggggcctggaatccccctgcggccagcagagaggcttggaggcctggcgcaagaagcttcggggggtggggggtggcatcccggaagtgactgattctgcgtgtccttcccagatgcccctcggtggccttatcctcttacataggagacagggcctctcccaggtatggagtgagctccgtagagtactgtgtggtggggaggcggagctgccacctaacgttccctctgcagtccccaag

SEQ ID NO: 147429 - DNA, 2324 bp, Homo sapiens; identical to SEQ ID NO: 109534
  chr3:195599089-195601413
  hypo

SEQ ID NO: 147430 - DNA, 928 bp, Homo sapiens
  chr3:195602335-195603263
  hypo
agctccccctcgggatggcgcccacgcacactccaaggcagcttcatcccaaggctccagtgggacttccaagaggaccgtgtcacttctcgcagcccacacgcacccgtgtgaggctcagtgtggccgaggcaccagcagtccagaggggactgaggccagcccttccttccaggcccgccctgtccgcgccctctctctcccgccatgaacaggccggagtccccgtggccatgggagggccagggctgctacccggccgtgactgaagcaggggcggatgaggacttcctgggggagcaggaaaagggcccaacacctccgcatgaaccttctacctcctgctgcccccgggcctctggtcaacatctctggggtagacaagatggaaaacagaggccggtgctgagaactgcctaaggctgccccagctctggaaatctcagcaccacgttcccgtccgggccgaaggtagtccagaaatggctcaactaatgccggacattctgttcaaaacgcccgcccgctcttctccctaggggtcccaggcgcccaggcctggagggataacccggatgcctggctcccacccaccacaggaagccgaggctccagggccagaccaggccaaggacccgcaatggattccaacacccgctctgtatgcggaacaaaagtgctgccagccaccccttcctccaaacgagcccctgggaaagaccagtcatcatttgtgtctccaaatctagacacagcacgaaacatctaggtgtctcccctctgcccacagcctggtaccctgagaaggactgagcctagactcagtcagagctgcggcaggtggcctcccagactccgcaccaggaaacaaatactggacacagcttcgcaagtgggaagccacggcgaagagaaggccaggctagga

SEQ ID NO: 147431 - DNA, 715 bp, Homo sapiens; identical to SEQ ID NO: 67423
  chr3:195603846-195604561
  hypo

SEQ ID NO: 147432 - DNA, 116 bp, Homo sapiens; identical to SEQ ID NO: 67424
  chr3:195604986-195605102
  hypo

SEQ ID NO: 147433 - DNA, 205 bp, Homo sapiens; identical to SEQ ID NO: 67425
  chr3:195605369-195605574
  hypo

SEQ ID NO: 147434 - DNA, 142 bp, Homo sapiens; identical to SEQ ID NO: 109535
  chr3:195610105-195610247
  hypo

SEQ ID NO: 147435 - DNA, 30 bp, Homo sapiens; identical to SEQ ID NO: 67426
  chr3:195614952-195614982
  hypo

SEQ ID NO: 147436 - DNA, 34 bp, Homo sapiens; identical to SEQ ID NO: 3074
  chr3:195636197-195636231
  hypo

SEQ ID NO: 147437 - DNA, 307 bp, Homo sapiens
  chr3:195637215-195637522
  hypo
gaaggagaaaacccagcgctcggattcccagcggcggggcagcctgcaggccctgttcccagcccacagacccatgtcccagcccaaacggaggcagccctgggcagcgggcgcgtggagcccaagggctcagggccactcagcccttgttactgtccctcatctagaaaatggatgtaataacaaaacagttcacggtaggtggcaagatcagacacatcggaaactgtgtagggctggctctttctgcgctcacactgtccagcaatgggccccagggacttggccagagcgcagtagggcaatg

SEQ ID NO: 147438 - DNA, 27 bp, Homo sapiens
  chr3:195639185-195639212
  hypo
tatttttttgagatggagtttcgtgct

SEQ ID NO: 147439 - DNA, 181 bp, Homo sapiens; identical to SEQ ID NO: 67430
  chr3:195639451-195639632
  hypo

SEQ ID NO: 147440 - DNA, 268 bp, Homo sapiens
  chr3:195640365-195640633
  hypo
gtcacagtcaaaacacggagagccatggctacaacttgagcaagtcaaacacgctgtgattcaggccagggagatgagcgtgggtaaagaacactgtacgaactagctcagggcttctggaactgtgtgcggctgaatcaccggggcatcttggtgaactgtaaattctgattcagcaaactgggaggagggcgctgagatccagcatttccatcaagcttcccatggaccacactctgactatcagggccttcgatgcagacagtct

SEQ ID NO: 147441 - DNA, 30 bp, Homo sapiens
  chr3:195643342-195643372
  hypo
ccacagctgagccagcgaggcccccaggta

SEQ ID NO: 147442 - DNA, 100 bp, Homo sapiens
  chr3:195643955-195644055
  hypo
atcttcctaaaacatcgatttcatcatgtctctcccttactcaagaactccacattgctccccagttccacgcagcatcgctccccggttccactcagca

SEQ ID NO: 147443 - DNA, 224 bp, Homo sapiens
  chr3:195648721-195648945
  hypo
aacagaggagcacttccgtcacccaggaacacggctctgatcaaggaattcaagaacccaacagaaaaatacagaacagaaactactgcgataaagctctaataccttgattggagtgacagttactcttacatttttcaaaattcataaagtttacatttaagatctgttgcggggcgagggggcgaagcgggggagagcatcgggacaaatagctaaggcat

SEQ ID NO: 147444 - DNA, 81 bp, Homo sapiens
  chr3:195691553-195691634
  hypo
agcggaaatgccacacgggtgaactgtgcttgtgtggaacaagctgcaacccccctaccacaccctcggctggctgttccc

SEQ ID NO: 147445 - DNA, 30 bp, Homo sapiens; identical to SEQ ID NO: 18304
  chr3:195709683-195709713
  hypo

SEQ ID NO: 147446 - DNA, 343 bp, Homo sapiens
  chr3:195735473-195735816
  hypo
acagctcttaagccacgtggttcctcagcaccacctgagctgacccgtcccagctcgtgatcacacagacaaagacataactgtagaagcgtcggtatttcatatgtatcaaatttcatttttaaaagacatttttaggggacagaaatgttatagaacaacttttaacgttccacaaaagtataaatagtagaaaaggaaactagtgcgtgtgaactaggactccatgaaaagtacccagtagttgaagctccacgactccatggacagaagtttgcataaatatttaagcgatgttagttcctgaacatataagcaagccgtggcaggtctgtggccagag

SEQ ID NO: 147447 - DNA, 489 bp, Homo sapiens
  chr3:195750599-195751088
  hypo
cacgcacctgccaaacgcaacagcctctttcagcgtcattaaaatatttcaacaggaggactgagtttagactcaacctgtgttttctcccctggaaaacgaaggtttcatgaagcaaggaaggtctttactgtcctcatccgaaacgctgaggcatctgtgatgtctgctgtaagtgccaccaggctctccgctgaaatctcgcaacgggaaaatagagaccgtagattctgcttttagaaaggggagaatcagaagtaatgtggaaatgccatgtcctcgttcataaacatcttcttttacaaattccacaagtttagttactttgggattaatatgggcttatcttaaagtgcgtttattaacttagcgtgagttgttcaaatgcattctggatcctgagccgacatccagcaatgctgagtgtgcgcctgtgtgagtcaccagccctgatgagcctcaggttattgtgttcgtaaaatgaagggg

SEQ ID NO: 147448 - DNA, 127 bp, Homo sapiens; identical to SEQ ID NO: 18305
  chr3:195751983-195752110
  hypo

SEQ ID NO: 147449 - DNA, 260 bp, Homo sapiens
  chr3:195763582-195763842
  hypo
gagccactgcacccagccagaattgttttcttaatatcctctcggaatgttcattgctagtggataacaatgcagctgattttcgtgtgttgattttgtatcttgccatgtctctgaattctggagtgagatgtaaccattttattgtggattctttagaatttgctacatgtaagagcgtgtcttctgtgaacagaggtgattttacttcttcctttccagttcagatgcgatttatttttggccgagttgctgtgact

SEQ ID NO: 147450 - DNA, 95 bp, Homo sapiens; identical to SEQ ID NO: 67439
  chr3:195770515-195770610
  hypo

SEQ ID NO: 147451 - DNA, 345 bp, Homo sapiens; identical to SEQ ID NO: 67440
  chr3:195778817-195779162
  hypo

SEQ ID NO: 147452 - DNA, 506 bp, Homo sapiens; identical to SEQ ID NO: 109540
  chr3:195808864-195809370
  hypo

SEQ ID NO: 147453 - DNA, 29 bp, Homo sapiens
  chr3:195834904-195834933
  hypo
gccaccgcgcctgtcatctttttaacatt

SEQ ID NO: 147454 - DNA, 30 bp, Homo sapiens; identical to SEQ ID NO: 67443
  chr3:195837118-195837148
  hypo

SEQ ID NO: 147455 - DNA, 101 bp, Homo sapiens; identical to SEQ ID NO: 67444
  chr3:195855352-195855453
  hypo

SEQ ID NO: 147456 - DNA, 37 bp, Homo sapiens; identical to SEQ ID NO: 67445
  chr3:195863856-195863893
  hypo

SEQ ID NO: 147457 - DNA, 38 bp, Homo sapiens; identical to SEQ ID NO: 18309
  chr3:195866854-195866892
  hypo

SEQ ID NO: 147458 - DNA, 198 bp, Homo sapiens; identical to SEQ ID NO: 67447
  chr3:195867975-195868173
  hypo

SEQ ID NO: 147459 - DNA, 30 bp, Homo sapiens; identical to SEQ ID NO: 67448
  chr3:195875353-195875383
  hypo

SEQ ID NO: 147460 - DNA, 36 bp, Homo sapiens; identical to SEQ ID NO: 18310
  chr3:195901886-195901922
  hypo

SEQ ID NO: 147461 - DNA, 98 bp, Homo sapiens
  chr3:195910786-195910884
  hypo
gcgaaagatccaacacgcagcccttctcgttcctttgagtggatccatttgaaaagctcctgtctcctggctgggtgtggtggctcacgcctgtaatc

SEQ ID NO: 147462 - DNA, 170 bp, Homo sapiens
  chr3:195923149-195923319
  hypo
gtggtgtgtcagctgcgtggtggagaaaatcatcatgatgacactgaccgcgctcactgtgtgcctaccgtgtacctgtgtcccgatgttttgcatgaaacacctcattccggcctctgccagccttccagaaagatgcattattcccagtcccacggtcacattctggc

SEQ ID NO: 147463 - DNA, 30 bp, Homo sapiens; identical to SEQ ID NO: 18311
  chr3:195924623-195924653
  hypo

SEQ ID NO: 147464 - DNA, 23 bp, Homo sapiens
  chr3:195928222-195928245
  hypo
caccgcaccgggccaaaactgac

SEQ ID NO: 147465 - DNA, 19 bp, Homo sapiens
  chr3:195933632-195933651
  hypo
gctccgcctctccggttca

SEQ ID NO: 147466 - DNA, 33 bp, Homo sapiens
  chr3:195960903-195960936
  hypo
caggacacggccgggcgcgggggctcacgcctg

SEQ ID NO: 147467 - DNA, 33 bp, Homo sapiens; identical to SEQ ID NO: 67451
  chr3:195961175-195961208
  hypo

SEQ ID NO: 147468 - DNA, 45 bp, Homo sapiens; identical to SEQ ID NO: 18312
  chr3:195990770-195990815
  hypo

SEQ ID NO: 147469 - DNA, 40 bp, Homo sapiens; identical to SEQ ID NO: 67453
  chr3:196039338-196039378
  hypo

SEQ ID NO: 147470 - DNA, 99 bp, Homo sapiens
  chr3:196039617-196039716
  hypo
ccgcgcctggcccatagtatattctactttaaaggcaaaaggcaggcattctcaaacacaaaagaatccagggaatacggcatttctgagtcctttctg

SEQ ID NO: 147471 - DNA, 30 bp, Homo sapiens; identical to SEQ ID NO: 18314
  chr3:196046442-196046472
  hypo

SEQ ID NO: 147472 - DNA, 38 bp, Homo sapiens; identical to SEQ ID NO: 18315
  chr3:196046696-196046734
  hypo

SEQ ID NO: 147473 - DNA, 361 bp, Homo sapiens; identical to SEQ ID NO: 18316
  chr3:196069870-196070231
  hypo

SEQ ID NO: 147474 - DNA, 181 bp, Homo sapiens
  chr3:196099464-196099645
  hypo
ggcctcccaaagtgctggaattacaggtgtgactcatcatgaccggtaatggctgaatttttaatgtatgtttaaacatctttacctgaaaaggattcaacaaacttaagatcaacaagtcacgtaattttattctcttgcaacctccatcaacaattttttttttttttgagacgagctt

SEQ ID NO: 147475 - DNA, 30 bp, Homo sapiens
  chr3:196100183-196100213
  hypo
tcgtacaacagatatcgatacatcaatcgt

SEQ ID NO: 147476 - DNA, 25 bp, Homo sapiens
  chr3:196138387-196138412
  hypo
aaaactagcagatggccgagcacag

SEQ ID NO: 147477 - DNA, 39 bp, Homo sapiens; identical to SEQ ID NO: 67459
  chr3:196138791-196138830
  hypo

SEQ ID NO: 147478 - DNA, 139 bp, Homo sapiens; identical to SEQ ID NO: 67460
  chr3:196143803-196143942
  hypo

SEQ ID NO: 147479 - DNA, 78 bp, Homo sapiens; identical to SEQ ID NO: 67461
  chr3:196144181-196144259
  hypo

SEQ ID NO: 147480 - DNA, 243 bp, Homo sapiens; identical to SEQ ID NO: 18320
  chr3:196199258-196199501
  hypo

SEQ ID NO: 147481 - DNA, 147 bp, Homo sapiens; identical to SEQ ID NO: 67463
  chr3:196226288-196226435
  hypo

SEQ ID NO: 147482 - DNA, 30 bp, Homo sapiens; identical to SEQ ID NO: 67464
  chr3:196231389-196231419
  hypo

SEQ ID NO: 147483 - DNA, 82 bp, Homo sapiens; identical to SEQ ID NO: 67465
  chr3:196245240-196245322
  hypo

SEQ ID NO: 147484 - DNA, 33 bp, Homo sapiens; identical to SEQ ID NO: 109547
  chr3:196255598-196255631
  hypo

SEQ ID NO: 147485 - DNA, 121 bp, Homo sapiens; identical to SEQ ID NO: 67466
  chr3:196263348-196263469
  hypo

SEQ ID NO: 147486 - DNA, 45 bp, Homo sapiens; identical to SEQ ID NO: 67467
  chr3:196263528-196263573
  hypo

SEQ ID NO: 147487 - DNA, 19 bp, Homo sapiens
  chr3:196290727-196290746
  hypo
tcaccgcacccagcctccc

SEQ ID NO: 147488 - DNA, 28 bp, Homo sapiens
  chr3:196297099-196297127
  hypo
tgaatgcattagtaactaaaacgataac

SEQ ID NO: 147489 - DNA, 241 bp, Homo sapiens
  chr3:196297366-196297607
  hypo
cagagtgctgggattagaggcgtgagccaccgcgcgataacaccccctttttaatgctagcttgccaacaggggtcggagtaagaagtaaaaatttttttttcatgtgaagcatgtaaaatttatacttatgtagtaaaaccggttttagttatagaagatagggaacattgccattaaatatgtaaactatcaagttgtttctcttttcttttttctttttttttttttttttgagacgg

SEQ ID NO: 147490 - DNA, 209 bp, Homo sapiens; identical to SEQ ID NO: 67469
  chr3:196302818-196303027
  hypo

SEQ ID NO: 147491 - DNA, 332 bp, Homo sapiens
  chr3:196318575-196318907
  hypo
tgagggtaacgagtgcggttttgaacatgttaaatcggaggtggaaatacagaaaaggcagttggaactagtgagcctggagttaaggagatcggcagccagctggatgagagagctgctggtgtgccgcgttcctcactggccgtacgggctccacagcccagcgggtagagcgagggaggcgggcctgcaatacccccaaaggacaaccaactgccttctaaaccgtgactctgccaactaaaggctgcgggggtgttttgttgtttcgggatttttcttttccttacataccccacacctctgaataacaatcctagcagttcaatttt

SEQ ID NO: 147492 - DNA, 198 bp, Homo sapiens
  chr3:196376653-196376851
  hypo
ctagcacagagtgccccgagagctgcccactttctccaggagacctctttccgtaaagctttttcagcttctctgattactttgaggagaaaattcttaactacgtggtaacatacgtatggcacttgctcagagcccctttagcggagagggtccggtcccagctctggcagcagctgctcacgtagtagcagtcag

SEQ ID NO: 147493 - DNA, 225 bp, Homo sapiens
  chr3:196382388-196382613
  hypo
gagtgagactctctcaaaaaaagaaaaaaacaaaacaaaacaaaaaactggatgactgagctgcaccgatggtatgagaatctccgggtgaggtgcttgagagctggagaagcctgcctcggagtttgtggacgagttgaccgctaaggcttacacagctgcggggaggacttgctgccatgccactctgcagagcggcagcccggaccacgctcaggctaagaa

SEQ ID NO: 147494 - DNA, 1098 bp, Homo sapiens
  chr3:196386775-196387873
  hypo
ctgcacagctgccacctggagcgcatcagccgcggcgccttccaggagcaaggtcacctgcgcagcctggtcctgggggacaactgcctctcagagaactacgaagagacggcagccgccctccacgccctgccgggcctgcggaggctggacttgtcaggaaacgccctgacggaggacatggcagccctcatgctccagaacctctcctcgctgcggtccgtgtccctggcggggaacaccatcatgcggctggacgactccgtcttcgagggcctggagcgtctccgggagctggatctgcagaggaactacatcttcgagatcgagggcggcgctttcgacggcctggctgagctgaggcacctcaacctggccttcaacaacctcccctgcatcgtggacttcgggctcacgcggctgcgggtcctcaacgtcagctacaacgtcctggagtggttcctcgcgaccgggggagaggctgccttcgagctggagacgctggacctgtctcacaaccagctgctgttcttcccgctgctgccccagtacagcaagttgcggaccctcctgctgcgcgacaacaacatgggcttctaccgggacctgtacaacacctcgtcgccgagggagatggtggcccagttcctcctcgtggacggcaacgtgaccaacatcaccaccgtcagcctctgggaagaattctcctccagcgacctcgcagatctccgcttcctggacatgagccagaaccagttccagtacctgccagacggcttcctgaggaaaatgccttccctctcccacctgaacctccaccagaattgcctgatgacgcttcacattcgggagcacgagccccccggagcgctcaccgagctggacctgagccacaaccagctgtcggagctgcacctggctccggggctggccagctgcctgggcagcctgcgcttgttcaacctgagctccaaccagctcctgggcgtcccccctggcctcttcgccaatgctaggaacatcactacacttgacatgagccacaatcagatctcactttgtcccctgccagctgcctcggaccgggtgggcccccct

SEQ ID NO: 147495 - DNA, 318 bp, Homo sapiens
  chr3:196388383-196388701
  hypo
tcctccaagatcatccgcgtgacggagctgcccggaggtgtgcctcgggactgcaagtgggagcggctggacctgggcctgctctacctcgtgctcatcctccccagctgcctcaccctgctggtggcctgcactgtcatcgtcctcacttttaagaagcctctgcttcaggtcatcaagagccgctgccactggtcctccgtttactgacctggctgtgtgccaagactcgaaattcggtccgcacacaacaggacactttctctgccagctttcaagatgtgatgcagaggccaagtctgacgaattgaagtttca

SEQ ID NO: 147496 - DNA, 130 bp, Homo sapiens
  chr3:196389082-196389212
  hypo
gatttcatagcaggacgacgacaacaaagcatttcaaagcacagctggagggtctgacataagatcataagatgaggcctctcacctgctgcgtgactggccaccgccgtcagaacggtcctgtgatcct

SEQ ID NO: 147497 - DNA, 30 bp, Homo sapiens
  chr3:196391285-196391315
  hypo
acaggcgtgagccaccgcgcccaggcagcg

SEQ ID NO: 147498 - DNA, 31 bp, Homo sapiens; identical to SEQ ID NO: 18324
  chr3:196402160-196402191
  hypo

SEQ ID NO: 147499 - DNA, 210 bp, Homo sapiens; identical to SEQ ID NO: 18325
  chr3:196402790-196403000
  hypo

SEQ ID NO: 147500 - DNA, 89 bp, Homo sapiens; identical to SEQ ID NO: 67476
  chr3:196412487-196412576
  hypo

SEQ ID NO: 147501 - DNA, 30 bp, Homo sapiens; identical to SEQ ID NO: 18326
  chr3:196434188-196434218
  hypo

SEQ ID NO: 147502 - DNA, 127 bp, Homo sapiens; identical to SEQ ID NO: 18327
  chr3:196434730-196434857
  hypo

SEQ ID NO: 147503 - DNA, 121 bp, Homo sapiens; identical to SEQ ID NO: 67479
  chr3:196440473-196440594
  hypo

SEQ ID NO: 147504 - DNA, 43 bp, Homo sapiens
  chr3:196469495-196469538
  hypo
gtcttcttcgccgggcgcggtggctcacgcctgtaatcccagc

SEQ ID NO: 147505 - DNA, 30 bp, Homo sapiens; identical to SEQ ID NO: 67480
  chr3:196475368-196475398
  hypo

SEQ ID NO: 147506 - DNA, 164 bp, Homo sapiens
  chr3:196477977-196478141
  hypo
gatatttcttataactggaatcgtgcaatgtttgtccttttgtgtctcgctcattatttcatgtagcgcagtattttcagggtttatccattttgtagcatatagtataggttgagcatcgctaatctgaaaatccaaaatccgaaatgctccaaattccagca

SEQ ID NO: 147507 - DNA, 30 bp, Homo sapiens
  chr3:196482309-196482339
  hypo
acgcatttcttcttccgacttttttttttt

SEQ ID NO: 147508 - DNA, 30 bp, Homo sapiens
  chr3:196484664-196484694
  hypo
aataccgagaatactcgcgttagatactga

SEQ ID NO: 147509 - DNA, 203 bp, Homo sapiens; identical to SEQ ID NO: 18328
  chr3:196530354-196530557
  hypo

SEQ ID NO: 147510 - DNA, 22 bp, Homo sapiens
  chr3:196561446-196561468
  hypo
aaatagaagtatagggccaggc

SEQ ID NO: 147511 - DNA, 246 bp, Homo sapiens
  chr3:196674979-196675225
  hypo
gggagcagcaccagggcctcccgggtcagagacttcaaaccagggtttgtggctccacgagtgccccagaggtagagggggaccacagcaaaggccagaaaggtgggccggttgaagaagccagcagccacaatgcctccaagaagccagctgcgccaccgtggacccggcgccggctccttgcgtgtagggccccacgttacatgggaggataccagcaccagcagccacgtgaagaggagtccc

SEQ ID NO: 147512 - DNA, 224 bp, Homo sapiens; identical to SEQ ID NO: 109560
  chr3:196695304-196695528
  hypo

SEQ ID NO: 147513 - DNA, 90 bp, Homo sapiens; identical to SEQ ID NO: 67485
  chr3:196700061-196700151
  hypo

SEQ ID NO: 147514 - DNA, 31 bp, Homo sapiens; identical to SEQ ID NO: 67486
  chr3:196719326-196719357
  hypo

SEQ ID NO: 147515 - DNA, 292 bp, Homo sapiens; identical to SEQ ID NO: 18329
  chr3:196723695-196723987
  hypo

SEQ ID NO: 147516 - DNA, 30 bp, Homo sapiens; identical to SEQ ID NO: 67488
  chr3:196724290-196724320
  hypo

SEQ ID NO: 147517 - DNA, 30 bp, Homo sapiens; identical to SEQ ID NO: 67489
  chr3:196726283-196726313
  hypo

SEQ ID NO: 147518 - DNA, 334 bp, Homo sapiens
  chr3:196728412-196728746
  hypo
agctggaatgtgccagggcagcggaggccctgcaagagccagagaaccagtccaggtcgaagaagggcgcggggggcctcactgactagaggatgagagtggtccctgactggctcttggagaatggaatctgcccttctcggtggagcaggtaggcctttgagtgcctaacaaaacgaaagaaatcggcagcagaagtttctatcagggtccaagcctctgcatgtgctggcttgtttggctttattttagaaaccaaccaacatgtttcattagcactgacacagcaggggtcccctgctgccacctgacaatccagcgtcacttacactgc

SEQ ID NO: 147519 - DNA, 614 bp, Homo sapiens
  chr3:196752263-196752877
  hypo
cgcctgagatggttgcggggctcagcttacccatcacctctgcagagcaccgtcctgcctgctctatttcagtggatttccccgcaaccctcgttttctctgtcctgcccttcccttttcctcacagcaccccaacatgtgtcactgtattgttttgggtgtgtttatttactctctgctctgtgggggcaggaaggtctcttcgtttactgctgcatgcttatgaccagcgggtagcaggtgctcagtagaggtgtcgagttaattaaagaggaagaggtgcgtggggcctcggaggcagagctgtttctggctgatgggtgtgcagggttggactgtgccgtgtgtcatttgatggccattaattcaacaaggaaccagccagtgctttctccaagcgagatgctgtgtggagttccagagggtagacacaggggaagactggaccctcctctgaggactaacgagactgagcaggcagaggcttgcagaggccatgtgggtgcgggcaagagaggccctgctccagagagggaggggctcagggagcaccttggaggaggtgacagttgcgctggactgtgatggaggccaggcaccggccaagcagaggt

SEQ ID NO: 147520 - DNA, 506 bp, Homo sapiens; identical to SEQ ID NO: 67492
  chr3:196754391-196754897
  hypo

SEQ ID NO: 147521 - DNA, 275 bp, Homo sapiens
  chr3:196766006-196766281
  hypo
aagcagtgaatgaataggctgcggtgagtgcatccacacaatggaatactgctcagcaatgaaaaccatgcattcctacccaatacattttgctaagccacaccccaaacgctacattacactccatacgacattccgggaaaggcaaaactacaggcactgcgaacagatcggcggttgtcacagactggggctgagaggaggtctggattacacagggaaaagcatcagagaatttctttgggacagtgggactgtttcgcagtcttgattgt

SEQ ID NO: 147522 - DNA, 30 bp, Homo sapiens; identical to SEQ ID NO: 67494
  chr3:196767074-196767104
  hypo

SEQ ID NO: 147523 - DNA, 30 bp, Homo sapiens; identical to SEQ ID NO: 18334
  chr3:196767403-196767433
  hypo

SEQ ID NO: 147524 - DNA, 91 bp, Homo sapiens
  chr3:196784239-196784330
  hypo
gccgcacctgacagtcgttgactatttgaacagtactgtcatcacgcttgtacctgtctttgtaaacacaggtaagcgtttctgtggagtg

SEQ ID NO: 147525 - DNA, 193 bp, Homo sapiens; identical to SEQ ID NO: 18335
  chr3:196817781-196817974
  hypo

SEQ ID NO: 147526 - DNA, 30 bp, Homo sapiens
  chr3:196843565-196843595
  hypo
aaacaaaaccccacacgactgaataataca

SEQ ID NO: 147527 - DNA, 148 bp, Homo sapiens; identical to SEQ ID NO: 67497
  chr3:196907216-196907364
  hypo

SEQ ID NO: 147528 - DNA, 85 bp, Homo sapiens; identical to SEQ ID NO: 67498
  chr3:196910544-196910629
  hypo

SEQ ID NO: 147529 - DNA, 4 bp, Homo sapiens
  chr3:196910640-196910644
  hypo
agag

SEQ ID NO: 147530 - DNA, 17 bp, Homo sapiens
  chr3:196948088-196948105
  hypo
ataaagaaacataacag

SEQ ID NO: 147531 - DNA, 157 bp, Homo sapiens
  chr3:197027475-197027632
  hypo
ctgaaggcttcagggggactacgggaggctctttcagcatggatcattcacatagctagtaagttgatgctggctattgggcggaggcttcaatttctcaccatgaagacctttctatagggctgcttgagtgtcttcatgacgtagcggctgacgt

SEQ ID NO: 147532 - DNA, 159 bp, Homo sapiens; identical to SEQ ID NO: 67502
  chr3:197094179-197094338
  hypo

SEQ ID NO: 147533 - DNA, 381 bp, Homo sapiens
  chr3:197121209-197121590
  hypo
acaagagtgaaactccgtctcaaagaaaaaaggtctatttttaaaaactactaactgagaaagaagtaagagccttgaagaaacagaaagaaggaacctgagcatgccacggcaggagaggatgagaacggcatggagaagggggaggcgcaagcagctggaagcccacggcggaatgggccggtgctcggagagctgttcggatggcacgggagctgattgtcttgacgttaagttcctcggtgaggagagaacagaagttaatggcacccaccgggcctgggtggagcctcagcaccaccaaagaaagcagattctgcatttggaaagcctaggccctctccttgaacctggttctcaaggtttcggtgatgagtcacc

SEQ ID NO: 147534 - DNA, 284 bp, Homo sapiens
  chr3:197124818-197125102
  hypo
cctgtaccctgctggcgagaggacagattgagaggagtcggcattggcagtgttccggggcacacacaggcattgttagtcacattcggtataacatgctagcaatgcctccacgaggtatacatcccaggccgctcttatgcaattctgtaaggagaggtgtatgcaaatgttgcctgcacaggaattagtggtgggagctggagactccctgagtttccatcactgagatggagaaataaaatacagtgaatgcacgccagggagtacgatgaaacaggact

SEQ ID NO: 147535 - DNA, 87 bp, Homo sapiens; identical to SEQ ID NO: 67504
  chr3:197127429-197127516
  hypo

SEQ ID NO: 147536 - DNA, 252 bp, Homo sapiens
  chr3:197133871-197134123
  hypo
tacatcctcaggtctcgggtttatgtcacttccttggggaggcctttccagaccctcagtgctccatgagccgcccccattgctccctcacgcctccttcacaacactcgctgcgcctgtaatttttgactgactgtctattttcccatgagaaggtaattctgtacccatggactgtgcttcctcccgaggcctgcctgtggaggcacagagtggatactcgatacatcactctgacgggtagcgaggtgc

SEQ ID NO: 147537 - DNA, 32 bp, Homo sapiens; identical to SEQ ID NO: 67506
  chr3:197136799-197136831
  hypo

SEQ ID NO: 147538 - DNA, 75 bp, Homo sapiens; identical to SEQ ID NO: 67507
  chr3:197152284-197152359
  hypo

SEQ ID NO: 147539 - DNA, 31 bp, Homo sapiens; identical to SEQ ID NO: 67508
  chr3:197161832-197161863
  hypo

SEQ ID NO: 147540 - DNA, 161 bp, Homo sapiens
  chr3:197170405-197170566
  hypo
aaaaatctaagagagagagagcgctttgtgagttttcagactcaaaagttagagactgcacggaccaacctgagagcaggtgagtccggttaggagggagcagaagtgcttttggagggtgctcattgccgtgttgttactcgtggcggggaaactgaaag

SEQ ID NO: 147541 - DNA, 95 bp, Homo sapiens; identical to SEQ ID NO: 67510
  chr3:197216364-197216459
  hypo

SEQ ID NO: 147542 - DNA, 35 bp, Homo sapiens
  chr3:197216698-197216733
  hypo
gtgagcctccgcgcccagcccgacacaactcaatc

SEQ ID NO: 147543 - DNA, 97 bp, Homo sapiens; identical to SEQ ID NO: 3081
  chr3:197222651-197222748
  hypo

SEQ ID NO: 147544 - DNA, 30 bp, Homo sapiens; identical to SEQ ID NO: 67512
  chr3:197225516-197225546
  hypo

SEQ ID NO: 147545 - DNA, 31 bp, Homo sapiens
  chr3:197226094-197226125
  hypo
ggtggcaggtgccgggcgccacgacctcact

SEQ ID NO: 147546 - DNA, 142 bp, Homo sapiens
  chr3:197231738-197231880
  hypo
gctgttttctttcgtcgtacacttaaccgcacagaaaataagccctagggctgaaaactccagcttgtcgtggtgctggcagtggtgtgcgctcttccacatctgggtgcagcctaagcctcttgtccggttctgccctcag

SEQ ID NO: 147547 - DNA, 30 bp, Homo sapiens; identical to SEQ ID NO: 67513
  chr3:197232597-197232627
  hypo

SEQ ID NO: 147548 - DNA, 30 bp, Homo sapiens
  chr3:197236353-197236383
  hypo
aaaactacgtcctgcgccccggtaggttct

SEQ ID NO: 147549 - DNA, 301 bp, Homo sapiens
  chr3:197238898-197239199
  hypo
tcgatgacaggggacgtgtctgtggagccactgctgcagtaggtctccatcttggcgatcttttcatcaaagtacttcttgccgtagtccttgcgcacgacctcaggcagctcctcccacatcttcttggcgatggcctgaatgctctcagggctgtaaaggctggtggcagcgatgaagttgccgggctccaccacgctgaccttcacgcccagggggtacatctcatagcgcaggcagtccgagaaagcctctaccccgaacttggtgatgcagtacggggagcgggccgggttggcca

SEQ ID NO: 147550 - DNA, 361 bp, Homo sapiens
  chr3:197241230-197241591
  hypo
tgaactccacctccccgaacgttgagatgccggcattgttaacgaggccccacatgcctggacaggagagggatagatgtgcatttaccacatgggcttggcccagacattgcccatcagcctgcaggccagcctcctctctgcttctttcctgtgacttcccagcctctcgcccagtgctctcaagaaactttctagagtcactcaggaacgacaggaggtaaagaggcctaaagtgctgactgcagccctcccttgcgtctagaatgtccagtcctcacgtcacatctgcctggctcgagtctctgggcccatcatgacccagcctgccgtgtcccccggccttcagtctcacctcacc

SEQ ID NO: 147551 - DNA, 224 bp, Homo sapiens; identical to SEQ ID NO: 18340
  chr3:197243348-197243572
  hypo

SEQ ID NO: 147552 - DNA, 101 bp, Homo sapiens
  chr3:197246889-197246990
  hypo
tgtcctgcatggggtgtgggtcggtggcggccactgcgggtcggaacgctctgggagggtgctccctggagttcacagccggcattgcctgagggggaatt

SEQ ID NO: 147553 - DNA, 212 bp, Homo sapiens; identical to SEQ ID NO: 18342
  chr3:197250415-197250627
  hypo

SEQ ID NO: 147554 - DNA, 30 bp, Homo sapiens; identical to SEQ ID NO: 109570
  chr3:197281431-197281461
  hypo

SEQ ID NO: 147555 - DNA, 156 bp, Homo sapiens; identical to SEQ ID NO: 109571
  chr3:197281701-197281857
  hypo

SEQ ID NO: 147556 - DNA, 238 bp, Homo sapiens; identical to SEQ ID NO: 109572
  chr3:197281920-197282158
  hypo

SEQ ID NO: 147557 - DNA, 31 bp, Homo sapiens
  chr3:197313910-197313941
  hypo
caacacggcgaaaccccgtctctactaaaaa

SEQ ID NO: 147558 - DNA, 301 bp, Homo sapiens; identical to SEQ ID NO: 67521
  chr3:197327054-197327355
  hypo

SEQ ID NO: 147559 - DNA, 243 bp, Homo sapiens; identical to SEQ ID NO: 67522
  chr3:197327640-197327883
  hypo

SEQ ID NO: 147560 - DNA, 147 bp, Homo sapiens; identical to SEQ ID NO: 67523
  chr3:197330094-197330241
  hypo

SEQ ID NO: 147561 - DNA, 181 bp, Homo sapiens
  chr3:197330486-197330667
  hypo
tgctgtcccttcagccgggggtctccaggggcgctgctgtggctgtctccagagctccccaaggggcaagtctgttgaaggtgccagagcgttctgcgttccctgccggccaacacatcatcagaggtggggcgatgctcctcctcaagcagttcactctctgccccgcgccagctgggcc

SEQ ID NO: 147562 - DNA, 100 bp, Homo sapiens
  chr3:197401909-197402009
  hypo
ggcttccagggccagcgcttccgcgggctcctcctcgtagtctgacaggtaagactccaggctctgcctggccagtgcctcccgccgggcctgcagccgc

SEQ ID NO: 147563 - DNA, 31 bp, Homo sapiens; identical to SEQ ID NO: 18347
  chr3:197435285-197435316
  hypo

SEQ ID NO: 147564 - DNA, 30 bp, Homo sapiens
  chr3:197444884-197444914
  hypo
atgtccctgcaaagccgctccaagccacca

SEQ ID NO: 147565 - DNA, 22 bp, Homo sapiens
  chr3:197452519-197452541
  hypo
cactgcacgcagccaaaggaga

SEQ ID NO: 147566 - DNA, 31 bp, Homo sapiens; identical to SEQ ID NO: 18348
  chr3:197459517-197459548
  hypo

SEQ ID NO: 147567 - DNA, 30 bp, Homo sapiens; identical to SEQ ID NO: 18349
  chr3:197537987-197538017
  hypo

SEQ ID NO: 147568 - DNA, 21 bp, Homo sapiens
  chr3:197551218-197551239
  hypo
ccaccacgcccggcttttttt

SEQ ID NO: 147569 - DNA, 325 bp, Homo sapiens; identical to SEQ ID NO: 67529
  chr3:197582089-197582414
  hypo

SEQ ID NO: 147570 - DNA, 222 bp, Homo sapiens
  chr3:197582613-197582835
  hypo
acttgaaattcccttcggccgtttgtcaaaacacactcacttaagtcttagttctcagtattcatatctgatcctccaaattagacggcctttaaaacacatctcacatttctttgtctgccaaatagtgtccaaccaacactgtgcaaaaagagtcgtattttaaataaaacctcatattatcaaaactgtgcttcagaaggctcccgttgcttagagtga

SEQ ID NO: 147571 - DNA, 19 bp, Homo sapiens
  chr3:197602092-197602111
  hypo
acctggcattgcaacagtt

SEQ ID NO: 147572 - DNA, 17 bp, Homo sapiens
  chr3:197607108-197607125
  hypo
cccggcctgtgtattgt

SEQ ID NO: 147573 - DNA, 165 bp, Homo sapiens
  chr3:197608010-197608175
  hypo
tgcagcagctgctcacgaggagaaccgtcgtgccttttctggttttggccgcacccggttacttagatttctgctttgaactgtgtcctgagatcctgaatccccgctttgtcggtaggcacaggtccatataagcatttgcggtctggacgtttcaaaggtatt

SEQ ID NO: 147574 - DNA, 98 bp, Homo sapiens; identical to SEQ ID NO: 67531
  chr3:197612488-197612586
  hypo

SEQ ID NO: 147575 - DNA, 191 bp, Homo sapiens; identical to SEQ ID NO: 67532
  chr3:197616592-197616783
  hypo

SEQ ID NO: 147576 - DNA, 156 bp, Homo sapiens
  chr3:197640192-197640348
  hypo
gtgtgtgcgtgcgtgcgtgcgtgcgtgtgtgcgtgcgtgcgtgtgtgccatttagcattcccctcaaagaagatctaccacttctttcttcctcctggcatttttcaccgtgacttctcatcctataaactcaggtttgaacgaagttcagcgctc

SEQ ID NO: 147577 - DNA, 77 bp, Homo sapiens; identical to SEQ ID NO: 18352
  chr3:197663679-197663756
  hypo

SEQ ID NO: 147578 - DNA, 283 bp, Homo sapiens
  chr3:197685521-197685804
  hypo
gcgggggaaaacaaacggttgagactttaactcgagtaacttacatgtgcaatggcaaatgagactcaaaagcaaatacatgctcttccttactgagatgatgcagcatttgtaaataataaatgtatgtttttatgtttttctcctcccatatggaaattaagtcaaaagtactcaagtcaccgttgccaaaggaggagtcctgtggtttacaggaaagggcttgcgtggctggtaacttgtccactacaccattgaaacagctttgcctcctggctgggcg

SEQ ID NO: 147579 - DNA, 36 bp, Homo sapiens; identical to SEQ ID NO: 67535
  chr3:197714310-197714346
  hypo

SEQ ID NO: 147580 - DNA, 88 bp, Homo sapiens; identical to SEQ ID NO: 67536
  chr3:197726425-197726513
  hypo

SEQ ID NO: 147581 - DNA, 184 bp, Homo sapiens; identical to SEQ ID NO: 18354
  chr3:197764837-197765021
  hypo

SEQ ID NO: 147582 - DNA, 30 bp, Homo sapiens
  chr3:197837376-197837406
  hypo
ggggactttgagaaacgtgttcactcatga

SEQ ID NO: 147583 - DNA, 231 bp, Homo sapiens
  chr4:503183-503414
  hypo
tcagtattcagacacgccccaaacacacacacaccccactctgacctgtgcccagactcagccgccagcctatgcactctgccctcgcggccgccggccttgctgtcctgtcggcggctgccttccacttgcgcctggcttctgctgccacactcgctgcctcactcttggtgagctcagcggtaatttctgccgtcaggcacagcagacgctttcgggcgctgctctcac

SEQ ID NO: 147584 - DNA, 1472 bp, Homo sapiens
  chr4:512571-514043
  hypo
gcccattgtctacaccgtcggggatcctttttcctaaaacaaaatggggtatgtgttctgacactgaaatacgttttagaacccacagccaggcccgtgcagtccctcggtggcgtccagtctgttggaggctttgtgcccacccggctctctcagtgtagtgggaccggctttttctcacctctggacttttgcacatgctgttcccatcagcttgatgctcttcctgcagttttttgcctggcgaattcctgggtaccgtttacatttcagcgtaaacatcagaccttcctggtccagcgcccactcccaatccaaaatcagttcctccccattaccaaaaatccctcattgataccctctacttttccttcctgggaaacttgtaattacagctgtaatgcagtcacagtttgtaattacgcttgtgtgcgtgcgtgcgtgtctgtgagccctactggatccaagccccagcaggcaaggattgcacctgcttgctcgccatgctgtgtctcccctggcacagcgcctggcacagtgcctggcacgtcgtccacgctccatggatatttgtttcgatgcatgcacaggtgcacccccatagctttgtgactctctgataggcggtggggtgtggacacaggcgtccccccatccagggtggtaggtgtagcaatgaaggatgccagccctggaaccagactgcctgagtttcatttgcagcttttacccactggcactgtggcccaggtgcgtgactcaccctctgtgtctcagttgcctcctctggataacagttctgatgctcatccctgcctcatagggtcattagggaggtgaaacgagcgagccgcctagtgttgctggctactggcacttagtgcagagcacctggtgccggcagcagtggggtgggcctgcaggcgtgtgggttcatgcttagggacttggtgcctgcagcagtggggtgggcctgcaggcgtgtgggttcacgctcagggacctggtgccggcagcagtggggtgggcctgcaggcgtgtgggttcatgcttagggacttggtgcctgcagcagtggggtgggcctgcaggcgtgtgggttcacgctcagggacctggtgccggcagcagtggggtgggcctgcaggcgtgtgggttcatgcttagggacttggtgcctgcagcagtcgggtgtgcttgcaggcgtgtgggttcacgctcagggacctggtgccggcagcagtggggcgggcctgcaggcgtatgagttcatgctcagggacttgtgccacagcaccctggacctcagtggcttgagcgcctgtggcagctctttcactgctgtgatagcaggcctggggcatgcagagccacagggtggggcgagcctgccaagaggcacagctgagacccttcttggcatggctcttctggagtaggaagctcatgtcaaataccgagggggtctcagg

SEQ ID NO: 147585 - DNA, 30 bp, Homo sapiens
  chr4:515552-515582
  hypo
gatcctggttctttcggccgttcacgtcat

SEQ ID NO: 147586 - DNA, 30 bp, Homo sapiens; identical to SEQ ID NO: 67541
  chr4:519698-519728
  hypo

SEQ ID NO: 147587 - DNA, 30 bp, Homo sapiens; identical to SEQ ID NO: 18358
  chr4:520188-520218
  hypo

SEQ ID NO: 147588 - DNA, 30 bp, Homo sapiens
  chr4:521017-521047
  hypo
aagtaagtgcgtggcggacacggggtgcat

SEQ ID NO: 147589 - DNA, 30 bp, Homo sapiens; identical to SEQ ID NO: 67543
  chr4:527110-527140
  hypo

SEQ ID NO: 147590 - DNA, 101 bp, Homo sapiens
  chr4:529356-529457
  hypo
agccccagggagcgcgctgtggcctctccgctgagcagtgaggctggagggctcctacgtcctcccatgactgaaccgtcgctctcgcggtgctgactgct

SEQ ID NO: 147591 - DNA, 136 bp, Homo sapiens; identical to SEQ ID NO: 67545
  chr4:530422-530558
  hypo

SEQ ID NO: 147592 - DNA, 30 bp, Homo sapiens
  chr4:532960-532990
  hypo
gcttgcttctgctacgcactgatttgttct

SEQ ID NO: 147593 - DNA, 161 bp, Homo sapiens; identical to SEQ ID NO: 109591
  chr4:569274-569435
  hypo

SEQ ID NO: 147594 - DNA, 272 bp, Homo sapiens; identical to SEQ ID NO: 40142
  chr4:569460-569732
  hypo

SEQ ID NO: 147595 - DNA, 14 bp, Homo sapiens
  chr4:570063-570077
  hypo
gggaaccgatgcgg

SEQ ID NO: 147596 - DNA, 112 bp, Homo sapiens
  chr4:610966-611078
  hypo
cagttcgggtttccccgccctggaacaggctcctgaggtggtttccacggatgcgtctctgctccggcaaaccatggccccgtcattgacaggccagcgcccgtcagcccct

SEQ ID NO: 147597 - DNA, 254 bp, Homo sapiens; identical to SEQ ID NO: 67548
  chr4:616351-616605
  hypo

SEQ ID NO: 147598 - DNA, 243 bp, Homo sapiens; identical to SEQ ID NO: 67549
  chr4:617077-617320
  hypo

SEQ ID NO: 147599 - DNA, 154 bp, Homo sapiens
  chr4:618644-618798
  hypo
caaggcttgctgaggtgacagcggagaggagaggtcgggctttgttgccaggcagccccccaacattcaggtcctttttccactgaaagccatgtggcctcagagcggcgtcaccccgaagcttgtcccagccggggcctgacagcaggtaaag

SEQ ID NO: 147600 - DNA, 440 bp, Homo sapiens; identical to SEQ ID NO: 18361
  chr4:619492-619932
  hypo

SEQ ID NO: 147601 - DNA, 30 bp, Homo sapiens
  chr4:622180-622210
  hypo
cgtgggtggccagcacgcaacacccgggcc

SEQ ID NO: 147602 - DNA, 31 bp, Homo sapiens; identical to SEQ ID NO: 67551
  chr4:623248-623279
  hypo

SEQ ID NO: 147603 - DNA, 1221 bp, Homo sapiens; identical to SEQ ID NO: 67552
  chr4:628234-629455
  hypo

SEQ ID NO: 147604 - DNA, 30 bp, Homo sapiens
  chr4:629731-629761
  hypo
cacaactgcgagacgcgccgcggccaggta

SEQ ID NO: 147605 - DNA, 30 bp, Homo sapiens; identical to SEQ ID NO: 67553
  chr4:646838-646868
  hypo

SEQ ID NO: 147606 - DNA, 30 bp, Homo sapiens
  chr4:648480-648510
  hypo
cacatgcacggttacgtgtgtgggggtgtg

SEQ ID NO: 147607 - DNA, 518 bp, Homo sapiens
  chr4:650873-651391
  hypo
gtgtgggggcctccccgccaagcattcggctgtgtgcgtgtgctcatgtgtgtgcggtatgcatgcggccagggagaggacgacaaagggcccccccgggagcaggagcctctgcagagcacccgggagaccccacacagaagcactgcgacaccatggtggcagccccaggacctgcccgccgagccacggggcctggcacacaggcacatgggagggggcgcgccgggagcgctgagcgccagtgacactgccatcccctccagtccctgacacagttcctgggctggtcagtgatgaacaccgacacctacgacaagatgaacaagctggagaaccgcaaggacatcgcacaggacatggtcctttaccacgtgaagtgcgacagggacgagatccagctcatcctggtgcggcggggcaggacgtccaggggtcacccaggggtcacggctgtgtggcaggggcaggtcgtccaggggtcacccaggggtctcggctgtgtggtgggggcaggt

SEQ ID NO: 147608 - DNA, 30 bp, Homo sapiens
  chr4:651961-651991
  hypo
atggtgggggcaagtcgccaggggtcacgg

SEQ ID NO: 147609 - DNA, 237 bp, Homo sapiens; identical to SEQ ID NO: 18364
  chr4:655878-656115
  hypo

SEQ ID NO: 147610 - DNA, 30 bp, Homo sapiens; identical to SEQ ID NO: 67556
  chr4:656324-656354
  hypo

SEQ ID NO: 147611 - DNA, 509 bp, Homo sapiens; identical to SEQ ID NO: 109596
  chr4:657348-657857
  hypo

SEQ ID NO: 147612 - DNA, 30 bp, Homo sapiens; identical to SEQ ID NO: 67558
  chr4:658966-658996
  hypo

SEQ ID NO: 147613 - DNA, 30 bp, Homo sapiens; identical to SEQ ID NO: 18366
  chr4:660390-660420
  hypo

SEQ ID NO: 147614 - DNA, 30 bp, Homo sapiens; identical to SEQ ID NO: 18367
  chr4:660942-660972
  hypo

SEQ ID NO: 147615 - DNA, 30 bp, Homo sapiens
  chr4:666263-666293
  hypo
tccaaagagtgggtcgcagggtcactcact

SEQ ID NO: 147616 - DNA, 227 bp, Homo sapiens; identical to SEQ ID NO: 40146
  chr4:667539-667766
  hypo

SEQ ID NO: 147617 - DNA, 30 bp, Homo sapiens
  chr4:669709-669739
  hypo
ggaaaaactgtcctccgtgaaacctgtccc

SEQ ID NO: 147618 - DNA, 30 bp, Homo sapiens
  chr4:669945-669975
  hypo
aaccatcttggccctcggcaagcccccgct

SEQ ID NO: 147619 - DNA, 30 bp, Homo sapiens
  chr4:670247-670277
  hypo
agcttagtggtgggacgggtcccacctggc

SEQ ID NO: 147620 - DNA, 255 bp, Homo sapiens; identical to SEQ ID NO: 18368
  chr4:679511-679766
  hypo

SEQ ID NO: 147621 - DNA, 30 bp, Homo sapiens; identical to SEQ ID NO: 67563
  chr4:698465-698495
  hypo

SEQ ID NO: 147622 - DNA, 31 bp, Homo sapiens; identical to SEQ ID NO: 40147
  chr4:699369-699400
  hypo

SEQ ID NO: 147623 - DNA, 45 bp, Homo sapiens; identical to SEQ ID NO: 67565
  chr4:708089-708134
  hypo

SEQ ID NO: 147624 - DNA, 30 bp, Homo sapiens
  chr4:717025-717055
  hypo
tgaaggctcctagccgctgcagttgccggg

SEQ ID NO: 147625 - DNA, 441 bp, Homo sapiens; identical to SEQ ID NO: 67566
  chr4:717886-718327
  hypo

SEQ ID NO: 147626 - DNA, 31 bp, Homo sapiens; identical to SEQ ID NO: 18369
  chr4:718960-718991
  hypo

SEQ ID NO: 147627 - DNA, 188 bp, Homo sapiens; identical to SEQ ID NO: 67568
  chr4:722181-722369
  hypo

SEQ ID NO: 147628 - DNA, 28 bp, Homo sapiens
  chr4:722586-722614
  hypo
aattaaaaattcgttcggttggccgggt

SEQ ID NO: 147629 - DNA, 30 bp, Homo sapiens; identical to SEQ ID NO: 67570
  chr4:725080-725110
  hypo

SEQ ID NO: 147630 - DNA, 30 bp, Homo sapiens
  chr4:727529-727559
  hypo
agcgggtacctcatcgacgccaccacggtg

SEQ ID NO: 147631 - DNA, 30 bp, Homo sapiens; identical to SEQ ID NO: 67571
  chr4:736909-736939
  hypo

SEQ ID NO: 147632 - DNA, 30 bp, Homo sapiens
  chr4:737298-737328
  hypo
gggcatggaggtgccgggagacatcaaggg

SEQ ID NO: 147633 - DNA, 335 bp, Homo sapiens
  chr4:738132-738467
  hypo
cggctccggctgccccgtctctgtctcctgtgctccccacgcctgcaccccacaggcccacacgcccgttctgcatcctggggagacccctgcagacactttgcggacggctttcctttgacgcttactccgctccgggggtccagagtctcttaatggagtgaatttttgacggcatttggagtacagtgtagttttttaaatggcttgacagtttggatttcatggtgcgctatgttctgtttgtgctaaaaggtgaaaccaaagcagacgacagttcaaacaaagaggccgcggaggagaagccggaggaggacaacgactaccaccgcagc

SEQ ID NO: 147634 - DNA, 20 bp, Homo sapiens
  chr4:741511-741531
  hypo
cctccgggacactcctgtat

SEQ ID NO: 147635 - DNA, 178 bp, Homo sapiens
  chr4:741776-741954
  hypo
ttgtgccttttcctccgggcgcgtctctgtgctccgtgaatgttacgtgaaagaaagtaaagcctggcagtgtgttgaaaggaaagtgagagtgaacgtcgagggcctcttcgtgtgtcatttactgtattaccagatgaagacagaaaaactacacggtcacagagatgcagtaaaa

SEQ ID NO: 147636 - DNA, 276 bp, Homo sapiens
  chr4:744981-745257
  hypo
ccgcgtctataacttcgtgatgagttcctgatctccgtcttccaaaacttgggaagtcatccgagggtttgttccagattgttttgggtaattttaaaattttatttcacactaattttattctaggaatcgcttcttcatcttactgaagttttgatgcgacgttatagttatttaggcttaacgggaggttgcatgggttttgtggccgtttctggtgtcttcctggtgtgtttggatttgtgcttcgccacgtccgcacgtcacttctgagcc

SEQ ID NO: 147637 - DNA, 186 bp, Homo sapiens; identical to SEQ ID NO: 67575
  chr4:745650-745836
  hypo

SEQ ID NO: 147638 - DNA, 30 bp, Homo sapiens; identical to SEQ ID NO: 67576
  chr4:746252-746282
  hypo

SEQ ID NO: 147639 - DNA, 30 bp, Homo sapiens; identical to SEQ ID NO: 18371
  chr4:748931-748961
  hypo

SEQ ID NO: 147640 - DNA, 30 bp, Homo sapiens
  chr4:755128-755158
  hypo
ctgctcagcccaggcgaccgtcttgcatct

SEQ ID NO: 147641 - DNA, 688 bp, Homo sapiens
  chr4:756821-757509
  hypo
ttgagtgtcccacaggttggccggggatacggacagcacaccggggttggggagactcactgagcacgggctgcctggagatcatggagaaaccaagtcaggacacggggggaagggagagaaggaaatggggcaacgctttttgctaagtttctatcgttttgtttgcttttctgtgtagcgaaacagaaaagatggatggtagctggggacagagcaggccgaggaagtccttggattttcatgtggaggtgtagcgggaagctgccggacagtggggctgcagggggtggggaagaggttggccatttcccagcgcagggctggttcctccagggaagagtgtgaggtttgcgctgctgctgcgttaaccgtgcctctgagcccccaacccagccactcaggcaggtggggctgcttcaattcatgccttccccagggaggaatctgaagaactgtctacatgatcagggaaacgcaaggaaaactgcgtggcaccacgcgtaccccatagaagggccagaatcccaagcactgacaacacattcgggaaacgccgggagcgcaggttcattcctgtgggaagtggaacccgcaggccctgtggagaacagcttggcagctgctgacaacacgaaacacactctcggcaaaccacccagcagccacacctcgtcatttacccact

SEQ ID NO: 147642 - DNA, 217 bp, Homo sapiens; identical to SEQ ID NO: 18373
  chr4:757736-757953
  hypo

SEQ ID NO: 147643 - DNA, 479 bp, Homo sapiens
  chr4:759704-760183
  hypo
ctgcatgtggactgtgcctcacgggacgtgattcctcagcacccttcccgatgaagtaggtccttctcgcctccacccctgctaagcaggcactgtgcgttcttgtgtcttccagaaggcgccgctcctgctgcactacagacccaagatggacttgctgtgaatggtgccacacagcgcccacagactgggccctcgcacccttgggtgctcccggccgccgcgcttaagaacattgcctctgggtgtcatgtggaccagacttctgaatagagaatatttataacttttgtatgagagagaattcacactcaacaagacactaccagcaccacgtttacagaggatgaaaacacttcacagtctcccagagccgatcgtcctctcccccgccccaccccgtgcttcagccttgcagggagagtgatgctccaggcaacacggttctgagtcaccttctgacacgagctccctctgct

SEQ ID NO: 147644 - DNA, 211 bp, Homo sapiens; identical to SEQ ID NO: 18374
  chr4:765528-765739
  hypo

SEQ ID NO: 147645 - DNA, 35 bp, Homo sapiens; identical to SEQ ID NO: 67582
  chr4:793058-793093
  hypo

SEQ ID NO: 147646 - DNA, 140 bp, Homo sapiens; identical to SEQ ID NO: 67583
  chr4:793647-793787
  hypo

SEQ ID NO: 147647 - DNA, 459 bp, Homo sapiens; identical to SEQ ID NO: 67584
  chr4:812188-812647
  hypo

SEQ ID NO: 147648 - DNA, 30 bp, Homo sapiens; identical to SEQ ID NO: 67585
  chr4:812872-812902
  hypo

SEQ ID NO: 147649 - DNA, 98 bp, Homo sapiens
  chr4:815185-815283
  hypo
tcccacctgaagccccggcccgcctgccccacacattcccgaggacctgagcgtgtttaaacagggcgtgtgtcacatcaaggcggaggatgggagag

SEQ ID NO: 147650 - DNA, 298 bp, Homo sapiens; identical to SEQ ID NO: 40152
  chr4:819436-819734
  hypo

SEQ ID NO: 147651 - DNA, 31 bp, Homo sapiens; identical to SEQ ID NO: 3089
  chr4:824547-824578
  hypo

SEQ ID NO: 147652 - DNA, 30 bp, Homo sapiens; identical to SEQ ID NO: 67588
  chr4:828266-828296
  hypo

SEQ ID NO: 147653 - DNA, 388 bp, Homo sapiens
  chr4:829598-829986
  hypo
tggcctctgggctcagacacccggactgcgtcctcaggagtggagctccccgaggaaagagtgcctttgcttcccttgacgtgtcctgcactttgtgtcagccagcgcggcagcaagaacgagcacacggggacagaagctcatctgaacctgccggcccgtgtcggtgtccagcgcggaggcgctgtgtccgcagggcacctgcatcctcataagctggactgactgccgtggggcccggtgccccatgtccagtgcatcccagactagaacaaagacttgcacacggcgtccaccacagcacaagccacagcagccacgggggaggcagccacgggggaggccgcccagcgccatcggcagagcacagacacgcaaactgtggtcc

SEQ ID NO: 147654 - DNA, 220 bp, Homo sapiens; identical to SEQ ID NO: 67590
  chr4:841554-841774
  hypo

SEQ ID NO: 147655 - DNA, 727 bp, Homo sapiens
  chr4:843329-844056
  hypo
ggtgacccggggctcggagccccaccctggccacacctgctgtcgcccacggggtcctcacggtggggacccaggtcccacgacggctcccaacctgtggagctgtgtgcgcagccaccaccactgcggcctcagaagaggggccgggagccctggttctcaaactccgaccaggcgtcattcagctccatgaagatcatcttggcgtgctgctcgtacggctgccccgcagcctatgggtgacaggcggtgtaagcgcctcttataagcatgcgggggcgggcggggcaggaccccccccccgccccgcccctgaaggcctcaagcggccgcctggcagctctgctcaccttgtcggggtgcacagccagcaccgcgcggcgatagtgcttcttcacttgctccggagccaccaggtcggccatgcccacgggcgtccagcggctctccccgtcccacagcactgtgtgcagcgtggacagcagggcccggatgttccgctccttgccctcaatccagtccaggagctgcgggagacacggagcttgccgagccctgggcacctgcctgccctcctcctctgcaccgcggaaactgaggcacgacgctgaggaagtgcctggtcacgtggggtgggctcagcccggctcacagacactgtcccactgcacgccctgccctcaactatatagagcccactccggacgacacagggccaggtggtctt

SEQ ID NO: 147656 - DNA, 30 bp, Homo sapiens
  chr4:845659-845689
  hypo
gcgccctgggctggcggccgacttgtctgc

SEQ ID NO: 147657 - DNA, 31 bp, Homo sapiens; identical to SEQ ID NO: 67591
  chr4:852609-852640
  hypo

SEQ ID NO: 147658 - DNA, 30 bp, Homo sapiens
  chr4:853021-853051
  hypo
gccgacagctagcacgctccgagcacagcc

SEQ ID NO: 147659 - DNA, 122 bp, Homo sapiens
  chr4:854459-854581
  hypo
cacccaggccctggcgcacctcgcactgtgcacacggggagaagggcacccaggccctggcgcacctcgcactgtgcactcgaggggacgggcacccaggccctggcgcacctcgcactgtg

SEQ ID NO: 147660 - DNA, 30 bp, Homo sapiens; identical to SEQ ID NO: 67593
  chr4:858284-858314
  hypo

SEQ ID NO: 147661 - DNA, 30 bp, Homo sapiens; identical to SEQ ID NO: 18378
  chr4:858799-858829
  hypo

SEQ ID NO: 147662 - DNA, 129 bp, Homo sapiens
  chr4:859214-859343
  hypo
actgagcgagtggacgtaggggcaccagcaggcggagcagctcgcaggccaggctgagaacaagcatctgcgcattcccatccaaaagggtttgtcaggaccccactttctgccgccatccccacagcc

SEQ ID NO: 147663 - DNA, 379 bp, Homo sapiens
  chr4:860586-860965
  hypo
accctgacatgaccccgaggctgctcctgggggaggtgggggaagggcacgttcccttcctgcaagcaccttcgaaacacgcccatgcagtgagaatgactcagcctcatcactcatctactgtgaagccactcgccttcagaacagaaacacgtaccagcggcagggggccctcctcttggggtgctctgcacgctcaggggaggggccgggcttgccaggagcagcgggtcctcgctgagcagatcctccgggggcccctgggaggcggcctcagggggcccaaggaggcagctgagcaggtcggtgttgctggagggggccttgcaggcctgcgggggtacagctggccctgcgcccacctcggagtgcaggccca

SEQ ID NO: 147664 - DNA, 115 bp, Homo sapiens; identical to SEQ ID NO: 67596
  chr4:864980-865095
  hypo

SEQ ID NO: 147665 - DNA, 30 bp, Homo sapiens
  chr4:865837-865867
  hypo
agcagagtgggatccgccgagggagggcag

SEQ ID NO: 147666 - DNA, 178 bp, Homo sapiens; identical to SEQ ID NO: 67597
  chr4:866139-866317
  hypo

SEQ ID NO: 147667 - DNA, 30 bp, Homo sapiens; identical to SEQ ID NO: 67598
  chr4:866796-866826
  hypo

SEQ ID NO: 147668 - DNA, 30 bp, Homo sapiens; identical to SEQ ID NO: 67599
  chr4:870910-870940
  hypo

SEQ ID NO: 147669 - DNA, 248 bp, Homo sapiens; identical to SEQ ID NO: 67600
  chr4:872636-872884
  hypo

SEQ ID NO: 147670 - DNA, 150 bp, Homo sapiens
  chr4:873651-873801
  hypo
agtttcagtatctctcgacctggctccaaaggccactgactcagcctcagcgatgtcgaaggcgttctcatttcggggatttccatttgcttatttcctggcatttccacggctctgaagagtggcccactggaccgcgcacctgcctga

SEQ ID NO: 147671 - DNA, 30 bp, Homo sapiens
  chr4:875846-875876
  hypo
tctcgcgtgcgcctcgcactcatgcaggac

SEQ ID NO: 147672 - DNA, 30 bp, Homo sapiens
  chr4:877306-877336
  hypo
tgctgctgcggcctcgctgctcctgacgcc

SEQ ID NO: 147673 - DNA, 112 bp, Homo sapiens; identical to SEQ ID NO: 67601
  chr4:877547-877659
  hypo

SEQ ID NO: 147674 - DNA, 30 bp, Homo sapiens
  chr4:878712-878742
  hypo
cacgaccgaaccatcgcctgaaagtgacca

SEQ ID NO: 147675 - DNA, 39 bp, Homo sapiens; identical to SEQ ID NO: 67602
  chr4:881387-881426
  hypo

SEQ ID NO: 147676 - DNA, 30 bp, Homo sapiens; identical to SEQ ID NO: 67603
  chr4:882160-882190
  hypo

SEQ ID NO: 147677 - DNA, 136 bp, Homo sapiens; identical to SEQ ID NO: 18381
  chr4:882582-882718
  hypo

SEQ ID NO: 147678 - DNA, 30 bp, Homo sapiens; identical to SEQ ID NO: 67605
  chr4:887280-887310
  hypo

SEQ ID NO: 147679 - DNA, 124 bp, Homo sapiens; identical to SEQ ID NO: 67606
  chr4:887621-887745
  hypo

SEQ ID NO: 147680 - DNA, 30 bp, Homo sapiens; identical to SEQ ID NO: 67607
  chr4:890194-890224
  hypo

SEQ ID NO: 147681 - DNA, 30 bp, Homo sapiens; identical to SEQ ID NO: 67608
  chr4:890505-890535
  hypo

SEQ ID NO: 147682 - DNA, 114 bp, Homo sapiens; identical to SEQ ID NO: 67609
  chr4:891956-892070
  hypo

SEQ ID NO: 147683 - DNA, 30 bp, Homo sapiens
  chr4:894055-894085
  hypo
acgcacggggcaggcgagtggggccacgtg

SEQ ID NO: 147684 - DNA, 30 bp, Homo sapiens; identical to SEQ ID NO: 67610
  chr4:897572-897602
  hypo

SEQ ID NO: 147685 - DNA, 30 bp, Homo sapiens; identical to SEQ ID NO: 67611
  chr4:898516-898546
  hypo

SEQ ID NO: 147686 - DNA, 225 bp, Homo sapiens; identical to SEQ ID NO: 67612
  chr4:899760-899985
  hypo

SEQ ID NO: 147687 - DNA, 30 bp, Homo sapiens; identical to SEQ ID NO: 18384
  chr4:903017-903047
  hypo

SEQ ID NO: 147688 - DNA, 30 bp, Homo sapiens; identical to SEQ ID NO: 18385
  chr4:903299-903329
  hypo

SEQ ID NO: 147689 - DNA, 310 bp, Homo sapiens; identical to SEQ ID NO: 67615
  chr4:905661-905971
  hypo

SEQ ID NO: 147690 - DNA, 37 bp, Homo sapiens
  chr4:907578-907615
  hypo
aacataatggccccagcgtacacgccccccgcaaaca

SEQ ID NO: 147691 - DNA, 30 bp, Homo sapiens; identical to SEQ ID NO: 18387
  chr4:920592-920622
  hypo

SEQ ID NO: 147692 - DNA, 30 bp, Homo sapiens; identical to SEQ ID NO: 67617
  chr4:921622-921652
  hypo

SEQ ID NO: 147693 - DNA, 93 bp, Homo sapiens
  chr4:937312-937405
  hypo
tacaggcatgagccaccgcgcccagctaaattatttctctaagctgtgccaaactgagtaccagaggagatgagcaagcgcaggtctcatgcc

SEQ ID NO: 147694 - DNA, 90 bp, Homo sapiens
  chr4:937751-937841
  hypo
tggagggtgcgattccgtttataccacattctaaaaaaggcaaaattggctgggtgcagtggctcacgcatgcaatcccagcatttcggg

SEQ ID NO: 147695 - DNA, 30 bp, Homo sapiens; identical to SEQ ID NO: 67619
  chr4:942642-942672
  hypo

SEQ ID NO: 147696 - DNA, 31 bp, Homo sapiens; identical to SEQ ID NO: 67620
  chr4:942935-942966
  hypo

SEQ ID NO: 147697 - DNA, 30 bp, Homo sapiens; identical to SEQ ID NO: 18388
  chr4:943582-943612
  hypo

SEQ ID NO: 147698 - DNA, 30 bp, Homo sapiens; identical to SEQ ID NO: 67622
  chr4:944262-944292
  hypo

SEQ ID NO: 147699 - DNA, 30 bp, Homo sapiens; identical to SEQ ID NO: 67623
  chr4:947047-947077
  hypo

SEQ ID NO: 147700 - DNA, 42 bp, Homo sapiens; identical to SEQ ID NO: 67624
  chr4:949384-949426
  hypo

SEQ ID NO: 147701 - DNA, 2520 bp, Homo sapiens
  chr4:955056-957576
  hypo
gcgggagaggccagccgagcagggaccagggacgcccaccctggacctggccctggggcgggagaggccagccgggctcagcggggaccggggacgcccaccctggacctggccctggggcgggagaggccagctgggctcagcggggaccggggacgcccaccctgggctcgcccgcccactcggccggcggctcaccatgtgcacgacgcccgtcacgcccacaacctccagcagcccgtcgtccatgcgtggcttctcaaacctggtgtcgctgtcggagccccacaggtcggcccccgagccccagctgccgcataagagagcgggcacagaggtgtaggtgcaggcaggacgagggctgagcctgcccatggccccgccgggcagagcctctggggagccccgcccgcgagcacctggggatgttgatgaagatgaggccttcaatactgggcagctccacctcctgccgctccacctgcagccggatctgcttgtgcaggctccgagagtgactgatcttctgcagccccacccgcacgtacacacccttgttgtgcagcctgcaggacggggcaggtcacccatcaccaggggaagccctaccccgccttaggcagcctccgggttccggcccctctgcctgttcctgctgggggacctgagggaggtatgccgttgacaggtggtagcccctgcggctccggtacctgcttgtgaacttgccaggctcctcttcccgtgcctggtggaagtccaggctcagctccgcgtcgatgccaatgccacagtagttactcatctgcacgatctggggacagggcgttcatctcccaggacccggccgccctcaccaggccccctgagctccccaacagctctgccggcaggcagagacaagagcaaggaccaccctggcaccaagccgagcacccaggagagggcagcatgggcaggtcctggccaggctctgtcgccagctggctcagcacaatccccagcagtggctactttctgtgtctccctcaactgcccgctttgcagaggggatgatgcgggcgcgtacacccgagtgtggctgggaagaggacgcccgttgtgacgcgtgtagcggggtcatatgcaggagcctggaaggcaccccacgccgggctgccctgtaccttggggggctctgcgtctgccgtgtcgttctctgcactgccagcctcgtgggcatccagcaggatggtccagcggtccatgagcacggcgtcggcctcgtccacagacagcagtacggagaacgggtcctcgccgctgtagcccgccccccagcggaggactcgaccaaggtcattccctgggacacaagcagacacagagcatctgtccacacccacccgcccatcagctgggtgcagaccccaccacgaggacagccagcccaggcctcggcaaaagctgcacaggaaggggtagaccctgaggccccctcctcggctgcacggctgagcccacctgtgcccaggggcaggatggccacagaaggctccgggcaggccagtcggtaccgtgtctcctccagggcgccaagcacccagcccacagtgccatcgccaccacacaccagcacccggaagcagggcacctgggagaacaggtggagcctagcgggagacaggaagtgtcctctaccagctgcgggcgcagcccatcccccacccaggctgcctcttccaagtgcccgtcctggccgtgtggaggacttcaaggtcccagcacgggatccccgtggagctcctgccggccgagacagctgtggcagcctcctggggcccttcccgcccctgctgctgccctggaccaggggtcctgctggactcacccgggaagaggacctccgttggtcaggtcgaagacctgatgagggttcagtagcttccggaagctgcagagcaggtctcggcccttgaggcctccactcttggggttcacgaacacaaggaggggacagctgtctgggggcagcttcgcgtgctgacagacagggggctgggttaggatggggacccaaggtggggtgtccccactgctggggttgccaggcagtgcccagcccccaaccctgagcccacctggcttggaccagccccctccccaggaaggcgtggccagcaccctcacatctgaggcctcacacatgagctgcgtggtcaccccatctcgctgctggccagcagggcggcactgaggacagccggctggctgcctggcactcccagcacaaaggcctcagacctgcccactgagctgcgtgtgaacagaccacacccgcctgggccatgcagcgcgagtccaggctggaaatccacgtgggactctgcgtggcactctgtgccagcgagaccaaggcctgtcccctggggggcctctggtgcacacctttggaggatggcggctcccaggccaccgcccacctacacagcagccgagaaaagctcttaactcacagggtggcacgcggcgtccctcgac

SEQ ID NO: 147702 - DNA, 31 bp, Homo sapiens; identical to SEQ ID NO: 67627
  chr4:958712-958743
  hypo

SEQ ID NO: 147703 - DNA, 30 bp, Homo sapiens; identical to SEQ ID NO: 67628
  chr4:960294-960324
  hypo

SEQ ID NO: 147704 - DNA, 30 bp, Homo sapiens; identical to SEQ ID NO: 67629
  chr4:960820-960850
  hypo

SEQ ID NO: 147705 - DNA, 179 bp, Homo sapiens
  chr4:965202-965381
  hypo
gtggcaggggcttctcggccttcggcagattggctttaccaaggacatctgtgtctcactcccccgaaactacgcatacccctaattgtccctgctacgtgctgtgcaccgtgcctgagaccgagagccacccaaggcaggtgagggctctgggaggcaggagccgctggggagtggac

SEQ ID NO: 147706 - DNA, 310 bp, Homo sapiens; identical to SEQ ID NO: 40154
  chr4:966932-967242
  hypo

SEQ ID NO: 147707 - DNA, 30 bp, Homo sapiens; identical to SEQ ID NO: 67631
  chr4:968588-968618
  hypo

SEQ ID NO: 147708 - DNA, 334 bp, Homo sapiens; identical to SEQ ID NO: 67632
  chr4:968830-969164
  hypo

SEQ ID NO: 147709 - DNA, 30 bp, Homo sapiens; identical to SEQ ID NO: 67633
  chr4:976550-976580
  hypo

SEQ ID NO: 147710 - DNA, 33 bp, Homo sapiens; identical to SEQ ID NO: 18392
  chr4:982808-982841
  hypo

SEQ ID NO: 147711 - DNA, 30 bp, Homo sapiens; identical to SEQ ID NO: 67635
  chr4:984754-984784
  hypo

SEQ ID NO: 147712 - DNA, 30 bp, Homo sapiens; identical to SEQ ID NO: 67636
  chr4:985222-985252
  hypo

SEQ ID NO: 147713 - DNA, 30 bp, Homo sapiens; identical to SEQ ID NO: 67637
  chr4:989406-989436
  hypo

SEQ ID NO: 147714 - DNA, 39 bp, Homo sapiens; identical to SEQ ID NO: 18393
  chr4:995246-995285
  hypo

SEQ ID NO: 147715 - DNA, 74 bp, Homo sapiens; identical to SEQ ID NO: 3091
  chr4:996100-996174
  hypo

SEQ ID NO: 147716 - DNA, 43 bp, Homo sapiens; identical to SEQ ID NO: 109613
  chr4:996495-996538
  hypo

SEQ ID NO: 147717 - DNA, 30 bp, Homo sapiens; identical to SEQ ID NO: 109614
  chr4:1003777-1003807
  hypo

SEQ ID NO: 147718 - DNA, 30 bp, Homo sapiens; identical to SEQ ID NO: 109615
  chr4:1004020-1004050
  hypo

SEQ ID NO: 147719 - DNA, 397 bp, Homo sapiens; identical to SEQ ID NO: 109616
  chr4:1004392-1004789
  hypo

SEQ ID NO: 147720 - DNA, 251 bp, Homo sapiens; identical to SEQ ID NO: 18396
  chr4:1007047-1007298
  hypo

SEQ ID NO: 147721 - DNA, 30 bp, Homo sapiens; identical to SEQ ID NO: 18397
  chr4:1007642-1007672
  hypo

SEQ ID NO: 147722 - DNA, 368 bp, Homo sapiens; identical to SEQ ID NO: 67643
  chr4:1008573-1008941
  hypo

SEQ ID NO: 147723 - DNA, 30 bp, Homo sapiens; identical to SEQ ID NO: 18399
  chr4:1009793-1009823
  hypo

SEQ ID NO: 147724 - DNA, 134 bp, Homo sapiens
  chr4:1012454-1012588
  hypo
cagtgcgaggcagccggtcttcccaccaggtgcctgtgccctcaggtcctgactcagtttccccataggctgcgtgggttggacgcccgtccaggtggcgtggtgccctggccgctgtcctggtgtgatcattc

SEQ ID NO: 147725 - DNA, 465 bp, Homo sapiens; identical to SEQ ID NO: 67646
  chr4:1016331-1016796
  hypo

SEQ ID NO: 147726 - DNA, 30 bp, Homo sapiens
  chr4:1017744-1017774
  hypo
acgcgcccagaggccgctgagcccaggaag

SEQ ID NO: 147727 - DNA, 342 bp, Homo sapiens
  chr4:1022504-1022846
  hypo
cgcgtctgtgccctgcgccggctccctcgtcacatctgcacgtccacactcccaagaacaaaattgcgttcccctcccctccacgtgcaggaggcctgggagcacagaggccccgtgtgcttcgaggacttgaggcaggaggcgggcagaggcgcccagggcgtgagtgtggccagcaggacagagggcaggactgcgcttctgacagtggtctgctccggccaagcacctgaaagatggggagcccttcaccccaggctcactggccaggaggctcgaagggccgggtggggcttgtgggaggtgggggtgccgctctgtgggccccgtctcacctgtcct

SEQ ID NO: 147728 - DNA, 147 bp, Homo sapiens
  chr4:1025835-1025982
  hypo
ggagccaggggctgccgcagggcagccctggatgtgccctcctgggcacgcaggccgacatggattctgtggctgaggccgtcagcgtgtgaaagccacagacacaggcgggcccggagtgcctgtccaccccgaggcgcctgccct

SEQ ID NO: 147729 - DNA, 31 bp, Homo sapiens; identical to SEQ ID NO: 18401
  chr4:1032331-1032362
  hypo

SEQ ID NO: 147730 - DNA, 378 bp, Homo sapiens; identical to SEQ ID NO: 109620
  chr4:1036244-1036622
  hypo

SEQ ID NO: 147731 - DNA, 30 bp, Homo sapiens
  chr4:1036897-1036927
  hypo
acacacacccaccaccgcacacctacccac

SEQ ID NO: 147732 - DNA, 182 bp, Homo sapiens; identical to SEQ ID NO: 67649
  chr4:1044471-1044653
  hypo

SEQ ID NO: 147733 - DNA, 30 bp, Homo sapiens; identical to SEQ ID NO: 67650
  chr4:1050981-1051011
  hypo

SEQ ID NO: 147734 - DNA, 98 bp, Homo sapiens; identical to SEQ ID NO: 67651
  chr4:1077031-1077129
  hypo

SEQ ID NO: 147735 - DNA, 284 bp, Homo sapiens
  chr4:1093368-1093652
  hypo
cttttaaaagtcaagattgctcgcacaatccccaggaaaatcacaaacgaatgttttcttttcgtatttaatttttaaaaggggggtgtgtgcgccacaatggtacagtaacgaggatacatagttaaatctcacagcgtgactgaaggcctttgctgcgtctgacgtcatcatggcagagggcgtaaggaatggaggaaatcaaccctggtgcagagcaatcgagtccacaaggtccgacggcgcaagcggacacgggtacccctgtgcgggatccacggggc

SEQ ID NO: 147736 - DNA, 208 bp, Homo sapiens; identical to SEQ ID NO: 67653
  chr4:1189020-1189228
  hypo

SEQ ID NO: 147737 - DNA, 30 bp, Homo sapiens
  chr4:1189696-1189726
  hypo
caggcgtgagccccacgcctggccacgcgc

SEQ ID NO: 147738 - DNA, 43 bp, Homo sapiens; identical to SEQ ID NO: 67654
  chr4:1201009-1201052
  hypo

SEQ ID NO: 147739 - DNA, 241 bp, Homo sapiens; identical to SEQ ID NO: 67655
  chr4:1201277-1201518
  hypo

SEQ ID NO: 147740 - DNA, 334 bp, Homo sapiens
  chr4:1202637-1202971
  hypo
cgcacacgcacacgccgcccgcccaccaggcagacacccacacacctgtgcacgcacgcgcacgccaagccagcgggccctgcccctgccccggagccctcagtgtcagaaccaggctgctgtggctgtttcctctttaattcgcctgagttttatgagcccaaattcatagacctttgttgctgcatataaacttgaggataaacttgttgaatttgttcaacgtaagcagctgaaattctgcgtggggtggtgatgaacggctctagcactcggtaaaaggtatttaaagcgcatgtagtttacaacactaacagcccgccgcccgcgagca

SEQ ID NO: 147741 - DNA, 521 bp, Homo sapiens; identical to SEQ ID NO: 18404
  chr4:1204210-1204731
  hypo

SEQ ID NO: 147742 - DNA, 64 bp, Homo sapiens
  chr4:1204980-1205044
  hypo
tcccactggggcactgcgggcaggccgcctccaagccaggaccctacagcgtcccacagaccca

SEQ ID NO: 147743 - DNA, 143 bp, Homo sapiens
  chr4:1205830-1205973
  hypo
ggacacagggcagagcgcccacaggacggacgacgacaagcgacacgaggcccagcgctgccccctcccgcctcctgacagcccggaccagtctctgcagtgccagggccaccacacagatgcctcctccacacactctggtc

SEQ ID NO: 147744 - DNA, 283 bp, Homo sapiens
  chr4:1206025-1206308
  hypo
ggctacaactggtcactggcgtggtctctatccgcctcgggcttgacggtttggccaggagaaggggcgtggggcgggtgggccacagggggcaggccgtgggacagggacatggcgctggggacgataccttccacagcagctgggatgccagtgggggccacgcccaccacgcccggagggtacctgctgggagagggtccatccgtgaggcccacctgtaggcggcctggccaggccccacctgccctcctagcatcggcagcaccgagggggcctctcc

SEQ ID NO: 147745 - DNA, 30 bp, Homo sapiens
  chr4:1206719-1206749
  hypo
gctcagggtgcacgacggcggggtccatgc

SEQ ID NO: 147746 - DNA, 397 bp, Homo sapiens; identical to SEQ ID NO: 67659
  chr4:1208722-1209119
  hypo

SEQ ID NO: 147747 - DNA, 30 bp, Homo sapiens
  chr4:1209829-1209859
  hypo
gcagtgcagggtcacgcagtcgctgtggaa

SEQ ID NO: 147748 - DNA, 136 bp, Homo sapiens; identical to SEQ ID NO: 18408
  chr4:1212169-1212305
  hypo

SEQ ID NO: 147749 - DNA, 727 bp, Homo sapiens; identical to SEQ ID NO: 18409
  chr4:1214806-1215533
  hypo

SEQ ID NO: 147750 - DNA, 416 bp, Homo sapiens; identical to SEQ ID NO: 67662
  chr4:1215812-1216228
  hypo

SEQ ID NO: 147751 - DNA, 201 bp, Homo sapiens
  chr4:1217206-1217407
  hypo
aacctaggtgtggccgcctcaccgagaccacccgaaacgtccgattccccaaacgctggcgggacaaggacagcggtcagcaggagtgggctgcctggatgtttgggaagcggggggccggccggtcaaggggagtccctggcatggcaaggcccttgcatccccatggggcctcctgaggaacccgcgatctggggagac

SEQ ID NO: 147752 - DNA, 30 bp, Homo sapiens; identical to SEQ ID NO: 67664
  chr4:1218371-1218401
  hypo

SEQ ID NO: 147753 - DNA, 176 bp, Homo sapiens
  chr4:1222480-1222656
  hypo
cggggtcccgcctggcgaggacacaggagggggggtgcggccacacccaggaaggacactgagcaggtgcagctgggtggggtggccagggaacctgagacctgcaggcccggggatgcaggtagaaagtggtaagtccccgcggcacacaagcacgtcggcggaggcaggcagac

SEQ ID NO: 147754 - DNA, 366 bp, Homo sapiens
  chr4:1222882-1223248
  hypo
gccagtacatggcatcgctgtggtcacggccaaccccaccctgccaagggctcccagttacccccagcccagggagggcaggggcagtgtggggtgcagaggcacacaggtggaggaagtgccctaggccgaagaaccaggtgcagcactgggcacagggtggggatgtgtgtgcaccacctgcgcatccacccacacccaaacacatccacccgcacacgtccatcccacactcccgtgcatgacaacgcccacccacgggtgcagagatgctctgtgcgaacagccgtggctgaggacaccaggacatgcaggcctcgtccacatgggcatgtccgagtccccggagacaccagtgagcctccc

SEQ ID NO: 147755 - DNA, 30 bp, Homo sapiens; identical to SEQ ID NO: 18413
  chr4:1224231-1224261
  hypo

SEQ ID NO: 147756 - DNA, 215 bp, Homo sapiens
  chr4:1224484-1224699
  hypo
tctgaaccgcggcacgtcacctcccgcacattcggaggagacagcgatcagattcacgtgaatatgacgaatattcatccgcgcagccttaaggttgcttcctgcatcggctcttccgtgatgaaaatctatctcatctaggtaagctcggagaagccgaagcgtgcgccggccaagggccctcctttgggctccgggcgcgcccacccagctga

SEQ ID NO: 147757 - DNA, 494 bp, Homo sapiens
  chr4:1225294-1225788
  hypo
gaaacagaccccaggacgctcctggtggcagctggctcttgggggtcaggaaggggcccgccaagcccacctcctgccatgcagttctgccacctgcttctgtgctcaggactcgacgtcgcacttacctttccagacctcgtgcacaggggtggcttactctgtgaaactgctgctcacatcaggtcaccatcagggcagatgtttctctacgacacgcagccacatgcaggcccagggtggggctgggctgaagaccgcaggtttcagatttccagagaaactgccaaagcaccatcgagaccggcacggccgtttctatcccacatgaagggccaggcccaggctccctcagcacggctggtgcagggctcagcgcaggccaggccaggggttaccggcggtgcctgctgcacctgtgagaacccaggaggcgcaccccggttctcatacaccgctctgtctgtaccaaacgccaccgccctcatccattt

SEQ ID NO: 147758 - DNA, 553 bp, Homo sapiens
  chr4:1228595-1229148
  hypo
ctcaggtgtgcaccacgggcagttcacccacagccccttgcatgcgtgtggacatgcccacgtgacgtgccaacgtgcccatgtgccgattccagacaccggcctgccggcggcccccccacctacaccccgggccactgtttccgtcacgctaatcctatcacctggggatgaagagatcatacagtgtgcaccccttgaaaccagcttcttcactcgccatcatgctgccgagatcacccagggtgtggcagggacccagcgttcatgcctgttgctgaggaggacaccgagggaggtggccagcatttgcctggccactcacccactgaaggacagccggtggggggcgtccttctggtttgggctatggtgagttaagctgctagggagcatgacgtgcaggtctgtgtgtggacgcgcattccgagtctccgggataaaggagtgtggccactgggctgcattacaagcacgcatctacccgtgtgagaaaccatgaagaatcttccagagcgaacgccccagcagacgctcccggcagaccacgcgc

SEQ ID NO: 147759 - DNA, 30 bp, Homo sapiens
  chr4:1229460-1229490
  hypo
ctggggtgatcggctcgtgggcagcacggg

SEQ ID NO: 147760 - DNA, 78 bp, Homo sapiens
  chr4:1232724-1232802
  hypo
tgcctgggctaccgcgtggctgcccggaatccctgatggggtcaccagtgtttcacgtaggacgcccccaaccctctg

SEQ ID NO: 147761 - DNA, 31 bp, Homo sapiens
  chr4:1233071-1233102
  hypo
gccactgtcagccccacggcagctgggcaga

SEQ ID NO: 147762 - DNA, 30 bp, Homo sapiens; identical to SEQ ID NO: 67671
  chr4:1233424-1233454
  hypo

SEQ ID NO: 147763 - DNA, 30 bp, Homo sapiens
  chr4:1234052-1234082
  hypo
accgggtccctcgtcggaaccgcctggggg

SEQ ID NO: 147764 - DNA, 167 bp, Homo sapiens
  chr4:1238878-1239045
  hypo
aaacagctcctccgacgacagcaccccagacagacactgcccaagtcatccacgagccgatacggcaccttggacggcagcatccctgtgagccagggagccaccgcactccacggggcctgcagggccgcatcacagctcagaggacacagcgcaggggctgtgat

SEQ ID NO: 147765 - DNA, 141 bp, Homo sapiens; identical to SEQ ID NO: 3096
  chr4:1243420-1243561
  hypo

SEQ ID NO: 147766 - DNA, 30 bp, Homo sapiens; identical to SEQ ID NO: 67673
  chr4:1244489-1244519
  hypo

SEQ ID NO: 147767 - DNA, 30 bp, Homo sapiens; identical to SEQ ID NO: 18417
  chr4:1245191-1245221
  hypo

SEQ ID NO: 147768 - DNA, 30 bp, Homo sapiens; identical to SEQ ID NO: 67675
  chr4:1245550-1245580
  hypo

SEQ ID NO: 147769 - DNA, 335 bp, Homo sapiens
  chr4:1254350-1254685
  hypo
acagcacagactgcccgccctacatgcctcttacccaactacgtgtccaactctgctgaaacccgagctaacacagcacaggctgcccgccgctgccctacacgcctctcacccagctagactcgcatccaactctgctgaaccaccagctaacacagcacaggctgcccgccgctgccctacacgcctctcacccagctagactcactgtccaactctgctgaaccaccagctaacacagcacagactgctcgccgctgccctacgcgcttctcacccggctagactcgtgtcaaactccaagcagactggtgagacagcgctgctacaataca

SEQ ID NO: 147770 - DNA, 141 bp, Homo sapiens
  chr4:1282404-1282545
  hypo
ggagagtggcagacacgatgcgaaccgtgaaaggacgcaaagagtacagagtgcatgcttccatctctataggaaggtcaggaacgctgttacggggagcagggttagaatgatggggatatagcccgggaaggggcagag

SEQ ID NO: 147771 - DNA, 445 bp, Homo sapiens; identical to SEQ ID NO: 67676
  chr4:1290581-1291026
  hypo

SEQ ID NO: 147772 - DNA, 585 bp, Homo sapiens; identical to SEQ ID NO: 67677
  chr4:1299050-1299635
  hypo

SEQ ID NO: 147773 - DNA, 71 bp, Homo sapiens
  chr4:1304007-1304078
  hypo
gtggtgtcagggcctcgggggggccttccccagtgggtctcgttgagctcgcttgcactggtcaggtattt

SEQ ID NO: 147774 - DNA, 30 bp, Homo sapiens
  chr4:1304554-1304584
  hypo
tggcagccgggggaacgggctcagggccgg

SEQ ID NO: 147775 - DNA, 136 bp, Homo sapiens
  chr4:1305765-1305901
  hypo
ggtgccctacgagacgctgaacaaacgctttcgcgccgctcagaagaacattgaccgggagaccagccacgtcaccatggtggtggccgagctggagaagacgttgagcggctgccccgccgtggactccgtggtc

SEQ ID NO: 147776 - DNA, 370 bp, Homo sapiens
  chr4:1309325-1309695
  hypo
cacctgctgcgttgcggctactacaacacggctgtcaagctggcgcgccagagcggcatcgaggtgggtgcccgccagacgcaggcacagcgccccagctggccccaggcctatggccagccgccctgtggcatgtcccccggcatgcctgtgtccctacatgcttgtgttcccctccccccacccccgtatgcttgtgttcccctccccccacccccgtgtgcgtgtgtcccccctccagtgtgtgtgtgtgtccccctccccgtgtgcgtgtccccctccccccatgtgcatgtccccacccctgtgtgcgtgtgtccccttcccgtgtgtgtgcccccccccccccaatgtgcgtgtttctccccca

SEQ ID NO: 147777 - DNA, 111 bp, Homo sapiens; identical to SEQ ID NO: 67681
  chr4:1309944-1310055
  hypo

SEQ ID NO: 147778 - DNA, 30 bp, Homo sapiens; identical to SEQ ID NO: 18423
  chr4:1310540-1310570
  hypo

SEQ ID NO: 147779 - DNA, 31 bp, Homo sapiens; identical to SEQ ID NO: 3097
  chr4:1310814-1310845
  hypo

SEQ ID NO: 147780 - DNA, 30 bp, Homo sapiens; identical to SEQ ID NO: 67684
  chr4:1316258-1316288
  hypo

SEQ ID NO: 147781 - DNA, 685 bp, Homo sapiens; identical to SEQ ID NO: 67685
  chr4:1317014-1317699
  hypo

SEQ ID NO: 147782 - DNA, 30 bp, Homo sapiens; identical to SEQ ID NO: 67686
  chr4:1318830-1318860
  hypo

SEQ ID NO: 147783 - DNA, 30 bp, Homo sapiens; identical to SEQ ID NO: 67687
  chr4:1319077-1319107
  hypo

SEQ ID NO: 147784 - DNA, 30 bp, Homo sapiens
  chr4:1320659-1320689
  hypo
aacctcggtgcaggcgctccccgccctacc

SEQ ID NO: 147785 - DNA, 92 bp, Homo sapiens; identical to SEQ ID NO: 67688
  chr4:1322318-1322410
  hypo

SEQ ID NO: 147786 - DNA, 224 bp, Homo sapiens
  chr4:1323176-1323400
  hypo
tcataatgtctgagccgagctcagagctgtgccctctgcggcctcgtctgttgcaggggagcaggcaggtcccaggaagtgcgtgtccttcctcccgcaagcagacacgtgctgcctcgaagcctcagcagccagccgggcaggcatggcaaacaacaccccagtgtctcgggggcaggcgcagtgtgagctacatcctctgctggggccgtcttgggagtggt

SEQ ID NO: 147787 - DNA, 97 bp, Homo sapiens; identical to SEQ ID NO: 18429
  chr4:1323653-1323750
  hypo

SEQ ID NO: 147788 - DNA, 158 bp, Homo sapiens
  chr4:1324017-1324175
  hypo
tgagcagctccgtgccgtctgtcgcacacccacacctcagcctggccaggcacagtttaggaattttgtcttctgggtgtttctctctctctctctttccgtgtgtgtgtgtgtgtgttttgaggttgagttttgctctgttgcctggcacaatctca

SEQ ID NO: 147789 - DNA, 57 bp, Homo sapiens
  chr4:1324513-1324570
  hypo
ccgtgctgttctccccggacctgctctgagggccccacatctcggctgcagttctct

SEQ ID NO: 147790 - DNA, 257 bp, Homo sapiens
  chr4:1324846-1325103
  hypo
gccgtgttctgtgcacgtcttggcgtgtgacgaagggtgacttgtctccagagatggaatgagggggttgggtggggctcctcctggactcagacccacgcccacccacacgctccaaggagggggatgcatgggcactggaatctcggatggccgtccccagcccctgcacacgcaccctgcggggtcagccgtgtggactcacccccgactcccagtccctgtatgcaccctgcggggtcggccgtgtggattca

SEQ ID NO: 147791 - DNA, 151 bp, Homo sapiens
  chr4:1326089-1326240
  hypo
cagcctctggtgagccgcacctcccgccatcccagccccacccagcaggtcggcttggagtgaggcgattactttgtacctagactctgacataaaagctgttagctcagatttttcaacttaaaaatgcaggccgggtgcagcggctcat

SEQ ID NO: 147792 - DNA, 211 bp, Homo sapiens
  chr4:1326479-1326690
  hypo
aaaccctgtctctaaaagttaaaattaaaacgcaaacttaaatgtgccaaaatgttgttttttagacatgcaagaaagcacttcagccaagcagaagggagccagctggacgaggtgcgccaggccatgggcatgctggccttcccgcccgacacgcacatctccccgtacaaggtagggcgtgcgtccctggggtcggtgtcatgctggg

SEQ ID NO: 147793 - DNA, 291 bp, Homo sapiens; identical to SEQ ID NO: 67693
  chr4:1330874-1331165
  hypo

SEQ ID NO: 147794 - DNA, 2050 bp, Homo sapiens; identical to SEQ ID NO: 109627
  chr4:1331674-1333724
  hypo

SEQ ID NO: 147795 - DNA, 221 bp, Homo sapiens
  chr4:1333933-1334154
  hypo
tgagccgaggctgccgtgcgtttctaacaccgaggttgtgttctgctcctccccggggcccgggcagcatggcgggcatatgcgtagcttctggcaccacggccaccgggagttgagaagccggctggaggccactcctgcccggaccgcagtcctcctctcgggcgctgccctgaggcgtgatggccccagcgtcttgaggccccggcttgcagctgggt

SEQ ID NO: 147796 - DNA, 69 bp, Homo sapiens
  chr4:1334470-1334539
  hypo
caggtcccctcggccgaagcagaccctgtggccccactgccacgcagccgccccggcctccaccgtcct

SEQ ID NO: 147797 - DNA, 294 bp, Homo sapiens
  chr4:1336758-1337052
  hypo
gttgcatttccacgcacgttgtaaaatcaactcatcagtgtctgctgaacactgtaaaaagtgtgctgggattgtcactggaactgcagtgaacctatcatccctatttggggacggtattagtttgctcggctgccgtaacagaagaccacggactagcgggtttaaacaatggacatttatttcttcacggttctagaggagatgctggcagggttggctcccggtgaggcctctcttcccggcttgcagacggcccccttctcactgtgtacctctcgtggtggacttcct

SEQ ID NO: 147798 - DNA, 321 bp, Homo sapiens; identical to SEQ ID NO: 67698
  chr4:1338565-1338886
  hypo

SEQ ID NO: 147799 - DNA, 78 bp, Homo sapiens; identical to SEQ ID NO: 18437
  chr4:1339093-1339171
  hypo

SEQ ID NO: 147800 - DNA, 34 bp, Homo sapiens; identical to SEQ ID NO: 18438
  chr4:1348026-1348060
  hypo

SEQ ID NO: 147801 - DNA, 30 bp, Homo sapiens; identical to SEQ ID NO: 67701
  chr4:1348563-1348593
  hypo

SEQ ID NO: 147802 - DNA, 30 bp, Homo sapiens
  chr4:1352437-1352467
  hypo
gagtggcgtgtgtgcggcaggtggggctgg

SEQ ID NO: 147803 - DNA, 30 bp, Homo sapiens; identical to SEQ ID NO: 67702
  chr4:1352772-1352802
  hypo

SEQ ID NO: 147804 - DNA, 30 bp, Homo sapiens
  chr4:1353904-1353934
  hypo
cccctccatcacgccgaaggccaagccgct

SEQ ID NO: 147805 - DNA, 249 bp, Homo sapiens; identical to SEQ ID NO: 67703
  chr4:1354333-1354582
  hypo

SEQ ID NO: 147806 - DNA, 133 bp, Homo sapiens; identical to SEQ ID NO: 67704
  chr4:1355306-1355439
  hypo

SEQ ID NO: 147807 - DNA, 30 bp, Homo sapiens
  chr4:1355731-1355761
  hypo
ccaagttaattagatcgtacaaaatttatt

SEQ ID NO: 147808 - DNA, 30 bp, Homo sapiens
  chr4:1362237-1362267
  hypo
gaggtgaggctccccgggcctgtggccaaa

SEQ ID NO: 147809 - DNA, 30 bp, Homo sapiens; identical to SEQ ID NO: 18439
  chr4:1368951-1368981
  hypo

SEQ ID NO: 147810 - DNA, 30 bp, Homo sapiens; identical to SEQ ID NO: 18440
  chr4:1374643-1374673
  hypo

SEQ ID NO: 147811 - DNA, 30 bp, Homo sapiens; identical to SEQ ID NO: 18441
  chr4:1376361-1376391
  hypo

SEQ ID NO: 147812 - DNA, 30 bp, Homo sapiens
  chr4:1379953-1379983
  hypo
gcagaagaggccctcgggcctggagatgtg

SEQ ID NO: 147813 - DNA, 425 bp, Homo sapiens; identical to SEQ ID NO: 109634
  chr4:1399207-1399632
  hypo

SEQ ID NO: 147814 - DNA, 349 bp, Homo sapiens; identical to SEQ ID NO: 109635
  chr4:1399665-1400014
  hypo

SEQ ID NO: 147815 - DNA, 227 bp, Homo sapiens; identical to SEQ ID NO: 109636
  chr4:1400112-1400339
  hypo

SEQ ID NO: 147816 - DNA, 18 bp, Homo sapiens
  chr4:1404047-1404065
  hypo
cgggggcggggggtgcgg

SEQ ID NO: 147817 - DNA, 609 bp, Homo sapiens; identical to SEQ ID NO: 109642
  chr4:1404120-1404729
  hypo

SEQ ID NO: 147818 - DNA, 472 bp, Homo sapiens; identical to SEQ ID NO: 109643
  chr4:1407531-1408003
  hypo

SEQ ID NO: 147819 - DNA, 269 bp, Homo sapiens
  chr4:1411587-1411856
  hypo
ttgcttgtggcctgccgatgcggccacacgcgtccattttgagaggaggcctgtggtttgggagcgcggttcaatttcaagctcagctcctgtccccaccccaccccaggtcccactcgttcctttgtgtaaacagtaggttcaaaataaacagatggcacagtggccgcagagaccaagctgcagaacttggtgcctcccaccctgttcttccaggcgcaggctgcccgcacgcctcgcggcacttactccctcggacatgtttcttc

SEQ ID NO: 147820 - DNA, 284 bp, Homo sapiens
  chr4:1491942-1492226
  hypo
gagctggagctgttccggggccctggacctgccgggctggggacagcctctgtgggtgccgggggtgctttggcggctgagcgggtctcttggtgcgacgccgcctcccgcctcccggagccccggcccccaccccggcacacacacaactatttaattttgctctggcaaggaataatagagtcctgtgtatctattacagatgcggggagattgggccgccacaggctgcacagcacattcagaggcctcacaaagccggctgcaatcgactcggcctgcca

SEQ ID NO: 147821 - DNA, 31 bp, Homo sapiens
  chr4:1505043-1505074
  hypo
gaggggacaccctgagcgccccacctgcctc

SEQ ID NO: 147822 - DNA, 30 bp, Homo sapiens; identical to SEQ ID NO: 18442
  chr4:1505443-1505473
  hypo

SEQ ID NO: 147823 - DNA, 30 bp, Homo sapiens
  chr4:1512234-1512264
  hypo
ctttactccccaccgcgatgcacgcacact

SEQ ID NO: 147824 - DNA, 30 bp, Homo sapiens
  chr4:1532279-1532309
  hypo
agcttccgtgttgttcgttgctgcttggtg

SEQ ID NO: 147825 - DNA, 30 bp, Homo sapiens; identical to SEQ ID NO: 67713
  chr4:1534918-1534948
  hypo

SEQ ID NO: 147826 - DNA, 121 bp, Homo sapiens; identical to SEQ ID NO: 67714
  chr4:1537042-1537163
  hypo

SEQ ID NO: 147827 - DNA, 95 bp, Homo sapiens
  chr4:1537282-1537377
  hypo
gtgtgtgctcagagaagtcacctggagccgaggagatcccaggaggctgaggctgccccacaggcacggtaggctttgccgtgggtgttcagctt

SEQ ID NO: 147828 - DNA, 119 bp, Homo sapiens
  chr4:1538148-1538267
  hypo
ggggtgaggcagccccacatgggtgctgggctgcagggacccaggtcttgcctttgcagatgggagacgcggccagcacacaggcaggtgctatggggtggcagcgggcggggggggcg

SEQ ID NO: 147829 - DNA, 30 bp, Homo sapiens
  chr4:1538877-1538907
  hypo
cccatggcgacgcctcgcacccacgctcac

SEQ ID NO: 147830 - DNA, 301 bp, Homo sapiens; identical to SEQ ID NO: 67715
  chr4:1541581-1541882
  hypo

SEQ ID NO: 147831 - DNA, 175 bp, Homo sapiens
  chr4:1556435-1556610
  hypo
ggcccccaccagcctcgacctgcccgtcccgtcatccatttatttatgccccgcttgccgatgcctgcggctgaataacaactctgtgggtcccagcatagggtctgcggcatggagcctgcctggcatggcccaggcagccgccatcctcaccagccccggcccagccttgctc

SEQ ID NO: 147832 - DNA, 514 bp, Homo sapiens
  chr4:1556817-1557331
  hypo
cacagagtcaacaagcgtggaccgcctgcgggctccgagctgagggagaagcacacgccgcccctgccctgtgagctggcgttccaggacagaatcggatatcaaacgagcacacggataccaagtaaaggccccaccgtcacacagcagccgccgctggaaactgagtttggtgggggaggggcctctctgcccagggactgagaccctgggatggtgacaaaggccagcaccgggtcccacacggagatgacgccatttaaccctccccaagacgccagggaagaggcgtccttgttcgtccattttacagaagagtacactgaggcctccagacgctggtggggacctcccaagccaggctccccatgtctctttctgggcctccgaccaccgttgatcagagaagcaaatctgttgggagaaatctcggagccacagagccctggcagggtgctcctggtggggaccagtccgggctggcccgacacttcctgcacgccggcctccctgt

SEQ ID NO: 147833 - DNA, 576 bp, Homo sapiens
  chr4:1563630-1564206
  hypo
acggcctgggagtgtcgattctgcgccactaactcattgatcgccttgcccgggttaattaattaattaggggcagccatggagcacagtgggctggggccaaggagggaccccagcgccgggagctttattagtacataaaatgggtgtttaaaacacacacggccacgagcgtgcagttgaggcttttcattaaacaaacctataacattacgtgcctcattatgtatttcgagacttcccctgccttccgcgctccctctccacctgcctccccgcgcactccaagtgcctatttgaaatcaatttctctaataatggacttaatgagctcatcaattagagctgccataaccgagtgtcgtgggctctgcggttatcagttaaactctggaactaatttccatgcttcatctatcacggggcgcccgcgacgtggggctgctgctctgggacgatagggagaccccaggcccttcccgcaggtctcggggccatccctggaagaggacaatgaggacagagtggcccacctggccgagagcggccgaggcgcgaggccggtgtcattagtgg

SEQ ID NO: 147834 - DNA, 828 bp, Homo sapiens
  chr4:1577790-1578618
  hypo
tgggtttgatcggcccgtgcactggtgagagcatgctaatattggctccaataaagagcaaatcagggccctagtcgacgcgtcttatcacacagtcagaactgatggctgcagaagtcataaagatcccatttaatctcgcgcctatctatcacgcggctgccttcatcctctttgtgccggggtaatatgtgctcattacaaaagcaaaacagatctggcatgaataaacgcaggatgaagtgctcactcggaaagtgacagcatgatcagtggcggcagtaatcgcagagaatcgcgggctaaattattccataaccgtgatttgaggggacagcccagagcaccccacagctgcctgcagcacagcgacgtgtcctgataaaacatccttcccaatttacggggccgcgcttgactaatctgcctccgcgcgcacactgtctaatcatgccatcagcaccgcgagaaggggctcaattgggactccaatgaaaggagattggaaaactaccctcaattgaaattacatttgtaaatgaggcagagttttctgttcagagtgtgaacgttacggtaaatctgctccagaaagtcgaagaggcggcagcggtgggcaggccggggacgccgcaggggcgactgggactgtgccccggctggggccagggtccacattctggagaggtgcccggcaccatgctggcccctggggacagccccaggagaggagaggggctgtggcggaagcccggagagttgggcctagtttgtcagacatcagacttcacttcccactctgtaaaatggggcgcagggcggcctcct

SEQ ID NO: 147835 - DNA, 63 bp, Homo sapiens
  chr4:1585406-1585469
  hypo
acctgtccctcctcccggggcttgtgcgaggattgaagcgttagtgtcgttcttgccggctca

SEQ ID NO: 147836 - DNA, 30 bp, Homo sapiens; identical to SEQ ID NO: 67720
  chr4:1594633-1594663
  hypo

SEQ ID NO: 147837 - DNA, 525 bp, Homo sapiens
  chr4:1600695-1601220
  hypo
tctcctctctgtagcgtgcgcaggggtgcgtgcgggtgcagcaccgcgttccttccccggcccgcttccctcctggcctggcagacccttcgtcaccgaggccaggggatccagggtgccggagcgcagggccgtcggctccaaccccgcctggtacttcaccgaggccaggggatccagggtgctggagctcagggccgtcggctccaaccccgcccgggacttcgccgaggccaggggatccagggtgccggagcgcagggccgtcagctccaaccctgcctggtacttcaccgaggccaggggatccagggtgccggagctcagggccgtcagctccaacaactccgcccggtacttggccggagcagaagcacagtgggactcgggccagccaggagcccatcgggggcagggcatggcacctggacctgagggacatctcgagtgtttcgcagacaaggagacaaggcacagaggccaaatgagtggccccaggccccacagccacgggagcagcactgg

SEQ ID NO: 147838 - DNA, 30 bp, Homo sapiens; identical to SEQ ID NO: 67722
  chr4:1608268-1608298
  hypo

SEQ ID NO: 147839 - DNA, 30 bp, Homo sapiens; identical to SEQ ID NO: 67723
  chr4:1615312-1615342
  hypo

SEQ ID NO: 147840 - DNA, 471 bp, Homo sapiens
  chr4:1616405-1616876
  hypo
cagcccaggggaggttcctgccgcctccggtcacaacagctccgtccgccaatcaatacccggccctgctttatgtgtggccctattcacagacaccgcactgagcgtgtatattgatcccttaacatcaagctcacagccagcggtgccacagctcccacccagaggcaggtcgccccacacgcatttctccacggggtgccccatggccgtcctatgctgacggacaccagatggcatttcagcaccgggcacaggggccgctttaaacagcaaaatcaccaaagggacacgagagcaaaaacatggcacacgcaaaccacaaaaaaggacatttacagatgagcagagacagaaggcaggatgcggccacgcccaccccacctgggcacacagaaggcaggacacgaccacgcccacctcacctggggacacaagggaggcaggatgcagccacgcccaccccacctg

SEQ ID NO: 147841 - DNA, 30 bp, Homo sapiens; identical to SEQ ID NO: 67725
  chr4:1620024-1620054
  hypo

SEQ ID NO: 147842 - DNA, 472 bp, Homo sapiens
  chr4:1621150-1621622
  hypo
tcccttgcccagctcggcgtctctggggttggcccacttcaggactggccggccttcccgccctgttcccagactcatgcacctgtggacatgggcactttcctccaagccgcatctccctcccgcaccaggtgctggcctatctctgggtctataccctgcaatcggcttctcaggtcttcaccccccggcctcccgtgaccacccccgcccttcatctccagcgtctctgactcacgcaccgggcaccggccttgcgctttgtcttttactacagatcccagttctgctgtgcattggagctccatttgtaccactcagggccctggcaggaatgggggttcacggcgtccacacgcaaagccctgtcctgggcatgtcaggtccctttcgcccacactggcacctggatctgcttcacttcatctgccctgcgatcatctaagctgtcctctctcgcctcatggtctcc

SEQ ID NO: 147843 - DNA, 30 bp, Homo sapiens
  chr4:1626133-1626163
  hypo
agcgccgtgaccccccgaaccacaaatgtg

SEQ ID NO: 147844 - DNA, 266 bp, Homo sapiens
  chr4:1626394-1626660
  hypo
caccacgccaggtaccgccacgctgcgggtctggctgagaaggcacctggaattctgtcccagatgctgtgtttcacgccagatgacagcaaagctctcccctgacatgcgggcacactccagactcccccagaggccctcctggaagaaccactcaaggacccaagggcccaaaaggcatcagaaggtcctatgtcccggcccacgtggtcaggggtcacaccaggtgatcagaagcccccacgtcccggcccacgtggtcaggg

SEQ ID NO: 147845 - DNA, 26 bp, Homo sapiens
  chr4:1626779-1626805
  hypo
gccccacgtcccggcccacgtggtca

SEQ ID NO: 147846 - DNA, 30 bp, Homo sapiens
  chr4:1637383-1637413
  hypo
agcacggatctgccgcgcccactgccaacg

SEQ ID NO: 147847 - DNA, 40 bp, Homo sapiens
  chr4:1638195-1638235
  hypo
tgttgccccgttcacgggagatcccgtccgtcctcgcgct

SEQ ID NO: 147848 - DNA, 31 bp, Homo sapiens; identical to SEQ ID NO: 67729
  chr4:1640681-1640712
  hypo

SEQ ID NO: 147849 - DNA, 46 bp, Homo sapiens; identical to SEQ ID NO: 67730
  chr4:1642969-1643015
  hypo

SEQ ID NO: 147850 - DNA, 479 bp, Homo sapiens; identical to SEQ ID NO: 67731
  chr4:1645865-1646344
  hypo

SEQ ID NO: 147851 - DNA, 375 bp, Homo sapiens
  chr4:1651636-1652011
  hypo
gtgaggtggcacaggcgtggcgtttgactgtgaggtggcacaggcgtggcgtttgactgtgaggtggcacaggcgtggcgtttgactgtgaggtggcacaggcgtggcgtttgactgtgaggtggcacaggcgtggcgtttgactgtgaggtggcacaggcgtggtgtttgtgaggtggcacaggcgtggcgtttgactgtgaggtggcacagtcatggtgtttgactgtgaggtggcacaggcgtggtgtttgtgaggtggcacaggcgtggcgtttgactgtgaggtggcacaggcgtgacatttgactgtgaggtggcacaggcgtggcgtttgactgtgaggtggcaaaggcgtggcgtttgactgtgagg

SEQ ID NO: 147852 - DNA, 30 bp, Homo sapiens
  chr4:1653537-1653567
  hypo
aagggacccaaagccggggctgcatggatc

SEQ ID NO: 147853 - DNA, 163 bp, Homo sapiens; identical to SEQ ID NO: 67732
  chr4:1656588-1656751
  hypo

SEQ ID NO: 147854 - DNA, 30 bp, Homo sapiens
  chr4:1657177-1657207
  hypo
agggggaccggcagcgcacaagctcctcgg

SEQ ID NO: 147855 - DNA, 100 bp, Homo sapiens; identical to SEQ ID NO: 67733
  chr4:1658843-1658943
  hypo

SEQ ID NO: 147856 - DNA, 313 bp, Homo sapiens; identical to SEQ ID NO: 67734
  chr4:1672853-1673166
  hypo

SEQ ID NO: 147857 - DNA, 116 bp, Homo sapiens; identical to SEQ ID NO: 67735
  chr4:1684724-1684840
  hypo

SEQ ID NO: 147858 - DNA, 355 bp, Homo sapiens
  chr4:1687131-1687486
  hypo
ggggctcggtggccacgtcccacagtggacactgtgggcagacagatgcatggaggccggctggttccgggaataggctatgggtgaggccatgcagcacccctggggctggatgctgggggaggcatcggggctcccaggggtcaggctggggcctcccaacaggttctgggcctggtaaggctagtccggtgcaggctgcgaagccaggccagctgacaccaggactggctggagtcagcctcacctgtctggaagagtgggagtcccagcggggctggggaggggagaagggctggagcaggcgtccaggccattctcttcgctggggtccggtaatcccccacctgcaaca

SEQ ID NO: 147859 - DNA, 20 bp, Homo sapiens
  chr4:1688086-1688106
  hypo
agtctgtgcccctttaaagt

SEQ ID NO: 147860 - DNA, 30 bp, Homo sapiens; identical to SEQ ID NO: 40178
  chr4:1734223-1734253
  hypo

SEQ ID NO: 147861 - DNA, 30 bp, Homo sapiens
  chr4:1737114-1737144
  hypo
tcttgcccccggagcgtcccttggtgccca

SEQ ID NO: 147862 - DNA, 387 bp, Homo sapiens
  chr4:1738655-1739042
  hypo
ggctctgagctgtgaacagccccctgatgaggcagcactggctccgctcagcctgcagtgggtaatgaagcgtcaccgtgctctcccggaaggacaagcagccacgtgggatgggcaggtgagggaggggggcacggagcagcagagaggccgggcatgctggatgcgggtctgcgttttctaccactaccctgacttgagtggttttaaactaaaaagcaaagagcccggttagcttgtccacatggtcctctgtgtcctactcaacactgggagggcctagtgactgaggctgcctctgcttggtggcagcatgcacggtgcaaatgagactccctcaggacgtccgcgggaagccaagcttgtggagttcgatttcttgggagc

SEQ ID NO: 147863 - DNA, 43 bp, Homo sapiens
  chr4:1753593-1753636
  hypo
ccagctctccaggttaaggtgcgcctgccaagcagggagctgc

SEQ ID NO: 147864 - DNA, 682 bp, Homo sapiens
  chr4:1760183-1760865
  hypo
gggtaaggcaggccccggctggaacggggcggggaggggagcggcacagccccaggtgcctcagcctcagcctagggctctggggacgcccaacccggacaggcctgggcaggtggatggaggtgggctgatatcttcatgacaccagcaactgcccggctgatgcccgccactacctggtggcatctggccacagtgagcaccgcagagctccagccatcctgcatagctgcctcagccctgagtccagagccaccatcagggaggcctctcctgtctcgtggtgaagggagactcagtgtgacctcggtacgccagccccttccctgcacgtcccaaagccactggctcagaaagaccctcccttcggctgccagggccctgcccgagtgtggggcactcccaggccctgggccagcggaagcagttccgggagactgcgcaggccaggaaagcccaggtggcctgggaggtcagcagccactggcagggtccaccccagtccaccccaggccagccctgtgccctcctttgctggggtctgggccgcaggatacacggtggggtgtgaggcggcggcaggtgaggagggtctctttcttggcctccctgtagccccggtcagctgaaatagaactggagaaacaagaagcttggccggggcccccggcaagcaaggggg

SEQ ID NO: 147865 - DNA, 149 bp, Homo sapiens
  chr4:1763038-1763187
  hypo
cactgcccatgcaacccggtgcgccttgtccaccctgtccgccctgcctgccctgcctgccccgtgtgccccacccaccccgtgcaccctgtgcaccccgtccacctcatctaccccgtgcaccccgaccaccccgtccaccccgccca

SEQ ID NO: 147866 - DNA, 31 bp, Homo sapiens; identical to SEQ ID NO: 67741
  chr4:1764446-1764477
  hypo

SEQ ID NO: 147867 - DNA, 130 bp, Homo sapiens; identical to SEQ ID NO: 67742
  chr4:1768299-1768429
  hypo

SEQ ID NO: 147868 - DNA, 369 bp, Homo sapiens; identical to SEQ ID NO: 67743
  chr4:1778328-1778697
  hypo

SEQ ID NO: 147869 - DNA, 31 bp, Homo sapiens; identical to SEQ ID NO: 67744
  chr4:1780620-1780651
  hypo

SEQ ID NO: 147870 - DNA, 30 bp, Homo sapiens
  chr4:1780986-1781016
  hypo
cagtcagggcaggagcgtgtcaggaggacc

SEQ ID NO: 147871 - DNA, 476 bp, Homo sapiens
  chr4:1781227-1781703
  hypo
atggagggttccctggcgtggggagaagggggcatccatggctgtaatgggtggtctgccaggcctgccacctcccctggcgagtggcaggaccccagacaggcccagcgatgggccgaggggcaggtcctgggcttccgagtgctcccagggaatgggggccggggctccaggcagcatcagcccctgggctcagcctgaccaccctcatgctcaggacctggcccaagcgctgctcggagatccctggggcagggccccatgcagggctgacgcaccagcctccctgcacaaagtgcccaagggccccacctccagcctgggccaccatgtggccttcgagggcagggccatggcctatggcccagatgagcccccagggctgggagcagccccagacacccaggaggtgctcgctgggtggctgggattgaatgaattagtgaagagcgaagggccaacgcctgattcacaag

SEQ ID NO: 147872 - DNA, 98 bp, Homo sapiens; identical to SEQ ID NO: 67746
  chr4:1782912-1783010
  hypo

SEQ ID NO: 147873 - DNA, 475 bp, Homo sapiens
  chr4:1784387-1784862
  hypo
gcaatagcggcccagcgccttccagaagtctccagacactgaggcctctccttgcaggcctggtcgcagctttattgcccccactctatggatgactgcatgggtgagcccacggccatgcagggagcccggtcctccgggctgggaccggccttgagatgggatgcatggccaggaggcgggcgatggccgaggtgaggggctcagggagggggctggtcatggcattcagagccaggttatgatggggcctggccattgacgacagacggggtgatgacagcggggccccaggatggagcctgcagtccacgacattcagagcagagcatggggcatgcaggaaagggggccagaggacctgctgggtctttccgggtgtatggtgccagcaggtgtccagcgcctccagccccttgtctgagagcaatggagacaggtggggggggggggtgcagggcgtctgggtagaacc

SEQ ID NO: 147874 - DNA, 74 bp, Homo sapiens
  chr4:1785061-1785135
  hypo
gagggtgtgtggggccgccctgggggtcctgccatgctgtggtggggtcacaatgtcaacgttgcagcgggggg

SEQ ID NO: 147875 - DNA, 30 bp, Homo sapiens
  chr4:1785787-1785817
  hypo
ctaatgagccccacacggccgggccagcct

SEQ ID NO: 147876 - DNA, 59 bp, Homo sapiens; identical to SEQ ID NO: 18455
  chr4:1787675-1787734
  hypo

SEQ ID NO: 147877 - DNA, 564 bp, Homo sapiens; identical to SEQ ID NO: 67748
  chr4:1791208-1791772
  hypo

SEQ ID NO: 147878 - DNA, 20 bp, Homo sapiens
  chr4:1794935-1794955
  hypo
ggggaccgggcgggagcggg

SEQ ID NO: 147879 - DNA, 2173 bp, Homo sapiens; identical to SEQ ID NO: 109651
  chr4:1794972-1797145
  hypo

SEQ ID NO: 147880 - DNA, 80 bp, Homo sapiens
  chr4:1798717-1798797
  hypo
tgtgtggggttggggcgccggcaggagcacgtgttgtgggatccatagaagggtgggaggtgggacgcgttgcctcctac

SEQ ID NO: 147881 - DNA, 62 bp, Homo sapiens; identical to SEQ ID NO: 67753
  chr4:1801891-1801953
  hypo

SEQ ID NO: 147882 - DNA, 30 bp, Homo sapiens; identical to SEQ ID NO: 67754
  chr4:1803062-1803092
  hypo

SEQ ID NO: 147883 - DNA, 369 bp, Homo sapiens
  chr4:1803382-1803751
  hypo
gtggtgccctcggaccgcggcaactacacctgcgtcgtggagaacaagtttggcagcatccggcagacgtacacgctggacgtgctgggtgagggccctggggcggcgcgggggtgggggcggcagtggcggtggtggtgagggagggggtggcccctgagcgtcatctgcccccacagagcgctccccgcaccggcccatcctgcaggcggggctgccggccaaccagacggcggtgctgggcagcgacgtggagttccactgcaaggtgtacagtgacgcacagccccacatccagtggctcaagcacgtggaggtgaatggcagcaaggtgggcccggacggcacaccctacgttaccgtgctcaa

SEQ ID NO: 147884 - DNA, 1047 bp, Homo sapiens; identical to SEQ ID NO: 18460
  chr4:1804645-1805692
  hypo

SEQ ID NO: 147885 - DNA, 257 bp, Homo sapiens; identical to SEQ ID NO: 67757
  chr4:1805920-1806177
  hypo

SEQ ID NO: 147886 - DNA, 30 bp, Homo sapiens; identical to SEQ ID NO: 67758
  chr4:1806507-1806537
  hypo

SEQ ID NO: 147887 - DNA, 511 bp, Homo sapiens; identical to SEQ ID NO: 67759
  chr4:1807096-1807607
  hypo

SEQ ID NO: 147888 - DNA, 240 bp, Homo sapiens; identical to SEQ ID NO: 67760
  chr4:1808361-1808601
  hypo

SEQ ID NO: 147889 - DNA, 30 bp, Homo sapiens
  chr4:1810540-1810570
  hypo
attttgttaacccagcgacgaactttccga

SEQ ID NO: 147890 - DNA, 328 bp, Homo sapiens
  chr4:1814433-1814761
  hypo
gcacggctgatgtcacggaagccaccaaaggcacccaccagagccttccccacctgcaaagcccctgcagcacccggagggcaagctggcttttggaggccatgcggagtccagggcagaggggacagtgggatgggctgcctgttgcagtggctgttcacgtcaacagtgctcagccaaggcagtgaggacgaggatgagagccggggcagctgactgggcccgcgatgccgctcacaggagaggcgtctgcacacacctggcaactgcaagacttgttctcaagggtaagtacacttggacaaacgaacaccaggctacttacaca

SEQ ID NO: 147891 - DNA, 30 bp, Homo sapiens
  chr4:1815109-1815139
  hypo
gacaccacctgcccacgccctggccagcct

SEQ ID NO: 147892 - DNA, 136 bp, Homo sapiens
  chr4:1827204-1827340
  hypo
tttgggaagagcctccgagtggcctttcgaggctgatgtttcccttgagcccgtgccggcctggcaccaggccaatattcacgcacctgcttcagctgacccctcaggcggtcttccgtgacgcccagggcccgca

SEQ ID NO: 147893 - DNA, 509 bp, Homo sapiens; identical to SEQ ID NO: 109653
  chr4:1828220-1828729
  hypo

SEQ ID NO: 147894 - DNA, 30 bp, Homo sapiens
  chr4:1834478-1834508
  hypo
ctgcctttatggagcgcagccgcatggtaa

SEQ ID NO: 147895 - DNA, 141 bp, Homo sapiens; identical to SEQ ID NO: 67764
  chr4:1835053-1835194
  hypo

SEQ ID NO: 147896 - DNA, 31 bp, Homo sapiens; identical to SEQ ID NO: 18465
  chr4:1840860-1840891
  hypo

SEQ ID NO: 147897 - DNA, 142 bp, Homo sapiens; identical to SEQ ID NO: 67766
  chr4:1844709-1844851
  hypo

SEQ ID NO: 147898 - DNA, 247 bp, Homo sapiens; identical to SEQ ID NO: 67767
  chr4:1902450-1902697
  hypo

SEQ ID NO: 147899 - DNA, 80 bp, Homo sapiens; identical to SEQ ID NO: 67768
  chr4:1911666-1911746
  hypo

SEQ ID NO: 147900 - DNA, 31 bp, Homo sapiens; identical to SEQ ID NO: 18467
  chr4:1925938-1925969
  hypo

SEQ ID NO: 147901 - DNA, 30 bp, Homo sapiens; identical to SEQ ID NO: 67770
  chr4:1952708-1952738
  hypo

SEQ ID NO: 147902 - DNA, 286 bp, Homo sapiens; identical to SEQ ID NO: 18468
  chr4:1955050-1955336
  hypo

SEQ ID NO: 147903 - DNA, 30 bp, Homo sapiens
  chr4:1957822-1957852
  hypo
ggacgcatcaggcgcgagtgttcccgtaca

SEQ ID NO: 147904 - DNA, 298 bp, Homo sapiens
  chr4:1960081-1960379
  hypo
gtgctgggagtcagtcacatacggccagggctcagtgactgagccccaaacacgtagatcctgtacctcagagagcaagatggcggggcggcaggggagcttgccagttctgtgtttattccagtgagctcgagagccccagcaggaggaagtgcagccagggcagggctctgtgagagctccaggcccctcagggctgcctgcgctcagagctggtgcggcaagccgcatccccaggagcctcgtggccgttcctgacgagtgtttgtgataagtgtgtgccggaggtcaggtgctc

SEQ ID NO: 147905 - DNA, 92 bp, Homo sapiens; identical to SEQ ID NO: 67773
  chr4:1960865-1960957
  hypo

SEQ ID NO: 147906 - DNA, 34 bp, Homo sapiens
  chr4:1961339-1961373
  hypo
cgcaggtgtgtcccgcgggcgagttctgccagaa

SEQ ID NO: 147907 - DNA, 377 bp, Homo sapiens
  chr4:1962688-1963065
  hypo
gggagtcttgagccccgacactgaggattggtcagcacgctttttgtcatggccacatgcttgtgatttccagggagaatttgttaacgagtacgttggggagctgatcgacgaggaggagtgcatggcgagaatcaagcacgcacacgagaacgacatcacccacttctacatgctcactatagacaaggtaatgcggaactccactgtgagcttctgcagtgtgctggacctggagccctgatggtcacctgtagaactggactttgccctgtggcagcgccagcatttgtctccttagctgcttattttcaaacatctgcacattttcttctgaggtgcagcgtgtctttcagctgcgccggagggctagagct

SEQ ID NO: 147908 - DNA, 30 bp, Homo sapiens
  chr4:1963506-1963536
  hypo
agccctgtgggggtgcgtgtcatcccttcc

SEQ ID NO: 147909 - DNA, 78 bp, Homo sapiens
  chr4:1973280-1973358
  hypo
ataaatctcttcttacgagcccacaatagtgccgtgtacttttcagaggcacatgtactgaggcgtgaggtccgagcc

SEQ ID NO: 147910 - DNA, 30 bp, Homo sapiens; identical to SEQ ID NO: 67776
  chr4:1975503-1975533
  hypo

SEQ ID NO: 147911 - DNA, 30 bp, Homo sapiens; identical to SEQ ID NO: 18471
  chr4:1976217-1976247
  hypo

SEQ ID NO: 147912 - DNA, 68 bp, Homo sapiens
  chr4:1976550-1976618
  hypo
ttgctaacacttgaccgaatatatcacttgaccttacaggaccgtataatagacgctggccccaaagg

SEQ ID NO: 147913 - DNA, 594 bp, Homo sapiens
  chr4:1977008-1977602
  hypo
ctcttctcccagggacggagctgacttttaactacaacctcgattgtctgggcaatgaaaaaacggtctgccggtgtggagcctccaattgcagtggattcctcggggatagaccaaaggtaaggctgtggcgccctccttccccccaggctctgtgttggcattttgcactcctggagacctgtgtcccccgtgaacagcggcttcctccaggctggcttgttgccgggacaggtgggagcaagttccctgctgtgggctggggaggatggctctcaacaaaggccagtggttaagagttcctcactgaacgtgtttcctggggctgccagaacaatgcctcacagacgcgtggtttcgcagttctgggtgtgggcagggccgtgcgccctctgaaggttccttgggaggctctttcccaggcctgtctcccgttcctggtggcggccacagtccttgctgctccttggcttgtagcagcaccgcccaaccattctccctgcgaacatgactgttgacttgcccttcttataagagcactggtcctgttgacttagcgcctgccctgctaccgtgtgaccccatcttaacaga

SEQ ID NO: 147914 - DNA, 425 bp, Homo sapiens
  chr4:1980622-1981047
  hypo
cagagggcaaatagcgccaggcggccgcttggccggatccaggggcggtgcagggcggccggccctgcctgcgggagagggcgagcatgaactggcccggaggacccagctcgagccgccaggacacagacgtacaggcctcctcgggagggagcgcctccccaccactgagccatcctcagcagcgtccgctgcgtctgcactgatgaccgtctgagcccagctcagcgttcctggacaaacagcctcactcctcagcgttaccgccacacttgaatttctccgaatgtcaaggttccctcccactctatttttttaggttaaagttaattggcatatggaatgttttaatctcctctgaaatgtgtagcgtaggcttttcccaagggtcgctagaaactcgtcttcgcgttgccccctttctg

SEQ ID NO: 147915 - DNA, 30 bp, Homo sapiens
  chr4:1982687-1982717
  hypo
aggccccagggccccgctgtcacttgccca

SEQ ID NO: 147916 - DNA, 30 bp, Homo sapiens
  chr4:1983365-1983395
  hypo
gccggcctttcttccggcgacacccgtcca

SEQ ID NO: 147917 - DNA, 30 bp, Homo sapiens; identical to SEQ ID NO: 67781
  chr4:1984935-1984965
  hypo

SEQ ID NO: 147918 - DNA, 419 bp, Homo sapiens
  chr4:1986314-1986733
  hypo
tgtctgtgcccaggacgggcagggtggggcaaagcagctggtttatgtcttggagctcaagctgaacagcggggcatctgcccccagcagattctggctgaggcagaagggggacaacagagatgcaggagtgagaaccgcagccctggcagcgcccgtgggcaaggtcatgtcctggcaggcagcttggctggttccaggctggggccagcagactcacctgggggcgtctcggagctggggatgtaggaggaggcgggaaccacgctgggcgtggagggaaggtagctcgtggagggcagcgcaggctcattgttcagggacccaagtttctggaacacagagtttaaggttccttccagaagaggccatgcttccggcatgtgctaacacatggcccgacccggagctccactgcc

SEQ ID NO: 147919 - DNA, 30 bp, Homo sapiens
  chr4:1987268-1987298
  hypo
gcccctccagcaagcgtggggcaggttccc

SEQ ID NO: 147920 - DNA, 30 bp, Homo sapiens
  chr4:1987862-1987892
  hypo
cgcctctcggccagcgccaaccatatccag

SEQ ID NO: 147921 - DNA, 30 bp, Homo sapiens
  chr4:1989560-1989590
  hypo
tccccaacagggagcgggtctccaggtgaa

SEQ ID NO: 147922 - DNA, 1401 bp, Homo sapiens
  chr4:1993650-1995051
  hypo
gcaaggccccggcatccggtgccctcccagcagcctcccacctcccagcagcacccagtccactgggcctactcttccaccggtgcgcagatgcaagaaaacctgaagggtgagaagccggggccaccactgctcccgcagaaagcctgcgggtgggaaatcctggggatgaggggcgtagagcaggcaggtgcccggcacagcagagcgcaggagcagggtggagtcacctgccgcgggggtgtgtgcctgggcagcagggggtggggcctgggacctggggcagcacccgtgacagctgagctggtgcctagtcaccatctaggcagggacggctgcctctgggtctggacggcgctgggagttggcgctcgtggagcctggaggtggccccgggatctggagtgaggccagggccttggggaggccatgggcgacgtgcgtggaggaagcaggcgcaccccgtgctccctcaatacctgggaggccagatccatccacaccagggcctgcttcggccacataaaccccctcccacgaggaaacgcagagagccaggccatggcgtgcctgtgcctctgccatgcgcccactgggctgctcacagtgtgagacagctgggctggctggcgctgggggtgaacaacagcgccctgccctgtccagacgccggggctgaaaccccagccccaggccttcctgacacccactccctgcgtcaggcgccagagacccgtcctacgagggctgcggccatcacgtccccgcgagcgccgcctcctggtggcctctgagtgggaggaccttccagcgcttccctcactgtcctcatgggcttcctgccctgagggaagttggctcgaagggcagagatcagaggtcgtgccaggggagcctgcctgctgccaagcccctctgcatctgccctgcaggacacccagctgccctcaggagtcaagaaccccccgcgtggcccagccccttctgttccttgggcaaccagggagggtgtcgccccggccgctgaccctgcgccccgggccctcactcccgacgcccgcccgagctgagtgcgcgatgcggcagaagatgctacgtggctgcaggaagcgctgcgcacacgctgcctctggcagccgcacagcccggctgtttccagccagtgcggcctctccacagcagccccagggaaaccctacgcctgccaagaggcaagcgcgcggcattttataaaaatggtaaggataaaaaaagtcggggatgttaatttaaaacaaaaaggaccactgttgtggagtcaatgttttctctccagaacgcgcatgttgaagcctggctcgctctactggggcttcttgtaggaaaacgcttggctttcccgggcgcggtagctcatgtctg

SEQ ID NO: 147923 - DNA, 95 bp, Homo sapiens; identical to SEQ ID NO: 18475
  chr4:1999768-1999863
  hypo

SEQ ID NO: 147924 - DNA, 230 bp, Homo sapiens
  chr4:2038291-2038521
  hypo
ctggttcagtgttgacggaagctgaagacagacggaagctccactacaacatgttcagggcggccctcgaggacagcgtggagaagaaatcctccctgtgggtataactcggatcagttagcttgcttgtctgcttcacgtagaggcagaagagtcatgaaataagaatatatatggagtcgtgggtggggctgtttggctggttgatgagaacccggaaggagcaagtt

SEQ ID NO: 147925 - DNA, 90 bp, Homo sapiens; identical to SEQ ID NO: 109659
  chr4:2042168-2042258
  hypo

SEQ ID NO: 147926 - DNA, 189 bp, Homo sapiens
  chr4:2045627-2045816
  hypo
gtgcctgctggccagcggggcactgaggaccacgctgctccgtgtgaataaatgcccagtggcacgcctgtgtcctgtctctctgttctggccaccagagcccctgcgtcgcccccggcagtcctgggttgggcccctctctgggcttgggtttccccagctgttccagctgggcgagccctcttggct

SEQ ID NO: 147927 - DNA, 1174 bp, Homo sapiens; identical to SEQ ID NO: 109663
  chr4:2060919-2062093
  hypo

SEQ ID NO: 147928 - DNA, 30 bp, Homo sapiens; identical to SEQ ID NO: 3113
  chr4:2062493-2062523
  hypo

SEQ ID NO: 147929 - DNA, 30 bp, Homo sapiens; identical to SEQ ID NO: 18480
  chr4:2065734-2065764
  hypo

SEQ ID NO: 147930 - DNA, 255 bp, Homo sapiens
  chr4:2066057-2066312
  hypo
gtcgccatagcccctcgcccttccccacctgcctgggcggcttgccacctgaagagtggcatcttggaccaccgcggctgtccatgacgctgccctgcccgccgccactggggaaggcccagccttgctcaccaagcacagaacctctgcagcagatcccggggccaggctccggccccgcctgcggccccagcgccactgcctgtggaggccccagctggccacggcgctgctttgctccgcgcatgccgaggg

SEQ ID NO: 147931 - DNA, 178 bp, Homo sapiens
  chr4:2128211-2128389
  hypo
gcccctgggcgctgtcgctgcagcaggatggacagtagagcaatacatgggaatgtgcatcggaccagagaggagcagagaccagagaggagcggagaccagagagaagcggagaccagagaggagtggagaccagagaggagtggagaccagagaggagcggcgccgtgcccagcat

SEQ ID NO: 147932 - DNA, 30 bp, Homo sapiens
  chr4:2128705-2128735
  hypo
gacagacccctcacccgcttaggactctgc

SEQ ID NO: 147933 - DNA, 266 bp, Homo sapiens
  chr4:2165181-2165447
  hypo
gggccagaggtggagcgccatcagccaccatggctccgcgggctcacccgcgctctgcgccggctgcagacaccacattcgtctgacctcccttctcactcatttcccgctggtgcctcttctctcactgacctttaaagatcagtttctcggagtttaactctgtggttatctatgctggctgcgtatcgcaatcaacagggagcttcaaaagcaggcccatgactaggctcccccgcccaattctgactcgtgggatcagctgt

SEQ ID NO: 147934 - DNA, 31 bp, Homo sapiens; identical to SEQ ID NO: 67792
  chr4:2171163-2171194
  hypo

SEQ ID NO: 147935 - DNA, 30 bp, Homo sapiens
  chr4:2229483-2229513
  hypo
agatggactgactgtcgtaaatttttcatc

SEQ ID NO: 147936 - DNA, 30 bp, Homo sapiens
  chr4:2248961-2248991
  hypo
cccggtgtggttggcggcacggggtgccgt

SEQ ID NO: 147937 - DNA, 78 bp, Homo sapiens
  chr4:2251590-2251668
  hypo
gtgtctaggtgcgtgcgcgtgtgcgtctgacagtcctaccagagcagacgctgcccagctcggcgtgggctgggctgg

SEQ ID NO: 147938 - DNA, 30 bp, Homo sapiens; identical to SEQ ID NO: 18482
  chr4:2252251-2252281
  hypo

SEQ ID NO: 147939 - DNA, 30 bp, Homo sapiens; identical to SEQ ID NO: 67794
  chr4:2252847-2252877
  hypo

SEQ ID NO: 147940 - DNA, 30 bp, Homo sapiens; identical to SEQ ID NO: 67795
  chr4:2272467-2272497
  hypo

SEQ ID NO: 147941 - DNA, 696 bp, Homo sapiens
  chr4:2278256-2278952
  hypo
atagcggccaagagacggcagcaactcaggtgtctgttggcagaggcgtggataaaccaaatgtggtccacccatacaacagaatattattcagccttaaaaaggaaggaaattcggatctaggctacagccacggatgaatgttggcaagatcatgctgagtgaaacaacccagctaccaaaggatgcgtcctgcttgagtctccgacacgaggtcctgagagccgtcacgttcatacagatggaaggtagaacggtgggcgccagggtgggcagagggcggggagtcggggggagtgagtgatggggaaacagtttcagtttgggaagatgaggacgttgcggagatgatgttggtgacagttgcacggcactgagtgtgttcaatgccacgaaattgtacgcttaggaagggctaaatagtaaactttatgctacatatattttacaaaaattaaaaatataaaaaaaaaagaattggggcagggagagagcagaggcaagggaacggaggcggcaagtacatggcagaaggccggattggcgtggcgcccgacacagaaggctcaggggtattattgcccaaaaccactgaactgtgtgatttagaaaggtgaattttgtggtatgtatgttacatatcaataaaggcttttttttaaagatcacgccgggcgtggtggctcatgcctgtaa

SEQ ID NO: 147942 - DNA, 30 bp, Homo sapiens
  chr4:2298092-2298122
  hypo
acctgggcctgtgcacggcggaccagccct

SEQ ID NO: 147943 - DNA, 30 bp, Homo sapiens; identical to SEQ ID NO: 67797
  chr4:2299157-2299187
  hypo

SEQ ID NO: 147944 - DNA, 30 bp, Homo sapiens; identical to SEQ ID NO: 67798
  chr4:2302607-2302637
  hypo

SEQ ID NO: 147945 - DNA, 187 bp, Homo sapiens
  chr4:2303622-2303809
  hypo
aggagaggctgttcgcgcgaggctgttcatcgtggcacgtctgtgacaggaaaagcctggaaacaagcccaagccagcacttgggcccgagtgcacgccaggccagcctcgcatgaggccctgccccgcagtgaagggaagcaggacatctctagcaagcactggagcggctcgggcagaaggccag

SEQ ID NO: 147946 - DNA, 214 bp, Homo sapiens
  chr4:2305613-2305827
  hypo
ctcagggcaaggggcccggcgctggcacagcccgctcccactgccccgcacaggcacgcggctcacaccaggggcgggatgggccggggctgcggcaggtgagctgagggcttggcactgcgcccatgtcacctgacaggcacccggaacatcagaaacagggaagcgggcccgctggcgcacattttctggtgcatgacgccccacagggcag

SEQ ID NO: 147947 - DNA, 30 bp, Homo sapiens; identical to SEQ ID NO: 67800
  chr4:2306532-2306562
  hypo

SEQ ID NO: 147948 - DNA, 52 bp, Homo sapiens
  chr4:2306803-2306855
  hypo
gccagctggggactcgggcctggccagggcttctgccgtcccctccacgtca

SEQ ID NO: 147949 - DNA, 30 bp, Homo sapiens; identical to SEQ ID NO: 67802
  chr4:2332545-2332575
  hypo

SEQ ID NO: 147950 - DNA, 52 bp, Homo sapiens; identical to SEQ ID NO: 67803
  chr4:2337322-2337374
  hypo

SEQ ID NO: 147951 - DNA, 31 bp, Homo sapiens; identical to SEQ ID NO: 67804
  chr4:2339950-2339981
  hypo

SEQ ID NO: 147952 - DNA, 30 bp, Homo sapiens; identical to SEQ ID NO: 67805
  chr4:2343252-2343282
  hypo

SEQ ID NO: 147953 - DNA, 31 bp, Homo sapiens; identical to SEQ ID NO: 67806
  chr4:2353586-2353617
  hypo

SEQ ID NO: 147954 - DNA, 31 bp, Homo sapiens; identical to SEQ ID NO: 67807
  chr4:2361256-2361287
  hypo

SEQ ID NO: 147955 - DNA, 31 bp, Homo sapiens; identical to SEQ ID NO: 67808
  chr4:2362274-2362305
  hypo

SEQ ID NO: 147956 - DNA, 247 bp, Homo sapiens
  chr4:2362984-2363231
  hypo
gaacaaagcagctctcggttcaaaaaatacaaggatggactgactctgggctaattttgtaaagctgattaaactgttaattcattcgagcccctggtccctaatgtgagctgtggctgcaggtgggaggtgcgggttggaggcacgtgcagggagagagacgcggtgcgcacgtgtgagctcagcccgtctgacccacgtgtgatgaccctgcagtgtttcccagcagttacgagggctggccacc

SEQ ID NO: 147957 - DNA, 31 bp, Homo sapiens; identical to SEQ ID NO: 18483
  chr4:2387539-2387570
  hypo

SEQ ID NO: 147958 - DNA, 278 bp, Homo sapiens; identical to SEQ ID NO: 67810
  chr4:2396219-2396497
  hypo

SEQ ID NO: 147959 - DNA, 30 bp, Homo sapiens
  chr4:2402031-2402061
  hypo
actgtgtcatgacacgcacacacatttcat

SEQ ID NO: 147960 - DNA, 31 bp, Homo sapiens; identical to SEQ ID NO: 67811
  chr4:2411285-2411316
  hypo

SEQ ID NO: 147961 - DNA, 31 bp, Homo sapiens; identical to SEQ ID NO: 67812
  chr4:2426868-2426899
  hypo

SEQ ID NO: 147962 - DNA, 45 bp, Homo sapiens; identical to SEQ ID NO: 18484
  chr4:2427612-2427657
  hypo

SEQ ID NO: 147963 - DNA, 30 bp, Homo sapiens
  chr4:2451669-2451699
  hypo
ctgagggcaaacatcgaggaactgtgctgc

SEQ ID NO: 147964 - DNA, 35 bp, Homo sapiens
  chr4:2459492-2459527
  hypo
gccgactccctattccgtgccgaggctggtgctgt

SEQ ID NO: 147965 - DNA, 244 bp, Homo sapiens
  chr4:2459751-2459995
  hypo
gcctccctgattccacgttcccaaagagccaggaggcaccgccgccctcttctgcactcccggcctgaggcgcccagccgtctccctgtgccatggtctgacgctgtggctgcgcggggagggccggtgtggacgcctcttttctctctttgctcattgtctggttgactgagacgggaatcttggtattttttggtgcccactttcttcacctcatatttctacacaacgtattaccaagttt

SEQ ID NO: 147966 - DNA, 211 bp, Homo sapiens
  chr4:2460372-2460583
  hypo
cgccctgggctggggcgggaccaggcagggaagccggagcagccccactcaccgtggcaggtccgctgtctgggcagatggccaagctgatgctgcagcgtgcagagagacggctccgggaggacaggtccaggaaggagctggtggagcaggtgatagaggggcagaagaacgccaaggcggcccagacgaagctcgcgaagggccgaca

SEQ ID NO: 147967 - DNA, 117 bp, Homo sapiens
  chr4:2514668-2514785
  hypo
agtctctcggatgcccgcgctaaggcagagtcaggaggccagggacgggactcttgtaggggataggggccactcacgtgacagggtataataaaatgtttgcgttgactgagaaac

SEQ ID NO: 147968 - DNA, 82 bp, Homo sapiens; identical to SEQ ID NO: 18486
  chr4:2524116-2524198
  hypo

SEQ ID NO: 147969 - DNA, 121 bp, Homo sapiens
  chr4:2524745-2524866
  hypo
ctcaaaaaaaaaaactcaaaccaatacataattgtataccttaagaaacaaacaaacaaaaaactaaataaaaagttagcagaaggaaggccataataaagattagagtcaagataggccc

SEQ ID NO: 147970 - DNA, 181 bp, Homo sapiens
  chr4:2527843-2528024
  hypo
cctgggcgacagggcgagactccgtctcaacaacaacaaaaaaaagactaatctttctcaaacttcattgtaaaatgaacgggaaagaaaactttctcactcattttgtgaggtcaatagtaccctaatactgaagccacctaaagacgttgcaagaaaataaaactgcagaactggccag

SEQ ID NO: 147971 - DNA, 35 bp, Homo sapiens
  chr4:2540190-2540225
  hypo
attacaggtgtgagccaccgcgcccggccgttttt

SEQ ID NO: 147972 - DNA, 32 bp, Homo sapiens; identical to SEQ ID NO: 18487
  chr4:2559964-2559996
  hypo

SEQ ID NO: 147973 - DNA, 30 bp, Homo sapiens; identical to SEQ ID NO: 67821
  chr4:2561616-2561646
  hypo

SEQ ID NO: 147974 - DNA, 37 bp, Homo sapiens; identical to SEQ ID NO: 67822
  chr4:2567249-2567286
  hypo

SEQ ID NO: 147975 - DNA, 25 bp, Homo sapiens
  chr4:2567775-2567800
  hypo
tgcttttttttttttttgagacgga

SEQ ID NO: 147976 - DNA, 121 bp, Homo sapiens; identical to SEQ ID NO: 67824
  chr4:2568039-2568160
  hypo

SEQ ID NO: 147977 - DNA, 31 bp, Homo sapiens; identical to SEQ ID NO: 18489
  chr4:2571129-2571160
  hypo

SEQ ID NO: 147978 - DNA, 43 bp, Homo sapiens
  chr4:2592458-2592501
  hypo
gaagtgtagaagttggccaggcgcagtggctcacacctgtaat

SEQ ID NO: 147979 - DNA, 79 bp, Homo sapiens; identical to SEQ ID NO: 18490
  chr4:2622585-2622664
  hypo

SEQ ID NO: 147980 - DNA, 79 bp, Homo sapiens
  chr4:2626192-2626271
  hypo
ccttgttcctcagagcaggcagtgcaggctatgggattccccaggacggagaggcctctgccccggctgcttgatgcaa

SEQ ID NO: 147981 - DNA, 121 bp, Homo sapiens
  chr4:2626553-2626674
  hypo
ccgccatgcccagccgaattgtttcctttttgtatgtatgtgtgtgtctgtgtgacaatgtctctgtcacccagacaggagtgcagtggggcatgatcacggctgactatagcctcaactt

SEQ ID NO: 147982 - DNA, 269 bp, Homo sapiens; identical to SEQ ID NO: 67828
  chr4:2626992-2627261
  hypo

SEQ ID NO: 147983 - DNA, 87 bp, Homo sapiens
  chr4:2638079-2638166
  hypo
gtgccctgccaggaagaatattttaatagcctcttcaaatcctgatagatcttctctgagagtacaccaacgcgggagagtttctta

SEQ ID NO: 147984 - DNA, 30 bp, Homo sapiens; identical to SEQ ID NO: 67829
  chr4:2639531-2639561
  hypo

SEQ ID NO: 147985 - DNA, 241 bp, Homo sapiens; identical to SEQ ID NO: 67830
  chr4:2639920-2640161
  hypo

SEQ ID NO: 147986 - DNA, 147 bp, Homo sapiens; identical to SEQ ID NO: 18494
  chr4:2640599-2640746
  hypo

SEQ ID NO: 147987 - DNA, 117 bp, Homo sapiens
  chr4:2672876-2672993
  hypo
ccccttcctccagcccgtgaggtgtcctcagtgcatgcactgtgctctcctggtcagccagcgagttgtggacagcttaagaagcccttccgtggcgctctcatttccagggttctc

SEQ ID NO: 147988 - DNA, 30 bp, Homo sapiens; identical to SEQ ID NO: 67833
  chr4:2686943-2686973
  hypo

SEQ ID NO: 147989 - DNA, 221 bp, Homo sapiens; identical to SEQ ID NO: 67834
  chr4:2687341-2687562
  hypo

SEQ ID NO: 147990 - DNA, 438 bp, Homo sapiens
  chr4:2688474-2688912
  hypo
gtttaccagctgggccggcacaatgggactgctgctcaaagctagcagtttggcatctgtcacgggcttctgccttttacaagaaggtcctcaagaccaagaagtcttctacttgttactttttgtcaattacttctcagcaaagcagctcttagcttatcgctgctttgtagaaatgggtatctattgaaatacgtttttttattttcctggctcttgtcccatggggctcccttaccaaaacaatgacttcaggccctttactgtatcctgggtggcccgtctggacctgtttattcctgctgttgagtcctgagtgtctgctctaccctcctctccccctttgccttcctgggcctgttccaggtcagtggactcgctgagctgtccagcagcccagaggggagtgcttcctctctgctccgaagcactgtggaa

SEQ ID NO: 147991 - DNA, 195 bp, Homo sapiens
  chr4:2698196-2698391
  hypo
agaaagggaaagcgtcgttgaccatcggagggtggaggatttgttgcagtttataaatagctccgaaaccaaaccagtgagcagcacgcgtgcagcgaagcgagcaaggcataagcaaaggaaggcaagtgacagttctcagcacctggaggcgccaggtctgagggcatttgaaggtgccgtgccacgccagtc

SEQ ID NO: 147992 - DNA, 939 bp, Homo sapiens
  chr4:2704072-2705011
  hypo
actttgtgtcatggttcgatgctccgggctcatctcgtgtcttctctctcccagccctgaaccagccatttctccaaggagccctcctctttcttcaacagtggtgttcagaaacccagacctggacactgccatatggcattgcttttaggccctctcagtcagcagagcaggaggagtgggggtgtgagcatgtgcacacgagcgcctgccacctacacacactaattgctatgtacaagccgtgagttcccacagatatcccagccccactcctgtgctacagtgagcgttctcccttccccgtccacctttgtaactccttagacagtaagaacctggaccccatcatccatggtgcctttactgacttgctgagtcctacaacacaggtaaagggttcagaagtccctgcccttacccgatggaaaactccgggcatgctttcggtatttgttcagttctttttgtctttagcctcagggtgtggtgattacactgaatttacaaatgacttaaattagttcttttcacctttagtacaattacgttattgattgaaaacacacctgattgcgtttttccatttgtgttccatttgttttctcccctacccagttcctctttttttttaatctgttcccacccactccctgtaggtaactaatcagtttcttatttgcttttcttttttacataaaaggtagtgtattatagacataatagtgacttctgggttcttttctacttcatatattctgggaatcactgcacatcagttcgtagagattgtcctcattctttctgcagcgacacggtactccatttaaagtgtacgatgatttctgcagtcactcttctttgtgcgagcgtttaggttgtttctaatgctttggttttttgtttttgtttctgttttaaggtggagtctcactctgt

SEQ ID NO: 147993 - DNA, 30 bp, Homo sapiens
  chr4:2733719-2733749
  hypo
ctgaaaccccagaccgagaagttgatgctc

SEQ ID NO: 147994 - DNA, 31 bp, Homo sapiens
  chr4:2733979-2734010
  hypo
ctctcctgtgcccctgcgtctcaccctaggc

SEQ ID NO: 147995 - DNA, 55 bp, Homo sapiens
  chr4:2745777-2745832
  hypo
agacaggtcaggacacgtagggagctcacactttgaggcccgagatatgctctct

SEQ ID NO: 147996 - DNA, 103 bp, Homo sapiens
  chr4:2746454-2746557
  hypo
gcagcatcccgggccgtcctggaggccgccagctcctgcttcacttcggcacagtcatttattttctcttccaactgtctgttgagccgggagatctccttcc

SEQ ID NO: 147997 - DNA, 30 bp, Homo sapiens
  chr4:2806657-2806687
  hypo
cagttggcgatggagcgggcacagagctgg

SEQ ID NO: 147998 - DNA, 105 bp, Homo sapiens
  chr4:2806951-2807056
  hypo
ccaggctggtgtgggcgtggggtgtcccggccacagctgatctgctcagtgactgctgctgcccttgcctatcgatgaggatgctggggccgggaggtcaccctg

SEQ ID NO: 147999 - DNA, 30 bp, Homo sapiens; identical to SEQ ID NO: 67838
  chr4:2826405-2826435
  hypo

SEQ ID NO: 148000 - DNA, 30 bp, Homo sapiens; identical to SEQ ID NO: 67839
  chr4:2827046-2827076
  hypo

SEQ ID NO: 148001 - DNA, 30 bp, Homo sapiens; identical to SEQ ID NO: 67840
  chr4:2829010-2829040
  hypo

SEQ ID NO: 148002 - DNA, 25 bp, Homo sapiens
  chr4:2874726-2874751
  hypo
ttattattttttaagacggagtctt

SEQ ID NO: 148003 - DNA, 29 bp, Homo sapiens
  chr4:2878139-2878168
  hypo
tagcttaggctgggtgcgtcggctcaagc

SEQ ID NO: 148004 - DNA, 30 bp, Homo sapiens
  chr4:2898215-2898245
  hypo
atgagccaccacgtccgacctgatattgat

SEQ ID NO: 148005 - DNA, 124 bp, Homo sapiens
  chr4:2907411-2907535
  hypo
agacggccatagtggcgagtcaccttctgactcctgttgggtgcggcatgacccaagtgcagcgcaggccatctgcaggcaccagcgacagacgctgcaaggggtgcttcgtttcagcgttaat

SEQ ID NO: 148006 - DNA, 92 bp, Homo sapiens
  chr4:2925309-2925401
  hypo
ggccatgttgcctgtcaccctgacatttgtctctttacgaacacagtatttctgtctgttgaagcttcaccggggagagacctcctttactc

SEQ ID NO: 148007 - DNA, 30 bp, Homo sapiens; identical to SEQ ID NO: 67843
  chr4:2925912-2925942
  hypo

SEQ ID NO: 148008 - DNA, 196 bp, Homo sapiens; identical to SEQ ID NO: 18498
  chr4:2926276-2926472
  hypo

SEQ ID NO: 148009 - DNA, 110 bp, Homo sapiens; identical to SEQ ID NO: 67845
  chr4:2926879-2926989
  hypo

SEQ ID NO: 148010 - DNA, 30 bp, Homo sapiens
  chr4:2928164-2928194
  hypo
ctgtgtgagccacacgccggctgcctctca

SEQ ID NO: 148011 - DNA, 233 bp, Homo sapiens
  chr4:2932816-2933049
  hypo
ctggccagagcacctaggctgcgcagtgtacccatgaccgtgcccttctgccctggtgagcctgtgggaagaggcacagtcaggcaccactgcccttctcccgctcaggtggcttcggccgagggaagggggctcaccatagccagcgaccacggaggacaggcagggcaccacaacggcggcggctggtgggagacatcgaggaggtgcccgtcagcccaggggagggtgca

SEQ ID NO: 148012 - DNA, 30 bp, Homo sapiens; identical to SEQ ID NO: 67847
  chr4:2941745-2941775
  hypo

SEQ ID NO: 148013 - DNA, 30 bp, Homo sapiens
  chr4:2954084-2954114
  hypo
caaagccaagctcgcgaaccatcatgtcat

SEQ ID NO: 148014 - DNA, 39 bp, Homo sapiens; identical to SEQ ID NO: 67848
  chr4:2957243-2957282
  hypo

SEQ ID NO: 148015 - DNA, 17 bp, Homo sapiens
  chr4:2961295-2961312
  hypo
ggcgacagacaaagact

SEQ ID NO: 148016 - DNA, 31 bp, Homo sapiens
  chr4:2979114-2979145
  hypo
agagctccggctgctacgcctactgctagac

SEQ ID NO: 148017 - DNA, 21 bp, Homo sapiens
  chr4:2986849-2986870
  hypo
ttgagccaggccgggcgcagt

SEQ ID NO: 148018 - DNA, 30 bp, Homo sapiens
  chr4:3024026-3024056
  hypo
agtttcgtgttttgccgcgctagcccttgc

SEQ ID NO: 148019 - DNA, 31 bp, Homo sapiens; identical to SEQ ID NO: 18503
  chr4:3103815-3103846
  hypo

SEQ ID NO: 148020 - DNA, 30 bp, Homo sapiens
  chr4:3107180-3107210
  hypo
gatgttggtttttgtcgggggccagctgct

SEQ ID NO: 148021 - DNA, 168 bp, Homo sapiens
  chr4:3120140-3120308
  hypo
agttcagtcatgagccgtcacttatgggcacgtggaatctgacccggcacagagttgggagaagacaggagctttatagacagaaaatgtggtctttgctaagtcccaggagtgaaagggtgagacagtgctcacagcacacgagtgtgggtgcgtagacagagcaag

SEQ ID NO: 148022 - DNA, 30 bp, Homo sapiens
  chr4:3190517-3190547
  hypo
ctgtgtccacggcgacggcgctctgcattt

SEQ ID NO: 148023 - DNA, 143 bp, Homo sapiens
  chr4:3208226-3208369
  hypo
agaacctccatgactccgagcacttaacgtggctcattgtaaatcacattcaagatctgatcagcctttcccacgagcctccagtacaggacttcatcagtgccgttcatcggaactctgctgccagcggcctgttcatccag

SEQ ID NO: 148024 - DNA, 247 bp, Homo sapiens; identical to SEQ ID NO: 18505
  chr4:3216984-3217231
  hypo

SEQ ID NO: 148025 - DNA, 184 bp, Homo sapiens
  chr4:3220629-3220813
  hypo
tgtggctgcctgagaagggtgcgtgcctgcctgtgtgtgtgtgtgcacgtgtgtgtatgtatgctggagagtctagggaggcttgctccaaggacgcagtattgtttgatcctgagagataaggattctgccgcagggaatgaaggtattccagatggcgggcttattccgaagaagaggccag

SEQ ID NO: 148026 - DNA, 30 bp, Homo sapiens
  chr4:3231560-3231590
  hypo
ggattctaacagcgcgattctccccttgcc

SEQ ID NO: 148027 - DNA, 30 bp, Homo sapiens; identical to SEQ ID NO: 67853
  chr4:3234799-3234829
  hypo

SEQ ID NO: 148028 - DNA, 156 bp, Homo sapiens
  chr4:3240560-3240716
  hypo
acagcaccgggcagtcgtccatggtccgggactgggtcatgctgtccctctccaacttcacgcagagggccccggtcgccatggccacgtggagcctctcctgcttctttgtcagcgcgtccaccagcccgtgggtcgcggcgatgtatcctctct

SEQ ID NO: 148029 - DNA, 147 bp, Homo sapiens
  chr4:3241772-3241919
  hypo
tcaccacctgctgagcgccatggtgggagagactgtgaggcggcagctggggccggagcctttggaagtctgcgcccttgtgccctgcctccaccgagccagcttggtccctatgggcttccgcacatgccgcgggcggccaggcaa

SEQ ID NO: 148030 - DNA, 268 bp, Homo sapiens
  chr4:3245187-3245455
  hypo
tcagacgaggacactcgcttgccgggcctgggcctcctgggaaggagggagctgctcagaatgccgcatgacaactgaaggcaacctggaaggttcaggggccgctcttcccccatgtgcctgtcacgctctggtgcagtcaaaggaacgccttcccctcagttgtttctaagagcagagtctcccgctgcaatctgggtggtaactgccagccttggaggatcgtggccaacgtggacctgcctacggagggtgggctctgacccaa

SEQ ID NO: 148031 - DNA, 82 bp, Homo sapiens
  chr4:3249854-3249936
  hypo
gcatgtgttacgtttcgggtgccgatgcccttgggcggcacttctccgggcagaacccccaggccaccgctccggttccggt

SEQ ID NO: 148032 - DNA, 150 bp, Homo sapiens
  chr4:3251090-3251240
  hypo
gacgccgagatgcgcggcctcatgctggtctgggaggagttcttcgacgagctcaagcagaccaagcgcaacgccaaggtgtacgagaagatggccagcaagctcttcgagatgaccggcgagcgcaggctgggcgaggagatcaagatc

SEQ ID NO: 148033 - DNA, 823 bp, Homo sapiens; identical to SEQ ID NO: 67856
  chr4:3252196-3253019
  hypo

SEQ ID NO: 148034 - DNA, 120 bp, Homo sapiens
  chr4:3265174-3265294
  hypo
gcctgcctgatctgccgctaagaaccagcgctggcacagtgtgcgtctgtcccctgcccaggcttttctcgcacaagtacctgctgctctgaaccttgccattttcggcaatatacctgc

SEQ ID NO: 148035 - DNA, 39 bp, Homo sapiens
  chr4:3267991-3268030
  hypo
cagtgtggggcacgcgcggccacacggggacagcccagc

SEQ ID NO: 148036 - DNA, 371 bp, Homo sapiens
  chr4:3288565-3288936
  hypo
tgcgctgctaggcaccgaatgggagcccggtcagcagtgcctgcgggagccgacgctgctccggcaggattgagtggaattccgcccaggccgggagctccctcgggctggggaggcctcggggacctggctatgatggtgatctgggacttgatgggtgaatgggttggggccagcatcagctttgggcatatattagggagttactgaggaagacagagaaaaaggggcacctagttcttttataatcctccgggaaaaggtgagctctgagcgctacctgctcactgaacagcggaagagcgagcagcgcccaggccccgacgctgtgcagagccccgggagggcggcgtttgcgtgattgttcaagg

SEQ ID NO: 148037 - DNA, 122 bp, Homo sapiens
  chr4:3292279-3292401
  hypo
gacgcccccacaccccgagtcccgtggaagaattatcatccatcccacttgttcaactcaggagtgcctccttaagcaactgtagcctatgagctgtgggtagggccgctgagccgctgcct

SEQ ID NO: 148038 - DNA, 30 bp, Homo sapiens; identical to SEQ ID NO: 67859
  chr4:3298499-3298529
  hypo

SEQ ID NO: 148039 - DNA, 30 bp, Homo sapiens
  chr4:3306300-3306330
  hypo
tcctcatttgtaaaacgggataattagact

SEQ ID NO: 148040 - DNA, 204 bp, Homo sapiens; identical to SEQ ID NO: 67860
  chr4:3310029-3310233
  hypo

SEQ ID NO: 148041 - DNA, 145 bp, Homo sapiens; identical to SEQ ID NO: 67861
  chr4:3310674-3310819
  hypo

SEQ ID NO: 148042 - DNA, 32 bp, Homo sapiens
  chr4:3311031-3311063
  hypo
tctgctgaggagaaccgggtgggagaggagct

SEQ ID NO: 148043 - DNA, 84 bp, Homo sapiens
  chr4:3311955-3312039
  hypo
ggaggagctgggacccgggaaatggcaggtgtcctctgaggggaaccgtgtcggggaggagctgggacccgggaaatggcaggt

SEQ ID NO: 148044 - DNA, 156 bp, Homo sapiens
  chr4:3313495-3313651
  hypo
tatatacagatgttccgaatcagaaaaaatccacagcccttctggtcccaaaaatctcttctaagggacactcagcctgtgtgacgtggtcggtgactcctgatgggaggtggcagtgctgtgcggcgagtggggaccttcgtgtcacatcccatc

SEQ ID NO: 148045 - DNA, 30 bp, Homo sapiens; identical to SEQ ID NO: 67865
  chr4:3318896-3318926
  hypo

SEQ ID NO: 148046 - DNA, 30 bp, Homo sapiens; identical to SEQ ID NO: 67866
  chr4:3319232-3319262
  hypo

SEQ ID NO: 148047 - DNA, 194 bp, Homo sapiens
  chr4:3324702-3324896
  hypo
ggtgtactggagtacccgagagctacatctgagtgagatagtggtacctgcatcacctgaagtacatctgaaaatcgcgctcataaaaaaggcaaaatacagaagcctcaagcccgtgagcagcgcagtctgctgtccagggtggcgcgtgcccctcggtgggaggacaagccaggggcgagcgggaggacgag

SEQ ID NO: 148048 - DNA, 30 bp, Homo sapiens; identical to SEQ ID NO: 67868
  chr4:3338126-3338156
  hypo

SEQ ID NO: 148049 - DNA, 199 bp, Homo sapiens; identical to SEQ ID NO: 18512
  chr4:3345082-3345281
  hypo

SEQ ID NO: 148050 - DNA, 31 bp, Homo sapiens; identical to SEQ ID NO: 18513
  chr4:3363136-3363167
  hypo

SEQ ID NO: 148051 - DNA, 30 bp, Homo sapiens; identical to SEQ ID NO: 18514
  chr4:3363494-3363524
  hypo

SEQ ID NO: 148052 - DNA, 35 bp, Homo sapiens; identical to SEQ ID NO: 67872
  chr4:3368269-3368304
  hypo

SEQ ID NO: 148053 - DNA, 100 bp, Homo sapiens; identical to SEQ ID NO: 67873
  chr4:3375343-3375443
  hypo

SEQ ID NO: 148054 - DNA, 30 bp, Homo sapiens
  chr4:3376129-3376159
  hypo
ctcgattcgtccctcgcatgctgccctccc

SEQ ID NO: 148055 - DNA, 30 bp, Homo sapiens; identical to SEQ ID NO: 18515
  chr4:3399234-3399264
  hypo

SEQ ID NO: 148056 - DNA, 286 bp, Homo sapiens; identical to SEQ ID NO: 67875
  chr4:3403231-3403517
  hypo

SEQ ID NO: 148057 - DNA, 109 bp, Homo sapiens; identical to SEQ ID NO: 67876
  chr4:3413101-3413210
  hypo

SEQ ID NO: 148058 - DNA, 30 bp, Homo sapiens; identical to SEQ ID NO: 18517
  chr4:3413668-3413698
  hypo

SEQ ID NO: 148059 - DNA, 247 bp, Homo sapiens; identical to SEQ ID NO: 67878
  chr4:3415120-3415367
  hypo

SEQ ID NO: 148060 - DNA, 148 bp, Homo sapiens; identical to SEQ ID NO: 18518
  chr4:3415797-3415945
  hypo

SEQ ID NO: 148061 - DNA, 243 bp, Homo sapiens
  chr4:3416699-3416942
  hypo
gcgtgtgagaggttgcgtgtgaggggcgtgtgaggggcgtgtgtgagaggggcgtgtgagagggacgtgtgagagggccacctgtgtgtgaggggcgtgtgaggtcgcgtgtgtgaggggcgtgtgagaggtcgcgtgtgagagggccgcgtgtgtgtgaggggcgtgtgtgagagggccgcgtgtgtgtgaggggcgtgtgtgatagggccgcgtgtgagagggccgcgtgtgtgtgagagg

SEQ ID NO: 148062 - DNA, 756 bp, Homo sapiens
  chr4:3417329-3418085
  hypo
tgtggcctggcttccaggcttcggggctgctttcgtctgctcgcaatgctcagagggcgctgctctcctgcactcccaccttgccaagaccaggtgtgtggcgacacacggcagtattgcccctgcgcagctgctgctgggctagcatcgcccgggtctttgggacactttaagtatccgtttaaacaatcgtagaggagcccgcgcagtgctgctgcattctggccacacttttatttatttattcaagcaagaggtatttactggggcccgtgagaacacatctgtagagcccgggggtgtcgggccttggcaggcagcaggagtgcggggagaggaagccttgccgggctgctcaggtgcctttcctgtcagctttcctacagggcccgggagattttcagtaagtttctctgcagcaaagccaccaccccggtcaacatcgacagccaggcccagctagcagacgacgtcctccgcgcacctcacccagacatgttcaaggagcagcagctgcaggtaaccgcaggctgtgggagcttgtggggagtccaggctagggctcggggtatagggtccaccttcaaagaacacgtgctatcaggcaggccagtggatcgagagcatcacagacgcaggtagagaaacgcagacagaaagtggggctttcagtagggtagagaaacgcagacagaaagtggggctttcagtagggccatgaaataagtcccgaaccactgcgtgtctgtctgcaat

SEQ ID NO: 148063 - DNA, 270 bp, Homo sapiens; identical to SEQ ID NO: 67883
  chr4:3418656-3418926
  hypo

SEQ ID NO: 148064 - DNA, 200 bp, Homo sapiens; identical to SEQ ID NO: 67884
  chr4:3425118-3425318
  hypo

SEQ ID NO: 148065 - DNA, 67 bp, Homo sapiens
  chr4:3425858-3425925
  hypo
agaaagaaaacaccgcgtggggtggtgaccgcaggtgctgggcaggccacgcgagatggcgagagct

SEQ ID NO: 148066 - DNA, 275 bp, Homo sapiens
  chr4:3426135-3426410
  hypo
tgaagcctcttccccgcgctgcaggctccatcctggagtccagaaatctgcaggtgggagacagacctggcctggctcccaggtgtgcccctctggccgactctggggagacgctgcgcaattgtttagcccctgtgtgtcacagtttccctgactgtaaaatggggttggtcgtggcagcgtgctcgtggcatggttggggggcaccagggtggaagggctggctgcggtcaggctcgttccctgtgagctgcggccctcggctgccgaggctg

SEQ ID NO: 148067 - DNA, 30 bp, Homo sapiens; identical to SEQ ID NO: 67886
  chr4:3435510-3435540
  hypo

SEQ ID NO: 148068 - DNA, 30 bp, Homo sapiens
  chr4:3438569-3438599
  hypo
cagcacagtcggagccggcaggaccagcca

SEQ ID NO: 148069 - DNA, 30 bp, Homo sapiens; identical to SEQ ID NO: 18523
  chr4:3439080-3439110
  hypo

SEQ ID NO: 148070 - DNA, 166 bp, Homo sapiens
  chr4:3439562-3439728
  hypo
agaacgggctgggcacgctcaagaggggagtcacaccttccgcccgcagcccggacttgttcacagatgcctcatggaggctgcttccggaagcttggactgagggtgaggaggggcacgctgggattggggaccttggtggccacggagccgctggggcagcaag

SEQ ID NO: 148071 - DNA, 30 bp, Homo sapiens
  chr4:3440054-3440084
  hypo
cctgctcctctgggtcggcaacgtcacccc

SEQ ID NO: 148072 - DNA, 1085 bp, Homo sapiens
  chr4:3446157-3447242
  hypo
cccgacatacaggtgcgccacggggtgtgagccgtgccactgacccctgacgggtgtccctgtccacacccgagtgggaggaatggcctgaggtcacccagaaacaagggacaaggggtggaccccggccccgactccgctgtcgtggggcactgcgcggcccctggcccagctcctcggccctgcccccagcttgtctgagcagcccttgcctgaacgggggcacctgccacctgatcgtggccaccgggaccaccgtgtgtgcctgcccaccaggcttcgctggacggctctgcaacatcggtgagtgggtcagccccccggggtgccctggggcagtgccgggtggacccaccgtgggccggcctcactgcccctctgcccgcagagcctgatgagcgctgcttcttggggaacggcactgggtaccgtggcgtggccagcacctcagcctcgggcctcagctgcctggcctggaactccgatctgctctaccaggagctgcacgtggactccgtgggcgccgcggccctgctgggcctgggcccccatgcctactgccggtcagcaccacgccgctccaggccgccgcatgcggggcaggcaggatttgtcctggggagaggccccccggctccctaggacccaggcggggccagctccgtccagacaggccccggaacctctgcctgggaggctgcccgagggagggccactctcttcccactgctccaggtgcggggaaccgccctgctgggggttccgatgccccctccccatgccctcttcgaggggcagtgtgactccctgccagcccccacttatgcaccgcaggaatccggacaatgacgagaggccctggtgctacgtggtgaaggacagcgcgctctcctgggagtactgccgcctggaggcctgcggtgcgcggctggcggggggtgctgccttgggccccaccgaggtcacagcagttttccccgtgatcctcctagcccctccgcacacctggctactgcatctctgacaaatggggaaactggagctcacgggatcaggctggtccaaggtcacgcagtgggtcggta

SEQ ID NO: 148073 - DNA, 234 bp, Homo sapiens
  chr4:3447781-3448015
  hypo
agtccaactgtcaccggatctcctggcgaccctgcctgagccagcctccccggggcgccaggcctgcggcaggaggcacaagaagaggacgttcctgcggccacgtatcatcggcggctcctcctcgctgcccggctcgcacccctggctggccgccatctacatcggggacagcttctgcgccgggagcctggtccacacctgctgggtggtgtcggccgcccactgcttctc

SEQ ID NO: 148074 - DNA, 50 bp, Homo sapiens; identical to SEQ ID NO: 18526
  chr4:3448499-3448549
  hypo

SEQ ID NO: 148075 - DNA, 100 bp, Homo sapiens; identical to SEQ ID NO: 67892
  chr4:3449285-3449385
  hypo

SEQ ID NO: 148076 - DNA, 78 bp, Homo sapiens; identical to SEQ ID NO: 18527
  chr4:3449841-3449919
  hypo

SEQ ID NO: 148077 - DNA, 30 bp, Homo sapiens; identical to SEQ ID NO: 18528
  chr4:3451201-3451231
  hypo

SEQ ID NO: 148078 - DNA, 150 bp, Homo sapiens; identical to SEQ ID NO: 67895
  chr4:3452961-3453111
  hypo

SEQ ID NO: 148079 - DNA, 242 bp, Homo sapiens
  chr4:3467304-3467546
  hypo
cctttctcctccttgcgtttttctcaatcgtgagcacgtctttctgttatgacaaggtttagcgaatgaaagggaaacccttttatcaaagggctgctcagccacagcgcctggcatggccagtggacgtcgggccgtctgcctcggtgtgggactgcagggtgccctgcagtgggaccacgttcctcaatgtctccaccgcgtcctcactgcggaatgcgtgtctgcgtcccctctctggg

SEQ ID NO: 148080 - DNA, 30 bp, Homo sapiens
  chr4:3468015-3468045
  hypo
cggtgggactgagcccggcctgcaggaggg

SEQ ID NO: 148081 - DNA, 31 bp, Homo sapiens; identical to SEQ ID NO: 67896
  chr4:3468343-3468374
  hypo

SEQ ID NO: 148082 - DNA, 30 bp, Homo sapiens
  chr4:3474250-3474280
  hypo
ggagtcttcctgcgccgtcctctctgctct

SEQ ID NO: 148083 - DNA, 356 bp, Homo sapiens
  chr4:3475058-3475414
  hypo
cggcctccccggggacgccaagggtgcgggcaggcggtgttggctggcgtccctgacggccacgctccttgcagactgcctgctgatgctggtctacaaggacaagtcggagcgtatcaagggcctgcgggagcgcagcagcctgacgctagaggacatctgcgggctggagcccggcctgccctacgagggcttggtccacacgctggccattgtctgcctgtcccaggccatcatgctgggctttgacagccacgaggccatgtgtgcgtgggatgcccggatccgctatgcgctcggcgagggtgagtgacgggggccggggccgggcgggggctccccgttcaggtgtgccg

SEQ ID NO: 148084 - DNA, 381 bp, Homo sapiens
  chr4:3478049-3478430
  hypo
ttgccccgcctgcccgcagtgcataggttccatgtgacagtggctccaggcaccaagttggagagcggcccggctaccctgcacctctgcaatgatgtcctcgtcttggccagggacatccccccggctgtcacggggcagtggaagctgtctgacctccggcgctacggggccgtgccaagcggattcatctttgaaggcgggaccaggtgtgggtactgtaagtacggatgtgtggggtcactgggcagcagcagcaccccccacttcccctgagaactgctggcttcgggccggccgaccccacttgcaggctggcctgctggcatttccagaatgcgccggcaggtggacggagtctccccacgctcgatgtccaag

SEQ ID NO: 148085 - DNA, 30 bp, Homo sapiens
  chr4:3478859-3478889
  hypo
gtctgaggtgcccgccggggctgtgcagga

SEQ ID NO: 148086 - DNA, 368 bp, Homo sapiens
  chr4:3480303-3480671
  hypo
acagaacccgcaaacgggggctggccccacagaacccgcctttgcagctcagtgctgaatgttctcgtccccggtggtaccctggcctgagagaggaagggctctgggaattcggtcaccgacggctgcacaccccgtagggtaggtgggttctggaggccaggctggaaggcttggccgagccacccatccctgtccccagcaggccctgctgggctgtatcctcctggagacaggcgtggccaccaccctgggtggtttaggctgggtcttagactcggccaagcggtggtgttctcaacgcagcactgagtgcaggccgtctggctggagggacggggagtctgcggcacgtgtgggcagcctgg

SEQ ID NO: 148087 - DNA, 30 bp, Homo sapiens
  chr4:3480908-3480938
  hypo
ccggcggcctcggctcgtggctgtgccact

SEQ ID NO: 148088 - DNA, 30 bp, Homo sapiens
  chr4:3496966-3496996
  hypo
acctccggaggtggccgcgccagtcttgtt

SEQ ID NO: 148089 - DNA, 30 bp, Homo sapiens
  chr4:3497256-3497286
  hypo
ctcgtgagtgggcctcgctccgggcgtctg

SEQ ID NO: 148090 - DNA, 30 bp, Homo sapiens
  chr4:3505890-3505920
  hypo
caagatctggcctgcggcccttcaggggtc

SEQ ID NO: 148091 - DNA, 30 bp, Homo sapiens; identical to SEQ ID NO: 18534
  chr4:3507190-3507220
  hypo

SEQ ID NO: 148092 - DNA, 97 bp, Homo sapiens; identical to SEQ ID NO: 67902
  chr4:3512377-3512474
  hypo

SEQ ID NO: 148093 - DNA, 112 bp, Homo sapiens; identical to SEQ ID NO: 67903
  chr4:3514612-3514724
  hypo

SEQ ID NO: 148094 - DNA, 253 bp, Homo sapiens; identical to SEQ ID NO: 67904
  chr4:3515542-3515795
  hypo

SEQ ID NO: 148095 - DNA, 31 bp, Homo sapiens; identical to SEQ ID NO: 18536
  chr4:3516337-3516368
  hypo

SEQ ID NO: 148096 - DNA, 30 bp, Homo sapiens
  chr4:3522835-3522865
  hypo
ggtcccctggaatccggggcccatgcaacc

SEQ ID NO: 148097 - DNA, 72 bp, Homo sapiens; identical to SEQ ID NO: 67906
  chr4:3528238-3528310
  hypo

SEQ ID NO: 148098 - DNA, 31 bp, Homo sapiens; identical to SEQ ID NO: 18537
  chr4:3529879-3529910
  hypo

SEQ ID NO: 148099 - DNA, 30 bp, Homo sapiens; identical to SEQ ID NO: 67908
  chr4:3531930-3531960
  hypo

SEQ ID NO: 148100 - DNA, 93 bp, Homo sapiens
  chr4:3576257-3576350
  hypo
ggggccacaggagcccgcaccgggtccgcggaaggaactcacactcctgcttcaaggtgtggaaggcgacccaagaggcggtacacagaccgc

SEQ ID NO: 148101 - DNA, 151 bp, Homo sapiens; identical to SEQ ID NO: 67909
  chr4:3588427-3588578
  hypo

SEQ ID NO: 148102 - DNA, 30 bp, Homo sapiens
  chr4:3615671-3615701
  hypo
ctacacaacacagaacggagtctcagccac

SEQ ID NO: 148103 - DNA, 216 bp, Homo sapiens
  chr4:3616195-3616411
  hypo
gagagtgtgcaggcccggggcctgggcctacagaggtggagggttttctactctccccagcaccttcgccattgctgagggaagcagctcgtccccaccagcccccagtccacgaaggagaagcaacaaggggacaccccagacccaacggctccagccagccagcctcccggcgcagcccagataaattactgcattgcgcgccgtcgagatttc

SEQ ID NO: 148104 - DNA, 30 bp, Homo sapiens; identical to SEQ ID NO: 67910
  chr4:3643620-3643650
  hypo

SEQ ID NO: 148105 - DNA, 377 bp, Homo sapiens
  chr4:3671150-3671527
  hypo
acttcatcgttgctccgggaggctcacggttcattctgcagctgtctgcgcggccgccccccaactgcagctccatcggtttaaaatgggggccactttatcgcccagcttcctggcagctgctgcagcggcggggaccgaaattggctatttgtgctgctggcccaaacactggctgggccacgccaccagcagtcggggcaccttccacgacacagcgtcatcgagacgtggtttcatcttagcgaacgctgtctgtccccgtggactgaattcagaagccaaactgcagagccccggcccatggcaaaactttccatcttcaaagccgagttgctggcaaccaaggaggcggcccacgccggcgggggtgctgg

SEQ ID NO: 148106 - DNA, 33 bp, Homo sapiens; identical to SEQ ID NO: 67912
  chr4:3681905-3681938
  hypo

SEQ ID NO: 148107 - DNA, 100 bp, Homo sapiens; identical to SEQ ID NO: 67913
  chr4:3682489-3682589
  hypo

SEQ ID NO: 148108 - DNA, 138 bp, Homo sapiens
  chr4:3685350-3685488
  hypo
gatcttcgtgttggccgcgcctgtgcttctcatcctctctccactgccctcgctcctccatctcctcgccgccccacctcctccacccgccccgatcaccgttcaccccaacagccccagcggcgcctcgagctccag

SEQ ID NO: 148109 - DNA, 31 bp, Homo sapiens; identical to SEQ ID NO: 67914
  chr4:3692094-3692125
  hypo

SEQ ID NO: 148110 - DNA, 30 bp, Homo sapiens
  chr4:3728877-3728907
  hypo
aggggccctggggagcggcagggtcggcgc

SEQ ID NO: 148111 - DNA, 162 bp, Homo sapiens
  chr4:3729124-3729286
  hypo
accatgtggacagcgcggggaccttcagttcctgtgttctataagcagcactgacggaaggcgccatgaccctgcggttcaggccccaggcccctgagacccctgatctctgctgcgcccctataattactcagcaggggtggggtgatccgcagcaaatga

SEQ ID NO: 148112 - DNA, 162 bp, Homo sapiens
  chr4:3729585-3729747
  hypo
caaatgatttttatttgctttgccttttcttacattctcccaaatgtccatggtggaaatggtcaaattctgtcatcagaaaagcaagaagcaacacgaagaggtctccctgcagatggcccccgcacagcccagcggggagccccacgtcccccagcctct

SEQ ID NO: 148113 - DNA, 262 bp, Homo sapiens
  chr4:3748238-3748500
  hypo
atgctctcagaaacacgcatgcgtgcgtcatgctctcagaaacacgcatgcgtgcgtcatgctctcagaaacacgcatgcgtgcgtcatgctctcagaaacacgcatgcgtgcgtcatgctctcagaaacacgcatgcgtgagtcatgctctcagaaacacgcatgcgtgagtcatgctctcagaaacacgcatgcgtgagtcatgctctcagaaacacgcatgcgtgagtcatgctctcagaaacacgcatgcgtgagtca

SEQ ID NO: 148114 - DNA, 1340 bp, Homo sapiens; identical to SEQ ID NO: 109688
  chr4:3767150-3768490
  hypo

SEQ ID NO: 148115 - DNA, 30 bp, Homo sapiens
  chr4:3775778-3775808
  hypo
tggtgctgcgggggacgattttccacttca

SEQ ID NO: 148116 - DNA, 209 bp, Homo sapiens
  chr4:3776158-3776367
  hypo
cataattctgccaggcaggatcgatgcacccattttacagatgagaaaactgagctccagaaaggggctgccatagagagatgctgtctgagagccagacgctggaatgtgctccatactcaccccaccacaggggatccctcggcgagccgtcaccgtccacgatattagcttcattctacagatgagaaaaccggctcagagtgtgc

SEQ ID NO: 148117 - DNA, 31 bp, Homo sapiens
  chr4:3782693-3782724
  hypo
catccccaggtgcccccgacatgaggtgagc

SEQ ID NO: 148118 - DNA, 31 bp, Homo sapiens; identical to SEQ ID NO: 18540
  chr4:3808368-3808399
  hypo

SEQ ID NO: 148119 - DNA, 44 bp, Homo sapiens; identical to SEQ ID NO: 67919
  chr4:3810693-3810737
  hypo

SEQ ID NO: 148120 - DNA, 31 bp, Homo sapiens; identical to SEQ ID NO: 67920
  chr4:3826670-3826701
  hypo

SEQ ID NO: 148121 - DNA, 98 bp, Homo sapiens; identical to SEQ ID NO: 109692
  chr4:3873083-3873181
  hypo

SEQ ID NO: 148122 - DNA, 693 bp, Homo sapiens; identical to SEQ ID NO: 109693
  chr4:3873271-3873964
  hypo

SEQ ID NO: 148123 - DNA, 65 bp, Homo sapiens; identical to SEQ ID NO: 18542
  chr4:3944639-3944704
  hypo

SEQ ID NO: 148124 - DNA, 30 bp, Homo sapiens
  chr4:3947647-3947677
  hypo
tgtgcaggactctgtcgtggaacccagtac

SEQ ID NO: 148125 - DNA, 31 bp, Homo sapiens; identical to SEQ ID NO: 67924
  chr4:3949947-3949978
  hypo

SEQ ID NO: 148126 - DNA, 31 bp, Homo sapiens; identical to SEQ ID NO: 18543
  chr4:3951479-3951510
  hypo

SEQ ID NO: 148127 - DNA, 24 bp, Homo sapiens
  chr4:4167547-4167571
  hypo
tgagtccatcgcgggtcctaagag

SEQ ID NO: 148128 - DNA, 31 bp, Homo sapiens; identical to SEQ ID NO: 67926
  chr4:4199685-4199716
  hypo

SEQ ID NO: 148129 - DNA, 23 bp, Homo sapiens
  chr4:4221140-4221163
  hypo
acagattgccgggcgcggtggct

SEQ ID NO: 148130 - DNA, 22 bp, Homo sapiens
  chr4:4221402-4221424
  hypo
gacagagcgagactctgtctca

SEQ ID NO: 148131 - DNA, 37 bp, Homo sapiens; identical to SEQ ID NO: 18545
  chr4:4251227-4251264
  hypo

SEQ ID NO: 148132 - DNA, 30 bp, Homo sapiens
  chr4:4251870-4251900
  hypo
tactcccaagagcatcgccgctatcccagg

SEQ ID NO: 148133 - DNA, 20 bp, Homo sapiens
  chr4:4288387-4288407
  hypo
tttgagaaaggagtctcgct

SEQ ID NO: 148134 - DNA, 1579 bp, Homo sapiens; identical to SEQ ID NO: 109701
  chr4:4387592-4389171
  hypo

SEQ ID NO: 148135 - DNA, 726 bp, Homo sapiens; identical to SEQ ID NO: 109702
  chr4:4389207-4389933
  hypo

SEQ ID NO: 148136 - DNA, 299 bp, Homo sapiens
  chr4:4417393-4417692
  hypo
cctgtagggcagggccgtttctgagccatctcgtatgccagccctgagcggggccgccactccacaggtgttggccgcatcaggtcttgcaggactctgctgggtgccgaggtgggagggaagaggggaacccttggtccgtttccctgagggatgacgagcagcagatggagaggacagcgtgaaggggcgtggcggtgaggctggaggggagtttgtctggcctgcagagcctccttcctgatgcacgcgctgctggtctgaatgggctgtttgttctgtagcgtgtcaggtgcttc

SEQ ID NO: 148137 - DNA, 30 bp, Homo sapiens; identical to SEQ ID NO: 67935
  chr4:4417920-4417950
  hypo

SEQ ID NO: 148138 - DNA, 31 bp, Homo sapiens; identical to SEQ ID NO: 67936
  chr4:4475309-4475340
  hypo

SEQ ID NO: 148139 - DNA, 30 bp, Homo sapiens
  chr4:4475714-4475744
  hypo
gctgaaagtccctgccgcacaccccgcacc

SEQ ID NO: 148140 - DNA, 30 bp, Homo sapiens
  chr4:4485868-4485898
  hypo
gtgagccaccgtgcccggccccttcctctc

SEQ ID NO: 148141 - DNA, 30 bp, Homo sapiens
  chr4:4486389-4486419
  hypo
tccacaaaaacatcacggagaggctttgct

SEQ ID NO: 148142 - DNA, 30 bp, Homo sapiens
  chr4:4486694-4486724
  hypo
gatccgacccaacttcgcactgctttgcgt

SEQ ID NO: 148143 - DNA, 349 bp, Homo sapiens
  chr4:4487390-4487739
  hypo
cccagagctcacacacgctgggtggacggcaggcactgctgaaacaggcatttcttttctgccaagcacacatagataacctcctaccattaggtttctgtgggatgcacctacagcgtgcagcctgtccctgccctgtcccctatgcgctctcctccgtatcttttctcctgctcccaaagctctcctttttctcgatgctactggtactttcctgcacggaacagtctttgactcaccacacactttttctgggatcactgcttatactagaattccatgagcagcctatatcctttgctctcttagaagtacgagtggtggatggtcagcacgcaggcagagggcg

SEQ ID NO: 148144 - DNA, 30 bp, Homo sapiens
  chr4:4498174-4498204
  hypo
aaattcaccccctttcgctcaccccatcag

SEQ ID NO: 148145 - DNA, 66 bp, Homo sapiens
  chr4:4498751-4498817
  hypo
accccacaaagccagcgtttcaaccagagcagtttgtgaggatgatggctccgaatctaggccctg

SEQ ID NO: 148146 - DNA, 456 bp, Homo sapiens
  chr4:4509155-4509611
  hypo
agtccggctagtatgcgaactggagaaaaagttcagtggaaagcatattatctttatcgctcagaggagaattctgcctaagccaattcgaaaaagccgcacaaaaaataagcaaaagcgtcccaggagtgcactctgacagctgtgcacgacgcaagccttgaggacttgatcttcccaagcgaaattgtgggcaagagaattcacgtgaactggatggcagccggctcataaaggttcgtttggacaaagcccagcagaacaacgtggaacacagactgaaactttttctggtgtctctaagaagctcacgggcaaggatgttaattttgaattcccagagtttcaattgtaaacaaaaatgactaaataaaatatattcacagtaaaaaaaaaaaaaaaaaaaaaagttaaaaagcggcagctagctagaaaaatatacgagtttcctagtcc

SEQ ID NO: 148147 - DNA, 346 bp, Homo sapiens
  chr4:4614144-4614490
  hypo
gcgcagctcatgtagcgccaggtggcctggagtggcttaaaggtacagcctccgcagccctccagagcagctggatcaggaagcccagtgtcggtggggtctttacttaagcagacagaatagttatcctcaacacgtgacatgtgtctagcccccactgtgtctgctcgctccagccaagtgcttgcaaagtaattttattccaggtttgggtccttttatgaatgagtaaacgagcttggcaaggttgaatgacctgcccacgggcacttagccaagacgcaagccccatctgcttgcttccacaccgtctggaagcctcactggctgggttcaaaaagggagg

SEQ ID NO: 148148 - DNA, 30 bp, Homo sapiens; identical to SEQ ID NO: 18549
  chr4:4668217-4668247
  hypo

SEQ ID NO: 148149 - DNA, 30 bp, Homo sapiens
  chr4:4698480-4698510
  hypo
gccggcctcccggaacgccattgtgctggc

SEQ ID NO: 148150 - DNA, 2231 bp, Homo sapiens; identical to SEQ ID NO: 109717
  chr4:4861086-4863317
  hypo

SEQ ID NO: 148151 - DNA, 57 bp, Homo sapiens
  chr4:4921830-4921887
  hypo
ccatgtgaatcatggcgccgctggttgcccaggccaggcccccggccaacctctgca

SEQ ID NO: 148152 - DNA, 313 bp, Homo sapiens
  chr4:5024028-5024341
  hypo
gacttggtgactactcgtgttactcagagattaaggcacaagcccactaagaaacctacgcaggacagcctgacgtggctccccaccaggggctccctatgagacgccgcactggatacaggctggtggacccccgcacgtgtgttctgttctcaaatgtctccttcaccacgaatcacctgcatcctcccaccagctctttctctgcccccttctgaggctccttcagcagttggctgctccgaatattaaaaatccaggcaggaatttgcccacaaatcaggtaagcccttgtctccgccaaaaggtctct

SEQ ID NO: 148153 - DNA, 1605 bp, Homo sapiens; identical to SEQ ID NO: 109730
  chr4:5052364-5053969
  hypo

SEQ ID NO: 148154 - DNA, 30 bp, Homo sapiens
  chr4:5422139-5422169
  hypo
gagagatcaactgggcgagattcagcaact

SEQ ID NO: 148155 - DNA, 31 bp, Homo sapiens; identical to SEQ ID NO: 67943
  chr4:5448003-5448034
  hypo

SEQ ID NO: 148156 - DNA, 30 bp, Homo sapiens
  chr4:5586453-5586483
  hypo
aggccgacagagtctcggtcacccgggacg

SEQ ID NO: 148157 - DNA, 31 bp, Homo sapiens; identical to SEQ ID NO: 67944
  chr4:5753889-5753920
  hypo

SEQ ID NO: 148158 - DNA, 31 bp, Homo sapiens; identical to SEQ ID NO: 18553
  chr4:5754867-5754898
  hypo

SEQ ID NO: 148159 - DNA, 30 bp, Homo sapiens
  chr4:5761560-5761590
  hypo
gagggcgcgtcctgacgacacgcgcccaag

SEQ ID NO: 148160 - DNA, 30 bp, Homo sapiens
  chr4:5830262-5830292
  hypo
tccgcggaatgaagcggcccatgcccttgt

SEQ ID NO: 148161 - DNA, 401 bp, Homo sapiens; identical to SEQ ID NO: 3146
  chr4:5889212-5889613
  hypo

SEQ ID NO: 148162 - DNA, 920 bp, Homo sapiens; identical to SEQ ID NO: 109736
  chr4:5889852-5890772
  hypo

SEQ ID NO: 148163 - DNA, 30 bp, Homo sapiens
  chr4:5900245-5900275
  hypo
gcagcagagccgtcgcgtgtctggccccaa

SEQ ID NO: 148164 - DNA, 237 bp, Homo sapiens; identical to SEQ ID NO: 18556
  chr4:5970095-5970332
  hypo

SEQ ID NO: 148165 - DNA, 31 bp, Homo sapiens; identical to SEQ ID NO: 18557
  chr4:6022304-6022335
  hypo

SEQ ID NO: 148166 - DNA, 30 bp, Homo sapiens; identical to SEQ ID NO: 67950
  chr4:6058355-6058385
  hypo

SEQ ID NO: 148167 - DNA, 259 bp, Homo sapiens; identical to SEQ ID NO: 67951
  chr4:6058774-6059033
  hypo

SEQ ID NO: 148168 - DNA, 107 bp, Homo sapiens
  chr4:6064891-6064998
  hypo
aagtgtgtaaagacacaaatacgaaggagctccatgcatggttcacaggtgtggaaaacgacacagcataaatccctcatcagtgcgtgctgctcatccatgggaaa

SEQ ID NO: 148169 - DNA, 206 bp, Homo sapiens
  chr4:6176207-6176413
  hypo
acgggccctcaggcccgatggttccctcttgtccttgggagctggccacatgcaccagagcgaaccagggtgcagaagaacaggcctgggctcgcagctctcaacctgctgggtcctgtggagaggtcgcaacactgctgcagccctcagtttccccatctctagagccttaagtcttccccgaaaccccccggagcagctaaaac

SEQ ID NO: 148170 - DNA, 30 bp, Homo sapiens
  chr4:6193987-6194017
  hypo
tcagtccacaggagccgcattgcagtgctc

SEQ ID NO: 148171 - DNA, 823 bp, Homo sapiens; identical to SEQ ID NO: 40259
  chr4:6271358-6272181
  hypo

SEQ ID NO: 148172 - DNA, 30 bp, Homo sapiens; identical to SEQ ID NO: 67953
  chr4:6303250-6303280
  hypo

SEQ ID NO: 148173 - DNA, 223 bp, Homo sapiens
  chr4:6330983-6331206
  hypo
cttacctgtcgctcccgttccaggcacattcaaacttgtcgaaaatgcagtcgttctcgtacagggaacagagcttgctccgaaggtagtcatggacctggtgggataagggatgaggtgagtggacggggcgtcccgaccatcctggcccttccacaagaagggtctcaaagagcagcgagggtctgcatgccctgacatggcccagcgcagacctgctcat

SEQ ID NO: 148174 - DNA, 31 bp, Homo sapiens; identical to SEQ ID NO: 67954
  chr4:6374029-6374060
  hypo

SEQ ID NO: 148175 - DNA, 31 bp, Homo sapiens; identical to SEQ ID NO: 67955
  chr4:6423229-6423260
  hypo

SEQ ID NO: 148176 - DNA, 161 bp, Homo sapiens
  chr4:6525351-6525512
  hypo
aagcggcagggccaccgcaaaaaaagcttggtaccgccgcaacaaattaaacctggaattatcctgtgacctaccaattccactcctgggtgtctatcacggaacactgaaaacacacatccacatgaacactggaacgcgaatgttcccagcagccttat

SEQ ID NO: 148177 - DNA, 30 bp, Homo sapiens; identical to SEQ ID NO: 18559
  chr4:6536899-6536929
  hypo

SEQ ID NO: 148178 - DNA, 93 bp, Homo sapiens
  chr4:6540025-6540118
  hypo
accccaccccacggacgcttcctcggggtacagatatcggcatggagaggtgcccgccgcccatctgccaagttccaccgacacacaggtgca

SEQ ID NO: 148179 - DNA, 30 bp, Homo sapiens; identical to SEQ ID NO: 67957
  chr4:6579186-6579216
  hypo

SEQ ID NO: 148180 - DNA, 141 bp, Homo sapiens
  chr4:6580066-6580207
  hypo
gccatgctcaggagccgtaactggcttttttctctctgcctgcccatgtcaaggtccgccagctcctggaggaaggacgcctggaatttgtcatcggaggccaggtcatgcatgacgaggctgtgacgcaccttgatgacc

SEQ ID NO: 148181 - DNA, 183 bp, Homo sapiens; identical to SEQ ID NO: 18560
  chr4:6586517-6586700
  hypo

SEQ ID NO: 148182 - DNA, 95 bp, Homo sapiens; identical to SEQ ID NO: 67959
  chr4:6588778-6588873
  hypo

SEQ ID NO: 148183 - DNA, 41 bp, Homo sapiens; identical to SEQ ID NO: 18562
  chr4:6590874-6590915
  hypo

SEQ ID NO: 148184 - DNA, 31 bp, Homo sapiens; identical to SEQ ID NO: 67961
  chr4:6600202-6600233
  hypo

SEQ ID NO: 148185 - DNA, 305 bp, Homo sapiens
  chr4:6600487-6600792
  hypo
gattgaacctgaacacggtgctgcccagccttggcagagagtacgccggtgtcctcaggggcccggtcccttcctggctcctggcactccctcccgaactccacttggctgacatcacagcagggcagccgtgggaccagcctctttgactgtgagttttcccacgtgtagagtgactgatcacatgccagtgtgcctgggactgaggggtttccaaactgggaagatcctggacaaatgaagacaggttggcggccctccgcccgcatgagacttttgtgtgcataggccgccaggtcccaccc

SEQ ID NO: 148186 - DNA, 137 bp, Homo sapiens; identical to SEQ ID NO: 67963
  chr4:6616020-6616157
  hypo

SEQ ID NO: 148187 - DNA, 20 bp, Homo sapiens
  chr4:6626826-6626846
  hypo
gactccgtctcaaaaaaaaa

SEQ ID NO: 148188 - DNA, 42 bp, Homo sapiens; identical to SEQ ID NO: 67965
  chr4:6658783-6658825
  hypo

SEQ ID NO: 148189 - DNA, 30 bp, Homo sapiens
  chr4:6669546-6669576
  hypo
tcttcagcatccttcggcagcactccattt

SEQ ID NO: 148190 - DNA, 380 bp, Homo sapiens
  chr4:6669887-6670267
  hypo
agagatctttttacatagtctccacagcatggcaatttcaggggagccagacttcgtatatggtggctttggcgtccaaatgtacaaaacccaggagagtaagcatcggaagtcccatagcatctctttgccatatcaccttcacaaagtcccgccagggtcaaagggaggagacacagactccacctcttgatgggcatggcaaggttctggaagagcaggtgcaactgttagcaattgcattgtggccgtttcttgaaaatacaacgtgcaagacaccacgttttactgccccgcccggctagcagtggacgtggagacagctttgttgttgtggccgtgatgcgtcccacactccagtggctcgcgcttcctgtacc

SEQ ID NO: 148191 - DNA, 112 bp, Homo sapiens; identical to SEQ ID NO: 67967
  chr4:6686432-6686544
  hypo

SEQ ID NO: 148192 - DNA, 190 bp, Homo sapiens
  chr4:6695027-6695217
  hypo
cctattcatctgccttctgcccgttgattttcagcaaactcccagaggatgaaggggagttttctgtttggccccacaggggaggagcgagcgagattgacgtggaagctgggcctctgaaggacacagagtgctctaagaaagggacgatggggcagatccatgttcacaaacacgcccatgtgaattc

SEQ ID NO: 148193 - DNA, 102 bp, Homo sapiens
  chr4:6699158-6699260
  hypo
tttattcatctacttcgtaattcatttagtcggtcacgtagccactcattgaacctgggcccctccatctctccaaacagcatgttttcttcaagtaacata

SEQ ID NO: 148194 - DNA, 123 bp, Homo sapiens; identical to SEQ ID NO: 40267
  chr4:6717791-6717914
  hypo

SEQ ID NO: 148195 - DNA, 27 bp, Homo sapiens
  chr4:6719845-6719872
  hypo
cgtgagccaccgcgcccgtccagagca

SEQ ID NO: 148196 - DNA, 31 bp, Homo sapiens; identical to SEQ ID NO: 67970
  chr4:6724730-6724761
  hypo

SEQ ID NO: 148197 - DNA, 58 bp, Homo sapiens; identical to SEQ ID NO: 67971
  chr4:6726064-6726122
  hypo

SEQ ID NO: 148198 - DNA, 520 bp, Homo sapiens
  chr4:6733152-6733672
  hypo
tgcctgtagccgccccgtcccacagacagaagcacacacaggcgcctctcctcatgtgcagctggctctgagattcatggaacaagaagagccaactcctaggaggaggccagttcaaattctgcctttttccggctgtgtactcttggagaagttacacacctctctgaaaaattgttgaaagtaaacttactgcacaggacactttctgtgctcagttatgtctgccgagttcagctggcgtgcaggcactgccacaggccccgagaaaagaacggggtgcagagcaggggctgctttcagggacccgccgtgctagtgaaggtggaacggtaaagagggtcccgggtttaagggcgcgggcagtgatgggagcacagacccagtgaggcaggggagggtgagggaggccttctgcagagggggtaccctgcagacagagtcagggagagatcaagagacggggatggccaggagggcacagggctcactggccaggcaacatcgccattatttctgt

SEQ ID NO: 148199 - DNA, 42 bp, Homo sapiens; identical to SEQ ID NO: 67973
  chr4:6735825-6735867
  hypo

SEQ ID NO: 148200 - DNA, 97 bp, Homo sapiens; identical to SEQ ID NO: 67974
  chr4:6738168-6738265
  hypo

SEQ ID NO: 148201 - DNA, 254 bp, Homo sapiens
  chr4:6748303-6748557
  hypo
gagatctggggagttctgggccgtccaccggcaaaggacaatggatctccaaggggtgcggccagcggatgggtgatggcatggatggagggtgggtgcatcaatgctggagcatcaactctgtgtgcccctgcggggagaatcgcccctgccgaagccccggctggtccaaaaccacgccagccgctttaggggtgtctgtggacccaggaccacacagcctcaagagccaagagtcccgagtgtgtgcacct

SEQ ID NO: 148202 - DNA, 100 bp, Homo sapiens
  chr4:6765323-6765423
  hypo
gcgtgctggggcaagcgacgcctgggaatatgaagcgaacgccacacactagaacgcgccctgggagctggcctccggtgggggacgcaggtgttgaaga

SEQ ID NO: 148203 - DNA, 171 bp, Homo sapiens; identical to SEQ ID NO: 67976
  chr4:6769433-6769604
  hypo

SEQ ID NO: 148204 - DNA, 35 bp, Homo sapiens; identical to SEQ ID NO: 18567
  chr4:6786667-6786702
  hypo

SEQ ID NO: 148205 - DNA, 35 bp, Homo sapiens; identical to SEQ ID NO: 18568
  chr4:6786941-6786976
  hypo

SEQ ID NO: 148206 - DNA, 30 bp, Homo sapiens
  chr4:6806261-6806291
  hypo
gataaaggtagggcgcggtggactctgccc

SEQ ID NO: 148207 - DNA, 94 bp, Homo sapiens; identical to SEQ ID NO: 67979
  chr4:6883784-6883878
  hypo

SEQ ID NO: 148208 - DNA, 36 bp, Homo sapiens
  chr4:6902911-6902947
  hypo
ccttccccggctgtgcggcgcggggctgggagccct

SEQ ID NO: 148209 - DNA, 30 bp, Homo sapiens
  chr4:6904249-6904279
  hypo
tcacgtgtggcggggcgggggttcccgcag

SEQ ID NO: 148210 - DNA, 26 bp, Homo sapiens
  chr4:6904658-6904684
  hypo
ctttctggccaggcacggtggctcac

SEQ ID NO: 148211 - DNA, 30 bp, Homo sapiens; identical to SEQ ID NO: 18571
  chr4:6915960-6915990
  hypo

SEQ ID NO: 148212 - DNA, 30 bp, Homo sapiens; identical to SEQ ID NO: 67982
  chr4:6924638-6924668
  hypo

SEQ ID NO: 148213 - DNA, 212 bp, Homo sapiens; identical to SEQ ID NO: 67983
  chr4:6925273-6925485
  hypo

SEQ ID NO: 148214 - DNA, 30 bp, Homo sapiens
  chr4:6941629-6941659
  hypo
cgaaggccctgaggccggcggggactggcc

SEQ ID NO: 148215 - DNA, 25 bp, Homo sapiens
  chr4:6942920-6942945
  hypo
ttttttttttgagatgcggtctcac

SEQ ID NO: 148216 - DNA, 157 bp, Homo sapiens; identical to SEQ ID NO: 67985
  chr4:6946475-6946632
  hypo

SEQ ID NO: 148217 - DNA, 179 bp, Homo sapiens; identical to SEQ ID NO: 18573
  chr4:6950155-6950334
  hypo

SEQ ID NO: 148218 - DNA, 31 bp, Homo sapiens; identical to SEQ ID NO: 18574
  chr4:6952006-6952037
  hypo

SEQ ID NO: 148219 - DNA, 21 bp, Homo sapiens
  chr4:6956614-6956635
  hypo
agcggccgtgcccggcctgga

SEQ ID NO: 148220 - DNA, 173 bp, Homo sapiens; identical to SEQ ID NO: 67989
  chr4:6956966-6957139
  hypo

SEQ ID NO: 148221 - DNA, 38 bp, Homo sapiens
  chr4:6957577-6957615
  hypo
tagcagcctcggacacgtaagtccgagtcgcagctctg

SEQ ID NO: 148222 - DNA, 115 bp, Homo sapiens
  chr4:6958170-6958285
  hypo
cacaggctcccaacacgccatccccgctgatggctcctgcgcacgcgcctacacagacctgccattgagcgcctagagtgtgtgggatgactgacacgcccggtcccccttcact

SEQ ID NO: 148223 - DNA, 105 bp, Homo sapiens; identical to SEQ ID NO: 67991
  chr4:6964579-6964684
  hypo

SEQ ID NO: 148224 - DNA, 162 bp, Homo sapiens
  chr4:6974647-6974809
  hypo
gctttacaacagactcggtaactctttccgacataacactgtgtacataggctgtagggattgacgtcgttgttggaaatgaggttgagcggaaagttaatgtcctggttggactctgagggtgctgctgattgttggaaagatagccgcagggaggatagg

SEQ ID NO: 148225 - DNA, 30 bp, Homo sapiens
  chr4:6975181-6975211
  hypo
gaagtgaacaggtcccggtcccaggttaga

SEQ ID NO: 148226 - DNA, 283 bp, Homo sapiens
  chr4:6995746-6996029
  hypo
cctttagtcagcggcttttcattctgaatagcaggaaaggtttttggcgaattgtcctcgaaattggcttaaaagagtttcatgacaaaacaactttcttactttccgaaggacttcatcctatctgaaaggacctggagtcatccctggtttctttgtcctaggaatatgaagacaaggctggaagacctagcaagccaccctctccaaagcagaatgtgaggaagaatcttgactttgaaccactttccaccaccgcactcatcctcgaggacagaccagc

SEQ ID NO: 148227 - DNA, 219 bp, Homo sapiens; identical to SEQ ID NO: 67992
  chr4:7000530-7000749
  hypo

SEQ ID NO: 148228 - DNA, 84 bp, Homo sapiens; identical to SEQ ID NO: 67993
  chr4:7003854-7003938
  hypo

SEQ ID NO: 148229 - DNA, 191 bp, Homo sapiens; identical to SEQ ID NO: 67994
  chr4:7004174-7004365
  hypo

SEQ ID NO: 148230 - DNA, 320 bp, Homo sapiens
  chr4:7006524-7006844
  hypo
aaaaatacatgtgcacgtaatacttacccagaggcttttcttccagagctctttgacatctgtcttgcccgagccaaggagaggtggcggtcccttagcacaggaggctctgaagtggagaacgaaggtagaatgtcttctaaaaccagcggactgctgtggtcaattatgtttgtcattctttattacatagtgaagaaagttgacgttaactacagtagagattgttgtggagtcataaaaagctccacgagaaaagggttttttttgttttgttttttttagcaaaaattaaaggtaaaaactttttataagaaatt

SEQ ID NO: 148231 - DNA, 105 bp, Homo sapiens
  chr4:7015397-7015502
  hypo
gactcagacatgagtcgtgtagccccctggaagtgccaggggttggacgaggcatgcctgcttttccagatacttttttttttttttttatgagatggagtctcg

SEQ ID NO: 148232 - DNA, 30 bp, Homo sapiens
  chr4:7033140-7033170
  hypo
gtacagacggaggagcgagcaacacacgtc

SEQ ID NO: 148233 - DNA, 135 bp, Homo sapiens
  chr4:7033373-7033508
  hypo
tggaagcagggcccacgtggcggtccgctggcaggctggtcctggggagcattctgcggacccggtcacgggcttggttagtcatgcgtacatgtgtgccttggggtgctctgcactccacggcccttctcagcc

SEQ ID NO: 148234 - DNA, 109 bp, Homo sapiens; identical to SEQ ID NO: 18577
  chr4:7035496-7035605
  hypo

SEQ ID NO: 148235 - DNA, 154 bp, Homo sapiens; identical to SEQ ID NO: 67998
  chr4:7035947-7036101
  hypo

SEQ ID NO: 148236 - DNA, 20 bp, Homo sapiens
  chr4:7038430-7038450
  hypo
ttccttggccgggcgcggtg

SEQ ID NO: 148237 - DNA, 30 bp, Homo sapiens; identical to SEQ ID NO: 67999
  chr4:7043062-7043092
  hypo

SEQ ID NO: 148238 - DNA, 478 bp, Homo sapiens; identical to SEQ ID NO: 68000
  chr4:7047025-7047503
  hypo

SEQ ID NO: 148239 - DNA, 30 bp, Homo sapiens; identical to SEQ ID NO: 68001
  chr4:7048911-7048941
  hypo

SEQ ID NO: 148240 - DNA, 120 bp, Homo sapiens
  chr4:7167401-7167521
  hypo
cgcccttctgcaggaacgtcccgagtgtgaatctcggcctttgtgatccagctgtctcgcccgatgccctcctcctgcttgggcagacacacaggctcgcaaggccggttctggaggccc

SEQ ID NO: 148241 - DNA, 110 bp, Homo sapiens
  chr4:7218649-7218759
  hypo
ttccaattctccgtccgcactgcgtggcggttcccgtggctcttctgatcccccatccgcactgtgtggcggttcccgtggctcttccaatcctccgaccgcactacagc

SEQ ID NO: 148242 - DNA, 30 bp, Homo sapiens; identical to SEQ ID NO: 18582
  chr4:7251436-7251466
  hypo

SEQ ID NO: 148243 - DNA, 30 bp, Homo sapiens
  chr4:7265206-7265236
  hypo
gtcctgggaaggagccgggcgtgtccgacc

SEQ ID NO: 148244 - DNA, 30 bp, Homo sapiens
  chr4:7282754-7282784
  hypo
accacaaatgcgagtcgcgtgtctgaacgt

SEQ ID NO: 148245 - DNA, 30 bp, Homo sapiens
  chr4:7283013-7283043
  hypo
cattttgcccatctccgcttgtcggtgatg

SEQ ID NO: 148246 - DNA, 30 bp, Homo sapiens
  chr4:7319765-7319795
  hypo
cgcagggcagacagtcgcgtatcgtgcaag

SEQ ID NO: 148247 - DNA, 211 bp, Homo sapiens
  chr4:7395596-7395807
  hypo
tagtgcagagccaagcgtggaacccgggtggtctgacctcacttcagggtccttctccttgatgactgccgagtcaggtccttctccttgatgactgccgagtcagggcgtggtggggctgccttgctgtctggcttctccagcactggcccttcctgggcgacctccttgtttcagccctgggcaaagccaacgccgcaggaacccaaag

SEQ ID NO: 148248 - DNA, 31 bp, Homo sapiens; identical to SEQ ID NO: 68004
  chr4:7431090-7431121
  hypo

SEQ ID NO: 148249 - DNA, 218 bp, Homo sapiens; identical to SEQ ID NO: 18583
  chr4:7432356-7432574
  hypo

SEQ ID NO: 148250 - DNA, 31 bp, Homo sapiens; identical to SEQ ID NO: 68006
  chr4:7445128-7445159
  hypo

SEQ ID NO: 148251 - DNA, 30 bp, Homo sapiens
  chr4:7449700-7449730
  hypo
ttttgccacatatgccgctgtgctgccggc

SEQ ID NO: 148252 - DNA, 30 bp, Homo sapiens; identical to SEQ ID NO: 68007
  chr4:7449966-7449996
  hypo

SEQ ID NO: 148253 - DNA, 119 bp, Homo sapiens
  chr4:7472894-7473013
  hypo
gcacccgcccgctatcggggccagcatcctgcatccttccccgccggccccgcttccccgctccgctcagctcctgcctcgcgcaatgccatcttcagatttcacggaacacatttctg

SEQ ID NO: 148254 - DNA, 30 bp, Homo sapiens
  chr4:7473298-7473328
  hypo
cccctaccccgttctcggttcctggactca

SEQ ID NO: 148255 - DNA, 30 bp, Homo sapiens
  chr4:7483205-7483235
  hypo
ctggacatgtggagtcggcatccggcaggg

SEQ ID NO: 148256 - DNA, 30 bp, Homo sapiens
  chr4:7483599-7483629
  hypo
cgctcatccacctgacgccgttcagacctg

SEQ ID NO: 148257 - DNA, 30 bp, Homo sapiens; identical to SEQ ID NO: 68008
  chr4:7501551-7501581
  hypo

SEQ ID NO: 148258 - DNA, 30 bp, Homo sapiens
  chr4:7501873-7501903
  hypo
ccctgcccggtggtacgtccagctcccacc

SEQ ID NO: 148259 - DNA, 30 bp, Homo sapiens
  chr4:7522328-7522358
  hypo
gctggttgggagacgcggctcagggcgtgg

SEQ ID NO: 148260 - DNA, 30 bp, Homo sapiens
  chr4:7523035-7523065
  hypo
ctggcagggtctcctcgtccctaacactgg

SEQ ID NO: 148261 - DNA, 31 bp, Homo sapiens; identical to SEQ ID NO: 68009
  chr4:7528960-7528991
  hypo

SEQ ID NO: 148262 - DNA, 30 bp, Homo sapiens; identical to SEQ ID NO: 18584
  chr4:7543512-7543542
  hypo

SEQ ID NO: 148263 - DNA, 483 bp, Homo sapiens
  chr4:7600669-7601152
  hypo
tggctgttgttttccattgcacggtgccgatgcccttgcaggcggcagggttgaagcaagggctcttgaggaggcagccgggagaagtgggccgatgagaggttgcttgcctgagtggagccttgttgagacccatcctccaagaacacaagggctgttaagtcaagagggaacaagtccttccttccgcaggcttctcatggccgccctgcaagacggcggccccagctcacccgagatctccacagctcttgagttcctgagtgaagtcagcctgaccccagaaggccccttctgcccttcagcctctgctcccctgccagccaggactgggagccaactggtgtggtctcccctagagcacgggtgaggactgaagtggcggtgatccacgtgccaggcacttggcacgggtgcttctctgcagcctcagaaacagcaccgtcccccgccaagcccggtgtgctccgtgcagatgttgat

SEQ ID NO: 148264 - DNA, 195 bp, Homo sapiens
  chr4:7647750-7647945
  hypo
tcaaacgtgttcattcggtcagcaaatgggccttgcgcacccggcagccacggattccgggctaccgctggtgccgcaggtgagcgaggcaggtgtgtgcccccgggctgtgagcggcttagccgaggagcaggagataaactcccaggacgcaaggaagtcagcaaacagctgtgcaggcgtgagctccgcaca

SEQ ID NO: 148265 - DNA, 281 bp, Homo sapiens; identical to SEQ ID NO: 68012
  chr4:7666009-7666290
  hypo

SEQ ID NO: 148266 - DNA, 537 bp, Homo sapiens; identical to SEQ ID NO: 68013
  chr4:7741248-7741785
  hypo

SEQ ID NO: 148267 - DNA, 70 bp, Homo sapiens; identical to SEQ ID NO: 68014
  chr4:7755967-7756037
  hypo

SEQ ID NO: 148268 - DNA, 43 bp, Homo sapiens; identical to SEQ ID NO: 68015
  chr4:7756595-7756638
  hypo

SEQ ID NO: 148269 - DNA, 1059 bp, Homo sapiens; identical to SEQ ID NO: 68016
  chr4:7757466-7758525
  hypo

SEQ ID NO: 148270 - DNA, 30 bp, Homo sapiens; identical to SEQ ID NO: 68017
  chr4:7770624-7770654
  hypo

SEQ ID NO: 148271 - DNA, 31 bp, Homo sapiens; identical to SEQ ID NO: 18587
  chr4:7775800-7775831
  hypo

SEQ ID NO: 148272 - DNA, 75 bp, Homo sapiens; identical to SEQ ID NO: 68019
  chr4:7789548-7789623
  hypo

SEQ ID NO: 148273 - DNA, 45 bp, Homo sapiens; identical to SEQ ID NO: 68020
  chr4:7791291-7791336
  hypo

SEQ ID NO: 148274 - DNA, 35 bp, Homo sapiens; identical to SEQ ID NO: 68021
  chr4:7812694-7812729
  hypo

SEQ ID NO: 148275 - DNA, 307 bp, Homo sapiens; identical to SEQ ID NO: 18589
  chr4:7813250-7813557
  hypo

SEQ ID NO: 148276 - DNA, 31 bp, Homo sapiens; identical to SEQ ID NO: 18590
  chr4:7828943-7828974
  hypo

SEQ ID NO: 148277 - DNA, 220 bp, Homo sapiens; identical to SEQ ID NO: 68024
  chr4:7844867-7845087
  hypo

SEQ ID NO: 148278 - DNA, 79 bp, Homo sapiens
  chr4:7896169-7896248
  hypo
tttagcacagaggagcgtgaattctgaggcagaagagacgtacatgtcaagacaagcctggtgacggcggcaaccccgg

SEQ ID NO: 148279 - DNA, 50 bp, Homo sapiens; identical to SEQ ID NO: 68025
  chr4:7967942-7967992
  hypo

SEQ ID NO: 148280 - DNA, 31 bp, Homo sapiens; identical to SEQ ID NO: 68026
  chr4:7973586-7973617
  hypo

SEQ ID NO: 148281 - DNA, 31 bp, Homo sapiens; identical to SEQ ID NO: 18592
  chr4:7984131-7984162
  hypo

SEQ ID NO: 148282 - DNA, 212 bp, Homo sapiens; identical to SEQ ID NO: 68028
  chr4:7992551-7992763
  hypo

SEQ ID NO: 148283 - DNA, 191 bp, Homo sapiens; identical to SEQ ID NO: 68029
  chr4:8001654-8001845
  hypo

SEQ ID NO: 148284 - DNA, 30 bp, Homo sapiens
  chr4:8002744-8002774
  hypo
tgggcagttcccatccgctcctgggtgcac

SEQ ID NO: 148285 - DNA, 93 bp, Homo sapiens; identical to SEQ ID NO: 68030
  chr4:8005613-8005706
  hypo

SEQ ID NO: 148286 - DNA, 30 bp, Homo sapiens; identical to SEQ ID NO: 18594
  chr4:8011534-8011564
  hypo

SEQ ID NO: 148287 - DNA, 150 bp, Homo sapiens; identical to SEQ ID NO: 18595
  chr4:8012067-8012217
  hypo

SEQ ID NO: 148288 - DNA, 30 bp, Homo sapiens
  chr4:8031425-8031455
  hypo
gcgcccgaggctaaccgacccagtggagct

SEQ ID NO: 148289 - DNA, 30 bp, Homo sapiens
  chr4:8031852-8031882
  hypo
acagtgtgagaaccacggagactcccccag

SEQ ID NO: 148290 - DNA, 262 bp, Homo sapiens; identical to SEQ ID NO: 18596
  chr4:8032212-8032474
  hypo

SEQ ID NO: 148291 - DNA, 357 bp, Homo sapiens
  chr4:8062501-8062858
  hypo
gacaaggcaggctgacgaggctggcctggcacgtgccaccgccctgccctgccggctccccgctgtggctgggctgctcgtgacctagcgagatgacactgtcaccaacctgttcacacccagcatgtgtgtggacatcgaagagggtagttccttgctctaggggaccaaacaacacattttaatttgtaccttgaagatacatctcttcgccttctgcaaacatctggccgcacctgacacatagcgcgcaggaagggtggtagtgcttctctccggcctgtaagaaaagcacaaagcagaatgtttctactaaagccagaaaggtcggctgggtcccagcgcccggcatggata

SEQ ID NO: 148292 - DNA, 31 bp, Homo sapiens; identical to SEQ ID NO: 18597
  chr4:8063598-8063629
  hypo

SEQ ID NO: 148293 - DNA, 302 bp, Homo sapiens
  chr4:8070950-8071252
  hypo
agtggcactggcagacgagccgtccagtggggacgttctgaacaaggcaacacggtgcccaggaggccagcctgagcggccctagaggaccagagaacttgactaagtttgggaaaggctagggcagaatcccgcctgtggatgttcacacgcactgcagcgtgtccaggctcggagggtcccaccacgaagacagtgatgagcacattgcccggggaccaggggacgcaagggaggacacgacaggccagcgtggaagggtaggaccaggggctctgatgcgctgccggcatgaggcaagg

SEQ ID NO: 148294 - DNA, 30 bp, Homo sapiens
  chr4:8071502-8071532
  hypo
ttgtctgtgtctctccgtgtgcttgtgtgt

SEQ ID NO: 148295 - DNA, 30 bp, Homo sapiens
  chr4:8086655-8086685
  hypo
gccctgtgacaggctcgtgaccagcaatgg

SEQ ID NO: 148296 - DNA, 153 bp, Homo sapiens
  chr4:8087173-8087326
  hypo
cccacgctgcagccccgtccactcacacgggtctgggggtgcccacgctgcagtcccgtccactcacacggctctgggggtgcccacgctgcagccccgtccactcacatggctctgggggtgcccacgctgcagccccgtccactcacgcgg

SEQ ID NO: 148297 - DNA, 115 bp, Homo sapiens
  chr4:8090829-8090944
  hypo
ttttggcaccaccttaaagtccgcctccgcagcaagtgcctggagtgaggccaggtgagggaccgcagagagctggcccatcctcctgcagtccggggatgtctttggaaactga

SEQ ID NO: 148298 - DNA, 30 bp, Homo sapiens
  chr4:8107830-8107860
  hypo
ccagcaaaggtcccgcgtgtcccccactac

SEQ ID NO: 148299 - DNA, 30 bp, Homo sapiens
  chr4:8108249-8108279
  hypo
tacttgtcctgcacccgcagcacctcgccc

SEQ ID NO: 148300 - DNA, 30 bp, Homo sapiens; identical to SEQ ID NO: 68036
  chr4:8130112-8130142
  hypo

SEQ ID NO: 148301 - DNA, 390 bp, Homo sapiens; identical to SEQ ID NO: 68037
  chr4:8153833-8154223
  hypo

SEQ ID NO: 148302 - DNA, 30 bp, Homo sapiens; identical to SEQ ID NO: 68038
  chr4:8158598-8158628
  hypo

SEQ ID NO: 148303 - DNA, 141 bp, Homo sapiens; identical to SEQ ID NO: 40281
  chr4:8160429-8160570
  hypo

SEQ ID NO: 148304 - DNA, 217 bp, Homo sapiens
  chr4:8172087-8172304
  hypo
ttcttccatgcccagcgataatggtaaataggcaattgcaacactactgaccggcagacacaaaggactcagggctcggataccttagagctgagggtgtgggtcaccaagcctgactgacaggctgtccagggtgcacggcgggagtggctggtggaggagatggtggcgtccaccatagccccgggatcacccgcagccacggggccgggacttg

SEQ ID NO: 148305 - DNA, 189 bp, Homo sapiens
  chr4:8220506-8220695
  hypo
acagaggaccgtgaccgcgtcctctttatgaaaagctggcactgccagcagcccttctccttggatgccgggtccagcgctttgtgctctgtggcaagctgccggtgtctggatggcctgtgcacctgtcagagctgccggtgtctgggtggcctgtgcacctgtcagagctgccggtgtctgggtggc

SEQ ID NO: 148306 - DNA, 400 bp, Homo sapiens
  chr4:8237000-8237400
  hypo
tgccagcggtgggggcggccctaatgcacagggtctgaaaaaggctcagttgcacctgcagtgtgtgagaggaaggaggctgggcgggggagtccgacctgggtgggcgtggccacctcaccaggtgtgggtcttgagggaacttctgcctcctttcaggtggcacagaacgtggccctgtacacaggcgaccccaacctggggctggagctgtttgaggcggctggagacatcttcttcgacggggcctgggagcgggagaaagctgtgtccttctaccgggtgagctggcctgtgggctgatgtgggtgggccccagggggggcaccttgagggctgaggcacaggtgtggcagggcagagccctcgcacctggaggcagggccgcccatgcacatgc

SEQ ID NO: 148307 - DNA, 30 bp, Homo sapiens; identical to SEQ ID NO: 68042
  chr4:8239205-8239235
  hypo

SEQ ID NO: 148308 - DNA, 30 bp, Homo sapiens
  chr4:8252771-8252801
  hypo
ccagcacagggtccgcgcctagcaggcgtt

SEQ ID NO: 148309 - DNA, 126 bp, Homo sapiens
  chr4:8270687-8270813
  hypo
tttaaatctacttgacgacatcgttctgaaaaggacacccaggcttcgccaggcagcccagggtactaggaacacacacagtgtgaagaccgcagctccaggctgtgcgcgcggcgttatctcctg

SEQ ID NO: 148310 - DNA, 272 bp, Homo sapiens
  chr4:8285418-8285690
  hypo
gggtccaggcggacacggagccggcaatgagcagtcaccagaggccgcaggccagggctccagggacttgcttgttttcacggtactttccctgaggcctccagcctccctgtgacgaggctccactgccctaggcccggccctggggactgagcatctggtggctcatggggagatcccaggagtgattcctgctccagcaccgcctccctgctggctggctcggcgcttgtctggtccaagcccctgtcactaggcgtcacggcccctct

SEQ ID NO: 148311 - DNA, 18 bp, Homo sapiens
  chr4:8296287-8296305
  hypo
cttctatccgtccgtccg

SEQ ID NO: 148312 - DNA, 31 bp, Homo sapiens; identical to SEQ ID NO: 68044
  chr4:8309965-8309996
  hypo

SEQ ID NO: 148313 - DNA, 30 bp, Homo sapiens
  chr4:8346945-8346975
  hypo
atgagcgcccgaacacgatttgccttgagt

SEQ ID NO: 148314 - DNA, 31 bp, Homo sapiens; identical to SEQ ID NO: 68045
  chr4:8354965-8354996
  hypo

SEQ ID NO: 148315 - DNA, 319 bp, Homo sapiens
  chr4:8372556-8372875
  hypo
cccacaggagcatctcagctccgcagaaatgcccatcaacccttggggcactcccgtgaggccctgtcctccctttacctcgccgtcggctctgccaatcggtgagtccagaacaaagtcaggaggagcgatcacgtctaccagggcaactgcatcgtctttcagctgttggaaaacaaagcccagacacttggcacctcccgggaatttccatggtgaccaaagcataacagccccgtgtgtggttgccaggacccactagcaacgggtcacctgagcggcacgtgcggctctgctgcccatgcgtgatctcttcacc

SEQ ID NO: 148316 - DNA, 30 bp, Homo sapiens
  chr4:8373501-8373531
  hypo
cggagagaagctctcggcagagcacaggcg

SEQ ID NO: 148317 - DNA, 39 bp, Homo sapiens; identical to SEQ ID NO: 68047
  chr4:8375723-8375762
  hypo

SEQ ID NO: 148318 - DNA, 30 bp, Homo sapiens; identical to SEQ ID NO: 68048
  chr4:8376749-8376779
  hypo

SEQ ID NO: 148319 - DNA, 30 bp, Homo sapiens; identical to SEQ ID NO: 68049
  chr4:8378161-8378191
  hypo

SEQ ID NO: 148320 - DNA, 30 bp, Homo sapiens; identical to SEQ ID NO: 68050
  chr4:8379223-8379253
  hypo

SEQ ID NO: 148321 - DNA, 30 bp, Homo sapiens; identical to SEQ ID NO: 68051
  chr4:8385798-8385828
  hypo

SEQ ID NO: 148322 - DNA, 262 bp, Homo sapiens; identical to SEQ ID NO: 68052
  chr4:8386103-8386365
  hypo

SEQ ID NO: 148323 - DNA, 112 bp, Homo sapiens; identical to SEQ ID NO: 18601
  chr4:8386731-8386843
  hypo

SEQ ID NO: 148324 - DNA, 174 bp, Homo sapiens; identical to SEQ ID NO: 68054
  chr4:8389737-8389911
  hypo

SEQ ID NO: 148325 - DNA, 122 bp, Homo sapiens; identical to SEQ ID NO: 18603
  chr4:8396395-8396517
  hypo

SEQ ID NO: 148326 - DNA, 173 bp, Homo sapiens; identical to SEQ ID NO: 68056
  chr4:8398722-8398895
  hypo

SEQ ID NO: 148327 - DNA, 30 bp, Homo sapiens
  chr4:8409313-8409343
  hypo
actaacacgggggccggtgctgccgggagg

SEQ ID NO: 148328 - DNA, 155 bp, Homo sapiens
  chr4:8411914-8412069
  hypo
ctgagggccaccccagcgtcctacctgcacgataaagggatgcagcccatggcactggtcccctggcacacacagcttagcaaacaccaccgcgtgagtggctgtcttgcccatgttgccaacccaaaacttggcagcttcgaaatcaggggaat

SEQ ID NO: 148329 - DNA, 32 bp, Homo sapiens; identical to SEQ ID NO: 68057
  chr4:8455076-8455108
  hypo

SEQ ID NO: 148330 - DNA, 91 bp, Homo sapiens; identical to SEQ ID NO: 68058
  chr4:8455167-8455258
  hypo

SEQ ID NO: 148331 - DNA, 30 bp, Homo sapiens
  chr4:8458021-8458051
  hypo
catagcctagtgaaacgtgatctctggtat

SEQ ID NO: 148332 - DNA, 179 bp, Homo sapiens
  chr4:8466216-8466395
  hypo
agccacagttgcctccgcacggggagctgtgtgtgtccgagagacttggtcacgaagcaggttgtgctgctcctcgttgacgtttcgttgctgagtctccttatctcagattcttctgagctgttttcattctcaaggagtaactaggtgaaagatcaggtcttcgctcaggcttcgtt

SEQ ID NO: 148333 - DNA, 57 bp, Homo sapiens; identical to SEQ ID NO: 18607
  chr4:8473096-8473153
  hypo

SEQ ID NO: 148334 - DNA, 263 bp, Homo sapiens
  chr4:8474997-8475260
  hypo
gccgccaaggggcggcgcgctgcatccatgctggctggtatggagcctggcaccgtgctgccgggtacacgcggggcctcatctcatcctgcactcatggcagagcaggcctttcctccttgaacatgtagacaagtctcagagaggtcagtgcgccggcccgatgtctcccagtgagtggagaggccacgccacagtccgggccaggtctgacccagcactggcacccctgagcctatggcatcatccgaggactgtaatcc

SEQ ID NO: 148335 - DNA, 132 bp, Homo sapiens
  chr4:8475644-8475776
  hypo
cctgcctgcgccgttcgggagcctcatctctatcatcagcgcccgctcctcagtccttagacaccctgcaggtcctgcttccaaaacatggttgggtgtgctcttaactccggagccgcgtgggagggcctg

SEQ ID NO: 148336 - DNA, 31 bp, Homo sapiens; identical to SEQ ID NO: 18608
  chr4:8477856-8477887
  hypo

SEQ ID NO: 148337 - DNA, 386 bp, Homo sapiens
  chr4:8483723-8484109
  hypo
atgaaagaaagccttccgtgttgaggtctatgcttcagacttgttaaggtgcgtgtcgaggtctgcaaagcttttgctaaacccttcactgtaaattttcttggggctcatcttgtttttcgccagttgcctcttctcttgccccttgttcagctctgcgtccctcttccagttccagcagctcatttgtcagttcttcaggaaccgcctggaggcactcctcaacggcatcctcctccaccctagactggagttgtttgccgtcctagccacagccgtgttgagttttgcagcctcctcatcctgggcaaatcctttgaagtcctgggtgaactcttgcgtgtcctcctctggatgccactcacgcacaccttggcaggcacacc

SEQ ID NO: 148338 - DNA, 280 bp, Homo sapiens
  chr4:8514256-8514536
  hypo
gactttatgtgtaagcgttgtgtgtgtgcgtacataaaatcgtcgaaacttcctcaataaatgaagagatgtcctttttgtacgcctgaatttatgaaaggtaaatttctcgaggtcttgtttctttgggcagctgcgtgtgcagtgctgacccatgagtgtctgatcgatcacgtcaccagacgtagggtgtccttcatgggttttcaaatgacagctgttatctcaggaatttctttatgaatgtggtttgtctgctcatcaccgagtgtctatgctt

SEQ ID NO: 148339 - DNA, 323 bp, Homo sapiens
  chr4:8549954-8550277
  hypo
acaggcagtggttgccggggtcggccgctgccttagggcagattgttacacgctcaggaatgtcttgcgcaggctgatgctatgcatcaactcactggggcttgggggtgcccaggtagctgccgctgcaacattatttctgggtgcctgagaggtgtttctggaagggactagcattagaatgaggaaactgaggaaagaagatggccctccccagtgtgggcggcatcatcccatctactatgggtgcagagggaacaaggcagcggaggagggaggcagtggttctctgcctcccggagctgagacgtgcacacctcctg

SEQ ID NO: 148340 - DNA, 294 bp, Homo sapiens
  chr4:8560359-8560653
  hypo
cagccctcactggccacagctcggcccccatttccctggccagcaccgagccgcaggggagggtgagaatctttggcatcttggcatacgtttgttgttccagagtcgggctgtgccgagggaatgtgctgcttcccccattttgcagacagggacactgaggctcagtgagggtgagggctcacccaggttgcagagcctgcccaaagctgggtcttctggctccaagtcgggagcacgctgcacacctcatgccatggatcaggccttgaagctctccgtgaaggtgtacat

SEQ ID NO: 148341 - DNA, 43 bp, Homo sapiens; identical to SEQ ID NO: 40289
  chr4:8594309-8594352
  hypo

SEQ ID NO: 148342 - DNA, 31 bp, Homo sapiens; identical to SEQ ID NO: 3170
  chr4:8594372-8594403
  hypo

SEQ ID NO: 148343 - DNA, 249 bp, Homo sapiens
  chr4:8603004-8603253
  hypo
tgcaacccggacctgcggctgctgggctgtgctgtgctggccccccggtgtgagggcggctgggtgcgcagaccctgccggcacatctgcgagggcctgcgggaggtctgccagcccgccttcgacgccattgacatggcctggccctacttccttgactgccaccgctacttcacgagagaggacgagggctgctatgacccgctggagaagcttcggggtaagggaaagtggcgggggcctgtgtgg

SEQ ID NO: 148344 - DNA, 30 bp, Homo sapiens; identical to SEQ ID NO: 68068
  chr4:8605866-8605896
  hypo

SEQ ID NO: 148345 - DNA, 112 bp, Homo sapiens
  chr4:8607740-8607852
  hypo
caacattcatggcaacgaggtggcgggccgggagatgctcatctacctagcccagtacctgtgctctgagtacctgcttggtaacccccgcatccagcgcctgctcaacacc

SEQ ID NO: 148346 - DNA, 30 bp, Homo sapiens; identical to SEQ ID NO: 18612
  chr4:8608471-8608501
  hypo

SEQ ID NO: 148347 - DNA, 132 bp, Homo sapiens; identical to SEQ ID NO: 3171
  chr4:8609442-8609574
  hypo

SEQ ID NO: 148348 - DNA, 21 bp, Homo sapiens
  chr4:8614874-8614895
  hypo
tttgagacggagtctcgctct

SEQ ID NO: 148349 - DNA, 232 bp, Homo sapiens; identical to SEQ ID NO: 68071
  chr4:8615875-8616107
  hypo

SEQ ID NO: 148350 - DNA, 270 bp, Homo sapiens; identical to SEQ ID NO: 18615
  chr4:8621149-8621419
  hypo

SEQ ID NO: 148351 - DNA, 111 bp, Homo sapiens; identical to SEQ ID NO: 18616
  chr4:8647630-8647741
  hypo

SEQ ID NO: 148352 - DNA, 30 bp, Homo sapiens
  chr4:8655554-8655584
  hypo
tgggtcccattctctcgccagttcctggtg

SEQ ID NO: 148353 - DNA, 30 bp, Homo sapiens
  chr4:8657810-8657840
  hypo
cgatcgatggaaggacgcgcccctccaggt

SEQ ID NO: 148354 - DNA, 30 bp, Homo sapiens
  chr4:8658188-8658218
  hypo
tcccggaggtctccgcgaggctacgattct

SEQ ID NO: 148355 - DNA, 331 bp, Homo sapiens; identical to SEQ ID NO: 18617
  chr4:8739497-8739828
  hypo

SEQ ID NO: 148356 - DNA, 30 bp, Homo sapiens
  chr4:8740863-8740893
  hypo
ctcctagctggagcacgtcccaccctatcc

SEQ ID NO: 148357 - DNA, 30 bp, Homo sapiens
  chr4:8741276-8741306
  hypo
cggggcacccagtctcggtgaattagacgc

SEQ ID NO: 148358 - DNA, 429 bp, Homo sapiens
  chr4:8749241-8749670
  hypo
ccagcacctccgcagcgaggcctaggcagcagctgtgctgcaaacaccaccctggctgtgctcagaggcggccggccgccccgagaaaccctccatgatgtgacgcgaccagacaggcgcaaggaacaggccccgcagtcatgtaaaatgcaggagcgctcccatcccagacgctggctgaccgagcagcagcgcagcagtaagcgcatcccagtccccgtttgggggcaatttaacccgggcccttgcgtaacaacagcctcattattcggaggaagccggaggctcaggcgtgttctttgaatggcatagcccttgtagggggtgcgcgaaatcatctggggtggacgccacgtggcctcccagagctagcccagcccactacccagatggaagcttccagatgagtcagtccgtgggaagagaaca

SEQ ID NO: 148359 - DNA, 144 bp, Homo sapiens
  chr4:8761655-8761799
  hypo
ccgtagcattccgcacgcatttgccacaggacacagcagtcaccatcctggacacttacccaggcgaaatgaaacctgtgttgccacagtcgcccgaatgtcaatggttagaggagctttattgacgatcgctcaaactggaag

SEQ ID NO: 148360 - DNA, 31 bp, Homo sapiens; identical to SEQ ID NO: 18618
  chr4:8770251-8770282
  hypo

SEQ ID NO: 148361 - DNA, 31 bp, Homo sapiens; identical to SEQ ID NO: 68076
  chr4:8842664-8842695
  hypo

SEQ ID NO: 148362 - DNA, 893 bp, Homo sapiens; identical to SEQ ID NO: 109794
  chr4:8861918-8862811
  hypo

SEQ ID NO: 148363 - DNA, 203 bp, Homo sapiens; identical to SEQ ID NO: 3174
  chr4:8863323-8863526
  hypo

SEQ ID NO: 148364 - DNA, 39 bp, Homo sapiens; identical to SEQ ID NO: 3175
  chr4:8863856-8863895
  hypo

SEQ ID NO: 148365 - DNA, 156 bp, Homo sapiens; identical to SEQ ID NO: 109803
  chr4:8872916-8873072
  hypo

SEQ ID NO: 148366 - DNA, 258 bp, Homo sapiens; identical to SEQ ID NO: 109804
  chr4:8873773-8874031
  hypo

SEQ ID NO: 148367 - DNA, 30 bp, Homo sapiens
  chr4:8967316-8967346
  hypo
cttccagttccccctcggcatctgtagact

SEQ ID NO: 148368 - DNA, 30 bp, Homo sapiens
  chr4:9080679-9080709
  hypo
tccagctgctgctgccgccgccggtcgtgc

SEQ ID NO: 148369 - DNA, 24 bp, Homo sapiens
  chr4:9151887-9151911
  hypo
tttagtgaggctgggcgtggtggc

SEQ ID NO: 148370 - DNA, 147 bp, Homo sapiens
  chr4:9523561-9523708
  hypo
cagtagctgtcagtgcgcctagcccggcgtgtggacctggggactcaccagaagggcccgatgtggagtctcacggagcgtcggcggaaggcgcacaggatgctaaagctttacaacggcctttgggaaggggaggctgtgggactc

SEQ ID NO: 148371 - DNA, 146 bp, Homo sapiens
  chr4:9602006-9602152
  hypo
aacatttggaggcccgagcaagaaacgccaccaggcgagagccgggttagctccgggcctgctgcgggctcccccggaaggacggccggcttgtagcgggggcgccacctgaaaaaaaattttcaggtccccgaaaggtgaccatc

SEQ ID NO: 148372 - DNA, 30 bp, Homo sapiens
  chr4:9639389-9639419
  hypo
cccatcatcccactgcgagaatttgtcaac

SEQ ID NO: 148373 - DNA, 30 bp, Homo sapiens
  chr4:9639787-9639817
  hypo
ggtgatgcaatgctgcgggtccatgaatca

SEQ ID NO: 148374 - DNA, 210 bp, Homo sapiens; identical to SEQ ID NO: 3185
  chr4:9684932-9685142
  hypo

SEQ ID NO: 148375 - DNA, 208 bp, Homo sapiens; identical to SEQ ID NO: 68083
  chr4:9701509-9701717
  hypo

SEQ ID NO: 148376 - DNA, 36 bp, Homo sapiens; identical to SEQ ID NO: 68084
  chr4:9784384-9784420
  hypo

SEQ ID NO: 148377 - DNA, 30 bp, Homo sapiens
  chr4:10020391-10020421
  hypo
agaactgtcatcccccgcccctgtccccgt

SEQ ID NO: 148378 - DNA, 31 bp, Homo sapiens; identical to SEQ ID NO: 18622
  chr4:10077116-10077147
  hypo

SEQ ID NO: 148379 - DNA, 30 bp, Homo sapiens; identical to SEQ ID NO: 68086
  chr4:10084710-10084740
  hypo

SEQ ID NO: 148380 - DNA, 63 bp, Homo sapiens; identical to SEQ ID NO: 18623
  chr4:10086435-10086498
  hypo

SEQ ID NO: 148381 - DNA, 349 bp, Homo sapiens; identical to SEQ ID NO: 18624
  chr4:10087760-10088109
  hypo

SEQ ID NO: 148382 - DNA, 59 bp, Homo sapiens; identical to SEQ ID NO: 109826
  chr4:10089889-10089948
  hypo

SEQ ID NO: 148383 - DNA, 237 bp, Homo sapiens; identical to SEQ ID NO: 40315
  chr4:10090132-10090369
  hypo

SEQ ID NO: 148384 - DNA, 135 bp, Homo sapiens
  chr4:10101396-10101531
  hypo
caccgagcagttccacgacgcacaggaatccaagcgtaagattcttctgtgagagtagcaggtgggtgttgcgggggaaggagaattacacacagaactcgatgctgattctcttctcaccggagcgtgggcagc

SEQ ID NO: 148385 - DNA, 30 bp, Homo sapiens
  chr4:10116203-10116233
  hypo
ctactgctctgtatccgaggacgtgttagt

SEQ ID NO: 148386 - DNA, 30 bp, Homo sapiens
  chr4:10116515-10116545
  hypo
gactgcctgggttaacgagacagatgcggg

SEQ ID NO: 148387 - DNA, 430 bp, Homo sapiens; identical to SEQ ID NO: 68091
  chr4:10120443-10120873
  hypo

SEQ ID NO: 148388 - DNA, 80 bp, Homo sapiens
  chr4:10128969-10129049
  hypo
gaagtcacttatgcacgcagtctttgagatttgaaggggcggggttgcccctccacatccgtgggtgtttctcgttaggt

SEQ ID NO: 148389 - DNA, 30 bp, Homo sapiens; identical to SEQ ID NO: 18627
  chr4:10145468-10145498
  hypo

SEQ ID NO: 148390 - DNA, 38 bp, Homo sapiens
  chr4:10412554-10412592
  hypo
ggggcggagcctgagcgtgcctgcgtggcaccactcgg

SEQ ID NO: 148391 - DNA, 174 bp, Homo sapiens
  chr4:10444977-10445151
  hypo
aggcgtacatgatgccgtctgatgcctagctgacacctagtcctctctgataaaacaactttgaggacattgcctttgtatttatttattaccttcatcacattggtcacttctggcgagtccacatcagggtggtttaacacaatgactggctggttccgacggggacactta

SEQ ID NO: 148392 - DNA, 121 bp, Homo sapiens
  chr4:10447424-10447545
  hypo
ctctcctttcgtatacgaaatgtagctgcagtgagaacaaatgaatttaatctcctcgtgttgaagggtgtgctttttgtactgcagcgggtcctttgtagagaatcgacatttatcacaa

SEQ ID NO: 148393 - DNA, 1036 bp, Homo sapiens; identical to SEQ ID NO: 109830
  chr4:10458330-10459366
  hypo

SEQ ID NO: 148394 - DNA, 23 bp, Homo sapiens
  chr4:10500108-10500131
  hypo
ccgtctcaaaataaaataaaata

SEQ ID NO: 148395 - DNA, 31 bp, Homo sapiens; identical to SEQ ID NO: 68097
  chr4:10575193-10575224
  hypo

SEQ ID NO: 148396 - DNA, 85 bp, Homo sapiens
  chr4:10622722-10622807
  hypo
aacagaaaaacaagaaaccaaaaagccctacctcagtacctcagtcaccaagaggtaagtggccgctgcaggccagacacttctg

SEQ ID NO: 148397 - DNA, 190 bp, Homo sapiens; identical to SEQ ID NO: 68099
  chr4:11374202-11374392
  hypo

SEQ ID NO: 148398 - DNA, 30 bp, Homo sapiens; identical to SEQ ID NO: 40324
  chr4:11521627-11521657
  hypo

SEQ ID NO: 148399 - DNA, 30 bp, Homo sapiens
  chr4:12539813-12539843
  hypo
tgcccgagcttctggcgttaaacatgccct

SEQ ID NO: 148400 - DNA, 30 bp, Homo sapiens
  chr4:12787125-12787155
  hypo
tttattattaactgccgccctctacatatt

SEQ ID NO: 148401 - DNA, 319 bp, Homo sapiens
  chr4:13300413-13300732
  hypo
gagcccaaaggagagcgctgtggtcgtggaaggagagagccacggcgaggagagggtggctccttccagggggcggtgcgctctgccgttccgcgtcatatcccttggcagtattgtaaacacaagtccactgtatgtttttaaaacgtgagaagaagcaggatcctgccctcgtgttttgacatcgcctgcagggagggagaatgggacgagcagatctggcctgtgcaaaatgtaattgcttttcccacctgatggttaatctcaggcgggacgggctgtcccacaggctctcaacctgagccgcccacacccgggt

SEQ ID NO: 148402 - DNA, 971 bp, Homo sapiens; identical to SEQ ID NO: 109854
  chr4:13545940-13546911
  hypo

SEQ ID NO: 148403 - DNA, 380 bp, Homo sapiens
  chr4:13600963-13601343
  hypo
agagggatccttagccgtctgcccagacgtctgttctggtcctctcaggtgggcaggtgagttagcattcccctctaagccccttcctgctgaataacttgctgtgctactgccccctgctgtccctgtctctgggctcttatcttctttctgaagggagttcaacaatacattcttctcttctgcatttatgaggtgtaaagtgctctctttctgtcctcttcctgcaaatggtcctatttcggggcactccttgccatgcttctcttctttttccgcacaaacagcacttggatggccttgccctgcagagggcttgtggactgatggcccgttgtgcccctcctcggtgctcactgccaacacgggacccggttctt

SEQ ID NO: 148404 - DNA, 44 bp, Homo sapiens
  chr4:13627678-13627722
  hypo
gagaaaaccctcgaccgggcgcggtggctcatgcctactgggcg

SEQ ID NO: 148405 - DNA, 30 bp, Homo sapiens; identical to SEQ ID NO: 3201
  chr4:13669550-13669580
  hypo

SEQ ID NO: 148406 - DNA, 90 bp, Homo sapiens
  chr4:14264569-14264659
  hypo
acttctcagatgtaatggtttcaccgggaaaccatcattttgagtgtcatcttctcttattctatccaacaacaacgacccatttctcca

SEQ ID NO: 148407 - DNA, 30 bp, Homo sapiens
  chr4:15067371-15067401
  hypo
cctgcagtggagaggcgccgccttaatcag

SEQ ID NO: 148408 - DNA, 30 bp, Homo sapiens
  chr4:15638144-15638174
  hypo
tttccaaagcgatcccgtttttgtcagctg

SEQ ID NO: 148409 - DNA, 27 bp, Homo sapiens
  chr4:15676548-15676575
  hypo
ggcacgagccaccgcacccagtcggtt

SEQ ID NO: 148410 - DNA, 28 bp, Homo sapiens
  chr4:15697094-15697122
  hypo
cacaaggtgaaattgacgggaaaaggaa

SEQ ID NO: 148411 - DNA, 27 bp, Homo sapiens
  chr4:15697241-15697268
  hypo
cccatgcccggtcgactgggagaccat

SEQ ID NO: 148412 - DNA, 63 bp, Homo sapiens; identical to SEQ ID NO: 68103
  chr4:15789215-15789278
  hypo

SEQ ID NO: 148413 - DNA, 34 bp, Homo sapiens; identical to SEQ ID NO: 68104
  chr4:15789490-15789524
  hypo

SEQ ID NO: 148414 - DNA, 44 bp, Homo sapiens
  chr4:15843147-15843191
  hypo
gcaactgtaaaagcaatcttgcggcggaggagccaagatggccg

SEQ ID NO: 148415 - DNA, 30 bp, Homo sapiens; identical to SEQ ID NO: 68105
  chr4:16077309-16077339
  hypo

SEQ ID NO: 148416 - DNA, 139 bp, Homo sapiens; identical to SEQ ID NO: 3205
  chr4:16228990-16229129
  hypo

SEQ ID NO: 148417 - DNA, 275 bp, Homo sapiens; identical to SEQ ID NO: 109875
  chr4:16229202-16229477
  hypo

SEQ ID NO: 148418 - DNA, 30 bp, Homo sapiens; identical to SEQ ID NO: 68108
  chr4:16258198-16258228
  hypo

SEQ ID NO: 148419 - DNA, 30 bp, Homo sapiens; identical to SEQ ID NO: 68109
  chr4:16380152-16380182
  hypo

SEQ ID NO: 148420 - DNA, 43 bp, Homo sapiens
  chr4:17438264-17438307
  hypo
agcaggagccctccgcgggggtggagagaggctcaggcatggc

SEQ ID NO: 148421 - DNA, 121 bp, Homo sapiens
  chr4:17438426-17438547
  hypo
cccgggtgctaagcccctcactgccggggtccactctgagtgcggggcccgccaagcccacctcatccggaactctatctagctggcccctaagcgctgcgcgcagcccaggttcccgccc

SEQ ID NO: 148422 - DNA, 30 bp, Homo sapiens; identical to SEQ ID NO: 68110
  chr4:17516535-17516565
  hypo

SEQ ID NO: 148423 - DNA, 36 bp, Homo sapiens; identical to SEQ ID NO: 68111
  chr4:17741678-17741714
  hypo

SEQ ID NO: 148424 - DNA, 121 bp, Homo sapiens
  chr4:17817848-17817969
  hypo
tgcaacctggatacctcatgtgcgcagttcacaatagagttcctgcgcctgagagaatctaatgcatctgctgatctgacagtaggaagagctcaggtggtaatgctcgttagaccacggc

SEQ ID NO: 148425 - DNA, 138 bp, Homo sapiens; identical to SEQ ID NO: 68112
  chr4:17818028-17818166
  hypo

SEQ ID NO: 148426 - DNA, 234 bp, Homo sapiens; identical to SEQ ID NO: 109885
  chr4:18024245-18024479
  hypo

SEQ ID NO: 148427 - DNA, 54 bp, Homo sapiens; identical to SEQ ID NO: 18635
  chr4:19280789-19280843
  hypo

SEQ ID NO: 148428 - DNA, 30 bp, Homo sapiens
  chr4:21154413-21154443
  hypo
attctcatacaagagcgaagcctattgtga

SEQ ID NO: 148429 - DNA, 30 bp, Homo sapiens; identical to SEQ ID NO: 40365
  chr4:21215998-21216028
  hypo

SEQ ID NO: 148430 - DNA, 29 bp, Homo sapiens
  chr4:21639111-21639140
  hypo
agaaaacaggccaggcgcggtggcttatg

SEQ ID NO: 148431 - DNA, 30 bp, Homo sapiens; identical to SEQ ID NO: 40368
  chr4:22358598-22358628
  hypo

SEQ ID NO: 148432 - DNA, 30 bp, Homo sapiens; identical to SEQ ID NO: 40369
  chr4:22458521-22458551
  hypo

SEQ ID NO: 148433 - DNA, 26 bp, Homo sapiens
  chr4:22477019-22477045
  hypo
tcccaagtgggagttaagctacgaga

SEQ ID NO: 148434 - DNA, 26 bp, Homo sapiens
  chr4:22477344-22477370
  hypo
gtctcggaaaaaaaaataaataaata

SEQ ID NO: 148435 - DNA, 1010 bp, Homo sapiens; identical to SEQ ID NO: 109902
  chr4:22517044-22518054
  hypo

SEQ ID NO: 148436 - DNA, 76 bp, Homo sapiens
  chr4:22601449-22601525
  hypo
tgaccagcctgagtgacgccttccaaagagcgctcccgggtgggaaattgtcctggtggaacgcctcaccagagca

SEQ ID NO: 148437 - DNA, 159 bp, Homo sapiens
  chr4:22780296-22780455
  hypo
gaggctcccgcctcgcgagagccccacagcggggggcggggctcaggcatggcaggctgcaggtccgggcgggaggcggctgaggcctggcgagaattccagcgtggcaggtgtggaccggcagtgctgggggacccagcgcaccctccacagctgctg

SEQ ID NO: 148438 - DNA, 25 bp, Homo sapiens
  chr4:22866570-22866595
  hypo
ccagcctgagcgacagagcgagaat

SEQ ID NO: 148439 - DNA, 30 bp, Homo sapiens
  chr4:24339824-24339854
  hypo
cggtataaaatcctgcgagccactgaacca

SEQ ID NO: 148440 - DNA, 34 bp, Homo sapiens; identical to SEQ ID NO: 18639
  chr4:24422942-24422976
  hypo

SEQ ID NO: 148441 - DNA, 34 bp, Homo sapiens; identical to SEQ ID NO: 18640
  chr4:24423215-24423249
  hypo

SEQ ID NO: 148442 - DNA, 134 bp, Homo sapiens
  chr4:24534547-24534681
  hypo
aagtcagtacttcgacgaggcaaattaaatctgtccataattcgagatagctgctggcgtacattgtctgcggacatcagggacctgtagttaatgaagttgtcataacaccactgaaccgattcatgatctaa

SEQ ID NO: 148443 - DNA, 25 bp, Homo sapiens
  chr4:24586891-24586916
  hypo
ctccgacttgaaagaaaaaaaaaaa

SEQ ID NO: 148444 - DNA, 31 bp, Homo sapiens; identical to SEQ ID NO: 68126
  chr4:24631209-24631240
  hypo

SEQ ID NO: 148445 - DNA, 31 bp, Homo sapiens; identical to SEQ ID NO: 68127
  chr4:24670641-24670672
  hypo

SEQ ID NO: 148446 - DNA, 610 bp, Homo sapiens; identical to SEQ ID NO: 40378
  chr4:24914264-24914874
  hypo

SEQ ID NO: 148447 - DNA, 30 bp, Homo sapiens
  chr4:24993534-24993564
  hypo
cagctctcactttaccgtttctactgtgta

SEQ ID NO: 148448 - DNA, 31 bp, Homo sapiens; identical to SEQ ID NO: 68129
  chr4:25005691-25005722
  hypo

SEQ ID NO: 148449 - DNA, 186 bp, Homo sapiens
  chr4:25013884-25014070
  hypo
acattcctcctcccgcgggcttgccgcaatgctgaaattagttcaacacatctgatcaaagccacaacacacctgtaatgttgtcatagctccggaaattcatttcaatgtggtcccactccagcaccatgcagttctccatgctgggctgcgcgatggccacgtacacatcgttcttggagttga

SEQ ID NO: 148450 - DNA, 58 bp, Homo sapiens
  chr4:25014432-25014490
  hypo
gtaagacggacaggacgctgcacagcaacattctcaaaactgccgtgcaaatcactct

SEQ ID NO: 148451 - DNA, 185 bp, Homo sapiens; identical to SEQ ID NO: 68132
  chr4:25025016-25025201
  hypo

SEQ ID NO: 148452 - DNA, 30 bp, Homo sapiens
  chr4:25057656-25057686
  hypo
gccaagactaaactgcgttagctgcaaaat

SEQ ID NO: 148453 - DNA, 30 bp, Homo sapiens
  chr4:25057938-25057968
  hypo
aaaccattgcaaaagcgtgagctattattt

SEQ ID NO: 148454 - DNA, 25 bp, Homo sapiens
  chr4:25285253-25285278
  hypo
aactcaagaatattcccaggccggg

SEQ ID NO: 148455 - DNA, 20 bp, Homo sapiens
  chr4:25360282-25360302
  hypo
aggccaaggcagctttccag

SEQ ID NO: 148456 - DNA, 139 bp, Homo sapiens; identical to SEQ ID NO: 68134
  chr4:25360421-25360560
  hypo

SEQ ID NO: 148457 - DNA, 30 bp, Homo sapiens; identical to SEQ ID NO: 18642
  chr4:25371673-25371703
  hypo

SEQ ID NO: 148458 - DNA, 30 bp, Homo sapiens; identical to SEQ ID NO: 68136
  chr4:25507401-25507431
  hypo

SEQ ID NO: 148459 - DNA, 534 bp, Homo sapiens; identical to SEQ ID NO: 68137
  chr4:25677737-25678271
  hypo

SEQ ID NO: 148460 - DNA, 91 bp, Homo sapiens; identical to SEQ ID NO: 68138
  chr4:25681545-25681636
  hypo

SEQ ID NO: 148461 - DNA, 140 bp, Homo sapiens
  chr4:25811519-25811659
  hypo
tctccaaataaacatcgcaattgttggcaaaaataaagtcaaaagcaaggtagagcttcgctagtgcagccagtcactccttggcgtattgtgtggggacacctctgcccccacactcagcactccggagcctgggggca

SEQ ID NO: 148462 - DNA, 31 bp, Homo sapiens; identical to SEQ ID NO: 18643
  chr4:25812477-25812508
  hypo

SEQ ID NO: 148463 - DNA, 30 bp, Homo sapiens; identical to SEQ ID NO: 18644
  chr4:25818925-25818955
  hypo

SEQ ID NO: 148464 - DNA, 624 bp, Homo sapiens; identical to SEQ ID NO: 109922
  chr4:25863666-25864290
  hypo

SEQ ID NO: 148465 - DNA, 30 bp, Homo sapiens
  chr4:26184949-26184979
  hypo
acagaaactgtgatgcggcacatgaccgta

SEQ ID NO: 148466 - DNA, 26 bp, Homo sapiens
  chr4:26223327-26223353
  hypo
agtgtttgctgattgagtagacgagt

SEQ ID NO: 148467 - DNA, 205 bp, Homo sapiens; identical to SEQ ID NO: 68144
  chr4:26223412-26223617
  hypo

SEQ ID NO: 148468 - DNA, 30 bp, Homo sapiens; identical to SEQ ID NO: 68145
  chr4:26320231-26320261
  hypo

SEQ ID NO: 148469 - DNA, 281 bp, Homo sapiens
  chr4:26466304-26466585
  hypo
ggctttctgcttccccgggtggtgctggctcccgattacagcgggcaagagcagtcctcgcccccagtgaatcggcaggacccagctcacgttgtgcaaattcactcagtgggagagacgtgggcggcctggatacctgccctgctcaatgcctgtgagaagcagaaacaggcttcccgtcacctcccttcttctccaacagcagatccagcctggtgccctttggggactgagtaagaaaggaggggagggccccatgtgtttaccggtagagtatttag

SEQ ID NO: 148470 - DNA, 25 bp, Homo sapiens
  chr4:26730357-26730382
  hypo
gggcgtggtggctcacgcctgtaat

SEQ ID NO: 148471 - DNA, 24 bp, Homo sapiens
  chr4:26730621-26730645
  hypo
gcgagactccgtctcaaaaaaaga

SEQ ID NO: 148472 - DNA, 210 bp, Homo sapiens; identical to SEQ ID NO: 18646
  chr4:26823269-26823479
  hypo

SEQ ID NO: 148473 - DNA, 137 bp, Homo sapiens
  chr4:26855446-26855583
  hypo
gcgcctggccaagaaacaacttttaaaatctgatcttctttctttcgtatttacaataatgctctgggaatgtgctcatccgtaattcaaacatccacatttccagactttctgttttccttcgtttccatatcaga

SEQ ID NO: 148474 - DNA, 100 bp, Homo sapiens
  chr4:26856539-26856639
  hypo
actgaaaagtgcgggcgagtttgcatctcctgcagaaacctttgactgatgggagccaaaagttccatttttctcccttcttctcgcactgttccaaaac

SEQ ID NO: 148475 - DNA, 33 bp, Homo sapiens
  chr4:27077853-27077886
  hypo
ctgttcctattcggccatcttggctcctccccc

SEQ ID NO: 148476 - DNA, 36 bp, Homo sapiens; identical to SEQ ID NO: 68150
  chr4:27486039-27486075
  hypo

SEQ ID NO: 148477 - DNA, 54 bp, Homo sapiens
  chr4:27570053-27570107
  hypo
ttccttttctccctagactgacgtgcgcatatcgcaagcaccagttggtctttg

SEQ ID NO: 148478 - DNA, 30 bp, Homo sapiens
  chr4:28029213-28029243
  hypo
ggacgtgcggggtaacgaaacccataaatc

SEQ ID NO: 148479 - DNA, 31 bp, Homo sapiens
  chr4:30783420-30783451
  hypo
gtgctgggattacaagcgtgagccaccacgc

SEQ ID NO: 148480 - DNA, 157 bp, Homo sapiens; identical to SEQ ID NO: 68151
  chr4:35039894-35040051
  hypo

SEQ ID NO: 148481 - DNA, 799 bp, Homo sapiens; identical to SEQ ID NO: 3234
  chr4:36245408-36246207
  hypo

SEQ ID NO: 148482 - DNA, 145 bp, Homo sapiens; identical to SEQ ID NO: 109945
  chr4:36246257-36246402
  hypo

SEQ ID NO: 148483 - DNA, 118 bp, Homo sapiens
  chr4:36345194-36345312
  hypo
tcaactctccctctgcgccgtagcaccattcagctcatcaaactcaagaaccctgatgatctcacagaacagatccacgagtttctttgcttctggaaaaaatcgcttccaactttca

SEQ ID NO: 148484 - DNA, 102 bp, Homo sapiens
  chr4:36896146-36896248
  hypo
gagcgagactccccgtctcaaaaaaaaagaaagaaaagaaaagatcacgaatcgcggcaggctgtaactcaataaatgtctctctctcggccgggcacggtg

SEQ ID NO: 148485 - DNA, 524 bp, Homo sapiens; identical to SEQ ID NO: 3236
  chr4:37245836-37246360
  hypo

SEQ ID NO: 148486 - DNA, 210 bp, Homo sapiens; identical to SEQ ID NO: 3237
  chr4:37246489-37246699
  hypo

SEQ ID NO: 148487 - DNA, 17 bp, Homo sapiens
  chr4:37453968-37453985
  hypo
aggcaggctggggcgcg

SEQ ID NO: 148488 - DNA, 30 bp, Homo sapiens; identical to SEQ ID NO: 3241
  chr4:37526315-37526345
  hypo

SEQ ID NO: 148489 - DNA, 38 bp, Homo sapiens; identical to SEQ ID NO: 68157
  chr4:37585277-37585315
  hypo

SEQ ID NO: 148490 - DNA, 30 bp, Homo sapiens
  chr4:37648791-37648821
  hypo
ctgcaacgcttagaccgactcacgcttaga

SEQ ID NO: 148491 - DNA, 87 bp, Homo sapiens; identical to SEQ ID NO: 3242
  chr4:37688563-37688650
  hypo

SEQ ID NO: 148492 - DNA, 30 bp, Homo sapiens
  chr4:37688888-37688918
  hypo
ccttgcgcatactcccgcaaagtaggtctt

SEQ ID NO: 148493 - DNA, 301 bp, Homo sapiens; identical to SEQ ID NO: 109957
  chr4:37891997-37892298
  hypo

SEQ ID NO: 148494 - DNA, 30 bp, Homo sapiens; identical to SEQ ID NO: 68160
  chr4:38016031-38016061
  hypo

SEQ ID NO: 148495 - DNA, 30 bp, Homo sapiens; identical to SEQ ID NO: 68161
  chr4:38016324-38016354
  hypo

SEQ ID NO: 148496 - DNA, 50 bp, Homo sapiens; identical to SEQ ID NO: 68162
  chr4:38016578-38016628
  hypo

SEQ ID NO: 148497 - DNA, 30 bp, Homo sapiens
  chr4:38152470-38152500
  hypo
tgactcagtggcttacgtgttgcatgtcta

SEQ ID NO: 148498 - DNA, 23 bp, Homo sapiens
  chr4:38198464-38198487
  hypo
caagactccgtctcaaaaaaaaa

SEQ ID NO: 148499 - DNA, 189 bp, Homo sapiens; identical to SEQ ID NO: 18654
  chr4:38278934-38279123
  hypo

SEQ ID NO: 148500 - DNA, 131 bp, Homo sapiens; identical to SEQ ID NO: 68165
  chr4:38313303-38313434
  hypo

SEQ ID NO: 148501 - DNA, 20 bp, Homo sapiens
  chr4:38566394-38566414
  hypo
ccctccgcccggcccccttt

SEQ ID NO: 148502 - DNA, 214 bp, Homo sapiens
  chr4:38568874-38569088
  hypo
tacttcaccaaaaaacgtgaaacaatacggcacataagtcctaaggtttctctcagttatatattatgtgaaattggcttagaaatattttttaaaacttgagagaaatataacaaacttccttatagcaacgtttgtctattactaacaagcactttgccccggtagccttttttctcagctttgctccccaatgttacggtcaatttcacca

SEQ ID NO: 148503 - DNA, 30 bp, Homo sapiens
  chr4:38570448-38570478
  hypo
gaatctagtatctctcgcattctgcctgct

SEQ ID NO: 148504 - DNA, 23 bp, Homo sapiens
  chr4:38570997-38571020
  hypo
gggtattggccaggtgcggtggc

SEQ ID NO: 148505 - DNA, 17 bp, Homo sapiens
  chr4:38623532-38623549
  hypo
gagcaagactccatctc

SEQ ID NO: 148506 - DNA, 43 bp, Homo sapiens
  chr4:38678868-38678911
  hypo
accacgcccagtcagtgccagcgttttatactagactatgttt

SEQ ID NO: 148507 - DNA, 30 bp, Homo sapiens
  chr4:38690487-38690517
  hypo
gtgcagcccttcggcgtgccgctgtccatg

SEQ ID NO: 148508 - DNA, 22 bp, Homo sapiens
  chr4:38704219-38704241
  hypo
ttaccggcgtgagtcactgtgc

SEQ ID NO: 148509 - DNA, 207 bp, Homo sapiens; identical to SEQ ID NO: 68169
  chr4:38729966-38730173
  hypo

SEQ ID NO: 148510 - DNA, 30 bp, Homo sapiens; identical to SEQ ID NO: 18656
  chr4:38825649-38825679
  hypo

SEQ ID NO: 148511 - DNA, 741 bp, Homo sapiens; identical to SEQ ID NO: 109969
  chr4:38868923-38869664
  hypo

SEQ ID NO: 148512 - DNA, 347 bp, Homo sapiens; identical to SEQ ID NO: 109971
  chr4:39183809-39184156
  hypo

SEQ ID NO: 148513 - DNA, 30 bp, Homo sapiens
  chr4:39297254-39297284
  hypo
aggtcctgaacaatacgatcatgtttgcct

SEQ ID NO: 148514 - DNA, 90 bp, Homo sapiens
  chr4:39297606-39297696
  hypo
tcagggagatcatgtcgccaactcagcctcctcaagcaactaatctcaacataccggttacctcaccgatgccaacgtcacagcaaataa

SEQ ID NO: 148515 - DNA, 18 bp, Homo sapiens
  chr4:39447434-39447452
  hypo
cccggcctggatttttta

SEQ ID NO: 148516 - DNA, 549 bp, Homo sapiens
  chr4:39447938-39448487
  hypo
ttgtttttcacagcccgagtctgtggcttcgtccccacagttcagcgatcctcatctgtacgtgtggaacgccactggcaacagactgttgcaccgagtggaaggggtgaggctgaaaacacgacccgctcaatgcacagattttgtaaacatcaaaaaacaacttgagatgttggcaagaatgaaagtcacccactaccggtttgctctggattgggcctcggtccttcccactggcaacctgtccgcggtgaaccgacaggccctgaggtactacaggtgcgtggtcagtgaggggctgaagcttggcatctccgcgatggtcaccctgtattatccgacccacgcccacctaggcctccccgagcctctgttgcatgccgacgggtggctgaacccatcgacggccgaggccttccaggcctacgctgggctgtgcttccaggagctgggggacctggtgaagctctggatcaccatcaacgagcctaaccggctaagtgacatctacaaccgctctggcaacgacacctacggggcggcgcacaa

SEQ ID NO: 148517 - DNA, 30 bp, Homo sapiens
  chr4:39481676-39481706
  hypo
aaattctcagccggcgcggtggctcacgcc

SEQ ID NO: 148518 - DNA, 154 bp, Homo sapiens; identical to SEQ ID NO: 68175
  chr4:39481995-39482149
  hypo

SEQ ID NO: 148519 - DNA, 293 bp, Homo sapiens; identical to SEQ ID NO: 109978
  chr4:39529692-39529985
  hypo

SEQ ID NO: 148520 - DNA, 121 bp, Homo sapiens; identical to SEQ ID NO: 18662
  chr4:39623587-39623708
  hypo

SEQ ID NO: 148521 - DNA, 38 bp, Homo sapiens; identical to SEQ ID NO: 68178
  chr4:39629632-39629670
  hypo

SEQ ID NO: 148522 - DNA, 98 bp, Homo sapiens; identical to SEQ ID NO: 18663
  chr4:39745201-39745299
  hypo

SEQ ID NO: 148523 - DNA, 40 bp, Homo sapiens; identical to SEQ ID NO: 18664
  chr4:39761180-39761220
  hypo

SEQ ID NO: 148524 - DNA, 255 bp, Homo sapiens; identical to SEQ ID NO: 68181
  chr4:39773068-39773323
  hypo

SEQ ID NO: 148525 - DNA, 23 bp, Homo sapiens
  chr4:39787827-39787850
  hypo
gcgacagagcaagactgtctcaa

SEQ ID NO: 148526 - DNA, 30 bp, Homo sapiens
  chr4:39809606-39809636
  hypo
tcaggagcgccataccggaaagactcgtga

SEQ ID NO: 148527 - DNA, 80 bp, Homo sapiens; identical to SEQ ID NO: 68183
  chr4:39816676-39816756
  hypo

SEQ ID NO: 148528 - DNA, 199 bp, Homo sapiens
  chr4:39817115-39817314
  hypo
taccctggctcaagaaagcctgatgcaggcccagagcctggagagcagatgctgcaccaagcaggaacagcggagtctgcgagcgcgcccacctgctgcctgaggatgtcctggctggggacaccccttctgcttcagcagtggtagccgctgcgagcaggcgagcggaggcggatcatgaggacgccctggccggctg

SEQ ID NO: 148529 - DNA, 31 bp, Homo sapiens
  chr4:39819225-39819256
  hypo
caacagagcaagactccgtcttggaaaaaaa

SEQ ID NO: 148530 - DNA, 30 bp, Homo sapiens; identical to SEQ ID NO: 68184
  chr4:39827465-39827495
  hypo

SEQ ID NO: 148531 - DNA, 30 bp, Homo sapiens
  chr4:39900070-39900100
  hypo
gaagtttctcatcatcgccgagaacctggt

SEQ ID NO: 148532 - DNA, 30 bp, Homo sapiens
  chr4:39910459-39910489
  hypo
aacatggcaaaaccccgtctctacgaaaat

SEQ ID NO: 148533 - DNA, 38 bp, Homo sapiens; identical to SEQ ID NO: 18665
  chr4:39913157-39913195
  hypo

SEQ ID NO: 148534 - DNA, 256 bp, Homo sapiens; identical to SEQ ID NO: 68186
  chr4:39937633-39937889
  hypo

SEQ ID NO: 148535 - DNA, 18 bp, Homo sapiens
  chr4:39946776-39946794
  hypo
gcataaaaatctaaatgc

SEQ ID NO: 148536 - DNA, 31 bp, Homo sapiens; identical to SEQ ID NO: 18667
  chr4:39953928-39953959
  hypo

SEQ ID NO: 148537 - DNA, 39 bp, Homo sapiens; identical to SEQ ID NO: 18668
  chr4:39964134-39964173
  hypo

SEQ ID NO: 148538 - DNA, 84 bp, Homo sapiens; identical to SEQ ID NO: 18669
  chr4:39972694-39972778
  hypo

SEQ ID NO: 148539 - DNA, 30 bp, Homo sapiens
  chr4:40045626-40045656
  hypo
ctgatgatggcgcccgcctctttgatcatc

SEQ ID NO: 148540 - DNA, 105 bp, Homo sapiens; identical to SEQ ID NO: 18670
  chr4:40161796-40161901
  hypo

SEQ ID NO: 148541 - DNA, 24 bp, Homo sapiens
  chr4:40204871-40204895
  hypo
gtgagccaccgcgcccggccagtt

SEQ ID NO: 148542 - DNA, 30 bp, Homo sapiens
  chr4:40245485-40245515
  hypo
gcaggtgtttgagtgcgccgtccgaactgc

SEQ ID NO: 148543 - DNA, 92 bp, Homo sapiens
  chr4:40261224-40261316
  hypo
attattattatgacgcggcatcgtcttgggtaaatacccagggttcatcatcttgcgccaagaagattcaggacatgcacacacacaaggaa

SEQ ID NO: 148544 - DNA, 25 bp, Homo sapiens
  chr4:40280926-40280951
  hypo
aatgctggccgggcacggtggctca

SEQ ID NO: 148545 - DNA, 24 bp, Homo sapiens
  chr4:40281190-40281214
  hypo
gcgagactccgtctcaaaaaaaaa

SEQ ID NO: 148546 - DNA, 24 bp, Homo sapiens
  chr4:40394501-40394525
  hypo
agcgaaactccgtctcaaaaaaaa

SEQ ID NO: 148547 - DNA, 30 bp, Homo sapiens
  chr4:40464121-40464151
  hypo
tcagagaacagcgcccgtccagtgcagaca

SEQ ID NO: 148548 - DNA, 108 bp, Homo sapiens
  chr4:40485047-40485155
  hypo
tataaatactggttacgctattaatgattacaggtgaaattagaaacacgagaacatctttaaaaggtcaactccaaggctgatcagtttagacgggatgctaaaatt

SEQ ID NO: 148549 - DNA, 200 bp, Homo sapiens
  chr4:40485401-40485601
  hypo
aaaggggcggggtagcggaagcagagggagcgagacaggcaggggtcagatgggagcgttataacacccaggagaggacttcaagttctccttggctgattggaggattctgagcagagaagcgctgtgatctgcttttctgttttttaagatcactggtgtgcagccgggtgcattggctcacgccggtaatcccagct

SEQ ID NO: 148550 - DNA, 25 bp, Homo sapiens
  chr4:40492626-40492651
  hypo
attaaaaatacaaaaattagccggg

SEQ ID NO: 148551 - DNA, 84 bp, Homo sapiens; identical to SEQ ID NO: 68194
  chr4:40492770-40492854
  hypo

SEQ ID NO: 148552 - DNA, 31 bp, Homo sapiens; identical to SEQ ID NO: 18673
  chr4:40510717-40510748
  hypo

SEQ ID NO: 148553 - DNA, 17 bp, Homo sapiens
  chr4:40551554-40551571
  hypo
tttgagatgaagtctcg

SEQ ID NO: 148554 - DNA, 30 bp, Homo sapiens; identical to SEQ ID NO: 40433
  chr4:40569239-40569269
  hypo

SEQ ID NO: 148555 - DNA, 40 bp, Homo sapiens; identical to SEQ ID NO: 68197
  chr4:40625665-40625705
  hypo

SEQ ID NO: 148556 - DNA, 745 bp, Homo sapiens; identical to SEQ ID NO: 109996
  chr4:40751828-40752573
  hypo

SEQ ID NO: 148557 - DNA, 30 bp, Homo sapiens
  chr4:40817938-40817968
  hypo
tgatggtggcaagacgagagaacatgcttg

SEQ ID NO: 148558 - DNA, 41 bp, Homo sapiens; identical to SEQ ID NO: 68200
  chr4:40823879-40823920
  hypo

SEQ ID NO: 148559 - DNA, 101 bp, Homo sapiens; identical to SEQ ID NO: 18674
  chr4:40857393-40857494
  hypo

SEQ ID NO: 148560 - DNA, 30 bp, Homo sapiens; identical to SEQ ID NO: 18675
  chr4:40888204-40888234
  hypo

SEQ ID NO: 148561 - DNA, 148 bp, Homo sapiens
  chr4:40910433-40910581
  hypo
acacattcctgtcaccgcgccttgctgcctcctaggtgcggcaacaatgctggctttcctgacggagagagggaggccggcatccccaggccacacctataatgcctctcaccccatacacgtgtgcacaacacgcctcctcccctcc

SEQ ID NO: 148562 - DNA, 30 bp, Homo sapiens; identical to SEQ ID NO: 18676
  chr4:40921156-40921186
  hypo

SEQ ID NO: 148563 - DNA, 40 bp, Homo sapiens; identical to SEQ ID NO: 68204
  chr4:40983408-40983448
  hypo

SEQ ID NO: 148564 - DNA, 31 bp, Homo sapiens; identical to SEQ ID NO: 40438
  chr4:41003481-41003512
  hypo

SEQ ID NO: 148565 - DNA, 189 bp, Homo sapiens; identical to SEQ ID NO: 18678
  chr4:41012739-41012928
  hypo

SEQ ID NO: 148566 - DNA, 31 bp, Homo sapiens; identical to SEQ ID NO: 18679
  chr4:41111870-41111901
  hypo

SEQ ID NO: 148567 - DNA, 89 bp, Homo sapiens; identical to SEQ ID NO: 68208
  chr4:41167663-41167752
  hypo

SEQ ID NO: 148568 - DNA, 31 bp, Homo sapiens; identical to SEQ ID NO: 3253
  chr4:41168397-41168428
  hypo

SEQ ID NO: 148569 - DNA, 35 bp, Homo sapiens; identical to SEQ ID NO: 68210
  chr4:41198149-41198184
  hypo

SEQ ID NO: 148570 - DNA, 139 bp, Homo sapiens; identical to SEQ ID NO: 3254
  chr4:41216264-41216403
  hypo

SEQ ID NO: 148571 - DNA, 316 bp, Homo sapiens; identical to SEQ ID NO: 3255
  chr4:41218382-41218698
  hypo

SEQ ID NO: 148572 - DNA, 788 bp, Homo sapiens; identical to SEQ ID NO: 3257
  chr4:41259085-41259873
  hypo

SEQ ID NO: 148573 - DNA, 36 bp, Homo sapiens; identical to SEQ ID NO: 68214
  chr4:41317296-41317332
  hypo

SEQ ID NO: 148574 - DNA, 519 bp, Homo sapiens; identical to SEQ ID NO: 110004
  chr4:41362243-41362762
  hypo

SEQ ID NO: 148575 - DNA, 1058 bp, Homo sapiens; identical to SEQ ID NO: 40445
  chr4:41362780-41363838
  hypo

SEQ ID NO: 148576 - DNA, 30 bp, Homo sapiens; identical to SEQ ID NO: 68217
  chr4:41505266-41505296
  hypo

SEQ ID NO: 148577 - DNA, 30 bp, Homo sapiens; identical to SEQ ID NO: 68218
  chr4:41643092-41643122
  hypo

SEQ ID NO: 148578 - DNA, 1372 bp, Homo sapiens; identical to SEQ ID NO: 110025
  chr4:41883149-41884521
  hypo

SEQ ID NO: 148579 - DNA, 180 bp, Homo sapiens; identical to SEQ ID NO: 110031
  chr4:41993655-41993835
  hypo

SEQ ID NO: 148580 - DNA, 88 bp, Homo sapiens
  chr4:41994051-41994139
  hypo
ggacagaatgaatcatcggctgggtgcagtggctcatgctgctaatcctcaggaagattgtaaaccttaggacgctgaggtgggtgga

SEQ ID NO: 148581 - DNA, 30 bp, Homo sapiens; identical to SEQ ID NO: 40462
  chr4:42119644-42119674
  hypo

SEQ ID NO: 148582 - DNA, 450 bp, Homo sapiens; identical to SEQ ID NO: 3265
  chr4:42152961-42153411
  hypo

SEQ ID NO: 148583 - DNA, 41 bp, Homo sapiens; identical to SEQ ID NO: 3266
  chr4:42153591-42153632
  hypo

SEQ ID NO: 148584 - DNA, 1206 bp, Homo sapiens; identical to SEQ ID NO: 110035
  chr4:42153881-42155087
  hypo

SEQ ID NO: 148585 - DNA, 165 bp, Homo sapiens
  chr4:42316044-42316209
  hypo
tctctagtgaggcggcgtgccccgcccccctgtggcggtctcagcggtgagaaatcaggacccatgcagtgcgaggaataacccgagctctcagcaacgcggaaagaaacttgccagcaacctagcttaaaggatcctcacatactaccgcgacgactctgcaca

SEQ ID NO: 148586 - DNA, 121 bp, Homo sapiens
  chr4:42317329-42317450
  hypo
tccccagatcaagcccagcaggcgcccaccggccgcaccgactgcggggcccacttagcccgtgcccacctggaacctgcgccggcccacaagggccgtgtgcagccccggctcctggtgc

SEQ ID NO: 148587 - DNA, 266 bp, Homo sapiens
  chr4:42348065-42348331
  hypo
ggagttggcaggagccgggaacaggcgggagccctgcccgggtcggagctggcgtggcacgagccctgcccgcctgggtgcagcctcccccacaggctcggaaatgcctgctcctgctacctggcctgtatctgttcttggcgcccgctccgatttcggagaaaagttgaggccgagtccgggtgctgtggtaacctggccgggtatgcgtgcgctcggggtggggctgacacgccagccctttgccacctcggccccctcctgac

SEQ ID NO: 148588 - DNA, 2289 bp, Homo sapiens; identical to SEQ ID NO: 40466
  chr4:42398814-42401103
  hypo

SEQ ID NO: 148589 - DNA, 30 bp, Homo sapiens; identical to SEQ ID NO: 18691
  chr4:42429057-42429087
  hypo

SEQ ID NO: 148590 - DNA, 1079 bp, Homo sapiens; identical to SEQ ID NO: 110037
  chr4:42657888-42658967
  hypo

SEQ ID NO: 148591 - DNA, 139 bp, Homo sapiens; identical to SEQ ID NO: 110039
  chr4:42659534-42659673
  hypo

SEQ ID NO: 148592 - DNA, 30 bp, Homo sapiens; identical to SEQ ID NO: 3271
  chr4:43770052-43770082
  hypo

SEQ ID NO: 148593 - DNA, 31 bp, Homo sapiens; identical to SEQ ID NO: 18694
  chr4:44520583-44520614
  hypo

SEQ ID NO: 148594 - DNA, 35 bp, Homo sapiens
  chr4:44679262-44679297
  hypo
aagttccaagaaagggccaggcgcggtggctcacg

SEQ ID NO: 148595 - DNA, 30 bp, Homo sapiens; identical to SEQ ID NO: 3276
  chr4:44833239-44833269
  hypo

SEQ ID NO: 148596 - DNA, 24 bp, Homo sapiens
  chr4:46067748-46067772
  hypo
tttttttttgagacagagtctcgc

SEQ ID NO: 148597 - DNA, 182 bp, Homo sapiens; identical to SEQ ID NO: 68235
  chr4:47427737-47427919
  hypo

SEQ ID NO: 148598 - DNA, 440 bp, Homo sapiens; identical to SEQ ID NO: 110056
  chr4:47487072-47487512
  hypo

SEQ ID NO: 148599 - DNA, 30 bp, Homo sapiens; identical to SEQ ID NO: 3282
  chr4:47569090-47569120
  hypo

SEQ ID NO: 148600 - DNA, 29 bp, Homo sapiens
  chr4:47788255-47788284
  hypo
agaatagggcactcagcagggcgcggtgg

SEQ ID NO: 148601 - DNA, 31 bp, Homo sapiens; identical to SEQ ID NO: 68238
  chr4:48016911-48016942
  hypo

SEQ ID NO: 148602 - DNA, 151 bp, Homo sapiens; identical to SEQ ID NO: 68239
  chr4:48017181-48017332
  hypo

SEQ ID NO: 148603 - DNA, 30 bp, Homo sapiens; identical to SEQ ID NO: 3284
  chr4:48226149-48226179
  hypo

SEQ ID NO: 148604 - DNA, 32 bp, Homo sapiens; identical to SEQ ID NO: 68241
  chr4:48378916-48378948
  hypo

SEQ ID NO: 148605 - DNA, 228 bp, Homo sapiens; identical to SEQ ID NO: 68242
  chr4:48496109-48496337
  hypo

SEQ ID NO: 148606 - DNA, 30 bp, Homo sapiens
  chr4:48496641-48496671
  hypo
taaaaagccgcctagcgatcgcgccactgc

SEQ ID NO: 148607 - DNA, 30 bp, Homo sapiens; identical to SEQ ID NO: 68243
  chr4:48502161-48502191
  hypo

SEQ ID NO: 148608 - DNA, 152 bp, Homo sapiens; identical to SEQ ID NO: 18701
  chr4:48572778-48572930
  hypo

SEQ ID NO: 148609 - DNA, 149 bp, Homo sapiens; identical to SEQ ID NO: 18702
  chr4:48678684-48678833
  hypo

SEQ ID NO: 148610 - DNA, 137 bp, Homo sapiens; identical to SEQ ID NO: 18703
  chr4:48679319-48679456
  hypo

SEQ ID NO: 148611 - DNA, 197 bp, Homo sapiens; identical to SEQ ID NO: 18704
  chr4:48679695-48679892
  hypo

SEQ ID NO: 148612 - DNA, 19 bp, Homo sapiens
  chr4:48848471-48848490
  hypo
gtgttggtagttggccggg

SEQ ID NO: 148613 - DNA, 89 bp, Homo sapiens
  chr4:48887291-48887380
  hypo
cactgcgccatgccccgacatgttcttaaagagcagaaaaacatgtaacgcttagttcacttgaaagccttccacggaatacatttcag

SEQ ID NO: 148614 - DNA, 31 bp, Homo sapiens
  chr4:48947667-48947698
  hypo
ttagtttttttttttttgagacggagtctcg

SEQ ID NO: 148615 - DNA, 31 bp, Homo sapiens
  chr4:48947937-48947968
  hypo
tataggcgtgagccatcgcgcccagcaaaac

SEQ ID NO: 148616 - DNA, 45 bp, Homo sapiens; identical to SEQ ID NO: 68249
  chr4:48987267-48987312
  hypo

SEQ ID NO: 148617 - DNA, 20 bp, Homo sapiens
  chr4:52759861-52759881
  hypo
acaggcgtaagccaccgtgc

SEQ ID NO: 148618 - DNA, 22 bp, Homo sapiens
  chr4:52892694-52892716
  hypo
ttacaggcgtaagtcatcgcgc

SEQ ID NO: 148619 - DNA, 34 bp, Homo sapiens
  chr4:53200852-53200886
  hypo
gggaggccaaggcaggtggatcgcgaggtcagga

SEQ ID NO: 148620 - DNA, 94 bp, Homo sapiens
  chr4:53201065-53201159
  hypo
cctgggcgacagggcaagactcagtctcaaaaaaaagaaaatagcaagttaatcttactttaaatacagatgcggaagttctaaataaaatgtc

SEQ ID NO: 148621 - DNA, 90 bp, Homo sapiens
  chr4:53230796-53230886
  hypo
ttatatattttgacttcatggcgctcgtattagagaaactaatctcacagaggtatgttgataggaataaaagaaaataggctgggcaca

SEQ ID NO: 148622 - DNA, 30 bp, Homo sapiens; identical to SEQ ID NO: 18707
  chr4:53522806-53522836
  hypo

SEQ ID NO: 148623 - DNA, 44 bp, Homo sapiens; identical to SEQ ID NO: 18708
  chr4:53587808-53587852
  hypo

SEQ ID NO: 148624 - DNA, 30 bp, Homo sapiens; identical to SEQ ID NO: 68256
  chr4:53690609-53690639
  hypo

SEQ ID NO: 148625 - DNA, 395 bp, Homo sapiens; identical to SEQ ID NO: 68257
  chr4:53739881-53740276
  hypo

SEQ ID NO: 148626 - DNA, 30 bp, Homo sapiens; identical to SEQ ID NO: 18709
  chr4:53744058-53744088
  hypo

SEQ ID NO: 148627 - DNA, 33 bp, Homo sapiens; identical to SEQ ID NO: 68259
  chr4:54229704-54229737
  hypo

SEQ ID NO: 148628 - DNA, 33 bp, Homo sapiens; identical to SEQ ID NO: 68260
  chr4:54229976-54230009
  hypo

SEQ ID NO: 148629 - DNA, 40 bp, Homo sapiens; identical to SEQ ID NO: 68261
  chr4:54317440-54317480
  hypo

SEQ ID NO: 148630 - DNA, 31 bp, Homo sapiens; identical to SEQ ID NO: 18710
  chr4:54357937-54357968
  hypo

SEQ ID NO: 148631 - DNA, 31 bp, Homo sapiens; identical to SEQ ID NO: 18711
  chr4:54459311-54459342
  hypo

SEQ ID NO: 148632 - DNA, 38 bp, Homo sapiens; identical to SEQ ID NO: 68264
  chr4:54500676-54500714
  hypo

SEQ ID NO: 148633 - DNA, 30 bp, Homo sapiens
  chr4:54538662-54538692
  hypo
tcatgactccctgttcgcgtttctgtttct

SEQ ID NO: 148634 - DNA, 30 bp, Homo sapiens
  chr4:54673013-54673043
  hypo
tgttatcagcatatacgtagtttttattct

SEQ ID NO: 148635 - DNA, 143 bp, Homo sapiens
  chr4:54732284-54732427
  hypo
atcttccctgcctgtcgattcagcgtggggacctcagcgctggacttcaaatcctgattctagctcccggtgactcagcaagaaggcctgaaggctctctaccctgacacaacctacatccacttatacggcaagacgctgag

SEQ ID NO: 148636 - DNA, 31 bp, Homo sapiens; identical to SEQ ID NO: 68265
  chr4:54775816-54775847
  hypo

SEQ ID NO: 148637 - DNA, 71 bp, Homo sapiens; identical to SEQ ID NO: 18712
  chr4:54858182-54858253
  hypo

SEQ ID NO: 148638 - DNA, 31 bp, Homo sapiens; identical to SEQ ID NO: 68267
  chr4:55021856-55021887
  hypo

SEQ ID NO: 148639 - DNA, 41 bp, Homo sapiens
  chr4:55406439-55406480
  hypo
taaaaatacacatttccggccgggcgcggtggctcacgcct

SEQ ID NO: 148640 - DNA, 1681 bp, Homo sapiens; identical to SEQ ID NO: 110116
  chr4:55523741-55525422
  hypo

SEQ ID NO: 148641 - DNA, 230 bp, Homo sapiens; identical to SEQ ID NO: 3297
  chr4:55561713-55561943
  hypo

SEQ ID NO: 148642 - DNA, 92 bp, Homo sapiens; identical to SEQ ID NO: 3298
  chr4:55564468-55564560
  hypo

SEQ ID NO: 148643 - DNA, 30 bp, Homo sapiens; identical to SEQ ID NO: 3299
  chr4:55565886-55565916
  hypo

SEQ ID NO: 148644 - DNA, 76 bp, Homo sapiens; identical to SEQ ID NO: 3300
  chr4:55569949-55570025
  hypo

SEQ ID NO: 148645 - DNA, 30 bp, Homo sapiens; identical to SEQ ID NO: 3301
  chr4:55573295-55573325
  hypo

SEQ ID NO: 148646 - DNA, 30 bp, Homo sapiens; identical to SEQ ID NO: 3302
  chr4:55589780-55589810
  hypo

SEQ ID NO: 148647 - DNA, 46 bp, Homo sapiens; identical to SEQ ID NO: 3303
  chr4:55592093-55592139
  hypo

SEQ ID NO: 148648 - DNA, 303 bp, Homo sapiens; identical to SEQ ID NO: 3304
  chr4:55593415-55593718
  hypo

SEQ ID NO: 148649 - DNA, 30 bp, Homo sapiens; identical to SEQ ID NO: 3305
  chr4:55594000-55594030
  hypo

SEQ ID NO: 148650 - DNA, 63 bp, Homo sapiens; identical to SEQ ID NO: 3306
  chr4:55595496-55595559
  hypo

SEQ ID NO: 148651 - DNA, 35 bp, Homo sapiens; identical to SEQ ID NO: 3307
  chr4:55598030-55598065
  hypo

SEQ ID NO: 148652 - DNA, 43 bp, Homo sapiens; identical to SEQ ID NO: 3308
  chr4:55599305-55599348
  hypo

SEQ ID NO: 148653 - DNA, 97 bp, Homo sapiens; identical to SEQ ID NO: 3309
  chr4:55602682-55602779
  hypo

SEQ ID NO: 148654 - DNA, 30 bp, Homo sapiens; identical to SEQ ID NO: 3310
  chr4:55604624-55604654
  hypo

SEQ ID NO: 148655 - DNA, 30 bp, Homo sapiens
  chr4:55972129-55972159
  hypo
ccaggccataaacaacgcggctgtttgtgc

SEQ ID NO: 148656 - DNA, 205 bp, Homo sapiens
  chr4:56205290-56205495
  hypo
tcctctctcatgaggcgccatgccgcctcttgtggtggccttaggggtaaggggctgagacccacccggtgtgatgaataaatctggactctcagcaacacggaaagaaactggccactaacctggggtaaaggatcctcatctaccatggcgacgactctgtgcacagaccaacgaaggagaagccacgggagtcgataaagta

SEQ ID NO: 148657 - DNA, 36 bp, Homo sapiens; identical to SEQ ID NO: 68283
  chr4:56213495-56213531
  hypo

SEQ ID NO: 148658 - DNA, 36 bp, Homo sapiens; identical to SEQ ID NO: 68284
  chr4:56213650-56213686
  hypo

SEQ ID NO: 148659 - DNA, 104 bp, Homo sapiens; identical to SEQ ID NO: 68285
  chr4:56222929-56223033
  hypo

SEQ ID NO: 148660 - DNA, 29 bp, Homo sapiens
  chr4:56226091-56226120
  hypo
tttttctgtcgggtgcggtggctcacgcc

SEQ ID NO: 148661 - DNA, 19 bp, Homo sapiens
  chr4:56227141-56227160
  hypo
ccaccgcgcccggccagaa

SEQ ID NO: 148662 - DNA, 104 bp, Homo sapiens
  chr4:56227950-56228054
  hypo
acagagtgagactccatctaaaaaaaaagagcaaacccgtggacatcctctttggaagggtaggctacatcagcggatctcactccactcgttaaaacttcatc

SEQ ID NO: 148663 - DNA, 35 bp, Homo sapiens; identical to SEQ ID NO: 3314
  chr4:56412389-56412424
  hypo

SEQ ID NO: 148664 - DNA, 30 bp, Homo sapiens; identical to SEQ ID NO: 18730
  chr4:56458607-56458637
  hypo

SEQ ID NO: 148665 - DNA, 1438 bp, Homo sapiens; identical to SEQ ID NO: 110140
  chr4:56501426-56502864
  hypo

SEQ ID NO: 148666 - DNA, 19 bp, Homo sapiens
  chr4:56508595-56508614
  hypo
ctaattggccgggcacggt

SEQ ID NO: 148667 - DNA, 18 bp, Homo sapiens
  chr4:56640199-56640217
  hypo
aggcgtgagccacagcgc

SEQ ID NO: 148668 - DNA, 30 bp, Homo sapiens; identical to SEQ ID NO: 40547
  chr4:56751724-56751754
  hypo

SEQ ID NO: 148669 - DNA, 27 bp, Homo sapiens
  chr4:56785799-56785826
  hypo
ctttgggaggccaaggcgggcggctca

SEQ ID NO: 148670 - DNA, 981 bp, Homo sapiens; identical to SEQ ID NO: 110150
  chr4:56914934-56915915
  hypo

SEQ ID NO: 148671 - DNA, 106 bp, Homo sapiens; identical to SEQ ID NO: 68293
  chr4:56936356-56936462
  hypo

SEQ ID NO: 148672 - DNA, 21 bp, Homo sapiens
  chr4:56963539-56963560
  hypo
gagaatgtgacctgtcctcta

SEQ ID NO: 148673 - DNA, 20 bp, Homo sapiens
  chr4:56963619-56963639
  hypo
ggcctggttagtacttggat

SEQ ID NO: 148674 - DNA, 38 bp, Homo sapiens
  chr4:56966392-56966430
  hypo
agcaagactccatcttgcggggacgggggggaaggggt

SEQ ID NO: 148675 - DNA, 30 bp, Homo sapiens
  chr4:57019615-57019645
  hypo
tctgtattttacctccgagatgtggtgtat

SEQ ID NO: 148676 - DNA, 29 bp, Homo sapiens
  chr4:57025528-57025557
  hypo
agtctcagctggacgcggtggctcacgcc

SEQ ID NO: 148677 - DNA, 28 bp, Homo sapiens
  chr4:57039197-57039225
  hypo
aggcgtgagccaccgcacccggccaaca

SEQ ID NO: 148678 - DNA, 39 bp, Homo sapiens; identical to SEQ ID NO: 68296
  chr4:57051387-57051426
  hypo

SEQ ID NO: 148679 - DNA, 32 bp, Homo sapiens; identical to SEQ ID NO: 68297
  chr4:57064131-57064163
  hypo

SEQ ID NO: 148680 - DNA, 90 bp, Homo sapiens; identical to SEQ ID NO: 18736
  chr4:57082784-57082874
  hypo

SEQ ID NO: 148681 - DNA, 116 bp, Homo sapiens
  chr4:57093713-57093829
  hypo
ttttagagcagagatcgaccaacttttataaagggccagatagtaaatattttaggctttacgggccacatagaccggctgcagctgttcaactccatcttcgcagtgcacagata

SEQ ID NO: 148682 - DNA, 30 bp, Homo sapiens
  chr4:57108772-57108802
  hypo
aagctcagaaaaagacgtcgggggccacag

SEQ ID NO: 148683 - DNA, 297 bp, Homo sapiens
  chr4:57178036-57178333
  hypo
tctgtaggtacaggcgtggtgtcctaccttctaattcagtgtggcctgtgggttcgggctgtgtcacgatctctctgatctttccaaatctacccttcatctgaggttgtgtttttttttagtgattgcatctgtattctagagctgcaggccattccacaattcatcctttgaaggaccgcacttgtcccggtggcagatttttgccgctcatttttctcatcaggtccctcttccttttatcttctcagtgcagtcagtaccctgagacttctttggagcgattgtaccaaaact

SEQ ID NO: 148684 - DNA, 2800 bp, Homo sapiens
  chr4:57179993-57182793
  hypo
cggaaacagaatacacgtccttttctccattcgcacgacagagtcttgcgtggggtgaccgatgcctgagtttagctatccctgaacttgagaatacctgcttccaggtgttcttgagaaattaagagggtcgctggcactgtgaataggaaaaggaacgactgtgggtggagaaagcaaaaggctaattgtgttttcctttccaatgttaggatccacaacatgagcaaggcggccttgagagtcggccctgcctggaccagaacggacacccaggcgaggacaagccaacgtggcacgaagaggaacccaatccgctggattccgaggaagagagaagacgccaagaagactactggcgagaactggaggccaagtgcaagcggcaaaaggcggaagcagccgagaagagacgcctagaggagcagaggctgcaggcgctggagaggaggctttgggaagagaacagaaggcaggagctcttggaggaggagggcgaggggcaggagccgcctctagaggcggaaagggcgccgcgggaagagcagcagcggagcctggaagcgccaggttgggaggacgcggagcggagggagcgtgaggagcgcgagcgcctggaggcggaggaggagcgaaggcgtctgcaggcccaggcccaagcggaggagaggcggcggctggaggaggacgccaggctggaggagcggaggcggcaggaggaggaggaaggaagatgcgcggaggagctcaaaaggcaggaggaggaggaggctgagggatgggaagagctggaacagcaggaggcggaggtgcaggggccgcccgaggcgttggaggagactggggagggccggcggggcgcggaggaggaggatctgggggaagaggaggaggagggccaggcgcacctggaggactggagggggcagctcagtgagcttctgaacgactttgaggagaggctcgaagaccaggaacgcctgaaacccgaaggacaaagagaacactccgaggagccaggtatttgcgaggagcagaacccagaggccgagcggcgaagagagcagcagggaaggagcggggatttccagggggccgatcgtcctgggcccgaggaaaagagagaagaaggggacacggagcctctcctgaaacaagaggggccggtggaagccgcgcagcctccggtggagaggaaagaagccgccgcccttgaacaaggccgcaaggtggaggagctgcggtggcaggaggtggacgagagacagaccatgccccggccctacacgttccaggtgtcctccggagggaagcagattctctttcccaaagtcaacctgagccccgtgacgcccgcaaaggacacggggctcaccgctgctccccaggaaccaaaggcccccaaagccagcccagtccagcacgccctaccgtcgtccctgagcgttccccacaccgccattctggtcacgggcgcgcagctctgtggcccggcagtcaacctgagccagatcaaggacaccgcgtgcaagtccctcctgggcttggaggagaagaagcacgcggaagccccagctggggagaaccctccccgaggccccggcgacgcgagggcgggcagcgggaaggctaagccccgccaggagtctcccagcagcgcgtccgcactcgcagaatgggcttccattcggtccagaatcctgaagaacgcagagagtgacccgcgcagcagcgagagggaccagttgaggcccggtgatgagtccactcccaggggccggtgtgattcccgcgggaaccaacggaagactccgccagtcaatgcaaagttctctattatgcctgcctggcagaaattttccgatggtggcacggagacctccaaacagagcacggaagctgaaagcatacgaaaaagacccatgctgggacccagcgaagagacagccccccagcctcctcctgctggtgttcgcgagctcgggaagggtccggagaagtcggagatgcaccgggagcccgcagacaccaccgagggatgcaaatttgccaaagacctcccgtctttccttgtcccaagccttccttaccctccgcagaaagtggtggcccacacagagttcacgacctcgtcggacagcgagactgcaaacgggatagcaaagccagaccctgtgatgccaggtggagaggaaaaagcctcaccgtttggaataaaattgagaaggaccaactattccttgcgcttcaactgcgaccaacaggcagaacagaagaagaagaagaggcacagcagcaccggagacagcgcggatgcagggccgcctgcagcggggagcgctcgtggagagaaagagatggagggtgtggccctcaagcatggtccatccctcccccaagagcggaagcaagccccttccacccggagggactccgctgaaccttccagcagccgctctgttcctgtggcccaccctgggcctccaccggccagcagccagaccccggctccggagcacgacaaggcagcaaacaaaatgccactggcacaaaagccagcactggctcccaagcccaccagtcagaccccaccagcatccccactttccaaactgagcaggccctacttggtagagctgctgtctcgccgagcggggaggccggacccagagccaagtgagccgtccaaggaggaccaggagagcagtgaccgccggccaccctcgcccccaggccccgaggaaaggaagggacagaagagggacgaggaggaagaggcgacagagaggaaacctgcttc

SEQ ID NO: 148685 - DNA, 30 bp, Homo sapiens; identical to SEQ ID NO: 68304
  chr4:57252456-57252486
  hypo

SEQ ID NO: 148686 - DNA, 19 bp, Homo sapiens
  chr4:57274916-57274935
  hypo
ttcaaaaaaaaaaaaaaaa

SEQ ID NO: 148687 - DNA, 839 bp, Homo sapiens; identical to SEQ ID NO: 110159
  chr4:57396530-57397369
  hypo

SEQ ID NO: 148688 - DNA, 31 bp, Homo sapiens; identical to SEQ ID NO: 18742
  chr4:57400757-57400788
  hypo

SEQ ID NO: 148689 - DNA, 31 bp, Homo sapiens
  chr4:57409185-57409216
  hypo
aaaaattcatcctgtacgtgtacttttacct

SEQ ID NO: 148690 - DNA, 39 bp, Homo sapiens
  chr4:57486551-57486590
  hypo
gttttttttttttttttgagacggaattttgttcttgtt

SEQ ID NO: 148691 - DNA, 38 bp, Homo sapiens
  chr4:57486829-57486867
  hypo
cgtgagccaccgcgcccgacatccttctagttgttttt

SEQ ID NO: 148692 - DNA, 158 bp, Homo sapiens; identical to SEQ ID NO: 3320
  chr4:57521505-57521663
  hypo

SEQ ID NO: 148693 - DNA, 682 bp, Homo sapiens; identical to SEQ ID NO: 3321
  chr4:57521700-57522382
  hypo

SEQ ID NO: 148694 - DNA, 396 bp, Homo sapiens; identical to SEQ ID NO: 40556
  chr4:57522419-57522815
  hypo

SEQ ID NO: 148695 - DNA, 575 bp, Homo sapiens; identical to SEQ ID NO: 40557
  chr4:57687531-57688106
  hypo

SEQ ID NO: 148696 - DNA, 248 bp, Homo sapiens
  chr4:57777249-57777497
  hypo
acaaaggcaagagctcgaagaccaaaccctttcgctgtaagccatgccaatatgaagcagaatctgaagaacagtttgtgcatcacatcagagttcacagtgctaagaaattttttgtggaagagagtgcagagaagcaggcaaaagccagggaatctggctcttccactgcagaagagggagatttctccaagggccccattcgctgtgaccgctgcggctacaatactaatcgatatgatcactat

SEQ ID NO: 148697 - DNA, 30 bp, Homo sapiens
  chr4:57803524-57803554
  hypo
gcctcctctcaaaagcgttcgtattatagg

SEQ ID NO: 148698 - DNA, 115 bp, Homo sapiens; identical to SEQ ID NO: 68312
  chr4:57812271-57812386
  hypo

SEQ ID NO: 148699 - DNA, 361 bp, Homo sapiens
  chr4:57813005-57813366
  hypo
gccaccgcgcccagctgcattttctgtcttaatcctgcaccttttgggtgttttcctcatctgcagggcatgcctgcgtgtatgcacgtgcgggcacacacacgcgcgtgcacctttaaattcttcactgaggcttgctggagttctgtctctggtgggtagatggcttacagcaggcagcgcaagatccgtccaccccattcagataaagacagggatttcagggccgtggtccctcaagtcaatgaactccagaggaaaggactcttctggagataccagaagactctggtatgagcaaagcccagactctcctgggctgtactcatgttacaagaaagggatcccccagcctggccag

SEQ ID NO: 148700 - DNA, 30 bp, Homo sapiens
  chr4:57851551-57851581
  hypo
gctcggtgctgtggcgaggcggggatggca

SEQ ID NO: 148701 - DNA, 30 bp, Homo sapiens
  chr4:57889620-57889650
  hypo
gagagcaccaatagacgctataccaagaga

SEQ ID NO: 148702 - DNA, 114 bp, Homo sapiens
  chr4:57896301-57896415
  hypo
tgccattattcaaggcggtgtttataataaaaaataagtacaaagtaataatttttttctcttaacagtgatggtggcctgcgttttggagaaatggaacgagattgtcagatt

SEQ ID NO: 148703 - DNA, 30 bp, Homo sapiens
  chr4:57897119-57897149
  hypo
ctatgagtattgcaccgcgaatgatgagtg

SEQ ID NO: 148704 - DNA, 342 bp, Homo sapiens
  chr4:57921793-57922135
  hypo
ggtggacagggtcatcgcggttctcctggactgctttccattttcataaaatagggcagtcatctcccacctgcaccctgtccctcttctgccctcctcattcctgcccttgactgttctgtatggagatggggctctgtgtctggagtgcatgggtcttatctaaaatccctcgaacttgggagccgccctttgctcatttctggtccgattgcctctctgttaagacattcggtttggctttaagcgggcaaggaggaggttgaataaagggatctctgtgtgcgaatagcccccttcagacttccatggagcagagcgcagggcgtgatggctgcttgg

SEQ ID NO: 148705 - DNA, 13 bp, Homo sapiens
  chr4:57922184-57922197
  hypo
gactcccattgtc

SEQ ID NO: 148706 - DNA, 30 bp, Homo sapiens; identical to SEQ ID NO: 3326
  chr4:57944966-57944996
  hypo

SEQ ID NO: 148707 - DNA, 1587 bp, Homo sapiens; identical to SEQ ID NO: 40562
  chr4:57975869-57977456
  hypo

SEQ ID NO: 148708 - DNA, 30 bp, Homo sapiens
  chr4:59454263-59454293
  hypo
gtgtgtgtgtgtctgcgcacacgtgtatgc

SEQ ID NO: 148709 - DNA, 30 bp, Homo sapiens
  chr4:63059354-63059384
  hypo
gcccagaaagaatcacgaaatctccttgaa

SEQ ID NO: 148710 - DNA, 842 bp, Homo sapiens; identical to SEQ ID NO: 68317
  chr4:64214826-64215668
  hypo

SEQ ID NO: 148711 - DNA, 30 bp, Homo sapiens
  chr4:66107175-66107205
  hypo
actggctggaccaggcgttaccacaaatgg

SEQ ID NO: 148712 - DNA, 44 bp, Homo sapiens
  chr4:66107502-66107546
  hypo
gcttcattgacagaacggctgcagaggaccggaagtggacagct

SEQ ID NO: 148713 - DNA, 173 bp, Homo sapiens; identical to SEQ ID NO: 40570
  chr4:66535574-66535747
  hypo

SEQ ID NO: 148714 - DNA, 714 bp, Homo sapiens; identical to SEQ ID NO: 110183
  chr4:66535966-66536680
  hypo

SEQ ID NO: 148715 - DNA, 30 bp, Homo sapiens
  chr4:66864984-66865014
  hypo
ggagctgttcctattcggccatcttggctc

SEQ ID NO: 148716 - DNA, 30 bp, Homo sapiens; identical to SEQ ID NO: 18753
  chr4:68552347-68552377
  hypo

SEQ ID NO: 148717 - DNA, 24 bp, Homo sapiens
  chr4:68565591-68565615
  hypo
gattgcaagcgtttgagccactgc

SEQ ID NO: 148718 - DNA, 218 bp, Homo sapiens; identical to SEQ ID NO: 18754
  chr4:70647969-70648187
  hypo

SEQ ID NO: 148719 - DNA, 30 bp, Homo sapiens; identical to SEQ ID NO: 68322
  chr4:71566509-71566539
  hypo

SEQ ID NO: 148720 - DNA, 17 bp, Homo sapiens
  chr4:71566848-71566865
  hypo
tgtttttttgagacaga

SEQ ID NO: 148721 - DNA, 76 bp, Homo sapiens; identical to SEQ ID NO: 18756
  chr4:71566924-71567000
  hypo

SEQ ID NO: 148722 - DNA, 39 bp, Homo sapiens; identical to SEQ ID NO: 68325
  chr4:71642191-71642230
  hypo

SEQ ID NO: 148723 - DNA, 94 bp, Homo sapiens
  chr4:71705995-71706089
  hypo
tgctcttttttcaggcggtggaaactgaggcccaaagtaagtgaggctaggggcctggcgcagtgactcattcgtagtgactcattcttgtaat

SEQ ID NO: 148724 - DNA, 153 bp, Homo sapiens
  chr4:71706508-71706661
  hypo
ggccatcctgctctgggtagggccgagagctgtagcacaagtctgtgctgccctgcgctgtgccaccgaaacccgtggtgtgagtggctaaagaaccctttctgaaaggaattgtgataccttggttataaaaaaatcgttgggataatatca

SEQ ID NO: 148725 - DNA, 17 bp, Homo sapiens
  chr4:71729528-71729545
  hypo
tacaaaaagtttagccg

SEQ ID NO: 148726 - DNA, 16 bp, Homo sapiens
  chr4:71729664-71729680
  hypo
gcgacagagtgagact

SEQ ID NO: 148727 - DNA, 38 bp, Homo sapiens; identical to SEQ ID NO: 68330
  chr4:71756388-71756426
  hypo

SEQ ID NO: 148728 - DNA, 30 bp, Homo sapiens
  chr4:71759803-71759833
  hypo
gctttatacatgctgcgtcctctttctgca

SEQ ID NO: 148729 - DNA, 730 bp, Homo sapiens; identical to SEQ ID NO: 3339
  chr4:71767777-71768507
  hypo

SEQ ID NO: 148730 - DNA, 39 bp, Homo sapiens; identical to SEQ ID NO: 68332
  chr4:71774022-71774061
  hypo

SEQ ID NO: 148731 - DNA, 30 bp, Homo sapiens
  chr4:71789092-71789122
  hypo
ccacatgcgtagagacgaagttttgccatg

SEQ ID NO: 148732 - DNA, 150 bp, Homo sapiens; identical to SEQ ID NO: 18761
  chr4:71857968-71858118
  hypo

SEQ ID NO: 148733 - DNA, 38 bp, Homo sapiens
  chr4:71894315-71894353
  hypo
tatttcttttttttctcgagacagtcttgctccgtcgc

SEQ ID NO: 148734 - DNA, 23 bp, Homo sapiens
  chr4:71925576-71925599
  hypo
ggtttgctcgttaaatttattta

SEQ ID NO: 148735 - DNA, 15 bp, Homo sapiens
  chr4:71941299-71941314
  hypo
tgcctggggtgtttc

SEQ ID NO: 148736 - DNA, 84 bp, Homo sapiens; identical to SEQ ID NO: 68336
  chr4:71986659-71986743
  hypo

SEQ ID NO: 148737 - DNA, 39 bp, Homo sapiens; identical to SEQ ID NO: 68337
  chr4:72004453-72004492
  hypo

SEQ ID NO: 148738 - DNA, 30 bp, Homo sapiens
  chr4:72022270-72022300
  hypo
aaataagtgtgtgcgcgcatgcgcgcgcgc

SEQ ID NO: 148739 - DNA, 30 bp, Homo sapiens
  chr4:73960211-73960241
  hypo
catactatgtagacacgtgctgtgctaatg

SEQ ID NO: 148740 - DNA, 37 bp, Homo sapiens; identical to SEQ ID NO: 68338
  chr4:74402450-74402487
  hypo

SEQ ID NO: 148741 - DNA, 22 bp, Homo sapiens
  chr4:74468477-74468499
  hypo
aagtctgtgatgtccaaggcac

SEQ ID NO: 148742 - DNA, 22 bp, Homo sapiens
  chr4:74468798-74468820
  hypo
cgtctcaaaagaagaaagaaag

SEQ ID NO: 148743 - DNA, 344 bp, Homo sapiens; identical to SEQ ID NO: 40584
  chr4:74702405-74702749
  hypo

SEQ ID NO: 148744 - DNA, 30 bp, Homo sapiens; identical to SEQ ID NO: 3345
  chr4:74730215-74730245
  hypo

SEQ ID NO: 148745 - DNA, 210 bp, Homo sapiens; identical to SEQ ID NO: 18764
  chr4:75137754-75137964
  hypo

SEQ ID NO: 148746 - DNA, 143 bp, Homo sapiens; identical to SEQ ID NO: 68344
  chr4:75241343-75241486
  hypo

SEQ ID NO: 148747 - DNA, 99 bp, Homo sapiens
  chr4:75260919-75261018
  hypo
gtctcctggacctgtcgataatgttgtataatttagaaatcatgagtaggaggttttgggctaatggatacaaatcttagctgacgtttcaggggtaac

SEQ ID NO: 148748 - DNA, 35 bp, Homo sapiens; identical to SEQ ID NO: 18766
  chr4:75949440-75949475
  hypo

SEQ ID NO: 148749 - DNA, 46 bp, Homo sapiens; identical to SEQ ID NO: 68346
  chr4:76394242-76394288
  hypo

SEQ ID NO: 148750 - DNA, 30 bp, Homo sapiens
  chr4:76405339-76405369
  hypo
agcaaccctgggtaccgaagcctagagact

SEQ ID NO: 148751 - DNA, 38 bp, Homo sapiens; identical to SEQ ID NO: 68347
  chr4:76553300-76553338
  hypo

SEQ ID NO: 148752 - DNA, 38 bp, Homo sapiens; identical to SEQ ID NO: 68348
  chr4:76553577-76553615
  hypo

SEQ ID NO: 148753 - DNA, 145 bp, Homo sapiens; identical to SEQ ID NO: 18767
  chr4:76554709-76554854
  hypo

SEQ ID NO: 148754 - DNA, 31 bp, Homo sapiens
  chr4:76600185-76600216
  hypo
cgtgagccaccgcacccggccagtagttgct

SEQ ID NO: 148755 - DNA, 30 bp, Homo sapiens; identical to SEQ ID NO: 68350
  chr4:76602459-76602489
  hypo

SEQ ID NO: 148756 - DNA, 30 bp, Homo sapiens; identical to SEQ ID NO: 68351
  chr4:76632510-76632540
  hypo

SEQ ID NO: 148757 - DNA, 25 bp, Homo sapiens
  chr4:76912438-76912463
  hypo
ctttgggaggccaaggcgggcctga

SEQ ID NO: 148758 - DNA, 145 bp, Homo sapiens; identical to SEQ ID NO: 68352
  chr4:76912702-76912847
  hypo

SEQ ID NO: 148759 - DNA, 38 bp, Homo sapiens; identical to SEQ ID NO: 18769
  chr4:76917506-76917544
  hypo

SEQ ID NO: 148760 - DNA, 148 bp, Homo sapiens
  chr4:76932384-76932532
  hypo
tcgctcgtgctgctcgtgttgccgctgggtacgtttgctgccagtgctgatccagccggaggcgaagagaagcactttgggggcaaaaggtaggggttgtgccttcaggatctctcctctctgtcccctgagcggcccgcagcctccc

SEQ ID NO: 148761 - DNA, 39 bp, Homo sapiens; identical to SEQ ID NO: 18770
  chr4:77156170-77156209
  hypo

SEQ ID NO: 148762 - DNA, 1274 bp, Homo sapiens; identical to SEQ ID NO: 110235
  chr4:77227270-77228544
  hypo

SEQ ID NO: 148763 - DNA, 30 bp, Homo sapiens
  chr4:77341397-77341427
  hypo
ttccccacacgcccccgccatacccggcca

SEQ ID NO: 148764 - DNA, 37 bp, Homo sapiens; identical to SEQ ID NO: 18772
  chr4:77448699-77448736
  hypo

SEQ ID NO: 148765 - DNA, 31 bp, Homo sapiens; identical to SEQ ID NO: 68357
  chr4:77475935-77475966
  hypo

SEQ ID NO: 148766 - DNA, 99 bp, Homo sapiens; identical to SEQ ID NO: 68358
  chr4:77596031-77596130
  hypo

SEQ ID NO: 148767 - DNA, 62 bp, Homo sapiens; identical to SEQ ID NO: 68359
  chr4:77661924-77661986
  hypo

SEQ ID NO: 148768 - DNA, 30 bp, Homo sapiens; identical to SEQ ID NO: 68360
  chr4:77662404-77662434
  hypo

SEQ ID NO: 148769 - DNA, 122 bp, Homo sapiens
  chr4:77662881-77663003
  hypo
ggggacctgcttagcggagcaaacggtggaacaaggggcacccagagaggggatgagacccccagggagccatcctcctggggggccagggccgggaagtccatgtcggccgaggacctgct

SEQ ID NO: 148770 - DNA, 36 bp, Homo sapiens
  chr4:77776590-77776626
  hypo
gattacaggcgtgagccaccgcgccctgccagaaat

SEQ ID NO: 148771 - DNA, 119 bp, Homo sapiens
  chr4:77872186-77872305
  hypo
ctgcaggtggtggctcgggagattttgtagttacagacgaaagacttactgagatactggaagctcggaaatcccagaaatgcaaggctgtgctctcaggctcccggctcttccccctc

SEQ ID NO: 148772 - DNA, 165 bp, Homo sapiens; identical to SEQ ID NO: 68362
  chr4:78034395-78034560
  hypo

SEQ ID NO: 148773 - DNA, 31 bp, Homo sapiens; identical to SEQ ID NO: 18773
  chr4:78100428-78100459
  hypo

SEQ ID NO: 148774 - DNA, 106 bp, Homo sapiens; identical to SEQ ID NO: 68364
  chr4:78584405-78584511
  hypo

SEQ ID NO: 148775 - DNA, 30 bp, Homo sapiens; identical to SEQ ID NO: 68365
  chr4:78692522-78692552
  hypo

SEQ ID NO: 148776 - DNA, 24 bp, Homo sapiens
  chr4:78727284-78727308
  hypo
aaaattaacttcaggccgggcaca

SEQ ID NO: 148777 - DNA, 162 bp, Homo sapiens
  chr4:78839183-78839345
  hypo
ggcaacagagcgagacttcatctcaaaaaaaaaaaaaaaaggtatgtgtttatatatatacatgatatagaagttacagaaaagtagcaatgattgtttggagtagcaatggaacaagtaggtcaaggatgggttctaggaggagttcgaaaatatatacca

SEQ ID NO: 148778 - DNA, 30 bp, Homo sapiens; identical to SEQ ID NO: 68367
  chr4:78879938-78879968
  hypo

SEQ ID NO: 148779 - DNA, 49 bp, Homo sapiens; identical to SEQ ID NO: 68368
  chr4:78924252-78924301
  hypo

SEQ ID NO: 148780 - DNA, 785 bp, Homo sapiens; identical to SEQ ID NO: 110252
  chr4:78979791-78980576
  hypo

SEQ ID NO: 148781 - DNA, 134 bp, Homo sapiens; identical to SEQ ID NO: 68370
  chr4:79345198-79345332
  hypo

SEQ ID NO: 148782 - DNA, 179 bp, Homo sapiens; identical to SEQ ID NO: 68371
  chr4:79689599-79689778
  hypo

SEQ ID NO: 148783 - DNA, 93 bp, Homo sapiens; identical to SEQ ID NO: 18776
  chr4:79702946-79703039
  hypo

SEQ ID NO: 148784 - DNA, 151 bp, Homo sapiens; identical to SEQ ID NO: 18777
  chr4:79828973-79829124
  hypo

SEQ ID NO: 148785 - DNA, 124 bp, Homo sapiens; identical to SEQ ID NO: 18778
  chr4:79832670-79832794
  hypo

SEQ ID NO: 148786 - DNA, 30 bp, Homo sapiens
  chr4:79853702-79853732
  hypo
aaactcattgtttaacgcaaatgtccaatg

SEQ ID NO: 148787 - DNA, 39 bp, Homo sapiens
  chr4:80273037-80273076
  hypo
atagatgcggctgggcgcagtgcctcacacctgtaatct

SEQ ID NO: 148788 - DNA, 30 bp, Homo sapiens; identical to SEQ ID NO: 68375
  chr4:80978554-80978584
  hypo

SEQ ID NO: 148789 - DNA, 1326 bp, Homo sapiens; identical to SEQ ID NO: 110260
  chr4:81105152-81106478
  hypo

SEQ ID NO: 148790 - DNA, 906 bp, Homo sapiens; identical to SEQ ID NO: 110261
  chr4:81122997-81123903
  hypo

SEQ ID NO: 148791 - DNA, 782 bp, Homo sapiens; identical to SEQ ID NO: 40624
  chr4:81124121-81124903
  hypo

SEQ ID NO: 148792 - DNA, 98 bp, Homo sapiens; identical to SEQ ID NO: 68379
  chr4:81205170-81205268
  hypo

SEQ ID NO: 148793 - DNA, 408 bp, Homo sapiens; identical to SEQ ID NO: 18781
  chr4:81307564-81307972
  hypo

SEQ ID NO: 148794 - DNA, 45 bp, Homo sapiens; identical to SEQ ID NO: 18782
  chr4:81605693-81605738
  hypo

SEQ ID NO: 148795 - DNA, 30 bp, Homo sapiens; identical to SEQ ID NO: 68382
  chr4:82098555-82098585
  hypo

SEQ ID NO: 148796 - DNA, 285 bp, Homo sapiens; identical to SEQ ID NO: 3377
  chr4:82135919-82136204
  hypo

SEQ ID NO: 148797 - DNA, 741 bp, Homo sapiens; identical to SEQ ID NO: 110273
  chr4:82136243-82136984
  hypo

SEQ ID NO: 148798 - DNA, 30 bp, Homo sapiens; identical to SEQ ID NO: 18785
  chr4:82350868-82350898
  hypo

SEQ ID NO: 148799 - DNA, 27 bp, Homo sapiens
  chr4:82740526-82740553
  hypo
tgggtgacagagcgagactccgtctca

SEQ ID NO: 148800 - DNA, 30 bp, Homo sapiens; identical to SEQ ID NO: 68386
  chr4:83265407-83265437
  hypo

SEQ ID NO: 148801 - DNA, 30 bp, Homo sapiens; identical to SEQ ID NO: 68387
  chr4:83273342-83273372
  hypo

SEQ ID NO: 148802 - DNA, 30 bp, Homo sapiens
  chr4:83301202-83301232
  hypo
aagcgtgagccaccgcgacaggccatgaat

SEQ ID NO: 148803 - DNA, 141 bp, Homo sapiens
  chr4:83301588-83301729
  hypo
agccggaaagctctgcggttggtagcacctctgctaccatgccctctgggcttgttccgcccacgtggcccagcaggctgcactccacttgcactaccagcccagatctcatgcctgccaagggtgagccatgcacagagc

SEQ ID NO: 148804 - DNA, 321 bp, Homo sapiens; identical to SEQ ID NO: 68388
  chr4:83323436-83323757
  hypo

SEQ ID NO: 148805 - DNA, 30 bp, Homo sapiens
  chr4:83372352-83372382
  hypo
gccacatgtggagggcggcattcacagctg

SEQ ID NO: 148806 - DNA, 158 bp, Homo sapiens
  chr4:83407497-83407655
  hypo
aaaaaaaaaaaaaaaaaaagaagaaagcactgcaaatgactatgaattcatagttatcgttatatctgcagaaataattttgaacatatcaaattactaactgccgacatgtaagttgtgtttggctctgcagtgctactaaccgtgtctgagtggct

SEQ ID NO: 148807 - DNA, 34 bp, Homo sapiens; identical to SEQ ID NO: 68389
  chr4:83448626-83448660
  hypo

SEQ ID NO: 148808 - DNA, 31 bp, Homo sapiens; identical to SEQ ID NO: 18787
  chr4:83496633-83496664
  hypo

SEQ ID NO: 148809 - DNA, 156 bp, Homo sapiens; identical to SEQ ID NO: 68391
  chr4:83551710-83551866
  hypo

SEQ ID NO: 148810 - DNA, 33 bp, Homo sapiens; identical to SEQ ID NO: 18788
  chr4:83700297-83700330
  hypo

SEQ ID NO: 148811 - DNA, 30 bp, Homo sapiens
  chr4:83737517-83737547
  hypo
accgcgcccggcctatacactcatattctt

SEQ ID NO: 148812 - DNA, 41 bp, Homo sapiens
  chr4:83760708-83760749
  hypo
gattacaagtgtgagctaccgtgcccagcctcatttataat

SEQ ID NO: 148813 - DNA, 46 bp, Homo sapiens; identical to SEQ ID NO: 18789
  chr4:83808871-83808917
  hypo

SEQ ID NO: 148814 - DNA, 47 bp, Homo sapiens; identical to SEQ ID NO: 68394
  chr4:83839358-83839405
  hypo

SEQ ID NO: 148815 - DNA, 30 bp, Homo sapiens
  chr4:83849330-83849360
  hypo
tcctcaagtatcatccgttccgctgctgcc

SEQ ID NO: 148816 - DNA, 30 bp, Homo sapiens
  chr4:83900123-83900153
  hypo
tggaccagaggttggcgttcgaggcttctt

SEQ ID NO: 148817 - DNA, 30 bp, Homo sapiens; identical to SEQ ID NO: 68395
  chr4:84258456-84258486
  hypo

SEQ ID NO: 148818 - DNA, 86 bp, Homo sapiens; identical to SEQ ID NO: 40648
  chr4:84292569-84292655
  hypo

SEQ ID NO: 148819 - DNA, 177 bp, Homo sapiens
  chr4:84310213-84310390
  hypo
ccagcctccacctgccgttcactctgcccacagtaacaaaagtgcggatgcagccactgttagcgtgttctgcccacggcactatttagtgatgcatcagacctttctcacatttttctgtgtggactcatgtcctgcttttgtgcttctctcaaggactttcggcttctcctgaaa

SEQ ID NO: 148820 - DNA, 31 bp, Homo sapiens
  chr4:84405333-84405364
  hypo
ttttgagtaaaatagacgttatatcttaaaa

SEQ ID NO: 148821 - DNA, 36 bp, Homo sapiens; identical to SEQ ID NO: 68397
  chr4:84468674-84468710
  hypo

SEQ ID NO: 148822 - DNA, 28 bp, Homo sapiens
  chr4:84581095-84581123
  hypo
gtcaacaattgggggcttggccgggtgc

SEQ ID NO: 148823 - DNA, 30 bp, Homo sapiens
  chr4:84862300-84862330
  hypo
gccaccacgcccagccggaagttgcaagta

SEQ ID NO: 148824 - DNA, 31 bp, Homo sapiens; identical to SEQ ID NO: 68399
  chr4:85464134-85464165
  hypo

SEQ ID NO: 148825 - DNA, 385 bp, Homo sapiens; identical to SEQ ID NO: 40665
  chr4:85503525-85503910
  hypo

SEQ ID NO: 148826 - DNA, 1108 bp, Homo sapiens; identical to SEQ ID NO: 110325
  chr4:85503985-85505093
  hypo

SEQ ID NO: 148827 - DNA, 31 bp, Homo sapiens; identical to SEQ ID NO: 68402
  chr4:85547362-85547393
  hypo

SEQ ID NO: 148828 - DNA, 30 bp, Homo sapiens
  chr4:85611721-85611751
  hypo
cgtgcttgttccacccgtgatgaccagctt

SEQ ID NO: 148829 - DNA, 31 bp, Homo sapiens; identical to SEQ ID NO: 68403
  chr4:85634474-85634505
  hypo

SEQ ID NO: 148830 - DNA, 1670 bp, Homo sapiens; identical to SEQ ID NO: 110327
  chr4:85886792-85888462
  hypo

SEQ ID NO: 148831 - DNA, 31 bp, Homo sapiens; identical to SEQ ID NO: 68407
  chr4:85948837-85948868
  hypo

SEQ ID NO: 148832 - DNA, 162 bp, Homo sapiens; identical to SEQ ID NO: 18794
  chr4:86167316-86167478
  hypo

SEQ ID NO: 148833 - DNA, 102 bp, Homo sapiens; identical to SEQ ID NO: 110328
  chr4:86396087-86396189
  hypo

SEQ ID NO: 148834 - DNA, 544 bp, Homo sapiens; identical to SEQ ID NO: 110329
  chr4:86396421-86396965
  hypo

SEQ ID NO: 148835 - DNA, 161 bp, Homo sapiens; identical to SEQ ID NO: 18795
  chr4:86801947-86802108
  hypo

SEQ ID NO: 148836 - DNA, 105 bp, Homo sapiens
  chr4:86877877-86877982
  hypo
ggcaatggacgcctcgctgaatcaggagcacagccgacacccagccagggtggaagtcagcggcaggcagcaaaaagcagtggtggatggcgagtgaaaactcag

SEQ ID NO: 148837 - DNA, 32 bp, Homo sapiens
  chr4:86958367-86958399
  hypo
ttcaattcctaattgagctttcgaaggtaaaa

SEQ ID NO: 148838 - DNA, 23 bp, Homo sapiens
  chr4:87317208-87317231
  hypo
gtgtttccggccgggcgaggtgg

SEQ ID NO: 148839 - DNA, 102 bp, Homo sapiens; identical to SEQ ID NO: 68411
  chr4:87468462-87468564
  hypo

SEQ ID NO: 148840 - DNA, 37 bp, Homo sapiens; identical to SEQ ID NO: 68412
  chr4:87797487-87797524
  hypo

SEQ ID NO: 148841 - DNA, 25 bp, Homo sapiens
  chr4:87848934-87848959
  hypo
gagcgaggctccatttcaaaaaaaa

SEQ ID NO: 148842 - DNA, 40 bp, Homo sapiens; identical to SEQ ID NO: 18797
  chr4:87922649-87922689
  hypo

SEQ ID NO: 148843 - DNA, 30 bp, Homo sapiens; identical to SEQ ID NO: 68414
  chr4:87923914-87923944
  hypo

SEQ ID NO: 148844 - DNA, 65 bp, Homo sapiens
  chr4:87946923-87946988
  hypo
tcgctctgcaggtttcgcctagttcctatgcatggggatgtttgtgtttccgagagcgtctgtac

SEQ ID NO: 148845 - DNA, 30 bp, Homo sapiens; identical to SEQ ID NO: 18798
  chr4:87968907-87968937
  hypo

SEQ ID NO: 148846 - DNA, 30 bp, Homo sapiens; identical to SEQ ID NO: 68416
  chr4:87986370-87986400
  hypo

SEQ ID NO: 148847 - DNA, 144 bp, Homo sapiens; identical to SEQ ID NO: 18799
  chr4:87993063-87993207
  hypo

SEQ ID NO: 148848 - DNA, 84 bp, Homo sapiens; identical to SEQ ID NO: 18800
  chr4:87993506-87993590
  hypo

SEQ ID NO: 148849 - DNA, 22 bp, Homo sapiens
  chr4:88005401-88005423
  hypo
tgccattggctgggtgcggtgg

SEQ ID NO: 148850 - DNA, 41 bp, Homo sapiens; identical to SEQ ID NO: 68419
  chr4:88009707-88009748
  hypo

SEQ ID NO: 148851 - DNA, 41 bp, Homo sapiens; identical to SEQ ID NO: 68420
  chr4:88010167-88010208
  hypo

SEQ ID NO: 148852 - DNA, 30 bp, Homo sapiens; identical to SEQ ID NO: 18801
  chr4:88020841-88020871
  hypo

SEQ ID NO: 148853 - DNA, 30 bp, Homo sapiens
  chr4:88039533-88039563
  hypo
atacgcatgacctcacgtcgtgttctttac

SEQ ID NO: 148854 - DNA, 182 bp, Homo sapiens; identical to SEQ ID NO: 68422
  chr4:88053370-88053552
  hypo

SEQ ID NO: 148855 - DNA, 30 bp, Homo sapiens
  chr4:88063069-88063099
  hypo
gattgggagaaactacggggaaaagaatct

SEQ ID NO: 148856 - DNA, 79 bp, Homo sapiens; identical to SEQ ID NO: 18802
  chr4:88258990-88259069
  hypo

SEQ ID NO: 148857 - DNA, 25 bp, Homo sapiens
  chr4:88263676-88263701
  hypo
ggtgagatctcgtctcaaaaaaaca

SEQ ID NO: 148858 - DNA, 140 bp, Homo sapiens; identical to SEQ ID NO: 18803
  chr4:88296897-88297037
  hypo

SEQ ID NO: 148859 - DNA, 26 bp, Homo sapiens
  chr4:88377921-88377947
  hypo
aatacaaaaaaattagctgggcgtgg

SEQ ID NO: 148860 - DNA, 25 bp, Homo sapiens
  chr4:88378066-88378091
  hypo
cagcgagactccatctaaaaataaa

SEQ ID NO: 148861 - DNA, 30 bp, Homo sapiens; identical to SEQ ID NO: 68427
  chr4:88379301-88379331
  hypo

SEQ ID NO: 148862 - DNA, 46 bp, Homo sapiens; identical to SEQ ID NO: 68428
  chr4:88899512-88899558
  hypo

SEQ ID NO: 148863 - DNA, 22 bp, Homo sapiens
  chr4:88936565-88936587
  hypo
gtagttatttatttatttagac

SEQ ID NO: 148864 - DNA, 183 bp, Homo sapiens; identical to SEQ ID NO: 18804
  chr4:88941047-88941230
  hypo

SEQ ID NO: 148865 - DNA, 146 bp, Homo sapiens; identical to SEQ ID NO: 18805
  chr4:88957313-88957459
  hypo

SEQ ID NO: 148866 - DNA, 28 bp, Homo sapiens
  chr4:89292173-89292201
  hypo
tagagacggggttttgccatattggcca

SEQ ID NO: 148867 - DNA, 843 bp, Homo sapiens; identical to SEQ ID NO: 40685
  chr4:89377923-89378766
  hypo

SEQ ID NO: 148868 - DNA, 130 bp, Homo sapiens; identical to SEQ ID NO: 110351
  chr4:89378831-89378961
  hypo

SEQ ID NO: 148869 - DNA, 41 bp, Homo sapiens; identical to SEQ ID NO: 68434
  chr4:89660211-89660252
  hypo

SEQ ID NO: 148870 - DNA, 30 bp, Homo sapiens
  chr4:89765013-89765043
  hypo
tggggacaatgagagcgcacggctgtcctg

SEQ ID NO: 148871 - DNA, 30 bp, Homo sapiens; identical to SEQ ID NO: 68435
  chr4:89798028-89798058
  hypo

SEQ ID NO: 148872 - DNA, 27 bp, Homo sapiens
  chr4:89912577-89912604
  hypo
gactccgtctcaaaataaaaaataata

SEQ ID NO: 148873 - DNA, 32 bp, Homo sapiens; identical to SEQ ID NO: 68437
  chr4:90043370-90043402
  hypo

SEQ ID NO: 148874 - DNA, 151 bp, Homo sapiens
  chr4:90043641-90043792
  hypo
cactccagcctgggggacagggcaaaaaaaaaaaaaaaaagaaaagaaattccaggggctaatcttgaaacagcccaggcctggagacccagctgcagattacctcaaggtggttaatctacaacctggtcacagtcgacatgggaccagc

SEQ ID NO: 148875 - DNA, 30 bp, Homo sapiens
  chr4:90138600-90138630
  hypo
tccttcttgccttagcgcctttgctcacgc

SEQ ID NO: 148876 - DNA, 22 bp, Homo sapiens
  chr4:90745218-90745240
  hypo
taacaggcgtgagccaccgcgc

SEQ ID NO: 148877 - DNA, 181 bp, Homo sapiens; identical to SEQ ID NO: 18809
  chr4:91052007-91052188
  hypo

SEQ ID NO: 148878 - DNA, 37 bp, Homo sapiens; identical to SEQ ID NO: 68441
  chr4:91052427-91052464
  hypo

SEQ ID NO: 148879 - DNA, 30 bp, Homo sapiens; identical to SEQ ID NO: 68442
  chr4:91062076-91062106
  hypo

SEQ ID NO: 148880 - DNA, 17 bp, Homo sapiens
  chr4:91179361-91179378
  hypo
tttactcatttaaaaaa

SEQ ID NO: 148881 - DNA, 30 bp, Homo sapiens; identical to SEQ ID NO: 59735
  chr4:91281716-91281746
  hypo

SEQ ID NO: 148882 - DNA, 30 bp, Homo sapiens; identical to SEQ ID NO: 18810
  chr4:91640181-91640211
  hypo

SEQ ID NO: 148883 - DNA, 149 bp, Homo sapiens; identical to SEQ ID NO: 18811
  chr4:91640270-91640419
  hypo

SEQ ID NO: 148884 - DNA, 170 bp, Homo sapiens; identical to SEQ ID NO: 40702
  chr4:91760070-91760240
  hypo

SEQ ID NO: 148885 - DNA, 93 bp, Homo sapiens; identical to SEQ ID NO: 18812
  chr4:95127584-95127677
  hypo

SEQ ID NO: 148886 - DNA, 32 bp, Homo sapiens
  chr4:95128036-95128068
  hypo
agtgctgggattacaggcgtgagccaccactc

SEQ ID NO: 148887 - DNA, 31 bp, Homo sapiens; identical to SEQ ID NO: 18813
  chr4:95257392-95257423
  hypo

SEQ ID NO: 148888 - DNA, 30 bp, Homo sapiens; identical to SEQ ID NO: 3418
  chr4:95293542-95293572
  hypo

SEQ ID NO: 148889 - DNA, 234 bp, Homo sapiens; identical to SEQ ID NO: 110383
  chr4:95373793-95374027
  hypo

SEQ ID NO: 148890 - DNA, 88 bp, Homo sapiens
  chr4:95407091-95407179
  hypo
aaggtcagtcaattacgaattgggactcaggatgaagaggaggtctcaaaggcccccctcacgatcaggaaggcggaactggggactc

SEQ ID NO: 148891 - DNA, 27 bp, Homo sapiens
  chr4:95461290-95461317
  hypo
tttttttttgagatggagtctcgctct

SEQ ID NO: 148892 - DNA, 86 bp, Homo sapiens; identical to SEQ ID NO: 68452
  chr4:95461556-95461642
  hypo

SEQ ID NO: 148893 - DNA, 32 bp, Homo sapiens; identical to SEQ ID NO: 18816
  chr4:95578062-95578094
  hypo

SEQ ID NO: 148894 - DNA, 67 bp, Homo sapiens; identical to SEQ ID NO: 68454
  chr4:95636991-95637058
  hypo

SEQ ID NO: 148895 - DNA, 30 bp, Homo sapiens
  chr4:95696917-95696947
  hypo
ctgtttcaaatattattactacggttagaa

SEQ ID NO: 148896 - DNA, 38 bp, Homo sapiens; identical to SEQ ID NO: 68455
  chr4:99178270-99178308
  hypo

SEQ ID NO: 148897 - DNA, 338 bp, Homo sapiens; identical to SEQ ID NO: 68456
  chr4:99399704-99400042
  hypo

SEQ ID NO: 148898 - DNA, 26 bp, Homo sapiens
  chr4:99416390-99416416
  hypo
agccaaccggccaggcgcagtggctc

SEQ ID NO: 148899 - DNA, 30 bp, Homo sapiens; identical to SEQ ID NO: 18817
  chr4:99430509-99430539
  hypo

SEQ ID NO: 148900 - DNA, 30 bp, Homo sapiens
  chr4:99529267-99529297
  hypo
ctagacataagctgcgggagtgtgaacgaa

SEQ ID NO: 148901 - DNA, 31 bp, Homo sapiens; identical to SEQ ID NO: 18818
  chr4:99835221-99835252
  hypo

SEQ ID NO: 148902 - DNA, 31 bp, Homo sapiens; identical to SEQ ID NO: 18819
  chr4:99836004-99836035
  hypo

SEQ ID NO: 148903 - DNA, 38 bp, Homo sapiens
  chr4:99843420-99843458
  hypo
tgagttagcctggcgcggtggctcacgcctgtaatccc

SEQ ID NO: 148904 - DNA, 30 bp, Homo sapiens
  chr4:99852372-99852402
  hypo
ataattctgttgaccgcgttgttattttct

SEQ ID NO: 148905 - DNA, 78 bp, Homo sapiens; identical to SEQ ID NO: 68460
  chr4:99936194-99936272
  hypo

SEQ ID NO: 148906 - DNA, 18 bp, Homo sapiens
  chr4:99936331-99936349
  hypo
ttaaccaggcatttgcat

SEQ ID NO: 148907 - DNA, 30 bp, Homo sapiens; identical to SEQ ID NO: 18820
  chr4:99955879-99955909
  hypo

SEQ ID NO: 148908 - DNA, 50 bp, Homo sapiens
  chr4:99982328-99982378
  hypo
cagatggttggactgcggtgacaagagacggaaagcggtctgctcagttt

SEQ ID NO: 148909 - DNA, 30 bp, Homo sapiens
  chr4:100003520-100003550
  hypo
gtccccctttcagcgcgcgttagcaagaga

SEQ ID NO: 148910 - DNA, 30 bp, Homo sapiens; identical to SEQ ID NO: 40726
  chr4:100239303-100239333
  hypo

SEQ ID NO: 148911 - DNA, 30 bp, Homo sapiens
  chr4:100532317-100532347
  hypo
tctgaaggaaatggtcgctcacaattatga

SEQ ID NO: 148912 - DNA, 129 bp, Homo sapiens
  chr4:100555183-100555312
  hypo
taattatcctgctaacgctgtacatatggctcgtgcctggactcgctcgtgcctagaaagagtaaagccatgtcgaaactgtctacgtttccttgagtgtttttccagctcccccgcactcgcccaccg

SEQ ID NO: 148913 - DNA, 1034 bp, Homo sapiens
  chr4:100573591-100574625
  hypo
ctggaaacacaggggcgtctccacatgtttgatttccccctcgactttgctgaccacgaactccaaggccttggtctgagacttcttggactggatgtagagctggtcggcagtggcccgggccccactgcccttcctcagacctgcagccacagaggccgcgctgctcctgaggaggctctgctccaccctggccccaacacccccacattttaagtccaggaaagttgaccagcgcccaaagcccacttcggagagcgtggtggaggactcccgggagctgatgttcagagcctcaaagtaggggtaagccaggctccggaaggcccgggaggtcaggttacgcacctctttgtccgcatcgtccagttcgctcacggcactggaggctccgctggagtagtccaccagctccttcgcccggatggccccgcacctggtttgcaggcgagcaggtacagcaatgaatttctttgcatggtcctgagccactgctgcagccgggttttgcttcagcgaacttgaattgtgttcagcagctgtagagacgcggaggctcatgtcgccttcatgcttggcagcataaataatgttttgctttgcacgcacgttgctaggctcatttatagcccgggaagccggtttgattgataggaggatctggcttgctgcactcccacagctgcttgcggcggcggctgctgcccctgaagctgcctccggggtctcaggcaagggctcagtcaggggggcagtgccaggcccagtgggtgggggagtggggccactgtcagaggggccactgcccacttcggtgctgctggtgtcgcggccactgcggcctgcattggggcgggccaggtcgctgcttgtagggctgggcgtccgggtggtgttggtgctgggagtggtgctgaggtagcagctgttgtcgtcgtcctcttcggtcagactggtgatgtcccctggggtctcgtcgctgccaccaaaggaagcataatccacgaacgagtagatcacgttgttgtcctcga

SEQ ID NO: 148914 - DNA, 30 bp, Homo sapiens
  chr4:100799426-100799456
  hypo
agacttgccagtccccgcaatagtataagc

SEQ ID NO: 148915 - DNA, 81 bp, Homo sapiens; identical to SEQ ID NO: 68465
  chr4:100866006-100866087
  hypo

SEQ ID NO: 148916 - DNA, 4 bp, Homo sapiens
  chr4:100867918-100867922
  hypo
ctcc

SEQ ID NO: 148917 - DNA, 257 bp, Homo sapiens; identical to SEQ ID NO: 110403
  chr4:100867945-100868202
  hypo

SEQ ID NO: 148918 - DNA, 30 bp, Homo sapiens
  chr4:102165732-102165762
  hypo
ctatacgccctcccccgtggtagacaagag

SEQ ID NO: 148919 - DNA, 30 bp, Homo sapiens; identical to SEQ ID NO: 68467
  chr4:102246960-102246990
  hypo

SEQ ID NO: 148920 - DNA, 142 bp, Homo sapiens
  chr4:102266832-102266974
  hypo
aggccgatagattcccgtgcgacagagtgatcaaccacagcctgtccccttcctcactccgcacatcccagtttctctttgccagcaacctcagtgcatccttgccaggagtttatcatcccgtaggcggcgaagaggaggc

SEQ ID NO: 148921 - DNA, 44 bp, Homo sapiens; identical to SEQ ID NO: 68469
  chr4:102332862-102332906
  hypo

SEQ ID NO: 148922 - DNA, 121 bp, Homo sapiens
  chr4:103079068-103079189
  hypo
gaaaagaaaaagaaaaaaattcatgcgacccttcagaaacttcgaccatagaattaaataaacagttgcttagataagcggctcccaaccttttggcaccagggaccggttttgtgaaaga

SEQ ID NO: 148923 - DNA, 39 bp, Homo sapiens
  chr4:103240079-103240118
  hypo
ggtttcagatgtcctcgtgttcagcgcgttgacattttt

SEQ ID NO: 148924 - DNA, 221 bp, Homo sapiens; identical to SEQ ID NO: 110417
  chr4:103266877-103267098
  hypo

SEQ ID NO: 148925 - DNA, 28 bp, Homo sapiens
  chr4:103350982-103351010
  hypo
gggagcctgaggcaggagaatcgcttga

SEQ ID NO: 148926 - DNA, 200 bp, Homo sapiens; identical to SEQ ID NO: 18825
  chr4:103421131-103421331
  hypo

SEQ ID NO: 148927 - DNA, 43 bp, Homo sapiens; identical to SEQ ID NO: 18826
  chr4:103494438-103494481
  hypo

SEQ ID NO: 148928 - DNA, 30 bp, Homo sapiens
  chr4:103522884-103522914
  hypo
gaagcagagcttggacgttggtgatgggag

SEQ ID NO: 148929 - DNA, 30 bp, Homo sapiens
  chr4:103524002-103524032
  hypo
ggggtcattggtatccgtaaggtcattttg

SEQ ID NO: 148930 - DNA, 28 bp, Homo sapiens
  chr4:103794986-103795014
  hypo
attggcaaaacaggccaggtacggtgtg

SEQ ID NO: 148931 - DNA, 82 bp, Homo sapiens; identical to SEQ ID NO: 18827
  chr4:103806370-103806452
  hypo

SEQ ID NO: 148932 - DNA, 24 bp, Homo sapiens
  chr4:103929957-103929981
  hypo
tttttttttttttttttgagacgg

SEQ ID NO: 148933 - DNA, 324 bp, Homo sapiens; identical to SEQ ID NO: 68478
  chr4:103941523-103941847
  hypo

SEQ ID NO: 148934 - DNA, 980 bp, Homo sapiens; identical to SEQ ID NO: 110428
  chr4:103997158-103998138
  hypo

SEQ ID NO: 148935 - DNA, 30 bp, Homo sapiens
  chr4:104073797-104073827
  hypo
ataaaaaaattatggcgtattaatacaatg

SEQ ID NO: 148936 - DNA, 30 bp, Homo sapiens; identical to SEQ ID NO: 3433
  chr4:104251138-104251168
  hypo

SEQ ID NO: 148937 - DNA, 82 bp, Homo sapiens; identical to SEQ ID NO: 68481
  chr4:104854485-104854567
  hypo

SEQ ID NO: 148938 - DNA, 471 bp, Homo sapiens; identical to SEQ ID NO: 40759
  chr4:106067030-106067501
  hypo

SEQ ID NO: 148939 - DNA, 296 bp, Homo sapiens; identical to SEQ ID NO: 3435
  chr4:106067840-106068136
  hypo

SEQ ID NO: 148940 - DNA, 278 bp, Homo sapiens; identical to SEQ ID NO: 3436
  chr4:106068587-106068865
  hypo

SEQ ID NO: 148941 - DNA, 30 bp, Homo sapiens; identical to SEQ ID NO: 40762
  chr4:106084762-106084792
  hypo

SEQ ID NO: 148942 - DNA, 147 bp, Homo sapiens; identical to SEQ ID NO: 3437
  chr4:106111515-106111662
  hypo

SEQ ID NO: 148943 - DNA, 4462 bp, Homo sapiens; identical to SEQ ID NO: 3438
  chr4:106155052-106159514
  hypo

SEQ ID NO: 148944 - DNA, 241 bp, Homo sapiens; identical to SEQ ID NO: 3439
  chr4:106159633-106159874
  hypo

SEQ ID NO: 148945 - DNA, 181 bp, Homo sapiens; identical to SEQ ID NO: 3440
  chr4:106160113-106160294
  hypo

SEQ ID NO: 148946 - DNA, 121 bp, Homo sapiens; identical to SEQ ID NO: 3441
  chr4:106161133-106161254
  hypo

SEQ ID NO: 148947 - DNA, 2722 bp, Homo sapiens; identical to SEQ ID NO: 3442
  chr4:106161373-106164095
  hypo

SEQ ID NO: 148948 - DNA, 231 bp, Homo sapiens; identical to SEQ ID NO: 3443
  chr4:106164711-106164942
  hypo

SEQ ID NO: 148949 - DNA, 178 bp, Homo sapiens; identical to SEQ ID NO: 3444
  chr4:106180761-106180939
  hypo

SEQ ID NO: 148950 - DNA, 108 bp, Homo sapiens; identical to SEQ ID NO: 3445
  chr4:106182910-106183018
  hypo

SEQ ID NO: 148951 - DNA, 162 bp, Homo sapiens; identical to SEQ ID NO: 3446
  chr4:106190751-106190913
  hypo

SEQ ID NO: 148952 - DNA, 377 bp, Homo sapiens; identical to SEQ ID NO: 3447
  chr4:106193707-106194084
  hypo

SEQ ID NO: 148953 - DNA, 3102 bp, Homo sapiens; identical to SEQ ID NO: 3448
  chr4:106196197-106199299
  hypo

SEQ ID NO: 148954 - DNA, 1602 bp, Homo sapiens; identical to SEQ ID NO: 3449
  chr4:106199358-106200960
  hypo

SEQ ID NO: 148955 - DNA, 35 bp, Homo sapiens; identical to SEQ ID NO: 18849
  chr4:106335455-106335490
  hypo

SEQ ID NO: 148956 - DNA, 215 bp, Homo sapiens; identical to SEQ ID NO: 68500
  chr4:106335549-106335764
  hypo

SEQ ID NO: 148957 - DNA, 30 bp, Homo sapiens; identical to SEQ ID NO: 18851
  chr4:106336030-106336060
  hypo

SEQ ID NO: 148958 - DNA, 58 bp, Homo sapiens; identical to SEQ ID NO: 68502
  chr4:106631891-106631949
  hypo

SEQ ID NO: 148959 - DNA, 36 bp, Homo sapiens; identical to SEQ ID NO: 68503
  chr4:106689193-106689229
  hypo

SEQ ID NO: 148960 - DNA, 35 bp, Homo sapiens; identical to SEQ ID NO: 68504
  chr4:106689468-106689503
  hypo

SEQ ID NO: 148961 - DNA, 30 bp, Homo sapiens
  chr4:107208118-107208148
  hypo
tcaccaacttctttcgcctcagttccttta

SEQ ID NO: 148962 - DNA, 31 bp, Homo sapiens
  chr4:107219482-107219513
  hypo
agacgtggccgggcacggtagctcacgcctg

SEQ ID NO: 148963 - DNA, 30 bp, Homo sapiens; identical to SEQ ID NO: 18853
  chr4:107219812-107219842
  hypo

SEQ ID NO: 148964 - DNA, 30 bp, Homo sapiens
  chr4:107223490-107223520
  hypo
ttacagtttctaagcggatcagttcccacc

SEQ ID NO: 148965 - DNA, 18 bp, Homo sapiens
  chr4:107236067-107236085
  hypo
caccgcgcccgaccattt

SEQ ID NO: 148966 - DNA, 219 bp, Homo sapiens; identical to SEQ ID NO: 18854
  chr4:108132181-108132400
  hypo

SEQ ID NO: 148967 - DNA, 328 bp, Homo sapiens
  chr4:108302152-108302480
  hypo
ggaagaaatcgtttacgccctctgttggcagcaggggcctgtcctcctttactctttagaatctagagggagaaagccaaaaaccaacctctctagaagggaaagaccggtgtctagacaacccacacccactaacacgtgggtctagatcatcttcctccattcagtgcccccgatcccgctcctctggtttccgtttcaggtccctcccctgcttcctcttcctgctgtccctgatcccgcccctccggttcccatttcaggtacttcccgtgcttgcatccctcttccagcttttccgatcccgctcccccggtttctgttccag

SEQ ID NO: 148968 - DNA, 44 bp, Homo sapiens; identical to SEQ ID NO: 18855
  chr4:108446494-108446538
  hypo

SEQ ID NO: 148969 - DNA, 31 bp, Homo sapiens; identical to SEQ ID NO: 68508
  chr4:108789574-108789605
  hypo

SEQ ID NO: 148970 - DNA, 30 bp, Homo sapiens; identical to SEQ ID NO: 110467
  chr4:108852437-108852467
  hypo

SEQ ID NO: 148971 - DNA, 450 bp, Homo sapiens; identical to SEQ ID NO: 110468
  chr4:108852944-108853394
  hypo

SEQ ID NO: 148972 - DNA, 82 bp, Homo sapiens; identical to SEQ ID NO: 18856
  chr4:108975406-108975488
  hypo

SEQ ID NO: 148973 - DNA, 30 bp, Homo sapiens; identical to SEQ ID NO: 68511
  chr4:109002142-109002172
  hypo

SEQ ID NO: 148974 - DNA, 207 bp, Homo sapiens; identical to SEQ ID NO: 68512
  chr4:109002483-109002690
  hypo

SEQ ID NO: 148975 - DNA, 169 bp, Homo sapiens; identical to SEQ ID NO: 18857
  chr4:109009507-109009676
  hypo

SEQ ID NO: 148976 - DNA, 30 bp, Homo sapiens
  chr4:109075463-109075493
  hypo
tactgctgtcgctgacgatggatccttgtc

SEQ ID NO: 148977 - DNA, 2009 bp, Homo sapiens; identical to SEQ ID NO: 110471
  chr4:109088014-109090023
  hypo

SEQ ID NO: 148978 - DNA, 30 bp, Homo sapiens; identical to SEQ ID NO: 110472
  chr4:109090353-109090383
  hypo

SEQ ID NO: 148979 - DNA, 2000 bp, Homo sapiens; identical to SEQ ID NO: 110473
  chr4:109092585-109094585
  hypo

SEQ ID NO: 148980 - DNA, 21 bp, Homo sapiens
  chr4:109099899-109099920
  hypo
gccaccgcgcccagcaactta

SEQ ID NO: 148981 - DNA, 25 bp, Homo sapiens
  chr4:109117462-109117487
  hypo
aagcgaaactttgtctcaaacaaac

SEQ ID NO: 148982 - DNA, 31 bp, Homo sapiens; identical to SEQ ID NO: 18859
  chr4:109295090-109295121
  hypo

SEQ ID NO: 148983 - DNA, 30 bp, Homo sapiens
  chr4:109410531-109410561
  hypo
tacgaactgtgtatacgacaatgcgagagc

SEQ ID NO: 148984 - DNA, 31 bp, Homo sapiens; identical to SEQ ID NO: 18860
  chr4:109680328-109680359
  hypo

SEQ ID NO: 148985 - DNA, 102 bp, Homo sapiens
  chr4:110314366-110314468
  hypo
tataaaccactctattaaatacgttatgggtaaatatctattgtcctatatgcccaaccaattcaccgtcccaatatatcctatcttctgtgaataatatcc

SEQ ID NO: 148986 - DNA, 41 bp, Homo sapiens; identical to SEQ ID NO: 68520
  chr4:110314767-110314808
  hypo

SEQ ID NO: 148987 - DNA, 21 bp, Homo sapiens
  chr4:110344893-110344914
  hypo
tgaaagtaagcaggctgggca

SEQ ID NO: 148988 - DNA, 30 bp, Homo sapiens; identical to SEQ ID NO: 68522
  chr4:110352876-110352906
  hypo

SEQ ID NO: 148989 - DNA, 30 bp, Homo sapiens
  chr4:110531789-110531819
  hypo
tcacgcgtcttttaacggcagggatacatt

SEQ ID NO: 148990 - DNA, 30 bp, Homo sapiens
  chr4:110610413-110610443
  hypo
ggtgtgagtaaccacgcctggctgagaaag

SEQ ID NO: 148991 - DNA, 30 bp, Homo sapiens; identical to SEQ ID NO: 68523
  chr4:110622406-110622436
  hypo

SEQ ID NO: 148992 - DNA, 212 bp, Homo sapiens; identical to SEQ ID NO: 40807
  chr4:110651656-110651868
  hypo

SEQ ID NO: 148993 - DNA, 30 bp, Homo sapiens; identical to SEQ ID NO: 3472
  chr4:110686397-110686427
  hypo

SEQ ID NO: 148994 - DNA, 80 bp, Homo sapiens; identical to SEQ ID NO: 68526
  chr4:110735439-110735519
  hypo

SEQ ID NO: 148995 - DNA, 20 bp, Homo sapiens
  chr4:110735818-110735838
  hypo
cgccccgcctacaaaggtat

SEQ ID NO: 148996 - DNA, 31 bp, Homo sapiens; identical to SEQ ID NO: 18863
  chr4:110974665-110974696
  hypo

SEQ ID NO: 148997 - DNA, 88 bp, Homo sapiens; identical to SEQ ID NO: 68529
  chr4:111019209-111019297
  hypo

SEQ ID NO: 148998 - DNA, 25 bp, Homo sapiens
  chr4:111042653-111042678
  hypo
accatcttggctaacacggtgaaac

SEQ ID NO: 148999 - DNA, 45 bp, Homo sapiens; identical to SEQ ID NO: 68531
  chr4:111096240-111096285
  hypo

SEQ ID NO: 149000 - DNA, 87 bp, Homo sapiens; identical to SEQ ID NO: 18865
  chr4:111097858-111097945
  hypo

SEQ ID NO: 149001 - DNA, 31 bp, Homo sapiens; identical to SEQ ID NO: 18866
  chr4:111109685-111109716
  hypo

SEQ ID NO: 149002 - DNA, 441 bp, Homo sapiens; identical to SEQ ID NO: 110492
  chr4:111117164-111117605
  hypo

SEQ ID NO: 149003 - DNA, 573 bp, Homo sapiens; identical to SEQ ID NO: 110495
  chr4:111119711-111120284
  hypo

SEQ ID NO: 149004 - DNA, 31 bp, Homo sapiens; identical to SEQ ID NO: 68536
  chr4:111135520-111135551
  hypo

SEQ ID NO: 149005 - DNA, 38 bp, Homo sapiens
  chr4:111144768-111144806
  hypo
gctgaattcctacaacgtccaatgcaataagttttttt

SEQ ID NO: 149006 - DNA, 31 bp, Homo sapiens; identical to SEQ ID NO: 18868
  chr4:111147617-111147648
  hypo

SEQ ID NO: 149007 - DNA, 35 bp, Homo sapiens
  chr4:111177275-111177310
  hypo
ggattacaggcgtgagccaccgcgcccggcgagag

SEQ ID NO: 149008 - DNA, 91 bp, Homo sapiens
  chr4:111213415-111213506
  hypo
cggtgttagctcccccgacagcctgtatgtgggttccggtgcctgaagacatttgaggtgctcgaaaagaacacagcggaaaccatcatgc

SEQ ID NO: 149009 - DNA, 288 bp, Homo sapiens
  chr4:111214248-111214536
  hypo
aggcctcctggacaacgtcaaagacggcagctaccggctggccaatgcaagatctaccctttgccggaaaaacgtcccgtgaagaagctcacggggacgtcggtgcctcagccctcctgcatgatcaacagcatgctggctgagatctgccgccagaccagcggcctggaggaccaggaggaagggcatgcccaggtggtggaggagatgagggacttcaagttttagaaggtgcttggccacctgcgttgtgctggagcatctctttggctccgcagccaaatggtc

SEQ ID NO: 149010 - DNA, 31 bp, Homo sapiens; identical to SEQ ID NO: 18869
  chr4:111320333-111320364
  hypo

SEQ ID NO: 149011 - DNA, 37 bp, Homo sapiens; identical to SEQ ID NO: 18870
  chr4:111383531-111383568
  hypo

SEQ ID NO: 149012 - DNA, 578 bp, Homo sapiens; identical to SEQ ID NO: 18871
  chr4:111508743-111509321
  hypo

SEQ ID NO: 149013 - DNA, 99 bp, Homo sapiens; identical to SEQ ID NO: 110504
  chr4:111539228-111539327
  hypo

SEQ ID NO: 149014 - DNA, 292 bp, Homo sapiens; identical to SEQ ID NO: 3483
  chr4:111543403-111543695
  hypo

SEQ ID NO: 149015 - DNA, 460 bp, Homo sapiens; identical to SEQ ID NO: 3484
  chr4:111543720-111544180
  hypo

SEQ ID NO: 149016 - DNA, 292 bp, Homo sapiens; identical to SEQ ID NO: 3485
  chr4:111544298-111544590
  hypo

SEQ ID NO: 149017 - DNA, 74 bp, Homo sapiens
  chr4:113199030-113199104
  hypo
tcatccatttctgtcggagaactgctttgggaggagcagagcgaataagtgccatactccggtatgggcctgtg

SEQ ID NO: 149018 - DNA, 191 bp, Homo sapiens; identical to SEQ ID NO: 68547
  chr4:113276887-113277078
  hypo

SEQ ID NO: 149019 - DNA, 1938 bp, Homo sapiens; identical to SEQ ID NO: 40851
  chr4:113435423-113437361
  hypo

SEQ ID NO: 149020 - DNA, 1088 bp, Homo sapiens; identical to SEQ ID NO: 110539
  chr4:113437616-113438704
  hypo

SEQ ID NO: 149021 - DNA, 30 bp, Homo sapiens
  chr4:113486047-113486077
  hypo
caccgcgccgccgtcgctctccaacgccag

SEQ ID NO: 149022 - DNA, 79 bp, Homo sapiens; identical to SEQ ID NO: 68550
  chr4:113559123-113559202
  hypo

SEQ ID NO: 149023 - DNA, 19 bp, Homo sapiens
  chr4:113559441-113559460
  hypo
gctgcgtctccaaacaaac

SEQ ID NO: 149024 - DNA, 184 bp, Homo sapiens; identical to SEQ ID NO: 18880
  chr4:114417170-114417354
  hypo

SEQ ID NO: 149025 - DNA, 102 bp, Homo sapiens; identical to SEQ ID NO: 18881
  chr4:114528565-114528667
  hypo

SEQ ID NO: 149026 - DNA, 45 bp, Homo sapiens
  chr4:115416723-115416768
  hypo
ccaaggccaagagaggaaacccggagtgaagcggataccagcttt

SEQ ID NO: 149027 - DNA, 721 bp, Homo sapiens; identical to SEQ ID NO: 110555
  chr4:115520453-115521174
  hypo

SEQ ID NO: 149028 - DNA, 30 bp, Homo sapiens; identical to SEQ ID NO: 18883
  chr4:117520537-117520567
  hypo

SEQ ID NO: 149029 - DNA, 30 bp, Homo sapiens; identical to SEQ ID NO: 68555
  chr4:117626779-117626809
  hypo

SEQ ID NO: 149030 - DNA, 30 bp, Homo sapiens; identical to SEQ ID NO: 68556
  chr4:118497239-118497269
  hypo

SEQ ID NO: 149031 - DNA, 24 bp, Homo sapiens
  chr4:119275318-119275342
  hypo
tttaaataagccatctttagccgg

SEQ ID NO: 149032 - DNA, 39 bp, Homo sapiens; identical to SEQ ID NO: 68558
  chr4:119501590-119501629
  hypo

SEQ ID NO: 149033 - DNA, 30 bp, Homo sapiens
  chr4:119948077-119948107
  hypo
gggagaaggtagaagcggtacagcctgggc

SEQ ID NO: 149034 - DNA, 30 bp, Homo sapiens
  chr4:119951176-119951206
  hypo
agcttgagcgagaggcggacgaggaggaag

SEQ ID NO: 149035 - DNA, 212 bp, Homo sapiens
  chr4:119951551-119951763
  hypo
aagagtcggtaagaacgcagagctctgtgagcaaaagctacatcgaggtgagtcatggtcttggccatgttccccaacagaatggcttcagtgggacatctgagacagcaaacatccagaggatggtccccatgaatagaacggccaaacccttcccagggtctgtgaatcagccagctacccccttctcgccaacccgaaacatgacgagt

SEQ ID NO: 149036 - DNA, 30 bp, Homo sapiens
  chr4:119951989-119952019
  hypo
ccaaaaggagaagcacgacaaaacccatgt

SEQ ID NO: 149037 - DNA, 97 bp, Homo sapiens
  chr4:120024256-120024353
  hypo
caccaccatgcccagttaatttttacaataaactcttagggcaaaatttgttcaaagaaattagcaatcaacatgtaatcttcgcttttagatttaa

SEQ ID NO: 149038 - DNA, 334 bp, Homo sapiens; identical to SEQ ID NO: 3515
  chr4:120549977-120550311
  hypo

SEQ ID NO: 149039 - DNA, 27 bp, Homo sapiens
  chr4:121042040-121042067
  hypo
cctaccgtctctttgtcttttataagg

SEQ ID NO: 149040 - DNA, 1268 bp, Homo sapiens; identical to SEQ ID NO: 110577
  chr4:121843109-121844377
  hypo

SEQ ID NO: 149041 - DNA, 200 bp, Homo sapiens
  chr4:122158961-122159161
  hypo
agatttgaaagtatttcgaaaggttcaataaaataattgtgtggttattggagattgtagaaaagatattgtgggttaaaaattacaatctccctctccctctcccgcttcctctccctctcccgctcccgctcccgctccctctccagctccccctcccgctccctctccacctcccgctcccgctccccctccctctc

SEQ ID NO: 149042 - DNA, 39 bp, Homo sapiens; identical to SEQ ID NO: 68561
  chr4:122165517-122165556
  hypo

SEQ ID NO: 149043 - DNA, 18 bp, Homo sapiens
  chr4:122606040-122606058
  hypo
aaatatattttatggccg

SEQ ID NO: 149044 - DNA, 77 bp, Homo sapiens; identical to SEQ ID NO: 18889
  chr4:122615462-122615539
  hypo

SEQ ID NO: 149045 - DNA, 123 bp, Homo sapiens; identical to SEQ ID NO: 40889
  chr4:122685767-122685890
  hypo

SEQ ID NO: 149046 - DNA, 510 bp, Homo sapiens; identical to SEQ ID NO: 40890
  chr4:122686113-122686623
  hypo

SEQ ID NO: 149047 - DNA, 31 bp, Homo sapiens; identical to SEQ ID NO: 18891
  chr4:122854136-122854167
  hypo

SEQ ID NO: 149048 - DNA, 1902 bp, Homo sapiens; identical to SEQ ID NO: 40892
  chr4:122871294-122873196
  hypo

SEQ ID NO: 149049 - DNA, 35 bp, Homo sapiens; identical to SEQ ID NO: 18893
  chr4:122924454-122924489
  hypo

SEQ ID NO: 149050 - DNA, 20 bp, Homo sapiens
  chr4:123031252-123031272
  hypo
aggagccaagatggccgaat

SEQ ID NO: 149051 - DNA, 30 bp, Homo sapiens; identical to SEQ ID NO: 68569
  chr4:123069703-123069733
  hypo

SEQ ID NO: 149052 - DNA, 308 bp, Homo sapiens; identical to SEQ ID NO: 68570
  chr4:123300365-123300673
  hypo

SEQ ID NO: 149053 - DNA, 30 bp, Homo sapiens
  chr4:123301295-123301325
  hypo
gccagttcaaccagcgacaaagacgataac

SEQ ID NO: 149054 - DNA, 30 bp, Homo sapiens; identical to SEQ ID NO: 18896
  chr4:123664095-123664125
  hypo

SEQ ID NO: 149055 - DNA, 1565 bp, Homo sapiens; identical to SEQ ID NO: 110592
  chr4:123747655-123749220
  hypo

SEQ ID NO: 149056 - DNA, 19 bp, Homo sapiens
  chr4:123866926-123866945
  hypo
tgttcggccatcttggctc

SEQ ID NO: 149057 - DNA, 223 bp, Homo sapiens; identical to SEQ ID NO: 68573
  chr4:124029141-124029364
  hypo

SEQ ID NO: 149058 - DNA, 183 bp, Homo sapiens; identical to SEQ ID NO: 68574
  chr4:124036405-124036588
  hypo

SEQ ID NO: 149059 - DNA, 140 bp, Homo sapiens; identical to SEQ ID NO: 18899
  chr4:124106850-124106990
  hypo

SEQ ID NO: 149060 - DNA, 17 bp, Homo sapiens
  chr4:124124054-124124071
  hypo
gtagtcctagctactcg

SEQ ID NO: 149061 - DNA, 30 bp, Homo sapiens
  chr4:124225921-124225951
  hypo
cagcagccaggctgccgtgaccgagcgcag

SEQ ID NO: 149062 - DNA, 33 bp, Homo sapiens; identical to SEQ ID NO: 68576
  chr4:124313334-124313367
  hypo

SEQ ID NO: 149063 - DNA, 1572 bp, Homo sapiens; identical to SEQ ID NO: 40897
  chr4:124317730-124319302
  hypo

SEQ ID NO: 149064 - DNA, 41 bp, Homo sapiens; identical to SEQ ID NO: 68578
  chr4:124335274-124335315
  hypo

SEQ ID NO: 149065 - DNA, 181 bp, Homo sapiens
  chr4:124335554-124335735
  hypo
tgcctcaaaaaaaaaaaaaagaaaagaaaaaaaatgtttgcaacataaagagtcttggttttccttattccctgtatttttctctgcctgctggtggtggtgatgatgatagagaaaggaaggaaggtgattgggcaatatgtaatccctgtaatcccagcgctttgggaggccgaggcgg

SEQ ID NO: 149066 - DNA, 540 bp, Homo sapiens; identical to SEQ ID NO: 110599
  chr4:124426676-124427216
  hypo

SEQ ID NO: 149067 - DNA, 482 bp, Homo sapiens
  chr4:124468460-124468942
  hypo
ctctgagaagtggcccgacattctaggtaacctgattccccagacgggataggcggcggcctgctgctgcgaaggcgcgaccacgtgacctttcctgcctgcaccggggaaatgcataccttgttcagaaaactaggggacaggtgagcccaaggtagtgttttgaatcagaattaaaaacatgtatttatttaaaaggtgcttgcttctacatcagacagctaccactttgatcattccaaatgaaaaggcacgattggccatggggttttatggcgtgaactgagctgcaagacaaaggaaggacgatctccaggaggaaaaggcggagcgggttttatgggagctgctgcacaagtctgaacgcggaggctgcacacggggagggcaaagccgccctggcaggagcccgagctgcaggcctcggctgggaagcctgtccctcctgtccatttccctggctctcgcggtccctcgtttgt

SEQ ID NO: 149068 - DNA, 40 bp, Homo sapiens; identical to SEQ ID NO: 18905
  chr4:124533355-124533395
  hypo

SEQ ID NO: 149069 - DNA, 35 bp, Homo sapiens
  chr4:125038667-125038702
  hypo
cctgcccctgcggagcgtggtgactcacgcctgta

SEQ ID NO: 149070 - DNA, 35 bp, Homo sapiens; identical to SEQ ID NO: 18906
  chr4:125038941-125038976
  hypo

SEQ ID NO: 149071 - DNA, 971 bp, Homo sapiens; identical to SEQ ID NO: 110601
  chr4:125633096-125634067
  hypo

SEQ ID NO: 149072 - DNA, 1194 bp, Homo sapiens; identical to SEQ ID NO: 110603
  chr4:126236931-126238125
  hypo

SEQ ID NO: 149073 - DNA, 176 bp, Homo sapiens; identical to SEQ ID NO: 110604
  chr4:126238378-126238554
  hypo

SEQ ID NO: 149074 - DNA, 30 bp, Homo sapiens
  chr4:126467678-126467708
  hypo
ccaggcaagtgtgcccgtgacctcaaagcc

SEQ ID NO: 149075 - DNA, 30 bp, Homo sapiens
  chr4:128501278-128501308
  hypo
cagttgcagcgggcacggtggctcacgcct

SEQ ID NO: 149076 - DNA, 219 bp, Homo sapiens; identical to SEQ ID NO: 68588
  chr4:128651503-128651722
  hypo

SEQ ID NO: 149077 - DNA, 197 bp, Homo sapiens; identical to SEQ ID NO: 68589
  chr4:128702502-128702699
  hypo

SEQ ID NO: 149078 - DNA, 138 bp, Homo sapiens; identical to SEQ ID NO: 3539
  chr4:128703234-128703372
  hypo

SEQ ID NO: 149079 - DNA, 569 bp, Homo sapiens
  chr4:128764579-128765148
  hypo
ataatgcataaagatccactccgtgagaaaaaaaataaaaaatcacggaaattcacgggaatagcaaaagacaccccagatcccgaggaggaggaggtggacaggtggcccccatgatagtctctggctgataaaactgacactccagtacgtgagggggcagagagccagtttccgtgactcacctttccactagggatccgtgcaatccaggccgagggagaataacttgtttctctcaaaccctggagataacttggagagaggcgaagagacagagagacaccaggaaaagctgcagccattttcccggacttgggactgagatgaggacgcaatctttaaccctggcttatacaaagtcagtcactggccacctggcagcaggggccactgcaggcattttagtcgctggctggagattggagcacatgctctgagcaggaaatggcccacaaagccagaattgagcagtgagtgtggcgagtgccccagcactaggcgttggaattgggttccctaccaccgcaagactggaggactgcagcggcaggagagttactgaagct

SEQ ID NO: 149080 - DNA, 30 bp, Homo sapiens
  chr4:128806292-128806322
  hypo
tcagttggaaataacgaagattaaaaggaa

SEQ ID NO: 149081 - DNA, 30 bp, Homo sapiens
  chr4:128812377-128812407
  hypo
gcaacttcaaattatcgtttaagcacgttt

SEQ ID NO: 149082 - DNA, 33 bp, Homo sapiens; identical to SEQ ID NO: 18912
  chr4:128889076-128889109
  hypo

SEQ ID NO: 149083 - DNA, 32 bp, Homo sapiens; identical to SEQ ID NO: 18913
  chr4:128889348-128889380
  hypo

SEQ ID NO: 149084 - DNA, 40 bp, Homo sapiens; identical to SEQ ID NO: 68594
  chr4:128967287-128967327
  hypo

SEQ ID NO: 149085 - DNA, 23 bp, Homo sapiens
  chr4:128984282-128984305
  hypo
cttaagaaagtaaaaatgggccg

SEQ ID NO: 149086 - DNA, 20 bp, Homo sapiens
  chr4:128985138-128985158
  hypo
gcgattggctgtgcgcggtg

SEQ ID NO: 149087 - DNA, 30 bp, Homo sapiens
  chr4:129275125-129275155
  hypo
ctagcacatagcaggcgccagagccatcct

SEQ ID NO: 149088 - DNA, 17 bp, Homo sapiens
  chr4:129396160-129396177
  hypo
aaaagaactaggagggc

SEQ ID NO: 149089 - DNA, 30 bp, Homo sapiens
  chr4:129481141-129481171
  hypo
tgactgtaatccaatcggagctactctgga

SEQ ID NO: 149090 - DNA, 43 bp, Homo sapiens; identical to SEQ ID NO: 68596
  chr4:129697833-129697876
  hypo

SEQ ID NO: 149091 - DNA, 25 bp, Homo sapiens
  chr4:129736539-129736564
  hypo
ccaccgtgcccggcaatcttaagta

SEQ ID NO: 149092 - DNA, 38 bp, Homo sapiens
  chr4:129754819-129754857
  hypo
agcctggcgacagagcgagactccgtctcgaaaaaaaa

SEQ ID NO: 149093 - DNA, 53 bp, Homo sapiens; identical to SEQ ID NO: 68597
  chr4:129776886-129776939
  hypo

SEQ ID NO: 149094 - DNA, 168 bp, Homo sapiens
  chr4:130168456-130168624
  hypo
taagacagatgggtgcgcagcaagtgttcgcgacacaaccatttatgccgatagagtttgcagacaccagctccaccttggcctgtgtgcaatggctgctcccttgtggaggggaccaacgcaaacatcggagcttggatcataatcgccatacactaacattttgcc

SEQ ID NO: 149095 - DNA, 30 bp, Homo sapiens; identical to SEQ ID NO: 3551
  chr4:136732789-136732819
  hypo

SEQ ID NO: 149096 - DNA, 30 bp, Homo sapiens; identical to SEQ ID NO: 18917
  chr4:137849027-137849057
  hypo

SEQ ID NO: 149097 - DNA, 44 bp, Homo sapiens; identical to SEQ ID NO: 68601
  chr4:138974560-138974604
  hypo

SEQ ID NO: 149098 - DNA, 30 bp, Homo sapiens; identical to SEQ ID NO: 68602
  chr4:139177528-139177558
  hypo

SEQ ID NO: 149099 - DNA, 17 bp, Homo sapiens
  chr4:139187569-139187586
  hypo
agaagcatagatctcct

SEQ ID NO: 149100 - DNA, 36 bp, Homo sapiens
  chr4:139707315-139707351
  hypo
cagaccagagctgttcctattcggccatctttgtac

SEQ ID NO: 149101 - DNA, 18 bp, Homo sapiens
  chr4:139732428-139732446
  hypo
aggcgtgagccaccgcgc

SEQ ID NO: 149102 - DNA, 30 bp, Homo sapiens; identical to SEQ ID NO: 3552
  chr4:139814386-139814416
  hypo

SEQ ID NO: 149103 - DNA, 28 bp, Homo sapiens
  chr4:139864070-139864098
  hypo
aactaggggctgggtgcggtggctcacg

SEQ ID NO: 149104 - DNA, 30 bp, Homo sapiens
  chr4:139904911-139904941
  hypo
cctgggggacaagagcgaaactcttgtctc

SEQ ID NO: 149105 - DNA, 32 bp, Homo sapiens
  chr4:139946031-139946063
  hypo
acaggtgtgagccaccgcgcccagccagtttt

SEQ ID NO: 149106 - DNA, 30 bp, Homo sapiens; identical to SEQ ID NO: 68607
  chr4:140036647-140036677
  hypo

SEQ ID NO: 149107 - DNA, 103 bp, Homo sapiens; identical to SEQ ID NO: 3553
  chr4:140097253-140097356
  hypo

SEQ ID NO: 149108 - DNA, 41 bp, Homo sapiens; identical to SEQ ID NO: 68609
  chr4:140100685-140100726
  hypo

SEQ ID NO: 149109 - DNA, 31 bp, Homo sapiens; identical to SEQ ID NO: 18920
  chr4:140134627-140134658
  hypo

SEQ ID NO: 149110 - DNA, 30 bp, Homo sapiens
  chr4:140165198-140165228
  hypo
ccgggagttcaagaccggcctttcaaacat

SEQ ID NO: 149111 - DNA, 30 bp, Homo sapiens; identical to SEQ ID NO: 18921
  chr4:140225571-140225601
  hypo

SEQ ID NO: 149112 - DNA, 30 bp, Homo sapiens; identical to SEQ ID NO: 68612
  chr4:140229390-140229420
  hypo

SEQ ID NO: 149113 - DNA, 31 bp, Homo sapiens
  chr4:140290552-140290583
  hypo
ttttctgaagtggttccgttgtttgctatct

SEQ ID NO: 149114 - DNA, 287 bp, Homo sapiens; identical to SEQ ID NO: 68613
  chr4:140357385-140357672
  hypo

SEQ ID NO: 149115 - DNA, 21 bp, Homo sapiens
  chr4:140406966-140406987
  hypo
tttcaccgtgttagccaggat

SEQ ID NO: 149116 - DNA, 30 bp, Homo sapiens
  chr4:140527854-140527884
  hypo
agtgacttcctctgtcgtaacggaagggaa

SEQ ID NO: 149117 - DNA, 38 bp, Homo sapiens
  chr4:140566708-140566746
  hypo
ctgagattacaggcatgggccaccgcgcccggcctgtt

SEQ ID NO: 149118 - DNA, 400 bp, Homo sapiens; identical to SEQ ID NO: 110651
  chr4:140586865-140587265
  hypo

SEQ ID NO: 149119 - DNA, 41 bp, Homo sapiens; identical to SEQ ID NO: 68615
  chr4:140592641-140592682
  hypo

SEQ ID NO: 149120 - DNA, 30 bp, Homo sapiens; identical to SEQ ID NO: 18923
  chr4:140619764-140619794
  hypo

SEQ ID NO: 149121 - DNA, 83 bp, Homo sapiens; identical to SEQ ID NO: 68617
  chr4:140640070-140640153
  hypo

SEQ ID NO: 149122 - DNA, 40 bp, Homo sapiens; identical to SEQ ID NO: 68618
  chr4:140641397-140641437
  hypo

SEQ ID NO: 149123 - DNA, 91 bp, Homo sapiens; identical to SEQ ID NO: 68619
  chr4:140701210-140701301
  hypo

SEQ ID NO: 149124 - DNA, 532 bp, Homo sapiens; identical to SEQ ID NO: 68620
  chr4:140705005-140705537
  hypo

SEQ ID NO: 149125 - DNA, 36 bp, Homo sapiens; identical to SEQ ID NO: 68621
  chr4:140705887-140705923
  hypo

SEQ ID NO: 149126 - DNA, 31 bp, Homo sapiens
  chr4:140714178-140714209
  hypo
cgtgagacaccgcgcccggcagaactggttt

SEQ ID NO: 149127 - DNA, 30 bp, Homo sapiens; identical to SEQ ID NO: 68622
  chr4:140745539-140745569
  hypo

SEQ ID NO: 149128 - DNA, 142 bp, Homo sapiens; identical to SEQ ID NO: 68623
  chr4:140751842-140751984
  hypo

SEQ ID NO: 149129 - DNA, 317 bp, Homo sapiens; identical to SEQ ID NO: 18926
  chr4:140754335-140754652
  hypo

SEQ ID NO: 149130 - DNA, 30 bp, Homo sapiens
  chr4:140754851-140754881
  hypo
gtgccaaggggtggccgcttgaaggtctcc

SEQ ID NO: 149131 - DNA, 30 bp, Homo sapiens
  chr4:140755608-140755638
  hypo
ggggatccccgtggccggccagcgccctct

SEQ ID NO: 149132 - DNA, 408 bp, Homo sapiens
  chr4:140780991-140781399
  hypo
ggtcttccaaaaaatcgacatcgagaaggttttaaacgtgtaaagattttttttagggaaaccgtctgtacgagagcaaacgagagcggagaggcctgagcgccacagggtgcaaggccggagtgaccggacgaaggcgtcgcgggaggggctagaggagcagccaccgagcctcgagtacccgggggcaggcgcgggcctcagcgagacgtgctgccgtttctattggagagacaaaatctaaatgttatcaggaggattttcatttatcaggaaagcaactcgaaaacccacagcctgagttcctgaagcccctagctccctcccaagccgcagaggcgtggaaacgccgtggggtcggagtcgcttccatgcggatcctgcgttcaccagcgcccaaaagaggag

SEQ ID NO: 149133 - DNA, 22 bp, Homo sapiens
  chr4:140785538-140785560
  hypo
aaatctttcatgggccaggtgc

SEQ ID NO: 149134 - DNA, 30 bp, Homo sapiens
  chr4:140796477-140796507
  hypo
tggaagtggtgggagcgctgcaaaaacgga

SEQ ID NO: 149135 - DNA, 25 bp, Homo sapiens
  chr4:140865030-140865055
  hypo
ttttttttttttgagacggaatctt

SEQ ID NO: 149136 - DNA, 109 bp, Homo sapiens
  chr4:140929944-140930053
  hypo
gcaactgactccttgcgataaaagacacttctgtcaggcactgacctggcagcctttacagggatgtggatccatgtgtattatttcgccaccacgaaaactctttacc

SEQ ID NO: 149137 - DNA, 208 bp, Homo sapiens; identical to SEQ ID NO: 68628
  chr4:141007378-141007586
  hypo

SEQ ID NO: 149138 - DNA, 38 bp, Homo sapiens; identical to SEQ ID NO: 18928
  chr4:141014854-141014892
  hypo

SEQ ID NO: 149139 - DNA, 31 bp, Homo sapiens; identical to SEQ ID NO: 68630
  chr4:141050717-141050748
  hypo

SEQ ID NO: 149140 - DNA, 31 bp, Homo sapiens; identical to SEQ ID NO: 68631
  chr4:141058427-141058458
  hypo

SEQ ID NO: 149141 - DNA, 139 bp, Homo sapiens; identical to SEQ ID NO: 68632
  chr4:141067294-141067433
  hypo

SEQ ID NO: 149142 - DNA, 1320 bp, Homo sapiens; identical to SEQ ID NO: 110656
  chr4:141071487-141072807
  hypo

SEQ ID NO: 149143 - DNA, 2283 bp, Homo sapiens; identical to SEQ ID NO: 110657
  chr4:141073108-141075391
  hypo

SEQ ID NO: 149144 - DNA, 31 bp, Homo sapiens; identical to SEQ ID NO: 68637
  chr4:141087175-141087206
  hypo

SEQ ID NO: 149145 - DNA, 30 bp, Homo sapiens; identical to SEQ ID NO: 68638
  chr4:141172880-141172910
  hypo

SEQ ID NO: 149146 - DNA, 102 bp, Homo sapiens; identical to SEQ ID NO: 18935
  chr4:141207749-141207851
  hypo

SEQ ID NO: 149147 - DNA, 47 bp, Homo sapiens; identical to SEQ ID NO: 18936
  chr4:141207918-141207965
  hypo

SEQ ID NO: 149148 - DNA, 155 bp, Homo sapiens; identical to SEQ ID NO: 68641
  chr4:141266287-141266442
  hypo

SEQ ID NO: 149149 - DNA, 1036 bp, Homo sapiens; identical to SEQ ID NO: 40952
  chr4:141348028-141349064
  hypo

SEQ ID NO: 149150 - DNA, 1378 bp, Homo sapiens
  chr4:141563898-141565276
  hypo
cagctcatagtcatctgatgtcggcagagatttgctgctcagctttccgctactgttgcagttcttccccctcttgcgggcgggcgacagggctctcgggggcgtgggtctgtttccacggcctgcgtgccaagcttccatgggactcctcgtgcctgtcctcggagtcccggcgccgctgcagcttcaccagctcatgctgcttctccttgtactggtgctggacctcggcccgccacattctgaagtccagttccaggacgtccatgtcctccacggaggacttcatggggtacatccgctcctccttcttgcgcatccagctgtacttattgtgggcttcagctcccgtgggagccgcaggttcttgagcgggtcccaccacgggcccatccagcacctccctcagcatgtggctgccggctgccagcaggctctccagtgagggccgagccaccagggcccgctccgcacctcccaccttcttgctcctcctctccagctccagctctgcgatctcgctcagcagggtgatgccgtgcagaaagctctgctccaagacaaggctctcggcagcttcctgcttctccaaggcctggactccagtagcacctggggagggcagaggcctggcctggggcagctccatggccacctccatgccagccagtgggtcttccaggccgggcaggaactgctcagagcttgcctcttccaggtagcaggtgctgccgggcacaggcacggcctcccggggctccagtctcgggcactctccctccccggcgggcacgtcacagtctgacatttctaggctgggctggggctcgctcagggccgcctgggccaggccttcctccggcgctgcctctgccgcaggaaccgccacaggcacctccactggctcctccttggcctccactagcgtctcgggtgtcagctgcacccccaggtccaatgcggccgtgcagggttctgtccggcccggggaatccacgcatgcttcaggcccctccgcaaagtctgggcactcagagggctcggtgcagccctgcccggtggcactcagcgcctgggcctccaacgggccacctctgcatccgcctgcagggctcggggtagccatggtttccatggcgggcagtggcagcggcaactccagaggcggcagctctgcggggcgctcgtccacatcctccacctccaccttcgcctcctgttcagccagcggctcttcctccgggtcctcccgcagcggctctgggatcttggagggggacaggaggatgagcttgtcttcgggcgagagtgtcaggcgcttggtcccatcagctgggagcagcacatcaggggccaggccatccgcatcggcggccac

SEQ ID NO: 149151 - DNA, 1309 bp, Homo sapiens; identical to SEQ ID NO: 110668
  chr4:141676912-141678221
  hypo

SEQ ID NO: 149152 - DNA, 1726 bp, Homo sapiens; identical to SEQ ID NO: 110669
  chr4:142053207-142054933
  hypo

SEQ ID NO: 149153 - DNA, 85 bp, Homo sapiens; identical to SEQ ID NO: 68649
  chr4:142134703-142134788
  hypo

SEQ ID NO: 149154 - DNA, 853 bp, Homo sapiens; identical to SEQ ID NO: 110672
  chr4:142557228-142558081
  hypo

SEQ ID NO: 149155 - DNA, 186 bp, Homo sapiens; identical to SEQ ID NO: 18944
  chr4:142677008-142677194
  hypo

SEQ ID NO: 149156 - DNA, 39 bp, Homo sapiens; identical to SEQ ID NO: 68652
  chr4:143073505-143073544
  hypo

SEQ ID NO: 149157 - DNA, 197 bp, Homo sapiens; identical to SEQ ID NO: 18945
  chr4:143477971-143478168
  hypo

SEQ ID NO: 149158 - DNA, 75 bp, Homo sapiens; identical to SEQ ID NO: 18946
  chr4:144141583-144141658
  hypo

SEQ ID NO: 149159 - DNA, 541 bp, Homo sapiens; identical to SEQ ID NO: 110677
  chr4:144256958-144257499
  hypo

SEQ ID NO: 149160 - DNA, 190 bp, Homo sapiens; identical to SEQ ID NO: 40970
  chr4:144257936-144258126
  hypo

SEQ ID NO: 149161 - DNA, 301 bp, Homo sapiens; identical to SEQ ID NO: 3583
  chr4:144258374-144258675
  hypo

SEQ ID NO: 149162 - DNA, 118 bp, Homo sapiens
  chr4:144265399-144265517
  hypo
gtgtgagtgccagctcgtgttgggggggagagaataacaccaacggatcacatgaaaccccctctccctgtggatggaggggtttctctcatttcacattcctcgcatcaacatggcg

SEQ ID NO: 149163 - DNA, 30 bp, Homo sapiens
  chr4:144271250-144271280
  hypo
gcaccggcgtcatccgccatttggtgtttt

SEQ ID NO: 149164 - DNA, 30 bp, Homo sapiens
  chr4:144286293-144286323
  hypo
tgctgagattacaggcgtgagccatcgcgc

SEQ ID NO: 149165 - DNA, 125 bp, Homo sapiens; identical to SEQ ID NO: 68658
  chr4:144507007-144507132
  hypo

SEQ ID NO: 149166 - DNA, 42 bp, Homo sapiens
  chr4:146047171-146047213
  hypo
aacagagcgagtctctgtccctgcccccgcccccgcaacccc

SEQ ID NO: 149167 - DNA, 30 bp, Homo sapiens; identical to SEQ ID NO: 68659
  chr4:146092115-146092145
  hypo

SEQ ID NO: 149168 - DNA, 30 bp, Homo sapiens
  chr4:146093589-146093619
  hypo
tacagcttgcttcatcgcttcattgttact

SEQ ID NO: 149169 - DNA, 30 bp, Homo sapiens; identical to SEQ ID NO: 40983
  chr4:146102031-146102061
  hypo

SEQ ID NO: 149170 - DNA, 158 bp, Homo sapiens; identical to SEQ ID NO: 110692
  chr4:146102129-146102287
  hypo

SEQ ID NO: 149171 - DNA, 1186 bp, Homo sapiens; identical to SEQ ID NO: 110694
  chr4:146402703-146403889
  hypo

SEQ ID NO: 149172 - DNA, 37 bp, Homo sapiens; identical to SEQ ID NO: 68664
  chr4:146449669-146449706
  hypo

SEQ ID NO: 149173 - DNA, 30 bp, Homo sapiens; identical to SEQ ID NO: 18954
  chr4:146559532-146559562
  hypo

SEQ ID NO: 149174 - DNA, 30 bp, Homo sapiens; identical to SEQ ID NO: 68666
  chr4:146682362-146682392
  hypo

SEQ ID NO: 149175 - DNA, 30 bp, Homo sapiens; identical to SEQ ID NO: 68667
  chr4:146682649-146682679
  hypo

SEQ ID NO: 149176 - DNA, 30 bp, Homo sapiens; identical to SEQ ID NO: 68668
  chr4:146686221-146686251
  hypo

SEQ ID NO: 149177 - DNA, 64 bp, Homo sapiens
  chr4:146694921-146694985
  hypo
ctggttttctttggccgcgaacacacatgccatgcgtcattaaggagagcgtcagggctgcagt

SEQ ID NO: 149178 - DNA, 182 bp, Homo sapiens
  chr4:146825845-146826027
  hypo
gtgtatgagagtgtgtatgcacgtgtgtgtgtgtgtgcgcgtgtgtgcacatgcactgtggtgcaggagtggggtcacacagatctacaggacgttgtgaactgcagaaaggtcttctgaatttggcaaaactgggtaccactggagggtttgtggcaagcgagtgttatgacatgacttat

SEQ ID NO: 149179 - DNA, 31 bp, Homo sapiens; identical to SEQ ID NO: 18955
  chr4:146853627-146853658
  hypo

SEQ ID NO: 149180 - DNA, 91 bp, Homo sapiens; identical to SEQ ID NO: 68671
  chr4:146853897-146853988
  hypo

SEQ ID NO: 149181 - DNA, 888 bp, Homo sapiens; identical to SEQ ID NO: 110706
  chr4:147559190-147560078
  hypo

SEQ ID NO: 149182 - DNA, 285 bp, Homo sapiens; identical to SEQ ID NO: 40995
  chr4:147560133-147560418
  hypo

SEQ ID NO: 149183 - DNA, 155 bp, Homo sapiens; identical to SEQ ID NO: 110714
  chr4:147576046-147576201
  hypo

SEQ ID NO: 149184 - DNA, 435 bp, Homo sapiens; identical to SEQ ID NO: 110715
  chr4:147576329-147576764
  hypo

SEQ ID NO: 149185 - DNA, 31 bp, Homo sapiens; identical to SEQ ID NO: 68675
  chr4:148463774-148463805
  hypo

SEQ ID NO: 149186 - DNA, 34 bp, Homo sapiens; identical to SEQ ID NO: 3604
  chr4:148538934-148538968
  hypo

SEQ ID NO: 149187 - DNA, 20 bp, Homo sapiens
  chr4:148543379-148543399
  hypo
caccgcgcctggccgcagta

SEQ ID NO: 149188 - DNA, 31 bp, Homo sapiens
  chr4:148597949-148597980
  hypo
tttgggagaccgaggcgggtggatcactaga

SEQ ID NO: 149189 - DNA, 100 bp, Homo sapiens; identical to SEQ ID NO: 18961
  chr4:148782278-148782378
  hypo

SEQ ID NO: 149190 - DNA, 29 bp, Homo sapiens
  chr4:148835301-148835330
  hypo
caaaaaaagaaatccgctttattgaggta

SEQ ID NO: 149191 - DNA, 31 bp, Homo sapiens; identical to SEQ ID NO: 68680
  chr4:148884819-148884850
  hypo

SEQ ID NO: 149192 - DNA, 31 bp, Homo sapiens; identical to SEQ ID NO: 18963
  chr4:148985416-148985447
  hypo

SEQ ID NO: 149193 - DNA, 31 bp, Homo sapiens; identical to SEQ ID NO: 18964
  chr4:149363505-149363536
  hypo

SEQ ID NO: 149194 - DNA, 127 bp, Homo sapiens; identical to SEQ ID NO: 3607
  chr4:149364526-149364653
  hypo

SEQ ID NO: 149195 - DNA, 1597 bp, Homo sapiens; identical to SEQ ID NO: 110727
  chr4:149364661-149366258
  hypo

SEQ ID NO: 149196 - DNA, 38 bp, Homo sapiens; identical to SEQ ID NO: 18967
  chr4:149905344-149905382
  hypo

SEQ ID NO: 149197 - DNA, 30 bp, Homo sapiens
  chr4:150637711-150637741
  hypo
gttttctgttccctgcggctccatggagca

SEQ ID NO: 149198 - DNA, 30 bp, Homo sapiens; identical to SEQ ID NO: 68686
  chr4:150958769-150958799
  hypo

SEQ ID NO: 149199 - DNA, 30 bp, Homo sapiens
  chr4:151010052-151010082
  hypo
ggcacatgcgtaggccggctgcaccaatgg

SEQ ID NO: 149200 - DNA, 34 bp, Homo sapiens; identical to SEQ ID NO: 68687
  chr4:151020123-151020157
  hypo

SEQ ID NO: 149201 - DNA, 22 bp, Homo sapiens
  chr4:151029369-151029391
  hypo
aaccttcttggccgggcgcagt

SEQ ID NO: 149202 - DNA, 22 bp, Homo sapiens
  chr4:151044885-151044907
  hypo
tttttcagatttaaaaattaac

SEQ ID NO: 149203 - DNA, 30 bp, Homo sapiens
  chr4:151051203-151051233
  hypo
gaacgggattaaattcgtggatgttttgca

SEQ ID NO: 149204 - DNA, 30 bp, Homo sapiens; identical to SEQ ID NO: 18969
  chr4:151156988-151157018
  hypo

SEQ ID NO: 149205 - DNA, 30 bp, Homo sapiens; identical to SEQ ID NO: 18970
  chr4:151177538-151177568
  hypo

SEQ ID NO: 149206 - DNA, 76 bp, Homo sapiens
  chr4:151435899-151435975
  hypo
tgcttgcattcgatccgaagtatattaacttatcccaactctcttccatttcttcttattgcgtatgttaaattga

SEQ ID NO: 149207 - DNA, 214 bp, Homo sapiens
  chr4:151897749-151897963
  hypo
aaatacaagccttcaccgatcatcgccgcgacagaaacaacaaatttaacaaccatgtccacaaaaaagcaccttcataaaaaccaaaaataaggtgagcaatcacttcgtatcacagaaaggggcactgaagaaggtaagcaagacagtcttgaattgctattccccccaaaagcagctgtgtgtcatggagcacctacgcgcctgggagtgg

SEQ ID NO: 149208 - DNA, 34 bp, Homo sapiens; identical to SEQ ID NO: 68693
  chr4:151960719-151960753
  hypo

SEQ ID NO: 149209 - DNA, 137 bp, Homo sapiens; identical to SEQ ID NO: 68694
  chr4:151974305-151974442
  hypo

SEQ ID NO: 149210 - DNA, 34 bp, Homo sapiens; identical to SEQ ID NO: 68695
  chr4:152157385-152157419
  hypo

SEQ ID NO: 149211 - DNA, 31 bp, Homo sapiens; identical to SEQ ID NO: 68696
  chr4:152273414-152273445
  hypo

SEQ ID NO: 149212 - DNA, 1079 bp, Homo sapiens; identical to SEQ ID NO: 41014
  chr4:152329808-152330887
  hypo

SEQ ID NO: 149213 - DNA, 37 bp, Homo sapiens
  chr4:152448688-152448725
  hypo
tggggagagcgagagcgagagagagagggagagggag

SEQ ID NO: 149214 - DNA, 142 bp, Homo sapiens
  chr4:152591279-152591421
  hypo
ctggtctttaagcgacgtgagtcagaggtaacaaaggcatatatataccgaacaaaggtgctccggtgcagtggagagaacagtattagtgtcgcaagcacaggagtgcagacagccccgccttcatcgtgatgcctgcagc

SEQ ID NO: 149215 - DNA, 31 bp, Homo sapiens; identical to SEQ ID NO: 18973
  chr4:152594486-152594517
  hypo

SEQ ID NO: 149216 - DNA, 30 bp, Homo sapiens
  chr4:152614156-152614186
  hypo
ccgtcccctttgcggcgggggtgctggggt

SEQ ID NO: 149217 - DNA, 30 bp, Homo sapiens
  chr4:152640323-152640353
  hypo
ctgtgcaattatgagcgagccaccagaagc

SEQ ID NO: 149218 - DNA, 298 bp, Homo sapiens
  chr4:152640709-152641007
  hypo
agttcctctcagaaccgcaggctgaacaaatgcttctcccacacactgacatcctcgctgaatatgcaacttggcccttcaacaggcattatctctggttctctgggtgggcagctccagttcacaagccgagtctgtttgcctgggaatcagggaaggatataaagaagaaaatgtatgcagcagtgggtcccaccgggcacttaaggaactgccacatcgggaaccctttcccccagtgcccggcatcaaagctaacaggaagagtcgcagaaaagcttagcggagtggttactac

SEQ ID NO: 149219 - DNA, 30 bp, Homo sapiens; identical to SEQ ID NO: 18974
  chr4:153199808-153199838
  hypo

SEQ ID NO: 149220 - DNA, 93 bp, Homo sapiens
  chr4:153247350-153247443
  hypo
ctaagagtggcatctcgagaaccgctaacaactctgcagagggagaaacagaaaaacaaaacaaaacaaaaaaacccacgtttagaattttta

SEQ ID NO: 149221 - DNA, 30 bp, Homo sapiens; identical to SEQ ID NO: 3615
  chr4:153249370-153249400
  hypo

SEQ ID NO: 149222 - DNA, 30 bp, Homo sapiens; identical to SEQ ID NO: 68702
  chr4:153369672-153369702
  hypo

SEQ ID NO: 149223 - DNA, 21 bp, Homo sapiens
  chr4:153454049-153454070
  hypo
ttttttggcaggacgcggtgt

SEQ ID NO: 149224 - DNA, 63 bp, Homo sapiens; identical to SEQ ID NO: 68704
  chr4:153460845-153460908
  hypo

SEQ ID NO: 149225 - DNA, 42 bp, Homo sapiens
  chr4:153535666-153535708
  hypo
gtgcggcagccaagccgtgcagtcctgcgctttctgactcac

SEQ ID NO: 149226 - DNA, 30 bp, Homo sapiens; identical to SEQ ID NO: 41017
  chr4:153589912-153589942
  hypo

SEQ ID NO: 149227 - DNA, 98 bp, Homo sapiens; identical to SEQ ID NO: 68706
  chr4:153702686-153702784
  hypo

SEQ ID NO: 149228 - DNA, 18 bp, Homo sapiens
  chr4:153736902-153736920
  hypo
ttttttttttttgagacg

SEQ ID NO: 149229 - DNA, 30 bp, Homo sapiens
  chr4:153806643-153806673
  hypo
ctaactttgttgatacggactcagttcaga

SEQ ID NO: 149230 - DNA, 152 bp, Homo sapiens; identical to SEQ ID NO: 68708
  chr4:153821325-153821477
  hypo

SEQ ID NO: 149231 - DNA, 27 bp, Homo sapiens
  chr4:153860380-153860407
  hypo
caccacgcccagctactgtgtgtgtgt

SEQ ID NO: 149232 - DNA, 30 bp, Homo sapiens; identical to SEQ ID NO: 68710
  chr4:153863058-153863088
  hypo

SEQ ID NO: 149233 - DNA, 87 bp, Homo sapiens; identical to SEQ ID NO: 18976
  chr4:153889784-153889871
  hypo

SEQ ID NO: 149234 - DNA, 30 bp, Homo sapiens
  chr4:153890430-153890460
  hypo
aaatattatggccttcggcggatgcttgat

SEQ ID NO: 149235 - DNA, 30 bp, Homo sapiens; identical to SEQ ID NO: 18977
  chr4:153894777-153894807
  hypo

SEQ ID NO: 149236 - DNA, 252 bp, Homo sapiens; identical to SEQ ID NO: 68713
  chr4:153896020-153896272
  hypo

SEQ ID NO: 149237 - DNA, 649 bp, Homo sapiens
  chr4:153897071-153897720
  hypo
cccgggagcgcccggcggagccagggggcagtggccaagtctgtgcggaccctgaccgcctcagagaacgagagcatgcgcaaggtcatgcccatcaccaagtccagcagaggcgccggctggaggcgaccagagctgtcatcccgggggccctcccagaatccccccagcagcacagatactgtgtggtcacgccagaactccgtgcggagggcctccacaggcgccgaagagcagaggctgccgcgggggagcagcggctccagcagcacccgtccggggagggacgttcccctgcagcccaggggttctttcaagaagcccagtgccaaaccactcaggaacctccccagacagaagcctgaggaaaataagacctgccgcgcccactccgagggccctgagagtcccaaagaagagcccaagaccccgtcagtgcccagcgtcccccacgaactaccccgtgtcccgagctttgcccggaacacagtggcctcctcctctcgaagcatgagaacagatcttcctcccgtggccaaagcccccggcatcactcggacagtgtcgcagcggcagctgagggtgaaaggggaccccgaggatgccgctcccaaggacagcagcactttgaggcgagccagcagtgccc

SEQ ID NO: 149238 - DNA, 30 bp, Homo sapiens; identical to SEQ ID NO: 18981
  chr4:153898094-153898124
  hypo

SEQ ID NO: 149239 - DNA, 241 bp, Homo sapiens; identical to SEQ ID NO: 68716
  chr4:153918911-153919152
  hypo

SEQ ID NO: 149240 - DNA, 430 bp, Homo sapiens
  chr4:153943298-153943728
  hypo
tgggaaggtccaggcacctcacgaggtaggtccaggtgactgggacacgggagggctccagacagccgctatttgccacacggaaccaaagcatttcactgttttaacaagcggttcagctggtccggagtatccctgctggctctcagccctaaagtggcgtgagggctgggcacgtcgacagcacttgatccgctccttccctctggaaatgcatttccttccattaccagaacagcctctcacagtttggcctgcctcttctcatgctatgtcgaaacaaagccacctgcctcccatgaaagacggcattgtttttccacctgagccacccacacctgggcaggtagaacagcgggtccccactccagggagctctcccactcgggcctgtcatggctcacaccccgagcagctgctgtgcttgccc

SEQ ID NO: 149241 - DNA, 234 bp, Homo sapiens
  chr4:153985891-153986125
  hypo
agcctgaggcccagtcgcccggtctctcacggggaagcgcacatttcctttcctggctctctgcacctacctgggaaggcggcccgccttgctgctacctgccagtctgctggcccgcctggtcctgtggctctccgtggagctttctggagcaaagaggctgaagaatacagcggcacagggccagaagctggcttctaggggctgggccatgtctctcggatcttggtcctc

SEQ ID NO: 149242 - DNA, 30 bp, Homo sapiens
  chr4:154016681-154016711
  hypo
tggcaaggagcctcgcgtgtgacacacctg

SEQ ID NO: 149243 - DNA, 30 bp, Homo sapiens
  chr4:154019092-154019122
  hypo
acctgggcgttgtctcgctgaggggtgggg

SEQ ID NO: 149244 - DNA, 30 bp, Homo sapiens; identical to SEQ ID NO: 18984
  chr4:154036612-154036642
  hypo

SEQ ID NO: 149245 - DNA, 30 bp, Homo sapiens; identical to SEQ ID NO: 18985
  chr4:154076805-154076835
  hypo

SEQ ID NO: 149246 - DNA, 944 bp, Homo sapiens; identical to SEQ ID NO: 68721
  chr4:154216327-154217271
  hypo

SEQ ID NO: 149247 - DNA, 151 bp, Homo sapiens
  chr4:154218326-154218477
  hypo
ttcaggctgaatcttcgcaaagacggtgatatgatatgtaacttgtctgttcagagcatggaagccctcatacattcacggccagatgtgcgatatgggtgcaggggttgttgattctccaccagagcagagtggacgagcttgggtggat

SEQ ID NO: 149248 - DNA, 36 bp, Homo sapiens; identical to SEQ ID NO: 68722
  chr4:154247836-154247872
  hypo

SEQ ID NO: 149249 - DNA, 30 bp, Homo sapiens
  chr4:154324515-154324545
  hypo
ccctcttagcaaagacggctgagccctttg

SEQ ID NO: 149250 - DNA, 24 bp, Homo sapiens
  chr4:154365083-154365107
  hypo
ccctgttctttttttcttttccgt

SEQ ID NO: 149251 - DNA, 240 bp, Homo sapiens; identical to SEQ ID NO: 41025
  chr4:154387494-154387734
  hypo

SEQ ID NO: 149252 - DNA, 227 bp, Homo sapiens; identical to SEQ ID NO: 110757
  chr4:154387969-154388196
  hypo

SEQ ID NO: 149253 - DNA, 41 bp, Homo sapiens; identical to SEQ ID NO: 68726
  chr4:154394645-154394686
  hypo

SEQ ID NO: 149254 - DNA, 97 bp, Homo sapiens; identical to SEQ ID NO: 18988
  chr4:154410568-154410665
  hypo

SEQ ID NO: 149255 - DNA, 223 bp, Homo sapiens; identical to SEQ ID NO: 68728
  chr4:154420386-154420609
  hypo

SEQ ID NO: 149256 - DNA, 103 bp, Homo sapiens; identical to SEQ ID NO: 68729
  chr4:154420848-154420951
  hypo

SEQ ID NO: 149257 - DNA, 127 bp, Homo sapiens; identical to SEQ ID NO: 68730
  chr4:154421942-154422069
  hypo

SEQ ID NO: 149258 - DNA, 22 bp, Homo sapiens
  chr4:154437983-154438005
  hypo
tattattcttttgagacggagt

SEQ ID NO: 149259 - DNA, 86 bp, Homo sapiens; identical to SEQ ID NO: 68732
  chr4:154454427-154454513
  hypo

SEQ ID NO: 149260 - DNA, 22 bp, Homo sapiens
  chr4:154455868-154455890
  hypo
gccacggcgcctggccaggagt

SEQ ID NO: 149261 - DNA, 231 bp, Homo sapiens
  chr4:154456108-154456339
  hypo
gaggccttggaaatgcggagttcttgtggggattttgagcagagcagtgatgccatttgaattaggtttaaagaggccatgctggcagtgctgagcctgggtggcagggaaaccagtgaggcccttacagccaggaagcaagagatggagagacatgatgggtgcttggatcaggtgtggcagtgggcctggtgaaagcggagctcatgggatttccgatggatgggatgc

SEQ ID NO: 149262 - DNA, 104 bp, Homo sapiens; identical to SEQ ID NO: 68734
  chr4:154469358-154469462
  hypo

SEQ ID NO: 149263 - DNA, 144 bp, Homo sapiens; identical to SEQ ID NO: 18992
  chr4:154520338-154520482
  hypo

SEQ ID NO: 149264 - DNA, 30 bp, Homo sapiens; identical to SEQ ID NO: 68736
  chr4:154527117-154527147
  hypo

SEQ ID NO: 149265 - DNA, 30 bp, Homo sapiens
  chr4:154540200-154540230
  hypo
ctggtcaccgagtcccgcctctcagtagtc

SEQ ID NO: 149266 - DNA, 30 bp, Homo sapiens
  chr4:154553933-154553963
  hypo
caccctggagaacggcgtgccttgtgtgat

SEQ ID NO: 149267 - DNA, 138 bp, Homo sapiens
  chr4:154554210-154554348
  hypo
gttattttttaaaaacgtctttaaaaaagacgattttttcatatattagaggcagatttgaaaaaaaaacactcataattcctaactgctagcagagcaaagctgttcatttttctgtggcattattcttgaacacgt

SEQ ID NO: 149268 - DNA, 30 bp, Homo sapiens; identical to SEQ ID NO: 3622
  chr4:154607110-154607140
  hypo

SEQ ID NO: 149269 - DNA, 31 bp, Homo sapiens; identical to SEQ ID NO: 18994
  chr4:154681753-154681784
  hypo

SEQ ID NO: 149270 - DNA, 442 bp, Homo sapiens; identical to SEQ ID NO: 110763
  chr4:154709168-154709610
  hypo

SEQ ID NO: 149271 - DNA, 859 bp, Homo sapiens; identical to SEQ ID NO: 110764
  chr4:154709758-154710617
  hypo

SEQ ID NO: 149272 - DNA, 457 bp, Homo sapiens; identical to SEQ ID NO: 110765
  chr4:154710728-154711185
  hypo

SEQ ID NO: 149273 - DNA, 734 bp, Homo sapiens; identical to SEQ ID NO: 110768
  chr4:154713480-154714214
  hypo

SEQ ID NO: 149274 - DNA, 30 bp, Homo sapiens
  chr4:154727462-154727492
  hypo
ctgtggccccgcactcggcgtggccagctg

SEQ ID NO: 149275 - DNA, 573 bp, Homo sapiens; identical to SEQ ID NO: 110769
  chr4:155254020-155254593
  hypo

SEQ ID NO: 149276 - DNA, 346 bp, Homo sapiens; identical to SEQ ID NO: 110784
  chr4:156297387-156297733
  hypo

SEQ ID NO: 149277 - DNA, 193 bp, Homo sapiens; identical to SEQ ID NO: 3642
  chr4:156297941-156298134
  hypo

SEQ ID NO: 149278 - DNA, 30 bp, Homo sapiens
  chr4:156482319-156482349
  hypo
gcgttttctacaagtcgcttcatttttctt

SEQ ID NO: 149279 - DNA, 103 bp, Homo sapiens; identical to SEQ ID NO: 68746
  chr4:156676881-156676984
  hypo

SEQ ID NO: 149280 - DNA, 753 bp, Homo sapiens; identical to SEQ ID NO: 110789
  chr4:157892474-157893227
  hypo

SEQ ID NO: 149281 - DNA, 77 bp, Homo sapiens; identical to SEQ ID NO: 68748
  chr4:157974482-157974559
  hypo

SEQ ID NO: 149282 - DNA, 142 bp, Homo sapiens
  chr4:158740620-158740762
  hypo
accgtgcctgactggcggagagctccagcagggtgtcccctgtggccacgcaccagccgtcacgctccctctccacactgcagcttccttctgcctcacggcaactccccacttcacactgctagtacgtgtctgccaggtg

SEQ ID NO: 149283 - DNA, 69 bp, Homo sapiens
  chr4:158740987-158741056
  hypo
acccagatctggactcgccagcgccccgccttggagccaacaccacctcaagtgcgacattgcacatag

SEQ ID NO: 149284 - DNA, 35 bp, Homo sapiens
  chr4:159018074-159018109
  hypo
attacaggcgtgagccaccgcgcccggccttactg

SEQ ID NO: 149285 - DNA, 19 bp, Homo sapiens
  chr4:159071361-159071380
  hypo
ccaccgcgctcggcctctg

SEQ ID NO: 149286 - DNA, 105 bp, Homo sapiens
  chr4:159488284-159488389
  hypo
cgcttggcagggctcgggacctgcagcctaccatgcctgagcctccctctcaccccgccttgggctcctgcacagccggagcctccccgacgaccatggccccct

SEQ ID NO: 149287 - DNA, 46 bp, Homo sapiens
  chr4:159680338-159680384
  hypo
tctctcctctctctctttccacggtctccctctgttgccgaggctg

SEQ ID NO: 149288 - DNA, 738 bp, Homo sapiens; identical to SEQ ID NO: 41067
  chr4:159690016-159690754
  hypo

SEQ ID NO: 149289 - DNA, 42 bp, Homo sapiens; identical to SEQ ID NO: 68751
  chr4:159749468-159749510
  hypo

SEQ ID NO: 149290 - DNA, 30 bp, Homo sapiens
  chr4:159755181-159755211
  hypo
aaatccatggtgtttcgaaaattctgccaa

SEQ ID NO: 149291 - DNA, 30 bp, Homo sapiens
  chr4:159772534-159772564
  hypo
agcagttaccagcgccgctggcttcgaagt

SEQ ID NO: 149292 - DNA, 30 bp, Homo sapiens; identical to SEQ ID NO: 68752
  chr4:159784661-159784691
  hypo

SEQ ID NO: 149293 - DNA, 31 bp, Homo sapiens; identical to SEQ ID NO: 68753
  chr4:159790257-159790288
  hypo

SEQ ID NO: 149294 - DNA, 196 bp, Homo sapiens
  chr4:159919844-159920040
  hypo
cattaggtaagaatcgcgccggttttacccacactggaaagagctgagaggtatgcatagctcttttattgctctgagtaatgatggtaattatgatgtaatccacagagcacaaccgacactggactgggtggaaatagtgctctcaatcctccactctataacaatatggcttgtaaaacgtatgtaccattga

SEQ ID NO: 149295 - DNA, 97 bp, Homo sapiens
  chr4:159927207-159927304
  hypo
gcctgaccctcttttaattttttaatgtggctgccagaaaatgttcaattatgtatgtggctcgaattatgtttccgttgaacagtgttggtctgaa

SEQ ID NO: 149296 - DNA, 20 bp, Homo sapiens
  chr4:160016975-160016995
  hypo
gactccgtctcaaaaaaaga

SEQ ID NO: 149297 - DNA, 30 bp, Homo sapiens
  chr4:160021982-160022012
  hypo
ggtaagtaaagcgacgaagataaccagagt

SEQ ID NO: 149298 - DNA, 30 bp, Homo sapiens; identical to SEQ ID NO: 68756
  chr4:160277127-160277157
  hypo

SEQ ID NO: 149299 - DNA, 31 bp, Homo sapiens
  chr4:160286683-160286714
  hypo
gttgtgaatcattgagcgcaggcactacgtc

SEQ ID NO: 149300 - DNA, 30 bp, Homo sapiens; identical to SEQ ID NO: 68757
  chr4:160310849-160310879
  hypo

SEQ ID NO: 149301 - DNA, 33 bp, Homo sapiens; identical to SEQ ID NO: 68758
  chr4:162799089-162799122
  hypo

SEQ ID NO: 149302 - DNA, 30 bp, Homo sapiens; identical to SEQ ID NO: 3653
  chr4:163811945-163811975
  hypo

SEQ ID NO: 149303 - DNA, 30 bp, Homo sapiens
  chr4:164285800-164285830
  hypo
tcttattctgctatgcgatgcgatgcgatg

SEQ ID NO: 149304 - DNA, 112 bp, Homo sapiens; identical to SEQ ID NO: 68760
  chr4:164394801-164394913
  hypo

SEQ ID NO: 149305 - DNA, 569 bp, Homo sapiens; identical to SEQ ID NO: 68761
  chr4:165109362-165109931
  hypo

SEQ ID NO: 149306 - DNA, 17 bp, Homo sapiens
  chr4:165206912-165206929
  hypo
ttaattttattttttaa

SEQ ID NO: 149307 - DNA, 322 bp, Homo sapiens; identical to SEQ ID NO: 68763
  chr4:165850786-165851108
  hypo

SEQ ID NO: 149308 - DNA, 30 bp, Homo sapiens
  chr4:165854026-165854056
  hypo
gtttttcccaccgggcgtagccctgcggtg

SEQ ID NO: 149309 - DNA, 313 bp, Homo sapiens
  chr4:165854267-165854580
  hypo
agttctgaggtccagcgcagagtcccagggctcccaagtcagattaagggcttgaggacgggggcgcagagatgggggtgtcctgcagaggcaggggcgccggcacaccctcttcagccatcggaatctggcagaagatgaagtgagcagggaaagagaagcctctttagcagggttcagttccttgactggcagctggcactcgcccctggagggtggaggactctgcggctccacattcggtgcccatgagaggcgctggggtgaggctgggccctctgtgggctccgggagaggtcgaaagtgaagatct

SEQ ID NO: 149310 - DNA, 30 bp, Homo sapiens; identical to SEQ ID NO: 68764
  chr4:165953178-165953208
  hypo

SEQ ID NO: 149311 - DNA, 24 bp, Homo sapiens
  chr4:165953686-165953710
  hypo
caccgtgctcggccggattctgtt

SEQ ID NO: 149312 - DNA, 162 bp, Homo sapiens
  chr4:166035043-166035205
  hypo
tgggattacaagtttagccaccgcgtcttgcccactttcatacattctaatgcttatttgtacattgagtatagtgtgatccagtttaggatgtgtgagataaaactacgcaaatgttagtgaaggaagagatggtgtaagactccacgtgatcttcttttt

SEQ ID NO: 149313 - DNA, 30 bp, Homo sapiens; identical to SEQ ID NO: 68767
  chr4:166245531-166245561
  hypo

SEQ ID NO: 149314 - DNA, 181 bp, Homo sapiens
  chr4:166337213-166337394
  hypo
cacaaggaatcttcccgcctgcactcccctgccagctcagctacttccctactcctgcgccaactcaaccgtaacagtagctgagacgaaagcattgctctgaagtaaggtgtagggaagctttctggcttccttaataaagttacacacgatcttctaagcttggcgatggagggagaag

SEQ ID NO: 149315 - DNA, 30 bp, Homo sapiens; identical to SEQ ID NO: 3660
  chr4:166513760-166513790
  hypo

SEQ ID NO: 149316 - DNA, 31 bp, Homo sapiens; identical to SEQ ID NO: 68769
  chr4:167457985-167458016
  hypo

SEQ ID NO: 149317 - DNA, 23 bp, Homo sapiens
  chr4:169014730-169014753
  hypo
ggcaagagaatggcgtgaacccg

SEQ ID NO: 149318 - DNA, 23 bp, Homo sapiens
  chr4:169014812-169014835
  hypo
gcgagactccatctcaaaaaaca

SEQ ID NO: 149319 - DNA, 93 bp, Homo sapiens; identical to SEQ ID NO: 68772
  chr4:169105969-169106062
  hypo

SEQ ID NO: 149320 - DNA, 25 bp, Homo sapiens
  chr4:169190461-169190486
  hypo
aatgttggccgggcacggtggctca

SEQ ID NO: 149321 - DNA, 44 bp, Homo sapiens; identical to SEQ ID NO: 68773
  chr4:169198693-169198737
  hypo

SEQ ID NO: 149322 - DNA, 33 bp, Homo sapiens; identical to SEQ ID NO: 68774
  chr4:169224158-169224191
  hypo

SEQ ID NO: 149323 - DNA, 38 bp, Homo sapiens
  chr4:169315724-169315762
  hypo
ccgtgtcttgtaaatcgcactcgcggtaataccctctc

SEQ ID NO: 149324 - DNA, 34 bp, Homo sapiens; identical to SEQ ID NO: 19010
  chr4:169358977-169359011
  hypo

SEQ ID NO: 149325 - DNA, 164 bp, Homo sapiens; identical to SEQ ID NO: 19011
  chr4:169377151-169377315
  hypo

SEQ ID NO: 149326 - DNA, 119 bp, Homo sapiens
  chr4:169459970-169460089
  hypo
aagtgggtgattacccgcgattggtgtctgttacagtcattgtgtctttctctaggattctctctctgtttccgaaacacatatgttccaagttttggatgctacgacttcgtgttcat

SEQ ID NO: 149327 - DNA, 30 bp, Homo sapiens
  chr4:169529293-169529323
  hypo
cgcattgggagcagcgctggcaacctataa

SEQ ID NO: 149328 - DNA, 34 bp, Homo sapiens; identical to SEQ ID NO: 19012
  chr4:169562059-169562093
  hypo

SEQ ID NO: 149329 - DNA, 30 bp, Homo sapiens
  chr4:169562787-169562817
  hypo
cacccctgattttgtcggcctcggctgctc

SEQ ID NO: 149330 - DNA, 206 bp, Homo sapiens; identical to SEQ ID NO: 68779
  chr4:169667597-169667803
  hypo

SEQ ID NO: 149331 - DNA, 93 bp, Homo sapiens; identical to SEQ ID NO: 68780
  chr4:169744532-169744625
  hypo

SEQ ID NO: 149332 - DNA, 125 bp, Homo sapiens; identical to SEQ ID NO: 68781
  chr4:169751968-169752093
  hypo

SEQ ID NO: 149333 - DNA, 233 bp, Homo sapiens
  chr4:169930592-169930825
  hypo
tgctttgtgcattcgcgcagggccaaggcacggcccttgggcaaaactgaagggagccgttggtacctgcactcccacctttcctgcctgaactcctttcgacccagccctgtctccgggggccgagaactcgcccttttccctacattaaaagtaaactgttacgtggctctctcccacaacagggaagctcctcagcgttagcactagccgcagggcggagggtgcgtata

SEQ ID NO: 149334 - DNA, 151 bp, Homo sapiens; identical to SEQ ID NO: 68782
  chr4:169952681-169952832
  hypo

SEQ ID NO: 149335 - DNA, 45 bp, Homo sapiens
  chr4:169957540-169957585
  hypo
tcacctctcactgggattacaggcgtgagccgccacgcccagcct

SEQ ID NO: 149336 - DNA, 20 bp, Homo sapiens
  chr4:169978176-169978196
  hypo
ttagagcaggctcttgcgct

SEQ ID NO: 149337 - DNA, 79 bp, Homo sapiens; identical to SEQ ID NO: 68784
  chr4:169978255-169978334
  hypo

SEQ ID NO: 149338 - DNA, 210 bp, Homo sapiens
  chr4:170037585-170037795
  hypo
caggccagaggggcactggctcgactgatactgatggcagcagtgtgcgtggctgagcctggcatcagaggcgcaggttgtggggaggccagcgagtgatgggacaggcccacagatgcagggctgaggccggcggcattctgtacctggatgggtgtcactgctgccgtggggcgttcctggttgtgcgctgcaactagtagatgggaa

SEQ ID NO: 149339 - DNA, 186 bp, Homo sapiens; identical to SEQ ID NO: 19013
  chr4:170043183-170043369
  hypo

SEQ ID NO: 149340 - DNA, 90 bp, Homo sapiens
  chr4:170064507-170064597
  hypo
ctttgaaacccggtgcgaacggagtgcttccatcccactcagtttggacgagtctcgctgcaagttgctcaacagcgacatgtgcattgg

SEQ ID NO: 149341 - DNA, 215 bp, Homo sapiens; identical to SEQ ID NO: 19014
  chr4:170105280-170105495
  hypo

SEQ ID NO: 149342 - DNA, 46 bp, Homo sapiens
  chr4:170125971-170126017
  hypo
ttacaggcgtgagccactgagccccggccaccttctccttttgaag

SEQ ID NO: 149343 - DNA, 24 bp, Homo sapiens
  chr4:170162086-170162110
  hypo
ttaaaactgcccaggccgggcgtg

SEQ ID NO: 149344 - DNA, 30 bp, Homo sapiens
  chr4:170173188-170173218
  hypo
gactctggtatgttccgcagcgactcaaga

SEQ ID NO: 149345 - DNA, 74 bp, Homo sapiens; identical to SEQ ID NO: 41091
  chr4:170192273-170192347
  hypo

SEQ ID NO: 149346 - DNA, 31 bp, Homo sapiens; identical to SEQ ID NO: 68789
  chr4:170211793-170211824
  hypo

SEQ ID NO: 149347 - DNA, 77 bp, Homo sapiens; identical to SEQ ID NO: 19017
  chr4:170566082-170566159
  hypo

SEQ ID NO: 149348 - DNA, 76 bp, Homo sapiens; identical to SEQ ID NO: 19018
  chr4:170566218-170566294
  hypo

SEQ ID NO: 149349 - DNA, 30 bp, Homo sapiens
  chr4:170594621-170594651
  hypo
tgcttattatcttcacgctgtaaatagctt

SEQ ID NO: 149350 - DNA, 38 bp, Homo sapiens; identical to SEQ ID NO: 19019
  chr4:170612104-170612142
  hypo

SEQ ID NO: 149351 - DNA, 71 bp, Homo sapiens; identical to SEQ ID NO: 68793
  chr4:170641909-170641980
  hypo

SEQ ID NO: 149352 - DNA, 216 bp, Homo sapiens; identical to SEQ ID NO: 19020
  chr4:170652115-170652331
  hypo

SEQ ID NO: 149353 - DNA, 42 bp, Homo sapiens; identical to SEQ ID NO: 68795
  chr4:170845920-170845962
  hypo

SEQ ID NO: 149354 - DNA, 102 bp, Homo sapiens; identical to SEQ ID NO: 19021
  chr4:170865252-170865354
  hypo

SEQ ID NO: 149355 - DNA, 23 bp, Homo sapiens
  chr4:170903791-170903814
  hypo
tgttctggccaggcacggtggct

SEQ ID NO: 149356 - DNA, 30 bp, Homo sapiens; identical to SEQ ID NO: 68798
  chr4:170912645-170912675
  hypo

SEQ ID NO: 149357 - DNA, 30 bp, Homo sapiens; identical to SEQ ID NO: 68799
  chr4:170913012-170913042
  hypo

SEQ ID NO: 149358 - DNA, 30 bp, Homo sapiens
  chr4:170918861-170918891
  hypo
aggcccggtagctcacggcccttctatcac

SEQ ID NO: 149359 - DNA, 21 bp, Homo sapiens
  chr4:170930251-170930272
  hypo
tgagctggacatggtggctca

SEQ ID NO: 149360 - DNA, 123 bp, Homo sapiens
  chr4:170937654-170937777
  hypo
atgctctacctacctcgaccctgcctttgtctttacagcattaactactacgtgtttacatactgcgctcccattaggatgggagctcctagagggctgggctcctgtcgttgccgctgttta

SEQ ID NO: 149361 - DNA, 31 bp, Homo sapiens; identical to SEQ ID NO: 19023
  chr4:171014687-171014718
  hypo

SEQ ID NO: 149362 - DNA, 30 bp, Homo sapiens
  chr4:172509966-172509996
  hypo
aaattttgtttttaacgtttaacatcttcg

SEQ ID NO: 149363 - DNA, 122 bp, Homo sapiens; identical to SEQ ID NO: 41103
  chr4:172735016-172735138
  hypo

SEQ ID NO: 149364 - DNA, 31 bp, Homo sapiens; identical to SEQ ID NO: 41104
  chr4:172735202-172735233
  hypo

SEQ ID NO: 149365 - DNA, 121 bp, Homo sapiens
  chr4:173298722-173298843
  hypo
tgccgtggagcaggggccggtgcccatcagggaggctcgggccacacgggagcccaccggttgtgggggagctcggtcatggtgggctgcaggtcccaagccctgccccacagggaggcag

SEQ ID NO: 149366 - DNA, 42 bp, Homo sapiens; identical to SEQ ID NO: 68805
  chr4:173467909-173467951
  hypo

SEQ ID NO: 149367 - DNA, 30 bp, Homo sapiens
  chr4:174073810-174073840
  hypo
gttggagagggagaacggcatgccaggaca

SEQ ID NO: 149368 - DNA, 1704 bp, Homo sapiens; identical to SEQ ID NO: 110853
  chr4:174089733-174091437
  hypo

SEQ ID NO: 149369 - DNA, 23 bp, Homo sapiens
  chr4:174119489-174119512
  hypo
attacaggcgtgagccaccgcgc

SEQ ID NO: 149370 - DNA, 82 bp, Homo sapiens
  chr4:174136652-174136734
  hypo
ttgcaggtgtcagccaccatacccggcctgctgttctccttttaatgcacccaagtcctggggaacccgactggggatcaga

SEQ ID NO: 149371 - DNA, 26 bp, Homo sapiens
  chr4:174145873-174145899
  hypo
caaatattggccgggcgcggtggctc

SEQ ID NO: 149372 - DNA, 30 bp, Homo sapiens; identical to SEQ ID NO: 68807
  chr4:174157381-174157411
  hypo

SEQ ID NO: 149373 - DNA, 19 bp, Homo sapiens
  chr4:174189980-174189999
  hypo
cacccggacacttgtttac

SEQ ID NO: 149374 - DNA, 1125 bp, Homo sapiens; identical to SEQ ID NO: 110875
  chr4:174449601-174450726
  hypo

SEQ ID NO: 149375 - DNA, 732 bp, Homo sapiens; identical to SEQ ID NO: 110876
  chr4:174450751-174451483
  hypo

SEQ ID NO: 149376 - DNA, 30 bp, Homo sapiens; identical to SEQ ID NO: 41137
  chr4:175846410-175846440
  hypo

SEQ ID NO: 149377 - DNA, 149 bp, Homo sapiens; identical to SEQ ID NO: 19026
  chr4:175940747-175940896
  hypo

SEQ ID NO: 149378 - DNA, 30 bp, Homo sapiens; identical to SEQ ID NO: 68813
  chr4:177190406-177190436
  hypo

SEQ ID NO: 149379 - DNA, 100 bp, Homo sapiens; identical to SEQ ID NO: 41143
  chr4:177240752-177240852
  hypo

SEQ ID NO: 149380 - DNA, 30 bp, Homo sapiens
  chr4:178278299-178278329
  hypo
gtttgttttaatcctcgaaataatcctgta

SEQ ID NO: 149381 - DNA, 49 bp, Homo sapiens; identical to SEQ ID NO: 110909
  chr4:179699959-179700008
  hypo

SEQ ID NO: 149382 - DNA, 30 bp, Homo sapiens
  chr4:179938572-179938602
  hypo
atacagacaggaggccgggaaatactgggt

SEQ ID NO: 149383 - DNA, 185 bp, Homo sapiens
  chr4:181454370-181454555
  hypo
gtcgtatcttctgagcgcactttcacggccatgcaaaatacaatggattctgtcactcacacactattattataccctgttttagtttattcagagaactcagtacggctttgttcattttgtgactgttttcaaaactctagactaaaaggtccatgatgccgtctttccgtgcttcactttgg

SEQ ID NO: 149384 - DNA, 30 bp, Homo sapiens
  chr4:181706526-181706556
  hypo
ctgtccaagccttcccgtggaagttgcaag

SEQ ID NO: 149385 - DNA, 30 bp, Homo sapiens
  chr4:182848367-182848397
  hypo
atccatggaacccagcggatcccaccctca

SEQ ID NO: 149386 - DNA, 30 bp, Homo sapiens; identical to SEQ ID NO: 41152
  chr4:182872676-182872706
  hypo

SEQ ID NO: 149387 - DNA, 31 bp, Homo sapiens; identical to SEQ ID NO: 68817
  chr4:183081013-183081044
  hypo

SEQ ID NO: 149388 - DNA, 30 bp, Homo sapiens
  chr4:183260924-183260954
  hypo
atacctactgcagttcgactatcagatatc

SEQ ID NO: 149389 - DNA, 199 bp, Homo sapiens; identical to SEQ ID NO: 68818
  chr4:183626525-183626724
  hypo

SEQ ID NO: 149390 - DNA, 93 bp, Homo sapiens
  chr4:183673078-183673171
  hypo
aaatgcagaagtcgtcgcagggacaggggagcaatgccttccgtttgacgaggcgagatgtggggatggagggaaggccgtggaagccacact

SEQ ID NO: 149391 - DNA, 30 bp, Homo sapiens
  chr4:183749758-183749788
  hypo
cggtgctgtggagcacgccggtgccttgcg

SEQ ID NO: 149392 - DNA, 275 bp, Homo sapiens
  chr4:183768990-183769265
  hypo
gctgagtggggaaggcgaaattccccgccattgtcggaggctggcgatatcttccagactatggacaagttggcttaggtctgttcttaaccgcccagcaagaggtgaacaacaaagaaaaggttcctgatctcacagcttagagacgaaggacagacagctggaggaatttgctcaaaagaaattgcttacgtttcgccaaagctctaggtttttgcttggagacctcactggtccgaggctggccaagccggggactgcgtggcgttcagcac

SEQ ID NO: 149393 - DNA, 31 bp, Homo sapiens; identical to SEQ ID NO: 3713
  chr4:183796433-183796464
  hypo

SEQ ID NO: 149394 - DNA, 160 bp, Homo sapiens; identical to SEQ ID NO: 68820
  chr4:183808103-183808263
  hypo

SEQ ID NO: 149395 - DNA, 40 bp, Homo sapiens; identical to SEQ ID NO: 68821
  chr4:183808322-183808362
  hypo

SEQ ID NO: 149396 - DNA, 196 bp, Homo sapiens; identical to SEQ ID NO: 19029
  chr4:183809395-183809591
  hypo

SEQ ID NO: 149397 - DNA, 31 bp, Homo sapiens; identical to SEQ ID NO: 19030
  chr4:183814349-183814380
  hypo

SEQ ID NO: 149398 - DNA, 30 bp, Homo sapiens; identical to SEQ ID NO: 68824
  chr4:183814913-183814943
  hypo

SEQ ID NO: 149399 - DNA, 30 bp, Homo sapiens; identical to SEQ ID NO: 19031
  chr4:183815698-183815728
  hypo

SEQ ID NO: 149400 - DNA, 318 bp, Homo sapiens; identical to SEQ ID NO: 19032
  chr4:183815956-183816274
  hypo

SEQ ID NO: 149401 - DNA, 204 bp, Homo sapiens; identical to SEQ ID NO: 68827
  chr4:183824598-183824802
  hypo

SEQ ID NO: 149402 - DNA, 30 bp, Homo sapiens
  chr4:183939245-183939275
  hypo
gattagagtctgcctcgattgctgatcaaa

SEQ ID NO: 149403 - DNA, 30 bp, Homo sapiens
  chr4:183939859-183939889
  hypo
gaatagaggttctatcgggcgtcttcttcc

SEQ ID NO: 149404 - DNA, 31 bp, Homo sapiens; identical to SEQ ID NO: 68828
  chr4:184000059-184000090
  hypo

SEQ ID NO: 149405 - DNA, 2057 bp, Homo sapiens; identical to SEQ ID NO: 41165
  chr4:184019260-184021317
  hypo

SEQ ID NO: 149406 - DNA, 33 bp, Homo sapiens; identical to SEQ ID NO: 68830
  chr4:184051480-184051513
  hypo

SEQ ID NO: 149407 - DNA, 42 bp, Homo sapiens; identical to SEQ ID NO: 68831
  chr4:184160137-184160179
  hypo

SEQ ID NO: 149408 - DNA, 30 bp, Homo sapiens
  chr4:184165491-184165521
  hypo
caaagaattaggttacgtgaaatcctctag

SEQ ID NO: 149409 - DNA, 83 bp, Homo sapiens
  chr4:184166101-184166184
  hypo
agggatgggagaaatcttagccgcctgtgattaaaagagaaaggaggggctgagacgtgcggatcacgaggtcaggagttcaa

SEQ ID NO: 149410 - DNA, 31 bp, Homo sapiens; identical to SEQ ID NO: 19037
  chr4:184265808-184265839
  hypo

SEQ ID NO: 149411 - DNA, 180 bp, Homo sapiens
  chr4:184277758-184277938
  hypo
ctgctggagcctgaccgccagctcagtcccctccggggttggttcccgccattcctcttgatcacctctccctccctccccacctggctctaagggatgggtcgtcagagcccggaagggggcagctgtggagccgctgcctctgatgatttgtggctgagaccccgtgcaagcgggagg

SEQ ID NO: 149412 - DNA, 180 bp, Homo sapiens
  chr4:184278166-184278346
  hypo
tcccccctactctcccgccccgccccggcctgccccgccggcaccaaacgcaagcatcagactcacctgctctccggtgtgtgtgaccaagaaccctgcgggctcctctccaccctccactctcaggaaataacaggaaagatgtctccctggcatgcctggactcgtgcgtttattcac

SEQ ID NO: 149413 - DNA, 30 bp, Homo sapiens
  chr4:184278664-184278694
  hypo
acccatgctggccgtcggggtctggaggag

SEQ ID NO: 149414 - DNA, 151 bp, Homo sapiens
  chr4:184289434-184289585
  hypo
gctgctaaactcccacgttgacacctgtcaagaggagcttctgctatttttgcaagtttcaatgctatttgagcaccgatacgatgccgcaagtagaaaattccacaactaacctcaagtgagactgacaggttgcagttaaaacacagtc

SEQ ID NO: 149415 - DNA, 30 bp, Homo sapiens; identical to SEQ ID NO: 19039
  chr4:184297616-184297646
  hypo

SEQ ID NO: 149416 - DNA, 31 bp, Homo sapiens; identical to SEQ ID NO: 68836
  chr4:184322586-184322617
  hypo

SEQ ID NO: 149417 - DNA, 322 bp, Homo sapiens; identical to SEQ ID NO: 110924
  chr4:184328289-184328611
  hypo

SEQ ID NO: 149418 - DNA, 110 bp, Homo sapiens
  chr4:184331204-184331314
  hypo
cgtgctagcctgatacccaggcgcgacagaaactcagagcccatgcctctttctggcctcaagcttgcattcttccatggggagtgaccgggccaaccatctctgtcatc

SEQ ID NO: 149419 - DNA, 38 bp, Homo sapiens; identical to SEQ ID NO: 68839
  chr4:184339995-184340033
  hypo

SEQ ID NO: 149420 - DNA, 224 bp, Homo sapiens
  chr4:184343146-184343370
  hypo
gcttcagatgtctctttttttccctttccttgaaataatctgaatcaaatccggagactgccctcaggcccagctgagctctgaggagtctgagctagtcgtctccaaaggactcatagccaatctcggaaaccagttactccacaggaaagcccgtctacctcccagcacctcaggggcccacagcgcaagcaggtgagctggctggacgatcgagttcctgc

SEQ ID NO: 149421 - DNA, 121 bp, Homo sapiens; identical to SEQ ID NO: 68840
  chr4:184375284-184375405
  hypo

SEQ ID NO: 149422 - DNA, 29 bp, Homo sapiens
  chr4:184375704-184375733
  hypo
gcccggccgatcctgcttcttttatcccc

SEQ ID NO: 149423 - DNA, 134 bp, Homo sapiens; identical to SEQ ID NO: 68842
  chr4:184404651-184404785
  hypo

SEQ ID NO: 149424 - DNA, 30 bp, Homo sapiens
  chr4:184404994-184405024
  hypo
atgagcatatgaatcggctacagtctcaaa

SEQ ID NO: 149425 - DNA, 25 bp, Homo sapiens
  chr4:184532564-184532589
  hypo
cacacacacacgcacacacacacac

SEQ ID NO: 149426 - DNA, 31 bp, Homo sapiens; identical to SEQ ID NO: 68843
  chr4:184546934-184546965
  hypo

SEQ ID NO: 149427 - DNA, 33 bp, Homo sapiens
  chr4:184554619-184554652
  hypo
tgactcaccttgcccggccgaaagacatcattt

SEQ ID NO: 149428 - DNA, 19 bp, Homo sapiens
  chr4:184582527-184582546
  hypo
ttttttttttttgagacgg

SEQ ID NO: 149429 - DNA, 30 bp, Homo sapiens
  chr4:184592849-184592879
  hypo
tctctttcctggaatcggtgctcgtttttc

SEQ ID NO: 149430 - DNA, 30 bp, Homo sapiens
  chr4:184593082-184593112
  hypo
ggataaattctatttcgagacaggtcaaac

SEQ ID NO: 149431 - DNA, 31 bp, Homo sapiens; identical to SEQ ID NO: 68845
  chr4:184649712-184649743
  hypo

SEQ ID NO: 149432 - DNA, 181 bp, Homo sapiens; identical to SEQ ID NO: 19042
  chr4:184667623-184667804
  hypo

SEQ ID NO: 149433 - DNA, 201 bp, Homo sapiens; identical to SEQ ID NO: 68847
  chr4:184670514-184670715
  hypo

SEQ ID NO: 149434 - DNA, 181 bp, Homo sapiens
  chr4:184675873-184676054
  hypo
caaagcgctgggattacaggcatgagccaccgcgccctgccggcagagcgtccagtttctaaaggatctgccctgtcctgcgttctgtttcctcaaggcggagcgggacaccgactagcctgacagcttcctgggatttttttaaattttgtttttatttatttattttgagacagagtct

SEQ ID NO: 149435 - DNA, 326 bp, Homo sapiens; identical to SEQ ID NO: 19043
  chr4:184678228-184678554
  hypo

SEQ ID NO: 149436 - DNA, 147 bp, Homo sapiens
  chr4:184679180-184679327
  hypo
ggcttaaacggaaagcgacatggaatttgaaatacatgttttacaagtggagggtgtggggcggtgtcctggattctgccgagcccgcaccaagtgtcctgtcacacaaggcagaaggggaggctggccttgcgcctcaaatccctg

SEQ ID NO: 149437 - DNA, 19 bp, Homo sapiens
  chr4:184685030-184685049
  hypo
gagccgctgcgccaggcct

SEQ ID NO: 149438 - DNA, 82 bp, Homo sapiens
  chr4:184740847-184740929
  hypo
gaaatgaaaggagggcgtgagatattttatgttcgtcaaaaggaagcatgggtgaaaaaggcttgaacggcatcgccccact

SEQ ID NO: 149439 - DNA, 30 bp, Homo sapiens
  chr4:184754845-184754875
  hypo
gtgagaagggccgggcgcggtggctcacgc

SEQ ID NO: 149440 - DNA, 30 bp, Homo sapiens
  chr4:184810235-184810265
  hypo
agggagttaaaggatcgtcctcaacgacac

SEQ ID NO: 149441 - DNA, 117 bp, Homo sapiens
  chr4:184921949-184922066
  hypo
attgcgaacttcgttcgatctacttgtctgtcttctccacttaaatagaaactgagggcagagatgtttggggagaggcgcgcactctgtctctgcagctcccgttcccccagcaga

SEQ ID NO: 149442 - DNA, 31 bp, Homo sapiens; identical to SEQ ID NO: 68852
  chr4:184952936-184952967
  hypo

SEQ ID NO: 149443 - DNA, 311 bp, Homo sapiens
  chr4:185121433-185121744
  hypo
acgtccggacccactcggcacatctgttggtgtgctgctctcccgagccatcgccgcgtttccttaccacactgttattactgcttgtgtgttggttaattacatgatctgtggtgcgtggaggcctctcaacaaaaggtggattcaagcatatgtaattggctatcgagtcactgtgaacctttttggcttcggttggggttagcacacctagttggccagaacctaattaacatcaattgcgcactcactaaatgcacaaccaacctcagggctccatttgtctggtcttctcacgctaaacagcaaga

SEQ ID NO: 149444 - DNA, 38 bp, Homo sapiens; identical to SEQ ID NO: 19044
  chr4:185185201-185185239
  hypo

SEQ ID NO: 149445 - DNA, 30 bp, Homo sapiens
  chr4:185230860-185230890
  hypo
cgcagaggtggaggacggacgtgtagccct

SEQ ID NO: 149446 - DNA, 387 bp, Homo sapiens; identical to SEQ ID NO: 68855
  chr4:185238061-185238448
  hypo

SEQ ID NO: 149447 - DNA, 30 bp, Homo sapiens
  chr4:185238648-185238678
  hypo
ggctgctactgctgccgctcagtcaggccc

SEQ ID NO: 149448 - DNA, 17 bp, Homo sapiens
  chr4:185239349-185239366
  hypo
ggcgacagagtgagact

SEQ ID NO: 149449 - DNA, 125 bp, Homo sapiens; identical to SEQ ID NO: 19046
  chr4:185239991-185240116
  hypo

SEQ ID NO: 149450 - DNA, 37 bp, Homo sapiens; identical to SEQ ID NO: 19047
  chr4:185241302-185241339
  hypo

SEQ ID NO: 149451 - DNA, 30 bp, Homo sapiens
  chr4:185250389-185250419
  hypo
cctgaagcaggtcatcgtaagaccctcctg

SEQ ID NO: 149452 - DNA, 90 bp, Homo sapiens
  chr4:185322204-185322294
  hypo
ggagagtgacttgtccagactcgcacagcttggagtatatgtggtgctctatgttgcagtcattttctcaccaatcggcaaagtattcag

SEQ ID NO: 149453 - DNA, 229 bp, Homo sapiens; identical to SEQ ID NO: 68860
  chr4:185344285-185344514
  hypo

SEQ ID NO: 149454 - DNA, 157 bp, Homo sapiens; identical to SEQ ID NO: 19049
  chr4:185352798-185352955
  hypo

SEQ ID NO: 149455 - DNA, 281 bp, Homo sapiens; identical to SEQ ID NO: 68862
  chr4:185353276-185353557
  hypo

SEQ ID NO: 149456 - DNA, 31 bp, Homo sapiens; identical to SEQ ID NO: 19051
  chr4:185354512-185354543
  hypo

SEQ ID NO: 149457 - DNA, 171 bp, Homo sapiens; identical to SEQ ID NO: 68864
  chr4:185355393-185355564
  hypo

SEQ ID NO: 149458 - DNA, 30 bp, Homo sapiens
  chr4:185376823-185376853
  hypo
tgatattaactatacgttgtgatggataaa

SEQ ID NO: 149459 - DNA, 30 bp, Homo sapiens
  chr4:185377262-185377292
  hypo
gatcacactgatcacgggcgtctgacacac

SEQ ID NO: 149460 - DNA, 182 bp, Homo sapiens
  chr4:185386796-185386978
  hypo
aaatattttcccatcactaaacgctgctcgaaaacacgagctttataagctacctatagtctgtctggatgtgccgtaattcgttcaaatgtgtctctattgttggatatttagcttgtttccaagtttttacataacaaaagctaattcaataaacatccgtgtacatacatctttgttcc

SEQ ID NO: 149461 - DNA, 58 bp, Homo sapiens; identical to SEQ ID NO: 68866
  chr4:185425791-185425849
  hypo

SEQ ID NO: 149462 - DNA, 90 bp, Homo sapiens; identical to SEQ ID NO: 68867
  chr4:185426627-185426717
  hypo

SEQ ID NO: 149463 - DNA, 48 bp, Homo sapiens; identical to SEQ ID NO: 68868
  chr4:185480838-185480886
  hypo

SEQ ID NO: 149464 - DNA, 197 bp, Homo sapiens
  chr4:185491194-185491391
  hypo
ggcttcggcctctaaattctttttatggagcctcattttcacagttaaatgtcttcaattgactgtggcctgttgggaggtgggatggaggaagcttcttatggaaaatgaacgtggaagggaagcacaccagaagcaagaaagtgtcatcaatttttccatcaaagactccgtgaaaaagacgaagcacaagtagc

SEQ ID NO: 149465 - DNA, 166 bp, Homo sapiens
  chr4:185684717-185684883
  hypo
cttccaccctccgatcgcccccacccattacttgcactcatcttacacagaattcttagcatcctgttctctgtaagaagagagaacatatgcagctttggcaaacctcacgcaccacctggttctgatcaacacggcctttatttccttgcgtatgaagaagcat

SEQ ID NO: 149466 - DNA, 163 bp, Homo sapiens; identical to SEQ ID NO: 68869
  chr4:185688831-185688994
  hypo

SEQ ID NO: 149467 - DNA, 160 bp, Homo sapiens
  chr4:185709700-185709860
  hypo
ttctgaaaggccactcgttcttcatgaaacacggcgagcgggagccacgcaaatgcaggaaaatgcttacttgacacctgtattcccctctggaaaccttcgtataatgttgtgacatcatcatagaaatacaccaagggctcgtcgctgtcaagtagtg

SEQ ID NO: 149468 - DNA, 30 bp, Homo sapiens
  chr4:185715260-185715290
  hypo
tccacggatacagagcgccaaccgcgtcct

SEQ ID NO: 149469 - DNA, 30 bp, Homo sapiens
  chr4:185719749-185719779
  hypo
gccattcccattcccgggtgaccctaaggc

SEQ ID NO: 149470 - DNA, 382 bp, Homo sapiens; identical to SEQ ID NO: 110947
  chr4:185747617-185747999
  hypo

SEQ ID NO: 149471 - DNA, 149 bp, Homo sapiens
  chr4:185765455-185765604
  hypo
cttcatcggaagcaccgctgctgaggaacaaccacctcctcctgaccatcgcaagctgcccaggaagacatgctcatagcagtgtccgtttccctgcctaactttccaccagaagattccttcatgtctacgggcggacccaggccgat

SEQ ID NO: 149472 - DNA, 29 bp, Homo sapiens
  chr4:185767488-185767517
  hypo
caggcgtgagccaccgtgcctggccgctt

SEQ ID NO: 149473 - DNA, 30 bp, Homo sapiens
  chr4:185849484-185849514
  hypo
aacctctcccacccgcgtgtgagtcctgag

SEQ ID NO: 149474 - DNA, 146 bp, Homo sapiens
  chr4:185872173-185872319
  hypo
agacgaagctgaagccggcctaaaatgctggggagaggcaggactggcacggtgcatgaggagccgttcaccactgtgtgaggaagccagacccgtgggcgcacctgctagaatggctaccaccaaaagtgcgcactaacaagtgt

SEQ ID NO: 149475 - DNA, 212 bp, Homo sapiens
  chr4:185872522-185872734
  hypo
tagacgcagcccaaacgtccatggtgaggcaagatgtggtctatccagacagcgaactattattcagacgtgaaaaggcatgaggtgcggactcacacgaaacacggaagggccttgaaacacgatgccgagtgaaaaagcccgtcactcatgccgtgtattgaacgaaccattccctttttgtgaaatgtccagaacgggcaaatgcatag

SEQ ID NO: 149476 - DNA, 70 bp, Homo sapiens; identical to SEQ ID NO: 19055
  chr4:185873078-185873148
  hypo

SEQ ID NO: 149477 - DNA, 45 bp, Homo sapiens
  chr4:185886249-185886294
  hypo
gtatgtccagcacaccgcaggtgtgcagccagtgtgtgatggcca

SEQ ID NO: 149478 - DNA, 2979 bp, Homo sapiens; identical to SEQ ID NO: 110951
  chr4:185938974-185941953
  hypo

SEQ ID NO: 149479 - DNA, 30 bp, Homo sapiens; identical to SEQ ID NO: 19057
  chr4:186044812-186044842
  hypo

SEQ ID NO: 149480 - DNA, 30 bp, Homo sapiens
  chr4:186057865-186057895
  hypo
ggtctccgtctgtcacgcaggagtacagtg

SEQ ID NO: 149481 - DNA, 79 bp, Homo sapiens; identical to SEQ ID NO: 68876
  chr4:186066015-186066094
  hypo

SEQ ID NO: 149482 - DNA, 30 bp, Homo sapiens
  chr4:186071238-186071268
  hypo
cgagcgccgcaaggcgagcttatcttccac

SEQ ID NO: 149483 - DNA, 69 bp, Homo sapiens; identical to SEQ ID NO: 3724
  chr4:186130482-186130551
  hypo

SEQ ID NO: 149484 - DNA, 30 bp, Homo sapiens; identical to SEQ ID NO: 68878
  chr4:186143641-186143671
  hypo

SEQ ID NO: 149485 - DNA, 131 bp, Homo sapiens; identical to SEQ ID NO: 68879
  chr4:186150228-186150359
  hypo

SEQ ID NO: 149486 - DNA, 159 bp, Homo sapiens; identical to SEQ ID NO: 68880
  chr4:186203942-186204101
  hypo

SEQ ID NO: 149487 - DNA, 331 bp, Homo sapiens
  chr4:186220273-186220604
  hypo
aagacttctttttcagagtaacgctgagttgagtcataaaggcgagaggctctcattcattccctctgggcttgtcaggggatatgggtggatggcggcacatgcgcatagaaaaagagaatcgtgaagcagccttgtgcacgtaggtaggtcagatgagatcatgtgctcgtgcttgatatgcagtggagagatgagattaatagacaaggcctaaagggcctgggagttatcctagaaagcctggacgtaatgctgtagagcagtggttctcaagctatggtgcacgtcagcctcactggagagcttgttaaaacgcagattgctcacc

SEQ ID NO: 149488 - DNA, 38 bp, Homo sapiens
  chr4:186224523-186224561
  hypo
aacgaaggtgcagggcgtggtggctcacgcctgtaatc

SEQ ID NO: 149489 - DNA, 158 bp, Homo sapiens
  chr4:186224800-186224958
  hypo
agactctgtctcaaaaaaaaaaaaaaaaaaaaaaagcaaggcagggcacacagtgggcacaccctggccgggctgcacaaagtccatgtgtctctgtactcttctccatcataaagtgagtgattccgccatcaactcctgtacgatttctgctattc

SEQ ID NO: 149490 - DNA, 30 bp, Homo sapiens
  chr4:186249894-186249924
  hypo
aaagggacatgaacgcgagcagtgccttta

SEQ ID NO: 149491 - DNA, 96 bp, Homo sapiens; identical to SEQ ID NO: 19059
  chr4:186319409-186319505
  hypo

SEQ ID NO: 149492 - DNA, 18 bp, Homo sapiens
  chr4:186347891-186347909
  hypo
taagtagtggcgggccgg

SEQ ID NO: 149493 - DNA, 137 bp, Homo sapiens; identical to SEQ ID NO: 19061
  chr4:186348208-186348345
  hypo

SEQ ID NO: 149494 - DNA, 40 bp, Homo sapiens; identical to SEQ ID NO: 19062
  chr4:186348625-186348665
  hypo

SEQ ID NO: 149495 - DNA, 30 bp, Homo sapiens; identical to SEQ ID NO: 68885
  chr4:186356187-186356217
  hypo

SEQ ID NO: 149496 - DNA, 892 bp, Homo sapiens; identical to SEQ ID NO: 110964
  chr4:186455982-186456874
  hypo

SEQ ID NO: 149497 - DNA, 30 bp, Homo sapiens
  chr4:186545225-186545255
  hypo
accccggggcgttgcgggctgacctgtgtc

SEQ ID NO: 149498 - DNA, 30 bp, Homo sapiens
  chr4:186548092-186548122
  hypo
tgatctcccaagccccgtggtggacccact

SEQ ID NO: 149499 - DNA, 31 bp, Homo sapiens; identical to SEQ ID NO: 68887
  chr4:186580879-186580910
  hypo

SEQ ID NO: 149500 - DNA, 35 bp, Homo sapiens; identical to SEQ ID NO: 68888
  chr4:186933525-186933560
  hypo

SEQ ID NO: 149501 - DNA, 30 bp, Homo sapiens
  chr4:187013630-187013660
  hypo
gctgctcccgcacccgccccgtgggtgccc

SEQ ID NO: 149502 - DNA, 416 bp, Homo sapiens; identical to SEQ ID NO: 110968
  chr4:187026477-187026893
  hypo

SEQ ID NO: 149503 - DNA, 43 bp, Homo sapiens; identical to SEQ ID NO: 68890
  chr4:187027797-187027840
  hypo

SEQ ID NO: 149504 - DNA, 42 bp, Homo sapiens; identical to SEQ ID NO: 68891
  chr4:187028079-187028121
  hypo

SEQ ID NO: 149505 - DNA, 31 bp, Homo sapiens; identical to SEQ ID NO: 3727
  chr4:187066081-187066112
  hypo

SEQ ID NO: 149506 - DNA, 30 bp, Homo sapiens; identical to SEQ ID NO: 68893
  chr4:187109222-187109252
  hypo

SEQ ID NO: 149507 - DNA, 30 bp, Homo sapiens
  chr4:187115293-187115323
  hypo
tctggagtctcgctcggtacaagccagttt

SEQ ID NO: 149508 - DNA, 180 bp, Homo sapiens; identical to SEQ ID NO: 68894
  chr4:187206901-187207081
  hypo

SEQ ID NO: 149509 - DNA, 30 bp, Homo sapiens; identical to SEQ ID NO: 68895
  chr4:187313058-187313088
  hypo

SEQ ID NO: 149510 - DNA, 104 bp, Homo sapiens
  chr4:187404905-187405009
  hypo
aagaccaccccgtaacgcggccacctcaggagcactaggaccaccccgtaaccgagtcacctcagcagcactaagaacaccacgtaacgcggccacctcaggag

SEQ ID NO: 149511 - DNA, 37 bp, Homo sapiens; identical to SEQ ID NO: 68896
  chr4:187509899-187509936
  hypo

SEQ ID NO: 149512 - DNA, 200 bp, Homo sapiens; identical to SEQ ID NO: 68897
  chr4:187527078-187527278
  hypo

SEQ ID NO: 149513 - DNA, 178 bp, Homo sapiens; identical to SEQ ID NO: 19064
  chr4:187550653-187550831
  hypo

SEQ ID NO: 149514 - DNA, 31 bp, Homo sapiens; identical to SEQ ID NO: 68899
  chr4:187552633-187552664
  hypo

SEQ ID NO: 149515 - DNA, 30 bp, Homo sapiens
  chr4:187564830-187564860
  hypo
ccggggaacgctacccgaaccccctgcact

SEQ ID NO: 149516 - DNA, 30 bp, Homo sapiens; identical to SEQ ID NO: 41200
  chr4:187639298-187639328
  hypo

SEQ ID NO: 149517 - DNA, 1658 bp, Homo sapiens; identical to SEQ ID NO: 110976
  chr4:187646715-187648373
  hypo

SEQ ID NO: 149518 - DNA, 36 bp, Homo sapiens
  chr4:187680707-187680743
  hypo
cgccctcgggcccttccgggccgcttgcttttcatc

SEQ ID NO: 149519 - DNA, 268 bp, Homo sapiens; identical to SEQ ID NO: 68903
  chr4:187762169-187762437
  hypo

SEQ ID NO: 149520 - DNA, 43 bp, Homo sapiens; identical to SEQ ID NO: 68904
  chr4:187796039-187796082
  hypo

SEQ ID NO: 149521 - DNA, 303 bp, Homo sapiens
  chr4:187840651-187840954
  hypo
agacccggaacctcccgaatgtcagcgagaggcaggcgccagccgctctgcccaggcctgccccgcgctgcacatgattcagtgggttggggtgaggtagggtgtggaagcaacacaggaatgggtcacgaatagcaaatagtctctttccaaaaggagatcatgtacagacattgtactgggtctttgggaatgccgcaggggatcctgcgggaacagcgagaaagagggagagaggggctcgcagttacaaaagaaggttcgggtggcgttaggaggcggcagggacgtagctatgcaggc

SEQ ID NO: 149522 - DNA, 31 bp, Homo sapiens; identical to SEQ ID NO: 3733
  chr4:187855389-187855420
  hypo

SEQ ID NO: 149523 - DNA, 384 bp, Homo sapiens
  chr4:188427931-188428315
  hypo
ctgctcagcagttcatgctcccagcggccttacccgctcagaagcgcttccgaagtgcttcctccaggctccacagcggccttccccgctcgctcctttgagctcctcctcggtcgcttttgccagcctctgcctccctttctagcgtcctatttcagcacactcattttcgtttcaggcaggtgcgctttccgttcccagagcgcactggaacctctttcccgctggcctcagccttttcttggaatgccctttccagccttttcacgtggaagcaccactcagcttcaaagccacctccttgggaggccttctctgaccgcccagcctcgttcgcgccacgtgtacattctcagtgcagccagtaaccgcccatttatgtat

SEQ ID NO: 149524 - DNA, 31 bp, Homo sapiens; identical to SEQ ID NO: 68908
  chr4:188593959-188593990
  hypo

SEQ ID NO: 149525 - DNA, 31 bp, Homo sapiens; identical to SEQ ID NO: 19068
  chr4:188682666-188682697
  hypo

SEQ ID NO: 149526 - DNA, 30 bp, Homo sapiens; identical to SEQ ID NO: 19069
  chr4:188858956-188858986
  hypo

SEQ ID NO: 149527 - DNA, 95 bp, Homo sapiens; identical to SEQ ID NO: 68911
  chr4:189100359-189100454
  hypo

SEQ ID NO: 149528 - DNA, 524 bp, Homo sapiens; identical to SEQ ID NO: 19071
  chr4:189552364-189552888
  hypo

SEQ ID NO: 149529 - DNA, 224 bp, Homo sapiens; identical to SEQ ID NO: 68913
  chr4:189717744-189717968
  hypo

SEQ ID NO: 149530 - DNA, 30 bp, Homo sapiens; identical to SEQ ID NO: 68914
  chr4:189718329-189718359
  hypo

SEQ ID NO: 149531 - DNA, 285 bp, Homo sapiens; identical to SEQ ID NO: 19072
  chr4:189956759-189957044
  hypo

SEQ ID NO: 149532 - DNA, 30 bp, Homo sapiens
  chr4:190077004-190077034
  hypo
gtgaggcaacgttgccggctgggggagggc

SEQ ID NO: 149533 - DNA, 30 bp, Homo sapiens; identical to SEQ ID NO: 68916
  chr4:190095515-190095545
  hypo

SEQ ID NO: 149534 - DNA, 225 bp, Homo sapiens; identical to SEQ ID NO: 19073
  chr4:190345361-190345586
  hypo

SEQ ID NO: 149535 - DNA, 172 bp, Homo sapiens
  chr4:190434294-190434466
  hypo
cagaccggagactctcgactgagagaagagactgtctgggttgtggtgccagtggcccttctactaaaaacagcaacatcaataataatggtgtttaacatttagtaagcacttaatatataacagcgacactaaatcttcaggcttccttcaccatcgctgattatcatct

SEQ ID NO: 149536 - DNA, 744 bp, Homo sapiens; identical to SEQ ID NO: 19074
  chr4:190462466-190463210
  hypo

SEQ ID NO: 149537 - DNA, 30 bp, Homo sapiens
  chr4:190483989-190484019
  hypo
tgtgaatacactgctcggtgtggccgtaat

SEQ ID NO: 149538 - DNA, 30 bp, Homo sapiens
  chr4:190484459-190484489
  hypo
tccctccacttgatacggacacaggtttat

SEQ ID NO: 149539 - DNA, 150 bp, Homo sapiens; identical to SEQ ID NO: 68919
  chr4:190509468-190509618
  hypo

SEQ ID NO: 149540 - DNA, 30 bp, Homo sapiens
  chr4:190567706-190567736
  hypo
tgagaagacgacgtcgctgttggagaatat

SEQ ID NO: 149541 - DNA, 44 bp, Homo sapiens; identical to SEQ ID NO: 68920
  chr4:190767153-190767197
  hypo

SEQ ID NO: 149542 - DNA, 30 bp, Homo sapiens
  chr5:97559-97589
  hypo
tgtttgtccacattccgtcctccccagccc

SEQ ID NO: 149543 - DNA, 29 bp, Homo sapiens
  chr5:97648-97677
  hypo
acggaatcgcacaatatatagggttgtgt

SEQ ID NO: 149544 - DNA, 286 bp, Homo sapiens
  chr5:110216-110502
  hypo
tgcaacacacgtgcacgcacccacacagtctgcaacacacgtgcacacatccagtctgcaacacgtgcacacaccggccactctgcaacgcacatgcacacatccatacaatctgcaacacatgcacacaccggccactctgcaacacacatgcacacatccacacaatctgcaacacacatgcatacacccacacaatctgcaacacacgtgcacgcacccacacagtctgcaacacgtgcacacaccggccactctgcaacacacatgcacacatccacacaat

SEQ ID NO: 149545 - DNA, 345 bp, Homo sapiens
  chr5:110561-110906
  hypo
tctgcaacacacgtgcacacatccacacaatctgcaacacgtgtgcacactggccactctgcaacacacatgcacacatccacacaatctgcaacacacgtgcacacacccacgcaatctgcaacacacgcgcacacatccacacaatctgcaacacgtgtgcacacaccggccactctgcaacacacgtgcacacatccacacaatctgcaacacacgtgcacgcacccacacaatctgcagcacacgtgcacacatacaaaatgcaacacgtgtgcacacaccagccactctgcaacaaacgtgcacacatccacacaatctgcaacacgtgcacacacccgc

SEQ ID NO: 149546 - DNA, 533 bp, Homo sapiens; identical to SEQ ID NO: 68922
  chr5:139616-140149
  hypo

SEQ ID NO: 149547 - DNA, 30 bp, Homo sapiens
  chr5:140357-140387
  hypo
gcaggaggcggccgccgggggaccccactt

SEQ ID NO: 149548 - DNA, 125 bp, Homo sapiens
  chr5:141499-141624
  hypo
cgggggcacccatcccgcctcttccagcttctggggctccaggtgtcccgggctgtggctgcagccctctgaccgtcctccgtggcctcctccccagtgcttctctgactcgaatctccctctcc

SEQ ID NO: 149549 - DNA, 30 bp, Homo sapiens
  chr5:141978-142008
  hypo
tccgtgggctccccccgcggtgcctggaga

SEQ ID NO: 149550 - DNA, 532 bp, Homo sapiens; identical to SEQ ID NO: 68923
  chr5:142772-143304
  hypo

SEQ ID NO: 149551 - DNA, 31 bp, Homo sapiens; identical to SEQ ID NO: 68924
  chr5:156162-156193
  hypo

SEQ ID NO: 149552 - DNA, 30 bp, Homo sapiens
  chr5:160273-160303
  hypo
ggatgccgcatgtggcggcctcggcaccct

SEQ ID NO: 149553 - DNA, 30 bp, Homo sapiens
  chr5:160511-160541
  hypo
tttccacgcataagccgtggcactccagcc

SEQ ID NO: 149554 - DNA, 30 bp, Homo sapiens
  chr5:164157-164187
  hypo
cctaggccggatgccgtctgaacctccatc

SEQ ID NO: 149555 - DNA, 121 bp, Homo sapiens; identical to SEQ ID NO: 68925
  chr5:164482-164603
  hypo

SEQ ID NO: 149556 - DNA, 121 bp, Homo sapiens; identical to SEQ ID NO: 68926
  chr5:164902-165023
  hypo

SEQ ID NO: 149557 - DNA, 30 bp, Homo sapiens
  chr5:167051-167081
  hypo
aagaggaacgccaagcgctgtccctgagtc

SEQ ID NO: 149558 - DNA, 31 bp, Homo sapiens; identical to SEQ ID NO: 19076
  chr5:174970-175001
  hypo

SEQ ID NO: 149559 - DNA, 112 bp, Homo sapiens
  chr5:181711-181823
  hypo
tgtgcagtgataagcgaccgggctcccaaatgtgcagtgatgagcgaccgagtccccgacagcatcgtcaagggcacaggtacggtggctcggtcccgccctcactcaccct

SEQ ID NO: 149560 - DNA, 178 bp, Homo sapiens
  chr5:183413-183591
  hypo
taaactcacagtgcctgacctcggagtgccaggcgtgcagaggagcagccaagggcaaacactccaaggagagtcgcctggcaaagccaaccacccagagccagcgtctgtgctagaatcacagaattcaaactgtggctgaaatcgcagcccaggcgtccagaaagttaaagttaag

SEQ ID NO: 149561 - DNA, 30 bp, Homo sapiens; identical to SEQ ID NO: 41212
  chr5:188656-188686
  hypo

SEQ ID NO: 149562 - DNA, 516 bp, Homo sapiens
  chr5:192149-192665
  hypo
agggcaacttcgaggcggtggtgcaggctctgaggccagcgggcccggcccctctgcgggtgcactgcccctcgttccgggcggacagcctgagccccagccagctcctgcacgtgctgcgtctggctggcccgggtgccctgcgcaagctggaggtggtgcacaacgtgcggctgcatgcgggccacgtgcagcagcttctggcccaggtgggcttcccccggctggcctcgctcaccctgcccaccaaggcctttgatgcaccccccacctacgcctccactcccgacggcgaggaccccctcctcgcctccatcgcccgggagctcagcaagatggcgcagctcactgagctcagtgtggccttctccacgctgaccgggaagatcccgacgctgcttgggtgagtcttggggaggggactgagggcgggctggtggctgcagaggcaaggagagatcgtccaggggcctgctcatgtccaaggccatgaggctacacggcctccagcctctc

SEQ ID NO: 149563 - DNA, 30 bp, Homo sapiens
  chr5:195156-195186
  hypo
ctctgtgagctccccgagctgcgctgcatt

SEQ ID NO: 149564 - DNA, 30 bp, Homo sapiens; identical to SEQ ID NO: 68931
  chr5:203686-203716
  hypo

SEQ ID NO: 149565 - DNA, 30 bp, Homo sapiens
  chr5:205319-205349
  hypo
gggcagcacgggaacggaagacgccggaga

SEQ ID NO: 149566 - DNA, 116 bp, Homo sapiens; identical to SEQ ID NO: 68932
  chr5:230940-231056
  hypo

SEQ ID NO: 149567 - DNA, 123 bp, Homo sapiens; identical to SEQ ID NO: 19078
  chr5:233692-233815
  hypo

SEQ ID NO: 149568 - DNA, 36 bp, Homo sapiens
  chr5:234920-234956
  hypo
cctgccacggatacgcagggacgactgtatttggca

SEQ ID NO: 149569 - DNA, 48 bp, Homo sapiens; identical to SEQ ID NO: 19079
  chr5:235347-235395
  hypo

SEQ ID NO: 149570 - DNA, 31 bp, Homo sapiens; identical to SEQ ID NO: 19080
  chr5:236678-236709
  hypo

SEQ ID NO: 149571 - DNA, 93 bp, Homo sapiens; identical to SEQ ID NO: 68936
  chr5:279480-279573
  hypo

SEQ ID NO: 149572 - DNA, 150 bp, Homo sapiens
  chr5:285687-285837
  hypo
tgatgttccagtttgagggccctgcagctggagacccatggggatctgatgttccagtttcaggttggtgcagctggcgacccgggtgggagctgatgttctagtttgagggccgtgcagctggcgacccgggggcgggctgatgttcca

SEQ ID NO: 149573 - DNA, 98 bp, Homo sapiens
  chr5:286139-286237
  hypo
atgcagctggagacccggggagtggggggagctgatggtgcagtttgagggccatgcagctgaggacccaggggggagctgatgttctcctttgagtg

SEQ ID NO: 149574 - DNA, 217 bp, Homo sapiens
  chr5:286416-286633
  hypo
ttgagggccatgcagctggagacccatgggggagctgatgttgttttgagagccgtgcagctggagatccgggggtgagctgatgttcccgtttgagggctgtgcagctggaggcctagcgaggagctaatgttcctgtttgaggtccttgcagctggagacctggggaggagctgatgttcttgtttgagggccttccagccggagacccggggat

SEQ ID NO: 149575 - DNA, 30 bp, Homo sapiens
  chr5:305164-305194
  hypo
tgtgtctccatcccccgtagccaggtggga

SEQ ID NO: 149576 - DNA, 82 bp, Homo sapiens
  chr5:306771-306853
  hypo
gtggaagtacatcacggactggcagaacgtcttccgcacgtacgaccgggacaactccgggatgatcgataagaacgagctg

SEQ ID NO: 149577 - DNA, 471 bp, Homo sapiens; identical to SEQ ID NO: 68940
  chr5:309028-309499
  hypo

SEQ ID NO: 149578 - DNA, 30 bp, Homo sapiens
  chr5:310120-310150
  hypo
atggccgccgtccccgtgcacaccagtgat

SEQ ID NO: 149579 - DNA, 195 bp, Homo sapiens
  chr5:310507-310702
  hypo
gattcagagagtaggtgcacacgtccctgcagagattccagcaggactgaaaaccagtagaaatatatcagcacctggatcttgcctcctgagtcagtaaggatatgccacagtcacgaaggcagtgggatttcgagggagggaagggaaggcggcaggcggggcatgccctccggggtgcccgaacacacctgc

SEQ ID NO: 149580 - DNA, 190 bp, Homo sapiens
  chr5:312942-313132
  hypo
aaagggaaaagatgccgtgtaaaatctcgttctgtgtctgaattgccgtagggctcagatcttcatttgaggttctgtgtctgaattgccgtagggctcagatcttcatttgaggttatgttctataagttaacgttgatcttgtgtgagctttcggtagctggagtaacacaggcggcctcacagcgac

SEQ ID NO: 149581 - DNA, 119 bp, Homo sapiens; identical to SEQ ID NO: 68942
  chr5:314538-314657
  hypo

SEQ ID NO: 149582 - DNA, 30 bp, Homo sapiens; identical to SEQ ID NO: 68943
  chr5:317825-317855
  hypo

SEQ ID NO: 149583 - DNA, 85 bp, Homo sapiens
  chr5:325118-325203
  hypo
gtggctttgcccaggcgttgcagggcgagtagtcactggtatgtgaggctgaggagggcaacgaggcttccgtctcaattccggc

SEQ ID NO: 149584 - DNA, 534 bp, Homo sapiens; identical to SEQ ID NO: 110991
  chr5:343970-344504
  hypo

SEQ ID NO: 149585 - DNA, 83 bp, Homo sapiens; identical to SEQ ID NO: 41215
  chr5:368380-368463
  hypo

SEQ ID NO: 149586 - DNA, 30 bp, Homo sapiens; identical to SEQ ID NO: 68946
  chr5:370337-370367
  hypo

SEQ ID NO: 149587 - DNA, 30 bp, Homo sapiens; identical to SEQ ID NO: 41216
  chr5:372537-372567
  hypo

SEQ ID NO: 149588 - DNA, 266 bp, Homo sapiens; identical to SEQ ID NO: 41217
  chr5:373103-373369
  hypo

SEQ ID NO: 149589 - DNA, 286 bp, Homo sapiens; identical to SEQ ID NO: 41219
  chr5:374578-374864
  hypo

SEQ ID NO: 149590 - DNA, 250 bp, Homo sapiens
  chr5:375540-375790
  hypo
aagggctgtgtctccctaacccgcggaagtgggcagatccggtgaagcatggccgcctgggctgtgccacgccgggaccccggcacaggctgcccaccgtgaaggacggtgtgctggccttaaggtgccatgcgtgatgacagtttttatgccatctcaaggtcagaactggtggcaaggtagcatctgcctgagcggacaccacctgtgacttcagctgaggatccgggagacgcgggagcagcagatg

SEQ ID NO: 149591 - DNA, 30 bp, Homo sapiens
  chr5:376203-376233
  hypo
gagggagaggcgatgcgggtgtgcagggca

SEQ ID NO: 149592 - DNA, 268 bp, Homo sapiens; identical to SEQ ID NO: 41220
  chr5:377104-377372
  hypo

SEQ ID NO: 149593 - DNA, 30 bp, Homo sapiens
  chr5:386774-386804
  hypo
tccaggcttcagccacgggtctgtagggaa

SEQ ID NO: 149594 - DNA, 103 bp, Homo sapiens
  chr5:387245-387348
  hypo
gctcaaagtgctttacgctgtgtctctggtgtgttccacacctgcagcttgggatgagccaggacacgtgtcagttcgtacacagaagcggggtcctgtctcc

SEQ ID NO: 149595 - DNA, 160 bp, Homo sapiens
  chr5:387837-387997
  hypo
gatcgtgtgtccatacgctgtacctgccggaacttggcgacaccatgtcagcttcctggggcagccttaatgaatgactgcaaactgtgtggctcgaacaacaggggttattcttcacagcctggaggccaggagccaaaaccagcgccgatgggctgca

SEQ ID NO: 149596 - DNA, 30 bp, Homo sapiens
  chr5:388416-388446
  hypo
acacagggctcagtgcgactgcgcctgggg

SEQ ID NO: 149597 - DNA, 30 bp, Homo sapiens; identical to SEQ ID NO: 41221
  chr5:393543-393573
  hypo

SEQ ID NO: 149598 - DNA, 31 bp, Homo sapiens; identical to SEQ ID NO: 68953
  chr5:397105-397136
  hypo

SEQ ID NO: 149599 - DNA, 167 bp, Homo sapiens
  chr5:405761-405928
  hypo
gggccttcgggtcgccggcacctgacccagcagccttgtcccaccgcctgcgaccaccagctcctccgctctctccatcggtcgtaacatcttactgctcccctcgcagactgttgagttggtctttgacaagtgtttcttttatattttcacggcacgtgtgactt

SEQ ID NO: 149600 - DNA, 30 bp, Homo sapiens
  chr5:406283-406313
  hypo
acagctgggcttgggcgaggggcccacggt

SEQ ID NO: 149601 - DNA, 30 bp, Homo sapiens; identical to SEQ ID NO: 19085
  chr5:427605-427635
  hypo

SEQ ID NO: 149602 - DNA, 203 bp, Homo sapiens; identical to SEQ ID NO: 68955
  chr5:427952-428155
  hypo

SEQ ID NO: 149603 - DNA, 115 bp, Homo sapiens
  chr5:429647-429762
  hypo
ggtgctcctgctctgtgactccgagacccacccgacttgtcctcggcccctcggcgctgcaggcccaggccctggtaaccaagtgcagctcagccttgccgcgcgatcctgcagc

SEQ ID NO: 149604 - DNA, 164 bp, Homo sapiens; identical to SEQ ID NO: 68956
  chr5:447731-447895
  hypo

SEQ ID NO: 149605 - DNA, 373 bp, Homo sapiens; identical to SEQ ID NO: 68957
  chr5:453927-454300
  hypo

SEQ ID NO: 149606 - DNA, 45 bp, Homo sapiens; identical to SEQ ID NO: 19087
  chr5:457005-457050
  hypo

SEQ ID NO: 149607 - DNA, 165 bp, Homo sapiens
  chr5:458630-458795
  hypo
cttttaaagttgctttcctgttcattggttaaggttctaagtattagaccgacctgcatttttaccacggattcactttccaacgcccaagcctcactaggtgttagaaccggtgtgttcttaccacggattcactttccagtgtccgaccgccctgtgtcccgt

SEQ ID NO: 149608 - DNA, 191 bp, Homo sapiens; identical to SEQ ID NO: 68959
  chr5:462212-462403
  hypo

SEQ ID NO: 149609 - DNA, 166 bp, Homo sapiens; identical to SEQ ID NO: 19089
  chr5:463462-463628
  hypo

SEQ ID NO: 149610 - DNA, 105 bp, Homo sapiens
  chr5:464585-464690
  hypo
tgctcagaattcagcatccagcgagtccctccgtgagtgaacgttcacttgttgtcctatcagcccaagggaggcaataggctctgcggacgccacctccctggg

SEQ ID NO: 149611 - DNA, 1082 bp, Homo sapiens
  chr5:465049-466131
  hypo
cccccactgagcccccgctcctcctctgcggtgagatgccagagccgtggcggagcgaggaggagtgggctcagagcctccggggagccaccgggagccccagcctgggtttcaatgagggtgctcctggccgccagagccgtggagcctgccgctgaccgcgcgtgtctccccagaggatgacggccgaggcgcaccggcgcgtggtggtggagtacctgcgggcggtcatgcagaagcgcatttccttccggagcccggaggagcgcaaggagggtgccgagaagatggttagggaggcagagcagctgcgcttcctgttccggaagctggcgtccgtgagtgtcgcgcaggtccgggctggagaaggcctgtcgctccgcggccctgttcagcctccaccccgggactcgggccagtagatgggagtgtgtcgtgtgtttgtcaggcggggggagcctgggtccaggtcctgcctgaccttgtggttggacacgaatgtccacagaggtagacgcgccggccccgccggcttcccgaggccgcccacagctccctgacggacgcttcccagtctgtcctgcgctgcgaggtgctggctgcctcccacggtctcgccctcaccccagacccctggccctgtcactgagctttcagagtagatcctgaggagtcaggtgaagagggaggttcccagtcaggaaggggctcagccagaatccagctgctcccagcgccgcgggacagccgagggcggctcctcacattgctgctgccttccagggtttcggggaagacgtggacggatactgcgacaccatcgtggctgtggccgaagtgatcaagctgacagacccttctctgctctacctggaggtctccactctggtcagcaagtatccagacatcaggtaagggatgcacgtcttagaatcctgccttagaatcctggagtggagcggcaggtccctccttctgtctggggcgggtggggctcctggttcgcaagttcagccctgcagcacggcaagggttcaggtgcggcacagcggggcccaggcgcagggagcagagctgcttct

SEQ ID NO: 149612 - DNA, 83 bp, Homo sapiens; identical to SEQ ID NO: 68963
  chr5:466514-466597
  hypo

SEQ ID NO: 149613 - DNA, 30 bp, Homo sapiens; identical to SEQ ID NO: 68964
  chr5:467006-467036
  hypo

SEQ ID NO: 149614 - DNA, 1688 bp, Homo sapiens; identical to SEQ ID NO: 41222
  chr5:472579-474267
  hypo

SEQ ID NO: 149615 - DNA, 397 bp, Homo sapiens
  chr5:476481-476878
  hypo
cagatgcttgtactgcgggatcaggcacggaggtcacagctgtgcccaccgccggacattctcgccctcctgccgcaggagctgagcacggatcccccgtggtcccaggaggggacgaggaagccgccccacggggtccctgcggggtcctccagcccccagcccgcagtgcccacctcctgccgcggcttgtacaggtactgctgtagcgtgtggtgcgtgaccatgtcctccgcgtcccggatgctccgccgtcgctgctccagagactgcatgtccaggcagacagcgctgacattttctctcctgcgtggggaccagcgctgagccatacaggctccctcagggtggggtctcttgcgcgcccctcgccttcccacggcgggcatctggccct

SEQ ID NO: 149616 - DNA, 94 bp, Homo sapiens
  chr5:480652-480746
  hypo
cctgggcaggccccgcggcagcaatggcagctctcctgtacaggctgagtttcagccacaccaagaagtcaaagctaaccgaggctgtgccttc

SEQ ID NO: 149617 - DNA, 41 bp, Homo sapiens; identical to SEQ ID NO: 19093
  chr5:481006-481047
  hypo

SEQ ID NO: 149618 - DNA, 481 bp, Homo sapiens; identical to SEQ ID NO: 68968
  chr5:488123-488604
  hypo

SEQ ID NO: 149619 - DNA, 1563 bp, Homo sapiens; identical to SEQ ID NO: 111003
  chr5:490615-492178
  hypo

SEQ ID NO: 149620 - DNA, 31 bp, Homo sapiens; identical to SEQ ID NO: 68971
  chr5:492757-492788
  hypo

SEQ ID NO: 149621 - DNA, 30 bp, Homo sapiens
  chr5:498237-498267
  hypo
ggcttgagcctcggccgccacttccgcccc

SEQ ID NO: 149622 - DNA, 23 bp, Homo sapiens
  chr5:498787-498810
  hypo
atcacaggcgtgagccaccgtgc

SEQ ID NO: 149623 - DNA, 30 bp, Homo sapiens
  chr5:500146-500176
  hypo
ggacgcaacaggcagcgacatcttcaacct

SEQ ID NO: 149624 - DNA, 128 bp, Homo sapiens
  chr5:500464-500592
  hypo
acggcatgcgactggcgtggatccctggcgagaatggaagggggggtggcaggagacggggacgggaccctccagggacacaggaaacacacaccaagcacggagaggccaggcgggccggtgtggac

SEQ ID NO: 149625 - DNA, 30 bp, Homo sapiens
  chr5:500996-501026
  hypo
gtgtggacatggggtcggtgtggacgaggc

SEQ ID NO: 149626 - DNA, 527 bp, Homo sapiens
  chr5:508110-508637
  hypo
acgcctgaatctccccgctacacccaaatgcccacccacacccatgtggctccagttcccattcggcttcttggcgcccgcccctcacaccagtggagccaggggaaggggtgaccagtgctcaggcgcggagcccagctatggaatcacaagcagcccagagcgcgcccgggatggagatgccgcagggagacgcaggcctcaggatggagtagccgcaggcagacgcagtcctcagcgcgccagggatggagatgccgcagagagacgcagcccatagtgtgcccgggatggagatgccgcagggagacgcagcccacagtctgccggggatagagatgccgcagggagacgcaggcctcagcgcgcccggggatggagatgccgcagggaaactcaggcctcagcgcgcccggggatggagatgccgcagggagacgcagcccatagcgcgcctgggatggagatgccgcagggagacacagcccatagtgtgcccgggatggagatgccgcagggagacacag

SEQ ID NO: 149627 - DNA, 30 bp, Homo sapiens
  chr5:509713-509743
  hypo
gaagatggagaaccgcggacaggcatcacc

SEQ ID NO: 149628 - DNA, 398 bp, Homo sapiens
  chr5:510011-510409
  hypo
ctcagaggggccctgcgggcagccggcgttgtccctcctgcagtcagcgctccactgccccacactcagctggcttcccagggcctgagcaaggatgggggaggcttcgggagaagaggggctccaacgatgtggaggagaatgtgttggggagacaggtgctgggctggaccggggagccgctggaggcctgggggcattggaagcaggaggatccgtgggtgcttgggcccctggcggagcgcggcagcttgttgggagctgggagcagagccacttactgtgagctcagagaggctgccaagagcagcgacagagaccatcgttccctccaggcaaagccagatgctgtgtgggaaaggaaacgtggccgtacgctgccacggagctctaaggtg

SEQ ID NO: 149629 - DNA, 38 bp, Homo sapiens
  chr5:519701-519739
  hypo
cgctgggtaagacagcgggggtccgggagtcaagtgtc

SEQ ID NO: 149630 - DNA, 229 bp, Homo sapiens
  chr5:519988-520217
  hypo
gaccctgtgccctagcgtcctcctgaccctcctacggctgcgcgaggcactgcagactccagatacccgtctcgctcctgcctgcccttccagccagggttcaccaagatgtggggcggcctgggcctccgccatcacatccctcagcaacacaagctccacttcgagagcctgcccccaccgcccccacccagccccactgtcctggtttccccgtgggcagtcactg

SEQ ID NO: 149631 - DNA, 113 bp, Homo sapiens; identical to SEQ ID NO: 111004
  chr5:523689-523802
  hypo

SEQ ID NO: 149632 - DNA, 998 bp, Homo sapiens; identical to SEQ ID NO: 111005
  chr5:523856-524854
  hypo

SEQ ID NO: 149633 - DNA, 4 bp, Homo sapiens
  chr5:528888-528892
  hypo
gaag

SEQ ID NO: 149634 - DNA, 30 bp, Homo sapiens; identical to SEQ ID NO: 41226
  chr5:530631-530661
  hypo

SEQ ID NO: 149635 - DNA, 165 bp, Homo sapiens; identical to SEQ ID NO: 68978
  chr5:532004-532169
  hypo

SEQ ID NO: 149636 - DNA, 30 bp, Homo sapiens; identical to SEQ ID NO: 68979
  chr5:535470-535500
  hypo

SEQ ID NO: 149637 - DNA, 78 bp, Homo sapiens; identical to SEQ ID NO: 68980
  chr5:537334-537412
  hypo

SEQ ID NO: 149638 - DNA, 30 bp, Homo sapiens; identical to SEQ ID NO: 68981
  chr5:537679-537709
  hypo

SEQ ID NO: 149639 - DNA, 133 bp, Homo sapiens; identical to SEQ ID NO: 68982
  chr5:538680-538813
  hypo

SEQ ID NO: 149640 - DNA, 30 bp, Homo sapiens
  chr5:539146-539176
  hypo
acgacgaggtgtcctcggtgggaccaggtg

SEQ ID NO: 149641 - DNA, 1042 bp, Homo sapiens
  chr5:554298-555340
  hypo
tggcaaggaaaataaacgagccgttacctttcaccaaatcgcactgtattttattcatttagggtgtacacacctatctgctcttcaaaggaattttgggcagattgtaaaattacgctcaacatacagcaaggcgactataaatacaaaagcagcactgaggtgctggtgctgcgggtgggtcacgggataaaccaggcgtggggtctgggtcacgggatgacccgagggtgggtcacgggataaaccaggggtggggtctgggtcacaggatgacccgggggtgggtcacgggataaaccaggggtggggggctgggtcacgggatgaacggggggcgggtcacaggatgaaccgtgggcgggtcatgggataaaccagggtggggtctgggtcacaggatgacccgggggtgggtcacgggataaaccaggggtggggggtgggtcacgggatgaacggggggcgggtcacaggatgaaccgtgggtgggtcatgggataaaccagggtggggtctgggtcacgggatgaacggggttgggggctgggtcacgggatgaaccggggggtgggtcacgggatgaacggggggggggtgggtcacgggctaaaccggggttgggggtgggtcacgggatgaacggggttgggggctgggtcacgggatgaacggggggtgggtcacgggatgaacagggggtgggtcacgggataaaccggggtggggggctgggtcatgggatgaacggggggtgggtcacgggatgaaccggggtggggggtgggtcatgggatgaaccggggtggggggctgggtcatgggatgaaccggggtggggggctgggtcatgggatgaacgggggggtgggtcacgggatgaaccggggtgaggggtgggtcaccggatgaacgggggtgggtcatgggatgaaccaggggtttccgaggtcgcaggcggcttccttgccccgtgacctggctggggctgcttaacttatgagcagttcggcttcctcgcgggcgccggggcggtgctgcc

SEQ ID NO: 149642 - DNA, 39 bp, Homo sapiens
  chr5:555659-555698
  hypo
caggtgtgagtccctcgagccctccgcataaacctctgt

SEQ ID NO: 149643 - DNA, 30 bp, Homo sapiens
  chr5:556017-556047
  hypo
gggcccgaagcgggacgcacctgctccctc

SEQ ID NO: 149644 - DNA, 30 bp, Homo sapiens
  chr5:556276-556306
  hypo
ggtggtgaggacggcgctgggctgcggcca

SEQ ID NO: 149645 - DNA, 221 bp, Homo sapiens; identical to SEQ ID NO: 68985
  chr5:559380-559601
  hypo

SEQ ID NO: 149646 - DNA, 393 bp, Homo sapiens
  chr5:569851-570244
  hypo
ggaccagcgcttactcgaagaagatttaaaacacacaaggaaccgtgaaaccaaaccagaaaagccctgctgaccgagccgccccttctagaggccgaacaggcatggaaaccctgagccgacacaggcacttacccagcagagaggacagggccaccaggatccacatggccacaaagaagggggtgtgcacgggtagccaccgcaggctgaccactggaaacccgctgctgttccgggcaacggggggctctggccctgggccccggccaacgagtgtgcagggatgggctgtgcccaccagcaaggccagcaacgtgaaggcacagagtccagacccctggggctgcatgctgggggcacgtgccgccgacaaggcgctgtgtatccgcc

SEQ ID NO: 149647 - DNA, 266 bp, Homo sapiens
  chr5:572062-572328
  hypo
gcggacctggagccgcggctgcgggcaagggcacctgcacacaggggtgtgcagcacgggagaggctgagctgtgcctcggatgctcctgccacaggctcatagcttggtcctgtctcgaagaaactcctgacacaccccagaatgaatgagggtcttcacccaataagtgccccgcaaccatctcgggagaaaaagaggccaagccgcagaggaccatgcttggtttcaattggacagctggattcgctccgagggctctgaggt

SEQ ID NO: 149648 - DNA, 30 bp, Homo sapiens
  chr5:573340-573370
  hypo
ccatcctctccggcacggctagtcttccct

SEQ ID NO: 149649 - DNA, 131 bp, Homo sapiens
  chr5:583200-583331
  hypo
acaggtgtctctggccgcgggcagcccgcctgtttggggtcggcaaaggctccaggtgttgaagtggtaaaatctcgaagctgcctggcccatctcttacccctgctctcctgtgccgcttcgtcctcagg

SEQ ID NO: 149650 - DNA, 342 bp, Homo sapiens
  chr5:595102-595444
  hypo
tgcgagaacaccctttggaaacgaaggaaaaatcgatgcgagaacacccttcagaaatgaaaaatcaacgtgagaacacccttcggaaatgaaggaaaagtcgacgtgagaacacccttcggaaatgaaggaaaaatcgacgcgagaacacccttcagaaatgaagaaaagtcgacgcgagaacacccttcggaaacgaaagaaaaatcgatgcgagaacacccttcggaaacgaaggaaaaatcgacgcgagaacacccttcggaaatgaaagaaaaattgatgatctccagtgaggacgcactaagagaatttgttgccggcacacctgctttaaaagat

SEQ ID NO: 149651 - DNA, 528 bp, Homo sapiens
  chr5:600956-601484
  hypo
cccttctgacaaggtctgtggcgcccaccatggcgttagggccacagcctcctgccccatgtgccaggcccggctctgcccagctccctgcagctgcgccagtgtgtgctgtgactcgtgctcctggtttgtcatctgcctctcagtagacaccacggccttcaagctttctccgctccgtgaccagcagctgggacgggaccagcagtgcatgcggctctggattcatgtttgttgaatgactgactgaacggaggctcccttacagaagtgaacggcgcggccctccctgagttccggcctggctctggataccaaggagcaaggtggtcaggggtcaggggctggagtggggagattgcctgggagggggctggagggtgtggtggaactgcaggttctctccttgacatgcctgtgggggagcctttcccggccctctctccgctggttttcaccctttctccggtgcagccacactgggcatcccaccccagggatccaggaagggggcgtgtcggccgagtg

SEQ ID NO: 149652 - DNA, 30 bp, Homo sapiens; identical to SEQ ID NO: 19104
  chr5:602422-602452
  hypo

SEQ ID NO: 149653 - DNA, 197 bp, Homo sapiens
  chr5:608782-608979
  hypo
gccctgtgaggaacccgggatagaacctggggacagaggcctccattagtccttgggagcggcaggtagcccatggggtcactgtgatcccggcacattgtgggagcgtgcgctgggatggggaggggtcactgtgagcacggtgcgtcgtgggagcgtgcgctgggatggggaggggtcatcgtgatgatggcaca

SEQ ID NO: 149654 - DNA, 84 bp, Homo sapiens
  chr5:609240-609324
  hypo
ctgcctttgctttcccggcttctctgcggctctgtgcttttgctgccccattccaggccggaaggctcccgcgcctccatggat

SEQ ID NO: 149655 - DNA, 38 bp, Homo sapiens
  chr5:609576-609614
  hypo
gttatctcagcagggcggcatatcgaatctcggtgccc

SEQ ID NO: 149656 - DNA, 30 bp, Homo sapiens
  chr5:611805-611835
  hypo
agaccctccagggcgcggtcagccacgagc

SEQ ID NO: 149657 - DNA, 30 bp, Homo sapiens; identical to SEQ ID NO: 111009
  chr5:612189-612219
  hypo

SEQ ID NO: 149658 - DNA, 52 bp, Homo sapiens; identical to SEQ ID NO: 41228
  chr5:612240-612292
  hypo

SEQ ID NO: 149659 - DNA, 17 bp, Homo sapiens
  chr5:613502-613519
  hypo
ttagacggagtctcact

SEQ ID NO: 149660 - DNA, 30 bp, Homo sapiens; identical to SEQ ID NO: 68993
  chr5:619721-619751
  hypo

SEQ ID NO: 149661 - DNA, 30 bp, Homo sapiens; identical to SEQ ID NO: 68994
  chr5:620319-620349
  hypo

SEQ ID NO: 149662 - DNA, 190 bp, Homo sapiens; identical to SEQ ID NO: 68995
  chr5:623329-623519
  hypo

SEQ ID NO: 149663 - DNA, 30 bp, Homo sapiens
  chr5:624380-624410
  hypo
ctctgagggacaggcggcctcagcaccacg

SEQ ID NO: 149664 - DNA, 320 bp, Homo sapiens
  chr5:628858-629178
  hypo
tcaggttgcagtccccggggagtgttcccacgacccagcccccttctttgtgcagcttctggagaactcaggttgccgtccccagggagtggccccaggacccagcgcccttctttgtgcagcgttctggagaactcaggttgccgtccctggggagtggccccaggacccagcccccttctttgtgcagcgttctggagaactcaggtcacaggccccggggagtgttcccaggacccagcccccttctttgtgcagcgttctggagaactcagatcgcaggccccggggagtgggactgtcctcgggtggaccaggtg

SEQ ID NO: 149665 - DNA, 90 bp, Homo sapiens
  chr5:633968-634058
  hypo
ctcattgcagagtgcgagtgggacctcggcaggcctcccgggagcacgagcttcagccagaaggggcgtgaggccgactctcgtggttcc

SEQ ID NO: 149666 - DNA, 30 bp, Homo sapiens
  chr5:637371-637401
  hypo
tcccccagagtttgcgtgttagcacgtgtg

SEQ ID NO: 149667 - DNA, 31 bp, Homo sapiens; identical to SEQ ID NO: 19108
  chr5:638628-638659
  hypo

SEQ ID NO: 149668 - DNA, 31 bp, Homo sapiens; identical to SEQ ID NO: 19109
  chr5:638894-638925
  hypo

SEQ ID NO: 149669 - DNA, 566 bp, Homo sapiens; identical to SEQ ID NO: 68999
  chr5:640117-640683
  hypo

SEQ ID NO: 149670 - DNA, 30 bp, Homo sapiens
  chr5:641338-641368
  hypo
ccaggctccctccacgctgcaagggcctcc

SEQ ID NO: 149671 - DNA, 30 bp, Homo sapiens; identical to SEQ ID NO: 69000
  chr5:645301-645331
  hypo

SEQ ID NO: 149672 - DNA, 98 bp, Homo sapiens; identical to SEQ ID NO: 69001
  chr5:646056-646154
  hypo

SEQ ID NO: 149673 - DNA, 263 bp, Homo sapiens
  chr5:652920-653183
  hypo
gaggaggcaggtgggcggtagccagtgggacacagaaggtgatggggccacagagataggtctgtgtgcagggccagggcaccttcgtgcccatgcagggaggtgggcaggcccagcaggtgagggccacaccgctggagaggacggaagtgccaagcagccgcttccctgttgttctgcagctccctggtcagcaccaatgaacacctgctgcaggagctgagccaggtgcgggcgcagcacagagccgaggtggagcagat

SEQ ID NO: 149674 - DNA, 30 bp, Homo sapiens; identical to SEQ ID NO: 69003
  chr5:663624-663654
  hypo

SEQ ID NO: 149675 - DNA, 30 bp, Homo sapiens
  chr5:665173-665203
  hypo
tgctctggggacaccggcagtgccgcgagg

SEQ ID NO: 149676 - DNA, 30 bp, Homo sapiens; identical to SEQ ID NO: 69004
  chr5:666692-666722
  hypo

SEQ ID NO: 149677 - DNA, 96 bp, Homo sapiens; identical to SEQ ID NO: 19113
  chr5:667281-667377
  hypo

SEQ ID NO: 149678 - DNA, 159 bp, Homo sapiens
  chr5:675591-675750
  hypo
tggccaggggtacattgtggccggggctgcagtgtgaccaggggtgcagtgtggccggggatgccgtgtggccgggggtgcagtgtggctgggggtgcggtgtggccaggggtgcagcatggggggtacagtgtggccgggagtgcagtgccagaggtg

SEQ ID NO: 149679 - DNA, 799 bp, Homo sapiens; identical to SEQ ID NO: 111011
  chr5:676504-677303
  hypo

SEQ ID NO: 149680 - DNA, 585 bp, Homo sapiens; identical to SEQ ID NO: 19116
  chr5:677570-678155
  hypo

SEQ ID NO: 149681 - DNA, 30 bp, Homo sapiens
  chr5:678888-678918
  hypo
actttgcaaggcgcccgcccccagagtagg

SEQ ID NO: 149682 - DNA, 30 bp, Homo sapiens
  chr5:679223-679253
  hypo
caaccctgggactcacgaagccctctcaga

SEQ ID NO: 149683 - DNA, 30 bp, Homo sapiens
  chr5:688671-688701
  hypo
agaggcggcccagaacggctggcactagaa

SEQ ID NO: 149684 - DNA, 36 bp, Homo sapiens; identical to SEQ ID NO: 3744
  chr5:693797-693833
  hypo

SEQ ID NO: 149685 - DNA, 146 bp, Homo sapiens; identical to SEQ ID NO: 69009
  chr5:750520-750666
  hypo

SEQ ID NO: 149686 - DNA, 41 bp, Homo sapiens; identical to SEQ ID NO: 69010
  chr5:760083-760124
  hypo

SEQ ID NO: 149687 - DNA, 674 bp, Homo sapiens
  chr5:850085-850759
  hypo
agcttggcatggaaacgcaggctgccgacctgcggggcatggcgctgttcctccttggcaccaggggcaaggagaaaggtgctggccatgtgcaaaatgctgcgcagggattttagcggaaggctgccagcagggcgggtcctgcgccacgccagggggctgctgtccctcctgacagattccctctccggagccccctcagccaacgctgtcctgtcctgaccctaagcaggggctgcacagagcatgagtggccactgggcccacctgcaggctcaggggacatagtctggcccagggcaggtgactggtgccaccgggcagccatggcccagaccccacagccaggtccatcgcaagttcctccaggaacccctcccgcttagaccatgccacgatgaaaaggataccacgtaggcaatgtatttccacgcgtgaggcaggaagggaatgaagatcccgaaggtggccgaggaaaggcccacgaagacagcccaggtcaccacctggaagtagtgcaggggtaacgaccagccgttcactctggagatgcggggcggcaagaccagcttttcattattgagtatggcttctggggtgacggaacactggctcccggagcgggtgtccatctgcaggacacagaaggggaggacctgcgccgtcagatcctg

SEQ ID NO: 149688 - DNA, 30 bp, Homo sapiens
  chr5:851062-851092
  hypo
acagcccccacacagcgacaggtcccacaa

SEQ ID NO: 149689 - DNA, 516 bp, Homo sapiens
  chr5:851406-851922
  hypo
gggaggttctgaacacgctgcggctgctcctggccagtcaggtggggagggcggcaggggtgggagggacgtggtgtcacagagcggcagtgaaagacactcaacggccgctacggggtggggggttgatcttgaggggctgggcggtctctacagaggagggttaggaagcttcgccacgttatgcctcgctcaaagtccttgttgtctctttgggaaaaaaccttcagaaaatgaagttgatattaaatgtatttctttgagaagagagacattgagaaatagttaacaattcttcgttcttgcagtcgtgaacgtccatgatacagtggctctgcgctgcctttggtggctcctccctggtcctctaaatgtgacaccaggcggatgcggggccacaggaccctggggcttgagtcacacaagaatgtctctgggagacccgagagactcacagttatgaaacaggaccatggttctttggccgggcgcgggggctcacgcctgtaatcccag

SEQ ID NO: 149690 - DNA, 30 bp, Homo sapiens; identical to SEQ ID NO: 19119
  chr5:853432-853462
  hypo

SEQ ID NO: 149691 - DNA, 121 bp, Homo sapiens
  chr5:855236-855357
  hypo
gggacagaccccatggaggacagcgagccgggggacacagaccctacagagaacagagagccggggagacagaccccatggagaacagtgagcagcggggacagaccccacagaggacagc

SEQ ID NO: 149692 - DNA, 30 bp, Homo sapiens
  chr5:857339-857369
  hypo
ctggctgcccagcaccggggcctgcagcgc

SEQ ID NO: 149693 - DNA, 30 bp, Homo sapiens
  chr5:858110-858140
  hypo
cccccgggtctgtcccggtcctgtcccagg

SEQ ID NO: 149694 - DNA, 30 bp, Homo sapiens
  chr5:863734-863764
  hypo
ggacacagcaccctcgcgtgctgggagcag

SEQ ID NO: 149695 - DNA, 118 bp, Homo sapiens
  chr5:864282-864400
  hypo
acacgatggccacacgcccttcgtgtatgactccactcctcagggttcacggggctgtgtacagagactctctctgctgacacgatggccatatggccttcgcgtatgactccactcc

SEQ ID NO: 149696 - DNA, 30 bp, Homo sapiens; identical to SEQ ID NO: 69014
  chr5:865590-865620
  hypo

SEQ ID NO: 149697 - DNA, 30 bp, Homo sapiens
  chr5:872030-872060
  hypo
gataagaagggtctcgtgggttccacctgg

SEQ ID NO: 149698 - DNA, 154 bp, Homo sapiens; identical to SEQ ID NO: 69015
  chr5:873760-873914
  hypo

SEQ ID NO: 149699 - DNA, 205 bp, Homo sapiens; identical to SEQ ID NO: 69016
  chr5:876061-876266
  hypo

SEQ ID NO: 149700 - DNA, 30 bp, Homo sapiens; identical to SEQ ID NO: 69017
  chr5:880802-880832
  hypo

SEQ ID NO: 149701 - DNA, 30 bp, Homo sapiens
  chr5:881032-881062
  hypo
ccccgcgagatggccgtccacacctccact

SEQ ID NO: 149702 - DNA, 30 bp, Homo sapiens; identical to SEQ ID NO: 19122
  chr5:881622-881652
  hypo

SEQ ID NO: 149703 - DNA, 257 bp, Homo sapiens; identical to SEQ ID NO: 69019
  chr5:881856-882113
  hypo

SEQ ID NO: 149704 - DNA, 464 bp, Homo sapiens
  chr5:883800-884264
  hypo
aggaaatgaggtcagtgaccacgtggcctccacgatgcatgaaacaccagcggcagccctgccagaggcacctggaccccgactgaagagaccagccttatgtgtgtctgatccggacctcccgtcagggccccacgctgacctctggatcccggtggctgtgctagatcacacagcaccaacccagaaggagaggcacacagagagtctggggccacgtggcaccctctctcggtggccacagagcactaccttgccgcctgggaggaaccggttgatcctgtcccgagcttcgtcagctgcgtgctccaccagcgccagcacgtgctcctctgcggtactgtccgtcaagctgcaggcattcccttcaggctcaaacatgcagctgtgaggtggggacaaccaagtcacctggaggcagcgtccccaccgcacacctgctccccatgcgtcggcacctaacc

SEQ ID NO: 149705 - DNA, 136 bp, Homo sapiens; identical to SEQ ID NO: 69021
  chr5:884915-885051
  hypo

SEQ ID NO: 149706 - DNA, 216 bp, Homo sapiens
  chr5:885338-885554
  hypo
ggggtgggaaatgcaacgcacgtggggagaccgccttaggggactgtcgtccgttgccaagcaacacactctggccacgcagcgcaccctgtctcctaagccaaggctgcaggacctgaggggctggtctcaagaccactctcccttttgacggttggagggagctgctcagagcagaagcaccgagcccagcaccgctgccgccccacctgttaa

SEQ ID NO: 149707 - DNA, 693 bp, Homo sapiens
  chr5:885756-886449
  hypo
atactgggaagaccgcgagccacagtgctgtcagacacacggccatgagggtggatgtcctgagactgcgctctctggggcctgcactcagcaagtgacacgtgatgaagcaggctctgtgccaggcgcttctgcccgctgcaggctatgttaagtgctcttggtgcctctaaggcccctggcgatactctcgctttgtttggtcctatcaggcagccacctcacataggtggaggagcgtctacaggaatgacgtgtgatacggactttgatacaatctcaatgctcagccaccatgagacaaagagcccccatgaaaaccactctggggtttagaaaaaaaggaagaaggttccctgaaggaccagccaagtcggctgctccctgtgggagggagcagagctacagggagctgtggcctgcagtcctcacctgcttcccccgcagcatccacaccttcctgaccacaggcctgcacctgctccactccagcgtctacacagacacagaagcgagcagttcaggagtgtgcatctgccccacagcaacaaagaagccccctgccaatgctggctgcccaaagtcagcccgcttgtgcggcacagtctgggacaagggcacagccttggctgccggcaggcgctgtgcaggggagggaggggccaatgatcttaacggcgtgtagagacagag

SEQ ID NO: 149708 - DNA, 397 bp, Homo sapiens; identical to SEQ ID NO: 19126
  chr5:887037-887434
  hypo

SEQ ID NO: 149709 - DNA, 165 bp, Homo sapiens; identical to SEQ ID NO: 69025
  chr5:888863-889028
  hypo

SEQ ID NO: 149710 - DNA, 274 bp, Homo sapiens; identical to SEQ ID NO: 69026
  chr5:891192-891466
  hypo

SEQ ID NO: 149711 - DNA, 30 bp, Homo sapiens
  chr5:896239-896269
  hypo
atcatagcaagaccccgtctctaaaaagag

SEQ ID NO: 149712 - DNA, 193 bp, Homo sapiens; identical to SEQ ID NO: 19127
  chr5:902317-902510
  hypo

SEQ ID NO: 149713 - DNA, 201 bp, Homo sapiens
  chr5:909086-909287
  hypo
tgaaagaaaactcaggcatggtaagcattttacgtagcacagaaaagcataaaatgaagaactgctacgttcaggccttatcccacccacttctctcctatcccacccactgtcagcaccaactagtgctgctcgtaggtgaatggctgtcccctgctcgccctgctggcccaggacagacagcttcgtgtgcagatggtc

SEQ ID NO: 149714 - DNA, 101 bp, Homo sapiens; identical to SEQ ID NO: 19128
  chr5:909582-909683
  hypo

SEQ ID NO: 149715 - DNA, 467 bp, Homo sapiens
  chr5:912351-912818
  hypo
ggtaccagtcagtgtaggggacgtcagtgaccggctgtgtttacctggctggctgcacaaaccttagttctcagcttaccccgggcttttccaatgccctgcctctcgggggcctgtatccttacctgaaagaggaaacatcacgggcgtagtatgggcctggttttggtcacggggtccacatgacgtcacgttcttgagtcgcctgttgtgatgataggcaggaacactgttgccgtgggcagagcgacgcgtgcgggttgtgtgtgtgagtcaggaaggccgtcgccacgggcagagcgacgcgtgcggggagcgtgtgtgagtcaggagggccgtcgccacgggcacagtgacgtgcggtgagtgtgagtcaggagggccgtcgccacgggcacaatgacatgtgcggtgagtgtgagtcagtaaggccgtcgccatgggcacagtgacgcgtgtggtgagtg

SEQ ID NO: 149716 - DNA, 229 bp, Homo sapiens; identical to SEQ ID NO: 19130
  chr5:913179-913408
  hypo

SEQ ID NO: 149717 - DNA, 30 bp, Homo sapiens; identical to SEQ ID NO: 69032
  chr5:916130-916160
  hypo

SEQ ID NO: 149718 - DNA, 140 bp, Homo sapiens; identical to SEQ ID NO: 19131
  chr5:919455-919595
  hypo

SEQ ID NO: 149719 - DNA, 31 bp, Homo sapiens; identical to SEQ ID NO: 19132
  chr5:936463-936494
  hypo

SEQ ID NO: 149720 - DNA, 151 bp, Homo sapiens; identical to SEQ ID NO: 69035
  chr5:948028-948179
  hypo

SEQ ID NO: 149721 - DNA, 135 bp, Homo sapiens; identical to SEQ ID NO: 69036
  chr5:961623-961758
  hypo

SEQ ID NO: 149722 - DNA, 30 bp, Homo sapiens
  chr5:962229-962259
  hypo
ccgcatgctgtcggccgcacagactcacct

SEQ ID NO: 149723 - DNA, 517 bp, Homo sapiens
  chr5:962517-963034
  hypo
caggggccagggtctgcgggaatgagggggcagaccacccccaccgagcccagatgccagggaaggagcctggccagaaagatccagaaggactcagtgtctggcggccctcgctgctccccattctttgaggccgttgttcccagatgggatgtcggatgcgtctctggcccgggcccctggtgaaatgtgatggaggggtgtggatggagcgtggtggacacagcaagagcctggccaggcatccctggggcaggacagcatcagccggggagcggggtctagccccagccgcctggcacagagtggcgcccaattctagagcttgaatgaaagagggaattcaggaagacgcttacaccagccaggccccggggcactcaggacggtagcatcacggggtgccaaagtctgcaaaggtgacagaggacgtggggcctcggcagggctgcctccacttccccaagcacacggaagacaggcagggtggacgggggtgacccggcctgggacctgg

SEQ ID NO: 149724 - DNA, 30 bp, Homo sapiens
  chr5:976085-976115
  hypo
atggacgaatgggtacgcgcactgtggtct

SEQ ID NO: 149725 - DNA, 30 bp, Homo sapiens
  chr5:976387-976417
  hypo
attcacacaatggaacgtcgctcagccctt

SEQ ID NO: 149726 - DNA, 30 bp, Homo sapiens; identical to SEQ ID NO: 69038
  chr5:979354-979384
  hypo

SEQ ID NO: 149727 - DNA, 30 bp, Homo sapiens
  chr5:979585-979615
  hypo
tgctgactgggaagccgtgcacgcgaccgg

SEQ ID NO: 149728 - DNA, 156 bp, Homo sapiens
  chr5:993133-993289
  hypo
tgagttaccagggagcgggaggggttctgaagttcccaggctctgaggaccgactgttgatggaaggcctgggccacatcaggtgtttgccctgaggacccttgtcgagtcccgggacaccatgaaggagaatcctggatttggggtctgttgttc

SEQ ID NO: 149729 - DNA, 158 bp, Homo sapiens
  chr5:1003042-1003200
  hypo
gggactcctggaaggcagcttctcaccgtcactgccgtctgccctgctacatgtgacggctgtgtttcacatgttcaccggtgtgtacgcccgggtgtgcttcgaactgagaagccaggagcccagggcttctctgctgcccacgaatcatgccttct

SEQ ID NO: 149730 - DNA, 31 bp, Homo sapiens; identical to SEQ ID NO: 19134
  chr5:1013562-1013593
  hypo

SEQ ID NO: 149731 - DNA, 87 bp, Homo sapiens
  chr5:1026899-1026986
  hypo
cactgctggcctggacgtggccttggtcctgcccagccgcatcccaggtgcctcccgagtgccctgaggtggcggtggctgcagcct

SEQ ID NO: 149732 - DNA, 164 bp, Homo sapiens
  chr5:1027309-1027473
  hypo
tccacccaacagggccgtccccaccacagtgcaaggtggccaaggcgctggggagccagagtgcagcctgggaggtgcctatggatctaggggtgccaggtgctgctggtggcgatgaaagctgtaggagaggcccgtcctgtgtcaggcggtgtaggagctgt

SEQ ID NO: 149733 - DNA, 243 bp, Homo sapiens; identical to SEQ ID NO: 69042
  chr5:1027768-1028011
  hypo

SEQ ID NO: 149734 - DNA, 198 bp, Homo sapiens
  chr5:1028325-1028523
  hypo
tggcggggacgtggacggtggcctcggggtggttggctcacagaccagggtggccttcctgagcatcccgtagggccgtgggacctgaagcaaaggctacctgttgttgacgccgtgtgacagacgcctgctgctcatgcagctgcgaggctatgggttctggtcccggaggcctccgtgggttggggtcagaccctc

SEQ ID NO: 149735 - DNA, 240 bp, Homo sapiens; identical to SEQ ID NO: 19135
  chr5:1029656-1029896
  hypo

SEQ ID NO: 149736 - DNA, 37 bp, Homo sapiens; identical to SEQ ID NO: 69045
  chr5:1031040-1031077
  hypo

SEQ ID NO: 149737 - DNA, 249 bp, Homo sapiens; identical to SEQ ID NO: 69046
  chr5:1031560-1031809
  hypo

SEQ ID NO: 149738 - DNA, 192 bp, Homo sapiens; identical to SEQ ID NO: 19137
  chr5:1032281-1032473
  hypo

SEQ ID NO: 149739 - DNA, 33 bp, Homo sapiens
  chr5:1032886-1032919
  hypo
gtcccagctcaggctcgacgtgcacctgtctgc

SEQ ID NO: 149740 - DNA, 472 bp, Homo sapiens
  chr5:1033253-1033725
  hypo
gtggttgcagttgggggccaccgtgggctggtgagaggagggcacacccggctgtggctggccgggatagggcctccctcccctccgcaggggtcccaagatcgggctctcagctcaggcccgtctggacaggatcatggtgtggtgaggggagagcagcgagggtccccaatggcgggccacatcctccatgtgccctctgccagccccttcgcctcctcttgtccccctagtggcactccccgctgagaaagctgagggccgcgagcacccgggacaactcctcagcgcagatgacggagagagggcagcaaaccgcgagggcccgcgaggaccgggcgggcagcgcctcaacattgacgtgggtctctctccggcctcacttgcgggaacacgtccctggggccgggggctcagggacaggcatgtgttgccctaaactgggcatctgtggacacggcgtagttcactc

SEQ ID NO: 149741 - DNA, 30 bp, Homo sapiens; identical to SEQ ID NO: 69050
  chr5:1033954-1033984
  hypo

SEQ ID NO: 149742 - DNA, 465 bp, Homo sapiens; identical to SEQ ID NO: 69051
  chr5:1034277-1034742
  hypo

SEQ ID NO: 149743 - DNA, 184 bp, Homo sapiens
  chr5:1036264-1036448
  hypo
ggtcaggatgcaccccggacccctgccgcctgctgtaggcaccccgtcatcaggggtgcgccacccagtctgtgcgggggtcaggcccttctctgtgctccaagcaggaggcccagtactgacccccagccctgctcggagcgggggccctactgcgtggacgagaacacggagcgcagaaacc

SEQ ID NO: 149744 - DNA, 404 bp, Homo sapiens; identical to SEQ ID NO: 69052
  chr5:1036738-1037142
  hypo

SEQ ID NO: 149745 - DNA, 30 bp, Homo sapiens; identical to SEQ ID NO: 69053
  chr5:1037559-1037589
  hypo

SEQ ID NO: 149746 - DNA, 665 bp, Homo sapiens
  chr5:1037838-1038503
  hypo
agtgggccctgggccgtttctgaggagatgggaacctgagcctgcactcccagggcctcacactctgacctgtgtccgcagggtcccctcctgtgcaagcaaagcaggagccccagggcagggcctcgcacctccaggcccggtcccgctcccaggagccagatacacatgccgtacaccaccgcaggtcacaggtgctggtggaacacgtcgtgccagcctcggagcctgctgcccgggccctggacacgcagccccggccgaaggggccggagaagcagttcctcaagtcccccaagggctccgggaagccgcctggggtgccagccagcagcaagtccgggaaagccttcagctactacctgccggccgtcctgccgccccaggcccctcaggacggccaccacctcccgcagcccccaccgccaccctacggccacaagcggtaccgccaaaagggcagggagggccactcgccactcaaggccccacacgctcagcctgccacagtggagcacgaggtggtgcgggacctgccgcccacgccagcaggagagggctacgcggtgccagtgatccagcggcacgagcaccaccaccaccacgagcaccaccaccaccaccaccaccaccacttccacccgtcctagcgccactgccaagca

SEQ ID NO: 149747 - DNA, 990 bp, Homo sapiens; identical to SEQ ID NO: 69055
  chr5:1039233-1040223
  hypo

SEQ ID NO: 149748 - DNA, 30 bp, Homo sapiens; identical to SEQ ID NO: 69056
  chr5:1041013-1041043
  hypo

SEQ ID NO: 149749 - DNA, 190 bp, Homo sapiens; identical to SEQ ID NO: 69057
  chr5:1045514-1045704
  hypo

SEQ ID NO: 149750 - DNA, 79 bp, Homo sapiens; identical to SEQ ID NO: 19142
  chr5:1046856-1046935
  hypo

SEQ ID NO: 149751 - DNA, 18 bp, Homo sapiens
  chr5:1046994-1047012
  hypo
tgggttagtgtgtaaatg

SEQ ID NO: 149752 - DNA, 30 bp, Homo sapiens
  chr5:1049235-1049265
  hypo
agccagagcaggacccgccaccctcctgtg

SEQ ID NO: 149753 - DNA, 260 bp, Homo sapiens; identical to SEQ ID NO: 19144
  chr5:1049742-1050002
  hypo

SEQ ID NO: 149754 - DNA, 558 bp, Homo sapiens; identical to SEQ ID NO: 69061
  chr5:1050398-1050956
  hypo

SEQ ID NO: 149755 - DNA, 296 bp, Homo sapiens
  chr5:1051291-1051587
  hypo
aagctatctcttcagtgccaccgccgcctccatgcaaggcacaggccatggcaggggacgcccgggactcagccagacagacctgacaccaggcgccactgctgcctgaggacctcccacgtcgggtccgtgtcctccttccctggagcaccggggtggggatggcacgtgtgagccagctcagaggctgaactgtgtgccgtgctcctggggtggggtggggtggggagggcagtcctggctgtcgtgggctgtcgggggaactcactgttcactctgcgcgcgtgtgcccctgg

SEQ ID NO: 149756 - DNA, 1257 bp, Homo sapiens; identical to SEQ ID NO: 69063
  chr5:1051901-1053158
  hypo

SEQ ID NO: 149757 - DNA, 1649 bp, Homo sapiens; identical to SEQ ID NO: 69064
  chr5:1053385-1055034
  hypo

SEQ ID NO: 149758 - DNA, 2986 bp, Homo sapiens
  chr5:1055405-1058391
  hypo
gcacacagacatgcacactaacgtacgtggacgtgcacacaggcaggtacacgtccaccggcaggtgcgctgacaggtacatgcgagcacgcacacaaacagacatccgttaagtgtgctcccggggacgtcacagtaagccacgcacatctcacgcccgcactgcccagaagaggtcagggccgacctccagatcttcggagggcttctcccagcccaaccccgagaaactgctgggccaagagagtcaatgccatcccagacgcacgccacacatgaatacaaagcccacgcgttgtccattctggcccaccttctcctgaccctacaggcctgtggggacctgcccccgccccgaccaaggggaggcaagccccggcgctgggaggaggcacaggtgccactgagggtccccgagtgtgtgtgcctgtgcatgtgtgtgtcaaaccctactcctgggtctacgtcgttcttcggctttaattaacacgctattctgaaggcactttcagatttacagaacggagcaggaagtacagggattccctgcacgcctcgcacatagctgcacagtttcttgagtctgattaattcaggtttcggggttaaagataaaaagggaagggaagtgtggccactcagccaaggcgttcctcactcaggcaccaggcactgcctgcccacaaggaaaacatggcccaggcggttactggcgggggcaggcaggggacagagacggcatcgaggactcccagggagcaccctgggggtccgtccagggtacaccctcccacctgccccggagctcagacgcaggtagctcctgccgagggtccgaccacacagagaactgatctgcacccctctccgcctggaggctggacagctttaacatggaaggcattccaggtgggaacgcgactcagctagcgcctgacccagaaggacgtggatggactcactgacgggccctgcgaggcgcacgcctcccctccactccggagcggctcggacacctcccaggtctcagttcctgggcctcacttaggaagaggcttcaggcgtgtgctggagccaccgtgaacagaggggagcgaaggcaacaggaaactgacgtgggagccgcagcagctctgggtgagctctggctgtacgcggacgcacacaagccaccgtgcacggggcaggcacaggcctagaacacgcgcacagacacacgcaggccacacacacacaggcatgcagggcaaccgggcccggaaggcgacctggttgtagcgagtggacttacaggtttccccattctctatgcaggagaaaaaaacaagagtgtgttactgacttcaggagagagcaccaggctgttccagatcgcatggctgcccaggaggacgccgcctcatcccaccccacagggcccaggagcccccagcccttcctgagaacctggctttagggtctggctctgaccccgggtgagaggtgtctcttgcgctctcatctggaactcagaggctgcgtctgcagaaccaaacccacacccgcaaggaccctgtacagccctggtgttcgcagcccaaggccacaggtgggagccttggcgtagggcaggccctaaggcccgacagcagcctgaactacccacagggtgaaggccaggaattctgtgcccagcggcacaagcctcctcgcctccatggaacagacccatctgcctgctgcagtgaggcttgcctgagtaaagcaggcctggccgcagggctgacttcagggctggcccaggtaccaggaggactgctcgtcacccagctgtggggttaacatcaggacccaccctaggtcctacaaggacccctcagcgcttggcactagaaggacccctcagcgcttggcactagaaggacccctcagcacttggcacccaggtcttacaaggactcccggccttggcactagaaggatccctcagcgcccggccacagggctgaactcagggcccggccttggcaccaaaaggacccctcagtgcccactcaggcggctccctgttctctaacgggcccactggcctgcagggttgccccgaagctcttcagtggtcagggaagggactctgtcctcactgccgggccagcactgccaggatctgttccccccaggccacacgcacggacactcacggcttcatgctgaagaggtctttgaaaccagataggctggtgtctctgctcctgtacttctcagcgatcagcttctccctggtccaggtcatctgcaccttgtctggcgtaggcggcgcttgggtcctggctgccgccgcggtgtgggacgcggtgttcctgtcgtggatcagctgggcctggcgggcccgggacttggtgagaccagccggtctcaaaactcctctgggcgagagcgacccgggatgccaggccggaggtgagggcagctcacagaacctgaagggccctgtgtgcctgacccgggacccagcctggcgtcccacactggtcctgcgccgcccccgtgactgcctccctcctcccaggcttcccgaccaaacgctcaccccctcaccttcccgccctggccctgaactggaaaggccccatgaccccgtactgacaggaggtgacacgtgctggcagagtctccccctcacctgacggggctccacacacgtgttcaccccagaccacctgctcgcccacacgaccagcacgcaggcgtccccgtctcagggaggcttggggcaggtggggccgtaccagcatccaggccctgtccccggggaagcaggctgtgtctgaccagccaggggacgtttgggggccggccaggctggcaggggccctgtggggcaccgctggggccaatgacagggccggccccctgtgcgtcacttctgacaatccgaggaaaatgaaaacaccgtccacgcccctagctgtaggcgccgaaggggaagtggcgccctcaccgcgag

SEQ ID NO: 149759 - DNA, 347 bp, Homo sapiens; identical to SEQ ID NO: 19152
  chr5:1058826-1059173
  hypo

SEQ ID NO: 149760 - DNA, 469 bp, Homo sapiens; identical to SEQ ID NO: 19153
  chr5:1059425-1059894
  hypo

SEQ ID NO: 149761 - DNA, 217 bp, Homo sapiens; identical to SEQ ID NO: 19154
  chr5:1060377-1060594
  hypo

SEQ ID NO: 149762 - DNA, 566 bp, Homo sapiens; identical to SEQ ID NO: 69069
  chr5:1060647-1061213
  hypo

SEQ ID NO: 149763 - DNA, 220 bp, Homo sapiens; identical to SEQ ID NO: 41236
  chr5:1061581-1061801
  hypo

SEQ ID NO: 149764 - DNA, 30 bp, Homo sapiens; identical to SEQ ID NO: 19157
  chr5:1062593-1062623
  hypo

SEQ ID NO: 149765 - DNA, 841 bp, Homo sapiens; identical to SEQ ID NO: 19158
  chr5:1062886-1063727
  hypo

SEQ ID NO: 149766 - DNA, 2199 bp, Homo sapiens; identical to SEQ ID NO: 41237
  chr5:1064041-1066240
  hypo

SEQ ID NO: 149767 - DNA, 564 bp, Homo sapiens
  chr5:1066840-1067404
  hypo
tgggaggaagagactgcgtggaggcacaggcgcccagggtcgcccgggggcccaggagctggaggaggcaggaggatcctcccgggagactctggaggcagcgtggcctgcggtctccttcatctcagactcctgggctccagaactaggagagaacagacgccctttgctgtgagccgtgtggtctgtgtcccatcacagcagccccgggccactcagggatcagagccaccacctgcctcctttgccgagattccagcagcccctacgtcagcctgactggtatcctcaccccctaccctggctcacacctagagctccaccagcccttcacacacaaaacaacatccaatgttctcccacggccccactcctcctcaggcacccctcgtccttaccctgctctccagacacctccaccttctgcccagctgcccgggcgcaagacgggacagggtgcagggccagcagatatgctcctctttgagacttttgtttaggtcaggaaaggcctgaacacgttacccccaaggggcaccagccagcaagcggaggcaggggccc

SEQ ID NO: 149768 - DNA, 219 bp, Homo sapiens
  chr5:1068044-1068263
  hypo
gcccggcgcagcagtcgcagaggcctccgtgcagacagacctcaacccggaggacaactttacgagcggggagcaagaacaccagggccttaggaccccttttatgccaatcagtgccacacagaacagagcacaagggcgcgcatgagcctccctggcgactgcatgagtcacgaagctgcacgcttcttagagaaatgtccatgctttacagccttg

SEQ ID NO: 149769 - DNA, 1479 bp, Homo sapiens
  chr5:1068562-1070041
  hypo
aattaaaaaacaaataaataaaaaagatttgcccagatttctctaatttcacactaacatagccacgatggaggagaatacggctccccagggcagtgcagccccaaaggcagccaagggaaggcggggcctgcggctggctccagccctcgcaaccaatgcagctaagtcacagccaaaggctcgctgagagcagcgggggcagggtgcgctcgtcctcccgtccgcaagagcgggctcctgtctgaggctgccccagaccccccagccgaagggctgtcggacggagaggatctgcctgtgagctccgttaacgtgagagtataagtgagcgcagctcttcccatggccgtgaagactgtggcagagcgtggcagggggtcccgtcatcccccagtcactgcaatccctgccctgtccctcgtgcgcacagacgcgccctcacacacctccagggaggccaggcagtgccaggattcttagaatccacgccagcagggcagttccaactccgggattcctcctaagagcattccagcatgggataaggaacacggaaagggacatatggggaccaggaccgtgaacatccccccgaaaaccacgatacctaaatccacgggttcacagtcaatagcagctaacgcctgaacccgtggtgagccatgacgccgccgtcagggaaagggaaggcccagagcatctcctgtcttccctgggaaggcgaacctgtgcaacagcctgagaaggtggccatccacgtggccaacgtggcgggagcggcgggggccattttttacctccatgggatcctggccctaggccacaccacctgaggctgctaccatccacgtgcccacagccctcttgagcagggttcccacccctaggctgaccggcccagacctggacgggcctcagtgcggctgtggttgtgcagagaaacggaccggggaggcggtggggggcggctgcagatgcctggacacacccacaaggtcccagtgggggcctggcagcagggagctggctcccaacccacagcaaggacagagggggcacccgcatgggagggacctcggacacacaccactgcaacaggcacgtggtataggccccacagactcccacacacatgagggggaaggaggaggctcgaggcgcccacggcagccagccctgcctgggaatgaggtgcccttggcatgaaaatcacgcaggtgggcactcaaaagctccctgctttagcaagaaatacagaagtaactccaggtgacgtgacgtgacgtgacgtgatgggaccccacaggctttcatcgtgtcatcattccgtttctggatagtgtgaagcttcccataagaagtttgaaaatcagagaaatgaagacacaaagtctcagaccccgatgtcctggggcagccgactgcagcagcagggctcagagctggcaccagcatgctacacgcccggggcactca

SEQ ID NO: 149770 - DNA, 581 bp, Homo sapiens; identical to SEQ ID NO: 69078
  chr5:1073455-1074036
  hypo

SEQ ID NO: 149771 - DNA, 903 bp, Homo sapiens
  chr5:1074306-1075209
  hypo
cacacccgaggcccccgccgaggcccctgaggggacaatggcccggggcacacacctgaggcccccgccgaggccctgaggggcagaggcttcccaaagatggcctttgcttcagcaggagccaccctctcccaccccaagcccagggctgtgctggcagaggggccggctccccacacccccaccctgcagcagggacacccccggcccccagctgcgccatccgctctgcaccaggcagtgttcacaccccagaccttgcctgagcggctgaaggtgagaggcccctgagactcaaaggtccccactcaaaggccgacctcagaaacagctcttctgtgcgtctgaggaccacggggcatgggcggtgctcacctccagttcttggtgtgggggggaccgtgctccacgcgcagcagggcgtagcgggcggcgttcagggataggccacggatgccatcgccccactccttctcggccctgtgggaaaggaagtcggggtttgtccagccgcgtacctggaggctcctctcccacctgggaaaggggacttctgggggcaggtgagttggggcaaacaggacccccaggaaaagtccctggatgaggagggaggcctccatgcccacccttgccctgaagggagcccgtcctaggagccaccgggtcagagggtgctgtggctgtggagggaacgaggtctacgtccagcatgcgtgaggtgccttcctcacaggacgggggacaggaggcccatgacagggaagtggctggaccccgggcacgaggcgggtgcaggtggagggagggtgggtgctggggcacggggaaggacgcctgtggctgccgagtgagtacagacacaacctggggacacctcgcgagacacgtagcaggaatagt

SEQ ID NO: 149772 - DNA, 5033 bp, Homo sapiens; identical to SEQ ID NO: 69080
  chr5:1075471-1080504
  hypo

SEQ ID NO: 149773 - DNA, 94 bp, Homo sapiens; identical to SEQ ID NO: 19171
  chr5:1081413-1081507
  hypo

SEQ ID NO: 149774 - DNA, 314 bp, Homo sapiens
  chr5:1081823-1082137
  hypo
acgcccccgcgtgcgcgtacgtactccacaggttctctgccgggcaaggaagatcccatgggtttctggcaccttctgtgcagtgcccccgccatggggccgcccactccccggcaggtgccactggtggccggaggggaagggtcacagcttgtgcgccgcaagcaggctccaattcaaacacgctttcgagatggtacctctgggaaagctgcctgtctgcgtctacggagggaaggtcagcactaaagagaagcctcatgtggggaacaacatactcctggaaagcctgggcttcccgtctcgggttctgg

SEQ ID NO: 149775 - DNA, 1321 bp, Homo sapiens; identical to SEQ ID NO: 69082
  chr5:1083625-1084946
  hypo

SEQ ID NO: 149776 - DNA, 1659 bp, Homo sapiens; identical to SEQ ID NO: 69083
  chr5:1085199-1086858
  hypo

SEQ ID NO: 149777 - DNA, 2217 bp, Homo sapiens
  chr5:1087079-1089296
  hypo
agcagaggccgacagcgcctccaaactcgggtcccagcgagcgcgatatcatgtagtaggacccgccagctgcggagacaaaggcggcagccgcgggtcaggggcgcacttggactcggacccgaggtgcggtctgcgctgccattcacgggcaaaggagggcctgtctctgcgaaggcagcgtgtagaccctcgtccacccgcaaagcagcacatggagacgcttccacggtgaactctcccctcccgaggctcggcacacgttccacaccaagagcacgcgctctcatggacatgaggaccaggtgagatcagggataaggctctctggggagcaggaggccccagcaggtcccagaaaaagtcccgcgtacatcagtggcagccccagcccccacttccactaagttttgcttatgaaaaaggcaaaagagaaactaggatgttcaggagtcgtctcgtgtactgtgaaccacgcacgctatcactggcgggaaagccgggcgcaaccccagggctgcctggagaacacagctctccctgctctgagcagtgcgtgtggcatgtggaaggggtcctaatggacgcggccatcgtgaagcagagactggtcccttggctgcggagggagacccctggtgaaggccctcgtgctctcctgaggccggggaagtccgctgagcaccaagcgatgcccccgtggggatggggaccagctgcgtgaggacctggtgctgagcaagcccagccgttaacacgcgcagcacacatgcactcagaagcagacgtggcagcgtctccgttcactagttatttcgtatcgtaattcgtttattactaattaacagtatcatctcagtttactagttattacgtattgtaattaacttattactaattaatatcatctcggttcactagttatttagttattatgtattgtaattaacttattactaattaacaaggtcagggcagtgttttgtcttcaccttccctcgtgagatacaggttccaagaactcagcctatggcacacgctgggctacaggagccactggaatcgcccgtgcctccccctccccagcccgctgcctggtgggcactgcctaccctggcaagagacggtcaccacgcagcaaaatggggaagaaaaccaaacagccgtgacctcacggctcaaacgccagaggagccagtggagaacacgcagaaggcccggctgagacccccaggcagcccccggcccggcctcgccaagcggcctcctcgcggttgccgtgcggcaaaacacagactcctctaacaggactcagggccgcggctggcgggcaccccttacctgggaccacaccgttggtagcgatcgcactcatggaaatggcggtcagcattgtctgcaaaaagacaggcagccatctgaggagagttttccaacagcctgccggcatcgcaacactcccaagtcagggtctatgacccggctcccgccgaatgccagcccccaactccagggctctccatctcaatggagtggctaggaaacaggacctggaggctcccgggcaccaggcatgcgtgtcctggttcccaccccttcccctatgacagcgacccctgaaagtgcccaaggtccttccaaactggaggtgatgtcatcaaaacacagggtgtcccttcccttggaagcctcagcccccgggtgccgccccatgacacccaccactggctgagatgcctgtccgcagacacgggtaaatgaggtgccagcacgccagtcaacacgccagcactaaccccggacagtgtggcatctcatccccgcagctgcccggctctcgtggaggagacggcgctgaacgacgtctacacgggcgtctggggagggccctactgtccggctgccaccgcccgaaggcacaaccacagcggccaggggagacggcatctggggagagccctactgtccagctgccaccgcccgaaggcacagccacacctggccgggggagactcacacatgtgcagcacatggccacgatgaggaaggactccaggacaccagccacccccacgatccacgtcaggcgcaggaagaggatgacgcccaggatgttctgcaggcacggcaggtagacgccgatgaaggtgcccatgcgcggagcctgcgacagagcatagcgtgtcccaggggctcgtaccccacacccagagggag

SEQ ID NO: 149778 - DNA, 242 bp, Homo sapiens; identical to SEQ ID NO: 19177
  chr5:1090421-1090663
  hypo

SEQ ID NO: 149779 - DNA, 167 bp, Homo sapiens
  chr5:1091064-1091231
  hypo
aaagaggaccaggggcggcccctgcccttccaccccaggggccgagccacggtcccctaagggagccgaaggagtcactgccaactgaaacccgccaccgtcaaacaacaggcctgctggggtcacgggccctggtccctccacgactgaaacgcaggcagcatcag

SEQ ID NO: 149780 - DNA, 282 bp, Homo sapiens; identical to SEQ ID NO: 69088
  chr5:1091613-1091895
  hypo

SEQ ID NO: 149781 - DNA, 38 bp, Homo sapiens; identical to SEQ ID NO: 19179
  chr5:1092773-1092811
  hypo

SEQ ID NO: 149782 - DNA, 186 bp, Homo sapiens; identical to SEQ ID NO: 69090
  chr5:1094018-1094204
  hypo

SEQ ID NO: 149783 - DNA, 638 bp, Homo sapiens
  chr5:1094547-1095185
  hypo
catttcccagggtgcacgctagtcccaggacacatgctagccccaatgcgcaagctatccccagaacacaagctatccctaggacacaagctatccccagaacacacgctagctccagggcatacgctatcccccacacacatcatcattgaagacaaagcccctgaaagcctcggcaagtgagctgttcagcccagggcaagggtacctccctctggcgttgaaaatctctcattcagccaaatgtgggcaaaattctcactcttaaaagtcggggtggcacctcctagccttgctgcttaatccgccatttcggagggacacagaggacttcccactgttccctgttgaggacgccgcccacaggctctctaggtaaatgagcccctcctgagtctttcaggaaggctgggccggcgacccctccatggggctgagcccaggcttcgaaccagggggtaatcctagcagctgcccgagagcatgagcaagggaattggtggggaggaggacttgaggctccctggcaggttgaggcccgatggcccatgtgacggtgttagaagatagggtcggtaggaggtgggggcggtaggaggcggggggccggtaggaggcggggccggtaggaggtgggg

SEQ ID NO: 149784 - DNA, 418 bp, Homo sapiens; identical to SEQ ID NO: 69092
  chr5:1095612-1096030
  hypo

SEQ ID NO: 149785 - DNA, 1021 bp, Homo sapiens; identical to SEQ ID NO: 41238
  chr5:1111380-1112401
  hypo

SEQ ID NO: 149786 - DNA, 79 bp, Homo sapiens
  chr5:1114067-1114146
  hypo
gtgcagggctcccgtcgcacatccaagctctgcttcacaccccaggaccccagggccggctgcccgccatgtgctggct

SEQ ID NO: 149787 - DNA, 254 bp, Homo sapiens; identical to SEQ ID NO: 69095
  chr5:1114642-1114896
  hypo

SEQ ID NO: 149788 - DNA, 665 bp, Homo sapiens
  chr5:1115141-1115806
  hypo
aagtatatttgtacatcgctgatgaaacacattggtgggtctcagtcgatcaccattagtgccctttccaagcatcggtgtccagctttgcccagggggcctcttcaaatgcaatctcgcatccttatgatgtgagcctggtcatctgcgatggcctcttggccgtgtgcagggcacagccaggggaaccctgggatttagtgcgaaagtgtagccgatggtggttacattctgtgtgtagattctcgaaacagtccctgctgcctgccaccctggggtggagtttctaatggattaggacggacacccaatgccagcttccaagccaggaggccgctcgtgcccacggcttggaatcagggctgtggcctgggagggctctcaccagacgcaggctgcctccaggtatctgtgtgcctctgcccacggagcttctccccaggtccgcgggtccccccagtccacttctgctttcctgttagggtggggggctcatctcctggtgcgccatctgcatccttctgggctgggaacctgctgtcgggtatcaggcagggcgcacctccagggctgaaggatgcaggtggggctggcaggcagagtgtccgtggagagctccgtgtccagggaaggggacacctggaggaggccggccctggaggccc

SEQ ID NO: 149789 - DNA, 30 bp, Homo sapiens
  chr5:1116400-1116430
  hypo
ctggcttgcccagggcggggcctctgggcc

SEQ ID NO: 149790 - DNA, 631 bp, Homo sapiens
  chr5:1116659-1117290
  hypo
tcagtcctgtaattcacggacactgagtcttcgctcaagttccctctggaagattccgtggatgagtccgacacactcttcccctcactcaggaggctccaggatttttagaccacgtgtgtggctttccttctctcaaagtgtaactcacataatgttactcagaatctcacacggacgcccgtgagttgcagacacagggaaggttcgcatctcctctgaagtccaagctgcccagaagcccacccaccccccgccagctctcgttcctgctccacaggtgacttctttcccgtgaagcttgggcaaatgtttgctgtcggctcagggggaaaggccatgccagggtccagatgggctcaaaacctcccaacctggcagacacgcagcccttcagaaatggaagcagagcccaggacacgatgtggccaatcctctctcagacgtcataaagagctgggtttggaagacgaggccaaccctcatggatgccgcccccgaccccagcaacaccatgagatcagggatttgctggctctgtctcagagccgcggagggtcctgctcaaaccccagagccgtggggatgggctggggggctggtggggagcgtactgcgaggggccactgag

SEQ ID NO: 149791 - DNA, 43 bp, Homo sapiens; identical to SEQ ID NO: 69099
  chr5:1119924-1119967
  hypo

SEQ ID NO: 149792 - DNA, 363 bp, Homo sapiens; identical to SEQ ID NO: 69100
  chr5:1120338-1120701
  hypo

SEQ ID NO: 149793 - DNA, 32 bp, Homo sapiens; identical to SEQ ID NO: 69101
  chr5:1121006-1121038
  hypo

SEQ ID NO: 149794 - DNA, 31 bp, Homo sapiens; identical to SEQ ID NO: 69102
  chr5:1121381-1121412
  hypo

SEQ ID NO: 149795 - DNA, 223 bp, Homo sapiens
  chr5:1122178-1122401
  hypo
tgtgccccgggcccacggcaacgcagcccccattccagagagccagaccctccagctctcaagggaacagcagggaagacagggatggtgtggggggacactgtccttgggaactttccctgcccccaccgcctgcccttgcgcatgggcctccctagaaacgtgtcaccccaacccttgagaaaccagaacccccggcagggctgtgcgaggcggggtggga

SEQ ID NO: 149796 - DNA, 196 bp, Homo sapiens
  chr5:1122643-1122839
  hypo
tgtccgacggacgaaccgcattcccacagctgtgcgtccaccttcaccaccggtctccagagtcctcccaaactgaaggcctctccccagcctggcacctgccattctgcgttcggtctctacagatctgggaactccagggacctcccaggagaggatcagacagggccccgcggcatgacgtccacacagctcc

SEQ ID NO: 149797 - DNA, 160 bp, Homo sapiens; identical to SEQ ID NO: 69104
  chr5:1124658-1124818
  hypo

SEQ ID NO: 149798 - DNA, 814 bp, Homo sapiens
  chr5:1128887-1129701
  hypo
ggccccaagtgcctgcctggtctctacacggcttccagccttttcctagaatggatcacatgtttgcatacacacatatgtgcacacacatgcagaaaccagacccactcccaccatccacccacacaagctggaccctcagtcacgcggctccctgccacgtgctccatccccatgtgcgtccaacacacctgccagctctgctttcagctttccctgatggccaagcataccccgctgcccctgcaaggcttgggagcactcctgggatcccctgcaaggcttgggagcacccctgggatcccaagtctgatggcctctagaagtccctctcctcaaacctcggtcacagctgctgcctagggcctgccaggccagggggacagccacgtctctcctagacacacgaggacacccctccaagaggcctccctcagccagccgccactgctgccggcccctctgtgcatccccaagggctgagctgttgcagggtacaacgcctcctggctccaagtgaaagtcggaggtgggcaggacgttcaggtaacacccccacctccgaagtccagtctcacagagccttagcagccacccaaggcaaggaggtggccatgggccaccaggagtgtcccgagcatcccaggcccacaagggccagagaaagttccgggcttcccctagcgtaagggacagaaccaggcgccctcccctcctggccccctcagctttcctgtgacgcccaggaccaggaccaggaccagggaaaccacagcgtcccaggcgacagggtggagggcggctccaggagccc

SEQ ID NO: 149799 - DNA, 30 bp, Homo sapiens
  chr5:1130690-1130720
  hypo
cagggcggctgcccgcgcaggtcccctcac

SEQ ID NO: 149800 - DNA, 30 bp, Homo sapiens
  chr5:1131301-1131331
  hypo
acgtggggacacgctcggactcacggggac

SEQ ID NO: 149801 - DNA, 71 bp, Homo sapiens; identical to SEQ ID NO: 69107
  chr5:1140154-1140225
  hypo

SEQ ID NO: 149802 - DNA, 941 bp, Homo sapiens
  chr5:1143149-1144090
  hypo
gcaccacagagcttacggctccatctgtgacacgggccttccttccctgagggccccaacacagcctcctgggcaacatgcccctccatccgcagggtcagaagccgcagctcaaggatcacctgcggaaggtggcatttcccaagaccggagcttcccgacatcccgccacctcccgcagcgctggtgccagtcctgtcggataaggggcaagtgtaagaccggcctcatcagctccagcaattgtaacaaagcgccatgggcgggggcttcaacactagaaattgttccctcgcagcctgggggctggaagtcccagaccaaggggctgctgggcggtttctcccaaggcctattcatggcccgcagacggtggcttctcctgtgtcctcccacggccgctcctctgcacacacgcatccctggtgtcgctttctcttcttacaaggacacgtcctattgggtcagggccttcctcacaacctcatttaaccttaagtccctccctcaaggtcctagctccagatacagtcccgttggggctgggcctcagctgcgaatctgggggcacgactcagtcggcagctgtctgtgtcctgcatgcgcctccactgaccttcccagggttctccctgtgtcctggtgctgcttcttcacccagagcgctgccacccactgctgagcttcagacatgtgacctgcccagtcccctctgcaagccctgcaccttcctcagtaccaaccagcaaacccgtggctgcaccggggccagcagacactctcgggcagagtgctgggcaccctggcctcctgggcaccctggcgcttggcaccctggcctcctgggcaccctggcgctgggaaacctggcctcctgggcaccctggcgctgggaaacctggcctcctgggcaccctggcgctgggaaacctggcctcttg

SEQ ID NO: 149803 - DNA, 31 bp, Homo sapiens; identical to SEQ ID NO: 69110
  chr5:1149269-1149300
  hypo

SEQ ID NO: 149804 - DNA, 323 bp, Homo sapiens; identical to SEQ ID NO: 69111
  chr5:1154637-1154960
  hypo

SEQ ID NO: 149805 - DNA, 285 bp, Homo sapiens
  chr5:1161168-1161453
  hypo
cccaggtaaggctgccggcccctggagggtgagagacctggagagaggtctcagcccagagcacggcccagaagggccgataagcctagaccagctggccctgacagtgagcagggataagtaactgcagctcgacttgttacgcagtgttactgacccaacagcagactgatgcacttgtcctgcacccccttgccgaggtaaatcctcccagggcctcagcctcctcacatccgaagttgggagaacaatggtgcctccgccccaggacgggctcaaggttga

SEQ ID NO: 149806 - DNA, 87 bp, Homo sapiens; identical to SEQ ID NO: 69112
  chr5:1177290-1177377
  hypo

SEQ ID NO: 149807 - DNA, 197 bp, Homo sapiens
  chr5:1193747-1193944
  hypo
ggcagcatctcccctcgtgggcgcttacctcggagaactccgggcatgaatgtgcgaaaggcaggaacagacgtccacggcggctttcatcctcatggcgcaaacgggacccctaccgtcagcaatggagccgtgaaggagctgcagccgtggacctggagcaggcacagcgagccagggtgcgaggcccggacagc

SEQ ID NO: 149808 - DNA, 30 bp, Homo sapiens
  chr5:1194170-1194200
  hypo
gaaagccaaggctgccgtgaatttccataa

SEQ ID NO: 149809 - DNA, 232 bp, Homo sapiens
  chr5:1201776-1202008
  hypo
cgtgctgcccaaccccggcctagacgcccggatcccgtccctggctgagctggagaccatcgagcaggaggaggccagctcccggccgaagtgggacaacaaggcgcagtacatgctcacctgcctgggcttctgcgtgggcctcggcaacgtgtggcgcttcccctacctgtgtcagagccacggaggaggtaggctggccgggcggggctgcgggcgaggccgtggccag

SEQ ID NO: 149810 - DNA, 415 bp, Homo sapiens; identical to SEQ ID NO: 69115
  chr5:1207165-1207580
  hypo

SEQ ID NO: 149811 - DNA, 238 bp, Homo sapiens
  chr5:1210302-1210540
  hypo
caggaaggtgtgagccgggaaggcgtgtgcagggcaggcgtgtgccaggaaggtgtgagcctggaaggcgtgtacaggctgcaccacggcatcagctgcatgatcccggcctgcactgggtcggcccctcagattctggagtagcccatcccagccacaccctgtgccagccctgggacctcctgctcagagtggggatgggtggccagtggagggtgtgcctcggccccaagcctca

SEQ ID NO: 149812 - DNA, 237 bp, Homo sapiens
  chr5:1212419-1212656
  hypo
tatgtggacgagtgcgccaggagctcccctgtggactacttctggtaccgagagacgctcaacatctccacgtccatcagcgactcgggctccatccagtggtggatgctgctgtgcctggcctgcgcatggagcgtcctgtacatgtgcaccatccgcggcatcgagaccaccgggaaggtactgcatgggcccggccaggctgcaggtgctccagagggcgggtgcgggcagccc

SEQ ID NO: 149813 - DNA, 118 bp, Homo sapiens; identical to SEQ ID NO: 69117
  chr5:1213549-1213667
  hypo

SEQ ID NO: 149814 - DNA, 288 bp, Homo sapiens; identical to SEQ ID NO: 19193
  chr5:1215722-1216010
  hypo

SEQ ID NO: 149815 - DNA, 163 bp, Homo sapiens
  chr5:1216577-1216740
  hypo
ggctggcgctctgggcgggatgcggatgctgccctgggctgtgtcctgacctgggacctcatcgccagccgccatgacactggtctcgtctgcagcaacaactgcgagaaggactcggtgattgtgtccatcatcaacggcttcacatcggtgtatgtggcca

SEQ ID NO: 149816 - DNA, 148 bp, Homo sapiens
  chr5:1216987-1217135
  hypo
caacgcctccgaccccgcggcctacgcgcagctggtgttccagacctgcgacatcaacgccttcctctcagaggtaggtccattccggagctcgaggcagggagagggcaccccttgctggcacctcagagtccggccacccctgggc

SEQ ID NO: 149817 - DNA, 1475 bp, Homo sapiens
  chr5:1218541-1220016
  hypo
cacaggagcagaaggcgtccgggtggttgcgccttggtggttcttacccgagagcctgtctgtgagcacagcctgctctaacccggccgttggccacctgccttccgagcacgtccagggtatgcgtttattaacaggtgactcgcgtaacaccttgggtacgtggctcagctgcactggatcagggctgtgcaggctgtgagatctcagaagctccctgtgttgggagagcccgtctgtgggcggaacggggctctgagtgccgcttggtgatgggatccacgtgctggtcctgatgcatagttcggcttttgaaaatacactttgggcctaaaagacaagatctagctatttcatgacagctcagacctgcccgccccatgctgcgtggcttggcgacgcacgagacctcgggcggggaggagacggagcccacggagggcagaggccctggtgactgtgtgtcatccgtgcaggccgtggagggcacaggcctggccttcatcgtcttcaccgaggccatcaccaagatgccgttgtccccactgtggtctgtgctcttcttcattatgctcttctgcctggggctgtcatctatgtttgggaacatggagggcgtcgttgtgcccctgcaggacctcagagtcatccccccgaagtggcccaaggaggtgctcacaggtacgtgtgcagtcgggaggggtccccatggcaatggtgccacctgtgggatggcagcccccggctgtgtgaacagctctgtccccggccgtgcgtgcagcccccgggcgtgtgaacagctctgtccccggccgtgcgtgcagcccccaggcgtgtgaacagctctgtccccggccgtgtgtgcagcccccgggcgtgtgaacagctctgtccccggccgtgcgtgcagccgccgggcatgtgagcagctctgtccccggcagtgtgtgcagcccccgggtgtgtgaacagctctgtccctggccatatgtgcagcccccagttgtgtgaacagctctgtccctggccgtgcgtgcagcccctgggcgtgtgagcagctctgtcccccggcctgcaggcctcatctgcctggggacattcctcattggcttcatcttcacgctgaactccggccagtactggctctccctgctggacagctatgccggctccattcccctgctcatcatcgccttctgcgagatgttctctgtggtctacgtgtacggtgtggacaggtaggggccacggtggggacaggtgcctctaatgcagaaaagccaggtcacagggcgttcctgtgagggaggacccgggctgtgttcagggtacggagggagagtctatgactcggggcctcggccggccacagaggctggtgtagacctgtcctggcgggagcagagggcatcagcagggccctggcatgccgataatgggagctttgtgttgctgggagccgggaagcccagtgg

SEQ ID NO: 149818 - DNA, 30 bp, Homo sapiens
  chr5:1220690-1220720
  hypo
cctaaatgtggagcacgtgagaccagctcc

SEQ ID NO: 149819 - DNA, 238 bp, Homo sapiens
  chr5:1221115-1221353
  hypo
ccatgaccaggagggagggatcgggccctggcaaggggaggccgggcacctcgcagcacaccatctgttcgggtagcagaacgtacagaaagcttagcgagttgaagcccagctggtagcagcagtgacagctgtctctggccttggcaggttcaataaggacatcgagttcatgatcggccacaagcccaacatcttctggcaagtcacgtggcgcgtggtcagccccctgctcatg

SEQ ID NO: 149820 - DNA, 119 bp, Homo sapiens
  chr5:1222815-1222934
  hypo
acacacatatggacacgtgtggatatgtgtgcgtacacgtcgctgggacacatgcctgccactcggggcccagctgccctctgtgtttgtccttgccacagtcacggggtgcatgtgca

SEQ ID NO: 149821 - DNA, 87 bp, Homo sapiens
  chr5:1223195-1223282
  hypo
gtgggcagttgctggcgattctgagaaaacttggccgcatccaccggggccctgcctccagtcggccgctgccgagtctctgcgttc

SEQ ID NO: 149822 - DNA, 85 bp, Homo sapiens
  chr5:1223581-1223666
  hypo
cgcctgccctgcccccgtcacgggatgggcccccattggggttcaacattccatcgcagccaaaggcagtcggcacttgggacat

SEQ ID NO: 149823 - DNA, 819 bp, Homo sapiens; identical to SEQ ID NO: 69122
  chr5:1232523-1233342
  hypo

SEQ ID NO: 149824 - DNA, 106 bp, Homo sapiens; identical to SEQ ID NO: 69123
  chr5:1253818-1253924
  hypo

SEQ ID NO: 149825 - DNA, 30 bp, Homo sapiens
  chr5:1254930-1254960
  hypo
ggaagcagaggacggcgcggggctctgtcg

SEQ ID NO: 149826 - DNA, 30 bp, Homo sapiens
  chr5:1255530-1255560
  hypo
gaggatggcggacagcgtcagaggaaaggc

SEQ ID NO: 149827 - DNA, 30 bp, Homo sapiens
  chr5:1261363-1261393
  hypo
ctacattgaaataaacgttttgtgccatta

SEQ ID NO: 149828 - DNA, 229 bp, Homo sapiens
  chr5:1261769-1261998
  hypo
catgcatttctttgacgctgctggtaggaccttcccaagtgtgcatcagacgtccatttcttctttcacagccatccccaacacgaccttgggctccggctcaccctgagcctatgggtctgacttgtgtggggtcctcgggcagagcaagggccccggagcaggaggccaggctgcaatcatgcatgccctttgccagctgggtgaccaagggcggctgctcccctgg

SEQ ID NO: 149829 - DNA, 30 bp, Homo sapiens
  chr5:1264129-1264159
  hypo
agggccccagggtctcgggttcagagggac

SEQ ID NO: 149830 - DNA, 304 bp, Homo sapiens
  chr5:1264406-1264710
  hypo
tttgggattggcagtcgcctgccccacacggaagcagaggtggacgcaacggccctgcagcagcacctgccccagccgggcacaggctccacttccggccaggtgcgctcacctggagtagtcgctctgcacctccagggtccgggtatccagcagcaggccgcaccaggggaataggccgtgggccggcatctgaacaaaagccgtgccacccagggcctcgtcttctacagggaagttcaccactgtcttccgcaagttcaccacgcagccatactcagggacacctcggaccagggtccta

SEQ ID NO: 149831 - DNA, 30 bp, Homo sapiens; identical to SEQ ID NO: 69125
  chr5:1265837-1265867
  hypo

SEQ ID NO: 149832 - DNA, 30 bp, Homo sapiens; identical to SEQ ID NO: 69126
  chr5:1266125-1266155
  hypo

SEQ ID NO: 149833 - DNA, 55 bp, Homo sapiens
  chr5:1266472-1266527
  hypo
gacttggcagagacaacgctgcggtgccaggggcaggacacggggggctcaactg

SEQ ID NO: 149834 - DNA, 400 bp, Homo sapiens
  chr5:1269044-1269444
  hypo
cacagaaccagacacttgacccggaatgaatgcttaaccggactccttttttttttttcaaggaatttgtccacggtgaaagactcatgaccctacatgtagccgctgcgcgccaacggatacaaccttgcccctagtttcagcatgaccaacgagaagcagaaactctccaaacaaggatgccaagggtgcgttttcagacaaacagtgagagcagaatagccccgtggaacctaaaggtgcacacagaaggcatggctgccacgcgaccctcagccatccccagagcccacaggacgccactcctgttgctaagagacgcttgcagcctactgcaaaaacaagacctgttattttcgggaagcgctataggtggtcaccttaaaaagaggctttccgg

SEQ ID NO: 149835 - DNA, 30 bp, Homo sapiens
  chr5:1270454-1270484
  hypo
cgttccacctgactgcggatgaccttgctg

SEQ ID NO: 149836 - DNA, 422 bp, Homo sapiens
  chr5:1270693-1271115
  hypo
ccaccacaggccccccgagaggagcaaactacacggtcaaccccgcactttccagatgggaaatctagtcacagagagaagagcccgcgccctcgcgggggtcacacgacagggacaggaatgagaatcggataaaatccttttgtatcgggagagagagatacaagcgtgtgagagccgggtgtccagcgtcagtagtaacttggagctgacaagctgcaggctcaaacgctcggcgcacacctgacccagacacaccccccgcccctcgtcctccacgcaggagcaactccacaccccgcttgccatttccaggcctcgtgtggcacctgctccgctccggctgccgcaagccgagccatgtttccggggcctcgggagcctgcagcccaggagccggagggggcgggggccagaaaagg

SEQ ID NO: 149837 - DNA, 323 bp, Homo sapiens
  chr5:1272060-1272383
  hypo
actggagagaggccgcgcagtcaaacgtgagcaggtgcctgaatgcagcagctgtcgcagcctggcatggcccagctcagatttcgccaaggcacacagctcatcatgcccccatcacagctcattccccccactgccccccagggccaacagtctgtccggtcatgagcccagtgattgcccaggggaggacccactgctgggagtccgtgcccaaccctgcagggcagtgcccagacctgctcgatgacgacggcatccctcagcgggctggtctcctgcaggtgagccacgaactgtcgcatgtacggctggaggtctgt

SEQ ID NO: 149838 - DNA, 549 bp, Homo sapiens
  chr5:1277141-1277690
  hypo
gcgccccatacagagcggggcaggacggacagccacctcccgcaagagccccggggcggccagcacgggaacactgtgggcacgtgggcatcaagagagccccctgcacaatcccacgaggcggcttcgacaccttcaggccagcggccaccggaggcatcgccctcacaagcagccagccggggtgtcactgtcacccccctggaaactcccacaacatccctaaagcacgtctgtgacccagcaaccccacccctggaattcacccagaggcgagggcctctgacccctgggacactcccagaacccagcaggctcacagcaggcgcagccgtgcagtccgcacccaggagcctccacagcagcgggaaggatacatccacgtggcgagttccacaacggatgccattcatggacagaacgcacagctgaggcgttcagcatagctgaggctcgaaccccaaaacccacctcctgcctgatctcactcacatggagaccgggagagggagaccatggaggtcgaggtcggaacgagggtcacggtgg

SEQ ID NO: 149839 - DNA, 370 bp, Homo sapiens; identical to SEQ ID NO: 41241
  chr5:1279434-1279804
  hypo

SEQ ID NO: 149840 - DNA, 243 bp, Homo sapiens
  chr5:1282494-1282737
  hypo
ggtgttccaggacttcgagaagcagaggcctggcgtggggatacagtacctgattccaatgctttgcaacttgctccagacactcttccggtagaaaaagagcctgttcttttgaaacgtggtctccgtgacataaaagaaagacctgagcagctcgacgacgtacacactcatcagccagtgcaggaacttggccaggatctcctcacgcagacggtgctctgcggccggaacacagccaac

SEQ ID NO: 149841 - DNA, 30 bp, Homo sapiens; identical to SEQ ID NO: 69132
  chr5:1282969-1282999
  hypo

SEQ ID NO: 149842 - DNA, 30 bp, Homo sapiens; identical to SEQ ID NO: 69133
  chr5:1286244-1286274
  hypo

SEQ ID NO: 149843 - DNA, 30 bp, Homo sapiens
  chr5:1292078-1292108
  hypo
gaggcagctgccgttcgatgggtagggact

SEQ ID NO: 149844 - DNA, 246 bp, Homo sapiens; identical to SEQ ID NO: 41242
  chr5:1294070-1294316
  hypo

SEQ ID NO: 149845 - DNA, 728 bp, Homo sapiens; identical to SEQ ID NO: 111030
  chr5:1294714-1295442
  hypo

SEQ ID NO: 149846 - DNA, 30 bp, Homo sapiens; identical to SEQ ID NO: 41246
  chr5:1296240-1296270
  hypo

SEQ ID NO: 149847 - DNA, 30 bp, Homo sapiens; identical to SEQ ID NO: 41247
  chr5:1297472-1297502
  hypo

SEQ ID NO: 149848 - DNA, 112 bp, Homo sapiens
  chr5:1318451-1318563
  hypo
ttgcacttggctggcggcagcccgggcggccttcagtccgtgtggggcgcccgcgtggccttctcctcgtaggactccccaaactcgttcactctgcgtttatccacaggat

SEQ ID NO: 149849 - DNA, 70 bp, Homo sapiens
  chr5:1319611-1319681
  hypo
gctctgaacacctggcgaggttgagtgtggagacagggcggggacgggagcactgcgctccccaagggcc

SEQ ID NO: 149850 - DNA, 30 bp, Homo sapiens; identical to SEQ ID NO: 41248
  chr5:1322071-1322101
  hypo

SEQ ID NO: 149851 - DNA, 30 bp, Homo sapiens
  chr5:1325726-1325756
  hypo
tgctgcctccaccacggaggctcccctgac

SEQ ID NO: 149852 - DNA, 214 bp, Homo sapiens
  chr5:1326182-1326396
  hypo
gagggcagttctttacgccactctgcctgcacccaaataagcccccacctacttctgcctgccactcgggcagccctggagccagttttgggaccgctctgagagccgccacctcatggctaaatgcttggaaggcatcacccacggagctcaggacgggtgccagagccgggcacggcactgtgactcgtacctatggagggaccctgcctgt

SEQ ID NO: 149853 - DNA, 279 bp, Homo sapiens; identical to SEQ ID NO: 69141
  chr5:1330257-1330536
  hypo

SEQ ID NO: 149854 - DNA, 30 bp, Homo sapiens
  chr5:1331206-1331236
  hypo
cacccatcaaccactcgcccctgtccagac

SEQ ID NO: 149855 - DNA, 283 bp, Homo sapiens
  chr5:1331473-1331756
  hypo
ctggcaggccccacacgcccaggcctgcgctggtcggggaaggaacaccggcgggaggacggggcgagggaaccaagacaggggatgtgaggccccagccctgctcagcgcccatgagcagccgggaaggctcgagaggtccatgcatctcactctccacagcccagacccagaccccatgcacgccagagtccgcagccaggccctgagctgtgcagccgctggaggccctgagccgtgcagcctctgatggtcccaccacaattgccgcaacggctccctg

SEQ ID NO: 149856 - DNA, 113 bp, Homo sapiens
  chr5:1335181-1335294
  hypo
cagggagtacacggcgtcctgcatgtggatccagaagcgcagccgccccagtgagaccttgtcgtaggacacggtgaggggcagctcggtggtggagcggtttatgacctgat

SEQ ID NO: 149857 - DNA, 30 bp, Homo sapiens
  chr5:1338337-1338367
  hypo
cacggccactaggagcgggggaattacagg

SEQ ID NO: 149858 - DNA, 30 bp, Homo sapiens
  chr5:1338933-1338963
  hypo
gcaccctccccccggcgctccagctctggg

SEQ ID NO: 149859 - DNA, 31 bp, Homo sapiens; identical to SEQ ID NO: 69144
  chr5:1341689-1341720
  hypo

SEQ ID NO: 149860 - DNA, 235 bp, Homo sapiens; identical to SEQ ID NO: 69145
  chr5:1342378-1342613
  hypo

SEQ ID NO: 149861 - DNA, 30 bp, Homo sapiens; identical to SEQ ID NO: 41249
  chr5:1344442-1344472
  hypo

SEQ ID NO: 149862 - DNA, 435 bp, Homo sapiens; identical to SEQ ID NO: 69147
  chr5:1346148-1346583
  hypo

SEQ ID NO: 149863 - DNA, 30 bp, Homo sapiens
  chr5:1347094-1347124
  hypo
ccttccgactccgaccgcctgaggctgggc

SEQ ID NO: 149864 - DNA, 30 bp, Homo sapiens
  chr5:1363823-1363853
  hypo
atggcggtgggcgctcgggctgacctcacc

SEQ ID NO: 149865 - DNA, 30 bp, Homo sapiens
  chr5:1364384-1364414
  hypo
tgaattcaggttaaccgcaaagctcatcgg

SEQ ID NO: 149866 - DNA, 30 bp, Homo sapiens
  chr5:1364710-1364740
  hypo
gaaacagggaagaagcgaaagcatcttcat

SEQ ID NO: 149867 - DNA, 40 bp, Homo sapiens; identical to SEQ ID NO: 19206
  chr5:1381048-1381088
  hypo

SEQ ID NO: 149868 - DNA, 100 bp, Homo sapiens; identical to SEQ ID NO: 69149
  chr5:1381147-1381247
  hypo

SEQ ID NO: 149869 - DNA, 30 bp, Homo sapiens
  chr5:1382144-1382174
  hypo
cagaaaaagccagtgcggcacccacttacc

SEQ ID NO: 149870 - DNA, 354 bp, Homo sapiens; identical to SEQ ID NO: 69150
  chr5:1409807-1410161
  hypo

SEQ ID NO: 149871 - DNA, 246 bp, Homo sapiens
  chr5:1416070-1416316
  hypo
ctgtctgaaaggccacgcagctcacaggtttgcgggttcagtggatccgccctgttctcatccagggacaccctatttctggaagtcagcgacctctccctagtattgatgaggcccctgcctggccctgctaggggctcacctgtagcagttgttggtgaacttgttgtagctggagaaggcgatcagcaccccgaaccccacgcccagggagaagcacacctgggtggccgcgtcaatccaaac

SEQ ID NO: 149872 - DNA, 75 bp, Homo sapiens
  chr5:1416943-1417018
  hypo
ccctcggaacagcacggcctcatccacacatgacatgaccgcagcgtcctaacaaccctcggaacagcacagatt

SEQ ID NO: 149873 - DNA, 212 bp, Homo sapiens
  chr5:1431158-1431370
  hypo
atctggggagaatcgcgcaaacgtcctctcctcctctccaaaatgacggctgagtcgaagagtccgcctgtcagaacggcgacccggcacgaggccccaggcccggctggcgagggcaggaagatgtggatggcacccgccagatccagattccgggaggggtccaggggaaacagggaacccctgggtgtcagtaacgacccttccaggct

SEQ ID NO: 149874 - DNA, 30 bp, Homo sapiens
  chr5:1431664-1431694
  hypo
tctggccggggtggacggtgaggggtgggc

SEQ ID NO: 149875 - DNA, 166 bp, Homo sapiens
  chr5:1432517-1432683
  hypo
ctaccatgggggacctggctgcgccatctctcccgttcccgaggacccgactcccacttactcaaagtactcggcagcaggtgtggtcccaaaagtgtcgttgaggcccgagctgtctccactggagtcaccaggatgggcatccgagcagttggggctgttccag

SEQ ID NO: 149876 - DNA, 242 bp, Homo sapiens; identical to SEQ ID NO: 69153
  chr5:1439037-1439279
  hypo

SEQ ID NO: 149877 - DNA, 371 bp, Homo sapiens; identical to SEQ ID NO: 69154
  chr5:1462597-1462968
  hypo

SEQ ID NO: 149878 - DNA, 243 bp, Homo sapiens
  chr5:1463473-1463716
  hypo
acacggggcggcaccggtgccccccgcccggcagggaacctgaccccacggggtccaggccaggcgggggatccgcgtgcgcgccctccgattctcgcacagtaagcgtcggttctgcaacacacttcacaaaggaacaagatacaaacagcccccgaggcccctggaactcgggctgaagacagtgcctgtacagcaggagtgaggagcggagcccagaggtcactcgcaaagaggctcatg

SEQ ID NO: 149879 - DNA, 237 bp, Homo sapiens; identical to SEQ ID NO: 69156
  chr5:1467131-1467368
  hypo

SEQ ID NO: 149880 - DNA, 30 bp, Homo sapiens; identical to SEQ ID NO: 69157
  chr5:1467599-1467629
  hypo

SEQ ID NO: 149881 - DNA, 160 bp, Homo sapiens; identical to SEQ ID NO: 69158
  chr5:1468059-1468219
  hypo

SEQ ID NO: 149882 - DNA, 30 bp, Homo sapiens
  chr5:1475970-1476000
  hypo
ctcccatctccactccgagtggggctgcac

SEQ ID NO: 149883 - DNA, 402 bp, Homo sapiens
  chr5:1476319-1476721
  hypo
gtattggcagcagtccggagcacaggtgctgggcttggaggtgggaatgcattcccctggctcggcgcctactcagctttttgtattgttcagagctgcctgtggtgggggttgagtggagctttgcgggacagagactgccgggcccatttctaccctcggacacatgctttgggagggagaggatgggaacgtgagggaacgggccgcccagctgaatcttcagggtgtcagcggagtgtgaacaaagtggctcggaggtcagagccaggcacactctgatgggcccggccgtggctgtgttcccctctgggctctctggagaggcgagttcccagccatgccccgacctgctgcagcaggagcctgggggtggggccggtggaccgaggctgatgtggc

SEQ ID NO: 149884 - DNA, 30 bp, Homo sapiens; identical to SEQ ID NO: 69160
  chr5:1483853-1483883
  hypo

SEQ ID NO: 149885 - DNA, 96 bp, Homo sapiens; identical to SEQ ID NO: 19210
  chr5:1490330-1490426
  hypo

SEQ ID NO: 149886 - DNA, 73 bp, Homo sapiens; identical to SEQ ID NO: 69162
  chr5:1497220-1497293
  hypo

SEQ ID NO: 149887 - DNA, 30 bp, Homo sapiens; identical to SEQ ID NO: 69163
  chr5:1501094-1501124
  hypo

SEQ ID NO: 149888 - DNA, 30 bp, Homo sapiens
  chr5:1509284-1509314
  hypo
gaaggccgcgaggccgcgtcatcccgcaca

SEQ ID NO: 149889 - DNA, 30 bp, Homo sapiens
  chr5:1509978-1510008
  hypo
cttacctttggagcccgaggcacggcccgc

SEQ ID NO: 149890 - DNA, 146 bp, Homo sapiens
  chr5:1510455-1510601
  hypo
agccgtaccgcctcccgccgctgtcatctctactccaccgtcctcaccagaaccctcggcaccatcacctacccgaggctcttgcctgcgagatgacagtgtgttcagtaattccctttggatttgcaaatcggccccgcagtccc

SEQ ID NO: 149891 - DNA, 31 bp, Homo sapiens; identical to SEQ ID NO: 19211
  chr5:1511331-1511362
  hypo

SEQ ID NO: 149892 - DNA, 203 bp, Homo sapiens; identical to SEQ ID NO: 19212
  chr5:1517523-1517726
  hypo

SEQ ID NO: 149893 - DNA, 30 bp, Homo sapiens; identical to SEQ ID NO: 69166
  chr5:1538509-1538539
  hypo

SEQ ID NO: 149894 - DNA, 209 bp, Homo sapiens; identical to SEQ ID NO: 19213
  chr5:1546877-1547086
  hypo

SEQ ID NO: 149895 - DNA, 30 bp, Homo sapiens
  chr5:1547509-1547539
  hypo
atcgggccctagaaccggaggctgtccact

SEQ ID NO: 149896 - DNA, 272 bp, Homo sapiens; identical to SEQ ID NO: 69168
  chr5:1548855-1549127
  hypo

SEQ ID NO: 149897 - DNA, 58 bp, Homo sapiens; identical to SEQ ID NO: 69169
  chr5:1549946-1550004
  hypo

SEQ ID NO: 149898 - DNA, 115 bp, Homo sapiens; identical to SEQ ID NO: 69170
  chr5:1550653-1550768
  hypo

SEQ ID NO: 149899 - DNA, 296 bp, Homo sapiens
  chr5:1551522-1551818
  hypo
ccacagactgaagaagttcctcgtagctgtaggaaagcaaaacaccaaaaaacaggcacagctcatgaacaggagactcgctgagaggagacctaccgggccacggagacagggcacctgccgtgctggagctggctggggtaccgaagctgcaatgggcacccggcctggagctggctggggtaccggagctgcagcgggtgccccgctggggatggatgcacctctctcccctcgactgaggaagggagcaggtctgaccaggcctagagcccgtgactgctgggcagtcacac

SEQ ID NO: 149900 - DNA, 30 bp, Homo sapiens
  chr5:1552720-1552750
  hypo
caggcagcctttctccgggcttagagcgtc

SEQ ID NO: 149901 - DNA, 342 bp, Homo sapiens
  chr5:1553049-1553391
  hypo
acgatgctgacccagcgacacacagctcccttgtgttcccgctggacgctggcccggcggccgtggcctatagagcaggcccctcggtgcatgaagccagcacagccctggaaatcccgtgcaacaaaaagcctctgttccacccagaagagctctgagcagagagggccccgccgaggcctgccgcgacggactcacagatgggcgcctggagagagcgggctttcattaggtcagcccaggggtggggggagcagacagcactgctgggcttggcttgggaaagaggcgccccgaacccggaggaacttccaagagtttacaggacgctcaggagcctcc

SEQ ID NO: 149902 - DNA, 164 bp, Homo sapiens; identical to SEQ ID NO: 69172
  chr5:1554245-1554409
  hypo

SEQ ID NO: 149903 - DNA, 30 bp, Homo sapiens; identical to SEQ ID NO: 69173
  chr5:1565207-1565237
  hypo

SEQ ID NO: 149904 - DNA, 30 bp, Homo sapiens
  chr5:1576295-1576325
  hypo
tgtagccttccctggcgtgcgtgccccgtg

SEQ ID NO: 149905 - DNA, 31 bp, Homo sapiens; identical to SEQ ID NO: 69174
  chr5:1588247-1588278
  hypo

SEQ ID NO: 149906 - DNA, 30 bp, Homo sapiens
  chr5:1591889-1591919
  hypo
agcactacctgcggcgtcaggaacgatgga

SEQ ID NO: 149907 - DNA, 145 bp, Homo sapiens; identical to SEQ ID NO: 19214
  chr5:1641261-1641406
  hypo

SEQ ID NO: 149908 - DNA, 303 bp, Homo sapiens
  chr5:1702099-1702402
  hypo
tgggccgtctggggccgggtgagtcctgacgcacctaaaccagcccacagcccctcagcgactcccgggcacggctcacactcactcagaatggaaggatgtggctgcttaggggcctggctgccacgctgagagctttctggtcaagccacgctagcattgagctctgaactcaagcctggagcccgatggggagctcgaacccattgtgccgatgcgtcattgaaagttacacgcgtgcccaggactggacaacaggttgaagcgatgtccgatttcttcgatcctaatggtctgtcaaag

SEQ ID NO: 149909 - DNA, 135 bp, Homo sapiens; identical to SEQ ID NO: 19215
  chr5:1704596-1704731
  hypo

SEQ ID NO: 149910 - DNA, 30 bp, Homo sapiens
  chr5:1706800-1706830
  hypo
tttctctgatgctgacgatctctcccctga

SEQ ID NO: 149911 - DNA, 173 bp, Homo sapiens
  chr5:1707498-1707671
  hypo
agagtgatgtgaagacgtgccctcttactgagcaccacctctcaaatggccaagggctcccacgtggtccacttgcaatgtgggaggtcatcctagcagacggcaagggaggggagctggctgcaaaggtggacagtcaggctggaaggcctgagacccgcaagagaccgctc

SEQ ID NO: 149912 - DNA, 576 bp, Homo sapiens; identical to SEQ ID NO: 19216
  chr5:1729753-1730329
  hypo

SEQ ID NO: 149913 - DNA, 113 bp, Homo sapiens
  chr5:1745627-1745740
  hypo
ctggctggccgcacccgcatttccgtgtcgcatgatccatccggtgcctctgcagacagcaggcactaggacagatgggctggagctggcatatcgtgcggataaactgttta

SEQ ID NO: 149914 - DNA, 1298 bp, Homo sapiens
  chr5:1746027-1747325
  hypo
gagccgagcacgccccgtccacttggtgggggcattagcctgtcggaaagctgcctggtccaggggggctttcagcccgcaggacgccgagagctgtctgtaaacctctccatggttgtgtgggcctcgggccgaggcagcctgcagtgaaggaagatgttttggagaagttgttggggggctgaatccctaaacgcaggggacacttcacgcccgtggaatttggaaaaccgaggcagggagcagggaagggtgtgggactcgggaaggggagcagctggtgctcctttaactcgcccggtggcagttcagggtgtttccatctgagatcctacactcagccgggggcccacggtgtagcgggtcgtcagccgggccccgggccttctgggcagcaagggccctggcaggaccctgagggctgggccaaggagggcagttcgctccggggcacctgtcaggggccccacacggctgcttttaggccaggggtggcaaagacgctgctgccgcctgctctgggctcggctcccatggctgtgaaggaccctcgtcactccccgtcgcctgcctgggctgcccggggaccctcctgctgcgtcagcacagagcctggaaccgcggccaaggcaggaagctcccctgtgaaggcaccaagcacggcagacgccctcacatcgccggggcccgtttccctgtggacgggaagtgggaacgtgacgtggacgtgacgtgggaacgtaacgtgacgtgacgtgacgtgacgtggcatggcgcgaggacagcgcggcgggagcggcgcctcagatccagcagggagggagacgaaaggcggatggaagaggggcccccggaccccgcccctcgaggcttgtgtgccgccctggctgcggcgttctgggcgacgggaaacagagtcaggacacagaccagggagggccggggcagagccagggcacctgcgggcgaggacggctgggtgctgggtccccggcgtcagggcgcaatgccgcctgctgggcgtcaccctttcccagggctgctgggacacgtggccgcagctgcttggctcaccacagcggaagtcggtctctctcatcctggagtccgcgcggctgagggcgaggtgtccttccgggggccctgaggggctctgtccccggcctctcccctcggcgcccctgcccggccaagcattgcgccaagcccacccccacctcacgtggcggcctcctccccggcttggggacttctctctgtcacttgcaaaaacacgcgtccttggatttagggccctc

SEQ ID NO: 149915 - DNA, 115 bp, Homo sapiens
  chr5:1752558-1752673
  hypo
gacagagcagggtgtggagtgcgtcttagcgcagaggagtgccactttgctgtgatcatggctcagaggagcttcttctccagggatgctgccttcatgacgctgaccacgccat

SEQ ID NO: 149916 - DNA, 30 bp, Homo sapiens
  chr5:1764223-1764253
  hypo
gaggcagccgctcgtcgcctcttcttcctt

SEQ ID NO: 149917 - DNA, 883 bp, Homo sapiens
  chr5:1769197-1770080
  hypo
cgctggacctcaccacaggaccgcaccgctggaccgcaccgctggaccgcaccgctggaccgcacggcaggaccgtaccgctggacctcaccacaggacctcaccacaggacctcaccgctgggccgcaccgcaggaccgcaccgctggaccgcaccaccgtcctggcaggtgagcgtggagcctggcgctccctggcgacgaccctggtcagacttccaggagcgcccctgcgggtaaagtcacatgtacgctctgttctgggctcagcaaccgagtcgtaggagagacggagtggcctggggccaggtcctgagtccgaggagcagctgtctgggctctcccttggccacgaagcagctcacaccgagggcaggagcagaggcctcccggccccgggcggaaccccgcaggagggcctccctgaggccaacgtctctggcgccacctcccgcagtgttcgctggagcccgcggccatgcagggccacacggacccgggggctgcgcagaactggggccctcgtgcaccgtgggtgggaatggaacgtggcgccgctgctgtggaaaaccaaagggcaactcctcagaaagttaacacagaatctctatagggcccagcaatcccacctccaggcctatccacaaaagaatcgaaaacaggggctccaagaagtacgagtacacacatgcgcatagaaaccgcatgcgcagcagccgagaggcagaagcagcccagacgtccccttgacggctgagtgcataatggggcctccatagaagggaatatgtttccgccacagcaagggacgccgcactgacacggggaaccgcacgggtgaacctcgagacaccgtgctcagtggggttcgccagacacagaag

SEQ ID NO: 149918 - DNA, 328 bp, Homo sapiens; identical to SEQ ID NO: 19218
  chr5:1786633-1786961
  hypo

SEQ ID NO: 149919 - DNA, 293 bp, Homo sapiens
  chr5:1787310-1787603
  hypo
gcaaagatttacaggcgcccaggctgctgggcaggctgaggctgggggaagcagagctcctgggcaggtgagtgtgagctgggcggtgcctcccggccaggcctgctctgcctgcattccccacgcagcccatggctttcccaggtgaggccgaggtaaacacaaggaaactcgctgtgcggcagtttcctttgccacgcactcttccatcagagatggcctccagcctacccccagccacctcccatcttccatatccctgtcctggagggctgcctcgccgcccacatctg

SEQ ID NO: 149920 - DNA, 215 bp, Homo sapiens
  chr5:1794462-1794677
  hypo
aaggggtgagcaagcaggaggcgggcctcctctcatgagcaggcacggaggtgctggtctgccttcgctggccgagtgcccgctgcaggctgggctggtgggagacgtacggacacaaacacggctgggaagcaggctctgcctccacgcagcatgctcatctgtccgggctgcaataacaaaattccaccaacggcttacagacaagaaactgg

SEQ ID NO: 149921 - DNA, 368 bp, Homo sapiens
  chr5:1795100-1795468
  hypo
gatcacttccaccatcgctgggggaagaacgaatgcaccgcgtggagtgcttccgccacaaagcagcacatcacctctgctcggagaccctgctggtgaccctcagccagcctcataggccacagcaggtctcacagccatgcccactcgcagggaggcagggaagccccagcccccaccggtccggcacaggaaggagacctggaccctgggagtgccggtctcgcctcccactctcctgggtgagtgacagcgacgctgccaggtgggtggtccatcagttagacctggtccgtgagtagcctcctaggtggatacaaacatgacagcgtcccacagagcacctcgcctccttctggaaatgcata

SEQ ID NO: 149922 - DNA, 30 bp, Homo sapiens; identical to SEQ ID NO: 69186
  chr5:1804560-1804590
  hypo

SEQ ID NO: 149923 - DNA, 227 bp, Homo sapiens; identical to SEQ ID NO: 69187
  chr5:1808310-1808537
  hypo

SEQ ID NO: 149924 - DNA, 903 bp, Homo sapiens
  chr5:1809066-1809969
  hypo
ggtattctacagtgtcgatgatccagctggtggacttttcccttctgcgttggttttgatgctgtgtcacagaatcacatattttatgttttatctttaatagatgtaatctcagtttgacacaataggactttgactcctaaagatttaaacctacatatctttatgcccaatcatttgatcatcaagaggtcaatggaaagagtgtttcctattttttacattagtgacgggcgagggactcattttacagaggttggacacttcactgtgtatgatgtgccgtgtgcttaacaagagatggcgtgcgggctgctgtgacggttctcccttgattccctcgtgaagtgcagcagcgctcttcagtttttctcacctttccccaggtgaaagcaggtgagaatggagccttgagtctgaacccagagcggggctttgtgttgtggctgggtgtgttcactgccggagcttggccgtgtgaacccggagccgggctctgtgtcgtggctgggtgtgttcactgctggttctttgtattcctgcggttgcactgagctcctggagccagacgtttgctggtgatgggcggtcagggtcacccttgagctgcgcacactaaatgacgggagggcatcccgcgtcagtcgccagtgtcgaggcgtcagcagccctccctgcagggaggtggccggtctctttgactgccgtgatcggggcctggcagtttgttagtgcggcctttgtgacacgttgtcacttaggcagacaccatattatttacaccataaggcttaatttgtatggttagttgcatcgcctgcagcaggggtgagcagaacatcgctcactccagagccctctgtaaggcgctgcgacaaggcgagccgccgggccggcagcaga

SEQ ID NO: 149925 - DNA, 117 bp, Homo sapiens; identical to SEQ ID NO: 69190
  chr5:1813757-1813874
  hypo

SEQ ID NO: 149926 - DNA, 165 bp, Homo sapiens
  chr5:1814739-1814904
  hypo
gggcctacatagagccgcctgtccgaaaaccccctttcaactgtgaagtggtgggcggcatgtttctcttctcggacgcccaagcgtctttcctctctgggcccttctcggtttggtcatcatctcagctcaggctgccacacacagcaccgcaggctggggtcg

SEQ ID NO: 149927 - DNA, 186 bp, Homo sapiens; identical to SEQ ID NO: 19220
  chr5:1815266-1815452
  hypo

SEQ ID NO: 149928 - DNA, 30 bp, Homo sapiens; identical to SEQ ID NO: 69192
  chr5:1816078-1816108
  hypo

SEQ ID NO: 149929 - DNA, 99 bp, Homo sapiens; identical to SEQ ID NO: 69193
  chr5:1826982-1827081
  hypo

SEQ ID NO: 149930 - DNA, 30 bp, Homo sapiens; identical to SEQ ID NO: 69194
  chr5:1827692-1827722
  hypo

SEQ ID NO: 149931 - DNA, 31 bp, Homo sapiens; identical to SEQ ID NO: 69195
  chr5:1840310-1840341
  hypo

SEQ ID NO: 149932 - DNA, 174 bp, Homo sapiens; identical to SEQ ID NO: 69196
  chr5:1858631-1858805
  hypo

SEQ ID NO: 149933 - DNA, 54 bp, Homo sapiens
  chr5:1864430-1864484
  hypo
atcgacgactcgccccgggcccctgcccttctgagatttcgttttcccatcgaa

SEQ ID NO: 149934 - DNA, 346 bp, Homo sapiens
  chr5:1865340-1865686
  hypo
gggtcctgagagccgcgccatgtgtaaacatgcgccaggctccagatgatcgcagtgataaccgcgtgaccactccgggatcacgtgtgagtgcaccttctccacaggtcccaggaccacccatcggatcagggatcactccagactcctctcctagaggcgctgccaccctggaagcacatctggcactcagatcatgttcagtcagaaaaacgaagccaccgcgattatgattatgggaacatagggtttacacgggggagttgctggggagggcatttcaggacagccttgatcaaagggctggggagatggtccaggcgatgccaaccggaagccccagagg

SEQ ID NO: 149935 - DNA, 1721 bp, Homo sapiens; identical to SEQ ID NO: 111054
  chr5:1874585-1876306
  hypo

SEQ ID NO: 149936 - DNA, 283 bp, Homo sapiens; identical to SEQ ID NO: 3761
  chr5:1876637-1876920
  hypo

SEQ ID NO: 149937 - DNA, 502 bp, Homo sapiens; identical to SEQ ID NO: 41268
  chr5:1882419-1882921
  hypo

SEQ ID NO: 149938 - DNA, 485 bp, Homo sapiens; identical to SEQ ID NO: 3767
  chr5:1883131-1883616
  hypo

SEQ ID NO: 149939 - DNA, 937 bp, Homo sapiens; identical to SEQ ID NO: 111066
  chr5:1883879-1884816
  hypo

SEQ ID NO: 149940 - DNA, 462 bp, Homo sapiens; identical to SEQ ID NO: 41273
  chr5:1886379-1886841
  hypo

SEQ ID NO: 149941 - DNA, 148 bp, Homo sapiens; identical to SEQ ID NO: 41274
  chr5:1886997-1887145
  hypo

SEQ ID NO: 149942 - DNA, 35 bp, Homo sapiens; identical to SEQ ID NO: 3770
  chr5:1887546-1887581
  hypo

SEQ ID NO: 149943 - DNA, 280 bp, Homo sapiens; identical to SEQ ID NO: 111072
  chr5:1887655-1887935
  hypo

SEQ ID NO: 149944 - DNA, 43 bp, Homo sapiens; identical to SEQ ID NO: 69206
  chr5:1900862-1900905
  hypo

SEQ ID NO: 149945 - DNA, 370 bp, Homo sapiens
  chr5:1910373-1910743
  hypo
gggatagagtcttgggccacacggctgctcatgtgccgacatgccatgtcacccaggtggggatccggtcattaccacggagtggtcttgggcctctgtggaggggccctgcacctgcccaggccggcgtctgactccacatcgcgtgctctgtgggaagagcccagtggagccctgtacctgcccaggccggtgtctgactccagatcgcatgctctgtgggaagagcccagccagccacgcacaggctcctgccttgaaatatctgcgccttccgaaggagaggagaggatccaccactgggggggtcagagcccagcgttgtctctgcacgtcttctgtatacgctggaaggcggcctgtgctgggt

SEQ ID NO: 149946 - DNA, 283 bp, Homo sapiens
  chr5:1911954-1912237
  hypo
ggcagggagtgaggaggtccacggtgtgctctcggggctggtacgagaatccgcacatggggcggtggggctcatgttacattgggtgcatcgcgtaacctcattttaacagctgggcttcaccacgtcgtggcacgtcagagctccgtgccttctcgctgccaagggatgtccacgtgtggccgggctcacggcgcgtctcactcaccaggcgaggtcacttgggttgtttgtgcttcttggctattgtgaatcgtgctgcgaggaacatttgtgtacaagt

SEQ ID NO: 149947 - DNA, 43 bp, Homo sapiens; identical to SEQ ID NO: 69209
  chr5:1914051-1914094
  hypo

SEQ ID NO: 149948 - DNA, 331 bp, Homo sapiens; identical to SEQ ID NO: 69210
  chr5:1922812-1923143
  hypo

SEQ ID NO: 149949 - DNA, 155 bp, Homo sapiens; identical to SEQ ID NO: 69211
  chr5:1923519-1923674
  hypo

SEQ ID NO: 149950 - DNA, 96 bp, Homo sapiens
  chr5:1924124-1924220
  hypo
ccctcagccaacgatcgctttcctctgacacgctctgtctgctccgctcggcacagcggatttgcctgaagcctcagggctcgccctgcagcctgg

SEQ ID NO: 149951 - DNA, 184 bp, Homo sapiens; identical to SEQ ID NO: 111073
  chr5:1930820-1931004
  hypo

SEQ ID NO: 149952 - DNA, 222 bp, Homo sapiens; identical to SEQ ID NO: 111074
  chr5:1931064-1931286
  hypo

SEQ ID NO: 149953 - DNA, 132 bp, Homo sapiens; identical to SEQ ID NO: 3774
  chr5:1931444-1931576
  hypo

SEQ ID NO: 149954 - DNA, 382 bp, Homo sapiens; identical to SEQ ID NO: 111076
  chr5:1931617-1931999
  hypo

SEQ ID NO: 149955 - DNA, 30 bp, Homo sapiens
  chr5:1933171-1933201
  hypo
tggtgcgggtatcagcgcagtttacaatta

SEQ ID NO: 149956 - DNA, 394 bp, Homo sapiens
  chr5:1950777-1951171
  hypo
ccctcggcagcttcacgacctcaccaagtgcccgccgctctcacgagagaggtggttatggttgcgcattgaatatgcttgggagaggcaaagatggatggcgtagtctctaccctcacacccagtgctgagcgcgagtcgtccgctgtgtgtgcatcatctgctgtgcgtgtgtcatctgctgtgcatgcctgcgtcatctgctgtgtatgtgtcatctgttgtgcatgcgtgtgtcgtctgctgtgggcgcgtgagtcatctgctctgtgtgcttgtgccgtctgctgtgcctgcgtcatcgtctgctgtgcgtgtgtcatctgtgcgtgtgtcatctgctgtgcgtgagtcatctgctgtgcgtgtgtcatctgtgcgtgtgtcatctgct

SEQ ID NO: 149957 - DNA, 471 bp, Homo sapiens
  chr5:1951385-1951856
  hypo
cgtctgctgtgcgtgcgccgtctgctgtgcgtgagtcgtctgctgtgcgtgtgccgtctgctgtgcgtgagtcgtctgctgtgcgtgtgtcgtttgctgtgcgtgtgccgtctgctgtgcgtgtgtcatcttctgtgtgtgcgtgccgtctgctgtgcatgtgtgcattgtccattgtctgctgtgcatgcatcgtctgctctgcgtgcgtgcgtcatctgctgtgcgtgtgtcatctgctgtgcgtgtgccatctgctgcgggtgcatcatctgctgtgcgtgcgtgtgccatctgtgcctgtgtgcatcgtctgctgtgtgtgtgttgtctgctgtgcatgcatgcgccgtctgctgtgcgtgcatgtgttgtctgttgtgcatgtgtcatctgctgtgcatgcatgcattgtcttctatgggcacaggcgtcatctgctatgggtgtgtgcgtcgtctgctgtgggcc

SEQ ID NO: 149958 - DNA, 30 bp, Homo sapiens
  chr5:1973758-1973788
  hypo
tgtaacatctgatcccggtccagctcccgc

SEQ ID NO: 149959 - DNA, 66 bp, Homo sapiens; identical to SEQ ID NO: 69217
  chr5:2006865-2006931
  hypo

SEQ ID NO: 149960 - DNA, 320 bp, Homo sapiens
  chr5:2007526-2007846
  hypo
gtctcttgtttagaacgaggaatgacaatgaatgttggagagcctctcccgcagatgggtggcacggcctcagcctgagggaaacgtgttcccatcccgctccgggggcaagtccccgccggctcggaccccagggaggtggaggcaggcaccgtccccttgtccgggtgaccctgtgtggcctccctgctaagcccgcagcctgggctggcaacagcctcgatcgggggccgggggaagcggccgagatgtggctcggaggtggcagctggcaggcggggtcctccagtgacagctgatgtgtcgcggcctgagcctcc

SEQ ID NO: 149961 - DNA, 30 bp, Homo sapiens
  chr5:2018410-2018440
  hypo
tttcagagcagactccgaggctcgggtcca

SEQ ID NO: 149962 - DNA, 444 bp, Homo sapiens; identical to SEQ ID NO: 41281
  chr5:2038418-2038862
  hypo

SEQ ID NO: 149963 - DNA, 102 bp, Homo sapiens
  chr5:2041328-2041430
  hypo
ccacttttgtggtggcgcttagtgttggtgacggtgcagcggcacagcccgtccgtgggtggctggtggaggtgtcggtcagctctgcgtccgtggaaagca

SEQ ID NO: 149964 - DNA, 329 bp, Homo sapiens; identical to SEQ ID NO: 69220
  chr5:2052997-2053326
  hypo

SEQ ID NO: 149965 - DNA, 32 bp, Homo sapiens
  chr5:2054409-2054441
  hypo
tttgggaggccgaggcgggcggatcacgaggt

SEQ ID NO: 149966 - DNA, 31 bp, Homo sapiens; identical to SEQ ID NO: 19237
  chr5:2094834-2094865
  hypo

SEQ ID NO: 149967 - DNA, 625 bp, Homo sapiens
  chr5:2111863-2112488
  hypo
agccaccgctggggtcggggtccagtcctggggaacgcgggtccctggagcacagcagggcctgaccgcctccgcgccgccctccccgcatttcctctcctcctccccaagcccatggctcagaacaccgagacctgcctcgccaagaaacgcccatttatttccttcctatttatttattttgcaaaagccgccttttgaaagccggagtgcagtgcggactggctgaggccggggcccaggcgcgcgcctccttcctgcaggcggcccggggcatcgatcgcgcggggcgtaatgaaccctaataacagctctatcaccgcccgcccgccaattggcccgggtgccctccaaattagccacaaagaagccagtctgtcaatattaattccgccgcggagattacttgttgtgggagaacaaaggtgttctggcttgagctgaacaacttaactccttgtctcataaaatttaagctgctattgatcgcctccttgcattgtgtgaggattaaacacgtgcgcgtgcacatccaggcacacgcgcgcacacactcggggcgcccggccccgctcaggcagccgccccacctcctcgcctacccggaatcattcagcaacgtgga

SEQ ID NO: 149968 - DNA, 384 bp, Homo sapiens
  chr5:2136840-2137224
  hypo
gtggacagaggtgaccgggtccacgtgcgtgcctggacagaggtgaccaggcccgcgtgtgtgcgtgggtagaggtgactgggcccgtgtgtgtgcgtgggcagaagtgactgggcgtgcgtgtgtggacagaagtgaccgggcgcgcctgtgtgggcgggcagaggtgactgggccagcatgcgtgggtgggcagaggtgaccgggcatgcgtgcgtgggcgggcagaggtgaccgggcgtgcgtgggtggacagaggtgactaggcattgcttgcgtgggtgggcagaggtgaccgggcttgcgtgcgtgggtggacagaggtgaccaggcgtgcgtgcgtgggcagaggtgactgggcattgcgtgcgtgggtggacagac

SEQ ID NO: 149969 - DNA, 30 bp, Homo sapiens
  chr5:2137609-2137639
  hypo
gcccaagctcggatccggcctgctgggtca

SEQ ID NO: 149970 - DNA, 30 bp, Homo sapiens
  chr5:2137990-2138020
  hypo
atgctgacaaccagccgcgttactacgcca

SEQ ID NO: 149971 - DNA, 166 bp, Homo sapiens; identical to SEQ ID NO: 19240
  chr5:2155743-2155909
  hypo

SEQ ID NO: 149972 - DNA, 30 bp, Homo sapiens
  chr5:2156144-2156174
  hypo
agggtgtcgcaggggcgcactccctccagc

SEQ ID NO: 149973 - DNA, 30 bp, Homo sapiens; identical to SEQ ID NO: 19241
  chr5:2180403-2180433
  hypo

SEQ ID NO: 149974 - DNA, 155 bp, Homo sapiens
  chr5:2181761-2181916
  hypo
cacaggctgcccctgcgcgcttgctggttgtgtacgtctccggcatcttctacacgcccagggtctgccgcgtgcagcaaacgcaggaaagaaggtaggctctgccttgacctggtgtccaccaccccagggcctggcaccgcagggggtattgc

SEQ ID NO: 149975 - DNA, 30 bp, Homo sapiens
  chr5:2186988-2187018
  hypo
gagcaagaagagccgcgcttctccctggag

SEQ ID NO: 149976 - DNA, 30 bp, Homo sapiens
  chr5:2187459-2187489
  hypo
ttcccgcttgcgtcacgggaccatgcacca

SEQ ID NO: 149977 - DNA, 28 bp, Homo sapiens
  chr5:2221989-2222017
  hypo
aaaatgttatatttggccaggcggggtg

SEQ ID NO: 149978 - DNA, 30 bp, Homo sapiens
  chr5:2223683-2223713
  hypo
gctttccagcactcacgagtcacgtgtgcc

SEQ ID NO: 149979 - DNA, 120 bp, Homo sapiens
  chr5:2224966-2225086
  hypo
gggtggacagcacgccgcgtgcactgcccagggcgtgaggaccacgcacacctgtctgggggatgtggagacctggcgatcaggagcctggaagatgcagaaagtcgctcatgcgctggc

SEQ ID NO: 149980 - DNA, 260 bp, Homo sapiens
  chr5:2225363-2225623
  hypo
gctgaacccagaccccgcaggtgcacagcaagggagccgagtttcctccagcgcttgaaaaaaaagtgtttactttgccagcggaccttgtcgcaggagtggaggaacggcctggaagcgcacttgtgatctcagcaaactgctgaaatctgtactgattgaggaaaagtatccctgttaaaggacgcgtgttcatgtatgaaagaagtggcttgaaatggaagatcgttcttgttcccgtgtctataatttaacatctg

SEQ ID NO: 149981 - DNA, 464 bp, Homo sapiens
  chr5:2261210-2261674
  hypo
ggaaagcctgctctccgggtggctctgtggctgagacgggcaacacctctcaaatggaaacacctgacgttgcaccagatctcagatgcgaagggcgggggtccctccagtgaggactcccaggggaccgagttttccacctgcgttctagatgttctccgtgaaagcatcacgtggtgtcccggtgaggggcctggctgagtgggcatcggcttgagcgcctggagcttgctggagaagagactcatgggcaccaccgggcccaccatgcagacttcagggaaagagagcagccggaatgcgttttaaatcctgcctgagagcgtggatgctacaggactcctggcgtggggaacccggcatctgtgtatgtgcccgtgggcatgtggtcagcgaggcaaccctcacaggaccacgaggccctggtcggacacaggctgcccgcagccccttcccacaggagc

SEQ ID NO: 149982 - DNA, 30 bp, Homo sapiens
  chr5:2275509-2275539
  hypo
tgcagaacgaagcatcgggggcaccagccc

SEQ ID NO: 149983 - DNA, 46 bp, Homo sapiens
  chr5:2302692-2302738
  hypo
cattttcttctaaaaatggaccgccgtaattatatgttaaatatga

SEQ ID NO: 149984 - DNA, 30 bp, Homo sapiens
  chr5:2335788-2335818
  hypo
gagaaactgaacatccgttcacataatgac

SEQ ID NO: 149985 - DNA, 326 bp, Homo sapiens
  chr5:2338564-2338890
  hypo
cgtaggagagggcaccgcagacaaaaagaaaaaaaaaaaagaatgagcagacgcagctggagcgtgttaccaccatgcccggttctgtcaggtggtgcagagttagaataaacatggggctttacaatggcacatttacattttagaaaaccgtttcacatcgaaaatagcatctaagaaggtcgtggcacctacgccgctttcccatataactgctaaggttctggactgtctgcatgttttaatattcagcacctcctgagacccgagccccgtgtcgggattgctaggaaatggcagcgagcccaggccgcagcctgggctgg

SEQ ID NO: 149986 - DNA, 30 bp, Homo sapiens
  chr5:2339140-2339170
  hypo
gacagtggcaccaagcgcgtcatgtggccc

SEQ ID NO: 149987 - DNA, 258 bp, Homo sapiens; identical to SEQ ID NO: 69230
  chr5:2369536-2369794
  hypo

SEQ ID NO: 149988 - DNA, 30 bp, Homo sapiens
  chr5:2371095-2371125
  hypo
gtggtccacacacatcggacaaaggacaaa

SEQ ID NO: 149989 - DNA, 435 bp, Homo sapiens
  chr5:2371455-2371890
  hypo
gaagctccgggactgcgctgagccatggtgacctgctatgccaggttccttttctgcacagcgtcgctccctctgcttggcttggtcgccaccagtttactcctcctggaggtgactgggcgagagggtctcactggactctggagccacatgccgaacaccggcttctttccccgcagggaggccgagtttcctgttcctcgaactctaaatctcctctccaccgcgagcttggatgtgcagttgagtttcccactttcacctcggcagagaccacctgtgcacacgcggccttctagccaacccttccccagcaagcgtgacctccaaccttccccaggccccgcctatccctccccatcagtgatggtgcgtttggctgttagctaggagcccgattacgtaatttaccatccaggtcggacgttgggagtg

SEQ ID NO: 149990 - DNA, 30 bp, Homo sapiens
  chr5:2372232-2372262
  hypo
atcggatctgcaaatcgtgtctgccgctga

SEQ ID NO: 149991 - DNA, 128 bp, Homo sapiens; identical to SEQ ID NO: 69231
  chr5:2374869-2374997
  hypo

SEQ ID NO: 149992 - DNA, 233 bp, Homo sapiens
  chr5:2412070-2412303
  hypo
gggcctcgctctggccggattcggccattctcatggaaaccaggggcccttcccagggcgcctcctcacttcatctccaagctgagaggcaattagtaggagtccgtctcagagtttctggagcctcagccatgatggcggccacctcatccccggaaaggacgtaccgggagcacagtcagaagtgaggagcagccgtggtaacaaatctcatctgtcgccctcatctgctg

SEQ ID NO: 149993 - DNA, 56 bp, Homo sapiens; identical to SEQ ID NO: 69232
  chr5:2495119-2495175
  hypo

SEQ ID NO: 149994 - DNA, 30 bp, Homo sapiens
  chr5:2523662-2523692
  hypo
tctggaatgaacacccgacagcatggaagg

SEQ ID NO: 149995 - DNA, 170 bp, Homo sapiens
  chr5:2524942-2525112
  hypo
ggccagtagccctgccgggatcatccgggtggaaagtcctcagtgagagtgcagcgggcagctctcgattgtttaagcctggtttcctctcactaggatcctggagatgggcttacctagaaacccaggcactggagccatggctcgcactgtcccggtctcacattagc

SEQ ID NO: 149996 - DNA, 214 bp, Homo sapiens; identical to SEQ ID NO: 19243
  chr5:2541475-2541689
  hypo

SEQ ID NO: 149997 - DNA, 49 bp, Homo sapiens; identical to SEQ ID NO: 69234
  chr5:2542211-2542260
  hypo

SEQ ID NO: 149998 - DNA, 30 bp, Homo sapiens; identical to SEQ ID NO: 41282
  chr5:2544169-2544199
  hypo

SEQ ID NO: 149999 - DNA, 237 bp, Homo sapiens
  chr5:2547094-2547331
  hypo
gaaaatttcccaggtcttcctcggtgttagtgcccaccagcctccccggtcaccctgttagcccagactttaattagctctggcgtcctcttcataatgataaatgcagagatgatgaatcgaaatgcaaatgacggtgaagtgcctcagccatcagcgctgaatatcattaataccttcccactgttaaatcgatcactgtcatccccggatgccggcgtgcggcggggcacatgg

SEQ ID NO: 150000 - DNA, 164 bp, Homo sapiens
  chr5:2557177-2557341
  hypo
gccagtccagtgtagcgtctatcggccttagacgacctggagccagggattactgaggatgaaaacactctgcggaaatatgcaaaacctatcacctgatgcggaggccaccaggctgtgtacggagtgtgagtaaaggccgtcatcctcgagccgctgattgg

SEQ ID NO: 150001 - DNA, 30 bp, Homo sapiens; identical to SEQ ID NO: 69238
  chr5:2557845-2557875
  hypo

SEQ ID NO: 150002 - DNA, 69 bp, Homo sapiens
  chr5:2561182-2561251
  hypo
tgcaggccccaccaccgtgcgtttccttgtacgatagacaccaaacgtcaaccacgcctacttatgagt

SEQ ID NO: 150003 - DNA, 46 bp, Homo sapiens
  chr5:2564557-2564603
  hypo
ctggcggtaatgcagggagcacggcggctggcggtaacgcagggag

SEQ ID NO: 150004 - DNA, 114 bp, Homo sapiens
  chr5:2579040-2579154
  hypo
cctcaggcatccaagcggtccctgttcttggggaaggggcgcctagccccatcagcggctctgtgattttaacgggctcttctttctttctaagacgcacgcctgggccacctg

SEQ ID NO: 150005 - DNA, 119 bp, Homo sapiens
  chr5:2634149-2634268
  hypo
tttcctccttccccgcggtgcccctatctgctcgagtcagctgtgtgccagcgagaaggagacgcactcggagaaggcgtccaagcctctgtgagcagcgcccacgcctctacttgtgg

SEQ ID NO: 150006 - DNA, 301 bp, Homo sapiens; identical to SEQ ID NO: 69240
  chr5:2668650-2668951
  hypo

SEQ ID NO: 150007 - DNA, 87 bp, Homo sapiens; identical to SEQ ID NO: 69241
  chr5:2669178-2669265
  hypo

SEQ ID NO: 150008 - DNA, 201 bp, Homo sapiens; identical to SEQ ID NO: 69242
  chr5:2708349-2708550
  hypo

SEQ ID NO: 150009 - DNA, 127 bp, Homo sapiens; identical to SEQ ID NO: 69243
  chr5:2708902-2709029
  hypo

SEQ ID NO: 150010 - DNA, 30 bp, Homo sapiens
  chr5:2717225-2717255
  hypo
gaccttgttcttcctcgcaccactcaagag

SEQ ID NO: 150011 - DNA, 110 bp, Homo sapiens; identical to SEQ ID NO: 69244
  chr5:2808977-2809087
  hypo

SEQ ID NO: 150012 - DNA, 30 bp, Homo sapiens
  chr5:2819747-2819777
  hypo
agaggaaggtgaatccgacgaggaccaggc

SEQ ID NO: 150013 - DNA, 120 bp, Homo sapiens
  chr5:2823298-2823418
  hypo
cagggaagggaggatcgaggcaagccaggggcctgctgggggcaggggccttccatgatacagctggaggctgcacaccttaaaatttgccgactttgaaagcatcgcgcctgggcttgc

SEQ ID NO: 150014 - DNA, 187 bp, Homo sapiens
  chr5:2831542-2831729
  hypo
gcatcttacccaccacggcccatggaaccctcactcagtgcagacaccatctgccccggcctgccatacactgcctaagtgtgcggtgggtgggagggaggagggatagatggccgaggcctgaggaggcccgcgggaggagaggcccaaactcaggggctgcaggtgcagacgtggcaggggaggc

SEQ ID NO: 150015 - DNA, 196 bp, Homo sapiens
  chr5:2889717-2889913
  hypo
tggaaagactctgagcgggcagggaagagcttccaggaaaaagtgaggagacctcagctgaaacaagatttgaaagcctctgttccttttgccatcctgcggactccgagacgcctcttactccggtgacgccgtatccaggagtactgagcaggctgctgaggttccgtcaggtaagtcacgattctttattgaa

SEQ ID NO: 150016 - DNA, 30 bp, Homo sapiens; identical to SEQ ID NO: 69245
  chr5:2890263-2890293
  hypo

SEQ ID NO: 150017 - DNA, 271 bp, Homo sapiens
  chr5:2890698-2890969
  hypo
gcacagcaagtaacttagagccgataaacagccggcagcgcattatggaacataaaatttaaaacgctttctgggcctcagcttcctaaagcttctttgattgtcaaacgtcgttactaagtccaagtttaagacatctgccgctctaccttacacaccacgcacaggccgcaaggccaccgggaaatgatgaaaacatgaatgcgggcagcattgctgtggtgttaaccctacctttgaaaatacttacgtttgtgatctgtaattgatt

SEQ ID NO: 150018 - DNA, 30 bp, Homo sapiens; identical to SEQ ID NO: 69247
  chr5:2894642-2894672
  hypo

SEQ ID NO: 150019 - DNA, 390 bp, Homo sapiens; identical to SEQ ID NO: 69248
  chr5:2896878-2897268
  hypo

SEQ ID NO: 150020 - DNA, 53 bp, Homo sapiens; identical to SEQ ID NO: 69249
  chr5:2903648-2903701
  hypo

SEQ ID NO: 150021 - DNA, 116 bp, Homo sapiens; identical to SEQ ID NO: 69250
  chr5:2904032-2904148
  hypo

SEQ ID NO: 150022 - DNA, 33 bp, Homo sapiens
  chr5:2990178-2990211
  hypo
gccccaacggggatgcgtcgttgccgtggatgc

SEQ ID NO: 150023 - DNA, 326 bp, Homo sapiens
  chr5:3027110-3027436
  hypo
cttctagcccagaatcgaagggaagcaggtgatccactggactcctagggactgcacgctccagcccgcgccagggagcccctcaccagcttgtgtcggtctctgccatgcctatggctggttctccttcatcattgtcaccccagccttcatcctgccccggattcagagccccttgttggtcttgcatggcggggaggagcccccaagacagcgtgtgttgaaggtcaccacgtctcagtccaccggtgaggggcagtgcccccagcgacatgcggtgttttaagcaggtctgacccctggccgcctccacatgtgcacaccca

SEQ ID NO: 150024 - DNA, 167 bp, Homo sapiens
  chr5:3028122-3028289
  hypo
aggtgtggtctcctctctgtgcggagcctcctcaccttgctctgggctcgtggccgtggctcttctctccatctggagccgcctcgcctccctgcgcactcgtggccatggctctcctctttgtgcggagccgcctcaccttgctgtgcgctcgtggccgtggctct

SEQ ID NO: 150025 - DNA, 46 bp, Homo sapiens
  chr5:3029915-3029961
  hypo
aaaaggaatcctgcccggcgcggtggctcacacctgtaatcccagc

SEQ ID NO: 150026 - DNA, 30 bp, Homo sapiens
  chr5:3030668-3030698
  hypo
tcccgatccccaagacgatggtgctagtcg

SEQ ID NO: 150027 - DNA, 85 bp, Homo sapiens; identical to SEQ ID NO: 69254
  chr5:3031837-3031922
  hypo

SEQ ID NO: 150028 - DNA, 145 bp, Homo sapiens
  chr5:3031981-3032126
  hypo
agagggacccgcatgtgcactgcggcctttgggtgacaatcacccgtcactgtggctcatcccttgtgaccaagctgccgcacagagcagggtgttgatagaggggaggctctgcttgtgtggcgatgggggtgtgtgggagctc

SEQ ID NO: 150029 - DNA, 83 bp, Homo sapiens; identical to SEQ ID NO: 69256
  chr5:3042021-3042104
  hypo

SEQ ID NO: 150030 - DNA, 137 bp, Homo sapiens; identical to SEQ ID NO: 69257
  chr5:3051521-3051658
  hypo

SEQ ID NO: 150031 - DNA, 210 bp, Homo sapiens
  chr5:3078555-3078765
  hypo
tccatccacaggtgactccaccgcgtgccaggagggatccacaggggactccgccgcatgtccggagggatccacaggggactccgccgcgtgtccggagggatccacaggggactccgccgcgtgtccggagggatccacaggggactccgccgcgtgtctggagggatccacaggggactccgccgcgtgtctggagggatccacagg

SEQ ID NO: 150032 - DNA, 30 bp, Homo sapiens
  chr5:3092302-3092332
  hypo
tcccacactgggaagcggacagtgttgggt

SEQ ID NO: 150033 - DNA, 30 bp, Homo sapiens
  chr5:3092796-3092826
  hypo
gatttctggggcttgcgggttcagcgttct

SEQ ID NO: 150034 - DNA, 33 bp, Homo sapiens; identical to SEQ ID NO: 69258
  chr5:3098403-3098436
  hypo

SEQ ID NO: 150035 - DNA, 93 bp, Homo sapiens; identical to SEQ ID NO: 69259
  chr5:3114548-3114641
  hypo

SEQ ID NO: 150036 - DNA, 191 bp, Homo sapiens
  chr5:3143536-3143727
  hypo
caacatgcgtccttccgtgaccagcttattttacgtggcatcatgtcttcaaggtgcaaacatgttgtagcgtgtgtcagaattgtcttcatttctgcgactgagtaatgttccatatggagacgcctcctttggtttatccattcatccatccatgaacagttgggctgcttccccgtcttggctatggt

SEQ ID NO: 150037 - DNA, 43 bp, Homo sapiens
  chr5:3152256-3152299
  hypo
tggagggccttttacagacagcgtgaggagaagaaaaactgga

SEQ ID NO: 150038 - DNA, 360 bp, Homo sapiens; identical to SEQ ID NO: 69260
  chr5:3155669-3156029
  hypo

SEQ ID NO: 150039 - DNA, 264 bp, Homo sapiens
  chr5:3188086-3188350
  hypo
tagcactgaaagccgcgtctgtctgggcgtcgcaggagcggtctaaagtgtttactctgcttcttctcagaaatggctttgatagcgccaataaccgctacaaccggaagcgaaatgaaagggggggggacttttttgaaatgatgtttcggtgccgccatgcacttttcatgcgtcctggcaggttcacactgtgctcccaggctgcagctggctcactgcggccggagcctgccaggcgggttcccgcgggcgcagccgagg

SEQ ID NO: 150040 - DNA, 56 bp, Homo sapiens; identical to SEQ ID NO: 69261
  chr5:3203777-3203833
  hypo

SEQ ID NO: 150041 - DNA, 115 bp, Homo sapiens; identical to SEQ ID NO: 69262
  chr5:3212679-3212794
  hypo

SEQ ID NO: 150042 - DNA, 113 bp, Homo sapiens
  chr5:3213160-3213273
  hypo
ccgggaaagctggttcggcgggtcggtcacaccttcctcttctttttagtgttcgttcctggaagaatcatggaagaaatggtcttggtggcttcctgcgccctcctcagcgc

SEQ ID NO: 150043 - DNA, 338 bp, Homo sapiens
  chr5:3220999-3221337
  hypo
gcagatgcaggccggcgcactgtgctcctggtcctggcgcgagcatctcctttccagcctgcccggcgctagggctccatggaaccccaagctctctggcttcagaactgctccaggcaaatgcgtggcatcattcataaggaggcagcgtcttgcggtgctgagaccgagcccctggctgcttccagatgtcacttccaatgccagcccttccgcatgatagctctgtcaccaggagcgctcgggcgccttcactctgcttgcgcctctaaagcacacctgccccgcccacctggatctgctgtcaatagctgtcgggcgtgcggtgtgcaatttgg

SEQ ID NO: 150044 - DNA, 30 bp, Homo sapiens
  chr5:3276856-3276886
  hypo
ggtgcagtgcagaagcgggggtgggaccca

SEQ ID NO: 150045 - DNA, 359 bp, Homo sapiens; identical to SEQ ID NO: 19246
  chr5:3282931-3283290
  hypo

SEQ ID NO: 150046 - DNA, 30 bp, Homo sapiens
  chr5:3310841-3310871
  hypo
gctgcctggcatcaccgtacacgtgtgaga

SEQ ID NO: 150047 - DNA, 30 bp, Homo sapiens
  chr5:3311228-3311258
  hypo
gtgactctgccactgcgtatgtggtggatg

SEQ ID NO: 150048 - DNA, 943 bp, Homo sapiens
  chr5:3324687-3325630
  hypo
atcctcctcctgacccggcgcggtggggctgggtcccaggctggctccccgccctccctcctactgtgatcccaggaccctcggccaccgcccttcctgcccaggcccgtcctgggacccgggtggccctcgtcatagaaggctgtgttgcccccagcaagagcaaagccaccgctccacgcctgcccggggaattggtggccgagcttatctgggaccactggtccacgcgatgccccgtgacgggccaggaagggttcaggcttggaaatgtcggacggggacgactctgggccttgctggttggtggagctgggagcagcttcattctcctctgactgtgtggacacagccctcaaggggagagggccgcatccctgttccccgccttcctcgccatgactggacgcagcggggcgccctgtccctgcctggagctcttccagctcagggccccatcagcgccaccaccttggactgccgccatccagggcgcagggcccgctgccccacacctgagggacacagccaggctttctgcttggcctgctgttctctacgtctcacaggcgtcttgctttccaccatgcaacttcacaatctgcccaaatgtccttttattaaaactagtcgacaaagtcccaaagccctagctgttcggcgtgtgtgtgtgtgtgtgtgagcgcgcgcgtgcgtggggttaagtgtttccataattgcatctctcttgaaaatcaaaacagaacaaaccgtgctttatgtacgagtaagagtcatgattcaacaatggggcctgcctgaaggagctgcctatttagtcacataccacagcaacctactggcttgtcattttatgatctggcacggagccgacggcgcacacggtgtcttgggcagccttgggagcccgtgacagtgctgtgaccagcgggggccagtcctg

SEQ ID NO: 150049 - DNA, 172 bp, Homo sapiens; identical to SEQ ID NO: 19248
  chr5:3326307-3326479
  hypo

SEQ ID NO: 150050 - DNA, 231 bp, Homo sapiens; identical to SEQ ID NO: 69267
  chr5:3339350-3339581
  hypo

SEQ ID NO: 150051 - DNA, 148 bp, Homo sapiens
  chr5:3346707-3346855
  hypo
gggccagccccatcccgtgggagagaaccacatgacgggccagcccaatcctgtgggagagaaccacatgacggtggagccacacgtccaccagagcctaagcgttggggccccgagtgaccacacggaaccacgctgccccaggcac

SEQ ID NO: 150052 - DNA, 267 bp, Homo sapiens; identical to SEQ ID NO: 69268
  chr5:3454258-3454525
  hypo

SEQ ID NO: 150053 - DNA, 46 bp, Homo sapiens; identical to SEQ ID NO: 69269
  chr5:3489719-3489765
  hypo

SEQ ID NO: 150054 - DNA, 920 bp, Homo sapiens; identical to SEQ ID NO: 69270
  chr5:3535477-3536397
  hypo

SEQ ID NO: 150055 - DNA, 258 bp, Homo sapiens; identical to SEQ ID NO: 41302
  chr5:3590399-3590657
  hypo

SEQ ID NO: 150056 - DNA, 748 bp, Homo sapiens; identical to SEQ ID NO: 41303
  chr5:3590803-3591551
  hypo

SEQ ID NO: 150057 - DNA, 313 bp, Homo sapiens; identical to SEQ ID NO: 41309
  chr5:3595055-3595368
  hypo

SEQ ID NO: 150058 - DNA, 252 bp, Homo sapiens; identical to SEQ ID NO: 41310
  chr5:3595849-3596101
  hypo

SEQ ID NO: 150059 - DNA, 30 bp, Homo sapiens
  chr5:3608724-3608754
  hypo
gcctgccttctttaacgtgattacagcgtg

SEQ ID NO: 150060 - DNA, 258 bp, Homo sapiens; identical to SEQ ID NO: 69275
  chr5:3627872-3628130
  hypo

SEQ ID NO: 150061 - DNA, 150 bp, Homo sapiens
  chr5:3630988-3631138
  hypo
gattttcatccatggcgagaacttgatttttatccatggcaagaacttgattttcatccagggcaagaacttgattttcatccagggcgagaacttgatttttatccatggcgagaacttgattttcatccagggcgagaacttgatttt

SEQ ID NO: 150062 - DNA, 30 bp, Homo sapiens
  chr5:3657961-3657991
  hypo
gtgtccatcattttccgggtcatcgccagt

SEQ ID NO: 150063 - DNA, 219 bp, Homo sapiens; identical to SEQ ID NO: 69276
  chr5:3659550-3659769
  hypo

SEQ ID NO: 150064 - DNA, 30 bp, Homo sapiens
  chr5:3684416-3684446
  hypo
acagatgttgcccaccggctcccaggctgc

SEQ ID NO: 150065 - DNA, 30 bp, Homo sapiens
  chr5:3738676-3738706
  hypo
gcacactaagcacatcggatgagctgtttg

SEQ ID NO: 150066 - DNA, 455 bp, Homo sapiens
  chr5:3740589-3741044
  hypo
ccggtgtgaggtgaccgcgtgctgtgctctgcagggccaggcctagaccccgacgtcccagtcccagtctctgtctgcccaagtgggcgggagaatctgggggagggagggagaggctgcttcccaggccgtcatcccagcacggcttcctcactgggaggacgcggcttgttcccatttctggagtcaggctgtatgggcccctccacaatcttcagcgccgcgtccctgcaggtccacatgtcccccgcgggccctcccctggtttccgatgcccatcacccaacctcttctgtgtcctcagcccggggtgggggtgcagcccctgcaggtgcctcagggtgtctgtgctcccagccctacccactgctcggtcaaaccttcacatcgccttctctcctgcgcgcagctggcggcttctatcttctgacccaccccagcgtgcctaccggctt

SEQ ID NO: 150067 - DNA, 25 bp, Homo sapiens
  chr5:3759541-3759566
  hypo
aggcgtcagccaccaagaggttttc

SEQ ID NO: 150068 - DNA, 832 bp, Homo sapiens; identical to SEQ ID NO: 69279
  chr5:3761113-3761945
  hypo

SEQ ID NO: 150069 - DNA, 157 bp, Homo sapiens
  chr5:3781373-3781530
  hypo
ttggtgaaatagtcgcgcctagagtgagatgcatgatgcacacataggccaacccaccctggcagggcgatgatgtcgtgctccgtggcgtgattgccatggctttcagctgcaggcagagcccaggccaggaggaaaggagcggcagcccaggcaa

SEQ ID NO: 150070 - DNA, 68 bp, Homo sapiens
  chr5:3805790-3805858
  hypo
ggcgcctgccgtcgacgagtgtggcaaactgagctgaaatgtatagtgtagaacgaccatggagtggc

SEQ ID NO: 150071 - DNA, 30 bp, Homo sapiens
  chr5:3806496-3806526
  hypo
gttcactgtcgtgttcgcacatggcatttt

SEQ ID NO: 150072 - DNA, 30 bp, Homo sapiens
  chr5:3849101-3849131
  hypo
gcctcgtgggatccacgctgtgtcctgata

SEQ ID NO: 150073 - DNA, 30 bp, Homo sapiens
  chr5:3852976-3853006
  hypo
aaggcccctctgctgcgccatgtcctccag

SEQ ID NO: 150074 - DNA, 161 bp, Homo sapiens
  chr5:3865172-3865333
  hypo
cgtgactggagaaggcggtatttacaagtctactgtgggcccatattaaacttcactttgacataggctcacttctttggcagtgagagtgaaaggggtggagtgagtgtgccacgctagttggctccgggacacaatggggctggcggctggaagaggat

SEQ ID NO: 150075 - DNA, 222 bp, Homo sapiens
  chr5:3932149-3932371
  hypo
cgcccggggaaagttcgtaggcaacattcatttgcacaacgagcgcactttgaaagactccagcgcaggcctgtgttcctggccgcaacaaaacacctgcttgaagcggagacaaaatgccaagctggagagagttcaaaagaacagggtgacaatcacacagtgttgaacaacagcaacggcaacccatcactacagccttttgtccgtggctgcttgatt

SEQ ID NO: 150076 - DNA, 30 bp, Homo sapiens; identical to SEQ ID NO: 19255
  chr5:3999796-3999826
  hypo

SEQ ID NO: 150077 - DNA, 18 bp, Homo sapiens
  chr5:4143932-4143950
  hypo
acataaaatgaaaaagaa

SEQ ID NO: 150078 - DNA, 977 bp, Homo sapiens
  chr5:4144249-4145226
  hypo
aaaaaaaaaagaaagaaaaggtgactgtagtgaagaaatacatttccaagtcctctcaaagccgtgatattctatgcaagcaacattcatagaagcacagcttactacatgtgttctgtgtgccgtgctcttgcgtgcacctggaatgccaactgcacagtttactgtgtcctgtgtgccgtgctcttgtgtgcatgcagaatgctgaccgcacagttactaagtgttctgtgttccgtgctctcgtgtgcacgtggaatgtggaccacacagctaagtgtgttctgtgtggcatgctctagtgtgcgcatggaatgctgactgcacagcttactacgtgtgttctgtgttccgtgctctcacatgcatgcggaattctgacggcacagcttactaagtgtgttcggtatgccacacacttgtgtgcatgcggaatgctgactgcatagcttactatacgtgttctgtgtgccccactctcctgtgcatgtggaatgctgactgcatagcttactatgtatgctctgtgggctgtgctctcatgtgcacgtggaatgctgaccgcacagcttactaagggcgtcctacgtgcggtgctctcatgcacatgcacaatgccgatggcacagcttactaagtgtgtactgtgtgctctgctctcgtgtgcacgtggaatgctgactgcacagcttactacatgtgttctttgtgccacgctctcatgtgcgtgcacaatgatgactgcacagcttactacgtgtgttctgtgtgccgtgctcttgtgtgcatgcagagtgctgaccgcacagcttactacgtatgttctgtgtgccacactcttgcctgcacgtggaatgctgactgcacagcttactacctgtgttctgtgtgtgacgctcttgtgtgcatgtggaatgctgatggcacaacttactctgtgtgttatgtttgccacactctcgcgtgcacatggaatg

SEQ ID NO: 150079 - DNA, 30 bp, Homo sapiens
  chr5:4192222-4192252
  hypo
tgtgggtttaaacaacggactccctgatct

SEQ ID NO: 150080 - DNA, 36 bp, Homo sapiens
  chr5:4195641-4195677
  hypo
cattctcctgcctcagcctcccgaaaaacaactttc

SEQ ID NO: 150081 - DNA, 30 bp, Homo sapiens
  chr5:4222996-4223026
  hypo
cagggcgggtttctgcgtggttccagccta

SEQ ID NO: 150082 - DNA, 30 bp, Homo sapiens
  chr5:4223268-4223298
  hypo
tggaacaggaccctgcgacatctcccgcga

SEQ ID NO: 150083 - DNA, 31 bp, Homo sapiens; identical to SEQ ID NO: 69284
  chr5:4442308-4442339
  hypo

SEQ ID NO: 150084 - DNA, 599 bp, Homo sapiens
  chr5:4580997-4581596
  hypo
gcacatgcacacacgcgtggacaggcacacgcacagcgacactcttgcacatggtcatacacgtggacaggaacatgcacagcaacactcttgcacacacacacacacacacacggtcaggcacatgctcagcgacactcttgcacacagaaacacacgtggacagacacacgcacagcgacactcttggagagcacatacacatggacaggcacacgcacagtgacactcttgcacacacacacacgtggacagacacacgcacagcgacatcttgcacacgcggacacacacgtggacaggcacacacacagcgacgctcttggagagcacacatacatgtggacaggcacacgcacagtgacgctcttgcacacgcacacacacgtggacaggcacatgcacagcgacactcttgcacacacacacacgtggacaggcacacacacagcgacgctcttggagagcacatacatacatgtggacaggcacacgcacagcgacgctcttgcacacgcacacacacgtggacaggcacatgtttgcagcacggctcactctcaagtccacgcccacacgcacagaggcagcttcgtgaa

SEQ ID NO: 150085 - DNA, 30 bp, Homo sapiens
  chr5:4582847-4582877
  hypo
tccacgtccatcatacggggctcatttcaa

SEQ ID NO: 150086 - DNA, 22 bp, Homo sapiens
  chr5:4630898-4630920
  hypo
tcacaggcgtgagccaccgcgc

SEQ ID NO: 150087 - DNA, 238 bp, Homo sapiens
  chr5:4886499-4886737
  hypo
ccttaggatcaccaccgtctaccgagagagatcagaggaagagaattctttaatgagacaaaacagacagcgaagtccatggagaaccaggagagaagagtgtccccaaagtcagcaagggtgagtgataagaaaatgcaataaacatcatattccgaagagcaattcattaagataaggcatgaaaaaaggccataagtcacggcaacgtgggcatcagagacgacatccagagaaa

SEQ ID NO: 150088 - DNA, 30 bp, Homo sapiens
  chr5:5041605-5041635
  hypo
gctttggtgggagcacggacggggcatccg

SEQ ID NO: 150089 - DNA, 170 bp, Homo sapiens; identical to SEQ ID NO: 3799
  chr5:5139753-5139923
  hypo

SEQ ID NO: 150090 - DNA, 424 bp, Homo sapiens; identical to SEQ ID NO: 3801
  chr5:5140031-5140455
  hypo

SEQ ID NO: 150091 - DNA, 132 bp, Homo sapiens; identical to SEQ ID NO: 3802
  chr5:5140527-5140659
  hypo

SEQ ID NO: 150092 - DNA, 49 bp, Homo sapiens; identical to SEQ ID NO: 3803
  chr5:5140708-5140757
  hypo

SEQ ID NO: 150093 - DNA, 142 bp, Homo sapiens; identical to SEQ ID NO: 3804
  chr5:5140849-5140991
  hypo

SEQ ID NO: 150094 - DNA, 30 bp, Homo sapiens
  chr5:5189423-5189453
  hypo
agttccaatgttctacgctctgttacttca

SEQ ID NO: 150095 - DNA, 391 bp, Homo sapiens; identical to SEQ ID NO: 69291
  chr5:5303188-5303579
  hypo

SEQ ID NO: 150096 - DNA, 30 bp, Homo sapiens; identical to SEQ ID NO: 69292
  chr5:5418612-5418642
  hypo

SEQ ID NO: 150097 - DNA, 30 bp, Homo sapiens; identical to SEQ ID NO: 19264
  chr5:5419057-5419087
  hypo

SEQ ID NO: 150098 - DNA, 30 bp, Homo sapiens
  chr5:5566950-5566980
  hypo
aacagctggagatgccgtagcaagtgacag

SEQ ID NO: 150099 - DNA, 23 bp, Homo sapiens
  chr5:5571812-5571835
  hypo
tttttttttttgagacggagtct

SEQ ID NO: 150100 - DNA, 30 bp, Homo sapiens
  chr5:5629971-5630001
  hypo
cggtgccacaggaatcgtcacttagcgcat

SEQ ID NO: 150101 - DNA, 72 bp, Homo sapiens; identical to SEQ ID NO: 69294
  chr5:5652237-5652309
  hypo

SEQ ID NO: 150102 - DNA, 30 bp, Homo sapiens
  chr5:5802835-5802865
  hypo
tctagtaatagaagtcgtcactcctaggaa

SEQ ID NO: 150103 - DNA, 31 bp, Homo sapiens
  chr5:5886658-5886689
  hypo
cgtgaactgggccaggcggccacgaggccga

SEQ ID NO: 150104 - DNA, 39 bp, Homo sapiens; identical to SEQ ID NO: 69295
  chr5:5907760-5907799
  hypo

SEQ ID NO: 150105 - DNA, 30 bp, Homo sapiens
  chr5:6038131-6038161
  hypo
gcaggccactgtgggcgtgtgaaggagtct

SEQ ID NO: 150106 - DNA, 277 bp, Homo sapiens; identical to SEQ ID NO: 69296
  chr5:6228484-6228761
  hypo

SEQ ID NO: 150107 - DNA, 32 bp, Homo sapiens
  chr5:6322026-6322058
  hypo
actgcagggcttggacgcgctagctttctgac

SEQ ID NO: 150108 - DNA, 30 bp, Homo sapiens
  chr5:6343197-6343227
  hypo
acagctacggggcgccggcactggtgaggt

SEQ ID NO: 150109 - DNA, 30 bp, Homo sapiens
  chr5:6344657-6344687
  hypo
ctgtgacccactcaacgtgaaagggaaccc

SEQ ID NO: 150110 - DNA, 508 bp, Homo sapiens
  chr5:6349463-6349971
  hypo
cccttgcgctaggagcggccgtcgccctgtggtccccggagagggtcctccgaggactctgaaagccgcttccatggttggcgccgagcacaggcggctccctctggcttccgcaggcacggacggggtttgcccagagacaccctgctcagcactgccaagctggaaaacaagtgggtgggggcagccgccgggaggggccagcaaaccgggccctcatccaggagcaaattccaccttcagtgcctcacttttatctccagatgggcgcgtccttgtgagaaaccacagtattgtccctcacccatgaagggaggcgtggacgtgatcccaaagcccctatgttagacggtccagcctcacctgagcagtcacatggacctgcccggtcctttgacctcaacaccacacacttcccacccctgcggcaggaaggcgaggcaggaagcatccacacaaacctgagtatatcacagtggcaccaccaacgtgccggctgcaaagttga

SEQ ID NO: 150111 - DNA, 116 bp, Homo sapiens
  chr5:6420111-6420227
  hypo
agcccccaacttttacggcatccactgaatttgtgcccccaatctcctgcgttggtgatgcttcaacccttgtgtattaatgtcctggcacacgcggcaaagtatcatggactggg

SEQ ID NO: 150112 - DNA, 881 bp, Homo sapiens; identical to SEQ ID NO: 3806
  chr5:6448768-6449649
  hypo

SEQ ID NO: 150113 - DNA, 52 bp, Homo sapiens
  chr5:6527275-6527327
  hypo
caccacccaggccagcgagccaggtagggacagtgtgcggacatgggtatgt

SEQ ID NO: 150114 - DNA, 31 bp, Homo sapiens
  chr5:6546412-6546443
  hypo
aggccccgcctcggtccggagaatcagaact

SEQ ID NO: 150115 - DNA, 30 bp, Homo sapiens; identical to SEQ ID NO: 19266
  chr5:6582527-6582557
  hypo

SEQ ID NO: 150116 - DNA, 30 bp, Homo sapiens; identical to SEQ ID NO: 69300
  chr5:6592192-6592222
  hypo

SEQ ID NO: 150117 - DNA, 30 bp, Homo sapiens
  chr5:6605101-6605131
  hypo
tctgcccaggagggcgagctgtgagaacta

SEQ ID NO: 150118 - DNA, 30 bp, Homo sapiens
  chr5:6612031-6612061
  hypo
ggaaggcaaacccgtcgacagaaagtggat

SEQ ID NO: 150119 - DNA, 31 bp, Homo sapiens; identical to SEQ ID NO: 19267
  chr5:6625963-6625994
  hypo

SEQ ID NO: 150120 - DNA, 30 bp, Homo sapiens; identical to SEQ ID NO: 69302
  chr5:6629623-6629653
  hypo

SEQ ID NO: 150121 - DNA, 31 bp, Homo sapiens; identical to SEQ ID NO: 19268
  chr5:6675044-6675075
  hypo

SEQ ID NO: 150122 - DNA, 30 bp, Homo sapiens; identical to SEQ ID NO: 69304
  chr5:6749332-6749362
  hypo

SEQ ID NO: 150123 - DNA, 30 bp, Homo sapiens
  chr5:6750354-6750384
  hypo
ggctcagcagagcccgtgactgatgctgcc

SEQ ID NO: 150124 - DNA, 30 bp, Homo sapiens
  chr5:6754101-6754131
  hypo
agtctgcttggccgcgactttgcagtgcag

SEQ ID NO: 150125 - DNA, 30 bp, Homo sapiens; identical to SEQ ID NO: 19269
  chr5:6756258-6756288
  hypo

SEQ ID NO: 150126 - DNA, 88 bp, Homo sapiens; identical to SEQ ID NO: 69306
  chr5:6758953-6759041
  hypo

SEQ ID NO: 150127 - DNA, 30 bp, Homo sapiens
  chr5:6759698-6759728
  hypo
cccaggcctctgagacggaacgcttggagc

SEQ ID NO: 150128 - DNA, 77 bp, Homo sapiens
  chr5:6760001-6760078
  hypo
agtcctgtgacgtgacgggcttctaaaggtcacgtggcacatccgccaggcccccgagagggcgctgggtctcgctc

SEQ ID NO: 150129 - DNA, 73 bp, Homo sapiens; identical to SEQ ID NO: 69307
  chr5:6762499-6762572
  hypo

SEQ ID NO: 150130 - DNA, 25 bp, Homo sapiens
  chr5:6765598-6765623
  hypo
cccaaagtgccgtgtgccaccatac

SEQ ID NO: 150131 - DNA, 216 bp, Homo sapiens
  chr5:6846209-6846425
  hypo
ggccttgggttcgtccggagcgcctggaaggtttgcagtcccccctccccgccacccccgaggccttgggttcgtccggagcttctagaaggtttgcagtcccccctccccccaagccccgaggccttgggttcgtccggagcgtctagaagggtcccccctcccctccacccccgaagccttgggtccccagagcgcgcccagggcttttttttt

SEQ ID NO: 150132 - DNA, 35 bp, Homo sapiens
  chr5:6846844-6846879
  hypo
gcccggcgcagggcgtgcccagggcttctgatgcc

SEQ ID NO: 150133 - DNA, 48 bp, Homo sapiens
  chr5:6857838-6857886
  hypo
tgactgcagagtccacgtctcaaccgtgaagatcgtggctcagaattg

SEQ ID NO: 150134 - DNA, 30 bp, Homo sapiens; identical to SEQ ID NO: 69311
  chr5:6858212-6858242
  hypo

SEQ ID NO: 150135 - DNA, 43 bp, Homo sapiens
  chr5:6906770-6906813
  hypo
cactgccagcaaggtgtagggcggggtgtggctgccaggattc

SEQ ID NO: 150136 - DNA, 23 bp, Homo sapiens
  chr5:7184437-7184460
  hypo
tgagccaccgtgcctggccagaa

SEQ ID NO: 150137 - DNA, 30 bp, Homo sapiens
  chr5:7505625-7505655
  hypo
ctgatgggttggagccgaggactgtgcagg

SEQ ID NO: 150138 - DNA, 30 bp, Homo sapiens
  chr5:7667334-7667364
  hypo
aaataataggtgtctcggcggggatgactg

SEQ ID NO: 150139 - DNA, 37 bp, Homo sapiens; identical to SEQ ID NO: 19273
  chr5:7704692-7704729
  hypo

SEQ ID NO: 150140 - DNA, 43 bp, Homo sapiens; identical to SEQ ID NO: 69313
  chr5:7802431-7802474
  hypo

SEQ ID NO: 150141 - DNA, 27 bp, Homo sapiens
  chr5:7811594-7811621
  hypo
cagagcgagactctgtctcaaaaaaaa

SEQ ID NO: 150142 - DNA, 148 bp, Homo sapiens; identical to SEQ ID NO: 19274
  chr5:7825239-7825387
  hypo

SEQ ID NO: 150143 - DNA, 140 bp, Homo sapiens
  chr5:7867952-7868092
  hypo
agaacactggtccaccgagtggatgaaggtcatttccatttttcgaatgaaactttttacaatgggcatgatggaatttgaccccgaaaggctcaggttgtcgtgaacacaaccaagggcacagacgctccttgactacc

SEQ ID NO: 150144 - DNA, 30 bp, Homo sapiens; identical to SEQ ID NO: 69316
  chr5:8158300-8158330
  hypo

SEQ ID NO: 150145 - DNA, 79 bp, Homo sapiens; identical to SEQ ID NO: 69317
  chr5:8424506-8424585
  hypo

SEQ ID NO: 150146 - DNA, 19 bp, Homo sapiens
  chr5:8424884-8424903
  hypo
gtagtatgcttgggataaa

SEQ ID NO: 150147 - DNA, 93 bp, Homo sapiens; identical to SEQ ID NO: 19275
  chr5:8649802-8649895
  hypo

SEQ ID NO: 150148 - DNA, 121 bp, Homo sapiens
  chr5:8841450-8841571
  hypo
cagccagactacgaacccttactacgaacccatcagctggaaggaacaattccagacaattccacacaggaggaagcaacaactctggatgtgccacctttaggaactgtaccactcacgg

SEQ ID NO: 150149 - DNA, 161 bp, Homo sapiens
  chr5:8841690-8841851
  hypo
cattcttgaagtcagcgagaccaagaacccactaattccatacgcaatgggttcatttcttttttttttttttttacaaaagtcttctctgtgctgacttaaggggacactttgtgtcacttccagggaaggatgcgctggggtcccgacattctgtcagg

SEQ ID NO: 150150 - DNA, 196 bp, Homo sapiens; identical to SEQ ID NO: 69320
  chr5:9040383-9040579
  hypo

SEQ ID NO: 150151 - DNA, 43 bp, Homo sapiens
  chr5:9044651-9044694
  hypo
tggagctgctcagccccacggcgatcatgtggaacatgttgaa

SEQ ID NO: 150152 - DNA, 200 bp, Homo sapiens; identical to SEQ ID NO: 69321
  chr5:9051991-9052191
  hypo

SEQ ID NO: 150153 - DNA, 167 bp, Homo sapiens
  chr5:9054170-9054337
  hypo
gctgtgcagtaggtgaggtgccgcttacctgggcagggctgcgtgttgcagagtgcctcttctgtgtgcagccccaggcagatgtcccctccataggccggggctggattggagcaagagcgggtcctcatatagtgtccaccgccgcatgttgctgaacattttgt

SEQ ID NO: 150154 - DNA, 156 bp, Homo sapiens; identical to SEQ ID NO: 69323
  chr5:9066590-9066746
  hypo

SEQ ID NO: 150155 - DNA, 30 bp, Homo sapiens; identical to SEQ ID NO: 19277
  chr5:9069767-9069797
  hypo

SEQ ID NO: 150156 - DNA, 256 bp, Homo sapiens; identical to SEQ ID NO: 19278
  chr5:9119014-9119270
  hypo

SEQ ID NO: 150157 - DNA, 403 bp, Homo sapiens; identical to SEQ ID NO: 69326
  chr5:9122691-9123094
  hypo

SEQ ID NO: 150158 - DNA, 156 bp, Homo sapiens; identical to SEQ ID NO: 69327
  chr5:9136511-9136667
  hypo

SEQ ID NO: 150159 - DNA, 71 bp, Homo sapiens; identical to SEQ ID NO: 69328
  chr5:9183701-9183772
  hypo

SEQ ID NO: 150160 - DNA, 107 bp, Homo sapiens
  chr5:9220792-9220899
  hypo
aagagtcaaggacagggcagacgctcaagccacagcgtgcactacctaagtatggtacagcataaactttctgtaaaagaaacttcgaggcaacaatgtcatccttc

SEQ ID NO: 150161 - DNA, 42 bp, Homo sapiens; identical to SEQ ID NO: 69329
  chr5:9330246-9330288
  hypo

SEQ ID NO: 150162 - DNA, 31 bp, Homo sapiens; identical to SEQ ID NO: 69330
  chr5:9366779-9366810
  hypo

SEQ ID NO: 150163 - DNA, 30 bp, Homo sapiens
  chr5:9426798-9426828
  hypo
cacaaatcatgcacacgtgattagaaatgt

SEQ ID NO: 150164 - DNA, 43 bp, Homo sapiens
  chr5:9445439-9445482
  hypo
acatttaataaagaatcccttcggtaaatatctctcgtgccat

SEQ ID NO: 150165 - DNA, 31 bp, Homo sapiens; identical to SEQ ID NO: 19280
  chr5:9458300-9458331
  hypo

SEQ ID NO: 150166 - DNA, 180 bp, Homo sapiens
  chr5:9497475-9497655
  hypo
ttttcaaatatacagtccatacggttcagacacaatggactggggatagagacggctatagtgccgataatggagaaactagccagagcttcagatatttgttttccaggacatctcaataattgggtacacctcacaatatgtgagacttgacgtcgagtggcacggcatactctggcg

SEQ ID NO: 150167 - DNA, 43 bp, Homo sapiens; identical to SEQ ID NO: 69333
  chr5:9498628-9498671
  hypo

SEQ ID NO: 150168 - DNA, 43 bp, Homo sapiens
  chr5:9629930-9629973
  hypo
agaagataacaatcacattaacgtagaagatgaacaactgcag

SEQ ID NO: 150169 - DNA, 145 bp, Homo sapiens; identical to SEQ ID NO: 69334
  chr5:9725135-9725280
  hypo

SEQ ID NO: 150170 - DNA, 217 bp, Homo sapiens
  chr5:10080574-10080791
  hypo
tgggcctccaggaataactcccggaaccaggggccaaactgaccctcggaggccagttagaaatacaggagttaaaagtgcagccctagtacaactcgccacagggaatattggctcctcctgcgccaagctggggacagaaatcacaatactgagttcctctgccttcaaacgagcgatgcccaaacactgcaccggctgccaacactgctgtgaa

SEQ ID NO: 150171 - DNA, 30 bp, Homo sapiens; identical to SEQ ID NO: 69335
  chr5:10150315-10150345
  hypo

SEQ ID NO: 150172 - DNA, 104 bp, Homo sapiens
  chr5:10248591-10248695
  hypo
cttcaaggtctagcgcgtaagtatgccaagcatgaagagttaacagatcaccaaccatcccatgacagtcagtcctccctgtttttagagacagaatctcgctc

SEQ ID NO: 150173 - DNA, 26 bp, Homo sapiens
  chr5:10252571-10252597
  hypo
caggcattgactgggcgcggtggctc

SEQ ID NO: 150174 - DNA, 26 bp, Homo sapiens
  chr5:10252716-10252742
  hypo
actccgtctcaaaaaaaaaaaaaaaa

SEQ ID NO: 150175 - DNA, 218 bp, Homo sapiens; identical to SEQ ID NO: 69337
  chr5:10256072-10256290
  hypo

SEQ ID NO: 150176 - DNA, 79 bp, Homo sapiens
  chr5:10268929-10269008
  hypo
ccaagcgggcaacgagagatccaatgcagggttgggcctttcaacttggggttttatatgttggcgtacttccagggtc

SEQ ID NO: 150177 - DNA, 191 bp, Homo sapiens; identical to SEQ ID NO: 69338
  chr5:10278514-10278705
  hypo

SEQ ID NO: 150178 - DNA, 41 bp, Homo sapiens; identical to SEQ ID NO: 69339
  chr5:10283589-10283630
  hypo

SEQ ID NO: 150179 - DNA, 31 bp, Homo sapiens; identical to SEQ ID NO: 19282
  chr5:10296893-10296924
  hypo

SEQ ID NO: 150180 - DNA, 57 bp, Homo sapiens; identical to SEQ ID NO: 69341
  chr5:10322103-10322160
  hypo

SEQ ID NO: 150181 - DNA, 24 bp, Homo sapiens
  chr5:10325892-10325916
  hypo
ttttttttttttgagacggagtct

SEQ ID NO: 150182 - DNA, 30 bp, Homo sapiens; identical to SEQ ID NO: 69343
  chr5:10339280-10339310
  hypo

SEQ ID NO: 150183 - DNA, 158 bp, Homo sapiens; identical to SEQ ID NO: 69344
  chr5:10352279-10352437
  hypo

SEQ ID NO: 150184 - DNA, 902 bp, Homo sapiens; identical to SEQ ID NO: 111168
  chr5:10441402-10442304
  hypo

SEQ ID NO: 150185 - DNA, 143 bp, Homo sapiens; identical to SEQ ID NO: 111169
  chr5:10442372-10442515
  hypo

SEQ ID NO: 150186 - DNA, 499 bp, Homo sapiens
  chr5:10453377-10453876
  hypo
ctctgccctggctcccgcggcccacagagtgctgagcacgagttcaaacacctgtctcggggtgcgctgggtagacaggaggtgctcggaccctccaggccttggtgtggacagttgtgttgttgaccttgttggccctgggtggcttggaggtgtgctaagaacacaaagctgtgaattcaaggaggggtttcttcatgtcgttcagcgtcataagcgttcatttttatgctttaaaaaaataccttcaaaaaggaggaaatgaagtgcgatgagaataatttgtagtggattaccacctgcagaagtttatttcacataggatgctgtgtaattggtggctagccgctgcctgcgtgagcgggatagatgtcgttcctgctccctgcatctatggcgggggcgtggcttgtggcaggtgtactctctgtgctgtttacatttatttatcttagaaatcactctagtcaaattcatcgagttgaagatctctaaaaag

SEQ ID NO: 150187 - DNA, 31 bp, Homo sapiens; identical to SEQ ID NO: 69348
  chr5:10477381-10477412
  hypo

SEQ ID NO: 150188 - DNA, 151 bp, Homo sapiens
  chr5:10479714-10479865
  hypo
ggctggcagctgcttcgggcgtctcaccttgtgactatttcctgggcactgtgggagaggaggcctcttgcctgagctcctgtccctactgtctcctctcactaaatgcacggcacggctttgcggtaataggctgggacatgtcaactct

SEQ ID NO: 150189 - DNA, 31 bp, Homo sapiens; identical to SEQ ID NO: 69349
  chr5:10483795-10483826
  hypo

SEQ ID NO: 150190 - DNA, 107 bp, Homo sapiens; identical to SEQ ID NO: 19284
  chr5:10486100-10486207
  hypo

SEQ ID NO: 150191 - DNA, 30 bp, Homo sapiens
  chr5:10509895-10509925
  hypo
ttaaagaggaaaagccggtgtaagcaggtc

SEQ ID NO: 150192 - DNA, 41 bp, Homo sapiens; identical to SEQ ID NO: 19285
  chr5:10548512-10548553
  hypo

SEQ ID NO: 150193 - DNA, 371 bp, Homo sapiens; identical to SEQ ID NO: 41348
  chr5:10564287-10564658
  hypo

SEQ ID NO: 150194 - DNA, 427 bp, Homo sapiens; identical to SEQ ID NO: 3820
  chr5:10564800-10565227
  hypo

SEQ ID NO: 150195 - DNA, 489 bp, Homo sapiens; identical to SEQ ID NO: 3821
  chr5:10565262-10565751
  hypo

SEQ ID NO: 150196 - DNA, 37 bp, Homo sapiens; identical to SEQ ID NO: 69355
  chr5:10618605-10618642
  hypo

SEQ ID NO: 150197 - DNA, 108 bp, Homo sapiens; identical to SEQ ID NO: 69356
  chr5:10702259-10702367
  hypo

SEQ ID NO: 150198 - DNA, 30 bp, Homo sapiens; identical to SEQ ID NO: 69357
  chr5:10788704-10788734
  hypo

SEQ ID NO: 150199 - DNA, 30 bp, Homo sapiens
  chr5:10859130-10859160
  hypo
tgtcagcatgccacgcgcatcccctgccgt

SEQ ID NO: 150200 - DNA, 19 bp, Homo sapiens
  chr5:10864368-10864387
  hypo
tttttgtttttgtttttga

SEQ ID NO: 150201 - DNA, 101 bp, Homo sapiens; identical to SEQ ID NO: 19292
  chr5:10936741-10936842
  hypo

SEQ ID NO: 150202 - DNA, 61 bp, Homo sapiens
  chr5:10972030-10972091
  hypo
aaagagcaaagctagtttacccgcggcccatgttcttttcgatggttagccttatttctta

SEQ ID NO: 150203 - DNA, 30 bp, Homo sapiens
  chr5:10978210-10978240
  hypo
gcagaggacaagcttcgatgctgaaactga

SEQ ID NO: 150204 - DNA, 30 bp, Homo sapiens; identical to SEQ ID NO: 69360
  chr5:11014893-11014923
  hypo

SEQ ID NO: 150205 - DNA, 31 bp, Homo sapiens; identical to SEQ ID NO: 19293
  chr5:11069013-11069044
  hypo

SEQ ID NO: 150206 - DNA, 40 bp, Homo sapiens; identical to SEQ ID NO: 69362
  chr5:11074313-11074353
  hypo

SEQ ID NO: 150207 - DNA, 76 bp, Homo sapiens
  chr5:11130331-11130407
  hypo
gttctgtgcccaaagcggtggttgctaggttcataccacaccccccccatccacccataaacgtaagccatcagaa

SEQ ID NO: 150208 - DNA, 153 bp, Homo sapiens
  chr5:11130728-11130881
  hypo
ttaactgtgagcctaattgtgcgggtggccctttgtgctccacaaacactcacgtgccgctcacagttgttctttcctaacttgcagtacttggggaatgagctgtactcactaggcattgattttttcatgaccggacgacgtctcaagctt

SEQ ID NO: 150209 - DNA, 23 bp, Homo sapiens
  chr5:11203563-11203586
  hypo
ttttgtttttagacagagttgcg

SEQ ID NO: 150210 - DNA, 22 bp, Homo sapiens
  chr5:11203765-11203787
  hypo
cgtgagccactgtgccaggcct

SEQ ID NO: 150211 - DNA, 30 bp, Homo sapiens
  chr5:11262199-11262229
  hypo
catgctaaagttccacgttaccaatcgaga

SEQ ID NO: 150212 - DNA, 30 bp, Homo sapiens
  chr5:11264078-11264108
  hypo
ttccctctggtggcacgtcatctgtaatct

SEQ ID NO: 150213 - DNA, 30 bp, Homo sapiens
  chr5:11365937-11365967
  hypo
cacgaaaatcatttgcgttggggcaatgag

SEQ ID NO: 150214 - DNA, 30 bp, Homo sapiens
  chr5:11565065-11565095
  hypo
tcatgctgccagtctcggatccgagcttgc

SEQ ID NO: 150215 - DNA, 29 bp, Homo sapiens
  chr5:11698401-11698430
  hypo
tttttttttttttttttgagacggagtct

SEQ ID NO: 150216 - DNA, 19 bp, Homo sapiens
  chr5:11724147-11724166
  hypo
cagagcaaggcttcatttc

SEQ ID NO: 150217 - DNA, 401 bp, Homo sapiens; identical to SEQ ID NO: 19295
  chr5:12794951-12795352
  hypo

SEQ ID NO: 150218 - DNA, 30 bp, Homo sapiens
  chr5:12805339-12805369
  hypo
ctcgggagccacgagcgcagatacaaaagg

SEQ ID NO: 150219 - DNA, 37 bp, Homo sapiens
  chr5:13037955-13037992
  hypo
ctaagaaaggccgggcgcggtggctcacgtctgtaat

SEQ ID NO: 150220 - DNA, 33 bp, Homo sapiens; identical to SEQ ID NO: 69369
  chr5:13416578-13416611
  hypo

SEQ ID NO: 150221 - DNA, 30 bp, Homo sapiens
  chr5:13735952-13735982
  hypo
cagaaactggcgaagcgaagtctgatacat

SEQ ID NO: 150222 - DNA, 81 bp, Homo sapiens; identical to SEQ ID NO: 69370
  chr5:13884613-13884694
  hypo

SEQ ID NO: 150223 - DNA, 30 bp, Homo sapiens; identical to SEQ ID NO: 69371
  chr5:13946233-13946263
  hypo

SEQ ID NO: 150224 - DNA, 241 bp, Homo sapiens
  chr5:13946863-13947104
  hypo
tggacctcatgtgggcggaaggcttcatccagaaatccaagtacctgcaggcaaagtttgaagttccactttcattcattgaacaaaagctcgtgagtgccttttacgcagccagacgctgcgctatacactatgaatagaacagctaataaaaacagatgtttactcagacatttaaaaatattaattgtagaatgcataattatcctatgcaacactcggaatgaaaaaataatgctgc

SEQ ID NO: 150225 - DNA, 31 bp, Homo sapiens; identical to SEQ ID NO: 69372
  chr5:14046165-14046196
  hypo

SEQ ID NO: 150226 - DNA, 27 bp, Homo sapiens
  chr5:14092559-14092586
  hypo
cataataaaaatgcatctaggcggccg

SEQ ID NO: 150227 - DNA, 100 bp, Homo sapiens; identical to SEQ ID NO: 69374
  chr5:14122605-14122705
  hypo

SEQ ID NO: 150228 - DNA, 1445 bp, Homo sapiens; identical to SEQ ID NO: 111186
  chr5:14142659-14144104
  hypo

SEQ ID NO: 150229 - DNA, 124 bp, Homo sapiens; identical to SEQ ID NO: 3833
  chr5:14144285-14144409
  hypo

SEQ ID NO: 150230 - DNA, 17 bp, Homo sapiens
  chr5:14152780-14152797
  hypo
cacgctttttaagagtc

SEQ ID NO: 150231 - DNA, 41 bp, Homo sapiens; identical to SEQ ID NO: 69379
  chr5:14173629-14173670
  hypo

SEQ ID NO: 150232 - DNA, 94 bp, Homo sapiens; identical to SEQ ID NO: 69380
  chr5:14253720-14253814
  hypo

SEQ ID NO: 150233 - DNA, 135 bp, Homo sapiens
  chr5:14269363-14269498
  hypo
ttctatggacaggagcgatttacattaagaaatcagatcacaccgctgatttattcattctttgtttctatgaatgataatgttgtagagactgaattctgctatattcctcccgaagatgttgattttgttgct

SEQ ID NO: 150234 - DNA, 182 bp, Homo sapiens; identical to SEQ ID NO: 19300
  chr5:14273914-14274096
  hypo

SEQ ID NO: 150235 - DNA, 30 bp, Homo sapiens
  chr5:14284658-14284688
  hypo
actgtgcaagctcagcgtagcttttggttt

SEQ ID NO: 150236 - DNA, 87 bp, Homo sapiens; identical to SEQ ID NO: 69383
  chr5:14286805-14286892
  hypo

SEQ ID NO: 150237 - DNA, 31 bp, Homo sapiens; identical to SEQ ID NO: 19301
  chr5:14289049-14289080
  hypo

SEQ ID NO: 150238 - DNA, 30 bp, Homo sapiens
  chr5:14297283-14297313
  hypo
agcaggagtggaaggcgtttgcggcagccc

SEQ ID NO: 150239 - DNA, 191 bp, Homo sapiens; identical to SEQ ID NO: 19302
  chr5:14303325-14303516
  hypo

SEQ ID NO: 150240 - DNA, 42 bp, Homo sapiens; identical to SEQ ID NO: 69386
  chr5:14315627-14315669
  hypo

SEQ ID NO: 150241 - DNA, 20 bp, Homo sapiens
  chr5:14317793-14317813
  hypo
tggtaaattcaaaagacgtt

SEQ ID NO: 150242 - DNA, 192 bp, Homo sapiens; identical to SEQ ID NO: 69388
  chr5:14319945-14320137
  hypo

SEQ ID NO: 150243 - DNA, 106 bp, Homo sapiens; identical to SEQ ID NO: 19305
  chr5:14325451-14325557
  hypo

SEQ ID NO: 150244 - DNA, 22 bp, Homo sapiens
  chr5:14327555-14327577
  hypo
agccaccgcgcctggccagaaa

SEQ ID NO: 150245 - DNA, 482 bp, Homo sapiens
  chr5:14328241-14328723
  hypo
accagttaaagtgcacgcccaatacgctagttaaaacaaagcactcaatacaccagttaaaacaacgcgctcaatacatgagttaaagtaatgtgcactcaatacgttaaaacaatgtgcaagttaaaacaatgcactacttaaaacaatgagctcaatacgctagttaaaacaatgtgctcaatacactagttaaaacaatgcactgaatacgcttgttaaaacaatgcactcgttaaagtaatgtgcactcaatgcactagttaaaacaatgcgcccaatatgctatttaaaacaatgtgctcaatacactagttagtgtgctcaatacgtgagttaaaacaatgcgctcaatacacgagttaaaataatgcgctcaatacgccagttaaaacaatggactcaatactctagttaaaataatgtaccgaatacattagttaaaatggaatatgtacagcctgtgccgtcaggagcttgaa

SEQ ID NO: 150246 - DNA, 316 bp, Homo sapiens; identical to SEQ ID NO: 69392
  chr5:14332849-14333165
  hypo

SEQ ID NO: 150247 - DNA, 30 bp, Homo sapiens; identical to SEQ ID NO: 19309
  chr5:14333434-14333464
  hypo

SEQ ID NO: 150248 - DNA, 160 bp, Homo sapiens; identical to SEQ ID NO: 69394
  chr5:14338463-14338623
  hypo

SEQ ID NO: 150249 - DNA, 315 bp, Homo sapiens
  chr5:14348847-14349162
  hypo
tcctctgtgtgtgtacgcacatgagcatgtgtgtttttcctgcatgtttgtgtgtgtacgcacgtgagcatgtgtttttcctgcgtgtttatgtgtgtgtacgcacgtgagcatgtttttcctgtatatgtgtatgcacatgagcatgtgtttttcctgcatgtttgtgtgtgtacgcacgtgagcatgtgtttttcctgtatgtgtgtacacacgtgagcatgtgtgtttttcctgtgtgtatatgtgtgcgcacgcacatgagcatgtttttcttgtgtgtttatttatgtgtacgcacgtgagcatgtgttt

SEQ ID NO: 150250 - DNA, 31 bp, Homo sapiens; identical to SEQ ID NO: 19312
  chr5:14368814-14368845
  hypo

SEQ ID NO: 150251 - DNA, 143 bp, Homo sapiens; identical to SEQ ID NO: 69397
  chr5:14369626-14369769
  hypo

SEQ ID NO: 150252 - DNA, 176 bp, Homo sapiens; identical to SEQ ID NO: 19313
  chr5:14378047-14378223
  hypo

SEQ ID NO: 150253 - DNA, 103 bp, Homo sapiens; identical to SEQ ID NO: 19314
  chr5:14381248-14381351
  hypo

SEQ ID NO: 150254 - DNA, 264 bp, Homo sapiens; identical to SEQ ID NO: 69400
  chr5:14390711-14390975
  hypo

SEQ ID NO: 150255 - DNA, 30 bp, Homo sapiens
  chr5:14394764-14394794
  hypo
atgtcacacccctcgcggcacaccttgtcc

SEQ ID NO: 150256 - DNA, 30 bp, Homo sapiens; identical to SEQ ID NO: 69401
  chr5:14405459-14405489
  hypo

SEQ ID NO: 150257 - DNA, 189 bp, Homo sapiens
  chr5:14405985-14406174
  hypo
gataaagcatatccgcgaagtcatccaggagcggacgatccacctgaagggagccctgaaggagcccattcacatccctaagaccgctcccgccacaagacagaagggaaggaggtgcgtgtctgggcgccactggaggtttgtggatgtgggagggaggggcgaggcggtgttagctcaccctgcttc

SEQ ID NO: 150258 - DNA, 436 bp, Homo sapiens; identical to SEQ ID NO: 69403
  chr5:14409997-14410433
  hypo

SEQ ID NO: 150259 - DNA, 101 bp, Homo sapiens
  chr5:14414263-14414364
  hypo
cctcttccccgccctcgttcccttttccacttcatagccagaaagcgtttacctgccacgccacagggccgcctgtggggcctgcacggcacctccggcat

SEQ ID NO: 150260 - DNA, 30 bp, Homo sapiens
  chr5:14414736-14414766
  hypo
aaaaaaaaaatgtaacgtaaagtttaccgt

SEQ ID NO: 150261 - DNA, 30 bp, Homo sapiens; identical to SEQ ID NO: 19318
  chr5:14418155-14418185
  hypo

SEQ ID NO: 150262 - DNA, 146 bp, Homo sapiens; identical to SEQ ID NO: 69405
  chr5:14420064-14420210
  hypo

SEQ ID NO: 150263 - DNA, 169 bp, Homo sapiens; identical to SEQ ID NO: 69406
  chr5:14426764-14426933
  hypo

SEQ ID NO: 150264 - DNA, 328 bp, Homo sapiens; identical to SEQ ID NO: 69407
  chr5:14427573-14427901
  hypo

SEQ ID NO: 150265 - DNA, 40 bp, Homo sapiens; identical to SEQ ID NO: 69408
  chr5:14431086-14431126
  hypo

SEQ ID NO: 150266 - DNA, 106 bp, Homo sapiens; identical to SEQ ID NO: 69409
  chr5:14435286-14435392
  hypo

SEQ ID NO: 150267 - DNA, 30 bp, Homo sapiens; identical to SEQ ID NO: 69410
  chr5:14441137-14441167
  hypo

SEQ ID NO: 150268 - DNA, 137 bp, Homo sapiens; identical to SEQ ID NO: 69411
  chr5:14441379-14441516
  hypo

SEQ ID NO: 150269 - DNA, 161 bp, Homo sapiens; identical to SEQ ID NO: 69412
  chr5:14454340-14454501
  hypo

SEQ ID NO: 150270 - DNA, 318 bp, Homo sapiens; identical to SEQ ID NO: 69413
  chr5:14459374-14459692
  hypo

SEQ ID NO: 150271 - DNA, 156 bp, Homo sapiens; identical to SEQ ID NO: 69414
  chr5:14460338-14460494
  hypo

SEQ ID NO: 150272 - DNA, 30 bp, Homo sapiens; identical to SEQ ID NO: 69415
  chr5:14460838-14460868
  hypo

SEQ ID NO: 150273 - DNA, 269 bp, Homo sapiens; identical to SEQ ID NO: 69416
  chr5:14461123-14461392
  hypo

SEQ ID NO: 150274 - DNA, 188 bp, Homo sapiens; identical to SEQ ID NO: 19323
  chr5:14485222-14485410
  hypo

SEQ ID NO: 150275 - DNA, 30 bp, Homo sapiens; identical to SEQ ID NO: 69418
  chr5:14487253-14487283
  hypo

SEQ ID NO: 150276 - DNA, 123 bp, Homo sapiens; identical to SEQ ID NO: 69419
  chr5:14487502-14487625
  hypo

SEQ ID NO: 150277 - DNA, 710 bp, Homo sapiens; identical to SEQ ID NO: 19324
  chr5:14487988-14488698
  hypo

SEQ ID NO: 150278 - DNA, 184 bp, Homo sapiens; identical to SEQ ID NO: 69421
  chr5:14489507-14489691
  hypo

SEQ ID NO: 150279 - DNA, 169 bp, Homo sapiens; identical to SEQ ID NO: 69422
  chr5:14492757-14492926
  hypo

SEQ ID NO: 150280 - DNA, 176 bp, Homo sapiens; identical to SEQ ID NO: 19327
  chr5:14493320-14493496
  hypo

SEQ ID NO: 150281 - DNA, 538 bp, Homo sapiens; identical to SEQ ID NO: 69424
  chr5:14498252-14498790
  hypo

SEQ ID NO: 150282 - DNA, 190 bp, Homo sapiens
  chr5:14501758-14501948
  hypo
attggacatggtttaaggaaacgcattcccagtgacaacctggggagaggtgaggaagcccacgtgaagatagggatgggcagatgctcggcctgggctggactgcaggtcaggtgagcgggccgaaagaggggagaggaaactaagtggggagaggaggctggatgagtggggtcgggagggccaggct

SEQ ID NO: 150283 - DNA, 142 bp, Homo sapiens; identical to SEQ ID NO: 69426
  chr5:14502170-14502312
  hypo

SEQ ID NO: 150284 - DNA, 99 bp, Homo sapiens; identical to SEQ ID NO: 69427
  chr5:14504055-14504154
  hypo

SEQ ID NO: 150285 - DNA, 31 bp, Homo sapiens; identical to SEQ ID NO: 19330
  chr5:14504531-14504562
  hypo

SEQ ID NO: 150286 - DNA, 31 bp, Homo sapiens; identical to SEQ ID NO: 69429
  chr5:14505470-14505501
  hypo

SEQ ID NO: 150287 - DNA, 370 bp, Homo sapiens; identical to SEQ ID NO: 69430
  chr5:14507311-14507681
  hypo

SEQ ID NO: 150288 - DNA, 143 bp, Homo sapiens; identical to SEQ ID NO: 69431
  chr5:14508325-14508468
  hypo

SEQ ID NO: 150289 - DNA, 31 bp, Homo sapiens; identical to SEQ ID NO: 69432
  chr5:14509070-14509101
  hypo

SEQ ID NO: 150290 - DNA, 77 bp, Homo sapiens; identical to SEQ ID NO: 69433
  chr5:14523712-14523789
  hypo

SEQ ID NO: 150291 - DNA, 26 bp, Homo sapiens
  chr5:14524113-14524139
  hypo
acacgcctataatcccgacactttgg

SEQ ID NO: 150292 - DNA, 26 bp, Homo sapiens
  chr5:14555335-14555361
  hypo
tttttttttttttttttgagacggag

SEQ ID NO: 150293 - DNA, 30 bp, Homo sapiens
  chr5:14580547-14580577
  hypo
attttgtatgagtaacgtggctctatacac

SEQ ID NO: 150294 - DNA, 30 bp, Homo sapiens
  chr5:14674368-14674398
  hypo
acccctccgctggtccgtggagacttggct

SEQ ID NO: 150295 - DNA, 138 bp, Homo sapiens; identical to SEQ ID NO: 69435
  chr5:14681596-14681734
  hypo

SEQ ID NO: 150296 - DNA, 30 bp, Homo sapiens; identical to SEQ ID NO: 69436
  chr5:14710775-14710805
  hypo

SEQ ID NO: 150297 - DNA, 30 bp, Homo sapiens; identical to SEQ ID NO: 69437
  chr5:14713028-14713058
  hypo

SEQ ID NO: 150298 - DNA, 26 bp, Homo sapiens
  chr5:14716332-14716358
  hypo
aggtgcagtggctcacgcctgtaatc

SEQ ID NO: 150299 - DNA, 30 bp, Homo sapiens
  chr5:14716868-14716898
  hypo
aggcaaagtccactccgatgatgtctatca

SEQ ID NO: 150300 - DNA, 322 bp, Homo sapiens
  chr5:14725551-14725873
  hypo
agttgattcacattccggtgctagcttcttatcccatcacggatggccagacctctggcactcatctgcaaaccccgagcctgcgagcactgcagtttgcataaaccgcttttccagcaccggcacaccaaatgtgatccacggatgtcacctgtgagtattccagaaggtttcctgggaccgtattctaacaaaacgctagcaggggagtcctctggaggtggtgagattaggactgattgaattttcctctttgtatttttccgtggcttccacaaagaacatgtattctttttatcagaaaaacatttttttttctttt

SEQ ID NO: 150301 - DNA, 278 bp, Homo sapiens; identical to SEQ ID NO: 69438
  chr5:14726309-14726587
  hypo

SEQ ID NO: 150302 - DNA, 30 bp, Homo sapiens; identical to SEQ ID NO: 69439
  chr5:14727021-14727051
  hypo

SEQ ID NO: 150303 - DNA, 223 bp, Homo sapiens
  chr5:14734655-14734878
  hypo
gaaaaccgaaagagccgggctgggcacctgcctctttgaggtggaactcgggtcaggcagcactcggcaggtgcagggatccgtggggcccaggctttacttccttaagggctcagaggggctggtgagcagtgcgtgtctgcaggcccagggtataaacaacgtgtcttccctgttgctttcaaactcattcaggtggtgggccccacgtgggttcttggca

SEQ ID NO: 150304 - DNA, 274 bp, Homo sapiens
  chr5:14756368-14756642
  hypo
tctctgtctctcaagcgtctcagtcccaaagtagcatccttcccacgtgatgcagatcataatgagggctctcatttgggtctgagttattacagtcattaccggtgctcactgactgattagggcctactgttttcttgccttcaagtttgggcaggatctgacctgacactttgggagatgaggaggaagatgctacgaggggagcagacgaaaagcccgaggaacagcaggtctggagaaggtttcaagttcatgacgggctctgtttaag

SEQ ID NO: 150305 - DNA, 40 bp, Homo sapiens; identical to SEQ ID NO: 19333
  chr5:14774553-14774593
  hypo

SEQ ID NO: 150306 - DNA, 39 bp, Homo sapiens; identical to SEQ ID NO: 19334
  chr5:14774712-14774751
  hypo

SEQ ID NO: 150307 - DNA, 162 bp, Homo sapiens
  chr5:14780228-14780390
  hypo
ttcactgtgaatgaacggtgcctggatgggcgacagggcattcaggagaagtggctgtgcaagtcaggacgtgccaagggctgctgggccctgaccttgttatacacattcatgaccacatggttagaaaataaaatcatgggccagacatggtggctcacg

SEQ ID NO: 150308 - DNA, 133 bp, Homo sapiens
  chr5:14780931-14781064
  hypo
aaaagacaactcctccgtctacagcttcaatgatctcattatacttacgatgacatcaaggaaactgaccattgtagtagacgaaatctagttttaaaatgtgccttacaccctaagtcgtcagaaaatgtac

SEQ ID NO: 150309 - DNA, 26 bp, Homo sapiens
  chr5:14789059-14789085
  hypo
gggcacggtggctcacgcctgtaatc

SEQ ID NO: 150310 - DNA, 86 bp, Homo sapiens
  chr5:14789324-14789410
  hypo
gaaaccctgtctccaaaaacaacaacaacaacaactcagttagcatatataccatagtatttatttaagaacgtaagaatggttcc

SEQ ID NO: 150311 - DNA, 30 bp, Homo sapiens; identical to SEQ ID NO: 69443
  chr5:14838693-14838723
  hypo

SEQ ID NO: 150312 - DNA, 35 bp, Homo sapiens; identical to SEQ ID NO: 69444
  chr5:14839000-14839035
  hypo

SEQ ID NO: 150313 - DNA, 213 bp, Homo sapiens
  chr5:14846241-14846454
  hypo
aagcatgagccaccgcgcccggccgtaaaacttattttgatgcagccaaattctaatctctgagcatcttttggtaaatatgcataaggcagtgtgtcaaactgcgaggaggtcataatcttaaaagattaaagactgttacctaagtgtctactatttccatgatacaaggattcccactgctttcctttaattttccgtacaggcaatgcc

SEQ ID NO: 150314 - DNA, 111 bp, Homo sapiens; identical to SEQ ID NO: 69445
  chr5:14849839-14849950
  hypo

SEQ ID NO: 150315 - DNA, 30 bp, Homo sapiens; identical to SEQ ID NO: 69446
  chr5:14874817-14874847
  hypo

SEQ ID NO: 150316 - DNA, 30 bp, Homo sapiens; identical to SEQ ID NO: 69447
  chr5:14904817-14904847
  hypo

SEQ ID NO: 150317 - DNA, 40 bp, Homo sapiens; identical to SEQ ID NO: 69448
  chr5:14934637-14934677
  hypo

SEQ ID NO: 150318 - DNA, 30 bp, Homo sapiens
  chr5:14959305-14959335
  hypo
ctttgcggaccagctcgaccagaggaaaaa

SEQ ID NO: 150319 - DNA, 34 bp, Homo sapiens
  chr5:14959675-14959709
  hypo
atgctccaaatagcgcgcccggggacctgggaaa

SEQ ID NO: 150320 - DNA, 45 bp, Homo sapiens; identical to SEQ ID NO: 69449
  chr5:15343331-15343376
  hypo

SEQ ID NO: 150321 - DNA, 30 bp, Homo sapiens; identical to SEQ ID NO: 69450
  chr5:15346555-15346585
  hypo

SEQ ID NO: 150322 - DNA, 372 bp, Homo sapiens; identical to SEQ ID NO: 41367
  chr5:15499744-15500116
  hypo

SEQ ID NO: 150323 - DNA, 118 bp, Homo sapiens; identical to SEQ ID NO: 3839
  chr5:15500570-15500688
  hypo

SEQ ID NO: 150324 - DNA, 208 bp, Homo sapiens; identical to SEQ ID NO: 3840
  chr5:15500735-15500943
  hypo

SEQ ID NO: 150325 - DNA, 17 bp, Homo sapiens
  chr5:15519156-15519173
  hypo
aatctgggccctgcagc

SEQ ID NO: 150326 - DNA, 30 bp, Homo sapiens; identical to SEQ ID NO: 19339
  chr5:15928351-15928381
  hypo

SEQ ID NO: 150327 - DNA, 873 bp, Homo sapiens; identical to SEQ ID NO: 69456
  chr5:15936620-15937493
  hypo

SEQ ID NO: 150328 - DNA, 43 bp, Homo sapiens; identical to SEQ ID NO: 19340
  chr5:16032774-16032817
  hypo

SEQ ID NO: 150329 - DNA, 162 bp, Homo sapiens; identical to SEQ ID NO: 3841
  chr5:16178990-16179152
  hypo

SEQ ID NO: 150330 - DNA, 140 bp, Homo sapiens; identical to SEQ ID NO: 3842
  chr5:16179266-16179406
  hypo

SEQ ID NO: 150331 - DNA, 30 bp, Homo sapiens; identical to SEQ ID NO: 41375
  chr5:16187512-16187542
  hypo

SEQ ID NO: 150332 - DNA, 76 bp, Homo sapiens; identical to SEQ ID NO: 69461
  chr5:16467045-16467121
  hypo

SEQ ID NO: 150333 - DNA, 36 bp, Homo sapiens
  chr5:16488903-16488939
  hypo
agaccttaggccgggcgtggtggctcacgcctataa

SEQ ID NO: 150334 - DNA, 36 bp, Homo sapiens; identical to SEQ ID NO: 69462
  chr5:16503481-16503517
  hypo

SEQ ID NO: 150335 - DNA, 31 bp, Homo sapiens; identical to SEQ ID NO: 69463
  chr5:16537287-16537318
  hypo

SEQ ID NO: 150336 - DNA, 293 bp, Homo sapiens; identical to SEQ ID NO: 41377
  chr5:16616790-16617083
  hypo

SEQ ID NO: 150337 - DNA, 205 bp, Homo sapiens; identical to SEQ ID NO: 69465
  chr5:16668249-16668454
  hypo

SEQ ID NO: 150338 - DNA, 385 bp, Homo sapiens; identical to SEQ ID NO: 19343
  chr5:16670786-16671171
  hypo

SEQ ID NO: 150339 - DNA, 37 bp, Homo sapiens; identical to SEQ ID NO: 69467
  chr5:16671881-16671918
  hypo

SEQ ID NO: 150340 - DNA, 43 bp, Homo sapiens
  chr5:16674282-16674325
  hypo
atgaaaattcttggccgggcgccgtggctaacgcctgtaatcc

SEQ ID NO: 150341 - DNA, 31 bp, Homo sapiens; identical to SEQ ID NO: 19345
  chr5:16679600-16679631
  hypo

SEQ ID NO: 150342 - DNA, 35 bp, Homo sapiens; identical to SEQ ID NO: 69470
  chr5:16680074-16680109
  hypo

SEQ ID NO: 150343 - DNA, 312 bp, Homo sapiens; identical to SEQ ID NO: 19346
  chr5:16681934-16682246
  hypo

SEQ ID NO: 150344 - DNA, 804 bp, Homo sapiens; identical to SEQ ID NO: 69472
  chr5:16701009-16701813
  hypo

SEQ ID NO: 150345 - DNA, 30 bp, Homo sapiens
  chr5:16723733-16723763
  hypo
ttaggcaaaaacttacgtccacacaaaaat

SEQ ID NO: 150346 - DNA, 32 bp, Homo sapiens; identical to SEQ ID NO: 19348
  chr5:16729561-16729593
  hypo

SEQ ID NO: 150347 - DNA, 31 bp, Homo sapiens; identical to SEQ ID NO: 19349
  chr5:16729832-16729863
  hypo

SEQ ID NO: 150348 - DNA, 30 bp, Homo sapiens
  chr5:16735764-16735794
  hypo
acactctagcctaggcgacagagcctcggg

SEQ ID NO: 150349 - DNA, 249 bp, Homo sapiens; identical to SEQ ID NO: 69475
  chr5:16744496-16744745
  hypo

SEQ ID NO: 150350 - DNA, 149 bp, Homo sapiens
  chr5:16745034-16745183
  hypo
taaaaatatttgacacgctcctatgaacgaatatctgacattttcacattaatctcaaatggccagaagaagagcagcgaatggaagatgcagaaatgcagatttcattcattacaattaagacctttcccaggccgggcgcggtagct

SEQ ID NO: 150351 - DNA, 135 bp, Homo sapiens; identical to SEQ ID NO: 69476
  chr5:16750562-16750697
  hypo

SEQ ID NO: 150352 - DNA, 162 bp, Homo sapiens; identical to SEQ ID NO: 69477
  chr5:16766143-16766305
  hypo

SEQ ID NO: 150353 - DNA, 30 bp, Homo sapiens; identical to SEQ ID NO: 69478
  chr5:16779162-16779192
  hypo

SEQ ID NO: 150354 - DNA, 312 bp, Homo sapiens; identical to SEQ ID NO: 19350
  chr5:16794679-16794991
  hypo

SEQ ID NO: 150355 - DNA, 30 bp, Homo sapiens
  chr5:16804135-16804165
  hypo
tacggtcacggagcccgtgagtcagagtga

SEQ ID NO: 150356 - DNA, 43 bp, Homo sapiens; identical to SEQ ID NO: 69480
  chr5:16814252-16814295
  hypo

SEQ ID NO: 150357 - DNA, 43 bp, Homo sapiens; identical to SEQ ID NO: 69481
  chr5:16814534-16814577
  hypo

SEQ ID NO: 150358 - DNA, 33 bp, Homo sapiens; identical to SEQ ID NO: 19351
  chr5:16816657-16816690
  hypo

SEQ ID NO: 150359 - DNA, 28 bp, Homo sapiens
  chr5:16870696-16870724
  hypo
ctttgggtaaaataaaaatttcgcagca

SEQ ID NO: 150360 - DNA, 30 bp, Homo sapiens
  chr5:16896015-16896045
  hypo
tgccgcacagcagggcgggggcagggagga

SEQ ID NO: 150361 - DNA, 30 bp, Homo sapiens
  chr5:16918910-16918940
  hypo
actgaaagtatttttcgagccctcactcgg

SEQ ID NO: 150362 - DNA, 55 bp, Homo sapiens
  chr5:16920450-16920505
  hypo
aaaaaggaacaaaaccggcacgtgtaccaacatggatgggcggcaaaggcactga

SEQ ID NO: 150363 - DNA, 1625 bp, Homo sapiens; identical to SEQ ID NO: 111214
  chr5:16935457-16937082
  hypo

SEQ ID NO: 150364 - DNA, 34 bp, Homo sapiens; identical to SEQ ID NO: 19353
  chr5:16952527-16952561
  hypo

SEQ ID NO: 150365 - DNA, 121 bp, Homo sapiens; identical to SEQ ID NO: 69486
  chr5:16964572-16964693
  hypo

SEQ ID NO: 150366 - DNA, 89 bp, Homo sapiens
  chr5:16968118-16968207
  hypo
agaactagaagagaacgtaatttcactttgctgccttaagtcttatgaaatggtctttcttggccaggcgcgatggctcacgcttgtaa

SEQ ID NO: 150367 - DNA, 121 bp, Homo sapiens
  chr5:16969885-16970006
  hypo
tccgtctcaaaaaaaaaaaaaatggactcatttaggctgggcggtggctcacgcctgtaatcctaacacttttggaggcctcggttcatgaggtcaagagattgagaccatcctggccaac

SEQ ID NO: 150368 - DNA, 20 bp, Homo sapiens
  chr5:16970185-16970205
  hypo
tctcaaaaaaaattgactta

SEQ ID NO: 150369 - DNA, 38 bp, Homo sapiens
  chr5:17006737-17006775
  hypo
agccatggccaggcacggtggctcacgcctgtaatccc

SEQ ID NO: 150370 - DNA, 33 bp, Homo sapiens; identical to SEQ ID NO: 19356
  chr5:17032023-17032056
  hypo

SEQ ID NO: 150371 - DNA, 30 bp, Homo sapiens
  chr5:17040781-17040811
  hypo
atttcttctccaggacggcatcatcaccta

SEQ ID NO: 150372 - DNA, 20 bp, Homo sapiens
  chr5:17081892-17081912
  hypo
ggtctcgatctcctgacctc

SEQ ID NO: 150373 - DNA, 36 bp, Homo sapiens; identical to SEQ ID NO: 69490
  chr5:17159690-17159726
  hypo

SEQ ID NO: 150374 - DNA, 36 bp, Homo sapiens; identical to SEQ ID NO: 19357
  chr5:17161189-17161225
  hypo

SEQ ID NO: 150375 - DNA, 30 bp, Homo sapiens
  chr5:17196548-17196578
  hypo
acttatcctcgctcccgtcacgcacaccac

SEQ ID NO: 150376 - DNA, 232 bp, Homo sapiens; identical to SEQ ID NO: 41383
  chr5:17217632-17217864
  hypo

SEQ ID NO: 150377 - DNA, 942 bp, Homo sapiens; identical to SEQ ID NO: 41384
  chr5:17217991-17218933
  hypo

SEQ ID NO: 150378 - DNA, 17 bp, Homo sapiens
  chr5:17235666-17235683
  hypo
ggcctgctctttatgtt

SEQ ID NO: 150379 - DNA, 27 bp, Homo sapiens
  chr5:17250714-17250741
  hypo
ttttattttagttttttgagacggagt

SEQ ID NO: 150380 - DNA, 26 bp, Homo sapiens
  chr5:17250980-17251006
  hypo
gggattacaggcgtgagccacagcgc

SEQ ID NO: 150381 - DNA, 670 bp, Homo sapiens; identical to SEQ ID NO: 69496
  chr5:17275348-17276018
  hypo

SEQ ID NO: 150382 - DNA, 30 bp, Homo sapiens
  chr5:17276317-17276347
  hypo
gaaagtgcagtacatcgtttgtacctgaaa

SEQ ID NO: 150383 - DNA, 45 bp, Homo sapiens
  chr5:17298135-17298180
  hypo
ctattttattttattttatttcgagacagagtctcgctgtgttac

SEQ ID NO: 150384 - DNA, 26 bp, Homo sapiens
  chr5:17321854-17321880
  hypo
attaattttactggccaggggcggtg

SEQ ID NO: 150385 - DNA, 379 bp, Homo sapiens; identical to SEQ ID NO: 19361
  chr5:17354379-17354758
  hypo

SEQ ID NO: 150386 - DNA, 184 bp, Homo sapiens
  chr5:17491365-17491549
  hypo
tcacatcagaactaccagttacgggggaagagaaaaaagaaaacacaagcaaacagaaaagaagtcctctagagtgcaaggtttcccaggagcgtgggctctccggcaccctctccacggaggcggcgggccagctgcatgtctcggggcataattgtgacgcgcctggcatggatggcacaca

SEQ ID NO: 150387 - DNA, 43 bp, Homo sapiens
  chr5:17491984-17492027
  hypo
gcctgtgagttgagatccatgcgcaggactctcccacacactt

SEQ ID NO: 150388 - DNA, 157 bp, Homo sapiens; identical to SEQ ID NO: 69500
  chr5:17512035-17512192
  hypo

SEQ ID NO: 150389 - DNA, 160 bp, Homo sapiens; identical to SEQ ID NO: 19362
  chr5:17670363-17670523
  hypo

SEQ ID NO: 150390 - DNA, 43 bp, Homo sapiens; identical to SEQ ID NO: 69502
  chr5:17670807-17670850
  hypo

SEQ ID NO: 150391 - DNA, 19 bp, Homo sapiens
  chr5:17719751-17719770
  hypo
atggatttgtggcctgagt

SEQ ID NO: 150392 - DNA, 30 bp, Homo sapiens
  chr5:17778019-17778049
  hypo
ccgttgaacttctctcgtttgtttccattt

SEQ ID NO: 150393 - DNA, 17 bp, Homo sapiens
  chr5:17778589-17778606
  hypo
tgccagtccatgttctt

SEQ ID NO: 150394 - DNA, 29 bp, Homo sapiens
  chr5:17779501-17779530
  hypo
tgggccgggcgcagtggctcacgcctgta

SEQ ID NO: 150395 - DNA, 35 bp, Homo sapiens
  chr5:17924525-17924560
  hypo
tttttttttttttttttgagacggagtcttgctct

SEQ ID NO: 150396 - DNA, 35 bp, Homo sapiens
  chr5:17924799-17924834
  hypo
attacaggcatgagccaccgcgcccggccgaaaat

SEQ ID NO: 150397 - DNA, 77 bp, Homo sapiens; identical to SEQ ID NO: 3853
  chr5:17987027-17987104
  hypo

SEQ ID NO: 150398 - DNA, 17 bp, Homo sapiens
  chr5:17987223-17987240
  hypo
ctcgcctgccactcacc

SEQ ID NO: 150399 - DNA, 138 bp, Homo sapiens
  chr5:18034127-18034265
  hypo
cagctaaaatctacatatttgcgactttatgtgctttgaactacatttccacatttcctctctcccaccaccgttttattctctgtgtatatttgtccttttaaaaaaagattccggccgggcgcggtggctcgcgcc

SEQ ID NO: 150400 - DNA, 67 bp, Homo sapiens; identical to SEQ ID NO: 69509
  chr5:18119292-18119359
  hypo

SEQ ID NO: 150401 - DNA, 32 bp, Homo sapiens
  chr5:18296458-18296490
  hypo
agttctgggattacaagcgtgacccaccgcgc

SEQ ID NO: 150402 - DNA, 37 bp, Homo sapiens; identical to SEQ ID NO: 69510
  chr5:18380065-18380102
  hypo

SEQ ID NO: 150403 - DNA, 170 bp, Homo sapiens; identical to SEQ ID NO: 19366
  chr5:18482070-18482240
  hypo

SEQ ID NO: 150404 - DNA, 227 bp, Homo sapiens
  chr5:18793519-18793746
  hypo
tgcccagcttgggggggacaccggacgactggaggccacatgtggacttagcaatccaccgctccatgtacctggatacgtttccaggcaaggcttcatagacagttgtgaagaccggtcagtgaaagtgaaacctgtatctttgcaccgtggcatcatcagctgcttggctccccgcttatgcactgtgtatgtctctcccgtacgtgagtacattttgggggtgg

SEQ ID NO: 150405 - DNA, 26 bp, Homo sapiens
  chr5:19219217-19219243
  hypo
agagcgagactctgtctcaaaaaaaa

SEQ ID NO: 150406 - DNA, 32 bp, Homo sapiens; identical to SEQ ID NO: 69512
  chr5:19289323-19289355
  hypo

SEQ ID NO: 150407 - DNA, 23 bp, Homo sapiens
  chr5:20378472-20378495
  hypo
ggtttcaccgtgttagccaggat

SEQ ID NO: 150408 - DNA, 30 bp, Homo sapiens
  chr5:21015160-21015190
  hypo
cttgccgcaatgggacggtgtcctgtccaa

SEQ ID NO: 150409 - DNA, 31 bp, Homo sapiens; identical to SEQ ID NO: 69513
  chr5:22983782-22983813
  hypo

SEQ ID NO: 150410 - DNA, 95 bp, Homo sapiens; identical to SEQ ID NO: 69514
  chr5:23726882-23726977
  hypo

SEQ ID NO: 150411 - DNA, 43 bp, Homo sapiens
  chr5:24294249-24294292
  hypo
tgtttttctgtttctctttatcgaggatttgtgttatgctctt

SEQ ID NO: 150412 - DNA, 30 bp, Homo sapiens; identical to SEQ ID NO: 19367
  chr5:24710956-24710986
  hypo

SEQ ID NO: 150413 - DNA, 18 bp, Homo sapiens
  chr5:25901086-25901104
  hypo
acttatgaaatatcagct

SEQ ID NO: 150414 - DNA, 43 bp, Homo sapiens; identical to SEQ ID NO: 69517
  chr5:26324222-26324265
  hypo

SEQ ID NO: 150415 - DNA, 34 bp, Homo sapiens; identical to SEQ ID NO: 19368
  chr5:27121726-27121760
  hypo

SEQ ID NO: 150416 - DNA, 34 bp, Homo sapiens; identical to SEQ ID NO: 19369
  chr5:27121939-27121973
  hypo

SEQ ID NO: 150417 - DNA, 138 bp, Homo sapiens
  chr5:27217837-27217975
  hypo
ctggatgtcaagaggagcacaacagaggaggaacacagaggtggctagacacagagagtaacacactgacggctggacatacggagtaaaacaccgacaggcacgggcaccctggcaggccaccgaccattagaaata

SEQ ID NO: 150418 - DNA, 230 bp, Homo sapiens; identical to SEQ ID NO: 69520
  chr5:27523814-27524044
  hypo

SEQ ID NO: 150419 - DNA, 30 bp, Homo sapiens; identical to SEQ ID NO: 3856
  chr5:28974970-28975000
  hypo

SEQ ID NO: 150420 - DNA, 122 bp, Homo sapiens; identical to SEQ ID NO: 3857
  chr5:29296853-29296975
  hypo

SEQ ID NO: 150421 - DNA, 18 bp, Homo sapiens
  chr5:29297094-29297112
  hypo
gtcacctctcagggggac

SEQ ID NO: 150422 - DNA, 23 bp, Homo sapiens
  chr5:29348394-29348417
  hypo
tgagccaccgcgcccggccagaa

SEQ ID NO: 150423 - DNA, 56 bp, Homo sapiens; identical to SEQ ID NO: 69524
  chr5:29379761-29379817
  hypo

SEQ ID NO: 150424 - DNA, 22 bp, Homo sapiens
  chr5:29628060-29628082
  hypo
cgcaccctggcctagtgacttc

SEQ ID NO: 150425 - DNA, 30 bp, Homo sapiens; identical to SEQ ID NO: 3858
  chr5:30298760-30298790
  hypo

SEQ ID NO: 150426 - DNA, 23 bp, Homo sapiens
  chr5:30694203-30694226
  hypo
gctgagatcgcaccactgcactc

SEQ ID NO: 150427 - DNA, 33 bp, Homo sapiens; identical to SEQ ID NO: 19374
  chr5:30864344-30864377
  hypo

SEQ ID NO: 150428 - DNA, 100 bp, Homo sapiens
  chr5:31410340-31410440
  hypo
tgtgtataatcctttcgttaactataataggattatttacaatgctgccagaccatatcggaaactgcaaaagacgacatttgtccgcagagctttgcac

SEQ ID NO: 150429 - DNA, 161 bp, Homo sapiens
  chr5:31424608-31424769
  hypo
aagggagccatttaacgcactctagagtactaaataaaatgtcattatttgaaatacggaactatttcagacactgactccacttatggcaaattcaacagtgctggcaaactaattttttttttaagtgtattcaccactcaaaccgcctgtagtgactc

SEQ ID NO: 150430 - DNA, 161 bp, Homo sapiens
  chr5:31435823-31435984
  hypo
gaagagcatgtcagacgtaactacaaatgctgcagatgtcttctatacctttgctagcatggcaaggtgctgattctgaacaatggcagtccgataggttgctaatcctccttcttccagactaggaaacaaatagtacaaatggacgctacaaaaaaaaa

SEQ ID NO: 150431 - DNA, 31 bp, Homo sapiens; identical to SEQ ID NO: 19375
  chr5:31454672-31454703
  hypo

SEQ ID NO: 150432 - DNA, 30 bp, Homo sapiens
  chr5:31504310-31504340
  hypo
gcactttactaagagcgtcgctccagggcc

SEQ ID NO: 150433 - DNA, 27 bp, Homo sapiens
  chr5:31575925-31575952
  hypo
gactccgtctcaaaaataaataaataa

SEQ ID NO: 150434 - DNA, 47 bp, Homo sapiens; identical to SEQ ID NO: 69531
  chr5:31599716-31599763
  hypo

SEQ ID NO: 150435 - DNA, 720 bp, Homo sapiens; identical to SEQ ID NO: 111234
  chr5:31639164-31639884
  hypo

SEQ ID NO: 150436 - DNA, 26 bp, Homo sapiens
  chr5:31654177-31654203
  hypo
accgcgcctggccccaatatatgttt

SEQ ID NO: 150437 - DNA, 21 bp, Homo sapiens
  chr5:31655566-31655587
  hypo
tgcgcccggcctagtttttta

SEQ ID NO: 150438 - DNA, 43 bp, Homo sapiens; identical to SEQ ID NO: 69534
  chr5:31662737-31662780
  hypo

SEQ ID NO: 150439 - DNA, 32 bp, Homo sapiens; identical to SEQ ID NO: 19376
  chr5:31670493-31670525
  hypo

SEQ ID NO: 150440 - DNA, 31 bp, Homo sapiens; identical to SEQ ID NO: 19377
  chr5:31670824-31670855
  hypo

SEQ ID NO: 150441 - DNA, 26 bp, Homo sapiens
  chr5:31692592-31692618
  hypo
cgagcgagggctgtgagggctgccag

SEQ ID NO: 150442 - DNA, 30 bp, Homo sapiens
  chr5:31712838-31712868
  hypo
tcaacagggaagtgacgtgtgcacagaaaa

SEQ ID NO: 150443 - DNA, 32 bp, Homo sapiens; identical to SEQ ID NO: 19378
  chr5:31724693-31724725
  hypo

SEQ ID NO: 150444 - DNA, 156 bp, Homo sapiens; identical to SEQ ID NO: 69538
  chr5:31750620-31750776
  hypo

SEQ ID NO: 150445 - DNA, 30 bp, Homo sapiens
  chr5:31758167-31758197
  hypo
ctgttttgtacgtctcgcctgacaggcgct

SEQ ID NO: 150446 - DNA, 43 bp, Homo sapiens; identical to SEQ ID NO: 69539
  chr5:31758532-31758575
  hypo

SEQ ID NO: 150447 - DNA, 19 bp, Homo sapiens
  chr5:31760732-31760751
  hypo
tttgttaagtgagaggcca

SEQ ID NO: 150448 - DNA, 30 bp, Homo sapiens
  chr5:31764154-31764184
  hypo
agggcacctgctgcccgtcacggatgtcca

SEQ ID NO: 150449 - DNA, 30 bp, Homo sapiens
  chr5:31774052-31774082
  hypo
gcagctggtgaaaaccgatgtcgacaccta

SEQ ID NO: 150450 - DNA, 43 bp, Homo sapiens; identical to SEQ ID NO: 69541
  chr5:31797548-31797591
  hypo

SEQ ID NO: 150451 - DNA, 42 bp, Homo sapiens; identical to SEQ ID NO: 69542
  chr5:31797710-31797752
  hypo

SEQ ID NO: 150452 - DNA, 31 bp, Homo sapiens; identical to SEQ ID NO: 19379
  chr5:31802727-31802758
  hypo

SEQ ID NO: 150453 - DNA, 1257 bp, Homo sapiens; identical to SEQ ID NO: 111235
  chr5:31854441-31855698
  hypo

SEQ ID NO: 150454 - DNA, 30 bp, Homo sapiens; identical to SEQ ID NO: 69545
  chr5:31889061-31889091
  hypo

SEQ ID NO: 150455 - DNA, 58 bp, Homo sapiens; identical to SEQ ID NO: 19381
  chr5:31908393-31908451
  hypo

SEQ ID NO: 150456 - DNA, 29 bp, Homo sapiens
  chr5:31929659-31929688
  hypo
aaagagcagtggaaggccaggcgcagtgg

SEQ ID NO: 150457 - DNA, 30 bp, Homo sapiens; identical to SEQ ID NO: 69548
  chr5:31964786-31964816
  hypo

SEQ ID NO: 150458 - DNA, 29 bp, Homo sapiens
  chr5:31965115-31965144
  hypo
ccgcgcccggccagtttttttgccatttt

SEQ ID NO: 150459 - DNA, 30 bp, Homo sapiens; identical to SEQ ID NO: 69550
  chr5:31985884-31985914
  hypo

SEQ ID NO: 150460 - DNA, 30 bp, Homo sapiens
  chr5:32003690-32003720
  hypo
ccacctcctcaaaatcgtgtgctgaagaac

SEQ ID NO: 150461 - DNA, 93 bp, Homo sapiens
  chr5:32004110-32004203
  hypo
tccagcctctcctgctagtttggaaaatggggaaggggatggcttttctttgtcaagtcgttatccagaaacacaaaacgtaagattaaaaaa

SEQ ID NO: 150462 - DNA, 33 bp, Homo sapiens; identical to SEQ ID NO: 69551
  chr5:32012490-32012523
  hypo

SEQ ID NO: 150463 - DNA, 26 bp, Homo sapiens
  chr5:32042021-32042047
  hypo
aaaaaaaaaaacatcaattgccgggc

SEQ ID NO: 150464 - DNA, 30 bp, Homo sapiens; identical to SEQ ID NO: 69553
  chr5:32089755-32089785
  hypo

SEQ ID NO: 150465 - DNA, 30 bp, Homo sapiens; identical to SEQ ID NO: 69554
  chr5:32090858-32090888
  hypo

SEQ ID NO: 150466 - DNA, 30 bp, Homo sapiens
  chr5:32103795-32103825
  hypo
gttggtcacaggacacgtagcctctgcagt

SEQ ID NO: 150467 - DNA, 17 bp, Homo sapiens
  chr5:32156721-32156738
  hypo
ggcgggggggatggttt

SEQ ID NO: 150468 - DNA, 30 bp, Homo sapiens
  chr5:32163498-32163528
  hypo
tggccgggggcacagcggctcacatctgtg

SEQ ID NO: 150469 - DNA, 22 bp, Homo sapiens
  chr5:32164782-32164804
  hypo
gagctaccgcgcccggccaaga

SEQ ID NO: 150470 - DNA, 36 bp, Homo sapiens
  chr5:32184015-32184051
  hypo
gattacaggcgtgaaacaccgcgcccggcctcacat

SEQ ID NO: 150471 - DNA, 35 bp, Homo sapiens
  chr5:32199874-32199909
  hypo
ccgttgctctccattcttgccgacaactggtattg

SEQ ID NO: 150472 - DNA, 30 bp, Homo sapiens
  chr5:32228427-32228457
  hypo
actgaaagtttttccgaacatgtaacattc

SEQ ID NO: 150473 - DNA, 29 bp, Homo sapiens
  chr5:32282176-32282205
  hypo
ccacactgtactcaatcatcacgagcatc

SEQ ID NO: 150474 - DNA, 30 bp, Homo sapiens
  chr5:32286950-32286980
  hypo
gggcactgctcctctcgagttcacatgctc

SEQ ID NO: 150475 - DNA, 102 bp, Homo sapiens; identical to SEQ ID NO: 69557
  chr5:32314456-32314558
  hypo

SEQ ID NO: 150476 - DNA, 45 bp, Homo sapiens; identical to SEQ ID NO: 69558
  chr5:32333127-32333172
  hypo

SEQ ID NO: 150477 - DNA, 19 bp, Homo sapiens
  chr5:32424370-32424389
  hypo
gggcgtggtggctcacgcc

SEQ ID NO: 150478 - DNA, 18 bp, Homo sapiens
  chr5:32424628-32424646
  hypo
ctccgtctcaaaaaaaaa

SEQ ID NO: 150479 - DNA, 28 bp, Homo sapiens
  chr5:32440465-32440493
  hypo
aaacaaggttgggcgcggtggctcatgc

SEQ ID NO: 150480 - DNA, 31 bp, Homo sapiens; identical to SEQ ID NO: 19389
  chr5:32443798-32443829
  hypo

SEQ ID NO: 150481 - DNA, 229 bp, Homo sapiens; identical to SEQ ID NO: 69562
  chr5:32445348-32445577
  hypo

SEQ ID NO: 150482 - DNA, 34 bp, Homo sapiens; identical to SEQ ID NO: 19391
  chr5:32446097-32446131
  hypo

SEQ ID NO: 150483 - DNA, 77 bp, Homo sapiens
  chr5:32526514-32526591
  hypo
cttactcacttctaatcgtgtttctccctatttgtgaaataacatgaaatccttctccacgccgggcgcggtggctc

SEQ ID NO: 150484 - DNA, 30 bp, Homo sapiens; identical to SEQ ID NO: 41401
  chr5:32567716-32567746
  hypo

SEQ ID NO: 150485 - DNA, 218 bp, Homo sapiens
  chr5:32584343-32584561
  hypo
ggattacaggggtgagccaccgcgcctgatgtcagtgtttattttcatggcttcttttatttcattatgatggagagtttcacaacaaactaagggattagtttgtatttttgtcagcatttaatcctttaaaagtcaggtaattctagaaagggacgtgtgggggatgctttcacgtttagtgttcagactttgattccatccgctgtgttctttgc

SEQ ID NO: 150486 - DNA, 89 bp, Homo sapiens
  chr5:32640982-32641071
  hypo
tcaggttatgtaggccgggctgcctgccagaaacctcctgctgcggtggggtgccctgggccacgaggccttaagacagatgggaacgg

SEQ ID NO: 150487 - DNA, 1165 bp, Homo sapiens; identical to SEQ ID NO: 111240
  chr5:32709812-32710977
  hypo

SEQ ID NO: 150488 - DNA, 1065 bp, Homo sapiens; identical to SEQ ID NO: 3865
  chr5:32711036-32712101
  hypo

SEQ ID NO: 150489 - DNA, 812 bp, Homo sapiens; identical to SEQ ID NO: 41404
  chr5:32712289-32713101
  hypo

SEQ ID NO: 150490 - DNA, 72 bp, Homo sapiens; identical to SEQ ID NO: 111243
  chr5:32713504-32713576
  hypo

SEQ ID NO: 150491 - DNA, 38 bp, Homo sapiens; identical to SEQ ID NO: 69568
  chr5:32754967-32755005
  hypo

SEQ ID NO: 150492 - DNA, 38 bp, Homo sapiens; identical to SEQ ID NO: 69569
  chr5:32755244-32755282
  hypo

SEQ ID NO: 150493 - DNA, 36 bp, Homo sapiens; identical to SEQ ID NO: 19395
  chr5:32764593-32764629
  hypo

SEQ ID NO: 150494 - DNA, 30 bp, Homo sapiens
  chr5:32770000-32770030
  hypo
aagaagtgagagcgacgtggctcgctgcca

SEQ ID NO: 150495 - DNA, 30 bp, Homo sapiens
  chr5:32770648-32770678
  hypo
gaatgattttcatctcgttgaaaggccact

SEQ ID NO: 150496 - DNA, 360 bp, Homo sapiens; identical to SEQ ID NO: 69571
  chr5:32782524-32782884
  hypo

SEQ ID NO: 150497 - DNA, 112 bp, Homo sapiens; identical to SEQ ID NO: 69572
  chr5:32793678-32793790
  hypo

SEQ ID NO: 150498 - DNA, 30 bp, Homo sapiens
  chr5:32832875-32832905
  hypo
actgtgtgcatctctcgtgtgcgggggttg

SEQ ID NO: 150499 - DNA, 29 bp, Homo sapiens
  chr5:32835693-32835722
  hypo
catgcagtaggcaatcggtaaatatttct

SEQ ID NO: 150500 - DNA, 29 bp, Homo sapiens
  chr5:32836021-32836050
  hypo
tgcccggcggtaaatatttctcataaaag

SEQ ID NO: 150501 - DNA, 24 bp, Homo sapiens
  chr5:32841608-32841632
  hypo
ctcgcctggcctaaaatggaattt

SEQ ID NO: 150502 - DNA, 30 bp, Homo sapiens; identical to SEQ ID NO: 69576
  chr5:32847924-32847954
  hypo

SEQ ID NO: 150503 - DNA, 110 bp, Homo sapiens
  chr5:32855653-32855763
  hypo
ttagtactttaagtatgttttcgttattgtgagcaaatacccacaacgttttcgtcttgcagatctgaaactctatacccattaaacaaaaccttcgctttacacgcccc

SEQ ID NO: 150504 - DNA, 30 bp, Homo sapiens
  chr5:32913733-32913763
  hypo
tgttcttttttctctcgcctattattacac

SEQ ID NO: 150505 - DNA, 327 bp, Homo sapiens
  chr5:32934065-32934392
  hypo
aaccacaccagaccacgtaattagaaattacttcagcacataaacaggtactttacaatgtttttttgacaacgggcagcacgcttctcctttccactgccagaggggaaccagcgttggcttcccatgggcccacctcctcttcagcccagccccgtcttcccctacagagaaagcagcagacacagtcacacgggaacatctgctctaaatgtgggccccttccaggggccctggctcaagaggagcgggtaaaatggcctcctttaacctaaatcaccgcggccacggtgccctccccctccgccctcccgttctcccatcaac

SEQ ID NO: 150506 - DNA, 23 bp, Homo sapiens
  chr5:33006154-33006177
  hypo
aaaagaccattcttggccaggcg

SEQ ID NO: 150507 - DNA, 35 bp, Homo sapiens; identical to SEQ ID NO: 69579
  chr5:33035690-33035725
  hypo

SEQ ID NO: 150508 - DNA, 494 bp, Homo sapiens
  chr5:33162234-33162728
  hypo
ttggcttaagatttttttgggcggtttctctttccagccagcgccgagcgatgggcatctctcgggacaactggcaccagcgccgcaaaaccgggggcaagagaaagccctaccacaagaagcggaagtatgagttggagcgcccagctgccaacaccaagattggcccccgccgcatccacacagtccgtgtgcagggaagtaacaagaaataccgtgccctgaggttggacgtgggggaatttctcctggggctcagagtgttgtactcgtaaaacaaggatcatcgatgttgtctacaatgcatctaataatgagctggttcgtaccaagaccctggtgaagaattgcatcgtgctcatcgacagcacaccgtgccgacagtggtaagatgtcccactacgtgctgcccctgggccgcaagaagggagccaagctgactcctgaggaagaagagattttaaacaaaaaacgatttaaacaaattcagaaga

SEQ ID NO: 150509 - DNA, 42 bp, Homo sapiens; identical to SEQ ID NO: 19401
  chr5:33234416-33234458
  hypo

SEQ ID NO: 150510 - DNA, 30 bp, Homo sapiens
  chr5:33247820-33247850
  hypo
cagctacttcttttgcgtttcctttttttt

SEQ ID NO: 150511 - DNA, 325 bp, Homo sapiens
  chr5:33297913-33298238
  hypo
atgctgttttaatgacggcctgggtgcaggcgggccccaagtgacgactgggcaaagttttatagtctcctgtaaacagtaagtgtcacagtccgatgtaactgctacgttgtacccggatggcctttttctggatcttcgtgtcttccggccagggtaggtgtcttcccccggctctcttcctgcttctgctatcgcgcaccctgctggcgcaccctgctggcgcaccctgctggcgcaccctgctggcgcaccctgctggcgcaccctgctggcgcaccctgctggcgcaccctgctggcgcaagttgcgccttgggactggg

SEQ ID NO: 150512 - DNA, 39 bp, Homo sapiens; identical to SEQ ID NO: 19402
  chr5:33311278-33311317
  hypo

SEQ ID NO: 150513 - DNA, 103 bp, Homo sapiens
  chr5:33442928-33443031
  hypo
acgctgtgaagtgggttctgttattatctccattatacagatgagaaagcaggcgtaggaacagtaacttgctcaaacccagtatccccgtttttttccttcc

SEQ ID NO: 150514 - DNA, 180 bp, Homo sapiens; identical to SEQ ID NO: 69584
  chr5:33502052-33502232
  hypo

SEQ ID NO: 150515 - DNA, 121 bp, Homo sapiens; identical to SEQ ID NO: 69585
  chr5:33509453-33509574
  hypo

SEQ ID NO: 150516 - DNA, 120 bp, Homo sapiens
  chr5:33530560-33530680
  hypo
caagcatcacaaagccgccccagtttcttagccagcctctcctgaagtctctgtggatggaggctggagagggcacaggtggggcggctctttgccccacaatctcgtcgctgtgtctgt

SEQ ID NO: 150517 - DNA, 40 bp, Homo sapiens; identical to SEQ ID NO: 69586
  chr5:33724925-33724965
  hypo

SEQ ID NO: 150518 - DNA, 19 bp, Homo sapiens
  chr5:33927746-33927765
  hypo
gactccatctcaaaaaaaa

SEQ ID NO: 150519 - DNA, 597 bp, Homo sapiens; identical to SEQ ID NO: 41407
  chr5:33936114-33936711
  hypo

SEQ ID NO: 150520 - DNA, 360 bp, Homo sapiens
  chr5:33984386-33984746
  hypo
cggccccacctggaccggcagtggtcgctggccgatccgaccacgggctgcagcaggaatcccaggatggggctgaggaaccacacaatgctgtacaggctgctgggcagacctacgctgagcaggactggggtcacatacgctgcctccaccgcgtagcagaactctcttccgaacatggccatgctgtgcatgatgagtctgctggtgggtcttttaggcggctccacagagtcaaaggggccatcatcagctagggatttatagatgtggcggccagcctgcccactgttgctacccatggccactgggagaggaaccttcctgcgagcccaccacctcctgcgtggtcctagggtc

SEQ ID NO: 150521 - DNA, 30 bp, Homo sapiens
  chr5:33985141-33985171
  hypo
acacatgatcacacacgtggcttctctcac

SEQ ID NO: 150522 - DNA, 30 bp, Homo sapiens
  chr5:33985922-33985952
  hypo
catggggcttttctcgttattacacatgat

SEQ ID NO: 150523 - DNA, 92 bp, Homo sapiens; identical to SEQ ID NO: 69590
  chr5:34147859-34147951
  hypo

SEQ ID NO: 150524 - DNA, 40 bp, Homo sapiens
  chr5:34440315-34440355
  hypo
attttaaaaaatggtctcttgcggccgggcgtggtggctc

SEQ ID NO: 150525 - DNA, 127 bp, Homo sapiens; identical to SEQ ID NO: 69591
  chr5:34491442-34491569
  hypo

SEQ ID NO: 150526 - DNA, 183 bp, Homo sapiens; identical to SEQ ID NO: 69592
  chr5:34530161-34530344
  hypo

SEQ ID NO: 150527 - DNA, 84 bp, Homo sapiens; identical to SEQ ID NO: 19407
  chr5:34551766-34551850
  hypo

SEQ ID NO: 150528 - DNA, 39 bp, Homo sapiens
  chr5:34586706-34586745
  hypo
tcatatggccaggtacggcggctcacgcctgcaatctca

SEQ ID NO: 150529 - DNA, 164 bp, Homo sapiens; identical to SEQ ID NO: 69595
  chr5:34591002-34591166
  hypo

SEQ ID NO: 150530 - DNA, 24 bp, Homo sapiens
  chr5:34684151-34684175
  hypo
aacagttggcgtagaaaccctggc

SEQ ID NO: 150531 - DNA, 31 bp, Homo sapiens; identical to SEQ ID NO: 69596
  chr5:34702683-34702714
  hypo

SEQ ID NO: 150532 - DNA, 34 bp, Homo sapiens; identical to SEQ ID NO: 69597
  chr5:34736209-34736243
  hypo

SEQ ID NO: 150533 - DNA, 35 bp, Homo sapiens; identical to SEQ ID NO: 69598
  chr5:34756420-34756455
  hypo

SEQ ID NO: 150534 - DNA, 31 bp, Homo sapiens; identical to SEQ ID NO: 19409
  chr5:35044505-35044536
  hypo

SEQ ID NO: 150535 - DNA, 30 bp, Homo sapiens
  chr5:35232116-35232146
  hypo
gtgtccatgaaggtacgcaacttctattta

SEQ ID NO: 150536 - DNA, 24 bp, Homo sapiens
  chr5:35494252-35494276
  hypo
tttctataacaatgatggcatcgg

SEQ ID NO: 150537 - DNA, 30 bp, Homo sapiens
  chr5:35647662-35647692
  hypo
tccaccgccatgacccggacacctcccgtt

SEQ ID NO: 150538 - DNA, 219 bp, Homo sapiens
  chr5:36035943-36036162
  hypo
aaagacatagggcttgaggtgcgtcgcgccccctgtctggaggacgtggtcaatccagcccaccagccgctgtgtggggctgagcgggtgggagcgcaggatgacactggcagccactgccgcggacttgtatctgttgagagagatagagagggggcattactaatgtgacctcacaagagttagaatgtatgatccgttctatatgatgcaccaaag

SEQ ID NO: 150539 - DNA, 30 bp, Homo sapiens
  chr5:36078748-36078778
  hypo
tgcctgctccttggtcgtgcaaccccgtcc

SEQ ID NO: 150540 - DNA, 72 bp, Homo sapiens
  chr5:36240987-36241059
  hypo
gcttttaaaacaagctcgtagtgtccaacgaccacgttccagcaaggaaaaggctcacgctgaaggactttc

SEQ ID NO: 150541 - DNA, 30 bp, Homo sapiens
  chr5:36478774-36478804
  hypo
ttacacctgtctcaccgatgagaaaattaa

SEQ ID NO: 150542 - DNA, 148 bp, Homo sapiens
  chr5:36526935-36527083
  hypo
gaaacaactcatatgcgccgctgcccccaaggaagtgctccttcaccctggtgctgtagacgtgtacaagggtctggccactagtgacagacctggcgaatctccctttggcatccattctcggggctcctgccgccatcttggatcc

SEQ ID NO: 150543 - DNA, 44 bp, Homo sapiens
  chr5:36643795-36643839
  hypo
tcttacaaagggtaacgtgggccaggcacggtggctcacacctg

SEQ ID NO: 150544 - DNA, 30 bp, Homo sapiens
  chr5:36737545-36737575
  hypo
acgatggcagccctgcgctgaggaggtata

SEQ ID NO: 150545 - DNA, 25 bp, Homo sapiens
  chr5:36868344-36868369
  hypo
atttatttttttgagacggagtttc

SEQ ID NO: 150546 - DNA, 30 bp, Homo sapiens; identical to SEQ ID NO: 19411
  chr5:36962813-36962843
  hypo

SEQ ID NO: 150547 - DNA, 28 bp, Homo sapiens
  chr5:37014313-37014341
  hypo
ggagaccgtggagagggagagggagagg

SEQ ID NO: 150548 - DNA, 43 bp, Homo sapiens
  chr5:37022497-37022540
  hypo
tttgtcatttttataatgattcgtgaatataattttgcctttc

SEQ ID NO: 150549 - DNA, 20 bp, Homo sapiens
  chr5:37042244-37042264
  hypo
aagtccaaaatgggctgggc

SEQ ID NO: 150550 - DNA, 80 bp, Homo sapiens
  chr5:37042503-37042583
  hypo
ttccgcctgggtgacagaacgaggctctgtgtcaaaaaaaaaagtccaaaatctatgccggtaatccattactaacaatg

SEQ ID NO: 150551 - DNA, 107 bp, Homo sapiens; identical to SEQ ID NO: 69607
  chr5:37052538-37052645
  hypo

SEQ ID NO: 150552 - DNA, 21 bp, Homo sapiens
  chr5:37055439-37055460
  hypo
gagactccatctcaacagtaa

SEQ ID NO: 150553 - DNA, 77 bp, Homo sapiens
  chr5:37064065-37064142
  hypo
ggaggcacttcaggggtgaggcggaggaggagtcaacgtatttcgcagcgtattacgtaaaatgatttttatgtgct

SEQ ID NO: 150554 - DNA, 37 bp, Homo sapiens
  chr5:37082174-37082211
  hypo
acaagagtgaaactccgtatcaaaaaaaaaaaaaaag

SEQ ID NO: 150555 - DNA, 56 bp, Homo sapiens
  chr5:37170188-37170244
  hypo
tggcagtgtgggctgttcttgcgaggctctctggcgttctctcccattgactgtgg

SEQ ID NO: 150556 - DNA, 32 bp, Homo sapiens; identical to SEQ ID NO: 69608
  chr5:37230261-37230293
  hypo

SEQ ID NO: 150557 - DNA, 25 bp, Homo sapiens
  chr5:37255495-37255520
  hypo
ccaccgcgcccggccaaaccaaaac

SEQ ID NO: 150558 - DNA, 17 bp, Homo sapiens
  chr5:37285709-37285726
  hypo
tcagggtctcaatctgt

SEQ ID NO: 150559 - DNA, 29 bp, Homo sapiens
  chr5:37292318-37292347
  hypo
attttttttttttttttgagacggagtct

SEQ ID NO: 150560 - DNA, 23 bp, Homo sapiens
  chr5:37321524-37321547
  hypo
aaaagataaagacaggccaggcg

SEQ ID NO: 150561 - DNA, 29 bp, Homo sapiens
  chr5:37334962-37334991
  hypo
ttaaaaagtattttactggctcggcgagg

SEQ ID NO: 150562 - DNA, 39 bp, Homo sapiens; identical to SEQ ID NO: 69612
  chr5:37338511-37338550
  hypo

SEQ ID NO: 150563 - DNA, 38 bp, Homo sapiens; identical to SEQ ID NO: 69613
  chr5:37338789-37338827
  hypo

SEQ ID NO: 150564 - DNA, 34 bp, Homo sapiens
  chr5:37347338-37347372
  hypo
caaacaaaaaaccgaaagagtgaatagttaaaag

SEQ ID NO: 150565 - DNA, 28 bp, Homo sapiens
  chr5:37356046-37356074
  hypo
tatgctgggcatggtggctcacgtctgt

SEQ ID NO: 150566 - DNA, 19 bp, Homo sapiens
  chr5:37375180-37375199
  hypo
gtaagccaccatgcctgac

SEQ ID NO: 150567 - DNA, 30 bp, Homo sapiens; identical to SEQ ID NO: 69615
  chr5:37378035-37378065
  hypo

SEQ ID NO: 150568 - DNA, 30 bp, Homo sapiens; identical to SEQ ID NO: 69616
  chr5:37696760-37696790
  hypo

SEQ ID NO: 150569 - DNA, 66 bp, Homo sapiens
  chr5:37806565-37806631
  hypo
acactgtgtcagcactgctatcgctacaccccagtccaagttaccgttatcacccacatggattct

SEQ ID NO: 150570 - DNA, 412 bp, Homo sapiens; identical to SEQ ID NO: 3884
  chr5:37839807-37840219
  hypo

SEQ ID NO: 150571 - DNA, 95 bp, Homo sapiens; identical to SEQ ID NO: 3885
  chr5:37840267-37840362
  hypo

SEQ ID NO: 150572 - DNA, 280 bp, Homo sapiens; identical to SEQ ID NO: 3886
  chr5:37840529-37840809
  hypo

SEQ ID NO: 150573 - DNA, 28 bp, Homo sapiens
  chr5:38175624-38175652
  hypo
ctcccccgactgatgtccttcttatagg

SEQ ID NO: 150574 - DNA, 34 bp, Homo sapiens; identical to SEQ ID NO: 69621
  chr5:38198896-38198930
  hypo

SEQ ID NO: 150575 - DNA, 30 bp, Homo sapiens; identical to SEQ ID NO: 3892
  chr5:38353672-38353702
  hypo

SEQ ID NO: 150576 - DNA, 30 bp, Homo sapiens; identical to SEQ ID NO: 69623
  chr5:38462439-38462469
  hypo

SEQ ID NO: 150577 - DNA, 30 bp, Homo sapiens
  chr5:38624834-38624864
  hypo
gcaggcgtgagccaccgcgcccggcggctg

SEQ ID NO: 150578 - DNA, 32 bp, Homo sapiens
  chr5:38631850-38631882
  hypo
cagcctggatcggccaggctctttttaacaac

SEQ ID NO: 150579 - DNA, 37 bp, Homo sapiens; identical to SEQ ID NO: 69624
  chr5:38635819-38635856
  hypo

SEQ ID NO: 150580 - DNA, 30 bp, Homo sapiens; identical to SEQ ID NO: 69625
  chr5:38949648-38949678
  hypo

SEQ ID NO: 150581 - DNA, 43 bp, Homo sapiens; identical to SEQ ID NO: 19416
  chr5:39053666-39053709
  hypo

SEQ ID NO: 150582 - DNA, 214 bp, Homo sapiens
  chr5:39186059-39186273
  hypo
agctgagcagagtcccgctggctgccttgtccaggaggaaagaggagcacctggattgaagactggctgtcaaagtgccccatgtccgggcacactaaccccacccctctcttccctcaagcgggctgcacaaacagaaacggtggacaattgaattcaagctccactaaaacatgaacacaaaatcaagaattttcaaacattgaaaaggcaa

SEQ ID NO: 150583 - DNA, 103 bp, Homo sapiens; identical to SEQ ID NO: 19417
  chr5:39209362-39209465
  hypo

SEQ ID NO: 150584 - DNA, 30 bp, Homo sapiens; identical to SEQ ID NO: 41443
  chr5:39394973-39395003
  hypo

SEQ ID NO: 150585 - DNA, 88 bp, Homo sapiens; identical to SEQ ID NO: 69629
  chr5:39576391-39576479
  hypo

SEQ ID NO: 150586 - DNA, 27 bp, Homo sapiens
  chr5:39611381-39611408
  hypo
gtcaccgtgcctggcctctctctttct

SEQ ID NO: 150587 - DNA, 27 bp, Homo sapiens
  chr5:39627301-39627328
  hypo
cagagcgagactctgtctcaaaagaaa

SEQ ID NO: 150588 - DNA, 229 bp, Homo sapiens; identical to SEQ ID NO: 69631
  chr5:39665679-39665908
  hypo

SEQ ID NO: 150589 - DNA, 370 bp, Homo sapiens; identical to SEQ ID NO: 69632
  chr5:39721485-39721855
  hypo

SEQ ID NO: 150590 - DNA, 130 bp, Homo sapiens
  chr5:39740631-39740761
  hypo
caaaagaactcatgacgaacccgtgattcagtcgcggctacgcatgcaggcgtgtctgtacacatacttaccagccctgagacctggcgacagtggagcagcgctctagggaacccggccagcgggctga

SEQ ID NO: 150591 - DNA, 17 bp, Homo sapiens
  chr5:39787722-39787739
  hypo
taaacttaactacttaa

SEQ ID NO: 150592 - DNA, 41 bp, Homo sapiens; identical to SEQ ID NO: 69635
  chr5:39802882-39802923
  hypo

SEQ ID NO: 150593 - DNA, 41 bp, Homo sapiens; identical to SEQ ID NO: 69636
  chr5:39803162-39803203
  hypo

SEQ ID NO: 150594 - DNA, 224 bp, Homo sapiens; identical to SEQ ID NO: 19420
  chr5:39808821-39809045
  hypo

SEQ ID NO: 150595 - DNA, 30 bp, Homo sapiens; identical to SEQ ID NO: 3900
  chr5:39851507-39851537
  hypo

SEQ ID NO: 150596 - DNA, 21 bp, Homo sapiens
  chr5:40015551-40015572
  hypo
gaaaacaaatggttaagtcaa

SEQ ID NO: 150597 - DNA, 27 bp, Homo sapiens
  chr5:40038855-40038882
  hypo
aatgagacaactgaggccaggcgcagt

SEQ ID NO: 150598 - DNA, 391 bp, Homo sapiens; identical to SEQ ID NO: 69640
  chr5:40066712-40067103
  hypo

SEQ ID NO: 150599 - DNA, 30 bp, Homo sapiens; identical to SEQ ID NO: 69641
  chr5:40067282-40067312
  hypo

SEQ ID NO: 150600 - DNA, 166 bp, Homo sapiens; identical to SEQ ID NO: 69642
  chr5:40775146-40775312
  hypo

SEQ ID NO: 150601 - DNA, 28 bp, Homo sapiens
  chr5:40783840-40783868
  hypo
acagagcgagactccatctcaaaaaaaa

SEQ ID NO: 150602 - DNA, 20 bp, Homo sapiens
  chr5:40808197-40808217
  hypo
agactctgtctcaaaagaaa

SEQ ID NO: 150603 - DNA, 43 bp, Homo sapiens; identical to SEQ ID NO: 69644
  chr5:40823269-40823312
  hypo

SEQ ID NO: 150604 - DNA, 43 bp, Homo sapiens
  chr5:40957871-40957914
  hypo
tttttttttttttaaatcttacgcatgcacagaagatatataa

SEQ ID NO: 150605 - DNA, 51 bp, Homo sapiens; identical to SEQ ID NO: 69645
  chr5:41588036-41588087
  hypo

SEQ ID NO: 150606 - DNA, 797 bp, Homo sapiens; identical to SEQ ID NO: 111306
  chr5:41870077-41870874
  hypo

SEQ ID NO: 150607 - DNA, 20 bp, Homo sapiens
  chr5:41958515-41958535
  hypo
tgagcagccctgccagccag

SEQ ID NO: 150608 - DNA, 40 bp, Homo sapiens; identical to SEQ ID NO: 19424
  chr5:41991876-41991916
  hypo

SEQ ID NO: 150609 - DNA, 40 bp, Homo sapiens; identical to SEQ ID NO: 19425
  chr5:41992155-41992195
  hypo

SEQ ID NO: 150610 - DNA, 82 bp, Homo sapiens
  chr5:42140522-42140604
  hypo
caactccgtctcaaaaaaaaaaacaaaaaacaaacaaaaaaaacagaccaaagagtccatcgctgatcatgcagacatgtaa

SEQ ID NO: 150611 - DNA, 772 bp, Homo sapiens; identical to SEQ ID NO: 3910
  chr5:42424336-42425108
  hypo

SEQ ID NO: 150612 - DNA, 568 bp, Homo sapiens
  chr5:42468531-42469099
  hypo
ggccaagatgagtattgcctacgtgcgcagctgagaggcccgaccagagttcactggctctgcagcaggaggctgggggaccaggacctcagctcctactggcacgagaacaatgacccttattccttctttcttaagcaccatggacggctgcgtctcctctttcctgtcaaccacgccaacgctggagggcagcgggttcttgctgtctttctgggactccttgcgcagctagctatttgcctgccgccttggagttggtctgggtcgcagcctgagctgccgctcttggccccagagacgccgcccccgccagcttcttttttcttgttctctcctgccttcagcacctcgaaggggtccgattagttgtcaaataactggtcgaatcggttggtgaccaggcagctgaagccttcctgtaactgcccaggcatgatggttgctcggcggcacattcctccacggattgcagcgggctgcgccgagccaagagcgcgtgcttcagctcttcccagaagatcgaagaacaatttttttgaaatccgcctgtaaatgtcaggcaagg

SEQ ID NO: 150613 - DNA, 37 bp, Homo sapiens; identical to SEQ ID NO: 19427
  chr5:42476008-42476045
  hypo

SEQ ID NO: 150614 - DNA, 23 bp, Homo sapiens
  chr5:42575841-42575864
  hypo
aaaaggtaaagaggggctgggcg

SEQ ID NO: 150615 - DNA, 141 bp, Homo sapiens; identical to SEQ ID NO: 69654
  chr5:42582810-42582951
  hypo

SEQ ID NO: 150616 - DNA, 38 bp, Homo sapiens; identical to SEQ ID NO: 69655
  chr5:42638259-42638297
  hypo

SEQ ID NO: 150617 - DNA, 94 bp, Homo sapiens
  chr5:42697694-42697788
  hypo
ctcactcaatgaacagcaggccggcggtggagtgggcacagagtgagcgaggagactggtatgagaccaaatcgcacagacaagacagtcaaat

SEQ ID NO: 150618 - DNA, 30 bp, Homo sapiens
  chr5:42756393-42756423
  hypo
aggcgtgagccacagcgcccggcagaggca

SEQ ID NO: 150619 - DNA, 35 bp, Homo sapiens; identical to SEQ ID NO: 69656
  chr5:42760112-42760147
  hypo

SEQ ID NO: 150620 - DNA, 43 bp, Homo sapiens
  chr5:42975838-42975881
  hypo
ttaaaagatcactggcggggcgcggtggctcacgcctgtaatc

SEQ ID NO: 150621 - DNA, 32 bp, Homo sapiens; identical to SEQ ID NO: 19428
  chr5:42984042-42984074
  hypo

SEQ ID NO: 150622 - DNA, 31 bp, Homo sapiens; identical to SEQ ID NO: 19429
  chr5:42984313-42984344
  hypo

SEQ ID NO: 150623 - DNA, 35 bp, Homo sapiens
  chr5:43069385-43069420
  hypo
tttgagacggagtctcgctctgttccccaggctgg

SEQ ID NO: 150624 - DNA, 44 bp, Homo sapiens; identical to SEQ ID NO: 69659
  chr5:43120110-43120154
  hypo

SEQ ID NO: 150625 - DNA, 106 bp, Homo sapiens; identical to SEQ ID NO: 19430
  chr5:43147786-43147892
  hypo

SEQ ID NO: 150626 - DNA, 39 bp, Homo sapiens; identical to SEQ ID NO: 69661
  chr5:43215532-43215571
  hypo

SEQ ID NO: 150627 - DNA, 119 bp, Homo sapiens; identical to SEQ ID NO: 19431
  chr5:43233243-43233362
  hypo

SEQ ID NO: 150628 - DNA, 90 bp, Homo sapiens; identical to SEQ ID NO: 69663
  chr5:43387665-43387755
  hypo

SEQ ID NO: 150629 - DNA, 345 bp, Homo sapiens; identical to SEQ ID NO: 111344
  chr5:43557420-43557765
  hypo

SEQ ID NO: 150630 - DNA, 30 bp, Homo sapiens; identical to SEQ ID NO: 69665
  chr5:43558844-43558874
  hypo

SEQ ID NO: 150631 - DNA, 222 bp, Homo sapiens; identical to SEQ ID NO: 111349
  chr5:43603562-43603784
  hypo

SEQ ID NO: 150632 - DNA, 30 bp, Homo sapiens
  chr5:43711671-43711701
  hypo
ttgaccttaatttggcgtgtttccttctcg

SEQ ID NO: 150633 - DNA, 24 bp, Homo sapiens
  chr5:43749408-43749432
  hypo
accggagctgttcctattcggcca

SEQ ID NO: 150634 - DNA, 35 bp, Homo sapiens
  chr5:43850517-43850552
  hypo
attcaaaactggatatgtggccgggcgcagtggct

SEQ ID NO: 150635 - DNA, 32 bp, Homo sapiens; identical to SEQ ID NO: 69668
  chr5:43950020-43950052
  hypo

SEQ ID NO: 150636 - DNA, 30 bp, Homo sapiens; identical to SEQ ID NO: 41496
  chr5:44706482-44706512
  hypo

SEQ ID NO: 150637 - DNA, 49 bp, Homo sapiens; identical to SEQ ID NO: 69670
  chr5:44708953-44709002
  hypo

SEQ ID NO: 150638 - DNA, 99 bp, Homo sapiens
  chr5:44811148-44811247
  hypo
gaagaaattattcctcgtggtcatcgaagaggtcgaattgatgacttgcgataccagatagatgataaaccaaacaaccagattcgaatatccaagcaa

SEQ ID NO: 150639 - DNA, 30 bp, Homo sapiens
  chr5:44935819-44935849
  hypo
gggcacacatctccccgcaggtcttcgcac

SEQ ID NO: 150640 - DNA, 80 bp, Homo sapiens; identical to SEQ ID NO: 19433
  chr5:45196606-45196686
  hypo

SEQ ID NO: 150641 - DNA, 45 bp, Homo sapiens; identical to SEQ ID NO: 19434
  chr5:45225671-45225716
  hypo

SEQ ID NO: 150642 - DNA, 391 bp, Homo sapiens; identical to SEQ ID NO: 41501
  chr5:49736586-49736977
  hypo

SEQ ID NO: 150643 - DNA, 252 bp, Homo sapiens; identical to SEQ ID NO: 111361
  chr5:49737098-49737350
  hypo

SEQ ID NO: 150644 - DNA, 34 bp, Homo sapiens; identical to SEQ ID NO: 19437
  chr5:49903304-49903338
  hypo

SEQ ID NO: 150645 - DNA, 30 bp, Homo sapiens
  chr5:51516975-51517005
  hypo
tctcgctgaggtgcccggctgcactcttct

SEQ ID NO: 150646 - DNA, 30 bp, Homo sapiens
  chr5:51705820-51705850
  hypo
gggagtgacggagagcgactgtgaatccag

SEQ ID NO: 150647 - DNA, 32 bp, Homo sapiens
  chr5:51793954-51793986
  hypo
ttacaggcgtgagccaccgcgcccggccgtcc

SEQ ID NO: 150648 - DNA, 18 bp, Homo sapiens
  chr5:52182856-52182874
  hypo
cctcggcctccctgaaat

SEQ ID NO: 150649 - DNA, 30 bp, Homo sapiens; identical to SEQ ID NO: 69679
  chr5:52780886-52780916
  hypo

SEQ ID NO: 150650 - DNA, 30 bp, Homo sapiens; identical to SEQ ID NO: 69680
  chr5:52858116-52858146
  hypo

SEQ ID NO: 150651 - DNA, 39 bp, Homo sapiens
  chr5:52888052-52888091
  hypo
attacaggtgtgagccgctgcgcccggcattgttgagtt

SEQ ID NO: 150652 - DNA, 120 bp, Homo sapiens; identical to SEQ ID NO: 69682
  chr5:52941753-52941873
  hypo

SEQ ID NO: 150653 - DNA, 47 bp, Homo sapiens
  chr5:53241083-53241130
  hypo
tctacatcactattacgttgcaactgtgaacacggacatgtttgtcg

SEQ ID NO: 150654 - DNA, 30 bp, Homo sapiens
  chr5:53281651-53281681
  hypo
aaaagtagagcaaccgacaaaattaacccc

SEQ ID NO: 150655 - DNA, 31 bp, Homo sapiens; identical to SEQ ID NO: 19439
  chr5:53593991-53594022
  hypo

SEQ ID NO: 150656 - DNA, 79 bp, Homo sapiens
  chr5:53821870-53821949
  hypo
tggtatggtagacagctggagcgacttctctctgacccaaattaataggactaccaaagagataaattatgacagtttt

SEQ ID NO: 150657 - DNA, 30 bp, Homo sapiens
  chr5:53829321-53829351
  hypo
atctatggggctttgcgatcgccatgggta

SEQ ID NO: 150658 - DNA, 41 bp, Homo sapiens; identical to SEQ ID NO: 69684
  chr5:53959227-53959268
  hypo

SEQ ID NO: 150659 - DNA, 140 bp, Homo sapiens; identical to SEQ ID NO: 69685
  chr5:54069073-54069213
  hypo

SEQ ID NO: 150660 - DNA, 108 bp, Homo sapiens; identical to SEQ ID NO: 3959
  chr5:54469035-54469143
  hypo

SEQ ID NO: 150661 - DNA, 30 bp, Homo sapiens
  chr5:54624618-54624648
  hypo
gggaaaaacagtatgcgccgagtgagtagc

SEQ ID NO: 150662 - DNA, 99 bp, Homo sapiens; identical to SEQ ID NO: 19442
  chr5:54665638-54665737
  hypo

SEQ ID NO: 150663 - DNA, 33 bp, Homo sapiens; identical to SEQ ID NO: 19443
  chr5:54734439-54734472
  hypo

SEQ ID NO: 150664 - DNA, 33 bp, Homo sapiens; identical to SEQ ID NO: 69689
  chr5:54734711-54734744
  hypo

SEQ ID NO: 150665 - DNA, 45 bp, Homo sapiens
  chr5:54850287-54850332
  hypo
ggcgacgaagcgagactccgactcgaaaaaaaaaaaaagaagcac

SEQ ID NO: 150666 - DNA, 41 bp, Homo sapiens
  chr5:54952934-54952975
  hypo
cacctcggcctcccaaagtcagtcaccgggcccagcctata

SEQ ID NO: 150667 - DNA, 27 bp, Homo sapiens
  chr5:55029084-55029111
  hypo
ttccttggagtcttgctctctcgcccg

SEQ ID NO: 150668 - DNA, 26 bp, Homo sapiens
  chr5:55029350-55029376
  hypo
cgcccggcccttagttttcttaattg

SEQ ID NO: 150669 - DNA, 30 bp, Homo sapiens; identical to SEQ ID NO: 19444
  chr5:55032937-55032967
  hypo

SEQ ID NO: 150670 - DNA, 285 bp, Homo sapiens
  chr5:55033680-55033965
  hypo
ctatgaggccagagcgtcgccataggggcccgaacgctagcgtttagggaatccgcaggctagaagtggaggcgggacgccactggtcgtctgagcgctgattggctggtggcgctagtcaccagccaatcgtcaacagacgccatttgttgttggagccacgcacctgacgcagtgggcgtcttgcacgtgcagccgtttaagtcgcgtgggcgcctgcgagggcttgggagagcaagccgcggagaggtgagtgggccgcttttctacgggaactggcctgaa

SEQ ID NO: 150671 - DNA, 20 bp, Homo sapiens
  chr5:55108111-55108131
  hypo
gggcgcggtggttcacgcct

SEQ ID NO: 150672 - DNA, 30 bp, Homo sapiens
  chr5:55198175-55198205
  hypo
gtgcacgatggctcacgcctgtaatcccag

SEQ ID NO: 150673 - DNA, 166 bp, Homo sapiens; identical to SEQ ID NO: 69695
  chr5:55229392-55229558
  hypo

SEQ ID NO: 150674 - DNA, 24 bp, Homo sapiens
  chr5:55256849-55256873
  hypo
tccgcctcccaggttcaagtgatt

SEQ ID NO: 150675 - DNA, 142 bp, Homo sapiens
  chr5:55309216-55309358
  hypo
gtgctgggattacaggagtgagccactgcacctggccagaattagagttataattaaggcaggacgtgccaaggtgatcacagccaaaggtcccactgtgacctgggaatgcggttgttgttagcagcggcaacaactggta

SEQ ID NO: 150676 - DNA, 35 bp, Homo sapiens; identical to SEQ ID NO: 69698
  chr5:55330546-55330581
  hypo

SEQ ID NO: 150677 - DNA, 34 bp, Homo sapiens; identical to SEQ ID NO: 19445
  chr5:55330820-55330854
  hypo

SEQ ID NO: 150678 - DNA, 24 bp, Homo sapiens
  chr5:55335522-55335546
  hypo
tgcaacctccgcctccagggttca

SEQ ID NO: 150679 - DNA, 95 bp, Homo sapiens
  chr5:55379299-55379394
  hypo
cggagccaccgcgcccggctgccaccgcgtctgttcttactgcttccgtgttagtttgagttcctctctttctcgccaactcaatttgacaacct

SEQ ID NO: 150680 - DNA, 30 bp, Homo sapiens
  chr5:55616011-55616041
  hypo
gctgtttcagagaagcgcgttcccatgtct

SEQ ID NO: 150681 - DNA, 32 bp, Homo sapiens
  chr5:55705172-55705204
  hypo
agttgcgggattggacgcgttaatgcacatta

SEQ ID NO: 150682 - DNA, 134 bp, Homo sapiens
  chr5:55789716-55789850
  hypo
gagcctaacttcttgcgattcgaattcctcaggcctgggatggggcctggagaacttgttttatgttcagccagcccaggccatactgactgagtagttcccgagtccacactgagatacgctgtcctgcccct

SEQ ID NO: 150683 - DNA, 147 bp, Homo sapiens; identical to SEQ ID NO: 69701
  chr5:56011131-56011278
  hypo

SEQ ID NO: 150684 - DNA, 30 bp, Homo sapiens
  chr5:56013661-56013691
  hypo
caatgcaatgccaatcggactccttcgcca

SEQ ID NO: 150685 - DNA, 30 bp, Homo sapiens; identical to SEQ ID NO: 41552
  chr5:56031868-56031898
  hypo

SEQ ID NO: 150686 - DNA, 563 bp, Homo sapiens; identical to SEQ ID NO: 111428
  chr5:56112630-56113193
  hypo

SEQ ID NO: 150687 - DNA, 30 bp, Homo sapiens; identical to SEQ ID NO: 69703
  chr5:56177574-56177604
  hypo

SEQ ID NO: 150688 - DNA, 30 bp, Homo sapiens; identical to SEQ ID NO: 69704
  chr5:56208703-56208733
  hypo

SEQ ID NO: 150689 - DNA, 30 bp, Homo sapiens
  chr5:56346943-56346973
  hypo
ccttttagaaacccgcggataccctcccag

SEQ ID NO: 150690 - DNA, 30 bp, Homo sapiens
  chr5:56470030-56470060
  hypo
ggcagaaggtaacaccgtcctctaggctcc

SEQ ID NO: 150691 - DNA, 170 bp, Homo sapiens
  chr5:56470295-56470465
  hypo
ttggggggtgtttggcgtttggcggaggctgggagcgagtccgacgctctcagtgctcggccttccttcccccggcctcttgcacacgcccgcctggttttgcaccactacccttctcagggctgagggagtcgaggccgagttgtggccttcggcggtttcttcagcag

SEQ ID NO: 150692 - DNA, 44 bp, Homo sapiens; identical to SEQ ID NO: 69705
  chr5:56487658-56487702
  hypo

SEQ ID NO: 150693 - DNA, 31 bp, Homo sapiens
  chr5:56512248-56512279
  hypo
taaaaaacaaaacaccgtggtcgggcgtggt

SEQ ID NO: 150694 - DNA, 30 bp, Homo sapiens
  chr5:56512706-56512736
  hypo
catataaataagactcgaatggctcatgac

SEQ ID NO: 150695 - DNA, 23 bp, Homo sapiens
  chr5:56544538-56544561
  hypo
gcgtgagccactattttttattt

SEQ ID NO: 150696 - DNA, 30 bp, Homo sapiens
  chr5:56563524-56563554
  hypo
aggcgtgagctgctgcgcacagctttagct

SEQ ID NO: 150697 - DNA, 156 bp, Homo sapiens; identical to SEQ ID NO: 69707
  chr5:56568063-56568219
  hypo

SEQ ID NO: 150698 - DNA, 22 bp, Homo sapiens
  chr5:56653353-56653375
  hypo
cgattttaccagcattattttt

SEQ ID NO: 150699 - DNA, 30 bp, Homo sapiens; identical to SEQ ID NO: 19447
  chr5:56718334-56718364
  hypo

SEQ ID NO: 150700 - DNA, 207 bp, Homo sapiens; identical to SEQ ID NO: 69710
  chr5:56718794-56719001
  hypo

SEQ ID NO: 150701 - DNA, 30 bp, Homo sapiens
  chr5:56751386-56751416
  hypo
ctcataccatgtctccgtaccatgtcatgg

SEQ ID NO: 150702 - DNA, 30 bp, Homo sapiens
  chr5:57742538-57742568
  hypo
gttgatgtgatcttccgggtgcgttcctct

SEQ ID NO: 150703 - DNA, 1275 bp, Homo sapiens; identical to SEQ ID NO: 111433
  chr5:57755329-57756604
  hypo

SEQ ID NO: 150704 - DNA, 30 bp, Homo sapiens; identical to SEQ ID NO: 41561
  chr5:58184045-58184075
  hypo

SEQ ID NO: 150705 - DNA, 30 bp, Homo sapiens; identical to SEQ ID NO: 41563
  chr5:58337465-58337495
  hypo

SEQ ID NO: 150706 - DNA, 30 bp, Homo sapiens; identical to SEQ ID NO: 41564
  chr5:58407755-58407785
  hypo

SEQ ID NO: 150707 - DNA, 30 bp, Homo sapiens
  chr5:59055203-59055233
  hypo
cggcttcagctcgtacgaacaggcttcaca

SEQ ID NO: 150708 - DNA, 204 bp, Homo sapiens; identical to SEQ ID NO: 111456
  chr5:60626140-60626344
  hypo

SEQ ID NO: 150709 - DNA, 253 bp, Homo sapiens; identical to SEQ ID NO: 111457
  chr5:60626722-60626975
  hypo

SEQ ID NO: 150710 - DNA, 46 bp, Homo sapiens
  chr5:60676637-60676683
  hypo
catttatgggccgggcgaggtggctcacgcctatagtcccagcact

SEQ ID NO: 150711 - DNA, 40 bp, Homo sapiens
  chr5:60700055-60700095
  hypo
aagtattttttgtaccaccggaaaactttccttcacattt

SEQ ID NO: 150712 - DNA, 201 bp, Homo sapiens
  chr5:60821631-60821832
  hypo
tcgaacaggccacatcggacagtgttcacccgagccatcgaggcatgcgatctccactggcaggatagccacttgcagcacattatcagcagtgacctatacaccaactactgttaccatgacgacactgaaaactccctcttcgactcccgcgggtggcccctctggcatggtaagtgaccaaaccggaaagacatttcc

SEQ ID NO: 150713 - DNA, 31 bp, Homo sapiens; identical to SEQ ID NO: 41575
  chr5:60840110-60840141
  hypo

SEQ ID NO: 150714 - DNA, 137 bp, Homo sapiens
  chr5:60866393-60866530
  hypo
gaacctgcagttccccggagcggaagtatttcaaacctgaggcttcggtcaccgagccagaccctgagaggactgaatgcaaatttcgtagtttaatttaaatctgagcaggagaaaaggtgcggcagactgcactc

SEQ ID NO: 150715 - DNA, 30 bp, Homo sapiens; identical to SEQ ID NO: 69720
  chr5:61040828-61040858
  hypo

SEQ ID NO: 150716 - DNA, 30 bp, Homo sapiens; identical to SEQ ID NO: 69721
  chr5:61041146-61041176
  hypo

SEQ ID NO: 150717 - DNA, 30 bp, Homo sapiens
  chr5:61277142-61277172
  hypo
gcaggtagaggagtgcgtgccctattgtca

SEQ ID NO: 150718 - DNA, 162 bp, Homo sapiens
  chr5:61681251-61681413
  hypo
tgtaaactcttactgcgtgtaatacaatacttattccctctttcttttctttttccaagataaagtgaaatctttccgtgcagctctacaagaggaggaacaagccagcaagcaaatcaacccgaagagaccccgtgccctttaaaccggcatttgctgcta

SEQ ID NO: 150719 - DNA, 84 bp, Homo sapiens; identical to SEQ ID NO: 19453
  chr5:61690790-61690874
  hypo

SEQ ID NO: 150720 - DNA, 40 bp, Homo sapiens; identical to SEQ ID NO: 69723
  chr5:61704348-61704388
  hypo

SEQ ID NO: 150721 - DNA, 26 bp, Homo sapiens
  chr5:61752642-61752668
  hypo
gggtgcggtggctcacgcctgtaatc

SEQ ID NO: 150722 - DNA, 30 bp, Homo sapiens
  chr5:61803067-61803097
  hypo
actttaagcataatgcgactcccgtggtag

SEQ ID NO: 150723 - DNA, 22 bp, Homo sapiens
  chr5:61812121-61812143
  hypo
ttttttttttcctttttgagac

SEQ ID NO: 150724 - DNA, 32 bp, Homo sapiens
  chr5:61849886-61849918
  hypo
ggccattcgtatgtcttcgtttgagagctgtt

SEQ ID NO: 150725 - DNA, 343 bp, Homo sapiens
  chr5:61910223-61910566
  hypo
ctcctcgccccttcccgccagcattgtcattacaggacagggaagtgctgctggcagtaatgggtgggagccaaggctgttgctaagttctgcagtacgtagaactgaaatgctgaagagttacctgacccgccccccctcaccccgcaggatatgcgacaggggtgtgactcatccacaagtgctcaagccccttatgggagggtgagcatgcagacaggtaggtgcaggagccagggcaaatacccctgggctccagccccatgacaacatccagaggtggtagcctgcaactccgaaaacccaagtgtgcgtgtgtgtgtgtgtgttacagtccactttt

SEQ ID NO: 150726 - DNA, 30 bp, Homo sapiens
  chr5:61910817-61910847
  hypo
ccgaactcctattggcgttctgatgctcct

SEQ ID NO: 150727 - DNA, 31 bp, Homo sapiens; identical to SEQ ID NO: 19455
  chr5:61938738-61938769
  hypo

SEQ ID NO: 150728 - DNA, 30 bp, Homo sapiens
  chr5:62073146-62073176
  hypo
ctccacggacacggcgggcgcattggtttc

SEQ ID NO: 150729 - DNA, 43 bp, Homo sapiens; identical to SEQ ID NO: 69726
  chr5:62080932-62080975
  hypo

SEQ ID NO: 150730 - DNA, 299 bp, Homo sapiens; identical to SEQ ID NO: 41579
  chr5:63254943-63255242
  hypo

SEQ ID NO: 150731 - DNA, 387 bp, Homo sapiens; identical to SEQ ID NO: 41580
  chr5:63255315-63255702
  hypo

SEQ ID NO: 150732 - DNA, 22 bp, Homo sapiens
  chr5:63374045-63374067
  hypo
aaaactccgtctaaaaaaaaaa

SEQ ID NO: 150733 - DNA, 824 bp, Homo sapiens; identical to SEQ ID NO: 111476
  chr5:63461427-63462251
  hypo

SEQ ID NO: 150734 - DNA, 30 bp, Homo sapiens; identical to SEQ ID NO: 69731
  chr5:64016690-64016720
  hypo

SEQ ID NO: 150735 - DNA, 30 bp, Homo sapiens; identical to SEQ ID NO: 41589
  chr5:64067736-64067766
  hypo

SEQ ID NO: 150736 - DNA, 157 bp, Homo sapiens; identical to SEQ ID NO: 69733
  chr5:64103540-64103697
  hypo

SEQ ID NO: 150737 - DNA, 139 bp, Homo sapiens; identical to SEQ ID NO: 19457
  chr5:64339981-64340120
  hypo

SEQ ID NO: 150738 - DNA, 30 bp, Homo sapiens; identical to SEQ ID NO: 19458
  chr5:64395529-64395559
  hypo

SEQ ID NO: 150739 - DNA, 30 bp, Homo sapiens; identical to SEQ ID NO: 19459
  chr5:64446588-64446618
  hypo

SEQ ID NO: 150740 - DNA, 40 bp, Homo sapiens
  chr5:64516271-64516311
  hypo
aacagaagagtgggaattagccgggcgcagtggctcacgc

SEQ ID NO: 150741 - DNA, 39 bp, Homo sapiens
  chr5:64516550-64516589
  hypo
gcaacagagcgagactccgtctcaaaaaaaaaagaagag

SEQ ID NO: 150742 - DNA, 30 bp, Homo sapiens
  chr5:64675553-64675583
  hypo
ggcaaacagtgtccccgctttctcctctca

SEQ ID NO: 150743 - DNA, 30 bp, Homo sapiens
  chr5:64831419-64831449
  hypo
gctgccaactcgccacgtcacacatagttg

SEQ ID NO: 150744 - DNA, 30 bp, Homo sapiens
  chr5:64831760-64831790
  hypo
tggttactgagtcaccgatggtataaaaca

SEQ ID NO: 150745 - DNA, 42 bp, Homo sapiens; identical to SEQ ID NO: 19460
  chr5:65020926-65020968
  hypo

SEQ ID NO: 150746 - DNA, 41 bp, Homo sapiens; identical to SEQ ID NO: 69738
  chr5:65107350-65107391
  hypo

SEQ ID NO: 150747 - DNA, 29 bp, Homo sapiens
  chr5:65181743-65181772
  hypo
caggcgtgagccaccgcgcccggttgcaa

SEQ ID NO: 150748 - DNA, 78 bp, Homo sapiens; identical to SEQ ID NO: 19462
  chr5:65465906-65465984
  hypo

SEQ ID NO: 150749 - DNA, 43 bp, Homo sapiens; identical to SEQ ID NO: 69740
  chr5:65505216-65505259
  hypo

SEQ ID NO: 150750 - DNA, 206 bp, Homo sapiens; identical to SEQ ID NO: 19463
  chr5:65988336-65988542
  hypo

SEQ ID NO: 150751 - DNA, 18 bp, Homo sapiens
  chr5:66273220-66273238
  hypo
gcccggctatcagacatt

SEQ ID NO: 150752 - DNA, 187 bp, Homo sapiens; identical to SEQ ID NO: 69743
  chr5:66441262-66441449
  hypo

SEQ ID NO: 150753 - DNA, 120 bp, Homo sapiens
  chr5:66448538-66448658
  hypo
gattcctctcccagccgagattcctcagcagcttctgccagtccacatcagccgattgtgatccacagttcggggaagaactacggctttaccatccgagccatccgggtgtatgtggga

SEQ ID NO: 150754 - DNA, 623 bp, Homo sapiens; identical to SEQ ID NO: 69744
  chr5:66459031-66459654
  hypo

SEQ ID NO: 150755 - DNA, 30 bp, Homo sapiens
  chr5:66459983-66460013
  hypo
gaagggggaaggcacggagaagtcctccca

SEQ ID NO: 150756 - DNA, 762 bp, Homo sapiens
  chr5:66460858-66461620
  hypo
ccaggccacgctgcccgctcccacctgaagcttccccctcaagggagaagccaggcctgagggaatcgtctgaaagaggccctcccacagccagaagcgagcgctctgctgcgagggctgacacatgcagagagccctccatggaactgtgctttccagaaactgcgaaaaccagtgacaactccaaaaatctcctctctgtgggaaggacccacccagatttctatacacagacccaggccatggagaaagcatgggcgccgggtgggaaaacgaaccacaaagatggcccaggtgaggcgaggcccccgcccagagacaactcctctctgcactcagctggaattccctgtgagaaggagctgggcaaggtgaggcgtggcgtggaacccaagcccgaagcgcttcttgccaggcggtctctgcagccacctggaattgagagtgagaagagtgaaaagctctccagtttcccatctttgcagaaagatggtgccaaggaacctgaaaggaaggagcagcctctacaaaggcatcccagcagcatccctccgccccctctgacggccaaagacctgtccagcccggctgccaggcagcattgcagttccccaagccacgcttctggcagagagccgggggccaagcccagcactgcagagcccagctcgagcccccaggaccctcccaagcctgttgctgcgcacagtgaaagcagcagccacaagccccggcctggccctgacccgggccctccaaaga

SEQ ID NO: 150757 - DNA, 213 bp, Homo sapiens
  chr5:66534132-66534345
  hypo
ggagtgaaaggatggcggatgactcacgattttacgagacacttccaggacaaggagaaggcaaaggagagatgcagccttggagagcctaattcctctctggagtgcgtgcttttccctgatgtcaagattctaaattattccactgtttacctgctgcgtgacttgacaaaagggtaatgtgatttagaaactcagcggtcatccagaaag

SEQ ID NO: 150758 - DNA, 59 bp, Homo sapiens; identical to SEQ ID NO: 69746
  chr5:66790233-66790292
  hypo

SEQ ID NO: 150759 - DNA, 35 bp, Homo sapiens; identical to SEQ ID NO: 69747
  chr5:66911430-66911465
  hypo

SEQ ID NO: 150760 - DNA, 163 bp, Homo sapiens; identical to SEQ ID NO: 19466
  chr5:66938603-66938766
  hypo

SEQ ID NO: 150761 - DNA, 38 bp, Homo sapiens; identical to SEQ ID NO: 69749
  chr5:66987569-66987607
  hypo

SEQ ID NO: 150762 - DNA, 37 bp, Homo sapiens; identical to SEQ ID NO: 69750
  chr5:67015512-67015549
  hypo

SEQ ID NO: 150763 - DNA, 36 bp, Homo sapiens; identical to SEQ ID NO: 69751
  chr5:67021469-67021505
  hypo

SEQ ID NO: 150764 - DNA, 38 bp, Homo sapiens; identical to SEQ ID NO: 69752
  chr5:67488204-67488242
  hypo

SEQ ID NO: 150765 - DNA, 342 bp, Homo sapiens
  chr5:67590942-67591284
  hypo
agataataacaaatacgtttcttttgcctgcaggattatgcataattatgataagttgaagtctcgaatcagtgaaattattgacagtagaagaagattggaagaagacttgaagaagcaggcagctgagtatcgagaaattgacaaacgtatgaacagcattaaaccagaccttatccagctgagaaagacgagagaccaatacttgatgtaagtatttgaaatggaatcctatacatgaataattggtgattgctacaattcaggatgagttaatgcgttctcttttcaaaactgtttttcaggtggttgactcaaaaaggtgttcggcaaaagaagttg

SEQ ID NO: 150766 - DNA, 175 bp, Homo sapiens; identical to SEQ ID NO: 19467
  chr5:67617619-67617794
  hypo

SEQ ID NO: 150767 - DNA, 24 bp, Homo sapiens
  chr5:67646893-67646917
  hypo
caccacgcccggcctgggctcagt

SEQ ID NO: 150768 - DNA, 81 bp, Homo sapiens; identical to SEQ ID NO: 69756
  chr5:67708115-67708196
  hypo

SEQ ID NO: 150769 - DNA, 138 bp, Homo sapiens; identical to SEQ ID NO: 19469
  chr5:67717788-67717926
  hypo

SEQ ID NO: 150770 - DNA, 38 bp, Homo sapiens; identical to SEQ ID NO: 19470
  chr5:67753208-67753246
  hypo

SEQ ID NO: 150771 - DNA, 37 bp, Homo sapiens; identical to SEQ ID NO: 19471
  chr5:67753365-67753402
  hypo

SEQ ID NO: 150772 - DNA, 161 bp, Homo sapiens
  chr5:67771772-67771933
  hypo
ttctgctagtcagttcgttaatcaattattagtaacaaggtaataagaacccagaattggccattcaaaacaaaatctcagaacttgatgctaatctacatgtagcccaccccacacctgtggtcaccatcatccttttaaaaagctttttatgggctggg

SEQ ID NO: 150773 - DNA, 43 bp, Homo sapiens; identical to SEQ ID NO: 69761
  chr5:67845322-67845365
  hypo

SEQ ID NO: 150774 - DNA, 31 bp, Homo sapiens; identical to SEQ ID NO: 69762
  chr5:67857567-67857598
  hypo

SEQ ID NO: 150775 - DNA, 31 bp, Homo sapiens; identical to SEQ ID NO: 69763
  chr5:68018530-68018561
  hypo

SEQ ID NO: 150776 - DNA, 27 bp, Homo sapiens
  chr5:68133363-68133390
  hypo
agccaccgcgcccggccagaaatgggt

SEQ ID NO: 150777 - DNA, 157 bp, Homo sapiens; identical to SEQ ID NO: 69765
  chr5:68238652-68238809
  hypo

SEQ ID NO: 150778 - DNA, 30 bp, Homo sapiens
  chr5:68257052-68257082
  hypo
ctcacccttcctcttcgctctgtgctgctt

SEQ ID NO: 150779 - DNA, 38 bp, Homo sapiens; identical to SEQ ID NO: 69766
  chr5:68337840-68337878
  hypo

SEQ ID NO: 150780 - DNA, 44 bp, Homo sapiens; identical to SEQ ID NO: 69767
  chr5:68363913-68363957
  hypo

SEQ ID NO: 150781 - DNA, 31 bp, Homo sapiens; identical to SEQ ID NO: 69768
  chr5:68368094-68368125
  hypo

SEQ ID NO: 150782 - DNA, 387 bp, Homo sapiens
  chr5:68370824-68371211
  hypo
caggcaccggggtaccgtgcccagcccccgggcacctccacagggctgccatgtggcagaggaagccggtgaactgacgcttggctgcagccaggcaggcctaagctctgttgccccgccgcatcccagctacacccacaggcctggatgccaaccagctggcgtcagtgcccgcggtgccttccagcacccgcctgtcctggaggagctgcacctgtcccctaatatcttcacccgcctcttaggggcagccttctcggccctggcgtgcatggtgcaccacctccacctctctgaaaagctggcctgggtgcccgtggaggccttcgtggggctgcagatccaagtgaaccaatccgccaacccgtgaaactgggactgtgccct

SEQ ID NO: 150783 - DNA, 40 bp, Homo sapiens
  chr5:68391292-68391332
  hypo
ccgggattacaggcatgagccaccgcgcccgcccaacata

SEQ ID NO: 150784 - DNA, 20 bp, Homo sapiens
  chr5:68459532-68459552
  hypo
tataatattcccagtgcggc

SEQ ID NO: 150785 - DNA, 30 bp, Homo sapiens; identical to SEQ ID NO: 69770
  chr5:68461925-68461955
  hypo

SEQ ID NO: 150786 - DNA, 39 bp, Homo sapiens; identical to SEQ ID NO: 69771
  chr5:68475607-68475646
  hypo

SEQ ID NO: 150787 - DNA, 31 bp, Homo sapiens
  chr5:68476732-68476763
  hypo
gagccaatgcgcctgacgcccacttctattt

SEQ ID NO: 150788 - DNA, 31 bp, Homo sapiens; identical to SEQ ID NO: 41605
  chr5:68485209-68485240
  hypo

SEQ ID NO: 150789 - DNA, 30 bp, Homo sapiens; identical to SEQ ID NO: 19473
  chr5:68505721-68505751
  hypo

SEQ ID NO: 150790 - DNA, 30 bp, Homo sapiens
  chr5:70926017-70926047
  hypo
tgacgcacgcttgaccgaatgttgagaaag

SEQ ID NO: 150791 - DNA, 128 bp, Homo sapiens
  chr5:70945905-70946033
  hypo
ctctacatttggccaaatgctcgtatctcagtgatgggaggagagcaggcagccaatgtgttggccacgataacaaaggaccaaagagcccgggaaggaaagcaggtcggtgtcgttttctcttgttt

SEQ ID NO: 150792 - DNA, 108 bp, Homo sapiens
  chr5:70958354-70958462
  hypo
atgtcacattagcaacgagttgtgaagactgagcattaatgcatgggaggtcacggtcgtggagagaacactgggcggggtgtggaccggtttcgctctagttcagct

SEQ ID NO: 150793 - DNA, 320 bp, Homo sapiens; identical to SEQ ID NO: 69775
  chr5:70994054-70994374
  hypo

SEQ ID NO: 150794 - DNA, 38 bp, Homo sapiens; identical to SEQ ID NO: 69776
  chr5:71313584-71313622
  hypo

SEQ ID NO: 150795 - DNA, 30 bp, Homo sapiens
  chr5:71581782-71581812
  hypo
tttgtcttacagacacgaatccgtcctcat

SEQ ID NO: 150796 - DNA, 30 bp, Homo sapiens
  chr5:71584656-71584686
  hypo
aacacaaagtctctacgccctcaaaggaaa

SEQ ID NO: 150797 - DNA, 158 bp, Homo sapiens
  chr5:71714797-71714955
  hypo
gccaccgtgcccggcccatgccaggttaatttttatactggttaatttttatatactggttatacaggttaatttttataccggggagggggagtctcgcagtgttgcccaggctggtctcgaactgctgagttcaagccatccgctcgcctccagac

SEQ ID NO: 150798 - DNA, 30 bp, Homo sapiens
  chr5:71756469-71756499
  hypo
tgcgtgcacgcgtgcggcttgatcccactg

SEQ ID NO: 150799 - DNA, 30 bp, Homo sapiens
  chr5:71756710-71756740
  hypo
gcaggaaggtgtgccggctgaaggggaagg

SEQ ID NO: 150800 - DNA, 40 bp, Homo sapiens; identical to SEQ ID NO: 69777
  chr5:71780023-71780063
  hypo

SEQ ID NO: 150801 - DNA, 30 bp, Homo sapiens
  chr5:72162610-72162640
  hypo
catatttctggtaatcgatacaccattgct

SEQ ID NO: 150802 - DNA, 30 bp, Homo sapiens
  chr5:72197671-72197701
  hypo
gaggcaggcagatcacgaggtcaggagttc

SEQ ID NO: 150803 - DNA, 270 bp, Homo sapiens
  chr5:72197880-72198150
  hypo
gacaagagcgagacttcatctggaaaaaaaaaaaatgtagttgagggagggaagcaaagaactaaattttggtttccaggaatgcacacaagagttataaaactgccccaaaaaaatgcttttatagcaataactttctcacatttcttaattttcaagaaaattgaaactttccactccgagaggggtgttttgaacatttttaaattgtgaccttttgatgtttcctagctcgtattgtggtttttcttaactcggttttagaaacgt

SEQ ID NO: 150804 - DNA, 181 bp, Homo sapiens; identical to SEQ ID NO: 69778
  chr5:72236833-72237014
  hypo

SEQ ID NO: 150805 - DNA, 46 bp, Homo sapiens; identical to SEQ ID NO: 69779
  chr5:72242482-72242528
  hypo

SEQ ID NO: 150806 - DNA, 30 bp, Homo sapiens
  chr5:72247576-72247606
  hypo
ctctgaaatgagtagcgtgcagggtgatgt

SEQ ID NO: 150807 - DNA, 253 bp, Homo sapiens; identical to SEQ ID NO: 69780
  chr5:72292519-72292772
  hypo

SEQ ID NO: 150808 - DNA, 182 bp, Homo sapiens; identical to SEQ ID NO: 19475
  chr5:72388278-72388460
  hypo

SEQ ID NO: 150809 - DNA, 40 bp, Homo sapiens; identical to SEQ ID NO: 4019
  chr5:72732869-72732909
  hypo

SEQ ID NO: 150810 - DNA, 774 bp, Homo sapiens; identical to SEQ ID NO: 41631
  chr5:72733012-72733786
  hypo

SEQ ID NO: 150811 - DNA, 2926 bp, Homo sapiens; identical to SEQ ID NO: 41633
  chr5:72742463-72745389
  hypo

SEQ ID NO: 150812 - DNA, 30 bp, Homo sapiens; identical to SEQ ID NO: 69785
  chr5:72804605-72804635
  hypo

SEQ ID NO: 150813 - DNA, 31 bp, Homo sapiens; identical to SEQ ID NO: 19479
  chr5:72806527-72806558
  hypo

SEQ ID NO: 150814 - DNA, 1144 bp, Homo sapiens; identical to SEQ ID NO: 41636
  chr5:72921422-72922566
  hypo

SEQ ID NO: 150815 - DNA, 197 bp, Homo sapiens
  chr5:72980653-72980850
  hypo
ttttcattgcagatgcgaaagccatggagttgagctgcagcgaagcacctctttacgtaagttgctaagcacggggcttcaggtccaaggggccctttcttaactccaaaccatgtgactgaagtggggagaaatgtttttcttgctattgagttaaggctttttaaaaacaacacactgagcgttactgtctagtt

SEQ ID NO: 150816 - DNA, 195 bp, Homo sapiens; identical to SEQ ID NO: 19481
  chr5:73081112-73081307
  hypo

SEQ ID NO: 150817 - DNA, 39 bp, Homo sapiens; identical to SEQ ID NO: 69789
  chr5:73102525-73102564
  hypo

SEQ ID NO: 150818 - DNA, 24 bp, Homo sapiens
  chr5:73127801-73127825
  hypo
caccatgtccggcctgaagtttag

SEQ ID NO: 150819 - DNA, 42 bp, Homo sapiens; identical to SEQ ID NO: 69791
  chr5:73192670-73192712
  hypo

SEQ ID NO: 150820 - DNA, 30 bp, Homo sapiens; identical to SEQ ID NO: 69792
  chr5:73205414-73205444
  hypo

SEQ ID NO: 150821 - DNA, 88 bp, Homo sapiens; identical to SEQ ID NO: 69793
  chr5:73205663-73205751
  hypo

SEQ ID NO: 150822 - DNA, 137 bp, Homo sapiens; identical to SEQ ID NO: 69794
  chr5:73228901-73229038
  hypo

SEQ ID NO: 150823 - DNA, 46 bp, Homo sapiens; identical to SEQ ID NO: 19483
  chr5:73247792-73247838
  hypo

SEQ ID NO: 150824 - DNA, 177 bp, Homo sapiens; identical to SEQ ID NO: 69796
  chr5:73623642-73623819
  hypo

SEQ ID NO: 150825 - DNA, 179 bp, Homo sapiens; identical to SEQ ID NO: 19484
  chr5:73627933-73628112
  hypo

SEQ ID NO: 150826 - DNA, 31 bp, Homo sapiens; identical to SEQ ID NO: 69798
  chr5:73636136-73636167
  hypo

SEQ ID NO: 150827 - DNA, 36 bp, Homo sapiens; identical to SEQ ID NO: 69799
  chr5:73665485-73665521
  hypo

SEQ ID NO: 150828 - DNA, 32 bp, Homo sapiens; identical to SEQ ID NO: 69800
  chr5:73687765-73687797
  hypo

SEQ ID NO: 150829 - DNA, 31 bp, Homo sapiens; identical to SEQ ID NO: 69801
  chr5:73771007-73771038
  hypo

SEQ ID NO: 150830 - DNA, 194 bp, Homo sapiens; identical to SEQ ID NO: 4025
  chr5:73843884-73844078
  hypo

SEQ ID NO: 150831 - DNA, 30 bp, Homo sapiens
  chr5:73852431-73852461
  hypo
agaaagttctacgctcggggttcaatcctt

SEQ ID NO: 150832 - DNA, 192 bp, Homo sapiens; identical to SEQ ID NO: 69803
  chr5:73855840-73856032
  hypo

SEQ ID NO: 150833 - DNA, 223 bp, Homo sapiens; identical to SEQ ID NO: 69804
  chr5:73932083-73932306
  hypo

SEQ ID NO: 150834 - DNA, 264 bp, Homo sapiens; identical to SEQ ID NO: 41638
  chr5:73935723-73935987
  hypo

SEQ ID NO: 150835 - DNA, 516 bp, Homo sapiens; identical to SEQ ID NO: 41639
  chr5:73936032-73936548
  hypo

SEQ ID NO: 150836 - DNA, 286 bp, Homo sapiens; identical to SEQ ID NO: 41640
  chr5:73936773-73937059
  hypo

SEQ ID NO: 150837 - DNA, 30 bp, Homo sapiens; identical to SEQ ID NO: 19489
  chr5:73980422-73980452
  hypo

SEQ ID NO: 150838 - DNA, 204 bp, Homo sapiens; identical to SEQ ID NO: 4030
  chr5:74162515-74162719
  hypo

SEQ ID NO: 150839 - DNA, 23 bp, Homo sapiens
  chr5:74177827-74177850
  hypo
gagacagggtctgggccgggcgc

SEQ ID NO: 150840 - DNA, 31 bp, Homo sapiens; identical to SEQ ID NO: 69811
  chr5:74238223-74238254
  hypo

SEQ ID NO: 150841 - DNA, 30 bp, Homo sapiens
  chr5:74330937-74330967
  hypo
ccagctaagcggacacgactgcattcaggg

SEQ ID NO: 150842 - DNA, 544 bp, Homo sapiens; identical to SEQ ID NO: 41645
  chr5:74348350-74348894
  hypo

SEQ ID NO: 150843 - DNA, 1101 bp, Homo sapiens; identical to SEQ ID NO: 111567
  chr5:74348906-74350007
  hypo

SEQ ID NO: 150844 - DNA, 40 bp, Homo sapiens; identical to SEQ ID NO: 69814
  chr5:74628695-74628735
  hypo

SEQ ID NO: 150845 - DNA, 38 bp, Homo sapiens; identical to SEQ ID NO: 19493
  chr5:74652648-74652686
  hypo

SEQ ID NO: 150846 - DNA, 91 bp, Homo sapiens
  chr5:74753657-74753748
  hypo
tacttctttatcaatcgtgttagcttttctttctcaagccagactggtttttcttgggtgtatgggtataggcgcgcgtgtgtgtgtgtgt

SEQ ID NO: 150847 - DNA, 90 bp, Homo sapiens
  chr5:74753807-74753897
  hypo
tatgtgtgtgtgtgttttgtgcctgttagaaataaccaaaacaggtgtttcaactacaactttgtgaaactcaaacgaacaagtataggc

SEQ ID NO: 150848 - DNA, 28 bp, Homo sapiens
  chr5:74808618-74808646
  hypo
actacaaggatgggacgataggagcgaa

SEQ ID NO: 150849 - DNA, 26 bp, Homo sapiens
  chr5:74826906-74826932
  hypo
caggcgtgagccactgcacccaaacc

SEQ ID NO: 150850 - DNA, 24 bp, Homo sapiens
  chr5:74862326-74862350
  hypo
cccgtgaaatctcctggtctccag

SEQ ID NO: 150851 - DNA, 389 bp, Homo sapiens; identical to SEQ ID NO: 41648
  chr5:75377859-75378248
  hypo

SEQ ID NO: 150852 - DNA, 2333 bp, Homo sapiens; identical to SEQ ID NO: 111576
  chr5:75378678-75381011
  hypo

SEQ ID NO: 150853 - DNA, 30 bp, Homo sapiens; identical to SEQ ID NO: 69821
  chr5:75470024-75470054
  hypo

SEQ ID NO: 150854 - DNA, 39 bp, Homo sapiens
  chr5:75587128-75587167
  hypo
tgttcggatccgcaccgagctgtacggagtaagtaacaa

SEQ ID NO: 150855 - DNA, 2020 bp, Homo sapiens; identical to SEQ ID NO: 41651
  chr5:75698193-75700213
  hypo

SEQ ID NO: 150856 - DNA, 30 bp, Homo sapiens; identical to SEQ ID NO: 69824
  chr5:75774896-75774926
  hypo

SEQ ID NO: 150857 - DNA, 30 bp, Homo sapiens; identical to SEQ ID NO: 19497
  chr5:75784942-75784972
  hypo

SEQ ID NO: 150858 - DNA, 30 bp, Homo sapiens
  chr5:75913639-75913669
  hypo
acaaccatctatgatcgtatgcattaagtg

SEQ ID NO: 150859 - DNA, 30 bp, Homo sapiens; identical to SEQ ID NO: 69826
  chr5:75969398-75969428
  hypo

SEQ ID NO: 150860 - DNA, 30 bp, Homo sapiens
  chr5:75996936-75996966
  hypo
agaacccaaaggggcgaagagagcgaagcc

SEQ ID NO: 150861 - DNA, 38 bp, Homo sapiens; identical to SEQ ID NO: 69827
  chr5:76159634-76159672
  hypo

SEQ ID NO: 150862 - DNA, 408 bp, Homo sapiens; identical to SEQ ID NO: 111584
  chr5:76249944-76250352
  hypo

SEQ ID NO: 150863 - DNA, 30 bp, Homo sapiens; identical to SEQ ID NO: 69828
  chr5:76264816-76264846
  hypo

SEQ ID NO: 150864 - DNA, 137 bp, Homo sapiens; identical to SEQ ID NO: 69829
  chr5:76327276-76327413
  hypo

SEQ ID NO: 150865 - DNA, 16 bp, Homo sapiens
  chr5:76327712-76327728
  hypo
agtgcaactctgtctc

SEQ ID NO: 150866 - DNA, 38 bp, Homo sapiens; identical to SEQ ID NO: 19499
  chr5:76328104-76328142
  hypo

SEQ ID NO: 150867 - DNA, 170 bp, Homo sapiens; identical to SEQ ID NO: 19500
  chr5:76372311-76372481
  hypo

SEQ ID NO: 150868 - DNA, 47 bp, Homo sapiens; identical to SEQ ID NO: 19501
  chr5:76373686-76373733
  hypo

SEQ ID NO: 150869 - DNA, 30 bp, Homo sapiens
  chr5:76382407-76382437
  hypo
cagaaactgctccagcggactccgaaagga

SEQ ID NO: 150870 - DNA, 198 bp, Homo sapiens; identical to SEQ ID NO: 69834
  chr5:76399985-76400183
  hypo

SEQ ID NO: 150871 - DNA, 30 bp, Homo sapiens
  chr5:76440263-76440293
  hypo
caggaccaatgagtacgagtcatagggacg

SEQ ID NO: 150872 - DNA, 974 bp, Homo sapiens; identical to SEQ ID NO: 111589
  chr5:76506029-76507003
  hypo

SEQ ID NO: 150873 - DNA, 231 bp, Homo sapiens; identical to SEQ ID NO: 41660
  chr5:76507082-76507313
  hypo

SEQ ID NO: 150874 - DNA, 30 bp, Homo sapiens; identical to SEQ ID NO: 69837
  chr5:76607830-76607860
  hypo

SEQ ID NO: 150875 - DNA, 33 bp, Homo sapiens; identical to SEQ ID NO: 69838
  chr5:76738422-76738455
  hypo

SEQ ID NO: 150876 - DNA, 22 bp, Homo sapiens
  chr5:76785929-76785951
  hypo
ttttttcgcaccacacgcccaa

SEQ ID NO: 150877 - DNA, 22 bp, Homo sapiens
  chr5:76786070-76786092
  hypo
aagccaccgcgcccagcccaga

SEQ ID NO: 150878 - DNA, 23 bp, Homo sapiens
  chr5:77047288-77047311
  hypo
caccgcgccggccagcctgacca

SEQ ID NO: 150879 - DNA, 30 bp, Homo sapiens; identical to SEQ ID NO: 69840
  chr5:77081277-77081307
  hypo

SEQ ID NO: 150880 - DNA, 667 bp, Homo sapiens; identical to SEQ ID NO: 41685
  chr5:77268309-77268976
  hypo

SEQ ID NO: 150881 - DNA, 42 bp, Homo sapiens; identical to SEQ ID NO: 41686
  chr5:77269195-77269237
  hypo

SEQ ID NO: 150882 - DNA, 204 bp, Homo sapiens; identical to SEQ ID NO: 111620
  chr5:77269263-77269467
  hypo

SEQ ID NO: 150883 - DNA, 119 bp, Homo sapiens
  chr5:77288992-77289111
  hypo
gaggagtgtgtggggcggagtaggcatggctaggtgcacagctgaagctaccaaactaggtgatgcaaaagccaagtgggcaaaaggaacggttcggaaacgcacggaagagcaaagcc

SEQ ID NO: 150884 - DNA, 208 bp, Homo sapiens
  chr5:77291946-77292154
  hypo
gtaacatggagtgggagcaagcgattatggtgtggtaatagtaatccagcgatggaggccgagtcggttggaaatggattgaggtaaaataactcccgcaccatgataaatgtgaacagcgctttgctgacagatgatctaacaggtgttcataacaactatataagaggatttatttatgaccagccacagccgcagcactgtaaat

SEQ ID NO: 150885 - DNA, 109 bp, Homo sapiens
  chr5:77300046-77300155
  hypo
taaaaataaaactgccgcgctaacagcacgctgcggactattcaagagcaaaccaactggtcagtgtctcatgtctgacaattagcatgggcctcgcacagagcccacg

SEQ ID NO: 150886 - DNA, 64 bp, Homo sapiens; identical to SEQ ID NO: 69845
  chr5:77425048-77425112
  hypo

SEQ ID NO: 150887 - DNA, 30 bp, Homo sapiens
  chr5:77506958-77506988
  hypo
gccctataaatacgccgttattttctatag

SEQ ID NO: 150888 - DNA, 30 bp, Homo sapiens; identical to SEQ ID NO: 19506
  chr5:77511969-77511999
  hypo

SEQ ID NO: 150889 - DNA, 94 bp, Homo sapiens; identical to SEQ ID NO: 69847
  chr5:77655147-77655241
  hypo

SEQ ID NO: 150890 - DNA, 154 bp, Homo sapiens
  chr5:77655480-77655634
  hypo
gggattacaggcgtaagccaccgcgcccggccggtacaaattaatttaacacatcttttgataatctcatccttggtgttggaaaagacgggaaaatccaaaagtgtctattttgtgcccaaatgctcaagttaatactcgagggccttgatct

SEQ ID NO: 150891 - DNA, 31 bp, Homo sapiens; identical to SEQ ID NO: 69849
  chr5:77810047-77810078
  hypo

SEQ ID NO: 150892 - DNA, 112 bp, Homo sapiens; identical to SEQ ID NO: 69850
  chr5:77816709-77816821
  hypo

SEQ ID NO: 150893 - DNA, 35 bp, Homo sapiens; identical to SEQ ID NO: 69851
  chr5:77848658-77848693
  hypo

SEQ ID NO: 150894 - DNA, 21 bp, Homo sapiens
  chr5:77885002-77885023
  hypo
ttagaagttggccaggcgcag

SEQ ID NO: 150895 - DNA, 86 bp, Homo sapiens; identical to SEQ ID NO: 69853
  chr5:77912254-77912340
  hypo

SEQ ID NO: 150896 - DNA, 31 bp, Homo sapiens; identical to SEQ ID NO: 19510
  chr5:77916703-77916734
  hypo

SEQ ID NO: 150897 - DNA, 19 bp, Homo sapiens
  chr5:77922886-77922905
  hypo
agagcgaaactccatttca

SEQ ID NO: 150898 - DNA, 31 bp, Homo sapiens; identical to SEQ ID NO: 4058
  chr5:77944026-77944057
  hypo

SEQ ID NO: 150899 - DNA, 30 bp, Homo sapiens; identical to SEQ ID NO: 69857
  chr5:77945724-77945754
  hypo

SEQ ID NO: 150900 - DNA, 28 bp, Homo sapiens
  chr5:78039587-78039615
  hypo
ttcacatcggccaggcgcggtggctcac

SEQ ID NO: 150901 - DNA, 181 bp, Homo sapiens; identical to SEQ ID NO: 69858
  chr5:78068861-78069042
  hypo

SEQ ID NO: 150902 - DNA, 30 bp, Homo sapiens; identical to SEQ ID NO: 69859
  chr5:78069638-78069668
  hypo

SEQ ID NO: 150903 - DNA, 255 bp, Homo sapiens; identical to SEQ ID NO: 19512
  chr5:78105381-78105636
  hypo

SEQ ID NO: 150904 - DNA, 27 bp, Homo sapiens
  chr5:78162648-78162675
  hypo
gaatagggacagttccggtctacggct

SEQ ID NO: 150905 - DNA, 140 bp, Homo sapiens; identical to SEQ ID NO: 19514
  chr5:78264450-78264590
  hypo

SEQ ID NO: 150906 - DNA, 51 bp, Homo sapiens; identical to SEQ ID NO: 19515
  chr5:78264836-78264887
  hypo

SEQ ID NO: 150907 - DNA, 31 bp, Homo sapiens; identical to SEQ ID NO: 69864
  chr5:78356327-78356358
  hypo

SEQ ID NO: 150908 - DNA, 46 bp, Homo sapiens; identical to SEQ ID NO: 69865
  chr5:78445630-78445676
  hypo

SEQ ID NO: 150909 - DNA, 100 bp, Homo sapiens; identical to SEQ ID NO: 69866
  chr5:78469178-78469278
  hypo

SEQ ID NO: 150910 - DNA, 44 bp, Homo sapiens
  chr5:78535317-78535361
  hypo
tttttggatactcagaaaaagcgactgtcaggccggtcgcggtg

SEQ ID NO: 150911 - DNA, 30 bp, Homo sapiens
  chr5:78581764-78581794
  hypo
ctatcctagctgacacgcgctttttttccg

SEQ ID NO: 150912 - DNA, 31 bp, Homo sapiens; identical to SEQ ID NO: 4064
  chr5:78810400-78810431
  hypo

SEQ ID NO: 150913 - DNA, 34 bp, Homo sapiens; identical to SEQ ID NO: 69868
  chr5:78812537-78812571
  hypo

SEQ ID NO: 150914 - DNA, 37 bp, Homo sapiens; identical to SEQ ID NO: 19518
  chr5:78881931-78881968
  hypo

SEQ ID NO: 150915 - DNA, 37 bp, Homo sapiens; identical to SEQ ID NO: 69870
  chr5:78882207-78882244
  hypo

SEQ ID NO: 150916 - DNA, 37 bp, Homo sapiens; identical to SEQ ID NO: 19519
  chr5:78949954-78949991
  hypo

SEQ ID NO: 150917 - DNA, 133 bp, Homo sapiens
  chr5:78985058-78985191
  hypo
taaagagagccgggacggaacactggttcaaaactgggcttttgagcagggcacgcctagctttgtttctcattgggtcattttactagcaatgacagcctgagctgctggagctcttcggagtctcagtttc

SEQ ID NO: 150918 - DNA, 215 bp, Homo sapiens; identical to SEQ ID NO: 69872
  chr5:78986241-78986456
  hypo

SEQ ID NO: 150919 - DNA, 31 bp, Homo sapiens; identical to SEQ ID NO: 19520
  chr5:79086452-79086483
  hypo

SEQ ID NO: 150920 - DNA, 120 bp, Homo sapiens; identical to SEQ ID NO: 69874
  chr5:79097420-79097540
  hypo

SEQ ID NO: 150921 - DNA, 30 bp, Homo sapiens; identical to SEQ ID NO: 41703
  chr5:79316411-79316441
  hypo

SEQ ID NO: 150922 - DNA, 96 bp, Homo sapiens; identical to SEQ ID NO: 69876
  chr5:79393211-79393307
  hypo

SEQ ID NO: 150923 - DNA, 87 bp, Homo sapiens
  chr5:79438044-79438131
  hypo
atcttgggtagctgccgaaagtcacgtttctgtattactttgcaagtacgtattttggaaattcctgtgcagcgtgatctcggctca

SEQ ID NO: 150924 - DNA, 39 bp, Homo sapiens; identical to SEQ ID NO: 69877
  chr5:79448990-79449029
  hypo

SEQ ID NO: 150925 - DNA, 31 bp, Homo sapiens; identical to SEQ ID NO: 69878
  chr5:79451010-79451041
  hypo

SEQ ID NO: 150926 - DNA, 31 bp, Homo sapiens; identical to SEQ ID NO: 69879
  chr5:79453490-79453521
  hypo

SEQ ID NO: 150927 - DNA, 119 bp, Homo sapiens
  chr5:79498688-79498807
  hypo
acacggacaaacttacgtgctctttcatcttgtgagccacggttgttgacatcatgatgcagcagaggacgacgaccagaatgaagtagagggcgtacatgaagcgggtgctgagggac

SEQ ID NO: 150928 - DNA, 292 bp, Homo sapiens; identical to SEQ ID NO: 41705
  chr5:79551151-79551443
  hypo

SEQ ID NO: 150929 - DNA, 79 bp, Homo sapiens; identical to SEQ ID NO: 69882
  chr5:79552928-79553007
  hypo

SEQ ID NO: 150930 - DNA, 32 bp, Homo sapiens; identical to SEQ ID NO: 69883
  chr5:79554325-79554357
  hypo

SEQ ID NO: 150931 - DNA, 166 bp, Homo sapiens
  chr5:79598626-79598792
  hypo
agccattgttgaatacgagagcagtgatatcgtcatgcatggtgagctggcagcaggtgtggatgggcggcggagtggagagggcgaggctctgtgctcgtggggaggatgcagtcttggcttcttttgttttgtttgttttttgagatggagtttcgcttttgtt

SEQ ID NO: 150932 - DNA, 30 bp, Homo sapiens; identical to SEQ ID NO: 69885
  chr5:79628357-79628387
  hypo

SEQ ID NO: 150933 - DNA, 30 bp, Homo sapiens; identical to SEQ ID NO: 19522
  chr5:79647599-79647629
  hypo

SEQ ID NO: 150934 - DNA, 23 bp, Homo sapiens
  chr5:79753567-79753590
  hypo
caggcacagtggctcacgcctgt

SEQ ID NO: 150935 - DNA, 20 bp, Homo sapiens
  chr5:79783234-79783254
  hypo
tatttgacagtctagctcta

SEQ ID NO: 150936 - DNA, 43 bp, Homo sapiens
  chr5:79785449-79785492
  hypo
aacaaatttttgggccgggcgcggtgactcacgcccgtaatcc

SEQ ID NO: 150937 - DNA, 40 bp, Homo sapiens
  chr5:79786094-79786134
  hypo
ccagccactcaggaggagactgaggcgggagaatcgctta

SEQ ID NO: 150938 - DNA, 500 bp, Homo sapiens; identical to SEQ ID NO: 111650
  chr5:79864944-79865444
  hypo

SEQ ID NO: 150939 - DNA, 180 bp, Homo sapiens; identical to SEQ ID NO: 4068
  chr5:79865522-79865702
  hypo

SEQ ID NO: 150940 - DNA, 89 bp, Homo sapiens; identical to SEQ ID NO: 4069
  chr5:79865744-79865833
  hypo

SEQ ID NO: 150941 - DNA, 361 bp, Homo sapiens; identical to SEQ ID NO: 111653
  chr5:79866099-79866460
  hypo

SEQ ID NO: 150942 - DNA, 450 bp, Homo sapiens
  chr5:79911129-79911579
  hypo
gccagtgcttgcccgcggggctacagaggaagacagcagccacgcctgcatatgggcttctgcactgctagcctcaaggctgccagagtgcaaagaatgccaggataatggctttatccacgtgtggccttttgacacataagctaatgactatattccaggtacaaatagttctttcccacgagctgtttctgcaggtctccaaacagacaattacccggttccacttaacagagtgactcaaggacggatctgagggctgggtcttgtgaacgcgggctgttgtcctgccctctcccagctctaacattgtgctgaaaagttaaaatacaaaacgccaaagctccccaatcccatcccacgcccctgcctgcgcagcctttcatgcattgaatgggcagcttcatgatgctgctgcgacaatagcgacaatagcgggggcagaggagt

SEQ ID NO: 150943 - DNA, 448 bp, Homo sapiens
  chr5:79974516-79974964
  hypo
attcagggcggctctcggaaatctgatttatagtatcatttagatatctgtgagtctgactcttcgtgtaagagtcctgaaaagcagacaggtttctaacactttagaaatagagtacatacatactcctgagtgtatcatctttactttttccatgtttatgctgtgttatagccataactggggaaatacattttttctgtaacattatatttgtatttgtttttagggagtgcagcctgccacaggcgaggttgtgtttgatagtttccaggactctgcttctcgttcagagctagaaacccggatgtcaagcctgcagccagtagagctgctgcttccttcggccttgtccgagcaaacagaggcgctcatccacagagccacatctgttaggtaagttggcacatcactggaatataataccgattctgaaacttaggtttag

SEQ ID NO: 150944 - DNA, 164 bp, Homo sapiens; identical to SEQ ID NO: 19529
  chr5:79986400-79986564
  hypo

SEQ ID NO: 150945 - DNA, 81 bp, Homo sapiens; identical to SEQ ID NO: 19530
  chr5:80076658-80076739
  hypo

SEQ ID NO: 150946 - DNA, 30 bp, Homo sapiens
  chr5:80382780-80382810
  hypo
ctgtgaaatggacccgcgacctgatgcgct

SEQ ID NO: 150947 - DNA, 23 bp, Homo sapiens
  chr5:80396006-80396029
  hypo
tgagccaccgcgcccggccacta

SEQ ID NO: 150948 - DNA, 30 bp, Homo sapiens
  chr5:80480224-80480254
  hypo
tgcacaagactctgtcgaaggcctttcacg

SEQ ID NO: 150949 - DNA, 30 bp, Homo sapiens
  chr5:80549678-80549708
  hypo
ggggaaggtccgcatcgggtgagaggtgcc

SEQ ID NO: 150950 - DNA, 49 bp, Homo sapiens
  chr5:80550826-80550875
  hypo
ttcgacgagcattacgtgctgtcttctcgggtgcgcactggccgcagca

SEQ ID NO: 150951 - DNA, 30 bp, Homo sapiens
  chr5:80583343-80583373
  hypo
aaaaaaaaaaaagagcgagatcgtaactga

SEQ ID NO: 150952 - DNA, 184 bp, Homo sapiens; identical to SEQ ID NO: 69898
  chr5:80652823-80653007
  hypo

SEQ ID NO: 150953 - DNA, 102 bp, Homo sapiens; identical to SEQ ID NO: 69899
  chr5:80717291-80717393
  hypo

SEQ ID NO: 150954 - DNA, 35 bp, Homo sapiens; identical to SEQ ID NO: 69900
  chr5:80728271-80728306
  hypo

SEQ ID NO: 150955 - DNA, 37 bp, Homo sapiens; identical to SEQ ID NO: 69901
  chr5:80839869-80839906
  hypo

SEQ ID NO: 150956 - DNA, 27 bp, Homo sapiens
  chr5:80931411-80931438
  hypo
tttttttttgagacattgtctcgctct

SEQ ID NO: 150957 - DNA, 153 bp, Homo sapiens; identical to SEQ ID NO: 69903
  chr5:81058592-81058745
  hypo

SEQ ID NO: 150958 - DNA, 43 bp, Homo sapiens
  chr5:81067108-81067151
  hypo
gggatgtggcagagacacagacgggtggacccaagcattgagg

SEQ ID NO: 150959 - DNA, 30 bp, Homo sapiens
  chr5:81069483-81069513
  hypo
cggggactaattggacggtggtttacaaag

SEQ ID NO: 150960 - DNA, 30 bp, Homo sapiens; identical to SEQ ID NO: 19533
  chr5:81192371-81192401
  hypo

SEQ ID NO: 150961 - DNA, 30 bp, Homo sapiens; identical to SEQ ID NO: 69905
  chr5:81266660-81266690
  hypo

SEQ ID NO: 150962 - DNA, 16 bp, Homo sapiens
  chr5:81282004-81282020
  hypo
ccgcgcccagccctct

SEQ ID NO: 150963 - DNA, 30 bp, Homo sapiens; identical to SEQ ID NO: 41722
  chr5:81538030-81538060
  hypo

SEQ ID NO: 150964 - DNA, 141 bp, Homo sapiens; identical to SEQ ID NO: 69907
  chr5:81570368-81570509
  hypo

SEQ ID NO: 150965 - DNA, 30 bp, Homo sapiens; identical to SEQ ID NO: 41724
  chr5:81658875-81658905
  hypo

SEQ ID NO: 150966 - DNA, 30 bp, Homo sapiens; identical to SEQ ID NO: 41727
  chr5:82453282-82453312
  hypo

SEQ ID NO: 150967 - DNA, 76 bp, Homo sapiens; identical to SEQ ID NO: 69910
  chr5:82808024-82808100
  hypo

SEQ ID NO: 150968 - DNA, 61 bp, Homo sapiens
  chr5:83095504-83095565
  hypo
aatgaaaaactgtttccggtatcaggctggcaaagataaaaaggttcgctaatatactgag

SEQ ID NO: 150969 - DNA, 31 bp, Homo sapiens; identical to SEQ ID NO: 69912
  chr5:84845601-84845632
  hypo

SEQ ID NO: 150970 - DNA, 30 bp, Homo sapiens; identical to SEQ ID NO: 69913
  chr5:85842324-85842354
  hypo

SEQ ID NO: 150971 - DNA, 27 bp, Homo sapiens
  chr5:85911801-85911828
  hypo
tttttttttgagatggagtctcgctct

SEQ ID NO: 150972 - DNA, 30 bp, Homo sapiens
  chr5:86180591-86180621
  hypo
atctgcacctacaccgtctcctggaatttg

SEQ ID NO: 150973 - DNA, 551 bp, Homo sapiens
  chr5:86547818-86548369
  hypo
gtgtcaccgctgacccgtgcacacacccggaggggatgtgacagcaccctagctcagccccaaccccaatcggagatctgattggcgccgggagtggggagaggccaggcagctggagcaggtacctctgagcctgcgaggggaaggggggccttctcagacctcctaagagttcagggatgccccgcctcttgggcggggctcctgctactctgggttcccaagagcaccggggccggaatgcagcccgcttgggtggctgcagttgtacctggagagctcccgcctggccaacttggaaagagcagggctcccggttgttcccagctcccactggcgcagtgggcacccagccgcacctcctggcagccagggacgggggctccaggtcatcccttgacctgcgccaccatctggtataggggcgagcttgctatgagctacccctgtgtcccagcgctcagggactggctggagcaccgcctgtgagctcagcgcaaccatgccaggccttatcaccacggcccccaaggtagcgggctgcagggagc

SEQ ID NO: 150974 - DNA, 135 bp, Homo sapiens
  chr5:86672202-86672337
  hypo
tcccaagtatttatgcgctgccagttgagccgattacagaaagggcatgccacagatgaatggtttctgctcagctcccatataccattaaaaggtattgaaccagggtccctgcgtgttcgagcacgatactct

SEQ ID NO: 150975 - DNA, 30 bp, Homo sapiens
  chr5:87212376-87212406
  hypo
agatgggctgactagcgaagtgatttccct

SEQ ID NO: 150976 - DNA, 997 bp, Homo sapiens; identical to SEQ ID NO: 41737
  chr5:87436528-87437525
  hypo

SEQ ID NO: 150977 - DNA, 20 bp, Homo sapiens
  chr5:88079167-88079187
  hypo
gggtgcagtggttcacgcct

SEQ ID NO: 150978 - DNA, 32 bp, Homo sapiens; identical to SEQ ID NO: 69917
  chr5:88097574-88097606
  hypo

SEQ ID NO: 150979 - DNA, 17 bp, Homo sapiens
  chr5:88103082-88103099
  hypo
taggctggagtgtagcg

SEQ ID NO: 150980 - DNA, 16 bp, Homo sapiens
  chr5:88103338-88103354
  hypo
ccgtgcctcgcctcac

SEQ ID NO: 150981 - DNA, 37 bp, Homo sapiens
  chr5:88139903-88139940
  hypo
ggcatgagccatcgcacccctgcgaaacaattttaaa

SEQ ID NO: 150982 - DNA, 39 bp, Homo sapiens
  chr5:88161979-88162018
  hypo
tgggattacaggagtgagccaccgcgcccggcccaagtc

SEQ ID NO: 150983 - DNA, 751 bp, Homo sapiens; identical to SEQ ID NO: 111713
  chr5:88178385-88179136
  hypo

SEQ ID NO: 150984 - DNA, 1222 bp, Homo sapiens; identical to SEQ ID NO: 111714
  chr5:88179187-88180409
  hypo

SEQ ID NO: 150985 - DNA, 265 bp, Homo sapiens
  chr5:88233029-88233294
  hypo
cgatgtagaaagaatcgctgcactttcccagggctgctccgcagtgtgagtggccactagctctcttttcctatgaccccagtgctgtttgggtttgctctccagaagaacaggtagatacatttgcagctggcgggggcactgctttattgcctattgtggaatgcgtgccaaataaaaaccatcgtgatttgaaatcggcaatcttatatgcttttcaggttactcggatgttcaaacacacgtaaccaaccatcaatatgag

SEQ ID NO: 150986 - DNA, 27 bp, Homo sapiens
  chr5:88371467-88371494
  hypo
taatcttgcttaggggcggatctcctg

SEQ ID NO: 150987 - DNA, 19 bp, Homo sapiens
  chr5:88417900-88417919
  hypo
gatccgcccgcctccgcct

SEQ ID NO: 150988 - DNA, 31 bp, Homo sapiens; identical to SEQ ID NO: 69921
  chr5:90256912-90256943
  hypo

SEQ ID NO: 150989 - DNA, 35 bp, Homo sapiens; identical to SEQ ID NO: 69922
  chr5:90257314-90257349
  hypo

SEQ ID NO: 150990 - DNA, 30 bp, Homo sapiens; identical to SEQ ID NO: 19537
  chr5:90459826-90459856
  hypo

SEQ ID NO: 150991 - DNA, 144 bp, Homo sapiens; identical to SEQ ID NO: 69924
  chr5:90670734-90670878
  hypo

SEQ ID NO: 150992 - DNA, 94 bp, Homo sapiens; identical to SEQ ID NO: 69925
  chr5:90672505-90672599
  hypo

SEQ ID NO: 150993 - DNA, 31 bp, Homo sapiens; identical to SEQ ID NO: 69926
  chr5:92310056-92310087
  hypo

SEQ ID NO: 150994 - DNA, 31 bp, Homo sapiens; identical to SEQ ID NO: 4107
  chr5:92917347-92917378
  hypo

SEQ ID NO: 150995 - DNA, 36 bp, Homo sapiens
  chr5:93032773-93032809
  hypo
aaaaaaaaaaaaaaaggttggcggacaagtttagtt

SEQ ID NO: 150996 - DNA, 101 bp, Homo sapiens; identical to SEQ ID NO: 69928
  chr5:93076895-93076996
  hypo

SEQ ID NO: 150997 - DNA, 145 bp, Homo sapiens; identical to SEQ ID NO: 69929
  chr5:93077275-93077420
  hypo

SEQ ID NO: 150998 - DNA, 158 bp, Homo sapiens; identical to SEQ ID NO: 69930
  chr5:93143745-93143903
  hypo

SEQ ID NO: 150999 - DNA, 30 bp, Homo sapiens; identical to SEQ ID NO: 19540
  chr5:93414323-93414353
  hypo

SEQ ID NO: 151000 - DNA, 31 bp, Homo sapiens; identical to SEQ ID NO: 69932
  chr5:93823875-93823906
  hypo

SEQ ID NO: 151001 - DNA, 39 bp, Homo sapiens; identical to SEQ ID NO: 19541
  chr5:94762452-94762491
  hypo

SEQ ID NO: 151002 - DNA, 38 bp, Homo sapiens; identical to SEQ ID NO: 19542
  chr5:94762730-94762768
  hypo

SEQ ID NO: 151003 - DNA, 87 bp, Homo sapiens; identical to SEQ ID NO: 69935
  chr5:94776918-94777005
  hypo

SEQ ID NO: 151004 - DNA, 31 bp, Homo sapiens; identical to SEQ ID NO: 19543
  chr5:94795583-94795614
  hypo

SEQ ID NO: 151005 - DNA, 1635 bp, Homo sapiens; identical to SEQ ID NO: 111753
  chr5:94955629-94957264
  hypo

SEQ ID NO: 151006 - DNA, 95 bp, Homo sapiens; identical to SEQ ID NO: 69938
  chr5:94981772-94981867
  hypo

SEQ ID NO: 151007 - DNA, 34 bp, Homo sapiens
  chr5:94982106-94982140
  hypo
aggcgtgaaccaccgcgcccggccttaacatcct

SEQ ID NO: 151008 - DNA, 17 bp, Homo sapiens
  chr5:95019538-95019555
  hypo
ccgacagcctagttata

SEQ ID NO: 151009 - DNA, 278 bp, Homo sapiens; identical to SEQ ID NO: 111754
  chr5:95066553-95066831
  hypo

SEQ ID NO: 151010 - DNA, 156 bp, Homo sapiens; identical to SEQ ID NO: 69942
  chr5:95213825-95213981
  hypo

SEQ ID NO: 151011 - DNA, 19 bp, Homo sapiens
  chr5:95247334-95247353
  hypo
ccatcgcacccggccttgc

SEQ ID NO: 151012 - DNA, 30 bp, Homo sapiens
  chr5:95264679-95264709
  hypo
gtgcttgctgggtgccggaacacgctactc

SEQ ID NO: 151013 - DNA, 33 bp, Homo sapiens; identical to SEQ ID NO: 19546
  chr5:95290420-95290453
  hypo

SEQ ID NO: 151014 - DNA, 99 bp, Homo sapiens
  chr5:95515381-95515480
  hypo
gagggagcatgtgcaggagcacgagagcacttgtcacgttgagagaacgttacacggtttagaactggtagagtgtaggccgggcgcggtggctcacac

SEQ ID NO: 151015 - DNA, 30 bp, Homo sapiens; identical to SEQ ID NO: 69944
  chr5:95993882-95993912
  hypo

SEQ ID NO: 151016 - DNA, 30 bp, Homo sapiens
  chr5:96066269-96066299
  hypo
tacgcaagttacctgcgtgaacgttttagg

SEQ ID NO: 151017 - DNA, 30 bp, Homo sapiens; identical to SEQ ID NO: 69945
  chr5:96098100-96098130
  hypo

SEQ ID NO: 151018 - DNA, 476 bp, Homo sapiens; identical to SEQ ID NO: 69946
  chr5:96111421-96111897
  hypo

SEQ ID NO: 151019 - DNA, 204 bp, Homo sapiens; identical to SEQ ID NO: 19548
  chr5:96114495-96114699
  hypo

SEQ ID NO: 151020 - DNA, 30 bp, Homo sapiens; identical to SEQ ID NO: 19549
  chr5:96121167-96121197
  hypo

SEQ ID NO: 151021 - DNA, 167 bp, Homo sapiens; identical to SEQ ID NO: 69949
  chr5:96121445-96121612
  hypo

SEQ ID NO: 151022 - DNA, 30 bp, Homo sapiens; identical to SEQ ID NO: 19551
  chr5:96141706-96141736
  hypo

SEQ ID NO: 151023 - DNA, 34 bp, Homo sapiens; identical to SEQ ID NO: 19552
  chr5:96173521-96173555
  hypo

SEQ ID NO: 151024 - DNA, 30 bp, Homo sapiens
  chr5:96355651-96355681
  hypo
tccttgcatcgtcagcgtagcaagtatttt

SEQ ID NO: 151025 - DNA, 86 bp, Homo sapiens; identical to SEQ ID NO: 19553
  chr5:96362697-96362783
  hypo

SEQ ID NO: 151026 - DNA, 30 bp, Homo sapiens
  chr5:96378609-96378639
  hypo
gtagctggctcaggccgggaaattgccacc

SEQ ID NO: 151027 - DNA, 61 bp, Homo sapiens
  chr5:96378906-96378967
  hypo
ttgaatgccctgtgtcgctgattgggaaccagaggcgcttttgatccgcactgagtaacca

SEQ ID NO: 151028 - DNA, 56 bp, Homo sapiens
  chr5:96397785-96397841
  hypo
ttaatgatgttgatccgggctgctctccgctgccagcctctcgagtgatccaggta

SEQ ID NO: 151029 - DNA, 43 bp, Homo sapiens; identical to SEQ ID NO: 69953
  chr5:96742641-96742684
  hypo

SEQ ID NO: 151030 - DNA, 18 bp, Homo sapiens
  chr5:96855630-96855648
  hypo
catcttggctcctcccca

SEQ ID NO: 151031 - DNA, 30 bp, Homo sapiens
  chr5:97746216-97746246
  hypo
aggttaaattaacaccgacgaatataatgg

SEQ ID NO: 151032 - DNA, 30 bp, Homo sapiens
  chr5:97746464-97746494
  hypo
gggctcagaatattgcggaagatcatttga

SEQ ID NO: 151033 - DNA, 83 bp, Homo sapiens
  chr5:97912103-97912186
  hypo
cacgcgggttcagagcgtggagcagatgggcgaggtggcctagggagcggcccgcatccgtggggagacgctgggcctcaacg

SEQ ID NO: 151034 - DNA, 30 bp, Homo sapiens
  chr5:97912536-97912566
  hypo
gctttgctcagggtccgttgaaaaatgccc

SEQ ID NO: 151035 - DNA, 448 bp, Homo sapiens; identical to SEQ ID NO: 41807
  chr5:98109212-98109660
  hypo

SEQ ID NO: 151036 - DNA, 696 bp, Homo sapiens; identical to SEQ ID NO: 41808
  chr5:98109926-98110622
  hypo

SEQ ID NO: 151037 - DNA, 182 bp, Homo sapiens; identical to SEQ ID NO: 69957
  chr5:98200929-98201111
  hypo

SEQ ID NO: 151038 - DNA, 133 bp, Homo sapiens; identical to SEQ ID NO: 69958
  chr5:98239919-98240052
  hypo

SEQ ID NO: 151039 - DNA, 77 bp, Homo sapiens; identical to SEQ ID NO: 19557
  chr5:98242968-98243045
  hypo

SEQ ID NO: 151040 - DNA, 30 bp, Homo sapiens; identical to SEQ ID NO: 69960
  chr5:98260390-98260420
  hypo

SEQ ID NO: 151041 - DNA, 20 bp, Homo sapiens
  chr5:98294300-98294320
  hypo
gggcgtggtggctcacgcct

SEQ ID NO: 151042 - DNA, 30 bp, Homo sapiens; identical to SEQ ID NO: 69961
  chr5:98396286-98396316
  hypo

SEQ ID NO: 151043 - DNA, 18 bp, Homo sapiens
  chr5:99030787-99030805
  hypo
gacgtgagcgggtgccgg

SEQ ID NO: 151044 - DNA, 30 bp, Homo sapiens; identical to SEQ ID NO: 19558
  chr5:99583036-99583066
  hypo

SEQ ID NO: 151045 - DNA, 22 bp, Homo sapiens
  chr5:100096088-100096110
  hypo
cgtgagccgccgcacccggcca

SEQ ID NO: 151046 - DNA, 30 bp, Homo sapiens
  chr5:100158275-100158305
  hypo
gttcactgtaaattacgaatcaatatgtaa

SEQ ID NO: 151047 - DNA, 28 bp, Homo sapiens
  chr5:100185189-100185217
  hypo
taagaaacactgctggctgagcgcggtg

SEQ ID NO: 151048 - DNA, 937 bp, Homo sapiens; identical to SEQ ID NO: 4123
  chr5:100238182-100239119
  hypo

SEQ ID NO: 151049 - DNA, 1010 bp, Homo sapiens; identical to SEQ ID NO: 4124
  chr5:100239134-100240144
  hypo

SEQ ID NO: 151050 - DNA, 40 bp, Homo sapiens; identical to SEQ ID NO: 69966
  chr5:100247923-100247963
  hypo

SEQ ID NO: 151051 - DNA, 27 bp, Homo sapiens
  chr5:100377803-100377830
  hypo
agaaaaaagctgacttctggccgggcg

SEQ ID NO: 151052 - DNA, 26 bp, Homo sapiens
  chr5:100378069-100378095
  hypo
tgggcgaactgacataaaacatcaca

SEQ ID NO: 151053 - DNA, 519 bp, Homo sapiens; identical to SEQ ID NO: 111788
  chr5:102201406-102201925
  hypo

SEQ ID NO: 151054 - DNA, 30 bp, Homo sapiens; identical to SEQ ID NO: 19564
  chr5:102364820-102364850
  hypo

SEQ ID NO: 151055 - DNA, 81 bp, Homo sapiens; identical to SEQ ID NO: 69971
  chr5:103289776-103289857
  hypo

SEQ ID NO: 151056 - DNA, 30 bp, Homo sapiens
  chr5:104050768-104050798
  hypo
agtcgtgagccactgcgcccagccgcgatg

SEQ ID NO: 151057 - DNA, 19 bp, Homo sapiens
  chr5:104382503-104382522
  hypo
cagacggctgcacatcagt

SEQ ID NO: 151058 - DNA, 30 bp, Homo sapiens
  chr5:106940516-106940546
  hypo
catctattcccatcacggtagttcactcag

SEQ ID NO: 151059 - DNA, 30 bp, Homo sapiens
  chr5:106946046-106946076
  hypo
acggcgcacccgccccgcttgaagaagttc

SEQ ID NO: 151060 - DNA, 30 bp, Homo sapiens
  chr5:106946593-106946623
  hypo
tagcaacgcaggtttcgatctttgctattt

SEQ ID NO: 151061 - DNA, 2608 bp, Homo sapiens; identical to SEQ ID NO: 41820
  chr5:107005046-107007654
  hypo

SEQ ID NO: 151062 - DNA, 103 bp, Homo sapiens; identical to SEQ ID NO: 41821
  chr5:107007962-107008065
  hypo

SEQ ID NO: 151063 - DNA, 30 bp, Homo sapiens
  chr5:107060923-107060953
  hypo
gagatgacggaaaatcgttcagtcgtcgta

SEQ ID NO: 151064 - DNA, 30 bp, Homo sapiens
  chr5:107061220-107061250
  hypo
gtacatgatgcaaaccgagggggatgattc

SEQ ID NO: 151065 - DNA, 30 bp, Homo sapiens; identical to SEQ ID NO: 4132
  chr5:107141292-107141322
  hypo

SEQ ID NO: 151066 - DNA, 30 bp, Homo sapiens
  chr5:107293766-107293796
  hypo
aatacaggtgaacagcgcgattatttccct

SEQ ID NO: 151067 - DNA, 207 bp, Homo sapiens; identical to SEQ ID NO: 4133
  chr5:107359032-107359239
  hypo

SEQ ID NO: 151068 - DNA, 344 bp, Homo sapiens; identical to SEQ ID NO: 69977
  chr5:107703568-107703912
  hypo

SEQ ID NO: 151069 - DNA, 30 bp, Homo sapiens
  chr5:107872114-107872144
  hypo
tgggggtccaggggtcgcgggtatccccct

SEQ ID NO: 151070 - DNA, 375 bp, Homo sapiens
  chr5:108063452-108063827
  hypo
atgcatgaatgagctcgtgttgttaatattgccaggcccacaggaagcacccaacaaagagcaatgattggtgttcgcgttcattatctcatttaattcttacaaaaccacggcaaggattcaaccccacaactgctgtctagaaaaccgaggaaagtgacgcaacccgcgggaggtctgacggcccgagagccgcagcgccaggcccgggagccagccccgtccacttccccggtggattcttctccgttccccgccggccgccccaggtgaagctcctttccgccgtcagaaggaggctcccagcgggaagcagcatcgagggcgacccagggccagcacgggaaatgccagggaccgcgtcagccgagcctg

SEQ ID NO: 151071 - DNA, 216 bp, Homo sapiens
  chr5:108586385-108586601
  hypo
tgcaaaggtggctgtcggcaggatcagtgctggaatttcagcctcatatctcatagcctgctcccggggtgatggatggcttctgcgcggctggccattgatcccagtcatagccgaagagtaaaacaacccttgccgccgcatttacattgcgggctgacatgtgtctgcaatgcggcgccgaggcccccagggactgcgcgtggccaccttctg

SEQ ID NO: 151072 - DNA, 30 bp, Homo sapiens; identical to SEQ ID NO: 69978
  chr5:108666416-108666446
  hypo

SEQ ID NO: 151073 - DNA, 39 bp, Homo sapiens; identical to SEQ ID NO: 19571
  chr5:108730037-108730076
  hypo

SEQ ID NO: 151074 - DNA, 30 bp, Homo sapiens; identical to SEQ ID NO: 19572
  chr5:108906276-108906306
  hypo

SEQ ID NO: 151075 - DNA, 465 bp, Homo sapiens; identical to SEQ ID NO: 111802
  chr5:109024544-109025009
  hypo

SEQ ID NO: 151076 - DNA, 42 bp, Homo sapiens
  chr5:109032070-109032112
  hypo
attacaggcgtgagcctctgcgcctggttggtatctcttaaa

SEQ ID NO: 151077 - DNA, 43 bp, Homo sapiens
  chr5:109040407-109040450
  hypo
gaccagggactgcagcaataacgatgacacccctgctggaaat

SEQ ID NO: 151078 - DNA, 30 bp, Homo sapiens; identical to SEQ ID NO: 69982
  chr5:109123832-109123862
  hypo

SEQ ID NO: 151079 - DNA, 290 bp, Homo sapiens
  chr5:109162075-109162365
  hypo
catatataaactggacgtaacctgtaaatcttttttcattctagtccggatcattttttttttcaacatgaaagcagttggtaggaaatagagataccagaatcacctgaaatgctttcttccaaactatataccttcccgtgtttgtatttgagctcctcttaacaaatctccctctgggaaaagataagcccggttgtggagagagtctttccttagtaatcttcatgactcacctgtctctcctgtttttcacataccattgcctgaacactcgggttgtctcaatc

SEQ ID NO: 151080 - DNA, 30 bp, Homo sapiens; identical to SEQ ID NO: 69985
  chr5:109221096-109221126
  hypo

SEQ ID NO: 151081 - DNA, 1028 bp, Homo sapiens; identical to SEQ ID NO: 111805
  chr5:110074272-110075300
  hypo

SEQ ID NO: 151082 - DNA, 30 bp, Homo sapiens; identical to SEQ ID NO: 69988
  chr5:110427056-110427086
  hypo

SEQ ID NO: 151083 - DNA, 30 bp, Homo sapiens; identical to SEQ ID NO: 69989
  chr5:110427338-110427368
  hypo

SEQ ID NO: 151084 - DNA, 570 bp, Homo sapiens; identical to SEQ ID NO: 4138
  chr5:110559548-110560118
  hypo

SEQ ID NO: 151085 - DNA, 436 bp, Homo sapiens; identical to SEQ ID NO: 41835
  chr5:110560138-110560574
  hypo

SEQ ID NO: 151086 - DNA, 20 bp, Homo sapiens
  chr5:110826285-110826305
  hypo
aactccgtcaaaaaaaaata

SEQ ID NO: 151087 - DNA, 1031 bp, Homo sapiens; identical to SEQ ID NO: 41837
  chr5:110847624-110848655
  hypo

SEQ ID NO: 151088 - DNA, 123 bp, Homo sapiens; identical to SEQ ID NO: 19582
  chr5:111065739-111065862
  hypo

SEQ ID NO: 151089 - DNA, 30 bp, Homo sapiens; identical to SEQ ID NO: 4142
  chr5:111093898-111093928
  hypo

SEQ ID NO: 151090 - DNA, 153 bp, Homo sapiens; identical to SEQ ID NO: 111817
  chr5:111093929-111094082
  hypo

SEQ ID NO: 151091 - DNA, 20 bp, Homo sapiens
  chr5:111160054-111160074
  hypo
gactccgtctcaaaaaataa

SEQ ID NO: 151092 - DNA, 30 bp, Homo sapiens; identical to SEQ ID NO: 69997
  chr5:111504743-111504773
  hypo

SEQ ID NO: 151093 - DNA, 124 bp, Homo sapiens; identical to SEQ ID NO: 69998
  chr5:111675708-111675832
  hypo

SEQ ID NO: 151094 - DNA, 30 bp, Homo sapiens; identical to SEQ ID NO: 19585
  chr5:112094580-112094610
  hypo

SEQ ID NO: 151095 - DNA, 30 bp, Homo sapiens
  chr5:112136795-112136825
  hypo
accgagatagtcgaccgccaatcgtactgg

SEQ ID NO: 151096 - DNA, 30 bp, Homo sapiens; identical to SEQ ID NO: 4145
  chr5:112175624-112175654
  hypo

SEQ ID NO: 151097 - DNA, 30 bp, Homo sapiens
  chr5:112179420-112179450
  hypo
tgttcccatgcgtaccgtgggtttggaaaa

SEQ ID NO: 151098 - DNA, 31 bp, Homo sapiens; identical to SEQ ID NO: 19587
  chr5:112255823-112255854
  hypo

SEQ ID NO: 151099 - DNA, 31 bp, Homo sapiens; identical to SEQ ID NO: 70002
  chr5:112308701-112308732
  hypo

SEQ ID NO: 151100 - DNA, 18 bp, Homo sapiens
  chr5:112340528-112340546
  hypo
aatatactgggcttggcc

SEQ ID NO: 151101 - DNA, 30 bp, Homo sapiens; identical to SEQ ID NO: 70004
  chr5:112930105-112930135
  hypo

SEQ ID NO: 151102 - DNA, 30 bp, Homo sapiens; identical to SEQ ID NO: 41857
  chr5:114506052-114506082
  hypo

SEQ ID NO: 151103 - DNA, 292 bp, Homo sapiens; identical to SEQ ID NO: 41858
  chr5:114506294-114506586
  hypo

SEQ ID NO: 151104 - DNA, 30 bp, Homo sapiens; identical to SEQ ID NO: 41859
  chr5:114506853-114506883
  hypo

SEQ ID NO: 151105 - DNA, 30 bp, Homo sapiens; identical to SEQ ID NO: 70008
  chr5:114527362-114527392
  hypo

SEQ ID NO: 151106 - DNA, 30 bp, Homo sapiens
  chr5:114599144-114599174
  hypo
tatatgactgcttgcgtcattcttttacaa

SEQ ID NO: 151107 - DNA, 30 bp, Homo sapiens; identical to SEQ ID NO: 70009
  chr5:114849104-114849134
  hypo

SEQ ID NO: 151108 - DNA, 31 bp, Homo sapiens; identical to SEQ ID NO: 4161
  chr5:114879309-114879340
  hypo

SEQ ID NO: 151109 - DNA, 211 bp, Homo sapiens; identical to SEQ ID NO: 111854
  chr5:114938163-114938374
  hypo

SEQ ID NO: 151110 - DNA, 30 bp, Homo sapiens
  chr5:114938958-114938988
  hypo
tgtagtcagaaataccgtattatgtaccgt

SEQ ID NO: 151111 - DNA, 242 bp, Homo sapiens
  chr5:115570378-115570620
  hypo
taatttacacacagatcgagttaggaacttccgaaaaaatagtactcgttctaaaaacatccaattggataatttcacttataagggtaaagagtactgattttaaaaggttctcagagtctgttttgtgaagagatcccttaaagtataatggtggcggagcacagggaagagctcacatgcagccgcaggagagctagggaaaaagggtgacagctctgctaagccgccacttagaaaag

SEQ ID NO: 151112 - DNA, 101 bp, Homo sapiens; identical to SEQ ID NO: 70012
  chr5:115717686-115717787
  hypo

SEQ ID NO: 151113 - DNA, 30 bp, Homo sapiens
  chr5:115782446-115782476
  hypo
cctcgagacagtcacggcctggccagatgg

SEQ ID NO: 151114 - DNA, 560 bp, Homo sapiens; identical to SEQ ID NO: 70013
  chr5:115783166-115783726
  hypo

SEQ ID NO: 151115 - DNA, 62 bp, Homo sapiens
  chr5:115824595-115824657
  hypo
ttgaatcgtgcttgacggtccgcagggtagggctttctccaagactccggtaaatgactgcg

SEQ ID NO: 151116 - DNA, 30 bp, Homo sapiens
  chr5:115831648-115831678
  hypo
ggaggtgggcatcggcgtacactcagaaga

SEQ ID NO: 151117 - DNA, 24 bp, Homo sapiens
  chr5:116036181-116036205
  hypo
gtgagactccgtctcaaaaaacaa

SEQ ID NO: 151118 - DNA, 39 bp, Homo sapiens; identical to SEQ ID NO: 70014
  chr5:116177881-116177920
  hypo

SEQ ID NO: 151119 - DNA, 34 bp, Homo sapiens; identical to SEQ ID NO: 70015
  chr5:116238694-116238728
  hypo

SEQ ID NO: 151120 - DNA, 157 bp, Homo sapiens; identical to SEQ ID NO: 70016
  chr5:118309318-118309475
  hypo

SEQ ID NO: 151121 - DNA, 31 bp, Homo sapiens; identical to SEQ ID NO: 19592
  chr5:118420252-118420283
  hypo

SEQ ID NO: 151122 - DNA, 30 bp, Homo sapiens
  chr5:118445212-118445242
  hypo
ccttggcattttttccgtagtaattttttt

SEQ ID NO: 151123 - DNA, 36 bp, Homo sapiens; identical to SEQ ID NO: 19593
  chr5:118461527-118461563
  hypo

SEQ ID NO: 151124 - DNA, 30 bp, Homo sapiens; identical to SEQ ID NO: 70019
  chr5:118579739-118579769
  hypo

SEQ ID NO: 151125 - DNA, 30 bp, Homo sapiens; identical to SEQ ID NO: 70020
  chr5:118580240-118580270
  hypo

SEQ ID NO: 151126 - DNA, 35 bp, Homo sapiens; identical to SEQ ID NO: 70021
  chr5:118717628-118717663
  hypo

SEQ ID NO: 151127 - DNA, 42 bp, Homo sapiens
  chr5:119517816-119517858
  hypo
cgctgggagatgtagaccggacctattcgtattcggccatct

SEQ ID NO: 151128 - DNA, 31 bp, Homo sapiens; identical to SEQ ID NO: 70022
  chr5:120004769-120004800
  hypo

SEQ ID NO: 151129 - DNA, 132 bp, Homo sapiens; identical to SEQ ID NO: 70023
  chr5:121187430-121187562
  hypo

SEQ ID NO: 151130 - DNA, 150 bp, Homo sapiens; identical to SEQ ID NO: 19595
  chr5:121187994-121188144
  hypo

SEQ ID NO: 151131 - DNA, 30 bp, Homo sapiens; identical to SEQ ID NO: 41885
  chr5:121263545-121263575
  hypo

SEQ ID NO: 151132 - DNA, 30 bp, Homo sapiens; identical to SEQ ID NO: 19596
  chr5:121478913-121478943
  hypo

SEQ ID NO: 151133 - DNA, 31 bp, Homo sapiens; identical to SEQ ID NO: 70027
  chr5:121495181-121495212
  hypo

SEQ ID NO: 151134 - DNA, 1076 bp, Homo sapiens; identical to SEQ ID NO: 111886
  chr5:121647493-121648569
  hypo

SEQ ID NO: 151135 - DNA, 30 bp, Homo sapiens
  chr5:121669079-121669109
  hypo
cagtttattgacttccgctaggttttacta

SEQ ID NO: 151136 - DNA, 166 bp, Homo sapiens; identical to SEQ ID NO: 70029
  chr5:121874456-121874622
  hypo

SEQ ID NO: 151137 - DNA, 204 bp, Homo sapiens; identical to SEQ ID NO: 70030
  chr5:121906793-121906997
  hypo

SEQ ID NO: 151138 - DNA, 31 bp, Homo sapiens; identical to SEQ ID NO: 19598
  chr5:122116620-122116651
  hypo

SEQ ID NO: 151139 - DNA, 42 bp, Homo sapiens; identical to SEQ ID NO: 70032
  chr5:122150759-122150801
  hypo

SEQ ID NO: 151140 - DNA, 55 bp, Homo sapiens
  chr5:122152700-122152755
  hypo
tcaagatgaatgaatcggatgcagtaagagctgatttttcggcttgaataatgag

SEQ ID NO: 151141 - DNA, 44 bp, Homo sapiens; identical to SEQ ID NO: 70034
  chr5:122179758-122179802
  hypo

SEQ ID NO: 151142 - DNA, 39 bp, Homo sapiens; identical to SEQ ID NO: 70035
  chr5:122189086-122189125
  hypo

SEQ ID NO: 151143 - DNA, 30 bp, Homo sapiens
  chr5:122244627-122244657
  hypo
cggtgagcacttgagcggggagtgaagcgt

SEQ ID NO: 151144 - DNA, 254 bp, Homo sapiens; identical to SEQ ID NO: 4180
  chr5:122425701-122425955
  hypo

SEQ ID NO: 151145 - DNA, 702 bp, Homo sapiens; identical to SEQ ID NO: 111902
  chr5:122426004-122426706
  hypo

SEQ ID NO: 151146 - DNA, 15 bp, Homo sapiens
  chr5:122426796-122426811
  hypo
cgggccgcggggttg

SEQ ID NO: 151147 - DNA, 32 bp, Homo sapiens; identical to SEQ ID NO: 70038
  chr5:122906338-122906370
  hypo

SEQ ID NO: 151148 - DNA, 89 bp, Homo sapiens; identical to SEQ ID NO: 70039
  chr5:123929399-123929488
  hypo

SEQ ID NO: 151149 - DNA, 299 bp, Homo sapiens; identical to SEQ ID NO: 111918
  chr5:123987436-123987735
  hypo

SEQ ID NO: 151150 - DNA, 239 bp, Homo sapiens; identical to SEQ ID NO: 111921
  chr5:124084137-124084376
  hypo

SEQ ID NO: 151151 - DNA, 417 bp, Homo sapiens; identical to SEQ ID NO: 4187
  chr5:124084645-124085062
  hypo

SEQ ID NO: 151152 - DNA, 25 bp, Homo sapiens
  chr5:124128184-124128209
  hypo
tttttttttttttttttgagacgga

SEQ ID NO: 151153 - DNA, 145 bp, Homo sapiens; identical to SEQ ID NO: 70043
  chr5:124128448-124128593
  hypo

SEQ ID NO: 151154 - DNA, 20 bp, Homo sapiens
  chr5:125400286-125400306
  hypo
ccaccgcgcccggccgagct

SEQ ID NO: 151155 - DNA, 13 bp, Homo sapiens
  chr5:125720715-125720728
  hypo
gatgaatacattt

SEQ ID NO: 151156 - DNA, 23 bp, Homo sapiens
  chr5:125870914-125870937
  hypo
agaggagggggagcacgcaggag

SEQ ID NO: 151157 - DNA, 40 bp, Homo sapiens; identical to SEQ ID NO: 19604
  chr5:125911665-125911705
  hypo

SEQ ID NO: 151158 - DNA, 201 bp, Homo sapiens
  chr5:126073558-126073759
  hypo
ccttttctttagaacccgatccaatagcgactactcgcttgcagtacttttccttgagatttttctggaagcataatgcctcctttggttacagtttcggcagtactcctttcaaccgatactcggtcagagtggaagaaagtttctaaaggtttgtcccgacatgactccctccgccgcagcctcgtactctgctctcgt

SEQ ID NO: 151159 - DNA, 25 bp, Homo sapiens
  chr5:126085548-126085573
  hypo
ggattaaaggcgtgagccaccgcgc

SEQ ID NO: 151160 - DNA, 31 bp, Homo sapiens; identical to SEQ ID NO: 70048
  chr5:126139595-126139626
  hypo

SEQ ID NO: 151161 - DNA, 30 bp, Homo sapiens
  chr5:126162483-126162513
  hypo
ccaggtgctgtaccacgcatcactgagcct

SEQ ID NO: 151162 - DNA, 30 bp, Homo sapiens
  chr5:126163533-126163563
  hypo
gggtcaaatcacaccgtccccttaggggtt

SEQ ID NO: 151163 - DNA, 153 bp, Homo sapiens
  chr5:126193332-126193485
  hypo
cgcaggccttcttgccgcctgcctggcctccctggcattggctgcactgggaccggtgttctgcagatctgccctcttggtggcttccagacattctctctcacaaatctcaagactgacttaaaaaaaattcctaacgtcagcagtctttaa

SEQ ID NO: 151164 - DNA, 265 bp, Homo sapiens
  chr5:126213743-126214008
  hypo
gctcccgccagcaatcgaaggtctgttttctaccgggcaggtgagatgtgttacagacaagaggaaaggcttgtgccagctgtgaggctgccagctccaaatggcctgaaccccagccacggcccatacttactagtgtccaaaagaggtaaatagtgaagagtgcgacagtgagtgcaatcagtccgacggcttccagccgactactaaagtgcaggtggtccacggcgccccgcaggcacagccagcccgagatggtggccag

SEQ ID NO: 151165 - DNA, 304 bp, Homo sapiens; identical to SEQ ID NO: 70051
  chr5:126250499-126250803
  hypo

SEQ ID NO: 151166 - DNA, 31 bp, Homo sapiens; identical to SEQ ID NO: 19608
  chr5:126260014-126260045
  hypo

SEQ ID NO: 151167 - DNA, 20 bp, Homo sapiens
  chr5:126338839-126338859
  hypo
gaggtggaagcttggtaagt

SEQ ID NO: 151168 - DNA, 19 bp, Homo sapiens
  chr5:126339398-126339417
  hypo
gccagaggagtatacaacc

SEQ ID NO: 151169 - DNA, 31 bp, Homo sapiens
  chr5:126409451-126409482
  hypo
tccgagccattttaaccgctctgcatgcatc

SEQ ID NO: 151170 - DNA, 41 bp, Homo sapiens; identical to SEQ ID NO: 70055
  chr5:126479574-126479615
  hypo

SEQ ID NO: 151171 - DNA, 30 bp, Homo sapiens
  chr5:126851401-126851431
  hypo
tgtctgcgcacatgccgagcacactccatc

SEQ ID NO: 151172 - DNA, 30 bp, Homo sapiens
  chr5:126851898-126851928
  hypo
gaggataggagccaccgccaaagaaaaccg

SEQ ID NO: 151173 - DNA, 25 bp, Homo sapiens
  chr5:127091573-127091598
  hypo
ctgcactttgggaggctgaggcggg

SEQ ID NO: 151174 - DNA, 22 bp, Homo sapiens
  chr5:127344554-127344576
  hypo
cgagcgtggtggctcacgcctg

SEQ ID NO: 151175 - DNA, 43 bp, Homo sapiens; identical to SEQ ID NO: 70058
  chr5:127808516-127808559
  hypo

SEQ ID NO: 151176 - DNA, 253 bp, Homo sapiens; identical to SEQ ID NO: 41921
  chr5:127873552-127873805
  hypo

SEQ ID NO: 151177 - DNA, 497 bp, Homo sapiens; identical to SEQ ID NO: 41922
  chr5:127873980-127874477
  hypo

SEQ ID NO: 151178 - DNA, 1894 bp, Homo sapiens; identical to SEQ ID NO: 41927
  chr5:128795583-128797477
  hypo

SEQ ID NO: 151179 - DNA, 30 bp, Homo sapiens; identical to SEQ ID NO: 4200
  chr5:129196622-129196652
  hypo

SEQ ID NO: 151180 - DNA, 1377 bp, Homo sapiens; identical to SEQ ID NO: 111945
  chr5:129239557-129240934
  hypo

SEQ ID NO: 151181 - DNA, 660 bp, Homo sapiens; identical to SEQ ID NO: 111946
  chr5:129240962-129241622
  hypo

SEQ ID NO: 151182 - DNA, 30 bp, Homo sapiens; identical to SEQ ID NO: 70065
  chr5:129353640-129353670
  hypo

SEQ ID NO: 151183 - DNA, 299 bp, Homo sapiens
  chr5:130330813-130331112
  hypo
cctccagaaaaaccgcgaaaaccaggcgttcagctttctgtacgagccagcccaacagccaagcgtccaactgctactgacagaagctggaggagttccagaaagccaaggccggctccacaggcacccgaccccggcctgaagcgcaggtctcctcctgaggcccgacaaccacctgccccgcctcgtcctcgcctgtgtcccccccgtcatccccgctccaggcgcccccggggagccagcctccgcagccaccgtcaagaggaagccgaagagccggtggaggcctgaagagaaca

SEQ ID NO: 151184 - DNA, 423 bp, Homo sapiens
  chr5:130331392-130331815
  hypo
cgaggaggtgagcagcgagctgcgcacctgggagcaccagctgcagcgcatggagatgaacaagacgagggaatgggccgagcagctgacgaagatgagccgaggcaagcacttcatcggagacttcctacctccagacaagctggagaagtttatggagactttcaaggccctgaaggagggtcgcgagcctgactactcggagtacaaggagttcaagctcaccgaggagaacgtgctgatgaagatgggctggaaggagggtgagggcctcagcgagccagggcatcaagaacccggtcaacaagggcaccaccgcagtggctggtgccggcttcggcattgacccgccagccgctgtctccaaggaagacggcgagaactaggccttcctcaagaggatgatgccggcctaccgcttcc

SEQ ID NO: 151185 - DNA, 27 bp, Homo sapiens
  chr5:130530661-130530688
  hypo
gcaaaataaaattggccgggatcgctg

SEQ ID NO: 151186 - DNA, 98 bp, Homo sapiens; identical to SEQ ID NO: 19617
  chr5:130636509-130636607
  hypo

SEQ ID NO: 151187 - DNA, 66 bp, Homo sapiens; identical to SEQ ID NO: 19618
  chr5:130661705-130661771
  hypo

SEQ ID NO: 151188 - DNA, 22 bp, Homo sapiens
  chr5:130708432-130708454
  hypo
cggatttgaattccagagctgg

SEQ ID NO: 151189 - DNA, 43 bp, Homo sapiens; identical to SEQ ID NO: 19619
  chr5:130723957-130724000
  hypo

SEQ ID NO: 151190 - DNA, 30 bp, Homo sapiens
  chr5:130946171-130946201
  hypo
ggaatccacatgactcgcttggttattcct

SEQ ID NO: 151191 - DNA, 44 bp, Homo sapiens
  chr5:130951289-130951333
  hypo
tgtagctttcaagagggaagtcggctgggtacagtggctcacac

SEQ ID NO: 151192 - DNA, 30 bp, Homo sapiens; identical to SEQ ID NO: 70074
  chr5:130958305-130958335
  hypo

SEQ ID NO: 151193 - DNA, 56 bp, Homo sapiens; identical to SEQ ID NO: 4203
  chr5:130970374-130970430
  hypo

SEQ ID NO: 151194 - DNA, 30 bp, Homo sapiens; identical to SEQ ID NO: 70076
  chr5:130972859-130972889
  hypo

SEQ ID NO: 151195 - DNA, 190 bp, Homo sapiens
  chr5:131037382-131037572
  hypo
ttctaaaccattctaacgggtctacccacctctcgtctcttactccagtctcttcaaaacgcactaccaagtgctcgtttcagcagccatatacaaaacacactgccaagttaatctccccaaagtacaacttgcaaacagccttaaagacaaagtcagaactccctggcaagcacgctacattttttgt

SEQ ID NO: 151196 - DNA, 198 bp, Homo sapiens; identical to SEQ ID NO: 41936
  chr5:131133197-131133395
  hypo

SEQ ID NO: 151197 - DNA, 41 bp, Homo sapiens
  chr5:131133934-131133975
  hypo
gccgaggcaggcagatcgctttagctctgtagttcgaaacc

SEQ ID NO: 151198 - DNA, 56 bp, Homo sapiens; identical to SEQ ID NO: 70079
  chr5:131410605-131410661
  hypo

SEQ ID NO: 151199 - DNA, 83 bp, Homo sapiens
  chr5:131517612-131517695
  hypo
gtcctcaatctggtccggtgtccgacgcctgcgtctggagtcaagtcccaccttttacctcagtgataagtgctctaaagaaa

SEQ ID NO: 151200 - DNA, 278 bp, Homo sapiens; identical to SEQ ID NO: 41939
  chr5:131563558-131563836
  hypo

SEQ ID NO: 151201 - DNA, 657 bp, Homo sapiens
  chr5:131607798-131608455
  hypo
gcgtggttacttctttctggacgagcggctctactgtgagagccacgccaaggcgcgcgtgaagccgcccgagggctacgacgtggtggcggtgtaccccaatgccaaggtggaactcgtctgagctgggaccctgctcccacgcctgcttcttaaggtccctgctcggccggtgtaaatatgtttcaccctgtccctctaataaagctcctctgctccaccttgaacctgtcacctggcctgccaccctcctgcgcaggccatgcatggctcccgagtacagtagtatctgcttaggtgccaggcatgtcctaggctctgggtgcagtagtgagcaggacgggtaccatgctgccctgaagggggccacagcctgggtggaaggcagacctgaatcacaacgggccagctctagtaatacgaaggtgaggtctgggatgctgcgtgcggcgcgacgacaggaggtatgacctgggtggggtcagggaaagtcttagctgagaactaagagatgagggaggcacaaactctgcacgggggaactgtgtgtgcaaaggtgagctgggggcgagaaaggcctctgtggccgtcatcggcactagcgggttgggggtggtggtggggtgctggcagcctcaggagcgatcgctcccctgg

SEQ ID NO: 151202 - DNA, 325 bp, Homo sapiens; identical to SEQ ID NO: 70082
  chr5:131609887-131610212
  hypo

SEQ ID NO: 151203 - DNA, 360 bp, Homo sapiens
  chr5:131628916-131629276
  hypo
caattttatctgcctcgtgaaccccagggctcaggctccaggcccgggctagctcacacaacagcagaagggccttaggtctgggcactgagccaaaaaaagggaggctgtggtccctgctttggttaccctgccgggtctgagcgccaaatcggatctcctacttctctctccctccctccctctgttcctggactgggggcaggcccttctgctaacagaaagccttccagtcggagaaagctctgacagcctgccgcgataaagggccctgggggcgtgaggagagcaaggggctcaaaatcagaacccagcgtgacgacagtgcctccatgactgtgctcccgcaatgcgcaggct

SEQ ID NO: 151204 - DNA, 30 bp, Homo sapiens
  chr5:131643482-131643512
  hypo
caggctaccttccagcgttctcagttccgt

SEQ ID NO: 151205 - DNA, 30 bp, Homo sapiens; identical to SEQ ID NO: 19626
  chr5:131658146-131658176
  hypo

SEQ ID NO: 151206 - DNA, 137 bp, Homo sapiens
  chr5:131701218-131701355
  hypo
accccttaccagaagcgtccaaacacggatttgagggatctacagcagacactggacagatgctctgaatcattctctactctgatgctgaagctataatattggactaagcttgggccttctactcttttctttct

SEQ ID NO: 151207 - DNA, 30 bp, Homo sapiens
  chr5:131709613-131709643
  hypo
ccttgagaaacttccggctgggtgtggtgg

SEQ ID NO: 151208 - DNA, 180 bp, Homo sapiens
  chr5:131712815-131712995
  hypo
gcagtgtgcctgctgcgggagttctccgtgtccagcctgagggttgcctgccaacccctctgagaggtgcccggaggctgtgcgcccacactgcccagcagtgcggagaagcaggcttgtttttccctgtcactggcttggaagagatgctttgttctagggagccgcatgtccccttgc

SEQ ID NO: 151209 - DNA, 132 bp, Homo sapiens; identical to SEQ ID NO: 70085
  chr5:131725263-131725395
  hypo

SEQ ID NO: 151210 - DNA, 178 bp, Homo sapiens
  chr5:131787117-131787295
  hypo
gcacctcggcggtaacgctagagccccaccaagcatgtgtttgtcctcccatcccctatgattggcacctcccgggagagctccaggtaggagatcttgtaacccaaggctcatctgtcccagcttctgatgacaataaatgtgtgtagcctcttttagcggccgagacagcctgact

SEQ ID NO: 151211 - DNA, 30 bp, Homo sapiens; identical to SEQ ID NO: 70087
  chr5:131806578-131806608
  hypo

SEQ ID NO: 151212 - DNA, 239 bp, Homo sapiens; identical to SEQ ID NO: 4211
  chr5:131831521-131831760
  hypo

SEQ ID NO: 151213 - DNA, 30 bp, Homo sapiens; identical to SEQ ID NO: 70089
  chr5:131835741-131835771
  hypo

SEQ ID NO: 151214 - DNA, 38 bp, Homo sapiens
  chr5:131859638-131859676
  hypo
caggctggccgggcacggtggctcacgcctgtaatccc

SEQ ID NO: 151215 - DNA, 30 bp, Homo sapiens
  chr5:131931452-131931482
  hypo
aaaaaaaaggaaaagcggcgtgatgaaatg

SEQ ID NO: 151216 - DNA, 102 bp, Homo sapiens
  chr5:131982463-131982565
  hypo
aggcggtaatgctccctcacctgtcactcacctcctgttgtgcgactctgttcctaacaggctgaggacaggtaatggtctgcagcccgggggttggggacc

SEQ ID NO: 151217 - DNA, 46 bp, Homo sapiens; identical to SEQ ID NO: 70091
  chr5:131991176-131991222
  hypo

SEQ ID NO: 151218 - DNA, 160 bp, Homo sapiens; identical to SEQ ID NO: 19630
  chr5:132001669-132001829
  hypo

SEQ ID NO: 151219 - DNA, 30 bp, Homo sapiens
  chr5:132013144-132013174
  hypo
ggagtgtcgccccctcgctgcgataccaga

SEQ ID NO: 151220 - DNA, 317 bp, Homo sapiens
  chr5:132015481-132015798
  hypo
ctcgctgcctgggtgcgactgcacagcagttccacaggcacaagcagctgatccgattcctgaaacggctcgacaggaacctctggggcctggcgggcttggtaagctgcactgtattcctggcaagccggccgcgtggctcctggtggacagcagcctcacttctaaacactccttaggagctgcagcacccttggtcaacccattcattcattcactcattcaataagtatttgctgaagttccacaagtgctgggtgtggttctaggtgctgaggacgtgtcactaaagacacgcaggccgagtccctgttctc

SEQ ID NO: 151221 - DNA, 248 bp, Homo sapiens
  chr5:132083825-132084073
  hypo
aaggaactcagcctacgacgaaaagtgggcgcgaggggtgggggtgatgggtgagccgctgcgccggggggcgcttactcccagcgggcatgcagaggaagggacttctcactgccccaccccccgcaccttaagcaggaggctcctgctgctgggggaccaggagtggccgctagcgaccttcctcgccccacctgctcttcttcctagcaggatgaaatctgcgacgccttcgaggaagtcgtgct

SEQ ID NO: 151222 - DNA, 220 bp, Homo sapiens; identical to SEQ ID NO: 70093
  chr5:132095766-132095986
  hypo

SEQ ID NO: 151223 - DNA, 30 bp, Homo sapiens; identical to SEQ ID NO: 70094
  chr5:132097213-132097243
  hypo

SEQ ID NO: 151224 - DNA, 30 bp, Homo sapiens; identical to SEQ ID NO: 19632
  chr5:132110953-132110983
  hypo

SEQ ID NO: 151225 - DNA, 30 bp, Homo sapiens
  chr5:132156582-132156612
  hypo
tgtttctaagaataccgcaacggaataatg

SEQ ID NO: 151226 - DNA, 69 bp, Homo sapiens
  chr5:132167161-132167230
  hypo
gccaagaaatgctccgttcctgagaggggctggggaccctttgatgagcctctccggctctcaggtctc

SEQ ID NO: 151227 - DNA, 161 bp, Homo sapiens
  chr5:132167446-132167607
  hypo
ggagacacctgagcccgacttctgagagtggtgcccgctgggccctgctccttcttcaacaccatctggactcaggcaccagcttcagctggagcgctaggctttaagacagtgcctaagaacctttcggctttgaaagacttttgttgtttgttttgctt

SEQ ID NO: 151228 - DNA, 30 bp, Homo sapiens
  chr5:132200501-132200531
  hypo
tactgttacactaccggactaactatgtag

SEQ ID NO: 151229 - DNA, 30 bp, Homo sapiens; identical to SEQ ID NO: 19634
  chr5:132204383-132204413
  hypo

SEQ ID NO: 151230 - DNA, 30 bp, Homo sapiens; identical to SEQ ID NO: 70098
  chr5:132232571-132232601
  hypo

SEQ ID NO: 151231 - DNA, 39 bp, Homo sapiens; identical to SEQ ID NO: 19635
  chr5:132267349-132267388
  hypo

SEQ ID NO: 151232 - DNA, 30 bp, Homo sapiens; identical to SEQ ID NO: 70100
  chr5:132295360-132295390
  hypo

SEQ ID NO: 151233 - DNA, 19 bp, Homo sapiens
  chr5:132296621-132296640
  hypo
atcgcctaggttggccggg

SEQ ID NO: 151234 - DNA, 30 bp, Homo sapiens; identical to SEQ ID NO: 70101
  chr5:132322088-132322118
  hypo

SEQ ID NO: 151235 - DNA, 31 bp, Homo sapiens; identical to SEQ ID NO: 19636
  chr5:132370349-132370380
  hypo

SEQ ID NO: 151236 - DNA, 31 bp, Homo sapiens; identical to SEQ ID NO: 70103
  chr5:132383280-132383311
  hypo

SEQ ID NO: 151237 - DNA, 830 bp, Homo sapiens; identical to SEQ ID NO: 111984
  chr5:132386957-132387787
  hypo

SEQ ID NO: 151238 - DNA, 30 bp, Homo sapiens; identical to SEQ ID NO: 70105
  chr5:132391934-132391964
  hypo

SEQ ID NO: 151239 - DNA, 29 bp, Homo sapiens
  chr5:132399903-132399932
  hypo
attctgagtcctggccaggtgcggtggct

SEQ ID NO: 151240 - DNA, 31 bp, Homo sapiens; identical to SEQ ID NO: 19638
  chr5:132448250-132448281
  hypo

SEQ ID NO: 151241 - DNA, 31 bp, Homo sapiens; identical to SEQ ID NO: 19639
  chr5:132584999-132585030
  hypo

SEQ ID NO: 151242 - DNA, 43 bp, Homo sapiens; identical to SEQ ID NO: 70109
  chr5:132585270-132585313
  hypo

SEQ ID NO: 151243 - DNA, 282 bp, Homo sapiens
  chr5:132607917-132608199
  hypo
ctgaaaattaatgacacggccatttcttgaagccaacaaccaaaggaatgagtgtttgccaagaagcaatagctcttgtaacacttacactcactgcattcttaacgcattgtttgtctgtggaaaaagcagtttgcccagcgtggtggtaaggagggcatgatggaaagccggcgtggagggagagaggaggcacgcgcgtgcagcgccgtgacgtgcatttagttacacgacggcttctggaggcccacaactgattaatatacacgggcttgttcattt

SEQ ID NO: 151244 - DNA, 207 bp, Homo sapiens; identical to SEQ ID NO: 70111
  chr5:132654499-132654706
  hypo

SEQ ID NO: 151245 - DNA, 198 bp, Homo sapiens; identical to SEQ ID NO: 70112
  chr5:132664449-132664647
  hypo

SEQ ID NO: 151246 - DNA, 31 bp, Homo sapiens; identical to SEQ ID NO: 70113
  chr5:132738534-132738565
  hypo

SEQ ID NO: 151247 - DNA, 30 bp, Homo sapiens
  chr5:132758958-132758988
  hypo
gacatttccagcattcgttgacatcagcag

SEQ ID NO: 151248 - DNA, 30 bp, Homo sapiens
  chr5:132759284-132759314
  hypo
tggtggggatgatggcggtgaggcggtggt

SEQ ID NO: 151249 - DNA, 30 bp, Homo sapiens; identical to SEQ ID NO: 70114
  chr5:132784881-132784911
  hypo

SEQ ID NO: 151250 - DNA, 30 bp, Homo sapiens; identical to SEQ ID NO: 70115
  chr5:132785322-132785352
  hypo

SEQ ID NO: 151251 - DNA, 31 bp, Homo sapiens; identical to SEQ ID NO: 70116
  chr5:133034437-133034468
  hypo

SEQ ID NO: 151252 - DNA, 31 bp, Homo sapiens; identical to SEQ ID NO: 70117
  chr5:133237867-133237898
  hypo

SEQ ID NO: 151253 - DNA, 93 bp, Homo sapiens; identical to SEQ ID NO: 19641
  chr5:133240404-133240497
  hypo

SEQ ID NO: 151254 - DNA, 30 bp, Homo sapiens
  chr5:133240916-133240946
  hypo
cctgggcgtcacgtacggtgtggagtgatc

SEQ ID NO: 151255 - DNA, 43 bp, Homo sapiens; identical to SEQ ID NO: 70119
  chr5:133280964-133281007
  hypo

SEQ ID NO: 151256 - DNA, 31 bp, Homo sapiens
  chr5:133337022-133337053
  hypo
aacatcacagaacattcgttgagcccccaga

SEQ ID NO: 151257 - DNA, 191 bp, Homo sapiens; identical to SEQ ID NO: 70120
  chr5:133362903-133363094
  hypo

SEQ ID NO: 151258 - DNA, 31 bp, Homo sapiens; identical to SEQ ID NO: 70121
  chr5:133363360-133363391
  hypo

SEQ ID NO: 151259 - DNA, 30 bp, Homo sapiens
  chr5:133415802-133415832
  hypo
gtgtgacatcaaagccggctgagcattggc

SEQ ID NO: 151260 - DNA, 30 bp, Homo sapiens
  chr5:133416211-133416241
  hypo
ggaggtacagtaccacgggcaggttaagtc

SEQ ID NO: 151261 - DNA, 101 bp, Homo sapiens; identical to SEQ ID NO: 70122
  chr5:133422877-133422978
  hypo

SEQ ID NO: 151262 - DNA, 18 bp, Homo sapiens
  chr5:133423247-133423265
  hypo
taaaaacaaaaagagcgg

SEQ ID NO: 151263 - DNA, 550 bp, Homo sapiens; identical to SEQ ID NO: 111989
  chr5:133450701-133451251
  hypo

SEQ ID NO: 151264 - DNA, 199 bp, Homo sapiens; identical to SEQ ID NO: 70124
  chr5:133456099-133456298
  hypo

SEQ ID NO: 151265 - DNA, 91 bp, Homo sapiens; identical to SEQ ID NO: 19643
  chr5:133457287-133457378
  hypo

SEQ ID NO: 151266 - DNA, 142 bp, Homo sapiens; identical to SEQ ID NO: 70126
  chr5:133458995-133459137
  hypo

SEQ ID NO: 151267 - DNA, 208 bp, Homo sapiens; identical to SEQ ID NO: 19644
  chr5:133459374-133459582
  hypo

SEQ ID NO: 151268 - DNA, 30 bp, Homo sapiens; identical to SEQ ID NO: 19645
  chr5:133461918-133461948
  hypo

SEQ ID NO: 151269 - DNA, 21 bp, Homo sapiens
  chr5:133462599-133462620
  hypo
aaagatcgtacaagccaagaa

SEQ ID NO: 151270 - DNA, 30 bp, Homo sapiens; identical to SEQ ID NO: 70130
  chr5:133463790-133463820
  hypo

SEQ ID NO: 151271 - DNA, 78 bp, Homo sapiens; identical to SEQ ID NO: 19647
  chr5:133464193-133464271
  hypo

SEQ ID NO: 151272 - DNA, 30 bp, Homo sapiens; identical to SEQ ID NO: 19648
  chr5:133464829-133464859
  hypo

SEQ ID NO: 151273 - DNA, 208 bp, Homo sapiens; identical to SEQ ID NO: 19649
  chr5:133465709-133465917
  hypo

SEQ ID NO: 151274 - DNA, 111 bp, Homo sapiens; identical to SEQ ID NO: 19650
  chr5:133469214-133469325
  hypo

SEQ ID NO: 151275 - DNA, 30 bp, Homo sapiens; identical to SEQ ID NO: 19651
  chr5:133533231-133533261
  hypo

SEQ ID NO: 151276 - DNA, 20 bp, Homo sapiens
  chr5:133547175-133547195
  hypo
tttttttttgagacagagtt

SEQ ID NO: 151277 - DNA, 31 bp, Homo sapiens; identical to SEQ ID NO: 70137
  chr5:133665434-133665465
  hypo

SEQ ID NO: 151278 - DNA, 18 bp, Homo sapiens
  chr5:133682095-133682113
  hypo
tttgttaaatttgtcacg

SEQ ID NO: 151279 - DNA, 18 bp, Homo sapiens
  chr5:133682472-133682490
  hypo
caccgtgcccagccggga

SEQ ID NO: 151280 - DNA, 380 bp, Homo sapiens
  chr5:133703365-133703745
  hypo
agatggttcttaaatcaaaaacttttcttgaacacttgccatatgccttttaattttttccaactgctagtaatcttttttaaagaaaaaaaacctccctcaccacatgtcaaactctaggaaagcaagtaattcgaagagttccaccatatacgaaatgatgtacaagagcacggaaataaagaggccagtgtctaactgcttaagtagacatagagttcaactggaatgacagtccctaatgaataaccaccatatcactagaccaagtgcctagggagtgctttctttattgaatagggctttctttgctttcttctataaaatgagttaaatgtaaaaaagcgaaatctcgctatgcttccgctaaataagaggaa

SEQ ID NO: 151281 - DNA, 33 bp, Homo sapiens; identical to SEQ ID NO: 70142
  chr5:133730847-133730880
  hypo

SEQ ID NO: 151282 - DNA, 30 bp, Homo sapiens
  chr5:133739773-133739803
  hypo
ccaaggctatggaagcgtacagctgccgcc

SEQ ID NO: 151283 - DNA, 30 bp, Homo sapiens; identical to SEQ ID NO: 4216
  chr5:133784545-133784575
  hypo

SEQ ID NO: 151284 - DNA, 30 bp, Homo sapiens
  chr5:133810804-133810834
  hypo
gggtatgtgccaccacgcctcgctacactg

SEQ ID NO: 151285 - DNA, 18 bp, Homo sapiens
  chr5:133818625-133818643
  hypo
cccgtctcgccctgtcgc

SEQ ID NO: 151286 - DNA, 241 bp, Homo sapiens; identical to SEQ ID NO: 70145
  chr5:133819199-133819440
  hypo

SEQ ID NO: 151287 - DNA, 103 bp, Homo sapiens; identical to SEQ ID NO: 19655
  chr5:133820038-133820141
  hypo

SEQ ID NO: 151288 - DNA, 31 bp, Homo sapiens; identical to SEQ ID NO: 19656
  chr5:133823804-133823835
  hypo

SEQ ID NO: 151289 - DNA, 267 bp, Homo sapiens
  chr5:133845347-133845614
  hypo
aactgagtgagatttgagtgacgaaaaggagcagacaaagacaacagcgagtacaaaggccctgaggcaggaacgagcttggcatgatcaagaactgaaaagagcacaggggaggctgcagcacagtgaaagagaggtcagtgataggacatgcgattagacggggcccactagacaatccaggataatccctccctctcaaggcccttaatttaatcatatctgcaaagtgccttctgccatgtcggggaacgtattcacaggctc

SEQ ID NO: 151290 - DNA, 903 bp, Homo sapiens; identical to SEQ ID NO: 4217
  chr5:133862722-133863625
  hypo

SEQ ID NO: 151291 - DNA, 62 bp, Homo sapiens
  chr5:133887784-133887846
  hypo
cataccagctcagcccggatgactactacatcctggcagacccatggcgacaggaatgggag

SEQ ID NO: 151292 - DNA, 319 bp, Homo sapiens
  chr5:133907413-133907732
  hypo
ggcttcccttggcctggctcagtcaagcttcagcacctggcctcctcccttgccagccccgacactcctcactgctcccttcagattcctgccacgaggctctgctctgcctcccccagcctggcctggcttggattcctcgttcccaggctctgccctgccgtgtgatcaactcccactcccactggctgcttgtgtgtccaagacgccttgctcagcacccccaagtgtgggtcggagccacctggtcctgtcagtagttggtcagcacctacctcccctgagaagaaaggggccccagcggcgttgctcacttgag

SEQ ID NO: 151293 - DNA, 136 bp, Homo sapiens; identical to SEQ ID NO: 70151
  chr5:133914458-133914594
  hypo

SEQ ID NO: 151294 - DNA, 39 bp, Homo sapiens; identical to SEQ ID NO: 19659
  chr5:133984528-133984567
  hypo

SEQ ID NO: 151295 - DNA, 25 bp, Homo sapiens
  chr5:134085042-134085067
  hypo
ccgctgcacccggccaactataggt

SEQ ID NO: 151296 - DNA, 48 bp, Homo sapiens
  chr5:134099604-134099652
  hypo
aacgatcggcatcccggggtcgctctggaagtcggtctagaagtcgct

SEQ ID NO: 151297 - DNA, 92 bp, Homo sapiens; identical to SEQ ID NO: 70154
  chr5:134202025-134202117
  hypo

SEQ ID NO: 151298 - DNA, 26 bp, Homo sapiens
  chr5:134204818-134204844
  hypo
ggtgtgagccacggcgcccggctatt

SEQ ID NO: 151299 - DNA, 30 bp, Homo sapiens
  chr5:134209197-134209227
  hypo
tttagcaggccccccggcaaaataccccaa

SEQ ID NO: 151300 - DNA, 147 bp, Homo sapiens
  chr5:134242155-134242302
  hypo
agtgctgtaatagaagaaatttaaaatagctcgaagacggaggaagataggcactccgccgcttcttgtccacgaaggggagaacacaagttgagtgcctactgtcacctaggcgtgtcttcaggcgtactctgccccaggtgctag

SEQ ID NO: 151301 - DNA, 147 bp, Homo sapiens
  chr5:134253079-134253226
  hypo
tcaggaacaggtaagcggcagtggctgggcgcttgggtgaatgataaattttgtgtgtaggacatgaggagtttccaatggtgattcaggaggaagggaccaagctttgtgagaatcagcggtggttctctgcggaggagctcctgg

SEQ ID NO: 151302 - DNA, 40 bp, Homo sapiens; identical to SEQ ID NO: 70156
  chr5:134256616-134256656
  hypo

SEQ ID NO: 151303 - DNA, 86 bp, Homo sapiens
  chr5:134273245-134273331
  hypo
cacacagcggacatccgctaatccagtggttagctgttccgggctctaatgcacactgttttacacgttaacggttttgaagttcc

SEQ ID NO: 151304 - DNA, 77 bp, Homo sapiens
  chr5:134273876-134273953
  hypo
tagctgccatgcctacgatgtcgctgccttttggtatttatcataaggcatgtctccagatccgtcattgttgccat

SEQ ID NO: 151305 - DNA, 158 bp, Homo sapiens; identical to SEQ ID NO: 19661
  chr5:134278931-134279089
  hypo

SEQ ID NO: 151306 - DNA, 167 bp, Homo sapiens
  chr5:134303557-134303724
  hypo
gcaaggattcccttcgtggccccttctctgctgcctctcagaatccagacgctaaggaaaatccctaagcagagattttctgttggatgctaaaagcaaggaataaaagttgaaaatttggaaaatgtctcaacaccgtcaccagcgccactcgagagtcatttcta

SEQ ID NO: 151307 - DNA, 31 bp, Homo sapiens; identical to SEQ ID NO: 70159
  chr5:134331950-134331981
  hypo

SEQ ID NO: 151308 - DNA, 31 bp, Homo sapiens; identical to SEQ ID NO: 19663
  chr5:134343157-134343188
  hypo

SEQ ID NO: 151309 - DNA, 185 bp, Homo sapiens; identical to SEQ ID NO: 112021
  chr5:134370267-134370452
  hypo

SEQ ID NO: 151310 - DNA, 36 bp, Homo sapiens; identical to SEQ ID NO: 112022
  chr5:134370508-134370544
  hypo

SEQ ID NO: 151311 - DNA, 82 bp, Homo sapiens
  chr5:134411889-134411971
  hypo
actggggtgagtcaccgccagcctgggaaatgcactggtgatgatggatggccggggtgctcggatgcgcccctgacagtat

SEQ ID NO: 151312 - DNA, 224 bp, Homo sapiens; identical to SEQ ID NO: 70162
  chr5:134436702-134436926
  hypo

SEQ ID NO: 151313 - DNA, 31 bp, Homo sapiens; identical to SEQ ID NO: 70163
  chr5:134440294-134440325
  hypo

SEQ ID NO: 151314 - DNA, 187 bp, Homo sapiens; identical to SEQ ID NO: 19666
  chr5:134453699-134453886
  hypo

SEQ ID NO: 151315 - DNA, 43 bp, Homo sapiens; identical to SEQ ID NO: 70165
  chr5:134462415-134462458
  hypo

SEQ ID NO: 151316 - DNA, 220 bp, Homo sapiens; identical to SEQ ID NO: 41982
  chr5:134463604-134463824
  hypo

SEQ ID NO: 151317 - DNA, 31 bp, Homo sapiens; identical to SEQ ID NO: 70167
  chr5:134468970-134469001
  hypo

SEQ ID NO: 151318 - DNA, 30 bp, Homo sapiens; identical to SEQ ID NO: 41983
  chr5:134499076-134499106
  hypo

SEQ ID NO: 151319 - DNA, 155 bp, Homo sapiens; identical to SEQ ID NO: 19668
  chr5:134513709-134513864
  hypo

SEQ ID NO: 151320 - DNA, 204 bp, Homo sapiens
  chr5:134524775-134524979
  hypo
aatgggaacatgcgccgatcaccagtcagtgacttgggaatttttcaggaggcatattttcttacgttaatgcttttgtagattccatcgatgttcagacatcaaagggcatgcaattaataatgggcatctggagggccgatcacatgtttccgatgttaaagtggtgaacgacaggaaaatcggccacggtcaggtattagc

SEQ ID NO: 151321 - DNA, 30 bp, Homo sapiens
  chr5:134529332-134529362
  hypo
ccgagtgattccgcccggcgtgttgctgat

SEQ ID NO: 151322 - DNA, 31 bp, Homo sapiens; identical to SEQ ID NO: 19669
  chr5:134547962-134547993
  hypo

SEQ ID NO: 151323 - DNA, 299 bp, Homo sapiens; identical to SEQ ID NO: 70171
  chr5:134579599-134579898
  hypo

SEQ ID NO: 151324 - DNA, 100 bp, Homo sapiens
  chr5:134582957-134583057
  hypo
gctaatagcatgaggcgcctttctcctggcactgcgaagtgcaccggtggccttgccgtcttccctgggggcgtgggggagaaggagagcaaatgcctta

SEQ ID NO: 151325 - DNA, 166 bp, Homo sapiens; identical to SEQ ID NO: 70173
  chr5:134583072-134583238
  hypo

SEQ ID NO: 151326 - DNA, 205 bp, Homo sapiens; identical to SEQ ID NO: 70174
  chr5:134585644-134585849
  hypo

SEQ ID NO: 151327 - DNA, 152 bp, Homo sapiens; identical to SEQ ID NO: 19672
  chr5:134608287-134608439
  hypo

SEQ ID NO: 151328 - DNA, 30 bp, Homo sapiens
  chr5:134657758-134657788
  hypo
gacagaaagccaaacgagactgtgacacct

SEQ ID NO: 151329 - DNA, 30 bp, Homo sapiens
  chr5:134660242-134660272
  hypo
gagcccacagttgcgcgcctgtgggacaca

SEQ ID NO: 151330 - DNA, 153 bp, Homo sapiens
  chr5:134666318-134666471
  hypo
gaagaaaaggtggcctcgccccagccattgagcattccccttctcagcagggagtgggtcccaggactccctcctcgccccatcgccttcaggtggatcactggaaggcggcaccaaggccagctcccaagataacatcggccaggagtgccc

SEQ ID NO: 151331 - DNA, 30 bp, Homo sapiens; identical to SEQ ID NO: 70177
  chr5:134672039-134672069
  hypo

SEQ ID NO: 151332 - DNA, 39 bp, Homo sapiens; identical to SEQ ID NO: 70178
  chr5:134673487-134673526
  hypo

SEQ ID NO: 151333 - DNA, 30 bp, Homo sapiens
  chr5:134677129-134677159
  hypo
ggtggcggcgggtggcgggcagtgatacag

SEQ ID NO: 151334 - DNA, 30 bp, Homo sapiens
  chr5:134677406-134677436
  hypo
cgaggcctgcctaagcggaaaatggcaaaa

SEQ ID NO: 151335 - DNA, 31 bp, Homo sapiens; identical to SEQ ID NO: 19674
  chr5:134785498-134785529
  hypo

SEQ ID NO: 151336 - DNA, 30 bp, Homo sapiens; identical to SEQ ID NO: 19675
  chr5:135082181-135082211
  hypo

SEQ ID NO: 151337 - DNA, 433 bp, Homo sapiens; identical to SEQ ID NO: 70181
  chr5:135091169-135091602
  hypo

SEQ ID NO: 151338 - DNA, 238 bp, Homo sapiens
  chr5:135120901-135121139
  hypo
caccccccttgtcccatagatcgtaatgtccgggtggggagatggtgatattattccccatggaacgggggatggaacacctcccttgctccatgggtcgtaatctccagggagggaggggctgatttactccccttggggcgggaggtggaaccctccccgccgcttgccctatggattgtaatatccagtgggggaaagggtgatattactccctatgcggcgggaggtggaacac

SEQ ID NO: 151339 - DNA, 30 bp, Homo sapiens
  chr5:135186115-135186145
  hypo
tcgcctgcaggctggcgttggctacggaaa

SEQ ID NO: 151340 - DNA, 150 bp, Homo sapiens
  chr5:135188295-135188445
  hypo
tgccgtctacaactccgtggtgtttggggtcttcagtaacacgcagcggttcctcagccagcaccgctgcggggagccagaggccagtcctccccgcacgctgtcagacctgctcctggccagcatggtggccggcgtggtctctgtcgg

SEQ ID NO: 151341 - DNA, 31 bp, Homo sapiens; identical to SEQ ID NO: 70183
  chr5:135265700-135265731
  hypo

SEQ ID NO: 151342 - DNA, 30 bp, Homo sapiens; identical to SEQ ID NO: 4237
  chr5:135335661-135335691
  hypo

SEQ ID NO: 151343 - DNA, 231 bp, Homo sapiens; identical to SEQ ID NO: 112053
  chr5:135468335-135468566
  hypo

SEQ ID NO: 151344 - DNA, 1481 bp, Homo sapiens; identical to SEQ ID NO: 112055
  chr5:135527797-135529278
  hypo

SEQ ID NO: 151345 - DNA, 750 bp, Homo sapiens; identical to SEQ ID NO: 19680
  chr5:135692312-135693062
  hypo

SEQ ID NO: 151346 - DNA, 31 bp, Homo sapiens; identical to SEQ ID NO: 70188
  chr5:135802138-135802169
  hypo

SEQ ID NO: 151347 - DNA, 35 bp, Homo sapiens; identical to SEQ ID NO: 19681
  chr5:135989644-135989679
  hypo

SEQ ID NO: 151348 - DNA, 30 bp, Homo sapiens; identical to SEQ ID NO: 19682
  chr5:136157285-136157315
  hypo

SEQ ID NO: 151349 - DNA, 24 bp, Homo sapiens
  chr5:136629411-136629435
  hypo
ctttcaacgatgcaccgggcgtgg

SEQ ID NO: 151350 - DNA, 374 bp, Homo sapiens; identical to SEQ ID NO: 4242
  chr5:136834289-136834663
  hypo

SEQ ID NO: 151351 - DNA, 174 bp, Homo sapiens; identical to SEQ ID NO: 4243
  chr5:136834706-136834880
  hypo

SEQ ID NO: 151352 - DNA, 254 bp, Homo sapiens; identical to SEQ ID NO: 4244
  chr5:136834912-136835166
  hypo

SEQ ID NO: 151353 - DNA, 132 bp, Homo sapiens; identical to SEQ ID NO: 70195
  chr5:136983256-136983388
  hypo

SEQ ID NO: 151354 - DNA, 31 bp, Homo sapiens; identical to SEQ ID NO: 19687
  chr5:137403227-137403258
  hypo

SEQ ID NO: 151355 - DNA, 36 bp, Homo sapiens; identical to SEQ ID NO: 19688
  chr5:137470415-137470451
  hypo

SEQ ID NO: 151356 - DNA, 82 bp, Homo sapiens; identical to SEQ ID NO: 19689
  chr5:137529620-137529702
  hypo

SEQ ID NO: 151357 - DNA, 18 bp, Homo sapiens
  chr5:137548054-137548072
  hypo
tggagtgcaatggcgcga

SEQ ID NO: 151358 - DNA, 30 bp, Homo sapiens; identical to SEQ ID NO: 70199
  chr5:137595617-137595647
  hypo

SEQ ID NO: 151359 - DNA, 30 bp, Homo sapiens; identical to SEQ ID NO: 19690
  chr5:137606591-137606621
  hypo

SEQ ID NO: 151360 - DNA, 30 bp, Homo sapiens
  chr5:137681107-137681137
  hypo
tcttgccctctgcccggagctctcccgcat

SEQ ID NO: 151361 - DNA, 221 bp, Homo sapiens; identical to SEQ ID NO: 70201
  chr5:137721786-137722007
  hypo

SEQ ID NO: 151362 - DNA, 78 bp, Homo sapiens
  chr5:137727076-137727154
  hypo
ggcagctctgtggaccggaaagtgcctgcagagtccatgcccaccctcactccagccttcccacggagcctcctaaat

SEQ ID NO: 151363 - DNA, 16 bp, Homo sapiens
  chr5:137727474-137727490
  hypo
tgccatggggaatggc

SEQ ID NO: 151364 - DNA, 285 bp, Homo sapiens; identical to SEQ ID NO: 70203
  chr5:137727661-137727946
  hypo

SEQ ID NO: 151365 - DNA, 30 bp, Homo sapiens; identical to SEQ ID NO: 19692
  chr5:137773697-137773727
  hypo

SEQ ID NO: 151366 - DNA, 162 bp, Homo sapiens; identical to SEQ ID NO: 112080
  chr5:137774492-137774654
  hypo

SEQ ID NO: 151367 - DNA, 193 bp, Homo sapiens; identical to SEQ ID NO: 112081
  chr5:137774863-137775056
  hypo

SEQ ID NO: 151368 - DNA, 31 bp, Homo sapiens; identical to SEQ ID NO: 70206
  chr5:137790369-137790400
  hypo

SEQ ID NO: 151369 - DNA, 142 bp, Homo sapiens
  chr5:137791021-137791163
  hypo
taaacaagagctgcccggatcggctgcccttgccctggctgccccagcgtgtgcccacgctcacttgtgctccttttctctctctcacacacagatgggagtcagctttccagccacattcagttctcgctttaattcaaat

SEQ ID NO: 151370 - DNA, 96 bp, Homo sapiens; identical to SEQ ID NO: 42015
  chr5:137801266-137801362
  hypo

SEQ ID NO: 151371 - DNA, 135 bp, Homo sapiens; identical to SEQ ID NO: 70208
  chr5:137802659-137802794
  hypo

SEQ ID NO: 151372 - DNA, 467 bp, Homo sapiens; identical to SEQ ID NO: 19693
  chr5:137803074-137803541
  hypo

SEQ ID NO: 151373 - DNA, 43 bp, Homo sapiens; identical to SEQ ID NO: 70210
  chr5:137824664-137824707
  hypo

SEQ ID NO: 151374 - DNA, 30 bp, Homo sapiens; identical to SEQ ID NO: 19694
  chr5:137840921-137840951
  hypo

SEQ ID NO: 151375 - DNA, 97 bp, Homo sapiens; identical to SEQ ID NO: 70212
  chr5:137865652-137865749
  hypo

SEQ ID NO: 151376 - DNA, 217 bp, Homo sapiens; identical to SEQ ID NO: 70213
  chr5:137895656-137895873
  hypo

SEQ ID NO: 151377 - DNA, 100 bp, Homo sapiens
  chr5:137911776-137911876
  hypo
cttgggtttccaactacgaagcgtttgattcacacagaacattaggccaattagcctgcacaaagggaaaaaaaaatagctgagcttggccgggcgctca

SEQ ID NO: 151378 - DNA, 157 bp, Homo sapiens; identical to SEQ ID NO: 70214
  chr5:137912555-137912712
  hypo

SEQ ID NO: 151379 - DNA, 102 bp, Homo sapiens; identical to SEQ ID NO: 19697
  chr5:137945776-137945878
  hypo

SEQ ID NO: 151380 - DNA, 16 bp, Homo sapiens
  chr5:138052138-138052154
  hypo
gcgtgagctaccaccc

SEQ ID NO: 151381 - DNA, 31 bp, Homo sapiens; identical to SEQ ID NO: 70217
  chr5:138064358-138064389
  hypo

SEQ ID NO: 151382 - DNA, 30 bp, Homo sapiens
  chr5:138072276-138072306
  hypo
atgataggccaggcgcggtggctcatgcct

SEQ ID NO: 151383 - DNA, 82 bp, Homo sapiens; identical to SEQ ID NO: 42018
  chr5:138088595-138088677
  hypo

SEQ ID NO: 151384 - DNA, 347 bp, Homo sapiens; identical to SEQ ID NO: 112090
  chr5:138089641-138089988
  hypo

SEQ ID NO: 151385 - DNA, 36 bp, Homo sapiens; identical to SEQ ID NO: 70221
  chr5:138101349-138101385
  hypo

SEQ ID NO: 151386 - DNA, 93 bp, Homo sapiens; identical to SEQ ID NO: 19701
  chr5:138119911-138120004
  hypo

SEQ ID NO: 151387 - DNA, 29 bp, Homo sapiens
  chr5:138122825-138122854
  hypo
ataagggctctgggctgggtgcgatggct

SEQ ID NO: 151388 - DNA, 29 bp, Homo sapiens
  chr5:138123093-138123122
  hypo
gagactccgtctccaaaaaaaaaaaaggt

SEQ ID NO: 151389 - DNA, 34 bp, Homo sapiens
  chr5:138179954-138179988
  hypo
gattatagacacaagccaccgcacctggccccag

SEQ ID NO: 151390 - DNA, 30 bp, Homo sapiens; identical to SEQ ID NO: 70225
  chr5:138238382-138238412
  hypo

SEQ ID NO: 151391 - DNA, 30 bp, Homo sapiens
  chr5:138265039-138265069
  hypo
gcccgggtaaggaagcgctccgtggggcag

SEQ ID NO: 151392 - DNA, 30 bp, Homo sapiens
  chr5:138265634-138265664
  hypo
gaggagctccccagccgtaggtctgtgggc

SEQ ID NO: 151393 - DNA, 93 bp, Homo sapiens
  chr5:138268301-138268394
  hypo
ctacctgcaacgcatcgccctctactgccaccagctgaacatctgcagcaaggtcaaggccgaggtgcagaatctcggcggggagcttgttgt

SEQ ID NO: 151394 - DNA, 616 bp, Homo sapiens
  chr5:138273628-138274244
  hypo
caaggcctcctcccctccccacggaagcaagagagaaggagctgccacgtgctgggcacctcagagcctgtgtccagcctttactctcgtcaccccatttcatctgtgcgacccgagatgtcagtgccattgctgcatctccagctgcacagctgaagaagtgactaggggaggtgaagtcacactgcggcaagtggctggccccgccacccggctttgagaggcacttcctccagggcccccagctttgggccatccctcctggaccctctgagtaatggtgatgccagtggccactccctccctctcacaccttgtcgattcccacggttccctgcccgtcaccaatgcgtgtccctcgtctcccttaccagctccttctcctcgtggcccctgacattgaggtgctccagggctcccatctggagcctcctctccatgttcagtgacacccagcaggggcttgctggtcaatgttgagccaccggctctctagggccaggccagggaggatgcgaacagatgcacatctgtgcatttagaaaacacgggaccgctataaaggaattgcagcacaccattcacaaaaggagacgtacaggactctaactgggaa

SEQ ID NO: 151395 - DNA, 414 bp, Homo sapiens
  chr5:138280518-138280932
  hypo
gaacgaacctggatgcggccaatgaggagagagactgcagcccaactcccattccgatgctctgagtgtgtgagggcagagtgcacgcagtcccacctcccaggcctcgggctcagcagcctggcgctggtccagccccctccctacagcccccaggtgcccgttcctccatcctcgctcccagaaatcctctcaagagcacctggcccaaagcctccctctgctttacagaatcgctgctgagggcagcacacctgggggcagaggggacactggggactgcagttaggcccctactagtggcactcctcccatagggacgctttccacaccccgggccagaccctggtggtcacagaggcctccagggccagcctggtcctgacacagccgagcgcccggcctggcctcccc

SEQ ID NO: 151396 - DNA, 78 bp, Homo sapiens
  chr5:138286150-138286228
  hypo
ccagcctccaccattcggcagcagttccagcggctgcccagccctgctccactagtcggcatgcggctcttctgggga

SEQ ID NO: 151397 - DNA, 30 bp, Homo sapiens
  chr5:138286533-138286563
  hypo
agccttttgtcccctcggggcctggtctcg

SEQ ID NO: 151398 - DNA, 68 bp, Homo sapiens
  chr5:138290871-138290939
  hypo
aagtgacatcagtggcgctggtgtgctcaaagtcaacagaaggatattaaggacgtagctcatctccg

SEQ ID NO: 151399 - DNA, 30 bp, Homo sapiens
  chr5:138291483-138291513
  hypo
tgtggggtcctgtgccgctgcacgggtggc

SEQ ID NO: 151400 - DNA, 252 bp, Homo sapiens
  chr5:138441363-138441615
  hypo
aggcaggctgtgagccgcgacactggcagatggctgccccggtagcaatcgtgcacgctccaacggccgcctcctccagtccacccttgagcacaggcttatgttcccaaaaggggtggagagcaccagcaaacattacccccaaagaatagtggctttccctagggaaggtaaacatttccatcagaaggcagaagccggcacaaggcaatttctctctgtgcagggaaaaggagccgcaaacataaagtt

SEQ ID NO: 151401 - DNA, 31 bp, Homo sapiens; identical to SEQ ID NO: 19705
  chr5:138538952-138538983
  hypo

SEQ ID NO: 151402 - DNA, 121 bp, Homo sapiens
  chr5:138627522-138627643
  hypo
tggccaagtaacttcatttttatggctatgccatttcaggtagtgcttcgttgaggcatcaagactccactgaccagctttttcactttattgaattacataacctttttttttttttttt

SEQ ID NO: 151403 - DNA, 32 bp, Homo sapiens; identical to SEQ ID NO: 19706
  chr5:138659302-138659334
  hypo

SEQ ID NO: 151404 - DNA, 153 bp, Homo sapiens
  chr5:138668933-138669086
  hypo
attgagggagtaaggggacaccggtttagccagccagatcagccaaatcaatttttgtatttttagtagagagggtttcaccacgttggccaggctggtctctaactcttgacctcaatcttccctcggcctcccactcggttcccaggtgag

SEQ ID NO: 151405 - DNA, 153 bp, Homo sapiens
  chr5:138676298-138676451
  hypo
gcacccatttcctagtcggtcatttgccctctccaaagggaagaaattagtttgtgtccctttttcaaagatagtatctacacatttgaacatccagatttgtaaaacacatactctcggccgggtgcggtggctcacacctgtaatcctagc

SEQ ID NO: 151406 - DNA, 23 bp, Homo sapiens
  chr5:138709154-138709177
  hypo
cactgagccgggctagtaatttt

SEQ ID NO: 151407 - DNA, 30 bp, Homo sapiens; identical to SEQ ID NO: 70233
  chr5:138713735-138713765
  hypo

SEQ ID NO: 151408 - DNA, 30 bp, Homo sapiens; identical to SEQ ID NO: 70234
  chr5:138717328-138717358
  hypo

SEQ ID NO: 151409 - DNA, 44 bp, Homo sapiens
  chr5:138741277-138741321
  hypo
ttgttttgtttcttgcgtttattttcatggacttggagacaagg

SEQ ID NO: 151410 - DNA, 30 bp, Homo sapiens; identical to SEQ ID NO: 19707
  chr5:138895190-138895220
  hypo

SEQ ID NO: 151411 - DNA, 30 bp, Homo sapiens; identical to SEQ ID NO: 19708
  chr5:138897028-138897058
  hypo

SEQ ID NO: 151412 - DNA, 56 bp, Homo sapiens; identical to SEQ ID NO: 19709
  chr5:138928997-138929053
  hypo

SEQ ID NO: 151413 - DNA, 34 bp, Homo sapiens
  chr5:138945974-138946008
  hypo
tgggtcatgcacagtgggtcacgcctgtaatccc

SEQ ID NO: 151414 - DNA, 121 bp, Homo sapiens; identical to SEQ ID NO: 70238
  chr5:138959964-138960085
  hypo

SEQ ID NO: 151415 - DNA, 19 bp, Homo sapiens
  chr5:138971484-138971503
  hypo
tctgtcttgaaaacctggg

SEQ ID NO: 151416 - DNA, 1167 bp, Homo sapiens; identical to SEQ ID NO: 112103
  chr5:139016855-139018022
  hypo

SEQ ID NO: 151417 - DNA, 65 bp, Homo sapiens; identical to SEQ ID NO: 4253
  chr5:139039950-139040015
  hypo

SEQ ID NO: 151418 - DNA, 52 bp, Homo sapiens; identical to SEQ ID NO: 19712
  chr5:139060688-139060740
  hypo

SEQ ID NO: 151419 - DNA, 499 bp, Homo sapiens; identical to SEQ ID NO: 112109
  chr5:139088831-139089330
  hypo

SEQ ID NO: 151420 - DNA, 144 bp, Homo sapiens; identical to SEQ ID NO: 112110
  chr5:139089533-139089677
  hypo

SEQ ID NO: 151421 - DNA, 368 bp, Homo sapiens
  chr5:139091503-139091871
  hypo
gccggttagggcagccgggggtgcaggagtcagaacctgaccctccttgtctcccgccagcgctctgggcgccgttcatcaaaatggccgggttcctgtttttgcctctgaaggcagaaatgtcactgccgctgcattaagcacgctcggcgggaactcggtttggagcgaggagctggcgctcagccctgccaagctgcctgccgcaggggggtggggatgggctggctggccagccggcctggctggggtcagtctttgtctacgaggggctcccaccttcctgtcgctctagcccgacatggcccactcccctaaaccgtgctggttgctcccaccccactcaagtttggcgggggtcgggggag

SEQ ID NO: 151422 - DNA, 228 bp, Homo sapiens
  chr5:139113840-139114068
  hypo
acccgaggggtatcccggggtgagtccgtgagtgtgcatttgggtgaggacgtgattctgggtgtgaggggtcttgcttgagcgcttgagcacatgagcagcccctagcctgctcagaacagagcactgctgtctctgctgcgccaacaacgaggcctctctgtctcagcgcataatgtcccctctgtattgtctgctgcatcgctgtggtgacgataattttaaggc

SEQ ID NO: 151423 - DNA, 30 bp, Homo sapiens; identical to SEQ ID NO: 19714
  chr5:139133700-139133730
  hypo

SEQ ID NO: 151424 - DNA, 30 bp, Homo sapiens; identical to SEQ ID NO: 19715
  chr5:139142883-139142913
  hypo

SEQ ID NO: 151425 - DNA, 235 bp, Homo sapiens; identical to SEQ ID NO: 112117
  chr5:139143821-139144056
  hypo

SEQ ID NO: 151426 - DNA, 101 bp, Homo sapiens; identical to SEQ ID NO: 112118
  chr5:139144114-139144215
  hypo

SEQ ID NO: 151427 - DNA, 30 bp, Homo sapiens; identical to SEQ ID NO: 42042
  chr5:139256182-139256212
  hypo

SEQ ID NO: 151428 - DNA, 1127 bp, Homo sapiens; identical to SEQ ID NO: 112127
  chr5:139283458-139284585
  hypo

SEQ ID NO: 151429 - DNA, 30 bp, Homo sapiens
  chr5:139508162-139508192
  hypo
tggaaaccaagcaaacgtgttgtgcatcag

SEQ ID NO: 151430 - DNA, 31 bp, Homo sapiens; identical to SEQ ID NO: 19717
  chr5:139535849-139535880
  hypo

SEQ ID NO: 151431 - DNA, 292 bp, Homo sapiens; identical to SEQ ID NO: 112133
  chr5:139554292-139554584
  hypo

SEQ ID NO: 151432 - DNA, 102 bp, Homo sapiens; identical to SEQ ID NO: 70251
  chr5:139556301-139556403
  hypo

SEQ ID NO: 151433 - DNA, 106 bp, Homo sapiens
  chr5:139632449-139632555
  hypo
catgtgccctgagccgccagcctggatgggtgaggagggccaacagaggcaggcaaaaccccacacctgagagacaggtctaagcggtccacggatatgcccactt

SEQ ID NO: 151434 - DNA, 165 bp, Homo sapiens
  chr5:139633302-139633467
  hypo
agtgatggggtcaagcgatgggcagctgaagtcggtggggacttttggttcagagaagattaagggaagaaggaatctatcactaccttaactatagaaagcaatggctctccaagtgcagtcctctcccagcagcatcgggatcacctgcgaacttattagaag

SEQ ID NO: 151435 - DNA, 39 bp, Homo sapiens
  chr5:139640452-139640491
  hypo
agacaggacacgggccgggcacaatggctcatgcctgta

SEQ ID NO: 151436 - DNA, 27 bp, Homo sapiens
  chr5:139678895-139678922
  hypo
aatgtactttgaggccaggggcggtgg

SEQ ID NO: 151437 - DNA, 64 bp, Homo sapiens; identical to SEQ ID NO: 112138
  chr5:139725674-139725738
  hypo

SEQ ID NO: 151438 - DNA, 152 bp, Homo sapiens; identical to SEQ ID NO: 42052
  chr5:139725996-139726148
  hypo

SEQ ID NO: 151439 - DNA, 275 bp, Homo sapiens; identical to SEQ ID NO: 112140
  chr5:139726429-139726704
  hypo

SEQ ID NO: 151440 - DNA, 24 bp, Homo sapiens
  chr5:139829237-139829261
  hypo
ctcggtctcaaaaaaaaaaaaaaa

SEQ ID NO: 151441 - DNA, 19 bp, Homo sapiens
  chr5:139922384-139922403
  hypo
ttaagacctttggggccgg

SEQ ID NO: 151442 - DNA, 30 bp, Homo sapiens
  chr5:139938327-139938357
  hypo
gccgcaggcgggcacgggcctgggcacccc

SEQ ID NO: 151443 - DNA, 30 bp, Homo sapiens; identical to SEQ ID NO: 70257
  chr5:139943158-139943188
  hypo

SEQ ID NO: 151444 - DNA, 33 bp, Homo sapiens
  chr5:139945502-139945535
  hypo
ctggaaagcctgcagcggcgtgtagaagacgaa

SEQ ID NO: 151445 - DNA, 121 bp, Homo sapiens
  chr5:140045561-140045682
  hypo
gacaatagagtgagacactcccttgattaaaacccttcaatggtctgcttttaggatttagtacaaatttctcaatcctgccttcaacgccctgaccatctgtgctcattcatccatacct

SEQ ID NO: 151446 - DNA, 30 bp, Homo sapiens; identical to SEQ ID NO: 70258
  chr5:140053053-140053083
  hypo

SEQ ID NO: 151447 - DNA, 30 bp, Homo sapiens
  chr5:140075180-140075210
  hypo
ccatagtccaaggccgttatagggagttct

SEQ ID NO: 151448 - DNA, 33 bp, Homo sapiens; identical to SEQ ID NO: 19723
  chr5:140088249-140088282
  hypo

SEQ ID NO: 151449 - DNA, 33 bp, Homo sapiens; identical to SEQ ID NO: 19724
  chr5:140088521-140088554
  hypo

SEQ ID NO: 151450 - DNA, 169 bp, Homo sapiens; identical to SEQ ID NO: 70261
  chr5:140905567-140905736
  hypo

SEQ ID NO: 151451 - DNA, 35 bp, Homo sapiens; identical to SEQ ID NO: 19725
  chr5:141002377-141002412
  hypo

SEQ ID NO: 151452 - DNA, 484 bp, Homo sapiens; identical to SEQ ID NO: 42085
  chr5:141030746-141031230
  hypo

SEQ ID NO: 151453 - DNA, 145 bp, Homo sapiens; identical to SEQ ID NO: 19728
  chr5:141051472-141051617
  hypo

SEQ ID NO: 151454 - DNA, 31 bp, Homo sapiens; identical to SEQ ID NO: 70265
  chr5:141052013-141052044
  hypo

SEQ ID NO: 151455 - DNA, 94 bp, Homo sapiens; identical to SEQ ID NO: 70266
  chr5:141052406-141052500
  hypo

SEQ ID NO: 151456 - DNA, 69 bp, Homo sapiens
  chr5:141072798-141072867
  hypo
tcatctctgtacatgcgcgcgcacacacacacacacacacagctgacagcctcacgcgctggaggggcg

SEQ ID NO: 151457 - DNA, 30 bp, Homo sapiens
  chr5:141162819-141162849
  hypo
tttatttttcagaggcgcctgcggcagagc

SEQ ID NO: 151458 - DNA, 30 bp, Homo sapiens
  chr5:141231123-141231153
  hypo
tacataaaactgtacgcgacacaggcattg

SEQ ID NO: 151459 - DNA, 30 bp, Homo sapiens
  chr5:141243421-141243451
  hypo
agggtctccagcagcgtgcggttggccaga

SEQ ID NO: 151460 - DNA, 266 bp, Homo sapiens; identical to SEQ ID NO: 70267
  chr5:141244705-141244971
  hypo

SEQ ID NO: 151461 - DNA, 724 bp, Homo sapiens
  chr5:141248095-141248819
  hypo
tgggtcaccctgacagttatacggagggggcctctcacctggatgaccgagtggcctatggggctattctcagatagttcggcctcataggagggccgctcaaacttgggggcgttgtcattggtgtcaagcacggtgacacgcagcagggcactgctggcgcgtggggggctgccgccatcctgcaccttgatggtgaggtcataggagtcccagcgctcacggtccaggttgcccatcacaatgagctgtggttgcttctcctcctggtcctctgccacctgcagcccaaatagctcctgggcctcaggcccagcctgcagctcataggatgccacaccgttgggaccagcatcacggtctgaagccagcgggatggggaagagtgagccgatgttggtgttctcagggatggccagagtgatgactggtgaggcgaagttgggtgtgttgtcattgatgtcttgtacttctatctggccctctagcagccgggggctgccattctgcacgaggtctgtgatagatacctcaaactccaggatgcagggatcaccagggagctggttctggcattcacggagcccctcacggtcgatggaggtctcggtggtgaaaatgtcacctgtcttgccatccacgcgaaggtacggggcacccacctctagcttgtacaggtgccccacatctggaaaaccatagtcggctgcgaggctcccaatga

SEQ ID NO: 151462 - DNA, 882 bp, Homo sapiens; identical to SEQ ID NO: 112199
  chr5:141257148-141258030
  hypo

SEQ ID NO: 151463 - DNA, 59 bp, Homo sapiens
  chr5:141295479-141295538
  hypo
agttctgtgctggatagagttcggccctgcccctcctcggttcctgccaataggactgc

SEQ ID NO: 151464 - DNA, 31 bp, Homo sapiens; identical to SEQ ID NO: 19731
  chr5:141303243-141303274
  hypo

SEQ ID NO: 151465 - DNA, 86 bp, Homo sapiens
  chr5:141355857-141355943
  hypo
acatccacgcatgtgcgtgcatgcacgtgcatgcacacacacgcacaaaacagggacagattaactggatgcgtggttgtggtttc

SEQ ID NO: 151466 - DNA, 30 bp, Homo sapiens; identical to SEQ ID NO: 70272
  chr5:141391518-141391548
  hypo

SEQ ID NO: 151467 - DNA, 30 bp, Homo sapiens
  chr5:141393686-141393716
  hypo
agaatcccgcccaatcgtcagatatgatta

SEQ ID NO: 151468 - DNA, 30 bp, Homo sapiens
  chr5:141467946-141467976
  hypo
gctagggcactgcgtcgtgccagcctggct

SEQ ID NO: 151469 - DNA, 33 bp, Homo sapiens
  chr5:141468241-141468274
  hypo
ttttggacctccttccggcgtatctgcagtggg

SEQ ID NO: 151470 - DNA, 30 bp, Homo sapiens
  chr5:141492523-141492553
  hypo
gaggacgttaactcccgttcatccatagat

SEQ ID NO: 151471 - DNA, 30 bp, Homo sapiens; identical to SEQ ID NO: 19732
  chr5:141576297-141576327
  hypo

SEQ ID NO: 151472 - DNA, 42 bp, Homo sapiens; identical to SEQ ID NO: 70275
  chr5:141581707-141581749
  hypo

SEQ ID NO: 151473 - DNA, 32 bp, Homo sapiens
  chr5:141610128-141610160
  hypo
acgcccagcccgaagtagggagttgttgttta

SEQ ID NO: 151474 - DNA, 31 bp, Homo sapiens; identical to SEQ ID NO: 19733
  chr5:141639936-141639967
  hypo

SEQ ID NO: 151475 - DNA, 245 bp, Homo sapiens; identical to SEQ ID NO: 70277
  chr5:141663281-141663526
  hypo

SEQ ID NO: 151476 - DNA, 35 bp, Homo sapiens; identical to SEQ ID NO: 19734
  chr5:141674167-141674202
  hypo

SEQ ID NO: 151477 - DNA, 35 bp, Homo sapiens; identical to SEQ ID NO: 70279
  chr5:141674501-141674536
  hypo

SEQ ID NO: 151478 - DNA, 266 bp, Homo sapiens; identical to SEQ ID NO: 42097
  chr5:141704447-141704713
  hypo

SEQ ID NO: 151479 - DNA, 342 bp, Homo sapiens; identical to SEQ ID NO: 42099
  chr5:141736298-141736640
  hypo

SEQ ID NO: 151480 - DNA, 318 bp, Homo sapiens
  chr5:141788584-141788902
  hypo
agcgcatgttatgggcgctgggtcggaacaggggccactttgaatggcaaggagggagaatcgctccagcgaagctggaacggccaagaagctgggatgtcaataaacacaggcaggacacagaaagccttttccgaagagatggaaggcggggaagcgaaggaaaggcagtgcctcactcccggtgcatttgagaaggaaaatgcttgaggtaacccgtgttggcagcttttatagcttcctctcgataatgtgctgggcagaccctgaacaggctggtgttttattttcgtgtaacgaagccgagtggaccagggg

SEQ ID NO: 151481 - DNA, 34 bp, Homo sapiens; identical to SEQ ID NO: 19738
  chr5:141803863-141803897
  hypo

SEQ ID NO: 151482 - DNA, 31 bp, Homo sapiens; identical to SEQ ID NO: 70284
  chr5:141815622-141815653
  hypo

SEQ ID NO: 151483 - DNA, 151 bp, Homo sapiens; identical to SEQ ID NO: 19739
  chr5:141850812-141850963
  hypo

SEQ ID NO: 151484 - DNA, 38 bp, Homo sapiens; identical to SEQ ID NO: 70286
  chr5:141903296-141903334
  hypo

SEQ ID NO: 151485 - DNA, 31 bp, Homo sapiens; identical to SEQ ID NO: 70287
  chr5:142054639-142054670
  hypo

SEQ ID NO: 151486 - DNA, 31 bp, Homo sapiens; identical to SEQ ID NO: 4293
  chr5:142092798-142092829
  hypo

SEQ ID NO: 151487 - DNA, 148 bp, Homo sapiens
  chr5:142170485-142170633
  hypo
accctctaaactccccgctgcatgttgaataaatgatgtcgaatgttcctttaaagggcccttctcaaccacttgacttttttctagaagcaactctaagtgttgatggcctcaagcatcaagcatctcttggttctccttagggttt

SEQ ID NO: 151488 - DNA, 172 bp, Homo sapiens; identical to SEQ ID NO: 70289
  chr5:142239512-142239684
  hypo

SEQ ID NO: 151489 - DNA, 58 bp, Homo sapiens
  chr5:142259163-142259221
  hypo
ctcatcggttctttacgggtgactgaagtacgaccatctgagccgtcaaccccggagg

SEQ ID NO: 151490 - DNA, 30 bp, Homo sapiens; identical to SEQ ID NO: 19741
  chr5:142394060-142394090
  hypo

SEQ ID NO: 151491 - DNA, 29 bp, Homo sapiens
  chr5:142464295-142464324
  hypo
ttatgccaacatctccgttagaaatactt

SEQ ID NO: 151492 - DNA, 28 bp, Homo sapiens
  chr5:142464623-142464651
  hypo
aaaaaaaaagaaacgctttctgcacggg

SEQ ID NO: 151493 - DNA, 217 bp, Homo sapiens
  chr5:142552916-142553133
  hypo
gaagtaacaaaccattctgcagggtgtgcaggagccacgagggcctagagggagtggagtcaggagagcggaaaatcaccacaggccagaattttcaagagacgtatttttaggcaggtccaagatgtttctccaaaaacgaagtggctttgcattgttttattagtaagagtcaacatttccgaattcaggcacttcgcttcgcaatttacatagg

SEQ ID NO: 151494 - DNA, 189 bp, Homo sapiens
  chr5:142623954-142624143
  hypo
tcttcctcttcgtgccgcacatattgacgttcagggcttcaagatctctcgcctggactatttcagcagcctcctaacagtctctcttctcccagctcccgcctctggctcctctgcatgttaagagcaaagtcgccccaaagcaggaaatgggattactctcctatcgtgatgaagcctgtgttgcct

SEQ ID NO: 151495 - DNA, 211 bp, Homo sapiens
  chr5:142625529-142625740
  hypo
gtcctggggtggccacggtcatgccaagtctcagtgccccctccgcttcaggggcttagaccgccacttggaatgcgtgcattctggcaggtgcggtgcatgcaggggtcagacccctatggtttgatgagataagagcctcctgcacagaatctcattttttctccatctgcaccgccatttgggcctcgggcctcatgactcacacagt

SEQ ID NO: 151496 - DNA, 28 bp, Homo sapiens
  chr5:142634380-142634408
  hypo
ccaccacgcccactctcaggcatgagct

SEQ ID NO: 151497 - DNA, 797 bp, Homo sapiens; identical to SEQ ID NO: 42104
  chr5:142781701-142782498
  hypo

SEQ ID NO: 151498 - DNA, 123 bp, Homo sapiens; identical to SEQ ID NO: 112221
  chr5:142782625-142782748
  hypo

SEQ ID NO: 151499 - DNA, 409 bp, Homo sapiens; identical to SEQ ID NO: 112222
  chr5:142782794-142783203
  hypo

SEQ ID NO: 151500 - DNA, 1712 bp, Homo sapiens; identical to SEQ ID NO: 112223
  chr5:142783606-142785318
  hypo

SEQ ID NO: 151501 - DNA, 30 bp, Homo sapiens
  chr5:143016547-143016577
  hypo
aaccttcaactgatgcgtatttttagcgct

SEQ ID NO: 151502 - DNA, 30 bp, Homo sapiens
  chr5:143026722-143026752
  hypo
ctttgggttgagtcacgcgaggggcacgtt

SEQ ID NO: 151503 - DNA, 40 bp, Homo sapiens; identical to SEQ ID NO: 70296
  chr5:143182535-143182575
  hypo

SEQ ID NO: 151504 - DNA, 30 bp, Homo sapiens
  chr5:143774848-143774878
  hypo
gggaggcgatatgtccgtgtctgatatact

SEQ ID NO: 151505 - DNA, 30 bp, Homo sapiens; identical to SEQ ID NO: 70297
  chr5:145234902-145234932
  hypo

SEQ ID NO: 151506 - DNA, 159 bp, Homo sapiens; identical to SEQ ID NO: 19745
  chr5:145379610-145379769
  hypo

SEQ ID NO: 151507 - DNA, 30 bp, Homo sapiens
  chr5:145408105-145408135
  hypo
ttgtggggtttttagcggcatccccggccc

SEQ ID NO: 151508 - DNA, 30 bp, Homo sapiens
  chr5:145408455-145408485
  hypo
gcgccaaaacacgaacgcgctcctagctgg

SEQ ID NO: 151509 - DNA, 31 bp, Homo sapiens; identical to SEQ ID NO: 19746
  chr5:145438102-145438133
  hypo

SEQ ID NO: 151510 - DNA, 31 bp, Homo sapiens; identical to SEQ ID NO: 19747
  chr5:145453475-145453506
  hypo

SEQ ID NO: 151511 - DNA, 30 bp, Homo sapiens
  chr5:145587141-145587171
  hypo
aagcttccaattcccgggggatttttaaaa

SEQ ID NO: 151512 - DNA, 30 bp, Homo sapiens
  chr5:145641199-145641229
  hypo
aaaataatgagcaaccgacactacagtcct

SEQ ID NO: 151513 - DNA, 551 bp, Homo sapiens; identical to SEQ ID NO: 112235
  chr5:145717843-145718394
  hypo

SEQ ID NO: 151514 - DNA, 1334 bp, Homo sapiens; identical to SEQ ID NO: 112236
  chr5:145718419-145719753
  hypo

SEQ ID NO: 151515 - DNA, 170 bp, Homo sapiens; identical to SEQ ID NO: 42126
  chr5:145725693-145725863
  hypo

SEQ ID NO: 151516 - DNA, 30 bp, Homo sapiens
  chr5:145847934-145847964
  hypo
gtatgtaaagacagtcgctaccaccaagac

SEQ ID NO: 151517 - DNA, 230 bp, Homo sapiens
  chr5:145887321-145887551
  hypo
ggcattacaagagatcgcaggtcagtgtgtaatattatgtacctatgtgctgcagtttgactccctaagtaaaagtgagttgtatttatgttttttattcatgtcttttcaaagattaccttaacatccacgtggaaagaagtaaaaaaaatcattaaggaagatcctcgatgtattaagttctcctccagtgacagggtaagaggattttgtgtcgagatttactgtca

SEQ ID NO: 151518 - DNA, 30 bp, Homo sapiens; identical to SEQ ID NO: 70305
  chr5:145890284-145890314
  hypo

SEQ ID NO: 151519 - DNA, 121 bp, Homo sapiens
  chr5:146085993-146086114
  hypo
tctccatcttccagcagcttcctgtaggtggcgatctcgatgtccagggtcagcttgatgttcatcagcttctggtaggcacgcagctgccgcgccatgtcctacttggtctgctgaaggg

SEQ ID NO: 151520 - DNA, 43 bp, Homo sapiens; identical to SEQ ID NO: 70306
  chr5:146685045-146685088
  hypo

SEQ ID NO: 151521 - DNA, 85 bp, Homo sapiens
  chr5:147015582-147015667
  hypo
gcagagccatgcacacgtgccacttcactgatggtgatggcggtgacagggatgcggttgagcacgcagccgaggacagagcagt

SEQ ID NO: 151522 - DNA, 347 bp, Homo sapiens
  chr5:147040614-147040961
  hypo
ggatcatattgctcagagcctcgtccacctgcttcttggccgttttcaggtccgcaatttcctgtaagagcttaaggcgctctgtgtcaaacagtttccgggcctcctcccgggcctcaatggtgagcgctgtccttactttgtcactgctgccgtcgcggagagcacagagagcagacttgagcctctggatctctccatcacgtaccttcaccgtccttgacatttcctgctcgtgctgcttgataaggttctccctcacagcctgcagctccttcatcttctcctcatggagcttggctttgagttctgtcaccagcaccgtgtgcttgcgctgctccagctca

SEQ ID NO: 151523 - DNA, 32 bp, Homo sapiens; identical to SEQ ID NO: 19750
  chr5:147055596-147055628
  hypo

SEQ ID NO: 151524 - DNA, 44 bp, Homo sapiens; identical to SEQ ID NO: 19751
  chr5:147274325-147274369
  hypo

SEQ ID NO: 151525 - DNA, 40 bp, Homo sapiens; identical to SEQ ID NO: 70310
  chr5:147439592-147439632
  hypo

SEQ ID NO: 151526 - DNA, 99 bp, Homo sapiens; identical to SEQ ID NO: 70311
  chr5:147439811-147439910
  hypo

SEQ ID NO: 151527 - DNA, 30 bp, Homo sapiens; identical to SEQ ID NO: 4310
  chr5:147534273-147534303
  hypo

SEQ ID NO: 151528 - DNA, 101 bp, Homo sapiens
  chr5:147610058-147610159
  hypo
acaaatgcatctgttgtgacccgtttgttatttggaaatgtactacgttgagttccattaatgagtatctgcatgtgaaaataacttctataaaatttacc

SEQ ID NO: 151529 - DNA, 404 bp, Homo sapiens; identical to SEQ ID NO: 112257
  chr5:148206070-148206474
  hypo

SEQ ID NO: 151530 - DNA, 43 bp, Homo sapiens; identical to SEQ ID NO: 70314
  chr5:148222773-148222816
  hypo

SEQ ID NO: 151531 - DNA, 198 bp, Homo sapiens; identical to SEQ ID NO: 70315
  chr5:148409734-148409932
  hypo

SEQ ID NO: 151532 - DNA, 120 bp, Homo sapiens; identical to SEQ ID NO: 70316
  chr5:148520458-148520578
  hypo

SEQ ID NO: 151533 - DNA, 30 bp, Homo sapiens; identical to SEQ ID NO: 19753
  chr5:148638018-148638048
  hypo

SEQ ID NO: 151534 - DNA, 1172 bp, Homo sapiens; identical to SEQ ID NO: 112260
  chr5:148650950-148652122
  hypo

SEQ ID NO: 151535 - DNA, 31 bp, Homo sapiens; identical to SEQ ID NO: 19755
  chr5:148669501-148669532
  hypo

SEQ ID NO: 151536 - DNA, 36 bp, Homo sapiens; identical to SEQ ID NO: 70320
  chr5:148686934-148686970
  hypo

SEQ ID NO: 151537 - DNA, 100 bp, Homo sapiens; identical to SEQ ID NO: 70321
  chr5:148695864-148695964
  hypo

SEQ ID NO: 151538 - DNA, 72 bp, Homo sapiens
  chr5:148702155-148702227
  hypo
catctcccaccaggacgaggagcccgagcgccccacaggggcccaggtgaagcgtcacgcctcctcctgcag

SEQ ID NO: 151539 - DNA, 107 bp, Homo sapiens; identical to SEQ ID NO: 4314
  chr5:148724796-148724903
  hypo

SEQ ID NO: 151540 - DNA, 31 bp, Homo sapiens; identical to SEQ ID NO: 70323
  chr5:148745523-148745554
  hypo

SEQ ID NO: 151541 - DNA, 31 bp, Homo sapiens; identical to SEQ ID NO: 70324
  chr5:148748095-148748126
  hypo

SEQ ID NO: 151542 - DNA, 50 bp, Homo sapiens; identical to SEQ ID NO: 70325
  chr5:148754032-148754082
  hypo

SEQ ID NO: 151543 - DNA, 30 bp, Homo sapiens
  chr5:148761841-148761871
  hypo
cggtgtcggggtcaccgattccaggtgtcg

SEQ ID NO: 151544 - DNA, 34 bp, Homo sapiens; identical to SEQ ID NO: 70326
  chr5:148772454-148772488
  hypo

SEQ ID NO: 151545 - DNA, 93 bp, Homo sapiens; identical to SEQ ID NO: 70327
  chr5:148772607-148772700
  hypo

SEQ ID NO: 151546 - DNA, 30 bp, Homo sapiens
  chr5:148787844-148787874
  hypo
acagtcctctagcaccggcctctgtcttgt

SEQ ID NO: 151547 - DNA, 30 bp, Homo sapiens
  chr5:148788478-148788508
  hypo
tgccaggctgtagggcggcctaggactctc

SEQ ID NO: 151548 - DNA, 18 bp, Homo sapiens
  chr5:148811473-148811491
  hypo
ctttccggccgggcgcgg

SEQ ID NO: 151549 - DNA, 17 bp, Homo sapiens
  chr5:148811730-148811747
  hypo
agcgtgggggacaaaag

SEQ ID NO: 151550 - DNA, 142 bp, Homo sapiens; identical to SEQ ID NO: 70330
  chr5:148821006-148821148
  hypo

SEQ ID NO: 151551 - DNA, 31 bp, Homo sapiens; identical to SEQ ID NO: 70331
  chr5:148823375-148823406
  hypo

SEQ ID NO: 151552 - DNA, 30 bp, Homo sapiens
  chr5:148833146-148833176
  hypo
gggaaagacaaggtgcggcaggacccacag

SEQ ID NO: 151553 - DNA, 31 bp, Homo sapiens; identical to SEQ ID NO: 70332
  chr5:148850848-148850879
  hypo

SEQ ID NO: 151554 - DNA, 35 bp, Homo sapiens
  chr5:148868489-148868524
  hypo
accattcctccaagacgaggagtcttcaccgtctg

SEQ ID NO: 151555 - DNA, 34 bp, Homo sapiens; identical to SEQ ID NO: 19757
  chr5:148868823-148868857
  hypo

SEQ ID NO: 151556 - DNA, 23 bp, Homo sapiens
  chr5:148872634-148872657
  hypo
acctttttgttgttgttgagacg

SEQ ID NO: 151557 - DNA, 23 bp, Homo sapiens
  chr5:148872896-148872919
  hypo
gcgtgtgccactgctcctagcca

SEQ ID NO: 151558 - DNA, 30 bp, Homo sapiens; identical to SEQ ID NO: 42140
  chr5:148904076-148904106
  hypo

SEQ ID NO: 151559 - DNA, 121 bp, Homo sapiens
  chr5:148925771-148925892
  hypo
gctctttactcaggatgctatgcttcttaacaataggtctctcaaattacacaggaaggacctgattcagcaggtcatctacgcaggccaggtaattttcagtctctgttgtaagatatac

SEQ ID NO: 151560 - DNA, 59 bp, Homo sapiens; identical to SEQ ID NO: 70337
  chr5:148938521-148938580
  hypo

SEQ ID NO: 151561 - DNA, 23 bp, Homo sapiens
  chr5:148945696-148945719
  hypo
ccgtgcctggcccagaaactcta

SEQ ID NO: 151562 - DNA, 30 bp, Homo sapiens
  chr5:148958705-148958735
  hypo
caaagtattccatcacgtacttctgaaaaa

SEQ ID NO: 151563 - DNA, 23 bp, Homo sapiens
  chr5:148976154-148976177
  hypo
accgcacccgggcccttgatact

SEQ ID NO: 151564 - DNA, 62 bp, Homo sapiens; identical to SEQ ID NO: 70340
  chr5:148980119-148980181
  hypo

SEQ ID NO: 151565 - DNA, 42 bp, Homo sapiens; identical to SEQ ID NO: 19761
  chr5:148981577-148981619
  hypo

SEQ ID NO: 151566 - DNA, 89 bp, Homo sapiens; identical to SEQ ID NO: 70342
  chr5:148982436-148982525
  hypo

SEQ ID NO: 151567 - DNA, 145 bp, Homo sapiens; identical to SEQ ID NO: 19762
  chr5:148989227-148989372
  hypo

SEQ ID NO: 151568 - DNA, 37 bp, Homo sapiens; identical to SEQ ID NO: 19763
  chr5:148999329-148999366
  hypo

SEQ ID NO: 151569 - DNA, 44 bp, Homo sapiens; identical to SEQ ID NO: 70345
  chr5:149006875-149006919
  hypo

SEQ ID NO: 151570 - DNA, 30 bp, Homo sapiens; identical to SEQ ID NO: 70346
  chr5:149014767-149014797
  hypo

SEQ ID NO: 151571 - DNA, 137 bp, Homo sapiens
  chr5:149144785-149144922
  hypo
gcatgtaaggctcatcgggacctcggttaccatttcacctgtgcaaattttcaggactgagtcttttctctatactgccccacgaggggactgacattacttaaggcctctctccaggaccccgagctcaggcctag

SEQ ID NO: 151572 - DNA, 335 bp, Homo sapiens
  chr5:149189243-149189578
  hypo
ctttcttaaaaaaaaaaaaaaaaaaaaaaaaaaattaatcaatttcatgttatttatattttaccacaatttaaaaacatactgataaaaggaggcaggggatagcagagaatgataagtgctaatcgagggaattccagcagggtgctaggtaggccagagacgggatggccatttggggtgcagtggtcagggaggcccatctggggagggacgttcaacctgggatgaggatagaaagaagggagccgctatgggagatgaaggagagagaaggcgttccaggctgaggaaggctccagcacagaggccccggggtggacactcaagccaca

SEQ ID NO: 151573 - DNA, 327 bp, Homo sapiens
  chr5:149230002-149230329
  hypo
gcctgccaagggcatcgagtagtctctacttgctatcccgtacataaaatgctacaagttctaaaatttaccgaccctgcagacaacctctatcccgaaggactcattcggtgctgtgtattatttagggcaactccaaggtctattcagaaaaacgagtgaaccttggtctctttcccaccaaattgaggagtaacccagagggagcagctgccattggcaaccatctcgttgtagctctgtcctagtgtttgctcttgatgatgtttacatgtgatcgccataaagcttgctgtagactgtgtcgatagccgcccgcacagggca

SEQ ID NO: 151574 - DNA, 42 bp, Homo sapiens
  chr5:149262326-149262368
  hypo
aactttaattcgggccgggcatgatggctcacgcctataatc

SEQ ID NO: 151575 - DNA, 31 bp, Homo sapiens; identical to SEQ ID NO: 19766
  chr5:149270743-149270774
  hypo

SEQ ID NO: 151576 - DNA, 30 bp, Homo sapiens
  chr5:149321347-149321377
  hypo
aagacagcgctacatcggtgtctgagacaa

SEQ ID NO: 151577 - DNA, 443 bp, Homo sapiens
  chr5:149323763-149324206
  hypo
tcctctgtgttggggacgttagcaatcttcttagagtgtgcgacatggcccacgatgcccatgtccaaagggaagacgatctcttggtcgggcatcaccaggcagtcctcgaggacagcatccttgtggacattgaaaagcctggtggccagctctgcgatgccattgcgggtccggtacatgaacaggctcatgcggtctgcctgcaggaggaagcacagcttcttcatgacattgaagatgcatttctctgtctgtaaattctcctgaaagtcccgcaggagatcaaagatgatttcgctctcctccatgctgctcggggagtggtagttgctgaagtccacggcagcctccttggccccaaggaggtcggagatgagcttggcccggtagtggaggttgtagtactgtttggcaaagccaatattcgagtccaggaactt

SEQ ID NO: 151578 - DNA, 31 bp, Homo sapiens; identical to SEQ ID NO: 70350
  chr5:149333519-149333550
  hypo

SEQ ID NO: 151579 - DNA, 34 bp, Homo sapiens; identical to SEQ ID NO: 19768
  chr5:149375067-149375101
  hypo

SEQ ID NO: 151580 - DNA, 95 bp, Homo sapiens; identical to SEQ ID NO: 19769
  chr5:149375679-149375774
  hypo

SEQ ID NO: 151581 - DNA, 43 bp, Homo sapiens
  chr5:149405659-149405702
  hypo
tgggattacaggcgtgagctaccgcgcccggccccatcttgct

SEQ ID NO: 151582 - DNA, 30 bp, Homo sapiens
  chr5:149405981-149406011
  hypo
acacgctgtagacatcgttttacacttctg

SEQ ID NO: 151583 - DNA, 30 bp, Homo sapiens; identical to SEQ ID NO: 70353
  chr5:149431987-149432017
  hypo

SEQ ID NO: 151584 - DNA, 52 bp, Homo sapiens; identical to SEQ ID NO: 70354
  chr5:149449458-149449510
  hypo

SEQ ID NO: 151585 - DNA, 30 bp, Homo sapiens; identical to SEQ ID NO: 70355
  chr5:149493799-149493829
  hypo

SEQ ID NO: 151586 - DNA, 186 bp, Homo sapiens; identical to SEQ ID NO: 70356
  chr5:149497193-149497379
  hypo

SEQ ID NO: 151587 - DNA, 40 bp, Homo sapiens; identical to SEQ ID NO: 70357
  chr5:149501435-149501475
  hypo

SEQ ID NO: 151588 - DNA, 144 bp, Homo sapiens; identical to SEQ ID NO: 70358
  chr5:149502536-149502680
  hypo

SEQ ID NO: 151589 - DNA, 127 bp, Homo sapiens; identical to SEQ ID NO: 70359
  chr5:149503639-149503766
  hypo

SEQ ID NO: 151590 - DNA, 230 bp, Homo sapiens
  chr5:149523407-149523637
  hypo
tccacccctgcaccacgaacctccccaccagcctcgggatcactctaagggctacagaaagagagcagcccggcgcagcccactcggtgttggagccattctctgtgccacgctgcttctaggcccggggtcctctttatgtttctccaggtacctacaaagtcccctgaacaaagcagcagaaatcgactaagatggggcctggcgtgtgctcccgctgctctggaagt

SEQ ID NO: 151591 - DNA, 188 bp, Homo sapiens; identical to SEQ ID NO: 70360
  chr5:149573354-149573542
  hypo

SEQ ID NO: 151592 - DNA, 30 bp, Homo sapiens
  chr5:149576614-149576644
  hypo
agccatgctgctcatcgtgggcttggtggc

SEQ ID NO: 151593 - DNA, 31 bp, Homo sapiens; identical to SEQ ID NO: 19771
  chr5:149581943-149581974
  hypo

SEQ ID NO: 151594 - DNA, 134 bp, Homo sapiens
  chr5:149637114-149637248
  hypo
gccaaactcacaggtcgaagatcaggtagtggtgtccctcctctgagatgctgtcatgtagtcggactgtgggcggggcaaggcagttggttacagtgggacacactgctgcacaggcccgccctccctctctc

SEQ ID NO: 151595 - DNA, 30 bp, Homo sapiens; identical to SEQ ID NO: 70362
  chr5:149675544-149675574
  hypo

SEQ ID NO: 151596 - DNA, 30 bp, Homo sapiens; identical to SEQ ID NO: 70363
  chr5:149680084-149680114
  hypo

SEQ ID NO: 151597 - DNA, 189 bp, Homo sapiens; identical to SEQ ID NO: 19772
  chr5:149725940-149726129
  hypo

SEQ ID NO: 151598 - DNA, 320 bp, Homo sapiens
  chr5:149754246-149754566
  hypo
aaggagctgccccagcgccccctgggaagacagggcctgcagttgccaaggcccaggcggggaagcgggaggaggactcgcagagcagcagcgaggaatcggacagtgaggaggaggcgcctgctcaggtgaggcagaggggaggggtggagagtagccccatgcctaaaccccagcacctgcatgggtgtggccacctttgccacatccagctcctgtctccacacgtccaccctctgggctctcccctcatcctgtttctcactccaggcgaagccttcagggaaggccccccaggtcagagccgcctcggcccctgc

SEQ ID NO: 151599 - DNA, 30 bp, Homo sapiens; identical to SEQ ID NO: 70365
  chr5:149765856-149765886
  hypo

SEQ ID NO: 151600 - DNA, 30 bp, Homo sapiens; identical to SEQ ID NO: 70366
  chr5:149784322-149784352
  hypo

SEQ ID NO: 151601 - DNA, 148 bp, Homo sapiens; identical to SEQ ID NO: 19773
  chr5:149800712-149800860
  hypo

SEQ ID NO: 151602 - DNA, 210 bp, Homo sapiens
  chr5:149810732-149810942
  hypo
cggtggacttgggcacgtgaggtcgccggcgaagctgacaagagcaggcttgtgaactgcttgaggatgggtggagcagcactgggagcagcggcaggaggtgaggcagtggctggacaagatgcagccccgggtgcgagcatgcttgtccgcagagggagtgactccgtggggagggagagccaatgatgctgacgaggggaggcagca

SEQ ID NO: 151603 - DNA, 27 bp, Homo sapiens
  chr5:149814536-149814563
  hypo
agagaatgcagccaggcgcagtggctc

SEQ ID NO: 151604 - DNA, 27 bp, Homo sapiens
  chr5:149814862-149814889
  hypo
acactcggcatagtacctacctcaata

SEQ ID NO: 151605 - DNA, 31 bp, Homo sapiens; identical to SEQ ID NO: 19775
  chr5:149866413-149866444
  hypo

SEQ ID NO: 151606 - DNA, 31 bp, Homo sapiens; identical to SEQ ID NO: 19776
  chr5:149922920-149922951
  hypo

SEQ ID NO: 151607 - DNA, 31 bp, Homo sapiens; identical to SEQ ID NO: 70372
  chr5:149925306-149925337
  hypo

SEQ ID NO: 151608 - DNA, 30 bp, Homo sapiens; identical to SEQ ID NO: 70373
  chr5:149935362-149935392
  hypo

SEQ ID NO: 151609 - DNA, 78 bp, Homo sapiens
  chr5:150014716-150014794
  hypo
catgccagccttccacgagtcccgtgtacctgcgggtgctcagtgtgcacatatttatgtgtacgtcctgccccctct

SEQ ID NO: 151610 - DNA, 55 bp, Homo sapiens; identical to SEQ ID NO: 70374
  chr5:150028667-150028722
  hypo

SEQ ID NO: 151611 - DNA, 30 bp, Homo sapiens; identical to SEQ ID NO: 70375
  chr5:150029200-150029230
  hypo

SEQ ID NO: 151612 - DNA, 31 bp, Homo sapiens; identical to SEQ ID NO: 70376
  chr5:150030360-150030391
  hypo

SEQ ID NO: 151613 - DNA, 31 bp, Homo sapiens; identical to SEQ ID NO: 70377
  chr5:150055342-150055373
  hypo

SEQ ID NO: 151614 - DNA, 33 bp, Homo sapiens; identical to SEQ ID NO: 70378
  chr5:150060536-150060569
  hypo

SEQ ID NO: 151615 - DNA, 40 bp, Homo sapiens; identical to SEQ ID NO: 19778
  chr5:150066937-150066977
  hypo

SEQ ID NO: 151616 - DNA, 30 bp, Homo sapiens; identical to SEQ ID NO: 70380
  chr5:150139133-150139163
  hypo

SEQ ID NO: 151617 - DNA, 30 bp, Homo sapiens; identical to SEQ ID NO: 4320
  chr5:150336249-150336279
  hypo

SEQ ID NO: 151618 - DNA, 185 bp, Homo sapiens; identical to SEQ ID NO: 70382
  chr5:150446151-150446336
  hypo

SEQ ID NO: 151619 - DNA, 38 bp, Homo sapiens; identical to SEQ ID NO: 70383
  chr5:150452467-150452505
  hypo

SEQ ID NO: 151620 - DNA, 30 bp, Homo sapiens; identical to SEQ ID NO: 4326
  chr5:150620960-150620990
  hypo

SEQ ID NO: 151621 - DNA, 30 bp, Homo sapiens
  chr5:150647705-150647735
  hypo
tgatttcgatttttcgcttttttttttttt

SEQ ID NO: 151622 - DNA, 100 bp, Homo sapiens
  chr5:150834190-150834290
  hypo
ccctcttgactctccacgtactgatcctagccctgcctgacctttgaggccccaaataacaagtctaatccatgtgacagcttttttttttttttttttt

SEQ ID NO: 151623 - DNA, 30 bp, Homo sapiens
  chr5:150835315-150835345
  hypo
ggggagtgcgtccttcggcctttgttacca

SEQ ID NO: 151624 - DNA, 30 bp, Homo sapiens
  chr5:150872800-150872830
  hypo
acttgagaatttgttcgcaccagcaagcat

SEQ ID NO: 151625 - DNA, 30 bp, Homo sapiens; identical to SEQ ID NO: 70386
  chr5:150884798-150884828
  hypo

SEQ ID NO: 151626 - DNA, 31 bp, Homo sapiens; identical to SEQ ID NO: 19781
  chr5:150885248-150885279
  hypo

SEQ ID NO: 151627 - DNA, 31 bp, Homo sapiens; identical to SEQ ID NO: 70388
  chr5:150885683-150885714
  hypo

SEQ ID NO: 151628 - DNA, 187 bp, Homo sapiens
  chr5:150911165-150911352
  hypo
ggaacctgccttgctcgttcccgctgaccacgcggtagccggtcttctctgcgcccgggcgagtgagggtggccagctgcagcacctccgtgccaggtggggcgtcctcgggcacctgcacgctgtgctcggtgttcaggaacacgggcaggtagtcttctaggcccaccaccgagactgtgacggt

SEQ ID NO: 151629 - DNA, 480 bp, Homo sapiens
  chr5:150945537-150946017
  hypo
tctctccagaatgagcgcccctgtcatcaggtccacccggaaggtcccatgggcgccatccatcagaacatatcgcacttcacctgcggggcccaggtcaggatcagaggcatccagaaatgtcaagacagtcccggggggcaggtcctctggaaccttcagcctgttgtgttctgtgatgcactggggagagttgtcgttgacatcctccaatgtgattatcaggtcagtgacagagaagagctggtggcctttgctgggctgatccctggcctccaccttgagtatgtaccgaggctctgattcgcggtccaggtgtcctgtaacaaccagttccccagtgagagggtggagggagaacttctctgtgggacttagcagggtgtagcgaaccctgccattgtcttccgagtcagcatctttggttgtcagctctgcaattgtggttccaacttctgtgtcctccgagatggttaactg

SEQ ID NO: 151630 - DNA, 30 bp, Homo sapiens; identical to SEQ ID NO: 70389
  chr5:150948291-150948321
  hypo

SEQ ID NO: 151631 - DNA, 30 bp, Homo sapiens
  chr5:151011598-151011628
  hypo
gaacgacttgcctgtcgcatcagccattct

SEQ ID NO: 151632 - DNA, 38 bp, Homo sapiens
  chr5:151082161-151082199
  hypo
atgggagggcagccacgggagtgggtctgggtggggcc

SEQ ID NO: 151633 - DNA, 42 bp, Homo sapiens
  chr5:151082218-151082260
  hypo
ggagtatatagatccatttcagaggctcgccaaccccttcac

SEQ ID NO: 151634 - DNA, 23 bp, Homo sapiens
  chr5:151150204-151150227
  hypo
cggctccccagaggccgaggccg

SEQ ID NO: 151635 - DNA, 648 bp, Homo sapiens; identical to SEQ ID NO: 42171
  chr5:151150270-151150918
  hypo

SEQ ID NO: 151636 - DNA, 26 bp, Homo sapiens
  chr5:151162427-151162453
  hypo
tttttttttgagatggactctcgctc

SEQ ID NO: 151637 - DNA, 26 bp, Homo sapiens
  chr5:151162692-151162718
  hypo
caagcgtgagccactgcacccagcct

SEQ ID NO: 151638 - DNA, 30 bp, Homo sapiens
  chr5:151251415-151251445
  hypo
cgcccggccgtgagacgatttttataggcc

SEQ ID NO: 151639 - DNA, 30 bp, Homo sapiens; identical to SEQ ID NO: 70393
  chr5:151784236-151784266
  hypo

SEQ ID NO: 151640 - DNA, 21 bp, Homo sapiens
  chr5:152190069-152190090
  hypo
tttttttttttttttttgaga

SEQ ID NO: 151641 - DNA, 40 bp, Homo sapiens; identical to SEQ ID NO: 70395
  chr5:153454423-153454463
  hypo

SEQ ID NO: 151642 - DNA, 40 bp, Homo sapiens; identical to SEQ ID NO: 112315
  chr5:153569199-153569239
  hypo

SEQ ID NO: 151643 - DNA, 23 bp, Homo sapiens
  chr5:153651012-153651035
  hypo
cgaaactccgtctcaaaaaataa

SEQ ID NO: 151644 - DNA, 146 bp, Homo sapiens; identical to SEQ ID NO: 70397
  chr5:153675964-153676110
  hypo

SEQ ID NO: 151645 - DNA, 214 bp, Homo sapiens
  chr5:153734232-153734446
  hypo
cgggtgggggggtatcgttggggagaggagacagttaaggacattacagaaggcacacatctttgtgtctagtacgtctttatatcatgacactcacacatctgctgtaccctgtgctttactgggtgggagaaaaagagatgccattgtagctcttatagccccaggcatggaaactgtacgtgaccctgggtatatccgtgtgatcctgtca

SEQ ID NO: 151646 - DNA, 30 bp, Homo sapiens
  chr5:153769823-153769853
  hypo
gccccccatgtctctcgcctgagtcactaa

SEQ ID NO: 151647 - DNA, 143 bp, Homo sapiens; identical to SEQ ID NO: 70398
  chr5:153785958-153786101
  hypo

SEQ ID NO: 151648 - DNA, 37 bp, Homo sapiens
  chr5:153798340-153798377
  hypo
cccctgtgcttgcaacgcttacgtgttgatcccagtg

SEQ ID NO: 151649 - DNA, 31 bp, Homo sapiens
  chr5:153827798-153827829
  hypo
gttctgggattacaggcgtgagccactgcgc

SEQ ID NO: 151650 - DNA, 261 bp, Homo sapiens; identical to SEQ ID NO: 112327
  chr5:153856936-153857197
  hypo

SEQ ID NO: 151651 - DNA, 649 bp, Homo sapiens; identical to SEQ ID NO: 112328
  chr5:153857284-153857933
  hypo

SEQ ID NO: 151652 - DNA, 98 bp, Homo sapiens
  chr5:154071647-154071745
  hypo
agccctgctggtccctttcgaaggaaaccttcgctggctccctagtgccctggaataacactgaaaccccttagaacggtggagaaggcctatctcca

SEQ ID NO: 151653 - DNA, 20 bp, Homo sapiens
  chr5:154082383-154082403
  hypo
gaggacactggttgtgctgg

SEQ ID NO: 151654 - DNA, 28 bp, Homo sapiens
  chr5:154094719-154094747
  hypo
acagagcgagactctgtctcaaaaaaaa

SEQ ID NO: 151655 - DNA, 30 bp, Homo sapiens; identical to SEQ ID NO: 19789
  chr5:154158985-154159015
  hypo

SEQ ID NO: 151656 - DNA, 30 bp, Homo sapiens; identical to SEQ ID NO: 70406
  chr5:154166968-154166998
  hypo

SEQ ID NO: 151657 - DNA, 30 bp, Homo sapiens; identical to SEQ ID NO: 70407
  chr5:154181816-154181846
  hypo

SEQ ID NO: 151658 - DNA, 30 bp, Homo sapiens; identical to SEQ ID NO: 19790
  chr5:154194743-154194773
  hypo

SEQ ID NO: 151659 - DNA, 267 bp, Homo sapiens; identical to SEQ ID NO: 70409
  chr5:154209727-154209994
  hypo

SEQ ID NO: 151660 - DNA, 35 bp, Homo sapiens; identical to SEQ ID NO: 19791
  chr5:154218387-154218422
  hypo

SEQ ID NO: 151661 - DNA, 30 bp, Homo sapiens; identical to SEQ ID NO: 70411
  chr5:154245974-154246004
  hypo

SEQ ID NO: 151662 - DNA, 30 bp, Homo sapiens; identical to SEQ ID NO: 70412
  chr5:154248101-154248131
  hypo

SEQ ID NO: 151663 - DNA, 105 bp, Homo sapiens
  chr5:154318069-154318174
  hypo
tgttcaaccactatcccgtccaacgttttttgagcgctatgtgccagggcactttgctagttgtggaggtgttttaaagatatgcacaagaggccgggtgcggtg

SEQ ID NO: 151664 - DNA, 18 bp, Homo sapiens
  chr5:154929087-154929105
  hypo
gcccggatctcattattt

SEQ ID NO: 151665 - DNA, 30 bp, Homo sapiens
  chr5:155273178-155273208
  hypo
ttgaggaaaccttagcgtattcgtctttac

SEQ ID NO: 151666 - DNA, 30 bp, Homo sapiens
  chr5:155363921-155363951
  hypo
atgtcagcacggccccgggtgtgcgcacac

SEQ ID NO: 151667 - DNA, 44 bp, Homo sapiens
  chr5:155438697-155438741
  hypo
tcggcctctgaatgtgctgggattacaggcgtgcgcctcggtgc

SEQ ID NO: 151668 - DNA, 21 bp, Homo sapiens
  chr5:156207110-156207131
  hypo
ccagctgggtgcggtggctca

SEQ ID NO: 151669 - DNA, 43 bp, Homo sapiens
  chr5:156485284-156485327
  hypo
ggaaacagggccgggcgcggtggctcaaacctgtaatcctagc

SEQ ID NO: 151670 - DNA, 103 bp, Homo sapiens; identical to SEQ ID NO: 19795
  chr5:156485566-156485669
  hypo

SEQ ID NO: 151671 - DNA, 84 bp, Homo sapiens
  chr5:156558375-156558459
  hypo
ggtacctacgctatgcggagatgtgtattatgtttaccattgttaaggaaattgagttttatggaagttttttcttttttgaga

SEQ ID NO: 151672 - DNA, 21 bp, Homo sapiens
  chr5:156577157-156577178
  hypo
aatatcggctgggcgcggtgg

SEQ ID NO: 151673 - DNA, 30 bp, Homo sapiens; identical to SEQ ID NO: 4345
  chr5:156693942-156693972
  hypo

SEQ ID NO: 151674 - DNA, 156 bp, Homo sapiens; identical to SEQ ID NO: 70420
  chr5:156811485-156811641
  hypo

SEQ ID NO: 151675 - DNA, 256 bp, Homo sapiens
  chr5:156874151-156874407
  hypo
gataggtaagcaccaacgtatttaatgggctggctacagaataaacagctacatttttctttggggagcaaaatgcagataattatcaccacttaagctttagtgcaactgtgtaaaaaggcgcggctttttattggcccagcgcctttgtgtgcaaccaatcctgaggtgggcggctgtgtccccgccctggtgggcggagctcttcccagcccaggggcctttgcccatcaggcggttccgcctggcactggct

SEQ ID NO: 151676 - DNA, 490 bp, Homo sapiens; identical to SEQ ID NO: 112352
  chr5:156887015-156887505
  hypo

SEQ ID NO: 151677 - DNA, 254 bp, Homo sapiens; identical to SEQ ID NO: 19798
  chr5:156895562-156895816
  hypo

SEQ ID NO: 151678 - DNA, 1323 bp, Homo sapiens; identical to SEQ ID NO: 112353
  chr5:157001781-157003104
  hypo

SEQ ID NO: 151679 - DNA, 422 bp, Homo sapiens
  chr5:157078067-157078489
  hypo
atgggcaacacagacgcagttttgaaaacccgactcccctgctgtctaatacctgcatctgagggcaacacggtgagcgggacatctttggtttcaatttttacagaaggctccagtagggactgcattttagtaggcactggtgtcagggggaccttggtcaatcttatcagctctgaaggcggagctccctgaaactggatccgggccccaggggggaccgtgtggagcgtcaaagggatcctaaggtcttgctggtgcggcccaaaggcaccggacgttggggccaagatgacctccgcgctgccatgaaccaggccattggacgcgggctccgcgccgagcctgcagtcctcgaggagtctctcgggttcctccgttttgatcacaccttctcggatggctgccgggcttttgcctgc

SEQ ID NO: 151680 - DNA, 30 bp, Homo sapiens; identical to SEQ ID NO: 70425
  chr5:157107138-157107168
  hypo

SEQ ID NO: 151681 - DNA, 29 bp, Homo sapiens
  chr5:157195587-157195616
  hypo
aaagcgttggccgggcgcggtggctcacg

SEQ ID NO: 151682 - DNA, 30 bp, Homo sapiens
  chr5:157450471-157450501
  hypo
agtgagtaaggcagacgtgttcctgcgctg

SEQ ID NO: 151683 - DNA, 30 bp, Homo sapiens; identical to SEQ ID NO: 42212
  chr5:157988964-157988994
  hypo

SEQ ID NO: 151684 - DNA, 143 bp, Homo sapiens; identical to SEQ ID NO: 70427
  chr5:158139221-158139364
  hypo

SEQ ID NO: 151685 - DNA, 30 bp, Homo sapiens; identical to SEQ ID NO: 42213
  chr5:158244067-158244097
  hypo

SEQ ID NO: 151686 - DNA, 223 bp, Homo sapiens; identical to SEQ ID NO: 112364
  chr5:158526149-158526372
  hypo

SEQ ID NO: 151687 - DNA, 650 bp, Homo sapiens; identical to SEQ ID NO: 4353
  chr5:158527353-158528003
  hypo

SEQ ID NO: 151688 - DNA, 25 bp, Homo sapiens
  chr5:158612931-158612956
  hypo
aagatctatgaaaagggcctccggc

SEQ ID NO: 151689 - DNA, 29 bp, Homo sapiens
  chr5:158631513-158631542
  hypo
ataaaatagggcaaacaaggccgggcgca

SEQ ID NO: 151690 - DNA, 1212 bp, Homo sapiens; identical to SEQ ID NO: 42220
  chr5:158634800-158636012
  hypo

SEQ ID NO: 151691 - DNA, 19 bp, Homo sapiens
  chr5:158638269-158638288
  hypo
gaagtatggttgctggatt

SEQ ID NO: 151692 - DNA, 32 bp, Homo sapiens; identical to SEQ ID NO: 19803
  chr5:158884899-158884931
  hypo

SEQ ID NO: 151693 - DNA, 30 bp, Homo sapiens; identical to SEQ ID NO: 19804
  chr5:159214703-159214733
  hypo

SEQ ID NO: 151694 - DNA, 31 bp, Homo sapiens; identical to SEQ ID NO: 42224
  chr5:159228213-159228244
  hypo

SEQ ID NO: 151695 - DNA, 599 bp, Homo sapiens; identical to SEQ ID NO: 112375
  chr5:159343215-159343814
  hypo

SEQ ID NO: 151696 - DNA, 31 bp, Homo sapiens; identical to SEQ ID NO: 19806
  chr5:159459176-159459207
  hypo

SEQ ID NO: 151697 - DNA, 25 bp, Homo sapiens
  chr5:159475941-159475966
  hypo
agcgagactccgtctaaaaaaaaaa

SEQ ID NO: 151698 - DNA, 194 bp, Homo sapiens; identical to SEQ ID NO: 70440
  chr5:159489226-159489420
  hypo

SEQ ID NO: 151699 - DNA, 30 bp, Homo sapiens; identical to SEQ ID NO: 70441
  chr5:159489946-159489976
  hypo

SEQ ID NO: 151700 - DNA, 31 bp, Homo sapiens; identical to SEQ ID NO: 19807
  chr5:159497742-159497773
  hypo

SEQ ID NO: 151701 - DNA, 31 bp, Homo sapiens; identical to SEQ ID NO: 19808
  chr5:159600447-159600478
  hypo

SEQ ID NO: 151702 - DNA, 27 bp, Homo sapiens
  chr5:159653281-159653308
  hypo
aatataggccgagcgcggtggctcacg

SEQ ID NO: 151703 - DNA, 26 bp, Homo sapiens
  chr5:159653487-159653513
  hypo
aacctgggaggcggaggttgcagtga

SEQ ID NO: 151704 - DNA, 42 bp, Homo sapiens
  chr5:159658702-159658744
  hypo
ttgaaagtctcattcattccagaacttcgcgagcttggcaag

SEQ ID NO: 151705 - DNA, 100 bp, Homo sapiens; identical to SEQ ID NO: 70445
  chr5:159659074-159659174
  hypo

SEQ ID NO: 151706 - DNA, 45 bp, Homo sapiens; identical to SEQ ID NO: 19809
  chr5:159669396-159669441
  hypo

SEQ ID NO: 151707 - DNA, 33 bp, Homo sapiens; identical to SEQ ID NO: 70447
  chr5:159670914-159670947
  hypo

SEQ ID NO: 151708 - DNA, 425 bp, Homo sapiens
  chr5:159679759-159680184
  hypo
aaagcaagaccacttcgggaagcagcagcacatgacatatctaaaaggctgaaaatggttttaggttcgaaaacaaaggcaagacagccacccactgtgcctcgcaaggcaaacactcaggcatacacaccaactcaggcccctctgcatagagccagggaaagaaaagcacccaatatgggatcctccgggggtcctgagaacacgccaggctgcccctcctttttcagcggtgtagctgccatcagcaaagaatagaaaagtctttaatgctaaaaactggacatgcttgagatcagtggtctgtgtccagttcccactctcctggcctcttatcaagtctttctcgattcactgggcccctgtgtggggggacggccaccaagccatccttttgtaccctagccacacgtggcagacgtttc

SEQ ID NO: 151709 - DNA, 407 bp, Homo sapiens; identical to SEQ ID NO: 70448
  chr5:159686735-159687142
  hypo

SEQ ID NO: 151710 - DNA, 461 bp, Homo sapiens
  chr5:159691932-159692393
  hypo
aaaattttaaatatacgaaaagagagagagaaatgttactataatgaactcccttgaatgttattacccagtgccaacagtcatcagcatttacactgcctttaaaaaagcccgaaaacttaaaacaaaaaggtaaccagcacagaacaaggttctgtagaaattcagcattctctcattcctgttgcccaggcttgagcgcggcccacccccaactagacagaccgtgttctgcactgtgccccacgaatgcccccaaaagtccttcatgcgtgggaagatgcctactgatggacccattcagggctacctgctgccctttcaggtgcttaacccaggctcagagattaggccaaagtttcctggctaaagagaaacaggttttaaagccacagctggctacttttcttccctaaagaaatgcaatgccggccaggtgtggtggctcacgcctgtaatcc

SEQ ID NO: 151711 - DNA, 440 bp, Homo sapiens; identical to SEQ ID NO: 70450
  chr5:159707381-159707821
  hypo

SEQ ID NO: 151712 - DNA, 29 bp, Homo sapiens
  chr5:159732104-159732133
  hypo
gccaccgcgcctggccaggtcactgattt

SEQ ID NO: 151713 - DNA, 569 bp, Homo sapiens
  chr5:159776167-159776736
  hypo
ggcatgtctatacctcgttggggtcatcctggtcggcatagattaggaagcccgtaaagaggctgtctgtccagtaagggtcatagaagagcccgttctgctctgagtagaagatctgcagccaaacttcgtcaccctgcttgagagccaggatggtggagcctgaggccacatcgtggttgccggtgttggcatcaaaggtccggatgcggtactggccgttgtgcaccaggccgatggccaggtgcttgttggccagcgtgatgtcgtaggtgaagtagtagatcccaggcacgccgcagacgaacttgccgctggaagcattgtagtggccaccctcgttcatcagaatcttgtcaaacttgatgggcagccgctcccgtgggtagctcttggtcactgccaccgagaaagctgacttggtatggccactgccacagctgcaggggcctgggaggcctggctcccccttcttgcccttgggccccttcttgcctggtgtgccatgcttcccgggggtaccgttgacccccttggggccacgggggccagcccgcccaatggccccg

SEQ ID NO: 151714 - DNA, 174 bp, Homo sapiens; identical to SEQ ID NO: 4360
  chr5:159826415-159826589
  hypo

SEQ ID NO: 151715 - DNA, 31 bp, Homo sapiens
  chr5:160498376-160498407
  hypo
cgaataggaacagctccggtctgcagtgcca

SEQ ID NO: 151716 - DNA, 857 bp, Homo sapiens; identical to SEQ ID NO: 42238
  chr5:160974540-160975397
  hypo

SEQ ID NO: 151717 - DNA, 31 bp, Homo sapiens; identical to SEQ ID NO: 19813
  chr5:165055690-165055721
  hypo

SEQ ID NO: 151718 - DNA, 31 bp, Homo sapiens; identical to SEQ ID NO: 19814
  chr5:165210728-165210759
  hypo

SEQ ID NO: 151719 - DNA, 31 bp, Homo sapiens; identical to SEQ ID NO: 19815
  chr5:166318065-166318096
  hypo

SEQ ID NO: 151720 - DNA, 33 bp, Homo sapiens; identical to SEQ ID NO: 70458
  chr5:166374190-166374223
  hypo

SEQ ID NO: 151721 - DNA, 104 bp, Homo sapiens; identical to SEQ ID NO: 19816
  chr5:166477137-166477241
  hypo

SEQ ID NO: 151722 - DNA, 30 bp, Homo sapiens
  chr5:166524147-166524177
  hypo
gtgggtgtttgccggcgctagtcttgtggc

SEQ ID NO: 151723 - DNA, 30 bp, Homo sapiens
  chr5:167266395-167266425
  hypo
tgcagaacagtaaatcggtgaacctgtcat

SEQ ID NO: 151724 - DNA, 8 bp, Homo sapiens
  chr5:167372643-167372651
  hypo
gtaattcc

SEQ ID NO: 151725 - DNA, 230 bp, Homo sapiens
  chr5:167531534-167531764
  hypo
cccatcacatccaagcgaccgggtatgtgtccaagtgacagaaatgcggatttactctcttgacctcacactgcgcctcccgtgccctcagatgtgcagtgcaaatggcagctccttgtcttcttataaacctgccagtctgcatcaggcatctgaagacatccttgcagtgaatggaggaatcagtcagcatgcgtttgcaagagcgtttattccgcagccctcacaat

SEQ ID NO: 151726 - DNA, 156 bp, Homo sapiens; identical to SEQ ID NO: 70460
  chr5:167536297-167536453
  hypo

SEQ ID NO: 151727 - DNA, 30 bp, Homo sapiens; identical to SEQ ID NO: 70461
  chr5:167615243-167615273
  hypo

SEQ ID NO: 151728 - DNA, 57 bp, Homo sapiens; identical to SEQ ID NO: 19817
  chr5:167652912-167652969
  hypo

SEQ ID NO: 151729 - DNA, 49 bp, Homo sapiens; identical to SEQ ID NO: 70463
  chr5:167671585-167671634
  hypo

SEQ ID NO: 151730 - DNA, 33 bp, Homo sapiens; identical to SEQ ID NO: 70464
  chr5:167680719-167680752
  hypo

SEQ ID NO: 151731 - DNA, 537 bp, Homo sapiens
  chr5:167689118-167689655
  hypo
ggtcattactaaaaagctccacgccagcatccgagagaaagcaggtcactggtttgccaccaccacgcccatcattggcaaaggcatcatgtttgccatcaaagaagggcgggtgaccacgggcgtgtccagcatcgccagcgaagatagccgcaaggtggcatctgtgctgaacaacgcctactacctggacaagatgcactacagcatcgagggcaaggacacccactactttgtgaagattggctcagccgatggcgacctggtcacactaggcaccaccatcggccgcaaggtgctagagagcggggtgaacgtgaccgtgtcccagcccacgctgctggtcaacggcaggactcgaaggttcacgaacattgagttccagtactccacgctgctgctcagcatccgctatggcctcacccccgacaccctggacgaagagaaggcccgcgtcctggaccaggcgagacagagggccctgggcacggcctgggccaaggagcagcagaaagccagggacgggagagaggggag

SEQ ID NO: 151732 - DNA, 36 bp, Homo sapiens; identical to SEQ ID NO: 70466
  chr5:167698410-167698446
  hypo

SEQ ID NO: 151733 - DNA, 224 bp, Homo sapiens; identical to SEQ ID NO: 4371
  chr5:167718507-167718731
  hypo

SEQ ID NO: 151734 - DNA, 378 bp, Homo sapiens; identical to SEQ ID NO: 4372
  chr5:167718951-167719329
  hypo

SEQ ID NO: 151735 - DNA, 150 bp, Homo sapiens; identical to SEQ ID NO: 70469
  chr5:167729412-167729562
  hypo

SEQ ID NO: 151736 - DNA, 30 bp, Homo sapiens
  chr5:167791439-167791469
  hypo
ctgtggctcaggccgcgggtagcgttacag

SEQ ID NO: 151737 - DNA, 103 bp, Homo sapiens; identical to SEQ ID NO: 70470
  chr5:167825007-167825110
  hypo

SEQ ID NO: 151738 - DNA, 31 bp, Homo sapiens; identical to SEQ ID NO: 70471
  chr5:167833667-167833698
  hypo

SEQ ID NO: 151739 - DNA, 43 bp, Homo sapiens; identical to SEQ ID NO: 19821
  chr5:167847700-167847743
  hypo

SEQ ID NO: 151740 - DNA, 179 bp, Homo sapiens; identical to SEQ ID NO: 70473
  chr5:167853640-167853819
  hypo

SEQ ID NO: 151741 - DNA, 31 bp, Homo sapiens; identical to SEQ ID NO: 19823
  chr5:167858405-167858436
  hypo

SEQ ID NO: 151742 - DNA, 45 bp, Homo sapiens; identical to SEQ ID NO: 19824
  chr5:167897878-167897923
  hypo

SEQ ID NO: 151743 - DNA, 238 bp, Homo sapiens; identical to SEQ ID NO: 19825
  chr5:168112660-168112898
  hypo

SEQ ID NO: 151744 - DNA, 43 bp, Homo sapiens; identical to SEQ ID NO: 19826
  chr5:168124522-168124565
  hypo

SEQ ID NO: 151745 - DNA, 30 bp, Homo sapiens; identical to SEQ ID NO: 70478
  chr5:168174920-168174950
  hypo

SEQ ID NO: 151746 - DNA, 84 bp, Homo sapiens; identical to SEQ ID NO: 19827
  chr5:168184344-168184428
  hypo

SEQ ID NO: 151747 - DNA, 23 bp, Homo sapiens
  chr5:168184727-168184750
  hypo
ccgtgcccaacccaacccctgtt

SEQ ID NO: 151748 - DNA, 320 bp, Homo sapiens; identical to SEQ ID NO: 19829
  chr5:168189440-168189760
  hypo

SEQ ID NO: 151749 - DNA, 41 bp, Homo sapiens
  chr5:168192428-168192469
  hypo
atgtgatattttatacgagtgggagccagaaatgttaataa

SEQ ID NO: 151750 - DNA, 346 bp, Homo sapiens; identical to SEQ ID NO: 19830
  chr5:168195070-168195416
  hypo

SEQ ID NO: 151751 - DNA, 306 bp, Homo sapiens; identical to SEQ ID NO: 19831
  chr5:168199737-168200043
  hypo

SEQ ID NO: 151752 - DNA, 30 bp, Homo sapiens; identical to SEQ ID NO: 70484
  chr5:168202507-168202537
  hypo

SEQ ID NO: 151753 - DNA, 30 bp, Homo sapiens; identical to SEQ ID NO: 70485
  chr5:168203236-168203266
  hypo

SEQ ID NO: 151754 - DNA, 30 bp, Homo sapiens; identical to SEQ ID NO: 19832
  chr5:168233452-168233482
  hypo

SEQ ID NO: 151755 - DNA, 126 bp, Homo sapiens; identical to SEQ ID NO: 19833
  chr5:168244375-168244501
  hypo

SEQ ID NO: 151756 - DNA, 112 bp, Homo sapiens
  chr5:168250181-168250293
  hypo
aggtttgacaagcagcgtagagtgctgcactttgggcgtgaggtagggagaaaatgggagagatgcacagacttcttactcacagagttcggatcttcggcatgtggttgaa

SEQ ID NO: 151757 - DNA, 17 bp, Homo sapiens
  chr5:168250967-168250984
  hypo
tttgagacggggtttcg

SEQ ID NO: 151758 - DNA, 30 bp, Homo sapiens
  chr5:168251293-168251323
  hypo
tccggtgcatctctacgaccatgaacggag

SEQ ID NO: 151759 - DNA, 189 bp, Homo sapiens
  chr5:168273344-168273533
  hypo
ctcaccacatcttctcgacccctaattcttctggagcctttattcacacgggtttgctaagcctctttttcatagatttcttgcagtgttggggccgccgactccctgcagaggttctatgaaggcagtctagtcctgctgcccagcttctagatttatcatcagcttagaggccggtgaatcaacaac

SEQ ID NO: 151760 - DNA, 186 bp, Homo sapiens; identical to SEQ ID NO: 19834
  chr5:168284803-168284989
  hypo

SEQ ID NO: 151761 - DNA, 30 bp, Homo sapiens
  chr5:168285206-168285236
  hypo
ggagaaagccatccccggggatagtcccaa

SEQ ID NO: 151762 - DNA, 153 bp, Homo sapiens
  chr5:168296873-168297026
  hypo
tgtgcctggggactgcgtacagagagaactttaaaggagaatgttaacaatggcaaataatagctgtcggtgtaaatggacacatcgtaacacatccatttatagagctgaatgcttgtggcagacacagaagtgctccgtgccggcacggca

SEQ ID NO: 151763 - DNA, 30 bp, Homo sapiens
  chr5:168560507-168560537
  hypo
tgagcgacatgctgacgtatcaaaggatgc

SEQ ID NO: 151764 - DNA, 825 bp, Homo sapiens; identical to SEQ ID NO: 112424
  chr5:169063980-169064805
  hypo

SEQ ID NO: 151765 - DNA, 96 bp, Homo sapiens
  chr5:169116209-169116305
  hypo
tgtcaggtcccttggcagtaacgggctgccactcttcttcccacagtgagaactacctagtgcgatggggcagccggggcttccctaaggagattg

SEQ ID NO: 151766 - DNA, 30 bp, Homo sapiens
  chr5:169116888-169116918
  hypo
tagaaatgttgaaatcgattgttatttgga

SEQ ID NO: 151767 - DNA, 175 bp, Homo sapiens
  chr5:169157435-169157610
  hypo
agatgaatttggacagcgagtcagaggctaccatgcagggattattctaggcacattgcaaactgctcagaggggatttaactaaaaacgcttgtatggcaggtagcacgtataatacttgggtgacaagaagggtttgtgtcatggaccacacgtgtgtcgtaacctctacaag

SEQ ID NO: 151768 - DNA, 30 bp, Homo sapiens
  chr5:169276405-169276435
  hypo
ttgtacactcctaagcgatgaataactaag

SEQ ID NO: 151769 - DNA, 30 bp, Homo sapiens; identical to SEQ ID NO: 19836
  chr5:169361336-169361366
  hypo

SEQ ID NO: 151770 - DNA, 30 bp, Homo sapiens
  chr5:169366633-169366663
  hypo
acattaggatgggtgcgatgccactaggag

SEQ ID NO: 151771 - DNA, 30 bp, Homo sapiens
  chr5:169477280-169477310
  hypo
gggaaggaatatgagcgaagagaagatttc

SEQ ID NO: 151772 - DNA, 320 bp, Homo sapiens
  chr5:169484410-169484730
  hypo
ttcttaagggtaaggtgagagcgtgtttctgggtcttgcaatatttattctgctttcgggtagatgggaggcccggggacctggctgggtttctgccaagcttctccgatacccaggtttcataaatgtgtttgttgctttcctgcccttgccacccctctgcccacggacagtccatgtggattgagagaacctccttcgtgactgcatacaagctgccggggatcctgcgctggtttgaggtggtgcacatgtcgcaggtgagtctgggacattcgtggcagggccacccttcctccgatgggcagggcacagccagt

SEQ ID NO: 151773 - DNA, 30 bp, Homo sapiens; identical to SEQ ID NO: 19838
  chr5:169532928-169532958
  hypo

SEQ ID NO: 151774 - DNA, 951 bp, Homo sapiens
  chr5:169659748-169660699
  hypo
accgctatcctgtgcgactcaaatgcagataagggttgcaaaagcctggcacactgggggtaaggaatgtcagtgctttttccgccaacgtggccgcgcgagtcagttgtaacccggcatccagaaccttctccgtaggggccttgcctgggactacaactcccaggatgccgcaggcggagaagctggccaatcagggggcgcggcttcgccttcaccgtcggctccctgctcctgtcagaacctcggtgacggttggccaggtgggtagtgacggctgctcggtcttgaaggatcctaatctggtttgggagggtgaagaccgctgaaatttccaggctgcccgaggctccaccttccaccacccaacgggtgggcggtgggccgggctggcctcggagcctctccctgggtgtcggttgggccgagaaggggacggttggctgggtgggcctggcggctggtggctgtccgtaggccggggtcactctgagggcattttacattaccctaatcctgtccacttggcaagaaacttagtaagccccaaaggttcattccaaatcctgtctgggagggcgaggactgtggaaacttccagatgcctcaggctccatctttagctgttgagcgggtggttgggccgctcatggccccaaagatctggggggtcttcatgggcagttgggtcgctgagggccctaaagatctggggctcctcccaggtgtcagttgggccaaggaggaggctgggctttcagagtagaacctgcggtgctaacgatggctctgcagggctgcgggctgagggcctgggcggcgtcctgtggcccggagatggcgctctagtggtatcaggccttgagtcagcgacatcctggcttctgaccccccattcctatggcccctacagtctggtctccgcttccccactcccggtgaattgctgtt

SEQ ID NO: 151775 - DNA, 30 bp, Homo sapiens
  chr5:169731600-169731630
  hypo
gtccttttgagtaggcgaacgcctccatat

SEQ ID NO: 151776 - DNA, 31 bp, Homo sapiens; identical to SEQ ID NO: 19839
  chr5:169732124-169732155
  hypo

SEQ ID NO: 151777 - DNA, 30 bp, Homo sapiens; identical to SEQ ID NO: 19840
  chr5:169805568-169805598
  hypo

SEQ ID NO: 151778 - DNA, 31 bp, Homo sapiens; identical to SEQ ID NO: 70497
  chr5:169821168-169821199
  hypo

SEQ ID NO: 151779 - DNA, 30 bp, Homo sapiens
  chr5:169877733-169877763
  hypo
ctggccaacttctatcggttttcagaatgt

SEQ ID NO: 151780 - DNA, 280 bp, Homo sapiens; identical to SEQ ID NO: 112425
  chr5:169930890-169931170
  hypo

SEQ ID NO: 151781 - DNA, 103 bp, Homo sapiens; identical to SEQ ID NO: 112426
  chr5:169931223-169931326
  hypo

SEQ ID NO: 151782 - DNA, 167 bp, Homo sapiens; identical to SEQ ID NO: 112427
  chr5:169931353-169931520
  hypo

SEQ ID NO: 151783 - DNA, 30 bp, Homo sapiens
  chr5:170059525-170059555
  hypo
agcgcggctctgctgcgtggccctgggcaa

SEQ ID NO: 151784 - DNA, 376 bp, Homo sapiens
  chr5:170059921-170060297
  hypo
tgcacagcgttccctcgcgtgggggtgggttggggcttgagcacgggttgaacctggaagaggccatttccctcccttctccccgaggaataattgtgaattcctgggtctcagaggaaacatccgctttggtggtcagaaaggacatcctcctttgagcagggggagagcagagggaagggggttgcgagggtcacgccttccccaggcattctcggggtctctccagcaaggatggaggcggccaggggcttgggcggtgtggggcgccacctggcgtccagaagaggtaagacaggcggagcgggaccctccgaagtgggaggaggacgctggtcaggggaggaggggaccgcgagagcgagagcggacattc

SEQ ID NO: 151785 - DNA, 31 bp, Homo sapiens; identical to SEQ ID NO: 70499
  chr5:170169587-170169618
  hypo

SEQ ID NO: 151786 - DNA, 707 bp, Homo sapiens; identical to SEQ ID NO: 112429
  chr5:170171108-170171815
  hypo

SEQ ID NO: 151787 - DNA, 19 bp, Homo sapiens
  chr5:170618414-170618433
  hypo
gggcgcagtggctcacgcc

SEQ ID NO: 151788 - DNA, 19 bp, Homo sapiens
  chr5:170618672-170618691
  hypo
agagcgagactccgtctca

SEQ ID NO: 151789 - DNA, 30 bp, Homo sapiens; identical to SEQ ID NO: 19842
  chr5:170678690-170678720
  hypo

SEQ ID NO: 151790 - DNA, 31 bp, Homo sapiens; identical to SEQ ID NO: 70503
  chr5:170680140-170680171
  hypo

SEQ ID NO: 151791 - DNA, 31 bp, Homo sapiens; identical to SEQ ID NO: 19843
  chr5:170758643-170758674
  hypo

SEQ ID NO: 151792 - DNA, 30 bp, Homo sapiens; identical to SEQ ID NO: 4390
  chr5:170819918-170819948
  hypo

SEQ ID NO: 151793 - DNA, 30 bp, Homo sapiens; identical to SEQ ID NO: 4391
  chr5:170834697-170834727
  hypo

SEQ ID NO: 151794 - DNA, 30 bp, Homo sapiens; identical to SEQ ID NO: 4392
  chr5:170837529-170837559
  hypo

SEQ ID NO: 151795 - DNA, 30 bp, Homo sapiens; identical to SEQ ID NO: 4393
  chr5:170837858-170837888
  hypo

SEQ ID NO: 151796 - DNA, 85 bp, Homo sapiens; identical to SEQ ID NO: 19848
  chr5:170863091-170863176
  hypo

SEQ ID NO: 151797 - DNA, 30 bp, Homo sapiens; identical to SEQ ID NO: 70510
  chr5:170880220-170880250
  hypo

SEQ ID NO: 151798 - DNA, 186 bp, Homo sapiens; identical to SEQ ID NO: 70511
  chr5:170883646-170883832
  hypo

SEQ ID NO: 151799 - DNA, 30 bp, Homo sapiens; identical to SEQ ID NO: 70512
  chr5:170884263-170884293
  hypo

SEQ ID NO: 151800 - DNA, 179 bp, Homo sapiens
  chr5:170894272-170894451
  hypo
ctaaggactgtggcccggatcagtggttctcacctggggcgattttgttccccagggccatttcggcagtgcgtggagacaacgttggttgtctccaactccccagttgtcacaactgggagccgggggactgccactggcatctagtggagagagtccagggacgctgccgaacatcc

SEQ ID NO: 151801 - DNA, 30 bp, Homo sapiens; identical to SEQ ID NO: 19850
  chr5:170919700-170919730
  hypo

SEQ ID NO: 151802 - DNA, 40 bp, Homo sapiens; identical to SEQ ID NO: 70514
  chr5:170937769-170937809
  hypo

SEQ ID NO: 151803 - DNA, 207 bp, Homo sapiens
  chr5:170972876-170973083
  hypo
gctctgaggaaagttcgtcattgctcttctaccactgaggaccagcggctcagaggtcagttccttgcccacggccacatagccagccggtctcaatccaaaacccagggttctaaatcctcgggattactgagcagcggtgtgtccagaactgtgctgttcaccctgagaggggcaaagggaaatattacccgggccaccctgggg

SEQ ID NO: 151804 - DNA, 30 bp, Homo sapiens
  chr5:170973529-170973559
  hypo
accgatggggattcccgtgtgagaaaaaaa

SEQ ID NO: 151805 - DNA, 30 bp, Homo sapiens
  chr5:171016029-171016059
  hypo
aggaacacactctgacggtctctactatgt

SEQ ID NO: 151806 - DNA, 30 bp, Homo sapiens
  chr5:171016612-171016642
  hypo
aggactgactcaatacgcatggaaatcaga

SEQ ID NO: 151807 - DNA, 30 bp, Homo sapiens; identical to SEQ ID NO: 4396
  chr5:171022582-171022612
  hypo

SEQ ID NO: 151808 - DNA, 30 bp, Homo sapiens
  chr5:171094730-171094760
  hypo
gcatccaggtaatcccggccttcgagcggg

SEQ ID NO: 151809 - DNA, 132 bp, Homo sapiens
  chr5:171095092-171095224
  hypo
tctccggcctcggggcgggcgtccgggcccgcgccgtctgaggttagcgggagcgcgtaccctgggaggtggccagaagccctacattgaaatatcacagtgggtcagagcaggggtcgcaaactccagtgc

SEQ ID NO: 151810 - DNA, 155 bp, Homo sapiens
  chr5:171209463-171209618
  hypo
cagtgccggccttgccgggcagttaggagaattagatgaaataacgtgtggaagggacttaccctgggtcaggcgcacagtaggtacttcgttcatgacacccactaattccgatacccttccctagccaccccggacctcggcttcttcaaaac

SEQ ID NO: 151811 - DNA, 30 bp, Homo sapiens; identical to SEQ ID NO: 70516
  chr5:171341739-171341769
  hypo

SEQ ID NO: 151812 - DNA, 462 bp, Homo sapiens; identical to SEQ ID NO: 70517
  chr5:171351589-171352051
  hypo

SEQ ID NO: 151813 - DNA, 27 bp, Homo sapiens
  chr5:171367903-171367930
  hypo
acagacgctgacctgaaaaggcaccca

SEQ ID NO: 151814 - DNA, 30 bp, Homo sapiens; identical to SEQ ID NO: 19852
  chr5:171382191-171382221
  hypo

SEQ ID NO: 151815 - DNA, 43 bp, Homo sapiens
  chr5:171395983-171396026
  hypo
acggaaggggccgggcgtggtggctcatgcctgtaatcctagc

SEQ ID NO: 151816 - DNA, 28 bp, Homo sapiens
  chr5:171402082-171402110
  hypo
ccaccacgcctggcaatactatgtgacc

SEQ ID NO: 151817 - DNA, 30 bp, Homo sapiens; identical to SEQ ID NO: 70520
  chr5:171410135-171410165
  hypo

SEQ ID NO: 151818 - DNA, 30 bp, Homo sapiens; identical to SEQ ID NO: 70521
  chr5:171410553-171410583
  hypo

SEQ ID NO: 151819 - DNA, 30 bp, Homo sapiens; identical to SEQ ID NO: 70522
  chr5:171427595-171427625
  hypo

SEQ ID NO: 151820 - DNA, 267 bp, Homo sapiens; identical to SEQ ID NO: 70523
  chr5:171470997-171471264
  hypo

SEQ ID NO: 151821 - DNA, 315 bp, Homo sapiens
  chr5:171478659-171478974
  hypo
atgggtcacgagggacgttgcaaaggggctagtgacagagaagaaacccagcagaaggtgggcctaggaggacaaggcaggcgaggaagagagtgactggcagcactggctgccaccaggaggtcaagtccagccagccgtatccatgcgagtcagccaccaggatgttggtattgaccatgccagcagcggctgcagtgggctgagaaaggaatttctcagtgggtggaggaagaaattgtgacagggcttcgcagagaaagagagagacagggcagtaaagaaagatgtgggactgagcgagggcatggggtt

SEQ ID NO: 151822 - DNA, 219 bp, Homo sapiens
  chr5:171479924-171480143
  hypo
aaagttaccttcttgcgcggccgaagcttgtcccgccattccttcaggttctggttatggctctcatccagggccttcagtttctgggtttcgtgctctaccaggaggtggcacttttcattctggaacagattccaggcagaacaggtgagaaatcagaagacgcaggccctgaagactgagacacacctcacgctgtggctacgagggcaccagcat

SEQ ID NO: 151823 - DNA, 30 bp, Homo sapiens; identical to SEQ ID NO: 70524
  chr5:171481205-171481235
  hypo

SEQ ID NO: 151824 - DNA, 277 bp, Homo sapiens; identical to SEQ ID NO: 19853
  chr5:171523261-171523538
  hypo

SEQ ID NO: 151825 - DNA, 30 bp, Homo sapiens; identical to SEQ ID NO: 70526
  chr5:171528887-171528917
  hypo

SEQ ID NO: 151826 - DNA, 82 bp, Homo sapiens; identical to SEQ ID NO: 70527
  chr5:171529692-171529774
  hypo

SEQ ID NO: 151827 - DNA, 318 bp, Homo sapiens
  chr5:171533430-171533748
  hypo
aagggaaaaagaggcacgaagggcccgggggggctcagaaacgcctgaagacccccaggccccaacctctcctttggagctagcagcaccaggagaacgctaccactgcacctccccagccccgtccaccacatattccagccctaatcccggcgcaggcaccccggcaggtggccctgcccctgcccctcaccacttagagggcgtgagcagcgtgggagggtccgacttggcgatctttagcaggacccgcatggggttgagctcgtggtgtggcggctcgatctgggccatctcaatcagcgtgatgcccaggga

SEQ ID NO: 151828 - DNA, 43 bp, Homo sapiens
  chr5:171534419-171534462
  hypo
tactgttcaccttcacggtccccatccccggccctcaatacat

SEQ ID NO: 151829 - DNA, 86 bp, Homo sapiens; identical to SEQ ID NO: 42294
  chr5:171541757-171541843
  hypo

SEQ ID NO: 151830 - DNA, 30 bp, Homo sapiens
  chr5:171568883-171568913
  hypo
cagctgtcgtggtgccgtgtaagggttggg

SEQ ID NO: 151831 - DNA, 30 bp, Homo sapiens
  chr5:171569503-171569533
  hypo
cggtatccctatctacgacacctaatgcaa

SEQ ID NO: 151832 - DNA, 30 bp, Homo sapiens; identical to SEQ ID NO: 19855
  chr5:171682601-171682631
  hypo

SEQ ID NO: 151833 - DNA, 25 bp, Homo sapiens
  chr5:171693220-171693245
  hypo
caccgcacctggccagcaccacaca

SEQ ID NO: 151834 - DNA, 30 bp, Homo sapiens
  chr5:171711864-171711894
  hypo
aacaccctgccttttcgaatctagaatttg

SEQ ID NO: 151835 - DNA, 46 bp, Homo sapiens; identical to SEQ ID NO: 70532
  chr5:171724014-171724060
  hypo

SEQ ID NO: 151836 - DNA, 31 bp, Homo sapiens; identical to SEQ ID NO: 70533
  chr5:171762546-171762577
  hypo

SEQ ID NO: 151837 - DNA, 30 bp, Homo sapiens
  chr5:171765293-171765323
  hypo
tgataaattaagaggcgtattaaatacgtg

SEQ ID NO: 151838 - DNA, 30 bp, Homo sapiens
  chr5:171765695-171765725
  hypo
tggcttttggagggacgaggagagcacggc

SEQ ID NO: 151839 - DNA, 507 bp, Homo sapiens; identical to SEQ ID NO: 19857
  chr5:171766369-171766876
  hypo

SEQ ID NO: 151840 - DNA, 73 bp, Homo sapiens; identical to SEQ ID NO: 70535
  chr5:171769328-171769401
  hypo

SEQ ID NO: 151841 - DNA, 93 bp, Homo sapiens; identical to SEQ ID NO: 19859
  chr5:171777274-171777367
  hypo

SEQ ID NO: 151842 - DNA, 18 bp, Homo sapiens
  chr5:171782457-171782475
  hypo
acccgggtcccagaaaga

SEQ ID NO: 151843 - DNA, 110 bp, Homo sapiens; identical to SEQ ID NO: 70538
  chr5:171808699-171808809
  hypo

SEQ ID NO: 151844 - DNA, 25 bp, Homo sapiens
  chr5:171818129-171818154
  hypo
ccaccacgcccggcttgcagcttcc

SEQ ID NO: 151845 - DNA, 202 bp, Homo sapiens; identical to SEQ ID NO: 70540
  chr5:171821578-171821780
  hypo

SEQ ID NO: 151846 - DNA, 230 bp, Homo sapiens
  chr5:171846000-171846230
  hypo
acggctgacagctaacgcgcttactgagccaggtgcgtccgcttaaccagcacaataaatgcacgaggaaggcactttcattcctactatgcagatgaggaggctgaggctcagaaacatacagcggtgaccccaagctgagccctgaacaggcaaagctgagatttgcacccaggtctgtctgactgaaagccaaggtcttaagccttaggctgcgctggaacagggaa

SEQ ID NO: 151847 - DNA, 45 bp, Homo sapiens; identical to SEQ ID NO: 70541
  chr5:171858872-171858917
  hypo

SEQ ID NO: 151848 - DNA, 137 bp, Homo sapiens
  chr5:171859486-171859623
  hypo
gtgcacgttgggtgacgcaaatttttcaccgctctgcacgtgcccatgtccgaaaatgcccacaaaagtgcttcgagtatcgcttttgagttacaaataaattttagcaagtaggcaaattcgcaaacatgaaatct

SEQ ID NO: 151849 - DNA, 31 bp, Homo sapiens; identical to SEQ ID NO: 19863
  chr5:171863585-171863616
  hypo

SEQ ID NO: 151850 - DNA, 188 bp, Homo sapiens; identical to SEQ ID NO: 70544
  chr5:171867142-171867330
  hypo

SEQ ID NO: 151851 - DNA, 57 bp, Homo sapiens
  chr5:171890093-171890150
  hypo
agaggcaccagggcacgtggaactttgcagggatcgtgggaacgctggctttgactc

SEQ ID NO: 151852 - DNA, 31 bp, Homo sapiens; identical to SEQ ID NO: 70545
  chr5:171892635-171892666
  hypo

SEQ ID NO: 151853 - DNA, 72 bp, Homo sapiens
  chr5:171909810-171909882
  hypo
tcctactcaccctcccgcatcgcctcttcccgctgctgctcaagctcatatgtcttacgctccggaaccggc

SEQ ID NO: 151854 - DNA, 334 bp, Homo sapiens
  chr5:171916859-171917193
  hypo
caggctctccctggagcgggccagctcagctggggcataggcacttgaggtggccaggccagtcacaagtccaccgtggagtggggtcagtcaatttccctgactgcctcaaggacagtgggcggcaaaagccctgcgcccctgaggcaacaggaacatggagccttctccgtgtgcccgcgaggttggaagatgaagcgggtgtcggatcataggtgaggatggaggctcctgcgtccacacgcaccccacagtcgggctacctgacctggggggagaggtgcaactaccccagtgctttaaatatcaccctgtggtggccgggtgtggtggc

SEQ ID NO: 151855 - DNA, 285 bp, Homo sapiens
  chr5:171981547-171981832
  hypo
gcagcttaagtcgcccgttataaatgtctccccggcacagagttcaagtttctcacgtataatccctgcccccattaggcccggtaatgcctgtgagcaaggatgtataatacctctcccccatcggctgccagctggccctcaagatttacgtgtggctcctgtttttcctcatgcaaacgctgcccgtcggttccttccatctttcctaataagtcatcttcctcacccttggtaatctctctcacttttccctggaccgcctccagccggccttcgtttatg

SEQ ID NO: 151856 - DNA, 66 bp, Homo sapiens; identical to SEQ ID NO: 70547
  chr5:172016614-172016680
  hypo

SEQ ID NO: 151857 - DNA, 33 bp, Homo sapiens; identical to SEQ ID NO: 19865
  chr5:172062314-172062347
  hypo

SEQ ID NO: 151858 - DNA, 378 bp, Homo sapiens
  chr5:172074241-172074619
  hypo
gcagagagggaagagggagggcgccaggtcgcagcccgacaggtagcacacgctcacctgggcagtgtcgcggggtggtccgagcttctgcacacctgccctgcactaggccctttattccatcccattgaagccgtcatgagagccttgcgaggcagtcttctcatgtcacagaaggggaaactgaggctcagaggggtagtgagacctgcccggcccaggtggccaggaagtggcagagtgaattggatcccaggcacgctgggctccacaccccttcccctccatcccacggggcactgcaccctggggcctcttgcggctcctcttgctgacttgctgctgccccttgtcctcgtcctgagcacctgagcccca

SEQ ID NO: 151859 - DNA, 30 bp, Homo sapiens; identical to SEQ ID NO: 70550
  chr5:172093498-172093528
  hypo

SEQ ID NO: 151860 - DNA, 95 bp, Homo sapiens; identical to SEQ ID NO: 19867
  chr5:172097650-172097745
  hypo

SEQ ID NO: 151861 - DNA, 28 bp, Homo sapiens
  chr5:172100845-172100873
  hypo
agaaattcaaatgtggctacacgcggtg

SEQ ID NO: 151862 - DNA, 40 bp, Homo sapiens; identical to SEQ ID NO: 19868
  chr5:172105003-172105043
  hypo

SEQ ID NO: 151863 - DNA, 30 bp, Homo sapiens; identical to SEQ ID NO: 70554
  chr5:172110196-172110226
  hypo

SEQ ID NO: 151864 - DNA, 484 bp, Homo sapiens
  chr5:172113598-172114082
  hypo
gaagccctgcattctcggggttgccccaacagagcccacctgagagagacattgttaacatatgtcctcttctccctttcggcagtgacggcccccagctccccgctgagccccccggtgtcccccgtgttctccccaccggagccggcaggcatcaagaatggcgagtgcacggtgtgcttcgatggcgaggtggacacggtcatctacacgtgtggacacatgtgcctgtgccacagctgcggcctgcggctcaagcgacaggcccgggcctgctgccccatctgccggcggcccatcaaggacgtcattaagatctacaggccatagcctagcctgcccacgggccttggccggtgcaaggtcacctttctgaaggccccctgggctgggcaaccacatggctgccagggagtccacgggcagcggccatctctccagtggtgggcaaggtgtgacagtcgtggagcgaggcccacagggc

SEQ ID NO: 151865 - DNA, 30 bp, Homo sapiens
  chr5:172114350-172114380
  hypo
ggctccgggaggagacgtgcaatccggagc

SEQ ID NO: 151866 - DNA, 294 bp, Homo sapiens
  chr5:172117801-172118095
  hypo
ccccagaggccccgccggttggtgatcaccctcaggtcctgccagggagacacagtgaggaggttggctaattgctgctttcaggccctggaaatcagtcgccaaggcccaggagaaccccggtgagtccgtccagttgaggcagaggcaataacctcccattgctcggccctgcgcctgccccagtcctggcagggggcaccggctcaggaacatgcggcctcctggcatttctcggtatttaactgtctcgctgtcttatccgagtccctaatgaaacgacttgtgtgacaa

SEQ ID NO: 151867 - DNA, 217 bp, Homo sapiens
  chr5:172123412-172123629
  hypo
gacgcggcgcatccccggctcccaacacagggtctaccaaacaggagagtcttagtgtgtacacccctcacccacacccagcgtggaatttctggcattagcacacctcccttccacaaagaatgaaccggagtggtgatctgctggtggggtcgtgccaggcctcggggctggcccaggcccccgccccttgcttgtcttggttcccagtcaagag

SEQ ID NO: 151868 - DNA, 30 bp, Homo sapiens
  chr5:172158340-172158370
  hypo
cgacctaggcagacgcgctgttatcatccc

SEQ ID NO: 151869 - DNA, 30 bp, Homo sapiens; identical to SEQ ID NO: 70557
  chr5:172189359-172189389
  hypo

SEQ ID NO: 151870 - DNA, 125 bp, Homo sapiens
  chr5:172191066-172191191
  hypo
aagcgttgtctgatgcgcgcccagggtgtcactttggtgaggcagcccacttttgtgggcgctcaagcacgagcgcccctccggagcgctccagagccactccggaggggcgctcatgcttgagg

SEQ ID NO: 151871 - DNA, 30 bp, Homo sapiens
  chr5:172209900-172209930
  hypo
gctgacgcacgctgccgtatggatgaacct

SEQ ID NO: 151872 - DNA, 31 bp, Homo sapiens; identical to SEQ ID NO: 19871
  chr5:172234014-172234045
  hypo

SEQ ID NO: 151873 - DNA, 121 bp, Homo sapiens; identical to SEQ ID NO: 19872
  chr5:172235650-172235771
  hypo

SEQ ID NO: 151874 - DNA, 200 bp, Homo sapiens; identical to SEQ ID NO: 19873
  chr5:172264178-172264378
  hypo

SEQ ID NO: 151875 - DNA, 30 bp, Homo sapiens
  chr5:172285445-172285475
  hypo
ggggccggtggtctgcgcatctgcacacta

SEQ ID NO: 151876 - DNA, 98 bp, Homo sapiens; identical to SEQ ID NO: 70561
  chr5:172307698-172307796
  hypo

SEQ ID NO: 151877 - DNA, 30 bp, Homo sapiens
  chr5:172327146-172327176
  hypo
acaagtgagttttgacgtcacagcttgagg

SEQ ID NO: 151878 - DNA, 209 bp, Homo sapiens; identical to SEQ ID NO: 19874
  chr5:172346277-172346486
  hypo

SEQ ID NO: 151879 - DNA, 30 bp, Homo sapiens
  chr5:172347730-172347760
  hypo
cactcccggagcacgcggcccaggccccaa

SEQ ID NO: 151880 - DNA, 435 bp, Homo sapiens; identical to SEQ ID NO: 70563
  chr5:172353788-172354223
  hypo

SEQ ID NO: 151881 - DNA, 210 bp, Homo sapiens
  chr5:172366891-172367101
  hypo
atccctgggagccctcggagggcggggtggggccaggatggaagtggaggcacctgctgtggcttctctttctctctttttaaaaatcaaacacttgcgtgcaaagcccctaaacggcaaatgggggcctctgcaaatagctccttagaggggctgcagatgaagaggggcttaggtcgggatgtcgtcatgtggcggctgcggggctgg

SEQ ID NO: 151882 - DNA, 30 bp, Homo sapiens
  chr5:172367315-172367345
  hypo
gcaccttgctcagagcgatgctctgtgcta

SEQ ID NO: 151883 - DNA, 133 bp, Homo sapiens; identical to SEQ ID NO: 19875
  chr5:172367588-172367721
  hypo

SEQ ID NO: 151884 - DNA, 30 bp, Homo sapiens
  chr5:172367991-172368021
  hypo
atattttcagctgggcgcggtggcttacac

SEQ ID NO: 151885 - DNA, 23 bp, Homo sapiens
  chr5:172384946-172384969
  hypo
ttaactgtgaagggcccggaata

SEQ ID NO: 151886 - DNA, 447 bp, Homo sapiens; identical to SEQ ID NO: 4404
  chr5:172385501-172385948
  hypo

SEQ ID NO: 151887 - DNA, 250 bp, Homo sapiens; identical to SEQ ID NO: 112476
  chr5:172386282-172386532
  hypo

SEQ ID NO: 151888 - DNA, 30 bp, Homo sapiens; identical to SEQ ID NO: 70568
  chr5:172409775-172409805
  hypo

SEQ ID NO: 151889 - DNA, 103 bp, Homo sapiens; identical to SEQ ID NO: 42309
  chr5:172444178-172444281
  hypo

SEQ ID NO: 151890 - DNA, 30 bp, Homo sapiens
  chr5:172451647-172451677
  hypo
tttaagaatcacgatcggagtgctaggtgc

SEQ ID NO: 151891 - DNA, 35 bp, Homo sapiens; identical to SEQ ID NO: 19877
  chr5:172454587-172454622
  hypo

SEQ ID NO: 151892 - DNA, 320 bp, Homo sapiens; identical to SEQ ID NO: 70571
  chr5:172461479-172461799
  hypo

SEQ ID NO: 151893 - DNA, 30 bp, Homo sapiens
  chr5:172492902-172492932
  hypo
atgtgcgattacaggcgtgaccaaccgcac

SEQ ID NO: 151894 - DNA, 490 bp, Homo sapiens; identical to SEQ ID NO: 112486
  chr5:172659535-172660025
  hypo

SEQ ID NO: 151895 - DNA, 293 bp, Homo sapiens; identical to SEQ ID NO: 112487
  chr5:172660141-172660434
  hypo

SEQ ID NO: 151896 - DNA, 965 bp, Homo sapiens; identical to SEQ ID NO: 112491
  chr5:172665285-172666250
  hypo

SEQ ID NO: 151897 - DNA, 30 bp, Homo sapiens
  chr5:172724227-172724257
  hypo
cacgggccgccagtgcgccttccttgctct

SEQ ID NO: 151898 - DNA, 244 bp, Homo sapiens; identical to SEQ ID NO: 70575
  chr5:172724558-172724802
  hypo

SEQ ID NO: 151899 - DNA, 30 bp, Homo sapiens; identical to SEQ ID NO: 70576
  chr5:172725067-172725097
  hypo

SEQ ID NO: 151900 - DNA, 505 bp, Homo sapiens
  chr5:172744594-172745099
  hypo
ggtacgaggataacgcgggcgcgctcccttgagtacgtgtaagtgcagaattcaccaggcacccctgagaccccacggccccaggggtctccatctcacctgtccgttccgcgaacacacacctcgatgaagtccacagtccccacagaatcctgcgtgtgacatcccccctctctaatggtaaatgttttggaatgtccatagataagaaaatggacggcgtggaggaaagatttcgtggccaggcctttcatttcacctccggatatcagaatactcagactgttcgtcttcccactcgctgcttccggaaggtccctgagccccaaggcccccgactctgcctcgggcatgggcgtttgggtggctcttgctacctcgctcacccttggcacctcggccagtctccctactgctgggctctgggaggtgatgtcctgcttccccgtggtgggccctggagagcttggttctgtccacctggggctggcgctcggggggcgcc

SEQ ID NO: 151901 - DNA, 197 bp, Homo sapiens; identical to SEQ ID NO: 70578
  chr5:172765670-172765867
  hypo

SEQ ID NO: 151902 - DNA, 30 bp, Homo sapiens
  chr5:172851674-172851704
  hypo
ttataaatgctattacgttgttcatctgtt

SEQ ID NO: 151903 - DNA, 30 bp, Homo sapiens
  chr5:172982512-172982542
  hypo
tgccttttcagaggccgacttcgccccctg

SEQ ID NO: 151904 - DNA, 30 bp, Homo sapiens; identical to SEQ ID NO: 70579
  chr5:173089860-173089890
  hypo

SEQ ID NO: 151905 - DNA, 30 bp, Homo sapiens
  chr5:173126407-173126437
  hypo
tgttaatatctcacacgagagtctccgatc

SEQ ID NO: 151906 - DNA, 30 bp, Homo sapiens
  chr5:173127865-173127895
  hypo
aggcgtgagccaccgcgcccggcctttcac

SEQ ID NO: 151907 - DNA, 280 bp, Homo sapiens
  chr5:173180488-173180768
  hypo
gagtgtccctggcttcggcaggcagtgcgggagcgtaaccggatctgcttagagaggccccagcttgcgccattcactgggccagaaacctgagctgctcctgagagggctggaaaacagcctggggcttggagattggctcacactatcccagctattccaacgcagactaaatggcttctggcccttgttaatggcgccatctcagatcagtgccaggggaaccactggtcatttgggggcactggagggagcagggtagaggcgtggggtgatggtg

SEQ ID NO: 151908 - DNA, 30 bp, Homo sapiens
  chr5:173184206-173184236
  hypo
tgtgttatagccgcacggtggatttgcaat

SEQ ID NO: 151909 - DNA, 30 bp, Homo sapiens
  chr5:173184766-173184796
  hypo
gccagagggtgggaacgtgtttgcttggaa

SEQ ID NO: 151910 - DNA, 138 bp, Homo sapiens
  chr5:173383098-173383236
  hypo
ggcggtgaccgccctcggcatatttcattccgctggaactaaaggataactgcagtgctcattttcaggcctcagaataagtgcactcttctgttcattctgaccccttcctcaacctcttcacgctggcatgtcctt

SEQ ID NO: 151911 - DNA, 78 bp, Homo sapiens
  chr5:173389972-173390050
  hypo
tctcttgagaataggcgccactggctttgaataaattctaagaatttagaaaatgaacatttgcgccccactaggaac

SEQ ID NO: 151912 - DNA, 155 bp, Homo sapiens
  chr5:173396937-173397092
  hypo
gtcaaaatacaggttgcgagtcagcagcgctgggagcctgagactacatctctaccaagctatccagtgggctccatgctactgcttctccatagaagttagttcttgagaaagccgtgaacgttcagacctgggagtaacgctgtcagaatgag

SEQ ID NO: 151913 - DNA, 30 bp, Homo sapiens
  chr5:173415518-173415548
  hypo
ctctgaaatcctcccgcacccaagcatggg

SEQ ID NO: 151914 - DNA, 58 bp, Homo sapiens
  chr5:173415948-173416006
  hypo
tccccccatccccacgcggtggtctggccctaaccctgtcaccgcatccctagggggg

SEQ ID NO: 151915 - DNA, 30 bp, Homo sapiens; identical to SEQ ID NO: 70583
  chr5:173416259-173416289
  hypo

SEQ ID NO: 151916 - DNA, 247 bp, Homo sapiens
  chr5:173416550-173416797
  hypo
atcgagagttcagagcggcaccagacagtcggcgcgtgcaggtggtgcagcggggcagggcgggaccgggcgcggcggggcgggacggggcggagcgggctcagctgctgggcgccatcttgcggcacgcaggaggctgggggcagctttcctgtcaggccgtgttgcgagcacgcgcaggggcgaaggagaagcccagtaattcccttcagagggccagctgtggccggcacgggcacctgacata

SEQ ID NO: 151917 - DNA, 30 bp, Homo sapiens
  chr5:173476423-173476453
  hypo
taagctatatgtgcacgcgcacgtgcacac

SEQ ID NO: 151918 - DNA, 30 bp, Homo sapiens
  chr5:173538520-173538550
  hypo
atcccagcggccggtcggatcagaaggtat

SEQ ID NO: 151919 - DNA, 35 bp, Homo sapiens
  chr5:173539167-173539202
  hypo
ggcagccctgggacccggtgcgactcctgcacctg

SEQ ID NO: 151920 - DNA, 30 bp, Homo sapiens; identical to SEQ ID NO: 70585
  chr5:173622072-173622102
  hypo

SEQ ID NO: 151921 - DNA, 21 bp, Homo sapiens
  chr5:173780908-173780929
  hypo
agccaccgtgcctggcctcca

SEQ ID NO: 151922 - DNA, 36 bp, Homo sapiens
  chr5:173978712-173978748
  hypo
cgaaatgggcataagcgcttgcgtatgtctataagc

SEQ ID NO: 151923 - DNA, 41 bp, Homo sapiens; identical to SEQ ID NO: 70587
  chr5:174029707-174029748
  hypo

SEQ ID NO: 151924 - DNA, 26 bp, Homo sapiens
  chr5:174056496-174056522
  hypo
gtggaaggacagtgatcgcttagaaa

SEQ ID NO: 151925 - DNA, 89 bp, Homo sapiens; identical to SEQ ID NO: 42349
  chr5:174220727-174220816
  hypo

SEQ ID NO: 151926 - DNA, 205 bp, Homo sapiens; identical to SEQ ID NO: 42350
  chr5:174220856-174221061
  hypo

SEQ ID NO: 151927 - DNA, 150 bp, Homo sapiens; identical to SEQ ID NO: 70591
  chr5:174350057-174350207
  hypo

SEQ ID NO: 151928 - DNA, 44 bp, Homo sapiens; identical to SEQ ID NO: 70592
  chr5:174667549-174667593
  hypo

SEQ ID NO: 151929 - DNA, 30 bp, Homo sapiens; identical to SEQ ID NO: 42351
  chr5:174728096-174728126
  hypo

SEQ ID NO: 151930 - DNA, 30 bp, Homo sapiens
  chr5:174891122-174891152
  hypo
gtacactgagccatacggacacaaatgcac

SEQ ID NO: 151931 - DNA, 79 bp, Homo sapiens; identical to SEQ ID NO: 70594
  chr5:174920752-174920831
  hypo

SEQ ID NO: 151932 - DNA, 29 bp, Homo sapiens
  chr5:174921420-174921449
  hypo
acaatagatcatctttatttgcgacagca

SEQ ID NO: 151933 - DNA, 30 bp, Homo sapiens; identical to SEQ ID NO: 19884
  chr5:174949926-174949956
  hypo

SEQ ID NO: 151934 - DNA, 619 bp, Homo sapiens; identical to SEQ ID NO: 42356
  chr5:175084695-175085314
  hypo

SEQ ID NO: 151935 - DNA, 195 bp, Homo sapiens; identical to SEQ ID NO: 112534
  chr5:175085524-175085719
  hypo

SEQ ID NO: 151936 - DNA, 199 bp, Homo sapiens; identical to SEQ ID NO: 70599
  chr5:175110259-175110458
  hypo

SEQ ID NO: 151937 - DNA, 30 bp, Homo sapiens; identical to SEQ ID NO: 70600
  chr5:175139214-175139244
  hypo

SEQ ID NO: 151938 - DNA, 250 bp, Homo sapiens; identical to SEQ ID NO: 70601
  chr5:175139688-175139938
  hypo

SEQ ID NO: 151939 - DNA, 1676 bp, Homo sapiens; identical to SEQ ID NO: 42362
  chr5:175298494-175300170
  hypo

SEQ ID NO: 151940 - DNA, 101 bp, Homo sapiens; identical to SEQ ID NO: 42363
  chr5:175300216-175300317
  hypo

SEQ ID NO: 151941 - DNA, 272 bp, Homo sapiens
  chr5:175329247-175329519
  hypo
acgcctggcaccgatcgcccctggcccaggtgatgaaggatgctggacttgtgaaagaaattcattaactggtgtgatgtgtcagtgtgacagatttgagaaagacgggggtggagggtcggggggcggaagtaatataacagttgaactgggtggctattgttaaacccacttgatctggaaagcaataacaaaaagctaagcgtgattaatcagcaattaaaggctaacgtgaaagccagaggcccttctgttggcgtttaaagaggctc

SEQ ID NO: 151942 - DNA, 31 bp, Homo sapiens; identical to SEQ ID NO: 70604
  chr5:175337161-175337192
  hypo

SEQ ID NO: 151943 - DNA, 30 bp, Homo sapiens; identical to SEQ ID NO: 70605
  chr5:175348886-175348916
  hypo

SEQ ID NO: 151944 - DNA, 191 bp, Homo sapiens
  chr5:175387361-175387552
  hypo
gcaggaaagtgtctccgcgtcacagggacatgcagttacatgaaggatctgcatggctggatgctggacaatgttcaccacaacgtgactaacaggggcatgcattctttacatagtggaatttcaagttctttactttcctcttcgaagttttctatacagttttaatctttttacgaagagtgtcaaag

SEQ ID NO: 151945 - DNA, 54 bp, Homo sapiens; identical to SEQ ID NO: 70606
  chr5:175559712-175559766
  hypo

SEQ ID NO: 151946 - DNA, 30 bp, Homo sapiens
  chr5:175574851-175574881
  hypo
gatcttgccaggccacggtgctctgttccg

SEQ ID NO: 151947 - DNA, 143 bp, Homo sapiens
  chr5:175578295-175578438
  hypo
tttattacttttaaagtttgtttaggctcagaccctcgctctgtcgccagtgctggagcgcagcagcacgatgctagctcactgcagcctggacctccggggccaccacgcctggctgatttttcaaacgtttttttagagac

SEQ ID NO: 151948 - DNA, 30 bp, Homo sapiens; identical to SEQ ID NO: 70608
  chr5:175610504-175610534
  hypo

SEQ ID NO: 151949 - DNA, 24 bp, Homo sapiens
  chr5:175617624-175617648
  hypo
gggcgcggtggctcacgcctgtaa

SEQ ID NO: 151950 - DNA, 23 bp, Homo sapiens
  chr5:175617887-175617910
  hypo
cgacagcgcgagactccgtctca

SEQ ID NO: 151951 - DNA, 30 bp, Homo sapiens
  chr5:175618183-175618213
  hypo
aagcctcaggctcctcgaggctctgtgttc

SEQ ID NO: 151952 - DNA, 241 bp, Homo sapiens; identical to SEQ ID NO: 70609
  chr5:175777487-175777728
  hypo

SEQ ID NO: 151953 - DNA, 761 bp, Homo sapiens; identical to SEQ ID NO: 42367
  chr5:175792170-175792931
  hypo

SEQ ID NO: 151954 - DNA, 159 bp, Homo sapiens; identical to SEQ ID NO: 112545
  chr5:175792997-175793156
  hypo

SEQ ID NO: 151955 - DNA, 632 bp, Homo sapiens; identical to SEQ ID NO: 70612
  chr5:175831151-175831783
  hypo

SEQ ID NO: 151956 - DNA, 269 bp, Homo sapiens
  chr5:175832698-175832967
  hypo
gtggagggcacgggacgagcgctggacactccatcagaggggctgggctttacatcccccttctgccactcactggactcgcgacctttgagaagtcccttccctgggcagcttggctttcaaacctgttaaatgagtgacaatatcctactaccggtgggaagtgaggcttacgagatgctatggtaacactctgcagcccatagagggcgtgtgcgtatgagggacagcatggctgctgtggcctgctgttccggtgtggcagggcc

SEQ ID NO: 151957 - DNA, 30 bp, Homo sapiens; identical to SEQ ID NO: 19896
  chr5:175840779-175840809
  hypo

SEQ ID NO: 151958 - DNA, 30 bp, Homo sapiens; identical to SEQ ID NO: 70614
  chr5:175842207-175842237
  hypo

SEQ ID NO: 151959 - DNA, 31 bp, Homo sapiens
  chr5:175869565-175869596
  hypo
ttttttttagagtctcgctctgttgcccagg

SEQ ID NO: 151960 - DNA, 37 bp, Homo sapiens; identical to SEQ ID NO: 70615
  chr5:175871771-175871808
  hypo

SEQ ID NO: 151961 - DNA, 37 bp, Homo sapiens; identical to SEQ ID NO: 70616
  chr5:175872856-175872893
  hypo

SEQ ID NO: 151962 - DNA, 37 bp, Homo sapiens; identical to SEQ ID NO: 19897
  chr5:175879332-175879369
  hypo

SEQ ID NO: 151963 - DNA, 18 bp, Homo sapiens
  chr5:175924883-175924901
  hypo
ctcatacctgtaatccga

SEQ ID NO: 151964 - DNA, 30 bp, Homo sapiens; identical to SEQ ID NO: 70619
  chr5:175936006-175936036
  hypo

SEQ ID NO: 151965 - DNA, 30 bp, Homo sapiens; identical to SEQ ID NO: 70620
  chr5:175955090-175955120
  hypo

SEQ ID NO: 151966 - DNA, 18 bp, Homo sapiens
  chr5:175971441-175971459
  hypo
ttctctctttcctttttt

SEQ ID NO: 151967 - DNA, 78 bp, Homo sapiens; identical to SEQ ID NO: 70622
  chr5:175971758-175971836
  hypo

SEQ ID NO: 151968 - DNA, 31 bp, Homo sapiens; identical to SEQ ID NO: 70623
  chr5:175975194-175975225
  hypo

SEQ ID NO: 151969 - DNA, 205 bp, Homo sapiens; identical to SEQ ID NO: 70624
  chr5:176003231-176003436
  hypo

SEQ ID NO: 151970 - DNA, 30 bp, Homo sapiens
  chr5:176011768-176011798
  hypo
tgtggtggttgcctcggatgtggacaccag

SEQ ID NO: 151971 - DNA, 163 bp, Homo sapiens; identical to SEQ ID NO: 19901
  chr5:176012686-176012849
  hypo

SEQ ID NO: 151972 - DNA, 77 bp, Homo sapiens; identical to SEQ ID NO: 19902
  chr5:176016152-176016229
  hypo

SEQ ID NO: 151973 - DNA, 30 bp, Homo sapiens; identical to SEQ ID NO: 70627
  chr5:176022744-176022774
  hypo

SEQ ID NO: 151974 - DNA, 63 bp, Homo sapiens
  chr5:176035934-176035997
  hypo
ctcgtccccttctctcgtagtgccctcagagcagcgaagtctcctgctcgggggtgtgggggg

SEQ ID NO: 151975 - DNA, 30 bp, Homo sapiens
  chr5:176036298-176036328
  hypo
ccatgctgtgatccgcgatggctggtttga

SEQ ID NO: 151976 - DNA, 1281 bp, Homo sapiens; identical to SEQ ID NO: 112564
  chr5:176056553-176057834
  hypo

SEQ ID NO: 151977 - DNA, 98 bp, Homo sapiens; identical to SEQ ID NO: 19905
  chr5:176066072-176066170
  hypo

SEQ ID NO: 151978 - DNA, 52 bp, Homo sapiens; identical to SEQ ID NO: 19906
  chr5:176077109-176077161
  hypo

SEQ ID NO: 151979 - DNA, 188 bp, Homo sapiens
  chr5:176081964-176082152
  hypo
aaccccagccgggagcgctgcggggtgcccttctcctgctgcgtcagggaccctgcggtgagtggggctgggggaggagaggtaagggactttccagtgcacagactctggagaaacctcccacagggccccgctccgctctgccctgctctgggggcgtggatgctgggggacgtcattttacatgg

SEQ ID NO: 151980 - DNA, 30 bp, Homo sapiens
  chr5:176082612-176082642
  hypo
agccacgcattccagcgtctgggaaagagg

SEQ ID NO: 151981 - DNA, 31 bp, Homo sapiens; identical to SEQ ID NO: 19907
  chr5:176087845-176087876
  hypo

SEQ ID NO: 151982 - DNA, 56 bp, Homo sapiens
  chr5:176175540-176175596
  hypo
ccccgtggaggtgtccgctctcagacactgtgacgccctcacggccaaggtcagag

SEQ ID NO: 151983 - DNA, 171 bp, Homo sapiens; identical to SEQ ID NO: 19908
  chr5:176225692-176225863
  hypo

SEQ ID NO: 151984 - DNA, 97 bp, Homo sapiens
  chr5:176285034-176285131
  hypo
gtgttctcacacgcccgtccgtcagtggccccagaggcagcagcggtaggcaccccaccccgaggccccagttgctaatgcccgcattaagcagcct

SEQ ID NO: 151985 - DNA, 30 bp, Homo sapiens; identical to SEQ ID NO: 70633
  chr5:176295296-176295326
  hypo

SEQ ID NO: 151986 - DNA, 329 bp, Homo sapiens; identical to SEQ ID NO: 70634
  chr5:176295607-176295936
  hypo

SEQ ID NO: 151987 - DNA, 133 bp, Homo sapiens
  chr5:176296712-176296845
  hypo
cctctcaacgggggcgctttctgtgaggggcagaatgtccagaaaacagcctgcgccaccctgtgcccaggtaccagcggccaccgcctcccgcatcgttcctcaccacgccatctccgtgccctggctccat

SEQ ID NO: 151988 - DNA, 30 bp, Homo sapiens; identical to SEQ ID NO: 70636
  chr5:176307728-176307758
  hypo

SEQ ID NO: 151989 - DNA, 120 bp, Homo sapiens
  chr5:176314522-176314642
  hypo
ttggccatggccttccgcatctgtgcctgaaccgcagccagttgatcatggttcaaccggaatggggccagggtctcctccagcaggcgccggtgggcagccagacgggcagccacggca

SEQ ID NO: 151990 - DNA, 188 bp, Homo sapiens; identical to SEQ ID NO: 70637
  chr5:176315296-176315484
  hypo

SEQ ID NO: 151991 - DNA, 23 bp, Homo sapiens
  chr5:176328428-176328451
  hypo
tcccacaatctcaatagtccacg

SEQ ID NO: 151992 - DNA, 30 bp, Homo sapiens; identical to SEQ ID NO: 70639
  chr5:176382803-176382833
  hypo

SEQ ID NO: 151993 - DNA, 31 bp, Homo sapiens; identical to SEQ ID NO: 19909
  chr5:176456647-176456678
  hypo

SEQ ID NO: 151994 - DNA, 30 bp, Homo sapiens
  chr5:176519374-176519404
  hypo
gccgtggtgggcagcgacgtggagctgctg

SEQ ID NO: 151995 - DNA, 191 bp, Homo sapiens
  chr5:176520326-176520517
  hypo
cgacaggtactgggcgcatcccccacctcacatgtgacagcctgactccagcaggcagaaccaagtctcccactttgcagttctccctggagtcaggctcttccggcaagtcaagctcatccctggtacgaggcgtgcgtctctcctccagcggccccgccttgctcgccggcctcgtgagtctagatcta

SEQ ID NO: 151996 - DNA, 30 bp, Homo sapiens
  chr5:176543851-176543881
  hypo
gcaagatctgggacacgctgaaagttaata

SEQ ID NO: 151997 - DNA, 165 bp, Homo sapiens
  chr5:176544211-176544376
  hypo
cctgtcccagacgcccggaccctgtgtccttctgataaattccccctttttctctcgctggcttctggggccatgtcctttttaccccctctggtccaaagtagtgttttaggagatttggaagcaagcagaaccaagttgaaattacttgctccgctgggcgcg

SEQ ID NO: 151998 - DNA, 423 bp, Homo sapiens
  chr5:176558643-176559066
  hypo
gtcacacagggcaacgccaaaaatggcctttctcccaggtgggctcaaagttaacagaaggcagtgagtaaacagtccactggggcaataactatgcacatttactaagccatgggaagaatagtagtcacgtggccctcgagggcggtgccctcagcttgagatggagttaactccaaatctaatcacagaaggctttctggaggaggcggaatttttatggcggccggatccggctttctctgaacagcgagaaggcgcttagcgccctagggaccaggtaactcctgaggtgagcttcttggtggggatcaagcccagggggcgacggagtccgggctgggggaagggcccgaggggctggagtcgcaagttcaggcccagcttgggctccctgtcccgcccttccgctgtcttggggga

SEQ ID NO: 151999 - DNA, 604 bp, Homo sapiens; identical to SEQ ID NO: 112583
  chr5:176560001-176560605
  hypo

SEQ ID NO: 152000 - DNA, 22 bp, Homo sapiens
  chr5:176576219-176576241
  hypo
gttttgtttttttttttgagac

SEQ ID NO: 152001 - DNA, 88 bp, Homo sapiens
  chr5:176596458-176596546
  hypo
ttgctctcaattggtcgttgtcaacttcccatggccggctactactcctcatcttcaagggtctcgcctgcttcgcaaaacttcttga

SEQ ID NO: 152002 - DNA, 148 bp, Homo sapiens
  chr5:176602185-176602333
  hypo
ttgtatttattatatcattgatttagttttgggcaaatgtggtcacagaagatttggacaaatgttgtcacaaaaggttatgcttaattttccgtaatttatttcggcagtgagtaggaagaaaatttgaatgcgtatatgttacaga

SEQ ID NO: 152003 - DNA, 77 bp, Homo sapiens; identical to SEQ ID NO: 70647
  chr5:176611703-176611780
  hypo

SEQ ID NO: 152004 - DNA, 93 bp, Homo sapiens
  chr5:176613629-176613722
  hypo
cgaagatggtagtgacgagcttttctgggttagtttaatataaagtgatacgtcactgtcagtgaaataaggaatataaggtggccgtggtgg

SEQ ID NO: 152005 - DNA, 31 bp, Homo sapiens; identical to SEQ ID NO: 70648
  chr5:176640469-176640500
  hypo

SEQ ID NO: 152006 - DNA, 28 bp, Homo sapiens
  chr5:176646196-176646224
  hypo
tttttttttgagagggagtctcgctctg

SEQ ID NO: 152007 - DNA, 98 bp, Homo sapiens; identical to SEQ ID NO: 19913
  chr5:176663883-176663981
  hypo

SEQ ID NO: 152008 - DNA, 77 bp, Homo sapiens; identical to SEQ ID NO: 19914
  chr5:176674063-176674140
  hypo

SEQ ID NO: 152009 - DNA, 30 bp, Homo sapiens
  chr5:176677507-176677537
  hypo
tttatttctaattcacgttgtaattaacgt

SEQ ID NO: 152010 - DNA, 31 bp, Homo sapiens; identical to SEQ ID NO: 70652
  chr5:176680868-176680899
  hypo

SEQ ID NO: 152011 - DNA, 163 bp, Homo sapiens; identical to SEQ ID NO: 19915
  chr5:176694902-176695065
  hypo

SEQ ID NO: 152012 - DNA, 102 bp, Homo sapiens; identical to SEQ ID NO: 70654
  chr5:176698048-176698150
  hypo

SEQ ID NO: 152013 - DNA, 30 bp, Homo sapiens
  chr5:176724664-176724694
  hypo
ggggcggggggagggcgtgcaggccatgta

SEQ ID NO: 152014 - DNA, 30 bp, Homo sapiens; identical to SEQ ID NO: 70655
  chr5:176742704-176742734
  hypo

SEQ ID NO: 152015 - DNA, 153 bp, Homo sapiens; identical to SEQ ID NO: 70656
  chr5:176757376-176757529
  hypo

SEQ ID NO: 152016 - DNA, 30 bp, Homo sapiens
  chr5:176763800-176763830
  hypo
aggttgccaagggaccgttcaaggcctgag

SEQ ID NO: 152017 - DNA, 340 bp, Homo sapiens; identical to SEQ ID NO: 70657
  chr5:176764094-176764434
  hypo

SEQ ID NO: 152018 - DNA, 43 bp, Homo sapiens; identical to SEQ ID NO: 70658
  chr5:176780527-176780570
  hypo

SEQ ID NO: 152019 - DNA, 475 bp, Homo sapiens
  chr5:176795049-176795524
  hypo
ggcccctgcaggatggctccaaacaaggcccaccagtggggaacaggcttccgcagaggatgggtgagggcggggggctgttcgcgttcatcgctccctcttcactagagctgggcgggactgcaaacgccgccttgcgccgagagtctcagggctccctcaactcctccgccagcctggaccttggcttcctagccttcgtcagcagcaaatctgaggtgagccgactgttggggaagacaagatgctctatgggctagagtcactactcaggcccatttacgtggtggccctcattccaagttgctgtccttactgcgtctcccagcttgctctgcgtagccaacccttcagcctccttacttgtctcactacattggtccccatatatgtcatgggtacacatcctcagttggcaaatgtgtgcacatgtgcagcacccaggtgtgtatacacagcacgtgtgtgggaatca

SEQ ID NO: 152020 - DNA, 31 bp, Homo sapiens; identical to SEQ ID NO: 19919
  chr5:176810601-176810632
  hypo

SEQ ID NO: 152021 - DNA, 30 bp, Homo sapiens; identical to SEQ ID NO: 70661
  chr5:176813826-176813856
  hypo

SEQ ID NO: 152022 - DNA, 91 bp, Homo sapiens; identical to SEQ ID NO: 42402
  chr5:176827092-176827183
  hypo

SEQ ID NO: 152023 - DNA, 289 bp, Homo sapiens; identical to SEQ ID NO: 112593
  chr5:176830416-176830705
  hypo

SEQ ID NO: 152024 - DNA, 148 bp, Homo sapiens; identical to SEQ ID NO: 112594
  chr5:176830932-176831080
  hypo

SEQ ID NO: 152025 - DNA, 30 bp, Homo sapiens; identical to SEQ ID NO: 70663
  chr5:176863149-176863179
  hypo

SEQ ID NO: 152026 - DNA, 32 bp, Homo sapiens; identical to SEQ ID NO: 70664
  chr5:176865065-176865097
  hypo

SEQ ID NO: 152027 - DNA, 30 bp, Homo sapiens
  chr5:176868278-176868308
  hypo
ttgctgcctggcctcggggagccacgggca

SEQ ID NO: 152028 - DNA, 30 bp, Homo sapiens; identical to SEQ ID NO: 19920
  chr5:176886297-176886327
  hypo

SEQ ID NO: 152029 - DNA, 150 bp, Homo sapiens; identical to SEQ ID NO: 70666
  chr5:176901646-176901796
  hypo

SEQ ID NO: 152030 - DNA, 197 bp, Homo sapiens
  chr5:176911110-176911307
  hypo
cctgttccggatgggcgtcttgcaggcagcacaggtaaagcagtgcacgtgccaggtcatcttcagggcgtgcatgatctcctggaaggaggtcccagtcactcggcaggctcaggcccctcctgccctgccctgggtcacgggaacacaggagggctggccgcaagccctgttccttctcgcggtaaacactacat

SEQ ID NO: 152031 - DNA, 31 bp, Homo sapiens; identical to SEQ ID NO: 70667
  chr5:176912593-176912624
  hypo

SEQ ID NO: 152032 - DNA, 30 bp, Homo sapiens
  chr5:176918175-176918205
  hypo
acactgggggtgggcggtgggggcagcccc

SEQ ID NO: 152033 - DNA, 857 bp, Homo sapiens
  chr5:176918897-176919754
  hypo
cgcggagggtccgcggcgggggcggaggcctgggcagagacacagccgggcagggcgggcgggcagggtaaggtgggggcctgggtggaagtggggcgcctgcagcagaggacagcggcagctccagccccccacccccaccccaccccctacatctatttggaggctacggggagaggacgactcaggtttcaaggggcccatttgggagtggcgatctcagtccacgcaggaccgagggctgaccgagtgcgggcgagcacgcagcgccggcggcgggaggcagcaggcggacagacaggcggacagacaggcggacatgcgtggtgccaggaccgtgcagcagcccctggctcaactccagggccctagacccgccttagctccggtttctgccctccactcccggccagggattggggtaccgagaatgtgccaggagggcgagcaggcctggccgtccaagcccacaccgcccaccgcccggatgtcccggccagcctcgtaccttctgcggtttgctctgaaccggctgggccctggaggagaaggaaagcgtgacagcgggccgggcccgcagggatccccactgccagcgcgggcgcacccatccatgtccacccgcatacctgctgaggcccaggctgaggcgctccccgcaggcccggatcttgttctgagcttcgatgtgtgtgaggctacccgcattctcgccatcgatgctcagcacccagtcacccacggccactccggcctgcgccgctttgcccccaggagtgagctgtggagagagaagcaaagtgaccgaggccctggaccctgcagacccaagccaggctgacggtggtaacactgcc

SEQ ID NO: 152034 - DNA, 87 bp, Homo sapiens
  chr5:176922891-176922978
  hypo
ccacaaaaaatgtacgccatgctgtgcctcaattccaatccctgcttcaccatggactcgatgagcgagccccgccacctctccatg

SEQ ID NO: 152035 - DNA, 31 bp, Homo sapiens; identical to SEQ ID NO: 70670
  chr5:176926732-176926763
  hypo

SEQ ID NO: 152036 - DNA, 30 bp, Homo sapiens; identical to SEQ ID NO: 70671
  chr5:176931096-176931126
  hypo

SEQ ID NO: 152037 - DNA, 30 bp, Homo sapiens; identical to SEQ ID NO: 19923
  chr5:176931407-176931437
  hypo

SEQ ID NO: 152038 - DNA, 30 bp, Homo sapiens; identical to SEQ ID NO: 19924
  chr5:176938851-176938881
  hypo

SEQ ID NO: 152039 - DNA, 30 bp, Homo sapiens; identical to SEQ ID NO: 70674
  chr5:176956719-176956749
  hypo

SEQ ID NO: 152040 - DNA, 30 bp, Homo sapiens; identical to SEQ ID NO: 19925
  chr5:176958368-176958398
  hypo

SEQ ID NO: 152041 - DNA, 280 bp, Homo sapiens; identical to SEQ ID NO: 70676
  chr5:176965873-176966153
  hypo

SEQ ID NO: 152042 - DNA, 44 bp, Homo sapiens; identical to SEQ ID NO: 19927
  chr5:176976122-176976166
  hypo

SEQ ID NO: 152043 - DNA, 24 bp, Homo sapiens
  chr5:176987695-176987719
  hypo
ggcgtgagccaccactcccagcct

SEQ ID NO: 152044 - DNA, 30 bp, Homo sapiens; identical to SEQ ID NO: 70679
  chr5:177022345-177022375
  hypo

SEQ ID NO: 152045 - DNA, 545 bp, Homo sapiens; identical to SEQ ID NO: 70680
  chr5:177031059-177031604
  hypo

SEQ ID NO: 152046 - DNA, 30 bp, Homo sapiens; identical to SEQ ID NO: 70681
  chr5:177035504-177035534
  hypo

SEQ ID NO: 152047 - DNA, 30 bp, Homo sapiens
  chr5:177038609-177038639
  hypo
caggctgggcctgacgcgttccaaatctgc

SEQ ID NO: 152048 - DNA, 187 bp, Homo sapiens
  chr5:177310251-177310438
  hypo
aatctgtgacactcttcgtaaaaagattaaaactgtatagaaaacttcgaagaggaaagtaaagaacttgaaattccactatgtaaagaatgctcctgttagtcacgttgtggtgaacattgtccagcatccagccatgcagatccttcatgtaactgcatgtccctgtgacgcggagacactttcc

SEQ ID NO: 152049 - DNA, 154 bp, Homo sapiens; identical to SEQ ID NO: 70682
  chr5:177387549-177387703
  hypo

SEQ ID NO: 152050 - DNA, 266 bp, Homo sapiens
  chr5:177393138-177393404
  hypo
ttccacaagcagttgcgtttcctttagctggtatgagtttgtgcgcgtgggcggtggggtgtgtctgtgtggggtgggatttgtgtggggcggccgtgtgtctgtgcccacgtctgtttccgctggtgttatactccgcctagacagcagagttgcaggtgtaagctttctcaacaaggaatgccgtccccattactccacagcgtatatgtggagcctaaccgggtggactgcaaggcagttccgaccctcaccactcagggtta

SEQ ID NO: 152051 - DNA, 121 bp, Homo sapiens
  chr5:177482543-177482664
  hypo
gagagcagggtgtcagcaagaaaacctgtgagcctttcctttcgctgctgcggccgcagccatgagcatgctcgggcctcagaagaggctcgcctctagtgtcctccgctgtggcaagaag

SEQ ID NO: 152052 - DNA, 202 bp, Homo sapiens
  chr5:177482723-177482925
  hypo
gatccggaagctcatcaaagacgggctgatcatccgcaagcctgtgacggtccattcccgggctcgatgccggaaaaacaccttggcccgccggaagggcaggcacgtggccataggtgagcagaagggtacagccaatgcccgaatgccagagaaggtcacatggatgaggagaatgacgattttgcgccggctgctcaga

SEQ ID NO: 152053 - DNA, 17 bp, Homo sapiens
  chr5:177508374-177508391
  hypo
tcaacaaaagtcttggc

SEQ ID NO: 152054 - DNA, 17 bp, Homo sapiens
  chr5:177508690-177508707
  hypo
agcgtagcctccaggac

SEQ ID NO: 152055 - DNA, 19 bp, Homo sapiens
  chr5:177514135-177514154
  hypo
accgcgcccggcgcctcct

SEQ ID NO: 152056 - DNA, 95 bp, Homo sapiens; identical to SEQ ID NO: 70686
  chr5:177525840-177525935
  hypo

SEQ ID NO: 152057 - DNA, 30 bp, Homo sapiens; identical to SEQ ID NO: 70687
  chr5:177547285-177547315
  hypo

SEQ ID NO: 152058 - DNA, 131 bp, Homo sapiens; identical to SEQ ID NO: 19932
  chr5:177548898-177549029
  hypo

SEQ ID NO: 152059 - DNA, 104 bp, Homo sapiens
  chr5:177571341-177571445
  hypo
ctcgtgcctgctatgcgccacaccacactcatttagagcatgccatgcccgtcccacctgttctgcctcgtatgcctccctgacctgtgtggcctatggaaaag

SEQ ID NO: 152060 - DNA, 30 bp, Homo sapiens; identical to SEQ ID NO: 70690
  chr5:177575201-177575231
  hypo

SEQ ID NO: 152061 - DNA, 30 bp, Homo sapiens; identical to SEQ ID NO: 70691
  chr5:177581756-177581786
  hypo

SEQ ID NO: 152062 - DNA, 30 bp, Homo sapiens; identical to SEQ ID NO: 70692
  chr5:177615716-177615746
  hypo

SEQ ID NO: 152063 - DNA, 49 bp, Homo sapiens; identical to SEQ ID NO: 19933
  chr5:177637069-177637118
  hypo

SEQ ID NO: 152064 - DNA, 308 bp, Homo sapiens
  chr5:177650746-177651054
  hypo
agagccctcacctgtcgccaacagtcttccctctgttgtcaccgtaggtaacacacctctctctcctatgtctgcgcctccactccatctccaccatactgcccccgtcaggcctccccacagctcacttggggcctgctggccacttcacggtcacctgacctcaagccgccgcattccaatccatcctccacatagccctggagtcagagagcagccccggccccaggtcttagcgctctcctgcttaagactctggtggttcccgggggcctccagggcagaactgctgccgcccagcatagttc

SEQ ID NO: 152065 - DNA, 410 bp, Homo sapiens
  chr5:177651331-177651741
  hypo
tggagggcagggcctcgtttggttttctctctgggttcccagcatctagcacagtggcggtgacaacggaggtgacattcactgttggctggattggacaggcgcggacacggttaccttcctgcccttctcctgtgcactgctgaccacacgtttcacctcgttggcataggccatagctgggttggggtggtcctcccggtaggggccccggtaggtgtctgggagaggtgcctgtggggagtgacagcgccatgttatccgggcttggggacaggcaccgacctgttgttgagttgggcagtgcataccacgtggacccactccttctggccatccaggttgcggaacttgtagggactgatgtcaatcagggagctcaggtggccgtgatacgcactggggaggag

SEQ ID NO: 152066 - DNA, 244 bp, Homo sapiens; identical to SEQ ID NO: 19935
  chr5:177653944-177654188
  hypo

SEQ ID NO: 152067 - DNA, 31 bp, Homo sapiens; identical to SEQ ID NO: 70696
  chr5:177675598-177675629
  hypo

SEQ ID NO: 152068 - DNA, 121 bp, Homo sapiens; identical to SEQ ID NO: 70697
  chr5:177680783-177680904
  hypo

SEQ ID NO: 152069 - DNA, 298 bp, Homo sapiens; identical to SEQ ID NO: 19936
  chr5:177708330-177708628
  hypo

SEQ ID NO: 152070 - DNA, 30 bp, Homo sapiens
  chr5:177713400-177713430
  hypo
ccccgacagtcacagcgccccttctccagg

SEQ ID NO: 152071 - DNA, 40 bp, Homo sapiens; identical to SEQ ID NO: 70699
  chr5:177718240-177718280
  hypo

SEQ ID NO: 152072 - DNA, 163 bp, Homo sapiens
  chr5:177735753-177735916
  hypo
cagagccagtcacaccggatgactggccctggttattaactaagccccaggtttggggggcaggtcagcactctcggggggggctttcctcctctctgggcctgttttcaatgagagcgaggtacgggaacgggagccccccggcacacgcagcaccatgttc

SEQ ID NO: 152073 - DNA, 126 bp, Homo sapiens; identical to SEQ ID NO: 70700
  chr5:177737218-177737344
  hypo

SEQ ID NO: 152074 - DNA, 19 bp, Homo sapiens
  chr5:177739036-177739055
  hypo
aactggttcttatgagtcc

SEQ ID NO: 152075 - DNA, 350 bp, Homo sapiens
  chr5:177746583-177746933
  hypo
gcatgcaacatgcgccgtccgctcccagccgagctgacccttgcaggccttggacagggaactctcggggttcctcggaaccgtggaccagcgccctcctgagggaagagtgcagcagcccggcatggcccagttttaacttccacgtctcctggagcttgagtgggcactgggttgaccgactgtcacggtttgctggggactgaggggtttccctgggctctcagtgctgaaatcaggtcagtcttaggcaaactggaactgcgggtcactccgagggcatctgtaagaagggaggcctcccccgccctatctgcccactgcttccctgcacccggccgcatgcccct

SEQ ID NO: 152076 - DNA, 208 bp, Homo sapiens; identical to SEQ ID NO: 70702
  chr5:177749733-177749941
  hypo

SEQ ID NO: 152077 - DNA, 161 bp, Homo sapiens; identical to SEQ ID NO: 70703
  chr5:177778268-177778429
  hypo

SEQ ID NO: 152078 - DNA, 190 bp, Homo sapiens
  chr5:177794188-177794378
  hypo
ttggaaaccaccaatggcatccgctccgagtcttccgatgatgtccagatgggagctgctgcgcttagtgcattttctatcattaagctgacgggagctccacgtctgagaggggcgtttggccttgggtgggtcacgcctctctgtgtgcccgtttctcctctggagcggcaagaagcagcagccagag

SEQ ID NO: 152079 - DNA, 31 bp, Homo sapiens; identical to SEQ ID NO: 19939
  chr5:177800879-177800910
  hypo

SEQ ID NO: 152080 - DNA, 30 bp, Homo sapiens
  chr5:177802013-177802043
  hypo
gacaaccgaaatcaccgtcagctgatgaac

SEQ ID NO: 152081 - DNA, 159 bp, Homo sapiens; identical to SEQ ID NO: 70705
  chr5:177802447-177802606
  hypo

SEQ ID NO: 152082 - DNA, 30 bp, Homo sapiens
  chr5:177807941-177807971
  hypo
gtgggcccacccagccggcaggcacatcta

SEQ ID NO: 152083 - DNA, 151 bp, Homo sapiens
  chr5:177808936-177809087
  hypo
ttgcctggaatttttggatcaaattggcctgtgccccctccggtgggaatcctaggcattctgagggcaggttagtcttgccctcgagtctccatgtgagatggtctgaccaacagagatgcctatttctgggtttcggttctcagtccgc

SEQ ID NO: 152084 - DNA, 91 bp, Homo sapiens; identical to SEQ ID NO: 70706
  chr5:177852083-177852174
  hypo

SEQ ID NO: 152085 - DNA, 211 bp, Homo sapiens
  chr5:177852473-177852684
  hypo
aaaataaagccaatggtggctgtttcccgcgctcacctctgtttcagtttcctcatccgcaaaaaggtggatctgaacattgacaccacagggcagttttgagatgtatggaaatcaaacgagatatcagtggtgcaaccggccaacacacgtctggcattcagtggtactcaatgaatgcagagtttgggtctgccggcaactggagggg

SEQ ID NO: 152086 - DNA, 30 bp, Homo sapiens
  chr5:177852910-177852940
  hypo
ggggccagccgctcccgatggacttgtgct

SEQ ID NO: 152087 - DNA, 114 bp, Homo sapiens
  chr5:177853493-177853607
  hypo
gcttccacctgcgatcgcgctctgtgctgccatccgggcgcagatcctgctctggctgtggtccatccctgtagatgagccgccagaagtggtggatgccgcacaccaccccct

SEQ ID NO: 152088 - DNA, 30 bp, Homo sapiens
  chr5:177853895-177853925
  hypo
gcagatccaaaataacgatgaggccagtgt

SEQ ID NO: 152089 - DNA, 30 bp, Homo sapiens
  chr5:177857550-177857580
  hypo
tatgtccacgtgtgacgtgcgcagcagagt

SEQ ID NO: 152090 - DNA, 462 bp, Homo sapiens
  chr5:177862606-177863068
  hypo
ctacaggatgcatctcgtgggcttcccgggcagctgcagaatttctgatgaggaaaagcgagggggagggaggtgatctggtttcagggtgttgagagggaaagctgcttttgaagccgcaattgcatgcagggccctgtttaccttagatggtatgttttggaggtggccctggagagggcacccccatccccctcaacttcccggacctgtcactgaggactgagtcagatgacgcgcagaatcgtctaacacgatgcttgccacataggtagcacagaaaatgttgatgccacatcattttaggactgtttgactcttgcccgggatgagtttacagaacaagagggaggcagccacacagcggtcattacaagtgcgccaaatgtgctgggcatcgtgggcatgcacagcaagcatgcttaattctgcctgggcactgaaggccgacttcacggagct

SEQ ID NO: 152091 - DNA, 229 bp, Homo sapiens
  chr5:177868495-177868724
  hypo
aaattcaaggcctctcggtacaggcgcacaggggcttgctgatgaagctgaccccaaattataaagacagagatggggggatgcggggctagagtttcaaagggctgccttaatggttcttaagatcccatttcaccctgatgtttggagaaagacaaacacaaacatgcttttgaaacaaacaaaatagtcaaggaacccctaacagacgacacggggtgacgacgcg

SEQ ID NO: 152092 - DNA, 30 bp, Homo sapiens
  chr5:177869068-177869098
  hypo
ctgagaaaccacgcacgccgagtcctgcag

SEQ ID NO: 152093 - DNA, 54 bp, Homo sapiens
  chr5:177875101-177875155
  hypo
gtgctagtcacagtccgttttgttctgttagtgctagtcgcagtccgttttgtt

SEQ ID NO: 152094 - DNA, 30 bp, Homo sapiens
  chr5:177875401-177875431
  hypo
gtgctagtcgcagtccgttttgttctgtta

SEQ ID NO: 152095 - DNA, 30 bp, Homo sapiens
  chr5:177881992-177882022
  hypo
ggccagcagctgggccgctcctctctgctt

SEQ ID NO: 152096 - DNA, 38 bp, Homo sapiens
  chr5:177882255-177882293
  hypo
acgcacgggcctgcccgtgggcccgccctaaacctttc

SEQ ID NO: 152097 - DNA, 197 bp, Homo sapiens
  chr5:177882637-177882834
  hypo
tggcatctccgccatcgcttctgtgtgtttcctctctgccacgcggacggaccgcacctcaaggccgagagctggcacctatcccctgcccacccatcccaccaggctccacgaggaggtcagagcggaggaccagccctctacagtggccctatgtctgacactggctccctcagctcgcccgcccatcaggagga

SEQ ID NO: 152098 - DNA, 34 bp, Homo sapiens
  chr5:177883393-177883427
  hypo
aacagtcaaaaaactcgagagtttggccgggcat

SEQ ID NO: 152099 - DNA, 22 bp, Homo sapiens
  chr5:177884489-177884511
  hypo
acaggcacgaaccactacgccc

SEQ ID NO: 152100 - DNA, 30 bp, Homo sapiens
  chr5:177890650-177890680
  hypo
cagctgagaggcgagcgggacacaggcttc

SEQ ID NO: 152101 - DNA, 196 bp, Homo sapiens
  chr5:177890947-177891143
  hypo
ggcctcccggccgggcgtgagcacaaccacaggctcatggggagaaatctgccgcctccccaacaccagttggcaggagctgttcacctacccccttttactgccgtaacatacacataacacaaaatgtaccatcttaactacgtttaagcgtacagctcagcggcattaagtgcatccgcgataccttgtggcc

SEQ ID NO: 152102 - DNA, 30 bp, Homo sapiens
  chr5:177892249-177892279
  hypo
cagaggctgggggttcggagatcctgcagc

SEQ ID NO: 152103 - DNA, 440 bp, Homo sapiens
  chr5:177892706-177893146
  hypo
gtccccgcggggtggcggtcacgtcctcacgagatggggaggcagagtgatcgtgctacacacggtaaagaagtagactgtcctggggattcaacagcagtgagtcctctgagggactggcgtgcaggggcagggagatgtggggtggtcagtaccaaccagcggtggtgtggactcgccgcttgcctggcttcctgcctgctccggatggcgagtctaactcagcgcacacttcaggacacaaaacacagtagagcctcggggtgagtgcacctcaaggccatcgtgtccacatcaccctggtccctcagtctcccctctgcgccacctctttcctgaatcccatcctggtgaacgacccccatgaatctcatcttgggagacacacatcggcctccaagccgtgggcctcagaggcattgcaacgcaaactcactccc

SEQ ID NO: 152104 - DNA, 22 bp, Homo sapiens
  chr5:177911534-177911556
  hypo
tgaggccgggccgggcgtggtg

SEQ ID NO: 152105 - DNA, 30 bp, Homo sapiens
  chr5:177952696-177952726
  hypo
ctggtaagaaatggcgacacagcgcgcaga

SEQ ID NO: 152106 - DNA, 152 bp, Homo sapiens; identical to SEQ ID NO: 70711
  chr5:177961362-177961514
  hypo

SEQ ID NO: 152107 - DNA, 37 bp, Homo sapiens; identical to SEQ ID NO: 70712
  chr5:177964384-177964421
  hypo

SEQ ID NO: 152108 - DNA, 41 bp, Homo sapiens
  chr5:177969294-177969335
  hypo
gtgctgggattacaaaagtgagccaccgtgcccggccctgt

SEQ ID NO: 152109 - DNA, 37 bp, Homo sapiens
  chr5:177970114-177970151
  hypo
tttttttttttgagccggagtttcgcgcttgtcgccc

SEQ ID NO: 152110 - DNA, 96 bp, Homo sapiens
  chr5:177981478-177981574
  hypo
cctcctggtgtgctttaagtggagccaaccctttggttacacctttgcaaaccacctggcggtgactgggccagccgtcaccggaagagtctggtc

SEQ ID NO: 152111 - DNA, 117 bp, Homo sapiens; identical to SEQ ID NO: 70713
  chr5:178002878-178002995
  hypo

SEQ ID NO: 152112 - DNA, 31 bp, Homo sapiens; identical to SEQ ID NO: 70714
  chr5:178006763-178006794
  hypo

SEQ ID NO: 152113 - DNA, 31 bp, Homo sapiens; identical to SEQ ID NO: 70715
  chr5:178012189-178012220
  hypo

SEQ ID NO: 152114 - DNA, 88 bp, Homo sapiens
  chr5:178039468-178039556
  hypo
atgttcatcatcatacgttgcacttccaaagtcaacaactttgatatctgtgtttttcagtgtgcgttcatcacgtttctagagagac

SEQ ID NO: 152115 - DNA, 19 bp, Homo sapiens
  chr5:178089147-178089166
  hypo
ggctcggacgcctctgaca

SEQ ID NO: 152116 - DNA, 241 bp, Homo sapiens
  chr5:178108494-178108735
  hypo
aagagcaaaactctgtcccctcaaaaaaaaaaaagtagtaagaacatttaacatgaaatctatcttcctgacaaatgtttaagcccacaacacagtattgtcaatataggcacggtgtcgtgcagcagctgtctagagcatactcatctggcataaccgaaactgtacacctgctgagcagtacacctccatttacgccgccccccagcccctgacaaccgccattctaccctctgtctct

SEQ ID NO: 152117 - DNA, 35 bp, Homo sapiens; identical to SEQ ID NO: 70717
  chr5:178113315-178113350
  hypo

SEQ ID NO: 152118 - DNA, 35 bp, Homo sapiens; identical to SEQ ID NO: 70718
  chr5:178113589-178113624
  hypo

SEQ ID NO: 152119 - DNA, 215 bp, Homo sapiens
  chr5:178146439-178146654
  hypo
aggggtgcagcaggacgctgctggagtgtttcgtaagaattgacatataagataggatgtgaaaggaatcgccataggctagatgaaggggtagcacaagggctgaaggcagcacccaagtctttgaatgcaagtcagttttccagacttatttgctgaagtatccacccccaccttatcctatagctagtcagagtaaaagctccacctataaa

SEQ ID NO: 152120 - DNA, 30 bp, Homo sapiens
  chr5:178193083-178193113
  hypo
acaacccactcttgccgtgtctgaacatga

SEQ ID NO: 152121 - DNA, 32 bp, Homo sapiens
  chr5:178195541-178195573
  hypo
acttcgtgtggtgtcgccggccctcccgctgt

SEQ ID NO: 152122 - DNA, 86 bp, Homo sapiens
  chr5:178196656-178196742
  hypo
gaaggctggcggcaacgaccacgccggcaagagcctccctagtccccgccacatcatcatcatcagggtgccgcatcatcaccctg

SEQ ID NO: 152123 - DNA, 30 bp, Homo sapiens
  chr5:178197197-178197227
  hypo
tccttagctcagcaacgaaagaggtaaatt

SEQ ID NO: 152124 - DNA, 30 bp, Homo sapiens
  chr5:178199406-178199436
  hypo
tcgctggcagaagacggtcataccgcgatg

SEQ ID NO: 152125 - DNA, 17 bp, Homo sapiens
  chr5:178204267-178204284
  hypo
ggcgtgagccacggcgc

SEQ ID NO: 152126 - DNA, 318 bp, Homo sapiens
  chr5:178220777-178221095
  hypo
agacgttcagaacagcgcctggccccagcaggatgagggaagcaattaagcagccatgaaacagaatgaggtctgggctgacgcggaaccgcctccaaagaaggaggtctgggctgacgcggaaccgtctccaaagaaggaggtctgggctgacgcggaaccgtctccaaagaaggaggtctgggctgacgcggaaccgtctccaagacattgttcatacaaagcaagcatgcagcataaccctgtcagtccagaggaaaggacagatatgtaaacacacacgctcacacacacatgcccatacatatgcacacacac

SEQ ID NO: 152127 - DNA, 31 bp, Homo sapiens; identical to SEQ ID NO: 19942
  chr5:178224674-178224705
  hypo

SEQ ID NO: 152128 - DNA, 38 bp, Homo sapiens; identical to SEQ ID NO: 70721
  chr5:178226973-178227011
  hypo

SEQ ID NO: 152129 - DNA, 23 bp, Homo sapiens
  chr5:178240797-178240820
  hypo
caatgcggccgggcgcggtggct

SEQ ID NO: 152130 - DNA, 185 bp, Homo sapiens; identical to SEQ ID NO: 70722
  chr5:178259506-178259691
  hypo

SEQ ID NO: 152131 - DNA, 565 bp, Homo sapiens; identical to SEQ ID NO: 42424
  chr5:178287035-178287600
  hypo

SEQ ID NO: 152132 - DNA, 167 bp, Homo sapiens; identical to SEQ ID NO: 19945
  chr5:178289145-178289312
  hypo

SEQ ID NO: 152133 - DNA, 31 bp, Homo sapiens; identical to SEQ ID NO: 19946
  chr5:178291936-178291967
  hypo

SEQ ID NO: 152134 - DNA, 85 bp, Homo sapiens; identical to SEQ ID NO: 70726
  chr5:178292217-178292302
  hypo

SEQ ID NO: 152135 - DNA, 31 bp, Homo sapiens; identical to SEQ ID NO: 19947
  chr5:178293312-178293343
  hypo

SEQ ID NO: 152136 - DNA, 46 bp, Homo sapiens; identical to SEQ ID NO: 19948
  chr5:178295549-178295595
  hypo

SEQ ID NO: 152137 - DNA, 377 bp, Homo sapiens; identical to SEQ ID NO: 70729
  chr5:178295948-178296325
  hypo

SEQ ID NO: 152138 - DNA, 44 bp, Homo sapiens; identical to SEQ ID NO: 70730
  chr5:178298334-178298378
  hypo

SEQ ID NO: 152139 - DNA, 24 bp, Homo sapiens
  chr5:178320069-178320093
  hypo
aaaaacaaagctaggccgggcgca

SEQ ID NO: 152140 - DNA, 38 bp, Homo sapiens; identical to SEQ ID NO: 70732
  chr5:178369100-178369138
  hypo

SEQ ID NO: 152141 - DNA, 30 bp, Homo sapiens; identical to SEQ ID NO: 4478
  chr5:178382964-178382994
  hypo

SEQ ID NO: 152142 - DNA, 135 bp, Homo sapiens
  chr5:178397975-178398110
  hypo
gctgtttcccatcaccggggccagcagttcacatgtgaggccacgcctggcaccagatgctgttgtaagaactttgcgtatattcattcatttaatcctcacaattgcatgaaaccgttacgtccatcctgtttt

SEQ ID NO: 152143 - DNA, 30 bp, Homo sapiens
  chr5:178398560-178398590
  hypo
ccagccccggctgggcgcggtggccatgcc

SEQ ID NO: 152144 - DNA, 117 bp, Homo sapiens; identical to SEQ ID NO: 70734
  chr5:178411212-178411329
  hypo

SEQ ID NO: 152145 - DNA, 181 bp, Homo sapiens; identical to SEQ ID NO: 70735
  chr5:178411694-178411875
  hypo

SEQ ID NO: 152146 - DNA, 114 bp, Homo sapiens; identical to SEQ ID NO: 70736
  chr5:178416035-178416149
  hypo

SEQ ID NO: 152147 - DNA, 215 bp, Homo sapiens; identical to SEQ ID NO: 4479
  chr5:178423618-178423833
  hypo

SEQ ID NO: 152148 - DNA, 30 bp, Homo sapiens
  chr5:178425635-178425665
  hypo
gcccgcgtgtgcccgcgaaagtgccggatc

SEQ ID NO: 152149 - DNA, 51 bp, Homo sapiens
  chr5:178426058-178426109
  hypo
ggccaccaggcctatcggattcgggctccaccctcgcgacctcatctaacc

SEQ ID NO: 152150 - DNA, 672 bp, Homo sapiens; identical to SEQ ID NO: 112641
  chr5:178450490-178451162
  hypo

SEQ ID NO: 152151 - DNA, 31 bp, Homo sapiens; identical to SEQ ID NO: 70739
  chr5:178451595-178451626
  hypo

SEQ ID NO: 152152 - DNA, 89 bp, Homo sapiens
  chr5:178478896-178478985
  hypo
atcttcaaagggagctgctccacaggcttgtgtgccgggaggaacaggggaccttgctttgcattgtgcatcgccgcgctactgtttta

SEQ ID NO: 152153 - DNA, 30 bp, Homo sapiens
  chr5:178509800-178509830
  hypo
aagcgactgaccaaccgatcaggtcgagga

SEQ ID NO: 152154 - DNA, 103 bp, Homo sapiens
  chr5:178540328-178540431
  hypo
cccagcgggccactacgctcaccccggtcagccgcctggccctggaagacgatttgagttcatcacctccacttcattgtactcatctcggcaacgggtcagt

SEQ ID NO: 152155 - DNA, 30 bp, Homo sapiens
  chr5:178540940-178540970
  hypo
tcataggggctcggtcgtcgagggattagg

SEQ ID NO: 152156 - DNA, 30 bp, Homo sapiens
  chr5:178546301-178546331
  hypo
ccccaggctagcccccgggcccggccctat

SEQ ID NO: 152157 - DNA, 226 bp, Homo sapiens; identical to SEQ ID NO: 70740
  chr5:178551040-178551266
  hypo

SEQ ID NO: 152158 - DNA, 641 bp, Homo sapiens; identical to SEQ ID NO: 70741
  chr5:178551487-178552128
  hypo

SEQ ID NO: 152159 - DNA, 83 bp, Homo sapiens
  chr5:178564803-178564886
  hypo
ggcgtcgccgtgctcgaagtacaggtcccactggcggcactgctcctcgcggaagtcagccagggagtcggggcagtcctggc

SEQ ID NO: 152160 - DNA, 216 bp, Homo sapiens; identical to SEQ ID NO: 19958
  chr5:178576385-178576601
  hypo

SEQ ID NO: 152161 - DNA, 30 bp, Homo sapiens
  chr5:178579970-178580000
  hypo
aggcgagcattaagacgctcatagacactg

SEQ ID NO: 152162 - DNA, 256 bp, Homo sapiens
  chr5:178580403-178580659
  hypo
gtcctcacactgtcccgggagctgcccctacaccagcacgcctccccccagacctgggagggtcccggctgcagggctgcacactcaccgccgtgcacatcatgtagcccaggccgaagtcaaagcggcattgctcgttcatggagtagtgcagtcccgggagctggggcagcgccggccagtcgtgggcgaaggggtcatccagcaggcagtcataggagctgtgggggacacacggtgccgcgagcagccttca

SEQ ID NO: 152163 - DNA, 39 bp, Homo sapiens
  chr5:178585236-178585275
  hypo
attacaggtgtgaaccaccgcgcccggccttttgtctct

SEQ ID NO: 152164 - DNA, 256 bp, Homo sapiens; identical to SEQ ID NO: 19959
  chr5:178585630-178585886
  hypo

SEQ ID NO: 152165 - DNA, 30 bp, Homo sapiens
  chr5:178586147-178586177
  hypo
cgtcatctaaggcctcgcatagtcccaccg

SEQ ID NO: 152166 - DNA, 179 bp, Homo sapiens; identical to SEQ ID NO: 70747
  chr5:178589359-178589538
  hypo

SEQ ID NO: 152167 - DNA, 546 bp, Homo sapiens; identical to SEQ ID NO: 112644
  chr5:178594123-178594669
  hypo

SEQ ID NO: 152168 - DNA, 30 bp, Homo sapiens
  chr5:178598587-178598617
  hypo
aactcaggagatccccgggatggagcggac

SEQ ID NO: 152169 - DNA, 30 bp, Homo sapiens
  chr5:178599022-178599052
  hypo
agttagctctggaagcgtgcgtccagcttc

SEQ ID NO: 152170 - DNA, 30 bp, Homo sapiens; identical to SEQ ID NO: 19961
  chr5:178622065-178622095
  hypo

SEQ ID NO: 152171 - DNA, 30 bp, Homo sapiens; identical to SEQ ID NO: 70750
  chr5:178622788-178622818
  hypo

SEQ ID NO: 152172 - DNA, 39 bp, Homo sapiens
  chr5:178634616-178634655
  hypo
tccgcagcatgcctgcgtgccctccgcctcgagctgttg

SEQ ID NO: 152173 - DNA, 30 bp, Homo sapiens; identical to SEQ ID NO: 112645
  chr5:178646870-178646900
  hypo

SEQ ID NO: 152174 - DNA, 30 bp, Homo sapiens; identical to SEQ ID NO: 112646
  chr5:178647150-178647180
  hypo

SEQ ID NO: 152175 - DNA, 30 bp, Homo sapiens; identical to SEQ ID NO: 112647
  chr5:178647487-178647517
  hypo

SEQ ID NO: 152176 - DNA, 158 bp, Homo sapiens
  chr5:178650422-178650580
  hypo
atgcactcacacgaacgcactcacacacgcacactcacacacgaatgcactcacacacaaatggactcacactcacatgcacactcatacgaatgcactcacacacatgcactcacactcacacgaatgcactcacacacacgcgaatgcactcgcac

SEQ ID NO: 152177 - DNA, 153 bp, Homo sapiens
  chr5:178651185-178651338
  hypo
aggtggatgctgtgcgcttactgcagccatgcggtgggtgcacgctaccaccgtcttctcctctttttcttgggagctgtcgccatggctcccggcacaccctgacatccgtaggcgccatcctgacaacacgctgccggccgcaggcctcac

SEQ ID NO: 152178 - DNA, 31 bp, Homo sapiens; identical to SEQ ID NO: 70753
  chr5:178652178-178652209
  hypo

SEQ ID NO: 152179 - DNA, 121 bp, Homo sapiens; identical to SEQ ID NO: 19963
  chr5:178652527-178652648
  hypo

SEQ ID NO: 152180 - DNA, 138 bp, Homo sapiens; identical to SEQ ID NO: 70755
  chr5:178665270-178665408
  hypo

SEQ ID NO: 152181 - DNA, 30 bp, Homo sapiens; identical to SEQ ID NO: 70756
  chr5:178665745-178665775
  hypo

SEQ ID NO: 152182 - DNA, 30 bp, Homo sapiens
  chr5:178694364-178694394
  hypo
cgtggtggcgtgcctcgtctgcccgtcagg

SEQ ID NO: 152183 - DNA, 30 bp, Homo sapiens
  chr5:178697733-178697763
  hypo
ttccagtcagtgtgtcgatctcagcccagg

SEQ ID NO: 152184 - DNA, 31 bp, Homo sapiens; identical to SEQ ID NO: 19965
  chr5:178702394-178702425
  hypo

SEQ ID NO: 152185 - DNA, 330 bp, Homo sapiens
  chr5:178734176-178734506
  hypo
actgcagagctgccccggcccacgcgcccctgccctgctgtgctccgccatctgccccagcagtgctgtgagagcatcgcaccctgcaagcctcagccttcagggacggcaagacctggggcccacaggaggtccaccggccctctcagggctcgagcacccggccaaccctgggtggccactgctcagcactccaggacagctccatgacacagaagcagctctgcccatgagcattcaacagcccggtccggggggcaccaccacgcaggggcttcccgggtcatgctgcaccatccactaatagcaccatcacgtatgccaggctgg

SEQ ID NO: 152186 - DNA, 30 bp, Homo sapiens
  chr5:178735010-178735040
  hypo
gcatggagttgagtacgggaggtcgccggc

SEQ ID NO: 152187 - DNA, 110 bp, Homo sapiens
  chr5:178735324-178735434
  hypo
accgccttggggatccgtggagctcagcggtgcccagagagagcactcgaaatgccagctggaaaggtcacgcacgccagctggaaggggagccgcgcagcccctgggca

SEQ ID NO: 152188 - DNA, 152 bp, Homo sapiens
  chr5:178742609-178742761
  hypo
actacgttctagagacgccgtacccaggaccgcccatggcacgcagaggaaaactgaaacaacgatccttccagagacaaagcacagccccagatggccacaggaactggccgcccccaggagctgctgagcacaaacgccactggagagag

SEQ ID NO: 152189 - DNA, 31 bp, Homo sapiens; identical to SEQ ID NO: 70758
  chr5:178744775-178744806
  hypo

SEQ ID NO: 152190 - DNA, 464 bp, Homo sapiens; identical to SEQ ID NO: 112648
  chr5:178770440-178770904
  hypo

SEQ ID NO: 152191 - DNA, 432 bp, Homo sapiens; identical to SEQ ID NO: 4483
  chr5:178771198-178771630
  hypo

SEQ ID NO: 152192 - DNA, 136 bp, Homo sapiens; identical to SEQ ID NO: 4484
  chr5:178771723-178771859
  hypo

SEQ ID NO: 152193 - DNA, 762 bp, Homo sapiens; identical to SEQ ID NO: 42436
  chr5:178771967-178772729
  hypo

SEQ ID NO: 152194 - DNA, 30 bp, Homo sapiens; identical to SEQ ID NO: 42437
  chr5:178772778-178772808
  hypo

SEQ ID NO: 152195 - DNA, 167 bp, Homo sapiens
  chr5:178801532-178801699
  hypo
agaggacttggaggacgtcagggcagaaggcacagaggacgtcgggacagagggcacggaggacgtcggggcagaggactcagaggacatcagggcagagagctcagaggacatcggggcagagagcacagaggacgtcggggcagagggcacggaggacgtcgggg

SEQ ID NO: 152196 - DNA, 30 bp, Homo sapiens
  chr5:178808981-178809011
  hypo
gctcactgctccacgcgactcactgctcca

SEQ ID NO: 152197 - DNA, 147 bp, Homo sapiens; identical to SEQ ID NO: 19972
  chr5:178854897-178855044
  hypo

SEQ ID NO: 152198 - DNA, 30 bp, Homo sapiens; identical to SEQ ID NO: 70765
  chr5:178855635-178855665
  hypo

SEQ ID NO: 152199 - DNA, 165 bp, Homo sapiens
  chr5:178857573-178857738
  hypo
ccgtggagctctggccgtggcacctcacagcccaagcccagcacagctctctgcagaggtgaccgcattgccagcatggaacctgttcctacagacacttgtccacgagtttacacgcacggagaccactgctgcaagaagcctcatacacgtgtccacgggaaa

SEQ ID NO: 152200 - DNA, 37 bp, Homo sapiens; identical to SEQ ID NO: 70766
  chr5:178882637-178882674
  hypo

SEQ ID NO: 152201 - DNA, 30 bp, Homo sapiens
  chr5:178902941-178902971
  hypo
accctttctcccaccggtttatggctggag

SEQ ID NO: 152202 - DNA, 30 bp, Homo sapiens
  chr5:178913829-178913859
  hypo
ccgccccctcttcaccgtgtctggaacaag

SEQ ID NO: 152203 - DNA, 30 bp, Homo sapiens; identical to SEQ ID NO: 70767
  chr5:178950840-178950870
  hypo

SEQ ID NO: 152204 - DNA, 30 bp, Homo sapiens; identical to SEQ ID NO: 19973
  chr5:178956058-178956088
  hypo

SEQ ID NO: 152205 - DNA, 36 bp, Homo sapiens; identical to SEQ ID NO: 70769
  chr5:178975529-178975565
  hypo

SEQ ID NO: 152206 - DNA, 30 bp, Homo sapiens; identical to SEQ ID NO: 70770
  chr5:178982541-178982571
  hypo

SEQ ID NO: 152207 - DNA, 23 bp, Homo sapiens
  chr5:178987413-178987436
  hypo
aggttactttaaaagcgttagat

SEQ ID NO: 152208 - DNA, 252 bp, Homo sapiens; identical to SEQ ID NO: 70771
  chr5:179004520-179004772
  hypo

SEQ ID NO: 152209 - DNA, 163 bp, Homo sapiens; identical to SEQ ID NO: 19974
  chr5:179023532-179023695
  hypo

SEQ ID NO: 152210 - DNA, 176 bp, Homo sapiens
  chr5:179026667-179026843
  hypo
ggggaggaggctctgcgatcctggatggagctgactgcagcctggggcgctctggggggctcctcccacgtggggatggcgtgccctcttctcaggcccctgcgctgccgagcgctgcaggaaaactgagcccaaagcagacctcccctcggcacctgccccggaggggccttcag

SEQ ID NO: 152211 - DNA, 47 bp, Homo sapiens; identical to SEQ ID NO: 19975
  chr5:179030601-179030648
  hypo

SEQ ID NO: 152212 - DNA, 121 bp, Homo sapiens
  chr5:179064355-179064476
  hypo
ctccgtctcaaaaaaaaaaaaagaaacacaagtaaggaaactgaatttgttatccatactttccgaaaagaaaaacccaggcctggatgatttaaccgcttagtattttgttttattttat

SEQ ID NO: 152213 - DNA, 33 bp, Homo sapiens
  chr5:179076780-179076813
  hypo
aaaagctcccagggacgacgcctccgggagctt

SEQ ID NO: 152214 - DNA, 44 bp, Homo sapiens; identical to SEQ ID NO: 19976
  chr5:179106626-179106670
  hypo

SEQ ID NO: 152215 - DNA, 35 bp, Homo sapiens
  chr5:179110845-179110880
  hypo
tttttttggcattggcttctcgccgcataattatt

SEQ ID NO: 152216 - DNA, 21 bp, Homo sapiens
  chr5:179111256-179111277
  hypo
gtggcgtttttgagacggggt

SEQ ID NO: 152217 - DNA, 27 bp, Homo sapiens
  chr5:179114382-179114409
  hypo
cgtgagccaccgcgcccggcctgtgct

SEQ ID NO: 152218 - DNA, 284 bp, Homo sapiens; identical to SEQ ID NO: 112664
  chr5:179223439-179223723
  hypo

SEQ ID NO: 152219 - DNA, 30 bp, Homo sapiens; identical to SEQ ID NO: 70777
  chr5:179224821-179224851
  hypo

SEQ ID NO: 152220 - DNA, 51 bp, Homo sapiens; identical to SEQ ID NO: 70778
  chr5:179225522-179225573
  hypo

SEQ ID NO: 152221 - DNA, 30 bp, Homo sapiens
  chr5:179225962-179225992
  hypo
gatgaagtcccccgcggcaggggtgaaggc

SEQ ID NO: 152222 - DNA, 30 bp, Homo sapiens; identical to SEQ ID NO: 70779
  chr5:179228474-179228504
  hypo

SEQ ID NO: 152223 - DNA, 150 bp, Homo sapiens; identical to SEQ ID NO: 42447
  chr5:179234472-179234622
  hypo

SEQ ID NO: 152224 - DNA, 150 bp, Homo sapiens; identical to SEQ ID NO: 70781
  chr5:179234921-179235071
  hypo

SEQ ID NO: 152225 - DNA, 753 bp, Homo sapiens; identical to SEQ ID NO: 112670
  chr5:179245836-179246589
  hypo

SEQ ID NO: 152226 - DNA, 30 bp, Homo sapiens; identical to SEQ ID NO: 70783
  chr5:179254302-179254332
  hypo

SEQ ID NO: 152227 - DNA, 29 bp, Homo sapiens
  chr5:179254571-179254600
  hypo
ctgcacccggccctcagatgtctttgagc

SEQ ID NO: 152228 - DNA, 30 bp, Homo sapiens
  chr5:179260033-179260063
  hypo
attgaagttgatatcgatgtggagcacgga

SEQ ID NO: 152229 - DNA, 31 bp, Homo sapiens; identical to SEQ ID NO: 4492
  chr5:179279346-179279377
  hypo

SEQ ID NO: 152230 - DNA, 27 bp, Homo sapiens
  chr5:179281293-179281320
  hypo
acaggcgtgagccaccagggctggatc

SEQ ID NO: 152231 - DNA, 204 bp, Homo sapiens; identical to SEQ ID NO: 70787
  chr5:179293875-179294079
  hypo

SEQ ID NO: 152232 - DNA, 30 bp, Homo sapiens; identical to SEQ ID NO: 70788
  chr5:179297425-179297455
  hypo

SEQ ID NO: 152233 - DNA, 149 bp, Homo sapiens
  chr5:179343373-179343522
  hypo
taaaaaaataaaaatataaaataccaatttgatttagcgtgtagctcgaacggattggatgtgagggtaataaaaacatgagaagagcttataaagccaatagaaaatgtcaagcttgtaaaattcagtaatctcgtttttaaaaatac

SEQ ID NO: 152234 - DNA, 151 bp, Homo sapiens; identical to SEQ ID NO: 70789
  chr5:179358102-179358253
  hypo

SEQ ID NO: 152235 - DNA, 31 bp, Homo sapiens; identical to SEQ ID NO: 70790
  chr5:179383617-179383648
  hypo

SEQ ID NO: 152236 - DNA, 140 bp, Homo sapiens
  chr5:179393860-179394000
  hypo
aagaggtgagatccccgaagttcgaagtggctcaaggccaagggagttgtcgccggcgaggtcgccgagggctgatcttcggttaacagcttgggttctggtgagcctttccatatcgaatgctacgttatcagtacatg

SEQ ID NO: 152237 - DNA, 214 bp, Homo sapiens; identical to SEQ ID NO: 70791
  chr5:179401179-179401393
  hypo

SEQ ID NO: 152238 - DNA, 521 bp, Homo sapiens; identical to SEQ ID NO: 70792
  chr5:179401682-179402203
  hypo

SEQ ID NO: 152239 - DNA, 346 bp, Homo sapiens; identical to SEQ ID NO: 19983
  chr5:179402747-179403093
  hypo

SEQ ID NO: 152240 - DNA, 235 bp, Homo sapiens
  chr5:179448856-179449091
  hypo
cgactttcccaataacgtcctttacagcagcccaggtccgagtcacatgctacactcagtcgtcacgtcatagccatctccgtcagtctgcaactgtctctcggtctttcttggtgtttgtgaccttggcactttcgaagactacattcggcccagttgatctgtcgaaggtatttccctgtggctagattcaggtcaggtgccgctggcagtaacaacacggaggtgaggctgc

SEQ ID NO: 152241 - DNA, 171 bp, Homo sapiens; identical to SEQ ID NO: 70794
  chr5:179473084-179473255
  hypo

SEQ ID NO: 152242 - DNA, 31 bp, Homo sapiens; identical to SEQ ID NO: 19985
  chr5:179482573-179482604
  hypo

SEQ ID NO: 152243 - DNA, 1351 bp, Homo sapiens; identical to SEQ ID NO: 112675
  chr5:179498001-179499352
  hypo

SEQ ID NO: 152244 - DNA, 189 bp, Homo sapiens; identical to SEQ ID NO: 70797
  chr5:179503668-179503857
  hypo

SEQ ID NO: 152245 - DNA, 42 bp, Homo sapiens; identical to SEQ ID NO: 70798
  chr5:179545454-179545496
  hypo

SEQ ID NO: 152246 - DNA, 150 bp, Homo sapiens
  chr5:179546907-179547057
  hypo
ttgtctgtggccaggcgctcgggacttcagacccctgtgatgcgcagaaccacaccatgtccttccccagccatcctgggctgcagctggctccctggggggctcaggccaggcttcgcccaggctcggccctctcgcctgcagccagcg

SEQ ID NO: 152247 - DNA, 148 bp, Homo sapiens
  chr5:179547318-179547466
  hypo
caactcctgtgtccatcgccacgtcgcatggggccgcctcctctctactcttctccgcaggtgtggacccctcatgaacatgtgccccatactcagtctcagcacctgctgcggagagcccagcctggcccagcgctgcctccagcct

SEQ ID NO: 152248 - DNA, 30 bp, Homo sapiens; identical to SEQ ID NO: 70801
  chr5:179563730-179563760
  hypo

SEQ ID NO: 152249 - DNA, 161 bp, Homo sapiens
  chr5:179564198-179564359
  hypo
gtagagccctaccgacgcgtgtgcaatagaggcagcccgcaggacccggccaggactgggaaggtggagcggatgtgctgggggaaggaagcccaccagaggcagcaggccctcccggccacagatgggtcctactgaccgggctccggatactcaggtct

SEQ ID NO: 152250 - DNA, 380 bp, Homo sapiens
  chr5:179564662-179565042
  hypo
ggctcgatgaagaggcgagagctcagcaggaaggtgaagatgtaggctttctgggggacacacgagaaagagggcacaggctcaggagggcaccaggaggggcatgcttcccagctggccctgtaccctggcccaaggtcacgcccaaccctgatgccccccgtgcgtggtggaggagagcccactctcctgcccgctgggtggatcacccacctcggggtagtagtcggctgtgggcaccaggtgctggatcagtgtttccagggaggctgaggatggcgctccatccaggaggggctgcccagcctgttcgccatctgtgggctcggtggggggtgggctgaggctgcctggggtgaccatgtcggaggcactcagcg

SEQ ID NO: 152251 - DNA, 30 bp, Homo sapiens
  chr5:179601039-179601069
  hypo
cctcgctgctgctctcgggggctccttccg

SEQ ID NO: 152252 - DNA, 30 bp, Homo sapiens; identical to SEQ ID NO: 70802
  chr5:179621719-179621749
  hypo

SEQ ID NO: 152253 - DNA, 116 bp, Homo sapiens; identical to SEQ ID NO: 70803
  chr5:179643355-179643471
  hypo

SEQ ID NO: 152254 - DNA, 106 bp, Homo sapiens
  chr5:179666254-179666360
  hypo
aaaccaacattagcacgttgcaagcattcgctgaggccagtgagcattgactgaggccagtgagcacgctgtgtgcatgcactgctgagcacgggcacacacaggt

SEQ ID NO: 152255 - DNA, 124 bp, Homo sapiens
  chr5:179708844-179708968
  hypo
gccgaggtgtgttagcgtgccagccagggagtgactccagtgacgccacagcgcttagatgctggacaaacagctgctcatacaacccgcaccgcaggagtctcagtcccgtgttacctgggag

SEQ ID NO: 152256 - DNA, 30 bp, Homo sapiens
  chr5:179709504-179709534
  hypo
ggcagaagacaaggacggcttcaaggagga

SEQ ID NO: 152257 - DNA, 30 bp, Homo sapiens; identical to SEQ ID NO: 70804
  chr5:179710052-179710082
  hypo

SEQ ID NO: 152258 - DNA, 23 bp, Homo sapiens
  chr5:179725477-179725500
  hypo
acgcctgtaatcccagcgctttg

SEQ ID NO: 152259 - DNA, 165 bp, Homo sapiens; identical to SEQ ID NO: 70806
  chr5:179726330-179726495
  hypo

SEQ ID NO: 152260 - DNA, 30 bp, Homo sapiens
  chr5:179729515-179729545
  hypo
ctcaattgtcttatacgcaaacttggaact

SEQ ID NO: 152261 - DNA, 194 bp, Homo sapiens; identical to SEQ ID NO: 70807
  chr5:179731618-179731812
  hypo

SEQ ID NO: 152262 - DNA, 32 bp, Homo sapiens; identical to SEQ ID NO: 70808
  chr5:179742136-179742168
  hypo

SEQ ID NO: 152263 - DNA, 31 bp, Homo sapiens; identical to SEQ ID NO: 70809
  chr5:179742467-179742498
  hypo

SEQ ID NO: 152264 - DNA, 184 bp, Homo sapiens
  chr5:179743759-179743943
  hypo
ttacagccacggcagcgtggtagctggttccacagccaatcacgatgagccgtcggcatcgtcgaatctccttcaagtggtccttcaagccacccaggagcactgcagggcacacgacaaggcgttaatgctgagtctacacagtcaccgcattccctgagactaggctcgggcggaggctccc

SEQ ID NO: 152265 - DNA, 30 bp, Homo sapiens
  chr5:179755543-179755573
  hypo
aacatgtgaattccacggtgagcgatgtgc

SEQ ID NO: 152266 - DNA, 312 bp, Homo sapiens; identical to SEQ ID NO: 70810
  chr5:179762745-179763057
  hypo

SEQ ID NO: 152267 - DNA, 30 bp, Homo sapiens
  chr5:179763387-179763417
  hypo
agaatctccattctccggcgctgttggaat

SEQ ID NO: 152268 - DNA, 31 bp, Homo sapiens; identical to SEQ ID NO: 19990
  chr5:179773468-179773499
  hypo

SEQ ID NO: 152269 - DNA, 665 bp, Homo sapiens; identical to SEQ ID NO: 4498
  chr5:179780035-179780700
  hypo

SEQ ID NO: 152270 - DNA, 627 bp, Homo sapiens; identical to SEQ ID NO: 112681
  chr5:179780801-179781428
  hypo

SEQ ID NO: 152271 - DNA, 95 bp, Homo sapiens
  chr5:179796986-179797081
  hypo
taaaaaaccttttgtccatcacaaatgtgtaagagtcggcctgggccagtgggagggacgtcagggcagtcagggccaggcggaagggaagtgtg

SEQ ID NO: 152272 - DNA, 133 bp, Homo sapiens
  chr5:179806434-179806567
  hypo
actccaggtgttgtccggcctctgctcggagctgcaagctcagtgccccctctcccactccccggccactctcctgttcagtgtcttcactgcagctgcacagaacggctggcccctgcgtgtttctgctcca

SEQ ID NO: 152273 - DNA, 158 bp, Homo sapiens
  chr5:179824173-179824331
  hypo
ctggctccatccaagcgagctggcaacggtgggtaagagagggagcctgccagggaggtgcagccgctgcttcacagcctcatctcagaagcagcacccgtggctgtttgccttgctctgtttttgtgttttcttttgttgtcgttgttgttgttttt

SEQ ID NO: 152274 - DNA, 158 bp, Homo sapiens; identical to SEQ ID NO: 70816
  chr5:179824630-179824788
  hypo

SEQ ID NO: 152275 - DNA, 20 bp, Homo sapiens
  chr5:179826083-179826103
  hypo
tgccacggcctcccaaagtg

SEQ ID NO: 152276 - DNA, 30 bp, Homo sapiens
  chr5:179855386-179855416
  hypo
cagtaactgtcttaacgctcttgtctgcta

SEQ ID NO: 152277 - DNA, 161 bp, Homo sapiens
  chr5:179855728-179855889
  hypo
ctgtacccaatagcccgtgaattatgagtttttcctgtaagccggtgagaacagtgttcccagccctgtttgggtttcaggctgtgtccaggccgtgctccctgtaacccttccatgaggttcttgccctggccatgggtagtttccgcatatgcgtgtgc

SEQ ID NO: 152278 - DNA, 235 bp, Homo sapiens
  chr5:179866443-179866678
  hypo
agaccccgtctgggtcggcactgcctgagggcagccagcactgaggcgggtcgtgaccccgtcggtgcctgtgcagaaaggaggctcgctgcagaagggaagaaacctgtgctaaccctgccccgcctcctgctggctctgtgccctggggcctgtcagtaccggatcccagccttgctttcctcactggtaaattagggatctaacgcacagtctgccacgaggatgggattga

SEQ ID NO: 152279 - DNA, 31 bp, Homo sapiens; identical to SEQ ID NO: 19993
  chr5:179903411-179903442
  hypo

SEQ ID NO: 152280 - DNA, 30 bp, Homo sapiens; identical to SEQ ID NO: 70819
  chr5:179918447-179918477
  hypo

SEQ ID NO: 152281 - DNA, 61 bp, Homo sapiens
  chr5:179923389-179923450
  hypo
gaccgggtttgtgtgcgtgtgagagcgcatgagtgtgcgacctaatcgctagaggtttgtt

SEQ ID NO: 152282 - DNA, 28 bp, Homo sapiens
  chr5:179924031-179924059
  hypo
aagtatgcattttatgccaggcgcggtg

SEQ ID NO: 152283 - DNA, 30 bp, Homo sapiens
  chr5:179961637-179961667
  hypo
accatggcatgggccggagtcgctggggtc

SEQ ID NO: 152284 - DNA, 30 bp, Homo sapiens; identical to SEQ ID NO: 112685
  chr5:180007865-180007895
  hypo

SEQ ID NO: 152285 - DNA, 1053 bp, Homo sapiens; identical to SEQ ID NO: 42458
  chr5:180017078-180018131
  hypo

SEQ ID NO: 152286 - DNA, 336 bp, Homo sapiens; identical to SEQ ID NO: 42459
  chr5:180018484-180018820
  hypo

SEQ ID NO: 152287 - DNA, 24 bp, Homo sapiens
  chr5:180024540-180024564
  hypo
caccgcgcccggcctctcagctcc

SEQ ID NO: 152288 - DNA, 39 bp, Homo sapiens
  chr5:180030297-180030336
  hypo
cctcctcgggccccccgctcaggccgccgccgcctccct

SEQ ID NO: 152289 - DNA, 30 bp, Homo sapiens
  chr5:180035821-180035851
  hypo
gcagctcaccttgaacgcgcgaaaaggcca

SEQ ID NO: 152290 - DNA, 315 bp, Homo sapiens; identical to SEQ ID NO: 70824
  chr5:180036576-180036891
  hypo

SEQ ID NO: 152291 - DNA, 385 bp, Homo sapiens
  chr5:180038082-180038467
  hypo
tacccttgatgttggggtgaggggacactggtgggtggacaggactcaaaaacaagcacgcagccaggccacacggccgtggaaggaccctgcagtgggtcatttaaagccactctgtgctctgagtttgtgcacactggcctctgacgtcgcatgatttgcttttccccgatgacgcagagggataaaatgcaccttgtccacatggctttctcccaccctactcctggacctgcaggacagctgacctggcggccaggctgtggcgctgcaggcttggcgggctgtcctcagcgtcagcctgggcgatgtgtagggccatggtggacacctgcgagaagctgccctcttctgagctctgagagctgcgcggggccatgcagac

SEQ ID NO: 152292 - DNA, 217 bp, Homo sapiens
  chr5:180039812-180040029
  hypo
tgttccgacagcgcccggccttccctcctggtgtcctcctggtgcagctgtgctacagactacccgtgtatcttgagggtggtgcccaggcctgtcctactggccctggcttccctgatgccaccttctcatggacacaacccccacgcccccgacgcttgctgtccccaaaacctgcagggccatggggaggctcacatggcgggagtggccagct

SEQ ID NO: 152293 - DNA, 30 bp, Homo sapiens
  chr5:180040398-180040428
  hypo
ctggatcatcagcggcgggggagccgcctg

SEQ ID NO: 152294 - DNA, 113 bp, Homo sapiens
  chr5:180043365-180043478
  hypo
cactgcccttgcggacgtagtcggggtctttgtagatgtcccgggcaaggccaaagtcacagatcttcaccacgtcgctttccgacagcagaatgttccgagcagccaggtct

SEQ ID NO: 152295 - DNA, 84 bp, Homo sapiens
  chr5:180043956-180044040
  hypo
atcttccatggtcagcgggctcagccacaggtcctcagctacacagtggagccaggtgggctcaggaggcgcctcctccgcggc

SEQ ID NO: 152296 - DNA, 30 bp, Homo sapiens; identical to SEQ ID NO: 112688
  chr5:180046167-180046197
  hypo

SEQ ID NO: 152297 - DNA, 536 bp, Homo sapiens; identical to SEQ ID NO: 112689
  chr5:180046790-180047326
  hypo

SEQ ID NO: 152298 - DNA, 322 bp, Homo sapiens
  chr5:180047649-180047971
  hypo
agaagacagcgatgacgccggtaccgacaaggatcacgatctccatgctgcccttatcctcggagcctgcgtgggcagaaaggggccggcgtgtgtgtgtgtgtgtgtaagagcgtgcacctgcaggcagcaccccttctggtggccacgacttgcccaaggtggccacaagaaagcgttaactggggacgggaagggagttgaggggtgcagcctgaggccagaccttccacggccacgctggcggaggagttgacgcagcccttggcgttgcacacgctgcacagatagcgtcccgcatcctcctcgcgcacgcgctgga

SEQ ID NO: 152299 - DNA, 30 bp, Homo sapiens
  chr5:180055396-180055426
  hypo
tcctggaagctctctcgctcgctgccgtgc

SEQ ID NO: 152300 - DNA, 379 bp, Homo sapiens; identical to SEQ ID NO: 70826
  chr5:180055789-180056168
  hypo

SEQ ID NO: 152301 - DNA, 153 bp, Homo sapiens
  chr5:180056383-180056536
  hypo
gtctgctgggagcgtcgctcgggcacccacttaccccgctctgcctgcccgcacccagggaagccccgcgtcagcaggcgggctcctgcacagctaccccaccgaaggcacacctcccagcccagccagcggtggctccggaagccctggacc

SEQ ID NO: 152302 - DNA, 30 bp, Homo sapiens
  chr5:180057018-180057048
  hypo
atcgtgcagcagtggcgtggacacgagcat

SEQ ID NO: 152303 - DNA, 190 bp, Homo sapiens; identical to SEQ ID NO: 70828
  chr5:180057545-180057735
  hypo

SEQ ID NO: 152304 - DNA, 14 bp, Homo sapiens
  chr5:180075843-180075857
  hypo
cttccgccccttct

SEQ ID NO: 152305 - DNA, 404 bp, Homo sapiens; identical to SEQ ID NO: 112691
  chr5:180076053-180076457
  hypo

SEQ ID NO: 152306 - DNA, 541 bp, Homo sapiens; identical to SEQ ID NO: 112692
  chr5:180076532-180077073
  hypo

SEQ ID NO: 152307 - DNA, 43 bp, Homo sapiens; identical to SEQ ID NO: 70831
  chr5:180093827-180093870
  hypo

SEQ ID NO: 152308 - DNA, 36 bp, Homo sapiens
  chr5:180098112-180098148
  hypo
caggaaaagccgtgccgacctcggtgtggctagagg

SEQ ID NO: 152309 - DNA, 152 bp, Homo sapiens; identical to SEQ ID NO: 42463
  chr5:180101015-180101167
  hypo

SEQ ID NO: 152310 - DNA, 27 bp, Homo sapiens
  chr5:180101251-180101278
  hypo
cgggaggaaaaacggaggctcccaggg

SEQ ID NO: 152311 - DNA, 92 bp, Homo sapiens
  chr5:180111760-180111852
  hypo
gatgaattctatccacgacccatccatcttgctgacggccgacctgagcagctacctgagagctggcagcgctcgctcgatgaaggccgccg

SEQ ID NO: 152312 - DNA, 23 bp, Homo sapiens
  chr5:180169520-180169543
  hypo
tgagccaccgcgcccgacctgct

SEQ ID NO: 152313 - DNA, 611 bp, Homo sapiens; identical to SEQ ID NO: 70833
  chr5:180218494-180219105
  hypo

SEQ ID NO: 152314 - DNA, 445 bp, Homo sapiens; identical to SEQ ID NO: 70834
  chr5:180219600-180220045
  hypo

SEQ ID NO: 152315 - DNA, 30 bp, Homo sapiens
  chr5:180245468-180245498
  hypo
aaatgccacgctcctcgaaagtgcagtacg

SEQ ID NO: 152316 - DNA, 30 bp, Homo sapiens
  chr5:180245815-180245845
  hypo
atgagacaggactttcggctaaaatcggag

SEQ ID NO: 152317 - DNA, 143 bp, Homo sapiens
  chr5:180255233-180255376
  hypo
cgtgccctgccaaacctctggtggtaaggcttcgattactaaatggaagaaagggacacagggtgttttggagttgacacctagctctttggaggtgactcagatcactcaggagagtccgtaaggcccggtgggcaacaccc

SEQ ID NO: 152318 - DNA, 30 bp, Homo sapiens; identical to SEQ ID NO: 20004
  chr5:180276703-180276733
  hypo

SEQ ID NO: 152319 - DNA, 30 bp, Homo sapiens
  chr5:180294200-180294230
  hypo
agggaaggcagcgtgcggtgtggatggacg

SEQ ID NO: 152320 - DNA, 451 bp, Homo sapiens; identical to SEQ ID NO: 70837
  chr5:180326120-180326571
  hypo

SEQ ID NO: 152321 - DNA, 30 bp, Homo sapiens
  chr5:180475134-180475164
  hypo
ggtcaaggacgacatcgcctatggcagcgt

SEQ ID NO: 152322 - DNA, 1489 bp, Homo sapiens; identical to SEQ ID NO: 42469
  chr5:180479641-180481130
  hypo

SEQ ID NO: 152323 - DNA, 79 bp, Homo sapiens; identical to SEQ ID NO: 70839
  chr5:180502177-180502256
  hypo

SEQ ID NO: 152324 - DNA, 19 bp, Homo sapiens
  chr5:180502315-180502334
  hypo
gggacgaggaaagagggaa

SEQ ID NO: 152325 - DNA, 233 bp, Homo sapiens; identical to SEQ ID NO: 112703
  chr5:180527465-180527698
  hypo

SEQ ID NO: 152326 - DNA, 27 bp, Homo sapiens
  chr5:180527793-180527820
  hypo
cgactggaaatccgggtgcacctccgc

SEQ ID NO: 152327 - DNA, 30 bp, Homo sapiens
  chr5:180581291-180581321
  hypo
taaaagattcggtatcggccgggcgcggtg

SEQ ID NO: 152328 - DNA, 31 bp, Homo sapiens; identical to SEQ ID NO: 20010
  chr5:180621422-180621453
  hypo

SEQ ID NO: 152329 - DNA, 30 bp, Homo sapiens; identical to SEQ ID NO: 70843
  chr5:180647231-180647261
  hypo

SEQ ID NO: 152330 - DNA, 105 bp, Homo sapiens; identical to SEQ ID NO: 20011
  chr5:180657109-180657214
  hypo

SEQ ID NO: 152331 - DNA, 30 bp, Homo sapiens; identical to SEQ ID NO: 70845
  chr5:180659734-180659764
  hypo

SEQ ID NO: 152332 - DNA, 433 bp, Homo sapiens; identical to SEQ ID NO: 70846
  chr5:180661377-180661810
  hypo

SEQ ID NO: 152333 - DNA, 30 bp, Homo sapiens; identical to SEQ ID NO: 20013
  chr5:180664007-180664037
  hypo

SEQ ID NO: 152334 - DNA, 339 bp, Homo sapiens; identical to SEQ ID NO: 4509
  chr5:180673931-180674270
  hypo

SEQ ID NO: 152335 - DNA, 36 bp, Homo sapiens; identical to SEQ ID NO: 70849
  chr5:180674398-180674434
  hypo

SEQ ID NO: 152336 - DNA, 44 bp, Homo sapiens; identical to SEQ ID NO: 70850
  chr5:180680860-180680904
  hypo

SEQ ID NO: 152337 - DNA, 121 bp, Homo sapiens
  chr5:180681263-180681384
  hypo
tgggcaacagagcgagactctgtcaaacagagagagagagagagaaagaaaaagaaatcaatcaatcaatcaatccggtttagatgacaacatgaatcaggtttgttgttgttgttgttgt

SEQ ID NO: 152338 - DNA, 30 bp, Homo sapiens
  chr5:180708587-180708617
  hypo
ggagcagtaacatggcggcctgagcggtag

SEQ ID NO: 152339 - DNA, 173 bp, Homo sapiens
  chr5:180708831-180709004
  hypo
agagggcggcctgagcggtaggaggggggctggagcagtaagagggcggcctgagccgtaggagggtgggtggcagctggagatgctcttgaccggctagaggtctaggagaaggtggggaccgtgtccaacactcgtggctggagccttggccaccgcggttctcctggctg

SEQ ID NO: 152340 - DNA, 140 bp, Homo sapiens
  chr6:223798-223938
  hypo
ctgctttacacctggcgatatgagacagcctgtcgtgccaggctgagacctgcatgtcactgcgctgagtgctgtcggcaattatgacacagtggcgtgtgtgtatctaaacagagaaaaggtgccgtgaaagaacaata

SEQ ID NO: 152341 - DNA, 30 bp, Homo sapiens; identical to SEQ ID NO: 70852
  chr6:224324-224354
  hypo

SEQ ID NO: 152342 - DNA, 177 bp, Homo sapiens; identical to SEQ ID NO: 70853
  chr6:226030-226207
  hypo

SEQ ID NO: 152343 - DNA, 61 bp, Homo sapiens; identical to SEQ ID NO: 70854
  chr6:356758-356819
  hypo

SEQ ID NO: 152344 - DNA, 43 bp, Homo sapiens; identical to SEQ ID NO: 70855
  chr6:358266-358309
  hypo

SEQ ID NO: 152345 - DNA, 55 bp, Homo sapiens; identical to SEQ ID NO: 70856
  chr6:373251-373306
  hypo

SEQ ID NO: 152346 - DNA, 30 bp, Homo sapiens
  chr6:382248-382278
  hypo
gtccaatatgccttacgcaaaacactgaca

SEQ ID NO: 152347 - DNA, 802 bp, Homo sapiens; identical to SEQ ID NO: 4510
  chr6:391097-391899
  hypo

SEQ ID NO: 152348 - DNA, 24 bp, Homo sapiens
  chr6:392409-392433
  hypo
gctctcccgggcctgctccggggt

SEQ ID NO: 152349 - DNA, 371 bp, Homo sapiens; identical to SEQ ID NO: 4512
  chr6:392587-392958
  hypo

SEQ ID NO: 152350 - DNA, 348 bp, Homo sapiens; identical to SEQ ID NO: 4513
  chr6:393124-393472
  hypo

SEQ ID NO: 152351 - DNA, 76 bp, Homo sapiens; identical to SEQ ID NO: 4514
  chr6:393764-393840
  hypo

SEQ ID NO: 152352 - DNA, 161 bp, Homo sapiens; identical to SEQ ID NO: 70862
  chr6:394826-394987
  hypo

SEQ ID NO: 152353 - DNA, 214 bp, Homo sapiens; identical to SEQ ID NO: 70863
  chr6:402005-402219
  hypo

SEQ ID NO: 152354 - DNA, 30 bp, Homo sapiens; identical to SEQ ID NO: 70864
  chr6:423668-423698
  hypo

SEQ ID NO: 152355 - DNA, 30 bp, Homo sapiens; identical to SEQ ID NO: 70865
  chr6:423967-423997
  hypo

SEQ ID NO: 152356 - DNA, 30 bp, Homo sapiens
  chr6:447514-447544
  hypo
gctgaccacgcagcgcgcagcattgcccct

SEQ ID NO: 152357 - DNA, 30 bp, Homo sapiens
  chr6:447903-447933
  hypo
gaggaagggctgcaccgagcgccgcagtgg

SEQ ID NO: 152358 - DNA, 132 bp, Homo sapiens; identical to SEQ ID NO: 70866
  chr6:504234-504366
  hypo

SEQ ID NO: 152359 - DNA, 30 bp, Homo sapiens; identical to SEQ ID NO: 70867
  chr6:515798-515828
  hypo

SEQ ID NO: 152360 - DNA, 30 bp, Homo sapiens
  chr6:521322-521352
  hypo
cacgcactgagtgccgacagtcactgtcca

SEQ ID NO: 152361 - DNA, 30 bp, Homo sapiens
  chr6:537194-537224
  hypo
tacactcgagatgacgaccgacggagcgca

SEQ ID NO: 152362 - DNA, 30 bp, Homo sapiens; identical to SEQ ID NO: 70868
  chr6:537481-537511
  hypo

SEQ ID NO: 152363 - DNA, 30 bp, Homo sapiens
  chr6:548664-548694
  hypo
gcggctgtgtgtgcacgcgtgcatgcacaa

SEQ ID NO: 152364 - DNA, 149 bp, Homo sapiens
  chr6:550597-550746
  hypo
tatgatactcctccacgtttcgtgaataaacggccagaaggaaaacagtgaataagcactggaaactcgcccaggtgagggagggacgaggacgctacattcccctccagtccccgggcctggagtcaccatgacgcagtccctgtaag

SEQ ID NO: 152365 - DNA, 31 bp, Homo sapiens; identical to SEQ ID NO: 20021
  chr6:571736-571767
  hypo

SEQ ID NO: 152366 - DNA, 30 bp, Homo sapiens; identical to SEQ ID NO: 70870
  chr6:572766-572796
  hypo

SEQ ID NO: 152367 - DNA, 30 bp, Homo sapiens; identical to SEQ ID NO: 20022
  chr6:589259-589289
  hypo

SEQ ID NO: 152368 - DNA, 30 bp, Homo sapiens; identical to SEQ ID NO: 70872
  chr6:594437-594467
  hypo

SEQ ID NO: 152369 - DNA, 30 bp, Homo sapiens; identical to SEQ ID NO: 70873
  chr6:596258-596288
  hypo

SEQ ID NO: 152370 - DNA, 30 bp, Homo sapiens; identical to SEQ ID NO: 70874
  chr6:617283-617313
  hypo

SEQ ID NO: 152371 - DNA, 30 bp, Homo sapiens
  chr6:617734-617764
  hypo
agaatgtactgagaccgcctttcacatagg

SEQ ID NO: 152372 - DNA, 30 bp, Homo sapiens; identical to SEQ ID NO: 70875
  chr6:617983-618013
  hypo

SEQ ID NO: 152373 - DNA, 31 bp, Homo sapiens; identical to SEQ ID NO: 70876
  chr6:623146-623177
  hypo

SEQ ID NO: 152374 - DNA, 79 bp, Homo sapiens; identical to SEQ ID NO: 70877
  chr6:625317-625396
  hypo

SEQ ID NO: 152375 - DNA, 30 bp, Homo sapiens; identical to SEQ ID NO: 70878
  chr6:656489-656519
  hypo

SEQ ID NO: 152376 - DNA, 819 bp, Homo sapiens; identical to SEQ ID NO: 112729
  chr6:710653-711472
  hypo

SEQ ID NO: 152377 - DNA, 215 bp, Homo sapiens
  chr6:736612-736827
  hypo
tacaggcgtgagccaccgcgcccggcccagctgtgctttttatgggcaacaaaaattgttttcagaattgaaattgcccttgatattttgacatgggtttgacgtctgcaaagttatttcatattacactaaaaaatgtcatggaaagagtacgccccgtgtacccaccacgcaactgaacagtaacacggcacggggagcgtgggaggctccgg

SEQ ID NO: 152378 - DNA, 31 bp, Homo sapiens; identical to SEQ ID NO: 20025
  chr6:782981-783012
  hypo

SEQ ID NO: 152379 - DNA, 30 bp, Homo sapiens
  chr6:967829-967859
  hypo
cccccgccacctccacgtgcctgcctcccc

SEQ ID NO: 152380 - DNA, 149 bp, Homo sapiens; identical to SEQ ID NO: 70882
  chr6:968510-968659
  hypo

SEQ ID NO: 152381 - DNA, 116 bp, Homo sapiens
  chr6:972332-972448
  hypo
tgtgtgtggaagacccgcccgactacacagaccacaaaaccatgcctcatgagccctctcagctggtgacgtgttcaggccaggcaaaatcaatagagttacgtgtcttgcccctg

SEQ ID NO: 152382 - DNA, 40 bp, Homo sapiens
  chr6:999946-999986
  hypo
agcagcgataataggcgtgccagcccgcacgactgtagga

SEQ ID NO: 152383 - DNA, 31 bp, Homo sapiens; identical to SEQ ID NO: 20026
  chr6:1001881-1001912
  hypo

SEQ ID NO: 152384 - DNA, 30 bp, Homo sapiens; identical to SEQ ID NO: 70884
  chr6:1003679-1003709
  hypo

SEQ ID NO: 152385 - DNA, 30 bp, Homo sapiens; identical to SEQ ID NO: 70885
  chr6:1004091-1004121
  hypo

SEQ ID NO: 152386 - DNA, 30 bp, Homo sapiens
  chr6:1029182-1029212
  hypo
accccagcgtgtgggcgggaggttgcctct

SEQ ID NO: 152387 - DNA, 30 bp, Homo sapiens
  chr6:1029672-1029702
  hypo
ctctcccatctgttgcgtcttctctcgcca

SEQ ID NO: 152388 - DNA, 578 bp, Homo sapiens
  chr6:1080627-1081205
  hypo
tatcagcaactttccccacaacgctgatggatctggaaccacttctaaacccgctgcctgtttgcgaggagggcagaccactgacggtgggaaggatgcatttccccaagccacggaccacactgccgaggccctgactgtcctttcccggacccctgcctggcacgcctgggaaaggtttaccctgggggcgggggcaggttggcgccaggcagcttgcagaatgtgtgctcggaccccgggcatcgcgaagtgtgcgggccgtgggccccggctgcaccgccagcccctgcctggccaccccaccgcttacttgacctccaggaagcgcctgaaagaaagcgagctctgatatgtgcagctccagtgtgtttcaataagctgttttcaaagagtttgggtgcctcttcagactaagcccgttcgaaacctccatcttctttctagggttttcttcaacgggggcttagatgataaacggagacccctgttccctaccggttgaaactgtgtctgcggcaacagtaagcacccggccgagacacccacacccccatgtcgtgcgctcaggaccaggg

SEQ ID NO: 152389 - DNA, 30 bp, Homo sapiens
  chr6:1081774-1081804
  hypo
caaaatcggacatttcggagtcgcccgtct

SEQ ID NO: 152390 - DNA, 225 bp, Homo sapiens
  chr6:1082984-1083209
  hypo
ctgaaggattaatgcagacaacgtgggcaaagcactgggcgcagatcctggcagttagcaagggcttgggaagcaccggactctctcactcgctgtgagttatgcattggcactcacatgttttgttggcttataatcctcgcacggtgttaaaacctaggtgctgtcattatgcccactttacaaatgaggaaacagaggcccggggatgcaaagtaccttgtt

SEQ ID NO: 152391 - DNA, 256 bp, Homo sapiens; identical to SEQ ID NO: 70888
  chr6:1097958-1098214
  hypo

SEQ ID NO: 152392 - DNA, 31 bp, Homo sapiens; identical to SEQ ID NO: 70889
  chr6:1317676-1317707
  hypo

SEQ ID NO: 152393 - DNA, 824 bp, Homo sapiens; identical to SEQ ID NO: 112737
  chr6:1379267-1380091
  hypo

SEQ ID NO: 152394 - DNA, 331 bp, Homo sapiens; identical to SEQ ID NO: 4530
  chr6:1390427-1390758
  hypo

SEQ ID NO: 152395 - DNA, 512 bp, Homo sapiens; identical to SEQ ID NO: 4531
  chr6:1390955-1391467
  hypo

SEQ ID NO: 152396 - DNA, 106 bp, Homo sapiens
  chr6:1408643-1408749
  hypo
acagctccccatcaacgcttcctgcgtcgggctcaagccagcgttgtggaaaaaaagcatagcatggttttttcacgttgtcaagagcgttctgaggcctgccctt

SEQ ID NO: 152397 - DNA, 286 bp, Homo sapiens
  chr6:1446291-1446577
  hypo
gttactgggccatggcgtctaggaagtttcttacctttctgagacctcttgctgttctccaaagcagcggcccgctttgccttcccacggggagcgcgtgggagttgccgtcgcccagggtcccatcatcagcacttgctcttttccatcgctgtgtcgttctggcttttttctcaacccgctctagcaggcttgtagcagcgtctcattcccctaatgggtaatggcgtggagcatctttccatgagtttattggccatttatagatcttcgttggggaagtgtc

SEQ ID NO: 152398 - DNA, 352 bp, Homo sapiens; identical to SEQ ID NO: 70894
  chr6:1515494-1515846
  hypo

SEQ ID NO: 152399 - DNA, 30 bp, Homo sapiens; identical to SEQ ID NO: 70895
  chr6:1519148-1519178
  hypo

SEQ ID NO: 152400 - DNA, 371 bp, Homo sapiens
  chr6:1523632-1524003
  hypo
gctcagctggcagaggtgcaccgccttgcttggtttccactcctcttgaaggaagaggtgctggcatctgcaccattcttagcgtcggcactgctttgcaccccccggctggccagcgcgggatgtgggtggggaaatagccactacagtccggagtctccccactccctccccaggcccacttccccgacgaagtttcactccattgttcctgggcatctccaggggtgtctagtttgaacaagaaaaggaatgttctggatggctggtcctgggcgctcaccgggaatgaacgtgagccactctttcgcacacaggccactctgcgtcagccactctcgggctgccccgaagtgatgtcctggtggtcc

SEQ ID NO: 152401 - DNA, 75 bp, Homo sapiens
  chr6:1574419-1574494
  hypo
ctgcataaacctcagcgcccctcacgccagccttgggggacatgcctcaccaaggagaagcgttgccttctatgg

SEQ ID NO: 152402 - DNA, 30 bp, Homo sapiens; identical to SEQ ID NO: 70898
  chr6:1581771-1581801
  hypo

SEQ ID NO: 152403 - DNA, 101 bp, Homo sapiens
  chr6:1587932-1588033
  hypo
aacaccaggcagcgccggttctagtcttgactccggcacaattccccaggcagtgagacttggctcacctggcttggcagctgcagcgttacaacccatga

SEQ ID NO: 152404 - DNA, 724 bp, Homo sapiens; identical to SEQ ID NO: 112751
  chr6:1604912-1605636
  hypo

SEQ ID NO: 152405 - DNA, 2013 bp, Homo sapiens; identical to SEQ ID NO: 112752
  chr6:1610182-1612195
  hypo

SEQ ID NO: 152406 - DNA, 186 bp, Homo sapiens; identical to SEQ ID NO: 112753
  chr6:1612300-1612486
  hypo

SEQ ID NO: 152407 - DNA, 30 bp, Homo sapiens; identical to SEQ ID NO: 20035
  chr6:1621792-1621822
  hypo

SEQ ID NO: 152408 - DNA, 30 bp, Homo sapiens
  chr6:1630044-1630074
  hypo
tcatttgggatcagcggctgttaagcacta

SEQ ID NO: 152409 - DNA, 173 bp, Homo sapiens; identical to SEQ ID NO: 70904
  chr6:1631278-1631451
  hypo

SEQ ID NO: 152410 - DNA, 74 bp, Homo sapiens; identical to SEQ ID NO: 70905
  chr6:1666396-1666470
  hypo

SEQ ID NO: 152411 - DNA, 190 bp, Homo sapiens
  chr6:1679634-1679824
  hypo
aatttaggtcagctgacgcaagcgctgagaagctgaacaactggcatggtgctctatcttcactgccaggccaggcaagggggccccagctaatgctgctccgtgctgatctgctctctgctcctcatacctgttggtatcgaccttgtaagaaggttcagatccatgagtggcccgtgatgactgaaca

SEQ ID NO: 152412 - DNA, 34 bp, Homo sapiens
  chr6:1702253-1702287
  hypo
ttctcaaatgacgcacgcctctcttgggtattat

SEQ ID NO: 152413 - DNA, 70 bp, Homo sapiens
  chr6:1702366-1702436
  hypo
gttttctcagcaatgcctgatgcaagctcgagctttgacagcagtagctggactccgactcttcgtaaag

SEQ ID NO: 152414 - DNA, 328 bp, Homo sapiens; identical to SEQ ID NO: 20036
  chr6:1708417-1708745
  hypo

SEQ ID NO: 152415 - DNA, 354 bp, Homo sapiens
  chr6:1726567-1726921
  hypo
tggcaccaggcattccatgagcgcatttgcccagccagccagccaaatgtggccacgcactgggtggccagagagtccttaccacttcagttggccggtagtacttgagatccacagtcacgtgaactttgccggtctctttacatctgcccacttcattttcattctttccttcccacctgtaaggaagataaacactgaatcagctcctaattgcttgggaacatttggccatgctgtagcaccttgggatgccccagccctctccccgcaggagcgcttaagctcattaaccacagcagcacaggctgatgctccagctgattattaaagcaacggcgactttcaaagcct

SEQ ID NO: 152416 - DNA, 102 bp, Homo sapiens
  chr6:1874236-1874338
  hypo
cttgcaggaggcagacggaccagtgggaggaagggtgaccactgcctcgaacagggcaccggcctccagagacgacctgcttggaggcgtgccaccccacgg

SEQ ID NO: 152417 - DNA, 30 bp, Homo sapiens
  chr6:1908132-1908162
  hypo
caaaccgtacacacacgatgttttttccca

SEQ ID NO: 152418 - DNA, 30 bp, Homo sapiens
  chr6:1908411-1908441
  hypo
ggaatggttcacgtccgggcagaacgaagt

SEQ ID NO: 152419 - DNA, 151 bp, Homo sapiens
  chr6:1923748-1923899
  hypo
gcagctggtcttgctctctcacgtgctccctcccacaaggggttgagcgcagcaggctgagtaaatggagcttgttcctgccagcgcacagagcagcagccagccggatcccgcactcgctcactcacgcgctccctcctacaagcggttg

SEQ ID NO: 152420 - DNA, 282 bp, Homo sapiens; identical to SEQ ID NO: 20037
  chr6:1953248-1953530
  hypo

SEQ ID NO: 152421 - DNA, 30 bp, Homo sapiens
  chr6:1993424-1993454
  hypo
acttctcttccttctcggagggtatgggta

SEQ ID NO: 152422 - DNA, 30 bp, Homo sapiens
  chr6:1993801-1993831
  hypo
aacaaaaaagtgcgacggaagctctgtttc

SEQ ID NO: 152423 - DNA, 180 bp, Homo sapiens; identical to SEQ ID NO: 70910
  chr6:2108902-2109082
  hypo

SEQ ID NO: 152424 - DNA, 164 bp, Homo sapiens; identical to SEQ ID NO: 20039
  chr6:2127866-2128030
  hypo

SEQ ID NO: 152425 - DNA, 97 bp, Homo sapiens; identical to SEQ ID NO: 20040
  chr6:2233025-2233122
  hypo

SEQ ID NO: 152426 - DNA, 30 bp, Homo sapiens
  chr6:2244347-2244377
  hypo
tccacctctgcacaccgaagtgctgagatt

SEQ ID NO: 152427 - DNA, 69 bp, Homo sapiens
  chr6:2244786-2244855
  hypo
aacacctctaagaggcgaccctcacaaaccagccatgcttagcctgagacattccgaagacctcctctt

SEQ ID NO: 152428 - DNA, 31 bp, Homo sapiens; identical to SEQ ID NO: 70913
  chr6:2247165-2247196
  hypo

SEQ ID NO: 152429 - DNA, 122 bp, Homo sapiens
  chr6:2377320-2377442
  hypo
ggcagaaatgccatgcgcgcccctccgaggacggggcagcgtgtttgaagagtcaccatggtagtgatattttatgagcatgagtcacttgtctgtttttcagggagcgctttgctcggccc

SEQ ID NO: 152430 - DNA, 574 bp, Homo sapiens
  chr6:2434634-2435208
  hypo
cactgggctcggggccgcccctgcccctggtccttcagtgttgctcaaactagaaacagaagccatgctggaagacagagctgctgacctaagcccaaagcccaggtaaggtgcagacaacaggcaggcactggagtggcaaggaccatcacgtggttcctgggtccatgcgtgttctgcccgggcgacagctggcactctgaaacaccactcacagctccagtcctggccctgccgccacgttagcttgtgctctcatgcagtcactgaccctccccagacctccgtgtttttatcaggagaatgagaagctggatgtcatcgctcctttgcaatgattctgaggtactgcatttagggagaaaaccccaccacacacatgctcaatacaaaccctatttctgggggtagatttgatttaaaacgtcaccataaaccgtttaaagcatccagtaatttactaataatgcgtttcctgatgaggggagggaaggccgcggtttcaatctctcctactgattcagtgtgtgctgttccctaaaataaaaatcagcttcatcgaaagctgctgaaa

SEQ ID NO: 152431 - DNA, 168 bp, Homo sapiens; identical to SEQ ID NO: 70914
  chr6:2447381-2447549
  hypo

SEQ ID NO: 152432 - DNA, 152 bp, Homo sapiens; identical to SEQ ID NO: 70915
  chr6:2510116-2510268
  hypo

SEQ ID NO: 152433 - DNA, 141 bp, Homo sapiens; identical to SEQ ID NO: 70916
  chr6:2530902-2531043
  hypo

SEQ ID NO: 152434 - DNA, 386 bp, Homo sapiens
  chr6:2559178-2559564
  hypo
gggggtgggggcatgggaggtcggcactccctccttcaggaatctctgagctcgcagaaccgtccagtgcgtgggtggtagagggatcagctgacggggaagtgcaagcgtgaaggcggccacccaagacttcaggtcactgctgacctcccgtcggggctcagatctcagcactgggagggcatctgctcgccctgccaaaacaaaccagcccctgcaaggggcacattgcacaggaaggggggctggagggacaaggagctccgggtttcacttgaacagtctcaaataaccggtttacaatgatgcggtgttcttggcgttgcgggtaacaaaagggctgaggcccaactccagatctggtgagcattcgtgggcagcagcac

SEQ ID NO: 152435 - DNA, 30 bp, Homo sapiens
  chr6:2630679-2630709
  hypo
aagtggcaaggatcccgctcacccgaggag

SEQ ID NO: 152436 - DNA, 30 bp, Homo sapiens
  chr6:2641821-2641851
  hypo
acacacacacacacacgcacgcacaaacat

SEQ ID NO: 152437 - DNA, 30 bp, Homo sapiens
  chr6:2685386-2685416
  hypo
gtgattgtgtgatccgcgcgaatcagagtc

SEQ ID NO: 152438 - DNA, 68 bp, Homo sapiens; identical to SEQ ID NO: 70918
  chr6:2697705-2697773
  hypo

SEQ ID NO: 152439 - DNA, 396 bp, Homo sapiens
  chr6:2701263-2701659
  hypo
catgtgtgtgtcaaccgacttcaaatggaatcacagctcctcatgttcatttcattaaaatgagtcttactttgtaaaatttccctttcataacgcaagtccaaaccttggaatgttttcgcatgaagtttacagtgtttcttcatcacccaataaaactctttgatttcttcccgccgcagacagttttaagagccttcatttcacatggggttctcggtatgctttttaatttttattttaagatcattttttatcacttcatctcctgtctcccactctgagcctaagttcagttcggcctccccgagccccactgcctccctgcagtggggcacgccggccgaggctcagaggggcttggtgtttcctaatgtgaggcgaggtgtggtcccc

SEQ ID NO: 152440 - DNA, 30 bp, Homo sapiens; identical to SEQ ID NO: 70919
  chr6:2713785-2713815
  hypo

SEQ ID NO: 152441 - DNA, 57 bp, Homo sapiens
  chr6:2780601-2780658
  hypo
gactttggttccaagcgctgcctcttcgtgggtgagcacactcgctgcatgacctag

SEQ ID NO: 152442 - DNA, 30 bp, Homo sapiens
  chr6:2780963-2780993
  hypo
tcaccatgccgggatcgccattgtttctga

SEQ ID NO: 152443 - DNA, 31 bp, Homo sapiens; identical to SEQ ID NO: 20042
  chr6:2803700-2803731
  hypo

SEQ ID NO: 152444 - DNA, 80 bp, Homo sapiens
  chr6:2870698-2870778
  hypo
tccctccacacttcccggtaagagggagccggctctggcctggccacctcagagagtggctcacacagtgcagcggcggg

SEQ ID NO: 152445 - DNA, 19 bp, Homo sapiens
  chr6:2870837-2870856
  hypo
cgagcgagggctgctagca

SEQ ID NO: 152446 - DNA, 290 bp, Homo sapiens
  chr6:2891874-2892164
  hypo
tagtttggcagatcacgcagacaatattgggaaaagtcagccttgaacaaaagttcgatcccaacgccaagtgcctgcacagtgtgcgtctgccgcatcgccaactcagaaggtgaatatgagaggtggaagtggcactcgagttctgcccgcaaaggtgtccctgggttcttcccgcagcccgggtcttaccgtgctgagctccacgccgtcgtcaggcagcagcaccagcaggctcagctccttcctggcgtagggcagctccagcagctgcgcgcgcacctcgccca

SEQ ID NO: 152447 - DNA, 34 bp, Homo sapiens; identical to SEQ ID NO: 20043
  chr6:2906981-2907015
  hypo

SEQ ID NO: 152448 - DNA, 93 bp, Homo sapiens; identical to SEQ ID NO: 20044
  chr6:2907134-2907227
  hypo

SEQ ID NO: 152449 - DNA, 64 bp, Homo sapiens; identical to SEQ ID NO: 70923
  chr6:2907532-2907596
  hypo

SEQ ID NO: 152450 - DNA, 257 bp, Homo sapiens; identical to SEQ ID NO: 20045
  chr6:2920899-2921156
  hypo

SEQ ID NO: 152451 - DNA, 181 bp, Homo sapiens
  chr6:2939518-2939699
  hypo
aaaaaaaaaaaaaatcaaagcggaagcagcacttgatttttgaagtctcctgcttgaccctcttccaagcctactttctccaatgaactttcacattgcttaaaataaatgttcccttgcctgtctctcatttgaattctttccttttaaaagtacaaagtgagaagtgacagcatgctgg

SEQ ID NO: 152452 - DNA, 30 bp, Homo sapiens
  chr6:2948384-2948414
  hypo
acacggagtgaatgcggcatcccacaaatg

SEQ ID NO: 152453 - DNA, 203 bp, Homo sapiens
  chr6:2985172-2985375
  hypo
ctcccaggactttgccgaagggagtggcgtccatttgcatgaggagctcaggaaaactgctcctcaggtgccgagttagagacacctagtgagcttcaccagagtagttttgaccagggatacaacaaagctcctaaaactgaaaaagcacgaaaacaaaaatggttgtgaacagggctcagcgatgacgaggctacattcag

SEQ ID NO: 152454 - DNA, 44 bp, Homo sapiens; identical to SEQ ID NO: 70926
  chr6:2986009-2986053
  hypo

SEQ ID NO: 152455 - DNA, 16 bp, Homo sapiens
  chr6:2986765-2986781
  hypo
gcctcattctacaaac

SEQ ID NO: 152456 - DNA, 225 bp, Homo sapiens; identical to SEQ ID NO: 112769
  chr6:2999175-2999400
  hypo

SEQ ID NO: 152457 - DNA, 30 bp, Homo sapiens; identical to SEQ ID NO: 70928
  chr6:3036870-3036900
  hypo

SEQ ID NO: 152458 - DNA, 329 bp, Homo sapiens; identical to SEQ ID NO: 70929
  chr6:3053000-3053329
  hypo

SEQ ID NO: 152459 - DNA, 159 bp, Homo sapiens
  chr6:3065503-3065662
  hypo
aaaaaaaaaaaaaaaaaaaaaagacacggctttctgaggtgccgtgcggctgtggcgggggtggctgggggtgcgggttgtgttcattgtccaaggctctccagtgctttgcgtggcgttttggggagcacagatgaggtgtcccgacagtggggagtg

SEQ ID NO: 152460 - DNA, 30 bp, Homo sapiens; identical to SEQ ID NO: 70931
  chr6:3083384-3083414
  hypo

SEQ ID NO: 152461 - DNA, 384 bp, Homo sapiens; identical to SEQ ID NO: 70932
  chr6:3115565-3115949
  hypo

SEQ ID NO: 152462 - DNA, 30 bp, Homo sapiens
  chr6:3129395-3129425
  hypo
gcctacgtcactgacgaagacagcatgata

SEQ ID NO: 152463 - DNA, 129 bp, Homo sapiens; identical to SEQ ID NO: 70933
  chr6:3132219-3132348
  hypo

SEQ ID NO: 152464 - DNA, 30 bp, Homo sapiens; identical to SEQ ID NO: 70934
  chr6:3140586-3140616
  hypo

SEQ ID NO: 152465 - DNA, 31 bp, Homo sapiens; identical to SEQ ID NO: 20049
  chr6:3143423-3143454
  hypo

SEQ ID NO: 152466 - DNA, 30 bp, Homo sapiens
  chr6:3144088-3144118
  hypo
ctgggtttcagactcgactgcaaacgatga

SEQ ID NO: 152467 - DNA, 30 bp, Homo sapiens; identical to SEQ ID NO: 20050
  chr6:3150252-3150282
  hypo

SEQ ID NO: 152468 - DNA, 27 bp, Homo sapiens
  chr6:3154184-3154211
  hypo
tcgttcatgttgctctcggcctcggtg

SEQ ID NO: 152469 - DNA, 255 bp, Homo sapiens; identical to SEQ ID NO: 112775
  chr6:3162841-3163096
  hypo

SEQ ID NO: 152470 - DNA, 41 bp, Homo sapiens; identical to SEQ ID NO: 70939
  chr6:3177386-3177427
  hypo

SEQ ID NO: 152471 - DNA, 41 bp, Homo sapiens; identical to SEQ ID NO: 20052
  chr6:3179683-3179724
  hypo

SEQ ID NO: 152472 - DNA, 216 bp, Homo sapiens; identical to SEQ ID NO: 70941
  chr6:3193807-3194023
  hypo

SEQ ID NO: 152473 - DNA, 45 bp, Homo sapiens
  chr6:3194435-3194480
  hypo
gctgggattacgggcgtgagccacggcgcccggcctacatttaaa

SEQ ID NO: 152474 - DNA, 353 bp, Homo sapiens
  chr6:3195389-3195742
  hypo
ggacaaggcccagggccggcatgactctgggtcacaaggtctattcatcttggtgtggcttctttgcttattgtgctccgtcctgtgatggtctctgcagggggccacagagacgtaaagaacttgctctcctttccctgttgcaagagacaggtctaggttgaaggactaagtgagcgagggaaatgagggtcacggcagcccactcccttaccgcctttaacaatttgatctccatccaaccgaagcattgcctctatactttactgagaagctcaaaggcactttgcttttatgagctgctctcttccgaaataaatattaatgacattcaagctcgtgggtgttgctga

SEQ ID NO: 152475 - DNA, 30 bp, Homo sapiens
  chr6:3196265-3196295
  hypo
tcagctgcagcgtggcgtaggtcgccatca

SEQ ID NO: 152476 - DNA, 219 bp, Homo sapiens
  chr6:3218508-3218727
  hypo
acgcttgtatcttcccgtcttaacccctcaaggctcgcctctctcagctgtccttccagattttcagccacttctgaacatgggcatctaacatgttctgtggcgctgactttccctccagccctcagacttgccttagtccctgttgtctgccagtttttccctggacatcgtcctctgagagaccatgcagtcccatggccgcgcatgaccagtatg

SEQ ID NO: 152477 - DNA, 30 bp, Homo sapiens; identical to SEQ ID NO: 20054
  chr6:3226274-3226304
  hypo

SEQ ID NO: 152478 - DNA, 150 bp, Homo sapiens
  chr6:3250842-3250992
  hypo
ttaagccatgggctgcggagctggagagaataggacgctggacgcttctgctgcacaggtgggactatgacgaagaaccagccaaggagcctgagaaggagggacctggagggacgaggcaccaagacagagcagcgccccagaaatcaa

SEQ ID NO: 152479 - DNA, 253 bp, Homo sapiens
  chr6:3263635-3263888
  hypo
ttgagacactaaaacgagcctttcgtgtgaaactggtcctagaacttagtagcactgtggttccagcttcatctttcccaactccgctgacctcatatgcgacatggggtccacctacttggttgttgacggacgccacccctctttccctcggcacctgtgcctgtcctctctgaacctgccactgccatcgtcgtgaagaatcagaagcccggaagccagaagtgtggctggcctgcggggggtggagaag

SEQ ID NO: 152480 - DNA, 91 bp, Homo sapiens; identical to SEQ ID NO: 70946
  chr6:3267968-3268059
  hypo

SEQ ID NO: 152481 - DNA, 69 bp, Homo sapiens; identical to SEQ ID NO: 70947
  chr6:3269487-3269556
  hypo

SEQ ID NO: 152482 - DNA, 30 bp, Homo sapiens; identical to SEQ ID NO: 70948
  chr6:3272494-3272524
  hypo

SEQ ID NO: 152483 - DNA, 30 bp, Homo sapiens; identical to SEQ ID NO: 20056
  chr6:3272953-3272983
  hypo

SEQ ID NO: 152484 - DNA, 249 bp, Homo sapiens
  chr6:3273205-3273454
  hypo
cctggctgcgtgttcggtccctggtctgtaaacctgtgcccaagctgccccagaccctggagccccgggttccgcaggccgggctacatggccttcatgccgttggccgtggcaccctcgggcagtgtgtcacccgcggctgcggcatcgtggaggcccgagtagtccttgagctcggcgttggtgagcagcagtggctgctcccccttcttgtgcggcagcagcggctggcgcgtgtagtgctccccg

SEQ ID NO: 152485 - DNA, 97 bp, Homo sapiens; identical to SEQ ID NO: 70951
  chr6:3281276-3281373
  hypo

SEQ ID NO: 152486 - DNA, 30 bp, Homo sapiens
  chr6:3284683-3284713
  hypo
aatggcaccggagaccgacctcgcgccagg

SEQ ID NO: 152487 - DNA, 534 bp, Homo sapiens
  chr6:3285281-3285815
  hypo
aggaagcacagcccacgcgcttgggactcacctgagtctgggtgctggctgtactttccaatcactggacccgcagacatgatcgcacccacacggacaagggccaagcaagcgagaagagagaagagagcacattaggtgtggagttagcctagcgtgttcccatgcgacttggttcaagcaaactcccttccgtgtctgggatggcgctggccgccggggcagtggaattcatactgcgctaaacaaagatctttttgttaggaagacaggagtgagaccctgctggcctcagagcctgaggagaaaatggaaccttcacagtgagaccccagcaggtgcaaagggtgagcttccttgcatgtaaagtcacccacaggtcactgccgcctgcattcaagctgcgtcaagtgctgtggggtgcccctgccagccccagctctgctcctcacggctgcttggtgttcgcctggggctcctgtgcattcctgctcagggccaaaggggcaccacaacacccgggggctgaggcac

SEQ ID NO: 152488 - DNA, 30 bp, Homo sapiens
  chr6:3286032-3286062
  hypo
gctctgatctgggtgcggtggacagccctg

SEQ ID NO: 152489 - DNA, 37 bp, Homo sapiens; identical to SEQ ID NO: 20059
  chr6:3289594-3289631
  hypo

SEQ ID NO: 152490 - DNA, 31 bp, Homo sapiens; identical to SEQ ID NO: 70954
  chr6:3289980-3290011
  hypo

SEQ ID NO: 152491 - DNA, 153 bp, Homo sapiens; identical to SEQ ID NO: 70955
  chr6:3290702-3290855
  hypo

SEQ ID NO: 152492 - DNA, 31 bp, Homo sapiens; identical to SEQ ID NO: 70956
  chr6:3292642-3292673
  hypo

SEQ ID NO: 152493 - DNA, 121 bp, Homo sapiens; identical to SEQ ID NO: 70957
  chr6:3302109-3302230
  hypo

SEQ ID NO: 152494 - DNA, 30 bp, Homo sapiens
  chr6:3305681-3305711
  hypo
ttttatgacgcgctccgtgaatttaaattt

SEQ ID NO: 152495 - DNA, 266 bp, Homo sapiens; identical to SEQ ID NO: 70958
  chr6:3307209-3307475
  hypo

SEQ ID NO: 152496 - DNA, 30 bp, Homo sapiens; identical to SEQ ID NO: 70959
  chr6:3312213-3312243
  hypo

SEQ ID NO: 152497 - DNA, 70 bp, Homo sapiens; identical to SEQ ID NO: 70960
  chr6:3312766-3312836
  hypo

SEQ ID NO: 152498 - DNA, 70 bp, Homo sapiens
  chr6:3315027-3315097
  hypo
ctggagtgtcttctccgggccagtgtcctttacggcagcacaatctcacgtcctccgcgctagggtttac

SEQ ID NO: 152499 - DNA, 158 bp, Homo sapiens
  chr6:3315693-3315851
  hypo
gctatctgttcacatcgtggaactggacaggaccatcagatctcacaggcccttcgaggatggcatctgtttcatttcactacacagtctcgaaccctatttcatgtaagaaaagtgtgtgttcggctgggcatggtggctcacacatataatcccag

SEQ ID NO: 152500 - DNA, 30 bp, Homo sapiens
  chr6:3316272-3316302
  hypo
caggcccaccacaggcgtttttattcagca

SEQ ID NO: 152501 - DNA, 77 bp, Homo sapiens; identical to SEQ ID NO: 20060
  chr6:3316814-3316891
  hypo

SEQ ID NO: 152502 - DNA, 31 bp, Homo sapiens; identical to SEQ ID NO: 70962
  chr6:3317655-3317686
  hypo

SEQ ID NO: 152503 - DNA, 201 bp, Homo sapiens; identical to SEQ ID NO: 70963
  chr6:3321382-3321583
  hypo

SEQ ID NO: 152504 - DNA, 179 bp, Homo sapiens
  chr6:3322741-3322920
  hypo
gacaagagctggaggcggccccaggagaggagctcagttcgggcagcggtggctgctgagtggcctctctggcaggtggccttttcccatctgctattgctggccccctgctgctgccgaggtcctcataacacagtgagcaagaaccaggctctcggggaaaccgcacctgcaccctc

SEQ ID NO: 152505 - DNA, 30 bp, Homo sapiens; identical to SEQ ID NO: 70964
  chr6:3327249-3327279
  hypo

SEQ ID NO: 152506 - DNA, 528 bp, Homo sapiens
  chr6:3328431-3328959
  hypo
ggttgtgagaatgaaacagtacgtagctgagactgaactgaggcatttgtttagtgaatcaacagggaccatgactaagtctgagcacagaggccgcccggaggctttgatagaaaagtggcattgttaggaggccacagctctgggagatacgcttttcggaagtcgtcagattcttacaaattttcaggaggaaaagcacattgcgcttcccagggtagacactttatgtgacggaggaggaaggcctgagggagtggggtgtgggggtttgatgtgtcacgtggcggggctgcagtcttaggcatttgctcaaacaggaaccccggtgctgccaggagagagctgactttgagcgaggggcttctagataatttgggtgggtctcgcctcatctgttgaaagacctgaacatagggccgaggcttccttgaggaggaagaagattccacctgtggacggcagtgcccgcccccatgccctggagtcctgatggctggccctcccgctggcccctcatggatgtca

SEQ ID NO: 152507 - DNA, 261 bp, Homo sapiens; identical to SEQ ID NO: 70966
  chr6:3333097-3333358
  hypo

SEQ ID NO: 152508 - DNA, 30 bp, Homo sapiens; identical to SEQ ID NO: 70967
  chr6:3343873-3343903
  hypo

SEQ ID NO: 152509 - DNA, 211 bp, Homo sapiens; identical to SEQ ID NO: 70968
  chr6:3346365-3346576
  hypo

SEQ ID NO: 152510 - DNA, 26 bp, Homo sapiens
  chr6:3362338-3362364
  hypo
actttaaaaaaattagcggccaggtg

SEQ ID NO: 152511 - DNA, 31 bp, Homo sapiens; identical to SEQ ID NO: 70970
  chr6:3368646-3368677
  hypo

SEQ ID NO: 152512 - DNA, 30 bp, Homo sapiens; identical to SEQ ID NO: 20062
  chr6:3386569-3386599
  hypo

SEQ ID NO: 152513 - DNA, 30 bp, Homo sapiens; identical to SEQ ID NO: 20063
  chr6:3400399-3400429
  hypo

SEQ ID NO: 152514 - DNA, 30 bp, Homo sapiens
  chr6:3405206-3405236
  hypo
tttgtcggccaggtgcggtggctcatgcct

SEQ ID NO: 152515 - DNA, 330 bp, Homo sapiens
  chr6:3405475-3405805
  hypo
cagtgcgagactgtctcaaaaaatttaaaaaaaaaaaaagtttgtcaaaggccttcggtaaactctgactcatttccttggtggaaatagccttgtgagtggagttggtcccaccaggagaagggctttttgccctgagaacttgctgctactgggaaggcccacgtatctgaagatggggaaaccgggtggagacaaagagacgaccgagcacgtattcatgcgaaactttcccttcacccaaatgcagagcaaatgtttgctccccagaagcccacaaggtagctgaagccatttctagttgacatcggcaatctccattctcttcat

SEQ ID NO: 152516 - DNA, 30 bp, Homo sapiens
  chr6:3432426-3432456
  hypo
agtgctccttgcccacgcctctgctccctg

SEQ ID NO: 152517 - DNA, 30 bp, Homo sapiens
  chr6:3432722-3432752
  hypo
ctccttctagctctccgctttggctcagta

SEQ ID NO: 152518 - DNA, 30 bp, Homo sapiens
  chr6:3438564-3438594
  hypo
actcactttcggagccggcaaagccacgag

SEQ ID NO: 152519 - DNA, 557 bp, Homo sapiens
  chr6:3441845-3442402
  hypo
gaagcgactcctctgcgcccctgcaccttgtcctgttcttgggccaaggcacctcacagtgcactgcacctgccctcctgggatgtgctcggttcaccccccaccctcagctcccattccctgccccgctcatcctgtgccgcatgccagggatattcaatttcccaaccgtctccggctacatgaggagctcccttctccagggcagacacgatcttctacccatctgtgacaccagcccagggcagatgttctgagaggaagacagggacaccacgcaagcagctgcagcactgcctctgaaggggagggcacgggagggatggagggattgtccggaactgtcttcaagaaggagggcatcacccaagttcccagccgcacatgcaccatagccaaggggtagaggcgacccaagtgtctgccgatgggtgaacaaacaaacagaatgtggtgcaggcacacaatggcgtattcctcagtctaaggcaggcaggaaacgctcacacacgctaccacatggatgagccttgaagacatcacgctgagcgacatga

SEQ ID NO: 152520 - DNA, 47 bp, Homo sapiens; identical to SEQ ID NO: 70975
  chr6:3445256-3445303
  hypo

SEQ ID NO: 152521 - DNA, 44 bp, Homo sapiens; identical to SEQ ID NO: 70976
  chr6:3450541-3450585
  hypo

SEQ ID NO: 152522 - DNA, 43 bp, Homo sapiens; identical to SEQ ID NO: 70977
  chr6:3450824-3450867
  hypo

SEQ ID NO: 152523 - DNA, 1367 bp, Homo sapiens; identical to SEQ ID NO: 42532
  chr6:3455897-3457264
  hypo

SEQ ID NO: 152524 - DNA, 707 bp, Homo sapiens; identical to SEQ ID NO: 112783
  chr6:3457536-3458243
  hypo

SEQ ID NO: 152525 - DNA, 31 bp, Homo sapiens; identical to SEQ ID NO: 70980
  chr6:3466107-3466138
  hypo

SEQ ID NO: 152526 - DNA, 217 bp, Homo sapiens
  chr6:3468952-3469169
  hypo
ggtcctggctccaccttctcccgcttgccctgtcttgctgcagacacgttgctttgcatcttggacagaaccagaaacgtgacacattcctaataaccttaataatcctcacagctagcatttcttgagcacgcgatcacctttccacatatctcatctcacttaaggtaccctacgcgaaggaaggatcattgcaccattacggagacgaggatac

SEQ ID NO: 152527 - DNA, 97 bp, Homo sapiens; identical to SEQ ID NO: 70982
  chr6:3471225-3471322
  hypo

SEQ ID NO: 152528 - DNA, 273 bp, Homo sapiens
  chr6:3515168-3515441
  hypo
gacaggcggcttctgcgaagggccagggatgatggaggggaattggatcctggagcaggaaagtagggcatggttaggggctgatggagacctgcagtcgcatggaaggaaggcagagtctcagggcaaggggtgcccagcgagcctgacgctgggggtgcaaggaagccaagcatcggaggtgactccaagttctggacacagggacggggaaaaaagtgtcattatcgaagatggggtatacatcttgggaaaaggctgacttctatgtat

SEQ ID NO: 152529 - DNA, 30 bp, Homo sapiens
  chr6:3536102-3536132
  hypo
gcgtttctattgcagcgctatgattcagtc

SEQ ID NO: 152530 - DNA, 30 bp, Homo sapiens
  chr6:3536460-3536490
  hypo
gctgcgacacggggccgttctgcttttgca

SEQ ID NO: 152531 - DNA, 140 bp, Homo sapiens
  chr6:3540897-3541037
  hypo
acccagtgtcaatgccgcatgacgctgaggccaacccagggctgcccttgcctgtgtggctgtgccccccgggttgacatggccactcctgaggctggggagtgagcacttcttttttcttttttgagacagagtcccgc

SEQ ID NO: 152532 - DNA, 30 bp, Homo sapiens
  chr6:3542756-3542786
  hypo
tcaacagcttgcagccgaccctggggcgcc

SEQ ID NO: 152533 - DNA, 101 bp, Homo sapiens
  chr6:3543265-3543366
  hypo
ttcagtacttgggagcggagggttgttttcttcaggggcggtgttgtataaaatatacgtatttaacattagacctacactcggttcggtgagtgtctcat

SEQ ID NO: 152534 - DNA, 29 bp, Homo sapiens
  chr6:3548728-3548757
  hypo
cctgggccacagagcgagactccgactca

SEQ ID NO: 152535 - DNA, 141 bp, Homo sapiens
  chr6:3572617-3572758
  hypo
agccacagccagccacgtgcttactgtgtgctggcgttgtgctacttgaggaaggaattctgtttccattttacagttgaggaaacagaggttgagaaactggctccagggagaagcaaagctcttggattacttccaagc

SEQ ID NO: 152536 - DNA, 21 bp, Homo sapiens
  chr6:3572937-3572958
  hypo
gccatgttgcccacaagtccc

SEQ ID NO: 152537 - DNA, 257 bp, Homo sapiens; identical to SEQ ID NO: 70984
  chr6:3578543-3578800
  hypo

SEQ ID NO: 152538 - DNA, 222 bp, Homo sapiens; identical to SEQ ID NO: 20068
  chr6:3579859-3580081
  hypo

SEQ ID NO: 152539 - DNA, 30 bp, Homo sapiens
  chr6:3589750-3589780
  hypo
ctgcggcaaggtgggcgtgctcagcatgat

SEQ ID NO: 152540 - DNA, 72 bp, Homo sapiens
  chr6:3590113-3590185
  hypo
gccaagtctgaaacacgggctcgggcttctgactccatgtcagggcgtttccacggccggctccacaggagg

SEQ ID NO: 152541 - DNA, 477 bp, Homo sapiens
  chr6:3593168-3593645
  hypo
tccagagcccactaacgcagtgggggccccggggttttaccaactggtccacttggccctattatttctcttcattctttgtgagccatgtggctcctcactggtggctgctgctaatattttagacccaccatttgtgtcctacaccttcgaaactgcaggaaagtctccgggggagtgggggcaacgggctctcccccccgcaccccattaatcgtatcttgctggaaggggctgcaaagcggtgcttagggaaacctctatttccaccgataaccctttccctcaaaaatacatactccttattttgctgatgatgaaaaccaagtttcaggttgttgaagagatttgccttagatttcctcttgagaagacagtagacgggaaataaatccagccggaaacccattcaactaaccaacactgcctctttgcatgtttgtgcatgtaggtaaatacatccgtagatttatttaa

SEQ ID NO: 152542 - DNA, 30 bp, Homo sapiens
  chr6:3608506-3608536
  hypo
tgagtgccctcccagcgtggcttcggcaac

SEQ ID NO: 152543 - DNA, 25 bp, Homo sapiens
  chr6:3612287-3612312
  hypo
acccggcctctcattttcatctgct

SEQ ID NO: 152544 - DNA, 518 bp, Homo sapiens
  chr6:3618094-3618612
  hypo
cgacatctgtctctccgagacctccaaccccagcctggagccgccgtgcctatttctggaatctgagagacctcaaattccaaaggcaccgtgagagtctcaggactcagcctttccacccttgccggggtgactcgtggagggaatcgagcctaagtcttacggcacgttgtgcagtttgggccggggcggaggaccagggcccagctgaggctggccttagtgactcagccttgatcctgccacggtgacaagggtgggagggttcccgcaggggtccagctcgtgtctgtgagaagcaccttcccttcagggtcgcacgtggaccgtggctgctaccacgctaccgttgccttcagtgctcttttgcaggagtgcagacgggcagttcagcgcgggccccagtgccgggggtggggggcagggagctcccgcagggctttgctgagaaggggcataaccatgacccactggtgatgtctgtgaggtggaggcagtggttgcggtgagattcatag

SEQ ID NO: 152545 - DNA, 30 bp, Homo sapiens
  chr6:3626759-3626789
  hypo
acctacagattcaaccgtatcctgggtgct

SEQ ID NO: 152546 - DNA, 44 bp, Homo sapiens
  chr6:3633704-3633748
  hypo
actgatgtgccaggacggtaatgtgttcccgaggacgatggaag

SEQ ID NO: 152547 - DNA, 35 bp, Homo sapiens; identical to SEQ ID NO: 70988
  chr6:3646461-3646496
  hypo

SEQ ID NO: 152548 - DNA, 391 bp, Homo sapiens; identical to SEQ ID NO: 20072
  chr6:3646959-3647350
  hypo

SEQ ID NO: 152549 - DNA, 133 bp, Homo sapiens
  chr6:3654811-3654944
  hypo
cccttcgcacaccagcggtcaagtgacaatgcggggcaggtcgctccacgggccgctaggcatcttcctgtgacctcctctggccagagcccctgggtgccaccactgcacagaaacacgtcttcagatttct

SEQ ID NO: 152550 - DNA, 30 bp, Homo sapiens
  chr6:3665567-3665597
  hypo
acaaacagcagagtccgcctcaaccagaga

SEQ ID NO: 152551 - DNA, 199 bp, Homo sapiens
  chr6:3711993-3712192
  hypo
cgaaactttgtctcaaaaaatcataataaaaatgaataaacaaacacgtaactaagagaattacaacaaaattacttcactatcgaagtatagtcacaattactaatagcaagcaagtaacaacagaatggcacttggacctatctggatgagataatcagggaagggagtgaatgcagtcaatcgcggttgccaagag

SEQ ID NO: 152552 - DNA, 30 bp, Homo sapiens
  chr6:3723914-3723944
  hypo
ctgctgggtcgtccccgtcctccagctctg

SEQ ID NO: 152553 - DNA, 340 bp, Homo sapiens
  chr6:3724298-3724638
  hypo
ggtctgtcctcagggaagaggcgcctgcctcgtgctgggccctggggacagctgagagaggagtggtcacgagctcacagcctgaccgcagcagagatgacacacggacgcacaggaggctgcgagggaacaggaggctggagaagagccggcgaggcccgtggaggtcacggggggagacaccttctagcggggaagcctgcatgtgggtacgtgtttcattcgcgctctggcagatgagaagcatccgaacatgggggacttacatggggtgtggagaactagggaagaatacaaaccccaaacataaggggacgtaaaagcccgcgatactgactcc

SEQ ID NO: 152554 - DNA, 578 bp, Homo sapiens
  chr6:3724870-3725448
  hypo
tcctgggagccacctcggggctgcctcctgtgccgcccccagtgactgaaggtggccctggcccgtggacaactgtgggaactcagccatctctggaaagctttgccatgaccaagatgactgcacagtccaggcccctggccggacacacaacaaggcagggcgagcatatgtcccccacaaacctagtacatcgtgcgaatcccgctgacctcaagggacagggctgtgaagacagctttaaggcatttggataagaaaggctgaggctgcagaggaaggcctcccctctgactccatggccaggcctggagtgtggtgtcagcccccgcctcggcttccctatgctcacggtcctggcaacacgaggctgggacagaggccgcggcacaaagagccctagctgtgggtgggaaagctatggggggctcacggagacagagcagctctccaacttcatccagggaatgaaatctcttccccagaccagggctggatggaaacccaagggggaaccttgggcgtgccgaaaggttcaagccagtcgagggacagagccacagcgccacctcaaacag

SEQ ID NO: 152555 - DNA, 433 bp, Homo sapiens; identical to SEQ ID NO: 70992
  chr6:3725747-3726180
  hypo

SEQ ID NO: 152556 - DNA, 116 bp, Homo sapiens
  chr6:3734362-3734478
  hypo
caacatgagactctacgtttctccctgttaaatttcgtctcactatgctcgccccttagggtccacgtgggccatgtgttcatacacatcgctgatagagacgggaggccagggca

SEQ ID NO: 152557 - DNA, 130 bp, Homo sapiens; identical to SEQ ID NO: 70993
  chr6:3738058-3738188
  hypo

SEQ ID NO: 152558 - DNA, 716 bp, Homo sapiens; identical to SEQ ID NO: 112785
  chr6:3750699-3751415
  hypo

SEQ ID NO: 152559 - DNA, 19 bp, Homo sapiens
  chr6:3758266-3758285
  hypo
gcctcctcggcctgggcgc

SEQ ID NO: 152560 - DNA, 30 bp, Homo sapiens
  chr6:3761098-3761128
  hypo
cctctacatggcctacgcctgacgccgtcc

SEQ ID NO: 152561 - DNA, 30 bp, Homo sapiens
  chr6:3783836-3783866
  hypo
aggtctggggaggggcgtgatttccgcgtt

SEQ ID NO: 152562 - DNA, 128 bp, Homo sapiens
  chr6:3784840-3784968
  hypo
tgagtcagagggtcacgttccgtcatacagagcggtgcccagtgttttcccgtgacagtggcactgttcgttcaccacagtcaccctgtaaccggcagcggtgctgttgacttcgtcatgccaaggga

SEQ ID NO: 152563 - DNA, 31 bp, Homo sapiens; identical to SEQ ID NO: 20077
  chr6:3810823-3810854
  hypo

SEQ ID NO: 152564 - DNA, 53 bp, Homo sapiens; identical to SEQ ID NO: 70996
  chr6:3821399-3821452
  hypo

SEQ ID NO: 152565 - DNA, 36 bp, Homo sapiens; identical to SEQ ID NO: 70997
  chr6:3850717-3850753
  hypo

SEQ ID NO: 152566 - DNA, 30 bp, Homo sapiens; identical to SEQ ID NO: 70998
  chr6:3853081-3853111
  hypo

SEQ ID NO: 152567 - DNA, 326 bp, Homo sapiens
  chr6:3880042-3880368
  hypo
ctgtgtcagtccttgcgtgattagtaacaaacaactgtgagcacctcagagatgttcgacgcttgaaaagttgggttctgggggagatccctgggatggaggtgacggtcccgcctctgatcagaggaccgcggctccctggatggatctcatccccacacccggcactccagtttgatcctggcattttataggtgcagaaactgagaagccacgcgactgcccgtggtggcagatattgaccatatccacttggtactgctttctagcatacagttcagtgtttcacagctccaggcacacacaactcagccatctccctcctc

SEQ ID NO: 152568 - DNA, 25 bp, Homo sapiens
  chr6:3880667-3880692
  hypo
ccaccgcgcccggccagcacgcatc

SEQ ID NO: 152569 - DNA, 31 bp, Homo sapiens; identical to SEQ ID NO: 71000
  chr6:3895146-3895177
  hypo

SEQ ID NO: 152570 - DNA, 68 bp, Homo sapiens
  chr6:3900288-3900356
  hypo
ctctgggcaccagcgcgagccgtgctgtggctcccctgtgtccatctgcaggacggacagctctggtt

SEQ ID NO: 152571 - DNA, 31 bp, Homo sapiens; identical to SEQ ID NO: 20079
  chr6:3931975-3932006
  hypo

SEQ ID NO: 152572 - DNA, 37 bp, Homo sapiens
  chr6:4008151-4008188
  hypo
gcaacgtagccaggatctgtctcgggggacagggaaa

SEQ ID NO: 152573 - DNA, 19 bp, Homo sapiens
  chr6:4020057-4020076
  hypo
atttcatttatttatttga

SEQ ID NO: 152574 - DNA, 241 bp, Homo sapiens; identical to SEQ ID NO: 71003
  chr6:4020315-4020556
  hypo

SEQ ID NO: 152575 - DNA, 155 bp, Homo sapiens; identical to SEQ ID NO: 20082
  chr6:4061558-4061713
  hypo

SEQ ID NO: 152576 - DNA, 30 bp, Homo sapiens; identical to SEQ ID NO: 71005
  chr6:4079634-4079664
  hypo

SEQ ID NO: 152577 - DNA, 31 bp, Homo sapiens; identical to SEQ ID NO: 71006
  chr6:4160622-4160653
  hypo

SEQ ID NO: 152578 - DNA, 31 bp, Homo sapiens; identical to SEQ ID NO: 20083
  chr6:4165190-4165221
  hypo

SEQ ID NO: 152579 - DNA, 22 bp, Homo sapiens
  chr6:4166997-4167019
  hypo
gatcaagggccaggtgcggtgg

SEQ ID NO: 152580 - DNA, 30 bp, Homo sapiens
  chr6:4188284-4188314
  hypo
gcaccattccaattccgccttgtcggctgc

SEQ ID NO: 152581 - DNA, 102 bp, Homo sapiens; identical to SEQ ID NO: 71009
  chr6:4189171-4189273
  hypo

SEQ ID NO: 152582 - DNA, 188 bp, Homo sapiens; identical to SEQ ID NO: 20085
  chr6:4254743-4254931
  hypo

SEQ ID NO: 152583 - DNA, 30 bp, Homo sapiens
  chr6:4281695-4281725
  hypo
aggaggcagaccaaacgcagggtcagaatc

SEQ ID NO: 152584 - DNA, 30 bp, Homo sapiens; identical to SEQ ID NO: 4550
  chr6:4415168-4415198
  hypo

SEQ ID NO: 152585 - DNA, 202 bp, Homo sapiens; identical to SEQ ID NO: 20087
  chr6:4494277-4494479
  hypo

SEQ ID NO: 152586 - DNA, 369 bp, Homo sapiens; identical to SEQ ID NO: 71013
  chr6:4549976-4550345
  hypo

SEQ ID NO: 152587 - DNA, 434 bp, Homo sapiens; identical to SEQ ID NO: 71014
  chr6:4559570-4560004
  hypo

SEQ ID NO: 152588 - DNA, 30 bp, Homo sapiens
  chr6:4561075-4561105
  hypo
gtctctacacaacttcgcatctcctggatg

SEQ ID NO: 152589 - DNA, 69 bp, Homo sapiens; identical to SEQ ID NO: 71015
  chr6:4563332-4563401
  hypo

SEQ ID NO: 152590 - DNA, 30 bp, Homo sapiens; identical to SEQ ID NO: 71016
  chr6:4672211-4672241
  hypo

SEQ ID NO: 152591 - DNA, 43 bp, Homo sapiens; identical to SEQ ID NO: 71017
  chr6:4689094-4689137
  hypo

SEQ ID NO: 152592 - DNA, 96 bp, Homo sapiens
  chr6:4724689-4724785
  hypo
gaagcaacctgctcgcgtccggaatcggtgggttcttggtctcactgacttcaaatgtgatgccgcagaccctcgctctgagtgtcacagttctta

SEQ ID NO: 152593 - DNA, 870 bp, Homo sapiens; identical to SEQ ID NO: 112794
  chr6:4775126-4775996
  hypo

SEQ ID NO: 152594 - DNA, 83 bp, Homo sapiens; identical to SEQ ID NO: 112795
  chr6:4776187-4776270
  hypo

SEQ ID NO: 152595 - DNA, 62 bp, Homo sapiens
  chr6:4782239-4782301
  hypo
aggagcctctggatacgcccttctgtgtttcagacccttaggctctgcgtggaggtgggtgg

SEQ ID NO: 152596 - DNA, 30 bp, Homo sapiens
  chr6:4808410-4808440
  hypo
acatgcggggcaacacgtgcttgttgccgt

SEQ ID NO: 152597 - DNA, 30 bp, Homo sapiens
  chr6:4808835-4808865
  hypo
attggaacacagccccgcctatttgtttat

SEQ ID NO: 152598 - DNA, 141 bp, Homo sapiens
  chr6:4836441-4836582
  hypo
ttcggccatcttggctcctccccaaggcttaggtttctaagtcagccacaaatgctacccaaaactacataaagaagaaaaaagttgcatagaaccaaaaagtgagttttaattatttattttatacgtgtgctttcagaa

SEQ ID NO: 152599 - DNA, 113 bp, Homo sapiens
  chr6:4854164-4854277
  hypo
ctttgtaaaattttgttttcccgaaattcagcacagatgggcttctgtgaaggtgttgtcctgattctctgtgcagaggtgagctcctgctcgtggtgagtccccttgaagtg

SEQ ID NO: 152600 - DNA, 71 bp, Homo sapiens
  chr6:4854536-4854607
  hypo
gtttcctcaaaactcagcatccgcagttcacatcaccctgtttatgttacgcagtttcatactagtcatgt

SEQ ID NO: 152601 - DNA, 129 bp, Homo sapiens; identical to SEQ ID NO: 71022
  chr6:4858681-4858810
  hypo

SEQ ID NO: 152602 - DNA, 43 bp, Homo sapiens; identical to SEQ ID NO: 71023
  chr6:4872577-4872620
  hypo

SEQ ID NO: 152603 - DNA, 147 bp, Homo sapiens
  chr6:4874010-4874157
  hypo
tgttttattgtgaataggctccgagagcctggtttgaaaccgccaagtaggaacatcgcacaggggacaccttcacatgcgccgcagctgtgcagatttcacctcctgccactgcttgctcattctggttcccgccttctgcctgtc

SEQ ID NO: 152604 - DNA, 111 bp, Homo sapiens; identical to SEQ ID NO: 71025
  chr6:4874531-4874642
  hypo

SEQ ID NO: 152605 - DNA, 21 bp, Homo sapiens
  chr6:4886532-4886553
  hypo
gaacaacgagactgttttcca

SEQ ID NO: 152606 - DNA, 42 bp, Homo sapiens; identical to SEQ ID NO: 71027
  chr6:4889731-4889773
  hypo

SEQ ID NO: 152607 - DNA, 30 bp, Homo sapiens
  chr6:4904696-4904726
  hypo
atgtatttgctcttccgagcaagtggattt

SEQ ID NO: 152608 - DNA, 574 bp, Homo sapiens
  chr6:4905022-4905596
  hypo
ggctttgggcctcatcgtacagctacaggttgtacttaggacccgtgttagccacttagactacagctgtgcactgtgtccccctcatccccaccccgacctccagctgagaaataattatcacagagtccatgcactgaaatggaggtgtttaatcacaagaacacctccgcagtgcctgtgtgatcggccgtccctatgtgagctgctgatctcagagacagcattaggatggcgaccactgccccagacggcccagtgctctacccctagcgtgatctgaactgctgaagtcagagaagtccacgttggataaacaaagccagcccagtagtaacctggctgtcacagtgaccgtgtgtccgtcttactgaacctgggtttacgtgactaggatgctgacacaagtgagtttgcgcatggcttgctgttctcttcaaccctctccagcctgaataggaatgttaaacccactcaggaattctcgttggtctaaaggactgtgttcattggtctttgacactccgtcaaccaacttagcggggttgacctgagccttcggacacgatgtgcc

SEQ ID NO: 152609 - DNA, 199 bp, Homo sapiens; identical to SEQ ID NO: 20097
  chr6:4909051-4909250
  hypo

SEQ ID NO: 152610 - DNA, 92 bp, Homo sapiens; identical to SEQ ID NO: 71030
  chr6:4909754-4909846
  hypo

SEQ ID NO: 152611 - DNA, 32 bp, Homo sapiens; identical to SEQ ID NO: 71031
  chr6:4910085-4910117
  hypo

SEQ ID NO: 152612 - DNA, 143 bp, Homo sapiens; identical to SEQ ID NO: 20099
  chr6:4910916-4911059
  hypo

SEQ ID NO: 152613 - DNA, 22 bp, Homo sapiens
  chr6:4911358-4911380
  hypo
cgaaaaaggatttttaaggcag

SEQ ID NO: 152614 - DNA, 203 bp, Homo sapiens
  chr6:4932007-4932210
  hypo
tgagcagggacctcactggcacgaggagccaacacagttttaactcaggagtctgaaggccaagttcagtagtcttggtcagcgtgagccaaaatgaatccatttttaaattagcagaaccacggatagttcgtagggactatcgcctcaaagaaaatgctgaagctgtttctgagactcacgtataaaggctgcatgggctc

SEQ ID NO: 152615 - DNA, 49 bp, Homo sapiens
  chr6:4936319-4936368
  hypo
ggctccatgaaggcacgtgggaaatgtgtgtgcacgcgctttgctttag

SEQ ID NO: 152616 - DNA, 507 bp, Homo sapiens; identical to SEQ ID NO: 4553
  chr6:4948975-4949482
  hypo

SEQ ID NO: 152617 - DNA, 31 bp, Homo sapiens; identical to SEQ ID NO: 4554
  chr6:4949502-4949533
  hypo

SEQ ID NO: 152618 - DNA, 30 bp, Homo sapiens; identical to SEQ ID NO: 20103
  chr6:4950293-4950323
  hypo

SEQ ID NO: 152619 - DNA, 278 bp, Homo sapiens; identical to SEQ ID NO: 71038
  chr6:4950658-4950936
  hypo

SEQ ID NO: 152620 - DNA, 277 bp, Homo sapiens
  chr6:4951175-4951452
  hypo
aaaaaaacttgcaaaccctcatgaggagcctgtccccagccctgttttccagcctctgcctgcatgggaggggcagtgagtcagccacgtgtttgctttgccgcctctgcctgtgtgctctccaagctgcgggtttcacatgcagtaaacggcatcaagacattgacagaaggtgtatgggcagtcttacactgtctcagcgacttcagggccaaaactgtcttttgtgattttgcctcttttggaagtggaagccacctaccgaaattgtgtttta

SEQ ID NO: 152621 - DNA, 30 bp, Homo sapiens; identical to SEQ ID NO: 71040
  chr6:4952435-4952465
  hypo

SEQ ID NO: 152622 - DNA, 30 bp, Homo sapiens; identical to SEQ ID NO: 71041
  chr6:4953850-4953880
  hypo

SEQ ID NO: 152623 - DNA, 114 bp, Homo sapiens
  chr6:4954217-4954331
  hypo
gaaaatctggggctcggcccaggggatggactccatgttaaagtacttgcagaggaagatcgatgagttctgagtgtcgggctgcccactggtgacaccgggatcgggctgagc

SEQ ID NO: 152624 - DNA, 34 bp, Homo sapiens; identical to SEQ ID NO: 20106
  chr6:5003273-5003307
  hypo

SEQ ID NO: 152625 - DNA, 30 bp, Homo sapiens; identical to SEQ ID NO: 71043
  chr6:5030126-5030156
  hypo

SEQ ID NO: 152626 - DNA, 30 bp, Homo sapiens
  chr6:5066477-5066507
  hypo
tacaagtctggatttcggggatctgccgtt

SEQ ID NO: 152627 - DNA, 1653 bp, Homo sapiens; identical to SEQ ID NO: 112800
  chr6:5084675-5086328
  hypo

SEQ ID NO: 152628 - DNA, 207 bp, Homo sapiens
  chr6:5107467-5107674
  hypo
gctgttacagcctgcagcccacgttaagtttgggtggactgcctcattgcgtaaaacctgggggagtgggagaagtctcctctggagctgttatcttgccggcaatttgatgccttcagcacggaggttcaaatctggacttcggttccaagtagcagttgcttaaattaagtataaatcagcagtgccgtgcgttagtagcgtggt

SEQ ID NO: 152629 - DNA, 150 bp, Homo sapiens
  chr6:5108212-5108362
  hypo
ctgggtgacagagcgagactccatctcaaaaaaaaagactttatcctgaaatcaaaagttgtactgccaaatagaatggctacacgttacatctatttgaacgcatcattgcagcaaatctatgctctctaaaagcgactggaagacatg

SEQ ID NO: 152630 - DNA, 31 bp, Homo sapiens; identical to SEQ ID NO: 20109
  chr6:5109989-5110020
  hypo

SEQ ID NO: 152631 - DNA, 30 bp, Homo sapiens; identical to SEQ ID NO: 71048
  chr6:5145056-5145086
  hypo

SEQ ID NO: 152632 - DNA, 30 bp, Homo sapiens; identical to SEQ ID NO: 71049
  chr6:5264914-5264944
  hypo

SEQ ID NO: 152633 - DNA, 84 bp, Homo sapiens
  chr6:5413098-5413182
  hypo
tgacttgtctgtactcgcctcgccgtagcttagatgtagtctagagcaggttgctctttccgataaaaacgggccaacaccttc

SEQ ID NO: 152634 - DNA, 224 bp, Homo sapiens; identical to SEQ ID NO: 20110
  chr6:5507939-5508163
  hypo

SEQ ID NO: 152635 - DNA, 133 bp, Homo sapiens; identical to SEQ ID NO: 71051
  chr6:5510682-5510815
  hypo

SEQ ID NO: 152636 - DNA, 127 bp, Homo sapiens
  chr6:5537757-5537884
  hypo
gagatgtcccgggcctcctctcgagttggagatgtcccgggcttcctctcgagttggagatgtcccgggcttcctctcgagttggagatgtcccgggcttcctctcgagttggagatgcagacaaga

SEQ ID NO: 152637 - DNA, 142 bp, Homo sapiens; identical to SEQ ID NO: 71052
  chr6:5556542-5556684
  hypo

SEQ ID NO: 152638 - DNA, 30 bp, Homo sapiens
  chr6:5582031-5582061
  hypo
ggttaattcctgatgcgcttttctaaatgg

SEQ ID NO: 152639 - DNA, 30 bp, Homo sapiens
  chr6:5637066-5637096
  hypo
cctaagtgtccacctcgatcattgagttac

SEQ ID NO: 152640 - DNA, 30 bp, Homo sapiens
  chr6:5645730-5645760
  hypo
ttcatttaggaatgacgaaaatgcatgcag

SEQ ID NO: 152641 - DNA, 155 bp, Homo sapiens
  chr6:5663763-5663918
  hypo
tcagagaatgtgtttcgatgagatcagaagcaatccactaaagaaaaagtggagaggacttgagagcttaaaagagcggagaggagagatgtgagaaaacctaaaaaaagacaaaagttggtgtggaagaaggggtggcgcgggctccatggcag

SEQ ID NO: 152642 - DNA, 31 bp, Homo sapiens; identical to SEQ ID NO: 20112
  chr6:5684506-5684537
  hypo

SEQ ID NO: 152643 - DNA, 157 bp, Homo sapiens; identical to SEQ ID NO: 71054
  chr6:5746472-5746629
  hypo

SEQ ID NO: 152644 - DNA, 599 bp, Homo sapiens
  chr6:5783576-5784175
  hypo
agtttggactttggagtcaggcggttcaagttcaaatccagtgtccttgagcacccgctaagctccctgagccacacctaagagttaaatggcacagtgtgtgcaaaagctgctaaaatcaggccgagaagtcgacaatgaagggaagacggaagggattgtgaggtctgggaagtgtctggaaaaacgtcgcatcgcagaaggcctgtggtgttaggatatgcgttttggtttttgtccaggttcctggctcccagcacccacattccttgttagaatgctggggcgccttaggactcaggaaacagaatctctctctgaccttctgctgtttttctttcacttgcccacggcgggatgctaatctgtttgtggatcaaaaaaccctcactccacagaaagtcctgccccataccctagaggaaggaatgctgcttagagaagccaagaaaagtccgagcaggccggccttgctgggtttaagtcacacgctttctgtccggtcacacttccgcgtggttgtcaagcatgcccgtgcatcggagcctccataaaaacccacgaggacagggtccgggagcttgcggatacctgaaccc

SEQ ID NO: 152645 - DNA, 74 bp, Homo sapiens; identical to SEQ ID NO: 71056
  chr6:5839913-5839987
  hypo

SEQ ID NO: 152646 - DNA, 30 bp, Homo sapiens; identical to SEQ ID NO: 71057
  chr6:5989367-5989397
  hypo

SEQ ID NO: 152647 - DNA, 30 bp, Homo sapiens; identical to SEQ ID NO: 4561
  chr6:5999244-5999274
  hypo

SEQ ID NO: 152648 - DNA, 398 bp, Homo sapiens; identical to SEQ ID NO: 112806
  chr6:5999609-6000007
  hypo

SEQ ID NO: 152649 - DNA, 92 bp, Homo sapiens; identical to SEQ ID NO: 112807
  chr6:6000046-6000138
  hypo

SEQ ID NO: 152650 - DNA, 811 bp, Homo sapiens; identical to SEQ ID NO: 42550
  chr6:6008842-6009653
  hypo

SEQ ID NO: 152651 - DNA, 178 bp, Homo sapiens
  chr6:6045509-6045687
  hypo
gaaatgagagttgggacgtgctaagcagcacgctggtagcatccttcttacctacgtgcactgaagccctggatgcacctatcaatcatgcttctttacctactggtgcgccttacttaagtcaactaagaaataaagcaaaattaactataaaatcacaactcggaagcactatgaa

SEQ ID NO: 152652 - DNA, 114 bp, Homo sapiens; identical to SEQ ID NO: 71061
  chr6:6167627-6167741
  hypo

SEQ ID NO: 152653 - DNA, 208 bp, Homo sapiens; identical to SEQ ID NO: 71062
  chr6:6199259-6199467
  hypo

SEQ ID NO: 152654 - DNA, 27 bp, Homo sapiens
  chr6:6199706-6199733
  hypo
cagagcgagactccatctcagaaaaaa

SEQ ID NO: 152655 - DNA, 58 bp, Homo sapiens; identical to SEQ ID NO: 71064
  chr6:6250342-6250400
  hypo

SEQ ID NO: 152656 - DNA, 30 bp, Homo sapiens; identical to SEQ ID NO: 20117
  chr6:6328399-6328429
  hypo

SEQ ID NO: 152657 - DNA, 30 bp, Homo sapiens
  chr6:6377494-6377524
  hypo
ttacagatggtataaatctttcgccttggc

SEQ ID NO: 152658 - DNA, 30 bp, Homo sapiens
  chr6:6377823-6377853
  hypo
aaatctttcgccttttactaaaaccatgag

SEQ ID NO: 152659 - DNA, 30 bp, Homo sapiens
  chr6:6497961-6497991
  hypo
ggctgcggcagggcccgcgccacatgcagc

SEQ ID NO: 152660 - DNA, 30 bp, Homo sapiens; identical to SEQ ID NO: 71066
  chr6:6534782-6534812
  hypo

SEQ ID NO: 152661 - DNA, 933 bp, Homo sapiens; identical to SEQ ID NO: 112814
  chr6:6546386-6547319
  hypo

SEQ ID NO: 152662 - DNA, 31 bp, Homo sapiens; identical to SEQ ID NO: 71068
  chr6:6558351-6558382
  hypo

SEQ ID NO: 152663 - DNA, 30 bp, Homo sapiens
  chr6:6611894-6611924
  hypo
cgcaccttgtggctacgctgcgcgccggtc

SEQ ID NO: 152664 - DNA, 30 bp, Homo sapiens
  chr6:6612503-6612533
  hypo
tctgagtttctttctcgtgggttagtggcc

SEQ ID NO: 152665 - DNA, 341 bp, Homo sapiens
  chr6:6614431-6614772
  hypo
gtccaagttcacagccgcagaagaaccacacccaaaattgctgagagtgtgaaccttgactgccttacaaacacagaccgcaaagggaggtaaagcttattcggctacaaaagatgttgcttgtctcttaagtagttccttcattgacgccaaatgtcttttatttataatcacgtctctttttttttttttttatttgagtgtatgcttgcattcccaccttcaaatcattgctctccgcccgagcacagagctcccgcgagcctgcaggcagcccaggactcctgcgcataccaggctctctggtcttggctctcccagccccacgccgcccactcaca

SEQ ID NO: 152666 - DNA, 30 bp, Homo sapiens; identical to SEQ ID NO: 71069
  chr6:6615179-6615209
  hypo

SEQ ID NO: 152667 - DNA, 31 bp, Homo sapiens; identical to SEQ ID NO: 71070
  chr6:6668387-6668418
  hypo

SEQ ID NO: 152668 - DNA, 129 bp, Homo sapiens; identical to SEQ ID NO: 71071
  chr6:6737009-6737138
  hypo

SEQ ID NO: 152669 - DNA, 209 bp, Homo sapiens
  chr6:6745315-6745524
  hypo
ctaatagtaggttcacgctctcactgactcaatagccaagccgcagaccttcatggtgtgcgttacagctcataaagggaacatagacctaaacagcaaacaacaacaagatttaccgcagaacaaaagaacagaactcgcacaatataaacacacaccacaaaagaaaaccgaccaggttataattgctagcgcggcagcctgctttt

SEQ ID NO: 152670 - DNA, 93 bp, Homo sapiens; identical to SEQ ID NO: 71073
  chr6:6753684-6753777
  hypo

SEQ ID NO: 152671 - DNA, 137 bp, Homo sapiens; identical to SEQ ID NO: 20118
  chr6:6780549-6780686
  hypo

SEQ ID NO: 152672 - DNA, 194 bp, Homo sapiens; identical to SEQ ID NO: 71075
  chr6:6824563-6824757
  hypo

SEQ ID NO: 152673 - DNA, 30 bp, Homo sapiens; identical to SEQ ID NO: 71076
  chr6:6843227-6843257
  hypo

SEQ ID NO: 152674 - DNA, 17 bp, Homo sapiens
  chr6:6849734-6849751
  hypo
ggcgcccagccataaga

SEQ ID NO: 152675 - DNA, 198 bp, Homo sapiens
  chr6:6898398-6898596
  hypo
gtgttgtttcagtggacgctctaatcagatgtcttctcataccacataatgaagcaggcgagctggtggattcaactgggactcagaagactgcacttgaggagatcatcgtgagttgaagatctcttgcttagtctcgcagaaacttcatcaagtctagctcacctgggagtcagttggtgccggcgaatcaattcg

SEQ ID NO: 152676 - DNA, 131 bp, Homo sapiens; identical to SEQ ID NO: 20120
  chr6:6901360-6901491
  hypo

SEQ ID NO: 152677 - DNA, 30 bp, Homo sapiens
  chr6:6921229-6921259
  hypo
acacagctgcggggtcgtccctcccaccca

SEQ ID NO: 152678 - DNA, 30 bp, Homo sapiens
  chr6:6921531-6921561
  hypo
aagtttgcagcaccccggctccacagcagc

SEQ ID NO: 152679 - DNA, 39 bp, Homo sapiens
  chr6:6934019-6934058
  hypo
gcatgagccaccgcgcccggcccataatagaaatatttt

SEQ ID NO: 152680 - DNA, 99 bp, Homo sapiens
  chr6:6969969-6970068
  hypo
atcttttccaagatcttacagtggaccataaccctaactcggctctgactgcaaagcctttcttcatctctggcccctcccttccgtggccctgccagc

SEQ ID NO: 152681 - DNA, 86 bp, Homo sapiens; identical to SEQ ID NO: 71080
  chr6:6971300-6971386
  hypo

SEQ ID NO: 152682 - DNA, 94 bp, Homo sapiens; identical to SEQ ID NO: 71081
  chr6:6982818-6982912
  hypo

SEQ ID NO: 152683 - DNA, 137 bp, Homo sapiens; identical to SEQ ID NO: 71082
  chr6:6984867-6985004
  hypo

SEQ ID NO: 152684 - DNA, 31 bp, Homo sapiens; identical to SEQ ID NO: 20122
  chr6:7040003-7040034
  hypo

SEQ ID NO: 152685 - DNA, 12 bp, Homo sapiens
  chr6:7051649-7051661
  hypo
tgcctctccagg

SEQ ID NO: 152686 - DNA, 72 bp, Homo sapiens; identical to SEQ ID NO: 42553
  chr6:7051765-7051837
  hypo

SEQ ID NO: 152687 - DNA, 787 bp, Homo sapiens; identical to SEQ ID NO: 112820
  chr6:7051873-7052660
  hypo

SEQ ID NO: 152688 - DNA, 95 bp, Homo sapiens; identical to SEQ ID NO: 71087
  chr6:7058378-7058473
  hypo

SEQ ID NO: 152689 - DNA, 31 bp, Homo sapiens; identical to SEQ ID NO: 71088
  chr6:7120383-7120414
  hypo

SEQ ID NO: 152690 - DNA, 99 bp, Homo sapiens; identical to SEQ ID NO: 71089
  chr6:7132659-7132758
  hypo

SEQ ID NO: 152691 - DNA, 30 bp, Homo sapiens
  chr6:7151193-7151223
  hypo
cagctgctggccgcccggagatcagcctcc

SEQ ID NO: 152692 - DNA, 337 bp, Homo sapiens
  chr6:7204198-7204535
  hypo
agtggtggtggctgcagtgtccggtgcatttcaccaggagcatcctgcgagccctgggagctgcctggctgacggcattcccacagcgagcctacagactgtgggtttacacttcatgccaggctgactttagatttttctaagggctggctttggaggtcagcacaggtgcttacgcattgtctaaccttcctccacaccctgggagagctggtgtgacctgccttccggacaagcatgactgaacccatacaacacctgaattactagaaggtgcctctgtactttacaggtggggccacaccaggaattgctcagttgccgccttgctgtcctc

SEQ ID NO: 152693 - DNA, 118 bp, Homo sapiens
  chr6:7204765-7204883
  hypo
tggacaaaaaaaagcgagcaccaggtacggatggggatgtctctataaccaggctgctagaccctgtttgaacctgttgcctccagcttggcaggtcctgggccgtgctgtgtgtgct

SEQ ID NO: 152694 - DNA, 30 bp, Homo sapiens; identical to SEQ ID NO: 20125
  chr6:7214465-7214495
  hypo

SEQ ID NO: 152695 - DNA, 30 bp, Homo sapiens
  chr6:7219485-7219515
  hypo
gagtgagacgctgtttctaaaataataaaa

SEQ ID NO: 152696 - DNA, 30 bp, Homo sapiens; identical to SEQ ID NO: 71093
  chr6:7230098-7230128
  hypo

SEQ ID NO: 152697 - DNA, 83 bp, Homo sapiens; identical to SEQ ID NO: 20126
  chr6:7230352-7230435
  hypo

SEQ ID NO: 152698 - DNA, 30 bp, Homo sapiens
  chr6:7231444-7231474
  hypo
gcacagccttgctgcgtccactgcggccca

SEQ ID NO: 152699 - DNA, 30 bp, Homo sapiens
  chr6:7235810-7235840
  hypo
tttaggcgtgagccacggtgcctggccgtt

SEQ ID NO: 152700 - DNA, 226 bp, Homo sapiens; identical to SEQ ID NO: 71095
  chr6:7237762-7237988
  hypo

SEQ ID NO: 152701 - DNA, 157 bp, Homo sapiens; identical to SEQ ID NO: 71096
  chr6:7246885-7247042
  hypo

SEQ ID NO: 152702 - DNA, 210 bp, Homo sapiens; identical to SEQ ID NO: 71097
  chr6:7247339-7247549
  hypo

SEQ ID NO: 152703 - DNA, 30 bp, Homo sapiens; identical to SEQ ID NO: 71098
  chr6:7247826-7247856
  hypo

SEQ ID NO: 152704 - DNA, 30 bp, Homo sapiens
  chr6:7259306-7259336
  hypo
cgtatccagatgactcggaaggaggacccc

SEQ ID NO: 152705 - DNA, 113 bp, Homo sapiens; identical to SEQ ID NO: 71099
  chr6:7267436-7267549
  hypo

SEQ ID NO: 152706 - DNA, 181 bp, Homo sapiens; identical to SEQ ID NO: 71100
  chr6:7268059-7268240
  hypo

SEQ ID NO: 152707 - DNA, 30 bp, Homo sapiens; identical to SEQ ID NO: 71101
  chr6:7269009-7269039
  hypo

SEQ ID NO: 152708 - DNA, 135 bp, Homo sapiens; identical to SEQ ID NO: 20129
  chr6:7269313-7269448
  hypo

SEQ ID NO: 152709 - DNA, 56 bp, Homo sapiens; identical to SEQ ID NO: 71103
  chr6:7271970-7272026
  hypo

SEQ ID NO: 152710 - DNA, 29 bp, Homo sapiens
  chr6:7279445-7279474
  hypo
attaagaatctatcttggggccgggtgcg

SEQ ID NO: 152711 - DNA, 23 bp, Homo sapiens
  chr6:7291623-7291646
  hypo
ccgtgtctcagaaaaataaaaaa

SEQ ID NO: 152712 - DNA, 103 bp, Homo sapiens; identical to SEQ ID NO: 71106
  chr6:7294550-7294653
  hypo

SEQ ID NO: 152713 - DNA, 171 bp, Homo sapiens
  chr6:7415146-7415317
  hypo
ggaatgtgaatcatcacgtggtccagcgtcttcacactgtcgacactccccacccgttagtcacttagtagccttcttggctatcagttcagctgctgtgatgttgtggtgcttgtgtgcaagtaacccttactttgcttaataatgaccgtaaattacaggagtagtgat

SEQ ID NO: 152714 - DNA, 30 bp, Homo sapiens; identical to SEQ ID NO: 71108
  chr6:7474307-7474337
  hypo

SEQ ID NO: 152715 - DNA, 30 bp, Homo sapiens
  chr6:7503323-7503353
  hypo
gacgctggtggctttcggcagagctcactc

SEQ ID NO: 152716 - DNA, 2036 bp, Homo sapiens; identical to SEQ ID NO: 112827
  chr6:7541427-7543463
  hypo

SEQ ID NO: 152717 - DNA, 31 bp, Homo sapiens; identical to SEQ ID NO: 20132
  chr6:7583974-7584005
  hypo

SEQ ID NO: 152718 - DNA, 203 bp, Homo sapiens
  chr6:7691934-7692137
  hypo
cgctgtctcagatttctgattcctcattcctatttggccagcctgggtcaggtgtccaccttgggatgagcagaatgcactaacacagataaggctgcctgccaggcccctccgtgtggtgagatgacggcctggtaagcacgtagttcttagagcattgaggctaagatggcccccactgaaggcaccgtgaaaaggggatt

SEQ ID NO: 152719 - DNA, 1723 bp, Homo sapiens; identical to SEQ ID NO: 4574
  chr6:7726045-7727768
  hypo

SEQ ID NO: 152720 - DNA, 38 bp, Homo sapiens; identical to SEQ ID NO: 71113
  chr6:7767220-7767258
  hypo

SEQ ID NO: 152721 - DNA, 80 bp, Homo sapiens
  chr6:7879855-7879935
  hypo
atcacaggtggtgagcgataaaaggtagcttccatatgcaggtggcactacttccgcaggagcaccgtgggctcctggag

SEQ ID NO: 152722 - DNA, 323 bp, Homo sapiens
  chr6:7880270-7880593
  hypo
agaatgctccttcccactcaacgcacacatgaatgcaaccaaccacgcgattgtgcagaccttggtgagctctcggagactttgttttgtaagtgggagtaagccaagaccaggtgtcatttctaaggtaccttctccccttctgttttggaacaggttcaccttatgaaccccgagtatgtccccaaaccgtgctgtgcgccaactaagctaaatgccatctcggttctttactttgatgacaactccaatgtcattctgaaaaaatacaggaatatggttgtaagagcttgtggatgccactaactcgaaaccagatgctg

SEQ ID NO: 152723 - DNA, 30 bp, Homo sapiens
  chr6:7881093-7881123
  hypo
acagccagggctccacggggcgcccttgtc

SEQ ID NO: 152724 - DNA, 30 bp, Homo sapiens
  chr6:7881354-7881384
  hypo
taacttctggactgccggctctagtacctt

SEQ ID NO: 152725 - DNA, 390 bp, Homo sapiens
  chr6:7882609-7882999
  hypo
agttcatgtgggctctggcttcgtgttaacatgaggaactaaagacatgtttcaccccgtgagaaacagaaggatcccctgaacagtaactgatttgacaagtatcgacacataaagttatggcatcagcattctcttactcaggcacggtcagaagtaacgctgctttcatcacggctaacctctcacactgagagaagtattcacagcaacagaagctccagcagcggccgtgaaggtatcttccagaggtgtgggtttttgcatttcaatctgctccatgctacggaccaacacagtattgagtcaactgtgaccttaagatcagaggaacgtcaatactgccacaaggccacctttccagaactcgtgggcaggtaaactatgctt

SEQ ID NO: 152726 - DNA, 560 bp, Homo sapiens
  chr6:7883235-7883795
  hypo
acacacaaagaagatacctcacgcttagtatgttctgctttctgaacagccaccactgggaacccagtggcctctgtgggactgaactcctaaacgcagggtgcgggagctgggcaggagaggtgacctccaactgtgttcctaaagttcgtctttcgcttggctcaggacaaagcggtgtaacgagtcaaggtctctgcctccactgtgctcactgactttcttccctcctcggaaaagcaataacgtggggtagcctcgtaccttaaaacaaaaaagaaaaaagtttgcaaaccagcggtccagatcacatgcaaattgcttcctaaataaaaccagatacactcctaccgttgtggctggaaaaattctgtggctaatttttaaaggtgtatattccattaaaacaggagcagactactgtttagaaagcacagccgtggggctgtgtgttcacttctgaattcaaaatgacatcattaaagatcagcctcaaaggaacgactttaccctaaagcagacgctttcagtctttactgtgcacacgatcacctgcggat

SEQ ID NO: 152727 - DNA, 535 bp, Homo sapiens
  chr6:7884118-7884653
  hypo
aacccaagcacaggaccgacttgctggcatggccctttcagaaaggaggttatgttgaaatgattcttagattcagccactgcattttataatgctggcttatgtgtgaaaaatgagcgactcgggtatttatggcaaaggctacagaccactggtcaatcatcaagagtcgcggtgtgggaagccccacagtctatggcgtggggtctgttacttcacggccttgttactcagacagcaaggcctgaaaacctgcactgaaacatggatactaactacaaagcgggcgaagaagaatgccttccctttgagagaggatctcttttgcttctccaaacaaacaactcaaagggacataaaaaccacattgttgagaagatgagagcagagtgagttatcgtggttgaggcacagttcccttgggatctgcccccatactgagagctcccataagcatccatccaagtacccaccgaatacttgctgcagatattccgttcagcagtgcagtctacttcggcgatcttgacccccg

SEQ ID NO: 152728 - DNA, 204 bp, Homo sapiens; identical to SEQ ID NO: 20137
  chr6:7885607-7885811
  hypo

SEQ ID NO: 152729 - DNA, 356 bp, Homo sapiens; identical to SEQ ID NO: 20138
  chr6:7887533-7887889
  hypo

SEQ ID NO: 152730 - DNA, 891 bp, Homo sapiens; identical to SEQ ID NO: 20139
  chr6:7888465-7889356
  hypo

SEQ ID NO: 152731 - DNA, 70 bp, Homo sapiens; identical to SEQ ID NO: 20140
  chr6:7889725-7889795
  hypo

SEQ ID NO: 152732 - DNA, 218 bp, Homo sapiens; identical to SEQ ID NO: 20141
  chr6:7890516-7890734
  hypo

SEQ ID NO: 152733 - DNA, 152 bp, Homo sapiens
  chr6:7891502-7891654
  hypo
ttgggtgaggtcgaacgtggacggtctccaagttcgtccagtgaacattctacaaggctctaccccatctctttgcagaacgggctctggggctgccaattcagatttggccatctcttcaaaataaacaaagcagccgaggccataattta

SEQ ID NO: 152734 - DNA, 123 bp, Homo sapiens; identical to SEQ ID NO: 71124
  chr6:7891858-7891981
  hypo

SEQ ID NO: 152735 - DNA, 98 bp, Homo sapiens; identical to SEQ ID NO: 71125
  chr6:7892314-7892412
  hypo

SEQ ID NO: 152736 - DNA, 196 bp, Homo sapiens; identical to SEQ ID NO: 71126
  chr6:7893045-7893241
  hypo

SEQ ID NO: 152737 - DNA, 272 bp, Homo sapiens; identical to SEQ ID NO: 20142
  chr6:7893705-7893977
  hypo

SEQ ID NO: 152738 - DNA, 211 bp, Homo sapiens; identical to SEQ ID NO: 71128
  chr6:7898571-7898782
  hypo

SEQ ID NO: 152739 - DNA, 30 bp, Homo sapiens
  chr6:7900735-7900765
  hypo
gccacttctacagcgcgtatgtggattttg

SEQ ID NO: 152740 - DNA, 301 bp, Homo sapiens; identical to SEQ ID NO: 71129
  chr6:7911687-7911988
  hypo

SEQ ID NO: 152741 - DNA, 203 bp, Homo sapiens; identical to SEQ ID NO: 20144
  chr6:7919988-7920191
  hypo

SEQ ID NO: 152742 - DNA, 30 bp, Homo sapiens
  chr6:7959534-7959564
  hypo
accccggtaggtccccggaaaggttcaaaa

SEQ ID NO: 152743 - DNA, 91 bp, Homo sapiens; identical to SEQ ID NO: 71131
  chr6:7976896-7976987
  hypo

SEQ ID NO: 152744 - DNA, 47 bp, Homo sapiens; identical to SEQ ID NO: 71132
  chr6:7986657-7986704
  hypo

SEQ ID NO: 152745 - DNA, 30 bp, Homo sapiens; identical to SEQ ID NO: 71133
  chr6:7987724-7987754
  hypo

SEQ ID NO: 152746 - DNA, 30 bp, Homo sapiens
  chr6:8013942-8013972
  hypo
gtgttggcaattaatcgcattccaaaaagt

SEQ ID NO: 152747 - DNA, 26 bp, Homo sapiens
  chr6:8114391-8114417
  hypo
gccaccgcacccggccattgtctgct

SEQ ID NO: 152748 - DNA, 30 bp, Homo sapiens; identical to SEQ ID NO: 4578
  chr6:8825196-8825226
  hypo

SEQ ID NO: 152749 - DNA, 181 bp, Homo sapiens
  chr6:9041149-9041330
  hypo
gagggtgcgccaggtcccccagcagtgccggccgacggtgagtctccccaccaccccccaccgccgtgggctcctgcgcgacgcgagtttccccgacgagcgcagccccctgattcagggcagccaattccatcgatctcccaaggactgaaaagtgccggcgcatggcgcgggaagggca

SEQ ID NO: 152750 - DNA, 17 bp, Homo sapiens
  chr6:10075433-10075450
  hypo
agcgagtgctgctgggg

SEQ ID NO: 152751 - DNA, 493 bp, Homo sapiens; identical to SEQ ID NO: 20149
  chr6:10319601-10320094
  hypo

SEQ ID NO: 152752 - DNA, 26 bp, Homo sapiens
  chr6:10436414-10436440
  hypo
tcgcccactcgccaccgcgcccggct

SEQ ID NO: 152753 - DNA, 26 bp, Homo sapiens
  chr6:10436559-10436585
  hypo
gccaccgcgcccggccgcagtaggca

SEQ ID NO: 152754 - DNA, 44 bp, Homo sapiens; identical to SEQ ID NO: 71139
  chr6:10491328-10491372
  hypo

SEQ ID NO: 152755 - DNA, 30 bp, Homo sapiens; identical to SEQ ID NO: 20150
  chr6:10494984-10495014
  hypo

SEQ ID NO: 152756 - DNA, 30 bp, Homo sapiens
  chr6:10503030-10503060
  hypo
cggagttcactgtcccgtgctgtgtgatgt

SEQ ID NO: 152757 - DNA, 100 bp, Homo sapiens; identical to SEQ ID NO: 71141
  chr6:10527663-10527763
  hypo

SEQ ID NO: 152758 - DNA, 149 bp, Homo sapiens; identical to SEQ ID NO: 20151
  chr6:10538234-10538383
  hypo

SEQ ID NO: 152759 - DNA, 42 bp, Homo sapiens; identical to SEQ ID NO: 20152
  chr6:10539695-10539737
  hypo

SEQ ID NO: 152760 - DNA, 32 bp, Homo sapiens; identical to SEQ ID NO: 20153
  chr6:10542885-10542917
  hypo

SEQ ID NO: 152761 - DNA, 36 bp, Homo sapiens
  chr6:10549000-10549036
  hypo
tttttttttttgagacgaagtctcgctgtcacccag

SEQ ID NO: 152762 - DNA, 31 bp, Homo sapiens; identical to SEQ ID NO: 71145
  chr6:10551605-10551636
  hypo

SEQ ID NO: 152763 - DNA, 258 bp, Homo sapiens
  chr6:10560600-10560858
  hypo
ggcatgagccactgcgccgggctgagctcttctattttcaatgtcatgttttaagaggaaaaattcttctgtccgtacagggtaaacatctttttgcaaacgtgcaagtgcaggtggtgctgttcatttcttccctcaaagcgaccgcctccctttctcctaaataccttaaattaaaatgtgttagcaagaccctgtgcaggcatttcaggtttcccaaaacacccccaagagcaatgtgaccgagaaaatgattag

SEQ ID NO: 152764 - DNA, 30 bp, Homo sapiens; identical to SEQ ID NO: 71146
  chr6:10578053-10578083
  hypo

SEQ ID NO: 152765 - DNA, 85 bp, Homo sapiens; identical to SEQ ID NO: 20154
  chr6:10595774-10595859
  hypo

SEQ ID NO: 152766 - DNA, 30 bp, Homo sapiens; identical to SEQ ID NO: 71148
  chr6:10612506-10612536
  hypo

SEQ ID NO: 152767 - DNA, 181 bp, Homo sapiens
  chr6:10693034-10693215
  hypo
gagtgagccaccgtgcccagccaagaaagattttggaagagtgaatgaatacaaggatttccactagactgagaattagtttgtcaacagcatttcagtgtcttgagaagtgtttacatttggcgtggacaaagctggcagatgacgtagaaagtaaaaagttgcctcttcaaagtttccc

SEQ ID NO: 152768 - DNA, 121 bp, Homo sapiens
  chr6:10693274-10693395
  hypo
tacttcaagcctccttgctttgtgctaataactctgttaagccctattgtatgtaactgcgggacatgctcacaggcccaggcacgttccagctcacagcctgtttagcaaatcgggtatc

SEQ ID NO: 152769 - DNA, 30 bp, Homo sapiens; identical to SEQ ID NO: 71151
  chr6:10693775-10693805
  hypo

SEQ ID NO: 152770 - DNA, 36 bp, Homo sapiens
  chr6:10700560-10700596
  hypo
gattacaggcgtgagccaccgcgccctgccaaaaaa

SEQ ID NO: 152771 - DNA, 21 bp, Homo sapiens
  chr6:10716122-10716143
  hypo
ccaccgcgcccggccctggat

SEQ ID NO: 152772 - DNA, 88 bp, Homo sapiens; identical to SEQ ID NO: 71152
  chr6:10735101-10735189
  hypo

SEQ ID NO: 152773 - DNA, 25 bp, Homo sapiens
  chr6:10761165-10761190
  hypo
tgccgcacctgatcattcatgcatt

SEQ ID NO: 152774 - DNA, 30 bp, Homo sapiens
  chr6:10784822-10784852
  hypo
ggtagcattacagcacgaacaacgagagga

SEQ ID NO: 152775 - DNA, 251 bp, Homo sapiens
  chr6:10785247-10785498
  hypo
ccgtatacaatttcccgtcaccctagtgtcaggcacagaaaataggtatttgtggagacatgcctgtgtctcagccagaacagacttgtgcagtggctaagcacctcgctagctgtttagtggtgtttgttagtattaagactgactctctgcctgttggtccctaactcccacagtcctgtttctgtgtacggactgaggactttctgcttcgaggcttagttctgtctcattcccgaggcctgtccctg

SEQ ID NO: 152776 - DNA, 22 bp, Homo sapiens
  chr6:10832343-10832365
  hypo
cagtagctgggattacaggtgc

SEQ ID NO: 152777 - DNA, 19 bp, Homo sapiens
  chr6:10856653-10856672
  hypo
gagccgagatcatgccact

SEQ ID NO: 152778 - DNA, 21 bp, Homo sapiens
  chr6:10969879-10969900
  hypo
agccaccgcgcctggccggaa

SEQ ID NO: 152779 - DNA, 84 bp, Homo sapiens
  chr6:11029459-11029543
  hypo
aaaaaaaaaaaaaaaaaaaaaaggtaggctggcattcagtgtggttcactgcaaagggcaggagttttacgcaggttctagttt

SEQ ID NO: 152780 - DNA, 1240 bp, Homo sapiens; identical to SEQ ID NO: 112877
  chr6:11043615-11044855
  hypo

SEQ ID NO: 152781 - DNA, 91 bp, Homo sapiens; identical to SEQ ID NO: 71158
  chr6:11052341-11052432
  hypo

SEQ ID NO: 152782 - DNA, 30 bp, Homo sapiens; identical to SEQ ID NO: 20159
  chr6:11191220-11191250
  hypo

SEQ ID NO: 152783 - DNA, 30 bp, Homo sapiens; identical to SEQ ID NO: 42610
  chr6:11217446-11217476
  hypo

SEQ ID NO: 152784 - DNA, 465 bp, Homo sapiens
  chr6:11273699-11274164
  hypo
ctgaatcatgacaagtgccaccgatgctgaggtgcgaacggccggggactgcgcctatctgtgtgcgttcacctgtgttgccctccacacagtccccgcctgtggtctagccttctactccctttccggccggcagattccgtcttgccagtggcttgatatgacttcatttatttgaggttgtgagtcaatgttatcaagatccgaattaccctgggcattgttcatacaatggaaggccgaaatggacacccatgacatgtagggcaaccgtgagtagagcctcactcaatatgagattgttccctggaaaattcctgtgttcacccgacagcaagtgattcagatgtcaagattaaggaaaacgactatgggggtggacaggtactttgacgtactctgacctctttttataggattggtttcttcttcattagcattttcccaagtcgagcaaagaaatgt

SEQ ID NO: 152785 - DNA, 61 bp, Homo sapiens
  chr6:11288374-11288435
  hypo
ggctcagtcaaaattacgcaggctggttcagctgcagttcaagtggcgtatggcgtgtggc

SEQ ID NO: 152786 - DNA, 66 bp, Homo sapiens; identical to SEQ ID NO: 71163
  chr6:11324664-11324730
  hypo

SEQ ID NO: 152787 - DNA, 30 bp, Homo sapiens; identical to SEQ ID NO: 4620
  chr6:11392177-11392207
  hypo

SEQ ID NO: 152788 - DNA, 30 bp, Homo sapiens
  chr6:11486796-11486826
  hypo
tgcctgcccgggccgcggtaacacagtact

SEQ ID NO: 152789 - DNA, 608 bp, Homo sapiens; identical to SEQ ID NO: 112888
  chr6:11538299-11538907
  hypo

SEQ ID NO: 152790 - DNA, 64 bp, Homo sapiens
  chr6:11633529-11633593
  hypo
tgcgctcctcccaggcggctcaggctcaatgaccttgccgccaagcatccgctgtgcccagctt

SEQ ID NO: 152791 - DNA, 106 bp, Homo sapiens
  chr6:11711664-11711770
  hypo
ctccgtcatttgactcggagcatgtcattttctcccattttagaccgtgtacagtcaaaccctgtgaaaggactcacagatagcggccctgcgtgtatgagtgggc

SEQ ID NO: 152792 - DNA, 151 bp, Homo sapiens
  chr6:11789745-11789896
  hypo
acttgactggatcaccgatcttatatttcaaggggatttacaggaattcactccagatgaagccgaattctttacctttacacttgctctctgtctatttactcctcctccttctcactaccgctcccaccttcagcgcgccattcaacag

SEQ ID NO: 152793 - DNA, 117 bp, Homo sapiens
  chr6:11926203-11926320
  hypo
ggctgcccactaagccgtcatcccgtggcgctgcacccactgcttctccccagctcctctgcataggtctgcccttcactcccacgcagaacacgtggctcacgagatgttctgatg

SEQ ID NO: 152794 - DNA, 30 bp, Homo sapiens; identical to SEQ ID NO: 42617
  chr6:11968636-11968666
  hypo

SEQ ID NO: 152795 - DNA, 22 bp, Homo sapiens
  chr6:12007481-12007503
  hypo
agcatgattttttttttgagac

SEQ ID NO: 152796 - DNA, 30 bp, Homo sapiens
  chr6:12025984-12026014
  hypo
atcgttggccaagctcgatggctcacgcct

SEQ ID NO: 152797 - DNA, 30 bp, Homo sapiens; identical to SEQ ID NO: 71168
  chr6:12029260-12029290
  hypo

SEQ ID NO: 152798 - DNA, 38 bp, Homo sapiens; identical to SEQ ID NO: 71169
  chr6:12029573-12029611
  hypo

SEQ ID NO: 152799 - DNA, 30 bp, Homo sapiens; identical to SEQ ID NO: 42618
  chr6:12163297-12163327
  hypo

SEQ ID NO: 152800 - DNA, 30 bp, Homo sapiens
  chr6:12203535-12203565
  hypo
ggagaatgctggggtcgggtagacgaagga

SEQ ID NO: 152801 - DNA, 647 bp, Homo sapiens
  chr6:12222840-12223487
  hypo
acaggcaagcctaaccctgcccgggcctgtgtctgatggcgaggcttggtatatactacaagcaccttgtcattagggttttatcgtgctatggatatgctaacgatacatttataaacaaagtttctaagtagtgcaattgccgaggaaaaactgattgatttatacaagtgtggattttttttagacatcccgttccatgccttagggtttctagtgttctctagctgggcaagtccagactcactttggtcttgttctgggtgttttccgaggctgtgctcgctctgtgtggatgacatgagtgtgtgtggagtttatggctgtgataaaatacagctctggcatttgctgtggttccctatcgaaagccacgctttctcggcactggttgcctcccactgtagaatctgaaaatctcagataatcacattcctggtgtgtttgtagctcagcagaggaatggcacccaatcctgggcaaaggaatgtgaaggtttctggaaaacaggttttcttccccaattttcaaagagaggtttcttccggtccctgccttcgttcgagggagcacgtgatacttggcactgcaaccacagtcttgtgaacctgtgggagcagcaccaaggaccacgaagaggctgcccc

SEQ ID NO: 152802 - DNA, 96 bp, Homo sapiens
  chr6:12287831-12287927
  hypo
ggcaggtgccacccctcgcccctgacacacaaagaaaaagacacggaaattctctctctctcttctcttctcctatctctctctctctccctctct

SEQ ID NO: 152803 - DNA, 155 bp, Homo sapiens; identical to SEQ ID NO: 20161
  chr6:12287986-12288141
  hypo

SEQ ID NO: 152804 - DNA, 83 bp, Homo sapiens
  chr6:12288539-12288622
  hypo
gtgttgggggggaggcgctgcttggaacctgtgaatgtgacatcagctctcctctcctctcccaaggtcggctttggagaggg

SEQ ID NO: 152805 - DNA, 266 bp, Homo sapiens; identical to SEQ ID NO: 71174
  chr6:12338228-12338494
  hypo

SEQ ID NO: 152806 - DNA, 22 bp, Homo sapiens
  chr6:12397113-12397135
  hypo
taatcagactgggcgcggtggc

SEQ ID NO: 152807 - DNA, 83 bp, Homo sapiens
  chr6:12456682-12456765
  hypo
ttacttgagaagagcaagtccgcccttgggctgagttcaagtttgcttctaaagaaatagtgtgggagcgattaagcaggaag

SEQ ID NO: 152808 - DNA, 22 bp, Homo sapiens
  chr6:12788094-12788116
  hypo
ctcaacaaaggaggccaggcac

SEQ ID NO: 152809 - DNA, 106 bp, Homo sapiens
  chr6:12965811-12965917
  hypo
agaacatacagtgagcgtggctcaggcatgagtgatagtgctgttggccgtgtggcttcaatgttgatgaatcaacggtatgtgttaaatccggcatggttcaaca

SEQ ID NO: 152810 - DNA, 30 bp, Homo sapiens; identical to SEQ ID NO: 71176
  chr6:13194012-13194042
  hypo

SEQ ID NO: 152811 - DNA, 30 bp, Homo sapiens
  chr6:13240085-13240115
  hypo
ctgcaagcccagtaccgcatgttgaggagc

SEQ ID NO: 152812 - DNA, 31 bp, Homo sapiens
  chr6:13293171-13293202
  hypo
ttgtcccctacagcatcgcaggtttgagggt

SEQ ID NO: 152813 - DNA, 297 bp, Homo sapiens
  chr6:13295930-13296227
  hypo
cctgtggccagtccccgcagtgtggcaggcctgccactgtgcgaccgaggccgtcatgcatgaagcacatctggggctttatggctcaacacctgagcctcctggaaggccttggccgcctcactgaagccccagcgtaccggctctgcaaggccctggggttaaaatagcaaaaatgccatctggcaagaggctggctttgttcagactgtgtgctgcgttgtcgctggggtggtggggacattttccaagccaccattagaatatgagctgtcacctgggcgagccccactcccc

SEQ ID NO: 152814 - DNA, 184 bp, Homo sapiens; identical to SEQ ID NO: 71177
  chr6:13296595-13296779
  hypo

SEQ ID NO: 152815 - DNA, 30 bp, Homo sapiens
  chr6:13318074-13318104
  hypo
atgaggcagagtgggcgctaagtaggtgct

SEQ ID NO: 152816 - DNA, 259 bp, Homo sapiens
  chr6:13318557-13318816
  hypo
acacactcagaagcacgtctgcctgaggctgcagtaaaggtgtctcagcttggaacacagacaagctgagtagcggtgaggcggaacctataccctgtcatctcaattcctaatctaatttaatttgatatataatttaagaacttgtgtagtactatcaacttcactttgccaataagtgaaatttaaagatgattgcttaaattattccaattattttttagggaccttctctctcgataaacgtaagaaatataaa

SEQ ID NO: 152817 - DNA, 18 bp, Homo sapiens
  chr6:13330102-13330120
  hypo
tgtgttaaaaagtgatcg

SEQ ID NO: 152818 - DNA, 29 bp, Homo sapiens
  chr6:13331763-13331792
  hypo
tgagccacagcgcccggccagcaccgatc

SEQ ID NO: 152819 - DNA, 136 bp, Homo sapiens; identical to SEQ ID NO: 20165
  chr6:13333028-13333164
  hypo

SEQ ID NO: 152820 - DNA, 30 bp, Homo sapiens; identical to SEQ ID NO: 71180
  chr6:13333831-13333861
  hypo

SEQ ID NO: 152821 - DNA, 30 bp, Homo sapiens; identical to SEQ ID NO: 20166
  chr6:13350850-13350880
  hypo

SEQ ID NO: 152822 - DNA, 101 bp, Homo sapiens
  chr6:13351755-13351856
  hypo
caacagcataacagccgtctgccgacccctgacaggcttaggaaggagccctttcataccgctacagctccgtgttagcggccgcccgtggagagggaact

SEQ ID NO: 152823 - DNA, 30 bp, Homo sapiens; identical to SEQ ID NO: 71182
  chr6:13365034-13365064
  hypo

SEQ ID NO: 152824 - DNA, 173 bp, Homo sapiens; identical to SEQ ID NO: 71183
  chr6:13386516-13386689
  hypo

SEQ ID NO: 152825 - DNA, 25 bp, Homo sapiens
  chr6:13397368-13397393
  hypo
tgtgggtgcccacagtggtctcgaa

SEQ ID NO: 152826 - DNA, 84 bp, Homo sapiens; identical to SEQ ID NO: 20168
  chr6:13397452-13397536
  hypo

SEQ ID NO: 152827 - DNA, 390 bp, Homo sapiens; identical to SEQ ID NO: 20169
  chr6:13456726-13457116
  hypo

SEQ ID NO: 152828 - DNA, 437 bp, Homo sapiens; identical to SEQ ID NO: 112902
  chr6:13488241-13488678
  hypo

SEQ ID NO: 152829 - DNA, 388 bp, Homo sapiens
  chr6:13510020-13510408
  hypo
agtcgtgattaaaagcgataaagtgtattcactcagtgggatactaagtagcaatgagaacgaattaactacaactactagagatgatagacaaatctcacaatcagtgaaagaagccaaacacaaaagagttcatactgtgtgatttcatttataggaaaccaatttatggcgacatgggtcagaatcacatgcgaaacacagggctgattgggaggagttttgagcttcccttctggggtgctagtcgtgtttttttcatctggattattagtcacacgggcgtatttactttgtaatagtttgccaaggtgtgatgattggtgcacttttctgttacatacatacgtattttagacaatctccctctgtcctccagggtggagta

SEQ ID NO: 152830 - DNA, 27 bp, Homo sapiens
  chr6:13510527-13510554
  hypo
gaagtcggtgtgtctggagtttttttc

SEQ ID NO: 152831 - DNA, 147 bp, Homo sapiens; identical to SEQ ID NO: 4623
  chr6:13574017-13574164
  hypo

SEQ ID NO: 152832 - DNA, 38 bp, Homo sapiens; identical to SEQ ID NO: 20171
  chr6:13631318-13631356
  hypo

SEQ ID NO: 152833 - DNA, 30 bp, Homo sapiens; identical to SEQ ID NO: 20172
  chr6:13639923-13639953
  hypo

SEQ ID NO: 152834 - DNA, 30 bp, Homo sapiens; identical to SEQ ID NO: 42627
  chr6:13722507-13722537
  hypo

SEQ ID NO: 152835 - DNA, 85 bp, Homo sapiens
  chr6:13780583-13780668
  hypo
acctagtttgaggcacgaagaaggatactacatcagtctgaaaacagtctgggcatgccgggcgtggtggctcatgcctgtaatc

SEQ ID NO: 152836 - DNA, 30 bp, Homo sapiens; identical to SEQ ID NO: 71195
  chr6:13795737-13795767
  hypo

SEQ ID NO: 152837 - DNA, 19 bp, Homo sapiens
  chr6:13797646-13797665
  hypo
aaaacacacttaggccggg

SEQ ID NO: 152838 - DNA, 30 bp, Homo sapiens; identical to SEQ ID NO: 71197
  chr6:13988024-13988054
  hypo

SEQ ID NO: 152839 - DNA, 211 bp, Homo sapiens; identical to SEQ ID NO: 71198
  chr6:14002318-14002529
  hypo

SEQ ID NO: 152840 - DNA, 90 bp, Homo sapiens
  chr6:14002888-14002978
  hypo
gagtctccctcccgcccgcccgcggtgggctcctgcgcggccctagcctctcagacgtgtgccgtccccgctccacggctcccagtccca

SEQ ID NO: 152841 - DNA, 30 bp, Homo sapiens; identical to SEQ ID NO: 71199
  chr6:14003738-14003768
  hypo

SEQ ID NO: 152842 - DNA, 30 bp, Homo sapiens
  chr6:14016759-14016789
  hypo
accagcctttccctgcgtccccagtccggc

SEQ ID NO: 152843 - DNA, 101 bp, Homo sapiens; identical to SEQ ID NO: 71200
  chr6:14099381-14099482
  hypo

SEQ ID NO: 152844 - DNA, 42 bp, Homo sapiens
  chr6:14116491-14116533
  hypo
aaaaaaaaaaaaaaaaaaagagggtctcgaaaatgttagtac

SEQ ID NO: 152845 - DNA, 293 bp, Homo sapiens; identical to SEQ ID NO: 42630
  chr6:14117385-14117678
  hypo

SEQ ID NO: 152846 - DNA, 41 bp, Homo sapiens
  chr6:14130663-14130704
  hypo
acagaaagcaagccgcgcacggtggctcacgcctgtaatcc

SEQ ID NO: 152847 - DNA, 95 bp, Homo sapiens; identical to SEQ ID NO: 71202
  chr6:14139161-14139256
  hypo

SEQ ID NO: 152848 - DNA, 30 bp, Homo sapiens
  chr6:14196642-14196672
  hypo
agattcgtacagattcgcagccgcgctaac

SEQ ID NO: 152849 - DNA, 157 bp, Homo sapiens; identical to SEQ ID NO: 71203
  chr6:14203366-14203523
  hypo

SEQ ID NO: 152850 - DNA, 129 bp, Homo sapiens; identical to SEQ ID NO: 4628
  chr6:14211102-14211231
  hypo

SEQ ID NO: 152851 - DNA, 30 bp, Homo sapiens
  chr6:14217054-14217084
  hypo
gaagaacgcatggtacggagagagccacga

SEQ ID NO: 152852 - DNA, 173 bp, Homo sapiens; identical to SEQ ID NO: 71205
  chr6:14273200-14273373
  hypo

SEQ ID NO: 152853 - DNA, 145 bp, Homo sapiens
  chr6:14274906-14275051
  hypo
ggcagagtgcagtggcggagcccacgctggggtgcgtgtctcaacaactggcctgggtactgctttgagcctcagtgatgagtcactttattcattcatttatatggcaaattgtatgaagcacctgtgacgtgcaggcagtgtt

SEQ ID NO: 152854 - DNA, 435 bp, Homo sapiens; identical to SEQ ID NO: 71206
  chr6:14282462-14282897
  hypo

SEQ ID NO: 152855 - DNA, 149 bp, Homo sapiens
  chr6:14324569-14324718
  hypo
tcacccatcagctctatactccgctgttccagcctcacactttcatctttgtccttaacggagtggcgagaaaggccacactaatcttcagaagcaggaacatacgggtgctcttccatcattttaccgctaatatcacttccacctct

SEQ ID NO: 152856 - DNA, 26 bp, Homo sapiens
  chr6:14559510-14559536
  hypo
atacgcattgttggctgggtgcggtg

SEQ ID NO: 152857 - DNA, 30 bp, Homo sapiens
  chr6:14624544-14624574
  hypo
cgagggagcggaggccgtagctttggggct

SEQ ID NO: 152858 - DNA, 37 bp, Homo sapiens
  chr6:14726131-14726168
  hypo
ccgtgagcccaagaacgaccttcgtattcaagtggca

SEQ ID NO: 152859 - DNA, 31 bp, Homo sapiens; identical to SEQ ID NO: 71209
  chr6:14744737-14744768
  hypo

SEQ ID NO: 152860 - DNA, 18 bp, Homo sapiens
  chr6:14755745-14755763
  hypo
cgggcgcagtggctcacg

SEQ ID NO: 152861 - DNA, 17 bp, Homo sapiens
  chr6:14756002-14756019
  hypo
gagcaagactctgtctc

SEQ ID NO: 152862 - DNA, 18 bp, Homo sapiens
  chr6:14771956-14771974
  hypo
gtgaaaacagggcaaaga

SEQ ID NO: 152863 - DNA, 137 bp, Homo sapiens
  chr6:14772273-14772410
  hypo
aaaaaaattcaagggcacagactgcgccctgctggctctacacctatagcatctcgtcctgcccttcccgagtctgtggctcttgggagtctcattccctcctttccagggtgtgcttcccccgtgggtggtctcac

SEQ ID NO: 152864 - DNA, 37 bp, Homo sapiens
  chr6:14777339-14777376
  hypo
ctgggccaggcgcagcggctcacgcctgtaatcccag

SEQ ID NO: 152865 - DNA, 31 bp, Homo sapiens; identical to SEQ ID NO: 20182
  chr6:14813397-14813428
  hypo

SEQ ID NO: 152866 - DNA, 30 bp, Homo sapiens; identical to SEQ ID NO: 71214
  chr6:14844859-14844889
  hypo

SEQ ID NO: 152867 - DNA, 31 bp, Homo sapiens; identical to SEQ ID NO: 20183
  chr6:14847049-14847080
  hypo

SEQ ID NO: 152868 - DNA, 37 bp, Homo sapiens; identical to SEQ ID NO: 71216
  chr6:14916086-14916123
  hypo

SEQ ID NO: 152869 - DNA, 32 bp, Homo sapiens; identical to SEQ ID NO: 71217
  chr6:14930076-14930108
  hypo

SEQ ID NO: 152870 - DNA, 31 bp, Homo sapiens
  chr6:14930347-14930378
  hypo
tacaggcatgagccaccgcgcccagccagta

SEQ ID NO: 152871 - DNA, 33 bp, Homo sapiens
  chr6:14934114-14934147
  hypo
aattactgggattacaggcgtgagtcaccatgc

SEQ ID NO: 152872 - DNA, 31 bp, Homo sapiens; identical to SEQ ID NO: 20184
  chr6:14940112-14940143
  hypo

SEQ ID NO: 152873 - DNA, 82 bp, Homo sapiens; identical to SEQ ID NO: 71219
  chr6:14941361-14941443
  hypo

SEQ ID NO: 152874 - DNA, 31 bp, Homo sapiens; identical to SEQ ID NO: 71220
  chr6:14963355-14963386
  hypo

SEQ ID NO: 152875 - DNA, 28 bp, Homo sapiens
  chr6:14966732-14966760
  hypo
taaaaatttgaaatttcgaggccaggtg

SEQ ID NO: 152876 - DNA, 88 bp, Homo sapiens; identical to SEQ ID NO: 20186
  chr6:14966819-14966907
  hypo

SEQ ID NO: 152877 - DNA, 103 bp, Homo sapiens; identical to SEQ ID NO: 71223
  chr6:14986857-14986960
  hypo

SEQ ID NO: 152878 - DNA, 28 bp, Homo sapiens
  chr6:14993681-14993709
  hypo
ttttttttttttgagacggagtttcact

SEQ ID NO: 152879 - DNA, 23 bp, Homo sapiens
  chr6:14999093-14999116
  hypo
agccaccgcgcctggctgaaacg

SEQ ID NO: 152880 - DNA, 40 bp, Homo sapiens; identical to SEQ ID NO: 71225
  chr6:15083848-15083888
  hypo

SEQ ID NO: 152881 - DNA, 19 bp, Homo sapiens
  chr6:15224640-15224659
  hypo
cacccgccaccatgcccgg

SEQ ID NO: 152882 - DNA, 210 bp, Homo sapiens; identical to SEQ ID NO: 20188
  chr6:15227669-15227879
  hypo

SEQ ID NO: 152883 - DNA, 43 bp, Homo sapiens
  chr6:15263031-15263074
  hypo
ttataggcgtgagccaccgtgcccggcccgtttggctattttg

SEQ ID NO: 152884 - DNA, 44 bp, Homo sapiens; identical to SEQ ID NO: 20189
  chr6:15282317-15282361
  hypo

SEQ ID NO: 152885 - DNA, 44 bp, Homo sapiens; identical to SEQ ID NO: 20190
  chr6:15282480-15282524
  hypo

SEQ ID NO: 152886 - DNA, 121 bp, Homo sapiens; identical to SEQ ID NO: 20191
  chr6:15283482-15283603
  hypo

SEQ ID NO: 152887 - DNA, 24 bp, Homo sapiens
  chr6:15283842-15283866
  hypo
gattacaggcgtgagccaccgtgc

SEQ ID NO: 152888 - DNA, 19 bp, Homo sapiens
  chr6:15382230-15382249
  hypo
ggggctgggtactgtggct

SEQ ID NO: 152889 - DNA, 39 bp, Homo sapiens
  chr6:15469669-15469708
  hypo
tttctttcttttgtgacggagtctcgctctgtcgcccag

SEQ ID NO: 152890 - DNA, 30 bp, Homo sapiens
  chr6:15479175-15479205
  hypo
gtgagccaccgtgcccggccggatttaggg

SEQ ID NO: 152891 - DNA, 30 bp, Homo sapiens
  chr6:15479936-15479966
  hypo
agcatcccaggttgacgtttgttccctgtg

SEQ ID NO: 152892 - DNA, 30 bp, Homo sapiens; identical to SEQ ID NO: 20192
  chr6:15494999-15495029
  hypo

SEQ ID NO: 152893 - DNA, 30 bp, Homo sapiens
  chr6:15495483-15495513
  hypo
caagattaccacggcgtccaagctgtaaga

SEQ ID NO: 152894 - DNA, 30 bp, Homo sapiens
  chr6:15499215-15499245
  hypo
acatcgtagtgacagcgccttttgtttaga

SEQ ID NO: 152895 - DNA, 150 bp, Homo sapiens
  chr6:15501254-15501404
  hypo
gaactgcccaggaccggctggccaagctgcaggaggcctactgccagtacctactctcctacgactccctgtccccagaggagcaccggcggctggagaaggaggtgctgatggagaaggagatcctggagaagcgcaaggggccgctgg

SEQ ID NO: 152896 - DNA, 129 bp, Homo sapiens; identical to SEQ ID NO: 71234
  chr6:15503288-15503417
  hypo

SEQ ID NO: 152897 - DNA, 30 bp, Homo sapiens; identical to SEQ ID NO: 71235
  chr6:15503637-15503667
  hypo

SEQ ID NO: 152898 - DNA, 193 bp, Homo sapiens
  chr6:15512505-15512698
  hypo
ttgtcgtctgcttcccgggatcctttgtgtccaaagtgtgctgtgggtacagcgtgtctgaaaccgtgcactttgctaccacccagtggacaagtatgggctttgagaccgccaaggtgagcagagccggcctcctcccgcttgctgcccccgcatccctgtgagtgccgtgcgtgagcgcacacagaagcat

SEQ ID NO: 152899 - DNA, 673 bp, Homo sapiens; identical to SEQ ID NO: 20194
  chr6:15513370-15514043
  hypo

SEQ ID NO: 152900 - DNA, 42 bp, Homo sapiens; identical to SEQ ID NO: 20195
  chr6:15518529-15518571
  hypo

SEQ ID NO: 152901 - DNA, 54 bp, Homo sapiens; identical to SEQ ID NO: 20196
  chr6:15523494-15523548
  hypo

SEQ ID NO: 152902 - DNA, 30 bp, Homo sapiens; identical to SEQ ID NO: 71240
  chr6:15524599-15524629
  hypo

SEQ ID NO: 152903 - DNA, 301 bp, Homo sapiens
  chr6:15525178-15525479
  hypo
ctgttttgagtaggacgctcagcctgtctcaaagaggccaacattcctgcagcaacagttagcgaccttcctccctgccagccacagctctgcttcctgcctacaggtgccctgaaccttcccggcaggcgcactcctctaattgcaagtggagtttccactggccttggaacatttctcgggcctaacggcagaaggggtttgacctacatctgtaagctgtaagagctccctgcagtggaagcacagactaggagaaaacaaaacccagcccaccagcagacggcgaccccatgaaaca

SEQ ID NO: 152904 - DNA, 42 bp, Homo sapiens
  chr6:15530494-15530536
  hypo
ctctgcacagacgtgcgatgagatgcccgattcccgtgtgtg

SEQ ID NO: 152905 - DNA, 30 bp, Homo sapiens
  chr6:15530802-15530832
  hypo
actgcagtacgtgcccgtccctgtcaccag

SEQ ID NO: 152906 - DNA, 30 bp, Homo sapiens; identical to SEQ ID NO: 4629
  chr6:15810289-15810319
  hypo

SEQ ID NO: 152907 - DNA, 30 bp, Homo sapiens
  chr6:15843875-15843905
  hypo
gtattcttgttttcacgacaagtcaatatc

SEQ ID NO: 152908 - DNA, 26 bp, Homo sapiens
  chr6:15891667-15891693
  hypo
tttcttaaaataaaaccggccgggct

SEQ ID NO: 152909 - DNA, 30 bp, Homo sapiens; identical to SEQ ID NO: 71243
  chr6:15895042-15895072
  hypo

SEQ ID NO: 152910 - DNA, 32 bp, Homo sapiens; identical to SEQ ID NO: 20199
  chr6:15907073-15907105
  hypo

SEQ ID NO: 152911 - DNA, 30 bp, Homo sapiens
  chr6:16034807-16034837
  hypo
ccagtctcctacccacgacatccccaccca

SEQ ID NO: 152912 - DNA, 19 bp, Homo sapiens
  chr6:16160738-16160757
  hypo
tgtgaaggtctgggccggg

SEQ ID NO: 152913 - DNA, 30 bp, Homo sapiens
  chr6:16161190-16161220
  hypo
acatcatcatcacaccggctggcaggggct

SEQ ID NO: 152914 - DNA, 269 bp, Homo sapiens
  chr6:16197030-16197299
  hypo
gaaccaagccgaggccgctccacagagaaagcatttagaccacccctagccaaagggaaatcagaatcgcccatcccagcagttcagaattgagttctgatgtgtccggaattgatgggttgtctcactgacttcaaggaaaaagccgcagatctccgtggtgggtgctaaaattcttaaaggtggtgtgtctggagtatgttccttttcatgttcagacgtgtgcagtttacgggggtggggaggttctaggtctcgctggctcagga

SEQ ID NO: 152915 - DNA, 28 bp, Homo sapiens
  chr6:16197358-16197386
  hypo
gtttgtttctacccgtgagttcgtgata

SEQ ID NO: 152916 - DNA, 147 bp, Homo sapiens; identical to SEQ ID NO: 71247
  chr6:16197606-16197753
  hypo

SEQ ID NO: 152917 - DNA, 121 bp, Homo sapiens
  chr6:16218401-16218522
  hypo
caccggggttgctggtggagctgcctgccagtcccgcaccgtgtgcctgcacaccggggctgtaaatggagctgcctgccagtcctgcatcatgtgctaagtccctcattgcctggggcta

SEQ ID NO: 152918 - DNA, 17 bp, Homo sapiens
  chr6:16220365-16220382
  hypo
attaggaactagagtgg

SEQ ID NO: 152919 - DNA, 30 bp, Homo sapiens
  chr6:16249930-16249960
  hypo
acgactgacacaaagcgggtcataaatgct

SEQ ID NO: 152920 - DNA, 30 bp, Homo sapiens
  chr6:16286714-16286744
  hypo
cgttgtgggtgccggcgggaggcagaaacg

SEQ ID NO: 152921 - DNA, 30 bp, Homo sapiens; identical to SEQ ID NO: 71250
  chr6:16295439-16295469
  hypo

SEQ ID NO: 152922 - DNA, 147 bp, Homo sapiens; identical to SEQ ID NO: 71251
  chr6:16298906-16299053
  hypo

SEQ ID NO: 152923 - DNA, 140 bp, Homo sapiens; identical to SEQ ID NO: 20200
  chr6:16322046-16322186
  hypo

SEQ ID NO: 152924 - DNA, 30 bp, Homo sapiens; identical to SEQ ID NO: 71253
  chr6:16327551-16327581
  hypo

SEQ ID NO: 152925 - DNA, 30 bp, Homo sapiens
  chr6:16328329-16328359
  hypo
aaaccaagctccaccgaggtccctgccggc

SEQ ID NO: 152926 - DNA, 30 bp, Homo sapiens
  chr6:16356230-16356260
  hypo
ctcgttccttccccgcgaccattctcctcc

SEQ ID NO: 152927 - DNA, 46 bp, Homo sapiens; identical to SEQ ID NO: 71254
  chr6:16733497-16733543
  hypo

SEQ ID NO: 152928 - DNA, 43 bp, Homo sapiens; identical to SEQ ID NO: 71255
  chr6:16841588-16841631
  hypo

SEQ ID NO: 152929 - DNA, 30 bp, Homo sapiens
  chr6:17032047-17032077
  hypo
aggtacacgcgaggccggcgagttgtcatg

SEQ ID NO: 152930 - DNA, 1294 bp, Homo sapiens; identical to SEQ ID NO: 112930
  chr6:17281118-17282412
  hypo

SEQ ID NO: 152931 - DNA, 30 bp, Homo sapiens
  chr6:17322173-17322203
  hypo
tgagtttgagaattccgtttgcccgctcga

SEQ ID NO: 152932 - DNA, 30 bp, Homo sapiens
  chr6:17322595-17322625
  hypo
tgtcctttagtgaggcgaatagattggggg

SEQ ID NO: 152933 - DNA, 20 bp, Homo sapiens
  chr6:17333378-17333398
  hypo
tgactcttcttttttttgag

SEQ ID NO: 152934 - DNA, 20 bp, Homo sapiens
  chr6:17339499-17339519
  hypo
aagaccgaaacttcgtctca

SEQ ID NO: 152935 - DNA, 30 bp, Homo sapiens
  chr6:17340730-17340760
  hypo
gccactgtgccccgccgaggaacagaattt

SEQ ID NO: 152936 - DNA, 27 bp, Homo sapiens
  chr6:17386650-17386677
  hypo
caccgcgcccagccagccttattgtta

SEQ ID NO: 152937 - DNA, 205 bp, Homo sapiens; identical to SEQ ID NO: 71259
  chr6:17508424-17508629
  hypo

SEQ ID NO: 152938 - DNA, 30 bp, Homo sapiens
  chr6:17615960-17615990
  hypo
aacgcgttccatgaacgcttatcagcgcac

SEQ ID NO: 152939 - DNA, 23 bp, Homo sapiens
  chr6:17690580-17690603
  hypo
ctcctgggcgacagagcgagact

SEQ ID NO: 152940 - DNA, 30 bp, Homo sapiens
  chr6:17691357-17691387
  hypo
gcaaaagcgagactccgtctcaagaaaaaa

SEQ ID NO: 152941 - DNA, 25 bp, Homo sapiens
  chr6:17751570-17751595
  hypo
ccacggtgcccggccttgttgttgt

SEQ ID NO: 152942 - DNA, 121 bp, Homo sapiens; identical to SEQ ID NO: 71261
  chr6:17756938-17757059
  hypo

SEQ ID NO: 152943 - DNA, 43 bp, Homo sapiens; identical to SEQ ID NO: 20203
  chr6:17761881-17761924
  hypo

SEQ ID NO: 152944 - DNA, 30 bp, Homo sapiens
  chr6:17764826-17764856
  hypo
gaaatcatgcacaagcgatggtgtggagtg

SEQ ID NO: 152945 - DNA, 31 bp, Homo sapiens; identical to SEQ ID NO: 20204
  chr6:17779890-17779921
  hypo

SEQ ID NO: 152946 - DNA, 77 bp, Homo sapiens; identical to SEQ ID NO: 20205
  chr6:17788885-17788962
  hypo

SEQ ID NO: 152947 - DNA, 31 bp, Homo sapiens; identical to SEQ ID NO: 71265
  chr6:17795509-17795540
  hypo

SEQ ID NO: 152948 - DNA, 96 bp, Homo sapiens; identical to SEQ ID NO: 20206
  chr6:17797154-17797250
  hypo

SEQ ID NO: 152949 - DNA, 255 bp, Homo sapiens
  chr6:17799565-17799820
  hypo
caccggggcagccaccgtagactcacactggtcccagaatgtgtattgacagaagacaaaatttgagaggtttaagggcagccccgttgcttctttaatttttacctgaagagataaacaatacaaataaaactccaatgaacactaaacattctttcatttcagctacctcaaatttaagagtaagcgatgaaacaaattggtcatccatttgacatgtgaaaatattatatctgacaccgtgacactaagggt

SEQ ID NO: 152950 - DNA, 68 bp, Homo sapiens; identical to SEQ ID NO: 71267
  chr6:17800167-17800235
  hypo

SEQ ID NO: 152951 - DNA, 95 bp, Homo sapiens
  chr6:17801738-17801833
  hypo
caacaacaaaaacaacaacaacaacagcaacaaaactcactaataacagcatagaatagttgctataatagatatatgtgcgagttgttatggga

SEQ ID NO: 152952 - DNA, 52 bp, Homo sapiens
  chr6:17837136-17837188
  hypo
ttctcgacttcctcccgcagttctcggatcacttttgcgttggggtcctcat

SEQ ID NO: 152953 - DNA, 30 bp, Homo sapiens
  chr6:17877975-17878005
  hypo
aatttcagtgacatgcgtcatcctaaatat

SEQ ID NO: 152954 - DNA, 30 bp, Homo sapiens; identical to SEQ ID NO: 71268
  chr6:17899775-17899805
  hypo

SEQ ID NO: 152955 - DNA, 37 bp, Homo sapiens; identical to SEQ ID NO: 71269
  chr6:17934557-17934594
  hypo

SEQ ID NO: 152956 - DNA, 330 bp, Homo sapiens; identical to SEQ ID NO: 71270
  chr6:17940368-17940698
  hypo

SEQ ID NO: 152957 - DNA, 21 bp, Homo sapiens
  chr6:17974600-17974621
  hypo
gcccggcgggaacctcgttta

SEQ ID NO: 152958 - DNA, 31 bp, Homo sapiens; identical to SEQ ID NO: 4637
  chr6:17987686-17987717
  hypo

SEQ ID NO: 152959 - DNA, 39 bp, Homo sapiens; identical to SEQ ID NO: 71272
  chr6:18024630-18024669
  hypo

SEQ ID NO: 152960 - DNA, 121 bp, Homo sapiens; identical to SEQ ID NO: 71273
  chr6:18030873-18030994
  hypo

SEQ ID NO: 152961 - DNA, 99 bp, Homo sapiens; identical to SEQ ID NO: 71274
  chr6:18035942-18036041
  hypo

SEQ ID NO: 152962 - DNA, 31 bp, Homo sapiens; identical to SEQ ID NO: 20210
  chr6:18044394-18044425
  hypo

SEQ ID NO: 152963 - DNA, 30 bp, Homo sapiens
  chr6:18081821-18081851
  hypo
ctggcgcctatccaccgagtctctagagat

SEQ ID NO: 152964 - DNA, 105 bp, Homo sapiens; identical to SEQ ID NO: 71276
  chr6:18129285-18129390
  hypo

SEQ ID NO: 152965 - DNA, 41 bp, Homo sapiens
  chr6:18205883-18205924
  hypo
aaccttcaccaggtgcgcttgggttttgtgaaaggtgtgct

SEQ ID NO: 152966 - DNA, 88 bp, Homo sapiens; identical to SEQ ID NO: 71277
  chr6:18220399-18220487
  hypo

SEQ ID NO: 152967 - DNA, 78 bp, Homo sapiens; identical to SEQ ID NO: 71278
  chr6:18220964-18221042
  hypo

SEQ ID NO: 152968 - DNA, 21 bp, Homo sapiens
  chr6:18228603-18228624
  hypo
ctctaattgtttgccccggga

SEQ ID NO: 152969 - DNA, 31 bp, Homo sapiens; identical to SEQ ID NO: 71280
  chr6:18239433-18239464
  hypo

SEQ ID NO: 152970 - DNA, 77 bp, Homo sapiens; identical to SEQ ID NO: 71281
  chr6:18247861-18247938
  hypo

SEQ ID NO: 152971 - DNA, 99 bp, Homo sapiens; identical to SEQ ID NO: 20211
  chr6:18250344-18250443
  hypo

SEQ ID NO: 152972 - DNA, 42 bp, Homo sapiens; identical to SEQ ID NO: 20212
  chr6:18259257-18259299
  hypo

SEQ ID NO: 152973 - DNA, 1475 bp, Homo sapiens; identical to SEQ ID NO: 4639
  chr6:18263765-18265240
  hypo

SEQ ID NO: 152974 - DNA, 18 bp, Homo sapiens
  chr6:18273571-18273589
  hypo
aaaaatagccgggtgcgg

SEQ ID NO: 152975 - DNA, 34 bp, Homo sapiens; identical to SEQ ID NO: 20214
  chr6:18275932-18275966
  hypo

SEQ ID NO: 152976 - DNA, 583 bp, Homo sapiens; identical to SEQ ID NO: 4640
  chr6:18277377-18277960
  hypo

SEQ ID NO: 152977 - DNA, 103 bp, Homo sapiens; identical to SEQ ID NO: 42654
  chr6:18277979-18278082
  hypo

SEQ ID NO: 152978 - DNA, 22 bp, Homo sapiens
  chr6:18282593-18282615
  hypo
aagatatctggccaggcgtggt

SEQ ID NO: 152979 - DNA, 39 bp, Homo sapiens
  chr6:18294410-18294449
  hypo
tgggattacgggcgtgagccaccgcgcgtggccaggcat

SEQ ID NO: 152980 - DNA, 30 bp, Homo sapiens; identical to SEQ ID NO: 71289
  chr6:18368151-18368181
  hypo

SEQ ID NO: 152981 - DNA, 252 bp, Homo sapiens; identical to SEQ ID NO: 71290
  chr6:18368661-18368913
  hypo

SEQ ID NO: 152982 - DNA, 44 bp, Homo sapiens; identical to SEQ ID NO: 71291
  chr6:18458439-18458483
  hypo

SEQ ID NO: 152983 - DNA, 30 bp, Homo sapiens
  chr6:18586603-18586633
  hypo
acagcctgccgaaaccgagagggacacagt

SEQ ID NO: 152984 - DNA, 26 bp, Homo sapiens
  chr6:19557118-19557144
  hypo
gggcgcggtggctcacgcctgtaatc

SEQ ID NO: 152985 - DNA, 26 bp, Homo sapiens
  chr6:19557383-19557409
  hypo
gctccgtctcagaaaaaaaaaaaaaa

SEQ ID NO: 152986 - DNA, 181 bp, Homo sapiens; identical to SEQ ID NO: 71294
  chr6:19676996-19677177
  hypo

SEQ ID NO: 152987 - DNA, 43 bp, Homo sapiens; identical to SEQ ID NO: 20220
  chr6:19677236-19677279
  hypo

SEQ ID NO: 152988 - DNA, 22 bp, Homo sapiens
  chr6:19779513-19779535
  hypo
gccactgcgctcagcctgtatt

SEQ ID NO: 152989 - DNA, 39 bp, Homo sapiens
  chr6:19828886-19828925
  hypo
agttgaggctgggcgcggtggctcaagcctgtaatccca

SEQ ID NO: 152990 - DNA, 30 bp, Homo sapiens
  chr6:19868421-19868451
  hypo
ccttttttgtagtgacgcaagtgaattaca

SEQ ID NO: 152991 - DNA, 84 bp, Homo sapiens
  chr6:19892211-19892295
  hypo
ctttgcgccttagaacgccgaagttttctgaattaaaaaaataataaaaaccagcctggccaacatggtgaaacctcgtctcta

SEQ ID NO: 152992 - DNA, 144 bp, Homo sapiens
  chr6:19892474-19892618
  hypo
agagactctgcctcaaaataataattaataataaaaataaggtaacagcacagctcacatcagtgaacataggtgtgtgaacctgcttgtcttggctttccagcaggcagatgtccagggacatgcggccggaagaaccggatt

SEQ ID NO: 152993 - DNA, 36 bp, Homo sapiens; identical to SEQ ID NO: 71297
  chr6:19967404-19967440
  hypo

SEQ ID NO: 152994 - DNA, 31 bp, Homo sapiens; identical to SEQ ID NO: 71298
  chr6:20057722-20057753
  hypo

SEQ ID NO: 152995 - DNA, 31 bp, Homo sapiens; identical to SEQ ID NO: 71299
  chr6:20105679-20105710
  hypo

SEQ ID NO: 152996 - DNA, 67 bp, Homo sapiens; identical to SEQ ID NO: 71300
  chr6:20124516-20124583
  hypo

SEQ ID NO: 152997 - DNA, 20 bp, Homo sapiens
  chr6:20208374-20208394
  hypo
taggtaaagaaactttgtag

SEQ ID NO: 152998 - DNA, 1154 bp, Homo sapiens; identical to SEQ ID NO: 112952
  chr6:20211952-20213106
  hypo

SEQ ID NO: 152999 - DNA, 42 bp, Homo sapiens; identical to SEQ ID NO: 71302
  chr6:20228877-20228919
  hypo

SEQ ID NO: 153000 - DNA, 33 bp, Homo sapiens; identical to SEQ ID NO: 71303
  chr6:20239104-20239137
  hypo

SEQ ID NO: 153001 - DNA, 121 bp, Homo sapiens
  chr6:20239436-20239557
  hypo
ggggcagcagctactgtgctcaatttgtggccaggccttagctgccttcccgcggggcagggctcgggatctggagcccgcctgcgcctcccccgccactccgtgggctcctgcgcggcca

SEQ ID NO: 153002 - DNA, 26 bp, Homo sapiens
  chr6:20256566-20256592
  hypo
gagaacaaggccaggcgcggtggctc

SEQ ID NO: 153003 - DNA, 31 bp, Homo sapiens; identical to SEQ ID NO: 71305
  chr6:20294237-20294268
  hypo

SEQ ID NO: 153004 - DNA, 30 bp, Homo sapiens; identical to SEQ ID NO: 71306
  chr6:20321330-20321360
  hypo

SEQ ID NO: 153005 - DNA, 44 bp, Homo sapiens; identical to SEQ ID NO: 71307
  chr6:20395765-20395809
  hypo

SEQ ID NO: 153006 - DNA, 363 bp, Homo sapiens
  chr6:20479818-20480181
  hypo
ctaatgctgaaggatcgctgtgtttgtccatctgggtgtggacggatgatcacggcaggtgaagagagtgtgcatgacaacccagcctacaacgctagaatcctggctctagggaatgacaagatgctgagtggggtggagcagaggggtgagagctggcatgagcctgcagcatttggcaggccagcccacaaactgcctcccttcttgttcttgtccatatgaccggtgacgagagatcgcactttcttattacaggcaaagcgaaggctggagctaggagaaagcggtcatcagtacctctcagatggtttaaaaacccccaagggcaaaggaagagctgcactacgaagtccagatagt

SEQ ID NO: 153007 - DNA, 30 bp, Homo sapiens
  chr6:20487996-20488026
  hypo
tttggctttgcgagccgtacagcctgtgtc

SEQ ID NO: 153008 - DNA, 30 bp, Homo sapiens; identical to SEQ ID NO: 71308
  chr6:20561378-20561408
  hypo

SEQ ID NO: 153009 - DNA, 92 bp, Homo sapiens; identical to SEQ ID NO: 71309
  chr6:20640181-20640273
  hypo

SEQ ID NO: 153010 - DNA, 206 bp, Homo sapiens
  chr6:20686904-20687110
  hypo
tccctcgtgccaaaacggttgggggccactgaactaggacatccagtatgatattgaaaaggagtggtgaggggacatttttgtctttgttcgtgattttagtgggaaagcttcgagtttctcaccgttaagtatgatgttagctatagatttttgtagtctttttaactagttgaagttactctatatctcgttcactgagatct

SEQ ID NO: 153011 - DNA, 274 bp, Homo sapiens
  chr6:20691376-20691650
  hypo
gctgccatttgtaaacggccattcattgtcctgtctcttgcctttggctctttccagtttttcttcccaaatctttggactagttcctgcagaaaatatgaattcacagtggtgccctctgggcctgggcatctctgggccggcagaccctgagcagcgactgctgctgagagcaggtgtgtgtacagatggcatggtggggccagcctgccttctgcttggtgatgttggagagggtgattgataatagagcttacaccgagtaatggtctga

SEQ ID NO: 153012 - DNA, 151 bp, Homo sapiens
  chr6:20745518-20745669
  hypo
tgagaatatttctatcgtacaccatgttgcaaaaggtaaacaaattcacaaagtggagcagtgtcacagtaacagtgggatcagtattgagggcaaggcttgaggaacgctctccttctcctgtttgcccctacttcgaacatttcttctt

SEQ ID NO: 153013 - DNA, 21 bp, Homo sapiens
  chr6:20878666-20878687
  hypo
aatctttaaagccaaccttag

SEQ ID NO: 153014 - DNA, 30 bp, Homo sapiens; identical to SEQ ID NO: 71313
  chr6:20893392-20893422
  hypo

SEQ ID NO: 153015 - DNA, 30 bp, Homo sapiens; identical to SEQ ID NO: 71314
  chr6:20907802-20907832
  hypo

SEQ ID NO: 153016 - DNA, 30 bp, Homo sapiens
  chr6:21046799-21046829
  hypo
gccagccaggcgtggcgtgagacacaacgg

SEQ ID NO: 153017 - DNA, 30 bp, Homo sapiens
  chr6:21102966-21102996
  hypo
ggcataactcttggtcgccattagaccacc

SEQ ID NO: 153018 - DNA, 181 bp, Homo sapiens
  chr6:21202325-21202506
  hypo
aaataaagggaataccgcttcactctggcaatagtaccgcttcactctggcaatagcaacaaagacaatactattgtctgtgttctcactgactgtggcactggattcttgtgtccgacagcagtgataattcacatgtgcttcacaagtgcccatgaaggatctgcgtgcatggccgtct

SEQ ID NO: 153019 - DNA, 30 bp, Homo sapiens
  chr6:21220416-21220446
  hypo
gctcgtgcgtgcgtgcgtgtgtgtgtgtgt

SEQ ID NO: 153020 - DNA, 182 bp, Homo sapiens; identical to SEQ ID NO: 71315
  chr6:21277793-21277975
  hypo

SEQ ID NO: 153021 - DNA, 281 bp, Homo sapiens
  chr6:21342660-21342941
  hypo
gcaccctaaactcagcggcctcatgttcacagactaagaagcaaacagcaaagcacagaaacaagggatttcttcccggaaagaagaatgttccccacttagtagatggatgagtagtgggataagagccctaactccaggagccagattatggtgtatcgctaaggtctgtgtttcagtcgctccagtcatgaactgctaacagcatctggcgtccataacccttagtagaggaatgtttgccggcctatttgtggagcgtatctctgagtgcacactta

SEQ ID NO: 153022 - DNA, 30 bp, Homo sapiens; identical to SEQ ID NO: 71317
  chr6:21369107-21369137
  hypo

SEQ ID NO: 153023 - DNA, 96 bp, Homo sapiens
  chr6:21406918-21407014
  hypo
aaagcatttcacacaattccacgccactcttactttctgttttagcctgtttccagcctggatcttcacatttccggctccccagccaacacacct

SEQ ID NO: 153024 - DNA, 88 bp, Homo sapiens
  chr6:21423806-21423894
  hypo
ctgtacctgggagagcggcagcagctacaccggaggagctcccgccctaactgggaaggggcggagctcccgcttgtccctggctcct

SEQ ID NO: 153025 - DNA, 207 bp, Homo sapiens
  chr6:21423953-21424160
  hypo
cacccaggagggcagatcctacctgctccctgaccccccgaagagcacagggaggctcagatccacagccttagagcaggaggcctgggtctgcagccgggttgggtgggctgcagtggcacccggggtgctcctgccccaactcgaaaggggtggggctcccaccggctccatggagtgtgcagccccagccgtgcctttctgctg

SEQ ID NO: 153026 - DNA, 31 bp, Homo sapiens; identical to SEQ ID NO: 20227
  chr6:21459015-21459046
  hypo

SEQ ID NO: 153027 - DNA, 23 bp, Homo sapiens
  chr6:21470164-21470187
  hypo
ctgcgccccgcctaaaataataa

SEQ ID NO: 153028 - DNA, 34 bp, Homo sapiens; identical to SEQ ID NO: 71321
  chr6:21494918-21494952
  hypo

SEQ ID NO: 153029 - DNA, 30 bp, Homo sapiens
  chr6:21522453-21522483
  hypo
tgcgagatagcttcacgggtgccgggcatg

SEQ ID NO: 153030 - DNA, 30 bp, Homo sapiens
  chr6:21522899-21522929
  hypo
ctcttcctcagttaccgagcttgtccctta

SEQ ID NO: 153031 - DNA, 94 bp, Homo sapiens; identical to SEQ ID NO: 20229
  chr6:21570591-21570685
  hypo

SEQ ID NO: 153032 - DNA, 31 bp, Homo sapiens; identical to SEQ ID NO: 4652
  chr6:21588775-21588806
  hypo

SEQ ID NO: 153033 - DNA, 1132 bp, Homo sapiens; identical to SEQ ID NO: 4653
  chr6:21594474-21595606
  hypo

SEQ ID NO: 153034 - DNA, 31 bp, Homo sapiens; identical to SEQ ID NO: 71325
  chr6:21596585-21596616
  hypo

SEQ ID NO: 153035 - DNA, 188 bp, Homo sapiens; identical to SEQ ID NO: 71326
  chr6:21602323-21602511
  hypo

SEQ ID NO: 153036 - DNA, 121 bp, Homo sapiens; identical to SEQ ID NO: 71327
  chr6:21622713-21622834
  hypo

SEQ ID NO: 153037 - DNA, 30 bp, Homo sapiens
  chr6:21633430-21633460
  hypo
ttctctcgctgggcacggtggtcaggagtt

SEQ ID NO: 153038 - DNA, 45 bp, Homo sapiens
  chr6:21633879-21633924
  hypo
caatatgtgtttagccgggcgtggtggcatacgcctgtagtccca

SEQ ID NO: 153039 - DNA, 31 bp, Homo sapiens; identical to SEQ ID NO: 20233
  chr6:21636069-21636100
  hypo

SEQ ID NO: 153040 - DNA, 30 bp, Homo sapiens; identical to SEQ ID NO: 42673
  chr6:21649069-21649099
  hypo

SEQ ID NO: 153041 - DNA, 23 bp, Homo sapiens
  chr6:21649881-21649904
  hypo
caccgcgccggcctacactcttt

SEQ ID NO: 153042 - DNA, 31 bp, Homo sapiens; identical to SEQ ID NO: 20234
  chr6:21730829-21730860
  hypo

SEQ ID NO: 153043 - DNA, 31 bp, Homo sapiens; identical to SEQ ID NO: 4656
  chr6:21783024-21783055
  hypo

SEQ ID NO: 153044 - DNA, 55 bp, Homo sapiens; identical to SEQ ID NO: 71334
  chr6:21918788-21918843
  hypo

SEQ ID NO: 153045 - DNA, 31 bp, Homo sapiens; identical to SEQ ID NO: 71335
  chr6:21919459-21919490
  hypo

SEQ ID NO: 153046 - DNA, 31 bp, Homo sapiens; identical to SEQ ID NO: 71336
  chr6:21959458-21959489
  hypo

SEQ ID NO: 153047 - DNA, 24 bp, Homo sapiens
  chr6:22015265-22015289
  hypo
gcgcctggccggaagtatgattta

SEQ ID NO: 153048 - DNA, 35 bp, Homo sapiens; identical to SEQ ID NO: 20236
  chr6:22037568-22037603
  hypo

SEQ ID NO: 153049 - DNA, 28 bp, Homo sapiens
  chr6:22141282-22141310
  hypo
aggcatgagccaccgcgcccggccttag

SEQ ID NO: 153050 - DNA, 264 bp, Homo sapiens; identical to SEQ ID NO: 112966
  chr6:22146852-22147116
  hypo

SEQ ID NO: 153051 - DNA, 71 bp, Homo sapiens
  chr6:22294672-22294743
  hypo
tgtagtgggacaggacgacggcgcggtcaaacaggtctcgaagggtcacctggcatcgggcagccccgccg

SEQ ID NO: 153052 - DNA, 37 bp, Homo sapiens; identical to SEQ ID NO: 20238
  chr6:22331078-22331115
  hypo

SEQ ID NO: 153053 - DNA, 255 bp, Homo sapiens; identical to SEQ ID NO: 20239
  chr6:22349412-22349667
  hypo

SEQ ID NO: 153054 - DNA, 368 bp, Homo sapiens; identical to SEQ ID NO: 71341
  chr6:22569528-22569896
  hypo

SEQ ID NO: 153055 - DNA, 30 bp, Homo sapiens; identical to SEQ ID NO: 20240
  chr6:22570131-22570161
  hypo

SEQ ID NO: 153056 - DNA, 30 bp, Homo sapiens
  chr6:22736392-22736422
  hypo
ggctgcagactgcagcggaaatgagtgttg

SEQ ID NO: 153057 - DNA, 33 bp, Homo sapiens
  chr6:24035311-24035344
  hypo
attacaagcatcaccgtccgcctttatctcggc

SEQ ID NO: 153058 - DNA, 44 bp, Homo sapiens
  chr6:24343550-24343594
  hypo
acaggcgtcagccaccgtgccccgcctaaatattcttgaggaaa

SEQ ID NO: 153059 - DNA, 30 bp, Homo sapiens; identical to SEQ ID NO: 20241
  chr6:24384144-24384174
  hypo

SEQ ID NO: 153060 - DNA, 162 bp, Homo sapiens; identical to SEQ ID NO: 20242
  chr6:24425298-24425460
  hypo

SEQ ID NO: 153061 - DNA, 231 bp, Homo sapiens; identical to SEQ ID NO: 71345
  chr6:24432977-24433208
  hypo

SEQ ID NO: 153062 - DNA, 31 bp, Homo sapiens; identical to SEQ ID NO: 20244
  chr6:24434291-24434322
  hypo

SEQ ID NO: 153063 - DNA, 35 bp, Homo sapiens; identical to SEQ ID NO: 71347
  chr6:24476566-24476601
  hypo

SEQ ID NO: 153064 - DNA, 126 bp, Homo sapiens; identical to SEQ ID NO: 20245
  chr6:24523038-24523164
  hypo

SEQ ID NO: 153065 - DNA, 30 bp, Homo sapiens; identical to SEQ ID NO: 71349
  chr6:24535207-24535237
  hypo

SEQ ID NO: 153066 - DNA, 162 bp, Homo sapiens; identical to SEQ ID NO: 20246
  chr6:24647203-24647365
  hypo

SEQ ID NO: 153067 - DNA, 121 bp, Homo sapiens; identical to SEQ ID NO: 20247
  chr6:24662783-24662904
  hypo

SEQ ID NO: 153068 - DNA, 81 bp, Homo sapiens; identical to SEQ ID NO: 71352
  chr6:24761525-24761606
  hypo

SEQ ID NO: 153069 - DNA, 20 bp, Homo sapiens
  chr6:24761665-24761685
  hypo
tgcaccggcaaagctcctgc

SEQ ID NO: 153070 - DNA, 29 bp, Homo sapiens
  chr6:24781125-24781154
  hypo
aattgttcaatttaagaagttcgtcgggt

SEQ ID NO: 153071 - DNA, 30 bp, Homo sapiens
  chr6:24843679-24843709
  hypo
tgagggcgcagtccccgttgggcaggtcac

SEQ ID NO: 153072 - DNA, 80 bp, Homo sapiens
  chr6:24847768-24847848
  hypo
catagagctctagcacggccttgggactcggcctgagggagggcaggtcactgaaggagcggctgcggtgcagcttggca

SEQ ID NO: 153073 - DNA, 31 bp, Homo sapiens; identical to SEQ ID NO: 71355
  chr6:24895642-24895673
  hypo

SEQ ID NO: 153074 - DNA, 42 bp, Homo sapiens; identical to SEQ ID NO: 71356
  chr6:25023689-25023731
  hypo

SEQ ID NO: 153075 - DNA, 70 bp, Homo sapiens
  chr6:25103771-25103841
  hypo
gtggtgagaggttagcgagagaaaagactgcaacaaggattctcttcgtattattcgaaccgaaattgct

SEQ ID NO: 153076 - DNA, 174 bp, Homo sapiens; identical to SEQ ID NO: 20249
  chr6:25153407-25153581
  hypo

SEQ ID NO: 153077 - DNA, 359 bp, Homo sapiens
  chr6:25218502-25218861
  hypo
cagggaggtagcggacgctggagcttcttaggccagaagtccaggggcaggggcatggtgggggcgcctttctcaccccgagaaaacgcagcggtggtcacggggaggggcgccaccatgcagcacccaggcctggattccagctagcagtatcagccttctctcactttcgggcagcgacaccgctggtgtagaccgtctcaggtgcgtcttcgttcagctctactgtcctcagccccagcttgggctcgccctcagcctgctggagctgttggatgtgttcaggcctccaggcaccctggcctccccccacccgccccgcgaagaccgagggaaagcagacgcgtctccgcggcaac

SEQ ID NO: 153078 - DNA, 30 bp, Homo sapiens
  chr6:25219309-25219339
  hypo
atgtatgaactgaaccgcgccaaagtcaga

SEQ ID NO: 153079 - DNA, 16 bp, Homo sapiens
  chr6:25244653-25244669
  hypo
gcgcccagcccagctg

SEQ ID NO: 153080 - DNA, 21 bp, Homo sapiens
  chr6:25506764-25506785
  hypo
gtctcaaacaaacaaacaaac

SEQ ID NO: 153081 - DNA, 31 bp, Homo sapiens
  chr6:25688736-25688767
  hypo
gctgttttggaggcccggtgccgtggctcac

SEQ ID NO: 153082 - DNA, 816 bp, Homo sapiens; identical to SEQ ID NO: 71359
  chr6:25726842-25727658
  hypo

SEQ ID NO: 153083 - DNA, 181 bp, Homo sapiens; identical to SEQ ID NO: 20252
  chr6:25727897-25728078
  hypo

SEQ ID NO: 153084 - DNA, 30 bp, Homo sapiens
  chr6:25878530-25878560
  hypo
gtaaggtattgaagtcgaactaaataaaga

SEQ ID NO: 153085 - DNA, 30 bp, Homo sapiens
  chr6:25956308-25956338
  hypo
gggtctggatctggacggacccctttccgg

SEQ ID NO: 153086 - DNA, 55 bp, Homo sapiens
  chr6:26018519-26018574
  hypo
gcaatgttttagagcgatgtgtctcgcgaatacctttcacgtcaaacaagaatga

SEQ ID NO: 153087 - DNA, 30 bp, Homo sapiens
  chr6:26019343-26019373
  hypo
attcaaatatttcacgtaatttctaaaaat

SEQ ID NO: 153088 - DNA, 222 bp, Homo sapiens; identical to SEQ ID NO: 71361
  chr6:26025540-26025762
  hypo

SEQ ID NO: 153089 - DNA, 506 bp, Homo sapiens; identical to SEQ ID NO: 4661
  chr6:26027157-26027663
  hypo

SEQ ID NO: 153090 - DNA, 31 bp, Homo sapiens; identical to SEQ ID NO: 71363
  chr6:26039044-26039075
  hypo

SEQ ID NO: 153091 - DNA, 99 bp, Homo sapiens; identical to SEQ ID NO: 71364
  chr6:26047694-26047793
  hypo

SEQ ID NO: 153092 - DNA, 37 bp, Homo sapiens; identical to SEQ ID NO: 71365
  chr6:26095302-26095339
  hypo

SEQ ID NO: 153093 - DNA, 30 bp, Homo sapiens
  chr6:26108419-26108449
  hypo
catcacctaggcaccgcccccgccccttgg

SEQ ID NO: 153094 - DNA, 22 bp, Homo sapiens
  chr6:26160802-26160824
  hypo
atacagacttgaggccaggcac

SEQ ID NO: 153095 - DNA, 30 bp, Homo sapiens
  chr6:26163051-26163081
  hypo
ccaccgtgccgagcccggtagtttccttct

SEQ ID NO: 153096 - DNA, 753 bp, Homo sapiens; identical to SEQ ID NO: 4672
  chr6:26188698-26189451
  hypo

SEQ ID NO: 153097 - DNA, 1046 bp, Homo sapiens; identical to SEQ ID NO: 42713
  chr6:26198851-26199897
  hypo

SEQ ID NO: 153098 - DNA, 27 bp, Homo sapiens
  chr6:26201158-26201185
  hypo
tttttttttgaggaggagtttcgctat

SEQ ID NO: 153099 - DNA, 37 bp, Homo sapiens; identical to SEQ ID NO: 71370
  chr6:26214611-26214648
  hypo

SEQ ID NO: 153100 - DNA, 30 bp, Homo sapiens; identical to SEQ ID NO: 20257
  chr6:26225974-26226004
  hypo

SEQ ID NO: 153101 - DNA, 35 bp, Homo sapiens; identical to SEQ ID NO: 71372
  chr6:26226774-26226809
  hypo

SEQ ID NO: 153102 - DNA, 761 bp, Homo sapiens; identical to SEQ ID NO: 113025
  chr6:26240633-26241394
  hypo

SEQ ID NO: 153103 - DNA, 30 bp, Homo sapiens
  chr6:26241862-26241892
  hypo
cggcgttgtggcggacgcctgctgtcgcag

SEQ ID NO: 153104 - DNA, 30 bp, Homo sapiens; identical to SEQ ID NO: 20258
  chr6:26246955-26246985
  hypo

SEQ ID NO: 153105 - DNA, 30 bp, Homo sapiens; identical to SEQ ID NO: 71374
  chr6:26247238-26247268
  hypo

SEQ ID NO: 153106 - DNA, 24 bp, Homo sapiens
  chr6:26247490-26247514
  hypo
actcctggccgggcgcggtggctc

SEQ ID NO: 153107 - DNA, 24 bp, Homo sapiens
  chr6:26247753-26247777
  hypo
gggcaagggcgaagcccgtctcaa

SEQ ID NO: 153108 - DNA, 97 bp, Homo sapiens
  chr6:26294596-26294693
  hypo
tgcataggactcctgcgacccttgcataacttgtagaaaagattgtactgggactccttgctctggaatggtgtcccaggcgcgtttagcagccaag

SEQ ID NO: 153109 - DNA, 161 bp, Homo sapiens
  chr6:26386082-26386243
  hypo
ttcacttcttcagaagcacacgcattcctcagctgaggccatgagcaggggaaaatagttaatcccggaaaagaaagtcttatgcctgccttggcactgaactgtgcacgtctgagagtgaaaggagacactgtcaaaaattgtcccggggcaatcagaat

SEQ ID NO: 153110 - DNA, 111 bp, Homo sapiens; identical to SEQ ID NO: 71375
  chr6:26423338-26423449
  hypo

SEQ ID NO: 153111 - DNA, 30 bp, Homo sapiens; identical to SEQ ID NO: 71376
  chr6:26500068-26500098
  hypo

SEQ ID NO: 153112 - DNA, 30 bp, Homo sapiens; identical to SEQ ID NO: 113056
  chr6:26522551-26522581
  hypo

SEQ ID NO: 153113 - DNA, 30 bp, Homo sapiens; identical to SEQ ID NO: 113057
  chr6:26522901-26522931
  hypo

SEQ ID NO: 153114 - DNA, 22 bp, Homo sapiens
  chr6:26534412-26534434
  hypo
aagatgcaagtcggccgggcgc

SEQ ID NO: 153115 - DNA, 24 bp, Homo sapiens
  chr6:26549651-26549675
  hypo
tgcttgtttgtttttttgagacgg

SEQ ID NO: 153116 - DNA, 121 bp, Homo sapiens
  chr6:26549974-26550095
  hypo
ttctgaccctcacatctgaggcactgagcatggaagagttggaaagaagagggagggaaacttatttttctgtatctgttcttgcaccactaccttcttttctcaatagttgttgtgttac

SEQ ID NO: 153117 - DNA, 30 bp, Homo sapiens
  chr6:26552487-26552517
  hypo
tgtccagactatccacgcggtatgcgctcc

SEQ ID NO: 153118 - DNA, 73 bp, Homo sapiens
  chr6:26970360-26970433
  hypo
cagcggcagggactcgccacccgcagccgtggagccgggccatgagcgcctgtgcggcgctgggtcgctgtcc

SEQ ID NO: 153119 - DNA, 35 bp, Homo sapiens
  chr6:27102662-27102697
  hypo
attaccggcgtaagccaccacgcccggcccactct

SEQ ID NO: 153120 - DNA, 30 bp, Homo sapiens; identical to SEQ ID NO: 71380
  chr6:27162135-27162165
  hypo

SEQ ID NO: 153121 - DNA, 1242 bp, Homo sapiens; identical to SEQ ID NO: 113086
  chr6:27218585-27219827
  hypo

SEQ ID NO: 153122 - DNA, 991 bp, Homo sapiens; identical to SEQ ID NO: 113095
  chr6:27279795-27280786
  hypo

SEQ ID NO: 153123 - DNA, 31 bp, Homo sapiens; identical to SEQ ID NO: 20263
  chr6:27408482-27408513
  hypo

SEQ ID NO: 153124 - DNA, 134 bp, Homo sapiens; identical to SEQ ID NO: 71384
  chr6:27428732-27428866
  hypo

SEQ ID NO: 153125 - DNA, 534 bp, Homo sapiens; identical to SEQ ID NO: 113100
  chr6:27440465-27440999
  hypo

SEQ ID NO: 153126 - DNA, 160 bp, Homo sapiens; identical to SEQ ID NO: 71386
  chr6:27441961-27442121
  hypo

SEQ ID NO: 153127 - DNA, 217 bp, Homo sapiens; identical to SEQ ID NO: 113102
  chr6:27447356-27447573
  hypo

SEQ ID NO: 153128 - DNA, 43 bp, Homo sapiens; identical to SEQ ID NO: 71388
  chr6:27631246-27631289
  hypo

SEQ ID NO: 153129 - DNA, 30 bp, Homo sapiens
  chr6:27667041-27667071
  hypo
agtgtgctgtgactgcgacggagcctagac

SEQ ID NO: 153130 - DNA, 30 bp, Homo sapiens
  chr6:27743670-27743700
  hypo
agcgccctgacagatcgagtacgcccatat

SEQ ID NO: 153131 - DNA, 121 bp, Homo sapiens; identical to SEQ ID NO: 71389
  chr6:27770798-27770919
  hypo

SEQ ID NO: 153132 - DNA, 153 bp, Homo sapiens; identical to SEQ ID NO: 4750
  chr6:27805753-27805906
  hypo

SEQ ID NO: 153133 - DNA, 575 bp, Homo sapiens; identical to SEQ ID NO: 42819
  chr6:27805936-27806511
  hypo

SEQ ID NO: 153134 - DNA, 30 bp, Homo sapiens; identical to SEQ ID NO: 20271
  chr6:27830376-27830406
  hypo

SEQ ID NO: 153135 - DNA, 19 bp, Homo sapiens
  chr6:27843639-27843658
  hypo
aaagaaagtttgtggccgg

SEQ ID NO: 153136 - DNA, 31 bp, Homo sapiens; identical to SEQ ID NO: 20272
  chr6:27846867-27846898
  hypo

SEQ ID NO: 153137 - DNA, 44 bp, Homo sapiens; identical to SEQ ID NO: 71395
  chr6:28031401-28031445
  hypo

SEQ ID NO: 153138 - DNA, 30 bp, Homo sapiens
  chr6:28120913-28120943
  hypo
gctgccaaatgcaacggggatgttatcagg

SEQ ID NO: 153139 - DNA, 433 bp, Homo sapiens
  chr6:28192666-28193099
  hypo
caaattccaggctaacggtgacagtggctgcctcggggagtgggactaaggaggggtaggtggggtttgacattttactttattaattttggtattgtctgagggtttttaaaccataaataatgtattaattttaaaaatgcttttaaaaatcatcattttcaatagttaacggtctatgcttcatcaacgttttccgtttaaaacctgtgtgcggcccacacacgtatgacattctgattatgtgattcactgctgaaaaagaactggacgccaggaaattgggggttgagtccgaagcaaggtgaacgccggacatcgagacatggaatcctagaccggcccggaagtgcctctgctccgtccgccttcgaggagaggtcggcatctttgttccctgcccggccattgttcgtgccgcgcttctagcaac

SEQ ID NO: 153140 - DNA, 30 bp, Homo sapiens; identical to SEQ ID NO: 113163
  chr6:28193268-28193298
  hypo

SEQ ID NO: 153141 - DNA, 30 bp, Homo sapiens; identical to SEQ ID NO: 113164
  chr6:28193337-28193367
  hypo

SEQ ID NO: 153142 - DNA, 30 bp, Homo sapiens; identical to SEQ ID NO: 20273
  chr6:28226188-28226218
  hypo

SEQ ID NO: 153143 - DNA, 30 bp, Homo sapiens; identical to SEQ ID NO: 71397
  chr6:28280847-28280877
  hypo

SEQ ID NO: 153144 - DNA, 30 bp, Homo sapiens
  chr6:28297264-28297294
  hypo
gatgacagagttctcggagccggctcagag

SEQ ID NO: 153145 - DNA, 30 bp, Homo sapiens; identical to SEQ ID NO: 71398
  chr6:28327484-28327514
  hypo

SEQ ID NO: 153146 - DNA, 156 bp, Homo sapiens; identical to SEQ ID NO: 20274
  chr6:28327738-28327894
  hypo

SEQ ID NO: 153147 - DNA, 234 bp, Homo sapiens
  chr6:28397693-28397927
  hypo
aggacgcacttcggccggctcctctgccgcctctctaggattcttggaggatccatcaatctcagtggttcatttgtgcacaccacctggctcacctttgtgagcgcagaagccgcctcaaaaaggctgaggccgacaggggtcgtaacctcttgtgtccagcagccactcagtctgggctgacttctctctctcccctgctgaagacacttgactgctcgcactggatcctcc

SEQ ID NO: 153148 - DNA, 238 bp, Homo sapiens; identical to SEQ ID NO: 113174
  chr6:28414753-28414991
  hypo

SEQ ID NO: 153149 - DNA, 15 bp, Homo sapiens
  chr6:28415091-28415106
  hypo
cgttcccctttatcg

SEQ ID NO: 153150 - DNA, 30 bp, Homo sapiens
  chr6:28453218-28453248
  hypo
agagtttaatagacacgaggtcggccatgc

SEQ ID NO: 153151 - DNA, 30 bp, Homo sapiens; identical to SEQ ID NO: 42847
  chr6:28458582-28458612
  hypo

SEQ ID NO: 153152 - DNA, 30 bp, Homo sapiens; identical to SEQ ID NO: 71403
  chr6:29924284-29924314
  hypo

SEQ ID NO: 153153 - DNA, 30 bp, Homo sapiens; identical to SEQ ID NO: 71404
  chr6:31132622-31132652
  hypo

SEQ ID NO: 153154 - DNA, 30 bp, Homo sapiens; identical to SEQ ID NO: 42848
  chr6:31390394-31390424
  hypo

SEQ ID NO: 153155 - DNA, 30 bp, Homo sapiens; identical to SEQ ID NO: 42849
  chr6:31540125-31540155
  hypo

SEQ ID NO: 153156 - DNA, 30 bp, Homo sapiens; identical to SEQ ID NO: 42850
  chr6:32600787-32600817
  hypo

SEQ ID NO: 153157 - DNA, 30 bp, Homo sapiens; identical to SEQ ID NO: 4772
  chr6:32612963-32612993
  hypo

SEQ ID NO: 153158 - DNA, 30 bp, Homo sapiens; identical to SEQ ID NO: 42852
  chr6:32636104-32636134
  hypo

SEQ ID NO: 153159 - DNA, 30 bp, Homo sapiens; identical to SEQ ID NO: 42853
  chr6:33072156-33072186
  hypo

SEQ ID NO: 153160 - DNA, 30 bp, Homo sapiens; identical to SEQ ID NO: 42854
  chr6:33204258-33204288
  hypo

SEQ ID NO: 153161 - DNA, 30 bp, Homo sapiens; identical to SEQ ID NO: 71412
  chr6:33493141-33493171
  hypo

SEQ ID NO: 153162 - DNA, 30 bp, Homo sapiens
  chr6:33540138-33540168
  hypo
atggggaggggcgaacgccttccatcggag

SEQ ID NO: 153163 - DNA, 32 bp, Homo sapiens; identical to SEQ ID NO: 71413
  chr6:33549225-33549257
  hypo

SEQ ID NO: 153164 - DNA, 418 bp, Homo sapiens; identical to SEQ ID NO: 71414
  chr6:33578944-33579362
  hypo

SEQ ID NO: 153165 - DNA, 41 bp, Homo sapiens
  chr6:33597877-33597918
  hypo
aaccatcgagatcctgtcaaggtactcgtgttacattttct

SEQ ID NO: 153166 - DNA, 77 bp, Homo sapiens
  chr6:33606109-33606186
  hypo
cattggtggtcaacctaaccttcagcggctctctccttccaggaggaggtcgtgacggaggtggggctgaaaatggg

SEQ ID NO: 153167 - DNA, 247 bp, Homo sapiens; identical to SEQ ID NO: 20276
  chr6:33609018-33609265
  hypo

SEQ ID NO: 153168 - DNA, 30 bp, Homo sapiens
  chr6:33615673-33615703
  hypo
cagagggcgggagctcggtgattgccactt

SEQ ID NO: 153169 - DNA, 30 bp, Homo sapiens
  chr6:33621754-33621784
  hypo
gcactctctgccgggcgtggtggctcacgc

SEQ ID NO: 153170 - DNA, 30 bp, Homo sapiens
  chr6:33636891-33636921
  hypo
ggccggcaacgcccacgacgagaatgtgct

SEQ ID NO: 153171 - DNA, 267 bp, Homo sapiens
  chr6:33638298-33638565
  hypo
cggtcaagtttgcccgtctctggactgagatccccacagccatcaccatcaaggagtgagaggggtggaggcagggtgggcggggcaggggcagaggctggagtgggtgtatctcggggaccttcatgcctcatggcctccaccctcagctatgattccaacctcaacgcgtcccgagatgacaagaagaacaagtttgccaacaccatggagttcgtggaggactacctcaacaatgtagtcagcgaggccgtgccctttgccaac

SEQ ID NO: 153172 - DNA, 38 bp, Homo sapiens; identical to SEQ ID NO: 71417
  chr6:33645951-33645989
  hypo

SEQ ID NO: 153173 - DNA, 125 bp, Homo sapiens; identical to SEQ ID NO: 71418
  chr6:33653396-33653521
  hypo

SEQ ID NO: 153174 - DNA, 30 bp, Homo sapiens
  chr6:33655799-33655829
  hypo
tggggcctgacctccgcgccctccccacct

SEQ ID NO: 153175 - DNA, 30 bp, Homo sapiens; identical to SEQ ID NO: 71419
  chr6:33656778-33656808
  hypo

SEQ ID NO: 153176 - DNA, 246 bp, Homo sapiens; identical to SEQ ID NO: 71420
  chr6:33674158-33674404
  hypo

SEQ ID NO: 153177 - DNA, 68 bp, Homo sapiens
  chr6:33684639-33684707
  hypo
cagtaatcgagacaccgaattgcacatttaaatcgcttgcaagtaaaaaatatcgttttgtaatgctg

SEQ ID NO: 153178 - DNA, 140 bp, Homo sapiens; identical to SEQ ID NO: 71421
  chr6:33687281-33687421
  hypo

SEQ ID NO: 153179 - DNA, 254 bp, Homo sapiens
  chr6:33694497-33694751
  hypo
gcaaggatacgatgccgcttgttctctgggtactcggagcacaggcgggtcaggtgggcctggtggcattgcaggccccacgggttgaagctcttcctctcaacctggtttccgttggtgtcttccaccagcgagaaggctggagtgttgaggtggggctcggacctcagaagagccttggccgggctgcggcggagtggagcacaggacggtcagagcagaggtctggggaagggcgccgctgcctgtggctg

SEQ ID NO: 153180 - DNA, 31 bp, Homo sapiens; identical to SEQ ID NO: 71423
  chr6:33698515-33698546
  hypo

SEQ ID NO: 153181 - DNA, 142 bp, Homo sapiens; identical to SEQ ID NO: 71424
  chr6:33701972-33702114
  hypo

SEQ ID NO: 153182 - DNA, 42 bp, Homo sapiens
  chr6:33740513-33740555
  hypo
aggaactccacagctcggtcccagacacgcttcatgcgcctc

SEQ ID NO: 153183 - DNA, 153 bp, Homo sapiens
  chr6:33745238-33745391
  hypo
agcggcatccccagccgtccagatctcggctcctcccaacctcattctggggctttcatctcctcccttgtgaaccagaacacagtgtttcatacatatatacatgccggggccctttgtattccgagatgctgctgccgataatgatttctg

SEQ ID NO: 153184 - DNA, 98 bp, Homo sapiens
  chr6:33745988-33746086
  hypo
gaaggggagggaaggcggccgaggacttacaccagaagaagatgagcacgttggtgacagcagtgagcaaggcccggctcaggcggcagccaacaccc

SEQ ID NO: 153185 - DNA, 30 bp, Homo sapiens; identical to SEQ ID NO: 71425
  chr6:33747177-33747207
  hypo

SEQ ID NO: 153186 - DNA, 144 bp, Homo sapiens; identical to SEQ ID NO: 20281
  chr6:33748501-33748645
  hypo

SEQ ID NO: 153187 - DNA, 30 bp, Homo sapiens; identical to SEQ ID NO: 71427
  chr6:33757638-33757668
  hypo

SEQ ID NO: 153188 - DNA, 30 bp, Homo sapiens; identical to SEQ ID NO: 71428
  chr6:33770197-33770227
  hypo

SEQ ID NO: 153189 - DNA, 84 bp, Homo sapiens; identical to SEQ ID NO: 20282
  chr6:33771000-33771084
  hypo

SEQ ID NO: 153190 - DNA, 344 bp, Homo sapiens
  chr6:33802492-33802836
  hypo
tcagtgggaaggcgccgttcgaggcccgcgggggtaggagcgagcggcgagggatgcccttggccagcgcctccccacaggtgagcaggcccaggcgctgtgcggaagccctgctgggaattggtcagtgttgctgcttcagcatcaggaacagccttctctgcagccctggatttaaagggtcagagccagggtcttccccaaccctgggcacatcagagcctggcgggcgccctgcagaaggctggcaacccttgatggtaggggcaggtctctggccaggcctcagcccccgagtctgtgcaagtcagtggagctcagagccgcggcgtgtctggacacgt

SEQ ID NO: 153191 - DNA, 79 bp, Homo sapiens; identical to SEQ ID NO: 71430
  chr6:33871407-33871486
  hypo

SEQ ID NO: 153192 - DNA, 30 bp, Homo sapiens; identical to SEQ ID NO: 20283
  chr6:33878451-33878481
  hypo

SEQ ID NO: 153193 - DNA, 30 bp, Homo sapiens; identical to SEQ ID NO: 71432
  chr6:33878808-33878838
  hypo

SEQ ID NO: 153194 - DNA, 108 bp, Homo sapiens; identical to SEQ ID NO: 20284
  chr6:33907852-33907960
  hypo

SEQ ID NO: 153195 - DNA, 171 bp, Homo sapiens
  chr6:33914099-33914270
  hypo
gtttagtgcgctctacggtgtctcggcagaggttaacacacggaatacatctgaattgcgttccaagtttggacaggccaaactgccttgctttatcaggcaccgagccggagatgcgagcagtgacttccagggctcctcaggctgctgcctgcacggccatttccacct

SEQ ID NO: 153196 - DNA, 30 bp, Homo sapiens
  chr6:33948130-33948160
  hypo
ctggccgaggactcacgtcttcccatgctt

SEQ ID NO: 153197 - DNA, 384 bp, Homo sapiens
  chr6:33955433-33955817
  hypo
ggcagaggcgatgcccgatacacatgcatagaatatgagtcaacactgctgtgcgcatgtcaccctcacggccactctggaggcaggcgcttttgtcatcaaacccatttcacatgtgagggcgctgaagcccaaagaaagcagcgcctcactctgctgcctcatactctgttaaaaggagaatcatgccaacctccagaaatgaggcgggaaaatgactgcgctccgtgacctgtcaattaccccctggagacagccagcagctgtcctcatccctaggctgcggtcagagaaacatggaccccgagaggttaagggcttgcccaggtctggagctctggtctgtcagggtcctggacaccagagcttcgggatcagctggag

SEQ ID NO: 153198 - DNA, 41 bp, Homo sapiens; identical to SEQ ID NO: 71435
  chr6:33962223-33962264
  hypo

SEQ ID NO: 153199 - DNA, 36 bp, Homo sapiens; identical to SEQ ID NO: 20286
  chr6:33985260-33985296
  hypo

SEQ ID NO: 153200 - DNA, 312 bp, Homo sapiens
  chr6:33995831-33996143
  hypo
gcccacctgctgcaaaaggagcggggcctggggcccgagagggcagaacggggccaggcactcacctggggcctcaaggttctcgcagagctcagacttggcctctccgttgggccggaagttgcccttctgcgtgaacttgttggacatggtggccgccgtaacgacggctttgaggctgcgcttgcgcttgggcacgttctgctccgggtggaagaggatgatgtagactttgggcatgtagagcattcccagggacaccgaggcgctcagactcaccgagaccgtcagcgtcgtcgtctggatgtacag

SEQ ID NO: 153201 - DNA, 30 bp, Homo sapiens; identical to SEQ ID NO: 71438
  chr6:34003625-34003655
  hypo

SEQ ID NO: 153202 - DNA, 30 bp, Homo sapiens; identical to SEQ ID NO: 71439
  chr6:34008415-34008445
  hypo

SEQ ID NO: 153203 - DNA, 105 bp, Homo sapiens; identical to SEQ ID NO: 20288
  chr6:34100883-34100988
  hypo

SEQ ID NO: 153204 - DNA, 1866 bp, Homo sapiens; identical to SEQ ID NO: 113194
  chr6:34111734-34113600
  hypo

SEQ ID NO: 153205 - DNA, 31 bp, Homo sapiens; identical to SEQ ID NO: 20290
  chr6:34165021-34165052
  hypo

SEQ ID NO: 153206 - DNA, 181 bp, Homo sapiens; identical to SEQ ID NO: 71443
  chr6:34170820-34171001
  hypo

SEQ ID NO: 153207 - DNA, 19 bp, Homo sapiens
  chr6:34171060-34171079
  hypo
ccaccgccaggagtgtggg

SEQ ID NO: 153208 - DNA, 31 bp, Homo sapiens; identical to SEQ ID NO: 20292
  chr6:34191861-34191892
  hypo

SEQ ID NO: 153209 - DNA, 30 bp, Homo sapiens; identical to SEQ ID NO: 20293
  chr6:34194629-34194659
  hypo

SEQ ID NO: 153210 - DNA, 30 bp, Homo sapiens
  chr6:34201391-34201421
  hypo
atccctacgtgtgcacgaacaggtgaaacg

SEQ ID NO: 153211 - DNA, 257 bp, Homo sapiens
  chr6:34208660-34208917
  hypo
tgagtcccgggacagcgctggtagggagtcaggtgggtgtccaaacctttgcttcacttggtttaccctttggggctagggaggtgcctggagtttcattcagcaggcgagaccatgcatggagggtgcagaatgattctgcgcagtaagcgtgtgggtgtgtcctcccacctgtgtgtactcctgccccacttgcaaccctggtcagatctctatagagaccccaggagagaaccgggggccgaggaattcaagat

SEQ ID NO: 153212 - DNA, 121 bp, Homo sapiens; identical to SEQ ID NO: 20294
  chr6:34219815-34219936
  hypo

SEQ ID NO: 153213 - DNA, 42 bp, Homo sapiens; identical to SEQ ID NO: 71448
  chr6:34231474-34231516
  hypo

SEQ ID NO: 153214 - DNA, 250 bp, Homo sapiens; identical to SEQ ID NO: 42865
  chr6:34359486-34359736
  hypo

SEQ ID NO: 153215 - DNA, 30 bp, Homo sapiens; identical to SEQ ID NO: 71450
  chr6:34390006-34390036
  hypo

SEQ ID NO: 153216 - DNA, 30 bp, Homo sapiens
  chr6:34391763-34391793
  hypo
catttaggaatctgcgcattttttcacctc

SEQ ID NO: 153217 - DNA, 30 bp, Homo sapiens; identical to SEQ ID NO: 20297
  chr6:34392090-34392120
  hypo

SEQ ID NO: 153218 - DNA, 33 bp, Homo sapiens
  chr6:34395945-34395978
  hypo
aaaaaaggccgggcgcggtggctcacgcctgta

SEQ ID NO: 153219 - DNA, 32 bp, Homo sapiens
  chr6:34396517-34396549
  hypo
agcgagactccgtctcaaaaacaaacaaaaag

SEQ ID NO: 153220 - DNA, 121 bp, Homo sapiens; identical to SEQ ID NO: 42867
  chr6:34405015-34405136
  hypo

SEQ ID NO: 153221 - DNA, 40 bp, Homo sapiens; identical to SEQ ID NO: 42868
  chr6:34405255-34405295
  hypo

SEQ ID NO: 153222 - DNA, 31 bp, Homo sapiens; identical to SEQ ID NO: 71454
  chr6:34484387-34484418
  hypo

SEQ ID NO: 153223 - DNA, 30 bp, Homo sapiens
  chr6:34503157-34503187
  hypo
gagagccggtcccttcgccctgcgggggcc

SEQ ID NO: 153224 - DNA, 214 bp, Homo sapiens
  chr6:34503445-34503659
  hypo
tgccttcctgcgtctcgcctggctctgaatgcatttctgtgtgggacccgtgggagggctccttggggagaatttctcaggggcatgggcaggaccggagctctgggttcttggctgttctgccagccccaagcccagcccttgctctagctccctgactccccctgcatccagccccaggggatctcttccggggtatcgcagaagtcccagg

SEQ ID NO: 153225 - DNA, 244 bp, Homo sapiens
  chr6:34507098-34507342
  hypo
gccacaggtggatgggctgcccggagcatgatgagtccacctcgctgtcggtccagctctcctcactggtcgaggctgggtggccagggagggtggcggtgagtgggaatgggaggccagtcccggcttcattggcagccacccctccaccccacccgagcccccgcctccaccctgccgctgcctggctcaccacagtagtgaatcgccccaggtgaagtccgctctttcatccaggccgctg

SEQ ID NO: 153226 - DNA, 244 bp, Homo sapiens; identical to SEQ ID NO: 71455
  chr6:34512042-34512286
  hypo

SEQ ID NO: 153227 - DNA, 43 bp, Homo sapiens; identical to SEQ ID NO: 71456
  chr6:34513307-34513350
  hypo

SEQ ID NO: 153228 - DNA, 201 bp, Homo sapiens
  chr6:34513708-34513909
  hypo
acgcacacacacacaaagaatacgtcaagccagaggcagaagattaccaacagatatacgctcctaataatacagagaaccagttagggaggaggaaaggaacagataaacctgttaagggcaagttaatttgtgtcctttctcgagggttatttatagtttcaagcagtggttctccaaatgtgccgtctgggccagcag

SEQ ID NO: 153229 - DNA, 30 bp, Homo sapiens
  chr6:34514198-34514228
  hypo
gacccgcgcagcctccgtatgcagctggca

SEQ ID NO: 153230 - DNA, 194 bp, Homo sapiens; identical to SEQ ID NO: 20300
  chr6:34518767-34518961
  hypo

SEQ ID NO: 153231 - DNA, 592 bp, Homo sapiens
  chr6:34519688-34520280
  hypo
tagcaactacaattccgctcaaccttcagggctttccagaaattgccattcacgtcttccttcagccctggttgagcccatgtgtatataaatacatttcacttctcagtgcccccgtcaggcctcttagccacaccaaggctgccatacccccaccacctgcacatccccgctttgccatgatgcagcccgggtcacatggctgcccctctctggcacagtctcgtcctcacccccaaatcgccggtacactccttgaagggccggccacagtaccttccctcttccctaccctcctccagccccgcatacgccgtacctcccagcttgccacaggacaggggtcgtgaggtttcctgggtctcttgctccccacagccctgcccagcagggtcgttgagggcatgagaacacacggatgtcaccggagctctgctgctcctgcctgaggccccttggccgatcctcttggcctcagcctcttcagcagtgaaacagggactcataaagacagctgtgtgtctggattttgaagtcaccaggcaggacagcgatgtgagaaggcttcactgtctcccgagaggtgtgtgtc

SEQ ID NO: 153232 - DNA, 147 bp, Homo sapiens
  chr6:34520751-34520898
  hypo
gcaaccagtctcaggcgctggagccccgggctgggcagtccctccagccacgtctcccctgtgccagagctagagggagaaggaggggggtctttatcctggtggtgcgccgtcataatcctggggaggtcccggtcccatccgacc

SEQ ID NO: 153233 - DNA, 116 bp, Homo sapiens
  chr6:34524256-34524372
  hypo
taggggactcattcattcactcgctcattcactcgttcattggttgctgcatagccactcagctcatattacgtgcaaggcgccagagatacgtcgagtgggtccagggctggggt

SEQ ID NO: 153234 - DNA, 43 bp, Homo sapiens
  chr6:34535913-34535956
  hypo
gtcactgcgcccagccatatccggcattatgaaacagtcctcc

SEQ ID NO: 153235 - DNA, 90 bp, Homo sapiens
  chr6:34563972-34564062
  hypo
gccttctgactactccgggaggcttgctggtggcacagcaggacccgtcagcatgagagaaggacttctgtaagatgatttaacattggt

SEQ ID NO: 153236 - DNA, 119 bp, Homo sapiens
  chr6:34618501-34618620
  hypo
acagggttgagctatctaccacgcctggccaggaatttaattttaaacagtgcgcaacgttcgccttcttcgggaaagctattgggacaactatatgcgattcctatcagtctcatctg

SEQ ID NO: 153237 - DNA, 28 bp, Homo sapiens
  chr6:34659277-34659305
  hypo
ttaacaaatagaggccaggtgcggtggc

SEQ ID NO: 153238 - DNA, 28 bp, Homo sapiens
  chr6:34659544-34659572
  hypo
cctgggcgacagagcaaaactctgtctc

SEQ ID NO: 153239 - DNA, 101 bp, Homo sapiens; identical to SEQ ID NO: 20301
  chr6:34683316-34683417
  hypo

SEQ ID NO: 153240 - DNA, 207 bp, Homo sapiens
  chr6:34690599-34690806
  hypo
ctcactgtgggctgaaactcctaggctcaagtgatctgcctcccaaagtggaattacaggtatgagccactgtgcccggccctcaacccctgtaataataggtctttgcaatgccttacccttgtaccttttatggcatctttttaaatttgggattcttcccccaacaccaccaccccctgccgccggtggcgtttttttgttttt

SEQ ID NO: 153241 - DNA, 27 bp, Homo sapiens
  chr6:34714766-34714793
  hypo
agtgctaagtgctttattattcgtttt

SEQ ID NO: 153242 - DNA, 37 bp, Homo sapiens; identical to SEQ ID NO: 71463
  chr6:34723873-34723910
  hypo

SEQ ID NO: 153243 - DNA, 38 bp, Homo sapiens; identical to SEQ ID NO: 71464
  chr6:34726097-34726135
  hypo

SEQ ID NO: 153244 - DNA, 30 bp, Homo sapiens
  chr6:34778275-34778305
  hypo
cttgagacagggtctcgctgtgtcacccag

SEQ ID NO: 153245 - DNA, 17 bp, Homo sapiens
  chr6:34785644-34785661
  hypo
tgggggggtggagtctc

SEQ ID NO: 153246 - DNA, 37 bp, Homo sapiens; identical to SEQ ID NO: 71466
  chr6:34854518-34854555
  hypo

SEQ ID NO: 153247 - DNA, 36 bp, Homo sapiens; identical to SEQ ID NO: 71467
  chr6:34870301-34870337
  hypo

SEQ ID NO: 153248 - DNA, 30 bp, Homo sapiens
  chr6:34876154-34876184
  hypo
tccagcaggagtcagcggaggtgaggttgg

SEQ ID NO: 153249 - DNA, 89 bp, Homo sapiens; identical to SEQ ID NO: 71468
  chr6:34953049-34953138
  hypo

SEQ ID NO: 153250 - DNA, 30 bp, Homo sapiens
  chr6:34960271-34960301
  hypo
agttcttcctgtgtgcggaacactcactga

SEQ ID NO: 153251 - DNA, 205 bp, Homo sapiens
  chr6:35019281-35019486
  hypo
agcacgctgcatggccgtggagaacagcttttccagtgcagactctaaagaaatggaaactacactttggttcattcacagattcattcaataggttctctatttaccatgtgccaggcccagcgggtgacaaggcaaataaaatacgcttgatgccaaccctcattggtgtctacagtgttaagctctgcgtgtgagtagaata

SEQ ID NO: 153252 - DNA, 109 bp, Homo sapiens
  chr6:35027132-35027241
  hypo
tgacccccgagccccggcccatgtgccccattcagccccttgctgccttgagcctctgagcacaaagggccggtggccatggtttgcttattccgggactgctggggga

SEQ ID NO: 153253 - DNA, 31 bp, Homo sapiens; identical to SEQ ID NO: 71471
  chr6:35027635-35027666
  hypo

SEQ ID NO: 153254 - DNA, 111 bp, Homo sapiens
  chr6:35033837-35033948
  hypo
gccctgtgtgactttcggcaggttacccttcctccctgttcgtcgtctgtcacgcgggccttcatttgacctacttacttcatgaggcataaactccgaagaggacacagt

SEQ ID NO: 153255 - DNA, 202 bp, Homo sapiens; identical to SEQ ID NO: 71473
  chr6:35044730-35044932
  hypo

SEQ ID NO: 153256 - DNA, 96 bp, Homo sapiens; identical to SEQ ID NO: 71474
  chr6:35045148-35045244
  hypo

SEQ ID NO: 153257 - DNA, 181 bp, Homo sapiens
  chr6:35045558-35045739
  hypo
catctgttagattaacgggattaacagagaccctaacatgcaggttgtgagcatgaagtgggatgcgccaggtgaaagctctcggccctgtcatatagtaagaaaggagcaggagcaccagcctccgcccccacatccttgcatcgtgcttagcgctgcaggtgggcgctccgtgtgcctc

SEQ ID NO: 153258 - DNA, 45 bp, Homo sapiens
  chr6:35048224-35048269
  hypo
ggtaactagagcagccgctccccgagccctcgggtgcactgggcc

SEQ ID NO: 153259 - DNA, 325 bp, Homo sapiens
  chr6:35048590-35048915
  hypo
agtggacggtggctgcgtggtgccacctgtctgacacccctgtggtgttggccccttcgctccctgctgcttctcccggtgccgctgcctgtgccgtcctaaccagtggggctggctgatacctgtagtcgggcactgggccgagggttgcaagttccacctggatttttccctccacagtgccaagatttgctctcccagacgtcatccccactgagtcagaatgattcctgcactgggcggtcggcagatctgctgctgcctccaggggacacaggcaggaggcgccatgacagtctccatgaccctgcggcaccctcccgag

SEQ ID NO: 153260 - DNA, 288 bp, Homo sapiens
  chr6:35109281-35109569
  hypo
cctggaactgctgagacgaggccagagcatgcatggggcttttcttcaggctgtttggacagccgagaagccgagccacacccaggagggttgtttcacagcgtgtgccgcaggggcgcaggggccgcgctctttcctcacatgtgggagaagcggaggagccgccagggctggggccaggctctgcccactggggttccgcccgttgtcgccctccgcctcctgggctctagcccttgcctttcttgactctaagtctactctgtcgcccttgcagtgatgtgaaga

SEQ ID NO: 153261 - DNA, 271 bp, Homo sapiens; identical to SEQ ID NO: 71479
  chr6:35149809-35150080
  hypo

SEQ ID NO: 153262 - DNA, 30 bp, Homo sapiens
  chr6:35196446-35196476
  hypo
atccctggcaattaccggtgtacctgctat

SEQ ID NO: 153263 - DNA, 31 bp, Homo sapiens; identical to SEQ ID NO: 20307
  chr6:35260503-35260534
  hypo

SEQ ID NO: 153264 - DNA, 27 bp, Homo sapiens
  chr6:35271478-35271505
  hypo
aataaggtgatcaggccgggcagggta

SEQ ID NO: 153265 - DNA, 30 bp, Homo sapiens
  chr6:35309531-35309561
  hypo
ggagcttgcggcctacggaaggtgtggccg

SEQ ID NO: 153266 - DNA, 30 bp, Homo sapiens
  chr6:35314580-35314610
  hypo
ctgcgccttctgcgccgacctgataaaatc

SEQ ID NO: 153267 - DNA, 34 bp, Homo sapiens; identical to SEQ ID NO: 71482
  chr6:35357349-35357383
  hypo

SEQ ID NO: 153268 - DNA, 30 bp, Homo sapiens
  chr6:35360429-35360459
  hypo
caccgcctacgtgctcgggacgccccagga

SEQ ID NO: 153269 - DNA, 697 bp, Homo sapiens; identical to SEQ ID NO: 71483
  chr6:35374507-35375204
  hypo

SEQ ID NO: 153270 - DNA, 30 bp, Homo sapiens; identical to SEQ ID NO: 71484
  chr6:35392231-35392261
  hypo

SEQ ID NO: 153271 - DNA, 30 bp, Homo sapiens
  chr6:35445082-35445112
  hypo
cttactgctgagcgtcggcggcaggggcgg

SEQ ID NO: 153272 - DNA, 862 bp, Homo sapiens
  chr6:35454053-35454915
  hypo
gttagggggcgagcccggcttgtttatgaggaggagcgcggaggaggatccagacacacaggcttgcgcgcccagactcgcccggccagcggctggcggcctccgacgtcaccaaaccggttgggtgagagggcagagagcagggggaagggccgcagtcccgcccgcgccccccggcacgcaccgtacatcttgccctcgtctgacaggatgatcttccgccggccgcagggcgggtagatggccagggcctcctggaagctctgctcgatgtccgggctccacacgccctccgcatcgttgtccagccccttgtccaggccctcgggcccatcctcccgggcctccccggggctgctgctggcgttccagctgttggacgctattgtgctggttgctctgggctctgggcctgagcccactgggcggctgagcctgggggacagacagacaggaactgggaccagggtcctcctcgaccacagcaatctcctatcccacagccgctggctctggagctccgcccccagccccaagcccaccctaggagcaggtgctccaggtggaacggaggtaaccagaggaacaaccacagcttgttcagagctgtgtgacctgggatgcacgcgctacttcacctctctaggcctcagtcctgtaaaacgagaaaagggtctccttgaggagacctccttgaggttgtgagggttaaaatgtaaatgagctcatgacaaagtaccaaccacatgcccagctcataatactcaagaaataggtaatcggtaacaacaatgcctcataccaacacagcacttttgtagggaaaaggcattttcatattcattcaaacctcacaaaacta

SEQ ID NO: 153273 - DNA, 20 bp, Homo sapiens
  chr6:35470998-35471018
  hypo
gccaccgcgcccggcccagg

SEQ ID NO: 153274 - DNA, 30 bp, Homo sapiens
  chr6:35477651-35477681
  hypo
ccttattcctaacacgcagaggtttcggtg

SEQ ID NO: 153275 - DNA, 31 bp, Homo sapiens; identical to SEQ ID NO: 71487
  chr6:35490043-35490074
  hypo

SEQ ID NO: 153276 - DNA, 25 bp, Homo sapiens
  chr6:35505223-35505248
  hypo
gctgagccaccgctcccggccaggg

SEQ ID NO: 153277 - DNA, 31 bp, Homo sapiens; identical to SEQ ID NO: 42881
  chr6:35523457-35523488
  hypo

SEQ ID NO: 153278 - DNA, 30 bp, Homo sapiens; identical to SEQ ID NO: 20312
  chr6:35529548-35529578
  hypo

SEQ ID NO: 153279 - DNA, 30 bp, Homo sapiens
  chr6:35556065-35556095
  hypo
acaggcgtgagctaccgcgcccagtgacta

SEQ ID NO: 153280 - DNA, 26 bp, Homo sapiens
  chr6:35568030-35568056
  hypo
atatttttactgaattcgctgagggt

SEQ ID NO: 153281 - DNA, 26 bp, Homo sapiens
  chr6:35568175-35568201
  hypo
cagagtgagaccgtctcaaaaaaaaa

SEQ ID NO: 153282 - DNA, 30 bp, Homo sapiens
  chr6:35644050-35644080
  hypo
tctcctaaccgctatcggaaacagaaaagt

SEQ ID NO: 153283 - DNA, 1266 bp, Homo sapiens; identical to SEQ ID NO: 113226
  chr6:35655507-35656773
  hypo

SEQ ID NO: 153284 - DNA, 30 bp, Homo sapiens; identical to SEQ ID NO: 20315
  chr6:35704807-35704837
  hypo

SEQ ID NO: 153285 - DNA, 30 bp, Homo sapiens; identical to SEQ ID NO: 71494
  chr6:35741529-35741559
  hypo

SEQ ID NO: 153286 - DNA, 31 bp, Homo sapiens; identical to SEQ ID NO: 71495
  chr6:35763035-35763066
  hypo

SEQ ID NO: 153287 - DNA, 30 bp, Homo sapiens
  chr6:35773490-35773520
  hypo
ataccaactatgtgcggaactcgcgagccg

SEQ ID NO: 153288 - DNA, 42 bp, Homo sapiens; identical to SEQ ID NO: 71496
  chr6:35895200-35895242
  hypo

SEQ ID NO: 153289 - DNA, 55 bp, Homo sapiens; identical to SEQ ID NO: 71497
  chr6:35911712-35911767
  hypo

SEQ ID NO: 153290 - DNA, 39 bp, Homo sapiens; identical to SEQ ID NO: 71498
  chr6:35944303-35944342
  hypo

SEQ ID NO: 153291 - DNA, 31 bp, Homo sapiens; identical to SEQ ID NO: 71499
  chr6:35989517-35989548
  hypo

SEQ ID NO: 153292 - DNA, 23 bp, Homo sapiens
  chr6:35994810-35994833
  hypo
aacagccttctggccggaacctg

SEQ ID NO: 153293 - DNA, 51 bp, Homo sapiens
  chr6:36060521-36060572
  hypo
agtgtcagcatacgccggtgtcacgactcaagacatcggcacctcccgagg

SEQ ID NO: 153294 - DNA, 22 bp, Homo sapiens
  chr6:36072474-36072496
  hypo
ttcttgtcgtcattctgttctg

SEQ ID NO: 153295 - DNA, 36 bp, Homo sapiens; identical to SEQ ID NO: 71502
  chr6:36092695-36092731
  hypo

SEQ ID NO: 153296 - DNA, 131 bp, Homo sapiens; identical to SEQ ID NO: 20318
  chr6:36165691-36165822
  hypo

SEQ ID NO: 153297 - DNA, 30 bp, Homo sapiens; identical to SEQ ID NO: 71504
  chr6:36168127-36168157
  hypo

SEQ ID NO: 153298 - DNA, 192 bp, Homo sapiens; identical to SEQ ID NO: 71505
  chr6:36178133-36178325
  hypo

SEQ ID NO: 153299 - DNA, 30 bp, Homo sapiens
  chr6:36195133-36195163
  hypo
gttctatttattgttcgcatattcatatta

SEQ ID NO: 153300 - DNA, 259 bp, Homo sapiens; identical to SEQ ID NO: 71506
  chr6:36198229-36198488
  hypo

SEQ ID NO: 153301 - DNA, 198 bp, Homo sapiens
  chr6:36214656-36214854
  hypo
tcttaaatatgtcttcttgaacgccatcgccccatcccagactcaggaccagcctccccgcgctcactgctgtcactgctttccgcactccctgcggattttaggattttagctcccatctcgcgtcctctctccagctcctcctgccccctgcctggtggtttcaccatccacttaccagcccgccgatggtgccct

SEQ ID NO: 153302 - DNA, 211 bp, Homo sapiens
  chr6:36238214-36238425
  hypo
cagaaagtcagaggccgaggagatggaagaacaggtgttcaagggggacccggacacccctcactccatctccttctcgggcagtggattcctctccttctaccaggcgggggctgtggacgccctgcgggacctggccccccggatgctggaaacagcccaccgctttgcggggacatcggcaggtgctgtgatcgccgccctggccatc

SEQ ID NO: 153303 - DNA, 21 bp, Homo sapiens
  chr6:36240211-36240232
  hypo
gctgtgcggcctggttcctaa

SEQ ID NO: 153304 - DNA, 30 bp, Homo sapiens; identical to SEQ ID NO: 71509
  chr6:36275505-36275535
  hypo

SEQ ID NO: 153305 - DNA, 30 bp, Homo sapiens
  chr6:36288560-36288590
  hypo
atggaatcagccgggcgggtggggccagga

SEQ ID NO: 153306 - DNA, 30 bp, Homo sapiens; identical to SEQ ID NO: 71510
  chr6:36313961-36313991
  hypo

SEQ ID NO: 153307 - DNA, 82 bp, Homo sapiens
  chr6:36314472-36314554
  hypo
gactaattaatcgccgtagatcgagggaaggagagcagcaaatggcctcagctgtgtgggtcccgctcggtcatggccggaa

SEQ ID NO: 153308 - DNA, 65 bp, Homo sapiens
  chr6:36336749-36336814
  hypo
ctcggaagatcttggcgtccttgtcttcccacttgatgtagggctcatatcgggtatcaaggagc

SEQ ID NO: 153309 - DNA, 146 bp, Homo sapiens; identical to SEQ ID NO: 71512
  chr6:36339125-36339271
  hypo

SEQ ID NO: 153310 - DNA, 84 bp, Homo sapiens; identical to SEQ ID NO: 71513
  chr6:36343599-36343683
  hypo

SEQ ID NO: 153311 - DNA, 30 bp, Homo sapiens
  chr6:36344131-36344161
  hypo
agcactggactaggcgtgctggagcacact

SEQ ID NO: 153312 - DNA, 102 bp, Homo sapiens
  chr6:36344552-36344654
  hypo
aagaaaaaaaaaaaaaaaaaaggaagggatgttattgtttcccaaatgaggcagtgaggctcccagaggttaagtgactagcccacacgcatacaggcagca

SEQ ID NO: 153313 - DNA, 23 bp, Homo sapiens
  chr6:36392139-36392162
  hypo
ggagcgcggtggctcacgcctgt

SEQ ID NO: 153314 - DNA, 121 bp, Homo sapiens; identical to SEQ ID NO: 71514
  chr6:36392401-36392522
  hypo

SEQ ID NO: 153315 - DNA, 18 bp, Homo sapiens
  chr6:36396174-36396192
  hypo
tcgcgacagagcgagact

SEQ ID NO: 153316 - DNA, 39 bp, Homo sapiens; identical to SEQ ID NO: 20324
  chr6:36406488-36406527
  hypo

SEQ ID NO: 153317 - DNA, 30 bp, Homo sapiens; identical to SEQ ID NO: 71517
  chr6:36406780-36406810
  hypo

SEQ ID NO: 153318 - DNA, 18 bp, Homo sapiens
  chr6:36535241-36535259
  hypo
tttgagacggagcctcgc

SEQ ID NO: 153319 - DNA, 18 bp, Homo sapiens
  chr6:36535498-36535516
  hypo
ctgtaaactgtatttttg

SEQ ID NO: 153320 - DNA, 81 bp, Homo sapiens; identical to SEQ ID NO: 71520
  chr6:36545728-36545809
  hypo

SEQ ID NO: 153321 - DNA, 30 bp, Homo sapiens
  chr6:36567664-36567694
  hypo
gtcatgtgaccagcgcgccccattcagctt

SEQ ID NO: 153322 - DNA, 30 bp, Homo sapiens; identical to SEQ ID NO: 71521
  chr6:36569528-36569558
  hypo

SEQ ID NO: 153323 - DNA, 103 bp, Homo sapiens; identical to SEQ ID NO: 20325
  chr6:36599662-36599765
  hypo

SEQ ID NO: 153324 - DNA, 42 bp, Homo sapiens; identical to SEQ ID NO: 71523
  chr6:36600064-36600106
  hypo

SEQ ID NO: 153325 - DNA, 30 bp, Homo sapiens; identical to SEQ ID NO: 42898
  chr6:36622884-36622914
  hypo

SEQ ID NO: 153326 - DNA, 30 bp, Homo sapiens; identical to SEQ ID NO: 20326
  chr6:36629624-36629654
  hypo

SEQ ID NO: 153327 - DNA, 131 bp, Homo sapiens
  chr6:36657807-36657938
  hypo
gaagaatcaaggaaacgtttattttatatgtttatagtggcattacggatctttctcttccatcagtgcgtcctgggtcagaactggctcaaagctggaaactaggtaagagattgcgattttctgtctcg

SEQ ID NO: 153328 - DNA, 30 bp, Homo sapiens
  chr6:36690514-36690544
  hypo
gggcattggggagggcggcagggagcaagg

SEQ ID NO: 153329 - DNA, 30 bp, Homo sapiens
  chr6:36695377-36695407
  hypo
gctccgcaaggctgacggggtggtgctcat

SEQ ID NO: 153330 - DNA, 230 bp, Homo sapiens; identical to SEQ ID NO: 71527
  chr6:36713047-36713277
  hypo

SEQ ID NO: 153331 - DNA, 75 bp, Homo sapiens
  chr6:36831576-36831651
  hypo
tacttgatccacactcgatgtcacccttctgcttgagttgctgtcttcctttggcttccacgactccacattctc

SEQ ID NO: 153332 - DNA, 30 bp, Homo sapiens; identical to SEQ ID NO: 71529
  chr6:36837401-36837431
  hypo

SEQ ID NO: 153333 - DNA, 46 bp, Homo sapiens
  chr6:36897106-36897152
  hypo
gtgatgcctcacccacggcgtccttggttctcgcaggacggccagg

SEQ ID NO: 153334 - DNA, 149 bp, Homo sapiens
  chr6:36926813-36926962
  hypo
tgctaaggaggtgccggaaggatttccccacgacctcctcgaccttttgcttggtccccacagcatctgtgggcatcctcacctcccttctctcacctgccctgcagagatgggacgaggagctggccgccttcgccaaggcctacgca

SEQ ID NO: 153335 - DNA, 30 bp, Homo sapiens; identical to SEQ ID NO: 71531
  chr6:36929175-36929205
  hypo

SEQ ID NO: 153336 - DNA, 178 bp, Homo sapiens; identical to SEQ ID NO: 71532
  chr6:36936700-36936878
  hypo

SEQ ID NO: 153337 - DNA, 258 bp, Homo sapiens
  chr6:36937178-36937436
  hypo
tgccccatttcactgcgaggcaaatcaaggccaggaaaaggcaaggttctgccctcggccaaagcctggacccctgactgctgggcccaagagctccagctacggagaggtagcttcggtacagaacacgagaacccaaggttggtactgctgccagttccccacgtggcccagccccacccacaggctctcctgggcccaggaatgtcctgcaggagggaggagtcggtttccaatgccagccgccctaacaaccca

SEQ ID NO: 153338 - DNA, 112 bp, Homo sapiens; identical to SEQ ID NO: 71534
  chr6:36939066-36939178
  hypo

SEQ ID NO: 153339 - DNA, 30 bp, Homo sapiens
  chr6:36940017-36940047
  hypo
tcacaactaggatgccgtcagatcaaaggc

SEQ ID NO: 153340 - DNA, 30 bp, Homo sapiens; identical to SEQ ID NO: 71535
  chr6:36949243-36949273
  hypo

SEQ ID NO: 153341 - DNA, 30 bp, Homo sapiens
  chr6:36957253-36957283
  hypo
gcagaaggtggaaggcggagtgagcacact

SEQ ID NO: 153342 - DNA, 98 bp, Homo sapiens
  chr6:36992804-36992902
  hypo
aagccaagtcttcctcgcagtcacaccttgcggcacccagtgttcctctctgagtcttcccaggccccttttacccagcctcccggcatgatccatgt

SEQ ID NO: 153343 - DNA, 27 bp, Homo sapiens
  chr6:37000353-37000380
  hypo
tcacataatacaaatcgttttatctat

SEQ ID NO: 153344 - DNA, 18 bp, Homo sapiens
  chr6:37011430-37011448
  hypo
gcccggccccagactcac

SEQ ID NO: 153345 - DNA, 30 bp, Homo sapiens; identical to SEQ ID NO: 20330
  chr6:37012625-37012655
  hypo

SEQ ID NO: 153346 - DNA, 838 bp, Homo sapiens; identical to SEQ ID NO: 71538
  chr6:37023811-37024649
  hypo

SEQ ID NO: 153347 - DNA, 95 bp, Homo sapiens; identical to SEQ ID NO: 71539
  chr6:37033765-37033860
  hypo

SEQ ID NO: 153348 - DNA, 31 bp, Homo sapiens; identical to SEQ ID NO: 71540
  chr6:37053275-37053306
  hypo

SEQ ID NO: 153349 - DNA, 119 bp, Homo sapiens; identical to SEQ ID NO: 71541
  chr6:37060658-37060777
  hypo

SEQ ID NO: 153350 - DNA, 41 bp, Homo sapiens; identical to SEQ ID NO: 20334
  chr6:37100544-37100585
  hypo

SEQ ID NO: 153351 - DNA, 32 bp, Homo sapiens
  chr6:37102028-37102060
  hypo
ggaaccttggagaatcgcggtgtgcgactctc

SEQ ID NO: 153352 - DNA, 45 bp, Homo sapiens; identical to SEQ ID NO: 71543
  chr6:37131658-37131703
  hypo

SEQ ID NO: 153353 - DNA, 988 bp, Homo sapiens; identical to SEQ ID NO: 42905
  chr6:37138569-37139557
  hypo

SEQ ID NO: 153354 - DNA, 23 bp, Homo sapiens
  chr6:37195193-37195216
  hypo
tcttgattgctctaagcgaaggt

SEQ ID NO: 153355 - DNA, 27 bp, Homo sapiens
  chr6:37197394-37197421
  hypo
ggcgtgagccaccgcgccggccaatgt

SEQ ID NO: 153356 - DNA, 30 bp, Homo sapiens
  chr6:37209688-37209718
  hypo
gagatggctttatcgcgttgtctttatttt

SEQ ID NO: 153357 - DNA, 163 bp, Homo sapiens; identical to SEQ ID NO: 20335
  chr6:37275431-37275594
  hypo

SEQ ID NO: 153358 - DNA, 39 bp, Homo sapiens
  chr6:37340457-37340496
  hypo
cttttagaccgggcacggtggctcacgcctgtaatcccg

SEQ ID NO: 153359 - DNA, 87 bp, Homo sapiens; identical to SEQ ID NO: 71547
  chr6:37352724-37352811
  hypo

SEQ ID NO: 153360 - DNA, 440 bp, Homo sapiens
  chr6:37358448-37358888
  hypo
gaagcagggagtccacggaagggaaatacaggctcctcatttatttatttctcttctttttctccaaagcaaagagattgttctgaagaccgtgctctaagggcatttgaaagactgccaggtagtgcgagcctgagatggtctggaggattctctctagccgtgactccgctgctctgaaggtcaactgagaagtcttgtgggacagagacttgagttaggaagccctcagtcacttgccttccacggtggccagccctgctgccatcattggctgaagcaccaccaggattcacggcacccaactgcttcagggtacttcgtagactctgcctcactacatgtcgaaagagttatttgagttctcttctgtttttttttaatttgttgttgttgttactgttttgatacctcggaaacacctccgttgacagttgttt

SEQ ID NO: 153361 - DNA, 23 bp, Homo sapiens
  chr6:37392303-37392326
  hypo
tgagccaccgcgcccggcctagt

SEQ ID NO: 153362 - DNA, 100 bp, Homo sapiens
  chr6:37450274-37450374
  hypo
agccttgcctgcctgtcgaagatggattaactccgcactcccctgggatcgccacatgaccacttcaagtccccaagccgcccttcgctgcacagactgc

SEQ ID NO: 153363 - DNA, 188 bp, Homo sapiens; identical to SEQ ID NO: 20338
  chr6:37450649-37450837
  hypo

SEQ ID NO: 153364 - DNA, 598 bp, Homo sapiens
  chr6:37460886-37461484
  hypo
agcctaggggcttgtcgctcgcctggacacacccccatgccaggtcagaaaggcgagggaaccgctgcagcccacgcgagtcccgacgccttcccgcgaggagacggaggccgagccagccttgcaagttagcgcccgagccagtccgcgcccgaagatgccagctgtccctgggccggaaggtggtgtggggtttgttttgtcttctttccccccgatatctattttttgataaactagcaaaagcttgttcatcgctgaaaggctcaaagcacttttcaagaactggcatccaccccgagccttatgaattcattaattaagatgctggcagacagccactccacacacgccgccatccagccgcgctaggtaatgaggttttagtctcctgacccccgtcaagtggcgcagagccagatgtaggctgccgcgagaaatcacctgcccaatggcgacctgtcgctctcgcctggcagcaggtgaggctcatttaatggtcagcggcccctgaacagtcctctgcgtgctgcgagcctttctcccagcccctggcttggggttcagggtcccagcaaggtggcgtctaaccgcctgc

SEQ ID NO: 153365 - DNA, 154 bp, Homo sapiens; identical to SEQ ID NO: 71552
  chr6:37605016-37605170
  hypo

SEQ ID NO: 153366 - DNA, 37 bp, Homo sapiens; identical to SEQ ID NO: 71553
  chr6:37608134-37608171
  hypo

SEQ ID NO: 153367 - DNA, 30 bp, Homo sapiens
  chr6:37626020-37626050
  hypo
actgcacgtccacgcggatggacttgatgg

SEQ ID NO: 153368 - DNA, 104 bp, Homo sapiens; identical to SEQ ID NO: 71554
  chr6:37642011-37642115
  hypo

SEQ ID NO: 153369 - DNA, 1226 bp, Homo sapiens; identical to SEQ ID NO: 42913
  chr6:37664481-37665707
  hypo

SEQ ID NO: 153370 - DNA, 381 bp, Homo sapiens; identical to SEQ ID NO: 42915
  chr6:37666462-37666843
  hypo

SEQ ID NO: 153371 - DNA, 221 bp, Homo sapiens; identical to SEQ ID NO: 42916
  chr6:37666866-37667087
  hypo

SEQ ID NO: 153372 - DNA, 103 bp, Homo sapiens; identical to SEQ ID NO: 20341
  chr6:37721652-37721755
  hypo

SEQ ID NO: 153373 - DNA, 30 bp, Homo sapiens
  chr6:37722597-37722627
  hypo
cagcggagaatgtggcggtgcatcccaggc

SEQ ID NO: 153374 - DNA, 30 bp, Homo sapiens
  chr6:37775285-37775315
  hypo
ccccgtatgtgcgtgcgcatgcacatatat

SEQ ID NO: 153375 - DNA, 36 bp, Homo sapiens; identical to SEQ ID NO: 20342
  chr6:37776699-37776735
  hypo

SEQ ID NO: 153376 - DNA, 37 bp, Homo sapiens; identical to SEQ ID NO: 71560
  chr6:37791848-37791885
  hypo

SEQ ID NO: 153377 - DNA, 198 bp, Homo sapiens
  chr6:37841058-37841256
  hypo
gaaaattggaacctaaggagttaatgcagacacaattaatcattctttctgtgtgctaccccctagggtttggtcaataaatcggtatttttataatagaaggtaaacacagccctaattcatacataatcacttgtttgcttgcttgctagagcctgtcgaattttattgggatcatttatgcggttgtgattcttg

SEQ ID NO: 153378 - DNA, 30 bp, Homo sapiens; identical to SEQ ID NO: 71561
  chr6:37865335-37865365
  hypo

SEQ ID NO: 153379 - DNA, 19 bp, Homo sapiens
  chr6:37980160-37980179
  hypo
ttttttttttttgagtcgg

SEQ ID NO: 153380 - DNA, 83 bp, Homo sapiens; identical to SEQ ID NO: 71563
  chr6:38020517-38020600
  hypo

SEQ ID NO: 153381 - DNA, 167 bp, Homo sapiens; identical to SEQ ID NO: 71564
  chr6:38084361-38084528
  hypo

SEQ ID NO: 153382 - DNA, 30 bp, Homo sapiens; identical to SEQ ID NO: 20344
  chr6:38087590-38087620
  hypo

SEQ ID NO: 153383 - DNA, 181 bp, Homo sapiens; identical to SEQ ID NO: 71566
  chr6:38101942-38102123
  hypo

SEQ ID NO: 153384 - DNA, 234 bp, Homo sapiens
  chr6:38118811-38119045
  hypo
gcgttttgaaagaggcggccagcagactctggggacctcagacgtctgtgctccacatgcgtatcggccgctctagagattgcctgggaagctggagggaatgggagacaccccggtgcagctgcgccctgagttctctgagcctggctcctggctccctgcagccctcccctccttgttcctgacccagagtgactttacctgtaccggctccctgctcgataggcctcttga

SEQ ID NO: 153385 - DNA, 30 bp, Homo sapiens
  chr6:38120876-38120906
  hypo
aggatccaaggtcacgagaagcagccagag

SEQ ID NO: 153386 - DNA, 105 bp, Homo sapiens; identical to SEQ ID NO: 71568
  chr6:38121252-38121357
  hypo

SEQ ID NO: 153387 - DNA, 83 bp, Homo sapiens; identical to SEQ ID NO: 20346
  chr6:38122001-38122084
  hypo

SEQ ID NO: 153388 - DNA, 64 bp, Homo sapiens; identical to SEQ ID NO: 20347
  chr6:38134383-38134447
  hypo

SEQ ID NO: 153389 - DNA, 538 bp, Homo sapiens
  chr6:38141417-38141955
  hypo
gaaaggaaactcccacgccctcaccctcctttgatcagggttgcaggttggcgccgaagacccaaggactgcagtgctgctcacgtgccatgccgtcctggggagactcccaggctgatgctgatggcgacagaggccggagctctggggacagcggaggggcaggcaatgttgtgcgcagttacccagggcaggcagcactggaatggaaatcactaagtaggagacggagccacatcaagccaccatcgtcaaatgaggtccttttgatgaggattaggagaaaagcttcttggaactgctatttttcagtccccagttgagtactgtggtgtgggggaagcacggagtcccagttctgcgttcctgacgctgatgggcaggtggctgcctctccaatgcttcgataaacacaactggaggggcagctaagccacggcagtccccggcaggtttggccacgccagaactcggtatatgtttatctacatggacttcggaacagtgaattagcagcgggcatagtaactatttcctt

SEQ ID NO: 153390 - DNA, 30 bp, Homo sapiens
  chr6:38152766-38152796
  hypo
gatgctcctctgacacgctcgtgggctgat

SEQ ID NO: 153391 - DNA, 30 bp, Homo sapiens
  chr6:38163363-38163393
  hypo
aaccgttaccctctccggaatgctgacaga

SEQ ID NO: 153392 - DNA, 30 bp, Homo sapiens; identical to SEQ ID NO: 71571
  chr6:38183173-38183203
  hypo

SEQ ID NO: 153393 - DNA, 187 bp, Homo sapiens; identical to SEQ ID NO: 20348
  chr6:38646371-38646558
  hypo

SEQ ID NO: 153394 - DNA, 30 bp, Homo sapiens; identical to SEQ ID NO: 20349
  chr6:38803940-38803970
  hypo

SEQ ID NO: 153395 - DNA, 31 bp, Homo sapiens; identical to SEQ ID NO: 71574
  chr6:38852630-38852661
  hypo

SEQ ID NO: 153396 - DNA, 24 bp, Homo sapiens
  chr6:38926062-38926086
  hypo
gagccaccgcgcccggccgataga

SEQ ID NO: 153397 - DNA, 30 bp, Homo sapiens; identical to SEQ ID NO: 71575
  chr6:39072443-39072473
  hypo

SEQ ID NO: 153398 - DNA, 94 bp, Homo sapiens; identical to SEQ ID NO: 71576
  chr6:39127058-39127152
  hypo

SEQ ID NO: 153399 - DNA, 42 bp, Homo sapiens
  chr6:39154858-39154900
  hypo
tacagcaatgacggccgggcacggtggctcacgcctgtaatc

SEQ ID NO: 153400 - DNA, 240 bp, Homo sapiens; identical to SEQ ID NO: 71577
  chr6:39158096-39158336
  hypo

SEQ ID NO: 153401 - DNA, 824 bp, Homo sapiens; identical to SEQ ID NO: 71578
  chr6:39158587-39159411
  hypo

SEQ ID NO: 153402 - DNA, 104 bp, Homo sapiens; identical to SEQ ID NO: 71579
  chr6:39162022-39162126
  hypo

SEQ ID NO: 153403 - DNA, 67 bp, Homo sapiens; identical to SEQ ID NO: 71580
  chr6:39162447-39162514
  hypo

SEQ ID NO: 153404 - DNA, 25 bp, Homo sapiens
  chr6:39184594-39184619
  hypo
gtaaaagttgaaactcactgccggg

SEQ ID NO: 153405 - DNA, 43 bp, Homo sapiens; identical to SEQ ID NO: 71582
  chr6:39185582-39185625
  hypo

SEQ ID NO: 153406 - DNA, 30 bp, Homo sapiens
  chr6:39259377-39259407
  hypo
agcggagcagctgagcgccgaacataatgt

SEQ ID NO: 153407 - DNA, 30 bp, Homo sapiens; identical to SEQ ID NO: 113286
  chr6:39280770-39280800
  hypo

SEQ ID NO: 153408 - DNA, 1041 bp, Homo sapiens; identical to SEQ ID NO: 113287
  chr6:39281095-39282136
  hypo

SEQ ID NO: 153409 - DNA, 30 bp, Homo sapiens
  chr6:39290462-39290492
  hypo
actgtttgaacagtgcggctcagcttggct

SEQ ID NO: 153410 - DNA, 30 bp, Homo sapiens
  chr6:39386565-39386595
  hypo
acaaactgaggctatcgtgatttttatatt

SEQ ID NO: 153411 - DNA, 31 bp, Homo sapiens
  chr6:39543953-39543984
  hypo
gcaatggtgcgatctcggatcactgtaacct

SEQ ID NO: 153412 - DNA, 38 bp, Homo sapiens; identical to SEQ ID NO: 71584
  chr6:39691930-39691968
  hypo

SEQ ID NO: 153413 - DNA, 668 bp, Homo sapiens; identical to SEQ ID NO: 113288
  chr6:39692722-39693390
  hypo

SEQ ID NO: 153414 - DNA, 297 bp, Homo sapiens; identical to SEQ ID NO: 71586
  chr6:39895078-39895375
  hypo

SEQ ID NO: 153415 - DNA, 476 bp, Homo sapiens; identical to SEQ ID NO: 113291
  chr6:39901936-39902412
  hypo

SEQ ID NO: 153416 - DNA, 36 bp, Homo sapiens
  chr6:39907359-39907395
  hypo
aaatcgtgccaggcgcggtggctcctgcctgtaatc

SEQ ID NO: 153417 - DNA, 30 bp, Homo sapiens; identical to SEQ ID NO: 71588
  chr6:40346284-40346314
  hypo

SEQ ID NO: 153418 - DNA, 185 bp, Homo sapiens
  chr6:40359820-40360005
  hypo
ggactgtagccgcccggcacgacccctcccgccgccgcagcagcaaagtcccccatgtcgaaggagtggctgcgtttggccttgccctccaacggcaaggggagcaggctcctggcccgggccgcagggggccccagcagtggctctcggtccgagtggtggccccgggccgacgtcccagcccc

SEQ ID NO: 153419 - DNA, 322 bp, Homo sapiens
  chr6:40360222-40360544
  hypo
tccaggagctcgttgcgcaccaccaccttcggcgggccctgcggcggggccccggctggtgcgctgcttggaggcggtggctgggcgccgttggtctgcgagtacacattgctcacggccgctgccatcttgctgggggcctcgtggttgcagaccttgtagcgcaccatgaggatgacgatgaagaccagcagcgtggccacgatgatgcccccgatgaccaggatcatggtgccgcccagaatctggctgtgcatggactggcactgcgggtagtcagccttggtgaagaactgggcgcagcccacgatgttggtggccg

SEQ ID NO: 153420 - DNA, 30 bp, Homo sapiens; identical to SEQ ID NO: 71590
  chr6:40399617-40399647
  hypo

SEQ ID NO: 153421 - DNA, 721 bp, Homo sapiens; identical to SEQ ID NO: 71591
  chr6:40399973-40400694
  hypo

SEQ ID NO: 153422 - DNA, 921 bp, Homo sapiens; identical to SEQ ID NO: 113292
  chr6:40554349-40555270
  hypo

SEQ ID NO: 153423 - DNA, 634 bp, Homo sapiens; identical to SEQ ID NO: 113293
  chr6:40555282-40555916
  hypo

SEQ ID NO: 153424 - DNA, 32 bp, Homo sapiens
  chr6:40624386-40624418
  hypo
tttttctgggctgggcgcagtggctcacacct

SEQ ID NO: 153425 - DNA, 31 bp, Homo sapiens; identical to SEQ ID NO: 4803
  chr6:40763876-40763907
  hypo

SEQ ID NO: 153426 - DNA, 30 bp, Homo sapiens; identical to SEQ ID NO: 42933
  chr6:40802245-40802275
  hypo

SEQ ID NO: 153427 - DNA, 121 bp, Homo sapiens
  chr6:40846065-40846186
  hypo
aaaaaaaaccaaaaacaaaaaaaacctcatccagtaccattgctttgaggttcaaaagcagacaaaactagtctatggtaatagaaatcagaataatagttactcaggccgggcatgttgg

SEQ ID NO: 153428 - DNA, 30 bp, Homo sapiens
  chr6:40886533-40886563
  hypo
gcacatgacagacgccggcacaccagcagg

SEQ ID NO: 153429 - DNA, 74 bp, Homo sapiens; identical to SEQ ID NO: 71596
  chr6:41001833-41001907
  hypo

SEQ ID NO: 153430 - DNA, 30 bp, Homo sapiens; identical to SEQ ID NO: 71597
  chr6:41068158-41068188
  hypo

SEQ ID NO: 153431 - DNA, 47 bp, Homo sapiens
  chr6:41303867-41303914
  hypo
agggcagacgctaaccgtgagatgccagtacccgcccacgggcagtc

SEQ ID NO: 153432 - DNA, 489 bp, Homo sapiens; identical to SEQ ID NO: 4806
  chr6:41339069-41339558
  hypo

SEQ ID NO: 153433 - DNA, 1586 bp, Homo sapiens; identical to SEQ ID NO: 113304
  chr6:41339601-41341187
  hypo

SEQ ID NO: 153434 - DNA, 30 bp, Homo sapiens; identical to SEQ ID NO: 20360
  chr6:41454616-41454646
  hypo

SEQ ID NO: 153435 - DNA, 231 bp, Homo sapiens
  chr6:41490964-41491195
  hypo
ctggtactctggcagcgagacacttcgaggttctccaaccactcggaggtgagtatgaaggcggtggccgtggcagcacccaggccatggaggtgggtggccaagcggcaagattaggggcgtggggtccagagggacccctctggggagctggggtcctgggtggccaagcaggaactgggccacagacaggagcatctccacctgagctggccacgccctgaacaggga

SEQ ID NO: 153436 - DNA, 159 bp, Homo sapiens
  chr6:41511549-41511708
  hypo
atgagccttggttccggccaccgccaaagcacctgcacctgccctgagtcctgtgaaggaacaaggacagaaagaggaccctcctgcctgctcccggtcactcccactttggagccaagggctactcttttcaaccttcttaacgaagctcttgcacca

SEQ ID NO: 153437 - DNA, 30 bp, Homo sapiens
  chr6:41519020-41519050
  hypo
ctgtggtgtgtcgcccgggctggacatgcc

SEQ ID NO: 153438 - DNA, 30 bp, Homo sapiens; identical to SEQ ID NO: 20362
  chr6:41519620-41519650
  hypo

SEQ ID NO: 153439 - DNA, 30 bp, Homo sapiens; identical to SEQ ID NO: 20363
  chr6:41524751-41524781
  hypo

SEQ ID NO: 153440 - DNA, 30 bp, Homo sapiens; identical to SEQ ID NO: 20364
  chr6:41529917-41529947
  hypo

SEQ ID NO: 153441 - DNA, 30 bp, Homo sapiens
  chr6:41544314-41544344
  hypo
taagtgcgcagggcacgaggctatgttggg

SEQ ID NO: 153442 - DNA, 30 bp, Homo sapiens; identical to SEQ ID NO: 71607
  chr6:41584022-41584052
  hypo

SEQ ID NO: 153443 - DNA, 31 bp, Homo sapiens; identical to SEQ ID NO: 20365
  chr6:41619005-41619036
  hypo

SEQ ID NO: 153444 - DNA, 338 bp, Homo sapiens; identical to SEQ ID NO: 71609
  chr6:41620829-41621167
  hypo

SEQ ID NO: 153445 - DNA, 30 bp, Homo sapiens; identical to SEQ ID NO: 42948
  chr6:41692796-41692826
  hypo

SEQ ID NO: 153446 - DNA, 128 bp, Homo sapiens
  chr6:41709759-41709887
  hypo
tgtggaagagattcattccatcgtggccatggaatgcaaagacaagtcggaggggactggggacaggtgcagggatggggtgtggtcgggtggctgggagaggattcgagaggaagcccaggaaggaa

SEQ ID NO: 153447 - DNA, 383 bp, Homo sapiens
  chr6:41715219-41715602
  hypo
cccagggtgtaccctgtgcttcgtgtatcgtttctgtgtatttttccttcttgagggtggccgcaacagactttcatcttattgactttttggttcaagcatcggaggccaggaggtgcaagcgataagagagaaagttgccgtaagatggagtggtgaagattacgtcttgttcccaaaccagaggcataatgtgtgcatttagggacgagggccagaaaaaggtagaggcagagtgctgggatagataggatctatagccagggtttcgcaacctcagtgctgtcgacattttggaacaaatagttctttgttgtgggccccatcctgtgtactatagaatgtttaacagcattcctggcatctaccgactcgatgccagg

SEQ ID NO: 153448 - DNA, 30 bp, Homo sapiens
  chr6:41716090-41716120
  hypo
cctgctgctgttcctcgttctctcttctgc

SEQ ID NO: 153449 - DNA, 198 bp, Homo sapiens
  chr6:41748534-41748732
  hypo
gaactgcccggacagcgacgcacagcgagggtgagaccccagcggagtcctggtcccctcccctaaaatcccagcagccagaccgggaaccccagcggactcgggaaacaccgcgtcccagccccggaggcgggcccgccaagttccagaaaaactctggggatctatcgagagggcagttggcgggactgggcactc

SEQ ID NO: 153450 - DNA, 81 bp, Homo sapiens; identical to SEQ ID NO: 71612
  chr6:41753205-41753286
  hypo

SEQ ID NO: 153451 - DNA, 30 bp, Homo sapiens
  chr6:41753822-41753852
  hypo
aatgaatgaatgaaacgttcccctctccct

SEQ ID NO: 153452 - DNA, 1038 bp, Homo sapiens; identical to SEQ ID NO: 71613
  chr6:41773490-41774528
  hypo

SEQ ID NO: 153453 - DNA, 30 bp, Homo sapiens; identical to SEQ ID NO: 71614
  chr6:41776547-41776577
  hypo

SEQ ID NO: 153454 - DNA, 201 bp, Homo sapiens; identical to SEQ ID NO: 20369
  chr6:41827195-41827396
  hypo

SEQ ID NO: 153455 - DNA, 30 bp, Homo sapiens; identical to SEQ ID NO: 71616
  chr6:41900483-41900513
  hypo

SEQ ID NO: 153456 - DNA, 30 bp, Homo sapiens
  chr6:41935326-41935356
  hypo
cttccgggtagagcccgggaatctgcattt

SEQ ID NO: 153457 - DNA, 25 bp, Homo sapiens
  chr6:41952373-41952398
  hypo
ccactctcggcgggtagttgctgtt

SEQ ID NO: 153458 - DNA, 43 bp, Homo sapiens; identical to SEQ ID NO: 71617
  chr6:41956741-41956784
  hypo

SEQ ID NO: 153459 - DNA, 29 bp, Homo sapiens
  chr6:41981483-41981512
  hypo
cagcagtcccttccagcgccaagccattc

SEQ ID NO: 153460 - DNA, 30 bp, Homo sapiens
  chr6:41994002-41994032
  hypo
agaccctctccccccgccgcccccctgcca

SEQ ID NO: 153461 - DNA, 30 bp, Homo sapiens
  chr6:42011886-42011916
  hypo
gggacgggtgtatgccgcagaggcggaggc

SEQ ID NO: 153462 - DNA, 48 bp, Homo sapiens; identical to SEQ ID NO: 71619
  chr6:42017468-42017516
  hypo

SEQ ID NO: 153463 - DNA, 204 bp, Homo sapiens; identical to SEQ ID NO: 71620
  chr6:42047605-42047809
  hypo

SEQ ID NO: 153464 - DNA, 45 bp, Homo sapiens
  chr6:42062060-42062105
  hypo
aagcaagcctgagcaacacagcgacaccccatctttttttttttt

SEQ ID NO: 153465 - DNA, 30 bp, Homo sapiens; identical to SEQ ID NO: 20371
  chr6:42071204-42071234
  hypo

SEQ ID NO: 153466 - DNA, 368 bp, Homo sapiens
  chr6:42073934-42074302
  hypo
gcctccagctcattccggatctgccgcacactgggagttggagagtcttggggaatgtagtccacagagggcagggtcaggctgggggcagcctctgtctctgtcaggctgctgccgccaagactcttttcaggaacacctgggggagtgtcctttgctggcaggctcaggagagtctccttctcaggcaggcgggggcccttcttgccctccttgctctgaggggccactgttgggcctggcctgtgactgaggaatcggtcctctctcctggagccacagagataggctgccagctcgttccgcagcttttccatctggctggggtccctccagtccacaggtgctgaagacgctgtgttctctgg

SEQ ID NO: 153467 - DNA, 30 bp, Homo sapiens
  chr6:42076878-42076908
  hypo
atagggcagtccggccgggtgcggtggctc

SEQ ID NO: 153468 - DNA, 163 bp, Homo sapiens; identical to SEQ ID NO: 71624
  chr6:42090712-42090875
  hypo

SEQ ID NO: 153469 - DNA, 40 bp, Homo sapiens; identical to SEQ ID NO: 71625
  chr6:42105771-42105811
  hypo

SEQ ID NO: 153470 - DNA, 77 bp, Homo sapiens
  chr6:42110869-42110946
  hypo
agagaatgtgggatgacgaaatcttggcattctgtgtctgtacatcacattgtttttctttttcttttcttttcttt

SEQ ID NO: 153471 - DNA, 31 bp, Homo sapiens; identical to SEQ ID NO: 71626
  chr6:42141343-42141374
  hypo

SEQ ID NO: 153472 - DNA, 30 bp, Homo sapiens; identical to SEQ ID NO: 71627
  chr6:42143414-42143444
  hypo

SEQ ID NO: 153473 - DNA, 30 bp, Homo sapiens; identical to SEQ ID NO: 20373
  chr6:42207495-42207525
  hypo

SEQ ID NO: 153474 - DNA, 30 bp, Homo sapiens
  chr6:42357848-42357878
  hypo
agaaagaaaaagtgtcgggggagaattcta

SEQ ID NO: 153475 - DNA, 30 bp, Homo sapiens
  chr6:42360739-42360769
  hypo
ttcaagctgccgacgcgagggccactggac

SEQ ID NO: 153476 - DNA, 224 bp, Homo sapiens
  chr6:42421401-42421625
  hypo
agaagaatgacctcccgctacccagaccttcgccagtgtcccccaccccacccccacccgggcgctgggtgtggattgggcggagggaggctatatgggagcttaaagcatgaggtcatgagcggaggagactgctgccaaaagcacccgaggtttttgtgttttttgaggggtaacggttctccatcttcagcagtggaaagtcctcccgcctaccctaccaa

SEQ ID NO: 153477 - DNA, 40 bp, Homo sapiens
  chr6:42510149-42510189
  hypo
gtttgaggttgaggccgggtgcagtggctcacgcctgtaa

SEQ ID NO: 153478 - DNA, 30 bp, Homo sapiens
  chr6:42641535-42641565
  hypo
gtcttaggtcattgacgagatttgccgcag

SEQ ID NO: 153479 - DNA, 30 bp, Homo sapiens
  chr6:42657433-42657463
  hypo
actcagggcctgcagcgcccttccgtatgt

SEQ ID NO: 153480 - DNA, 30 bp, Homo sapiens
  chr6:42663068-42663098
  hypo
agtgtaacaggtgcccggacgaggaggggc

SEQ ID NO: 153481 - DNA, 30 bp, Homo sapiens
  chr6:42664763-42664793
  hypo
tttgccttctggcctcggtctccagccagg

SEQ ID NO: 153482 - DNA, 30 bp, Homo sapiens
  chr6:42674917-42674947
  hypo
atgagccactgcgctcggctgagatatttt

SEQ ID NO: 153483 - DNA, 30 bp, Homo sapiens
  chr6:42709571-42709601
  hypo
gtgtgggcactgctcgagaaaaggccagga

SEQ ID NO: 153484 - DNA, 30 bp, Homo sapiens; identical to SEQ ID NO: 71629
  chr6:42712085-42712115
  hypo

SEQ ID NO: 153485 - DNA, 181 bp, Homo sapiens
  chr6:42762702-42762883
  hypo
aaaaaaaaagaaacttaccataagtcatgcaagagtctatttactgatctctccaccaatactcacaaagagaattacgcatgaacgacagtcaaggtaactgaaaagatctacatctattgttagaaagttgtctaacttgttttccaaaactttctgctattagatttaaaaacgtgac

SEQ ID NO: 153486 - DNA, 38 bp, Homo sapiens; identical to SEQ ID NO: 20374
  chr6:42773434-42773472
  hypo

SEQ ID NO: 153487 - DNA, 31 bp, Homo sapiens; identical to SEQ ID NO: 20375
  chr6:42777803-42777834
  hypo

SEQ ID NO: 153488 - DNA, 30 bp, Homo sapiens
  chr6:42813074-42813104
  hypo
tcctgtctcagcctccggagggattacaag

SEQ ID NO: 153489 - DNA, 80 bp, Homo sapiens; identical to SEQ ID NO: 71633
  chr6:42813436-42813516
  hypo

SEQ ID NO: 153490 - DNA, 18 bp, Homo sapiens
  chr6:42846175-42846193
  hypo
gagcgagacgccatctca

SEQ ID NO: 153491 - DNA, 23 bp, Homo sapiens
  chr6:42905051-42905074
  hypo
aggatgaggccaggtgcggtggc

SEQ ID NO: 153492 - DNA, 30 bp, Homo sapiens; identical to SEQ ID NO: 71636
  chr6:42929919-42929949
  hypo

SEQ ID NO: 153493 - DNA, 30 bp, Homo sapiens; identical to SEQ ID NO: 71637
  chr6:42932095-42932125
  hypo

SEQ ID NO: 153494 - DNA, 22 bp, Homo sapiens
  chr6:42942139-42942161
  hypo
ctgatataccaagaggcgccta

SEQ ID NO: 153495 - DNA, 23 bp, Homo sapiens
  chr6:42945869-42945892
  hypo
accgcgcccggctagaaacatta

SEQ ID NO: 153496 - DNA, 36 bp, Homo sapiens; identical to SEQ ID NO: 20378
  chr6:42951450-42951486
  hypo

SEQ ID NO: 153497 - DNA, 30 bp, Homo sapiens
  chr6:42957911-42957941
  hypo
gcagcttagcaatctcgggttataaagcaa

SEQ ID NO: 153498 - DNA, 30 bp, Homo sapiens; identical to SEQ ID NO: 71640
  chr6:42979946-42979976
  hypo

SEQ ID NO: 153499 - DNA, 30 bp, Homo sapiens; identical to SEQ ID NO: 20379
  chr6:42997019-42997049
  hypo

SEQ ID NO: 153500 - DNA, 30 bp, Homo sapiens; identical to SEQ ID NO: 71642
  chr6:43034095-43034125
  hypo

SEQ ID NO: 153501 - DNA, 20 bp, Homo sapiens
  chr6:43050197-43050217
  hypo
gccaccgtgccctgctgcaa

SEQ ID NO: 153502 - DNA, 86 bp, Homo sapiens
  chr6:43057812-43057898
  hypo
acagcaattttaggcgagtctctacttgggcctttccaagagactcccttttccaggcactgcacagctgccgctggtgacccaga

SEQ ID NO: 153503 - DNA, 126 bp, Homo sapiens; identical to SEQ ID NO: 42981
  chr6:43081635-43081761
  hypo

SEQ ID NO: 153504 - DNA, 30 bp, Homo sapiens
  chr6:43090794-43090824
  hypo
gaggacttctgggccggtagcatcaagctc

SEQ ID NO: 153505 - DNA, 267 bp, Homo sapiens; identical to SEQ ID NO: 20382
  chr6:43096726-43096993
  hypo

SEQ ID NO: 153506 - DNA, 30 bp, Homo sapiens
  chr6:43098038-43098068
  hypo
aggagcggaacctgacgctccggccagctg

SEQ ID NO: 153507 - DNA, 30 bp, Homo sapiens
  chr6:43098376-43098406
  hypo
actcccatcactaaccgcagtcggtaaggc

SEQ ID NO: 153508 - DNA, 35 bp, Homo sapiens; identical to SEQ ID NO: 71647
  chr6:43104147-43104182
  hypo

SEQ ID NO: 153509 - DNA, 31 bp, Homo sapiens; identical to SEQ ID NO: 20383
  chr6:43113235-43113266
  hypo

SEQ ID NO: 153510 - DNA, 32 bp, Homo sapiens; identical to SEQ ID NO: 71649
  chr6:43118950-43118982
  hypo

SEQ ID NO: 153511 - DNA, 92 bp, Homo sapiens; identical to SEQ ID NO: 20384
  chr6:43119821-43119913
  hypo

SEQ ID NO: 153512 - DNA, 30 bp, Homo sapiens
  chr6:43153870-43153900
  hypo
tctctgagcttgtgcggagcatgggctggg

SEQ ID NO: 153513 - DNA, 31 bp, Homo sapiens; identical to SEQ ID NO: 71651
  chr6:43181064-43181095
  hypo

SEQ ID NO: 153514 - DNA, 30 bp, Homo sapiens
  chr6:43190542-43190572
  hypo
cttctacagccaggacgcagagtacatgga

SEQ ID NO: 153515 - DNA, 131 bp, Homo sapiens
  chr6:43191027-43191158
  hypo
ctggcctcctccctgcgcctcctgcgggccgactgcctcagcacgggcatggagctgctccggcggatccaggagaggctgcttgccatcctgcagcattctgcccaggtactgcccggcccagacccctt

SEQ ID NO: 153516 - DNA, 30 bp, Homo sapiens; identical to SEQ ID NO: 42987
  chr6:43214835-43214865
  hypo

SEQ ID NO: 153517 - DNA, 30 bp, Homo sapiens; identical to SEQ ID NO: 113372
  chr6:43214880-43214910
  hypo

SEQ ID NO: 153518 - DNA, 31 bp, Homo sapiens; identical to SEQ ID NO: 71653
  chr6:43222389-43222420
  hypo

SEQ ID NO: 153519 - DNA, 216 bp, Homo sapiens; identical to SEQ ID NO: 71654
  chr6:43230736-43230952
  hypo

SEQ ID NO: 153520 - DNA, 31 bp, Homo sapiens; identical to SEQ ID NO: 20385
  chr6:43249394-43249425
  hypo

SEQ ID NO: 153521 - DNA, 251 bp, Homo sapiens
  chr6:43251539-43251790
  hypo
cagacgggccagccccggtgtccccgctggagccaagccctgagaaagtggccaccatctcccccagacgccatgctatgccaggctctcgccccaggagccgtatccctgtcctgctctctgaggaggacacgggctcggagccctcaggctcactgtcggccaaagagcggtggagcaagcgggctcggccgcagcaggacctggcgcggctggtgatggagaagaggcagggccgcctgctgttgcgg

SEQ ID NO: 153522 - DNA, 30 bp, Homo sapiens
  chr6:43251999-43252029
  hypo
cagcagatcccatggcgcggccccagcatt

SEQ ID NO: 153523 - DNA, 66 bp, Homo sapiens
  chr6:43325213-43325279
  hypo
ctgtgtcatcataacggggtcttttggcctcccggctcctttcttcagatcgtatggagtagcctt

SEQ ID NO: 153524 - DNA, 102 bp, Homo sapiens
  chr6:43334538-43334640
  hypo
attacatacacacacacgcacacaaactgtaactcccttctctgctcttagtccttttttttttgttttgtttgagacttgctctgtcgtccccagcctgga

SEQ ID NO: 153525 - DNA, 29 bp, Homo sapiens
  chr6:43338304-43338333
  hypo
tcttcacacgttttcgagctgttttctga

SEQ ID NO: 153526 - DNA, 84 bp, Homo sapiens
  chr6:43364278-43364362
  hypo
atagcacggggggaacgaactggtacatggggaactggtcaaacaagttttaaaaagcctcctgcttcccgcagaggtagccgt

SEQ ID NO: 153527 - DNA, 30 bp, Homo sapiens; identical to SEQ ID NO: 71659
  chr6:43398431-43398461
  hypo

SEQ ID NO: 153528 - DNA, 96 bp, Homo sapiens; identical to SEQ ID NO: 71660
  chr6:43424451-43424547
  hypo

SEQ ID NO: 153529 - DNA, 19 bp, Homo sapiens
  chr6:43425113-43425132
  hypo
ttttttttttttgagacgg

SEQ ID NO: 153530 - DNA, 320 bp, Homo sapiens; identical to SEQ ID NO: 20388
  chr6:43456969-43457289
  hypo

SEQ ID NO: 153531 - DNA, 93 bp, Homo sapiens; identical to SEQ ID NO: 113385
  chr6:43477368-43477461
  hypo

SEQ ID NO: 153532 - DNA, 251 bp, Homo sapiens
  chr6:43478565-43478816
  hypo
aggccccaggggccacggctgggcagagccagcttgagctgctggggagaagggtaccccatagggtccctagggcaggggagcctcagatagatgcaaggtcctggtgccacaccttctcaggtacgcagggcactgttgacatctgagggtgtgtccgtgccgcgagactggggcagccaatacaaagaaggtgccagggccagggccctggagcactggtgaggacgtgaaggcggctgagccacact

SEQ ID NO: 153533 - DNA, 24 bp, Homo sapiens
  chr6:43481964-43481988
  hypo
tgcgactccatctcaaaacaaaac

SEQ ID NO: 153534 - DNA, 30 bp, Homo sapiens
  chr6:43492236-43492266
  hypo
aattggtcctttcggcgcttgtcagccact

SEQ ID NO: 153535 - DNA, 99 bp, Homo sapiens; identical to SEQ ID NO: 4831
  chr6:43596712-43596811
  hypo

SEQ ID NO: 153536 - DNA, 31 bp, Homo sapiens; identical to SEQ ID NO: 20390
  chr6:43608107-43608138
  hypo

SEQ ID NO: 153537 - DNA, 113 bp, Homo sapiens
  chr6:43639542-43639655
  hypo
ccctcagaaggggtgaccccacgggcatgcgcaccctgttccagcgggggccttttttgtagatgggcttgacggagccaggagcccagcgcgtcaggtacctgtggagggag

SEQ ID NO: 153538 - DNA, 310 bp, Homo sapiens
  chr6:43641285-43641595
  hypo
ctgcgccacacggagcggccagctggcagggggtgggccgggtggcctccagccagctctttgggaacaccccagctctagcaagaaccaagtctctttcctaaaccagccccttcctacctctcctgaaggggcagcaggaggagcgacacagcagcagacaaagcatggctccgccaggccccagcggagcctgggcccatgcatggcagcattaaacgagactcccctgcaagggaatccatttccttcgtagcctgaactccccctcccgctcagcgtggccttttgcaaccgactagcccccaca

SEQ ID NO: 153539 - DNA, 282 bp, Homo sapiens
  chr6:43706685-43706967
  hypo
gggatgagggtggggcgatgggaggaggtgtgctactcaacttctcaatggttgttgcatttctggaatttaagactccaaagcccatcctcccacccccactccactgtttaccttctggctttggtgatgggctgcaccttttctgaggacgctgtgcaggccaatgcgggtgggccagacagaacatgtctgaggacgggatgtggtccacggggtgccagtttgcaacctcctcatccagccaaactgtactttttgccattccgttgtataggactg

SEQ ID NO: 153540 - DNA, 308 bp, Homo sapiens
  chr6:43745060-43745368
  hypo
cagtaggagggacttacgttagattttggaaggacttgcctgattcggaagctccaaagagtggcattacagagctgggtggagagaggggctagccatcttttgtgtcgcccaccgggctcatgtgtcatcgcctctcatgcagtggtgaagttcatggatgtctatcagcgcagctactgccatccaatcgagaccctggtggacatcttccaggagtaccctgatgagatcgagtacatcttcaagccatcctgtgtgcccctgatgcgatgcgggggctgctgcaatgacgagggcctggagtg

SEQ ID NO: 153541 - DNA, 338 bp, Homo sapiens; identical to SEQ ID NO: 20394
  chr6:43748285-43748623
  hypo

SEQ ID NO: 153542 - DNA, 392 bp, Homo sapiens
  chr6:43749536-43749928
  hypo
ttttgctgtagcgctcggatccttccagggcctgggggctgaccggctgggtgggggtgcagctgcggacatgttagggggtgttgcatggtgattttttttctctctctctgctgatgctctagcttagatgtctttccttttgcctttttgcagtccctgtgggccttgctcagagcggagaaagcatttgtttgtacaagatccgcagacgtgtaaatgttcctgcaaaaacacagactcgcgttgcaaggcgaggcagcttgagttaaacgaacgtacttgcaggttggttcccagagggcaagcaagtcagagaggggcatcacacagagatggggagagagagagagaaagagagtgagcgagcgagcgagcgggagagcgcctga

SEQ ID NO: 153543 - DNA, 168 bp, Homo sapiens; identical to SEQ ID NO: 71671
  chr6:43752448-43752616
  hypo

SEQ ID NO: 153544 - DNA, 84 bp, Homo sapiens
  chr6:43753107-43753191
  hypo
tccacatgctgcacgcgcatctcgcccccaggggcactgcctggaagattcaggagcctgggcggccttcgcttactctcacct

SEQ ID NO: 153545 - DNA, 77 bp, Homo sapiens; identical to SEQ ID NO: 71672
  chr6:43755592-43755669
  hypo

SEQ ID NO: 153546 - DNA, 196 bp, Homo sapiens
  chr6:43755968-43756164
  hypo
cggcaggtaggggcttttttcatcccatctggatttttgctggagcctttaaattggccgcctggcttctcctctggccttcctttagttgaatctcacacaactgccagagtgagcctgttaaaatgtgagttaagttttggcaccttttgactcaaaaccttccagagatagttttactcggagaaaaacccaa

SEQ ID NO: 153547 - DNA, 30 bp, Homo sapiens; identical to SEQ ID NO: 71674
  chr6:43792936-43792966
  hypo

SEQ ID NO: 153548 - DNA, 101 bp, Homo sapiens
  chr6:43814640-43814741
  hypo
atcgttggctgaaacatcattatgcggtacatgactgtataaaactaaataggtagtttcatgagagaaataatcagaagttactacgctgttttaactga

SEQ ID NO: 153549 - DNA, 31 bp, Homo sapiens; identical to SEQ ID NO: 71675
  chr6:43819544-43819575
  hypo

SEQ ID NO: 153550 - DNA, 30 bp, Homo sapiens; identical to SEQ ID NO: 71676
  chr6:43827222-43827252
  hypo

SEQ ID NO: 153551 - DNA, 34 bp, Homo sapiens
  chr6:43857892-43857926
  hypo
taagcctcatactgtccccgtgagttgggcaagg

SEQ ID NO: 153552 - DNA, 118 bp, Homo sapiens
  chr6:43890878-43890996
  hypo
acacatacatgagcacgtggatacatacgcatgtacgcctatccatgaggtcaccctatacatgtacattccccaggcaccttcccacactcagacacacaaacgtcccacactgcac

SEQ ID NO: 153553 - DNA, 190 bp, Homo sapiens; identical to SEQ ID NO: 71679
  chr6:43891388-43891578
  hypo

SEQ ID NO: 153554 - DNA, 166 bp, Homo sapiens; identical to SEQ ID NO: 20397
  chr6:43893234-43893400
  hypo

SEQ ID NO: 153555 - DNA, 93 bp, Homo sapiens; identical to SEQ ID NO: 71681
  chr6:43894168-43894261
  hypo

SEQ ID NO: 153556 - DNA, 51 bp, Homo sapiens
  chr6:43894751-43894802
  hypo
acccaatcccagtgccgggaagggggacagagggcccgggagctgcccccc

SEQ ID NO: 153557 - DNA, 56 bp, Homo sapiens
  chr6:43895089-43895145
  hypo
gggctcgaggtgtggcgacacagtcagggatgattgagactcggcaaacaggaata

SEQ ID NO: 153558 - DNA, 134 bp, Homo sapiens
  chr6:43917991-43918125
  hypo
ccattcaactccgcctcgtttgttcaacaatcaagtattatgggcatgttctaggccagaccctccattaggttctgggatcgcaaagcagcctccaacccagctctggagaagacgcacgaaggcttcatgaa

SEQ ID NO: 153559 - DNA, 193 bp, Homo sapiens; identical to SEQ ID NO: 71684
  chr6:43990913-43991106
  hypo

SEQ ID NO: 153560 - DNA, 142 bp, Homo sapiens
  chr6:44030785-44030927
  hypo
acgtgcaggccagggcgtgcctgtgtggggggaacaggaccgagcttctgccaagggcccgctgccggctgttgctgagcttgtgctcgccagaggggtgggggcggcaggcagacaatggaccccacggcccagcctcctg

SEQ ID NO: 153561 - DNA, 388 bp, Homo sapiens; identical to SEQ ID NO: 43004
  chr6:44044180-44044568
  hypo

SEQ ID NO: 153562 - DNA, 145 bp, Homo sapiens
  chr6:44077026-44077171
  hypo
acactgaggaggctgcgcacggggaggttggagcggaacggccttgggctcccacctgcacagtaggatctcacccccggattgaccccggccctggccctcctccacactcttgacacaggaggaggcacgcctccagtgaatt

SEQ ID NO: 153563 - DNA, 30 bp, Homo sapiens
  chr6:44081534-44081564
  hypo
aactgctccattcacgagtcctgcaaccag

SEQ ID NO: 153564 - DNA, 26 bp, Homo sapiens
  chr6:44086401-44086427
  hypo
atctcatttaaacctcatggccgggc

SEQ ID NO: 153565 - DNA, 44 bp, Homo sapiens; identical to SEQ ID NO: 71687
  chr6:44086952-44086996
  hypo

SEQ ID NO: 153566 - DNA, 41 bp, Homo sapiens; identical to SEQ ID NO: 71688
  chr6:44089392-44089433
  hypo

SEQ ID NO: 153567 - DNA, 35 bp, Homo sapiens; identical to SEQ ID NO: 71689
  chr6:44090097-44090132
  hypo

SEQ ID NO: 153568 - DNA, 271 bp, Homo sapiens; identical to SEQ ID NO: 43006
  chr6:44095870-44096141
  hypo

SEQ ID NO: 153569 - DNA, 30 bp, Homo sapiens; identical to SEQ ID NO: 71691
  chr6:44116495-44116525
  hypo

SEQ ID NO: 153570 - DNA, 219 bp, Homo sapiens; identical to SEQ ID NO: 71692
  chr6:44120363-44120582
  hypo

SEQ ID NO: 153571 - DNA, 168 bp, Homo sapiens; identical to SEQ ID NO: 71693
  chr6:44121129-44121297
  hypo

SEQ ID NO: 153572 - DNA, 30 bp, Homo sapiens; identical to SEQ ID NO: 71694
  chr6:44123599-44123629
  hypo

SEQ ID NO: 153573 - DNA, 33 bp, Homo sapiens
  chr6:44150583-44150616
  hypo
tacaggcatgagccaccgcgcccggcctcagta

SEQ ID NO: 153574 - DNA, 37 bp, Homo sapiens; identical to SEQ ID NO: 20401
  chr6:44166168-44166205
  hypo

SEQ ID NO: 153575 - DNA, 31 bp, Homo sapiens; identical to SEQ ID NO: 71696
  chr6:44200718-44200749
  hypo

SEQ ID NO: 153576 - DNA, 565 bp, Homo sapiens
  chr6:44222493-44223058
  hypo
ctttagacggccccgcgcgtagactctgagcaggagggcagcaaagaccacagccacccccagccctcccaccacagtgacagtgtggccatagagaaggcaggaaagaaggatggcaaaggcctggcggagggtcatgatgatggtgaagacggcagccccaaactgcccaatggtgtaaaagatgaagagctggccacatgcggagcagatggagagtagcagggcatgggcagcaaactcactgtgtcgccccatgaagcgggttccctccagtagggccccctgttctagcagtgagcccactgtgaagaggcaggagaagaaattgaccccaaacatcatctgcaccgatgacatcttataggcaaacagggcatcctgccagtttgaggtgaagctgtcaaaagcaatataacctgccagtaagatgaggcctgagagtgtggtggctggggagctgcggggctctggtccgctggatagcagaaacatgctgaccccaatggagatgagggtggctgtcaggtactcccagtgttcgtagctgcgccgagacacaagc

SEQ ID NO: 153577 - DNA, 238 bp, Homo sapiens; identical to SEQ ID NO: 20403
  chr6:44227779-44228017
  hypo

SEQ ID NO: 153578 - DNA, 171 bp, Homo sapiens; identical to SEQ ID NO: 71699
  chr6:44229400-44229571
  hypo

SEQ ID NO: 153579 - DNA, 106 bp, Homo sapiens
  chr6:44250123-44250229
  hypo
ttgagcacacgcaggcggctgtggctcagcagcttggcagcacctcgtgcaccacggtctccaatgaggttttgtgacaagtccagctcctcgaggactgggtggt

SEQ ID NO: 153580 - DNA, 32 bp, Homo sapiens
  chr6:44375065-44375097
  hypo
cctttttttttttttttgagacggagtcttgc

SEQ ID NO: 153581 - DNA, 31 bp, Homo sapiens; identical to SEQ ID NO: 71701
  chr6:44376364-44376395
  hypo

SEQ ID NO: 153582 - DNA, 30 bp, Homo sapiens
  chr6:44413594-44413624
  hypo
gaggctagaggtaacgttatatattgaact

SEQ ID NO: 153583 - DNA, 31 bp, Homo sapiens; identical to SEQ ID NO: 71702
  chr6:44429408-44429439
  hypo

SEQ ID NO: 153584 - DNA, 30 bp, Homo sapiens; identical to SEQ ID NO: 20404
  chr6:44438427-44438457
  hypo

SEQ ID NO: 153585 - DNA, 128 bp, Homo sapiens; identical to SEQ ID NO: 71704
  chr6:44449534-44449662
  hypo

SEQ ID NO: 153586 - DNA, 255 bp, Homo sapiens
  chr6:44451223-44451478
  hypo
tggagctccccccaccgcctcccaccgccctccccgcccaaccgtgagatgcagatacattgtactcaaaatgtctgagcgtggtgtaattttgttctaaatcagatgccattttaacctgtattataccacgggccagtggcatttcagtagagacacgtgtacagtaggggaatgctttcatctgaaaatgttctacgctgtacgtgtacttccctcaagtagcagcgcacctccttccggggctgagtttga

SEQ ID NO: 153587 - DNA, 535 bp, Homo sapiens
  chr6:44695619-44696154
  hypo
atgagcgagcacgcacgcgtacacacgaggcacgcaggtgggcatgcgtgcgttaggtgtacctgtacacttgctgctcccctgatgatttgctcaacagtgtctgcaattggcagccagaaggagtccgcaagaagcaggagggttcggacctgagaccgcgccacaggaggaaggccaggatctgggagcgcaaggtgagtgcaggggaaaacagcctgagcaggtcttgagccagcttcctgctgcctggggcaatgatggcgtcaggcctgtggaaataagcgccaggtttgaatactcaaggacagtaaagccaattaaacaagtgggtgcccctctctccttttctgattaggcctctcaggccttgcgccatctcgtgctaggatgcctcttcagtctctttctcactacttttatcctcacgctctcagctctggtcgtgtgccctgccttggggcagacacctcctggactgcaccctgaaatgaatgtctgaagcctagccctgccctccggaaagaacagccag

SEQ ID NO: 153588 - DNA, 43 bp, Homo sapiens; identical to SEQ ID NO: 71706
  chr6:45030133-45030176
  hypo

SEQ ID NO: 153589 - DNA, 44 bp, Homo sapiens; identical to SEQ ID NO: 113423
  chr6:45390375-45390419
  hypo

SEQ ID NO: 153590 - DNA, 1003 bp, Homo sapiens; identical to SEQ ID NO: 113424
  chr6:45390538-45391541
  hypo

SEQ ID NO: 153591 - DNA, 40 bp, Homo sapiens
  chr6:45492175-45492215
  hypo
gtatctaaagcttatcgccatctcgcgctgtacccaaaac

SEQ ID NO: 153592 - DNA, 36 bp, Homo sapiens
  chr6:45492559-45492595
  hypo
atggtagaggctgggcgcggtggctcatgcttgtaa

SEQ ID NO: 153593 - DNA, 131 bp, Homo sapiens
  chr6:45544534-45544665
  hypo
atcaacaatgcccttttgatacgtcacagaagacggtaactatgacagcccatagaccacgcccactttacggccagccctctcagtccaggaacttgttgaaagttatcgtctcaaaaattctgtcacaa

SEQ ID NO: 153594 - DNA, 320 bp, Homo sapiens
  chr6:45608782-45609102
  hypo
actcactttgtcggcggagggtcaggactggccctgtagtctgctcataggacctggctgtcacccacaggcaattcatcctgaccgcgtctgcaactgtgtatggaaaacaacagcagtcgctttaacagcaaaagcaacaaacacacaccaaacgggatcatccctgtgctcccaggtggtgggaggcagatacgggagggaggacacattttcctgcgatattgaataagatgagcaatggttattttgggccagtctccagcaagcatttggagagcgcctcagaactgcagatgaagccccggattgactttatt

SEQ ID NO: 153595 - DNA, 30 bp, Homo sapiens
  chr6:45609423-45609453
  hypo
ggcttccttgccacccgcctgctgcggagg

SEQ ID NO: 153596 - DNA, 37 bp, Homo sapiens; identical to SEQ ID NO: 43021
  chr6:45631098-45631135
  hypo

SEQ ID NO: 153597 - DNA, 23 bp, Homo sapiens
  chr6:45631602-45631625
  hypo
cgtttcagcgtgaaacagacccg

SEQ ID NO: 153598 - DNA, 30 bp, Homo sapiens
  chr6:45924613-45924643
  hypo
cgctacaccttcccacggaggtaaagttac

SEQ ID NO: 153599 - DNA, 373 bp, Homo sapiens; identical to SEQ ID NO: 113428
  chr6:46097248-46097621
  hypo

SEQ ID NO: 153600 - DNA, 535 bp, Homo sapiens; identical to SEQ ID NO: 113429
  chr6:46097694-46098229
  hypo

SEQ ID NO: 153601 - DNA, 30 bp, Homo sapiens
  chr6:46655291-46655321
  hypo
gctcctgcgtttctcgttcccgtcgggaac

SEQ ID NO: 153602 - DNA, 30 bp, Homo sapiens
  chr6:46656597-46656627
  hypo
cagctgcagctgggcgtgacggaggccgtg

SEQ ID NO: 153603 - DNA, 30 bp, Homo sapiens; identical to SEQ ID NO: 71714
  chr6:46657166-46657196
  hypo

SEQ ID NO: 153604 - DNA, 24 bp, Homo sapiens
  chr6:46783944-46783968
  hypo
gattacaggcgtgagccaccatta

SEQ ID NO: 153605 - DNA, 88 bp, Homo sapiens; identical to SEQ ID NO: 113435
  chr6:46816764-46816852
  hypo

SEQ ID NO: 153606 - DNA, 32 bp, Homo sapiens; identical to SEQ ID NO: 20411
  chr6:46951821-46951853
  hypo

SEQ ID NO: 153607 - DNA, 32 bp, Homo sapiens; identical to SEQ ID NO: 71718
  chr6:46952092-46952124
  hypo

SEQ ID NO: 153608 - DNA, 153 bp, Homo sapiens; identical to SEQ ID NO: 71719
  chr6:47084372-47084525
  hypo

SEQ ID NO: 153609 - DNA, 632 bp, Homo sapiens
  chr6:47201997-47202629
  hypo
ctgctgcgcacggcctaaaacctgtacttctgactctcaagataagttcaactttaaatctttggatacagcaagcttggtaaataattttcaaaaatcttgccagactacattttatcaggccttccccgaaacacacatttgatagcatcatgaggataaagggtggccgatagctctccaccgggcagtgcgagctgcaaagattttggaggcgtgtcttcgccagccaatggcgaggttactctcgggccagcgtatcttgaagttttggactggtcttcctgggcaggtaattcagatgactcaactctcagctacaactggactgtggacggggagggacgaatcccaggggctctttggggggtttaagtgcgtgtgtgaggtctgctgcgatgcccgtacctttggtaataaaggaaccgttcctgctcagcgcggaggagccgctggatgtagagtcacagcggagaaggggctccgactcatccacgaagaagcccttgttcttgtcctgtggggaaggctccaccgtcaggagagcggaattctcaagtttcgcgttggggctggggatggggctcgggctaagcgggctggggctcatcgggagagctagtttgtcagtt

SEQ ID NO: 153610 - DNA, 25 bp, Homo sapiens
  chr6:47205763-47205788
  hypo
cgacggagtgagactctgtctcaaa

SEQ ID NO: 153611 - DNA, 81 bp, Homo sapiens
  chr6:47221021-47221102
  hypo
cttctccacaacatcgtttctccggtgctggcgcagggcgctaattagctgggcgaggctggcctcggggccccggatggt

SEQ ID NO: 153612 - DNA, 30 bp, Homo sapiens
  chr6:47370298-47370328
  hypo
gtttacattagggtgcgcctcaattccaca

SEQ ID NO: 153613 - DNA, 42 bp, Homo sapiens
  chr6:47412330-47412372
  hypo
agcctcgactcggcatcagagggagaccgtggaaagtgcgag

SEQ ID NO: 153614 - DNA, 30 bp, Homo sapiens; identical to SEQ ID NO: 4848
  chr6:47413210-47413240
  hypo

SEQ ID NO: 153615 - DNA, 30 bp, Homo sapiens; identical to SEQ ID NO: 71724
  chr6:47452720-47452750
  hypo

SEQ ID NO: 153616 - DNA, 177 bp, Homo sapiens; identical to SEQ ID NO: 71725
  chr6:47539955-47540132
  hypo

SEQ ID NO: 153617 - DNA, 30 bp, Homo sapiens; identical to SEQ ID NO: 4849
  chr6:47655314-47655344
  hypo

SEQ ID NO: 153618 - DNA, 22 bp, Homo sapiens
  chr6:48788421-48788443
  hypo
cgacagagtgagacactgtctc

SEQ ID NO: 153619 - DNA, 96 bp, Homo sapiens
  chr6:49221777-49221873
  hypo
cctgcctcagcctcccgtgcactcacatttctattacacacacacacaagcatgcatattttatttgaagtgttaaaaatgaagaaactggccggg

SEQ ID NO: 153620 - DNA, 145 bp, Homo sapiens; identical to SEQ ID NO: 71728
  chr6:49453724-49453869
  hypo

SEQ ID NO: 153621 - DNA, 31 bp, Homo sapiens; identical to SEQ ID NO: 71729
  chr6:49527737-49527768
  hypo

SEQ ID NO: 153622 - DNA, 17 bp, Homo sapiens
  chr6:49590554-49590571
  hypo
ttgttttgttttgagac

SEQ ID NO: 153623 - DNA, 30 bp, Homo sapiens
  chr6:49681056-49681086
  hypo
gtgccctccagatgccggaagaggagcgaa

SEQ ID NO: 153624 - DNA, 99 bp, Homo sapiens; identical to SEQ ID NO: 20415
  chr6:49708446-49708545
  hypo

SEQ ID NO: 153625 - DNA, 30 bp, Homo sapiens; identical to SEQ ID NO: 20416
  chr6:49755175-49755205
  hypo

SEQ ID NO: 153626 - DNA, 225 bp, Homo sapiens
  chr6:52141054-52141279
  hypo
attccacttaccctgccgtagacagggttggcagctgccaaaacactgcagcgggcattcagccgagcatggatgccagccttggcaatggtcactcgaccctgctccatcacttcatggatggctgtgcgatccatgtcagacattttgtcaaattcatcaatgcaaaccacgcctcggtcagccaggaccatggcccctgcttccagacggcgctctcctggg

SEQ ID NO: 153627 - DNA, 46 bp, Homo sapiens; identical to SEQ ID NO: 113480
  chr6:52156895-52156941
  hypo

SEQ ID NO: 153628 - DNA, 37 bp, Homo sapiens
  chr6:52161689-52161726
  hypo
ttaaccacagaatgaacgattgctgggcttttttttt

SEQ ID NO: 153629 - DNA, 143 bp, Homo sapiens
  chr6:52171804-52171947
  hypo
tcttaaactggaaaacctcggtatgtcaaggcctgcacttcatgtgtccgggcccagatgaactgaggactgacctcaaatgcctcgctcacctggctcccagctcacctgggagaagcgtttctgttcgcggaacctgaact

SEQ ID NO: 153630 - DNA, 1353 bp, Homo sapiens; identical to SEQ ID NO: 113481
  chr6:52226691-52228044
  hypo

SEQ ID NO: 153631 - DNA, 414 bp, Homo sapiens
  chr6:52267885-52268299
  hypo
ccatagttccttgtccgtcttagctgcattcgtgtctcactgcggctttgccaattttcctttcttttctgcaggttgcataccctgtcctgagggcgcggcacggagtgcatgcgggccgctgccatgacgaccgccatcttggagcgcctgagcaccctgtcggtcagcgggcagcagctgcgccgcctgcccaagatcctggaggatgggcttcccaagatgccttgcactgtcccagaaacggatgtgccccagctcttccgggagccttacatccgcaccggctaccgccccacggggcacgagtggcgctactacttcttcagcctctttcagaaacacaacgaggtggtcaacgtctggacccatttactggcagccctggccgtcctcttgcgattctgggccttt

SEQ ID NO: 153632 - DNA, 30 bp, Homo sapiens; identical to SEQ ID NO: 71739
  chr6:52288808-52288838
  hypo

SEQ ID NO: 153633 - DNA, 297 bp, Homo sapiens; identical to SEQ ID NO: 20421
  chr6:52344288-52344585
  hypo

SEQ ID NO: 153634 - DNA, 25 bp, Homo sapiens
  chr6:52393651-52393676
  hypo
ctgctcacactgccttacaaacgtg

SEQ ID NO: 153635 - DNA, 24 bp, Homo sapiens
  chr6:52393975-52393999
  hypo
accgtgcccagccacaaatgtgta

SEQ ID NO: 153636 - DNA, 152 bp, Homo sapiens; identical to SEQ ID NO: 71743
  chr6:52409342-52409494
  hypo

SEQ ID NO: 153637 - DNA, 200 bp, Homo sapiens; identical to SEQ ID NO: 113483
  chr6:52441277-52441477
  hypo

SEQ ID NO: 153638 - DNA, 30 bp, Homo sapiens; identical to SEQ ID NO: 113484
  chr6:52441524-52441554
  hypo

SEQ ID NO: 153639 - DNA, 40 bp, Homo sapiens
  chr6:52442475-52442515
  hypo
ccctaggggagctttcgctccaatgcggggagagggtgga

SEQ ID NO: 153640 - DNA, 22 bp, Homo sapiens
  chr6:52527456-52527478
  hypo
gatctgggccgggcacggtggc

SEQ ID NO: 153641 - DNA, 19 bp, Homo sapiens
  chr6:52694101-52694120
  hypo
gaaatggcgggctgcacgt

SEQ ID NO: 153642 - DNA, 98 bp, Homo sapiens; identical to SEQ ID NO: 71746
  chr6:52769064-52769162
  hypo

SEQ ID NO: 153643 - DNA, 44 bp, Homo sapiens
  chr6:52856824-52856868
  hypo
ttacaggtgtgagccaccgtgccggctggttaataccatttttc

SEQ ID NO: 153644 - DNA, 212 bp, Homo sapiens; identical to SEQ ID NO: 113489
  chr6:52859557-52859769
  hypo

SEQ ID NO: 153645 - DNA, 18 bp, Homo sapiens
  chr6:52862526-52862544
  hypo
tcacgcccctgcagtaca

SEQ ID NO: 153646 - DNA, 30 bp, Homo sapiens
  chr6:52878445-52878475
  hypo
tctgggctgctcaccgactgtggatgcttg

SEQ ID NO: 153647 - DNA, 30 bp, Homo sapiens
  chr6:52917648-52917678
  hypo
agtggaagaaatgtccgtacctcttcaggc

SEQ ID NO: 153648 - DNA, 30 bp, Homo sapiens
  chr6:52926086-52926116
  hypo
tagtcagggaaattccgaaagcaagtcctc

SEQ ID NO: 153649 - DNA, 121 bp, Homo sapiens; identical to SEQ ID NO: 71748
  chr6:52928886-52929007
  hypo

SEQ ID NO: 153650 - DNA, 30 bp, Homo sapiens
  chr6:52998854-52998884
  hypo
ctaagctctactcacgctgctgcttctgcc

SEQ ID NO: 153651 - DNA, 31 bp, Homo sapiens; identical to SEQ ID NO: 71749
  chr6:53024100-53024131
  hypo

SEQ ID NO: 153652 - DNA, 92 bp, Homo sapiens
  chr6:53052067-53052159
  hypo
aaaaggatagccaggacacttcgcagggcctcaagagcctccacctgtatttcttcctcattcctcccaagtttacttgtcgcaggtagaaa

SEQ ID NO: 153653 - DNA, 30 bp, Homo sapiens
  chr6:53075173-53075203
  hypo
actttgtgtataacacgctattttcaccat

SEQ ID NO: 153654 - DNA, 207 bp, Homo sapiens; identical to SEQ ID NO: 20425
  chr6:53111000-53111207
  hypo

SEQ ID NO: 153655 - DNA, 157 bp, Homo sapiens; identical to SEQ ID NO: 71752
  chr6:53139850-53140007
  hypo

SEQ ID NO: 153656 - DNA, 44 bp, Homo sapiens; identical to SEQ ID NO: 71753
  chr6:53154514-53154558
  hypo

SEQ ID NO: 153657 - DNA, 87 bp, Homo sapiens
  chr6:53188588-53188675
  hypo
caggctggtctcgaactcccgaccatctgaccgaccatcgggccatgcccgaccattacgggcatgggccaccgcacccggcccaat

SEQ ID NO: 153658 - DNA, 1865 bp, Homo sapiens; identical to SEQ ID NO: 4871
  chr6:53212357-53214222
  hypo

SEQ ID NO: 153659 - DNA, 121 bp, Homo sapiens; identical to SEQ ID NO: 71755
  chr6:53219593-53219714
  hypo

SEQ ID NO: 153660 - DNA, 31 bp, Homo sapiens; identical to SEQ ID NO: 71756
  chr6:53290504-53290535
  hypo

SEQ ID NO: 153661 - DNA, 709 bp, Homo sapiens; identical to SEQ ID NO: 71757
  chr6:53385074-53385783
  hypo

SEQ ID NO: 153662 - DNA, 81 bp, Homo sapiens
  chr6:53406019-53406100
  hypo
aaagaaaaaaagaaatgtagagaggtaccacaatggagaattagtatctgcatcccagatcaagggcgggaggtagaacaa

SEQ ID NO: 153663 - DNA, 539 bp, Homo sapiens; identical to SEQ ID NO: 43077
  chr6:53409552-53410091
  hypo

SEQ ID NO: 153664 - DNA, 31 bp, Homo sapiens; identical to SEQ ID NO: 71760
  chr6:53519303-53519334
  hypo

SEQ ID NO: 153665 - DNA, 470 bp, Homo sapiens; identical to SEQ ID NO: 113503
  chr6:53660403-53660873
  hypo

SEQ ID NO: 153666 - DNA, 62 bp, Homo sapiens; identical to SEQ ID NO: 113504
  chr6:53660908-53660970
  hypo

SEQ ID NO: 153667 - DNA, 31 bp, Homo sapiens; identical to SEQ ID NO: 71761
  chr6:53725818-53725849
  hypo

SEQ ID NO: 153668 - DNA, 88 bp, Homo sapiens
  chr6:53787619-53787707
  hypo
gtcttcctctgctgtcgagacgttcctgtctgcttcccgggagcctcacgtgctccttgtcctaaccagcccccgcgcgccatcttcc

SEQ ID NO: 153669 - DNA, 30 bp, Homo sapiens; identical to SEQ ID NO: 4875
  chr6:54835453-54835483
  hypo

SEQ ID NO: 153670 - DNA, 100 bp, Homo sapiens
  chr6:55010119-55010219
  hypo
cattccacgtatccacggaagatgtcctggctctctaatgaggcatacaaagtcgtctcataacattctttgtttttttttttgtttttttgtttgtttt

SEQ ID NO: 153671 - DNA, 20 bp, Homo sapiens
  chr6:55445498-55445518
  hypo
caccgcgcccagccggatgt

SEQ ID NO: 153672 - DNA, 113 bp, Homo sapiens; identical to SEQ ID NO: 71764
  chr6:56295531-56295644
  hypo

SEQ ID NO: 153673 - DNA, 75 bp, Homo sapiens; identical to SEQ ID NO: 71765
  chr6:56297180-56297255
  hypo

SEQ ID NO: 153674 - DNA, 30 bp, Homo sapiens; identical to SEQ ID NO: 71766
  chr6:56391200-56391230
  hypo

SEQ ID NO: 153675 - DNA, 2018 bp, Homo sapiens; identical to SEQ ID NO: 113514
  chr6:56818397-56820415
  hypo

SEQ ID NO: 153676 - DNA, 148 bp, Homo sapiens; identical to SEQ ID NO: 20432
  chr6:56894235-56894383
  hypo

SEQ ID NO: 153677 - DNA, 30 bp, Homo sapiens; identical to SEQ ID NO: 71769
  chr6:56910296-56910326
  hypo

SEQ ID NO: 153678 - DNA, 26 bp, Homo sapiens
  chr6:56972904-56972930
  hypo
gggattacaggcgtgagccacagtgc

SEQ ID NO: 153679 - DNA, 60 bp, Homo sapiens; identical to SEQ ID NO: 71771
  chr6:57042599-57042659
  hypo

SEQ ID NO: 153680 - DNA, 8 bp, Homo sapiens
  chr6:57042734-57042742
  hypo
gttttgtc

SEQ ID NO: 153681 - DNA, 92 bp, Homo sapiens
  chr6:57085533-57085625
  hypo
gttttttttctgtggcgggggagcgatagatttgttctacatccttactgtagtggtggttacatgagtctaaaattcgcagaactgtacat

SEQ ID NO: 153682 - DNA, 156 bp, Homo sapiens
  chr6:57096922-57097078
  hypo
aatgcaagacaaaacaagttccgcaaaacaaaacaagcgttccgttgttgtattaatgatggttatagacatcgagtttcagagccacgttgatgagtccagattctggtcctcaaatttgtaagtttaaaaattaaaattttagggactgggcgt

SEQ ID NO: 153683 - DNA, 92 bp, Homo sapiens; identical to SEQ ID NO: 71774
  chr6:57111927-57112019
  hypo

SEQ ID NO: 153684 - DNA, 19 bp, Homo sapiens
  chr6:57343641-57343660
  hypo
tttattacattcggccggg

SEQ ID NO: 153685 - DNA, 145 bp, Homo sapiens; identical to SEQ ID NO: 71775
  chr6:57726145-57726290
  hypo

SEQ ID NO: 153686 - DNA, 24 bp, Homo sapiens
  chr6:57726469-57726493
  hypo
tccgtcttaaaaaaaaaaaaaaaa

SEQ ID NO: 153687 - DNA, 30 bp, Homo sapiens; identical to SEQ ID NO: 4886
  chr6:57943180-57943210
  hypo

SEQ ID NO: 153688 - DNA, 112 bp, Homo sapiens
  chr6:58002344-58002456
  hypo
ggtgtacaccttctgcgatattgaaagtaatatcaccctctccccccatccccccgcttatgagaaacgataccacaggggaggtgtacactccctccgacaatgggagtaa

SEQ ID NO: 153689 - DNA, 30 bp, Homo sapiens; identical to SEQ ID NO: 43096
  chr6:58180191-58180221
  hypo

SEQ ID NO: 153690 - DNA, 26 bp, Homo sapiens
  chr6:58559005-58559031
  hypo
tattcggccatcgtggctccacgagt

SEQ ID NO: 153691 - DNA, 419 bp, Homo sapiens; identical to SEQ ID NO: 113530
  chr6:62995455-62995874
  hypo

SEQ ID NO: 153692 - DNA, 453 bp, Homo sapiens; identical to SEQ ID NO: 4889
  chr6:62996077-62996530
  hypo

SEQ ID NO: 153693 - DNA, 31 bp, Homo sapiens; identical to SEQ ID NO: 71781
  chr6:63347183-63347214
  hypo

SEQ ID NO: 153694 - DNA, 30 bp, Homo sapiens; identical to SEQ ID NO: 71782
  chr6:63921443-63921473
  hypo

SEQ ID NO: 153695 - DNA, 218 bp, Homo sapiens; identical to SEQ ID NO: 71783
  chr6:64150630-64150848
  hypo

SEQ ID NO: 153696 - DNA, 97 bp, Homo sapiens; identical to SEQ ID NO: 71784
  chr6:64151087-64151184
  hypo

SEQ ID NO: 153697 - DNA, 53 bp, Homo sapiens; identical to SEQ ID NO: 43101
  chr6:64283087-64283140
  hypo

SEQ ID NO: 153698 - DNA, 30 bp, Homo sapiens; identical to SEQ ID NO: 20440
  chr6:64289954-64289984
  hypo

SEQ ID NO: 153699 - DNA, 101 bp, Homo sapiens
  chr6:64354746-64354847
  hypo
catcctttccctattcgtggccccaggcagtcactaatttgttggattttttttttttttttgggcacaggttctggctcttttgccaggctggagtgcag

SEQ ID NO: 153700 - DNA, 31 bp, Homo sapiens; identical to SEQ ID NO: 20442
  chr6:65212134-65212165
  hypo

SEQ ID NO: 153701 - DNA, 31 bp, Homo sapiens; identical to SEQ ID NO: 20443
  chr6:65212404-65212435
  hypo

SEQ ID NO: 153702 - DNA, 490 bp, Homo sapiens; identical to SEQ ID NO: 71790
  chr6:66497654-66498144
  hypo

SEQ ID NO: 153703 - DNA, 43 bp, Homo sapiens
  chr6:66948546-66948589
  hypo
tttaatttcattctgcgctacttggcaccgttgtaatcattaa

SEQ ID NO: 153704 - DNA, 2027 bp, Homo sapiens; identical to SEQ ID NO: 113536
  chr6:69344102-69346129
  hypo

SEQ ID NO: 153705 - DNA, 30 bp, Homo sapiens; identical to SEQ ID NO: 4894
  chr6:69454973-69455003
  hypo

SEQ ID NO: 153706 - DNA, 43 bp, Homo sapiens; identical to SEQ ID NO: 71793
  chr6:69882239-69882282
  hypo

SEQ ID NO: 153707 - DNA, 30 bp, Homo sapiens; identical to SEQ ID NO: 20446
  chr6:70507772-70507802
  hypo

SEQ ID NO: 153708 - DNA, 42 bp, Homo sapiens; identical to SEQ ID NO: 71795
  chr6:70515894-70515936
  hypo

SEQ ID NO: 153709 - DNA, 23 bp, Homo sapiens
  chr6:71121842-71121865
  hypo
tggtacaagccaggcacggtgtc

SEQ ID NO: 153710 - DNA, 23 bp, Homo sapiens
  chr6:71122104-71122127
  hypo
ctgggcgacggagcaatgctctg

SEQ ID NO: 153711 - DNA, 30 bp, Homo sapiens; identical to SEQ ID NO: 71798
  chr6:71122578-71122608
  hypo

SEQ ID NO: 153712 - DNA, 566 bp, Homo sapiens; identical to SEQ ID NO: 43112
  chr6:71123137-71123703
  hypo

SEQ ID NO: 153713 - DNA, 304 bp, Homo sapiens; identical to SEQ ID NO: 43113
  chr6:71123746-71124050
  hypo

SEQ ID NO: 153714 - DNA, 20 bp, Homo sapiens
  chr6:71246929-71246949
  hypo
cctggccttgatttgccttt

SEQ ID NO: 153715 - DNA, 63 bp, Homo sapiens
  chr6:71521662-71521725
  hypo
gggtagcgtataaagcgtggatgtgctggacaaagggatgattcacatcgctgggacaatatt

SEQ ID NO: 153716 - DNA, 39 bp, Homo sapiens; identical to SEQ ID NO: 71802
  chr6:71544652-71544691
  hypo

SEQ ID NO: 153717 - DNA, 184 bp, Homo sapiens
  chr6:71556090-71556274
  hypo
ggactggtcatggctcggggctataaaagtggtgccagcgaggagtaaagaggcttctggagtactggggcatgcctgttcagcctaagaacattccgatgccataaaaactaaaaatgaaaaggataagatgcttgggaaggcttctactttgcagcccctggattagcggaacatttggagg

SEQ ID NO: 153718 - DNA, 1229 bp, Homo sapiens; identical to SEQ ID NO: 113550
  chr6:71665451-71666680
  hypo

SEQ ID NO: 153719 - DNA, 38 bp, Homo sapiens; identical to SEQ ID NO: 71804
  chr6:71874696-71874734
  hypo

SEQ ID NO: 153720 - DNA, 87 bp, Homo sapiens; identical to SEQ ID NO: 71805
  chr6:71874758-71874845
  hypo

SEQ ID NO: 153721 - DNA, 121 bp, Homo sapiens
  chr6:71955554-71955675
  hypo
aattctgccttgtcccgccaccgatggcctgccgatgtctgctggtgtctgtgtgtttgcttttctgctcctcttgacgaccagccatttgtgtctgtgcccgctacggtctctcgggttt

SEQ ID NO: 153722 - DNA, 282 bp, Homo sapiens; identical to SEQ ID NO: 113553
  chr6:72129567-72129849
  hypo

SEQ ID NO: 153723 - DNA, 118 bp, Homo sapiens; identical to SEQ ID NO: 4905
  chr6:72129926-72130044
  hypo

SEQ ID NO: 153724 - DNA, 308 bp, Homo sapiens; identical to SEQ ID NO: 4906
  chr6:72130190-72130498
  hypo

SEQ ID NO: 153725 - DNA, 230 bp, Homo sapiens; identical to SEQ ID NO: 20458
  chr6:72806768-72806998
  hypo

SEQ ID NO: 153726 - DNA, 66 bp, Homo sapiens
  chr6:73319960-73320026
  hypo
aaccagaaacaccaccggacattgcaaatatcatctgcggggcaaaattaccgctgttgtaaagaa

SEQ ID NO: 153727 - DNA, 1069 bp, Homo sapiens; identical to SEQ ID NO: 113559
  chr6:73330781-73331850
  hypo

SEQ ID NO: 153728 - DNA, 1246 bp, Homo sapiens; identical to SEQ ID NO: 43124
  chr6:73331875-73333121
  hypo

SEQ ID NO: 153729 - DNA, 30 bp, Homo sapiens; identical to SEQ ID NO: 71813
  chr6:73435929-73435959
  hypo

SEQ ID NO: 153730 - DNA, 71 bp, Homo sapiens
  chr6:73843278-73843349
  hypo
gcagaagagctggagcttcaacgaccgaacccgcttccggccctcgctgcgcctcaaaagttctcagccaa

SEQ ID NO: 153731 - DNA, 30 bp, Homo sapiens; identical to SEQ ID NO: 71814
  chr6:73870159-73870189
  hypo

SEQ ID NO: 153732 - DNA, 243 bp, Homo sapiens
  chr6:73934978-73935221
  hypo
aaaaacagatgaaggaggggacgtgggcaaaggccactcaccgaagatgagctcctcctggtcctcttccatgtggaacaccattggagaatgaaagttttcgggcagggtccaccacggctccttgctgagagcactcgttcccacggccatgctgtgctcccacctgattcagaataggggaaagtctaacaaactggttggcaaaagacttggaaaagcgaggaagggcctaggctctgt

SEQ ID NO: 153733 - DNA, 105 bp, Homo sapiens
  chr6:73940903-73941008
  hypo
agccaggaaacattaatattaaaaaaaaaaaaaactttccaaaatatctgtacaaagcatggatagttccataaaacggtcaaataatcacgaacactcccttct

SEQ ID NO: 153734 - DNA, 502 bp, Homo sapiens; identical to SEQ ID NO: 113561
  chr6:73972641-73973143
  hypo

SEQ ID NO: 153735 - DNA, 43 bp, Homo sapiens; identical to SEQ ID NO: 71817
  chr6:74016435-74016478
  hypo

SEQ ID NO: 153736 - DNA, 853 bp, Homo sapiens; identical to SEQ ID NO: 43126
  chr6:74019357-74020210
  hypo

SEQ ID NO: 153737 - DNA, 58 bp, Homo sapiens; identical to SEQ ID NO: 20463
  chr6:74025142-74025200
  hypo

SEQ ID NO: 153738 - DNA, 30 bp, Homo sapiens; identical to SEQ ID NO: 71820
  chr6:74074121-74074151
  hypo

SEQ ID NO: 153739 - DNA, 30 bp, Homo sapiens
  chr6:74077647-74077677
  hypo
cccatgccggacacccgtgcagcctcgcct

SEQ ID NO: 153740 - DNA, 218 bp, Homo sapiens; identical to SEQ ID NO: 71821
  chr6:74079516-74079734
  hypo

SEQ ID NO: 153741 - DNA, 91 bp, Homo sapiens
  chr6:74097679-74097770
  hypo
cctcctgtgttccagcgattctcatgcctcagtgcctcagccatccgattacctgggacgacaggcatgcggcaccacaccaagctaattt

SEQ ID NO: 153742 - DNA, 23 bp, Homo sapiens
  chr6:74135419-74135442
  hypo
ggcgtggtgacacaacgcctgta

SEQ ID NO: 153743 - DNA, 266 bp, Homo sapiens; identical to SEQ ID NO: 43129
  chr6:74161232-74161498
  hypo

SEQ ID NO: 153744 - DNA, 113 bp, Homo sapiens; identical to SEQ ID NO: 4916
  chr6:74161684-74161797
  hypo

SEQ ID NO: 153745 - DNA, 235 bp, Homo sapiens; identical to SEQ ID NO: 113567
  chr6:74161830-74162065
  hypo

SEQ ID NO: 153746 - DNA, 208 bp, Homo sapiens
  chr6:74191758-74191966
  hypo
gtagggtgtgatagccggaatcaacgccagtcttcgggtcagtcgcaagcctccctttgtggttagccgaacagaaggttacataggagtcttgattgatgacctcactactctgggcaccagtgaaccataccgcatgtttaccagccgagtagagttccgtttgtcactgcgccctgataatgctgacagccggctcacactgcga

SEQ ID NO: 153747 - DNA, 39 bp, Homo sapiens; identical to SEQ ID NO: 71825
  chr6:74234188-74234227
  hypo

SEQ ID NO: 153748 - DNA, 611 bp, Homo sapiens; identical to SEQ ID NO: 113572
  chr6:74405593-74406204
  hypo

SEQ ID NO: 153749 - DNA, 19 bp, Homo sapiens
  chr6:75756094-75756113
  hypo
gtaagaatggctattgttg

SEQ ID NO: 153750 - DNA, 30 bp, Homo sapiens
  chr6:75893678-75893708
  hypo
gtcgcgaacactgagcgtggttgtctgagg

SEQ ID NO: 153751 - DNA, 78 bp, Homo sapiens
  chr6:75985976-75986054
  hypo
taaataaagtgtttacctgagttctatgagccgctctagcaaataaagcaaactcaaggagggcgtcatggaaacacc

SEQ ID NO: 153752 - DNA, 38 bp, Homo sapiens; identical to SEQ ID NO: 71828
  chr6:75995668-75995706
  hypo

SEQ ID NO: 153753 - DNA, 30 bp, Homo sapiens
  chr6:76063324-76063354
  hypo
tctcgttctctaactcgtatacggtgcgcc

SEQ ID NO: 153754 - DNA, 21 bp, Homo sapiens
  chr6:76234817-76234838
  hypo
tttttttttttttttttgaga

SEQ ID NO: 153755 - DNA, 87 bp, Homo sapiens; identical to SEQ ID NO: 4925
  chr6:76458863-76458950
  hypo

SEQ ID NO: 153756 - DNA, 43 bp, Homo sapiens; identical to SEQ ID NO: 71831
  chr6:76468480-76468523
  hypo

SEQ ID NO: 153757 - DNA, 36 bp, Homo sapiens; identical to SEQ ID NO: 71832
  chr6:76541352-76541388
  hypo

SEQ ID NO: 153758 - DNA, 30 bp, Homo sapiens
  chr6:78389472-78389502
  hypo
tccccaagacagtctcgctccgtctcccag

SEQ ID NO: 153759 - DNA, 30 bp, Homo sapiens
  chr6:79708767-79708797
  hypo
acaaggtagcatttgcgctgagatttaaat

SEQ ID NO: 153760 - DNA, 178 bp, Homo sapiens; identical to SEQ ID NO: 71833
  chr6:79767962-79768140
  hypo

SEQ ID NO: 153761 - DNA, 22 bp, Homo sapiens
  chr6:79879551-79879573
  hypo
acagtatcatgcctggcgctgt

SEQ ID NO: 153762 - DNA, 18 bp, Homo sapiens
  chr6:80235956-80235974
  hypo
ataatattaaaacaaatt

SEQ ID NO: 153763 - DNA, 30 bp, Homo sapiens; identical to SEQ ID NO: 71836
  chr6:80268289-80268319
  hypo

SEQ ID NO: 153764 - DNA, 36 bp, Homo sapiens; identical to SEQ ID NO: 71837
  chr6:80380889-80380925
  hypo

SEQ ID NO: 153765 - DNA, 1134 bp, Homo sapiens; identical to SEQ ID NO: 113606
  chr6:80656570-80657704
  hypo

SEQ ID NO: 153766 - DNA, 30 bp, Homo sapiens; identical to SEQ ID NO: 4939
  chr6:81814308-81814338
  hypo

SEQ ID NO: 153767 - DNA, 30 bp, Homo sapiens; identical to SEQ ID NO: 43168
  chr6:82128370-82128400
  hypo

SEQ ID NO: 153768 - DNA, 25 bp, Homo sapiens
  chr6:82560663-82560688
  hypo
agcgagactccgttaaaaaaaaaaa

SEQ ID NO: 153769 - DNA, 42 bp, Homo sapiens; identical to SEQ ID NO: 71842
  chr6:82588583-82588625
  hypo

SEQ ID NO: 153770 - DNA, 43 bp, Homo sapiens; identical to SEQ ID NO: 71843
  chr6:82936652-82936695
  hypo

SEQ ID NO: 153771 - DNA, 29 bp, Homo sapiens
  chr6:82958621-82958650
  hypo
taagttggccgggcgcggtggctcacgcc

SEQ ID NO: 153772 - DNA, 30 bp, Homo sapiens; identical to SEQ ID NO: 4944
  chr6:82968453-82968483
  hypo

SEQ ID NO: 153773 - DNA, 19 bp, Homo sapiens
  chr6:83757501-83757520
  hypo
gttcaataatctgcattaa

SEQ ID NO: 153774 - DNA, 44 bp, Homo sapiens
  chr6:83901418-83901462
  hypo
aaacatcggccgggagcggtggctcacgccagtaatcttagcac

SEQ ID NO: 153775 - DNA, 155 bp, Homo sapiens; identical to SEQ ID NO: 113623
  chr6:84417908-84418063
  hypo

SEQ ID NO: 153776 - DNA, 528 bp, Homo sapiens; identical to SEQ ID NO: 4949
  chr6:84418260-84418788
  hypo

SEQ ID NO: 153777 - DNA, 86 bp, Homo sapiens; identical to SEQ ID NO: 20474
  chr6:84513478-84513564
  hypo

SEQ ID NO: 153778 - DNA, 30 bp, Homo sapiens; identical to SEQ ID NO: 20475
  chr6:84621443-84621473
  hypo

SEQ ID NO: 153779 - DNA, 30 bp, Homo sapiens
  chr6:86200325-86200355
  hypo
tagcgtgcaccgctacggccagtccactgg

SEQ ID NO: 153780 - DNA, 106 bp, Homo sapiens; identical to SEQ ID NO: 71852
  chr6:86302344-86302450
  hypo

SEQ ID NO: 153781 - DNA, 30 bp, Homo sapiens; identical to SEQ ID NO: 71853
  chr6:86324288-86324318
  hypo

SEQ ID NO: 153782 - DNA, 30 bp, Homo sapiens
  chr6:86324672-86324702
  hypo
ccgcggccacccctcgcaccacgtaccccg

SEQ ID NO: 153783 - DNA, 78 bp, Homo sapiens; identical to SEQ ID NO: 20477
  chr6:86325373-86325451
  hypo

SEQ ID NO: 153784 - DNA, 18 bp, Homo sapiens
  chr6:86325510-86325528
  hypo
gagcgagactctgactca

SEQ ID NO: 153785 - DNA, 21 bp, Homo sapiens
  chr6:86356949-86356970
  hypo
ccaccgcgcccggcggcacta

SEQ ID NO: 153786 - DNA, 24 bp, Homo sapiens
  chr6:86653087-86653111
  hypo
tttttttttttttttttgagacgg

SEQ ID NO: 153787 - DNA, 83 bp, Homo sapiens; identical to SEQ ID NO: 71857
  chr6:86653350-86653433
  hypo

SEQ ID NO: 153788 - DNA, 47 bp, Homo sapiens; identical to SEQ ID NO: 71858
  chr6:86915707-86915754
  hypo

SEQ ID NO: 153789 - DNA, 29 bp, Homo sapiens
  chr6:87321736-87321765
  hypo
gaggattcggtctcaaaaaaaaaaaaaaa

SEQ ID NO: 153790 - DNA, 82 bp, Homo sapiens
  chr6:87725862-87725944
  hypo
gatctagatcacccaggagaacgtcagcagatctctagcaccagggaacggaaggcagcacgcatcctggggctgattctgg

SEQ ID NO: 153791 - DNA, 30 bp, Homo sapiens; identical to SEQ ID NO: 113654
  chr6:87832006-87832036
  hypo

SEQ ID NO: 153792 - DNA, 146 bp, Homo sapiens; identical to SEQ ID NO: 113655
  chr6:87832385-87832531
  hypo

SEQ ID NO: 153793 - DNA, 121 bp, Homo sapiens; identical to SEQ ID NO: 20479
  chr6:87890685-87890806
  hypo

SEQ ID NO: 153794 - DNA, 32 bp, Homo sapiens; identical to SEQ ID NO: 20480
  chr6:88039270-88039302
  hypo

SEQ ID NO: 153795 - DNA, 31 bp, Homo sapiens; identical to SEQ ID NO: 71862
  chr6:88068031-88068062
  hypo

SEQ ID NO: 153796 - DNA, 31 bp, Homo sapiens; identical to SEQ ID NO: 71863
  chr6:88068301-88068332
  hypo

SEQ ID NO: 153797 - DNA, 31 bp, Homo sapiens; identical to SEQ ID NO: 71864
  chr6:88137642-88137673
  hypo

SEQ ID NO: 153798 - DNA, 102 bp, Homo sapiens
  chr6:88280032-88280134
  hypo
ttttctaaaagctcctcgcacgactgttaatacatagccaaagttgtgaactattaccctaattggacactcaaagttaggtggaagagacattcccatgta

SEQ ID NO: 153799 - DNA, 30 bp, Homo sapiens
  chr6:88302413-88302443
  hypo
ttatagttgcacagcggtctttaacactat

SEQ ID NO: 153800 - DNA, 31 bp, Homo sapiens
  chr6:88368724-88368755
  hypo
acctaaaaagtggggcgggggggggagaacc

SEQ ID NO: 153801 - DNA, 31 bp, Homo sapiens
  chr6:88369054-88369085
  hypo
caggcgtgagccaccgcgcccggccctgttt

SEQ ID NO: 153802 - DNA, 29 bp, Homo sapiens
  chr6:88387950-88387979
  hypo
gggcgtggtgctcaccgcctgtaatcagg

SEQ ID NO: 153803 - DNA, 30 bp, Homo sapiens
  chr6:88450688-88450718
  hypo
gccactgcacccggccgacaaatagtctta

SEQ ID NO: 153804 - DNA, 36 bp, Homo sapiens; identical to SEQ ID NO: 71866
  chr6:88461839-88461875
  hypo

SEQ ID NO: 153805 - DNA, 121 bp, Homo sapiens
  chr6:88553998-88554119
  hypo
cacatattattggctgaaatgtctcttactttttttttttttttttttaaatctataggtttcccgtccagcttttcttttttttctttataatttatttgttaaagaaaccaggttgttg

SEQ ID NO: 153806 - DNA, 191 bp, Homo sapiens; identical to SEQ ID NO: 113671
  chr6:88875376-88875567
  hypo

SEQ ID NO: 153807 - DNA, 616 bp, Homo sapiens; identical to SEQ ID NO: 4974
  chr6:88875621-88876237
  hypo

SEQ ID NO: 153808 - DNA, 192 bp, Homo sapiens; identical to SEQ ID NO: 4975
  chr6:88876284-88876476
  hypo

SEQ ID NO: 153809 - DNA, 791 bp, Homo sapiens; identical to SEQ ID NO: 4976
  chr6:88876630-88877421
  hypo

SEQ ID NO: 153810 - DNA, 121 bp, Homo sapiens; identical to SEQ ID NO: 20486
  chr6:89376381-89376502
  hypo

SEQ ID NO: 153811 - DNA, 201 bp, Homo sapiens
  chr6:89376681-89376882
  hypo
ggggaaaggacatttagtatcagcaagaaattttacagttattagaagcagtatggaagcctcggagggtggcagtaatgcattgtaaaggacatcagtgagtcaccacttctgttgccttagggaattctggagcagactcctaagctcgcagagcagcatccactcccttccgagcatcagtcacggcccctctgctct

SEQ ID NO: 153812 - DNA, 30 bp, Homo sapiens
  chr6:89522908-89522938
  hypo
gatatggcctactggcgtttgcacagaacg

SEQ ID NO: 153813 - DNA, 151 bp, Homo sapiens
  chr6:89554101-89554252
  hypo
acggcttatttctgacgctaaatggttcctgtgttttgtcaatgagcccagtcttcattttttcgtgtcgaggacttataatttctcgttctatacactgcagacgaacattaaaatcacaatctccaacgggctgtgactgaattaaata

SEQ ID NO: 153814 - DNA, 30 bp, Homo sapiens; identical to SEQ ID NO: 71874
  chr6:89769219-89769249
  hypo

SEQ ID NO: 153815 - DNA, 22 bp, Homo sapiens
  chr6:89821728-89821750
  hypo
taaaactatttattttgagacc

SEQ ID NO: 153816 - DNA, 22 bp, Homo sapiens
  chr6:89821929-89821951
  hypo
cggcctaaaacttatttttaaa

SEQ ID NO: 153817 - DNA, 814 bp, Homo sapiens; identical to SEQ ID NO: 113679
  chr6:89827120-89827934
  hypo

SEQ ID NO: 153818 - DNA, 36 bp, Homo sapiens; identical to SEQ ID NO: 20488
  chr6:89857376-89857412
  hypo

SEQ ID NO: 153819 - DNA, 121 bp, Homo sapiens; identical to SEQ ID NO: 20489
  chr6:89857591-89857712
  hypo

SEQ ID NO: 153820 - DNA, 196 bp, Homo sapiens
  chr6:89913945-89914141
  hypo
ttttctgccaggactcgactgatgcacagggacacatcagaacagatgcacaaggattatgtcatctgtagaaaatggagcagagacaggtgtgcgctctgcaggcgtgggcagagctaagactggggagtggcatgcgcttcaggcgatgggccatcacagttgatgggcagcgtgaggccgaaggacaccgggg

SEQ ID NO: 153821 - DNA, 30 bp, Homo sapiens; identical to SEQ ID NO: 71881
  chr6:90011775-90011805
  hypo

SEQ ID NO: 153822 - DNA, 30 bp, Homo sapiens
  chr6:90024790-90024820
  hypo
cctgccctgtccatcgcttcctcttgggtt

SEQ ID NO: 153823 - DNA, 64 bp, Homo sapiens; identical to SEQ ID NO: 20490
  chr6:90052740-90052804
  hypo

SEQ ID NO: 153824 - DNA, 338 bp, Homo sapiens; identical to SEQ ID NO: 113682
  chr6:90062613-90062951
  hypo

SEQ ID NO: 153825 - DNA, 183 bp, Homo sapiens
  chr6:90095592-90095775
  hypo
tcctgaatgaacttacgatcctctcaggcatggggagtctactcagaggatggttctcgagcatgggctcagaatgatattatcgggaatagtctttgtaacacttcagccctaacagctctggtgctcctagaagggccaggtgtgcttagcggggcgatgcacacccgcagctggccaacc

SEQ ID NO: 153826 - DNA, 1577 bp, Homo sapiens; identical to SEQ ID NO: 113684
  chr6:90120935-90122512
  hypo

SEQ ID NO: 153827 - DNA, 1094 bp, Homo sapiens; identical to SEQ ID NO: 113685
  chr6:90142634-90143728
  hypo

SEQ ID NO: 153828 - DNA, 30 bp, Homo sapiens; identical to SEQ ID NO: 71886
  chr6:90205020-90205050
  hypo

SEQ ID NO: 153829 - DNA, 30 bp, Homo sapiens; identical to SEQ ID NO: 71887
  chr6:90312233-90312263
  hypo

SEQ ID NO: 153830 - DNA, 96 bp, Homo sapiens
  chr6:90359812-90359908
  hypo
ctgggcttggtccttcgaagccaaatcttgtctttccgaaattgactagcaatgtatggaatgactttccgtatgtttagtcgtttcccagttcga

SEQ ID NO: 153831 - DNA, 30 bp, Homo sapiens; identical to SEQ ID NO: 20493
  chr6:90367403-90367433
  hypo

SEQ ID NO: 153832 - DNA, 222 bp, Homo sapiens
  chr6:90367695-90367917
  hypo
gacgaaattgctgaatgaggcatttttcagaatgtatccctgtctttaaaaaataactgttcagtcacgcgttgcttaaagaatgagatgtggtctgttagatgtcaacaacaaaacaaacaacaaaataaccaaacataaaccaactaatgctacacagaatgtgatgtcggacagggagaagagaccctactaagaggcagctggcggctgcagtgaaac

SEQ ID NO: 153833 - DNA, 36 bp, Homo sapiens; identical to SEQ ID NO: 71890
  chr6:90522084-90522120
  hypo

SEQ ID NO: 153834 - DNA, 30 bp, Homo sapiens; identical to SEQ ID NO: 71891
  chr6:90527747-90527777
  hypo

SEQ ID NO: 153835 - DNA, 30 bp, Homo sapiens; identical to SEQ ID NO: 71892
  chr6:90596351-90596381
  hypo

SEQ ID NO: 153836 - DNA, 260 bp, Homo sapiens
  chr6:90644559-90644819
  hypo
agcaggcatgcgacacgcacaaggaacaggtctccgacacgggagctgcatgtgccgtaacatgaatgcaatctggcaggcggcgtgggcatgtgtgtcggaaagagagatttacaccgggaaagggcacctcctaaaatatttataaatttatcaagaaaatatgttttaaaaatgaaaaataaacagatgtacaagtgcaacttgagagaaatacattatgcgagtttgcaacagctgagtggcgggtgtgtgggaga

SEQ ID NO: 153837 - DNA, 30 bp, Homo sapiens
  chr6:90661226-90661256
  hypo
ctacggggatggcggcggcctcaaagctga

SEQ ID NO: 153838 - DNA, 105 bp, Homo sapiens; identical to SEQ ID NO: 71893
  chr6:90685939-90686044
  hypo

SEQ ID NO: 153839 - DNA, 28 bp, Homo sapiens
  chr6:90749120-90749148
  hypo
tgagatggagtctcactgtgtcgcccag

SEQ ID NO: 153840 - DNA, 28 bp, Homo sapiens
  chr6:90749387-90749415
  hypo
ccactgcgcctggccaagagtacttctt

SEQ ID NO: 153841 - DNA, 423 bp, Homo sapiens; identical to SEQ ID NO: 43229
  chr6:91004755-91005178
  hypo

SEQ ID NO: 153842 - DNA, 422 bp, Homo sapiens; identical to SEQ ID NO: 4985
  chr6:91005208-91005630
  hypo

SEQ ID NO: 153843 - DNA, 1092 bp, Homo sapiens; identical to SEQ ID NO: 113692
  chr6:91005660-91006752
  hypo

SEQ ID NO: 153844 - DNA, 30 bp, Homo sapiens
  chr6:91225710-91225740
  hypo
aggttccgtatttccgtaatataccaccaa

SEQ ID NO: 153845 - DNA, 46 bp, Homo sapiens
  chr6:91291933-91291979
  hypo
cattaaaacaagactcggatctcatttctaacgtgttgccttagcc

SEQ ID NO: 153846 - DNA, 45 bp, Homo sapiens
  chr6:91304005-91304050
  hypo
ttacaagaagttaaacatggccgggcgcggtggctcacgcctgta

SEQ ID NO: 153847 - DNA, 42 bp, Homo sapiens; identical to SEQ ID NO: 71899
  chr6:91316403-91316445
  hypo

SEQ ID NO: 153848 - DNA, 1055 bp, Homo sapiens; identical to SEQ ID NO: 113695
  chr6:91320247-91321302
  hypo

SEQ ID NO: 153849 - DNA, 19 bp, Homo sapiens
  chr6:91362617-91362636
  hypo
attttgtactgcacttcca

SEQ ID NO: 153850 - DNA, 29 bp, Homo sapiens
  chr6:91714533-91714562
  hypo
tttttttttttgaatcggagtctcgctct

SEQ ID NO: 153851 - DNA, 30 bp, Homo sapiens; identical to SEQ ID NO: 71902
  chr6:92242264-92242294
  hypo

SEQ ID NO: 153852 - DNA, 27 bp, Homo sapiens
  chr6:93513855-93513882
  hypo
cgtgagccaccgcgcccggcctgaatt

SEQ ID NO: 153853 - DNA, 30 bp, Homo sapiens; identical to SEQ ID NO: 43241
  chr6:94309719-94309749
  hypo

SEQ ID NO: 153854 - DNA, 25 bp, Homo sapiens
  chr6:94511686-94511711
  hypo
tttttattttttgagacggagtctc

SEQ ID NO: 153855 - DNA, 30 bp, Homo sapiens; identical to SEQ ID NO: 4993
  chr6:94807929-94807959
  hypo

SEQ ID NO: 153856 - DNA, 26 bp, Homo sapiens
  chr6:96026947-96026973
  hypo
gttaaaaaaaattctgcggcctggcg

SEQ ID NO: 153857 - DNA, 95 bp, Homo sapiens; identical to SEQ ID NO: 20501
  chr6:96085018-96085113
  hypo

SEQ ID NO: 153858 - DNA, 35 bp, Homo sapiens
  chr6:96552674-96552709
  hypo
ggattacaggcatgagccaccgcgcctggccacac

SEQ ID NO: 153859 - DNA, 30 bp, Homo sapiens; identical to SEQ ID NO: 71908
  chr6:97593511-97593541
  hypo

SEQ ID NO: 153860 - DNA, 83 bp, Homo sapiens
  chr6:98148228-98148311
  hypo
actttcctactgccacgttgccaccaaatatgggttaagggcattagaaaagaaatcccacatgcagccgggcatggtggctc

SEQ ID NO: 153861 - DNA, 30 bp, Homo sapiens; identical to SEQ ID NO: 4998
  chr6:98405135-98405165
  hypo

SEQ ID NO: 153862 - DNA, 17 bp, Homo sapiens
  chr6:98660884-98660901
  hypo
gggcgcggtggctcacg

SEQ ID NO: 153863 - DNA, 27 bp, Homo sapiens
  chr6:99396455-99396482
  hypo
tatgtattttttgagacggagtctcgc

SEQ ID NO: 153864 - DNA, 26 bp, Homo sapiens
  chr6:99396721-99396747
  hypo
gccaccgcgcccgcccttggcacttt

SEQ ID NO: 153865 - DNA, 30 bp, Homo sapiens
  chr6:99674271-99674301
  hypo
tcgcttctcactccccgcctttagagaaag

SEQ ID NO: 153866 - DNA, 67 bp, Homo sapiens; identical to SEQ ID NO: 5019
  chr6:99962858-99962925
  hypo

SEQ ID NO: 153867 - DNA, 220 bp, Homo sapiens; identical to SEQ ID NO: 43278
  chr6:99963447-99963667
  hypo

SEQ ID NO: 153868 - DNA, 30 bp, Homo sapiens; identical to SEQ ID NO: 71914
  chr6:100017973-100018003
  hypo

SEQ ID NO: 153869 - DNA, 560 bp, Homo sapiens; identical to SEQ ID NO: 113758
  chr6:100054671-100055231
  hypo

SEQ ID NO: 153870 - DNA, 531 bp, Homo sapiens; identical to SEQ ID NO: 113762
  chr6:100061165-100061696
  hypo

SEQ ID NO: 153871 - DNA, 1010 bp, Homo sapiens; identical to SEQ ID NO: 113763
  chr6:100061988-100062998
  hypo

SEQ ID NO: 153872 - DNA, 147 bp, Homo sapiens; identical to SEQ ID NO: 71917
  chr6:100841321-100841468
  hypo

SEQ ID NO: 153873 - DNA, 30 bp, Homo sapiens; identical to SEQ ID NO: 5030
  chr6:100933169-100933199
  hypo

SEQ ID NO: 153874 - DNA, 30 bp, Homo sapiens
  chr6:100954917-100954947
  hypo
tggaatgtcctctttcgtctgtgccttccc

SEQ ID NO: 153875 - DNA, 1174 bp, Homo sapiens; identical to SEQ ID NO: 113790
  chr6:101840992-101842166
  hypo

SEQ ID NO: 153876 - DNA, 30 bp, Homo sapiens
  chr6:104750081-104750111
  hypo
cgtaagaattctgtacgataagcctgatgg

SEQ ID NO: 153877 - DNA, 60 bp, Homo sapiens; identical to SEQ ID NO: 113796
  chr6:105307081-105307141
  hypo

SEQ ID NO: 153878 - DNA, 192 bp, Homo sapiens; identical to SEQ ID NO: 43314
  chr6:105584127-105584319
  hypo

SEQ ID NO: 153879 - DNA, 1175 bp, Homo sapiens; identical to SEQ ID NO: 43315
  chr6:105584366-105585541
  hypo

SEQ ID NO: 153880 - DNA, 1011 bp, Homo sapiens; identical to SEQ ID NO: 113808
  chr6:105627227-105628238
  hypo

SEQ ID NO: 153881 - DNA, 405 bp, Homo sapiens; identical to SEQ ID NO: 20513
  chr6:105750345-105750750
  hypo

SEQ ID NO: 153882 - DNA, 30 bp, Homo sapiens
  chr6:105772664-105772694
  hypo
tacgctgcccccgaccggaaaggagtaata

SEQ ID NO: 153883 - DNA, 30 bp, Homo sapiens
  chr6:105814664-105814694
  hypo
agcttgaagatgttacgctaaatgaactaa

SEQ ID NO: 153884 - DNA, 166 bp, Homo sapiens
  chr6:106456820-106456986
  hypo
atagtcttcccgcagcggtggccaggtccatggccaggcattgtctctgactcctaagaccccagcaactgaacacaggcccctcacggcagtggttatattctgccacgttctatgtctaccctttcgctcacgcccccttctgtcttagcgctcttgcctccct

SEQ ID NO: 153885 - DNA, 30 bp, Homo sapiens
  chr6:106457203-106457233
  hypo
ttttaggatgactttcgcttccttttggtc

SEQ ID NO: 153886 - DNA, 791 bp, Homo sapiens; identical to SEQ ID NO: 113814
  chr6:106533693-106534484
  hypo

SEQ ID NO: 153887 - DNA, 30 bp, Homo sapiens; identical to SEQ ID NO: 20515
  chr6:106553142-106553172
  hypo

SEQ ID NO: 153888 - DNA, 33 bp, Homo sapiens
  chr6:106582672-106582705
  hypo
atgaacaagcccactcgccgtcagagtcccagc

SEQ ID NO: 153889 - DNA, 30 bp, Homo sapiens; identical to SEQ ID NO: 71926
  chr6:106720463-106720493
  hypo

SEQ ID NO: 153890 - DNA, 21 bp, Homo sapiens
  chr6:106731576-106731597
  hypo
cgcgcccgactagttcttagg

SEQ ID NO: 153891 - DNA, 31 bp, Homo sapiens; identical to SEQ ID NO: 71928
  chr6:106908237-106908268
  hypo

SEQ ID NO: 153892 - DNA, 20 bp, Homo sapiens
  chr6:106945964-106945984
  hypo
gactccgtcttaaaaaaaaa

SEQ ID NO: 153893 - DNA, 1660 bp, Homo sapiens; identical to SEQ ID NO: 5045
  chr6:106959519-106961179
  hypo

SEQ ID NO: 153894 - DNA, 30 bp, Homo sapiens
  chr6:107001560-107001590
  hypo
tccaatggcgtgcttcgtgatatctgagta

SEQ ID NO: 153895 - DNA, 35 bp, Homo sapiens; identical to SEQ ID NO: 20518
  chr6:107010363-107010398
  hypo

SEQ ID NO: 153896 - DNA, 78 bp, Homo sapiens; identical to SEQ ID NO: 71932
  chr6:107078764-107078842
  hypo

SEQ ID NO: 153897 - DNA, 31 bp, Homo sapiens; identical to SEQ ID NO: 20519
  chr6:107132181-107132212
  hypo

SEQ ID NO: 153898 - DNA, 86 bp, Homo sapiens
  chr6:107537664-107537750
  hypo
agactccatctcaaagaaaaccaaaaaaaacaaaaaacaaaaaacaaaacctgggaataagcttagaaacgcgcaaaactgaatgc

SEQ ID NO: 153899 - DNA, 121 bp, Homo sapiens; identical to SEQ ID NO: 20520
  chr6:107562425-107562546
  hypo

SEQ ID NO: 153900 - DNA, 21 bp, Homo sapiens
  chr6:107562845-107562866
  hypo
ggctgctctacaaacttcttt

SEQ ID NO: 153901 - DNA, 37 bp, Homo sapiens
  chr6:107563805-107563842
  hypo
gtgtgatcacagcttattgtaacgtcaaactcctggg

SEQ ID NO: 153902 - DNA, 30 bp, Homo sapiens
  chr6:107772981-107773011
  hypo
cagcctccaatctagcgctggccctctgga

SEQ ID NO: 153903 - DNA, 31 bp, Homo sapiens; identical to SEQ ID NO: 20522
  chr6:107777106-107777137
  hypo

SEQ ID NO: 153904 - DNA, 19 bp, Homo sapiens
  chr6:107779401-107779420
  hypo
acttttggccgggcacggt

SEQ ID NO: 153905 - DNA, 18 bp, Homo sapiens
  chr6:107779599-107779617
  hypo
aagcgagactccgtctca

SEQ ID NO: 153906 - DNA, 1084 bp, Homo sapiens; identical to SEQ ID NO: 43328
  chr6:107810017-107811101
  hypo

SEQ ID NO: 153907 - DNA, 30 bp, Homo sapiens
  chr6:108051510-108051540
  hypo
cgtagggctcacaggcgaaggcactcatgg

SEQ ID NO: 153908 - DNA, 30 bp, Homo sapiens
  chr6:108141897-108141927
  hypo
ggctggcagccagggcgttcggacttggta

SEQ ID NO: 153909 - DNA, 30 bp, Homo sapiens
  chr6:108142127-108142157
  hypo
tcagaaattttaccacgatttgggtgatcc

SEQ ID NO: 153910 - DNA, 21 bp, Homo sapiens
  chr6:108181931-108181952
  hypo
cctattcggccatcttggccc

SEQ ID NO: 153911 - DNA, 91 bp, Homo sapiens; identical to SEQ ID NO: 71940
  chr6:108274498-108274589
  hypo

SEQ ID NO: 153912 - DNA, 225 bp, Homo sapiens; identical to SEQ ID NO: 113840
  chr6:108455136-108455361
  hypo

SEQ ID NO: 153913 - DNA, 30 bp, Homo sapiens
  chr6:108533438-108533468
  hypo
ccagaggatgaccagcgaccctgagaataa

SEQ ID NO: 153914 - DNA, 29 bp, Homo sapiens
  chr6:108533818-108533847
  hypo
ggcgtgagccactgcgcccggctcagaat

SEQ ID NO: 153915 - DNA, 17 bp, Homo sapiens
  chr6:108555477-108555494
  hypo
tgggtgcagtggctcac

SEQ ID NO: 153916 - DNA, 22 bp, Homo sapiens
  chr6:108614847-108614869
  hypo
tctttttttgagacagagtctc

SEQ ID NO: 153917 - DNA, 184 bp, Homo sapiens; identical to SEQ ID NO: 43353
  chr6:108882163-108882347
  hypo

SEQ ID NO: 153918 - DNA, 30 bp, Homo sapiens
  chr6:108905300-108905330
  hypo
ttagtttcattccgccggcacggtaatgca

SEQ ID NO: 153919 - DNA, 30 bp, Homo sapiens; identical to SEQ ID NO: 71944
  chr6:108930997-108931027
  hypo

SEQ ID NO: 153920 - DNA, 30 bp, Homo sapiens
  chr6:108976903-108976933
  hypo
ctgtcattatacaccgaaggcgcccacccg

SEQ ID NO: 153921 - DNA, 45 bp, Homo sapiens; identical to SEQ ID NO: 20526
  chr6:108984286-108984331
  hypo

SEQ ID NO: 153922 - DNA, 30 bp, Homo sapiens
  chr6:108985185-108985215
  hypo
gaaaacctcatggacgacctgctggataac

SEQ ID NO: 153923 - DNA, 31 bp, Homo sapiens; identical to SEQ ID NO: 20527
  chr6:108990718-108990749
  hypo

SEQ ID NO: 153924 - DNA, 32 bp, Homo sapiens
  chr6:108997761-108997793
  hypo
ttaaactagaagagcatcgacacatacacata

SEQ ID NO: 153925 - DNA, 30 bp, Homo sapiens; identical to SEQ ID NO: 71947
  chr6:109020263-109020293
  hypo

SEQ ID NO: 153926 - DNA, 30 bp, Homo sapiens; identical to SEQ ID NO: 20528
  chr6:109029003-109029033
  hypo

SEQ ID NO: 153927 - DNA, 73 bp, Homo sapiens; identical to SEQ ID NO: 71949
  chr6:109038592-109038665
  hypo

SEQ ID NO: 153928 - DNA, 100 bp, Homo sapiens
  chr6:109053386-109053486
  hypo
ccggagtgatggatgcggcaggagtgttcaagcagtgcctctcccatctgcagcttcgtccggtttccagtcaagcactactgcacgcccagcaccccag

SEQ ID NO: 153929 - DNA, 43 bp, Homo sapiens; identical to SEQ ID NO: 20530
  chr6:109057730-109057773
  hypo

SEQ ID NO: 153930 - DNA, 163 bp, Homo sapiens; identical to SEQ ID NO: 71952
  chr6:109058635-109058798
  hypo

SEQ ID NO: 153931 - DNA, 87 bp, Homo sapiens; identical to SEQ ID NO: 71953
  chr6:109059834-109059921
  hypo

SEQ ID NO: 153932 - DNA, 121 bp, Homo sapiens; identical to SEQ ID NO: 20532
  chr6:109059980-109060101
  hypo

SEQ ID NO: 153933 - DNA, 19 bp, Homo sapiens
  chr6:109485994-109486013
  hypo
taaaaaccgtccaggcgcg

SEQ ID NO: 153934 - DNA, 40 bp, Homo sapiens; identical to SEQ ID NO: 71955
  chr6:109551796-109551836
  hypo

SEQ ID NO: 153935 - DNA, 31 bp, Homo sapiens; identical to SEQ ID NO: 71956
  chr6:109643047-109643078
  hypo

SEQ ID NO: 153936 - DNA, 30 bp, Homo sapiens
  chr6:109645288-109645318
  hypo
tccaactccatagatcgcttcccttcagta

SEQ ID NO: 153937 - DNA, 140 bp, Homo sapiens
  chr6:109647759-109647899
  hypo
atgcagcaaagcggacgccttcctccatggaatgtgctgatttcagacggggcatcagccaatgtagaaaacactaacattttttcttggaactggattgtgatgagaggtgcttgccgtgaacataagctactatcttt

SEQ ID NO: 153938 - DNA, 430 bp, Homo sapiens; identical to SEQ ID NO: 5067
  chr6:109777176-109777606
  hypo

SEQ ID NO: 153939 - DNA, 30 bp, Homo sapiens
  chr6:109784463-109784493
  hypo
aggcatgagcctccacgcccggcgtcattg

SEQ ID NO: 153940 - DNA, 30 bp, Homo sapiens
  chr6:109787466-109787496
  hypo
gtacagaatcggttacgagaagctgaattt

SEQ ID NO: 153941 - DNA, 30 bp, Homo sapiens
  chr6:109794730-109794760
  hypo
ctctttccggcatcccgcccccttaccttg

SEQ ID NO: 153942 - DNA, 30 bp, Homo sapiens
  chr6:109797373-109797403
  hypo
gtacctgtatgaactcggtaatggctcttt

SEQ ID NO: 153943 - DNA, 30 bp, Homo sapiens
  chr6:109797680-109797710
  hypo
gaatttaagtttccccgaaaggcgttcaaa

SEQ ID NO: 153944 - DNA, 144 bp, Homo sapiens; identical to SEQ ID NO: 20535
  chr6:109798004-109798148
  hypo

SEQ ID NO: 153945 - DNA, 30 bp, Homo sapiens; identical to SEQ ID NO: 71959
  chr6:109819221-109819251
  hypo

SEQ ID NO: 153946 - DNA, 30 bp, Homo sapiens; identical to SEQ ID NO: 20536
  chr6:110104618-110104648
  hypo

SEQ ID NO: 153947 - DNA, 92 bp, Homo sapiens
  chr6:110437729-110437821
  hypo
aagaggccggtaagcttgaactgctcagtaaggtctattccctctataaattccacctcttggggaaggacgtagtagaacaaaaagcagca

SEQ ID NO: 153948 - DNA, 69 bp, Homo sapiens; identical to SEQ ID NO: 71962
  chr6:110670275-110670344
  hypo

SEQ ID NO: 153949 - DNA, 30 bp, Homo sapiens
  chr6:110750561-110750591
  hypo
ctcatgccaagccagcgattcccgaagagc

SEQ ID NO: 153950 - DNA, 136 bp, Homo sapiens; identical to SEQ ID NO: 20537
  chr6:110768070-110768206
  hypo

SEQ ID NO: 153951 - DNA, 45 bp, Homo sapiens; identical to SEQ ID NO: 71964
  chr6:110798285-110798330
  hypo

SEQ ID NO: 153952 - DNA, 87 bp, Homo sapiens
  chr6:110817990-110818077
  hypo
caccgcacccggcctgtcttggtaaattcttttatctccccgccacctgtccagatagtcgtcgctcgcctccgacactttcttcat

SEQ ID NO: 153953 - DNA, 22 bp, Homo sapiens
  chr6:110818335-110818357
  hypo
ggatggggccgggcgcggtggc

SEQ ID NO: 153954 - DNA, 122 bp, Homo sapiens
  chr6:110842270-110842392
  hypo
gtggcctgtctcacccgcaatcacacctcaccatcctagcctagtgccggctctcagccggtgtttaagggagttgttcagtaaaggggccctccccggcaccgcaccgcccagctggcctt

SEQ ID NO: 153955 - DNA, 49 bp, Homo sapiens; identical to SEQ ID NO: 20538
  chr6:110843340-110843389
  hypo

SEQ ID NO: 153956 - DNA, 188 bp, Homo sapiens; identical to SEQ ID NO: 71966
  chr6:110872231-110872419
  hypo

SEQ ID NO: 153957 - DNA, 426 bp, Homo sapiens; identical to SEQ ID NO: 71967
  chr6:110966934-110967360
  hypo

SEQ ID NO: 153958 - DNA, 83 bp, Homo sapiens; identical to SEQ ID NO: 71968
  chr6:110968046-110968129
  hypo

SEQ ID NO: 153959 - DNA, 30 bp, Homo sapiens
  chr6:110976268-110976298
  hypo
ggtttcaaaaatcctcgataggccgggcac

SEQ ID NO: 153960 - DNA, 121 bp, Homo sapiens
  chr6:111014239-111014360
  hypo
aaaaagatattccacacaaatgtaaagcaaaagtgagcaaaagcgttaaaatctgacggataggagacaggactaatgtggaactcccacttggacagacagaacagcgtgtggagactca

SEQ ID NO: 153961 - DNA, 87 bp, Homo sapiens; identical to SEQ ID NO: 71969
  chr6:111022041-111022128
  hypo

SEQ ID NO: 153962 - DNA, 46 bp, Homo sapiens; identical to SEQ ID NO: 20540
  chr6:111085014-111085060
  hypo

SEQ ID NO: 153963 - DNA, 30 bp, Homo sapiens; identical to SEQ ID NO: 71971
  chr6:111179852-111179882
  hypo

SEQ ID NO: 153964 - DNA, 20 bp, Homo sapiens
  chr6:111190619-111190639
  hypo
ccaccgcgcccagcccatta

SEQ ID NO: 153965 - DNA, 31 bp, Homo sapiens; identical to SEQ ID NO: 20542
  chr6:111204757-111204788
  hypo

SEQ ID NO: 153966 - DNA, 27 bp, Homo sapiens
  chr6:111222989-111223016
  hypo
gatgtgagccaccgtgcccggccacct

SEQ ID NO: 153967 - DNA, 178 bp, Homo sapiens; identical to SEQ ID NO: 71974
  chr6:111244971-111245149
  hypo

SEQ ID NO: 153968 - DNA, 30 bp, Homo sapiens
  chr6:111270191-111270221
  hypo
aggcgtatgttcggccgagcgcagtggctc

SEQ ID NO: 153969 - DNA, 1142 bp, Homo sapiens; identical to SEQ ID NO: 113906
  chr6:111408730-111409872
  hypo

SEQ ID NO: 153970 - DNA, 105 bp, Homo sapiens
  chr6:111546767-111546872
  hypo
aagtaaaagtacacacagtttaaaagtaaacatgtttacttcggataattctaatccttttagctgcatttaagaatattttaatttatacgaatgttacttgaa

SEQ ID NO: 153971 - DNA, 42 bp, Homo sapiens
  chr6:111579403-111579445
  hypo
accaaaaagcgccacaacactccagcccgggcgacataggct

SEQ ID NO: 153972 - DNA, 33 bp, Homo sapiens; identical to SEQ ID NO: 71977
  chr6:111581422-111581455
  hypo

SEQ ID NO: 153973 - DNA, 139 bp, Homo sapiens
  chr6:111581989-111582128
  hypo
cgtcactgacttgtccggtcctgttgtaaatcctttgaagacatgaactaatttgattagattctgtgctcaggcttctctcgaagtacgaggtgcttgctgtgcacctgggcccatagtggtccgtggtcttggactg

SEQ ID NO: 153974 - DNA, 30 bp, Homo sapiens
  chr6:111587996-111588026
  hypo
ctcttgatcgccagcgaaaagaagacagaa

SEQ ID NO: 153975 - DNA, 30 bp, Homo sapiens
  chr6:111672883-111672913
  hypo
acccgagagatcatccgacataagtcaata

SEQ ID NO: 153976 - DNA, 196 bp, Homo sapiens; identical to SEQ ID NO: 20544
  chr6:111673960-111674156
  hypo

SEQ ID NO: 153977 - DNA, 30 bp, Homo sapiens
  chr6:111680152-111680182
  hypo
tccggttctaagtctcgtctagttcgagca

SEQ ID NO: 153978 - DNA, 246 bp, Homo sapiens; identical to SEQ ID NO: 71979
  chr6:111750919-111751165
  hypo

SEQ ID NO: 153979 - DNA, 213 bp, Homo sapiens
  chr6:111751865-111752078
  hypo
agatgccaaagcacacgccttcaagagtcccagcaaagaaaataaaaagaaagacaaagacatgcttgaagataagtttaaaagcaataatttagagagagcgcaggagcagcttgaccgcatcgtgaaggaatctggaggaaagctgaccaggcggcttgtgaacagtcagtgcaaattggaaagaagaaaaccagacggaacaacaatgtt

SEQ ID NO: 153980 - DNA, 165 bp, Homo sapiens; identical to SEQ ID NO: 71981
  chr6:111766136-111766301
  hypo

SEQ ID NO: 153981 - DNA, 30 bp, Homo sapiens; identical to SEQ ID NO: 20547
  chr6:111846875-111846905
  hypo

SEQ ID NO: 153982 - DNA, 35 bp, Homo sapiens
  chr6:111860205-111860240
  hypo
agatcacgccactgcgctcccgtccggcaacagag

SEQ ID NO: 153983 - DNA, 157 bp, Homo sapiens
  chr6:111872273-111872430
  hypo
gcagccaaggcatcatcgggaggctagggcttgatggaaggggtaaggggggtggtgccgggcatctggttggagggaagtaggaacacaggcagaagcagagaagggcccttagtgctgccgagcacaggctgctgcttgacgcgcagccctcagc

SEQ ID NO: 153984 - DNA, 162 bp, Homo sapiens
  chr6:111874465-111874627
  hypo
gcctccctcaaaaggcgagccagcatgaccatacgtttctcatgtctacatccaaaaggtaatgcagatgttccaaacagctaagtattattccaagaagtgccatttttgtggaatcagaattgtgataggacgggctggacgcagtggctcatacccgta

SEQ ID NO: 153985 - DNA, 88 bp, Homo sapiens
  chr6:111886814-111886902
  hypo
gaaactgtctcacagcgtctctataatcacggggagaaggaggattcgtagcccataaaacagccagttccaacgctgggtgattgtt

SEQ ID NO: 153986 - DNA, 103 bp, Homo sapiens; identical to SEQ ID NO: 71985
  chr6:111955505-111955608
  hypo

SEQ ID NO: 153987 - DNA, 31 bp, Homo sapiens; identical to SEQ ID NO: 71986
  chr6:111960202-111960233
  hypo

SEQ ID NO: 153988 - DNA, 30 bp, Homo sapiens
  chr6:111983187-111983217
  hypo
gatccaggccctgaccgccgcacttgcaga

SEQ ID NO: 153989 - DNA, 187 bp, Homo sapiens; identical to SEQ ID NO: 71987
  chr6:111993234-111993421
  hypo

SEQ ID NO: 153990 - DNA, 86 bp, Homo sapiens
  chr6:112021619-112021705
  hypo
actagcagcacacagcgctccttaaacagcgctacaccagcagacgaccacacacacggtggaagatcagacgccacacacggaaa

SEQ ID NO: 153991 - DNA, 30 bp, Homo sapiens
  chr6:112041077-112041107
  hypo
ttggcccccggctgcgtggaagttgttgta

SEQ ID NO: 153992 - DNA, 87 bp, Homo sapiens
  chr6:112128160-112128247
  hypo
tcttccggaccccagcgctgattgtcctccacacgctatttgtttcattcagagtgctgagctctgatttcacgtttcccttggaag

SEQ ID NO: 153993 - DNA, 30 bp, Homo sapiens
  chr6:112605047-112605077
  hypo
ttccgatatgtatggcgtacgtatggtggg

SEQ ID NO: 153994 - DNA, 40 bp, Homo sapiens; identical to SEQ ID NO: 71988
  chr6:114153358-114153398
  hypo

SEQ ID NO: 153995 - DNA, 31 bp, Homo sapiens; identical to SEQ ID NO: 5077
  chr6:114180217-114180248
  hypo

SEQ ID NO: 153996 - DNA, 30 bp, Homo sapiens
  chr6:116289817-116289847
  hypo
gaaaagattcttcttcgcgtgagaaaaaat

SEQ ID NO: 153997 - DNA, 31 bp, Homo sapiens; identical to SEQ ID NO: 71990
  chr6:116574056-116574087
  hypo

SEQ ID NO: 153998 - DNA, 35 bp, Homo sapiens
  chr6:116800744-116800779
  hypo
tttttttttttgagacggagtcttctcactctgtc

SEQ ID NO: 153999 - DNA, 41 bp, Homo sapiens; identical to SEQ ID NO: 71991
  chr6:116873933-116873974
  hypo

SEQ ID NO: 154000 - DNA, 30 bp, Homo sapiens; identical to SEQ ID NO: 71992
  chr6:116885175-116885205
  hypo

SEQ ID NO: 154001 - DNA, 131 bp, Homo sapiens
  chr6:116905293-116905424
  hypo
taagagttttacttccgtacaagtgtgagatccgtaaattgacacagactaaaagagtgagtgagaatatatagatgaattaggttaaaagtttcccatataaccttttatactctcgaggtctaaacggt

SEQ ID NO: 154002 - DNA, 18 bp, Homo sapiens
  chr6:116959858-116959876
  hypo
aggaggaggagccaagat

SEQ ID NO: 154003 - DNA, 30 bp, Homo sapiens
  chr6:117006407-117006437
  hypo
ctaaatgaaagaagccggatttattttgtt

SEQ ID NO: 154004 - DNA, 35 bp, Homo sapiens
  chr6:117100691-117100726
  hypo
ctctggtgatccacccccctcggcctcccaaagtg

SEQ ID NO: 154005 - DNA, 690 bp, Homo sapiens; identical to SEQ ID NO: 43411
  chr6:117591683-117592373
  hypo

SEQ ID NO: 154006 - DNA, 821 bp, Homo sapiens; identical to SEQ ID NO: 43412
  chr6:117803612-117804433
  hypo

SEQ ID NO: 154007 - DNA, 63 bp, Homo sapiens
  chr6:117894654-117894717
  hypo
cgtttcaagtcattacgtcctctgcaggctcggatcacagttttgtgacgatgcaaatgtatt

SEQ ID NO: 154008 - DNA, 242 bp, Homo sapiens; identical to SEQ ID NO: 113954
  chr6:118227989-118228231
  hypo

SEQ ID NO: 154009 - DNA, 1066 bp, Homo sapiens; identical to SEQ ID NO: 43416
  chr6:118228323-118229389
  hypo

SEQ ID NO: 154010 - DNA, 156 bp, Homo sapiens; identical to SEQ ID NO: 43417
  chr6:118229416-118229572
  hypo

SEQ ID NO: 154011 - DNA, 45 bp, Homo sapiens
  chr6:118848428-118848473
  hypo
aagtgctgggattacaggcatgagccaccgcgtccggctctactt

SEQ ID NO: 154012 - DNA, 84 bp, Homo sapiens
  chr6:118898185-118898269
  hypo
acagcctggggcagtaaggcatgtcaaaccctcttgctgctattcctagaagtgaaaagccctgcaggtcggcccctgagggct

SEQ ID NO: 154013 - DNA, 30 bp, Homo sapiens
  chr6:118898533-118898563
  hypo
agcaaaaaggacaatcgtgaaaaaagaagt

SEQ ID NO: 154014 - DNA, 56 bp, Homo sapiens; identical to SEQ ID NO: 113960
  chr6:118971583-118971639
  hypo

SEQ ID NO: 154015 - DNA, 30 bp, Homo sapiens; identical to SEQ ID NO: 20556
  chr6:118983677-118983707
  hypo

SEQ ID NO: 154016 - DNA, 34 bp, Homo sapiens; identical to SEQ ID NO: 72001
  chr6:119023865-119023899
  hypo

SEQ ID NO: 154017 - DNA, 25 bp, Homo sapiens
  chr6:119117467-119117492
  hypo
gattggtggagccaagatggccgaa

SEQ ID NO: 154018 - DNA, 82 bp, Homo sapiens
  chr6:119162951-119163033
  hypo
gtgctcaaaaagatacgtctactgagcaaaacaagagctatcttgcctttttttttttttttttgacacggagtctcgctct

SEQ ID NO: 154019 - DNA, 30 bp, Homo sapiens
  chr6:119225036-119225066
  hypo
ccaccgtgctcagagcgtgaaaagattatc

SEQ ID NO: 154020 - DNA, 71 bp, Homo sapiens
  chr6:119240580-119240651
  hypo
taatgagaattagatcggataatgtacgtaaattacttaatgcagtatctagaagacggcaagtgctcagt

SEQ ID NO: 154021 - DNA, 93 bp, Homo sapiens
  chr6:119254298-119254391
  hypo
ggttaaatttaaatgaggtgacgatctcagaagtagcactggacagttagaaaccagctgtccaaataagaaacacttatttggggccgggcg

SEQ ID NO: 154022 - DNA, 33 bp, Homo sapiens; identical to SEQ ID NO: 20559
  chr6:119254690-119254723
  hypo

SEQ ID NO: 154023 - DNA, 87 bp, Homo sapiens
  chr6:119462543-119462630
  hypo
agcgttggcaccaaccggaggggcctggatgcagggctgctgcctgctgcatggcgtgggcggggggaggatccagggaatcctttg

SEQ ID NO: 154024 - DNA, 32 bp, Homo sapiens; identical to SEQ ID NO: 72005
  chr6:119482931-119482963
  hypo

SEQ ID NO: 154025 - DNA, 32 bp, Homo sapiens; identical to SEQ ID NO: 72006
  chr6:119483262-119483294
  hypo

SEQ ID NO: 154026 - DNA, 199 bp, Homo sapiens
  chr6:119510812-119511011
  hypo
aataacatgtactcacatgttcgattatatgattcatgacaagtacgggcaatttcagccccgagttcaaggtagtgttgggccatgccttcgggagctgcatcagccccgagtgcgaacatgccccccgcgaagcaggtcaggtggcccatcttgtgctccaggaggccccctttccactctgcgatataagttagtc

SEQ ID NO: 154027 - DNA, 147 bp, Homo sapiens
  chr6:119590025-119590172
  hypo
gtaagccaatgtgcccggccctcatttttctaaaacaactctctcatgaacgagtaggccatagacaaactacgcctgaacaattcttagagtcatttaaagtaacaatatagaaaggcagttgaataatgccgtttccttaccccc

SEQ ID NO: 154028 - DNA, 30 bp, Homo sapiens
  chr6:119590602-119590632
  hypo
gggacgtcctggcctcgcttggtcttgcga

SEQ ID NO: 154029 - DNA, 30 bp, Homo sapiens
  chr6:119605089-119605119
  hypo
gagacgctggcagtacgaaggtcagttgga

SEQ ID NO: 154030 - DNA, 42 bp, Homo sapiens
  chr6:119620031-119620073
  hypo
attacaggagtgagccactgcgcctggccaactttttaaata

SEQ ID NO: 154031 - DNA, 29 bp, Homo sapiens
  chr6:119657509-119657538
  hypo
ggtgtgagccactgcgcccggcaccagca

SEQ ID NO: 154032 - DNA, 41 bp, Homo sapiens; identical to SEQ ID NO: 113968
  chr6:119762015-119762056
  hypo

SEQ ID NO: 154033 - DNA, 30 bp, Homo sapiens; identical to SEQ ID NO: 72008
  chr6:119826718-119826748
  hypo

SEQ ID NO: 154034 - DNA, 93 bp, Homo sapiens
  chr6:119834900-119834993
  hypo
catcattgtgcttatcgaagttttcctggtataatgtggacttttctgttccgctaataaaaagctcctcctggccccgtgtggtggcacatg

SEQ ID NO: 154035 - DNA, 30 bp, Homo sapiens
  chr6:119942624-119942654
  hypo
tcatgctaccgtttccggacatttttacag

SEQ ID NO: 154036 - DNA, 23 bp, Homo sapiens
  chr6:119947112-119947135
  hypo
tgagaaggagtctccctctgtcg

SEQ ID NO: 154037 - DNA, 30 bp, Homo sapiens
  chr6:119950363-119950393
  hypo
cacaccacacacgcgcgcgcacacacacac

SEQ ID NO: 154038 - DNA, 22 bp, Homo sapiens
  chr6:119958271-119958293
  hypo
acatgatgccgggtgcggtggc

SEQ ID NO: 154039 - DNA, 91 bp, Homo sapiens
  chr6:121364078-121364169
  hypo
ggccagatcccacaatatctggtgcctaacgtggccttctttgttcctcggctcagtgcactccgagtgcgggtttgtgatgactagtctt

SEQ ID NO: 154040 - DNA, 30 bp, Homo sapiens; identical to SEQ ID NO: 5096
  chr6:121506912-121506942
  hypo

SEQ ID NO: 154041 - DNA, 211 bp, Homo sapiens
  chr6:121654737-121654948
  hypo
tcaaggaacaaagatcgttggaactcattgcttttaagtactgtatactgacaggaatcccttgaaatcgtggaagtattctttcaaagaacatgaataatttataattaatattactgtgctgcccgggtgaggcgcgggggaatggattattaggatatgctggttgtggcagtaaaaatatagaggcggcggccgggcgcggtggctc

SEQ ID NO: 154042 - DNA, 601 bp, Homo sapiens; identical to SEQ ID NO: 113980
  chr6:123110274-123110875
  hypo

SEQ ID NO: 154043 - DNA, 12 bp, Homo sapiens
  chr6:123111123-123111135
  hypo
cacccagccaga

SEQ ID NO: 154044 - DNA, 30 bp, Homo sapiens; identical to SEQ ID NO: 5103
  chr6:123366433-123366463
  hypo

SEQ ID NO: 154045 - DNA, 30 bp, Homo sapiens
  chr6:123667226-123667256
  hypo
agcgaacatccttgccgtgttcctgacctc

SEQ ID NO: 154046 - DNA, 1403 bp, Homo sapiens; identical to SEQ ID NO: 113983
  chr6:124123916-124125319
  hypo

SEQ ID NO: 154047 - DNA, 132 bp, Homo sapiens; identical to SEQ ID NO: 72014
  chr6:125087370-125087502
  hypo

SEQ ID NO: 154048 - DNA, 40 bp, Homo sapiens; identical to SEQ ID NO: 72015
  chr6:125207461-125207501
  hypo

SEQ ID NO: 154049 - DNA, 635 bp, Homo sapiens; identical to SEQ ID NO: 113984
  chr6:125282854-125283489
  hypo

SEQ ID NO: 154050 - DNA, 774 bp, Homo sapiens; identical to SEQ ID NO: 5105
  chr6:125283600-125284374
  hypo

SEQ ID NO: 154051 - DNA, 211 bp, Homo sapiens
  chr6:125299461-125299672
  hypo
cggcaggctgcattccgcttgtgccccagaccagatcctgtgcccaccgtggctctgcgctcagcccatggatcaaccaggcatgctgtgagcggcttccaccttgggtgccagcaactagatgaggggaatgcggtggtgcctgataactcagagatgccagcagtcgtggagccccaaggggggttacagttctcgcttgtggagtccc

SEQ ID NO: 154052 - DNA, 30 bp, Homo sapiens
  chr6:125367349-125367379
  hypo
gagctggtggagagtcgggagaggcagctg

SEQ ID NO: 154053 - DNA, 30 bp, Homo sapiens
  chr6:125392400-125392430
  hypo
tcaaattttgaatttcgatcttttcccagg

SEQ ID NO: 154054 - DNA, 419 bp, Homo sapiens; identical to SEQ ID NO: 43442
  chr6:125420730-125421149
  hypo

SEQ ID NO: 154055 - DNA, 17 bp, Homo sapiens
  chr6:125843088-125843105
  hypo
cacgacctttcttttgg

SEQ ID NO: 154056 - DNA, 30 bp, Homo sapiens; identical to SEQ ID NO: 43445
  chr6:126010100-126010130
  hypo

SEQ ID NO: 154057 - DNA, 25 bp, Homo sapiens
  chr6:126046021-126046046
  hypo
cataaacaggccaggcgcgattgct

SEQ ID NO: 154058 - DNA, 42 bp, Homo sapiens; identical to SEQ ID NO: 72021
  chr6:126208031-126208073
  hypo

SEQ ID NO: 154059 - DNA, 30 bp, Homo sapiens
  chr6:126217646-126217676
  hypo
gattttatggctgggcgtggtacgtcatgc

SEQ ID NO: 154060 - DNA, 152 bp, Homo sapiens; identical to SEQ ID NO: 20565
  chr6:126242091-126242243
  hypo

SEQ ID NO: 154061 - DNA, 58 bp, Homo sapiens; identical to SEQ ID NO: 72023
  chr6:126243891-126243949
  hypo

SEQ ID NO: 154062 - DNA, 151 bp, Homo sapiens; identical to SEQ ID NO: 20566
  chr6:126426569-126426720
  hypo

SEQ ID NO: 154063 - DNA, 30 bp, Homo sapiens; identical to SEQ ID NO: 72025
  chr6:126663033-126663063
  hypo

SEQ ID NO: 154064 - DNA, 1138 bp, Homo sapiens; identical to SEQ ID NO: 114006
  chr6:127439824-127440962
  hypo

SEQ ID NO: 154065 - DNA, 689 bp, Homo sapiens; identical to SEQ ID NO: 5109
  chr6:127441030-127441719
  hypo

SEQ ID NO: 154066 - DNA, 31 bp, Homo sapiens; identical to SEQ ID NO: 20569
  chr6:127536396-127536427
  hypo

SEQ ID NO: 154067 - DNA, 30 bp, Homo sapiens; identical to SEQ ID NO: 20570
  chr6:127665866-127665896
  hypo

SEQ ID NO: 154068 - DNA, 17 bp, Homo sapiens
  chr6:127669721-127669738
  hypo
tgaaccactatcctttt

SEQ ID NO: 154069 - DNA, 31 bp, Homo sapiens
  chr6:127739718-127739749
  hypo
ttctgtcataaaaatacgagaagtttgtttt

SEQ ID NO: 154070 - DNA, 1772 bp, Homo sapiens; identical to SEQ ID NO: 114013
  chr6:127836029-127837801
  hypo

SEQ ID NO: 154071 - DNA, 83 bp, Homo sapiens; identical to SEQ ID NO: 72032
  chr6:128830108-128830191
  hypo

SEQ ID NO: 154072 - DNA, 743 bp, Homo sapiens
  chr6:128901268-128902011
  hypo
tcaaagctgcgatgtcgacactctgcacatgctcctcaaacttggtgatctcctcctccagcaagtctgtccccactttgtcgtcctccaccacacactgaatctgcatcttccggataccatagcccacggacgccagcttggaggccccgctcactagcccatccagctggatagagcgcacacatgcctccagctgggtcatgtccgtcttattgtcccaaggcttgatgtccagcaggatggaggacttggccaccagcgagggattcttggccttcttggcgtacagccgcagccgctcctcccgcagccgccttgcctccttgtcttcctccttattgtcgctgccaacagatcaatgtcatcgtcctcgttatcctctgcttcttggccggggtcgtagtaaggggggcgaggggaggggcgctccacttggcgcatgggagacacgtgctgtgtctgcgggactgtggaccatggccaggcgagctcttctctcttctccggcatgttcagccaggcctccaggttggagaccgcctgctgcagctcctgcaccacgccgcgcaggctctggttctccacttccaggctggcgatctggaggacgagctcgctgtggtcttccctggggccgagctctggcgggaggcgctggccacaggcccattcatctgcttgtagaatttcctttctgtatcttcatatttgaatttgtcgagccagatcttctcatgtgc

SEQ ID NO: 154073 - DNA, 27 bp, Homo sapiens
  chr6:129373289-129373316
  hypo
ttttttttttaggcagagtttcgctct

SEQ ID NO: 154074 - DNA, 82 bp, Homo sapiens; identical to SEQ ID NO: 72035
  chr6:129635703-129635785
  hypo

SEQ ID NO: 154075 - DNA, 30 bp, Homo sapiens
  chr6:129956180-129956210
  hypo
atggtaaaccatggccgactctgctcagca

SEQ ID NO: 154076 - DNA, 30 bp, Homo sapiens; identical to SEQ ID NO: 20573
  chr6:130015070-130015100
  hypo

SEQ ID NO: 154077 - DNA, 31 bp, Homo sapiens; identical to SEQ ID NO: 5118
  chr6:130342613-130342644
  hypo

SEQ ID NO: 154078 - DNA, 30 bp, Homo sapiens; identical to SEQ ID NO: 43469
  chr6:130349103-130349133
  hypo

SEQ ID NO: 154079 - DNA, 31 bp, Homo sapiens; identical to SEQ ID NO: 20575
  chr6:130454500-130454531
  hypo

SEQ ID NO: 154080 - DNA, 33 bp, Homo sapiens; identical to SEQ ID NO: 72040
  chr6:130472586-130472619
  hypo

SEQ ID NO: 154081 - DNA, 104 bp, Homo sapiens
  chr6:130499428-130499532
  hypo
acccttcttgaagacagtgccttagggctgcttctgctgctcttctccgctgcaatgccgtgtgattgaatagatccccacagtgagtgcggggaagggaaaaa

SEQ ID NO: 154082 - DNA, 821 bp, Homo sapiens; identical to SEQ ID NO: 5119
  chr6:130686371-130687192
  hypo

SEQ ID NO: 154083 - DNA, 525 bp, Homo sapiens; identical to SEQ ID NO: 43471
  chr6:130687224-130687749
  hypo

SEQ ID NO: 154084 - DNA, 381 bp, Homo sapiens; identical to SEQ ID NO: 114029
  chr6:131383360-131383741
  hypo

SEQ ID NO: 154085 - DNA, 30 bp, Homo sapiens
  chr6:131402719-131402749
  hypo
ttggcttagcgctaacgtgtaagtcatata

SEQ ID NO: 154086 - DNA, 30 bp, Homo sapiens; identical to SEQ ID NO: 20579
  chr6:131455391-131455421
  hypo

SEQ ID NO: 154087 - DNA, 141 bp, Homo sapiens
  chr6:131455818-131455959
  hypo
agagtaactagtttgccgacttctagtgtgcagcctttacgccagctgttgtggctgtgtaggggtcttcttttcttccatccctattctacgatgcattcaacataagcgaagtgttattattcacgaaaggcgctaatt

SEQ ID NO: 154088 - DNA, 30 bp, Homo sapiens
  chr6:131901500-131901530
  hypo
taatccatacctgaacgttaaggcattatt

SEQ ID NO: 154089 - DNA, 30 bp, Homo sapiens; identical to SEQ ID NO: 72047
  chr6:131908766-131908796
  hypo

SEQ ID NO: 154090 - DNA, 30 bp, Homo sapiens; identical to SEQ ID NO: 20581
  chr6:132568035-132568065
  hypo

SEQ ID NO: 154091 - DNA, 144 bp, Homo sapiens
  chr6:132601693-132601837
  hypo
tgcagaaactggagccgcggtctctctttgtcacattagagtgctgcactttctagaaagacaaaagaagagagcagcctgggcgtcagtgggcttatgtaaggaatgcatactgatacgatgtcacaataaaactactgatga

SEQ ID NO: 154092 - DNA, 30 bp, Homo sapiens; identical to SEQ ID NO: 72049
  chr6:133091304-133091334
  hypo

SEQ ID NO: 154093 - DNA, 42 bp, Homo sapiens
  chr6:133118417-133118459
  hypo
ccttgtacattactgccgttttgaaaacgtactgctttcggc

SEQ ID NO: 154094 - DNA, 31 bp, Homo sapiens; identical to SEQ ID NO: 5125
  chr6:133134687-133134718
  hypo

SEQ ID NO: 154095 - DNA, 194 bp, Homo sapiens; identical to SEQ ID NO: 43483
  chr6:133146627-133146821
  hypo

SEQ ID NO: 154096 - DNA, 301 bp, Homo sapiens; identical to SEQ ID NO: 5127
  chr6:133561966-133562267
  hypo

SEQ ID NO: 154097 - DNA, 88 bp, Homo sapiens; identical to SEQ ID NO: 5128
  chr6:133562348-133562436
  hypo

SEQ ID NO: 154098 - DNA, 420 bp, Homo sapiens; identical to SEQ ID NO: 5129
  chr6:133562674-133563094
  hypo

SEQ ID NO: 154099 - DNA, 1039 bp, Homo sapiens; identical to SEQ ID NO: 114049
  chr6:133563157-133564196
  hypo

SEQ ID NO: 154100 - DNA, 31 bp, Homo sapiens; identical to SEQ ID NO: 20587
  chr6:134067447-134067478
  hypo

SEQ ID NO: 154101 - DNA, 825 bp, Homo sapiens; identical to SEQ ID NO: 114056
  chr6:134212293-134213118
  hypo

SEQ ID NO: 154102 - DNA, 24 bp, Homo sapiens
  chr6:134285170-134285194
  hypo
tgcgtctcaaaaaaaagaaccaat

SEQ ID NO: 154103 - DNA, 44 bp, Homo sapiens
  chr6:134502444-134502488
  hypo
aatctctctccaagtctctcccgtttgttttctttctttctttt

SEQ ID NO: 154104 - DNA, 27 bp, Homo sapiens
  chr6:134532914-134532941
  hypo
tcctactgaatcacttgaacccgggag

SEQ ID NO: 154105 - DNA, 26 bp, Homo sapiens
  chr6:134533000-134533026
  hypo
attccgtctacaaggaaaaaaaaaaa

SEQ ID NO: 154106 - DNA, 25 bp, Homo sapiens
  chr6:134533449-134533474
  hypo
caaagtgctgcgattacaggcgtga

SEQ ID NO: 154107 - DNA, 33 bp, Homo sapiens
  chr6:134545870-134545903
  hypo
tataatatggccaggcgcagtgtctcacgcctg

SEQ ID NO: 154108 - DNA, 88 bp, Homo sapiens; identical to SEQ ID NO: 72059
  chr6:134589499-134589587
  hypo

SEQ ID NO: 154109 - DNA, 175 bp, Homo sapiens
  chr6:134669114-134669289
  hypo
tgaccatatgccagccgcctcttggactctgagtgaatagctcacctcaatagaacgcatagaacactcattccagaaataacaggtgcccacatttttcttccttgggagacacattcatggagccaacaactaattatcataccaagaaaacaaaaaccgtgagggagagcag

SEQ ID NO: 154110 - DNA, 75 bp, Homo sapiens
  chr6:134749835-134749910
  hypo
acctgcctcgggcatcgctgcttctcttgtcggcaagttgccgaaggatccttccctaggcggagatcagttaga

SEQ ID NO: 154111 - DNA, 83 bp, Homo sapiens; identical to SEQ ID NO: 20588
  chr6:134817632-134817715
  hypo

SEQ ID NO: 154112 - DNA, 74 bp, Homo sapiens; identical to SEQ ID NO: 72061
  chr6:135305599-135305673
  hypo

SEQ ID NO: 154113 - DNA, 30 bp, Homo sapiens
  chr6:135318616-135318646
  hypo
gccagactttttcaccggtgctggggttga

SEQ ID NO: 154114 - DNA, 111 bp, Homo sapiens
  chr6:135427926-135428037
  hypo
tgtccatcgcaaacacgggcctcggggcagcagttctggtgaaggggaaaggagaagccccagaaagcttcatggtcacgccacgtatgggatgctcggcagctgccctgg

SEQ ID NO: 154115 - DNA, 45 bp, Homo sapiens; identical to SEQ ID NO: 5139
  chr6:135503607-135503652
  hypo

SEQ ID NO: 154116 - DNA, 30 bp, Homo sapiens; identical to SEQ ID NO: 20590
  chr6:135572009-135572039
  hypo

SEQ ID NO: 154117 - DNA, 30 bp, Homo sapiens; identical to SEQ ID NO: 20591
  chr6:135572371-135572401
  hypo

SEQ ID NO: 154118 - DNA, 30 bp, Homo sapiens
  chr6:135640334-135640364
  hypo
tttgggggcagggcgcggtggctcatgcca

SEQ ID NO: 154119 - DNA, 24 bp, Homo sapiens
  chr6:135676748-135676772
  hypo
aacatatcggctgggcgcggtggc

SEQ ID NO: 154120 - DNA, 35 bp, Homo sapiens
  chr6:135930508-135930543
  hypo
gcatgagccactgcgcccagccttggataattttt

SEQ ID NO: 154121 - DNA, 30 bp, Homo sapiens
  chr6:136337586-136337616
  hypo
cacctaataagcgctcgataaatattagct

SEQ ID NO: 154122 - DNA, 30 bp, Homo sapiens
  chr6:136383169-136383199
  hypo
tactgtgatagagccgagcaaagctctgtg

SEQ ID NO: 154123 - DNA, 56 bp, Homo sapiens
  chr6:136552673-136552729
  hypo
atgtatcaggtactacgctcagagccaaggacaaaagtgaacgagacactctcagc

SEQ ID NO: 154124 - DNA, 160 bp, Homo sapiens; identical to SEQ ID NO: 72065
  chr6:136556324-136556484
  hypo

SEQ ID NO: 154125 - DNA, 30 bp, Homo sapiens; identical to SEQ ID NO: 20592
  chr6:136647689-136647719
  hypo

SEQ ID NO: 154126 - DNA, 121 bp, Homo sapiens; identical to SEQ ID NO: 72067
  chr6:136655687-136655808
  hypo

SEQ ID NO: 154127 - DNA, 30 bp, Homo sapiens; identical to SEQ ID NO: 20593
  chr6:136657114-136657144
  hypo

SEQ ID NO: 154128 - DNA, 31 bp, Homo sapiens; identical to SEQ ID NO: 72069
  chr6:136681876-136681907
  hypo

SEQ ID NO: 154129 - DNA, 85 bp, Homo sapiens; identical to SEQ ID NO: 72070
  chr6:136682123-136682208
  hypo

SEQ ID NO: 154130 - DNA, 207 bp, Homo sapiens; identical to SEQ ID NO: 20594
  chr6:136682757-136682964
  hypo

SEQ ID NO: 154131 - DNA, 31 bp, Homo sapiens
  chr6:136760664-136760695
  hypo
taaaatctctaggacgcgcttagatgaataa

SEQ ID NO: 154132 - DNA, 17 bp, Homo sapiens
  chr6:136770171-136770188
  hypo
cacagtggctcaagccc

SEQ ID NO: 154133 - DNA, 155 bp, Homo sapiens; identical to SEQ ID NO: 72074
  chr6:136809004-136809159
  hypo

SEQ ID NO: 154134 - DNA, 564 bp, Homo sapiens; identical to SEQ ID NO: 43506
  chr6:136870741-136871305
  hypo

SEQ ID NO: 154135 - DNA, 30 bp, Homo sapiens
  chr6:136871457-136871487
  hypo
actatccccgctgtgcggtcacctgtttcg

SEQ ID NO: 154136 - DNA, 30 bp, Homo sapiens; identical to SEQ ID NO: 72076
  chr6:136888847-136888877
  hypo

SEQ ID NO: 154137 - DNA, 157 bp, Homo sapiens; identical to SEQ ID NO: 72077
  chr6:136901461-136901618
  hypo

SEQ ID NO: 154138 - DNA, 126 bp, Homo sapiens; identical to SEQ ID NO: 20596
  chr6:136980867-136980993
  hypo

SEQ ID NO: 154139 - DNA, 30 bp, Homo sapiens; identical to SEQ ID NO: 72079
  chr6:137021183-137021213
  hypo

SEQ ID NO: 154140 - DNA, 100 bp, Homo sapiens
  chr6:137144496-137144596
  hypo
gaggaatgcacacattcgcaagtaggtgttacagactccagttaattgtctcccgtcgcgcgcattggctcagcctgtggttaaagctgctcaggaggct

SEQ ID NO: 154141 - DNA, 213 bp, Homo sapiens
  chr6:137147516-137147729
  hypo
catcacctgtagtggcgatggctcgctgcagctctgggacactgccaaagctgcagggccactgcaagtctataaagaacacgctcaggaggtaggagggaaatctttctgggctgattatttttctttcttcgactttggttgaaatccatttggggatggacacatggagaaatatcttcaggggacaagtttaaacgttagcatttctta

SEQ ID NO: 154142 - DNA, 2356 bp, Homo sapiens; identical to SEQ ID NO: 114088
  chr6:137241792-137244148
  hypo

SEQ ID NO: 154143 - DNA, 230 bp, Homo sapiens; identical to SEQ ID NO: 43510
  chr6:137244235-137244465
  hypo

SEQ ID NO: 154144 - DNA, 30 bp, Homo sapiens; identical to SEQ ID NO: 5147
  chr6:137421484-137421514
  hypo

SEQ ID NO: 154145 - DNA, 31 bp, Homo sapiens; identical to SEQ ID NO: 20602
  chr6:137491867-137491898
  hypo

SEQ ID NO: 154146 - DNA, 44 bp, Homo sapiens; identical to SEQ ID NO: 20603
  chr6:138055130-138055174
  hypo

SEQ ID NO: 154147 - DNA, 30 bp, Homo sapiens
  chr6:138350256-138350286
  hypo
caacctcattcagcccgactcgcccatcag

SEQ ID NO: 154148 - DNA, 228 bp, Homo sapiens; identical to SEQ ID NO: 43527
  chr6:138428362-138428590
  hypo

SEQ ID NO: 154149 - DNA, 191 bp, Homo sapiens; identical to SEQ ID NO: 72088
  chr6:138518766-138518957
  hypo

SEQ ID NO: 154150 - DNA, 30 bp, Homo sapiens; identical to SEQ ID NO: 72089
  chr6:138723160-138723190
  hypo

SEQ ID NO: 154151 - DNA, 267 bp, Homo sapiens; identical to SEQ ID NO: 5159
  chr6:138724515-138724782
  hypo

SEQ ID NO: 154152 - DNA, 328 bp, Homo sapiens; identical to SEQ ID NO: 72091
  chr6:138745334-138745662
  hypo

SEQ ID NO: 154153 - DNA, 30 bp, Homo sapiens; identical to SEQ ID NO: 20607
  chr6:138785343-138785373
  hypo

SEQ ID NO: 154154 - DNA, 264 bp, Homo sapiens; identical to SEQ ID NO: 72093
  chr6:138790361-138790625
  hypo

SEQ ID NO: 154155 - DNA, 42 bp, Homo sapiens; identical to SEQ ID NO: 72094
  chr6:138812077-138812119
  hypo

SEQ ID NO: 154156 - DNA, 162 bp, Homo sapiens; identical to SEQ ID NO: 72095
  chr6:138883860-138884022
  hypo

SEQ ID NO: 154157 - DNA, 185 bp, Homo sapiens; identical to SEQ ID NO: 72096
  chr6:138884362-138884547
  hypo

SEQ ID NO: 154158 - DNA, 155 bp, Homo sapiens; identical to SEQ ID NO: 72097
  chr6:138905936-138906091
  hypo

SEQ ID NO: 154159 - DNA, 30 bp, Homo sapiens; identical to SEQ ID NO: 72098
  chr6:138938916-138938946
  hypo

SEQ ID NO: 154160 - DNA, 28 bp, Homo sapiens
  chr6:139002029-139002057
  hypo
aggcatgagccaccgtgcccagccccct

SEQ ID NO: 154161 - DNA, 484 bp, Homo sapiens; identical to SEQ ID NO: 43534
  chr6:139013360-139013844
  hypo

SEQ ID NO: 154162 - DNA, 31 bp, Homo sapiens
  chr6:139137900-139137931
  hypo
catgagccgccgcgcccggcctaaacatctt

SEQ ID NO: 154163 - DNA, 30 bp, Homo sapiens; identical to SEQ ID NO: 72101
  chr6:139139728-139139758
  hypo

SEQ ID NO: 154164 - DNA, 31 bp, Homo sapiens; identical to SEQ ID NO: 5162
  chr6:139350568-139350599
  hypo

SEQ ID NO: 154165 - DNA, 33 bp, Homo sapiens
  chr6:139455796-139455829
  hypo
tacaggcataagccaccgcgcccggtcccctgt

SEQ ID NO: 154166 - DNA, 30 bp, Homo sapiens; identical to SEQ ID NO: 20611
  chr6:139461634-139461664
  hypo

SEQ ID NO: 154167 - DNA, 380 bp, Homo sapiens; identical to SEQ ID NO: 72104
  chr6:139564047-139564427
  hypo

SEQ ID NO: 154168 - DNA, 30 bp, Homo sapiens
  chr6:139665132-139665162
  hypo
acctgcctttctaagcgtgtgggagctggg

SEQ ID NO: 154169 - DNA, 408 bp, Homo sapiens; identical to SEQ ID NO: 114135
  chr6:139694963-139695371
  hypo

SEQ ID NO: 154170 - DNA, 273 bp, Homo sapiens
  chr6:139697289-139697562
  hypo
tcctgctgcgaagagcgagtccgcctccccgcccccccctcgtctttttcccccttcttgcacacaagacttttaaaggccctgtttcttgaggactggaaattctgatacatttccccgttcaggaatttgcaaaagagacccaatcctgattattttcgtctatgacccctctgtcttttcctagtcaggcatatttttgtaaatgttgttactttgtgtcttgtcttctttcctcttccaggctctccggcaaaccgtgcaggcaaataa

SEQ ID NO: 154171 - DNA, 30 bp, Homo sapiens; identical to SEQ ID NO: 72106
  chr6:139716824-139716854
  hypo

SEQ ID NO: 154172 - DNA, 30 bp, Homo sapiens
  chr6:139831845-139831875
  hypo
gctctaaacccatgccgggtcaacacgtct

SEQ ID NO: 154173 - DNA, 64 bp, Homo sapiens
  chr6:139858224-139858288
  hypo
aggcctggaccaacagtccctcggtgaattcatgacaaaacgcctgaatgtggaatcagggtag

SEQ ID NO: 154174 - DNA, 21 bp, Homo sapiens
  chr6:139858355-139858376
  hypo
gggacacccagaactaaccca

SEQ ID NO: 154175 - DNA, 79 bp, Homo sapiens
  chr6:139858704-139858783
  hypo
ttacccttgtccaggccctgtcgtatgaatagttctatttcattcgactcttcctctccagacatgtgggagaaagatg

SEQ ID NO: 154176 - DNA, 34 bp, Homo sapiens; identical to SEQ ID NO: 20613
  chr6:139871209-139871243
  hypo

SEQ ID NO: 154177 - DNA, 34 bp, Homo sapiens; identical to SEQ ID NO: 72109
  chr6:139871482-139871516
  hypo

SEQ ID NO: 154178 - DNA, 32 bp, Homo sapiens
  chr6:139908684-139908716
  hypo
tacaggcgtgggccaccgcgcctggccagaag

SEQ ID NO: 154179 - DNA, 31 bp, Homo sapiens; identical to SEQ ID NO: 72110
  chr6:140012887-140012918
  hypo

SEQ ID NO: 154180 - DNA, 213 bp, Homo sapiens; identical to SEQ ID NO: 20614
  chr6:140300531-140300744
  hypo

SEQ ID NO: 154181 - DNA, 36 bp, Homo sapiens
  chr6:141150319-141150355
  hypo
gctgtgtgattgtcacgtcaccggactgctcaatga

SEQ ID NO: 154182 - DNA, 28 bp, Homo sapiens
  chr6:141150739-141150767
  hypo
gacacacagcaaggccgggcgcggtggc

SEQ ID NO: 154183 - DNA, 30 bp, Homo sapiens; identical to SEQ ID NO: 5164
  chr6:141490782-141490812
  hypo

SEQ ID NO: 154184 - DNA, 33 bp, Homo sapiens
  chr6:142237864-142237897
  hypo
ttgtttttttccccccgataaacatataaattg

SEQ ID NO: 154185 - DNA, 87 bp, Homo sapiens
  chr6:142509607-142509694
  hypo
ccaaagtggtgggattacaggcatgagccaccgtgcctgttttcaaatagtaaaaccacgttcgctctggaacgctaatgtgcgtat

SEQ ID NO: 154186 - DNA, 78 bp, Homo sapiens
  chr6:142543124-142543202
  hypo
tacaataatcaaggtgagatattatgatgtcttagtccaggagtagccttggaggtaataaaacgggattggtttctg

SEQ ID NO: 154187 - DNA, 949 bp, Homo sapiens; identical to SEQ ID NO: 114141
  chr6:142622499-142623448
  hypo

SEQ ID NO: 154188 - DNA, 66 bp, Homo sapiens; identical to SEQ ID NO: 20616
  chr6:143031707-143031773
  hypo

SEQ ID NO: 154189 - DNA, 39 bp, Homo sapiens
  chr6:143239180-143239219
  hypo
attatagacgtgagccatcatgcccggagcgtctgtaat

SEQ ID NO: 154190 - DNA, 30 bp, Homo sapiens; identical to SEQ ID NO: 72116
  chr6:143253197-143253227
  hypo

SEQ ID NO: 154191 - DNA, 199 bp, Homo sapiens; identical to SEQ ID NO: 114144
  chr6:143266116-143266315
  hypo

SEQ ID NO: 154192 - DNA, 47 bp, Homo sapiens
  chr6:143557406-143557453
  hypo
tccggctcagcccagcggggcagggcctctgccgtgagtttgcagat

SEQ ID NO: 154193 - DNA, 30 bp, Homo sapiens; identical to SEQ ID NO: 20618
  chr6:143658588-143658618
  hypo

SEQ ID NO: 154194 - DNA, 30 bp, Homo sapiens; identical to SEQ ID NO: 72119
  chr6:143661926-143661956
  hypo

SEQ ID NO: 154195 - DNA, 18 bp, Homo sapiens
  chr6:143831531-143831549
  hypo
aggtatgagccaccgcgg

SEQ ID NO: 154196 - DNA, 30 bp, Homo sapiens
  chr6:143859663-143859693
  hypo
cggcaaaagccctgccggggcgtgaacgtg

SEQ ID NO: 154197 - DNA, 30 bp, Homo sapiens
  chr6:143860030-143860060
  hypo
gaaaagcattgagtccgaatgtttttaacc

SEQ ID NO: 154198 - DNA, 40 bp, Homo sapiens; identical to SEQ ID NO: 72120
  chr6:143947370-143947410
  hypo

SEQ ID NO: 154199 - DNA, 40 bp, Homo sapiens; identical to SEQ ID NO: 72121
  chr6:143947649-143947689
  hypo

SEQ ID NO: 154200 - DNA, 714 bp, Homo sapiens; identical to SEQ ID NO: 114155
  chr6:143998942-143999656
  hypo

SEQ ID NO: 154201 - DNA, 30 bp, Homo sapiens; identical to SEQ ID NO: 114156
  chr6:144000048-144000078
  hypo

SEQ ID NO: 154202 - DNA, 174 bp, Homo sapiens
  chr6:144067583-144067757
  hypo
tgcgagaatgtggcccgatccctaggccagcggcacttgctcttgcagttgccaccttcatccttaagtttagggcagaacagccgtgaatctctgggcctgttcccaggaatggaggccaagacaactgttggaggaggtctacagagtcccgccacccctcagagcccagtc

SEQ ID NO: 154203 - DNA, 30 bp, Homo sapiens; identical to SEQ ID NO: 72124
  chr6:144179890-144179920
  hypo

SEQ ID NO: 154204 - DNA, 251 bp, Homo sapiens; identical to SEQ ID NO: 72125
  chr6:144271185-144271436
  hypo

SEQ ID NO: 154205 - DNA, 73 bp, Homo sapiens; identical to SEQ ID NO: 20620
  chr6:144330174-144330247
  hypo

SEQ ID NO: 154206 - DNA, 30 bp, Homo sapiens
  chr6:144409814-144409844
  hypo
ggaaaggaaagttatcgtggctatgagttc

SEQ ID NO: 154207 - DNA, 30 bp, Homo sapiens; identical to SEQ ID NO: 72127
  chr6:144467325-144467355
  hypo

SEQ ID NO: 154208 - DNA, 80 bp, Homo sapiens; identical to SEQ ID NO: 72128
  chr6:144508670-144508750
  hypo

SEQ ID NO: 154209 - DNA, 174 bp, Homo sapiens; identical to SEQ ID NO: 72129
  chr6:144534398-144534572
  hypo

SEQ ID NO: 154210 - DNA, 30 bp, Homo sapiens
  chr6:144537001-144537031
  hypo
aagaggaggccactgcgctgcatccaagac

SEQ ID NO: 154211 - DNA, 30 bp, Homo sapiens; identical to SEQ ID NO: 114162
  chr6:144537897-144537927
  hypo

SEQ ID NO: 154212 - DNA, 47 bp, Homo sapiens; identical to SEQ ID NO: 5173
  chr6:144537938-144537985
  hypo

SEQ ID NO: 154213 - DNA, 488 bp, Homo sapiens; identical to SEQ ID NO: 43561
  chr6:144606892-144607380
  hypo

SEQ ID NO: 154214 - DNA, 106 bp, Homo sapiens; identical to SEQ ID NO: 20624
  chr6:144608086-144608192
  hypo

SEQ ID NO: 154215 - DNA, 30 bp, Homo sapiens
  chr6:144661281-144661311
  hypo
gacataacaagactgcgactgcgtctcaag

SEQ ID NO: 154216 - DNA, 178 bp, Homo sapiens
  chr6:144973590-144973768
  hypo
actagtagactctggcgctttcactctgccacagtctaggtgggatcacttaaacctacttgaaagataaagcgatgcttcaattgcctggacaaatcaggccagacattcattttcaagcgttatcaatggatttttataaacattccaaaaaactttagaccgtagtatcacagta

SEQ ID NO: 154217 - DNA, 30 bp, Homo sapiens; identical to SEQ ID NO: 43562
  chr6:145166138-145166168
  hypo

SEQ ID NO: 154218 - DNA, 32 bp, Homo sapiens; identical to SEQ ID NO: 20625
  chr6:146011351-146011383
  hypo

SEQ ID NO: 154219 - DNA, 30 bp, Homo sapiens
  chr6:146060087-146060117
  hypo
cagtgcatcaccaccggcctgttttgtcat

SEQ ID NO: 154220 - DNA, 783 bp, Homo sapiens; identical to SEQ ID NO: 114170
  chr6:146136027-146136810
  hypo

SEQ ID NO: 154221 - DNA, 801 bp, Homo sapiens; identical to SEQ ID NO: 114175
  chr6:146864476-146865277
  hypo

SEQ ID NO: 154222 - DNA, 31 bp, Homo sapiens; identical to SEQ ID NO: 72138
  chr6:147177766-147177797
  hypo

SEQ ID NO: 154223 - DNA, 70 bp, Homo sapiens; identical to SEQ ID NO: 72139
  chr6:147519321-147519391
  hypo

SEQ ID NO: 154224 - DNA, 164 bp, Homo sapiens; identical to SEQ ID NO: 72140
  chr6:147728141-147728305
  hypo

SEQ ID NO: 154225 - DNA, 43 bp, Homo sapiens
  chr6:148062631-148062674
  hypo
gttttcaaaatatgttgcatgcggattaacataaaaaggcaaa

SEQ ID NO: 154226 - DNA, 138 bp, Homo sapiens
  chr6:148200359-148200497
  hypo
tcacaactgcttctgcgcaagcaatagggataaagaattttgcctttccatgaaatggctcagccagggtaattatttatctgcgcaggctgatgccttaagcttagtgcccgtggactcctccgagagcagagatga

SEQ ID NO: 154227 - DNA, 30 bp, Homo sapiens; identical to SEQ ID NO: 20629
  chr6:148200970-148201000
  hypo

SEQ ID NO: 154228 - DNA, 30 bp, Homo sapiens; identical to SEQ ID NO: 43571
  chr6:148540220-148540250
  hypo

SEQ ID NO: 154229 - DNA, 40 bp, Homo sapiens; identical to SEQ ID NO: 72144
  chr6:148648688-148648728
  hypo

SEQ ID NO: 154230 - DNA, 31 bp, Homo sapiens; identical to SEQ ID NO: 72145
  chr6:148699760-148699791
  hypo

SEQ ID NO: 154231 - DNA, 158 bp, Homo sapiens
  chr6:148710315-148710473
  hypo
gtggactacacgagccggctaaagtctaagcgcttcacacgtgttactccagtagtcctcactgaagtaggtgttgtgattattcagtgttcctcagaggttgagacgtgcctaaggccacttaaccaataccaggcgctatggagctgggtggaaac

SEQ ID NO: 154232 - DNA, 30 bp, Homo sapiens
  chr6:148711256-148711286
  hypo
tccaccccttcaggacggttcactgggaaa

SEQ ID NO: 154233 - DNA, 199 bp, Homo sapiens; identical to SEQ ID NO: 72147
  chr6:148819896-148820095
  hypo

SEQ ID NO: 154234 - DNA, 31 bp, Homo sapiens; identical to SEQ ID NO: 72148
  chr6:148854572-148854603
  hypo

SEQ ID NO: 154235 - DNA, 31 bp, Homo sapiens; identical to SEQ ID NO: 72149
  chr6:148857378-148857409
  hypo

SEQ ID NO: 154236 - DNA, 31 bp, Homo sapiens; identical to SEQ ID NO: 72150
  chr6:148865873-148865904
  hypo

SEQ ID NO: 154237 - DNA, 211 bp, Homo sapiens
  chr6:148869355-148869566
  hypo
ccttttagacatacgcgaagtagtcctcgatgacacatggagcgtttctatcatattctttcttaatttatccagattccaagtggtggactcacggaaatctgccgaaagcccgtctctcctgggtgcatttcgtctgtgtcagattggctcatttccatcggtctgcccatgtacgccggcaccctctccaccgcgggcttcagcacac

SEQ ID NO: 154238 - DNA, 196 bp, Homo sapiens; identical to SEQ ID NO: 72151
  chr6:149177571-149177767
  hypo

SEQ ID NO: 154239 - DNA, 93 bp, Homo sapiens; identical to SEQ ID NO: 72152
  chr6:149198423-149198516
  hypo

SEQ ID NO: 154240 - DNA, 33 bp, Homo sapiens; identical to SEQ ID NO: 72153
  chr6:149198575-149198608
  hypo

SEQ ID NO: 154241 - DNA, 30 bp, Homo sapiens; identical to SEQ ID NO: 72154
  chr6:149285948-149285978
  hypo

SEQ ID NO: 154242 - DNA, 312 bp, Homo sapiens
  chr6:149409545-149409857
  hypo
acttcacagaagtcacgttctctgtccctcggcacacgcttgtatcttaatctttatttttccaactcagttgtggaattccaccaggaaaaccctttcttgctcaagaagaactgcgggtacaatttcagctcaccttgggtctgtgttgccccagggagcccaggctgagggtgaacaagctgcagctgccacttgaacagcgctttctcaggtcttgagccgctttgcgtcatctctgttgcttcagtgcctccagaagccccttggtgctccccccaagggtagcgctcaccacgctacattgtaaat

SEQ ID NO: 154243 - DNA, 30 bp, Homo sapiens; identical to SEQ ID NO: 20631
  chr6:149479234-149479264
  hypo

SEQ ID NO: 154244 - DNA, 30 bp, Homo sapiens
  chr6:149572233-149572263
  hypo
tgtttgccaagttaacgctttccttttgcc

SEQ ID NO: 154245 - DNA, 21 bp, Homo sapiens
  chr6:149574460-149574481
  hypo
aagaatgtagttttggccagg

SEQ ID NO: 154246 - DNA, 111 bp, Homo sapiens
  chr6:149721361-149721472
  hypo
gctggcgcacacagcgggaggggagggagcccaggatgtgcacgcaccctctccctcatccaccgctgtcacctcctgctgctcttcctgctgctcgtgtactcgttaggt

SEQ ID NO: 154247 - DNA, 324 bp, Homo sapiens; identical to SEQ ID NO: 114189
  chr6:149771948-149772272
  hypo

SEQ ID NO: 154248 - DNA, 169 bp, Homo sapiens; identical to SEQ ID NO: 114190
  chr6:149772292-149772461
  hypo

SEQ ID NO: 154249 - DNA, 35 bp, Homo sapiens; identical to SEQ ID NO: 72158
  chr6:149772981-149773016
  hypo

SEQ ID NO: 154250 - DNA, 30 bp, Homo sapiens
  chr6:149777791-149777821
  hypo
ccggacctaccggtcgttgacgaaggagaa

SEQ ID NO: 154251 - DNA, 43 bp, Homo sapiens
  chr6:149786123-149786166
  hypo
tcacactgctgtgctctctctcgtatgtgacctttcctgctat

SEQ ID NO: 154252 - DNA, 170 bp, Homo sapiens
  chr6:149813262-149813432
  hypo
agccttgtcccttgcgaacgctccccacgaaggcttgcgggtggttaggccgccatgtcttctgtttcacattcttattcctgtacccgaacgtggaaaccccttcaccacgcacctcaaaaccaccaggccgccacttcgccgcccgcctcaccggcaccattgcagcc

SEQ ID NO: 154253 - DNA, 30 bp, Homo sapiens; identical to SEQ ID NO: 72159
  chr6:149817119-149817149
  hypo

SEQ ID NO: 154254 - DNA, 25 bp, Homo sapiens
  chr6:149851783-149851808
  hypo
gactccatctcggaaaaaaaaaaag

SEQ ID NO: 154255 - DNA, 91 bp, Homo sapiens
  chr6:149868351-149868442
  hypo
ggcttgagccaccgcacctggcggaaaagccagagcttttataatgatttacaagatcctctcctaccccatcctacgccatcttcttatt

SEQ ID NO: 154256 - DNA, 485 bp, Homo sapiens; identical to SEQ ID NO: 72161
  chr6:149915184-149915669
  hypo

SEQ ID NO: 154257 - DNA, 85 bp, Homo sapiens; identical to SEQ ID NO: 20634
  chr6:150081970-150082055
  hypo

SEQ ID NO: 154258 - DNA, 30 bp, Homo sapiens; identical to SEQ ID NO: 72163
  chr6:150160453-150160483
  hypo

SEQ ID NO: 154259 - DNA, 123 bp, Homo sapiens; identical to SEQ ID NO: 72164
  chr6:150174428-150174551
  hypo

SEQ ID NO: 154260 - DNA, 287 bp, Homo sapiens; identical to SEQ ID NO: 43585
  chr6:150185354-150185641
  hypo

SEQ ID NO: 154261 - DNA, 211 bp, Homo sapiens
  chr6:150209154-150209365
  hypo
tggagaaaccccatctctactaaaaatgtaggatgtagttcggcactgtaatgtttagagggtggtgaaaggatttcttataccacatcttgtatgttatctgggagtaaatgctgcagccacaagcgccaccagcaagtcttctcagggtgaacgggaaaaggggatgggacctgctgagctaaatcacggtaaacgcagacagcaaaca

SEQ ID NO: 154262 - DNA, 30 bp, Homo sapiens; identical to SEQ ID NO: 72166
  chr6:150231927-150231957
  hypo

SEQ ID NO: 154263 - DNA, 100 bp, Homo sapiens; identical to SEQ ID NO: 72167
  chr6:150420026-150420126
  hypo

SEQ ID NO: 154264 - DNA, 40 bp, Homo sapiens; identical to SEQ ID NO: 72168
  chr6:150420185-150420225
  hypo

SEQ ID NO: 154265 - DNA, 121 bp, Homo sapiens
  chr6:150421766-150421887
  hypo
gttattgaaaaagtcgtcccttttccctttttctgtaacgaaatagacaggaatgaaagactttccccggggcctggaagctgggggtggtgggtgaataactcctccattctcagggcca

SEQ ID NO: 154266 - DNA, 121 bp, Homo sapiens
  chr6:150437045-150437166
  hypo
gccggctgagcctagtgagggagccccgtgagcccgtgccagcccggaacccgcaccagcctgcaagcgccacgctcagccccggctggcttcggcgcctcccgctccacacctccctgag

SEQ ID NO: 154267 - DNA, 44 bp, Homo sapiens
  chr6:150437285-150437329
  hypo
gagtgagcgagggctgctagcacgttgtcacttcttaccagggg

SEQ ID NO: 154268 - DNA, 36 bp, Homo sapiens; identical to SEQ ID NO: 72169
  chr6:150487185-150487221
  hypo

SEQ ID NO: 154269 - DNA, 119 bp, Homo sapiens
  chr6:150498912-150499031
  hypo
gagtgggacctgggccgctttctctgagccagtccggactgcagcagaaccccagtgactgtcccaacaagaggccgggacagactcatctcctgaggccccgtcgtcaggcaagaaag

SEQ ID NO: 154270 - DNA, 32 bp, Homo sapiens
  chr6:150499231-150499263
  hypo
cccccatgcagcctccgcgaggccttttgtgc

SEQ ID NO: 154271 - DNA, 170 bp, Homo sapiens
  chr6:150518590-150518760
  hypo
ctgaatattcgctgccggcctggggtcggtgagattagtgagaagggaacaggtggcgtaaaagctaatgggatgctttaagattggcacattgctgatttccaggctgccgtgggaaggctggtggtgggtatccaggttgctgtagcggggtggagagaaagcacctc

SEQ ID NO: 154272 - DNA, 40 bp, Homo sapiens; identical to SEQ ID NO: 20636
  chr6:150596882-150596922
  hypo

SEQ ID NO: 154273 - DNA, 496 bp, Homo sapiens
  chr6:150654139-150654635
  hypo
agttgatagtgtgcgcgagttgatagtgcgtgagttgatagtgtgtatgagttgatagtttgtgccaggtgatagtgggtgagttgatagtgtgcacgagttgatagtgtgcacgtgatagtgtgtgcacgagttgacagtgtgtgagttgatagtgtgtcagttgatagcatgtgagttgatagtgtgtgcatgagttgctagtgcacgagttgattgagttgatagtatgcaagttgatagtgtgcacgagttggtattgtgtgcaagttgatagtgtgcacgagttgatagttgcaggttgatagtgtgtgcacgagttaacagtgtgcaagttgatagtgtgtgcatgagttgctagtgcgcgagttgattgagttgatagtgtgcaagttgatagtgtgcacaatttgatattgtgcgcgagttgatagtgtgcacgagttgataatgcgtgcgagttgatagtgtgtgcgaattgatagggtgcatgagt

SEQ ID NO: 154274 - DNA, 31 bp, Homo sapiens; identical to SEQ ID NO: 72173
  chr6:150746914-150746945
  hypo

SEQ ID NO: 154275 - DNA, 767 bp, Homo sapiens; identical to SEQ ID NO: 5194
  chr6:150921276-150922043
  hypo

SEQ ID NO: 154276 - DNA, 67 bp, Homo sapiens
  chr6:151125833-151125900
  hypo
tcaatgacatgaagcggaaacacgagcacgcggtccggttacaggtgagcccgcgaggtgtcggtgc

SEQ ID NO: 154277 - DNA, 30 bp, Homo sapiens; identical to SEQ ID NO: 72175
  chr6:151152811-151152841
  hypo

SEQ ID NO: 154278 - DNA, 30 bp, Homo sapiens; identical to SEQ ID NO: 20639
  chr6:151244579-151244609
  hypo

SEQ ID NO: 154279 - DNA, 30 bp, Homo sapiens
  chr6:151270242-151270272
  hypo
acccatctaccatcacgtggcagagaggtg

SEQ ID NO: 154280 - DNA, 126 bp, Homo sapiens
  chr6:151306908-151307034
  hypo
aggaagcactgggaaatagcacgtcactggtgcctcgtgccatttccgtgcctttccctgtcttgcctcagccttgcactgtggaatgcaaaagagtagaagaaactccaacgtgaaaattgtcga

SEQ ID NO: 154281 - DNA, 30 bp, Homo sapiens; identical to SEQ ID NO: 20640
  chr6:151334995-151335025
  hypo

SEQ ID NO: 154282 - DNA, 170 bp, Homo sapiens
  chr6:151346253-151346423
  hypo
catttcccagagtccggttaccctcaccgcaccccaggtttgccgtagaaggatgagattccctacatgtaggcgtcttcagagtgaacctgttgctcagggcccgcgagcccacagggctccatgcccactgagcaggctcgtggacgtcggcacgtagctcagatgtg

SEQ ID NO: 154283 - DNA, 30 bp, Homo sapiens; identical to SEQ ID NO: 72180
  chr6:151430466-151430496
  hypo

SEQ ID NO: 154284 - DNA, 30 bp, Homo sapiens; identical to SEQ ID NO: 72181
  chr6:151430850-151430880
  hypo

SEQ ID NO: 154285 - DNA, 35 bp, Homo sapiens; identical to SEQ ID NO: 72182
  chr6:151546981-151547016
  hypo

SEQ ID NO: 154286 - DNA, 35 bp, Homo sapiens; identical to SEQ ID NO: 72183
  chr6:151547075-151547110
  hypo

SEQ ID NO: 154287 - DNA, 119 bp, Homo sapiens; identical to SEQ ID NO: 43603
  chr6:151561221-151561340
  hypo

SEQ ID NO: 154288 - DNA, 623 bp, Homo sapiens; identical to SEQ ID NO: 5196
  chr6:151561368-151561991
  hypo

SEQ ID NO: 154289 - DNA, 610 bp, Homo sapiens; identical to SEQ ID NO: 43605
  chr6:151562056-151562666
  hypo

SEQ ID NO: 154290 - DNA, 26 bp, Homo sapiens
  chr6:151575755-151575781
  hypo
gtgaaccactgcgcctggccttagat

SEQ ID NO: 154291 - DNA, 370 bp, Homo sapiens; identical to SEQ ID NO: 72187
  chr6:151662636-151663006
  hypo

SEQ ID NO: 154292 - DNA, 30 bp, Homo sapiens; identical to SEQ ID NO: 20646
  chr6:151671679-151671709
  hypo

SEQ ID NO: 154293 - DNA, 271 bp, Homo sapiens; identical to SEQ ID NO: 72189
  chr6:151687249-151687520
  hypo

SEQ ID NO: 154294 - DNA, 30 bp, Homo sapiens
  chr6:151687868-151687898
  hypo
gcttcctgaatgagcgggtaggcgtgcaga

SEQ ID NO: 154295 - DNA, 31 bp, Homo sapiens; identical to SEQ ID NO: 20647
  chr6:151726417-151726448
  hypo

SEQ ID NO: 154296 - DNA, 39 bp, Homo sapiens; identical to SEQ ID NO: 72191
  chr6:151770485-151770524
  hypo

SEQ ID NO: 154297 - DNA, 30 bp, Homo sapiens; identical to SEQ ID NO: 43609
  chr6:151918840-151918870
  hypo

SEQ ID NO: 154298 - DNA, 30 bp, Homo sapiens; identical to SEQ ID NO: 43610
  chr6:151942178-151942208
  hypo

SEQ ID NO: 154299 - DNA, 30 bp, Homo sapiens; identical to SEQ ID NO: 43611
  chr6:151948350-151948380
  hypo

SEQ ID NO: 154300 - DNA, 30 bp, Homo sapiens; identical to SEQ ID NO: 43612
  chr6:151952316-151952346
  hypo

SEQ ID NO: 154301 - DNA, 143 bp, Homo sapiens
  chr6:152099112-152099255
  hypo
taaataaaaataaaaaattaaaatgtacaatagagtgtgtaaaaccaggaaatctacatcttgacacttaactacccaagacgcaattggttcctcgtctgatttttaaaagaagtttccactttcttcggaaaatcacgaca

SEQ ID NO: 154302 - DNA, 30 bp, Homo sapiens
  chr6:152126041-152126071
  hypo
gtggatccatgtgaacgccactgggaaatg

SEQ ID NO: 154303 - DNA, 30 bp, Homo sapiens
  chr6:152135140-152135170
  hypo
gggccctaaggtccacgctccttggttcca

SEQ ID NO: 154304 - DNA, 30 bp, Homo sapiens; identical to SEQ ID NO: 43613
  chr6:152417445-152417475
  hypo

SEQ ID NO: 154305 - DNA, 30 bp, Homo sapiens; identical to SEQ ID NO: 43614
  chr6:152437000-152437030
  hypo

SEQ ID NO: 154306 - DNA, 45 bp, Homo sapiens
  chr6:152457828-152457873
  hypo
ttcatctgcgacaagcgatcctgcaggtcccggctctccttgctg

SEQ ID NO: 154307 - DNA, 30 bp, Homo sapiens
  chr6:152465115-152465145
  hypo
tcggacgtcgcaaaacggctctccagtccg

SEQ ID NO: 154308 - DNA, 125 bp, Homo sapiens
  chr6:152527364-152527489
  hypo
tctcttggatttcagcgagttcggcctgcaaggcggcctcagcgccactgtccgccgagagaaggagttgcttgccagcctccacagtcaggatgtagctgccttgttgccgcagaaacactttt

SEQ ID NO: 154309 - DNA, 30 bp, Homo sapiens
  chr6:152530590-152530620
  hypo
agatccataatgggccgggcccggtgactc

SEQ ID NO: 154310 - DNA, 178 bp, Homo sapiens
  chr6:152539827-152540005
  hypo
aaagtctgagttaaataaacacgaatatttatattaaagccgcttagtgtttattaattgaacaggccatggtggcaggcattggttcaggggcttgcatcttaaaccgattttaaaattccttggcagagaacagcgcaaaacgtccaccttcatcgtccccaccagaacttccaag

SEQ ID NO: 154311 - DNA, 30 bp, Homo sapiens
  chr6:152590358-152590388
  hypo
gacgccggggctctgcgtggctgttaggtc

SEQ ID NO: 154312 - DNA, 812 bp, Homo sapiens; identical to SEQ ID NO: 114237
  chr6:152622718-152623530
  hypo

SEQ ID NO: 154313 - DNA, 30 bp, Homo sapiens
  chr6:152625404-152625434
  hypo
agtcaccaagctttcgcacaatggtttgcc

SEQ ID NO: 154314 - DNA, 18 bp, Homo sapiens
  chr6:152633224-152633242
  hypo
agactttttttaatgaag

SEQ ID NO: 154315 - DNA, 166 bp, Homo sapiens
  chr6:152644580-152644746
  hypo
aaacaaaagaatgaaagtaggtgcttaattacttcaggcaccgatcttgcatggcggtgatttcctgcatgagcggaggctcttccccaggggttggggcggctccatcctggagcatgctcagggtttgctgccgcagcatgcccaaggccgactgctgctgctc

SEQ ID NO: 154316 - DNA, 30 bp, Homo sapiens; identical to SEQ ID NO: 5201
  chr6:152720395-152720425
  hypo

SEQ ID NO: 154317 - DNA, 254 bp, Homo sapiens; identical to SEQ ID NO: 43617
  chr6:152957526-152957780
  hypo

SEQ ID NO: 154318 - DNA, 689 bp, Homo sapiens; identical to SEQ ID NO: 43618
  chr6:152957815-152958504
  hypo

SEQ ID NO: 154319 - DNA, 31 bp, Homo sapiens; identical to SEQ ID NO: 20652
  chr6:153311586-153311617
  hypo

SEQ ID NO: 154320 - DNA, 40 bp, Homo sapiens; identical to SEQ ID NO: 72205
  chr6:153337060-153337100
  hypo

SEQ ID NO: 154321 - DNA, 111 bp, Homo sapiens
  chr6:153355447-153355558
  hypo
catgctccagggctgctctgacgtatacctgtgccgattaatgtgagggctgggaagcgcgaagtgatacagactgaagaaacagcatccgctaccttaactgacaacatg

SEQ ID NO: 154322 - DNA, 81 bp, Homo sapiens; identical to SEQ ID NO: 72206
  chr6:153572989-153573070
  hypo

SEQ ID NO: 154323 - DNA, 20 bp, Homo sapiens
  chr6:153573309-153573329
  hypo
gaatgatttttttttttaaa

SEQ ID NO: 154324 - DNA, 31 bp, Homo sapiens; identical to SEQ ID NO: 72208
  chr6:153990668-153990699
  hypo

SEQ ID NO: 154325 - DNA, 18 bp, Homo sapiens
  chr6:154300838-154300856
  hypo
gtacgtgtacaggtttct

SEQ ID NO: 154326 - DNA, 38 bp, Homo sapiens; identical to SEQ ID NO: 72209
  chr6:154709414-154709452
  hypo

SEQ ID NO: 154327 - DNA, 114 bp, Homo sapiens
  chr6:154727650-154727764
  hypo
cctcggatgtagtccgcaccccggaccagatgccgctcggtcgtgggtctggagaaccggtatgggggagaggagctctcttcaatgatcggaggaatccgctcgttactgaaa

SEQ ID NO: 154328 - DNA, 31 bp, Homo sapiens; identical to SEQ ID NO: 72211
  chr6:154739332-154739363
  hypo

SEQ ID NO: 154329 - DNA, 74 bp, Homo sapiens
  chr6:154757103-154757177
  hypo
atggcacgcgtcaagcgtggatgcacacctgagaatttggtgtgatggcacgcgtcaagcgtggatgcacaatg

SEQ ID NO: 154330 - DNA, 137 bp, Homo sapiens; identical to SEQ ID NO: 72212
  chr6:154764333-154764470
  hypo

SEQ ID NO: 154331 - DNA, 30 bp, Homo sapiens
  chr6:154771317-154771347
  hypo
tctgcagcagctgctcgccgttgatcttct

SEQ ID NO: 154332 - DNA, 20 bp, Homo sapiens
  chr6:154772650-154772670
  hypo
acactcgtgcacacacgcac

SEQ ID NO: 154333 - DNA, 97 bp, Homo sapiens; identical to SEQ ID NO: 72214
  chr6:154785475-154785572
  hypo

SEQ ID NO: 154334 - DNA, 22 bp, Homo sapiens
  chr6:154788906-154788928
  hypo
ttttgagatggagtctcgctct

SEQ ID NO: 154335 - DNA, 184 bp, Homo sapiens; identical to SEQ ID NO: 72216
  chr6:154799039-154799223
  hypo

SEQ ID NO: 154336 - DNA, 122 bp, Homo sapiens; identical to SEQ ID NO: 72217
  chr6:154806722-154806844
  hypo

SEQ ID NO: 154337 - DNA, 26 bp, Homo sapiens
  chr6:154812260-154812286
  hypo
gtgagccaccgcgcccggcccaggtc

SEQ ID NO: 154338 - DNA, 161 bp, Homo sapiens; identical to SEQ ID NO: 72218
  chr6:154826921-154827082
  hypo

SEQ ID NO: 154339 - DNA, 1654 bp, Homo sapiens; identical to SEQ ID NO: 114251
  chr6:154830546-154832200
  hypo

SEQ ID NO: 154340 - DNA, 176 bp, Homo sapiens; identical to SEQ ID NO: 72220
  chr6:154842636-154842812
  hypo

SEQ ID NO: 154341 - DNA, 24 bp, Homo sapiens
  chr6:154843244-154843268
  hypo
cactgcgcccggccctacatgatg

SEQ ID NO: 154342 - DNA, 342 bp, Homo sapiens
  chr6:154863130-154863472
  hypo
ccggctgagcccattctcttaatgacctcactgtatgtatgcctcttccttattgatttattcgattaaaaatatgttgagtcactgctgtgtgctgaactcgttccagatgttggagagagacagtgacgcaaaggaccagacctggttctcacagagtctacactccggtgtgaagggtctgaaagtatgtgggaagcgggagagaggaagaaagaggagcggaactgccgacccactctatgggaactctgtattgaaccatttgaggaagggccaggctgtttcccaaaagcagctgcaccattttgtatttcaccaaccaagcgtgtggggtgcaat

SEQ ID NO: 154343 - DNA, 153 bp, Homo sapiens; identical to SEQ ID NO: 72223
  chr6:154894707-154894860
  hypo

SEQ ID NO: 154344 - DNA, 22 bp, Homo sapiens
  chr6:154922341-154922363
  hypo
aagactccgtctcaaaaaaaaa

SEQ ID NO: 154345 - DNA, 30 bp, Homo sapiens; identical to SEQ ID NO: 72225
  chr6:154924326-154924356
  hypo

SEQ ID NO: 154346 - DNA, 40 bp, Homo sapiens; identical to SEQ ID NO: 72226
  chr6:154970552-154970592
  hypo

SEQ ID NO: 154347 - DNA, 39 bp, Homo sapiens; identical to SEQ ID NO: 72227
  chr6:154970831-154970870
  hypo

SEQ ID NO: 154348 - DNA, 30 bp, Homo sapiens
  chr6:155058840-155058870
  hypo
ttgagacaggtactcgctgttgacaggtca

SEQ ID NO: 154349 - DNA, 42 bp, Homo sapiens; identical to SEQ ID NO: 20662
  chr6:155077848-155077890
  hypo

SEQ ID NO: 154350 - DNA, 30 bp, Homo sapiens
  chr6:155116181-155116211
  hypo
aaggcttacctgatccgtgggtatctcaga

SEQ ID NO: 154351 - DNA, 175 bp, Homo sapiens; identical to SEQ ID NO: 20663
  chr6:155281566-155281741
  hypo

SEQ ID NO: 154352 - DNA, 93 bp, Homo sapiens; identical to SEQ ID NO: 114254
  chr6:155316127-155316220
  hypo

SEQ ID NO: 154353 - DNA, 1000 bp, Homo sapiens; identical to SEQ ID NO: 114255
  chr6:155316256-155317256
  hypo

SEQ ID NO: 154354 - DNA, 207 bp, Homo sapiens
  chr6:155353324-155353531
  hypo
ttttctcctggtgcatacacacgtcttaagcctgtgcgaacctgcctgcttgtctgtgcacaggaattaaagtttggaaagcttccattgtgatcctttccccacttgccactcacagtgtggttcatggaacgcaacgctcggtggacctacatttggagcatgaagatgctgatagcaatctatgtcatgcgtggcattaatcac

SEQ ID NO: 154355 - DNA, 61 bp, Homo sapiens; identical to SEQ ID NO: 72232
  chr6:155396835-155396896
  hypo

SEQ ID NO: 154356 - DNA, 393 bp, Homo sapiens
  chr6:155509027-155509420
  hypo
acttgcgcaggtgtggaaagcagccttggagagccagcctctctagcctgcattggctggagagcagccccagggctggcgtgagcactcccgctgccccttggccattagtctacaagaggtggcctgaactgaggcagtaggacttactgtttcctgaggccttctatgccgaggttttgaggatggaatgagataatgtgtgcaaagttcccggcacatgatctctgttgcgcatgtgtgttcttaggaattgtgtgtcccaaacctccaccattgtctttcctcgtgcgctcagaatgcaggcagtcgactcttagctcacctcgtttattgctgggcccgtgcttggaagacaccatgttccatttggcaaatcgcttacactgggaa

SEQ ID NO: 154357 - DNA, 451 bp, Homo sapiens
  chr6:155534948-155535399
  hypo
cagcgctgccctgaacgtgtccacacatggctgggttgcagcagtgcctgggcttggactcaactttgctccaagagcagagcgggcaccaggagtagggagaaaccaggcagtgggagcaggctactttcgagcctgtgggggcaatgggtccttcctaggcccctgagagtgcagagatgtctgggtccacagtcgcggctacgtggctgcagcagtacccgggagggcggggctccttcctgctcctggcccccaagaacacagggatgtctgggtcagaagccacggctgggcagtcacagctgtgcccgaggagcacgaggctcccgccctgccacttcaggattgggtggggcttccacattctcagctcctgctggctccatggaacgcacagcgctggccgtgcctcccccggtgcagccggcatcatcgcagtgactgttcc

SEQ ID NO: 154358 - DNA, 759 bp, Homo sapiens; identical to SEQ ID NO: 20665
  chr6:155568744-155569503
  hypo

SEQ ID NO: 154359 - DNA, 440 bp, Homo sapiens
  chr6:155577639-155578079
  hypo
cctgaagaattcctccagcaacgagtggaccggtgagactggcaagggaaccttgctggactctgacgagggcagcttgagcagcggcacccagagcagcggctgccccacggctgagggcaggcaggactccaagagcacttctcccgggaaatacccacaccccggcttggcagattttgccgacaatctcatcaaagagagtgacatcctgagcgatgaagatgatgaccaccgtcagactgtgaagcagggcagccctactaaagacatcgaaattcagttccagagactgaggatttccgaggacccagacgttcaccccgaggctgagcagcagcctggcccggagtcgggtgagggtcagaaaggaggagagcagcccaaactggtccgggggcacttctgccccattaaacgaaaagccaacagcaccaaga

SEQ ID NO: 154360 - DNA, 30 bp, Homo sapiens; identical to SEQ ID NO: 72235
  chr6:155582911-155582941
  hypo

SEQ ID NO: 154361 - DNA, 30 bp, Homo sapiens
  chr6:155593367-155593397
  hypo
taagaataggtctttcggtattatttagtt

SEQ ID NO: 154362 - DNA, 13 bp, Homo sapiens
  chr6:155593747-155593760
  hypo
tggctggagggta

SEQ ID NO: 154363 - DNA, 23 bp, Homo sapiens
  chr6:155596051-155596074
  hypo
ttaaaaataaaatcatttgggcg

SEQ ID NO: 154364 - DNA, 67 bp, Homo sapiens
  chr6:155838704-155838771
  hypo
aaccagctagggctggcgtctcactggcatctgtagacccacctaagccctccggcagcatctctgg

SEQ ID NO: 154365 - DNA, 41 bp, Homo sapiens; identical to SEQ ID NO: 72238
  chr6:155991044-155991085
  hypo

SEQ ID NO: 154366 - DNA, 66 bp, Homo sapiens; identical to SEQ ID NO: 72239
  chr6:156030250-156030316
  hypo

SEQ ID NO: 154367 - DNA, 30 bp, Homo sapiens
  chr6:156142314-156142344
  hypo
ttgctctatcattagcgtggctaagttaat

SEQ ID NO: 154368 - DNA, 33 bp, Homo sapiens; identical to SEQ ID NO: 20666
  chr6:156156135-156156168
  hypo

SEQ ID NO: 154369 - DNA, 121 bp, Homo sapiens; identical to SEQ ID NO: 72241
  chr6:156199682-156199803
  hypo

SEQ ID NO: 154370 - DNA, 30 bp, Homo sapiens
  chr6:156201200-156201230
  hypo
tgtgcaagataaatgcgctggagcgcacag

SEQ ID NO: 154371 - DNA, 131 bp, Homo sapiens; identical to SEQ ID NO: 72242
  chr6:156374933-156375064
  hypo

SEQ ID NO: 154372 - DNA, 140 bp, Homo sapiens
  chr6:156710185-156710325
  hypo
gagaaatctatcagcatcccccggcaacatcttctgaagatgaggcctgcatggagattctgactcagtgggcatagagaggggcctacgtcagaacatactgaaaaatgtttccgtgcgaaactaatgtacatccccaa

SEQ ID NO: 154373 - DNA, 197 bp, Homo sapiens
  chr6:156817500-156817697
  hypo
cctgcagaaagcccacgatctgcctaagaagggatcgtcaccagataaagccatgatgcatatctcgtcagtgaaaacagttgaataaaagcaaacttcaaccttcaagaaaaaaaaaattggaagcaacatatattttgctttgtttcgttttgttttgttttgagacggagtctctctctctccccaaggctgga

SEQ ID NO: 154374 - DNA, 16 bp, Homo sapiens
  chr6:156817936-156817952
  hypo
acgcccagccggaagc

SEQ ID NO: 154375 - DNA, 164 bp, Homo sapiens
  chr6:156876716-156876880
  hypo
cacatgaggcactgggcacatcgactcacctggcgctgactcccacactctttccacactggcacccactcaacctcaactgagatcctcaacaatcacattattttgtttcaaagaggttccaccccgtaggcagacaccacggaatctcacccattttgttc

SEQ ID NO: 154376 - DNA, 245 bp, Homo sapiens
  chr6:156883160-156883405
  hypo
gtgtgctgggcagtgcgaccaattcaaacgtgaatactgacaaagacaagacaggtgcagacacagccacacggcaacacagggcgcactcaggagcgggagggggagaaggtcaggcaagtggggagatggtgactgagctggcatcctgccaggtaagcaagccaggacagaagcccagaacctgagccacagaccacgaggggtggcatgggacagctgcctggcagcgggtgcgaggggct

SEQ ID NO: 154377 - DNA, 28 bp, Homo sapiens
  chr6:156909896-156909924
  hypo
ttataagatgaatgaatcttacggcagg

SEQ ID NO: 154378 - DNA, 30 bp, Homo sapiens
  chr6:156920607-156920637
  hypo
ttgttggcttaaaaacgccccttctctgaa

SEQ ID NO: 154379 - DNA, 30 bp, Homo sapiens; identical to SEQ ID NO: 20668
  chr6:156952430-156952460
  hypo

SEQ ID NO: 154380 - DNA, 22 bp, Homo sapiens
  chr6:157027562-157027584
  hypo
cgagactctgtctcaaaaaaaa

SEQ ID NO: 154381 - DNA, 13 bp, Homo sapiens
  chr6:157040028-157040041
  hypo
ttagtgacacaga

SEQ ID NO: 154382 - DNA, 22 bp, Homo sapiens
  chr6:157040391-157040413
  hypo
tttttttttttttttccgagac

SEQ ID NO: 154383 - DNA, 82 bp, Homo sapiens; identical to SEQ ID NO: 72249
  chr6:157159617-157159699
  hypo

SEQ ID NO: 154384 - DNA, 30 bp, Homo sapiens; identical to SEQ ID NO: 72250
  chr6:157191248-157191278
  hypo

SEQ ID NO: 154385 - DNA, 87 bp, Homo sapiens; identical to SEQ ID NO: 20670
  chr6:157193702-157193789
  hypo

SEQ ID NO: 154386 - DNA, 30 bp, Homo sapiens
  chr6:157230531-157230561
  hypo
acaggcgtgagtcaccgcatccggacaagg

SEQ ID NO: 154387 - DNA, 30 bp, Homo sapiens; identical to SEQ ID NO: 72252
  chr6:157255750-157255780
  hypo

SEQ ID NO: 154388 - DNA, 30 bp, Homo sapiens
  chr6:157282621-157282651
  hypo
gtcctctcccgggtccgctgcgttgcgcgg

SEQ ID NO: 154389 - DNA, 121 bp, Homo sapiens; identical to SEQ ID NO: 72253
  chr6:157283776-157283897
  hypo

SEQ ID NO: 154390 - DNA, 31 bp, Homo sapiens; identical to SEQ ID NO: 20671
  chr6:157319352-157319383
  hypo

SEQ ID NO: 154391 - DNA, 30 bp, Homo sapiens
  chr6:157325814-157325844
  hypo
tgtgttcaccacttgcgcttcccttgaggc

SEQ ID NO: 154392 - DNA, 167 bp, Homo sapiens; identical to SEQ ID NO: 72255
  chr6:157336126-157336293
  hypo

SEQ ID NO: 154393 - DNA, 228 bp, Homo sapiens; identical to SEQ ID NO: 72256
  chr6:157351859-157352087
  hypo

SEQ ID NO: 154394 - DNA, 41 bp, Homo sapiens; identical to SEQ ID NO: 72257
  chr6:157390993-157391034
  hypo

SEQ ID NO: 154395 - DNA, 145 bp, Homo sapiens
  chr6:157411049-157411194
  hypo
cgtttttcactttggcgttaggagggctgctgggttttggatgtgtattgaacaggtcttgggtcttacgctgggcctgattgcccctaatgcatggtggaagctgactcagcacggcatctgaatgcaccgctgttgccagaag

SEQ ID NO: 154396 - DNA, 177 bp, Homo sapiens; identical to SEQ ID NO: 20673
  chr6:157430365-157430542
  hypo

SEQ ID NO: 154397 - DNA, 174 bp, Homo sapiens; identical to SEQ ID NO: 72259
  chr6:157431599-157431773
  hypo

SEQ ID NO: 154398 - DNA, 31 bp, Homo sapiens; identical to SEQ ID NO: 5214
  chr6:157446395-157446426
  hypo

SEQ ID NO: 154399 - DNA, 30 bp, Homo sapiens
  chr6:157447401-157447431
  hypo
ccagagcaagatgtgcgttcttcactttac

SEQ ID NO: 154400 - DNA, 87 bp, Homo sapiens
  chr6:157447663-157447750
  hypo
tgtatgagcatacagcgcaggactcaaaactaggaaattccctgatcagaaccctggtgcagatttatgttacggatgaatatatta

SEQ ID NO: 154401 - DNA, 30 bp, Homo sapiens
  chr6:157448009-157448039
  hypo
ttaaagacgcagctgcgttccctcagctgt

SEQ ID NO: 154402 - DNA, 30 bp, Homo sapiens
  chr6:157455406-157455436
  hypo
ttacagcttgaaaagcgagttattatcttg

SEQ ID NO: 154403 - DNA, 30 bp, Homo sapiens; identical to SEQ ID NO: 72261
  chr6:157469065-157469095
  hypo

SEQ ID NO: 154404 - DNA, 167 bp, Homo sapiens; identical to SEQ ID NO: 72262
  chr6:157472012-157472179
  hypo

SEQ ID NO: 154405 - DNA, 225 bp, Homo sapiens
  chr6:157477822-157478047
  hypo
gccagggggccaaggcgcgggagcctcaactccaaaatcccctggtggttctggtgtggaagccagctcaggtctgaggggggcctcagagataaccgccactgcagagcacggaggcagcatggagtgggaggtttgggaggcatgctccggacgcttcctccttatgcagtcttcctgagggacatcacgtgaggagcacacagggctcgcactgggagcact

SEQ ID NO: 154406 - DNA, 270 bp, Homo sapiens
  chr6:157478284-157478554
  hypo
ggtggctgtgctcactcggagatggctcaccgtgactcgcgcaccactgtctatgccacctgtcttcacttccagcttcatggctctgttaacatcccgcccccatagatacacacttacaccagatgtcctgggatcgtcacagcgagaaccagcattaaagcgcacccatcactaggcgtcattagcagcccagcccagcaacccccacggttctgagttacgaaaggcagggatctttggaattacgtgtgtgcaacaggagtggca

SEQ ID NO: 154407 - DNA, 181 bp, Homo sapiens
  chr6:157484362-157484543
  hypo
cctcgaaacccaggtcgctgtggtctcgggcattgtattttcagccccaccaaacaaggagctttttgttgtgagccacagactcctcctaggttagcaacaccacgctgagcaggagtgctgggttagttagggcggcagccatcttaggagtccatccacagcccgctgtctccactaa

SEQ ID NO: 154408 - DNA, 280 bp, Homo sapiens
  chr6:157498983-157499263
  hypo
cgtctttccgaagggcgagtttgtttgcctactgtcagtgggaggagtgtaaatgaagacctttatccaaagccagcgtctatgaacaaggacagtatgtttggagcctggtcagtgatgagagtgataacgtacatgctctctattcactaagtctttaattgcgctctgttcagacactaaatattggctgtggtcattgcctgcccagtatgcgaaccataagctggggtggaggcgttgagtgctggcagcggacgcaacctcttgctcagccttc

SEQ ID NO: 154409 - DNA, 405 bp, Homo sapiens
  chr6:157502170-157502575
  hypo
gagaaagctctgggtcgaccgatacctcaccttcatggaagagagaggctctcctgtctcaagtctgcctgccgtgggcaagaagcccctggacctgttccgactctacgtctgcgtcaaagagatcgggggtttggcccaggtaagaatgagtgagggagggggtgaaaaaggaagcattgtggataagttcttacagtggctttctttgaatgtgtggactcattttttttctcacaaaggaaaagctaagcctgtgtgaaagtcgccttcttgcaacccacgtctgtgtgctgtcagggagcactgggggaccctggctctgccaccaactcgcagcgtgacctcagcaggtcatgttcttggacctcagtttcgtcatgtatacagcgggccagactagat

SEQ ID NO: 154410 - DNA, 52 bp, Homo sapiens
  chr6:157502909-157502961
  hypo
tcataccccaggcaccggctttcctcactgtagccctcgctccttaatcagg

SEQ ID NO: 154411 - DNA, 313 bp, Homo sapiens; identical to SEQ ID NO: 72266
  chr6:157505816-157506129
  hypo

SEQ ID NO: 154412 - DNA, 30 bp, Homo sapiens
  chr6:157519615-157519645
  hypo
ggacaggcggggctgcggcctccaagcaga

SEQ ID NO: 154413 - DNA, 30 bp, Homo sapiens
  chr6:157519985-157520015
  hypo
cctcgggacagccgccgtatggagggcacc

SEQ ID NO: 154414 - DNA, 30 bp, Homo sapiens
  chr6:157521984-157522014
  hypo
ccagggccagtacccgtatccctacagcag

SEQ ID NO: 154415 - DNA, 30 bp, Homo sapiens; identical to SEQ ID NO: 20678
  chr6:157527549-157527579
  hypo

SEQ ID NO: 154416 - DNA, 31 bp, Homo sapiens
  chr6:157540519-157540550
  hypo
ttccccggggctccctcgtccatgctcagcc

SEQ ID NO: 154417 - DNA, 67 bp, Homo sapiens; identical to SEQ ID NO: 20679
  chr6:157548326-157548393
  hypo

SEQ ID NO: 154418 - DNA, 80 bp, Homo sapiens
  chr6:157549783-157549863
  hypo
aaaaccgggaggcggcgccaggctgtgggattgggagagctgtgcccagcccagcaccaactgcccgggtctgtgcatgg

SEQ ID NO: 154419 - DNA, 32 bp, Homo sapiens
  chr6:157550094-157550126
  hypo
gctctccgtgagcatcgcgccggcagccactt

SEQ ID NO: 154420 - DNA, 30 bp, Homo sapiens
  chr6:157618788-157618818
  hypo
ggaggctggcatcaccgtgggtggacacac

SEQ ID NO: 154421 - DNA, 31 bp, Homo sapiens
  chr6:157632955-157632986
  hypo
tggctgtaacaaaaatcgatgtatttctgac

SEQ ID NO: 154422 - DNA, 26 bp, Homo sapiens
  chr6:157637600-157637626
  hypo
tttagtagagacggggtttcaccatg

SEQ ID NO: 154423 - DNA, 41 bp, Homo sapiens
  chr6:157638361-157638402
  hypo
agcacagggcagcagccggcttggcccgcagtgctcctccc

SEQ ID NO: 154424 - DNA, 30 bp, Homo sapiens; identical to SEQ ID NO: 72272
  chr6:157721206-157721236
  hypo

SEQ ID NO: 154425 - DNA, 60 bp, Homo sapiens; identical to SEQ ID NO: 43640
  chr6:157802883-157802943
  hypo

SEQ ID NO: 154426 - DNA, 196 bp, Homo sapiens; identical to SEQ ID NO: 114272
  chr6:157803298-157803494
  hypo

SEQ ID NO: 154427 - DNA, 83 bp, Homo sapiens
  chr6:157837761-157837844
  hypo
gaacagtatagaggccgttgaatgaaaactaattcacctcccacttgccactcccgagttgtagccattgttagcaaattttt

SEQ ID NO: 154428 - DNA, 22 bp, Homo sapiens
  chr6:157838143-157838165
  hypo
gccaccgcgcctggctcattgt

SEQ ID NO: 154429 - DNA, 139 bp, Homo sapiens
  chr6:157849556-157849695
  hypo
agctgctttttatagcggtgccctctgaaactagtggcctgttacgccttgtggaagggcacccgagagaggcgcattcctgcttagcgagtccccccgcccgccccaccccgcccctagcccccgagcacaggtggct

SEQ ID NO: 154430 - DNA, 364 bp, Homo sapiens; identical to SEQ ID NO: 72274
  chr6:157892373-157892737
  hypo

SEQ ID NO: 154431 - DNA, 30 bp, Homo sapiens
  chr6:157902406-157902436
  hypo
tttccgcatgtgatgcgactggttgtacag

SEQ ID NO: 154432 - DNA, 30 bp, Homo sapiens
  chr6:157912885-157912915
  hypo
ggccagcgatgcaagcgtaatcctaaggat

SEQ ID NO: 154433 - DNA, 30 bp, Homo sapiens
  chr6:157913145-157913175
  hypo
actgtcccctctcaccggggaggaaacccg

SEQ ID NO: 154434 - DNA, 30 bp, Homo sapiens
  chr6:157955273-157955303
  hypo
aggaagagctttctcggaagggccctggct

SEQ ID NO: 154435 - DNA, 30 bp, Homo sapiens; identical to SEQ ID NO: 20683
  chr6:157963687-157963717
  hypo

SEQ ID NO: 154436 - DNA, 30 bp, Homo sapiens
  chr6:157992234-157992264
  hypo
gcatgcctatgtgcacgagagcattccttg

SEQ ID NO: 154437 - DNA, 548 bp, Homo sapiens
  chr6:158017915-158018463
  hypo
gattacaacaagaagcgtcttcacaaagtagtaggaatcgccttgtttctctgtaatctggaaggatttagatgatctgccgtgatcgacgtgaatgtattttctgtctctctctgactttgtccctgctgcctgtttccgtctgtctctttctctgaatccttgactgtctctctggttctctgtgagtcttgccatcgcgttccttctgcacacgtggaacgcagcatttcgggttgtttatttatccaggcgggctttgaggttacggaatatttttaaacaaccaacagctggggccagggagccacctcttctctctcggatcctcatatccctcaaatcattaaagcgagagaaactgaaggagctgaagaggcaaagcatgggcctgtgagaccctctcgggctcactatgtatgttttaaagccccaggtgcatgctgccctcgtttttctgatggggtaggccctatgagggatgtctgtcgtttggtgggccctagtccagcgtcggaattgccagcagctttcgctggaatgcgtat

SEQ ID NO: 154438 - DNA, 707 bp, Homo sapiens
  chr6:158024056-158024763
  hypo
agaccgtggggccatcgtccccctgggtgtctgaagtggatgttgccgtggcttactgcaggctgggacgtccacagtgcttcatggcagtgccagggcccagggctggacatggagagtcaggtgaggaatccagccatctctgtggaacgctttgtgaagcaagtgtttacaatgaatccagaagcacttatggagtggctgctatgtgcacgtagagggcaaagaaatttcacacaggttcgttccctgcccttaacgagttttccacgtagttatgaaaagataactaacatcataaagaagtacttgacaaggtcgtagcactcaggatggtcattttagaccaattcccgtaaaggggagaaatgagagaaaaggctgaagaaattagctggcagccacactgagaggcccttggatgcccatctaggaaagagggacttgactcagctgctggagcacgatgcttgaacaggagattgagagggctggaattcagccctaggaggactgatctggcatccgagtataaagtgagctgatgacaggtagtaggcagctgttgtctgatgatgccgtattacaagcaccctcaaaaacctctgtggcccttaacaagcagcatttctttttctcgtgtgtctgtgggacatctggggcagctctgcggattaggcaaggctcggccccgggcgttggttcag

SEQ ID NO: 154439 - DNA, 30 bp, Homo sapiens; identical to SEQ ID NO: 72278
  chr6:158039205-158039235
  hypo

SEQ ID NO: 154440 - DNA, 30 bp, Homo sapiens; identical to SEQ ID NO: 72279
  chr6:158057191-158057221
  hypo

SEQ ID NO: 154441 - DNA, 30 bp, Homo sapiens; identical to SEQ ID NO: 72280
  chr6:158057471-158057501
  hypo

SEQ ID NO: 154442 - DNA, 91 bp, Homo sapiens; identical to SEQ ID NO: 72281
  chr6:158057892-158057983
  hypo

SEQ ID NO: 154443 - DNA, 276 bp, Homo sapiens
  chr6:158070270-158070546
  hypo
gctccagacttgaagcggtgtggggcagcactgaaggggctccgggggaggcttttattgggtgaaggcagagcaagacaaataagacatttgctttgttaaagtggggccgtagctttccttgggtcattctggagcttgggcagggacataggccactcataggcttccgggctggccccaggcagatgtgagggggtgatgcctacctttgcccctccctctcgtcccctcttgccttgcccttccgctgtgccacctcgacccagcccctgt

SEQ ID NO: 154444 - DNA, 30 bp, Homo sapiens
  chr6:158079586-158079616
  hypo
tgctgtggggctatgcgcagtctggccgtc

SEQ ID NO: 154445 - DNA, 30 bp, Homo sapiens
  chr6:158079824-158079854
  hypo
gtctggtgttggtatcggggtaataccggc

SEQ ID NO: 154446 - DNA, 653 bp, Homo sapiens; identical to SEQ ID NO: 72283
  chr6:158093622-158094275
  hypo

SEQ ID NO: 154447 - DNA, 57 bp, Homo sapiens
  chr6:158094783-158094840
  hypo
tggagaggtggcaccggggctgcagagggcggctggggttccgtcgtgtcgggtgtc

SEQ ID NO: 154448 - DNA, 277 bp, Homo sapiens
  chr6:158116416-158116693
  hypo
ctcacggagcgagagcgggacaggctggctgccagtggaaagtcagggtggactggccgtgggcgacagagtaacagtccactgcacttcccttgtgcacagcggccttggtatgatgctagcgagtagagaagtcaggcaataccaccacttggccacctaacaagggccggcaaaggctgaggtgaagaacaggggctttcagagcagttgccaaacctcgggcctggcacggccgtcctgtgcacctccctggcccccacgctgtcagccacag

SEQ ID NO: 154449 - DNA, 31 bp, Homo sapiens; identical to SEQ ID NO: 20687
  chr6:158140715-158140746
  hypo

SEQ ID NO: 154450 - DNA, 141 bp, Homo sapiens
  chr6:158177811-158177952
  hypo
acagagtcaaatatgcgggaaagaatctgattccggccagcagagggcaggagcgagaggaaactgggcatctcagcaacaaagcaggctgtgccaacctgcggccgagggccagatcgcaagccccggtgcagagaggac

SEQ ID NO: 154451 - DNA, 30 bp, Homo sapiens
  chr6:158181182-158181212
  hypo
gtgagccaccacgcccgggccatcaaggtt

SEQ ID NO: 154452 - DNA, 30 bp, Homo sapiens; identical to SEQ ID NO: 20688
  chr6:158239844-158239874
  hypo

SEQ ID NO: 154453 - DNA, 572 bp, Homo sapiens; identical to SEQ ID NO: 114273
  chr6:158244129-158244701
  hypo

SEQ ID NO: 154454 - DNA, 30 bp, Homo sapiens; identical to SEQ ID NO: 72289
  chr6:158270526-158270556
  hypo

SEQ ID NO: 154455 - DNA, 30 bp, Homo sapiens
  chr6:158276275-158276305
  hypo
tgcggtatagtactccgtttcgcagagatc

SEQ ID NO: 154456 - DNA, 303 bp, Homo sapiens; identical to SEQ ID NO: 72290
  chr6:158296041-158296344
  hypo

SEQ ID NO: 154457 - DNA, 88 bp, Homo sapiens; identical to SEQ ID NO: 72291
  chr6:158321402-158321490
  hypo

SEQ ID NO: 154458 - DNA, 200 bp, Homo sapiens; identical to SEQ ID NO: 20690
  chr6:158328732-158328932
  hypo

SEQ ID NO: 154459 - DNA, 30 bp, Homo sapiens; identical to SEQ ID NO: 72293
  chr6:158334664-158334694
  hypo

SEQ ID NO: 154460 - DNA, 30 bp, Homo sapiens
  chr6:158345740-158345770
  hypo
atgccaccacagttccgaaagccttcatca

SEQ ID NO: 154461 - DNA, 30 bp, Homo sapiens; identical to SEQ ID NO: 72294
  chr6:158365115-158365145
  hypo

SEQ ID NO: 154462 - DNA, 520 bp, Homo sapiens; identical to SEQ ID NO: 114274
  chr6:158402114-158402634
  hypo

SEQ ID NO: 154463 - DNA, 229 bp, Homo sapiens
  chr6:158412177-158412406
  hypo
gaggggaagagagaacgcctctggagcctggcacacacatttgccggagaaagtggtgagtgcgttgtgaccaggtgagggacgaaccttaaggagattggctgagaacacctcccctcctcaccctaagtcaacaaacccgggacagcagtgcttccaaaaccttacttgttcacctcacctggagattcttgtggcaaatcgggttctgcctcgttggctctggggt

SEQ ID NO: 154464 - DNA, 166 bp, Homo sapiens
  chr6:158454487-158454653
  hypo
aaccagctgttgcacgtgcccttgaggcagcaccaggtgagctgctgtgactggctgctgaagatcatctgcggggtggtcaccatccgcaccgtgtatgcctcccacaagcaggccaaggcctgcctcgtctctcgcgttagctgtgagcgcacaggcactcgct

SEQ ID NO: 154465 - DNA, 30 bp, Homo sapiens; identical to SEQ ID NO: 72296
  chr6:158464281-158464311
  hypo

SEQ ID NO: 154466 - DNA, 184 bp, Homo sapiens; identical to SEQ ID NO: 20692
  chr6:158488743-158488927
  hypo

SEQ ID NO: 154467 - DNA, 31 bp, Homo sapiens
  chr6:158489761-158489792
  hypo
taaggggccaggtgtgcggggccaggcaggg

SEQ ID NO: 154468 - DNA, 30 bp, Homo sapiens; identical to SEQ ID NO: 72298
  chr6:158492679-158492709
  hypo

SEQ ID NO: 154469 - DNA, 30 bp, Homo sapiens
  chr6:158515053-158515083
  hypo
tagtaacggaccctcggtaatcccttcctg

SEQ ID NO: 154470 - DNA, 38 bp, Homo sapiens; identical to SEQ ID NO: 72299
  chr6:158563785-158563823
  hypo

SEQ ID NO: 154471 - DNA, 36 bp, Homo sapiens
  chr6:158567709-158567745
  hypo
gggattacaggcgtgagccaccgcacctggccactc

SEQ ID NO: 154472 - DNA, 36 bp, Homo sapiens; identical to SEQ ID NO: 20693
  chr6:158593345-158593381
  hypo

SEQ ID NO: 154473 - DNA, 51 bp, Homo sapiens
  chr6:158619760-158619811
  hypo
tttctgtttagattgcaggagcgttctctcggctcatctcttgttttctca

SEQ ID NO: 154474 - DNA, 30 bp, Homo sapiens
  chr6:158651001-158651031
  hypo
tgtgtgcgcgcgcgcgcaagagagaaaggg

SEQ ID NO: 154475 - DNA, 218 bp, Homo sapiens
  chr6:158651784-158652002
  hypo
ctgggaccacagttaaatgcattatatttatacgcattcaaacatgaggcaactattcttggttcagttacttttaaattaatatttaattttcttgtgttagagccgggtttcgctatgctcaggctggagtccacaggcatgattatagctcactgcggcccccagctcctggtctccagggatccacccgcctcagcctccggagtagctgggga

SEQ ID NO: 154476 - DNA, 220 bp, Homo sapiens
  chr6:158708292-158708512
  hypo
agtgtttatttctgtcgtggcagtaaaaagacttctcctgtagtttattggcctataaaataatataatttacgacatcattggaaaagtatttttattcctatgtagggtcatttgtttctagagtagaacagttttaacaccgtatacaaataaaagcacttttattcaactgaacatgcatttattgaatacgtaatatatacgtacattttgcttg

SEQ ID NO: 154477 - DNA, 42 bp, Homo sapiens; identical to SEQ ID NO: 20694
  chr6:158734070-158734112
  hypo

SEQ ID NO: 154478 - DNA, 121 bp, Homo sapiens
  chr6:158794423-158794544
  hypo
cctttgacaagccaccgcttgaagaagccaacgtgactgctgccaaggagactgagtgaacagttagagtgtggcagtcgaatcagtcatcgtcgtcatcgtggatggctttgcacttgga

SEQ ID NO: 154479 - DNA, 158 bp, Homo sapiens; identical to SEQ ID NO: 72303
  chr6:158806006-158806164
  hypo

SEQ ID NO: 154480 - DNA, 30 bp, Homo sapiens
  chr6:158834201-158834231
  hypo
ctggtcaacgaccgcggggcgcaggtgagt

SEQ ID NO: 154481 - DNA, 182 bp, Homo sapiens
  chr6:158873202-158873384
  hypo
caagcctctgctcaccgtcagcttcacctcgggagacatcagcttaatgaacaactacgatgacttgtctcccacggtcatccgctcagggctgaaaggtacagaatgctgcacacaccccaaacctgcagaccgggcctgtgtgtgcttgcctcaaggccggtcttgtacactctgtgctt

SEQ ID NO: 154482 - DNA, 30 bp, Homo sapiens; identical to SEQ ID NO: 72305
  chr6:158902182-158902212
  hypo

SEQ ID NO: 154483 - DNA, 56 bp, Homo sapiens; identical to SEQ ID NO: 72306
  chr6:158925049-158925105
  hypo

SEQ ID NO: 154484 - DNA, 30 bp, Homo sapiens
  chr6:158945283-158945313
  hypo
tcctgagagcacattcgtccaactgctcgg

SEQ ID NO: 154485 - DNA, 1371 bp, Homo sapiens; identical to SEQ ID NO: 114282
  chr6:158957206-158958577
  hypo

SEQ ID NO: 154486 - DNA, 166 bp, Homo sapiens
  chr6:158982651-158982817
  hypo
gggtcttctgccagggtcctgcgctgttacaggacagggaactagaccaaagaaagcagttgaccaaggaaaggtcccgaggaggacaagcaaaacgcagcttgaattttgtgcgagtttgaggcctccccctgcagctgtaagcgctttgtgcctcaggctctgt

SEQ ID NO: 154487 - DNA, 449 bp, Homo sapiens; identical to SEQ ID NO: 20697
  chr6:159045070-159045519
  hypo

SEQ ID NO: 154488 - DNA, 484 bp, Homo sapiens
  chr6:159049611-159050095
  hypo
acaggtcagctcctcgcgccctgttctccggaggcctcgtctctgctgagaggtgtctcagttggccccgctgcagccgtgggaaggggcagcctgtccctcctctgtacacaggaagcttggctcagtagttgccccaggtcaggtttcgggtggcagagcccggctccaaacccagagaggctggcgctctggagcgtgcccacgccacgctgctttccacccagaggggcaggtgctgtgaggtaaatgaggtgcggttgcctctccacaccgcggggctccaagcccctactgccctccagcagagcactgtggggtggctgagggctgccgtgagcctcctgtctccccccgggatatctctctcatcatcacggagatgtatccaagggtatgacagttgtggcaggttgagcctgtgtctgtagggaagagctcagaaaatactgggacccccttcgattcccgctgtgcctgaggc

SEQ ID NO: 154489 - DNA, 30 bp, Homo sapiens
  chr6:159064206-159064236
  hypo
ctttcctttacaaagcgatttcttttttag

SEQ ID NO: 154490 - DNA, 30 bp, Homo sapiens; identical to SEQ ID NO: 20699
  chr6:159067669-159067699
  hypo

SEQ ID NO: 154491 - DNA, 217 bp, Homo sapiens; identical to SEQ ID NO: 72312
  chr6:159076941-159077158
  hypo

SEQ ID NO: 154492 - DNA, 24 bp, Homo sapiens
  chr6:159077469-159077493
  hypo
atccttggccgggtgcgatggctc

SEQ ID NO: 154493 - DNA, 125 bp, Homo sapiens
  chr6:159086526-159086651
  hypo
gggttcctgctgcaccggggcgccgtgtgccggggctgcagccaccgcgtgtgtgcccagtgccgagtgttcctgagggggacccatgcctggaagtgcacggtgtgcttcgaggacaggtaagc

SEQ ID NO: 154494 - DNA, 28 bp, Homo sapiens
  chr6:159092110-159092138
  hypo
caggcgtgagccacggcgcccggcctat

SEQ ID NO: 154495 - DNA, 17 bp, Homo sapiens
  chr6:159113679-159113696
  hypo
aggtgccaggccgggcg

SEQ ID NO: 154496 - DNA, 216 bp, Homo sapiens; identical to SEQ ID NO: 20700
  chr6:159135763-159135979
  hypo

SEQ ID NO: 154497 - DNA, 242 bp, Homo sapiens
  chr6:159151685-159151927
  hypo
gtgcagggtcctcacataccacgcgggccaggtaacctcatgcataagacaaggaaggaaataccggaggagctggtaaaatatttccttggtggtcaggactaaggaaagaaaagctgcggggcggtaaagcattccttggttaggacatacctaggtaagagaaaccgcaggggcggtaaagcattccttaggactgaagaaagaaaagccgccagggggcgggtcggggtggggcggtg

SEQ ID NO: 154498 - DNA, 104 bp, Homo sapiens
  chr6:159175773-159175877
  hypo
aaaggtagattctgtatgtagcagggagtagtcctattgacagaaaggggcgagcaatgggtaaggacccaggagaagtggctgagcgtcgcccacacacagct

SEQ ID NO: 154499 - DNA, 307 bp, Homo sapiens
  chr6:159176739-159177046
  hypo
tgaaccccaaagcaaacaaaccgcacagctgctgcaaatgggtgcaagtgtccagcctcacagcaacagccgtgtcacgaggagtcaccattcaaaccccaaacaagcgccggagtgggggcagcatgggccacagaggtcagcagcgagactcgggcctggacacagtcagtgcacgtgaatctggcctgcagtgtcggctaccagaccaagggagggagggtcactgaatttccaagctgcttttttttcacctgcaacatggtttgaattatactgacctcatagggtgcgtgtgaaagctaaa

SEQ ID NO: 154500 - DNA, 93 bp, Homo sapiens
  chr6:159177386-159177479
  hypo
aaacacgtggtgttgcggggaatggaggaggggggagttcatgctttgctttaaaaaataaataaataaatgcaggctggtgcagtggctcac

SEQ ID NO: 154501 - DNA, 163 bp, Homo sapiens
  chr6:159180412-159180575
  hypo
agacgggctggcccacgcgggctcccaggagtcctgaggcctctgagggtaactgagagggctgcttctcagtgctggcaggagccatggtggaccggatgtgtcaagaccaaacttgtccaacctgcagcccgggacggctctgttttttggttgttgttgt

SEQ ID NO: 154502 - DNA, 113 bp, Homo sapiens
  chr6:159182969-159183082
  hypo
caccactcccatctgctctctcggggtctgagggctgtagcagattctctagctgagctctcggttttggggtggtggtactgcatactaacgtatcaggagacatggtttga

SEQ ID NO: 154503 - DNA, 30 bp, Homo sapiens; identical to SEQ ID NO: 72316
  chr6:159185655-159185685
  hypo

SEQ ID NO: 154504 - DNA, 30 bp, Homo sapiens; identical to SEQ ID NO: 72317
  chr6:159186795-159186825
  hypo

SEQ ID NO: 154505 - DNA, 30 bp, Homo sapiens; identical to SEQ ID NO: 72318
  chr6:159187875-159187905
  hypo

SEQ ID NO: 154506 - DNA, 115 bp, Homo sapiens
  chr6:159188288-159188403
  hypo
tcaccagcagctgccgctgcacacgctcgttcttctctgcctcagtgatgcgcttctcctcattgcggtcatcccggatgccctcactagacagctccgcgctgtagcccgtggg

SEQ ID NO: 154507 - DNA, 195 bp, Homo sapiens
  chr6:159190316-159190511
  hypo
ggtgctgtggccgtgcggaggtgtcccccgtgcagactcaccctgtgctgccactcttcaacttcatcctccttgcgcctccgcgcctcttccaggagggcaatcttggcagtgtattctgcaagctccgcagcctgggaagggaatgccaagctcacgtcagttctgatatcctttcaacggagtccagttgtg

SEQ ID NO: 154508 - DNA, 30 bp, Homo sapiens
  chr6:159190892-159190922
  hypo
cagcctctaggcgctcggcctcctcctgtg

SEQ ID NO: 154509 - DNA, 30 bp, Homo sapiens
  chr6:159191241-159191271
  hypo
tctccccaggtcagccgcccgctgtgctgg

SEQ ID NO: 154510 - DNA, 30 bp, Homo sapiens
  chr6:159191845-159191875
  hypo
aactcctccttctcgcgcatcatctgctct

SEQ ID NO: 154511 - DNA, 30 bp, Homo sapiens
  chr6:159192318-159192348
  hypo
tcatctgctgcacctcgatggtgtcaggct

SEQ ID NO: 154512 - DNA, 30 bp, Homo sapiens
  chr6:159192604-159192634
  hypo
gaagggcacgtgccgcgtgtgtgtgcggtt

SEQ ID NO: 154513 - DNA, 179 bp, Homo sapiens
  chr6:159193320-159193499
  hypo
acagacagccacgtgcgagctccacagccttgagcacatcccttcaccaggctcagtgccttcaaccataaggcagggatgccggtatctcaagggacttcagatatgggactcaatcctcccagcagtcccattagatgctggcgtccccgccttatcggtgacgttcaggaggtgct

SEQ ID NO: 154514 - DNA, 30 bp, Homo sapiens
  chr6:159193867-159193897
  hypo
gacctaacgaggaaccggctgagcgggctc

SEQ ID NO: 154515 - DNA, 97 bp, Homo sapiens
  chr6:159203057-159203154
  hypo
tgggattccaggtgtgagccgctgtgcctggcttttccgtgcttctttaccaatgctgcatccagcacacttggagtaggagcgaaccgagagtcct

SEQ ID NO: 154516 - DNA, 30 bp, Homo sapiens
  chr6:159205208-159205238
  hypo
cagaatcaggtggctcggccatgtcttaca

SEQ ID NO: 154517 - DNA, 126 bp, Homo sapiens; identical to SEQ ID NO: 72322
  chr6:159205610-159205736
  hypo

SEQ ID NO: 154518 - DNA, 235 bp, Homo sapiens; identical to SEQ ID NO: 72323
  chr6:159206077-159206312
  hypo

SEQ ID NO: 154519 - DNA, 173 bp, Homo sapiens
  chr6:159211978-159212151
  hypo
caggtgtaaatgtaataaggacgtattacctgtgccagtatatggcgacagaggtttcgttatccagccagggaaccagaaatattaagcactcaccaaatgtcacttcctacttcaggaacataattagtctccccagccgctcccaccccgtcccaataacatttaagact

SEQ ID NO: 154520 - DNA, 36 bp, Homo sapiens; identical to SEQ ID NO: 72325
  chr6:159213571-159213607
  hypo

SEQ ID NO: 154521 - DNA, 131 bp, Homo sapiens
  chr6:159215618-159215749
  hypo
gtgcagactggagaaaaagagcgcgtggtctgcagtttttattgtcttagtaattcccctcagattacacagttatcaaaaacggtgttcagtgaaggcaacgcaatcacgtgtagtacaggtgtgtgtat

SEQ ID NO: 154522 - DNA, 144 bp, Homo sapiens
  chr6:159219541-159219685
  hypo
ctcactgcttctgggcgctatggggtgccccaccagggcagagctgagaggctggctcagctctgcttcagagacctccctcgatggaaaagggacttagtttgctgctccgctttttttttttttttttttttttttgagaaa

SEQ ID NO: 154523 - DNA, 38 bp, Homo sapiens; identical to SEQ ID NO: 72326
  chr6:159223563-159223601
  hypo

SEQ ID NO: 154524 - DNA, 38 bp, Homo sapiens; identical to SEQ ID NO: 72327
  chr6:159223840-159223878
  hypo

SEQ ID NO: 154525 - DNA, 33 bp, Homo sapiens; identical to SEQ ID NO: 72328
  chr6:159228048-159228081
  hypo

SEQ ID NO: 154526 - DNA, 480 bp, Homo sapiens; identical to SEQ ID NO: 114289
  chr6:159290683-159291163
  hypo

SEQ ID NO: 154527 - DNA, 64 bp, Homo sapiens; identical to SEQ ID NO: 20704
  chr6:159299253-159299317
  hypo

SEQ ID NO: 154528 - DNA, 120 bp, Homo sapiens; identical to SEQ ID NO: 72331
  chr6:159345137-159345257
  hypo

SEQ ID NO: 154529 - DNA, 30 bp, Homo sapiens
  chr6:159368415-159368445
  hypo
tctggctgcactttccgctaacttgggcag

SEQ ID NO: 154530 - DNA, 30 bp, Homo sapiens
  chr6:159368838-159368868
  hypo
catctgtctgacaggcgatgtcttaagtct

SEQ ID NO: 154531 - DNA, 121 bp, Homo sapiens; identical to SEQ ID NO: 20705
  chr6:159419498-159419619
  hypo

SEQ ID NO: 154532 - DNA, 146 bp, Homo sapiens; identical to SEQ ID NO: 72333
  chr6:159423618-159423764
  hypo

SEQ ID NO: 154533 - DNA, 30 bp, Homo sapiens; identical to SEQ ID NO: 72334
  chr6:159423989-159424019
  hypo

SEQ ID NO: 154534 - DNA, 30 bp, Homo sapiens; identical to SEQ ID NO: 72335
  chr6:159456892-159456922
  hypo

SEQ ID NO: 154535 - DNA, 30 bp, Homo sapiens; identical to SEQ ID NO: 72336
  chr6:159550143-159550173
  hypo

SEQ ID NO: 154536 - DNA, 401 bp, Homo sapiens; identical to SEQ ID NO: 114294
  chr6:159589685-159590086
  hypo

SEQ ID NO: 154537 - DNA, 607 bp, Homo sapiens; identical to SEQ ID NO: 43656
  chr6:159590154-159590761
  hypo

SEQ ID NO: 154538 - DNA, 368 bp, Homo sapiens; identical to SEQ ID NO: 5225
  chr6:159590971-159591339
  hypo

SEQ ID NO: 154539 - DNA, 244 bp, Homo sapiens
  chr6:159653183-159653427
  hypo
gttcccgggaggactcgcccatgtcaccctcagacacccaagaccagaaacggaccctgaggccgccaagtagacacggccactcggtggttgctcccggcaggactgcagtgagggcccggatgccagcgctgccccgaagggaaggcgtagataagcctggcttttccctggccacgcagccccgcccaggggcgcccccctcggcttcggcctctcctgcccaccacgcgtccacccaggg

SEQ ID NO: 154540 - DNA, 131 bp, Homo sapiens
  chr6:159653852-159653983
  hypo
atctctcgtccaggacgcaggtctctgagggagcggaggcttctgatggtgaaagccacggtgacggcgatagggaagacggcggaaggcaggcggaggccacggcccagacgctgcgggcccggcctgcc

SEQ ID NO: 154541 - DNA, 20 bp, Homo sapiens
  chr6:159686671-159686691
  hypo
ccctgcaaggccgggcgcgg

SEQ ID NO: 154542 - DNA, 360 bp, Homo sapiens
  chr6:159876778-159877138
  hypo
catcaccaaagagcacgaccaccacctgggagcatcaccaccacctgggagcaccaccaccacccgggagcaccatcaccagggagtgtcaccactgcccagaagcaccaccaccaccacccgggagcaccaccaccaccaccgcccagaagcaccaccaccaccacccgggagcaccaccaccaccaccgcccaggagcatcaccaccactcaggaacaccaccacctgggagcactaccaccaccagggagcgtcaccaccaccagggagagtcaccaccgcccaggagcaccaccactaccggggagtgtcaccaccacccatgagcagcatcaccaccacccggggagcaccacca

SEQ ID NO: 154543 - DNA, 30 bp, Homo sapiens
  chr6:159981686-159981716
  hypo
ggcagccaccatgcccggcctacagtgctc

SEQ ID NO: 154544 - DNA, 30 bp, Homo sapiens; identical to SEQ ID NO: 114308
  chr6:160183556-160183586
  hypo

SEQ ID NO: 154545 - DNA, 254 bp, Homo sapiens; identical to SEQ ID NO: 72340
  chr6:160220482-160220736
  hypo

SEQ ID NO: 154546 - DNA, 181 bp, Homo sapiens; identical to SEQ ID NO: 72341
  chr6:160328045-160328226
  hypo

SEQ ID NO: 154547 - DNA, 30 bp, Homo sapiens; identical to SEQ ID NO: 72342
  chr6:160388909-160388939
  hypo

SEQ ID NO: 154548 - DNA, 471 bp, Homo sapiens; identical to SEQ ID NO: 43664
  chr6:160389586-160390057
  hypo

SEQ ID NO: 154549 - DNA, 30 bp, Homo sapiens; identical to SEQ ID NO: 72344
  chr6:160393034-160393064
  hypo

SEQ ID NO: 154550 - DNA, 30 bp, Homo sapiens
  chr6:160407116-160407146
  hypo
ctttgcagttctccccgctcctctcctgtg

SEQ ID NO: 154551 - DNA, 134 bp, Homo sapiens
  chr6:160418649-160418783
  hypo
ctcagggctcctagccgctctctgcccctctcgtttcctgctttttattttttgccctcgtttcatcccaggggttctccaccaggctccagtgctctccacttgatactccattctggcgacggttgctcacc

SEQ ID NO: 154552 - DNA, 31 bp, Homo sapiens; identical to SEQ ID NO: 20711
  chr6:160425815-160425846
  hypo

SEQ ID NO: 154553 - DNA, 237 bp, Homo sapiens
  chr6:160452660-160452897
  hypo
gtgtcagactgcactgagccacgtgggcagaagcatcgattatgagtcaaacagaagagggttgggcctgcagctctgcaacttactaattgtgtgcgacctgtttgtaaacctggcacctagtgcctggcgtgtagcaggtgctcagtgagtatttacggaatgaatggtgctgggaagcagcacggctatgcccggtgctaagcccagtaagtcgtgtctcctaagggtgattaa

SEQ ID NO: 154554 - DNA, 57 bp, Homo sapiens; identical to SEQ ID NO: 72347
  chr6:160455507-160455564
  hypo

SEQ ID NO: 154555 - DNA, 264 bp, Homo sapiens; identical to SEQ ID NO: 72348
  chr6:160459514-160459778
  hypo

SEQ ID NO: 154556 - DNA, 218 bp, Homo sapiens
  chr6:160463627-160463845
  hypo
tcaccagtcttgtgagttcagcggccacctgtggtaccttgcttgtcttctgtggtagcatgcattgcatcctgcactcagtctgcagatgtgtaagaggttgctggtttcttttagcttcacaggccttcacaggggccgagcggggtgtattagcaatggtgttaagcggggtgtactagcaatgatgtaccactctactgcgtcccaagacacag

SEQ ID NO: 154557 - DNA, 138 bp, Homo sapiens; identical to SEQ ID NO: 20713
  chr6:160475954-160476092
  hypo

SEQ ID NO: 154558 - DNA, 30 bp, Homo sapiens; identical to SEQ ID NO: 72351
  chr6:160481513-160481543
  hypo

SEQ ID NO: 154559 - DNA, 163 bp, Homo sapiens; identical to SEQ ID NO: 72352
  chr6:160491753-160491916
  hypo

SEQ ID NO: 154560 - DNA, 30 bp, Homo sapiens
  chr6:160501251-160501281
  hypo
gtgtagcacaactgcggactacgacagaga

SEQ ID NO: 154561 - DNA, 72 bp, Homo sapiens
  chr6:160509960-160510032
  hypo
ttctgcctaggcctgcgcagcccggggagtgggggcctcgggacccaactgaagtctcgcagcaccttgact

SEQ ID NO: 154562 - DNA, 558 bp, Homo sapiens; identical to SEQ ID NO: 72353
  chr6:160511921-160512479
  hypo

SEQ ID NO: 154563 - DNA, 32 bp, Homo sapiens
  chr6:160513373-160513405
  hypo
gtcttcacgctccatcgcgcagcactggccac

SEQ ID NO: 154564 - DNA, 112 bp, Homo sapiens
  chr6:160527213-160527325
  hypo
ctgggcgggtacagcgcggaggaggagggaggccaggcgggcatggcgtggaggaggagggaggccgggcggtcacagcatggaggaggagggaggcgctgctggtgttctt

SEQ ID NO: 154565 - DNA, 30 bp, Homo sapiens; identical to SEQ ID NO: 20716
  chr6:160555558-160555588
  hypo

SEQ ID NO: 154566 - DNA, 469 bp, Homo sapiens; identical to SEQ ID NO: 20717
  chr6:160679356-160679825
  hypo

SEQ ID NO: 154567 - DNA, 196 bp, Homo sapiens; identical to SEQ ID NO: 72356
  chr6:160680140-160680336
  hypo

SEQ ID NO: 154568 - DNA, 30 bp, Homo sapiens; identical to SEQ ID NO: 43667
  chr6:160840236-160840266
  hypo

SEQ ID NO: 154569 - DNA, 99 bp, Homo sapiens; identical to SEQ ID NO: 72358
  chr6:161430267-161430366
  hypo

SEQ ID NO: 154570 - DNA, 31 bp, Homo sapiens
  chr6:161460048-161460079
  hypo
agactgaggtggaaatcgcaggccttcttag

SEQ ID NO: 154571 - DNA, 30 bp, Homo sapiens
  chr6:161494514-161494544
  hypo
ggaggtcctgaagggcggcctgctgatgaa

SEQ ID NO: 154572 - DNA, 169 bp, Homo sapiens; identical to SEQ ID NO: 20718
  chr6:161522587-161522756
  hypo

SEQ ID NO: 154573 - DNA, 30 bp, Homo sapiens; identical to SEQ ID NO: 20719
  chr6:161538160-161538190
  hypo

SEQ ID NO: 154574 - DNA, 65 bp, Homo sapiens
  chr6:161547842-161547907
  hypo
tgtggtggtatggggcggatgaaaagcgtatcagctgtggtggtatggggcggatgaggcggtgg

SEQ ID NO: 154575 - DNA, 76 bp, Homo sapiens
  chr6:161549952-161550028
  hypo
ctttccactctggggcgagtcctctggtaacctgctctagtgttctagcattttgtcaagtcgctttttctcttct

SEQ ID NO: 154576 - DNA, 30 bp, Homo sapiens
  chr6:161554618-161554648
  hypo
tttttaagagtccccgtgggctggctttcc

SEQ ID NO: 154577 - DNA, 35 bp, Homo sapiens
  chr6:161556867-161556902
  hypo
tgtgtgccagggacacgcttcgttggtctccacgc

SEQ ID NO: 154578 - DNA, 40 bp, Homo sapiens; identical to SEQ ID NO: 72361
  chr6:161558060-161558100
  hypo

SEQ ID NO: 154579 - DNA, 129 bp, Homo sapiens
  chr6:161559034-161559163
  hypo
ggcccctctccaagacggcgtgggtgtgtgtgtgccttgctgttgcctgctattgaagcagaagggttgagcttgcccccgccctaccaggggccctggcacctgcagctgccccggacccttggccag

SEQ ID NO: 154580 - DNA, 363 bp, Homo sapiens
  chr6:161559596-161559959
  hypo
actttccattttctgcgcttgtctattgcttgggccttttatagtgagcatactgcatctttgtgtttgacagaaaataactgagtcctgtccatttggaagaagcacgtgatctctgtgtgcttggacaatgtgccgtctctcccgggctctccaaagcctcagaggacgccaggcttggggagacagggcctttcacagggaaaccccaaagtcttccttggctccaggaagcacggacctgctgttcacagggcaggaagcaggcacgacaggctgccccgccagaggcaaggagcagggtgcacaggggcttgccaccaagaagcagcagtagcccgagaataccggtcacctggagcc

SEQ ID NO: 154581 - DNA, 48 bp, Homo sapiens; identical to SEQ ID NO: 72363
  chr6:161560590-161560638
  hypo

SEQ ID NO: 154582 - DNA, 30 bp, Homo sapiens; identical to SEQ ID NO: 72364
  chr6:161563543-161563573
  hypo

SEQ ID NO: 154583 - DNA, 114 bp, Homo sapiens; identical to SEQ ID NO: 72365
  chr6:161572341-161572455
  hypo

SEQ ID NO: 154584 - DNA, 862 bp, Homo sapiens
  chr6:161575238-161576100
  hypo
tcctgctcccacttgcgcgaacagaagaccatctcggtgaagtaccacatccagccgataattgggacataggccagctctttcttggccaggaccttggagccctgaaacagaagaaggagcccaggtgcccatgaaggagacgtcagagccacctgccggggctgttggagactgaagtagaaaaagaggaggggacgttcacaccagacgcctcgggacagtcccagaacacatgctgtcgaggccatggaccctggtgccctccccacctttcagctagaggtccaggttgtgcttgccctgccagtgtgggagcagggggcaggggcaccctggttctcagcgcagacggcaggagtcaagaaggcagcagcgagcagtcacaggtattcagggtcctgacgatgctcccaccaccatccaaacggtttctaggttatcaccgtcacatactcgctaagcccaccgtgcagctgtgtgacactaatttgtgcacctcttttctgcagatctcactgagttttgtgatattacaaaatatagtaattcttgatcgctgaaaatgtcaaacgctagaaaatgtagcattcctaggtgtgaggttaacatccttcttgaacagtggttggccaaagattcatttgaatccgatttttccgagacagctcaactcactctgctgagctctgcagttgaggcaaacaggagtctccgctcacagagcaggctgcggagcccagtgggatctccgggtacagctggtccaagctgggagtaaaacccagaccaggagatgtgctcggtgccctccacacccgctgccagcatgtccttgaggctgagacggggcagaagcacc

SEQ ID NO: 154585 - DNA, 31 bp, Homo sapiens; identical to SEQ ID NO: 20720
  chr6:161577268-161577299
  hypo

SEQ ID NO: 154586 - DNA, 183 bp, Homo sapiens
  chr6:161585055-161585238
  hypo
aatcaaggggaggtgcggtccctatgctgcaggtgggatgggcgtgctgttgacttgctttcccgccatcagcgctcccgcccttatgctcagagttgtaaagtgatcatggattcggaagcctttgggagcaaaaccctaaacggtgctgagattaaattcccgctccgtgaatgtctcttc

SEQ ID NO: 154587 - DNA, 31 bp, Homo sapiens; identical to SEQ ID NO: 20721
  chr6:161586464-161586495
  hypo

SEQ ID NO: 154588 - DNA, 30 bp, Homo sapiens
  chr6:161616927-161616957
  hypo
tctcaaggtccgctccgatcctatcttttc

SEQ ID NO: 154589 - DNA, 277 bp, Homo sapiens; identical to SEQ ID NO: 72368
  chr6:161637993-161638270
  hypo

SEQ ID NO: 154590 - DNA, 100 bp, Homo sapiens
  chr6:161642103-161642203
  hypo
cgcacccggccccagacagcatatttaaacagatgacacaaacgctggatgaacatggtgagcaaggaacacatggtgaaggaaacgtgtgaggctttcc

SEQ ID NO: 154591 - DNA, 30 bp, Homo sapiens; identical to SEQ ID NO: 72369
  chr6:161656388-161656418
  hypo

SEQ ID NO: 154592 - DNA, 169 bp, Homo sapiens
  chr6:161685573-161685742
  hypo
tccccctggcgtgcccgcgcatccctgccctgcaagtcttatccactgcgtgggaacccctcgctgaggcttccgtcttgccctctgggcagcaggctcctcaaaggcacttgcagggtcggctccctctttgtattcctgcgggctgaatgcacgggctccctaagaa

SEQ ID NO: 154593 - DNA, 30 bp, Homo sapiens; identical to SEQ ID NO: 20723
  chr6:161687270-161687300
  hypo

SEQ ID NO: 154594 - DNA, 135 bp, Homo sapiens
  chr6:161725114-161725249
  hypo
ccagctgcccgctggcgaaatgggcttggtctcttcctgctccgcacactttgacatcagctcgttgtggctccctgtctctgctctcccgggtggccagtgacgctgtgcggggtgcagcgcctgtgctgtctg

SEQ ID NO: 154595 - DNA, 31 bp, Homo sapiens; identical to SEQ ID NO: 72371
  chr6:161767101-161767132
  hypo

SEQ ID NO: 154596 - DNA, 30 bp, Homo sapiens; identical to SEQ ID NO: 72372
  chr6:161769534-161769564
  hypo

SEQ ID NO: 154597 - DNA, 142 bp, Homo sapiens
  chr6:161788277-161788419
  hypo
gctgggattacaggcgtgagccaccgcgcccggccgtgtctgaagttttaacagtaccaagctaggggagggtgttttagccggcaggacagctacccactttcttttgcagtgggggtggggttcacgctgacctcctggg

SEQ ID NO: 154598 - DNA, 30 bp, Homo sapiens
  chr6:161788750-161788780
  hypo
agagggaggggcggccggcgggtccgagac

SEQ ID NO: 154599 - DNA, 258 bp, Homo sapiens
  chr6:162253676-162253934
  hypo
gatcaatatcagtgtatacccgcggaactgtaatacaggccgatccctaaggcctccatggtgtcttacagccacacagtgtgacacaatgacatgcgccatcctggagcagggcatctcaccctccccattctctacggtctgtctggagaaagctttgtggcggcgcctgtgccctgcagggtctccagcagcatccccgctcctgcccactagatgccagcagccttctcctacttgggacgaccaactatgact

SEQ ID NO: 154600 - DNA, 30 bp, Homo sapiens; identical to SEQ ID NO: 72373
  chr6:162294471-162294501
  hypo

SEQ ID NO: 154601 - DNA, 30 bp, Homo sapiens; identical to SEQ ID NO: 20724
  chr6:162340097-162340127
  hypo

SEQ ID NO: 154602 - DNA, 30 bp, Homo sapiens; identical to SEQ ID NO: 20725
  chr6:162792072-162792102
  hypo

SEQ ID NO: 154603 - DNA, 42 bp, Homo sapiens; identical to SEQ ID NO: 72376
  chr6:162938562-162938604
  hypo

SEQ ID NO: 154604 - DNA, 38 bp, Homo sapiens; identical to SEQ ID NO: 72377
  chr6:163009854-163009892
  hypo

SEQ ID NO: 154605 - DNA, 46 bp, Homo sapiens
  chr6:163032922-163032968
  hypo
aaagaaatgatacagcggggcgtggtggctcacgcctgtaatccca

SEQ ID NO: 154606 - DNA, 291 bp, Homo sapiens; identical to SEQ ID NO: 72378
  chr6:163321043-163321334
  hypo

SEQ ID NO: 154607 - DNA, 30 bp, Homo sapiens
  chr6:163325481-163325511
  hypo
cgtggagtgagggagcgagggaggccatcc

SEQ ID NO: 154608 - DNA, 30 bp, Homo sapiens
  chr6:163485394-163485424
  hypo
gccgatgagcgaaaacgttatcaagaactc

SEQ ID NO: 154609 - DNA, 59 bp, Homo sapiens; identical to SEQ ID NO: 72379
  chr6:163558513-163558572
  hypo

SEQ ID NO: 154610 - DNA, 30 bp, Homo sapiens; identical to SEQ ID NO: 43672
  chr6:163591386-163591416
  hypo

SEQ ID NO: 154611 - DNA, 210 bp, Homo sapiens; identical to SEQ ID NO: 20727
  chr6:163591722-163591932
  hypo

SEQ ID NO: 154612 - DNA, 154 bp, Homo sapiens
  chr6:163607797-163607951
  hypo
cagcatgcatttcctctccaccgctctgctccctccctggaggtgcttctgttcctacccgctgaggggcacagtcaggaggtatttagtcggcctcccgtcgccctcaccgcacacacaagaccaatttgacggttgtttgggggcatccact

SEQ ID NO: 154613 - DNA, 18 bp, Homo sapiens
  chr6:163618735-163618753
  hypo
ctcccaaagttttgggct

SEQ ID NO: 154614 - DNA, 30 bp, Homo sapiens; identical to SEQ ID NO: 20728
  chr6:163661759-163661789
  hypo

SEQ ID NO: 154615 - DNA, 145 bp, Homo sapiens; identical to SEQ ID NO: 72383
  chr6:163710195-163710340
  hypo

SEQ ID NO: 154616 - DNA, 30 bp, Homo sapiens
  chr6:163722076-163722106
  hypo
agtttagtagggccacgtccgctgcttccc

SEQ ID NO: 154617 - DNA, 30 bp, Homo sapiens
  chr6:163802581-163802611
  hypo
acgccttgggcaccacgctccgctgctcct

SEQ ID NO: 154618 - DNA, 2822 bp, Homo sapiens; identical to SEQ ID NO: 114331
  chr6:163834987-163837809
  hypo

SEQ ID NO: 154619 - DNA, 30 bp, Homo sapiens
  chr6:163891231-163891261
  hypo
agctttgggggatagcgtttggagtctata

SEQ ID NO: 154620 - DNA, 36 bp, Homo sapiens
  chr6:163946670-163946706
  hypo
acaggcgtgagccaccacgcccggccatcttgtttc

SEQ ID NO: 154621 - DNA, 30 bp, Homo sapiens; identical to SEQ ID NO: 72385
  chr6:163985208-163985238
  hypo

SEQ ID NO: 154622 - DNA, 30 bp, Homo sapiens; identical to SEQ ID NO: 72386
  chr6:163987802-163987832
  hypo

SEQ ID NO: 154623 - DNA, 30 bp, Homo sapiens
  chr6:163996090-163996120
  hypo
tgtctctgatgggagcggtgggtagtgtac

SEQ ID NO: 154624 - DNA, 30 bp, Homo sapiens
  chr6:163996684-163996714
  hypo
accaggatgtgcatacgtacacacaatcgg

SEQ ID NO: 154625 - DNA, 44 bp, Homo sapiens
  chr6:164064088-164064132
  hypo
cagctgatcaaagtaggtccacgttgttttcctttttttttttt

SEQ ID NO: 154626 - DNA, 30 bp, Homo sapiens; identical to SEQ ID NO: 72387
  chr6:164066699-164066729
  hypo

SEQ ID NO: 154627 - DNA, 30 bp, Homo sapiens; identical to SEQ ID NO: 20730
  chr6:164067317-164067347
  hypo

SEQ ID NO: 154628 - DNA, 51 bp, Homo sapiens
  chr6:164112160-164112211
  hypo
gattgcataggctggcggggctgagacagccctcctcgaactcatcaagcc

SEQ ID NO: 154629 - DNA, 221 bp, Homo sapiens
  chr6:164170159-164170380
  hypo
agcctgtcctggagcacagcccgtgcccaaagtggctcccacaccaagcgtggtgggagctgggccgcactgggggatgggactggctgctctggaagcatcgagaagtagtgtcctccagaggaggtagaaccagagatctcgcaggtacgaggggaacagatggggtgaggggccgggggatgtcactgctgcagatcgccccagtggaggccaggaag

SEQ ID NO: 154630 - DNA, 181 bp, Homo sapiens
  chr6:164183097-164183278
  hypo
ggcctctcctaggtttttaaatgactgcattcttcctgcctcttcacacagtcacccttctgtgcacaaggatctgctgtctctctgtctgtgtcctaacctcctcttcctataaggattccagttggattggactagggacctcacgtaggacctcattttaacataattacctctttaa

SEQ ID NO: 154631 - DNA, 76 bp, Homo sapiens
  chr6:164241312-164241388
  hypo
acctcccacggatgcgtttctggcctgatgcttggcgctctggcagtctgtgtcattcaccgctctgcctctgccg

SEQ ID NO: 154632 - DNA, 314 bp, Homo sapiens
  chr6:164245429-164245743
  hypo
ctgcaaagagacaccagccaccgggaaagcggtggttaacgttggctccacgcccttgttcctgcatctgcccaacatggacaaagatgctgcatggaccagccttcctcttgtgaagaggagcttgtgctctgtaaagccttactgtggtgcgcctcaggggagcagggtcccggacaaccatctccacgccaacagggcggccatctttggtagcattttgtgcctcataacgtgttttaaattaaaatacgtcatgtttttcttctctactaaggccttactgttgtgtcggaaaacaattacagagattg

SEQ ID NO: 154633 - DNA, 30 bp, Homo sapiens
  chr6:164247942-164247972
  hypo
gctccacttgagtggcggccactctctcca

SEQ ID NO: 154634 - DNA, 30 bp, Homo sapiens; identical to SEQ ID NO: 72391
  chr6:164256003-164256033
  hypo

SEQ ID NO: 154635 - DNA, 30 bp, Homo sapiens
  chr6:164277115-164277145
  hypo
catccctccacacagcgtgtgtgggggcgt

SEQ ID NO: 154636 - DNA, 78 bp, Homo sapiens; identical to SEQ ID NO: 72392
  chr6:164283341-164283419
  hypo

SEQ ID NO: 154637 - DNA, 43 bp, Homo sapiens; identical to SEQ ID NO: 72393
  chr6:164299007-164299050
  hypo

SEQ ID NO: 154638 - DNA, 114 bp, Homo sapiens
  chr6:164314283-164314397
  hypo
tcaagttggtgctcaggtatccgtggagagcgcacaggagagtctcacctgcagggccagtaaagaggactcagaaacttcatgggtcaggttgcggcccgactggcctgacag

SEQ ID NO: 154639 - DNA, 39 bp, Homo sapiens; identical to SEQ ID NO: 72395
  chr6:164320870-164320909
  hypo

SEQ ID NO: 154640 - DNA, 158 bp, Homo sapiens
  chr6:164322566-164322724
  hypo
tttcagaggggggcatcttaacgcgagtcttacggtctttcctgggttcccatgctcggcggcggctcctccacaggcctgtcttccctttgttctggagaatgttctgcctgggcggagcattcggtgcggttacgtgggtgcggttctccagggag

SEQ ID NO: 154641 - DNA, 30 bp, Homo sapiens
  chr6:164331224-164331254
  hypo
aagtgtggccgacctcgggcagtcttgatg

SEQ ID NO: 154642 - DNA, 131 bp, Homo sapiens; identical to SEQ ID NO: 72397
  chr6:164339932-164340063
  hypo

SEQ ID NO: 154643 - DNA, 30 bp, Homo sapiens
  chr6:164409923-164409953
  hypo
aaattctgtcgttgccgtgtctagctctta

SEQ ID NO: 154644 - DNA, 173 bp, Homo sapiens; identical to SEQ ID NO: 20731
  chr6:164441337-164441510
  hypo

SEQ ID NO: 154645 - DNA, 136 bp, Homo sapiens
  chr6:164506146-164506282
  hypo
ccctctcttgtcatccgtcagaagcgcagagctttttcggaagctttgaccgtgaaggatcacaaatttgtttctcaaaggcccctccgctggctcctccggcctcacgagtcccgttccccgtgtgcttctgtcc

SEQ ID NO: 154646 - DNA, 30 bp, Homo sapiens; identical to SEQ ID NO: 20732
  chr6:164758318-164758348
  hypo

SEQ ID NO: 154647 - DNA, 53 bp, Homo sapiens; identical to SEQ ID NO: 72400
  chr6:165747831-165747884
  hypo

SEQ ID NO: 154648 - DNA, 30 bp, Homo sapiens
  chr6:166103141-166103171
  hypo
ctcttccgccgtgagcggaagcttcctgag

SEQ ID NO: 154649 - DNA, 129 bp, Homo sapiens
  chr6:166128525-166128654
  hypo
caggaacccacgggccgcgagggtagagtattggctcagcctgcagggacggccgcccgagaacccccgagggacgctgcagtgcagcagggctcagtgaccaggtgcggccggcgctgcttacactca

SEQ ID NO: 154650 - DNA, 90 bp, Homo sapiens
  chr6:166144515-166144605
  hypo
agtgagactccgtctcaaaaacaaaaagcaacaattaaaaaaatgtcaattgtacagaacccacgccccatgccgcgccgcggaaccctg

SEQ ID NO: 154651 - DNA, 30 bp, Homo sapiens
  chr6:166144953-166144983
  hypo
aaaggcccgagctgccggcacgttggagga

SEQ ID NO: 154652 - DNA, 30 bp, Homo sapiens
  chr6:166207661-166207691
  hypo
tccctcccacactcacgcactcacgctcac

SEQ ID NO: 154653 - DNA, 30 bp, Homo sapiens
  chr6:166240118-166240148
  hypo
tggtgcgggggaggccgaggtacccccgtg

SEQ ID NO: 154654 - DNA, 446 bp, Homo sapiens; identical to SEQ ID NO: 72401
  chr6:166240450-166240896
  hypo

SEQ ID NO: 154655 - DNA, 30 bp, Homo sapiens
  chr6:166374193-166374223
  hypo
tgagggcgctagaatcgccagtgacccagg

SEQ ID NO: 154656 - DNA, 30 bp, Homo sapiens
  chr6:166374963-166374993
  hypo
ggatgcggtgagggccggatcactgctggt

SEQ ID NO: 154657 - DNA, 2171 bp, Homo sapiens; identical to SEQ ID NO: 114346
  chr6:166400479-166402650
  hypo

SEQ ID NO: 154658 - DNA, 151 bp, Homo sapiens; identical to SEQ ID NO: 5249
  chr6:166402752-166402903
  hypo

SEQ ID NO: 154659 - DNA, 34 bp, Homo sapiens
  chr6:166487243-166487277
  hypo
accgcgcccggccgaagtaaggcttcttcttaat

SEQ ID NO: 154660 - DNA, 3059 bp, Homo sapiens; identical to SEQ ID NO: 114351
  chr6:166579760-166582819
  hypo

SEQ ID NO: 154661 - DNA, 109 bp, Homo sapiens; identical to SEQ ID NO: 43695
  chr6:166666750-166666859
  hypo

SEQ ID NO: 154662 - DNA, 246 bp, Homo sapiens; identical to SEQ ID NO: 114355
  chr6:166666879-166667125
  hypo

SEQ ID NO: 154663 - DNA, 471 bp, Homo sapiens; identical to SEQ ID NO: 114356
  chr6:166667161-166667632
  hypo

SEQ ID NO: 154664 - DNA, 137 bp, Homo sapiens; identical to SEQ ID NO: 72408
  chr6:166711366-166711503
  hypo

SEQ ID NO: 154665 - DNA, 201 bp, Homo sapiens
  chr6:166731253-166731454
  hypo
cctatccatccaggacgcctgagagctctgagctaagacaacacccttgtctgaactcaggtgtctctctccaccacctgggcagactgaatgacgcccttctctatcccgaggccacgcctcacaccccatggtggacccaaagctactccatatcctgtcctgggactacaccccaccccgcaccgctgcatcaatata

SEQ ID NO: 154666 - DNA, 290 bp, Homo sapiens
  chr6:166731847-166732137
  hypo
ggggaggcagcagagcgcaacggggggcacggcctccgcagcccacaagctggccacacctgcccctgccacgcaggctgagtcaccacggcagctgcacctctgtatggcatggagactcggctacaccgcagggctgagggccggccctcagacgaaccaggccccagacagaactcagcacatgagtttcttcctagtcttctgcaaactgacatgttttctttactcccattgtcgcctgctgtctaaaataagattcttcttcaggctgccgctactctcagact

SEQ ID NO: 154667 - DNA, 30 bp, Homo sapiens
  chr6:166732406-166732436
  hypo
ctttgaagacaaggacgtctgttgcatctt

SEQ ID NO: 154668 - DNA, 30 bp, Homo sapiens
  chr6:166742713-166742743
  hypo
cctacctcacaagctcgtcataatacatac

SEQ ID NO: 154669 - DNA, 107 bp, Homo sapiens; identical to SEQ ID NO: 72409
  chr6:166742968-166743075
  hypo

SEQ ID NO: 154670 - DNA, 49 bp, Homo sapiens; identical to SEQ ID NO: 20736
  chr6:166748325-166748374
  hypo

SEQ ID NO: 154671 - DNA, 30 bp, Homo sapiens
  chr6:166799887-166799917
  hypo
ctctgcagagcctccgcatggggctgcatg

SEQ ID NO: 154672 - DNA, 31 bp, Homo sapiens; identical to SEQ ID NO: 5254
  chr6:166822698-166822729
  hypo

SEQ ID NO: 154673 - DNA, 30 bp, Homo sapiens; identical to SEQ ID NO: 72412
  chr6:166826082-166826112
  hypo

SEQ ID NO: 154674 - DNA, 30 bp, Homo sapiens; identical to SEQ ID NO: 72413
  chr6:166826423-166826453
  hypo

SEQ ID NO: 154675 - DNA, 30 bp, Homo sapiens; identical to SEQ ID NO: 72414
  chr6:166858103-166858133
  hypo

SEQ ID NO: 154676 - DNA, 204 bp, Homo sapiens; identical to SEQ ID NO: 72415
  chr6:166868889-166869093
  hypo

SEQ ID NO: 154677 - DNA, 30 bp, Homo sapiens
  chr6:166892634-166892664
  hypo
tgcaggcatttgtgcgcgtctgggctgcag

SEQ ID NO: 154678 - DNA, 30 bp, Homo sapiens; identical to SEQ ID NO: 72416
  chr6:166921875-166921905
  hypo

SEQ ID NO: 154679 - DNA, 497 bp, Homo sapiens
  chr6:166943948-166944445
  hypo
gtgctgcccccgtgacgccctgtgtggcacggggtgccctcctccccagggggtcagtttatgtaactaataagctgctgtcagttcatctgtccagtgcccggcgctgtgtgttcaatcgcctaatgctgtttagggcagggggaagttccctctctcaccaacacagtgaataggaggtgatcagaacagatacggtaggtgcccagctagtgacgggcttaaagactgtgagcctggaacggagattttggatcacattctgactctaacgctgcactaggggctcatccctcacttgcaggatgggcgtgcagaggagctgggcagaaatcggtatttctaatgcccagtcactgggtcaacaaaggaaaacaacccaacccaaccatgagtcacgttgtatttaaaaccgagtgaggccgtcggcctgccggtatcgaggctggtttgtcaggccccatccagcccaacagcctgctcgcagcctgctgctc

SEQ ID NO: 154680 - DNA, 45 bp, Homo sapiens
  chr6:166944737-166944782
  hypo
taaggaccttcatggcgtagagctgcccagcgtcggaccccttca

SEQ ID NO: 154681 - DNA, 30 bp, Homo sapiens
  chr6:167017941-167017971
  hypo
ggtgcgtgcttccccgctggggtaactgaa

SEQ ID NO: 154682 - DNA, 137 bp, Homo sapiens
  chr6:167038232-167038369
  hypo
ggaaagttacatatgctaccccgattttcacaagtatcaaataatagaaagctggggaatgcatttgtaaaaaagagagcattgtattagcattgacctttttttttttgagacaagtctcgctctctcgccaggct

SEQ ID NO: 154683 - DNA, 97 bp, Homo sapiens; identical to SEQ ID NO: 20738
  chr6:167051699-167051796
  hypo

SEQ ID NO: 154684 - DNA, 31 bp, Homo sapiens; identical to SEQ ID NO: 72420
  chr6:167065180-167065211
  hypo

SEQ ID NO: 154685 - DNA, 88 bp, Homo sapiens
  chr6:167089922-167090010
  hypo
gttgatctccggaagcgcaagtccaccctgtgattccacgcctcaccctctagcggctcggctccctattacacgggaagattcctct

SEQ ID NO: 154686 - DNA, 68 bp, Homo sapiens
  chr6:167091814-167091882
  hypo
ggcctccaccctccacggggaaccaaatcatgggaaagctggattccacaagccgccctgcaagccca

SEQ ID NO: 154687 - DNA, 38 bp, Homo sapiens
  chr6:167092251-167092289
  hypo
tggcctctgaagtctcgatcccccgcatttctgctgcg

SEQ ID NO: 154688 - DNA, 30 bp, Homo sapiens
  chr6:167122119-167122149
  hypo
aggtacttacacacccgctgagagttctcg

SEQ ID NO: 154689 - DNA, 30 bp, Homo sapiens
  chr6:167122571-167122601
  hypo
cggcttgttttagcacgcctcttatccggg

SEQ ID NO: 154690 - DNA, 308 bp, Homo sapiens
  chr6:167136190-167136498
  hypo
tcccattctctgaaacgcttgatacacgtgcttctccacgtgaagcaaatgcctccctttttgagattcgtccttcagtctactacttagactttacctccagtgacacttcagtttccatgagcttcaatcgctgcattttcagcccattcctctctgcatttctggagtaatttcggttactctttgcacagctccctctccgagtccacaggactcatcacaactcgcgagacaccaccgcctccaaggtctgtctgtgcctacacttggcgactatgacaaccgttaagcgatgcaaggtttgg

SEQ ID NO: 154691 - DNA, 30 bp, Homo sapiens
  chr6:167136893-167136923
  hypo
ctggggggtcccacacgtgtgcactacctt

SEQ ID NO: 154692 - DNA, 195 bp, Homo sapiens
  chr6:167139142-167139337
  hypo
ggtggggtgggcccacggggagaccctcactccacctgccttctcttcagatgctggggacgagagtgaagctccgagtttctgcttgcacagcttcctcgggccagcgtggacgttcccgacctgccccacagcacagagactggctccaggtatgccgggcagggaggctcctggcggcgcaggcccagaggg

SEQ ID NO: 154693 - DNA, 334 bp, Homo sapiens
  chr6:167140084-167140418
  hypo
tccaaaatatataaccgtgatcaccttaaatcacataaacatgatcaccttaaacagagaactggatctcgtgtactgatgctgctggcagcattggaaagtgactcttacaacttcagttgcgataccggtttccataagcttctgtgaattcttgtcaaagctttaaaactgaacacggcaacaactctaggtgaggagtgtttggcagatgaaacccctccaccagggaggtgacgggtctcagggagtgtgtctggcgggtggggaggaatcccaggcctggaatctaccgtcctgggtgctgtctcctccaccacgtaagccaaacctg

SEQ ID NO: 154694 - DNA, 43 bp, Homo sapiens
  chr6:167144436-167144479
  hypo
atagatgtcatccgccgggtgcagtggctcttgcctgtaatcc

SEQ ID NO: 154695 - DNA, 30 bp, Homo sapiens; identical to SEQ ID NO: 20742
  chr6:167152239-167152269
  hypo

SEQ ID NO: 154696 - DNA, 56 bp, Homo sapiens; identical to SEQ ID NO: 72425
  chr6:167169076-167169132
  hypo

SEQ ID NO: 154697 - DNA, 30 bp, Homo sapiens
  chr6:167271868-167271898
  hypo
ggaaaccatatcaccgtcccttcccacctg

SEQ ID NO: 154698 - DNA, 356 bp, Homo sapiens; identical to SEQ ID NO: 43704
  chr6:167275699-167276055
  hypo

SEQ ID NO: 154699 - DNA, 175 bp, Homo sapiens; identical to SEQ ID NO: 114366
  chr6:167276259-167276434
  hypo

SEQ ID NO: 154700 - DNA, 205 bp, Homo sapiens; identical to SEQ ID NO: 72428
  chr6:167284358-167284563
  hypo

SEQ ID NO: 154701 - DNA, 2668 bp, Homo sapiens; identical to SEQ ID NO: 72429
  chr6:167313422-167316090
  hypo

SEQ ID NO: 154702 - DNA, 177 bp, Homo sapiens
  chr6:167354230-167354407
  hypo
ttttttttttaagcatcagaacggtcagtcaccaatgcgaagtgactcagcgtgttgccctctgtgctgagagacaccctgactcacccaccaagagcagatgcagccaggagcggatgtcccaggctcacccacccactgtcacccagcccgctcggccacaacaggcagccagtc

SEQ ID NO: 154703 - DNA, 66 bp, Homo sapiens; identical to SEQ ID NO: 20744
  chr6:167384338-167384404
  hypo

SEQ ID NO: 154704 - DNA, 30 bp, Homo sapiens
  chr6:167390608-167390638
  hypo
gttttccagcctcctcgagtcataggacat

SEQ ID NO: 154705 - DNA, 218 bp, Homo sapiens
  chr6:167391009-167391227
  hypo
atgctttgatatctggcaattccttttcttatttccctgaaatgaatgcctggcttagagtaggaaacgaatttgttgagttaatagattggtgaaatgactgcagtgctatgatgttgagaaatattttcttttcggtcagcatacacatatatgtgtatatgcttatgggggtgtggggtaggtgtatatacgcatgtgcacgcccattcgtgtat

SEQ ID NO: 154706 - DNA, 30 bp, Homo sapiens
  chr6:167411490-167411520
  hypo
gcaccgcagttgactcggccaaaggaaaaa

SEQ ID NO: 154707 - DNA, 197 bp, Homo sapiens; identical to SEQ ID NO: 20745
  chr6:167511714-167511911
  hypo

SEQ ID NO: 154708 - DNA, 31 bp, Homo sapiens; identical to SEQ ID NO: 72432
  chr6:167570837-167570868
  hypo

SEQ ID NO: 154709 - DNA, 31 bp, Homo sapiens; identical to SEQ ID NO: 72433
  chr6:167592732-167592763
  hypo

SEQ ID NO: 154710 - DNA, 128 bp, Homo sapiens; identical to SEQ ID NO: 72434
  chr6:167649277-167649405
  hypo

SEQ ID NO: 154711 - DNA, 31 bp, Homo sapiens; identical to SEQ ID NO: 72435
  chr6:167651139-167651170
  hypo

SEQ ID NO: 154712 - DNA, 87 bp, Homo sapiens
  chr6:167707448-167707535
  hypo
gcagtttccaggatacgagggccacgtccctggtccattctcaaaccttagacagtgacgggcactcggaggcgggcgatggatatt

SEQ ID NO: 154713 - DNA, 31 bp, Homo sapiens; identical to SEQ ID NO: 72436
  chr6:167808332-167808363
  hypo

SEQ ID NO: 154714 - DNA, 139 bp, Homo sapiens
  chr6:167813213-167813352
  hypo
acagagtccctgtgtcgcaccagccctgcaggcacctgtttcttggtgccgagcgtctttcacgagtgtgaacccatctgatgttagtccccagtagggaaaatgcccatgggaaacggggtgtcgggggagcccaagc

SEQ ID NO: 154715 - DNA, 395 bp, Homo sapiens
  chr6:167834913-167835308
  hypo
gcctgcacccgccaccgctccaatccccacgcagcccggtcacccggtgcctccactgccttggctggcgctgggccggggcctccaggtttctgtgtccaaagggcaggagagaggcgcaagcgggagctgctcttgctatgccagggcggtgctagagatagactttgccctgggctgggctgttttccccccacgcggatcctcacctccgcttctccactggctttccgcctttacatacgtctattttaaatttgtgttaggcacccccacactgtgactcccctcaacactgccgctcccccacgcacacagcggctcccccaacacacggctgctccccccacagcctgcggctccccacacacggcggctcatccacatatgctggc

SEQ ID NO: 154716 - DNA, 454 bp, Homo sapiens
  chr6:167836477-167836931
  hypo
ctccctcatacactgcggcttcccccccaacacatgacggctcacccacatctggcggctccccctctacacggctcccgtctccaaccctccacacggcggctcctccacaaatacggcggctccccctcccacggcggctcccccacacacagcagttcccacacacacactgcggctcccccgcacatggtggcttccccccaccacactggggttcccccccagggcagctcccacacacacgacggctccccccatactgtggcttccctgcacacgacagctccccccccacacaccatggttccccccacacggtggctccccctcacacagcagctcccccgctacacggcggctcccccgacacggtggctccccacacgtaagcagcagctccccccacacacggccctccccacacacacacacccggcggctccccccacca

SEQ ID NO: 154717 - DNA, 31 bp, Homo sapiens; identical to SEQ ID NO: 72439
  chr6:167859495-167859526
  hypo

SEQ ID NO: 154718 - DNA, 546 bp, Homo sapiens; identical to SEQ ID NO: 20747
  chr6:167880206-167880752
  hypo

SEQ ID NO: 154719 - DNA, 30 bp, Homo sapiens
  chr6:167906177-167906207
  hypo
actaggccttgggtgcggcccgtccgcctc

SEQ ID NO: 154720 - DNA, 19 bp, Homo sapiens
  chr6:168046805-168046824
  hypo
taagaaagaagggggccgg

SEQ ID NO: 154721 - DNA, 52 bp, Homo sapiens; identical to SEQ ID NO: 72442
  chr6:168054235-168054287
  hypo

SEQ ID NO: 154722 - DNA, 733 bp, Homo sapiens
  chr6:168062966-168063699
  hypo
cctttcccgcagtcacgatcactggagcacgttcagggcctgcaggtggtgatgggccgcgcagtcgggaccctggagctcttcaacgtgcttcatggcactgcttctcgacctgagattcaaggctccagaggccccactggccactccgcttccgggacccctcacacctcccagccgggacttggggaggcacttgcgagaggctgcgtttgccgttgcgctctctggagctggagaaccactgggcgactctgcgtgactcctgcacccactgtcaggaccccggaagccaaccggtttggagaaaagggcccactcctcaccgcgctctctgcccgcggcctggcgcagggcctcacggggctgagatcctgatcaccaggaggagccacacctggcggagcccctcctttaccgagcccatctcaggtggctggtgaggatgcgtgaaggggtaaaccgaggcaccaggagggcctcccaagcactggctgggcactttcccattcttgtttagtcctcaggccacccgccagtgaggcgcaccccaggccatcccctgatgagcctcagaggtagccagggagatgcccccgcccgtttcacccgcgctgtcactgctcgctgccccgtgagccagcctgggttctgggtggcaccagcggcagtggctctgcctttgggagcctggggacagtgctggctgcatggagcgcgggcctctgcggct

SEQ ID NO: 154723 - DNA, 30 bp, Homo sapiens
  chr6:168064606-168064636
  hypo
agctccacgaagtgacgctgccctgggatg

SEQ ID NO: 154724 - DNA, 30 bp, Homo sapiens
  chr6:168070292-168070322
  hypo
gcccactgggaggctcgccgaaagccatcc

SEQ ID NO: 154725 - DNA, 30 bp, Homo sapiens
  chr6:168070703-168070733
  hypo
tgtgtgactcaaccacgccataagagaggc

SEQ ID NO: 154726 - DNA, 30 bp, Homo sapiens
  chr6:168070999-168071029
  hypo
gcaacctggcttctgcggcagctggtgacg

SEQ ID NO: 154727 - DNA, 31 bp, Homo sapiens; identical to SEQ ID NO: 72444
  chr6:168098917-168098948
  hypo

SEQ ID NO: 154728 - DNA, 30 bp, Homo sapiens
  chr6:168104354-168104384
  hypo
agctctcaaggaaccgggcttggacacatt

SEQ ID NO: 154729 - DNA, 30 bp, Homo sapiens; identical to SEQ ID NO: 20749
  chr6:168122740-168122770
  hypo

SEQ ID NO: 154730 - DNA, 37 bp, Homo sapiens; identical to SEQ ID NO: 20750
  chr6:168131200-168131237
  hypo

SEQ ID NO: 154731 - DNA, 262 bp, Homo sapiens
  chr6:168137806-168138068
  hypo
tgggatctgatgctgcgacccagcccagcacacccagttctgctgcccgcatagccagaggactagcggactttgtgtgatgtggctgcttcgtgacccccattcagagaggctgacggagtgcgaggggcatggcccacgggcccaccgtggggttgcagggccagggcgccgcctggcctgggctgagtaacgatgagctgctgggacagtgggggctgcagcagagacccagggtggctcggagcgtggctgctgcacc

SEQ ID NO: 154732 - DNA, 48 bp, Homo sapiens; identical to SEQ ID NO: 72447
  chr6:168156340-168156388
  hypo

SEQ ID NO: 154733 - DNA, 278 bp, Homo sapiens
  chr6:168167926-168168204
  hypo
ctggactcaatcactcggggggcaggaaatcccaccccagccgcaccgaggttctgctccagcagctggtccaaaggcaccaattttggcatcccgcagagcgtcagagaatctttgttgccataggtgagaagtgcgtctcctgaaatgccaggtgttttctgctgacagctgcacacgctccttaccagggccgtgccatcctgctccatgacacactccatagagggatcgctgcactacaggtggtgacagcagggtggcgtgcgtcgcactga

SEQ ID NO: 154734 - DNA, 30 bp, Homo sapiens
  chr6:168176685-168176715
  hypo
tatgccgtaactttccgtgtgtttgggggc

SEQ ID NO: 154735 - DNA, 931 bp, Homo sapiens; identical to SEQ ID NO: 114372
  chr6:168226537-168227468
  hypo

SEQ ID NO: 154736 - DNA, 34 bp, Homo sapiens; identical to SEQ ID NO: 5261
  chr6:168227909-168227943
  hypo

SEQ ID NO: 154737 - DNA, 85 bp, Homo sapiens; identical to SEQ ID NO: 5262
  chr6:168228221-168228306
  hypo

SEQ ID NO: 154738 - DNA, 30 bp, Homo sapiens
  chr6:168232960-168232990
  hypo
ggtgggcttccagttcgtgtctctctatgt

SEQ ID NO: 154739 - DNA, 301 bp, Homo sapiens; identical to SEQ ID NO: 72451
  chr6:168377437-168377738
  hypo

SEQ ID NO: 154740 - DNA, 684 bp, Homo sapiens; identical to SEQ ID NO: 72452
  chr6:168378612-168379296
  hypo

SEQ ID NO: 154741 - DNA, 30 bp, Homo sapiens; identical to SEQ ID NO: 72453
  chr6:168379793-168379823
  hypo

SEQ ID NO: 154742 - DNA, 41 bp, Homo sapiens; identical to SEQ ID NO: 72454
  chr6:168387061-168387102
  hypo

SEQ ID NO: 154743 - DNA, 87 bp, Homo sapiens; identical to SEQ ID NO: 72455
  chr6:168387332-168387419
  hypo

SEQ ID NO: 154744 - DNA, 189 bp, Homo sapiens; identical to SEQ ID NO: 72456
  chr6:168389683-168389872
  hypo

SEQ ID NO: 154745 - DNA, 101 bp, Homo sapiens; identical to SEQ ID NO: 72457
  chr6:168390654-168390755
  hypo

SEQ ID NO: 154746 - DNA, 100 bp, Homo sapiens; identical to SEQ ID NO: 72458
  chr6:168390874-168390974
  hypo

SEQ ID NO: 154747 - DNA, 306 bp, Homo sapiens; identical to SEQ ID NO: 72459
  chr6:168391270-168391576
  hypo

SEQ ID NO: 154748 - DNA, 202 bp, Homo sapiens; identical to SEQ ID NO: 72460
  chr6:168401779-168401981
  hypo

SEQ ID NO: 154749 - DNA, 30 bp, Homo sapiens
  chr6:168402950-168402980
  hypo
gaagacaccttcaggcgtagcctcgggcag

SEQ ID NO: 154750 - DNA, 98 bp, Homo sapiens
  chr6:168416724-168416822
  hypo
atagcatcaaaggaacggtccccgaagtggacagcagaaaaatgaaaatatgccgcgagaaaggagcaaagggcctaggctggcggttggattaggga

SEQ ID NO: 154751 - DNA, 128 bp, Homo sapiens
  chr6:168417025-168417153
  hypo
ttcttctgtgaaagccgtgccggagcacgagcacgcgcaacctccacatcctggtggtcgtttctgtgctgcgatggagaccacggaccgccccagccaccggctgctcctcccggcattgccagagt

SEQ ID NO: 154752 - DNA, 201 bp, Homo sapiens; identical to SEQ ID NO: 72461
  chr6:168420279-168420480
  hypo

SEQ ID NO: 154753 - DNA, 30 bp, Homo sapiens; identical to SEQ ID NO: 20760
  chr6:168421731-168421761
  hypo

SEQ ID NO: 154754 - DNA, 46 bp, Homo sapiens; identical to SEQ ID NO: 72463
  chr6:168428431-168428477
  hypo

SEQ ID NO: 154755 - DNA, 168 bp, Homo sapiens; identical to SEQ ID NO: 72464
  chr6:168434609-168434777
  hypo

SEQ ID NO: 154756 - DNA, 154 bp, Homo sapiens
  chr6:168450068-168450222
  hypo
ggagggcagtcccagcgccacggagaaatgcatctccagaaacactcgtggcttcctcaaactgagcacaaccagacctccccagcgctgacctacggcacaattgttcatgcacgagagccgccttatggggtgagtgcgtgactctggtgcg

SEQ ID NO: 154757 - DNA, 553 bp, Homo sapiens
  chr6:168450727-168451280
  hypo
cggaaccacaggggcccggccccatctcggggtccggggtggcttccctgcgggggcggcctctgtgcagaggcctgaagggtccacagtggcaaagggggaatgacaaagtgtctgcctgtgccggaccgagtgatctgtactataattaccctgtgaggggcgcacgctgccgtcctagagcgtcacagacaccagcccccgggcctgttggtactcgccggaggtccctgcgtgcccagagtcccgccctggccatcgtttagtgtgaggcaggagggggccagatatgggggggacgcctggctcccccagatctctcttgcctgctctttcctccgcaggctgcctgtgcccctcccccgtagccaggaacaggccctggggagtggtgggaggccgtgcagtgaggcttgcggccctggatgctccctcaggactgtctgggaccaggctcgtctcacaatccgaattaactgcagacctcacttcgagaacagcctggcccagccctgatactcggggaaagagcagcggtcggaggaggcaggag

SEQ ID NO: 154758 - DNA, 211 bp, Homo sapiens
  chr6:168453026-168453237
  hypo
gcagaggcccccattggaggccggcctgttcccactgttacgtgttcccatgtccgctcaggagggagcctggcccgcaccccacagggcacactcctgcatctggctctgaggacatgcttcttcctcttctcccactgcgccaggccctgccgccgccccaacagcgtggatgtccagggctgtgggcggacaatggccctgatgtcca

SEQ ID NO: 154759 - DNA, 352 bp, Homo sapiens; identical to SEQ ID NO: 72467
  chr6:168458056-168458408
  hypo

SEQ ID NO: 154760 - DNA, 204 bp, Homo sapiens
  chr6:168458626-168458830
  hypo
acttgcccttctacgcgtgtttccttgtttttaatcaatacgtctttcaagagtgacagtccctggcccagagctcaggcggcttcgggcagccgtctcctccactgagtgggctgacctgggtttgggattgcccccactgggatgggcccgcgcctgccaggacttgcagcctcccctccctcctcccgtgcccagccctgt

SEQ ID NO: 154761 - DNA, 31 bp, Homo sapiens; identical to SEQ ID NO: 72468
  chr6:168461479-168461510
  hypo

SEQ ID NO: 154762 - DNA, 67 bp, Homo sapiens; identical to SEQ ID NO: 72469
  chr6:168461831-168461898
  hypo

SEQ ID NO: 154763 - DNA, 387 bp, Homo sapiens
  chr6:168462441-168462828
  hypo
ggcacagtccggctgcggagcccagcatacccagcccagccccaccttctgcctcctcccgctgccgcagctgttgcagagtgggccgcacgcggaggtggagctggtggctggcgcgcagcaggtgcagcaggtgcctggaccgccaggtgcaccccgtgtagtaaaccagcttctgtgctgcgggcagcccatccagctggatctccagcttctttccctgagcaaacaggagagaagttgccactccacaggtggaaaaccacgctagccacaggaaaggatgattttaaatgtcagccatggcccccagggggacgaggcccaggttttcacttcgcagtgcagatggctgttggcggacactgtgcgcggacactgtgctct

SEQ ID NO: 154764 - DNA, 30 bp, Homo sapiens
  chr6:168463048-168463078
  hypo
gaggccacacaggtgcgtttctatgacctg

SEQ ID NO: 154765 - DNA, 203 bp, Homo sapiens; identical to SEQ ID NO: 72470
  chr6:168463426-168463629
  hypo

SEQ ID NO: 154766 - DNA, 31 bp, Homo sapiens; identical to SEQ ID NO: 72471
  chr6:168464976-168465007
  hypo

SEQ ID NO: 154767 - DNA, 157 bp, Homo sapiens; identical to SEQ ID NO: 72472
  chr6:168467712-168467869
  hypo

SEQ ID NO: 154768 - DNA, 31 bp, Homo sapiens; identical to SEQ ID NO: 72473
  chr6:168481549-168481580
  hypo

SEQ ID NO: 154769 - DNA, 95 bp, Homo sapiens
  chr6:168482040-168482135
  hypo
ctcgactggcctgttcgtgatggaagaggctggcctgccacgttcgtgatgtcagggccgggcagtggacgggcagaggccgcgaggaagaggag

SEQ ID NO: 154770 - DNA, 173 bp, Homo sapiens
  chr6:168482713-168482886
  hypo
cgtgagtgtgagacacgtgggtgctgtgtgagggtgtgcctgtgtggatgtgagtgggcacatgcttgcacacgtatgttcacatgcagccttcatgtccgggaatgctagggctgcccacctctcctccacgtcctcctctgcacaatcagcaacaccgactgatccctttc

SEQ ID NO: 154771 - DNA, 104 bp, Homo sapiens
  chr6:168490177-168490281
  hypo
caggtggaggaggaccgaggcaggaatggccgcctccaggcagctgtgtttatcacgcacactgtttaccgtcactgtgcacagataatcgaccatcagcagct

SEQ ID NO: 154772 - DNA, 119 bp, Homo sapiens; identical to SEQ ID NO: 72475
  chr6:168517649-168517768
  hypo

SEQ ID NO: 154773 - DNA, 31 bp, Homo sapiens; identical to SEQ ID NO: 72476
  chr6:168529145-168529176
  hypo

SEQ ID NO: 154774 - DNA, 542 bp, Homo sapiens; identical to SEQ ID NO: 72477
  chr6:168529685-168530227
  hypo

SEQ ID NO: 154775 - DNA, 39 bp, Homo sapiens; identical to SEQ ID NO: 72478
  chr6:168561522-168561561
  hypo

SEQ ID NO: 154776 - DNA, 210 bp, Homo sapiens; identical to SEQ ID NO: 72479
  chr6:168591118-168591328
  hypo

SEQ ID NO: 154777 - DNA, 109 bp, Homo sapiens; identical to SEQ ID NO: 72480
  chr6:168613293-168613402
  hypo

SEQ ID NO: 154778 - DNA, 30 bp, Homo sapiens
  chr6:168615150-168615180
  hypo
atgctcgttgacttacggacgtttctgcct

SEQ ID NO: 154779 - DNA, 30 bp, Homo sapiens; identical to SEQ ID NO: 20769
  chr6:168630192-168630222
  hypo

SEQ ID NO: 154780 - DNA, 253 bp, Homo sapiens; identical to SEQ ID NO: 72482
  chr6:168633685-168633938
  hypo

SEQ ID NO: 154781 - DNA, 31 bp, Homo sapiens; identical to SEQ ID NO: 72483
  chr6:168643920-168643951
  hypo

SEQ ID NO: 154782 - DNA, 194 bp, Homo sapiens; identical to SEQ ID NO: 72484
  chr6:168664087-168664281
  hypo

SEQ ID NO: 154783 - DNA, 401 bp, Homo sapiens
  chr6:168672431-168672832
  hypo
acatgctggaatcctcgttcccgctgaaatctgcctgggcggccacacgcttcctgtgcaggctgcagggacccagaggacggtgtcttgccgagggatcctccctccctccaggtacctcgccccgggacagcagaagtgagagacaatccgagcatatccatgtaatgtggaaatgctgtactatcacccatctaaacaaagctcggaactgtctgcgccccaggacggggtcccagctggcccaggagaaatcgcactcacaggcccagcagagcccaacgccagcgctcagaatcccacagtgtctagacacgcacagcagcaacacggaagcggcacagggacagccccagcggtggcgacccagctccacaggcgtgtggcaaatgcaggcaggc

SEQ ID NO: 154784 - DNA, 57 bp, Homo sapiens
  chr6:168700435-168700492
  hypo
gtgctccggggccaccgcgtccctgaaggctccatcgtcggacggttctacaatagc

SEQ ID NO: 154785 - DNA, 454 bp, Homo sapiens
  chr6:168708246-168708700
  hypo
ggtccaggccagctccgcatgcccggccgccacatagcccagtgccaggtcacagtccctgctctgggcgccgccctcctcgtcgctgctgctggactcacggtctccgaatcggttggtggtgtggtcactggactctccctcgctggtctccgggatgactgacgggaaccgcgggtcacactcggccgagtgcttggagggctctgagtcgctcctggtgtaggcgtcctggcggaccagtgagggacggccccgggccagtgggccacctgctctcctggccacgggcctggggggccccaggttagactcaggacagctggccaggcgggcccgggccgagatctccacggtggactgccagcggcgatgcttcctcctggccactgaggtgagcagtgacgcctcaaaggggaacagggcttgggctgaggtccggtggctctcctgc

SEQ ID NO: 154786 - DNA, 647 bp, Homo sapiens
  chr6:168709571-168710218
  hypo
acagggggctctgtagagccacggcgtgcagggggctggggtacgggtacacctccctgccgccctgggacaccaggtcctgccgatacttggggtccggcacgtgcagcgggatatccaccccctggcagaggagcccgaggagctcggcgtccgcgctggctttctggagccccgtgtccgccggcagggctctgtcaagatcacctgggagcgagaaaaatgaacaaacacgtaactacggagacgatttagtgcactgttgatttcatttcatgcgtggcagctgggatggaaacgctgctcattcactgcttcgaggaactcctgggtcccatgggagacggcgactcacagtcactgaggtccgcgtgtagacacagggcgcggggcagacgggaatgcgtttaagacactgggcgcggggcagacgggaatgcgtttagacacagggtgcagggcctcatttgcatttagacacaggcgtggggcccgtctgcatctagacaccgcacagggccgtttgcgtgtagacacagggtgcggggccgtttgcgtgtagacacagggtgcggggccctatttgcgcctgcagcgcggccccctcagcctgttctgatcctgcccgttgcgggagagtgcatggg

SEQ ID NO: 154787 - DNA, 31 bp, Homo sapiens; identical to SEQ ID NO: 72488
  chr6:168710885-168710916
  hypo

SEQ ID NO: 154788 - DNA, 625 bp, Homo sapiens; identical to SEQ ID NO: 114376
  chr6:168720069-168720694
  hypo

SEQ ID NO: 154789 - DNA, 30 bp, Homo sapiens; identical to SEQ ID NO: 20773
  chr6:168771624-168771654
  hypo

SEQ ID NO: 154790 - DNA, 30 bp, Homo sapiens
  chr6:168775060-168775090
  hypo
gcgggtacagctcctcggagcctgggaagg

SEQ ID NO: 154791 - DNA, 134 bp, Homo sapiens; identical to SEQ ID NO: 72490
  chr6:168813948-168814082
  hypo

SEQ ID NO: 154792 - DNA, 30 bp, Homo sapiens
  chr6:168816627-168816657
  hypo
tcagctccatgtcgccgcttcaagacaggt

SEQ ID NO: 154793 - DNA, 30 bp, Homo sapiens
  chr6:168817401-168817431
  hypo
tgcgcagagcctctgcggccaccaggaagt

SEQ ID NO: 154794 - DNA, 203 bp, Homo sapiens
  chr6:168858074-168858277
  hypo
ctgcgatggactcagcgacaaacggcacccaccgaccctgcactggagctgcagtgacttcatcgccttgtgtttcccgtcgggtgcccagtaatcacaaagtggcctggagtcactgtttgtaaatacacaggagcctgcacccatcatatgtatgcggcagagtaatcctcccagaacatgagccccgcgtcacgtccttc

SEQ ID NO: 154795 - DNA, 355 bp, Homo sapiens
  chr6:168936431-168936786
  hypo
aggatgtcaggagagaggcagcgccgccgggggaagatgggagggagaccaatgcgcagtgacagtgatcctggggacacgtgaggaataacgcagcagtgatgcagcttcacggcacaggggcgccgccgggggaagatgggagggagacgcatgagcagtgacagggatcctggggacacgtgaggaataacgcagcagccatgcagcttcacggcacaggggcccggccgttctctctggattctggctcgaattttcacacgtgccaacctcactcggagggcctgatgggcccaggctgtgccggctcctggagtttctggcctggcaggtctgtcgtgtggccaaagtt

SEQ ID NO: 154796 - DNA, 30 bp, Homo sapiens
  chr6:168955849-168955879
  hypo
gtaacatgtctccaccgggcctgcaatcat

SEQ ID NO: 154797 - DNA, 157 bp, Homo sapiens; identical to SEQ ID NO: 72492
  chr6:168956124-168956281
  hypo

SEQ ID NO: 154798 - DNA, 88 bp, Homo sapiens; identical to SEQ ID NO: 72493
  chr6:169013508-169013596
  hypo

SEQ ID NO: 154799 - DNA, 30 bp, Homo sapiens
  chr6:169061275-169061305
  hypo
gggttgccaccatgccgccctgggcgggaa

SEQ ID NO: 154800 - DNA, 24 bp, Homo sapiens
  chr6:169098055-169098079
  hypo
tagatggagttttgctcttgtcgc

SEQ ID NO: 154801 - DNA, 186 bp, Homo sapiens; identical to SEQ ID NO: 20776
  chr6:169106756-169106942
  hypo

SEQ ID NO: 154802 - DNA, 30 bp, Homo sapiens; identical to SEQ ID NO: 43717
  chr6:169386136-169386166
  hypo

SEQ ID NO: 154803 - DNA, 30 bp, Homo sapiens
  chr6:169424344-169424374
  hypo
tgtccagcagtcagcgtggccatgaggtgg

SEQ ID NO: 154804 - DNA, 43 bp, Homo sapiens
  chr6:169448768-169448811
  hypo
aagccttcccatctcactgcacgacttgatcatacagtgggct

SEQ ID NO: 154805 - DNA, 178 bp, Homo sapiens; identical to SEQ ID NO: 72497
  chr6:169465182-169465360
  hypo

SEQ ID NO: 154806 - DNA, 633 bp, Homo sapiens; identical to SEQ ID NO: 20777
  chr6:169539420-169540053
  hypo

SEQ ID NO: 154807 - DNA, 427 bp, Homo sapiens; identical to SEQ ID NO: 20778
  chr6:169567203-169567630
  hypo

SEQ ID NO: 154808 - DNA, 46 bp, Homo sapiens; identical to SEQ ID NO: 72500
  chr6:169585504-169585550
  hypo

SEQ ID NO: 154809 - DNA, 30 bp, Homo sapiens; identical to SEQ ID NO: 20779
  chr6:169586491-169586521
  hypo

SEQ ID NO: 154810 - DNA, 241 bp, Homo sapiens; identical to SEQ ID NO: 20780
  chr6:169592277-169592518
  hypo

SEQ ID NO: 154811 - DNA, 213 bp, Homo sapiens; identical to SEQ ID NO: 20781
  chr6:169592577-169592790
  hypo

SEQ ID NO: 154812 - DNA, 31 bp, Homo sapiens; identical to SEQ ID NO: 72504
  chr6:169614048-169614079
  hypo

SEQ ID NO: 154813 - DNA, 30 bp, Homo sapiens; identical to SEQ ID NO: 72505
  chr6:169622385-169622415
  hypo

SEQ ID NO: 154814 - DNA, 369 bp, Homo sapiens; identical to SEQ ID NO: 72506
  chr6:169625140-169625509
  hypo

SEQ ID NO: 154815 - DNA, 30 bp, Homo sapiens
  chr6:169632336-169632366
  hypo
ggctccggaggcgtcgaggcggggcgtcgg

SEQ ID NO: 154816 - DNA, 30 bp, Homo sapiens; identical to SEQ ID NO: 72507
  chr6:169632773-169632803
  hypo

SEQ ID NO: 154817 - DNA, 334 bp, Homo sapiens; identical to SEQ ID NO: 20782
  chr6:169634742-169635076
  hypo

SEQ ID NO: 154818 - DNA, 31 bp, Homo sapiens; identical to SEQ ID NO: 72509
  chr6:169639660-169639691
  hypo

SEQ ID NO: 154819 - DNA, 350 bp, Homo sapiens
  chr6:169641062-169641412
  hypo
ccaagctcctgccctcgccaccctccctgccccggtctcctgccatcgaccccctccctgccccaggctcctgccctcgccgccctccctgccccggactcctgcccctgccgccctccctgccctgggctccatctcctggcatcatttacttcatgccctctgggtacgagtgacagtcagcatcactgcaccctggttagccatgtgtatgttgtggggcaccgtggcccggagcacctcattatgttcagtccctttctctaaactgcgagctgcccgtcctgagccccgcaggcatcgctctctcttcctggccgcgctgtgccgctcaaacccatttcactcct

SEQ ID NO: 154820 - DNA, 416 bp, Homo sapiens; identical to SEQ ID NO: 20783
  chr6:169641782-169642198
  hypo

SEQ ID NO: 154821 - DNA, 746 bp, Homo sapiens; identical to SEQ ID NO: 20784
  chr6:169648463-169649209
  hypo

SEQ ID NO: 154822 - DNA, 30 bp, Homo sapiens; identical to SEQ ID NO: 43721
  chr6:169776469-169776499
  hypo

SEQ ID NO: 154823 - DNA, 30 bp, Homo sapiens
  chr6:169779875-169779905
  hypo
agccatcgggcttcacgcaggtctcactga

SEQ ID NO: 154824 - DNA, 30 bp, Homo sapiens
  chr6:169780163-169780193
  hypo
gtgtccagttggcaccggccgcaaagctgc

SEQ ID NO: 154825 - DNA, 194 bp, Homo sapiens; identical to SEQ ID NO: 72514
  chr6:169803234-169803428
  hypo

SEQ ID NO: 154826 - DNA, 30 bp, Homo sapiens
  chr6:169824637-169824667
  hypo
tagaagcgatgccacgggaggatcactggc

SEQ ID NO: 154827 - DNA, 30 bp, Homo sapiens
  chr6:169852378-169852408
  hypo
gcctctggcgcagggcgctccttgcttgaa

SEQ ID NO: 154828 - DNA, 30 bp, Homo sapiens
  chr6:169852617-169852647
  hypo
cagagaggagccgtgcgtggggtcagagag

SEQ ID NO: 154829 - DNA, 121 bp, Homo sapiens
  chr6:169880472-169880593
  hypo
gctctgcagcacccggtcctgtcgactgcccaaggggttaggtatgcaggcgtgcagcgtgggactggtggtcagctctgcctaaggccccagagcgggatccactaggcgaagccagctg

SEQ ID NO: 154830 - DNA, 30 bp, Homo sapiens; identical to SEQ ID NO: 20785
  chr6:169902426-169902456
  hypo

SEQ ID NO: 154831 - DNA, 30 bp, Homo sapiens
  chr6:169964964-169964994
  hypo
aagtaatgaacgcccgcgtcctcatgccaa

SEQ ID NO: 154832 - DNA, 30 bp, Homo sapiens
  chr6:169970984-169971014
  hypo
aggagtctcccgtggcggccaggaaggagg

SEQ ID NO: 154833 - DNA, 104 bp, Homo sapiens
  chr6:169971577-169971681
  hypo
ctatcctggcataaacatttacgttccacattcaacacccagcaaccactcaaaaactgcattgggccacgtgcggcagctcgcacctgcaatcccagcacttt

SEQ ID NO: 154834 - DNA, 30 bp, Homo sapiens; identical to SEQ ID NO: 20786
  chr6:170028094-170028124
  hypo

SEQ ID NO: 154835 - DNA, 30 bp, Homo sapiens; identical to SEQ ID NO: 72518
  chr6:170038650-170038680
  hypo

SEQ ID NO: 154836 - DNA, 30 bp, Homo sapiens; identical to SEQ ID NO: 72519
  chr6:170040818-170040848
  hypo

SEQ ID NO: 154837 - DNA, 30 bp, Homo sapiens
  chr6:170047053-170047083
  hypo
atggtaacccttaggcgactcaaccctctg

SEQ ID NO: 154838 - DNA, 422 bp, Homo sapiens
  chr6:170047308-170047730
  hypo
tgaaggcattatcaggacacacgtgagaatcgggcgactgtcacggaagccgagacacactcagccctgcaggaaaaggtcccggctgagggtccggtaaggaaggaatcctgtgcgcagcctgcatgatgccatccccagcctggcgcctccagcccatccatgagcagaggccgcgtctccagagggaagcagtgactgttccattagcttctttgcctgccgaagccctcccaccttaacatgtctgtaggaggggtcagacaaacagagcaaaccccggaggagctggacacagaacagcaaattcgctgctagtgagtgagtgccagtgtctgtgcccacgcaggggtgagatgcctggagatcaccctcactacagtcgagtgaaacgcagtctcggttttcatccagacacaaac

SEQ ID NO: 154839 - DNA, 30 bp, Homo sapiens; identical to SEQ ID NO: 72521
  chr6:170047980-170048010
  hypo

SEQ ID NO: 154840 - DNA, 179 bp, Homo sapiens; identical to SEQ ID NO: 20787
  chr6:170059399-170059578
  hypo

SEQ ID NO: 154841 - DNA, 30 bp, Homo sapiens; identical to SEQ ID NO: 72523
  chr6:170060651-170060681
  hypo

SEQ ID NO: 154842 - DNA, 37 bp, Homo sapiens; identical to SEQ ID NO: 20788
  chr6:170061017-170061054
  hypo

SEQ ID NO: 154843 - DNA, 699 bp, Homo sapiens
  chr6:170065253-170065952
  hypo
cgtgggagcgggggacgtctgctcacagccctcttctcagcaggttttcagggtcacgtgagtggccctcacttttgctgcactccagaaccacgcatggagctctgggacatgcagacccagctcctccgcagaccagggggcccaggaccatattgaacccacagtgacgctgagacccacagaaggtcacgttctcagcactgaggtggacaggttttttcaaatcgcaggaaaatacaaagtagcatgaagacaaagacctttgtgtacaagctcacgttcaggcatgtctgggaactggaacttaactctgtggctgtctcacctggccgtcagcacacccggtgaccagctgcctgctttctgcatcaatgaataaactgagaagaggatatgctggtgaaaggaacatcggaaaatttagctttgtaagtgcctggtaccaattaacccgagaactgtcagttttacttatctctttacacgtaatatttacttacagtatttctgttagtcaagtttgaactattccaaaataatttcttcaccaaaaagtaaaacttgcacatgaatacaaatgttgaaaaccccataaacacaatgaaggctggggacatcaccccaaaaggctgcccggtgagtccaccacagatgggtcccgaggaatcccatcccacctcccgacagaaggcctgg

SEQ ID NO: 154844 - DNA, 30 bp, Homo sapiens; identical to SEQ ID NO: 72527
  chr6:170068087-170068117
  hypo

SEQ ID NO: 154845 - DNA, 30 bp, Homo sapiens; identical to SEQ ID NO: 72528
  chr6:170068370-170068400
  hypo

SEQ ID NO: 154846 - DNA, 524 bp, Homo sapiens; identical to SEQ ID NO: 114387
  chr6:170124882-170125406
  hypo

SEQ ID NO: 154847 - DNA, 30 bp, Homo sapiens; identical to SEQ ID NO: 72530
  chr6:170176624-170176654
  hypo

SEQ ID NO: 154848 - DNA, 146 bp, Homo sapiens; identical to SEQ ID NO: 72531
  chr6:170178944-170179090
  hypo

SEQ ID NO: 154849 - DNA, 30 bp, Homo sapiens; identical to SEQ ID NO: 72532
  chr6:170180727-170180757
  hypo

SEQ ID NO: 154850 - DNA, 30 bp, Homo sapiens; identical to SEQ ID NO: 20791
  chr6:170201658-170201688
  hypo

SEQ ID NO: 154851 - DNA, 616 bp, Homo sapiens; identical to SEQ ID NO: 20792
  chr6:170339177-170339793
  hypo

SEQ ID NO: 154852 - DNA, 31 bp, Homo sapiens; identical to SEQ ID NO: 72535
  chr6:170344373-170344404
  hypo

SEQ ID NO: 154853 - DNA, 43 bp, Homo sapiens; identical to SEQ ID NO: 72536
  chr6:170365709-170365752
  hypo

SEQ ID NO: 154854 - DNA, 30 bp, Homo sapiens
  chr6:170371181-170371211
  hypo
tcgctggcttcaggacgctccctgagatgc

SEQ ID NO: 154855 - DNA, 30 bp, Homo sapiens
  chr6:170387686-170387716
  hypo
agaaagcatcccacgcgatcacgagtagaa

SEQ ID NO: 154856 - DNA, 484 bp, Homo sapiens; identical to SEQ ID NO: 72537
  chr6:170402058-170402542
  hypo

SEQ ID NO: 154857 - DNA, 30 bp, Homo sapiens
  chr6:170409583-170409613
  hypo
agctccttccattccggttcacacccagac

SEQ ID NO: 154858 - DNA, 306 bp, Homo sapiens
  chr6:170413529-170413835
  hypo
catccacagagccaccggtgaccccggcagagtcaggacatgctccccatgagcacacacacccggcgaggacatcactcacagagtcacgggtgaccccagcaaagtcaggacatgctccccatgagcacacacacccggcgaggacatcactcacagagccaccggtgaccccggcagagtcaggacatgctcaccgtgagggtgcacacccagcgagggcatcactcacagagccatcggtgaccccggcagagtcaggacatgctcacaatgagcacacacacccagcgagggcatcaccca

SEQ ID NO: 154859 - DNA, 30 bp, Homo sapiens
  chr6:170414179-170414209
  hypo
ccgccccggcacagccgtcctttgctcctg

SEQ ID NO: 154860 - DNA, 1067 bp, Homo sapiens; identical to SEQ ID NO: 20793
  chr6:170453832-170454899
  hypo

SEQ ID NO: 154861 - DNA, 30 bp, Homo sapiens
  chr6:170465809-170465839
  hypo
acccagggatcatgacggggcacctggggc

SEQ ID NO: 154862 - DNA, 30 bp, Homo sapiens
  chr6:170466206-170466236
  hypo
cggaggtctcaggcccgcccagccctggcg

SEQ ID NO: 154863 - DNA, 30 bp, Homo sapiens
  chr6:170468089-170468119
  hypo
gtgctcaggacgagccgtaccaagagggac

SEQ ID NO: 154864 - DNA, 1005 bp, Homo sapiens
  chr6:170474562-170475567
  hypo
tgtgcagtgccgcccgccatcctcctgcattagcatactcctaattgattaagtggatgattgattattggacccgtgcggtctgctttccagacccgttggctgggaatggaaagccacgctcggccctcggatgcagcagaagccccctgccccgtccgctccaggctgcagagccgaggtgattggcgccaggctgcccaccccgcctgccccagcaagtgcgtcgcgcccccatggtttctgctgtttgcatgtcaggtcccggcaggaagctgcagtccgacgttgctcagcgtccagcaaggggctgcccagatcccgtcttccacagaccccctctgaggccctcgttccctcaaaccccaggagccagctctgcccccgcacagctccacggccccaggctgcttcccgctactgtaacagacgaccacaggtcgcataggccagagcccggcacggcttcttgggtgacaatcgaggggtcctgacccagcacccgtgggcacacccttatttggaaattgggcctagcccggagtgatcatgaggccacgtgacatgggcgtgccagtctcaccaacgtgtgttttcacgggcaccacagagtctgttttctatgggtggggcagcggtgaacatatccctcttaatagcggtacgggtacggccagggaggcggcagaacgtagacagaacccgggcactgagagaccggtgccgccccccgccgtccacacaacccgggcctcgggcagcaccagcaggacttttattcctcaccccgcacgccgccgtccatctcctaggccagcgtgattcttctgagtgcagctgggtctcctcctgggagatccggtggctctagcagcgtgggtgctgggaacaggaccagcctcgccggcggacagtgtggacgcctgagggcaaaccctggaccactctctccccgggggactccgttcccgcctccagggagctgcgaacgctccttctgggaca

SEQ ID NO: 154865 - DNA, 30 bp, Homo sapiens; identical to SEQ ID NO: 72541
  chr6:170491187-170491217
  hypo

SEQ ID NO: 154866 - DNA, 1274 bp, Homo sapiens
  chr6:170491588-170492862
  hypo
cagctcagccccgtcccggactcaggggggccctggaagggcgggggcgcctgggaaggacgggaggggtgggggcggcgcacagcggccagggacggagactctgggagccggggggacccacagagggcagggaggccatggcttccaggcggggctgcccatgagttctgtgtccgcccccggcagggctcgaccctggtgcgtccccagcatgtttcttgggggcgctggaggctgctgatgctgcccagagtggccggacactcctgcccgaggcctccttccgccctgagccccccaaacgtgtggagttgggaagaggagcgggccgggaaggagggcgcgggggaaggaaaatggagaaatgaggaaaacgtgtcggttctaataaaaccatgtctccctgttcccgggcacgcagcggggcagctggctccggaggcggggccgcccactcagcacagccgcccagcctggccggctgtaaacagctattactgctgatcaaaggcgctacaaggacttaatcacagggcttaaggtgaaggaagtgagagggggctgcgcacgacggggcacaaacgcggcgttaggtttccacgcaccgcgattcccgcgtgcggagcgtcggtccccgccctcgacagctggagtggggccagacggccgggaccccagagttcagagggccactgtggcccacccgacagccacgtattcacatgagagggtgcgggtttcacctctcaaggcgaaggagcctcgcccgacgctgggtggtgagcacgttgaagatgaaaacatctgagagcgccgtgcaagatgggcgacgtaggaaaagcaaggagcgcaattccgcctcagatggcagaggggcagccggcagcgggggaggggcagtcggcgggggaggggcggcctgtggggggaggggcagtcggcgggggaggggcagccggcagcgggggaggggcagtcggcggggggaggggcagtcggcggggggaggggcagccggtcgggaggcatccagggggaacggggccctcctcgctgcctgcctcttggacagagcccaggcggccggtttcagctctgagtcccacagccaccaccctctctaggccacggacatggtcctcttgaaggtttcctgcagcacccacacccctggaccttatggctgctgtgcctccccagagagacgctggagggggaggcagccccagggagtcctagggacagaaaacgagagcgacctttcaggcgca

SEQ ID NO: 154867 - DNA, 30 bp, Homo sapiens
  chr6:170493113-170493143
  hypo
gccagctcctttcttcgagttctctcactg

SEQ ID NO: 154868 - DNA, 121 bp, Homo sapiens; identical to SEQ ID NO: 72543
  chr6:170500861-170500982
  hypo

SEQ ID NO: 154869 - DNA, 30 bp, Homo sapiens; identical to SEQ ID NO: 72544
  chr6:170528283-170528313
  hypo

SEQ ID NO: 154870 - DNA, 185 bp, Homo sapiens; identical to SEQ ID NO: 72545
  chr6:170531566-170531751
  hypo

SEQ ID NO: 154871 - DNA, 30 bp, Homo sapiens
  chr6:170534556-170534586
  hypo
cttccacactgtccccgcttccctctgccc

SEQ ID NO: 154872 - DNA, 30 bp, Homo sapiens; identical to SEQ ID NO: 20798
  chr6:170545099-170545129
  hypo

SEQ ID NO: 154873 - DNA, 31 bp, Homo sapiens; identical to SEQ ID NO: 72547
  chr6:170561025-170561056
  hypo

SEQ ID NO: 154874 - DNA, 30 bp, Homo sapiens; identical to SEQ ID NO: 72548
  chr6:170561897-170561927
  hypo

SEQ ID NO: 154875 - DNA, 332 bp, Homo sapiens
  chr6:170578600-170578932
  hypo
gcctgctgctactagcgatcccagtttggcaaacaccggggcctcactttgtctcttgtgtggggaatgcacacacctcacatctgtctcacggaccataaacgctctcccgagaatcatgttgactctgctcaccgagcccaggcccagcacaaagacacaccataaacacctgcggagggagcgtggcccagcccagggactctggggctcccagaagacagggccctcccccagccatgccgggaatgctgcgtgacagcggatcaggaaatggggcagaagcccatgaaaccctcggagtcaggtcaccagggcgggtgctcgcccac

SEQ ID NO: 154876 - DNA, 171 bp, Homo sapiens; identical to SEQ ID NO: 20799
  chr6:170579425-170579596
  hypo

SEQ ID NO: 154877 - DNA, 30 bp, Homo sapiens
  chr6:170593063-170593093
  hypo
agccggcctggcagcggcacaggtaggcat

SEQ ID NO: 154878 - DNA, 454 bp, Homo sapiens; identical to SEQ ID NO: 114396
  chr6:170605421-170605875
  hypo

SEQ ID NO: 154879 - DNA, 163 bp, Homo sapiens; identical to SEQ ID NO: 114397
  chr6:170605909-170606072
  hypo

SEQ ID NO: 154880 - DNA, 30 bp, Homo sapiens; identical to SEQ ID NO: 114398
  chr6:170606376-170606406
  hypo

SEQ ID NO: 154881 - DNA, 345 bp, Homo sapiens
  chr6:170667199-170667544
  hypo
gtgtgtgcatgtttgcgcctatacacacactcatagttaataactgagatcaatttgtaagaaatgtttaatttttcctgtagcctaacactggcctttctctgtccttttcaggtggacacgctttgcctggaggatttgcatgcgtttattgcgcaggccttgtgcctccaaggaaaatccacctcgcagcttgtaaatctacaggtacagacgtgaccagttagttgtcactgcccggaagacagctgtgcagtccagccttctctttcccattatagttgaagtttcacagaaaagatcaggaaggtattttagtcaggatcttttcgtgatgcagtagtt

SEQ ID NO: 154882 - DNA, 30 bp, Homo sapiens; identical to SEQ ID NO: 72552
  chr6:170682022-170682052
  hypo

SEQ ID NO: 154883 - DNA, 30 bp, Homo sapiens; identical to SEQ ID NO: 20800
  chr6:170700092-170700122
  hypo

SEQ ID NO: 154884 - DNA, 113 bp, Homo sapiens
  chr6:170713940-170714053
  hypo
gtgggagccaggcctcgcttgcatgaagaaggaacgatgcctttttcaatggtgtctccctcccattgtgcagaagagcttttgttggcttctctcccgagcttgtgcctgat

SEQ ID NO: 154885 - DNA, 30 bp, Homo sapiens; identical to SEQ ID NO: 20801
  chr6:170819916-170819946
  hypo

SEQ ID NO: 154886 - DNA, 177 bp, Homo sapiens
  chr6:170871266-170871443
  hypo
ccatcactcctgccacgccagcttcggagagttctgggattgtaccgcagctgcagtgagtacttcgtgttttatgtttcctcccacttaggagtccctttgagttatgttcctgctctgttttcagatggatccttttattaagggagggagtggcactaacggtaattgtgtatc

SEQ ID NO: 154887 - DNA, 121 bp, Homo sapiens; identical to SEQ ID NO: 20802
  chr6:170894912-170895033
  hypo

SEQ ID NO: 154888 - DNA, 34 bp, Homo sapiens; identical to SEQ ID NO: 72557
  chr7:62936-62970
  hypo

SEQ ID NO: 154889 - DNA, 30 bp, Homo sapiens
  chr7:68843-68873
  hypo
gtcccggatcctccccgcaggtcagattca

SEQ ID NO: 154890 - DNA, 219 bp, Homo sapiens
  chr7:84204-84423
  hypo
aggctcccaaggctgcgctgtgcgtctcttccaccacacgcactggggcatgaggccaagggcatcgtctgcagagcgagagggaaactggggtggcagggcttgcgggcgcaggacagcgccaaggggctttcgtctcccagcattaggacgaccttgtcctctgcccctgtctgggggccgctgggtccctcctcacaggagcgaggcaggcagctc

SEQ ID NO: 154891 - DNA, 30 bp, Homo sapiens
  chr7:84903-84933
  hypo
tgctcatgcccagggcggcaggtgtccttt

SEQ ID NO: 154892 - DNA, 140 bp, Homo sapiens; identical to SEQ ID NO: 20803
  chr7:85449-85589
  hypo

SEQ ID NO: 154893 - DNA, 90 bp, Homo sapiens; identical to SEQ ID NO: 20804
  chr7:88326-88416
  hypo

SEQ ID NO: 154894 - DNA, 30 bp, Homo sapiens
  chr7:88719-88749
  hypo
ctctggcgccatggccgtaaagagaaaacc

SEQ ID NO: 154895 - DNA, 47 bp, Homo sapiens; identical to SEQ ID NO: 72560
  chr7:118251-118298
  hypo

SEQ ID NO: 154896 - DNA, 30 bp, Homo sapiens; identical to SEQ ID NO: 72561
  chr7:124488-124518
  hypo

SEQ ID NO: 154897 - DNA, 95 bp, Homo sapiens; identical to SEQ ID NO: 72562
  chr7:139617-139712
  hypo

SEQ ID NO: 154898 - DNA, 30 bp, Homo sapiens
  chr7:143205-143235
  hypo
catgtgggagcactcgtgcgtggaaggcca

SEQ ID NO: 154899 - DNA, 790 bp, Homo sapiens; identical to SEQ ID NO: 43736
  chr7:149019-149809
  hypo

SEQ ID NO: 154900 - DNA, 30 bp, Homo sapiens
  chr7:153247-153277
  hypo
gtcactcaaaggaatcgttcccagccttaa

SEQ ID NO: 154901 - DNA, 156 bp, Homo sapiens
  chr7:153659-153815
  hypo
ccttccccacatgctcgggttggcccagcgtctcacgctagcagctacgtggaatagttattttttctggagaactctgggacccctctgatgtcttggagcacccacacaggccgttcactgtgcacgctgtgaggctgtcgtcttggagcaccc

SEQ ID NO: 154902 - DNA, 67 bp, Homo sapiens
  chr7:154288-154355
  hypo
cgagagcagcctggacggtccgcaggagacgtctcctgtcttaggcgtcccacgccgcgtgctcctg

SEQ ID NO: 154903 - DNA, 31 bp, Homo sapiens; identical to SEQ ID NO: 72564
  chr7:156973-157004
  hypo

SEQ ID NO: 154904 - DNA, 218 bp, Homo sapiens
  chr7:158842-159060
  hypo
cttctcatcacaatgcgtacagggaggcttccagaagctctgggtcagtattccggcgtgcatgtcctccaccctaacgcactcacccacatgcgccgagcaaagttggagcgggtggagaagggcctggcggtgcagaggccccaggatttctggacagggcagctgtggctgcagcagggaggtgcagtgctgcggggaggcggttgacagctgtc

SEQ ID NO: 154905 - DNA, 30 bp, Homo sapiens; identical to SEQ ID NO: 72565
  chr7:159759-159789
  hypo

SEQ ID NO: 154906 - DNA, 30 bp, Homo sapiens
  chr7:160009-160039
  hypo
ctcacgggccccggcggggctcagacaccg

SEQ ID NO: 154907 - DNA, 30 bp, Homo sapiens; identical to SEQ ID NO: 72566
  chr7:160672-160702
  hypo

SEQ ID NO: 154908 - DNA, 263 bp, Homo sapiens; identical to SEQ ID NO: 72567
  chr7:161868-162131
  hypo

SEQ ID NO: 154909 - DNA, 150 bp, Homo sapiens
  chr7:168484-168634
  hypo
gtctcctggagggtccgtgtccctggtggatccgtgtccctagtagatccgtctcctggagggtccgtgtccctggcggatccgtctctgaccgcgcgtgctcttcaccatggaaggaggtgctggtagccaagccgccctccccaagtg

SEQ ID NO: 154910 - DNA, 30 bp, Homo sapiens
  chr7:169350-169380
  hypo
ggcatccctcccctccggagggcctcccca

SEQ ID NO: 154911 - DNA, 30 bp, Homo sapiens
  chr7:169659-169689
  hypo
tgatttgtttcttgccgtcaagaccctggt

SEQ ID NO: 154912 - DNA, 284 bp, Homo sapiens
  chr7:170019-170303
  hypo
tgcttccctgcaccacggtccgcctggatcctgcacacccagcccggtggctcctgcccactcagcggggccctgacgccctacatctcctctgtgagcaaaagctctcttgttgttagagagacttgcggaagccacacacccatagaccgttacttctacacattctttttatttcacacagatctgcatcccttgaagtactcacggggacgtattccgcatggtttccatcttagtgcacatagaacacggttttaacttacaatcggcactgtcttctc

SEQ ID NO: 154913 - DNA, 30 bp, Homo sapiens
  chr7:170703-170733
  hypo
ccacccccttcctctcgctgatgctgctct

SEQ ID NO: 154914 - DNA, 30 bp, Homo sapiens; identical to SEQ ID NO: 72568
  chr7:171528-171558
  hypo

SEQ ID NO: 154915 - DNA, 487 bp, Homo sapiens; identical to SEQ ID NO: 72569
  chr7:173193-173680
  hypo

SEQ ID NO: 154916 - DNA, 530 bp, Homo sapiens
  chr7:175272-175802
  hypo
tcagcaagaaaggtacggcagggcggggccaggacagggtgaacaggaccccagcgcttggtggccacgagtcccagctctgggaggaacaggccttgaggatgcagagaggtttgcattggcaaaagtctcggcatctctcatttttcccgtacatgcaccaccaccgctgcttcctgctgtagcccctctccgccaagaggcattcccagcccccaggaccatagagaggggcaggggtcttcagcgtggctgagggccaccgcctgcggcacgtgggaggaagctgccaactacccccatcccctgagctgaagtctccttgcatctgggccttgattttttaatgcgagatgcagctcaaggcttgcggtcatacttctgtcttcaggtgcgaaaactgcgttttcttcttgagttccgtgtttcagggagagaatcgtgaagaaacagactaaaggactttgttgcaagctacagtcatgaagaaggacacgtgggtgaggctgggagcccggggagcctggtgt

SEQ ID NO: 154917 - DNA, 30 bp, Homo sapiens
  chr7:178247-178277
  hypo
cacgcggagccaggacgagcaggccacaca

SEQ ID NO: 154918 - DNA, 255 bp, Homo sapiens
  chr7:178589-178844
  hypo
gctctggggccgcatcgcacccccgattcgtgtcctccagcctgtttcctcgccttaggtgggacgcgatcacccgcctgcggggagtcttgctgccgtgcgacagtgagtagaggccgggcacaggcccacagcaggcgctcagcaaacgctcactcccaggtccccgtgtgcccgtctaagaaccgcgaggcttcaggcctccaggaggtgtcttgcgggggcagccgctctgacgtcgcctctgcccactgt

SEQ ID NO: 154919 - DNA, 335 bp, Homo sapiens
  chr7:181258-181593
  hypo
tgccagcccagctctcgggctccctggcaaggctggagccgcaaggggctcgagtttcccctgcccgcagcccccataactggaagctggctcgcccagtgccctgatcccacccgccggccccttcctgtccacacatccccgcttttccctggaagcctttggtgacaagtgcagacactctgcccctcatcgtctggggtccttggccgcctctcacctgtcccccaggtggcaggtgaggccctcgggtccactctgaaggtgatgggctgatgctccaggccggacatcaggctccgtgacagctggttctacaccgtcttctccggctg

SEQ ID NO: 154920 - DNA, 31 bp, Homo sapiens
  chr7:181882-181913
  hypo
gctgaccagcggccacgctatcctggacgcg

SEQ ID NO: 154921 - DNA, 2032 bp, Homo sapiens; identical to SEQ ID NO: 114405
  chr7:191991-194023
  hypo

SEQ ID NO: 154922 - DNA, 149 bp, Homo sapiens
  chr7:199425-199574
  hypo
cgagattagcacctgcgtgctccaggctctgagttctgtcccctcagctgtccggcccctgggtgctcactttaatctcaagtcattcatcttactattaaacgtgagcccagaaatattgttgtaatggagaacgatgcctgcgagtc

SEQ ID NO: 154923 - DNA, 203 bp, Homo sapiens; identical to SEQ ID NO: 72573
  chr7:204778-204981
  hypo

SEQ ID NO: 154924 - DNA, 30 bp, Homo sapiens; identical to SEQ ID NO: 72574
  chr7:206138-206168
  hypo

SEQ ID NO: 154925 - DNA, 30 bp, Homo sapiens; identical to SEQ ID NO: 20807
  chr7:207651-207681
  hypo

SEQ ID NO: 154926 - DNA, 203 bp, Homo sapiens
  chr7:208837-209040
  hypo
caggagaagaaggggcgtgaggccagagagtgaccctgtttctctccctccttcctgcagccatgaagtcggggggcacgcagctgaagctcatcatgaccttccagaattacgggcaagcgctgttcaaacccatgaagtaagtgccgaggcctgtgggctggggcgtgaggagctggagctgcaggcgagcaggcgccggg

SEQ ID NO: 154927 - DNA, 30 bp, Homo sapiens
  chr7:209346-209376
  hypo
ctacaaagggccggacgcagctatttcagg

SEQ ID NO: 154928 - DNA, 31 bp, Homo sapiens; identical to SEQ ID NO: 72576
  chr7:211563-211594
  hypo

SEQ ID NO: 154929 - DNA, 343 bp, Homo sapiens; identical to SEQ ID NO: 72577
  chr7:212458-212801
  hypo

SEQ ID NO: 154930 - DNA, 156 bp, Homo sapiens
  chr7:217101-217257
  hypo
caagaggaggatggccgtcagcggccccccaggggtgagcagatgcagctcagacaaacctttcccaggtgccctggggctgctgaccccccgaggcctgtgggggaggcggacacagctttggcctcggacttgcagctgcgtggggccttctgc

SEQ ID NO: 154931 - DNA, 315 bp, Homo sapiens
  chr7:217589-217904
  hypo
gccctagagaggtgccggctttccctgaagcggcttctgaggcctttctcgcacccatgtctagggccaggcagaggtgccctgagggttctctgcagtcccacgtggccacgtccagagagggcaaaacagatgcaatattaataagaaagacgggagaacaatgacccggggcccgcgcgtcactgcaaagctttccatttgtacgaggagaggactgagaggttcgatgagcgcctggctggggctggccgtaacggccaccctcagaggaagaggggcctggctgatggtggtgcacgttggctgggagag

SEQ ID NO: 154932 - DNA, 121 bp, Homo sapiens; identical to SEQ ID NO: 72578
  chr7:223533-223654
  hypo

SEQ ID NO: 154933 - DNA, 355 bp, Homo sapiens; identical to SEQ ID NO: 72579
  chr7:226183-226538
  hypo

SEQ ID NO: 154934 - DNA, 167 bp, Homo sapiens; identical to SEQ ID NO: 72580
  chr7:228055-228222
  hypo

SEQ ID NO: 154935 - DNA, 30 bp, Homo sapiens
  chr7:228812-228842
  hypo
gggcagcctcctcaacgtgtttgtagtcct

SEQ ID NO: 154936 - DNA, 30 bp, Homo sapiens
  chr7:229209-229239
  hypo
gtgagtttccttccacgtgcaatgaggcag

SEQ ID NO: 154937 - DNA, 232 bp, Homo sapiens
  chr7:229477-229709
  hypo
cagccctgtggctggagagctcgccgtcctcacgcaaacagtccagaccacagcggtggcacatcgtgagaatgacagatgggggatgagcaaggtgccaggggttttaaataagacggccgcgttttgccaaacacctaccccacggggctggaacaagtgacgcagaaatgggcaggaagcgtggaccgcgaactcggggaccaaaaggtcgtgccggagtcactgccag

SEQ ID NO: 154938 - DNA, 125 bp, Homo sapiens
  chr7:230452-230577
  hypo
acctctgtgtcccggcgttcggaacaccaggagcccttcacgaggctcctgtggggccgtgggtggatggagggtggccgggccgtctggtccacatgcctcaccctggccggccacctcagaca

SEQ ID NO: 154939 - DNA, 30 bp, Homo sapiens; identical to SEQ ID NO: 72581
  chr7:231922-231952
  hypo

SEQ ID NO: 154940 - DNA, 306 bp, Homo sapiens; identical to SEQ ID NO: 72582
  chr7:284815-285121
  hypo

SEQ ID NO: 154941 - DNA, 772 bp, Homo sapiens
  chr7:286005-286777
  hypo
gggtcccagggtggacgtgccggggcccccagccagtgcaggagaggcctttgagcagcttacctgagaagggcccatggggagctgggacctccggcctccgtcgcaagggcctgcgctgctctgagggcccgtcggcagctgggtcagggccacggggagctgggacccccggcctccgtcgcacgtgcctgcgctgctctgagggcccgtcggcagctgggtgcccagggtcccgaaggctcagggtggccctgaggaggctggagctccaccgcatttttcatatgaggaacccagcacgtcccgcctgcctccggcccctggaggctttctcagtgacaaaccgtttctgtttctgtcttgttttctcagacaaacgagggagcaggagacaccccctgactttttttatttctctgactacgagaggcacaatgcggagattgctgccttccacctggacaggtgagcccttccttcctccctccatccgcgctcccgtgcgctcagacccaccggtgagtgaggccgtcctgcactggacacagcaggacgtcatcgtcaccttcgtcaccatcaggcagcgccggtgcctgctctccccccaccccgagtgctgccctgagcagggtcctgtatgtcatcgtcacctttgtcaccatcaggcagcgccggtgcctgctctccccccaccccgagtgctgccctgagcagggccctctgtgtcatcgtagcccacacaacacgcggtagggagagcctttcatat

SEQ ID NO: 154942 - DNA, 30 bp, Homo sapiens; identical to SEQ ID NO: 72584
  chr7:287380-287410
  hypo

SEQ ID NO: 154943 - DNA, 1087 bp, Homo sapiens
  chr7:287707-288794
  hypo
acacagagcccagcacccaggcgagccgtctgacaggtggagggggagggtgctccacgcagaggcgtggtcgggccttgggtcccgggtcggccctggcagacggcccacgtccctccacacctggtcacctcgcctcacaggacaatcaccacgtcctccgtcagcaagaaaagctctcgccctgcattctccatttaattaagcgagtgggagcctgtggtgtggttcagaaggagttccattaaaagtggctcctttaatttaattttgttttaaatttagccctggaatgagggcaggctttagctatgcaggcagttggtgctgtgtgcccatcagtgaggcatcgccagccccagtccctcaggggcctctcccacccccatcaccgtggggccaggcagagccaccggacctagggctgggtttattcggaggcagggacacagaggcccgctgagccgcacagagcacagaccctcccctgccccgttcttatttggaggcagggacacagaggcccgctgagccgcacagagcacagaccattccccgcccgtttcttgccaggatcctggacttccgccgggtccctcccgtggccggcaggatggtcaacatgaccaaggagatccgggacgtcacacgggacaagaagctctggaggaccttcttcatctctccaggtagcctggcacgggggcccgcattcatctctccaggtagcctggcacgggggcccgcattcatctctccaggtagcctggcacggggagcccacattcatctcgccaggtagcctggcacgggggcccacattcacctctccaggtagcctggcacggggggccgcattcatctcttcaggtagcctggcacggggagcccacattcatctcgccaggtagcctggcacgggggcccacattcacctctccaggtagcctggcacgggggcccgcattcatctctccaggtagcctggcatggggagcccacattcacctccccaggtagcctggcacggggagaccacattcatctcgccaggtagcctggcacaggggcccgcattcatctctcc

SEQ ID NO: 154944 - DNA, 114 bp, Homo sapiens; identical to SEQ ID NO: 72586
  chr7:289726-289840
  hypo

SEQ ID NO: 154945 - DNA, 30 bp, Homo sapiens
  chr7:290231-290261
  hypo
aattaagctccgttccgtcagccagggctc

SEQ ID NO: 154946 - DNA, 259 bp, Homo sapiens; identical to SEQ ID NO: 20812
  chr7:290536-290795
  hypo

SEQ ID NO: 154947 - DNA, 234 bp, Homo sapiens
  chr7:291024-291258
  hypo
tcagagcagcatctccggaactcctcattttgttgtaaaatgagcctgtgggggcaggtcgtttcctccccgtttctaaggtcttactgagtggccgggcacggcggctcacgcctgcactgagtggccgggcacggcggctcacggctgcactgagtggccgggcacggcggctcacgcctgcactgagtggccgggcacggtggctcacacgcctgcaatcccagtactggg

SEQ ID NO: 154948 - DNA, 666 bp, Homo sapiens; identical to SEQ ID NO: 20813
  chr7:292735-293401
  hypo

SEQ ID NO: 154949 - DNA, 1354 bp, Homo sapiens
  chr7:293610-294964
  hypo
gggacccccgcttcccgggcgaggggctgggcacagagcagggaggcacttgcctgaggtcacacagctccaagccctcctaaccccgcccgggaggcccctttaatacccgatttggatctgcaaagagaaatggctgtgggcccgagaaatgcctttctcttttaacacgataccatctgaaaccggcttaggcgaggacgggaggctgttaacagcagacgaattttaagcctccagccaatgagcgctcagatgaagattttcctcctgaaatggagctcctgccccggtgggggctgcctcgtccgactgtgggctgccgactaatctgtatcagcacgagacaggattgcagctggtctttccttgatcgttcgttcttacaataatgacccagcgttggcagtggggtgagggggcgcgggaaggagggggcaggcaggtgatcggggcgttggaaccagaccagccgggacctgccgggtgcgtggggtgtggtgggggccaggtcggcctggcacccaccccgtttcctctccgaacctcagcttgttcagctaagaaagggcagccgggaccggccaccctcctgttcactccgctgggaagcgccctgccgaacctgccttctgatcccacggggagcctgccctgcagccaggagagacccctggaatcactcagcctggctgcataggaatgctgggactgggggagctgtgagtgaggttcggggctccggccccaacaaaaccacgttctcaccagttctacagccccaggctttccagagtttctccacaaacaaataaagcaagaaaaactagatttaatcagcaaataaatacaggaatagcgccgtcggccgggcctccagcatcagagcagtgaacccgcactgctagcgggcctggacagcgcttgcatttttctgattattctttctttattaaggtataattcatgtaccacaaaatttaccatttaaaagcgtacagttccgtggtttttagtatatccacaatggtgtgcaaccatcaccactgtctaaatccagaatgtcctgctgaccccaaaaaggagccccgtaccatgagcaggcggtcaccgttcctcaccccgcagccctcgacgagcagcgtcccacccccagtctatctggatttgcctgttctgggcgtttcatattaagagggtcatacgacgtgtggcctcctctgtctggcctccttcgcggagcacagggttctcgggttcagtgagggcttcattcctcttcttgtttcatttcgtttcgtgtcatcgcacggatggaccatgttcacctggcgtgtccactcctctcttgatg

SEQ ID NO: 154950 - DNA, 1234 bp, Homo sapiens
  chr7:295709-296943
  hypo
tgagaagcaccaggcagagcccggcccggccttgggggccgtgagaccacaggtgaggacgcagccctgtgcggccctggtaacccgcagcctgtccctccccagccaacaacatctgcttctacggcgagtgttcctactactgctccacggagcacgccctgtgcgggaagccagaccagatcgagggctcgctggcggccttcctgcccgacctgtccctggccaagaggaagacctggcggaacccttggcggcgttcctaccacaagcgcaagaaggccgagtgagtgcggggccggggggctggcgtccggccaccctacggcagagggagctgggcctgggcgggcatgggagggtcggcgcccacgggggtggcagagatgggtgcagagcctgctgtgcgatgctggcctgtgtgagatgaccgcttcctgatgagacggtggcagagggcgtccttactccagtatttccatgtgcttccctgacccgggccggcctgcccaccaggtccctcgaatcggggcctctcagcgtttgagctctgctctcgccccgtccctctcctcactcctgcgggagaaacggcccctgttctttccgccccacgttgtcctcgtgagtgtgtagtccaggtcctgtttccccacagagactctgcaaaaaacacggggcccagaggtgaaggcagctccaggtggggtcaccccgaggcagggcagagcggctccgtcccctcccacacccgtgctcccgctaatgcagcctcagcgccgcagcccgggcgggtccatctgcagacgccaaggtccctgccgcagtgtttctcttctgctcctcatggcacgcgccgggctccccagaatctggcctgggccccccgtctcacgctggctccccgcaggtgggaggtggaccctgactactgcgaggaggtgaagcagacaccgccctacgacagcagccaccgcatcctggacgtcatggacatgacgatcttcgacttcctcatgggtacgtcccgcaggggcacggggtccccgtgtcactcgccttgcgtggagcggatgcacgcagggctctgcagggcacactccgtggcacggcccggctgcggtcctgtggcctgtgaaggggccagattgcttagaggtcacgctggcaggaggagacgccgctctgcagagcacagaggcctctgagctacgtggcccggctccccacgagc

SEQ ID NO: 154951 - DNA, 316 bp, Homo sapiens
  chr7:297157-297473
  hypo
gagggatgggaatgtcgcaaaggcccatctcagagccagatgcagagggcggccccaggccccaaccaggagggagggccgccccgggagtgggacctccgaggcacaggaatgctgcagaccaagtcccggcagagctggtgttacctgggaaacggaggccaggagaggctgctggtaggaagagcaggaccgtgcagaatagatgggcctctgcctgcacgcggtacctggagccagccagcgggggataggcggcctctgcggccgctgctggcctgccacggggggtcttgggcggcgctgtgagaccctg

SEQ ID NO: 154952 - DNA, 675 bp, Homo sapiens; identical to SEQ ID NO: 20816
  chr7:298604-299279
  hypo

SEQ ID NO: 154953 - DNA, 39 bp, Homo sapiens; identical to SEQ ID NO: 72593
  chr7:299616-299655
  hypo

SEQ ID NO: 154954 - DNA, 1067 bp, Homo sapiens; identical to SEQ ID NO: 72594
  chr7:299915-300982
  hypo

SEQ ID NO: 154955 - DNA, 31 bp, Homo sapiens; identical to SEQ ID NO: 72595
  chr7:302539-302570
  hypo

SEQ ID NO: 154956 - DNA, 30 bp, Homo sapiens
  chr7:305412-305442
  hypo
cctgcatgtggaccccgcccggacagccgc

SEQ ID NO: 154957 - DNA, 31 bp, Homo sapiens
  chr7:307125-307156
  hypo
gagggacccgcaggtccgcaggtgagcgcag

SEQ ID NO: 154958 - DNA, 408 bp, Homo sapiens; identical to SEQ ID NO: 72596
  chr7:312489-312897
  hypo

SEQ ID NO: 154959 - DNA, 260 bp, Homo sapiens
  chr7:322779-323039
  hypo
cagatccccatcctgtctgcccggggccctgttaaccatggacccctcctctggacgtggacggcccctccgggcgcccccatcctggccgccccaccctctcgggcgcacccgcgtgtcaggatcgccagcctccatcgcttccgcatcgaggacgcacacggtgtgtcccttcagtgctacagagcacgcacccttaaataggcttccgtacagtcaaggatcctcgaagagtaaacgcttttaagctttttccattc

SEQ ID NO: 154960 - DNA, 30 bp, Homo sapiens
  chr7:324976-325006
  hypo
ctcgcgagcactcggcgttgtgtggtctct

SEQ ID NO: 154961 - DNA, 147 bp, Homo sapiens
  chr7:325294-325441
  hypo
tttcattttcttccccgcccctggggctgtggctgggatttattgtgtttattttccgatgtgtagcttttatgatctggggtccgctgagcggggctcggacagtaccctaagctaggtcgggtcgcactgcgccactcactctgc

SEQ ID NO: 154962 - DNA, 141 bp, Homo sapiens; identical to SEQ ID NO: 72597
  chr7:328220-328361
  hypo

SEQ ID NO: 154963 - DNA, 140 bp, Homo sapiens; identical to SEQ ID NO: 20820
  chr7:328540-328680
  hypo

SEQ ID NO: 154964 - DNA, 88 bp, Homo sapiens; identical to SEQ ID NO: 114406
  chr7:329605-329693
  hypo

SEQ ID NO: 154965 - DNA, 71 bp, Homo sapiens; identical to SEQ ID NO: 114407
  chr7:329764-329835
  hypo

SEQ ID NO: 154966 - DNA, 30 bp, Homo sapiens
  chr7:333955-333985
  hypo
gctgggaggtgctgccgagcggacgtttgg

SEQ ID NO: 154967 - DNA, 160 bp, Homo sapiens
  chr7:337219-337379
  hypo
gagtggacacgtggacgatgggacgcggggctgaggggtggcgggaggaggtgctgggaggcactggacgcgtggaagacgggacgtggggctgcggggtggtgggaggaggtgctgggagggagtggacacgtggatgatgggacgcagggctgagggg

SEQ ID NO: 154968 - DNA, 30 bp, Homo sapiens
  chr7:337741-337771
  hypo
acaccacccagggcacgcgtgaggcttgga

SEQ ID NO: 154969 - DNA, 64 bp, Homo sapiens
  chr7:337995-338059
  hypo
cccaccgaaaggggacgatgtaatgacagtccaagagagaatggaggtgcggtcccctgcagtg

SEQ ID NO: 154970 - DNA, 30 bp, Homo sapiens
  chr7:338477-338507
  hypo
agcgagcgtcagagacggtgggaacattcc

SEQ ID NO: 154971 - DNA, 35 bp, Homo sapiens; identical to SEQ ID NO: 20821
  chr7:339203-339238
  hypo

SEQ ID NO: 154972 - DNA, 30 bp, Homo sapiens
  chr7:344125-344155
  hypo
tatcccgtcggtccccgtccagggctgggc

SEQ ID NO: 154973 - DNA, 30 bp, Homo sapiens
  chr7:344435-344465
  hypo
tgcttctgccatccgcgtattccgtgtgcg

SEQ ID NO: 154974 - DNA, 534 bp, Homo sapiens
  chr7:345229-345763
  hypo
ggcagccactgtctttttcaacgctgtttgtacagagaaaggggtgcacagagccgtggacctgcagctcctggagcttcccggagctggtcctccagtagaggtgctggggatggggggacgcagccacggccttcatgcaccaacctggggtctccacgagcaaactctgtgttcaaggaggcactcggcctggggacgcggtgggaagagctatcggaggagcccctcggagctgcctcagcacagctgatgaaagcaatcagcgcccgcctgagctggatgtaaaggttaatacataaatcaaagggaaatgtcaggtgccttttaacactgattgagatgtaattgggcagggaccgtgcgccaggcacccgcgctcacggaaccacggcaggacgtggaagaaattatgtggcttgtttgtgtgtctgcaatcgcgtcaagaccgatggtccctcggctctggacagacgcccccccagccagctgaggatgcgaatattcatggcctggtgccgggtccggggctgg

SEQ ID NO: 154975 - DNA, 30 bp, Homo sapiens
  chr7:351142-351172
  hypo
gacacacagcgtctccgaaggatcttctcg

SEQ ID NO: 154976 - DNA, 293 bp, Homo sapiens
  chr7:357935-358228
  hypo
acacgcacattctgacggcacacccttccccgatctgcaccagatgaaacgcagagaaactccagtaacttccaaaacgatagctaaccaggaaccaaggattaccgctacacccggcccacccgaatacaccctgaattccctctgtgcagatcccaggacttctacgttctatttctggcattctgggattcagcccgttgacaaacctgccccaggccaggcccagccaggcaggtcctgagaacagggtgccactgtgcctgcgggcagcccgccgtcagctgggaggg

SEQ ID NO: 154977 - DNA, 57 bp, Homo sapiens; identical to SEQ ID NO: 72601
  chr7:361848-361905
  hypo

SEQ ID NO: 154978 - DNA, 30 bp, Homo sapiens
  chr7:365779-365809
  hypo
tgattccctcacattcgtcacacagtcctc

SEQ ID NO: 154979 - DNA, 30 bp, Homo sapiens
  chr7:366074-366104
  hypo
caagccaagcctgaacgccacctgcctcca

SEQ ID NO: 154980 - DNA, 30 bp, Homo sapiens
  chr7:366466-366496
  hypo
ccaggacccagtacccggcgtggccgccct

SEQ ID NO: 154981 - DNA, 181 bp, Homo sapiens; identical to SEQ ID NO: 72602
  chr7:367649-367830
  hypo

SEQ ID NO: 154982 - DNA, 259 bp, Homo sapiens; identical to SEQ ID NO: 72603
  chr7:369856-370115
  hypo

SEQ ID NO: 154983 - DNA, 259 bp, Homo sapiens
  chr7:373770-374029
  hypo
acacacacacaaacgcgcacacatgcacacatgcacccacatgcacgcagaaacacacgcacaaacaaacgcgcacacatgcacacatgcatccacatgcatgcagaaacgcacacacaaacgcgcacacatgcacacatgcacccacatgcacgcagaaacacacacacaaacgtgcacacatgcacacatgcacacatgcacccacatgcacgcagaaacacacaaacgtgcacacatgcacacatgcacccacatg

SEQ ID NO: 154984 - DNA, 18 bp, Homo sapiens
  chr7:374148-374166
  hypo
acgcgcacacatgcacac

SEQ ID NO: 154985 - DNA, 354 bp, Homo sapiens
  chr7:378630-378984
  hypo
cccaacccggtaccccgctctcttgcaagggtgtctgcctgtgccaattttcacagcagcgggtgggttccgtgggcctccacaggtgcctggctggacagcaacgttggtgatggctccctcatagcgacccgctctgagagaactgctagcccctttcacagatggggagactgaggctgcaaagatgagcggatttcccagagcatcagagccgggggtgggagagctggatcgctcactctcctccataccttcccaggtctagggcaggcaggactccgtgcaggacccccaagagccccgctctgtgcgacgaggatggcagcgtccagggcacgtcctggctgccgg

SEQ ID NO: 154986 - DNA, 30 bp, Homo sapiens
  chr7:380677-380707
  hypo
aacgcaacagaagggcgtctgaactgagga

SEQ ID NO: 154987 - DNA, 262 bp, Homo sapiens
  chr7:380935-381197
  hypo
gtcctcagctaattacatctgcgaagaccctgtttccaaaggtcacattcgagggtttgggtgggcacgaattttgaggggataccgtccgatccggtgcagggactttccagccgcaggctctagggaaggctctgtgctaaaatgcatccccggttcacactgcagggcaggagtgtgcgggcggaaggagccatgctgttgaggggcctgggtaactgtataacctgagggtctccatgttttccggcctgcgtgggtg

SEQ ID NO: 154988 - DNA, 30 bp, Homo sapiens
  chr7:381463-381493
  hypo
atgtgtgagaagcaccggcctgtgtggcca

SEQ ID NO: 154989 - DNA, 101 bp, Homo sapiens
  chr7:388189-388290
  hypo
ggctctttgccttgtcgcttgcaagcgctgggcagcctgcggggagatctgtccaacagtgccagggtccaaagaccgaggggccccgtgcaggcctgggc

SEQ ID NO: 154990 - DNA, 31 bp, Homo sapiens; identical to SEQ ID NO: 20824
  chr7:396925-396956
  hypo

SEQ ID NO: 154991 - DNA, 710 bp, Homo sapiens
  chr7:409494-410204
  hypo
ctccaatccgccgtggccagacgcccggcgatcgtccactgtgccgaggccccgggccccaggctggctgcagaggcgaacgacgcggccggccccgcgctgcagacgggccgcctaccccagcggtgccaccaaggccgctctcaggctgccccacagctgcgtgccaagcccctgacgggcactttatggcacgttatctcgcctgtgccccacaacaacccggccgggtgggaattccgctcccattaaacagataaggaaccgggattcggagaggcgagggcggccccaggtcccgcgggttataaagcaagggctggacccagcccgggcccacctgactccgagcccacctgatgctccggcacgggcccacgccccgttaataaaatgtaataaatagactctttgtttcaaagaaaatgtttttaaaagcaaggcagccaagccgggcccaggtaacaagcagagggaggaggcctcagagggaggaggcctcagcttcggactcagcccaggcctggcctcccgactcccaccaccaggggcctggctgtacctgtgggggctggagccccagggcagacacttcgcagactctgtgcagggccaggtgagccccagggcggagctggcagctgagggtgctccgtggctcggtgcactggccctgactcacgaatgccgcagcgcgtcctacgggaagc

SEQ ID NO: 154992 - DNA, 30 bp, Homo sapiens
  chr7:410540-410570
  hypo
ctcggacatgaaaggcgtctggtcggggcc

SEQ ID NO: 154993 - DNA, 654 bp, Homo sapiens
  chr7:414502-415156
  hypo
accccactcccaccgcggcggctacctctttcctcgcacgctccatggagagctggacctgcgggccgacggagggaaccctgtacacgccccctcactcactcgccatcccctgccccaaatgcagtgaatctctcctgtggtcccggattcaccgtctccactcagagtcgctaattctagagacaaggacggccttgttccagctggaacgcacacggaatgggaaggtgaatggggtgggaagcgtgcgtgggtcctgccacttggctcgtgggcagccctctgtgctgggggtcacgtggggcccacggccgcccgtgaaggagcctcccctgatggaggagacctgagcccaggccgctgagtgagccctgaggtgtggaacttgcaggagcccacaggggtaggatgtctcacaaagggtacggggtccgtgtcggcacccacgccaccaccggaccagctgggagatcccgggctcagaggcagcctctgccccagcgtctcctgtgcagctggagacagccaggtcctcacttggggaccgagccggcctcacctgagacaggcccttctgccctcaggcctgcctctcacagcctagctgcccatcacagcttcatgttctgggcgggccgctcgacctctctg

SEQ ID NO: 154994 - DNA, 31 bp, Homo sapiens; identical to SEQ ID NO: 20826
  chr7:416864-416895
  hypo

SEQ ID NO: 154995 - DNA, 429 bp, Homo sapiens; identical to SEQ ID NO: 72610
  chr7:418416-418845
  hypo

SEQ ID NO: 154996 - DNA, 31 bp, Homo sapiens; identical to SEQ ID NO: 72611
  chr7:425949-425980
  hypo

SEQ ID NO: 154997 - DNA, 147 bp, Homo sapiens; identical to SEQ ID NO: 20828
  chr7:429736-429883
  hypo

SEQ ID NO: 154998 - DNA, 453 bp, Homo sapiens; identical to SEQ ID NO: 72613
  chr7:431386-431839
  hypo

SEQ ID NO: 154999 - DNA, 52 bp, Homo sapiens; identical to SEQ ID NO: 72614
  chr7:432225-432277
  hypo

SEQ ID NO: 155000 - DNA, 191 bp, Homo sapiens; identical to SEQ ID NO: 72615
  chr7:438532-438723
  hypo

SEQ ID NO: 155001 - DNA, 30 bp, Homo sapiens
  chr7:441834-441864
  hypo
gataccgtgagctttcgaggatgccagttc

SEQ ID NO: 155002 - DNA, 159 bp, Homo sapiens
  chr7:442388-442547
  hypo
gagctctaacactgccgcttccataaagctgttttattctccctaccaccagctgacccttgaattctttcctaggtggagccaagaaccctcacaggctaagccccacattggggttcacccgtcctgcatcagcttcgcttacgggagccaaagcca

SEQ ID NO: 155003 - DNA, 36 bp, Homo sapiens
  chr7:453593-453629
  hypo
caccgctcccggaccgacaccttgttttgaaagagc

SEQ ID NO: 155004 - DNA, 306 bp, Homo sapiens
  chr7:455127-455433
  hypo
agctcacgggggatgcggcctgcggtgccctccaggctcagcctgggtgacagggccaactcacggggcccgtggcctgcggagtcctccaggctcaccctgggtcacagggccagtttgcagggacagcagcctgcggtgccttccaggctcaccctgggtcacgcggccagttcgcggggcccgtggcctgcagagtcctctaggctcaccctgggtcatgcggccagttcgtggggacagcagcctgaggtgtcctccaggctcaccctgggtcacgcagtcagctcacgggggccgcggcct

SEQ ID NO: 155005 - DNA, 388 bp, Homo sapiens
  chr7:455738-456126
  hypo
agactgcagcgacgccgtggctagccaaggagctgccgagccgccgggagctcagagggcctggcgccttcctgaaactcctcatgctggtgttggggacacagaggtgggtcccacagggtgggtctgctctcgaggggcaccaagcaggggagagaagacagagcagagatcagtgagggaactgcacgccgatcccgggccagaccccgactttcacaaggagacacacgtcggggacgccagggaggcaggaaaacgttcccagacactcagcggggcccgcaggctgcccaggagcagagactccagacgttcatgccacagaggcagagagggagaggaggcactggggccccgaggctgagaggggcgcagggagcagcct

SEQ ID NO: 155006 - DNA, 207 bp, Homo sapiens
  chr7:462324-462531
  hypo
ttccttctcagacaccgcgcagcctgcggggcaggggaagctcccacgaggggctgcgtgcctgacactcccctcaccctccactcaactaagctcgggcttgggggaaggaataggagagcttggagctttgtgaacggaggcagcttcttgccacctgcccagaggggaaagcctgccggcctccggggccgcatcgtctgaccc

SEQ ID NO: 155007 - DNA, 574 bp, Homo sapiens
  chr7:462737-463311
  hypo
actcccagcatcagacggagacccccgagactcccccaacacgcccagcatcggatggaacccgggtgttggttccaggggtccccgccctatgcaccgcaccccctgctcaggccggcttatcttcgagggaataagaaagcatcgtgtccaccccaagacccccgcaggcccagtgtccccagagggccgggcgccccaggcctagtgaggaaggggcacccactgaggctgctgggagctttcagggtgaggggtgtggcaccggggacggaacgcccaggccaggtttcaggctgggattaagggtcctccagaccctccttgaattttaggagaagcacgaaggggtgggggcgtctctctcttctcttaggagatctggaggagacttcgggcactgcactgtggcctccacgacaagccgaggaacaaggccgtccacccctgagaaggccacgcagaccactcaccgagggtcctgggggctatggacagaatgtttgtgccccaaactcctgctctgaaatcctcactcctaaggtgttggtgtttggagcggggccttggggaa

SEQ ID NO: 155008 - DNA, 30 bp, Homo sapiens
  chr7:463994-464024
  hypo
agacctgaagccgcacgttcccccagactt

SEQ ID NO: 155009 - DNA, 534 bp, Homo sapiens
  chr7:465352-465886
  hypo
agggaggccgtccgtcggtgaccagacgcctgacctcatacaccggcaatgatgcacatgtcagacccagcttgtagccgctcagcccacccgacagacagcaccagtgcccagtggcagccagccccatgcagatgaaagaaaaaggcacagcccagggcggatgcttctgaggtgcaggtgcctgtctgtcatcgggcaggagcccgcaggtggacagcatggggcccgcacacctggggaccgggcgaggggtgtggagcgccgtggggcaccctgcagcatcgggtacatctgcgtgtggacagcaggacatcaagagtcgaaaaggtgcgattaacaagttgcagaacagaacggccgtgaacccattttatctaaacgtggtgtgtgcgtgtgtgtgttcgagggtgtgcgtgtgtgtgcctgtgtgtgtgtgtgcgtgtgcgatagtgtgaactgaaaagccactgggcctctggtcaaggcagacggggccactccccccccaagcctgctcgggaactaagccca

SEQ ID NO: 155010 - DNA, 35 bp, Homo sapiens
  chr7:466109-466144
  hypo
aactctagagggtggcgacccgatttgcaaatggc

SEQ ID NO: 155011 - DNA, 311 bp, Homo sapiens
  chr7:466507-466818
  hypo
tccacacacgaaggccgggcactcactctgggccaggacttgtgctgggtgcaggcggcacagcagagttgatgctgccctggcctcagagactctccctgagtgcaggcggcacaacccagtcgaggctgccctgtcctcagagactcccctgggtgcaggtggcatagctgagtcgatgccgccctgtcctcagggactctccctgggggataaggcagtgcctccctgccactccccgtgctgtgctggcaaacgtctaacaatcagcaacccaggaagaccctgactcgcagcgactgccaatttcc

SEQ ID NO: 155012 - DNA, 31 bp, Homo sapiens; identical to SEQ ID NO: 72617
  chr7:469230-469261
  hypo

SEQ ID NO: 155013 - DNA, 513 bp, Homo sapiens
  chr7:469698-470211
  hypo
gcatttaaatacagccgacccggccgatgccctaacgcaggcagggcccagagaccaagagaggcccatacactgcacgtcctggcgttaaataacaccgccccggctgatgccccgtggaactcgcagagtagcctccgtgctcccgccgtgacagacttcacaccagcctggacgttcagactcaaggttagaaatctcagcttcccgaggacacacagccatgcctcctgcctccctccatcgcctccggcttcactctcacgggaagggggcttcgggatgccgggcccgcactccgagtggccatgctgggtccgggtcctgcacagagcgcccttggctgcccccacaccaggcccagcaccgcaggcagaggacttggaagaggaagacacgtggtgctcgtgggacctttggggcaggagcctcgggaaccccagggccttgaggtactcaggatgggattgcgaaggcagctcaggcctcagcggggctggaggggaactacag

SEQ ID NO: 155014 - DNA, 30 bp, Homo sapiens
  chr7:477614-477644
  hypo
tgaggcaggtggcggcgcccgcctggccat

SEQ ID NO: 155015 - DNA, 30 bp, Homo sapiens
  chr7:478323-478353
  hypo
ttctctgcgcgttcccgccgccctccctcc

SEQ ID NO: 155016 - DNA, 320 bp, Homo sapiens
  chr7:479004-479324
  hypo
ctggcactcccaccacgatggccagcggacaacaacagtgtgggcacagtgatgggcacccccccgtgtccactcggccgggctgcagtgcccagcggcacggtcaagccccatccagatgccactgtggctgtgctgcaggtgtgatggacacgcacaattggctaattgcaagtgctgcagatcacgagatgtggctgggcctcagctgcagctgaagatgaacgccgaggcttcctggagaaggatttctgccccaagactgcaacataaaatcctgcccgggctcccagcctgctcccctgcgggtctgccctgca

SEQ ID NO: 155017 - DNA, 451 bp, Homo sapiens
  chr7:480949-481400
  hypo
aggccgcagcacataacgaggtaggaagagccggagaaggcctggctggccctgggagacacgtccatctcactgctggttcataagcatgtgggcacccgggaagctggagcgtggcctgtgtgacgtgggcgcccaccaccacgatgaggccggttcataaacatgtgggcacccgggaagctggagcgtggcctgtgtgacgtgggtgcccaccaccatgatggggccggttcataaacacgtgggcacccgggaagctggagcgtggcctgtgtgacgtgggcgcccaccaccaggatgaggctggttcataaacaggtgggcacccgggaagctggagcgtggcctgtgtggcatgggcgcccaccaccacgatggggctggttcataaaaacacgtgggcacccgggaagctggagtgtggcctgtgtgacgtgggcgcccacca

SEQ ID NO: 155018 - DNA, 36 bp, Homo sapiens; identical to SEQ ID NO: 20832
  chr7:485247-485283
  hypo

SEQ ID NO: 155019 - DNA, 138 bp, Homo sapiens
  chr7:497764-497902
  hypo
tgttcctattcataccgcctggcctcaggtccacggctgcggccacagagcccatccaggaattctgctgctctcagtttacatttaaaataaatgtttccttaactcgcatctcatggccggcggtgaacggcagga

SEQ ID NO: 155020 - DNA, 30 bp, Homo sapiens; identical to SEQ ID NO: 43740
  chr7:500667-500697
  hypo

SEQ ID NO: 155021 - DNA, 1080 bp, Homo sapiens
  chr7:502957-504037
  hypo
ctgggacccagcctccggggagccgtgaagccctgccgtcttgtggctccaaagccggtccaccaatgacctcgtgccagcggcatcacgacgctgcctcacaccgcacaagactcgccgggaagatgcgagacccatgacagagcccagaaaggcgacggggtggcccaaggtcacacccacgccaggcccagcactctgctcttcccgctcacccactcggccgggcctgtgccctcccgcccggccaagtgggggctccaggaagggcagcgagtgccccgcggccccggccccactgcgggcggccggaacacagagggcggtgaggaaggaggcgttccctgccgggtgccctccagcaggattcgcgaacccaggggagcgagcgggaggattttccatgtgaggccggcttcctggggcgaggcccacccggcgccagcgtggagagaggagaggagcaaagcgcctcgacacattctccctcggtgatttaatggccggagcattcgtgcgatatttatgcagtaaatccttccactggggggtttcactgtgtcacgggaggctcctcccagcccgtccccatcccgtcccccccaaaaaaagaatcctgagaaaatctcatttcacagtttcccatcgagccaggtgcacagcagctgcggtgggcatggcgggcgcgggtcctggggaacaccctctgctggcgtccgcagcccgggagggagcgtgaagtggaggatctcggcaggcgtggctgtgtccaggcaggcgggtgctgccgcgtccccggctgcagggtcttggttccccggagccacaggacggcagggcttcacggctccccggaggctgggtcccagcgctggggaaggacaccgggccctgagggccaacgccaaacccagacgacgttcaaatccagctttccgagcaaggctcacaccaccaggaaagccgatacactttctaaactccacttctgagttgaatattcgaaataggctcttaaagcaaatgttggcccccacgtcagagtcaaccatgttcatcggatgcctccagccccaccaa

SEQ ID NO: 155022 - DNA, 30 bp, Homo sapiens; identical to SEQ ID NO: 72624
  chr7:516718-516748
  hypo

SEQ ID NO: 155023 - DNA, 30 bp, Homo sapiens; identical to SEQ ID NO: 72625
  chr7:516951-516981
  hypo

SEQ ID NO: 155024 - DNA, 31 bp, Homo sapiens; identical to SEQ ID NO: 20834
  chr7:526252-526283
  hypo

SEQ ID NO: 155025 - DNA, 499 bp, Homo sapiens; identical to SEQ ID NO: 72627
  chr7:531099-531598
  hypo

SEQ ID NO: 155026 - DNA, 108 bp, Homo sapiens; identical to SEQ ID NO: 72628
  chr7:532033-532141
  hypo

SEQ ID NO: 155027 - DNA, 31 bp, Homo sapiens; identical to SEQ ID NO: 20836
  chr7:532562-532593
  hypo

SEQ ID NO: 155028 - DNA, 103 bp, Homo sapiens
  chr7:533201-533304
  hypo
gcctggacgacagagccagactgcgtctcaaaaaagaaaagaaaagaaaggctgggcgaggcaggcgggtcccctggacactgggggacgatcccgcggcagg

SEQ ID NO: 155029 - DNA, 189 bp, Homo sapiens; identical to SEQ ID NO: 72631
  chr7:534691-534880
  hypo

SEQ ID NO: 155030 - DNA, 30 bp, Homo sapiens; identical to SEQ ID NO: 72632
  chr7:537227-537257
  hypo

SEQ ID NO: 155031 - DNA, 30 bp, Homo sapiens
  chr7:539952-539982
  hypo
tcagggccacatccccgccgcacccggcga

SEQ ID NO: 155032 - DNA, 293 bp, Homo sapiens
  chr7:540522-540815
  hypo
tctcctgccagtgccgcagcttgggccaccctccccaccggacacctgcaggtgtgggatccgtctcccccgcaggcatctggcccgggagcagggcaacgaatccttcaacagcagcccagatgctcacagcagtaagcgttgcgctcaagggggccacctaacaccccaaaagcaaggctctgaagacctgttctccaacaccgatgccgacgaaggcagccactcacccgtgtcctcttcccgataatccggattcaggcttgtggtcgcgcaggcgcactccaaatgct

SEQ ID NO: 155033 - DNA, 160 bp, Homo sapiens
  chr7:544944-545104
  hypo
accttatcacaccagacattccgattccccacggctgagttcatctgcgtcgtaagccgccccacctcaacactcccggcgcgaactcacccaagactacaacccagggatgccgtcacccctctagacctgggatgccgagtccctactgctacaaagc

SEQ ID NO: 155034 - DNA, 202 bp, Homo sapiens
  chr7:545345-545547
  hypo
gcccagagtcacacagcgttgaatctccatccctagcctgcactccttctcacctctttcacggaaagaaagcctagagtccagagccctggccccaccgccccacagccccacctgggtgtctctcgacagagacttggaatgtcactcaatccagatgctgacttgggtcatgaggaccccagctgggtgcggtggctca

SEQ ID NO: 155035 - DNA, 30 bp, Homo sapiens
  chr7:546102-546132
  hypo
tgggagcttctcacccgtaacaccccagcc

SEQ ID NO: 155036 - DNA, 698 bp, Homo sapiens; identical to SEQ ID NO: 72637
  chr7:551452-552150
  hypo

SEQ ID NO: 155037 - DNA, 43 bp, Homo sapiens
  chr7:552999-553042
  hypo
gtctcaggtctctccaaatcccgcagtagggagaggacccaca

SEQ ID NO: 155038 - DNA, 293 bp, Homo sapiens; identical to SEQ ID NO: 5277
  chr7:557697-557990
  hypo

SEQ ID NO: 155039 - DNA, 37 bp, Homo sapiens; identical to SEQ ID NO: 43744
  chr7:558726-558763
  hypo

SEQ ID NO: 155040 - DNA, 506 bp, Homo sapiens; identical to SEQ ID NO: 43745
  chr7:558985-559491
  hypo

SEQ ID NO: 155041 - DNA, 30 bp, Homo sapiens
  chr7:563868-563898
  hypo
tgtggccgctggacacgagagacgtggcca

SEQ ID NO: 155042 - DNA, 210 bp, Homo sapiens
  chr7:564177-564387
  hypo
gtgctggggacacggcgttaagaccaggccctcacggagccctcactctctgaggaggaacaataagtcagagagcgcgcgagtgcagcccttcaggcaaaggatttcaggcccaggtcaggaaggccttgtctgaggagtctgagaagaagtcaattgacaacagctagaacatctaggtcaggcactccaggccgacacgacaaagca

SEQ ID NO: 155043 - DNA, 74 bp, Homo sapiens; identical to SEQ ID NO: 72641
  chr7:576730-576804
  hypo

SEQ ID NO: 155044 - DNA, 30 bp, Homo sapiens
  chr7:577443-577473
  hypo
gacctggccttaccacgactgccctcagcg

SEQ ID NO: 155045 - DNA, 151 bp, Homo sapiens
  chr7:577691-577842
  hypo
tggttgtgggcggcccggccaggccctgcttaggttctggggtgcactgcaggggtgcacagcaggagtgcgctgcggtggatcagggccgtggagggcccagcctggggctgacctgaccagagcccaggggagccggggtccctggagg

SEQ ID NO: 155046 - DNA, 429 bp, Homo sapiens
  chr7:578809-579238
  hypo
tggaaggacccttccagctggcggggggctcccgtttggggacaagtgcctcagctacgccggtggagccttggtgaggaacccctgtgcccccactcactgcgggcagaggcaccacctctgggggccggtgtgaagccagactcctagccagccctgcagcctgtcccaggggccagtagaaccgggagggggccgggtgtgtaactgcctcctgaggccggcgagtagattcctgaggctcagggcggtgccctcctctacctgcccacacactccaagggagcttcagtccccacctgccagctggaacaggggctccctgagggcccgagtccccaacgctaacacaggaggcaccagggagcgtctgcggaattaaaccaacactctgtgtgcacgtcacacgtttagcggacacaggcccag

SEQ ID NO: 155047 - DNA, 30 bp, Homo sapiens; identical to SEQ ID NO: 72644
  chr7:581530-581560
  hypo

SEQ ID NO: 155048 - DNA, 32 bp, Homo sapiens; identical to SEQ ID NO: 72645
  chr7:587415-587447
  hypo

SEQ ID NO: 155049 - DNA, 149 bp, Homo sapiens; identical to SEQ ID NO: 72646
  chr7:589081-589230
  hypo

SEQ ID NO: 155050 - DNA, 30 bp, Homo sapiens; identical to SEQ ID NO: 72647
  chr7:590083-590113
  hypo

SEQ ID NO: 155051 - DNA, 132 bp, Homo sapiens; identical to SEQ ID NO: 72648
  chr7:593560-593692
  hypo

SEQ ID NO: 155052 - DNA, 30 bp, Homo sapiens; identical to SEQ ID NO: 72649
  chr7:593917-593947
  hypo

SEQ ID NO: 155053 - DNA, 208 bp, Homo sapiens
  chr7:601254-601462
  hypo
cccggctggccgagacggaactgatgtacgtcacacaccctgggctgcaaactgtcctcgggacgacagcgaaaacacacttcagcgggcgagccgcccaaggtcagctcctgtgccagcgtttaatggatcatccatgaggtctggggcccggcaaaggcacggcccagcagcttccgtgggaaacaagccgttcccgcggacgtcg

SEQ ID NO: 155054 - DNA, 359 bp, Homo sapiens; identical to SEQ ID NO: 20843
  chr7:601503-601862
  hypo

SEQ ID NO: 155055 - DNA, 30 bp, Homo sapiens; identical to SEQ ID NO: 72652
  chr7:610322-610352
  hypo

SEQ ID NO: 155056 - DNA, 30 bp, Homo sapiens; identical to SEQ ID NO: 72653
  chr7:611045-611075
  hypo

SEQ ID NO: 155057 - DNA, 30 bp, Homo sapiens
  chr7:611382-611412
  hypo
gatggaggaatgtgcgcagggaacctgaga

SEQ ID NO: 155058 - DNA, 359 bp, Homo sapiens; identical to SEQ ID NO: 72654
  chr7:612443-612802
  hypo

SEQ ID NO: 155059 - DNA, 30 bp, Homo sapiens
  chr7:617013-617043
  hypo
gacgcacgcatttcccgatgacaggtacag

SEQ ID NO: 155060 - DNA, 473 bp, Homo sapiens
  chr7:617511-617984
  hypo
tcccgctaggcagtgcgctgagggtagcagctcagggcgcttttgcagtcccatttatacccactttaaattatgtgcacattaaggggtgggttatacacagctctctggttaagggtggtaattttccgggtcatcagaccacattgccatggaaaggggcgggagcgcccgggtgttgtcatggcaacggtaaactgacaatggtgcacgggtgggcgtggcttacggagagtggcttgcaccctggccctgttttagccagtcctcaattaggtccagtgtcccagccccacctctggagtcgagtcccacctgctaactctcaggcacggagtccctcgccggcacccggaatgggagttcacacgcgaattcctgccgtgtcctcaggacagctgctcggcccacccaacagtctgcgtgcggccaccacggactgcggccccagcacatcccgggagctccacgga

SEQ ID NO: 155061 - DNA, 30 bp, Homo sapiens; identical to SEQ ID NO: 72655
  chr7:618959-618989
  hypo

SEQ ID NO: 155062 - DNA, 869 bp, Homo sapiens
  chr7:622699-623568
  hypo
gggcagggggggtgacggctcacagggacggggctctgtctcgggtgaggacggggctctgggatgggagcggtgccgacaacgtcgtgtgtagactcaacggccctgaaatgcgcttccgggaaaggtcaaaacggtcggcgtgctgtgacgtgcattttaccacaatggaaagacccgcacgctcctttctcgacatttcacagaaggatttcagagagaacaggggtcaaagtcctccccaagaaggaacacaggcacagccacactgcatacacacacgtgcacacacacaggcgcacacacccactcacacatgtgcacactcacaccccccacacgtgtgcacacccacgcacacacgcacacacccacagtgcacactcacacccactcacacacgtgcactcacacccacgcacacacgtgtgtgcacacccatacacacccacacacgcgtgcacacacccactcacacacgtgccaaacacatgcgtgcacacccatgcacacacacttgcacactcccaggtgcacacacaccccctcacacgtgcacactcaaacccccacactcacatgcatgcacacccatgcgcacacacccacacacaacccacacggtgcactcacaccctcacacacgtgcaattcacacgcattctacacacatgcacacacccatgcatgtgcactcgcacccatgcacactcacgtgtacacccatgtgcactcacatgcacactcatgcacacacacgcacacacacccccatgtgcacactcacccccacacacctgcacggttctgcctgctctagcccaaggagcccccactggcccagctggcgccatcgcgtataactcagg

SEQ ID NO: 155063 - DNA, 40 bp, Homo sapiens; identical to SEQ ID NO: 72656
  chr7:635125-635165
  hypo

SEQ ID NO: 155064 - DNA, 30 bp, Homo sapiens
  chr7:636215-636245
  hypo
acaccagaggcggacgcacccggcccccgc

SEQ ID NO: 155065 - DNA, 37 bp, Homo sapiens; identical to SEQ ID NO: 20845
  chr7:636568-636605
  hypo

SEQ ID NO: 155066 - DNA, 30 bp, Homo sapiens; identical to SEQ ID NO: 20846
  chr7:637207-637237
  hypo

SEQ ID NO: 155067 - DNA, 30 bp, Homo sapiens; identical to SEQ ID NO: 72659
  chr7:645485-645515
  hypo

SEQ ID NO: 155068 - DNA, 43 bp, Homo sapiens; identical to SEQ ID NO: 72660
  chr7:649822-649865
  hypo

SEQ ID NO: 155069 - DNA, 152 bp, Homo sapiens
  chr7:653115-653267
  hypo
gtctgaggaagcgtacgggatcagaaccagcagctccgttcacagccaaactcgccttcaaaaggcaaggagatggcgcgccaagctcagcccctgaaatcacacacgcggggttgaacgtgagtaactcagcccatcgttccgcactgtga

SEQ ID NO: 155070 - DNA, 293 bp, Homo sapiens; identical to SEQ ID NO: 72662
  chr7:653524-653817
  hypo

SEQ ID NO: 155071 - DNA, 30 bp, Homo sapiens
  chr7:657448-657478
  hypo
acccctcctgggccccgcgtagcactcacc

SEQ ID NO: 155072 - DNA, 30 bp, Homo sapiens
  chr7:661618-661648
  hypo
gtgatgcaaatggagcggcccatgccccga

SEQ ID NO: 155073 - DNA, 77 bp, Homo sapiens
  chr7:661918-661995
  hypo
cattcagaagagcagcgaggtgaggggtggcagcaaggacccccgcgccacacagggcctcccgctcactcctcccg

SEQ ID NO: 155074 - DNA, 331 bp, Homo sapiens; identical to SEQ ID NO: 72663
  chr7:667313-667644
  hypo

SEQ ID NO: 155075 - DNA, 30 bp, Homo sapiens; identical to SEQ ID NO: 72664
  chr7:667964-667994
  hypo

SEQ ID NO: 155076 - DNA, 30 bp, Homo sapiens; identical to SEQ ID NO: 72665
  chr7:668335-668365
  hypo

SEQ ID NO: 155077 - DNA, 69 bp, Homo sapiens; identical to SEQ ID NO: 72666
  chr7:671702-671771
  hypo

SEQ ID NO: 155078 - DNA, 30 bp, Homo sapiens; identical to SEQ ID NO: 72667
  chr7:672093-672123
  hypo

SEQ ID NO: 155079 - DNA, 152 bp, Homo sapiens; identical to SEQ ID NO: 72668
  chr7:675430-675582
  hypo

SEQ ID NO: 155080 - DNA, 30 bp, Homo sapiens; identical to SEQ ID NO: 72669
  chr7:710325-710355
  hypo

SEQ ID NO: 155081 - DNA, 70 bp, Homo sapiens; identical to SEQ ID NO: 72670
  chr7:711711-711781
  hypo

SEQ ID NO: 155082 - DNA, 30 bp, Homo sapiens
  chr7:712993-713023
  hypo
gtcttcagctcagccgggcgcggtggctca

SEQ ID NO: 155083 - DNA, 347 bp, Homo sapiens; identical to SEQ ID NO: 72671
  chr7:716114-716461
  hypo

SEQ ID NO: 155084 - DNA, 281 bp, Homo sapiens
  chr7:716714-716995
  hypo
gctgtgattcccaggcgagcaacgggggctgcccacctcctggaggccagggagggaggcagtgatgcccaggcaagtggcgggacctgcccacctcccggaggccgaggagggcggcggtgatgccggggcaggggacgagtctgcctacctcctctcgttgtcatccaggtgagcgaagagcacgttcttggagatggccttggccagcgcagtcatggttttgtagtccttgggaatcacctgaagcggagccaacacatcaccgtgtgagccaccct

SEQ ID NO: 155085 - DNA, 31 bp, Homo sapiens; identical to SEQ ID NO: 72673
  chr7:718852-718883
  hypo

SEQ ID NO: 155086 - DNA, 30 bp, Homo sapiens; identical to SEQ ID NO: 72674
  chr7:731239-731269
  hypo

SEQ ID NO: 155087 - DNA, 30 bp, Homo sapiens
  chr7:734750-734780
  hypo
gccccacatcctcacgccatataaactgtc

SEQ ID NO: 155088 - DNA, 102 bp, Homo sapiens
  chr7:738372-738474
  hypo
atgcatgtgcacacacgactccacgtaccctcctcctcggtggcaacagtacatccttgcctgtgtgtgcatgtgtgtgcatctgggcgagtgtgtgtacat

SEQ ID NO: 155089 - DNA, 32 bp, Homo sapiens; identical to SEQ ID NO: 72675
  chr7:744079-744111
  hypo

SEQ ID NO: 155090 - DNA, 93 bp, Homo sapiens; identical to SEQ ID NO: 72676
  chr7:746772-746865
  hypo

SEQ ID NO: 155091 - DNA, 22 bp, Homo sapiens
  chr7:755892-755914
  hypo
ctatgttgcctaggctagtctc

SEQ ID NO: 155092 - DNA, 30 bp, Homo sapiens; identical to SEQ ID NO: 20852
  chr7:768551-768581
  hypo

SEQ ID NO: 155093 - DNA, 90 bp, Homo sapiens; identical to SEQ ID NO: 72679
  chr7:778947-779037
  hypo

SEQ ID NO: 155094 - DNA, 30 bp, Homo sapiens; identical to SEQ ID NO: 72680
  chr7:781195-781225
  hypo

SEQ ID NO: 155095 - DNA, 30 bp, Homo sapiens
  chr7:783064-783094
  hypo
gccctgttaaatccacgcctacagagccgt

SEQ ID NO: 155096 - DNA, 30 bp, Homo sapiens
  chr7:785014-785044
  hypo
tgatccttggaatgcggtaagggagaagac

SEQ ID NO: 155097 - DNA, 30 bp, Homo sapiens
  chr7:786171-786201
  hypo
gtcatccctttcccccgcccgccgtgccca

SEQ ID NO: 155098 - DNA, 30 bp, Homo sapiens; identical to SEQ ID NO: 72681
  chr7:790369-790399
  hypo

SEQ ID NO: 155099 - DNA, 30 bp, Homo sapiens; identical to SEQ ID NO: 20854
  chr7:794470-794500
  hypo

SEQ ID NO: 155100 - DNA, 30 bp, Homo sapiens
  chr7:797022-797052
  hypo
agatgtggggtccacgtcatcccacccctg

SEQ ID NO: 155101 - DNA, 30 bp, Homo sapiens; identical to SEQ ID NO: 43749
  chr7:797705-797735
  hypo

SEQ ID NO: 155102 - DNA, 83 bp, Homo sapiens; identical to SEQ ID NO: 72684
  chr7:799678-799761
  hypo

SEQ ID NO: 155103 - DNA, 633 bp, Homo sapiens
  chr7:803210-803843
  hypo
tcgctgcagagacggcgttggtgtgaacgggatcagggtctcgccctgcacccgcggctctcgctctcctgcaccctgggcggggctccctgtggcagcctccctcccgattatcctggcaggcccggcctgtgtggttcttacgcgtgagggggatagtgagtcccagcaggcaggcaggcttgagccctgagtgttggaattgtctcagtctctgacttgtaacctccaggcacaggagacgatggactcactggccatggtggagggtgtcagcagctgccaggacctctaccgcaagcacattggtcccctcctggagcgggtgaccgcgtcgcaccttgactggaccgcacactcgccggagctcctgcagttcagtgtcatcgtcgcacagtcaggtgagccgtcccgacagctggcgtgccgtgcctggccccactcaggctacacacctgctcccccaggtgctcagcaggtaccagcgccgaccagctgagctgtggttcactgaagcgtgttgttaaaagtacccaatagtcactcttgcctggggagaagcagcattttaaggagcatcgcattgaagactgtgggacgcagctcttccacttggcccgggcacacgctttc

SEQ ID NO: 155104 - DNA, 729 bp, Homo sapiens
  chr7:807332-808061
  hypo
gacacgtgatcagggcggaagtgtccgtgctgcgaggcggagctggcgctgggaggggagacacgtgatccgggcggaagtgtccgtgctgccagcaggagctcccgctgggagggcagacacgtggtccgggtggaagtgtccctgctgcgagcaggagctcacgctgggagggcagacacatggtccggtggaagtgtccctgctgcaagcaggagcgctagtgctgggagggcggacacgtggctccgggcagaagtgtccgccagcaggagcgctcgtgcttggaaggtagacacgtggcccgggcggaagtgtccttgcagcgagcaggagctggcgctgggagggcagacacgtggtccgggcggaagtgtccgtgcagcgagcgggagctcgcgctgggagcggagacaggtgatctgggcggaagtgtccatgctgcgagcgctcgcggctgggagcgcagacacgtggtccaggcggaagtgtccatgctgcagcaggagctcgcactgggaggggagacacgtgatcagggcggaagtgtccgtgctgcgaggaggagctagcgctgggaggggagacacgtggtctgggcggaagtgtccgtgctgcgagcaggagctctcgctgggagggcagacacgtgatcctggcggaagtgtctgtgctgtgagccgcagctcacactgggagggaagacacgtggtccgggcggaagtgtct

SEQ ID NO: 155105 - DNA, 868 bp, Homo sapiens
  chr7:808383-809251
  hypo
tggctcacccgtcagcgtgcttctttttcccatcccaggagttggacttgacctgtggacatttggctgttttctttttgtttttaagccagaaacactgtcttgtttccagtttaagatgtagagagggtgaaacagtcagaaactgggtcagaagcagcgtggttctcgtggcagggcggcacttggcccaagactcgtgctctggcgggaggctcaagtcaggcgtcccagcagcttcggtgcaacgcctcctgcccggctgcgtggggaggccctccaagacaccagctggtctcaccgcgaggcctgacttcgagccagagcagcgagtacattgcgtctccgtgtggcaagggcaggtgcgggggtctcagtccactaccgagcagcctgctctgatgactggcggcgccagggagaaggctcacatcgcgaggtccccagcaacggctcaaggtgactcacagttgcttggataagccagtggacgctccctctacactggcccggggccagagcgcctccttctgcggccccaacccagtccccaccctgagccttcagctcctgggcctgcaggctgagcctggcaggagacgctgcagggactctcagagctgtccttgccctgtcattcatggagacttacagggaggcggggcggccctactgcagtggggaccccttggggcgtaggatgcacagtgcaggcgcccaagcctcgcgcccaccggagagcagccacggtgcaggagcttggccctgagtgtgggcggggtgagggctgcaacgctgagaagcagatattaaagaagttctttcactgaaacaattgattttggtcgttgtttcaactattgcttga

SEQ ID NO: 155106 - DNA, 31 bp, Homo sapiens; identical to SEQ ID NO: 20858
  chr7:810520-810551
  hypo

SEQ ID NO: 155107 - DNA, 30 bp, Homo sapiens; identical to SEQ ID NO: 43750
  chr7:814375-814405
  hypo

SEQ ID NO: 155108 - DNA, 30 bp, Homo sapiens; identical to SEQ ID NO: 72690
  chr7:815402-815432
  hypo

SEQ ID NO: 155109 - DNA, 246 bp, Homo sapiens; identical to SEQ ID NO: 20859
  chr7:818257-818503
  hypo

SEQ ID NO: 155110 - DNA, 480 bp, Homo sapiens
  chr7:819361-819841
  hypo
cagcagggcctgggccgcctccactctgttggctggggttcaggggtcccaggtcgccaggagcaccttgcatgtggctcgggatgcacggagtctcccgtgaggtgtgggtttcttaggaccccagggcaggtgtcccatgggagtatgaactaaatgcctttgtggacgtttagacgtgaaatgtctgctctagactcacacacctgtctcgctccctccttccagaactcttaaaacgcctagatgacgtgtccaacgatgtgaggatggcagccgcctccaccttggtcacctggctgcagtgtgtcaagggtgccaacgcaaaatcctactatcagagcagtgtccagtacctgtaccgagagttgctggttcaccttgacgatccagagagggccatccaggatgcaattttaggtgagactccgacggcttggccttcgttccgatgcctgctttcggcgcctgccacgggca

SEQ ID NO: 155111 - DNA, 257 bp, Homo sapiens; identical to SEQ ID NO: 43751
  chr7:822391-822648
  hypo

SEQ ID NO: 155112 - DNA, 70 bp, Homo sapiens
  chr7:825190-825260
  hypo
cctggtgagggagacggaggccgtcatccacaagcaccgctcggccacctactgcgagcagctcctgcag

SEQ ID NO: 155113 - DNA, 987 bp, Homo sapiens; identical to SEQ ID NO: 72694
  chr7:834224-835211
  hypo

SEQ ID NO: 155114 - DNA, 17 bp, Homo sapiens
  chr7:842218-842235
  hypo
ggacgaagtggctcacg

SEQ ID NO: 155115 - DNA, 16 bp, Homo sapiens
  chr7:842534-842550
  hypo
aaagaaagaaaaaaag

SEQ ID NO: 155116 - DNA, 30 bp, Homo sapiens
  chr7:851787-851817
  hypo
caccaaggccgctgtcgccgcgactcacta

SEQ ID NO: 155117 - DNA, 30 bp, Homo sapiens; identical to SEQ ID NO: 72696
  chr7:862503-862533
  hypo

SEQ ID NO: 155118 - DNA, 107 bp, Homo sapiens
  chr7:872192-872299
  hypo
ctccccagtgtgtgccggagaacacgggctacacgtatgcgctcaggtgagtgtgcacctgcacgtggggtcctggccttgcaatgcccactcgctgtcgcggtggc

SEQ ID NO: 155119 - DNA, 30 bp, Homo sapiens
  chr7:872781-872811
  hypo
ctgaaacgaagtttgcgtttgatgacatta

SEQ ID NO: 155120 - DNA, 21 bp, Homo sapiens
  chr7:873220-873241
  hypo
tccaggcgtgagccaccgtgc

SEQ ID NO: 155121 - DNA, 142 bp, Homo sapiens; identical to SEQ ID NO: 72697
  chr7:874774-874916
  hypo

SEQ ID NO: 155122 - DNA, 36 bp, Homo sapiens; identical to SEQ ID NO: 72698
  chr7:878052-878088
  hypo

SEQ ID NO: 155123 - DNA, 30 bp, Homo sapiens; identical to SEQ ID NO: 72699
  chr7:881995-882025
  hypo

SEQ ID NO: 155124 - DNA, 123 bp, Homo sapiens; identical to SEQ ID NO: 20864
  chr7:882989-883112
  hypo

SEQ ID NO: 155125 - DNA, 30 bp, Homo sapiens
  chr7:883501-883531
  hypo
gagtggctttgggacgctgctctggtctgt

SEQ ID NO: 155126 - DNA, 30 bp, Homo sapiens; identical to SEQ ID NO: 72701
  chr7:884810-884840
  hypo

SEQ ID NO: 155127 - DNA, 287 bp, Homo sapiens; identical to SEQ ID NO: 114435
  chr7:889349-889636
  hypo

SEQ ID NO: 155128 - DNA, 30 bp, Homo sapiens; identical to SEQ ID NO: 72703
  chr7:895442-895472
  hypo

SEQ ID NO: 155129 - DNA, 31 bp, Homo sapiens; identical to SEQ ID NO: 20865
  chr7:897565-897596
  hypo

SEQ ID NO: 155130 - DNA, 464 bp, Homo sapiens
  chr7:899730-900194
  hypo
ataggacatttgtgtccgtctgctgttttactaggtggacgtgcaagtcagagaaatggtgaaactcctgttttccgaagatcagcaaggcggttctctggaacagctgctgcagaggttctcatcacagtttgtgagcaaaggcgacttgcagacgatgctgcgagacctgcagctgcagatcctgcggaacgtcacccaccacgtttccgtgaccaagcagctcccaacctcagaagccgtggtgtctgctgtgagcgaggcgggggcgtctggaataacagaggcggtgagtcggcgagtcggcggcaagagatgcttacagtccattctgtgctgagactgaagacctagctgtgaggtgtggatgttgatgtcttgttttaagagtggtctggctggggtgtgcttagctgacgtaagtgagatgagacgtgcctgggcagtgccgtgtgtggaggggg

SEQ ID NO: 155131 - DNA, 383 bp, Homo sapiens
  chr7:902842-903225
  hypo
gggcccctggagtgccgccctcccgagctcgcccttgctgcccagcattcaccagcgccagggcccctggagtgccgccctcccgagctcgcccttgctgcccggcgttcaccagcgccagggcccctggagtgccgccctcccgagctcgcccttgctgcccggggttgtgtgctgccttcacggccaacttggtttttgtttcttgggggttttttgtcctgctttgacaacaacattctgcctgtcctgtatcctactaagggccaaactggacttgttttttatgcttcctcttattattgagatgtaattcacacaaaaattcagcgtttttaaatgtacagctccgtggctattaacatattcgcggtgcagccatc

SEQ ID NO: 155132 - DNA, 30 bp, Homo sapiens; identical to SEQ ID NO: 20869
  chr7:906025-906055
  hypo

SEQ ID NO: 155133 - DNA, 452 bp, Homo sapiens; identical to SEQ ID NO: 72709
  chr7:907650-908102
  hypo

SEQ ID NO: 155134 - DNA, 64 bp, Homo sapiens; identical to SEQ ID NO: 20871
  chr7:915323-915387
  hypo

SEQ ID NO: 155135 - DNA, 93 bp, Homo sapiens
  chr7:920452-920545
  hypo
cagagtattccatgggtgtatcgccgccagagaagtcacattccccaagttacgctttttgttttttgagacagagtcttgctctgtcgctca

SEQ ID NO: 155136 - DNA, 393 bp, Homo sapiens; identical to SEQ ID NO: 72712
  chr7:920784-921177
  hypo

SEQ ID NO: 155137 - DNA, 45 bp, Homo sapiens
  chr7:921708-921753
  hypo
ccgctgacaggccccagcttgattccatgtcggtgctgttgtgag

SEQ ID NO: 155138 - DNA, 222 bp, Homo sapiens
  chr7:923636-923858
  hypo
aaccaggccgggggccgtgaccatcggcagtgccccccagagcaggctcctcgtgcaggaatatgggtcactgccttccagggagtcctttttttcttctggtttctaagtcgccacctcttgctttacctcagatagaagcatccagaacgctgtagtatcggcaaagcagaagctggtgtggtgcttgctcagggtcggtgcatgcggttctgcccgtgg

SEQ ID NO: 155139 - DNA, 30 bp, Homo sapiens
  chr7:924077-924107
  hypo
ccggaggcctgccaacggcctgcaggctga

SEQ ID NO: 155140 - DNA, 30 bp, Homo sapiens; identical to SEQ ID NO: 20873
  chr7:924949-924979
  hypo

SEQ ID NO: 155141 - DNA, 778 bp, Homo sapiens
  chr7:925618-926396
  hypo
tgacctgaagatgagcgggggagcgcggtggcgagggcacgtgggcgtggctcacggtctcctctctgtggcaggtacatgtcccagagcaagcacacggaggcccgggagctcatgtactcgggagccctgctcttcttcagccatggccaggtaagccgtcttgcttcctcctgcatccctttctgctccgggcaggcaagtggaggtgggaatgacctcccacctccactgatgggcaaccttgcgctgccctgggcctcggccactggggctgtgggtggcagaggggcccagagtcccccctggcttggctgctccactctcaagactggggctctgcgctgcgtttgtgcacgatggggctgagagggcgttgtgttggtataaacgtccccgtccattttcatgtgattctcggccaggagctctctttttcggcggcattgccaagggacgtggtgctcagaagagactcctcagcaccggccgcactctggcttctgctggaaacccagccttgtctttgctgtcctgaacaggtcagggctttgttcttgattcttgtgtgttgctttctcttgtagcaaaacagtgcagcagacttgtccatgctggtcctggagtccctggagaaggcggaagtggaggtggctgacgagctgctgggtgagcatccggcccttcaccccgggaccctgtgacagcggccccagtacgcccctccccgggtctctgcgctgtgtttcgtgtctgcgtttgggggtcttgtgtgctg

SEQ ID NO: 155142 - DNA, 30 bp, Homo sapiens; identical to SEQ ID NO: 72715
  chr7:930778-930808
  hypo

SEQ ID NO: 155143 - DNA, 69 bp, Homo sapiens; identical to SEQ ID NO: 20875
  chr7:931094-931163
  hypo

SEQ ID NO: 155144 - DNA, 67 bp, Homo sapiens
  chr7:931797-931864
  hypo
tgggccgcaggaaccgtgggcgcacgagcttgggaaggacatgtcggaggccggcgcctgtgcgggc

SEQ ID NO: 155145 - DNA, 510 bp, Homo sapiens; identical to SEQ ID NO: 114439
  chr7:932818-933328
  hypo

SEQ ID NO: 155146 - DNA, 30 bp, Homo sapiens; identical to SEQ ID NO: 72719
  chr7:934206-934236
  hypo

SEQ ID NO: 155147 - DNA, 782 bp, Homo sapiens
  chr7:943347-944129
  hypo
cccagagccggctaccgtccacatctcctccccgtaggaccccagttccccccgaggtcccctctgggcattgtgggggcggtggatcctctagcccgagctggcagcccccactgacagggccaagctgggtggccccagagacagcgtggtgatccggctcctgggcagcccggccctgggaagctgccttcctgcacctgtcttcccatgctgcccggcgccagtgcccacactcccacacgtccaagcacccgccttcccacgctgcccagcccgacttcccgccttctcatgccgcctagctcaagtgcctaccctcccgtaccgtccaagcacccaccttcctgcgccacccgggcctgagggcccaccctcctgtgccacccgggcccgagtgctcgccagcacccaccttcccgtcctcatggtagatgaagatgttacgggtgctgttgtccttcaggtaggtgacctgcaggccgtgggggtggccgatcttggccggctggaaggtggcgttcaggtgctcgatcttcatcacggccttgggctccttggcctgagaaggggtggggtctaagcacctcacaggggccgtcgtccaagctcaagggagcaggaagggcagaccctgtgggtgctggcggcgcacctgctgtgctgtgtggctttgggcaagttacttaagcgctctgagccttggcctcccggtctgtaagcagaaggtaacagcacctccctcccaggagtgatggggacctcaacgacactgtgcaggt

SEQ ID NO: 155148 - DNA, 153 bp, Homo sapiens
  chr7:955104-955257
  hypo
tgggcttcagaggccggcaggcaaggccaaggccttgggctccgaccctgcgagcaagcgtgtgcctgaaaacctctgccccgactctaccctgctgggaggcctctccctccctccaacccctgcccgagggtcacacgggaggctttagct

SEQ ID NO: 155149 - DNA, 302 bp, Homo sapiens
  chr7:955483-955785
  hypo
agaacccagaacccgcgcccactttccacgagacgctgtctgccacccgcctgcagaacccagaacccgcgcccactttccacgagatgccgtctgccacctgcctgcagaacccacgcccactgcccacgagacactgtctgccacctgcacgcacccccacttctggagcccagacctgatcttccccagaagggccactccaggggccagaggcgggcacgccacctagggcgccacgtttcccaagtcacatcccggcccgaccagtcagaggtgacgagacagggactttttccagc

SEQ ID NO: 155150 - DNA, 763 bp, Homo sapiens
  chr7:959551-960314
  hypo
agagagccagggagaggtagccgggaggccccaccccacccgggtggcctcacctgccgagtagggctcctgcttctccgggtagatgaactcctgtcgctcgtacttggcccggatccactgctctcgaaggagcctgtggggagaggagagactgagccactgggccaaggcggcctccgacccagcacacgccgctctctggcccggaccctggacatctcaagaggctcatagggacccccggcagactcgagccgcccctctgggcacaagatcccggaagaaatgcagggtcagcctcctgcccgggacgcttctcactctgatattagtttattggtttcttgtgcgttcggcccccggagcatcaggcctcacgttctgcacaagcgttcccggtggacgggctggtgcctcccctctccttcccaccttggcctcagctgatgccccacagggctggggtacaggggttgagccaggcccccccaccccgagtcacacgcccctgggccctccccgaccctccccacctcgttggaccggatctgggaagtggccgcggcgccgccctccacccaccgtgctgccaccttgcaccccccgtgccgccctccacccgccgtgccgccctccacgtggttctgagacacaggacggagctatcagggcacccgtcgaggtcaggaggcgtccggggcatcaggagaaactaccggcaaatacccaagaatccaggaagacccgggatgaggagaag

SEQ ID NO: 155151 - DNA, 181 bp, Homo sapiens
  chr7:960589-960770
  hypo
ctgggcgggaatcctcgcccacaggatctgatgggtgatgggtcccagctgggtctctggcccctggccccaggtgtgtgtgtgtcccccacctgctacaacgatcaccccaaaattcggtccccgaaagcaacagaaatgtatcatctcggtcacggaggccaaacgtctgagatcaagg

SEQ ID NO: 155152 - DNA, 726 bp, Homo sapiens
  chr7:965797-966523
  hypo
acccacgtccgctcccgccctgaggagccagggcaggccccgaaacaacagccgcccctcccgttcccctcccagaccgccaggagcacctgggagggcccctcagatccacccgagacccccaaggcctcagcgaacctgggtgggctgtagctactgatgcacaatgaccttcccagccccaccccagcgccccccgccccagaaccaaagcccggtggtggccagcagacacaggcggcacctcggggtctgggggacgcagctgcggctggcttctccccgaccctgtgggcggcacccaactccccaccctgccgggtcctcccggggccatctcggagccacccagcacttgaccatggccctgacaaggcccctttgtactcactggcagtcggagggcgtgggccggtagtagaaggagggtactttggactcaaacctggctctcgcggcgtcgttcccgtgggaggccatgaactgcaagagaggaggggccgggtcagaggcctggggtcccaggggcagcctaggaggtgccagctgcccttggggccgtcaccacagtgacccgcagacccaaggctctgagggctccaccagcaccaggacgggaacgccacctcctcctgccccagggacaccatttctgagtgatcgaccctcccctgggacagggaaggagccagcgtccctaacgacggggtcccggcaaagggggcc

SEQ ID NO: 155153 - DNA, 143 bp, Homo sapiens; identical to SEQ ID NO: 72726
  chr7:966925-967068
  hypo

SEQ ID NO: 155154 - DNA, 121 bp, Homo sapiens
  chr7:984883-985004
  hypo
cgcagcccatcggagcgaaaaggggcggggcacgcactctcagagaccctccagggtggaaggggagctggtctgacgccccagcagcagggcccccacaggcccacgcaggagagcctct

SEQ ID NO: 155155 - DNA, 183 bp, Homo sapiens
  chr7:985369-985552
  hypo
ccctcctcccagccccgctctgccctacctgctcccaggacgcccgaggtgactcagccgctcaccatttccggagctggtctggggcacctgggcaggtgagccacattcttgggcggagccaggtggggcaggcgtgtcccccaagccaaggcccaggctggggcacgggcagggggaagg

SEQ ID NO: 155156 - DNA, 30 bp, Homo sapiens
  chr7:985768-985798
  hypo
cccccaggcacacagcgccccactccacgc

SEQ ID NO: 155157 - DNA, 399 bp, Homo sapiens
  chr7:986123-986522
  hypo
cctcccagcagcacccggacacagtccattttcagaatcccccaaggacccccccaggctctgccctgcccctgccctcccaccctctctccctcctggtgctccagccccatggcgggaaccccacggtgaaggccatccccagtcctccctggacccaccctgtcccggagcccactctctggggcccccaccccgcgcccctccaggctcttcagggccctcgcacagggccgactcctctgcggcccatctggtctctcggctgtcaaaccctatttttggaactcgatagaggtggtggttgaacagcatggagaacgttctaaatgccactgaattttcactttgaaatgattaacctgaggccgggcggggcggctcacgcctgcaatctca

SEQ ID NO: 155158 - DNA, 99 bp, Homo sapiens; identical to SEQ ID NO: 72728
  chr7:986581-986680
  hypo

SEQ ID NO: 155159 - DNA, 234 bp, Homo sapiens
  chr7:987220-987454
  hypo
tctactctgcccaccacaccccgacatcccgttgaccagcaaatatttcaagacgatccaggctttgaccctccccacactcacgccccgccctaggcctagccaccgccacccggcctcggtcactgcagcagcgtcccacccacctcccgctcccgcgctggccctacctgccctggaccctgtgacgcgtcgtgggctgggacactcctcggctcacagaattcccatggt

SEQ ID NO: 155160 - DNA, 43 bp, Homo sapiens
  chr7:988730-988773
  hypo
gagtgaagggctggtctggtccggtctccctgagccccagtga

SEQ ID NO: 155161 - DNA, 318 bp, Homo sapiens
  chr7:996950-997268
  hypo
gccatctactgcctgctgttccggggcctcctccgtggggcagctccagcaggcgagtgtcttgccttctctgtccttccatcccgctaagggaactgtggcattgctcggggggcaggagggcgtgaggatgagacagaggtgggtgaacccctcagatctaagagatgtcggggctgagggggattcttccaaagaggaggctgctcggccgagatccgcaagtacctgcctggacccgagagcacagccgtcctgaaatcctgctgccctgactggctgtggtcagggctgggcggggcagtaggggagcccagg

SEQ ID NO: 155162 - DNA, 352 bp, Homo sapiens; identical to SEQ ID NO: 43758
  chr7:1001817-1002169
  hypo

SEQ ID NO: 155163 - DNA, 30 bp, Homo sapiens; identical to SEQ ID NO: 72731
  chr7:1006928-1006958
  hypo

SEQ ID NO: 155164 - DNA, 835 bp, Homo sapiens; identical to SEQ ID NO: 114441
  chr7:1007357-1008192
  hypo

SEQ ID NO: 155165 - DNA, 30 bp, Homo sapiens
  chr7:1008296-1008326
  hypo
gccggggtctcgggcggagctggctggcac

SEQ ID NO: 155166 - DNA, 58 bp, Homo sapiens; identical to SEQ ID NO: 72733
  chr7:1011970-1012028
  hypo

SEQ ID NO: 155167 - DNA, 46 bp, Homo sapiens; identical to SEQ ID NO: 72734
  chr7:1024994-1025040
  hypo

SEQ ID NO: 155168 - DNA, 114 bp, Homo sapiens; identical to SEQ ID NO: 20884
  chr7:1026934-1027048
  hypo

SEQ ID NO: 155169 - DNA, 159 bp, Homo sapiens
  chr7:1029386-1029545
  hypo
gcctgggtgacagagcgagattccatctcaaacaaacagaaggaaatgtcgagccacacagtggcacatgtgctgggggcggtgtggtcggcagtgtgacagtggcacgtgtgctgggggcggtgtggtcggcagtgtgagtggcgcgtgtgctggtgg

SEQ ID NO: 155170 - DNA, 427 bp, Homo sapiens
  chr7:1029911-1030338
  hypo
gcagtgtgacagtggcgcgtgtgctgggggtggtgtggtcggcagtgtgacagtggcgcgtgtgctgggggcggtgtggtcggcagtgtgacagtggcgcgtgtgctgggggcggtgtgatgggacacctgctgtctgagacggccctggcccccgtcccagcgctgaccatgcacgtgagcggcaggcggcccctcaccgagaagagaggataagccgtggcacattcccacctgcgccacgtgaagcggcgccccaaggccaggacgtggtggccgggacacacgggtgcacggcaggcctcacactcccaggtggggccgcagggtccctaagtcatgggtggggctgctgctacggaggctgctgcaaggacgagaaggggacggagggatggaggctcggctgcgtccgctcacctatttct

SEQ ID NO: 155171 - DNA, 30 bp, Homo sapiens; identical to SEQ ID NO: 72738
  chr7:1036971-1037001
  hypo

SEQ ID NO: 155172 - DNA, 30 bp, Homo sapiens; identical to SEQ ID NO: 20886
  chr7:1037328-1037358
  hypo

SEQ ID NO: 155173 - DNA, 207 bp, Homo sapiens
  chr7:1045396-1045603
  hypo
gagtgacttgctctcgtcctcccgcaggtgagtgggggaccccgtcccggctggatccgtgtggcccgggtcccagttcctctctctcctgtgggggcaccacctcccgcctcgagcagacccaggcagggggccggcccccgaaaatggtgagctaaagcctgcagggaccagggaggcagcggtcacctcgccacctgcccccaa

SEQ ID NO: 155174 - DNA, 30 bp, Homo sapiens; identical to SEQ ID NO: 72741
  chr7:1046331-1046361
  hypo

SEQ ID NO: 155175 - DNA, 30 bp, Homo sapiens; identical to SEQ ID NO: 72742
  chr7:1050056-1050086
  hypo

SEQ ID NO: 155176 - DNA, 213 bp, Homo sapiens
  chr7:1052678-1052891
  hypo
ggaatgggagcagcgcgggagggtggtggggccgccaggatcgggcgtggtaatgccgggacctgctgcttgctctgcttggcctgcacagtgtctggcccggagagcacaggtgagcaaggtaggacggctgtcacccacagacgagcagcggagaactttctctaactgccacccacgtgccgaccctccaaagaacgcgggtttcactag

SEQ ID NO: 155177 - DNA, 30 bp, Homo sapiens; identical to SEQ ID NO: 72744
  chr7:1057654-1057684
  hypo

SEQ ID NO: 155178 - DNA, 441 bp, Homo sapiens; identical to SEQ ID NO: 72745
  chr7:1059663-1060104
  hypo

SEQ ID NO: 155179 - DNA, 403 bp, Homo sapiens; identical to SEQ ID NO: 72746
  chr7:1061546-1061949
  hypo

SEQ ID NO: 155180 - DNA, 427 bp, Homo sapiens
  chr7:1066100-1066527
  hypo
acctgtggaagccaccgctaactagcagtcggaggcggcgttgtttctaagacaggcaggcagctccggcaggagcagccgctaagcacaaggacggccaaccacacaaagcctgcttctcaaccactcgcaggaaatcggctcacagttgctccccattcttcaatgctgatcctgccactttactgaaaatcacattattaacgtttaaaaaacgtatgggaaccatgcaaagacatccacgcccctcagttgctgccgctccagcacctggctccgaagtctgtgcagaaggcgaggctcccgtagtgctcgagagggccttgcacgctccccgtggagggaacaaagctacgtggattttccagcgcgccgcccacttcaccaggcagcctctgggcttcatcctgctcgcgtgacaggtgtg

SEQ ID NO: 155181 - DNA, 333 bp, Homo sapiens; identical to SEQ ID NO: 114442
  chr7:1069636-1069969
  hypo

SEQ ID NO: 155182 - DNA, 121 bp, Homo sapiens; identical to SEQ ID NO: 20889
  chr7:1071762-1071883
  hypo

SEQ ID NO: 155183 - DNA, 190 bp, Homo sapiens
  chr7:1075881-1076071
  hypo
cataagctgcggacttcgggcggttgtgctgtggccatgtagggttcgggtgctcgtgctgtggccgtgcagggttcgggtgctcgtgctgtggccgtgcagggctcgggtgctcgtggtgtggccgtgcagggctcgggtgctcgtgctgtggccgtgcagggctcgggtgctcgtggtgtggccgtgt

SEQ ID NO: 155184 - DNA, 339 bp, Homo sapiens; identical to SEQ ID NO: 43761
  chr7:1083895-1084234
  hypo

SEQ ID NO: 155185 - DNA, 133 bp, Homo sapiens; identical to SEQ ID NO: 20890
  chr7:1086193-1086326
  hypo

SEQ ID NO: 155186 - DNA, 39 bp, Homo sapiens; identical to SEQ ID NO: 20891
  chr7:1097389-1097428
  hypo

SEQ ID NO: 155187 - DNA, 243 bp, Homo sapiens
  chr7:1097705-1097948
  hypo
agctgccgacgccacgctggtgttcatcggctacgtggtgccagcactggccaccctctacgcgctggtgctactctcccgcgtccgcagggaggacacgcccctggaccgggacacgggccggctggagccctcggcacacaggctgctggtggccaccgtgtgcacgcagtttgggctctggacgccacactatctgatcctgctggggcacacggtcatcatctcgcgagggaagcccgt

SEQ ID NO: 155188 - DNA, 189 bp, Homo sapiens
  chr7:1103861-1104050
  hypo
gagacccgacacagcgccgggtcctgatgggctgtgacgtgaagatggggagaccaggcccttagcagccacagaacaggccccggaaagacgcacgatggctccactcttggaagcagatggtggctctgtagggagacaaggcttaccttgctccagggactctgaggagacgctgtgcagggaggc

SEQ ID NO: 155189 - DNA, 30 bp, Homo sapiens; identical to SEQ ID NO: 72755
  chr7:1108068-1108098
  hypo

SEQ ID NO: 155190 - DNA, 45 bp, Homo sapiens; identical to SEQ ID NO: 20892
  chr7:1113682-1113727
  hypo

SEQ ID NO: 155191 - DNA, 215 bp, Homo sapiens; identical to SEQ ID NO: 72757
  chr7:1115544-1115759
  hypo

SEQ ID NO: 155192 - DNA, 179 bp, Homo sapiens; identical to SEQ ID NO: 20894
  chr7:1124307-1124486
  hypo

SEQ ID NO: 155193 - DNA, 30 bp, Homo sapiens
  chr7:1131052-1131082
  hypo
agtgagcagctccacgcgggactgtgcacg

SEQ ID NO: 155194 - DNA, 128 bp, Homo sapiens
  chr7:1132021-1132149
  hypo
acgctgggcttcatcgtgcccttcgccatcatcggcctgtgctactccctcattgtccgggtgctggtcagggcgcaccggcaccgtgggctgcggccccggcggcagaaggcgctccgcatgatcct

SEQ ID NO: 155195 - DNA, 150 bp, Homo sapiens
  chr7:1133747-1133897
  hypo
tagaaggctctcggccgcgtgcgaggcccaagagctctgcggcacccaagcgctcctggagcagccggccgggaaggttcctgctccttctcccatcaccggggctggatcctggcgctgctcccctcctttcccgcctcacccacctgg

SEQ ID NO: 155196 - DNA, 149 bp, Homo sapiens
  chr7:1141331-1141480
  hypo
cactcagcacggccacggcagcctgaactcccagccttggtatccacgcagcccgcagctctctgcaatgaggggccggccgcaggcccagggagatgtcagctgccccaggcaatcacaagcaaggaggtgcgcgtcgcggacacagc

SEQ ID NO: 155197 - DNA, 445 bp, Homo sapiens; identical to SEQ ID NO: 72761
  chr7:1141909-1142354
  hypo

SEQ ID NO: 155198 - DNA, 31 bp, Homo sapiens; identical to SEQ ID NO: 72762
  chr7:1142682-1142713
  hypo

SEQ ID NO: 155199 - DNA, 31 bp, Homo sapiens; identical to SEQ ID NO: 5287
  chr7:1147466-1147497
  hypo

SEQ ID NO: 155200 - DNA, 321 bp, Homo sapiens
  chr7:1148236-1148557
  hypo
cctgccatgtgtctccgccagctaaaaggattttgtacctcccattttaaggacaagtggctctcggctaggagggcagttgagttccactctctgccgcctgagtgtctgagatcacccgggttgccgtgtcactgctgacacacacgcccctaccgtgtgcacccgctttgatgccgatgggggccatccagtgtgcacccccctcactggagcggctgctgggtctcttctttaccacctgcttttgaattaactatgctagaaaattcggctgtgatatttctcccaggcatttttttttttttttttttgagacgg

SEQ ID NO: 155201 - DNA, 30 bp, Homo sapiens; identical to SEQ ID NO: 72764
  chr7:1149690-1149720
  hypo

SEQ ID NO: 155202 - DNA, 151 bp, Homo sapiens
  chr7:1164415-1164566
  hypo
acacaggaattcaacagcctgcggaggaggagccgaaattcaaggtgaggctcaggtggaacgcggggctgcctgctgacccgctgcgcgggagccgcaggacctctgcacctgccaggcctcagcctccgggtgaccttggggtgttctg

SEQ ID NO: 155203 - DNA, 94 bp, Homo sapiens
  chr7:1184624-1184718
  hypo
atctcagaaaaaaaaaaggcagggccagtgacctccacggttgactctgacactccagccggcagggccacggccgactcgcccgctctcagtg

SEQ ID NO: 155204 - DNA, 30 bp, Homo sapiens; identical to SEQ ID NO: 72765
  chr7:1191756-1191786
  hypo

SEQ ID NO: 155205 - DNA, 30 bp, Homo sapiens; identical to SEQ ID NO: 72766
  chr7:1192673-1192703
  hypo

SEQ ID NO: 155206 - DNA, 464 bp, Homo sapiens
  chr7:1202643-1203107
  hypo
tggccaccgagtgaacgggctgtgctaaggggaattgccaccttgggaaacctgtgtagttgcggcttttctgattaagtatcaataaaagtctgaccttgtgaaaaaagcaaacgtgagtggccctgcttatgtttcaccttgcgttgctcagtgatagttctgcaaagtcgcaggaaacctggaatcatctaattatcgtgagtgttggtgagtaacacccataggcactggctcccggggaaatacagagtcaggttcctccgagccgctggccacagcatttttgttaagcagttcatcgttaaccttgttgtacatgtctctctctcaaggttccttatttaataatgtctagttgattcattaacatggaattcatggccagtacctctgtcactcatgcctgactgaagttgatcagcacgtctttttctcccttaggcacatgacagccttcttgc

SEQ ID NO: 155207 - DNA, 47 bp, Homo sapiens
  chr7:1215556-1215603
  hypo
cagctcagcggccaacgtcgcatccctgaggccgtgtgcctgctccg

SEQ ID NO: 155208 - DNA, 49 bp, Homo sapiens
  chr7:1220821-1220870
  hypo
gaggcaaagcgagaacggtccgtgggtcgtctcccgtgccgtccactca

SEQ ID NO: 155209 - DNA, 239 bp, Homo sapiens; identical to SEQ ID NO: 72767
  chr7:1225055-1225294
  hypo

SEQ ID NO: 155210 - DNA, 30 bp, Homo sapiens
  chr7:1234056-1234086
  hypo
aggacagcgatgccccggacagcctgggct

SEQ ID NO: 155211 - DNA, 87 bp, Homo sapiens
  chr7:1234855-1234942
  hypo
tgacagactaagactcggtctcaaaacaaaaacaaacaaacaaaaaaccagttcctaccgtttatgaaacgccgctcgcagcctgcc

SEQ ID NO: 155212 - DNA, 297 bp, Homo sapiens; identical to SEQ ID NO: 114456
  chr7:1269166-1269463
  hypo

SEQ ID NO: 155213 - DNA, 640 bp, Homo sapiens; identical to SEQ ID NO: 114457
  chr7:1269552-1270192
  hypo

SEQ ID NO: 155214 - DNA, 217 bp, Homo sapiens
  chr7:1303351-1303568
  hypo
gattaccccgctccccgcctgggaacatgtggcctggcatatgtggggccaacctcagcagaaatccacgtgcacctccgcaggcagcgcgtcccccgcacacccgctgcccgcccggctttcactccagaatggcgctgcccgtgcctgtacagacagctggcaaagcgtcagatggcattacaatatttttacttataatcgagaaagcaataaa

SEQ ID NO: 155215 - DNA, 30 bp, Homo sapiens
  chr7:1304039-1304069
  hypo
cgttctgtggatgaacggatggagcttcct

SEQ ID NO: 155216 - DNA, 372 bp, Homo sapiens
  chr7:1308149-1308521
  hypo
gcctgggtgaaggcccgcgaccctggcaggaggtctcagagaagacggctcgccacaggccctcagaacaccctcctggtctacagaggggacgctgaggctgggagcgggaatgtggctggtccctgctgctccctcgctcgcccctgtccccgaagccccaggacacccagtggccctctttgggctggacccaccctggccaccctggcccttccggctgccggctggggacgcgggcgtggtgcggcaggcctgccttgattgtgtcgatgggagatgattttcaaggtgaaatttctagttcactagagtcactttcgttcaaggcgacgcacaaaatgtcatcccggcctgttccgcgtgcaacgc

SEQ ID NO: 155217 - DNA, 230 bp, Homo sapiens; identical to SEQ ID NO: 72771
  chr7:1315704-1315934
  hypo

SEQ ID NO: 155218 - DNA, 90 bp, Homo sapiens; identical to SEQ ID NO: 72772
  chr7:1318803-1318893
  hypo

SEQ ID NO: 155219 - DNA, 92 bp, Homo sapiens
  chr7:1324737-1324829
  hypo
cctggctgcagctgtggggtccggggtggcctggtctgctctgctgtgtgtggactgtgcgggaaggtcccgctggggtctttggagccttg

SEQ ID NO: 155220 - DNA, 395 bp, Homo sapiens
  chr7:1328510-1328905
  hypo
agaaagcagacaactcgtccgcgttgtcctggagatgcagccgacatcggcctgcttgtcctgctgccagggccgctgggggccccatcgatgtccacccggccagacacagctcccgtcattcaatatggcaaagtgtggtggtgctggctccgcagaccccactgtggaggcgaaaggtaagaagtcagggttcgaggttggggttccgtgaacacagccccgagaccgggtgtctaccccaccgagaggaggggtctcgtcggggggcctcgctgagcctccgtgtcccacccggagccagggtgggcaccctcccgtccccgcagccccggaagatctggcaggtggcatgacacccacccgggggccctggtcaccggcgcatgggcagc

SEQ ID NO: 155221 - DNA, 305 bp, Homo sapiens; identical to SEQ ID NO: 20902
  chr7:1333574-1333879
  hypo

SEQ ID NO: 155222 - DNA, 688 bp, Homo sapiens
  chr7:1347153-1347841
  hypo
tcaccccccaggagccatgaacgtctcctgcccccgccctggctccaccatgaactccgagcctgcaacagtgtgtccaccatcttatccagggacgtggcaagggtcaaaaccagtcgatggtgttcgatgggggcccgatgtgtgggttggaccctgatatcggaggcgccatgcctactgcttagcgaaccagcccttaaaaccaggactctcccatgtggggcgatgcagtgagacaagaggcaaccacgttgctgggggtgccgaagccaggccagcccttatggagagtgactcggcaacatgcactctgcgccatggaaatgctcagcacctctgacccagtgacgccgcctctgggatgctcttccgggggaaattatccacaatatggggagagatttaagccaaagatattcatggcaacattatctttgatgaccaaaaaaaaattggaagcagctgaaatgtccaacaatcggggagttgtttagtagattacgacatacacactcggtggaatactaggcagtcattaaaagtgctaattgcgaagactgggtggttatgtacaaacacgcctacagcatgatgccgagggaagccgtgtatggaattaggggcacattaagggtgtaatgatgtaaaaaacatatgcagcccgagaacgcgtggatgaagagga

SEQ ID NO: 155223 - DNA, 574 bp, Homo sapiens
  chr7:1351443-1352017
  hypo
gccatgggctggggcagcagccgtagctgggcggtgtgggcagggggctggcaggcgccggccgcggctgtctcctccagggcctgctgttgtggcgtctggccgcggcccagcaccgccgtcatctgggctcagctctctctgtccgcggggctgtctccctggtggtgccggccccagagcgcatggccacagccagcctggtccacccgacattgaagcctccctgtcataattggcaattttgtcatatttattcacaacagatcgggctgtcaggagcttgtgggggctctccggaggcccgccgtgaaatcggtttgaaatggcgtgtcaggtttttctctccctgctgaagcgaccatctggctgatagactcggcgctgggatgatacgctgacccgcggaatcacggctaagccgctcccggggggccacatgccggctgggcagcccctcgtgccacacctgacctccctgtgggttctgggagccaggccacagggcaaggcctgggctgggcagggacaggggtgggcaccaggctgggagctccccgggtaccccactggc

SEQ ID NO: 155224 - DNA, 55 bp, Homo sapiens; identical to SEQ ID NO: 72778
  chr7:1354097-1354152
  hypo

SEQ ID NO: 155225 - DNA, 30 bp, Homo sapiens; identical to SEQ ID NO: 72779
  chr7:1354936-1354966
  hypo

SEQ ID NO: 155226 - DNA, 155 bp, Homo sapiens; identical to SEQ ID NO: 72780
  chr7:1357985-1358140
  hypo

SEQ ID NO: 155227 - DNA, 266 bp, Homo sapiens
  chr7:1358497-1358763
  hypo
ctgggccacgcccaccgtcccagaatgtgacctgtgggactcagaaggcagcccccagacaggccatggtgctgcccactcggtcccaggaggcctacctggcacctgtcccagacacgcaggtccagggactgggagcaaggatgtgtgtgcaaatgggtgtgtgtgcttagcatgtgaaaatgggcgtgtgtgttaacatgtgcacccgggcgagggagcaagtgaacttgcagagggatccatgtgcgtgtctgtgtgggtgc

SEQ ID NO: 155228 - DNA, 150 bp, Homo sapiens
  chr7:1360166-1360316
  hypo
tgaccacgttcatgtcgtggtgggagcctgaggctctgggggggtgggggaggtgcctgagagggtgaacgtccttgcacacgtgcttgggtgtgctcacgcctgagcgtgtgttcactgaagtcctgggtgtggcgtgcccgcctgcgt

SEQ ID NO: 155229 - DNA, 127 bp, Homo sapiens
  chr7:1365419-1365546
  hypo
gccagctgcgatgcgcgatgcactgccctccgccccatccaggtgccccaagggtacggccggcatttaagggccctcgcttcctgggggtgtgtacgtggctgctgctctccgctcccctgggctg

SEQ ID NO: 155230 - DNA, 30 bp, Homo sapiens
  chr7:1365862-1365892
  hypo
ttccacgtcgggtcacgaggtccagggctg

SEQ ID NO: 155231 - DNA, 30 bp, Homo sapiens
  chr7:1366108-1366138
  hypo
agatgcagccatggccgactttggagaata

SEQ ID NO: 155232 - DNA, 442 bp, Homo sapiens; identical to SEQ ID NO: 72781
  chr7:1370034-1370476
  hypo

SEQ ID NO: 155233 - DNA, 12 bp, Homo sapiens
  chr7:1370977-1370989
  hypo
gattctgggagc

SEQ ID NO: 155234 - DNA, 30 bp, Homo sapiens
  chr7:1384858-1384888
  hypo
atccgctgtgaacagcggttttggagatgg

SEQ ID NO: 155235 - DNA, 30 bp, Homo sapiens; identical to SEQ ID NO: 72783
  chr7:1391751-1391781
  hypo

SEQ ID NO: 155236 - DNA, 331 bp, Homo sapiens; identical to SEQ ID NO: 43790
  chr7:1408439-1408770
  hypo

SEQ ID NO: 155237 - DNA, 17 bp, Homo sapiens
  chr7:1408874-1408891
  hypo
cgcggaccccggcccat

SEQ ID NO: 155238 - DNA, 233 bp, Homo sapiens
  chr7:1451099-1451332
  hypo
ctaattaagaagtgttctctgcgtatccggggtgttcgaacaattgtgcggcgccgacgatgcaagctgttgacctgcacagataaaccgtgcgtgcggaggaatcgggggcggcggacggggtggggggagtgtacatggctgttcttttctgctggggcgcccggcgggccctgcctgtggttcgccctgtgtgcgggcggtgtgggcgtctttgccgcagggtgcttgtc

SEQ ID NO: 155239 - DNA, 30 bp, Homo sapiens
  chr7:1459041-1459071
  hypo
ttgcacctgcaggttcgtaccctacggggt

SEQ ID NO: 155240 - DNA, 358 bp, Homo sapiens; identical to SEQ ID NO: 20910
  chr7:1460651-1461009
  hypo

SEQ ID NO: 155241 - DNA, 30 bp, Homo sapiens; identical to SEQ ID NO: 72788
  chr7:1468355-1468385
  hypo

SEQ ID NO: 155242 - DNA, 30 bp, Homo sapiens; identical to SEQ ID NO: 72789
  chr7:1473454-1473484
  hypo

SEQ ID NO: 155243 - DNA, 588 bp, Homo sapiens; identical to SEQ ID NO: 20911
  chr7:1473772-1474360
  hypo

SEQ ID NO: 155244 - DNA, 30 bp, Homo sapiens; identical to SEQ ID NO: 72791
  chr7:1474672-1474702
  hypo

SEQ ID NO: 155245 - DNA, 320 bp, Homo sapiens; identical to SEQ ID NO: 20912
  chr7:1475084-1475404
  hypo

SEQ ID NO: 155246 - DNA, 1801 bp, Homo sapiens; identical to SEQ ID NO: 72793
  chr7:1476252-1478053
  hypo

SEQ ID NO: 155247 - DNA, 930 bp, Homo sapiens
  chr7:1478540-1479470
  hypo
ccagggggctccggccgaagccagttgtcacaaacgtcgaggctggcagggacggccagtctcctgcggcggggtggggagggggacctggctgcccccaggtggggagacagagccacgcttcagagcagggccactgggagcctggggtctgtcccagcacagccaacagctcgctgggtagcccggccatccccatgccctgggcctcccgactggcacagggttggcatcacaagccctacacccacgtcctgcccaacctggccatgtctccccagggggctaacccacggggctgctggctgctcaaggtcacacaggaagtggcacgagagctggatatggatccagggcagctatgagtgctaggaatacacacagagatgtgtgtgcacacacacgcatcacacacgaacacgggtgcacacgtggacacacatgcatcacattcatgaaacagatccacacatgggtacatgcaccacatacatgaacacggttgcacacacatgcatcacacagatgtacacatggacacacatgcatcgcacatgaacacagatgtacacatggacacatgcatcacgtgtgggcacacatgcatcacatacacgaacacagacacatggacacgcatcacacatgtacacatgcatcacacgcatgaacactgatgtacacatgaatacacatgcatcacacatcacatacatgaacagacacatggacatgcatcacgtgcacatgcatcacacacatgaacacagatgtacacatgcgcacacatgcatcacgcatggatacaggcatcacatacatgaacacatgcacacatgcatcacacacatgcacacatgtacacacaagcctgcccaggactaccagcttctctggctgaccggagcgcctctccgcacaccccaggag

SEQ ID NO: 155248 - DNA, 533 bp, Homo sapiens
  chr7:1479733-1480266
  hypo
catgaggtcggaacccgaaccaccagccccagggcctggcccacctggaggggctcccaggccatatgcagaccagccggagggagcaggtggccttctgagcaaatgccacctcccagcccactgactacacctgctgggaccctcctgcaaacacacgtgtccatcgctacctgccgtggtgcgaagcagattccaggcgtgagctccgggccccacgggacccacacatggggagactccaccccagctgcaggcatggtgcgtgaacccacacgggtgctgccatgcccaggtgagacacgcaacgctgcccccaaaccagggacagcggcccccatgtccctcaggcaggggtgacctggcctctgctactcacagggaggtgcgtctatccctggataggcgtgtcaatcggtcgattacatactcactgcatttattaagcacctatggtgtaccaggccctgggccagccccacccatccctaacctctcagctgggcttctcctgtccacgggcttcagattcg

SEQ ID NO: 155249 - DNA, 302 bp, Homo sapiens
  chr7:1480644-1480946
  hypo
tgagccacggctgcccgtctgcaggctttcttggctcctgggtcctgcaggatccagcgcgtggctttaacaatgagaactcagccaaagagaaggatctggaaaaaccctttgcagcccagcttgttccctgagcccagctcgataaagccatgggaacctctagcttttttctacacacacccaggtggcagggacagccagtttcctgcagtggggcgaggcggggggactcggctgcccccaggttgggagacagagccgtgcatcaaagcagggccgccaggagcctggggtctgtc

SEQ ID NO: 155250 - DNA, 31 bp, Homo sapiens; identical to SEQ ID NO: 20917
  chr7:1483466-1483497
  hypo

SEQ ID NO: 155251 - DNA, 31 bp, Homo sapiens; identical to SEQ ID NO: 20918
  chr7:1484816-1484847
  hypo

SEQ ID NO: 155252 - DNA, 516 bp, Homo sapiens; identical to SEQ ID NO: 72799
  chr7:1488211-1488727
  hypo

SEQ ID NO: 155253 - DNA, 30 bp, Homo sapiens; identical to SEQ ID NO: 20919
  chr7:1490616-1490646
  hypo

SEQ ID NO: 155254 - DNA, 822 bp, Homo sapiens
  chr7:1491120-1491942
  hypo
actgagaccccgtctcagaaaaacaaaaatatagtgatcgtgacccgtctgtccacgttgctgcctgtggggtcccggacagcagctgctgccatgtcagcgtgaactggactgttctagaagcttcctggccccacagagggagctggggctgcaagccgtgtcctgcctcaccccggcctgcatgtctgaccccggccagcctcggtctcagggcctcagtctccctgtctgggaggacaaccgcagctcctggtggcgaatctgacggccgtagctgcagcaaacaggaaggctgggcaggtctcaaacggagaagtgggggccgagacccctgtggccacgcagcctgggcggcctagttctgagcccagcctgcacagcccttgccaggccctgacccccataagaatgctccgaggcccggacagtgagcccatttcacctgtttcacagatggggaaactgaggccaggcagcagccacacggtggggtgggggcagtgggatgggggctgcaggctgcccacctctctccttaggaagcccccgccccgtccgcctgcagccctgccgtccatcaatctgctgggatccttgggaaccctccaccgtttccagcttggaccccctcccaggtaacaggtttcagacggcaggaccacccgtctgcacaggcggagcttctgcacgccggacaagatggggcgcggactcctctccgtgtggacagatgacgaggagccccctccctgggctcagtggcagcgaaagcggtttccgtctgctcgggcctgggccgatgcctctgtctgcctgggc

SEQ ID NO: 155255 - DNA, 30 bp, Homo sapiens; identical to SEQ ID NO: 72802
  chr7:1492142-1492172
  hypo

SEQ ID NO: 155256 - DNA, 348 bp, Homo sapiens; identical to SEQ ID NO: 72803
  chr7:1492392-1492740
  hypo

SEQ ID NO: 155257 - DNA, 30 bp, Homo sapiens; identical to SEQ ID NO: 72804
  chr7:1493092-1493122
  hypo

SEQ ID NO: 155258 - DNA, 96 bp, Homo sapiens; identical to SEQ ID NO: 72805
  chr7:1493402-1493498
  hypo

SEQ ID NO: 155259 - DNA, 96 bp, Homo sapiens
  chr7:1496413-1496509
  hypo
aaagcaaagggcccaggcacccatacaagcgcatgtccccacaccctggtgcacacccgacccccatgacactccgggttttccatcagccagggt

SEQ ID NO: 155260 - DNA, 1009 bp, Homo sapiens; identical to SEQ ID NO: 114485
  chr7:1498584-1499593
  hypo

SEQ ID NO: 155261 - DNA, 31 bp, Homo sapiens; identical to SEQ ID NO: 72808
  chr7:1503565-1503596
  hypo

SEQ ID NO: 155262 - DNA, 319 bp, Homo sapiens
  chr7:1505247-1505566
  hypo
tcacaggtgaggaatcaagctcagaaaagggcagcgatttgtccaaggccagtggggagcaggcgttagaaccctggggtcggtcctgcctcgtgtcacccacctgcccaggcctgcagccacaggctatggcccccgctgacaggactctggatggggcccccggggtcctggctggaatgctgactagggatgaaggaggcctaaagggtgtttgggatccagcagcccctccaccgtatcccagctctggaggcccctgggccctgtgtccccaaggactctatgttccccggagctggggcgccagcagtagcct

SEQ ID NO: 155263 - DNA, 30 bp, Homo sapiens; identical to SEQ ID NO: 72810
  chr7:1512325-1512355
  hypo

SEQ ID NO: 155264 - DNA, 221 bp, Homo sapiens
  chr7:1514361-1514582
  hypo
gccaccgccagcttccggcaggccatgctggcatccgcccctcggttctccaacgcccgggagtcgctggtgtccgcaaggagcgtgatgaagcggtggatgagtccgtccagctgcagggaggggcgctctgaggccggggccgctggctcccctcacttgcccacccacactcagcctggccgccagctgtggccgtgatccaccgcgtggcacgccat

SEQ ID NO: 155265 - DNA, 30 bp, Homo sapiens; identical to SEQ ID NO: 72811
  chr7:1515968-1515998
  hypo

SEQ ID NO: 155266 - DNA, 281 bp, Homo sapiens; identical to SEQ ID NO: 72812
  chr7:1519128-1519409
  hypo

SEQ ID NO: 155267 - DNA, 237 bp, Homo sapiens
  chr7:1520864-1521101
  hypo
cacccacccgacctcggatcacccacccgctcgcacccaggccccaaaagcctggccgggctggggctcggtcagcgtgtgtgaacccactccgcaggtccctggcatcttactcttgtccatgatgttctgctccagagtctgggggtcgtgggccactgcctggtccaggaactggaggagtttgctcatgctggacacggggatgccaaacgactgcacgaacagcagcagctg

SEQ ID NO: 155268 - DNA, 30 bp, Homo sapiens
  chr7:1521358-1521388
  hypo
tcggcagccccacccgagacctggggcagt

SEQ ID NO: 155269 - DNA, 30 bp, Homo sapiens
  chr7:1522934-1522964
  hypo
ggttccagacactgcgctggccagagcgtc

SEQ ID NO: 155270 - DNA, 30 bp, Homo sapiens; identical to SEQ ID NO: 72814
  chr7:1523812-1523842
  hypo

SEQ ID NO: 155271 - DNA, 245 bp, Homo sapiens; identical to SEQ ID NO: 72815
  chr7:1524902-1525147
  hypo

SEQ ID NO: 155272 - DNA, 30 bp, Homo sapiens; identical to SEQ ID NO: 20924
  chr7:1526364-1526394
  hypo

SEQ ID NO: 155273 - DNA, 30 bp, Homo sapiens
  chr7:1529873-1529903
  hypo
gcagtgcgggattccgaagtgcgtccgacc

SEQ ID NO: 155274 - DNA, 87 bp, Homo sapiens; identical to SEQ ID NO: 72817
  chr7:1532978-1533065
  hypo

SEQ ID NO: 155275 - DNA, 551 bp, Homo sapiens; identical to SEQ ID NO: 72818
  chr7:1533907-1534458
  hypo

SEQ ID NO: 155276 - DNA, 145 bp, Homo sapiens; identical to SEQ ID NO: 72819
  chr7:1534751-1534896
  hypo

SEQ ID NO: 155277 - DNA, 214 bp, Homo sapiens
  chr7:1535456-1535670
  hypo
cataatcaaacacccggactgccccaaacaccacctcccctccccactcccgcccgtggctggggccaccacgcctgcaatgcccccatgctgggccagaactggagcacacaaaggacgctcatgggaacagggtctgagcctgcagctggggtgaggcccggatggacaggaacggggacggcagcttccaggctccgtgtccccgagtagc

SEQ ID NO: 155278 - DNA, 30 bp, Homo sapiens
  chr7:1535926-1535956
  hypo
ccagaagggacacccgggagccccactcca

SEQ ID NO: 155279 - DNA, 30 bp, Homo sapiens
  chr7:1537233-1537263
  hypo
aagccatagaagcgcgtgtgccatctcagc

SEQ ID NO: 155280 - DNA, 30 bp, Homo sapiens; identical to SEQ ID NO: 72821
  chr7:1537473-1537503
  hypo

SEQ ID NO: 155281 - DNA, 69 bp, Homo sapiens; identical to SEQ ID NO: 20929
  chr7:1537960-1538029
  hypo

SEQ ID NO: 155282 - DNA, 31 bp, Homo sapiens; identical to SEQ ID NO: 20930
  chr7:1538765-1538796
  hypo

SEQ ID NO: 155283 - DNA, 30 bp, Homo sapiens; identical to SEQ ID NO: 72824
  chr7:1542754-1542784
  hypo

SEQ ID NO: 155284 - DNA, 36 bp, Homo sapiens; identical to SEQ ID NO: 72825
  chr7:1547436-1547472
  hypo

SEQ ID NO: 155285 - DNA, 270 bp, Homo sapiens
  chr7:1552940-1553210
  hypo
cggccctgaccctggtccaggacccgggcgcacggctgggcaggcggctgccacggtcactggaagtgggcgctcagggccagggattgagagattccgcgttcctctgaatgacaagtggccacagggtgcctagggggctggccgtctcccaaccaccctgcccactaaatttagaaactgcctcatgcacactggaagctcctcagcgcggtgacgagtgtcaaagccgtgagtcagcagttatgagggcgtcgatgcccgtggggc

SEQ ID NO: 155286 - DNA, 69 bp, Homo sapiens; identical to SEQ ID NO: 72826
  chr7:1554244-1554313
  hypo

SEQ ID NO: 155287 - DNA, 159 bp, Homo sapiens; identical to SEQ ID NO: 72827
  chr7:1556124-1556283
  hypo

SEQ ID NO: 155288 - DNA, 136 bp, Homo sapiens; identical to SEQ ID NO: 72828
  chr7:1560606-1560742
  hypo

SEQ ID NO: 155289 - DNA, 263 bp, Homo sapiens
  chr7:1563389-1563652
  hypo
ggggccacctctcacacgccatgctcagggctcctgcctgtcttctccctgcagtagaattgatcctggtggtctccgtgtcccttcctttccccgacctcagccggggccacctgagtcccccgggttaccctgcatacctccaactctcaggaagaagcgagggtaggagggaccccacccctcccggggcgccccgggctcatggtgcaactggactcgtctccctgcaagaaccagccctgcaccgctggggtcctggg

SEQ ID NO: 155290 - DNA, 352 bp, Homo sapiens; identical to SEQ ID NO: 72830
  chr7:1574076-1574428
  hypo

SEQ ID NO: 155291 - DNA, 211 bp, Homo sapiens; identical to SEQ ID NO: 72831
  chr7:1575802-1576013
  hypo

SEQ ID NO: 155292 - DNA, 1040 bp, Homo sapiens
  chr7:1578254-1579294
  hypo
ctgtccagcggggccccacactcctcggggccggcacagctgtcttgagggagggaggttttgccaccagtcactttggtcctcggtacggggcaccttgtgctgtgcaggtgcagacgtcttctctgacctcagggagagtcagaacaggaagcagccactgccggcgcctgctggtcaccccacagtgccggcggctgcagcccaggtctgcagggcagcagggggccgcacctggctgccaggccctggggtggggtcccagccgctctgtggagtgtgctagagtgtgaggtgcagccagacctttccctgaaccctcaggcagggacagaggccgggccaggatgcctcaccccctgggaagcccctcaggacgggctgggcccggatggtgccccgtcttgttttcatggtgctgtgactgtccaccccgggctgagaagcatccctgcatgggaggtgggcaccctgtccggcgctgccggccctgacctgtgctggcttctctgcttgtccatgttttccagctacgagttccagggagctctgtcctggtgaccgtgcccgggttatgacgactaatcccaaaccgaataaggcattaaaggtaaggctggttccaagcaggccccgtctcaagcacaggcgtgggaaaggcccccggcccgacagcccctgctatcccagggccgtcctgagcctgtgatggaggcctccctgttgccaggaggaggggggctgctgtggccgagggatgttcacaggagaggtggagtcaggatcggggactgtggttccaggcgatgactcccaggctgagggcgtggcagggtctgctgccttcccgcctgggctgtgtgtccgccgggcgctactgcatgagctcatcccctggctccaggcgtgggcagcgtggccagcgtggcctctggtgaacgcgatgctccagctcccaaggcccgagcccacctgtgcctggcgcttgccgcctccacaatggcgtgtgcctgtgggccggctcagtcccagcagcagga

SEQ ID NO: 155293 - DNA, 56 bp, Homo sapiens; identical to SEQ ID NO: 20935
  chr7:1579573-1579629
  hypo

SEQ ID NO: 155294 - DNA, 30 bp, Homo sapiens; identical to SEQ ID NO: 72834
  chr7:1581243-1581273
  hypo

SEQ ID NO: 155295 - DNA, 30 bp, Homo sapiens
  chr7:1581668-1581698
  hypo
cagccccggggctgcgacttggttctgtgt

SEQ ID NO: 155296 - DNA, 294 bp, Homo sapiens
  chr7:1581943-1582237
  hypo
gtaaatctatcagagcagagccgggggcacgggcacaggtgggagttgggagcaaagcggaggcccgggctgcccgccgtcccccttcatctccccacggactgtaccaggcagctgggccccgcaggacaggccgcagcgggtggccggttctgtcccgtcttggggttcttggtgtccacgtcttgtgggccgtgggcttctacctgcccttggcctgcagtgctttgctggagaagggactccctggtccccagggtggacggagccgctgtcaccgcccagagctgggcc

SEQ ID NO: 155297 - DNA, 64 bp, Homo sapiens; identical to SEQ ID NO: 72836
  chr7:1582573-1582637
  hypo

SEQ ID NO: 155298 - DNA, 514 bp, Homo sapiens
  chr7:1583897-1584411
  hypo
tgtgaaaggagacaccgccccgcccggccatgcagcctgcacccgggccaggccagggcccccagggcttccaccgtttcttgtggatgctggggattttcagctggaccatctcccagagaaggatactgaggccaggagaggctagagagcttggcgggtgcgctgggcccagatacgcggctcctgcctgcctcatggcctgctcctctgtcggggcctgtcaccgggaaaccccttttttagcagcgatgacgacactggaaccacgctagtctccgtccctcccgctcacatgcgcccacgctccccctcgaggcaggttgagccccggcctggaccgccccacgctgccttccgtccacgcagagcgggctcggccctcagggctttccttcgagtcgtgttggaaagaagcagaagcagcctcacccgtggggcggaggcgtctgagggtcaggaggcagggaggagagagggcctctgtggagccggctgcctggtgtccaagtcc

SEQ ID NO: 155299 - DNA, 384 bp, Homo sapiens
  chr7:1585838-1586222
  hypo
gcgggaacagaagccaagacccggtagaaaatccaaggtgtttaaatataaataagagcgattcccacagccccacggtgctggccagcctcacaggtgcccgctggttctgtgacccatcccaggcacacgctcccctggctgggcgcctggccagggctcccctgtggctggcgtgtggagacacgtgggcccttctccacgtgcccacgagggccgtagcaggctccaaggaggcccagccccggccagcctgtgtggaccccgccggcctgcggcgcccggagctgctgactgtgtcagagcccggctgcccagcgccccggcgcccctccctccagctgcccagcctgggatccgtccgctgtctgtctcctgaaccag

SEQ ID NO: 155300 - DNA, 591 bp, Homo sapiens
  chr7:1589280-1589871
  hypo
ctagcccagccggacgccaggcctgccttgttgggccccaccgctgggccccaggggacccagtgcccacctcatgccaggtgcccccgcagctcccaccttacttgagcccagctggacgccaagtccgcctcgttgggccccactcccgggccccgggggacccagtgcccacctcatgccaggtgtccccgcagctcccgccttacttgaagtccccgtcgtggtatttgccaaatgcctggaggatgatggtggtgacggccatgacgggcttcaccaggcagaactgcagagtggcctgggggcgacggcacccggtgggcctggggccaggtcccccaggggcccaggaatggggattggggcagccagcaatgagcagccccctgacactgggtggggtggcgctgggccggctagggcccctgacgggcttgggtgggaggagggcgggcagggctgggtggcccctcacctgcttacagaagcgcaggaacccgatggagtaggtcatgccccggaggcagcaggtgccgtacaagcagctggacctgcgggggacgtccctgagccggtgcgggagaatgc

SEQ ID NO: 155301 - DNA, 58 bp, Homo sapiens; identical to SEQ ID NO: 72840
  chr7:1590460-1590518
  hypo

SEQ ID NO: 155302 - DNA, 37 bp, Homo sapiens; identical to SEQ ID NO: 72841
  chr7:1596341-1596378
  hypo

SEQ ID NO: 155303 - DNA, 31 bp, Homo sapiens; identical to SEQ ID NO: 72842
  chr7:1597683-1597714
  hypo

SEQ ID NO: 155304 - DNA, 847 bp, Homo sapiens
  chr7:1598548-1599395
  hypo
cggctgagccagatgcgccagctcgggaaccgtggaccaagtgtactggtctggggatgtcaggagcagggcctggtccccagggaggggcagtcgggaggttgaccgctctgccacctgctcacagggctcgccggctgatcgaggcctcacccggtgctggtgtcacagcctctgcgcccggtcacaggaggcggcagggccggctgggcctgatttttctggcgggggcgggacactgaccaagcccattgcaggacagacctgtctgcccagatccaggcgacggggccctctgaccattgttcactgcgtccaggtgcccagagctgtggggaggctgagaagccgcccagccagtcccacaccctggccctggcacagccacctcctcctgctctcatgagaaacccggctgagggcccatgagctgttgcctggttccaggccggctgccctgctagtgcccaccccgaccccctgcctgcccgtctctctgcagatgcggacaggcatggtgtacccccctgcctgcctccttcactgctgggtggaactcggggcgcccaggagccgcctcctcagggctggctcatttgatgtcccaggctgagctgcacactagggggatgaggtgaccggtgggcacccatctcagacacccggcttcccaggtcccgcggccctcccctgggggccctggccagcagttcaccaaggcagcagccccgggtgtgagcagggggtgacagggatggggctccacatcctcccggctctgcttctgggattcccccggctcctgtccacgggcacggcctcctgagagccgcgtggggcgggcagg

SEQ ID NO: 155305 - DNA, 1155 bp, Homo sapiens
  chr7:1599699-1600854
  hypo
ccactgtctcagctgacctggcgacctggcaggtcataggggggcgcttgcctcagcttctgactctcgagcaattctgttctgcctgagcccatcagccccagatcccagggtggggccgtcccaaggatctgctctcttcctcccataggtctcccgtcctgtcctccggggccaagcccccacctccctgctcctgtccctggtccctctgttgcccccatccccagaaagtcacccagggcctgcctatacttgccttcacctgagggagctgccagccctgggcgtgtacgggtcgggggcaccctttcatctggagccaggatggggggtgctcgtctggcctggacttgccaggctggctggagaccctgtttggtgtccaggtgccgtcctggggcccagcctctgaggtggcggtgaggcttaggggttggcggactgtgattctccgaatttcaaggtatgttttttttttcgaggagccccccaccccattgaagtgcaggggctcagcctggacaccatacccctctggtatgcacccccttcccccacacacacactctcgcactcccacacccacgcagctcacctccctggtggcgctcagcctgtcaggcaggttggctgcaggtctctgggcctgaggggggggccaaggcggggtgggcctgaagctcggcccccggcctcctggcctctgctgccgcctcctcacagcggcgggcagcctgggtccctgagagatgattgctcctgagcagtggcctctccccagacccaggaactcctcccagccccaccccctccccacccagccagccctacctgcctgggtacagctggcacggaccacaccctccaccttcccccctgcccggattttgggacccacatctgtccacgtgccacccctgcctcctgccatcccagcgggtgtgagcctggaccaatctccctgtccggtggatttcagacgtgggaccacaagtgggctggggtcccgatgccccttcacgagtgacgcagcccctgcctccccttctttggccccctcacccctgaaaagtcccattcgggagcctgagggtgtcgggacacggatcgccaccaagctctgcccctgcccacgcacgcctgctacccggg

SEQ ID NO: 155306 - DNA, 31 bp, Homo sapiens; identical to SEQ ID NO: 72845
  chr7:1601633-1601664
  hypo

SEQ ID NO: 155307 - DNA, 242 bp, Homo sapiens; identical to SEQ ID NO: 72846
  chr7:1607230-1607472
  hypo

SEQ ID NO: 155308 - DNA, 324 bp, Homo sapiens; identical to SEQ ID NO: 72847
  chr7:1607696-1608020
  hypo

SEQ ID NO: 155309 - DNA, 574 bp, Homo sapiens; identical to SEQ ID NO: 72848
  chr7:1615004-1615578
  hypo

SEQ ID NO: 155310 - DNA, 237 bp, Homo sapiens
  chr7:1620358-1620595
  hypo
gttcagaatcgggcccggggagacagaagctggaatagactgtcaaggccataacagaagcgcagggcctgtgtgtgccggtgccgggtcctctgcagttgctgttattgggcctcagcctcagctctgaccttcctggtagccctagagaaaagggaaacgagaccgggcagccaggttcctgactccctgtcctgggcaaggagcctcccggctgctccgcgaaagcgccgtgtt

SEQ ID NO: 155311 - DNA, 30 bp, Homo sapiens; identical to SEQ ID NO: 72849
  chr7:1624972-1625002
  hypo

SEQ ID NO: 155312 - DNA, 125 bp, Homo sapiens
  chr7:1625534-1625659
  hypo
gccctggggtggcggcgggcagagaaaccccccggagtggtctccgttcttctaaaagtgatgttgacccccgtgtcgcaggcagctggcagggtggcagttcgatctgtcgttacgggcttgca

SEQ ID NO: 155313 - DNA, 408 bp, Homo sapiens
  chr7:1627149-1627557
  hypo
gtagcccaggtgccccggaggctgctgagagggttgagagtgcagagacgaggggcccagggaagtcttggattctctcgccatcttcaatgtcggagcccagacggggcaaggcgaggaggagcccggggcgaagacgccacccacattcctccttcccgcaggcttcttctccttctagcccttccaggagagaaaccatcccacaagtccagagtagtggcgtccccggggccatgtctcctgagcaaacactgttttctaggagtccgaggggcctcagccatctaggtcaatccctttgcagaacggtgaaggaatctgaagcccagagagggaaaacaatgcctcctgggtcacacagcccatcaggggcagggcagggacgaacggcgagaaaaggaccag

SEQ ID NO: 155314 - DNA, 30 bp, Homo sapiens
  chr7:1629887-1629917
  hypo
tttggctgttggggacggtgctgctgtgaa

SEQ ID NO: 155315 - DNA, 30 bp, Homo sapiens
  chr7:1637241-1637271
  hypo
gctcacggtatgagacgaaggagccaaggt

SEQ ID NO: 155316 - DNA, 674 bp, Homo sapiens
  chr7:1641739-1642413
  hypo
ctgggtcagcccggacgcaccggcctctgtctgggtcccagtcttctcaccgccaggcgggcaggtcagcagaccaggcaggaccgagcccgtcgcccggggctcttgttgtctgtgccatttcggtgccttttgtccttgcttcccgccgctccttgaggatgtttaccggctgctggggccgtgccttccaggtgaggcctcggtcattccaggtgcagcctcggatcagggatgacggcccaggctgaagtatcatgatgaagagcttggaccgagggcagttaaggtgtgtgagtattcagatcccccacgtgcccttctctggaaggtgccagcgacctgtcctctctgggcctctgtcttctcctctgtggaatgggaatgatggcgtccgcacctcatagggctgctggaaaatgggtctgggtctcggctggaatttcagccagcgccgaggaccagaggccctggttcctgtccacgtggcctgggacccccgcggccccgcacctgggctccgggggcaagtgtgttcgctttgaggacccagccttggaggtcagatggcatccgttatgggttaaattttgtccccctaaattcatatgttgaagtcttaacccacagggcctcagaatgggatggtatttggagcccgggccttgaaagag

SEQ ID NO: 155317 - DNA, 77 bp, Homo sapiens; identical to SEQ ID NO: 20944
  chr7:1650397-1650474
  hypo

SEQ ID NO: 155318 - DNA, 30 bp, Homo sapiens
  chr7:1652227-1652257
  hypo
agaaaagattatgagcggggtgcttgaggg

SEQ ID NO: 155319 - DNA, 208 bp, Homo sapiens
  chr7:1659705-1659913
  hypo
caccctggagcctccgacggggcggccacgggcagcgaagaacccggaaaaacaggttcgaggcagacacaagatccaggccccggcaggctccgtgtctgccgaaggcttcctgggtcataggcgacaccttcccgccgtgccctcttgtgggaaaggggtgagggagccctctggggctccttttatttatttttaattttttaat

SEQ ID NO: 155320 - DNA, 351 bp, Homo sapiens
  chr7:1660349-1660700
  hypo
ttggtgtgaactgcgcggcggcgtcccccaccaggcaccacaggtgattcattcgtttccctgaaaaggcgcctggatgctgtttctagctcccgttatccccagcgatgctgcacctgccccaggacacacgctagggtggaaccgccgggcatggagcaggtgtggtctcaaccgcaggagaaacagccgggtagcctccaaagggacgtgccacttggcgctcctgcaaggggagaggcactgaggctctcggtcctcaccagcacgtccttgtgccacactcaggcccggcgggtggtgtgggggccgcatctcatggaggtctccgtccacgttgcccccattgtg

SEQ ID NO: 155321 - DNA, 30 bp, Homo sapiens; identical to SEQ ID NO: 72856
  chr7:1680592-1680622
  hypo

SEQ ID NO: 155322 - DNA, 161 bp, Homo sapiens; identical to SEQ ID NO: 20946
  chr7:1681116-1681277
  hypo

SEQ ID NO: 155323 - DNA, 87 bp, Homo sapiens; identical to SEQ ID NO: 20947
  chr7:1689039-1689126
  hypo

SEQ ID NO: 155324 - DNA, 204 bp, Homo sapiens
  chr7:1692785-1692989
  hypo
tacaggcgtgagccaccgcgcccggccaattatttttttaaaggaggaaatttgtgcacagacagacgtgtacagaggaaagacatccctgtgactgagtgacgtgtcttccagccacggagcaccaaggcttgctcagggatgctggaagaggcaggaaggatcctccccaagagctatgagagggagcgcggccctgccaat

SEQ ID NO: 155325 - DNA, 414 bp, Homo sapiens
  chr7:1694554-1694968
  hypo
gcatgcagggggagcgaagggggtgcccagcctcgccccgcccagcgcacccctgcagcagcccgggagggcaggccgtggctcctgggaacacggcgcccagctgcaatccacattgctgctagtgaatatggacaattcagagacatgaaataaggcagacagagaaaaagcatcggtgactctgccaggctacatatgtgtgtgcgtgtctgcatatatatacacacacgtgtatacgcacacacagagccacacatcactcaacgacagggacacgttctgagaaatacatggttccgtgattttgtcatcgcgcgtacatcctagagtgactcacacgaacgcagatggcggagcctaccccacgcctgggcctcgcggtacagcctgtggctccggggctacacaccc

SEQ ID NO: 155326 - DNA, 3500 bp, Homo sapiens; identical to SEQ ID NO: 43800
  chr7:1704118-1707618
  hypo

SEQ ID NO: 155327 - DNA, 656 bp, Homo sapiens; identical to SEQ ID NO: 43802
  chr7:1708905-1709561
  hypo

SEQ ID NO: 155328 - DNA, 47 bp, Homo sapiens; identical to SEQ ID NO: 5305
  chr7:1709617-1709664
  hypo

SEQ ID NO: 155329 - DNA, 51 bp, Homo sapiens; identical to SEQ ID NO: 114496
  chr7:1709871-1709922
  hypo

SEQ ID NO: 155330 - DNA, 288 bp, Homo sapiens; identical to SEQ ID NO: 114497
  chr7:1709955-1710243
  hypo

SEQ ID NO: 155331 - DNA, 192 bp, Homo sapiens; identical to SEQ ID NO: 114498
  chr7:1710324-1710516
  hypo

SEQ ID NO: 155332 - DNA, 30 bp, Homo sapiens
  chr7:1713404-1713434
  hypo
tgaagatggtccagccggtccattttccag

SEQ ID NO: 155333 - DNA, 30 bp, Homo sapiens
  chr7:1713675-1713705
  hypo
aactgagtcaggcggcgaggaccactgctc

SEQ ID NO: 155334 - DNA, 466 bp, Homo sapiens
  chr7:1714477-1714943
  hypo
gcgggaaacatccttcggcccgggccagcccagccatcaccaggtccactgtgtttgctagagcccccaattcaatctctgaattttaaagatagggacactgaggcgcagacagggcagtggccgcaagccactgaggcttgcaggcagtggtatctgggctcagccctgctcccatgctgggctccccacacctcatatccgggctcagctgggagagtgccctggccttaccgacggggacccggcagcccacggcgtggaggtgaaccagcttgtctgggaagccacattccacccctgtgcacccccaggccctctgtggcccactaccccctctaggaccccaccccacagaagcgcatctctctgctgtccgccccactccagtggtaacttctgtcagagggcttgtcacagagtgctgaccgcgctgagagcttctcaccagcgctggacatgtggc

SEQ ID NO: 155335 - DNA, 30 bp, Homo sapiens
  chr7:1715300-1715330
  hypo
ccccagaccctcggccggtgcgcaggaggc

SEQ ID NO: 155336 - DNA, 227 bp, Homo sapiens; identical to SEQ ID NO: 72867
  chr7:1718470-1718697
  hypo

SEQ ID NO: 155337 - DNA, 167 bp, Homo sapiens
  chr7:1719590-1719757
  hypo
gagcagaagggggcgcgtgtgcccctgagcgctcctgtgtgcaggtgcacagttcattaaacatgaccatgaagtcgggacatgggagttacgcattagaagtgttcattcactgattcattcattcattcacctacccagtggacattctccgatgctgggctccg

SEQ ID NO: 155338 - DNA, 30 bp, Homo sapiens
  chr7:1732443-1732473
  hypo
atcggaaactacggacgtttctttaattcc

SEQ ID NO: 155339 - DNA, 187 bp, Homo sapiens
  chr7:1733133-1733320
  hypo
atgtgtggtgtggggcgtgacccacttcctggtgcaagaacacatacacgcctgtggacgtagccttgctgggtgtgtgcacatctgcagaggggtcggtgtacaccgctgtgtgaacacctccggcggtgcccagtccgtgtgaacacatgcaggtgagcacagacacatgcgtgcatgccctctg

SEQ ID NO: 155340 - DNA, 30 bp, Homo sapiens
  chr7:1733589-1733619
  hypo
gtgattcttgcagggcgattggagcaatac

SEQ ID NO: 155341 - DNA, 382 bp, Homo sapiens
  chr7:1734709-1735091
  hypo
acggctccggatgcacgtggctgtgccaggcagcagacgtggccgacaggcacatggtgggacctgctctgtggctccagagctcatgcgcagcccgctggggctgtgagggttctgtccatccaccaggaaggccaccaggaccctgctcctgcctgagaaccccaggaagtagtagcgtgccaggtgcgtggccggcctcccagcccttcccagcaccagctgcgtcctcctcctccagggctgcagctcagggctcaggtgtccgcgtcgagggcactccctaaagggcaggagcaggaccattggcacaagcctgggcgagtctcgctgggaggcaggagcagactcagcccgccaagcccatgaaccccactttgaa

SEQ ID NO: 155342 - DNA, 30 bp, Homo sapiens
  chr7:1746736-1746766
  hypo
gggcaggtgccctgacgtgcacaccgtgcc

SEQ ID NO: 155343 - DNA, 454 bp, Homo sapiens
  chr7:1775489-1775943
  hypo
ccccaccacaaccctgggaggcggacaccgtgatgatctctgtttgacagatgaggggactgaggctaagagaggttaagtgacatgcccaaggtcacacagcaggcgcacggcagagccaacaccatctcctggcccacgatggttctgtgtcccctgacgcagcaggtgcacaggcgggccccccacctgctcctagctgggccgggtcaccgtggcaggccttgcggctcgaggcccaactgccctgatatgcctatcacagcctcatgggctctgcggcagagcccagggagacagacagggcgagagccaagctgcagaggcaggcagacgttagcagtaaacatgatctatcggcaaaacattggaacgatgaaaagttatcgatctatagctttccaaccatctccccgcctcccccacacgtctggccctccgcccacctttcccc

SEQ ID NO: 155344 - DNA, 401 bp, Homo sapiens
  chr7:1778727-1779128
  hypo
ctggagattgtgtctggaggccggattctcctccacgcgtggaggactggacgccctcagggctgcgcggggccgcaggaccgccttggtggttagcgaggctccctctggctgtggagggagaatggattgtgggtgccaggagaccaggtggtaccttgggcgtcgtccccgctggaggtgggtttgggcggtcgtggtgggagtggagtgattccagatgcttctgcaggtggattagatgctgctggagttggaccaggtgtggggggaggaaagagaggagtccagaatgcggcgtcaacttttggtgtaggaatgtggcggatggtgaggcagggagatgccagcggggacgggaacttggagcagccacttagacgcaacgggggagaatcttc

SEQ ID NO: 155345 - DNA, 1381 bp, Homo sapiens; identical to SEQ ID NO: 72871
  chr7:1783931-1785312
  hypo

SEQ ID NO: 155346 - DNA, 1073 bp, Homo sapiens; identical to SEQ ID NO: 43808
  chr7:1785929-1787002
  hypo

SEQ ID NO: 155347 - DNA, 181 bp, Homo sapiens
  chr7:1787238-1787419
  hypo
ccgtctcttcattgccgcctccggagtccactgcagaggggcagagtgaatgccggcggccaagtggcctccgggacaggtcctggagccctgctggactcagggtgggtggaggctgtgcctgtggacggccggggtggccaggacggccaagggctgggaggcacgtcccccagcccag

SEQ ID NO: 155348 - DNA, 188 bp, Homo sapiens
  chr7:1794934-1795122
  hypo
atccatttttcactttcgtagatcatgcttttggtaccacattgccgagccagtggtcctgaagatgttctagtatttctgctatattttattttagaagattacagtttactttttgcatttaaattcgtggcctatttcggattaatgttcgaaagcgccgggatggtgggcgtgagccaatacgc

SEQ ID NO: 155349 - DNA, 203 bp, Homo sapiens
  chr7:1800897-1801100
  hypo
cggcagcggtgaagacggatggatcgctggcattctgcacagcacgggtgagctgcaccacaccatgccatgccgcagaggcctcacctggaagatttccacaggccctatttttaatcactaagaaacccagactgctcctaatagaaaataatatataatttgctttttgtttttcgatatctttttttttcttttggaga

SEQ ID NO: 155350 - DNA, 143 bp, Homo sapiens
  chr7:1801399-1801542
  hypo
atttactactctgggatttatttcagtttggcatacaaagtagggagctttggaattttctttcaaatgattgaccaggtgttcggcacggttatcgagcaatccattgtacacccactgacgcgagacgccactcccacctc

SEQ ID NO: 155351 - DNA, 18 bp, Homo sapiens
  chr7:1801958-1801976
  hypo
gtgtgcgtgcgtttgcgt

SEQ ID NO: 155352 - DNA, 30 bp, Homo sapiens
  chr7:1809199-1809229
  hypo
gagagcccccgttccggtcggtgtctgtgt

SEQ ID NO: 155353 - DNA, 22 bp, Homo sapiens
  chr7:1817474-1817496
  hypo
cgcctggccatttgttggaata

SEQ ID NO: 155354 - DNA, 29 bp, Homo sapiens
  chr7:1819769-1819798
  hypo
ccacacccggccaacttttttatcatgat

SEQ ID NO: 155355 - DNA, 144 bp, Homo sapiens; identical to SEQ ID NO: 72874
  chr7:1827530-1827674
  hypo

SEQ ID NO: 155356 - DNA, 155 bp, Homo sapiens
  chr7:1846091-1846246
  hypo
gctttttctttaaactacaaactccgtctccttcccacgtacatttctcccgctctcagtgaccaccactgtatggctgtgttgctggtctccctgagcctcggtttctcttctgcaacctgggggcccactccgggagtgaattgggaaaaagc

SEQ ID NO: 155357 - DNA, 76 bp, Homo sapiens; identical to SEQ ID NO: 72876
  chr7:1847552-1847628
  hypo

SEQ ID NO: 155358 - DNA, 309 bp, Homo sapiens
  chr7:1849767-1850076
  hypo
gctccctcggtgaacgtgacaaggcccctccttccccacgggggtgacacgccagagccaggggcgcccggggtggctgggcccaaccgagagggacaagtggaaaatccagcgggatccccgagaccaaagccgactgtggaaggtcccattcaccgttcgcattggtcacacgtcgacacgatgccatgttggatagattgggttagaggtgtatttgctaacattaatttcactggcttctgcttactatttaacgtggctactaaaaaatgtcaagttacgtatgcggttcgcgtggcgtctcta

SEQ ID NO: 155359 - DNA, 364 bp, Homo sapiens; identical to SEQ ID NO: 72878
  chr7:1855555-1855919
  hypo

SEQ ID NO: 155360 - DNA, 540 bp, Homo sapiens
  chr7:1856752-1857292
  hypo
cggggaaacgtgaaccgcaactgagcgagacacggagccgcctcgcgccgacggccactgagagcaaccaccatgagctgctgggtcgaggggaatcagaccctccgcgtcgctggcgggagcgtgtgtggtgcggccactgcaaacagccggcagctcctcaaagagctggacgcagagtccatgggcccagcacccgcccgggcgcgcagccagggggtctgagcgcagtccacgcacagacctcggcacgggtgtccacggcaacacgatcccatcaccaacagatggaacgcggaaccagccctcaaccgccggagggagacacaaaaccgggtttacccgtcaacaccgcttcgtacagccgaactctgatacacgctgccacgcgggcaaaccccgaaaacacgcccagccagtcacagagacctgtcgacacaactccgtgcccaggggatgtcctggaggggcacgtcagggctcagggccagtggaaatgtgccacggttagactggtcgcggctgcgcactgaatgtgcc

SEQ ID NO: 155361 - DNA, 284 bp, Homo sapiens
  chr7:1864265-1864549
  hypo
ccccaccaggacccgcgggagaggagaggggcgtgcctggatggcatctgccggggcagccataggtccctgtgaacctcgcttgtagaatacacctgctctcaaagccagcgaaggggagatttttttttgtcttgaggctgtcaggaaatcaaagtgttttcaacttcaaaagactctccgggcgtctcaagttgagaatctgacgcgtcccaggcactttcatgcacacatggggcgagccggggagaagactcagcagcgtccgccgagagtcagccctg

SEQ ID NO: 155362 - DNA, 290 bp, Homo sapiens; identical to SEQ ID NO: 20959
  chr7:1865908-1866198
  hypo

SEQ ID NO: 155363 - DNA, 31 bp, Homo sapiens; identical to SEQ ID NO: 20960
  chr7:1867561-1867592
  hypo

SEQ ID NO: 155364 - DNA, 30 bp, Homo sapiens
  chr7:1880655-1880685
  hypo
ctctccactgccggcggctggtgggattag

SEQ ID NO: 155365 - DNA, 30 bp, Homo sapiens
  chr7:1881375-1881405
  hypo
cactctgctgtccccgtcctggctgtgagc

SEQ ID NO: 155366 - DNA, 123 bp, Homo sapiens; identical to SEQ ID NO: 20961
  chr7:1885180-1885303
  hypo

SEQ ID NO: 155367 - DNA, 269 bp, Homo sapiens
  chr7:1888786-1889055
  hypo
cacacacacacgtacgcacatgcggggtcagggagctgatgctgtgcgaggctgtcgagggcttcttcactcagcggcacttgggaagcgctgctctgtgggaggcccctcatccatgtcctcgttattggcagcacaaatctccaagtgaggaggggccatgtttaccagccgtccttccagcccacgtctcctacggttccttattttcacaggtactgttttgcagacacagagcccccaagcagcccacacgtcttagccgggtg

SEQ ID NO: 155368 - DNA, 30 bp, Homo sapiens
  chr7:1892554-1892584
  hypo
ctgcatcatttatccgggccttcacgtgct

SEQ ID NO: 155369 - DNA, 30 bp, Homo sapiens; identical to SEQ ID NO: 72882
  chr7:1892788-1892818
  hypo

SEQ ID NO: 155370 - DNA, 30 bp, Homo sapiens; identical to SEQ ID NO: 20962
  chr7:1897359-1897389
  hypo

SEQ ID NO: 155371 - DNA, 31 bp, Homo sapiens; identical to SEQ ID NO: 72884
  chr7:1906135-1906166
  hypo

SEQ ID NO: 155372 - DNA, 137 bp, Homo sapiens
  chr7:1906701-1906838
  hypo
tgaggggctgaggtcggctgcagtacttggagatctagggccaagctggggcgaagtgggagacagaggcaggcagaagctggtgagatggatggcacggtcagtgccacagacatgggcaccgtaggcctcccctg

SEQ ID NO: 155373 - DNA, 30 bp, Homo sapiens; identical to SEQ ID NO: 72886
  chr7:1908699-1908729
  hypo

SEQ ID NO: 155374 - DNA, 30 bp, Homo sapiens; identical to SEQ ID NO: 72887
  chr7:1912901-1912931
  hypo

SEQ ID NO: 155375 - DNA, 30 bp, Homo sapiens; identical to SEQ ID NO: 72888
  chr7:1913490-1913520
  hypo

SEQ ID NO: 155376 - DNA, 191 bp, Homo sapiens; identical to SEQ ID NO: 72889
  chr7:1913833-1914024
  hypo

SEQ ID NO: 155377 - DNA, 30 bp, Homo sapiens
  chr7:1915692-1915722
  hypo
gcggtctcagccccccgccgtggggctctg

SEQ ID NO: 155378 - DNA, 31 bp, Homo sapiens; identical to SEQ ID NO: 72890
  chr7:1924361-1924392
  hypo

SEQ ID NO: 155379 - DNA, 30 bp, Homo sapiens
  chr7:1926165-1926195
  hypo
gcacggtggcacgggcgggagagggcccac

SEQ ID NO: 155380 - DNA, 288 bp, Homo sapiens; identical to SEQ ID NO: 20964
  chr7:1931659-1931947
  hypo

SEQ ID NO: 155381 - DNA, 235 bp, Homo sapiens; identical to SEQ ID NO: 20965
  chr7:1932168-1932403
  hypo

SEQ ID NO: 155382 - DNA, 31 bp, Homo sapiens; identical to SEQ ID NO: 20966
  chr7:1932816-1932847
  hypo

SEQ ID NO: 155383 - DNA, 236 bp, Homo sapiens
  chr7:1937724-1937960
  hypo
ccatcccctttggacgcgaggctgctcctttgctgagggctacggtcggatctccccacaggaggagacagagagcgagacagccggagagccgtcacacgcaggacccaccttgaagatgaggcagtcgcctgggtgctcggcgtacagcgaggtcagccggtactggttctccgtggtgatgtcgatctggtagccggtgagcgtgtagcaggccttgcggaactcctggatct

SEQ ID NO: 155384 - DNA, 30 bp, Homo sapiens; identical to SEQ ID NO: 72895
  chr7:1939799-1939829
  hypo

SEQ ID NO: 155385 - DNA, 80 bp, Homo sapiens; identical to SEQ ID NO: 72896
  chr7:1946382-1946462
  hypo

SEQ ID NO: 155386 - DNA, 30 bp, Homo sapiens; identical to SEQ ID NO: 72897
  chr7:1947153-1947183
  hypo

SEQ ID NO: 155387 - DNA, 30 bp, Homo sapiens; identical to SEQ ID NO: 72898
  chr7:1947437-1947467
  hypo

SEQ ID NO: 155388 - DNA, 30 bp, Homo sapiens; identical to SEQ ID NO: 72899
  chr7:1949162-1949192
  hypo

SEQ ID NO: 155389 - DNA, 153 bp, Homo sapiens; identical to SEQ ID NO: 72900
  chr7:1950265-1950418
  hypo

SEQ ID NO: 155390 - DNA, 181 bp, Homo sapiens; identical to SEQ ID NO: 72901
  chr7:1950692-1950873
  hypo

SEQ ID NO: 155391 - DNA, 79 bp, Homo sapiens
  chr7:1961802-1961881
  hypo
gcatcaccagcccagcggcgagcgccctgcttccagctgcgagagacatgcagctggacctggccgcgccgcgtcttta

SEQ ID NO: 155392 - DNA, 192 bp, Homo sapiens; identical to SEQ ID NO: 20970
  chr7:1962361-1962553
  hypo

SEQ ID NO: 155393 - DNA, 31 bp, Homo sapiens; identical to SEQ ID NO: 20971
  chr7:1963283-1963314
  hypo

SEQ ID NO: 155394 - DNA, 148 bp, Homo sapiens
  chr7:1969178-1969326
  hypo
cctgcctgaacttccgagcagggactcagatccccgagagcaggggcctctttatgtgtttctgtgtcttctctgaccggaggtctggggcccacaccagagacagcccttggggaagccgtggcaaacacgaaagggagctcttgac

SEQ ID NO: 155395 - DNA, 254 bp, Homo sapiens; identical to SEQ ID NO: 72905
  chr7:1970776-1971030
  hypo

SEQ ID NO: 155396 - DNA, 30 bp, Homo sapiens; identical to SEQ ID NO: 72906
  chr7:1973076-1973106
  hypo

SEQ ID NO: 155397 - DNA, 30 bp, Homo sapiens; identical to SEQ ID NO: 72907
  chr7:1974823-1974853
  hypo

SEQ ID NO: 155398 - DNA, 30 bp, Homo sapiens
  chr7:1976949-1976979
  hypo
cctggaaggtgccccgtgccacaagagaaa

SEQ ID NO: 155399 - DNA, 30 bp, Homo sapiens; identical to SEQ ID NO: 72908
  chr7:1987182-1987212
  hypo

SEQ ID NO: 155400 - DNA, 30 bp, Homo sapiens
  chr7:1991924-1991954
  hypo
ccgaggactgcggccgactcagcctccccg

SEQ ID NO: 155401 - DNA, 30 bp, Homo sapiens; identical to SEQ ID NO: 72909
  chr7:1993582-1993612
  hypo

SEQ ID NO: 155402 - DNA, 119 bp, Homo sapiens; identical to SEQ ID NO: 20973
  chr7:1995852-1995971
  hypo

SEQ ID NO: 155403 - DNA, 30 bp, Homo sapiens
  chr7:1996683-1996713
  hypo
gctccctgtacaccacggcccagttaaaac

SEQ ID NO: 155404 - DNA, 304 bp, Homo sapiens
  chr7:1997040-1997344
  hypo
gtgggtggtgcgggccgcagaggactccagaggcagccagtgcaggcctgtcagcggcatggcctccctgccaggcaagggggtgcacatgggagggaggagagttcagacagacgagccagaaaacgggtgttctgtggcagcaggaaccacggtcgttcacgacgcccaaagaaatgagaggcccaggcagtgcctcacccagaggctgccccgccctcacctgcagagctcgccgctccagctgtgcctccagcatcctcttttcctcctccagccgactccgctcgccttccagctcctc

SEQ ID NO: 155405 - DNA, 149 bp, Homo sapiens
  chr7:1997547-1997696
  hypo
tgggggagtccgtggcggcccctgctcagctggaggagcctgtgcggagaaagtctctgtcgaccacaccttggctggaagcacagagggaaccagcccgaggcaggacgcctgggagtcagtgtgtccgtgtccgtcagccactccca

SEQ ID NO: 155406 - DNA, 108 bp, Homo sapiens
  chr7:1999008-1999116
  hypo
agaaggcagaggaagcgacgggacaaatactataagaaagttccactttcaatggaaaggataaagccacagatgtagaaagctcaacagacacgaggcagcgcaagg

SEQ ID NO: 155407 - DNA, 197 bp, Homo sapiens
  chr7:2004875-2005072
  hypo
acccaacactcgctgcgtgtcctgacacggagcacctcgcccctccaggcttgtttgtcataaagagagcacgtgacaaagccgcgcagacatggcagtgtgacgggtgcccacgcctgcccttcctctcccacagacagggctacaatgcctggacacgtgcccggctctggaaggcccaccgcactggtgggtag

SEQ ID NO: 155408 - DNA, 182 bp, Homo sapiens; identical to SEQ ID NO: 20975
  chr7:2006410-2006592
  hypo

SEQ ID NO: 155409 - DNA, 224 bp, Homo sapiens
  chr7:2007845-2008069
  hypo
aggtccaccgtcgacgcctcagtccggcggtcaggtccaccgtcaacaccagcggtcttgtccacatcaacgcctcagtccagcggtcaggtccactgtcaacgcctcagtctggtggtcaggtcaaccgtccacacctcagtccagtggtcaggtccactgtcaatgcctcagtccagcggtcaggtccactgtccatgcctcagtccggcgatcaggtccac

SEQ ID NO: 155410 - DNA, 182 bp, Homo sapiens; identical to SEQ ID NO: 114501
  chr7:2018615-2018797
  hypo

SEQ ID NO: 155411 - DNA, 336 bp, Homo sapiens; identical to SEQ ID NO: 72915
  chr7:2019123-2019459
  hypo

SEQ ID NO: 155412 - DNA, 547 bp, Homo sapiens
  chr7:2024688-2025235
  hypo
actttatagtctgtgacggttcattccatgtgtccactggacaggacctggggtactcagatcaaaacactttctgggtgtgtctgggagggtttgtggatgagatcagcatttgaatcggggactcagcagacggccccgggcagcatgggtaggcctcctccaaccccttgaggccggaatgaaatgaaaactggaggaggcgaccgttcctcccttgcctgcctggtggcctgagcggggcagctcccgttttccgcccaggactggggctttcaccacaggctccgctggttctcaggcctgcagagcggactgggcacagcacaggctcttccaggtctgctgtgcacagatgcagaccacgggatcctggctccatggccaagagcgagggcctcacagtcactctctcgggatagaccagtctaccgcacctggtgctctagggagcctaacatgcagctcgatctgctctccccacctgatactacctttagatggtgtgtctgtgtcttcggctctcaacagcgaagccgccatcctc

SEQ ID NO: 155413 - DNA, 30 bp, Homo sapiens; identical to SEQ ID NO: 72917
  chr7:2025468-2025498
  hypo

SEQ ID NO: 155414 - DNA, 74 bp, Homo sapiens
  chr7:2027224-2027298
  hypo
gggaagagcaaatgcgaggatggtcccggggtgctctcggcaccaactgcagtgccctcgcccagccgccgggc

SEQ ID NO: 155415 - DNA, 30 bp, Homo sapiens
  chr7:2031854-2031884
  hypo
ctgctctgacttccacgctggatacccagc

SEQ ID NO: 155416 - DNA, 30 bp, Homo sapiens
  chr7:2034266-2034296
  hypo
gaggaggccaccgggcggagcctcgggggg

SEQ ID NO: 155417 - DNA, 30 bp, Homo sapiens
  chr7:2034594-2034624
  hypo
gtaagccaccacgcccggccaacatctgct

SEQ ID NO: 155418 - DNA, 101 bp, Homo sapiens
  chr7:2034834-2034935
  hypo
tctgtggagaagcctcggggggcacctcggggcacgcactgaggatgaggctggacgcagggaaacctgagctggtgaacgggcagcgagcctggaaccag

SEQ ID NO: 155419 - DNA, 218 bp, Homo sapiens
  chr7:2035957-2036175
  hypo
acacggctgctgggcgggcagggtcccccgggtctacacatgcctcactgggagtctcttcagggaagctccgccggtgtcctcagcctcccatgagaagccagaggctctgagagccacacggaccacaggctcctgcacaggagaccccagagagcctagagcttcttcatgggcccacgggacctgccctgctcacggtcgccagatttcagaat

SEQ ID NO: 155420 - DNA, 30 bp, Homo sapiens; identical to SEQ ID NO: 72919
  chr7:2037513-2037543
  hypo

SEQ ID NO: 155421 - DNA, 35 bp, Homo sapiens
  chr7:2037950-2037985
  hypo
tcaagatgccagctccgaggcgtccgtgcctctgt

SEQ ID NO: 155422 - DNA, 97 bp, Homo sapiens; identical to SEQ ID NO: 20978
  chr7:2040769-2040866
  hypo

SEQ ID NO: 155423 - DNA, 570 bp, Homo sapiens
  chr7:2041376-2041946
  hypo
ctggacagacccctcgtaggctctcacacctgctttgccccgacaccgtggcctcatgcggcaaacatgtcactggccccctgccacaaacacggtggtggggcccgaggggctgtgctccccgccggcgcatgccacctgtcactagtagagatgggactcaggctcctcacacacccttccccgctcaacgcagcttccgacgacagaagaggcagccatgcactggcgcctgcagcctaaaggcttatggggacaggcgtccctgcccagacccagggtccaggtgccctgaatcccagccactcccgcgtctgactcaccatgtctgctctttgtttctggcctcccagctcctccagggcctgcgacagctgagcctgcaagacaagacaggattcggcctgagactgtggtgggccaggccccatttctaggactgcagggaacacaacccccaccaccccgcagcctccactctctggggagcaacgggacccaggagctgggaagtgggcagccagagggtgggcaggggccagtgtggctgccccgcgaggccgagagccc

SEQ ID NO: 155424 - DNA, 30 bp, Homo sapiens
  chr7:2044663-2044693
  hypo
cttggagcagctcccgtgagagtgcagccc

SEQ ID NO: 155425 - DNA, 30 bp, Homo sapiens; identical to SEQ ID NO: 72923
  chr7:2045473-2045503
  hypo

SEQ ID NO: 155426 - DNA, 73 bp, Homo sapiens; identical to SEQ ID NO: 72924
  chr7:2046905-2046978
  hypo

SEQ ID NO: 155427 - DNA, 30 bp, Homo sapiens
  chr7:2048648-2048678
  hypo
gcgcagccacgccccggccccgcaaccctg

SEQ ID NO: 155428 - DNA, 31 bp, Homo sapiens; identical to SEQ ID NO: 72925
  chr7:2051726-2051757
  hypo

SEQ ID NO: 155429 - DNA, 30 bp, Homo sapiens; identical to SEQ ID NO: 72926
  chr7:2052459-2052489
  hypo

SEQ ID NO: 155430 - DNA, 301 bp, Homo sapiens
  chr7:2053260-2053561
  hypo
gcggcgtgtgccagcgaggccagaagaccctggcaggtatcccaccacgcccaggcggggctgcactgtgcccacggagaagtggtgcaaatcctgagaggagaacacgggcctttcaagctccaggctgggaacggtgtgctaggagcccccggccccagtgtagatgagaagtgtggatggggagtgtggacgtggcctccgcccaggccctgcgatacccagctccttcttcccactgcacaggtgagagctgctcagagctagacaagggcacggagcgtcacggtggcccatgggg

SEQ ID NO: 155431 - DNA, 30 bp, Homo sapiens; identical to SEQ ID NO: 72928
  chr7:2054049-2054079
  hypo

SEQ ID NO: 155432 - DNA, 30 bp, Homo sapiens; identical to SEQ ID NO: 72929
  chr7:2055084-2055114
  hypo

SEQ ID NO: 155433 - DNA, 86 bp, Homo sapiens
  chr7:2056517-2056603
  hypo
cccattgacttttatcgtttcaagccagttaccggagttgtcagtaccaacgcgcggacgccgcgcaaggccggggcgggggactt

SEQ ID NO: 155434 - DNA, 170 bp, Homo sapiens
  chr7:2056885-2057055
  hypo
tgctgaacaaacaggcggctggcagtgctgacgggggcgtcccagactcgctttaagaagcacccagcagagttacattgtccactggctgctcctccttaggtacagaaacgtcccggttctaaggaatagaatgtgctcatcatgcaacgaacggccatgtgaagaga

SEQ ID NO: 155435 - DNA, 43 bp, Homo sapiens; identical to SEQ ID NO: 72932
  chr7:2067733-2067776
  hypo

SEQ ID NO: 155436 - DNA, 176 bp, Homo sapiens
  chr7:2068932-2069108
  hypo
aacagaaaccaaacacgaaagattacacgctgcatggctccatttcacaacatttttaaatgggcagaactggcgtgtgagaatcgggaaggcagggctttgggggaggtggaggagccggcaggtgaacttgggagccctggtgacaccgtgttcccgaccgtggagctgagaca

SEQ ID NO: 155437 - DNA, 135 bp, Homo sapiens; identical to SEQ ID NO: 72934
  chr7:2069774-2069909
  hypo

SEQ ID NO: 155438 - DNA, 166 bp, Homo sapiens
  chr7:2070135-2070301
  hypo
ttagagcctgttacacgcgggcccctgaacagccttgatgtgcagaggcccctgggtaagccagggcgccagtgacaggtggccggaccccgcaggagtggaacctgcccatctgcgcttgacgaaaatgcctccaaaacaaaccagacgccgccccggcagagga

SEQ ID NO: 155439 - DNA, 267 bp, Homo sapiens
  chr7:2071760-2072027
  hypo
tgacccctcattcatgcgggacgcccggccccagtccctgtccagtgcctggaacagaacaggtgctcaggaactgtgtgttcaattaaaaaatgaacgagtgaaaccatcagccaatcagtcctcggaaccacctcctgaggcaggctggagtcctccctttcagatgaggacaaggctccaggggaaggcgcgcgccccaggtctccagcctccgtgaagccgagcctgggctcttggccatcatgctaacgggcaggtgggaaa

SEQ ID NO: 155440 - DNA, 30 bp, Homo sapiens; identical to SEQ ID NO: 72937
  chr7:2072888-2072918
  hypo

SEQ ID NO: 155441 - DNA, 30 bp, Homo sapiens
  chr7:2074848-2074878
  hypo
ctgagaaatgtaaaccggagtccaggctcc

SEQ ID NO: 155442 - DNA, 145 bp, Homo sapiens
  chr7:2076007-2076152
  hypo
caggacaggggaggacgatgcattcctgcgccacctccgtgcggggaaccagagctccagcctgaatcccttagggttggctcagagtcctctctggatgaagtgtctagtctgaggaggacaatccatccggtcgtgagtttgg

SEQ ID NO: 155443 - DNA, 30 bp, Homo sapiens; identical to SEQ ID NO: 72938
  chr7:2076618-2076648
  hypo

SEQ ID NO: 155444 - DNA, 106 bp, Homo sapiens; identical to SEQ ID NO: 72939
  chr7:2083090-2083196
  hypo

SEQ ID NO: 155445 - DNA, 30 bp, Homo sapiens; identical to SEQ ID NO: 72940
  chr7:2086318-2086348
  hypo

SEQ ID NO: 155446 - DNA, 204 bp, Homo sapiens; identical to SEQ ID NO: 72941
  chr7:2091643-2091847
  hypo

SEQ ID NO: 155447 - DNA, 32 bp, Homo sapiens
  chr7:2092073-2092105
  hypo
gcaggcagggagggcgccggacagctcactag

SEQ ID NO: 155448 - DNA, 641 bp, Homo sapiens
  chr7:2094461-2095102
  hypo
gctgaacttgagctgcgctcggctgggccgtgccctcgcagtgatgggagagcggggaacacatgcggtactcagggctgctccttggacatccccagaggctaaagcccaggagacaagatgggttgcatgggtcacagtagcaggaggagccgagcggtggggccgggactcagggacgacggcagggcccgaactccatctgtcctgtgttcacgtacacagtgcagagcttgtcacaaagggcgggggcagcagagacagaggaagcggggccaagcctccctccaggcactaggcaggcagcacagcgaggcggtgcgtgccacgacagcaccaggcagaggcacgccacaaaccctgacagaaagcagggagtgaatgagcacacgccaggacgtgtgtcctctcggaggcagacagtgaggacagcaggtaggcagtggtcttcagagggagctgggggtgagccaggcctagggccagtcagcagcatccacatcagctgtgtgacccggcccctgtggcccgcatcgtagggcacgatccaggcctctgccacccctgacagaactggcccggagcagcacaggagcgccaccagggaaccggtgagacatggggaccgcaggctgcacccc

SEQ ID NO: 155449 - DNA, 48 bp, Homo sapiens; identical to SEQ ID NO: 20984
  chr7:2099513-2099561
  hypo

SEQ ID NO: 155450 - DNA, 170 bp, Homo sapiens
  chr7:2100208-2100378
  hypo
aacactggaaggaggaggcaacgacgacagcatggaatcgtaaacaaataaaaaaagagcccatggaacacaccagaaagccctgaagtggacggccacgaggggtccccgggccacggccatggcagcgccacgcgtggggagaaggcggccttgcaatagaggctgcc

SEQ ID NO: 155451 - DNA, 313 bp, Homo sapiens
  chr7:2102521-2102834
  hypo
aacacgctgcattcccagggacgaaggtcaaaaggataacgctaagataaaaacaaagagaagccacagaagcgtggctctatgtacagaaaacataaaaatgggaaaagcggagcaatgtttaaagatatacacacaattaaactagaaagaaaaatgagggaagggactgctctacgtttagagcacggctccgtctgacagcggaggctgttctgtttcttacactgggactgagacacgggaacttgctgtattctttgagctgtatgtatatgttctatatgatctttgcacacgcaatgtgtttcac

SEQ ID NO: 155452 - DNA, 47 bp, Homo sapiens
  chr7:2105353-2105400
  hypo
cgacgtgagtccgacgccgctggacacccagcgtcaactgctccccc

SEQ ID NO: 155453 - DNA, 30 bp, Homo sapiens
  chr7:2105855-2105885
  hypo
agccctcctgggtgcgccttgagagaaggc

SEQ ID NO: 155454 - DNA, 30 bp, Homo sapiens; identical to SEQ ID NO: 72948
  chr7:2106676-2106706
  hypo

SEQ ID NO: 155455 - DNA, 240 bp, Homo sapiens
  chr7:2108163-2108403
  hypo
gaggcaggcagggggagtctccgcccagcaaactggacacccgccctggcccagagagcatctggggacagattgacttctttcccgccttgtcttctgaaatttcagtgcccaaggaacattttaaacagaactcacaaaaaccgtctttcatgctccagcgacctctgctcacggtgccaggcatcagaacccccgcaggcactgaggcttagagtcgggccatggagccacccacag

SEQ ID NO: 155456 - DNA, 229 bp, Homo sapiens; identical to SEQ ID NO: 72950
  chr7:2110059-2110288
  hypo

SEQ ID NO: 155457 - DNA, 405 bp, Homo sapiens
  chr7:2113541-2113946
  hypo
gcaagcactcgggcccgcgtcatcagggccacatccccaaggcctgatggctgacactgaaatcttctgaacaacagaactagactgtaaaaatccaacaccaagacgtgacaaggagacgacactgtggaatgctcgccaagaaccatgtccgggatgtttgccactcacacctgactggcaggcgagtctacccagtctgttcagcacacgggatgtgggtgaggacggccacatgccgttccaggcagcagagatggcagcacggaacaccgcagccagcctgggctcgctgggcctccattctactggggtgggaatctcaagcaaagaagccacgcgtgtggcatgagcagagaatctcacggcgggtgcaggtactgaggtcaccgagagcagaaggaa

SEQ ID NO: 155458 - DNA, 30 bp, Homo sapiens
  chr7:2115532-2115562
  hypo
gcaagggcaggcatcgcacaaacaggcatc

SEQ ID NO: 155459 - DNA, 30 bp, Homo sapiens
  chr7:2118261-2118291
  hypo
ttcccactctcgcccgagcagctttcggct

SEQ ID NO: 155460 - DNA, 43 bp, Homo sapiens; identical to SEQ ID NO: 72952
  chr7:2120253-2120296
  hypo

SEQ ID NO: 155461 - DNA, 30 bp, Homo sapiens; identical to SEQ ID NO: 20987
  chr7:2122327-2122357
  hypo

SEQ ID NO: 155462 - DNA, 138 bp, Homo sapiens
  chr7:2122562-2122700
  hypo
agaagtcaataccccgttaggtgtggcaccttcatggggcctctgctgtctctcgcgctgcagggagagctcccctgcccgtcaatcaggaacgggtggcacaggcccccagggggaagagccgtccctccctgcgcg

SEQ ID NO: 155463 - DNA, 30 bp, Homo sapiens
  chr7:2128706-2128736
  hypo
gagagcggctcacacggccgactcgggccc

SEQ ID NO: 155464 - DNA, 30 bp, Homo sapiens; identical to SEQ ID NO: 72955
  chr7:2130393-2130423
  hypo

SEQ ID NO: 155465 - DNA, 48 bp, Homo sapiens; identical to SEQ ID NO: 72956
  chr7:2130635-2130683
  hypo

SEQ ID NO: 155466 - DNA, 30 bp, Homo sapiens; identical to SEQ ID NO: 72957
  chr7:2130946-2130976
  hypo

SEQ ID NO: 155467 - DNA, 30 bp, Homo sapiens; identical to SEQ ID NO: 72958
  chr7:2135933-2135963
  hypo

SEQ ID NO: 155468 - DNA, 80 bp, Homo sapiens; identical to SEQ ID NO: 72959
  chr7:2138294-2138374
  hypo

SEQ ID NO: 155469 - DNA, 30 bp, Homo sapiens; identical to SEQ ID NO: 72960
  chr7:2142538-2142568
  hypo

SEQ ID NO: 155470 - DNA, 30 bp, Homo sapiens; identical to SEQ ID NO: 20988
  chr7:2143492-2143522
  hypo

SEQ ID NO: 155471 - DNA, 159 bp, Homo sapiens
  chr7:2147798-2147957
  hypo
gtagcaaatgaattccggtgggattcatgtccgctgatcactattcaggccccacctcattatcatagcaggcttaattggcatttcatccccacattgtgtctcacaaacgaacaaggtgtaattatggtaaaaagagcgctccgacggttttggttt

SEQ ID NO: 155472 - DNA, 50 bp, Homo sapiens
  chr7:2148950-2149000
  hypo
cacacaatcaggtgacgagaagcggctgcagcagccgcagggaacacggc

SEQ ID NO: 155473 - DNA, 30 bp, Homo sapiens; identical to SEQ ID NO: 72963
  chr7:2155029-2155059
  hypo

SEQ ID NO: 155474 - DNA, 196 bp, Homo sapiens
  chr7:2158522-2158718
  hypo
gaggagaagccaccccgcgattgtgcctcccgtctctctccttgacctgcagtgcagacctggagctgagacgtcctccatcaaggccaaaagctccacacgcccagctgcctgggctcgccccagcctccagccccacgtgacggtctgcctcccagacccctgcgcggacaagcaggagcggctgggctcgagc

SEQ ID NO: 155475 - DNA, 171 bp, Homo sapiens; identical to SEQ ID NO: 72965
  chr7:2160715-2160886
  hypo

SEQ ID NO: 155476 - DNA, 164 bp, Homo sapiens; identical to SEQ ID NO: 20992
  chr7:2162502-2162666
  hypo

SEQ ID NO: 155477 - DNA, 884 bp, Homo sapiens
  chr7:2162965-2163849
  hypo
agctcagccagctcagggactgagatgaaactgcacgctacagcttggagacattgcgggagggctcccagcaagcgaaactgggctggggtgcaggacggagagagggcgctggtgaggccctggtcctgtgtgtgagggcggctgacacccggtgggctctgtttgcgcttgagctggtgacggtagggtttccttccctgtcaagcaggagagcaccccagtccacccagggagcacccaggaggagccagccccgccaagggcacgcatgggaggcgtcaatccgctggagggcagcagccctcaagcgaggactcacggggacatgcgataccaggaagcgagtcggaggcaattaagcctgtttcagagtgcacttcgcaggcggcgctgaatcgatagatcctccggcggcgtggtgctgcaggtgaggaatcagtcaggtaaatgcctcccaatctgttcctgctgtgcaaagaatcagcgctgtttaccactcaagccagaaataaataaataaagctgccaattagccagcgcccttttccgctctggcaagggctttttagcttctccaaatacaccagagtcctgcaaggctgcacacaagcaaaggcagcccaggcagcaaggggcgggggcttaggccccgggggcaagaactctgcttcctgggaagccccctgtagccaggtcaggctcctcctctagacggggaagccgggcaaacacctccaggagcaaggcgaaggctctcagtacccccagtacagatgcagccgggagcccccagctctccacaggtcagaggccacgccacgcccctgctcaactcgcagagcagcaaggcaggaggggcaggccatcgggcagcggtgcag

SEQ ID NO: 155478 - DNA, 30 bp, Homo sapiens; identical to SEQ ID NO: 72969
  chr7:2165797-2165827
  hypo

SEQ ID NO: 155479 - DNA, 376 bp, Homo sapiens
  chr7:2169011-2169387
  hypo
gaatgtggacaggcacgagcaggccaagccacccagcaggctcacggcggctcctgtccacacggctcctgctaggcagcgcccctcctgccgtgggtctgaatccgtcacctgccagtgacgaggacgcgaggaacacgcgcttctcagagtccagtcacacacgaggcagcaggacaggaaccccaggtgcctcccgtcatgaggagagagcacacacacgatcccatccctctggaggctgcctgtctaacaaagatggtctccctgacgagagcaaggtggcaagacagacacagctggacacgcaggctcgagcttctgcccagagatcagaaaaacaaatgcagttatttttacacgcatgtcagagaca

SEQ ID NO: 155480 - DNA, 31 bp, Homo sapiens; identical to SEQ ID NO: 72971
  chr7:2172532-2172563
  hypo

SEQ ID NO: 155481 - DNA, 30 bp, Homo sapiens
  chr7:2174636-2174666
  hypo
acattcaatgactgacgttcattaatgatg

SEQ ID NO: 155482 - DNA, 30 bp, Homo sapiens; identical to SEQ ID NO: 72972
  chr7:2182167-2182197
  hypo

SEQ ID NO: 155483 - DNA, 159 bp, Homo sapiens
  chr7:2183889-2184048
  hypo
tgaagcacagcgcagcgcatggtgagggcagatgcgagacaaacactgactgctctcagcgtccccatcgtcattcatcgccgggattacagatgatacacctgaaccctggagccctcacggggtcctgagaggccccgctcccgccaccagccctct

SEQ ID NO: 155484 - DNA, 30 bp, Homo sapiens
  chr7:2185956-2185986
  hypo
acagggcaccgcctcgaagagggagcaccg

SEQ ID NO: 155485 - DNA, 30 bp, Homo sapiens; identical to SEQ ID NO: 20995
  chr7:2191748-2191778
  hypo

SEQ ID NO: 155486 - DNA, 203 bp, Homo sapiens; identical to SEQ ID NO: 43809
  chr7:2195724-2195927
  hypo

SEQ ID NO: 155487 - DNA, 447 bp, Homo sapiens; identical to SEQ ID NO: 72976
  chr7:2196793-2197240
  hypo

SEQ ID NO: 155488 - DNA, 92 bp, Homo sapiens
  chr7:2206522-2206614
  hypo
ccactacacacctgggcggcgcactccgctcacaaagcactcttccaggaagggccccgggctgctggagactgaaccggaatctgcctaac

SEQ ID NO: 155489 - DNA, 612 bp, Homo sapiens
  chr7:2208344-2208956
  hypo
cgcgtggagggcgccacgaggtcaaggtcctgaggccggaacaccaaggagctctgggagggtggaggaagaacacaagcctggagcagggggcagacacacggggcgtggggcccagaggccaccgggaggactcaggttttattccgagtgtgctaaggagccagggattgtggctgaagcgggaggaacacgctaaggagccagggatggcggctgaagcgggaggaacacgcgctcggacttgctgatgggctcttacgtgggcttttccccagctgaagaatgagttactaaatgtgttttaaaatgcaaaaatgtgtacccggtgcttgtcctggcgctgttcagaacaggaagaaccggaaacaacctgaatattcacaggaggcaaacgatccgtgacaggacaagcgtgggatggcctcctgtgtggcagaaaggacattcgggacctatgacgcaaacgcaggcggctacacattcgcctgcaggactgcaccttttaaagtccgcatgtagacagtgaaaatctacaaaggtaaaccggaatctcctaagagcgggtagggatgcgactggtgggattacgggggattggcagtcttcttt

SEQ ID NO: 155490 - DNA, 30 bp, Homo sapiens
  chr7:2209213-2209243
  hypo
aggtgccaggctccgcgctgcgtgcaatta

SEQ ID NO: 155491 - DNA, 694 bp, Homo sapiens
  chr7:2211988-2212682
  hypo
ccagactccaactctcgtctgactctcgcccctgcaggcctcgactccacacagggcccagggcccagcagcaggaagtcacggtgccgctgcgaaaggccccgggtctccagagaacatccacgcctcctcaggacaaagggctcctctgggaaaaggcacaaacactgcctgcaccgtgtgcttcccagaacagaaaacgggagggcgccgccgccaggacggggcagcccaggcgcagccactcgccaccttggccggctcaacttcccagcagcatccagcaaagccgtcagtagtcctcgtggtgccagctcgagtgcctgatgggccctcgcacgggtctccgtgggacagaggtaagggatagaggaccgaggccctaaccagctgagaacccacgtggctggccgcagtcccatcccagccctgctggctgccaggtcaaggctggagccccagatgggctcccgtggggcgaagtcagaagtcagaggtgctcgaggctgccccatcagatggctcctgggagcgtgcacaccgcggtctgtgcgcacagaagaccccagacggtgccaggcaccctgcacacatgcctctggctgagactacagcacctgctagcatgcccctggcattcccagtcgaatctccttttcttccatgtatacgtattcctcgtgaagttacataa

SEQ ID NO: 155492 - DNA, 31 bp, Homo sapiens; identical to SEQ ID NO: 21000
  chr7:2214040-2214071
  hypo

SEQ ID NO: 155493 - DNA, 241 bp, Homo sapiens; identical to SEQ ID NO: 72980
  chr7:2222235-2222476
  hypo

SEQ ID NO: 155494 - DNA, 748 bp, Homo sapiens
  chr7:2232843-2233591
  hypo
aggtgcaggctcacaaaccatcggcccaagccacgccccagcatactcacttgcccaagcaaccggggtgagacaagggccacccagctccgacagccaccacgtcctggagagaaagcgtccccgcccagaggacggtccttgtcctagaacagcaaggccctccaactcttggtcctcaaagcccttccccgcctccgcacccagcaccacattgctgtgctgagtttcagcacagggaccgtgcgtcctgctctctgctgcatctcccagccagtatacaccacggtacgtcataagccctcaacaaatatttgttgaatggaacagacgtgatcacaatatgtgctcctgggaaccctcggctaccagaaaaaaaggcgagacagaaatgagcacttctcaaccctgggagcaaatttataagggttttatcccttcaaaattattaccaaggggtaacacggccgcgggtaactccagattcctccggaaaacctcactgtgcactgccaaggctccagccagagcaggtgctgagccgcgatccgggagacgccagtctcaccctaggctctcttccacaaccaccctcaggcaaggccacaccgtcgcccaactgtcccaaatctggaaaggaagaaaccaccatgatgctgtgtgggcagcaaaaggctctgcatgggaaagaaaagctgcagggaaaaggcagcaaggctctgcatggatttttttttttttttttttt

SEQ ID NO: 155495 - DNA, 185 bp, Homo sapiens
  chr7:2236060-2236245
  hypo
caactaagatactcccgcaaaacgctcctgcggcatcttccaaaagattgcatctgaggaggcacccctgttgttttcattgtttaaagctgtctgtgtgtgtgcactacgtgggcagactgtgctgtgctcgtcacagcgtcgccagagccagcccaaagcctggcaaacggcaggtctccaaa

SEQ ID NO: 155496 - DNA, 138 bp, Homo sapiens; identical to SEQ ID NO: 72983
  chr7:2237099-2237237
  hypo

SEQ ID NO: 155497 - DNA, 340 bp, Homo sapiens; identical to SEQ ID NO: 21003
  chr7:2237967-2238307
  hypo

SEQ ID NO: 155498 - DNA, 111 bp, Homo sapiens; identical to SEQ ID NO: 72985
  chr7:2241773-2241884
  hypo

SEQ ID NO: 155499 - DNA, 30 bp, Homo sapiens; identical to SEQ ID NO: 72986
  chr7:2250259-2250289
  hypo

SEQ ID NO: 155500 - DNA, 30 bp, Homo sapiens; identical to SEQ ID NO: 72987
  chr7:2252758-2252788
  hypo

SEQ ID NO: 155501 - DNA, 275 bp, Homo sapiens; identical to SEQ ID NO: 21004
  chr7:2255762-2256037
  hypo

SEQ ID NO: 155502 - DNA, 101 bp, Homo sapiens; identical to SEQ ID NO: 72989
  chr7:2256930-2257031
  hypo

SEQ ID NO: 155503 - DNA, 73 bp, Homo sapiens; identical to SEQ ID NO: 72990
  chr7:2259944-2260017
  hypo

SEQ ID NO: 155504 - DNA, 30 bp, Homo sapiens; identical to SEQ ID NO: 72991
  chr7:2260984-2261014
  hypo

SEQ ID NO: 155505 - DNA, 30 bp, Homo sapiens; identical to SEQ ID NO: 21006
  chr7:2261322-2261352
  hypo

SEQ ID NO: 155506 - DNA, 93 bp, Homo sapiens; identical to SEQ ID NO: 72993
  chr7:2262277-2262370
  hypo

SEQ ID NO: 155507 - DNA, 510 bp, Homo sapiens; identical to SEQ ID NO: 72994
  chr7:2263997-2264507
  hypo

SEQ ID NO: 155508 - DNA, 661 bp, Homo sapiens; identical to SEQ ID NO: 21010
  chr7:2264961-2265622
  hypo

SEQ ID NO: 155509 - DNA, 20 bp, Homo sapiens
  chr7:2279837-2279857
  hypo
cagagcgagactctgtctca

SEQ ID NO: 155510 - DNA, 30 bp, Homo sapiens; identical to SEQ ID NO: 72997
  chr7:2289660-2289690
  hypo

SEQ ID NO: 155511 - DNA, 30 bp, Homo sapiens; identical to SEQ ID NO: 21012
  chr7:2290711-2290741
  hypo

SEQ ID NO: 155512 - DNA, 458 bp, Homo sapiens
  chr7:2292990-2293448
  hypo
aaggtgcggggtggacggagaggccttgcagccttctgcccacacggggtcacgcttcatggctcgggtgtcatggtgccattcatggcaactgagaacctgtctctgcagaggggcgtcagaaggcagcgcagcccaagactcgggtggactagggactcacgggacagcccacccatcgggctccaaagggaacgctgccctctgctcatctggccagaaggaagcagcccacctcacagcaggaaggcagcagcagaacccacagggcagggcaggctgggcccgagccccacagccaccgagtcagcacagcccacggggccagaaggcacggccgttccctctggccggctcgcagtggacgatggatcacctgcctgcggggcacacacaggagtcccctctccatcccacggccgtgagctgcccgtaggtacaggcggaagggaagcacc

SEQ ID NO: 155513 - DNA, 195 bp, Homo sapiens; identical to SEQ ID NO: 21013
  chr7:2293742-2293937
  hypo

SEQ ID NO: 155514 - DNA, 491 bp, Homo sapiens
  chr7:2294447-2294938
  hypo
agagaaccccaccacctctctcgaccaggctagcaggccacagggcgaaggacagtgtggcccagctgcccccatggtccacggatgcgcctcccgacccgcaggcgtgagctcctctgctccagctgcagcacggggcgtggcggggaggggagctgccgtccaaagggaattacaccgggacacaccgtttggaaagaggttttagtgcggccgcagggagcaccacctcagcctcaggcgctagtgaggacacaggccgtcctccggcggggagcacggtggggtcagggtgctgtgtggtcccgcaaagaggcagctgagcttgggcctcaggtcgttccacaccttgctcatctgaaagggaagcgaagagaacaagatcagcaggcggggccggggctcctcctcacgctctgatcccagttccttcgcctgccagtgacagggagggaggggccctcaggtgcgccagctcctcaaacctctgg

SEQ ID NO: 155515 - DNA, 30 bp, Homo sapiens; identical to SEQ ID NO: 73001
  chr7:2296688-2296718
  hypo

SEQ ID NO: 155516 - DNA, 30 bp, Homo sapiens; identical to SEQ ID NO: 73002
  chr7:2297038-2297068
  hypo

SEQ ID NO: 155517 - DNA, 427 bp, Homo sapiens
  chr7:2298035-2298462
  hypo
ctttctcaggccttcgcaaagccggcgactctcccaacacatatgctgggagagccagatgccccagaccccccgacccctaaggctccatcaagcactgcagaaaacccgagttcccatataacgctgtgagccgtgtgcaaaacgggcacgcccaggaggggcacggaggagaacaagggtgttgtctccgcatcagtaacaggagagagaaacgcaggcctaggaagggggcacagggaagggggcgcagggtaggtaggagagacagcagctgcaggaaggacgtgctgctgatccaggaagagaggcggccgccccaggctgcacgcagaagcaccacactcggcggtgggggcagcggtggacacaggctcctcttcggccctcacacaaggctctgtgcgggcagcacagccacagagag

SEQ ID NO: 155518 - DNA, 266 bp, Homo sapiens
  chr7:2299115-2299381
  hypo
atggaacgagttttacgggacacagccctggaatgggagccaggggtgccgcccaggccctgctgcaccccaggggaccctaagataccccttccaccctccagacctcaggccgactgaacccggaggctccccggccaccaaccccacacccaaagcagctgggattccagccagtaaaatgtgccaggagaagaggtgtgttaagagtttctaaaactctagagagaaaacgccagctgaccgcaggtgcccagctcccacct

SEQ ID NO: 155519 - DNA, 150 bp, Homo sapiens; identical to SEQ ID NO: 73006
  chr7:2300172-2300322
  hypo

SEQ ID NO: 155520 - DNA, 35 bp, Homo sapiens; identical to SEQ ID NO: 21017
  chr7:2300781-2300816
  hypo

SEQ ID NO: 155521 - DNA, 30 bp, Homo sapiens; identical to SEQ ID NO: 21018
  chr7:2303966-2303996
  hypo

SEQ ID NO: 155522 - DNA, 20 bp, Homo sapiens
  chr7:2312473-2312493
  hypo
aatactttttttgagacgga

SEQ ID NO: 155523 - DNA, 143 bp, Homo sapiens; identical to SEQ ID NO: 73010
  chr7:2313677-2313820
  hypo

SEQ ID NO: 155524 - DNA, 30 bp, Homo sapiens
  chr7:2314692-2314722
  hypo
ccaggagatgggctcgctccctccgccccc

SEQ ID NO: 155525 - DNA, 30 bp, Homo sapiens; identical to SEQ ID NO: 73011
  chr7:2314932-2314962
  hypo

SEQ ID NO: 155526 - DNA, 30 bp, Homo sapiens; identical to SEQ ID NO: 21019
  chr7:2316621-2316651
  hypo

SEQ ID NO: 155527 - DNA, 30 bp, Homo sapiens
  chr7:2322288-2322318
  hypo
tcccaccccagagaccgcagctttagaaac

SEQ ID NO: 155528 - DNA, 22 bp, Homo sapiens
  chr7:2323843-2323865
  hypo
cgtgagccaccacacccagcct

SEQ ID NO: 155529 - DNA, 31 bp, Homo sapiens; identical to SEQ ID NO: 73013
  chr7:2324509-2324540
  hypo

SEQ ID NO: 155530 - DNA, 553 bp, Homo sapiens
  chr7:2328671-2329224
  hypo
tgtttttatattatgtaaccacggtcgaaagtcagttcctttgttcctgacgtctttccctcagcatcaggctgcgagacctgttgtgcacgtggctgtggggcgatggctgcccctgtggtgggcgccgctgcgtgactatgtgtcctcgtcgcctcctcctccctctgctgcggggcatctgggagggttccagcacctccctgttccacacggtgctgttacgaacattccagcacgtggctcttggtggacatatgtgtgcctttctgttggctccataacatatctacaagtgaaattgctggatcacgggatctgcatatgttcagcttggtaaatatttcagttttccaaagtgactgagccaattcacactcccaccagcaagagctccagctgcctcgcacacgagccaacattcagcattttccgtccgtcttccctcattccaggaggactgtgcctcttttaacacagttgcgatccattagttcactgttccatctagatgcttttccctttacgttataaccaccgttccatattccca

SEQ ID NO: 155531 - DNA, 396 bp, Homo sapiens; identical to SEQ ID NO: 73015
  chr7:2349363-2349759
  hypo

SEQ ID NO: 155532 - DNA, 153 bp, Homo sapiens
  chr7:2360916-2361069
  hypo
atacatcgtcagctccgctgctggatccctctagtgtttggagagtgccttgggaatgtgcaccgacacgtctgccttcagcagatcctccccacagaatactattcctgcgtattcagggaactgtaaaaagaaaatggaatttcttttttt

SEQ ID NO: 155533 - DNA, 30 bp, Homo sapiens
  chr7:2403378-2403408
  hypo
caattgaagaaagagcggtgtgtatttgct

SEQ ID NO: 155534 - DNA, 30 bp, Homo sapiens; identical to SEQ ID NO: 73017
  chr7:2405735-2405765
  hypo

SEQ ID NO: 155535 - DNA, 128 bp, Homo sapiens
  chr7:2412472-2412600
  hypo
agatgatgacccagtcgctgcccaacagtgagcatttgactggcctaggaccactgctgggcaggccgggactcgcctatgaatggggtgtggcctcggctgatggaagtgagcgatggcctggaggt

SEQ ID NO: 155536 - DNA, 30 bp, Homo sapiens; identical to SEQ ID NO: 21021
  chr7:2414933-2414963
  hypo

SEQ ID NO: 155537 - DNA, 30 bp, Homo sapiens; identical to SEQ ID NO: 73019
  chr7:2418600-2418630
  hypo

SEQ ID NO: 155538 - DNA, 30 bp, Homo sapiens; identical to SEQ ID NO: 73020
  chr7:2419152-2419182
  hypo

SEQ ID NO: 155539 - DNA, 440 bp, Homo sapiens; identical to SEQ ID NO: 73021
  chr7:2420147-2420587
  hypo

SEQ ID NO: 155540 - DNA, 261 bp, Homo sapiens
  chr7:2448728-2448989
  hypo
tggtgtactacaaggcgcagctgtggatagcctcgccgcaatgatagtaatttatgtaaacactgactgctgctctaattgaaattatgatgcacctgggcagagaaggtgtggggaggagagcgctgcattttcgcctgtcgccttgggaagtcagtcgctaatgccccaagctgaacaaccaaggttcactctgaaggcagacattaaaagaattagctaaaaagaattatggagcgggtagggcgtggtggttcgcac

SEQ ID NO: 155541 - DNA, 91 bp, Homo sapiens
  chr7:2464828-2464919
  hypo
actccgtctcaaaaaaaaaaaaaaaacaacaaacaaaaaaaaaacgtaaaaaaacaaaccccggcccagtgaggaccgcgcttagtcagca

SEQ ID NO: 155542 - DNA, 30 bp, Homo sapiens; identical to SEQ ID NO: 73022
  chr7:2465680-2465710
  hypo

SEQ ID NO: 155543 - DNA, 215 bp, Homo sapiens
  chr7:2471873-2472088
  hypo
ccactccctgggaggcgtcctcttcttgggagttgtgggcaatattactttcccgccagtggcgagtgtcagcacatgtggagtactgccagccagggaagcacgcgagccttggcgtccagggtcattactggtgctcgggcacatggatgtgtagactccctgcactgctgacctcagcctccagcccctctggagggcgagctgatatcacg

SEQ ID NO: 155544 - DNA, 30 bp, Homo sapiens; identical to SEQ ID NO: 73023
  chr7:2472349-2472379
  hypo

SEQ ID NO: 155545 - DNA, 479 bp, Homo sapiens; identical to SEQ ID NO: 73024
  chr7:2472799-2473278
  hypo

SEQ ID NO: 155546 - DNA, 338 bp, Homo sapiens; identical to SEQ ID NO: 21024
  chr7:2473779-2474117
  hypo

SEQ ID NO: 155547 - DNA, 34 bp, Homo sapiens
  chr7:2476916-2476950
  hypo
agtgggagggcacctcgcccgtttacagttgggc

SEQ ID NO: 155548 - DNA, 281 bp, Homo sapiens; identical to SEQ ID NO: 73027
  chr7:2477348-2477629
  hypo

SEQ ID NO: 155549 - DNA, 30 bp, Homo sapiens; identical to SEQ ID NO: 21025
  chr7:2480819-2480849
  hypo

SEQ ID NO: 155550 - DNA, 549 bp, Homo sapiens
  chr7:2499647-2500196
  hypo
cagagagaatctgagcggcacacaggctggggaggggttggccgtgcctcggacaccggcctctgcagcttgagcctattactgacccaagtcccagtatcaccaggtcccagtgattcctcacagcagccggcgtccctccccttgtctcattcctgctggccccgacttcctagctccgtgcttctccaggcctcagtttcccctcttccaaggccagggcccgctccccttcctggggctgccaggagcctagagcgtgggaaacggctctgctgtgtgtccggggccaaagacacgcaggggcggtcgtgccagccaggctctcgggctcttgggcgctcgccacactctggcggccaaacaatgcccacctctgagtagagctgtgggtggcggtaaccatggtgaggggccctccacgccaactgcccatccggggtcagccgggcccgtggccctggttccggctttgtctcggggctggaactgggcccagggatgggctctgaatggctggcgggtgggagggcactgcccaccacatag

SEQ ID NO: 155551 - DNA, 3 bp, Homo sapiens
  chr7:2500212-2500215
  hypo
gag

SEQ ID NO: 155552 - DNA, 176 bp, Homo sapiens; identical to SEQ ID NO: 21028
  chr7:2539249-2539425
  hypo

SEQ ID NO: 155553 - DNA, 2 bp, Homo sapiens
  chr7:2539829-2539831
  hypo
ct

SEQ ID NO: 155554 - DNA, 43 bp, Homo sapiens
  chr7:2540075-2540118
  hypo
cgctctgggaactccagtggtgggaagcgcgtttgccaggtgg

SEQ ID NO: 155555 - DNA, 372 bp, Homo sapiens
  chr7:2544412-2544784
  hypo
cgtgggaaggggcttcgggggaggtccctgtggacacacctgagcagcccggcctcctgggggctgcgggagaggcagcagagccagcccgctcaacagcagggccacaattgcctgtggcccctggggagtgacaccccccccccccccccccggctccacagaggcgaggatgggaagaggcggaggaaccggctgtgcgggacacctgagccccggaccaggcctcccagggggtggccgccttggggctgagaggcagagaggaggtcagttcccaccgcctccccgcagaggccctgggaggaagcgggtcagcaggtggtgggccagctggggcctgggcctgccccaacccgcatctgctgggca

SEQ ID NO: 155556 - DNA, 30 bp, Homo sapiens
  chr7:2545003-2545033
  hypo
cagcaggtggacgctcggagacctggcttc

SEQ ID NO: 155557 - DNA, 31 bp, Homo sapiens; identical to SEQ ID NO: 73034
  chr7:2546548-2546579
  hypo

SEQ ID NO: 155558 - DNA, 78 bp, Homo sapiens; identical to SEQ ID NO: 43815
  chr7:2555343-2555421
  hypo

SEQ ID NO: 155559 - DNA, 30 bp, Homo sapiens; identical to SEQ ID NO: 21029
  chr7:2557159-2557189
  hypo

SEQ ID NO: 155560 - DNA, 30 bp, Homo sapiens
  chr7:2564718-2564748
  hypo
ggaggctacggccgccgggcccagcttgaa

SEQ ID NO: 155561 - DNA, 257 bp, Homo sapiens
  chr7:2565008-2565265
  hypo
ccggcatgccctcccccgatggccctgccttgtcctcaggtggttctgccacgtggacgatgacaactacgtcaacctgcgggccctgctgcggctgctggccagctacccgcacacgcgggacgtctacgtcggcaagcccagcctggacaggcccatccaggccatggagcgggtcagcgagaacaaggtggtgagtgcctgcccctcccagtcccccacgcccacgcggagcgcacacccggagtgggggtggg

SEQ ID NO: 155562 - DNA, 112 bp, Homo sapiens
  chr7:2565882-2565994
  hypo
gtcacttcatgaatacggctgagcggatccggctgcctgatgactgcaccatcggctacatcgtggaggccctgctgggtgtgcccctcatccgcagcggcctcttccactc

SEQ ID NO: 155563 - DNA, 790 bp, Homo sapiens
  chr7:2566358-2567148
  hypo
caagggaggccagggcagggccgttgcctcactcagggctgtgtggccagcctggggcggggcccagggatgtcgggcccctcccggcatcactccgcccgctccccacaggtgacgctgagctacggtatgtttgaaaacaagcggaacgccgtccacgtgaaggggcccttctcggtggaggccgacccatccaggtaaggaaaccccggcccagatgggcttgcgtagggtggcctaggggcgtcagggggcctcgtggagctgcagcagggtctctctaagcggcatgactctacatagaggtgtcccccggagtcctgcttgctcggggtggggccgccagtgttgtgggactgcaaatgggagctcagcacctgcctgccacccacgcagaccagcccctgctctgttcccacaggttccgctccatccactgccacctgtacccggacacaccctggtgtccccgcactgccatcttctagtggccatggctgagacccaatccctgggcgcccctggtatccaaagggcccagggaccctgttgcgctgccctggcctcggcattcgaggctcccctagggccgtgcctgtgcgtgtgcgtgtgcgtgtgtgtgtgtgtgtactgcatgcccacccgggtagcaggctgctgggcagttctgctctgtggaggggcgggcaccagcgccacttatgtgcctctgctccgagggccagtgggctgcagggcctgcttggaggaaggatttgtgtgtcggaggccactccgagggcaattctgt

SEQ ID NO: 155564 - DNA, 30 bp, Homo sapiens; identical to SEQ ID NO: 73039
  chr7:2578292-2578322
  hypo

SEQ ID NO: 155565 - DNA, 30 bp, Homo sapiens; identical to SEQ ID NO: 73040
  chr7:2581086-2581116
  hypo

SEQ ID NO: 155566 - DNA, 30 bp, Homo sapiens; identical to SEQ ID NO: 73041
  chr7:2581384-2581414
  hypo

SEQ ID NO: 155567 - DNA, 310 bp, Homo sapiens
  chr7:2583246-2583556
  hypo
cacgaacgagtgtgcggcggggatggggtctctctccagcagacaggccacgcggggactcagccgcacccacagggcttccgtccaggggctctggcagcgcccgaaggtcgtggtcaggacgttcagggcctgagtgaccttgggggtggccgcggagcacaaggactcttcaacgtgatccatgatcttctgggcacacgcgggccagtcaccccccggcaggcagggctgcccctcggctccacctcgcatggacaaagccaggacgtgcaccaggagctgactggccgccgaggccacaaacagg

SEQ ID NO: 155568 - DNA, 30 bp, Homo sapiens
  chr7:2584594-2584624
  hypo
gccctggatccagccgctgcgcacggtggg

SEQ ID NO: 155569 - DNA, 30 bp, Homo sapiens; identical to SEQ ID NO: 21032
  chr7:2586666-2586696
  hypo

SEQ ID NO: 155570 - DNA, 38 bp, Homo sapiens; identical to SEQ ID NO: 73045
  chr7:2593552-2593590
  hypo

SEQ ID NO: 155571 - DNA, 54 bp, Homo sapiens; identical to SEQ ID NO: 73046
  chr7:2609244-2609298
  hypo

SEQ ID NO: 155572 - DNA, 302 bp, Homo sapiens; identical to SEQ ID NO: 21033
  chr7:2611214-2611516
  hypo

SEQ ID NO: 155573 - DNA, 42 bp, Homo sapiens
  chr7:2611943-2611985
  hypo
gcgctctgccagcaacggtgagcatgccgatggtggcgaggc

SEQ ID NO: 155574 - DNA, 153 bp, Homo sapiens; identical to SEQ ID NO: 21034
  chr7:2612208-2612361
  hypo

SEQ ID NO: 155575 - DNA, 33 bp, Homo sapiens; identical to SEQ ID NO: 73049
  chr7:2612480-2612513
  hypo

SEQ ID NO: 155576 - DNA, 30 bp, Homo sapiens; identical to SEQ ID NO: 73050
  chr7:2614208-2614238
  hypo

SEQ ID NO: 155577 - DNA, 30 bp, Homo sapiens; identical to SEQ ID NO: 73051
  chr7:2618065-2618095
  hypo

SEQ ID NO: 155578 - DNA, 43 bp, Homo sapiens; identical to SEQ ID NO: 73052
  chr7:2629285-2629328
  hypo

SEQ ID NO: 155579 - DNA, 270 bp, Homo sapiens; identical to SEQ ID NO: 73053
  chr7:2632065-2632335
  hypo

SEQ ID NO: 155580 - DNA, 30 bp, Homo sapiens; identical to SEQ ID NO: 21037
  chr7:2632756-2632786
  hypo

SEQ ID NO: 155581 - DNA, 441 bp, Homo sapiens
  chr7:2643037-2643478
  hypo
gcgggtgaggggatccgggctccttgtccgatcggccagtcagtggtgggtgccgtctccccatcctgcttctctccctggcgccccccatgcctcaggggcctcgtctctaagtaaagacagcagtgaggctgcctgtgtggggctgtggtgagcgtggggtttgccagtgtgtgcgcagtgtgtggcgtgacggagatgcgtgcccctctcacccctccggctggtgcagagcctcccgtacctggcagccactttaccggaagcttctgggcagcctccacatggtcaccacactctggcgggtcgttcaccgttaatagccggcgctgcctcgccctcctttgctgagctcttttcccaccctagctttaagacaaaacaaaggtgctttctgttccaacagcggcaagcctgctaaactcacgtggcatggggctc

SEQ ID NO: 155582 - DNA, 30 bp, Homo sapiens; identical to SEQ ID NO: 21038
  chr7:2650012-2650042
  hypo

SEQ ID NO: 155583 - DNA, 44 bp, Homo sapiens
  chr7:2658375-2658419
  hypo
ttgcaatccacgtgacggctgagaaatctgctcctgccgggcgc

SEQ ID NO: 155584 - DNA, 104 bp, Homo sapiens
  chr7:2658658-2658762
  hypo
tccagccagggcgacagagcaagactctgtcccaaaaaaaaaaattctgaacagggtgtgccatgattggagcatttctccccaagccacgagtgccggtgtgc

SEQ ID NO: 155585 - DNA, 31 bp, Homo sapiens; identical to SEQ ID NO: 43820
  chr7:2671600-2671631
  hypo

SEQ ID NO: 155586 - DNA, 31 bp, Homo sapiens; identical to SEQ ID NO: 73057
  chr7:2674427-2674458
  hypo

SEQ ID NO: 155587 - DNA, 31 bp, Homo sapiens; identical to SEQ ID NO: 21039
  chr7:2678377-2678408
  hypo

SEQ ID NO: 155588 - DNA, 552 bp, Homo sapiens; identical to SEQ ID NO: 73059
  chr7:2679579-2680131
  hypo

SEQ ID NO: 155589 - DNA, 53 bp, Homo sapiens
  chr7:2680523-2680576
  hypo
gggggtctcgccttacaagtgcggagccagccgaggttcacacagagcaaagg

SEQ ID NO: 155590 - DNA, 31 bp, Homo sapiens; identical to SEQ ID NO: 73060
  chr7:2683829-2683860
  hypo

SEQ ID NO: 155591 - DNA, 30 bp, Homo sapiens; identical to SEQ ID NO: 73061
  chr7:2686390-2686420
  hypo

SEQ ID NO: 155592 - DNA, 179 bp, Homo sapiens
  chr7:2686783-2686962
  hypo
tcgcagtgggattctacggcaacggggagaccagtgatggcatccatagggccacctactcgctccgccacgccaaccgcacggtggccggggtccaggaccgcgtgagtggccgcggagttggggccaggagcactcttgctgctccggagccccacgtctgcgcgaggacgggcggg

SEQ ID NO: 155593 - DNA, 30 bp, Homo sapiens; identical to SEQ ID NO: 73063
  chr7:2687203-2687233
  hypo

SEQ ID NO: 155594 - DNA, 141 bp, Homo sapiens; identical to SEQ ID NO: 73064
  chr7:2690601-2690742
  hypo

SEQ ID NO: 155595 - DNA, 185 bp, Homo sapiens; identical to SEQ ID NO: 73065
  chr7:2691941-2692126
  hypo

SEQ ID NO: 155596 - DNA, 56 bp, Homo sapiens; identical to SEQ ID NO: 21042
  chr7:2695697-2695753
  hypo

SEQ ID NO: 155597 - DNA, 272 bp, Homo sapiens; identical to SEQ ID NO: 73067
  chr7:2697945-2698217
  hypo

SEQ ID NO: 155598 - DNA, 183 bp, Homo sapiens; identical to SEQ ID NO: 73068
  chr7:2698473-2698656
  hypo

SEQ ID NO: 155599 - DNA, 152 bp, Homo sapiens; identical to SEQ ID NO: 73069
  chr7:2699683-2699835
  hypo

SEQ ID NO: 155600 - DNA, 35 bp, Homo sapiens
  chr7:2705239-2705274
  hypo
gctgggagtgctgatccgatcgacgtagtgaaagc

SEQ ID NO: 155601 - DNA, 424 bp, Homo sapiens; identical to SEQ ID NO: 114524
  chr7:2727878-2728302
  hypo

SEQ ID NO: 155602 - DNA, 212 bp, Homo sapiens
  chr7:2731702-2731914
  hypo
agcaggtcatgtcaccggtacccagaaactacaaaaataagctggtgagtctcctgtggcgtcgggtgctccgaggccggctaagtgcctcctcctcctacttgggccagccaggctcctggaggaagacaggtgggaccacacccatctcacagggaggacacagtggggttgaaagaggaccgagcttggccgggcgtggtggctcacgc

SEQ ID NO: 155603 - DNA, 243 bp, Homo sapiens; identical to SEQ ID NO: 73072
  chr7:2740187-2740430
  hypo

SEQ ID NO: 155604 - DNA, 30 bp, Homo sapiens
  chr7:2740684-2740714
  hypo
ccaggcactgtgctgcgggctgtataaaga

SEQ ID NO: 155605 - DNA, 160 bp, Homo sapiens
  chr7:2741197-2741357
  hypo
ggcaggtgcggggagcgcgaggggcagggccagctctgtgcctctcacatgccaagagcagcctggcagagacagcacacgggacgggggcccttgggctcggagaggaggaaagggctggtgtccgcttctgaccagcgcaccacgcctttcggcatct

SEQ ID NO: 155606 - DNA, 240 bp, Homo sapiens; identical to SEQ ID NO: 73073
  chr7:2742259-2742499
  hypo

SEQ ID NO: 155607 - DNA, 380 bp, Homo sapiens
  chr7:2751964-2752344
  hypo
gactctacacctggactcaggcggtggtggggacgtggcccagccaggaggcgggggagccgtcagtgtgggaggacaccccgcctgccagcgccgactcgggcatgtgctgtgagagtgactcggagcccggcaccagtgtgtcggagcccctcacccctgatgccgggagtcacaccttcgcctcggggccagaggaagggctgagctacctggcagcctcagaggctccgctgccacctgggggccctgcggaggccatcaaggagcatgaacggtggctggccatgtgcatccaggccctgcagcgggaagtggcagaggaggacctggtgcaggtggacagagccgtggacgccctcgaccgctgggagatgttc

SEQ ID NO: 155608 - DNA, 30 bp, Homo sapiens; identical to SEQ ID NO: 73075
  chr7:2754203-2754233
  hypo

SEQ ID NO: 155609 - DNA, 30 bp, Homo sapiens; identical to SEQ ID NO: 73076
  chr7:2763900-2763930
  hypo

SEQ ID NO: 155610 - DNA, 31 bp, Homo sapiens; identical to SEQ ID NO: 21048
  chr7:2764249-2764280
  hypo

SEQ ID NO: 155611 - DNA, 30 bp, Homo sapiens
  chr7:2770280-2770310
  hypo
ctggggctgcagggccgggctcaggcactg

SEQ ID NO: 155612 - DNA, 443 bp, Homo sapiens
  chr7:2770610-2771053
  hypo
ggattcagtagctaacgtgacagtttccatgtccttttgcctagagctcgctggctggctggtctgacagcattcctgagccaggtattccagggcacggatccgagaaacccactcaaggaccacacagacaacacacacccaagagtctgaccgacagccgtgggggctgctcaacgacgacaaaccccggggcttcctcgctcactgcagcatgatgtccttcaggttctcctgcaggatggtgtctttcacagcatggaacacgaagcggacgttctcggtgtcgatggcggtggtgaagtggtggaagagtggcttgctgcggttccgtctcttcctgtcgaagcactggaccaggtagcgctggacgtcctccagcctgtgcgggtcgcccctgaagtccgggaagtgcttcttgatgctcacggtcttcaccttct

SEQ ID NO: 155613 - DNA, 33 bp, Homo sapiens; identical to SEQ ID NO: 73079
  chr7:2783183-2783216
  hypo

SEQ ID NO: 155614 - DNA, 121 bp, Homo sapiens
  chr7:2796664-2796785
  hypo
gccagtggcactccagtctgggcaacagagcgatactctgtcccaaggcgggggaaaaaaggaggtgaccttggcaggcccgatctaatcaggtgggcctttttttttttttttttttttt

SEQ ID NO: 155615 - DNA, 100 bp, Homo sapiens
  chr7:2796964-2797064
  hypo
tcgccatgtcaggtgggccttttaaaagaggtgctctcctgctgacctagaagaaagcacacagccgtgttatgaggaggagccacgtggcaaggaagtg

SEQ ID NO: 155616 - DNA, 79 bp, Homo sapiens; identical to SEQ ID NO: 21049
  chr7:2798450-2798529
  hypo

SEQ ID NO: 155617 - DNA, 30 bp, Homo sapiens; identical to SEQ ID NO: 73081
  chr7:2801233-2801263
  hypo

SEQ ID NO: 155618 - DNA, 30 bp, Homo sapiens; identical to SEQ ID NO: 73082
  chr7:2801817-2801847
  hypo

SEQ ID NO: 155619 - DNA, 167 bp, Homo sapiens
  chr7:2804414-2804581
  hypo
tctcccagcgtgagccggcggaccctgaagggaacactgagactgaccacagctggacttgcgccgcctcgtcctcttagtgaatgaggtcctcagaggcttaagcacgcgttagttatccaaaatgcttctgttcaggtgaatgcacaaagcgttgaggtaggtca

SEQ ID NO: 155620 - DNA, 38 bp, Homo sapiens; identical to SEQ ID NO: 21051
  chr7:2815343-2815381
  hypo

SEQ ID NO: 155621 - DNA, 31 bp, Homo sapiens; identical to SEQ ID NO: 21052
  chr7:2834425-2834456
  hypo

SEQ ID NO: 155622 - DNA, 30 bp, Homo sapiens; identical to SEQ ID NO: 73086
  chr7:2836919-2836949
  hypo

SEQ ID NO: 155623 - DNA, 30 bp, Homo sapiens
  chr7:2844022-2844052
  hypo
acccataaacacacacgcgtgtacatacac

SEQ ID NO: 155624 - DNA, 61 bp, Homo sapiens
  chr7:2844839-2844900
  hypo
ggccataacaatctgcgttcatgggactaagcgcctgccatgtgaacgacactgtgttaag

SEQ ID NO: 155625 - DNA, 31 bp, Homo sapiens; identical to SEQ ID NO: 21053
  chr7:2864021-2864052
  hypo

SEQ ID NO: 155626 - DNA, 45 bp, Homo sapiens; identical to SEQ ID NO: 73088
  chr7:2871309-2871354
  hypo

SEQ ID NO: 155627 - DNA, 31 bp, Homo sapiens; identical to SEQ ID NO: 21054
  chr7:2873500-2873531
  hypo

SEQ ID NO: 155628 - DNA, 102 bp, Homo sapiens
  chr7:2884993-2885095
  hypo
aggcgtgagccgccgcgcctggcccagtgtgtagtcttttatctctcgccaccccccaccttttaccctgagtccccaaagtccaatctctgtgcggtgtct

SEQ ID NO: 155629 - DNA, 43 bp, Homo sapiens
  chr7:2900159-2900202
  hypo
gtgctggcattacagatgtgagccaccgcgcccggcccttttc

SEQ ID NO: 155630 - DNA, 30 bp, Homo sapiens; identical to SEQ ID NO: 73091
  chr7:2921535-2921565
  hypo

SEQ ID NO: 155631 - DNA, 228 bp, Homo sapiens; identical to SEQ ID NO: 21055
  chr7:2931115-2931343
  hypo

SEQ ID NO: 155632 - DNA, 241 bp, Homo sapiens; identical to SEQ ID NO: 73093
  chr7:2935117-2935358
  hypo

SEQ ID NO: 155633 - DNA, 50 bp, Homo sapiens; identical to SEQ ID NO: 73094
  chr7:2946304-2946354
  hypo

SEQ ID NO: 155634 - DNA, 244 bp, Homo sapiens; identical to SEQ ID NO: 73095
  chr7:2951741-2951985
  hypo

SEQ ID NO: 155635 - DNA, 70 bp, Homo sapiens; identical to SEQ ID NO: 73096
  chr7:2952964-2953034
  hypo

SEQ ID NO: 155636 - DNA, 161 bp, Homo sapiens
  chr7:2953808-2953969
  hypo
tgggggacggtggaccgggaggcccctcgccgggttgataaatggcaagtggcactcagtgggtagagaaatcaataaaacgaacacttcacagcaaacagccccaattaacacgggtacccgggagcgaagcaaccacacgagagcgtcgttattgggtg

SEQ ID NO: 155637 - DNA, 128 bp, Homo sapiens
  chr7:2958268-2958396
  hypo
gcaccgggaagccagcggggccgcagcaccgcactggcatgggtggggcgcgtgtccgactctgcgtagggatggccctgtggctggtgtgcgctctgagcccagggggcgcccggggagaagatgtg

SEQ ID NO: 155638 - DNA, 186 bp, Homo sapiens
  chr7:2959042-2959228
  hypo
ggtctgtgaaagggtcgacccgcgcgcacagccactcgtgcctgtcctggtacatggtgtcacggacgtgcacaacatcgtcacacttcagggacatggtgcaggcgtccagctggctggagatgttcaggttcagccggatgtagaacgagtcccccgatgtgatcaggccgtcctccatgtcct

SEQ ID NO: 155639 - DNA, 30 bp, Homo sapiens
  chr7:2960759-2960789
  hypo
cctgtcgaatgtccacgcccacattccagg

SEQ ID NO: 155640 - DNA, 30 bp, Homo sapiens
  chr7:2961032-2961062
  hypo
agggctgtgctgctgcgcagctccgggctt

SEQ ID NO: 155641 - DNA, 30 bp, Homo sapiens; identical to SEQ ID NO: 21059
  chr7:2962830-2962860
  hypo

SEQ ID NO: 155642 - DNA, 322 bp, Homo sapiens; identical to SEQ ID NO: 73100
  chr7:2967958-2968280
  hypo

SEQ ID NO: 155643 - DNA, 193 bp, Homo sapiens; identical to SEQ ID NO: 73101
  chr7:2972304-2972497
  hypo

SEQ ID NO: 155644 - DNA, 287 bp, Homo sapiens; identical to SEQ ID NO: 21062
  chr7:2976622-2976909
  hypo

SEQ ID NO: 155645 - DNA, 30 bp, Homo sapiens; identical to SEQ ID NO: 73103
  chr7:2977495-2977525
  hypo

SEQ ID NO: 155646 - DNA, 177 bp, Homo sapiens
  chr7:2983575-2983752
  hypo
ggtcggtccttgtgcgcatgtctgcccatgcgcacaggggatgtaggccgcttacccggtagcgctaagcactatgggtacacgtgcaggtgcatagtggacctagaactcccagaggccctgtgtcctccattcccccacacctggctggcaggaagctccggcagaccacgtgca

SEQ ID NO: 155647 - DNA, 30 bp, Homo sapiens
  chr7:3008093-3008123
  hypo
tcctttgtagcgtgacggaataaacaagtc

SEQ ID NO: 155648 - DNA, 30 bp, Homo sapiens
  chr7:3008672-3008702
  hypo
attccagacagactgcggggacgggggtcc

SEQ ID NO: 155649 - DNA, 506 bp, Homo sapiens
  chr7:3012739-3013245
  hypo
caccgctcctggccacgagtagcactaacatcttaaggctactgtggcacgtacagtgggcaatgctacttagctactcagcccacccccgtcggaagctagcagcaaactcaggacagaaacaagaagtcactacctactcgtcctgtgtaattacctccattccaagcagaatttagagaaaaactttaaacatttaccctcaaaccttctgtctgagcttccgattggaaactcacccagccggtggtgttggcatctttctgtgtcttccacgttcctctgggcagggacacacttcatatttccttgtgtaccctggcttagcaagtgtgttccataaatcggcatttcatatttatcaagtgagtggtgtccagtggctaaacgctggctttctttcgctcattacagcttcttcccttcagccgatcagacctctacctccccatgtgtggggagagctttcactgtgactgctttccggtgcctgctgttcccaccta

SEQ ID NO: 155650 - DNA, 43 bp, Homo sapiens; identical to SEQ ID NO: 73106
  chr7:3015333-3015376
  hypo

SEQ ID NO: 155651 - DNA, 30 bp, Homo sapiens
  chr7:3025135-3025165
  hypo
cattctgccttacaacggactggatggtgc

SEQ ID NO: 155652 - DNA, 30 bp, Homo sapiens
  chr7:3025636-3025666
  hypo
taatatctactcaagcgtgtccgtgtgtgg

SEQ ID NO: 155653 - DNA, 274 bp, Homo sapiens; identical to SEQ ID NO: 21064
  chr7:3026287-3026561
  hypo

SEQ ID NO: 155654 - DNA, 791 bp, Homo sapiens
  chr7:3033183-3033974
  hypo
tacgggaaagagaggcggcggactcgccaggggaaagctcatatccagggacgcagcagaaggtgggccccgtgatccgggtcggagctgcttttaattgcctttgcttttcctgcacaaaggagtctgggccatttggctttctctgcagaagaattaacctttagcaggatggataattgatcctcagcaggggaaacgtcccgtgggttttgacgcagaaccggctctcggtaaacctgtccctgccacaccctgcaaagctcccgcccctgcctcctcttgtctggagctgtctcccttctagctcgccaaatgctcagggttcctatattttaaaaaatcttgtcccatcaaactctgctttcaggaatggcacgaagagccgacacgcacggtgagcagctgccttctgcagatggaacgcctcacctgggacgcctcacctgggacgcctcacctgggacgcaggcgttcctgttcctagtcacgccctgagccctggattcctgcccaagctcacatagcagggactggcccagccccattcactcatgcatgtctgaccccaaggcagggctggtggcctctaaatcctcccgctagggtttcagcgcctggctgcgttgaaggtatcaccttttctacgaacacctgttctgaacagtgaaaatagctattcctaacagaggagttgcaagctccagggatctgtgtgtgcgttggggagagtggagtacatcatttctggaaaacggggcctcaaaacgtagcgccgtttacagatgaga

SEQ ID NO: 155655 - DNA, 30 bp, Homo sapiens; identical to SEQ ID NO: 73109
  chr7:3034521-3034551
  hypo

SEQ ID NO: 155656 - DNA, 216 bp, Homo sapiens; identical to SEQ ID NO: 73110
  chr7:3049090-3049306
  hypo

SEQ ID NO: 155657 - DNA, 126 bp, Homo sapiens
  chr7:3054279-3054405
  hypo
gggggatgacagcggcggtggtgagggcacaggacggaacggcaggcccttcagtgctgccctggagacccgcgggctgcacacacatcagaaacatctctgtggagcccccgaggcctgcattgc

SEQ ID NO: 155658 - DNA, 30 bp, Homo sapiens; identical to SEQ ID NO: 73111
  chr7:3074518-3074548
  hypo

SEQ ID NO: 155659 - DNA, 78 bp, Homo sapiens
  chr7:3081165-3081243
  hypo
atggatttaaacaagcgtgtcatctttagaagagcttggtttagaagtcttttttttgagacagagtcacgctctgtc

SEQ ID NO: 155660 - DNA, 569 bp, Homo sapiens; identical to SEQ ID NO: 114526
  chr7:3082718-3083287
  hypo

SEQ ID NO: 155661 - DNA, 370 bp, Homo sapiens; identical to SEQ ID NO: 43823
  chr7:3083330-3083700
  hypo

SEQ ID NO: 155662 - DNA, 30 bp, Homo sapiens; identical to SEQ ID NO: 73114
  chr7:3140458-3140488
  hypo

SEQ ID NO: 155663 - DNA, 43 bp, Homo sapiens; identical to SEQ ID NO: 73115
  chr7:3150399-3150442
  hypo

SEQ ID NO: 155664 - DNA, 45 bp, Homo sapiens; identical to SEQ ID NO: 21067
  chr7:3179216-3179261
  hypo

SEQ ID NO: 155665 - DNA, 116 bp, Homo sapiens; identical to SEQ ID NO: 73117
  chr7:3211448-3211564
  hypo

SEQ ID NO: 155666 - DNA, 43 bp, Homo sapiens; identical to SEQ ID NO: 73118
  chr7:3239122-3239165
  hypo

SEQ ID NO: 155667 - DNA, 91 bp, Homo sapiens
  chr7:3243215-3243306
  hypo
aaaaaaaaaggattatcagatcagattcagcaaggaagtctattatcatattcagcaaggaagtctctcatgtcatcgacaaaggagtcaa

SEQ ID NO: 155668 - DNA, 30 bp, Homo sapiens; identical to SEQ ID NO: 73119
  chr7:3280631-3280661
  hypo

SEQ ID NO: 155669 - DNA, 214 bp, Homo sapiens
  chr7:3283441-3283655
  hypo
ctgggattacaggccgtgagccaccgcgcccagcctcagaagtgctccttttttaccaatggagaaacagcccagagaggaaaagcgatttgcacagagtcacgcagctgaagactggcagatccaggctgtttgctgtcagtctgagctctcgaattctaagacgagccacttctctcgggaagccaggaaggctcctcgcaaatcctggtgg

SEQ ID NO: 155670 - DNA, 691 bp, Homo sapiens; identical to SEQ ID NO: 114528
  chr7:3340123-3340814
  hypo

SEQ ID NO: 155671 - DNA, 122 bp, Homo sapiens; identical to SEQ ID NO: 5314
  chr7:3341286-3341408
  hypo

SEQ ID NO: 155672 - DNA, 468 bp, Homo sapiens; identical to SEQ ID NO: 5315
  chr7:3341569-3342037
  hypo

SEQ ID NO: 155673 - DNA, 22 bp, Homo sapiens
  chr7:3381926-3381948
  hypo
aaggagaaagttagccaggtgc

SEQ ID NO: 155674 - DNA, 36 bp, Homo sapiens; identical to SEQ ID NO: 73125
  chr7:3513738-3513774
  hypo

SEQ ID NO: 155675 - DNA, 21 bp, Homo sapiens
  chr7:3575689-3575710
  hypo
ataatttttttttttcttaga

SEQ ID NO: 155676 - DNA, 43 bp, Homo sapiens; identical to SEQ ID NO: 73127
  chr7:3624122-3624165
  hypo

SEQ ID NO: 155677 - DNA, 183 bp, Homo sapiens; identical to SEQ ID NO: 21070
  chr7:3727108-3727291
  hypo

SEQ ID NO: 155678 - DNA, 30 bp, Homo sapiens; identical to SEQ ID NO: 73129
  chr7:3771086-3771116
  hypo

SEQ ID NO: 155679 - DNA, 43 bp, Homo sapiens; identical to SEQ ID NO: 73130
  chr7:3864236-3864279
  hypo

SEQ ID NO: 155680 - DNA, 158 bp, Homo sapiens; identical to SEQ ID NO: 21071
  chr7:3880278-3880436
  hypo

SEQ ID NO: 155681 - DNA, 177 bp, Homo sapiens
  chr7:3947952-3948129
  hypo
gggcaggattcttgggaatgacgccagatccaggagacgatcagcttggtctcattccccaccacgaacctcgtgtcccgacagcgtcgacacatcccttcatacacggctggccagatgctcacccgcagtccactcagcggtccactcagctgcgtccaggattgctgggtcatt

SEQ ID NO: 155682 - DNA, 31 bp, Homo sapiens; identical to SEQ ID NO: 73132
  chr7:3949423-3949454
  hypo

SEQ ID NO: 155683 - DNA, 29 bp, Homo sapiens
  chr7:3981825-3981854
  hypo
ctgcacccggccaagacttcagtcttctc

SEQ ID NO: 155684 - DNA, 89 bp, Homo sapiens
  chr7:3982614-3982703
  hypo
cagcctggccacgtgcggggaacggcccatggcctgtccctgttcgagctggctgctgcgaaagtttcaagaggcgtattcgccaggag

SEQ ID NO: 155685 - DNA, 98 bp, Homo sapiens; identical to SEQ ID NO: 73134
  chr7:3991157-3991255
  hypo

SEQ ID NO: 155686 - DNA, 132 bp, Homo sapiens; identical to SEQ ID NO: 73135
  chr7:3991579-3991711
  hypo

SEQ ID NO: 155687 - DNA, 118 bp, Homo sapiens
  chr7:4011095-4011213
  hypo
agatcggacgtccatcgtccaccctcctgaggaccacgtggtgattaaggggaccacggccacgctgcactgtggtgccacacatgacccccgggtttcactccggtcagcacaatca

SEQ ID NO: 155688 - DNA, 31 bp, Homo sapiens; identical to SEQ ID NO: 73136
  chr7:4015316-4015347
  hypo

SEQ ID NO: 155689 - DNA, 31 bp, Homo sapiens; identical to SEQ ID NO: 73137
  chr7:4027689-4027720
  hypo

SEQ ID NO: 155690 - DNA, 30 bp, Homo sapiens
  chr7:4029700-4029730
  hypo
gaggccacacttgggcgttggtctgtgtgg

SEQ ID NO: 155691 - DNA, 302 bp, Homo sapiens
  chr7:4030055-4030357
  hypo
ttcaacggctctgaccgaacggggaaggccagggtgttactgattcagataacttctgagagtacagaagagtttcctgaggatggcgtggccatgctgcctgtacgtaaaacaggacttgacagtgatctggacggagagaatgggacaggggagagctcgtgtcatctgaattctggttcgcatccaccctaaggacagcccccatcaggcgctgtcgcctcgggcttcaggactgtgtctcctttgtcttcgtgctcctcattccctgcacttagtacgtactcagcaaatgaggtgaa

SEQ ID NO: 155692 - DNA, 30 bp, Homo sapiens; identical to SEQ ID NO: 73139
  chr7:4030580-4030610
  hypo

SEQ ID NO: 155693 - DNA, 43 bp, Homo sapiens; identical to SEQ ID NO: 73140
  chr7:4047168-4047211
  hypo

SEQ ID NO: 155694 - DNA, 244 bp, Homo sapiens; identical to SEQ ID NO: 73141
  chr7:4056897-4057141
  hypo

SEQ ID NO: 155695 - DNA, 19 bp, Homo sapiens
  chr7:4062703-4062722
  hypo
cccttgtttttcttttcaa

SEQ ID NO: 155696 - DNA, 170 bp, Homo sapiens; identical to SEQ ID NO: 73143
  chr7:4116726-4116896
  hypo

SEQ ID NO: 155697 - DNA, 117 bp, Homo sapiens; identical to SEQ ID NO: 73144
  chr7:4139330-4139447
  hypo

SEQ ID NO: 155698 - DNA, 95 bp, Homo sapiens
  chr7:4140698-4140793
  hypo
gccttgcctgggccccgaaaaccaacagctgggcagccctgaccctttggtttgtttgttttaaggtagcaaggacacttgcatttttttttttt

SEQ ID NO: 155699 - DNA, 35 bp, Homo sapiens; identical to SEQ ID NO: 21074
  chr7:4141092-4141127
  hypo

SEQ ID NO: 155700 - DNA, 179 bp, Homo sapiens; identical to SEQ ID NO: 73147
  chr7:4146922-4147101
  hypo

SEQ ID NO: 155701 - DNA, 258 bp, Homo sapiens; identical to SEQ ID NO: 21075
  chr7:4152826-4153084
  hypo

SEQ ID NO: 155702 - DNA, 409 bp, Homo sapiens; identical to SEQ ID NO: 21076
  chr7:4153552-4153961
  hypo

SEQ ID NO: 155703 - DNA, 30 bp, Homo sapiens; identical to SEQ ID NO: 73150
  chr7:4169615-4169645
  hypo

SEQ ID NO: 155704 - DNA, 43 bp, Homo sapiens; identical to SEQ ID NO: 73151
  chr7:4171197-4171240
  hypo

SEQ ID NO: 155705 - DNA, 201 bp, Homo sapiens; identical to SEQ ID NO: 73152
  chr7:4171859-4172060
  hypo

SEQ ID NO: 155706 - DNA, 93 bp, Homo sapiens
  chr7:4177335-4177428
  hypo
ctgctgctattgattcggcctgttcattcctccctcgcacacgccgccgtcttctggccttgcgtcgctgaagtgcagcgcactgatgtttct

SEQ ID NO: 155707 - DNA, 367 bp, Homo sapiens
  chr7:4183233-4183600
  hypo
gtgtccttcctttgaagggcccgctagcttctattggagaggatgcttctgcgcagtgggccctggggtccgtggttccgagcaacggggacctggcgaggggatgctctccctttgctcacagatcggcatgggtgtttgcttctcccaggaagagtaggcacccatggggctccagcccgactctctcgtcactttctcgctggggacccatcttggagcttcacagcctcgtcctcatccttgtcttgtatgcttcctgacaggcctgcggcgagggtctggcatgggaagcgttgcagggatgcagcagggtccctggatgtgcctagcagtgtagccgctgtggtcacgctctcctcaccgt

SEQ ID NO: 155708 - DNA, 239 bp, Homo sapiens; identical to SEQ ID NO: 21078
  chr7:4185349-4185588
  hypo

SEQ ID NO: 155709 - DNA, 358 bp, Homo sapiens; identical to SEQ ID NO: 73156
  chr7:4187737-4188095
  hypo

SEQ ID NO: 155710 - DNA, 141 bp, Homo sapiens; identical to SEQ ID NO: 73157
  chr7:4198501-4198642
  hypo

SEQ ID NO: 155711 - DNA, 562 bp, Homo sapiens
  chr7:4201342-4201904
  hypo
tgagggtggccctgggaagggcggcagaacataacaaccaccctgacccccgctttcctctcctgtgtgtttcagttccaggagagcccccgggatctgtctcagcgacgccacacaccacgtcctctgtcctgatacagtggcaggtaagagcgcggggaatcacgcgcgttttgtcaaatgtgttctcatttccctgcgcattcagccacaacggctgacatggactgcaagctgagccctgagctaagcgtttgagagtagaaccaaggagacacaccctcagactcaaaaacgcgagggggaaatggtgtcaattatcatctcggtgtaatttccaaaacattagaagcaggactgtgatgcacgtagagaatgaacttgactccccttattcaggagggaccggcaggatggggaggccagtctgagagcgttggaggaactgggtatgtcttggcatttcaccgaggacgttggagcaaggcttctgtgtatacacaaattggttatcgccctacaaggcagtaaaactgcaaccgctggagttagcttttctaga

SEQ ID NO: 155712 - DNA, 136 bp, Homo sapiens; identical to SEQ ID NO: 73159
  chr7:4203269-4203405
  hypo

SEQ ID NO: 155713 - DNA, 30 bp, Homo sapiens
  chr7:4206228-4206258
  hypo
atcaggaccaaactccggagagaatccctg

SEQ ID NO: 155714 - DNA, 318 bp, Homo sapiens; identical to SEQ ID NO: 73160
  chr7:4211344-4211662
  hypo

SEQ ID NO: 155715 - DNA, 953 bp, Homo sapiens
  chr7:4214558-4215511
  hypo
catttcctggcacccaccaaacggtgtcacaaaaatactctttgccccttgacatcctcgtgccggggacagagtgaagaagcagctccagaacacgccgtgtggacggtgccctcccgctttctgccatccctgtggcaccagggctgcctacctcacgcgccaatgccagccgcggggccttccacgcacccagtgcgcggacggcagcagctcctatgctcctatgctcacacagcttgaccccagtacagcgccaggcatgatgttgatgaatgttgaagacgggaaattgcagcactggtgtctgcactgttggcacaccccaaaggtggcccttgctgaccaccagacagttggcatctccctgggctctgtcgcaaaatcaaaacagcacagtagaagggccccgggatgcggctgggcttacgcacctggtcgcgcagctctccctgaggtggtttgctcggctcctccagccggggctccctgcgtgagcatgagtcagctgcacctgccccggggtgaccgggagaaaaggtgtcctgccactcagtgctaagttgtgccaaaaactagcatgtttcactgaatcagagtggtaagcacaccccgcctgtccgggactggggtgccttgttgtttacgaggaggtgcggcagcccccgcaactgggagctggtggaaagcttgggcggtagcggggtctttattgccccgggaggcgcagcgtgggaagtggctggcatcccagtaaggcacctgtctcccttgttcctgccgcacatcacctgcgatggccgtgtccctgcgtgctaaccacctttctgctttgcttaccccaatagcccaaagcagcttcaagacggtgaacagcagctccacatcgacgatgtgtgaactaacacgtaagtgcgctctcagcgggaggcccatgccgcgaggcgcacaca

SEQ ID NO: 155716 - DNA, 139 bp, Homo sapiens; identical to SEQ ID NO: 73163
  chr7:4218109-4218248
  hypo

SEQ ID NO: 155717 - DNA, 803 bp, Homo sapiens; identical to SEQ ID NO: 73164
  chr7:4219128-4219931
  hypo

SEQ ID NO: 155718 - DNA, 43 bp, Homo sapiens
  chr7:4230170-4230213
  hypo
acaaatgcactaagaagccctcgccaaggagtgcagagtggag

SEQ ID NO: 155719 - DNA, 30 bp, Homo sapiens; identical to SEQ ID NO: 21083
  chr7:4230870-4230900
  hypo

SEQ ID NO: 155720 - DNA, 245 bp, Homo sapiens
  chr7:4243555-4243800
  hypo
gtcatgggcctttgcccagctcgtctccaccccagagaaaggggcatgcgggcccctaatttatgggggttcacctggcgctcacagacccaccagttcctacaggcggatatccaagtccagagctgtcgtgggcgcgctgagttgggccatctttggaaagaaaccctggggctgtcgcggggggagggcgatgtctcaccgactaccagggtaatggccgcgctcaattttgcctttcacat

SEQ ID NO: 155721 - DNA, 172 bp, Homo sapiens; identical to SEQ ID NO: 73166
  chr7:4246745-4246917
  hypo

SEQ ID NO: 155722 - DNA, 200 bp, Homo sapiens; identical to SEQ ID NO: 21084
  chr7:4247840-4248040
  hypo

SEQ ID NO: 155723 - DNA, 189 bp, Homo sapiens; identical to SEQ ID NO: 73168
  chr7:4249810-4249999
  hypo

SEQ ID NO: 155724 - DNA, 165 bp, Homo sapiens; identical to SEQ ID NO: 21085
  chr7:4254666-4254831
  hypo

SEQ ID NO: 155725 - DNA, 94 bp, Homo sapiens; identical to SEQ ID NO: 73170
  chr7:4256586-4256680
  hypo

SEQ ID NO: 155726 - DNA, 264 bp, Homo sapiens; identical to SEQ ID NO: 73171
  chr7:4265022-4265286
  hypo

SEQ ID NO: 155727 - DNA, 123 bp, Homo sapiens; identical to SEQ ID NO: 73172
  chr7:4265507-4265630
  hypo

SEQ ID NO: 155728 - DNA, 317 bp, Homo sapiens; identical to SEQ ID NO: 73173
  chr7:4272744-4273061
  hypo

SEQ ID NO: 155729 - DNA, 241 bp, Homo sapiens; identical to SEQ ID NO: 21088
  chr7:4273569-4273810
  hypo

SEQ ID NO: 155730 - DNA, 140 bp, Homo sapiens
  chr7:4275902-4276042
  hypo
catggaaggccctgaatgggacgccgggaccacccagcacccatcaagatacaatttcccgcttttctgttctgagcgagcagaacgagacagaaggaagaagagcgtccttcaaagccgcctttacatgcatttttttc

SEQ ID NO: 155731 - DNA, 210 bp, Homo sapiens; identical to SEQ ID NO: 73175
  chr7:4277416-4277626
  hypo

SEQ ID NO: 155732 - DNA, 184 bp, Homo sapiens; identical to SEQ ID NO: 21090
  chr7:4285296-4285480
  hypo

SEQ ID NO: 155733 - DNA, 183 bp, Homo sapiens; identical to SEQ ID NO: 73177
  chr7:4286817-4287000
  hypo

SEQ ID NO: 155734 - DNA, 43 bp, Homo sapiens
  chr7:4299320-4299363
  hypo
agctcaagtcagctcagccttcgccaccaaatgagttataaaa

SEQ ID NO: 155735 - DNA, 30 bp, Homo sapiens; identical to SEQ ID NO: 73178
  chr7:4300167-4300197
  hypo

SEQ ID NO: 155736 - DNA, 116 bp, Homo sapiens; identical to SEQ ID NO: 73179
  chr7:4307406-4307522
  hypo

SEQ ID NO: 155737 - DNA, 481 bp, Homo sapiens
  chr7:4308002-4308483
  hypo
acggccaccttctgggtgaatcggtccagcccaagcccctctccccagcctcgccttcagcctctctcccagcctgcttttataaggcgcacttcactcaatgctgtagccaaaaaacgaggggccccagggagaggggacccagatggccacacacggaacgcgcctccacagccccgggaggtggctcactctgtacaggtcttcggaggccgtgtttgtatctaactgtgactgggctgaagcatgatgtttgcctaatggttcgtagcatggtttttatttcttacgcattcttggcacacagtgtagctatcctcctgacgagcaacccgtctgcgtacctaagtgtggctccccgtgggtcagcgtcctggtagcatggatccagtctgaaaggtgaggacaacgtggaaactcatgagctgagcctgcccgctgggacacgtctccttcccgcgtcaccttctggtttagggag

SEQ ID NO: 155738 - DNA, 25 bp, Homo sapiens
  chr7:4322036-4322061
  hypo
tgacgagagtgaaactctgcctcaa

SEQ ID NO: 155739 - DNA, 79 bp, Homo sapiens
  chr7:4323515-4323594
  hypo
gagtggctgagaatcttgtcccgtctcccgagggtgactgcaggactcctacccatgcgtaggtgccctgcctcctcca

SEQ ID NO: 155740 - DNA, 156 bp, Homo sapiens; identical to SEQ ID NO: 73182
  chr7:4348037-4348193
  hypo

SEQ ID NO: 155741 - DNA, 325 bp, Homo sapiens
  chr7:4349444-4349769
  hypo
cgccctcacttttgacgccaattgcgagttcagaggccctcgagaccacccttaggttcgacgatttgctggaaagactcggaactcgctggaagctgtgatagtcccagctatggtttatcacagggaaaagacaccgattaaaatcagcatgcaggggcagagcccacgagggttccacacactgagcgtctgctgtcctctcctgtggagctgcggacagcgttacccctctgacaatgtgcgatcatacgcacaaaacacggtcagccaggaaggttcctccacaccagggcttccctgcggctccatcccataggcaggg

SEQ ID NO: 155742 - DNA, 358 bp, Homo sapiens; identical to SEQ ID NO: 73184
  chr7:4410635-4410993
  hypo

SEQ ID NO: 155743 - DNA, 17 bp, Homo sapiens
  chr7:4463746-4463763
  hypo
tttgagaagagaaaagc

SEQ ID NO: 155744 - DNA, 30 bp, Homo sapiens
  chr7:4496372-4496402
  hypo
aagtaagttaacaggcgtggctgtgtttca

SEQ ID NO: 155745 - DNA, 82 bp, Homo sapiens; identical to SEQ ID NO: 73185
  chr7:4540650-4540732
  hypo

SEQ ID NO: 155746 - DNA, 80 bp, Homo sapiens
  chr7:4546533-4546613
  hypo
ggaattacaggcctgagccaccgcgcctggcctgttggctctttctaatcagttacatcgcctatatgggctgtgccaaa

SEQ ID NO: 155747 - DNA, 30 bp, Homo sapiens
  chr7:4682042-4682072
  hypo
ggggccggtgggattcgcagggtccgtttt

SEQ ID NO: 155748 - DNA, 220 bp, Homo sapiens; identical to SEQ ID NO: 73186
  chr7:4730595-4730815
  hypo

SEQ ID NO: 155749 - DNA, 30 bp, Homo sapiens
  chr7:4731871-4731901
  hypo
tagtcggctgtgatgcgtgttcaggctgaa

SEQ ID NO: 155750 - DNA, 30 bp, Homo sapiens; identical to SEQ ID NO: 73187
  chr7:4743131-4743161
  hypo

SEQ ID NO: 155751 - DNA, 30 bp, Homo sapiens; identical to SEQ ID NO: 73188
  chr7:4743379-4743409
  hypo

SEQ ID NO: 155752 - DNA, 30 bp, Homo sapiens; identical to SEQ ID NO: 21093
  chr7:4748935-4748965
  hypo

SEQ ID NO: 155753 - DNA, 30 bp, Homo sapiens; identical to SEQ ID NO: 21094
  chr7:4749191-4749221
  hypo

SEQ ID NO: 155754 - DNA, 30 bp, Homo sapiens
  chr7:4749558-4749588
  hypo
gcctgtgtgttaggcgttaacattgttccc

SEQ ID NO: 155755 - DNA, 710 bp, Homo sapiens; identical to SEQ ID NO: 73191
  chr7:4751217-4751927
  hypo

SEQ ID NO: 155756 - DNA, 36 bp, Homo sapiens; identical to SEQ ID NO: 73192
  chr7:4753918-4753954
  hypo

SEQ ID NO: 155757 - DNA, 148 bp, Homo sapiens; identical to SEQ ID NO: 73193
  chr7:4754251-4754399
  hypo

SEQ ID NO: 155758 - DNA, 30 bp, Homo sapiens; identical to SEQ ID NO: 73194
  chr7:4761820-4761850
  hypo

SEQ ID NO: 155759 - DNA, 131 bp, Homo sapiens
  chr7:4762727-4762858
  hypo
gatggtaacggcaccgtgctcactccaacgccgtggctgtgagcggagccagcttcaaagcactgggtccagggcgcctgctcgcggtcacccatagggtgggtggacacccatggcggcttgcacgttgc

SEQ ID NO: 155760 - DNA, 258 bp, Homo sapiens
  chr7:4767337-4767595
  hypo
ctgtcccaccttcccgtcactcctcgatgtcacatcagagtgctctctcctgggtgggaacccgcgcacggaggaaacactttaccagagtaaacgagattataacttgtttgccagagaacctctcctgtggccatgcctgaacctctcctgggactgtccgtggtcttcacattggtgcttggacacccgtccttcgggaggggaggaaaagcggccggtaaaatggagacagtcggtggcgtgtgtttgccgatt

SEQ ID NO: 155761 - DNA, 30 bp, Homo sapiens; identical to SEQ ID NO: 73197
  chr7:4768232-4768262
  hypo

SEQ ID NO: 155762 - DNA, 30 bp, Homo sapiens; identical to SEQ ID NO: 73198
  chr7:4768682-4768712
  hypo

SEQ ID NO: 155763 - DNA, 30 bp, Homo sapiens; identical to SEQ ID NO: 73199
  chr7:4768936-4768966
  hypo

SEQ ID NO: 155764 - DNA, 30 bp, Homo sapiens; identical to SEQ ID NO: 73200
  chr7:4769923-4769953
  hypo

SEQ ID NO: 155765 - DNA, 51 bp, Homo sapiens; identical to SEQ ID NO: 5316
  chr7:4770078-4770129
  hypo

SEQ ID NO: 155766 - DNA, 120 bp, Homo sapiens; identical to SEQ ID NO: 43829
  chr7:4770152-4770272
  hypo

SEQ ID NO: 155767 - DNA, 220 bp, Homo sapiens; identical to SEQ ID NO: 73203
  chr7:4771495-4771715
  hypo

SEQ ID NO: 155768 - DNA, 30 bp, Homo sapiens
  chr7:4772299-4772329
  hypo
ctcaggtctcacttcgcagaggcagtggct

SEQ ID NO: 155769 - DNA, 30 bp, Homo sapiens; identical to SEQ ID NO: 73204
  chr7:4780501-4780531
  hypo

SEQ ID NO: 155770 - DNA, 581 bp, Homo sapiens; identical to SEQ ID NO: 73205
  chr7:4781491-4782072
  hypo

SEQ ID NO: 155771 - DNA, 145 bp, Homo sapiens; identical to SEQ ID NO: 73206
  chr7:4783195-4783340
  hypo

SEQ ID NO: 155772 - DNA, 30 bp, Homo sapiens; identical to SEQ ID NO: 73207
  chr7:4789661-4789691
  hypo

SEQ ID NO: 155773 - DNA, 30 bp, Homo sapiens; identical to SEQ ID NO: 73208
  chr7:4794294-4794324
  hypo

SEQ ID NO: 155774 - DNA, 30 bp, Homo sapiens; identical to SEQ ID NO: 73209
  chr7:4796640-4796670
  hypo

SEQ ID NO: 155775 - DNA, 30 bp, Homo sapiens; identical to SEQ ID NO: 73210
  chr7:4798456-4798486
  hypo

SEQ ID NO: 155776 - DNA, 106 bp, Homo sapiens
  chr7:4800782-4800888
  hypo
ggtccccggacacacggtcaccatcctgcagcccgccacacccgtgaccctcgggcagcaccaccttccagtccgggccgtgacccagaacggaaagcatgcggtt

SEQ ID NO: 155777 - DNA, 1371 bp, Homo sapiens
  chr7:4801645-4803016
  hypo
ggggacggcagggcccgcagggagcagagcaagggtagccgtcctgcctggcaggggtgcactgacctccggttccggcttggtggcttagcccctgtataggggacttgaaaaaagcagctgggtcctaaccagaccccagagtaaccctcttcttcctccactccagccctcaccagccctttgcagctccttgcgacccaagcgagttcatccgcgccggtggtggtcacccgggtgtgcgaggtggggcccaaggagccagcagcagccgtcgcggccacggccaccaccaccccagccactgccaccaccgcctctgcctccgcctcttccactggagagcccgaggtcaaaaggtcccgggtggaggagcccagtggtgctgtaaccacaccggctggagtgatcgcagctgccggcccccaggggccaggcaccggggagtgaggtcacctgcaacgcgggggagtgggactcacccagcggcgaccccgaagctggacccggcagctcaggcggccgcacccacagacggaggagaacagcccgcggcggcctgtgggcatcggcggcacctggacacacccagccctttccatttgatcgcctgccttcccgtggtttaagacaaaaacacataaacaagttcagacaactgattgtatgattctgggaattctttgctttcctttccttctccctcggcaccacctcctctccccaggcctccctgtcgggcatggggaggaggttggagctcagcatcttgaggaatgtgtcaagacagcccctccgctccgcgctgcacggccagccgcctttgtccgggaggacagacagaaacgcagcaaggcacacaccaaggctgccggggaggcccgggcaccggacagatgcctgttgggaagccaggagctgccgagccacggaccacctaacagcctctccgcccggaacgtgacatagagagtgttggcattaactcggggggtgtccgatttcacttcagaccccaagtttttctttgtttgtttaaacatggaattcagacttcattgtacacctgagacagacacaaaagggatcatgtatttttgaggattttacctgttgacgtctgatgaccggccgtaggtccagggttcccgctgggtttaatcccctcgaagagtaaacctgccgctctgtctgataacttcaagtaagagcagcggcttcctgggttggcgttcgcggtggaaggttcctaggatgaaaggtgagcctggatccgccggccgcagacatcgcgctgctggggacgattggggccgctgctctgcagaccagaccttcccgaattatccgtggctccgatgtcccggtgct

SEQ ID NO: 155778 - DNA, 30 bp, Homo sapiens
  chr7:4803228-4803258
  hypo
cagcccccgccaacgcgactggttttgttt

SEQ ID NO: 155779 - DNA, 70 bp, Homo sapiens
  chr7:4803493-4803563
  hypo
tttgctggccgctccggcgctggctctcctgtccgggaccacaacgagaaacagcgacagattcgacgca

SEQ ID NO: 155780 - DNA, 30 bp, Homo sapiens; identical to SEQ ID NO: 21101
  chr7:4804926-4804956
  hypo

SEQ ID NO: 155781 - DNA, 30 bp, Homo sapiens; identical to SEQ ID NO: 21102
  chr7:4805928-4805958
  hypo

SEQ ID NO: 155782 - DNA, 832 bp, Homo sapiens
  chr7:4806262-4807094
  hypo
ggagttgggccaggacgggggcttcaccctgccccctccagactgccgaagcccccaagaagttttgagcccagctgggcctcgcctccccggctcctgggtccattttctgtactggtttgagatcacaggcatcattcagcgaatgctcttgtgtcctctgcataaagagggccctccctggagcacccccggggagctgggactctccagaaagccccgggtgagggctccgtcttgagagagagagaaatcccttctttgggcgattcagtgagttcaggaggaggaggaagcttttccttggctttgaaatcagtgtttttatggagacaaagaacagacctcagtgggaaaaatgaaaacgtaatggaacacggggaggtgtcggagaagaaaggattttccccttcgctttcagagccggcgggagtgcaggtctgttttgcttcagaagcctcacattctgctttgcccttgagtgacttcatgcgggatgaggaactgttgacccctctagagaggacaccccaagtccatcctgggctcctcctcacccctctgagaaagcccccctaaaaaaaggcttcagagtcaccggcatgccgcctcacgttgcaggacggaatcgcgcgctcctcacgctggagtaagttacgaaacatgatcgtcaggctctttgcaaacgcagagccccagaacgctggatggaggcctcctcggccctgcgggcggcctggctgcggtaggtctgctgcaaggagccaccacggggactgcgccacactcctgatgaaaacgtgtttacccacagcctcgcctcgagcctcct

SEQ ID NO: 155783 - DNA, 153 bp, Homo sapiens
  chr7:4807418-4807571
  hypo
tacgaaaagctgctacgtttggtgaccagagggagggtttggaatctgtgctttgcaggggatctcggtgggtaccgcggcccctcgcagggtggcgagtggggtccgtgcctcgagaagggggcccttacccacaccgtgcggcttgaattc

SEQ ID NO: 155784 - DNA, 123 bp, Homo sapiens
  chr7:4813798-4813921
  hypo
cggctccaggggcacccgccgcactccaccgactcccatccaccgctcaccatccaccgattcccatctcttcattctctgcaccaggtgccctcagacatcactgggcgccctagggcatct

SEQ ID NO: 155785 - DNA, 30 bp, Homo sapiens; identical to SEQ ID NO: 73218
  chr7:4822792-4822822
  hypo

SEQ ID NO: 155786 - DNA, 30 bp, Homo sapiens
  chr7:4823030-4823060
  hypo
agacacctcctccccgtcatggccaaggtc

SEQ ID NO: 155787 - DNA, 128 bp, Homo sapiens
  chr7:4823842-4823970
  hypo
gtcaccgaggtggacggggcggtagccacagacttcttcacggtgctctccagcggccaccgcttcacagacgaccagtggctgaacgtgcaggccttctctatgctgcgggcgtggctgctgcacag

SEQ ID NO: 155788 - DNA, 152 bp, Homo sapiens
  chr7:4824491-4824643
  hypo
gcccgggagccacacgtcagcctgctgagagttcccacctcccgcagatgacaggtcagagcaggagggctccactctgtcggtgatctccgccacctcctctgccggccgcctgctgccgccccgggagcggcttcgggaggtggccttcg

SEQ ID NO: 155789 - DNA, 226 bp, Homo sapiens
  chr7:4825102-4825328
  hypo
gggatgggaggcagcgactcggcccatttgatgtggtccatgtcccgcagtgcctggtggaggccgtgctggtgctggacgtgctgtgccggcaggacccgtccttcctgtaccgaagtctctcctgcctgaaggccctgcacgggcgggtgcgcggggacccggcctctgtgcgggtgctgctgcccctcgcccacttcttcctgagccacggtgagcccagggt

SEQ ID NO: 155790 - DNA, 30 bp, Homo sapiens; identical to SEQ ID NO: 73222
  chr7:4827231-4827261
  hypo

SEQ ID NO: 155791 - DNA, 98 bp, Homo sapiens
  chr7:4828436-4828534
  hypo
gcgggcagcactcacggccacactgtgtcctcaggttggcgccactccaccagctgctgcagcccatggccggctgtgcccgcgtggcccagtgtgcc

SEQ ID NO: 155792 - DNA, 30 bp, Homo sapiens; identical to SEQ ID NO: 73224
  chr7:4829241-4829271
  hypo

SEQ ID NO: 155793 - DNA, 30 bp, Homo sapiens
  chr7:4830387-4830417
  hypo
gaggctctgctattcgaggtcacccagtgc

SEQ ID NO: 155794 - DNA, 30 bp, Homo sapiens; identical to SEQ ID NO: 73225
  chr7:4839082-4839112
  hypo

SEQ ID NO: 155795 - DNA, 72 bp, Homo sapiens
  chr7:4839337-4839409
  hypo
cgctgcggggctgcccgggagcagggtctggatgtagagcccgggggcgcccaggtgcgtgtgctggggaca

SEQ ID NO: 155796 - DNA, 189 bp, Homo sapiens
  chr7:4839815-4840004
  hypo
ggcccatccccagcccggaggggcctcgttccagctccaccgtgaagacgtagcagaagtcctcggtgctggagctgcggctggacggggctggaggggactcctccgcaagggctgcagagtctcctgggtgggggccaggaaaggtgggtgggagtgaggcgccaggaatcacgacgaggaatggga

SEQ ID NO: 155797 - DNA, 19 bp, Homo sapiens
  chr7:4843106-4843125
  hypo
ggcacgctggctgggtccc

SEQ ID NO: 155798 - DNA, 1697 bp, Homo sapiens
  chr7:4855713-4857410
  hypo
tcacccctcagggacaccagacgctcagggagcaggaggccaaaaagggcagagccgcctccaggagctggcgagggaggcgccagcagccgtcatgtccaggaatgtgagcccccgacccctcaaccctgcacgaggccctcacccctgtcgaggagctggttgagaagcagtgtcccggagaagaagaagaggtaggcgagcatctgcgaggccacctcggggtgcacctgcagctgccgcaggaggtccagggctgcctggtacacagacaccacgcggcgcagctcctcgggcagttcgggggccgaggaccagctctcacggcgctccgtctggaatggcgggcactccaggagtgccgggaggcagatgtacagggactggcgggggcaagaggagaacagcaaccagcatttccaggagcgctggcggccgaacggggggcctgacccagcgagctccccacccacgcactgcttgcagggacccggcctcggtagcttcctgctggacaggccatggctttgcaaatgtccagtgtgggatgtggggacacaggagctgcctcctggggctgctgggagcagaggtggggtgcagggggctcagggggatctgctgtcggaggcacagatgaactcagaaggcgcacagaggtggcgcctggggggatgggctccaacaaaggggctccaacaaaatgacgggagagtcaccactcccccagaaagtggctcaccgcacccccgatgcaccccaagctggccagggccacagggggaccggcggcagcacctctggcacccgtgggtccagggtgacaacagggccatgtcccttgcgccccatgctggggcctcccccacctcatccctgaccctcgaaatactggcaggaagggggcgtttcaaggcgagggaaagggagctgggatggttctagggcttctgtgcgacctgaggaggagcgggtgtggggggtgcagctgggcctgtgcagaacctgcagccactgctccctgatgaagtggagcttgtcacggtcccctccctcagccccccagaaggctccttaggagagccacaggcacaagcttgagccccacttgatcccaggagctgcctgagtgcagaagcagagcccgtccgtgcaccttggagacatagtagacgcactgctggaaggcgtacagcaccacctcctccagcaccgccatggcctcctcgctggccgtcagcgtgcaggagaacagcgattccttcgagcctgccgggagacagccacgccaatggtcacaacgggcacagcgctcaggaacgcagcaactcagccagccgccagctctttccctggcgcgggcaccacccaacgcgcccatctggggtccagatgcgataaactggccgagggactctgggccctggctgggacgagcgcagcaaacctgccgccactcttacctggggaggggaatgccgggaggggcaggaggggtccagacacccaacatctcaatgcccagcccagcccagcccaagcgctcattcactcccacgttctggatacgttttctgttacaaccaactgcacccaacatagcaggtcctaactgcctccccacaggtcacctctcactcgcgacacgggtcacaggactctggcagcagcccctgagtggccgccactctgtggaa

SEQ ID NO: 155799 - DNA, 437 bp, Homo sapiens
  chr7:4857845-4858282
  hypo
ccagggctgcatgggcggcgcctggtgagccaggccaacactcaccccagcgcgggcctcccaggagcacaggcccccagctgcccctctgccgggcagactgcaccggaggccggcccactcatggccaggacaatggtgcgccaagcccttggacaagcccctgtcactttcgctctgccgctcctggtgctcctccttcaggggcttggggctgcctggcccccacccaccaagcccgctccccaagaacctgtgaagccccccagtgcctgccccacagggtcacatctgggaaccaggcagggcagctggagggaccccggggtccggggcagtaaggggctctcgggctctgccaacctcaacactgtgcccagaagcctccaggcctgtggagacacacaaggtggcccgacggcgcccacagcgagtgc

SEQ ID NO: 155800 - DNA, 364 bp, Homo sapiens
  chr7:4861933-4862297
  hypo
tggccaactaggttccgaggacggcgaggagatgccacactcccctgcctggggtgctggcggggggaatggagggcagcgccagccgtacctgtgatgtccagctgctcctccatgctctgcatgtagagtgggcatttctgctggataaagtacaggagctcgatggagttagacatccagaaaagaatgggctgcaagtctggaaccagatcagccatggcgcagctggccagcgagatgggctcctggctaccaagacagaaagactaagagttacgcggggacccgaccctcaggaggctgaatctaccactctttctacataaggatgcgcgttttcatgggacgctgacaacaactg

SEQ ID NO: 155801 - DNA, 30 bp, Homo sapiens; identical to SEQ ID NO: 73231
  chr7:4864571-4864601
  hypo

SEQ ID NO: 155802 - DNA, 217 bp, Homo sapiens
  chr7:4864846-4865063
  hypo
tcagcaggggcagcacggcccggcaggaggaacgggcgcagctggctgaggcaggctggtcaaggcgcgggtatctcctgcgggtggagggaagcactggagtcccactcctgggaaccaaggcgatggaaacactcgcagggcccacaaggagcacagagaccagagcatgggctgccggccacagcctatgcatgcctgtcgcgtccatcaggag

SEQ ID NO: 155803 - DNA, 35 bp, Homo sapiens; identical to SEQ ID NO: 21109
  chr7:4867283-4867318
  hypo

SEQ ID NO: 155804 - DNA, 30 bp, Homo sapiens
  chr7:4871742-4871772
  hypo
ggcgggcacaataaccgggtcatactcaca

SEQ ID NO: 155805 - DNA, 399 bp, Homo sapiens; identical to SEQ ID NO: 21110
  chr7:4874065-4874464
  hypo

SEQ ID NO: 155806 - DNA, 30 bp, Homo sapiens
  chr7:4875079-4875109
  hypo
cccggaggagcacacgagagacccaggaga

SEQ ID NO: 155807 - DNA, 30 bp, Homo sapiens; identical to SEQ ID NO: 21111
  chr7:4876213-4876243
  hypo

SEQ ID NO: 155808 - DNA, 176 bp, Homo sapiens
  chr7:4878539-4878715
  hypo
acagccagcaggacccgtgcactcgtgcacacatgcatgcacacgtgcacacgtgcacacgtacattcagcaccgcttgagttagcaaagcccagaacccacccaatcaccccccacagggagccgccatgcacgggaggagagctctgcagagagaagaccgtagccagctgtgt

SEQ ID NO: 155809 - DNA, 22 bp, Homo sapiens
  chr7:4882927-4882949
  hypo
gccaccgcgcccggccaagaga

SEQ ID NO: 155810 - DNA, 17 bp, Homo sapiens
  chr7:4887528-4887545
  hypo
gtgatgaaaacgtgccg

SEQ ID NO: 155811 - DNA, 38 bp, Homo sapiens
  chr7:4902241-4902279
  hypo
cttacccaggctgggcgcagtggctcacgcctgtaatc

SEQ ID NO: 155812 - DNA, 30 bp, Homo sapiens
  chr7:4912927-4912957
  hypo
acctggggctggactcgttaacacaaacgt

SEQ ID NO: 155813 - DNA, 287 bp, Homo sapiens
  chr7:4913157-4913444
  hypo
ctgaaggggccctggcgtgcgctggacctcactgggcctgccctgcaggggcagatgtgatcctgccatcccgccgtccttttgaaactacaccacccacttcagtaggatttgtttcactgcagccccccaccttcccccaaagcgacacggtgacacatgccccacactgagggccactctcaggacaaacagacaccacagcagccccatcggtgcccagggaggcgcaggacaggcgggctgctggaaggcgcagagctcaccatcaccggaggtatgtaatg

SEQ ID NO: 155814 - DNA, 259 bp, Homo sapiens
  chr7:4913718-4913977
  hypo
gagacctctcagaggcgggttccagggatgtgcacagaggccgcctccaacccacggaaaggccgtgcaggtgtctcacgcagggaacagttccaagtgggagactgtgtgtgtgagcacctgtgtggacatttctctgtccaggtacccatgtgtcaccacaacaaccgaacacactctagcgcaaagcttctgggcgcgggcctgtttgaggcagggctgtccagctacagtaaggtctgtgcggggtcatccccag

SEQ ID NO: 155815 - DNA, 270 bp, Homo sapiens
  chr7:4915140-4915410
  hypo
cccagggctcctcctcgcccggtgacacacaacgcaatggcctgaggacaggccaggctgatccccagccacacagcagcaaccctggcccgtgctctgcagccccaaggtggccctgtcccactcgctttttgcccgctgcttggcagaggcaacgcatggtggaagaatgaccgaaattctgtgtctgacattgaagagcctttgttcccgtgcagaaaacatcccaccatgcgcctcctccctttcgggtttcctggcctcacagga

SEQ ID NO: 155816 - DNA, 282 bp, Homo sapiens
  chr7:4916206-4916488
  hypo
caggtgtgagccaccgcgcctggccaaaattattttttatgacacacacctattaagataatcaacttctttccaccaattgaataaatcaccagacacagtgggccccaggccccggggctctcaaactctgcggcaggcactcaacgccacccgtgctctcggcactcctcagaccgacaatgatcggctgcccgtggccaggccctcctcaggaaggcctcccaccacccaggcacccacagacccgcggtacgctgagtgcaccgtggtcacctctgg

SEQ ID NO: 155817 - DNA, 547 bp, Homo sapiens
  chr7:4917081-4917628
  hypo
aggcttcaaacatccaggacacgggctccgactgcctcctgcagagcgagcccgccccacgcatgtcccctgcaccactccttctccgcctacctcggctggccttctcagcgctcagacccacggctcttcctgaacctgtggcccccctcacctgccgtgatggtgtccacctccttggctgccagctcctccacgtccgacctcttcctcagctcaaacctccgggataaaccttctcggggtttccataattcctggatcaagaggggcttctcactgtccccaaacacccgaaagcaccgggcctgccaccgctgcccagcatcgccggcttggcccaccacgtcacacagcacgtactggccggcctgcctggggtccagggcgtaccgctccagcgcctccttcaccagctcacgggcgctggaggtgccggtggccaggacgctcttgtagtgggttcctgtgcagacactgtccccaaacaccttcaggacaccaggggccgacagctgggtggagagctcggcggggtcatcgctgg

SEQ ID NO: 155818 - DNA, 196 bp, Homo sapiens
  chr7:4918324-4918520
  hypo
gaaacacaatgaggtcgcctaagtaagacacgctccgctgcagggcttggatttctggaaagtgctgggcgcagcgcccgtgtgcagtgagcatcaaggagcgccccacccggagccggccccagcaccatcacagccacagaagagcagcgggcagcccaagggcaaagcttcgcctctccgtaaacctcgtgtc

SEQ ID NO: 155819 - DNA, 30 bp, Homo sapiens
  chr7:4918768-4918798
  hypo
ggaatgcaggcgtcccgcccaccacaggcc

SEQ ID NO: 155820 - DNA, 36 bp, Homo sapiens
  chr7:4932639-4932675
  hypo
cagctgactaattgcggtttctaagatagccacctc

SEQ ID NO: 155821 - DNA, 30 bp, Homo sapiens; identical to SEQ ID NO: 73241
  chr7:4937172-4937202
  hypo

SEQ ID NO: 155822 - DNA, 78 bp, Homo sapiens; identical to SEQ ID NO: 21114
  chr7:4985612-4985690
  hypo

SEQ ID NO: 155823 - DNA, 138 bp, Homo sapiens; identical to SEQ ID NO: 21115
  chr7:4985869-4986007
  hypo

SEQ ID NO: 155824 - DNA, 298 bp, Homo sapiens; identical to SEQ ID NO: 114543
  chr7:4998288-4998586
  hypo

SEQ ID NO: 155825 - DNA, 30 bp, Homo sapiens
  chr7:5017651-5017681
  hypo
acagaggcaaccaccgtcatcagatttatt

SEQ ID NO: 155826 - DNA, 41 bp, Homo sapiens
  chr7:5041594-5041635
  hypo
ctccccactgccctccgtgtccctcccgctagcaaacacca

SEQ ID NO: 155827 - DNA, 30 bp, Homo sapiens
  chr7:5042014-5042044
  hypo
agtaagactggtcaccgtttcacagattta

SEQ ID NO: 155828 - DNA, 457 bp, Homo sapiens
  chr7:5157463-5157920
  hypo
ggggtcgcgggccgccgcaaggccttcaacacggtggcgtcccacctcaccgtggctgtgctccactacggctgtgccacggccatgtatgccaggcccctgaacagccgttcccttgaggaggacaagctggtctcgctcatctatatcaacgtcaccccgctgctgtacccggccatctacacgctgcggaaccgggacatgcaggaggccctgcaatgcatggtcggccagaggacgctggggatggccaccaggtggattttgcctgatgctgggtgccaggcggtgtctgtcctgagatttctcccactgaggggaatctcaccattctggagccatctaagcctccccaacgcctacggggtgtaaatctaagtatagcacgcaaagaccagcaatccgactccagcctagcgctgctgtgtccgttgacgtcttgcgctggatggttctt

SEQ ID NO: 155829 - DNA, 277 bp, Homo sapiens
  chr7:5230915-5231192
  hypo
gtgctgggattacaggtgtgagccaccgtgcgcggccctccctgttctttttgggacatcaactttgatgtcttctccagcaagtaacaaacttagcaataaccttggcatctgacctagctagggagaaactgagccaagagaggcgttacggaccagtgccccaggagtctcagagctccagcgggtgggtcatcctcagggcaagagaaggccttaatgccagcccgtgcattcggaacgctgtttgtccccactgatacgggttggatgctgc

SEQ ID NO: 155830 - DNA, 264 bp, Homo sapiens
  chr7:5237697-5237961
  hypo
gtatggactcataaacgcaaggccatgaaaccaatcctctgctttttccttgtaagccaacgacggggcctttgattccagactctaaggtagctttggagtccgtttcgtttccagcccactgctcagccatggcacagcacaggggtggagccacgggtagtaaaggcctgcagaagcacagagagatgcctgcgcccacctcgattttaaataccttcgtttaaaatttagaaaattcacttacttaactttttttttttt

SEQ ID NO: 155831 - DNA, 90 bp, Homo sapiens; identical to SEQ ID NO: 73246
  chr7:5240135-5240225
  hypo

SEQ ID NO: 155832 - DNA, 89 bp, Homo sapiens; identical to SEQ ID NO: 73247
  chr7:5240284-5240373
  hypo

SEQ ID NO: 155833 - DNA, 122 bp, Homo sapiens
  chr7:5242890-5243012
  hypo
tatcctacagaggagaaaccacgagcgtcccttggcctaaatctgtggtgctggaatgctggcctcttaccttgcatcctggcggagccgcagacacacacggaagtggattcaagcagtta

SEQ ID NO: 155834 - DNA, 30 bp, Homo sapiens; identical to SEQ ID NO: 73249
  chr7:5252744-5252774
  hypo

SEQ ID NO: 155835 - DNA, 30 bp, Homo sapiens; identical to SEQ ID NO: 21118
  chr7:5253001-5253031
  hypo

SEQ ID NO: 155836 - DNA, 30 bp, Homo sapiens
  chr7:5253726-5253756
  hypo
ccagcctcagtatgcgagcacgtaggctag

SEQ ID NO: 155837 - DNA, 115 bp, Homo sapiens; identical to SEQ ID NO: 73251
  chr7:5253972-5254087
  hypo

SEQ ID NO: 155838 - DNA, 603 bp, Homo sapiens; identical to SEQ ID NO: 73252
  chr7:5262385-5262988
  hypo

SEQ ID NO: 155839 - DNA, 272 bp, Homo sapiens
  chr7:5265608-5265880
  hypo
tccccacttgctgccgggatgagaggtaagcacggacccgcccaccctctgacatcgttagccagtgaagaccccggagctggccatggagcgagcacctccgcatccaggctcggcagtgaggaggatgggccccagcagatgagcttctcccacaggcagcacgcagggtagacagagccctcgcgtagggcatggagggcccaggtggacatccttttgtcagtgaagatggcctctcctcaggttcccctcacgacaaaagcgtttgt

SEQ ID NO: 155840 - DNA, 30 bp, Homo sapiens; identical to SEQ ID NO: 21121
  chr7:5267979-5268009
  hypo

SEQ ID NO: 155841 - DNA, 30 bp, Homo sapiens; identical to SEQ ID NO: 21122
  chr7:5269146-5269176
  hypo

SEQ ID NO: 155842 - DNA, 30 bp, Homo sapiens
  chr7:5272189-5272219
  hypo
tgagacagtggggaccgccgaggccagagt

SEQ ID NO: 155843 - DNA, 515 bp, Homo sapiens; identical to SEQ ID NO: 21123
  chr7:5272773-5273288
  hypo

SEQ ID NO: 155844 - DNA, 30 bp, Homo sapiens; identical to SEQ ID NO: 21124
  chr7:5273495-5273525
  hypo

SEQ ID NO: 155845 - DNA, 20 bp, Homo sapiens
  chr7:5284487-5284507
  hypo
cttgagaggcttgaaacagg

SEQ ID NO: 155846 - DNA, 30 bp, Homo sapiens; identical to SEQ ID NO: 73259
  chr7:5304898-5304928
  hypo

SEQ ID NO: 155847 - DNA, 54 bp, Homo sapiens
  chr7:5305461-5305515
  hypo
aagtgcgtgcatctgcgtgagattgagtgtgtgtgggtgcgtctttttgtgtgt

SEQ ID NO: 155848 - DNA, 30 bp, Homo sapiens
  chr7:5309853-5309883
  hypo
gggctctggcttgatcgctgttccgtttgt

SEQ ID NO: 155849 - DNA, 31 bp, Homo sapiens; identical to SEQ ID NO: 5323
  chr7:5329219-5329250
  hypo

SEQ ID NO: 155850 - DNA, 31 bp, Homo sapiens; identical to SEQ ID NO: 73262
  chr7:5331444-5331475
  hypo

SEQ ID NO: 155851 - DNA, 30 bp, Homo sapiens; identical to SEQ ID NO: 21126
  chr7:5334519-5334549
  hypo

SEQ ID NO: 155852 - DNA, 99 bp, Homo sapiens; identical to SEQ ID NO: 21127
  chr7:5334868-5334967
  hypo

SEQ ID NO: 155853 - DNA, 119 bp, Homo sapiens
  chr7:5342788-5342907
  hypo
ccagcactgtgttctgcgtttggtctcatacctgcgtctaccttccatctgtgtccagcggccccggctccagcccagccagcactctgcagggtcacacgcaccgtgtccccacccag

SEQ ID NO: 155854 - DNA, 30 bp, Homo sapiens; identical to SEQ ID NO: 73266
  chr7:5349057-5349087
  hypo

SEQ ID NO: 155855 - DNA, 30 bp, Homo sapiens; identical to SEQ ID NO: 73267
  chr7:5350421-5350451
  hypo

SEQ ID NO: 155856 - DNA, 111 bp, Homo sapiens; identical to SEQ ID NO: 21128
  chr7:5353277-5353388
  hypo

SEQ ID NO: 155857 - DNA, 396 bp, Homo sapiens; identical to SEQ ID NO: 73269
  chr7:5372387-5372783
  hypo

SEQ ID NO: 155858 - DNA, 43 bp, Homo sapiens; identical to SEQ ID NO: 73270
  chr7:5373541-5373584
  hypo

SEQ ID NO: 155859 - DNA, 119 bp, Homo sapiens; identical to SEQ ID NO: 73271
  chr7:5384804-5384923
  hypo

SEQ ID NO: 155860 - DNA, 30 bp, Homo sapiens; identical to SEQ ID NO: 73272
  chr7:5389256-5389286
  hypo

SEQ ID NO: 155861 - DNA, 30 bp, Homo sapiens; identical to SEQ ID NO: 73273
  chr7:5389501-5389531
  hypo

SEQ ID NO: 155862 - DNA, 30 bp, Homo sapiens
  chr7:5389883-5389913
  hypo
tccggggtggtgttcgctcagaggggtagt

SEQ ID NO: 155863 - DNA, 320 bp, Homo sapiens
  chr7:5390476-5390796
  hypo
tccgtcccttgatgcggcaacggagccgctttcgtattgaatgacagagaccaggggtgtcaaaggctctgggccctgcactgcctacgcacccttcaaaacagaaatacacgtgagaagacaagtgtttgtaaataatagtttttaaccactggcaagtaagaatagagctttaagaaaataaaagacaaaacaagcaactaaaaaaacatgatgatgctggaggtgaaggcgcttgattttaaacctgaaaaatgaaatgaatgccaatcgctaccagggatatttgaataacacaggcaagcggcaggcggcacggt

SEQ ID NO: 155864 - DNA, 56 bp, Homo sapiens; identical to SEQ ID NO: 73275
  chr7:5391378-5391434
  hypo

SEQ ID NO: 155865 - DNA, 31 bp, Homo sapiens; identical to SEQ ID NO: 21131
  chr7:5391824-5391855
  hypo

SEQ ID NO: 155866 - DNA, 30 bp, Homo sapiens
  chr7:5396253-5396283
  hypo
caagacagggccggcggaggtcggctccca

SEQ ID NO: 155867 - DNA, 232 bp, Homo sapiens; identical to SEQ ID NO: 73277
  chr7:5396666-5396898
  hypo

SEQ ID NO: 155868 - DNA, 30 bp, Homo sapiens
  chr7:5397901-5397931
  hypo
agtcatttgttgaagcgaaacacgcagttt

SEQ ID NO: 155869 - DNA, 104 bp, Homo sapiens; identical to SEQ ID NO: 73278
  chr7:5398874-5398978
  hypo

SEQ ID NO: 155870 - DNA, 30 bp, Homo sapiens
  chr7:5400743-5400773
  hypo
ctgcgaccgccgcccgaggaggagaagctt

SEQ ID NO: 155871 - DNA, 30 bp, Homo sapiens; identical to SEQ ID NO: 73279
  chr7:5413857-5413887
  hypo

SEQ ID NO: 155872 - DNA, 30 bp, Homo sapiens
  chr7:5417090-5417120
  hypo
cagcgacctgagcccgccagcgccgggccc

SEQ ID NO: 155873 - DNA, 30 bp, Homo sapiens; identical to SEQ ID NO: 73280
  chr7:5426816-5426846
  hypo

SEQ ID NO: 155874 - DNA, 30 bp, Homo sapiens
  chr7:5427999-5428029
  hypo
aggaccggctgggccgcggggcgcacgctc

SEQ ID NO: 155875 - DNA, 558 bp, Homo sapiens; identical to SEQ ID NO: 73281
  chr7:5428493-5429051
  hypo

SEQ ID NO: 155876 - DNA, 30 bp, Homo sapiens; identical to SEQ ID NO: 73282
  chr7:5429413-5429443
  hypo

SEQ ID NO: 155877 - DNA, 31 bp, Homo sapiens; identical to SEQ ID NO: 21133
  chr7:5437033-5437064
  hypo

SEQ ID NO: 155878 - DNA, 89 bp, Homo sapiens; identical to SEQ ID NO: 73284
  chr7:5441349-5441438
  hypo

SEQ ID NO: 155879 - DNA, 287 bp, Homo sapiens
  chr7:5446685-5446972
  hypo
caagattctgtgccccggcctcgcagggacgtctggggcacccccacactccggtgatagagctcgaggctggggtggtgggacagggggctcaccctgcacgtccttggcactgcggctgggctatcagacctgtggccaccgccgccgttctggaactcccatcggcgcagaaaagaggcaggtgagagtccgaggctgcagtctcctccaagctatgctgggaccagaaccaggaccaagactgcagtagccaccagcccagatcaacccgcttcagccctgcc

SEQ ID NO: 155880 - DNA, 82 bp, Homo sapiens; identical to SEQ ID NO: 21136
  chr7:5449225-5449307
  hypo

SEQ ID NO: 155881 - DNA, 161 bp, Homo sapiens; identical to SEQ ID NO: 73287
  chr7:5453844-5454005
  hypo

SEQ ID NO: 155882 - DNA, 21 bp, Homo sapiens
  chr7:5455294-5455315
  hypo
agccaccgtgcccagcctgca

SEQ ID NO: 155883 - DNA, 222 bp, Homo sapiens; identical to SEQ ID NO: 5325
  chr7:5462089-5462311
  hypo

SEQ ID NO: 155884 - DNA, 31 bp, Homo sapiens; identical to SEQ ID NO: 73290
  chr7:5473942-5473973
  hypo

SEQ ID NO: 155885 - DNA, 31 bp, Homo sapiens; identical to SEQ ID NO: 21139
  chr7:5480613-5480644
  hypo

SEQ ID NO: 155886 - DNA, 31 bp, Homo sapiens; identical to SEQ ID NO: 21140
  chr7:5483111-5483142
  hypo

SEQ ID NO: 155887 - DNA, 250 bp, Homo sapiens
  chr7:5488161-5488411
  hypo
ccccactttggccggcgagactttgaaaagaaagctggacgtgcaggagcaggggttgggaaggggaattccaggaaggggcctgggactggggccctggaaccatggtggccccccaggccagatccacccctggacaggtgcaaggactctgggagcggccccaaggatccaaataccttcctcagcagcccctttaatttgctttctgcagaaagtaagctaatgccggcagcggagacttcattta

SEQ ID NO: 155888 - DNA, 191 bp, Homo sapiens; identical to SEQ ID NO: 73293
  chr7:5491668-5491859
  hypo

SEQ ID NO: 155889 - DNA, 30 bp, Homo sapiens
  chr7:5515639-5515669
  hypo
gtcatgagatacggcgagacccccaggtcc

SEQ ID NO: 155890 - DNA, 30 bp, Homo sapiens; identical to SEQ ID NO: 73294
  chr7:5515980-5516010
  hypo

SEQ ID NO: 155891 - DNA, 92 bp, Homo sapiens
  chr7:5521406-5521498
  hypo
caccaccacaggttcggcggttcctcggccactctgctcttaaataaggtgatctcatccaggtgcaccagggggacgtcccggatgacgtc

SEQ ID NO: 155892 - DNA, 103 bp, Homo sapiens; identical to SEQ ID NO: 73296
  chr7:5521755-5521858
  hypo

SEQ ID NO: 155893 - DNA, 157 bp, Homo sapiens
  chr7:5528280-5528437
  hypo
ctctaggtgcacagtcgcagcctcccactggctggagggcctgtgagtggagcccagccgcaagcgcaagcgtatggggggcgaaggcccgaggctcttcccacatctgacaggacagagctagggcggagctgcctgcatccgccacacctgagaa

SEQ ID NO: 155894 - DNA, 70 bp, Homo sapiens
  chr7:5528738-5528808
  hypo
ccgtgtttttaaaaccgccatgaaccagggcggaccacgacacccagatgagagccgtgaggacagcact

SEQ ID NO: 155895 - DNA, 337 bp, Homo sapiens
  chr7:5529738-5530075
  hypo
ggcaagcagggttgtcggcgcccagtggctcgagacgtcctggctgatggctcttctcgcaactctgtgaacagctggggcctccttcctgtcacctctccccacctgcagggacacgaacactcagggcgttcatgtcctgctgcccccttggccgggcgcacgcctctctcaggagccctgatcactccagcagtcagcccgtcctcctgagaggtcttgaaatgcgtcactccccacatcgcctaccaagctccagctctctccaggaatcgcctcctcctaatttgtgttcaattctaggtgctcacctgacttcctgcgcagcagcagagca

SEQ ID NO: 155896 - DNA, 190 bp, Homo sapiens
  chr7:5530810-5531000
  hypo
tgctggtgatttctgcggcccctgaagctgtacgcaacccacatcactcacctgcggagaagcgactgctgcaggctcttgcaggtggcgagggactccccggtgaacaggtggcacatgacaacctgcaggcagcgagccatgaaggccagcacggcatcgggctggagggtgccgctgcgagagacca

SEQ ID NO: 155897 - DNA, 30 bp, Homo sapiens
  chr7:5534243-5534273
  hypo
caaccctttgcagaccggaaggtgggaaac

SEQ ID NO: 155898 - DNA, 30 bp, Homo sapiens; identical to SEQ ID NO: 73297
  chr7:5540519-5540549
  hypo

SEQ ID NO: 155899 - DNA, 255 bp, Homo sapiens; identical to SEQ ID NO: 73298
  chr7:5541326-5541581
  hypo

SEQ ID NO: 155900 - DNA, 634 bp, Homo sapiens; identical to SEQ ID NO: 114562
  chr7:5594637-5595271
  hypo

SEQ ID NO: 155901 - DNA, 26 bp, Homo sapiens
  chr7:5625728-5625754
  hypo
ggtcagaacagtgctcgggctgggcg

SEQ ID NO: 155902 - DNA, 30 bp, Homo sapiens
  chr7:5626294-5626324
  hypo
tggcatgccgggccccggccctcagtgaaa

SEQ ID NO: 155903 - DNA, 920 bp, Homo sapiens; identical to SEQ ID NO: 5333
  chr7:5632265-5633185
  hypo

SEQ ID NO: 155904 - DNA, 215 bp, Homo sapiens; identical to SEQ ID NO: 43851
  chr7:5633395-5633610
  hypo

SEQ ID NO: 155905 - DNA, 30 bp, Homo sapiens
  chr7:5641104-5641134
  hypo
attacaggcgtgagccgccgtggcaacccg

SEQ ID NO: 155906 - DNA, 30 bp, Homo sapiens; identical to SEQ ID NO: 73303
  chr7:5641951-5641981
  hypo

SEQ ID NO: 155907 - DNA, 30 bp, Homo sapiens
  chr7:5642769-5642799
  hypo
cgcccaccccaccccgtggtgttaccttgc

SEQ ID NO: 155908 - DNA, 30 bp, Homo sapiens; identical to SEQ ID NO: 73304
  chr7:5643006-5643036
  hypo

SEQ ID NO: 155909 - DNA, 30 bp, Homo sapiens; identical to SEQ ID NO: 73305
  chr7:5644925-5644955
  hypo

SEQ ID NO: 155910 - DNA, 30 bp, Homo sapiens; identical to SEQ ID NO: 73306
  chr7:5646462-5646492
  hypo

SEQ ID NO: 155911 - DNA, 587 bp, Homo sapiens; identical to SEQ ID NO: 73307
  chr7:5647832-5648419
  hypo

SEQ ID NO: 155912 - DNA, 30 bp, Homo sapiens
  chr7:5652389-5652419
  hypo
agctccgacagtcctcgtccttgtcctccc

SEQ ID NO: 155913 - DNA, 33 bp, Homo sapiens
  chr7:5655101-5655134
  hypo
tgcccagctgagcagcgccgtccaggtctgcac

SEQ ID NO: 155914 - DNA, 94 bp, Homo sapiens
  chr7:5655366-5655460
  hypo
ctctgccctccctgccgtcctcggccaagcacttttcctgtctcccctccccagttctcacagcccgaggaagatgctgcggcgattcccactt

SEQ ID NO: 155915 - DNA, 30 bp, Homo sapiens
  chr7:5655660-5655690
  hypo
agacatgtgtgcagacgaagggacaggaag

SEQ ID NO: 155916 - DNA, 154 bp, Homo sapiens
  chr7:5692776-5692930
  hypo
ttgctcatcactcatcggcatggatgtcacccttaaaagtttcacttcatatataaacatgcatcttaaataatcaccacctttattctaggatccttcatagtttataaaatgctttcatatgtgccagaaactatcccacatcagtaagaat

SEQ ID NO: 155917 - DNA, 195 bp, Homo sapiens
  chr7:5697662-5697857
  hypo
tcagtgtaatgtgcacgcacacacggcaggggagcatgcatgtgcatgcagaggagaaagaggtgagtcagacaaggattctttgcggagctgacatcttcatgggattgactacagtaagtgccatgagtaatcagaacctccatgcaaccaataaagtgcttctcctactgggatctacgtcttagtgaaacg

SEQ ID NO: 155918 - DNA, 139 bp, Homo sapiens
  chr7:5730672-5730811
  hypo
cccagctcacacagccgtgcaaagaactctgttctcacgggttgatctgccatgtttttaagttccgacagaagcacacccatttctctaaccgtgtgtgtagacggtgagcctgggtgatcaacgtgacagcacttct

SEQ ID NO: 155919 - DNA, 18 bp, Homo sapiens
  chr7:5841285-5841303
  hypo
gcccggtggattaaggct

SEQ ID NO: 155920 - DNA, 302 bp, Homo sapiens
  chr7:5870804-5871106
  hypo
ttttcagtgggttgttttttccgtttccatctctggctagtcttgaaggctagacttgcgtaggagagcagacacgaggacatgagccagttctgctgagctgttactgtgtaaggagcagggagcgctggagggtggttgaaccgtgtccagccaggagttgagtgggcggtgggctggtcaccatggttaccgcagtgggccactagcttcacaattccgtagcatcgctttgtgctgcgaatgggaccttccgctcttgatcccctccttgtgttgacggctgctgcttgcatctccag

SEQ ID NO: 155921 - DNA, 223 bp, Homo sapiens
  chr7:5877161-5877384
  hypo
tccccactcccacatagctcccggtccctgctgctgcccccgggctgtgccctgcttgttgcccctcctctgcacgcgcttgtctcaccactggggacaatttgggtcgcccatttgcctatgaacatccgtcatcaccccagcagcatgtgtccagggggcccaccacagctctttatacccagcatccccccttgacctctgccacagtgatgaaagcccc

SEQ ID NO: 155922 - DNA, 30 bp, Homo sapiens; identical to SEQ ID NO: 73311
  chr7:5883630-5883660
  hypo

SEQ ID NO: 155923 - DNA, 30 bp, Homo sapiens; identical to SEQ ID NO: 21148
  chr7:5886707-5886737
  hypo

SEQ ID NO: 155924 - DNA, 30 bp, Homo sapiens
  chr7:5893741-5893771
  hypo
ctgacttcatgagaccgaggatctcgttcg

SEQ ID NO: 155925 - DNA, 160 bp, Homo sapiens
  chr7:5896909-5897069
  hypo
aagctgggaaccgttcgtgtttccagcaggcaaagtgaaaaacctcataatacctggggcattgaatcaagtgttcagaggggcgttgccttcgtggtgcggcagaattggccctagactaagggttggtctagttctgcaagtctcaaaaggaccacgc

SEQ ID NO: 155926 - DNA, 24 bp, Homo sapiens
  chr7:5917879-5917903
  hypo
cactgcgcccggccagtagtcaaa

SEQ ID NO: 155927 - DNA, 95 bp, Homo sapiens; identical to SEQ ID NO: 73315
  chr7:5920561-5920656
  hypo

SEQ ID NO: 155928 - DNA, 84 bp, Homo sapiens; identical to SEQ ID NO: 73316
  chr7:5997466-5997550
  hypo

SEQ ID NO: 155929 - DNA, 142 bp, Homo sapiens
  chr7:6034952-6035094
  hypo
ccactgcgcccggacagaaaagtcttcagttgaaacatctgaagctgggggccatctgcggtagacttctgtaaatgcacaaaataagataatgttaaagccatgtttctcaaagtcccgagctccacgtaaactgcctatt

SEQ ID NO: 155930 - DNA, 126 bp, Homo sapiens; identical to SEQ ID NO: 73318
  chr7:6054903-6055029
  hypo

SEQ ID NO: 155931 - DNA, 209 bp, Homo sapiens
  chr7:6058646-6058855
  hypo
gagaaatgtaaacaaacgtgaagatgagcatgaaatcccaactgcgtaacattaattgtggaacaaacagactgtactgctggaataatttcacagccgcctccagcgtggggagtgtctgcttcaatctgcttcagacaccctgtgacgctaatcatctcggtgtgagcagctaattcatctctccaggaaattgcatgttgcagtca

SEQ ID NO: 155932 - DNA, 28 bp, Homo sapiens
  chr7:6059154-6059182
  hypo
gctatttttccatcgtgcattgccataa

SEQ ID NO: 155933 - DNA, 42 bp, Homo sapiens; identical to SEQ ID NO: 73320
  chr7:6059657-6059699
  hypo

SEQ ID NO: 155934 - DNA, 336 bp, Homo sapiens
  chr7:6060508-6060844
  hypo
gtgtttatgatcaggcgagctcttacctataaaactgctaacacctgagacttaacgggaaaagataaacacagctgctgatcttttggttgtacaacgtctggacaagaacgctttttctggattaattccattgatgccttgtccttgaagtcaggatgtaccttgccagtaaggtacacctttttaaagttcttcaatgctgcaggcactcagagccccacgagttaacaccaagggcgtcaaagtcgtctacttgcccccaggctcattacacacagtactctatgaaattgtcagtgctatgaaagagaaccctggctgggcatggtggcg

SEQ ID NO: 155935 - DNA, 152 bp, Homo sapiens; identical to SEQ ID NO: 21154
  chr7:6068149-6068301
  hypo

SEQ ID NO: 155936 - DNA, 30 bp, Homo sapiens; identical to SEQ ID NO: 73323
  chr7:6075065-6075095
  hypo

SEQ ID NO: 155937 - DNA, 186 bp, Homo sapiens
  chr7:6076893-6077079
  hypo
atactctggatctatcgaacaatgacttatctgacagtaattataacctcctaagcaaatgaactaggacatgtaatcttatttagtttaatcaaccaacatcaagtcgtccctgatacaaagctcccactgctttcaatgatttcatcgcccccacttaccttcagatctcggtgcacaattccc

SEQ ID NO: 155938 - DNA, 241 bp, Homo sapiens
  chr7:6099498-6099739
  hypo
tgggcgacagagcaagactcactctcaaaaaaaaaaaaaaacgggagatgccaactacattccaaaacgcgcagtgaatccaacctaacagaaattcctcttagaatttacaactgaaatgttttccttaaaaaaaaaaaaaaaaaaaatttaggttgagggatacaggtgcaggttcgttttccaaactaaaaccccccgccctggccacactccatctactatgggttgaaaccctcag

SEQ ID NO: 155939 - DNA, 31 bp, Homo sapiens; identical to SEQ ID NO: 73325
  chr7:6116791-6116822
  hypo

SEQ ID NO: 155940 - DNA, 143 bp, Homo sapiens
  chr7:6124190-6124333
  hypo
ctccacatcgctgcccgcatcaccacgctgcggcatctgctgttgcatctgcgatccacaaggcctacaccattcgccatcgcacctggctgtttgttgcagatatttctcaggtctcttttacgccctgctacactcctcac

SEQ ID NO: 155941 - DNA, 101 bp, Homo sapiens; identical to SEQ ID NO: 21156
  chr7:6124620-6124721
  hypo

SEQ ID NO: 155942 - DNA, 32 bp, Homo sapiens
  chr7:6143252-6143284
  hypo
cttgggcggtggctccggagtgtaatcccagc

SEQ ID NO: 155943 - DNA, 28 bp, Homo sapiens
  chr7:6154602-6154630
  hypo
gagccactgtgcccggccctatatatat

SEQ ID NO: 155944 - DNA, 30 bp, Homo sapiens; identical to SEQ ID NO: 21158
  chr7:6188239-6188269
  hypo

SEQ ID NO: 155945 - DNA, 464 bp, Homo sapiens; identical to SEQ ID NO: 21159
  chr7:6188604-6189068
  hypo

SEQ ID NO: 155946 - DNA, 30 bp, Homo sapiens; identical to SEQ ID NO: 73330
  chr7:6189903-6189933
  hypo

SEQ ID NO: 155947 - DNA, 218 bp, Homo sapiens; identical to SEQ ID NO: 73331
  chr7:6193771-6193989
  hypo

SEQ ID NO: 155948 - DNA, 30 bp, Homo sapiens
  chr7:6196576-6196606
  hypo
tctctctggtggcccgcctctggaaggcgt

SEQ ID NO: 155949 - DNA, 30 bp, Homo sapiens; identical to SEQ ID NO: 21160
  chr7:6198831-6198861
  hypo

SEQ ID NO: 155950 - DNA, 30 bp, Homo sapiens; identical to SEQ ID NO: 21161
  chr7:6203252-6203282
  hypo

SEQ ID NO: 155951 - DNA, 30 bp, Homo sapiens; identical to SEQ ID NO: 21162
  chr7:6204506-6204536
  hypo

SEQ ID NO: 155952 - DNA, 239 bp, Homo sapiens; identical to SEQ ID NO: 73335
  chr7:6204759-6204998
  hypo

SEQ ID NO: 155953 - DNA, 533 bp, Homo sapiens
  chr7:6207762-6208295
  hypo
ccgttagcaggcaggcgcgtacgtgcacacacaggtccacatgcacacactttctgtatggcagctcggattgggccacctcctaggattttttttttttttttttttctggtgattgattcaagactcgaagtcttaagttaccaacaatcgtaagccacgcctgtgtacacagcagggctcctacgctctggcaaagcatccaggcctttttaagaccacctgttctaaaagcaaatctacaataagaatgcaaccaagccaggccgcactccccgctgagcacacgcctggaagcacgttctagatcctgcacccatctcgtctgcctccagccagggccctggctcgccagcctttggtctcgaactttgtttctgagaacacagcagacatacagggtgctgggagaggacaaggaagccagcccctagagcagcaggtgctcaccgggccgcccaccacactgaggccacgccagctggaccagcccctccagggcccctgcgcttggcacccggcgcccagccagc

SEQ ID NO: 155954 - DNA, 30 bp, Homo sapiens; identical to SEQ ID NO: 73337
  chr7:6208560-6208590
  hypo

SEQ ID NO: 155955 - DNA, 20 bp, Homo sapiens
  chr7:6209131-6209151
  hypo
gcacccggctgataaaattt

SEQ ID NO: 155956 - DNA, 31 bp, Homo sapiens; identical to SEQ ID NO: 73339
  chr7:6217462-6217493
  hypo

SEQ ID NO: 155957 - DNA, 200 bp, Homo sapiens; identical to SEQ ID NO: 73340
  chr7:6222703-6222903
  hypo

SEQ ID NO: 155958 - DNA, 45 bp, Homo sapiens; identical to SEQ ID NO: 73341
  chr7:6229681-6229726
  hypo

SEQ ID NO: 155959 - DNA, 148 bp, Homo sapiens
  chr7:6235847-6235995
  hypo
cgagtggaatgaatgcgcaccacacttagcgttgaaggagaagaaacacaaagaaatcgagatcaagagataacgtgagaagtaggaaagaatgaaagccaataaagaatttcaacaggcagaaaaccaacatcgaatgcccagagag

SEQ ID NO: 155960 - DNA, 31 bp, Homo sapiens; identical to SEQ ID NO: 21166
  chr7:6260173-6260204
  hypo

SEQ ID NO: 155961 - DNA, 30 bp, Homo sapiens
  chr7:6276755-6276785
  hypo
tcccgcctcggcaggcgttgcttcagctct

SEQ ID NO: 155962 - DNA, 30 bp, Homo sapiens; identical to SEQ ID NO: 73343
  chr7:6288056-6288086
  hypo

SEQ ID NO: 155963 - DNA, 30 bp, Homo sapiens
  chr7:6291168-6291198
  hypo
caatctgtgaaggaccgcaaaattctccgc

SEQ ID NO: 155964 - DNA, 42 bp, Homo sapiens
  chr7:6295661-6295703
  hypo
gggattacaggcatgagccattgcgcccggccaacctttaat

SEQ ID NO: 155965 - DNA, 83 bp, Homo sapiens; identical to SEQ ID NO: 21167
  chr7:6308100-6308183
  hypo

SEQ ID NO: 155966 - DNA, 30 bp, Homo sapiens
  chr7:6326342-6326372
  hypo
ggcacagtctcccctcggcgcccgcctgct

SEQ ID NO: 155967 - DNA, 30 bp, Homo sapiens; identical to SEQ ID NO: 21168
  chr7:6370702-6370732
  hypo

SEQ ID NO: 155968 - DNA, 284 bp, Homo sapiens
  chr7:6386233-6386517
  hypo
actcctgagcttaagcgacgcagacaccttggcctcccaaagtgttgggattacttacaggagtgagctactgtgcccagccatcttaactcaatttggatcaacagccggtgttaggtttcatgttaattaccatcacctgtgtcaggcaccagccacctgaagacctgctactgggacaatcatactttgatatggccaaaccgacgttagaaagggacggcacctgcagtgtggtggttctactgctcagactggttcattctgcacgccagggagcaacc

SEQ ID NO: 155969 - DNA, 95 bp, Homo sapiens; identical to SEQ ID NO: 73346
  chr7:6405540-6405635
  hypo

SEQ ID NO: 155970 - DNA, 26 bp, Homo sapiens
  chr7:6427338-6427364
  hypo
agagcgaaactccatctcaaaagaaa

SEQ ID NO: 155971 - DNA, 161 bp, Homo sapiens; identical to SEQ ID NO: 21169
  chr7:6432514-6432675
  hypo

SEQ ID NO: 155972 - DNA, 64 bp, Homo sapiens
  chr7:6438068-6438132
  hypo
cctctgtcttcaccatcgttgaacttaacgcctgcttttgaccaggtagcgtggagtgtttcag

SEQ ID NO: 155973 - DNA, 209 bp, Homo sapiens; identical to SEQ ID NO: 21170
  chr7:6443273-6443482
  hypo

SEQ ID NO: 155974 - DNA, 508 bp, Homo sapiens; identical to SEQ ID NO: 73350
  chr7:6443683-6444191
  hypo

SEQ ID NO: 155975 - DNA, 192 bp, Homo sapiens
  chr7:6448756-6448948
  hypo
cactatggtgacgcgcgctttattgtttcaactcctgaatccactggccgaccccagagccagaagagtagcaagaattcaatcagcaactcctgatgtggacaaacaactgggcagtgggaataggcagttggggggctgtggctcggcggggccgggggctccacttactttcccgatcgggtttcgtct

SEQ ID NO: 155976 - DNA, 30 bp, Homo sapiens
  chr7:6449198-6449228
  hypo
cgggccagggcttcccgaggctgtctccac

SEQ ID NO: 155977 - DNA, 70 bp, Homo sapiens
  chr7:6449560-6449630
  hypo
gtctggcatgtggtcggtgagcatcttcggacctatgagtattttgctgaattccgcttcgtgtgaccac

SEQ ID NO: 155978 - DNA, 100 bp, Homo sapiens; identical to SEQ ID NO: 73353
  chr7:6450103-6450203
  hypo

SEQ ID NO: 155979 - DNA, 30 bp, Homo sapiens
  chr7:6463925-6463955
  hypo
gagaacggcaggccacgagggcctgtgagg

SEQ ID NO: 155980 - DNA, 30 bp, Homo sapiens
  chr7:6464319-6464349
  hypo
gcagctgtgggctcccgctcccgcacccac

SEQ ID NO: 155981 - DNA, 17 bp, Homo sapiens
  chr7:6483609-6483626
  hypo
ataggtgatcagacgcg

SEQ ID NO: 155982 - DNA, 89 bp, Homo sapiens; identical to SEQ ID NO: 21174
  chr7:6484555-6484644
  hypo

SEQ ID NO: 155983 - DNA, 30 bp, Homo sapiens; identical to SEQ ID NO: 73356
  chr7:6484891-6484921
  hypo

SEQ ID NO: 155984 - DNA, 30 bp, Homo sapiens; identical to SEQ ID NO: 73357
  chr7:6485702-6485732
  hypo

SEQ ID NO: 155985 - DNA, 17 bp, Homo sapiens
  chr7:6499370-6499387
  hypo
ttttttttttttttttt

SEQ ID NO: 155986 - DNA, 178 bp, Homo sapiens
  chr7:6500828-6501006
  hypo
agtcccacactccctcgcaggcacccttgctaagatgtcctcctgggtgaccaaaacggtggtaacatagccaaggttacttttacttgggtaggatgactgcagaaggaatggctacacagagcttccagacctttccatgcgttgtgctctccagaggatgcgccaggtgtatcag

SEQ ID NO: 155987 - DNA, 45 bp, Homo sapiens; identical to SEQ ID NO: 21176
  chr7:6524567-6524612
  hypo

SEQ ID NO: 155988 - DNA, 181 bp, Homo sapiens; identical to SEQ ID NO: 21177
  chr7:6524911-6525092
  hypo

SEQ ID NO: 155989 - DNA, 30 bp, Homo sapiens; identical to SEQ ID NO: 73362
  chr7:6542458-6542488
  hypo

SEQ ID NO: 155990 - DNA, 262 bp, Homo sapiens
  chr7:6545732-6545994
  hypo
cctcctggggtcaatcgagactcaagacttggaacactactcgtgcagaagccagcaaggtgggactgcagcgggggcatgaaggagctgtgaagaggctagagccaagtaaggggctaccggaggtggctcaggggtctggctctgtcatcaggtctccttggagagcggtgagttcaccagggctgccctgggcagagtgagctggtgctgagagaactgcaactgtgacagcctaggggccagacgctggacacgtggc

SEQ ID NO: 155991 - DNA, 30 bp, Homo sapiens; identical to SEQ ID NO: 73363
  chr7:6550346-6550376
  hypo

SEQ ID NO: 155992 - DNA, 203 bp, Homo sapiens
  chr7:6560220-6560423
  hypo
aagctctcgagggcccggcagaccccatagcgctcaggaggtgtgagtaggtgctccagctgctggctgaaggtcctcccttggacccggatgctggacggcaggatctccgccacccactgcagggaggtgagcgccgacgacgggttgggtgagtccagagaatcggagtctgctgggaccacaggcgggagaggcatgag

SEQ ID NO: 155993 - DNA, 484 bp, Homo sapiens; identical to SEQ ID NO: 114595
  chr7:6570378-6570862
  hypo

SEQ ID NO: 155994 - DNA, 305 bp, Homo sapiens; identical to SEQ ID NO: 43864
  chr7:6570900-6571205
  hypo

SEQ ID NO: 155995 - DNA, 134 bp, Homo sapiens; identical to SEQ ID NO: 114597
  chr7:6575940-6576074
  hypo

SEQ ID NO: 155996 - DNA, 127 bp, Homo sapiens
  chr7:6597054-6597181
  hypo
tgactgcaatgaccacggagttcagagcacagtgctcccgggacgcccaaggacactcgcttgtggccggccctctgctgctcagggccttggcatcagttaccgatgtgcccgcagtgacagctgg

SEQ ID NO: 155997 - DNA, 42 bp, Homo sapiens; identical to SEQ ID NO: 21178
  chr7:6619098-6619140
  hypo

SEQ ID NO: 155998 - DNA, 30 bp, Homo sapiens; identical to SEQ ID NO: 73369
  chr7:6628987-6629017
  hypo

SEQ ID NO: 155999 - DNA, 31 bp, Homo sapiens; identical to SEQ ID NO: 73370
  chr7:6641614-6641645
  hypo

SEQ ID NO: 156000 - DNA, 29 bp, Homo sapiens
  chr7:6643896-6643925
  hypo
ttcataccgatgcagttactaactagcaa

SEQ ID NO: 156001 - DNA, 333 bp, Homo sapiens; identical to SEQ ID NO: 21180
  chr7:6644209-6644542
  hypo

SEQ ID NO: 156002 - DNA, 25 bp, Homo sapiens
  chr7:6645338-6645363
  hypo
ttcttttttgagacagagtctcgct

SEQ ID NO: 156003 - DNA, 204 bp, Homo sapiens; identical to SEQ ID NO: 21182
  chr7:6645602-6645806
  hypo

SEQ ID NO: 156004 - DNA, 53 bp, Homo sapiens; identical to SEQ ID NO: 73375
  chr7:6646145-6646198
  hypo

SEQ ID NO: 156005 - DNA, 1291 bp, Homo sapiens; identical to SEQ ID NO: 21183
  chr7:6647170-6648461
  hypo

SEQ ID NO: 156006 - DNA, 43 bp, Homo sapiens
  chr7:6650216-6650259
  hypo
acacacttccctgtcctggcacggttgatggcatttattgggt

SEQ ID NO: 156007 - DNA, 358 bp, Homo sapiens; identical to SEQ ID NO: 114600
  chr7:6654777-6655135
  hypo

SEQ ID NO: 156008 - DNA, 666 bp, Homo sapiens; identical to SEQ ID NO: 114601
  chr7:6655355-6656021
  hypo

SEQ ID NO: 156009 - DNA, 102 bp, Homo sapiens; identical to SEQ ID NO: 73380
  chr7:6661789-6661891
  hypo

SEQ ID NO: 156010 - DNA, 30 bp, Homo sapiens; identical to SEQ ID NO: 73381
  chr7:6662314-6662344
  hypo

SEQ ID NO: 156011 - DNA, 134 bp, Homo sapiens
  chr7:6662670-6662804
  hypo
cccgggttcatgggcgctggaggcgtcctggaatatccctggagtaaaaggcttccaccatcatcatcatcatcatcttccggattccctgagaaaataccaggttcacagatttcaccgccagaaaaatccat

SEQ ID NO: 156012 - DNA, 31 bp, Homo sapiens; identical to SEQ ID NO: 21185
  chr7:6682330-6682361
  hypo

SEQ ID NO: 156013 - DNA, 174 bp, Homo sapiens
  chr7:6682658-6682832
  hypo
ggaggaggatgaggacgaggatgatttgctgacggctgggtgtcaggtgagccgccctctccgtttggggcttgggtaacctgggcagggtttcccccggggcctcggcacctgctgtttggaggcgtctgttggcagcggccatggcactggagtccccggaccaggcccagg

SEQ ID NO: 156014 - DNA, 133 bp, Homo sapiens
  chr7:6683067-6683200
  hypo
accagtgcccacgctcggtttagttgctgctgcttgtccactcgggtgtgggccctccatggctgacatggccattgcactggcttgagccagactgcatgaagagggggactgggggcggggctccctgtct

SEQ ID NO: 156015 - DNA, 191 bp, Homo sapiens
  chr7:6686202-6686393
  hypo
cctgcggatggtcgtcgtgttggggctggcaggcctgggatgccccccggccctgagtgggtgtgtaaagtcagtctctgaaatgtgatccatagcctgtgtactgagtggctaccctcccctgatgctccccgcctcccccagtgctccctgcctcccctgcattcatttctggtcggctgagctggttg

SEQ ID NO: 156016 - DNA, 31 bp, Homo sapiens; identical to SEQ ID NO: 21188
  chr7:6687041-6687072
  hypo

SEQ ID NO: 156017 - DNA, 30 bp, Homo sapiens; identical to SEQ ID NO: 21189
  chr7:6689203-6689233
  hypo

SEQ ID NO: 156018 - DNA, 30 bp, Homo sapiens; identical to SEQ ID NO: 73387
  chr7:6692430-6692460
  hypo

SEQ ID NO: 156019 - DNA, 187 bp, Homo sapiens; identical to SEQ ID NO: 73388
  chr7:6692858-6693045
  hypo

SEQ ID NO: 156020 - DNA, 30 bp, Homo sapiens; identical to SEQ ID NO: 21191
  chr7:6693319-6693349
  hypo

SEQ ID NO: 156021 - DNA, 30 bp, Homo sapiens; identical to SEQ ID NO: 21192
  chr7:6693823-6693853
  hypo

SEQ ID NO: 156022 - DNA, 30 bp, Homo sapiens; identical to SEQ ID NO: 73391
  chr7:6694358-6694388
  hypo

SEQ ID NO: 156023 - DNA, 30 bp, Homo sapiens; identical to SEQ ID NO: 73392
  chr7:6694720-6694750
  hypo

SEQ ID NO: 156024 - DNA, 173 bp, Homo sapiens; identical to SEQ ID NO: 73393
  chr7:6694963-6695136
  hypo

SEQ ID NO: 156025 - DNA, 105 bp, Homo sapiens; identical to SEQ ID NO: 114605
  chr7:6966950-6967055
  hypo

SEQ ID NO: 156026 - DNA, 30 bp, Homo sapiens; identical to SEQ ID NO: 5339
  chr7:7044631-7044661
  hypo

SEQ ID NO: 156027 - DNA, 30 bp, Homo sapiens
  chr7:7054094-7054124
  hypo
aaccctgggcagcctcgctcactctttcag

SEQ ID NO: 156028 - DNA, 218 bp, Homo sapiens; identical to SEQ ID NO: 73396
  chr7:7097446-7097664
  hypo

SEQ ID NO: 156029 - DNA, 377 bp, Homo sapiens; identical to SEQ ID NO: 73397
  chr7:7097927-7098304
  hypo

SEQ ID NO: 156030 - DNA, 156 bp, Homo sapiens; identical to SEQ ID NO: 73398
  chr7:7099523-7099679
  hypo

SEQ ID NO: 156031 - DNA, 165 bp, Homo sapiens
  chr7:7102867-7103032
  hypo
ttgttcctaatatcccggggggagtcagtgatattggcaatatcacagggtgtgtacaccacacctgttatattgttttttttttccggcaatgaagaaattgatactattgtcaaaacagaatgcgcggtacaccccgcatgagatattgtttctaatatccat

SEQ ID NO: 156032 - DNA, 44 bp, Homo sapiens; identical to SEQ ID NO: 73400
  chr7:7103151-7103195
  hypo

SEQ ID NO: 156033 - DNA, 30 bp, Homo sapiens; identical to SEQ ID NO: 73401
  chr7:7103796-7103826
  hypo

SEQ ID NO: 156034 - DNA, 115 bp, Homo sapiens
  chr7:7109414-7109529
  hypo
aaaaaacggagatgacgttaccctagtatcacaaagggtgtatccccccctgtatattgttcgtaatatgcaaggggtgagatgacgttactcccagtatcgtagggggtgtacc

SEQ ID NO: 156035 - DNA, 91 bp, Homo sapiens
  chr7:7109911-7110002
  hypo
taaggggggagacgacgtcactcccagtgtcgcagggggtgtaccccttctgtgatactgttcttaatatttaaggggggagattatgtgc

SEQ ID NO: 156036 - DNA, 30 bp, Homo sapiens
  chr7:7112446-7112476
  hypo
tgttactcctaatatcgcagggggtgtaca

SEQ ID NO: 156037 - DNA, 30 bp, Homo sapiens
  chr7:7113088-7113118
  hypo
ggggcgtacaccctccgtgatatttctcgt

SEQ ID NO: 156038 - DNA, 50 bp, Homo sapiens; identical to SEQ ID NO: 73402
  chr7:7188992-7189042
  hypo

SEQ ID NO: 156039 - DNA, 30 bp, Homo sapiens; identical to SEQ ID NO: 73403
  chr7:7247775-7247805
  hypo

SEQ ID NO: 156040 - DNA, 37 bp, Homo sapiens; identical to SEQ ID NO: 21195
  chr7:7249347-7249384
  hypo

SEQ ID NO: 156041 - DNA, 33 bp, Homo sapiens; identical to SEQ ID NO: 73405
  chr7:7284845-7284878
  hypo

SEQ ID NO: 156042 - DNA, 22 bp, Homo sapiens
  chr7:7504653-7504675
  hypo
tatgaacacctttatgcgcata

SEQ ID NO: 156043 - DNA, 217 bp, Homo sapiens; identical to SEQ ID NO: 73406
  chr7:7605216-7605433
  hypo

SEQ ID NO: 156044 - DNA, 405 bp, Homo sapiens; identical to SEQ ID NO: 5341
  chr7:7605663-7606068
  hypo

SEQ ID NO: 156045 - DNA, 101 bp, Homo sapiens; identical to SEQ ID NO: 21198
  chr7:7612730-7612831
  hypo

SEQ ID NO: 156046 - DNA, 180 bp, Homo sapiens; identical to SEQ ID NO: 21199
  chr7:7613123-7613303
  hypo

SEQ ID NO: 156047 - DNA, 166 bp, Homo sapiens
  chr7:7621496-7621662
  hypo
cttcccttgattcgctcggtgaactgagtaagggccttaattatatctgcaaaatgctttcacctctgctgtattctgttatctcgagacaagttacagattctacctgtacgcaaggggaggggtttacacaagagtgtggttggcggggcgggagggcgggcca

SEQ ID NO: 156048 - DNA, 90 bp, Homo sapiens; identical to SEQ ID NO: 73411
  chr7:7666891-7666981
  hypo

SEQ ID NO: 156049 - DNA, 30 bp, Homo sapiens; identical to SEQ ID NO: 73412
  chr7:7678616-7678646
  hypo

SEQ ID NO: 156050 - DNA, 31 bp, Homo sapiens
  chr7:7752548-7752579
  hypo
aaaattatcttggcctcgtgtttctttagtg

SEQ ID NO: 156051 - DNA, 87 bp, Homo sapiens
  chr7:7799054-7799141
  hypo
gattccataagagtccggttacatcgagcattttgcgccctctttaaacttgactgagaatttacaaggccacggggcttacagcat

SEQ ID NO: 156052 - DNA, 82 bp, Homo sapiens; identical to SEQ ID NO: 73413
  chr7:7807036-7807118
  hypo

SEQ ID NO: 156053 - DNA, 83 bp, Homo sapiens
  chr7:7822312-7822395
  hypo
tctgtgcctacaagccgaaacaatagcagaatgtcttgtgtataacctctctcttttttttttttttttttttgagacggagt

SEQ ID NO: 156054 - DNA, 31 bp, Homo sapiens; identical to SEQ ID NO: 21201
  chr7:7824632-7824663
  hypo

SEQ ID NO: 156055 - DNA, 60 bp, Homo sapiens
  chr7:7839193-7839253
  hypo
taaataatatttcttcgagtaaaggactttttatagtgcgttatacgtattttcttagaa

SEQ ID NO: 156056 - DNA, 98 bp, Homo sapiens
  chr7:7880863-7880961
  hypo
tactttagtgactcccgaagatgtggttccactgaagaatgcaaggaattatagctacgaactgtcaatataacaagtgatctttttttttttttttt

SEQ ID NO: 156057 - DNA, 101 bp, Homo sapiens
  chr7:7935068-7935169
  hypo
cttattcaaacttcgcgttttaattgtttggaattcttagacagagtaggtggaatttcatcctttgtatgttttaaggagagcttcgctcctctctttac

SEQ ID NO: 156058 - DNA, 91 bp, Homo sapiens
  chr7:7998933-7999024
  hypo
ggcttatgggtatatcgataggaatattttctcttttcttttttctttttttttgagacagagtccaatggtgtgatcttggctaaccaca

SEQ ID NO: 156059 - DNA, 30 bp, Homo sapiens; identical to SEQ ID NO: 21202
  chr7:8153354-8153384
  hypo

SEQ ID NO: 156060 - DNA, 30 bp, Homo sapiens
  chr7:8157895-8157925
  hypo
acaatgaaaaaatacgaagagttctaaaag

SEQ ID NO: 156061 - DNA, 30 bp, Homo sapiens
  chr7:8176161-8176191
  hypo
cgttaatatttaagccgacgctaccctgtg

SEQ ID NO: 156062 - DNA, 30 bp, Homo sapiens
  chr7:8183398-8183428
  hypo
agtaagacaagtctgcgtctgaggcccagc

SEQ ID NO: 156063 - DNA, 30 bp, Homo sapiens
  chr7:8190944-8190974
  hypo
ccagtcgccatcaggcgtggatgaacaaat

SEQ ID NO: 156064 - DNA, 30 bp, Homo sapiens
  chr7:8220094-8220124
  hypo
ttatgaaaatactgccgtgaacattcttgt

SEQ ID NO: 156065 - DNA, 30 bp, Homo sapiens; identical to SEQ ID NO: 73419
  chr7:8254696-8254726
  hypo

SEQ ID NO: 156066 - DNA, 30 bp, Homo sapiens
  chr7:8261139-8261169
  hypo
aaattaaatctaagcggcaggctacagggt

SEQ ID NO: 156067 - DNA, 24 bp, Homo sapiens
  chr7:8343760-8343784
  hypo
ctcctcccccggaattttcttaat

SEQ ID NO: 156068 - DNA, 839 bp, Homo sapiens; identical to SEQ ID NO: 114631
  chr7:8483147-8483986
  hypo

SEQ ID NO: 156069 - DNA, 37 bp, Homo sapiens; identical to SEQ ID NO: 73422
  chr7:8954795-8954832
  hypo

SEQ ID NO: 156070 - DNA, 26 bp, Homo sapiens
  chr7:9017653-9017679
  hypo
ataaagcatatagaaaacacacggcc

SEQ ID NO: 156071 - DNA, 30 bp, Homo sapiens; identical to SEQ ID NO: 5354
  chr7:9580107-9580137
  hypo

SEQ ID NO: 156072 - DNA, 43 bp, Homo sapiens
  chr7:9707912-9707955
  hypo
cactatttatgttcaatatatcgttgtattatacaagacctaa

SEQ ID NO: 156073 - DNA, 705 bp, Homo sapiens; identical to SEQ ID NO: 73425
  chr7:9766086-9766791
  hypo

SEQ ID NO: 156074 - DNA, 27 bp, Homo sapiens
  chr7:10357576-10357603
  hypo
tattttattttatttatttatcgttat

SEQ ID NO: 156075 - DNA, 285 bp, Homo sapiens
  chr7:10516003-10516288
  hypo
ttgtttagatatgtgatttttcgccaccggctccagcacccctgggccgtgcaacccggtccctacaggtgaggatccagctccacccctgctcgcctgccaggcggtggagacctcgaaatgaagacagcatgagttctgcaatactgggcctgccgcctaccctccctgagcctcagtttgctggcccgtgaagtgggcatagtcacgaagcgtctcatctccgtcgggctcagtgtcaggtgccgttgcccctttcagaccgctgtttaacaactttggaca

SEQ ID NO: 156076 - DNA, 25 bp, Homo sapiens
  chr7:10650170-10650195
  hypo
tttttttttttttttcccagacgca

SEQ ID NO: 156077 - DNA, 24 bp, Homo sapiens
  chr7:10704173-10704197
  hypo
tgagatagatagacagacagacgg

SEQ ID NO: 156078 - DNA, 33 bp, Homo sapiens
  chr7:11281034-11281067
  hypo
aggcgcggtggctcacgcctgtaatcccagcac

SEQ ID NO: 156079 - DNA, 30 bp, Homo sapiens; identical to SEQ ID NO: 73429
  chr7:12395027-12395057
  hypo

SEQ ID NO: 156080 - DNA, 137 bp, Homo sapiens
  chr7:12510650-12510787
  hypo
gctttgctggtgcgcgacggcgtgttgctgttcctcactgcctctcgcggcgtccgttcgcccctcgccttcctcaggttcaggctgagcgccgcgtgggccgcagccagagggggcgtagcggaacgggagcgggc

SEQ ID NO: 156081 - DNA, 31 bp, Homo sapiens; identical to SEQ ID NO: 73431
  chr7:12740190-12740221
  hypo

SEQ ID NO: 156082 - DNA, 100 bp, Homo sapiens; identical to SEQ ID NO: 73432
  chr7:12750830-12750930
  hypo

SEQ ID NO: 156083 - DNA, 31 bp, Homo sapiens; identical to SEQ ID NO: 73433
  chr7:12751553-12751584
  hypo

SEQ ID NO: 156084 - DNA, 33 bp, Homo sapiens; identical to SEQ ID NO: 73434
  chr7:12763982-12764015
  hypo

SEQ ID NO: 156085 - DNA, 18 bp, Homo sapiens
  chr7:12779952-12779970
  hypo
gcccggcccttactgttg

SEQ ID NO: 156086 - DNA, 45 bp, Homo sapiens; identical to SEQ ID NO: 73436
  chr7:12795791-12795836
  hypo

SEQ ID NO: 156087 - DNA, 31 bp, Homo sapiens; identical to SEQ ID NO: 73437
  chr7:12802525-12802556
  hypo

SEQ ID NO: 156088 - DNA, 31 bp, Homo sapiens; identical to SEQ ID NO: 21209
  chr7:12971156-12971187
  hypo

SEQ ID NO: 156089 - DNA, 35 bp, Homo sapiens; identical to SEQ ID NO: 73439
  chr7:13761023-13761058
  hypo

SEQ ID NO: 156090 - DNA, 28 bp, Homo sapiens
  chr7:14352863-14352891
  hypo
ttcaattaaaacaacatattgcggggag

SEQ ID NO: 156091 - DNA, 32 bp, Homo sapiens; identical to SEQ ID NO: 73441
  chr7:15128781-15128813
  hypo

SEQ ID NO: 156092 - DNA, 90 bp, Homo sapiens
  chr7:15436140-15436230
  hypo
tacattgcaaagagcaaaagaacaaagctaccacaacgaggaaaaggacaacagcttgccgctccttgcttggatcgccagcttttattc

SEQ ID NO: 156093 - DNA, 79 bp, Homo sapiens; identical to SEQ ID NO: 73442
  chr7:16189281-16189360
  hypo

SEQ ID NO: 156094 - DNA, 19 bp, Homo sapiens
  chr7:16189599-16189618
  hypo
gagtcattaaaaaaaaaaa

SEQ ID NO: 156095 - DNA, 38 bp, Homo sapiens
  chr7:16256010-16256048
  hypo
gtagtaaacactcagagaaaacgaggttgaaaaaccaa

SEQ ID NO: 156096 - DNA, 89 bp, Homo sapiens
  chr7:16313197-16313286
  hypo
aaagccacttccactcgtcagtaaatcctccacattcaccacccttcaattaactgatgcagcctgattcctcccggacaccgaacaag

SEQ ID NO: 156097 - DNA, 16 bp, Homo sapiens
  chr7:16313945-16313961
  hypo
acggacgtgagccacc

SEQ ID NO: 156098 - DNA, 39 bp, Homo sapiens; identical to SEQ ID NO: 21210
  chr7:16370911-16370950
  hypo

SEQ ID NO: 156099 - DNA, 132 bp, Homo sapiens; identical to SEQ ID NO: 73447
  chr7:16436344-16436476
  hypo

SEQ ID NO: 156100 - DNA, 30 bp, Homo sapiens; identical to SEQ ID NO: 73448
  chr7:16437432-16437462
  hypo

SEQ ID NO: 156101 - DNA, 136 bp, Homo sapiens; identical to SEQ ID NO: 73449
  chr7:16438007-16438143
  hypo

SEQ ID NO: 156102 - DNA, 162 bp, Homo sapiens
  chr7:16439150-16439312
  hypo
acacgtgactgacacgagattgacatgaatgacatgacacgtttgtgacatgtgacaagcgacttacacgattggcatgtgtccaacacgtgactgacccgatcgacacatgatcgacatgtaatcaacgtgtgacacgtggccgacgcatgaccagtgaca

SEQ ID NO: 156103 - DNA, 482 bp, Homo sapiens; identical to SEQ ID NO: 73451
  chr7:16439978-16440460
  hypo

SEQ ID NO: 156104 - DNA, 31 bp, Homo sapiens; identical to SEQ ID NO: 73452
  chr7:16542229-16542260
  hypo

SEQ ID NO: 156105 - DNA, 30 bp, Homo sapiens; identical to SEQ ID NO: 73453
  chr7:16566246-16566276
  hypo

SEQ ID NO: 156106 - DNA, 30 bp, Homo sapiens; identical to SEQ ID NO: 73454
  chr7:16566869-16566899
  hypo

SEQ ID NO: 156107 - DNA, 30 bp, Homo sapiens; identical to SEQ ID NO: 73455
  chr7:16625231-16625261
  hypo

SEQ ID NO: 156108 - DNA, 285 bp, Homo sapiens; identical to SEQ ID NO: 114655
  chr7:16793056-16793341
  hypo

SEQ ID NO: 156109 - DNA, 182 bp, Homo sapiens; identical to SEQ ID NO: 114656
  chr7:16793380-16793562
  hypo

SEQ ID NO: 156110 - DNA, 29 bp, Homo sapiens
  chr7:16810118-16810147
  hypo
gccaccgcgcccagcccccttttatcttt

SEQ ID NO: 156111 - DNA, 183 bp, Homo sapiens; identical to SEQ ID NO: 73458
  chr7:16844193-16844376
  hypo

SEQ ID NO: 156112 - DNA, 29 bp, Homo sapiens
  chr7:16917187-16917216
  hypo
ctttgagaatattttcttggccgggcgcg

SEQ ID NO: 156113 - DNA, 30 bp, Homo sapiens
  chr7:17108731-17108761
  hypo
attcacaaggtaaggcggaaagtgattctt

SEQ ID NO: 156114 - DNA, 338 bp, Homo sapiens
  chr7:17214725-17215063
  hypo
tggaagcatcatctgcgttgtgagaccttccttctgatgtttttctgcagctggtctgttagctcctgaggcttacgctgttttcttgttcattgtgtgtaattttcttatatccccttagcacagccttgacaagtagtaattgctttacaagtgtttgttttatataactgaattgcagtgaatagcggggcttagcctgagcttcagctgattctttagacagaaaactaagtatttcaagccctgcgtgtaaatcccaggtgaggctattttggtcaggtgaatgttttagcacttgtcagctcatagcgtggaggtagcggccagctttccct

SEQ ID NO: 156115 - DNA, 31 bp, Homo sapiens; identical to SEQ ID NO: 73461
  chr7:17324454-17324485
  hypo

SEQ ID NO: 156116 - DNA, 1039 bp, Homo sapiens; identical to SEQ ID NO: 114657
  chr7:17338061-17339100
  hypo

SEQ ID NO: 156117 - DNA, 37 bp, Homo sapiens; identical to SEQ ID NO: 21217
  chr7:17413226-17413263
  hypo

SEQ ID NO: 156118 - DNA, 31 bp, Homo sapiens; identical to SEQ ID NO: 73466
  chr7:17705052-17705083
  hypo

SEQ ID NO: 156119 - DNA, 31 bp, Homo sapiens; identical to SEQ ID NO: 21218
  chr7:17891210-17891241
  hypo

SEQ ID NO: 156120 - DNA, 34 bp, Homo sapiens; identical to SEQ ID NO: 73468
  chr7:18041862-18041896
  hypo

SEQ ID NO: 156121 - DNA, 195 bp, Homo sapiens; identical to SEQ ID NO: 5372
  chr7:18125866-18126061
  hypo

SEQ ID NO: 156122 - DNA, 375 bp, Homo sapiens; identical to SEQ ID NO: 5373
  chr7:18126082-18126457
  hypo

SEQ ID NO: 156123 - DNA, 411 bp, Homo sapiens; identical to SEQ ID NO: 114662
  chr7:18126465-18126876
  hypo

SEQ ID NO: 156124 - DNA, 40 bp, Homo sapiens; identical to SEQ ID NO: 21222
  chr7:18927744-18927784
  hypo

SEQ ID NO: 156125 - DNA, 442 bp, Homo sapiens; identical to SEQ ID NO: 5381
  chr7:19156303-19156745
  hypo

SEQ ID NO: 156126 - DNA, 511 bp, Homo sapiens; identical to SEQ ID NO: 5382
  chr7:19157055-19157566
  hypo

SEQ ID NO: 156127 - DNA, 41 bp, Homo sapiens; identical to SEQ ID NO: 73475
  chr7:19379033-19379074
  hypo

SEQ ID NO: 156128 - DNA, 23 bp, Homo sapiens
  chr7:19549247-19549270
  hypo
attacaggcgtgagccaccgcgc

SEQ ID NO: 156129 - DNA, 69 bp, Homo sapiens
  chr7:19740985-19741054
  hypo
agggattacagggaacggagggaagaagggagaaatgaataggtggagcacaagcggtttttaggagag

SEQ ID NO: 156130 - DNA, 30 bp, Homo sapiens
  chr7:19800556-19800586
  hypo
ctttcttccacaccacgctgtcttttcctc

SEQ ID NO: 156131 - DNA, 19 bp, Homo sapiens
  chr7:20178579-20178598
  hypo
ccatcgcgcccggccaaga

SEQ ID NO: 156132 - DNA, 17 bp, Homo sapiens
  chr7:20244050-20244067
  hypo
tacgcatgagccactgc

SEQ ID NO: 156133 - DNA, 30 bp, Homo sapiens
  chr7:20421349-20421379
  hypo
agtcatatcggatggcgaaaagaggctaaa

SEQ ID NO: 156134 - DNA, 186 bp, Homo sapiens; identical to SEQ ID NO: 73476
  chr7:20628396-20628582
  hypo

SEQ ID NO: 156135 - DNA, 31 bp, Homo sapiens; identical to SEQ ID NO: 21226
  chr7:20664637-20664668
  hypo

SEQ ID NO: 156136 - DNA, 39 bp, Homo sapiens; identical to SEQ ID NO: 73478
  chr7:20719882-20719921
  hypo

SEQ ID NO: 156137 - DNA, 24 bp, Homo sapiens
  chr7:20797449-20797473
  hypo
gccgacaatttaaaggtttaaaat

SEQ ID NO: 156138 - DNA, 676 bp, Homo sapiens; identical to SEQ ID NO: 43940
  chr7:20817280-20817956
  hypo

SEQ ID NO: 156139 - DNA, 2035 bp, Homo sapiens; identical to SEQ ID NO: 43946
  chr7:20824835-20826870
  hypo

SEQ ID NO: 156140 - DNA, 70 bp, Homo sapiens; identical to SEQ ID NO: 43953
  chr7:20837556-20837626
  hypo

SEQ ID NO: 156141 - DNA, 182 bp, Homo sapiens; identical to SEQ ID NO: 43954
  chr7:20837650-20837832
  hypo

SEQ ID NO: 156142 - DNA, 31 bp, Homo sapiens; identical to SEQ ID NO: 73484
  chr7:20852609-20852640
  hypo

SEQ ID NO: 156143 - DNA, 29 bp, Homo sapiens
  chr7:20854796-20854825
  hypo
gggcgcgggggctcacgcctctaatccca

SEQ ID NO: 156144 - DNA, 121 bp, Homo sapiens; identical to SEQ ID NO: 21233
  chr7:20855064-20855185
  hypo

SEQ ID NO: 156145 - DNA, 43 bp, Homo sapiens; identical to SEQ ID NO: 73486
  chr7:20930361-20930404
  hypo

SEQ ID NO: 156146 - DNA, 38 bp, Homo sapiens; identical to SEQ ID NO: 21234
  chr7:21409420-21409458
  hypo

SEQ ID NO: 156147 - DNA, 38 bp, Homo sapiens; identical to SEQ ID NO: 21235
  chr7:21501379-21501417
  hypo

SEQ ID NO: 156148 - DNA, 30 bp, Homo sapiens
  chr7:21790431-21790461
  hypo
taaaggtcaactgcacggtacggatttgca

SEQ ID NO: 156149 - DNA, 92 bp, Homo sapiens
  chr7:21924278-21924370
  hypo
catgcactgactcatcggctctttataaaaaccctatgaggtatgcagagctgacgctgttattcccttttctagaccgagatgctgaaaca

SEQ ID NO: 156150 - DNA, 30 bp, Homo sapiens; identical to SEQ ID NO: 73489
  chr7:21946101-21946131
  hypo

SEQ ID NO: 156151 - DNA, 1128 bp, Homo sapiens; identical to SEQ ID NO: 43960
  chr7:21984771-21985899
  hypo

SEQ ID NO: 156152 - DNA, 32 bp, Homo sapiens
  chr7:22028251-22028283
  hypo
cgcttggaagtgtcacgcgtaatttctgccca

SEQ ID NO: 156153 - DNA, 38 bp, Homo sapiens; identical to SEQ ID NO: 73491
  chr7:22083772-22083810
  hypo

SEQ ID NO: 156154 - DNA, 185 bp, Homo sapiens; identical to SEQ ID NO: 43961
  chr7:22143357-22143542
  hypo

SEQ ID NO: 156155 - DNA, 39 bp, Homo sapiens
  chr7:22143964-22144003
  hypo
tgggattacaggcgtgagccactgcgcctggccctactt

SEQ ID NO: 156156 - DNA, 30 bp, Homo sapiens
  chr7:22158537-22158567
  hypo
caaaactggcccactcgctaagaagcaggc

SEQ ID NO: 156157 - DNA, 26 bp, Homo sapiens
  chr7:22280015-22280041
  hypo
aatcttgctctatcacgcaggctggc

SEQ ID NO: 156158 - DNA, 31 bp, Homo sapiens; identical to SEQ ID NO: 5407
  chr7:22396516-22396547
  hypo

SEQ ID NO: 156159 - DNA, 30 bp, Homo sapiens
  chr7:22519991-22520021
  hypo
gtctgtgagcggcagcgccttgtatcaaga

SEQ ID NO: 156160 - DNA, 30 bp, Homo sapiens; identical to SEQ ID NO: 21238
  chr7:22704301-22704331
  hypo

SEQ ID NO: 156161 - DNA, 30 bp, Homo sapiens; identical to SEQ ID NO: 73495
  chr7:22704869-22704899
  hypo

SEQ ID NO: 156162 - DNA, 161 bp, Homo sapiens
  chr7:22881608-22881769
  hypo
atagagtgaccaaagcaggcaacattgactggagttgtccagggcagattcccaaggcttgcccaacccaagagcgtgtgatcacatctcaggtttcagcagcaaactccagagacgacgtaagactgggaacagttgcatctcagcggtcactgtcctga

SEQ ID NO: 156163 - DNA, 1278 bp, Homo sapiens; identical to SEQ ID NO: 114711
  chr7:22893422-22894700
  hypo

SEQ ID NO: 156164 - DNA, 76 bp, Homo sapiens
  chr7:22903373-22903449
  hypo
ggtgccagtgttacccgagctctgagaaaccagaggtgctgcctacctcttaggttaaaggcgtccaaatgccctt

SEQ ID NO: 156165 - DNA, 989 bp, Homo sapiens; identical to SEQ ID NO: 114712
  chr7:23052803-23053792
  hypo

SEQ ID NO: 156166 - DNA, 260 bp, Homo sapiens; identical to SEQ ID NO: 114713
  chr7:23053819-23054079
  hypo

SEQ ID NO: 156167 - DNA, 30 bp, Homo sapiens; identical to SEQ ID NO: 21241
  chr7:23211106-23211136
  hypo

SEQ ID NO: 156168 - DNA, 105 bp, Homo sapiens; identical to SEQ ID NO: 21242
  chr7:23211636-23211741
  hypo

SEQ ID NO: 156169 - DNA, 30 bp, Homo sapiens
  chr7:23300096-23300126
  hypo
tatgttccagaagaacgatcgaaattcatc

SEQ ID NO: 156170 - DNA, 27 bp, Homo sapiens
  chr7:23321891-23321918
  hypo
gcgtgagcactgcgcccagccacttga

SEQ ID NO: 156171 - DNA, 40 bp, Homo sapiens; identical to SEQ ID NO: 73502
  chr7:23345799-23345839
  hypo

SEQ ID NO: 156172 - DNA, 30 bp, Homo sapiens
  chr7:23454719-23454749
  hypo
tcccgtccgtcagtcggcttcactgcatta

SEQ ID NO: 156173 - DNA, 2279 bp, Homo sapiens; identical to SEQ ID NO: 114718
  chr7:23507575-23509854
  hypo

SEQ ID NO: 156174 - DNA, 957 bp, Homo sapiens; identical to SEQ ID NO: 43972
  chr7:23510067-23511024
  hypo

SEQ ID NO: 156175 - DNA, 1471 bp, Homo sapiens; identical to SEQ ID NO: 114720
  chr7:23513225-23514696
  hypo

SEQ ID NO: 156176 - DNA, 33 bp, Homo sapiens
  chr7:23525030-23525063
  hypo
aaacgtattgttggccgggcacggtggctcacg

SEQ ID NO: 156177 - DNA, 77 bp, Homo sapiens; identical to SEQ ID NO: 73506
  chr7:23529547-23529624
  hypo

SEQ ID NO: 156178 - DNA, 30 bp, Homo sapiens
  chr7:23545810-23545840
  hypo
tcatagtaagaatctcgacgtctgccacca

SEQ ID NO: 156179 - DNA, 41 bp, Homo sapiens; identical to SEQ ID NO: 21246
  chr7:23550216-23550257
  hypo

SEQ ID NO: 156180 - DNA, 43 bp, Homo sapiens; identical to SEQ ID NO: 21247
  chr7:23556806-23556849
  hypo

SEQ ID NO: 156181 - DNA, 24 bp, Homo sapiens
  chr7:23567831-23567855
  hypo
ttttttgttttgtttttgagacga

SEQ ID NO: 156182 - DNA, 24 bp, Homo sapiens
  chr7:23568094-23568118
  hypo
gattacaggcgtgagccaccgggc

SEQ ID NO: 156183 - DNA, 38 bp, Homo sapiens; identical to SEQ ID NO: 73509
  chr7:23568875-23568913
  hypo

SEQ ID NO: 156184 - DNA, 37 bp, Homo sapiens
  chr7:23569152-23569189
  hypo
tacaggcgtgagccactgcgcccggccagaaacgatt

SEQ ID NO: 156185 - DNA, 250 bp, Homo sapiens; identical to SEQ ID NO: 114721
  chr7:23570142-23570392
  hypo

SEQ ID NO: 156186 - DNA, 84 bp, Homo sapiens; identical to SEQ ID NO: 21248
  chr7:23578780-23578864
  hypo

SEQ ID NO: 156187 - DNA, 30 bp, Homo sapiens
  chr7:23625770-23625800
  hypo
ctgtgctgcgaagacgagcggctaaatgtc

SEQ ID NO: 156188 - DNA, 30 bp, Homo sapiens; identical to SEQ ID NO: 73512
  chr7:23626047-23626077
  hypo

SEQ ID NO: 156189 - DNA, 30 bp, Homo sapiens
  chr7:23695251-23695281
  hypo
catcatattgacggcggctatgcaggacac

SEQ ID NO: 156190 - DNA, 643 bp, Homo sapiens
  chr7:23749558-23750201
  hypo
taaaatttaaatccacgtgaacagattaggaaagaccacgaaatcctacgtcacctctaaagtcacagcttgaagccttgcgaaaggaactggccctagaccccaccccggcctataaatcaccagggcgcagcctcagtgcctgggggtcggcagcagccagcgtcaggcggctcccgcacgcttcttcctaggcggcaggccgtggctgccacgtgactcccgctaacaccggatgatggcgcagcgctgtgcacgcaggcgcagtgtggggcccttgcggtcgaagctcacgcggtaagccgctgcacgtgtgctacggcgggcggagggccgaaagtccagtatgtgggtccagggtcactcttctagagcttccgcaacggaaagtgtgaggtcagtagtagtttttgtggtacgtgcagtggtggccgcttcaaggactattttcgtcgctgcttgcgttttaagtctccaatcctgggacgaggcccatttcagggttttctgtcaccttctagccgcccgccaccccagaggggtgccagatgccccagtttttgagtgcatgcaggcaggcgaaagtggctcgaaaagacctccggcctgaatgatctccatgaagacgcggtcacgcagcctc

SEQ ID NO: 156191 - DNA, 150 bp, Homo sapiens; identical to SEQ ID NO: 73514
  chr7:24099248-24099398
  hypo

SEQ ID NO: 156192 - DNA, 146 bp, Homo sapiens; identical to SEQ ID NO: 114726
  chr7:24323182-24323328
  hypo

SEQ ID NO: 156193 - DNA, 684 bp, Homo sapiens; identical to SEQ ID NO: 114727
  chr7:24323343-24324027
  hypo

SEQ ID NO: 156194 - DNA, 121 bp, Homo sapiens; identical to SEQ ID NO: 114728
  chr7:24324063-24324184
  hypo

SEQ ID NO: 156195 - DNA, 440 bp, Homo sapiens; identical to SEQ ID NO: 114729
  chr7:24324248-24324688
  hypo

SEQ ID NO: 156196 - DNA, 30 bp, Homo sapiens; identical to SEQ ID NO: 73518
  chr7:24516449-24516479
  hypo

SEQ ID NO: 156197 - DNA, 620 bp, Homo sapiens; identical to SEQ ID NO: 43981
  chr7:24796416-24797036
  hypo

SEQ ID NO: 156198 - DNA, 434 bp, Homo sapiens; identical to SEQ ID NO: 43982
  chr7:24797067-24797501
  hypo

SEQ ID NO: 156199 - DNA, 38 bp, Homo sapiens; identical to SEQ ID NO: 73521
  chr7:24990041-24990079
  hypo

SEQ ID NO: 156200 - DNA, 1201 bp, Homo sapiens; identical to SEQ ID NO: 5425
  chr7:25019059-25020260
  hypo

SEQ ID NO: 156201 - DNA, 30 bp, Homo sapiens; identical to SEQ ID NO: 5427
  chr7:25043520-25043550
  hypo

SEQ ID NO: 156202 - DNA, 31 bp, Homo sapiens; identical to SEQ ID NO: 73524
  chr7:25100241-25100272
  hypo

SEQ ID NO: 156203 - DNA, 34 bp, Homo sapiens
  chr7:25132426-25132460
  hypo
gaaattacttccggccgggcgcggtagtttatgc

SEQ ID NO: 156204 - DNA, 34 bp, Homo sapiens; identical to SEQ ID NO: 21258
  chr7:25132699-25132733
  hypo

SEQ ID NO: 156205 - DNA, 45 bp, Homo sapiens; identical to SEQ ID NO: 73526
  chr7:25133412-25133457
  hypo

SEQ ID NO: 156206 - DNA, 147 bp, Homo sapiens; identical to SEQ ID NO: 73527
  chr7:25158786-25158933
  hypo

SEQ ID NO: 156207 - DNA, 30 bp, Homo sapiens; identical to SEQ ID NO: 21261
  chr7:25218726-25218756
  hypo

SEQ ID NO: 156208 - DNA, 572 bp, Homo sapiens; identical to SEQ ID NO: 43986
  chr7:25219528-25220100
  hypo

SEQ ID NO: 156209 - DNA, 30 bp, Homo sapiens
  chr7:25530898-25530928
  hypo
aatttgtattaaaggcggggcgcagtgact

SEQ ID NO: 156210 - DNA, 50 bp, Homo sapiens
  chr7:25607207-25607257
  hypo
tcatagctgtcgtaccgctgtaggcattactcacacgtttgtggcgatgc

SEQ ID NO: 156211 - DNA, 84 bp, Homo sapiens; identical to SEQ ID NO: 73530
  chr7:25783408-25783492
  hypo

SEQ ID NO: 156212 - DNA, 532 bp, Homo sapiens; identical to SEQ ID NO: 5429
  chr7:25891898-25892430
  hypo

SEQ ID NO: 156213 - DNA, 31 bp, Homo sapiens; identical to SEQ ID NO: 21264
  chr7:25936760-25936791
  hypo

SEQ ID NO: 156214 - DNA, 907 bp, Homo sapiens; identical to SEQ ID NO: 114753
  chr7:25989914-25990821
  hypo

SEQ ID NO: 156215 - DNA, 129 bp, Homo sapiens
  chr7:26098332-26098461
  hypo
caatacacggaccatcgtgtgagctggcggtgcagaagcataaagctccttggccatcattccgttcacaatcattccgttcacaacagggccatgctgcatctggggaaaggccggtgatcatgtgag

SEQ ID NO: 156216 - DNA, 30 bp, Homo sapiens
  chr7:26186606-26186636
  hypo
gtgagccactgtgcccggcgaggtccacct

SEQ ID NO: 156217 - DNA, 98 bp, Homo sapiens
  chr7:26198601-26198699
  hypo
aggtggggcttgtaccgcttcttccccaatttactcccgtccattgtgttgtcaggtgcaggtttccaaagcacaccttggttcgtctctctgcgttt

SEQ ID NO: 156218 - DNA, 78 bp, Homo sapiens; identical to SEQ ID NO: 21266
  chr7:26217155-26217233
  hypo

SEQ ID NO: 156219 - DNA, 181 bp, Homo sapiens; identical to SEQ ID NO: 73535
  chr7:26259533-26259714
  hypo

SEQ ID NO: 156220 - DNA, 241 bp, Homo sapiens; identical to SEQ ID NO: 73536
  chr7:26283742-26283983
  hypo

SEQ ID NO: 156221 - DNA, 37 bp, Homo sapiens; identical to SEQ ID NO: 21268
  chr7:26291674-26291711
  hypo

SEQ ID NO: 156222 - DNA, 34 bp, Homo sapiens
  chr7:26298988-26299022
  hypo
aaagcgctgggattacaggcgtgagccaccgcgc

SEQ ID NO: 156223 - DNA, 18 bp, Homo sapiens
  chr7:26317524-26317542
  hypo
gatcgcaccactgcactc

SEQ ID NO: 156224 - DNA, 127 bp, Homo sapiens
  chr7:26417607-26417734
  hypo
cagctctctgcatagcggtgtactgggagccctgtgctttcgtttaatttttttttaaacaaaagaaattacagaaaagtgcaaatttaacgtgtgacatttaacattttgccgtggcaggcagcct

SEQ ID NO: 156225 - DNA, 320 bp, Homo sapiens; identical to SEQ ID NO: 73539
  chr7:26439681-26440001
  hypo

SEQ ID NO: 156226 - DNA, 30 bp, Homo sapiens
  chr7:26537954-26537984
  hypo
acgtgatctgtccggcgtaagcgagtgctg

SEQ ID NO: 156227 - DNA, 17 bp, Homo sapiens
  chr7:26549042-26549059
  hypo
gtagtctcactctgtcg

SEQ ID NO: 156228 - DNA, 30 bp, Homo sapiens
  chr7:26565822-26565852
  hypo
tgccagtccatgcctcggagattcactcct

SEQ ID NO: 156229 - DNA, 18 bp, Homo sapiens
  chr7:26582432-26582450
  hypo
ggcggagtctcgctccgt

SEQ ID NO: 156230 - DNA, 143 bp, Homo sapiens
  chr7:26667939-26668082
  hypo
aagcaaagtggtacttcaccacggggcagattaaaatatgcattttctcctaattgagcatagtgaaatcagccggcggtcctgtcacaagtgcaggaatgaattgtcacagcacgacacacacgactcgacagagcatctat

SEQ ID NO: 156231 - DNA, 30 bp, Homo sapiens; identical to SEQ ID NO: 73541
  chr7:26686711-26686741
  hypo

SEQ ID NO: 156232 - DNA, 96 bp, Homo sapiens
  chr7:26687815-26687911
  hypo
ctgggagatcagttgcgccaacccttaaccttacagaggaggaaacttagtctcacggggatcaagaggctggcccaaggtcgttctgcgctgtgc

SEQ ID NO: 156233 - DNA, 45 bp, Homo sapiens; identical to SEQ ID NO: 73542
  chr7:26753489-26753534
  hypo

SEQ ID NO: 156234 - DNA, 17 bp, Homo sapiens
  chr7:26762352-26762369
  hypo
tcttcttactcttgaaa

SEQ ID NO: 156235 - DNA, 30 bp, Homo sapiens; identical to SEQ ID NO: 73544
  chr7:26941672-26941702
  hypo

SEQ ID NO: 156236 - DNA, 31 bp, Homo sapiens; identical to SEQ ID NO: 73545
  chr7:27021024-27021055
  hypo

SEQ ID NO: 156237 - DNA, 28 bp, Homo sapiens
  chr7:27031760-27031788
  hypo
tttgtttgtttgtttttgaggcggagtt

SEQ ID NO: 156238 - DNA, 88 bp, Homo sapiens; identical to SEQ ID NO: 21271
  chr7:27032267-27032355
  hypo

SEQ ID NO: 156239 - DNA, 30 bp, Homo sapiens; identical to SEQ ID NO: 73548
  chr7:27087892-27087922
  hypo

SEQ ID NO: 156240 - DNA, 22 bp, Homo sapiens
  chr7:27089486-27089508
  hypo
cggaagttattgaagaaatatt

SEQ ID NO: 156241 - DNA, 609 bp, Homo sapiens; identical to SEQ ID NO: 5441
  chr7:27135161-27135770
  hypo

SEQ ID NO: 156242 - DNA, 956 bp, Homo sapiens; identical to SEQ ID NO: 44011
  chr7:27135979-27136935
  hypo

SEQ ID NO: 156243 - DNA, 32 bp, Homo sapiens; identical to SEQ ID NO: 114773
  chr7:27146541-27146573
  hypo

SEQ ID NO: 156244 - DNA, 30 bp, Homo sapiens; identical to SEQ ID NO: 44012
  chr7:27163863-27163893
  hypo

SEQ ID NO: 156245 - DNA, 870 bp, Homo sapiens; identical to SEQ ID NO: 114776
  chr7:27191548-27192418
  hypo

SEQ ID NO: 156246 - DNA, 588 bp, Homo sapiens; identical to SEQ ID NO: 44026
  chr7:27212395-27212983
  hypo

SEQ ID NO: 156247 - DNA, 1073 bp, Homo sapiens; identical to SEQ ID NO: 5454
  chr7:27213188-27214261
  hypo

SEQ ID NO: 156248 - DNA, 1836 bp, Homo sapiens; identical to SEQ ID NO: 44030
  chr7:27223221-27225057
  hypo

SEQ ID NO: 156249 - DNA, 35 bp, Homo sapiens; identical to SEQ ID NO: 5471
  chr7:27278958-27278993
  hypo

SEQ ID NO: 156250 - DNA, 131 bp, Homo sapiens; identical to SEQ ID NO: 5472
  chr7:27279237-27279368
  hypo

SEQ ID NO: 156251 - DNA, 704 bp, Homo sapiens; identical to SEQ ID NO: 114815
  chr7:27279453-27280157
  hypo

SEQ ID NO: 156252 - DNA, 36 bp, Homo sapiens; identical to SEQ ID NO: 73560
  chr7:27336399-27336435
  hypo

SEQ ID NO: 156253 - DNA, 39 bp, Homo sapiens; identical to SEQ ID NO: 73561
  chr7:27514342-27514381
  hypo

SEQ ID NO: 156254 - DNA, 532 bp, Homo sapiens; identical to SEQ ID NO: 73562
  chr7:27531191-27531723
  hypo

SEQ ID NO: 156255 - DNA, 30 bp, Homo sapiens; identical to SEQ ID NO: 73563
  chr7:27561067-27561097
  hypo

SEQ ID NO: 156256 - DNA, 72 bp, Homo sapiens
  chr7:27591611-27591683
  hypo
tttaccagcgacattcgcagaaaaaggcgacagctgggacagaaagctgctactcaacgaacaatataatcc

SEQ ID NO: 156257 - DNA, 130 bp, Homo sapiens; identical to SEQ ID NO: 73564
  chr7:27651037-27651167
  hypo

SEQ ID NO: 156258 - DNA, 189 bp, Homo sapiens; identical to SEQ ID NO: 73565
  chr7:27679514-27679703
  hypo

SEQ ID NO: 156259 - DNA, 29 bp, Homo sapiens
  chr7:27682557-27682586
  hypo
ccgcgcccggccaaatgtctagtctttag

SEQ ID NO: 156260 - DNA, 181 bp, Homo sapiens; identical to SEQ ID NO: 73567
  chr7:27686736-27686917
  hypo

SEQ ID NO: 156261 - DNA, 194 bp, Homo sapiens; identical to SEQ ID NO: 114826
  chr7:27701809-27702003
  hypo

SEQ ID NO: 156262 - DNA, 42 bp, Homo sapiens; identical to SEQ ID NO: 73568
  chr7:27782387-27782429
  hypo

SEQ ID NO: 156263 - DNA, 168 bp, Homo sapiens; identical to SEQ ID NO: 21284
  chr7:27831633-27831801
  hypo

SEQ ID NO: 156264 - DNA, 226 bp, Homo sapiens; identical to SEQ ID NO: 73570
  chr7:27882583-27882809
  hypo

SEQ ID NO: 156265 - DNA, 425 bp, Homo sapiens
  chr7:27903422-27903847
  hypo
gggaggaaggcatagcgaagacacacaaaaacgtcacctacctgagattcagcttccagcaaatgaaacgcctaagttcaattccctgtcacatttctctctgccagtttttggcaaagaagtgaaactcacaagttgatggaatgcttgtgggcagtggcacttcccgctaggtcaactgccagagaggagcacaggagaatgcaggggctgcctcctccaagccgccagctttgtgaacagagcccggactcaccaggagcgcagggccctgactaccgcctggccgctgtgacgagaccgtcgtcatcctaagggctaatgatgcacagaggaggctgtgactcacccctggctccctcactctgcatcagggaagaaggaagaatgtcaccctaattccatggcccgcgatttaatttgag

SEQ ID NO: 156266 - DNA, 537 bp, Homo sapiens
  chr7:27907622-27908159
  hypo
gtttcttcatggactcgcttggtgactcaggcaagacattcaattccatttgccattttcttctcttgctacagagcccacttcagaggattcaatgagtgaatacgacaacggtgcttggatcagtgcctgccatactgtcagcactagtcgttactattttcactggttgaacagacacgtgagttcacacatgacaccatctattgggatgagtcacgttgcttgctcaacaactttaaggcctaggatcagtgacagaactccaggagcagcggggttaacacgggtgaccaatttctcctgcccactgtcactcacatggcccatgcctgctcctgcagatgccgttccccggtcctcaccgcaactccctgtggggttgactgccgcttgcttctcccgctcccatccccctctccagattcctccgcccctgcatgggccgcctcacgggggtttctcaccatccactctgaacaaggcgtggagttgcttgctccagcctggctggtcggctccccagctgccctgccc

SEQ ID NO: 156267 - DNA, 30 bp, Homo sapiens
  chr7:27914525-27914555
  hypo
gcagtgctggagcgccgggagctgcagaaa

SEQ ID NO: 156268 - DNA, 149 bp, Homo sapiens
  chr7:27914808-27914957
  hypo
ggagtctttctctctcgctttctcttccagcctcatccaactcccatcggctctactccaaaacattccgagttcatccgcacttccctgctctgtgatcctcgtcccagccttacatcactttcctctttcctcggcacagctggaat

SEQ ID NO: 156269 - DNA, 30 bp, Homo sapiens
  chr7:27956437-27956467
  hypo
actcaaaaatcccaccgctctgtccatgtc

SEQ ID NO: 156270 - DNA, 30 bp, Homo sapiens; identical to SEQ ID NO: 73574
  chr7:27956692-27956722
  hypo

SEQ ID NO: 156271 - DNA, 185 bp, Homo sapiens
  chr7:27984538-27984723
  hypo
taagccacaccctttccggaacgctgtcatctgctacggtgtgactggtaatacatttcggagttcgagaaataatccttgacacctccccactatgcattatcatcttaaaactatcacaagacccacaggaaaacagttcttctatctaggatctttggaaaagtgatcgagaactcactttg

SEQ ID NO: 156272 - DNA, 30 bp, Homo sapiens; identical to SEQ ID NO: 73576
  chr7:28000984-28001014
  hypo

SEQ ID NO: 156273 - DNA, 106 bp, Homo sapiens; identical to SEQ ID NO: 21288
  chr7:28012335-28012441
  hypo

SEQ ID NO: 156274 - DNA, 30 bp, Homo sapiens; identical to SEQ ID NO: 73578
  chr7:28072435-28072465
  hypo

SEQ ID NO: 156275 - DNA, 30 bp, Homo sapiens
  chr7:28105448-28105478
  hypo
ttagcgattacagcccggggctatttttcc

SEQ ID NO: 156276 - DNA, 330 bp, Homo sapiens
  chr7:28109346-28109676
  hypo
tttagagtttggggcgcttttttctcctggaggtgccaggtacggctccatgctaggtctgcagcattcaccatgctgagcgttgagccgtgttctcaaaaactcatgcccccaagtttgaacaaactcatacttgtcccctaagaagtccctgtcatcccggtctgtcggccatgagctcgttactcccctgaccttgaggcccacagactgggatgaagccaggacctggctcctcactcaagtcctcccgcgccttctctggatgcctttctctccctgctcacggcacactgcactttgtaaaacgtcttcagatgtggagagctg

SEQ ID NO: 156277 - DNA, 121 bp, Homo sapiens; identical to SEQ ID NO: 73581
  chr7:28110707-28110828
  hypo

SEQ ID NO: 156278 - DNA, 31 bp, Homo sapiens; identical to SEQ ID NO: 73582
  chr7:28139359-28139390
  hypo

SEQ ID NO: 156279 - DNA, 39 bp, Homo sapiens
  chr7:28176529-28176568
  hypo
ggatgagtgttcacacgggaggctcgcaggagatgaggc

SEQ ID NO: 156280 - DNA, 130 bp, Homo sapiens; identical to SEQ ID NO: 73583
  chr7:28190079-28190209
  hypo

SEQ ID NO: 156281 - DNA, 30 bp, Homo sapiens; identical to SEQ ID NO: 21290
  chr7:28230539-28230569
  hypo

SEQ ID NO: 156282 - DNA, 37 bp, Homo sapiens
  chr7:28266792-28266829
  hypo
aggcgtgagccatcgcgcctggcccagagtgtttttt

SEQ ID NO: 156283 - DNA, 30 bp, Homo sapiens
  chr7:28506336-28506366
  hypo
tagacgacatctctccggtgtgttgactcc

SEQ ID NO: 156284 - DNA, 30 bp, Homo sapiens
  chr7:28526858-28526888
  hypo
tgctgacttcagtgccgattacattagtga

SEQ ID NO: 156285 - DNA, 203 bp, Homo sapiens
  chr7:28811873-28812076
  hypo
gttagtagccgaaaaccgctggaagttggggcaaaagagcaatgagggctgcagggtgacctgggcagcccaaggggtgactgcttgaggcaacactgggaatggagagcagggtgctcaggaagccaggtggaacggggagcccaactcactaccaaaggctgggagcccaggcgccgctcgagcctcgccactgtttgttt

SEQ ID NO: 156286 - DNA, 85 bp, Homo sapiens; identical to SEQ ID NO: 73586
  chr7:28989194-28989279
  hypo

SEQ ID NO: 156287 - DNA, 30 bp, Homo sapiens; identical to SEQ ID NO: 73587
  chr7:28989666-28989696
  hypo

SEQ ID NO: 156288 - DNA, 30 bp, Homo sapiens; identical to SEQ ID NO: 73588
  chr7:29084189-29084219
  hypo

SEQ ID NO: 156289 - DNA, 50 bp, Homo sapiens; identical to SEQ ID NO: 73589
  chr7:29105617-29105667
  hypo

SEQ ID NO: 156290 - DNA, 30 bp, Homo sapiens; identical to SEQ ID NO: 73590
  chr7:29109781-29109811
  hypo

SEQ ID NO: 156291 - DNA, 21 bp, Homo sapiens
  chr7:29136309-29136330
  hypo
gtgttcacagctggtcgcggt

SEQ ID NO: 156292 - DNA, 30 bp, Homo sapiens
  chr7:29136784-29136814
  hypo
agggtattggcagggcggtgatgttgaaaa

SEQ ID NO: 156293 - DNA, 609 bp, Homo sapiens; identical to SEQ ID NO: 5488
  chr7:29185639-29186248
  hypo

SEQ ID NO: 156294 - DNA, 136 bp, Homo sapiens
  chr7:29210727-29210863
  hypo
gtgctggacataatgaactgccggtttccccccagttctgactcttgcctgcagagccctaacattgcttacatacgcactgctctttcacatgaaggaacagcgcagacatcacctaatacgcgtcctactgtat

SEQ ID NO: 156295 - DNA, 30 bp, Homo sapiens
  chr7:29211122-29211152
  hypo
tcctcaattcagccccgagctttctttgaa

SEQ ID NO: 156296 - DNA, 1058 bp, Homo sapiens; identical to SEQ ID NO: 114842
  chr7:29234008-29235066
  hypo

SEQ ID NO: 156297 - DNA, 161 bp, Homo sapiens; identical to SEQ ID NO: 73594
  chr7:29362349-29362510
  hypo

SEQ ID NO: 156298 - DNA, 30 bp, Homo sapiens
  chr7:29367326-29367356
  hypo
tggagcctagagcgccgtataaatgctata

SEQ ID NO: 156299 - DNA, 35 bp, Homo sapiens
  chr7:29372515-29372550
  hypo
actctacagagacgacggctcgatcttggcttggg

SEQ ID NO: 156300 - DNA, 81 bp, Homo sapiens
  chr7:29390374-29390455
  hypo
gaacttgctattgaccggacgttgtcccaagaatttcatatgcattgtctcatttaattcccacaatgcggccgggcgagg

SEQ ID NO: 156301 - DNA, 101 bp, Homo sapiens; identical to SEQ ID NO: 73595
  chr7:29410048-29410149
  hypo

SEQ ID NO: 156302 - DNA, 33 bp, Homo sapiens; identical to SEQ ID NO: 73596
  chr7:29452224-29452257
  hypo

SEQ ID NO: 156303 - DNA, 139 bp, Homo sapiens
  chr7:29482437-29482576
  hypo
catttattttttcagcgattaatacctgaatgctgcctaggtttttccttatttattccatttctatgattttctccacttaatccccatcgctttcaatttcattgaatttctttttttttttttttttgagacggag

SEQ ID NO: 156304 - DNA, 31 bp, Homo sapiens; identical to SEQ ID NO: 73597
  chr7:29516192-29516223
  hypo

SEQ ID NO: 156305 - DNA, 29 bp, Homo sapiens
  chr7:29522724-29522753
  hypo
ccgcgcccggcctgcacttttttctagag

SEQ ID NO: 156306 - DNA, 30 bp, Homo sapiens
  chr7:29679920-29679950
  hypo
ttgtccttaccccatcggagagcctgagtg

SEQ ID NO: 156307 - DNA, 104 bp, Homo sapiens; identical to SEQ ID NO: 73599
  chr7:29682477-29682581
  hypo

SEQ ID NO: 156308 - DNA, 57 bp, Homo sapiens
  chr7:29689981-29690038
  hypo
tatgagaaaatagtcgggcaaatgagaagtaagctcaaaagcgtaggctcaagagcc

SEQ ID NO: 156309 - DNA, 370 bp, Homo sapiens; identical to SEQ ID NO: 5493
  chr7:29724331-29724701
  hypo

SEQ ID NO: 156310 - DNA, 55 bp, Homo sapiens; identical to SEQ ID NO: 5494
  chr7:29725076-29725131
  hypo

SEQ ID NO: 156311 - DNA, 30 bp, Homo sapiens; identical to SEQ ID NO: 73603
  chr7:29844753-29844783
  hypo

SEQ ID NO: 156312 - DNA, 30 bp, Homo sapiens
  chr7:29880576-29880606
  hypo
atatcgagatggggtcgttcttgctaaacc

SEQ ID NO: 156313 - DNA, 1247 bp, Homo sapiens; identical to SEQ ID NO: 44079
  chr7:30028510-30029757
  hypo

SEQ ID NO: 156314 - DNA, 23 bp, Homo sapiens
  chr7:30048555-30048578
  hypo
ccgtctccaaaaaaaaaaaaaga

SEQ ID NO: 156315 - DNA, 30 bp, Homo sapiens; identical to SEQ ID NO: 73606
  chr7:30053482-30053512
  hypo

SEQ ID NO: 156316 - DNA, 247 bp, Homo sapiens; identical to SEQ ID NO: 5498
  chr7:30067777-30068024
  hypo

SEQ ID NO: 156317 - DNA, 30 bp, Homo sapiens
  chr7:30132206-30132236
  hypo
cattctccatactccggaggacatctgttt

SEQ ID NO: 156318 - DNA, 123 bp, Homo sapiens
  chr7:30205886-30206009
  hypo
tgtgggcaggttggccgcgcagggtggtttaggataatagcagacacattttttttctggtatccatgtacttacaaagatttttgaaagtgactggaagaaccggggcgacaagtttataaa

SEQ ID NO: 156319 - DNA, 30 bp, Homo sapiens
  chr7:30206381-30206411
  hypo
caccctcaataccaccgccactgctggatg

SEQ ID NO: 156320 - DNA, 63 bp, Homo sapiens; identical to SEQ ID NO: 21298
  chr7:30341569-30341632
  hypo

SEQ ID NO: 156321 - DNA, 30 bp, Homo sapiens
  chr7:30447014-30447044
  hypo
ttagtgagtcacctgcgtagaggggagtat

SEQ ID NO: 156322 - DNA, 31 bp, Homo sapiens; identical to SEQ ID NO: 21299
  chr7:30490902-30490933
  hypo

SEQ ID NO: 156323 - DNA, 31 bp, Homo sapiens; identical to SEQ ID NO: 73610
  chr7:30495017-30495048
  hypo

SEQ ID NO: 156324 - DNA, 150 bp, Homo sapiens; identical to SEQ ID NO: 73611
  chr7:30516405-30516555
  hypo

SEQ ID NO: 156325 - DNA, 257 bp, Homo sapiens; identical to SEQ ID NO: 114856
  chr7:30517955-30518212
  hypo

SEQ ID NO: 156326 - DNA, 30 bp, Homo sapiens
  chr7:30565248-30565278
  hypo
cattgtctgagtcaccgctccatgatgggg

SEQ ID NO: 156327 - DNA, 41 bp, Homo sapiens
  chr7:30596670-30596711
  hypo
atctggttgccatggcgctgaaagagcgctttctatacctg

SEQ ID NO: 156328 - DNA, 90 bp, Homo sapiens
  chr7:30599494-30599584
  hypo
cagcaccgcttcactcgctgcactcaaacattgcttcacgtttccatagtgctcatcaccgcttgccagtacattgtattaaatagttct

SEQ ID NO: 156329 - DNA, 237 bp, Homo sapiens
  chr7:30603330-30603567
  hypo
aaactcaccgactcaccgttctggaggctggaagaccaagatcaaagtgttggccgagccatgctcctgctgaagccgctgggggaggctccgtgtagtttctgggagccccaggcatttgtggcgtgtggcagcatctctccgatctctgcctccatcttcacacggcggtctctgctctgtgtgtgtccagatttccctcttcttaataaggacgcttgtcccactgggttcaga

SEQ ID NO: 156330 - DNA, 30 bp, Homo sapiens
  chr7:30656297-30656327
  hypo
attacgtgtactctacggggttcacaaatt

SEQ ID NO: 156331 - DNA, 155 bp, Homo sapiens
  chr7:30656753-30656908
  hypo
ggctatttcattggccgcatctacctctacctcacgaaggttggaatatctccagataaactccgcttccggcagcacatggagaatgagatggcccattatgcctgtgactgttgggatgcagaatccaaaacatcctacgtaagtggagtgct

SEQ ID NO: 156332 - DNA, 165 bp, Homo sapiens; identical to SEQ ID NO: 73615
  chr7:30675596-30675761
  hypo

SEQ ID NO: 156333 - DNA, 668 bp, Homo sapiens; identical to SEQ ID NO: 44083
  chr7:30721274-30721942
  hypo

SEQ ID NO: 156334 - DNA, 389 bp, Homo sapiens; identical to SEQ ID NO: 114861
  chr7:30722018-30722407
  hypo

SEQ ID NO: 156335 - DNA, 413 bp, Homo sapiens
  chr7:30817951-30818364
  hypo
atcttggtgaacatcaggaatcgtttgcttgtgctttatgagaacagcgggttttgatttaagatggtaaacagcgattcagctttcttccctcagggcttaaagaagacatgtgtgaccatggaccaggaacgcccacgctctgacctcagcataaacaacagaaatgatcttcgaaaggttttgcatcttgaatttctctataaggagaacaaggtatgtgctttctaaggtgtggtgtggagtcttggaactgagtttggcactgccaaagcactcatgggccctgccagtgacaggagaggcttgaggttctcctggcctgtcacacttgcggtcagagagaaacggaccccccaaatgtggacagatccccagcgggagtgggttttccatctcggtcagctggtgcc

SEQ ID NO: 156336 - DNA, 277 bp, Homo sapiens; identical to SEQ ID NO: 21306
  chr7:30857132-30857409
  hypo

SEQ ID NO: 156337 - DNA, 31 bp, Homo sapiens; identical to SEQ ID NO: 73620
  chr7:30899815-30899846
  hypo

SEQ ID NO: 156338 - DNA, 96 bp, Homo sapiens; identical to SEQ ID NO: 73621
  chr7:30902137-30902233
  hypo

SEQ ID NO: 156339 - DNA, 51 bp, Homo sapiens; identical to SEQ ID NO: 21307
  chr7:30921726-30921777
  hypo

SEQ ID NO: 156340 - DNA, 174 bp, Homo sapiens; identical to SEQ ID NO: 73623
  chr7:30922907-30923081
  hypo

SEQ ID NO: 156341 - DNA, 80 bp, Homo sapiens
  chr7:30925106-30925186
  hypo
acaagagggaaactccgtctcaaaaaaacaaacaaacaaaaaacccaaaaccaaaaaacacaaagcgccgtgccccacac

SEQ ID NO: 156342 - DNA, 43 bp, Homo sapiens; identical to SEQ ID NO: 73624
  chr7:30928161-30928204
  hypo

SEQ ID NO: 156343 - DNA, 121 bp, Homo sapiens; identical to SEQ ID NO: 73625
  chr7:30934600-30934721
  hypo

SEQ ID NO: 156344 - DNA, 31 bp, Homo sapiens; identical to SEQ ID NO: 73626
  chr7:30938647-30938678
  hypo

SEQ ID NO: 156345 - DNA, 140 bp, Homo sapiens; identical to SEQ ID NO: 21308
  chr7:30944105-30944245
  hypo

SEQ ID NO: 156346 - DNA, 116 bp, Homo sapiens; identical to SEQ ID NO: 73628
  chr7:30946538-30946654
  hypo

SEQ ID NO: 156347 - DNA, 30 bp, Homo sapiens; identical to SEQ ID NO: 73629
  chr7:30963960-30963990
  hypo

SEQ ID NO: 156348 - DNA, 43 bp, Homo sapiens; identical to SEQ ID NO: 73630
  chr7:30971901-30971944
  hypo

SEQ ID NO: 156349 - DNA, 217 bp, Homo sapiens; identical to SEQ ID NO: 21309
  chr7:30972823-30973040
  hypo

SEQ ID NO: 156350 - DNA, 153 bp, Homo sapiens; identical to SEQ ID NO: 73632
  chr7:31018778-31018931
  hypo

SEQ ID NO: 156351 - DNA, 30 bp, Homo sapiens
  chr7:31031679-31031709
  hypo
aggactgagccaccgcgtccagtctcacag

SEQ ID NO: 156352 - DNA, 300 bp, Homo sapiens
  chr7:31032046-31032346
  hypo
ggggcacaggcagtacgtgtccagcttggccgaggttgccactcctggtcctgcgggaatggtgtgcatgcctgcacgcacgcatgtgtgtgcgcacaggagcatgtgtgctgagggtgcaggcacgtgcctgggcttgtgcctgggcatgtgcccggctctgccctgacaaggcctgccggctccctagcagctggagcacccgctgtgctgacagggcctgcaatcacgggaaattaccaaacccagaactaaaattaaggctgctgctgctgctgctgctgccgccgccgccacaga

SEQ ID NO: 156353 - DNA, 164 bp, Homo sapiens
  chr7:31068264-31068428
  hypo
tttcctcgtctgccccgcagcatccatgggactgcagtagtgtgtatatgcggctgtggcccctgggagaggcacctctgggaccactggccatctggccctcggtagccgtgtggcgcagatttcctcctccgtggtctcccgggcaacgcggagctgcctgc

SEQ ID NO: 156354 - DNA, 463 bp, Homo sapiens; identical to SEQ ID NO: 5502
  chr7:31091703-31092166
  hypo

SEQ ID NO: 156355 - DNA, 457 bp, Homo sapiens; identical to SEQ ID NO: 5503
  chr7:31092241-31092698
  hypo

SEQ ID NO: 156356 - DNA, 166 bp, Homo sapiens; identical to SEQ ID NO: 44087
  chr7:31092713-31092879
  hypo

SEQ ID NO: 156357 - DNA, 30 bp, Homo sapiens; identical to SEQ ID NO: 5508
  chr7:31568350-31568380
  hypo

SEQ ID NO: 156358 - DNA, 18 bp, Homo sapiens
  chr7:31938752-31938770
  hypo
tttttttttttttttttg

SEQ ID NO: 156359 - DNA, 138 bp, Homo sapiens
  chr7:31939009-31939147
  hypo
caaagtgctgggattacaggcgtaagtaagccactgcgcccggccggacagtcccgtttctacaactcagtcttgcctataggtcacaatgcagtgaaaagcggcagctgatagtgtaagccccgggagatcccaaat

SEQ ID NO: 156360 - DNA, 101 bp, Homo sapiens
  chr7:32128067-32128168
  hypo
gcaagtatttggggccgggcctttctaatctgcctagtccgccaaggcggccggagccctgcagtggtgaggaggccccatttggccgagctgctgctaag

SEQ ID NO: 156361 - DNA, 226 bp, Homo sapiens; identical to SEQ ID NO: 44095
  chr7:32337756-32337982
  hypo

SEQ ID NO: 156362 - DNA, 174 bp, Homo sapiens; identical to SEQ ID NO: 44096
  chr7:32338043-32338217
  hypo

SEQ ID NO: 156363 - DNA, 681 bp, Homo sapiens; identical to SEQ ID NO: 44097
  chr7:32338283-32338964
  hypo

SEQ ID NO: 156364 - DNA, 32 bp, Homo sapiens; identical to SEQ ID NO: 73641
  chr7:32416316-32416348
  hypo

SEQ ID NO: 156365 - DNA, 32 bp, Homo sapiens; identical to SEQ ID NO: 73642
  chr7:32416587-32416619
  hypo

SEQ ID NO: 156366 - DNA, 29 bp, Homo sapiens
  chr7:32528601-32528630
  hypo
gctgggattataggcgtgagccactgggc

SEQ ID NO: 156367 - DNA, 30 bp, Homo sapiens; identical to SEQ ID NO: 73643
  chr7:32537570-32537600
  hypo

SEQ ID NO: 156368 - DNA, 30 bp, Homo sapiens
  chr7:32609199-32609229
  hypo
ctcctaatagtgcttcggtggttatgtgca

SEQ ID NO: 156369 - DNA, 131 bp, Homo sapiens; identical to SEQ ID NO: 73644
  chr7:32609660-32609791
  hypo

SEQ ID NO: 156370 - DNA, 197 bp, Homo sapiens; identical to SEQ ID NO: 73645
  chr7:32630924-32631121
  hypo

SEQ ID NO: 156371 - DNA, 31 bp, Homo sapiens; identical to SEQ ID NO: 73646
  chr7:32648439-32648470
  hypo

SEQ ID NO: 156372 - DNA, 376 bp, Homo sapiens; identical to SEQ ID NO: 44102
  chr7:32768219-32768595
  hypo

SEQ ID NO: 156373 - DNA, 30 bp, Homo sapiens
  chr7:32901798-32901828
  hypo
catcaaagggcgtggcgagaggattatgtt

SEQ ID NO: 156374 - DNA, 31 bp, Homo sapiens; identical to SEQ ID NO: 73648
  chr7:32963858-32963889
  hypo

SEQ ID NO: 156375 - DNA, 1206 bp, Homo sapiens; identical to SEQ ID NO: 114883
  chr7:32981765-32982971
  hypo

SEQ ID NO: 156376 - DNA, 895 bp, Homo sapiens; identical to SEQ ID NO: 44104
  chr7:32996716-32997611
  hypo

SEQ ID NO: 156377 - DNA, 20 bp, Homo sapiens
  chr7:32998729-32998749
  hypo
acaacaggccgggcgcggtg

SEQ ID NO: 156378 - DNA, 33 bp, Homo sapiens; identical to SEQ ID NO: 21321
  chr7:33026794-33026827
  hypo

SEQ ID NO: 156379 - DNA, 187 bp, Homo sapiens
  chr7:33139662-33139849
  hypo
cactctaagtctccctcgtgcacacacaccctggcaccttggccagggagctgcaggagggatgcctgtaccagggagcgggactggatagctgtcagatctcctcagagtttactgctctctgagctgctgagctcaagaaaccagcagaggatggaccgaggggctgagccgggtgaggccgaca

SEQ ID NO: 156380 - DNA, 208 bp, Homo sapiens; identical to SEQ ID NO: 73653
  chr7:33542771-33542979
  hypo

SEQ ID NO: 156381 - DNA, 30 bp, Homo sapiens
  chr7:33599179-33599209
  hypo
agcctggtaattactcgcatgttcacctga

SEQ ID NO: 156382 - DNA, 288 bp, Homo sapiens; identical to SEQ ID NO: 73654
  chr7:33725729-33726017
  hypo

SEQ ID NO: 156383 - DNA, 43 bp, Homo sapiens
  chr7:33737758-33737801
  hypo
tgaactatgcccagccttgggcgagaaatggtttcccacatct

SEQ ID NO: 156384 - DNA, 30 bp, Homo sapiens
  chr7:33796970-33797000
  hypo
cagcaggcagcaggccggctgagcgtatgc

SEQ ID NO: 156385 - DNA, 228 bp, Homo sapiens
  chr7:33877123-33877351
  hypo
gtcagccctcgcaggcgagctctggatcctgtcttaggggcccaactctgccttcagaggagacttgcagaactggcagatttcagtttggtttggagttttgttgtgtgtgtcttggcaggaggcgaccctcctccatccacagagcgccccggattaatggctaaagtaacacctactggcgggaccaacccaggctcagagcaggctttccgctgttgattcacg

SEQ ID NO: 156386 - DNA, 30 bp, Homo sapiens
  chr7:33885985-33886015
  hypo
actgggttgtctagacgtaggtgtcgttct

SEQ ID NO: 156387 - DNA, 37 bp, Homo sapiens; identical to SEQ ID NO: 73655
  chr7:33899152-33899189
  hypo

SEQ ID NO: 156388 - DNA, 1771 bp, Homo sapiens; identical to SEQ ID NO: 114889
  chr7:33943729-33945500
  hypo

SEQ ID NO: 156389 - DNA, 43 bp, Homo sapiens; identical to SEQ ID NO: 21324
  chr7:34034216-34034259
  hypo

SEQ ID NO: 156390 - DNA, 31 bp, Homo sapiens; identical to SEQ ID NO: 73658
  chr7:34192957-34192988
  hypo

SEQ ID NO: 156391 - DNA, 141 bp, Homo sapiens
  chr7:34349351-34349492
  hypo
tgctgggattacaggcgtaagccaccgcgcccagccgaatgcgggagttttactgagtgatggaggtggctctcagcgtgataggtggggagccagaagtgggggatggagtgggaaaatgatcttcgcctggagccgtcc

SEQ ID NO: 156392 - DNA, 45 bp, Homo sapiens; identical to SEQ ID NO: 73660
  chr7:34526628-34526673
  hypo

SEQ ID NO: 156393 - DNA, 30 bp, Homo sapiens
  chr7:34978722-34978752
  hypo
ttgtttagagcttagcggtcttatttcagc

SEQ ID NO: 156394 - DNA, 30 bp, Homo sapiens
  chr7:34978958-34978988
  hypo
cgtgggcatggcacccgcaaacactgcatc

SEQ ID NO: 156395 - DNA, 98 bp, Homo sapiens; identical to SEQ ID NO: 73661
  chr7:35042665-35042763
  hypo

SEQ ID NO: 156396 - DNA, 32 bp, Homo sapiens
  chr7:35066800-35066832
  hypo
agcaaaactccgtctcaaagaaaaaaaagaaa

SEQ ID NO: 156397 - DNA, 38 bp, Homo sapiens; identical to SEQ ID NO: 21327
  chr7:35190134-35190172
  hypo

SEQ ID NO: 156398 - DNA, 37 bp, Homo sapiens; identical to SEQ ID NO: 21328
  chr7:35190411-35190448
  hypo

SEQ ID NO: 156399 - DNA, 483 bp, Homo sapiens; identical to SEQ ID NO: 114892
  chr7:35225350-35225833
  hypo

SEQ ID NO: 156400 - DNA, 206 bp, Homo sapiens; identical to SEQ ID NO: 114893
  chr7:35226044-35226250
  hypo

SEQ ID NO: 156401 - DNA, 53 bp, Homo sapiens; identical to SEQ ID NO: 114894
  chr7:35226469-35226522
  hypo

SEQ ID NO: 156402 - DNA, 84 bp, Homo sapiens; identical to SEQ ID NO: 44111
  chr7:35226556-35226640
  hypo

SEQ ID NO: 156403 - DNA, 161 bp, Homo sapiens; identical to SEQ ID NO: 73667
  chr7:35349990-35350151
  hypo

SEQ ID NO: 156404 - DNA, 30 bp, Homo sapiens
  chr7:35452199-35452229
  hypo
accgtccacgaaggtcgagacatgagcggt

SEQ ID NO: 156405 - DNA, 30 bp, Homo sapiens
  chr7:35551165-35551195
  hypo
atgaggatggacgcacgtggtttgagatcg

SEQ ID NO: 156406 - DNA, 30 bp, Homo sapiens; identical to SEQ ID NO: 73668
  chr7:35808182-35808212
  hypo

SEQ ID NO: 156407 - DNA, 30 bp, Homo sapiens
  chr7:35838342-35838372
  hypo
tgagccaccgcgcccggccactctgtgtga

SEQ ID NO: 156408 - DNA, 29 bp, Homo sapiens
  chr7:35844772-35844801
  hypo
tgagccatcacgcccggccaagtgtttgt

SEQ ID NO: 156409 - DNA, 42 bp, Homo sapiens; identical to SEQ ID NO: 73670
  chr7:35994750-35994792
  hypo

SEQ ID NO: 156410 - DNA, 30 bp, Homo sapiens; identical to SEQ ID NO: 73671
  chr7:36005384-36005414
  hypo

SEQ ID NO: 156411 - DNA, 134 bp, Homo sapiens; identical to SEQ ID NO: 73672
  chr7:36008764-36008898
  hypo

SEQ ID NO: 156412 - DNA, 290 bp, Homo sapiens; identical to SEQ ID NO: 21331
  chr7:36124377-36124667
  hypo

SEQ ID NO: 156413 - DNA, 30 bp, Homo sapiens; identical to SEQ ID NO: 73674
  chr7:36124979-36125009
  hypo

SEQ ID NO: 156414 - DNA, 113 bp, Homo sapiens; identical to SEQ ID NO: 73675
  chr7:36134136-36134249
  hypo

SEQ ID NO: 156415 - DNA, 1060 bp, Homo sapiens; identical to SEQ ID NO: 114912
  chr7:36192232-36193292
  hypo

SEQ ID NO: 156416 - DNA, 507 bp, Homo sapiens; identical to SEQ ID NO: 73677
  chr7:36338989-36339496
  hypo

SEQ ID NO: 156417 - DNA, 35 bp, Homo sapiens
  chr7:36343957-36343992
  hypo
aggatgtgtacacaacgacacgtgctcatgtgtgc

SEQ ID NO: 156418 - DNA, 36 bp, Homo sapiens; identical to SEQ ID NO: 73678
  chr7:36349958-36349994
  hypo

SEQ ID NO: 156419 - DNA, 356 bp, Homo sapiens
  chr7:36352554-36352910
  hypo
agaggtccccttgagcggggacctgaccgggtgagtagcagatggcatccccggaagaggggaccaggagggccggggtgtggagggaggacagcagtgatgtggctgctcctggcaagagcttaggacgagatatggagaggagactgacgggagccacaggccagctcttccaaggcaggctaaggatgttgaggtggttctgcggcgctggggagcattgcaggcttgtgtgggagtaggaacaggtagaggagggggcctgcatccgcagtgccgggagcggcgcaggtatcggggcagggatgggggatggctctcgttgccggcatattattgtgcggtccttcggctaa

SEQ ID NO: 156420 - DNA, 23 bp, Homo sapiens
  chr7:36379758-36379781
  hypo
gagccaccgcgcttggcctgctt

SEQ ID NO: 156421 - DNA, 89 bp, Homo sapiens; identical to SEQ ID NO: 73681
  chr7:36428639-36428728
  hypo

SEQ ID NO: 156422 - DNA, 30 bp, Homo sapiens
  chr7:36438707-36438737
  hypo
tcgccatcaaaaaaacgctgttctgacaac

SEQ ID NO: 156423 - DNA, 30 bp, Homo sapiens
  chr7:36438959-36438989
  hypo
cttgcagagcaacggcgccgttgggataat

SEQ ID NO: 156424 - DNA, 30 bp, Homo sapiens; identical to SEQ ID NO: 73682
  chr7:36453632-36453662
  hypo

SEQ ID NO: 156425 - DNA, 25 bp, Homo sapiens
  chr7:36524505-36524530
  hypo
ctgcggccatattaagtacaaaagg

SEQ ID NO: 156426 - DNA, 30 bp, Homo sapiens; identical to SEQ ID NO: 21334
  chr7:36585405-36585435
  hypo

SEQ ID NO: 156427 - DNA, 30 bp, Homo sapiens; identical to SEQ ID NO: 21335
  chr7:36672672-36672702
  hypo

SEQ ID NO: 156428 - DNA, 44 bp, Homo sapiens
  chr7:36823503-36823547
  hypo
ctgggattacaagcgtgagccaccgtgcccggctcgaactctag

SEQ ID NO: 156429 - DNA, 241 bp, Homo sapiens
  chr7:36825464-36825705
  hypo
cacattgtgaaaagccgcaagtatagagcgggcacgacttcttataattaagtatacgggtaaaagcacagctgaatttggaattttgcataagggagttttctaggcttttttttggctttaaagaaaaagcacaaataaggaggcagaatacaggagaggagacaggagtccggaacaaaagcaaataacctaatgagctattcaaaggcaaattcacaaactgcgcttctcgaagcct

SEQ ID NO: 156430 - DNA, 110 bp, Homo sapiens; identical to SEQ ID NO: 73686
  chr7:36836026-36836136
  hypo

SEQ ID NO: 156431 - DNA, 30 bp, Homo sapiens
  chr7:36878221-36878251
  hypo
atgagctaccgtgcccggtgcatatgtttt

SEQ ID NO: 156432 - DNA, 554 bp, Homo sapiens
  chr7:36894940-36895494
  hypo
tgaagcagtggagccgaggaacagaatcagggcggtgagcaagatgccagctaggggctgaaagttgccagggctagaggtgatgctgaagggaatgtggacccacagcttccctttaccaaaggacggttccaaggcgtgggtgtgttttcattcctctctcctgttagctaggtgttccagttttggaaggggcatgtctgggcccggccacttcagttacagtcatagacgaagtcatagttgctgggctccttgggaatcggcggaggtgcgtcagggatctggatgttttccaggtccaggaggcggagcttgatttccatgctgagcagggtgtccaggtcattccgcgtcaggtcgctcatcatgtccttcccgagtagcgcattcagtccatccgtccagatacagtactggcaggaagggaggcaacagcgatcattactggtggcaattacagaagtattaatagtaaaaatagctaacagtgaatactcatccctcagtaggctgtgcgctaagggctctgcctacttcgtcatttcatattt

SEQ ID NO: 156433 - DNA, 178 bp, Homo sapiens; identical to SEQ ID NO: 73688
  chr7:36901364-36901542
  hypo

SEQ ID NO: 156434 - DNA, 46 bp, Homo sapiens
  chr7:36941500-36941546
  hypo
atattcaggacaaatcgaacagaatcggttccgacagattaaagag

SEQ ID NO: 156435 - DNA, 30 bp, Homo sapiens
  chr7:36967777-36967807
  hypo
attaacgcccggattcgtaagtgcatcttc

SEQ ID NO: 156436 - DNA, 30 bp, Homo sapiens
  chr7:36972718-36972748
  hypo
aagcagctcagagcacgtggggctagacag

SEQ ID NO: 156437 - DNA, 30 bp, Homo sapiens
  chr7:36984612-36984642
  hypo
acgcctgctgactcacggcagctttgctct

SEQ ID NO: 156438 - DNA, 55 bp, Homo sapiens
  chr7:36985066-36985121
  hypo
gcatttaacttagcacgaagctttccgggaatccctagaacgatcatttagaatg

SEQ ID NO: 156439 - DNA, 30 bp, Homo sapiens
  chr7:37052602-37052632
  hypo
atgaaagaaaacattcgccttgataacgtg

SEQ ID NO: 156440 - DNA, 30 bp, Homo sapiens
  chr7:37052980-37053010
  hypo
cctcaaaggatctgtcgtgggtgaagaaca

SEQ ID NO: 156441 - DNA, 30 bp, Homo sapiens; identical to SEQ ID NO: 5526
  chr7:37078723-37078753
  hypo

SEQ ID NO: 156442 - DNA, 30 bp, Homo sapiens
  chr7:37136214-37136244
  hypo
tatacttacgcaactcgcccactttcaaga

SEQ ID NO: 156443 - DNA, 30 bp, Homo sapiens
  chr7:37158195-37158225
  hypo
tttaaggagtgggaacgggaacaatcaact

SEQ ID NO: 156444 - DNA, 30 bp, Homo sapiens
  chr7:37191004-37191034
  hypo
actgggcaattaggccggctcccggtggtc

SEQ ID NO: 156445 - DNA, 30 bp, Homo sapiens
  chr7:37237039-37237069
  hypo
tccgagtctggacgtcgtgctcacacctcc

SEQ ID NO: 156446 - DNA, 105 bp, Homo sapiens; identical to SEQ ID NO: 21338
  chr7:37250875-37250980
  hypo

SEQ ID NO: 156447 - DNA, 118 bp, Homo sapiens; identical to SEQ ID NO: 73691
  chr7:37264493-37264611
  hypo

SEQ ID NO: 156448 - DNA, 30 bp, Homo sapiens; identical to SEQ ID NO: 21340
  chr7:37265720-37265750
  hypo

SEQ ID NO: 156449 - DNA, 30 bp, Homo sapiens
  chr7:37272746-37272776
  hypo
ggtccatcagctcaacgaaggccgtcaggg

SEQ ID NO: 156450 - DNA, 69 bp, Homo sapiens; identical to SEQ ID NO: 21341
  chr7:37299039-37299108
  hypo

SEQ ID NO: 156451 - DNA, 17 bp, Homo sapiens
  chr7:37347437-37347454
  hypo
gggtgtggtggctcacg

SEQ ID NO: 156452 - DNA, 43 bp, Homo sapiens; identical to SEQ ID NO: 73694
  chr7:37424295-37424338
  hypo

SEQ ID NO: 156453 - DNA, 333 bp, Homo sapiens
  chr7:37458221-37458554
  hypo
tgaatagcaacaccatggatgcgtcagagtcagctcagataacctcggtcagatgctgacctgcagaagtctcaggcagggccaagcgtggagatggaaaatccagaaacacacagatgcgggcaggcagaatcacagaagtcatctcgcaggtattataaggaggtgtcagtcatcaggttaagcgtgggaggcaaactgcagcttctgcagtgaaggggcagtgaggcgagatggggatggtaagagtcaagtgcccagctctcagggtgctgcagaggctaggagtcgggtactcgcaacaagactaagcagctacggaacatgagtcga

SEQ ID NO: 156454 - DNA, 30 bp, Homo sapiens
  chr7:37466605-37466635
  hypo
ctacgtcttttttcccgaaaaaaagaaaaa

SEQ ID NO: 156455 - DNA, 119 bp, Homo sapiens; identical to SEQ ID NO: 44131
  chr7:37487145-37487264
  hypo

SEQ ID NO: 156456 - DNA, 130 bp, Homo sapiens; identical to SEQ ID NO: 5528
  chr7:37487323-37487453
  hypo

SEQ ID NO: 156457 - DNA, 210 bp, Homo sapiens; identical to SEQ ID NO: 5529
  chr7:37487755-37487965
  hypo

SEQ ID NO: 156458 - DNA, 1106 bp, Homo sapiens; identical to SEQ ID NO: 44134
  chr7:37487984-37489090
  hypo

SEQ ID NO: 156459 - DNA, 27 bp, Homo sapiens
  chr7:37531082-37531109
  hypo
atccaccatgcccggcctaaaattatg

SEQ ID NO: 156460 - DNA, 30 bp, Homo sapiens
  chr7:37609521-37609551
  hypo
acgtgtctgagcaggcggcaccaaagtatg

SEQ ID NO: 156461 - DNA, 19 bp, Homo sapiens
  chr7:37727748-37727767
  hypo
atgtagtaggctgggcgcg

SEQ ID NO: 156462 - DNA, 30 bp, Homo sapiens; identical to SEQ ID NO: 73701
  chr7:37780141-37780171
  hypo

SEQ ID NO: 156463 - DNA, 30 bp, Homo sapiens
  chr7:37868891-37868921
  hypo
cagctgcagcgacaccgagctcctcacagc

SEQ ID NO: 156464 - DNA, 30 bp, Homo sapiens
  chr7:37951788-37951818
  hypo
agaatttgtaatgagcgggacttgagttcg

SEQ ID NO: 156465 - DNA, 30 bp, Homo sapiens; identical to SEQ ID NO: 73702
  chr7:37959671-37959701
  hypo

SEQ ID NO: 156466 - DNA, 371 bp, Homo sapiens; identical to SEQ ID NO: 5532
  chr7:37960165-37960536
  hypo

SEQ ID NO: 156467 - DNA, 585 bp, Homo sapiens; identical to SEQ ID NO: 5533
  chr7:37960562-37961147
  hypo

SEQ ID NO: 156468 - DNA, 30 bp, Homo sapiens; identical to SEQ ID NO: 73705
  chr7:37988229-37988259
  hypo

SEQ ID NO: 156469 - DNA, 30 bp, Homo sapiens
  chr7:37989964-37989994
  hypo
actggagaagatgagcgaagactgctcctg

SEQ ID NO: 156470 - DNA, 143 bp, Homo sapiens; identical to SEQ ID NO: 73706
  chr7:38089575-38089718
  hypo

SEQ ID NO: 156471 - DNA, 30 bp, Homo sapiens
  chr7:38105590-38105620
  hypo
gcgagaatgggctttcggtatccacctggg

SEQ ID NO: 156472 - DNA, 30 bp, Homo sapiens
  chr7:38423104-38423134
  hypo
gatgtcagggaacaccgagtgaccagcaat

SEQ ID NO: 156473 - DNA, 30 bp, Homo sapiens; identical to SEQ ID NO: 21349
  chr7:38469039-38469069
  hypo

SEQ ID NO: 156474 - DNA, 25 bp, Homo sapiens
  chr7:38508455-38508480
  hypo
cagtagaacatacagacggccgggc

SEQ ID NO: 156475 - DNA, 286 bp, Homo sapiens
  chr7:38725397-38725683
  hypo
gattcagaaacctggcgtctgcgggttcctccaggttatcatgccaagacataggcttcctcgtaatcctgtgaaccttgcgcaggggattcacatggtactgcgtgtggagtttctgggttcgtaactctttgaggtacagctcccgcaagatctggttctgatggacctcatctgtgaccaccctctctttcgggtgtcccgccatagccttggggctgctccgtgggtccggggctctctcggcgtcctcttaccactcgcttggctgcgggccttctgcagt

SEQ ID NO: 156476 - DNA, 276 bp, Homo sapiens; identical to SEQ ID NO: 73710
  chr7:38726297-38726573
  hypo

SEQ ID NO: 156477 - DNA, 29 bp, Homo sapiens
  chr7:38731689-38731718
  hypo
tgccggcatatttcccgggtcttgcgtcc

SEQ ID NO: 156478 - DNA, 30 bp, Homo sapiens
  chr7:38732169-38732199
  hypo
tttctgattggcggccgggcgcggtggctc

SEQ ID NO: 156479 - DNA, 30 bp, Homo sapiens
  chr7:38765417-38765447
  hypo
agcacgtggaaacaacgtccaagttgcagg

SEQ ID NO: 156480 - DNA, 67 bp, Homo sapiens; identical to SEQ ID NO: 73711
  chr7:38787792-38787859
  hypo

SEQ ID NO: 156481 - DNA, 30 bp, Homo sapiens
  chr7:38902612-38902642
  hypo
gtaaatcagtgctatcgcttaagctgcaca

SEQ ID NO: 156482 - DNA, 133 bp, Homo sapiens
  chr7:38943826-38943959
  hypo
tctccaaggtgttaatgtgggcgcggcggaggctactaataatcagctagtgaagtggcctctagccgaccaattcaggtgaagataagtggaaaaactaacaaagcaatccgctagtccagcaaaactaatc

SEQ ID NO: 156483 - DNA, 132 bp, Homo sapiens; identical to SEQ ID NO: 73712
  chr7:38974186-38974318
  hypo

SEQ ID NO: 156484 - DNA, 19 bp, Homo sapiens
  chr7:39169359-39169378
  hypo
aattatttaaaaaattttt

SEQ ID NO: 156485 - DNA, 30 bp, Homo sapiens; identical to SEQ ID NO: 73713
  chr7:39383738-39383768
  hypo

SEQ ID NO: 156486 - DNA, 30 bp, Homo sapiens; identical to SEQ ID NO: 21350
  chr7:39390643-39390673
  hypo

SEQ ID NO: 156487 - DNA, 30 bp, Homo sapiens; identical to SEQ ID NO: 73715
  chr7:39446055-39446085
  hypo

SEQ ID NO: 156488 - DNA, 866 bp, Homo sapiens; identical to SEQ ID NO: 44143
  chr7:39453505-39454371
  hypo

SEQ ID NO: 156489 - DNA, 30 bp, Homo sapiens; identical to SEQ ID NO: 73717
  chr7:39500273-39500303
  hypo

SEQ ID NO: 156490 - DNA, 61 bp, Homo sapiens
  chr7:39503984-39504045
  hypo
tatgcagaacctgaccgagtttatcgggagtgaaccatccaaaaagcgcaagcggcgcacc

SEQ ID NO: 156491 - DNA, 31 bp, Homo sapiens; identical to SEQ ID NO: 21352
  chr7:39761549-39761580
  hypo

SEQ ID NO: 156492 - DNA, 38 bp, Homo sapiens; identical to SEQ ID NO: 73719
  chr7:39942870-39942908
  hypo

SEQ ID NO: 156493 - DNA, 30 bp, Homo sapiens
  chr7:40026375-40026405
  hypo
tatatgtgtgtttacgtgagtaaagtgatt

SEQ ID NO: 156494 - DNA, 167 bp, Homo sapiens
  chr7:40027211-40027378
  hypo
cccgaagcagaagcccgtattcatctaggcattcaagatctcgtagcaggcacagattgtctagatccagaagtcgtcattctagtatttctcctagcacactaactctgaagagtagcctggcagctgaattgaacaagaataaaaaagcacgagcagcagaggca

SEQ ID NO: 156495 - DNA, 30 bp, Homo sapiens
  chr7:40056818-40056848
  hypo
gttattggtttttagcgtcttccaacagtg

SEQ ID NO: 156496 - DNA, 18 bp, Homo sapiens
  chr7:40069545-40069563
  hypo
tggcctagattagattct

SEQ ID NO: 156497 - DNA, 33 bp, Homo sapiens; identical to SEQ ID NO: 73721
  chr7:40156752-40156785
  hypo

SEQ ID NO: 156498 - DNA, 93 bp, Homo sapiens
  chr7:40157024-40157117
  hypo
atactacagaatgctattatacttgtgaaattctcttgtctaacctgaatttacattccatgatgataacatggtatacgtattgttatgaaa

SEQ ID NO: 156499 - DNA, 31 bp, Homo sapiens; identical to SEQ ID NO: 73722
  chr7:40243014-40243045
  hypo

SEQ ID NO: 156500 - DNA, 19 bp, Homo sapiens
  chr7:40697082-40697101
  hypo
tttaattagtaatctcgtg

SEQ ID NO: 156501 - DNA, 107 bp, Homo sapiens; identical to SEQ ID NO: 21353
  chr7:40766264-40766371
  hypo

SEQ ID NO: 156502 - DNA, 39 bp, Homo sapiens
  chr7:40840155-40840194
  hypo
actgggattacaggcgtgagccaccgcgcctggccctca

SEQ ID NO: 156503 - DNA, 30 bp, Homo sapiens; identical to SEQ ID NO: 44148
  chr7:40866647-40866677
  hypo

SEQ ID NO: 156504 - DNA, 219 bp, Homo sapiens
  chr7:40938913-40939132
  hypo
ctttatttacccctccgcctcccattttggcacctcggtggctataaatacgccctgtgaatgcaattacgtgatggaacgcaggctgcgccaaagcctctttgctccaggctatggtgtcagccatttacctctgtgaagcatataaaaagacacgcgactcaagaggcaacgcacacgctgagacagaaagcaagagcacaacgaaaaatacaacaa

SEQ ID NO: 156505 - DNA, 146 bp, Homo sapiens
  chr7:40939650-40939796
  hypo
cctcgggggctgctgcgaggccttctcagcgaagcattggccaggctctgggaagagccgatgaccggctgtgctttccagatttggaaacttggctcatacttttccttaagcagcctccagcttctctgcgtatttcaaatcat

SEQ ID NO: 156506 - DNA, 300 bp, Homo sapiens
  chr7:41176258-41176558
  hypo
ccgtcctcagctgcccggcagcctgccttcctgaactcactggtgcccaaagcttcagaggggggccgaggcggcgggggtgctggtgtgtcagtgctgcccggagcgcacacacacctggccaggttgcgacagtgcctgagcaagctcagcttcaaccttgctccaattggagcgggtgccaggagcagaagaggccaggcagtgggaataagcacttccaagcctgtgcggggagggggtttcccggccctgagaacacagggatgcctggatccgcagccacggctgggctgctgt

SEQ ID NO: 156507 - DNA, 154 bp, Homo sapiens
  chr7:41764776-41764930
  hypo
gtcctcgtgagtcatgagttccgccatggcccagagctgccaaaatgccgttcttccccacacttttccacaggaactgggggtgcctcagcctttggaaagctaccttgtactctatccacactcaataaacgctgcttaataatgacaatga

SEQ ID NO: 156508 - DNA, 37 bp, Homo sapiens; identical to SEQ ID NO: 21354
  chr7:41840522-41840559
  hypo

SEQ ID NO: 156509 - DNA, 30 bp, Homo sapiens
  chr7:42004035-42004065
  hypo
gagggacgcccgaggcgtggtgaggcggga

SEQ ID NO: 156510 - DNA, 1366 bp, Homo sapiens; identical to SEQ ID NO: 21355
  chr7:42004851-42006217
  hypo

SEQ ID NO: 156511 - DNA, 30 bp, Homo sapiens; identical to SEQ ID NO: 21356
  chr7:42007425-42007455
  hypo

SEQ ID NO: 156512 - DNA, 31 bp, Homo sapiens; identical to SEQ ID NO: 73730
  chr7:42096566-42096597
  hypo

SEQ ID NO: 156513 - DNA, 30 bp, Homo sapiens
  chr7:42117715-42117745
  hypo
cacagagcgtccccccgctgaagtcggctg

SEQ ID NO: 156514 - DNA, 58 bp, Homo sapiens
  chr7:42142437-42142495
  hypo
tatgggagtgccatctcagttcgccggtcacactggcgcagaaatgcctaattgtggc

SEQ ID NO: 156515 - DNA, 32 bp, Homo sapiens; identical to SEQ ID NO: 73731
  chr7:42169113-42169145
  hypo

SEQ ID NO: 156516 - DNA, 32 bp, Homo sapiens; identical to SEQ ID NO: 21357
  chr7:42169384-42169416
  hypo

SEQ ID NO: 156517 - DNA, 273 bp, Homo sapiens
  chr7:42237185-42237458
  hypo
cgtgctactggagcacggagcccttactcagtacagagaaggatgggggcctttgtcacctgaaattcaccactttgctatgttccggtcagcgggaggtacagttcgctactcacaggcctaaaagcagtgtcgggcttagctaccccagacaggagagtcagcgcctgctcatgcattgagactgaaacaatggtctgggcgtcacagcagctgtgcaaatccctgaaaattcagtccacgttaacgcaaggctctcgctctacataacct

SEQ ID NO: 156518 - DNA, 2120 bp, Homo sapiens; identical to SEQ ID NO: 44152
  chr7:42275702-42277822
  hypo

SEQ ID NO: 156519 - DNA, 43 bp, Homo sapiens; identical to SEQ ID NO: 73734
  chr7:42353123-42353166
  hypo

SEQ ID NO: 156520 - DNA, 27 bp, Homo sapiens
  chr7:42369987-42370014
  hypo
tatttattttgctttttgagacggagt

SEQ ID NO: 156521 - DNA, 144 bp, Homo sapiens
  chr7:42440832-42440976
  hypo
gagcgataatgctttcggctctctgtgttggttggacagaatcgaatggcgcattgctttttccagtgttacaaaagagaaggctatgtaataatttttctagaaaaagtaaacagggacataatttctcgttttcaaagctgt

SEQ ID NO: 156522 - DNA, 30 bp, Homo sapiens
  chr7:42446145-42446175
  hypo
taccgaaggcggcgccggggcacgagtatc

SEQ ID NO: 156523 - DNA, 30 bp, Homo sapiens
  chr7:42512326-42512356
  hypo
tattttaggctttgccggccctgcagtctc

SEQ ID NO: 156524 - DNA, 30 bp, Homo sapiens
  chr7:42512642-42512672
  hypo
gctgccgctcatggacgacagtttctcttt

SEQ ID NO: 156525 - DNA, 30 bp, Homo sapiens
  chr7:42746420-42746450
  hypo
cctcattgcaaactgcgggaactgccgtag

SEQ ID NO: 156526 - DNA, 30 bp, Homo sapiens
  chr7:42747157-42747187
  hypo
catgttacacgaagtcgtctaacacgcgtt

SEQ ID NO: 156527 - DNA, 179 bp, Homo sapiens; identical to SEQ ID NO: 73736
  chr7:42812189-42812368
  hypo

SEQ ID NO: 156528 - DNA, 222 bp, Homo sapiens; identical to SEQ ID NO: 73737
  chr7:42834366-42834588
  hypo

SEQ ID NO: 156529 - DNA, 34 bp, Homo sapiens; identical to SEQ ID NO: 73738
  chr7:42909817-42909851
  hypo

SEQ ID NO: 156530 - DNA, 30 bp, Homo sapiens; identical to SEQ ID NO: 5545
  chr7:43016820-43016850
  hypo

SEQ ID NO: 156531 - DNA, 17 bp, Homo sapiens
  chr7:43037171-43037188
  hypo
caaaaaaaaagaaaaaa

SEQ ID NO: 156532 - DNA, 198 bp, Homo sapiens; identical to SEQ ID NO: 73741
  chr7:43116309-43116507
  hypo

SEQ ID NO: 156533 - DNA, 208 bp, Homo sapiens; identical to SEQ ID NO: 44157
  chr7:43151999-43152207
  hypo

SEQ ID NO: 156534 - DNA, 786 bp, Homo sapiens; identical to SEQ ID NO: 5547
  chr7:43152413-43153199
  hypo

SEQ ID NO: 156535 - DNA, 464 bp, Homo sapiens; identical to SEQ ID NO: 44159
  chr7:43153229-43153693
  hypo

SEQ ID NO: 156536 - DNA, 145 bp, Homo sapiens; identical to SEQ ID NO: 73745
  chr7:43237313-43237458
  hypo

SEQ ID NO: 156537 - DNA, 33 bp, Homo sapiens; identical to SEQ ID NO: 73746
  chr7:43279647-43279680
  hypo

SEQ ID NO: 156538 - DNA, 33 bp, Homo sapiens; identical to SEQ ID NO: 73747
  chr7:43279919-43279952
  hypo

SEQ ID NO: 156539 - DNA, 78 bp, Homo sapiens; identical to SEQ ID NO: 73748
  chr7:43313711-43313789
  hypo

SEQ ID NO: 156540 - DNA, 30 bp, Homo sapiens
  chr7:43351523-43351553
  hypo
ccccgctccaccagcgacactgacctggtc

SEQ ID NO: 156541 - DNA, 30 bp, Homo sapiens
  chr7:43360023-43360053
  hypo
tatggggttgggaggcgatcccggcataaa

SEQ ID NO: 156542 - DNA, 33 bp, Homo sapiens
  chr7:43409044-43409077
  hypo
gagcgaaactccgtctcaaaaaaaataaaaaaa

SEQ ID NO: 156543 - DNA, 94 bp, Homo sapiens
  chr7:43594217-43594311
  hypo
gctggttctgggctgcggtggagcgcttcaataatgagcagaggctgagattactgcagtttgtcacgggaacatccagcgtgccctacgaagg

SEQ ID NO: 156544 - DNA, 34 bp, Homo sapiens
  chr7:43799757-43799791
  hypo
tggcatgagtcaccgcgcccggccgatctttact

SEQ ID NO: 156545 - DNA, 16 bp, Homo sapiens
  chr7:43805151-43805167
  hypo
atttatttatttttaa

SEQ ID NO: 156546 - DNA, 186 bp, Homo sapiens; identical to SEQ ID NO: 73751
  chr7:43827244-43827430
  hypo

SEQ ID NO: 156547 - DNA, 30 bp, Homo sapiens; identical to SEQ ID NO: 5550
  chr7:43896240-43896270
  hypo

SEQ ID NO: 156548 - DNA, 30 bp, Homo sapiens
  chr7:43903322-43903352
  hypo
agggatggcctgagccggaaatgccccggt

SEQ ID NO: 156549 - DNA, 21 bp, Homo sapiens
  chr7:44083439-44083460
  hypo
cgtgcccggcaggatttatat

SEQ ID NO: 156550 - DNA, 20 bp, Homo sapiens
  chr7:44089053-44089073
  hypo
cccagcccaaagttcttatg

SEQ ID NO: 156551 - DNA, 129 bp, Homo sapiens
  chr7:44097727-44097856
  hypo
aaggaggaggagaaccgtcggctggaggaaaagcggcgggccgaggaggcacagcggcagctggagcaggagcgccgggagcgtgagctgcgtgaggctgcacgccgggagcagcgctatcaggagcag

SEQ ID NO: 156552 - DNA, 30 bp, Homo sapiens; identical to SEQ ID NO: 73756
  chr7:44142958-44142988
  hypo

SEQ ID NO: 156553 - DNA, 30 bp, Homo sapiens; identical to SEQ ID NO: 21366
  chr7:44150873-44150903
  hypo

SEQ ID NO: 156554 - DNA, 98 bp, Homo sapiens
  chr7:44151842-44151940
  hypo
gagaggaaatgggtcccctaccgggtccccaacaataacttgcccatccctgaacgctacctttcgccagatgccacggtgaggctacagcctggctg

SEQ ID NO: 156555 - DNA, 55 bp, Homo sapiens
  chr7:44152190-44152245
  hypo
tggagaagaaccccttcgtgctgggagcaaatctgaacggcggcgagcggctagt

SEQ ID NO: 156556 - DNA, 486 bp, Homo sapiens; identical to SEQ ID NO: 21367
  chr7:44153136-44153622
  hypo

SEQ ID NO: 156557 - DNA, 30 bp, Homo sapiens; identical to SEQ ID NO: 21368
  chr7:44154307-44154337
  hypo

SEQ ID NO: 156558 - DNA, 30 bp, Homo sapiens
  chr7:44190652-44190682
  hypo
actcagagatgtagtcgaagagctggaaga

SEQ ID NO: 156559 - DNA, 37 bp, Homo sapiens; identical to SEQ ID NO: 73761
  chr7:44250465-44250502
  hypo

SEQ ID NO: 156560 - DNA, 323 bp, Homo sapiens
  chr7:44256924-44257247
  hypo
ccgccaccaccacaccgcggacacctagctagcagaccggtgtggcttgctctttaggggtcatgcaaaagaattatcccccagaaaaaaaatccccaaattatcccagacaggcagctccgtggaggtgacaaggtgagagggagaggaggggaggaggccccaggacgccagggtggccggctgctgggccacgtgctgtccgtggtgagccctgccgctgtcccatggcccagggagccactggtgcggagcccggcagatgtttaccctgtgttcatggatggggacagctgtcctgggcacagcgtggacggaagatg

SEQ ID NO: 156561 - DNA, 306 bp, Homo sapiens
  chr7:44258443-44258749
  hypo
tgccgaagggttgtccgtgctgggtgtgtggggataccgggcacggaaaacccacacctagcccttcaggggatgaaaggaagggaagggaaagcaggaacaacagcaactctcaggcacaactagcgggaaaggaggcagcccagcgggcccccacagcccctcccaagagacagctgacagtcacgacagccagcgagcacaccacgtggagcccatgcgttggcaggaggatgcagacaccttaggtgtggggtgtgtgcgttacctacaaactaacaccgttcagcacgcgacgggggcctg

SEQ ID NO: 156562 - DNA, 30 bp, Homo sapiens; identical to SEQ ID NO: 21369
  chr7:44259032-44259062
  hypo

SEQ ID NO: 156563 - DNA, 30 bp, Homo sapiens; identical to SEQ ID NO: 73763
  chr7:44259795-44259825
  hypo

SEQ ID NO: 156564 - DNA, 30 bp, Homo sapiens; identical to SEQ ID NO: 73764
  chr7:44279147-44279177
  hypo

SEQ ID NO: 156565 - DNA, 92 bp, Homo sapiens
  chr7:44279650-44279742
  hypo
cggatcacagacgctcgcacacggagtgtcggacgacggagaagccacaggtacagcttgtccagacctgggctgccggctccactccgggg

SEQ ID NO: 156566 - DNA, 31 bp, Homo sapiens; identical to SEQ ID NO: 21370
  chr7:44291703-44291734
  hypo

SEQ ID NO: 156567 - DNA, 38 bp, Homo sapiens; identical to SEQ ID NO: 73767
  chr7:44301707-44301745
  hypo

SEQ ID NO: 156568 - DNA, 31 bp, Homo sapiens; identical to SEQ ID NO: 21371
  chr7:44302563-44302594
  hypo

SEQ ID NO: 156569 - DNA, 30 bp, Homo sapiens
  chr7:44305513-44305543
  hypo
acacacaaacacacacgtcgtatcgagtgc

SEQ ID NO: 156570 - DNA, 30 bp, Homo sapiens
  chr7:44307757-44307787
  hypo
ccaggacgccgaagacgccctggactgcgc

SEQ ID NO: 156571 - DNA, 100 bp, Homo sapiens; identical to SEQ ID NO: 73769
  chr7:44311756-44311856
  hypo

SEQ ID NO: 156572 - DNA, 230 bp, Homo sapiens; identical to SEQ ID NO: 44176
  chr7:44364448-44364678
  hypo

SEQ ID NO: 156573 - DNA, 383 bp, Homo sapiens; identical to SEQ ID NO: 44177
  chr7:44364698-44365081
  hypo

SEQ ID NO: 156574 - DNA, 525 bp, Homo sapiens; identical to SEQ ID NO: 114979
  chr7:44365117-44365642
  hypo

SEQ ID NO: 156575 - DNA, 227 bp, Homo sapiens; identical to SEQ ID NO: 73773
  chr7:44430994-44431221
  hypo

SEQ ID NO: 156576 - DNA, 28 bp, Homo sapiens
  chr7:44452236-44452264
  hypo
attggcagggccgggcgcagtggctcac

SEQ ID NO: 156577 - DNA, 28 bp, Homo sapiens
  chr7:44492663-44492691
  hypo
aatgttggccgggtgcggtggctcacgc

SEQ ID NO: 156578 - DNA, 44 bp, Homo sapiens; identical to SEQ ID NO: 73776
  chr7:44517849-44517893
  hypo

SEQ ID NO: 156579 - DNA, 30 bp, Homo sapiens
  chr7:44573949-44573979
  hypo
gacccagcaaattcacgccagagtcccatc

SEQ ID NO: 156580 - DNA, 30 bp, Homo sapiens
  chr7:44574185-44574215
  hypo
ccacggccaccccgccgaggcccagcgtgg

SEQ ID NO: 156581 - DNA, 476 bp, Homo sapiens
  chr7:44582325-44582801
  hypo
cgggaactggtggggacgtgcccaagaaggtcccctccaaggaataaggacacagacagctttccaccacattcatctgtcactggtagaggacattcctggaagatttcgccccagcacgtggcgggcaccttcagtgtcaaagggccttaggcagggccgtgggcacttgcgacaagaagacactgtcggcatgcacagagctgtgtcagaacaaagatatgaaaggcccaccctgcctttcatatgtttcttcccatgggggctgtctaggctaagcccctggagcccagctgtgcccagtctagcaccacagagagatagagtccagctatgtggtctcctggggtcatttgtgaaacacacgcagcataacagcggcacaatccggctcggaatgacagtgaaaatttcacacccgatctcccaacccagctgccggtgcctctggacacacgtgccgagctgtaaccata

SEQ ID NO: 156582 - DNA, 40 bp, Homo sapiens; identical to SEQ ID NO: 73778
  chr7:44583393-44583433
  hypo

SEQ ID NO: 156583 - DNA, 142 bp, Homo sapiens; identical to SEQ ID NO: 21374
  chr7:44611080-44611222
  hypo

SEQ ID NO: 156584 - DNA, 67 bp, Homo sapiens
  chr7:44612062-44612129
  hypo
ccagctccaagggccgctaattgtagtaactggcttccagccaccccgctctcgtcccaactcctac

SEQ ID NO: 156585 - DNA, 30 bp, Homo sapiens; identical to SEQ ID NO: 73781
  chr7:44723439-44723469
  hypo

SEQ ID NO: 156586 - DNA, 32 bp, Homo sapiens; identical to SEQ ID NO: 21376
  chr7:44740321-44740353
  hypo

SEQ ID NO: 156587 - DNA, 92 bp, Homo sapiens; identical to SEQ ID NO: 21377
  chr7:44740652-44740744
  hypo

SEQ ID NO: 156588 - DNA, 503 bp, Homo sapiens
  chr7:44746535-44747038
  hypo
aatactcttgtccccgaagtctgagccaagctgttttgaaggctagcctggtgttacttgatacccagagctggccatgtctgctgtgtatttgttacacgtaacgtgcttttcaaagtgtgcctggtctgagcaaatacagggcatcagaggctggtgaaggggaagcatctctaacccttgaaagctgcgtctcctggcagcagtccctggcacagccctgggcccaggagagctctcagccacatacctgagagaaccagcctagccatgggaactctcttgtaggaacccacttccagcgggtgatcccagaagatggccctgcagctcagaacccagaaaatgtcaaaaggcttctcttctgcaccggcaaagtgtattatgacctcacccgggagcgcaaagcacgcgacatggtggggcaggtggccatcacaaggattgagcaggtgagggcaggtggtgccatcagggtgtccccccagcgggggtcagggctc

SEQ ID NO: 156589 - DNA, 30 bp, Homo sapiens; identical to SEQ ID NO: 21379
  chr7:44748195-44748225
  hypo

SEQ ID NO: 156590 - DNA, 30 bp, Homo sapiens; identical to SEQ ID NO: 73786
  chr7:44748826-44748856
  hypo

SEQ ID NO: 156591 - DNA, 149 bp, Homo sapiens
  chr7:44750443-44750592
  hypo
ctcctgaattgtcgccgttggggcagggcagacagggacataacctacccaacatcactgccaacatccttgcgcttttctggatataaaaaaggtacttctggatccgaaatatctaagctagatgtgagagcgtcagcttgctccac

SEQ ID NO: 156592 - DNA, 459 bp, Homo sapiens
  chr7:44801184-44801643
  hypo
ataatgaggtgagctccgcctggcccccacctgacccccacgaggctctgttcctcctcccacactctcagggcccgttttctgggtgtccacccatcttcctgagcaggcctgacctggagctgcaattcaagtgctaccaccacgaggaccggcagatgaacaccaactggccagcctcggtgcaggtcagcgtcaatgccacgccgctcaccatcgagcgtggcgacaacaagacctcgcacaagccactctacctgaagcatgtgtgccagccaggccgcaacaccatccagatcaccgtcaccgcctgctgctgcgtgcgtgtcctgcgccgagggggcggtgctgtggcgtggggcggggtgtggtggggcctggcccagcggtgccgtggggtggggcggggtgtgggcggggcctggcccagcggcgcagtgggagcggagccaggacatg

SEQ ID NO: 156593 - DNA, 335 bp, Homo sapiens; identical to SEQ ID NO: 73789
  chr7:44835103-44835438
  hypo

SEQ ID NO: 156594 - DNA, 33 bp, Homo sapiens; identical to SEQ ID NO: 73790
  chr7:44844993-44845026
  hypo

SEQ ID NO: 156595 - DNA, 22 bp, Homo sapiens
  chr7:44893432-44893454
  hypo
tttgagacggagtctcgctctg

SEQ ID NO: 156596 - DNA, 97 bp, Homo sapiens; identical to SEQ ID NO: 73791
  chr7:44912166-44912263
  hypo

SEQ ID NO: 156597 - DNA, 24 bp, Homo sapiens
  chr7:44918922-44918946
  hypo
gccgcatttggaatctcaaatgga

SEQ ID NO: 156598 - DNA, 700 bp, Homo sapiens; identical to SEQ ID NO: 44183
  chr7:44924078-44924778
  hypo

SEQ ID NO: 156599 - DNA, 30 bp, Homo sapiens
  chr7:44953102-44953132
  hypo
atggaatcccgtagtcgctgtgtccagcca

SEQ ID NO: 156600 - DNA, 30 bp, Homo sapiens; identical to SEQ ID NO: 21382
  chr7:45006456-45006486
  hypo

SEQ ID NO: 156601 - DNA, 31 bp, Homo sapiens; identical to SEQ ID NO: 21383
  chr7:45015221-45015252
  hypo

SEQ ID NO: 156602 - DNA, 624 bp, Homo sapiens; identical to SEQ ID NO: 114989
  chr7:45026004-45026628
  hypo

SEQ ID NO: 156603 - DNA, 19 bp, Homo sapiens
  chr7:45027141-45027160
  hypo
agagcgagactctgtctca

SEQ ID NO: 156604 - DNA, 121 bp, Homo sapiens; identical to SEQ ID NO: 73797
  chr7:45046868-45046989
  hypo

SEQ ID NO: 156605 - DNA, 164 bp, Homo sapiens; identical to SEQ ID NO: 73798
  chr7:45091549-45091713
  hypo

SEQ ID NO: 156606 - DNA, 30 bp, Homo sapiens
  chr7:45098764-45098794
  hypo
tcactgcccccgctacgattgatatttgaa

SEQ ID NO: 156607 - DNA, 139 bp, Homo sapiens; identical to SEQ ID NO: 73799
  chr7:45115573-45115712
  hypo

SEQ ID NO: 156608 - DNA, 30 bp, Homo sapiens; identical to SEQ ID NO: 73800
  chr7:45115939-45115969
  hypo

SEQ ID NO: 156609 - DNA, 227 bp, Homo sapiens; identical to SEQ ID NO: 73801
  chr7:45125648-45125875
  hypo

SEQ ID NO: 156610 - DNA, 30 bp, Homo sapiens; identical to SEQ ID NO: 21387
  chr7:45139765-45139795
  hypo

SEQ ID NO: 156611 - DNA, 30 bp, Homo sapiens
  chr7:45140725-45140755
  hypo
tcctgggagaggcccggggccacgggcagg

SEQ ID NO: 156612 - DNA, 30 bp, Homo sapiens; identical to SEQ ID NO: 73803
  chr7:45144059-45144089
  hypo

SEQ ID NO: 156613 - DNA, 30 bp, Homo sapiens; identical to SEQ ID NO: 73804
  chr7:45146792-45146822
  hypo

SEQ ID NO: 156614 - DNA, 30 bp, Homo sapiens
  chr7:45148542-45148572
  hypo
attgctgtccaagtcgtgactgccaccaag

SEQ ID NO: 156615 - DNA, 215 bp, Homo sapiens; identical to SEQ ID NO: 21388
  chr7:45222824-45223039
  hypo

SEQ ID NO: 156616 - DNA, 104 bp, Homo sapiens; identical to SEQ ID NO: 73806
  chr7:45252687-45252791
  hypo

SEQ ID NO: 156617 - DNA, 154 bp, Homo sapiens; identical to SEQ ID NO: 21389
  chr7:45262244-45262398
  hypo

SEQ ID NO: 156618 - DNA, 25 bp, Homo sapiens
  chr7:45293681-45293706
  hypo
tgagccaccgcgcccggtcttccct

SEQ ID NO: 156619 - DNA, 189 bp, Homo sapiens; identical to SEQ ID NO: 44188
  chr7:45299683-45299872
  hypo

SEQ ID NO: 156620 - DNA, 97 bp, Homo sapiens; identical to SEQ ID NO: 73809
  chr7:45431197-45431294
  hypo

SEQ ID NO: 156621 - DNA, 241 bp, Homo sapiens; identical to SEQ ID NO: 73810
  chr7:45439017-45439258
  hypo

SEQ ID NO: 156622 - DNA, 23 bp, Homo sapiens
  chr7:45597367-45597390
  hypo
tttttttttgagacagagtcacg

SEQ ID NO: 156623 - DNA, 355 bp, Homo sapiens; identical to SEQ ID NO: 114997
  chr7:45613458-45613813
  hypo

SEQ ID NO: 156624 - DNA, 712 bp, Homo sapiens; identical to SEQ ID NO: 5556
  chr7:45613857-45614569
  hypo

SEQ ID NO: 156625 - DNA, 424 bp, Homo sapiens; identical to SEQ ID NO: 5557
  chr7:45614580-45615004
  hypo

SEQ ID NO: 156626 - DNA, 181 bp, Homo sapiens; identical to SEQ ID NO: 73814
  chr7:45632338-45632519
  hypo

SEQ ID NO: 156627 - DNA, 30 bp, Homo sapiens
  chr7:45698979-45699009
  hypo
ggggagtttgcttctcgccccataaacctg

SEQ ID NO: 156628 - DNA, 62 bp, Homo sapiens; identical to SEQ ID NO: 73815
  chr7:45743035-45743097
  hypo

SEQ ID NO: 156629 - DNA, 30 bp, Homo sapiens
  chr7:45762343-45762373
  hypo
gggtgtcattttctcgcacaatacaactca

SEQ ID NO: 156630 - DNA, 30 bp, Homo sapiens; identical to SEQ ID NO: 73816
  chr7:45766804-45766834
  hypo

SEQ ID NO: 156631 - DNA, 46 bp, Homo sapiens; identical to SEQ ID NO: 73817
  chr7:45809382-45809428
  hypo

SEQ ID NO: 156632 - DNA, 148 bp, Homo sapiens; identical to SEQ ID NO: 21394
  chr7:47088918-47089066
  hypo

SEQ ID NO: 156633 - DNA, 154 bp, Homo sapiens; identical to SEQ ID NO: 115005
  chr7:47293660-47293814
  hypo

SEQ ID NO: 156634 - DNA, 174 bp, Homo sapiens; identical to SEQ ID NO: 115006
  chr7:47294080-47294254
  hypo

SEQ ID NO: 156635 - DNA, 30 bp, Homo sapiens; identical to SEQ ID NO: 73820
  chr7:47317247-47317277
  hypo

SEQ ID NO: 156636 - DNA, 283 bp, Homo sapiens
  chr7:47338285-47338568
  hypo
cagtaaatacctccacggcgcactcccacagaggcccctcacatgcccccaggcctgaccggacccacagccaaggcatctgtctggccataggatgaaacgaatggtttcttttacacatttttcaatgtctgcaccgtggccctgtgcacaggatgagggcacggggaggagctcaacatgcccctggggatgaagcaggagcttctaaacagcacgcagtgggaaggatgggcaggaaaacacaggcaggctcaccgtgcatgcccgagactgctggtag

SEQ ID NO: 156637 - DNA, 30 bp, Homo sapiens
  chr7:47340130-47340160
  hypo
accttgctaccctgccgaggaagccagcag

SEQ ID NO: 156638 - DNA, 85 bp, Homo sapiens
  chr7:47340360-47340445
  hypo
gggggccacagtcatcgggattcttgagacacaagcagggccagggtggtggcaacaggcacacagcatccggccgcagagaggc

SEQ ID NO: 156639 - DNA, 30 bp, Homo sapiens; identical to SEQ ID NO: 73822
  chr7:47340864-47340894
  hypo

SEQ ID NO: 156640 - DNA, 320 bp, Homo sapiens; identical to SEQ ID NO: 73823
  chr7:47343227-47343547
  hypo

SEQ ID NO: 156641 - DNA, 30 bp, Homo sapiens
  chr7:47370549-47370579
  hypo
cccaccggactcgggcgaaccttatgtgtg

SEQ ID NO: 156642 - DNA, 135 bp, Homo sapiens; identical to SEQ ID NO: 73824
  chr7:47370840-47370975
  hypo

SEQ ID NO: 156643 - DNA, 45 bp, Homo sapiens; identical to SEQ ID NO: 73825
  chr7:47384307-47384352
  hypo

SEQ ID NO: 156644 - DNA, 126 bp, Homo sapiens; identical to SEQ ID NO: 73826
  chr7:47394756-47394882
  hypo

SEQ ID NO: 156645 - DNA, 30 bp, Homo sapiens
  chr7:47408615-47408645
  hypo
ggcccaggtccggaacgagggtgccctgcg

SEQ ID NO: 156646 - DNA, 30 bp, Homo sapiens
  chr7:47409179-47409209
  hypo
cgtaaaggctgccatcgacagggccctgcg

SEQ ID NO: 156647 - DNA, 256 bp, Homo sapiens
  chr7:47410353-47410609
  hypo
gtggtgggaagcccacgctgcgtgggcacctggaatttgagagacgtgagccactacctaacagcagtcactgagcctggcccaggagccctctggagggacctgccctgagcatgtgcctcacagccccgggctccaggttgatgcaccaccatggtcagcagctgctggcctttttgaaaacactgggacaacgtgttgggacagagtcccaaggggtcctggggtgtggtgctgaaaacgcgcccacgccagg

SEQ ID NO: 156648 - DNA, 149 bp, Homo sapiens
  chr7:47420375-47420524
  hypo
cacacacacaaatgctctctgcttaccttccttcaaaacagcccagcggctctctcagtctgcacctctgagcccagttttccttgacacaggctttcacagcaggacagtggcatgccagaggagggcgggggcgtgccacctccctc

SEQ ID NO: 156649 - DNA, 429 bp, Homo sapiens; identical to SEQ ID NO: 73829
  chr7:47440317-47440746
  hypo

SEQ ID NO: 156650 - DNA, 30 bp, Homo sapiens
  chr7:47442695-47442725
  hypo
ccctcccgtcagtaccgccccgcccagcgc

SEQ ID NO: 156651 - DNA, 88 bp, Homo sapiens
  chr7:47446855-47446943
  hypo
gaagccactccttctctgacacgctggaaatcatctctcccacctaacctttagctcttgccgccgcgcaccttctgccatgctcagt

SEQ ID NO: 156652 - DNA, 48 bp, Homo sapiens
  chr7:47449176-47449224
  hypo
ggcaggtagaacactacgcaaacaagatgagggcgggtgcaaatccta

SEQ ID NO: 156653 - DNA, 30 bp, Homo sapiens; identical to SEQ ID NO: 73830
  chr7:47479237-47479267
  hypo

SEQ ID NO: 156654 - DNA, 30 bp, Homo sapiens
  chr7:47479496-47479526
  hypo
ctgcggtcagggaacgcacagagagaaagc

SEQ ID NO: 156655 - DNA, 307 bp, Homo sapiens; identical to SEQ ID NO: 73831
  chr7:47515266-47515573
  hypo

SEQ ID NO: 156656 - DNA, 150 bp, Homo sapiens
  chr7:47544598-47544748
  hypo
cccttaagcagccggcgacaggcttcatttaagaaatggaaggaacaacagcaggctcatctctgcggctgtggctcagaggtggctgggcccacaacagagtcaggacaagcagcccaccccctcctcctactccgcagccgacccaag

SEQ ID NO: 156657 - DNA, 72 bp, Homo sapiens; identical to SEQ ID NO: 21399
  chr7:47581606-47581678
  hypo

SEQ ID NO: 156658 - DNA, 30 bp, Homo sapiens
  chr7:47586409-47586439
  hypo
cgtgtgccaagaccacggtctctcagtgtg

SEQ ID NO: 156659 - DNA, 36 bp, Homo sapiens
  chr7:47591521-47591557
  hypo
aaaccgtgtgtccaccgggagcgatccttggcctct

SEQ ID NO: 156660 - DNA, 452 bp, Homo sapiens; identical to SEQ ID NO: 73833
  chr7:47605259-47605711
  hypo

SEQ ID NO: 156661 - DNA, 107 bp, Homo sapiens
  chr7:47612933-47613040
  hypo
cccaccctggggacaccctgccgccctccacgctgcctcccaccagcccgctaggtcgctggggcattggtctcaaatctacaagcgccatggaaagttgtccaggg

SEQ ID NO: 156662 - DNA, 39 bp, Homo sapiens; identical to SEQ ID NO: 21401
  chr7:47615109-47615148
  hypo

SEQ ID NO: 156663 - DNA, 222 bp, Homo sapiens; identical to SEQ ID NO: 5564
  chr7:47621698-47621920
  hypo

SEQ ID NO: 156664 - DNA, 32 bp, Homo sapiens; identical to SEQ ID NO: 73836
  chr7:47628645-47628677
  hypo

SEQ ID NO: 156665 - DNA, 87 bp, Homo sapiens
  chr7:47639912-47639999
  hypo
ggaagaagacacaagcggctgatcgtcgagagcacgcaggcagaagagcacattgacaggcaccggcatgcccgcaggccatcaact

SEQ ID NO: 156666 - DNA, 152 bp, Homo sapiens
  chr7:47679853-47680005
  hypo
tctgcctcagcacttcgtgcagatgaaagaagctagagtcatggtgaggctgaaaattgcttgggtaacaagtaatatttctgttcaactggacccgaaggacaggttgggaggtcagcggaaccacagcccacagcgccagctgaggtggg

SEQ ID NO: 156667 - DNA, 63 bp, Homo sapiens; identical to SEQ ID NO: 73838
  chr7:47711088-47711151
  hypo

SEQ ID NO: 156668 - DNA, 18 bp, Homo sapiens
  chr7:47733260-47733278
  hypo
ttctgacatagagtctcg

SEQ ID NO: 156669 - DNA, 30 bp, Homo sapiens; identical to SEQ ID NO: 73840
  chr7:47784645-47784675
  hypo

SEQ ID NO: 156670 - DNA, 1006 bp, Homo sapiens; identical to SEQ ID NO: 115009
  chr7:48074953-48075959
  hypo

SEQ ID NO: 156671 - DNA, 34 bp, Homo sapiens; identical to SEQ ID NO: 73842
  chr7:48093727-48093761
  hypo

SEQ ID NO: 156672 - DNA, 263 bp, Homo sapiens; identical to SEQ ID NO: 5566
  chr7:48127994-48128257
  hypo

SEQ ID NO: 156673 - DNA, 116 bp, Homo sapiens
  chr7:48147029-48147145
  hypo
atgcagccggcgtccgcaatatcgagatggagtcctcggtgtttgccgccatgtgcagcgcctgcggcctccaaggtaagcggcacttgatgggcctcggcgtcccctcctccctt

SEQ ID NO: 156674 - DNA, 32 bp, Homo sapiens; identical to SEQ ID NO: 73845
  chr7:48212092-48212124
  hypo

SEQ ID NO: 156675 - DNA, 30 bp, Homo sapiens
  chr7:48453839-48453869
  hypo
gcatcaattctgttccgtgttctccccacc

SEQ ID NO: 156676 - DNA, 50 bp, Homo sapiens; identical to SEQ ID NO: 21407
  chr7:48964016-48964066
  hypo

SEQ ID NO: 156677 - DNA, 54 bp, Homo sapiens; identical to SEQ ID NO: 21408
  chr7:49740606-49740660
  hypo

SEQ ID NO: 156678 - DNA, 267 bp, Homo sapiens; identical to SEQ ID NO: 44202
  chr7:49812750-49813017
  hypo

SEQ ID NO: 156679 - DNA, 283 bp, Homo sapiens; identical to SEQ ID NO: 5568
  chr7:49813809-49814092
  hypo

SEQ ID NO: 156680 - DNA, 629 bp, Homo sapiens; identical to SEQ ID NO: 5569
  chr7:49814121-49814750
  hypo

SEQ ID NO: 156681 - DNA, 133 bp, Homo sapiens; identical to SEQ ID NO: 5570
  chr7:49815116-49815249
  hypo

SEQ ID NO: 156682 - DNA, 116 bp, Homo sapiens; identical to SEQ ID NO: 5571
  chr7:49815656-49815772
  hypo

SEQ ID NO: 156683 - DNA, 52 bp, Homo sapiens
  chr7:49842429-49842481
  hypo
aaaaatggtatgtgagatccccgttggtgacggggtgcacctcccaccctga

SEQ ID NO: 156684 - DNA, 30 bp, Homo sapiens; identical to SEQ ID NO: 73853
  chr7:50198833-50198863
  hypo

SEQ ID NO: 156685 - DNA, 96 bp, Homo sapiens; identical to SEQ ID NO: 73854
  chr7:50221916-50222012
  hypo

SEQ ID NO: 156686 - DNA, 113 bp, Homo sapiens; identical to SEQ ID NO: 73855
  chr7:50231277-50231390
  hypo

SEQ ID NO: 156687 - DNA, 221 bp, Homo sapiens; identical to SEQ ID NO: 73856
  chr7:50251516-50251737
  hypo

SEQ ID NO: 156688 - DNA, 105 bp, Homo sapiens; identical to SEQ ID NO: 73857
  chr7:50294026-50294131
  hypo

SEQ ID NO: 156689 - DNA, 728 bp, Homo sapiens
  chr7:50341934-50342662
  hypo
agagagacgtaccagcggctaaaggtacttctgcatccaagaactagaggtgtcccgtgtcccctttacaacattgttggcctccctctgggccttgtaccttatgtttattgcctcatttaatccaggtaaggagtctttaggattggtggcatgtattctttttatagacaaggaagatgatgctcaggagtttggataacctgcccaaggtcacgcagtggaggagaggactagaaggtaaatcaatggacctttcactaccttccccttctctgggctgtagcagtgagttaactggctcagacttgcccagcggaatgcccttcaggacacactgagtactgtagtaagagctgcatatgcgctcagggagaatgtggatagacgctgtttgtgattcacgggtaaagggccttctcccagaggcagcagaggcagatcctgtctctggtgtgccctggcccccgacttggaggcctcctgggccaggccaagaccttccccggcagcgatggtctccagccacactcaactgccctgaagggacatttcctgcttattcccttgcccggctgtgtcctccacccggaaggcctgtgccttcttcgcctgcatgtcctaccctgaggaggctcccttggtctttcatcgctctccctatgggtcttcacgccttcccgaaccaccgcgcccaagcaggagcacgttctcggccctcttcacag

SEQ ID NO: 156690 - DNA, 294 bp, Homo sapiens; identical to SEQ ID NO: 115017
  chr7:50343195-50343489
  hypo

SEQ ID NO: 156691 - DNA, 880 bp, Homo sapiens; identical to SEQ ID NO: 115018
  chr7:50343974-50344854
  hypo

SEQ ID NO: 156692 - DNA, 86 bp, Homo sapiens; identical to SEQ ID NO: 73861
  chr7:50365026-50365112
  hypo

SEQ ID NO: 156693 - DNA, 154 bp, Homo sapiens; identical to SEQ ID NO: 73862
  chr7:50415430-50415584
  hypo

SEQ ID NO: 156694 - DNA, 30 bp, Homo sapiens
  chr7:50439995-50440025
  hypo
tgcttgaatcttacgcgccccgtggtgacg

SEQ ID NO: 156695 - DNA, 147 bp, Homo sapiens; identical to SEQ ID NO: 73863
  chr7:50441145-50441292
  hypo

SEQ ID NO: 156696 - DNA, 181 bp, Homo sapiens; identical to SEQ ID NO: 73864
  chr7:50443886-50444067
  hypo

SEQ ID NO: 156697 - DNA, 57 bp, Homo sapiens
  chr7:50447753-50447810
  hypo
gatggaccccggccacgcaagaacacacatggcgtgggctgcgttcttgtgccccag

SEQ ID NO: 156698 - DNA, 168 bp, Homo sapiens; identical to SEQ ID NO: 73866
  chr7:50450250-50450418
  hypo

SEQ ID NO: 156699 - DNA, 30 bp, Homo sapiens
  chr7:50451305-50451335
  hypo
tactgcatgagacttcggaggcgaaaggtt

SEQ ID NO: 156700 - DNA, 30 bp, Homo sapiens
  chr7:50451891-50451921
  hypo
tcccagagaggggtgcggcacccatgttgg

SEQ ID NO: 156701 - DNA, 30 bp, Homo sapiens
  chr7:50454758-50454788
  hypo
taaaggctaggcttccgtgattgaagcagg

SEQ ID NO: 156702 - DNA, 30 bp, Homo sapiens
  chr7:50455135-50455165
  hypo
aaagcatgggccttccgggcacactgtacc

SEQ ID NO: 156703 - DNA, 30 bp, Homo sapiens
  chr7:50459826-50459856
  hypo
gggcggctgcaccagcgtgcacagggtgga

SEQ ID NO: 156704 - DNA, 109 bp, Homo sapiens
  chr7:50460165-50460274
  hypo
caccatccagccagacgctgcagggacagtgagccagggtccgagtggaaaggcgctaggcttgggaaccagctcagagtcaatacagagccaccgccactcaccaact

SEQ ID NO: 156705 - DNA, 104 bp, Homo sapiens; identical to SEQ ID NO: 21420
  chr7:50514845-50514949
  hypo

SEQ ID NO: 156706 - DNA, 30 bp, Homo sapiens; identical to SEQ ID NO: 21421
  chr7:50533497-50533527
  hypo

SEQ ID NO: 156707 - DNA, 44 bp, Homo sapiens; identical to SEQ ID NO: 73869
  chr7:50537913-50537957
  hypo

SEQ ID NO: 156708 - DNA, 424 bp, Homo sapiens; identical to SEQ ID NO: 21422
  chr7:50560480-50560904
  hypo

SEQ ID NO: 156709 - DNA, 30 bp, Homo sapiens
  chr7:50596963-50596993
  hypo
gacgctgcctgcagccgatggatcactttg

SEQ ID NO: 156710 - DNA, 251 bp, Homo sapiens
  chr7:50611648-50611899
  hypo
agcggcagggatcagcggccgcaggtacccgggctccacgtcagggtagacctggcgtccctcaatgccttccatgtagttggccatgtaatccaccatctccttccctctccttcggaattcacttgcgttcatggtgtctgggctctgtcagaggtgaaaactgcagaaagaaaatgattcagtgagcaaattttgcaacctctgaactggaaggcggggataccaagcaagccgtgggtagggacacc

SEQ ID NO: 156711 - DNA, 356 bp, Homo sapiens
  chr7:50654698-50655054
  hypo
ggcagagtggatctgcgtccacgtgtgagtacacagccacggcagagtggatctgcgcccacgtgtgagtacacagctacggcagagtggatctgtgtccacgtgtgagtatacagctatggcagagtggatccgcttgcccacgtgtgagtacacagccacggcagagtggatctgcgtccacgtgtgagtatacagctacggcagagtggatccatttgcccacatgtgaatatacagctatggcagagtggatccgtttgcccacgtgtgagtatacagctacagcagagtggatctgtgtacccaggtgtgagtatacagttacggcataatggatccgtgtgcccaggtgt

SEQ ID NO: 156712 - DNA, 30 bp, Homo sapiens
  chr7:50658009-50658039
  hypo
taccgccagcttgcccgcccccagaaaggc

SEQ ID NO: 156713 - DNA, 113 bp, Homo sapiens
  chr7:50658395-50658508
  hypo
ggtggaattcccagccgcccagcgcgaggccagcgagctggggccttaggaagtctgccgccacgtggaggcggtttacattctccaacaattcacttcggcagggaaaatac

SEQ ID NO: 156714 - DNA, 104 bp, Homo sapiens; identical to SEQ ID NO: 21426
  chr7:50659742-50659846
  hypo

SEQ ID NO: 156715 - DNA, 625 bp, Homo sapiens
  chr7:50660381-50661006
  hypo
tccagtttattttcaactttccgctggatcttccatgccctccccaatttggccgatgcagagggaggcgaccctgctgggttcacagcagcaaatcgtcgtttaagtccaacaaactagtcaatcttggtcggctggcaccgaacaaacccatctcgctctgggtccccaggtgcagaatcgatgtgtgttcttcaccaacgcacagaccgcttcttcactccagtgttcacttcctccagtcttcagccgagaggacatctgcggtcataaggccactcggatgcagtggtgcttgagtttgcaaggcaggactcctttgttcagctggtaaaagtcaaccagctggatcaggtcagagaatttggtgttcccgtcatctaggctgaagaacgtctgcccgtcgtcctcgcactggagagacacaagaacacttgccaggttagaggctgccacctcagggaacagaacggggcccacggccagcagcagctacatctgcccatgatttgattccagagggacacacagggcaaggtaggctagaaaacaccaggggcgggaaagacgggagcagaggatgtgtgctgggggctgccatgtccctgagcgagggacagacttt

SEQ ID NO: 156716 - DNA, 90 bp, Homo sapiens
  chr7:50667299-50667389
  hypo
aggctccagggaggacggagaggaacacctgctgaagaataagacgggcggcaccagccgggctgatttggggaacggaaggtaacagag

SEQ ID NO: 156717 - DNA, 30 bp, Homo sapiens
  chr7:50684693-50684723
  hypo
gtgggaaaggcacgtcggacagagccctgg

SEQ ID NO: 156718 - DNA, 203 bp, Homo sapiens; identical to SEQ ID NO: 73877
  chr7:50687515-50687718
  hypo

SEQ ID NO: 156719 - DNA, 30 bp, Homo sapiens
  chr7:50688164-50688194
  hypo
atctcagatgagccccgaccggcatgcaga

SEQ ID NO: 156720 - DNA, 167 bp, Homo sapiens
  chr7:50695453-50695620
  hypo
cttacctcgacagcccggaaaaagcagtcagaggagcaagatggcattttaaattgcgactgcctcttgcaagggagcgtgtttccgtctctccccactgtcccaggctggctgtgtggagcctgcgtgtgccctggggggcaggctgtctccgggcagcagggagg

SEQ ID NO: 156721 - DNA, 31 bp, Homo sapiens; identical to SEQ ID NO: 73878
  chr7:50708877-50708908
  hypo

SEQ ID NO: 156722 - DNA, 204 bp, Homo sapiens; identical to SEQ ID NO: 73879
  chr7:50709529-50709733
  hypo

SEQ ID NO: 156723 - DNA, 191 bp, Homo sapiens; identical to SEQ ID NO: 73880
  chr7:50715837-50716028
  hypo

SEQ ID NO: 156724 - DNA, 109 bp, Homo sapiens; identical to SEQ ID NO: 21429
  chr7:50720335-50720444
  hypo

SEQ ID NO: 156725 - DNA, 47 bp, Homo sapiens
  chr7:50734032-50734079
  hypo
gagctcagagggaggcggcattggaggaatcgcgtgctgttgaatag

SEQ ID NO: 156726 - DNA, 30 bp, Homo sapiens
  chr7:50738219-50738249
  hypo
atcgggggcggggggcggggtgccgaagtt

SEQ ID NO: 156727 - DNA, 38 bp, Homo sapiens; identical to SEQ ID NO: 73883
  chr7:50740986-50741024
  hypo

SEQ ID NO: 156728 - DNA, 30 bp, Homo sapiens; identical to SEQ ID NO: 73884
  chr7:50741327-50741357
  hypo

SEQ ID NO: 156729 - DNA, 83 bp, Homo sapiens
  chr7:50769973-50770056
  hypo
gctctcggctggatacggtgggcctggctctggccctgcttccccagtcactgccggagaagggaaagcgcagccctttgtat

SEQ ID NO: 156730 - DNA, 30 bp, Homo sapiens
  chr7:50771532-50771562
  hypo
gtcggtcagactgtgcggggagtcctggtc

SEQ ID NO: 156731 - DNA, 30 bp, Homo sapiens; identical to SEQ ID NO: 21430
  chr7:50772852-50772882
  hypo

SEQ ID NO: 156732 - DNA, 30 bp, Homo sapiens
  chr7:50778253-50778283
  hypo
taaaactgcaacacacggatggaggggcag

SEQ ID NO: 156733 - DNA, 258 bp, Homo sapiens
  chr7:50801205-50801463
  hypo
aaatcaccaaagaacgccccagaacactttgctggggctgaaaggaagcagtcaatagcagtggaagtactggcacaatgaagggagcaggtccatgacctggctcagacgtccccaacctactcagtgagaactgtgcccgcatccacccttcacctctgccatgatcagcagccccaaggcctcagccttctccggctcacagtcagcctgtcctcggggtagctggtgttacacgtcaacagtccaggctctaat

SEQ ID NO: 156734 - DNA, 30 bp, Homo sapiens
  chr7:50815763-50815793
  hypo
gattgttctcatccccgcctgatgatgctg

SEQ ID NO: 156735 - DNA, 211 bp, Homo sapiens
  chr7:50816098-50816309
  hypo
tgtgagagctgagctcgggaaagtgttggaaattaggagtggagaaaggaggtaggagaaacagcataacaaaaccagaggcaaaggcacacacaacaggctgggagaatgcggagaaaatcagggtaccagggatggggtcgggtaaaaacaagcctttgtggaacatttataatgggccaggttctcagctaagcgctgacttccattt

SEQ ID NO: 156736 - DNA, 82 bp, Homo sapiens
  chr7:50821772-50821854
  hypo
gggcgactgcctgcccgtgagcacggcactccctgattcagcttcgcagggctgccttcctgaagctcgcacacctgcctga

SEQ ID NO: 156737 - DNA, 30 bp, Homo sapiens; identical to SEQ ID NO: 73888
  chr7:50822184-50822214
  hypo

SEQ ID NO: 156738 - DNA, 210 bp, Homo sapiens
  chr7:50823199-50823409
  hypo
caactcctgaggctcacgaggagtgcccagagtgacccaggaggcaggcagcatcacccccaccatatggaagggcacaaggagaccagtgaggcccagaggcatgtccgcgaggagagtgtgcgcagcccggctctgctgcagcccaggtcctcccatccctacccgactcagcccggtgttcccaggcagagccgagccaaggaggag

SEQ ID NO: 156739 - DNA, 30 bp, Homo sapiens
  chr7:50831226-50831256
  hypo
tcacatgcatacacacgcgtgcatacacac

SEQ ID NO: 156740 - DNA, 173 bp, Homo sapiens; identical to SEQ ID NO: 73890
  chr7:50853191-50853364
  hypo

SEQ ID NO: 156741 - DNA, 205 bp, Homo sapiens
  chr7:50876167-50876372
  hypo
aagagtgagcccattcgtcgaagaagggggattgggctgggtggcctggcatccgcatgccaccccggtcacatctccttccttgcacccttgcagtaggggtgttaccatgaaagagccacgcaaccacagggaagcacagctgcccgagcagcaggtctgcgggcacagcagcttcccctggaaggagcgtggccctggcagg

SEQ ID NO: 156742 - DNA, 30 bp, Homo sapiens
  chr7:50889822-50889852
  hypo
attcactaaaaataacgtacatctgagaat

SEQ ID NO: 156743 - DNA, 43 bp, Homo sapiens; identical to SEQ ID NO: 73891
  chr7:50905758-50905801
  hypo

SEQ ID NO: 156744 - DNA, 192 bp, Homo sapiens
  chr7:50935530-50935722
  hypo
ctttcgaaaagagcacggttgagactgagacgcacaatacctgactggctaagtatggcagtgggctggggtggcagtggtcgcagggctttaggtcttgacacgatggggaaccgcggcagcagatgcagcaaaggcagtgaggccaaccgagtctctgggtctgcagccgggaagctcttgccttcttgg

SEQ ID NO: 156745 - DNA, 31 bp, Homo sapiens; identical to SEQ ID NO: 73893
  chr7:51082824-51082855
  hypo

SEQ ID NO: 156746 - DNA, 160 bp, Homo sapiens
  chr7:51083467-51083627
  hypo
cctaacacccaggcagcgtcctgcccccagggcctttgcactcactcttctcgctgccagtcatgcgtccatccggagtttgctccctcacttccttcagggttttactcaacggtcaccttctcactgggcctttcttcatccccgtctcctttgtccc

SEQ ID NO: 156747 - DNA, 30 bp, Homo sapiens
  chr7:51084280-51084310
  hypo
gctgttggacaaacgcgtcaaggctgaacc

SEQ ID NO: 156748 - DNA, 31 bp, Homo sapiens; identical to SEQ ID NO: 21433
  chr7:51087890-51087921
  hypo

SEQ ID NO: 156749 - DNA, 31 bp, Homo sapiens; identical to SEQ ID NO: 73896
  chr7:51088280-51088311
  hypo

SEQ ID NO: 156750 - DNA, 362 bp, Homo sapiens; identical to SEQ ID NO: 73897
  chr7:51092656-51093018
  hypo

SEQ ID NO: 156751 - DNA, 185 bp, Homo sapiens; identical to SEQ ID NO: 73898
  chr7:51098964-51099149
  hypo

SEQ ID NO: 156752 - DNA, 41 bp, Homo sapiens; identical to SEQ ID NO: 73899
  chr7:51111295-51111336
  hypo

SEQ ID NO: 156753 - DNA, 126 bp, Homo sapiens
  chr7:51113096-51113222
  hypo
cagcttctgaagggacagacacgtacgcaaagaatgacagtgctgtatggtcacaccaactctcggtgtgctcccataggcagagtgtggcaggctggactgagcgaggtggtggcacacagtagg

SEQ ID NO: 156754 - DNA, 168 bp, Homo sapiens; identical to SEQ ID NO: 73900
  chr7:51126557-51126725
  hypo

SEQ ID NO: 156755 - DNA, 174 bp, Homo sapiens; identical to SEQ ID NO: 73901
  chr7:51130437-51130611
  hypo

SEQ ID NO: 156756 - DNA, 31 bp, Homo sapiens; identical to SEQ ID NO: 21436
  chr7:51150748-51150779
  hypo

SEQ ID NO: 156757 - DNA, 31 bp, Homo sapiens; identical to SEQ ID NO: 21437
  chr7:51194780-51194811
  hypo

SEQ ID NO: 156758 - DNA, 70 bp, Homo sapiens; identical to SEQ ID NO: 73904
  chr7:51323447-51323517
  hypo

SEQ ID NO: 156759 - DNA, 43 bp, Homo sapiens; identical to SEQ ID NO: 73905
  chr7:51374680-51374723
  hypo

SEQ ID NO: 156760 - DNA, 30 bp, Homo sapiens; identical to SEQ ID NO: 5579
  chr7:51793410-51793440
  hypo

SEQ ID NO: 156761 - DNA, 23 bp, Homo sapiens
  chr7:51819590-51819613
  hypo
cctttttttttttttttttgacg

SEQ ID NO: 156762 - DNA, 43 bp, Homo sapiens; identical to SEQ ID NO: 73908
  chr7:51873290-51873333
  hypo

SEQ ID NO: 156763 - DNA, 242 bp, Homo sapiens; identical to SEQ ID NO: 73909
  chr7:52736844-52737086
  hypo

SEQ ID NO: 156764 - DNA, 30 bp, Homo sapiens
  chr7:53032322-53032352
  hypo
acttctcagagcctacgaatgtattatgtg

SEQ ID NO: 156765 - DNA, 95 bp, Homo sapiens; identical to SEQ ID NO: 73910
  chr7:53071289-53071384
  hypo

SEQ ID NO: 156766 - DNA, 751 bp, Homo sapiens
  chr7:53103560-53104311
  hypo
tccagtgggggcgcccggtgcccagcacccacctcatcgaggtgcggcccacccaggaccccgccaagccgcagcgggtggtctccgagggctggaggcgccctgcccttcccggggagaccgctctggggcgagacctctcctgtgcctgggagggttgcatgaaaggggggctgtgtcgtgcctggaacccaggacggacctggagcccggtgaccatcgggatcgcgccccctgagcgtcaggagagcccctggagatcccctggacagagagcccgccccgcaggccgccccgccgcccaggagctcctggacccctgcacccgggagactctgctgggggcgctcagccagtgccccaagggaagcgctaggttcgacgggccgttgtggttcgaggtctcagacagcaagggtggcaggcggaacctgcagccccggccctctgccttcaagcccctgagcaaaaatggagcggttgcttccttcgtgcccaggccagggcctctgaagccgagcctcggcccctggagcctcagtttttgtgatgatgcttggccttccgtgctggtccagcccgccccatccgccatctgggacttctgggaggcgacaacgccttcctgcggcagctgcagtagggtctccttcgccctcgaggtcacccagtctgctggcccctttggctcctaagaatctgggctctgctacccacctccggagacacaagcccacgtatctactttcac

SEQ ID NO: 156767 - DNA, 150 bp, Homo sapiens; identical to SEQ ID NO: 73912
  chr7:53155252-53155402
  hypo

SEQ ID NO: 156768 - DNA, 30 bp, Homo sapiens
  chr7:53254931-53254961
  hypo
tgaaatggctctgggcgtgaaaggagcagg

SEQ ID NO: 156769 - DNA, 30 bp, Homo sapiens
  chr7:53255174-53255204
  hypo
gcggaaagatcgtgtcgcacacgcacctcg

SEQ ID NO: 156770 - DNA, 42 bp, Homo sapiens; identical to SEQ ID NO: 73913
  chr7:53364396-53364438
  hypo

SEQ ID NO: 156771 - DNA, 43 bp, Homo sapiens; identical to SEQ ID NO: 73914
  chr7:54332182-54332225
  hypo

SEQ ID NO: 156772 - DNA, 30 bp, Homo sapiens; identical to SEQ ID NO: 73915
  chr7:54537654-54537684
  hypo

SEQ ID NO: 156773 - DNA, 30 bp, Homo sapiens; identical to SEQ ID NO: 73916
  chr7:54825232-54825262
  hypo

SEQ ID NO: 156774 - DNA, 81 bp, Homo sapiens
  chr7:54842470-54842551
  hypo
actgtctttaaaaaaaaaaaaaaaaaaaaattatttcttggtaattacaaagttgtgtccatcagacgaactctagaactc

SEQ ID NO: 156775 - DNA, 789 bp, Homo sapiens
  chr7:55145812-55146601
  hypo
tcctgtccaccgtgccgtgttcctgtcctggggtatttgggtgtgtggcgtgtggggaggggagaaggagcaaggcggcagggaggggatgaggaccaccctgtccatgggacaggccctgggccccgcacacaccccaagccccgcgtcccgcgtcctcactgtcctgggacaccccccaccccaccccaccgccacagcccagagcggtgccaggaagccgcctcgacgcagccgtatcttgaggctccagccccatccccagggtaccacgccacgtagagacactatttttcacttcgtgtttgtcactcctaaagcatgtgtgctagctgcaccaaccctgggatgcctcggtgcatagggtttatgtgcgtcctcctccttccctctgagctggtcccccgtggggaactgctgcccagactgacctgcgtccttccgcacgtgcaggaaaatgtccacgtgcacttgtcagggtgggggccacacgggcaccaccactgatcatctgtgggatcgagttactgcccatgcagatcccacgtgcagggcccagtcgctttggtgagagagtggacgctgtggtgactccacggtctgtggctgtgctcaggaggacagagaggggacatcctgagatggtttgggcagcccgcggatcctgtgcatgtccccagagcgtccactttctccatggagcagtggagtggcgttgctgagacagaaagttcaggttctccactccccatgcagcccccactcccctgtctccggccaggcacgcgt

SEQ ID NO: 156776 - DNA, 33 bp, Homo sapiens
  chr7:55147016-55147049
  hypo
ggaagaggggcgggtcggcgtgctgctgaagat

SEQ ID NO: 156777 - DNA, 51 bp, Homo sapiens; identical to SEQ ID NO: 21440
  chr7:55212335-55212386
  hypo

SEQ ID NO: 156778 - DNA, 125 bp, Homo sapiens
  chr7:55223542-55223667
  hypo
cacggctcgtgcgtccgagcctgtggggccgacagctatgagatggaggaagacggcgtccgcaagtgtaagaagtgcgaagggccttgccgcaaaggtaggaagcccgccggtgtgcggacgag

SEQ ID NO: 156779 - DNA, 61 bp, Homo sapiens; identical to SEQ ID NO: 73919
  chr7:55312948-55313009
  hypo

SEQ ID NO: 156780 - DNA, 38 bp, Homo sapiens; identical to SEQ ID NO: 21441
  chr7:55323528-55323566
  hypo

SEQ ID NO: 156781 - DNA, 173 bp, Homo sapiens
  chr7:55323876-55324049
  hypo
cactcacgcctgctgcgccctgtgctgcaggttgtacgcgatataaaacatgacactgactgcccgtgaggatcttgacaagttgttttgaagatggcattttgctaagtccctgagggtcactggtcctcaaagcggcatggcggcatggcgtggctggttctgccacatgc

SEQ ID NO: 156782 - DNA, 30 bp, Homo sapiens
  chr7:55410405-55410435
  hypo
acgtgggggacctccggctgctggggagtc

SEQ ID NO: 156783 - DNA, 30 bp, Homo sapiens; identical to SEQ ID NO: 73922
  chr7:55410949-55410979
  hypo

SEQ ID NO: 156784 - DNA, 19 bp, Homo sapiens
  chr7:55435129-55435148
  hypo
gaaacaggccgggcgcggt

SEQ ID NO: 156785 - DNA, 30 bp, Homo sapiens; identical to SEQ ID NO: 73923
  chr7:55463507-55463537
  hypo

SEQ ID NO: 156786 - DNA, 227 bp, Homo sapiens
  chr7:55464080-55464307
  hypo
ctgcaaagggtttatcgcagccccgcctacccggagcaagggagatgcctagctccagctggttctagctttcagcattggggaagggagatgatcagctgcagcttctgctggccatcctggccaactgagggcgtggggatgggaggcactggtgcagttcacagtccaaaggcacaggctggccagaaggttgagcctgctcacaggcgcgtgctccccagcac

SEQ ID NO: 156787 - DNA, 62 bp, Homo sapiens
  chr7:55468906-55468968
  hypo
gggaagaaagaaaaacggagcgctgcccgctgttgtaccagtggcaccggaagcagtacgtt

SEQ ID NO: 156788 - DNA, 217 bp, Homo sapiens
  chr7:55473622-55473839
  hypo
ccctgctgcacggttcgtggctgttgtcagtgcagaactacgattcagaaatgtggaaaggagggctttgtttctcatacagggttacagcctgcagctaatcatacgtagccttgggctagaagccagaaatattctgagggagtggaaagggagcaggaacgtatgccaagccaggtggccgaatgtatgtgtcggtgagctgcaggaggagtgg

SEQ ID NO: 156789 - DNA, 30 bp, Homo sapiens
  chr7:55474124-55474154
  hypo
gaaagatctggttcccgcttagcccttagg

SEQ ID NO: 156790 - DNA, 98 bp, Homo sapiens
  chr7:55495725-55495823
  hypo
tcaggatagagcaggcgtttcgagttgcttctggaatcatcagctgaagcggcaggaggaaggtgccagggagaacagagtgtcgttgagccgttcgg

SEQ ID NO: 156791 - DNA, 175 bp, Homo sapiens; identical to SEQ ID NO: 21442
  chr7:55506180-55506355
  hypo

SEQ ID NO: 156792 - DNA, 177 bp, Homo sapiens
  chr7:55540709-55540886
  hypo
gtaatagggcggccccggctgctgggctcctgaaagacagacaaacataggtgagcacagaagggaaagccccatcacaccgcaagtatgtgcaggctgcagggccagcagaccacgccccgtcattcactcagcgacagtgtatgaaggacccaacatgcccggtgagggggcacc

SEQ ID NO: 156793 - DNA, 117 bp, Homo sapiens
  chr7:55541145-55541262
  hypo
ctccattctccctgccgggctagtgtgccctcagggcaggagttactcacaggcagggaggccgtgcacctgggcacacatagccaggctgcagctgattgacgctccatgggtcag

SEQ ID NO: 156794 - DNA, 207 bp, Homo sapiens
  chr7:55541704-55541911
  hypo
aagtcagaccatgggaatctgcgcatgtgcggaaggagagcatgtagaacagaagcacaggccaggcctgcactgtctctcactgagcgctctcaactgccaggagggcactcagcacagatgccaccctgtgtgagaggctgcctcgccctgcatctgtgccgtcccacagacaccacctgagtgagatgccgtgtggtcccacag

SEQ ID NO: 156795 - DNA, 30 bp, Homo sapiens
  chr7:55542200-55542230
  hypo
atggggagcgcacagcgtgggagacaaggg

SEQ ID NO: 156796 - DNA, 206 bp, Homo sapiens
  chr7:55542789-55542995
  hypo
ggcagctggaaggcacgcagggcaagagaaggtgcctttgtaaggatggaaacgcttgcgcatatgggcaggggtagggacagacacaggacagagagaactttcggggagaacacagctcggtgagggtaatggcctctggtaaagcacttggagcctactagctgggagctggtgcacaggaaggcacccgagacagtgggccg

SEQ ID NO: 156797 - DNA, 30 bp, Homo sapiens; identical to SEQ ID NO: 21443
  chr7:55545173-55545203
  hypo

SEQ ID NO: 156798 - DNA, 230 bp, Homo sapiens; identical to SEQ ID NO: 73929
  chr7:55552438-55552668
  hypo

SEQ ID NO: 156799 - DNA, 615 bp, Homo sapiens; identical to SEQ ID NO: 21445
  chr7:55553219-55553834
  hypo

SEQ ID NO: 156800 - DNA, 69 bp, Homo sapiens
  chr7:55554249-55554318
  hypo
gctggtgaggaggcccgccatattgggaggccatctcaattcctgggcgtcaccaagtaagacagttcc

SEQ ID NO: 156801 - DNA, 224 bp, Homo sapiens; identical to SEQ ID NO: 21446
  chr7:55557172-55557396
  hypo

SEQ ID NO: 156802 - DNA, 52 bp, Homo sapiens; identical to SEQ ID NO: 73932
  chr7:55570140-55570192
  hypo

SEQ ID NO: 156803 - DNA, 30 bp, Homo sapiens
  chr7:55570946-55570976
  hypo
agagtctacgggccacgatttagacaggtg

SEQ ID NO: 156804 - DNA, 200 bp, Homo sapiens; identical to SEQ ID NO: 73933
  chr7:55571327-55571527
  hypo

SEQ ID NO: 156805 - DNA, 30 bp, Homo sapiens
  chr7:55573229-55573259
  hypo
atcggtttcagcatcgggattaaaaaaatg

SEQ ID NO: 156806 - DNA, 43 bp, Homo sapiens; identical to SEQ ID NO: 21447
  chr7:55585936-55585979
  hypo

SEQ ID NO: 156807 - DNA, 30 bp, Homo sapiens
  chr7:55588308-55588338
  hypo
ggcctcagagacaggcgatcattgtgattt

SEQ ID NO: 156808 - DNA, 138 bp, Homo sapiens; identical to SEQ ID NO: 73935
  chr7:55588551-55588689
  hypo

SEQ ID NO: 156809 - DNA, 30 bp, Homo sapiens
  chr7:55589273-55589303
  hypo
gtctgcaagatgctgcgagtcacggttcac

SEQ ID NO: 156810 - DNA, 43 bp, Homo sapiens; identical to SEQ ID NO: 73936
  chr7:55589956-55589999
  hypo

SEQ ID NO: 156811 - DNA, 116 bp, Homo sapiens; identical to SEQ ID NO: 5587
  chr7:55593335-55593451
  hypo

SEQ ID NO: 156812 - DNA, 66 bp, Homo sapiens; identical to SEQ ID NO: 21449
  chr7:55619128-55619194
  hypo

SEQ ID NO: 156813 - DNA, 35 bp, Homo sapiens
  chr7:55638345-55638380
  hypo
gattgcagggccgggcgcggtggctcaccttgtaa

SEQ ID NO: 156814 - DNA, 30 bp, Homo sapiens
  chr7:55833047-55833077
  hypo
gtgagccaccgcgcccggccgagatgaatg

SEQ ID NO: 156815 - DNA, 30 bp, Homo sapiens
  chr7:55855207-55855237
  hypo
ttcctgctatagccccggctgattggcttt

SEQ ID NO: 156816 - DNA, 146 bp, Homo sapiens; identical to SEQ ID NO: 73939
  chr7:55923001-55923147
  hypo

SEQ ID NO: 156817 - DNA, 83 bp, Homo sapiens; identical to SEQ ID NO: 73940
  chr7:55960567-55960650
  hypo

SEQ ID NO: 156818 - DNA, 21 bp, Homo sapiens
  chr7:56018234-56018255
  hypo
aatcccagcactttgggaagc

SEQ ID NO: 156819 - DNA, 81 bp, Homo sapiens; identical to SEQ ID NO: 73942
  chr7:56018494-56018575
  hypo

SEQ ID NO: 156820 - DNA, 389 bp, Homo sapiens
  chr7:56030888-56031277
  hypo
tgagccaccgtgcctggctcatttgtggctttttaaaaaatcttcctggaggacacatttttccctctatagcgccagccacccagatccacgcctttgcttaagttatttcctcaagacagggatgccctcccttcttcccctgggactgatatgtcctgccagctccttggagaactttctccccatctatcctctaattcacagccacccccggttacatgctctctttccgtgcctctttcgtgtctcatgaacctgtccattttgacacttaacacactcggtccaatcatcattgtacattctgtccccactagacccagacggccttgagggtaaggtaccaaggactccccatggccagtgcccaccggtgctgaaatgaa

SEQ ID NO: 156821 - DNA, 77 bp, Homo sapiens; identical to SEQ ID NO: 73945
  chr7:56031536-56031613
  hypo

SEQ ID NO: 156822 - DNA, 77 bp, Homo sapiens; identical to SEQ ID NO: 73946
  chr7:56031792-56031869
  hypo

SEQ ID NO: 156823 - DNA, 30 bp, Homo sapiens
  chr7:56034009-56034039
  hypo
ataataaagcctggacgcagtgactcacac

SEQ ID NO: 156824 - DNA, 152 bp, Homo sapiens; identical to SEQ ID NO: 73947
  chr7:56037251-56037403
  hypo

SEQ ID NO: 156825 - DNA, 85 bp, Homo sapiens
  chr7:56075634-56075719
  hypo
cagaatgaacaatggcgtcacacggacaatcagccatgcctttctgagtccatcctagtgtaggcatgtgcgtaactcctgggag

SEQ ID NO: 156826 - DNA, 19 bp, Homo sapiens
  chr7:56077144-56077163
  hypo
caggcgtgagccaccgtgc

SEQ ID NO: 156827 - DNA, 91 bp, Homo sapiens
  chr7:56078751-56078842
  hypo
atccgttctgacatacggataaacttttattgacataccaaagagaaaccaatattcactgaaggctgccgaatccgtatttctaagagta

SEQ ID NO: 156828 - DNA, 166 bp, Homo sapiens; identical to SEQ ID NO: 73949
  chr7:56144505-56144671
  hypo

SEQ ID NO: 156829 - DNA, 30 bp, Homo sapiens
  chr7:56171082-56171112
  hypo
gaatcgcttgaacccgggcggtggagcctg

SEQ ID NO: 156830 - DNA, 18 bp, Homo sapiens
  chr7:56172895-56172913
  hypo
gcccggccactttaatct

SEQ ID NO: 156831 - DNA, 121 bp, Homo sapiens
  chr7:56332923-56333044
  hypo
ctgaatttcccccgataagtggctgcttcctccaaagggttactcaggactttcctggcaagggcggatgattaggcctgccacaaaacttattaacttgtgaatcctttttttttttttt

SEQ ID NO: 156832 - DNA, 31 bp, Homo sapiens; identical to SEQ ID NO: 73951
  chr7:56346702-56346733
  hypo

SEQ ID NO: 156833 - DNA, 22 bp, Homo sapiens
  chr7:56357548-56357570
  hypo
cgagactccatctcaaaaaaaa

SEQ ID NO: 156834 - DNA, 33 bp, Homo sapiens; identical to SEQ ID NO: 73953
  chr7:56362764-56362797
  hypo

SEQ ID NO: 156835 - DNA, 121 bp, Homo sapiens
  chr7:56363036-56363157
  hypo
gccaccgcgccaggccacacagctctagtttaaaactgtggcaaagtgacagctcattccctaggaggcagacagtcctgtgactataccagtgtaatgattagcaagttcttcttaggtc

SEQ ID NO: 156836 - DNA, 24 bp, Homo sapiens
  chr7:56436533-56436557
  hypo
ctctctctgcgtgggatgtgccgg

SEQ ID NO: 156837 - DNA, 21 bp, Homo sapiens
  chr7:56443055-56443076
  hypo
agagtccgctgtgaggccgat

SEQ ID NO: 156838 - DNA, 105 bp, Homo sapiens; identical to SEQ ID NO: 73957
  chr7:56636908-56637013
  hypo

SEQ ID NO: 156839 - DNA, 156 bp, Homo sapiens; identical to SEQ ID NO: 73958
  chr7:56665469-56665625
  hypo

SEQ ID NO: 156840 - DNA, 469 bp, Homo sapiens; identical to SEQ ID NO: 21454
  chr7:57247597-57248066
  hypo

SEQ ID NO: 156841 - DNA, 30 bp, Homo sapiens
  chr7:57276622-57276652
  hypo
aactgtcagtgtaaccgtccacttccgtat

SEQ ID NO: 156842 - DNA, 336 bp, Homo sapiens; identical to SEQ ID NO: 73960
  chr7:57324291-57324627
  hypo

SEQ ID NO: 156843 - DNA, 30 bp, Homo sapiens; identical to SEQ ID NO: 5590
  chr7:57351679-57351709
  hypo

SEQ ID NO: 156844 - DNA, 219 bp, Homo sapiens; identical to SEQ ID NO: 21456
  chr7:57706363-57706582
  hypo

SEQ ID NO: 156845 - DNA, 278 bp, Homo sapiens; identical to SEQ ID NO: 21457
  chr7:57706641-57706919
  hypo

SEQ ID NO: 156846 - DNA, 142 bp, Homo sapiens; identical to SEQ ID NO: 73964
  chr7:57711529-57711671
  hypo

SEQ ID NO: 156847 - DNA, 40 bp, Homo sapiens; identical to SEQ ID NO: 73965
  chr7:57712630-57712670
  hypo

SEQ ID NO: 156848 - DNA, 69 bp, Homo sapiens; identical to SEQ ID NO: 21458
  chr7:57878612-57878681
  hypo

SEQ ID NO: 156849 - DNA, 162 bp, Homo sapiens; identical to SEQ ID NO: 115054
  chr7:57928158-57928320
  hypo

SEQ ID NO: 156850 - DNA, 30 bp, Homo sapiens
  chr7:62689693-62689723
  hypo
ctggctcctggttaacgggtgtttctaatt

SEQ ID NO: 156851 - DNA, 150 bp, Homo sapiens; identical to SEQ ID NO: 73967
  chr7:63027889-63028039
  hypo

SEQ ID NO: 156852 - DNA, 21 bp, Homo sapiens
  chr7:63343658-63343679
  hypo
ttccccggccgagcacggtgg

SEQ ID NO: 156853 - DNA, 150 bp, Homo sapiens; identical to SEQ ID NO: 73968
  chr7:63392779-63392929
  hypo

SEQ ID NO: 156854 - DNA, 36 bp, Homo sapiens; identical to SEQ ID NO: 21459
  chr7:63423513-63423549
  hypo

SEQ ID NO: 156855 - DNA, 35 bp, Homo sapiens; identical to SEQ ID NO: 21460
  chr7:63423788-63423823
  hypo

SEQ ID NO: 156856 - DNA, 160 bp, Homo sapiens; identical to SEQ ID NO: 21461
  chr7:63569122-63569282
  hypo

SEQ ID NO: 156857 - DNA, 373 bp, Homo sapiens; identical to SEQ ID NO: 21462
  chr7:63652609-63652982
  hypo

SEQ ID NO: 156858 - DNA, 45 bp, Homo sapiens; identical to SEQ ID NO: 21463
  chr7:63666705-63666750
  hypo

SEQ ID NO: 156859 - DNA, 45 bp, Homo sapiens; identical to SEQ ID NO: 21464
  chr7:63667109-63667154
  hypo

SEQ ID NO: 156860 - DNA, 170 bp, Homo sapiens; identical to SEQ ID NO: 73975
  chr7:63757330-63757500
  hypo

SEQ ID NO: 156861 - DNA, 438 bp, Homo sapiens; identical to SEQ ID NO: 5594
  chr7:63767573-63768011
  hypo

SEQ ID NO: 156862 - DNA, 104 bp, Homo sapiens; identical to SEQ ID NO: 21466
  chr7:63864995-63865099
  hypo

SEQ ID NO: 156863 - DNA, 43 bp, Homo sapiens; identical to SEQ ID NO: 73978
  chr7:63867872-63867915
  hypo

SEQ ID NO: 156864 - DNA, 27 bp, Homo sapiens
  chr7:63925194-63925221
  hypo
aagagcgagacttcatttcaaaaaaaa

SEQ ID NO: 156865 - DNA, 438 bp, Homo sapiens; identical to SEQ ID NO: 73980
  chr7:64146483-64146921
  hypo

SEQ ID NO: 156866 - DNA, 30 bp, Homo sapiens
  chr7:64323510-64323540
  hypo
ccgccaggagaacggcgccagcatgatcct

SEQ ID NO: 156867 - DNA, 30 bp, Homo sapiens
  chr7:64329071-64329101
  hypo
gtgggaggactccaacgtgcggggaacagt

SEQ ID NO: 156868 - DNA, 684 bp, Homo sapiens
  chr7:64330353-64331037
  hypo
ttctttagatcagaccggctatgcccgtactattttcccctgcttaggcaggctgacatccctgacagctgggcgcccgagccggcctcgcgaatgcacatacgccagttgcggggcaccaggcacgagtggtgagctgcggctgtcgtcacagtgaacgccaccgttgcctggccacgggtccctgcggcttggcaaaccagtagacttctgtggacgtgcatcgccgctggactctcacccgtcttctctgagagatccacgggatagtcccctgatcctagaattgggcagggccgacccagggtgaagaaacctcaagcggactcccagggctgcagatcgaaatccctaaggatcccaggggacccgcaggatgtgtcaggcatgcctaggcggtgtgggggtgagtctatttgatagttgccccccggtgatttctaggtaaaccctgcctgtgtttcccggggctgctctctccccggagggacttcctggtggagcagaaccgggttgcctcagaatgtgctgggttgtgtatttctgtgggagtgttgcaagtgtttgatgtctgtgtgtgtatgtctgtgtgtgtgtttctgtgtgtgcctggaagtggggttggttaaaggatctggcttgcgcactggagcgcttgttctttcgagtcggtcaatcttcttg

SEQ ID NO: 156869 - DNA, 536 bp, Homo sapiens; identical to SEQ ID NO: 73982
  chr7:64332669-64333205
  hypo

SEQ ID NO: 156870 - DNA, 43 bp, Homo sapiens
  chr7:64336400-64336443
  hypo
tgatgaggtgtggatagggtccggaaacttccccttcaggaga

SEQ ID NO: 156871 - DNA, 382 bp, Homo sapiens; identical to SEQ ID NO: 73983
  chr7:64345084-64345466
  hypo

SEQ ID NO: 156872 - DNA, 840 bp, Homo sapiens; identical to SEQ ID NO: 115065
  chr7:64349041-64349881
  hypo

SEQ ID NO: 156873 - DNA, 115 bp, Homo sapiens; identical to SEQ ID NO: 115066
  chr7:64349983-64350098
  hypo

SEQ ID NO: 156874 - DNA, 36 bp, Homo sapiens; identical to SEQ ID NO: 73985
  chr7:64358372-64358408
  hypo

SEQ ID NO: 156875 - DNA, 45 bp, Homo sapiens
  chr7:64358739-64358784
  hypo
cgtttgagtgttcttcgtttgagtagtactcgcgtgccaaacgct

SEQ ID NO: 156876 - DNA, 30 bp, Homo sapiens; identical to SEQ ID NO: 21473
  chr7:64373789-64373819
  hypo

SEQ ID NO: 156877 - DNA, 30 bp, Homo sapiens; identical to SEQ ID NO: 21474
  chr7:64374109-64374139
  hypo

SEQ ID NO: 156878 - DNA, 30 bp, Homo sapiens
  chr7:64439201-64439231
  hypo
ataacgtttctctccggtatgaattaactt

SEQ ID NO: 156879 - DNA, 128 bp, Homo sapiens
  chr7:64450761-64450889
  hypo
tggccactggcccagcggattaacatccaaaggctgagccctgaacaaagacagggcttgacttttatacatgcatcaggcaggggcaagtcgggtttttggcgcaaaacctgcgaggtgagaaagca

SEQ ID NO: 156880 - DNA, 30 bp, Homo sapiens
  chr7:64457695-64457725
  hypo
agcttttgcagctttcgcctgatgtctccc

SEQ ID NO: 156881 - DNA, 144 bp, Homo sapiens; identical to SEQ ID NO: 21475
  chr7:64458252-64458396
  hypo

SEQ ID NO: 156882 - DNA, 30 bp, Homo sapiens
  chr7:64459171-64459201
  hypo
gccactagtctcggtcggttccacacttca

SEQ ID NO: 156883 - DNA, 211 bp, Homo sapiens
  chr7:64459455-64459666
  hypo
tccatccttatgggacgggtcctgccttgggcccaaaccttactgcagtcctgtagcgtgaagtcctggaatcgtcctgtagccccttaggttccaatgcactgtcagggaggggcgccgggtcatgggagagccaatctcccctccgggttgaaggtctcccaatggtgccttgggtcacgggtctcccccagcccggggctccagtccc

SEQ ID NO: 156884 - DNA, 139 bp, Homo sapiens; identical to SEQ ID NO: 73990
  chr7:64478037-64478176
  hypo

SEQ ID NO: 156885 - DNA, 30 bp, Homo sapiens; identical to SEQ ID NO: 5597
  chr7:64691764-64691794
  hypo

SEQ ID NO: 156886 - DNA, 30 bp, Homo sapiens
  chr7:64699399-64699429
  hypo
cgggagtatggtagcgcgtgtgcagggcag

SEQ ID NO: 156887 - DNA, 30 bp, Homo sapiens; identical to SEQ ID NO: 21477
  chr7:64711253-64711283
  hypo

SEQ ID NO: 156888 - DNA, 39 bp, Homo sapiens; identical to SEQ ID NO: 73993
  chr7:64824059-64824098
  hypo

SEQ ID NO: 156889 - DNA, 43 bp, Homo sapiens; identical to SEQ ID NO: 21478
  chr7:64851807-64851850
  hypo

SEQ ID NO: 156890 - DNA, 412 bp, Homo sapiens; identical to SEQ ID NO: 73995
  chr7:64895202-64895614
  hypo

SEQ ID NO: 156891 - DNA, 21 bp, Homo sapiens
  chr7:64973893-64973914
  hypo
cctccgcgcgcagtgccgccc

SEQ ID NO: 156892 - DNA, 148 bp, Homo sapiens; identical to SEQ ID NO: 5600
  chr7:64974033-64974181
  hypo

SEQ ID NO: 156893 - DNA, 741 bp, Homo sapiens; identical to SEQ ID NO: 44252
  chr7:64974273-64975014
  hypo

SEQ ID NO: 156894 - DNA, 143 bp, Homo sapiens; identical to SEQ ID NO: 115077
  chr7:65037618-65037761
  hypo

SEQ ID NO: 156895 - DNA, 29 bp, Homo sapiens
  chr7:65236286-65236315
  hypo
atgaggctccctgggccgtgctatcccgg

SEQ ID NO: 156896 - DNA, 24 bp, Homo sapiens
  chr7:65410591-65410615
  hypo
tccgtctcaaaaaaaaaaggtgga

SEQ ID NO: 156897 - DNA, 31 bp, Homo sapiens; identical to SEQ ID NO: 21482
  chr7:65439501-65439532
  hypo

SEQ ID NO: 156898 - DNA, 105 bp, Homo sapiens; identical to SEQ ID NO: 74003
  chr7:65441720-65441825
  hypo

SEQ ID NO: 156899 - DNA, 100 bp, Homo sapiens; identical to SEQ ID NO: 74004
  chr7:65442035-65442135
  hypo

SEQ ID NO: 156900 - DNA, 145 bp, Homo sapiens
  chr7:65474281-65474426
  hypo
aggtgaaatgcttcccgttaccctcaggtaaagtcaacaggacctgtgtagattgtgtcgggggaggaggagtgaaggaacagatagttaaggttaggttgtttagaaaaaaatacattatttaggccgggcacggtggcttaca

SEQ ID NO: 156901 - DNA, 39 bp, Homo sapiens; identical to SEQ ID NO: 5604
  chr7:65541036-65541075
  hypo

SEQ ID NO: 156902 - DNA, 471 bp, Homo sapiens
  chr7:65553869-65554340
  hypo
caaggaattcagcttcgtgcagctctcagatgcctacaggtaagccctgaactgccacctccatctgccgctgccggcctctgtatcccccgccgcccgcggacgtggctgccttcctccccgtcccacccctccgccagacctggccattgcggcgctggaccagccaagggtccagccccttcagcgccagcacctctgtccccagcacgggaagcagcctgatgccccagaagaaaaaccccgacagtttggagctgatccggagcaaggctgggcgtgtgtttgggcgggtgagcaaggcagggggaggggcggggcctctgggctgatggtgggtggccaggggggcaggatcccgggtccagcccctgtgcctccctcttcccgcagtgtgccgggctcctgatgaccctcaagggacttcccagcacctacaacaaagacttacaggtgcgaggccgggggagg

SEQ ID NO: 156903 - DNA, 30 bp, Homo sapiens
  chr7:65557822-65557852
  hypo
tgggcggcactgcgcgctccagcgtcgact

SEQ ID NO: 156904 - DNA, 121 bp, Homo sapiens
  chr7:65562568-65562689
  hypo
gggattacaggcatgagcctccgcgcccagctgtgccattactttcaatggcaaaaccggcaattacttttggacggatacaatagtaacatcaaggatcactggtcatagatcagcatga

SEQ ID NO: 156905 - DNA, 23 bp, Homo sapiens
  chr7:65589331-65589354
  hypo
gcgagactccttctcaaaaaaaa

SEQ ID NO: 156906 - DNA, 30 bp, Homo sapiens; identical to SEQ ID NO: 21484
  chr7:65610394-65610424
  hypo

SEQ ID NO: 156907 - DNA, 265 bp, Homo sapiens
  chr7:65611004-65611269
  hypo
aagttctgttgcttctgtcttcgttcttgcttctctcccccgtgtactgcgttgatttctgccattatttcttcacgcggctcttgcggttatcctctccccattctccctggctccccaagtccatctcccacatcaccgtcagagatcacatctaaaaccatgaatgtgatcccatttccctgcataaaccgtttatttagtacagcctcatcacttgtgaagtccgctttgtactgagagcgtaggctttggaataggagga

SEQ ID NO: 156908 - DNA, 160 bp, Homo sapiens; identical to SEQ ID NO: 74009
  chr7:65647878-65648038
  hypo

SEQ ID NO: 156909 - DNA, 25 bp, Homo sapiens
  chr7:65772132-65772157
  hypo
ttttagatggagtctcgctctgtct

SEQ ID NO: 156910 - DNA, 25 bp, Homo sapiens
  chr7:65772396-65772421
  hypo
gcccggcccacttcattcactttaa

SEQ ID NO: 156911 - DNA, 25 bp, Homo sapiens
  chr7:65819313-65819338
  hypo
caggtgcggtggttcacgcctgtaa

SEQ ID NO: 156912 - DNA, 19 bp, Homo sapiens
  chr7:65830619-65830638
  hypo
cacccggcccgttgaatga

SEQ ID NO: 156913 - DNA, 184 bp, Homo sapiens
  chr7:65841298-65841482
  hypo
aggcagaagatgggcgtgaagagacaatcctgagacaggggctggtgtaagagagggcccaaaagaggccagtatggggcaggggccgcgcccctcagggcctacgccgggcaggaggtgggcctggcgaggcctactttgggacgctttgggccactttgggccacatcgaggaaggcagctt

SEQ ID NO: 156914 - DNA, 31 bp, Homo sapiens; identical to SEQ ID NO: 74013
  chr7:65841862-65841893
  hypo

SEQ ID NO: 156915 - DNA, 30 bp, Homo sapiens
  chr7:65842422-65842452
  hypo
gggcctggagcggccgccaacaggcaagaa

SEQ ID NO: 156916 - DNA, 273 bp, Homo sapiens
  chr7:65877890-65878163
  hypo
gggggggaaaaaaatacaccaagcgtgcaccacgcctggctaatttttgaaacttttctacagacggggttgcgtcacgttgcccagggcagtctcgaactccttagaccaagccatcctccccctcggcctcccaaagtgctgggattatagagtccagccagcctcatgttttctttaagcagtccctccctgttgcacagttggatagtttatttttttatttttttagacatggtttacctcagtctcgcaggacggagtgctgtgatg

SEQ ID NO: 156917 - DNA, 121 bp, Homo sapiens; identical to SEQ ID NO: 74015
  chr7:65879508-65879629
  hypo

SEQ ID NO: 156918 - DNA, 22 bp, Homo sapiens
  chr7:65879868-65879890
  hypo
cgacagagtgagacactgtgtc

SEQ ID NO: 156919 - DNA, 29 bp, Homo sapiens
  chr7:65937775-65937804
  hypo
ttttttttttttgagacggagtctcactc

SEQ ID NO: 156920 - DNA, 29 bp, Homo sapiens
  chr7:65938043-65938072
  hypo
caggcatgagccaccgtgccaggccctct

SEQ ID NO: 156921 - DNA, 62 bp, Homo sapiens
  chr7:65938575-65938637
  hypo
ataaaggataaggttcggatggctgcaccgaatgttcctcctttcaacgaggctgggccgag

SEQ ID NO: 156922 - DNA, 205 bp, Homo sapiens; identical to SEQ ID NO: 74019
  chr7:65939522-65939727
  hypo

SEQ ID NO: 156923 - DNA, 30 bp, Homo sapiens; identical to SEQ ID NO: 74020
  chr7:65967818-65967848
  hypo

SEQ ID NO: 156924 - DNA, 30 bp, Homo sapiens; identical to SEQ ID NO: 74021
  chr7:65968145-65968175
  hypo

SEQ ID NO: 156925 - DNA, 95 bp, Homo sapiens
  chr7:65969577-65969672
  hypo
ttgtgaagaggagaggcgcactgggcgtcaataactttaaaaaggggggaaaatatcagttcccgagtctccatgcgtttcgtgttgaagaagaa

SEQ ID NO: 156926 - DNA, 30 bp, Homo sapiens; identical to SEQ ID NO: 74023
  chr7:66021461-66021491
  hypo

SEQ ID NO: 156927 - DNA, 30 bp, Homo sapiens; identical to SEQ ID NO: 21491
  chr7:66022059-66022089
  hypo

SEQ ID NO: 156928 - DNA, 37 bp, Homo sapiens; identical to SEQ ID NO: 74025
  chr7:66064298-66064335
  hypo

SEQ ID NO: 156929 - DNA, 41 bp, Homo sapiens; identical to SEQ ID NO: 74026
  chr7:66076555-66076596
  hypo

SEQ ID NO: 156930 - DNA, 138 bp, Homo sapiens; identical to SEQ ID NO: 5606
  chr7:66094048-66094186
  hypo

SEQ ID NO: 156931 - DNA, 30 bp, Homo sapiens; identical to SEQ ID NO: 74028
  chr7:66105645-66105675
  hypo

SEQ ID NO: 156932 - DNA, 191 bp, Homo sapiens
  chr7:66105967-66106158
  hypo
cctccgtggggctggacggcagtgatctcctgttccctatgtgtaaacaaagattccagggcgtggttttgcactcctgttgtactcttttagaggtggaaaagaggtggatactgagatctaagaggaaaggatagtcattcacgttctgagatatgcgctctctctattgttctcgtacacaaagggat

SEQ ID NO: 156933 - DNA, 30 bp, Homo sapiens; identical to SEQ ID NO: 21493
  chr7:66115943-66115973
  hypo

SEQ ID NO: 156934 - DNA, 30 bp, Homo sapiens
  chr7:66141509-66141539
  hypo
tggacctacgcagttcggacctgtgttgtt

SEQ ID NO: 156935 - DNA, 30 bp, Homo sapiens
  chr7:66141855-66141885
  hypo
ccatcacacctggtccgtgaatagtgtccc

SEQ ID NO: 156936 - DNA, 39 bp, Homo sapiens; identical to SEQ ID NO: 74031
  chr7:66150977-66151016
  hypo

SEQ ID NO: 156937 - DNA, 121 bp, Homo sapiens
  chr7:66204244-66204365
  hypo
gttttatactctgttgtaccctcagcgtagcacacattaggcacttaggaagaatctgagaaacgaatcagttaatccctactttaccaataatgaataaagactgagaaactcgggccgg

SEQ ID NO: 156938 - DNA, 19 bp, Homo sapiens
  chr7:66214949-66214968
  hypo
gactccatctcaaaaacaa

SEQ ID NO: 156939 - DNA, 189 bp, Homo sapiens; identical to SEQ ID NO: 74033
  chr7:66265793-66265982
  hypo

SEQ ID NO: 156940 - DNA, 19 bp, Homo sapiens
  chr7:66281527-66281546
  hypo
tagtgcagtagctcacgcc

SEQ ID NO: 156941 - DNA, 141 bp, Homo sapiens; identical to SEQ ID NO: 21495
  chr7:66293248-66293389
  hypo

SEQ ID NO: 156942 - DNA, 30 bp, Homo sapiens
  chr7:66368764-66368794
  hypo
ctgggccacgtttccgcctgcctcgcggca

SEQ ID NO: 156943 - DNA, 130 bp, Homo sapiens
  chr7:66369061-66369191
  hypo
cccagctccttgctcgtggctgcgcccgcgggcccagctcctgcctctgaacatcctcctgtgactcggctcctgcccagctcccagcggcctccgtagacccgaagcctcctccggtccagctctccag

SEQ ID NO: 156944 - DNA, 30 bp, Homo sapiens
  chr7:66369510-66369540
  hypo
cacagtggcccctccgggcccagctcgtgc

SEQ ID NO: 156945 - DNA, 30 bp, Homo sapiens; identical to SEQ ID NO: 21497
  chr7:66370315-66370345
  hypo

SEQ ID NO: 156946 - DNA, 31 bp, Homo sapiens; identical to SEQ ID NO: 21498
  chr7:66412369-66412400
  hypo

SEQ ID NO: 156947 - DNA, 211 bp, Homo sapiens
  chr7:66423290-66423501
  hypo
gtaagtgtttcttgtcgtgaggcacctgccatgtctgttgcgttttcctcggcagcgtgtagggcttcagcttcctgggttttcacccttcctgcaggcactgtggggtcctgagggccagtgggtccatttcacctcttgctgcatgatggtcagtagctgatctgttatggcattcacttccagattaattttccgtgtttgaagtatg

SEQ ID NO: 156948 - DNA, 697 bp, Homo sapiens
  chr7:66423829-66424526
  hypo
ggagttccaagacacccctctcggtgacataaaccctcagcatgcactaagcctgtatgcccagccgcaggtgcccagcccgctctgcggtctcctgttgcagagctctggcccgctctagacctcctttgccaagacagtgcatcctctgcagtttccatagctaaagggagatcgtattcactaatgtgaatccttcccctttccagcagccagaggctctgtgtcccttcccttccctccccagcaggtgctggggtcgcaaggtcagtctcatggttgaggaaggtgctactcaatgagctctttgttccttctgcctccacctctccctgcctcctgcctggaacaggcaaactctgcgtggagcgcagtgttatttcctgctctctccttggactcaagtatttgtgtaggtggtgattcccctccatcccagtacagaatacgccttggaggagaagaactcatgtctctctgctgtcttagcctggtaaaacctgatacgtgccaggttctcaagtcaggtcagaggttttgctttaaaatcatttcattttcccggtgggccccctgtgcttccagttccctcacactcacggatctgtaaggattcccccaaaagtggaatgaacgcacagactatagcactccggagtctactcaaggtcattgtgaacttagttgctgtctcaaa

SEQ ID NO: 156949 - DNA, 37 bp, Homo sapiens; identical to SEQ ID NO: 21499
  chr7:66626983-66627020
  hypo

SEQ ID NO: 156950 - DNA, 30 bp, Homo sapiens
  chr7:66653649-66653679
  hypo
ggcttgttccctacccgtgcgtttggtaaa

SEQ ID NO: 156951 - DNA, 32 bp, Homo sapiens; identical to SEQ ID NO: 74041
  chr7:66694224-66694256
  hypo

SEQ ID NO: 156952 - DNA, 89 bp, Homo sapiens
  chr7:66766507-66766596
  hypo
ttataggtgtgagccaccgcgcccggcccacttcagatatttattttcaggagggagcgcatttagatacagaccgaaaatgtatttaa

SEQ ID NO: 156953 - DNA, 29 bp, Homo sapiens
  chr7:66827948-66827977
  hypo
gctgggattacaggcgtgagccaccgcac

SEQ ID NO: 156954 - DNA, 23 bp, Homo sapiens
  chr7:66844111-66844134
  hypo
gacagagtttcactcttgttgcg

SEQ ID NO: 156955 - DNA, 181 bp, Homo sapiens; identical to SEQ ID NO: 74044
  chr7:66847452-66847633
  hypo

SEQ ID NO: 156956 - DNA, 30 bp, Homo sapiens; identical to SEQ ID NO: 74045
  chr7:66877601-66877631
  hypo

SEQ ID NO: 156957 - DNA, 142 bp, Homo sapiens; identical to SEQ ID NO: 74046
  chr7:66880055-66880197
  hypo

SEQ ID NO: 156958 - DNA, 25 bp, Homo sapiens
  chr7:66935893-66935918
  hypo
ttttttttttgttttttgagacgga

SEQ ID NO: 156959 - DNA, 22 bp, Homo sapiens
  chr7:66946467-66946489
  hypo
cgcaagccactacaccccagcc

SEQ ID NO: 156960 - DNA, 22 bp, Homo sapiens
  chr7:66948786-66948808
  hypo
ctggccaggtgcagtagctgac

SEQ ID NO: 156961 - DNA, 141 bp, Homo sapiens; identical to SEQ ID NO: 74050
  chr7:66960264-66960405
  hypo

SEQ ID NO: 156962 - DNA, 22 bp, Homo sapiens
  chr7:66961153-66961175
  hypo
cgacagagtgagactctgtctc

SEQ ID NO: 156963 - DNA, 242 bp, Homo sapiens; identical to SEQ ID NO: 74052
  chr7:67006547-67006789
  hypo

SEQ ID NO: 156964 - DNA, 33 bp, Homo sapiens; identical to SEQ ID NO: 21502
  chr7:67027847-67027880
  hypo

SEQ ID NO: 156965 - DNA, 17 bp, Homo sapiens
  chr7:67047346-67047363
  hypo
caaaaaaaaaaaaaaaa

SEQ ID NO: 156966 - DNA, 30 bp, Homo sapiens
  chr7:67057071-67057101
  hypo
aatgttttcaaggttcgtacatgttgaatc

SEQ ID NO: 156967 - DNA, 171 bp, Homo sapiens; identical to SEQ ID NO: 74055
  chr7:67067245-67067416
  hypo

SEQ ID NO: 156968 - DNA, 18 bp, Homo sapiens
  chr7:67074362-67074380
  hypo
ttgttttttgagatggag

SEQ ID NO: 156969 - DNA, 51 bp, Homo sapiens
  chr7:67093766-67093817
  hypo
aatgggtggtgcctgggtgtgcgacatcccggataaaattccatggacagc

SEQ ID NO: 156970 - DNA, 81 bp, Homo sapiens; identical to SEQ ID NO: 74057
  chr7:67103481-67103562
  hypo

SEQ ID NO: 156971 - DNA, 134 bp, Homo sapiens; identical to SEQ ID NO: 74058
  chr7:67113979-67114113
  hypo

SEQ ID NO: 156972 - DNA, 28 bp, Homo sapiens
  chr7:67148162-67148190
  hypo
cactcccgtctcaaaaaaaaaaaaaaat

SEQ ID NO: 156973 - DNA, 19 bp, Homo sapiens
  chr7:67151928-67151947
  hypo
ctcaaaacaaaaaacaaaa

SEQ ID NO: 156974 - DNA, 37 bp, Homo sapiens; identical to SEQ ID NO: 74061
  chr7:67180646-67180683
  hypo

SEQ ID NO: 156975 - DNA, 111 bp, Homo sapiens; identical to SEQ ID NO: 74062
  chr7:67202218-67202329
  hypo

SEQ ID NO: 156976 - DNA, 33 bp, Homo sapiens
  chr7:67252809-67252842
  hypo
gctcaataacagatggagtctcgctttgttgcc

SEQ ID NO: 156977 - DNA, 30 bp, Homo sapiens
  chr7:67269162-67269192
  hypo
atacagaaatgaggtcgacacaagtttctc

SEQ ID NO: 156978 - DNA, 43 bp, Homo sapiens; identical to SEQ ID NO: 74063
  chr7:67274833-67274876
  hypo

SEQ ID NO: 156979 - DNA, 99 bp, Homo sapiens; identical to SEQ ID NO: 74064
  chr7:67318538-67318637
  hypo

SEQ ID NO: 156980 - DNA, 182 bp, Homo sapiens
  chr7:67322984-67323166
  hypo
aattaaaacaaaagaagaagacggatggtgtgcaccacttgcagataagagctgctggcgaaaagaggtgacctgaagagtccgcgttccattttgtagcttacctttattgagtagatagaggctgcctttgaaaagaagcagaagtacataaaacccccggaaccagtgggaaagaagaa

SEQ ID NO: 156981 - DNA, 121 bp, Homo sapiens; identical to SEQ ID NO: 74066
  chr7:67353382-67353503
  hypo

SEQ ID NO: 156982 - DNA, 92 bp, Homo sapiens; identical to SEQ ID NO: 74067
  chr7:67355826-67355918
  hypo

SEQ ID NO: 156983 - DNA, 99 bp, Homo sapiens; identical to SEQ ID NO: 74068
  chr7:67375595-67375694
  hypo

SEQ ID NO: 156984 - DNA, 34 bp, Homo sapiens; identical to SEQ ID NO: 74069
  chr7:67388759-67388793
  hypo

SEQ ID NO: 156985 - DNA, 31 bp, Homo sapiens; identical to SEQ ID NO: 74070
  chr7:67405317-67405348
  hypo

SEQ ID NO: 156986 - DNA, 421 bp, Homo sapiens; identical to SEQ ID NO: 74071
  chr7:67405587-67406008
  hypo

SEQ ID NO: 156987 - DNA, 25 bp, Homo sapiens
  chr7:67408839-67408864
  hypo
tttttttgagacagagtctcacgcg

SEQ ID NO: 156988 - DNA, 91 bp, Homo sapiens; identical to SEQ ID NO: 74073
  chr7:67417183-67417274
  hypo

SEQ ID NO: 156989 - DNA, 88 bp, Homo sapiens; identical to SEQ ID NO: 74074
  chr7:67424154-67424242
  hypo

SEQ ID NO: 156990 - DNA, 43 bp, Homo sapiens; identical to SEQ ID NO: 74075
  chr7:67451826-67451869
  hypo

SEQ ID NO: 156991 - DNA, 163 bp, Homo sapiens
  chr7:67482476-67482639
  hypo
accgctccaggcccacatgtacttttaaagtggtacgattgtatagagctgaattgtcatgttgtaggttatacgacgccaaaggagcccaagatcagaatgcagggtgagattcttgaagagaaacatccaaagctttcccgcctctaagttctgctttgct

SEQ ID NO: 156992 - DNA, 40 bp, Homo sapiens; identical to SEQ ID NO: 74076
  chr7:67534655-67534695
  hypo

SEQ ID NO: 156993 - DNA, 27 bp, Homo sapiens
  chr7:67539901-67539928
  hypo
caccgcgcccagcctcttctggcatct

SEQ ID NO: 156994 - DNA, 116 bp, Homo sapiens; identical to SEQ ID NO: 74078
  chr7:67540135-67540251
  hypo

SEQ ID NO: 156995 - DNA, 30 bp, Homo sapiens; identical to SEQ ID NO: 74079
  chr7:67543978-67544008
  hypo

SEQ ID NO: 156996 - DNA, 22 bp, Homo sapiens
  chr7:67562868-67562890
  hypo
agtctagctggaggtcagtggc

SEQ ID NO: 156997 - DNA, 141 bp, Homo sapiens
  chr7:67563069-67563210
  hypo
tgatccgcccgcctcggcctcccaaagtgactaatactttttataatctgagaagcctttgcttcaaaacgaaaagttctaacaattgaacaaacatctactaatttagagtgactttacggctgtccacctccttaccac

SEQ ID NO: 156998 - DNA, 35 bp, Homo sapiens; identical to SEQ ID NO: 74082
  chr7:67579759-67579794
  hypo

SEQ ID NO: 156999 - DNA, 30 bp, Homo sapiens
  chr7:67586794-67586824
  hypo
tttctaattaagccacgatatacagtgctc

SEQ ID NO: 157000 - DNA, 36 bp, Homo sapiens; identical to SEQ ID NO: 74083
  chr7:67637854-67637890
  hypo

SEQ ID NO: 157001 - DNA, 43 bp, Homo sapiens; identical to SEQ ID NO: 74084
  chr7:67642883-67642926
  hypo

SEQ ID NO: 157002 - DNA, 22 bp, Homo sapiens
  chr7:67645590-67645612
  hypo
cgagcctccatctcaataataa

SEQ ID NO: 157003 - DNA, 109 bp, Homo sapiens; identical to SEQ ID NO: 74085
  chr7:67648537-67648646
  hypo

SEQ ID NO: 157004 - DNA, 22 bp, Homo sapiens
  chr7:67655690-67655712
  hypo
cgaaactctgtgtcaaaaagaa

SEQ ID NO: 157005 - DNA, 32 bp, Homo sapiens
  chr7:67659056-67659088
  hypo
ttatttatctatttttttagacggagtctcac

SEQ ID NO: 157006 - DNA, 92 bp, Homo sapiens
  chr7:67659327-67659419
  hypo
tacaggcgtgagccaccgcgtcaggcccatagttcatcctttaaaattaatctatttttgtgttttataacgtatacaacatattagtactt

SEQ ID NO: 157007 - DNA, 31 bp, Homo sapiens; identical to SEQ ID NO: 74088
  chr7:67663623-67663654
  hypo

SEQ ID NO: 157008 - DNA, 43 bp, Homo sapiens; identical to SEQ ID NO: 74089
  chr7:67665220-67665263
  hypo

SEQ ID NO: 157009 - DNA, 201 bp, Homo sapiens
  chr7:67737922-67738123
  hypo
caaaagcagtgcagcaatgggcgcatgctcgtgggattcagtggtttgatcaggttccccagtattcataagaagctggcttggtaaaacagtggaatagcgctttgaagactcagttacacaaccaactaggtgatgataccttacaagactggtacaaggttctccggaaatctgcacgtgctctgaatcatcatccaa

SEQ ID NO: 157010 - DNA, 45 bp, Homo sapiens; identical to SEQ ID NO: 21507
  chr7:67812979-67813024
  hypo

SEQ ID NO: 157011 - DNA, 177 bp, Homo sapiens
  chr7:67858436-67858613
  hypo
ggaaaaatgattagaaaaggacgcgctgatgctccagtttagaaaagacatgttctctcctgatgctctgagacatgctagttcctctgtctgctgtcgttggccccacttttctagctgatgaaaatctgttctgcgtgggcccttcaggtgctcgtgcattcagtcaatgaacac

SEQ ID NO: 157012 - DNA, 31 bp, Homo sapiens; identical to SEQ ID NO: 74092
  chr7:67862011-67862042
  hypo

SEQ ID NO: 157013 - DNA, 18 bp, Homo sapiens
  chr7:67985692-67985710
  hypo
catttttttttatttttg

SEQ ID NO: 157014 - DNA, 121 bp, Homo sapiens; identical to SEQ ID NO: 74093
  chr7:68000298-68000419
  hypo

SEQ ID NO: 157015 - DNA, 29 bp, Homo sapiens
  chr7:68000598-68000627
  hypo
acgcggagagcaagcgagggctgtcagca

SEQ ID NO: 157016 - DNA, 284 bp, Homo sapiens; identical to SEQ ID NO: 74094
  chr7:68003148-68003432
  hypo

SEQ ID NO: 157017 - DNA, 82 bp, Homo sapiens; identical to SEQ ID NO: 74095
  chr7:68008894-68008976
  hypo

SEQ ID NO: 157018 - DNA, 91 bp, Homo sapiens; identical to SEQ ID NO: 74096
  chr7:68058865-68058956
  hypo

SEQ ID NO: 157019 - DNA, 131 bp, Homo sapiens; identical to SEQ ID NO: 74097
  chr7:68111545-68111676
  hypo

SEQ ID NO: 157020 - DNA, 43 bp, Homo sapiens
  chr7:68135057-68135100
  hypo
aaagaccattgcaggcaaaggcgctagccattgcaaagagcac

SEQ ID NO: 157021 - DNA, 29 bp, Homo sapiens
  chr7:68175650-68175679
  hypo
tagaaaatgtgcatgactggccgggcgcg

SEQ ID NO: 157022 - DNA, 56 bp, Homo sapiens; identical to SEQ ID NO: 21508
  chr7:68185671-68185727
  hypo

SEQ ID NO: 157023 - DNA, 43 bp, Homo sapiens; identical to SEQ ID NO: 74099
  chr7:68263364-68263407
  hypo

SEQ ID NO: 157024 - DNA, 22 bp, Homo sapiens
  chr7:68263867-68263889
  hypo
gggtgggacggaatctcgctcc

SEQ ID NO: 157025 - DNA, 29 bp, Homo sapiens
  chr7:68269766-68269795
  hypo
tgtttatttgtttgtttgagacggagtct

SEQ ID NO: 157026 - DNA, 45 bp, Homo sapiens; identical to SEQ ID NO: 74102
  chr7:68303944-68303989
  hypo

SEQ ID NO: 157027 - DNA, 42 bp, Homo sapiens; identical to SEQ ID NO: 21509
  chr7:68418435-68418477
  hypo

SEQ ID NO: 157028 - DNA, 101 bp, Homo sapiens; identical to SEQ ID NO: 21510
  chr7:68418716-68418817
  hypo

SEQ ID NO: 157029 - DNA, 30 bp, Homo sapiens
  chr7:68557938-68557968
  hypo
tctcagcgtcagcatcgcgaagttccgaaa

SEQ ID NO: 157030 - DNA, 81 bp, Homo sapiens; identical to SEQ ID NO: 74105
  chr7:68564600-68564681
  hypo

SEQ ID NO: 157031 - DNA, 31 bp, Homo sapiens; identical to SEQ ID NO: 74106
  chr7:68678433-68678464
  hypo

SEQ ID NO: 157032 - DNA, 86 bp, Homo sapiens
  chr7:68912780-68912866
  hypo
ctttcctcagtgtaaatacgatcggaggccactactggcttccgcttgcattctggggctgatgcgccaggccctccagacccagt

SEQ ID NO: 157033 - DNA, 96 bp, Homo sapiens; identical to SEQ ID NO: 74107
  chr7:68960049-68960145
  hypo

SEQ ID NO: 157034 - DNA, 149 bp, Homo sapiens
  chr7:69056875-69057024
  hypo
ccctgcctgctttttcctggagcggtaggcccaggtctgcagccacgggtgcggcggctgcagctgcacccgggaaggcagatcctgccccttcccggctcccccaagagctgcagtttgggtggctatagccccgccgccaggtacag

SEQ ID NO: 157035 - DNA, 2583 bp, Homo sapiens; identical to SEQ ID NO: 115096
  chr7:69062188-69064771
  hypo

SEQ ID NO: 157036 - DNA, 533 bp, Homo sapiens; identical to SEQ ID NO: 44268
  chr7:69064833-69065366
  hypo

SEQ ID NO: 157037 - DNA, 81 bp, Homo sapiens; identical to SEQ ID NO: 21513
  chr7:69478665-69478746
  hypo

SEQ ID NO: 157038 - DNA, 153 bp, Homo sapiens; identical to SEQ ID NO: 74111
  chr7:69501074-69501227
  hypo

SEQ ID NO: 157039 - DNA, 24 bp, Homo sapiens
  chr7:69521194-69521218
  hypo
tccggacctcaggcaatccatcct

SEQ ID NO: 157040 - DNA, 30 bp, Homo sapiens; identical to SEQ ID NO: 44269
  chr7:69538625-69538655
  hypo

SEQ ID NO: 157041 - DNA, 30 bp, Homo sapiens; identical to SEQ ID NO: 44270
  chr7:69553461-69553491
  hypo

SEQ ID NO: 157042 - DNA, 22 bp, Homo sapiens
  chr7:69627132-69627154
  hypo
tttaagaaataaaggagaggcc

SEQ ID NO: 157043 - DNA, 30 bp, Homo sapiens; identical to SEQ ID NO: 44271
  chr7:69677254-69677284
  hypo

SEQ ID NO: 157044 - DNA, 69 bp, Homo sapiens
  chr7:69736940-69737009
  hypo
tgagacaaggcccaacgccctaatctttcatcaccttgaacctggagactaggacgcgtctcagcacca

SEQ ID NO: 157045 - DNA, 30 bp, Homo sapiens; identical to SEQ ID NO: 44272
  chr7:69807320-69807350
  hypo

SEQ ID NO: 157046 - DNA, 30 bp, Homo sapiens; identical to SEQ ID NO: 44273
  chr7:69827455-69827485
  hypo

SEQ ID NO: 157047 - DNA, 30 bp, Homo sapiens
  chr7:69897648-69897678
  hypo
gccaggcaaggcaaacgttaggcgctgttt

SEQ ID NO: 157048 - DNA, 30 bp, Homo sapiens
  chr7:69897904-69897934
  hypo
ttttggcagactccacgactggccttgtcg

SEQ ID NO: 157049 - DNA, 30 bp, Homo sapiens; identical to SEQ ID NO: 44274
  chr7:69917036-69917066
  hypo

SEQ ID NO: 157050 - DNA, 30 bp, Homo sapiens; identical to SEQ ID NO: 44275
  chr7:70041731-70041761
  hypo

SEQ ID NO: 157051 - DNA, 17 bp, Homo sapiens
  chr7:70046462-70046479
  hypo
aagccagtgagttctag

SEQ ID NO: 157052 - DNA, 30 bp, Homo sapiens; identical to SEQ ID NO: 44277
  chr7:70084964-70084994
  hypo

SEQ ID NO: 157053 - DNA, 30 bp, Homo sapiens; identical to SEQ ID NO: 44278
  chr7:70085970-70086000
  hypo

SEQ ID NO: 157054 - DNA, 30 bp, Homo sapiens; identical to SEQ ID NO: 44279
  chr7:70092963-70092993
  hypo

SEQ ID NO: 157055 - DNA, 30 bp, Homo sapiens; identical to SEQ ID NO: 44280
  chr7:70119677-70119707
  hypo

SEQ ID NO: 157056 - DNA, 30 bp, Homo sapiens; identical to SEQ ID NO: 44281
  chr7:70142308-70142338
  hypo

SEQ ID NO: 157057 - DNA, 30 bp, Homo sapiens; identical to SEQ ID NO: 44282
  chr7:70160670-70160700
  hypo

SEQ ID NO: 157058 - DNA, 30 bp, Homo sapiens; identical to SEQ ID NO: 44283
  chr7:70161177-70161207
  hypo

SEQ ID NO: 157059 - DNA, 30 bp, Homo sapiens; identical to SEQ ID NO: 44284
  chr7:70170333-70170363
  hypo

SEQ ID NO: 157060 - DNA, 30 bp, Homo sapiens
  chr7:70172500-70172530
  hypo
ggatggtaaaaattcggattgggggaaact

SEQ ID NO: 157061 - DNA, 31 bp, Homo sapiens; identical to SEQ ID NO: 21515
  chr7:70234743-70234774
  hypo

SEQ ID NO: 157062 - DNA, 31 bp, Homo sapiens; identical to SEQ ID NO: 74131
  chr7:70250820-70250851
  hypo

SEQ ID NO: 157063 - DNA, 30 bp, Homo sapiens; identical to SEQ ID NO: 74132
  chr7:70252320-70252350
  hypo

SEQ ID NO: 157064 - DNA, 141 bp, Homo sapiens; identical to SEQ ID NO: 21516
  chr7:70255441-70255582
  hypo

SEQ ID NO: 157065 - DNA, 228 bp, Homo sapiens; identical to SEQ ID NO: 74134
  chr7:70255789-70256017
  hypo

SEQ ID NO: 157066 - DNA, 30 bp, Homo sapiens; identical to SEQ ID NO: 44285
  chr7:70259342-70259372
  hypo

SEQ ID NO: 157067 - DNA, 30 bp, Homo sapiens; identical to SEQ ID NO: 44288
  chr7:70294766-70294796
  hypo

SEQ ID NO: 157068 - DNA, 121 bp, Homo sapiens
  chr7:70311100-70311221
  hypo
tcaaaaaaaaaaacaaaacggctgtacctccctaaaatcttaccttcattttactaaaggaactacacctgttattcctatagctaatgctaaaatcaaggtgtccgttataaaagatcta

SEQ ID NO: 157069 - DNA, 24 bp, Homo sapiens
  chr7:70311280-70311304
  hypo
taaatatttcgtctgcaccctaag

SEQ ID NO: 157070 - DNA, 30 bp, Homo sapiens; identical to SEQ ID NO: 44289
  chr7:70333599-70333629
  hypo

SEQ ID NO: 157071 - DNA, 203 bp, Homo sapiens
  chr7:70340708-70340911
  hypo
agtgagcactggacctaacagcgcatcaaggtatcagcgcatcaagacgtaggtttcttcctataatacgtgaggacattagctgacattcctacaagagcaggtccaccatactcctgtctggtgttcaccacgttcccaaaaggctttctctctctctctgtatttttttttttttttgacacggagtctcgctctgtcgc

SEQ ID NO: 157072 - DNA, 30 bp, Homo sapiens; identical to SEQ ID NO: 44290
  chr7:70373975-70374005
  hypo

SEQ ID NO: 157073 - DNA, 188 bp, Homo sapiens; identical to SEQ ID NO: 74140
  chr7:70378263-70378451
  hypo

SEQ ID NO: 157074 - DNA, 18 bp, Homo sapiens
  chr7:70382504-70382522
  hypo
gcccgccttggcctgtgt

SEQ ID NO: 157075 - DNA, 30 bp, Homo sapiens; identical to SEQ ID NO: 44291
  chr7:70384684-70384714
  hypo

SEQ ID NO: 157076 - DNA, 30 bp, Homo sapiens; identical to SEQ ID NO: 44292
  chr7:70388688-70388718
  hypo

SEQ ID NO: 157077 - DNA, 37 bp, Homo sapiens
  chr7:70482806-70482843
  hypo
ataacgtagcagttacgtcagactaggacacttcttg

SEQ ID NO: 157078 - DNA, 26 bp, Homo sapiens
  chr7:70489080-70489106
  hypo
actccgtctcaaaataaataaataaa

SEQ ID NO: 157079 - DNA, 121 bp, Homo sapiens; identical to SEQ ID NO: 74144
  chr7:70542995-70543116
  hypo

SEQ ID NO: 157080 - DNA, 358 bp, Homo sapiens; identical to SEQ ID NO: 44293
  chr7:70596057-70596415
  hypo

SEQ ID NO: 157081 - DNA, 257 bp, Homo sapiens; identical to SEQ ID NO: 44294
  chr7:70596453-70596710
  hypo

SEQ ID NO: 157082 - DNA, 504 bp, Homo sapiens; identical to SEQ ID NO: 44295
  chr7:70597367-70597871
  hypo

SEQ ID NO: 157083 - DNA, 30 bp, Homo sapiens; identical to SEQ ID NO: 44297
  chr7:70601107-70601137
  hypo

SEQ ID NO: 157084 - DNA, 30 bp, Homo sapiens; identical to SEQ ID NO: 44298
  chr7:70611826-70611856
  hypo

SEQ ID NO: 157085 - DNA, 30 bp, Homo sapiens
  chr7:70623840-70623870
  hypo
gtgagccaccacgcccggcaatttttgtat

SEQ ID NO: 157086 - DNA, 31 bp, Homo sapiens; identical to SEQ ID NO: 21518
  chr7:70645461-70645492
  hypo

SEQ ID NO: 157087 - DNA, 30 bp, Homo sapiens; identical to SEQ ID NO: 44299
  chr7:70651397-70651427
  hypo

SEQ ID NO: 157088 - DNA, 30 bp, Homo sapiens; identical to SEQ ID NO: 5614
  chr7:70734445-70734475
  hypo

SEQ ID NO: 157089 - DNA, 15 bp, Homo sapiens
  chr7:70868708-70868723
  hypo
cagttattccactcc

SEQ ID NO: 157090 - DNA, 30 bp, Homo sapiens
  chr7:70916476-70916506
  hypo
attttaaaatcctttcgacgaactaactcc

SEQ ID NO: 157091 - DNA, 57 bp, Homo sapiens; identical to SEQ ID NO: 74154
  chr7:70921260-70921317
  hypo

SEQ ID NO: 157092 - DNA, 30 bp, Homo sapiens; identical to SEQ ID NO: 44302
  chr7:70926804-70926834
  hypo

SEQ ID NO: 157093 - DNA, 32 bp, Homo sapiens; identical to SEQ ID NO: 74156
  chr7:71048821-71048853
  hypo

SEQ ID NO: 157094 - DNA, 30 bp, Homo sapiens; identical to SEQ ID NO: 44303
  chr7:71062903-71062933
  hypo

SEQ ID NO: 157095 - DNA, 30 bp, Homo sapiens; identical to SEQ ID NO: 44304
  chr7:71117865-71117895
  hypo

SEQ ID NO: 157096 - DNA, 38 bp, Homo sapiens; identical to SEQ ID NO: 21520
  chr7:71119292-71119330
  hypo

SEQ ID NO: 157097 - DNA, 30 bp, Homo sapiens; identical to SEQ ID NO: 44305
  chr7:71120821-71120851
  hypo

SEQ ID NO: 157098 - DNA, 30 bp, Homo sapiens; identical to SEQ ID NO: 44306
  chr7:71190931-71190961
  hypo

SEQ ID NO: 157099 - DNA, 89 bp, Homo sapiens; identical to SEQ ID NO: 44307
  chr7:71198520-71198609
  hypo

SEQ ID NO: 157100 - DNA, 30 bp, Homo sapiens; identical to SEQ ID NO: 44309
  chr7:71242950-71242980
  hypo

SEQ ID NO: 157101 - DNA, 163 bp, Homo sapiens; identical to SEQ ID NO: 74164
  chr7:71251955-71252118
  hypo

SEQ ID NO: 157102 - DNA, 86 bp, Homo sapiens; identical to SEQ ID NO: 74165
  chr7:71276626-71276712
  hypo

SEQ ID NO: 157103 - DNA, 25 bp, Homo sapiens
  chr7:71276951-71276976
  hypo
ctgcgcctggccagtagtgtcactt

SEQ ID NO: 157104 - DNA, 39 bp, Homo sapiens; identical to SEQ ID NO: 21521
  chr7:71287515-71287554
  hypo

SEQ ID NO: 157105 - DNA, 44 bp, Homo sapiens; identical to SEQ ID NO: 74168
  chr7:71335071-71335115
  hypo

SEQ ID NO: 157106 - DNA, 27 bp, Homo sapiens
  chr7:71348937-71348964
  hypo
tgccaggttggagtgaagtggcgcgat

SEQ ID NO: 157107 - DNA, 43 bp, Homo sapiens; identical to SEQ ID NO: 74170
  chr7:71396556-71396599
  hypo

SEQ ID NO: 157108 - DNA, 36 bp, Homo sapiens; identical to SEQ ID NO: 21522
  chr7:71397498-71397534
  hypo

SEQ ID NO: 157109 - DNA, 31 bp, Homo sapiens; identical to SEQ ID NO: 74172
  chr7:71400691-71400722
  hypo

SEQ ID NO: 157110 - DNA, 35 bp, Homo sapiens
  chr7:71403493-71403528
  hypo
acacagggccgggcacggtggctcatgcctgtaat

SEQ ID NO: 157111 - DNA, 30 bp, Homo sapiens
  chr7:71404248-71404278
  hypo
gtgtatggatgtggccgggcgtggtggctc

SEQ ID NO: 157112 - DNA, 30 bp, Homo sapiens
  chr7:71460112-71460142
  hypo
aggtctgagccactgcgcctggcgcccctt

SEQ ID NO: 157113 - DNA, 30 bp, Homo sapiens
  chr7:71468434-71468464
  hypo
acagcagagggagaacggcaggctagagag

SEQ ID NO: 157114 - DNA, 99 bp, Homo sapiens
  chr7:71598018-71598117
  hypo
tgatctgaggtggaacagtttcatcctgaaaccatccacccacaactatccatggaaaagatggtcttccatgacaccagaccccggtgccaaaaaggg

SEQ ID NO: 157115 - DNA, 239 bp, Homo sapiens
  chr7:71656029-71656268
  hypo
gaaaaatggccaagacgtagttactgcttttgtgcaagtcatggtctagtgtgagagacagatgcgccaacgaataattacaacccgctgtaatgaaggatagaataaagtcatgcgagcaggctgggaagacaagaagaatgcgactgacagcctagaggaattggcaacttcaaagcctttggatcctacaagatgaacagagaacaacgtagcaatttaggcggaagctacagact

SEQ ID NO: 157116 - DNA, 25 bp, Homo sapiens
  chr7:71669265-71669290
  hypo
caccgcacccagccaaagccaagag

SEQ ID NO: 157117 - DNA, 30 bp, Homo sapiens
  chr7:71690576-71690606
  hypo
tattctattttaaagcgaagccctcggcgc

SEQ ID NO: 157118 - DNA, 30 bp, Homo sapiens
  chr7:71715784-71715814
  hypo
cagatgcaggcaccacgctcgtatagcctg

SEQ ID NO: 157119 - DNA, 23 bp, Homo sapiens
  chr7:71794642-71794665
  hypo
gtgagacctttcttggttgggcg

SEQ ID NO: 157120 - DNA, 140 bp, Homo sapiens; identical to SEQ ID NO: 5617
  chr7:71802206-71802346
  hypo

SEQ ID NO: 157121 - DNA, 30 bp, Homo sapiens
  chr7:71827846-71827876
  hypo
acatttaccatattccggtaaatgaagcag

SEQ ID NO: 157122 - DNA, 23 bp, Homo sapiens
  chr7:71845545-71845568
  hypo
tacctgggcggtgaccgtgtctg

SEQ ID NO: 157123 - DNA, 30 bp, Homo sapiens
  chr7:71857330-71857360
  hypo
cccccgagtttggggcggtttattacaaag

SEQ ID NO: 157124 - DNA, 220 bp, Homo sapiens
  chr7:71870979-71871199
  hypo
agctcaacaggcgcacggcactgaaggtggcagctccccgtaaggaacaatcgctcctgctgctcagctggctctggtgccctcactgcggcactcgcgatgtgccagagaaacacaaagccaggggacccaaaatggagctggctcccatagccagaagccgtctctccagaattcccctctcccagtcacagctgcctgctggcgtaacgagggaagc

SEQ ID NO: 157125 - DNA, 28 bp, Homo sapiens
  chr7:71885891-71885919
  hypo
cctggccgggatgcatcttaaacatgca

SEQ ID NO: 157126 - DNA, 94 bp, Homo sapiens; identical to SEQ ID NO: 74178
  chr7:71913526-71913620
  hypo

SEQ ID NO: 157127 - DNA, 22 bp, Homo sapiens
  chr7:71927458-71927480
  hypo
cgcaaccagcttgtccctgtat

SEQ ID NO: 157128 - DNA, 31 bp, Homo sapiens; identical to SEQ ID NO: 74179
  chr7:72325008-72325039
  hypo

SEQ ID NO: 157129 - DNA, 44 bp, Homo sapiens; identical to SEQ ID NO: 74180
  chr7:75935605-75935649
  hypo

SEQ ID NO: 157130 - DNA, 193 bp, Homo sapiens
  chr7:75958853-75959046
  hypo
agtagtagcatccgcgtgcgctgccagttcccctggggccttaattgttgccttcgccgccatcgtcgtcctgctggtcgctcgtccagagcgtgaggttgtcgcggaggagctgcatgatgagcgtggagtccttgtaggagtcctcgttgagggtgtcaagctcggcgatggcgtcgtcgaacgcggtctt

SEQ ID NO: 157131 - DNA, 22 bp, Homo sapiens
  chr7:75975251-75975273
  hypo
cgcctcaaaaaaaaatttaaaa

SEQ ID NO: 157132 - DNA, 27 bp, Homo sapiens
  chr7:75977564-75977591
  hypo
caagagccttagacttcgttttttttt

SEQ ID NO: 157133 - DNA, 30 bp, Homo sapiens; identical to SEQ ID NO: 74183
  chr7:76009144-76009174
  hypo

SEQ ID NO: 157134 - DNA, 46 bp, Homo sapiens; identical to SEQ ID NO: 74184
  chr7:76033250-76033296
  hypo

SEQ ID NO: 157135 - DNA, 30 bp, Homo sapiens; identical to SEQ ID NO: 74185
  chr7:76054740-76054770
  hypo

SEQ ID NO: 157136 - DNA, 31 bp, Homo sapiens; identical to SEQ ID NO: 74186
  chr7:76059753-76059784
  hypo

SEQ ID NO: 157137 - DNA, 30 bp, Homo sapiens
  chr7:76067865-76067895
  hypo
aaaaaaaaagggtagcggggcagtgcttac

SEQ ID NO: 157138 - DNA, 293 bp, Homo sapiens
  chr7:76106203-76106496
  hypo
gaggctgcgtgccttcgtggaaagttttagctgatgtcctcgcctgtatttcccaggctgtttttgcagagttgtgagagttggttcatccgggccatgaggacatgttgggacataccccgtgtgccgatgatggaggcggccgtggctgcccgagagatgcgtgacacccaggagtaattggcttggaaggcagtcctctgatttgtacctcattgtggttacagaaacttccaattgaagacactgagctgaaccattccgcccgcccgcccgcccgagggcactccagg

SEQ ID NO: 157139 - DNA, 30 bp, Homo sapiens
  chr7:76135170-76135200
  hypo
tctgggggctgcttcgggcccgcggtgctc

SEQ ID NO: 157140 - DNA, 30 bp, Homo sapiens
  chr7:76143287-76143317
  hypo
cctggccagggcggcgaagtggcagcatga

SEQ ID NO: 157141 - DNA, 30 bp, Homo sapiens; identical to SEQ ID NO: 21526
  chr7:76246556-76246586
  hypo

SEQ ID NO: 157142 - DNA, 295 bp, Homo sapiens
  chr7:76604302-76604597
  hypo
gaggctgcgtgccttcgtggaaagttttagctgaagtcctcgcctatatttcccaggctgttttgcagagttgtgagagttggttcatcgggccatgaggacatgttgggacataccccgtgtgccgatgatggaggcggccgtggctgcccgagagatgcgtgacacccaggagtaattggcttggaaggcagtcctctgatttgtacctcattgtggttacagaaacttccaattgaagacactgagctgaaccattccgcccgcccgcccgcctgcccgcccgcccgagggc

SEQ ID NO: 157143 - DNA, 201 bp, Homo sapiens
  chr7:76631492-76631693
  hypo
gcatggagaagctgtccgcagcgtctggatacagcgatgtgactgacagcaaggcaatcgggcccctggctgtgggctgcctcaccaagtgcagccacgccttccacctgctgtgcctcctggccatgtactgcaacggcaataaggtgcccccactggcccggggcggaggcgggtggcctgccccggaagtcctgagct

SEQ ID NO: 157144 - DNA, 160 bp, Homo sapiens; identical to SEQ ID NO: 74191
  chr7:76632094-76632254
  hypo

SEQ ID NO: 157145 - DNA, 91 bp, Homo sapiens; identical to SEQ ID NO: 74192
  chr7:77036054-77036145
  hypo

SEQ ID NO: 157146 - DNA, 30 bp, Homo sapiens
  chr7:77126645-77126675
  hypo
tggaaatatgcccaccgttaacaggatgcc

SEQ ID NO: 157147 - DNA, 43 bp, Homo sapiens; identical to SEQ ID NO: 21528
  chr7:77129871-77129914
  hypo

SEQ ID NO: 157148 - DNA, 422 bp, Homo sapiens; identical to SEQ ID NO: 115159
  chr7:77167455-77167877
  hypo

SEQ ID NO: 157149 - DNA, 40 bp, Homo sapiens; identical to SEQ ID NO: 74196
  chr7:77184919-77184959
  hypo

SEQ ID NO: 157150 - DNA, 18 bp, Homo sapiens
  chr7:77296352-77296370
  hypo
ccccgtcagtcagtatat

SEQ ID NO: 157151 - DNA, 112 bp, Homo sapiens
  chr7:77296781-77296893
  hypo
gtggagttagtccaccggaggatatattcacataagggacaaaatagccttttgggagtcagagcgcgtgcatttggtttaaggcaatgtgaaaaaccgtaaacaatctcag

SEQ ID NO: 157152 - DNA, 121 bp, Homo sapiens; identical to SEQ ID NO: 74198
  chr7:77305018-77305139
  hypo

SEQ ID NO: 157153 - DNA, 22 bp, Homo sapiens
  chr7:77309368-77309390
  hypo
ctctgctggagtgcagtggtcc

SEQ ID NO: 157154 - DNA, 142 bp, Homo sapiens
  chr7:77309569-77309711
  hypo
gtgctgggattacaggcgtgagccatcgtgcccggccagacgatagatggattctttttttttttttttttttttgagcaaattgagctacttgagcctcggcctcccaaagtgctgggattactggcgtcagccactgcac

SEQ ID NO: 157155 - DNA, 91 bp, Homo sapiens; identical to SEQ ID NO: 74201
  chr7:77315383-77315474
  hypo

SEQ ID NO: 157156 - DNA, 30 bp, Homo sapiens
  chr7:77323331-77323361
  hypo
caacaggtaagaaaacggaggtcctaacaa

SEQ ID NO: 157157 - DNA, 121 bp, Homo sapiens; identical to SEQ ID NO: 21534
  chr7:77323832-77323953
  hypo

SEQ ID NO: 157158 - DNA, 241 bp, Homo sapiens; identical to SEQ ID NO: 21535
  chr7:77324192-77324433
  hypo

SEQ ID NO: 157159 - DNA, 26 bp, Homo sapiens
  chr7:77330195-77330221
  hypo
gggcgcggtggctcacgcctgtaatc

SEQ ID NO: 157160 - DNA, 30 bp, Homo sapiens
  chr7:77366537-77366567
  hypo
agaatccgtggcattcggttgctagacaac

SEQ ID NO: 157161 - DNA, 30 bp, Homo sapiens; identical to SEQ ID NO: 74204
  chr7:77409072-77409102
  hypo

SEQ ID NO: 157162 - DNA, 102 bp, Homo sapiens; identical to SEQ ID NO: 21536
  chr7:77413232-77413334
  hypo

SEQ ID NO: 157163 - DNA, 27 bp, Homo sapiens
  chr7:77456621-77456648
  hypo
tcattttcttttcttagaattcgtgga

SEQ ID NO: 157164 - DNA, 89 bp, Homo sapiens; identical to SEQ ID NO: 74207
  chr7:77459675-77459764
  hypo

SEQ ID NO: 157165 - DNA, 30 bp, Homo sapiens; identical to SEQ ID NO: 74208
  chr7:77464289-77464319
  hypo

SEQ ID NO: 157166 - DNA, 1525 bp, Homo sapiens; identical to SEQ ID NO: 115168
  chr7:79081509-79083034
  hypo

SEQ ID NO: 157167 - DNA, 951 bp, Homo sapiens; identical to SEQ ID NO: 115169
  chr7:79083190-79084141
  hypo

SEQ ID NO: 157168 - DNA, 27 bp, Homo sapiens
  chr7:79197433-79197460
  hypo
cgcctcggcctcccaaaaaactgtgaa

SEQ ID NO: 157169 - DNA, 32 bp, Homo sapiens; identical to SEQ ID NO: 74212
  chr7:79851711-79851743
  hypo

SEQ ID NO: 157170 - DNA, 31 bp, Homo sapiens; identical to SEQ ID NO: 74213
  chr7:79851982-79852013
  hypo

SEQ ID NO: 157171 - DNA, 31 bp, Homo sapiens; identical to SEQ ID NO: 74214
  chr7:80019541-80019572
  hypo

SEQ ID NO: 157172 - DNA, 22 bp, Homo sapiens
  chr7:80076739-80076761
  hypo
cccaaagcgttgggattacagg

SEQ ID NO: 157173 - DNA, 24 bp, Homo sapiens
  chr7:80163430-80163454
  hypo
taacataaagaaacaaaaatacgg

SEQ ID NO: 157174 - DNA, 154 bp, Homo sapiens; identical to SEQ ID NO: 74216
  chr7:80168618-80168772
  hypo

SEQ ID NO: 157175 - DNA, 30 bp, Homo sapiens; identical to SEQ ID NO: 74217
  chr7:80171532-80171562
  hypo

SEQ ID NO: 157176 - DNA, 30 bp, Homo sapiens
  chr7:80291778-80291808
  hypo
actggcagagagcctcgtgccgttagacgt

SEQ ID NO: 157177 - DNA, 35 bp, Homo sapiens; identical to SEQ ID NO: 74218
  chr7:80541272-80541307
  hypo

SEQ ID NO: 157178 - DNA, 37 bp, Homo sapiens; identical to SEQ ID NO: 74219
  chr7:80544780-80544817
  hypo

SEQ ID NO: 157179 - DNA, 857 bp, Homo sapiens; identical to SEQ ID NO: 115172
  chr7:80548006-80548863
  hypo

SEQ ID NO: 157180 - DNA, 31 bp, Homo sapiens; identical to SEQ ID NO: 74221
  chr7:80565299-80565330
  hypo

SEQ ID NO: 157181 - DNA, 98 bp, Homo sapiens
  chr7:80572492-80572590
  hypo
aaaattagccagagcgagactctgtctcaaaaaaaaaaaaaagtaacagacggtagaggcagtcaaatgtagagaacgcagaagcaactcttctttta

SEQ ID NO: 157182 - DNA, 20 bp, Homo sapiens
  chr7:80619356-80619376
  hypo
gatgccgtctcaataataat

SEQ ID NO: 157183 - DNA, 30 bp, Homo sapiens
  chr7:80670479-80670509
  hypo
acaggcgtgagccaccgcacccggcgaact

SEQ ID NO: 157184 - DNA, 30 bp, Homo sapiens
  chr7:80671209-80671239
  hypo
agaaatcagacatcccggcactcgctattt

SEQ ID NO: 157185 - DNA, 16 bp, Homo sapiens
  chr7:80716381-80716397
  hypo
gccatagatgaatttt

SEQ ID NO: 157186 - DNA, 30 bp, Homo sapiens
  chr7:80748363-80748393
  hypo
gaagggtgaggagggcgaagaattttattg

SEQ ID NO: 157187 - DNA, 29 bp, Homo sapiens
  chr7:80752215-80752244
  hypo
tttttttttgagatggagtctcgctctgt

SEQ ID NO: 157188 - DNA, 29 bp, Homo sapiens
  chr7:80752483-80752512
  hypo
gctaccgcgcccagccctatgtcaatatt

SEQ ID NO: 157189 - DNA, 241 bp, Homo sapiens
  chr7:80790076-80790317
  hypo
ccaaagtgatgggattacaggtgagccactgcgcccagccgcttttctcactcttaagaaaagtcacaaacacatttcaactttgctgactttggagatgcgtggaaatcgtttttaggactaggagaagatctgccagagagaaaaaattaacatgctaacaatggtaaaaaaaaaaaaaaaaaaaaaagaaagttggaaggaaactattttttttcgcttaagaatgaggagagccagc

SEQ ID NO: 157190 - DNA, 118 bp, Homo sapiens
  chr7:80896251-80896369
  hypo
gggggtccctgagcccgccctttgggccccaatgtctgttcatgatctaccttctgacggaccactgcacgagcccgcaatgggggttctttctcctcggtatcggactgagtggggg

SEQ ID NO: 157191 - DNA, 37 bp, Homo sapiens; identical to SEQ ID NO: 21542
  chr7:80917899-80917936
  hypo

SEQ ID NO: 157192 - DNA, 37 bp, Homo sapiens; identical to SEQ ID NO: 21543
  chr7:80918175-80918212
  hypo

SEQ ID NO: 157193 - DNA, 32 bp, Homo sapiens; identical to SEQ ID NO: 74230
  chr7:80965881-80965913
  hypo

SEQ ID NO: 157194 - DNA, 141 bp, Homo sapiens
  chr7:81066981-81067122
  hypo
atagatttctccttccaggattactatgatgtgctcctgatagaactccctgctttaacccttcaccctcaaagtcgattctcaacacaacagccagacggaacgtttaaatcataagtgagataacgtcattactttaca

SEQ ID NO: 157195 - DNA, 21 bp, Homo sapiens
  chr7:82010654-82010675
  hypo
gtccttgacagcaacaaagct

SEQ ID NO: 157196 - DNA, 84 bp, Homo sapiens
  chr7:82176345-82176429
  hypo
aaaaaaaaaagaaagtgacagaaaccccaattcaaaatgacttacggaaaaaagaaaaattggcttacacgactgaaatgttca

SEQ ID NO: 157197 - DNA, 447 bp, Homo sapiens; identical to SEQ ID NO: 115176
  chr7:82791562-82792009
  hypo

SEQ ID NO: 157198 - DNA, 297 bp, Homo sapiens; identical to SEQ ID NO: 44343
  chr7:82792128-82792425
  hypo

SEQ ID NO: 157199 - DNA, 30 bp, Homo sapiens
  chr7:85759716-85759746
  hypo
gtgagcgaacaagtgcgggaactggagtga

SEQ ID NO: 157200 - DNA, 30 bp, Homo sapiens
  chr7:85760188-85760218
  hypo
gaagtaaaaaggggacggggcaggtaggta

SEQ ID NO: 157201 - DNA, 613 bp, Homo sapiens; identical to SEQ ID NO: 21545
  chr7:86415570-86416183
  hypo

SEQ ID NO: 157202 - DNA, 30 bp, Homo sapiens
  chr7:86813822-86813852
  hypo
gaacgagtcggtacccgctcagaaaagcaa

SEQ ID NO: 157203 - DNA, 110 bp, Homo sapiens; identical to SEQ ID NO: 115189
  chr7:86849526-86849636
  hypo

SEQ ID NO: 157204 - DNA, 18 bp, Homo sapiens
  chr7:86959423-86959441
  hypo
ggacgagaagaatgtgca

SEQ ID NO: 157205 - DNA, 30 bp, Homo sapiens; identical to SEQ ID NO: 44356
  chr7:87079053-87079083
  hypo

SEQ ID NO: 157206 - DNA, 30 bp, Homo sapiens; identical to SEQ ID NO: 44358
  chr7:87124806-87124836
  hypo

SEQ ID NO: 157207 - DNA, 19 bp, Homo sapiens
  chr7:87254287-87254306
  hypo
tatggctgggcgcggcggc

SEQ ID NO: 157208 - DNA, 19 bp, Homo sapiens
  chr7:87254605-87254624
  hypo
ttacctcatcatttaagat

SEQ ID NO: 157209 - DNA, 987 bp, Homo sapiens; identical to SEQ ID NO: 5649
  chr7:87256906-87257893
  hypo

SEQ ID NO: 157210 - DNA, 536 bp, Homo sapiens; identical to SEQ ID NO: 44361
  chr7:87257922-87258458
  hypo

SEQ ID NO: 157211 - DNA, 22 bp, Homo sapiens
  chr7:87372415-87372437
  hypo
cgagattccgtctcaaaaaaaa

SEQ ID NO: 157212 - DNA, 30 bp, Homo sapiens
  chr7:87499184-87499214
  hypo
tcagaaaatgttttccgaagccgttgaacc

SEQ ID NO: 157213 - DNA, 1376 bp, Homo sapiens; identical to SEQ ID NO: 115201
  chr7:87563188-87564564
  hypo

SEQ ID NO: 157214 - DNA, 482 bp, Homo sapiens; identical to SEQ ID NO: 115203
  chr7:87849419-87849901
  hypo

SEQ ID NO: 157215 - DNA, 42 bp, Homo sapiens; identical to SEQ ID NO: 74246
  chr7:88858570-88858612
  hypo

SEQ ID NO: 157216 - DNA, 30 bp, Homo sapiens
  chr7:89375410-89375440
  hypo
ctaaaaataataattcggcggccgggcgcg

SEQ ID NO: 157217 - DNA, 29 bp, Homo sapiens
  chr7:89375739-89375768
  hypo
agacaagctcctgacggtccacacctgtt

SEQ ID NO: 157218 - DNA, 30 bp, Homo sapiens; identical to SEQ ID NO: 74247
  chr7:89856300-89856330
  hypo

SEQ ID NO: 157219 - DNA, 30 bp, Homo sapiens
  chr7:90121591-90121621
  hypo
aacagttcctattcacgaccgcagtgctac

SEQ ID NO: 157220 - DNA, 1514 bp, Homo sapiens; identical to SEQ ID NO: 115218
  chr7:90225110-90226624
  hypo

SEQ ID NO: 157221 - DNA, 23 bp, Homo sapiens
  chr7:90269563-90269586
  hypo
tcggccatcttggctcctccctc

SEQ ID NO: 157222 - DNA, 30 bp, Homo sapiens
  chr7:90452926-90452956
  hypo
agggagtaggtatttcgaatcaaccaaacc

SEQ ID NO: 157223 - DNA, 185 bp, Homo sapiens
  chr7:90635232-90635417
  hypo
cttaacagatggtgatgtgggcgactgtggtttaagatctgactcggttcataaagacacccagtcttgtcctggtcccaccctataggcagtgatggctccaggctcatccaaacaactctgcaacaagatggtgtcagccatccacgtgggtggacaccgctggaccccgtagacaggcagcg

SEQ ID NO: 157224 - DNA, 30 bp, Homo sapiens; identical to SEQ ID NO: 115222
  chr7:90894014-90894044
  hypo

SEQ ID NO: 157225 - DNA, 30 bp, Homo sapiens; identical to SEQ ID NO: 115223
  chr7:90894293-90894323
  hypo

SEQ ID NO: 157226 - DNA, 607 bp, Homo sapiens; identical to SEQ ID NO: 115224
  chr7:90894560-90895167
  hypo

SEQ ID NO: 157227 - DNA, 30 bp, Homo sapiens; identical to SEQ ID NO: 21557
  chr7:90916005-90916035
  hypo

SEQ ID NO: 157228 - DNA, 21 bp, Homo sapiens
  chr7:91209455-91209476
  hypo
gggggtggggggacagagtct

SEQ ID NO: 157229 - DNA, 22 bp, Homo sapiens
  chr7:91218962-91218984
  hypo
agaggcagcagccaagatggcc

SEQ ID NO: 157230 - DNA, 31 bp, Homo sapiens
  chr7:91510851-91510882
  hypo
agttatcctcaggagacgatggtgatttggt

SEQ ID NO: 157231 - DNA, 146 bp, Homo sapiens; identical to SEQ ID NO: 74254
  chr7:91531326-91531472
  hypo

SEQ ID NO: 157232 - DNA, 25 bp, Homo sapiens
  chr7:91539029-91539054
  hypo
tttcgattggctcctgtacatcatt

SEQ ID NO: 157233 - DNA, 81 bp, Homo sapiens
  chr7:91655604-91655685
  hypo
cttaaagaatgaagtcgctctccctctccctctccctctccctctcttctctcttctctctctttccacggtctccctctg

SEQ ID NO: 157234 - DNA, 30 bp, Homo sapiens; identical to SEQ ID NO: 74256
  chr7:91765498-91765528
  hypo

SEQ ID NO: 157235 - DNA, 348 bp, Homo sapiens; identical to SEQ ID NO: 115228
  chr7:91808297-91808645
  hypo

SEQ ID NO: 157236 - DNA, 30 bp, Homo sapiens
  chr7:92025702-92025732
  hypo
aggaggcacagacaacgtcgtcgaggagat

SEQ ID NO: 157237 - DNA, 41 bp, Homo sapiens; identical to SEQ ID NO: 21558
  chr7:92075853-92075894
  hypo

SEQ ID NO: 157238 - DNA, 31 bp, Homo sapiens
  chr7:92164124-92164155
  hypo
aagaagagaagatgatcgtaaacttggaact

SEQ ID NO: 157239 - DNA, 144 bp, Homo sapiens; identical to SEQ ID NO: 5665
  chr7:92219763-92219907
  hypo

SEQ ID NO: 157240 - DNA, 120 bp, Homo sapiens
  chr7:92370086-92370206
  hypo
gtgaaggcgggaaaccgaatttgagaagccagaaaggtgcctaacacacacaaggcccatatcatcagaaacctaagctcctcctcacctcgtgcccaggtacacgtggcccctctgcaa

SEQ ID NO: 157241 - DNA, 1230 bp, Homo sapiens; identical to SEQ ID NO: 115237
  chr7:92462186-92463416
  hypo

SEQ ID NO: 157242 - DNA, 248 bp, Homo sapiens; identical to SEQ ID NO: 115238
  chr7:92463700-92463948
  hypo

SEQ ID NO: 157243 - DNA, 263 bp, Homo sapiens; identical to SEQ ID NO: 115239
  chr7:92464876-92465139
  hypo

SEQ ID NO: 157244 - DNA, 194 bp, Homo sapiens
  chr7:92465433-92465627
  hypo
gtagagttccagttccgtttggagaaactgtatgaggcgtgttccgtgtgggtgtgtgtgcgtacggatacgtggaagcaggatctcggtgtcgcgggtgtccctaggctgggatctccccctctcatcagataaggagaatcctctagctccccaaaactggcccccataaccaatcccgtctcagttcgtaa

SEQ ID NO: 157245 - DNA, 30 bp, Homo sapiens
  chr7:92465846-92465876
  hypo
ctccgcacgtgtccgcggcctcgcggagca

SEQ ID NO: 157246 - DNA, 253 bp, Homo sapiens; identical to SEQ ID NO: 5668
  chr7:92466275-92466528
  hypo

SEQ ID NO: 157247 - DNA, 18 bp, Homo sapiens
  chr7:92558588-92558606
  hypo
aggcgtgagccactgcgc

SEQ ID NO: 157248 - DNA, 17 bp, Homo sapiens
  chr7:92602320-92602337
  hypo
cagaagggaagaaattt

SEQ ID NO: 157249 - DNA, 89 bp, Homo sapiens; identical to SEQ ID NO: 74264
  chr7:92745364-92745453
  hypo

SEQ ID NO: 157250 - DNA, 30 bp, Homo sapiens; identical to SEQ ID NO: 74265
  chr7:92779409-92779439
  hypo

SEQ ID NO: 157251 - DNA, 130 bp, Homo sapiens; identical to SEQ ID NO: 21564
  chr7:92939971-92940101
  hypo

SEQ ID NO: 157252 - DNA, 29 bp, Homo sapiens
  chr7:93549240-93549269
  hypo
attaacaaaaaattagtcaggcgtggtag

SEQ ID NO: 157253 - DNA, 30 bp, Homo sapiens; identical to SEQ ID NO: 74268
  chr7:93629922-93629952
  hypo

SEQ ID NO: 157254 - DNA, 95 bp, Homo sapiens; identical to SEQ ID NO: 74269
  chr7:94138371-94138466
  hypo

SEQ ID NO: 157255 - DNA, 30 bp, Homo sapiens; identical to SEQ ID NO: 74270
  chr7:94142348-94142378
  hypo

SEQ ID NO: 157256 - DNA, 64 bp, Homo sapiens; identical to SEQ ID NO: 74271
  chr7:94293683-94293747
  hypo

SEQ ID NO: 157257 - DNA, 30 bp, Homo sapiens; identical to SEQ ID NO: 74272
  chr7:94539837-94539867
  hypo

SEQ ID NO: 157258 - DNA, 90 bp, Homo sapiens
  chr7:94732596-94732686
  hypo
gcttccttgtgttgccgtttgaactagcatgctctctacctcccattatatagagtatgtttggttttttttcacttctttttttttttt

SEQ ID NO: 157259 - DNA, 30 bp, Homo sapiens
  chr7:94785488-94785518
  hypo
gctgctgcaatggggcgggcagttacaggt

SEQ ID NO: 157260 - DNA, 30 bp, Homo sapiens
  chr7:95063953-95063983
  hypo
ttcaagaaagtgtcgcgattcactccaaac

SEQ ID NO: 157261 - DNA, 438 bp, Homo sapiens; identical to SEQ ID NO: 44404
  chr7:95064140-95064578
  hypo

SEQ ID NO: 157262 - DNA, 30 bp, Homo sapiens
  chr7:95765792-95765822
  hypo
tctctttctctcgcacgcatgctgttgcac

SEQ ID NO: 157263 - DNA, 30 bp, Homo sapiens
  chr7:95766097-95766127
  hypo
agcaggtctgggagacggaggcttaacaga

SEQ ID NO: 157264 - DNA, 30 bp, Homo sapiens
  chr7:95850431-95850461
  hypo
gccattatggtcaatcgtgcaaatccgtat

SEQ ID NO: 157265 - DNA, 30 bp, Homo sapiens
  chr7:95850832-95850862
  hypo
cctcagctatcttttcgaatatttcatttt

SEQ ID NO: 157266 - DNA, 30 bp, Homo sapiens
  chr7:95951729-95951759
  hypo
acgacagatggtgcacggcctggggaagtt

SEQ ID NO: 157267 - DNA, 27 bp, Homo sapiens
  chr7:96076068-96076095
  hypo
aggtgctgcggctcacgcctgtaatcc

SEQ ID NO: 157268 - DNA, 30 bp, Homo sapiens
  chr7:96415623-96415653
  hypo
gtgtgtgtgtgtgcgcgcgcacacacaggc

SEQ ID NO: 157269 - DNA, 352 bp, Homo sapiens; identical to SEQ ID NO: 5684
  chr7:96635619-96635971
  hypo

SEQ ID NO: 157270 - DNA, 819 bp, Homo sapiens; identical to SEQ ID NO: 115275
  chr7:96636033-96636852
  hypo

SEQ ID NO: 157271 - DNA, 822 bp, Homo sapiens; identical to SEQ ID NO: 115289
  chr7:96746746-96747568
  hypo

SEQ ID NO: 157272 - DNA, 28 bp, Homo sapiens
  chr7:97044825-97044853
  hypo
acagcaagaggtggctgggtgcggtggc

SEQ ID NO: 157273 - DNA, 27 bp, Homo sapiens
  chr7:97045092-97045119
  hypo
ctgggcgacacagtgagactccatctc

SEQ ID NO: 157274 - DNA, 44 bp, Homo sapiens; identical to SEQ ID NO: 74279
  chr7:97137337-97137381
  hypo

SEQ ID NO: 157275 - DNA, 675 bp, Homo sapiens; identical to SEQ ID NO: 115294
  chr7:97501248-97501923
  hypo

SEQ ID NO: 157276 - DNA, 30 bp, Homo sapiens
  chr7:97589633-97589663
  hypo
tgtcacagggcgagtcggacctgtcataaa

SEQ ID NO: 157277 - DNA, 93 bp, Homo sapiens
  chr7:97591810-97591903
  hypo
cactgtgataatattcgtaatatcctaaatggatgttaatgctagtgacacgacgcgtgtacatcctctgtatttgttcgttatatcctcggg

SEQ ID NO: 157278 - DNA, 30 bp, Homo sapiens; identical to SEQ ID NO: 21571
  chr7:97598477-97598507
  hypo

SEQ ID NO: 157279 - DNA, 181 bp, Homo sapiens; identical to SEQ ID NO: 74282
  chr7:97600008-97600189
  hypo

SEQ ID NO: 157280 - DNA, 39 bp, Homo sapiens; identical to SEQ ID NO: 74283
  chr7:97600248-97600287
  hypo

SEQ ID NO: 157281 - DNA, 97 bp, Homo sapiens; identical to SEQ ID NO: 74284
  chr7:97627564-97627661
  hypo

SEQ ID NO: 157282 - DNA, 187 bp, Homo sapiens; identical to SEQ ID NO: 74285
  chr7:97670350-97670537
  hypo

SEQ ID NO: 157283 - DNA, 34 bp, Homo sapiens; identical to SEQ ID NO: 74286
  chr7:97706015-97706049
  hypo

SEQ ID NO: 157284 - DNA, 20 bp, Homo sapiens
  chr7:97738172-97738192
  hypo
tttttttttttttttttgag

SEQ ID NO: 157285 - DNA, 19 bp, Homo sapiens
  chr7:97738491-97738510
  hypo
tttttattccattctttta

SEQ ID NO: 157286 - DNA, 226 bp, Homo sapiens; identical to SEQ ID NO: 74289
  chr7:97748928-97749154
  hypo

SEQ ID NO: 157287 - DNA, 30 bp, Homo sapiens
  chr7:97772779-97772809
  hypo
ggataaaaagtaacacgctactagaataaa

SEQ ID NO: 157288 - DNA, 30 bp, Homo sapiens; identical to SEQ ID NO: 74290
  chr7:97778819-97778849
  hypo

SEQ ID NO: 157289 - DNA, 30 bp, Homo sapiens; identical to SEQ ID NO: 21573
  chr7:97797622-97797652
  hypo

SEQ ID NO: 157290 - DNA, 30 bp, Homo sapiens
  chr7:97801693-97801723
  hypo
gcaagctccacctcccgggttcacgccttg

SEQ ID NO: 157291 - DNA, 224 bp, Homo sapiens; identical to SEQ ID NO: 74292
  chr7:97804193-97804417
  hypo

SEQ ID NO: 157292 - DNA, 152 bp, Homo sapiens; identical to SEQ ID NO: 21574
  chr7:97806160-97806312
  hypo

SEQ ID NO: 157293 - DNA, 160 bp, Homo sapiens; identical to SEQ ID NO: 74294
  chr7:97807168-97807328
  hypo

SEQ ID NO: 157294 - DNA, 266 bp, Homo sapiens
  chr7:97807595-97807861
  hypo
tgaaaatgcctcctgcgtgttgagtttgcattggagaaccccgaagacgcgcaaactagtcctagcgtgagtgagcagcaagcagtggtacttccttgtgaatcggggtgggaacccttcagaaccgcgagctcccactttctgtcgatcgctctgctcatgcggccctgagtctcatggttactgtggtctcagtcacagcaagtgctgccaagctcaggcgacgctgccagagccttctgagagccgggcggggctggtgccac

SEQ ID NO: 157295 - DNA, 49 bp, Homo sapiens; identical to SEQ ID NO: 74296
  chr7:97808577-97808626
  hypo

SEQ ID NO: 157296 - DNA, 30 bp, Homo sapiens
  chr7:97821202-97821232
  hypo
tatgtctgggaggccgctaagcacgaccac

SEQ ID NO: 157297 - DNA, 30 bp, Homo sapiens
  chr7:97821484-97821514
  hypo
gcgctgctcacaaccgacatggataatcca

SEQ ID NO: 157298 - DNA, 30 bp, Homo sapiens
  chr7:97822359-97822389
  hypo
cgctgtgactgtcccggttgaaattctctc

SEQ ID NO: 157299 - DNA, 30 bp, Homo sapiens; identical to SEQ ID NO: 115299
  chr7:97823634-97823664
  hypo

SEQ ID NO: 157300 - DNA, 30 bp, Homo sapiens; identical to SEQ ID NO: 74297
  chr7:97824751-97824781
  hypo

SEQ ID NO: 157301 - DNA, 30 bp, Homo sapiens; identical to SEQ ID NO: 74298
  chr7:97826730-97826760
  hypo

SEQ ID NO: 157302 - DNA, 123 bp, Homo sapiens
  chr7:97832524-97832647
  hypo
tgcccactttggattccgggctgacctgagtccaggcgggggattgtggaggagaagccgacacacttgttgctggtgggtggcaccttgagcactgccgctcgtgcccgcctgcctgctgct

SEQ ID NO: 157303 - DNA, 302 bp, Homo sapiens
  chr7:97833193-97833495
  hypo
ggctccccctctccctcatcacgcagtgataaaaagggtggggttttattttttatttctaggtggtggctttgagtgggatgatgacttctccccagatccttttatgtcaaagacaacaagtaacctgctcagctccaagccttctctccaaacatccaagtacttttctccgccgccaccggcccggagcacggagcagagctggccgcactcggcgccttactcccggttctccatctctcccgccaacattgccagcttttccctcacacacctgaccgactcggacatcgagcagg

SEQ ID NO: 157304 - DNA, 245 bp, Homo sapiens; identical to SEQ ID NO: 74301
  chr7:97833959-97834204
  hypo

SEQ ID NO: 157305 - DNA, 500 bp, Homo sapiens; identical to SEQ ID NO: 74302
  chr7:97841576-97842076
  hypo

SEQ ID NO: 157306 - DNA, 112 bp, Homo sapiens; identical to SEQ ID NO: 74303
  chr7:97844376-97844488
  hypo

SEQ ID NO: 157307 - DNA, 166 bp, Homo sapiens; identical to SEQ ID NO: 74304
  chr7:97846966-97847132
  hypo

SEQ ID NO: 157308 - DNA, 30 bp, Homo sapiens
  chr7:97852007-97852037
  hypo
atctcatcctcctgcgagcagggaaagcgc

SEQ ID NO: 157309 - DNA, 30 bp, Homo sapiens
  chr7:97852802-97852832
  hypo
acatttactcagattcggcttccctcttca

SEQ ID NO: 157310 - DNA, 30 bp, Homo sapiens
  chr7:97853073-97853103
  hypo
tttctggaaagggaccgtgcatgtaaacat

SEQ ID NO: 157311 - DNA, 185 bp, Homo sapiens
  chr7:97855416-97855601
  hypo
agacagatgtgggtgcgcagccctgccctgccctgccctgtcctccgtcggaactgaggaggacgtgaggagggagtggagatccaagtgtgctgccaggctgtgtggacactgcccacagctgaggcggaggttttcaggatggaaatattttggcgatgtgtgccaaccgccttagaaaatct

SEQ ID NO: 157312 - DNA, 166 bp, Homo sapiens
  chr7:97857341-97857507
  hypo
tgacggggttccagcgctggttctcatagatgtgaacacacttcacgtctgactgcgtgtagatgttactggtgctgctggccaggcctgtggggagaggtggctgctgggaccgaggccacatacgctccgcttgggactctggctttccgtctgaagcacagat

SEQ ID NO: 157313 - DNA, 257 bp, Homo sapiens; identical to SEQ ID NO: 74306
  chr7:97869427-97869684
  hypo

SEQ ID NO: 157314 - DNA, 148 bp, Homo sapiens
  chr7:97882238-97882386
  hypo
aacacgggctcagagatggagcgactcacgttgtaagcgatggaactgggatttgaaaacactgtatcccgcctggcagaaaactggcaaggttaggatggagaaaggagaaaaaagaaagatgtcggccaggtgcggcggttcatac

SEQ ID NO: 157315 - DNA, 30 bp, Homo sapiens
  chr7:97888202-97888232
  hypo
ataaagacggccaggcgcggtggctcaccc

SEQ ID NO: 157316 - DNA, 430 bp, Homo sapiens
  chr7:97925141-97925571
  hypo
aatcctcacaaagaacgcagcaagaagcaccgactcctgccaggaggactgaggaggaaaaagaacgcttaagatgacagctggaagccactcagtgttgggccaaccccgtgcacgcatgcctggggcccaacaatcctgctccctgtaggaacaagcagggcacacacccatgggcaccgagacactcgggcagccctggagaaacagcccagaccagaaacaccagacgcccgtcaatgggagagtcagaaccagcttctgtgcagacagcaggtcaccacacagcactgagcgactgtccctacggggccaccccagacagccatctctgtgccagggcttggggagtctggtgttggagaagggatggtcacggaggtgggccatgctgggtgatcgtgggggccgggaacgtcctgctgggtat

SEQ ID NO: 157317 - DNA, 31 bp, Homo sapiens; identical to SEQ ID NO: 74309
  chr7:97942776-97942807
  hypo

SEQ ID NO: 157318 - DNA, 31 bp, Homo sapiens; identical to SEQ ID NO: 74310
  chr7:97947129-97947160
  hypo

SEQ ID NO: 157319 - DNA, 18 bp, Homo sapiens
  chr7:97947878-97947896
  hypo
ccacgcccagtgaacaca

SEQ ID NO: 157320 - DNA, 133 bp, Homo sapiens; identical to SEQ ID NO: 74312
  chr7:97968885-97969018
  hypo

SEQ ID NO: 157321 - DNA, 225 bp, Homo sapiens; identical to SEQ ID NO: 74313
  chr7:97984207-97984432
  hypo

SEQ ID NO: 157322 - DNA, 30 bp, Homo sapiens
  chr7:97984647-97984677
  hypo
gtctctgaccagccccggggaaccttcagc

SEQ ID NO: 157323 - DNA, 43 bp, Homo sapiens; identical to SEQ ID NO: 74314
  chr7:97989648-97989691
  hypo

SEQ ID NO: 157324 - DNA, 36 bp, Homo sapiens; identical to SEQ ID NO: 21581
  chr7:98012254-98012290
  hypo

SEQ ID NO: 157325 - DNA, 28 bp, Homo sapiens
  chr7:98019241-98019269
  hypo
ttttgagaggtagtctcgcactgtcgcc

SEQ ID NO: 157326 - DNA, 28 bp, Homo sapiens
  chr7:98019508-98019536
  hypo
gagccactgcgcccggtctcgggttagt

SEQ ID NO: 157327 - DNA, 237 bp, Homo sapiens; identical to SEQ ID NO: 115303
  chr7:98030419-98030656
  hypo

SEQ ID NO: 157328 - DNA, 168 bp, Homo sapiens
  chr7:98088534-98088702
  hypo
cacctgtggagtgcccgctatgtgtgtccgcacctgccagggaagctgagaggcctggctggctgcttcgggtttgagcgaggacagcagcttggttctgagttaagcagactgcatcagaggtagccaagtattgaggcttctgctgggccccgcaccgtgttcccc

SEQ ID NO: 157329 - DNA, 344 bp, Homo sapiens; identical to SEQ ID NO: 21583
  chr7:98115910-98116254
  hypo

SEQ ID NO: 157330 - DNA, 30 bp, Homo sapiens
  chr7:98140967-98140997
  hypo
gatgtcagcgctgcccgcaactccactggg

SEQ ID NO: 157331 - DNA, 140 bp, Homo sapiens
  chr7:98147930-98148070
  hypo
aagtttcttattcaccgggtaagaactttctcccctttcctgtctgcctcctccccgggaaaaccatatcagccttttgaataggtctccaggcaccacgtggaggcccgagctccacggccggacggccctggacagac

SEQ ID NO: 157332 - DNA, 22 bp, Homo sapiens
  chr7:98163401-98163423
  hypo
cgagactctgtctcaaaacaaa

SEQ ID NO: 157333 - DNA, 30 bp, Homo sapiens
  chr7:98201002-98201032
  hypo
agttgggcaagggagcgtattcgtctgccc

SEQ ID NO: 157334 - DNA, 203 bp, Homo sapiens; identical to SEQ ID NO: 5696
  chr7:98246304-98246507
  hypo

SEQ ID NO: 157335 - DNA, 1240 bp, Homo sapiens; identical to SEQ ID NO: 44447
  chr7:98246533-98247773
  hypo

SEQ ID NO: 157336 - DNA, 117 bp, Homo sapiens; identical to SEQ ID NO: 74323
  chr7:98254319-98254436
  hypo

SEQ ID NO: 157337 - DNA, 30 bp, Homo sapiens
  chr7:98569541-98569571
  hypo
tttctggacactctccgagaggtgaaggtc

SEQ ID NO: 157338 - DNA, 30 bp, Homo sapiens
  chr7:98573821-98573851
  hypo
gctggcagagaagacgtgggtccagctttt

SEQ ID NO: 157339 - DNA, 30 bp, Homo sapiens
  chr7:98574096-98574126
  hypo
tggtttcaggcactcgcgggtgagataagt

SEQ ID NO: 157340 - DNA, 30 bp, Homo sapiens
  chr7:98574650-98574680
  hypo
ggagacagcgactgcgattgcttacgagca

SEQ ID NO: 157341 - DNA, 30 bp, Homo sapiens; identical to SEQ ID NO: 74324
  chr7:98579514-98579544
  hypo

SEQ ID NO: 157342 - DNA, 30 bp, Homo sapiens
  chr7:98581074-98581104
  hypo
ttaccagggtaaaccgacctggtccggcat

SEQ ID NO: 157343 - DNA, 30 bp, Homo sapiens; identical to SEQ ID NO: 74325
  chr7:98581398-98581428
  hypo

SEQ ID NO: 157344 - DNA, 531 bp, Homo sapiens
  chr7:98586156-98586687
  hypo
tttatatgaaatgtacagaaccggtcaatccacagagacagaaggcagactgcaggttcccaggggctggaggtgggaggggttcagagcgactgcttatggggcggttgcacaacattgtgaatggaccaaatgccccgcagtgttcattttataatggttaatttcagattacgtgaagctcgcttcaattgaaaaccatacacgttttggttttctgtctcctcacaggtccgaggaggcaaacaaagccttctctgcagctgtgcagatgcacgatgtgctggtgaaagcctgggccatgtggggcgactacctggagaacatctttgtgaaggagcggcagctgcacctgggcgtgtctgccatcacctgctacctgcacgcctgccggcatcagaacgagagcaaatcgaggaaatacttagccaaggtgagaccgaaaaaacgagctttgaccagaggccatctgtcaccttcagatttggacagaaatttagctatagtttactcatccgtgccgggtgtgag

SEQ ID NO: 157345 - DNA, 30 bp, Homo sapiens; identical to SEQ ID NO: 74328
  chr7:98591105-98591135
  hypo

SEQ ID NO: 157346 - DNA, 358 bp, Homo sapiens
  chr7:98598593-98598951
  hypo
actgatgggttaaatcgtagactaagtggttcacatgtgtggtattcaaagaatctcctaaagactcattgtgtcctagatgacacagttaatattaagtcacataaaagaaaatcttcatctccttaatcggaaaggacactcaacagccatagctgtgaccagggttgcatcgaggttgcatccagctgaagtgtggcgtgtgccctgcagttgctccaggcagtctgggggcgcagctccctgttcgtgatgtgtgggttgggcttgccttaggtgaacccacagctgagggaggtgctctttgaaaagtgaagggcaagcccggtcctccccgtctatacgtgaagcgctttca

SEQ ID NO: 157347 - DNA, 205 bp, Homo sapiens
  chr7:98599225-98599430
  hypo
aagtgcagtgggtctcagacacgcacagccagagctcatccaccttccgctctcctgtacacaggggaggctgtttctgtctctttgtctgtgttccgttcgtggaatgcagtccgattctctagcagagctgcatgtgtgggctgccaaccacatgtctgtaaagaggtggaagaaagctcagaaatggcgcactccatttatc

SEQ ID NO: 157348 - DNA, 498 bp, Homo sapiens
  chr7:98599729-98600227
  hypo
gatgcaggggagaggcgggggggtggggtggtgggggtgggtggtagctgtgaagggcagccaagggcatcccgtgctgatggtgcagctcagcaactgattgtgctggtggctctgcgaggccacacagtgacatgaccagaggtgtgcgcatgcatacacacatgtgcgcacacacacgtgcacacataactggtgaagtctgaatcagctcttcagctctttggactgtgccaatgtcactttttggtgttggcatcgcactgggttgcataggatgctggtgtgggaggaagagggttaggagtacatgggactttctgtatattttgtttgcatcctgttgtgaatctctaggaatttcagaataaaagttaaaaagagatcaggcatgagcttggcagcacgttcttggtccagcgtggagagggaacaatgaggtggcctgcgtccttggtggtggcctctgtctctcgcggctctgctgggggatctcac

SEQ ID NO: 157349 - DNA, 82 bp, Homo sapiens; identical to SEQ ID NO: 74331
  chr7:98601683-98601765
  hypo

SEQ ID NO: 157350 - DNA, 398 bp, Homo sapiens
  chr7:98602531-98602929
  hypo
ctctccctcctccttgacttccgtccgtggctgctgaattgaaaatattgtgactcatttacaccgcatcagggtgaggcagggtacaaataaattgataaacgaccgctggcctacacagtccgttttcccgtgacagttcggacattcctagcttcttctcaagacaaggactggtagcagagatgcagggcatgtcctcatggcttctcgctctggcaggttcatgccccgggtagagattgtgcagaagcacaacaccgcagcccggcggctgtacatccggggacacaatggcaagatctacccatacctcgtcatgaacgacgcctgcctcacagagtcacggcgagaggagcgtgtgttgcagctgctgcgtctgctgaacccctgtttgg

SEQ ID NO: 157351 - DNA, 184 bp, Homo sapiens
  chr7:98605990-98606174
  hypo
tctccccagtgccccgggttgtggcagtttccccacagatgcgcctcgtggaggacaacccctcttcactttcccttgtggagatctacaagcagcgctgcgccaagaagggcatcgagcatgacaaccccatctcccgttactatgaccggctggctacggtgcaggcgcggggaacccaagc

SEQ ID NO: 157352 - DNA, 30 bp, Homo sapiens
  chr7:98609206-98609236
  hypo
atgcccgcgcgtcacggccttgcaggagct

SEQ ID NO: 157353 - DNA, 30 bp, Homo sapiens
  chr7:98609749-98609779
  hypo
aacacaagaggacacgtcctctcctctctc

SEQ ID NO: 157354 - DNA, 30 bp, Homo sapiens; identical to SEQ ID NO: 74334
  chr7:98609998-98610028
  hypo

SEQ ID NO: 157355 - DNA, 30 bp, Homo sapiens
  chr7:98610516-98610546
  hypo
tctcgttgagcgttcggcgtggatccacgg

SEQ ID NO: 157356 - DNA, 30 bp, Homo sapiens; identical to SEQ ID NO: 74335
  chr7:98625691-98625721
  hypo

SEQ ID NO: 157357 - DNA, 233 bp, Homo sapiens
  chr7:98636064-98636297
  hypo
ttcagttcatgctgcaggatccgcccgaaggcgttgtgttccacgcagaaggtgtggtccagtacaggcgtgatgtcgttctctctgttgaaataagacagaaggatgtaggttagaactctgccaccacgcggggccattgggtagacagaaaacatttacgactgccaaacccggggctgcaagacaggacagcctcgggcagacacagaacctgcgtgggggtggcacag

SEQ ID NO: 157358 - DNA, 222 bp, Homo sapiens; identical to SEQ ID NO: 74337
  chr7:98639037-98639259
  hypo

SEQ ID NO: 157359 - DNA, 217 bp, Homo sapiens
  chr7:98639723-98639940
  hypo
tgttcattcatacttacggggttgattgaagaatccggatttatttgcaacatgtaaatattgtccgtagaatactggaagagcccgtaataaggattcagcatttcatggcacagcaagtaaagccactccctgggagcaaacaacaaaaatgcatttgagacgcgctaaaatttctacattttttttttttccctgagatggagtctcactctgt

SEQ ID NO: 157360 - DNA, 18 bp, Homo sapiens
  chr7:98699284-98699302
  hypo
gggcatggtggctcacgc

SEQ ID NO: 157361 - DNA, 18 bp, Homo sapiens
  chr7:98699541-98699559
  hypo
gcacgaccacgtctcaaa

SEQ ID NO: 157362 - DNA, 44 bp, Homo sapiens; identical to SEQ ID NO: 21588
  chr7:98704237-98704281
  hypo

SEQ ID NO: 157363 - DNA, 163 bp, Homo sapiens; identical to SEQ ID NO: 21589
  chr7:98704340-98704503
  hypo

SEQ ID NO: 157364 - DNA, 42 bp, Homo sapiens; identical to SEQ ID NO: 74341
  chr7:98705847-98705889
  hypo

SEQ ID NO: 157365 - DNA, 103 bp, Homo sapiens
  chr7:98735268-98735371
  hypo
gataaacgatgttgccgacattcctcagccaattagaattcctttcagctgcagtggaggtgaacacagctggaattacagagtggggcgcgtcaccagacgc

SEQ ID NO: 157366 - DNA, 45 bp, Homo sapiens; identical to SEQ ID NO: 74342
  chr7:98738341-98738386
  hypo

SEQ ID NO: 157367 - DNA, 130 bp, Homo sapiens; identical to SEQ ID NO: 74343
  chr7:98775354-98775484
  hypo

SEQ ID NO: 157368 - DNA, 30 bp, Homo sapiens; identical to SEQ ID NO: 21590
  chr7:98805069-98805099
  hypo

SEQ ID NO: 157369 - DNA, 42 bp, Homo sapiens; identical to SEQ ID NO: 74345
  chr7:98814529-98814571
  hypo

SEQ ID NO: 157370 - DNA, 31 bp, Homo sapiens; identical to SEQ ID NO: 21591
  chr7:98821689-98821720
  hypo

SEQ ID NO: 157371 - DNA, 236 bp, Homo sapiens
  chr7:98845138-98845374
  hypo
ggcctgaagggaactccgctgggggaagagggtaccaggaggaaaaatcagctgaccatcttccctccctcccaccagacctactcgggcttgttctgcgtgacggtcaacccctacaagtggctgcccatctacggggcccgtgtggctaacatgtacaagggcaagaagcgcacagagatgccgcctcacctcttctccatctctgacaacgcctaccacgacatgcttatggg

SEQ ID NO: 157372 - DNA, 30 bp, Homo sapiens
  chr7:98865522-98865552
  hypo
agcctgcctctgtgccgcctggagcagatc

SEQ ID NO: 157373 - DNA, 30 bp, Homo sapiens
  chr7:98866018-98866048
  hypo
cgggacagagctagtcggcataaggcccac

SEQ ID NO: 157374 - DNA, 73 bp, Homo sapiens; identical to SEQ ID NO: 21593
  chr7:98870777-98870850
  hypo

SEQ ID NO: 157375 - DNA, 187 bp, Homo sapiens; identical to SEQ ID NO: 74349
  chr7:98876192-98876379
  hypo

SEQ ID NO: 157376 - DNA, 31 bp, Homo sapiens; identical to SEQ ID NO: 74350
  chr7:98877234-98877265
  hypo

SEQ ID NO: 157377 - DNA, 196 bp, Homo sapiens; identical to SEQ ID NO: 74351
  chr7:98879379-98879575
  hypo

SEQ ID NO: 157378 - DNA, 31 bp, Homo sapiens; identical to SEQ ID NO: 21595
  chr7:98881512-98881543
  hypo

SEQ ID NO: 157379 - DNA, 31 bp, Homo sapiens; identical to SEQ ID NO: 74353
  chr7:98882347-98882378
  hypo

SEQ ID NO: 157380 - DNA, 119 bp, Homo sapiens; identical to SEQ ID NO: 74354
  chr7:98885540-98885659
  hypo

SEQ ID NO: 157381 - DNA, 25 bp, Homo sapiens
  chr7:98889549-98889574
  hypo
gagtgaaactcggtctcaggaaaaa

SEQ ID NO: 157382 - DNA, 35 bp, Homo sapiens; identical to SEQ ID NO: 74356
  chr7:98889890-98889925
  hypo

SEQ ID NO: 157383 - DNA, 31 bp, Homo sapiens; identical to SEQ ID NO: 74357
  chr7:98894702-98894733
  hypo

SEQ ID NO: 157384 - DNA, 38 bp, Homo sapiens; identical to SEQ ID NO: 74358
  chr7:98901752-98901790
  hypo

SEQ ID NO: 157385 - DNA, 217 bp, Homo sapiens; identical to SEQ ID NO: 74359
  chr7:98904286-98904503
  hypo

SEQ ID NO: 157386 - DNA, 30 bp, Homo sapiens; identical to SEQ ID NO: 74360
  chr7:98945876-98945906
  hypo

SEQ ID NO: 157387 - DNA, 245 bp, Homo sapiens
  chr7:98955429-98955674
  hypo
gctcctggctaagaccgtttggttcatcttggtagctctagctcctaacacagtgcctggccgtcagcacagatctgtgtggtcacagccctctcggagctccggtgagcacaggcaaggagaaggtcctagcacaggtgtctgctgccaagtcatagtaacaggaagagctctaggagctaagagcagggagaagccactttaggcggaagtggcccgggaaagtggaccgtgggatcatgggg

SEQ ID NO: 157388 - DNA, 30 bp, Homo sapiens; identical to SEQ ID NO: 21597
  chr7:98956010-98956040
  hypo

SEQ ID NO: 157389 - DNA, 45 bp, Homo sapiens; identical to SEQ ID NO: 74363
  chr7:98960331-98960376
  hypo

SEQ ID NO: 157390 - DNA, 147 bp, Homo sapiens; identical to SEQ ID NO: 21598
  chr7:98966331-98966478
  hypo

SEQ ID NO: 157391 - DNA, 96 bp, Homo sapiens; identical to SEQ ID NO: 74365
  chr7:98966738-98966834
  hypo

SEQ ID NO: 157392 - DNA, 30 bp, Homo sapiens; identical to SEQ ID NO: 21600
  chr7:98969184-98969214
  hypo

SEQ ID NO: 157393 - DNA, 117 bp, Homo sapiens
  chr7:98970797-98970914
  hypo
cagtggaaaagagagcggcggctaagggcacctccaatggggagggtgtcggggcaaagcgacctgagacccccagccacatactgcaggacaaaccaatgtcggcaggtgaggaca

SEQ ID NO: 157394 - DNA, 156 bp, Homo sapiens; identical to SEQ ID NO: 115309
  chr7:98971520-98971676
  hypo

SEQ ID NO: 157395 - DNA, 402 bp, Homo sapiens; identical to SEQ ID NO: 115310
  chr7:98971810-98972212
  hypo

SEQ ID NO: 157396 - DNA, 87 bp, Homo sapiens; identical to SEQ ID NO: 74371
  chr7:98985727-98985814
  hypo

SEQ ID NO: 157397 - DNA, 165 bp, Homo sapiens; identical to SEQ ID NO: 74372
  chr7:98991539-98991704
  hypo

SEQ ID NO: 157398 - DNA, 223 bp, Homo sapiens; identical to SEQ ID NO: 74373
  chr7:98994223-98994446
  hypo

SEQ ID NO: 157399 - DNA, 181 bp, Homo sapiens; identical to SEQ ID NO: 74374
  chr7:98997416-98997597
  hypo

SEQ ID NO: 157400 - DNA, 33 bp, Homo sapiens
  chr7:99019873-99019906
  hypo
ggcgtgacacctgcacggcgttcctgaccccgc

SEQ ID NO: 157401 - DNA, 77 bp, Homo sapiens; identical to SEQ ID NO: 74376
  chr7:99020628-99020705
  hypo

SEQ ID NO: 157402 - DNA, 16 bp, Homo sapiens
  chr7:99020764-99020780
  hypo
tggctcacaacaaatc

SEQ ID NO: 157403 - DNA, 74 bp, Homo sapiens; identical to SEQ ID NO: 74378
  chr7:99021092-99021166
  hypo

SEQ ID NO: 157404 - DNA, 30 bp, Homo sapiens; identical to SEQ ID NO: 74379
  chr7:99021445-99021475
  hypo

SEQ ID NO: 157405 - DNA, 121 bp, Homo sapiens; identical to SEQ ID NO: 74380
  chr7:99032513-99032634
  hypo

SEQ ID NO: 157406 - DNA, 71 bp, Homo sapiens; identical to SEQ ID NO: 74381
  chr7:99065117-99065188
  hypo

SEQ ID NO: 157407 - DNA, 31 bp, Homo sapiens; identical to SEQ ID NO: 5704
  chr7:99070937-99070968
  hypo

SEQ ID NO: 157408 - DNA, 37 bp, Homo sapiens
  chr7:99073692-99073729
  hypo
tgggattataggcgtgagccaccgtgcctggccagag

SEQ ID NO: 157409 - DNA, 30 bp, Homo sapiens; identical to SEQ ID NO: 74384
  chr7:99073939-99073969
  hypo

SEQ ID NO: 157410 - DNA, 30 bp, Homo sapiens
  chr7:99074371-99074401
  hypo
cagtatctggttactcgtttagcactgtgt

SEQ ID NO: 157411 - DNA, 236 bp, Homo sapiens; identical to SEQ ID NO: 74385
  chr7:99084624-99084860
  hypo

SEQ ID NO: 157412 - DNA, 33 bp, Homo sapiens; identical to SEQ ID NO: 21610
  chr7:99101318-99101351
  hypo

SEQ ID NO: 157413 - DNA, 245 bp, Homo sapiens
  chr7:99103805-99104050
  hypo
gagactttttaccagcgcttcaggcacttccagtaccatgaggcttcaggaccccgggaggctctcagccaactccgggtgctctgctgtgagtggctgaggcccgagctgcacacgaaggagcagatcctggagctgctggtgctggagcagttcctgaccatcctgcctgaagagttccagccctgggtgagggaacatcaccctgaaagtggagaagaggcggtggccgtgatagaaaatat

SEQ ID NO: 157414 - DNA, 260 bp, Homo sapiens
  chr7:99135319-99135579
  hypo
agtagctggtattgaagagccagccgcacagctgtgtgtgggagccacctgactaagcagccgagacaaggcggacagtataagagaactagtgtaagtgagctgctgatgagagctgctaaataaaactacatttcacctgcctacggccccctgagtgttttcagctatctgctcatccactcactccctttggacctcagcatgagttggaacctgaccctgggcatgacagttggcgtagtcgtgaacctgacacc

SEQ ID NO: 157415 - DNA, 451 bp, Homo sapiens; identical to SEQ ID NO: 74388
  chr7:99140776-99141227
  hypo

SEQ ID NO: 157416 - DNA, 1137 bp, Homo sapiens; identical to SEQ ID NO: 44461
  chr7:99155931-99157068
  hypo

SEQ ID NO: 157417 - DNA, 190 bp, Homo sapiens
  chr7:99161481-99161671
  hypo
gtaggcatacttctccgccttcccaccacccggattcatagtgtgaattcctgcccggccctgagtcatacccaggcaagtgctttctctggagaaacacttgccgtccttacagcaggaatctccaagagatggcccaagtatcggcttcccatcgatattgctcgtccctgctcggaaactccttttc

SEQ ID NO: 157418 - DNA, 30 bp, Homo sapiens
  chr7:99177983-99178013
  hypo
aaacgcagttggcggcggggcccagcttgc

SEQ ID NO: 157419 - DNA, 75 bp, Homo sapiens
  chr7:99191694-99191769
  hypo
atttcattaatatcacggtgtgtaaactctgtaatatgataaatatcagaagcgatataccgttaatatcacagt

SEQ ID NO: 157420 - DNA, 239 bp, Homo sapiens
  chr7:99227291-99227530
  hypo
gaagccctacaagtgcggggactgctggaagagcttcagccgcaggcagcacctgcaggtgcaccggaggacgcacaccggggagaagccctacacctgcgagtgtggcaagagcttcagcaggaatgccaatctggcggtgcaccggcgtgcccacactggcgagaagccatatgggtgccaggtgtgcgggaagcggttcagcaaaggggagcggctggtccgacaccagagaatcc

SEQ ID NO: 157421 - DNA, 30 bp, Homo sapiens; identical to SEQ ID NO: 21613
  chr7:99236608-99236638
  hypo

SEQ ID NO: 157422 - DNA, 39 bp, Homo sapiens; identical to SEQ ID NO: 74392
  chr7:99391323-99391362
  hypo

SEQ ID NO: 157423 - DNA, 99 bp, Homo sapiens; identical to SEQ ID NO: 74393
  chr7:99391421-99391520
  hypo

SEQ ID NO: 157424 - DNA, 31 bp, Homo sapiens; identical to SEQ ID NO: 21614
  chr7:99538810-99538841
  hypo

SEQ ID NO: 157425 - DNA, 145 bp, Homo sapiens; identical to SEQ ID NO: 74395
  chr7:99552783-99552928
  hypo

SEQ ID NO: 157426 - DNA, 31 bp, Homo sapiens; identical to SEQ ID NO: 21615
  chr7:99589185-99589216
  hypo

SEQ ID NO: 157427 - DNA, 94 bp, Homo sapiens; identical to SEQ ID NO: 74397
  chr7:99602414-99602508
  hypo

SEQ ID NO: 157428 - DNA, 31 bp, Homo sapiens; identical to SEQ ID NO: 21616
  chr7:99611394-99611425
  hypo

SEQ ID NO: 157429 - DNA, 30 bp, Homo sapiens; identical to SEQ ID NO: 115332
  chr7:99613101-99613131
  hypo

SEQ ID NO: 157430 - DNA, 127 bp, Homo sapiens; identical to SEQ ID NO: 115333
  chr7:99613132-99613259
  hypo

SEQ ID NO: 157431 - DNA, 29 bp, Homo sapiens
  chr7:99625681-99625710
  hypo
aattaagtacttggggctgggcgcagtga

SEQ ID NO: 157432 - DNA, 17 bp, Homo sapiens
  chr7:99648527-99648544
  hypo
ttgtgtggccgggcgcg

SEQ ID NO: 157433 - DNA, 17 bp, Homo sapiens
  chr7:99649203-99649220
  hypo
cacggcgccgggccccc

SEQ ID NO: 157434 - DNA, 30 bp, Homo sapiens
  chr7:99652444-99652474
  hypo
gagtgagacgctgtctcaaaaaaaaaaaaa

SEQ ID NO: 157435 - DNA, 30 bp, Homo sapiens
  chr7:99662308-99662338
  hypo
cattgcagcagcatcgattccggtgataga

SEQ ID NO: 157436 - DNA, 132 bp, Homo sapiens
  chr7:99678692-99678824
  hypo
taatacaactgaaaacggagcctgagccaggtgtatcacgcgatgcactgggctccagcaggattacccctggaatcggcgtctgcacccactcccagccctcgtgctaactgcgtacgcttagcagaattt

SEQ ID NO: 157437 - DNA, 314 bp, Homo sapiens; identical to SEQ ID NO: 74401
  chr7:99691589-99691903
  hypo

SEQ ID NO: 157438 - DNA, 255 bp, Homo sapiens
  chr7:99696721-99696976
  hypo
cgagtgacgattccacgcacagttaccaacttccccacagagtcagcccgcacttcccggatcacacgaggcttgttgctgctagggccttgaaaatacagctcactaaggggagaaaacagtcacaaacaagatcctggagaaccaatccctacatctttcccgacagagaccactcacaatctgcgcatgagttcagcagggtactggttctgggggcttcggaccatcccagggtcccgactccgctgctcc

SEQ ID NO: 157439 - DNA, 30 bp, Homo sapiens
  chr7:99697291-99697321
  hypo
ttgagtccaccaactcggggtcatcctcgg

SEQ ID NO: 157440 - DNA, 30 bp, Homo sapiens; identical to SEQ ID NO: 21619
  chr7:99707615-99707645
  hypo

SEQ ID NO: 157441 - DNA, 166 bp, Homo sapiens; identical to SEQ ID NO: 74403
  chr7:99723168-99723334
  hypo

SEQ ID NO: 157442 - DNA, 207 bp, Homo sapiens; identical to SEQ ID NO: 115344
  chr7:99725599-99725806
  hypo

SEQ ID NO: 157443 - DNA, 121 bp, Homo sapiens
  chr7:99734870-99734991
  hypo
tacaggtgagccactgcacccggccacagcaatatgtttagacttacgttttctagcagcaaggccaacactaaaggttataagatgttttcttgctttttaaaatttgttctttcttttt

SEQ ID NO: 157444 - DNA, 79 bp, Homo sapiens
  chr7:99751551-99751630
  hypo
aggcagaaccgaggtcgggagcccattgatgtctgagcctgccggagggcgagggtcggagaagcggattgggtcctgg

SEQ ID NO: 157445 - DNA, 24 bp, Homo sapiens
  chr7:99761982-99762006
  hypo
ttcctttaaaaccccccgctctcg

SEQ ID NO: 157446 - DNA, 30 bp, Homo sapiens
  chr7:99775865-99775895
  hypo
taccccaggggcagtcgtagatatttttac

SEQ ID NO: 157447 - DNA, 38 bp, Homo sapiens; identical to SEQ ID NO: 74405
  chr7:99782062-99782100
  hypo

SEQ ID NO: 157448 - DNA, 88 bp, Homo sapiens
  chr7:99796108-99796196
  hypo
gggtgctgacggacgcggattgtgagagcgtctacccagttgtgtatgcctctcatcgaggcctggcctctgccgcaggcgaatttct

SEQ ID NO: 157449 - DNA, 289 bp, Homo sapiens
  chr7:99819893-99820182
  hypo
ccatcagactagctccggggcgggtctgtgtctcccacctcagactagctccagggcaggtccatgtctcccacctcagactagttctggggcgggtctttgtctccccgctcagactagctctggaacgggtccttgccttcccactcagattagttccggggtgggtccatgtctccccgctcagactagctccagggaaggtctgtgtctcttccctcagatgagctcctggcaaagcctcccccgtcagactaagactcctaggcagagccgtgcctccccctgg

SEQ ID NO: 157450 - DNA, 266 bp, Homo sapiens; identical to SEQ ID NO: 21621
  chr7:99839731-99839997
  hypo

SEQ ID NO: 157451 - DNA, 93 bp, Homo sapiens; identical to SEQ ID NO: 74407
  chr7:99849462-99849555
  hypo

SEQ ID NO: 157452 - DNA, 31 bp, Homo sapiens; identical to SEQ ID NO: 5713
  chr7:99869133-99869164
  hypo

SEQ ID NO: 157453 - DNA, 31 bp, Homo sapiens; identical to SEQ ID NO: 21623
  chr7:99939850-99939881
  hypo

SEQ ID NO: 157454 - DNA, 142 bp, Homo sapiens; identical to SEQ ID NO: 74410
  chr7:99964959-99965101
  hypo

SEQ ID NO: 157455 - DNA, 77 bp, Homo sapiens; identical to SEQ ID NO: 21624
  chr7:100024903-100024980
  hypo

SEQ ID NO: 157456 - DNA, 136 bp, Homo sapiens; identical to SEQ ID NO: 21625
  chr7:100025339-100025475
  hypo

SEQ ID NO: 157457 - DNA, 129 bp, Homo sapiens; identical to SEQ ID NO: 21626
  chr7:100030627-100030756
  hypo

SEQ ID NO: 157458 - DNA, 449 bp, Homo sapiens
  chr7:100034727-100035176
  hypo
tgctgggattacaggcatgagccaccgcacctggccataaatggggcagctttaaggtaacggtccagtgtgccctgacctcccactcagacctgcacagcatttccggtgttccgttgcctccaaactcggaccggagttggcctgtatgagtgcgggcgagggtcgccgaccccatcccggactcccttctgggacacagcaactcttgcagctttttgtgactacttttaccttcgagagttccctgaaatattaatttgtataaaaagtagatatctggcacgggtgcggtagcgcatacctgcaattccaactctgggaggccaaggcgggaagatgtcttgaaaccctgagctggagacaagcatgggcaacataccgagactccacaccaccattcccaatctctaccaaaagaatttaattttagccgggcgtggtggtgg

SEQ ID NO: 157459 - DNA, 31 bp, Homo sapiens; identical to SEQ ID NO: 74414
  chr7:100039691-100039722
  hypo

SEQ ID NO: 157460 - DNA, 30 bp, Homo sapiens; identical to SEQ ID NO: 74415
  chr7:100054427-100054457
  hypo

SEQ ID NO: 157461 - DNA, 278 bp, Homo sapiens; identical to SEQ ID NO: 21627
  chr7:100064565-100064843
  hypo

SEQ ID NO: 157462 - DNA, 38 bp, Homo sapiens; identical to SEQ ID NO: 74417
  chr7:100065386-100065424
  hypo

SEQ ID NO: 157463 - DNA, 31 bp, Homo sapiens; identical to SEQ ID NO: 21628
  chr7:100076281-100076312
  hypo

SEQ ID NO: 157464 - DNA, 30 bp, Homo sapiens
  chr7:100080412-100080442
  hypo
atccccggactaaagcgtctctcagagagg

SEQ ID NO: 157465 - DNA, 30 bp, Homo sapiens
  chr7:100085810-100085840
  hypo
gccggaaggttcctccgcagaagcccaggc

SEQ ID NO: 157466 - DNA, 229 bp, Homo sapiens; identical to SEQ ID NO: 74419
  chr7:100086231-100086460
  hypo

SEQ ID NO: 157467 - DNA, 158 bp, Homo sapiens; identical to SEQ ID NO: 21629
  chr7:100088161-100088319
  hypo

SEQ ID NO: 157468 - DNA, 30 bp, Homo sapiens
  chr7:100088636-100088666
  hypo
ctccgcctccacctccggagtccggcaggt

SEQ ID NO: 157469 - DNA, 181 bp, Homo sapiens
  chr7:100098053-100098234
  hypo
gatcatagctcattgcagcctcaccgtcctggcttctagcgatcctcctgacttggcctaatagttgtttcttaaagaattaactactcagaagggggagggtgggaagctgcatctctatttcatttattatgccaaaggacttcagtgtaaaaacaaacattaaaaggaaaatgtgggc

SEQ ID NO: 157470 - DNA, 112 bp, Homo sapiens
  chr7:100100529-100100641
  hypo
gcggtttccaggtaccgtgtgttggagtgtctcagtgctagctgttcagatccaggtgtccctcatgcatgtccctgtagagtagtggtccactctgcgggggtccagcttc

SEQ ID NO: 157471 - DNA, 31 bp, Homo sapiens; identical to SEQ ID NO: 21630
  chr7:100116513-100116544
  hypo

SEQ ID NO: 157472 - DNA, 26 bp, Homo sapiens
  chr7:100153793-100153819
  hypo
cagccacaatggctcacgcctgcaat

SEQ ID NO: 157473 - DNA, 26 bp, Homo sapiens
  chr7:100153938-100153964
  hypo
aaacaaacgaacgaacaaacaaaacc

SEQ ID NO: 157474 - DNA, 31 bp, Homo sapiens; identical to SEQ ID NO: 21631
  chr7:100160494-100160525
  hypo

SEQ ID NO: 157475 - DNA, 34 bp, Homo sapiens; identical to SEQ ID NO: 21632
  chr7:100170148-100170182
  hypo

SEQ ID NO: 157476 - DNA, 30 bp, Homo sapiens; identical to SEQ ID NO: 74426
  chr7:100171602-100171632
  hypo

SEQ ID NO: 157477 - DNA, 30 bp, Homo sapiens; identical to SEQ ID NO: 74427
  chr7:100174929-100174959
  hypo

SEQ ID NO: 157478 - DNA, 187 bp, Homo sapiens; identical to SEQ ID NO: 74428
  chr7:100179297-100179484
  hypo

SEQ ID NO: 157479 - DNA, 414 bp, Homo sapiens
  chr7:100179713-100180127
  hypo
gcttgttgttgctgacgatgaggaccctcaggggcagctggcagatgtagggtggcagcagcgacagctggtttcggctgtggaagggagaaaggcagcggactggctccccaggcatggcatcccagcactgccatcctctcggggtcactgggtgggtcactcagtagtacttgagactgagaagcacacgctcccacgtggccctggctcggcctccctacctgaggttgaggtaggtgagggctgtgagattccccaaggctgggttcaggcatctcaggcaattgtggtagaggctcaggccctccagggacaccagctggcacgccgcctcgggcacctcgggaaaccggttccgggacaggtctggggaaaaggaggtgtcggggagagttgcggaaaggcccagcc

SEQ ID NO: 157480 - DNA, 37 bp, Homo sapiens; identical to SEQ ID NO: 74430
  chr7:100189308-100189345
  hypo

SEQ ID NO: 157481 - DNA, 31 bp, Homo sapiens; identical to SEQ ID NO: 74431
  chr7:100190396-100190427
  hypo

SEQ ID NO: 157482 - DNA, 87 bp, Homo sapiens; identical to SEQ ID NO: 74432
  chr7:100198414-100198501
  hypo

SEQ ID NO: 157483 - DNA, 31 bp, Homo sapiens; identical to SEQ ID NO: 21634
  chr7:100212727-100212758
  hypo

SEQ ID NO: 157484 - DNA, 30 bp, Homo sapiens; identical to SEQ ID NO: 21635
  chr7:100218066-100218096
  hypo

SEQ ID NO: 157485 - DNA, 292 bp, Homo sapiens; identical to SEQ ID NO: 74435
  chr7:100218440-100218732
  hypo

SEQ ID NO: 157486 - DNA, 30 bp, Homo sapiens
  chr7:100228514-100228544
  hypo
gctctgagcggccttcgatgcagccgaaga

SEQ ID NO: 157487 - DNA, 30 bp, Homo sapiens; identical to SEQ ID NO: 21637
  chr7:100229850-100229880
  hypo

SEQ ID NO: 157488 - DNA, 96 bp, Homo sapiens
  chr7:100246354-100246450
  hypo
gctgcagaacgtagccgtcatgtactggaatggccgtggtgtgggtggctccactgtccagcacgaggccagtggaccgcccgtttgcaaagctgg

SEQ ID NO: 157489 - DNA, 30 bp, Homo sapiens; identical to SEQ ID NO: 21638
  chr7:100255028-100255058
  hypo

SEQ ID NO: 157490 - DNA, 33 bp, Homo sapiens; identical to SEQ ID NO: 74438
  chr7:100258216-100258249
  hypo

SEQ ID NO: 157491 - DNA, 254 bp, Homo sapiens; identical to SEQ ID NO: 74439
  chr7:100275848-100276102
  hypo

SEQ ID NO: 157492 - DNA, 197 bp, Homo sapiens
  chr7:100279780-100279977
  hypo
cccccaggcaggaacggatataatcgtggacatcatagggggattccacctccttgaggatcgctacagccatgggcactgcaggatgagcgaaggctgtcagggccccctggccgggtctggagacccaggtcccgcccacctcctgggagccgctcgcccaccgtccaggctgcccgtggcgctcagcgtgtgca

SEQ ID NO: 157493 - DNA, 283 bp, Homo sapiens
  chr7:100281491-100281774
  hypo
gcaccgacaaggaccggctcatcgtcgggagcaggttctggtccccgcctctgaggagcaaattgtggattcttaggaccccaaatccatctctggtctgcccccatcccccccccaccctgtatcctgagggctcgcacgcaccacgcacctggggggtttgagcgcctggagctgctgcaggaatgccgtgagctgctgctgctgctgctgtggcggcggcggtggtggcggtgtcaggtcccccagagctgccttttctcggagcgcgcactgtgggagc

SEQ ID NO: 157494 - DNA, 30 bp, Homo sapiens; identical to SEQ ID NO: 21641
  chr7:100283197-100283227
  hypo

SEQ ID NO: 157495 - DNA, 31 bp, Homo sapiens; identical to SEQ ID NO: 21642
  chr7:100283961-100283992
  hypo

SEQ ID NO: 157496 - DNA, 114 bp, Homo sapiens; identical to SEQ ID NO: 74444
  chr7:100284948-100285062
  hypo

SEQ ID NO: 157497 - DNA, 682 bp, Homo sapiens; identical to SEQ ID NO: 74445
  chr7:100285460-100286142
  hypo

SEQ ID NO: 157498 - DNA, 30 bp, Homo sapiens
  chr7:100287121-100287151
  hypo
gagggaggctggcccggcttggtgctgcag

SEQ ID NO: 157499 - DNA, 50 bp, Homo sapiens; identical to SEQ ID NO: 74446
  chr7:100388724-100388774
  hypo

SEQ ID NO: 157500 - DNA, 30 bp, Homo sapiens
  chr7:100392915-100392945
  hypo
ctgtgtatggagcctcgagatgcgccacct

SEQ ID NO: 157501 - DNA, 245 bp, Homo sapiens
  chr7:100400265-100400510
  hypo
ccaagcaccggcgtccgtttctgggttccaccaccaactaccgcccttttcactacctcaccccacaccccttcataggacacagcttgggggtcccaggcggggtccggggatgtgggatgaccaaggcactgttctggaaacagacatgatgatgggcccctgtttcaacttgggcaaaggaggccatagtgaaacaggttccctccaacacaaagttatgacaaggacggtagaaaaacaaa

SEQ ID NO: 157502 - DNA, 860 bp, Homo sapiens
  chr7:100402442-100403302
  hypo
tggaaaaagagaacccgagttgacacattgttaccgtgagagccgggcctggaatgcagatagatgcacaaagatagctagaagtgagaggcggaagcgcgatggcccagggctgtgatggcaggaggaggtgaggcgggcaggctggccccaaagagtccttgggtcctcagctccatggggctgtgactgctcctctggggcccttctaggcatggcatgagcgcagtgcaagaagacagcattggcacccgaagctgaccccaaaagcccctggagaccccgtgggcctgactccagctgccccgctctcccagccccactccagctcctgccactgcttactcagcagagatctggctgaccagctcgaaggagccaaagccagcggctgcgaaactttcttcgtatcttcccattttgatggcccgaagccactcgcccacagagccaaaagctgagtagtgaggctgccgctggtccaggagagggtgtgaggccctagggggcaaggatggggaggaatgctgagtaccaggcccaggtccgggggaggaggtggaacccagccttgcagaggcggacagaggccctcccacccaacaccaatgaacggacacttctgggcaaggagtgggggcagagagcgggaaggagggcccattctctgcagtcctcacccgccattctcccgggccacgattttgaggctggcggggttccggatcatcttgtccagggcgctgaccacctgggggaagcggggccgggcattccggtctttctgccaacagtccagcatgagctggtggagggaggtgggacagtctgggggcgggggcagccggtagtcctgttca

SEQ ID NO: 157503 - DNA, 270 bp, Homo sapiens
  chr7:100405017-100405287
  hypo
ttctcctccaggaatcgggaaaggccaaagtcagacactttgcagacgaggttgctgttgactaggatgttgcgagcagccaggtctcggtggacgtagctcatctcggcaaggtaccgcatgcccgaggcgatgccccgcagcatgcccacgagctggatgactgtgaactgtccgtcgtttagctggagagcagatagggtgggggcttggtgaggacagcccacccaccgttccccctcccatccacatcttttttttttagagaca

SEQ ID NO: 157504 - DNA, 30 bp, Homo sapiens
  chr7:100405525-100405555
  hypo
cagatgttgagtcaccgtacccagcctccc

SEQ ID NO: 157505 - DNA, 81 bp, Homo sapiens; identical to SEQ ID NO: 21645
  chr7:100407981-100408062
  hypo

SEQ ID NO: 157506 - DNA, 515 bp, Homo sapiens
  chr7:100410406-100410921
  hypo
ctgtgagaatcatgacgggcatgctgttggtgaccacgccctccaggcggatgatattggggtgctcgaactggcccatgatggaggcctcgctcagaaactcacgccgctgccgctccgtgtagccacccttcagggtcttgattgccacacagctctccttcttccctggggccttgagccgcccccggcacacctcgccaaactcaccttcaaacaaggacgcagaggtcatcagctctcccgctccagtgtggccctgcccacccccgcttcgttcccaggtgcccgggcagccttcggctctcacctgcaccaatcacctcttcaatcttgacgtaggagacatcgatctcttttgcaaattccctcacagcctcattagggtcttcataagtgaaggggtcgatgtagaccttagtacctgagaaatcaggcagggccccgtcagctgggaattaactcccactggactcggaggctcggctcatagcttttagccccaaacccctgtc

SEQ ID NO: 157507 - DNA, 38 bp, Homo sapiens; identical to SEQ ID NO: 74451
  chr7:100414989-100415027
  hypo

SEQ ID NO: 157508 - DNA, 30 bp, Homo sapiens; identical to SEQ ID NO: 74452
  chr7:100415897-100415927
  hypo

SEQ ID NO: 157509 - DNA, 45 bp, Homo sapiens; identical to SEQ ID NO: 21647
  chr7:100417051-100417096
  hypo

SEQ ID NO: 157510 - DNA, 99 bp, Homo sapiens; identical to SEQ ID NO: 74454
  chr7:100420025-100420124
  hypo

SEQ ID NO: 157511 - DNA, 414 bp, Homo sapiens
  chr7:100421145-100421559
  hypo
ttccagcccccagcgcgcgggccagaggcctcgcaactacatcggctgccctccaggccacgggcctgctggctggaatcccaccttggctgtggctgagccctgggggcacccaggtaccttgatgtaggggttctccatccaggctggcgtgagggccgtggccgtgtccgcatcgctctcatagtagaagacggtgaaggtctccttgcaggagcgcccagcccgaggcagggacaggcactcgagcatggtgaagcgcagcgtggcgtacacgtggacggcgccccgccgtgggacccaacctgtgcgaagccagtgggcctggcccggggcacgctgcacgtcacacacttcgtaggtgcgcacgctgtgctgttcctcatccaggccgctcagttcctcccactgtgc

SEQ ID NO: 157512 - DNA, 1502 bp, Homo sapiens; identical to SEQ ID NO: 115377
  chr7:100424340-100425842
  hypo

SEQ ID NO: 157513 - DNA, 30 bp, Homo sapiens; identical to SEQ ID NO: 74457
  chr7:100454498-100454528
  hypo

SEQ ID NO: 157514 - DNA, 123 bp, Homo sapiens; identical to SEQ ID NO: 21650
  chr7:100480481-100480604
  hypo

SEQ ID NO: 157515 - DNA, 30 bp, Homo sapiens; identical to SEQ ID NO: 74459
  chr7:100483856-100483886
  hypo

SEQ ID NO: 157516 - DNA, 298 bp, Homo sapiens; identical to SEQ ID NO: 74460
  chr7:100489967-100490265
  hypo

SEQ ID NO: 157517 - DNA, 44 bp, Homo sapiens; identical to SEQ ID NO: 74461
  chr7:100490910-100490954
  hypo

SEQ ID NO: 157518 - DNA, 144 bp, Homo sapiens; identical to SEQ ID NO: 74462
  chr7:100512578-100512722
  hypo

SEQ ID NO: 157519 - DNA, 92 bp, Homo sapiens
  chr7:100514708-100514800
  hypo
ggcccttccaaattctttcttgcacaagatccaagaaccctctcttgcggactgaattaggacctgtttccggtaaaagtgctttcctgaat

SEQ ID NO: 157520 - DNA, 153 bp, Homo sapiens; identical to SEQ ID NO: 115386
  chr7:100608955-100609108
  hypo

SEQ ID NO: 157521 - DNA, 138 bp, Homo sapiens; identical to SEQ ID NO: 115387
  chr7:100609360-100609498
  hypo

SEQ ID NO: 157522 - DNA, 39 bp, Homo sapiens; identical to SEQ ID NO: 74465
  chr7:100650570-100650609
  hypo

SEQ ID NO: 157523 - DNA, 59 bp, Homo sapiens
  chr7:100731010-100731069
  hypo
cagacccacacccaccgcgtggtggacctggtgggctacagggccgggtggtatgatga

SEQ ID NO: 157524 - DNA, 344 bp, Homo sapiens; identical to SEQ ID NO: 74467
  chr7:100732094-100732438
  hypo

SEQ ID NO: 157525 - DNA, 21 bp, Homo sapiens
  chr7:100768457-100768478
  hypo
ccaaatccagctgggcgcggt

SEQ ID NO: 157526 - DNA, 30 bp, Homo sapiens; identical to SEQ ID NO: 74469
  chr7:100803926-100803956
  hypo

SEQ ID NO: 157527 - DNA, 675 bp, Homo sapiens; identical to SEQ ID NO: 44500
  chr7:100808389-100809064
  hypo

SEQ ID NO: 157528 - DNA, 180 bp, Homo sapiens; identical to SEQ ID NO: 115401
  chr7:100823170-100823350
  hypo

SEQ ID NO: 157529 - DNA, 431 bp, Homo sapiens; identical to SEQ ID NO: 44507
  chr7:100823380-100823811
  hypo

SEQ ID NO: 157530 - DNA, 37 bp, Homo sapiens; identical to SEQ ID NO: 74473
  chr7:100834972-100835009
  hypo

SEQ ID NO: 157531 - DNA, 96 bp, Homo sapiens; identical to SEQ ID NO: 74474
  chr7:100838060-100838156
  hypo

SEQ ID NO: 157532 - DNA, 85 bp, Homo sapiens; identical to SEQ ID NO: 74475
  chr7:100840808-100840893
  hypo

SEQ ID NO: 157533 - DNA, 24 bp, Homo sapiens
  chr7:100841132-100841156
  hypo
agcgagactctgtctcaacaacaa

SEQ ID NO: 157534 - DNA, 30 bp, Homo sapiens; identical to SEQ ID NO: 74477
  chr7:100849043-100849073
  hypo

SEQ ID NO: 157535 - DNA, 306 bp, Homo sapiens; identical to SEQ ID NO: 74478
  chr7:100849346-100849652
  hypo

SEQ ID NO: 157536 - DNA, 30 bp, Homo sapiens
  chr7:100856414-100856444
  hypo
aatggggagcgtgtcgtaggccacgttccg

SEQ ID NO: 157537 - DNA, 30 bp, Homo sapiens; identical to SEQ ID NO: 74479
  chr7:100859446-100859476
  hypo

SEQ ID NO: 157538 - DNA, 288 bp, Homo sapiens
  chr7:100860096-100860384
  hypo
tccaccgcccagctccgggcctcacgtgctttgctgtcctccctctcactcgacttccctccctttcttccttcccattcttaaactcttctcacccaggaacactctgaccccaaggagggcagggtgggagtggtgcccaggaattccgagtccctttgcatagggaggctggaaaccccagttcagggtagtgatgggcgaggggcttggcgcgactcagcctcaagagcacgctgggcgggggacgggccagacacctcctcgagcctccgaccctctccgggc

SEQ ID NO: 157539 - DNA, 95 bp, Homo sapiens; identical to SEQ ID NO: 74480
  chr7:100865917-100866012
  hypo

SEQ ID NO: 157540 - DNA, 158 bp, Homo sapiens; identical to SEQ ID NO: 74481
  chr7:100866247-100866405
  hypo

SEQ ID NO: 157541 - DNA, 104 bp, Homo sapiens
  chr7:100870051-100870155
  hypo
tctccaaaaagaaaagaaaagactatttcggggctgaacaacaccatctgtgcttctccgtggcatcctaggctgggattcccgtccagcttgcactgtcagca

SEQ ID NO: 157542 - DNA, 30 bp, Homo sapiens
  chr7:100872362-100872392
  hypo
tgagcctctgcgcccggccagtggtttaca

SEQ ID NO: 157543 - DNA, 30 bp, Homo sapiens; identical to SEQ ID NO: 21655
  chr7:100877568-100877598
  hypo

SEQ ID NO: 157544 - DNA, 30 bp, Homo sapiens; identical to SEQ ID NO: 21656
  chr7:100883537-100883567
  hypo

SEQ ID NO: 157545 - DNA, 30 bp, Homo sapiens; identical to SEQ ID NO: 74484
  chr7:100889031-100889061
  hypo

SEQ ID NO: 157546 - DNA, 20 bp, Homo sapiens
  chr7:100897026-100897046
  hypo
gccaccgtgcccagccagca

SEQ ID NO: 157547 - DNA, 30 bp, Homo sapiens; identical to SEQ ID NO: 74485
  chr7:100913042-100913072
  hypo

SEQ ID NO: 157548 - DNA, 30 bp, Homo sapiens; identical to SEQ ID NO: 21657
  chr7:100921854-100921884
  hypo

SEQ ID NO: 157549 - DNA, 92 bp, Homo sapiens; identical to SEQ ID NO: 74487
  chr7:100961429-100961521
  hypo

SEQ ID NO: 157550 - DNA, 23 bp, Homo sapiens
  chr7:100967003-100967026
  hypo
tgagccgccgcgcccagcccggt

SEQ ID NO: 157551 - DNA, 411 bp, Homo sapiens; identical to SEQ ID NO: 115412
  chr7:101006042-101006453
  hypo

SEQ ID NO: 157552 - DNA, 30 bp, Homo sapiens
  chr7:101063317-101063347
  hypo
gacggtggtccagcgcgtgtaccagagctg

SEQ ID NO: 157553 - DNA, 158 bp, Homo sapiens
  chr7:101086133-101086291
  hypo
gtgtggaagtgtgcacgagtgtgtttgtgcgagtgtgcaagcacgagtgtgcacacgagtgtgagagagcaaatgagtgtgtgactgtgtgagggtgtgcgtatgtgttagtttgtgagagcttgcaagtaagtttgtgcaagcgtgtgaaggtgtga

SEQ ID NO: 157554 - DNA, 35 bp, Homo sapiens
  chr7:101086745-101086780
  hypo
cagtgcgtctccaaacgtcgcgcctgctgctacca

SEQ ID NO: 157555 - DNA, 203 bp, Homo sapiens; identical to SEQ ID NO: 74490
  chr7:101131925-101132128
  hypo

SEQ ID NO: 157556 - DNA, 30 bp, Homo sapiens
  chr7:101178281-101178311
  hypo
atgaacacaggtgtgcgggagacatctgtg

SEQ ID NO: 157557 - DNA, 78 bp, Homo sapiens; identical to SEQ ID NO: 21660
  chr7:101195309-101195387
  hypo

SEQ ID NO: 157558 - DNA, 30 bp, Homo sapiens
  chr7:101196672-101196702
  hypo
cttcacgttccctcccgcctccttggctgt

SEQ ID NO: 157559 - DNA, 30 bp, Homo sapiens
  chr7:101196989-101197019
  hypo
tccctctcaacggaccgggttctcccgtga

SEQ ID NO: 157560 - DNA, 60 bp, Homo sapiens
  chr7:101210705-101210765
  hypo
gccccgttgccatggcgattaccatgtctcagcttactgaggtggcgttgcaaacctgta

SEQ ID NO: 157561 - DNA, 424 bp, Homo sapiens; identical to SEQ ID NO: 74492
  chr7:101241665-101242089
  hypo

SEQ ID NO: 157562 - DNA, 20 bp, Homo sapiens
  chr7:101262881-101262901
  hypo
accagaggccgggcacggtg

SEQ ID NO: 157563 - DNA, 31 bp, Homo sapiens; identical to SEQ ID NO: 21662
  chr7:101270579-101270610
  hypo

SEQ ID NO: 157564 - DNA, 58 bp, Homo sapiens
  chr7:101279963-101280021
  hypo
cctcgtcctgctggacggctgaggaaactgaggcctggagcagcgaggggcctgctca

SEQ ID NO: 157565 - DNA, 31 bp, Homo sapiens; identical to SEQ ID NO: 21663
  chr7:101382584-101382615
  hypo

SEQ ID NO: 157566 - DNA, 337 bp, Homo sapiens; identical to SEQ ID NO: 115420
  chr7:101457432-101457769
  hypo

SEQ ID NO: 157567 - DNA, 468 bp, Homo sapiens; identical to SEQ ID NO: 5742
  chr7:101458245-101458713
  hypo

SEQ ID NO: 157568 - DNA, 191 bp, Homo sapiens; identical to SEQ ID NO: 5743
  chr7:101459182-101459373
  hypo

SEQ ID NO: 157569 - DNA, 497 bp, Homo sapiens; identical to SEQ ID NO: 115423
  chr7:101460544-101461041
  hypo

SEQ ID NO: 157570 - DNA, 147 bp, Homo sapiens; identical to SEQ ID NO: 74500
  chr7:101465440-101465587
  hypo

SEQ ID NO: 157571 - DNA, 455 bp, Homo sapiens; identical to SEQ ID NO: 74501
  chr7:101475653-101476108
  hypo

SEQ ID NO: 157572 - DNA, 38 bp, Homo sapiens; identical to SEQ ID NO: 74502
  chr7:101476345-101476383
  hypo

SEQ ID NO: 157573 - DNA, 30 bp, Homo sapiens; identical to SEQ ID NO: 74503
  chr7:101492262-101492292
  hypo

SEQ ID NO: 157574 - DNA, 140 bp, Homo sapiens; identical to SEQ ID NO: 74504
  chr7:101497174-101497314
  hypo

SEQ ID NO: 157575 - DNA, 153 bp, Homo sapiens; identical to SEQ ID NO: 21670
  chr7:101504315-101504468
  hypo

SEQ ID NO: 157576 - DNA, 30 bp, Homo sapiens; identical to SEQ ID NO: 21671
  chr7:101512514-101512544
  hypo

SEQ ID NO: 157577 - DNA, 43 bp, Homo sapiens; identical to SEQ ID NO: 74507
  chr7:101521620-101521663
  hypo

SEQ ID NO: 157578 - DNA, 57 bp, Homo sapiens; identical to SEQ ID NO: 74508
  chr7:101533918-101533975
  hypo

SEQ ID NO: 157579 - DNA, 174 bp, Homo sapiens; identical to SEQ ID NO: 21672
  chr7:101536662-101536836
  hypo

SEQ ID NO: 157580 - DNA, 275 bp, Homo sapiens
  chr7:101543483-101543758
  hypo
cactgaggattgacgcggcccctttaaaatcgcatctccgctcttggcaccaggagctgtcatgtagtgtaacctgttggtgcccagaacccaggtttcctggtggcagccagcggtaccggtgccaggaggcagcgaaggaatcacttgcgacgcccgctctctctgccatacgagtgtcgttctgcggggccatctggctggcagcagctctcagccaatggcaggatgttgtaaacctcactcgctgaatgcggcaccgaaaatcttgaaaa

SEQ ID NO: 157581 - DNA, 51 bp, Homo sapiens
  chr7:101556167-101556218
  hypo
atacgccttctcacacgtgacccgtgactcatgggccgaggcctctgcatt

SEQ ID NO: 157582 - DNA, 30 bp, Homo sapiens
  chr7:101556668-101556698
  hypo
ccagcagcaagttgccgcaggcgcactggc

SEQ ID NO: 157583 - DNA, 112 bp, Homo sapiens; identical to SEQ ID NO: 5746
  chr7:101559393-101559505
  hypo

SEQ ID NO: 157584 - DNA, 351 bp, Homo sapiens
  chr7:101566715-101567066
  hypo
ccccagccctcatcctggtgacgtcagtcggcccagtcctactccagaacgcttcttgggtgtctgtctgcaggactttgctcagttaatttttgtctcctctaaaacagaccccgttgctctgggaggagagccgagctgcggctcaggggccgtcactggtcatttttgccctgatgtatttttgcctctacatttcttgatctctggaacgttaatcccaacgatgcctggtctgcggtgctcacagtctgtgtctgtgctttctacacctgtcctgctcagatgcacatgatgtcacacccaggtctccatcctggctcttgttggctgcggcggcagccctgactg

SEQ ID NO: 157585 - DNA, 284 bp, Homo sapiens
  chr7:101583546-101583830
  hypo
taatgttcgcaaagctggtcagtttccaatctggtgtcaccagtggaaaaaagatgtaagtgttgttggcaagagaagctcacccagagacacgctccatgaagtccctgacccccgctgggggtgcctgtgatggagggtaggctgtggtgcctgcgggcgcgcacaggtgagatggaaggaataaggggttattccttctgggtgcagctctgcctggaggccagagctgtcctcctcccttcgatctctgaattaaagacgctcttctagtattttcttat

SEQ ID NO: 157586 - DNA, 159 bp, Homo sapiens; identical to SEQ ID NO: 74513
  chr7:101586045-101586204
  hypo

SEQ ID NO: 157587 - DNA, 201 bp, Homo sapiens
  chr7:101595975-101596176
  hypo
gtggctcactcccttttctgccgccaccttctcccccactgcgccatgctggtctcagctcggggcttacctggtcccagaggtgtgttgggaggtccccaccccttgcctctgcccgttgccttttccacccctgcactgggtgtgcataggtgcgcagggcacgtgtgtgtcctctgcggtcactgacttgattgtctg

SEQ ID NO: 157588 - DNA, 500 bp, Homo sapiens
  chr7:101603071-101603571
  hypo
tgcggaggatttcaccgcgtacatattctctgtttggacatggtacaacctgtggacccttttaaacatagttacatgtttgactctttatagggtaataactcgattaattttgcaaggctttttagaataccattgttctcttgaaaagaacaggtttgctgttttaacaagactttaatgccatcgagatgcctcacattggcacggttgcgtaagaatcgcacggtcccatgaaatgaaattgagagagctttttccggcgcctggttggttggggcggcctccgttcggtgcttttttcatcctcgacccagtgaccaactgtgtttgccctgatgtttctttcaattccaccattccgaaatgtctccggaatctgtcgttttagcttttgcagcaaggttcgttgtgtttgtcttgcccgcttcaggtttctctaatgagattcacgtgtaaaggaggattggcaattaatcggatgactgattaattgtgag

SEQ ID NO: 157589 - DNA, 214 bp, Homo sapiens
  chr7:101610607-101610821
  hypo
catttgccacacttgtgacttagccaagtgtctttttcaaagactaataaagccttcacagcttccgaaacaccgcgctagatctggtagccgcggacaatttggattccttctccagtgggaaagattcaaaactgcaggtttcagaagcctttaaaagcttcttgtctgtgtgatgttcattgaatgcaaattctttcgcaaataatggcct

SEQ ID NO: 157590 - DNA, 235 bp, Homo sapiens
  chr7:101615799-101616034
  hypo
agagggccaggagcacggaggacctggggagggccctgaccactggacacatctgccctttgctcctcctttttgtctctgctggtggccctttctgctgtattcacgcgccctcaccacctcctgtgtattcgtgtgctggagttcagccgccaaggtggagagagactccctgtcggggaaggactccggccccaatgcctcctcctccaggccaggccgccatggtgggtgg

SEQ ID NO: 157591 - DNA, 324 bp, Homo sapiens
  chr7:101616395-101616719
  hypo
tccttgcccaggtaccggtatccatcagagcgtgattggggtttcagcagagccaggcctgcttttcctggcagaggctgggcccctttagatttttcttgtagattttgcttgagcctcccagcccttccttgctcagcacctgtgacccactgggtcacagtgacccacatcccatggctctgaccgcagctggactcatctcacactcacgttcatcacggctcccagaaggcacgtgtttttaatgagaggctcatttccaccactgccccccagccctccgcagcaagccagtgcaacgccaggacagtctgctgacag

SEQ ID NO: 157592 - DNA, 46 bp, Homo sapiens; identical to SEQ ID NO: 21679
  chr7:101624112-101624158
  hypo

SEQ ID NO: 157593 - DNA, 503 bp, Homo sapiens
  chr7:101627639-101628142
  hypo
gtacccaccctgtaagattgtcgtgggacaatgtagataaaaacctcgatatacagcctagtacacaaaggacggtgtaaatattctcttccgtgcttcgtagatttcatttttgaacgctcagattgttctccggcaaaaaaaaaaaaaaaaaaaagtgcttgcagtgagaacctgccctgcactctcaggcgagctgttgggtgcaagtcctgcaggactgagctctgaaggccacccacaccctgggttgtgcttggatgatggcatccctcctggcacaagcgcagatgggcagtcgggagggaacatcagcctgggaaaactagatgtcagtgaaaaatgctggaggtggctggcgttcgcaaaactcagtcgtaaaaaacagcacgttctcagtacaaaatgagcactgttaaaaataaaccgcgcaagaagaaatatatgaatacgagggcatggcaaacagttttgcaaggtattaagatcgcattaatcttaat

SEQ ID NO: 157594 - DNA, 164 bp, Homo sapiens; identical to SEQ ID NO: 74519
  chr7:101629391-101629555
  hypo

SEQ ID NO: 157595 - DNA, 147 bp, Homo sapiens; identical to SEQ ID NO: 74520
  chr7:101630531-101630678
  hypo

SEQ ID NO: 157596 - DNA, 31 bp, Homo sapiens; identical to SEQ ID NO: 74521
  chr7:101632780-101632811
  hypo

SEQ ID NO: 157597 - DNA, 30 bp, Homo sapiens; identical to SEQ ID NO: 74522
  chr7:101648516-101648546
  hypo

SEQ ID NO: 157598 - DNA, 456 bp, Homo sapiens; identical to SEQ ID NO: 74523
  chr7:101649202-101649658
  hypo

SEQ ID NO: 157599 - DNA, 30 bp, Homo sapiens; identical to SEQ ID NO: 74524
  chr7:101650974-101651004
  hypo

SEQ ID NO: 157600 - DNA, 442 bp, Homo sapiens
  chr7:101652270-101652712
  hypo
gggaaccctcggccccgcgtgctccagcaggtctgcatgattaacctgaattgcagtgttcagaggctcggcctgccagccacagcggttccagatgaaatgcagcttagaaggcagcatggtgtagtagctttggcgccagccgcacccagagtttggattgtagccagatggcctcaggtgcaatgtataacctctgggaattccagatttcctatttacacgacagggatgattccatacctgaagggctgtttggaagcatctagaagcaagcacagtggagtggctgtcatgacgctgaccgcacaaatgatggtgttaggatccctccacggatgtggccaggtgacacccctcacctaggccgcacagcaccctaatgtacacactgaagaaaggctgcgtggggctgcagagcggctcatttctaagaaggcca

SEQ ID NO: 157601 - DNA, 216 bp, Homo sapiens
  chr7:101653174-101653390
  hypo
agccttcgtgactggcgtgcctcacttagcttaatccctggttggtacatgttaaaacctataaagacagcctctccagcacacatggggagcttgaaaatgaaagaaaggttgctctgacctctcagaactgcggacttcttaaaaaagaaagagtgaggtgggcggcctcccttgctgccggtgctagattccatgatatgaaacagcaagggt

SEQ ID NO: 157602 - DNA, 30 bp, Homo sapiens
  chr7:101655969-101655999
  hypo
cctggagagtgggggcggggggagggggtt

SEQ ID NO: 157603 - DNA, 236 bp, Homo sapiens; identical to SEQ ID NO: 74527
  chr7:101656269-101656505
  hypo

SEQ ID NO: 157604 - DNA, 49 bp, Homo sapiens; identical to SEQ ID NO: 5747
  chr7:101671376-101671425
  hypo

SEQ ID NO: 157605 - DNA, 32 bp, Homo sapiens; identical to SEQ ID NO: 21685
  chr7:101694627-101694659
  hypo

SEQ ID NO: 157606 - DNA, 18 bp, Homo sapiens
  chr7:101695197-101695215
  hypo
aaacctcatactggccgg

SEQ ID NO: 157607 - DNA, 153 bp, Homo sapiens
  chr7:101706968-101707121
  hypo
tgtcaagaaccctttacatattgagcattttcataaatatttaaacctggattcctgaacccttgggtcacatctgcagaccatgcagttggccattgcggaagatattaaaagcatattaaacacccactgcgtgcccgtggtcgggaggaa

SEQ ID NO: 157608 - DNA, 106 bp, Homo sapiens; identical to SEQ ID NO: 115428
  chr7:101707444-101707550
  hypo

SEQ ID NO: 157609 - DNA, 37 bp, Homo sapiens
  chr7:101707601-101707638
  hypo
ttacaggcatgagcaacggtgccggctctaaatggtt

SEQ ID NO: 157610 - DNA, 30 bp, Homo sapiens; identical to SEQ ID NO: 21686
  chr7:101712197-101712227
  hypo

SEQ ID NO: 157611 - DNA, 80 bp, Homo sapiens; identical to SEQ ID NO: 5748
  chr7:101713617-101713697
  hypo

SEQ ID NO: 157612 - DNA, 139 bp, Homo sapiens; identical to SEQ ID NO: 5749
  chr7:101740642-101740781
  hypo

SEQ ID NO: 157613 - DNA, 125 bp, Homo sapiens; identical to SEQ ID NO: 5750
  chr7:101747614-101747739
  hypo

SEQ ID NO: 157614 - DNA, 78 bp, Homo sapiens; identical to SEQ ID NO: 5751
  chr7:101754976-101755054
  hypo

SEQ ID NO: 157615 - DNA, 68 bp, Homo sapiens; identical to SEQ ID NO: 5752
  chr7:101758485-101758553
  hypo

SEQ ID NO: 157616 - DNA, 50 bp, Homo sapiens; identical to SEQ ID NO: 5753
  chr7:101801838-101801888
  hypo

SEQ ID NO: 157617 - DNA, 106 bp, Homo sapiens; identical to SEQ ID NO: 5754
  chr7:101813724-101813830
  hypo

SEQ ID NO: 157618 - DNA, 190 bp, Homo sapiens; identical to SEQ ID NO: 5755
  chr7:101821747-101821937
  hypo

SEQ ID NO: 157619 - DNA, 60 bp, Homo sapiens; identical to SEQ ID NO: 5756
  chr7:101833091-101833151
  hypo

SEQ ID NO: 157620 - DNA, 50 bp, Homo sapiens; identical to SEQ ID NO: 5757
  chr7:101837120-101837170
  hypo

SEQ ID NO: 157621 - DNA, 98 bp, Homo sapiens; identical to SEQ ID NO: 5758
  chr7:101838785-101838883
  hypo

SEQ ID NO: 157622 - DNA, 673 bp, Homo sapiens; identical to SEQ ID NO: 5759
  chr7:101839912-101840585
  hypo

SEQ ID NO: 157623 - DNA, 67 bp, Homo sapiens; identical to SEQ ID NO: 5760
  chr7:101842080-101842147
  hypo

SEQ ID NO: 157624 - DNA, 103 bp, Homo sapiens; identical to SEQ ID NO: 5761
  chr7:101843349-101843452
  hypo

SEQ ID NO: 157625 - DNA, 846 bp, Homo sapiens; identical to SEQ ID NO: 5762
  chr7:101844638-101845484
  hypo

SEQ ID NO: 157626 - DNA, 167 bp, Homo sapiens; identical to SEQ ID NO: 5763
  chr7:101847669-101847836
  hypo

SEQ ID NO: 157627 - DNA, 58 bp, Homo sapiens; identical to SEQ ID NO: 5764
  chr7:101848392-101848450
  hypo

SEQ ID NO: 157628 - DNA, 304 bp, Homo sapiens; identical to SEQ ID NO: 5765
  chr7:101870645-101870949
  hypo

SEQ ID NO: 157629 - DNA, 190 bp, Homo sapiens; identical to SEQ ID NO: 5766
  chr7:101877330-101877520
  hypo

SEQ ID NO: 157630 - DNA, 266 bp, Homo sapiens; identical to SEQ ID NO: 5767
  chr7:101882598-101882864
  hypo

SEQ ID NO: 157631 - DNA, 9823 bp, Homo sapiens; identical to SEQ ID NO: 5768
  chr7:101891690-101901513
  hypo

SEQ ID NO: 157632 - DNA, 129 bp, Homo sapiens; identical to SEQ ID NO: 5769
  chr7:101916635-101916764
  hypo

SEQ ID NO: 157633 - DNA, 68 bp, Homo sapiens; identical to SEQ ID NO: 5770
  chr7:101917513-101917581
  hypo

SEQ ID NO: 157634 - DNA, 114 bp, Homo sapiens; identical to SEQ ID NO: 5771
  chr7:101918516-101918630
  hypo

SEQ ID NO: 157635 - DNA, 118 bp, Homo sapiens; identical to SEQ ID NO: 5772
  chr7:101921218-101921336
  hypo

SEQ ID NO: 157636 - DNA, 85 bp, Homo sapiens; identical to SEQ ID NO: 5773
  chr7:101923327-101923412
  hypo

SEQ ID NO: 157637 - DNA, 58 bp, Homo sapiens; identical to SEQ ID NO: 5774
  chr7:101924094-101924152
  hypo

SEQ ID NO: 157638 - DNA, 82 bp, Homo sapiens; identical to SEQ ID NO: 5775
  chr7:101925130-101925212
  hypo

SEQ ID NO: 157639 - DNA, 66 bp, Homo sapiens; identical to SEQ ID NO: 5776
  chr7:101926002-101926068
  hypo

SEQ ID NO: 157640 - DNA, 939 bp, Homo sapiens; identical to SEQ ID NO: 5777
  chr7:101926311-101927250
  hypo

SEQ ID NO: 157641 - DNA, 28 bp, Homo sapiens
  chr7:102086680-102086708
  hypo
cgaccacgctggcctcttctgtactgtt

SEQ ID NO: 157642 - DNA, 587 bp, Homo sapiens; identical to SEQ ID NO: 74563
  chr7:102087174-102087761
  hypo

SEQ ID NO: 157643 - DNA, 67 bp, Homo sapiens; identical to SEQ ID NO: 21718
  chr7:102088065-102088132
  hypo

SEQ ID NO: 157644 - DNA, 31 bp, Homo sapiens; identical to SEQ ID NO: 21719
  chr7:102093187-102093218
  hypo

SEQ ID NO: 157645 - DNA, 39 bp, Homo sapiens; identical to SEQ ID NO: 74566
  chr7:102094840-102094879
  hypo

SEQ ID NO: 157646 - DNA, 40 bp, Homo sapiens; identical to SEQ ID NO: 74567
  chr7:102096999-102097039
  hypo

SEQ ID NO: 157647 - DNA, 30 bp, Homo sapiens; identical to SEQ ID NO: 74568
  chr7:102098199-102098229
  hypo

SEQ ID NO: 157648 - DNA, 30 bp, Homo sapiens; identical to SEQ ID NO: 74569
  chr7:102100206-102100236
  hypo

SEQ ID NO: 157649 - DNA, 30 bp, Homo sapiens
  chr7:102113493-102113523
  hypo
tagcctcacaccatcgcaaaggaccaggga

SEQ ID NO: 157650 - DNA, 30 bp, Homo sapiens; identical to SEQ ID NO: 74570
  chr7:102756100-102756130
  hypo

SEQ ID NO: 157651 - DNA, 39 bp, Homo sapiens; identical to SEQ ID NO: 74571
  chr7:102756772-102756811
  hypo

SEQ ID NO: 157652 - DNA, 142 bp, Homo sapiens; identical to SEQ ID NO: 21720
  chr7:102782153-102782295
  hypo

SEQ ID NO: 157653 - DNA, 18 bp, Homo sapiens
  chr7:102791062-102791080
  hypo
acggagaagtaatcccgg

SEQ ID NO: 157654 - DNA, 29 bp, Homo sapiens
  chr7:102792125-102792154
  hypo
tcaagtgatttgcccgcctgggcctccca

SEQ ID NO: 157655 - DNA, 691 bp, Homo sapiens; identical to SEQ ID NO: 115466
  chr7:102920837-102921528
  hypo

SEQ ID NO: 157656 - DNA, 30 bp, Homo sapiens; identical to SEQ ID NO: 74574
  chr7:102988229-102988259
  hypo

SEQ ID NO: 157657 - DNA, 30 bp, Homo sapiens; identical to SEQ ID NO: 74575
  chr7:102989097-102989127
  hypo

SEQ ID NO: 157658 - DNA, 18 bp, Homo sapiens
  chr7:103032991-103033009
  hypo
agttcttgtgccttccat

SEQ ID NO: 157659 - DNA, 31 bp, Homo sapiens; identical to SEQ ID NO: 74577
  chr7:103080374-103080405
  hypo

SEQ ID NO: 157660 - DNA, 1182 bp, Homo sapiens; identical to SEQ ID NO: 115472
  chr7:103085749-103086931
  hypo

SEQ ID NO: 157661 - DNA, 665 bp, Homo sapiens; identical to SEQ ID NO: 115474
  chr7:103629129-103629794
  hypo

SEQ ID NO: 157662 - DNA, 756 bp, Homo sapiens; identical to SEQ ID NO: 115475
  chr7:103630363-103631119
  hypo

SEQ ID NO: 157663 - DNA, 94 bp, Homo sapiens
  chr7:103778099-103778193
  hypo
tcgagagcaacataccggcagacaccagcagatgccagcaggccacctacggtgggacaacacagagtttggccaagagcggctagacttcagg

SEQ ID NO: 157664 - DNA, 45 bp, Homo sapiens
  chr7:103778512-103778557
  hypo
tctgcatgctcccattagaggtttgagcagcgggacactgaagaa

SEQ ID NO: 157665 - DNA, 152 bp, Homo sapiens
  chr7:104464162-104464314
  hypo
agcctttcaatttctcgctccgcttcaaagagtacacaaagtacaaactgtaaatcaacctccacatttgctgatatggccactaagctggaaaaaaagagaaagagatatggctaataaactattcaaaaaagatttaggagcctggggcc

SEQ ID NO: 157666 - DNA, 32 bp, Homo sapiens
  chr7:104564546-104564578
  hypo
agtgctatgattacaggcgtgagccaccacgc

SEQ ID NO: 157667 - DNA, 85 bp, Homo sapiens
  chr7:104566591-104566676
  hypo
gagaaggcaggagttcgagaccagctgggccaaataatcaagggtgcctgtctctacaaaaaaaaatagaaaaattagctgggcg

SEQ ID NO: 157668 - DNA, 45 bp, Homo sapiens; identical to SEQ ID NO: 21725
  chr7:104629826-104629871
  hypo

SEQ ID NO: 157669 - DNA, 96 bp, Homo sapiens; identical to SEQ ID NO: 74582
  chr7:104764716-104764812
  hypo

SEQ ID NO: 157670 - DNA, 30 bp, Homo sapiens
  chr7:104829786-104829816
  hypo
gcctatggtgacatcgagagactcatccta

SEQ ID NO: 157671 - DNA, 30 bp, Homo sapiens
  chr7:104837815-104837845
  hypo
caggttaagtattccggagaactatggatg

SEQ ID NO: 157672 - DNA, 142 bp, Homo sapiens
  chr7:104845019-104845161
  hypo
aactaccactgaatgcgtgcgctgaagatgacggctgctgtggaaaggttgctctgagggtcagttgcccgacatgtgagtgccattccttggggcatttctgcaacggcagccctcaggcctgctgcgtctagaagaacaa

SEQ ID NO: 157673 - DNA, 96 bp, Homo sapiens
  chr7:104860661-104860757
  hypo
cctaattcttagatccacttacgattttaacagtctagcttgtgccgggtgtggtggctcacacctgtaaccgggaggcggaggcgggcagatcac

SEQ ID NO: 157674 - DNA, 310 bp, Homo sapiens
  chr7:104869026-104869336
  hypo
ctgctaacacaccaccgtccgcagacagcggaactaagagagcagtgtaacaccctctctcaggcctcggggtcacgggcaccctcacctaggcagcgccacaagcggcaagatgagctgctaacacactgctgtctgcagacagcagaactaagagaataccgtaacactcactctggggcttcagagtcccaggcaccctcacctgggcgctgcgagagcttgttcccgtgttggcgcctggagcagccagccggatcccgcactcgctcgctcacatgctccctcctgcaagcgctggagaatggca

SEQ ID NO: 157675 - DNA, 23 bp, Homo sapiens
  chr7:104869616-104869639
  hypo
cgaccatcctttggccgagcaag

SEQ ID NO: 157676 - DNA, 142 bp, Homo sapiens
  chr7:104869938-104870080
  hypo
taacataaaaaatccagacatctaaatatgtcatttttattatatcaaatacgtagctttgatcttagctatggaggaggtatctctccctctccttccgcagtgcccacaacagatgaagggggagcgcaggaataaaatt

SEQ ID NO: 157677 - DNA, 85 bp, Homo sapiens; identical to SEQ ID NO: 21726
  chr7:104917804-104917889
  hypo

SEQ ID NO: 157678 - DNA, 30 bp, Homo sapiens; identical to SEQ ID NO: 21727
  chr7:104941883-104941913
  hypo

SEQ ID NO: 157679 - DNA, 30 bp, Homo sapiens
  chr7:104955110-104955140
  hypo
gttagccaccatgcccggcccaaaacatat

SEQ ID NO: 157680 - DNA, 121 bp, Homo sapiens
  chr7:104988782-104988903
  hypo
gctgggattacaggtgtgagtcaccgcgcacagcagtcaaacttaataagccactatttggtataaaatgcctttgaacttttttctttctttttttttttttttttgagatgcagtctcg

SEQ ID NO: 157681 - DNA, 38 bp, Homo sapiens; identical to SEQ ID NO: 21728
  chr7:105016767-105016805
  hypo

SEQ ID NO: 157682 - DNA, 173 bp, Homo sapiens
  chr7:105029729-105029902
  hypo
cttggccggcgcctccgcgggtctcgcaccacctctcttcccgcggcctcttctctccctttgctcctctacatccttgcaaccccatgagcgccgcttcctcctctccggcaggcgtggaaagggcacacgaccaaaagctgggaaacctgggtccgcgattagcggtgtga

SEQ ID NO: 157683 - DNA, 21 bp, Homo sapiens
  chr7:105061906-105061927
  hypo
ttatttattatttttttgaga

SEQ ID NO: 157684 - DNA, 41 bp, Homo sapiens
  chr7:105137528-105137569
  hypo
gacttctacagcacccggtagttatgcggtgggttaacagc

SEQ ID NO: 157685 - DNA, 501 bp, Homo sapiens; identical to SEQ ID NO: 74589
  chr7:105254042-105254543
  hypo

SEQ ID NO: 157686 - DNA, 30 bp, Homo sapiens
  chr7:105255050-105255080
  hypo
agggcgctcgggtccggcgatgtcacgaaa

SEQ ID NO: 157687 - DNA, 30 bp, Homo sapiens; identical to SEQ ID NO: 74590
  chr7:105258651-105258681
  hypo

SEQ ID NO: 157688 - DNA, 30 bp, Homo sapiens
  chr7:105264569-105264599
  hypo
ggattcgtcggctccgtccatctccccttc

SEQ ID NO: 157689 - DNA, 131 bp, Homo sapiens
  chr7:105278332-105278463
  hypo
gcatggtgcagtgagcgtctaagaggtgctaacgacctattcacctgggtttccctactccgctccaggaatcgtcaactaatataaaagcccaggcagccaggaagtcacctggcggctgatgtgtcaca

SEQ ID NO: 157690 - DNA, 121 bp, Homo sapiens
  chr7:105278912-105279033
  hypo
tggaagtatttccctcgtggaagtcaggagatgctctttatctttaacttctttttcccgggactttgctttgtgttctgccaggaggaggtcaaattgctttttccggcctgggactgcc

SEQ ID NO: 157691 - DNA, 349 bp, Homo sapiens; identical to SEQ ID NO: 74592
  chr7:105279329-105279678
  hypo

SEQ ID NO: 157692 - DNA, 95 bp, Homo sapiens
  chr7:105280242-105280337
  hypo
tagcttcggcagcaccgccgaacgcagcacaaggctcggggaatagggcgggagcaggcaccgaagggaaggagaggagccgtgctgctcttaat

SEQ ID NO: 157693 - DNA, 30 bp, Homo sapiens
  chr7:105280752-105280782
  hypo
cacgtgggaataaaacggggcaggctgccc

SEQ ID NO: 157694 - DNA, 24 bp, Homo sapiens
  chr7:105340662-105340686
  hypo
acaaggggggctgggcgcggtggc

SEQ ID NO: 157695 - DNA, 190 bp, Homo sapiens; identical to SEQ ID NO: 74595
  chr7:105399235-105399425
  hypo

SEQ ID NO: 157696 - DNA, 30 bp, Homo sapiens; identical to SEQ ID NO: 74596
  chr7:105415955-105415985
  hypo

SEQ ID NO: 157697 - DNA, 435 bp, Homo sapiens
  chr7:105432453-105432888
  hypo
tgctgggtgacctgtcgaggcctgtcaggctgccactgacgccccattcttctgtattcctccagagacctgcagagcccatcccgtctcccccacccccacagtcacacacatctgttatgtcagtgagcggaaggtaaaggttcggctccttagagactgtggccacctggaggtgtgttcccctccaggcctttcccgttgagacttttcctagtttccctagagggaagtgtcaaccttgtacgtgtctgatctgagcatgtctcctgtggaaagtgagaggacctgggaatctgcttgattattcctcagtgagtcaaccttaggatctcctctacaggctgcccaggtcctgagggccctgccgatggcgagcaaagacaggcagctggctcccaggaagaccaccacttcacacggctgggtgttcac

SEQ ID NO: 157698 - DNA, 157 bp, Homo sapiens; identical to SEQ ID NO: 74598
  chr7:105445967-105446124
  hypo

SEQ ID NO: 157699 - DNA, 30 bp, Homo sapiens
  chr7:105467513-105467543
  hypo
ttaatgtatgcagaacggaaggcgaggttg

SEQ ID NO: 157700 - DNA, 30 bp, Homo sapiens
  chr7:105468034-105468064
  hypo
gacttttcatatattcgggttccgcaaggc

SEQ ID NO: 157701 - DNA, 30 bp, Homo sapiens
  chr7:105478232-105478262
  hypo
tctccactcacatggcgagcccgatgccaa

SEQ ID NO: 157702 - DNA, 257 bp, Homo sapiens; identical to SEQ ID NO: 115494
  chr7:105517674-105517931
  hypo

SEQ ID NO: 157703 - DNA, 162 bp, Homo sapiens; identical to SEQ ID NO: 74600
  chr7:105586618-105586780
  hypo

SEQ ID NO: 157704 - DNA, 30 bp, Homo sapiens; identical to SEQ ID NO: 21733
  chr7:105680140-105680170
  hypo

SEQ ID NO: 157705 - DNA, 39 bp, Homo sapiens; identical to SEQ ID NO: 21734
  chr7:105722824-105722863
  hypo

SEQ ID NO: 157706 - DNA, 31 bp, Homo sapiens; identical to SEQ ID NO: 44586
  chr7:105752146-105752177
  hypo

SEQ ID NO: 157707 - DNA, 30 bp, Homo sapiens
  chr7:105753508-105753538
  hypo
ttctacgctgtcggtcgacagtcctctttt

SEQ ID NO: 157708 - DNA, 257 bp, Homo sapiens
  chr7:105753777-105754034
  hypo
ccactgaggttattccgtcagggttgacaactgttattgaacgtccttgtagtaagcgaaccctttctctttcgagacctatctccttgtttgctgtccagagagtgcaaaaaatacatttcattttctatgcagacagagacaatctttatgtttatcttggctcccgttcctcagtccccagcacagtcagtgctcaatgagcacctaatggcatatctcattttgaaataacattaagaactgggcgcggtggc

SEQ ID NO: 157709 - DNA, 17 bp, Homo sapiens
  chr7:105754213-105754230
  hypo
atcgcttgaaccgggag

SEQ ID NO: 157710 - DNA, 30 bp, Homo sapiens
  chr7:105821346-105821376
  hypo
tggatgtcatggtgacggcgagagaaacag

SEQ ID NO: 157711 - DNA, 30 bp, Homo sapiens; identical to SEQ ID NO: 21735
  chr7:106435445-106435475
  hypo

SEQ ID NO: 157712 - DNA, 31 bp, Homo sapiens; identical to SEQ ID NO: 21736
  chr7:106507803-106507834
  hypo

SEQ ID NO: 157713 - DNA, 688 bp, Homo sapiens; identical to SEQ ID NO: 115500
  chr7:106508244-106508932
  hypo

SEQ ID NO: 157714 - DNA, 86 bp, Homo sapiens
  chr7:106574560-106574646
  hypo
tttagaaggaatcttcgatataatcttcacgacattggattaggcaatgggttttttggatatgataccaaaagaacaagcaacag

SEQ ID NO: 157715 - DNA, 19 bp, Homo sapiens
  chr7:106604414-106604433
  hypo
tcctccgccgggcgccgtg

SEQ ID NO: 157716 - DNA, 24 bp, Homo sapiens
  chr7:106613156-106613180
  hypo
gatcaggagcgcagcagacacctg

SEQ ID NO: 157717 - DNA, 30 bp, Homo sapiens; identical to SEQ ID NO: 74611
  chr7:106622440-106622470
  hypo

SEQ ID NO: 157718 - DNA, 266 bp, Homo sapiens
  chr7:106622689-106622955
  hypo
caccggaacaatgtgcggcacatattagacactcaatacatgtttgccaaatgaatacgtgaatgattgtagtcttggacaagtcaaatggcccttagggactatttgttcattgattattttcccacctgcgtcacagcatggctgctgtcttggaaagcgtaaactgctcatgagtggcaggtgtgaagaagagaggctgacggagtgaacggtggtgaggcacaggaggaaagttgcaaggtgtgaggcgtggacggggaagt

SEQ ID NO: 157719 - DNA, 17 bp, Homo sapiens
  chr7:106625071-106625088
  hypo
accgctgcactccagcc

SEQ ID NO: 157720 - DNA, 17 bp, Homo sapiens
  chr7:106631395-106631412
  hypo
caaaaaaaaaaaaaaaa

SEQ ID NO: 157721 - DNA, 30 bp, Homo sapiens
  chr7:106635458-106635488
  hypo
gtgctgtgaggaacccgagccatgtagaga

SEQ ID NO: 157722 - DNA, 29 bp, Homo sapiens
  chr7:106635934-106635963
  hypo
cgtgtattggccgggcgcggtggctcaca

SEQ ID NO: 157723 - DNA, 19 bp, Homo sapiens
  chr7:106639961-106639980
  hypo
ttggctgggcgtagtcgct

SEQ ID NO: 157724 - DNA, 38 bp, Homo sapiens; identical to SEQ ID NO: 21740
  chr7:106675695-106675733
  hypo

SEQ ID NO: 157725 - DNA, 87 bp, Homo sapiens; identical to SEQ ID NO: 74615
  chr7:106683488-106683575
  hypo

SEQ ID NO: 157726 - DNA, 27 bp, Homo sapiens
  chr7:106683874-106683901
  hypo
agccactgcgcccggccaaaagtttaa

SEQ ID NO: 157727 - DNA, 1363 bp, Homo sapiens; identical to SEQ ID NO: 115501
  chr7:106684799-106686162
  hypo

SEQ ID NO: 157728 - DNA, 21 bp, Homo sapiens
  chr7:106770654-106770675
  hypo
ttatgccgggccgggcgtggt

SEQ ID NO: 157729 - DNA, 30 bp, Homo sapiens
  chr7:106792222-106792252
  hypo
cgttgtactgcatatcgctagcctgggaga

SEQ ID NO: 157730 - DNA, 24 bp, Homo sapiens
  chr7:106796950-106796974
  hypo
caaaacctcttcatttagggccgg

SEQ ID NO: 157731 - DNA, 23 bp, Homo sapiens
  chr7:106797273-106797296
  hypo
ttagaaaccgagacagcttgttc

SEQ ID NO: 157732 - DNA, 47 bp, Homo sapiens
  chr7:106797711-106797758
  hypo
gtaactaacaaacctcgagcagcttctgcccacgccattgggactgt

SEQ ID NO: 157733 - DNA, 82 bp, Homo sapiens
  chr7:106802885-106802967
  hypo
agactccgtccataaaacaaacaagcttaaaaattcttcaagtgaaacggcatgaagcaagagacttcggattttattgaaa

SEQ ID NO: 157734 - DNA, 38 bp, Homo sapiens; identical to SEQ ID NO: 74619
  chr7:106836714-106836752
  hypo

SEQ ID NO: 157735 - DNA, 38 bp, Homo sapiens; identical to SEQ ID NO: 21744
  chr7:106836991-106837029
  hypo

SEQ ID NO: 157736 - DNA, 42 bp, Homo sapiens; identical to SEQ ID NO: 21745
  chr7:106837816-106837858
  hypo

SEQ ID NO: 157737 - DNA, 30 bp, Homo sapiens
  chr7:106871089-106871119
  hypo
cctaaatcagatactcgtctacagaatgga

SEQ ID NO: 157738 - DNA, 43 bp, Homo sapiens; identical to SEQ ID NO: 74622
  chr7:107060906-107060949
  hypo

SEQ ID NO: 157739 - DNA, 96 bp, Homo sapiens; identical to SEQ ID NO: 74623
  chr7:107148302-107148398
  hypo

SEQ ID NO: 157740 - DNA, 23 bp, Homo sapiens
  chr7:107163981-107164004
  hypo
gggcgcggtggttcacgcctgta

SEQ ID NO: 157741 - DNA, 31 bp, Homo sapiens; identical to SEQ ID NO: 74624
  chr7:107202109-107202140
  hypo

SEQ ID NO: 157742 - DNA, 91 bp, Homo sapiens
  chr7:107202439-107202530
  hypo
agaaagaaaggagcagaggctccacttccgttgcaattgaaaaggcaagggaaaaaaggtgcaacagatggttatacgttgaggttaaatt

SEQ ID NO: 157743 - DNA, 30 bp, Homo sapiens; identical to SEQ ID NO: 74626
  chr7:107272619-107272649
  hypo

SEQ ID NO: 157744 - DNA, 116 bp, Homo sapiens
  chr7:107430183-107430299
  hypo
gcaaactcaaggatccgcaactgaaataatattacacaaaacgtaaaggctcaacctgtatgtacatgccttgaagaagcaaatgtccctgcctcctgggacgcctcccacccagg

SEQ ID NO: 157745 - DNA, 401 bp, Homo sapiens; identical to SEQ ID NO: 74627
  chr7:107483555-107483956
  hypo

SEQ ID NO: 157746 - DNA, 202 bp, Homo sapiens; identical to SEQ ID NO: 74628
  chr7:107524447-107524649
  hypo

SEQ ID NO: 157747 - DNA, 323 bp, Homo sapiens; identical to SEQ ID NO: 44596
  chr7:107531674-107531997
  hypo

SEQ ID NO: 157748 - DNA, 30 bp, Homo sapiens
  chr7:107592590-107592620
  hypo
gaccagtggctttgtcgcactggcagtcag

SEQ ID NO: 157749 - DNA, 31 bp, Homo sapiens; identical to SEQ ID NO: 74630
  chr7:107621457-107621488
  hypo

SEQ ID NO: 157750 - DNA, 45 bp, Homo sapiens; identical to SEQ ID NO: 21748
  chr7:107633906-107633951
  hypo

SEQ ID NO: 157751 - DNA, 58 bp, Homo sapiens
  chr7:107773015-107773073
  hypo
tggtgagccttctctcgctgtggccttgcccgtcattcccgcgcggtggcccacctaa

SEQ ID NO: 157752 - DNA, 29 bp, Homo sapiens
  chr7:108076611-108076640
  hypo
tcacacacgtataccacccttcctctctc

SEQ ID NO: 157753 - DNA, 349 bp, Homo sapiens; identical to SEQ ID NO: 5799
  chr7:108095228-108095577
  hypo

SEQ ID NO: 157754 - DNA, 1913 bp, Homo sapiens; identical to SEQ ID NO: 115514
  chr7:108095780-108097693
  hypo

SEQ ID NO: 157755 - DNA, 28 bp, Homo sapiens
  chr7:108165222-108165250
  hypo
cctgggcgacagagagagactcccaaca

SEQ ID NO: 157756 - DNA, 161 bp, Homo sapiens; identical to SEQ ID NO: 74636
  chr7:108168535-108168696
  hypo

SEQ ID NO: 157757 - DNA, 38 bp, Homo sapiens; identical to SEQ ID NO: 74637
  chr7:108298192-108298230
  hypo

SEQ ID NO: 157758 - DNA, 31 bp, Homo sapiens; identical to SEQ ID NO: 21752
  chr7:108498633-108498664
  hypo

SEQ ID NO: 157759 - DNA, 90 bp, Homo sapiens; identical to SEQ ID NO: 74639
  chr7:110163601-110163691
  hypo

SEQ ID NO: 157760 - DNA, 82 bp, Homo sapiens; identical to SEQ ID NO: 74640
  chr7:110471984-110472066
  hypo

SEQ ID NO: 157761 - DNA, 30 bp, Homo sapiens; identical to SEQ ID NO: 21753
  chr7:110585125-110585155
  hypo

SEQ ID NO: 157762 - DNA, 31 bp, Homo sapiens; identical to SEQ ID NO: 21754
  chr7:112149177-112149208
  hypo

SEQ ID NO: 157763 - DNA, 30 bp, Homo sapiens; identical to SEQ ID NO: 5803
  chr7:112149590-112149620
  hypo

SEQ ID NO: 157764 - DNA, 35 bp, Homo sapiens
  chr7:112187147-112187182
  hypo
tcctagggagatcagcgttctgtccgtaaacatct

SEQ ID NO: 157765 - DNA, 215 bp, Homo sapiens
  chr7:112187241-112187456
  hypo
ggtctcacctaacgaagcagtctggccgtggtctgccacagccgtaccgtggggaattcctcccagtgcaaatcatccggtctccctggcaccggcaggggagaacggccgactggagctgcagggatggcggctgtccccaccccctacccaaccaacttgggtgtgtcttaggcagtctccagtgtgctgccactggccgcaacctgagcggc

SEQ ID NO: 157766 - DNA, 200 bp, Homo sapiens
  chr7:112431879-112432079
  hypo
caccgcccttttctgcgtggcagacggaaaattgaaagtacctcggattggttgctttccataactaattaaatgtttgcatagggtgtaacctttgtaacttcgcttcaggctctgattggttgctttccgctatcagactgattgtgggccactatatttgcgtggggtgtacaccaagtggccaatgggaaacctct

SEQ ID NO: 157767 - DNA, 1257 bp, Homo sapiens; identical to SEQ ID NO: 44616
  chr7:113726353-113727610
  hypo

SEQ ID NO: 157768 - DNA, 3 bp, Homo sapiens
  chr7:113727622-113727625
  hypo
cgg

SEQ ID NO: 157769 - DNA, 62 bp, Homo sapiens; identical to SEQ ID NO: 5813
  chr7:113727753-113727815
  hypo

SEQ ID NO: 157770 - DNA, 58 bp, Homo sapiens; identical to SEQ ID NO: 74647
  chr7:114410864-114410922
  hypo

SEQ ID NO: 157771 - DNA, 31 bp, Homo sapiens
  chr7:114671155-114671186
  hypo
ttggctcctccctccccgttatcagatctta

SEQ ID NO: 157772 - DNA, 44 bp, Homo sapiens
  chr7:115430129-115430173
  hypo
cgccaccagaagccccggctcccgcaggcgcctctcgctccaca

SEQ ID NO: 157773 - DNA, 43 bp, Homo sapiens
  chr7:116492600-116492643
  hypo
agcctctccgagtagctggaactacaggcgcccgcaaccactc

SEQ ID NO: 157774 - DNA, 30 bp, Homo sapiens
  chr7:116731635-116731665
  hypo
cgggaaagaaacgctcggggcacatagagt

SEQ ID NO: 157775 - DNA, 30 bp, Homo sapiens; identical to SEQ ID NO: 74648
  chr7:116764213-116764243
  hypo

SEQ ID NO: 157776 - DNA, 22 bp, Homo sapiens
  chr7:116810478-116810500
  hypo
gtaatcccagcacttcgggagg

SEQ ID NO: 157777 - DNA, 103 bp, Homo sapiens
  chr7:116914128-116914231
  hypo
gcgagacaacagccccgggccagcttttaataacccagaagtaataacaataacccgcctgaacaagccggccaggaaagcgcatgcacggtcatgttgtccg

SEQ ID NO: 157778 - DNA, 293 bp, Homo sapiens; identical to SEQ ID NO: 5823
  chr7:116962853-116963146
  hypo

SEQ ID NO: 157779 - DNA, 1390 bp, Homo sapiens; identical to SEQ ID NO: 115562
  chr7:116963330-116964720
  hypo

SEQ ID NO: 157780 - DNA, 30 bp, Homo sapiens
  chr7:117313714-117313744
  hypo
ttgcgccgctgggcccgcacagagtttgct

SEQ ID NO: 157781 - DNA, 30 bp, Homo sapiens; identical to SEQ ID NO: 74651
  chr7:120477652-120477682
  hypo

SEQ ID NO: 157782 - DNA, 763 bp, Homo sapiens; identical to SEQ ID NO: 115569
  chr7:120496811-120497574
  hypo

SEQ ID NO: 157783 - DNA, 121 bp, Homo sapiens
  chr7:120521914-120522035
  hypo
tttaatcttgatgatatgttgtatttttaaatattcagttattaaaaagataatgtattttaatgaggcaataaacaagttatattaatttttttgtttttgagacagagtttcgctcttg

SEQ ID NO: 157784 - DNA, 30 bp, Homo sapiens
  chr7:120704495-120704525
  hypo
ttccgcagttcacaacgctttgccaatgaa

SEQ ID NO: 157785 - DNA, 31 bp, Homo sapiens; identical to SEQ ID NO: 21761
  chr7:121756493-121756524
  hypo

SEQ ID NO: 157786 - DNA, 199 bp, Homo sapiens; identical to SEQ ID NO: 5840
  chr7:121863465-121863664
  hypo

SEQ ID NO: 157787 - DNA, 30 bp, Homo sapiens
  chr7:122033372-122033402
  hypo
taaagaaacaaacaacgtgggaagggacca

SEQ ID NO: 157788 - DNA, 30 bp, Homo sapiens; identical to SEQ ID NO: 5861
  chr7:122844521-122844551
  hypo

SEQ ID NO: 157789 - DNA, 158 bp, Homo sapiens; identical to SEQ ID NO: 44684
  chr7:123174505-123174663
  hypo

SEQ ID NO: 157790 - DNA, 94 bp, Homo sapiens
  chr7:123175849-123175943
  hypo
ccaggctgatctggaactcctagcctcaagcaatccgccttcaaaagtgttggggattacaggagtgagccaccgcgcccggcctatcaatgaa

SEQ ID NO: 157791 - DNA, 181 bp, Homo sapiens
  chr7:124940678-124940859
  hypo
acacggatacggtatgggtcatcccttactcctttacccagactactttgttgtgcctcatatcaatgcgcacatcaggagttcccatctccttcatggcaaattgcggaatctctgagttcccgaggggcacgcttcttgaatcccactccatggacacacttgggaatattgatggtgt

SEQ ID NO: 157792 - DNA, 39 bp, Homo sapiens; identical to SEQ ID NO: 74658
  chr7:125532055-125532094
  hypo

SEQ ID NO: 157793 - DNA, 33 bp, Homo sapiens; identical to SEQ ID NO: 74659
  chr7:126013968-126014001
  hypo

SEQ ID NO: 157794 - DNA, 30 bp, Homo sapiens
  chr7:126129253-126129283
  hypo
ctgatatttaaatgacgtattttatgagaa

SEQ ID NO: 157795 - DNA, 135 bp, Homo sapiens; identical to SEQ ID NO: 74660
  chr7:126173533-126173668
  hypo

SEQ ID NO: 157796 - DNA, 3142 bp, Homo sapiens; identical to SEQ ID NO: 115616
  chr7:126891134-126894276
  hypo

SEQ ID NO: 157797 - DNA, 14 bp, Homo sapiens
  chr7:126987825-126987839
  hypo
cccgtggagacggc

SEQ ID NO: 157798 - DNA, 163 bp, Homo sapiens; identical to SEQ ID NO: 44693
  chr7:126988120-126988283
  hypo

SEQ ID NO: 157799 - DNA, 30 bp, Homo sapiens
  chr7:127061435-127061465
  hypo
ttagaaacgctgctccgtaggtactaaaat

SEQ ID NO: 157800 - DNA, 37 bp, Homo sapiens
  chr7:127231012-127231049
  hypo
tcagctgcaggaggacgagctgcgggatgcagtgctg

SEQ ID NO: 157801 - DNA, 246 bp, Homo sapiens
  chr7:127235456-127235702
  hypo
accgtgtgttatggccgcccaaggaccagccaccatgggtgctttctactgcgtttccaccggaacagcaagtggaccctccagtgcctaatctctggtcgttatttggagtccaatggcaaggacgtgttttgcacttcccacgtcctctcagcttaccacatgtggaccccccgaccagccctccatgtccacgtgatcctctacagccccatccaccgctgctatgcccgggctgaccccact

SEQ ID NO: 157802 - DNA, 101 bp, Homo sapiens
  chr7:127240010-127240111
  hypo
aaaggaaaaacaggacctctgttgttttcacacttcaaagccccagggtgggttggcagaacagaaaacagtggaatccctattggcgctcctgcatttcc

SEQ ID NO: 157803 - DNA, 30 bp, Homo sapiens
  chr7:127305962-127305992
  hypo
gcattctattcctcccggtgtgtaaggtag

SEQ ID NO: 157804 - DNA, 30 bp, Homo sapiens
  chr7:127306290-127306320
  hypo
atattacaagtaaggcgatgtggggctgct

SEQ ID NO: 157805 - DNA, 488 bp, Homo sapiens
  chr7:127371027-127371515
  hypo
agccacattcatattcgtatggagctgcctttagcagcatctgcttctccagctggagaggcttgttttagaacgactggcatgcggaagcggtaggtggaggtctgggaggagctgcgtagccagggctccccttccagcctcccgtctcccttaggctctttctggcctgaggcatggtcgccatgggtgggggcactgcccgcccgattctggttggaccccctttcctctacttcataccgcagctgctgtgagcgagtgcactgtgctctgcacaggagaattggcagacagttccatatgctggttttggccattgggacattcaggattattaggccagtttgtactttaagaggagggagacttgacatcgctcaaagcagcttattttatttatttctatttcttataaaggggaaagaagctagcccagcccttagctgttcctttcaacgtagccggctcaacgttttcctcaggaa

SEQ ID NO: 157806 - DNA, 30 bp, Homo sapiens
  chr7:127371906-127371936
  hypo
cagagtacctgataccgtagacggaacctg

SEQ ID NO: 157807 - DNA, 30 bp, Homo sapiens
  chr7:127433352-127433382
  hypo
atatgtgatatcgggcgtgttatttctctg

SEQ ID NO: 157808 - DNA, 164 bp, Homo sapiens
  chr7:127452505-127452669
  hypo
acaatgtgaagtcctcgataacattgctaagccaattttgaagcttgatttctctttctcttcattcgcttggcataggtgtgacttctgggagcatcagggagaaaggaaggacaggtgttgcttttttttatcttggcacagggtcacggagaagttgaggg

SEQ ID NO: 157809 - DNA, 30 bp, Homo sapiens; identical to SEQ ID NO: 74666
  chr7:127474582-127474612
  hypo

SEQ ID NO: 157810 - DNA, 33 bp, Homo sapiens
  chr7:127497483-127497516
  hypo
ctgacctcgtgatccgcccgcctcgccctccca

SEQ ID NO: 157811 - DNA, 30 bp, Homo sapiens
  chr7:127502406-127502436
  hypo
ttttgccctggaatccggtgcccggtgatc

SEQ ID NO: 157812 - DNA, 55 bp, Homo sapiens
  chr7:127502787-127502842
  hypo
tgattgagagtgttgcggatggatgggtgctctcccaggccgtgcactgctgctg

SEQ ID NO: 157813 - DNA, 161 bp, Homo sapiens; identical to SEQ ID NO: 74667
  chr7:127544830-127544991
  hypo

SEQ ID NO: 157814 - DNA, 173 bp, Homo sapiens
  chr7:127583866-127584039
  hypo
tgaaagcagttttgacgaacaactcaataaagagccatggaatcccacagaatatgtttcattttttcattacatttgttaacccgttggagggctgattgctgccagtcactcctcatcctgctgagctggtgcctcagaggagggcggatgtggctcgactgcgttccctc

SEQ ID NO: 157815 - DNA, 30 bp, Homo sapiens
  chr7:127601939-127601969
  hypo
ttgccctttgttggccgaagcgcctcttat

SEQ ID NO: 157816 - DNA, 30 bp, Homo sapiens; identical to SEQ ID NO: 74668
  chr7:127615393-127615423
  hypo

SEQ ID NO: 157817 - DNA, 114 bp, Homo sapiens; identical to SEQ ID NO: 74669
  chr7:127615837-127615951
  hypo

SEQ ID NO: 157818 - DNA, 30 bp, Homo sapiens; identical to SEQ ID NO: 74670
  chr7:127669489-127669519
  hypo

SEQ ID NO: 157819 - DNA, 216 bp, Homo sapiens; identical to SEQ ID NO: 74671
  chr7:127670439-127670655
  hypo

SEQ ID NO: 157820 - DNA, 207 bp, Homo sapiens; identical to SEQ ID NO: 115628
  chr7:127671450-127671657
  hypo

SEQ ID NO: 157821 - DNA, 109 bp, Homo sapiens; identical to SEQ ID NO: 21769
  chr7:127673454-127673563
  hypo

SEQ ID NO: 157822 - DNA, 106 bp, Homo sapiens
  chr7:127679930-127680036
  hypo
ggcgccccattacctcgctttatggagagctgggtaaatttaaaggcagctataaatatcccactgagtgccagagctatagcacagtcggcgggtacctgctggg

SEQ ID NO: 157823 - DNA, 30 bp, Homo sapiens; identical to SEQ ID NO: 21770
  chr7:127682564-127682594
  hypo

SEQ ID NO: 157824 - DNA, 288 bp, Homo sapiens; identical to SEQ ID NO: 21771
  chr7:127693922-127694210
  hypo

SEQ ID NO: 157825 - DNA, 47 bp, Homo sapiens
  chr7:127721779-127721826
  hypo
catggaggtgctgccggacaggtcctctggacgcaggtgagataacc

SEQ ID NO: 157826 - DNA, 30 bp, Homo sapiens; identical to SEQ ID NO: 74675
  chr7:127732231-127732261
  hypo

SEQ ID NO: 157827 - DNA, 30 bp, Homo sapiens; identical to SEQ ID NO: 115629
  chr7:127743813-127743843
  hypo

SEQ ID NO: 157828 - DNA, 499 bp, Homo sapiens; identical to SEQ ID NO: 115630
  chr7:127744069-127744568
  hypo

SEQ ID NO: 157829 - DNA, 31 bp, Homo sapiens; identical to SEQ ID NO: 74677
  chr7:127846529-127846560
  hypo

SEQ ID NO: 157830 - DNA, 43 bp, Homo sapiens
  chr7:127984394-127984437
  hypo
tgcataaaacacaaccggaacactaacacgtagacatagatat

SEQ ID NO: 157831 - DNA, 30 bp, Homo sapiens; identical to SEQ ID NO: 21773
  chr7:128064475-128064505
  hypo

SEQ ID NO: 157832 - DNA, 31 bp, Homo sapiens; identical to SEQ ID NO: 74679
  chr7:128086258-128086289
  hypo

SEQ ID NO: 157833 - DNA, 88 bp, Homo sapiens
  chr7:128097001-128097089
  hypo
caccgcgcctggcctaagaaagtaaaagttttaagaagtgttcttgaattagtccaagaagcaacactggctccgcagccatgaagtt

SEQ ID NO: 157834 - DNA, 106 bp, Homo sapiens
  chr7:128097962-128098068
  hypo
caaaaaaaaaagaaaagaaaaagcctgtttaatgcacaggtgtgagtggattgcttatggctatgagataggttgatctcgcccttaccccggggtctggtgtatg

SEQ ID NO: 157835 - DNA, 25 bp, Homo sapiens
  chr7:128180584-128180609
  hypo
tgccggggccaaggaactctttttc

SEQ ID NO: 157836 - DNA, 24 bp, Homo sapiens
  chr7:128197985-128198009
  hypo
caccacgctcggccagttatatct

SEQ ID NO: 157837 - DNA, 30 bp, Homo sapiens; identical to SEQ ID NO: 74684
  chr7:128434596-128434626
  hypo

SEQ ID NO: 157838 - DNA, 216 bp, Homo sapiens
  chr7:128441279-128441495
  hypo
gcatgagaaagaaagcgaacttaaggaaatagaacaggaattgcatttggcccaggctgagatccagagtctgcggcaagcagcagaggattccgcaactgaacatgagagtgacatagcatccctgcaggaggatctctgccggatgcagaatgaacttgaagacatggaacgcattcggggagattatgagatggagatcgcctccctccgtgc

SEQ ID NO: 157839 - DNA, 604 bp, Homo sapiens; identical to SEQ ID NO: 115661
  chr7:128470452-128471056
  hypo

SEQ ID NO: 157840 - DNA, 13 bp, Homo sapiens
  chr7:128471125-128471138
  hypo
cggggagctgaga

SEQ ID NO: 157841 - DNA, 30 bp, Homo sapiens; identical to SEQ ID NO: 21778
  chr7:128478655-128478685
  hypo

SEQ ID NO: 157842 - DNA, 31 bp, Homo sapiens
  chr7:128483018-128483049
  hypo
tcctgggtactcacagcgacatgcacctgcc

SEQ ID NO: 157843 - DNA, 258 bp, Homo sapiens; identical to SEQ ID NO: 74687
  chr7:128484036-128484294
  hypo

SEQ ID NO: 157844 - DNA, 351 bp, Homo sapiens
  chr7:128484884-128485235
  hypo
gcccacggagcctggcgagtacaccatcaacatcctgtttgctgaggcccacatccctggctcgcccttcaaagccaccattcggcctgtgtttgacccgagcaaggtgcgggccagtggaccgggcctggagcgcggcaaggtcggtgaggcagccaccttcactgtggactgctcagaggcaggcgaggcggagctgaccattgagatcctgtcggatgccggggtcaaggccgaggtgctgatccacaacaacgcggatggcacctaccacatcacctacagccctgccttccctggcacctacaccattaccatcaagtatggcgggcatcccgtgcccaaattccc

SEQ ID NO: 157845 - DNA, 342 bp, Homo sapiens
  chr7:128488722-128489064
  hypo
catcgacgcacgggacgcgggcgaggggttgctcactgtccagatcttggtgagtctctgtgcatcccaccccgcaggtcatgctccaggcacaggcgggccttgacctctgcttctccctcaggaccccgagggtaagcccaagaaggccaacatccgggacaatggggatggcacgtacactgtgtcctacctgccggacatgagtggccggtacaccatcaccatcaagtatggcggtgatgagatcccctactcgcccttccgcatccatgctctgcccactggggatgccagcaagtgcctcgtcacaggtgggtgcccacccgctgcccgtgccct

SEQ ID NO: 157846 - DNA, 223 bp, Homo sapiens
  chr7:128489417-128489640
  hypo
aggagacggtgatcacggtggatgccaaggcagccggtgaggggaaggtgacatgcacggtgtccacgccggatggggcagagctcgatgtggatgtggttgagaaccatgacggtacctttgacatctactacacagcgcccgagccgggcaagtacgtcatcaccatccgcttcgggggtgagcacatccccaacagccccttccacgtgctggtaagttc

SEQ ID NO: 157847 - DNA, 30 bp, Homo sapiens
  chr7:128490065-128490095
  hypo
gaagtgccacagctgcgccagccctacgct

SEQ ID NO: 157848 - DNA, 439 bp, Homo sapiens; identical to SEQ ID NO: 74692
  chr7:128492720-128493159
  hypo

SEQ ID NO: 157849 - DNA, 106 bp, Homo sapiens
  chr7:128494166-128494272
  hypo
ggagtccacccaggtcggcggggaccccttccctgctgtgtttggggacttcctgggccgggagcgcctgggatccttcggcagcatcacccggcagcaggagggt

SEQ ID NO: 157850 - DNA, 276 bp, Homo sapiens
  chr7:128494587-128494863
  hypo
ggggccccatacggtcgctgtcaagtaccgtggccagcacgtgcccggcagcccctttcagttcactgtggggccgctgggtgaaggtggtgcccacaaggtgcgggccggaggcacagggctggagcgaggtgtggccggcgtgccaggtaaggggcaggtggccaggagtggggatgaagtcagggcagccagtgtgaggggcgatgatgctgaagtccactaccttgcctgtccccagccgagttcagcatctggacccgggaggctggcgct

SEQ ID NO: 157851 - DNA, 113 bp, Homo sapiens; identical to SEQ ID NO: 44717
  chr7:128509597-128509710
  hypo

SEQ ID NO: 157852 - DNA, 240 bp, Homo sapiens; identical to SEQ ID NO: 44718
  chr7:128509981-128510221
  hypo

SEQ ID NO: 157853 - DNA, 266 bp, Homo sapiens
  chr7:128528749-128529015
  hypo
acacacagccgtgcccgggacctctatcaaaggtgagggagtcggagagtgagagaaaagtatggtggagcggcaggcagtgggagggctgggaggaaagtggaatcggtgagaaaggcaccccgggagccccagcagggggaatggaagggcaggtgtggctctaccctggcaggtcgggcagcagtgcccagaggggatgagtgggtggctgcagcccggaggctcacagggccggcggccgcaggtcacgaagcctccaagac

SEQ ID NO: 157854 - DNA, 109 bp, Homo sapiens; identical to SEQ ID NO: 74696
  chr7:128532125-128532234
  hypo

SEQ ID NO: 157855 - DNA, 43 bp, Homo sapiens; identical to SEQ ID NO: 74697
  chr7:128533895-128533938
  hypo

SEQ ID NO: 157856 - DNA, 43 bp, Homo sapiens; identical to SEQ ID NO: 74698
  chr7:128534158-128534201
  hypo

SEQ ID NO: 157857 - DNA, 75 bp, Homo sapiens
  chr7:128587331-128587406
  hypo
aggatgtcaagtggccgcccactctgcagccgcccactctgcggccgcctactctgcagccgcccactctgcagc

SEQ ID NO: 157858 - DNA, 206 bp, Homo sapiens
  chr7:128597297-128597503
  hypo
aggagtgtgagctatcgaaacaacctggtgaagtctcgcaaggcccagcaaacttgtttacattcctcagcactagaaaagaaaaggtaggttggtccttgactgaggagaaagacagaatatgctgaaaaacaactgcaacattggggcacactgagaaccgtcccaactctgctaggagctctctccatcgtctcctgagcgat

SEQ ID NO: 157859 - DNA, 94 bp, Homo sapiens; identical to SEQ ID NO: 74700
  chr7:128602075-128602169
  hypo

SEQ ID NO: 157860 - DNA, 33 bp, Homo sapiens; identical to SEQ ID NO: 21783
  chr7:128602408-128602441
  hypo

SEQ ID NO: 157861 - DNA, 30 bp, Homo sapiens
  chr7:128637513-128637543
  hypo
catgaataacttcatcgttagttttgtaca

SEQ ID NO: 157862 - DNA, 30 bp, Homo sapiens; identical to SEQ ID NO: 74702
  chr7:128767009-128767039
  hypo

SEQ ID NO: 157863 - DNA, 85 bp, Homo sapiens
  chr7:128767405-128767490
  hypo
ggccagcccgtggtcgacagggaagaaggagagcctcacagcatctcctcttggccagggtcccccgggcgccccaacagcggtt

SEQ ID NO: 157864 - DNA, 1203 bp, Homo sapiens; identical to SEQ ID NO: 115673
  chr7:128828176-128829379
  hypo

SEQ ID NO: 157865 - DNA, 31 bp, Homo sapiens; identical to SEQ ID NO: 74705
  chr7:128845244-128845275
  hypo

SEQ ID NO: 157866 - DNA, 30 bp, Homo sapiens
  chr7:128850259-128850289
  hypo
agatcaagaatcgcccgagccttctggtgg

SEQ ID NO: 157867 - DNA, 37 bp, Homo sapiens
  chr7:128853697-128853734
  hypo
ggattacaggcgtgagccaccgcgcccagctagtgcg

SEQ ID NO: 157868 - DNA, 129 bp, Homo sapiens
  chr7:129050167-129050296
  hypo
tcatcaagctttagctctaggcgtgttggtttccgtctcagcatactgaagtcaacactaagggccaaacccagtgaactattagcaattcacaggattatcctcagcgtccaaacagatcttaaatgt

SEQ ID NO: 157869 - DNA, 95 bp, Homo sapiens; identical to SEQ ID NO: 21784
  chr7:129096501-129096596
  hypo

SEQ ID NO: 157870 - DNA, 82 bp, Homo sapiens; identical to SEQ ID NO: 74707
  chr7:129172366-129172448
  hypo

SEQ ID NO: 157871 - DNA, 30 bp, Homo sapiens
  chr7:129190783-129190813
  hypo
ggattataggaaacccgaaacagatgttgg

SEQ ID NO: 157872 - DNA, 24 bp, Homo sapiens
  chr7:129205463-129205487
  hypo
caccgcacccggctggatactttt

SEQ ID NO: 157873 - DNA, 130 bp, Homo sapiens
  chr7:129245414-129245544
  hypo
tggatccctggtgcctctccccgaatctcacacacagcccacgtgtatttgttacagctctttaggttaggactgtctgctcacctgaaaccatgctcaaaggactttcgtaaaaaagacaaaggcaatc

SEQ ID NO: 157874 - DNA, 45 bp, Homo sapiens; identical to SEQ ID NO: 74709
  chr7:129287557-129287602
  hypo

SEQ ID NO: 157875 - DNA, 147 bp, Homo sapiens
  chr7:129297202-129297349
  hypo
cggagtgacccaaaccgaacatatggctaccatagaagcacatgcagtggcccagcaagtgcagcaggtccatgtggctacttacaccgagcatagtatgctgagtgctgatgaagactcgccttcttctcccgaggacacctctta

SEQ ID NO: 157876 - DNA, 234 bp, Homo sapiens
  chr7:129330227-129330461
  hypo
gcccttaattccctgcaggtgcgtaagtacaagagcatgatcctggaagacctggagtctgctctggcagaacacgcccctgcgccacaggaggttaactcagaactgccgcctctcaccatcgacggaattccagtctctgtggacaaaatgacccaggtgaggggtgggaggtgaggaggagactcaaagacaagtggcacaggtgtgggcgggcctctgatcacttttctg

SEQ ID NO: 157877 - DNA, 30 bp, Homo sapiens
  chr7:129330806-129330836
  hypo
agtacagcttccttccgcaagaatgtaaaa

SEQ ID NO: 157878 - DNA, 30 bp, Homo sapiens
  chr7:129381189-129381219
  hypo
ccttccctttaggtccgcagatctttcgga

SEQ ID NO: 157879 - DNA, 185 bp, Homo sapiens; identical to SEQ ID NO: 74711
  chr7:129392672-129392857
  hypo

SEQ ID NO: 157880 - DNA, 30 bp, Homo sapiens; identical to SEQ ID NO: 74712
  chr7:129402206-129402236
  hypo

SEQ ID NO: 157881 - DNA, 30 bp, Homo sapiens
  chr7:129402775-129402805
  hypo
ccccggcttccccacgggccatactgccta

SEQ ID NO: 157882 - DNA, 76 bp, Homo sapiens; identical to SEQ ID NO: 74713
  chr7:129410251-129410327
  hypo

SEQ ID NO: 157883 - DNA, 331 bp, Homo sapiens
  chr7:129414552-129414883
  hypo
atgattgctcagagcggagagacacaagcaaaaatgtgctagtgccaaaatcggccaagcagatggcactggtgcgggctctctggggacacactggacgaggggccttgcatccctgcacccttggaagcagcctgtttccgacgtctaggagcactcaaggcagaagtgggtaaggtgctccggaggccctcgtggatctgtctctgctctgtttatggcccttcggtaattcactgactgagactgttcacagtgaattctaccagtgccatacacagaacaggagtcacactctgcggcctgccgaccctgcggagagaccagcggc

SEQ ID NO: 157884 - DNA, 113 bp, Homo sapiens; identical to SEQ ID NO: 74715
  chr7:129435133-129435246
  hypo

SEQ ID NO: 157885 - DNA, 30 bp, Homo sapiens; identical to SEQ ID NO: 74716
  chr7:129436501-129436531
  hypo

SEQ ID NO: 157886 - DNA, 30 bp, Homo sapiens; identical to SEQ ID NO: 74717
  chr7:129444383-129444413
  hypo

SEQ ID NO: 157887 - DNA, 236 bp, Homo sapiens; identical to SEQ ID NO: 74718
  chr7:129470902-129471138
  hypo

SEQ ID NO: 157888 - DNA, 40 bp, Homo sapiens; identical to SEQ ID NO: 74719
  chr7:129483109-129483149
  hypo

SEQ ID NO: 157889 - DNA, 297 bp, Homo sapiens; identical to SEQ ID NO: 21789
  chr7:129483350-129483647
  hypo

SEQ ID NO: 157890 - DNA, 27 bp, Homo sapiens
  chr7:129492849-129492876
  hypo
gccaccgtgcccagcctacaacttaat

SEQ ID NO: 157891 - DNA, 30 bp, Homo sapiens
  chr7:129495443-129495473
  hypo
ttacagtcacgtgtgcgtgtgcgtgtgtat

SEQ ID NO: 157892 - DNA, 34 bp, Homo sapiens
  chr7:129501457-129501491
  hypo
acagtggctctcgcccgtaatcccaacactttgg

SEQ ID NO: 157893 - DNA, 144 bp, Homo sapiens
  chr7:129504688-129504832
  hypo
gccactaccagacattttctaacaacatatttcagtgatttgaccagattaaaatcagaactccttaagttttttggacagttattctctggcgtagttctagcactcgttaaaggggatggggaggatcgtacaacaggaata

SEQ ID NO: 157894 - DNA, 155 bp, Homo sapiens
  chr7:129518099-129518254
  hypo
ctttaccattcacaacgctgaaacttagaggcccctatagcaagaaagaaatttctgattcaactggttaggagtgggggtgtagtggggagtggtctagactccaggatatcgggcattacttcttaagacagcccacagcagccaggcgcaat

SEQ ID NO: 157895 - DNA, 28 bp, Homo sapiens
  chr7:129540873-129540901
  hypo
actcaccgtaccaggtgttttctttttc

SEQ ID NO: 157896 - DNA, 23 bp, Homo sapiens
  chr7:129546324-129546347
  hypo
gtgagtcacgcgcccagccctga

SEQ ID NO: 157897 - DNA, 23 bp, Homo sapiens
  chr7:129554293-129554316
  hypo
accatgcccgaccaaaaatcaac

SEQ ID NO: 157898 - DNA, 177 bp, Homo sapiens
  chr7:129565204-129565381
  hypo
ataaacaaaaattcacggtgttctccaggtggaaaaaaaacaagaaaaaaataaaatccacaatgtgggacagttcatgggagctaggcctatacaataatgctcccaaatatgtaaatgaaagaaaaaagcgaaacaacattcactgtgaaagacactgtacgtgatccaacccag

SEQ ID NO: 157899 - DNA, 30 bp, Homo sapiens
  chr7:129588245-129588275
  hypo
tttaatgtaagacaccgtccctttctatca

SEQ ID NO: 157900 - DNA, 17 bp, Homo sapiens
  chr7:129609407-129609424
  hypo
tggagtgcggtggcgcg

SEQ ID NO: 157901 - DNA, 30 bp, Homo sapiens
  chr7:129633312-129633342
  hypo
gcattcttggctctccggttttggaattgc

SEQ ID NO: 157902 - DNA, 32 bp, Homo sapiens; identical to SEQ ID NO: 74723
  chr7:129665424-129665456
  hypo

SEQ ID NO: 157903 - DNA, 46 bp, Homo sapiens; identical to SEQ ID NO: 21790
  chr7:129689364-129689410
  hypo

SEQ ID NO: 157904 - DNA, 241 bp, Homo sapiens; identical to SEQ ID NO: 21791
  chr7:129689709-129689950
  hypo

SEQ ID NO: 157905 - DNA, 30 bp, Homo sapiens; identical to SEQ ID NO: 74726
  chr7:129774820-129774850
  hypo

SEQ ID NO: 157906 - DNA, 148 bp, Homo sapiens; identical to SEQ ID NO: 21792
  chr7:129778854-129779002
  hypo

SEQ ID NO: 157907 - DNA, 75 bp, Homo sapiens
  chr7:129780113-129780188
  hypo
tgcatactagggcatccaggacgagaactccagctttacactggatctaaccccggaccccaaacacacacacta

SEQ ID NO: 157908 - DNA, 326 bp, Homo sapiens; identical to SEQ ID NO: 74728
  chr7:129780406-129780732
  hypo

SEQ ID NO: 157909 - DNA, 696 bp, Homo sapiens
  chr7:129782251-129782947
  hypo
gggtcccagaggggtggcctccgcccctcctgggggccgaggactgtcaccatgtcactacggcactctccagctgctgaccaaagccctcgctaaccgcagccctgccatactctgggtctttcctctggagcaaggtgaagagactgcagcgaggcgtggaattgggaagctcttctggttttattaaaaactcgttccaccacaggagtcagcctggccactcaggtgtggggcgggtctctcctcatttagctttcacctgcgtgcccagggataggagaaaaacggcacagagggaggttgtagggagtaagcatcctgccctggcaaagctgagtgaacgtgggtagcttcagcccagtgaagcagcagcagggacgcctgtggaaacctgggtggaggtgccttctgaccttggtttgtctgggccagggggcgaatgcttctggcagtggagcttccaggcccggaaaacccaggcctcttctcctcacgtgggccctcaggtgcttgtggactgcccggagacagaacagaactgagggtgggagggcctgcttttgcctgcagaacaccctgaaatgtcccatttacccagctctctccagggcccgcacagtccaaacttctctggcctcaactcctaccactgtgcctttgctcactctcgaccagccacggtggcttccttgc

SEQ ID NO: 157910 - DNA, 246 bp, Homo sapiens
  chr7:129794493-129794739
  hypo
cctggggaccacatgcgtgactggctggccccctgctcatcccgcctctctcctccgcctggcttcgcgccgcctgcctgccctcggggacaagcgtgcccatctgacacctcagcgcctgcccattccccgggaccaggccatctggcctcgctgctgcctctgctctgtgcaacccccatgccgcagcccgtcgcctcctgctccagcctccgccaggactgtcctgtgcgcccatcagggtgt

SEQ ID NO: 157911 - DNA, 204 bp, Homo sapiens; identical to SEQ ID NO: 21795
  chr7:129800275-129800479
  hypo

SEQ ID NO: 157912 - DNA, 181 bp, Homo sapiens
  chr7:129833436-129833617
  hypo
atgcatattgttaagtgaaagaagccaatccgaaaagctacacgggtatgattctaagtacatgacgttctagaaaaggcaaaactatggcggcaattaaaaaaaaacactggttaacaggaatttggaggaaaagatgaatgaataaatggtgcagtttcattctgtatgatactataat

SEQ ID NO: 157913 - DNA, 39 bp, Homo sapiens; identical to SEQ ID NO: 74732
  chr7:129844184-129844223
  hypo

SEQ ID NO: 157914 - DNA, 168 bp, Homo sapiens
  chr7:129846025-129846193
  hypo
gctgagccaggcgcacggatatagaaaataagaccttcctggttattacccagaggagctcaaccccagcggaggcccacagatgcatttcggtggcaggtgaggtggatgcagtgctccccaaggaggcgcatccagcccagccccagctctcgcgagcttcctgga

SEQ ID NO: 157915 - DNA, 28 bp, Homo sapiens
  chr7:129846538-129846566
  hypo
aataccggccgggcgcggtggctcacgc

SEQ ID NO: 157916 - DNA, 79 bp, Homo sapiens; identical to SEQ ID NO: 74733
  chr7:129851261-129851340
  hypo

SEQ ID NO: 157917 - DNA, 31 bp, Homo sapiens; identical to SEQ ID NO: 74734
  chr7:129861967-129861998
  hypo

SEQ ID NO: 157918 - DNA, 26 bp, Homo sapiens
  chr7:129924772-129924798
  hypo
actccgtctcaaaaaaaaaaaagaaa

SEQ ID NO: 157919 - DNA, 31 bp, Homo sapiens; identical to SEQ ID NO: 74736
  chr7:129937094-129937125
  hypo

SEQ ID NO: 157920 - DNA, 275 bp, Homo sapiens; identical to SEQ ID NO: 74737
  chr7:129948128-129948403
  hypo

SEQ ID NO: 157921 - DNA, 30 bp, Homo sapiens; identical to SEQ ID NO: 44740
  chr7:130667105-130667135
  hypo

SEQ ID NO: 157922 - DNA, 30 bp, Homo sapiens; identical to SEQ ID NO: 44741
  chr7:130680505-130680535
  hypo

SEQ ID NO: 157923 - DNA, 30 bp, Homo sapiens
  chr7:130726252-130726282
  hypo
cttgtaaccaaaagcgcttctttgaaggac

SEQ ID NO: 157924 - DNA, 30 bp, Homo sapiens; identical to SEQ ID NO: 74740
  chr7:130752081-130752111
  hypo

SEQ ID NO: 157925 - DNA, 30 bp, Homo sapiens
  chr7:130858994-130859024
  hypo
tgctgggattacaggcgtgagccaccgcgc

SEQ ID NO: 157926 - DNA, 30 bp, Homo sapiens; identical to SEQ ID NO: 74742
  chr7:130934904-130934934
  hypo

SEQ ID NO: 157927 - DNA, 30 bp, Homo sapiens; identical to SEQ ID NO: 21797
  chr7:130970110-130970140
  hypo

SEQ ID NO: 157928 - DNA, 45 bp, Homo sapiens; identical to SEQ ID NO: 74744
  chr7:130982738-130982783
  hypo

SEQ ID NO: 157929 - DNA, 127 bp, Homo sapiens; identical to SEQ ID NO: 21798
  chr7:131041469-131041596
  hypo

SEQ ID NO: 157930 - DNA, 84 bp, Homo sapiens; identical to SEQ ID NO: 21799
  chr7:131231113-131231197
  hypo

SEQ ID NO: 157931 - DNA, 30 bp, Homo sapiens
  chr7:131292710-131292740
  hypo
agaggcggcattgagcgtgactgtggccag

SEQ ID NO: 157932 - DNA, 31 bp, Homo sapiens; identical to SEQ ID NO: 21800
  chr7:131329430-131329461
  hypo

SEQ ID NO: 157933 - DNA, 30 bp, Homo sapiens; identical to SEQ ID NO: 74748
  chr7:131422237-131422267
  hypo

SEQ ID NO: 157934 - DNA, 282 bp, Homo sapiens; identical to SEQ ID NO: 74749
  chr7:131422549-131422831
  hypo

SEQ ID NO: 157935 - DNA, 31 bp, Homo sapiens; identical to SEQ ID NO: 74750
  chr7:131496158-131496189
  hypo

SEQ ID NO: 157936 - DNA, 30 bp, Homo sapiens
  chr7:131579367-131579397
  hypo
ctaatccaactgaagcgaaggaaccatttc

SEQ ID NO: 157937 - DNA, 30 bp, Homo sapiens; identical to SEQ ID NO: 74751
  chr7:131831424-131831454
  hypo

SEQ ID NO: 157938 - DNA, 250 bp, Homo sapiens; identical to SEQ ID NO: 21801
  chr7:131864447-131864697
  hypo

SEQ ID NO: 157939 - DNA, 30 bp, Homo sapiens; identical to SEQ ID NO: 74753
  chr7:132107214-132107244
  hypo

SEQ ID NO: 157940 - DNA, 30 bp, Homo sapiens; identical to SEQ ID NO: 74754
  chr7:132170071-132170101
  hypo

SEQ ID NO: 157941 - DNA, 946 bp, Homo sapiens; identical to SEQ ID NO: 115717
  chr7:132261534-132262480
  hypo

SEQ ID NO: 157942 - DNA, 30 bp, Homo sapiens
  chr7:132397569-132397599
  hypo
acaaacatgcacactcgcacacacccacat

SEQ ID NO: 157943 - DNA, 30 bp, Homo sapiens
  chr7:132398285-132398315
  hypo
gagcacagagcagctcggctctctatctct

SEQ ID NO: 157944 - DNA, 272 bp, Homo sapiens
  chr7:132418867-132419139
  hypo
caagaccaccctggcttgccacgcccccacctgagcctataaaaaccggataccctagcaaggcagagacagaagctgttggacggtgagaggaacacgttggcggaagaagacaagcagctggatatcgaggggacatcgaggggagcatgctggcagaagaacacaccaacagagggacacccgcactctggctggtctcacaacccgcaggacaaggcagagtttggctggggcaatcggaggaactccagggaaaaaccatctccctt

SEQ ID NO: 157945 - DNA, 30 bp, Homo sapiens
  chr7:132442058-132442088
  hypo
cattgtttatgtacgcgttctacctatagg

SEQ ID NO: 157946 - DNA, 30 bp, Homo sapiens; identical to SEQ ID NO: 74758
  chr7:132468168-132468198
  hypo

SEQ ID NO: 157947 - DNA, 106 bp, Homo sapiens; identical to SEQ ID NO: 21804
  chr7:132527722-132527828
  hypo

SEQ ID NO: 157948 - DNA, 46 bp, Homo sapiens; identical to SEQ ID NO: 21805
  chr7:132527947-132527993
  hypo

SEQ ID NO: 157949 - DNA, 174 bp, Homo sapiens
  chr7:132610411-132610585
  hypo
tcagcaagcactcaccgcacacgtatataccccagctataacacaagtatatatcccagctagaaaaagagaggaataccacatcgtacttgtcctctaagagcttactgaccactagagaagtggagcacaaacacagagcaacaacaaacttcataacgaaaacgtttccaa

SEQ ID NO: 157950 - DNA, 204 bp, Homo sapiens; identical to SEQ ID NO: 21806
  chr7:132637909-132638113
  hypo

SEQ ID NO: 157951 - DNA, 30 bp, Homo sapiens; identical to SEQ ID NO: 21807
  chr7:132733565-132733595
  hypo

SEQ ID NO: 157952 - DNA, 26 bp, Homo sapiens
  chr7:133197618-133197644
  hypo
gctcacgcctgcgggcggatcagttg

SEQ ID NO: 157953 - DNA, 93 bp, Homo sapiens; identical to SEQ ID NO: 21808
  chr7:133234085-133234178
  hypo

SEQ ID NO: 157954 - DNA, 31 bp, Homo sapiens; identical to SEQ ID NO: 21809
  chr7:133318547-133318578
  hypo

SEQ ID NO: 157955 - DNA, 30 bp, Homo sapiens
  chr7:133630457-133630487
  hypo
ccaaccgcacagttgcgcaatattccagca

SEQ ID NO: 157956 - DNA, 158 bp, Homo sapiens
  chr7:133630764-133630922
  hypo
aattagaactctatgcgtggtaattcctctctcgcttcagtatttacaagtttcaaatatttgttgactgttatcagacagttcctcctcagcctaccttacatgtttagtttctctaatcacctttctatggttagactttccgtgcccttcatcgt

SEQ ID NO: 157957 - DNA, 30 bp, Homo sapiens
  chr7:133755376-133755406
  hypo
tgtctgggccaaagacgcgtctgtaattaa

SEQ ID NO: 157958 - DNA, 103 bp, Homo sapiens; identical to SEQ ID NO: 74765
  chr7:133828851-133828954
  hypo

SEQ ID NO: 157959 - DNA, 30 bp, Homo sapiens
  chr7:133842269-133842299
  hypo
cactcaaaagctatgcgtttttttgagacg

SEQ ID NO: 157960 - DNA, 20 bp, Homo sapiens
  chr7:134116469-134116489
  hypo
acagagtgagactctatctc

SEQ ID NO: 157961 - DNA, 43 bp, Homo sapiens; identical to SEQ ID NO: 74767
  chr7:134135182-134135225
  hypo

SEQ ID NO: 157962 - DNA, 607 bp, Homo sapiens; identical to SEQ ID NO: 115727
  chr7:134142979-134143586
  hypo

SEQ ID NO: 157963 - DNA, 439 bp, Homo sapiens; identical to SEQ ID NO: 5899
  chr7:134143700-134144139
  hypo

SEQ ID NO: 157964 - DNA, 30 bp, Homo sapiens
  chr7:134332126-134332156
  hypo
agaaaaactcgaatgcggtgaaaagagaag

SEQ ID NO: 157965 - DNA, 22 bp, Homo sapiens
  chr7:134335374-134335396
  hypo
taagacattaaaagccttggcc

SEQ ID NO: 157966 - DNA, 60 bp, Homo sapiens
  chr7:134377918-134377978
  hypo
catcgttatttgagacgtatgtgtataatgagacacttggcagcacgagcgaatgaagtg

SEQ ID NO: 157967 - DNA, 51 bp, Homo sapiens; identical to SEQ ID NO: 74772
  chr7:134378382-134378433
  hypo

SEQ ID NO: 157968 - DNA, 178 bp, Homo sapiens; identical to SEQ ID NO: 21814
  chr7:134613458-134613636
  hypo

SEQ ID NO: 157969 - DNA, 30 bp, Homo sapiens
  chr7:134644746-134644776
  hypo
caaagccggcagcctcggatcttcctgttc

SEQ ID NO: 157970 - DNA, 145 bp, Homo sapiens
  chr7:134673286-134673431
  hypo
tatgtatgtaaactaatgtcccgaaataagctcttaaagcttactttagctatttaaaggatttatggctttctgtgtttttctttttgttaatttaatttttttttttttcttgagccagagtttgagatcgctcttgttgctc

SEQ ID NO: 157971 - DNA, 24 bp, Homo sapiens
  chr7:134673670-134673694
  hypo
gagccgccacgcccggccaatttt

SEQ ID NO: 157972 - DNA, 185 bp, Homo sapiens; identical to SEQ ID NO: 21816
  chr7:134853336-134853521
  hypo

SEQ ID NO: 157973 - DNA, 243 bp, Homo sapiens
  chr7:134860913-134861156
  hypo
acaaatgatgttaagcggtaggcacagaagaggttcccagaagcagatccaaattgggatccaaaccaggcaggagaattgcaaaacctgcataggtatcgggaggcaccccttaatggaataaaggccagaaggaaaaaggcagcgaatttgggagaggtctcagaggtatgccaaaaggttgattagagtcccagtgaattttatgaaacactctgtgaagcataccggctttatacatcg

SEQ ID NO: 157974 - DNA, 30 bp, Homo sapiens
  chr7:134861407-134861437
  hypo
ggacgcggacttggtcgtggtcacagtaga

SEQ ID NO: 157975 - DNA, 30 bp, Homo sapiens
  chr7:134862033-134862063
  hypo
ggtgcaactccagtgcgtattccccagtac

SEQ ID NO: 157976 - DNA, 157 bp, Homo sapiens
  chr7:134862667-134862824
  hypo
gtagcccaagggcagcgtgaactcggcagtgggcagaaggaagccatatgtgcgctccccactcctgtcacccggcgacaagtaagggagtttttaggggcagcaggcttttgctgtacttcaatgccaaacctttcactcacggcaaagccattgt

SEQ ID NO: 157977 - DNA, 30 bp, Homo sapiens; identical to SEQ ID NO: 74777
  chr7:134867101-134867131
  hypo

SEQ ID NO: 157978 - DNA, 445 bp, Homo sapiens; identical to SEQ ID NO: 21817
  chr7:134880721-134881166
  hypo

SEQ ID NO: 157979 - DNA, 30 bp, Homo sapiens; identical to SEQ ID NO: 21818
  chr7:134884375-134884405
  hypo

SEQ ID NO: 157980 - DNA, 239 bp, Homo sapiens
  chr7:134890669-134890908
  hypo
acacactcacagttccgagtcccccaggcggtccatgttggagacataaggaggcaatttgtgttggaccaaggcctcttcctcttctggctgttgctcctctttcttcagtcggtggatttcagcttgcaatgcaaaaagctatacaggggtgggactgagttagccaatgatctcacctaaccttccctctgcggaggaagatttctagacacatcgcatccaagcccactggtctg

SEQ ID NO: 157981 - DNA, 22 bp, Homo sapiens
  chr7:134895079-134895101
  hypo
cgacagagtgagactttctgtc

SEQ ID NO: 157982 - DNA, 20 bp, Homo sapiens
  chr7:134898016-134898036
  hypo
tgacaataggccgggcgcgg

SEQ ID NO: 157983 - DNA, 200 bp, Homo sapiens; identical to SEQ ID NO: 74783
  chr7:134898275-134898475
  hypo

SEQ ID NO: 157984 - DNA, 578 bp, Homo sapiens; identical to SEQ ID NO: 74784
  chr7:134918298-134918876
  hypo

SEQ ID NO: 157985 - DNA, 37 bp, Homo sapiens; identical to SEQ ID NO: 74785
  chr7:134922345-134922382
  hypo

SEQ ID NO: 157986 - DNA, 30 bp, Homo sapiens; identical to SEQ ID NO: 74786
  chr7:134931429-134931459
  hypo

SEQ ID NO: 157987 - DNA, 44 bp, Homo sapiens; identical to SEQ ID NO: 74787
  chr7:135125369-135125413
  hypo

SEQ ID NO: 157988 - DNA, 19 bp, Homo sapiens
  chr7:135205085-135205104
  hypo
aaaaatagccaggcgcggt

SEQ ID NO: 157989 - DNA, 18 bp, Homo sapiens
  chr7:135234582-135234600
  hypo
tttctctgccgggcacgg

SEQ ID NO: 157990 - DNA, 31 bp, Homo sapiens; identical to SEQ ID NO: 74788
  chr7:135247629-135247660
  hypo

SEQ ID NO: 157991 - DNA, 30 bp, Homo sapiens
  chr7:135338304-135338334
  hypo
gcgccaggtgcagcacgcactcttcaccga

SEQ ID NO: 157992 - DNA, 98 bp, Homo sapiens; identical to SEQ ID NO: 21824
  chr7:135360967-135361065
  hypo

SEQ ID NO: 157993 - DNA, 198 bp, Homo sapiens
  chr7:135390899-135391097
  hypo
tggagttgcccgccacgagctgctcgtcctcagcactgaccagctcctgcagcacggcctccacgatgggcatcaccatggcggtggtggaggtgttggacagccacatggacagcaacgtggtacagcacatgaagcagagcagcagcctggaaggcagggagggttggggcagagcgtccacggaacacacatccc

SEQ ID NO: 157994 - DNA, 30 bp, Homo sapiens
  chr7:135391439-135391469
  hypo
cagcaattctgtgagcgccacggcactcct

SEQ ID NO: 157995 - DNA, 121 bp, Homo sapiens; identical to SEQ ID NO: 74791
  chr7:135401688-135401809
  hypo

SEQ ID NO: 157996 - DNA, 30 bp, Homo sapiens; identical to SEQ ID NO: 44766
  chr7:135405128-135405158
  hypo

SEQ ID NO: 157997 - DNA, 30 bp, Homo sapiens; identical to SEQ ID NO: 44767
  chr7:135405190-135405220
  hypo

SEQ ID NO: 157998 - DNA, 237 bp, Homo sapiens
  chr7:135412147-135412384
  hypo
tgctggggtggaggacgggcagaggcagcagcaggagcgggacgcagacgaccagcagcagcttccggactcggagcaggccctgcagcaggcccatcgcgcctctgtcctctccagctcgtccttggaccccgctctgccggcgaaaggcttcctgcctgggcactgctctctatccagaaagacttcttaaacctttcttggcttccgagagtcctccttcgtcttgggggcaga

SEQ ID NO: 157999 - DNA, 30 bp, Homo sapiens
  chr7:135432274-135432304
  hypo
cagatccttctctcgcgctgctctatcccc

SEQ ID NO: 158000 - DNA, 21 bp, Homo sapiens
  chr7:135440300-135440321
  hypo
ccctcaagggttgccagcata

SEQ ID NO: 158001 - DNA, 87 bp, Homo sapiens; identical to SEQ ID NO: 74795
  chr7:135440342-135440429
  hypo

SEQ ID NO: 158002 - DNA, 31 bp, Homo sapiens; identical to SEQ ID NO: 21825
  chr7:135495522-135495553
  hypo

SEQ ID NO: 158003 - DNA, 195 bp, Homo sapiens; identical to SEQ ID NO: 21826
  chr7:135611087-135611282
  hypo

SEQ ID NO: 158004 - DNA, 86 bp, Homo sapiens
  chr7:135751658-135751744
  hypo
agatccctcgcatgcacattctcgctcctatgagaatcgaatgccaccgctaatctgacgggagggagccccggcggtaatgtttg

SEQ ID NO: 158005 - DNA, 97 bp, Homo sapiens; identical to SEQ ID NO: 21827
  chr7:136437908-136438005
  hypo

SEQ ID NO: 158006 - DNA, 74 bp, Homo sapiens; identical to SEQ ID NO: 74799
  chr7:136849128-136849202
  hypo

SEQ ID NO: 158007 - DNA, 22 bp, Homo sapiens
  chr7:136968989-136969011
  hypo
accgcgccgggccgagcatcat

SEQ ID NO: 158008 - DNA, 30 bp, Homo sapiens; identical to SEQ ID NO: 21828
  chr7:137080295-137080325
  hypo

SEQ ID NO: 158009 - DNA, 32 bp, Homo sapiens
  chr7:137107611-137107643
  hypo
agtgctgggattacaggcgtgagccaccgcgc

SEQ ID NO: 158010 - DNA, 18 bp, Homo sapiens
  chr7:137491477-137491495
  hypo
ctgaacctctgcatctat

SEQ ID NO: 158011 - DNA, 68 bp, Homo sapiens
  chr7:137499013-137499081
  hypo
actggaatggaacaccgtcatgtgttcttataaagtaaagaaatgccaaaaaacgattcaaattccat

SEQ ID NO: 158012 - DNA, 193 bp, Homo sapiens; identical to SEQ ID NO: 21829
  chr7:137564611-137564804
  hypo

SEQ ID NO: 158013 - DNA, 30 bp, Homo sapiens
  chr7:137566908-137566938
  hypo
accacgccagctccccgctgatgcagcaga

SEQ ID NO: 158014 - DNA, 186 bp, Homo sapiens
  chr7:137593861-137594047
  hypo
tgctttgaaaaaagccggtttgtttctggagcaatgtgcgtggtcatgcccgcaggcaagacgccaggcattcttcattcagaaaacatgaaatccatcttcagatacgggagtgagcacaggaaaaataagtgagagtgcagtggggggactttctcctctaaagtctcccgcgtctttcctcaa

SEQ ID NO: 158015 - DNA, 30 bp, Homo sapiens; identical to SEQ ID NO: 21830
  chr7:137624004-137624034
  hypo

SEQ ID NO: 158016 - DNA, 38 bp, Homo sapiens; identical to SEQ ID NO: 21831
  chr7:137637555-137637593
  hypo

SEQ ID NO: 158017 - DNA, 38 bp, Homo sapiens; identical to SEQ ID NO: 21832
  chr7:137637832-137637870
  hypo

SEQ ID NO: 158018 - DNA, 30 bp, Homo sapiens
  chr7:137640495-137640525
  hypo
aagattaatatgcctcgtgttccattactg

SEQ ID NO: 158019 - DNA, 21 bp, Homo sapiens
  chr7:137648772-137648793
  hypo
acttgcggccaggcgcggtgg

SEQ ID NO: 158020 - DNA, 41 bp, Homo sapiens
  chr7:137658136-137658177
  hypo
gagtttcccagacagcggcccaccggcgcctattctctttg

SEQ ID NO: 158021 - DNA, 84 bp, Homo sapiens; identical to SEQ ID NO: 74807
  chr7:137664094-137664178
  hypo

SEQ ID NO: 158022 - DNA, 205 bp, Homo sapiens; identical to SEQ ID NO: 21834
  chr7:137670024-137670229
  hypo

SEQ ID NO: 158023 - DNA, 30 bp, Homo sapiens; identical to SEQ ID NO: 21835
  chr7:137678214-137678244
  hypo

SEQ ID NO: 158024 - DNA, 195 bp, Homo sapiens; identical to SEQ ID NO: 21836
  chr7:137706783-137706978
  hypo

SEQ ID NO: 158025 - DNA, 38 bp, Homo sapiens
  chr7:137742303-137742341
  hypo
ggcaggcaaatcacacgaggccaggagttcgagaccag

SEQ ID NO: 158026 - DNA, 120 bp, Homo sapiens
  chr7:138010001-138010121
  hypo
atgtcagagtaaacccgggtgtcatgtgtcagcaatgcggccatggacagccttggtacacgcacaggatagctttatgtacataaagtcatgcactgtaacgaccgcctatacaacagt

SEQ ID NO: 158027 - DNA, 301 bp, Homo sapiens; identical to SEQ ID NO: 21837
  chr7:138042027-138042328
  hypo

SEQ ID NO: 158028 - DNA, 40 bp, Homo sapiens; identical to SEQ ID NO: 21838
  chr7:138042567-138042607
  hypo

SEQ ID NO: 158029 - DNA, 84 bp, Homo sapiens
  chr7:138044358-138044442
  hypo
tttatttcgtttctgttttgatttttgttttaatttttgctctatggatttgcctcaaacgctttcttgcgtgtgacccaagaa

SEQ ID NO: 158030 - DNA, 121 bp, Homo sapiens
  chr7:138044850-138044971
  hypo
tggcattttatggctacttggcgtctgtcagtctggagcccacataccaagtggcttcaagaggtacttacttagcctaagcggggagtgagacgtgaccgctgttgcatttcaatgcctc

SEQ ID NO: 158031 - DNA, 31 bp, Homo sapiens; identical to SEQ ID NO: 74813
  chr7:138094770-138094801
  hypo

SEQ ID NO: 158032 - DNA, 31 bp, Homo sapiens; identical to SEQ ID NO: 74814
  chr7:138122332-138122363
  hypo

SEQ ID NO: 158033 - DNA, 30 bp, Homo sapiens
  chr7:138125402-138125432
  hypo
tgtttatgtctggtcgtggggtctcgcggc

SEQ ID NO: 158034 - DNA, 153 bp, Homo sapiens
  chr7:138125640-138125793
  hypo
tctcctcccccatggacgctgtgacagaagctgacatggccatcgcaatggctctgatgggaggtattggtttcattcaccaccactgcaccccagagttccaggccaatgaggtgcggaaggtcaagaagtttgaacggggctttatcatgg

SEQ ID NO: 158035 - DNA, 31 bp, Homo sapiens; identical to SEQ ID NO: 74816
  chr7:138127125-138127156
  hypo

SEQ ID NO: 158036 - DNA, 35 bp, Homo sapiens; identical to SEQ ID NO: 74817
  chr7:138247006-138247041
  hypo

SEQ ID NO: 158037 - DNA, 30 bp, Homo sapiens
  chr7:138348119-138348149
  hypo
gggtcctctgccgcccgcttgttgctagag

SEQ ID NO: 158038 - DNA, 21 bp, Homo sapiens
  chr7:138376268-138376289
  hypo
aagttttgctgttgttgctgt

SEQ ID NO: 158039 - DNA, 25 bp, Homo sapiens
  chr7:138397736-138397761
  hypo
caggagtaaagacatgcggccgggc

SEQ ID NO: 158040 - DNA, 30 bp, Homo sapiens; identical to SEQ ID NO: 74820
  chr7:138435360-138435390
  hypo

SEQ ID NO: 158041 - DNA, 31 bp, Homo sapiens; identical to SEQ ID NO: 74821
  chr7:138487654-138487685
  hypo

SEQ ID NO: 158042 - DNA, 294 bp, Homo sapiens
  chr7:138554217-138554511
  hypo
gctcctgtgccccccgcagcacctctgcgcgcccgccccaccgcctagcgcagagccccagcccacctcttcctgggctctatgaacacggagggcacgctggccgtggggtccaggatcttgtcgatctgcatctgtgccctgcggtacacccggtgtcgctccttagtgtcgcccgaggacaggtcgtctaccaccgggaactcgtagtgcccgcggcgcttggcgcgcaggcggatcttgttgcgatggtgctcgatctcagacttgtgccgcagcgcggtctgaatctga

SEQ ID NO: 158043 - DNA, 30 bp, Homo sapiens
  chr7:138556967-138556997
  hypo
caggcaggagccaccgggcccggcgctagt

SEQ ID NO: 158044 - DNA, 30 bp, Homo sapiens
  chr7:138574941-138574971
  hypo
aagtaatgagagagacgcctgatgaatgtg

SEQ ID NO: 158045 - DNA, 30 bp, Homo sapiens
  chr7:138575278-138575308
  hypo
gtaaccctgtggtcccggagtttgggagag

SEQ ID NO: 158046 - DNA, 30 bp, Homo sapiens
  chr7:138576684-138576714
  hypo
cccattttaaacacacgacaaaatctatag

SEQ ID NO: 158047 - DNA, 38 bp, Homo sapiens
  chr7:138588488-138588526
  hypo
ttaaatgaaaacatacgtggcacccaaaacaagtcagc

SEQ ID NO: 158048 - DNA, 37 bp, Homo sapiens
  chr7:138588585-138588622
  hypo
tgtgtgtgtgtgtgcgcgcgcgcgcgcgcgcacatat

SEQ ID NO: 158049 - DNA, 39 bp, Homo sapiens; identical to SEQ ID NO: 74823
  chr7:138636037-138636076
  hypo

SEQ ID NO: 158050 - DNA, 41 bp, Homo sapiens
  chr7:138647453-138647494
  hypo
gcagaattatccatccgagacctgtccgaattcctgacccg

SEQ ID NO: 158051 - DNA, 493 bp, Homo sapiens; identical to SEQ ID NO: 115760
  chr7:138720459-138720952
  hypo

SEQ ID NO: 158052 - DNA, 85 bp, Homo sapiens
  chr7:138721474-138721559
  hypo
ctggaattacaggcgtgagccaccccgcggggcctgctgagctttattggaaagtggctagtccgaattgagatgtgatataagt

SEQ ID NO: 158053 - DNA, 30 bp, Homo sapiens
  chr7:138764798-138764828
  hypo
cttgcgggtgagatcgtccacaggcgcgtc

SEQ ID NO: 158054 - DNA, 34 bp, Homo sapiens; identical to SEQ ID NO: 21841
  chr7:138778535-138778569
  hypo

SEQ ID NO: 158055 - DNA, 33 bp, Homo sapiens; identical to SEQ ID NO: 21842
  chr7:138845465-138845498
  hypo

SEQ ID NO: 158056 - DNA, 28 bp, Homo sapiens
  chr7:138909621-138909649
  hypo
tccctctccctctcccttcttcggtctc

SEQ ID NO: 158057 - DNA, 94 bp, Homo sapiens; identical to SEQ ID NO: 74828
  chr7:138912953-138913047
  hypo

SEQ ID NO: 158058 - DNA, 42 bp, Homo sapiens; identical to SEQ ID NO: 74829
  chr7:138913396-138913438
  hypo

SEQ ID NO: 158059 - DNA, 121 bp, Homo sapiens; identical to SEQ ID NO: 21844
  chr7:138974787-138974908
  hypo

SEQ ID NO: 158060 - DNA, 16 bp, Homo sapiens
  chr7:138974967-138974983
  hypo
ccgtgccttgccaact

SEQ ID NO: 158061 - DNA, 90 bp, Homo sapiens
  chr7:138993451-138993541
  hypo
ttgatggtgctactacggtcaggacttgaaatgtagatgtgggaatcatacaaaaataattcaaccttagaaattcaggtaagaggccgg

SEQ ID NO: 158062 - DNA, 30 bp, Homo sapiens
  chr7:139102363-139102393
  hypo
gggagaaacgccatcgccacaggtcccgct

SEQ ID NO: 158063 - DNA, 216 bp, Homo sapiens
  chr7:139112526-139112742
  hypo
ctacatagacgatgcccgatgaatgtggaatgaatgaatgaagtgcctcatgttttccaacataaattaactcacacgatctcatttgatttgtatagcaatcctgtggttactcgaagggaccatattctatcaccatcatgcccgtttttcggagtaggaagctgaggcatgctgagtgactaataggacagagtcagccgacacctttttgat

SEQ ID NO: 158064 - DNA, 43 bp, Homo sapiens
  chr7:139123707-139123750
  hypo
gggattacaggcgtgagccaccatgccccgcgtggcaatttct

SEQ ID NO: 158065 - DNA, 271 bp, Homo sapiens; identical to SEQ ID NO: 5916
  chr7:139167555-139167826
  hypo

SEQ ID NO: 158066 - DNA, 499 bp, Homo sapiens; identical to SEQ ID NO: 5917
  chr7:139168114-139168613
  hypo

SEQ ID NO: 158067 - DNA, 97 bp, Homo sapiens; identical to SEQ ID NO: 115778
  chr7:139208472-139208569
  hypo

SEQ ID NO: 158068 - DNA, 222 bp, Homo sapiens; identical to SEQ ID NO: 115779
  chr7:139208614-139208836
  hypo

SEQ ID NO: 158069 - DNA, 216 bp, Homo sapiens; identical to SEQ ID NO: 74834
  chr7:139245493-139245709
  hypo

SEQ ID NO: 158070 - DNA, 30 bp, Homo sapiens; identical to SEQ ID NO: 74835
  chr7:139251600-139251630
  hypo

SEQ ID NO: 158071 - DNA, 46 bp, Homo sapiens; identical to SEQ ID NO: 74836
  chr7:139256589-139256635
  hypo

SEQ ID NO: 158072 - DNA, 271 bp, Homo sapiens; identical to SEQ ID NO: 74837
  chr7:139257803-139258074
  hypo

SEQ ID NO: 158073 - DNA, 181 bp, Homo sapiens
  chr7:139298886-139299067
  hypo
agttcagtgataccagcgctctcactggaagaaatgaggagggcctttctccatgaaaatgagcgtgacagaaaactgcaggtgccggagccccagaggccgttctgtaagaagcaggtgagaggctgtggctgctcaatcttaccttggaagccggggggacacacgatgagagcttgct

SEQ ID NO: 158074 - DNA, 30 bp, Homo sapiens; identical to SEQ ID NO: 21850
  chr7:139412981-139413011
  hypo

SEQ ID NO: 158075 - DNA, 30 bp, Homo sapiens
  chr7:139475894-139475924
  hypo
cgacatgggttctcccgcatgttcacatgt

SEQ ID NO: 158076 - DNA, 546 bp, Homo sapiens; identical to SEQ ID NO: 115782
  chr7:139477942-139478488
  hypo

SEQ ID NO: 158077 - DNA, 21 bp, Homo sapiens
  chr7:139622185-139622206
  hypo
ccaccgcgcccagccgagaac

SEQ ID NO: 158078 - DNA, 30 bp, Homo sapiens
  chr7:139656412-139656442
  hypo
ttcccgtttctgagccgatgtccatgggag

SEQ ID NO: 158079 - DNA, 30 bp, Homo sapiens; identical to SEQ ID NO: 74842
  chr7:139657553-139657583
  hypo

SEQ ID NO: 158080 - DNA, 30 bp, Homo sapiens; identical to SEQ ID NO: 74843
  chr7:139658330-139658360
  hypo

SEQ ID NO: 158081 - DNA, 30 bp, Homo sapiens
  chr7:139659124-139659154
  hypo
tgcgcagtgaaaatgcggcacagatgttaa

SEQ ID NO: 158082 - DNA, 30 bp, Homo sapiens; identical to SEQ ID NO: 74844
  chr7:139688861-139688891
  hypo

SEQ ID NO: 158083 - DNA, 257 bp, Homo sapiens
  chr7:139690718-139690975
  hypo
cccgacggtgcaggcacgggggcacagaggcagcaggacattgcaggagcagagacacgaagacaaaagaaacaaatgattccttaagatccatggccaaaacaaattgccgcaattaacacgtgccactgccacgatctatgggctgaaacgtggctggaacgacgcagaagcagaaaccacagagagcgtgcgctccaataaaacggcactaaatggcacggctgtgatggaactcgtttcgattttgttccaaa

SEQ ID NO: 158084 - DNA, 41 bp, Homo sapiens
  chr7:139709786-139709827
  hypo
cacccgctccacacccgcttcacacccgctccacacccgcc

SEQ ID NO: 158085 - DNA, 59 bp, Homo sapiens
  chr7:139710187-139710246
  hypo
gcagccctgtctgagcgccactgaggtgactcccggatgctgtgcggtgcagttctgaa

SEQ ID NO: 158086 - DNA, 218 bp, Homo sapiens; identical to SEQ ID NO: 74846
  chr7:139717410-139717628
  hypo

SEQ ID NO: 158087 - DNA, 214 bp, Homo sapiens
  chr7:139727807-139728021
  hypo
tcccaggacagggaccgtcacgttttaaagctgagttagacagtgctcggcagccggccagctggcagacatcagcccaggtgcagacgggcagcctcagatgttagtctgcgtactctcctgcactcagcacagctcccactggtcagagcccctcaacaagctgccaaattgactgtccattctcctgtctgctagtcgtgaatgccttccc

SEQ ID NO: 158088 - DNA, 347 bp, Homo sapiens; identical to SEQ ID NO: 21852
  chr7:139733610-139733957
  hypo

SEQ ID NO: 158089 - DNA, 143 bp, Homo sapiens
  chr7:139763644-139763787
  hypo
gggaggtagggttacgtgggaacagtgtggttgatctttaaagactattacgaaggctgtttaacaagcatgcgttagagctccgtgtgcggatgtagaggggcagacagccatgatgtggtggtaaacgagaaaagatggct

SEQ ID NO: 158090 - DNA, 43 bp, Homo sapiens; identical to SEQ ID NO: 74849
  chr7:139842730-139842773
  hypo

SEQ ID NO: 158091 - DNA, 45 bp, Homo sapiens; identical to SEQ ID NO: 74850
  chr7:139866423-139866468
  hypo

SEQ ID NO: 158092 - DNA, 66 bp, Homo sapiens; identical to SEQ ID NO: 74851
  chr7:139897107-139897173
  hypo

SEQ ID NO: 158093 - DNA, 876 bp, Homo sapiens; identical to SEQ ID NO: 44797
  chr7:139929833-139930709
  hypo

SEQ ID NO: 158094 - DNA, 30 bp, Homo sapiens; identical to SEQ ID NO: 44798
  chr7:139931030-139931060
  hypo

SEQ ID NO: 158095 - DNA, 161 bp, Homo sapiens; identical to SEQ ID NO: 74854
  chr7:139992307-139992468
  hypo

SEQ ID NO: 158096 - DNA, 227 bp, Homo sapiens
  chr7:140006658-140006885
  hypo
aacagagtttccatacgctgaaaggtgagtctcttttccatctccaccgagagcacaacttcaaaggaacagactcaaattgtcggaagggctaaaaagaacaactttgacttgttagggatatcagactctgatccaaactaacaaaggaaataatgtgctcgccttggaaaatctttttttttaaatggatagcttaaaaaaaaaaagtgcgcctggctgtattg

SEQ ID NO: 158097 - DNA, 30 bp, Homo sapiens
  chr7:140007858-140007888
  hypo
aaaacaaaaaaaacccgccctcctctctct

SEQ ID NO: 158098 - DNA, 275 bp, Homo sapiens; identical to SEQ ID NO: 74855
  chr7:140026927-140027202
  hypo

SEQ ID NO: 158099 - DNA, 161 bp, Homo sapiens; identical to SEQ ID NO: 21856
  chr7:140027766-140027927
  hypo

SEQ ID NO: 158100 - DNA, 347 bp, Homo sapiens
  chr7:140029900-140030247
  hypo
tactagcagggttaccgggaaaagcttcatggaggtgggcaatgaagggggactatgacggatgaagagagtttgaatgcttggaagggacaggccaagtaaaaacacgcagcaggaataaagctagcagcttgagtaacatagagatttgtactggagcaaaagagctcactgttcgctgccgctgagccctcagggagagctggcgaggctgccaagagccagaggagaggagaatgcactcaaaacccacgtagtccgagaacctgggcagcgccgacagtctgcggccattaattgcaggcgtgcagcgtcctgagtaaagcaggtggcggggcagtgtgcag

SEQ ID NO: 158101 - DNA, 32 bp, Homo sapiens; identical to SEQ ID NO: 74858
  chr7:140045117-140045149
  hypo

SEQ ID NO: 158102 - DNA, 138 bp, Homo sapiens; identical to SEQ ID NO: 74859
  chr7:140045705-140045843
  hypo

SEQ ID NO: 158103 - DNA, 30 bp, Homo sapiens; identical to SEQ ID NO: 74860
  chr7:140047821-140047851
  hypo

SEQ ID NO: 158104 - DNA, 170 bp, Homo sapiens
  chr7:140048396-140048566
  hypo
attatggaaaagatgtatcaccggcatacctatgatccctccaacgtcgtaccaaatggacagcttgtcggcttccgcctccttccagccgaagttgttactcagataaaaggggagccagaagaagaaggagtaattcactaacttcaagcaggcgtaggccagtgagt

SEQ ID NO: 158105 - DNA, 191 bp, Homo sapiens; identical to SEQ ID NO: 74862
  chr7:140050011-140050202
  hypo

SEQ ID NO: 158106 - DNA, 93 bp, Homo sapiens; identical to SEQ ID NO: 21857
  chr7:140063542-140063635
  hypo

SEQ ID NO: 158107 - DNA, 30 bp, Homo sapiens; identical to SEQ ID NO: 74864
  chr7:140080169-140080199
  hypo

SEQ ID NO: 158108 - DNA, 190 bp, Homo sapiens; identical to SEQ ID NO: 115790
  chr7:140098063-140098253
  hypo

SEQ ID NO: 158109 - DNA, 179 bp, Homo sapiens; identical to SEQ ID NO: 115791
  chr7:140098296-140098475
  hypo

SEQ ID NO: 158110 - DNA, 121 bp, Homo sapiens
  chr7:140105279-140105400
  hypo
ccaaattgcttggattacaggtgtgagccactgcccctggcctatttcttattattttaatagagatgggcggggagggggggcgcagggctctcattatattgcctagactactttcaac

SEQ ID NO: 158111 - DNA, 30 bp, Homo sapiens
  chr7:140116598-140116628
  hypo
tagaatccagctgggcgccgtggctcacac

SEQ ID NO: 158112 - DNA, 43 bp, Homo sapiens; identical to SEQ ID NO: 74866
  chr7:140130675-140130718
  hypo

SEQ ID NO: 158113 - DNA, 213 bp, Homo sapiens; identical to SEQ ID NO: 21859
  chr7:140156472-140156685
  hypo

SEQ ID NO: 158114 - DNA, 117 bp, Homo sapiens
  chr7:140156953-140157070
  hypo
caactacattaaagacggttttccatactgtttgttatttctggtttctacatgaggttaagaccctagttaaaacctgtcggaaaataagggtgacaggcacgtaaactctcttat

SEQ ID NO: 158115 - DNA, 31 bp, Homo sapiens; identical to SEQ ID NO: 21861
  chr7:140169421-140169452
  hypo

SEQ ID NO: 158116 - DNA, 20 bp, Homo sapiens
  chr7:140176252-140176272
  hypo
cagagcgacactccatctca

SEQ ID NO: 158117 - DNA, 121 bp, Homo sapiens; identical to SEQ ID NO: 74871
  chr7:140180183-140180304
  hypo

SEQ ID NO: 158118 - DNA, 118 bp, Homo sapiens; identical to SEQ ID NO: 74872
  chr7:140205261-140205379
  hypo

SEQ ID NO: 158119 - DNA, 78 bp, Homo sapiens; identical to SEQ ID NO: 74873
  chr7:140217362-140217440
  hypo

SEQ ID NO: 158120 - DNA, 30 bp, Homo sapiens; identical to SEQ ID NO: 74874
  chr7:140219361-140219391
  hypo

SEQ ID NO: 158121 - DNA, 38 bp, Homo sapiens; identical to SEQ ID NO: 74875
  chr7:140219800-140219838
  hypo

SEQ ID NO: 158122 - DNA, 281 bp, Homo sapiens; identical to SEQ ID NO: 74876
  chr7:140221610-140221891
  hypo

SEQ ID NO: 158123 - DNA, 228 bp, Homo sapiens
  chr7:140227048-140227276
  hypo
gcagagccagcgccccgctctgttctccgcaccctgcagggagggggacagggctgagtgggagctcacctcttccagcggcagctccctgagcagtggcagcgagctggagagcagcccgatgaggaagggcgtcggcgagcacacgatgtcgaccatggcgggtggcagcaccgggatgtaggtgtgctgccaggcgaaggggtagatcagcgccaccatcgcgtg

SEQ ID NO: 158124 - DNA, 31 bp, Homo sapiens; identical to SEQ ID NO: 21864
  chr7:140255213-140255244
  hypo

SEQ ID NO: 158125 - DNA, 30 bp, Homo sapiens
  chr7:140268419-140268449
  hypo
ggccccactgtctcccgagatgtccacgcc

SEQ ID NO: 158126 - DNA, 1 bp, Homo sapiens
  chr7:140339866-140339867
  hypo
g

SEQ ID NO: 158127 - DNA, 281 bp, Homo sapiens; identical to SEQ ID NO: 115794
  chr7:140339951-140340232
  hypo

SEQ ID NO: 158128 - DNA, 615 bp, Homo sapiens; identical to SEQ ID NO: 115795
  chr7:140340368-140340983
  hypo

SEQ ID NO: 158129 - DNA, 30 bp, Homo sapiens; identical to SEQ ID NO: 74880
  chr7:140394664-140394694
  hypo

SEQ ID NO: 158130 - DNA, 30 bp, Homo sapiens
  chr7:140400203-140400233
  hypo
taagccaccgtgtccggccttcaaatcttg

SEQ ID NO: 158131 - DNA, 206 bp, Homo sapiens; identical to SEQ ID NO: 74881
  chr7:140402596-140402802
  hypo

SEQ ID NO: 158132 - DNA, 33 bp, Homo sapiens; identical to SEQ ID NO: 21865
  chr7:140427686-140427719
  hypo

SEQ ID NO: 158133 - DNA, 30 bp, Homo sapiens; identical to SEQ ID NO: 5925
  chr7:140453121-140453151
  hypo

SEQ ID NO: 158134 - DNA, 43 bp, Homo sapiens; identical to SEQ ID NO: 74884
  chr7:140643305-140643348
  hypo

SEQ ID NO: 158135 - DNA, 176 bp, Homo sapiens
  chr7:140710243-140710419
  hypo
tctgcatgagttcagcgtaagtgtggtgatttggataccaatcataagtctccttcttcttggccaagggcagttcactaaacagtttcaccactttcatagacttggaattagtaggcctggtgacttcaccaaatagccgggcactgagacgagacatgcggaaggcatattct

SEQ ID NO: 158136 - DNA, 338 bp, Homo sapiens; identical to SEQ ID NO: 5927
  chr7:140772337-140772675
  hypo

SEQ ID NO: 158137 - DNA, 2021 bp, Homo sapiens; identical to SEQ ID NO: 115806
  chr7:140772716-140774737
  hypo

SEQ ID NO: 158138 - DNA, 18 bp, Homo sapiens
  chr7:140799646-140799664
  hypo
tgagacagagtctggctt

SEQ ID NO: 158139 - DNA, 38 bp, Homo sapiens
  chr7:140988501-140988539
  hypo
tccagtgcggttgtccgaagagccgttcccacacaggc

SEQ ID NO: 158140 - DNA, 30 bp, Homo sapiens
  chr7:141063232-141063262
  hypo
accttctggagttgacggaagtattttaat

SEQ ID NO: 158141 - DNA, 189 bp, Homo sapiens; identical to SEQ ID NO: 74889
  chr7:141096127-141096316
  hypo

SEQ ID NO: 158142 - DNA, 30 bp, Homo sapiens; identical to SEQ ID NO: 21870
  chr7:141248787-141248817
  hypo

SEQ ID NO: 158143 - DNA, 63 bp, Homo sapiens
  chr7:141273454-141273517
  hypo
tgtccagatctgtcacgtattctggaacccaaagtaaatatcatttcacgcacgctatttata

SEQ ID NO: 158144 - DNA, 30 bp, Homo sapiens; identical to SEQ ID NO: 74891
  chr7:141490041-141490071
  hypo

SEQ ID NO: 158145 - DNA, 31 bp, Homo sapiens
  chr7:141534679-141534710
  hypo
ccaccgtgcccggcctcgtttttcactttta

SEQ ID NO: 158146 - DNA, 181 bp, Homo sapiens
  chr7:142906904-142907085
  hypo
gcccagcggacagactctcctccgactgcccccaaccgaatgccacgtcgtcctgccctagatggcgtgccggtgtctgctggtgtctgtcagtgtgctcttgtgcccctctgctcctctcaacgtccagccacttgtgtctgtgtccgcttaaggtcttgggcttacacgggtacaggat

SEQ ID NO: 158147 - DNA, 1016 bp, Homo sapiens; identical to SEQ ID NO: 115811
  chr7:142985428-142986444
  hypo

SEQ ID NO: 158148 - DNA, 162 bp, Homo sapiens; identical to SEQ ID NO: 74893
  chr7:143000866-143001028
  hypo

SEQ ID NO: 158149 - DNA, 145 bp, Homo sapiens; identical to SEQ ID NO: 74894
  chr7:143013313-143013458
  hypo

SEQ ID NO: 158150 - DNA, 31 bp, Homo sapiens; identical to SEQ ID NO: 74895
  chr7:143018532-143018563
  hypo

SEQ ID NO: 158151 - DNA, 30 bp, Homo sapiens
  chr7:143095431-143095461
  hypo
ctcataggtcaggttcgccccagggcttcg

SEQ ID NO: 158152 - DNA, 58 bp, Homo sapiens; identical to SEQ ID NO: 74896
  chr7:143096712-143096770
  hypo

SEQ ID NO: 158153 - DNA, 80 bp, Homo sapiens; identical to SEQ ID NO: 21874
  chr7:143097072-143097152
  hypo

SEQ ID NO: 158154 - DNA, 30 bp, Homo sapiens; identical to SEQ ID NO: 74898
  chr7:143599967-143599997
  hypo

SEQ ID NO: 158155 - DNA, 30 bp, Homo sapiens
  chr7:143678362-143678392
  hypo
tgaccgctacgtggccgtgtgccacccact

SEQ ID NO: 158156 - DNA, 30 bp, Homo sapiens; identical to SEQ ID NO: 44823
  chr7:144074913-144074943
  hypo

SEQ ID NO: 158157 - DNA, 258 bp, Homo sapiens; identical to SEQ ID NO: 115825
  chr7:144100838-144101096
  hypo

SEQ ID NO: 158158 - DNA, 17 bp, Homo sapiens
  chr7:144101618-144101635
  hypo
ggcgtgagccacagcgc

SEQ ID NO: 158159 - DNA, 23 bp, Homo sapiens
  chr7:144253180-144253203
  hypo
tcgtctcaaacaaaacaaaacaa

SEQ ID NO: 158160 - DNA, 30 bp, Homo sapiens
  chr7:144344464-144344494
  hypo
gatgttagcatcactcgacttcaagaattt

SEQ ID NO: 158161 - DNA, 77 bp, Homo sapiens
  chr7:145021288-145021365
  hypo
atgcagacgcacacacgtacacatgcacatgcacacacacgggcacagacacacacatgcgcatgcacacacacatg

SEQ ID NO: 158162 - DNA, 76 bp, Homo sapiens
  chr7:145021424-145021500
  hypo
acacgcacacgtgcacgcacaagcacacacacgctcacatgcatgtgcacacgcacacaagcgcacgcacacaagc

SEQ ID NO: 158163 - DNA, 129 bp, Homo sapiens
  chr7:145280165-145280294
  hypo
aaggtatgtttgcggcggcggccgggagcggacccggagaggctgaggggttcggagattcagagggagggagactcctgcctcgatgcagctggaggtatgtcctggcctccgcggagaccagggcag

SEQ ID NO: 158164 - DNA, 376 bp, Homo sapiens; identical to SEQ ID NO: 115831
  chr7:145813945-145814321
  hypo

SEQ ID NO: 158165 - DNA, 30 bp, Homo sapiens; identical to SEQ ID NO: 44828
  chr7:145814654-145814684
  hypo

SEQ ID NO: 158166 - DNA, 30 bp, Homo sapiens; identical to SEQ ID NO: 5939
  chr7:145815251-145815281
  hypo

SEQ ID NO: 158167 - DNA, 30 bp, Homo sapiens; identical to SEQ ID NO: 44830
  chr7:145836197-145836227
  hypo

SEQ ID NO: 158168 - DNA, 30 bp, Homo sapiens; identical to SEQ ID NO: 5940
  chr7:145864150-145864180
  hypo

SEQ ID NO: 158169 - DNA, 30 bp, Homo sapiens; identical to SEQ ID NO: 44832
  chr7:145883062-145883092
  hypo

SEQ ID NO: 158170 - DNA, 153 bp, Homo sapiens; identical to SEQ ID NO: 44833
  chr7:145981900-145982053
  hypo

SEQ ID NO: 158171 - DNA, 30 bp, Homo sapiens; identical to SEQ ID NO: 5942
  chr7:145984491-145984521
  hypo

SEQ ID NO: 158172 - DNA, 30 bp, Homo sapiens; identical to SEQ ID NO: 44835
  chr7:146042514-146042544
  hypo

SEQ ID NO: 158173 - DNA, 30 bp, Homo sapiens; identical to SEQ ID NO: 44836
  chr7:146051335-146051365
  hypo

SEQ ID NO: 158174 - DNA, 30 bp, Homo sapiens; identical to SEQ ID NO: 5943
  chr7:146072421-146072451
  hypo

SEQ ID NO: 158175 - DNA, 30 bp, Homo sapiens; identical to SEQ ID NO: 44838
  chr7:146188564-146188594
  hypo

SEQ ID NO: 158176 - DNA, 36 bp, Homo sapiens
  chr7:146228909-146228945
  hypo
tagaggcatgagccaccatgccggccctatagcttg

SEQ ID NO: 158177 - DNA, 30 bp, Homo sapiens; identical to SEQ ID NO: 5944
  chr7:146415862-146415892
  hypo

SEQ ID NO: 158178 - DNA, 133 bp, Homo sapiens; identical to SEQ ID NO: 21882
  chr7:146425092-146425225
  hypo

SEQ ID NO: 158179 - DNA, 43 bp, Homo sapiens
  chr7:146656355-146656398
  hypo
cgcctcggcctcccaaagtgagccaccgcgccaggcctaggat

SEQ ID NO: 158180 - DNA, 30 bp, Homo sapiens; identical to SEQ ID NO: 44840
  chr7:146657554-146657584
  hypo

SEQ ID NO: 158181 - DNA, 30 bp, Homo sapiens; identical to SEQ ID NO: 44841
  chr7:146658239-146658269
  hypo

SEQ ID NO: 158182 - DNA, 39 bp, Homo sapiens; identical to SEQ ID NO: 74917
  chr7:147179512-147179551
  hypo

SEQ ID NO: 158183 - DNA, 32 bp, Homo sapiens; identical to SEQ ID NO: 74918
  chr7:147216089-147216121
  hypo

SEQ ID NO: 158184 - DNA, 161 bp, Homo sapiens
  chr7:147354931-147355092
  hypo
atgaaatatttgcctgagtatcgggtttagaagtttcactgaaaggaaaagaaacttgacttgctgcctcaaattctagtagctgaaattatatgaggtgaagtttccaacgctgtctcttaagatagccgacctggccgggcgcggtggctcacgcctgt

SEQ ID NO: 158185 - DNA, 30 bp, Homo sapiens; identical to SEQ ID NO: 5945
  chr7:147729233-147729263
  hypo

SEQ ID NO: 158186 - DNA, 68 bp, Homo sapiens
  chr7:147954380-147954448
  hypo
cgtaaaggcatccgccgtgaaacacaccaggcacctccaggaccggcatgcatcgctaacccagtgac

SEQ ID NO: 158187 - DNA, 34 bp, Homo sapiens; identical to SEQ ID NO: 74921
  chr7:147975332-147975366
  hypo

SEQ ID NO: 158188 - DNA, 705 bp, Homo sapiens; identical to SEQ ID NO: 115849
  chr7:148036377-148037082
  hypo

SEQ ID NO: 158189 - DNA, 30 bp, Homo sapiens; identical to SEQ ID NO: 44846
  chr7:148038075-148038105
  hypo

SEQ ID NO: 158190 - DNA, 31 bp, Homo sapiens; identical to SEQ ID NO: 21885
  chr7:148042016-148042047
  hypo

SEQ ID NO: 158191 - DNA, 116 bp, Homo sapiens
  chr7:148077003-148077119
  hypo
taactgaacaaggagcgggaaagcatgctaatgcatcgcaaatggagttgctgcatttccttaaaaggactgtcatgagcatttcattttaacgtattacccggaattgtgtcagt

SEQ ID NO: 158192 - DNA, 561 bp, Homo sapiens
  chr7:148079351-148079912
  hypo
tccctgttccaccatcggaaccccgtgccccaggctctctcccttgaggccacctcagaaggagataccaaggggaagacagctctttaagaagtgtagactccatgttaaattgagaccccgcagacagatacggctttgaaacaattgattttctgtggtgtcatagggaaacctgccctcctcaaagttgcgaaaactgtcagggaccctatgaaatggagcgggagtcacaagttttctacccagctctaaaagaggagacaaaactaacactggttcacaatagataacagaacggcttcagcaaagggcaagcaagcgtagagagatgctggagaagaacaaggcactttatccatgtcccccacagcaccctgcctcagcgccggggcaaaagaatctttgtgtgagcccagggagtcggcagggacatgaggggttgatgcggcacttgctcagagcaatcgcagtgctgccgctggaattatctttctcacacagttcccagtagtggttaaaaggctctgaggtcagtccgcctggcccactagctaaggg

SEQ ID NO: 158193 - DNA, 30 bp, Homo sapiens
  chr7:148082341-148082371
  hypo
tcctagaacttgacgcggggcgctgtgagc

SEQ ID NO: 158194 - DNA, 30 bp, Homo sapiens; identical to SEQ ID NO: 21887
  chr7:148142954-148142984
  hypo

SEQ ID NO: 158195 - DNA, 262 bp, Homo sapiens
  chr7:148162145-148162407
  hypo
cacagactctcagtccgtccctctcgtaatcccttccccatggtgttgtctgtcactcatggctctttgtgtgggtgtgcgcattgccgtgtgatgcaattccctcatcttctcatgaaaacacacgcacagccaagttgactctatcatccatgcttgtcagaagcagggaggcctttgcgtgactctcctctgggttacaggaaagacataaacatgaaaaatgtgcttttaattgtatttgcttgcactcctactcaag

SEQ ID NO: 158196 - DNA, 129 bp, Homo sapiens; identical to SEQ ID NO: 74928
  chr7:148296994-148297123
  hypo

SEQ ID NO: 158197 - DNA, 30 bp, Homo sapiens
  chr7:148384033-148384063
  hypo
aagcgtctgtggctccgagtaaatttctgt

SEQ ID NO: 158198 - DNA, 30 bp, Homo sapiens
  chr7:148414637-148414667
  hypo
tggtctaagttgagccgttatctcggtgtc

SEQ ID NO: 158199 - DNA, 152 bp, Homo sapiens; identical to SEQ ID NO: 21889
  chr7:148448803-148448955
  hypo

SEQ ID NO: 158200 - DNA, 532 bp, Homo sapiens; identical to SEQ ID NO: 74930
  chr7:148480933-148481465
  hypo

SEQ ID NO: 158201 - DNA, 30 bp, Homo sapiens; identical to SEQ ID NO: 74931
  chr7:148481891-148481921
  hypo

SEQ ID NO: 158202 - DNA, 197 bp, Homo sapiens; identical to SEQ ID NO: 74932
  chr7:148500529-148500726
  hypo

SEQ ID NO: 158203 - DNA, 30 bp, Homo sapiens; identical to SEQ ID NO: 5947
  chr7:148506156-148506186
  hypo

SEQ ID NO: 158204 - DNA, 80 bp, Homo sapiens; identical to SEQ ID NO: 5948
  chr7:148506411-148506491
  hypo

SEQ ID NO: 158205 - DNA, 90 bp, Homo sapiens; identical to SEQ ID NO: 5949
  chr7:148507423-148507513
  hypo

SEQ ID NO: 158206 - DNA, 101 bp, Homo sapiens; identical to SEQ ID NO: 5950
  chr7:148508711-148508812
  hypo

SEQ ID NO: 158207 - DNA, 185 bp, Homo sapiens; identical to SEQ ID NO: 5951
  chr7:148511049-148511234
  hypo

SEQ ID NO: 158208 - DNA, 108 bp, Homo sapiens; identical to SEQ ID NO: 5952
  chr7:148512013-148512121
  hypo

SEQ ID NO: 158209 - DNA, 35 bp, Homo sapiens; identical to SEQ ID NO: 5953
  chr7:148513817-148513852
  hypo

SEQ ID NO: 158210 - DNA, 122 bp, Homo sapiens; identical to SEQ ID NO: 5954
  chr7:148514300-148514422
  hypo

SEQ ID NO: 158211 - DNA, 77 bp, Homo sapiens; identical to SEQ ID NO: 5955
  chr7:148515085-148515162
  hypo

SEQ ID NO: 158212 - DNA, 201 bp, Homo sapiens; identical to SEQ ID NO: 5956
  chr7:148523535-148523736
  hypo

SEQ ID NO: 158213 - DNA, 30 bp, Homo sapiens; identical to SEQ ID NO: 5957
  chr7:148525927-148525957
  hypo

SEQ ID NO: 158214 - DNA, 120 bp, Homo sapiens; identical to SEQ ID NO: 5958
  chr7:148526815-148526935
  hypo

SEQ ID NO: 158215 - DNA, 30 bp, Homo sapiens; identical to SEQ ID NO: 5959
  chr7:148543654-148543684
  hypo

SEQ ID NO: 158216 - DNA, 30 bp, Homo sapiens; identical to SEQ ID NO: 5960
  chr7:148544315-148544345
  hypo

SEQ ID NO: 158217 - DNA, 43 bp, Homo sapiens
  chr7:148625815-148625858
  hypo
agtctcctggctaggcgcggtggctcacgcctgtaatcccagc

SEQ ID NO: 158218 - DNA, 43 bp, Homo sapiens
  chr7:148626097-148626140
  hypo
tccgtctcaaaaaaaaaaaaaaaaaagtcgcagtcgccttctg

SEQ ID NO: 158219 - DNA, 30 bp, Homo sapiens
  chr7:148664057-148664087
  hypo
agacagggtgacaagcgctggctcgaacct

SEQ ID NO: 158220 - DNA, 144 bp, Homo sapiens; identical to SEQ ID NO: 74947
  chr7:148692792-148692936
  hypo

SEQ ID NO: 158221 - DNA, 30 bp, Homo sapiens; identical to SEQ ID NO: 74948
  chr7:148700272-148700302
  hypo

SEQ ID NO: 158222 - DNA, 226 bp, Homo sapiens; identical to SEQ ID NO: 21906
  chr7:148703453-148703679
  hypo

SEQ ID NO: 158223 - DNA, 136 bp, Homo sapiens; identical to SEQ ID NO: 74950
  chr7:148717799-148717935
  hypo

SEQ ID NO: 158224 - DNA, 31 bp, Homo sapiens; identical to SEQ ID NO: 21907
  chr7:148759940-148759971
  hypo

SEQ ID NO: 158225 - DNA, 28 bp, Homo sapiens
  chr7:148763573-148763601
  hypo
agattccgtctcaaaaaaaaaaaaaaag

SEQ ID NO: 158226 - DNA, 19 bp, Homo sapiens
  chr7:148819013-148819032
  hypo
ttgtttttttttgagacgg

SEQ ID NO: 158227 - DNA, 34 bp, Homo sapiens; identical to SEQ ID NO: 74954
  chr7:148819751-148819785
  hypo

SEQ ID NO: 158228 - DNA, 25 bp, Homo sapiens
  chr7:148841965-148841990
  hypo
tcaccgtgcccggcttctcggctac

SEQ ID NO: 158229 - DNA, 201 bp, Homo sapiens; identical to SEQ ID NO: 74956
  chr7:148846150-148846351
  hypo

SEQ ID NO: 158230 - DNA, 238 bp, Homo sapiens
  chr7:148851180-148851418
  hypo
gtggagatccacagccggcgactcctacacctggaaggtcggacagggacagcagagaagaaactagccagctgtgaaaagacagttaccgagcttgggaaccagctggagggcaagtgggccgtgctgggaaccctgctgcaggagtacgggctgctgcagaggcggctggagaacttggagaacctgctgcgcaacaggaacttctggatcctgcggctccctccaggtattaagg

SEQ ID NO: 158231 - DNA, 30 bp, Homo sapiens; identical to SEQ ID NO: 5963
  chr7:148857608-148857638
  hypo

SEQ ID NO: 158232 - DNA, 30 bp, Homo sapiens; identical to SEQ ID NO: 74959
  chr7:148876624-148876654
  hypo

SEQ ID NO: 158233 - DNA, 30 bp, Homo sapiens; identical to SEQ ID NO: 21911
  chr7:148879362-148879392
  hypo

SEQ ID NO: 158234 - DNA, 181 bp, Homo sapiens
  chr7:148884014-148884195
  hypo
agcatttttaatgtttttgtaagaataaggattattgtcatgaaaaaggtcctggaaaacaagtcaggaggccagagttttaaccttgctttcagttttctcattcataatgtgaggataatacctagtttacgaaggtgttgtgaagatcaaatgaggaaagtttttttttttttttgag

SEQ ID NO: 158235 - DNA, 30 bp, Homo sapiens; identical to SEQ ID NO: 74961
  chr7:148895430-148895460
  hypo

SEQ ID NO: 158236 - DNA, 85 bp, Homo sapiens; identical to SEQ ID NO: 74962
  chr7:148901647-148901732
  hypo

SEQ ID NO: 158237 - DNA, 118 bp, Homo sapiens
  chr7:148907691-148907809
  hypo
tgcctgcgcaggatgcgtcctcccaggtgaagcgtgaggacaccctgtgtgtccggggtcagcggggcctggaggaaagagccatccctacggaatccattaccggtgagtgagccaa

SEQ ID NO: 158238 - DNA, 247 bp, Homo sapiens; identical to SEQ ID NO: 74963
  chr7:148921395-148921642
  hypo

SEQ ID NO: 158239 - DNA, 30 bp, Homo sapiens; identical to SEQ ID NO: 74964
  chr7:148921993-148922023
  hypo

SEQ ID NO: 158240 - DNA, 30 bp, Homo sapiens
  chr7:148922340-148922370
  hypo
gcgctgcccaaccgcgctctccgcctacct

SEQ ID NO: 158241 - DNA, 30 bp, Homo sapiens; identical to SEQ ID NO: 74965
  chr7:148923203-148923233
  hypo

SEQ ID NO: 158242 - DNA, 46 bp, Homo sapiens; identical to SEQ ID NO: 74966
  chr7:148930558-148930604
  hypo

SEQ ID NO: 158243 - DNA, 159 bp, Homo sapiens; identical to SEQ ID NO: 44870
  chr7:148936557-148936716
  hypo

SEQ ID NO: 158244 - DNA, 30 bp, Homo sapiens
  chr7:148950115-148950145
  hypo
tacagaatagagtaccgtacgaggcggtag

SEQ ID NO: 158245 - DNA, 30 bp, Homo sapiens; identical to SEQ ID NO: 74968
  chr7:148951545-148951575
  hypo

SEQ ID NO: 158246 - DNA, 315 bp, Homo sapiens; identical to SEQ ID NO: 115883
  chr7:148959354-148959669
  hypo

SEQ ID NO: 158247 - DNA, 30 bp, Homo sapiens; identical to SEQ ID NO: 74969
  chr7:148975484-148975514
  hypo

SEQ ID NO: 158248 - DNA, 187 bp, Homo sapiens; identical to SEQ ID NO: 74970
  chr7:148979095-148979282
  hypo

SEQ ID NO: 158249 - DNA, 395 bp, Homo sapiens
  chr7:148984551-148984946
  hypo
gacgtctcccccattccggagaatcctgaccttcctgtatttgggaatggctctgggctgctctccttctggtggctgacttgcgaacttgtgtctggttgcaggactggcattgcggactgacctccagggagaggcccagatctgatctgcagagatctcccttccggctatcgtggctgctgttcaggtggtggagaagaagatggaaccccaggctgcctggctacagagcctggagggatgcatgtggacagccaagaagaagctggctgactgcgagaaggtggctgtggagttcgggaaccagctggaggcaagtgggccgtgctggggaccctgctgcaggagtacgggctgctgcagaggtggctggggaacgtggagaacctgct

SEQ ID NO: 158250 - DNA, 30 bp, Homo sapiens; identical to SEQ ID NO: 74972
  chr7:148985992-148986022
  hypo

SEQ ID NO: 158251 - DNA, 30 bp, Homo sapiens; identical to SEQ ID NO: 74973
  chr7:148990310-148990340
  hypo

SEQ ID NO: 158252 - DNA, 30 bp, Homo sapiens; identical to SEQ ID NO: 74974
  chr7:148991723-148991753
  hypo

SEQ ID NO: 158253 - DNA, 320 bp, Homo sapiens
  chr7:148992083-148992403
  hypo
gcccttccagtgtgcgcagtgcgacaagcgtttcacgcgtctggccaacctgaccgtgcaccagagagtgcacttgggcgagcgctccttccagtgcgcccagtacagcaggagattcatgcagaagcccggcttcctgcgtcatctgtgtggccactcgcaggagaagcactatccttgcagcccttgtggtgagagcttcacctgtccctcctggcttgtgcgtcaccaggacagccatgctagccaggcctctccatcttgcctggtttgtgagagggactcctcgaccgatgagccgcccacgggcctcaggggtg

SEQ ID NO: 158254 - DNA, 179 bp, Homo sapiens; identical to SEQ ID NO: 74977
  chr7:149005004-149005183
  hypo

SEQ ID NO: 158255 - DNA, 106 bp, Homo sapiens
  chr7:149084383-149084489
  hypo
ccagcccctaactttcaatgttactgttgagaattccaatgcgattttaattccctatgcttcgaccctgtcctacccctgccacgccccacctccacaggaagcc

SEQ ID NO: 158256 - DNA, 33 bp, Homo sapiens; identical to SEQ ID NO: 74979
  chr7:149114319-149114352
  hypo

SEQ ID NO: 158257 - DNA, 30 bp, Homo sapiens
  chr7:149127286-149127316
  hypo
ggaactacctgcccacgtatctgcaccagc

SEQ ID NO: 158258 - DNA, 30 bp, Homo sapiens; identical to SEQ ID NO: 21917
  chr7:149128221-149128251
  hypo

SEQ ID NO: 158259 - DNA, 30 bp, Homo sapiens; identical to SEQ ID NO: 74981
  chr7:149128921-149128951
  hypo

SEQ ID NO: 158260 - DNA, 30 bp, Homo sapiens; identical to SEQ ID NO: 74982
  chr7:149129297-149129327
  hypo

SEQ ID NO: 158261 - DNA, 30 bp, Homo sapiens; identical to SEQ ID NO: 74983
  chr7:149130000-149130030
  hypo

SEQ ID NO: 158262 - DNA, 30 bp, Homo sapiens; identical to SEQ ID NO: 74984
  chr7:149133712-149133742
  hypo

SEQ ID NO: 158263 - DNA, 30 bp, Homo sapiens; identical to SEQ ID NO: 74985
  chr7:149151980-149152010
  hypo

SEQ ID NO: 158264 - DNA, 31 bp, Homo sapiens; identical to SEQ ID NO: 74986
  chr7:149153083-149153114
  hypo

SEQ ID NO: 158265 - DNA, 97 bp, Homo sapiens
  chr7:149159383-149159480
  hypo
tgcactgctaaagtgcgtctctagagacgcctagacatgggactctggatggcaagagcaccttcatctttccccggcttcccgaactgctcactga

SEQ ID NO: 158266 - DNA, 431 bp, Homo sapiens; identical to SEQ ID NO: 74987
  chr7:149171586-149172017
  hypo

SEQ ID NO: 158267 - DNA, 30 bp, Homo sapiens; identical to SEQ ID NO: 74988
  chr7:149172216-149172246
  hypo

SEQ ID NO: 158268 - DNA, 30 bp, Homo sapiens
  chr7:149255852-149255882
  hypo
ggatgcttgctggggcgtgtgaggtgagtg

SEQ ID NO: 158269 - DNA, 78 bp, Homo sapiens
  chr7:149257398-149257476
  hypo
agtgtggactacagccgggatacctccgggtgtggacttagtgacagctctgcagacagtgagcgtcagtggggtctt

SEQ ID NO: 158270 - DNA, 102 bp, Homo sapiens
  chr7:149257708-149257810
  hypo
ctaaggcttggaagcgggtgactagactcaagactctgcatgtatgagatgttttggaattccaaccgttctttttttgagatggagtctcactctgtcacc

SEQ ID NO: 158271 - DNA, 31 bp, Homo sapiens; identical to SEQ ID NO: 21919
  chr7:149315325-149315356
  hypo

SEQ ID NO: 158272 - DNA, 30 bp, Homo sapiens
  chr7:149323019-149323049
  hypo
ttgccgatgctcctgcgtccgacttgcttc

SEQ ID NO: 158273 - DNA, 375 bp, Homo sapiens; identical to SEQ ID NO: 115895
  chr7:149411352-149411727
  hypo

SEQ ID NO: 158274 - DNA, 530 bp, Homo sapiens; identical to SEQ ID NO: 5971
  chr7:149411834-149412364
  hypo

SEQ ID NO: 158275 - DNA, 329 bp, Homo sapiens; identical to SEQ ID NO: 74993
  chr7:149416659-149416988
  hypo

SEQ ID NO: 158276 - DNA, 134 bp, Homo sapiens
  chr7:149418013-149418147
  hypo
cgctatggacagccccgagagcgagagccggggagccagcctggatggagagagagcgagccccgagggtaagtcagacagtggggcagtgcacgcagcctcctctgcactccgcatgatgaagcacaagtcca

SEQ ID NO: 158277 - DNA, 30 bp, Homo sapiens
  chr7:149418557-149418587
  hypo
cgcccaccgacagctcgtgttccagtggcc

SEQ ID NO: 158278 - DNA, 433 bp, Homo sapiens; identical to SEQ ID NO: 74995
  chr7:149420319-149420752
  hypo

SEQ ID NO: 158279 - DNA, 97 bp, Homo sapiens
  chr7:149427376-149427473
  hypo
tctgaaggagaagacccgaggccagagcctgatctctggaagccgctcccccagggtgagcctgtgcggagagggaggatagcgggatgtgtgccag

SEQ ID NO: 158280 - DNA, 970 bp, Homo sapiens
  chr7:149462307-149463277
  hypo
tcgcccgagggggcgcgctggggcaccacgggatcggatcctgggccgcagcccggtccgccaggcgcgctggccaggggcttggcggcgggggcatccacggtggcgcccagtgcgcactcatcgcacccaaaggggcgaccctcgctgcggtgcagacactggtgcgtggcgaggttctttttccagccgaagctcaagccgcagtcggagcacgcgaaaggctttggcccgggaaaggatggggtcggggacggggcagtggaatgaggagaagcggacgagtcgggagagggcctggccgggccggccgtctggtgcaccctttggtgccgcaccaagtgctgcttgtgcgtgaagctgcgtgcgcactgtgcgcactggtagggcctctcgcccgtatggatgcgctggtgccgaatcaagtgcgtcttcttgcgaaagcgcttctcgcattccgtgcaggggaagggccgctcgccggtgtgggtcttttggtgcgagcccaggtggatcttctggctgaagcgcttgccgcactccgcgcacgggtagggccgctcgcccgtgtgcgtgcgcaggtggcgggtcagatgggccttcttgctgaagcgcttgtcgcactcggagcacgggaaaggccgctcgccgcggtggctgcgctgatgcagtagcatgtgggcgcgctgcgtgaagctgcggccgcagtccgggcaggcgcaggggccctcgccccggtgcagccgctggtgcagtcgcaacgtcagctggtcccggaagcgccgctcacactccccgcagccgtagggcttctccggcatcggaccccacccagacagcgcgagcccactcagtgcccccggggcccctggctccagtttgtacgcggcagccagatgccccaggtcaggcgcgggaaaggggctgggaagtaacgatagatgctggggccattcgacctcctcttctg

SEQ ID NO: 158281 - DNA, 99 bp, Homo sapiens
  chr7:149489457-149489556
  hypo
ctggtggacggtgcccgctactggcctgggcaacgcatcaaggccgactgccagctctgcatctgccaagacggacggccccgacgctgccgactcaac

SEQ ID NO: 158282 - DNA, 31 bp, Homo sapiens
  chr7:149489767-149489798
  hypo
ccctccggccgaggtcgccagtgccgtggca

SEQ ID NO: 158283 - DNA, 31 bp, Homo sapiens; identical to SEQ ID NO: 21924
  chr7:149513356-149513387
  hypo

SEQ ID NO: 158284 - DNA, 132 bp, Homo sapiens
  chr7:149516459-149516591
  hypo
tgggaaccttgctcccgcagctgcggagtgggccagcagcgccgcctgcgggcataccgtccccctgggcccggcgggcactggtgccccaacatccttactgcctaccaagagcgccgcttctgcaacctg

SEQ ID NO: 158285 - DNA, 30 bp, Homo sapiens
  chr7:149516834-149516864
  hypo
tggtcctggtgtgaccgcagctgtggggga

SEQ ID NO: 158286 - DNA, 30 bp, Homo sapiens
  chr7:149559411-149559441
  hypo
accaagctctccaacgaggtgctcaacatg

SEQ ID NO: 158287 - DNA, 30 bp, Homo sapiens; identical to SEQ ID NO: 74999
  chr7:149577241-149577271
  hypo

SEQ ID NO: 158288 - DNA, 17 bp, Homo sapiens
  chr7:150005344-150005361
  hypo
cattcctccttcttccg

SEQ ID NO: 158289 - DNA, 137 bp, Homo sapiens; identical to SEQ ID NO: 21925
  chr7:150006589-150006726
  hypo

SEQ ID NO: 158290 - DNA, 121 bp, Homo sapiens; identical to SEQ ID NO: 21926
  chr7:150006785-150006906
  hypo

SEQ ID NO: 158291 - DNA, 30 bp, Homo sapiens; identical to SEQ ID NO: 75002
  chr7:150026539-150026569
  hypo

SEQ ID NO: 158292 - DNA, 30 bp, Homo sapiens; identical to SEQ ID NO: 75003
  chr7:150028485-150028515
  hypo

SEQ ID NO: 158293 - DNA, 44 bp, Homo sapiens; identical to SEQ ID NO: 75004
  chr7:150039377-150039421
  hypo

SEQ ID NO: 158294 - DNA, 90 bp, Homo sapiens; identical to SEQ ID NO: 75005
  chr7:150049532-150049622
  hypo

SEQ ID NO: 158295 - DNA, 1535 bp, Homo sapiens; identical to SEQ ID NO: 75006
  chr7:150068714-150070249
  hypo

SEQ ID NO: 158296 - DNA, 262 bp, Homo sapiens
  chr7:150079257-150079519
  hypo
gaggctcctgtgtggcgctgggggcctctgagattcccaactggctggaaggagtgatggcttaggaggagtgagtggcagcggggacgctggcagagaggcttgtacagatactgcccgatgcatccggctcaggcttgccgccctgtggtgctcctcccaaactcagggagcaggtatttccgttcacctgcgccttcaagaacctgagctcaaagcgctgcaatgactggccagggactagcagcggctcagtggtggg

SEQ ID NO: 158297 - DNA, 44 bp, Homo sapiens
  chr7:150079845-150079889
  hypo
cttatcccaccccagcgcaggtcatccaacggtgacttatggcc

SEQ ID NO: 158298 - DNA, 30 bp, Homo sapiens
  chr7:150080467-150080497
  hypo
tgcatatgagggacgcgcaggtgtgggagc

SEQ ID NO: 158299 - DNA, 243 bp, Homo sapiens; identical to SEQ ID NO: 75009
  chr7:150081213-150081456
  hypo

SEQ ID NO: 158300 - DNA, 31 bp, Homo sapiens; identical to SEQ ID NO: 21930
  chr7:150087538-150087569
  hypo

SEQ ID NO: 158301 - DNA, 30 bp, Homo sapiens; identical to SEQ ID NO: 75011
  chr7:150093044-150093074
  hypo

SEQ ID NO: 158302 - DNA, 30 bp, Homo sapiens; identical to SEQ ID NO: 75012
  chr7:150093649-150093679
  hypo

SEQ ID NO: 158303 - DNA, 30 bp, Homo sapiens; identical to SEQ ID NO: 75013
  chr7:150094146-150094176
  hypo

SEQ ID NO: 158304 - DNA, 30 bp, Homo sapiens; identical to SEQ ID NO: 75014
  chr7:150095069-150095099
  hypo

SEQ ID NO: 158305 - DNA, 58 bp, Homo sapiens; identical to SEQ ID NO: 75015
  chr7:150097103-150097161
  hypo

SEQ ID NO: 158306 - DNA, 30 bp, Homo sapiens; identical to SEQ ID NO: 75016
  chr7:150097428-150097458
  hypo

SEQ ID NO: 158307 - DNA, 233 bp, Homo sapiens; identical to SEQ ID NO: 75017
  chr7:150098290-150098523
  hypo

SEQ ID NO: 158308 - DNA, 90 bp, Homo sapiens; identical to SEQ ID NO: 75018
  chr7:150099968-150100058
  hypo

SEQ ID NO: 158309 - DNA, 182 bp, Homo sapiens; identical to SEQ ID NO: 21932
  chr7:150100653-150100835
  hypo

SEQ ID NO: 158310 - DNA, 155 bp, Homo sapiens; identical to SEQ ID NO: 75020
  chr7:150104946-150105101
  hypo

SEQ ID NO: 158311 - DNA, 54 bp, Homo sapiens; identical to SEQ ID NO: 21934
  chr7:150105547-150105601
  hypo

SEQ ID NO: 158312 - DNA, 30 bp, Homo sapiens; identical to SEQ ID NO: 75022
  chr7:150109689-150109719
  hypo

SEQ ID NO: 158313 - DNA, 153 bp, Homo sapiens
  chr7:150269705-150269858
  hypo
gtgaccgctactgtgcgttaaacaacaaggcaacaggcgctgagcaggaggcccagagggcacagttgctgggcctgatccagcgcgtggtgagggagaacaaggaaggctgctacactaataggatgtaccaaagggcggaggaggagatcc

SEQ ID NO: 158314 - DNA, 360 bp, Homo sapiens
  chr7:150325089-150325449
  hypo
aagccgcaatggcgccgtgcaagggtcacatccagccaggcaagggcctggttgttggtctctcgcacatagtcttccagggagccgccagccaggtcttccttccgggtgaacaccaggatggtgtgacccagaacccccactccaaagacctcctgcaggcgcctgaccacctgctgatcctcatccgtgaaccggcccagttgtgtcaccaggagcacggcgtggggccctggggcggataagacgatggcttggcagatagcgtctgccacctctggcgagacctggggggacagaatgttgggtgtgtcaatcacctcaagctccttcccagcccactctcggctccgtctctgg

SEQ ID NO: 158315 - DNA, 30 bp, Homo sapiens; identical to SEQ ID NO: 75023
  chr7:150446890-150446920
  hypo

SEQ ID NO: 158316 - DNA, 1109 bp, Homo sapiens; identical to SEQ ID NO: 115917
  chr7:150497094-150498203
  hypo

SEQ ID NO: 158317 - DNA, 30 bp, Homo sapiens; identical to SEQ ID NO: 75025
  chr7:150554405-150554435
  hypo

SEQ ID NO: 158318 - DNA, 875 bp, Homo sapiens; identical to SEQ ID NO: 5978
  chr7:150671456-150672331
  hypo

SEQ ID NO: 158319 - DNA, 30 bp, Homo sapiens; identical to SEQ ID NO: 115921
  chr7:150675765-150675795
  hypo

SEQ ID NO: 158320 - DNA, 381 bp, Homo sapiens; identical to SEQ ID NO: 115922
  chr7:150676163-150676544
  hypo

SEQ ID NO: 158321 - DNA, 31 bp, Homo sapiens; identical to SEQ ID NO: 21938
  chr7:150699034-150699065
  hypo

SEQ ID NO: 158322 - DNA, 1432 bp, Homo sapiens; identical to SEQ ID NO: 115924
  chr7:150714958-150716390
  hypo

SEQ ID NO: 158323 - DNA, 30 bp, Homo sapiens; identical to SEQ ID NO: 75030
  chr7:150718468-150718498
  hypo

SEQ ID NO: 158324 - DNA, 189 bp, Homo sapiens; identical to SEQ ID NO: 75031
  chr7:150720587-150720776
  hypo

SEQ ID NO: 158325 - DNA, 30 bp, Homo sapiens; identical to SEQ ID NO: 21940
  chr7:150721503-150721533
  hypo

SEQ ID NO: 158326 - DNA, 30 bp, Homo sapiens
  chr7:150729103-150729133
  hypo
aaaactgcccctcccgcaagtctcatgtct

SEQ ID NO: 158327 - DNA, 30 bp, Homo sapiens; identical to SEQ ID NO: 75033
  chr7:150732819-150732849
  hypo

SEQ ID NO: 158328 - DNA, 30 bp, Homo sapiens; identical to SEQ ID NO: 75034
  chr7:150738289-150738319
  hypo

SEQ ID NO: 158329 - DNA, 30 bp, Homo sapiens; identical to SEQ ID NO: 21941
  chr7:150742444-150742474
  hypo

SEQ ID NO: 158330 - DNA, 51 bp, Homo sapiens; identical to SEQ ID NO: 75036
  chr7:150745458-150745509
  hypo

SEQ ID NO: 158331 - DNA, 30 bp, Homo sapiens; identical to SEQ ID NO: 75037
  chr7:150745991-150746021
  hypo

SEQ ID NO: 158332 - DNA, 30 bp, Homo sapiens; identical to SEQ ID NO: 75038
  chr7:150746265-150746295
  hypo

SEQ ID NO: 158333 - DNA, 30 bp, Homo sapiens
  chr7:150749742-150749772
  hypo
tgctgtctgtgtcctcggagccccgccctg

SEQ ID NO: 158334 - DNA, 159 bp, Homo sapiens
  chr7:150753895-150754054
  hypo
aagggctcagccaggcaggtccgcctgacagacgtccagtgtcagcccccgcctcccccaagcggccacaccggcaaggagcacccgcctcccgcacacctgacgatgttcttgtgcttcagctccttgagtaggcagatctcccggagggcggaactc

SEQ ID NO: 158335 - DNA, 621 bp, Homo sapiens
  chr7:150758619-150759240
  hypo
gaccctgcgaggctccgttgtctgcctgggccttcactcccctctttccccagctcattatcactccctccctcatctttgttgctttctctccgggcctgggccttgactcctttctccctcatttttcttgcggcctttcccacctcctctctcctcctccctctactcagcctctcggcccttttcggcccccctcgcctcagtcctctcctgtctccttgttcttctcttttcttcctataaataactctcctctgtgctgtggctgccgctaagggccactctgaggcccttcatactccaggaggatccccagcagcgcagcctgcgcgtggtggctcctgccctcccagggctctcgatggtgatcaggcctctcccccatccaggttatgcctccgcctcgttgccctgaaagccgcagcgacagcgaaaagggctaagattcggccatgagcagcgcccctcggcgccccgccaagggcgcagattctttctgtacggtgagtgtggcccccaggtcgccagcccaaccttccctccctgggcagccttgggtgctccggccaagggtcctcgccaaccaggggtgtgagcgtgtgtgagtgtggagactgg

SEQ ID NO: 158336 - DNA, 30 bp, Homo sapiens; identical to SEQ ID NO: 75041
  chr7:150763518-150763548
  hypo

SEQ ID NO: 158337 - DNA, 30 bp, Homo sapiens; identical to SEQ ID NO: 75042
  chr7:150768373-150768403
  hypo

SEQ ID NO: 158338 - DNA, 30 bp, Homo sapiens; identical to SEQ ID NO: 75043
  chr7:150773211-150773241
  hypo

SEQ ID NO: 158339 - DNA, 55 bp, Homo sapiens; identical to SEQ ID NO: 75044
  chr7:150773441-150773496
  hypo

SEQ ID NO: 158340 - DNA, 1012 bp, Homo sapiens
  chr7:150773888-150774900
  hypo
ctctctgggactccagttcctcgaagggtagctgtggggagaggagagggcggcaggttacccgcaggctgggagtgaggatgcgccacgggccaggccagggccactcaccggcaggagctggtagcccatcaggcctaggtgccgctccctcagggccctcgagcccagcagcacccggccgtcccggcagaaatgccagcgttcccgcaacaccagcaccaccctgcagggggagggacgtggctcagggcatggcgggcaaggtggccagggctcccccaccctgcctcctttacctctgggcagggtctcgagtagtggcgctagaggcagcctggccctgtgggcaggaccttggtgggtatggcaggaaggggtcctgggtcctcacgggaagcacagcaccagagctgctggcgcacagcaggaagtctggaggggagcagggccggcggccttagccagggctccgtctccccgggcctgccgcctgccccttgctcacctgtgcagtagcctggaggcacagtcaggtcctggcggtatttctcctcccccagcagctggcgcaacccctcagctactatgtccttgtgactgaggagaaaggacaccagtagcaggaagggcccggcacctcatcctaatctgtcccagtctagtgccaccaccctgggcaaagccctctgctgcttcagggcccagttttatggtggccgagagctccttagctttggcgcttcatggtccctctggcttttccactctgctggtcccaggctggcccctccccttgccccaggctgccccatccacctgtacttgcagcgggcacggtcggtgatgagaggctggggaaagatgggcacttgctgccttcggggaaggcggggaccccggtatcctgggagctccagctccacggccgtgtccagcagggagaggtagcgacgcacaatcagagcatgaggggtgcctgtggggaggcggggactggggctctgggctg

SEQ ID NO: 158341 - DNA, 30 bp, Homo sapiens; identical to SEQ ID NO: 21946
  chr7:150776459-150776489
  hypo

SEQ ID NO: 158342 - DNA, 62 bp, Homo sapiens; identical to SEQ ID NO: 21947
  chr7:150776688-150776750
  hypo

SEQ ID NO: 158343 - DNA, 30 bp, Homo sapiens; identical to SEQ ID NO: 21948
  chr7:150777337-150777367
  hypo

SEQ ID NO: 158344 - DNA, 971 bp, Homo sapiens; identical to SEQ ID NO: 115935
  chr7:150784072-150785043
  hypo

SEQ ID NO: 158345 - DNA, 551 bp, Homo sapiens
  chr7:150811100-150811651
  hypo
cacccagaactgcagcggaggttatctttgacttctctgctgcccttaggcaggacgcttaactcagtccagacagatgagtatcttctggattttataatctccaaagaagacagcctcagtcatcaacagaaaccgactgtagcagccagcaactctcgacctcagaatgtcagagccgaaactaagacaggaccacctcgttgaagctcgcgtgctgcagacgaggacacgcgcgcagacccggcatggctgcctctgacgtctcactcaggcttgtcatacttctgggcctcatgttcttggctcttctggctcttcctttgaagaatgagaaatggcccgcttttctccaaaatggggcccagtgtgtggtggactgaggactgttatttagttggcctgctcgtaatgacagctcctcacctacctgccggatcctaggaggcgccctgggctggaatttcctgttttcgagggctcccaggggctgccccagcaggccggctcccccgcgccgcgccgccgttcccgggcgttccaggccagac

SEQ ID NO: 158346 - DNA, 473 bp, Homo sapiens
  chr7:150812865-150813338
  hypo
tggcgtctggggtcttcggcagtggccgaggaggacaggccggagggggagctctcgggtgcggcccaggaaaggaagaggagactcaccagagtcagagggctctgggctaggccagacacctttcctagttccctgtcggggcagcgcgctcgcctccggttgcccctgtgcatgaggttagggactgctgtggacctggtcgtcataactgctctttgacacaaacttgggacagtgcctctgggagccagggagggaagcagtgctgcccagctagagaggggttcccagagctagcccgagcacccatgtggaacctggaggtgacggagatgggggcctggctgtcggagggctctgggtaaagggacttgccagtcaggttctgaggacagactgaagggaagggagcccaggaggcggcctccctgctaaggaggagcttagagaggaggcgggtggggtagatg

SEQ ID NO: 158347 - DNA, 624 bp, Homo sapiens
  chr7:150813835-150814459
  hypo
tgtgtgccaccctggccctgacggggcggctctgtcttccgcagactcgtttgtgaacagccaggagtggacgctgagccgctccgtaccggagcttaaagtggtgagtgtggcccatgggcagcaccggcggcctggagctgggggggcgaggctgggtgccgcgggcctgggccttgcttctccggcttctgtccccttctctgctcagcttggccctctctgccctctctcctccccttcagccctggcctttctccctcctgctgcttctttgcttttcctgctgggtcttctccctcgtgccctctgccctctgacccactcaccccttcctctcccgcagggcatagtggggaacctgtctagcgggaagtcagccctggtgcaccgctatctgacggggacctatgtccaggaggagtcccctgaaggtgagcgtcacaggcccagcctgggccctgaggccggccactcctccagctcctgcccacagggtctgggtggggggtctccagcccccttccagtcctcttccctcccgcatgggaagctgtagatttcttcttggcccctggattctttctccacactttggacctgactgcgcgctctgtcctaggg

SEQ ID NO: 158348 - DNA, 30 bp, Homo sapiens; identical to SEQ ID NO: 75055
  chr7:150815376-150815406
  hypo

SEQ ID NO: 158349 - DNA, 592 bp, Homo sapiens
  chr7:150816819-150817411
  hypo
agaagcactcctgccggggccccaggacgagggtttgctgccctagtggggcagccctggcaaggtgacagtagatcctgctggcctccaggccaggtgaatgttccccccatatcatctgtaggggctagtggcccctctgctgcccatgagccccggccaggcccccattagcacagggattcccggcacccgcctggtgcccgtcccgcccctgacccggagctgccctcagcagccctctttgtccttaggccacgaatggcggcggcagcgccttcagcgactactcgtcctcagtcccctccacccccagcatcagccagcgggagctgcgcatcgagaccatcgctgcctcctccacccccacacccatccgaaagcagtccaagcggcgctccaacatcttcacggtacgtgactgccctcctcccccgcccagctgcctttgctgcacaggcagggctgagcgccgagctcccagccaggaggggcgtgggcagccccaagtcaggaagacggtacctgcagtctctccctcagatacacacggctcccgagggtccttgccggtgccctcagagtcttccag

SEQ ID NO: 158350 - DNA, 210 bp, Homo sapiens
  chr7:150817628-150817838
  hypo
gctgtttgcccaaggcgacacagagggttagctggcccagctagagtcagagcccaggcctccccgtcgccttccggctctttttccgttaccccactgccgaggggaaaattcatgctttccacccaccgctgtgattggtttaacaaaggcttagccatcttttcctgggcttcaccacgctgcctcgttcctccctctcaggtttgt

SEQ ID NO: 158351 - DNA, 30 bp, Homo sapiens; identical to SEQ ID NO: 21957
  chr7:150819539-150819569
  hypo

SEQ ID NO: 158352 - DNA, 30 bp, Homo sapiens
  chr7:150819905-150819935
  hypo
acatgccccctgtgcggggccggaggcggg

SEQ ID NO: 158353 - DNA, 30 bp, Homo sapiens; identical to SEQ ID NO: 75059
  chr7:150823633-150823663
  hypo

SEQ ID NO: 158354 - DNA, 30 bp, Homo sapiens; identical to SEQ ID NO: 75060
  chr7:150823865-150823895
  hypo

SEQ ID NO: 158355 - DNA, 30 bp, Homo sapiens; identical to SEQ ID NO: 75061
  chr7:150827283-150827313
  hypo

SEQ ID NO: 158356 - DNA, 198 bp, Homo sapiens
  chr7:150828088-150828286
  hypo
cgaggaaggagctccggcaactccagaggctccgacagaactctgggctgagcctggctctcctctccagcaagggtctcgcctgagccccaagggcatcgggactggtgactcacctatggatgggggccggggagacaggacacacagaagatgagttcgtgggccagccctgagccccgcgcccgattctcgccg

SEQ ID NO: 158357 - DNA, 36 bp, Homo sapiens; identical to SEQ ID NO: 75063
  chr7:150828562-150828598
  hypo

SEQ ID NO: 158358 - DNA, 34 bp, Homo sapiens; identical to SEQ ID NO: 5987
  chr7:150869803-150869837
  hypo

SEQ ID NO: 158359 - DNA, 30 bp, Homo sapiens; identical to SEQ ID NO: 75065
  chr7:150870837-150870867
  hypo

SEQ ID NO: 158360 - DNA, 110 bp, Homo sapiens
  chr7:150878304-150878414
  hypo
ctgcaggcagcgggcggtggtggcctcggcatcggtgatggactggcagcggacgtcacaggcagccagcagtggggtccagccttcggcattgcgggcatcaggacatg

SEQ ID NO: 158361 - DNA, 30 bp, Homo sapiens
  chr7:150888867-150888897
  hypo
ccggcgtgtagccatcggagaccttggcta

SEQ ID NO: 158362 - DNA, 390 bp, Homo sapiens
  chr7:150889158-150889548
  hypo
gaggaattagagcctcggaggacatagaccacctgctcgcgtccacagagccaaagccaggacccaggccactgggctgcttgtccagcagcccttccagaagaccgggctgtgggggtgagggctcgcagcagcaatggggtatggggcgggaggtgggcaggctttggtaggcgcagccgtccccacatccccaggcctcaccatagcgggatgcgtagtcaggccggggcatgaagaggatccgctcgtagacccggcacagaccccgcatctcggccagctgtggccgggaggttgtcccaatcagcatcacacggtctccgggagtcagcagccgcaaggccttggtgaggtccttctttatccgctttgggtccatctgctcca

SEQ ID NO: 158363 - DNA, 30 bp, Homo sapiens; identical to SEQ ID NO: 75067
  chr7:150933491-150933521
  hypo

SEQ ID NO: 158364 - DNA, 203 bp, Homo sapiens; identical to SEQ ID NO: 75068
  chr7:150934635-150934838
  hypo

SEQ ID NO: 158365 - DNA, 30 bp, Homo sapiens
  chr7:150935039-150935069
  hypo
cacgagaaggtggccgtggagctccagacc

SEQ ID NO: 158366 - DNA, 30 bp, Homo sapiens; identical to SEQ ID NO: 75069
  chr7:150935755-150935785
  hypo

SEQ ID NO: 158367 - DNA, 236 bp, Homo sapiens; identical to SEQ ID NO: 75070
  chr7:150936102-150936338
  hypo

SEQ ID NO: 158368 - DNA, 65 bp, Homo sapiens; identical to SEQ ID NO: 115945
  chr7:150948745-150948810
  hypo

SEQ ID NO: 158369 - DNA, 25 bp, Homo sapiens
  chr7:151035057-151035082
  hypo
agcaagactccgcctcaaaaaaaaa

SEQ ID NO: 158370 - DNA, 390 bp, Homo sapiens; identical to SEQ ID NO: 44913
  chr7:151038573-151038963
  hypo

SEQ ID NO: 158371 - DNA, 30 bp, Homo sapiens
  chr7:151052880-151052910
  hypo
ctcacaatgtgaaagcgatggtgcttgaac

SEQ ID NO: 158372 - DNA, 218 bp, Homo sapiens; identical to SEQ ID NO: 75074
  chr7:151073503-151073721
  hypo

SEQ ID NO: 158373 - DNA, 52 bp, Homo sapiens; identical to SEQ ID NO: 75075
  chr7:151074138-151074190
  hypo

SEQ ID NO: 158374 - DNA, 35 bp, Homo sapiens; identical to SEQ ID NO: 21961
  chr7:151074642-151074677
  hypo

SEQ ID NO: 158375 - DNA, 30 bp, Homo sapiens; identical to SEQ ID NO: 21962
  chr7:151076990-151077020
  hypo

SEQ ID NO: 158376 - DNA, 30 bp, Homo sapiens; identical to SEQ ID NO: 75078
  chr7:151077409-151077439
  hypo

SEQ ID NO: 158377 - DNA, 30 bp, Homo sapiens
  chr7:151082261-151082291
  hypo
cttgacggtcctgtccgcgctgccagagta

SEQ ID NO: 158378 - DNA, 30 bp, Homo sapiens; identical to SEQ ID NO: 75079
  chr7:151091587-151091617
  hypo

SEQ ID NO: 158379 - DNA, 185 bp, Homo sapiens; identical to SEQ ID NO: 115949
  chr7:151106380-151106565
  hypo

SEQ ID NO: 158380 - DNA, 399 bp, Homo sapiens; identical to SEQ ID NO: 44915
  chr7:151106589-151106988
  hypo

SEQ ID NO: 158381 - DNA, 455 bp, Homo sapiens; identical to SEQ ID NO: 115951
  chr7:151107395-151107850
  hypo

SEQ ID NO: 158382 - DNA, 238 bp, Homo sapiens
  chr7:151124255-151124493
  hypo
gctgggcacactgtgcgggggacatgccgccctgctccctgtgcctggcacctagaaatgaacactttacgggaatggaacccagggcacgaccatctcagcccgcggaacgatccagcccaactggtgagaactcccgctcttggtgttgggggccaggcagggttcgtggagagggtccttataacctgctcagccccctagccagagcaatcctacacatcgctgagccctcttc

SEQ ID NO: 158383 - DNA, 30 bp, Homo sapiens; identical to SEQ ID NO: 21965
  chr7:151126442-151126472
  hypo

SEQ ID NO: 158384 - DNA, 245 bp, Homo sapiens; identical to SEQ ID NO: 75084
  chr7:151129033-151129278
  hypo

SEQ ID NO: 158385 - DNA, 174 bp, Homo sapiens
  chr7:151133221-151133395
  hypo
ggcctagccgggcctcggggtgcggccacgtggcctgtactcacgctccgtccccgtacaccttgatggtgttcacacagttcttgacccagcccctgctctggaggaaggggctgtcctccaggaactccaggcactggcccgtgaagttgcaaccctcgaagatttctaggc

SEQ ID NO: 158386 - DNA, 34 bp, Homo sapiens; identical to SEQ ID NO: 21966
  chr7:151134319-151134353
  hypo

SEQ ID NO: 158387 - DNA, 313 bp, Homo sapiens; identical to SEQ ID NO: 75086
  chr7:151165387-151165700
  hypo

SEQ ID NO: 158388 - DNA, 30 bp, Homo sapiens
  chr7:151175270-151175300
  hypo
gccactgtctggtacgaacgtttcattctt

SEQ ID NO: 158389 - DNA, 37 bp, Homo sapiens; identical to SEQ ID NO: 21968
  chr7:151214438-151214475
  hypo

SEQ ID NO: 158390 - DNA, 348 bp, Homo sapiens; identical to SEQ ID NO: 115956
  chr7:151217152-151217500
  hypo

SEQ ID NO: 158391 - DNA, 29 bp, Homo sapiens
  chr7:151218583-151218612
  hypo
ctttcttttttttttttgagacggagtct

SEQ ID NO: 158392 - DNA, 30 bp, Homo sapiens; identical to SEQ ID NO: 75090
  chr7:151264638-151264668
  hypo

SEQ ID NO: 158393 - DNA, 98 bp, Homo sapiens; identical to SEQ ID NO: 75091
  chr7:151266426-151266524
  hypo

SEQ ID NO: 158394 - DNA, 5 bp, Homo sapiens
  chr7:151290073-151290078
  hypo
gataa

SEQ ID NO: 158395 - DNA, 62 bp, Homo sapiens
  chr7:151298838-151298900
  hypo
ttctggtgaggcacccgcagcatccactgtgcgagaggcggggatgccgcagggaagacaac

SEQ ID NO: 158396 - DNA, 30 bp, Homo sapiens
  chr7:151305168-151305198
  hypo
gctggggcgacgcagcgacaagccaaggat

SEQ ID NO: 158397 - DNA, 271 bp, Homo sapiens; identical to SEQ ID NO: 75093
  chr7:151326269-151326540
  hypo

SEQ ID NO: 158398 - DNA, 29 bp, Homo sapiens
  chr7:151333211-151333240
  hypo
caggcatgagccaccgcgcccagccaaaa

SEQ ID NO: 158399 - DNA, 305 bp, Homo sapiens
  chr7:151358567-151358872
  hypo
cagagctgtagaaatcgtattagaatttcatctgtgtagttccttagaaagcttttcattgaaccacctgtttcaatttccattttttaaaaaaataaaatatacctctgtctgtaatcacgctacgatgagcagctgacattcttactcaggacttagaataataatgctttagagtcctgcacgaagcctccaaaagagtggaaaaaatacacaacccttcgaaacaggtttactcaagcacggtgagagaggctgggcggtcattgattaacagggtatgcgttccttctcaaagagatggc

SEQ ID NO: 158400 - DNA, 30 bp, Homo sapiens
  chr7:151359199-151359229
  hypo
atttgctttcttccccgcaccggctgttac

SEQ ID NO: 158401 - DNA, 31 bp, Homo sapiens; identical to SEQ ID NO: 75095
  chr7:151361418-151361449
  hypo

SEQ ID NO: 158402 - DNA, 231 bp, Homo sapiens; identical to SEQ ID NO: 75096
  chr7:151411310-151411541
  hypo

SEQ ID NO: 158403 - DNA, 208 bp, Homo sapiens
  chr7:151412756-151412964
  hypo
aaaaattccaatttgagttgtgatctagaaagggaggatggagtggaagaagagaaagatagggggaaggctgaagaattaaagatcatgccagggaggcagcgaacaggaaagccaagaccacagaaaacaggtgctcaaggcgaaaggcaaaggcaggagagagggcggggcggggcaaggagccttggtgcgggactccactctc

SEQ ID NO: 158404 - DNA, 49 bp, Homo sapiens
  chr7:151421901-151421950
  hypo
acagagggtggcaccggcaccagaaagcaccccccgagcctagatttct

SEQ ID NO: 158405 - DNA, 95 bp, Homo sapiens
  chr7:151423342-151423437
  hypo
gcgtgtgcgcagagccggatggtggcagaagagagctggcatgcagggcgccaggttaggaagcctggggaagtgaagacacagcacctgcttac

SEQ ID NO: 158406 - DNA, 215 bp, Homo sapiens
  chr7:151423496-151423711
  hypo
cacagagctgatgccacattatttactatggctgcgtgcgtaccctactaccagtaatcttagtacgagtccaacagaaaggcacaccaacgcacaagagtgcccatgagagcactctgtcacagccccgactggaaaccacggtgtccattaacaactggacggacgcaggagtcgttgtctgggcagacagcggagggttctgcagcaatgaa

SEQ ID NO: 158407 - DNA, 108 bp, Homo sapiens
  chr7:151436198-151436306
  hypo
cccaagaagcctgctcggccccggcatggctccggtgtagctggagctggttctagcatttcagatcccatcgactggtagagcaactgctcacgtgattggacctga

SEQ ID NO: 158408 - DNA, 30 bp, Homo sapiens; identical to SEQ ID NO: 21972
  chr7:151468781-151468811
  hypo

SEQ ID NO: 158409 - DNA, 31 bp, Homo sapiens; identical to SEQ ID NO: 75101
  chr7:151474643-151474674
  hypo

SEQ ID NO: 158410 - DNA, 148 bp, Homo sapiens; identical to SEQ ID NO: 75102
  chr7:151476538-151476686
  hypo

SEQ ID NO: 158411 - DNA, 36 bp, Homo sapiens; identical to SEQ ID NO: 75103
  chr7:151496735-151496771
  hypo

SEQ ID NO: 158412 - DNA, 249 bp, Homo sapiens; identical to SEQ ID NO: 75104
  chr7:151505822-151506071
  hypo

SEQ ID NO: 158413 - DNA, 157 bp, Homo sapiens
  chr7:151506369-151506526
  hypo
acccctaccccgagacgggtgcagaatcagcagcggggatcatccagagactctcgcagtccacggcaggtgtcggagtgggcctcattccagagttgtggtggccgctccacctggcgagcttcgaggggactccggcaggcgctcgctgtggggt

SEQ ID NO: 158414 - DNA, 30 bp, Homo sapiens
  chr7:151516219-151516249
  hypo
cagcccacccagccccggtgacctggacgc

SEQ ID NO: 158415 - DNA, 30 bp, Homo sapiens
  chr7:151524933-151524963
  hypo
ggaccacgtggcctccgtcttggtgctgtt

SEQ ID NO: 158416 - DNA, 27 bp, Homo sapiens
  chr7:151528530-151528557
  hypo
aatatttcgttacgtgaaagaagtcat

SEQ ID NO: 158417 - DNA, 30 bp, Homo sapiens; identical to SEQ ID NO: 21974
  chr7:151542113-151542143
  hypo

SEQ ID NO: 158418 - DNA, 118 bp, Homo sapiens
  chr7:151554549-151554667
  hypo
gcaacagcccactcctctccacgcattttctcgggttgcatgctgccttccggcaccatctgtctgttcagcacagcggttgtgtgtgggctcaggcgccagacggctccggcttgat

SEQ ID NO: 158419 - DNA, 207 bp, Homo sapiens
  chr7:151556274-151556481
  hypo
ccagggaatgggcttcgagggtgctgcacagctgtggcaccagagaacactccgcggggaacggcgtcagacggggcggggcgaggtgaggcccgcaagccagtccctgctgcacacggtagcgaaggcggaaagctgcggcaacaccttcccaccatctctgtgaggtctgtgggtggagagggtgggatgcgactgccagccccg

SEQ ID NO: 158420 - DNA, 962 bp, Homo sapiens; identical to SEQ ID NO: 115957
  chr7:151572577-151573539
  hypo

SEQ ID NO: 158421 - DNA, 106 bp, Homo sapiens
  chr7:151591667-151591773
  hypo
tccctccgccctctccgatcctccgtcctccccactcctccgccctctccgatccgtcgtcctccccgctcctccgccctcccagttcctccgccctcctggcttc

SEQ ID NO: 158422 - DNA, 277 bp, Homo sapiens
  chr7:151592133-151592410
  hypo
tcctccccgctcgttcgccctccctgctcctgcgtcctcctcactcctccaccttccctgctcctccgtcctccctgcttgttcgccctccccgctcctccgccctccccgctcctctgccttgctgtgtgcccaacactttcacgggctgtgccacacccttcaggttacgcttaattatacactgacttgccccatttattttcctctctcgccttgctccataagaggcttttaggcaacgactcctccttttctttgccgagaggtttgtttc

SEQ ID NO: 158423 - DNA, 215 bp, Homo sapiens; identical to SEQ ID NO: 21976
  chr7:151624664-151624879
  hypo

SEQ ID NO: 158424 - DNA, 131 bp, Homo sapiens
  chr7:151648920-151649051
  hypo
taaaaagagtgacaacgccaaatgggagcacacgtggcactagcactttagtagaaggtctgaccacttcttaaaagactaaacactcctgggtgtttactcaagagaaccgaaagcgtcagtccataaaa

SEQ ID NO: 158425 - DNA, 31 bp, Homo sapiens
  chr7:151652913-151652944
  hypo
taaaaattagccgggcgcggtggctcacgcc

SEQ ID NO: 158426 - DNA, 30 bp, Homo sapiens
  chr7:151666617-151666647
  hypo
atgtatcccctagtgcgcagatccctcccc

SEQ ID NO: 158427 - DNA, 24 bp, Homo sapiens
  chr7:151667164-151667188
  hypo
gactacaggcgtgagccaccgcac

SEQ ID NO: 158428 - DNA, 30 bp, Homo sapiens
  chr7:151706339-151706369
  hypo
ctcattccagtaaatcgatatcctggaagg

SEQ ID NO: 158429 - DNA, 87 bp, Homo sapiens; identical to SEQ ID NO: 75111
  chr7:151712355-151712442
  hypo

SEQ ID NO: 158430 - DNA, 108 bp, Homo sapiens; identical to SEQ ID NO: 21978
  chr7:151720361-151720469
  hypo

SEQ ID NO: 158431 - DNA, 693 bp, Homo sapiens; identical to SEQ ID NO: 5993
  chr7:151722450-151723143
  hypo

SEQ ID NO: 158432 - DNA, 77 bp, Homo sapiens; identical to SEQ ID NO: 44925
  chr7:151723167-151723244
  hypo

SEQ ID NO: 158433 - DNA, 30 bp, Homo sapiens
  chr7:151774422-151774452
  hypo
cctctgacccagggccgcttttgcccggct

SEQ ID NO: 158434 - DNA, 132 bp, Homo sapiens
  chr7:151781605-151781737
  hypo
tcgtacttttgttggcgtgttgagtattttgtttcataatgaaaccgtctaatgaaactgtttaaactggttagccgtctttcttgcctctccttcttcacaataagcattcatttccgaggatgtggtctg

SEQ ID NO: 158435 - DNA, 237 bp, Homo sapiens; identical to SEQ ID NO: 75115
  chr7:151791343-151791580
  hypo

SEQ ID NO: 158436 - DNA, 184 bp, Homo sapiens; identical to SEQ ID NO: 21982
  chr7:151802390-151802574
  hypo

SEQ ID NO: 158437 - DNA, 30 bp, Homo sapiens; identical to SEQ ID NO: 75117
  chr7:151805229-151805259
  hypo

SEQ ID NO: 158438 - DNA, 336 bp, Homo sapiens; identical to SEQ ID NO: 75118
  chr7:151812520-151812856
  hypo

SEQ ID NO: 158439 - DNA, 30 bp, Homo sapiens; identical to SEQ ID NO: 75119
  chr7:151818875-151818905
  hypo

SEQ ID NO: 158440 - DNA, 206 bp, Homo sapiens
  chr7:151826349-151826555
  hypo
gagggatgagacagcgctgccgcgggccaggcccaccacgcgggccccaccgcagagtcccactttcctccatggaggccgcagttctccagcctccggggcggccgggagcagcgatgcgggggtgacagcgcggggagcggggacaccagcggggcagcgagtgtaccggggacgcagaccacgattccgcaggacccacctca

SEQ ID NO: 158441 - DNA, 30 bp, Homo sapiens; identical to SEQ ID NO: 75121
  chr7:151829650-151829680
  hypo

SEQ ID NO: 158442 - DNA, 31 bp, Homo sapiens; identical to SEQ ID NO: 21984
  chr7:151845095-151845126
  hypo

SEQ ID NO: 158443 - DNA, 115 bp, Homo sapiens; identical to SEQ ID NO: 21985
  chr7:151874696-151874811
  hypo

SEQ ID NO: 158444 - DNA, 42 bp, Homo sapiens; identical to SEQ ID NO: 75124
  chr7:151876084-151876126
  hypo

SEQ ID NO: 158445 - DNA, 30 bp, Homo sapiens
  chr7:152082725-152082755
  hypo
aaaaaaaaattgagacgtgtttacctgaac

SEQ ID NO: 158446 - DNA, 30 bp, Homo sapiens
  chr7:152092399-152092429
  hypo
ctgggactacaggcacgtggccgcacacct

SEQ ID NO: 158447 - DNA, 30 bp, Homo sapiens; identical to SEQ ID NO: 75125
  chr7:152122648-152122678
  hypo

SEQ ID NO: 158448 - DNA, 149 bp, Homo sapiens; identical to SEQ ID NO: 75126
  chr7:152152773-152152922
  hypo

SEQ ID NO: 158449 - DNA, 81 bp, Homo sapiens
  chr7:152159224-152159305
  hypo
tttcaaaaaaaaaaaaaggagaaagaaacaaagaaagaaagaaaaatgcctccccaaggtgacagacgagctaagccaggc

SEQ ID NO: 158450 - DNA, 144 bp, Homo sapiens
  chr7:152159656-152159800
  hypo
gccaaatgccttgtgcggggattggctccaaacctcagcctcatcagtcaatttatccttacgttcaagagcagccatttacaaaacgagctcagaaaattaaaaaaaaaatacaaactttaaatcgccagaatactgcataaa

SEQ ID NO: 158451 - DNA, 213 bp, Homo sapiens
  chr7:152221106-152221319
  hypo
aaagcggatcattgccggctccttcgagtcccggagtgccaagtcctgcgcccagcacaatggtcctttatacctcgctgtgtgctctctttcctggccccagctgcccccatgccctgtttttccttactcttttctgcagtattttctttccagttgacttagttattacagtacatggaccggggaggaaagctccggaacctgggcctg

SEQ ID NO: 158452 - DNA, 45 bp, Homo sapiens; identical to SEQ ID NO: 75128
  chr7:152243972-152244017
  hypo

SEQ ID NO: 158453 - DNA, 31 bp, Homo sapiens; identical to SEQ ID NO: 75129
  chr7:152252877-152252908
  hypo

SEQ ID NO: 158454 - DNA, 361 bp, Homo sapiens; identical to SEQ ID NO: 21986
  chr7:152273142-152273503
  hypo

SEQ ID NO: 158455 - DNA, 86 bp, Homo sapiens; identical to SEQ ID NO: 75131
  chr7:152371351-152371437
  hypo

SEQ ID NO: 158456 - DNA, 142 bp, Homo sapiens
  chr7:152374302-152374444
  hypo
tggcctcttctctacgtagggctgcgggcccgtatctgaaacattaacaaccatcaggaatgaggttggtctggttagcttaggcctgaatcgtgtgccccacttacttttctttttttctttttttttttttttttggaga

SEQ ID NO: 158457 - DNA, 22 bp, Homo sapiens
  chr7:152374743-152374765
  hypo
cggagtagagacatattttttc

SEQ ID NO: 158458 - DNA, 31 bp, Homo sapiens; identical to SEQ ID NO: 75134
  chr7:152397925-152397956
  hypo

SEQ ID NO: 158459 - DNA, 30 bp, Homo sapiens; identical to SEQ ID NO: 21990
  chr7:152455689-152455719
  hypo

SEQ ID NO: 158460 - DNA, 43 bp, Homo sapiens; identical to SEQ ID NO: 21991
  chr7:152455924-152455967
  hypo

SEQ ID NO: 158461 - DNA, 30 bp, Homo sapiens; identical to SEQ ID NO: 21992
  chr7:152537574-152537604
  hypo

SEQ ID NO: 158462 - DNA, 31 bp, Homo sapiens; identical to SEQ ID NO: 75138
  chr7:152543181-152543212
  hypo

SEQ ID NO: 158463 - DNA, 79 bp, Homo sapiens; identical to SEQ ID NO: 75139
  chr7:152543572-152543651
  hypo

SEQ ID NO: 158464 - DNA, 136 bp, Homo sapiens
  chr7:152549236-152549372
  hypo
catgttcagggatttcggacgccgactgcagagggatttgaagagagtggtggatgctaggctgaggctcagcgaggagctcagcggcgggaggatcaaggtaggagccagaggcctccacgcagtgcctggggct

SEQ ID NO: 158465 - DNA, 181 bp, Homo sapiens; identical to SEQ ID NO: 75141
  chr7:152551645-152551826
  hypo

SEQ ID NO: 158466 - DNA, 31 bp, Homo sapiens; identical to SEQ ID NO: 75142
  chr7:152553622-152553653
  hypo

SEQ ID NO: 158467 - DNA, 174 bp, Homo sapiens; identical to SEQ ID NO: 21995
  chr7:152555645-152555819
  hypo

SEQ ID NO: 158468 - DNA, 215 bp, Homo sapiens; identical to SEQ ID NO: 75144
  chr7:152562696-152562911
  hypo

SEQ ID NO: 158469 - DNA, 163 bp, Homo sapiens; identical to SEQ ID NO: 75145
  chr7:152564283-152564446
  hypo

SEQ ID NO: 158470 - DNA, 31 bp, Homo sapiens; identical to SEQ ID NO: 75146
  chr7:152566125-152566156
  hypo

SEQ ID NO: 158471 - DNA, 31 bp, Homo sapiens; identical to SEQ ID NO: 75147
  chr7:152567398-152567429
  hypo

SEQ ID NO: 158472 - DNA, 310 bp, Homo sapiens
  chr7:152569303-152569613
  hypo
ttccccagaatgcagcgcatgaggcggtgactgaagtgcagggctttgctgtggatgtggtcacagggaatggagtgggcggggaggagggcagtgctgagaggccacgcaggaggggcagtctggtgaccacgcaagaggggacgtctggtggccatgcaggaagggtggtccagtggccgggcaggaggggtggtcaggtggccatgcaggaggggcggtctggtggccacgcaggaggggcggtcaggtggctatgtaggaggggcggtctggtggggccatctggtggccacgcaagaggggacgt

SEQ ID NO: 158473 - DNA, 227 bp, Homo sapiens
  chr7:152569933-152570160
  hypo
gtggtccggtggctgcgcaggagggttggtcgagcggccgcgcaggagggatggtggagtggccgcgcaggatgcctgctctgacctgcctgactatctgtctatgctgtgacctgtctgggtctgtgctgtgaccgcctggaagccgtgtggactgtgtctcagagtcacccctttgctggggagagaggagggagtgttatccactccttcggcccccccgccgc

SEQ ID NO: 158474 - DNA, 40 bp, Homo sapiens; identical to SEQ ID NO: 21996
  chr7:152647710-152647750
  hypo

SEQ ID NO: 158475 - DNA, 236 bp, Homo sapiens; identical to SEQ ID NO: 75150
  chr7:152716532-152716768
  hypo

SEQ ID NO: 158476 - DNA, 43 bp, Homo sapiens; identical to SEQ ID NO: 75151
  chr7:152738786-152738829
  hypo

SEQ ID NO: 158477 - DNA, 32 bp, Homo sapiens
  chr7:152789901-152789933
  hypo
tctctgaaagatggaaacctgcgtttagcttt

SEQ ID NO: 158478 - DNA, 60 bp, Homo sapiens
  chr7:152796592-152796652
  hypo
ctacacacaggtgtcagccaccgtgcaggtgtgccccacgcatagacctcagccaccatg

SEQ ID NO: 158479 - DNA, 30 bp, Homo sapiens
  chr7:152948851-152948881
  hypo
cagaaagatgctgcgcgtttctggaaatgg

SEQ ID NO: 158480 - DNA, 254 bp, Homo sapiens
  chr7:153109298-153109552
  hypo
catgtggagccacagcggccgctccgaggctggggcagtctgacctccagtgctccatttgttggcagttagggcacgggtgtgttggcggcttggggtttgggcactgttttgcccaatgacctggattgccacacttgaaacagttgcaaggcgggcaggacggttgctgttggctagggcaccggctggcccagtgtcctgagttgcctcacttgaagcagacgccagacggggcccgggagattgtacct

SEQ ID NO: 158481 - DNA, 448 bp, Homo sapiens
  chr7:153110537-153110985
  hypo
ctgagtcgtcagtgccgatttggacttcccctggggaagtaaacttgggtcacctggtgacccggactggccttcccttgaagaaggaaactctccctgggtgtgcgcatgactctcggccagggaggaacggacaaaaggaaaaaggaggggtactcacctagcgtcggccgaattggactggagtagctgcagcaactgcgacctggcagcaagtaaccggacgaaatggacagatggccgtggaggagaagcctgacctgactgagggagaggactgatccgaccaggaggggagtccccctgagcctctgggggggcttaggaggtgtcccctcccgggtttcggcaccaatgaaaggcaatggaagggcaccatggatcaataaggctgagaggtgagaaaaagagggcaaaaatcttctttattgagccctcgggcgaggtt

SEQ ID NO: 158482 - DNA, 87 bp, Homo sapiens
  chr7:153111044-153111131
  hypo
ttatggatgctgggtgaggagtgggtggggtaggggcggggtcggttgagtttcgcgcttctgagtgtgacacgccctagtgggcat

SEQ ID NO: 158483 - DNA, 30 bp, Homo sapiens
  chr7:153482308-153482338
  hypo
acttctgtttctgcacgttctgctctgctc

SEQ ID NO: 158484 - DNA, 30 bp, Homo sapiens; identical to SEQ ID NO: 75152
  chr7:153992071-153992101
  hypo

SEQ ID NO: 158485 - DNA, 37 bp, Homo sapiens
  chr7:154018577-154018614
  hypo
atgatggcggccaggcgcggtcgctcacgtctgtaat

SEQ ID NO: 158486 - DNA, 92 bp, Homo sapiens; identical to SEQ ID NO: 75153
  chr7:154062696-154062788
  hypo

SEQ ID NO: 158487 - DNA, 31 bp, Homo sapiens; identical to SEQ ID NO: 67308
  chr7:154063027-154063058
  hypo

SEQ ID NO: 158488 - DNA, 206 bp, Homo sapiens; identical to SEQ ID NO: 75155
  chr7:154072002-154072208
  hypo

SEQ ID NO: 158489 - DNA, 411 bp, Homo sapiens
  chr7:154087907-154088318
  hypo
tctgagagaccctcccgactactcctgtgcccgttgccatgccatttgttggatcacttgcaggccccgagtctcaaacacatgatttatcatcagatcgtacagtcgtcagaagggtcccaccgtttctaaccatgtgacctgggcggttgctttacttctccgcacctcaatgtccttgtctgtaaaatggggcggatcagcccacctactgtttgggattaaatgaggtgatgtgcataaagctgtcagtgccatccctgggctgcagcgggcgttctggaaatatcacagattaccatcactgtccgccgcgcggcatccgtatgcccttgattcatacacagtgccacgcgtgggggcggttctcagtcagaaaataccaagagcagccgccgcatcttagaattt

SEQ ID NO: 158490 - DNA, 70 bp, Homo sapiens; identical to SEQ ID NO: 75156
  chr7:154128039-154128109
  hypo

SEQ ID NO: 158491 - DNA, 69 bp, Homo sapiens
  chr7:154150169-154150238
  hypo
ttctgatggaaacaccgtgaccttctccggtgccacaatcgctgacgtgggggtcggaaactccagcag

SEQ ID NO: 158492 - DNA, 36 bp, Homo sapiens; identical to SEQ ID NO: 75157
  chr7:154382566-154382602
  hypo

SEQ ID NO: 158493 - DNA, 31 bp, Homo sapiens
  chr7:154468091-154468122
  hypo
tgctacacaggtgttccggctacagccttac

SEQ ID NO: 158494 - DNA, 30 bp, Homo sapiens
  chr7:154474112-154474142
  hypo
cgaggtgatcgtctccgcagtgtcataagg

SEQ ID NO: 158495 - DNA, 330 bp, Homo sapiens
  chr7:154540197-154540527
  hypo
gtttgccaacacccgcggcactagacaacgccaagagaatggcttagtaataatgagataataacttaatgaaaaacccctgcgagccctgcggggcggggagggagacctggtgtgtggtgctggacgcttcctgagcacctccctgcacagcctgcctctggagtttctcgcgcatggcggtaagcagggccaggcctcactctttccccttcacagtggagggtgtgagcagggcttcgatgccttttgctcacggtgtccagcagtggatgcgctggttggaacggacgtgcctataaccatgactcccaccgaggccttgtcctg

SEQ ID NO: 158496 - DNA, 499 bp, Homo sapiens
  chr7:154541923-154542422
  hypo
ctgcagcaggcagaacctatccgtagatgaacaccctcgctctccagaagacaagaagcgggagtcgcagcctattgaagtgtagacatgatgtctacacagccaccctgtgtcctgcaagagcccaggctcagagcgtgtgcaccgtgagggccgcctgtgccggagcaggccgcttctccgtagcaaccacatcccacagtgtggaggttcccagcggcgggtagtgcggaaaacagggaaggcaggaaagaaacttagccaggcactgagtgcgtgggaaggcaaaacactcttttctcctcccacggcgggggcgctccctgggcgatgctcacggagagtgggagggcgtcccgcaccgggcagagctgaagggtggcgggggtcggcttcctcctctctgcctcttcccttccgccacgcttcctacccacaccagccagtctccagtaacagatatagaatgccttcatttggaacacggagagacaagcgt

SEQ ID NO: 158497 - DNA, 30 bp, Homo sapiens
  chr7:154547285-154547315
  hypo
ttagagccggcttggcgtgtgctgggtgct

SEQ ID NO: 158498 - DNA, 30 bp, Homo sapiens
  chr7:154547557-154547587
  hypo
ggcctctgtcttcatcgtgtgtcttgggtc

SEQ ID NO: 158499 - DNA, 30 bp, Homo sapiens
  chr7:154573324-154573354
  hypo
actttagtagagcagcgcttggtatttagg

SEQ ID NO: 158500 - DNA, 30 bp, Homo sapiens
  chr7:154573831-154573861
  hypo
catctctgcaccgtccgcacctagaaccgt

SEQ ID NO: 158501 - DNA, 234 bp, Homo sapiens
  chr7:154646527-154646761
  hypo
gaagcaaagagaactcgccctcggtccctccctttccagccctccctctgtctaacccaaagcagcctgtgtcctccttcccccgaatccttcccactcccttccacattcaggaaccccttccctggcaggagggcaaacttcatggcccgggtccgcagttcccctaggtctggggacagaggtgactccgtgtctccagtgaccatcgagcatcagcggctccctgattcc

SEQ ID NO: 158502 - DNA, 277 bp, Homo sapiens; identical to SEQ ID NO: 75159
  chr7:154673973-154674250
  hypo

SEQ ID NO: 158503 - DNA, 30 bp, Homo sapiens
  chr7:154679316-154679346
  hypo
agagtttgggggctgcgctcacagggcctc

SEQ ID NO: 158504 - DNA, 212 bp, Homo sapiens; identical to SEQ ID NO: 75160
  chr7:154875880-154876092
  hypo

SEQ ID NO: 158505 - DNA, 69 bp, Homo sapiens
  chr7:154922370-154922439
  hypo
gagcactcacatacacatgcacgcacacatgtacccatgcatgagcacgcacacatgcacacacacata

SEQ ID NO: 158506 - DNA, 95 bp, Homo sapiens; identical to SEQ ID NO: 21998
  chr7:154926246-154926341
  hypo

SEQ ID NO: 158507 - DNA, 30 bp, Homo sapiens; identical to SEQ ID NO: 75162
  chr7:154959026-154959056
  hypo

SEQ ID NO: 158508 - DNA, 96 bp, Homo sapiens
  chr7:155016944-155017040
  hypo
cagacaggcggggaccgcgctcttgcccaggcctacagctggtgggcaccagaccctgggctcggacccctggttcgatgccgtgtgatgttgcac

SEQ ID NO: 158509 - DNA, 30 bp, Homo sapiens
  chr7:155017306-155017336
  hypo
acgctatgatccactcgagcctcgtccagg

SEQ ID NO: 158510 - DNA, 252 bp, Homo sapiens
  chr7:155017975-155018227
  hypo
gcccttctcccatcacgggccatctccactgagccatgtgctaagcatcagctcctgggagccacggtgtcccctcacacctgcagtgaggactgagaaagctgcagatgggaggcgaggcagcgacacagccggctggcactaggcatggggtgacaaggtgcatggcgcggccaggacagccttgtgcaggggacagcggaagctcaggagacaaggtcagaggtggtggggccccgccacggagggcac

SEQ ID NO: 158511 - DNA, 30 bp, Homo sapiens; identical to SEQ ID NO: 75164
  chr7:155064887-155064917
  hypo

SEQ ID NO: 158512 - DNA, 205 bp, Homo sapiens; identical to SEQ ID NO: 75165
  chr7:155077345-155077550
  hypo

SEQ ID NO: 158513 - DNA, 187 bp, Homo sapiens
  chr7:155079939-155080126
  hypo
ctactactcagcagacggggggaccgtggcacccccggcctcagccagaccgtccgctgcacacctgcatggcactgactgaacatgacgtgtccgatcaacacggggccatgcctccgagaacgcgactgcagctctccctgcacctctgtcccatcttcagctacagaaccggagctccatacgc

SEQ ID NO: 158514 - DNA, 31 bp, Homo sapiens; identical to SEQ ID NO: 22000
  chr7:155105652-155105683
  hypo

SEQ ID NO: 158515 - DNA, 605 bp, Homo sapiens
  chr7:155130272-155130877
  hypo
acagagctgcaaaccaaggaacgccaagcaatgtggcaaggccagcagccgggagagaggcgcgtgcagggaggccagcggccgggacagaggcacatgtaggagggccggtggccaggacagagactcatttacggaggccagaggcgggcacagaggagcgtgcagggaggccagcggctgggacagaggcacatttacggaggccagaggcaggcacagaggcacgtgcagggaggccagcggccaagacagaggcgcatgcaggaaggccagcggccgggacagaggcacatttacggaggccagaggcaggcactaaggcgcgtacagggaggccagcggccgggacagaggcacgtgcagggaggccagcggccgggacagaggcacgtataccgcggtcagtggccgggacagaggcacatgcagggggaccagtggccaggacagagactcatttacggaggccagaggcaggcacagaggcgcgtgcagggaggccagcggctgggacagaggcacatttacggaggccagaggcaggcacagaggcgtgtgcagggaggccaacagccaccacagaggcgcgtgcaggaaggcca

SEQ ID NO: 158516 - DNA, 30 bp, Homo sapiens
  chr7:155132667-155132697
  hypo
ctgtgtccagcaccccgctgtgcagaacgg

SEQ ID NO: 158517 - DNA, 30 bp, Homo sapiens
  chr7:155133150-155133180
  hypo
tcctctgccgtatagcgtgggtcgggtccc

SEQ ID NO: 158518 - DNA, 2633 bp, Homo sapiens; identical to SEQ ID NO: 115990
  chr7:155164456-155167089
  hypo

SEQ ID NO: 158519 - DNA, 486 bp, Homo sapiens; identical to SEQ ID NO: 44946
  chr7:155167174-155167660
  hypo

SEQ ID NO: 158520 - DNA, 15 bp, Homo sapiens
  chr7:155167833-155167848
  hypo
cgcccagggccggcg

SEQ ID NO: 158521 - DNA, 708 bp, Homo sapiens; identical to SEQ ID NO: 44948
  chr7:155170270-155170978
  hypo

SEQ ID NO: 158522 - DNA, 31 bp, Homo sapiens; identical to SEQ ID NO: 6011
  chr7:155244946-155244977
  hypo

SEQ ID NO: 158523 - DNA, 621 bp, Homo sapiens; identical to SEQ ID NO: 44956
  chr7:155246858-155247479
  hypo

SEQ ID NO: 158524 - DNA, 487 bp, Homo sapiens; identical to SEQ ID NO: 44957
  chr7:155247650-155248137
  hypo

SEQ ID NO: 158525 - DNA, 935 bp, Homo sapiens; identical to SEQ ID NO: 116006
  chr7:155250323-155251258
  hypo

SEQ ID NO: 158526 - DNA, 203 bp, Homo sapiens; identical to SEQ ID NO: 6018
  chr7:155251346-155251549
  hypo

SEQ ID NO: 158527 - DNA, 193 bp, Homo sapiens; identical to SEQ ID NO: 6019
  chr7:155251661-155251854
  hypo

SEQ ID NO: 158528 - DNA, 371 bp, Homo sapiens; identical to SEQ ID NO: 116009
  chr7:155251890-155252261
  hypo

SEQ ID NO: 158529 - DNA, 110 bp, Homo sapiens; identical to SEQ ID NO: 116010
  chr7:155252316-155252426
  hypo

SEQ ID NO: 158530 - DNA, 503 bp, Homo sapiens; identical to SEQ ID NO: 6025
  chr7:155259119-155259622
  hypo

SEQ ID NO: 158531 - DNA, 124 bp, Homo sapiens; identical to SEQ ID NO: 6026
  chr7:155259833-155259957
  hypo

SEQ ID NO: 158532 - DNA, 852 bp, Homo sapiens; identical to SEQ ID NO: 6027
  chr7:155260038-155260890
  hypo

SEQ ID NO: 158533 - DNA, 95 bp, Homo sapiens
  chr7:155274562-155274657
  hypo
aaagttcctcacctgcgctagaggacctgtgtttctctgctcctcgtagcctggcagcagagacccggagtggcctagggcgaggctgtgactgc

SEQ ID NO: 158534 - DNA, 30 bp, Homo sapiens; identical to SEQ ID NO: 22015
  chr7:155314777-155314807
  hypo

SEQ ID NO: 158535 - DNA, 30 bp, Homo sapiens; identical to SEQ ID NO: 75184
  chr7:155333885-155333915
  hypo

SEQ ID NO: 158536 - DNA, 157 bp, Homo sapiens; identical to SEQ ID NO: 75185
  chr7:155343622-155343779
  hypo

SEQ ID NO: 158537 - DNA, 31 bp, Homo sapiens; identical to SEQ ID NO: 22016
  chr7:155352343-155352374
  hypo

SEQ ID NO: 158538 - DNA, 80 bp, Homo sapiens; identical to SEQ ID NO: 22017
  chr7:155352612-155352692
  hypo

SEQ ID NO: 158539 - DNA, 30 bp, Homo sapiens
  chr7:155355019-155355049
  hypo
tccacgtggggtcagcgatcctgaccactg

SEQ ID NO: 158540 - DNA, 30 bp, Homo sapiens; identical to SEQ ID NO: 22018
  chr7:155363313-155363343
  hypo

SEQ ID NO: 158541 - DNA, 30 bp, Homo sapiens; identical to SEQ ID NO: 75189
  chr7:155366654-155366684
  hypo

SEQ ID NO: 158542 - DNA, 210 bp, Homo sapiens; identical to SEQ ID NO: 75190
  chr7:155385398-155385608
  hypo

SEQ ID NO: 158543 - DNA, 20 bp, Homo sapiens
  chr7:155393775-155393795
  hypo
gccaccgcgcccgggctaaa

SEQ ID NO: 158544 - DNA, 36 bp, Homo sapiens; identical to SEQ ID NO: 75191
  chr7:155436111-155436147
  hypo

SEQ ID NO: 158545 - DNA, 31 bp, Homo sapiens; identical to SEQ ID NO: 22020
  chr7:155469875-155469906
  hypo

SEQ ID NO: 158546 - DNA, 30 bp, Homo sapiens; identical to SEQ ID NO: 75193
  chr7:155493740-155493770
  hypo

SEQ ID NO: 158547 - DNA, 30 bp, Homo sapiens; identical to SEQ ID NO: 75194
  chr7:155494174-155494204
  hypo

SEQ ID NO: 158548 - DNA, 169 bp, Homo sapiens; identical to SEQ ID NO: 22021
  chr7:155502688-155502857
  hypo

SEQ ID NO: 158549 - DNA, 156 bp, Homo sapiens; identical to SEQ ID NO: 75196
  chr7:155503997-155504153
  hypo

SEQ ID NO: 158550 - DNA, 21 bp, Homo sapiens
  chr7:155520435-155520456
  hypo
tgacattgccaaaaaggtaac

SEQ ID NO: 158551 - DNA, 178 bp, Homo sapiens; identical to SEQ ID NO: 75198
  chr7:155530781-155530959
  hypo

SEQ ID NO: 158552 - DNA, 30 bp, Homo sapiens; identical to SEQ ID NO: 22024
  chr7:155532000-155532030
  hypo

SEQ ID NO: 158553 - DNA, 196 bp, Homo sapiens; identical to SEQ ID NO: 75200
  chr7:155532478-155532674
  hypo

SEQ ID NO: 158554 - DNA, 112 bp, Homo sapiens; identical to SEQ ID NO: 75201
  chr7:155559196-155559308
  hypo

SEQ ID NO: 158555 - DNA, 127 bp, Homo sapiens; identical to SEQ ID NO: 22026
  chr7:155559942-155560069
  hypo

SEQ ID NO: 158556 - DNA, 30 bp, Homo sapiens; identical to SEQ ID NO: 22027
  chr7:155567826-155567856
  hypo

SEQ ID NO: 158557 - DNA, 30 bp, Homo sapiens; identical to SEQ ID NO: 75204
  chr7:155572916-155572946
  hypo

SEQ ID NO: 158558 - DNA, 214 bp, Homo sapiens; identical to SEQ ID NO: 75205
  chr7:155573669-155573883
  hypo

SEQ ID NO: 158559 - DNA, 63 bp, Homo sapiens; identical to SEQ ID NO: 75206
  chr7:155574315-155574378
  hypo

SEQ ID NO: 158560 - DNA, 231 bp, Homo sapiens; identical to SEQ ID NO: 44981
  chr7:155580181-155580412
  hypo

SEQ ID NO: 158561 - DNA, 212 bp, Homo sapiens; identical to SEQ ID NO: 116035
  chr7:155580714-155580926
  hypo

SEQ ID NO: 158562 - DNA, 1141 bp, Homo sapiens; identical to SEQ ID NO: 75209
  chr7:155581210-155582351
  hypo

SEQ ID NO: 158563 - DNA, 257 bp, Homo sapiens
  chr7:155582650-155582907
  hypo
ccatcggtttcttattcactcattcatgagcttgatatttactgaatgccactgtgtggcgtttctacggtgatggacacagggggtcttctgcggtgatggacacagtgctgcgcggcagcggacggcacagtccagccttgtctgcgtgaagcatgcagttctggtggcaaagagctggctccatggcagggctaaaaaacgccaaggacaccagcacctggcctttgtgtgtcccgagccggcagagctgccct

SEQ ID NO: 158564 - DNA, 31 bp, Homo sapiens; identical to SEQ ID NO: 75210
  chr7:155613134-155613165
  hypo

SEQ ID NO: 158565 - DNA, 767 bp, Homo sapiens; identical to SEQ ID NO: 75211
  chr7:155623718-155624485
  hypo

SEQ ID NO: 158566 - DNA, 267 bp, Homo sapiens; identical to SEQ ID NO: 75212
  chr7:155637255-155637522
  hypo

SEQ ID NO: 158567 - DNA, 120 bp, Homo sapiens
  chr7:155638078-155638198
  hypo
gaggatgatggcgcccgacgggtcctgcagcatctcttatcgggtctggcagcccggtcccctggggatgaaggctcctgactctcacctaggggcacagctccccggcacccctgattt

SEQ ID NO: 158568 - DNA, 628 bp, Homo sapiens
  chr7:155679094-155679722
  hypo
tgggtgagaaacatgggtaagcgtgtgcagacgtggagagggcgtggggtgagggacgcccacccctgtgggtgagaaaatgggcaagcatgcgcagacgtggagagggtgtgggggagcagaatgtggttttacgggtgcgatcacagggaggacagactggaatggaaggcttagcccggaggtggtcctgttcacctgagcgagagggcgtctgctggctcctttccctgacaaggccaactcggagggcaagctgggagcctggggtggggctggcggggtgaaggggctcagagggacgcctgcgttcttcatgatcttcccatccaagacttgctgcacgtcggcttcttccaggctccacatcacgggcagacccatgcagctccgctgagggcgtgcgcctggtatgggtgccctgccgccacgtacagctgagggaggccgtgggagcctccctggactcatctctgcctctgtttcttccccgtgagacatgggagctgagacctgccgactggctgtgctcctgcagggattggaaagggcttaacccagattggcagagagcgctgagtgtgactccagcaccccgggcgtcctgattttgcgaagcactttggag

SEQ ID NO: 158569 - DNA, 30 bp, Homo sapiens
  chr7:155680013-155680043
  hypo
ggacaggaggcgtgccgagccagggctgga

SEQ ID NO: 158570 - DNA, 192 bp, Homo sapiens
  chr7:155706979-155707171
  hypo
attgccccctctccccggcatactgctgggtcatacggagctggtcactcatggattgacccctctccccggcatactgctgggccacatggagttggttactcacacatggacccctctccccagcacactgctggattacacggagctggtcactcacggattgacccctctccccggcacaccgctggg

SEQ ID NO: 158571 - DNA, 30 bp, Homo sapiens
  chr7:155790789-155790819
  hypo
gagcccgtggacggacgtgtgcccttctcc

SEQ ID NO: 158572 - DNA, 30 bp, Homo sapiens
  chr7:155791121-155791151
  hypo
tgactcggcagtgggcggggccggatcccg

SEQ ID NO: 158573 - DNA, 159 bp, Homo sapiens
  chr7:155793925-155794084
  hypo
ccgggcgttctctgtcgccccctgttcccctgcacgctgggtgttctgggatgcgctcatttatgcttggggtcctcaccgtctcccatggtgctgggagagaatctctctccatggggatgatttgtggagggaaaaacctggcgaagtttgacatgt

SEQ ID NO: 158574 - DNA, 30 bp, Homo sapiens
  chr7:155794370-155794400
  hypo
caggcctgggtgccgcggtcccgcagtggc

SEQ ID NO: 158575 - DNA, 584 bp, Homo sapiens
  chr7:155797744-155798328
  hypo
gttcagctctggtggcggcatctggtccaggaaaatctagtggaacagtgtggttgcacagggcagaggtgcacccctacctcaccggcacccacttgcagggcagaagacatgggccccgtcttctgtgccagctcggacagtggcatccatgccctgggccctatgacttatcctaagacagctcctgtctgtccccactggtttctggaacaggcctccccagtggcggacggaggctatttctgagggagccccaggtggaggggtcacagctatcagagccaccccacaatggctgcatgtgccaagaagcctccagcagtgggagagccgcaccacggagcagacagattcctggagcatccaggactgtcggtctcctgggcccagcggtgccagcaagcccgctgcacatccctgcccaagtcccttctgttcctcaagtgtcccctgtcctcatcctgaagaggccctgcttcatttccctcgcaggccccccacagcagggagaaggtgcagcttcccgcagggctcctcagtgtcccactgccccacttgtgcgtccccgaagtcacgtcctc

SEQ ID NO: 158576 - DNA, 279 bp, Homo sapiens
  chr7:155828027-155828306
  hypo
tgatgtgtgcctccacggtgcaccagcctgcatcacacagtgatgtgtggcttcatggtacgccagcatgcatcacacactgatgtgtgcctccaaggtgcacctgcctgcattacacactgatgtgtgcctccacggttcacccgcctgcatcacacactgatgtgtgcctccacggtgcacccgcctgcatcacgcactgatgtgtgcctccacggtgcaccgcctgcattacacactgatgtgtgcctccacggtgcacccgcctgcatcacgcac

SEQ ID NO: 158577 - DNA, 98 bp, Homo sapiens; identical to SEQ ID NO: 22035
  chr7:155828365-155828463
  hypo

SEQ ID NO: 158578 - DNA, 30 bp, Homo sapiens
  chr7:155851691-155851721
  hypo
gcaggcagacgcctccgtctcagtctctgc

SEQ ID NO: 158579 - DNA, 30 bp, Homo sapiens
  chr7:155852264-155852294
  hypo
tgcacaatgcagccacgcggggtgaagaag

SEQ ID NO: 158580 - DNA, 319 bp, Homo sapiens; identical to SEQ ID NO: 75216
  chr7:155855974-155856293
  hypo

SEQ ID NO: 158581 - DNA, 74 bp, Homo sapiens; identical to SEQ ID NO: 75217
  chr7:155859953-155860027
  hypo

SEQ ID NO: 158582 - DNA, 312 bp, Homo sapiens; identical to SEQ ID NO: 75218
  chr7:155868044-155868356
  hypo

SEQ ID NO: 158583 - DNA, 205 bp, Homo sapiens
  chr7:155871902-155872107
  hypo
tgtttccctctggcccgcagcgttgcccatggtgaagacctggttgaaccaagaagccgtggaatcattaggatatcagagtgcagacctgcctgctcccccacactcaggcttcccacaggctccctggatgggcagcccctgctggaattcctccagagcctgaaacgttggccacattacaaagccgcgttctccatcgctg

SEQ ID NO: 158584 - DNA, 167 bp, Homo sapiens; identical to SEQ ID NO: 75219
  chr7:155897786-155897953
  hypo

SEQ ID NO: 158585 - DNA, 187 bp, Homo sapiens; identical to SEQ ID NO: 22036
  chr7:155898219-155898406
  hypo

SEQ ID NO: 158586 - DNA, 207 bp, Homo sapiens; identical to SEQ ID NO: 22037
  chr7:155900804-155901011
  hypo

SEQ ID NO: 158587 - DNA, 289 bp, Homo sapiens; identical to SEQ ID NO: 22038
  chr7:155913342-155913631
  hypo

SEQ ID NO: 158588 - DNA, 330 bp, Homo sapiens; identical to SEQ ID NO: 22039
  chr7:155916054-155916384
  hypo

SEQ ID NO: 158589 - DNA, 30 bp, Homo sapiens; identical to SEQ ID NO: 75224
  chr7:155919820-155919850
  hypo

SEQ ID NO: 158590 - DNA, 323 bp, Homo sapiens
  chr7:155920257-155920580
  hypo
gcgaattcctggcaccgggaacttggcctcgccccttattcatcaagtccaggcacgagtcactttctgctcaggtttggcctttaagattacgcactccgtgcaccctggggtagccaaccccccgaaggaaaacacgatggaagtcttcatccttagaacaggaggacaacgggctcgggttgaagcagctgacccggtgctgggaatgagtgagaggaggcgcggcacctgccccggcccgcatggacgcaggcacattagatgccaagtagtagggagccctggttcacttcttacctggctcgctgcaaagagaacac

SEQ ID NO: 158591 - DNA, 287 bp, Homo sapiens; identical to SEQ ID NO: 22041
  chr7:155935865-155936152
  hypo

SEQ ID NO: 158592 - DNA, 149 bp, Homo sapiens; identical to SEQ ID NO: 75227
  chr7:155948644-155948793
  hypo

SEQ ID NO: 158593 - DNA, 30 bp, Homo sapiens
  chr7:155970244-155970274
  hypo
aggatgctctgtgtacgcgtgtcagagaca

SEQ ID NO: 158594 - DNA, 255 bp, Homo sapiens; identical to SEQ ID NO: 75228
  chr7:155985232-155985487
  hypo

SEQ ID NO: 158595 - DNA, 43 bp, Homo sapiens; identical to SEQ ID NO: 75229
  chr7:156000100-156000143
  hypo

SEQ ID NO: 158596 - DNA, 151 bp, Homo sapiens; identical to SEQ ID NO: 22043
  chr7:156012927-156013078
  hypo

SEQ ID NO: 158597 - DNA, 30 bp, Homo sapiens; identical to SEQ ID NO: 75231
  chr7:156025787-156025817
  hypo

SEQ ID NO: 158598 - DNA, 53 bp, Homo sapiens
  chr7:156154857-156154910
  hypo
tcaccgcggtcaccacgcactgatgccctgtctgcacacgctttccacagccg

SEQ ID NO: 158599 - DNA, 31 bp, Homo sapiens; identical to SEQ ID NO: 75232
  chr7:156181998-156182029
  hypo

SEQ ID NO: 158600 - DNA, 31 bp, Homo sapiens; identical to SEQ ID NO: 75233
  chr7:156233573-156233604
  hypo

SEQ ID NO: 158601 - DNA, 262 bp, Homo sapiens
  chr7:156255035-156255297
  hypo
ttctccctcacagggcgagagaccaggcctttgcacacctgcttctctctgtcactgaatgtgggtttctctgaggagacgtgcacttgggcaggtctgtccactcacctgaagcggttcccagggaatgccgacggtgagtgctgtctgctggcagcattcccgggagctggaggaattcatcctttttcctgaagggagatccgggtgctgcattgcagtggctctgcgtggcctgagatggaggcgcacacccggtgct

SEQ ID NO: 158602 - DNA, 31 bp, Homo sapiens; identical to SEQ ID NO: 75234
  chr7:156264382-156264413
  hypo

SEQ ID NO: 158603 - DNA, 31 bp, Homo sapiens; identical to SEQ ID NO: 75235
  chr7:156289999-156290030
  hypo

SEQ ID NO: 158604 - DNA, 72 bp, Homo sapiens
  chr7:156290626-156290698
  hypo
gaggtgagctgaactcgcttgaaaaaggcgcccgcggagcaggtggatgcttgctgccgatggctgcggtgt

SEQ ID NO: 158605 - DNA, 30 bp, Homo sapiens
  chr7:156292523-156292553
  hypo
ggatcaactcttctgcgacaaatggcacgg

SEQ ID NO: 158606 - DNA, 291 bp, Homo sapiens; identical to SEQ ID NO: 75237
  chr7:156347362-156347653
  hypo

SEQ ID NO: 158607 - DNA, 307 bp, Homo sapiens
  chr7:156371321-156371628
  hypo
gatccgccaccaccacgcacgccaagcagccctgggtgtcctcggggggcagtgctgcatgctggccagcagggcggacgctggctgccatcccggctgacccacggccacccgagtgaccttggagtcactcgccctctctgtgcctcaggctctccacctgcaagctgggtacacatctcatccatggtgactacacggtatgacacacacaaagtgcctaaaacagcgctggacccttcgcttctgtgctgaaggggcacggagcgctgagggggccgaggacatacccgcgctggccgccacg

SEQ ID NO: 158608 - DNA, 88 bp, Homo sapiens; identical to SEQ ID NO: 75239
  chr7:156393240-156393328
  hypo

SEQ ID NO: 158609 - DNA, 223 bp, Homo sapiens
  chr7:156397738-156397961
  hypo
ccagcctccatcacccgcacccacactggcagaggctgcccacgagcaggcccctggggcttccaagactaggactgtgagggatcattttactcataaacaggacaggataatacttgtatttttaaaagtgttttacgcactgcgtgaagaaaggctgggcaagcgtgggtggtgggcaggctgccatttccatgagaccagagctcgaggcttcgtcgtt

SEQ ID NO: 158610 - DNA, 133 bp, Homo sapiens
  chr7:156435905-156436038
  hypo
gtgtccagtatcttgcgcagcaaagcggtagagttcaattggaactcaagttggtctgtccccatattctgtacttctgtgttctggacagactgaagttagccagtgttcctcttgcgttccagtttcttca

SEQ ID NO: 158611 - DNA, 406 bp, Homo sapiens
  chr7:156507227-156507633
  hypo
gggtcaggtatagatcgtatgtgttaccttaaggaaactgtacagtatttgaatggcaaacgtctttgcagcatttggagcagggaaatgacaagatcacacttccactgtgcatgtgtgtgtgtggtggggattgaactagcccttaaataacaagtagactctgaatggaaagaagggacaaaggaggtgccccaggttaggactctatacaccagaaaggcgactttcaaaagtccttccacctgcctccccttatcaagtgcctggcactaagaaggcaaatgcaaacacataaagactgacttactaaaaacaattaggccctggcattagactgccacgccaaggaaacggagaagaggacaaatatttactgagtatctactgagtaaaagacttataa

SEQ ID NO: 158612 - DNA, 188 bp, Homo sapiens; identical to SEQ ID NO: 75242
  chr7:156613329-156613517
  hypo

SEQ ID NO: 158613 - DNA, 30 bp, Homo sapiens
  chr7:156690443-156690473
  hypo
ttagaggggaggaggcgatcatgagcatca

SEQ ID NO: 158614 - DNA, 164 bp, Homo sapiens
  chr7:156733206-156733370
  hypo
tctcaccctcacccacgccccacccaaaacatggccatgcttcctgctgctcccagaacaaacacaaaacactcccggatcggcagagctttcacgcccggccctggccacctcgccagccgcatgtctcacgcaggtctcctcatgcccggcactcttgctgc

SEQ ID NO: 158615 - DNA, 121 bp, Homo sapiens; identical to SEQ ID NO: 22046
  chr7:156733809-156733930
  hypo

SEQ ID NO: 158616 - DNA, 38 bp, Homo sapiens; identical to SEQ ID NO: 22047
  chr7:156733989-156734027
  hypo

SEQ ID NO: 158617 - DNA, 33 bp, Homo sapiens; identical to SEQ ID NO: 22048
  chr7:156734691-156734724
  hypo

SEQ ID NO: 158618 - DNA, 154 bp, Homo sapiens; identical to SEQ ID NO: 75246
  chr7:156744699-156744853
  hypo

SEQ ID NO: 158619 - DNA, 30 bp, Homo sapiens; identical to SEQ ID NO: 75247
  chr7:156746442-156746472
  hypo

SEQ ID NO: 158620 - DNA, 30 bp, Homo sapiens; identical to SEQ ID NO: 75248
  chr7:156755760-156755790
  hypo

SEQ ID NO: 158621 - DNA, 30 bp, Homo sapiens; identical to SEQ ID NO: 75249
  chr7:156759348-156759378
  hypo

SEQ ID NO: 158622 - DNA, 30 bp, Homo sapiens; identical to SEQ ID NO: 75250
  chr7:156759782-156759812
  hypo

SEQ ID NO: 158623 - DNA, 124 bp, Homo sapiens; identical to SEQ ID NO: 75251
  chr7:156760915-156761039
  hypo

SEQ ID NO: 158624 - DNA, 188 bp, Homo sapiens; identical to SEQ ID NO: 75252
  chr7:156782594-156782782
  hypo

SEQ ID NO: 158625 - DNA, 2671 bp, Homo sapiens; identical to SEQ ID NO: 45005
  chr7:156801943-156804614
  hypo

SEQ ID NO: 158626 - DNA, 979 bp, Homo sapiens; identical to SEQ ID NO: 45013
  chr7:156812846-156813825
  hypo

SEQ ID NO: 158627 - DNA, 243 bp, Homo sapiens; identical to SEQ ID NO: 45014
  chr7:156813986-156814229
  hypo

SEQ ID NO: 158628 - DNA, 34 bp, Homo sapiens
  chr7:156832246-156832280
  hypo
ctgctcagatggccccgaccgagtaccaagacac

SEQ ID NO: 158629 - DNA, 724 bp, Homo sapiens
  chr7:156832486-156833210
  hypo
ccatgtctctgtgtccgcgggaccatcttataaggacacagtcacatcgaattgggggcccatcctactcctgcacagctaatcactaaccacatcttgttccgcagtaaagtcccattccgagacactggggctaggacttccacctgtctcttggacacatttcaacccgcagcaccaccactgaggaaacgcaagtgtgctgaagacgcaaacctaacacgcaggaggcaggaaccgtctgaggcagcccccggcaaacgtcaggctgtgtggctcagacccggcacagcctccgcgatgggagctccggggggggctggctggggacaaggacaagcggacttgggagcgacggggtttgggcatctgggagacgggaactccttcccgggaggaagaccgtgagggaggcgtggaagtggatgtgagccggtgtgcactgggctgcagtgcgcgctgctgggccggtccgggagcccacactgttgggtgctggctgctagaagcccacagcaggggcccgaggcccaccccctagcctcagggcacagcttcccctgtccagccaaggctgccttacccaagccctggtcctgcctgttccgtgccttctcccgcaaggcttcttcaacagcacaccgcgaaaacgtgcaggcatcgcccccagcacaagggtcgctgctagggaagctgcccttcgacagggcgggctgatccacct

SEQ ID NO: 158630 - DNA, 438 bp, Homo sapiens; identical to SEQ ID NO: 75257
  chr7:156880357-156880795
  hypo

SEQ ID NO: 158631 - DNA, 261 bp, Homo sapiens
  chr7:156883427-156883688
  hypo
aggggcaagaccagccaactgcgttttggggacacggtggccctgagaacagcatctcaggggacgcaggctgagacaggacaggagctgtgcagggtgggacaccgcaggtaagggcagggactgccaggatgagctgccttgcggctgacaccgtgactttcgggtggcacagaagctgtaggcatcagcggagagcagcgcaaagtggacagcagagatttgcacagctggacagggcagctccgtcacccgtgacca

SEQ ID NO: 158632 - DNA, 30 bp, Homo sapiens; identical to SEQ ID NO: 75259
  chr7:156905581-156905611
  hypo

SEQ ID NO: 158633 - DNA, 198 bp, Homo sapiens; identical to SEQ ID NO: 75260
  chr7:156918514-156918712
  hypo

SEQ ID NO: 158634 - DNA, 18 bp, Homo sapiens
  chr7:156922806-156922824
  hypo
gcccggccggatgttatc

SEQ ID NO: 158635 - DNA, 87 bp, Homo sapiens; identical to SEQ ID NO: 22054
  chr7:156937633-156937720
  hypo

SEQ ID NO: 158636 - DNA, 30 bp, Homo sapiens
  chr7:156974337-156974367
  hypo
cttacaactcctgtccggaaggtgcgaggt

SEQ ID NO: 158637 - DNA, 157 bp, Homo sapiens
  chr7:156974866-156975023
  hypo
atttcatcattccggcgcttgcagatgcgcagaccgttttcccttacgagccctttctgaatgcactgttgttaatagagagtagatgttcaagaaagagtggtggagcaccctggcttttctatttcgttttaactgttggcgaaaattatttggg

SEQ ID NO: 158638 - DNA, 30 bp, Homo sapiens; identical to SEQ ID NO: 75264
  chr7:157009427-157009457
  hypo

SEQ ID NO: 158639 - DNA, 30 bp, Homo sapiens
  chr7:157051926-157051956
  hypo
ttcaggtgttaggccggttgtcccttcgcg

SEQ ID NO: 158640 - DNA, 482 bp, Homo sapiens
  chr7:157052685-157053167
  hypo
gtcaatcatcgacgccgttatgttctggaagtaatgaataataaagacgtataaacttaaacgtgttagtgaataccatcactcaatgatatcagtagaaatgataatcttccaaattgttggagagaaaaaataaccatgcaaataaaacaggacaaacagaaccaactctgtttaccagatatggggggtgggggtgggaagtaacattcagaatcgtaaaatagaaaacatagaatgagagaagcctgaatgttacaacagtgagtgcggagaaactgacgtaatgaaagaaaaagactttgagacagggccaggaaaacgctgccgcctacaagcaacacacctaaacggagtgacccagaagggtttagtggcacgtccaggttcgtgtgtgaagaaatagatgggtccccttcagagtttgaagcatgacccatgtgaccagataggagaatctctcgagcgcagggaaagctggg

SEQ ID NO: 158641 - DNA, 30 bp, Homo sapiens; identical to SEQ ID NO: 75266
  chr7:157055997-157056027
  hypo

SEQ ID NO: 158642 - DNA, 338 bp, Homo sapiens
  chr7:157057953-157058291
  hypo
aatctgcacaggctgcgacagtgagcagactgagggcgatctgtgccttattgtcttcctgttggaagagaacacataaatcacgtatctcaaatgtgaggcaaatagctaatggtgtttgtgtatacgaggaaggtggagtcaccggttcttcgtggccatcagaggaccgacacgcccataggtctcatgcattaagtctgcgttgagcaatccctaacacggtttttgcctacagatacatttgcacaactgtgaaaaccaggtacgtattcattgcatcattttttgtaaaaagctgagagaagtgcccagcaacacgtcgtgccgcgcgtgtg

SEQ ID NO: 158643 - DNA, 30 bp, Homo sapiens; identical to SEQ ID NO: 75267
  chr7:157060853-157060883
  hypo

SEQ ID NO: 158644 - DNA, 180 bp, Homo sapiens
  chr7:157062217-157062397
  hypo
tcatcaggggtgggccgagcgtggctcccaggccggcggccggtgtgctcctatccgaccagccacgggtgttggcttcccgagtctcccattgggtctggcattagttcttgaaaaatttctggaggaagattctttgttctttgttttgtttgcccttttctacgttctgtcctactt

SEQ ID NO: 158645 - DNA, 223 bp, Homo sapiens; identical to SEQ ID NO: 75268
  chr7:157072933-157073156
  hypo

SEQ ID NO: 158646 - DNA, 74 bp, Homo sapiens; identical to SEQ ID NO: 75269
  chr7:157073388-157073462
  hypo

SEQ ID NO: 158647 - DNA, 418 bp, Homo sapiens
  chr7:157074071-157074489
  hypo
agatggttcagaggtgcaggccggggttggctcacctgccagcggctccgggccccaacctccttggcagcctctgcctcacctgctcacgcggccctcgggcagcccaggctgtgggcaccaaggggtcctgccggcttctcaggcagcagagtcctccgggtcctgagtgtggtgtgccttgggaacatgcgggaggcagagaagaacaggaagggattgaaaccgctccctccacccactcctgcccgaggcaccagaggcagcctcaaaaaaagcaaaaggtccagccttctgtggatctcagggatgcaggaggggaggccagggtggggacaaaggcggggaccaaaaagccgtgtgggttctagaacattcctagctgggccttgatccgtggcaccgtcgaggggtgtgg

SEQ ID NO: 158648 - DNA, 319 bp, Homo sapiens
  chr7:157075018-157075337
  hypo
gcggtgctgcctggacgcggcccacagggaggtggcctggccacacggaggctgtttgtgaaccgatgccaggcacaccctcccccaggcacgagtctcccctctggcctcatccctgccccaccccacactcagggaaccccctccctgtctttaaggctgatttcctcggtgcgttccccgggctgcgtgggccatggcggataacccgcctgaccccttccactcggctgtcggtacccacctgtcagccccacctgcgtgtccccctggaaggcagggcccgagtctcacccactctgcacgtcagggcctcacc

SEQ ID NO: 158649 - DNA, 926 bp, Homo sapiens
  chr7:157084098-157085024
  hypo
agggggtgaggccagtggagggcaggggaggaggagggcaatttcgctttggaaatccactccggggggccttggccggaagctggactgccgcggaggacactgcgcccctgctctgcagaggaggaatcccagccgggggacgggccgcccgaggtcacagaggggcctgccagcaggggtgtggcaggagggcggtggggaggaggccagggcagtgtctgaggctgcgtgtgggggccgtgtgttcacctgggcgccagggtgcagaggggggtcgcagggcagatgggggaggatgggggctccagccaggccttcagagaccgcgcgcctggaggagcgtttggcatcactcaacactaaagtgcaaacgtgggctccaagagcaagtcaagggtgttaccagctgggctctgggagcaaagacaaaggccagtggcctcccacccgccgtggcaggacaagcagagtgtggtctccacgcaagaggctggagcctgcagacccgggagggccccgggctggcgtcacatagcacagcaatgccagcagcagcgcagtctcaggctctccccgccccgatgattctccactcccaacataagggtcatgtggtctggagggacctttggcccagctacaggggaccaactcagggagacccctccttggctccgtgtgggtcaagaaggaaaggatggattcctcgtgtccatgtagaggcagagagcgcttccaaaaagacagatgagtgaccattgcctcggctgcctgggccctgaagggctcccctgtcctgctgactgttctgttctcaaggacctcggagaaatcgtgtcgcagtttaaggtcccttccttgctgccacccagacttctccttcccaaacctttagtgaacaacagcaccgggagagctcactg

SEQ ID NO: 158650 - DNA, 187 bp, Homo sapiens
  chr7:157085383-157085570
  hypo
gggcccgtgtgtccgcgtggagctggacatgcttctgtgggccaggcaccctgaccctgatcctctccagtgaagaggccgggggcaggcggaactgggtcaggctccaggacacagcctcaccctatcagggcagcgagggctggggcggacaggggagccgtagacagcccgtccctgggtgggc

SEQ ID NO: 158651 - DNA, 372 bp, Homo sapiens
  chr7:157085946-157086318
  hypo
gagcctctgctcccacggtctcaggccctccccgccctgatgagtctccgctcccaacacaagggccacgtggtctggagggaccttttgcccagctgcaggggccatctcagggagaccccgccttggaggacttgttctccggatctccagacgtttaggctgaaagtgcagagatttagaagtcggacagggagttggggagcagcgctgtgcacgttccactcacctgaacggcatcgtctgagtcgcgtttgataaaattcgtaggaggccactggtctggcctgagctcctgcaggaggcctggcagaacagaccaaaacgcagccactcgtgctagagctccacgtcatcaagccaaaactaact

SEQ ID NO: 158652 - DNA, 21 bp, Homo sapiens
  chr7:157086592-157086613
  hypo
aactggggccgggcgcggtgg

SEQ ID NO: 158653 - DNA, 30 bp, Homo sapiens
  chr7:157087781-157087811
  hypo
caagcagggttcagtcgccatcgtgggaat

SEQ ID NO: 158654 - DNA, 30 bp, Homo sapiens
  chr7:157088264-157088294
  hypo
atcctgggggagccccggccagcatctgcc

SEQ ID NO: 158655 - DNA, 173 bp, Homo sapiens
  chr7:157100020-157100193
  hypo
aatgtactttctgaccgggcgcggcggctcatgcctgtaatcccagcactttgggaggccccgccactctaactaggtgaactctccctcgcccgaggctccaaccagcttccacctcctggtttgtccactccgcttcacggccacacctctgactgcgctttgagggctgc

SEQ ID NO: 158656 - DNA, 58 bp, Homo sapiens
  chr7:157102725-157102783
  hypo
agatggctctcagatcgtccagccattctggggaggccagccccgccatcccccaaag

SEQ ID NO: 158657 - DNA, 137 bp, Homo sapiens; identical to SEQ ID NO: 75274
  chr7:157106436-157106573
  hypo

SEQ ID NO: 158658 - DNA, 22 bp, Homo sapiens
  chr7:157110376-157110398
  hypo
tttgtttttgagatggaatctc

SEQ ID NO: 158659 - DNA, 141 bp, Homo sapiens; identical to SEQ ID NO: 75276
  chr7:157110637-157110778
  hypo

SEQ ID NO: 158660 - DNA, 150 bp, Homo sapiens; identical to SEQ ID NO: 75277
  chr7:157122529-157122679
  hypo

SEQ ID NO: 158661 - DNA, 76 bp, Homo sapiens; identical to SEQ ID NO: 75278
  chr7:157128227-157128303
  hypo

SEQ ID NO: 158662 - DNA, 232 bp, Homo sapiens; identical to SEQ ID NO: 45019
  chr7:157129085-157129317
  hypo

SEQ ID NO: 158663 - DNA, 30 bp, Homo sapiens
  chr7:157137355-157137385
  hypo
tggagggcattggtgcgttcacgtctcact

SEQ ID NO: 158664 - DNA, 43 bp, Homo sapiens; identical to SEQ ID NO: 75280
  chr7:157139857-157139900
  hypo

SEQ ID NO: 158665 - DNA, 105 bp, Homo sapiens; identical to SEQ ID NO: 116075
  chr7:157150796-157150901
  hypo

SEQ ID NO: 158666 - DNA, 176 bp, Homo sapiens
  chr7:157151169-157151345
  hypo
agacccatcccaccaccgtgatttgcccatccccagcagcctcatcactgaccacctgtttttacttgcaggacccattccaacaatctcgtaaaacatggtggattactatgaagttctaggcgtgcagagacatgcctcacccgaggatattaaaaaggcgtaagtagttttat

SEQ ID NO: 158667 - DNA, 30 bp, Homo sapiens
  chr7:157151742-157151772
  hypo
gttcgagaactgcagcgctgcctgtggtac

SEQ ID NO: 158668 - DNA, 30 bp, Homo sapiens; identical to SEQ ID NO: 22061
  chr7:157162187-157162217
  hypo

SEQ ID NO: 158669 - DNA, 30 bp, Homo sapiens
  chr7:157171187-157171217
  hypo
agcattgtagcacgcgctgtatggttgtgc

SEQ ID NO: 158670 - DNA, 30 bp, Homo sapiens; identical to SEQ ID NO: 75284
  chr7:157190318-157190348
  hypo

SEQ ID NO: 158671 - DNA, 30 bp, Homo sapiens
  chr7:157198033-157198063
  hypo
tgcttccaggctgtgcgtgaggctggcttg

SEQ ID NO: 158672 - DNA, 30 bp, Homo sapiens
  chr7:157198461-157198491
  hypo
ccgggaggccgagtccgaggcgagagccat

SEQ ID NO: 158673 - DNA, 30 bp, Homo sapiens
  chr7:157198853-157198883
  hypo
gtcccagccgtgaggcggccgctccctgtc

SEQ ID NO: 158674 - DNA, 30 bp, Homo sapiens; identical to SEQ ID NO: 75285
  chr7:157199424-157199454
  hypo

SEQ ID NO: 158675 - DNA, 30 bp, Homo sapiens; identical to SEQ ID NO: 75286
  chr7:157199794-157199824
  hypo

SEQ ID NO: 158676 - DNA, 30 bp, Homo sapiens; identical to SEQ ID NO: 75287
  chr7:157202005-157202035
  hypo

SEQ ID NO: 158677 - DNA, 671 bp, Homo sapiens; identical to SEQ ID NO: 75288
  chr7:157202474-157203145
  hypo

SEQ ID NO: 158678 - DNA, 30 bp, Homo sapiens; identical to SEQ ID NO: 75289
  chr7:157205530-157205560
  hypo

SEQ ID NO: 158679 - DNA, 31 bp, Homo sapiens; identical to SEQ ID NO: 22062
  chr7:157205930-157205961
  hypo

SEQ ID NO: 158680 - DNA, 30 bp, Homo sapiens; identical to SEQ ID NO: 75291
  chr7:157207321-157207351
  hypo

SEQ ID NO: 158681 - DNA, 30 bp, Homo sapiens; identical to SEQ ID NO: 75292
  chr7:157208867-157208897
  hypo

SEQ ID NO: 158682 - DNA, 135 bp, Homo sapiens
  chr7:157218578-157218713
  hypo
tggatgtgctccctgcgcagtggggctgcgttcagccctccagaggacgggctctgatgtgctgcccgtggacccgccctgtggacacggtgagacccgccctgtggacacggtgagacccgacagtcaggaaag

SEQ ID NO: 158683 - DNA, 254 bp, Homo sapiens
  chr7:157219100-157219354
  hypo
tgggagcctggtgcccgtctggctgcccacggcccgcccctccatgctgctcccctgggcaggacctccgccgcctctgggttccttcacctctgggttctcctgaccgagaacgttgaggaccaggcagcggtcaaggttggcccgagaggaggcggtgggtggtggggacgaacctctctgtagggaaggggcccaggagctgtcttgagactcggcagccccctcccagctggtggcgagcagggacaggg

SEQ ID NO: 158684 - DNA, 91 bp, Homo sapiens
  chr7:157220411-157220502
  hypo
acacaccttcaaaaaactgagtcatcctttccctccagagaagctaccatgtgtggtgcagtttgctttggggacccgcctgggtggacct

SEQ ID NO: 158685 - DNA, 31 bp, Homo sapiens; identical to SEQ ID NO: 22063
  chr7:157221589-157221620
  hypo

SEQ ID NO: 158686 - DNA, 30 bp, Homo sapiens
  chr7:157225028-157225058
  hypo
gccacagaggcgtcccgcagcccatcaccc

SEQ ID NO: 158687 - DNA, 97 bp, Homo sapiens; identical to SEQ ID NO: 75295
  chr7:157233127-157233224
  hypo

SEQ ID NO: 158688 - DNA, 30 bp, Homo sapiens; identical to SEQ ID NO: 22064
  chr7:157236078-157236108
  hypo

SEQ ID NO: 158689 - DNA, 336 bp, Homo sapiens
  chr7:157255060-157255396
  hypo
gcatgacagtgggacacggggtctggggcgaggctggacgctgccatccagcacccagctcgtttcggcctgggctgccctcagcactgcgcagacccgcgagctcctcatttccccggaagatgaacgagaaggttcgcgcgagattctctgcaaagccctggcacaggccccgtccctgcagctgtttattgacgctgtggcggccgagacggcatgtttggaaatctgcttggcatggagactgcggtgccctgaccactgcagacaagaactcgtcttaacacctgcaggctaaaggaggaaagagtggggtgtctgcgttagaggttcaga

SEQ ID NO: 158690 - DNA, 30 bp, Homo sapiens
  chr7:157258701-157258731
  hypo
tgaggccgggtgccacggggtgactttccc

SEQ ID NO: 158691 - DNA, 30 bp, Homo sapiens
  chr7:157258936-157258966
  hypo
aggcatgtaagaaaacgatgttttaagaaa

SEQ ID NO: 158692 - DNA, 30 bp, Homo sapiens
  chr7:157259327-157259357
  hypo
ctaggtggaacgaagcggagggaagccacg

SEQ ID NO: 158693 - DNA, 31 bp, Homo sapiens; identical to SEQ ID NO: 22065
  chr7:157259720-157259751
  hypo

SEQ ID NO: 158694 - DNA, 31 bp, Homo sapiens; identical to SEQ ID NO: 75299
  chr7:157260472-157260503
  hypo

SEQ ID NO: 158695 - DNA, 30 bp, Homo sapiens; identical to SEQ ID NO: 22066
  chr7:157261148-157261178
  hypo

SEQ ID NO: 158696 - DNA, 1223 bp, Homo sapiens
  chr7:157262477-157263700
  hypo
gcaaggggccggcggcgcctaattccaccttgtgtgccagtgcagttcatagcccagcagtcacccggggtggggtcaactctggaaggcccctgtgtgttgactccagggtgaacccgggactcctgagtgggcgcccaggcccctctagtgctggccgcctctgcttccctctccaggcccacctgccggccaccacagtggcccccagcgcccagcccaggtcccccacgccggcttctctcggcccaggtcactctcttcacactgtcatctgccagtcacttgcacactctgattcccaaggcgactctgctgcaggcacacgccctcagcaagacctggctgagtgccgtctgtgcccgtggatgcacgcgcagctctcctggggacactggccctggctccactccctggacagatctgtgcccggcactgggtctgctccctgcacagacccacacctggtgctggcgccactccccggacacacctgcccctggcgctggcctgggttgggtgtgtccgtgtgtccagcgctggcctggattgggtgtgtccgtgtgtccggcactggcctgcgttgggtgtgtccgtgtgtccggcgctggcctgggttgggtgtgtccgtgtgtccggcgctggcctgggttgggtgtgtccatgtgtccggcgctggcctgggttgggtgtgtccgtgtgtccggcgctggcctgggttgggtgtgtccgtgtgtccggcgctggcctgggttgggtgtgtccgtgtgtccggcgctggcctgggttgggtgtgtccgtgtgtccggcgctggcctgggttgggtgtgtccgtgtgtccggtgttggcctgtgttgggtgtgtccggcgctggcctgcattgggtgtgtctgtgtgtccggcgctggcctgggttgggtgtgtccgtgtgcccggtgctggcctgcgttgggtgtgtctgtgtgtctggcgctccagcggggagtctgtggggggcatgttgctgaggtgctgggagctgggcctgacacttctgtgttttattgaatctcccaacatccaacatcccatttccatttaacagatgaggaaatgaaaacacagagaggagaaggcactcgcctgaggtaccctgccagacgctggggacgggctcacacgcagcggcccaaagcctgctgcctctcggagcagcgggggtctgggacggatattgaggcac

SEQ ID NO: 158697 - DNA, 18 bp, Homo sapiens
  chr7:157271528-157271546
  hypo
gggcgtgaaccaccgcgc

SEQ ID NO: 158698 - DNA, 30 bp, Homo sapiens; identical to SEQ ID NO: 22070
  chr7:157273376-157273406
  hypo

SEQ ID NO: 158699 - DNA, 30 bp, Homo sapiens; identical to SEQ ID NO: 22071
  chr7:157276391-157276421
  hypo

SEQ ID NO: 158700 - DNA, 51 bp, Homo sapiens
  chr7:157280683-157280734
  hypo
gccggggagagcacacgggagagccggggcggcacacgggagagcagatga

SEQ ID NO: 158701 - DNA, 165 bp, Homo sapiens
  chr7:157281181-157281346
  hypo
gtgcactgggcacgccgaagcccctccggcggcggctctttgttccccgcgtcacctcactgcacgccccgtcaccagcgtcgtgctccagcagcggcgctcctccagccaaagagggaggcactgacgaaacccgtgcagtcaaattctcgcggcctgtggtgg

SEQ ID NO: 158702 - DNA, 320 bp, Homo sapiens
  chr7:157294091-157294411
  hypo
tgggcagatgctctgcgtgcgggaggctgcgctttcagtcattatttggatttcgttttccacatgaaaatatttagagatccagctcttggaagccaaggagaaactggcttttaaggtaaaggaaggcaagtttgccgaggtgatgggaagacaccttgcaactgcgaaacctccaaatttaccggtagaacctggcacacagcttttgccgtcgtttggagaattactgcgtgcactgccgttcgctcagagccattgtgcacgtttgtttctctgatcactaacagcctgcacgtttccagcgtttccagtttcca

SEQ ID NO: 158703 - DNA, 30 bp, Homo sapiens
  chr7:157306533-157306563
  hypo
aaatcaaagttgattcggttgcaccaaagg

SEQ ID NO: 158704 - DNA, 155 bp, Homo sapiens
  chr7:157332353-157332508
  hypo
cccttccaggctctacgcagtgcgtgcaggtcgccctgatctcctctcccgggagggaaatgctcgcagccctctccgagttgccctgatctccttctctcccaggagggaaatgtcccctctctggggccccacaggtccgggacgtgcctgga

SEQ ID NO: 158705 - DNA, 269 bp, Homo sapiens
  chr7:157332824-157333093
  hypo
gtccatggtacccggcgcagtgttgatggagacgcagcgaggagctgtgattgtctcacttgccccgaagctgcaggacgttcagttctgtccctgcggcttctcccaatgataaactctctcaaagagaaatgccaaacgtgccttgtgtgccgggcggcctcactgagtgctgccagcttccccggccactcctgcacagtggatccaccctcccgaaagtggcagatgacaagcacactcttcctggaaaccgcctcgaacgtgct

SEQ ID NO: 158706 - DNA, 238 bp, Homo sapiens; identical to SEQ ID NO: 75306
  chr7:157334626-157334864
  hypo

SEQ ID NO: 158707 - DNA, 30 bp, Homo sapiens; identical to SEQ ID NO: 75307
  chr7:157335140-157335170
  hypo

SEQ ID NO: 158708 - DNA, 216 bp, Homo sapiens
  chr7:157335451-157335667
  hypo
aaggagaagctccaccgggcgtgtgggctggtgtgtgccgtgcaccttactcagagcccactgggccctgtgggcgtcggctggcaggaggagggggtgcttcccggaggggtgctgtgagcctcagagctggcgtttgaggggacaggggcttgtggatcatcttgtcctttatcgtgaagtgtcagctgcatgcggcgccgggatgtagcaccc

SEQ ID NO: 158709 - DNA, 30 bp, Homo sapiens
  chr7:157336061-157336091
  hypo
ctgaggtgggacggccgagccaggctcagg

SEQ ID NO: 158710 - DNA, 351 bp, Homo sapiens; identical to SEQ ID NO: 22073
  chr7:157336679-157337030
  hypo

SEQ ID NO: 158711 - DNA, 30 bp, Homo sapiens
  chr7:157338225-157338255
  hypo
gtgccgcctctctggcggctcgtgtggtgt

SEQ ID NO: 158712 - DNA, 30 bp, Homo sapiens
  chr7:157338522-157338552
  hypo
ttccaaaccaggcgacgtgacttcctccgt

SEQ ID NO: 158713 - DNA, 490 bp, Homo sapiens
  chr7:157340246-157340736
  hypo
tgtcacctcctctctcgacagcctcgcaacacatgccgaatgctgttgtgaacaagcagaaggaaagacagacatgtgcacagtcccagcttctccccgcgggacactgagtaaccacacagggaaaaatcatcacgcagccacgcagaagcctccagacacacacgcctcagtgggtgtagatgtgccgctccctcgtgagggacagtcctgccccctgccctgaccatgggggacgtgggacacgcctagacaagagacgttccacaaagagcaaggccgctggcgctctagaagacctcacagccgtgaagcgtcccggacagcagaggaaccatgatgcccctcgcgtggccgccctgggcgtgtcctgctccaggggaagctccctgggggggcgcgtagggcatcgctgggcctgttggtcagtggtttgcatcggtgctgacttcctgggtttggtcactgcgctgtggttatgtgaggtgtt

SEQ ID NO: 158714 - DNA, 548 bp, Homo sapiens
  chr7:157341257-157341805
  hypo
aggccccggagaggccgggcagcgctcagagagctcagaacatcctcctgagggttctgggatttatcgtcaacctctttctacaaaaatgcagcgttctccccccacccccaaatctagtgaatggaaagagccagtggatcgagttcctaggacttgagatgtggctgcatctggaggtgttgcaggaaacgccagtggacctttgggggcccagaagtgaccccgcccatgcaaggccggcatggacgaggccggtcagagcagagcaatcggtgtgcggctcacattaaaccaggccctccccgtgctcctctcaggaacacggccgcagagaggcaccttgaatgggtctgcgtcccggaggagagactgacagtaccttcgtctggaccatgccgggtctctggtccctcaagtgctccagggtcgctgcgatatcaatctctttagcacctgcaacaaaccacaaattgggctgagttcagagcacaagataatccatgccacatctgtcaatctcctgctagccacgttccctctgggct

SEQ ID NO: 158715 - DNA, 521 bp, Homo sapiens
  chr7:157344957-157345478
  hypo
aactaaatagcttcccgataaaaataattctatgtatttttacatatttctatgtacagggaaacctgccctctcatttagaagggaagtcatcgtgcaaagcggctggccgtgtgaataatagctcagaaacggggaaatgtacaggctccatctaacactgggtctcgtaactcctcacacaccccaactgctgacctcagcgagatgctgacctggaccacgtggggaggggatgggccgaggtgcaggatgagggaggctccatgtgctggggcctcacacccacgtttagagcacgctatttgtctttggccatacgctgctgggtttggaaaccgggttctaatacacaaaatgtattacaaccagtcttgtgtaattaaaaacgtaagatgtctattggcttttaagaaattttcccaaaaccaaaaaaggtgagttaaaggcaggagtgctggggttgccgacagacgtcgagttgtgtcacatgacgtggggaagctcgggctacagtgctg

SEQ ID NO: 158716 - DNA, 162 bp, Homo sapiens; identical to SEQ ID NO: 22075
  chr7:157346266-157346428
  hypo

SEQ ID NO: 158717 - DNA, 30 bp, Homo sapiens
  chr7:157346640-157346670
  hypo
tcctgagcatgggtacggccaggccgggcg

SEQ ID NO: 158718 - DNA, 30 bp, Homo sapiens
  chr7:157347052-157347082
  hypo
gcgctggatcctgcccgctcttgtgccctc

SEQ ID NO: 158719 - DNA, 573 bp, Homo sapiens; identical to SEQ ID NO: 75313
  chr7:157347301-157347874
  hypo

SEQ ID NO: 158720 - DNA, 30 bp, Homo sapiens; identical to SEQ ID NO: 22077
  chr7:157350852-157350882
  hypo

SEQ ID NO: 158721 - DNA, 30 bp, Homo sapiens; identical to SEQ ID NO: 22078
  chr7:157353082-157353112
  hypo

SEQ ID NO: 158722 - DNA, 30 bp, Homo sapiens
  chr7:157363646-157363676
  hypo
ccatgtgaggcctcgcgcggtggctcacgc

SEQ ID NO: 158723 - DNA, 110 bp, Homo sapiens
  chr7:157364281-157364391
  hypo
aaatcattttgcaatcgcttgttttgacggagaaaataaaaatcatacgcataatatcaaacatttattcttcttctcaacatgacgttattaatcggagctttaaaacc

SEQ ID NO: 158724 - DNA, 175 bp, Homo sapiens
  chr7:157367334-157367509
  hypo
tcggtgcctggcgaacgcgccaggccagagtgagaacgcgtcgtctattgttcaaagataagaaacgctgcagcatgaagatggccggtgtcttcagaaggggtctcacctttcctgtcgctgaaatcggggtggctattttatacagaaaaccagccaccggcaatgcttgtct

SEQ ID NO: 158725 - DNA, 628 bp, Homo sapiens
  chr7:157370298-157370926
  hypo
aggttttcttaaaaacggaccccacttaaaggcttgttatatgggaccgggaccacgctgtgaggcgaatgttttttctactctgttatcatttggatttagaaaaatctaaaagataaaaaccacaccacactcccagggtctggttcatgagcacacagccgtgtgaaccatccacacgggcatgcggccctcgggggtgactcagcctccgtcccctgaacatggggtgcgctgagcctccctgcatgcggccctcgggggtggctcagcctccatcccctgaacatggggtgcgctgagcctccctgcatgcggccctggggggccctaacgaatcccattcggaggaggagcagggcccgtcctcgtccggctggtgggtcctgccctgggtggctctggtcggagtacctcatagatgtggtagagattggagccttcatccggccagtagtggtagcactgccggacgccgttctccgcgaggggtgtcagcatgacgatcaccacgcagccgctctcccacaccatctgcggacaaagaaggcccgtggccgcggtgtgactgtctcatcaccgcgtgacatgtgtaattactgcactcggaagcacagtccaaatttat

SEQ ID NO: 158726 - DNA, 100 bp, Homo sapiens
  chr7:157372246-157372346
  hypo
taatcatccggcactcggctccgtgccacccaagtgtgacattacagagccccgtcgactggggggacccggacggcctggaagccgcactcattggctc

SEQ ID NO: 158727 - DNA, 135 bp, Homo sapiens
  chr7:157372650-157372785
  hypo
cagccttcaacagcgcgcctgaccagataacctcagaatacatcgcaaaaagttaatttggattttggtatgaatgcagaatcagtaaaaatcccagtcgagtaaggttcaatttctaatcggggagaagtttca

SEQ ID NO: 158728 - DNA, 30 bp, Homo sapiens
  chr7:157373217-157373247
  hypo
cctgcacacccgagccgagcccctgcacat

SEQ ID NO: 158729 - DNA, 156 bp, Homo sapiens
  chr7:157386351-157386507
  hypo
ccattctaagggcagcgctgggacggatgggtccatgtttcaggaaggcaggtgtgtgccatgcaaagaccttcctaccacgaaactcctgagacgatgggccccagggtgccatcttctctgggaaaggcatgttctcaccgggctgggcgactc

SEQ ID NO: 158730 - DNA, 240 bp, Homo sapiens; identical to SEQ ID NO: 22080
  chr7:157387163-157387403
  hypo

SEQ ID NO: 158731 - DNA, 30 bp, Homo sapiens
  chr7:157395538-157395568
  hypo
gaaactttgggacaccgtagggtgcgattt

SEQ ID NO: 158732 - DNA, 30 bp, Homo sapiens
  chr7:157395797-157395827
  hypo
aggtctccaaagccccggccctggacagtg

SEQ ID NO: 158733 - DNA, 30 bp, Homo sapiens
  chr7:157396116-157396146
  hypo
agctgccaccacactcgtccccagaaacac

SEQ ID NO: 158734 - DNA, 333 bp, Homo sapiens; identical to SEQ ID NO: 22081
  chr7:157396443-157396776
  hypo

SEQ ID NO: 158735 - DNA, 30 bp, Homo sapiens; identical to SEQ ID NO: 75320
  chr7:157401784-157401814
  hypo

SEQ ID NO: 158736 - DNA, 497 bp, Homo sapiens
  chr7:157402240-157402737
  hypo
ctcataaggatggaacgattcacgtggccacggcctcgtggtccacaggggagcacagggtttgactcccagccccactgcttgccagcgggcgatcctgggtaaactgttcagtgttcggagaatgcaggatgataacatacaactcacagcactgttgtggtaaatggcacgcagcaagcaatgaggagcaaggctgagatgacggtggacacgcacccaactgcgcaggtcagccaagctggcaaagcgtgttcttgctgccccgtggtggcagaacatatggagcgatttttcatagatgccaacagaagagacacatcccacaatttcttgttgattattactatggcaaagagccttgggagatggcccagctaagcatgctagaggacgcggcggtatagtcattaatcatgatctagaacctcccgtgcccaccccactgcatctgaggaaagcgtgtggaagactcctctgcccggaacatcgtcttg

SEQ ID NO: 158737 - DNA, 288 bp, Homo sapiens
  chr7:157403099-157403387
  hypo
tggagaggtggagccggtgtcttgctcctagagggagtcctgactccagcagagaacatgttccgggatgtgctccacagttggcaccagcacccacaagctcctgctccgagtttatggtgtccatcgaggtctgagggctgcaaaggcacatcccggggctgctggccgtcagcaagggccgtcagtgctgcttagggatcccagcggctcacacacagaaaggcctttgaacttgtcatagttgaggcaaaggaataaatgatcggaccacgtttgtttcaatac

SEQ ID NO: 158738 - DNA, 32 bp, Homo sapiens
  chr7:157403792-157403824
  hypo
ggcttccacactggacgcgtcaaaagcaggtc

SEQ ID NO: 158739 - DNA, 416 bp, Homo sapiens
  chr7:157404195-157404611
  hypo
cccagggttgagctgcgtaccctcccccaaaaagacacactggagtcccagccctgggaacatgaccttatttggaaatagggtctttacagaggtaagcgagcggagggcatttgggcggccctaatgcaatatgactggcgtgctgttaggaagaaggactctgcacacccacacgggagggagagcgcccgtgtgaagacgaagacagccgcggtcatgctggggacacgcggagggagcgcgcccgtgtgaagacgaagacagccgcagtcatgctggggacacgcggagggagagcgcccgtgtgaagacgaagacagccgcagtcatgctggggacacgcggagggagagcgcccgtgtgaagacgaagacagccgcagtcatgctggggacacgcggagggagagcgcc

SEQ ID NO: 158740 - DNA, 1108 bp, Homo sapiens
  chr7:157407767-157408875
  hypo
atacttacttgaagtcgtccagccagaaaataaatgaagtgctcgcaggtcacgctaatacggccaacactgggcggctggccagcgtgggtggtgggtgtgcaggcgatgccacgctaccccttccacttgagtgtttaaaactcttgtaataaaaagtgggggaggaagtcatgctaagccagccacacttctgctccagagagggccctgcaagagcggtgtgcgtgggttgcggctgggtctgcgctggggtagtgtaggctgcactctccggggagccgctgaccttgggctccctaacctccttcagccccagctctgtccctgtgtgaatctcagggctgtttcgaggatgaaaaggaggtgtttagccccgagcctcacgtggaaacatctgatgagcctttgccaatatgctcgggacctggggacggctggggtgaccccatcgcaaggccgggccgtggaaacaatctcagccctggaaccagcgcctgggaagtcccgcggtggatccgcgtcacgggggaggattggctcagcactggtcctgcggaatgtgtttttatcaatgacttgacgacgtgaaaaacatgtttataaaacgagcagatggtgccgagctgagagggaggtgacgcagtgactcaggaaccacaagctctggaggctgaacgagaatcggttacaggagatgaacacaaggctcgattctcctgttaaacttgactgtcaccaacggggggtggggggtgcgcgaggccctgggctccaccgaagaccttaaggaaaagactctggatgttagtgggttcggcctcagaatcagccggcgctgagatgtgcacctggcaggatgaacgtaacttctggtggataaagtgggaggcctgatccaggaagaagcacaccgtggcctggggcccctctggagggtaggtcttccaagtcacgggaaacagggcgcccaggagacggtgagcccggctgctgccaccccgaaggccaggctcgccccacactgtgagaccctccccacacgaagattctgtaagcggaatcggaaggaggatgtgagaaggacgggtagccatgccacaccagg

SEQ ID NO: 158741 - DNA, 340 bp, Homo sapiens
  chr7:157410942-157411282
  hypo
agacctgggagttcccggtgagcacgcggaaaggacgcggtgggagcggcaggtgcagagggaggacttgaaggttccatccctaacagaggacagcgtggccgagtactcatgcttccaaccctgcacagaggatagtgcatgcccagcatgcagactcgcttccatcgcgacacagaggacagcatggagcccagctcgagtgccgtccccccaccatgacagcgcagcatgggccttccaagccacagagccacagggaagccagtcctcctggaccgtgtgtggctgttttggagccagttgtgtcctgtgaagagcgcagcggccgcaggtgagg

SEQ ID NO: 158742 - DNA, 30 bp, Homo sapiens
  chr7:157412606-157412636
  hypo
acagtgacggagagacggcctcggccacag

SEQ ID NO: 158743 - DNA, 250 bp, Homo sapiens
  chr7:157413022-157413272
  hypo
tgtgggaacacgaggcggtgtctcttccagtccacgagagtcactcggagaactgctggcttatatttccattttctggcagtgatccctagctaggtagtaggtgctcagtttgtggaaataattgtaaagttaaagatgctgtaaaagcaaccactgttgattgtgtgcctgcgacgtaccggtgctatgctaatgacctcgtctaacccttacagcagtaatacttcaaggacgacagcgtgacccc

SEQ ID NO: 158744 - DNA, 194 bp, Homo sapiens; identical to SEQ ID NO: 22085
  chr7:157414206-157414400
  hypo

SEQ ID NO: 158745 - DNA, 30 bp, Homo sapiens
  chr7:157427273-157427303
  hypo
gcgttgtcaatgcatcgcgaccgggcatgg

SEQ ID NO: 158746 - DNA, 43 bp, Homo sapiens; identical to SEQ ID NO: 75327
  chr7:157434604-157434647
  hypo

SEQ ID NO: 158747 - DNA, 30 bp, Homo sapiens
  chr7:157435249-157435279
  hypo
gcctgtggacgtctccgtccgtcactgggt

SEQ ID NO: 158748 - DNA, 489 bp, Homo sapiens
  chr7:157436257-157436746
  hypo
ggcacacccacggcccgggcatcccagggaaatccagaaccagtggctgtgactgctcccccgacggagcccctgttccttgcacagccgctgctgcctccagcctctgtctgcgcccttcccaaggaccccctgcagacacccgcacccacagtaaaggaggtgggagcaggcggccaggctccagccaggaagtgtgagctgagctctagaaagtggtggtgtctaaagtggctcaccagcctctccgtcaggcctcgaaggttcgtcaccaactcgtgcagcagatagacggcagtccgggctgtggcaggtgacagcccagggcccagacaccggccagcctcatagtgctcgccgcacgctcagctcaccagtgcggggagactggagcttcccccgtgggactgtggctggaagaccaggggcctctcatgcgctacaagctaccagaaaacactggtgtgcatcaggcgtcggtccctgtta

SEQ ID NO: 158749 - DNA, 30 bp, Homo sapiens
  chr7:157444485-157444515
  hypo
tgcttttcagagtcccgagccttgctctga

SEQ ID NO: 158750 - DNA, 466 bp, Homo sapiens
  chr7:157445765-157446231
  hypo
gtcacagaaagtctccgctcttggtgctgagcctgccccccagacggtgcagccggcctctcccacctgctggggctcctcacatctagcttggcctccagacatcaccaacctctgctgtttatttcatcggatcgtggggttcagatgccacgttttgtccaacgtgccccaggagtggctgcatgtcaggaacatgtcgctgggaatctctgtggcttatctgaccatcctgccatcctcaggtgaggggcactgaggtggccggttgggtgtctggcggaaacgaggctttgcgcacagagggctgggctgctggatcaccacggaattggctgccttgtagctgtgatgagtcggaaggtcggcgactctgatgcgttcctgcggcaccaacctgcatgtgctttctacagcctgtgtgtgccagggagggtggcggtcagtgccccgagattggctgtag

SEQ ID NO: 158751 - DNA, 289 bp, Homo sapiens
  chr7:157446435-157446724
  hypo
agggtccaaggcccacgtctggcccacttggttgctggactccacacgatgcccgctgctccccacacccaccccaactgcacacgacgcccgccactccccacacccaccccgactccacacgatgcccgctgatccccacacccaccccaactccacatgacgcccgtctctccccacacccaccccaactgcacacgatgcccgctgctccccacacccaccccgactccacaccatgcccgccgctccccacacccaccccgactccacacgacgcccgcctctc

SEQ ID NO: 158752 - DNA, 30 bp, Homo sapiens
  chr7:157447228-157447258
  hypo
ggcggtggtgagacgcgttccgaaacagga

SEQ ID NO: 158753 - DNA, 55 bp, Homo sapiens
  chr7:157447780-157447835
  hypo
cgggtgtgaacacctcgggtttgatttctggcgggtggtccggcttcgtgggctc

SEQ ID NO: 158754 - DNA, 256 bp, Homo sapiens
  chr7:157448324-157448580
  hypo
gctccgtctccagtgcgggaaacagcacagccaggcacggtcacccaccaggacgacgcctacggcctggagatccaggaggcagccagcaggacgtgctgcgctattgacagctgtcctaataacacccggacattcattatgtatggagtggcaatgcacggccacacacgcgtgatcactccagcgaggaccctggaaaaggccgctgaagccgcgtcgccgtgagcctctggccggcgccaccaggaaggct

SEQ ID NO: 158755 - DNA, 526 bp, Homo sapiens
  chr7:157448929-157449455
  hypo
ggtgcagccatcatcgcccagtccccgagggtcagcgggcgcagatgctgggtgttgcaggggccgaggaaggagggccctggtgtttgtgtggcagggagtgcaaagactgggcttaccaggatcatgtggccggtggagatgtccatgttggactgcacaggctcctcggaccaggatgaggcgctgctgcgtgcggaggggctggggatcggcccgtcgctgaactgggatgagacgctgctgatgcgtgacgtgtgcgggccctcaggtcggtctggtggccgcgtggccatacgctggcggcacagctcctgcaggacagggggaggaagagcagggggttagtggcattggggacacccagcaggacgagggccacggcacccacgtggcacaaccccttctcctgctaagatccaaggttcaggcaggcgagagtttaccccagggcaggccagcgcaacatgacggtcaacgcaccccaaagcacgcgcccagcacggtgacccgagaagacttcagg

SEQ ID NO: 158756 - DNA, 45 bp, Homo sapiens; identical to SEQ ID NO: 75333
  chr7:157453760-157453805
  hypo

SEQ ID NO: 158757 - DNA, 30 bp, Homo sapiens
  chr7:157458120-157458150
  hypo
tagctgcgatgtcggcggcacttgcgaatt

SEQ ID NO: 158758 - DNA, 30 bp, Homo sapiens; identical to SEQ ID NO: 22090
  chr7:157461962-157461992
  hypo

SEQ ID NO: 158759 - DNA, 223 bp, Homo sapiens; identical to SEQ ID NO: 75335
  chr7:157464609-157464832
  hypo

SEQ ID NO: 158760 - DNA, 30 bp, Homo sapiens
  chr7:157465276-157465306
  hypo
actctcctgcatcatcgtcttcaccaaaaa

SEQ ID NO: 158761 - DNA, 453 bp, Homo sapiens
  chr7:157467101-157467554
  hypo
tcctcctcggtttgacgtgcaattgcttttcccgaagctttctcctcttgtaacacccagctcctgcatgccgtggcggctccagccatcattcctcatcccaccaccccgcgcagcgtcttgcctccttttatgccggtgtacgtgttgtgttaagagctgggctttgccatttttgacaggctaatgcatttcaccacagataatgccattcaccacagaggcgcattctctctcgtgcccatcaaggcagaggctgagaagaaggtctgctttacagcaacggcctgaggaccctcggccccaaggtgaggccccgcgcaggtacctctgtacacgcctgtggagtcccaccctgtcgtgtgcacgaggctgtcacctggagattccggccctgccgggcgtctcctcccacgccgagctcctcctgccgggggggtctgcacagttctg

SEQ ID NO: 158762 - DNA, 494 bp, Homo sapiens; identical to SEQ ID NO: 45027
  chr7:157476994-157477488
  hypo

SEQ ID NO: 158763 - DNA, 109 bp, Homo sapiens; identical to SEQ ID NO: 6065
  chr7:157477710-157477819
  hypo

SEQ ID NO: 158764 - DNA, 194 bp, Homo sapiens
  chr7:157502239-157502433
  hypo
ctgagaaattccctgcgagccccccagctctgtcttctatggggacttcgacctcgctccacgttgtgcagccacatggcccacaggaatgggcggtcctgctacatgggaaggagcttagggtttaacacgcctgctccaggagctgcgccacacacccgccttcagattcagcccggcgtgcctgggcttct

SEQ ID NO: 158765 - DNA, 30 bp, Homo sapiens
  chr7:157502770-157502800
  hypo
cctgagacacagggtcggccgtgaggacac

SEQ ID NO: 158766 - DNA, 30 bp, Homo sapiens; identical to SEQ ID NO: 75340
  chr7:157503473-157503503
  hypo

SEQ ID NO: 158767 - DNA, 274 bp, Homo sapiens; identical to SEQ ID NO: 75341
  chr7:157507357-157507631
  hypo

SEQ ID NO: 158768 - DNA, 326 bp, Homo sapiens; identical to SEQ ID NO: 22095
  chr7:157510157-157510483
  hypo

SEQ ID NO: 158769 - DNA, 247 bp, Homo sapiens; identical to SEQ ID NO: 22096
  chr7:157511384-157511631
  hypo

SEQ ID NO: 158770 - DNA, 437 bp, Homo sapiens
  chr7:157512999-157513436
  hypo
tggtttctcggctgccgcaatcggtcattccaatgtccgacctctggggccctcagacccccaaacccaccttgtcactctggcttctccgcctcctgcagctcctgctctgtgtttgggaacgcgtgcggcccacaggacaaagccttgttgcacacccgggtcaagggcaaatcccagctgcacagccgggtgatccagcggccgaccctgcttccctgcgtaggaggcctgagccaaggacactgcggccccggctgcaccgatgcatgggtgtgcacgcggggaccgagggagtcacgtgaatcatgtggcttccacgagctacctcttcccacaccaggagcaggtgccctcgtctccatcaagcgctttctggggagaaactccttcaaggataacggcaaatggtgagcgtgcctcactctttataatag

SEQ ID NO: 158771 - DNA, 30 bp, Homo sapiens
  chr7:157514210-157514240
  hypo
gtcagccgagcccagcgtcccaccagcagg

SEQ ID NO: 158772 - DNA, 65 bp, Homo sapiens; identical to SEQ ID NO: 22098
  chr7:157527706-157527771
  hypo

SEQ ID NO: 158773 - DNA, 334 bp, Homo sapiens; identical to SEQ ID NO: 75346
  chr7:157528456-157528790
  hypo

SEQ ID NO: 158774 - DNA, 573 bp, Homo sapiens
  chr7:157544022-157544595
  hypo
agaaaaaaatccatgcggcgaacgccctggctgtggcagcgggtttatttttgaatgaaggcaccatgcatttaaattaaatgtcagatgtaatttagcacccaggcatcaagaggctgagcgtgtgcagggaaagccggcagctcgcaggagtggctgagtgcctgctctccagcgcccacggagtgcgctcgctcgggaggtgtctctgtcctcggcgtgggagggtctttgagaaggtgaagcttggctgttgctaagacacacgagatcattgtttggaaggcgttttcccttctctctccctcaaatgactgtttaattgaggttactctgcaccgctgacacgcggtggaaagcccgacatcacttggagaacttaatcaaggctgatggagccgcgcgcacagaatcccaactgcccgcaccctttgtttcatgttcaccaagaccgaggggaccattcctacgggatgaggaaacacatctaacacaggccttctaaagagagaggagggagggagggagggatggaaagggggaaggacagagaccaccgtgaacacatctccg

SEQ ID NO: 158775 - DNA, 343 bp, Homo sapiens; identical to SEQ ID NO: 22100
  chr7:157549922-157550265
  hypo

SEQ ID NO: 158776 - DNA, 440 bp, Homo sapiens
  chr7:157550871-157551311
  hypo
gaaaagggccggtgtcgtaattgactggacaggtactaatgccgaccacatccaaatatggatgatgacgagcgtggtgttgcccacagtccaggcctgtccaggcgccattccccgtggcctgcacgctcctgggtcatgctccgctcaggcggctccttcagtgaagttgcacagcagtcagggtaacctccatgtccccaaagggcaagaccggctcagaggcgaggtaggtggcacgaggccacacagctggtcagctcagccgggctgggacgcgggccccagaccgtggcccccgtgcagctctgggtccagctggccaaggtggactttgcacaaggtttgggaggctaaagggagccgaggcaggtggcagctgctgtgctgggaaggctgcgtgcgcggggcatcctctcttggcccgggtgggcggacgc

SEQ ID NO: 158777 - DNA, 30 bp, Homo sapiens
  chr7:157551589-157551619
  hypo
ctggtttccctgccacggtacgcccctcca

SEQ ID NO: 158778 - DNA, 30 bp, Homo sapiens
  chr7:157551884-157551914
  hypo
gtgggcgcaggcggtcggcattgttactta

SEQ ID NO: 158779 - DNA, 172 bp, Homo sapiens; identical to SEQ ID NO: 75349
  chr7:157565438-157565610
  hypo

SEQ ID NO: 158780 - DNA, 156 bp, Homo sapiens; identical to SEQ ID NO: 22101
  chr7:157567208-157567364
  hypo

SEQ ID NO: 158781 - DNA, 30 bp, Homo sapiens
  chr7:157567899-157567929
  hypo
tgtgtggcaaccactcgctctcacccttcg

SEQ ID NO: 158782 - DNA, 125 bp, Homo sapiens
  chr7:157568243-157568368
  hypo
atggggacacagcagcgctgggaaggcttcgtcctcgggagccggcgctcacatgcagggagtcgcccaggacagcaagcctgggtgtggggctgaggcgggcgcagcctcggggcagtccccac

SEQ ID NO: 158783 - DNA, 30 bp, Homo sapiens
  chr7:157568569-157568599
  hypo
gacctacagtaacgccgctgtctctgtgat

SEQ ID NO: 158784 - DNA, 139 bp, Homo sapiens
  chr7:157570972-157571111
  hypo
ggtgtcgaatgcccacgtaaacatgtacatgtgaatacaggcatcaaatgcccacgtacatgtgattacagttgttgaatgcccacgtaaacatgtccacgtgaatacaggtgttgaatgcccacgtacatgtgaatac

SEQ ID NO: 158785 - DNA, 111 bp, Homo sapiens
  chr7:157571412-157571523
  hypo
cctgaatacaggtgccgaatgcccacgtaaacatgtccacgtgaatacgggtgccgaatgcccacataaacatgtccacgtgaatacaggtgccgccgaatgcccacataa

SEQ ID NO: 158786 - DNA, 30 bp, Homo sapiens; identical to SEQ ID NO: 22103
  chr7:157579865-157579895
  hypo

SEQ ID NO: 158787 - DNA, 30 bp, Homo sapiens; identical to SEQ ID NO: 22104
  chr7:157581824-157581854
  hypo

SEQ ID NO: 158788 - DNA, 298 bp, Homo sapiens
  chr7:157583900-157584198
  hypo
aagaagaatgagatacgtccatttgctgtgataagaaaagatattccacagtttcgtatttgttaagtattttcagcaaatcatggaacacgatgcaacacccgattccatgtttgaaaacagaacagaacaaaattcaacaagaaataagcgcccgcgtccacatattctcgtgcctggcgtgttttacgtgcttgggaagcggagcggccgctgggcttggctctgaggtcgggactggtgcaggcggatgcatgtatgtgcccgggtcccgcctccacacgcctgcctggcgcca

SEQ ID NO: 158789 - DNA, 305 bp, Homo sapiens
  chr7:157588647-157588952
  hypo
gaggggggcaggcgccgaggcgaacttgggagaggccctatggtgcacacccctacccttcctggctggagaaaaatggcccgccccgtgaaacagcaaataaacacacgcgttccaggacgtgagatacggcctccacatcaatcagagggacctgcccagtcctgtcaattttccatctaaattacataactgtcctccttagagacgcggggatgcccaggcacaggcatgaaagatcggccttgaggttattttgtctctgcaagtattgatgcgaggacttgtggcgcttttctttcccg

SEQ ID NO: 158790 - DNA, 292 bp, Homo sapiens; identical to SEQ ID NO: 22106
  chr7:157589659-157589951
  hypo

SEQ ID NO: 158791 - DNA, 30 bp, Homo sapiens
  chr7:157590293-157590323
  hypo
gggtgtgctgtgggacgtaccactcggtgg

SEQ ID NO: 158792 - DNA, 30 bp, Homo sapiens
  chr7:157593966-157593996
  hypo
cgagatcagtctctcgacccctgttaggag

SEQ ID NO: 158793 - DNA, 271 bp, Homo sapiens; identical to SEQ ID NO: 116091
  chr7:157594762-157595033
  hypo

SEQ ID NO: 158794 - DNA, 181 bp, Homo sapiens
  chr7:157602211-157602392
  hypo
cagcacagtgaatgccgccttctggacatagggtctctgtggatggagttagtaaagatgaggcccttatccagtacggccggcatccttctaagaagagacagcacagacacgccccgaggacggagacggaacggagtgaggcgtctacctgccaaggagcccccggcattgccaggag

SEQ ID NO: 158795 - DNA, 499 bp, Homo sapiens
  chr7:157602963-157603462
  hypo
gtgatcccaaagcagcgatctagacgtgtggggtccacaggcgggcgccctggcactgggggctctgcaacttgacgaggctatgccaggctgggctagaggtgccgtgctgggcacaggctctccacgggatggcgggactgctgggcacaggctctccacggggacggcggggctgctgggcacaggctctccacggggacagcggggctgctgggcacagggtctccatggggacggcgggactgctgggagctgggttctccacggggacggggacggcgggactgctgggggctgggctctccatggggacagggacggggacggcgggactgctgggggctgggctctccatggggacggggacgggaacggcgggactgctgggggctgggctcttcacggggacggcgggacttctgggggctggctctccacggggacggcgggactgctggaggctggctctccacggggacggcgggactgctgggca

SEQ ID NO: 158796 - DNA, 45 bp, Homo sapiens
  chr7:157605780-157605825
  hypo
tgcaaagacctgtgccgtgctaaaaccacacgcatggcagcctcc

SEQ ID NO: 158797 - DNA, 749 bp, Homo sapiens; identical to SEQ ID NO: 75357
  chr7:157606032-157606781
  hypo

SEQ ID NO: 158798 - DNA, 330 bp, Homo sapiens
  chr7:157607747-157608077
  hypo
tagtctttattctgggagcagcgcgggaggcagtggagacgtggaagcaggctccggctgctgggcctgcatgaccggtttccctgcagaagattctgcgcccttcagcctcaccgtcctcacctggcctgggtgctgctgtgggcaggcgctgggcacgctgggaagagcagggccagccgtttgcaggacgggaggctgaggctgtgtgcacctcctgagggctgggccacaggtgggctcaggcctgcgccctcccatggccgtggcctcttcctcggtcctttgccctccagggtgccaggcctaggcctccgcgcatcagtgtgg

SEQ ID NO: 158799 - DNA, 30 bp, Homo sapiens
  chr7:157608529-157608559
  hypo
tgcacactctgcacacgctcaggcggtgac

SEQ ID NO: 158800 - DNA, 124 bp, Homo sapiens
  chr7:157620460-157620584
  hypo
tggcccctgagctgccggccccgccctcgccggctgtgatgctttgactcagggacggccaccgtgtcacgggctgttcccagagtctcagtgccttcctcgggctgcacgttctgattttgtt

SEQ ID NO: 158801 - DNA, 367 bp, Homo sapiens
  chr7:157621928-157622295
  hypo
aaaacaaaaaggcaagggtcccgtcttgctgcgagtgttggggcaggtgctatctgaacacggtggcgcaaaagagatgaggcctcgccactgatcaaacactcggctggtaagtagaagtccttaaaaaagacgaacatcaaacaggtcctcatctggggcgctctttttgtggggtcaccctgaccgtgaggccacagatgcgggcccgtgtgcaccgcaggccatacgtggggttaggtaagtttgaaagtctggacaaggctgtcattaaagcgtaggtgatgctaaacggcgtgaaagcctctgctttctagaggctccagcaagactgacacggaaaagctgaggacgaggatgttggtga

SEQ ID NO: 158802 - DNA, 497 bp, Homo sapiens
  chr7:157625833-157626330
  hypo
atatgatcgtaaactcgttcaggaagtatgcgacgtggccagcgcccatccatcctgtatgatggtgaacttatccaggagcgagatgtggccggtgcccatctatcccatatgattgtaaactcgtccaggaagtgtgtgatgtggccggtgcccatccatcctgtatgacggtgaactcgtccaggagcgagatgtggctggtgcccatccatcccatatgatggtaaactcgtccaggaagtgtgtgacgtggggggcgcccatccatcctgtatgatggtgaacttgtccaggagcgagatgtggccggtgcccatccatcccatatgatggtaaactcgtccaggaagtatgcgacgtggccggcgcccatccatcctgtatgacggtgaatttgtccaggagcgagatgtggccggtgcccatctatcccatatgattgtaaactcgttcaggaagtgtgtgacgtggccggagcccatccatcctgtatg

SEQ ID NO: 158803 - DNA, 43 bp, Homo sapiens
  chr7:157626558-157626601
  hypo
tcgaatcggacaggacgtgggcagctggcgctgttggtctcca

SEQ ID NO: 158804 - DNA, 154 bp, Homo sapiens
  chr7:157630454-157630608
  hypo
acccttccttgttgccgccacacgtctgttgcacctgttagacacggagccttggactcaggggtgggtcccgtggatctcacagccctgctgcccagcataggacacacaagtgactcagtggagtccgacacttgctgagtggatggcaagg

SEQ ID NO: 158805 - DNA, 30 bp, Homo sapiens; identical to SEQ ID NO: 22112
  chr7:157633237-157633267
  hypo

SEQ ID NO: 158806 - DNA, 30 bp, Homo sapiens
  chr7:157637451-157637481
  hypo
gcaggtcagcggctccgcaggggtgagctg

SEQ ID NO: 158807 - DNA, 166 bp, Homo sapiens
  chr7:157638210-157638376
  hypo
ttcccggccacatcccggtgaaccatgcagcctaactcaccacgttcccggccacacagggccaagaacagcccaggcaatgttaaggagcattgcatggaggagccacttgcagatgcggtaacccactgtgcggcacagaacctccccgcggggcaggtgggtg

SEQ ID NO: 158808 - DNA, 541 bp, Homo sapiens
  chr7:157641412-157641953
  hypo
agtggggcccctgtccgcaggctgccacctctggcaggtcgtccacaggaacgcttgtcctgaatggtggcccgcaccctgcagtgagcccacggctatagtggtgcagccagcagccccgacgcctctgcagtcccagacccagggaagccccgtgtgcaccacggtgtgccctggaccactcacttggccgctgccaccctgggaggatcacaggggctgccttctggacatatgtcaggctctcactgccccagtgagaggactggctctggtcctgatccacaagctctgaaccaatagcgggtcttgggatgacgtctgcggagcccctcggtcccagcgtggctggcgtccaggaccccagcacctctacacccaggtccttctcagttcccaccggccgggctgacgctggtctccagggtgatggagctgattcttcgggtttccctcagctcagatcaaatttaacacagcaagaggacacccactgttcccaccgaagaggcagaaagctggagttcgcggtgcctttctc

SEQ ID NO: 158809 - DNA, 245 bp, Homo sapiens; identical to SEQ ID NO: 22113
  chr7:157642942-157643187
  hypo

SEQ ID NO: 158810 - DNA, 85 bp, Homo sapiens
  chr7:157643706-157643791
  hypo
tcgaacaaaaggcggcgagggaggtaccgtgcagagcctgctgggccttctgtcccatggccccgcacaccggactcacccagcc

SEQ ID NO: 158811 - DNA, 17 bp, Homo sapiens
  chr7:157644203-157644220
  hypo
tccagcgtccctatccg

SEQ ID NO: 158812 - DNA, 460 bp, Homo sapiens
  chr7:157645532-157645992
  hypo
ctcggcaacacagcaagtctctcaaaaaaaaaaaaaaaaaaaatactagcacagtggaccctgaagcgccagcagcaaaccctctgagatgtgcgtccggagtggccatgccaccagctttttctgcccactgttttggaaaagtgttgattttggaatgtggtttcccatcactgtgtggaccatgggtgaatggggagggtggatggtctctggggccgtcctctctccgcctccagatcagcaggcagtggatgggtatttgggtctttcttgtactcacacggatgcgatgtgtgattcctggtaggaaacaagaagcagctcactggcaacaccacactgccccttgcattccgaggagtcatgtagtcatgaggggcatgagcaagatggagacccagaggctcacgctcacatgatgacggccgagccgggcctgcaacggaaaggcctgtgg

SEQ ID NO: 158813 - DNA, 95 bp, Homo sapiens; identical to SEQ ID NO: 22115
  chr7:157646589-157646684
  hypo

SEQ ID NO: 158814 - DNA, 30 bp, Homo sapiens; identical to SEQ ID NO: 75366
  chr7:157647971-157648001
  hypo

SEQ ID NO: 158815 - DNA, 259 bp, Homo sapiens
  chr7:157653860-157654119
  hypo
gggaggcaccctgtgcgtgctccatggtgacactgccccacggggtccaaatgctgaattcctgtaccttttacatacgtgaagtctatacaataatggaaccgaagccctctgtggggaatccgtgggaggatgagaggcctggattgcaccggaagcacctccggctggagctcggccaaggagcccgggtcccttcagtctgcgctccctgcggtgggcagtggcttctgtgttttgccgtcgaggtgcaacatgc

SEQ ID NO: 158816 - DNA, 30 bp, Homo sapiens
  chr7:157654469-157654499
  hypo
tccgagccacgcagacggcttccctctgca

SEQ ID NO: 158817 - DNA, 30 bp, Homo sapiens
  chr7:157654830-157654860
  hypo
gtttgtccttcctgtcgcagggacatggcc

SEQ ID NO: 158818 - DNA, 375 bp, Homo sapiens
  chr7:157656413-157656788
  hypo
aacaagctcttatggcgaccctgacccagcaggaccggtatccttatcagaaagggatatctggacacagagacagacgtgcacgtgtggagacacctgaagatgaagatggcatctaccaggcgggggagtggcctcaggagaaacgggctctgcccacgcctcgacctcggacttccagcctccagagccgtgtgaaaagaaacttccatcatttaagctgccctgtctgtgggactttgcctcggcagcctgagcagacagtacaggctccaaaaacgctctctgcatgtgtgattctggccaggaccaccctgcccgaagccacggctatgtcgaagctaattgtgcgatttctgccggccacgtggtttt

SEQ ID NO: 158819 - DNA, 144 bp, Homo sapiens
  chr7:157657814-157657958
  hypo
cctgggtctggcccacgcaggctccttcccaagtgctgctgccgggaaatggaggtccctaggtgagacgggagccgggcactgtgggggtggcccctgaggggctgcaggttggcactgcccagctgacgcattccgcagtcc

SEQ ID NO: 158820 - DNA, 59 bp, Homo sapiens
  chr7:157658188-157658247
  hypo
accgtggggccacgacggaccctgcaaagctggtctgactgtgccgagcctgtcggggg

SEQ ID NO: 158821 - DNA, 116 bp, Homo sapiens
  chr7:157658675-157658791
  hypo
ctccttccccgctgccgcgcaacctctgacagccacgtgtactctcctgctttagaacaaggacctttcccttttgtgcatgaatacgctctcagcagatgcgagaaaatgggagt

SEQ ID NO: 158822 - DNA, 311 bp, Homo sapiens
  chr7:157659198-157659509
  hypo
tgctcatgacctactaaacagcgcatgtgcctctcagcccttgccatgacaaccatgaggtctgcaggaaacacgtccatagaggtggagctgaggctggtgtgcattctcccaggcacccagcatgagtgcccagctcagggtctgcaccgaggctgtctggcccgagtcccaggctcgccccagtgcttgccacacacaccctggggtctcctcagaagcagtgcctgtgccccgagatgcacggccaccaccccgcccctgaggccctggatacacggccactaccccgcccccgacgccctggatac

SEQ ID NO: 158823 - DNA, 79 bp, Homo sapiens
  chr7:157660119-157660198
  hypo
acacggccaccaccccgcccctgacgctctggatacagggccaccaccctgtccctgacgccctggatacacggccacc

SEQ ID NO: 158824 - DNA, 19 bp, Homo sapiens
  chr7:157660317-157660336
  hypo
ccccgcccagactgaaggg

SEQ ID NO: 158825 - DNA, 260 bp, Homo sapiens
  chr7:157660636-157660896
  hypo
ggggcaccgtgcctgcgccagcccaagctgcccagacttcctctggacagcaggcctcctgagccctggagattaactcactgccgcaggtaggatcacctgagtcctctaggaacccagcccgcatcctgggcaagaggcccacatgcaccttagaaagggcccgaaacagttcacgagtggggtgtgggctgtgggtccagacacagttatcctaaggccaggcacaggaagggttcctttcccgatggctccgacag

SEQ ID NO: 158826 - DNA, 165 bp, Homo sapiens
  chr7:157666018-157666183
  hypo
gctctggatgggatacgcttcccagtttgctcgcttccctggagaaacccccggagggccgcgccccgaggctttgctccgacgtgtgccaaggacatgtgctgggagcgtctgcaaggtccgtctcgccgtgggggccgggaggagaacgtaccgtcctcaagg

SEQ ID NO: 158827 - DNA, 108 bp, Homo sapiens
  chr7:157666382-157666490
  hypo
gggccgggaggagaacgtactgtcctcaagcagaatttcctgcgctggtctctgggatgggcagagggccctgctttcaggtactgaggagagcgcagcactcggcat

SEQ ID NO: 158828 - DNA, 30 bp, Homo sapiens
  chr7:157694608-157694638
  hypo
cggggccttcccgtccgtgtttcctgggtc

SEQ ID NO: 158829 - DNA, 30 bp, Homo sapiens
  chr7:157694916-157694946
  hypo
aaagggcgtcagctgcggccaatagtgact

SEQ ID NO: 158830 - DNA, 283 bp, Homo sapiens; identical to SEQ ID NO: 75371
  chr7:157703228-157703511
  hypo

SEQ ID NO: 158831 - DNA, 30 bp, Homo sapiens
  chr7:157710471-157710501
  hypo
cggccccaggtcctgcgtggcgacgaggaa

SEQ ID NO: 158832 - DNA, 369 bp, Homo sapiens
  chr7:157711202-157711571
  hypo
acaggtgccttcactcgcatcaaactactcattatctacaagcaacatatcgaaaacaacgccgtccagaaagattacaaactgacgcggccgggaaaatctatcagacatacgaatggaaggagagaaggcgtcatggcgtcgacaccaagaaaatgtgcaatttgtttaaaagttattgattaaagtggaataaatagactaatgttagattagattataaaattccagacaacgatatagggttaatgaactggtgtgtgccaagaaataaacatcgaaattaataaggaagaagtgatcacagtacaaagagatgccactcgcagcctgagggacggaagggcctgacggcggccatcctccacc

SEQ ID NO: 158833 - DNA, 31 bp, Homo sapiens; identical to SEQ ID NO: 75373
  chr7:157716856-157716887
  hypo

SEQ ID NO: 158834 - DNA, 31 bp, Homo sapiens; identical to SEQ ID NO: 75374
  chr7:157722646-157722677
  hypo

SEQ ID NO: 158835 - DNA, 281 bp, Homo sapiens; identical to SEQ ID NO: 22118
  chr7:157730032-157730313
  hypo

SEQ ID NO: 158836 - DNA, 170 bp, Homo sapiens; identical to SEQ ID NO: 116092
  chr7:157731889-157732059
  hypo

SEQ ID NO: 158837 - DNA, 325 bp, Homo sapiens
  chr7:157734697-157735022
  hypo
tccttagcacaccttcgcacacgggggtcctcggcccaccctccacacatgggggtctgcagtgcaccttcactcatgggagtccttggcctaccctccacacacgagggtcctcagcatgccttccacacgcacaggggtcctcggcccaccctccacacacaggggtcctcggcccaccctccacacacaggggtcctcggcccaccctccacacacgggagtcctcggcacgcctttccagaggaggtgatcttgaggcaccacaaaagcagcacctggcccctggccgctcccagctcagagcccacggtggggtcctcag

SEQ ID NO: 158838 - DNA, 269 bp, Homo sapiens; identical to SEQ ID NO: 22120
  chr7:157736785-157737054
  hypo

SEQ ID NO: 158839 - DNA, 315 bp, Homo sapiens; identical to SEQ ID NO: 22121
  chr7:157738092-157738407
  hypo

SEQ ID NO: 158840 - DNA, 187 bp, Homo sapiens; identical to SEQ ID NO: 22122
  chr7:157744266-157744453
  hypo

SEQ ID NO: 158841 - DNA, 30 bp, Homo sapiens
  chr7:157763237-157763267
  hypo
ggccagatgcagctgcgcagatggcagggg

SEQ ID NO: 158842 - DNA, 30 bp, Homo sapiens
  chr7:157766531-157766561
  hypo
gcgctgtctttcttccgttagggtggactg

SEQ ID NO: 158843 - DNA, 363 bp, Homo sapiens
  chr7:157776640-157777003
  hypo
ctggaatccctgaggaggagccggctcacccagcgccgcgagcatctcttcctgactcgcagggggcccgtgagatggagaatctgcctgacagggtgcacttgcacagccaagcaccaagaaggaaaatggcatttcattagccatggagacagccgggaacccagcagccttctttattctggctcatattttctcatcattctcagggagttgtccaggtaacaatgaccttgtgtaaaccagcgtccctgcctgagtcctcttcacctgaaaccaccgccccacgccaggctccacctccccacgccaggctccaccccccacgccaggctccaccccatcccacgccaggctccaccc

SEQ ID NO: 158844 - DNA, 131 bp, Homo sapiens
  chr7:157778515-157778646
  hypo
ctggctgacgagacccggcctcgctcagaaagctcctccaagatgccaccgcgtgtgaaatgcttggggttgaatctcgagagcagggagaccagccagacagcccacctggctgacgagacccggcctcg

SEQ ID NO: 158845 - DNA, 101 bp, Homo sapiens
  chr7:157793806-157793907
  hypo
ggggctggggtttggccgcaggtggggtgcaaggtggggctggggtttggccgcaggtctggtgcaacgtggggctggggtcgggccgcaggcggggtgaa

SEQ ID NO: 158846 - DNA, 841 bp, Homo sapiens; identical to SEQ ID NO: 75382
  chr7:157794263-157795104
  hypo

SEQ ID NO: 158847 - DNA, 234 bp, Homo sapiens; identical to SEQ ID NO: 22124
  chr7:157795357-157795591
  hypo

SEQ ID NO: 158848 - DNA, 30 bp, Homo sapiens
  chr7:157839063-157839093
  hypo
aacctgcgatcctggcgtcctgacactgcc

SEQ ID NO: 158849 - DNA, 31 bp, Homo sapiens; identical to SEQ ID NO: 22125
  chr7:157845212-157845243
  hypo

SEQ ID NO: 158850 - DNA, 183 bp, Homo sapiens; identical to SEQ ID NO: 22126
  chr7:157847114-157847297
  hypo

SEQ ID NO: 158851 - DNA, 31 bp, Homo sapiens
  chr7:157847640-157847671
  hypo
cgtgctctgcccagccgtccccttcactgtg

SEQ ID NO: 158852 - DNA, 111 bp, Homo sapiens; identical to SEQ ID NO: 22127
  chr7:157849575-157849686
  hypo

SEQ ID NO: 158853 - DNA, 436 bp, Homo sapiens
  chr7:157853827-157854263
  hypo
ggaagagcaggccgccgtcgggcggtgactgattacaatcatttgttgtgatgcatcgcaaattaaagggacaagcccagccaagctgctccgctcagagagtgcgcgtcccgcctctgcaattactgatgtgcacaaaggacccagggaccacttaaaacaaggggaggactgagtccacgcagggatgaagccacaggcacagtccccacgtgcttgacagtggccccgcaacccacctgctccagacacctgttccgagggaatctctcccatccacctgccgctgtggctcagaccccaggcacaacacaagcgctcggcagagaaatggaccgtgccgccaatgcactcggcgctgaaccatcattgaggagagaccagctgctgctgtggcccctggggctgcagcataaacagtcgtggtggcaaagtg

SEQ ID NO: 158854 - DNA, 361 bp, Homo sapiens
  chr7:157860322-157860683
  hypo
ggtcgggcagtccaccgtgaccacgcagctctgcctgtggcgaaagctgccagagacaaggcgtgaaggagtgagcgagtgacagagtgagtgagtgagcactgttcccaccaggcttccttcccagagcagcacaccgggtcaggccgggccgcgggcagcacaccgggtcgggtcaggctgggccgtgggcagcacactgggtcacgctgggccatgggcagcacactgggtcacgccgggccatgggcagcacaccagggcaggccgggtcatggtgtgcttagaatttggtgaggcggcagggtcggggcagacagggtggggtctgaggacagccgctgaggctcttcctgtgggg

SEQ ID NO: 158855 - DNA, 194 bp, Homo sapiens
  chr7:157861006-157861200
  hypo
tggcagccgagggtacggtgcagtgcacaggaggcccaggccacagctcccacgccaggaccattagggacccagtgcagtggctggactgcagctggggcaggagctgctgaggaggtgggtgcccagcaccacctttgcactcggcaccacctttgcactcagcagaacggaggccgcgtcctcagggaagc

SEQ ID NO: 158856 - DNA, 31 bp, Homo sapiens; identical to SEQ ID NO: 75388
  chr7:157868202-157868233
  hypo

SEQ ID NO: 158857 - DNA, 258 bp, Homo sapiens
  chr7:157877354-157877612
  hypo
gcccatccacacccacgacgcccatccacacccaccacgcccatccacacccacgacactcatccacacccacgatgcccatccacacagatgcccatacactccgacactcatccacacccacgatgcccatccacacggatgcccatacactcctacaatgcccatccacacccacgatgcccatccacatccttgatgcccatccacacccatgatgcccatccacatcctcgatgcccatccacacccaccacg

SEQ ID NO: 158858 - DNA, 30 bp, Homo sapiens; identical to SEQ ID NO: 22129
  chr7:157885890-157885920
  hypo

SEQ ID NO: 158859 - DNA, 809 bp, Homo sapiens
  chr7:157890829-157891638
  hypo
atgagcacacacgcacgcaggcaccagaactcaagacccagcgtggggcagcctctgcctggccaggactggggacctcggagaagcgctggacgcagcaagaatcaggcttcagctccgcaatgtgggcaggggacccgcaaaggatcctgcgggtgaggccaccgggggggctccctggggaggaggtggagaggtccagattcccgaaggctccgagggacgggcggcgggactcaggtttgactctgtaggaaagagggggccgccagtgtcctaaggcgggagatgcccgagggtgacgcttacccaggactgagcctggcaaagcccagccctgctcccggaatgcggagaagccgtccgtgctcagaatccgtcttccgacagcgaaggcggtggccaggagggccaggggcagggagcaggcacgggcgaggcccagctgctctgtgaaaccagaggctccccgaggcacacgcctccctcgcccgccccggcctggcatctgccagtcccaccattttgctgagactctgtgaaggtgaatggggttgcttgggctcggggactggaagaagaaggacgtttatctcgtgaacgcgggacgctccttatgggagaggagtgggagacatgaagcaaagcgtgaccaccgaggagctggggagaaagcgagaaagcaaggaagcagtgggggacggggaacggggccgcggggagggccggagaagatggtagaaggtgacagtgcggggtgcagcgttcctgggtccttgaggggagccgggcttctcagccttgaagac

SEQ ID NO: 158860 - DNA, 30 bp, Homo sapiens
  chr7:157903110-157903140
  hypo
gtctccgaagggcagcgcattttcctgaca

SEQ ID NO: 158861 - DNA, 51 bp, Homo sapiens
  chr7:157903544-157903595
  hypo
ggcacctgcaggaggcgggcgacgtcctccaccagccgccttccttcctcg

SEQ ID NO: 158862 - DNA, 105 bp, Homo sapiens
  chr7:157903814-157903919
  hypo
tcgcaagtggcccaccgtgtggagactggctcctctcagccttcagtgaaaatacaataaaggggagaagggagaagggacaggcaggtgcggcggatgctggga

SEQ ID NO: 158863 - DNA, 211 bp, Homo sapiens
  chr7:157916054-157916265
  hypo
atcctacagacaccacggtgaccgacgccatggtgaccgacgccgcagtgaccgacaccatgtctgtctccaccctggatcccctgcacgcccactctcttcctgcaggagtctaatgtcagggtctgggagaaggaggttttgatgctttgtgcacccaaactgaaccttcctcctgcggaccgccatgcagccccggagctcgtgtgcc

SEQ ID NO: 158864 - DNA, 246 bp, Homo sapiens; identical to SEQ ID NO: 22133
  chr7:157916513-157916759
  hypo

SEQ ID NO: 158865 - DNA, 283 bp, Homo sapiens; identical to SEQ ID NO: 22134
  chr7:157919943-157920226
  hypo

SEQ ID NO: 158866 - DNA, 257 bp, Homo sapiens
  chr7:157929558-157929815
  hypo
attctgtaaacttcgcgagagcggaggggactgaggagctaaatggtagacgtgaaggcagccacaatgacctcacccagctctgggggtctcacgtgatcgacaaagttaactcacggcaaaaaaaaaccccatcgtaccgagcagttcacgtcatgaaaaagcaaagtgaagccttcgccaaaaccacctcacaattaagatggcttcagaatccactgacttaggttatttcactgtggtcagcgtttctctct

SEQ ID NO: 158867 - DNA, 143 bp, Homo sapiens
  chr7:157931997-157932140
  hypo
aagtgaagagcacggcgtctgaaatttaaaatttatgtccattacgggtggacataacggaagaaacggtttgtgaatctgaagacagatcatagaagcgatcatcgttggaagaacagaatgggagacgttctgcagaacct

SEQ ID NO: 158868 - DNA, 30 bp, Homo sapiens
  chr7:157932368-157932398
  hypo
gcagcgggggcggggcggggggaagacacg

SEQ ID NO: 158869 - DNA, 115 bp, Homo sapiens
  chr7:157934028-157934143
  hypo
ccccgttcactcagccgcacgtcccgtcctctctccacagcgcaggctgtgtctagtccatgccgaggcagcggggccggcacccggtccccacgtgccccgttcactgcatacg

SEQ ID NO: 158870 - DNA, 238 bp, Homo sapiens; identical to SEQ ID NO: 22135
  chr7:157934534-157934772
  hypo

SEQ ID NO: 158871 - DNA, 30 bp, Homo sapiens
  chr7:157934978-157935008
  hypo
cccctggccccggagcggctggaactattc

SEQ ID NO: 158872 - DNA, 118 bp, Homo sapiens
  chr7:157935698-157935816
  hypo
tcgcaaccgagccaccgagccacgagcccagagcaaccttttcattctcattcactgcagtctcctcccaccacagatctttttctttcccagcgattatcatcgcgacagtcttatc

SEQ ID NO: 158873 - DNA, 283 bp, Homo sapiens
  chr7:157936030-157936313
  hypo
gcctgcggcaggaaccggcacagctgcagggagacctgaagggccctcggcattgggcatggctgtccccagcagtcggcgtcctccgtgcttaggaggcgagggatgtctccacacatgcctgcactagccaagatgtgtgtcagagtcggcccggccatagctcacggtggacaccagtccccgtgatggaatttcatcggagggaaagaaacagggaggtgaggaatgagtggtggttgctaaggaaaggtccttcctgtggacacgaaccaatgaacac

SEQ ID NO: 158874 - DNA, 30 bp, Homo sapiens
  chr7:157936667-157936697
  hypo
caccacctgcccagacgaccccactgcagc

SEQ ID NO: 158875 - DNA, 326 bp, Homo sapiens
  chr7:157949092-157949418
  hypo
ggtaacgcagctcaccgtggactgggtggcaggtaagaccagaagagaaaatgttttacagatgtcagagggttgggacttcggagctgcccacattcgctaaatgagctaagccgacatctgcagaaacgccctcgtaatgggaacagttacctcgaaaagttctagaaatgccggtggagagggcaggtgaacacacagctgcagtcagacgctcggcatgatcagacccaaagcaaaccaactgctgcatagaacgccctggggcttcgagcccccagttccagcctgtgacgcactcacccgtgggaaggggaaaggctccc

SEQ ID NO: 158876 - DNA, 71 bp, Homo sapiens
  chr7:157957665-157957736
  hypo
aagaccccctgatagcgtccaggacctacgagagtgcaggaggcagtgaagacccccgatggtgtctagta

SEQ ID NO: 158877 - DNA, 253 bp, Homo sapiens
  chr7:157958022-157958275
  hypo
agtggccactccaggcgggcagctcccgtagcaaacagcaccatcaatgctccagcagcactcactcaagtgcagcatcggcctcctccgccgtccttctcctccaagagaggaacaaggagaaagcatcggtaatggtcacacgtccttccctctaattgcaatttcacattccttctatttaaaaactgccataacggctgcatgaacaaagaaagagcgagggcaggagagctcccggctgcagacagca

SEQ ID NO: 158878 - DNA, 174 bp, Homo sapiens
  chr7:157958494-157958668
  hypo
gcaggaacccgcaaacgcctttctcccctgggcccgccctgacgtggcttaactcaggtagcgacaccggaagccacggtcttggcagagcagtcacctcgaggccgacactgttcagctagtgcatggtgagcagcatgaaatccagacagggggcttcggaggatgtggcaa

SEQ ID NO: 158879 - DNA, 30 bp, Homo sapiens
  chr7:157959043-157959073
  hypo
cctcctcccactggccgccgcgttccctgt

SEQ ID NO: 158880 - DNA, 135 bp, Homo sapiens
  chr7:157959396-157959531
  hypo
actgcgttcccaggacgtgaaatgaccacatactccttcccagcacagagagggtatgagggccgaagggacccttccctacatggtgccccattcctgccacgcgtcctcgggggagtgcggtgtgcagacccc

SEQ ID NO: 158881 - DNA, 147 bp, Homo sapiens; identical to SEQ ID NO: 22137
  chr7:157959847-157959994
  hypo

SEQ ID NO: 158882 - DNA, 130 bp, Homo sapiens
  chr7:157967880-157968010
  hypo
tgtctcactgcccgccggcagcactgacaggcaccttgatcacggcgtgcttgctgccagcctgacaaagcacacagcctcagtgctattcacaggcttcctaatgagccggcaccggatgcggccaggt

SEQ ID NO: 158883 - DNA, 56 bp, Homo sapiens; identical to SEQ ID NO: 75398
  chr7:157980854-157980910
  hypo

SEQ ID NO: 158884 - DNA, 152 bp, Homo sapiens
  chr7:157981291-157981443
  hypo
ggaagcccgccacgctcgccccctgatggggaaggccgccacgctcgccccctgatggggaaggccgccacgctcgccccctgtactggaaaggccgccacgcccgccccctgtagggggaaggccgccacgctcgccgccttgtatgggga

SEQ ID NO: 158885 - DNA, 158 bp, Homo sapiens; identical to SEQ ID NO: 22139
  chr7:157987112-157987270
  hypo

SEQ ID NO: 158886 - DNA, 477 bp, Homo sapiens
  chr7:158037653-158038130
  hypo
gcgaggccagcagttcgaagcccctgctccctggctgtgtcatgtggacaagtgacgtcgtcttgaggatggcctcgtgaggcggcggtgggcatgaaatgagatgaggcgtccagccctgcatctgcagcgtggtcagcacagaggctgacatccatggtcatgccggaatccgtggtcatgccagaatccgtggccatgccggaatccatggccatgccggaatccgtggtcatgctggaatccacggtcatgccggaacccatggccatgccggaatccgtggtcatgctggaatccacggtcatgccggaacccatggccatgccagaatccgtggtcatgccagaatccgtggtcatgccggaatccactgatggtgcacgtgacccacgatgggaaaagtcacaagacagcttcagagctggtcaaacgggactgagaggggctgcaccaggaatgcgcggcctgttgagt

SEQ ID NO: 158887 - DNA, 30 bp, Homo sapiens
  chr7:158039485-158039515
  hypo
ggccatgccggaatccgtggtcatgccgga

SEQ ID NO: 158888 - DNA, 623 bp, Homo sapiens
  chr7:158039727-158040350
  hypo
atgtgtgaggacgcacgatggggttaggcagcctgagaaaccatccctggcacgggctgcctcaaggaatgaggaggtgtgggcttcccggctgcccatccccatatctgcacatagcccctgcatctcactacacagagcgtggcccgtgggtggcaccccccagcatggccaggagcaccgaggcgcacgctgggctctgagacgccccctggccaagaggggtggaggaagggggcaggcgccaggatctggaaggagatttccaacccacgtggggtctcacaggagaaggccgtgatgggaggtggggaagtggggaggagggcgctcttgaccgtgtctgcgtgtctaagcaaaggatacaggggcgcaaagggaaggagtggccaggggtgcccgtcccaggtgtgctcttcttcacggcgcccctgcttccccaccacgcccatgtccacggctcgtgggcagctgggcactgggccactcagacaccgtcctaaacactccacacaggtaacttgctccctctccagccacacagcaaacacagcaaaggggacttgggtgtctgcggtttttttgtttgtttgtttttaagatggagtttcattcttgtggcc

SEQ ID NO: 158889 - DNA, 291 bp, Homo sapiens
  chr7:158044817-158045108
  hypo
tggcaactctgctctggttgccgcacagcctcaagcctcagctgcttggagtgggtgggaacgcgagagcacttgagcaccagtggcctgacaactctgcctcgtccccatcacctctgcggcgagaatcagagcagtcgcagaagctcctgccacaccactcccataatctctcagtgccaattacttggaggaaaaatggaatcatccccgtgcccagggtggtgagtggtgtcaccgttcggatggctcagatgaaggcggccaactgggcagcgggaatggagcctt

SEQ ID NO: 158890 - DNA, 30 bp, Homo sapiens
  chr7:158045443-158045473
  hypo
atcccgacaatcagccgcatcacatgcaaa

SEQ ID NO: 158891 - DNA, 228 bp, Homo sapiens
  chr7:158059762-158059990
  hypo
agacagccccacacccgcggcaggtcccgcctggcactcgggaagctcttgcatttaagagatctagaaatgttgacactttgcgtggaattttaaaagctgcttaatcaggaaggagccagtcaggaaaagggacctgccaacctgcttgttagccgagcagcgaggcactgtgagcacacgggatgatgggtgctgggtgctggagttgaccggctggcccggcag

SEQ ID NO: 158892 - DNA, 128 bp, Homo sapiens
  chr7:158060879-158061007
  hypo
caaaagcatcagagccgcggccgcacgcacacagagcggggtgtgagatatcccagccgcacacacacagagcggggtgtgaaatatcccagcccagacgcgtgcacacggggcgggtgtgaaatatc

SEQ ID NO: 158893 - DNA, 500 bp, Homo sapiens
  chr7:158061259-158061759
  hypo
cgcacgcacacagggcgggtgtgaaatatcccagccgcaggcacacagggcgggtgtgaaatatcccagccgcacacacacagggcgggtgtgaaatatcccagccgtgtgcacacagagagggtgtgaaatatcccagcccagccgcacacagagagggtgtgaaatatcccagcccagccgcacacagggcgggtgtgaaatatcccagccgcacacacacagggcgggtgtgaaatatcccagccgcacgcacacagggtgggtgtgaaatatcccagccgcacacacacagggcgggtgtgaaatatcccagccgcacgcacacagagtggggtgtgaaatatcccagccgcgtgcacacagggcgggtgtgaaatatcgcagccacattgttgttgaaagccgttgccgggcctgaaaatcgcagctttttgaacgcacacactgaacctccccggctttgttttctaggaaggacgtggcggctgctgcccaac

SEQ ID NO: 158894 - DNA, 30 bp, Homo sapiens
  chr7:158065875-158065905
  hypo
tcctaggacagggcacgtggagctccaggc

SEQ ID NO: 158895 - DNA, 1137 bp, Homo sapiens
  chr7:158066165-158067302
  hypo
aggcacagggggagccgcaggcacagggggagccgcagacagacatgggaggagccgcagacacggggagccgcagacacagggggagccgcaggcacagggggagccgcagacagacatgggaggagccgcagacacggggagccgcaggcatgggggagccgcagacagacatgggaggagccgcagacacgggaggagccgcagacacagggagccgcagacacagggggagctgcagacacaggaggagacacacaaggagccgcagacacagggggagccacagacagacatgggaggagccgcagacacggggagccgcagacacagggggagccgcaggcatgggggagccgcagacacagggggagccgcagacacaggaggagacacacgaggagccgcagacgcaggaggagccgcagacagacgcgggaggagccgcagacacagggggagccgcagacacagggggagctgcagacagacatgggaggagccgcagacacagggagccgcagacacagggagccgcagacacagggggagccgcagacacaggaggagacacacgaggagccgcaggcacagggggagccgcagacacagggggagctgcagacagacatgggaggagccgcagacacggggagccgcagacacagggagccgcagacacagggggagccgcagacacaggaggagacacacgaggagccgcagacacagggggagccgcagacagacatgggaggagccacagacacgggagccgcagacacggggagccgcagacacagggggagacgcagacacaggaggagacacacaaggagccgcagccacagggggagccgcagacgcgggagagccacagacacagggggagccgcagacacagggggagccgcaggcacagggggagccacaggcacagggggagccgcagacagacatgggaggagccgcagacacggggagccgcagacacaggaggagacacacgaggagccgcaggcacagggggagccacaggcacgggggagccgcaggcacagggggagccacagacaccctcacactccgggatctagcgtgtgtggacgagcccgaggcgctcggcccagcttgtca

SEQ ID NO: 158896 - DNA, 306 bp, Homo sapiens; identical to SEQ ID NO: 22142
  chr7:158072899-158073205
  hypo

SEQ ID NO: 158897 - DNA, 655 bp, Homo sapiens
  chr7:158075395-158076050
  hypo
cggctgatccctcctcgtgctcccacatgcagcagccagacacagacggctcatccctcctcgtgctcccacacacagcagccggacagacagctgatccctcctcgtgctcccacacacacagcagccggacacagatggcttgtccctccctgtgctcccacacacagcagcgggacacagagggctcatccctcctcatgctcccacacagcagcgggatatagacggtggtccctcctcgtgctcccacgcagcagcaggacatagacggctcgtccctcctcatgctcccacacgcacagcagccggacacagatggctgatccctcctcgtgctcccacatgcaggggcctcagctctcaggaggaaaacactcttgagagaagagaactgaggaaaggtagcgctgatgtcaggggaagacgcattcgacaacacgcatgaaaaaaaacacttcttgttacgttcatgccatgcttttgtattcgccacaataagaaaaccaagcaagtacttcagtcaggcggcagccgtcacaggtaaacaaactcctatgtgggaaatgaaccgaggctgtgagcctcaggcagctccccagacccccaagaggagagggagcagtgaccgagcaggccccgtctgcagttcaca

SEQ ID NO: 158898 - DNA, 176 bp, Homo sapiens
  chr7:158087288-158087464
  hypo
tgacacaggaggatgcgagaggcagggctgagccaggccaggcaggagcaagcggggagggaggagtgttcccgggggagagtgagaggcaggaaagacatccagccacaaggagacctgggagcacgggtcgcccagaattcagtgtgcttctatttccacgctcatggttcacc

SEQ ID NO: 158899 - DNA, 154 bp, Homo sapiens
  chr7:158087692-158087846
  hypo
gcaccaccttccacgcgcatggttcacccacctttctgagggtccaagcccatggcgcccgctgaccctgcctgtctgcccagacattgcaccacatcatggttcacccgcctttccgagggtcagagcccatggcacccgctgaccctgcctg

SEQ ID NO: 158900 - DNA, 30 bp, Homo sapiens
  chr7:158088456-158088486
  hypo
cactctccatccgcacggttcacccgcctt

SEQ ID NO: 158901 - DNA, 30 bp, Homo sapiens
  chr7:158093063-158093093
  hypo
atggacctaggtagtcgccaggggcctgtg

SEQ ID NO: 158902 - DNA, 197 bp, Homo sapiens; identical to SEQ ID NO: 75406
  chr7:158103400-158103597
  hypo

SEQ ID NO: 158903 - DNA, 105 bp, Homo sapiens
  chr7:158107193-158107298
  hypo
cctggcactggcctgcgcacagcaccccatcgccaaacgacagtggcacatatggagcaggagctgggcccaagccgccctggaggctcccgtggggaaagggct

SEQ ID NO: 158904 - DNA, 97 bp, Homo sapiens; identical to SEQ ID NO: 75407
  chr7:158109477-158109574
  hypo

SEQ ID NO: 158905 - DNA, 320 bp, Homo sapiens; identical to SEQ ID NO: 22145
  chr7:158113045-158113365
  hypo

SEQ ID NO: 158906 - DNA, 356 bp, Homo sapiens
  chr7:158136090-158136446
  hypo
aaaccgaaaataacgcgtgtgggtgagaacatggagaaaatagggccctgtgctccgcgggcaggaacgtaacctgatgcagtcgccgtggaaagcacacgggaaaagttcaatgtggaagtagcagatgatccgacagccccatttgattttacacccaatacctgcaagcagggctcgcgcagaggctcaggcagccatgctggtggcacatgggctgtcgcgactgctcccggtggaatcagccccatttctgattttacacccaacacctgcaagcagagctcgcgcagaggctcaggcagccatgctcgtggcacgtgggctgtcgcggctgctcccggtggaatcagccc

SEQ ID NO: 158907 - DNA, 30 bp, Homo sapiens
  chr7:158180988-158181018
  hypo
ttctgggctcggtcccgcaagaccaccccc

SEQ ID NO: 158908 - DNA, 152 bp, Homo sapiens
  chr7:158185086-158185238
  hypo
atgcgtcagctcacacgaggagagggcggcggggatctgctgcacacccagcgttgtctggggaaccatcctggcatggagcagggcctcacaggacagctgcttctcttggccagcaagagctccacgtgggggcacggccccagcagcca

SEQ ID NO: 158909 - DNA, 30 bp, Homo sapiens
  chr7:158185447-158185477
  hypo
accccacaggcttcccggtatcccctgcgg

SEQ ID NO: 158910 - DNA, 141 bp, Homo sapiens
  chr7:158188490-158188631
  hypo
cgcgaggggcgaggggcgagggctcccggcctgcgccgccttggatcccaccagccccgaattcgggcagagcgccatggagggcccagcctggagggggagctcggagcctgcagcaggtgaggtcgggctacagacttc

SEQ ID NO: 158911 - DNA, 141 bp, Homo sapiens
  chr7:158198530-158198671
  hypo
cacacactgagatcccgcagtggctcatccgtgagacacgtgtccgcacactgagatcccgcagtggctcatccgtgagacacgtggccgcacactgagatcccgcagtggctcatccgtgagacacgtgtccgcacactg

SEQ ID NO: 158912 - DNA, 144 bp, Homo sapiens
  chr7:158198932-158199076
  hypo
tcccggtggctcatccgtgagacatttggctgcacactgagatcccggtggctcatccgtgagacatttggctgcacactgagatcccggtggctcatccgtgagacatttggctgcacactgagatcccgcagtggctcatcc

SEQ ID NO: 158913 - DNA, 332 bp, Homo sapiens; identical to SEQ ID NO: 22146
  chr7:158216891-158217223
  hypo

SEQ ID NO: 158914 - DNA, 168 bp, Homo sapiens
  chr7:158235875-158236043
  hypo
gggcagaggcaggagcggaggctgcggaggacgctccaagcccatcttccgtggctcagcccagcggctcccgcggctccagggcagcgccaggcatggcttctccccgaaggcacagaaggctccgaagttgccacctcttgcctgagttgccggaaatccaagggt

SEQ ID NO: 158915 - DNA, 483 bp, Homo sapiens
  chr7:158240242-158240725
  hypo
ccgataaggccgacccgcccagcttgctcccgctgccagagcctcttccccacctctccaggaaacaaagccacctgcacgggtacccggcctgccttgcgtcctgccaggcccctggaaagcaaacatccctccaaggcctgggccagtggtgggctgcgtcaagctgttagccaagcgggcagtgaagacgaaggctgccccgtagccagggagctgacctctctgcgcaggtgccggggtacgagcaccagcagagccgagagcgggggcagtgctgaagcccctgctgccatccacaaaggggcctcagagggttggaaatgacaagccacggtcttgccccaccccggctcctggccatgctacccagccacacggcacagggcaaatgccagcaggacacaggccctcagcccggcatcatcgtcagcccgaggatgctgggccaggccaggtgccgactcagcagggcagcaagag

SEQ ID NO: 158916 - DNA, 570 bp, Homo sapiens
  chr7:158267275-158267845
  hypo
tccaccagagtcaaccgcccagcagaatgtgggcacccctcctccgagagggaccctcttcccaaggtcagctaagaggcgggtgcccgtctgagagggacccttttcccaaggtcagctaagaggcgggtgcccatctgagagggaccctcttcccaaggtcggctaagaggcgggtgaccgtctgaccactgagggagtcgggagtggggctgcccatggctttggggaagcactcgctgttcagcgggagagaagtcaaagagagaggccgggtgatgccacggggtgccctgtgggactgtgcacactgcgttctgcagacatgggcatcctggacagctgaaaacagggcaatgatgcaaactggcatttgcgcctcctggtgccccacggagacaggccctgaggagcctggtggtcctcgttcagctccagggcagatgctggcgagggaggaaggtgatcataagaaccccggctgcagcacagtctccaaccttctcatgcagaagagctgggggtgcttgggaggcaccagtttccctgacgccacggtggcaggcggga

SEQ ID NO: 158917 - DNA, 30 bp, Homo sapiens
  chr7:158268158-158268188
  hypo
gcttaacaagccagccgtgcaccagggaca

SEQ ID NO: 158918 - DNA, 499 bp, Homo sapiens; identical to SEQ ID NO: 75415
  chr7:158270796-158271295
  hypo

SEQ ID NO: 158919 - DNA, 643 bp, Homo sapiens
  chr7:158277359-158278002
  hypo
cattttgtataaatgaaatcatgtcccccgtgacttttgtgactcggtttcttcctctgagcacggcgattcccaggttcctccgcgtcagtgtgccggtgcttcctgcctccctttccacggccggacagcactccaccatcacagacgtcctcggttcctggtggttttctgccctcttcagtggagaaagggcttggaatagaagaagctgcagttggagacgtgaaggctgtggctgtgacgccgccacggggagtcggctgcaggaggagcctccccaccatcagcgtggccggcggagtgagccacgagcgcaagggcacccctcccagccgctgttgctgtggccccggccgccagcgtcccgggagggcacctgcggagggaaggcagacaccctgcaacggcccgcaggcccgtgtcacctgggccaccgagcgcagggcttgtgggtcgtcacagcataattcagccttgagccacgagacacggagccgacaggtgtgtagctgagccatcctcccccacctgtcagtcaccattcttccacctccctccaaacggagagcgcgacttgctcctcttgccctcctggacgtccgggatttccgcccctgggctccagcgctatggtgtggtc

SEQ ID NO: 158920 - DNA, 757 bp, Homo sapiens
  chr7:158281107-158281864
  hypo
tcttggcgcctccaccgtggcttcccttcccgaccccagaagctgcctaggcacagacacagaggtgcccccagccccaaaattccatccggaacccagggctggtcccacctcagggcgcacgagctcctcggtttcgcttctcagaccctcagaggcattcacctcggctccccctggatgcaccagtgcaggggaggcctgtcctgaaaggccccaggagggcggcaccccaggccagcgccctgccctgcacctcagtcccccgccggcacccacgtctgtgcagagattagtgggtgcgaggggcctctgggcaggccccgccatcctcgctaggattaaatccgctcctgcccacagtctgaggacagatgcgcagggagctggggaaagagaaggcctcgctcagtgcgccccgggcccacacgcagcccctgacttggagaaaggcggctccgcccagcgcttttctgaggatactggagtttaaccctcccctgcgcgttcagagcgcacagcgcccagttcaccagcatgacaggcccgggtggcgtctgccctgggagatgccctctgcctgaccgcgctggagggaaggggctctgcaggacccgctgctcgccgtatttcataataactgccgtcctcatgggctttcagcccaacctgaaaacacagcgtttgcactgttttcttatccgcctgataagagaggaaaatcagtggcttaaaggacgaaaaacctggccgggcg

SEQ ID NO: 158921 - DNA, 1297 bp, Homo sapiens
  chr7:158282163-158283460
  hypo
aaaacttgccgaaggacagagcaaaacaaaatcagaaagcaagggttggtgcgagcgatgggcgcccagaacccgggcaacctcttctccccacccaccgaggccgcagcccatggctccggggttccatccgcctcctctcggcagcgcgccccgggcggccccagctccaggccagcggcggggctcaccaggctgggcgctgcgcacggcgggcaggagaggggcagaccagggcgcagcagccaggaccccacactcaccgttcacacaggcctcggacgctccgcagaggccctcctcgagcaggcagcctgcggggaaacagagaagagacgcggtcagctggaggggaggaggggggtgcccccgaggctgccttcctggccccctggtgaatttcagagaaaccgccggtcaagcaggctcctccgacccggcttttccgagatggggccgattattctgaagccagaacgctgcgcccctgacccggccacgtgcgaggcctcctggcctagtcccggagcccagctctcacctggaccaggcccacagctctgggctgagggtcaagccggcgtcatcacaggagactctctggccgcgggagcagcagcggggccggggcctccccttgaggcctcccctgggcccggcgcctcccctggaccgggtgctcaccgcacgcaccgcgtccctggaagcaaggctgccgggcgccggggagcggaggcttccagggaggtaacgagctccgcggggagcccggctgcgtgggaagcaaaccgtggcgtccgtggccacagacaagagacgcaggagagggtcgggagaggaaaggaggcagcggaggcagcagagacgaagacgggcaggaaaggccagcgcggctgggccaggccctggaggagacgcggggcagaggcagcgcctcagtccccacccaggaaggggctccagaagctccgcggtgcctgggtggccaggcgaccccaagccacgcatcccccgcggccgagcaggctggcaaaggttggcgttcggctccacgtccacgcctgtcttaaacacagagagatgggtccagaaagcaccaccccgctagggagcggctcccgcgagggcgtgagcaccctggacaccagaaccgggagggccccagggccactaggcgggagtcgcaccgccagcaaaggccaggtgtggtgtgaacgcgcagtgtctttcactcattcctgcaaagcacagtgccttcaatgctgcttcaccagccgacaaacgcctgttcatccgc

SEQ ID NO: 158922 - DNA, 30 bp, Homo sapiens
  chr7:158301293-158301323
  hypo
cggggcaacgtgggacgctcggagcaggtg

SEQ ID NO: 158923 - DNA, 49 bp, Homo sapiens
  chr7:158301563-158301612
  hypo
cgctcctgtgggtgtcggggcaacgtgggacgctcggagcaggtgcgga

SEQ ID NO: 158924 - DNA, 118 bp, Homo sapiens; identical to SEQ ID NO: 75420
  chr7:158307738-158307856
  hypo

SEQ ID NO: 158925 - DNA, 30 bp, Homo sapiens
  chr7:158310974-158311004
  hypo
gaacattaatagagacgatacggatttcac

SEQ ID NO: 158926 - DNA, 142 bp, Homo sapiens; identical to SEQ ID NO: 75421
  chr7:158315943-158316085
  hypo

SEQ ID NO: 158927 - DNA, 110 bp, Homo sapiens
  chr7:158330970-158331080
  hypo
cgagacctgctcgtccggtgactggcgcacgctgcgctccctcacaaacactaaccccagtggttctcctcccagcactgcccctcacccctgcgcggcgtgtccctctg

SEQ ID NO: 158928 - DNA, 232 bp, Homo sapiens; identical to SEQ ID NO: 22153
  chr7:158331365-158331597
  hypo

SEQ ID NO: 158929 - DNA, 30 bp, Homo sapiens
  chr7:158339001-158339031
  hypo
acgcctgcccggagacggggtccgcgaggt

SEQ ID NO: 158930 - DNA, 763 bp, Homo sapiens; identical to SEQ ID NO: 22154
  chr7:158349366-158350129
  hypo

SEQ ID NO: 158931 - DNA, 30 bp, Homo sapiens
  chr7:158377879-158377909
  hypo
tctccttgcattctccgtggattgtgttct

SEQ ID NO: 158932 - DNA, 30 bp, Homo sapiens
  chr7:158378187-158378217
  hypo
tgttaccagtgacaccgtgatcagagccga

SEQ ID NO: 158933 - DNA, 463 bp, Homo sapiens; identical to SEQ ID NO: 116093
  chr7:158379347-158379810
  hypo

SEQ ID NO: 158934 - DNA, 31 bp, Homo sapiens; identical to SEQ ID NO: 22155
  chr7:158381341-158381372
  hypo

SEQ ID NO: 158935 - DNA, 21 bp, Homo sapiens
  chr7:158389992-158390013
  hypo
ttttgagatggagtcttgctc

SEQ ID NO: 158936 - DNA, 38 bp, Homo sapiens; identical to SEQ ID NO: 75427
  chr7:158414041-158414079
  hypo

SEQ ID NO: 158937 - DNA, 30 bp, Homo sapiens
  chr7:158438776-158438806
  hypo
cagctgcgtattcaacgaaaatggcaccgg

SEQ ID NO: 158938 - DNA, 206 bp, Homo sapiens
  chr7:158451037-158451243
  hypo
ggggacagcagaggccggcataaaggacattagcatgaataaagggatcttgcagcgatcatcctaaaagcgaaaaaagaaaaacaaaacaaagcatatgtaagcactataaattctgaaagtctctctacgtaaattcctgataacttactaccaaagttgctcaagaagaaccatggcagtcctttccacgttcaaaaggaaaa

SEQ ID NO: 158939 - DNA, 111 bp, Homo sapiens; identical to SEQ ID NO: 75429
  chr7:158516190-158516301
  hypo

SEQ ID NO: 158940 - DNA, 30 bp, Homo sapiens
  chr7:158533859-158533889
  hypo
ggccgcagcgaggcccgcgggccagctctg

SEQ ID NO: 158941 - DNA, 30 bp, Homo sapiens
  chr7:158534101-158534131
  hypo
ctccccaaagcatgccggcctcatgctctg

SEQ ID NO: 158942 - DNA, 317 bp, Homo sapiens; identical to SEQ ID NO: 75430
  chr7:158550058-158550375
  hypo

SEQ ID NO: 158943 - DNA, 382 bp, Homo sapiens; identical to SEQ ID NO: 75431
  chr7:158552732-158553114
  hypo

SEQ ID NO: 158944 - DNA, 164 bp, Homo sapiens; identical to SEQ ID NO: 22158
  chr7:158556264-158556428
  hypo

SEQ ID NO: 158945 - DNA, 380 bp, Homo sapiens; identical to SEQ ID NO: 22159
  chr7:158564137-158564517
  hypo

SEQ ID NO: 158946 - DNA, 219 bp, Homo sapiens
  chr7:158570553-158570772
  hypo
aagtgtgaaattctgcgagaattgccgaaacatgacacagagccatgaagtgagcacatgctgttcgcttcacagcacggacaggcttatttttcacagggctgccataaactttcaactagtaaaaacacagtatctacgaagcgcaataaagcaaagcacaataaagcgaggtgtgcctatgaacactttcatcttaaatgtcgcattcatatttta

SEQ ID NO: 158947 - DNA, 30 bp, Homo sapiens; identical to SEQ ID NO: 22161
  chr7:158571466-158571496
  hypo

SEQ ID NO: 158948 - DNA, 259 bp, Homo sapiens
  chr7:158583816-158584075
  hypo
tggcaaccaccattccgcttctgtctatgagtttgactcccccagaaacctcacacaagtgcaattatgcagacgctgtccctttgtgtctggcttgtttccttcagcataaggtcctcaaggtccagcatgtggcggcctggagcaggagtcccgtgtttctaaggtgtacaggccacattctgcttatccattcatcggcccacgcatccttgggctgcttccgccttgtagctattgtaaaaaatgctgctaagaa

SEQ ID NO: 158949 - DNA, 36 bp, Homo sapiens; identical to SEQ ID NO: 75436
  chr7:158594952-158594988
  hypo

SEQ ID NO: 158950 - DNA, 30 bp, Homo sapiens; identical to SEQ ID NO: 75437
  chr7:158595844-158595874
  hypo

SEQ ID NO: 158951 - DNA, 30 bp, Homo sapiens; identical to SEQ ID NO: 75438
  chr7:158596431-158596461
  hypo

SEQ ID NO: 158952 - DNA, 157 bp, Homo sapiens; identical to SEQ ID NO: 75439
  chr7:158598727-158598884
  hypo

SEQ ID NO: 158953 - DNA, 30 bp, Homo sapiens
  chr7:158605368-158605398
  hypo
aaggtggaaacaacccgaatggccattgtg

SEQ ID NO: 158954 - DNA, 35 bp, Homo sapiens; identical to SEQ ID NO: 22162
  chr7:158623833-158623868
  hypo

SEQ ID NO: 158955 - DNA, 34 bp, Homo sapiens; identical to SEQ ID NO: 22163
  chr7:158624107-158624141
  hypo

SEQ ID NO: 158956 - DNA, 50 bp, Homo sapiens; identical to SEQ ID NO: 75442
  chr7:158659173-158659223
  hypo

SEQ ID NO: 158957 - DNA, 30 bp, Homo sapiens; identical to SEQ ID NO: 75443
  chr7:158669872-158669902
  hypo

SEQ ID NO: 158958 - DNA, 30 bp, Homo sapiens
  chr7:158672743-158672773
  hypo
ttaccgggcggtgtcgccagacaaggttga

SEQ ID NO: 158959 - DNA, 30 bp, Homo sapiens; identical to SEQ ID NO: 22164
  chr7:158713060-158713090
  hypo

SEQ ID NO: 158960 - DNA, 30 bp, Homo sapiens
  chr7:158716317-158716347
  hypo
gcacggctcagttgtcgtctgggatttgag

SEQ ID NO: 158961 - DNA, 30 bp, Homo sapiens
  chr7:158725226-158725256
  hypo
tgagtcaggccctaacgagtctgtctgccg

SEQ ID NO: 158962 - DNA, 30 bp, Homo sapiens
  chr7:158739759-158739789
  hypo
ggtgcctgctacagcgcctgctgtgtcagt

SEQ ID NO: 158963 - DNA, 30 bp, Homo sapiens; identical to SEQ ID NO: 75445
  chr7:158740893-158740923
  hypo

SEQ ID NO: 158964 - DNA, 224 bp, Homo sapiens
  chr7:158741229-158741453
  hypo
acagtcatcgcccccgggtgcttcggacacgggaggtgctcagtgaaggtggcgcgggggatggctgagtggcagttgtgtctgcagggcagagtcatatcggaatgtacaagcgcaactggatatgcagacttttattcctggaggctacagtctggtccctcaatgaccccacaccccccacaattatttacaaaattccatttgacgtaaactggagtcaa

SEQ ID NO: 158965 - DNA, 30 bp, Homo sapiens; identical to SEQ ID NO: 75447
  chr7:158749629-158749659
  hypo

SEQ ID NO: 158966 - DNA, 529 bp, Homo sapiens
  chr7:158766775-158767304
  hypo
caccccgcgctgtccccggcggtctggcctggcgtctggagctccgggagcgcctgtcctcccagggccgatgccagcgcccgccctccgcgttcccggcattgacagaatgtccaggcgcgcagggcccgtgggtggggcctgggcacccggccctgccctcgcgcaccctccagacccgccacttcttagatagagagcggccgcctccccgccctcctttcagccactcgctccgcgcagtcagctctgctgactcttccggaggattctggaaggttccagagggtgtgccgccgaggccctgcgagagggcgttccctggggagaacattccagagcaaggtaacatccataaacggaggctgaaacggcctgagacgtcccgggagtaacgaagaccccaaggcggccccaacttgaggggggcgaggtagccaggaatgggggggtggtgggagggacgggaaggcaaacgcgctgcctgctggggacggacgcgccttggggcagccggggaggccccgaa

SEQ ID NO: 158967 - DNA, 30 bp, Homo sapiens
  chr7:158770746-158770776
  hypo
tgaataatgctttaccgtatggatagacca

SEQ ID NO: 158968 - DNA, 197 bp, Homo sapiens; identical to SEQ ID NO: 22166
  chr7:158792182-158792379
  hypo

SEQ ID NO: 158969 - DNA, 258 bp, Homo sapiens; identical to SEQ ID NO: 75450
  chr7:158817161-158817419
  hypo

SEQ ID NO: 158970 - DNA, 187 bp, Homo sapiens
  chr7:158820418-158820605
  hypo
gcatatgtgtgcacacgccccacgcacacacccacacacgcatgtgcatcacatgaacgcgcgtgcacacacacactcctgcactcagtcctgctctattaacaggttcttgggctctgcagagctgacagaggccgtgttgggtgcggcaggacaaggctgggcgtgcaggcgcctcctccacagg

SEQ ID NO: 158971 - DNA, 223 bp, Homo sapiens
  chr7:158856803-158857026
  hypo
ctggatggggaagccgcgcccggcgtgggtgggcgcggagggagcagaaaggaggcgatgcggctgctggggtgggagaggggcggccccacgcgccgggccaggagggctccttcttcccgcatttcacgggagccccggtcccctgccccggagccactggggcctggctgaggcgaccctgcacctgggccccgtgggctcgagcgggtccacagaggac

SEQ ID NO: 158972 - DNA, 159 bp, Homo sapiens
  chr7:158881370-158881529
  hypo
gctggagagggaatcacacagcggtggcagcacggcctgcaccacggagtgaaagcagtgagctccggagtccattcagctactctggtcacagcctggaaacgctgctgggagaacaatcccagtgcctcaggcctcggttcctcatctggggaatgg

SEQ ID NO: 158973 - DNA, 30 bp, Homo sapiens; identical to SEQ ID NO: 75452
  chr7:158886386-158886416
  hypo

SEQ ID NO: 158974 - DNA, 43 bp, Homo sapiens; identical to SEQ ID NO: 75453
  chr7:158890571-158890614
  hypo

SEQ ID NO: 158975 - DNA, 30 bp, Homo sapiens
  chr7:158933031-158933061
  hypo
tcagcctgtagattccggttcacatcgctg

SEQ ID NO: 158976 - DNA, 180 bp, Homo sapiens
  chr7:158933385-158933565
  hypo
gcctgcatatgaacccgctcaagctggcgtggggctgagtgactgcctgggacctgcggcccctagcgcccgatatgactcacacacggactgcccactgagggggagcccctgtgaatagtgtaaatgtgctgacctgcctttgggtgagggtgttccaggaggcgtcgccaatctcag

SEQ ID NO: 158977 - DNA, 597 bp, Homo sapiens; identical to SEQ ID NO: 116103
  chr7:158936493-158937090
  hypo

SEQ ID NO: 158978 - DNA, 172 bp, Homo sapiens; identical to SEQ ID NO: 45043
  chr7:158937202-158937374
  hypo

SEQ ID NO: 158979 - DNA, 469 bp, Homo sapiens; identical to SEQ ID NO: 45044
  chr7:158937576-158938045
  hypo

SEQ ID NO: 158980 - DNA, 115 bp, Homo sapiens
  chr7:158940024-158940139
  hypo
gacctgggccttaggcgggctgcttggcttgtgaagaaagctcgtggcgctgggtgccttcgacaaacgcatctttttctcccggttccacctgggtgagcgatgaactttgagc

SEQ ID NO: 158981 - DNA, 43 bp, Homo sapiens
  chr7:158945567-158945610
  hypo
caagtcctggggtccaaaagccgaggagcctggagctccaaag

SEQ ID NO: 158982 - DNA, 188 bp, Homo sapiens
  chr7:158951177-158951365
  hypo
ggacttgccccagcccgtctggtccagcagccgcactctcagctggacccttagacgggaaatcttagcgacttttctagggtgaagcttgatggcgttgtgatggggcgttctcgatgctgctttcttagcctagaaaagcacagagtgggcgccctccctgctccgtggtgcgcgtgttgattgtc

SEQ ID NO: 158983 - DNA, 1418 bp, Homo sapiens
  chr7:158962523-158963941
  hypo
tttgtcagtgggtgcagtgatcgagggcataaccgggctccatcccaatgctgcctcatccctgcagtcaccccgcacaggtgacgcaggcttcagagggccccggacctcgcctgagggtgaagaaaatcacggcatcactgacaaggccgccatgaggatcgcgtgagcagaaacacgatgatcatggctcactgatggggcagctctgaggatcgcgtgagcagaaacacacagataatcacagaatcactgacggggcagctctgaggatcacgtgagcagaaacacacagataatcacagaatcactgacggggctgctgtgaggatcccgtgagcagaaacatggatgatcacggctcactgacggggcagctctgaggatcgcgtgagcagaaacacacagataatcacagaatcactgacggggccgctgtgaggatcccgtgagcagaaacatggatgatcacggctcactgacggggcagctctgaggatcacgtgagcagaaacacacagataatcacagaatcactgacgaggcctctgtgaggatcccgtgagcagaaacatggatgatcgcggcctgactggcggggctgctgtgaggatcatatgaccagaaacacgtggaagatcatggctcactgacggggctgctgtgactattgcgtgagcagaaacacgatgatcatggctcactgaatgggcagctctgaggatcgcgtgagcagaaacatggatgatcatggctcactgacagggaggtctgaggattgcgtgagcagaaacacagataatcacagaatcactgagggggccactgtgaggatcgcatgagcagaaacacacagatgatcacggctcactaatggggccgctgcgagaatcgcgtgagcagaaacacggatgatcatggctcactgacggggcaactctgaggatcacgtgagcagaaacacacaaataatcacagaatcactgacggggccactgtgaggatcgcgtgagcagaaacacacagataaccaaggcctgaccaacggggctgctgggaggatcccgtgagcagaaacacggacgatcacagcatcactatcgagacggctctgaggatcctgtgagcaggacactggtgtgttatgctttaaagcttttccttgatcttggtgatttcacgtcttaggaaacctccctcactaatcagccggccccgtgggcaatgcagcttctcctgaaaagcaaacacttcaactttcaggcttcgtggccactgacccgcttctggccaggggcagcctcctccctacccctcgtgtaacggactacgggactggacatctgtcacgatgccatttgagacggaaagggcactgggccagtgtctggaactggcccgcacgcctcaggtcatct

SEQ ID NO: 158984 - DNA, 30 bp, Homo sapiens
  chr7:159023734-159023764
  hypo
taaagaggccgtggccggaggacggagcgg

SEQ ID NO: 158985 - DNA, 107 bp, Homo sapiens
  chr8:287939-288046
  hypo
acatcttactctgtgggattgcggtggtcccgatgtctgtgtccccaagatgcctacgttgaaatcctaacccccagggtgatggcgtgaggaggtggggcttttgg

SEQ ID NO: 158986 - DNA, 30 bp, Homo sapiens
  chr8:314057-314087
  hypo
gtccaggtcacgcacggtccaggtaactca

SEQ ID NO: 158987 - DNA, 10 bp, Homo sapiens
  chr8:494853-494863
  hypo
cgcgggccca

SEQ ID NO: 158988 - DNA, 93 bp, Homo sapiens; identical to SEQ ID NO: 116110
  chr8:495071-495164
  hypo

SEQ ID NO: 158989 - DNA, 44 bp, Homo sapiens; identical to SEQ ID NO: 116111
  chr8:495478-495522
  hypo

SEQ ID NO: 158990 - DNA, 242 bp, Homo sapiens; identical to SEQ ID NO: 116112
  chr8:495635-495877
  hypo

SEQ ID NO: 158991 - DNA, 73 bp, Homo sapiens; identical to SEQ ID NO: 116113
  chr8:495952-496025
  hypo

SEQ ID NO: 158992 - DNA, 208 bp, Homo sapiens
  chr8:566299-566507
  hypo
acaagcatggggcaagagggacgcgttaactgaaagttgctgaagacaggctcctgtcggccaggtgtgggcggccgccgtccagagagaaactcctgccacgtgtgtgaggctgaccgaaccccgcacaccccatgctctcctggctaagcggattcagcgctggccaacaaacccagacaggtacggccagagcactgctcccagg

SEQ ID NO: 158993 - DNA, 453 bp, Homo sapiens
  chr8:591504-591957
  hypo
ggttaatagcctgtatcgtaatgtatttcctcaaaggtgtctctcattccacatcgaaagaccttttcacacagattattcaaattatagcttaatatttcttgattaattgtactgggaggaggtagtgtgtctgagcgtgatctaatcagtggagaacgcagcggccgtcacgcctgggtacgctggcagcggagctcctcccggaggacccctccccctccccgccgattcctctcctgtctgcgttttccaggctcatctcagatgccgccttgtctatgaagctctctttggttcctgcccagacctcatcagaatcaacgccccggctctgtgctggccaaaaccccacggtgcctctggccgtatgcagtcctttcttctgaccccatctcgtcctccagtctccactggtctcaggtcaatagctttttccgaggaggcatctat

SEQ ID NO: 158994 - DNA, 144 bp, Homo sapiens
  chr8:592171-592315
  hypo
tcccagcacttaacgcgactggcccaggtggcagaggcactggtgtccatcagggcccacaggtcgggaatgcacactgctaactgcaatttgctttgctctcattcattttagcaggggaactgctgcaaagaacatccctaa

SEQ ID NO: 158995 - DNA, 31 bp, Homo sapiens
  chr8:592904-592935
  hypo
aggctgtggggctggacgggagactgcagcc

SEQ ID NO: 158996 - DNA, 158 bp, Homo sapiens; identical to SEQ ID NO: 75462
  chr8:593179-593337
  hypo

SEQ ID NO: 158997 - DNA, 30 bp, Homo sapiens
  chr8:617654-617684
  hypo
ccatatgctctgcacgctgtgactccagcc

SEQ ID NO: 158998 - DNA, 24 bp, Homo sapiens
  chr8:625100-625124
  hypo
agtgaggacagagacgtggcggcc

SEQ ID NO: 158999 - DNA, 30 bp, Homo sapiens; identical to SEQ ID NO: 75464
  chr8:626513-626543
  hypo

SEQ ID NO: 159000 - DNA, 285 bp, Homo sapiens; identical to SEQ ID NO: 75465
  chr8:636731-637016
  hypo

SEQ ID NO: 159001 - DNA, 30 bp, Homo sapiens
  chr8:640494-640524
  hypo
ggcagacccaagggcgcagcaagtgccgct

SEQ ID NO: 159002 - DNA, 572 bp, Homo sapiens
  chr8:644617-645189
  hypo
acagtcacaggcaccacgcagacaggagcaccacgaggggcctcacggcttgctcgtctgtgaatcacggtgaccatgtaacccataataccttctggttctaactttttatattcttttgggtaatgtatggtttactgtgaggacacttacgccttgcacaagttgaacgttacatgtcttgatcaggtgcaaggaagagaccggttacactttatggggtgggcggcagcgagagttccccgtcccatcatctcctccgccggacgcacagagaatgcagcgtctgtgagcacagctgccctggacctggcatctaagagtcagggtcagagaggggcagtcagaaacccacctccctgctggacaagtcacaagcaccagcatccctcgggaaaggcagaggggcgtggtggctcggagccctagggtgataggcggttggctgccctgtgggtttcaccagtgtcacctcttcgcaggtgtcattgacctggctcctttctccccgtcaggttcccctcagctcctctgggctgctcctggcagccgacagctatggaggggctcac

SEQ ID NO: 159003 - DNA, 30 bp, Homo sapiens; identical to SEQ ID NO: 75467
  chr8:647999-648029
  hypo

SEQ ID NO: 159004 - DNA, 31 bp, Homo sapiens; identical to SEQ ID NO: 22175
  chr8:650716-650747
  hypo

SEQ ID NO: 159005 - DNA, 286 bp, Homo sapiens
  chr8:651178-651464
  hypo
agacgggagcacaccgtacccacgggtctaccctgctggacgggagcacgccgtacccacgggtctaccctgctggacgggagcacgccgtacccacgggtctgccccgccggacgggagcacgccatacctacgggtctgccctgctggacgggagcacgccgtacccacgggtctaccctgctggacgggagcacgccatacctacgggtctgccccgccggacgggagcacgccttacccacgggtgtgccctgctggatgggaacacgccgtaggatgggag

SEQ ID NO: 159006 - DNA, 30 bp, Homo sapiens
  chr8:652273-652303
  hypo
ctcacactcaattagcgagactgcaaacac

SEQ ID NO: 159007 - DNA, 30 bp, Homo sapiens
  chr8:655830-655860
  hypo
ggtgaaaggctggccgcatgggggacggtg

SEQ ID NO: 159008 - DNA, 452 bp, Homo sapiens
  chr8:667714-668166
  hypo
ctggggcagccaacgcggacatgtggctgaagtcgcctccccaggcacagctgcctgcgagtgtctggagccaggaaaatgctatggagaaatcccaggccatggtcagagccaggcaatgctgcagaacgcctgaggctgggcaggcacaagacagtcccagggacgggggcaggccagggcaggccctgactaaacagccaccgccaggagacgctgggcccaagcaagcatcagatgacagagttttctgaaacaaggcagctgatcccaaagaaaatggcagaacacgccagggtaaggatcggagcgcactgagaaacggcacaacacatcagcgtttggatcagagcgcactgagaaaccgcacaacacaccagggtacagattggagtgcactgacaaactgcacaacacaccagggtacagatcggagcgcacggagaaaccgc

SEQ ID NO: 159009 - DNA, 75 bp, Homo sapiens; identical to SEQ ID NO: 45049
  chr8:686809-686884
  hypo

SEQ ID NO: 159010 - DNA, 55 bp, Homo sapiens; identical to SEQ ID NO: 45050
  chr8:687162-687217
  hypo

SEQ ID NO: 159011 - DNA, 128 bp, Homo sapiens; identical to SEQ ID NO: 6078
  chr8:687513-687641
  hypo

SEQ ID NO: 159012 - DNA, 138 bp, Homo sapiens; identical to SEQ ID NO: 6079
  chr8:687837-687975
  hypo

SEQ ID NO: 159013 - DNA, 241 bp, Homo sapiens; identical to SEQ ID NO: 45053
  chr8:688498-688739
  hypo

SEQ ID NO: 159014 - DNA, 21 bp, Homo sapiens
  chr8:689295-689316
  hypo
ggtcccagagcctggcggagc

SEQ ID NO: 159015 - DNA, 30 bp, Homo sapiens; identical to SEQ ID NO: 75477
  chr8:694455-694485
  hypo

SEQ ID NO: 159016 - DNA, 181 bp, Homo sapiens
  chr8:716397-716578
  hypo
ctatgtgagctgcagcgttctttgaaattcgtcacataaatctttctaatgtcctccggaattgaactctggggtgacccaaattagtgcagcaaatatattgtgatatagatgaattacagctggtgcctctgcctttatcaatgtgtccggcgttattggctgtcggagtgagagccag

SEQ ID NO: 159017 - DNA, 30 bp, Homo sapiens; identical to SEQ ID NO: 75478
  chr8:748433-748463
  hypo

SEQ ID NO: 159018 - DNA, 30 bp, Homo sapiens; identical to SEQ ID NO: 75479
  chr8:748860-748890
  hypo

SEQ ID NO: 159019 - DNA, 170 bp, Homo sapiens; identical to SEQ ID NO: 45055
  chr8:798794-798964
  hypo

SEQ ID NO: 159020 - DNA, 30 bp, Homo sapiens; identical to SEQ ID NO: 45056
  chr8:799238-799268
  hypo

SEQ ID NO: 159021 - DNA, 30 bp, Homo sapiens
  chr8:801314-801344
  hypo
acgcatgtctcaggacgtagccccattgct

SEQ ID NO: 159022 - DNA, 30 bp, Homo sapiens
  chr8:801790-801820
  hypo
gccaggaaccacactcggagctgggaagca

SEQ ID NO: 159023 - DNA, 86 bp, Homo sapiens; identical to SEQ ID NO: 22178
  chr8:833588-833674
  hypo

SEQ ID NO: 159024 - DNA, 30 bp, Homo sapiens; identical to SEQ ID NO: 22179
  chr8:852059-852089
  hypo

SEQ ID NO: 159025 - DNA, 30 bp, Homo sapiens; identical to SEQ ID NO: 22180
  chr8:853998-854028
  hypo

SEQ ID NO: 159026 - DNA, 325 bp, Homo sapiens; identical to SEQ ID NO: 22181
  chr8:893355-893680
  hypo

SEQ ID NO: 159027 - DNA, 54 bp, Homo sapiens
  chr8:923934-923988
  hypo
ctgggcgcaagctgcgcgcgcagaccgggccactcggtcgccagaaaagatttt

SEQ ID NO: 159028 - DNA, 30 bp, Homo sapiens; identical to SEQ ID NO: 75487
  chr8:962452-962482
  hypo

SEQ ID NO: 159029 - DNA, 421 bp, Homo sapiens
  chr8:972314-972735
  hypo
ctccctgggagtggacggtcccgtgccgaggtagacactctaaacaccacccaccctccctgggagtggacagtcccgtgccaaggtagacgctccaaacagcacccaccctccctgggagtggacggtcccgtgccaaggtagacactccagccgccatccatcctccctgggattggacggtcccatgccgaggtagacactccagccgccacccatcctccctgggagtggacggtcacgtgccgaggtagacactccagccgccacccatcctccctgggagtggacactcccgtgcttaggtagatgctccaaacagcacccaccctccctgggagtggacggtcccgtgccgaggtagacgctccaaacagcacccaccctccctgggggtggacagtaccgtgccgaggtagat

SEQ ID NO: 159030 - DNA, 298 bp, Homo sapiens
  chr8:976027-976325
  hypo
ccggcccgtccaggccgcctccagcaccaccatgcacttcgtcccggcttccaggagccctggcagaaacggagctcagctgccagtctggcgtcctcgaacatgctgcgagtggcgttggtgcccatggctgtgaaaatggaatcgttgtcacctcatccaggacgtgcctcacgatcgtgctgtctcgttggtggagacgtttgccgtcttccgaagcttctctgcaccagaccctctgagatggcgcgcttgccccatgaccccaacgctttgctcttcacgtctcctttgacaa

SEQ ID NO: 159031 - DNA, 97 bp, Homo sapiens; identical to SEQ ID NO: 75488
  chr8:977338-977435
  hypo

SEQ ID NO: 159032 - DNA, 30 bp, Homo sapiens
  chr8:977930-977960
  hypo
gttattctccaggtgcggtgccaggcgctc

SEQ ID NO: 159033 - DNA, 77 bp, Homo sapiens
  chr8:978467-978544
  hypo
ccctttattctccaggtggggtgccaggcgcccgttattctccacatgcggtgccaggcacccgttattctccaggt

SEQ ID NO: 159034 - DNA, 30 bp, Homo sapiens; identical to SEQ ID NO: 75489
  chr8:986256-986286
  hypo

SEQ ID NO: 159035 - DNA, 30 bp, Homo sapiens
  chr8:998068-998098
  hypo
ctgagtccgaatttccgctggaaagtattt

SEQ ID NO: 159036 - DNA, 30 bp, Homo sapiens
  chr8:1003595-1003625
  hypo
gaggcccgataactgcgaggaattccgtgg

SEQ ID NO: 159037 - DNA, 30 bp, Homo sapiens
  chr8:1004090-1004120
  hypo
ctctgagcctgtgtgcggcacccggcgttt

SEQ ID NO: 159038 - DNA, 317 bp, Homo sapiens
  chr8:1026276-1026593
  hypo
ggcatgagcccccgccggctgtccgcagctcacacggcactgacacagacactgagctgcaagtcccagctcactacgtggcagtgagtcgcagctccccgtctccgagcctcagtttccatgcaggagacgtacggtattttgcggaaagtcggatgggttagagggcaggatgctttcgaagttcttgtggaacaggaggcagatctgccgctcatggcccacacctgggttggtctcggaagatggcctctgggctgtgatgctccggccagggccacggctcagcccctctcttgagccgccttccgttttca

SEQ ID NO: 159039 - DNA, 97 bp, Homo sapiens
  chr8:1043966-1044063
  hypo
gtccatgcaggcgctcgtggatggagggcagctccccggtggagggagggcagcttcgcggtgggtggagggagggcagctccgcggtggagggagg

SEQ ID NO: 159040 - DNA, 30 bp, Homo sapiens
  chr8:1044675-1044705
  hypo
tgtgtctttattgaccgtgcagcgggcaca

SEQ ID NO: 159041 - DNA, 269 bp, Homo sapiens; identical to SEQ ID NO: 22183
  chr8:1047977-1048246
  hypo

SEQ ID NO: 159042 - DNA, 280 bp, Homo sapiens
  chr8:1048566-1048846
  hypo
cacccacagacgccgcgacccacaccaggctcccggccgcccacgggcgccgccacccacgccaggctcccggccgcccacggacgccgccacccacgccaggctcccggccgcccacgggcgccgccacccacgccaggctcccggccgcccacgggcgccgccacccacgccaggctcccggccgcccacgggcgccgccacccacgccaggctcccggccgcccacggacgccgccacccactccaggctcccggccgcgcacggacgctgcgacgc

SEQ ID NO: 159043 - DNA, 232 bp, Homo sapiens; identical to SEQ ID NO: 75492
  chr8:1078115-1078347
  hypo

SEQ ID NO: 159044 - DNA, 148 bp, Homo sapiens
  chr8:1104690-1104838
  hypo
tccgcagtcgaggaccgagctgccttttctcccggagtcggtcaggatttccagtccttactgtggccgggcaccctctatagtcctgccgtccatcccgccctaaaataagactgtgggcctgacaaaggcccggggtgccttggag

SEQ ID NO: 159045 - DNA, 70 bp, Homo sapiens
  chr8:1105154-1105224
  hypo
gtcccgtgtcccctgcgtctctcctctgcccagcacacaccagggtttctaggaacgcttgctggatgag

SEQ ID NO: 159046 - DNA, 44 bp, Homo sapiens
  chr8:1108700-1108744
  hypo
gacctttgtgggctgcgcacccagagccacgcgggtcctggtgg

SEQ ID NO: 159047 - DNA, 30 bp, Homo sapiens
  chr8:1112186-1112216
  hypo
aggcgagggaggcggcgattcatccatttt

SEQ ID NO: 159048 - DNA, 509 bp, Homo sapiens; identical to SEQ ID NO: 22185
  chr8:1132630-1133139
  hypo

SEQ ID NO: 159049 - DNA, 30 bp, Homo sapiens; identical to SEQ ID NO: 75494
  chr8:1138913-1138943
  hypo

SEQ ID NO: 159050 - DNA, 609 bp, Homo sapiens; identical to SEQ ID NO: 22186
  chr8:1150804-1151413
  hypo

SEQ ID NO: 159051 - DNA, 151 bp, Homo sapiens; identical to SEQ ID NO: 75496
  chr8:1207573-1207724
  hypo

SEQ ID NO: 159052 - DNA, 30 bp, Homo sapiens; identical to SEQ ID NO: 75497
  chr8:1245657-1245687
  hypo

SEQ ID NO: 159053 - DNA, 240 bp, Homo sapiens; identical to SEQ ID NO: 75498
  chr8:1246592-1246832
  hypo

SEQ ID NO: 159054 - DNA, 227 bp, Homo sapiens; identical to SEQ ID NO: 75499
  chr8:1251025-1251252
  hypo

SEQ ID NO: 159055 - DNA, 30 bp, Homo sapiens
  chr8:1252466-1252496
  hypo
ccctgatgatgaagacgacacagatgtctc

SEQ ID NO: 159056 - DNA, 254 bp, Homo sapiens; identical to SEQ ID NO: 75500
  chr8:1269310-1269564
  hypo

SEQ ID NO: 159057 - DNA, 261 bp, Homo sapiens; identical to SEQ ID NO: 75501
  chr8:1303162-1303423
  hypo

SEQ ID NO: 159058 - DNA, 96 bp, Homo sapiens; identical to SEQ ID NO: 75502
  chr8:1307776-1307872
  hypo

SEQ ID NO: 159059 - DNA, 311 bp, Homo sapiens
  chr8:1308185-1308496
  hypo
gaagaacaggaccatcgcgagccactttccgcctcttcatccccgtccactgaggaaatccaccgaagccctttgtgtggggttcggaggagagcgggttgcagggacttgccttctgggtgtgaccttggtgcaggtgcataagggttagcgactcctgctgcttcccgggtgtgctcaggggcggggcttttccggggcggggcttctccggggcggggcttctccggggcggggcttctccggggcggggcttctctggggcggggcttctccggggcggggcttctccggggcggggcttctccagg

SEQ ID NO: 159060 - DNA, 186 bp, Homo sapiens
  chr8:1324841-1325027
  hypo
gtcatcggcggatggcggggacagggctaccgagaccctcaacctgagcccggtgggatgtgtggtcatcggcggatggcggggacagggctaccgagaccctcaacctgagcccggtgggatgtgtggtccgcaggtggggttcttcttgctactgcaagcgtatttggccgtgaaagcgaaatg

SEQ ID NO: 159061 - DNA, 245 bp, Homo sapiens
  chr8:1326030-1326275
  hypo
cctgtgtctcttctgcgaagctgcacccacctcgtctgtctgggggtggcagccccaaatcagctgatggagttcacgcacccctgtgcagacgcagcctcccccagggcctttggctgccgtacaccctcaggcttggtccctctcagcagccactgaatcagacagctgccccaagacctgacttgcactgtactcctgctgaagtgacccgtctcaagatatctggacgcaggtgcacacct

SEQ ID NO: 159062 - DNA, 131 bp, Homo sapiens
  chr8:1326602-1326733
  hypo
cacctgtccatcctgcgcacacctgacttcgcctgtccatcctgcacacacctggcctcacctgtctttcctgcgcacacctgacctcacctgtccctgacacacacagctgacttcgcctgtctgtcctg

SEQ ID NO: 159063 - DNA, 302 bp, Homo sapiens; identical to SEQ ID NO: 75504
  chr8:1379942-1380244
  hypo

SEQ ID NO: 159064 - DNA, 151 bp, Homo sapiens; identical to SEQ ID NO: 75505
  chr8:1411608-1411759
  hypo

SEQ ID NO: 159065 - DNA, 30 bp, Homo sapiens; identical to SEQ ID NO: 22188
  chr8:1441371-1441401
  hypo

SEQ ID NO: 159066 - DNA, 397 bp, Homo sapiens
  chr8:1443510-1443907
  hypo
agaggcagccgaggacgtttactgtcccgtgttacccggccacacaccccagggccctttctcttccccttctgctgtgctgctctgagccggagactgagccggccagggcagccgaggccaagagtggcgctgctgaggggccgccatcatgaggggtcagaatgtggtgggtgagccaggactgcgctggcccggcgaggtcggtgtgctgagaccacagtgtgctcgggtcacagtggtgattgaaacgtttgcctctgcacctactgggaagcctcttcctggaggaccctggctttgatctgtggttgtgctgacgtggacatctttgcctcgcaggatgcagattgcagacgctcatcgtctcgcaggcagctccagctcgagtggtggc

SEQ ID NO: 159067 - DNA, 25 bp, Homo sapiens
  chr8:1444164-1444189
  hypo
gtggggcccccggcacggttctcct

SEQ ID NO: 159068 - DNA, 30 bp, Homo sapiens
  chr8:1444484-1444514
  hypo
ggagtgcatgggggtcggaacctgcaggtc

SEQ ID NO: 159069 - DNA, 399 bp, Homo sapiens
  chr8:1471335-1471734
  hypo
ccccctctggtggtccgggcccatggtcctgccaggggcccacagcatgaagatgtagctccctcacacacacgttgaatttggatttgcttgtctggcttctgctggggcgcaggatgtggggatggaaggaccaagacacacgacagagaacagcgtcacggggtcaccgtcccacttcccaccccgcgcctcacagcacagacgggggatttgccggcctcacgccggccgagccactgctgacttcacgcagccccagccatgcccccacgcagacacacggagccccaaggcgggccagatctcagggccggatggggctgtggagctgtgccttagacgggggggaaggactccctgccccaggccggcaccgcacagtccctgggtagaaaa

SEQ ID NO: 159070 - DNA, 299 bp, Homo sapiens; identical to SEQ ID NO: 75510
  chr8:1475084-1475383
  hypo

SEQ ID NO: 159071 - DNA, 30 bp, Homo sapiens
  chr8:1493517-1493547
  hypo
attgggtaggccggccgccccataagtgca

SEQ ID NO: 159072 - DNA, 30 bp, Homo sapiens; identical to SEQ ID NO: 75511
  chr8:1496332-1496362
  hypo

SEQ ID NO: 159073 - DNA, 305 bp, Homo sapiens; identical to SEQ ID NO: 75512
  chr8:1501386-1501691
  hypo

SEQ ID NO: 159074 - DNA, 30 bp, Homo sapiens
  chr8:1502799-1502829
  hypo
ctcagtaacaattagcgaggggcacctgta

SEQ ID NO: 159075 - DNA, 30 bp, Homo sapiens
  chr8:1509795-1509825
  hypo
tgatccacctgcaccgtgacccacaggggc

SEQ ID NO: 159076 - DNA, 382 bp, Homo sapiens
  chr8:1578879-1579261
  hypo
aaagtttgcccttcatgtttaacattcaattttttctcaagcacaggaagggaattaaaaatctaactgaagtcttgtgagaggtgcttatgtccatgccgtttcctccttggaacctcagtagctgcactctgcttgggtttcctgcagctcatgtcccgagggtctcggcgggaggtccgggtgtcccgagggtctgggcgggaggtccgggtgtcccgagggtctcggcgggaggtcccagtgtcccgagggtctcggcgggaggtccgggtgtcccgagggtctcggcgggaggtccgggtgtcccgagggtctgggcgggaggtccgggtgccccaagggtctgggcgggaggtccgggtgaacagatcattttaat

SEQ ID NO: 159077 - DNA, 210 bp, Homo sapiens
  chr8:1581634-1581844
  hypo
aacatgactcaccgccgctaagcaggtccatcattaatgcagatgcactaactatcttagagctccgaagactcagtctcgcaatttcctttagttctcatggaaaaccatacccacccctttgaaaatttaccgcccaacctaaatatcactgcctaatattttactgcctaatatgttattatttctataacacgatgaatacacatg

SEQ ID NO: 159078 - DNA, 30 bp, Homo sapiens
  chr8:1582310-1582340
  hypo
acttaggcttgttaacgtttctgactcttg

SEQ ID NO: 159079 - DNA, 30 bp, Homo sapiens; identical to SEQ ID NO: 75514
  chr8:1589150-1589180
  hypo

SEQ ID NO: 159080 - DNA, 30 bp, Homo sapiens; identical to SEQ ID NO: 22192
  chr8:1592436-1592466
  hypo

SEQ ID NO: 159081 - DNA, 274 bp, Homo sapiens; identical to SEQ ID NO: 75516
  chr8:1615949-1616223
  hypo

SEQ ID NO: 159082 - DNA, 122 bp, Homo sapiens
  chr8:1616693-1616815
  hypo
caaggccatgaacctcgcgctggaaacggccgctgcccagcgccacctgccagagagccagagcagctctgtgcggaccagcgacaaggccatcctggtgtccaaggcggaggagctcctca

SEQ ID NO: 159083 - DNA, 30 bp, Homo sapiens; identical to SEQ ID NO: 75518
  chr8:1617853-1617883
  hypo

SEQ ID NO: 159084 - DNA, 30 bp, Homo sapiens; identical to SEQ ID NO: 22193
  chr8:1623363-1623393
  hypo

SEQ ID NO: 159085 - DNA, 30 bp, Homo sapiens
  chr8:1682662-1682692
  hypo
cacctgctgccgcgtcgtcgtggggctgcc

SEQ ID NO: 159086 - DNA, 30 bp, Homo sapiens; identical to SEQ ID NO: 75520
  chr8:1689282-1689312
  hypo

SEQ ID NO: 159087 - DNA, 29 bp, Homo sapiens
  chr8:1689590-1689619
  hypo
tgacaggtggccaggcgcgttggctcatg

SEQ ID NO: 159088 - DNA, 30 bp, Homo sapiens; identical to SEQ ID NO: 75522
  chr8:1692092-1692122
  hypo

SEQ ID NO: 159089 - DNA, 31 bp, Homo sapiens; identical to SEQ ID NO: 22194
  chr8:1717584-1717615
  hypo

SEQ ID NO: 159090 - DNA, 285 bp, Homo sapiens
  chr8:1721744-1722029
  hypo
catcagcatcctgtacgcagcttgcagttttccagttttctctttgtgggcgttatttccataagagtgcagacttctgggatgcaggtcagggctgtgacttccctgggtttctctggagtgagatcagtgtggagtggagaggtgtgtgctggaggaagaggccttggcctgtgctccgcattgcctactcctctcacctggaaacaccggacttcaggagtcactcggctgtggcagaaaataaagttcttgaaaggaaagcagaggcgctcactcacatcg

SEQ ID NO: 159091 - DNA, 256 bp, Homo sapiens
  chr8:1723928-1724184
  hypo
tgatgttcagaacatcgactcttcagtgttttgtcttcagacacacactcttttcactcctgttgatactgtacgctctcttgaggagcaatgagcactcttgcaggccctgtgccaggtgccgggtcataacaaagacgattctcagtcttccgtaagtgggaatctgtgggaggcacatatgcatgtggtgcggcacacacgacagaagattctggaagctgaatctgtgaggggcacacgtgtgtggtggtgc

SEQ ID NO: 159092 - DNA, 227 bp, Homo sapiens; identical to SEQ ID NO: 75524
  chr8:1725080-1725307
  hypo

SEQ ID NO: 159093 - DNA, 31 bp, Homo sapiens; identical to SEQ ID NO: 75525
  chr8:1731056-1731087
  hypo

SEQ ID NO: 159094 - DNA, 45 bp, Homo sapiens; identical to SEQ ID NO: 75526
  chr8:1759475-1759520
  hypo

SEQ ID NO: 159095 - DNA, 236 bp, Homo sapiens; identical to SEQ ID NO: 22195
  chr8:1777140-1777376
  hypo

SEQ ID NO: 159096 - DNA, 34 bp, Homo sapiens
  chr8:1777966-1778000
  hypo
tctgcggaggaagaacgcgcggcgaggcccgggg

SEQ ID NO: 159097 - DNA, 31 bp, Homo sapiens; identical to SEQ ID NO: 75528
  chr8:1779412-1779443
  hypo

SEQ ID NO: 159098 - DNA, 31 bp, Homo sapiens; identical to SEQ ID NO: 22196
  chr8:1783329-1783360
  hypo

SEQ ID NO: 159099 - DNA, 89 bp, Homo sapiens
  chr8:1783964-1784053
  hypo
gcggcctgacgcacacggcatgaaacggtccttcagcctcggtgtctctgggctccctctctgactgaatgcatcatctttttgtttaa

SEQ ID NO: 159100 - DNA, 31 bp, Homo sapiens; identical to SEQ ID NO: 75531
  chr8:1789553-1789584
  hypo

SEQ ID NO: 159101 - DNA, 383 bp, Homo sapiens
  chr8:1791890-1792273
  hypo
caatcggagatggagcgggagggttgttacagaatggcgccttccagtgttgaaggcctcgctcaggcttaaagctcagctcgcccatggcgggtgctcgcccagtttccttttctgcctccctcctctgagcggccgctcagggacaagcacgccctctctatccatatgctccaataagggagggcctgctgatgaaagatttatcttcattgtcacctcacctgagttaaattgttgccaaaaagactatgccagggttgccagctcgcgctccggccagtggagaaggtggacactgaccgacgtttccatggcaggtcgtctgcagggcctggagacctggcctaggtcctcccggggcctgccggaccacatgttgc

SEQ ID NO: 159102 - DNA, 308 bp, Homo sapiens
  chr8:1796261-1796569
  hypo
tagcttgtagaataaatatttcgctaaagaaaacagaaaattgaagtgttctatgcgtcttcttttgcatcgtgcatattgtatttgtcgtcctctcttcagtatctctgtaaaaagaggtacgcggggtcctccgtcttagtcctcaggttaagtggctttgtacgcgccacacggcgtttcctacttgttgcaacatgccccagggagggattctttccattctgtgattcctttctatagacgagggatggggtctcgtggccagcaagcaaagtttgaactcagctctccgactccagaagccg

SEQ ID NO: 159103 - DNA, 163 bp, Homo sapiens; identical to SEQ ID NO: 22198
  chr8:1797379-1797542
  hypo

SEQ ID NO: 159104 - DNA, 523 bp, Homo sapiens; identical to SEQ ID NO: 75535
  chr8:1797601-1798124
  hypo

SEQ ID NO: 159105 - DNA, 43 bp, Homo sapiens; identical to SEQ ID NO: 75536
  chr8:1798700-1798743
  hypo

SEQ ID NO: 159106 - DNA, 202 bp, Homo sapiens; identical to SEQ ID NO: 75537
  chr8:1801272-1801474
  hypo

SEQ ID NO: 159107 - DNA, 51 bp, Homo sapiens
  chr8:1805143-1805194
  hypo
acagtcctagcacgccgtctctgcaaatgatgcacacggcaggctgcgcca

SEQ ID NO: 159108 - DNA, 282 bp, Homo sapiens
  chr8:1807457-1807739
  hypo
tttgtgtgcagcacgcgcctctctgcttacacggtgtttctttgtgcatagcaccagcctctcggttgtttgcccggtgtttctttggccatagcacctgcctctcggttgtttgcacggtgtttctttgtgcgcagcacccgcctctctgcttacatggtgtttctttgtgcatagcaccagcctctcggttgtttgcacagtgtttctttggccatagcatcagcctctcggttgtttgcatggcgtttctttgtgcacagcacccgcctctcagcttgc

SEQ ID NO: 159109 - DNA, 30 bp, Homo sapiens
  chr8:1809175-1809205
  hypo
caaagggctcagagtcggccactgaggacg

SEQ ID NO: 159110 - DNA, 30 bp, Homo sapiens
  chr8:1809587-1809617
  hypo
gcgacccagtcgaggcgtctcagccgaagt

SEQ ID NO: 159111 - DNA, 76 bp, Homo sapiens; identical to SEQ ID NO: 75538
  chr8:1814164-1814240
  hypo

SEQ ID NO: 159112 - DNA, 190 bp, Homo sapiens
  chr8:1821223-1821413
  hypo
ccgtcggccccctgccgtgtggcgaggcccagtgtgtcccctttgtaaggacagcacaagcaggagttaatggaccggccatccatagcggtggtggggcagggagccagtttccgaaagaaactcacgccgccgcaggagggccctgtgggatgctctgtgcagagctgttgtgcggaccgggagacgg

SEQ ID NO: 159113 - DNA, 55 bp, Homo sapiens; identical to SEQ ID NO: 75539
  chr8:1826000-1826055
  hypo

SEQ ID NO: 159114 - DNA, 176 bp, Homo sapiens; identical to SEQ ID NO: 75540
  chr8:1830206-1830382
  hypo

SEQ ID NO: 159115 - DNA, 301 bp, Homo sapiens; identical to SEQ ID NO: 22201
  chr8:1830727-1831028
  hypo

SEQ ID NO: 159116 - DNA, 31 bp, Homo sapiens; identical to SEQ ID NO: 75542
  chr8:1842463-1842494
  hypo

SEQ ID NO: 159117 - DNA, 30 bp, Homo sapiens
  chr8:1847321-1847351
  hypo
acggcctctaggtcacgtctgatgcagtgt

SEQ ID NO: 159118 - DNA, 30 bp, Homo sapiens
  chr8:1850437-1850467
  hypo
caaacgtcagcgtgtcgaatgtgaacgaaa

SEQ ID NO: 159119 - DNA, 47 bp, Homo sapiens; identical to SEQ ID NO: 75543
  chr8:1850869-1850916
  hypo

SEQ ID NO: 159120 - DNA, 728 bp, Homo sapiens; identical to SEQ ID NO: 75544
  chr8:1877721-1878449
  hypo

SEQ ID NO: 159121 - DNA, 110 bp, Homo sapiens; identical to SEQ ID NO: 75545
  chr8:1879661-1879771
  hypo

SEQ ID NO: 159122 - DNA, 347 bp, Homo sapiens
  chr8:1885042-1885389
  hypo
gatgcgggctaatgccgtcttcagccaggaaagggctctccggctggcccctggagacgtgggtttggttaggaatgcgaggtccacactggggcaaggtgcagatgggacctgggtcctgagcctcctggaggccgacgctctgccgtggatcatgaatagcattcccgcgtgagtctttttttgacacagcctccccgacgtccttcgagacctggtctgctagacaggaacagaaaatagctggacagggaggttggggtacatgttagatgatttttggcagtattgttcctgttacttttcatatccatctgacacttcttatttcacgtgccctgagaatg

SEQ ID NO: 159123 - DNA, 30 bp, Homo sapiens; identical to SEQ ID NO: 75546
  chr8:1899112-1899142
  hypo

SEQ ID NO: 159124 - DNA, 200 bp, Homo sapiens; identical to SEQ ID NO: 75547
  chr8:1902077-1902277
  hypo

SEQ ID NO: 159125 - DNA, 30 bp, Homo sapiens; identical to SEQ ID NO: 75548
  chr8:1925465-1925495
  hypo

SEQ ID NO: 159126 - DNA, 34 bp, Homo sapiens; identical to SEQ ID NO: 22203
  chr8:1926962-1926996
  hypo

SEQ ID NO: 159127 - DNA, 30 bp, Homo sapiens
  chr8:1935709-1935739
  hypo
agcacccctgcgctccggccaccctcggtc

SEQ ID NO: 159128 - DNA, 284 bp, Homo sapiens; identical to SEQ ID NO: 75550
  chr8:1942392-1942676
  hypo

SEQ ID NO: 159129 - DNA, 30 bp, Homo sapiens
  chr8:2522398-2522428
  hypo
atgtggtctgtgagccgggaggtcagtgtg

SEQ ID NO: 159130 - DNA, 92 bp, Homo sapiens
  chr8:2522804-2522896
  hypo
agactaaggctagaacgttcagagatggaacagcccgagccaagtgatcgtgtgaacggttccatgaccctgaagaacgaagtgggtgcggc

SEQ ID NO: 159131 - DNA, 33 bp, Homo sapiens; identical to SEQ ID NO: 75551
  chr8:2536388-2536421
  hypo

SEQ ID NO: 159132 - DNA, 39 bp, Homo sapiens
  chr8:2609652-2609691
  hypo
gccagcctcgacatccggaagtcacgcaggcaccagaac

SEQ ID NO: 159133 - DNA, 30 bp, Homo sapiens
  chr8:3509275-3509305
  hypo
ttactaccaacagagcgcctaccaccatca

SEQ ID NO: 159134 - DNA, 188 bp, Homo sapiens
  chr8:3509583-3509771
  hypo
ttacccccatcagagcgcttaccaccatcagagcacctaccaccatcagcacgcttaccatcagagcgcttaccaccatcagagcgcttaccaccatcagagcgcttaccaccatcagaacacctaccaccttcagcgggcctaccaccatcagagcgccatcaccaccagagcgcctaccaacgtca

SEQ ID NO: 159135 - DNA, 30 bp, Homo sapiens
  chr8:3737417-3737447
  hypo
ttttatcccctataacgaaatagtgcttgg

SEQ ID NO: 159136 - DNA, 24 bp, Homo sapiens
  chr8:3825413-3825437
  hypo
gcgcagtggctcacacgtgtaatc

SEQ ID NO: 159137 - DNA, 31 bp, Homo sapiens; identical to SEQ ID NO: 75552
  chr8:3881023-3881054
  hypo

SEQ ID NO: 159138 - DNA, 30 bp, Homo sapiens
  chr8:3970388-3970418
  hypo
gaaggcttgtaccaacgtggcatcaagcaa

SEQ ID NO: 159139 - DNA, 49 bp, Homo sapiens
  chr8:4110696-4110745
  hypo
ctggtctattctcctcttctacgatcccgccccattcctagttatcatt

SEQ ID NO: 159140 - DNA, 43 bp, Homo sapiens; identical to SEQ ID NO: 75553
  chr8:4123573-4123616
  hypo

SEQ ID NO: 159141 - DNA, 32 bp, Homo sapiens
  chr8:4218293-4218325
  hypo
gtgtgagccactgcacccggcccctcggggtt

SEQ ID NO: 159142 - DNA, 30 bp, Homo sapiens
  chr8:4334882-4334912
  hypo
ctctccacaagccatcggcaacgcctcgat

SEQ ID NO: 159143 - DNA, 43 bp, Homo sapiens
  chr8:4880492-4880535
  hypo
agcaaaacaatgaaccagcaacgcatggtggctcacacctgta

SEQ ID NO: 159144 - DNA, 254 bp, Homo sapiens
  chr8:5829439-5829693
  hypo
tggcttcattctccccgacctgtgttatattttacaaaaacacctcgagactggctcacccaattgcctctgtgagcgcccctaggaacttgttttgaggctgaatacactccatctatgaccgctctgtttcccggcccttggccaatatagacccaatgtcctcaggttctttcccttctgcgagctgggtgacatcacttcagaccaatgccctattgtatgttagaaccaaaaagcgtttacatttccat

SEQ ID NO: 159145 - DNA, 28 bp, Homo sapiens
  chr8:5888100-5888128
  hypo
acagagcgagactccatctcaaaaaaaa

SEQ ID NO: 159146 - DNA, 30 bp, Homo sapiens; identical to SEQ ID NO: 22204
  chr8:5908962-5908992
  hypo

SEQ ID NO: 159147 - DNA, 30 bp, Homo sapiens
  chr8:5909525-5909555
  hypo
atctgctgcctccaccgtgggagcccggtg

SEQ ID NO: 159148 - DNA, 135 bp, Homo sapiens
  chr8:5909950-5910085
  hypo
ccaggcacaacgcctcgcagtccccgaaatccactctctacgtccatcatgggtctgtttgtccggcccccaggtatcatcgcagctgggctggcttctgagacgacttgcggagtcatccgtgaccccatgagt

SEQ ID NO: 159149 - DNA, 30 bp, Homo sapiens; identical to SEQ ID NO: 75556
  chr8:6081550-6081580
  hypo

SEQ ID NO: 159150 - DNA, 30 bp, Homo sapiens
  chr8:6171096-6171126
  hypo
aagaaacatgtatgacgcatcagtggtcca

SEQ ID NO: 159151 - DNA, 17 bp, Homo sapiens
  chr8:6173013-6173030
  hypo
ggcgacagggtgaaact

SEQ ID NO: 159152 - DNA, 17 bp, Homo sapiens
  chr8:6285336-6285353
  hypo
ggagtgtcgctctgtcg

SEQ ID NO: 159153 - DNA, 16 bp, Homo sapiens
  chr8:6285592-6285608
  hypo
acgcctcgcctatact

SEQ ID NO: 159154 - DNA, 43 bp, Homo sapiens; identical to SEQ ID NO: 75557
  chr8:6302321-6302364
  hypo

SEQ ID NO: 159155 - DNA, 377 bp, Homo sapiens; identical to SEQ ID NO: 75558
  chr8:6313798-6314175
  hypo

SEQ ID NO: 159156 - DNA, 271 bp, Homo sapiens
  chr8:6322706-6322977
  hypo
atctgtttgagatattcggaaactcaatagcttgctgaagtagcaaacttgaatccttatttttattttaaaagggagtaaagggactgtagataagtaaaagatgctctgcactgcgcctctctggtaccagtccctctcgtttaggcagcggccacttcccgcggagctgttcacgccaagtgaccctgccactgcgctgctcccaccaccccatgtccaccccgtcctcggacgcctggtctcagcacatcaccggtattctcttcct

SEQ ID NO: 159157 - DNA, 273 bp, Homo sapiens
  chr8:6323186-6323459
  hypo
aggaagggcggagggcgggggaggcctgcaaaccttacggcttatttccactgacatcagagactcatgttaataagtaacaagcggctttgtttgttatgctcctcagacacgcggtaaggtagacacacagaaatgcacagctgtacgtatttgtcttgaaggctagaatttactttaaatgtgagtggttttcccaggaaaaatttatgtctgttctcttgaggaataattatttcctactcaattttatctatcgatccatccatccat

SEQ ID NO: 159158 - DNA, 71 bp, Homo sapiens; identical to SEQ ID NO: 75560
  chr8:6345658-6345729
  hypo

SEQ ID NO: 159159 - DNA, 39 bp, Homo sapiens; identical to SEQ ID NO: 22205
  chr8:6361544-6361583
  hypo

SEQ ID NO: 159160 - DNA, 18 bp, Homo sapiens
  chr8:6381125-6381143
  hypo
ggagtctcggagtctcgc

SEQ ID NO: 159161 - DNA, 30 bp, Homo sapiens
  chr8:6400065-6400095
  hypo
cccaacaccccatcccgcactctcatcgct

SEQ ID NO: 159162 - DNA, 30 bp, Homo sapiens
  chr8:6400510-6400540
  hypo
aaaaagggagaggagcggacttgggaatgc

SEQ ID NO: 159163 - DNA, 170 bp, Homo sapiens; identical to SEQ ID NO: 75562
  chr8:6400934-6401104
  hypo

SEQ ID NO: 159164 - DNA, 342 bp, Homo sapiens; identical to SEQ ID NO: 75563
  chr8:6414546-6414888
  hypo

SEQ ID NO: 159165 - DNA, 263 bp, Homo sapiens; identical to SEQ ID NO: 75564
  chr8:6434437-6434700
  hypo

SEQ ID NO: 159166 - DNA, 103 bp, Homo sapiens; identical to SEQ ID NO: 75565
  chr8:6456167-6456270
  hypo

SEQ ID NO: 159167 - DNA, 160 bp, Homo sapiens; identical to SEQ ID NO: 22208
  chr8:6465691-6465851
  hypo

SEQ ID NO: 159168 - DNA, 30 bp, Homo sapiens; identical to SEQ ID NO: 75567
  chr8:6466802-6466832
  hypo

SEQ ID NO: 159169 - DNA, 30 bp, Homo sapiens; identical to SEQ ID NO: 75568
  chr8:6470114-6470144
  hypo

SEQ ID NO: 159170 - DNA, 30 bp, Homo sapiens; identical to SEQ ID NO: 75569
  chr8:6473580-6473610
  hypo

SEQ ID NO: 159171 - DNA, 30 bp, Homo sapiens; identical to SEQ ID NO: 75570
  chr8:6478536-6478566
  hypo

SEQ ID NO: 159172 - DNA, 30 bp, Homo sapiens; identical to SEQ ID NO: 75571
  chr8:6479831-6479861
  hypo

SEQ ID NO: 159173 - DNA, 30 bp, Homo sapiens
  chr8:6483162-6483192
  hypo
gtaatttgagccgggcgtggtggcccatgc

SEQ ID NO: 159174 - DNA, 30 bp, Homo sapiens
  chr8:6526308-6526338
  hypo
gcaagagttaggagccgtgggcaggcaaat

SEQ ID NO: 159175 - DNA, 85 bp, Homo sapiens
  chr8:6535109-6535194
  hypo
gtcctgctgttaaatcgctttgaaatgaggtgcagtgaacgatgggattccttcgaggattctgccatagcggccccgggataga

SEQ ID NO: 159176 - DNA, 44 bp, Homo sapiens
  chr8:6559147-6559191
  hypo
ccttgatctgtctattcccagcggtgtttttgtttttgttttga

SEQ ID NO: 159177 - DNA, 91 bp, Homo sapiens
  chr8:6590043-6590134
  hypo
aaaagtaaatgctctttctcccgatttgattgtggcagcatggaggaatctatgtaaagcgcagtgccaaatttaacgagaaagagatgcg

SEQ ID NO: 159178 - DNA, 31 bp, Homo sapiens; identical to SEQ ID NO: 22209
  chr8:6594590-6594621
  hypo

SEQ ID NO: 159179 - DNA, 24 bp, Homo sapiens
  chr8:6619645-6619669
  hypo
tccgtattaaaaaaaaaaaaaaaa

SEQ ID NO: 159180 - DNA, 474 bp, Homo sapiens
  chr8:6630574-6631048
  hypo
gcctgtctggacagccgcagatgaggagcagcgcctgcgttcatccacgctgggtgaaaggtaagaattcagggttacatgcgtgaaggggaaagcaagcgggaagcccttagcattcaagcccctgagctctggtgttgtccacccctgggggctgcctggtggcaggacggcacttcacgaggggagatggaccccagtgggaaccacactcaatccctctacgcccaggccgctgtcagacactggagtcctccgcacagtcctgcagccggaagcacacgctgccagtatcccctccctcccactcccagcctacagacaagcgcatctctgctgcattcatcgccgcacacgccctaaaaatgtcctcacgtgagtctgtgccagcctgcgcgcaaaccgtgagcccaccgcgctgtgtgcacgctcagcttcccccaggctgcgtccctcccccgtggggtcgcattc

SEQ ID NO: 159181 - DNA, 30 bp, Homo sapiens
  chr8:6632718-6632748
  hypo
cttggggaaagggagcgaccacacactggg

SEQ ID NO: 159182 - DNA, 111 bp, Homo sapiens
  chr8:6633000-6633111
  hypo
atcgagaaacaccaccggctggaaatgtggctctgctcccgatctttgtctgcgttggcgagacaccggccgctctgggccggaatctctcatctacgaaaaagtgggtag

SEQ ID NO: 159183 - DNA, 30 bp, Homo sapiens; identical to SEQ ID NO: 75577
  chr8:6634817-6634847
  hypo

SEQ ID NO: 159184 - DNA, 230 bp, Homo sapiens; identical to SEQ ID NO: 22213
  chr8:6636291-6636521
  hypo

SEQ ID NO: 159185 - DNA, 20 bp, Homo sapiens
  chr8:6636747-6636767
  hypo
gctacgaggctgaggcggga

SEQ ID NO: 159186 - DNA, 103 bp, Homo sapiens; identical to SEQ ID NO: 75580
  chr8:6637650-6637753
  hypo

SEQ ID NO: 159187 - DNA, 70 bp, Homo sapiens
  chr8:6664119-6664189
  hypo
tctcacgcactggacgtggcacagcctgggcagcgccggcccctgtccttcctgcggacctgtgaggagc

SEQ ID NO: 159188 - DNA, 94 bp, Homo sapiens; identical to SEQ ID NO: 22215
  chr8:6707718-6707812
  hypo

SEQ ID NO: 159189 - DNA, 210 bp, Homo sapiens
  chr8:6756661-6756871
  hypo
ttgttctccaggagacgctctcccgaggatattttggcgcttgttctcccggtgggggggagctctctcgaggatatctgggctgcttgttctccagggggagctctctcgaggatatctgggtgcttgttcttcggggggcgctgtctcgaggatatttgggctgcctccggagtcgcagtgttatcggaaagtgggtgacgtgcggat

SEQ ID NO: 159190 - DNA, 30 bp, Homo sapiens
  chr8:6767874-6767904
  hypo
tggtctggggacaggcgacacacctgagtg

SEQ ID NO: 159191 - DNA, 78 bp, Homo sapiens; identical to SEQ ID NO: 75583
  chr8:8102809-8102887
  hypo

SEQ ID NO: 159192 - DNA, 37 bp, Homo sapiens; identical to SEQ ID NO: 75584
  chr8:8122016-8122053
  hypo

SEQ ID NO: 159193 - DNA, 548 bp, Homo sapiens; identical to SEQ ID NO: 75585
  chr8:8176210-8176758
  hypo

SEQ ID NO: 159194 - DNA, 30 bp, Homo sapiens; identical to SEQ ID NO: 45069
  chr8:8217417-8217447
  hypo

SEQ ID NO: 159195 - DNA, 30 bp, Homo sapiens; identical to SEQ ID NO: 75587
  chr8:8239128-8239158
  hypo

SEQ ID NO: 159196 - DNA, 31 bp, Homo sapiens; identical to SEQ ID NO: 45070
  chr8:8313040-8313071
  hypo

SEQ ID NO: 159197 - DNA, 31 bp, Homo sapiens; identical to SEQ ID NO: 22218
  chr8:8436500-8436531
  hypo

SEQ ID NO: 159198 - DNA, 31 bp, Homo sapiens; identical to SEQ ID NO: 75590
  chr8:8437500-8437531
  hypo

SEQ ID NO: 159199 - DNA, 158 bp, Homo sapiens; identical to SEQ ID NO: 75591
  chr8:8456540-8456698
  hypo

SEQ ID NO: 159200 - DNA, 329 bp, Homo sapiens
  chr8:8471120-8471449
  hypo
gctgggattacaggcatgaaccaccgcgcccgaactgtttctttcatagtgtagaggatgtttcatagagacgggtgttgccttatgggaggtggacaaaaagacacagaggaagggaacgaagcccaaagtctgcccgaggattctaggggaggagacaggaggagacacaaagggaaagcaaggagagcagaagccggaacgttcatccccactccactttttacacctgaccttgtcggaaaggggattatttagaaacaaccaagaataaaagggactttttctgcttcccccgccttacccgcgggcacctccacaatggcacc

SEQ ID NO: 159201 - DNA, 236 bp, Homo sapiens
  chr8:8522695-8522931
  hypo
tcgccgcccgccaggcgcccacgtgacctcgttgtctttgcggcatgtgcaaacttgttcacagctgtggctgttgtcatcacttcagcgggattatgtgcactgttggcacttcatgtgccgggtttaattgccatgtaaaatgccttcagaaagattatactatgattcagcattgaaaggaaaacttacggtgtattcagaaaggtgaggagacagagcgggtggggcggggg

SEQ ID NO: 159202 - DNA, 416 bp, Homo sapiens
  chr8:8560672-8561088
  hypo
ggcctacaccaactcggtggacgtcctcgacggggaggggtgggagtcccaggacgctccctcgtgcagcacccacccctgcgacagctcgctgccctgcgactccgacctctagacgcttgtagagcctggggggcgccgggtggcaaaggactcacccccgcacaggcccgcctggcttcgagttggaacccggacacttgcccctcactggtgtggatggaaatctgcctttcgtgggaccaaacaggactccttggacgattagttcaggttgggtttggttttcttcttaaagagtttagttttcctctccagagggatcagggtcctcttagggagtgacgggcttttcatatatttttgctgaagaatatatggaaagggtggcatttgcgtcacgtggaccagggaca

SEQ ID NO: 159203 - DNA, 26 bp, Homo sapiens
  chr8:8624330-8624356
  hypo
gagggagactccgtctcaaaaaaaaa

SEQ ID NO: 159204 - DNA, 40 bp, Homo sapiens; identical to SEQ ID NO: 22220
  chr8:8634036-8634076
  hypo

SEQ ID NO: 159205 - DNA, 40 bp, Homo sapiens; identical to SEQ ID NO: 22221
  chr8:8634315-8634355
  hypo

SEQ ID NO: 159206 - DNA, 361 bp, Homo sapiens
  chr8:8639464-8639825
  hypo
gcgggatgcagccgtagggccagccacacctctcccacgtgggacgcacctcttgtgacacttcttttggaaattctagttgcctcctgctttcctctgttctgttggcaaaagtggctttgaattctgcacaccccacggttctacctgccttgtcaggagtcttgcagtgaggccctcctggtctgaagcgatcccttcttccctgtattgcgctgtcttcagggcagggctcctcttgttacagtaggtagtcaggcacacataagcagggcagaagaacgccccccagcaaccatcaggtgagatggtcaggtggttgttacactgtctctctaaaataattggtgacagccggtgc

SEQ ID NO: 159207 - DNA, 216 bp, Homo sapiens; identical to SEQ ID NO: 45071
  chr8:8639884-8640100
  hypo

SEQ ID NO: 159208 - DNA, 156 bp, Homo sapiens; identical to SEQ ID NO: 75598
  chr8:8642144-8642300
  hypo

SEQ ID NO: 159209 - DNA, 201 bp, Homo sapiens; identical to SEQ ID NO: 75599
  chr8:8643102-8643303
  hypo

SEQ ID NO: 159210 - DNA, 21 bp, Homo sapiens
  chr8:8644604-8644625
  hypo
ttttgagacagagtctcgctc

SEQ ID NO: 159211 - DNA, 196 bp, Homo sapiens; identical to SEQ ID NO: 75601
  chr8:8651863-8652059
  hypo

SEQ ID NO: 159212 - DNA, 30 bp, Homo sapiens; identical to SEQ ID NO: 75602
  chr8:8652332-8652362
  hypo

SEQ ID NO: 159213 - DNA, 25 bp, Homo sapiens
  chr8:8667576-8667601
  hypo
aataatgatcagaagccaggccggg

SEQ ID NO: 159214 - DNA, 77 bp, Homo sapiens; identical to SEQ ID NO: 75604
  chr8:8669104-8669181
  hypo

SEQ ID NO: 159215 - DNA, 130 bp, Homo sapiens; identical to SEQ ID NO: 22225
  chr8:8673404-8673534
  hypo

SEQ ID NO: 159216 - DNA, 140 bp, Homo sapiens; identical to SEQ ID NO: 22226
  chr8:8680436-8680576
  hypo

SEQ ID NO: 159217 - DNA, 78 bp, Homo sapiens
  chr8:8680889-8680967
  hypo
ggacacggggccccgcgctccgatcctggtgctgcgctaactccctgcaagttcccgaaacaccgtgagtcctctggg

SEQ ID NO: 159218 - DNA, 201 bp, Homo sapiens; identical to SEQ ID NO: 22228
  chr8:8681181-8681382
  hypo

SEQ ID NO: 159219 - DNA, 31 bp, Homo sapiens; identical to SEQ ID NO: 22229
  chr8:8682667-8682698
  hypo

SEQ ID NO: 159220 - DNA, 31 bp, Homo sapiens; identical to SEQ ID NO: 22230
  chr8:8687219-8687250
  hypo

SEQ ID NO: 159221 - DNA, 30 bp, Homo sapiens; identical to SEQ ID NO: 75611
  chr8:8689136-8689166
  hypo

SEQ ID NO: 159222 - DNA, 30 bp, Homo sapiens; identical to SEQ ID NO: 22231
  chr8:8689405-8689435
  hypo

SEQ ID NO: 159223 - DNA, 160 bp, Homo sapiens; identical to SEQ ID NO: 22232
  chr8:8690236-8690396
  hypo

SEQ ID NO: 159224 - DNA, 175 bp, Homo sapiens; identical to SEQ ID NO: 22233
  chr8:8692862-8693037
  hypo

SEQ ID NO: 159225 - DNA, 20 bp, Homo sapiens
  chr8:8696336-8696356
  hypo
atccacgtaccttcaagctt

SEQ ID NO: 159226 - DNA, 31 bp, Homo sapiens; identical to SEQ ID NO: 75616
  chr8:8698201-8698232
  hypo

SEQ ID NO: 159227 - DNA, 106 bp, Homo sapiens; identical to SEQ ID NO: 22234
  chr8:8698609-8698715
  hypo

SEQ ID NO: 159228 - DNA, 22 bp, Homo sapiens
  chr8:8699710-8699732
  hypo
tttgaaacggaatttcgctctg

SEQ ID NO: 159229 - DNA, 142 bp, Homo sapiens
  chr8:8699971-8700113
  hypo
aataggcgtgagccaccatgcccgaccccacgtctgattttgaatgctaacatttcctcggtacacagtaactcacaacatcaaagtgacacaggacgcacgtgtaaatcgcactagaagcctcatccgtacagccttgcta

SEQ ID NO: 159230 - DNA, 284 bp, Homo sapiens
  chr8:8709480-8709764
  hypo
ctaataaggacagagcgctccctcaggaacagcgatgccaagcccagttttggatacatagggagtgggtggtggaatgccggcttccattcgaaggagacccctctccagcaccatgggagtcgcacccttagcagatattctgtcctccagagagctgaggtttcaggagtgccaagcaaggtataaatgtcattagcgtgagtacttaaaacataccacaatgtccaggtgcggtgactcacacctgtaatcacatttgggaagccgaggcgggcagatca

SEQ ID NO: 159231 - DNA, 121 bp, Homo sapiens; identical to SEQ ID NO: 75619
  chr8:8712565-8712686
  hypo

SEQ ID NO: 159232 - DNA, 79 bp, Homo sapiens; identical to SEQ ID NO: 75620
  chr8:8712745-8712824
  hypo

SEQ ID NO: 159233 - DNA, 160 bp, Homo sapiens
  chr8:8725340-8725500
  hypo
acaggcgtgagccaccgtgcctggccataaattgctatacttttttagtaacaggttaaaaaccctgggatctgagggaaagaccaattgtttaactccattcttcattctcaacatgtgtttcctaccgctaataaatggaactcgagtttttccatgg

SEQ ID NO: 159234 - DNA, 526 bp, Homo sapiens; identical to SEQ ID NO: 75622
  chr8:8731214-8731740
  hypo

SEQ ID NO: 159235 - DNA, 28 bp, Homo sapiens
  chr8:8744351-8744379
  hypo
gtggccaagcctagtggctcacgcttat

SEQ ID NO: 159236 - DNA, 1419 bp, Homo sapiens
  chr8:8748205-8749624
  hypo
tactgatggagctgggtggcccggagcagttcctggctgggggtggaccgcgccatgggcggggagctttccccctccgccttgccctctccactggtccctaggagcagcttatgcagcagcaaagagggatccctctggaagaagacattgaggatgtcgatgaggcgggtgaggttgtggaagacgtgctccttgagagccggactgtcctcaaagtagagtagcttgccgctctcatgcaggtaggagagggcactctgcagtcggtcctcggtcagacccgcctgcaggcccaagcgcgccgagtcccaccagcttagccacagtcgctgggcctgaggtggctggaaatgcagttcctccagcacctgccaggatcgaggcagtactctgtgtaagttggggaagatctctcggtgctcagcaactgacagcaacttgtcccgaaggcgtcgtaagtggcgcgggtccctgcagctaacaggcaacacgggggagaggatctgcagccggtggttgagcaggtattgaaaatgggccttgcgccgtcgaaggttcttgtccgaaacgccatagtaggctgcgtgggggctggcagagcgcagctcgaagtcccgggccagtgcctcgtccaccaccttggccaagcggctcagtccctccgcgtcgtgcttctcctgcagggcgatctggcggtgaatgtccagacatttctcctccagctcacgctctccgcacaggtctgcgtgggtgcccacgatgcacaccaccgcgtggggcactctcgccccgacccgatgcaagaaggagcccacggtggtaggaaagtggcgaggctcataggtggccaagttgaccaccagcacgtatagggcccctggggacaggaagaagggctggatcacctcataactttcatccccagctaagtcatacacgatgaaccgcaggccccgggaggcatcggccgtccagctggtcacctcgatgcccttgctcacagggggaggtgacggtgggtagcacttctccttgtcccctcctcctgggcatccctccactctctcctcggtgaggcagtggcgcagcaaagtctttcctgcagccttatgccccatcaggagcagcttgagccggggctgcaccgccggctgggaatgagccagttccttctggtaggctgcgatgtaggggatccccttcatgcagacctcgtaggggggctggatcagtgggttgtctttgatcttccacaaacccacccgggagagctggccaaagtggtcgggcagcaccgcgatctggttcccctgcagcacgagctcctccaggccggtcagctccacgatggagtccggcaggtagcggatgcggttattatccagccacaaggtgagaagccggcccaggcccgag

SEQ ID NO: 159237 - DNA, 376 bp, Homo sapiens; identical to SEQ ID NO: 45072
  chr8:8750283-8750659
  hypo

SEQ ID NO: 159238 - DNA, 31 bp, Homo sapiens; identical to SEQ ID NO: 75626
  chr8:8768214-8768245
  hypo

SEQ ID NO: 159239 - DNA, 158 bp, Homo sapiens; identical to SEQ ID NO: 75627
  chr8:8780058-8780216
  hypo

SEQ ID NO: 159240 - DNA, 30 bp, Homo sapiens; identical to SEQ ID NO: 75628
  chr8:8799027-8799057
  hypo

SEQ ID NO: 159241 - DNA, 40 bp, Homo sapiens
  chr8:8803668-8803708
  hypo
aaaaaaatagtatactccaactgtccgtgataacccaggt

SEQ ID NO: 159242 - DNA, 31 bp, Homo sapiens; identical to SEQ ID NO: 75629
  chr8:8806386-8806417
  hypo

SEQ ID NO: 159243 - DNA, 463 bp, Homo sapiens; identical to SEQ ID NO: 116149
  chr8:8820809-8821272
  hypo

SEQ ID NO: 159244 - DNA, 31 bp, Homo sapiens; identical to SEQ ID NO: 75632
  chr8:8842048-8842079
  hypo

SEQ ID NO: 159245 - DNA, 33 bp, Homo sapiens; identical to SEQ ID NO: 22242
  chr8:8850262-8850295
  hypo

SEQ ID NO: 159246 - DNA, 32 bp, Homo sapiens
  chr8:8850534-8850566
  hypo
gcgacagagcaagactccgtctcaaaaaacaa

SEQ ID NO: 159247 - DNA, 31 bp, Homo sapiens; identical to SEQ ID NO: 22243
  chr8:8851528-8851559
  hypo

SEQ ID NO: 159248 - DNA, 117 bp, Homo sapiens; identical to SEQ ID NO: 75635
  chr8:8898497-8898614
  hypo

SEQ ID NO: 159249 - DNA, 30 bp, Homo sapiens
  chr8:8908202-8908232
  hypo
aatgagtcagagttacggaaggaatggaga

SEQ ID NO: 159250 - DNA, 30 bp, Homo sapiens; identical to SEQ ID NO: 75636
  chr8:8910800-8910830
  hypo

SEQ ID NO: 159251 - DNA, 37 bp, Homo sapiens; identical to SEQ ID NO: 22245
  chr8:8922914-8922951
  hypo

SEQ ID NO: 159252 - DNA, 31 bp, Homo sapiens; identical to SEQ ID NO: 75638
  chr8:8926654-8926685
  hypo

SEQ ID NO: 159253 - DNA, 29 bp, Homo sapiens
  chr8:9412504-9412533
  hypo
caggcatgagccaccgtgaccagcctagc

SEQ ID NO: 159254 - DNA, 30 bp, Homo sapiens
  chr8:9416347-9416377
  hypo
gtagtcagtttgccacgcttccgtgattga

SEQ ID NO: 159255 - DNA, 28 bp, Homo sapiens
  chr8:9487193-9487221
  hypo
ttgcttgtttgttttttgagacgaagtc

SEQ ID NO: 159256 - DNA, 30 bp, Homo sapiens; identical to SEQ ID NO: 22246
  chr8:9525662-9525692
  hypo

SEQ ID NO: 159257 - DNA, 30 bp, Homo sapiens; identical to SEQ ID NO: 22247
  chr8:9537307-9537337
  hypo

SEQ ID NO: 159258 - DNA, 30 bp, Homo sapiens
  chr8:9599191-9599221
  hypo
acgtgtgtgtcactcgatgaccactgtgaa

SEQ ID NO: 159259 - DNA, 120 bp, Homo sapiens
  chr8:9637605-9637725
  hypo
atatatgccggagaacggcattagaatgcaataagttgtctaggtttttctgtttcagtgtctctcccaatggcacgaagggttattgggcattgtccccacccccgcctttttaacatg

SEQ ID NO: 159260 - DNA, 31 bp, Homo sapiens
  chr8:9686535-9686566
  hypo
ttcatttaatgggatccggatacaccttcgt

SEQ ID NO: 159261 - DNA, 30 bp, Homo sapiens
  chr8:9688484-9688514
  hypo
caacatatctccaggcggaggagctttatt

SEQ ID NO: 159262 - DNA, 1245 bp, Homo sapiens; identical to SEQ ID NO: 116157
  chr8:9760513-9761758
  hypo

SEQ ID NO: 159263 - DNA, 30 bp, Homo sapiens; identical to SEQ ID NO: 116159
  chr8:9762659-9762689
  hypo

SEQ ID NO: 159264 - DNA, 1010 bp, Homo sapiens; identical to SEQ ID NO: 116160
  chr8:9762751-9763761
  hypo

SEQ ID NO: 159265 - DNA, 262 bp, Homo sapiens; identical to SEQ ID NO: 6095
  chr8:9763787-9764049
  hypo

SEQ ID NO: 159266 - DNA, 551 bp, Homo sapiens; identical to SEQ ID NO: 45083
  chr8:9764195-9764746
  hypo

SEQ ID NO: 159267 - DNA, 30 bp, Homo sapiens
  chr8:10005408-10005438
  hypo
tcctcagactgatgcgaaactccaaagagc

SEQ ID NO: 159268 - DNA, 186 bp, Homo sapiens; identical to SEQ ID NO: 45085
  chr8:10058671-10058857
  hypo

SEQ ID NO: 159269 - DNA, 30 bp, Homo sapiens
  chr8:10117966-10117996
  hypo
gcacacgtacacaagcgaggcagcacgcag

SEQ ID NO: 159270 - DNA, 156 bp, Homo sapiens
  chr8:10192942-10193098
  hypo
cgagcctgaatgtttcgaaaattatcttcgtcttgctgggttcgctgctgaactggggaggcgattggaattaccatctggcctcagagctgcgggtgactcttgtcctgaccccgtggcctagtgaacagatgaccccggcgcctgatcttgtac

SEQ ID NO: 159271 - DNA, 513 bp, Homo sapiens; identical to SEQ ID NO: 22251
  chr8:10261661-10262174
  hypo

SEQ ID NO: 159272 - DNA, 142 bp, Homo sapiens; identical to SEQ ID NO: 75650
  chr8:10283195-10283337
  hypo

SEQ ID NO: 159273 - DNA, 233 bp, Homo sapiens; identical to SEQ ID NO: 75651
  chr8:10466916-10467149
  hypo

SEQ ID NO: 159274 - DNA, 30 bp, Homo sapiens
  chr8:10468359-10468389
  hypo
gtggaggcagacacccggccaggaagtgcc

SEQ ID NO: 159275 - DNA, 30 bp, Homo sapiens
  chr8:10468719-10468749
  hypo
ttgtccagccattcgcggaccacagcctct

SEQ ID NO: 159276 - DNA, 30 bp, Homo sapiens
  chr8:10469013-10469043
  hypo
ctctgggggcagggccgccccctgggcggg

SEQ ID NO: 159277 - DNA, 391 bp, Homo sapiens; identical to SEQ ID NO: 116169
  chr8:10587211-10587602
  hypo

SEQ ID NO: 159278 - DNA, 114 bp, Homo sapiens; identical to SEQ ID NO: 45087
  chr8:10587893-10588007
  hypo

SEQ ID NO: 159279 - DNA, 30 bp, Homo sapiens
  chr8:10614188-10614218
  hypo
agaatgcggctcttacggggctgtgctgag

SEQ ID NO: 159280 - DNA, 30 bp, Homo sapiens
  chr8:10621920-10621950
  hypo
caaggcgcggcgggcgagggcggcacaagc

SEQ ID NO: 159281 - DNA, 27 bp, Homo sapiens
  chr8:10652911-10652938
  hypo
tctctctcccccacaccaagacggagt

SEQ ID NO: 159282 - DNA, 203 bp, Homo sapiens; identical to SEQ ID NO: 22254
  chr8:10683499-10683702
  hypo

SEQ ID NO: 159283 - DNA, 137 bp, Homo sapiens; identical to SEQ ID NO: 75656
  chr8:10694852-10694989
  hypo

SEQ ID NO: 159284 - DNA, 31 bp, Homo sapiens; identical to SEQ ID NO: 22255
  chr8:10695375-10695406
  hypo

SEQ ID NO: 159285 - DNA, 43 bp, Homo sapiens; identical to SEQ ID NO: 75658
  chr8:10798363-10798406
  hypo

SEQ ID NO: 159286 - DNA, 1160 bp, Homo sapiens; identical to SEQ ID NO: 45091
  chr8:10873135-10874295
  hypo

SEQ ID NO: 159287 - DNA, 16 bp, Homo sapiens
  chr8:11049934-11049950
  hypo
acgtgagccacagcgc

SEQ ID NO: 159288 - DNA, 43 bp, Homo sapiens; identical to SEQ ID NO: 116181
  chr8:11058123-11058166
  hypo

SEQ ID NO: 159289 - DNA, 976 bp, Homo sapiens; identical to SEQ ID NO: 116182
  chr8:11058198-11059174
  hypo

SEQ ID NO: 159290 - DNA, 181 bp, Homo sapiens
  chr8:11143734-11143915
  hypo
acaggcgtgagccactgcgcctggcctaaaataaaaatttctaatggtagaattgcaggcagtttgggtgaagccatggtagattgattgattgatatgagcagggggctcttattagtctcctcaagccaccttttgctgtataaagtcttcagtgggcccggcacggtggctcacgcct

SEQ ID NO: 159291 - DNA, 89 bp, Homo sapiens
  chr8:11144655-11144744
  hypo
catttttatctccttcgaaacgtctaactgtggcttgggcatatagacgcgtaggaaacaaaagaaggattgaccgctgaatggtcaga

SEQ ID NO: 159292 - DNA, 88 bp, Homo sapiens; identical to SEQ ID NO: 75663
  chr8:11163742-11163830
  hypo

SEQ ID NO: 159293 - DNA, 137 bp, Homo sapiens; identical to SEQ ID NO: 75664
  chr8:11182857-11182994
  hypo

SEQ ID NO: 159294 - DNA, 896 bp, Homo sapiens; identical to SEQ ID NO: 116184
  chr8:11204525-11205421
  hypo

SEQ ID NO: 159295 - DNA, 264 bp, Homo sapiens; identical to SEQ ID NO: 45099
  chr8:11205445-11205709
  hypo

SEQ ID NO: 159296 - DNA, 333 bp, Homo sapiens
  chr8:11218928-11219261
  hypo
gaatcttcgggagatcgtggtaaacaaccgcatcacctggctgtttcattacagcgctttgctcagcgcctttggagaagcaaatgtttccctggcgagagcagtgaatataactggtaagcatctggctctggctggatgtgatttatttgccagtttttctagttctttaagaagagatgttttcagattctgatagtgtctgttcatttcaggcctgcataacatcctggatgtcgctgcggaacacaatctgcaattgtttgtgcctagcacgattggggcttttggacccacctctccccggaacccaacccccgatctctgtattca

SEQ ID NO: 159297 - DNA, 30 bp, Homo sapiens
  chr8:11247032-11247062
  hypo
gagagagggaggccacgctgattattcttg

SEQ ID NO: 159298 - DNA, 30 bp, Homo sapiens
  chr8:11300288-11300318
  hypo
gcacatgcaccctctcgttactaaagacgg

SEQ ID NO: 159299 - DNA, 30 bp, Homo sapiens; identical to SEQ ID NO: 75667
  chr8:11302015-11302045
  hypo

SEQ ID NO: 159300 - DNA, 61 bp, Homo sapiens; identical to SEQ ID NO: 75668
  chr8:11366264-11366325
  hypo

SEQ ID NO: 159301 - DNA, 30 bp, Homo sapiens
  chr8:11402631-11402661
  hypo
tgtggctccgtgttacgcatgtgaaacata

SEQ ID NO: 159302 - DNA, 30 bp, Homo sapiens; identical to SEQ ID NO: 22260
  chr8:11474041-11474071
  hypo

SEQ ID NO: 159303 - DNA, 150 bp, Homo sapiens
  chr8:11483116-11483266
  hypo
aggagtgggagagagcggccccccagggcaggctggggaggtgaggcagggggtagggttttgctgaagacggtgagggaggctggggaaggccagatgaggtggggctggccgaagtgaggtgggggttgattccgagacgtcgctggg

SEQ ID NO: 159304 - DNA, 688 bp, Homo sapiens; identical to SEQ ID NO: 116196
  chr8:11550050-11550738
  hypo

SEQ ID NO: 159305 - DNA, 67 bp, Homo sapiens; identical to SEQ ID NO: 22261
  chr8:11612346-11612413
  hypo

SEQ ID NO: 159306 - DNA, 31 bp, Homo sapiens; identical to SEQ ID NO: 75672
  chr8:11637202-11637233
  hypo

SEQ ID NO: 159307 - DNA, 30 bp, Homo sapiens; identical to SEQ ID NO: 75673
  chr8:11644629-11644659
  hypo

SEQ ID NO: 159308 - DNA, 180 bp, Homo sapiens
  chr8:11645474-11645654
  hypo
tcttgtactgaaggctcctcccgcacggggtgctctccctgtgtcgagggctgtgtctcccccacccagttctcaccacttcgcttacttcttgcacatgatctacaaaacaacacatgaagacaggtcctcaaccttgttgtccttaagttatagatgagaaaacggaagagtctagag

SEQ ID NO: 159309 - DNA, 76 bp, Homo sapiens
  chr8:11646749-11646825
  hypo
aggcgcgggccacggcggcactgggctctgttggtgtcagctggccaacagtgtgggcaccggggcaaggagggaa

SEQ ID NO: 159310 - DNA, 287 bp, Homo sapiens
  chr8:11647193-11647480
  hypo
aaatgtaagtggagaaaggaacgtccaaggagaagcgggctgtcgctatggtgaatcatgcagagatgaaggcgggacgatggagcagtggccccttgggcttggcaggtgatcaaattcgaggtcatgatgaccttcaggagagcactgtgtgcagagtgccagcagtgggaagggaccgggtgggagggaggacgtggaatgtgagggtggtctcccctgcaggaagtttggccttggaggggatgaaaatgaagggcagggaggagtcgcgagcgaacaagcag

SEQ ID NO: 159311 - DNA, 42 bp, Homo sapiens; identical to SEQ ID NO: 75676
  chr8:11657163-11657205
  hypo

SEQ ID NO: 159312 - DNA, 69 bp, Homo sapiens
  chr8:11669211-11669280
  hypo
aaagcacagttgccccgggaagagtaaaagggagcagaaggcgtaagccaggcacggctgttttcactg

SEQ ID NO: 159313 - DNA, 30 bp, Homo sapiens
  chr8:11669761-11669791
  hypo
ctgagcccacgtctgcgtccgcacagtcta

SEQ ID NO: 159314 - DNA, 30 bp, Homo sapiens; identical to SEQ ID NO: 75677
  chr8:11701704-11701734
  hypo

SEQ ID NO: 159315 - DNA, 55 bp, Homo sapiens
  chr8:11704224-11704279
  hypo
gaaggcgagggcaggcgtggccagccaccagggaggggggcgttcccacagagaa

SEQ ID NO: 159316 - DNA, 208 bp, Homo sapiens
  chr8:11704539-11704747
  hypo
ccatcagccatcagcacgcacctgacttgtagagcaggaagtccgaatacacagagaaagctccctccacggggccgtttttgtagatctcggccatgatgtccttctcgctattggagacgctgtaggaattgtatcctggaaaatgaaccgagctcggggttggggagggcagtgaccgtgcctcgtggcacgccacggtcagcca

SEQ ID NO: 159317 - DNA, 246 bp, Homo sapiens; identical to SEQ ID NO: 75679
  chr8:11705916-11706162
  hypo

SEQ ID NO: 159318 - DNA, 226 bp, Homo sapiens; identical to SEQ ID NO: 75680
  chr8:11706507-11706733
  hypo

SEQ ID NO: 159319 - DNA, 161 bp, Homo sapiens; identical to SEQ ID NO: 75681
  chr8:11708329-11708490
  hypo

SEQ ID NO: 159320 - DNA, 152 bp, Homo sapiens; identical to SEQ ID NO: 75682
  chr8:11711012-11711164
  hypo

SEQ ID NO: 159321 - DNA, 93 bp, Homo sapiens
  chr8:11712325-11712418
  hypo
gggcagcacatgtgtcgtaaaatgctgggtgatgctcatcagcacagcacccaacggaccactcagaagcacatcctccgtggaggaatcagc

SEQ ID NO: 159322 - DNA, 270 bp, Homo sapiens; identical to SEQ ID NO: 116208
  chr8:11726003-11726273
  hypo

SEQ ID NO: 159323 - DNA, 30 bp, Homo sapiens; identical to SEQ ID NO: 22265
  chr8:11728543-11728573
  hypo

SEQ ID NO: 159324 - DNA, 30 bp, Homo sapiens
  chr8:11772244-11772274
  hypo
ggtgatatttctccccgcatcgtgggggtc

SEQ ID NO: 159325 - DNA, 36 bp, Homo sapiens
  chr8:11883052-11883088
  hypo
ggagtccccaggtccacaccccgggctaggcccagt

SEQ ID NO: 159326 - DNA, 226 bp, Homo sapiens; identical to SEQ ID NO: 75685
  chr8:12623674-12623900
  hypo

SEQ ID NO: 159327 - DNA, 30 bp, Homo sapiens
  chr8:12671858-12671888
  hypo
ctcaatcaggtcttccgtgaccacacaggg

SEQ ID NO: 159328 - DNA, 30 bp, Homo sapiens
  chr8:12678674-12678704
  hypo
tggatggagttgaaacgggaaaagttacct

SEQ ID NO: 159329 - DNA, 30 bp, Homo sapiens
  chr8:12679196-12679226
  hypo
cttctgcctgcctgccgcttgccttgtctt

SEQ ID NO: 159330 - DNA, 92 bp, Homo sapiens
  chr8:12869538-12869630
  hypo
gcttagaggctacacgtggtctctcggatactagaactatctttcttgccttggaccagctaacgtgccttggttgcgccagtgtactgagc

SEQ ID NO: 159331 - DNA, 30 bp, Homo sapiens
  chr8:12898954-12898984
  hypo
catggtaattacactcgacggcctgtcact

SEQ ID NO: 159332 - DNA, 212 bp, Homo sapiens; identical to SEQ ID NO: 75687
  chr8:12950149-12950361
  hypo

SEQ ID NO: 159333 - DNA, 30 bp, Homo sapiens; identical to SEQ ID NO: 22268
  chr8:12952489-12952519
  hypo

SEQ ID NO: 159334 - DNA, 347 bp, Homo sapiens; identical to SEQ ID NO: 75689
  chr8:12957815-12958162
  hypo

SEQ ID NO: 159335 - DNA, 159 bp, Homo sapiens
  chr8:12959264-12959423
  hypo
ccagccctgacagctcgcggcattcataaacactaaggaacgtctttgctgattatgcccgatttatgtacaggactcagggataagctgtcacacggactattgcatcttggccttttcggcaggatatcaaagggcacaattcggtatgatacatgt

SEQ ID NO: 159336 - DNA, 30 bp, Homo sapiens
  chr8:13029508-13029538
  hypo
atcagtacatctacacgccatcactaccat

SEQ ID NO: 159337 - DNA, 34 bp, Homo sapiens; identical to SEQ ID NO: 75690
  chr8:13189948-13189982
  hypo

SEQ ID NO: 159338 - DNA, 30 bp, Homo sapiens
  chr8:13581231-13581261
  hypo
gtgattgtacgtggccgtcagtgccgcccc

SEQ ID NO: 159339 - DNA, 30 bp, Homo sapiens; identical to SEQ ID NO: 6119
  chr8:13624575-13624605
  hypo

SEQ ID NO: 159340 - DNA, 18 bp, Homo sapiens
  chr8:13770829-13770847
  hypo
ttacgggcatgagccacc

SEQ ID NO: 159341 - DNA, 30 bp, Homo sapiens
  chr8:15351720-15351750
  hypo
gtggatgtcgtatggcgtttattatctaaa

SEQ ID NO: 159342 - DNA, 30 bp, Homo sapiens
  chr8:15664654-15664684
  hypo
caaagcaatcacagccgtatgtgcatcctc

SEQ ID NO: 159343 - DNA, 35 bp, Homo sapiens
  chr8:16459747-16459782
  hypo
ccccctcctggctcccgatccgtctgctgagagcc

SEQ ID NO: 159344 - DNA, 154 bp, Homo sapiens
  chr8:16459901-16460055
  hypo
cagaaggtctaattgagctaattaacacaagccacctgtgttaaggctaagctgaaagagcgcactgtaatacgagcccactggggctttgagagctgtaaacactcaaccctaaacgctgcagtggggttgaagcccgcgctccccacgacct

SEQ ID NO: 159345 - DNA, 1202 bp, Homo sapiens; identical to SEQ ID NO: 45128
  chr8:16884157-16885359
  hypo

SEQ ID NO: 159346 - DNA, 30 bp, Homo sapiens
  chr8:17029069-17029099
  hypo
taaatacaaacattccgtgaatgtttaccc

SEQ ID NO: 159347 - DNA, 30 bp, Homo sapiens
  chr8:17029828-17029858
  hypo
cgtctcaaagtgtggcgttttctctaactc

SEQ ID NO: 159348 - DNA, 102 bp, Homo sapiens
  chr8:17360873-17360975
  hypo
gaaaaaaattttatgcttcagaagggtggctttttctttagatcgcgagttttttccttcctgaaattcactttatattcactcccgcggtgttccttatct

SEQ ID NO: 159349 - DNA, 400 bp, Homo sapiens; identical to SEQ ID NO: 116234
  chr8:17434526-17434926
  hypo

SEQ ID NO: 159350 - DNA, 31 bp, Homo sapiens; identical to SEQ ID NO: 22272
  chr8:17453694-17453725
  hypo

SEQ ID NO: 159351 - DNA, 123 bp, Homo sapiens
  chr8:17478544-17478667
  hypo
gtcttttattcctagcgtcaagcagaatgagcgctacggccagttgactctggtcaactccacctcggcagacacaggtgaattcagctgctgggtgcagctctgcagcggctacatctgcag

SEQ ID NO: 159352 - DNA, 31 bp, Homo sapiens; identical to SEQ ID NO: 75695
  chr8:17489660-17489691
  hypo

SEQ ID NO: 159353 - DNA, 35 bp, Homo sapiens; identical to SEQ ID NO: 75696
  chr8:17574338-17574373
  hypo

SEQ ID NO: 159354 - DNA, 30 bp, Homo sapiens
  chr8:17595788-17595818
  hypo
tttgctgcataaacacgcactctccctcct

SEQ ID NO: 159355 - DNA, 101 bp, Homo sapiens
  chr8:17648491-17648592
  hypo
tgggggcggggagaagttttatcccatttcagcaccaatgtatagaaaatcctggcaacagaaacttattacttccactcgcattaaaactagtcaaataa

SEQ ID NO: 159356 - DNA, 30 bp, Homo sapiens; identical to SEQ ID NO: 75698
  chr8:17651536-17651566
  hypo

SEQ ID NO: 159357 - DNA, 211 bp, Homo sapiens
  chr8:17767555-17767766
  hypo
tgagacgctcagcttcgtcatctttctcagctcccgaaaggacaggtcggagggaccagtcttcttcctctttggattcttccctttcttctgtccggtcggtgtagggttcattgcagaatttcaaatgtctattgggtatctaaatgggtgtttgattgtctcctggtgaaacacaagcaaaagcccttccccgcgtcataatttttct

SEQ ID NO: 159358 - DNA, 30 bp, Homo sapiens; identical to SEQ ID NO: 75699
  chr8:17769550-17769580
  hypo

SEQ ID NO: 159359 - DNA, 100 bp, Homo sapiens; identical to SEQ ID NO: 75700
  chr8:17910134-17910234
  hypo

SEQ ID NO: 159360 - DNA, 30 bp, Homo sapiens
  chr8:18083102-18083132
  hypo
tgaccgagagaaacacgtatgcctagtctc

SEQ ID NO: 159361 - DNA, 30 bp, Homo sapiens; identical to SEQ ID NO: 45137
  chr8:18272865-18272895
  hypo

SEQ ID NO: 159362 - DNA, 37 bp, Homo sapiens; identical to SEQ ID NO: 75702
  chr8:18381896-18381933
  hypo

SEQ ID NO: 159363 - DNA, 38 bp, Homo sapiens; identical to SEQ ID NO: 75703
  chr8:18474404-18474442
  hypo

SEQ ID NO: 159364 - DNA, 30 bp, Homo sapiens
  chr8:18528026-18528056
  hypo
aaggcaggcagtggcggattagggacggat

SEQ ID NO: 159365 - DNA, 88 bp, Homo sapiens
  chr8:18541366-18541454
  hypo
cccgggagtatttcacggaacctgaggtcctcacccgtaccttgctggcactctggacactattcacgccaatcattttcgaaggtca

SEQ ID NO: 159366 - DNA, 30 bp, Homo sapiens; identical to SEQ ID NO: 45138
  chr8:18671751-18671781
  hypo

SEQ ID NO: 159367 - DNA, 23 bp, Homo sapiens
  chr8:18699953-18699976
  hypo
atggctttggccgggcgcggtgg

SEQ ID NO: 159368 - DNA, 31 bp, Homo sapiens; identical to SEQ ID NO: 75707
  chr8:18797737-18797768
  hypo

SEQ ID NO: 159369 - DNA, 29 bp, Homo sapiens
  chr8:18867070-18867099
  hypo
ccaggaaaatatcactcgaaataagcgtt

SEQ ID NO: 159370 - DNA, 1086 bp, Homo sapiens; identical to SEQ ID NO: 116244
  chr8:18870211-18871297
  hypo

SEQ ID NO: 159371 - DNA, 27 bp, Homo sapiens
  chr8:18913046-18913073
  hypo
gccaccgtgcccggccgatttgtagac

SEQ ID NO: 159372 - DNA, 30 bp, Homo sapiens; identical to SEQ ID NO: 22276
  chr8:19034822-19034852
  hypo

SEQ ID NO: 159373 - DNA, 78 bp, Homo sapiens; identical to SEQ ID NO: 22277
  chr8:19068612-19068690
  hypo

SEQ ID NO: 159374 - DNA, 336 bp, Homo sapiens
  chr8:19094993-19095329
  hypo
gcggctcgtccttccccggcccggctgctgaggtggcggtgactgtggggcagccgggccgtgcacgtctggagaccgcccgggcgctggccgcggctggaccccgggagccgaaccgcgggagggcgctgtgcggagccggtggtggcctgctcgacggaggtggccgccgtcaccctactggtcctgtgatacgtgcccaaggactgcccgggagccagacctgccagcgggtgcaggacaccaaggtcaagactggagcagggagaaatagtgctgcggcctggagaagcgcatcagccaggaccagaggacatctgcgagctgccgggcggc

SEQ ID NO: 159375 - DNA, 36 bp, Homo sapiens; identical to SEQ ID NO: 75713
  chr8:19192505-19192541
  hypo

SEQ ID NO: 159376 - DNA, 39 bp, Homo sapiens
  chr8:19335637-19335676
  hypo
tgtctgggccgggtgcggtggctcacgcctgtaatctca

SEQ ID NO: 159377 - DNA, 61 bp, Homo sapiens
  chr8:19460932-19460993
  hypo
ctcggtcctctactgcggtgcctgcgcggctcccaccacccacttccgcctctgcctggcc

SEQ ID NO: 159378 - DNA, 292 bp, Homo sapiens; identical to SEQ ID NO: 22279
  chr8:19690582-19690874
  hypo

SEQ ID NO: 159379 - DNA, 63 bp, Homo sapiens
  chr8:19706753-19706816
  hypo
ccaagtggaatcaacgcccgctcatagtgtgctgtttgtcaacatgttcgctgcccatggttc

SEQ ID NO: 159380 - DNA, 65 bp, Homo sapiens
  chr8:19715649-19715714
  hypo
atctgcaagcttcggcgaatcaggtcatgtcccagcttgtttggtcctgccgccctgcccaggcc

SEQ ID NO: 159381 - DNA, 30 bp, Homo sapiens
  chr8:19719134-19719164
  hypo
tactttgataggagcggttctccagagaag

SEQ ID NO: 159382 - DNA, 786 bp, Homo sapiens; identical to SEQ ID NO: 6133
  chr8:19796822-19797608
  hypo

SEQ ID NO: 159383 - DNA, 412 bp, Homo sapiens; identical to SEQ ID NO: 6134
  chr8:19797677-19798089
  hypo

SEQ ID NO: 159384 - DNA, 30 bp, Homo sapiens; identical to SEQ ID NO: 22283
  chr8:20083596-20083626
  hypo

SEQ ID NO: 159385 - DNA, 21 bp, Homo sapiens
  chr8:20084212-20084233
  hypo
ccaccgcgcccggcctgttct

SEQ ID NO: 159386 - DNA, 30 bp, Homo sapiens; identical to SEQ ID NO: 75720
  chr8:20090210-20090240
  hypo

SEQ ID NO: 159387 - DNA, 359 bp, Homo sapiens
  chr8:20107411-20107770
  hypo
tctccttctcctccttccacacgagccgctcatgctggaagcccgaggacatctggtcatggccttgccgctcctcccgcagctcggcccgcagccgctccagctcccgctgcagggcagggacgtcctcggggaaggtgggcggccccatgtcgcgggccagggcggcctgggcccgcagctcctgcagctcctgctccagcaggttcaccttctcccgcagcagctccgcctcgttcttcttgcgctgcagctcattctcacagacctccagctccaggcccttggtgcgcagggcgccctccaggtcctgggtcctcagctccaggccctccagcttgccccgcgtgtccttcagc

SEQ ID NO: 159388 - DNA, 247 bp, Homo sapiens
  chr8:20110390-20110637
  hypo
tctcgagctcctgccggagctgccgcttctcctgctgaagctgcagtacctgcaggtgcaggacctgctgcgcgcgctggctcttctgcgaggcctgcttgagcttgttgccgcctttgggctccgggccctccagctcgtccctgcagcgccgcggccgctcctcgtaggccaggctggaggcaagctccttctcctcaaagctgcgctgcagcttctggagggcgccctccctctccaacagctt

SEQ ID NO: 159389 - DNA, 660 bp, Homo sapiens; identical to SEQ ID NO: 116258
  chr8:20160990-20161650
  hypo

SEQ ID NO: 159390 - DNA, 15 bp, Homo sapiens
  chr8:20161666-20161681
  hypo
cgcggggtcccgggt

SEQ ID NO: 159391 - DNA, 23 bp, Homo sapiens
  chr8:20433540-20433563
  hypo
agccaccgcgcccggcccctgcc

SEQ ID NO: 159392 - DNA, 30 bp, Homo sapiens
  chr8:20770523-20770553
  hypo
aggtgattggtcccccgcctcaccccagtg

SEQ ID NO: 159393 - DNA, 159 bp, Homo sapiens; identical to SEQ ID NO: 75724
  chr8:20793600-20793759
  hypo

SEQ ID NO: 159394 - DNA, 30 bp, Homo sapiens
  chr8:21433484-21433514
  hypo
tgcttagaagcggagcgactctgggcgtag

SEQ ID NO: 159395 - DNA, 196 bp, Homo sapiens; identical to SEQ ID NO: 75725
  chr8:21590920-21591116
  hypo

SEQ ID NO: 159396 - DNA, 186 bp, Homo sapiens
  chr8:21608109-21608295
  hypo
ggtcagtccggcacacgccacgcaggtccaggcagttgggcttctccttgtcctcataggagcagctgggcaggatggtttgccggcggcgctcagcgcacgcctggtcttggcaggagcagaagagcatgcggtaggtgtactcgctgggcacccggtcgaagaactggcgcagggccttgtggc

SEQ ID NO: 159397 - DNA, 87 bp, Homo sapiens; identical to SEQ ID NO: 75727
  chr8:21624002-21624089
  hypo

SEQ ID NO: 159398 - DNA, 88 bp, Homo sapiens
  chr8:21718692-21718780
  hypo
ctacgcagcattccccgtggtgcggctcccgggtggctgtcagctggatccagggcccgtcaagaatcatcgagcatggctgggcgtg

SEQ ID NO: 159399 - DNA, 30 bp, Homo sapiens; identical to SEQ ID NO: 75728
  chr8:21764124-21764154
  hypo

SEQ ID NO: 159400 - DNA, 233 bp, Homo sapiens
  chr8:21769764-21769997
  hypo
tgcacccagtcgccgcgctccgctgcaggggccgccaggaggtacaggcgctccttggtctccaggaagaaggcactggtgtcccgggggctgctggcctctccgccggcctcggccacccgcaggcagtcactgaggcggatgaccttccgggcagcctcacaccgacgaggcttctccgggccctcctgcagctccagccgggccaaggcgcagtccgaccctccatacag

SEQ ID NO: 159401 - DNA, 30 bp, Homo sapiens; identical to SEQ ID NO: 75730
  chr8:21770270-21770300
  hypo

SEQ ID NO: 159402 - DNA, 30 bp, Homo sapiens; identical to SEQ ID NO: 75731
  chr8:21802730-21802760
  hypo

SEQ ID NO: 159403 - DNA, 31 bp, Homo sapiens
  chr8:21842213-21842244
  hypo
gctgtccaccattgggcgttgtgaatatgag

SEQ ID NO: 159404 - DNA, 30 bp, Homo sapiens
  chr8:21864004-21864034
  hypo
gcgtgatcaggttgcggatagacttgtaag

SEQ ID NO: 159405 - DNA, 83 bp, Homo sapiens; identical to SEQ ID NO: 45153
  chr8:21868698-21868781
  hypo

SEQ ID NO: 159406 - DNA, 22 bp, Homo sapiens
  chr8:21868840-21868862
  hypo
cccgtctcgatttttcaaaaat

SEQ ID NO: 159407 - DNA, 125 bp, Homo sapiens; identical to SEQ ID NO: 45154
  chr8:21906318-21906443
  hypo

SEQ ID NO: 159408 - DNA, 30 bp, Homo sapiens; identical to SEQ ID NO: 45155
  chr8:21907630-21907660
  hypo

SEQ ID NO: 159409 - DNA, 203 bp, Homo sapiens
  chr8:21910413-21910616
  hypo
cactctagattctgcccggcttccacactttgcctgcaaagtgtgcccaggcatcgtgagttctggggcaggagagagcacaggccagggtgcttgcgggggctttgtggaaggtctggggtttgcatgatttcagatgatttcagtggagaaaatatgcacagagcggaaaatgacgagaggaaaaacgggcacgagaatca

SEQ ID NO: 159410 - DNA, 30 bp, Homo sapiens; identical to SEQ ID NO: 75737
  chr8:21926934-21926964
  hypo

SEQ ID NO: 159411 - DNA, 31 bp, Homo sapiens; identical to SEQ ID NO: 22289
  chr8:21931502-21931533
  hypo

SEQ ID NO: 159412 - DNA, 31 bp, Homo sapiens; identical to SEQ ID NO: 75739
  chr8:21932330-21932361
  hypo

SEQ ID NO: 159413 - DNA, 30 bp, Homo sapiens; identical to SEQ ID NO: 75740
  chr8:21939335-21939365
  hypo

SEQ ID NO: 159414 - DNA, 31 bp, Homo sapiens; identical to SEQ ID NO: 22290
  chr8:21940765-21940796
  hypo

SEQ ID NO: 159415 - DNA, 30 bp, Homo sapiens; identical to SEQ ID NO: 75742
  chr8:21948545-21948575
  hypo

SEQ ID NO: 159416 - DNA, 98 bp, Homo sapiens; identical to SEQ ID NO: 75743
  chr8:21959271-21959369
  hypo

SEQ ID NO: 159417 - DNA, 273 bp, Homo sapiens
  chr8:21959580-21959853
  hypo
tcccacccccacacacgttcacagtggccaggcaccttgctgggggagtgcaaaaatactcaccagccctgccagccctcggctctgtccaccatgttcctacagccatacagcctgaacctgcaggtgacctcggtcctgtcccggcttgccctcttcccccacccccatattcatgagtacctgctggatccgtacatcagcctggcccccggctgcaggagcctattctccgtgttggtgagggtgaggacgcctcggcccaagggagtg

SEQ ID NO: 159418 - DNA, 167 bp, Homo sapiens
  chr8:21960396-21960563
  hypo
tgatcctcgccagaacgtctccccagccccggaagggcaggtctgagccagcaccagggcggtgggagactcctgtccacacctctgccccagagctgcctcctgcctggcactgccgccacactcccctcctgggatggggcttctgctcccgggctcactcaagg

SEQ ID NO: 159419 - DNA, 895 bp, Homo sapiens; identical to SEQ ID NO: 75745
  chr8:21961296-21962191
  hypo

SEQ ID NO: 159420 - DNA, 31 bp, Homo sapiens; identical to SEQ ID NO: 22294
  chr8:21969268-21969299
  hypo

SEQ ID NO: 159421 - DNA, 30 bp, Homo sapiens; identical to SEQ ID NO: 22295
  chr8:21970258-21970288
  hypo

SEQ ID NO: 159422 - DNA, 30 bp, Homo sapiens; identical to SEQ ID NO: 45157
  chr8:21976724-21976754
  hypo

SEQ ID NO: 159423 - DNA, 88 bp, Homo sapiens
  chr8:21977139-21977227
  hypo
aaaaagaaagaaagaaatggaatcagagaagcgcttcaggccccagggccttggcacagacgctcgtgtgccccgagatgacaggcag

SEQ ID NO: 159424 - DNA, 380 bp, Homo sapiens
  chr8:21977565-21977945
  hypo
cggggcctgcggtggcggggaggtagggctggcccttggtgacatacacacctgctggtgtcctcatcccccaaagctcggtgcagcaggaggacagagccctcgtctgactttgggcgaactacaggaggagacagaacggccattggcctcctcagccctgaagcccctgccccggcggcagcaacacctgcttccagcccctcggggtcaccctgggactcctctgccacccgatccctagggcttgggctcccagctccctctcccctgtgttggggacacttacgctcaggccaggagaagccctcccagaatgttgtgctgcccaggctgctgggctggggaggtccgagggggctcagcgcctgcacctggcc

SEQ ID NO: 159425 - DNA, 226 bp, Homo sapiens; identical to SEQ ID NO: 75750
  chr8:21978252-21978478
  hypo

SEQ ID NO: 159426 - DNA, 31 bp, Homo sapiens; identical to SEQ ID NO: 75751
  chr8:21979170-21979201
  hypo

SEQ ID NO: 159427 - DNA, 71 bp, Homo sapiens; identical to SEQ ID NO: 75752
  chr8:21981255-21981326
  hypo

SEQ ID NO: 159428 - DNA, 30 bp, Homo sapiens
  chr8:21986326-21986356
  hypo
acagcgaggtgggcacgctggcccgcagaa

SEQ ID NO: 159429 - DNA, 30 bp, Homo sapiens
  chr8:21986598-21986628
  hypo
cgggctcctgtctcacgatgccgttctctg

SEQ ID NO: 159430 - DNA, 96 bp, Homo sapiens; identical to SEQ ID NO: 75753
  chr8:22005941-22006037
  hypo

SEQ ID NO: 159431 - DNA, 82 bp, Homo sapiens; identical to SEQ ID NO: 75754
  chr8:22006312-22006394
  hypo

SEQ ID NO: 159432 - DNA, 30 bp, Homo sapiens
  chr8:22018157-22018187
  hypo
ggaggttaagggagcgagcccaggcctgga

SEQ ID NO: 159433 - DNA, 144 bp, Homo sapiens
  chr8:22023238-22023382
  hypo
ggactgaagttttgccgctgttggtggaagctgctgccgctgcctctcatcttcccagaggattccagaggaagtctccttgcgtcccgggaaaaccggcgggcaaggcggcttttccttctgtaggaaacttttctggccaaa

SEQ ID NO: 159434 - DNA, 30 bp, Homo sapiens; identical to SEQ ID NO: 75755
  chr8:22034375-22034405
  hypo

SEQ ID NO: 159435 - DNA, 30 bp, Homo sapiens; identical to SEQ ID NO: 22298
  chr8:22034756-22034786
  hypo

SEQ ID NO: 159436 - DNA, 41 bp, Homo sapiens; identical to SEQ ID NO: 75757
  chr8:22052965-22053006
  hypo

SEQ ID NO: 159437 - DNA, 30 bp, Homo sapiens; identical to SEQ ID NO: 22300
  chr8:22064870-22064900
  hypo

SEQ ID NO: 159438 - DNA, 31 bp, Homo sapiens; identical to SEQ ID NO: 75759
  chr8:22071496-22071527
  hypo

SEQ ID NO: 159439 - DNA, 41 bp, Homo sapiens; identical to SEQ ID NO: 75760
  chr8:22073145-22073186
  hypo

SEQ ID NO: 159440 - DNA, 406 bp, Homo sapiens; identical to SEQ ID NO: 75761
  chr8:22078960-22079366
  hypo

SEQ ID NO: 159441 - DNA, 30 bp, Homo sapiens; identical to SEQ ID NO: 75762
  chr8:22084447-22084477
  hypo

SEQ ID NO: 159442 - DNA, 31 bp, Homo sapiens; identical to SEQ ID NO: 75763
  chr8:22088363-22088394
  hypo

SEQ ID NO: 159443 - DNA, 30 bp, Homo sapiens
  chr8:22100620-22100650
  hypo
aacttggatgatctgcggggaacaatgccg

SEQ ID NO: 159444 - DNA, 30 bp, Homo sapiens; identical to SEQ ID NO: 22302
  chr8:22108208-22108238
  hypo

SEQ ID NO: 159445 - DNA, 30 bp, Homo sapiens; identical to SEQ ID NO: 75765
  chr8:22112328-22112358
  hypo

SEQ ID NO: 159446 - DNA, 45 bp, Homo sapiens; identical to SEQ ID NO: 75766
  chr8:22132539-22132584
  hypo

SEQ ID NO: 159447 - DNA, 188 bp, Homo sapiens; identical to SEQ ID NO: 75767
  chr8:22133208-22133396
  hypo

SEQ ID NO: 159448 - DNA, 40 bp, Homo sapiens; identical to SEQ ID NO: 75768
  chr8:22231504-22231544
  hypo

SEQ ID NO: 159449 - DNA, 30 bp, Homo sapiens
  chr8:22246610-22246640
  hypo
gatggaatgaaaaagcgctggctctgcctg

SEQ ID NO: 159450 - DNA, 30 bp, Homo sapiens
  chr8:22246895-22246925
  hypo
tgaggaggagtcgggcgtgagcgggcttga

SEQ ID NO: 159451 - DNA, 298 bp, Homo sapiens
  chr8:22255559-22255857
  hypo
agacagctgcggggacgtcttaggatgattcactgaggccagtcagtggtggaaccaagagctctggggaacataatttctatcagcctggcgtctacttggccgccccctccactccctcacccacccctgcaaccctgtggtctttctttgtgtagaccatcagccttctcataattttaagtaaaatgcttaataaaaccccggtttagactgtcttcaaaccgaccgccaccccagagcctgcagctgactctgaccccgcgtaagagccccaccctggcgaagtcctgtgcac

SEQ ID NO: 159452 - DNA, 71 bp, Homo sapiens
  chr8:22256252-22256323
  hypo
gcaggacagaagtgccgcttctaggcagagctacttctggaccaagtgaagggtgacggtaggtggaattc

SEQ ID NO: 159453 - DNA, 316 bp, Homo sapiens
  chr8:22256721-22257037
  hypo
gcagctggggccatgcgcgcggacccctgcccggcctccccgtcccagcggcgtcaacagctgtgtgtgtttccctcttctttctttcctctctaataccttttacaaaccttttccccgctaagaataacttgtagttaaaaagaagacaagactccactggagcagaaaactcccctttcatgcctgccaaaaggccggggtcacttggacttaagtgtcactcgcagctcctagatcctccccaacccttgcgggtgagtgcatgtctcaagcgctggccaggcaggggggctgtgctcgctgaatctgcaca

SEQ ID NO: 159454 - DNA, 30 bp, Homo sapiens; identical to SEQ ID NO: 75769
  chr8:22294247-22294277
  hypo

SEQ ID NO: 159455 - DNA, 30 bp, Homo sapiens; identical to SEQ ID NO: 75770
  chr8:22389802-22389832
  hypo

SEQ ID NO: 159456 - DNA, 31 bp, Homo sapiens; identical to SEQ ID NO: 22303
  chr8:22396803-22396834
  hypo

SEQ ID NO: 159457 - DNA, 107 bp, Homo sapiens; identical to SEQ ID NO: 45165
  chr8:22408651-22408758
  hypo

SEQ ID NO: 159458 - DNA, 141 bp, Homo sapiens; identical to SEQ ID NO: 116286
  chr8:22409076-22409217
  hypo

SEQ ID NO: 159459 - DNA, 142 bp, Homo sapiens; identical to SEQ ID NO: 116287
  chr8:22409253-22409395
  hypo

SEQ ID NO: 159460 - DNA, 29 bp, Homo sapiens
  chr8:22418394-22418423
  hypo
cacgcgccgtggggagcagtgggtcagta

SEQ ID NO: 159461 - DNA, 31 bp, Homo sapiens; identical to SEQ ID NO: 22304
  chr8:22432576-22432607
  hypo

SEQ ID NO: 159462 - DNA, 892 bp, Homo sapiens; identical to SEQ ID NO: 116290
  chr8:22436855-22437747
  hypo

SEQ ID NO: 159463 - DNA, 93 bp, Homo sapiens
  chr8:22440002-22440095
  hypo
ggagggaccagggctcgggggaggtaggcctgggctgtaagtcaggcctctggttctgcaccaggcaagcccagactccagtctcttaatttt

SEQ ID NO: 159464 - DNA, 32 bp, Homo sapiens
  chr8:22440394-22440426
  hypo
ctccttacttttgctgacgtgatgcccacccc

SEQ ID NO: 159465 - DNA, 30 bp, Homo sapiens; identical to SEQ ID NO: 75775
  chr8:22445584-22445614
  hypo

SEQ ID NO: 159466 - DNA, 31 bp, Homo sapiens; identical to SEQ ID NO: 22306
  chr8:22471905-22471936
  hypo

SEQ ID NO: 159467 - DNA, 30 bp, Homo sapiens; identical to SEQ ID NO: 75777
  chr8:22476968-22476998
  hypo

SEQ ID NO: 159468 - DNA, 76 bp, Homo sapiens; identical to SEQ ID NO: 75778
  chr8:22477222-22477298
  hypo

SEQ ID NO: 159469 - DNA, 229 bp, Homo sapiens
  chr8:22479975-22480204
  hypo
cctctgggctggcggcggcccaccctgcccccactccctgcccaagccactgtgcgctgagtcactgggaatactcacttctccatgactaatggcagccgggcgggcgagggggaggctggggcccaagaggcagtcaacagcccccagcaatgctgcctggttaaagggcatccctggcctcccatctgctccaacctggacacgcgggagcctggcaccctgtggc

SEQ ID NO: 159470 - DNA, 31 bp, Homo sapiens
  chr8:22482549-22482580
  hypo
gctctgccattggaaccgccaaagttccaac

SEQ ID NO: 159471 - DNA, 146 bp, Homo sapiens; identical to SEQ ID NO: 22307
  chr8:22485266-22485412
  hypo

SEQ ID NO: 159472 - DNA, 230 bp, Homo sapiens; identical to SEQ ID NO: 75781
  chr8:22494910-22495140
  hypo

SEQ ID NO: 159473 - DNA, 70 bp, Homo sapiens; identical to SEQ ID NO: 75782
  chr8:22499361-22499431
  hypo

SEQ ID NO: 159474 - DNA, 13 bp, Homo sapiens
  chr8:22517039-22517052
  hypo
agagctgggcgat

SEQ ID NO: 159475 - DNA, 218 bp, Homo sapiens; identical to SEQ ID NO: 116295
  chr8:22550330-22550548
  hypo

SEQ ID NO: 159476 - DNA, 257 bp, Homo sapiens; identical to SEQ ID NO: 116296
  chr8:22550911-22551168
  hypo

SEQ ID NO: 159477 - DNA, 30 bp, Homo sapiens; identical to SEQ ID NO: 22308
  chr8:22564467-22564497
  hypo

SEQ ID NO: 159478 - DNA, 55 bp, Homo sapiens; identical to SEQ ID NO: 75784
  chr8:22773286-22773341
  hypo

SEQ ID NO: 159479 - DNA, 30 bp, Homo sapiens; identical to SEQ ID NO: 22309
  chr8:22786345-22786375
  hypo

SEQ ID NO: 159480 - DNA, 167 bp, Homo sapiens
  chr8:22851897-22852064
  hypo
ccccaggctggggtctcaccccgcgctggacccggacatcaggggccgctctcttgtcctgagtagggccctctatctgggctgagcgaccttggagtaattcgcggtgtgctcattccctttctcccctctgtctcccctgccccgccccatccactcctgttcct

SEQ ID NO: 159481 - DNA, 31 bp, Homo sapiens; identical to SEQ ID NO: 22310
  chr8:22854457-22854488
  hypo

SEQ ID NO: 159482 - DNA, 31 bp, Homo sapiens; identical to SEQ ID NO: 6150
  chr8:22857229-22857260
  hypo

SEQ ID NO: 159483 - DNA, 197 bp, Homo sapiens
  chr8:22864844-22865041
  hypo
cgtgcttccaccagcgacgggatcttacggggcaacggaacagggtacctaccgggcaggggtcgtgtgctgtcttcctggagccgagcttttgtgagcatccaggaagagatggcagaagatcctctcacctacaaatcccggctgatggtggtggtgaagatggacagttccatccagccggggcccttccgggc

SEQ ID NO: 159484 - DNA, 31 bp, Homo sapiens; identical to SEQ ID NO: 22312
  chr8:22871287-22871318
  hypo

SEQ ID NO: 159485 - DNA, 459 bp, Homo sapiens; identical to SEQ ID NO: 22313
  chr8:22874764-22875223
  hypo

SEQ ID NO: 159486 - DNA, 310 bp, Homo sapiens; identical to SEQ ID NO: 116308
  chr8:22925471-22925781
  hypo

SEQ ID NO: 159487 - DNA, 54 bp, Homo sapiens; identical to SEQ ID NO: 75792
  chr8:22984119-22984173
  hypo

SEQ ID NO: 159488 - DNA, 198 bp, Homo sapiens; identical to SEQ ID NO: 6152
  chr8:23020932-23021130
  hypo

SEQ ID NO: 159489 - DNA, 533 bp, Homo sapiens; identical to SEQ ID NO: 116313
  chr8:23021192-23021725
  hypo

SEQ ID NO: 159490 - DNA, 19 bp, Homo sapiens
  chr8:23073628-23073647
  hypo
ccagtttattacttttatt

SEQ ID NO: 159491 - DNA, 30 bp, Homo sapiens; identical to SEQ ID NO: 22317
  chr8:23118788-23118818
  hypo

SEQ ID NO: 159492 - DNA, 31 bp, Homo sapiens; identical to SEQ ID NO: 75797
  chr8:23177355-23177386
  hypo

SEQ ID NO: 159493 - DNA, 30 bp, Homo sapiens; identical to SEQ ID NO: 45186
  chr8:23197238-23197268
  hypo

SEQ ID NO: 159494 - DNA, 23 bp, Homo sapiens
  chr8:23201677-23201700
  hypo
aagggagcttgctctcgttcctg

SEQ ID NO: 159495 - DNA, 41 bp, Homo sapiens
  chr8:23201725-23201766
  hypo
ctgaatagggctggtggggagagccccgggggctccacgat

SEQ ID NO: 159496 - DNA, 30 bp, Homo sapiens; identical to SEQ ID NO: 45187
  chr8:23218852-23218882
  hypo

SEQ ID NO: 159497 - DNA, 30 bp, Homo sapiens; identical to SEQ ID NO: 75800
  chr8:23290450-23290480
  hypo

SEQ ID NO: 159498 - DNA, 157 bp, Homo sapiens
  chr8:23298418-23298575
  hypo
tgaaccgtcccccgccggccacgctatgctgccgcccacctttgaggggaaaatccagaaagctaggctttggtgttaatctacagctgaacacaaatggagtaataaagacgtgtagcaattcagaaatacatctggaaaccgtgccggggttctc

SEQ ID NO: 159499 - DNA, 30 bp, Homo sapiens; identical to SEQ ID NO: 22318
  chr8:23313423-23313453
  hypo

SEQ ID NO: 159500 - DNA, 30 bp, Homo sapiens
  chr8:23340735-23340765
  hypo
ccggctggacagcacgaggtaggtgttcac

SEQ ID NO: 159501 - DNA, 30 bp, Homo sapiens; identical to SEQ ID NO: 75802
  chr8:23341013-23341043
  hypo

SEQ ID NO: 159502 - DNA, 151 bp, Homo sapiens
  chr8:23380692-23380843
  hypo
gccacatttctgttgttttaagtcacctagtttgtgtcattttgttagagcactcccaggacacaaatattttacgctttctgagctttaggtgcagcagaatattcaggtagagctgccgggaggcacatgaatacgtgggtgggactgg

SEQ ID NO: 159503 - DNA, 360 bp, Homo sapiens; identical to SEQ ID NO: 116325
  chr8:23386070-23386430
  hypo

SEQ ID NO: 159504 - DNA, 282 bp, Homo sapiens; identical to SEQ ID NO: 75805
  chr8:23399593-23399875
  hypo

SEQ ID NO: 159505 - DNA, 351 bp, Homo sapiens; identical to SEQ ID NO: 75806
  chr8:23409902-23410253
  hypo

SEQ ID NO: 159506 - DNA, 365 bp, Homo sapiens
  chr8:23423712-23424077
  hypo
gaggcccttgcgaggcgtcaacgtcatgatcatgggtgcagggccggcccatgccatgtattttgcctgctatgaaaacatgaaaaggactttaaatgacgttttccaccaccaaggaaacagccacctagccaacggtattttgaaagcgtttgtctggagttagaaagttctcttcttcaacacgtccctccccagggtgttcctccctgtgacccagccgcctcgacttcggcccgcttgctcacgaataaagaactcagagttgtgtgtgcaatgcacacccagacacacgcacgcacacacacgcgcgcgcacacacatgcttttttctgttcccctccgctttctgaagcctggggaga

SEQ ID NO: 159507 - DNA, 37 bp, Homo sapiens
  chr8:23424341-23424378
  hypo
ggctgacaaaggactcgcgcaacgcagaaggcctttc

SEQ ID NO: 159508 - DNA, 126 bp, Homo sapiens; identical to SEQ ID NO: 22324
  chr8:23429102-23429228
  hypo

SEQ ID NO: 159509 - DNA, 343 bp, Homo sapiens
  chr8:23430697-23431040
  hypo
ccctcatgcccgagtcggaagacccctctccagaagccattctgcatccttgtctgctctgcgtcacccgagaacacaggcttcgcagcctcgctttctgaaatggtgtgtgccgagtcagattgccgctcagagaaaatacaagcccgttttccctagctgtgccatttggtgctctgccaggctgccgtgcaagggaataccgacgagacgagctgcactgtctctgatttggagccctcaccggagcttgtctttaaaaatgagcaggaagctcatgtatgtttgcatttcagtgagccgggtcctgacctgccgccacccatcacggtcagcgtggtgc

SEQ ID NO: 159510 - DNA, 1003 bp, Homo sapiens; identical to SEQ ID NO: 6159
  chr8:23559665-23560668
  hypo

SEQ ID NO: 159511 - DNA, 271 bp, Homo sapiens; identical to SEQ ID NO: 116339
  chr8:23567311-23567582
  hypo

SEQ ID NO: 159512 - DNA, 116 bp, Homo sapiens; identical to SEQ ID NO: 116340
  chr8:23567657-23567773
  hypo

SEQ ID NO: 159513 - DNA, 30 bp, Homo sapiens; identical to SEQ ID NO: 75813
  chr8:23809235-23809265
  hypo

SEQ ID NO: 159514 - DNA, 30 bp, Homo sapiens
  chr8:24625925-24625955
  hypo
ccccatttgctcaatcggacgaagtcgagt

SEQ ID NO: 159515 - DNA, 103 bp, Homo sapiens
  chr8:25084010-25084113
  hypo
ctcaggtgatctgcccgtctaggcctgggattacaggcgcaagccaccatgcctgacgttacccatgttttatttttttatttttttaattttaagttttttt

SEQ ID NO: 159516 - DNA, 217 bp, Homo sapiens; identical to SEQ ID NO: 22328
  chr8:25105392-25105609
  hypo

SEQ ID NO: 159517 - DNA, 203 bp, Homo sapiens; identical to SEQ ID NO: 75815
  chr8:25107886-25108089
  hypo

SEQ ID NO: 159518 - DNA, 29 bp, Homo sapiens
  chr8:25138961-25138990
  hypo
aaaaaaaaagtgaacggggatgaagaatt

SEQ ID NO: 159519 - DNA, 31 bp, Homo sapiens; identical to SEQ ID NO: 75817
  chr8:25159882-25159913
  hypo

SEQ ID NO: 159520 - DNA, 180 bp, Homo sapiens; identical to SEQ ID NO: 75818
  chr8:25174515-25174695
  hypo

SEQ ID NO: 159521 - DNA, 31 bp, Homo sapiens; identical to SEQ ID NO: 75819
  chr8:25206371-25206402
  hypo

SEQ ID NO: 159522 - DNA, 31 bp, Homo sapiens; identical to SEQ ID NO: 75820
  chr8:25212178-25212209
  hypo

SEQ ID NO: 159523 - DNA, 30 bp, Homo sapiens
  chr8:25229909-25229939
  hypo
aggtgtgtgtgtgtcggcttaactgtgtca

SEQ ID NO: 159524 - DNA, 31 bp, Homo sapiens; identical to SEQ ID NO: 75821
  chr8:25246525-25246556
  hypo

SEQ ID NO: 159525 - DNA, 85 bp, Homo sapiens; identical to SEQ ID NO: 75822
  chr8:25249435-25249520
  hypo

SEQ ID NO: 159526 - DNA, 90 bp, Homo sapiens
  chr8:25252802-25252892
  hypo
tataaatacagatgaagcttccctcacttacctgtcgctcacctctggctgtgtggcctgtttcctaataggccacggactgatactggc

SEQ ID NO: 159527 - DNA, 30 bp, Homo sapiens
  chr8:25253177-25253207
  hypo
gctgctcagtggcatcgtggacccggccgt

SEQ ID NO: 159528 - DNA, 170 bp, Homo sapiens; identical to SEQ ID NO: 75824
  chr8:25265512-25265682
  hypo

SEQ ID NO: 159529 - DNA, 30 bp, Homo sapiens; identical to SEQ ID NO: 22329
  chr8:25266268-25266298
  hypo

SEQ ID NO: 159530 - DNA, 258 bp, Homo sapiens
  chr8:25336998-25337256
  hypo
cattcctgccaccctcggatgttgaaatgcctgtgactctagcggtaaaattgcttattagtcaatgcttggctcagattagtttttatggtccaagtagtgggtgtcatgagtagaggcacgctaatagcttatagctgattcatgataccttctttcaacctctgactcagagatttcctggggagccaaatccccatacccactttacccttcgtagtccgatttgaggtaaaaactgaccgatgctgcttcttt

SEQ ID NO: 159531 - DNA, 30 bp, Homo sapiens
  chr8:25337744-25337774
  hypo
tcttactcgtcttaccgtaaatttttttcc

SEQ ID NO: 159532 - DNA, 39 bp, Homo sapiens
  chr8:25338911-25338950
  hypo
aacatttacaactggccgggcgtggtggcttatgcctgt

SEQ ID NO: 159533 - DNA, 148 bp, Homo sapiens; identical to SEQ ID NO: 75827
  chr8:25376164-25376312
  hypo

SEQ ID NO: 159534 - DNA, 171 bp, Homo sapiens; identical to SEQ ID NO: 22331
  chr8:25397039-25397210
  hypo

SEQ ID NO: 159535 - DNA, 30 bp, Homo sapiens
  chr8:25542874-25542904
  hypo
gagcagcaacgttctcgcagcgccagcccc

SEQ ID NO: 159536 - DNA, 1549 bp, Homo sapiens; identical to SEQ ID NO: 116370
  chr8:25900780-25902329
  hypo

SEQ ID NO: 159537 - DNA, 825 bp, Homo sapiens; identical to SEQ ID NO: 45226
  chr8:25904803-25905628
  hypo

SEQ ID NO: 159538 - DNA, 440 bp, Homo sapiens; identical to SEQ ID NO: 116379
  chr8:25909229-25909669
  hypo

SEQ ID NO: 159539 - DNA, 53 bp, Homo sapiens; identical to SEQ ID NO: 22333
  chr8:26053987-26054040
  hypo

SEQ ID NO: 159540 - DNA, 120 bp, Homo sapiens; identical to SEQ ID NO: 75832
  chr8:26148090-26148210
  hypo

SEQ ID NO: 159541 - DNA, 312 bp, Homo sapiens; identical to SEQ ID NO: 116381
  chr8:26148758-26149070
  hypo

SEQ ID NO: 159542 - DNA, 180 bp, Homo sapiens
  chr8:26193946-26194126
  hypo
aaaataataaattggcgtggaatgtgccttcccaccccacccctcagtctcaaatctcaattgttttactgtaatgctgtccttactgacttaatcatctctaggttttacgtgttcagttcacttaaggaatattaaggtttcttccttattagaaattgagcccggctgggtatggta

SEQ ID NO: 159543 - DNA, 42 bp, Homo sapiens
  chr8:26230450-26230492
  hypo
atgcatccagtcgggcgcggtggctcactcttgtaatcccaa

SEQ ID NO: 159544 - DNA, 41 bp, Homo sapiens; identical to SEQ ID NO: 22335
  chr8:26230731-26230772
  hypo

SEQ ID NO: 159545 - DNA, 31 bp, Homo sapiens; identical to SEQ ID NO: 22336
  chr8:26242168-26242199
  hypo

SEQ ID NO: 159546 - DNA, 30 bp, Homo sapiens; identical to SEQ ID NO: 75837
  chr8:26267175-26267205
  hypo

SEQ ID NO: 159547 - DNA, 136 bp, Homo sapiens; identical to SEQ ID NO: 22337
  chr8:26267633-26267769
  hypo

SEQ ID NO: 159548 - DNA, 30 bp, Homo sapiens; identical to SEQ ID NO: 75839
  chr8:26303382-26303412
  hypo

SEQ ID NO: 159549 - DNA, 1121 bp, Homo sapiens; identical to SEQ ID NO: 45242
  chr8:26371675-26372796
  hypo

SEQ ID NO: 159550 - DNA, 65 bp, Homo sapiens; identical to SEQ ID NO: 45243
  chr8:26435019-26435084
  hypo

SEQ ID NO: 159551 - DNA, 605 bp, Homo sapiens; identical to SEQ ID NO: 116396
  chr8:26436193-26436798
  hypo

SEQ ID NO: 159552 - DNA, 212 bp, Homo sapiens
  chr8:26444971-26445183
  hypo
tccctgctggctctgcgtttcccaggtcacaggccctggagactcctttctgtctgaaatggcgccgcatgtagaggaaaacacagccaaatattctcggtttaaaaaaggagatggcatgtcagcagcagaagataatattattgccattaaacagagcctgctattgagaatcacacaatgagatctttatgaggcggactcagtgtgga

SEQ ID NO: 159553 - DNA, 30 bp, Homo sapiens
  chr8:26445418-26445448
  hypo
ccggaaggacagacacgacttgccaacact

SEQ ID NO: 159554 - DNA, 175 bp, Homo sapiens
  chr8:26481169-26481344
  hypo
ctgcagaaatgtgagcggtaatgagagagcaggtaatgcccgggaacttttgaaaggcccggtccgtgtggctctgctccagcaccttcaagttccctgccgtctggcggggggcgtctcataagctgctttcaacacaaagaagggtttggctgctccccggccatttgacact

SEQ ID NO: 159555 - DNA, 31 bp, Homo sapiens; identical to SEQ ID NO: 75844
  chr8:26509696-26509727
  hypo

SEQ ID NO: 159556 - DNA, 31 bp, Homo sapiens; identical to SEQ ID NO: 75845
  chr8:26513962-26513993
  hypo

SEQ ID NO: 159557 - DNA, 149 bp, Homo sapiens; identical to SEQ ID NO: 75846
  chr8:26515707-26515856
  hypo

SEQ ID NO: 159558 - DNA, 30 bp, Homo sapiens
  chr8:26654104-26654134
  hypo
caaatgtatcctacacgtggccgcagagaa

SEQ ID NO: 159559 - DNA, 136 bp, Homo sapiens
  chr8:27145420-27145556
  hypo
gcgcacacgtaccacgcccaccctccagctctgcagccccccaagggccacctcccaggcgtgcgagccctgtgagaagacacgggagcccagcaggcagggcgccgaggagaagcgttccgggttctccacctgc

SEQ ID NO: 159560 - DNA, 30 bp, Homo sapiens; identical to SEQ ID NO: 75848
  chr8:27146745-27146775
  hypo

SEQ ID NO: 159561 - DNA, 79 bp, Homo sapiens; identical to SEQ ID NO: 45250
  chr8:27168527-27168606
  hypo

SEQ ID NO: 159562 - DNA, 30 bp, Homo sapiens
  chr8:27233185-27233215
  hypo
cctgcctccgggggccgtgttctttccctg

SEQ ID NO: 159563 - DNA, 30 bp, Homo sapiens; identical to SEQ ID NO: 75850
  chr8:27271176-27271206
  hypo

SEQ ID NO: 159564 - DNA, 30 bp, Homo sapiens
  chr8:27276138-27276168
  hypo
tacgtcggtgccttcgggtttttaaattta

SEQ ID NO: 159565 - DNA, 55 bp, Homo sapiens; identical to SEQ ID NO: 75851
  chr8:27279917-27279972
  hypo

SEQ ID NO: 159566 - DNA, 30 bp, Homo sapiens; identical to SEQ ID NO: 75852
  chr8:27288285-27288315
  hypo

SEQ ID NO: 159567 - DNA, 203 bp, Homo sapiens
  chr8:27315869-27316072
  hypo
gctggcacagcagaacgccgtgacctccctaagtgaggagtgcaagaggcagatgctgacggcttcacacaccctggctgtggacgccaagaacctgctcgacgctgtggaccaggccaaggttctggccaatctggcccacccacctgcagagtgacggagggtgggggccacctgcctgcgtcttccgcccctgcctgcca

SEQ ID NO: 159568 - DNA, 251 bp, Homo sapiens; identical to SEQ ID NO: 45252
  chr8:27327201-27327452
  hypo

SEQ ID NO: 159569 - DNA, 227 bp, Homo sapiens; identical to SEQ ID NO: 75854
  chr8:27337091-27337318
  hypo

SEQ ID NO: 159570 - DNA, 30 bp, Homo sapiens
  chr8:27383815-27383845
  hypo
gtgaaaggagctttgcgattcaggcaataa

SEQ ID NO: 159571 - DNA, 30 bp, Homo sapiens; identical to SEQ ID NO: 22342
  chr8:27473407-27473437
  hypo

SEQ ID NO: 159572 - DNA, 30 bp, Homo sapiens; identical to SEQ ID NO: 75856
  chr8:27504505-27504535
  hypo

SEQ ID NO: 159573 - DNA, 128 bp, Homo sapiens
  chr8:27516397-27516525
  hypo
ccagcggaagacagacgaggagaccctgaccctccagaagattgtcaccgactggcagaactacacacggctcttcagcggcctgcgcaccacctccaccaagactggagaggcggtcaagaacatcc

SEQ ID NO: 159574 - DNA, 169 bp, Homo sapiens
  chr8:27516772-27516941
  hypo
caacatcaatgccaccgacaaccacgtgcacagcatgctcaagtacctggatgacgtgcggctctcctgcacgctgggcttccacacccatgccgaggagctctactacctgaacaagtctgtctccatcatgctgggcaccacagacctgctccgggagcgcttcagc

SEQ ID NO: 159575 - DNA, 31 bp, Homo sapiens; identical to SEQ ID NO: 75859
  chr8:27525306-27525337
  hypo

SEQ ID NO: 159576 - DNA, 30 bp, Homo sapiens
  chr8:27526818-27526848
  hypo
ttcgtggggcgtctccgcctctgtatggct

SEQ ID NO: 159577 - DNA, 67 bp, Homo sapiens
  chr8:27530311-27530378
  hypo
accccctccaccgcccgcaaggttagggcatagagttgtctccttcccaacacggacccagagagca

SEQ ID NO: 159578 - DNA, 30 bp, Homo sapiens; identical to SEQ ID NO: 75860
  chr8:27634475-27634505
  hypo

SEQ ID NO: 159579 - DNA, 17 bp, Homo sapiens
  chr8:27684304-27684321
  hypo
tccgtctcaaaaaaaaa

SEQ ID NO: 159580 - DNA, 31 bp, Homo sapiens; identical to SEQ ID NO: 22346
  chr8:27778322-27778353
  hypo

SEQ ID NO: 159581 - DNA, 30 bp, Homo sapiens; identical to SEQ ID NO: 75863
  chr8:27779136-27779166
  hypo

SEQ ID NO: 159582 - DNA, 409 bp, Homo sapiens; identical to SEQ ID NO: 75864
  chr8:27779439-27779848
  hypo

SEQ ID NO: 159583 - DNA, 125 bp, Homo sapiens
  chr8:27845167-27845292
  hypo
gaggagagggaggacgaaggccgggagagagacagagaatcaactgtaggtggaaacagaagcaaatggatagaacaaggtgcccacccctgaccctaagcctgaacaccgggaccctctgctca

SEQ ID NO: 159584 - DNA, 28 bp, Homo sapiens
  chr8:27914783-27914811
  hypo
atgctattgataaatacggtgccgtatt

SEQ ID NO: 159585 - DNA, 235 bp, Homo sapiens; identical to SEQ ID NO: 75867
  chr8:27931038-27931273
  hypo

SEQ ID NO: 159586 - DNA, 30 bp, Homo sapiens; identical to SEQ ID NO: 75868
  chr8:27976918-27976948
  hypo

SEQ ID NO: 159587 - DNA, 354 bp, Homo sapiens
  chr8:28206804-28207158
  hypo
cctaaaagacaggcagccacccgtccccagctcctggtgcagaaggcctcgcaccttctcagggagaacactccagccgaggggagctcttggcaggagagtgaggaaggagcaggccttcatgccacactcaggacccagccaaggacaaggacaggggagccactggacctggccccctctgaggctctcctgcaggggacttagacggagccgctatgcctggaagcctcacactgcctcagtggcatcactggcaatctgatttacagtgtgacaccgccctgcaggagataactcaagaccagcgcctgctaggtagagttcaaaatgacttcccgcttacttgagttg

SEQ ID NO: 159588 - DNA, 157 bp, Homo sapiens
  chr8:28207458-28207615
  hypo
gcaagatggccacaccgacctgtggccacgtgccccgtgcccaagggatggcctccagccctgggatgtgtgggagagccctcggccatacgaggccccagccgtgctgcccgcacactcaccggagagagagagcaggcggcggagggggcagcag

SEQ ID NO: 159589 - DNA, 108 bp, Homo sapiens
  chr8:28207903-28208011
  hypo
ctcagcgctggtctacgtgctagcctcatgacttaatcaccgcagaagatttaacttctcaactggatcacctaccaagaacatgccatggcacgtgccaaaagaggc

SEQ ID NO: 159590 - DNA, 613 bp, Homo sapiens
  chr8:28208625-28209238
  hypo
agtattcaaaacatgcgtgctggactgtctgtccacagaacacaattctaggacctagacgtcacgtgggaagcccaactacacgactccatcctctcttataagcagaggtgtgacaattcccccacccaaatccatcgcccagttacttagggatttagctagattcctagtaaccactcatgacagctgccaatgtagataactccaggaattcccacatttattgagcagtgaattcggtttccttttgtttccttgtagaagagattagcaatttggccaaagggctcagccttccatcagggtggtcggtagcctgtaatcaagctggcccgtgatgagtcagctatgagcctgagcctccagcgagccccgccccatacctggtatgcatgatctgcctgaatgtgccagaaggacccaggagctgacttgctgagagcccctgagggcagggaggactccgggccaggatgttctgggccggaggactgggctttgtgcagaggtggtggaagagcagacagaggcaggccagtcatgctgggggtgggagctggctcggaggtgggagtcccagggactggggtgcctgcggcagcagcagcag

SEQ ID NO: 159591 - DNA, 30 bp, Homo sapiens
  chr8:28209675-28209705
  hypo
agcagcctgcaaactcgctctgcacagaac

SEQ ID NO: 159592 - DNA, 31 bp, Homo sapiens; identical to SEQ ID NO: 22352
  chr8:28210633-28210664
  hypo

SEQ ID NO: 159593 - DNA, 134 bp, Homo sapiens; identical to SEQ ID NO: 75873
  chr8:28237867-28238001
  hypo

SEQ ID NO: 159594 - DNA, 227 bp, Homo sapiens; identical to SEQ ID NO: 116416
  chr8:28242658-28242885
  hypo

SEQ ID NO: 159595 - DNA, 114 bp, Homo sapiens; identical to SEQ ID NO: 116419
  chr8:28258794-28258908
  hypo

SEQ ID NO: 159596 - DNA, 44 bp, Homo sapiens; identical to SEQ ID NO: 75876
  chr8:28265544-28265588
  hypo

SEQ ID NO: 159597 - DNA, 39 bp, Homo sapiens
  chr8:28266308-28266347
  hypo
cagcatgggccaggcacggtggctcacacctataatccc

SEQ ID NO: 159598 - DNA, 157 bp, Homo sapiens
  chr8:28268991-28269148
  hypo
atgggtgcgtttctgcggggttttttttgtggggggggctaattatttacacttttctgatttgccatagtgtatacactaagcacatattacttttattataaagcggcgggaggaggttgaaaacgatctccaatctcctcggtttccttcccaa

SEQ ID NO: 159599 - DNA, 30 bp, Homo sapiens
  chr8:28385549-28385579
  hypo
agcattctttatctcgtaccactcttggtt

SEQ ID NO: 159600 - DNA, 30 bp, Homo sapiens
  chr8:28566945-28566975
  hypo
ccttcataccttccacgtggaaggcataac

SEQ ID NO: 159601 - DNA, 30 bp, Homo sapiens
  chr8:28567400-28567430
  hypo
tggaactctgagccccgacttctcagccca

SEQ ID NO: 159602 - DNA, 145 bp, Homo sapiens
  chr8:28573488-28573633
  hypo
agtgaaacagagatcgttttgtggaatagcaacccatggttatggcgagtgacccgacgtgatctggggggcaggctgcagaggactcatgacaggctataccatgctgcggaatgggggcgcggggaacggaggtcagacctgc

SEQ ID NO: 159603 - DNA, 209 bp, Homo sapiens; identical to SEQ ID NO: 75878
  chr8:28610786-28610995
  hypo

SEQ ID NO: 159604 - DNA, 77 bp, Homo sapiens
  chr8:28737392-28737469
  hypo
gagactcgtggttgccgaggcctggaggtagtaacggagatctttttggagtaatggaaatgcgctaaatctggatc

SEQ ID NO: 159605 - DNA, 28 bp, Homo sapiens
  chr8:28746007-28746035
  hypo
agcgagctgagaacgcgccactgcactt

SEQ ID NO: 159606 - DNA, 334 bp, Homo sapiens; identical to SEQ ID NO: 6205
  chr8:28748908-28749242
  hypo

SEQ ID NO: 159607 - DNA, 30 bp, Homo sapiens
  chr8:28863785-28863815
  hypo
aggtgtgagccactgcgcctggccgatgca

SEQ ID NO: 159608 - DNA, 30 bp, Homo sapiens; identical to SEQ ID NO: 75881
  chr8:28906971-28907001
  hypo

SEQ ID NO: 159609 - DNA, 321 bp, Homo sapiens
  chr8:28918855-28919176
  hypo
gcccctcagttttgccggagcactcggaagggcctcctcttttcctagtagttgcctcatggtgactctagaaagcaagtgtgtgcagcctgtgcctccccgacccatggcgggcgtctagatcaggccctaggagcctccccatccctgcctcttctagccacttcccggggggctgtagagcacggtcacaggaaggcctctgctgggccgagtctgcggtccctgagccatcacagcactggcgtcttcagacacaccctggctgcaaggcaggacactccccctgccgagagacaccatgtgcgtcatcattgcctc

SEQ ID NO: 159610 - DNA, 30 bp, Homo sapiens
  chr8:28919456-28919486
  hypo
gctagcgggagagatcgcttcacagccata

SEQ ID NO: 159611 - DNA, 30 bp, Homo sapiens; identical to SEQ ID NO: 75882
  chr8:28921933-28921963
  hypo

SEQ ID NO: 159612 - DNA, 169 bp, Homo sapiens
  chr8:28928118-28928287
  hypo
agagggtggcgctccggcgggcctcgggggcacccagccggagtcctgtgctgcgccgccgcacagggcccgtggccctgcggacccggctgggcctgaccagcagcccgtagccagggttacacctgaagtactgcttcccgccgatggaaccgtcattcttacctgc

SEQ ID NO: 159613 - DNA, 30 bp, Homo sapiens; identical to SEQ ID NO: 75884
  chr8:28929674-28929704
  hypo

SEQ ID NO: 159614 - DNA, 306 bp, Homo sapiens; identical to SEQ ID NO: 22358
  chr8:28938417-28938723
  hypo

SEQ ID NO: 159615 - DNA, 214 bp, Homo sapiens; identical to SEQ ID NO: 75886
  chr8:28950155-28950369
  hypo

SEQ ID NO: 159616 - DNA, 176 bp, Homo sapiens
  chr8:28960024-28960200
  hypo
tggacaaagtaagaacgccggaggctccggggagggcctgacttggtccccagggacccatgcagtttttcccactcctgctcctctgccagatacggattctttgggttttctgggaatgagtctggttttgatcaggaaagtgacaaaaaggtaaataacgagaagtgccagtg

SEQ ID NO: 159617 - DNA, 126 bp, Homo sapiens; identical to SEQ ID NO: 75887
  chr8:29053239-29053365
  hypo

SEQ ID NO: 159618 - DNA, 28 bp, Homo sapiens
  chr8:29118150-29118178
  hypo
gagacagagtttcactcttgtcgcccag

SEQ ID NO: 159619 - DNA, 28 bp, Homo sapiens
  chr8:29118417-29118445
  hypo
agccaccgtgcctggcctgttttagtct

SEQ ID NO: 159620 - DNA, 143 bp, Homo sapiens
  chr8:29127379-29127522
  hypo
cctcatccaacctgactcactcgcctactcccaagtatccagacatcgctcttaagcctccaatgcctcaacttaccccctttgtcacaccgaggcttctccgggattcattttatatgttcgtgcaaaagtaattgtggttt

SEQ ID NO: 159621 - DNA, 99 bp, Homo sapiens
  chr8:29160769-29160868
  hypo
ccctcccttgatattcggtacaatatcacaggccgggtgtacaccttctgtgatattgggagtaatatccttctcccttcctgcatattagaaacaata

SEQ ID NO: 159622 - DNA, 2289 bp, Homo sapiens; identical to SEQ ID NO: 116433
  chr8:29205972-29208261
  hypo

SEQ ID NO: 159623 - DNA, 150 bp, Homo sapiens; identical to SEQ ID NO: 75892
  chr8:29212821-29212971
  hypo

SEQ ID NO: 159624 - DNA, 30 bp, Homo sapiens
  chr8:29386734-29386764
  hypo
cgatcctcccgcctccgcctccgcctccgc

SEQ ID NO: 159625 - DNA, 30 bp, Homo sapiens; identical to SEQ ID NO: 45276
  chr8:29509600-29509630
  hypo

SEQ ID NO: 159626 - DNA, 28 bp, Homo sapiens
  chr8:29596407-29596435
  hypo
atttttaggctgggcacggtagttcatg

SEQ ID NO: 159627 - DNA, 30 bp, Homo sapiens
  chr8:29707320-29707350
  hypo
ggggcaggtgcttaacgcattttgttccac

SEQ ID NO: 159628 - DNA, 30 bp, Homo sapiens
  chr8:29885136-29885166
  hypo
gtcctgcacagcaggcgcggagcagcgcag

SEQ ID NO: 159629 - DNA, 30 bp, Homo sapiens; identical to SEQ ID NO: 75895
  chr8:29923541-29923571
  hypo

SEQ ID NO: 159630 - DNA, 30 bp, Homo sapiens
  chr8:29926287-29926317
  hypo
tatatgccggaaatacgtttcgtaaatttt

SEQ ID NO: 159631 - DNA, 332 bp, Homo sapiens
  chr8:29926951-29927283
  hypo
ggccaatcaggcattaacatagcaaccacaatataccttgggagagagccaaacagaagaggtaaaagaagttgaaagtaaaaaacaaaatgagaagacaaacctcctttggtttcccaatgcaacgattttctatttcagaaccaagcacaggatgcactaacctcacacccgctctatttatggccactgcgagggaaacatacctgtgaactcagacttaaagcctgggggaggaggtcctgctgagttggtgaatctctggtaacggtgggaaaatggaggatactcagagtacggtggaggagaatactgcccgtcactcaggaaca

SEQ ID NO: 159632 - DNA, 30 bp, Homo sapiens; identical to SEQ ID NO: 75898
  chr8:29930904-29930934
  hypo

SEQ ID NO: 159633 - DNA, 30 bp, Homo sapiens; identical to SEQ ID NO: 75899
  chr8:29931540-29931570
  hypo

SEQ ID NO: 159634 - DNA, 30 bp, Homo sapiens
  chr8:29937977-29938007
  hypo
accatgtcctccttacgctgtttatcatac

SEQ ID NO: 159635 - DNA, 211 bp, Homo sapiens; identical to SEQ ID NO: 75900
  chr8:29949203-29949414
  hypo

SEQ ID NO: 159636 - DNA, 42 bp, Homo sapiens; identical to SEQ ID NO: 22364
  chr8:29951801-29951843
  hypo

SEQ ID NO: 159637 - DNA, 30 bp, Homo sapiens
  chr8:29954900-29954930
  hypo
tatttaatcctggcgcggtggctcacacct

SEQ ID NO: 159638 - DNA, 100 bp, Homo sapiens; identical to SEQ ID NO: 22365
  chr8:29958254-29958354
  hypo

SEQ ID NO: 159639 - DNA, 44 bp, Homo sapiens
  chr8:29962164-29962208
  hypo
aagtgatattggagaacgtggcttggatctgcagcagctgttgg

SEQ ID NO: 159640 - DNA, 31 bp, Homo sapiens; identical to SEQ ID NO: 75904
  chr8:30092821-30092852
  hypo

SEQ ID NO: 159641 - DNA, 30 bp, Homo sapiens
  chr8:30159802-30159832
  hypo
gcaaagtcaccgctgcgggtgggcggcatg

SEQ ID NO: 159642 - DNA, 31 bp, Homo sapiens; identical to SEQ ID NO: 75905
  chr8:30161182-30161213
  hypo

SEQ ID NO: 159643 - DNA, 31 bp, Homo sapiens; identical to SEQ ID NO: 75906
  chr8:30162575-30162606
  hypo

SEQ ID NO: 159644 - DNA, 2259 bp, Homo sapiens; identical to SEQ ID NO: 45278
  chr8:30241416-30243675
  hypo

SEQ ID NO: 159645 - DNA, 30 bp, Homo sapiens
  chr8:30282392-30282422
  hypo
tttcttgggtacacgcgcgcacacacacac

SEQ ID NO: 159646 - DNA, 30 bp, Homo sapiens; identical to SEQ ID NO: 22369
  chr8:30408960-30408990
  hypo

SEQ ID NO: 159647 - DNA, 30 bp, Homo sapiens
  chr8:30411139-30411169
  hypo
gaacgagccccacagcgaacttcagcgctc

SEQ ID NO: 159648 - DNA, 161 bp, Homo sapiens
  chr8:30419850-30420011
  hypo
aaaaaaaaaaagagtatgtaatgtctcccgtggatgaatcatttgttctgagctaagcttgggccatgggccagactccttcctcggagcctgtggggagcaggtgaggaaggagtatggataatggtgcccgttactcctgcacgcgggggagtctagtc

SEQ ID NO: 159649 - DNA, 30 bp, Homo sapiens
  chr8:30432653-30432683
  hypo
caaacctgctcttggcgcttctagagctgg

SEQ ID NO: 159650 - DNA, 50 bp, Homo sapiens
  chr8:30432994-30433044
  hypo
cagaggggggccaaccgtacagcgccagccagggccgtctagctctttga

SEQ ID NO: 159651 - DNA, 30 bp, Homo sapiens; identical to SEQ ID NO: 22370
  chr8:30437723-30437753
  hypo

SEQ ID NO: 159652 - DNA, 30 bp, Homo sapiens
  chr8:30472212-30472242
  hypo
tctcctcgctgatgccgtgtctatcaagtg

SEQ ID NO: 159653 - DNA, 401 bp, Homo sapiens
  chr8:30561835-30562236
  hypo
ctctctcaaaaagactggtgtgtctggaggagaggcagaaggctaagaaagacaacaggataatggtgaaatgaacagaggcaagagcaagagaggaatactctggccaagggagggaaacgcaatgcttgtgctttcgtaaaatgggaagaataccacaaaagtacatgacactgaagttctacgctggagacggtgagaactcagactcttacttttggatttgctcttactggaatcctctgtacccaggccttcacttaggggctgctggcacgctttcgccagccatgatacatgcaggggcatgcaaatgtggtcaacttacaagaataatggaaccatgtaagcatgattacaaagtggaatgctttaacatattggaacgtgcttgattctga

SEQ ID NO: 159654 - DNA, 44 bp, Homo sapiens
  chr8:30599239-30599283
  hypo
tacaggcgtgagtcaccgcgcccggccacaatgttcttttctaa

SEQ ID NO: 159655 - DNA, 31 bp, Homo sapiens; identical to SEQ ID NO: 75912
  chr8:30632837-30632868
  hypo

SEQ ID NO: 159656 - DNA, 23 bp, Homo sapiens
  chr8:30661333-30661356
  hypo
aatttttttttttttttgagacg

SEQ ID NO: 159657 - DNA, 39 bp, Homo sapiens; identical to SEQ ID NO: 75914
  chr8:30889694-30889733
  hypo

SEQ ID NO: 159658 - DNA, 30 bp, Homo sapiens
  chr8:30989205-30989235
  hypo
cattggtttactaagcggtgtggtgcgtgg

SEQ ID NO: 159659 - DNA, 30 bp, Homo sapiens
  chr8:31014608-31014638
  hypo
gtgaatagagaggggcgaggattgaattct

SEQ ID NO: 159660 - DNA, 30 bp, Homo sapiens
  chr8:31015009-31015039
  hypo
attgctgatgttatccgaaaccctcccgtc

SEQ ID NO: 159661 - DNA, 30 bp, Homo sapiens; identical to SEQ ID NO: 45289
  chr8:32349021-32349051
  hypo

SEQ ID NO: 159662 - DNA, 31 bp, Homo sapiens; identical to SEQ ID NO: 75916
  chr8:32621345-32621376
  hypo

SEQ ID NO: 159663 - DNA, 30 bp, Homo sapiens
  chr8:33304597-33304627
  hypo
agatacttcatcgctcgggagaccttttca

SEQ ID NO: 159664 - DNA, 19 bp, Homo sapiens
  chr8:33332815-33332834
  hypo
tcggcagggcacggtcgct

SEQ ID NO: 159665 - DNA, 691 bp, Homo sapiens; identical to SEQ ID NO: 116464
  chr8:33371760-33372451
  hypo

SEQ ID NO: 159666 - DNA, 31 bp, Homo sapiens; identical to SEQ ID NO: 22373
  chr8:33417651-33417682
  hypo

SEQ ID NO: 159667 - DNA, 320 bp, Homo sapiens
  chr8:33580343-33580663
  hypo
gcttcttacccaacccagccacggccctctccggcgcaggcagatttgaggaccgagccttcttgatgctgacggcctgagggggctcccgggtgccggatgtctggcccgggccagggtggctccccggggagacgtcggcaggcctgggggtgtgggtcggccctgagcagctgttctgggagagccagtccacggagccaaagctggagggctgctgccggccacgaggtggggaggaggacggacgcatggcggtcaggtgggccagagggaaggccgggcagggctggccaggcgcaggatccaccacctgcttc

SEQ ID NO: 159668 - DNA, 30 bp, Homo sapiens; identical to SEQ ID NO: 45299
  chr8:34704372-34704402
  hypo

SEQ ID NO: 159669 - DNA, 123 bp, Homo sapiens; identical to SEQ ID NO: 116470
  chr8:35093036-35093159
  hypo

SEQ ID NO: 159670 - DNA, 274 bp, Homo sapiens; identical to SEQ ID NO: 116471
  chr8:35093225-35093499
  hypo

SEQ ID NO: 159671 - DNA, 143 bp, Homo sapiens; identical to SEQ ID NO: 75921
  chr8:36179409-36179552
  hypo

SEQ ID NO: 159672 - DNA, 30 bp, Homo sapiens
  chr8:36502211-36502241
  hypo
acagcagcagcgagccgcaactctgagtca

SEQ ID NO: 159673 - DNA, 33 bp, Homo sapiens
  chr8:36636711-36636744
  hypo
gcactaggagaaatgcgcactggggtggagaca

SEQ ID NO: 159674 - DNA, 121 bp, Homo sapiens
  chr8:36636803-36636924
  hypo
cccgggattcaagctgcaggcgggaagcgctctagcaggggctcgccttgcgagagtccctgattcgagcctcttttcttcctcttcaatcaatactactctctcctactcaccattcaaa

SEQ ID NO: 159675 - DNA, 121 bp, Homo sapiens
  chr8:36636983-36637104
  hypo
aactaaggaaaagtcctgcaacacctttatacacgcccagccttcttttgggtcactgtgttccatctggccgatgattaatgcacttcagcactttgggaggccgaggcgggcggatcac

SEQ ID NO: 159676 - DNA, 30 bp, Homo sapiens; identical to SEQ ID NO: 45301
  chr8:36858467-36858497
  hypo

SEQ ID NO: 159677 - DNA, 21 bp, Homo sapiens
  chr8:37530658-37530679
  hypo
tttttttttttgagacggagt

SEQ ID NO: 159678 - DNA, 2024 bp, Homo sapiens; identical to SEQ ID NO: 116477
  chr8:37552160-37554184
  hypo

SEQ ID NO: 159679 - DNA, 30 bp, Homo sapiens; identical to SEQ ID NO: 75925
  chr8:37636084-37636114
  hypo

SEQ ID NO: 159680 - DNA, 30 bp, Homo sapiens; identical to SEQ ID NO: 22375
  chr8:37652942-37652972
  hypo

SEQ ID NO: 159681 - DNA, 515 bp, Homo sapiens; identical to SEQ ID NO: 45308
  chr8:37655475-37655990
  hypo

SEQ ID NO: 159682 - DNA, 155 bp, Homo sapiens; identical to SEQ ID NO: 45309
  chr8:37656049-37656204
  hypo

SEQ ID NO: 159683 - DNA, 34 bp, Homo sapiens; identical to SEQ ID NO: 75929
  chr8:37673306-37673340
  hypo

SEQ ID NO: 159684 - DNA, 267 bp, Homo sapiens; identical to SEQ ID NO: 75930
  chr8:37688848-37689115
  hypo

SEQ ID NO: 159685 - DNA, 30 bp, Homo sapiens
  chr8:37693236-37693266
  hypo
gggcctggcaagaggcgtggcgtggccacc

SEQ ID NO: 159686 - DNA, 444 bp, Homo sapiens; identical to SEQ ID NO: 75931
  chr8:37702265-37702709
  hypo

SEQ ID NO: 159687 - DNA, 48 bp, Homo sapiens
  chr8:37708575-37708623
  hypo
atcgtgggtgggatccggcagtccaagcccccccgccttttctagacc

SEQ ID NO: 159688 - DNA, 30 bp, Homo sapiens; identical to SEQ ID NO: 75933
  chr8:37719474-37719504
  hypo

SEQ ID NO: 159689 - DNA, 122 bp, Homo sapiens
  chr8:37720437-37720559
  hypo
acctgagtcgggatgcggaggatattgggggtttcttccatgaccctgacaagcaggttgtcaatgtagtcttccagctcgcggacctggaactccttcttgcttatcgtttccttctgttt

SEQ ID NO: 159690 - DNA, 81 bp, Homo sapiens
  chr8:37721473-37721554
  hypo
tttctttccagggcagcaggtcgaggtccagcccagactgtctgctcctgccaaagctgcgctcagaaggactcaatgagc

SEQ ID NO: 159691 - DNA, 30 bp, Homo sapiens
  chr8:37762671-37762701
  hypo
gtaggcacgagccaccgtgccggccagtag

SEQ ID NO: 159692 - DNA, 24 bp, Homo sapiens
  chr8:37815901-37815925
  hypo
ctgggactacgggtgtgtgccacc

SEQ ID NO: 159693 - DNA, 31 bp, Homo sapiens; identical to SEQ ID NO: 75936
  chr8:37914602-37914633
  hypo

SEQ ID NO: 159694 - DNA, 183 bp, Homo sapiens; identical to SEQ ID NO: 75937
  chr8:37946121-37946304
  hypo

SEQ ID NO: 159695 - DNA, 89 bp, Homo sapiens; identical to SEQ ID NO: 75938
  chr8:37961843-37961932
  hypo

SEQ ID NO: 159696 - DNA, 30 bp, Homo sapiens; identical to SEQ ID NO: 75939
  chr8:38010753-38010783
  hypo

SEQ ID NO: 159697 - DNA, 89 bp, Homo sapiens
  chr8:38020242-38020331
  hypo
gagcaaccatgatgtcgtttctcaaacatgagtcttctgcagtaaccagtaactgggaaacagctgaaagctccctcctcacgcctgag

SEQ ID NO: 159698 - DNA, 33 bp, Homo sapiens
  chr8:38032246-38032279
  hypo
aaatgatctgtcggccggaggcggtggctcacg

SEQ ID NO: 159699 - DNA, 31 bp, Homo sapiens; identical to SEQ ID NO: 75941
  chr8:38042304-38042335
  hypo

SEQ ID NO: 159700 - DNA, 276 bp, Homo sapiens
  chr8:38146028-38146304
  hypo
gaggccccagcctctccgctccgttttgatgatctctgcatcagggtatagtctctttgtaaagcactggttctgacaacgatctccagctgggcacacctgcgggtggcattcatactgcaacattctgttcaggcactccgattccaagccacaagggttttcatcagctggcttgcagttacagcggggaatctctgacaggtcagcaacctggatctgcacctttcctattactttgttagcctagaaaacaaaatcgcaagcgagagagag

SEQ ID NO: 159701 - DNA, 33 bp, Homo sapiens
  chr8:38223005-38223038
  hypo
ttgaagacggagtctcgctctgtcacccaagct

SEQ ID NO: 159702 - DNA, 241 bp, Homo sapiens; identical to SEQ ID NO: 75943
  chr8:38223277-38223518
  hypo

SEQ ID NO: 159703 - DNA, 29 bp, Homo sapiens
  chr8:38230021-38230050
  hypo
tttttttttgagacacagtttcgctcttt

SEQ ID NO: 159704 - DNA, 30 bp, Homo sapiens; identical to SEQ ID NO: 75945
  chr8:38246681-38246711
  hypo

SEQ ID NO: 159705 - DNA, 73 bp, Homo sapiens
  chr8:38260115-38260188
  hypo
gatcactgggtctcacggaggaacaactgcgacaacagctcacggaggcaagtagcagcgcccctctggggtc

SEQ ID NO: 159706 - DNA, 105 bp, Homo sapiens
  chr8:38274856-38274961
  hypo
tattcttatgcttcccgatcatcttcatcatctccatttctgagatcaggtctgacaagtctttctctgttgcgtccgctttaaagaacacgttgagactcattt

SEQ ID NO: 159707 - DNA, 35 bp, Homo sapiens; identical to SEQ ID NO: 75946
  chr8:38279096-38279131
  hypo

SEQ ID NO: 159708 - DNA, 30 bp, Homo sapiens; identical to SEQ ID NO: 75947
  chr8:38279585-38279615
  hypo

SEQ ID NO: 159709 - DNA, 71 bp, Homo sapiens
  chr8:38280651-38280722
  hypo
cagggtcagcacctccgcatccgagctattaatccccgaatgctggaacaaaccaacgacacaccagtcag

SEQ ID NO: 159710 - DNA, 136 bp, Homo sapiens
  chr8:38282092-38282228
  hypo
tagccactggatgtgcggctgcgggtcactgtacaccttacacatgaactccacgttgctacccagggccactgttttgttggcgggcaaccctgcttgcaggatgggccggtgaggggaccgctctgtggaagat

SEQ ID NO: 159711 - DNA, 30 bp, Homo sapiens
  chr8:38313794-38313824
  hypo
tagttttcaaagtcccgcgaaagccaccgg

SEQ ID NO: 159712 - DNA, 1505 bp, Homo sapiens; identical to SEQ ID NO: 45327
  chr8:38324811-38326316
  hypo

SEQ ID NO: 159713 - DNA, 43 bp, Homo sapiens
  chr8:38361679-38361722
  hypo
cagaggctgacctgccgggcgcagcgcccgactgtaggatgtg

SEQ ID NO: 159714 - DNA, 18 bp, Homo sapiens
  chr8:38487422-38487440
  hypo
atttaaaaaaattggccg

SEQ ID NO: 159715 - DNA, 645 bp, Homo sapiens; identical to SEQ ID NO: 116514
  chr8:38614518-38615163
  hypo

SEQ ID NO: 159716 - DNA, 144 bp, Homo sapiens
  chr8:38643831-38643975
  hypo
aaacctaaagatgtcgccaggcctcttggcttgttactgaagcagcgaaataagtcagaaatcaaagacttagaagttacgaaaagaaaatctcaaaaaggagaatggggtcaggcgcggtgtcaggcctggaatcctagcatt

SEQ ID NO: 159717 - DNA, 144 bp, Homo sapiens
  chr8:38644034-38644178
  hypo
catatcgagacgcctgtctgtattttaaataaataaatatggagaatgggaaacccatcaggctgtaatctcacagggaatttagtaccctttacctaagacaagacctgggcacttgggaagcctccccgagtgcggtttggg

SEQ ID NO: 159718 - DNA, 45 bp, Homo sapiens
  chr8:38692766-38692811
  hypo
gtctcaaaaaaaaaaaaaaaagtttacttccgtaggtaggaggaa

SEQ ID NO: 159719 - DNA, 106 bp, Homo sapiens
  chr8:38697061-38697167
  hypo
ctgctcttagagagcggtagccatccataataaccaacttggatatgacgtcaaaagtgatgggggcaccaccattgagggcaggggaggacgtgatgcgactcac

SEQ ID NO: 159720 - DNA, 43 bp, Homo sapiens
  chr8:38735771-38735814
  hypo
tatgagacaaagtcaacaaggcgagttttaggtatattaggtt

SEQ ID NO: 159721 - DNA, 289 bp, Homo sapiens; identical to SEQ ID NO: 75953
  chr8:38786179-38786468
  hypo

SEQ ID NO: 159722 - DNA, 30 bp, Homo sapiens; identical to SEQ ID NO: 75954
  chr8:38851140-38851170
  hypo

SEQ ID NO: 159723 - DNA, 34 bp, Homo sapiens; identical to SEQ ID NO: 22388
  chr8:38857789-38857823
  hypo

SEQ ID NO: 159724 - DNA, 105 bp, Homo sapiens; identical to SEQ ID NO: 75956
  chr8:38859452-38859557
  hypo

SEQ ID NO: 159725 - DNA, 395 bp, Homo sapiens; identical to SEQ ID NO: 75957
  chr8:39380182-39380577
  hypo

SEQ ID NO: 159726 - DNA, 27 bp, Homo sapiens
  chr8:39978201-39978228
  hypo
tatttatttgagacagggtcccgctct

SEQ ID NO: 159727 - DNA, 87 bp, Homo sapiens
  chr8:39978287-39978374
  hypo
gttcaagtgatcctcccacctcagtctccgcaatagctgggccttcaggcggggggaggggggtgcgatgagtaccttttaaaaagc

SEQ ID NO: 159728 - DNA, 31 bp, Homo sapiens; identical to SEQ ID NO: 22389
  chr8:40157533-40157564
  hypo

SEQ ID NO: 159729 - DNA, 394 bp, Homo sapiens
  chr8:40790348-40790742
  hypo
cacccccaccctcgccgcccgccgcccccgcaagaggaaaagcaggcgctcagaggagtctgggcttcccacagcccttccgcagcacctcctgtgggcctgctcgccatgcacgctgttcaggcttctgtattaattatgagacgtggaaaagagcaggaaatccatctccctaatgcaactcagcttacgacgttttccacctcagcgattccatccctgcactgccagctcggcggtcccatgagattccccatgccttccgtgagagcagagcgccctgggcatggcctgtgcccagaggtgcaggccgcagcaggaacgcccctgattgagagctgcaccaggcccaccccagcagcccccacgtggctgcccccgaggctggggctgg

SEQ ID NO: 159730 - DNA, 30 bp, Homo sapiens
  chr8:40791242-40791272
  hypo
gagactcaactcgcgcgtccggctgtcttc

SEQ ID NO: 159731 - DNA, 31 bp, Homo sapiens; identical to SEQ ID NO: 75959
  chr8:41141360-41141391
  hypo

SEQ ID NO: 159732 - DNA, 30 bp, Homo sapiens
  chr8:41143696-41143726
  hypo
gggcttgcctattcccgacttcgagtaatc

SEQ ID NO: 159733 - DNA, 413 bp, Homo sapiens; identical to SEQ ID NO: 6247
  chr8:41166266-41166679
  hypo

SEQ ID NO: 159734 - DNA, 243 bp, Homo sapiens; identical to SEQ ID NO: 6248
  chr8:41166745-41166988
  hypo

SEQ ID NO: 159735 - DNA, 323 bp, Homo sapiens; identical to SEQ ID NO: 116528
  chr8:41167025-41167348
  hypo

SEQ ID NO: 159736 - DNA, 30 bp, Homo sapiens; identical to SEQ ID NO: 45336
  chr8:41179541-41179571
  hypo

SEQ ID NO: 159737 - DNA, 27 bp, Homo sapiens
  chr8:41290491-41290518
  hypo
tgctccgcccaccaacgtgggtaggca

SEQ ID NO: 159738 - DNA, 87 bp, Homo sapiens; identical to SEQ ID NO: 22394
  chr8:41290577-41290664
  hypo

SEQ ID NO: 159739 - DNA, 30 bp, Homo sapiens; identical to SEQ ID NO: 75966
  chr8:41293608-41293638
  hypo

SEQ ID NO: 159740 - DNA, 64 bp, Homo sapiens; identical to SEQ ID NO: 22395
  chr8:41325382-41325446
  hypo

SEQ ID NO: 159741 - DNA, 17 bp, Homo sapiens
  chr8:41437078-41437095
  hypo
gggcgtggtgactcacg

SEQ ID NO: 159742 - DNA, 99 bp, Homo sapiens
  chr8:41478654-41478753
  hypo
ggctttcgccgagccgcagcgggatccctgtgcacccggcgcagcctacccttggtggtctaaacggatgctgctgggtgttgcgacccaggacgagat

SEQ ID NO: 159743 - DNA, 30 bp, Homo sapiens; identical to SEQ ID NO: 75970
  chr8:41482379-41482409
  hypo

SEQ ID NO: 159744 - DNA, 93 bp, Homo sapiens
  chr8:41486827-41486920
  hypo
tttctcccaggcaggcgctgttttctcttggttcaggaggccccttcgacacctgctttatttttcttcctgcgctgacgtgacgggagacag

SEQ ID NO: 159745 - DNA, 38 bp, Homo sapiens
  chr8:41488145-41488183
  hypo
tggagggcgtgggcctcgggggccggcacagccagccc

SEQ ID NO: 159746 - DNA, 123 bp, Homo sapiens
  chr8:41488512-41488635
  hypo
ttactcttgacctcccgagctggggctgatccttcctggagtgaatgtgtgtgtgtctgcgatgatcactggggaacgctggctttgggtggggcctgggttcatacccgcttcctccatgta

SEQ ID NO: 159747 - DNA, 30 bp, Homo sapiens; identical to SEQ ID NO: 22396
  chr8:41507690-41507720
  hypo

SEQ ID NO: 159748 - DNA, 30 bp, Homo sapiens; identical to SEQ ID NO: 75972
  chr8:41507922-41507952
  hypo

SEQ ID NO: 159749 - DNA, 30 bp, Homo sapiens; identical to SEQ ID NO: 75973
  chr8:41518036-41518066
  hypo

SEQ ID NO: 159750 - DNA, 30 bp, Homo sapiens
  chr8:41524659-41524689
  hypo
aggagtgcacacaggcgctggccctgcccg

SEQ ID NO: 159751 - DNA, 30 bp, Homo sapiens
  chr8:41525367-41525397
  hypo
agagcgccttgggcacgtcacccaggtcac

SEQ ID NO: 159752 - DNA, 30 bp, Homo sapiens
  chr8:41553681-41553711
  hypo
acaggcgtgagctatcgtgcccgacctgag

SEQ ID NO: 159753 - DNA, 488 bp, Homo sapiens
  chr8:41553926-41554414
  hypo
ccaggccctcctcctcggccagtgggggcggcgtgctgagcttctggggcttgaccaggcggcaggtgatgcgggtgggcgctgcgcacgtccgtggcgggatcaccactcgcaggccgttgtggcgacttcctctcatggaaccaccccgggcgtcaaccatgaagctcaccagaaacctaggagtggggcagatgcacgttgggcttctgcatcccctctcggagatggagacaggagtccccgagccctgcgcccgccactcaccctgtatgcaccgggctggccaccgggctgatgttgtctgaggtctcggtggccgggctgctggggatgagggagtcctcatcatactctttagatgcctgaggagagagaaagggtcctcctgtcccacctcctcccgggccagctggatgccgtgccagggcgtggaggcttggaagaaccttgccgctagaaaccaggtgccacgtggagaaagtgct

SEQ ID NO: 159754 - DNA, 30 bp, Homo sapiens
  chr8:41562201-41562231
  hypo
atggacactgaaccgcgagaagagggctat

SEQ ID NO: 159755 - DNA, 30 bp, Homo sapiens
  chr8:41565793-41565823
  hypo
aaaactgctcacgcgcgcttcctccccaga

SEQ ID NO: 159756 - DNA, 69 bp, Homo sapiens
  chr8:41566351-41566420
  hypo
cgtggccctcctgggcggccaggtgaaggggcgtcacaccttgcaccgactcggcgtttgctgagcccc

SEQ ID NO: 159757 - DNA, 30 bp, Homo sapiens
  chr8:41575626-41575656
  hypo
ggtgaccgcgtcgatcgaggctcccgtctt

SEQ ID NO: 159758 - DNA, 29 bp, Homo sapiens
  chr8:41581593-41581622
  hypo
ccgcgcccggcctaagacattttaaaacc

SEQ ID NO: 159759 - DNA, 30 bp, Homo sapiens; identical to SEQ ID NO: 75976
  chr8:41581830-41581860
  hypo

SEQ ID NO: 159760 - DNA, 89 bp, Homo sapiens; identical to SEQ ID NO: 75977
  chr8:41582823-41582912
  hypo

SEQ ID NO: 159761 - DNA, 30 bp, Homo sapiens
  chr8:41584180-41584210
  hypo
aggcatgagccactgcgcttggccatgagc

SEQ ID NO: 159762 - DNA, 30 bp, Homo sapiens
  chr8:41584531-41584561
  hypo
caccctcaagtgtgacgtcgtttctttggt

SEQ ID NO: 159763 - DNA, 276 bp, Homo sapiens
  chr8:41590544-41590820
  hypo
cgcgcccagtctgtttcattttatttttaattgctggctgcatcttgtttgataaataagatgcatgtcaggtaaaaaatgaaacttattttgcaatctatagatgtatcaatttcatgactctgggattttgaagttgagtcactggtatttataatctactgaaatggagtgaaatacgttactgtggatgcctggcgtcgccccatgccaaacgcctcctcatgaaacagaatgctgttccagatcgttagcgaggagaggaaatcagtttgg

SEQ ID NO: 159764 - DNA, 35 bp, Homo sapiens; identical to SEQ ID NO: 75979
  chr8:41602334-41602369
  hypo

SEQ ID NO: 159765 - DNA, 182 bp, Homo sapiens; identical to SEQ ID NO: 22398
  chr8:41643316-41643498
  hypo

SEQ ID NO: 159766 - DNA, 30 bp, Homo sapiens
  chr8:41648338-41648368
  hypo
ggcatcttcaaatcacgccgtgtagacaga

SEQ ID NO: 159767 - DNA, 30 bp, Homo sapiens
  chr8:41666885-41666915
  hypo
ggagcaattagcaaacgcgtcaacatgcac

SEQ ID NO: 159768 - DNA, 189 bp, Homo sapiens
  chr8:41668172-41668361
  hypo
tccagagcaacgtgccgccgaagcgtaatagcccgatgggttcatcttgcccgctgcccagaaagccaaaagcgcggagaacaggcactgccccaaagtaagggcctcatgaccacagggccgggagagccaggagaacaggagaaacttcccacacctgtctccccgggaattcggaggccagggtgt

SEQ ID NO: 159769 - DNA, 30 bp, Homo sapiens; identical to SEQ ID NO: 22400
  chr8:41684885-41684915
  hypo

SEQ ID NO: 159770 - DNA, 193 bp, Homo sapiens
  chr8:41688592-41688785
  hypo
cagacgaaagcacagcggcctgggagacaggagacgaggctccgcctggaccttgacgacgaccttccttaaaactatggactcgtcatctgacctctcaaggcctccatttccccatctgtaaaaccgaaagcccctcagcaatctggggctatcatctgaaaagtgtgggcagctgcgggcgctcatacct

SEQ ID NO: 159771 - DNA, 30 bp, Homo sapiens; identical to SEQ ID NO: 22401
  chr8:41707501-41707531
  hypo

SEQ ID NO: 159772 - DNA, 24 bp, Homo sapiens
  chr8:41711287-41711311
  hypo
taatttttagaaacagggtctcgt

SEQ ID NO: 159773 - DNA, 24 bp, Homo sapiens
  chr8:41711430-41711454
  hypo
accgcacttgaccccctgggttaa

SEQ ID NO: 159774 - DNA, 360 bp, Homo sapiens; identical to SEQ ID NO: 45344
  chr8:41753392-41753752
  hypo

SEQ ID NO: 159775 - DNA, 1438 bp, Homo sapiens; identical to SEQ ID NO: 6254
  chr8:41753770-41755208
  hypo

SEQ ID NO: 159776 - DNA, 30 bp, Homo sapiens; identical to SEQ ID NO: 22404
  chr8:41828965-41828995
  hypo

SEQ ID NO: 159777 - DNA, 30 bp, Homo sapiens
  chr8:41841913-41841943
  hypo
actgaagcttcttgtcgacaagcccgtggc

SEQ ID NO: 159778 - DNA, 159 bp, Homo sapiens; identical to SEQ ID NO: 75989
  chr8:41910397-41910556
  hypo

SEQ ID NO: 159779 - DNA, 19 bp, Homo sapiens
  chr8:41947421-41947440
  hypo
gatacgtgcctgcaaagtg

SEQ ID NO: 159780 - DNA, 37 bp, Homo sapiens
  chr8:41960684-41960721
  hypo
tcttgtcaaatgaagcgggtaacgtgggaatgttaat

SEQ ID NO: 159781 - DNA, 28 bp, Homo sapiens
  chr8:42004492-42004520
  hypo
ttgggattacaggcgtgagccactgtgc

SEQ ID NO: 159782 - DNA, 206 bp, Homo sapiens
  chr8:42011672-42011878
  hypo
cacctttcaagtgctcgctggtcccatagtggctatcgtattaagctgcgcatttcttgtgtatgtgtgagctgttgccaaaacatgacatcaaattcagtgttcttggaagccctcttcaaagaacactgattgtgttgcagtcaggcaacgcaaaacatgaggcacggcccttttcttcaaggagtttgcggttcggttgagaa

SEQ ID NO: 159783 - DNA, 30 bp, Homo sapiens
  chr8:42024730-42024760
  hypo
agtagttcccttggacgctttgaaataacg

SEQ ID NO: 159784 - DNA, 30 bp, Homo sapiens; identical to SEQ ID NO: 75992
  chr8:42033457-42033487
  hypo

SEQ ID NO: 159785 - DNA, 35 bp, Homo sapiens; identical to SEQ ID NO: 6255
  chr8:42040328-42040363
  hypo

SEQ ID NO: 159786 - DNA, 276 bp, Homo sapiens
  chr8:42053905-42054181
  hypo
ggcgatagctctgtccgcatcacacagaggcgattcgagcagctgaaaaggccaagtggggtaagagatgacaaagaaatgagtcatccggccagcagaaaaacagtgcagtctgaaaacaagaaagagcgaagagagggaggaaaaatgagtccttgtttcgccttcgctgaagaggtgggcgtcgaggtctggggccagtgacgggatgcagagcagagtgaaagccagaacaatggactcagactcgggaccgcagggcgtggctgggatgga

SEQ ID NO: 159787 - DNA, 90 bp, Homo sapiens; identical to SEQ ID NO: 75994
  chr8:42082695-42082785
  hypo

SEQ ID NO: 159788 - DNA, 30 bp, Homo sapiens; identical to SEQ ID NO: 75995
  chr8:42083084-42083114
  hypo

SEQ ID NO: 159789 - DNA, 86 bp, Homo sapiens; identical to SEQ ID NO: 22406
  chr8:42134200-42134286
  hypo

SEQ ID NO: 159790 - DNA, 30 bp, Homo sapiens; identical to SEQ ID NO: 75997
  chr8:42136063-42136093
  hypo

SEQ ID NO: 159791 - DNA, 266 bp, Homo sapiens
  chr8:42144493-42144759
  hypo
cttgtttagcagtggcaggatcggctctcaggctggggctccgggagctgctgccttgggcagctgctgccccgcagttgtcttggagacccccccatagccaaaagaggtgacagtggtgcagtggtgactcccttgtggcagctggagtgcccgaggccagagccgctttccctgctgcccgtgccacagcctcagggcctgcccgtctccagtgtccccactcatgcaccagggagaagaggggaggccgccaggagccagtg

SEQ ID NO: 159792 - DNA, 30 bp, Homo sapiens
  chr8:42145015-42145045
  hypo
cagagcagggccaagcgccagggtgggtgg

SEQ ID NO: 159793 - DNA, 143 bp, Homo sapiens
  chr8:42145509-42145652
  hypo
agggaaacctctctgcgcaggaatggtcagtagaggtttcatggcggagctgggaatggagcagggccttgaaggctctgtagactctggatggatagaaatgaggtgggagaggctgggtgcggtggctcacgtctgtaatc

SEQ ID NO: 159794 - DNA, 186 bp, Homo sapiens
  chr8:42146043-42146229
  hypo
ggtgattgcaggtaacgcttggggcctggagacccctcccatgcagcagacagggtgggatttggcctgcagctcgctctgctggtccccactgtgctgtttctgtaggaaacaggtgagcagattgccatcaagcagtgccggcaggagctcagcccccggaaccgagagcggtggtgcctggag

SEQ ID NO: 159795 - DNA, 174 bp, Homo sapiens; identical to SEQ ID NO: 22407
  chr8:42147386-42147560
  hypo

SEQ ID NO: 159796 - DNA, 86 bp, Homo sapiens; identical to SEQ ID NO: 76001
  chr8:42148194-42148280
  hypo

SEQ ID NO: 159797 - DNA, 30 bp, Homo sapiens
  chr8:42160699-42160729
  hypo
gaatggtggtggcggcgacggcatacagag

SEQ ID NO: 159798 - DNA, 44 bp, Homo sapiens; identical to SEQ ID NO: 22409
  chr8:42255792-42255836
  hypo

SEQ ID NO: 159799 - DNA, 43 bp, Homo sapiens; identical to SEQ ID NO: 22410
  chr8:42256015-42256058
  hypo

SEQ ID NO: 159800 - DNA, 463 bp, Homo sapiens
  chr8:42268279-42268742
  hypo
ccgtcgtcctgtgccgagggtctgctcaagggacagaggaggacggtgctgtcctggggtttcgtctggcttcctgtgcctgtcctcggaggctcgctgttacctttctgagcctcagcttctagcgcaggggctgggaagggagctcagaaggggccggagccgcgcggccccctgagcgttctcggtaaacgctcggggtccccactccaagcccggccttccgcatgccgcttcctcggctacccttgagaagcaaagcccccttttcccttgcccaccacgccagtgctggcgctcaggtgctgcctcccctgtaacccacagcccggttctgggtgcaggcgtgtgtgttagcgcgaggggcgttttcacatcccgcgcgcccttaatcgtgggctcctctgcgccccagcggcctctcaggtaagggtggtcggatactagcgccaccggccttgcc

SEQ ID NO: 159801 - DNA, 30 bp, Homo sapiens; identical to SEQ ID NO: 76005
  chr8:42271398-42271428
  hypo

SEQ ID NO: 159802 - DNA, 31 bp, Homo sapiens; identical to SEQ ID NO: 22411
  chr8:42287377-42287408
  hypo

SEQ ID NO: 159803 - DNA, 30 bp, Homo sapiens; identical to SEQ ID NO: 76007
  chr8:42292909-42292939
  hypo

SEQ ID NO: 159804 - DNA, 298 bp, Homo sapiens; identical to SEQ ID NO: 76008
  chr8:42293858-42294156
  hypo

SEQ ID NO: 159805 - DNA, 64 bp, Homo sapiens
  chr8:42306696-42306760
  hypo
gtcatttccccctgcggatggacatactggggcacagcctcagtggctcgtgttcactcagcca

SEQ ID NO: 159806 - DNA, 30 bp, Homo sapiens
  chr8:42314719-42314749
  hypo
ataggtgtgagccaccgcgcccagcctcac

SEQ ID NO: 159807 - DNA, 43 bp, Homo sapiens
  chr8:42315265-42315308
  hypo
gtgttgggattacaggcatgagccactgcgcccggctgagtat

SEQ ID NO: 159808 - DNA, 217 bp, Homo sapiens
  chr8:42316749-42316966
  hypo
tctcaaaaaaaaaaaaaaaaaaaaaaaacataaaaaataacaacaaaatccatgagaatgacaaggaaaggagtaattcagcaaagaaaatcatcattggcttcggtatctaaaaaaacaaagcatggcttctagtctctggataaactggtctgatatttccaggggtctgtactctgtgctgtgaacggctttagagctccgctgggcattgctg

SEQ ID NO: 159809 - DNA, 42 bp, Homo sapiens
  chr8:42318195-42318237
  hypo
ctagtaagttcaacacgaatggtactgcgcatgttttcagtt

SEQ ID NO: 159810 - DNA, 26 bp, Homo sapiens
  chr8:42318937-42318963
  hypo
tttcaattaaattaccgtatgttttt

SEQ ID NO: 159811 - DNA, 384 bp, Homo sapiens; identical to SEQ ID NO: 76010
  chr8:42333235-42333619
  hypo

SEQ ID NO: 159812 - DNA, 23 bp, Homo sapiens
  chr8:42333918-42333941
  hypo
ccggtttactgtgtctcaatgga

SEQ ID NO: 159813 - DNA, 35 bp, Homo sapiens; identical to SEQ ID NO: 76012
  chr8:42350486-42350521
  hypo

SEQ ID NO: 159814 - DNA, 41 bp, Homo sapiens; identical to SEQ ID NO: 76013
  chr8:42399255-42399296
  hypo

SEQ ID NO: 159815 - DNA, 121 bp, Homo sapiens
  chr8:42544828-42544949
  hypo
cgctgggcagggctcgggaggtgcagcccaccatacctgagcctcccctgcctccccccacccagcctcccccccaccccgcctcccccccaccccgcctcccccccaccccgcctccgtg

SEQ ID NO: 159816 - DNA, 225 bp, Homo sapiens
  chr8:42600786-42601011
  hypo
ccctttttcctctccagatgttcaccttctcttatgtaaaatgcaccattcgcagccggcctgtccctctccctactcgccccacccccacctctaaggacgtatataaatgttaaacctcctgaaatcctcttatgaaaaacagccacaggtgtgtcccacaggtgcggtgtttttcccagacccgccctcaagtggcttaataaacctcgatgatcaagacac

SEQ ID NO: 159817 - DNA, 83 bp, Homo sapiens
  chr8:42651994-42652077
  hypo
tccagacctgcagccagccatgcccaagcctccccacccccctacccccgccgtgggcttctgcatggcgcagcctccccaac

SEQ ID NO: 159818 - DNA, 30 bp, Homo sapiens
  chr8:42699328-42699358
  hypo
gggttcgaactagagcgactctgtgttgag

SEQ ID NO: 159819 - DNA, 241 bp, Homo sapiens
  chr8:42749967-42750208
  hypo
attacaggcgcgagacaccgcgcctggccacgtatgtgtaatttctaaaggtttctctgcccttggtgtagggaagaatgtttgaaaaaaagaccattgagaatacttcaggtaagtttttttttttttacacttacaaaatgctaaatgatcaggggtcaactatcaagtggtactctgtaaggcaaccttaaaaactcactgctgacccaggctcggtggctcacacttttgatcccag

SEQ ID NO: 159820 - DNA, 31 bp, Homo sapiens
  chr8:42773450-42773481
  hypo
agcctgggcaacaaagcgagacattctctct

SEQ ID NO: 159821 - DNA, 39 bp, Homo sapiens; identical to SEQ ID NO: 76015
  chr8:42917135-42917174
  hypo

SEQ ID NO: 159822 - DNA, 30 bp, Homo sapiens
  chr8:42938703-42938733
  hypo
atttctagagatctccgccttcaggttaac

SEQ ID NO: 159823 - DNA, 30 bp, Homo sapiens
  chr8:42979974-42980004
  hypo
ttatctcataacgttcgctatggcacccag

SEQ ID NO: 159824 - DNA, 433 bp, Homo sapiens; identical to SEQ ID NO: 116564
  chr8:42996734-42997167
  hypo

SEQ ID NO: 159825 - DNA, 30 bp, Homo sapiens; identical to SEQ ID NO: 76017
  chr8:43059504-43059534
  hypo

SEQ ID NO: 159826 - DNA, 234 bp, Homo sapiens; identical to SEQ ID NO: 76018
  chr8:43059741-43059975
  hypo

SEQ ID NO: 159827 - DNA, 30 bp, Homo sapiens; identical to SEQ ID NO: 76019
  chr8:43060263-43060293
  hypo

SEQ ID NO: 159828 - DNA, 30 bp, Homo sapiens; identical to SEQ ID NO: 76020
  chr8:43061714-43061744
  hypo

SEQ ID NO: 159829 - DNA, 30 bp, Homo sapiens
  chr8:43062048-43062078
  hypo
gggttcctgggccccgggtcctgtccaccc

SEQ ID NO: 159830 - DNA, 132 bp, Homo sapiens
  chr8:48044650-48044782
  hypo
caacaccaagccaagcgacgaacgccaagccaagccgttacatacgcatgcgcagaacaccaagccaagctgctgcggcgtgcgcgtgcggcgtacctcagatggcaagttactgcacgtggcagtgtccga

SEQ ID NO: 159831 - DNA, 264 bp, Homo sapiens
  chr8:48091761-48092025
  hypo
ggagctgtttcttccccagggcgcagccacaagtcgtcccgaacctgctgcagtgccggagagtcctcagggaactggagcgctacttctccacagtacagacgccacgctgcacatcacaccactgacaccatgcacaccacgcacaccacacataccacgctgcatctgcgcagagaacacgcatgcataccacatggggggcagaaaaggcggtttggcgatccctgccggtcacattgcgcagtgcaggctgattccacc

SEQ ID NO: 159832 - DNA, 31 bp, Homo sapiens; identical to SEQ ID NO: 76021
  chr8:48092297-48092328
  hypo

SEQ ID NO: 159833 - DNA, 31 bp, Homo sapiens
  chr8:48097065-48097096
  hypo
gtgagccaccgcacctggccttttttttcca

SEQ ID NO: 159834 - DNA, 298 bp, Homo sapiens; identical to SEQ ID NO: 76022
  chr8:48172268-48172566
  hypo

SEQ ID NO: 159835 - DNA, 37 bp, Homo sapiens
  chr8:48255176-48255213
  hypo
tacaggtatgatcaagtgcacccggcctgaaatgtct

SEQ ID NO: 159836 - DNA, 439 bp, Homo sapiens
  chr8:48292751-48293190
  hypo
cctgcaccacagcaacgcgtgctgcccctgcctgggcctggcagaaggctcccttgcagcagctcaggactcacactcactgagcaggttttaaaacacacagaatggccagacaggtcgtatcacagtttgtgtcagaattccacaggtgtacactatttttttttggagaagggggtacttttcatctgtgatcactgcagacaaggtgcgtcaggacctcggaggaccgtgttgctgggcggggcctgctgtttgctgtggagccccctggccctggtcactgccgccttctccaccctccactcctgcttggtgaactttgacccggcaggtgcctttcttgagcctcgtgattcccctcccctcttgccccgctgtctgtcatttctccttgggctcctcagagcaggtgccaggctgacgataggtggagggg

SEQ ID NO: 159837 - DNA, 197 bp, Homo sapiens
  chr8:48294167-48294364
  hypo
ctcagaagatcctattcgggcaggtctgggcctggtcagtaattgggtgggaggcctcagagagcagaaaccagcgattggcaggaagtggcatgggcagctcacctggcctgcgagtctgggctcagctggacctgccccacgtggcaccaggcgcacaaggtgtcctcacagagccgccccgtggcacgcctttg

SEQ ID NO: 159838 - DNA, 204 bp, Homo sapiens; identical to SEQ ID NO: 22418
  chr8:48348566-48348770
  hypo

SEQ ID NO: 159839 - DNA, 240 bp, Homo sapiens; identical to SEQ ID NO: 22419
  chr8:48396518-48396758
  hypo

SEQ ID NO: 159840 - DNA, 20 bp, Homo sapiens
  chr8:48513969-48513989
  hypo
gggagaggctaggcgcggtg

SEQ ID NO: 159841 - DNA, 42 bp, Homo sapiens
  chr8:48523966-48524008
  hypo
aaagaaaatagaggctgggcccggtgtctcacgcctgtaatc

SEQ ID NO: 159842 - DNA, 231 bp, Homo sapiens; identical to SEQ ID NO: 76026
  chr8:48585772-48586003
  hypo

SEQ ID NO: 159843 - DNA, 41 bp, Homo sapiens; identical to SEQ ID NO: 76027
  chr8:48593634-48593675
  hypo

SEQ ID NO: 159844 - DNA, 1724 bp, Homo sapiens; identical to SEQ ID NO: 45358
  chr8:48649724-48651448
  hypo

SEQ ID NO: 159845 - DNA, 98 bp, Homo sapiens
  chr8:48675250-48675348
  hypo
ttaaatggaagcatttttctttctccgtggcacataaagtctgggtgcatcttagattcaggcacatctcaagtgagctgaaacgcagtactcaattg

SEQ ID NO: 159846 - DNA, 121 bp, Homo sapiens; identical to SEQ ID NO: 76029
  chr8:48683806-48683927
  hypo

SEQ ID NO: 159847 - DNA, 26 bp, Homo sapiens
  chr8:48684166-48684192
  hypo
accacgcccagccaataatttatatt

SEQ ID NO: 159848 - DNA, 30 bp, Homo sapiens
  chr8:48691037-48691067
  hypo
cgcatgcccaaagtcgatcccgatcacgcc

SEQ ID NO: 159849 - DNA, 117 bp, Homo sapiens; identical to SEQ ID NO: 76031
  chr8:48694943-48695060
  hypo

SEQ ID NO: 159850 - DNA, 181 bp, Homo sapiens; identical to SEQ ID NO: 22425
  chr8:48711777-48711958
  hypo

SEQ ID NO: 159851 - DNA, 567 bp, Homo sapiens
  chr8:48744128-48744695
  hypo
cggctgatcccaggccggccacacttccacccgcggagagaactgggcgcactcctggacccccaccagagcgccatgagggctgcatccctgtgggggagccccaggaggctggtttggagcagtcccgcaacctggtttgcaggtgacattggaggcagtgtctggcaggaagcctgttcacttcgtctgtatcctgtgacagaaactgcatcgttctgatcaaattcttgacaagatacaaaccttctctcgtttttgctcagcaacgccttttctggcatacatcaaactgagcttctcctggtccctcataaaccgtctgcgcagtcgtagtaggtccgtccggccggccgcacctggagagggaaagcaggcccagttactccccgccgcccagacacttggctctgctggttcattttcacctcgggtttcctcaaagacaaaacctacaggtgccgcagaggcagcgaccgggagcaggagtgcaggggccacagctgcaactggaactgctcagcagtggattcagcaggcatgagcgctgaacgggccaggcccctc

SEQ ID NO: 159852 - DNA, 180 bp, Homo sapiens; identical to SEQ ID NO: 76035
  chr8:48793717-48793897
  hypo

SEQ ID NO: 159853 - DNA, 195 bp, Homo sapiens; identical to SEQ ID NO: 76036
  chr8:48801153-48801348
  hypo

SEQ ID NO: 159854 - DNA, 162 bp, Homo sapiens
  chr8:48854508-48854670
  hypo
attaaagacaaccagcgcagtggagggagggctggccggcttccctgcaggcccacgccccacccagccctgtgctaggaaaggcaggcatcgctagggaacaaggcccccagggtgccaccagggatgatccctctgcacacattccggacactcctcctt

SEQ ID NO: 159855 - DNA, 76 bp, Homo sapiens
  chr8:48854907-48854983
  hypo
gggagactaaggaggcgagagggacaggcggcagaggcagaggccaaagatgaggcccatcggctcagttttttgg

SEQ ID NO: 159856 - DNA, 30 bp, Homo sapiens; identical to SEQ ID NO: 76038
  chr8:48889505-48889535
  hypo

SEQ ID NO: 159857 - DNA, 84 bp, Homo sapiens
  chr8:48985103-48985187
  hypo
gtgtgagggtcagggcgggtagaaacaagctgtggggtgaggtagaaacgccagtgtatagcggaagagcgcggcctcttactc

SEQ ID NO: 159858 - DNA, 170 bp, Homo sapiens; identical to SEQ ID NO: 22429
  chr8:49055452-49055622
  hypo

SEQ ID NO: 159859 - DNA, 702 bp, Homo sapiens; identical to SEQ ID NO: 76040
  chr8:49172621-49173323
  hypo

SEQ ID NO: 159860 - DNA, 43 bp, Homo sapiens; identical to SEQ ID NO: 76041
  chr8:49187832-49187875
  hypo

SEQ ID NO: 159861 - DNA, 249 bp, Homo sapiens; identical to SEQ ID NO: 22430
  chr8:49241525-49241774
  hypo

SEQ ID NO: 159862 - DNA, 356 bp, Homo sapiens; identical to SEQ ID NO: 22431
  chr8:49334893-49335249
  hypo

SEQ ID NO: 159863 - DNA, 237 bp, Homo sapiens; identical to SEQ ID NO: 76044
  chr8:49339717-49339954
  hypo

SEQ ID NO: 159864 - DNA, 602 bp, Homo sapiens; identical to SEQ ID NO: 76045
  chr8:49382241-49382843
  hypo

SEQ ID NO: 159865 - DNA, 501 bp, Homo sapiens
  chr8:49390182-49390683
  hypo
aagcccagcatcccacaaggacggacactcactacagcccggtgcctgcggagtattccgaacgcgagatccaaggaaaccacgaaggctcctctgcgggctcccttgcccctctgcggttcagtcgggagacgctcaggcgctgacaacagcctccaggtgccgttccctgcgcatggccccatctttgcgggcagtgtccagtgggcttgtgctcacacctgcgctgggggctccacactagacggccctggactactgaaatagtggacagaagggtctcccgagaatgtccagggtgggcaggcagtgctggggagccagcgggaagggaagggagcctgaggcggagaaacgcccacgcgggagctgctagtgcagccgcaagagcaaggcctgggctgcagtaggggggctgggcagtggcccgcagtgtgcagcaggccctggagaccaggccaagggaagccttggagtgaacctggtcgcaggtgcgcaggt

SEQ ID NO: 159866 - DNA, 30 bp, Homo sapiens; identical to SEQ ID NO: 76047
  chr8:49426517-49426547
  hypo

SEQ ID NO: 159867 - DNA, 529 bp, Homo sapiens; identical to SEQ ID NO: 45366
  chr8:49468662-49469191
  hypo

SEQ ID NO: 159868 - DNA, 275 bp, Homo sapiens
  chr8:49493912-49494187
  hypo
gttacattttataagtagaaactcagattcaaaggactcacagagataatctagccttaactggaaggcccttcatacatacttttgatatttatatgctttattttcacaggcactatcttctgcccgtctttttgtaggtcagtggtttgaaggacggtgccatggtcatccttcccagcgcagggccggcgtggccctgggcggctgcatcatccccatggaggctgccctgcccgggctgtgcatgatctcacaggcgcgctgccaggggc

SEQ ID NO: 159869 - DNA, 194 bp, Homo sapiens
  chr8:49496390-49496584
  hypo
cgacactcgtcctcccgcccttccctgcccagtcctcgcctgactggcctcttccctacatgctgttctccacgttgccttcccgtgagctttcctttttgcctaaacacatttttcagctccatgtttctgacagactggttactaaaatccaacccaacaacgtgtaggacggccaagtgtataatatgcat

SEQ ID NO: 159870 - DNA, 45 bp, Homo sapiens; identical to SEQ ID NO: 76050
  chr8:49520278-49520323
  hypo

SEQ ID NO: 159871 - DNA, 31 bp, Homo sapiens; identical to SEQ ID NO: 76051
  chr8:49527632-49527663
  hypo

SEQ ID NO: 159872 - DNA, 443 bp, Homo sapiens
  chr8:49546881-49547324
  hypo
ggcctgcatccgcatttttcacaggctcagtgcccgaatgagctgcagtgtagtctggctggctccccaacctgtcgcacaggccttgctcaccactcctgacttttcaaggcagttgatttcactgttgaatacttccctattcaaataaagctctttactccaatgttattcgttgctccgggttccgtttgtaaagagcaaggctgcacagacctgtctgctccgttgagacagtgaaggccgtctcacaaccgcaccttgggactcgcttccacataacacctcttctgttcctctcacggttcctcacagcgccagggccaagattctctcggggctggttccctgcctcgcagtcctgcctgacatcttggggctttcgaaatgggcaagtcctacggctgagttttgatcctcccggagttcagtgggtctcaccc

SEQ ID NO: 159873 - DNA, 30 bp, Homo sapiens; identical to SEQ ID NO: 22437
  chr8:49561741-49561771
  hypo

SEQ ID NO: 159874 - DNA, 413 bp, Homo sapiens
  chr8:49571716-49572129
  hypo
cttgggaggctgcgtcgtcctatcacagttaagaaagaattatttcgtgagttttacctagcagtttacataaatcagtttacagcagatttggagaaaaagaacattaaaagcagaccaggtgaacgagtttgaaacggcacacggaattggaagggagaaaaggttgtgatcactgctcaaacaagttcttccttccctccaagaaatgaggcgtgggctgtggaacccattgcggctaatcgtaaacaggtgcatcttaaacataggatgccaacctgctccaacatgctgggcaccgggcttagctgcagctaattacgcgtgcgctctgaccgggcggcccacagcggctctgcaggctcagcggggcgagcgcaggaggcgcgggcccgacacgcgtgtttagacct

SEQ ID NO: 159875 - DNA, 44 bp, Homo sapiens
  chr8:49572363-49572407
  hypo
atttttgcaggatgacggatttgaacgagcgtgttgcctcttgt

SEQ ID NO: 159876 - DNA, 81 bp, Homo sapiens; identical to SEQ ID NO: 76056
  chr8:49588259-49588340
  hypo

SEQ ID NO: 159877 - DNA, 261 bp, Homo sapiens; identical to SEQ ID NO: 76057
  chr8:49608989-49609250
  hypo

SEQ ID NO: 159878 - DNA, 144 bp, Homo sapiens
  chr8:49747114-49747258
  hypo
cacggtgtgcaagtgcgtctggaacagggcttgggaagaagccgcactgcagggcacaataaccatgtgtagtgcttcctggctgaaatctgcactcaacaggaggtcgctcttagagtattaggctgctgctttgatatgagg

SEQ ID NO: 159879 - DNA, 324 bp, Homo sapiens
  chr8:49747317-49747641
  hypo
tttctagaagcaggcttgactggcatgcatgtgcatagatgcgggtggcccctcatcaggagggatgaggagaggagccgtgggctcgcggaagagcagcgagggacactggcgcacagagcagagaggagcagtgagcaggcggcacccccgggcagggtaaaagggcacgaagaaaagcgaaggtgcgaggggaggaccgactggcagcaagcgtccgggaggggcaggcaaaggctctcctcgaagtgcctttacgcttaggtagaatttccatgcctccctcgcgctccaccctgctgcgtgaacattttcctggcctgc

SEQ ID NO: 159880 - DNA, 39 bp, Homo sapiens
  chr8:49747862-49747901
  hypo
tgggaagctgctctgcggccccctcgagcatgctgaccc

SEQ ID NO: 159881 - DNA, 36 bp, Homo sapiens; identical to SEQ ID NO: 22442
  chr8:49797124-49797160
  hypo

SEQ ID NO: 159882 - DNA, 161 bp, Homo sapiens; identical to SEQ ID NO: 76060
  chr8:49803110-49803271
  hypo

SEQ ID NO: 159883 - DNA, 522 bp, Homo sapiens
  chr8:49808458-49808980
  hypo
cattaaatatgaacgaagcactatatgagactataaatggaattaatttttgtgaaaacaagaaaaggagtccccgaattaattactgctgtaagattgagcttgagaatttgtcttacaaaatcttttaataatgtattattctactcacaaaacagatattggttttgtgcctagtatgttccctgaggtgtacagggaacctcaaggagctcccagactatgggagtgacccctgcggagctgacaagccaatgctggagaagtgcacgggcaggctcaggcgcagccactcaatgggcctgtctgtgtcgggggcaggggcacagagaggggcaggtgagtcgaagctgattgggtgaagaaaagacagtgaaaagacggtgagaccaaaggcacagagcgggtttcccgccccagctaccacgctggtctgcagagcggtaagtctaaactggggagaggtcagaggcagcacaggggcctgtggggcaaccgcaggatccgcgaccctctctgagc

SEQ ID NO: 159884 - DNA, 105 bp, Homo sapiens; identical to SEQ ID NO: 76062
  chr8:49809396-49809501
  hypo

SEQ ID NO: 159885 - DNA, 30 bp, Homo sapiens; identical to SEQ ID NO: 76063
  chr8:49820746-49820776
  hypo

SEQ ID NO: 159886 - DNA, 471 bp, Homo sapiens; identical to SEQ ID NO: 76064
  chr8:49890417-49890888
  hypo

SEQ ID NO: 159887 - DNA, 250 bp, Homo sapiens
  chr8:49959158-49959408
  hypo
cagcccctccccagacgccagcgactctccggccaggcaggaacctttcatcagatacactgggtagggctgattatggaggaggaacgggaagttctaccaggagtcgctgtactgtattcacggctcttgttatatgatttatgctggcattatctaaactgagaagcggacaatcctttattcaaaggcgagctccctctattttgtgttgccgctcatggagtcctaaggtcggagccccatagga

SEQ ID NO: 159888 - DNA, 88 bp, Homo sapiens
  chr8:49983879-49983967
  hypo
aaagggagccacaatttgatgcgtaagtcaactgagtctgtgaaagggcaaagcaggccgggcgcagtggcttacgcctgtaatccca

SEQ ID NO: 159889 - DNA, 38 bp, Homo sapiens; identical to SEQ ID NO: 76065
  chr8:50014662-50014700
  hypo

SEQ ID NO: 159890 - DNA, 98 bp, Homo sapiens
  chr8:50015580-50015678
  hypo
gtctatgggaccgggcgtcttggagcagggggctttgctcctcggggaggctcaggctgtgcaagagcccatggcctgggtggggcgcgggaaggctc

SEQ ID NO: 159891 - DNA, 32 bp, Homo sapiens; identical to SEQ ID NO: 76067
  chr8:50053018-50053050
  hypo

SEQ ID NO: 159892 - DNA, 41 bp, Homo sapiens; identical to SEQ ID NO: 22445
  chr8:50071090-50071131
  hypo

SEQ ID NO: 159893 - DNA, 43 bp, Homo sapiens; identical to SEQ ID NO: 76069
  chr8:50115375-50115418
  hypo

SEQ ID NO: 159894 - DNA, 30 bp, Homo sapiens
  chr8:50187635-50187665
  hypo
gcaggggccacgcggcggagtttccggttg

SEQ ID NO: 159895 - DNA, 30 bp, Homo sapiens
  chr8:50187977-50188007
  hypo
cgagctgttactaatcgttcctcccagatg

SEQ ID NO: 159896 - DNA, 25 bp, Homo sapiens
  chr8:50213051-50213076
  hypo
cctcggcttcccaaagtgctggatt

SEQ ID NO: 159897 - DNA, 20 bp, Homo sapiens
  chr8:50313611-50313631
  hypo
aataccaataacagacaagt

SEQ ID NO: 159898 - DNA, 320 bp, Homo sapiens; identical to SEQ ID NO: 76071
  chr8:50313930-50314250
  hypo

SEQ ID NO: 159899 - DNA, 16 bp, Homo sapiens
  chr8:50377740-50377756
  hypo
aaaataaaacaaacaa

SEQ ID NO: 159900 - DNA, 39 bp, Homo sapiens; identical to SEQ ID NO: 76073
  chr8:50377958-50377997
  hypo

SEQ ID NO: 159901 - DNA, 31 bp, Homo sapiens; identical to SEQ ID NO: 76074
  chr8:50482181-50482212
  hypo

SEQ ID NO: 159902 - DNA, 121 bp, Homo sapiens; identical to SEQ ID NO: 76075
  chr8:50568928-50569049
  hypo

SEQ ID NO: 159903 - DNA, 83 bp, Homo sapiens; identical to SEQ ID NO: 76076
  chr8:50740530-50740613
  hypo

SEQ ID NO: 159904 - DNA, 361 bp, Homo sapiens
  chr8:50891734-50892095
  hypo
cagcagggcagttcacaatggcgagacgcagacgcctttggggcggtgcagccagagcggagtgcgcctgggactgagtgtcctcctcggggactgcatgggccccgcaccgccgcctgccccgcgccacgacagcccagagcacggatgggcccagactgtcctacagccgtttcagcaggcgagggtctgtccagcagcacctaaacagcttttgtatgtcctgtctccaaagtgtgtggctttaagtcaggttctgtgcttttgatgacaatattttctttgggtcgggatcattttcatctgttgccccttctgcccaacctttgcacttccccccgatcctcctcaccccttccct

SEQ ID NO: 159905 - DNA, 33 bp, Homo sapiens; identical to SEQ ID NO: 76078
  chr8:50945963-50945996
  hypo

SEQ ID NO: 159906 - DNA, 144 bp, Homo sapiens
  chr8:50987382-50987526
  hypo
agagccaactccctctgcttgcgagggagtggggaaggacaggtacctgagggaaccggggctgtgccccggccgcactcgcggcgcacgcgagttcggggtgggcatcctctccacagaccccacacttggagcggcctgccg

SEQ ID NO: 159907 - DNA, 28 bp, Homo sapiens
  chr8:51010216-51010244
  hypo
aaaaaacaaaaaacgaaactaaggagag

SEQ ID NO: 159908 - DNA, 101 bp, Homo sapiens
  chr8:52143252-52143353
  hypo
gccctccctcaccagcgcgacttccgggtgcgcgtgggctgggctggcccgcacttggagcggccagcagccccgggcagtgaggggcttagcacctgggc

SEQ ID NO: 159909 - DNA, 121 bp, Homo sapiens; identical to SEQ ID NO: 76080
  chr8:52184040-52184161
  hypo

SEQ ID NO: 159910 - DNA, 52 bp, Homo sapiens; identical to SEQ ID NO: 76081
  chr8:52191720-52191772
  hypo

SEQ ID NO: 159911 - DNA, 28 bp, Homo sapiens
  chr8:52289561-52289589
  hypo
ccaccgcgcccagccttgtttctcttta

SEQ ID NO: 159912 - DNA, 39 bp, Homo sapiens
  chr8:52384514-52384553
  hypo
gctgggattacaggcatgagccaccgcgcccggccggaa

SEQ ID NO: 159913 - DNA, 123 bp, Homo sapiens
  chr8:52432588-52432711
  hypo
tccaagtgtggactgcggttgtgggtatctgccggcttttcctccaggaaggagttcactgagacccacagaaagaatgccggggaatctgtgggagcttccctcccacgcggcagggaaagg

SEQ ID NO: 159914 - DNA, 282 bp, Homo sapiens
  chr8:52432926-52433208
  hypo
actggaacctggctgcggggaagggactggggcagggaagtgactggggccaatcactccacgccgcaccaggaggagggacggaaacgcgggagagccacaccctggagacataggcccgccatgcacccagaggacccaaatctcctcggaagatccgaggacggccacccaccatgtcctcccacctatgctaataaagctccaggaacaggaactatgggtcagagtgagaaaagctctaaggagcatcacaaaggccaaacccgaaaggggaggcga

SEQ ID NO: 159915 - DNA, 30 bp, Homo sapiens
  chr8:52786221-52786251
  hypo
agttctcctgcgatacggtattttaaaagt

SEQ ID NO: 159916 - DNA, 17 bp, Homo sapiens
  chr8:52789718-52789735
  hypo
tagaaagcgtacactcg

SEQ ID NO: 159917 - DNA, 17 bp, Homo sapiens
  chr8:52789794-52789811
  hypo
tgcggtcactttactgc

SEQ ID NO: 159918 - DNA, 42 bp, Homo sapiens; identical to SEQ ID NO: 76083
  chr8:53459773-53459815
  hypo

SEQ ID NO: 159919 - DNA, 30 bp, Homo sapiens; identical to SEQ ID NO: 76084
  chr8:53475977-53476007
  hypo

SEQ ID NO: 159920 - DNA, 33 bp, Homo sapiens; identical to SEQ ID NO: 76085
  chr8:53487089-53487122
  hypo

SEQ ID NO: 159921 - DNA, 35 bp, Homo sapiens; identical to SEQ ID NO: 22448
  chr8:53657304-53657339
  hypo

SEQ ID NO: 159922 - DNA, 25 bp, Homo sapiens
  chr8:53755952-53755977
  hypo
ccacggcgcccggccggactcagtt

SEQ ID NO: 159923 - DNA, 31 bp, Homo sapiens; identical to SEQ ID NO: 76087
  chr8:53757576-53757607
  hypo

SEQ ID NO: 159924 - DNA, 148 bp, Homo sapiens
  chr8:53805565-53805713
  hypo
gacccagcaggaagacggagttgcccagcgggaagaacgggttgcccagcaggaagacggagtgacccagcgggaagatggagtggcccagccggaagatggagtggcccagtgagaagatggtgtggcccagcgagaagatggggtt

SEQ ID NO: 159925 - DNA, 23 bp, Homo sapiens
  chr8:53852160-53852183
  hypo
ggaggaggtttggggcgccgcgg

SEQ ID NO: 159926 - DNA, 348 bp, Homo sapiens; identical to SEQ ID NO: 116597
  chr8:53852565-53852913
  hypo

SEQ ID NO: 159927 - DNA, 129 bp, Homo sapiens; identical to SEQ ID NO: 116598
  chr8:53853384-53853513
  hypo

SEQ ID NO: 159928 - DNA, 937 bp, Homo sapiens; identical to SEQ ID NO: 45379
  chr8:53853579-53854516
  hypo

SEQ ID NO: 159929 - DNA, 266 bp, Homo sapiens
  chr8:54154410-54154676
  hypo
aagggtaacggggagcgatgattccgcgggaacagccagtgcccctgggagctgctaagctcctcctctcagttgtcccggctgtggaatcatgcgcctctggacccctagaaggaacgttctagtgcattcagggttatgtgcagggtgagcgcttctcacgcccaacagcacctataagaaaatggcacctcgctaatgactggcgtgcactttcctagggcacaactacccggatgcctagcggtatatggatacttaaaatt

SEQ ID NO: 159930 - DNA, 432 bp, Homo sapiens; identical to SEQ ID NO: 6279
  chr8:54163694-54164126
  hypo

SEQ ID NO: 159931 - DNA, 31 bp, Homo sapiens; identical to SEQ ID NO: 76092
  chr8:54416852-54416883
  hypo

SEQ ID NO: 159932 - DNA, 251 bp, Homo sapiens
  chr8:54507103-54507354
  hypo
ttcccggccgggggcgccagctcccgccttgccctgcagctcagcatcccaagggcggcatggctcagacgccccggtccgatgggctaggctcatcttagagaagttgcccagcgagccccaccccatgcggccgggaaatcaggcactgcggggggcgccgtgtggctggtggatgccgtggacgtgaaggcgacgaggcatgggtgacgggttccctggtgtcgggaagccacgccccgtggctgtgc

SEQ ID NO: 159933 - DNA, 122 bp, Homo sapiens; identical to SEQ ID NO: 76094
  chr8:54640631-54640753
  hypo

SEQ ID NO: 159934 - DNA, 258 bp, Homo sapiens; identical to SEQ ID NO: 76095
  chr8:54645358-54645616
  hypo

SEQ ID NO: 159935 - DNA, 121 bp, Homo sapiens
  chr8:54645735-54645856
  hypo
gccagctgctcatgtactgaggacagctggttcacccgcctggacttgaaggacgctttctttagcatcagactagctcctgagagccagaaattgtctgctttccagtgggaagatccgg

SEQ ID NO: 159936 - DNA, 99 bp, Homo sapiens
  chr8:54647242-54647341
  hypo
tgcagggaacaccagcgagctcccactacagttgctttagggaactcctgggctgactcagaggctcggaaagctgcatccacccgctaccgggcgtca

SEQ ID NO: 159937 - DNA, 33 bp, Homo sapiens; identical to SEQ ID NO: 22454
  chr8:54647892-54647925
  hypo

SEQ ID NO: 159938 - DNA, 160 bp, Homo sapiens; identical to SEQ ID NO: 76098
  chr8:54658317-54658477
  hypo

SEQ ID NO: 159939 - DNA, 30 bp, Homo sapiens
  chr8:54662121-54662151
  hypo
ctggggtagctacatcggcttataactgag

SEQ ID NO: 159940 - DNA, 16 bp, Homo sapiens
  chr8:54665413-54665429
  hypo
tttcttatgactcaat

SEQ ID NO: 159941 - DNA, 109 bp, Homo sapiens
  chr8:54667966-54668075
  hypo
aatccattaagtttccgtctttagtgtgcgtgagtcactacacagagacttggcaagcactaaccaagcagccctttcccttatgattaggttacggggggtgggggtg

SEQ ID NO: 159942 - DNA, 192 bp, Homo sapiens; identical to SEQ ID NO: 22455
  chr8:54750267-54750459
  hypo

SEQ ID NO: 159943 - DNA, 2079 bp, Homo sapiens; identical to SEQ ID NO: 6284
  chr8:54792701-54794780
  hypo

SEQ ID NO: 159944 - DNA, 21 bp, Homo sapiens
  chr8:54869912-54869933
  hypo
ccacagcgctgggattacagg

SEQ ID NO: 159945 - DNA, 18 bp, Homo sapiens
  chr8:54870411-54870429
  hypo
taaaaaacaacaaggccg

SEQ ID NO: 159946 - DNA, 103 bp, Homo sapiens; identical to SEQ ID NO: 76104
  chr8:54925424-54925527
  hypo

SEQ ID NO: 159947 - DNA, 31 bp, Homo sapiens; identical to SEQ ID NO: 76105
  chr8:54935857-54935888
  hypo

SEQ ID NO: 159948 - DNA, 86 bp, Homo sapiens; identical to SEQ ID NO: 76106
  chr8:54945253-54945339
  hypo

SEQ ID NO: 159949 - DNA, 39 bp, Homo sapiens; identical to SEQ ID NO: 22458
  chr8:54956721-54956760
  hypo

SEQ ID NO: 159950 - DNA, 28 bp, Homo sapiens
  chr8:55022711-55022739
  hypo
attttttttgaataggtcaggcgcggtg

SEQ ID NO: 159951 - DNA, 28 bp, Homo sapiens
  chr8:55064964-55064992
  hypo
catgcccggccttaaatatttcaaaagt

SEQ ID NO: 159952 - DNA, 166 bp, Homo sapiens; identical to SEQ ID NO: 76110
  chr8:55212683-55212849
  hypo

SEQ ID NO: 159953 - DNA, 32 bp, Homo sapiens
  chr8:55229406-55229438
  hypo
ttgtgagccaccgcgcccggcctaaataataa

SEQ ID NO: 159954 - DNA, 30 bp, Homo sapiens
  chr8:55281116-55281146
  hypo
gtaagcggccggccgcggtggctcatgcct

SEQ ID NO: 159955 - DNA, 30 bp, Homo sapiens
  chr8:55329689-55329719
  hypo
agagttggccagccgcggtagctcacatcg

SEQ ID NO: 159956 - DNA, 697 bp, Homo sapiens; identical to SEQ ID NO: 45393
  chr8:55366951-55367648
  hypo

SEQ ID NO: 159957 - DNA, 203 bp, Homo sapiens; identical to SEQ ID NO: 6292
  chr8:55371172-55371375
  hypo

SEQ ID NO: 159958 - DNA, 285 bp, Homo sapiens; identical to SEQ ID NO: 6293
  chr8:55371439-55371724
  hypo

SEQ ID NO: 159959 - DNA, 74 bp, Homo sapiens; identical to SEQ ID NO: 6294
  chr8:55371993-55372067
  hypo

SEQ ID NO: 159960 - DNA, 168 bp, Homo sapiens; identical to SEQ ID NO: 6295
  chr8:55372416-55372584
  hypo

SEQ ID NO: 159961 - DNA, 62 bp, Homo sapiens; identical to SEQ ID NO: 45404
  chr8:55383182-55383244
  hypo

SEQ ID NO: 159962 - DNA, 70 bp, Homo sapiens
  chr8:55765264-55765334
  hypo
gaaatcaagtttcagcgtggacaggtaatagaaacaggtcttcatcagtttttaccgactatcgttcctt

SEQ ID NO: 159963 - DNA, 87 bp, Homo sapiens; identical to SEQ ID NO: 76117
  chr8:55826293-55826380
  hypo

SEQ ID NO: 159964 - DNA, 30 bp, Homo sapiens; identical to SEQ ID NO: 76118
  chr8:55828520-55828550
  hypo

SEQ ID NO: 159965 - DNA, 30 bp, Homo sapiens
  chr8:55972202-55972232
  hypo
gcatttgtaatagaacgttttccaagcaac

SEQ ID NO: 159966 - DNA, 257 bp, Homo sapiens; identical to SEQ ID NO: 6299
  chr8:56013635-56013892
  hypo

SEQ ID NO: 159967 - DNA, 173 bp, Homo sapiens; identical to SEQ ID NO: 6300
  chr8:56014011-56014184
  hypo

SEQ ID NO: 159968 - DNA, 367 bp, Homo sapiens; identical to SEQ ID NO: 6301
  chr8:56014376-56014743
  hypo

SEQ ID NO: 159969 - DNA, 18 bp, Homo sapiens
  chr8:56015034-56015052
  hypo
ggtgtggaggcatcatgg

SEQ ID NO: 159970 - DNA, 476 bp, Homo sapiens; identical to SEQ ID NO: 6303
  chr8:56015185-56015661
  hypo

SEQ ID NO: 159971 - DNA, 57 bp, Homo sapiens; identical to SEQ ID NO: 6304
  chr8:56015749-56015806
  hypo

SEQ ID NO: 159972 - DNA, 528 bp, Homo sapiens
  chr8:56361772-56362300
  hypo
actctggttctagaaacaattcgcctgcagccagctggctggactatttacaggcccattgcgggctgtactttggccacctcccggcacggtgctcagctgtgacgccgaaataagttagggctggccgggcggtgcggggcagggactagggctgtacacacaagtgctgggggctcggggcctcactactgccgagggccgggccggggctgtaaacatggccagggctgccctgcccacccctagtggtcggtaacgactggaagcagagcagccaggcaaggtcgggaggctcaggcgtccgacagtcagctctggatccggtccacccactgctgggctgagggcacgtcctgggcacaaaagtcgtaaacgcgaggagttgtcttcacgtcaaagaaggccttctcatccacgctcttaggggcacccatggtggccatgccaggtgccacagcctccacctccacctccaccaggtcgatgacacccttgcactcagtgtccacacggtggtcgtagtag

SEQ ID NO: 159973 - DNA, 311 bp, Homo sapiens
  chr8:56362504-56362815
  hypo
tgaggctcaaggtggagcccacgggttcctcctgcaggtacatacccagcgagcagcggtggtgaggtgcggtggacactaggagggagctaggggtgccacgtccatctggccgggcttcaaggcgccatgcagccttcacgcggtcccaggtgtccttccagcgcttagcgggtcggctcagctctgtctccaacctctgcaggcgtgagatggcgtcaggctgggctcgggggcagctgtggtagcagggccacaccacacagcacctgctctggggagcgcctccgtcaaaccgttcttcctcaggg

SEQ ID NO: 159974 - DNA, 502 bp, Homo sapiens; identical to SEQ ID NO: 76127
  chr8:56364011-56364513
  hypo

SEQ ID NO: 159975 - DNA, 161 bp, Homo sapiens; identical to SEQ ID NO: 76128
  chr8:56364907-56365068
  hypo

SEQ ID NO: 159976 - DNA, 866 bp, Homo sapiens
  chr8:56366963-56367829
  hypo
ccaggaggctcctgcaggcatcggtgagctgctggtagctccgggacaggaagagaacctcgtgctccatgagggtggcacagaccaaagacagtacgttggtgatgcccagctggcggaagagcaggccacgctgcagctgctgatgggcagggagtcggccagtggagtctggatgacctgccggtcaccagcccccaaataaatcgtcctctactagcccccagccaggggcacggtgcacgtcagcaggttcccaattacgttccctgggaacacattcaggccctccacgtggacggcatagatgaggccgaggctgttcctgaacacctccgcatggtcaagtcgcgacacaggtaccagcgtctttggggcaaacatctgggcagatgggcaggctctgtgggcgacaggtgcgtaaggcctccctcatcctcctcttcctcccactcagtggcatccttagcgcgtgtcgtttcctgctcccagaaggtcaagcagcacagtagtggcgcccggagttgatgtcggtgaggacagcaacaaagaaggtcggtggattcctctcgggacacatctgccacccgctggactggcaaaacagctgggggaatgggttggcctcccagtccttctccgggaagaactgcagaatatggccctggcctttcccactcccgcgcgggtgcggcctgaatgccaccagcaggaagtagtctgtgatccgcgccatggggagggacgctgggcgggctccgcggctcggggactcgagggctgcgcgctcatggcccgggcctggccctggaccgcacacccgggacaccccgggttcgctccgcggcggccgcagcggctgcggc

SEQ ID NO: 159977 - DNA, 30 bp, Homo sapiens
  chr8:56435966-56435996
  hypo
gcacttcttcaccatcgccgccagggtcat

SEQ ID NO: 159978 - DNA, 30 bp, Homo sapiens; identical to SEQ ID NO: 22473
  chr8:56436574-56436604
  hypo

SEQ ID NO: 159979 - DNA, 21 bp, Homo sapiens
  chr8:56536985-56537006
  hypo
gtaaaatctggggcccgggcg

SEQ ID NO: 159980 - DNA, 318 bp, Homo sapiens
  chr8:56602041-56602359
  hypo
ggacaaacttctccaagagcccgcccttcccggactccatccggctgcgcggggcagagttctgcattgcagaggccgggctgtggggacccaggccagcaccactcagggagcagcttggtgggccccgttcccgggtgtgagggcaggaaaactggctgaggagtcggcactagaagccttgacagggggcgggctccaggtccagccttgtcggagttgaccgagggcttaggccagagatgaggaagaaggacccagaaggtcccgggcgggcacagaggcagcgcccagggaggtacgcgctggccgatgaag

SEQ ID NO: 159981 - DNA, 38 bp, Homo sapiens; identical to SEQ ID NO: 22474
  chr8:56613553-56613591
  hypo

SEQ ID NO: 159982 - DNA, 22 bp, Homo sapiens
  chr8:56733089-56733111
  hypo
cgtctcaaaaaacaaaacaaaa

SEQ ID NO: 159983 - DNA, 1390 bp, Homo sapiens; identical to SEQ ID NO: 116640
  chr8:56791849-56793239
  hypo

SEQ ID NO: 159984 - DNA, 31 bp, Homo sapiens; identical to SEQ ID NO: 22476
  chr8:56860458-56860489
  hypo

SEQ ID NO: 159985 - DNA, 38 bp, Homo sapiens; identical to SEQ ID NO: 76138
  chr8:56979944-56979982
  hypo

SEQ ID NO: 159986 - DNA, 24 bp, Homo sapiens
  chr8:56983271-56983295
  hypo
agcgagactgtttccatttaaatt

SEQ ID NO: 159987 - DNA, 399 bp, Homo sapiens; identical to SEQ ID NO: 76140
  chr8:57079619-57080018
  hypo

SEQ ID NO: 159988 - DNA, 30 bp, Homo sapiens
  chr8:57090501-57090531
  hypo
agggagtctcaggcacgtgctacccagagc

SEQ ID NO: 159989 - DNA, 815 bp, Homo sapiens; identical to SEQ ID NO: 116649
  chr8:57122655-57123470
  hypo

SEQ ID NO: 159990 - DNA, 30 bp, Homo sapiens
  chr8:57213450-57213480
  hypo
agccagactgccactcggtctgcgtatcca

SEQ ID NO: 159991 - DNA, 26 bp, Homo sapiens
  chr8:57360599-57360625
  hypo
gcggcgctgctcccgcggggctccgg

SEQ ID NO: 159992 - DNA, 33 bp, Homo sapiens; identical to SEQ ID NO: 6314
  chr8:57360769-57360802
  hypo

SEQ ID NO: 159993 - DNA, 66 bp, Homo sapiens
  chr8:57390710-57390776
  hypo
tgaaagagcaggtgccgcgccacctcggagccatggtcgcgggcgggggcacggtgaagcggctgt

SEQ ID NO: 159994 - DNA, 21 bp, Homo sapiens
  chr8:58044268-58044289
  hypo
tttttttttgagacagagtct

SEQ ID NO: 159995 - DNA, 81 bp, Homo sapiens; identical to SEQ ID NO: 22482
  chr8:58044528-58044609
  hypo

SEQ ID NO: 159996 - DNA, 125 bp, Homo sapiens; identical to SEQ ID NO: 76146
  chr8:58106023-58106148
  hypo

SEQ ID NO: 159997 - DNA, 30 bp, Homo sapiens
  chr8:58116659-58116689
  hypo
cctgagaacgttggacggacagcagaagga

SEQ ID NO: 159998 - DNA, 151 bp, Homo sapiens
  chr8:58116976-58117127
  hypo
cagtggggaggaaaacgtaggaagcatggaagtgcatggcttgcgaaagaagcatctgaagccatggcatgtctgagagaggacacatcgggcaagattccacgtttggcagtgggcccatgagcggaggcagatgcgtatgggcctgcga

SEQ ID NO: 159999 - DNA, 251 bp, Homo sapiens; identical to SEQ ID NO: 76148
  chr8:58117446-58117697
  hypo

SEQ ID NO: 160000 - DNA, 30 bp, Homo sapiens
  chr8:58118644-58118674
  hypo
agaggcccaggtgggcggtgacctgagagg

SEQ ID NO: 160001 - DNA, 223 bp, Homo sapiens; identical to SEQ ID NO: 76149
  chr8:58122847-58123070
  hypo

SEQ ID NO: 160002 - DNA, 90 bp, Homo sapiens; identical to SEQ ID NO: 76150
  chr8:58130491-58130581
  hypo

SEQ ID NO: 160003 - DNA, 30 bp, Homo sapiens; identical to SEQ ID NO: 76151
  chr8:58173586-58173616
  hypo

SEQ ID NO: 160004 - DNA, 298 bp, Homo sapiens; identical to SEQ ID NO: 76152
  chr8:58191333-58191631
  hypo

SEQ ID NO: 160005 - DNA, 26 bp, Homo sapiens
  chr8:58716085-58716111
  hypo
atctgtcttttttctttgagacggag

SEQ ID NO: 160006 - DNA, 426 bp, Homo sapiens
  chr8:58982674-58983100
  hypo
gcatgtgctggattccgcatgtgccttttcctcattggttggtggcgttgctgctcgcccgtgtgataggtttccacagtaatctttatgctgcattagagacatagatacagaggtgctgtactgtgttcttgcaacggtggaggtgctcggctggtaacgttaaagaaggaataaggcgcccgacagaaggcgtttgtctttgttgtggagcatcagcgttaaggacagccggctgctgtgggaggtcagtgaaggaggctcagttcatggtaattacttaagtctgtctctcacgaaaaacacggccatgcgtgaaatgaagtatgttcatcgtgtcatctgtttaatctgatcttgctttgttaataccatgggtactccagcattccatatgaaaatacattctcccgcaggcttgcctgg

SEQ ID NO: 160007 - DNA, 88 bp, Homo sapiens; identical to SEQ ID NO: 22485
  chr8:58991410-58991498
  hypo

SEQ ID NO: 160008 - DNA, 290 bp, Homo sapiens; identical to SEQ ID NO: 22486
  chr8:59059044-59059334
  hypo

SEQ ID NO: 160009 - DNA, 30 bp, Homo sapiens
  chr8:59059929-59059959
  hypo
ggtctctgtgcttacgcagttgtgaaggtt

SEQ ID NO: 160010 - DNA, 30 bp, Homo sapiens; identical to SEQ ID NO: 76156
  chr8:59063214-59063244
  hypo

SEQ ID NO: 160011 - DNA, 26 bp, Homo sapiens
  chr8:59147994-59148020
  hypo
gaacgtatgtccggctgagctggtga

SEQ ID NO: 160012 - DNA, 30 bp, Homo sapiens
  chr8:59405939-59405969
  hypo
ctgcgtggcgatcaccgctgcccggtaaag

SEQ ID NO: 160013 - DNA, 18 bp, Homo sapiens
  chr8:59408078-59408096
  hypo
gcccggcctggtcagggc

SEQ ID NO: 160014 - DNA, 30 bp, Homo sapiens
  chr8:59574809-59574839
  hypo
gtaatgtgccaaactcgtaacaaggttcaa

SEQ ID NO: 160015 - DNA, 155 bp, Homo sapiens; identical to SEQ ID NO: 76158
  chr8:59686609-59686764
  hypo

SEQ ID NO: 160016 - DNA, 30 bp, Homo sapiens
  chr8:59721451-59721481
  hypo
ggagggaaaagtgtacgacagagcaaatat

SEQ ID NO: 160017 - DNA, 30 bp, Homo sapiens
  chr8:59916040-59916070
  hypo
gaagttcaggattcacgaggattgtggaaa

SEQ ID NO: 160018 - DNA, 30 bp, Homo sapiens
  chr8:59946669-59946699
  hypo
cccttcctgcaatatcgaggagctcttcct

SEQ ID NO: 160019 - DNA, 2619 bp, Homo sapiens; identical to SEQ ID NO: 45431
  chr8:60030067-60032686
  hypo

SEQ ID NO: 160020 - DNA, 237 bp, Homo sapiens; identical to SEQ ID NO: 22488
  chr8:60506002-60506239
  hypo

SEQ ID NO: 160021 - DNA, 30 bp, Homo sapiens; identical to SEQ ID NO: 6321
  chr8:60699763-60699793
  hypo

SEQ ID NO: 160022 - DNA, 43 bp, Homo sapiens; identical to SEQ ID NO: 76162
  chr8:60733750-60733793
  hypo

SEQ ID NO: 160023 - DNA, 94 bp, Homo sapiens
  chr8:61034761-61034855
  hypo
gccaccacgccgggctgagggaattaatttctaactatagttagcagtaaatccattcaccactttgcaatacgtcaataatataattatcttt

SEQ ID NO: 160024 - DNA, 30 bp, Homo sapiens
  chr8:61086236-61086266
  hypo
tttccagcgtctcaccgtcccactgtccta

SEQ ID NO: 160025 - DNA, 30 bp, Homo sapiens; identical to SEQ ID NO: 76164
  chr8:61131386-61131416
  hypo

SEQ ID NO: 160026 - DNA, 156 bp, Homo sapiens; identical to SEQ ID NO: 76165
  chr8:61156139-61156295
  hypo

SEQ ID NO: 160027 - DNA, 17 bp, Homo sapiens
  chr8:61168437-61168454
  hypo
tgcaaggtgcttccaac

SEQ ID NO: 160028 - DNA, 16 bp, Homo sapiens
  chr8:61168753-61168769
  hypo
ccgccacactcggcct

SEQ ID NO: 160029 - DNA, 82 bp, Homo sapiens
  chr8:61189327-61189409
  hypo
aatttaagtatacagcgataatacgagagtgaaatcataagaaagagggcaataagaaaactggcctcgtccaggtgctgtg

SEQ ID NO: 160030 - DNA, 1043 bp, Homo sapiens; identical to SEQ ID NO: 116671
  chr8:61193214-61194257
  hypo

SEQ ID NO: 160031 - DNA, 71 bp, Homo sapiens
  chr8:61282990-61283061
  hypo
tgttacataggatatcgcaaaggatacagatgaacagatacataaggcaaggtatgcgagaaggagcacga

SEQ ID NO: 160032 - DNA, 21 bp, Homo sapiens
  chr8:61297073-61297094
  hypo
gcccaacctctttcttctttt

SEQ ID NO: 160033 - DNA, 30 bp, Homo sapiens
  chr8:61396203-61396233
  hypo
gtaaggggaaaacgccgcgaatgaacatgc

SEQ ID NO: 160034 - DNA, 22 bp, Homo sapiens
  chr8:61436010-61436032
  hypo
cggccaaggactccacattctt

SEQ ID NO: 160035 - DNA, 33 bp, Homo sapiens; identical to SEQ ID NO: 76169
  chr8:61557773-61557806
  hypo

SEQ ID NO: 160036 - DNA, 199 bp, Homo sapiens; identical to SEQ ID NO: 76170
  chr8:61590483-61590682
  hypo

SEQ ID NO: 160037 - DNA, 86 bp, Homo sapiens
  chr8:61627785-61627871
  hypo
ggctagatgaaccatcgctggctttccagttgtatgtatccctcatagaatcagacaccaactcagggaggggcctttccagcaca

SEQ ID NO: 160038 - DNA, 155 bp, Homo sapiens
  chr8:61779844-61779999
  hypo
aatgggtagaaaaacacaatgcggtagtgtcagcaagggacacaaaggcactctggtgtcctgcagaccagcgctcgatgccagaaaccagtgtgtggaaaaacccatgtggaattgaaacagacccacttaagcacgcacgcgcgcacgcacgg

SEQ ID NO: 160039 - DNA, 211 bp, Homo sapiens
  chr8:61789711-61789922
  hypo
aagtgaaagcagttccgtgtgatgcggccgctcactcagagctatgctgtgatccaccagatgggctcgcgctgatgggagtccggttgagtcctgctcagccaatggcaggttgtgtgccacgggcgagctacttcatttctctggacctgtttccccagatggctggtcgcaataatgacgacgaggcggatggcggcggggaggctag

SEQ ID NO: 160040 - DNA, 789 bp, Homo sapiens; identical to SEQ ID NO: 45435
  chr8:61822238-61823027
  hypo

SEQ ID NO: 160041 - DNA, 31 bp, Homo sapiens; identical to SEQ ID NO: 76173
  chr8:62034028-62034059
  hypo

SEQ ID NO: 160042 - DNA, 106 bp, Homo sapiens
  chr8:62221610-62221716
  hypo
gctcaatgtaaacaacgcagccattccgtgtgtattcgaatgggactcaggcagtgatgcgtgtgcattagaagttgggtccaccagaagtcgagatgattctgaa

SEQ ID NO: 160043 - DNA, 30 bp, Homo sapiens
  chr8:62385949-62385979
  hypo
cgagggggaaaatgacgggggtgatgcaca

SEQ ID NO: 160044 - DNA, 30 bp, Homo sapiens
  chr8:62566083-62566113
  hypo
tctggcacacctgggcgagactcgaggatg

SEQ ID NO: 160045 - DNA, 1219 bp, Homo sapiens; identical to SEQ ID NO: 116678
  chr8:62626214-62627433
  hypo

SEQ ID NO: 160046 - DNA, 83 bp, Homo sapiens
  chr8:62745085-62745168
  hypo
agagagtcgtgcgccgtcactggtttctcatggcagccactccaacctgcgtgcgccttccctgatgcgccctgctagtcgct

SEQ ID NO: 160047 - DNA, 100 bp, Homo sapiens
  chr8:64037105-64037205
  hypo
gcttttgtgtcggttcgaacctgagagcaagccaacaaacaacacaaggcagtgtggagcaacacgctgtttttttttttgtttggttggttggtttttt

SEQ ID NO: 160048 - DNA, 30 bp, Homo sapiens
  chr8:64131975-64132005
  hypo
ttgagaaccactcttcgctgatacatgtcg

SEQ ID NO: 160049 - DNA, 34 bp, Homo sapiens
  chr8:64642938-64642972
  hypo
tgaaagtagttagaattaagacgactaagaaact

SEQ ID NO: 160050 - DNA, 30 bp, Homo sapiens
  chr8:64786651-64786681
  hypo
tctttctggtttgttcggtttagcaagtgc

SEQ ID NO: 160051 - DNA, 420 bp, Homo sapiens; identical to SEQ ID NO: 45446
  chr8:65281382-65281802
  hypo

SEQ ID NO: 160052 - DNA, 179 bp, Homo sapiens; identical to SEQ ID NO: 6333
  chr8:65281825-65282004
  hypo

SEQ ID NO: 160053 - DNA, 125 bp, Homo sapiens; identical to SEQ ID NO: 76180
  chr8:65483618-65483743
  hypo

SEQ ID NO: 160054 - DNA, 1239 bp, Homo sapiens; identical to SEQ ID NO: 6340
  chr8:65492339-65493578
  hypo

SEQ ID NO: 160055 - DNA, 148 bp, Homo sapiens; identical to SEQ ID NO: 6341
  chr8:65493806-65493954
  hypo

SEQ ID NO: 160056 - DNA, 523 bp, Homo sapiens; identical to SEQ ID NO: 6342
  chr8:65494076-65494599
  hypo

SEQ ID NO: 160057 - DNA, 184 bp, Homo sapiens
  chr8:65519230-65519414
  hypo
caaagtgtggcttagcggtcagatagtaagtgacaaatctgttttaccttccagtaccagttatgtgtgcgagatgaggttggctctcgctctgagccatcatgccgataatcaatagacgacaaaagtaatgagttgcgttattatcaacaatggagagtagagcttacgtggctctgcagaa

SEQ ID NO: 160058 - DNA, 18 bp, Homo sapiens
  chr8:65541478-65541496
  hypo
ccctcaacatttaaagcc

SEQ ID NO: 160059 - DNA, 30 bp, Homo sapiens
  chr8:65596421-65596451
  hypo
gcaggttcttgggcccggaatgttgttctt

SEQ ID NO: 160060 - DNA, 21 bp, Homo sapiens
  chr8:65732327-65732348
  hypo
tttgtggcgtgaacccgggag

SEQ ID NO: 160061 - DNA, 20 bp, Homo sapiens
  chr8:65732407-65732427
  hypo
gactccgtctcaaaaaaaaa

SEQ ID NO: 160062 - DNA, 179 bp, Homo sapiens
  chr8:65732648-65732827
  hypo
tccggttctaactgccgatggcaaacctgtcctgccttgcagtcccaggggcatctgctcagtcctcagtttcagctgctctagaagctgcctgcctgtccgttggggccagccacttctcacaccgtgcatgggtctcagttgtccctgactaacatgcctctcgtcactgtcctcaa

SEQ ID NO: 160063 - DNA, 39 bp, Homo sapiens; identical to SEQ ID NO: 22503
  chr8:65757969-65758008
  hypo

SEQ ID NO: 160064 - DNA, 39 bp, Homo sapiens; identical to SEQ ID NO: 22504
  chr8:65758247-65758286
  hypo

SEQ ID NO: 160065 - DNA, 37 bp, Homo sapiens; identical to SEQ ID NO: 76187
  chr8:66157670-66157707
  hypo

SEQ ID NO: 160066 - DNA, 241 bp, Homo sapiens; identical to SEQ ID NO: 22505
  chr8:66548503-66548744
  hypo

SEQ ID NO: 160067 - DNA, 26 bp, Homo sapiens
  chr8:66560526-66560552
  hypo
caggcgtgagtcaccatgcctggccc

SEQ ID NO: 160068 - DNA, 26 bp, Homo sapiens
  chr8:66565448-66565474
  hypo
tgagtttatttaagatcgagcacagt

SEQ ID NO: 160069 - DNA, 30 bp, Homo sapiens; identical to SEQ ID NO: 76190
  chr8:66635172-66635202
  hypo

SEQ ID NO: 160070 - DNA, 30 bp, Homo sapiens
  chr8:66676112-66676142
  hypo
aggtccaatacgtatcggtcaatttcctaa

SEQ ID NO: 160071 - DNA, 33 bp, Homo sapiens
  chr8:66678461-66678494
  hypo
tgagccaccatgcccagccgagatgaatttttg

SEQ ID NO: 160072 - DNA, 34 bp, Homo sapiens
  chr8:66776020-66776054
  hypo
ggtccaaaaatccaacgttggtccaagaagactc

SEQ ID NO: 160073 - DNA, 85 bp, Homo sapiens
  chr8:66877729-66877814
  hypo
caaacgagccatcaacgtcacccccatggccgctagagatcatatcaaaggaaagcgcagagtgatccactgcgcaatgttccac

SEQ ID NO: 160074 - DNA, 54 bp, Homo sapiens
  chr8:66940482-66940536
  hypo
tcttctcttactcaccggcgctcatgtccactctacctgcgctttgacaactca

SEQ ID NO: 160075 - DNA, 1524 bp, Homo sapiens; identical to SEQ ID NO: 116718
  chr8:67024904-67026428
  hypo

SEQ ID NO: 160076 - DNA, 30 bp, Homo sapiens
  chr8:67028240-67028270
  hypo
atagcatcatacagcgaaggcctgggggaa

SEQ ID NO: 160077 - DNA, 104 bp, Homo sapiens; identical to SEQ ID NO: 76193
  chr8:67299563-67299667
  hypo

SEQ ID NO: 160078 - DNA, 72 bp, Homo sapiens
  chr8:67340781-67340853
  hypo
ccaggaatttgtacccgccccggtcccggaccgcgcccctggacaaaccctccggcccgcccctccggattg

SEQ ID NO: 160079 - DNA, 30 bp, Homo sapiens; identical to SEQ ID NO: 22508
  chr8:67371073-67371103
  hypo

SEQ ID NO: 160080 - DNA, 43 bp, Homo sapiens; identical to SEQ ID NO: 76195
  chr8:67384647-67384690
  hypo

SEQ ID NO: 160081 - DNA, 53 bp, Homo sapiens
  chr8:67405468-67405521
  hypo
tggtaccaaaattcacgtttcctttttggtggaaattctccagccaagcttgg

SEQ ID NO: 160082 - DNA, 3 bp, Homo sapiens
  chr8:67405594-67405597
  hypo
caa

SEQ ID NO: 160083 - DNA, 32 bp, Homo sapiens
  chr8:67405804-67405836
  hypo
tggattaggatgcctcgcgactaggggtccag

SEQ ID NO: 160084 - DNA, 30 bp, Homo sapiens
  chr8:67406468-67406498
  hypo
cttgcaaacttaacccggaactaatgctgc

SEQ ID NO: 160085 - DNA, 450 bp, Homo sapiens; identical to SEQ ID NO: 45476
  chr8:67417574-67418024
  hypo

SEQ ID NO: 160086 - DNA, 30 bp, Homo sapiens
  chr8:67488312-67488342
  hypo
agccatccctaagttcgctgcctggggaat

SEQ ID NO: 160087 - DNA, 30 bp, Homo sapiens; identical to SEQ ID NO: 22510
  chr8:67624596-67624626
  hypo

SEQ ID NO: 160088 - DNA, 30 bp, Homo sapiens; identical to SEQ ID NO: 76198
  chr8:67634401-67634431
  hypo

SEQ ID NO: 160089 - DNA, 17 bp, Homo sapiens
  chr8:67737586-67737603
  hypo
acagtctcgctccgtcg

SEQ ID NO: 160090 - DNA, 35 bp, Homo sapiens
  chr8:67867313-67867348
  hypo
ataccggagctgttcctattcggccatcttggctc

SEQ ID NO: 160091 - DNA, 38 bp, Homo sapiens; identical to SEQ ID NO: 116740
  chr8:67873383-67873421
  hypo

SEQ ID NO: 160092 - DNA, 252 bp, Homo sapiens; identical to SEQ ID NO: 6352
  chr8:67873798-67874050
  hypo

SEQ ID NO: 160093 - DNA, 508 bp, Homo sapiens; identical to SEQ ID NO: 6353
  chr8:67874164-67874672
  hypo

SEQ ID NO: 160094 - DNA, 927 bp, Homo sapiens; identical to SEQ ID NO: 116743
  chr8:67874755-67875682
  hypo

SEQ ID NO: 160095 - DNA, 30 bp, Homo sapiens; identical to SEQ ID NO: 76203
  chr8:67898702-67898732
  hypo

SEQ ID NO: 160096 - DNA, 438 bp, Homo sapiens; identical to SEQ ID NO: 45487
  chr8:67940670-67941108
  hypo

SEQ ID NO: 160097 - DNA, 22 bp, Homo sapiens
  chr8:67956847-67956869
  hypo
tttggagacagagtttcgctct

SEQ ID NO: 160098 - DNA, 26 bp, Homo sapiens
  chr8:68065111-68065137
  hypo
ttgcctatacaaaactacatgcgaga

SEQ ID NO: 160099 - DNA, 371 bp, Homo sapiens; identical to SEQ ID NO: 76207
  chr8:68115287-68115658
  hypo

SEQ ID NO: 160100 - DNA, 30 bp, Homo sapiens
  chr8:68176785-68176815
  hypo
caatgctaagatgcacgcaggaagaaagaa

SEQ ID NO: 160101 - DNA, 155 bp, Homo sapiens
  chr8:68236302-68236457
  hypo
tgggattacaggcgtgagccaccgcagccagccacaacctacttttcaatatgccaatcagagtagaatgatttctctgaaatgcaacaacaatttcactcctttgcttggcattctactgtctacaatagaaggtggggcgcttgaacatggga

SEQ ID NO: 160102 - DNA, 24 bp, Homo sapiens
  chr8:68858252-68858276
  hypo
tttttttgaggagtcttgctccgt

SEQ ID NO: 160103 - DNA, 473 bp, Homo sapiens; identical to SEQ ID NO: 6355
  chr8:68863997-68864470
  hypo

SEQ ID NO: 160104 - DNA, 361 bp, Homo sapiens; identical to SEQ ID NO: 6356
  chr8:68864545-68864906
  hypo

SEQ ID NO: 160105 - DNA, 318 bp, Homo sapiens; identical to SEQ ID NO: 116751
  chr8:68864942-68865260
  hypo

SEQ ID NO: 160106 - DNA, 17 bp, Homo sapiens
  chr8:68993521-68993538
  hypo
gacttgacaggaggtgg

SEQ ID NO: 160107 - DNA, 30 bp, Homo sapiens
  chr8:69083736-69083766
  hypo
tgctcccctgaaatgcgatgaatatgaaga

SEQ ID NO: 160108 - DNA, 143 bp, Homo sapiens
  chr8:69169576-69169719
  hypo
ttgaccgcagccaaacgcaaaacctagagtgaacacattctacctgtttctcctctctccttagaacagcaatctgaagaggctggtggtgagtcgctaaaggggagagccatgtcctgaatagatgaagacatgtatttcct

SEQ ID NO: 160109 - DNA, 31 bp, Homo sapiens; identical to SEQ ID NO: 76214
  chr8:69197908-69197939
  hypo

SEQ ID NO: 160110 - DNA, 320 bp, Homo sapiens; identical to SEQ ID NO: 116752
  chr8:69242746-69243066
  hypo

SEQ ID NO: 160111 - DNA, 618 bp, Homo sapiens; identical to SEQ ID NO: 6359
  chr8:69243284-69243902
  hypo

SEQ ID NO: 160112 - DNA, 30 bp, Homo sapiens; identical to SEQ ID NO: 22521
  chr8:70041812-70041842
  hypo

SEQ ID NO: 160113 - DNA, 30 bp, Homo sapiens
  chr8:70246055-70246085
  hypo
gctctggcaggcccacgtcacctgcaggtg

SEQ ID NO: 160114 - DNA, 132 bp, Homo sapiens; identical to SEQ ID NO: 76218
  chr8:70246376-70246508
  hypo

SEQ ID NO: 160115 - DNA, 30 bp, Homo sapiens; identical to SEQ ID NO: 45498
  chr8:70744328-70744358
  hypo

SEQ ID NO: 160116 - DNA, 2402 bp, Homo sapiens; identical to SEQ ID NO: 116758
  chr8:70744865-70747267
  hypo

SEQ ID NO: 160117 - DNA, 88 bp, Homo sapiens; identical to SEQ ID NO: 76221
  chr8:71017205-71017293
  hypo

SEQ ID NO: 160118 - DNA, 31 bp, Homo sapiens; identical to SEQ ID NO: 76222
  chr8:71059337-71059368
  hypo

SEQ ID NO: 160119 - DNA, 19 bp, Homo sapiens
  chr8:71115131-71115150
  hypo
aaaatagttgcaagggctg

SEQ ID NO: 160120 - DNA, 167 bp, Homo sapiens; identical to SEQ ID NO: 76224
  chr8:71185495-71185662
  hypo

SEQ ID NO: 160121 - DNA, 30 bp, Homo sapiens; identical to SEQ ID NO: 76225
  chr8:71205174-71205204
  hypo

SEQ ID NO: 160122 - DNA, 22 bp, Homo sapiens
  chr8:71226105-71226127
  hypo
acttcaaaaacaactgctggcc

SEQ ID NO: 160123 - DNA, 30 bp, Homo sapiens; identical to SEQ ID NO: 22523
  chr8:71308114-71308144
  hypo

SEQ ID NO: 160124 - DNA, 369 bp, Homo sapiens; identical to SEQ ID NO: 116770
  chr8:71316514-71316883
  hypo

SEQ ID NO: 160125 - DNA, 30 bp, Homo sapiens
  chr8:71336865-71336895
  hypo
tgcaaaaagccagatcgtgaatattttagc

SEQ ID NO: 160126 - DNA, 206 bp, Homo sapiens
  chr8:71368455-71368661
  hypo
cactaacattctacacgtctaaacttcgaggaacttttctaaagcaagaaaaagaataagggctaaatttaattcgtcagagtggaaagagaacaaagagagaggactgggagtgggagattaaaaggctgtggaaagtggtcttgagatagatgttattggggaccaaccttctcaatgcactggtcaagcgccggacgttgttg

SEQ ID NO: 160127 - DNA, 270 bp, Homo sapiens; identical to SEQ ID NO: 22524
  chr8:71447611-71447881
  hypo

SEQ ID NO: 160128 - DNA, 241 bp, Homo sapiens; identical to SEQ ID NO: 22525
  chr8:71447940-71448181
  hypo

SEQ ID NO: 160129 - DNA, 142 bp, Homo sapiens; identical to SEQ ID NO: 76230
  chr8:71522526-71522668
  hypo

SEQ ID NO: 160130 - DNA, 14 bp, Homo sapiens
  chr8:72459556-72459570
  hypo
ctcccctccgtccc

SEQ ID NO: 160131 - DNA, 261 bp, Homo sapiens; identical to SEQ ID NO: 45523
  chr8:72755553-72755814
  hypo

SEQ ID NO: 160132 - DNA, 364 bp, Homo sapiens; identical to SEQ ID NO: 6378
  chr8:72756655-72757019
  hypo

SEQ ID NO: 160133 - DNA, 1277 bp, Homo sapiens; identical to SEQ ID NO: 116791
  chr8:73448677-73449954
  hypo

SEQ ID NO: 160134 - DNA, 176 bp, Homo sapiens; identical to SEQ ID NO: 6385
  chr8:73450026-73450202
  hypo

SEQ ID NO: 160135 - DNA, 38 bp, Homo sapiens
  chr8:73922263-73922301
  hypo
aagattacaggtatgagccaccgcgcctggcctagtgt

SEQ ID NO: 160136 - DNA, 27 bp, Homo sapiens
  chr8:73966733-73966760
  hypo
gcgttgagtcaccgcgcctggccagag

SEQ ID NO: 160137 - DNA, 187 bp, Homo sapiens; identical to SEQ ID NO: 76237
  chr8:73979603-73979790
  hypo

SEQ ID NO: 160138 - DNA, 132 bp, Homo sapiens
  chr8:73989476-73989608
  hypo
atctgtagcagcagccgtagaaaatgaatacactccttcacggggttgctatgaaggctgaaccaatgatgcctgtaagatctctctgctatgcaaacatgagggattcgtgtgccgcgcctcaaaggcgcc

SEQ ID NO: 160139 - DNA, 236 bp, Homo sapiens
  chr8:73999531-73999767
  hypo
gtgccttgcttacctcgtatgtaaaacgagaccaaaatgaggactaacatcagcgggttgagggatccaagtaagttaataactgtgaagtgcttgggagagcgcctggtatggaggaaatgtgaagtgttaacaacttgaccctccttcactgctcacccagggccgcagccaaattctgctaagtcaagtccatttgaatactggctccagtcaggccccgctcgttttttttc

SEQ ID NO: 160140 - DNA, 236 bp, Homo sapiens; identical to SEQ ID NO: 76239
  chr8:74004013-74004249
  hypo

SEQ ID NO: 160141 - DNA, 30 bp, Homo sapiens
  chr8:74064770-74064800
  hypo
tccagaaagttgtgccgcctctttctatct

SEQ ID NO: 160142 - DNA, 38 bp, Homo sapiens
  chr8:74086200-74086238
  hypo
gcattgctggccgggcgcggtggctcccgcctgtaatc

SEQ ID NO: 160143 - DNA, 99 bp, Homo sapiens
  chr8:74097717-74097816
  hypo
aatcattccgtgggccggcagagaactgcagcgtgatgcttaggcataaccggcactgtgcctggtctcggtgatgtgcagtgtcgtttggcaatggga

SEQ ID NO: 160144 - DNA, 455 bp, Homo sapiens; identical to SEQ ID NO: 76240
  chr8:74197776-74198231
  hypo

SEQ ID NO: 160145 - DNA, 46 bp, Homo sapiens
  chr8:74203779-74203825
  hypo
aacctaccaagagatcgagcaatcaaagcgttatctgtcaaagcaa

SEQ ID NO: 160146 - DNA, 184 bp, Homo sapiens; identical to SEQ ID NO: 116800
  chr8:74208008-74208192
  hypo

SEQ ID NO: 160147 - DNA, 30 bp, Homo sapiens
  chr8:74222752-74222782
  hypo
atgcatgtgtttatgcgtcatggaagtagt

SEQ ID NO: 160148 - DNA, 30 bp, Homo sapiens; identical to SEQ ID NO: 76241
  chr8:74331435-74331465
  hypo

SEQ ID NO: 160149 - DNA, 494 bp, Homo sapiens; identical to SEQ ID NO: 76242
  chr8:74360977-74361471
  hypo

SEQ ID NO: 160150 - DNA, 30 bp, Homo sapiens; identical to SEQ ID NO: 22534
  chr8:74363454-74363484
  hypo

SEQ ID NO: 160151 - DNA, 397 bp, Homo sapiens
  chr8:74371799-74372196
  hypo
tgtgaagtcgcctctcgttaaggtgatcccctccgcgaagacctcaaccagcagccctaccatgtgcagagctcccactgaaatcaaaacccaacctcaagctcacgcagctccgcctccacatatcgtcacatcccacacatgctgctgtcatcacacccacgctgttgtcacaacacccaacgggctgttactaagggccctggtatgctgctgaatatatgcattcaataggaattttcaaaacatatttcaggaatacttgtccttggttccgcatcatctgctcaatgcagccactgtctctggaaggagcaactcctatcgggcacggctcctttgactcttggggcctcctgcgtccccagccccagccgtgaatacacaatggagatca

SEQ ID NO: 160152 - DNA, 30 bp, Homo sapiens; identical to SEQ ID NO: 22536
  chr8:74385877-74385907
  hypo

SEQ ID NO: 160153 - DNA, 26 bp, Homo sapiens
  chr8:74568302-74568328
  hypo
tcaccgtgccaggccacataattttt

SEQ ID NO: 160154 - DNA, 60 bp, Homo sapiens; identical to SEQ ID NO: 76247
  chr8:74673151-74673211
  hypo

SEQ ID NO: 160155 - DNA, 132 bp, Homo sapiens; identical to SEQ ID NO: 76248
  chr8:74674333-74674465
  hypo

SEQ ID NO: 160156 - DNA, 91 bp, Homo sapiens
  chr8:74759372-74759463
  hypo
cagcctgggcgacagagtgagactctgtctcaaaaaacaactaaccaaacagaaaaataagcaaaagtctagaattcgtaattcacaaaaa

SEQ ID NO: 160157 - DNA, 40 bp, Homo sapiens; identical to SEQ ID NO: 76250
  chr8:74759827-74759867
  hypo

SEQ ID NO: 160158 - DNA, 100 bp, Homo sapiens
  chr8:74885115-74885215
  hypo
tggatccggagctcacgcacagaaaatccaggcgcctgccaaaccgttactcagtttttgggaacttctttctcattccacgccccgcttcccacccccc

SEQ ID NO: 160159 - DNA, 30 bp, Homo sapiens; identical to SEQ ID NO: 76251
  chr8:75227207-75227237
  hypo

SEQ ID NO: 160160 - DNA, 356 bp, Homo sapiens; identical to SEQ ID NO: 76252
  chr8:75227592-75227948
  hypo

SEQ ID NO: 160161 - DNA, 142 bp, Homo sapiens; identical to SEQ ID NO: 22540
  chr8:75737614-75737756
  hypo

SEQ ID NO: 160162 - DNA, 30 bp, Homo sapiens
  chr8:75871219-75871249
  hypo
tagtgagatcgcacccggtccctgtctttt

SEQ ID NO: 160163 - DNA, 985 bp, Homo sapiens; identical to SEQ ID NO: 116813
  chr8:75896507-75897492
  hypo

SEQ ID NO: 160164 - DNA, 30 bp, Homo sapiens; identical to SEQ ID NO: 45543
  chr8:76230285-76230315
  hypo

SEQ ID NO: 160165 - DNA, 30 bp, Homo sapiens; identical to SEQ ID NO: 6395
  chr8:76386311-76386341
  hypo

SEQ ID NO: 160166 - DNA, 30 bp, Homo sapiens; identical to SEQ ID NO: 45549
  chr8:76417921-76417951
  hypo

SEQ ID NO: 160167 - DNA, 721 bp, Homo sapiens; identical to SEQ ID NO: 45552
  chr8:77589893-77590614
  hypo

SEQ ID NO: 160168 - DNA, 17 bp, Homo sapiens
  chr8:79540302-79540319
  hypo
gggcgcggtggctcacg

SEQ ID NO: 160169 - DNA, 43 bp, Homo sapiens; identical to SEQ ID NO: 76259
  chr8:80272278-80272321
  hypo

SEQ ID NO: 160170 - DNA, 599 bp, Homo sapiens; identical to SEQ ID NO: 116832
  chr8:80523883-80524482
  hypo

SEQ ID NO: 160171 - DNA, 1084 bp, Homo sapiens; identical to SEQ ID NO: 116833
  chr8:80524695-80525779
  hypo

SEQ ID NO: 160172 - DNA, 31 bp, Homo sapiens; identical to SEQ ID NO: 22545
  chr8:80673151-80673182
  hypo

SEQ ID NO: 160173 - DNA, 559 bp, Homo sapiens; identical to SEQ ID NO: 116838
  chr8:80803548-80804107
  hypo

SEQ ID NO: 160174 - DNA, 82 bp, Homo sapiens
  chr8:80844670-80844752
  hypo
acggtagggtaaagtcggtacgttcaaaaccaaaaggccagtgtgactggaaagtactggcaggactcgcaggtcagacagg

SEQ ID NO: 160175 - DNA, 30 bp, Homo sapiens
  chr8:80864301-80864331
  hypo
cctattatcaacttcggaaaagaatgccca

SEQ ID NO: 160176 - DNA, 30 bp, Homo sapiens
  chr8:80865396-80865426
  hypo
tcagcaggctgcagccgttttctctctttt

SEQ ID NO: 160177 - DNA, 38 bp, Homo sapiens; identical to SEQ ID NO: 22547
  chr8:80998634-80998672
  hypo

SEQ ID NO: 160178 - DNA, 29 bp, Homo sapiens
  chr8:81048459-81048488
  hypo
gacatttaagaaaacaatggccgggcgcg

SEQ ID NO: 160179 - DNA, 247 bp, Homo sapiens
  chr8:81084472-81084719
  hypo
aaatgcgtgttgaggcgtcatgtccgttgatcaaaggacagtttgaggttcccgtaacaatccagttcttttcattagtagcgttaacaatctgttttcacagggttttgcagttactcgtcttccatgaagtcactttgattgtatgggtcatggtcttcaggtggtgtctcaatttcgtaagctatctgaggctgcaaatgaagtggggcttcttttctgtgttgcttgacgtttaggccgaagc

SEQ ID NO: 160180 - DNA, 45 bp, Homo sapiens; identical to SEQ ID NO: 76267
  chr8:81113804-81113849
  hypo

SEQ ID NO: 160181 - DNA, 30 bp, Homo sapiens; identical to SEQ ID NO: 76268
  chr8:81178018-81178048
  hypo

SEQ ID NO: 160182 - DNA, 541 bp, Homo sapiens
  chr8:81213156-81213697
  hypo
gctctttgggaagtggagctccgatgatgtgcagatctggcacttgcttgcaggattacactgcagtgaaggagaagtatgccaagtacctgcctcacagtgcagagcggtatgccgccaaacgcttccgcaaagctcagtgccccatcgtggagtgcctcacttactccatgatgacgcacggccgcaacaaccgcaagaagctcatgatcatgcgcatcgtcaagcacgccttcgagatcatccagctgctcacaggcgacaaccctctgcaggtcctggtgaacgccatcatcaacagtggtccccgggaggactccacactcactgggcgagccaggatcgtgagacgacaggctgtggccgtgtccccattaagccgtgtgaatcaggccatctggccgcagtgcacaggagctcttgaggctgccttccggaacatcaagaccattgctgagttcctggcagatgagctcatcagtgctgtcaagggctcctccaactcctatgctagcaagaagaaggacgagcttgagtgtgt

SEQ ID NO: 160183 - DNA, 34 bp, Homo sapiens
  chr8:81310005-81310039
  hypo
catgaacccaggaagcggagcttgcagtgagccg

SEQ ID NO: 160184 - DNA, 30 bp, Homo sapiens
  chr8:81318804-81318834
  hypo
tgatgactgagaccacgggggctgagggga

SEQ ID NO: 160185 - DNA, 37 bp, Homo sapiens; identical to SEQ ID NO: 76270
  chr8:81338704-81338741
  hypo

SEQ ID NO: 160186 - DNA, 30 bp, Homo sapiens
  chr8:81370646-81370676
  hypo
aaccagagagggggccgggcgcggtagctc

SEQ ID NO: 160187 - DNA, 2545 bp, Homo sapiens; identical to SEQ ID NO: 116843
  chr8:81397817-81400362
  hypo

SEQ ID NO: 160188 - DNA, 16 bp, Homo sapiens
  chr8:81414773-81414789
  hypo
ttaaaaaggattattt

SEQ ID NO: 160189 - DNA, 365 bp, Homo sapiens; identical to SEQ ID NO: 116845
  chr8:81490258-81490623
  hypo

SEQ ID NO: 160190 - DNA, 31 bp, Homo sapiens; identical to SEQ ID NO: 22551
  chr8:81549087-81549118
  hypo

SEQ ID NO: 160191 - DNA, 120 bp, Homo sapiens; identical to SEQ ID NO: 116847
  chr8:81599501-81599621
  hypo

SEQ ID NO: 160192 - DNA, 31 bp, Homo sapiens; identical to SEQ ID NO: 76274
  chr8:81615050-81615081
  hypo

SEQ ID NO: 160193 - DNA, 1868 bp, Homo sapiens; identical to SEQ ID NO: 116848
  chr8:81784962-81786830
  hypo

SEQ ID NO: 160194 - DNA, 39 bp, Homo sapiens
  chr8:81820450-81820489
  hypo
taccgatatgaaattatcgatctacatgttcttatgtag

SEQ ID NO: 160195 - DNA, 32 bp, Homo sapiens; identical to SEQ ID NO: 76277
  chr8:81964065-81964097
  hypo

SEQ ID NO: 160196 - DNA, 30 bp, Homo sapiens
  chr8:81992389-81992419
  hypo
cgaacacagtgactgcgcaatactcataat

SEQ ID NO: 160197 - DNA, 30 bp, Homo sapiens
  chr8:82084437-82084467
  hypo
ccctgctgcagctggcgtctacacagcagc

SEQ ID NO: 160198 - DNA, 1395 bp, Homo sapiens; identical to SEQ ID NO: 116849
  chr8:82192416-82193811
  hypo

SEQ ID NO: 160199 - DNA, 30 bp, Homo sapiens; identical to SEQ ID NO: 45580
  chr8:82653628-82653658
  hypo

SEQ ID NO: 160200 - DNA, 35 bp, Homo sapiens; identical to SEQ ID NO: 22556
  chr8:82680448-82680483
  hypo

SEQ ID NO: 160201 - DNA, 164 bp, Homo sapiens; identical to SEQ ID NO: 76281
  chr8:82902991-82903155
  hypo

SEQ ID NO: 160202 - DNA, 41 bp, Homo sapiens; identical to SEQ ID NO: 22557
  chr8:83135625-83135666
  hypo

SEQ ID NO: 160203 - DNA, 41 bp, Homo sapiens; identical to SEQ ID NO: 22558
  chr8:83135905-83135946
  hypo

SEQ ID NO: 160204 - DNA, 251 bp, Homo sapiens; identical to SEQ ID NO: 116867
  chr8:86132758-86133009
  hypo

SEQ ID NO: 160205 - DNA, 30 bp, Homo sapiens
  chr8:86313943-86313973
  hypo
aaaatacaaagccaccgcacccggctggga

SEQ ID NO: 160206 - DNA, 30 bp, Homo sapiens
  chr8:86358446-86358476
  hypo
gctcattcaccacgccgccctgcgaggaat

SEQ ID NO: 160207 - DNA, 30 bp, Homo sapiens
  chr8:86410826-86410856
  hypo
cacgtcattgtctctcgagtgctcccacag

SEQ ID NO: 160208 - DNA, 36 bp, Homo sapiens
  chr8:86431839-86431875
  hypo
actcacagccaggcgcggtggctcacgcctgtaatt

SEQ ID NO: 160209 - DNA, 57 bp, Homo sapiens
  chr8:86508968-86509025
  hypo
gctctcatccatgtccatcaacgctgctgccctcccgtctaccactaccacctcaat

SEQ ID NO: 160210 - DNA, 121 bp, Homo sapiens; identical to SEQ ID NO: 76285
  chr8:86544662-86544783
  hypo

SEQ ID NO: 160211 - DNA, 24 bp, Homo sapiens
  chr8:86545022-86545046
  hypo
agcctagggcgatagagcgagact

SEQ ID NO: 160212 - DNA, 86 bp, Homo sapiens
  chr8:86840939-86841025
  hypo
agtgtcgcggtggtcgcgcatcgcctttatataggcatgggtcagagtgggtggggcttcttcttgattacgttggtactttattc

SEQ ID NO: 160213 - DNA, 117 bp, Homo sapiens
  chr8:86952962-86953079
  hypo
tgtaaccggggtaaccgagtgggcagtagtttaggcagcctgataaatttatggtgagaactgctaggacggattcatctgtacacttcagcctcctctttccgcaatatcacctga

SEQ ID NO: 160214 - DNA, 30 bp, Homo sapiens
  chr8:86961260-86961290
  hypo
ctcaggtcagacctacgttgctgcttgaag

SEQ ID NO: 160215 - DNA, 87 bp, Homo sapiens
  chr8:87257023-87257110
  hypo
gggattatgggtgtgagccaccgcgcctggccggggatttttaggatagtgaaagtgttcatatacgatactgtaatggtgtacaca

SEQ ID NO: 160216 - DNA, 30 bp, Homo sapiens
  chr8:87393726-87393756
  hypo
cttccagaaatgttacgccacagactacat

SEQ ID NO: 160217 - DNA, 24 bp, Homo sapiens
  chr8:87402877-87402901
  hypo
gtccagcctcggctcagcatcaga

SEQ ID NO: 160218 - DNA, 162 bp, Homo sapiens; identical to SEQ ID NO: 76289
  chr8:87425718-87425880
  hypo

SEQ ID NO: 160219 - DNA, 30 bp, Homo sapiens
  chr8:87464797-87464827
  hypo
gaatggcgtttttctcgaggagtacaagaa

SEQ ID NO: 160220 - DNA, 90 bp, Homo sapiens; identical to SEQ ID NO: 6433
  chr8:87527031-87527121
  hypo

SEQ ID NO: 160221 - DNA, 546 bp, Homo sapiens
  chr8:88885820-88886366
  hypo
ccttccgattagggacgtagagggttttgtgcgggtatacccggagctcaggggtcgtcaggcctcgcatggtgatgatgccgtacttggagcctccagcttcgacttggttcactgtgaagagctggtcagtgttggtattcgccagtatgcggttaaatcggtcgcttgccaaagaggagggatcccagctatgaatctggacctttttcctctgcatgcagcttacacgcagctcgcgagctatacggcaatagttggcgaatctgaggaaacctagctggttctttcgtagcatggaaggtgcattgagtcccactctgactgtctttttctgcttgtctgcttcctcgagcagtcgcggtcttttgctctccatttcgttcggcggatgttctccctcctgaggggaagttctgtcccgggagtaagaggaagtaccgcttctttacaagcacgacttggcacggaagaacttcccgctgcgcctgcgcctgtgcgtatgaggtcgacccggacgagattcttcgtcgccttggcccaaat

SEQ ID NO: 160222 - DNA, 30 bp, Homo sapiens; identical to SEQ ID NO: 6439
  chr8:89928884-89928914
  hypo

SEQ ID NO: 160223 - DNA, 37 bp, Homo sapiens
  chr8:90650866-90650903
  hypo
tggaattacaggcgtgagctaccgcacccagccgagg

SEQ ID NO: 160224 - DNA, 96 bp, Homo sapiens; identical to SEQ ID NO: 22563
  chr8:90768481-90768577
  hypo

SEQ ID NO: 160225 - DNA, 23 bp, Homo sapiens
  chr8:90879608-90879631
  hypo
gggcgtggtggctcacgcctgta

SEQ ID NO: 160226 - DNA, 22 bp, Homo sapiens
  chr8:90889922-90889944
  hypo
aggtgcggtggctcacgcctgt

SEQ ID NO: 160227 - DNA, 30 bp, Homo sapiens; identical to SEQ ID NO: 76295
  chr8:90912934-90912964
  hypo

SEQ ID NO: 160228 - DNA, 150 bp, Homo sapiens; identical to SEQ ID NO: 76296
  chr8:90913503-90913653
  hypo

SEQ ID NO: 160229 - DNA, 44 bp, Homo sapiens; identical to SEQ ID NO: 76297
  chr8:91374998-91375042
  hypo

SEQ ID NO: 160230 - DNA, 560 bp, Homo sapiens; identical to SEQ ID NO: 45608
  chr8:91657127-91657687
  hypo

SEQ ID NO: 160231 - DNA, 604 bp, Homo sapiens; identical to SEQ ID NO: 45609
  chr8:91996904-91997508
  hypo

SEQ ID NO: 160232 - DNA, 486 bp, Homo sapiens; identical to SEQ ID NO: 6442
  chr8:91997527-91998013
  hypo

SEQ ID NO: 160233 - DNA, 20 bp, Homo sapiens
  chr8:92002998-92003018
  hypo
cccagcagcactttgggagg

SEQ ID NO: 160234 - DNA, 19 bp, Homo sapiens
  chr8:92003077-92003096
  hypo
agccacttgtctacaaata

SEQ ID NO: 160235 - DNA, 31 bp, Homo sapiens; identical to SEQ ID NO: 76303
  chr8:92083522-92083553
  hypo

SEQ ID NO: 160236 - DNA, 26 bp, Homo sapiens
  chr8:92083859-92083885
  hypo
gccaccgtgcccggccctgttaaact

SEQ ID NO: 160237 - DNA, 113 bp, Homo sapiens; identical to SEQ ID NO: 76304
  chr8:92120801-92120914
  hypo

SEQ ID NO: 160238 - DNA, 33 bp, Homo sapiens; identical to SEQ ID NO: 22567
  chr8:92433535-92433568
  hypo

SEQ ID NO: 160239 - DNA, 69 bp, Homo sapiens
  chr8:92570799-92570868
  hypo
aaacccaagctattatagttacgtaatatgagtctcttctctggaggcggtcttcatggattgtttgcc

SEQ ID NO: 160240 - DNA, 22 bp, Homo sapiens
  chr8:92903603-92903625
  hypo
atggccaaataggaacagctcc

SEQ ID NO: 160241 - DNA, 122 bp, Homo sapiens
  chr8:93875195-93875317
  hypo
aatgctagccactagtatagacggttataaaaatcataaattgctttggcattgccacggtattgtcgatacttatttttacagcagggctatttctaggcgtaacatctcaggcaatgaaa

SEQ ID NO: 160242 - DNA, 107 bp, Homo sapiens
  chr8:94129115-94129222
  hypo
aaaaatgtagttcttcgactacctgcatctgcctctcttggagtgcgtttaaaaagtgcaaattcctgggccccacccaggacaccggaatctctgagtgtcaggct

SEQ ID NO: 160243 - DNA, 30 bp, Homo sapiens
  chr8:94222109-94222139
  hypo
gaaacatggttcatgcggacccgccctgct

SEQ ID NO: 160244 - DNA, 30 bp, Homo sapiens
  chr8:94368072-94368102
  hypo
tgaattgtatctccgcgtctgagatcatcc

SEQ ID NO: 160245 - DNA, 130 bp, Homo sapiens; identical to SEQ ID NO: 76307
  chr8:94658931-94659061
  hypo

SEQ ID NO: 160246 - DNA, 105 bp, Homo sapiens
  chr8:94683867-94683972
  hypo
atcagagcgatatgtcgtgaatatcacagtgtgttaacaatgcacgcaattacaaatatcatagcgacatgtcaacaatatcacagcctgtaaacactgtgtgta

SEQ ID NO: 160247 - DNA, 121 bp, Homo sapiens; identical to SEQ ID NO: 76308
  chr8:94684091-94684212
  hypo

SEQ ID NO: 160248 - DNA, 121 bp, Homo sapiens; identical to SEQ ID NO: 22569
  chr8:94684331-94684452
  hypo

SEQ ID NO: 160249 - DNA, 158 bp, Homo sapiens; identical to SEQ ID NO: 22570
  chr8:94685461-94685619
  hypo

SEQ ID NO: 160250 - DNA, 160 bp, Homo sapiens; identical to SEQ ID NO: 76311
  chr8:94706935-94707095
  hypo

SEQ ID NO: 160251 - DNA, 1077 bp, Homo sapiens; identical to SEQ ID NO: 116906
  chr8:94712352-94713429
  hypo

SEQ ID NO: 160252 - DNA, 23 bp, Homo sapiens
  chr8:94735510-94735533
  hypo
acggtgcccggcccaagtcattg

SEQ ID NO: 160253 - DNA, 30 bp, Homo sapiens
  chr8:94746546-94746576
  hypo
catcctcgggtggtcgcctccattctccct

SEQ ID NO: 160254 - DNA, 30 bp, Homo sapiens
  chr8:94746882-94746912
  hypo
cttcctccctaggtcgcctgaagtcctctg

SEQ ID NO: 160255 - DNA, 90 bp, Homo sapiens
  chr8:94747733-94747823
  hypo
tttcttaaatctctttcgtcaatactgagggacagattttttaagtgaacataaaatccaagaggggaacgagaacgtgttcttctggga

SEQ ID NO: 160256 - DNA, 30 bp, Homo sapiens
  chr8:94806694-94806724
  hypo
tatttgcgttttacacgtgatgaaattgag

SEQ ID NO: 160257 - DNA, 23 bp, Homo sapiens
  chr8:94853887-94853910
  hypo
gggcgcggtagctcacgcctgta

SEQ ID NO: 160258 - DNA, 210 bp, Homo sapiens; identical to SEQ ID NO: 6451
  chr8:94929136-94929346
  hypo

SEQ ID NO: 160259 - DNA, 10 bp, Homo sapiens
  chr8:94929748-94929758
  hypo
gccgggcagg

SEQ ID NO: 160260 - DNA, 4 bp, Homo sapiens
  chr8:94929775-94929779
  hypo
cggg

SEQ ID NO: 160261 - DNA, 45 bp, Homo sapiens; identical to SEQ ID NO: 76318
  chr8:94941364-94941409
  hypo

SEQ ID NO: 160262 - DNA, 36 bp, Homo sapiens
  chr8:94967749-94967785
  hypo
tggctgtactttcctcgccaacgccccctcatgctg

SEQ ID NO: 160263 - DNA, 30 bp, Homo sapiens; identical to SEQ ID NO: 76319
  chr8:95238920-95238950
  hypo

SEQ ID NO: 160264 - DNA, 30 bp, Homo sapiens; identical to SEQ ID NO: 76320
  chr8:95290452-95290482
  hypo

SEQ ID NO: 160265 - DNA, 42 bp, Homo sapiens; identical to SEQ ID NO: 76321
  chr8:95488065-95488107
  hypo

SEQ ID NO: 160266 - DNA, 78 bp, Homo sapiens; identical to SEQ ID NO: 22576
  chr8:95556566-95556644
  hypo

SEQ ID NO: 160267 - DNA, 17 bp, Homo sapiens
  chr8:95556883-95556900
  hypo
ctgtctcaaaaaaaaaa

SEQ ID NO: 160268 - DNA, 30 bp, Homo sapiens
  chr8:95563337-95563367
  hypo
cataccctaacagacgactgactaccccag

SEQ ID NO: 160269 - DNA, 29 bp, Homo sapiens
  chr8:95582100-95582129
  hypo
gagactccgtctcaaaaaaaaataaataa

SEQ ID NO: 160270 - DNA, 32 bp, Homo sapiens
  chr8:95625859-95625891
  hypo
agttaaaatgaaatgcgcaagaaaaatggaat

SEQ ID NO: 160271 - DNA, 30 bp, Homo sapiens
  chr8:95641020-95641050
  hypo
tcccacgttagcccccgcaggcgttctcta

SEQ ID NO: 160272 - DNA, 38 bp, Homo sapiens; identical to SEQ ID NO: 76325
  chr8:95650754-95650792
  hypo

SEQ ID NO: 160273 - DNA, 901 bp, Homo sapiens; identical to SEQ ID NO: 45630
  chr8:95653852-95654753
  hypo

SEQ ID NO: 160274 - DNA, 30 bp, Homo sapiens
  chr8:95686741-95686771
  hypo
tttcttgggtcttggcgctattctacgcta

SEQ ID NO: 160275 - DNA, 100 bp, Homo sapiens; identical to SEQ ID NO: 76327
  chr8:95816349-95816449
  hypo

SEQ ID NO: 160276 - DNA, 98 bp, Homo sapiens; identical to SEQ ID NO: 76328
  chr8:95848305-95848403
  hypo

SEQ ID NO: 160277 - DNA, 30 bp, Homo sapiens
  chr8:95857257-95857287
  hypo
aggcatgagccaccacgcccagcttagttt

SEQ ID NO: 160278 - DNA, 158 bp, Homo sapiens; identical to SEQ ID NO: 22579
  chr8:95865516-95865674
  hypo

SEQ ID NO: 160279 - DNA, 121 bp, Homo sapiens; identical to SEQ ID NO: 76330
  chr8:95942701-95942822
  hypo

SEQ ID NO: 160280 - DNA, 30 bp, Homo sapiens
  chr8:96004975-96005005
  hypo
aacattcttttggttcgctcataattctct

SEQ ID NO: 160281 - DNA, 31 bp, Homo sapiens; identical to SEQ ID NO: 22581
  chr8:96038394-96038425
  hypo

SEQ ID NO: 160282 - DNA, 31 bp, Homo sapiens; identical to SEQ ID NO: 22582
  chr8:96038664-96038695
  hypo

SEQ ID NO: 160283 - DNA, 30 bp, Homo sapiens
  chr8:96049081-96049111
  hypo
gctttctgacgtgaccggtgttgaagctga

SEQ ID NO: 160284 - DNA, 30 bp, Homo sapiens; identical to SEQ ID NO: 76333
  chr8:96076778-96076808
  hypo

SEQ ID NO: 160285 - DNA, 27 bp, Homo sapiens
  chr8:96083324-96083351
  hypo
cataaggcaaccggccgggcgcggtgg

SEQ ID NO: 160286 - DNA, 41 bp, Homo sapiens; identical to SEQ ID NO: 22583
  chr8:96099107-96099148
  hypo

SEQ ID NO: 160287 - DNA, 30 bp, Homo sapiens; identical to SEQ ID NO: 22584
  chr8:96125685-96125715
  hypo

SEQ ID NO: 160288 - DNA, 28 bp, Homo sapiens
  chr8:96125974-96126002
  hypo
ctggcaagaatcacatgaacccgggagg

SEQ ID NO: 160289 - DNA, 30 bp, Homo sapiens
  chr8:96144790-96144820
  hypo
gatggtacggacaagcgtcctggtgacatc

SEQ ID NO: 160290 - DNA, 188 bp, Homo sapiens
  chr8:96145223-96145411
  hypo
gctgttctccctacttcgcccccatccctagtctaccctaagcaacttcgttacctctctacgaacccatcagagcgcttagctatcagatcaattagggcacatttaaccttatatactatgcaataattacagtttctaggtatgtgaagtaggctgatggggttttgtgtcgtcaaagttttggg

SEQ ID NO: 160291 - DNA, 1025 bp, Homo sapiens; identical to SEQ ID NO: 45635
  chr8:96145957-96146982
  hypo

SEQ ID NO: 160292 - DNA, 30 bp, Homo sapiens
  chr8:96204817-96204847
  hypo
taagtcaccgtgttacggtatttggttgca

SEQ ID NO: 160293 - DNA, 30 bp, Homo sapiens
  chr8:96205237-96205267
  hypo
gttgtctgggggtaccggctgaaacccaaa

SEQ ID NO: 160294 - DNA, 30 bp, Homo sapiens
  chr8:96205690-96205720
  hypo
cagcagaaagagccccggtgaggggtacct

SEQ ID NO: 160295 - DNA, 163 bp, Homo sapiens
  chr8:96208672-96208835
  hypo
ggtggccgagttaagcgcttggattctgccactgaacttgttttcttggagatctgactcgttgccatcagcaacatgggcggggtggagctggctttctctgcatctgttctcctctacacctgatgttaacagaatgcctggattccggggacttccaggt

SEQ ID NO: 160296 - DNA, 30 bp, Homo sapiens; identical to SEQ ID NO: 22587
  chr8:96214064-96214094
  hypo

SEQ ID NO: 160297 - DNA, 39 bp, Homo sapiens; identical to SEQ ID NO: 76339
  chr8:96229504-96229543
  hypo

SEQ ID NO: 160298 - DNA, 31 bp, Homo sapiens; identical to SEQ ID NO: 22588
  chr8:96232002-96232033
  hypo

SEQ ID NO: 160299 - DNA, 30 bp, Homo sapiens
  chr8:96232797-96232827
  hypo
tcagccgctgagtcccgctcctctgctgcg

SEQ ID NO: 160300 - DNA, 89 bp, Homo sapiens
  chr8:96285363-96285452
  hypo
gagtgtcaggtatttcgtaaagaataggcaagtgcctccaggtgatacaattattaacatggtaaaggagaccgggtgccgtggctcat

SEQ ID NO: 160301 - DNA, 46 bp, Homo sapiens; identical to SEQ ID NO: 22589
  chr8:96465481-96465527
  hypo

SEQ ID NO: 160302 - DNA, 30 bp, Homo sapiens
  chr8:97004595-97004625
  hypo
cacaagtcacagttcgtatgtgcttaaatt

SEQ ID NO: 160303 - DNA, 121 bp, Homo sapiens; identical to SEQ ID NO: 76342
  chr8:97128825-97128946
  hypo

SEQ ID NO: 160304 - DNA, 721 bp, Homo sapiens; identical to SEQ ID NO: 45653
  chr8:97172018-97172739
  hypo

SEQ ID NO: 160305 - DNA, 1042 bp, Homo sapiens; identical to SEQ ID NO: 45654
  chr8:97172821-97173863
  hypo

SEQ ID NO: 160306 - DNA, 160 bp, Homo sapiens
  chr8:97265369-97265529
  hypo
tagcaggctatacaacgtgccctggaaagtacaaatgacaaggactttaatgaagggactctatacagcggtgtgagcagccttaagagaacaaacaagagccttcccaacaataaagagacaaggaggcaaaatgttaccacggcgcagagggactaga

SEQ ID NO: 160307 - DNA, 30 bp, Homo sapiens
  chr8:97277956-97277986
  hypo
tccaccctactcactcgacagaatgagacc

SEQ ID NO: 160308 - DNA, 30 bp, Homo sapiens
  chr8:97278489-97278519
  hypo
gacgttgcctttctgcggatttgtgtactt

SEQ ID NO: 160309 - DNA, 30 bp, Homo sapiens
  chr8:97303736-97303766
  hypo
tgacatttctgcagtcgcttcgtaaatgtt

SEQ ID NO: 160310 - DNA, 259 bp, Homo sapiens; identical to SEQ ID NO: 76345
  chr8:97333716-97333975
  hypo

SEQ ID NO: 160311 - DNA, 265 bp, Homo sapiens; identical to SEQ ID NO: 76346
  chr8:97339834-97340099
  hypo

SEQ ID NO: 160312 - DNA, 30 bp, Homo sapiens
  chr8:97350967-97350997
  hypo
tgcacatagagcacacggccaggaggtgcc

SEQ ID NO: 160313 - DNA, 30 bp, Homo sapiens
  chr8:97351375-97351405
  hypo
tggcctgaaatcagtcgagatgccagctct

SEQ ID NO: 160314 - DNA, 155 bp, Homo sapiens
  chr8:97414933-97415088
  hypo
tattttcaaaggtacctacaggcgctcactaaaatgtatttgtaactccaaaatcaacactcacagagagcttcatggacacgcatagagaggtgaaaaatgtgagtagcccgaggcacacattcccaggtgaggtcaaacgaggcaacactgcc

SEQ ID NO: 160315 - DNA, 357 bp, Homo sapiens; identical to SEQ ID NO: 116964
  chr8:97657754-97658111
  hypo

SEQ ID NO: 160316 - DNA, 199 bp, Homo sapiens; identical to SEQ ID NO: 76348
  chr8:98289304-98289503
  hypo

SEQ ID NO: 160317 - DNA, 77 bp, Homo sapiens; identical to SEQ ID NO: 22593
  chr8:98307767-98307844
  hypo

SEQ ID NO: 160318 - DNA, 30 bp, Homo sapiens
  chr8:98568231-98568261
  hypo
cttgggtctagtctccgccaagttggcggt

SEQ ID NO: 160319 - DNA, 29 bp, Homo sapiens
  chr8:98616560-98616589
  hypo
tcccgctcccgctcccgctcccgctcccg

SEQ ID NO: 160320 - DNA, 30 bp, Homo sapiens; identical to SEQ ID NO: 76351
  chr8:98636694-98636724
  hypo

SEQ ID NO: 160321 - DNA, 30 bp, Homo sapiens; identical to SEQ ID NO: 76352
  chr8:98738218-98738248
  hypo

SEQ ID NO: 160322 - DNA, 24 bp, Homo sapiens
  chr8:98786421-98786445
  hypo
ctgcaacagcggcgaacagcagtg

SEQ ID NO: 160323 - DNA, 37 bp, Homo sapiens; identical to SEQ ID NO: 22595
  chr8:98798631-98798668
  hypo

SEQ ID NO: 160324 - DNA, 36 bp, Homo sapiens; identical to SEQ ID NO: 22596
  chr8:98798907-98798943
  hypo

SEQ ID NO: 160325 - DNA, 948 bp, Homo sapiens; identical to SEQ ID NO: 45669
  chr8:98880994-98881942
  hypo

SEQ ID NO: 160326 - DNA, 30 bp, Homo sapiens
  chr8:98904701-98904731
  hypo
gtaacggtctggcttcgtagaagacagcta

SEQ ID NO: 160327 - DNA, 30 bp, Homo sapiens
  chr8:98905176-98905206
  hypo
ggggctccgatgtggcgctgggtctgccag

SEQ ID NO: 160328 - DNA, 30 bp, Homo sapiens; identical to SEQ ID NO: 76356
  chr8:98907483-98907513
  hypo

SEQ ID NO: 160329 - DNA, 216 bp, Homo sapiens
  chr8:98933980-98934196
  hypo
gctgtgtcgcacggtcgtctttgctctcagtccatctgtctctctgtctctctttgacaagcccatgtagttcaagtctcataaataaaatgcgtacagccggggttcccaaaccccatgctgtggaccgatctcagtccgtggcctgttaggaaccaggccgcacagcaggaaatgaatggcaggtgagcattaccacctgagctccacctcctg

SEQ ID NO: 160330 - DNA, 30 bp, Homo sapiens
  chr8:99153381-99153411
  hypo
tctctctgcaaactacgttctctgaaaatg

SEQ ID NO: 160331 - DNA, 133 bp, Homo sapiens
  chr8:99166495-99166628
  hypo
ttggagagttggctgcgcccaggtcagctttccagtggagggagtgggggtgtttgtaggggagggacggtggtgtgagccatctaggctgatgaagagcgaggcagctgctgcgagccgcagggaggtgcta

SEQ ID NO: 160332 - DNA, 30 bp, Homo sapiens; identical to SEQ ID NO: 76357
  chr8:99204865-99204895
  hypo

SEQ ID NO: 160333 - DNA, 30 bp, Homo sapiens
  chr8:99234892-99234922
  hypo
attgcctagagactgcgcattacttgtaaa

SEQ ID NO: 160334 - DNA, 30 bp, Homo sapiens
  chr8:99271888-99271918
  hypo
tcaaaaagtattgcacgcctctggttatga

SEQ ID NO: 160335 - DNA, 31 bp, Homo sapiens
  chr8:99284950-99284981
  hypo
tcctgtctcaggctcccgagtaactgtgact

SEQ ID NO: 160336 - DNA, 30 bp, Homo sapiens; identical to SEQ ID NO: 76358
  chr8:99368933-99368963
  hypo

SEQ ID NO: 160337 - DNA, 66 bp, Homo sapiens; identical to SEQ ID NO: 76359
  chr8:99376414-99376480
  hypo

SEQ ID NO: 160338 - DNA, 57 bp, Homo sapiens
  chr8:99411606-99411663
  hypo
cctgctgatccataacgtatttcaagaaagaagacacattcccggttgacgctcttt

SEQ ID NO: 160339 - DNA, 27 bp, Homo sapiens
  chr8:99438691-99438718
  hypo
ccgaccagaactcagcgactcccgccc

SEQ ID NO: 160340 - DNA, 1076 bp, Homo sapiens; identical to SEQ ID NO: 116985
  chr8:99438739-99439815
  hypo

SEQ ID NO: 160341 - DNA, 31 bp, Homo sapiens; identical to SEQ ID NO: 76362
  chr8:99440634-99440665
  hypo

SEQ ID NO: 160342 - DNA, 30 bp, Homo sapiens
  chr8:99602525-99602555
  hypo
atgtgccctgatgccgttcctttcttccac

SEQ ID NO: 160343 - DNA, 102 bp, Homo sapiens; identical to SEQ ID NO: 76363
  chr8:99626611-99626713
  hypo

SEQ ID NO: 160344 - DNA, 55 bp, Homo sapiens; identical to SEQ ID NO: 116987
  chr8:99837476-99837531
  hypo

SEQ ID NO: 160345 - DNA, 30 bp, Homo sapiens
  chr8:99838019-99838049
  hypo
ccggccgccccgccccgcccccggccgccc

SEQ ID NO: 160346 - DNA, 776 bp, Homo sapiens; identical to SEQ ID NO: 116994
  chr8:99953786-99954562
  hypo

SEQ ID NO: 160347 - DNA, 532 bp, Homo sapiens; identical to SEQ ID NO: 116995
  chr8:99954686-99955218
  hypo

SEQ ID NO: 160348 - DNA, 1314 bp, Homo sapiens; identical to SEQ ID NO: 45687
  chr8:99956452-99957766
  hypo

SEQ ID NO: 160349 - DNA, 37 bp, Homo sapiens; identical to SEQ ID NO: 76367
  chr8:100026625-100026662
  hypo

SEQ ID NO: 160350 - DNA, 30 bp, Homo sapiens
  chr8:100074346-100074376
  hypo
cccccgaagttagatcgattctcaacttca

SEQ ID NO: 160351 - DNA, 27 bp, Homo sapiens
  chr8:100074704-100074731
  hypo
attttttttgaggcagagtttcgcttt

SEQ ID NO: 160352 - DNA, 30 bp, Homo sapiens
  chr8:100115262-100115292
  hypo
tgatatcgtcctttccgtcaatatcacttc

SEQ ID NO: 160353 - DNA, 28 bp, Homo sapiens
  chr8:100118364-100118392
  hypo
aaaacacatagctggccgggtgtggtgg

SEQ ID NO: 160354 - DNA, 197 bp, Homo sapiens; identical to SEQ ID NO: 76370
  chr8:100245121-100245318
  hypo

SEQ ID NO: 160355 - DNA, 30 bp, Homo sapiens
  chr8:100246771-100246801
  hypo
tggggttcgggggccgcgtggctgggagca

SEQ ID NO: 160356 - DNA, 30 bp, Homo sapiens; identical to SEQ ID NO: 22604
  chr8:100286615-100286645
  hypo

SEQ ID NO: 160357 - DNA, 30 bp, Homo sapiens; identical to SEQ ID NO: 76372
  chr8:100336193-100336223
  hypo

SEQ ID NO: 160358 - DNA, 175 bp, Homo sapiens; identical to SEQ ID NO: 22605
  chr8:100353991-100354166
  hypo

SEQ ID NO: 160359 - DNA, 30 bp, Homo sapiens
  chr8:100476196-100476226
  hypo
acaagcatgagccaccgctccaggccttaa

SEQ ID NO: 160360 - DNA, 393 bp, Homo sapiens
  chr8:100708317-100708710
  hypo
agaagtgcccacgcacggtggcgagagtgccatggacctctgccacagtggattttatggttgcgggacctcggtgccttcctgtgcacagctggcactcttcacgccgtgtctctgatgacttggtagtagagaagtccctcaagtccttcaaggacaagaacaagaagcttgaggaaggcggccaagtgtacacccccaccccacagaggtggtggtgaataagtcgctcgggcagagggagctggatgagctgaagcgctactgccttggcttctgcctgctgtggatccatgccaagatcgtggtgctcatgctgtggcacatccttgacagccacaccctgaccaggcaaagcgcaggcagtttctccggatccgcgccgacctcctc

SEQ ID NO: 160361 - DNA, 30 bp, Homo sapiens
  chr8:100708930-100708960
  hypo
ccaccagacttctccgttttcccagaagat

SEQ ID NO: 160362 - DNA, 30 bp, Homo sapiens; identical to SEQ ID NO: 22606
  chr8:100716056-100716086
  hypo

SEQ ID NO: 160363 - DNA, 467 bp, Homo sapiens; identical to SEQ ID NO: 76376
  chr8:100796508-100796975
  hypo

SEQ ID NO: 160364 - DNA, 105 bp, Homo sapiens
  chr8:100851149-100851254
  hypo
aactaaatgccagtgcggctgtagcgccaaatgacagagggtcggagagagggctggtgaggcgatgagagaccaaacctggcaaggccccgtaggtcctatcaa

SEQ ID NO: 160365 - DNA, 30 bp, Homo sapiens
  chr8:100874498-100874528
  hypo
gaacgtgatgggcaacgcttccgaagcact

SEQ ID NO: 160366 - DNA, 115 bp, Homo sapiens; identical to SEQ ID NO: 76378
  chr8:100881199-100881314
  hypo

SEQ ID NO: 160367 - DNA, 231 bp, Homo sapiens; identical to SEQ ID NO: 22609
  chr8:100882015-100882246
  hypo

SEQ ID NO: 160368 - DNA, 80 bp, Homo sapiens; identical to SEQ ID NO: 22610
  chr8:100900795-100900875
  hypo

SEQ ID NO: 160369 - DNA, 123 bp, Homo sapiens
  chr8:100904088-100904211
  hypo
aaacacatactttatgaccttcggcacaaagtaaaaaacatacataccttatacaaagctgcaacccccagggatagcacgaatgctacagccatatgatttcgcagacgcctggccagaagg

SEQ ID NO: 160370 - DNA, 24 bp, Homo sapiens
  chr8:101156865-101156889
  hypo
aaaaaaagcagcggccgggcgcgg

SEQ ID NO: 160371 - DNA, 40 bp, Homo sapiens; identical to SEQ ID NO: 76383
  chr8:101297998-101298038
  hypo

SEQ ID NO: 160372 - DNA, 30 bp, Homo sapiens; identical to SEQ ID NO: 22611
  chr8:101299821-101299851
  hypo

SEQ ID NO: 160373 - DNA, 120 bp, Homo sapiens
  chr8:101300172-101300292
  hypo
ttatcttttttcctccgaaacagggagcctattgaaattcttctttttttgggtgcctttttgactgaaggcaagctcacagatgaagcagaggactgaagatctcgatctgaacccatt

SEQ ID NO: 160374 - DNA, 22 bp, Homo sapiens
  chr8:101308604-101308626
  hypo
ttacaggcgtaagccaccacga

SEQ ID NO: 160375 - DNA, 24 bp, Homo sapiens
  chr8:101323668-101323692
  hypo
ggaattggtggctcacgcctgtaa

SEQ ID NO: 160376 - DNA, 30 bp, Homo sapiens; identical to SEQ ID NO: 76387
  chr8:101325723-101325753
  hypo

SEQ ID NO: 160377 - DNA, 30 bp, Homo sapiens; identical to SEQ ID NO: 45699
  chr8:101499210-101499240
  hypo

SEQ ID NO: 160378 - DNA, 23 bp, Homo sapiens
  chr8:101591222-101591245
  hypo
tacaggcacgagacactgtgccc

SEQ ID NO: 160379 - DNA, 30 bp, Homo sapiens
  chr8:101693770-101693800
  hypo
tcacatatcgagtgacggatgcagacttgc

SEQ ID NO: 160380 - DNA, 30 bp, Homo sapiens
  chr8:101694180-101694210
  hypo
gtacttcctgcagaacgggtctctgggcct

SEQ ID NO: 160381 - DNA, 125 bp, Homo sapiens
  chr8:101717050-101717175
  hypo
ggcttatatataacacgatgtaagtgttctgtacaattaagtccccataaaaagccacgtaataactgtgtaagaggcaacttggtaaataaatttaaatcaccttagaacggagtgactctgga

SEQ ID NO: 160382 - DNA, 39 bp, Homo sapiens; identical to SEQ ID NO: 22614
  chr8:101726913-101726952
  hypo

SEQ ID NO: 160383 - DNA, 30 bp, Homo sapiens
  chr8:101729512-101729542
  hypo
aggcatgagccaccgcgcccggacttgtga

SEQ ID NO: 160384 - DNA, 380 bp, Homo sapiens
  chr8:101730420-101730800
  hypo
cgaagtgatggatcacgctgagaccacatgatgcgtactggcttgccctttataacatcaaaattcatggtgtccaaagcacgctccgctgcaggaaggacattttcagagtcaatattacttcaaaatttttgctggctacttaagattatataaactatggtgactggagtgggaggacacatggtctcacagttgaacgcttcctctttaagcttcaagatggctagacctttcaagtatcacacactagtgtgggacctaagttgtataaagcaaagacaaataccagaagcccccgaaatttctcacatataaaagaattccatattgctaataattaataaattcttgacgcaatctctcgccttaattgccat

SEQ ID NO: 160385 - DNA, 40 bp, Homo sapiens; identical to SEQ ID NO: 22615
  chr8:101735882-101735922
  hypo

SEQ ID NO: 160386 - DNA, 110 bp, Homo sapiens; identical to SEQ ID NO: 22616
  chr8:101744185-101744295
  hypo

SEQ ID NO: 160387 - DNA, 40 bp, Homo sapiens
  chr8:101787704-101787744
  hypo
tattggcttgagccactgcgcccagcctatcttggttgtt

SEQ ID NO: 160388 - DNA, 151 bp, Homo sapiens; identical to SEQ ID NO: 76393
  chr8:101872196-101872347
  hypo

SEQ ID NO: 160389 - DNA, 34 bp, Homo sapiens; identical to SEQ ID NO: 76394
  chr8:101891230-101891264
  hypo

SEQ ID NO: 160390 - DNA, 24 bp, Homo sapiens
  chr8:101955919-101955943
  hypo
aagacactgtccaggccgggcgcg

SEQ ID NO: 160391 - DNA, 246 bp, Homo sapiens
  chr8:102039314-102039560
  hypo
ttcttcatgtcaccaacgcttgctacatgcacagatctccttgaccctgcagccaatgcctcggtcagccagtgcacctgtactgtctctcctcttgggatagggtccctctccatcaggtacaatatatgggaaatcgaggggtggcctttgtcccagctgtcttagtcaccgcattcttcaggtcactaaccgccccattggagagggttcacgcagctcacgtgtaaacggacccctctttcc

SEQ ID NO: 160392 - DNA, 30 bp, Homo sapiens
  chr8:102041790-102041820
  hypo
acaaatggtgccagacgagaggctctgggg

SEQ ID NO: 160393 - DNA, 146 bp, Homo sapiens
  chr8:102145021-102145167
  hypo
cccggccgcattggaacttttaacctgctaggttcattattcgtaaagctaactgacaatactgaattactttcaggagagtcttagctaaggctgtgacaattgccagtagtggaaactaatacgaatctttaaaagtttcataa

SEQ ID NO: 160394 - DNA, 202 bp, Homo sapiens; identical to SEQ ID NO: 76398
  chr8:102190369-102190571
  hypo

SEQ ID NO: 160395 - DNA, 37 bp, Homo sapiens; identical to SEQ ID NO: 76399
  chr8:102197223-102197260
  hypo

SEQ ID NO: 160396 - DNA, 26 bp, Homo sapiens
  chr8:102197995-102198021
  hypo
ggaggctaaggcgggcggatcacgag

SEQ ID NO: 160397 - DNA, 17 bp, Homo sapiens
  chr8:102214378-102214395
  hypo
aaaattgtggccaggcg

SEQ ID NO: 160398 - DNA, 31 bp, Homo sapiens; identical to SEQ ID NO: 6510
  chr8:102217068-102217099
  hypo

SEQ ID NO: 160399 - DNA, 54 bp, Homo sapiens
  chr8:102381067-102381121
  hypo
aacagacgtgggtcacgctctctctggctctctttctgccgccatcttgattcc

SEQ ID NO: 160400 - DNA, 345 bp, Homo sapiens
  chr8:102450881-102451226
  hypo
cgaaacttcctcgaggcgctggggtggggaggctgtaggctgcaggcctgcttagcgcccttctcaacaactgctgtcatcagggagagcgagcagagtgcgtgcactccgggcggcgaagccccagcagaggcctgcctggctgtgctctgggtgccactcattcatgagggctgcgctgcgctgcgggcaccacgattcccacggaggggctgtaggtacttaaggggccctcagacgtcaggacaaacggacacttctctttgtgaagttgtccaagcacaagaggccacaatgtggttactactttttttttttttttttttttttgagatgaagtcttgt

SEQ ID NO: 160401 - DNA, 30 bp, Homo sapiens; identical to SEQ ID NO: 76404
  chr8:102452133-102452163
  hypo

SEQ ID NO: 160402 - DNA, 429 bp, Homo sapiens; identical to SEQ ID NO: 45712
  chr8:102505556-102505985
  hypo

SEQ ID NO: 160403 - DNA, 52 bp, Homo sapiens; identical to SEQ ID NO: 6514
  chr8:102506365-102506417
  hypo

SEQ ID NO: 160404 - DNA, 40 bp, Homo sapiens
  chr8:102524932-102524972
  hypo
aatctttctcttttattacgctggtcgggattggcagagg

SEQ ID NO: 160405 - DNA, 30 bp, Homo sapiens; identical to SEQ ID NO: 22623
  chr8:102570873-102570903
  hypo

SEQ ID NO: 160406 - DNA, 30 bp, Homo sapiens; identical to SEQ ID NO: 6515
  chr8:102636867-102636897
  hypo

SEQ ID NO: 160407 - DNA, 95 bp, Homo sapiens; identical to SEQ ID NO: 76409
  chr8:102690213-102690308
  hypo

SEQ ID NO: 160408 - DNA, 30 bp, Homo sapiens; identical to SEQ ID NO: 76410
  chr8:102714946-102714976
  hypo

SEQ ID NO: 160409 - DNA, 214 bp, Homo sapiens
  chr8:102998568-102998782
  hypo
tgatattctttatccatcttttatggtactatggcttcgccttgaactggttctgaacatgccttggctattcccacctataagctctgattcacgtcaagccatagactcttacctgtgtcttttgttcagtcagccatcttgcaaagtcatgttcaaacctgatctcaattttaaaaaggagaaaatccctgcccaccgcagctgccagcaa

SEQ ID NO: 160410 - DNA, 118 bp, Homo sapiens; identical to SEQ ID NO: 76411
  chr8:103315023-103315141
  hypo

SEQ ID NO: 160411 - DNA, 30 bp, Homo sapiens
  chr8:103365295-103365325
  hypo
ctaccagtccccgtacgtcaatcgccatta

SEQ ID NO: 160412 - DNA, 106 bp, Homo sapiens
  chr8:103403084-103403190
  hypo
gagaaattcaacaaaacgtacatacacgtcagtgagaaacaaagaaacatatacacagaccaattaaaagacaatgaatatcgaggctgggtgtggtggctcaccc

SEQ ID NO: 160413 - DNA, 30 bp, Homo sapiens
  chr8:103420388-103420418
  hypo
ggaaaccaggcaacacgtaaaaagttaaaa

SEQ ID NO: 160414 - DNA, 82 bp, Homo sapiens; identical to SEQ ID NO: 76412
  chr8:103463269-103463351
  hypo

SEQ ID NO: 160415 - DNA, 26 bp, Homo sapiens
  chr8:103504821-103504847
  hypo
tttttttttttttttttgagacggag

SEQ ID NO: 160416 - DNA, 30 bp, Homo sapiens
  chr8:103562957-103562987
  hypo
ctcgagagctggaccgcagtttgaggtgaa

SEQ ID NO: 160417 - DNA, 139 bp, Homo sapiens
  chr8:103572767-103572906
  hypo
gatcaagtcaaagttcgagtgaaggatggaaaggtatgtgtgtcggctgagcgggagaacaggtacgactgccttggatcgaaaaagtacagctacatgaacatctgcaaagagttcagcttgccgccctgtgtggatg

SEQ ID NO: 160418 - DNA, 30 bp, Homo sapiens
  chr8:103576653-103576683
  hypo
tgatgtacttgtcagcgcacttgacagtgt

SEQ ID NO: 160419 - DNA, 39 bp, Homo sapiens; identical to SEQ ID NO: 76415
  chr8:103588276-103588315
  hypo

SEQ ID NO: 160420 - DNA, 30 bp, Homo sapiens
  chr8:103611837-103611867
  hypo
gctagtctggagctacgcaggcagtccagg

SEQ ID NO: 160421 - DNA, 34 bp, Homo sapiens; identical to SEQ ID NO: 76416
  chr8:103629515-103629549
  hypo

SEQ ID NO: 160422 - DNA, 34 bp, Homo sapiens; identical to SEQ ID NO: 22628
  chr8:103629848-103629882
  hypo

SEQ ID NO: 160423 - DNA, 30 bp, Homo sapiens; identical to SEQ ID NO: 76418
  chr8:103638285-103638315
  hypo

SEQ ID NO: 160424 - DNA, 29 bp, Homo sapiens
  chr8:103645846-103645875
  hypo
ggagtgagccaccgcgcccggctgcgagt

SEQ ID NO: 160425 - DNA, 30 bp, Homo sapiens; identical to SEQ ID NO: 76419
  chr8:103646415-103646445
  hypo

SEQ ID NO: 160426 - DNA, 30 bp, Homo sapiens
  chr8:103715108-103715138
  hypo
agacagttttacgatcgccgtgcgggcgcc

SEQ ID NO: 160427 - DNA, 157 bp, Homo sapiens; identical to SEQ ID NO: 76420
  chr8:103728516-103728673
  hypo

SEQ ID NO: 160428 - DNA, 363 bp, Homo sapiens
  chr8:103728892-103729255
  hypo
acttaccggagcgatcgccgtggggtgtcccaaagccagcaaggtgagtttcaaagactagtggtgaagcaaaacaggttctgagaagtgtttattcaatttagcagtgatgacttcactagtgatcttggcaggggaagggtggggttcagaggcacgatgagggaggccagattgcagtggctaggattgagtggctaagacatggaggcagagggttgggggctctttagccatgtgagagtagaaggaaagagagggcttaaggggcagcgaggtggagagaattttgtcgctggttttaggccagaatcttgagcaccctagcggatgctgtccttactctcccggatccccttatgg

SEQ ID NO: 160429 - DNA, 31 bp, Homo sapiens
  chr8:103757770-103757801
  hypo
gtggctcccctccctccgccccctcactccc

SEQ ID NO: 160430 - DNA, 69 bp, Homo sapiens; identical to SEQ ID NO: 76422
  chr8:103768912-103768981
  hypo

SEQ ID NO: 160431 - DNA, 172 bp, Homo sapiens
  chr8:103769320-103769492
  hypo
ggcacagttgacctgtaatgccgctcacggtgcagctgaggggcaagacaaatgtgcagggacagtggccagtggtgcaccgcccagccacagcctctgggagatccagcatagtgaggagtgagtgcatcgcagctggaagggtgagggcgggctccaggctgcccctgcc

SEQ ID NO: 160432 - DNA, 38 bp, Homo sapiens; identical to SEQ ID NO: 76424
  chr8:103833089-103833127
  hypo

SEQ ID NO: 160433 - DNA, 34 bp, Homo sapiens; identical to SEQ ID NO: 22629
  chr8:103878118-103878152
  hypo

SEQ ID NO: 160434 - DNA, 38 bp, Homo sapiens
  chr8:103916555-103916593
  hypo
aaccactggatgggcccggtggctcacacctgtaatcc

SEQ ID NO: 160435 - DNA, 38 bp, Homo sapiens
  chr8:103916712-103916750
  hypo
gcatgcctgtagtctcagctactcgggaggccgtggtg

SEQ ID NO: 160436 - DNA, 46 bp, Homo sapiens; identical to SEQ ID NO: 22631
  chr8:103932059-103932105
  hypo

SEQ ID NO: 160437 - DNA, 143 bp, Homo sapiens; identical to SEQ ID NO: 22632
  chr8:103943075-103943218
  hypo

SEQ ID NO: 160438 - DNA, 37 bp, Homo sapiens; identical to SEQ ID NO: 76429
  chr8:103984300-103984337
  hypo

SEQ ID NO: 160439 - DNA, 155 bp, Homo sapiens
  chr8:104054116-104054271
  hypo
atgcaataaaatgaccgatttttaatatttttggagttacggatacctttgagacaagatgtttcctccaaaacgtactcacttatgcacagttttgcatgcaaatttaattacagaccctctagcgcacatccgtggacctcctacttaagagc

SEQ ID NO: 160440 - DNA, 121 bp, Homo sapiens; identical to SEQ ID NO: 22633
  chr8:104055448-104055569
  hypo

SEQ ID NO: 160441 - DNA, 200 bp, Homo sapiens; identical to SEQ ID NO: 76431
  chr8:104086526-104086726
  hypo

SEQ ID NO: 160442 - DNA, 22 bp, Homo sapiens
  chr8:104408573-104408595
  hypo
tttttttttgtttgtttgaaac

SEQ ID NO: 160443 - DNA, 30 bp, Homo sapiens
  chr8:104430386-104430416
  hypo
atagtgtaaattgccgccaaatcaagtagg

SEQ ID NO: 160444 - DNA, 149 bp, Homo sapiens; identical to SEQ ID NO: 76433
  chr8:104431398-104431547
  hypo

SEQ ID NO: 160445 - DNA, 2953 bp, Homo sapiens; identical to SEQ ID NO: 117050
  chr8:104510980-104513933
  hypo

SEQ ID NO: 160446 - DNA, 26 bp, Homo sapiens
  chr8:105061356-105061382
  hypo
aaaaaaaaaaaaaaggccgggcggtg

SEQ ID NO: 160447 - DNA, 25 bp, Homo sapiens
  chr8:105061681-105061706
  hypo
acccgaagccatgcttttgttaaag

SEQ ID NO: 160448 - DNA, 80 bp, Homo sapiens; identical to SEQ ID NO: 76437
  chr8:105645132-105645212
  hypo

SEQ ID NO: 160449 - DNA, 681 bp, Homo sapiens; identical to SEQ ID NO: 117057
  chr8:106330392-106331073
  hypo

SEQ ID NO: 160450 - DNA, 173 bp, Homo sapiens; identical to SEQ ID NO: 6526
  chr8:106331083-106331256
  hypo

SEQ ID NO: 160451 - DNA, 30 bp, Homo sapiens
  chr8:106374909-106374939
  hypo
gagtgaataaatgcgcggaaagtctgagtg

SEQ ID NO: 160452 - DNA, 91 bp, Homo sapiens; identical to SEQ ID NO: 22638
  chr8:106453047-106453138
  hypo

SEQ ID NO: 160453 - DNA, 33 bp, Homo sapiens
  chr8:106458434-106458467
  hypo
accgtgcccggcgatagttccttattcatagaa

SEQ ID NO: 160454 - DNA, 39 bp, Homo sapiens; identical to SEQ ID NO: 76441
  chr8:106485009-106485048
  hypo

SEQ ID NO: 160455 - DNA, 30 bp, Homo sapiens; identical to SEQ ID NO: 6529
  chr8:106490682-106490712
  hypo

SEQ ID NO: 160456 - DNA, 30 bp, Homo sapiens
  chr8:106702664-106702694
  hypo
actgggccagtgtatcgagaaggacaccgg

SEQ ID NO: 160457 - DNA, 24 bp, Homo sapiens
  chr8:106987623-106987647
  hypo
aaaatattagaacaggccaggcgc

SEQ ID NO: 160458 - DNA, 30 bp, Homo sapiens; identical to SEQ ID NO: 76444
  chr8:107228188-107228218
  hypo

SEQ ID NO: 160459 - DNA, 21 bp, Homo sapiens
  chr8:107341859-107341880
  hypo
ccaccgcgcccagccatcagt

SEQ ID NO: 160460 - DNA, 30 bp, Homo sapiens
  chr8:107358324-107358354
  hypo
caccccccctaccgccgccagtgaattgaa

SEQ ID NO: 160461 - DNA, 1732 bp, Homo sapiens; identical to SEQ ID NO: 6531
  chr8:107669365-107671097
  hypo

SEQ ID NO: 160462 - DNA, 25 bp, Homo sapiens
  chr8:107789161-107789186
  hypo
tgtgagccaccgcgcccggccagct

SEQ ID NO: 160463 - DNA, 24 bp, Homo sapiens
  chr8:107830404-107830428
  hypo
tgcctggcccgcagtcacctcttt

SEQ ID NO: 160464 - DNA, 43 bp, Homo sapiens; identical to SEQ ID NO: 22642
  chr8:108454320-108454363
  hypo

SEQ ID NO: 160465 - DNA, 156 bp, Homo sapiens; identical to SEQ ID NO: 76447
  chr8:108581067-108581223
  hypo

SEQ ID NO: 160466 - DNA, 30 bp, Homo sapiens; identical to SEQ ID NO: 76448
  chr8:109144215-109144245
  hypo

SEQ ID NO: 160467 - DNA, 45 bp, Homo sapiens; identical to SEQ ID NO: 76449
  chr8:109255555-109255600
  hypo

SEQ ID NO: 160468 - DNA, 30 bp, Homo sapiens
  chr8:109453920-109453950
  hypo
gttaactttgagatgcgtatcagctagcta

SEQ ID NO: 160469 - DNA, 27 bp, Homo sapiens
  chr8:109500402-109500429
  hypo
tttttttttttgagacagtctcgttct

SEQ ID NO: 160470 - DNA, 565 bp, Homo sapiens; identical to SEQ ID NO: 117071
  chr8:109799174-109799739
  hypo

SEQ ID NO: 160471 - DNA, 78 bp, Homo sapiens; identical to SEQ ID NO: 6537
  chr8:109799888-109799966
  hypo

SEQ ID NO: 160472 - DNA, 71 bp, Homo sapiens; identical to SEQ ID NO: 76453
  chr8:109800323-109800394
  hypo

SEQ ID NO: 160473 - DNA, 121 bp, Homo sapiens
  chr8:110083306-110083427
  hypo
gcagggcgcgctgagtgtggggcccaccgagcccgcgcccaccgggaacctgcaccggcccgccgggaacctgcaccggcccgcgagcgctgggtgctcagcccgggctcccgcccacgcc

SEQ ID NO: 160474 - DNA, 95 bp, Homo sapiens; identical to SEQ ID NO: 76454
  chr8:110274930-110275025
  hypo

SEQ ID NO: 160475 - DNA, 26 bp, Homo sapiens
  chr8:110406105-110406131
  hypo
tcttaaaatcaactgtagggccgggc

SEQ ID NO: 160476 - DNA, 31 bp, Homo sapiens
  chr8:110459065-110459096
  hypo
agcacactgagaacaacgctgttccatttga

SEQ ID NO: 160477 - DNA, 162 bp, Homo sapiens; identical to SEQ ID NO: 76456
  chr8:110643644-110643806
  hypo

SEQ ID NO: 160478 - DNA, 707 bp, Homo sapiens; identical to SEQ ID NO: 117076
  chr8:110703596-110704303
  hypo

SEQ ID NO: 160479 - DNA, 43 bp, Homo sapiens; identical to SEQ ID NO: 22648
  chr8:110767245-110767288
  hypo

SEQ ID NO: 160480 - DNA, 19 bp, Homo sapiens
  chr8:111076610-111076629
  hypo
gcaccgaagaagcgagcca

SEQ ID NO: 160481 - DNA, 30 bp, Homo sapiens
  chr8:111128082-111128112
  hypo
acctggagtccggcccgagcagcgtgactc

SEQ ID NO: 160482 - DNA, 30 bp, Homo sapiens
  chr8:111841907-111841937
  hypo
tggttcgttgtctcacgctgagaaagaatt

SEQ ID NO: 160483 - DNA, 30 bp, Homo sapiens
  chr8:111842289-111842319
  hypo
acaagaaaaagggagcgggaaccgccatat

SEQ ID NO: 160484 - DNA, 150 bp, Homo sapiens
  chr8:112347384-112347534
  hypo
atggttttcccctgcagtcaggctgcttggaagcctggactgtcctccaactgccccagccaaactccgcgtcgttccacctatcaatggcccgccagcctgtaggtgtctgttggtgtgccctccacgagcagccgcttgtgtcttctt

SEQ ID NO: 160485 - DNA, 243 bp, Homo sapiens
  chr8:112482646-112482889
  hypo
gcccgtctggagccgcggttgggaagacgtcgtctgcagcaagggaggcgtggtggggctgtgcctctgtggagctggtgaggccgggaacaggcaggccccccgcccctatcaagtcgcggggcaagagcccctccctccagatgcaactgcaagggtgactccagacctatacgccctatggcactgtaggctcggaagggcctgctcccactccctggcctgttccggctcgggcaccca

SEQ ID NO: 160486 - DNA, 30 bp, Homo sapiens
  chr8:113323283-113323313
  hypo
acaagtcggaatcctcgatcacaggcccaa

SEQ ID NO: 160487 - DNA, 80 bp, Homo sapiens; identical to SEQ ID NO: 22649
  chr8:114691129-114691209
  hypo

SEQ ID NO: 160488 - DNA, 35 bp, Homo sapiens; identical to SEQ ID NO: 22650
  chr8:114888154-114888189
  hypo

SEQ ID NO: 160489 - DNA, 32 bp, Homo sapiens; identical to SEQ ID NO: 76461
  chr8:115222083-115222115
  hypo

SEQ ID NO: 160490 - DNA, 21 bp, Homo sapiens
  chr8:115599048-115599069
  hypo
agccaccgctcttggccaaca

SEQ ID NO: 160491 - DNA, 30 bp, Homo sapiens
  chr8:115610071-115610101
  hypo
caatgcccgtctttacgtttaagtacagaa

SEQ ID NO: 160492 - DNA, 29 bp, Homo sapiens
  chr8:116052349-116052378
  hypo
ccgtgcccggcccatttcaggagtcttaa

SEQ ID NO: 160493 - DNA, 93 bp, Homo sapiens
  chr8:116342860-116342953
  hypo
gagactccagccaagcgggagtccacgggaggggtgggggagaactcaagcatgacaggctcaggtcccaagccctgcctcgcagggaggtgg

SEQ ID NO: 160494 - DNA, 35 bp, Homo sapiens; identical to SEQ ID NO: 22651
  chr8:116345685-116345720
  hypo

SEQ ID NO: 160495 - DNA, 30 bp, Homo sapiens
  chr8:116513075-116513105
  hypo
aggcaggagccaccgcgcccgacctgaact

SEQ ID NO: 160496 - DNA, 30 bp, Homo sapiens
  chr8:116786481-116786511
  hypo
ataatgcatgtaatgcgtgtttaaggagaa

SEQ ID NO: 160497 - DNA, 30 bp, Homo sapiens
  chr8:116902911-116902941
  hypo
tgataaactttgaaacgactaactcgtctc

SEQ ID NO: 160498 - DNA, 30 bp, Homo sapiens; identical to SEQ ID NO: 45772
  chr8:117209532-117209562
  hypo

SEQ ID NO: 160499 - DNA, 177 bp, Homo sapiens
  chr8:117336910-117337087
  hypo
aaataacatgtgattttagtgcggcagtattgaagccaacgtctcatgtaaagatttagggctttttcatcaagacactgtattggaaaatcgcctgctaagaatgtggtcattaccgtacattttgtgtgcaaagcaaaggcggttgatactgtaccttggcgaagctgccttaac

SEQ ID NO: 160500 - DNA, 22 bp, Homo sapiens
  chr8:117421306-117421328
  hypo
cttccactctcaaaagcgtctt

SEQ ID NO: 160501 - DNA, 43 bp, Homo sapiens; identical to SEQ ID NO: 76468
  chr8:117572510-117572553
  hypo

SEQ ID NO: 160502 - DNA, 30 bp, Homo sapiens; identical to SEQ ID NO: 45773
  chr8:117624077-117624107
  hypo

SEQ ID NO: 160503 - DNA, 30 bp, Homo sapiens; identical to SEQ ID NO: 45774
  chr8:117630667-117630697
  hypo

SEQ ID NO: 160504 - DNA, 143 bp, Homo sapiens
  chr8:117631321-117631464
  hypo
gaatgtaagcgggcgcgtcgtccatctcacggaagcaagaagctttaatgtgctcttggatgatgtggctctgcccctcgtgcttctgacctccatcatgagaagagtaggtcccaacgtgagaccaccgtgagcctgcactc

SEQ ID NO: 160505 - DNA, 30 bp, Homo sapiens; identical to SEQ ID NO: 45775
  chr8:117647772-117647802
  hypo

SEQ ID NO: 160506 - DNA, 120 bp, Homo sapiens
  chr8:117667018-117667138
  hypo
cgcaatggaaggcggcgcttcaaccacagtcctacccgtgccagagcatagagaagaacattgatgtctctggcccttctgggttcatcccacttgccttatatcgaggaagtacaaagt

SEQ ID NO: 160507 - DNA, 105 bp, Homo sapiens; identical to SEQ ID NO: 76474
  chr8:117824013-117824118
  hypo

SEQ ID NO: 160508 - DNA, 21 bp, Homo sapiens
  chr8:117854530-117854551
  hypo
aggagtctagctctgtcaccc

SEQ ID NO: 160509 - DNA, 1759 bp, Homo sapiens; identical to SEQ ID NO: 6554
  chr8:117858171-117859930
  hypo

SEQ ID NO: 160510 - DNA, 85 bp, Homo sapiens; identical to SEQ ID NO: 6555
  chr8:117861183-117861268
  hypo

SEQ ID NO: 160511 - DNA, 162 bp, Homo sapiens; identical to SEQ ID NO: 6556
  chr8:117862855-117863017
  hypo

SEQ ID NO: 160512 - DNA, 150 bp, Homo sapiens; identical to SEQ ID NO: 6557
  chr8:117864185-117864335
  hypo

SEQ ID NO: 160513 - DNA, 175 bp, Homo sapiens; identical to SEQ ID NO: 6558
  chr8:117864772-117864947
  hypo

SEQ ID NO: 160514 - DNA, 225 bp, Homo sapiens; identical to SEQ ID NO: 6559
  chr8:117866482-117866707
  hypo

SEQ ID NO: 160515 - DNA, 124 bp, Homo sapiens; identical to SEQ ID NO: 6560
  chr8:117868403-117868527
  hypo

SEQ ID NO: 160516 - DNA, 134 bp, Homo sapiens; identical to SEQ ID NO: 6561
  chr8:117868876-117869010
  hypo

SEQ ID NO: 160517 - DNA, 222 bp, Homo sapiens; identical to SEQ ID NO: 6562
  chr8:117869490-117869712
  hypo

SEQ ID NO: 160518 - DNA, 108 bp, Homo sapiens; identical to SEQ ID NO: 6563
  chr8:117870589-117870697
  hypo

SEQ ID NO: 160519 - DNA, 113 bp, Homo sapiens; identical to SEQ ID NO: 6564
  chr8:117874066-117874179
  hypo

SEQ ID NO: 160520 - DNA, 131 bp, Homo sapiens; identical to SEQ ID NO: 6565
  chr8:117875367-117875498
  hypo

SEQ ID NO: 160521 - DNA, 177 bp, Homo sapiens; identical to SEQ ID NO: 6566
  chr8:117878823-117879000
  hypo

SEQ ID NO: 160522 - DNA, 114 bp, Homo sapiens; identical to SEQ ID NO: 6567
  chr8:117886848-117886962
  hypo

SEQ ID NO: 160523 - DNA, 237 bp, Homo sapiens; identical to SEQ ID NO: 117113
  chr8:117887066-117887303
  hypo

SEQ ID NO: 160524 - DNA, 30 bp, Homo sapiens; identical to SEQ ID NO: 76491
  chr8:117952020-117952050
  hypo

SEQ ID NO: 160525 - DNA, 29 bp, Homo sapiens
  chr8:118438455-118438484
  hypo
gccaaggctggactgtactgccgtgatct

SEQ ID NO: 160526 - DNA, 251 bp, Homo sapiens; identical to SEQ ID NO: 76493
  chr8:118531586-118531837
  hypo

SEQ ID NO: 160527 - DNA, 45 bp, Homo sapiens; identical to SEQ ID NO: 22671
  chr8:118532122-118532167
  hypo

SEQ ID NO: 160528 - DNA, 30 bp, Homo sapiens; identical to SEQ ID NO: 76495
  chr8:118537295-118537325
  hypo

SEQ ID NO: 160529 - DNA, 203 bp, Homo sapiens
  chr8:118849362-118849565
  hypo
aatctgaaggacccaagcctgcgaccacgaggaaccagacagaaagtggcattgtgcagcatttcccgataatcatacctagaaagagaagaggagtaaacagcaaatgaagactcattgcgaatgtggggatattgaccataggtgggcgcccatgtgcatgaatttacgcaaagcaactcgggaaagccaccagcaggcag

SEQ ID NO: 160530 - DNA, 213 bp, Homo sapiens
  chr8:118958835-118959048
  hypo
gaaaacagacaaaagcgtcatccacaaatggagccaatcctatacacgaggaccagtcgtgggctcctagcttgtttcagcaaacagcaggcattgatccagggcagggtgggagggcccacggcctctgaattattaacttctcctgttcccacgtgaacttcaccatcagtgcttacaccaccacctggcaccgttcggagggattttcca

SEQ ID NO: 160531 - DNA, 30 bp, Homo sapiens
  chr8:119024159-119024189
  hypo
gagtcctacagagagcgcgagagaacatgg

SEQ ID NO: 160532 - DNA, 89 bp, Homo sapiens
  chr8:119024389-119024478
  hypo
gccttcaaaagctctcgccaaaagtagggaaccctcaatgaagcgcaggccagatgccagttttcggtgcaaagcgatcctgtgatcat

SEQ ID NO: 160533 - DNA, 121 bp, Homo sapiens; identical to SEQ ID NO: 76496
  chr8:119057046-119057167
  hypo

SEQ ID NO: 160534 - DNA, 93 bp, Homo sapiens; identical to SEQ ID NO: 76497
  chr8:119057226-119057319
  hypo

SEQ ID NO: 160535 - DNA, 31 bp, Homo sapiens; identical to SEQ ID NO: 22673
  chr8:119096829-119096860
  hypo

SEQ ID NO: 160536 - DNA, 208 bp, Homo sapiens; identical to SEQ ID NO: 6570
  chr8:119123497-119123705
  hypo

SEQ ID NO: 160537 - DNA, 63 bp, Homo sapiens
  chr8:119146974-119147037
  hypo
tgctgctaacttgtccgctgtttaatcttcattagtcttccaaggaatcgagtgtgcagcgaa

SEQ ID NO: 160538 - DNA, 30 bp, Homo sapiens
  chr8:119316306-119316336
  hypo
gatgccttgtgggcccgggttctccgctct

SEQ ID NO: 160539 - DNA, 27 bp, Homo sapiens
  chr8:119404344-119404371
  hypo
agtaactactcacagcggtaagcacaa

SEQ ID NO: 160540 - DNA, 30 bp, Homo sapiens
  chr8:119407602-119407632
  hypo
tctattattacagaacgtgtatctcagata

SEQ ID NO: 160541 - DNA, 30 bp, Homo sapiens
  chr8:119489584-119489614
  hypo
aagagccattgcgctcgacctctgcggccg

SEQ ID NO: 160542 - DNA, 27 bp, Homo sapiens
  chr8:119571074-119571101
  hypo
cgtgagccaccgcgcccggccgacact

SEQ ID NO: 160543 - DNA, 171 bp, Homo sapiens
  chr8:119611613-119611784
  hypo
tttaacattctctcacgtgctccgagaaccaagtgacaaccatgtgcacatgagaacgcagtcaacaagaccatggcatgcagccccaaatattcactgctggcctgcccaggtgcggagcgctgctggtaccgcttctgtcaaaaggctcccgctcgtggggtgctcagt

SEQ ID NO: 160544 - DNA, 30 bp, Homo sapiens
  chr8:119635151-119635181
  hypo
tacaattcgacagctcgtaaaaattaagtt

SEQ ID NO: 160545 - DNA, 30 bp, Homo sapiens
  chr8:120714890-120714920
  hypo
tgtacctcgacacagcggaatgccgactga

SEQ ID NO: 160546 - DNA, 23 bp, Homo sapiens
  chr8:120844121-120844144
  hypo
ctggtgcggtggctcacgcctgt

SEQ ID NO: 160547 - DNA, 209 bp, Homo sapiens; identical to SEQ ID NO: 22676
  chr8:120846158-120846367
  hypo

SEQ ID NO: 160548 - DNA, 30 bp, Homo sapiens; identical to SEQ ID NO: 22677
  chr8:120846572-120846602
  hypo

SEQ ID NO: 160549 - DNA, 23 bp, Homo sapiens
  chr8:120954732-120954755
  hypo
accgcgtccggccgtgacttgat

SEQ ID NO: 160550 - DNA, 191 bp, Homo sapiens; identical to SEQ ID NO: 76503
  chr8:121292125-121292316
  hypo

SEQ ID NO: 160551 - DNA, 30 bp, Homo sapiens
  chr8:121354653-121354683
  hypo
ggcgcgtcaagtatgcgaacagctcatcca

SEQ ID NO: 160552 - DNA, 25 bp, Homo sapiens
  chr8:121464786-121464811
  hypo
atagccaggcacagtggctcacgcc

SEQ ID NO: 160553 - DNA, 68 bp, Homo sapiens
  chr8:121624348-121624416
  hypo
tgaacagtgagccttcgagaaagccatcgtgtttaactgatatttccactttgcgtagtggtccttat

SEQ ID NO: 160554 - DNA, 30 bp, Homo sapiens; identical to SEQ ID NO: 6576
  chr8:121706824-121706854
  hypo

SEQ ID NO: 160555 - DNA, 620 bp, Homo sapiens; identical to SEQ ID NO: 117139
  chr8:121823345-121823965
  hypo

SEQ ID NO: 160556 - DNA, 386 bp, Homo sapiens; identical to SEQ ID NO: 117140
  chr8:121824315-121824701
  hypo

SEQ ID NO: 160557 - DNA, 22 bp, Homo sapiens
  chr8:121826938-121826960
  hypo
aaacttatggctaggcgcagtg

SEQ ID NO: 160558 - DNA, 185 bp, Homo sapiens; identical to SEQ ID NO: 76508
  chr8:121982485-121982670
  hypo

SEQ ID NO: 160559 - DNA, 25 bp, Homo sapiens
  chr8:122126444-122126469
  hypo
cctcggcctcccaaagtggtgtttt

SEQ ID NO: 160560 - DNA, 39 bp, Homo sapiens; identical to SEQ ID NO: 76510
  chr8:122245399-122245438
  hypo

SEQ ID NO: 160561 - DNA, 24 bp, Homo sapiens
  chr8:122347035-122347059
  hypo
ttcggccatcttccttacccacca

SEQ ID NO: 160562 - DNA, 181 bp, Homo sapiens
  chr8:122454960-122455141
  hypo
tccgactgccccgccaaactgcgccttgccccgccagttgatggcctgcccgggctccggtgtctgtctgtctgtctgtgtgctcttccaccggcgtgttccctccgtgtcctctcgccatccagctgcttgtgtcttctcttgctgatgtgctcctctcgccgtccagcagcttctgtcc

SEQ ID NO: 160563 - DNA, 31 bp, Homo sapiens; identical to SEQ ID NO: 76512
  chr8:122621652-122621683
  hypo

SEQ ID NO: 160564 - DNA, 19 bp, Homo sapiens
  chr8:122698553-122698572
  hypo
ccgccgcgcccagccccag

SEQ ID NO: 160565 - DNA, 260 bp, Homo sapiens; identical to SEQ ID NO: 76513
  chr8:122731384-122731644
  hypo

SEQ ID NO: 160566 - DNA, 29 bp, Homo sapiens
  chr8:123078703-123078732
  hypo
tttttcttttttttttgagaccgagtctt

SEQ ID NO: 160567 - DNA, 24 bp, Homo sapiens
  chr8:123114667-123114691
  hypo
agaccacacagcaagaagagccgt

SEQ ID NO: 160568 - DNA, 23 bp, Homo sapiens
  chr8:123114990-123115013
  hypo
ccgaagggccatcttcttgctcc

SEQ ID NO: 160569 - DNA, 27 bp, Homo sapiens
  chr8:123167481-123167508
  hypo
gaagataattaagatagaaatcggccg

SEQ ID NO: 160570 - DNA, 29 bp, Homo sapiens
  chr8:123316158-123316187
  hypo
gagccaccgtgcctggcctgttatgatct

SEQ ID NO: 160571 - DNA, 77 bp, Homo sapiens; identical to SEQ ID NO: 76518
  chr8:123508180-123508257
  hypo

SEQ ID NO: 160572 - DNA, 30 bp, Homo sapiens
  chr8:123575485-123575515
  hypo
cgctcaaccccaagacgcatgttgactgct

SEQ ID NO: 160573 - DNA, 227 bp, Homo sapiens
  chr8:123695433-123695660
  hypo
tgcagcatgttccctggatcacgggagactccatcgattgatgtctggctcaccctgagaaatttaaagggcgagagatggcggcaggccagttgcgccgaaggtggagtgagacgaggtgatcgcgttgagggagacttgcttttcccgagtctgtcagggcaaagcatgtgtgagtttcccatggagcagaactggcctgggaggtgcggcgccagatgctaggg

SEQ ID NO: 160574 - DNA, 30 bp, Homo sapiens
  chr8:123769357-123769387
  hypo
gcccgccaccatgcccggctaattgggaga

SEQ ID NO: 160575 - DNA, 262 bp, Homo sapiens; identical to SEQ ID NO: 22683
  chr8:123830691-123830953
  hypo

SEQ ID NO: 160576 - DNA, 30 bp, Homo sapiens; identical to SEQ ID NO: 22684
  chr8:123838887-123838917
  hypo

SEQ ID NO: 160577 - DNA, 30 bp, Homo sapiens
  chr8:123840949-123840979
  hypo
tgtgttcccacgcttcgcagggctgatgga

SEQ ID NO: 160578 - DNA, 87 bp, Homo sapiens
  chr8:123842812-123842899
  hypo
tggtattcaccatgtcgttgtagcaggagcatcgcctgcattgtctggaaatatgtctgtgcctgcaagacagttatgttgagagga

SEQ ID NO: 160579 - DNA, 154 bp, Homo sapiens
  chr8:123865810-123865964
  hypo
ccctcgtctcagccacgctcagccaggctgctcctttcagccgtgcccttgctctggacctcacccctccgctcccctccttggaattcatactctcccacccttctctggctggcaatttccacccattcttcatggacgaggacaaacaccg

SEQ ID NO: 160580 - DNA, 36 bp, Homo sapiens
  chr8:123872984-123873020
  hypo
tcagagagggtcgggcgtggtggctcacacctgtaa

SEQ ID NO: 160581 - DNA, 135 bp, Homo sapiens
  chr8:123874079-123874214
  hypo
tttggagagtattgttcttctcgcaggtcagtgcctggaatgctcaggttagcttgtctcctggggcgcctcctcccgccggatggttagttctaaagggcagtggacaaaagcgctcaacttactggaatcaaa

SEQ ID NO: 160582 - DNA, 332 bp, Homo sapiens
  chr8:123874761-123875093
  hypo
tgtgtgcagcaagctcccagccggtacgattgcacccttgaatagtaataccccaggtcaggtgtgcgaggggcctggcgcgtggtaagtactcagtcaacagatctgccacctgaaagttttctttcccccagccaaaaggttctcctttgaaaacaggaatggatgaaaagagaaagctctgcccacctcagaattctcagggaaacaagaaaaaacaagtttggctttcaaggcgggctgggcgtggggagtgagaacggtgtgccctccgcggcagctccctggctcggtggctgctccgtgcacatgtgcgccgcaggtggcctctg

SEQ ID NO: 160583 - DNA, 51 bp, Homo sapiens
  chr8:123875755-123875806
  hypo
aggatgtgagcaacacgggaccggtgagtaccgtcgcgtttggcagtgtgg

SEQ ID NO: 160584 - DNA, 87 bp, Homo sapiens
  chr8:123943475-123943562
  hypo
cgcctccaggagccacgagtattatgcagggctcgtacactgctgcctgcgtgagaagggccagagtttgtgcggtaggcctcatgt

SEQ ID NO: 160585 - DNA, 30 bp, Homo sapiens; identical to SEQ ID NO: 76525
  chr8:123964016-123964046
  hypo

SEQ ID NO: 160586 - DNA, 30 bp, Homo sapiens
  chr8:123964923-123964953
  hypo
cccatcacacttgccgtggcaggagtcacc

SEQ ID NO: 160587 - DNA, 353 bp, Homo sapiens; identical to SEQ ID NO: 76526
  chr8:123966039-123966392
  hypo

SEQ ID NO: 160588 - DNA, 319 bp, Homo sapiens
  chr8:124001257-124001576
  hypo
gaatgttagagcccacgtggtccaatatcctgtctccaagaagccagaaagaaaaaaaaacatgaagaatggaaggatttagaagccactccgcctagggatagggaaggagatggcccggagatgctgcacagggttagacagcgcgatggggtaatacaaacacaaactttgcaggcaggtgattcaaatcctgtaatttggagcaagtgacttcacctctttcagccttggttttctcgagtgtaaaatgggaagataatgcctacatcatagagttttgaattggataacaagtcccgtggctgggcgcagtggc

SEQ ID NO: 160589 - DNA, 439 bp, Homo sapiens; identical to SEQ ID NO: 76528
  chr8:124014018-124014457
  hypo

SEQ ID NO: 160590 - DNA, 30 bp, Homo sapiens; identical to SEQ ID NO: 76529
  chr8:124038147-124038177
  hypo

SEQ ID NO: 160591 - DNA, 90 bp, Homo sapiens
  chr8:124055129-124055219
  hypo
atgcacagagaaaagccgctctaactaggttggaatgttggaggaactaaaagccaaaatgatccatcttgtctaattcaacttgtataa

SEQ ID NO: 160592 - DNA, 79 bp, Homo sapiens
  chr8:124161305-124161384
  hypo
ttcttagtaaaatagttcaatctgctttttcttttctgtttttctttttccgctgagttctgtccgcagaaaccgttct

SEQ ID NO: 160593 - DNA, 177 bp, Homo sapiens; identical to SEQ ID NO: 76530
  chr8:124163978-124164155
  hypo

SEQ ID NO: 160594 - DNA, 19 bp, Homo sapiens
  chr8:124171743-124171762
  hypo
taagattgccggacgcggt

SEQ ID NO: 160595 - DNA, 19 bp, Homo sapiens
  chr8:124172061-124172080
  hypo
aatacgctgaggggtggca

SEQ ID NO: 160596 - DNA, 307 bp, Homo sapiens; identical to SEQ ID NO: 76531
  chr8:124178877-124179184
  hypo

SEQ ID NO: 160597 - DNA, 385 bp, Homo sapiens
  chr8:124186902-124187287
  hypo
ctattcacctaagtgctcattcggtgccttcgacgtgccagccccaaactgggataggcacttggagttccaagaagctaagtcatgcctgaccccacccccaccccaaattgctcacagcctaaaggaggagattcccgcttaaaccagcagttacagacaaacgcaatccaggctctgtcatggggcccttaaggaatttacttaacctccctgtgcctcagtttcctcatctagaaaaacattaccgggctgcgccaggatgcagagtatatgcaacaggactatccgtccctgctgctgccctttctacccgccctgcccgttgtcttgtagattgtcccatgttctggatttttctgattgtttccttctcatgggatga

SEQ ID NO: 160598 - DNA, 226 bp, Homo sapiens
  chr8:124195482-124195708
  hypo
gaaggaaaaatccagcgccactgtgtacttccagaccgtcaagcacaacaacatcagagacctcgtccgccgctgcatcacccggactagccaggtaccgatggcaaagcccctgtctccgtggccaagtagcagggaggatcgggggctgatagagcagggaggggggtgcattttgctcccagggcgagagtccagataattggggcttcggatggaggggctt

SEQ ID NO: 160599 - DNA, 167 bp, Homo sapiens
  chr8:124197371-124197538
  hypo
ggccaggagtgcccacgctgcctttgtggcccggcgctggctgtatcccctcaggcaagtccctggactccttagggctcagctcctatgccggactaaagtccctccaggctccaaaggcctgttcctgagtgtgccagttctggtctttccgcatgaagttcagt

SEQ ID NO: 160600 - DNA, 414 bp, Homo sapiens
  chr8:124238536-124238950
  hypo
cagcccctgcggtcccgcacgctgcaggggaatgccgatcaagaggccgccttggtgattgctgagtgatcaaaaggcacacagaggagggagacaagtccttcagtagattaaatttggccctgctttataaaaaatgctatcagagccagggaaaatatctatgatgcttcgtttcacataaacccgagggatacactcacctcagctatcaacagcaaagtgtcttctttgaagctgaaccctttcattttatcttcaatttcctgctgagtccttaagttcctctccaaagcaaacgatgtttgctgaggttgggtaaactgaagcagaagcctgaaaaaccgaaaagtctcaatgcgtggcgaaaagtcccaacgcttccagataaaggaaagccgcgaggaaatgttc

SEQ ID NO: 160601 - DNA, 142 bp, Homo sapiens; identical to SEQ ID NO: 76536
  chr8:124247664-124247806
  hypo

SEQ ID NO: 160602 - DNA, 33 bp, Homo sapiens; identical to SEQ ID NO: 76537
  chr8:124248728-124248761
  hypo

SEQ ID NO: 160603 - DNA, 332 bp, Homo sapiens
  chr8:124249060-124249392
  hypo
tcagcgaggctgccgagctccagatgcagagatgcagatctttgtgaagaccctcacaggcaagaccatcacccttgagatcgagcccagcaacgccaaaattcaggacaaggagggcatcccacctgaccagcagcgtctgatacttgcgggcaaacagctggaggatggccgcactctctcagactacaacatccagaaggagtccaccctgcacctggtgctgcgcctgcgaggtggcattactgagccttccctccgccagctcgcccagaaatacaactacaacaagatgatctgccgcaagtgctgtgcccgcctgcaccaccccg

SEQ ID NO: 160604 - DNA, 83 bp, Homo sapiens; identical to SEQ ID NO: 22690
  chr8:124254705-124254788
  hypo

SEQ ID NO: 160605 - DNA, 80 bp, Homo sapiens; identical to SEQ ID NO: 22691
  chr8:124255228-124255308
  hypo

SEQ ID NO: 160606 - DNA, 30 bp, Homo sapiens; identical to SEQ ID NO: 22692
  chr8:124255872-124255902
  hypo

SEQ ID NO: 160607 - DNA, 39 bp, Homo sapiens; identical to SEQ ID NO: 22693
  chr8:124288873-124288912
  hypo

SEQ ID NO: 160608 - DNA, 30 bp, Homo sapiens; identical to SEQ ID NO: 22694
  chr8:124373840-124373870
  hypo

SEQ ID NO: 160609 - DNA, 42 bp, Homo sapiens; identical to SEQ ID NO: 76544
  chr8:124374922-124374964
  hypo

SEQ ID NO: 160610 - DNA, 28 bp, Homo sapiens
  chr8:124405860-124405888
  hypo
aatccaggaaagatggtcaggcgcggtg

SEQ ID NO: 160611 - DNA, 43 bp, Homo sapiens; identical to SEQ ID NO: 22695
  chr8:124412834-124412877
  hypo

SEQ ID NO: 160612 - DNA, 30 bp, Homo sapiens; identical to SEQ ID NO: 76547
  chr8:124431766-124431796
  hypo

SEQ ID NO: 160613 - DNA, 61 bp, Homo sapiens; identical to SEQ ID NO: 76548
  chr8:124453585-124453646
  hypo

SEQ ID NO: 160614 - DNA, 30 bp, Homo sapiens; identical to SEQ ID NO: 76549
  chr8:124453850-124453880
  hypo

SEQ ID NO: 160615 - DNA, 36 bp, Homo sapiens; identical to SEQ ID NO: 76550
  chr8:124455527-124455563
  hypo

SEQ ID NO: 160616 - DNA, 30 bp, Homo sapiens; identical to SEQ ID NO: 76551
  chr8:124456088-124456118
  hypo

SEQ ID NO: 160617 - DNA, 72 bp, Homo sapiens; identical to SEQ ID NO: 22696
  chr8:124532973-124533045
  hypo

SEQ ID NO: 160618 - DNA, 24 bp, Homo sapiens
  chr8:124538504-124538528
  hypo
acccaggctggagtgcagtggcgc

SEQ ID NO: 160619 - DNA, 30 bp, Homo sapiens
  chr8:124551762-124551792
  hypo
tccaagtaactccaacgtaaatggttatat

SEQ ID NO: 160620 - DNA, 51 bp, Homo sapiens
  chr8:124552150-124552201
  hypo
atcgcccccgctcaccgggctaaatgctgagagtctctgaaagtcaactgt

SEQ ID NO: 160621 - DNA, 58 bp, Homo sapiens
  chr8:124552287-124552345
  hypo
gacctcaggtttcccgccagaccacagagctcaggtgaggcctcgaatccagaggctc

SEQ ID NO: 160622 - DNA, 260 bp, Homo sapiens; identical to SEQ ID NO: 117157
  chr8:124552597-124552857
  hypo

SEQ ID NO: 160623 - DNA, 31 bp, Homo sapiens; identical to SEQ ID NO: 22697
  chr8:124553866-124553897
  hypo

SEQ ID NO: 160624 - DNA, 30 bp, Homo sapiens
  chr8:124570144-124570174
  hypo
gcgtggaaggagatacggagaatgagtgga

SEQ ID NO: 160625 - DNA, 30 bp, Homo sapiens; identical to SEQ ID NO: 22698
  chr8:124630593-124630623
  hypo

SEQ ID NO: 160626 - DNA, 116 bp, Homo sapiens
  chr8:124728888-124729004
  hypo
ggctgtattcatcagcgatgctcagtgctgatggaacgggtgtcctatggcttgttcccaggagctgggtaccgaacttcttctcgggaatgtagatggagcggacattccacgtc

SEQ ID NO: 160627 - DNA, 344 bp, Homo sapiens
  chr8:124729995-124730339
  hypo
tagtagggagtaggccgaggcgactttctgacggggcgtgtctcagcaggtttggagtgcagatgcacaagtccacaccttacgtaaccacgccacgtgaggcgcattaagtaaccactcagatgcgctcgtgcttggcttggagccactgttgtctgtaaaaggtacaattacgctgctaacgctgtacctctggcttggggctcacgcccagactcgcacccaggctcgcttgcgcccagagaaagagtaaagccatgttgaaactccctgcgattcctcgagtgtttttccagctgcccgccaccccaccgacttttttcggatctcacttagaaactaac

SEQ ID NO: 160628 - DNA, 30 bp, Homo sapiens; identical to SEQ ID NO: 45824
  chr8:124757645-124757675
  hypo

SEQ ID NO: 160629 - DNA, 30 bp, Homo sapiens
  chr8:124780160-124780190
  hypo
acgtgcagcacaccgcggaagggaagaggg

SEQ ID NO: 160630 - DNA, 30 bp, Homo sapiens
  chr8:124780535-124780565
  hypo
cgcgcgggcggggaacgctcacccgggcac

SEQ ID NO: 160631 - DNA, 42 bp, Homo sapiens; identical to SEQ ID NO: 22699
  chr8:124804119-124804161
  hypo

SEQ ID NO: 160632 - DNA, 30 bp, Homo sapiens
  chr8:124804627-124804657
  hypo
ttttaaatagcacggcgtactgtttataaa

SEQ ID NO: 160633 - DNA, 367 bp, Homo sapiens; identical to SEQ ID NO: 76558
  chr8:124965499-124965866
  hypo

SEQ ID NO: 160634 - DNA, 197 bp, Homo sapiens
  chr8:125230731-125230928
  hypo
aactccaaatatccgcgtgtatgcgtgcatattgggacttttgtcttgggaaatgacacctcagtttcttaggtgtactcaaaattctgagtcaaaattacttttagtttatgaagacccaattttaataatgcataaaaactcactcaatagataactctatctattagaatggataaaagcgctaagaaaaatta

SEQ ID NO: 160635 - DNA, 30 bp, Homo sapiens; identical to SEQ ID NO: 22700
  chr8:125266643-125266673
  hypo

SEQ ID NO: 160636 - DNA, 30 bp, Homo sapiens; identical to SEQ ID NO: 76560
  chr8:125313558-125313588
  hypo

SEQ ID NO: 160637 - DNA, 31 bp, Homo sapiens; identical to SEQ ID NO: 22701
  chr8:125364993-125365024
  hypo

SEQ ID NO: 160638 - DNA, 38 bp, Homo sapiens; identical to SEQ ID NO: 22702
  chr8:125411826-125411864
  hypo

SEQ ID NO: 160639 - DNA, 91 bp, Homo sapiens; identical to SEQ ID NO: 76563
  chr8:125452301-125452392
  hypo

SEQ ID NO: 160640 - DNA, 42 bp, Homo sapiens
  chr8:125455718-125455760
  hypo
ctctgacagtaatatagccctcgagaaaaaccaccaagtagg

SEQ ID NO: 160641 - DNA, 90 bp, Homo sapiens; identical to SEQ ID NO: 76564
  chr8:125498207-125498297
  hypo

SEQ ID NO: 160642 - DNA, 70 bp, Homo sapiens; identical to SEQ ID NO: 22704
  chr8:125498531-125498601
  hypo

SEQ ID NO: 160643 - DNA, 37 bp, Homo sapiens
  chr8:125507235-125507272
  hypo
tacaggcgtgagccaccgcgcccggcctcaccttgtt

SEQ ID NO: 160644 - DNA, 88 bp, Homo sapiens; identical to SEQ ID NO: 76566
  chr8:125553021-125553109
  hypo

SEQ ID NO: 160645 - DNA, 265 bp, Homo sapiens
  chr8:125573950-125574215
  hypo
ttccagccctcctcccgaccctttgccctctctgcttgtgagcagcacatatggtttagtgaagcacacagcggggaagaggagctccttacagaccaagccaagcaccccaggtgggacacgcactctcaagcactctcaaactatagccgtggctcttggctctgagtgcgtttaaaattgagtgtgtatccaaggaaggcagacagaggccacagtccccaggatggctgaaaaatgctaatgggagcgctgagctgtgagg

SEQ ID NO: 160646 - DNA, 30 bp, Homo sapiens; identical to SEQ ID NO: 76568
  chr8:125574596-125574626
  hypo

SEQ ID NO: 160647 - DNA, 72 bp, Homo sapiens; identical to SEQ ID NO: 76569
  chr8:125575143-125575215
  hypo

SEQ ID NO: 160648 - DNA, 169 bp, Homo sapiens; identical to SEQ ID NO: 22707
  chr8:125580647-125580816
  hypo

SEQ ID NO: 160649 - DNA, 30 bp, Homo sapiens; identical to SEQ ID NO: 22708
  chr8:125590217-125590247
  hypo

SEQ ID NO: 160650 - DNA, 30 bp, Homo sapiens; identical to SEQ ID NO: 45829
  chr8:125602743-125602773
  hypo

SEQ ID NO: 160651 - DNA, 17 bp, Homo sapiens
  chr8:125618690-125618707
  hypo
aaagtaggtatcattat

SEQ ID NO: 160652 - DNA, 120 bp, Homo sapiens; identical to SEQ ID NO: 22709
  chr8:125673726-125673846
  hypo

SEQ ID NO: 160653 - DNA, 102 bp, Homo sapiens; identical to SEQ ID NO: 22710
  chr8:125680349-125680451
  hypo

SEQ ID NO: 160654 - DNA, 31 bp, Homo sapiens; identical to SEQ ID NO: 22711
  chr8:125680996-125681027
  hypo

SEQ ID NO: 160655 - DNA, 107 bp, Homo sapiens; identical to SEQ ID NO: 76577
  chr8:125682589-125682696
  hypo

SEQ ID NO: 160656 - DNA, 30 bp, Homo sapiens
  chr8:125699341-125699371
  hypo
cactctcccggcactcgctttatccaaaac

SEQ ID NO: 160657 - DNA, 393 bp, Homo sapiens
  chr8:125738953-125739346
  hypo
caggcgcccaggcagcggctgaagaggggctgtccacacccactcggtgcacagctttccaaacctgcccactcgttttggaagcgagcttttaattaaacaccacctccccggatctggatctgttgaggcaaactggggctgggccagagccaaagagaagctccctaaatacacattaaaaaaataatttcccccaccgctcccaattcccacctccagccagctcgcgcggctggttttatttcctctggatgaataacacggggccctggtctatctctaggcaccagaaaatccacatccgaggatcaggttatccccagtcccaccctttgcaggaaaaaaccagggtgttgttccccgcccccacgcgcgcgcgcgcacacacac

SEQ ID NO: 160658 - DNA, 150 bp, Homo sapiens; identical to SEQ ID NO: 76578
  chr8:125792767-125792917
  hypo

SEQ ID NO: 160659 - DNA, 335 bp, Homo sapiens; identical to SEQ ID NO: 117170
  chr8:125985496-125985831
  hypo

SEQ ID NO: 160660 - DNA, 39 bp, Homo sapiens; identical to SEQ ID NO: 76579
  chr8:125992004-125992043
  hypo

SEQ ID NO: 160661 - DNA, 19 bp, Homo sapiens
  chr8:126007661-126007680
  hypo
tgggtgtggtggctcacgc

SEQ ID NO: 160662 - DNA, 79 bp, Homo sapiens; identical to SEQ ID NO: 76580
  chr8:126007979-126008058
  hypo

SEQ ID NO: 160663 - DNA, 30 bp, Homo sapiens; identical to SEQ ID NO: 76581
  chr8:126020645-126020675
  hypo

SEQ ID NO: 160664 - DNA, 174 bp, Homo sapiens
  chr8:126042713-126042887
  hypo
agctggcctgactgcagctcacgggaaataacgacattggggtttagaaagaatgcaaaatcagtaggagccactggtatgcactggatgtcaagaaacccatcactgcaaagccgagatcacgccactgcactccaacctgggcgacagagcgactctttctcataaaaaaaa

SEQ ID NO: 160665 - DNA, 377 bp, Homo sapiens; identical to SEQ ID NO: 76583
  chr8:126044383-126044760
  hypo

SEQ ID NO: 160666 - DNA, 30 bp, Homo sapiens
  chr8:126060834-126060864
  hypo
cacataaaatggtgccgttaccgtggaaca

SEQ ID NO: 160667 - DNA, 229 bp, Homo sapiens; identical to SEQ ID NO: 76584
  chr8:126061267-126061496
  hypo

SEQ ID NO: 160668 - DNA, 30 bp, Homo sapiens
  chr8:126079059-126079089
  hypo
gaatgttctccatcacgctccctacctttg

SEQ ID NO: 160669 - DNA, 30 bp, Homo sapiens; identical to SEQ ID NO: 76585
  chr8:126135825-126135855
  hypo

SEQ ID NO: 160670 - DNA, 30 bp, Homo sapiens; identical to SEQ ID NO: 76586
  chr8:126156729-126156759
  hypo

SEQ ID NO: 160671 - DNA, 17 bp, Homo sapiens
  chr8:126165003-126165020
  hypo
agaattgaactcttggc

SEQ ID NO: 160672 - DNA, 205 bp, Homo sapiens
  chr8:126238677-126238882
  hypo
tggagggacagaaagcggagaggtgtacagctgctcttcttgcactgtacccctcatatctgcagccgggatcagtcaagatctcattcgtgatgcttgggtgccttgggggcttgggaagccagctcaggccttgtgatccactcggattagtgttgtctggggttctcactttctgactcctggaggacgaaacgccacttgt

SEQ ID NO: 160673 - DNA, 30 bp, Homo sapiens
  chr8:126257063-126257093
  hypo
gagtaaatgaacattcgcacacaaaaaaag

SEQ ID NO: 160674 - DNA, 22 bp, Homo sapiens
  chr8:126278292-126278314
  hypo
agctaaccctgtgtgagcttgc

SEQ ID NO: 160675 - DNA, 17 bp, Homo sapiens
  chr8:126285115-126285132
  hypo
tacgtgtgtgtatatat

SEQ ID NO: 160676 - DNA, 35 bp, Homo sapiens
  chr8:126288086-126288121
  hypo
aattcaaacccagaacgctccgcctgcaaaaccca

SEQ ID NO: 160677 - DNA, 30 bp, Homo sapiens
  chr8:126320678-126320708
  hypo
catggtagcattttacgctgttctggttac

SEQ ID NO: 160678 - DNA, 41 bp, Homo sapiens
  chr8:126321192-126321233
  hypo
attgtgttatgaggccgggcacggtggcttacgcctgtaat

SEQ ID NO: 160679 - DNA, 30 bp, Homo sapiens
  chr8:126346717-126346747
  hypo
cctggcttagaggaccgaagtgctgcagct

SEQ ID NO: 160680 - DNA, 18 bp, Homo sapiens
  chr8:126371204-126371222
  hypo
aacagttgaaatgtcaga

SEQ ID NO: 160681 - DNA, 172 bp, Homo sapiens; identical to SEQ ID NO: 76591
  chr8:126374236-126374408
  hypo

SEQ ID NO: 160682 - DNA, 30 bp, Homo sapiens
  chr8:126412910-126412940
  hypo
aatgagttcaccgggcgcggtggctcacgc

SEQ ID NO: 160683 - DNA, 30 bp, Homo sapiens
  chr8:126433029-126433059
  hypo
ctcacattagctacccgctctctccccaga

SEQ ID NO: 160684 - DNA, 142 bp, Homo sapiens
  chr8:126562036-126562178
  hypo
gtgttctttcattgtcggttggctcatcacatattattgactaagctgaggaaacactgatctcattctttacgccttgaaacatttcattcttcattgttcatttaaagatttcatttttttttttttttttttttttttt

SEQ ID NO: 160685 - DNA, 30 bp, Homo sapiens
  chr8:126606618-126606648
  hypo
ggtaagaacccatcacgcatccccaaccct

SEQ ID NO: 160686 - DNA, 101 bp, Homo sapiens
  chr8:126628077-126628178
  hypo
ataaacaaagaaatgcacaatcgtaatagatcaggtggtggtgcgtgcctagatgaaaaatgaaacaggtggctgggcacggtatcacatgcctgtgaacc

SEQ ID NO: 160687 - DNA, 38 bp, Homo sapiens
  chr8:127412849-127412887
  hypo
ctctagtgtttctcacgtatttttcatcgtgtttactg

SEQ ID NO: 160688 - DNA, 38 bp, Homo sapiens
  chr8:127413006-127413044
  hypo
gatatgtaccataaattgaggtccgcagctgcagttgc

SEQ ID NO: 160689 - DNA, 105 bp, Homo sapiens; identical to SEQ ID NO: 76594
  chr8:127464657-127464762
  hypo

SEQ ID NO: 160690 - DNA, 45 bp, Homo sapiens; identical to SEQ ID NO: 22717
  chr8:127465001-127465046
  hypo

SEQ ID NO: 160691 - DNA, 24 bp, Homo sapiens
  chr8:127560444-127560468
  hypo
tgagatggagtctcactctgtcgc

SEQ ID NO: 160692 - DNA, 1497 bp, Homo sapiens; identical to SEQ ID NO: 117178
  chr8:127569426-127570923
  hypo

SEQ ID NO: 160693 - DNA, 23 bp, Homo sapiens
  chr8:127582716-127582739
  hypo
gcgcctggccaagaagtgatttt

SEQ ID NO: 160694 - DNA, 30 bp, Homo sapiens; identical to SEQ ID NO: 45836
  chr8:127707255-127707285
  hypo

SEQ ID NO: 160695 - DNA, 30 bp, Homo sapiens; identical to SEQ ID NO: 76601
  chr8:127767873-127767903
  hypo

SEQ ID NO: 160696 - DNA, 30 bp, Homo sapiens
  chr8:127857484-127857514
  hypo
acacatgcacacacgcgtatgcaccattta

SEQ ID NO: 160697 - DNA, 38 bp, Homo sapiens; identical to SEQ ID NO: 76602
  chr8:127887549-127887587
  hypo

SEQ ID NO: 160698 - DNA, 55 bp, Homo sapiens; identical to SEQ ID NO: 76603
  chr8:128235795-128235850
  hypo

SEQ ID NO: 160699 - DNA, 19 bp, Homo sapiens
  chr8:128323798-128323817
  hypo
aataaaaagtaagaaaaat

SEQ ID NO: 160700 - DNA, 30 bp, Homo sapiens; identical to SEQ ID NO: 45837
  chr8:128355602-128355632
  hypo

SEQ ID NO: 160701 - DNA, 30 bp, Homo sapiens; identical to SEQ ID NO: 45838
  chr8:128407427-128407457
  hypo

SEQ ID NO: 160702 - DNA, 30 bp, Homo sapiens; identical to SEQ ID NO: 45839
  chr8:128413289-128413319
  hypo

SEQ ID NO: 160703 - DNA, 30 bp, Homo sapiens; identical to SEQ ID NO: 45840
  chr8:128424776-128424806
  hypo

SEQ ID NO: 160704 - DNA, 30 bp, Homo sapiens
  chr8:128514599-128514629
  hypo
ctggttgtctattaacgtgagttagtgcca

SEQ ID NO: 160705 - DNA, 160 bp, Homo sapiens
  chr8:128699511-128699671
  hypo
cttgacctcgtgtgccggaaggggagactggagctcagacaggctacaacgcgtccaaggtcacacacctagttagtgagtgaatctggattgaaacttacatttcccaggctccaaagcctatggcatttcctctcctttgtgccgcttcccgccacag

SEQ ID NO: 160706 - DNA, 30 bp, Homo sapiens; identical to SEQ ID NO: 45841
  chr8:128718052-128718082
  hypo

SEQ ID NO: 160707 - DNA, 30 bp, Homo sapiens; identical to SEQ ID NO: 45842
  chr8:128719868-128719898
  hypo

SEQ ID NO: 160708 - DNA, 126 bp, Homo sapiens
  chr8:128735791-128735917
  hypo
ctaaatacatttggacggaggtgcacagaaaggagtccgctttattttgcagactgggaatccagatgcaatgaccacaggcagaaagcatggagcagaacctcccagcctcggctgtacccccag

SEQ ID NO: 160709 - DNA, 104 bp, Homo sapiens; identical to SEQ ID NO: 76611
  chr8:128745536-128745640
  hypo

SEQ ID NO: 160710 - DNA, 30 bp, Homo sapiens; identical to SEQ ID NO: 22721
  chr8:128810693-128810723
  hypo

SEQ ID NO: 160711 - DNA, 277 bp, Homo sapiens; identical to SEQ ID NO: 76613
  chr8:128831867-128832144
  hypo

SEQ ID NO: 160712 - DNA, 94 bp, Homo sapiens; identical to SEQ ID NO: 76614
  chr8:128836044-128836138
  hypo

SEQ ID NO: 160713 - DNA, 139 bp, Homo sapiens
  chr8:128861839-128861978
  hypo
gaaaagagaaagactgcgtgcatgtgcatgggtgcacagcctgtacatatgtgtgtgtgtgcccctgcgtgcacgtgcatgggtgcacagcctgtacatatgtgtgtgtgtgcccctgcgtgcacgtgcgtgggtgcac

SEQ ID NO: 160714 - DNA, 46 bp, Homo sapiens
  chr8:128867593-128867639
  hypo
atgggtcccggtgtgcggaaattggatggctcgctgaccccaaggg

SEQ ID NO: 160715 - DNA, 396 bp, Homo sapiens; identical to SEQ ID NO: 76616
  chr8:128867871-128868267
  hypo

SEQ ID NO: 160716 - DNA, 1108 bp, Homo sapiens
  chr8:128871641-128872749
  hypo
tttctcatattacgccgtggctgactccaaacttgaactctggtctctgtttttggagcttgcttccttcctacgaccctagactgctcctcctaaataattaagtggcaaacatggcacagacagtaacctcacataagaagctatgaggttaggacagaaatatccactgctggcctgcgaactattcacacaggtctgactccccgccagagtcctggctgccctggtcctgtggaatcccgtcatggcttctgtctaaacggagcaggctcagggccatgctgaacttggagaaatctgtgcaggagtcagatttgggctttagagtcacctggggttgaatctcgggcctgctatttattgaacctgtcctagcctcaatcgccttatctgtaccatggggatgataccatctaggtcgaaggtagttgcaggagattctcatgcacggaggcccttggccgtcatttgtttctttgtctctacaagcagagaggctgagtcatacagatcctgaggggagatcactttctcttccctcctttcgtgtgtcatctccacctgggtgtggtgagccccaggaataatgctgtgacatcaagccccgtgaacacctcctttcacacggaccccgtgactggctgcggctgccagcggtgatgagaactgatgacactccagggctaccaggaacggtgtgtgtgcctctgggcagggccacttcctagaaccatggggctgctctgtgaagagaaccggctcccagtgagctccaggagacgaggagcaggtcctggtggcggaggtgctggcgcaggaggccggctcctggcagaatcggcttccagctctgggcactggggtgcggtgtgggaccagcaacaggctgctcctctgccaggaaccgccagaaccaaagtcttctcgaaggcatcttcagaaggcaagcacagggctgagcactccggagaggagcctttgggggaaaactttttctcggagcttcggagctcagggagtactatgggggagattcactaggttgatgctttgctgataggcagccctgtagagaagacaaggcagctgggcatggtggctcagg

SEQ ID NO: 160717 - DNA, 653 bp, Homo sapiens; identical to SEQ ID NO: 22724
  chr8:128888833-128889486
  hypo

SEQ ID NO: 160718 - DNA, 457 bp, Homo sapiens; identical to SEQ ID NO: 22725
  chr8:128893132-128893589
  hypo

SEQ ID NO: 160719 - DNA, 42 bp, Homo sapiens; identical to SEQ ID NO: 22726
  chr8:128896286-128896328
  hypo

SEQ ID NO: 160720 - DNA, 30 bp, Homo sapiens
  chr8:128896999-128897029
  hypo
tgatacgggaaatcccggtgtacaatgcca

SEQ ID NO: 160721 - DNA, 30 bp, Homo sapiens; identical to SEQ ID NO: 22727
  chr8:128922506-128922536
  hypo

SEQ ID NO: 160722 - DNA, 397 bp, Homo sapiens; identical to SEQ ID NO: 76622
  chr8:128931027-128931424
  hypo

SEQ ID NO: 160723 - DNA, 149 bp, Homo sapiens; identical to SEQ ID NO: 22729
  chr8:128957471-128957620
  hypo

SEQ ID NO: 160724 - DNA, 76 bp, Homo sapiens; identical to SEQ ID NO: 22730
  chr8:128958208-128958284
  hypo

SEQ ID NO: 160725 - DNA, 30 bp, Homo sapiens; identical to SEQ ID NO: 22731
  chr8:128961226-128961256
  hypo

SEQ ID NO: 160726 - DNA, 30 bp, Homo sapiens; identical to SEQ ID NO: 22732
  chr8:128962708-128962738
  hypo

SEQ ID NO: 160727 - DNA, 245 bp, Homo sapiens; identical to SEQ ID NO: 76627
  chr8:129069802-129070047
  hypo

SEQ ID NO: 160728 - DNA, 31 bp, Homo sapiens; identical to SEQ ID NO: 22734
  chr8:129076175-129076206
  hypo

SEQ ID NO: 160729 - DNA, 91 bp, Homo sapiens; identical to SEQ ID NO: 76629
  chr8:129131613-129131704
  hypo

SEQ ID NO: 160730 - DNA, 30 bp, Homo sapiens; identical to SEQ ID NO: 45847
  chr8:129194625-129194655
  hypo

SEQ ID NO: 160731 - DNA, 78 bp, Homo sapiens
  chr8:129338076-129338154
  hypo
ggaagatgaatggaccggggccgttttgtcacggtctacaaagagcacattctccctgcgcctcgatcaatcaggcct

SEQ ID NO: 160732 - DNA, 43 bp, Homo sapiens; identical to SEQ ID NO: 76631
  chr8:129533965-129534008
  hypo

SEQ ID NO: 160733 - DNA, 30 bp, Homo sapiens; identical to SEQ ID NO: 45848
  chr8:129541915-129541945
  hypo

SEQ ID NO: 160734 - DNA, 30 bp, Homo sapiens; identical to SEQ ID NO: 45849
  chr8:129543933-129543963
  hypo

SEQ ID NO: 160735 - DNA, 35 bp, Homo sapiens; identical to SEQ ID NO: 76634
  chr8:129893540-129893575
  hypo

SEQ ID NO: 160736 - DNA, 86 bp, Homo sapiens; identical to SEQ ID NO: 76635
  chr8:129909747-129909833
  hypo

SEQ ID NO: 160737 - DNA, 30 bp, Homo sapiens
  chr8:129973145-129973175
  hypo
aacaccggttgataacgctgataaaatttg

SEQ ID NO: 160738 - DNA, 35 bp, Homo sapiens; identical to SEQ ID NO: 76636
  chr8:129996834-129996869
  hypo

SEQ ID NO: 160739 - DNA, 30 bp, Homo sapiens; identical to SEQ ID NO: 76637
  chr8:130254530-130254560
  hypo

SEQ ID NO: 160740 - DNA, 147 bp, Homo sapiens
  chr8:130368692-130368839
  hypo
gcttgcccgcgctgccgcaaaggagcccccacaatgtgaattcctgatggcaacagggaggggaaggagggaggatagggccccataaaatgaacaaacaataaagagatgattataggtgtctcacttcagcgcccgggttggtaa

SEQ ID NO: 160741 - DNA, 19 bp, Homo sapiens
  chr8:130369264-130369283
  hypo
tcctcggcttcccaaagtg

SEQ ID NO: 160742 - DNA, 30 bp, Homo sapiens
  chr8:130394183-130394213
  hypo
aatgccctaccaggccgggcgcggtggctc

SEQ ID NO: 160743 - DNA, 30 bp, Homo sapiens; identical to SEQ ID NO: 6589
  chr8:130647087-130647117
  hypo

SEQ ID NO: 160744 - DNA, 30 bp, Homo sapiens
  chr8:130696003-130696033
  hypo
caacagacgttctttcggcattgtcctggc

SEQ ID NO: 160745 - DNA, 30 bp, Homo sapiens; identical to SEQ ID NO: 76639
  chr8:130877061-130877091
  hypo

SEQ ID NO: 160746 - DNA, 30 bp, Homo sapiens; identical to SEQ ID NO: 76640
  chr8:130895624-130895654
  hypo

SEQ ID NO: 160747 - DNA, 30 bp, Homo sapiens
  chr8:131046300-131046330
  hypo
tggagcacaggagggcgcctcccatcaccg

SEQ ID NO: 160748 - DNA, 188 bp, Homo sapiens; identical to SEQ ID NO: 22736
  chr8:131064015-131064203
  hypo

SEQ ID NO: 160749 - DNA, 320 bp, Homo sapiens; identical to SEQ ID NO: 76642
  chr8:131070004-131070324
  hypo

SEQ ID NO: 160750 - DNA, 30 bp, Homo sapiens; identical to SEQ ID NO: 76643
  chr8:131080122-131080152
  hypo

SEQ ID NO: 160751 - DNA, 31 bp, Homo sapiens; identical to SEQ ID NO: 6590
  chr8:131081757-131081788
  hypo

SEQ ID NO: 160752 - DNA, 40 bp, Homo sapiens; identical to SEQ ID NO: 76645
  chr8:131082546-131082586
  hypo

SEQ ID NO: 160753 - DNA, 339 bp, Homo sapiens; identical to SEQ ID NO: 22738
  chr8:131085737-131086076
  hypo

SEQ ID NO: 160754 - DNA, 212 bp, Homo sapiens
  chr8:131098480-131098692
  hypo
gaatcctggcccccacgtactagctgtgagaaacagtgtaaatcacttaacctttctgcgccccgaagttgagataatagcattttctctctgtgtaaccatggttaagaatgaggtacgttaacacatgcgaagtgctcaacacaatgcccagcactctgtgaggcacttacaagtgatggccttataaaatattacgtacgtagtttttt

SEQ ID NO: 160755 - DNA, 30 bp, Homo sapiens
  chr8:131123320-131123350
  hypo
atgagcgggattcctcgtctgggcgcagtg

SEQ ID NO: 160756 - DNA, 134 bp, Homo sapiens
  chr8:131124330-131124464
  hypo
agcccatacctttcccggcgttcctaggaggcagagggggagcctccgtggttggtgatgtgggcgagtctgtgcttgtggaaacgaagatctggttggtgaaggctccataggagagccgctgtttgtccctt

SEQ ID NO: 160757 - DNA, 30 bp, Homo sapiens
  chr8:131260474-131260504
  hypo
ttggaggggggagtgcggaatgaacaggca

SEQ ID NO: 160758 - DNA, 30 bp, Homo sapiens
  chr8:131287690-131287720
  hypo
accagtcccctgaggcgtcccagcgcctgc

SEQ ID NO: 160759 - DNA, 30 bp, Homo sapiens; identical to SEQ ID NO: 22739
  chr8:131300212-131300242
  hypo

SEQ ID NO: 160760 - DNA, 30 bp, Homo sapiens; identical to SEQ ID NO: 76649
  chr8:131367139-131367169
  hypo

SEQ ID NO: 160761 - DNA, 31 bp, Homo sapiens; identical to SEQ ID NO: 22740
  chr8:131412441-131412472
  hypo

SEQ ID NO: 160762 - DNA, 1222 bp, Homo sapiens; identical to SEQ ID NO: 45854
  chr8:131455077-131456299
  hypo

SEQ ID NO: 160763 - DNA, 350 bp, Homo sapiens; identical to SEQ ID NO: 117200
  chr8:132051949-132052299
  hypo

SEQ ID NO: 160764 - DNA, 117 bp, Homo sapiens; identical to SEQ ID NO: 6593
  chr8:132052398-132052515
  hypo

SEQ ID NO: 160765 - DNA, 1994 bp, Homo sapiens; identical to SEQ ID NO: 6594
  chr8:132052589-132054583
  hypo

SEQ ID NO: 160766 - DNA, 20 bp, Homo sapiens
  chr8:132122691-132122711
  hypo
gtttgagatggagtttcgtt

SEQ ID NO: 160767 - DNA, 44 bp, Homo sapiens
  chr8:132966089-132966133
  hypo
attcaaggtgtggttcgcaaaacagtcaacgatgaacttcgggc

SEQ ID NO: 160768 - DNA, 30 bp, Homo sapiens
  chr8:132992334-132992364
  hypo
cagctgcccttataacgaacacagtattgc

SEQ ID NO: 160769 - DNA, 31 bp, Homo sapiens; identical to SEQ ID NO: 76656
  chr8:133182608-133182639
  hypo

SEQ ID NO: 160770 - DNA, 30 bp, Homo sapiens
  chr8:133292742-133292772
  hypo
actcactcactatagcgggaacagcaacaa

SEQ ID NO: 160771 - DNA, 202 bp, Homo sapiens; identical to SEQ ID NO: 117207
  chr8:133491908-133492110
  hypo

SEQ ID NO: 160772 - DNA, 503 bp, Homo sapiens; identical to SEQ ID NO: 6598
  chr8:133492127-133492630
  hypo

SEQ ID NO: 160773 - DNA, 1039 bp, Homo sapiens; identical to SEQ ID NO: 45863
  chr8:133492712-133493751
  hypo

SEQ ID NO: 160774 - DNA, 30 bp, Homo sapiens
  chr8:133578972-133579002
  hypo
cggcccttctctggccgtctggactgattc

SEQ ID NO: 160775 - DNA, 31 bp, Homo sapiens
  chr8:133655266-133655297
  hypo
cgcaacctacatccctcgcaagatcagttca

SEQ ID NO: 160776 - DNA, 95 bp, Homo sapiens; identical to SEQ ID NO: 22748
  chr8:133686739-133686834
  hypo

SEQ ID NO: 160777 - DNA, 25 bp, Homo sapiens
  chr8:133727357-133727382
  hypo
aatgaaaagagtgcagcagggcgcg

SEQ ID NO: 160778 - DNA, 30 bp, Homo sapiens
  chr8:133787055-133787085
  hypo
ctgtgcctgagcacgcgcgtacacacatct

SEQ ID NO: 160779 - DNA, 78 bp, Homo sapiens
  chr8:133906403-133906481
  hypo
tcagatggcacctgccgctcccacaaagccaatattcttgttaaaatgcgagggacccaagcccgtgaatgctcaaac

SEQ ID NO: 160780 - DNA, 30 bp, Homo sapiens; identical to SEQ ID NO: 22749
  chr8:134003881-134003911
  hypo

SEQ ID NO: 160781 - DNA, 30 bp, Homo sapiens; identical to SEQ ID NO: 76662
  chr8:134012870-134012900
  hypo

SEQ ID NO: 160782 - DNA, 30 bp, Homo sapiens
  chr8:134115100-134115130
  hypo
gccaggagttggcctcgtctgggagcaggt

SEQ ID NO: 160783 - DNA, 30 bp, Homo sapiens; identical to SEQ ID NO: 22750
  chr8:134218264-134218294
  hypo

SEQ ID NO: 160784 - DNA, 370 bp, Homo sapiens; identical to SEQ ID NO: 76664
  chr8:134224535-134224905
  hypo

SEQ ID NO: 160785 - DNA, 365 bp, Homo sapiens; identical to SEQ ID NO: 117213
  chr8:134232708-134233073
  hypo

SEQ ID NO: 160786 - DNA, 176 bp, Homo sapiens
  chr8:134251103-134251279
  hypo
gcagctgggcaggccgcctagcaggagacctccatggacttgggcccggcgctgttcccagcagcacccgagttgggggtgatgtccaggtgggccccctcgctggtgtgcgagcggctgcgggtgccctcgctggtgtgggagcggcttcgggtgccctcgctggtgtgggagcg

SEQ ID NO: 160787 - DNA, 143 bp, Homo sapiens; identical to SEQ ID NO: 22755
  chr8:134254199-134254342
  hypo

SEQ ID NO: 160788 - DNA, 30 bp, Homo sapiens; identical to SEQ ID NO: 76669
  chr8:134260992-134261022
  hypo

SEQ ID NO: 160789 - DNA, 135 bp, Homo sapiens
  chr8:134268416-134268551
  hypo
tccttacctctgaaacggtgataaaaattctcacctcctagagttactatgaagattaactgagatcatgcacacacagcaacgtagaatgaaactagcacatggtaaactctcaatctacgttagctaattatt

SEQ ID NO: 160790 - DNA, 484 bp, Homo sapiens
  chr8:134278413-134278897
  hypo
gtcccccagacaatcagcctccgcggggccccaggcttctcagcacttgacccgcccgcaagcggcgcacactcaggcctcacgaggccacctcagctcagcacgctgcattgattttccaaagattaaatgaggcagtgaagtggaacacagaacactctaaatgctgttgaacctgcttctagaagctggcagaaatgcgacccatacagatcactgccgtgtggcagcagagaggaaggtcagcgttcacaaactcacgcttgagaagaagggatgggacagatcaccacttaggcaccctgtgggggcaagtcacctcctccccagcttgaatctttaaaacaggaacagcctggcccttcctacctcctagaggtgctgaaggcccagagaatgtaggctgctccatctgtgagtgaccccccgtgaagtggtacgaggcagccacccccacgccatccacacccgctggtgatcggat

SEQ ID NO: 160791 - DNA, 31 bp, Homo sapiens; identical to SEQ ID NO: 22757
  chr8:134289833-134289864
  hypo

SEQ ID NO: 160792 - DNA, 156 bp, Homo sapiens
  chr8:134297709-134297865
  hypo
ctgcccaaggcccctcggatgcaatggtcgagagaatgcaagcctctgaaattcctgcctagggctcctctgaagacccaggaactcccaagaacctggtgaaacacctcttagaggtcagccggcaagtgcgggccaccccgaatccaccccggg

SEQ ID NO: 160793 - DNA, 678 bp, Homo sapiens; identical to SEQ ID NO: 45867
  chr8:134308717-134309395
  hypo

SEQ ID NO: 160794 - DNA, 31 bp, Homo sapiens; identical to SEQ ID NO: 22759
  chr8:134330746-134330777
  hypo

SEQ ID NO: 160795 - DNA, 206 bp, Homo sapiens; identical to SEQ ID NO: 22760
  chr8:134335638-134335844
  hypo

SEQ ID NO: 160796 - DNA, 30 bp, Homo sapiens
  chr8:134339561-134339591
  hypo
agaatttatttcaagcgtgtaaatgtaggc

SEQ ID NO: 160797 - DNA, 30 bp, Homo sapiens
  chr8:134339916-134339946
  hypo
tacagaatctcctgacgaaaggtgagccag

SEQ ID NO: 160798 - DNA, 214 bp, Homo sapiens
  chr8:134462494-134462708
  hypo
tgaggcagacacccccggaatcactgttcccggtttgcagagagggtctatccgtggaccccggtctttgactgctggggcctgtgactgtccatgggtgtccatgacccagtcatggcgccctctaacgcatcctctctaacttcaacccggccctccaccctagccaccagctgcctgtactcacagtcattttctccgacggttcacagtc

SEQ ID NO: 160799 - DNA, 256 bp, Homo sapiens
  chr8:134466988-134467244
  hypo
gccattcggtagtggcgacgccaacccaggaggccctctgagttggagtgttgaaggaggcgcaaatgcatgacccttgtagaaaagcaacaaacacacccaaacaataaaatagctctttgtttattcactttgatttggatcattggaaatattaaacaataaataaaacagagcgggggctgaggaaagcaggatcttgctgaagtcattcgaatgcatcccaaccagtgctcagctgcgtaacgacatggag

SEQ ID NO: 160800 - DNA, 138 bp, Homo sapiens; identical to SEQ ID NO: 76676
  chr8:134470039-134470177
  hypo

SEQ ID NO: 160801 - DNA, 30 bp, Homo sapiens; identical to SEQ ID NO: 76677
  chr8:134470403-134470433
  hypo

SEQ ID NO: 160802 - DNA, 30 bp, Homo sapiens; identical to SEQ ID NO: 76678
  chr8:134474242-134474272
  hypo

SEQ ID NO: 160803 - DNA, 163 bp, Homo sapiens; identical to SEQ ID NO: 22763
  chr8:134478324-134478487
  hypo

SEQ ID NO: 160804 - DNA, 44 bp, Homo sapiens; identical to SEQ ID NO: 76680
  chr8:134482028-134482072
  hypo

SEQ ID NO: 160805 - DNA, 32 bp, Homo sapiens; identical to SEQ ID NO: 22765
  chr8:134482374-134482406
  hypo

SEQ ID NO: 160806 - DNA, 31 bp, Homo sapiens; identical to SEQ ID NO: 22766
  chr8:134507967-134507998
  hypo

SEQ ID NO: 160807 - DNA, 30 bp, Homo sapiens; identical to SEQ ID NO: 22767
  chr8:134519981-134520011
  hypo

SEQ ID NO: 160808 - DNA, 101 bp, Homo sapiens
  chr8:134545308-134545409
  hypo
ggttctctgaatttccgctggatgctggaattcctggaatccctggatttccatggaatgtgggccttctagtcccccagcgcccccgcagtccaatggca

SEQ ID NO: 160809 - DNA, 30 bp, Homo sapiens
  chr8:134545617-134545647
  hypo
gcaggcatgggctctcgagcagcctacaca

SEQ ID NO: 160810 - DNA, 30 bp, Homo sapiens; identical to SEQ ID NO: 76684
  chr8:134566574-134566604
  hypo

SEQ ID NO: 160811 - DNA, 86 bp, Homo sapiens; identical to SEQ ID NO: 117217
  chr8:134581263-134581349
  hypo

SEQ ID NO: 160812 - DNA, 2486 bp, Homo sapiens; identical to SEQ ID NO: 117218
  chr8:134581731-134584217
  hypo

SEQ ID NO: 160813 - DNA, 44 bp, Homo sapiens; identical to SEQ ID NO: 76687
  chr8:134602078-134602122
  hypo

SEQ ID NO: 160814 - DNA, 284 bp, Homo sapiens
  chr8:134686550-134686834
  hypo
actttggcacatcagcgccttttgatttctgtagcctcttcagaagtatttttgacacaaacaatagtcccggcttttgcttttccaagaggcatcagcacaatcggagcagacactggtgactcattttgatcatcgcctttaagcaattcactctgtgagcctggacttgacaggcctcactgtgccgtgaaatctaatactatttttatgccttttaatctatcttttaacagcctccttgtttagaactctgcgccctggattcacggaaagcacgtttt

SEQ ID NO: 160815 - DNA, 27 bp, Homo sapiens
  chr8:134687439-134687466
  hypo
agaatgaaagccaaggctgggcgcggt

SEQ ID NO: 160816 - DNA, 30 bp, Homo sapiens
  chr8:134749596-134749626
  hypo
ccaccatcccacctgcgctttccaccatcc

SEQ ID NO: 160817 - DNA, 40 bp, Homo sapiens; identical to SEQ ID NO: 76690
  chr8:135003998-135004038
  hypo

SEQ ID NO: 160818 - DNA, 32 bp, Homo sapiens; identical to SEQ ID NO: 76691
  chr8:135301260-135301292
  hypo

SEQ ID NO: 160819 - DNA, 162 bp, Homo sapiens; identical to SEQ ID NO: 76692
  chr8:135348404-135348566
  hypo

SEQ ID NO: 160820 - DNA, 30 bp, Homo sapiens
  chr8:135506637-135506667
  hypo
gggacaggatcgatccgctgccctttagtg

SEQ ID NO: 160821 - DNA, 30 bp, Homo sapiens; identical to SEQ ID NO: 22769
  chr8:135547977-135548007
  hypo

SEQ ID NO: 160822 - DNA, 179 bp, Homo sapiens; identical to SEQ ID NO: 76694
  chr8:135563399-135563578
  hypo

SEQ ID NO: 160823 - DNA, 31 bp, Homo sapiens; identical to SEQ ID NO: 22770
  chr8:135595330-135595361
  hypo

SEQ ID NO: 160824 - DNA, 30 bp, Homo sapiens
  chr8:135647778-135647808
  hypo
ctgattaaaatgcaacgtcgttacctagct

SEQ ID NO: 160825 - DNA, 25 bp, Homo sapiens
  chr8:135670281-135670306
  hypo
gtaaaaaataaatatgcggccgggc

SEQ ID NO: 160826 - DNA, 30 bp, Homo sapiens
  chr8:135673295-135673325
  hypo
cagaaggctccgccacgtgacgtgggccat

SEQ ID NO: 160827 - DNA, 31 bp, Homo sapiens; identical to SEQ ID NO: 6606
  chr8:135703767-135703798
  hypo

SEQ ID NO: 160828 - DNA, 30 bp, Homo sapiens; identical to SEQ ID NO: 76698
  chr8:135705855-135705885
  hypo

SEQ ID NO: 160829 - DNA, 30 bp, Homo sapiens
  chr8:135708836-135708866
  hypo
gcaccacccacccgcgcttctctccaatac

SEQ ID NO: 160830 - DNA, 86 bp, Homo sapiens; identical to SEQ ID NO: 76699
  chr8:135805713-135805799
  hypo

SEQ ID NO: 160831 - DNA, 117 bp, Homo sapiens; identical to SEQ ID NO: 22772
  chr8:135871436-135871553
  hypo

SEQ ID NO: 160832 - DNA, 30 bp, Homo sapiens
  chr8:135877483-135877513
  hypo
ttgtcttacctctccggactcaggtcctgc

SEQ ID NO: 160833 - DNA, 105 bp, Homo sapiens
  chr8:135950260-135950365
  hypo
ccacctacctggattcggtgggcatctgagtttgcagccttcttccccatctaggatgttggatttaaactctctgaattctttttttttttgagacggagtctc

SEQ ID NO: 160834 - DNA, 30 bp, Homo sapiens; identical to SEQ ID NO: 76701
  chr8:136398438-136398468
  hypo

SEQ ID NO: 160835 - DNA, 84 bp, Homo sapiens; identical to SEQ ID NO: 76702
  chr8:136440094-136440178
  hypo

SEQ ID NO: 160836 - DNA, 30 bp, Homo sapiens
  chr8:136463475-136463505
  hypo
gctacgctagagaaacgccaaagaatgaaa

SEQ ID NO: 160837 - DNA, 1573 bp, Homo sapiens; identical to SEQ ID NO: 117227
  chr8:136468960-136470533
  hypo

SEQ ID NO: 160838 - DNA, 99 bp, Homo sapiens
  chr8:136577244-136577343
  hypo
ttggtgtgggagacacgtgggagtgctgcagagcgtaggggctgcgagtcttgttccattggctgtcgtggataatcgcctacccggaggcctggctgg

SEQ ID NO: 160839 - DNA, 30 bp, Homo sapiens
  chr8:136703347-136703377
  hypo
tgcctggccggtttttagtatttttaagtg

SEQ ID NO: 160840 - DNA, 30 bp, Homo sapiens; identical to SEQ ID NO: 76704
  chr8:138159414-138159444
  hypo

SEQ ID NO: 160841 - DNA, 82 bp, Homo sapiens
  chr8:138498656-138498738
  hypo
cagacacatcttacacggcaggagaaggggcaggagaaggagcaggagagagcgaggtgggaggtgctacacacttttaaat

SEQ ID NO: 160842 - DNA, 30 bp, Homo sapiens
  chr8:138643492-138643522
  hypo
aaagccatctctgtgcgtggagaaattcat

SEQ ID NO: 160843 - DNA, 30 bp, Homo sapiens; identical to SEQ ID NO: 45880
  chr8:138741514-138741544
  hypo

SEQ ID NO: 160844 - DNA, 28 bp, Homo sapiens
  chr8:138909174-138909202
  hypo
tttttttttttttttttgagacggagtc

SEQ ID NO: 160845 - DNA, 28 bp, Homo sapiens
  chr8:138909381-138909409
  hypo
tcttgacgtatatatgattatccccagt

SEQ ID NO: 160846 - DNA, 154 bp, Homo sapiens; identical to SEQ ID NO: 76708
  chr8:138910219-138910373
  hypo

SEQ ID NO: 160847 - DNA, 31 bp, Homo sapiens
  chr8:139081435-139081466
  hypo
cgtgagccaccgcacccgggccagcctgtag

SEQ ID NO: 160848 - DNA, 30 bp, Homo sapiens
  chr8:139081872-139081902
  hypo
gagatgagacaagggcgcaggaggagtaag

SEQ ID NO: 160849 - DNA, 43 bp, Homo sapiens; identical to SEQ ID NO: 76709
  chr8:139096092-139096135
  hypo

SEQ ID NO: 160850 - DNA, 30 bp, Homo sapiens
  chr8:139194277-139194307
  hypo
tcagactgcctctcccggcctccttgttcc

SEQ ID NO: 160851 - DNA, 30 bp, Homo sapiens; identical to SEQ ID NO: 6609
  chr8:139301362-139301392
  hypo

SEQ ID NO: 160852 - DNA, 97 bp, Homo sapiens
  chr8:139356748-139356845
  hypo
ttacgtcctcaaagacgcttttccgaaccctcagtctaaattaggagtctcttgctacactttctttctttcttttttttttttttttgttaaggag

SEQ ID NO: 160853 - DNA, 37 bp, Homo sapiens
  chr8:139357084-139357121
  hypo
tgggattacaggcgtgagccaccgcgcctggcttctt

SEQ ID NO: 160854 - DNA, 121 bp, Homo sapiens; identical to SEQ ID NO: 117231
  chr8:139509549-139509670
  hypo

SEQ ID NO: 160855 - DNA, 29 bp, Homo sapiens
  chr8:139509693-139509722
  hypo
cggggctcccctctcgagccaagacccca

SEQ ID NO: 160856 - DNA, 30 bp, Homo sapiens
  chr8:139767363-139767393
  hypo
gcagagcaaaccctgcgcaggagagggaca

SEQ ID NO: 160857 - DNA, 252 bp, Homo sapiens
  chr8:139833380-139833632
  hypo
caatgggcacactgtcgtagaggcgcttgccaatcacagtcttgccctggatgtcaatgttctcccgttcctcgatgggtagtgtctgcaccagcgcacagtcaatgtgcagggagacgttctgggcctggatgctcagggccatcttgtgccagtcccggtcaaagaggtcattgacccgagaacctcggaagaccaccctgacagcatctttcatggcacccacagcgttgtactcgactgccttgtttt

SEQ ID NO: 160858 - DNA, 142 bp, Homo sapiens; identical to SEQ ID NO: 22778
  chr8:139889989-139890131
  hypo

SEQ ID NO: 160859 - DNA, 30 bp, Homo sapiens; identical to SEQ ID NO: 76713
  chr8:139890431-139890461
  hypo

SEQ ID NO: 160860 - DNA, 30 bp, Homo sapiens
  chr8:139948600-139948630
  hypo
ccctctggcgggcggcgggggtaacgtccc

SEQ ID NO: 160861 - DNA, 30 bp, Homo sapiens
  chr8:139948939-139948969
  hypo
agattctgatgctaacgggtgagtcatggg

SEQ ID NO: 160862 - DNA, 30 bp, Homo sapiens
  chr8:140373422-140373452
  hypo
tgtggaacaggaaagcggctcagaaagcaa

SEQ ID NO: 160863 - DNA, 88 bp, Homo sapiens
  chr8:140383822-140383910
  hypo
ttccaccctcgagtgcggtgagctgttgacgtgcggcctcagaaggcgcaaaacaataaggccctccatgaggcgttcctaattggag

SEQ ID NO: 160864 - DNA, 36 bp, Homo sapiens
  chr8:140616735-140616771
  hypo
atggagagcacaagccgggcacgcagataggagcaa

SEQ ID NO: 160865 - DNA, 30 bp, Homo sapiens; identical to SEQ ID NO: 76714
  chr8:140617146-140617176
  hypo

SEQ ID NO: 160866 - DNA, 683 bp, Homo sapiens; identical to SEQ ID NO: 76715
  chr8:140630601-140631284
  hypo

SEQ ID NO: 160867 - DNA, 30 bp, Homo sapiens
  chr8:140684224-140684254
  hypo
cacactcgcagttcccgccctgatgaacat

SEQ ID NO: 160868 - DNA, 144 bp, Homo sapiens
  chr8:140691464-140691608
  hypo
tgggttcccggagagcgcctgtgtccctgacgcacaggtgcaggcccagctggcacctgcctctgctctcccctcctcttgccgagaaggcaggatgcggaatggcaggtgaaaggcactccctgagcacgggggtgtgggaac

SEQ ID NO: 160869 - DNA, 530 bp, Homo sapiens; identical to SEQ ID NO: 6610
  chr8:140714564-140715094
  hypo

SEQ ID NO: 160870 - DNA, 368 bp, Homo sapiens; identical to SEQ ID NO: 6611
  chr8:140715219-140715587
  hypo

SEQ ID NO: 160871 - DNA, 322 bp, Homo sapiens; identical to SEQ ID NO: 6612
  chr8:140715699-140716021
  hypo

SEQ ID NO: 160872 - DNA, 837 bp, Homo sapiens; identical to SEQ ID NO: 117239
  chr8:140716339-140717176
  hypo

SEQ ID NO: 160873 - DNA, 85 bp, Homo sapiens
  chr8:140719204-140719289
  hypo
tcagttggtcccaagcctgtccggtgctcctggtgcccatgcgctgtgtttacagcctgtctgcgccctccagcagccccaacat

SEQ ID NO: 160874 - DNA, 30 bp, Homo sapiens
  chr8:140740498-140740528
  hypo
gattatggggtcaccgggcctgtcctggcc

SEQ ID NO: 160875 - DNA, 168 bp, Homo sapiens
  chr8:140744185-140744353
  hypo
agaggctcccagaccgccttgcacaccaccacgcaccgcgtcgaggtagaaggtgctggagcccacgaaggagacggtgtcgtgcaggtcgtagttgtgcacgccgttctggtggtcctggaaggggaccacagtgagggcgaagggccctacgctgcgcgggctccg

SEQ ID NO: 160876 - DNA, 30 bp, Homo sapiens; identical to SEQ ID NO: 22784
  chr8:140746563-140746593
  hypo

SEQ ID NO: 160877 - DNA, 147 bp, Homo sapiens
  chr8:140751423-140751570
  hypo
gagtggctccaccaccggcagcagctcaagctgggtcctctcctcccggacacccagccccagcctgggaaacgtccggtgcccatgcagttgggcctctgctcagcctccacccgccccgccctggctggccgctccctctccttt

SEQ ID NO: 160878 - DNA, 74 bp, Homo sapiens; identical to SEQ ID NO: 76722
  chr8:140755512-140755586
  hypo

SEQ ID NO: 160879 - DNA, 285 bp, Homo sapiens; identical to SEQ ID NO: 76723
  chr8:140756689-140756974
  hypo

SEQ ID NO: 160880 - DNA, 85 bp, Homo sapiens
  chr8:140757361-140757446
  hypo
gacggggtgaaacaccgtcaccaacacaacacactgaggccagggtctcccagcccatggacaccctccacggataccaggccag

SEQ ID NO: 160881 - DNA, 45 bp, Homo sapiens
  chr8:140757749-140757794
  hypo
tcagcacgctcaaagcgattggtaggacagcgggtgagtcggggt

SEQ ID NO: 160882 - DNA, 316 bp, Homo sapiens
  chr8:140758125-140758441
  hypo
tccacgtgcccatggcgagcacgctggcactgcttcactgaacattctcagtgacattccgagaggcatcgtcctgctcacttgatggacaagcctgttttggtttaaagagacagagtcagcacttcaacccaggtctccctggcaccaaggccagtgtgcaccttcactccacggctctgtgatcagggtggcatctgctgccatccacagtgccccttgccctctgtgctgggctcctgcaatcgccgccggtggcacctcagctctgtgtctcaaggccctgcacatctgccccctccgtgaggcagttccc

SEQ ID NO: 160883 - DNA, 30 bp, Homo sapiens; identical to SEQ ID NO: 76725
  chr8:140770099-140770129
  hypo

SEQ ID NO: 160884 - DNA, 241 bp, Homo sapiens; identical to SEQ ID NO: 76726
  chr8:140770345-140770586
  hypo

SEQ ID NO: 160885 - DNA, 266 bp, Homo sapiens
  chr8:140774447-140774713
  hypo
ctaacgcaagcagagcggcccactgcaaaagtgtcctgaagtgctgcttctgagaacccaaagaatgatgtgtaattagcatattaagaactagtatgcaaatcacggtgctttaaaacagtctgttctcttaaatacagtcacgcacagcttaacactgcggataggttctgagaaatgcgtcattaggcgatttgtcctagtgtgaacatcacagagggcactcacacgagcctggaggtcaagcctctacacaccgaggccgt

SEQ ID NO: 160886 - DNA, 25 bp, Homo sapiens
  chr8:140774772-140774797
  hypo
ctgtagacaacggcaacacaatggt

SEQ ID NO: 160887 - DNA, 357 bp, Homo sapiens
  chr8:140775902-140776259
  hypo
acacatgcacgcacgcgtgcacacacacgtcgatcattcaggtgctggtaagcggggacaggataaagggagctggaggctgccacgtgggtcaggggagacgaggagtggctcagaccaggtcgaagctgtacaagctaagaagtggtcaggtcaggccatgttccagcaggccagtgatggagcaggcatagtgtggaaggggtcaggtgttgggcctcagcagccagaagaactgcccgttgacaactggggacaccgaggaggactaggactcgggaggttagcagtatcgagcatttgatcttggccttgtgaaggtggaagtgctcattagatacacggtaggtctgccga

SEQ ID NO: 160888 - DNA, 375 bp, Homo sapiens
  chr8:140785339-140785714
  hypo
cccgtggcaggaccacgcctctgaaggagcactggctgcctcgggagtcacgtggctgcacctacccagcaggtagggctgtgtggggttagtcacccagcaggacgcctggcgcgcccaggtctctgcctctgtccctcctcgtgccgatggctctaacaggtttcaacgaaaatccaaagtgaatgctagagagtatttagcaccagtgggatcactaaaatgaacacaaatgaagacaaagttcccaacggctgccagaggccccggctacattcctggagtttgtcctgaaagcctccctgggagcaggcagtgcagcagacggcactgggtgggggaatcagcagcctgaacaggcgactgccccgaagg

SEQ ID NO: 160889 - DNA, 30 bp, Homo sapiens; identical to SEQ ID NO: 76727
  chr8:140786378-140786408
  hypo

SEQ ID NO: 160890 - DNA, 30 bp, Homo sapiens
  chr8:140799482-140799512
  hypo
gaggaggaaaaatctcgttcagaggcaact

SEQ ID NO: 160891 - DNA, 351 bp, Homo sapiens
  chr8:140799715-140800066
  hypo
agggaaggtgggaaccgggcctgcctggctctgtcctcccttctgccccgaccctgcagacgctttcaaagcctaatatggaaaaaggcctcaccgaaagcttaaatgtaaatgaaccaagctaaggacgctgatatacacagaatttctttctacatggttattaggttaatagttaaaaactggcgactattaactttcactttaaatttattgttcaagctaacaccactgtttttcaacgtccctgtccggggtcggtgctacctgccaatgagcacctgggtgtgtttctgtctagagaccactgggtgctcaccagaccccacaggaagacggctcccaggggtg

SEQ ID NO: 160892 - DNA, 123 bp, Homo sapiens; identical to SEQ ID NO: 76728
  chr8:140802162-140802285
  hypo

SEQ ID NO: 160893 - DNA, 133 bp, Homo sapiens; identical to SEQ ID NO: 76729
  chr8:140802499-140802632
  hypo

SEQ ID NO: 160894 - DNA, 250 bp, Homo sapiens
  chr8:140807901-140808151
  hypo
atctgaaagataatccgcaaactaacctgaaacccagagtacgcaattaaagtgttgggaaacaatctgatgtcatgatgctctcctgggccagtgagcgtgaggggtgggaggcggacctctgggacagaaaatcagctgcgcacaagccaattaccacctggagatggatcctcaaaatggcacacggagggaactggatcccagtgcgtgaatgcacagggtcattagcccacggtgaacgttcact

SEQ ID NO: 160895 - DNA, 121 bp, Homo sapiens; identical to SEQ ID NO: 76730
  chr8:140809391-140809512
  hypo

SEQ ID NO: 160896 - DNA, 501 bp, Homo sapiens; identical to SEQ ID NO: 76731
  chr8:140815074-140815575
  hypo

SEQ ID NO: 160897 - DNA, 202 bp, Homo sapiens
  chr8:140818668-140818870
  hypo
ggccacctggatgtttccactcggggctcagcggcagtgacaccaaggacccgtgaaaacaatatgtagcagcagcaacaggattaagagtggagcagaagtagcctcaggtcccagagcagctccccaagggtgtacctgaaccgggaggcatccaggtgtgacctcagctgggtccggcagtagccgagcctcctgaacc

SEQ ID NO: 160898 - DNA, 163 bp, Homo sapiens; identical to SEQ ID NO: 76733
  chr8:140834001-140834164
  hypo

SEQ ID NO: 160899 - DNA, 133 bp, Homo sapiens; identical to SEQ ID NO: 22787
  chr8:140834748-140834881
  hypo

SEQ ID NO: 160900 - DNA, 30 bp, Homo sapiens
  chr8:140841567-140841597
  hypo
caggaggaagcagacgatagggatgtcaaa

SEQ ID NO: 160901 - DNA, 213 bp, Homo sapiens; identical to SEQ ID NO: 76735
  chr8:140844032-140844245
  hypo

SEQ ID NO: 160902 - DNA, 86 bp, Homo sapiens
  chr8:140844597-140844683
  hypo
tgcagacagaatgcgcggggtgttcgcgtggagcagctagtgagacctgccgctcctgccagaagcccagccgctggttggtctgg

SEQ ID NO: 160903 - DNA, 141 bp, Homo sapiens; identical to SEQ ID NO: 22788
  chr8:140847595-140847736
  hypo

SEQ ID NO: 160904 - DNA, 30 bp, Homo sapiens; identical to SEQ ID NO: 76737
  chr8:140855462-140855492
  hypo

SEQ ID NO: 160905 - DNA, 311 bp, Homo sapiens
  chr8:140859760-140860071
  hypo
gcctccctggaggcccggcctggggatgggcacgagcacctgtcccctggcggcgtggcctgcagatgggcacgagcacctgcctcccaggcgacccagcctgcggatgggcacgagcacctgccttcccgatggcctggcctggggatgggcatgagcacctgccttcccgacggcccggcctgtggatgggcatgagcacctgcccccctggtggcccagcctgcagatgggcacgagcacctgcctctccggcggcccagcctgcggatgggcacaagcacctgccttcctgacggcccggcctgggg

SEQ ID NO: 160906 - DNA, 165 bp, Homo sapiens; identical to SEQ ID NO: 76739
  chr8:140871033-140871198
  hypo

SEQ ID NO: 160907 - DNA, 30 bp, Homo sapiens; identical to SEQ ID NO: 76740
  chr8:140871422-140871452
  hypo

SEQ ID NO: 160908 - DNA, 168 bp, Homo sapiens
  chr8:140920091-140920259
  hypo
ggcagcatgtgctgggcggggactgcaggctggcagacaagctacggggtgcaggaactggccacgccactttctctttgtgaagtggagtcacagttttcatctgcaagacgggaagacaggataatgaaaccgccccaggagtcaggttgccgacaagggtgacgt

SEQ ID NO: 160909 - DNA, 30 bp, Homo sapiens
  chr8:140920565-140920595
  hypo
ttgctctgcatggggcgcccggccagaggc

SEQ ID NO: 160910 - DNA, 30 bp, Homo sapiens
  chr8:140920815-140920845
  hypo
ttgaagcctgagactcgggggtgagcactt

SEQ ID NO: 160911 - DNA, 30 bp, Homo sapiens
  chr8:140921382-140921412
  hypo
tcccagaccacacaacggagcaacgtgtgt

SEQ ID NO: 160912 - DNA, 30 bp, Homo sapiens
  chr8:140926784-140926814
  hypo
aggtgactttggggcgaggcctgacacttc

SEQ ID NO: 160913 - DNA, 30 bp, Homo sapiens; identical to SEQ ID NO: 76741
  chr8:140927212-140927242
  hypo

SEQ ID NO: 160914 - DNA, 220 bp, Homo sapiens; identical to SEQ ID NO: 76742
  chr8:140932072-140932292
  hypo

SEQ ID NO: 160915 - DNA, 681 bp, Homo sapiens
  chr8:140937002-140937683
  hypo
tttggatacctatttcgtccacctccttcgctcctggaccgtgaattctacagagtgagggaattacatcttactcatcttttacaggcctagaactcaagggctcattacatgtttgctgaatgagttactggaaacggccttagatcacctgaatgactttcatgagcaggggggtcagcggtgttcagtgtggccccagagggtagagccagagcagacggcctgcagcggccaccagcttcgtgttctccagcacgaggggccaccccactacaactcacgcctcccactgcctacaggggaaagctcccgaaaagcacacaaaaacagctccctgaggaatccgggagtaaaacaaaagcagcagaatgtggaggagtcgacacatggaatgagctcgcccacggggtggcggcgcctcccacttttccctcgacctttcctccacagtgtggaaaaaaatgccctgttacagagcatcaggcaacagcactggaggccgaaactctaacagaaatatcgcctttctgcccaggaaaaggggtggagtctttgtaggctgcagagttgcatatggaggtgggggaatcttagaggcgagagagctagagaagtggaccctttcattctgcatagaaacctgcagaaatctcggattgatccctgagcaaaacagac

SEQ ID NO: 160916 - DNA, 30 bp, Homo sapiens; identical to SEQ ID NO: 76744
  chr8:140941216-140941246
  hypo

SEQ ID NO: 160917 - DNA, 131 bp, Homo sapiens
  chr8:140950011-140950142
  hypo
tgtgaagcggaaatgcggacgcaaatgtcacgtattattaccgctgccgccacggtttctaatcgcgttaaacatgggtaatgaagccttctctggccagcgcttgacaaagccatcgctgagcagctgcc

SEQ ID NO: 160918 - DNA, 59 bp, Homo sapiens
  chr8:140962579-140962638
  hypo
ttacttggcaaaccgcggagctcaggctttttatcgcttgcctacgaaatggaaggtga

SEQ ID NO: 160919 - DNA, 428 bp, Homo sapiens
  chr8:140963129-140963557
  hypo
agtgaacaccggctccgaaggcctctttggtatgcaccaaaacacatggcatgcggcaagaggaggcgcggcagggagggagccgcacccgccttacagccaaacaaatgaactataaaagggtgaggtgagtcaaccgaggacaatgccctgccaaacagagtgcctcacctgctcacggcttggagtcagccagacccaggcgcgcacatccccaccgccacctccccacctgtgacacaggcctggttacgccacctctctgagctccatttcttcctcctaagaagttggagaatcaccctgacacctcacagaattggtatgggaaggaacaaagcctctgccaacgctcctcacacaaagccctactcctataggggcttgatgcctgcaggccccaccgttctcttcgaagtggtcacagc

SEQ ID NO: 160920 - DNA, 70 bp, Homo sapiens; identical to SEQ ID NO: 76747
  chr8:140968326-140968396
  hypo

SEQ ID NO: 160921 - DNA, 527 bp, Homo sapiens
  chr8:140971010-140971537
  hypo
acttatttacagacacgccccgaggcaggacagggtgtgcagtcagcttccttagacatgtaaggagtgccttttcctttccacaaggaaaaggggagttgtgtagacaccatgagatgtgaccactgccctcgggaacacatgccagagatgacagcctgacacagagcactgcattccgagtcacacagaggagcactgcattccgagtcacacaggggagccctgcattccgagtcacacaggggagcactgcattccgagtcacacgggggagcactgcattccgagtcacacgggggagcactgcattccgagtcacacgggggaggcctgcattccgagtcacacgggggagccctgcattccgagtcacacgggggagccctgcattccgagtcacacgggggagccctgcattccgagtcacacgggggagccctgcattccgagtcacacgggggagccctgcattccgagtcacacgggggagccctgcattccgagtcacacgggggagccctgca

SEQ ID NO: 160922 - DNA, 30 bp, Homo sapiens; identical to SEQ ID NO: 76748
  chr8:140990886-140990916
  hypo

SEQ ID NO: 160923 - DNA, 115 bp, Homo sapiens
  chr8:140992411-140992526
  hypo
gacatccactgtttccggttgtgcatggaaaatggacgaggagggaaggccgattctgggaacgcagcctagggaaccatgggcaactcccacagaaaggcgggcggtggagaac

SEQ ID NO: 160924 - DNA, 30 bp, Homo sapiens; identical to SEQ ID NO: 76749
  chr8:140998935-140998965
  hypo

SEQ ID NO: 160925 - DNA, 30 bp, Homo sapiens
  chr8:141018069-141018099
  hypo
atgacacatggaactcgggagcactagtta

SEQ ID NO: 160926 - DNA, 30 bp, Homo sapiens
  chr8:141018484-141018514
  hypo
tctcatcaaccaccacgaaggattcgccga

SEQ ID NO: 160927 - DNA, 30 bp, Homo sapiens; identical to SEQ ID NO: 76750
  chr8:141033993-141034023
  hypo

SEQ ID NO: 160928 - DNA, 380 bp, Homo sapiens
  chr8:141052507-141052887
  hypo
gaggcagccaccttgcggaacacacgcatgctccaaggatggttccggctgctttttatagaagagtcctgatcttcctgagaaagaccaaggcatggatattagttccccactttttcagctgagataactgggacttggccaaggtcccagagtttaccccaggacacctggtctttagggagcctagctgacctccttcacctacgcttgctctccacggccctgtggagtgtccgggaccgcctgggcccacgccctctgcagatgccagagcaaagcaaaggtggcagagcccccacctaacacatctctgccttcccagcaccgggctgctcctgagtcaatttccttctgctgatcttcgcagttattcaacg

SEQ ID NO: 160929 - DNA, 30 bp, Homo sapiens; identical to SEQ ID NO: 76751
  chr8:141054171-141054201
  hypo

SEQ ID NO: 160930 - DNA, 248 bp, Homo sapiens
  chr8:141054768-141055016
  hypo
ccttcggcactgatacgcagggctttcagaagattacagcttctcgcctcggggagaataagtccctattataaatggaaaccttatagtcccgcagatgctctttatttttcctaatgcacagctgcaaaagagaaaattttcccttgtgtgctaaatacgcatttctaattaccctcacctaagatgcattcactctaaagactaagaatagctaactgatataacttacacgcagtaatatagtc

SEQ ID NO: 160931 - DNA, 7 bp, Homo sapiens
  chr8:141057812-141057819
  hypo
cagcccc

SEQ ID NO: 160932 - DNA, 30 bp, Homo sapiens
  chr8:141068970-141069000
  hypo
tcaggagggcctttgcggcagtgggttctc

SEQ ID NO: 160933 - DNA, 187 bp, Homo sapiens
  chr8:141071377-141071564
  hypo
cattcccaaggctgcccggcagcctgttgtgtcctctcttgcagctcttgaggccatattttaattttgattcttctaatcaagagcatttcgtgaatacctaatatgtgccagatgctgtctcggagctggggatggatacacaagtccggttctctgtcctcaaggagcccgcagtcaagcagga

SEQ ID NO: 160934 - DNA, 30 bp, Homo sapiens; identical to SEQ ID NO: 76755
  chr8:141072126-141072156
  hypo

SEQ ID NO: 160935 - DNA, 30 bp, Homo sapiens; identical to SEQ ID NO: 76756
  chr8:141072365-141072395
  hypo

SEQ ID NO: 160936 - DNA, 195 bp, Homo sapiens; identical to SEQ ID NO: 76757
  chr8:141106959-141107154
  hypo

SEQ ID NO: 160937 - DNA, 622 bp, Homo sapiens
  chr8:141107408-141108030
  hypo
cggctcacccgagtccgccatgcgcagccctgccactgtctgcagggtaaggacgcccacctgggttcttgtgccagccacagttgtgccacagtccgtagggtaaggactcccccagagtaaggactcccgcctgagtcctggctgcgcagcctgtgttgccagtcgcagggtaatacactcgcctgcatcgtgggtgccccgccaccgccctgccacagtctacaaggcaagaacgcccgtctgggtccgtagtgtgcagccgcagctgtgctgctgtccacaccataaaaactcctggccacagacgtgccacagtcggcaggataagaatgcccagctggatcttggggtgcacagccccagctgtgccgctgtccacagggtaagaacgcctgtctgggtgggtccttggtgcacaaccacaggcgcgctgcagtcggcagagtgaggagcctgcctgggtcctccatacgcagtcgcagctgtgccgctgctcccagggtcatgacgcctacccaggtccttagtgcgtggctacagacgtgccgcagtcctaccgggaaagatgccagctcatgtcctcaatgagcagctgcagaattgccgccgtctgaaggat

SEQ ID NO: 160938 - DNA, 428 bp, Homo sapiens; identical to SEQ ID NO: 22794
  chr8:141147339-141147767
  hypo

SEQ ID NO: 160939 - DNA, 149 bp, Homo sapiens; identical to SEQ ID NO: 76760
  chr8:141159210-141159359
  hypo

SEQ ID NO: 160940 - DNA, 133 bp, Homo sapiens; identical to SEQ ID NO: 22796
  chr8:141159883-141160016
  hypo

SEQ ID NO: 160941 - DNA, 30 bp, Homo sapiens
  chr8:141182018-141182048
  hypo
ttgaggagtatctggcggcgtgaggagggc

SEQ ID NO: 160942 - DNA, 39 bp, Homo sapiens
  chr8:141185738-141185777
  hypo
aacaacgaaatctgacgacatccacgggtttaatcctga

SEQ ID NO: 160943 - DNA, 30 bp, Homo sapiens
  chr8:141186574-141186604
  hypo
gtgtgttgggcataccggtagctcgtttct

SEQ ID NO: 160944 - DNA, 147 bp, Homo sapiens; identical to SEQ ID NO: 76762
  chr8:141202562-141202709
  hypo

SEQ ID NO: 160945 - DNA, 30 bp, Homo sapiens
  chr8:141209072-141209102
  hypo
acagcaggctgaacgcggcaacacccggca

SEQ ID NO: 160946 - DNA, 161 bp, Homo sapiens; identical to SEQ ID NO: 76763
  chr8:141213694-141213855
  hypo

SEQ ID NO: 160947 - DNA, 222 bp, Homo sapiens; identical to SEQ ID NO: 76764
  chr8:141219189-141219411
  hypo

SEQ ID NO: 160948 - DNA, 31 bp, Homo sapiens
  chr8:141231022-141231053
  hypo
tgaagactcaaaaccccggagcacttgtgta

SEQ ID NO: 160949 - DNA, 120 bp, Homo sapiens; identical to SEQ ID NO: 76765
  chr8:141231523-141231643
  hypo

SEQ ID NO: 160950 - DNA, 160 bp, Homo sapiens
  chr8:141233422-141233582
  hypo
ttttaaagaacagcaataaacaacctgctcgcagtcatactggcagtcattgatcctaggcatcgtaccacacatgaatggatgtttagtaaacttgattggatggatggatgggtagacgggtggcaagtctgaaactcacactcggtgcttttgattc

SEQ ID NO: 160951 - DNA, 214 bp, Homo sapiens; identical to SEQ ID NO: 22798
  chr8:141249552-141249766
  hypo

SEQ ID NO: 160952 - DNA, 189 bp, Homo sapiens; identical to SEQ ID NO: 117241
  chr8:141260486-141260675
  hypo

SEQ ID NO: 160953 - DNA, 286 bp, Homo sapiens; identical to SEQ ID NO: 76767
  chr8:141265016-141265302
  hypo

SEQ ID NO: 160954 - DNA, 21 bp, Homo sapiens
  chr8:141265675-141265696
  hypo
acattcagatgatttcgagaa

SEQ ID NO: 160955 - DNA, 136 bp, Homo sapiens
  chr8:141267396-141267532
  hypo
tctggcagctcagaacgcagttgctgcctcttctccacgcagcagtgctggcactggcctgggcctcttctgcgctgagccaacctgtccaccttccttctacttctcctccaatggcactcggaggtgccatcct

SEQ ID NO: 160956 - DNA, 348 bp, Homo sapiens
  chr8:141268121-141268469
  hypo
caaacaggccagtgaccgctctcccagggctcatggtctgacagaggaggcagaaattaggcagaaaactagacacaagacaacaaagtatgtcatgaccaggtcagtctgtcttgggtacacgacagcacacgacagacaagtctggagggccagagaaactccccggagagaccgccattcagacacggcctgagggagcaggagggcttgggcaggttcaaaagagggagggtgaccctgtgcgactaattctggacttgttctccgcgttcacacgctccctggcacaagtaatggatttgacatttcactcaaaactcctcacacacacggctgttgccatct

SEQ ID NO: 160957 - DNA, 206 bp, Homo sapiens
  chr8:141273171-141273377
  hypo
ggtgtccccagtgcccgatacgatggccaccatgtaggaagtgctcagtacgggctgctgaggagtccagcaaaggcaagagcagctggcagccatgaagacagacaggtgagcaccagagggagcaaccactccaaaaaagagcagagaggacgatccctctgctgcccccgccctgcccactgctatcacgggacaccttgcac

SEQ ID NO: 160958 - DNA, 101 bp, Homo sapiens
  chr8:141290060-141290161
  hypo
gctggagcgctggccggagcttgctaagctggagatggagccacgatctcctttatgagctctctcagtgcccacctccagctttcgttgggcggctggtg

SEQ ID NO: 160959 - DNA, 30 bp, Homo sapiens; identical to SEQ ID NO: 76771
  chr8:141294157-141294187
  hypo

SEQ ID NO: 160960 - DNA, 30 bp, Homo sapiens; identical to SEQ ID NO: 76772
  chr8:141297735-141297765
  hypo

SEQ ID NO: 160961 - DNA, 30 bp, Homo sapiens; identical to SEQ ID NO: 76773
  chr8:141310524-141310554
  hypo

SEQ ID NO: 160962 - DNA, 30 bp, Homo sapiens
  chr8:141320430-141320460
  hypo
tagccaagccaagagcgttttaaagatact

SEQ ID NO: 160963 - DNA, 37 bp, Homo sapiens; identical to SEQ ID NO: 22801
  chr8:141343756-141343793
  hypo

SEQ ID NO: 160964 - DNA, 156 bp, Homo sapiens
  chr8:141347683-141347839
  hypo
cgactcatccagatgcgcctccctccggctctgccatgcagcacgtgggtgcgggtaccggatccacctgccctgaacctgctgcctcccccaccaaaatgggctgcctaggtgtcagatgggcacgtgatcagcggtgctgtgagagtggctgtg

SEQ ID NO: 160965 - DNA, 30 bp, Homo sapiens; identical to SEQ ID NO: 22802
  chr8:141362604-141362634
  hypo

SEQ ID NO: 160966 - DNA, 78 bp, Homo sapiens
  chr8:141436006-141436084
  hypo
aaatgttaaaaccaacgcctgcaaacctggggcaacttcatttcagagccaagatgcacgaggcgatgaaagcgaatg

SEQ ID NO: 160967 - DNA, 30 bp, Homo sapiens
  chr8:141455149-141455179
  hypo
cctgcccctgagctccggactcacatccga

SEQ ID NO: 160968 - DNA, 199 bp, Homo sapiens; identical to SEQ ID NO: 76777
  chr8:141455582-141455781
  hypo

SEQ ID NO: 160969 - DNA, 30 bp, Homo sapiens; identical to SEQ ID NO: 22803
  chr8:141458496-141458526
  hypo

SEQ ID NO: 160970 - DNA, 296 bp, Homo sapiens; identical to SEQ ID NO: 76779
  chr8:141458750-141459046
  hypo

SEQ ID NO: 160971 - DNA, 30 bp, Homo sapiens; identical to SEQ ID NO: 76780
  chr8:141461085-141461115
  hypo

SEQ ID NO: 160972 - DNA, 32 bp, Homo sapiens
  chr8:141466494-141466526
  hypo
tgcgagactccgtctcaaaaaaaaaaaaaaaa

SEQ ID NO: 160973 - DNA, 22 bp, Homo sapiens
  chr8:141476177-141476199
  hypo
cgccaccctgttatttctgtga

SEQ ID NO: 160974 - DNA, 30 bp, Homo sapiens; identical to SEQ ID NO: 76782
  chr8:141480466-141480496
  hypo

SEQ ID NO: 160975 - DNA, 35 bp, Homo sapiens; identical to SEQ ID NO: 76783
  chr8:141523824-141523859
  hypo

SEQ ID NO: 160976 - DNA, 77 bp, Homo sapiens
  chr8:141525506-141525583
  hypo
cacctcatgtacctacgccacagacagccagagggaaagcgacccagacagcagcccctcctcgacaggcccaccct

SEQ ID NO: 160977 - DNA, 119 bp, Homo sapiens; identical to SEQ ID NO: 76784
  chr8:141534527-141534646
  hypo

SEQ ID NO: 160978 - DNA, 30 bp, Homo sapiens; identical to SEQ ID NO: 76785
  chr8:141535333-141535363
  hypo

SEQ ID NO: 160979 - DNA, 31 bp, Homo sapiens; identical to SEQ ID NO: 22805
  chr8:141535612-141535643
  hypo

SEQ ID NO: 160980 - DNA, 81 bp, Homo sapiens
  chr8:141539850-141539931
  hypo
ccatccctgaagtaccgcacgcaggaggtggcagcaggcccacaaatctgcatgttaaacaagaaccgccatcccccagac

SEQ ID NO: 160981 - DNA, 30 bp, Homo sapiens
  chr8:141540344-141540374
  hypo
gagacccccgacctgcggcttgctgcccct

SEQ ID NO: 160982 - DNA, 30 bp, Homo sapiens
  chr8:141540655-141540685
  hypo
ttagccttcaaaatcgtccgtggtgtcact

SEQ ID NO: 160983 - DNA, 30 bp, Homo sapiens; identical to SEQ ID NO: 76787
  chr8:141541574-141541604
  hypo

SEQ ID NO: 160984 - DNA, 502 bp, Homo sapiens
  chr8:141543886-141544388
  hypo
cagagtgagactccgtctaaaaaaaaaaaacaacaacaaaaaattacacattagcagtaacattgtagaagtgagagtgtgaacgtgagtaccattttacacacctcctgcggttggagatcctttgaaatgaaagcagcaccagctgctgactgcaggcctctctgccacctctgcctgcctgcccgcctcactgcctgctccacctgccagcctcgcaggcccttctgacaacaacctgtccagcacagtccctgccacctgctctgtgtctagccctgtgccgaggcccctggtgctggtgggcagcggaacgttcgtccctgatgctccaccgcacatgctccggcacccctttcctggcgtgtgactggtggctgtcacaggggcccaggggagtgagggcatctgtctccatgggactgctaaggacacagcagcagtggcagccttgggccataaatagctcaccagagaagcatcccccgttagaaagattttg

SEQ ID NO: 160985 - DNA, 30 bp, Homo sapiens
  chr8:141544633-141544663
  hypo
cccactctcagctcccgggctgcaggctgg

SEQ ID NO: 160986 - DNA, 95 bp, Homo sapiens
  chr8:141545609-141545704
  hypo
gggtgggtgattttcgtgtccacagtcgtgcctgctggaatgtttccacttttcccaaccttcggcaacacaggcatctcgttagacacggccag

SEQ ID NO: 160987 - DNA, 30 bp, Homo sapiens; identical to SEQ ID NO: 76789
  chr8:141550864-141550894
  hypo

SEQ ID NO: 160988 - DNA, 30 bp, Homo sapiens
  chr8:141551352-141551382
  hypo
ctcgcggaccatggcggccaggtcttgtat

SEQ ID NO: 160989 - DNA, 30 bp, Homo sapiens; identical to SEQ ID NO: 76790
  chr8:141554296-141554326
  hypo

SEQ ID NO: 160990 - DNA, 30 bp, Homo sapiens
  chr8:141556287-141556317
  hypo
gagcccgcaccccacgctcacagccgttcc

SEQ ID NO: 160991 - DNA, 30 bp, Homo sapiens; identical to SEQ ID NO: 76791
  chr8:141557156-141557186
  hypo

SEQ ID NO: 160992 - DNA, 30 bp, Homo sapiens
  chr8:141557697-141557727
  hypo
caccgtgtctcccacgcgcttgacctcggc

SEQ ID NO: 160993 - DNA, 30 bp, Homo sapiens; identical to SEQ ID NO: 76792
  chr8:141559352-141559382
  hypo

SEQ ID NO: 160994 - DNA, 111 bp, Homo sapiens
  chr8:141559645-141559756
  hypo
cggctaacttgccaccgtaacacagcagcctttaaaccgcgctcacgctgcctcgcggctgtggcggccccagggcagtgatgcgatgctgtccccgtaaagctgctgagc

SEQ ID NO: 160995 - DNA, 412 bp, Homo sapiens
  chr8:141565894-141566306
  hypo
gaacacagtctacaccgcgggcgatagctcagaacctgagaggggtcgcagggcagagacatgccccgcagccacacgttccccgccgccccacacgtaccctgcccccgtagaggatggagggcggctgcagcacccgcccagtcacgtctgtcatctcatctttgaccatgattccaaattcacggacgtatggatctgtgttgaaacttgcacttcgcatctggcaaagggaaacaagaaaacgcacggagtgggtggaggcctcccatctctctagcagctgcgtccgttccaagcatcagaggtttctgtgccagggcaaccggactggattccacagggcagccctgcccgggactgacactcaccaatttgctaatctcttcttgccgatcgggcgccgacctag

SEQ ID NO: 160996 - DNA, 62 bp, Homo sapiens
  chr8:141566685-141566747
  hypo
agtcttcggtggctgcgggcgtgaaagcagctgcaggtgcgaaagacgtctacctgtgggac

SEQ ID NO: 160997 - DNA, 30 bp, Homo sapiens; identical to SEQ ID NO: 76796
  chr8:141567764-141567794
  hypo

SEQ ID NO: 160998 - DNA, 150 bp, Homo sapiens
  chr8:141568113-141568263
  hypo
ctatcacctcctcccgcaaagaaacaccagtacaacccaggacagcggtgcactctcaccccccactccggcctgcgtaccaaaccgtgctcttgccgtaatgatgggacacgcggactggcccagggaagggggcgtgggtcagggcca

SEQ ID NO: 160999 - DNA, 30 bp, Homo sapiens; identical to SEQ ID NO: 76798
  chr8:141570830-141570860
  hypo

SEQ ID NO: 161000 - DNA, 30 bp, Homo sapiens; identical to SEQ ID NO: 76799
  chr8:141571081-141571111
  hypo

SEQ ID NO: 161001 - DNA, 30 bp, Homo sapiens; identical to SEQ ID NO: 76800
  chr8:141572276-141572306
  hypo

SEQ ID NO: 161002 - DNA, 30 bp, Homo sapiens
  chr8:141577135-141577165
  hypo
gccctggcacggatcggatgcctgtcaatg

SEQ ID NO: 161003 - DNA, 31 bp, Homo sapiens
  chr8:141577474-141577505
  hypo
gcaggtggtccacacccgagacactgccgcc

SEQ ID NO: 161004 - DNA, 702 bp, Homo sapiens
  chr8:141587941-141588643
  hypo
tcggcatgatcactccgctcactgacggtcctgcaggcccctggaggcggggtcaggtccagctcatcctgcacacccagcacggcgtgcggcttgggctgggcggatctctcaagagaaggaggctgttcggtcatgccagtgaggcagtgccctgaggggctacaatgcacacccgtggagtcggctggcagacaatcctggccaccactcaggcctccgccgcccagagagagcatccctggccaccggctcgcagcccccatgcctcggggcccagtgccgagggtgaggaggggccgatcttgtgtaaagcagagaaactggacctcgtggctgtggcagcaggatggcaccttgctgcctaattctaacacggggggtcccttccctcctcaaacacacatgaccacgtatttggcagttaattttctttctttgtaaaactgtgataaaatacagataacataaaattgaccatttcaactaagtgttcagttcagcggcattgagtgtgtccatgctgttgtgcgaccatcaccaccctctgtccacaaatgattttcacttccccaaagtgaaactgtacctgtgaggcactaacttcccagccagcccacggagccacctggggaccctgctcgcggagtccctgaatctggtccttcgtttcgagccggcgcaggcactggaaagtgagca

SEQ ID NO: 161005 - DNA, 162 bp, Homo sapiens; identical to SEQ ID NO: 22811
  chr8:141589814-141589976
  hypo

SEQ ID NO: 161006 - DNA, 30 bp, Homo sapiens
  chr8:141590256-141590286
  hypo
tgcccacagctgtacgggacgctcctggga

SEQ ID NO: 161007 - DNA, 208 bp, Homo sapiens; identical to SEQ ID NO: 76803
  chr8:141594754-141594962
  hypo

SEQ ID NO: 161008 - DNA, 30 bp, Homo sapiens; identical to SEQ ID NO: 76804
  chr8:141595330-141595360
  hypo

SEQ ID NO: 161009 - DNA, 443 bp, Homo sapiens; identical to SEQ ID NO: 22813
  chr8:141596787-141597230
  hypo

SEQ ID NO: 161010 - DNA, 473 bp, Homo sapiens; identical to SEQ ID NO: 22814
  chr8:141599858-141600331
  hypo

SEQ ID NO: 161011 - DNA, 219 bp, Homo sapiens; identical to SEQ ID NO: 76807
  chr8:141603916-141604135
  hypo

SEQ ID NO: 161012 - DNA, 178 bp, Homo sapiens
  chr8:141613217-141613395
  hypo
ggagcctcggatggtgcgggttgactcaggcccccacggcggcgtggcggagattaaagatggggtctaatctggccctgtggacccggctcagcagacgatggaatcccagatctcatcgggaagtctgtcagccaaaaacacacacctcaaagcggagtgcgtggtgcctccacac

SEQ ID NO: 161013 - DNA, 87 bp, Homo sapiens
  chr8:141623739-141623826
  hypo
taatactggcagaatcggcgacaaatggaactctatccacaagaccactgcagaaattcgggtctggtttctatcacactataaaga

SEQ ID NO: 161014 - DNA, 124 bp, Homo sapiens
  chr8:141624845-141624969
  hypo
ccagtctcctcacttccaaaacgggaggatggcaggacccacagagtcatgaccgcctaaagccctttgcaagcacctggcactcagcattcgccgtgccctcggtaactgctgctgctgctgt

SEQ ID NO: 161015 - DNA, 30 bp, Homo sapiens
  chr8:141625503-141625533
  hypo
ccccgggcccccaggcggcccttctcatgc

SEQ ID NO: 161016 - DNA, 50 bp, Homo sapiens; identical to SEQ ID NO: 76809
  chr8:141633673-141633723
  hypo

SEQ ID NO: 161017 - DNA, 134 bp, Homo sapiens; identical to SEQ ID NO: 76810
  chr8:141634056-141634190
  hypo

SEQ ID NO: 161018 - DNA, 224 bp, Homo sapiens
  chr8:141634458-141634682
  hypo
agggcacagagccggcgtgcgtggcagtgaccacctcaccctggacagggatggacagtggcagaacaaacccaaacttggagagcctgcatccaaacacccctccagctccggccaccaatctgcaagaaagacactcggaacagagggcacgccgggctacacccaggagatgcagctgcgggagacggcagcactgagcagccagcgtccccaactaacag

SEQ ID NO: 161019 - DNA, 153 bp, Homo sapiens; identical to SEQ ID NO: 76812
  chr8:141636159-141636312
  hypo

SEQ ID NO: 161020 - DNA, 82 bp, Homo sapiens; identical to SEQ ID NO: 6616
  chr8:141644413-141644495
  hypo

SEQ ID NO: 161021 - DNA, 220 bp, Homo sapiens; identical to SEQ ID NO: 76814
  chr8:141704909-141705129
  hypo

SEQ ID NO: 161022 - DNA, 28 bp, Homo sapiens
  chr8:141721059-141721087
  hypo
acagtcacgctctgtcgcctaggctgga

SEQ ID NO: 161023 - DNA, 27 bp, Homo sapiens
  chr8:141721472-141721499
  hypo
tggggttacaggcgtgagccaccatgc

SEQ ID NO: 161024 - DNA, 43 bp, Homo sapiens; identical to SEQ ID NO: 22819
  chr8:141738004-141738047
  hypo

SEQ ID NO: 161025 - DNA, 92 bp, Homo sapiens; identical to SEQ ID NO: 76817
  chr8:141741357-141741449
  hypo

SEQ ID NO: 161026 - DNA, 177 bp, Homo sapiens; identical to SEQ ID NO: 76818
  chr8:141745320-141745497
  hypo

SEQ ID NO: 161027 - DNA, 31 bp, Homo sapiens; identical to SEQ ID NO: 76819
  chr8:141761240-141761271
  hypo

SEQ ID NO: 161028 - DNA, 761 bp, Homo sapiens; identical to SEQ ID NO: 117248
  chr8:142010301-142011062
  hypo

SEQ ID NO: 161029 - DNA, 1210 bp, Homo sapiens; identical to SEQ ID NO: 45893
  chr8:142011091-142012301
  hypo

SEQ ID NO: 161030 - DNA, 31 bp, Homo sapiens; identical to SEQ ID NO: 76822
  chr8:142030712-142030743
  hypo

SEQ ID NO: 161031 - DNA, 31 bp, Homo sapiens; identical to SEQ ID NO: 76823
  chr8:142078609-142078640
  hypo

SEQ ID NO: 161032 - DNA, 55 bp, Homo sapiens
  chr8:142112481-142112536
  hypo
ggatggaacactcacggccgtgatactctgatgacccatccgtgtccctgtgaac

SEQ ID NO: 161033 - DNA, 1661 bp, Homo sapiens; identical to SEQ ID NO: 117250
  chr8:142138199-142139860
  hypo

SEQ ID NO: 161034 - DNA, 43 bp, Homo sapiens; identical to SEQ ID NO: 117252
  chr8:142141061-142141104
  hypo

SEQ ID NO: 161035 - DNA, 51 bp, Homo sapiens
  chr8:142149851-142149902
  hypo
atgccactgttcccagtgtgccggcctggcgtgggcatgcctggtcctgct

SEQ ID NO: 161036 - DNA, 211 bp, Homo sapiens; identical to SEQ ID NO: 22825
  chr8:142157056-142157267
  hypo

SEQ ID NO: 161037 - DNA, 30 bp, Homo sapiens
  chr8:142157682-142157712
  hypo
gtcaggtcttcggatcgtcttctctgagtg

SEQ ID NO: 161038 - DNA, 30 bp, Homo sapiens
  chr8:142157918-142157948
  hypo
tgtgtggtgggcgagcgtgtgcagggatgc

SEQ ID NO: 161039 - DNA, 30 bp, Homo sapiens
  chr8:142161057-142161087
  hypo
cggccccgccccggcgagcgcgtcttgtgc

SEQ ID NO: 161040 - DNA, 31 bp, Homo sapiens; identical to SEQ ID NO: 22826
  chr8:142161895-142161926
  hypo

SEQ ID NO: 161041 - DNA, 152 bp, Homo sapiens
  chr8:142165997-142166149
  hypo
ctccaagtccacggacgataacgtggacattcctgatgtccccctcctggcagcccagacgtttattcagaggtaacgggaaacattaatggtatgaatttcagaccgtctttgttcagattctgtatttgccacttcgagtatcttttcca

SEQ ID NO: 161042 - DNA, 149 bp, Homo sapiens
  chr8:142176328-142176477
  hypo
gagaaaagagcctcccggaagtcctcgcacctgcatgtcacccacaggcgcatggtggtcagcatgcccaacctgcaggacattgccatgcctgagctggcacccaggaactcctcgctccggctgacggacaccgcaggctgtagggg

SEQ ID NO: 161043 - DNA, 54 bp, Homo sapiens; identical to SEQ ID NO: 76827
  chr8:142178199-142178253
  hypo

SEQ ID NO: 161044 - DNA, 30 bp, Homo sapiens; identical to SEQ ID NO: 22828
  chr8:142178456-142178486
  hypo

SEQ ID NO: 161045 - DNA, 235 bp, Homo sapiens; identical to SEQ ID NO: 76829
  chr8:142186980-142187215
  hypo

SEQ ID NO: 161046 - DNA, 30 bp, Homo sapiens; identical to SEQ ID NO: 76830
  chr8:142188203-142188233
  hypo

SEQ ID NO: 161047 - DNA, 77 bp, Homo sapiens; identical to SEQ ID NO: 76831
  chr8:142188437-142188514
  hypo

SEQ ID NO: 161048 - DNA, 236 bp, Homo sapiens
  chr8:142190006-142190242
  hypo
acgcaggaggtcgaggcgcccgcaggggctggcaggagggaccgcagaacaggctggtcccaggggcctccgggcagcaatgaggagccgtgtcagagcaggctgtgcccgggggcctccaggcaggaggccgctttaggttttgcctggaaacatgggttggattggatagcaagaggagcattaggatatcctgaggagcagtggttttgaacggggggcgatgttgcaccccc

SEQ ID NO: 161049 - DNA, 601 bp, Homo sapiens
  chr8:142190624-142191225
  hypo
gcctggccactcactcgcacaccaggtgacaaccaggaaaggaggccgagggtgcatggctttctttcagtgccccgggtccaagagaccttcgtcttcacaaattaggaagttttacctgcaagctgatattctgcagaaatcagagtgcgtgaggccgttgcatcgcgtctgtttccttgaggctgcaacagtaacactccaagtgtcttgtctttcagtgcccatgacgcttccggagacaaccctggaaacactgaagcataaaatcaacccctcggcgggggaggcgttcccacaagcggtggacgtgctgctctacactccaggtaaggcccctctgcccgcgcctcgctgccagttttcagccaatctgatgcgcttaggtttgggttcagggtcagccctgaagtgaaaggggagccagtgtcacgggataagtggggacaaggtgcctgttgctttctgaggtgaagtgctgagtgacaggtgtgcagctggcacgaccgctccacggactcagcctcacggtgactggagccagagagcccacgggagatggaattggggccagcacttgagctcccgccccagggctgcc

SEQ ID NO: 161050 - DNA, 30 bp, Homo sapiens; identical to SEQ ID NO: 76833
  chr8:142200489-142200519
  hypo

SEQ ID NO: 161051 - DNA, 515 bp, Homo sapiens; identical to SEQ ID NO: 76834
  chr8:142202625-142203140
  hypo

SEQ ID NO: 161052 - DNA, 242 bp, Homo sapiens; identical to SEQ ID NO: 22831
  chr8:142203889-142204131
  hypo

SEQ ID NO: 161053 - DNA, 31 bp, Homo sapiens; identical to SEQ ID NO: 22832
  chr8:142204676-142204707
  hypo

SEQ ID NO: 161054 - DNA, 31 bp, Homo sapiens; identical to SEQ ID NO: 22833
  chr8:142205350-142205381
  hypo

SEQ ID NO: 161055 - DNA, 319 bp, Homo sapiens; identical to SEQ ID NO: 76838
  chr8:142221149-142221468
  hypo

SEQ ID NO: 161056 - DNA, 30 bp, Homo sapiens; identical to SEQ ID NO: 22835
  chr8:142222299-142222329
  hypo

SEQ ID NO: 161057 - DNA, 87 bp, Homo sapiens; identical to SEQ ID NO: 76840
  chr8:142226698-142226785
  hypo

SEQ ID NO: 161058 - DNA, 329 bp, Homo sapiens
  chr8:142227280-142227609
  hypo
gagggggcctgttccggaaatgagacgggggctgacgagggcatctgctgggccctccaggccaggagcgtatttcccatgggaactgctggccggctgctcattctaagagcggtgacaggaaagtcccatccaggaggagagcccagcccaagtcggttgctatctgtaaagcatttccatgcctcccagaccacgaatgttctgtgacgtgactctgccaccgcggcaagaggcggagggttctgtgtgtctcccggtccccagtctgggctggtctggacttgcagaagtgacgctcccgcagcctctgccgtggccctctcgga

SEQ ID NO: 161059 - DNA, 31 bp, Homo sapiens; identical to SEQ ID NO: 22837
  chr8:142228045-142228076
  hypo

SEQ ID NO: 161060 - DNA, 512 bp, Homo sapiens; identical to SEQ ID NO: 22838
  chr8:142228299-142228811
  hypo

SEQ ID NO: 161061 - DNA, 30 bp, Homo sapiens; identical to SEQ ID NO: 76845
  chr8:142230376-142230406
  hypo

SEQ ID NO: 161062 - DNA, 30 bp, Homo sapiens; identical to SEQ ID NO: 22839
  chr8:142230989-142231019
  hypo

SEQ ID NO: 161063 - DNA, 970 bp, Homo sapiens; identical to SEQ ID NO: 76847
  chr8:142235169-142236139
  hypo

SEQ ID NO: 161064 - DNA, 229 bp, Homo sapiens; identical to SEQ ID NO: 76848
  chr8:142236374-142236603
  hypo

SEQ ID NO: 161065 - DNA, 1236 bp, Homo sapiens
  chr8:142240165-142241401
  hypo
aagtctacttactctcggtaaatgaattacatgtcagaggccgcattagactattttccacaacacagccggcccggtgagtagactcttggaagtaggtttcccagaagctgaagaagcacaggcctctgtttctgcatcaccgactcaaataagacccactgtggctgtcagggctgggccctggaggtctttaaagttaaaggtgctgtcagagcaccccatctcaacaagggagggccgctcctgaagtccccgcccttccatcagaaagcctctcaggacagaaggcagagagggaagcggccgcaaagacccatgggtgccgagggttcccagcacggccaacagggccctgcacactcacaggacagtccttgtattggagacaaacagctgtgccggagaggggtcctgagacagcagctccggtggccacgtgaaggtctgaagccccaagcgtgcccagctccaggatggggtaagcagcgggggaggtagggccctggtggctggggggccgccaggagcagcgcccaggccagtgctgcctctgccgcccggccttgctgcccgagcgcacgctgtgtctggggacagtccggccgctgccccggcacctatacctgacactatcttcctgtggaattagccacctgaaaagtctcctgcccagggaagtgcaatgctgacactgtccattttctgaagaaatgaaaagaagagaaatgctgccagagagcatgtggcacaggcgtggtgagtgcattctgccagccaaattgggaacgtggcactgatgacggccccaacgacgcggaaccaggcctgccccacccggggatccaggaatgcggatgctggggcagagcacctcctgctccggggacgctgtgctggcggcggcaacagcgtgtgacacccagtgaggcatttcccccaccccgcccggcctctctcttctcccctgtaaaatggagggaaagaccagcacctgacaggccctctctgcaaagaacactagtgtgggagaagccacattcggtcacgtttctagggcttaaggtcaccccggaagagaaaggacctggcaggtcccaggatgggtgcggagggtgggatgaagggcacagtgtgggaaggagcgccggagacagggcagggacagccaggccgggaaggccttggctctgggctgagagtgtggcccctcgcgccagaggcagcagggacccc

SEQ ID NO: 161066 - DNA, 31 bp, Homo sapiens; identical to SEQ ID NO: 22843
  chr8:142242138-142242169
  hypo

SEQ ID NO: 161067 - DNA, 338 bp, Homo sapiens
  chr8:142242733-142243071
  hypo
actcacaagctgcaacgggaacacagacattcagtggctcccaggtgagcgctcaccagctgcaacgggaacacagacattcagtggctcaacacagacattcagtggctcccaggtgagcactcacaagctgcaacgggaacacacacactcagtggctcccaggtgagcgctcgcgagctgcaacgggaacacacgcactcaatggctcccgggtgaacgctcacgaccagcttgggctggactggcgtctcctttcagtggttgccactttccatggtgtagatgctaccaccccgcccaatctcaagctgctgaggtgacgtcgctgaacagga

SEQ ID NO: 161068 - DNA, 146 bp, Homo sapiens; identical to SEQ ID NO: 76852
  chr8:142243839-142243985
  hypo

SEQ ID NO: 161069 - DNA, 117 bp, Homo sapiens
  chr8:142244184-142244301
  hypo
aatcgtcgccaacatcggggcctgcatcgctcacctgagggagtggggactgttcttctctatgtccactgaggcctaattcacatctcgtccctcggaaacctcagccctagcctg

SEQ ID NO: 161070 - DNA, 78 bp, Homo sapiens
  chr8:142247721-142247799
  hypo
aaccctcaccccaaagccacacggtgtccctcaccgccgccctccatgccttccccgaagtggcgctccacgatccct

SEQ ID NO: 161071 - DNA, 240 bp, Homo sapiens
  chr8:142248305-142248545
  hypo
ccaagcctggacctgcgtcaccatcaagctataagtctccagtcagcagggaatccaatttttagctttgtaaagtcgcccctttttttttcacatttttattgtgatcaaatatacacaacatcgaattgacctttttaatccctgtgagcgcacagctcaggggcggtgagcgcacttagactgccgtgcaaccatcaccactcaccccagagcgacgccatcttcccagactgaaac

SEQ ID NO: 161072 - DNA, 192 bp, Homo sapiens; identical to SEQ ID NO: 76855
  chr8:142252916-142253108
  hypo

SEQ ID NO: 161073 - DNA, 31 bp, Homo sapiens; identical to SEQ ID NO: 22845
  chr8:142253705-142253736
  hypo

SEQ ID NO: 161074 - DNA, 31 bp, Homo sapiens; identical to SEQ ID NO: 22846
  chr8:142254341-142254372
  hypo

SEQ ID NO: 161075 - DNA, 30 bp, Homo sapiens
  chr8:142260259-142260289
  hypo
gtagtaaagtacatacgcagacaggtcctg

SEQ ID NO: 161076 - DNA, 73 bp, Homo sapiens
  chr8:142260821-142260894
  hypo
ctatgacgtgcggtgcggtaggtgtgttaaatccattttcgactcaaggtattttcaacgatgggtttactgg

SEQ ID NO: 161077 - DNA, 143 bp, Homo sapiens; identical to SEQ ID NO: 22847
  chr8:142262364-142262507
  hypo

SEQ ID NO: 161078 - DNA, 601 bp, Homo sapiens; identical to SEQ ID NO: 22848
  chr8:142262686-142263287
  hypo

SEQ ID NO: 161079 - DNA, 142 bp, Homo sapiens; identical to SEQ ID NO: 22849
  chr8:142263346-142263488
  hypo

SEQ ID NO: 161080 - DNA, 368 bp, Homo sapiens
  chr8:142264057-142264425
  hypo
tcactgcgcacagacggggaggagacttaccaatctgcaacagtattggtgtgaccagagcggtttccatggcgtaacagaactccctgccaaacatcaccgccccgtgcatcacccacaggcgcatggggattcggtctatggacccctcgctgatggtctcgcagttctcggcctctgcgcctccggctttctgcgggtccggcaggggcacggataactcttgaacttgcatagattccgggtcggcattctgcggagccattttcattaccaccaaaaatatatgtatttatctatatattctatctatataaataatgctttcatatatctgtaatgataaattaagacgtcttctctttctg

SEQ ID NO: 161081 - DNA, 310 bp, Homo sapiens
  chr8:142277202-142277512
  hypo
ggccaaatctgtgtgcgcatatagcaagtgctgcattcaccacaagccaggagacttccgtgacacttccactgccttccttggactctggccttcccttggcctcagcagcttcactgctgtccttcaggaatgataccggggcagcagctctgggaagccggcagaccacctgctgccgtgtcccgtggggcctgcgtggctacacagtgcaatagtccaggctcctgcactggagtggagacgctgagggatggaggcaggctcaccagcgagcgtacggctgtgcacatgcgtgcctgcagagttc

SEQ ID NO: 161082 - DNA, 321 bp, Homo sapiens; identical to SEQ ID NO: 76863
  chr8:142277816-142278137
  hypo

SEQ ID NO: 161083 - DNA, 118 bp, Homo sapiens
  chr8:142278839-142278957
  hypo
aggggcatccatgctgactgccgcgtacttggggaagctttctgtgccacctgcttacacctgaacaaagtgtcctatcgtggaggcgcccatctccgggtgtgctatgcatcacctg

SEQ ID NO: 161084 - DNA, 268 bp, Homo sapiens; identical to SEQ ID NO: 76865
  chr8:142279181-142279449
  hypo

SEQ ID NO: 161085 - DNA, 156 bp, Homo sapiens; identical to SEQ ID NO: 22853
  chr8:142280195-142280351
  hypo

SEQ ID NO: 161086 - DNA, 30 bp, Homo sapiens; identical to SEQ ID NO: 76867
  chr8:142283490-142283520
  hypo

SEQ ID NO: 161087 - DNA, 201 bp, Homo sapiens
  chr8:142283870-142284071
  hypo
gtgaacgtcgtgctacgaaagtgaaaaatggaaatggctaactgtccaatgatacggagctctttcagttatggtgtgcactcaggacacacgatgtccgtgtgtttgaagggaagtatgacggatatttcagcaatgttaatgtcaaagcttgtctttaaaaaacgtaaagtttgggccaggcgtggtggctcacgcctg

SEQ ID NO: 161088 - DNA, 337 bp, Homo sapiens; identical to SEQ ID NO: 76869
  chr8:142290790-142291127
  hypo

SEQ ID NO: 161089 - DNA, 30 bp, Homo sapiens
  chr8:142291610-142291640
  hypo
atggccttaaagctccgcggcagcacgtgg

SEQ ID NO: 161090 - DNA, 194 bp, Homo sapiens; identical to SEQ ID NO: 76870
  chr8:142292546-142292740
  hypo

SEQ ID NO: 161091 - DNA, 30 bp, Homo sapiens
  chr8:142293008-142293038
  hypo
cacacgatgtcagcgcggcctcgtgcctag

SEQ ID NO: 161092 - DNA, 482 bp, Homo sapiens
  chr8:142294980-142295462
  hypo
cccctgtccctgccacggctgacatttaggagctctgtcccaagcgtccaccgtggcatgcagagccgccccacaccccgactccctggggcctcggccccccagcaaggccggcttgacaggaaccagtagccagcagaggcctgagcagaacagggtccggagctggcagtggggctcggggccactggttcccaagcagacttcccccacctcacaggcagcttctcctctccagcggcccagcgggatccagcacggactgagggcgggtgaaacgccagctcctgccttcagcacgtggtcactgccctgccctgcctgcaacagcagccaccagagagcgtccgctgggaaccacaacgcgcccgcaccccagcggccatcctcgggtcacgcagcctcatggcttccttcactgccgtggctgagattcctcggcctgcgccatgacggggcctcgcctacgttggaagataggt

SEQ ID NO: 161093 - DNA, 112 bp, Homo sapiens; identical to SEQ ID NO: 22856
  chr8:142295925-142296037
  hypo

SEQ ID NO: 161094 - DNA, 185 bp, Homo sapiens; identical to SEQ ID NO: 76872
  chr8:142296403-142296588
  hypo

SEQ ID NO: 161095 - DNA, 189 bp, Homo sapiens; identical to SEQ ID NO: 117254
  chr8:142297568-142297757
  hypo

SEQ ID NO: 161096 - DNA, 30 bp, Homo sapiens; identical to SEQ ID NO: 22857
  chr8:142302375-142302405
  hypo

SEQ ID NO: 161097 - DNA, 32 bp, Homo sapiens; identical to SEQ ID NO: 22858
  chr8:142304054-142304086
  hypo

SEQ ID NO: 161098 - DNA, 145 bp, Homo sapiens; identical to SEQ ID NO: 22859
  chr8:142305924-142306069
  hypo

SEQ ID NO: 161099 - DNA, 30 bp, Homo sapiens
  chr8:142309182-142309212
  hypo
gaccccttctcaggcgcttactgagtgctg

SEQ ID NO: 161100 - DNA, 84 bp, Homo sapiens; identical to SEQ ID NO: 76877
  chr8:142310044-142310128
  hypo

SEQ ID NO: 161101 - DNA, 223 bp, Homo sapiens; identical to SEQ ID NO: 76878
  chr8:142312688-142312911
  hypo

SEQ ID NO: 161102 - DNA, 30 bp, Homo sapiens
  chr8:142314004-142314034
  hypo
tgacttgaaaggttacgcaaatcccttcag

SEQ ID NO: 161103 - DNA, 891 bp, Homo sapiens; identical to SEQ ID NO: 45897
  chr8:142317706-142318597
  hypo

SEQ ID NO: 161104 - DNA, 227 bp, Homo sapiens
  chr8:142332801-142333028
  hypo
gagcagggacttctgcggtcgcagctgggctgggggcccctagccgtggggggtctgggcctttgggataccctccttagtctccagagaacatgggtttgaggacctgggcttgaccctcctgggtctccaggcaaagcctcagccccaccagcttcgagggtgagggcaggtgcacagccaccgtgggaggcaggcatgtccagggagcccggtctgtgactggg

SEQ ID NO: 161105 - DNA, 390 bp, Homo sapiens
  chr8:142349758-142350148
  hypo
gcaggtggtggtggccgcccagccctcacccagccccgagtcctgtgtggaaggcgattcctcccactttaccggggaggacacagaggctgagcgtggtcacggccggagccccagcgcagcatctgagctgcaggctggccgccccccaccccgctgcacccccatattccactcacagaccttcttcctgctgaacacagctgggccctgacgcctctgtgccttggccacaaggcaccttctgctcactcagctgtccctccagtccccgtagggctgcagacccaggcccacccagtcacaggcctggcagcgagggggaacaaaagggtcaaggggccgcccagggctgggaagggccttgctccacctcgctctcctccattc

SEQ ID NO: 161106 - DNA, 185 bp, Homo sapiens; identical to SEQ ID NO: 76881
  chr8:142359674-142359859
  hypo

SEQ ID NO: 161107 - DNA, 993 bp, Homo sapiens
  chr8:142367162-142368155
  hypo
gctgctgagggtcacggccacgtggtagaccacgaggctcgtgtggtgtggcatgtcgggccacagcgccacggccacttggcgggcgtggaagggcgtgaagcagacgagaaagatgatgagcaccgtgagcaggagctgcatggcccgcacgcggcgctggcgaccctggtggagcagacccggccgcgacagtgcacacatgatgcggccggtaaacacgctgatgaccagcaggggcagcaggaactccaggacagtcagcgcaaagacacggcagcagggccggctgcctgtcacgcccagcaccgacagggtgacggcaccggcggccagccacacgaaggcgcacacggccctggcacaggcaggctggcggcagcggcgggagccttcgggccgcacgatggccaggtagcggtccacgcagatgcaggtgaggaagaggatggagcagtgcatgttgaggaagtaaccgaggacgtgcgggaaggcacagcgcaggcagcccctggcgccgtagtacacagcgaagcgcgtgggcagggacagccctaccagtagatcggtcaccaccaggttgatggtgtagatgactgagggtgtcttggcccgggtgcggcagcagaagacgtacagcgccagcccgttgagcaccagccctgccaggaagatggctccgtgcaccgccatcagcgccagccacaggcctgggaaggtgccatgcagctcctcgtccagccgggcaaacaggtggaacaggggcacctccagcccgctggcattggtccgcactgttgtcactgcggtggcattggggactgccccggccgagggccccgctggagacacagagggcatgacggcagccagcacaccccaggcctggaagcaaggagaccaggtcaccccaggcgccagcctggccttaagccctgccctgaggcccagaactcagctggcccgtctgcccctgcacgcccagcatccccc

SEQ ID NO: 161108 - DNA, 189 bp, Homo sapiens; identical to SEQ ID NO: 22864
  chr8:142374614-142374803
  hypo

SEQ ID NO: 161109 - DNA, 205 bp, Homo sapiens; identical to SEQ ID NO: 76884
  chr8:142383100-142383305
  hypo

SEQ ID NO: 161110 - DNA, 30 bp, Homo sapiens; identical to SEQ ID NO: 76885
  chr8:142400678-142400708
  hypo

SEQ ID NO: 161111 - DNA, 234 bp, Homo sapiens; identical to SEQ ID NO: 45898
  chr8:142425566-142425800
  hypo

SEQ ID NO: 161112 - DNA, 595 bp, Homo sapiens; identical to SEQ ID NO: 117258
  chr8:142427478-142428073
  hypo

SEQ ID NO: 161113 - DNA, 299 bp, Homo sapiens
  chr8:142435196-142435495
  hypo
cctatgacaaaacgccgctggagaaggatggcatcaccgttgtggtgaggcgcgcgccacggggaccctagtcactgctgccaccgggggagggtggggcggggggctccgggcctgcgcagagggtttggtgcccctcctgtggcagccctgggcatgtctgtgcctgggccacgtgtgtgtctgggtacatcaagggaaggccagggtgttgggccgtgtgacctcaagaaagtcacccttgcgcacccgtctttctgtctctagggtgggccagcacggttcgccaggcaggggtg

SEQ ID NO: 161114 - DNA, 480 bp, Homo sapiens
  chr8:142435698-142436178
  hypo
ggggcggttctgctgcgatatccttgggggggtgggccacagcagctgcaggcccagagccagccccaggggggtccacccccggcccggtggacgactgcccccctggtgcaggcctgcccagctgcgcctgggcctcagtctcctcagtgcggagcacccctcagtcactgcttttcatcccaggactctgcttttggctggggttgcagttttgtgacctcagcttggcggtttggaatggtggcagcgctggcggtttggggtcagacaggccttgggctgcgtcccgcctctgccctccccagccttgcgaccctgcaggtcactccgagccttgggttcctcacctcaaagcgaggctgcttggaagaatgggaggcaaaggcatgtccccgcttctcgcacggggtgcgcccacaccctccctccccttccacagcagcgggagggattggggtcagacgtaagtagccgtga

SEQ ID NO: 161115 - DNA, 39 bp, Homo sapiens; identical to SEQ ID NO: 76887
  chr8:142437113-142437152
  hypo

SEQ ID NO: 161116 - DNA, 274 bp, Homo sapiens
  chr8:142439112-142439386
  hypo
tgctgtgtggctccccgcacctgaggctgcgctggtcaggacaggttgggccatgctgcggaaacagccaggcctgaaccccaacgactcagaacagcacgggcgtttcttgcccctgttgcgtgtctgttggtgggggccctacccggaggcgtggctgagggctgcgccttccccagtgtgccggctgctgggcgaggaaacgagcacggtggagccacacggggcacctgcagctttgctgggcagagactcctcgcgctactgctgctcc

SEQ ID NO: 161117 - DNA, 81 bp, Homo sapiens; identical to SEQ ID NO: 76889
  chr8:142440391-142440472
  hypo

SEQ ID NO: 161118 - DNA, 30 bp, Homo sapiens
  chr8:142445753-142445783
  hypo
agaccgggtcctgccgcatcgacggcaagt

SEQ ID NO: 161119 - DNA, 152 bp, Homo sapiens
  chr8:142452334-142452486
  hypo
ggacatggagaaacccgcggcactggccctcgcttgtgagtgacggagaaacccgcggcactggccctcgcttgtgagtgacggagaaacccgcggcactggcccttgcttgtgagtgacggagaaacccacggcaccggccctcgcttgtg

SEQ ID NO: 161120 - DNA, 18 bp, Homo sapiens
  chr8:142472927-142472945
  hypo
cctcgttttactgtgcgt

SEQ ID NO: 161121 - DNA, 32 bp, Homo sapiens
  chr8:142493072-142493104
  hypo
acgttctgctggctccgcgtccttgccaatgt

SEQ ID NO: 161122 - DNA, 184 bp, Homo sapiens; identical to SEQ ID NO: 117259
  chr8:142528218-142528402
  hypo

SEQ ID NO: 161123 - DNA, 152 bp, Homo sapiens; identical to SEQ ID NO: 45900
  chr8:142528454-142528606
  hypo

SEQ ID NO: 161124 - DNA, 111 bp, Homo sapiens; identical to SEQ ID NO: 45901
  chr8:142528670-142528781
  hypo

SEQ ID NO: 161125 - DNA, 127 bp, Homo sapiens; identical to SEQ ID NO: 117262
  chr8:142528834-142528961
  hypo

SEQ ID NO: 161126 - DNA, 240 bp, Homo sapiens
  chr8:142537301-142537541
  hypo
ttttcttataatcaaacaccacgtctgtctgtgtctgttgatactgactgcggccacacacgaggcatgggaacaatggctgtgcggagctctgggccctctgtgcttgtgcacatgtttgctggtatccggtgcacgtgcatgcatgcttcgcacatgtgtagatgtgtgcacctgtgcatgcatgcaggtgtgcacatcgtttgctagtgtgtgtagatgtgtcgatggcagtacaca

SEQ ID NO: 161127 - DNA, 39 bp, Homo sapiens; identical to SEQ ID NO: 22869
  chr8:142541545-142541584
  hypo

SEQ ID NO: 161128 - DNA, 149 bp, Homo sapiens; identical to SEQ ID NO: 76896
  chr8:142544217-142544366
  hypo

SEQ ID NO: 161129 - DNA, 97 bp, Homo sapiens
  chr8:142559812-142559909
  hypo
ggggtcgctgggcggcgggcctcttgtctccgcaggcagctcagcccagcccagcagtcagggtcccagcacccgtgtaccccgcagctgccactga

SEQ ID NO: 161130 - DNA, 174 bp, Homo sapiens
  chr8:142560197-142560371
  hypo
cccagggctccacgtcgtctctcctgcatgtgctcagtgctgggtgggccactcccagctggaacccatgtcctgagccacccttcacagtcaggcccgtcagctccccacgggcccagagctgggcctgtatctgccaagcacggtgatccagtgggtcggggtggacatcag

SEQ ID NO: 161131 - DNA, 30 bp, Homo sapiens
  chr8:142563285-142563315
  hypo
gccctgcccacaggccgagggtggacctgg

SEQ ID NO: 161132 - DNA, 30 bp, Homo sapiens
  chr8:142566709-142566739
  hypo
agggccccctctctccgaggctcccaggga

SEQ ID NO: 161133 - DNA, 30 bp, Homo sapiens
  chr8:142583074-142583104
  hypo
ggtggcggggggggacggggagggcggagg

SEQ ID NO: 161134 - DNA, 207 bp, Homo sapiens; identical to SEQ ID NO: 76897
  chr8:142590893-142591100
  hypo

SEQ ID NO: 161135 - DNA, 84 bp, Homo sapiens
  chr8:142593601-142593685
  hypo
tggtgaagcatcacccggtaccagccgcctcgctagctcttgccatagcagcagcgtgaacaagcgtcccgccatttagtggct

SEQ ID NO: 161136 - DNA, 30 bp, Homo sapiens
  chr8:142603365-142603395
  hypo
caagatggcgacacccgcgggtgggcataa

SEQ ID NO: 161137 - DNA, 453 bp, Homo sapiens
  chr8:142630169-142630622
  hypo
gccgagggtggtgggcgccccggagcgctggtggggattgggcaaagacgtcaacaccagggctgtggaaggaggcgaggggccttcaggtgccgagggtggtgcgcaccccgggatgctggtggggattgggcaaagacgtcaacaccagggctgtggaaggaggcgagggccttcaggtgccgagggtggtgggcgccccggagcgctggtggggattgggcaaagacgtcaacaccagggctgtggaaggaggcgaggggccttcaggtgccgagggtggtgggcgccccggagcgctggtggggattgggcaaagacgtcaacaccagggctgtggaaggaggcgaggggccttcaggtgccgagggtggtgcgcacccagggatgctggtggggattgggcaaagacgtcaactccagggctgtggaaggaggcgagggccttcaggt

SEQ ID NO: 161138 - DNA, 30 bp, Homo sapiens
  chr8:142723501-142723531
  hypo
actgactcattcatccgtcccgtccctctt

SEQ ID NO: 161139 - DNA, 120 bp, Homo sapiens
  chr8:142734865-142734985
  hypo
actgggatcccggtacgggatcctccctgtcaccctgctcctttgcacccactgatcatcaatggtacctctgttcatctcggggctccgtgctgtaagctcctccgccaccggcagcca

SEQ ID NO: 161140 - DNA, 67 bp, Homo sapiens; identical to SEQ ID NO: 76899
  chr8:142744450-142744517
  hypo

SEQ ID NO: 161141 - DNA, 185 bp, Homo sapiens; identical to SEQ ID NO: 76900
  chr8:142863057-142863242
  hypo

SEQ ID NO: 161142 - DNA, 369 bp, Homo sapiens
  chr8:142880970-142881339
  hypo
acagaggaggacctgcggccacccctccttgcctggccatcctccttgccatgtcacccctcaacgccaacccgtgcatgtgggggtgcatgaccagctgacatgggagtgtgggtcagccccagggccaagggggaagtgggtgagccaagatcccggagcatgacaagggccctggcagctgattggcaggggagtgcgctgggcaggccgtggttctcactcttcactgcggctggagggtctgggtgggaaggtgggtacagggagcaggcatgtcggactatgaatgcggagtgggaaacacagaacgactcgttgtggggagactagggatggacggggtccgctggtggagggctggaccag

SEQ ID NO: 161143 - DNA, 208 bp, Homo sapiens; identical to SEQ ID NO: 76902
  chr8:142898502-142898710
  hypo

SEQ ID NO: 161144 - DNA, 30 bp, Homo sapiens
  chr8:142944433-142944463
  hypo
agcagggcccgaagtcgcagctgctggctt

SEQ ID NO: 161145 - DNA, 195 bp, Homo sapiens
  chr8:142984444-142984639
  hypo
gcaggtccgctctatcgcaggccgggcacgctttgctcagaggcccacactgcagaagtccagtctcagcagactgtcaccaccgcccatcgccaccctgggagagtgaaggccgtcgtaggcaggagacaaactgctggatgagctgagtgccagagaaccttgatgcgcaaacaaaggcgcggctgggtctgg

SEQ ID NO: 161146 - DNA, 264 bp, Homo sapiens
  chr8:143022235-143022499
  hypo
caaccctggaatagacgtcgaagcagatggcaggagagagcccggagcagccagcgagagcctggcttggcccgaatccatctgtcctgcttcaagcatcttgcccgctggccacacattcatagtttcagccacatcagcattttgcaaaatgccagctccaagcaggggaccctcgagggctgtcgtggctgccaactgttggattttgacacatttcgtccagtgtgggcacaccggagcttcgtccgcacgcagaggatg

SEQ ID NO: 161147 - DNA, 262 bp, Homo sapiens
  chr8:143026584-143026846
  hypo
atttgctgcgtggcccgtggcacgtcctgcgtacaatctctgggcctacagatttcccgcaagtacagtaagggcgttgaacccaatgacctccaaaggcccttcccaaatctgtgacatttcatgagtctataatttatgagtgcctctgaggaggagtcctagcacggcaagggtgagaaaacctgccgtggtgagcagaggtgagcagcgactgggggcttggatacagattcagggaagggcacgtgcatgtgtgttc

SEQ ID NO: 161148 - DNA, 327 bp, Homo sapiens; identical to SEQ ID NO: 22872
  chr8:143054763-143055090
  hypo

SEQ ID NO: 161149 - DNA, 410 bp, Homo sapiens
  chr8:143088310-143088720
  hypo
ctggcgagctgtctccgtgcagtaatgaggacggtgaaaccactcatgaacagggatgctatcacaacagaatctgtcatgacaggcccttggagacagtgtgccgattaacaggaggggagtggggaagaagtcaggccatccacagaggactgtaagctactgaatgagaaaggccgctgcccaccgcagcgtgtacgccgttttctacatttacggagagactcaggtgtgtgcacactgtgtgtccagaagggctgagggctacagagcagcctggaagaagcacatcgaaatgagcagagcccacacccatcctcccggggaccatggactgccaccacctccctgcggacagccctgggatgcagaccccagccaccaggccggctgcacggaccgcagggtgc

SEQ ID NO: 161150 - DNA, 330 bp, Homo sapiens; identical to SEQ ID NO: 76906
  chr8:143089003-143089333
  hypo

SEQ ID NO: 161151 - DNA, 126 bp, Homo sapiens; identical to SEQ ID NO: 76907
  chr8:143090351-143090477
  hypo

SEQ ID NO: 161152 - DNA, 564 bp, Homo sapiens
  chr8:143152591-143153155
  hypo
tgaagcacagagaagctcacccggctgacggagggcgaatcggggcggccaggctggaaagccgttaggtgacggggaatgcgttgaagaggtgcatctccccccccgaccccgggttaattctacctcggccagatgcctagagaaggtcaccgcagagtccacaatgacacacaacggcatcgatggaagcttaggtagcaaaactacgtatcagcaaaaaatggaaacccccagcatagccggcagtaggagagcgtggactagtcgaggtggggtggccacgtgttcgcgcagcggcccggggtccagcggctctgctgagggaagagcctcagattcaacagggaaaaaccggaacgcttcatgttgaaggggtaggctgaacacggcatgatgctgctcatctgaaacttaagataattgggaagctgcaaaacaatattacatggaaatatgattgggagctctatgcaatgtgcattataggaagctgagacgtacccggaggcgacaccacattctctgcgcagagaggggccacgggagcggaagggtgccggg

SEQ ID NO: 161153 - DNA, 30 bp, Homo sapiens; identical to SEQ ID NO: 76909
  chr8:143162511-143162541
  hypo

SEQ ID NO: 161154 - DNA, 442 bp, Homo sapiens
  chr8:143171101-143171543
  hypo
caggcccacaagcacaggcctcgggccagatcacacgacacccactcggaaactggagtcaacagagagccgcagctgctcgtaccgggcaagtctctgcggggtgggaccctgtcccaggacgcaggattggcgctgagctcgggatctctgtgtgcacctgcatcgctggtaggaggacgcccaggaaccaaggagtgaggcaggagcagcccccggcatcatcactcccagtgacccaggaagggatttgtgcttttttccctgcggctctgggcactgcagagttagaggtcctggtccccggggatggagggagggggtatatcagcgggcacagagcatgtccagtgacgcacaaaccacggctgccctctggtgcgtcgggttccttgtggggggatcaccaggcaggagagagcaccaccgtcctggcaggtac

SEQ ID NO: 161155 - DNA, 30 bp, Homo sapiens
  chr8:143179890-143179920
  hypo
caccgcggccctgcccgctgcccacactcc

SEQ ID NO: 161156 - DNA, 30 bp, Homo sapiens; identical to SEQ ID NO: 76911
  chr8:143181313-143181343
  hypo

SEQ ID NO: 161157 - DNA, 30 bp, Homo sapiens; identical to SEQ ID NO: 76912
  chr8:143181646-143181676
  hypo

SEQ ID NO: 161158 - DNA, 30 bp, Homo sapiens
  chr8:143182646-143182676
  hypo
aagcacgaatattaacgccattaatattcg

SEQ ID NO: 161159 - DNA, 30 bp, Homo sapiens
  chr8:143198997-143199027
  hypo
ccctctgctccagagcgcagcagcactcgc

SEQ ID NO: 161160 - DNA, 266 bp, Homo sapiens; identical to SEQ ID NO: 76913
  chr8:143204857-143205123
  hypo

SEQ ID NO: 161161 - DNA, 152 bp, Homo sapiens
  chr8:143209713-143209865
  hypo
gcagcaaacagtgtgcgctgagaccctgggctgtccccgctgtggagcccacgtgcaatcgatttgagcagggccacgaggcaggcagagagggctggacatgcagaggccacagaagctgggtggcgtctatggctcgaggcggtgctgcc

SEQ ID NO: 161162 - DNA, 283 bp, Homo sapiens; identical to SEQ ID NO: 22878
  chr8:143234554-143234837
  hypo

SEQ ID NO: 161163 - DNA, 30 bp, Homo sapiens; identical to SEQ ID NO: 76915
  chr8:143250090-143250120
  hypo

SEQ ID NO: 161164 - DNA, 30 bp, Homo sapiens; identical to SEQ ID NO: 76916
  chr8:143250362-143250392
  hypo

SEQ ID NO: 161165 - DNA, 30 bp, Homo sapiens
  chr8:143262083-143262113
  hypo
cacacaccggctcatcgagattcacggctc

SEQ ID NO: 161166 - DNA, 30 bp, Homo sapiens
  chr8:143262491-143262521
  hypo
ctcaaggccactctgcgtagtagggcgctg

SEQ ID NO: 161167 - DNA, 214 bp, Homo sapiens; identical to SEQ ID NO: 76917
  chr8:143269915-143270129
  hypo

SEQ ID NO: 161168 - DNA, 30 bp, Homo sapiens
  chr8:143270627-143270657
  hypo
gagaggtcaggcacccgacagactccgaga

SEQ ID NO: 161169 - DNA, 244 bp, Homo sapiens
  chr8:143319107-143319351
  hypo
ggccccgggtggatgcggagggagggcccatgagctggatctctcctggacctctctctcccgaaccatgcttgcagtggctgctcgtgagtcctgtccaccagccccgcagggtggcttacagctttttaatgcgtctgacttagagaagcgtcgggttgggggaaggcaagtctaccagagacaaggatctcctgtacctcccgtttccctgctggcccacgccacccgcctgcccacgcca

SEQ ID NO: 161170 - DNA, 271 bp, Homo sapiens
  chr8:143333257-143333528
  hypo
atgtacctgccgcccgcgttctctgtctgcagggcccgggcaccatgtacccgccgcccatgttctctgtcttcagggcccgggcaccatgtacccgccactcgcgttctctatctgcagggcccgggcaccatgtacccgccgcccacgttctctatctgcagggcccgggcaccatgtacccaccgctcgcgttctctatctgcagggcccgggcaccatgtacccgccgcccgcgttctctgtctgcagggcacgcacgttgagagag

SEQ ID NO: 161171 - DNA, 30 bp, Homo sapiens
  chr8:143333843-143333873
  hypo
ggtcaggggaagaagcggcagccgcctgtg

SEQ ID NO: 161172 - DNA, 203 bp, Homo sapiens
  chr8:143334487-143334690
  hypo
gactgggctctgccacgggtgagagtgcggaggtggacaggctggcgacagcccaggctggcactacgggtacgggaggagggccggtagccgtggagtcacagcagtggtgacggcggtgcctgcagaagcagggccgctgggccacctcccgagcacaagcaacaagcgaggcacaggccagcgtgcgtgccgcgtctgca

SEQ ID NO: 161173 - DNA, 30 bp, Homo sapiens
  chr8:143335125-143335155
  hypo
gctggtcagtgggaacgcgtagccagcctt

SEQ ID NO: 161174 - DNA, 31 bp, Homo sapiens; identical to SEQ ID NO: 76919
  chr8:143353856-143353887
  hypo

SEQ ID NO: 161175 - DNA, 30 bp, Homo sapiens; identical to SEQ ID NO: 76920
  chr8:143356098-143356128
  hypo

SEQ ID NO: 161176 - DNA, 30 bp, Homo sapiens; identical to SEQ ID NO: 76921
  chr8:143360275-143360305
  hypo

SEQ ID NO: 161177 - DNA, 31 bp, Homo sapiens; identical to SEQ ID NO: 76922
  chr8:143360666-143360697
  hypo

SEQ ID NO: 161178 - DNA, 30 bp, Homo sapiens
  chr8:143361143-143361173
  hypo
tcaagcccactcgccggccctgcttgcccc

SEQ ID NO: 161179 - DNA, 30 bp, Homo sapiens; identical to SEQ ID NO: 76923
  chr8:143363090-143363120
  hypo

SEQ ID NO: 161180 - DNA, 31 bp, Homo sapiens; identical to SEQ ID NO: 76924
  chr8:143367814-143367845
  hypo

SEQ ID NO: 161181 - DNA, 132 bp, Homo sapiens
  chr8:143368384-143368516
  hypo
gaaaatgctggaatccgcatccaacccacatttagacagactccaacccaggtcactaccaccatcaacgcggggtggcacccaaggccaccctccaggatgtggaacccaggaccccggccagatctcagg

SEQ ID NO: 161182 - DNA, 335 bp, Homo sapiens
  chr8:143368918-143369253
  hypo
tggaacccaggaccccggccagatctcagggacagtgggccgccctccaggtcgtggaacccaggaccccggccagatctcagggacagtgggctgccctccaggtcgtggaacccaggaccccggccagatctcagggacagtggaacccaggaccccagccagatctcagggacagtgggccgccctccaggtcgtgaaacccaggaccccggccagatctcagggacagtgggccaccctccaggatgtggaacccaggaccccagccagatctcagggacagtgggccgccctccaggtcgtggaacccaggacctcggccagatctcagg

SEQ ID NO: 161183 - DNA, 243 bp, Homo sapiens
  chr8:143372384-143372627
  hypo
gtggactgaagggcacgcgcctgttccctccaacctctcctgcccagggagatgaattgctgctcgccacccgctgctcaggactggtgtcctcagctggggattaagtcactggctcctggggcgctggctctttccatgcctggctctggacctgcgggtggccttggagacaaatcccaccaccctcatctcagaaaggccaagcaaaagtcggctctccagcatcgcggtgaggatggc

SEQ ID NO: 161184 - DNA, 160 bp, Homo sapiens
  chr8:143373003-143373163
  hypo
acgccgttgcctccgcgggcttacgctcgagtggcgagagatgaatcctaacgagaacccaacagtgtgtggggggcgagcgtgggagcggcaggggttagaggacacccctggagtcagggcctgccagtgaaagggagccagcggctcaggcgtcagg

SEQ ID NO: 161185 - DNA, 190 bp, Homo sapiens
  chr8:143374347-143374537
  hypo
tgtcagaccacggctcgcctttcctgccccagaaagctccaggaccccacatgaagaaatcccaggactccggaacctcctaggcttgagtgctttccttcctcaggagtccccaagaaaacgcaaacccctccctcgagcagccgcaccgcaggccatcagcagcatctgctgccgttctcagtggcac

SEQ ID NO: 161186 - DNA, 169 bp, Homo sapiens; identical to SEQ ID NO: 76927
  chr8:143379123-143379292
  hypo

SEQ ID NO: 161187 - DNA, 1205 bp, Homo sapiens
  chr8:143386137-143387342
  hypo
gttgagctgtgcttttcccaacgctgtgagctacggggtagagacgttcctcccaggggggacatggccatacacgcccctggagagcggcatgacggttgagcacagcctcctcctgccagcggtgacaggccctacaacagccccactgactggggtcccgtggcctgggtaaagtcaaagcccccaggtaaacataacaaacttttgaggtaagaggtccccggggcagcccggctggtgtgcccgaggacggagatgtaggagcctgccctcggccctgacagcaaacagccacaggcgagggggctggaggaaatgtgctccctcccacgatgaaatcctccagggcagctaatgcgggcgagtgagatggccaggtggagaaggcaccacaggacgttctgtgcgatgttccctggacttgggggtttcagtgacagctccccaggagctgtgggcagagggtgccaggcacccatggagacctgcctcggatctgtgccttgggattgatgccacctcctgcatgtggagaaggggaagctcaggaggataggggagggcgcaggggtgggaggggggtgcaaacggggttccgtgtggacgcccaggaaagcggccaggctggggtgcgggctgtgtggacacccaggaaggcagtcacactgggatgcgagccgtgtggacacccaggaaggcggcagggctggggtgcgggccagaggagaccccgcaggtgctcggtctccctcacctccacagcgggaggatcgggggcctggtgccgctctccccagcagtgcaggacaaaagccaggggaggaagagatggcttagacgcccgggtccctccgcggcctcctcctgaaaggctcacaaagcgctcctttattctccccacaaaggcccaatttgggtcttgagctccgaggctgggattagggatttgctggcaaggtgctggggcaagcgcagaggggacggccctgtgatagttttccagctcaagaggcagacagacaaaggcggctttctcctccccacagggctcagggcctgggtccctgttccgacacgtagggaagagacatgctctaacgtgagtgctggagacagggcacacacggtttcccgtgggaagagactccgctctgccaggcattcagaaagcagggacccgaggccggcgctcagggctctcc

SEQ ID NO: 161188 - DNA, 30 bp, Homo sapiens; identical to SEQ ID NO: 76929
  chr8:143396984-143397014
  hypo

SEQ ID NO: 161189 - DNA, 163 bp, Homo sapiens; identical to SEQ ID NO: 76930
  chr8:143397306-143397469
  hypo

SEQ ID NO: 161190 - DNA, 43 bp, Homo sapiens
  chr8:143398748-143398791
  hypo
ctgtacgcgtgaagcgggtatggccagcggctcacactgtaca

SEQ ID NO: 161191 - DNA, 31 bp, Homo sapiens; identical to SEQ ID NO: 76932
  chr8:143400345-143400376
  hypo

SEQ ID NO: 161192 - DNA, 30 bp, Homo sapiens; identical to SEQ ID NO: 76933
  chr8:143402269-143402299
  hypo

SEQ ID NO: 161193 - DNA, 207 bp, Homo sapiens
  chr8:143404246-143404453
  hypo
aaaggccagcctggacgtgtccatgggctggatgatattgttatgaaaggccggccttaccgtgtccgtgggttggacaacgatactattatgaaaggccggtctggccgtgtctgtgggctggatgatattgttatgaaaggccggcctggacatgtctgtgggctggatgacaatactgttatgaaaggccggcctggctgcatc

SEQ ID NO: 161194 - DNA, 322 bp, Homo sapiens
  chr8:143405648-143405970
  hypo
aaaggccaggcaggcggctacagggtccaggaaacctgacccaagcatccctctcccagcactcctgtgcgaggtctgcacagctgccagctcggcggctcctgtactaccagccaggtggtgccgttgctgccagcagtcaggtgactgaggagtctgcgaggcctgcctggggggtgtgtcacctgaggcccatttgccctagcgccctgccctagtctgccggggccagaaccgacctgagtacggaggctctcgcatttgcttgtcattacttaagatgccgtttagaagcacctcatgtcccgcgtatctcatacct

SEQ ID NO: 161195 - DNA, 316 bp, Homo sapiens
  chr8:143406188-143406504
  hypo
actcgagtggttaatcggcgctcccgcccctctgtccgtgttcctagtgactgcgacgcccctgccggtccctcggctgagggggctgtgggaagagcctgtggctgggctggtttgatttcctggttcctgccctttcccagtaggtacactgccccgtcctagacctggcaacaccccaggagtgactccatgtagaccacggcccagtttcatgagcaggtgatgcccaagtcaacacaacgcagtggtgttggtgcacagacccagggaccgcccacggtggaggaggtggccagggcgagtgggccggcaa

SEQ ID NO: 161196 - DNA, 308 bp, Homo sapiens
  chr8:143410615-143410923
  hypo
acctaagagctaaggccggcccaggggagagccaaggtgccgggatactcggtcctcagaccaggacagtctcctactccacgctggggtcccctctcctctccgaggcccacagcgggtggtgtcggtcttcagctaaccaggccgggcggcccaggatgcgcacatgagggccagggtccggacgtgcccatcccacctggccctcgtgacctaacccaggagtgggccagtggcactaagatctaagcacagcagcttcactgggaacctgcccaccacactgaagagacgggagagccacagac

SEQ ID NO: 161197 - DNA, 30 bp, Homo sapiens; identical to SEQ ID NO: 76937
  chr8:143412990-143413020
  hypo

SEQ ID NO: 161198 - DNA, 323 bp, Homo sapiens
  chr8:143413396-143413719
  hypo
ggaaggaaggagagacgaaggcagggggtggtccctcagaaaggcagcaccctgagtttccatacaccgcagcagctggcgtgtgtgcccggaagctacgagcacctgcacgtggaggctcagagcagcatcactaagagtcaaagcacagccccgctgatgaagcaacagaaacaaggtccagctctgcaccggcagctcagcattggaaacagaaacactggtttccgcacaatgcaggtgagccctgagcacagcacgcacagagatgaaagccagcaggaaaaggccacacgccgcacggttccacacatctaccatgt

SEQ ID NO: 161199 - DNA, 43 bp, Homo sapiens; identical to SEQ ID NO: 76939
  chr8:143414783-143414826
  hypo

SEQ ID NO: 161200 - DNA, 36 bp, Homo sapiens; identical to SEQ ID NO: 22886
  chr8:143415310-143415346
  hypo

SEQ ID NO: 161201 - DNA, 30 bp, Homo sapiens
  chr8:143420680-143420710
  hypo
ctacgtgatgtgtgacggctcttgttacac

SEQ ID NO: 161202 - DNA, 46 bp, Homo sapiens
  chr8:143421173-143421219
  hypo
gccagcggagagcagcggccctgccgtacagcgccctcctcctctg

SEQ ID NO: 161203 - DNA, 30 bp, Homo sapiens
  chr8:143423965-143423995
  hypo
agatctcctatagcacggcctcgttcaaca

SEQ ID NO: 161204 - DNA, 222 bp, Homo sapiens
  chr8:143424644-143424866
  hypo
tgtttcaaaccacggcgctgaaacccaggtcagaaaaccagtttagtaagttgcaatcagctttttctttcatgagtagcacaagacgcagcaggaggaacatgagcacgcgtggccatggggagcgtcggcacggctagaaatgcctgattctcggtgtgtgtgtctaccccaggcagcaacggcaaatgcccttctcgccacggccgtggtcccagtgtg

SEQ ID NO: 161205 - DNA, 31 bp, Homo sapiens; identical to SEQ ID NO: 76942
  chr8:143425489-143425520
  hypo

SEQ ID NO: 161206 - DNA, 30 bp, Homo sapiens; identical to SEQ ID NO: 76943
  chr8:143427446-143427476
  hypo

SEQ ID NO: 161207 - DNA, 42 bp, Homo sapiens; identical to SEQ ID NO: 45904
  chr8:143429132-143429174
  hypo

SEQ ID NO: 161208 - DNA, 465 bp, Homo sapiens
  chr8:143436825-143437290
  hypo
ccttggggcaccggccgtccctggaatggggagctgggcatcccgcccaaacctctcctcccgtgggctgcagctccagggactcagagcaaatgaccagaggataacgggagctctcctgcccagacactgccagagcgtcctccctgtgtgcaggggtccctgtgcgggcagcttctgactggcctacaccctaatgctatcactacggaacctgctggccaggccacaccttaagttctaaacacctcagggcaagggctccacccgcccacacaaacacctgaagtgcgaaggcaggtttcagagcaaagtgagcctcacgccagctgagtacagacccaagtccctagggccggggaaggcggtgtgaccccacgttccctctgagcaagacacccgcctgtgccatccagccctgcccagagcagggcagcaccaggacaccatcgacccagtgggccc

SEQ ID NO: 161209 - DNA, 30 bp, Homo sapiens; identical to SEQ ID NO: 22889
  chr8:143442749-143442779
  hypo

SEQ ID NO: 161210 - DNA, 121 bp, Homo sapiens
  chr8:143455671-143455792
  hypo
acaaaagaaaaagaaaaaaaaaaagacttcagttcactcactggggacttggcttccaggcaaatcactttagaagtgggaaatgcggctgggtgcggtggctcacgcctgtaatcccagc

SEQ ID NO: 161211 - DNA, 33 bp, Homo sapiens
  chr8:143462128-143462161
  hypo
accagggacggcccacggcggatgccaccgaca

SEQ ID NO: 161212 - DNA, 914 bp, Homo sapiens
  chr8:143463001-143463915
  hypo
caggggagccacacacctaaacgaggaggagccacgtggggcaaaccacagagtcttccagtttccttcagtgggagtgtcagccccaggctgtaagcaagtccccaaccccagatgacctgggcaagcatcgtcacctccccgcagctcggcgtcctgggccagcccctaatggagcagaagacaagccctgcctgccttggcattgggaacaggcagcgcccgcgggtgccgcagctcatcctgcgtgtgggagacactgagtcacagccacggctcatgcccgcacccactctcagacgctgcccagtcctcccctcggtgagcaggccgccacctcctcctctgacgggtacctgacaccccccctacacacaggccagatgctcggtggaggaggcctggccgttcccaggcccacgcgcccctgccagcatcagccctgtgcagcctccgtgtggaatggggcccctgcgcatgggcatccgagtggcatgtgtgagcgtgtgtgctcatgtgtgcgacagagagccagaggaggaggagggcccagctggggagctgcagttacatgaatcagtgttgttatagcaacttcaactccacgtcaagcagaatgccagccgggcacccccaggcacctcgtagaccacgcccagaatcagcggtggagaagcaccgatcgctaacggcacaaatgggcggtcagaacaccagcaacacacatcctctttctccctcccaacctccatcattccccgggaggccggcctctgcccactgaccagctgccggcactgcccgccagtcccttctgctcgggatggcagcaacaaacagcaagatgccagcgcctgagtcatgcgggcagggggcagggagcacccctgcacgcagctgcacacagcccaaga

SEQ ID NO: 161213 - DNA, 181 bp, Homo sapiens; identical to SEQ ID NO: 22891
  chr8:143505867-143506048
  hypo

SEQ ID NO: 161214 - DNA, 30 bp, Homo sapiens; identical to SEQ ID NO: 76948
  chr8:143506693-143506723
  hypo

SEQ ID NO: 161215 - DNA, 30 bp, Homo sapiens; identical to SEQ ID NO: 76949
  chr8:143507454-143507484
  hypo

SEQ ID NO: 161216 - DNA, 30 bp, Homo sapiens
  chr8:143508641-143508671
  hypo
gttcgtgacccacatcgcctgcctgacaca

SEQ ID NO: 161217 - DNA, 565 bp, Homo sapiens
  chr8:143509041-143509606
  hypo
cctcggttcttcccacgtgggatattctggctgtacgcgcgtgaccgtgactgtggggactggcccagggcttgactgtggggactggcccagggcttttcagggttggagctgggattggagcccgccctgcctcggggaagatcctcgctccctttctccacggcacctctgtgattctcgtcacctgccaacaccagcaccagggctgcccctcctgacggccccctcgccgtctttctgggcacactccatcggcacagcgtcttcactgtcctcctgacaaacctcgtgccacccccatcagcttcagcaccacctccacagcagccgtggccagcaccgacgtccttttccgtcaccgtcaagcctcaaaactgggaccgtgggtaatggcgtcaccccatccgccgtctctctctagctgccaacggcgccttcaccagacacgcccggcaccaccttccaggtcagcagtcccagccctgcgtatcggaggcctgctctcccacagcgtccacagtcactgggccaggctcgcacctgtgaggggccaggacccata

SEQ ID NO: 161218 - DNA, 22 bp, Homo sapiens
  chr8:143509628-143509650
  hypo
cggccaccctctgggtcctcct

SEQ ID NO: 161219 - DNA, 1844 bp, Homo sapiens; identical to SEQ ID NO: 117267
  chr8:143530665-143532509
  hypo

SEQ ID NO: 161220 - DNA, 1099 bp, Homo sapiens; identical to SEQ ID NO: 6630
  chr8:143532541-143533640
  hypo

SEQ ID NO: 161221 - DNA, 1049 bp, Homo sapiens; identical to SEQ ID NO: 45910
  chr8:143533708-143534757
  hypo

SEQ ID NO: 161222 - DNA, 279 bp, Homo sapiens
  chr8:143535498-143535777
  hypo
ccaggtcatagggcgcgtcaggaggctgagtgcacagcctgttgagtgccgctgccacgcccacagctgcactgcacaagacgcaggccacattcatcacagtgggcgggcggcagccagccccgacgccacccaaaaccaacacacaccccggtgtgaggtgcaggcagacacccagagcaggcacgcgtgtccccacaaaggcaagaaacacggaacaccagggtgccacggcccgaaaacctgtgtcccattgtgggctcacgaggacatgggtca

SEQ ID NO: 161223 - DNA, 44 bp, Homo sapiens
  chr8:143550865-143550909
  hypo
atgtgtgtgtatgcacgtgcatgtgtgaatgtgagtgtatgcac

SEQ ID NO: 161224 - DNA, 103 bp, Homo sapiens
  chr8:143550968-143551071
  hypo
tgtgtgtgtatgcacgtgcatgtgtgtatgtgcacgtgcgtgtgaacgcaagtgcgtgtgtgtgcacgtgaatgtgtgtgaatgtgtgcgtgcctgtgtgtga

SEQ ID NO: 161225 - DNA, 30 bp, Homo sapiens; identical to SEQ ID NO: 45911
  chr8:143556218-143556248
  hypo

SEQ ID NO: 161226 - DNA, 296 bp, Homo sapiens; identical to SEQ ID NO: 117271
  chr8:143556722-143557018
  hypo

SEQ ID NO: 161227 - DNA, 30 bp, Homo sapiens; identical to SEQ ID NO: 117272
  chr8:143557294-143557324
  hypo

SEQ ID NO: 161228 - DNA, 244 bp, Homo sapiens; identical to SEQ ID NO: 22899
  chr8:143557843-143558087
  hypo

SEQ ID NO: 161229 - DNA, 323 bp, Homo sapiens; identical to SEQ ID NO: 76959
  chr8:143558402-143558725
  hypo

SEQ ID NO: 161230 - DNA, 30 bp, Homo sapiens
  chr8:143570301-143570331
  hypo
agatgccagtgacagcggggtccaggccag

SEQ ID NO: 161231 - DNA, 335 bp, Homo sapiens
  chr8:143570690-143571025
  hypo
ttgcaggaacacgaccgtcctgaattctaaggtgatctccgtgactgtgaaacccccgcctcgctccctgcgcacacccttggagatcgagtttgcccacatgtataatgtgagtgccgtccacgtgcacactctgatgccagcagaaacgcgtgtgcgcgaattctgtcccactcctcagccactaagcctttggggcctcctcacaacagctttaaccttcgagagctacttttatccctggattacaggtggggaaacaggctcagagaggtgcggtgacttgcccggggtcacacagcaagtgaggtgccgaaaccccatctgtgcctgac

SEQ ID NO: 161232 - DNA, 256 bp, Homo sapiens
  chr8:143582342-143582598
  hypo
gttctgcttgcactgcgccttggacatggtgagcacgggataaacacttgttgtcgaatgctggtgactgttaccaggctagtgtcagttccagggacagtgacggagctggttctgatgaggcgatggcagtgttggagacgagaatgatgatgtgcttatagtggaggtgacgctggtgaccatgggtgaccggtggtcattgtgatgactgtgaagggacagtaaaggtgacggttgtggtgacagtggtggt

SEQ ID NO: 161233 - DNA, 30 bp, Homo sapiens
  chr8:143594392-143594422
  hypo
gctgctgtcggggggcgcttctagtgttag

SEQ ID NO: 161234 - DNA, 30 bp, Homo sapiens
  chr8:143595222-143595252
  hypo
gagagactggtggcccgcaaggcctggggg

SEQ ID NO: 161235 - DNA, 161 bp, Homo sapiens
  chr8:143595637-143595798
  hypo
ggcagggtggtagagcgaggggaggtgagacccacgagtcctcctctagagctggcctggagccagggtgtcggcgcagatgcgggctgcgcagatgccggctctgcggctgcagcaggcctacgacggccggaaggttgagtaaccgctctgagtcacac

SEQ ID NO: 161236 - DNA, 30 bp, Homo sapiens
  chr8:143599082-143599112
  hypo
tgcccccggatttctcgaagcctgggccca

SEQ ID NO: 161237 - DNA, 179 bp, Homo sapiens
  chr8:143599429-143599608
  hypo
agtcttcgggtctgccgagtgggcgagtggggtgcctcactccctgcggtctcttcccggtccccacagaacatggagaaggcgactctgccgtcggtgacgctcatcgtgggctgtggcgtgtcctctctcaccctgctcatgctggtcatcatctacgtgtccgtgtggaggtgggt

SEQ ID NO: 161238 - DNA, 191 bp, Homo sapiens
  chr8:143609364-143609555
  hypo
acacagcccaggagcgcacccagactcgcctgtgtggccgtgtaggtctcgccgcccacgtagacgggatggaggttggggtggaggggcacccagtacaccggtctatgtgtgcacgcacacccacacgcatgggcacacacacgtgggcatacacatgccacgaggacctgcacgaggtccctgcccag

SEQ ID NO: 161239 - DNA, 314 bp, Homo sapiens
  chr8:143614681-143614995
  hypo
tgctgccgctgctggcgctgacctggatgtcggctgtgctcgccgtcaccgaccgccgctccgccctcttccagatcctcttcgctgtcttcgactcgctggagggcttcgtcatcgtcatggtgcactgtatcctccgtagagaggtgggtgaggcagcctctgtcgggccgggctcctgcggggtcctggggctgccgagtggcctcctccttccccgaggacctcggcagggagattgtgggtaggcgcagcatccatgaccctgacacatctgcaggcctcggtggtccacagagcggggcctgcaggtg

SEQ ID NO: 161240 - DNA, 30 bp, Homo sapiens
  chr8:143617237-143617267
  hypo
tccttagctggtgtccgggggtcagaggcc

SEQ ID NO: 161241 - DNA, 179 bp, Homo sapiens; identical to SEQ ID NO: 22903
  chr8:143623480-143623659
  hypo

SEQ ID NO: 161242 - DNA, 313 bp, Homo sapiens; identical to SEQ ID NO: 76966
  chr8:143660375-143660688
  hypo

SEQ ID NO: 161243 - DNA, 280 bp, Homo sapiens
  chr8:143662795-143663075
  hypo
gtctgcccgtccacccgcaaacagcagaagctttgctagggagactgatcagccccagccgtgggtgaccgccccgtctgcccgtccgtgagtgaccgccccgtctgcccgtccgtgggtgaccgccccgtctgcccgtccgtgggtgaccgccccgtctgcccatccaccccaaaacagaaattgcttgctaggctcctagacgtcatccgaccaaggagaagggaccaggcggcaggcaggggagcgcctcgaccgcgttactctcccttgatggcag

SEQ ID NO: 161244 - DNA, 30 bp, Homo sapiens
  chr8:143663860-143663890
  hypo
gaaccagtccagaggcgggggatgcggctg

SEQ ID NO: 161245 - DNA, 175 bp, Homo sapiens
  chr8:143667141-143667316
  hypo
gcaccttcccgagcccgaggtggccaagccttgcgtgtgactgtgaaccagtgcctgccgcaggccccgccctcaacctcgtcctccatcgcgtgctgtggggcctggggagatgactgaatggctaggtgcctcagtttccccacctgtaaaccagtgtcggctgcacgtggtt

SEQ ID NO: 161246 - DNA, 161 bp, Homo sapiens; identical to SEQ ID NO: 76968
  chr8:143699027-143699188
  hypo

SEQ ID NO: 161247 - DNA, 30 bp, Homo sapiens; identical to SEQ ID NO: 45920
  chr8:143761915-143761945
  hypo

SEQ ID NO: 161248 - DNA, 17 bp, Homo sapiens
  chr8:143819453-143819470
  hypo
cacgtgcacgcaggcaa

SEQ ID NO: 161249 - DNA, 30 bp, Homo sapiens; identical to SEQ ID NO: 76971
  chr8:143823719-143823749
  hypo

SEQ ID NO: 161250 - DNA, 30 bp, Homo sapiens
  chr8:143833859-143833889
  hypo
tcccccgcatggtcccggcccactcctctg

SEQ ID NO: 161251 - DNA, 267 bp, Homo sapiens
  chr8:143843319-143843586
  hypo
gtgcgtccacaccttcgtcacagcctgtgtcataaatgggtaaacgcggctcagtgtgtccctgagttctatgagccgctccagcaagtcatcaaacccgaggagggggttgtgggaaccctgattcatggcaggttggtcagaagcacgggccacacctggggcttgcgactggcattggaagtggggctcactgcgtggcactgagccctccacctgcgggatctgacgtgaccgccacaggaatggtgtcggaattgaattgag

SEQ ID NO: 161252 - DNA, 31 bp, Homo sapiens; identical to SEQ ID NO: 22908
  chr8:143846050-143846081
  hypo

SEQ ID NO: 161253 - DNA, 30 bp, Homo sapiens
  chr8:143852606-143852636
  hypo
gaagcgcagacaatgcgaatctgttgattt

SEQ ID NO: 161254 - DNA, 31 bp, Homo sapiens; identical to SEQ ID NO: 76974
  chr8:143856622-143856653
  hypo

SEQ ID NO: 161255 - DNA, 689 bp, Homo sapiens
  chr8:143868760-143869449
  hypo
accagccctgcctcccgccctccagggccccagaagccctccccgtgggattccttcccccactctccaggcccctcctgctacgttgggggcagcgccatcccggccactttgtaactattgctctaggtgtcccggctccagtctccccaaaatcgtgaactctttggggctgggccccagcacccagggcctcaaagcaggttcttggtctgctgcccgttgagtggaggccagtccccgccttcaccctctttatactcacaggagggactttctttccctggagacggggtctctgagcacccaccgcctcgcgcaggagcccacctcttggggcccccatccacctgctcagcccagcacgctctgccgctcgcctgtgctgggcagcacccacctgagtggtgtggaggggcccacagacttgctttgcccctgccctggctaggctgaaggtgagtgggagccggggcacagatggaggtcagccctgggcccagcctcctgccgccgctgccacgtggctgatgaacagacaacaacaggcccagggcagggcagggccggttccgaggagggtggtcctgggctgggctgaggcttttgggagcaccgtgggtactggggccagtcaggcctgggcttgagacagaccctctggcccttcctcccggcatctctccctt

SEQ ID NO: 161256 - DNA, 72 bp, Homo sapiens
  chr8:143879111-143879183
  hypo
cctgcggctgcactgcggttgcactggctaccctggcagcaggacacagagagggcgcggctgtcggaggac

SEQ ID NO: 161257 - DNA, 30 bp, Homo sapiens; identical to SEQ ID NO: 76975
  chr8:143887633-143887663
  hypo

SEQ ID NO: 161258 - DNA, 31 bp, Homo sapiens; identical to SEQ ID NO: 76976
  chr8:143909261-143909292
  hypo

SEQ ID NO: 161259 - DNA, 97 bp, Homo sapiens
  chr8:143916191-143916288
  hypo
aaagttccagaaagcgggtggggaggtcggcgcgggaggctcagatggctggaggcggcgggcacgcacactgcggggctccgaggggcacaggtca

SEQ ID NO: 161260 - DNA, 30 bp, Homo sapiens
  chr8:143956501-143956531
  hypo
atagcgctcaggcctcgggaacaaggcggg
